United States Patent Application Publication US 2006/0003322 A1 - sequence listing, part 23

SEQ ID NO: 969962 - RNA, 19 nt, Human
acugcagcauauuagacua

SEQ ID NO: 969963 - RNA, 24 nt, Human
acugcagcauauuagacuacauga

SEQ ID NO: 969964 - RNA, 22 nt, Human
agacaaauggugaaauuuaagg

SEQ ID NO: 969965 - RNA, 23 nt, Human
agcucuccucuaacaaaagaaaa

SEQ ID NO: 969966 - RNA, 22 nt, Human
aggaaauuaaagcucuaagaac

SEQ ID NO: 969967 - RNA, 18 nt, Human
aguaguuccuguucaugu

SEQ ID NO: 969968 - RNA, 24 nt, Human
auaaccuuuaaaaugaaagacaaa

SEQ ID NO: 969969 - RNA, 28 nt, Human
auaccagagacuuccuccaaccggaggg

SEQ ID NO: 969970 - RNA, 24 nt, Human
auauucacagcaaaacagaccaau

SEQ ID NO: 969971 - RNA, 23 nt, Human
auuaccauccgccauuggaauaa

SEQ ID NO: 969972 - RNA, 23 nt, Human
caaaacagaccaaugucaagaac

SEQ ID NO: 969973 - RNA, 22 nt, Human
caaacagcauauucuauacuga

SEQ ID NO: 969974 - RNA, 23 nt, Human
caagaccacuacacaguuuuugu

SEQ ID NO: 969975 - RNA, 22 nt, Human
caagauaucagagcagaaaaaa

SEQ ID NO: 969976 - RNA, 24 nt, Human
caaggaaaaauugcaggaaauuaa

SEQ ID NO: 969977 - RNA, 23 nt, Human
caaguccccaggacaguagaucc

SEQ ID NO: 969978 - RNA, 21 nt, Human
caauagaaauaaaacaacaca

SEQ ID NO: 969979 - RNA, 19 nt, Human
cacucuauuagguccuuaa

SEQ ID NO: 969980 - RNA, 21 nt, Human
cacuucagaucaugugagcac

SEQ ID NO: 969981 - RNA, 20 nt, Human
cagcaaaacagaccaauguc

SEQ ID NO: 969982 - RNA, 20 nt, Human
cagcacaauagaaauaaaac

SEQ ID NO: 969983 - RNA, 20 nt, Human
cagcaucaagaccacuacac

SEQ ID NO: 969984 - RNA, 24 nt, Human
caguuguaaaacuaaaccauaagc

SEQ ID NO: 969985 - RNA, 26 nt, Human
cauugaaaaauauaaaaaaauaacug

SEQ ID NO: 969986 - RNA, 23 nt, Human
cauuguagccuugguguguggaa

SEQ ID NO: 969987 - RNA, 20 nt, Human
ccaaauuaccuaugacaaaa

SEQ ID NO: 969988 - RNA, 19 nt, Human
ccagugaccaaugaauuag

SEQ ID NO: 969989 - RNA, 20 nt, Human
ccuuuaaaaugaaagacaaa

SEQ ID NO: 969990 - RNA, 19 nt, Human
cuaaaccauaagcccagca

SEQ ID NO: 969991 - RNA, 20 nt, Human
cuaacaaaaaugagaaaaaa

SEQ ID NO: 969992 - RNA, 22 nt, Human
cucaaggaaaaauugcaggaaa

SEQ ID NO: 969993 - RNA, 24 nt, Human
cucaaggaaaaauugcaggaaauu

SEQ ID NO: 969994 - RNA, 21 nt, Human
cuccaacaaagcuucagugga

SEQ ID NO: 969995 - RNA, 21 nt, Human
cuccauaccagagacuuccuc

SEQ ID NO: 969996 - RNA, 23 nt, Human
cucuaacaaaagaaaaaaaaauc

SEQ ID NO: 969997 - RNA, 20 nt, Human
cuucuacuauaaacacugaa

SEQ ID NO: 969998 - RNA, 25 nt, Human
cuucuuguagaaguaaacuucucua

SEQ ID NO: 969999 - RNA, 23 nt, Human
gcaaaaugccagcauauggccuc

SEQ ID NO: 970000 - RNA, 23 nt, Human
ggcaaaacaauucaaaacucaag

SEQ ID NO: 970001 - RNA, 22 nt, Human
ggcacauuugcuaaguuguuuu

SEQ ID NO: 970002 - RNA, 18 nt, Human
ggucuuggaaaaguaaug

SEQ ID NO: 970003 - RNA, 20 nt, Human
gucauauauaaaaauaaggu

SEQ ID NO: 970004 - RNA, 20 nt, Human
uaaaaauaagguaaucucau

SEQ ID NO: 970005 - RNA, 24 nt, Human
uaaaacaaaggucuucauaaggua

SEQ ID NO: 970006 - RNA, 24 nt, Human
uaaacaagaaaaaaaaucauugca

SEQ ID NO: 970007 - RNA, 21 nt, Human
uaaagagacugaggcuaccag

SEQ ID NO: 970008 - RNA, 22 nt, Human
uaaagagacugaggcuaccaua

SEQ ID NO: 970009 - RNA, 23 nt, Human
uaaagagacugaggcuaccauag

SEQ ID NO: 970010 - RNA, 25 nt, Human
uaaauugguuguuacaugcugauca

SEQ ID NO: 970011 - RNA, 20 nt, Human
uaacaaaaaugagaaaaaaa

SEQ ID NO: 970012 - RNA, 20 nt, Human
uaacucaugcuuaccuacca

SEQ ID NO: 970013 - RNA, 21 nt, Human
uaagcaugaaaacaguaacau

SEQ ID NO: 970014 - RNA, 24 nt, Human
uaauauuuuuuucuggucuuggaa

SEQ ID NO: 970015 - RNA, 23 nt, Human
uacaaauggcuuguaaauguucc

SEQ ID NO: 970016 - RNA, 24 nt, Human
uacacuaaaacuaaacacauacug

SEQ ID NO: 970017 - RNA, 20 nt, Human
uacagagagaaguuguguga

SEQ ID NO: 970018 - RNA, 23 nt, Human
uacagcacaauagaaauaaaaca

SEQ ID NO: 970019 - RNA, 22 nt, Human
uacaugauuuuuaacuaaaaau

SEQ ID NO: 970020 - RNA, 21 nt, Human
uacauugaauaaaacauuagc

SEQ ID NO: 970021 - RNA, 23 nt, Human
uacugaauuagauuaucauccca

SEQ ID NO: 970022 - RNA, 18 nt, Human
uagcucuuaagcucucag

SEQ ID NO: 970023 - RNA, 22 nt, Human
uauauugacuaucucugaaaua

SEQ ID NO: 970024 - RNA, 25 nt, Human
uaucugaaggagaaguaguuccugu

SEQ ID NO: 970025 - RNA, 20 nt, Human
uaugcaguuacuaagucacc

SEQ ID NO: 970026 - RNA, 23 nt, Human
ucaaucaaaauugaaauggcugg

SEQ ID NO: 970027 - RNA, 21 nt, Human
ucagaacuccauaccagagac

SEQ ID NO: 970028 - RNA, 21 nt, Human
ucagaacugauccauaaucuc

SEQ ID NO: 970029 - RNA, 23 nt, Human
ucagacaauacuguguccacuuu

SEQ ID NO: 970030 - RNA, 22 nt, Human
ucagagcagaaaaaacuuaaaa

SEQ ID NO: 970031 - RNA, 23 nt, Human
ucaguggaaaacagagccccaag

SEQ ID NO: 970032 - RNA, 21 nt, Human
uccaauauucacagcaaaaca

SEQ ID NO: 970033 - RNA, 18 nt, Human
uccacuuuaucaacaaac

SEQ ID NO: 970034 - RNA, 18 nt, Human
uccccaggacaguagauc

SEQ ID NO: 970035 - RNA, 21 nt, Human
uccccaggacaguagauccug

SEQ ID NO: 970036 - RNA, 19 nt, Human
uccuagguaaaucaauuug

SEQ ID NO: 970037 - RNA, 18 nt, Human
ucucagaacuccauacca

SEQ ID NO: 970038 - RNA, 19 nt, Human
ucuccaacaaagcuucagu

SEQ ID NO: 970039 - RNA, 25 nt, Human
ucuccucuaacaaaagaaaaaaaaa

SEQ ID NO: 970040 - RNA, 20 nt, Human
ucugcgaggcaccaaauguu

SEQ ID NO: 970041 - RNA, 21 nt, Human
ucuguaggaucuaaacaacca

SEQ ID NO: 970042 - RNA, 21 nt, Human
ugaaauucuauguacuuguau

SEQ ID NO: 970043 - RNA, 22 nt, Human
ugaauuagagauggugaauauu

SEQ ID NO: 970044 - RNA, 20 nt, Human
ugagaaaaaaaaguuggcag

SEQ ID NO: 970045 - RNA, 18 nt, Human
uggaaaccacuaaauguc

SEQ ID NO: 970046 - RNA, 21 nt, Human
uggaaacgaauuauuuccagu

SEQ ID NO: 970047 - RNA, 25 nt, Human
uggaauaauuuaauuggacaaagca

SEQ ID NO: 970048 - RNA, 20 nt, Human
ugguaaagacaagagcugua

SEQ ID NO: 970049 - RNA, 23 nt, Human
ugguauuuucucaucuaaaaauu

SEQ ID NO: 970050 - RNA, 20 nt, Human
uggugaauauuaccauccgc

SEQ ID NO: 970051 - RNA, 24 nt, Human
uguaaaauaacuuugacacuucag

SEQ ID NO: 970052 - RNA, 20 nt, Human
uguaauauuuuuuucugguc

SEQ ID NO: 970053 - RNA, 18 nt, Human
uguaauguuaacagucuu

SEQ ID NO: 970054 - RNA, 22 nt, Human
ugugaaauucuauguacuuguu

SEQ ID NO: 970055 - RNA, 23 nt, Human
uguggaagucuuaaaacaaaggu

SEQ ID NO: 970056 - RNA, 18 nt, Human
ugugugaaaauggcacau

SEQ ID NO: 970057 - RNA, 18 nt, Human
uguuugguuuacuuuuug

SEQ ID NO: 970058 - RNA, 19 nt, Human
uguuugguuuacuuuuugu

SEQ ID NO: 970059 - RNA, 20 nt, Human
uuaauaauaauaguguuauu

SEQ ID NO: 970060 - RNA, 23 nt, Human
uucaguggaaaacagagccucuu

SEQ ID NO: 970061 - RNA, 19 nt, Human
uugcuaaguuguuuuuaug

SEQ ID NO: 970062 - RNA, 25 nt, Human
uuggaagaguguuugaugggaaugu

SEQ ID NO: 970063 - RNA, 22 nt, Human
uuguguugucaaugccugcuuc

SEQ ID NO: 970064 - RNA, 20 nt, Human
uuuauacacagcaaaauaua

SEQ ID NO: 970065 - RNA, 21 nt, Human
uuuccauguaaauugguuguu

SEQ ID NO: 970066 - RNA, 19 nt, Human
uuugagaaagguggauuca

SEQ ID NO: 970067 - RNA, 23 nt, Human
uuugcaaaugauaggcaaccacc

SEQ ID NO: 970068 - RNA, 24 nt, Human
uuuuagagcgguuaaaaugcuguu

SEQ ID NO: 970069 - RNA, 22 nt, Human
acaauugaccccuuuuugggua

SEQ ID NO: 970070 - RNA, 21 nt, Human
acacggcucucgccuggcugg

SEQ ID NO: 970071 - RNA, 23 nt, Human
acgcagcccccgcccugggaccu

SEQ ID NO: 970072 - RNA, 19 nt, Human
agauggucuggcacaaagc

SEQ ID NO: 970073 - RNA, 23 nt, Human
agucaggaaggaaguacugcuag

SEQ ID NO: 970074 - RNA, 27 nt, Human
cagcccccggcgcccaggcgucucccu

SEQ ID NO: 970075 - RNA, 18 nt, Human
cgcccugggaccugcagc

SEQ ID NO: 970076 - RNA, 27 nt, Human
cgcccugggaccugcagcccccggcgc

SEQ ID NO: 970077 - RNA, 21 nt, Human
cgcugggaucccacacggcuc

SEQ ID NO: 970078 - RNA, 21 nt, Human
cuccuuggcgggggcgggagu

SEQ ID NO: 970079 - RNA, 20 nt, Human
cuggcagguaguaggaguca

SEQ ID NO: 970080 - RNA, 23 nt, Human
gacaauugaccccuuuuugggua

SEQ ID NO: 970081 - RNA, 24 nt, Human
gcccugggaccugcagcccccggc

SEQ ID NO: 970082 - RNA, 19 nt, Human
gcgugccuggcucugcggc

SEQ ID NO: 970083 - RNA, 18 nt, Human
ggacgcagcccccgcccu

SEQ ID NO: 970084 - RNA, 25 nt, Human
uacuagaguuauacauuuuauuuga

SEQ ID NO: 970085 - RNA, 23 nt, Human
uacugcuaguucguauccagucu

SEQ ID NO: 970086 - RNA, 19 nt, Human
uagaauauaugcugaaggu

SEQ ID NO: 970087 - RNA, 24 nt, Human
uauaugcugaaggugaaaugaggg

SEQ ID NO: 970088 - RNA, 22 nt, Human
uaugaucccagcgcagagcaag

SEQ ID NO: 970089 - RNA, 25 nt, Human
ucauuccacagauacugacugagug

SEQ ID NO: 970090 - RNA, 20 nt, Human
uccucagagauaagcuccca

SEQ ID NO: 970091 - RNA, 23 nt, Human
uggagaaaggggaacagggauga

SEQ ID NO: 970092 - RNA, 24 nt, Human
ugggaccugcagcccccggcgccc

SEQ ID NO: 970093 - RNA, 20 nt, Human
uuccacagauacugacugag

SEQ ID NO: 970094 - RNA, 22 nt, Human
uuccacagauacugacugagug

SEQ ID NO: 970095 - RNA, 18 nt, Human
uuggagaaaggggaacag

SEQ ID NO: 970096 - RNA, 21 nt, Human
aaagggaggcauuucccugau

SEQ ID NO: 970097 - RNA, 23 nt, Human
aacaaaaggagaaugaggcuuaa

SEQ ID NO: 970098 - RNA, 18 nt, Human
aagaauguguuggcucuu

SEQ ID NO: 970099 - RNA, 18 nt, Human
aagaauguguuggcucuu

SEQ ID NO: 970100 - RNA, 21 nt, Human
aagcagugaugagaggccaga

SEQ ID NO: 970101 - RNA, 21 nt, Human
aagcagugaugagaggccaga

SEQ ID NO: 970102 - RNA, 19 nt, Human
aaggaucacuucaucaagu

SEQ ID NO: 970103 - RNA, 19 nt, Human
aaggaucacuucaucaagu

SEQ ID NO: 970104 - RNA, 18 nt, Human
aagggguuguuaagcuga

SEQ ID NO: 970105 - RNA, 18 nt, Human
aagggguuguuaagcuga

SEQ ID NO: 970106 - RNA, 20 nt, Human
acacccccugugaccccagg

SEQ ID NO: 970107 - RNA, 22 nt, Human
acagcaguggugguuugggcag

SEQ ID NO: 970108 - RNA, 22 nt, Human
acagcaguggugguuugggcag

SEQ ID NO: 970109 - RNA, 22 nt, Human
acaggucaguaucacuaagaac

SEQ ID NO: 970110 - RNA, 22 nt, Human
acaggucaguaucacuaagaac

SEQ ID NO: 970111 - RNA, 19 nt, Human
acuugguucaaaggggacu

SEQ ID NO: 970112 - RNA, 19 nt, Human
acuugguucaaaggggacu

SEQ ID NO: 970113 - RNA, 23 nt, Human
agagacagaguugaggcagcugg

SEQ ID NO: 970114 - RNA, 23 nt, Human
agagacagaguugaggcagcugg

SEQ ID NO: 970115 - RNA, 18 nt, Human
agaggaacccaagcucug

SEQ ID NO: 970116 - RNA, 18 nt, Human
agcagccucugagggcag

SEQ ID NO: 970117 - RNA, 22 nt, Human
agcaguggugguuugggcagcc

SEQ ID NO: 970118 - RNA, 22 nt, Human
agcaguggugguuugggcagcc

SEQ ID NO: 970119 - RNA, 18 nt, Human
aggaagggaggagagagg

SEQ ID NO: 970120 - RNA, 28 nt, Human
aggaagggaggagagagggggagaggag

SEQ ID NO: 970121 - RNA, 20 nt, Human
aggagagagggggagaggag

SEQ ID NO: 970122 - RNA, 22 nt, Human
aggauaaggcagauuuaccaaa

SEQ ID NO: 970123 - RNA, 22 nt, Human
aggauaaggcagauuuaccaaa

SEQ ID NO: 970124 - RNA, 24 nt, Human
aggcaagccagaguccuaaccaag

SEQ ID NO: 970125 - RNA, 24 nt, Human
aggcaagccagaguccuaaccaag

SEQ ID NO: 970126 - RNA, 21 nt, Human
aggcagauuuaccaaagggag

SEQ ID NO: 970127 - RNA, 21 nt, Human
aggcagauuuaccaaagggag

SEQ ID NO: 970128 - RNA, 19 nt, Human
aggccagcacaguuguacu

SEQ ID NO: 970129 - RNA, 19 nt, Human
agugggcuguccccgggga

SEQ ID NO: 970130 - RNA, 19 nt, Human
agugggcuguccccgggga

SEQ ID NO: 970131 - RNA, 23 nt, Human
aguuccauuggcagccagauggc

SEQ ID NO: 970132 - RNA, 23 nt, Human
aguuccauuggcagccagauggc

SEQ ID NO: 970133 - RNA, 24 nt, Human
augugcuugcugacagcaguggug

SEQ ID NO: 970134 - RNA, 24 nt, Human
augugcuugcugacagcaguggug

SEQ ID NO: 970135 - RNA, 23 nt, Human
auugcggccagggccugacgggu

SEQ ID NO: 970136 - RNA, 18 nt, Human
caagugccaggcacucug

SEQ ID NO: 970137 - RNA, 18 nt, Human
cacaauucaaauccaguu

SEQ ID NO: 970138 - RNA, 24 nt, Human
cacacagacacacaacgcaggucu

SEQ ID NO: 970139 - RNA, 24 nt, Human
cacacagacacacaacgcaggucu

SEQ ID NO: 970140 - RNA, 22 nt, Human
cacaucugcaugcaguuagggg

SEQ ID NO: 970141 - RNA, 23 nt, Human
cacccccugugaccccaggcuca

SEQ ID NO: 970142 - RNA, 25 nt, Human
caccgagccgugcggggagcucacu

SEQ ID NO: 970143 - RNA, 23 nt, Human
cagcaguggugguuugggcagcc

SEQ ID NO: 970144 - RNA, 23 nt, Human
cagcaguggugguuugggcagcc

SEQ ID NO: 970145 - RNA, 24 nt, Human
cagcgggcucugcaacccucagac

SEQ ID NO: 970146 - RNA, 24 nt, Human
cagcgggcucugcaacccucagac

SEQ ID NO: 970147 - RNA, 18 nt, Human
cagcuacccaucccccuc

SEQ ID NO: 970148 - RNA, 18 nt, Human
cagcuacccaucccccuc

SEQ ID NO: 970149 - RNA, 20 nt, Human
cagcugccaaggacagggca

SEQ ID NO: 970150 - RNA, 21 nt, Human
caggaggcugaggcagaaccu

SEQ ID NO: 970151 - RNA, 21 nt, Human
caggaggcugaggcagaaccu

SEQ ID NO: 970152 - RNA, 27 nt, Human
caguaggguuccucucaauaccuccuu

SEQ ID NO: 970153 - RNA, 21 nt, Human
cagugaugagaggccagaaga

SEQ ID NO: 970154 - RNA, 21 nt, Human
cagugaugagaggccagaaga

SEQ ID NO: 970155 - RNA, 24 nt, Human
caucuucauaggagaagauggccu

SEQ ID NO: 970156 - RNA, 26 nt, Human
ccaaaaguuuugugcagaauaacugg

SEQ ID NO: 970157 - RNA, 21 nt, Human
ccacagcgggcucugcaaccc

SEQ ID NO: 970158 - RNA, 21 nt, Human
ccacagcgggcucugcaaccc

SEQ ID NO: 970159 - RNA, 22 nt, Human
cccccugugaccccaggcucau

SEQ ID NO: 970160 - RNA, 22 nt, Human
cccucagacauguggcagaucu

SEQ ID NO: 970161 - RNA, 22 nt, Human
cccucagacauguggcagaucu

SEQ ID NO: 970162 - RNA, 19 nt, Human
cccucuuccccucugaguc

SEQ ID NO: 970163 - RNA, 19 nt, Human
cccucuuccccucugaguc

SEQ ID NO: 970164 - RNA, 20 nt, Human
cccuguguugguacuagcac

SEQ ID NO: 970165 - RNA, 23 nt, Human
ccgcccgacacccccugugaccc

SEQ ID NO: 970166 - RNA, 22 nt, Human
ccucauguguuuccaaucuuac

SEQ ID NO: 970167 - RNA, 19 nt, Human
ccugagguccuaagggugu

SEQ ID NO: 970168 - RNA, 19 nt, Human
ccugagguccuaagggugu

SEQ ID NO: 970169 - RNA, 21 nt, Human
ccugcuucaaccagguccaga

SEQ ID NO: 970170 - RNA, 21 nt, Human
ccugcuucaaccagguccaga

SEQ ID NO: 970171 - RNA, 20 nt, Human
ccuggaggacuuccaccuuu

SEQ ID NO: 970172 - RNA, 20 nt, Human
ccuggaggacuuccaccuuu

SEQ ID NO: 970173 - RNA, 21 nt, Human
ccugggccugagcuggacuug

SEQ ID NO: 970174 - RNA, 21 nt, Human
ccugggccugagcuggacuug

SEQ ID NO: 970175 - RNA, 22 nt, Human
ccuggggucaagggggacuguc

SEQ ID NO: 970176 - RNA, 22 nt, Human
ccuggggucaagggggacuguc

SEQ ID NO: 970177 - RNA, 21 nt, Human
cgggugaagagugggcucacc

SEQ ID NO: 970178 - RNA, 19 nt, Human
cuaagaacauucaaaagca

SEQ ID NO: 970179 - RNA, 19 nt, Human
cuaagaacauucaaaagca

SEQ ID NO: 970180 - RNA, 25 nt, Human
cuaagaacauucaaaagcauugaaa

SEQ ID NO: 970181 - RNA, 25 nt, Human
cuaagaacauucaaaagcauugaaa

SEQ ID NO: 970182 - RNA, 24 nt, Human
cuagagucugaugugcuugcugac

SEQ ID NO: 970183 - RNA, 24 nt, Human
cuagagucugaugugcuugcugac

SEQ ID NO: 970184 - RNA, 19 nt, Human
cucccaccuccugggccug

SEQ ID NO: 970185 - RNA, 19 nt, Human
cucccaccuccugggccug

SEQ ID NO: 970186 - RNA, 23 nt, Human
cuccuuuaacucuaagaagacuu

SEQ ID NO: 970187 - RNA, 23 nt, Human
cucucccugagccucaacuccag

SEQ ID NO: 970188 - RNA, 23 nt, Human
cucucccugagccucaacuccag

SEQ ID NO: 970189 - RNA, 21 nt, Human
cucuuggccagcacccccucc

SEQ ID NO: 970190 - RNA, 21 nt, Human
cucuuggccagcacccccucc

SEQ ID NO: 970191 - RNA, 21 nt, Human
cugggcagggcugcaggugug

SEQ ID NO: 970192 - RNA, 20 nt, Human
cuuggaaauuccugaggcuc

SEQ ID NO: 970193 - RNA, 20 nt, Human
cuuggaaauuccugaggcuc

SEQ ID NO: 970194 - RNA, 23 nt, Human
cuuuccugcuucaaccaggucca

SEQ ID NO: 970195 - RNA, 20 nt, Human
cuuuuccaaauauuccagca

SEQ ID NO: 970196 - RNA, 20 nt, Human
cuuuuccaaauauuccagca

SEQ ID NO: 970197 - RNA, 24 nt, Human
gaacaaaaggagaaugaggcuuaa

SEQ ID NO: 970198 - RNA, 23 nt, Human
gacagcaguggugguuugggcag

SEQ ID NO: 970199 - RNA, 23 nt, Human
gacagcaguggugguuugggcag

SEQ ID NO: 970200 - RNA, 19 nt, Human
gaccccauugugucucugg

SEQ ID NO: 970201 - RNA, 21 nt, Human
gaccuucucccaccuccuggg

SEQ ID NO: 970202 - RNA, 21 nt, Human
gaccuucucccaccuccuggg

SEQ ID NO: 970203 - RNA, 20 nt, Human
gagcagccucugagggcagu

SEQ ID NO: 970204 - RNA, 21 nt, Human
gagccgugcgggcucugggac

SEQ ID NO: 970205 - RNA, 22 nt, Human
gagccucaacuccaggucacug

SEQ ID NO: 970206 - RNA, 22 nt, Human
gagccucaacuccaggucacug

SEQ ID NO: 970207 - RNA, 21 nt, Human
gaggagagagggggagaggag

SEQ ID NO: 970208 - RNA, 18 nt, Human
gaggcagcuggggaaggc

SEQ ID NO: 970209 - RNA, 21 nt, Human
gaggcagcuggggaaggcaag

SEQ ID NO: 970210 - RNA, 19 nt, Human
gaucccuggaggacuucca

SEQ ID NO: 970211 - RNA, 19 nt, Human
gaucccuggaggacuucca

SEQ ID NO: 970212 - RNA, 21 nt, Human
gaugauggagggggggcgcau

SEQ ID NO: 970213 - RNA, 21 nt, Human
gaugauggagggggggcgcau

SEQ ID NO: 970214 - RNA, 18 nt, Human
gcagagcugccagagaca

SEQ ID NO: 970215 - RNA, 18 nt, Human
gcagagcugccagagaca

SEQ ID NO: 970216 - RNA, 21 nt, Human
gcagugaugagaggccagaag

SEQ ID NO: 970217 - RNA, 21 nt, Human
gcagugaugagaggccagaag

SEQ ID NO: 970218 - RNA, 22 nt, Human
gccuagacuccuggguguggag

SEQ ID NO: 970219 - RNA, 22 nt, Human
gccuagacuccuggguguggag

SEQ ID NO: 970220 - RNA, 18 nt, Human
gcugggccagcccaaccu

SEQ ID NO: 970221 - RNA, 18 nt, Human
gcugggccagcccaaccu

SEQ ID NO: 970222 - RNA, 18 nt, Human
ggaaggagguggaguagg

SEQ ID NO: 970223 - RNA, 18 nt, Human
ggaaggagguggaguagg

SEQ ID NO: 970224 - RNA, 18 nt, Human
ggaaggagguggaguagg

SEQ ID NO: 970225 - RNA, 24 nt, Human
ggagugagcaggaggcuuguccau

SEQ ID NO: 970226 - RNA, 20 nt, Human
ggcagggcugcagguguguc

SEQ ID NO: 970227 - RNA, 22 nt, Human
ggcugcaggugugucuggggag

SEQ ID NO: 970228 - RNA, 22 nt, Human
gggaaggaagggaggagagagg

SEQ ID NO: 970229 - RNA, 20 nt, Human
gggaugcacuuuccuccgcc

SEQ ID NO: 970230 - RNA, 18 nt, Human
gggcccuggggucaaggg

SEQ ID NO: 970231 - RNA, 18 nt, Human
gggcccuggggucaaggg

SEQ ID NO: 970232 - RNA, 24 nt, Human
gggcugcaggugugucuggggagg

SEQ ID NO: 970233 - RNA, 18 nt, Human
gggugggguggagugagc

SEQ ID NO: 970234 - RNA, 21 nt, Human
ggugcagagcugccagagaca

SEQ ID NO: 970235 - RNA, 21 nt, Human
ggugcagagcugccagagaca

SEQ ID NO: 970236 - RNA, 23 nt, Human
guagcucugguggucucgacggu

SEQ ID NO: 970237 - RNA, 24 nt, Human
guagcucugguggucucgacgguc

SEQ ID NO: 970238 - RNA, 18 nt, Human
gugcuugcugacagcagu

SEQ ID NO: 970239 - RNA, 18 nt, Human
gugcuugcugacagcagu

SEQ ID NO: 970240 - RNA, 21 nt, Human
guuaaugauuacuuggggguu

SEQ ID NO: 970241 - RNA, 21 nt, Human
guuaaugauuacuuggggguu

SEQ ID NO: 970242 - RNA, 21 nt, Human
guugaggcagcuggggaaggc

SEQ ID NO: 970243 - RNA, 25 nt, Human
uaagguucccaguccucccugggaa

SEQ ID NO: 970244 - RNA, 25 nt, Human
uaagguucccaguccucccugggaa

SEQ ID NO: 970245 - RNA, 18 nt, Human
uaccaaggccuagacucc

SEQ ID NO: 970246 - RNA, 18 nt, Human
uaccaaggccuagacucc

SEQ ID NO: 970247 - RNA, 21 nt, Human
uaccaaggccuagacuccugg

SEQ ID NO: 970248 - RNA, 21 nt, Human
uaccaaggccuagacuccugg

SEQ ID NO: 970249 - RNA, 21 nt, Human
uacccaucccccucuuugggg

SEQ ID NO: 970250 - RNA, 21 nt, Human
uacccaucccccucuuugggg

SEQ ID NO: 970251 - RNA, 18 nt, Human
uaggaugccagaugauuc

SEQ ID NO: 970252 - RNA, 18 nt, Human
uaggaugccagaugauuc

SEQ ID NO: 970253 - RNA, 22 nt, Human
uagggaagggguuguuaagcug

SEQ ID NO: 970254 - RNA, 22 nt, Human
uagggaagggguuguuaagcug

SEQ ID NO: 970255 - RNA, 21 nt, Human
uauauuaucacaggucaguau

SEQ ID NO: 970256 - RNA, 21 nt, Human
uauauuaucacaggucaguau

SEQ ID NO: 970257 - RNA, 22 nt, Human
uaucacuaagaacauucaaaag

SEQ ID NO: 970258 - RNA, 20 nt, Human
uauggaagucccaagugcca

SEQ ID NO: 970259 - RNA, 21 nt, Human
ucaacaaucuccuucaguucu

SEQ ID NO: 970260 - RNA, 21 nt, Human
ucaacaaucuccuucaguucu

SEQ ID NO: 970261 - RNA, 23 nt, Human
ucaacacacagacacacaacgca

SEQ ID NO: 970262 - RNA, 23 nt, Human
ucaacacacagacacacaacgca

SEQ ID NO: 970263 - RNA, 31 nt, Human
ucaacaguaggguuccucucaauaccuccuu

SEQ ID NO: 970264 - RNA, 21 nt, Human
ucaagagauaagguucccagu

SEQ ID NO: 970265 - RNA, 21 nt, Human
ucaagagauaagguucccagu

SEQ ID NO: 970266 - RNA, 20 nt, Human
ucaagggggacugucugggc

SEQ ID NO: 970267 - RNA, 20 nt, Human
ucaagggggacugucugggc

SEQ ID NO: 970268 - RNA, 24 nt, Human
uccaaguuuugaguuccauuggca

SEQ ID NO: 970269 - RNA, 24 nt, Human
uccaaguuuugaguuccauuggca

SEQ ID NO: 970270 - RNA, 27 nt, Human
uccauuggcagccagauggcauaauga

SEQ ID NO: 970271 - RNA, 27 nt, Human
uccauuggcagccagauggcauaauga

SEQ ID NO: 970272 - RNA, 19 nt, Human
ucccaagugccaggcacuc

SEQ ID NO: 970273 - RNA, 19 nt, Human
uccccggggagguagcucu

SEQ ID NO: 970274 - RNA, 19 nt, Human
uccccggggagguagcucu

SEQ ID NO: 970275 - RNA, 22 nt, Human
ucccucugccucauguguuucc

SEQ ID NO: 970276 - RNA, 22 nt, Human
ucccucugccucauguguuucc

SEQ ID NO: 970277 - RNA, 22 nt, Human
ucccugagccucaacuccaggu

SEQ ID NO: 970278 - RNA, 22 nt, Human
ucccugagccucaacuccaggu

SEQ ID NO: 970279 - RNA, 18 nt, Human
ucccugaugggcccuggg

SEQ ID NO: 970280 - RNA, 22 nt, Human
ucccuggaggacuuccaccuuu

SEQ ID NO: 970281 - RNA, 22 nt, Human
ucccuggaggacuuccaccuuu

SEQ ID NO: 970282 - RNA, 25 nt, Human
ucccuggaggacuuccaccuuugcc

SEQ ID NO: 970283 - RNA, 25 nt, Human
ucccuggaggacuuccaccuuugcc

SEQ ID NO: 970284 - RNA, 21 nt, Human
ucccuguguugguacuagcac

SEQ ID NO: 970285 - RNA, 22 nt, Human
uccugcuucaaccagguccaga

SEQ ID NO: 970286 - RNA, 22 nt, Human
uccugcuucaaccagguccaga

SEQ ID NO: 970287 - RNA, 20 nt, Human
uccuggccacuguccaggcu

SEQ ID NO: 970288 - RNA, 20 nt, Human
uccuggccacuguccaggcu

SEQ ID NO: 970289 - RNA, 19 nt, Human
ucuggauuauuucacuacu

SEQ ID NO: 970290 - RNA, 19 nt, Human
ucuggauuauuucacuacu

SEQ ID NO: 970291 - RNA, 26 nt, Human
ucuuaccuccacagcgggcucugcaa

SEQ ID NO: 970292 - RNA, 26 nt, Human
ucuuaccuccacagcgggcucugcaa

SEQ ID NO: 970293 - RNA, 18 nt, Human
ucuucauaggagaagaug

SEQ ID NO: 970294 - RNA, 18 nt, Human
ucuucauaggagaagaug

SEQ ID NO: 970295 - RNA, 21 nt, Human
ucuuccccucugagucucugg

SEQ ID NO: 970296 - RNA, 21 nt, Human
ucuuccccucugagucucugg

SEQ ID NO: 970297 - RNA, 21 nt, Human
ucuuccugugcaggaagaccc

SEQ ID NO: 970298 - RNA, 21 nt, Human
ucuuccugugcaggaagaccc

SEQ ID NO: 970299 - RNA, 22 nt, Human
ugacaccaucugacaccgagcc

SEQ ID NO: 970300 - RNA, 18 nt, Human
ugaccccaggcucauccu

SEQ ID NO: 970301 - RNA, 22 nt, Human
ugagaaaagcagugaugagagg

SEQ ID NO: 970302 - RNA, 22 nt, Human
ugagaaaagcagugaugagagg

SEQ ID NO: 970303 - RNA, 18 nt, Human
ugaguugucauuggcuaa

SEQ ID NO: 970304 - RNA, 18 nt, Human
ugaguugucauuggcuaa

SEQ ID NO: 970305 - RNA, 24 nt, Human
ugauguuucaggaggcugaggcag

SEQ ID NO: 970306 - RNA, 24 nt, Human
ugauguuucaggaggcugaggcag

SEQ ID NO: 970307 - RNA, 22 nt, Human
ugcaaagaggaauucccaaaag

SEQ ID NO: 970308 - RNA, 22 nt, Human
ugcaaagaggaauucccaaaag

SEQ ID NO: 970309 - RNA, 22 nt, Human
ugccaggcacucuguaggcagc

SEQ ID NO: 970310 - RNA, 24 nt, Human
ugccucauguguuuccaaucuuac

SEQ ID NO: 970311 - RNA, 18 nt, Human
ugcugacagcaguggugg

SEQ ID NO: 970312 - RNA, 18 nt, Human
ugcugacagcaguggugg

SEQ ID NO: 970313 - RNA, 19 nt, Human
uggaaggagguggaguagg

SEQ ID NO: 970314 - RNA, 19 nt, Human
uggaaggagguggaguagg

SEQ ID NO: 970315 - RNA, 21 nt, Human
uggaaggagguggaguagggg

SEQ ID NO: 970316 - RNA, 25 nt, Human
uggaggacuuccaccuuugccuaca

SEQ ID NO: 970317 - RNA, 25 nt, Human
uggaggacuuccaccuuugccuaca

SEQ ID NO: 970318 - RNA, 19 nt, Human
uggccugagguccuaaggg

SEQ ID NO: 970319 - RNA, 19 nt, Human
uggccugagguccuaaggg

SEQ ID NO: 970320 - RNA, 19 nt, Human
ugggcccuggggucaaggg

SEQ ID NO: 970321 - RNA, 19 nt, Human
ugggcccuggggucaaggg

SEQ ID NO: 970322 - RNA, 18 nt, Human
ugggcuguccccggggag

SEQ ID NO: 970323 - RNA, 18 nt, Human
ugggcuguccccggggag

SEQ ID NO: 970324 - RNA, 20 nt, Human
uggggaugauggaggggggg

SEQ ID NO: 970325 - RNA, 20 nt, Human
uggggaugauggaggggggg

SEQ ID NO: 970326 - RNA, 24 nt, Human
uggggauguuuuccuaggcugggc

SEQ ID NO: 970327 - RNA, 24 nt, Human
uggggauguuuuccuaggcugggc

SEQ ID NO: 970328 - RNA, 22 nt, Human
ugggguggagugagcaggaggc

SEQ ID NO: 970329 - RNA, 23 nt, Human
ugggguggagugagcaggaggcu

SEQ ID NO: 970330 - RNA, 24 nt, Human
uguacagcaggccagcacaguugu

SEQ ID NO: 970331 - RNA, 21 nt, Human
uguccaggcuagagucugaug

SEQ ID NO: 970332 - RNA, 21 nt, Human
uguccaggcuagagucugaug

SEQ ID NO: 970333 - RNA, 21 nt, Human
uguccaggcuagagucugaug

SEQ ID NO: 970334 - RNA, 21 nt, Human
uguccaggcuagagucugaug

SEQ ID NO: 970335 - RNA, 21 nt, Human
uguccauugcggccagggccu

SEQ ID NO: 970336 - RNA, 22 nt, Human
uguccgugacagccugacacug

SEQ ID NO: 970337 - RNA, 22 nt, Human
ugugaccccaggcucauccuuu

SEQ ID NO: 970338 - RNA, 24 nt, Human
uguggagagcacauggucccuggg

SEQ ID NO: 970339 - RNA, 24 nt, Human
uguggagagcacauggucccuggg

SEQ ID NO: 970340 - RNA, 25 nt, Human
uguuaaagagucuuccugugcagga

SEQ ID NO: 970341 - RNA, 25 nt, Human
uguuaaagagucuuccugugcagga

SEQ ID NO: 970342 - RNA, 21 nt, Human
uucaucuucauaggagaagau

SEQ ID NO: 970343 - RNA, 21 nt, Human
uucaucuucauaggagaagau

SEQ ID NO: 970344 - RNA, 25 nt, Human
uuccugaggcucugugaccuucucc

SEQ ID NO: 970345 - RNA, 25 nt, Human
uuccugaggcucugugaccuucucc

SEQ ID NO: 970346 - RNA, 23 nt, Human
uugaggcagcuggggaaggcaag

SEQ ID NO: 970347 - RNA, 22 nt, Human
uuggcacuucgggugcugggca

SEQ ID NO: 970348 - RNA, 22 nt, Human
uuggcacuucgggugcugggca

SEQ ID NO: 970349 - RNA, 19 nt, Human
uuggcagccagauggcaua

SEQ ID NO: 970350 - RNA, 19 nt, Human
uuggcagccagauggcaua

SEQ ID NO: 970351 - RNA, 20 nt, Human
uuuccacaucugcaugcagu

SEQ ID NO: 970352 - RNA, 20 nt, Human
uuuccacaucugcaugcagu

SEQ ID NO: 970353 - RNA, 20 nt, Human
uuucccugaugggcccuggg

SEQ ID NO: 970354 - RNA, 26 nt, Human
uuugaagcuuguacagcaggccagca

SEQ ID NO: 970355 - RNA, 22 nt, Human
uuugggguuucuagccagccuc

SEQ ID NO: 970356 - RNA, 22 nt, Human
uuugggguuucuagccagccuc

SEQ ID NO: 970357 - RNA, 18 nt, Human
uuuugugcagaauaacug

SEQ ID NO: 970358 - RNA, 18 nt, Human
uuuugugcagaauaacug

SEQ ID NO: 970359 - RNA, 18 nt, Human
uuuuuuuuuuuuuuuuug

SEQ ID NO: 970360 - RNA, 21 nt, Human
uuuuuuuuuuuuuuuuuuugg

SEQ ID NO: 970361 - RNA, 18 nt, Human
aggucccaagcgcucuuc

SEQ ID NO: 970362 - RNA, 19 nt, Human
aucgcugcugguuguucag

SEQ ID NO: 970363 - RNA, 21 nt, Human
cuggagguccuuuguaccugg

SEQ ID NO: 970364 - RNA, 22 nt, Human
ucagaguuccacuggagaagug

SEQ ID NO: 970365 - RNA, 21 nt, Human
uggcuggcucuggucuggagg

SEQ ID NO: 970366 - RNA, 21 nt, Human
uuugcugcuggcuggcucugg

SEQ ID NO: 970367 - RNA, 20 nt, Human
aaaaaagagauuagaaaaga

SEQ ID NO: 970368 - RNA, 19 nt, Human
aaaaacacuccccacagcc

SEQ ID NO: 970369 - RNA, 22 nt, Human
aaacccaucuccuuuccgcaaa

SEQ ID NO: 970370 - RNA, 21 nt, Human
aaauagccucaaaagcacaga

SEQ ID NO: 970371 - RNA, 19 nt, Human
aacacagugaaaccccauc

SEQ ID NO: 970372 - RNA, 20 nt, Human
aacacagugaaaccccaucu

SEQ ID NO: 970373 - RNA, 21 nt, Human
aacacagugaaaccccaucuc

SEQ ID NO: 970374 - RNA, 21 nt, Human
aacacagugaaaccccaucuc

SEQ ID NO: 970375 - RNA, 20 nt, Human
aacagaaugagacuccaccu

SEQ ID NO: 970376 - RNA, 23 nt, Human
aacagaaugagacuccaccucaa

SEQ ID NO: 970377 - RNA, 19 nt, Human
aagcaggaugcuggagaug

SEQ ID NO: 970378 - RNA, 19 nt, Human
aagcaggaugcuggagaug

SEQ ID NO: 970379 - RNA, 21 nt, Human
aagcauccagcaccuaggauc

SEQ ID NO: 970380 - RNA, 24 nt, Human
aaguggagguugcagugagccaag

SEQ ID NO: 970381 - RNA, 24 nt, Human
aaucauuuaauuuuuuauaauggc

SEQ ID NO: 970382 - RNA, 24 nt, Human
aaucgcuugaacccaggaagugga

SEQ ID NO: 970383 - RNA, 23 nt, Human
aaugauaagaguaaaaaaagaga

SEQ ID NO: 970384 - RNA, 22 nt, Human
acaccauguauuggcuacaaac

SEQ ID NO: 970385 - RNA, 24 nt, Human
acagaaugagacuccaccucaaaa

SEQ ID NO: 970386 - RNA, 24 nt, Human
acccaggaaguggagguugcagug

SEQ ID NO: 970387 - RNA, 20 nt, Human
accccagcaaaagcaaacca

SEQ ID NO: 970388 - RNA, 18 nt, Human
accccaucucugcuaaaa

SEQ ID NO: 970389 - RNA, 22 nt, Human
accuuguauccaaagucaacua

SEQ ID NO: 970390 - RNA, 22 nt, Human
acgccgcugccgccggacaaac

SEQ ID NO: 970391 - RNA, 24 nt, Human
acuacuggaagaauaaucccucca

SEQ ID NO: 970392 - RNA, 23 nt, Human
acuggauacaagggaagcaucua

SEQ ID NO: 970393 - RNA, 18 nt, Human
agaacuccuucuuaaaug

SEQ ID NO: 970394 - RNA, 22 nt, Human
agaaucgcuugaacccaggaag

SEQ ID NO: 970395 - RNA, 22 nt, Human
agaauuccaggcagacggauuc

SEQ ID NO: 970396 - RNA, 19 nt, Human
agacaaaaguaaaacaaug

SEQ ID NO: 970397 - RNA, 20 nt, Human
agcacucugggaggcugagg

SEQ ID NO: 970398 - RNA, 24 nt, Human
agcacucugggaggcugagguggg

SEQ ID NO: 970399 - RNA, 24 nt, Human
agccuggccaacacagugaaaccc

SEQ ID NO: 970400 - RNA, 24 nt, Human
agccugggcaacagaaugagacuc

SEQ ID NO: 970401 - RNA, 23 nt, Human
agcugggugugguggcacgcgcc

SEQ ID NO: 970402 - RNA, 20 nt, Human
aggcaauauugacaagcagg

SEQ ID NO: 970403 - RNA, 23 nt, Human
aggcaggagaaucgcuugaaccc

SEQ ID NO: 970404 - RNA, 24 nt, Human
aggcaggagaaucgcuugaaccca

SEQ ID NO: 970405 - RNA, 22 nt, Human
aggccuggcaaggacccccucc

SEQ ID NO: 970406 - RNA, 20 nt, Human
aggcugaggcaggagaaucg

SEQ ID NO: 970407 - RNA, 24 nt, Human
aggcugaggcaggagaaucgcuug

SEQ ID NO: 970408 - RNA, 24 nt, Human
aggcugagguggguggaucacuug

SEQ ID NO: 970409 - RNA, 21 nt, Human
aguugcuggugaaggauaaau

SEQ ID NO: 970410 - RNA, 22 nt, Human
aucccccgccggaguccccaac

SEQ ID NO: 970411 - RNA, 20 nt, Human
augacaccagcagaccaagg

SEQ ID NO: 970412 - RNA, 25 nt, Human
auggggcaacaaagacuucauagaa

SEQ ID NO: 970413 - RNA, 22 nt, Human
caaaaaaaaaaaaugauaagag

SEQ ID NO: 970414 - RNA, 20 nt, Human
caaaaacacuccccacagcc

SEQ ID NO: 970415 - RNA, 23 nt, Human
caaaagcacagauaauaguaaca

SEQ ID NO: 970416 - RNA, 19 nt, Human
caaagucaacuaucacugc

SEQ ID NO: 970417 - RNA, 18 nt, Human
caacaaagacuucauaga

SEQ ID NO: 970418 - RNA, 23 nt, Human
caacagaaugagacuccaccuca

SEQ ID NO: 970419 - RNA, 21 nt, Human
caaccaaagacuaacaugaug

SEQ ID NO: 970420 - RNA, 24 nt, Human
caccauguauuggcuacaaacaag

SEQ ID NO: 970421 - RNA, 19 nt, Human
cacgcauggaugacaaagc

SEQ ID NO: 970422 - RNA, 18 nt, Human
cacgucggccagccaggc

SEQ ID NO: 970423 - RNA, 23 nt, Human
cagcaaugacaccagcagaccaa

SEQ ID NO: 970424 - RNA, 20 nt, Human
cagcaucugggagcuucuug

SEQ ID NO: 970425 - RNA, 24 nt, Human
cagcuacuuaggaggcugaggcag

SEQ ID NO: 970426 - RNA, 19 nt, Human
cagcucacuggagucagga

SEQ ID NO: 970427 - RNA, 18 nt, Human
cagcuggaacuugugcuc

SEQ ID NO: 970428 - RNA, 20 nt, Human
caggccagccugggcaacag

SEQ ID NO: 970429 - RNA, 19 nt, Human
caggccccgaggccuggag

SEQ ID NO: 970430 - RNA, 22 nt, Human
caggggccacucccaaaagacc

SEQ ID NO: 970431 - RNA, 18 nt, Human
ccaaacccaucuccuuuc

SEQ ID NO: 970432 - RNA, 23 nt, Human
ccagcacccauaugugcacgcag

SEQ ID NO: 970433 - RNA, 22 nt, Human
ccaggcccuggaccagcugggg

SEQ ID NO: 970434 - RNA, 25 nt, Human
cccaaaagaccagcuggaacuugug

SEQ ID NO: 970435 - RNA, 25 nt, Human
cccaacgccgcugccgccggacaaa

SEQ ID NO: 970436 - RNA, 22 nt, Human
cccaggcccuggaccagcuggg

SEQ ID NO: 970437 - RNA, 19 nt, Human
ccccaacgccgcugccgcc

SEQ ID NO: 970438 - RNA, 18 nt, Human
cccccaucugauucaccc

SEQ ID NO: 970439 - RNA, 20 nt, Human
ccccgaggccuggaggcggg

SEQ ID NO: 970440 - RNA, 21 nt, Human
ccccugggacauaauuauccc

SEQ ID NO: 970441 - RNA, 18 nt, Human
cccgaggccuggaggcgg

SEQ ID NO: 970442 - RNA, 25 nt, Human
cccgcgcgcagcgccgccaacgcca

SEQ ID NO: 970443 - RNA, 27 nt, Human
cccgcgcgcagcgccgccaacgccacg

SEQ ID NO: 970444 - RNA, 20 nt, Human
cccuccugcccugcccuccc

SEQ ID NO: 970445 - RNA, 22 nt, Human
cccuggaccagcuggggacccu

SEQ ID NO: 970446 - RNA, 19 nt, Human
ccgcccccgccucuguccc

SEQ ID NO: 970447 - RNA, 18 nt, Human
ccgccggacaaacuuucc

SEQ ID NO: 970448 - RNA, 24 nt, Human
ccgccggacaaacuuuccggcccg

SEQ ID NO: 970449 - RNA, 20 nt, Human
ccgggcgcgcaucccccgcc

SEQ ID NO: 970450 - RNA, 25 nt, Human
ccuccugcccugcccucccgcgcgc

SEQ ID NO: 970451 - RNA, 18 nt, Human
ccucugucccuccugccc

SEQ ID NO: 970452 - RNA, 24 nt, Human
ccuggccaacacagugaaacccca

SEQ ID NO: 970453 - RNA, 18 nt, Human
ccuguaaucccagcuacu

SEQ ID NO: 970454 - RNA, 21 nt, Human
ccuguaaucccagcuacuuag

SEQ ID NO: 970455 - RNA, 22 nt, Human
ccuguaauccuagcacucuggg

SEQ ID NO: 970456 - RNA, 21 nt, Human
ccuucagggccugaaacccaa

SEQ ID NO: 970457 - RNA, 22 nt, Human
ccuucagggccugaaacccaaa

SEQ ID NO: 970458 - RNA, 20 nt, Human
cgagaggccagaguccuugg

SEQ ID NO: 970459 - RNA, 21 nt, Human
cgagaggccagaguccuuggg

SEQ ID NO: 970460 - RNA, 22 nt, Human
cgcccccggccgccccaggccu

SEQ ID NO: 970461 - RNA, 21 nt, Human
cgccuguaaucccagcuacuu

SEQ ID NO: 970462 - RNA, 24 nt, Human
cgccuguaaucccagcuacuuagg

SEQ ID NO: 970463 - RNA, 19 nt, Human
cgugcugggggcgcugagg

SEQ ID NO: 970464 - RNA, 23 nt, Human
cuccaaacccaucuccuuuccgc

SEQ ID NO: 970465 - RNA, 20 nt, Human
cuccaccucaaaaaaaaaaa

SEQ ID NO: 970466 - RNA, 18 nt, Human
cuccccagcaucugggag

SEQ ID NO: 970467 - RNA, 25 nt, Human
cucugucccuccugcccugcccucc

SEQ ID NO: 970468 - RNA, 18 nt, Human
cugccaagaggcaaaggc

SEQ ID NO: 970469 - RNA, 19 nt, Human
cugcccugcccucccgcgc

SEQ ID NO: 970470 - RNA, 25 nt, Human
cuggaccagcuggggacccuccuga

SEQ ID NO: 970471 - RNA, 18 nt, Human
cuggaggcgggacggagg

SEQ ID NO: 970472 - RNA, 23 nt, Human
cuggccaacacagugaaacccca

SEQ ID NO: 970473 - RNA, 25 nt, Human
cugggaggcugagguggguggauca

SEQ ID NO: 970474 - RNA, 19 nt, Human
cugggugugguggcacgcg

SEQ ID NO: 970475 - RNA, 23 nt, Human
gaaaaucaacaaacaauaaauca

SEQ ID NO: 970476 - RNA, 18 nt, Human
gaaguggagguugcagug

SEQ ID NO: 970477 - RNA, 21 nt, Human
gaaguggagguugcagugagc

SEQ ID NO: 970478 - RNA, 23 nt, Human
gaauauucuucuuauaaaaacug

SEQ ID NO: 970479 - RNA, 22 nt, Human
gagaagauaggagaacucgaga

SEQ ID NO: 970480 - RNA, 20 nt, Human
gaggcaugaaacuagauccu

SEQ ID NO: 970481 - RNA, 18 nt, Human
gagguugcagugagccaa

SEQ ID NO: 970482 - RNA, 22 nt, Human
gagguugcagugagccaagauc

SEQ ID NO: 970483 - RNA, 23 nt, Human
gaucacuugagcucaggaguuca

SEQ ID NO: 970484 - RNA, 22 nt, Human
gaucaggccagccugggcaaca

SEQ ID NO: 970485 - RNA, 20 nt, Human
gaugacaguguucaacuacc

SEQ ID NO: 970486 - RNA, 22 nt, Human
gcaggagaaucgcuugaaccca

SEQ ID NO: 970487 - RNA, 24 nt, Human
gccacaguuccagaauuccaggca

SEQ ID NO: 970488 - RNA, 23 nt, Human
gccagaguccuugggggcucugc

SEQ ID NO: 970489 - RNA, 22 nt, Human
gccccaggccuggcaaggaccc

SEQ ID NO: 970490 - RNA, 19 nt, Human
gccccgaggccuggaggcg

SEQ ID NO: 970491 - RNA, 19 nt, Human
gccuccaaacccaucuccu

SEQ ID NO: 970492 - RNA, 24 nt, Human
gcucuggggccuaggaagcaggau

SEQ ID NO: 970493 - RNA, 21 nt, Human
ggaggcugaggcaggagaauc

SEQ ID NO: 970494 - RNA, 20 nt, Human
ggagguugcagugagccaag

SEQ ID NO: 970495 - RNA, 24 nt, Human
ggagguugcagugagccaagauca

SEQ ID NO: 970496 - RNA, 23 nt, Human
ggccuguaauccuagcacucugg

SEQ ID NO: 970497 - RNA, 20 nt, Human
ggcgugcugggggcgcugag

SEQ ID NO: 970498 - RNA, 23 nt, Human
gggcaggggccacucccaaaaga

SEQ ID NO: 970499 - RNA, 21 nt, Human
ggguccaaaggagggaccugg

SEQ ID NO: 970500 - RNA, 24 nt, Human
gggugugguggcacgcgccuguaa

SEQ ID NO: 970501 - RNA, 24 nt, Human
gguggcacgcgccuguaaucccag

SEQ ID NO: 970502 - RNA, 24 nt, Human
guaaaaaaagagacuucccccuuc

SEQ ID NO: 970503 - RNA, 18 nt, Human
gucagaguugcuggugaa

SEQ ID NO: 970504 - RNA, 19 nt, Human
gucccuccugcccugcccu

SEQ ID NO: 970505 - RNA, 26 nt, Human
gucccuuccuuacaugaucugcaguc

SEQ ID NO: 970506 - RNA, 22 nt, Human
gugauacaaaaacacuccccac

SEQ ID NO: 970507 - RNA, 25 nt, Human
guuaauuuuuguguguauaaauuuu

SEQ ID NO: 970508 - RNA, 24 nt, Human
uaaaaaaagagacuucccccuucc

SEQ ID NO: 970509 - RNA, 21 nt, Human
uacaaacaagacauacuuuaa

SEQ ID NO: 970510 - RNA, 19 nt, Human
uacacuagugaggaagaca

SEQ ID NO: 970511 - RNA, 22 nt, Human
uacacuagugaggaagacaaaa

SEQ ID NO: 970512 - RNA, 22 nt, Human
uacagagauaaaggguauguuu

SEQ ID NO: 970513 - RNA, 21 nt, Human
uagaaaagaugauauccucau

SEQ ID NO: 970514 - RNA, 21 nt, Human
uagaacugaggccucccguca

SEQ ID NO: 970515 - RNA, 24 nt, Human
uagcacucugggaggcugaggugg

SEQ ID NO: 970516 - RNA, 20 nt, Human
uagcugggugugguggcacg

SEQ ID NO: 970517 - RNA, 21 nt, Human
uaggaagcaggaugcuggaga

SEQ ID NO: 970518 - RNA, 18 nt, Human
uaugugcacgcauggaug

SEQ ID NO: 970519 - RNA, 21 nt, Human
ucaacaaacaauaaaucaagc

SEQ ID NO: 970520 - RNA, 18 nt, Human
ucauuuggauuuaggggu

SEQ ID NO: 970521 - RNA, 25 nt, Human
uccaaacccaucuccuuuccgcaaa

SEQ ID NO: 970522 - RNA, 19 nt, Human
uccagcacaucacuggaua

SEQ ID NO: 970523 - RNA, 20 nt, Human
uccagcacaucacuggauac

SEQ ID NO: 970524 - RNA, 19 nt, Human
ucccaaaagaccagcugga

SEQ ID NO: 970525 - RNA, 18 nt, Human
uccccaacgccgcugccg

SEQ ID NO: 970526 - RNA, 22 nt, Human
uccucaagaaccuucagggccu

SEQ ID NO: 970527 - RNA, 23 nt, Human
uccugaaaauguagcaaccagcu

SEQ ID NO: 970528 - RNA, 21 nt, Human
ucuagaaaaucaacaaacaau

SEQ ID NO: 970529 - RNA, 23 nt, Human
ucuccccuaggucuccauaagag

SEQ ID NO: 970530 - RNA, 23 nt, Human
ucuucauucuccccagcaucugg

SEQ ID NO: 970531 - RNA, 22 nt, Human
ugaaacccaaaaugaagaauug

SEQ ID NO: 970532 - RNA, 18 nt, Human
ugaaugucagaacuccuu

SEQ ID NO: 970533 - RNA, 21 nt, Human
ugacaguguucaacuacugga

SEQ ID NO: 970534 - RNA, 19 nt, Human
ugaggaaacugagguucag

SEQ ID NO: 970535 - RNA, 23 nt, Human
ugaggaaacugagguucagggag

SEQ ID NO: 970536 - RNA, 20 nt, Human
ugaggcaggagaaucgcuug

SEQ ID NO: 970537 - RNA, 24 nt, Human
ugaggcaggagaaucgcuugaacc

SEQ ID NO: 970538 - RNA, 25 nt, Human
ugaggcaggagaaucgcuugaaccc

SEQ ID NO: 970539 - RNA, 21 nt, Human
ugagguggguggaucacuuga

SEQ ID NO: 970540 - RNA, 22 nt, Human
ugagguggguggaucacuugag

SEQ ID NO: 970541 - RNA, 23 nt, Human
ugagguggguggaucacuugagc

SEQ ID NO: 970542 - RNA, 24 nt, Human
ugagguggguggaucacuugagcu

SEQ ID NO: 970543 - RNA, 18 nt, Human
ugaguggggaaucaggaa

SEQ ID NO: 970544 - RNA, 21 nt, Human
ugcccugcccucccgcgcgca

SEQ ID NO: 970545 - RNA, 23 nt, Human
ugcccugcccucccgcgcgcagc

SEQ ID NO: 970546 - RNA, 25 nt, Human
ugcugggggcgcugaggggccgggc

SEQ ID NO: 970547 - RNA, 23 nt, Human
uggaccagcuggggacccuccug

SEQ ID NO: 970548 - RNA, 24 nt, Human
uggaucacuugagcucaggaguuc

SEQ ID NO: 970549 - RNA, 19 nt, Human
uggcaaagccagcuccagc

SEQ ID NO: 970550 - RNA, 21 nt, Human
uggcacgcgccuguaauccca

SEQ ID NO: 970551 - RNA, 21 nt, Human
uggccuccaaacccaucuccu

SEQ ID NO: 970552 - RNA, 20 nt, Human
ugggaggcugaggugggugg

SEQ ID NO: 970553 - RNA, 23 nt, Human
ugggaggcugagguggguggauc

SEQ ID NO: 970554 - RNA, 24 nt, Human
ugggaggcugagguggguggauca

SEQ ID NO: 970555 - RNA, 24 nt, Human
ugguggcacgcgccuguaauccca

SEQ ID NO: 970556 - RNA, 27 nt, Human
uguaaaaauccugaaaauguagcaacc

SEQ ID NO: 970557 - RNA, 21 nt, Human
ugucauugaguggggaaucag

SEQ ID NO: 970558 - RNA, 23 nt, Human
ugugcacgcauggaugacaaagc

SEQ ID NO: 970559 - RNA, 23 nt, Human
uuagaaaagaugauauccucauu

SEQ ID NO: 970560 - RNA, 18 nt, Human
uuagcugggugugguggc

SEQ ID NO: 970561 - RNA, 20 nt, Human
uuagcugggugugguggcac

SEQ ID NO: 970562 - RNA, 22 nt, Human
uuagcugggugugguggcacgc

SEQ ID NO: 970563 - RNA, 22 nt, Human
uucaacuacuggaagaauaauc

SEQ ID NO: 970564 - RNA, 19 nt, Human
uucccaggcccuggaccag

SEQ ID NO: 970565 - RNA, 18 nt, Human
uugcagugagccaagauc

SEQ ID NO: 970566 - RNA, 21 nt, Human
uuucccaggcccuggaccagc

SEQ ID NO: 970567 - RNA, 24 nt, Human
uuucccaggcccuggaccagcugg

SEQ ID NO: 970568 - RNA, 20 nt, Human
uuuccgcaaagccauccugc

SEQ ID NO: 970569 - RNA, 19 nt, Human
uuugagcagcugucagcug

SEQ ID NO: 970570 - RNA, 20 nt, Human
uuugccaaaccuuguaucca

SEQ ID NO: 970571 - RNA, 22 nt, Human
uuugccaaaccuuguauccaaa

SEQ ID NO: 970572 - RNA, 18 nt, Human
uuuuuuuuuugccaaacc

SEQ ID NO: 970573 - RNA, 18 nt, Human
aaagugcugggauuacag

SEQ ID NO: 970574 - RNA, 24 nt, Human
aaagugcugggauuacagucauga

SEQ ID NO: 970575 - RNA, 26 nt, Human
aagugcugggauuacagucaugagcu

SEQ ID NO: 970576 - RNA, 19 nt, Human
aaugaggaaugcaggaggg

SEQ ID NO: 970577 - RNA, 24 nt, Human
accauugauugcuaagcaccugga

SEQ ID NO: 970578 - RNA, 23 nt, Human
aggaaugcaggagggagugagga

SEQ ID NO: 970579 - RNA, 22 nt, Human
aggagggagugaggaccagggc

SEQ ID NO: 970580 - RNA, 21 nt, Human
aggcugguuucaaacucuggc

SEQ ID NO: 970581 - RNA, 24 nt, Human
agugcugggauuacagucaugagc

SEQ ID NO: 970582 - RNA, 21 nt, Human
caaagggugcucaauaaacac

SEQ ID NO: 970583 - RNA, 22 nt, Human
caaagugcugggauuacaguca

SEQ ID NO: 970584 - RNA, 24 nt, Human
cacuauguuaccuaggcugguuuc

SEQ ID NO: 970585 - RNA, 22 nt, Human
cagggcccuggcaggaagcaga

SEQ ID NO: 970586 - RNA, 18 nt, Human
caugagcugccacaacca

SEQ ID NO: 970587 - RNA, 21 nt, Human
ccaaagugcugggauuacagu

SEQ ID NO: 970588 - RNA, 24 nt, Human
ccaaagugcugggauuacagucau

SEQ ID NO: 970589 - RNA, 19 nt, Human
ccagggcccuggcaggaag

SEQ ID NO: 970590 - RNA, 26 nt, Human
ccucccaccuuggccucccaaagugc

SEQ ID NO: 970591 - RNA, 20 nt, Human
ccucugccgcagcacugagg

SEQ ID NO: 970592 - RNA, 22 nt, Human
ccucugccgcagcacugaggcu

SEQ ID NO: 970593 - RNA, 24 nt, Human
cucaauugauccucccaccuuggc

SEQ ID NO: 970594 - RNA, 24 nt, Human
cucugccgcagcacugaggcugaa

SEQ ID NO: 970595 - RNA, 18 nt, Human
gauuacagucaugagcug

SEQ ID NO: 970596 - RNA, 19 nt, Human
gauuacagucaugagcugc

SEQ ID NO: 970597 - RNA, 19 nt, Human
gauuacagucaugagcugc

SEQ ID NO: 970598 - RNA, 19 nt, Human
ggagggagugaggaccagg

SEQ ID NO: 970599 - RNA, 24 nt, Human
gggggucucacuauguuaccuagg

SEQ ID NO: 970600 - RNA, 18 nt, Human
gguaggagaaccggucuc

SEQ ID NO: 970601 - RNA, 19 nt, Human
gguaggagaaccggucucg

SEQ ID NO: 970602 - RNA, 21 nt, Human
gugcguccugggcagagcgag

SEQ ID NO: 970603 - RNA, 19 nt, Human
gugcugggauuacagucau

SEQ ID NO: 970604 - RNA, 20 nt, Human
uaccuuuagccuggaauacc

SEQ ID NO: 970605 - RNA, 19 nt, Human
uagcuggcuuuggcucugg

SEQ ID NO: 970606 - RNA, 23 nt, Human
uauguuaccuaggcugguuucaa

SEQ ID NO: 970607 - RNA, 24 nt, Human
uauguuaccuaggcugguuucaaa

SEQ ID NO: 970608 - RNA, 25 nt, Human
ucaauugauccucccaccuuggccu

SEQ ID NO: 970609 - RNA, 22 nt, Human
ucccaaagugcugggauuacag

SEQ ID NO: 970610 - RNA, 23 nt, Human
uccugggcagagcgagagacuug

SEQ ID NO: 970611 - RNA, 23 nt, Human
ucucacuauguuaccuaggcugg

SEQ ID NO: 970612 - RNA, 24 nt, Human
ucucacuauguuaccuaggcuggu

SEQ ID NO: 970613 - RNA, 24 nt, Human
ugagcugccacaaccagccuguaa

SEQ ID NO: 970614 - RNA, 18 nt, Human
ugaggaccagggcccugg

SEQ ID NO: 970615 - RNA, 26 nt, Human
ugcggguaggagaaccggucucgggu

SEQ ID NO: 970616 - RNA, 18 nt, Human
ugcguccugggcagagcg

SEQ ID NO: 970617 - RNA, 22 nt, Human
uggcaggaagcagaggacagga

SEQ ID NO: 970618 - RNA, 22 nt, Human
ugggauuacagucaugagcugc

SEQ ID NO: 970619 - RNA, 23 nt, Human
ugggauuacagucaugagcugcc

SEQ ID NO: 970620 - RNA, 24 nt, Human
ugggauuacagucaugagcugcca

SEQ ID NO: 970621 - RNA, 23 nt, Human
uugcuaagcaccuggagccaugu

SEQ ID NO: 970622 - RNA, 18 nt, Human
uuggccucccaaagugcu

SEQ ID NO: 970623 - RNA, 20 nt, Human
uuggcucuggccaccccuuu

SEQ ID NO: 970624 - RNA, 21 nt, Human
aaaccaguuccaugacacuga

SEQ ID NO: 970625 - RNA, 21 nt, Human
aaacuucgggcaaagcuaaug

SEQ ID NO: 970626 - RNA, 19 nt, Human
aaaggcugcucugugaaga

SEQ ID NO: 970627 - RNA, 22 nt, Human
aagaguguggggaaaaacuucg

SEQ ID NO: 970628 - RNA, 22 nt, Human
accaaaccgccccgaccacccc

SEQ ID NO: 970629 - RNA, 20 nt, Human
acccucauguccagaccacu

SEQ ID NO: 970630 - RNA, 24 nt, Human
acugaaaagagagcacaggagucg

SEQ ID NO: 970631 - RNA, 26 nt, Human
agaaaaagagaucacuuaggaccuug

SEQ ID NO: 970632 - RNA, 21 nt, Human
agaaacuguacccucaugucc

SEQ ID NO: 970633 - RNA, 21 nt, Human
auacuuguugaauguaacuag

SEQ ID NO: 970634 - RNA, 21 nt, Human
augacacugaaaagagagcac

SEQ ID NO: 970635 - RNA, 22 nt, Human
augcauugguccaaagacaccc

SEQ ID NO: 970636 - RNA, 23 nt, Human
caccaaaccgccccgaccacccc

SEQ ID NO: 970637 - RNA, 19 nt, Human
cacguagaaguuacagccg

SEQ ID NO: 970638 - RNA, 22 nt, Human
cauaauagcaugcuaaagaaga

SEQ ID NO: 970639 - RNA, 20 nt, Human
ccacuaaaauccuagccagg

SEQ ID NO: 970640 - RNA, 21 nt, Human
ccaggaguggucacuuucccc

SEQ ID NO: 970641 - RNA, 25 nt, Human
ccccgaccacccccgcucccaggag

SEQ ID NO: 970642 - RNA, 27 nt, Human
ccccgccaccaaaccgccccgaccacc

SEQ ID NO: 970643 - RNA, 20 nt, Human
ccgaccacccccgcucccag

SEQ ID NO: 970644 - RNA, 23 nt, Human
ccugcucagaaaaagagaucacu

SEQ ID NO: 970645 - RNA, 18 nt, Human
cugcauaauaaagcugcg

SEQ ID NO: 970646 - RNA, 27 nt, Human
gauuaaaggcugucuuuaaccuugugg

SEQ ID NO: 970647 - RNA, 18 nt, Human
gcauugguccaaagacac

SEQ ID NO: 970648 - RNA, 22 nt, Human
gccccgaccacccccgcuccca

SEQ ID NO: 970649 - RNA, 18 nt, Human
gcuaaagaagaguguggg

SEQ ID NO: 970650 - RNA, 19 nt, Human
ggcggagguugaugucuuc

SEQ ID NO: 970651 - RNA, 18 nt, Human
guugaugucuucacuagg

SEQ ID NO: 970652 - RNA, 20 nt, Human
uaaagcugcgacuggccucc

SEQ ID NO: 970653 - RNA, 19 nt, Human
uaacaugaaauucauaaaa

SEQ ID NO: 970654 - RNA, 23 nt, Human
uaaccugauauccugcucagaaa

SEQ ID NO: 970655 - RNA, 20 nt, Human
uagcaugcuaaagaagagug

SEQ ID NO: 970656 - RNA, 25 nt, Human
uaggcagaaacuguacccucauguc

SEQ ID NO: 970657 - RNA, 21 nt, Human
uaugcauugguccaaagacac

SEQ ID NO: 970658 - RNA, 19 nt, Human
uauuucacaauauuaacau

SEQ ID NO: 970659 - RNA, 19 nt, Human
uccaaagacacccuccuaa

SEQ ID NO: 970660 - RNA, 21 nt, Human
ucccaggaguggucacuuucc

SEQ ID NO: 970661 - RNA, 26 nt, Human
uccccauaauagcaugcuaaagaaga

SEQ ID NO: 970662 - RNA, 23 nt, Human
uccccgccaccaaaccgccccga

SEQ ID NO: 970663 - RNA, 23 nt, Human
ucuggggaggagggggauuaaag

SEQ ID NO: 970664 - RNA, 22 nt, Human
ugaagaagguagaaaguauuaa

SEQ ID NO: 970665 - RNA, 19 nt, Human
uggggaaaaacuucgggca

SEQ ID NO: 970666 - RNA, 24 nt, Human
uggggaggagggggauuaaaggcu

SEQ ID NO: 970667 - RNA, 21 nt, Human
ugguaggcagaaacuguaccc

SEQ ID NO: 970668 - RNA, 21 nt, Human
uguccagaccacuuguguguc

SEQ ID NO: 970669 - RNA, 25 nt, Human
uguccagaccacuugugugucccaa

SEQ ID NO: 970670 - RNA, 23 nt, Human
uuaaggcggagguugaugucuuc

SEQ ID NO: 970671 - RNA, 22 nt, Human
uuuuuuuuuaaccugauauccu

SEQ ID NO: 970672 - RNA, 20 nt, Human
aaaaaaagacaaguacaauu

SEQ ID NO: 970673 - RNA, 23 nt, Human
aaacaaaaauauggaauccaaag

SEQ ID NO: 970674 - RNA, 21 nt, Human
aaacaaacaccaauaacagca

SEQ ID NO: 970675 - RNA, 18 nt, Human
aaauauaugagcagcuga

SEQ ID NO: 970676 - RNA, 20 nt, Human
aacacccuuggaccaucucc

SEQ ID NO: 970677 - RNA, 25 nt, Human
aaccaauuuggaacccauaaaaacc

SEQ ID NO: 970678 - RNA, 19 nt, Human
aacccauaaaaaccuuuaa

SEQ ID NO: 970679 - RNA, 18 nt, Human
aagaaaaacacagagaca

SEQ ID NO: 970680 - RNA, 22 nt, Human
aagaaaaacacagagacaaauc

SEQ ID NO: 970681 - RNA, 24 nt, Human
aauaaaaaguuaagaaaaaagucc

SEQ ID NO: 970682 - RNA, 24 nt, Human
acagaacacccuuggaccaucucc

SEQ ID NO: 970683 - RNA, 21 nt, Human
acagcugugcccuuguaggag

SEQ ID NO: 970684 - RNA, 19 nt, Human
acucuguugccacuaauaa

SEQ ID NO: 970685 - RNA, 20 nt, Human
agaaacaaaaauauggaauc

SEQ ID NO: 970686 - RNA, 18 nt, Human
agaagcagggcagugaag

SEQ ID NO: 970687 - RNA, 20 nt, Human
agcuauguauguaacacaaa

SEQ ID NO: 970688 - RNA, 20 nt, Human
aggacuccaaggccaaugag

SEQ ID NO: 970689 - RNA, 18 nt, Human
agggcaggggcccggggc

SEQ ID NO: 970690 - RNA, 22 nt, Human
aguaugaaaacaacccgacaga

SEQ ID NO: 970691 - RNA, 23 nt, Human
aucucuguaaauauuuuuuaaaa

SEQ ID NO: 970692 - RNA, 19 nt, Human
auugcuguucuucuccccc

SEQ ID NO: 970693 - RNA, 23 nt, Human
auuuccuuccucuuuuuuguuuc

SEQ ID NO: 970694 - RNA, 24 nt, Human
caaaauaguaggacuccaaggcca

SEQ ID NO: 970695 - RNA, 26 nt, Human
caauaacagcaggauuauuucugcca

SEQ ID NO: 970696 - RNA, 24 nt, Human
caccaauaacagcaggauuauuuc

SEQ ID NO: 970697 - RNA, 20 nt, Human
cacugaugcaaaaaaaggaa

SEQ ID NO: 970698 - RNA, 21 nt, Human
cagauuagaagcagggcagug

SEQ ID NO: 970699 - RNA, 22 nt, Human
caucaugguuguaucuuccucc

SEQ ID NO: 970700 - RNA, 18 nt, Human
ccacugauuuccuuccuc

SEQ ID NO: 970701 - RNA, 21 nt, Human
cugccacugauuuccuuccuc

SEQ ID NO: 970702 - RNA, 27 nt, Human
cuuuuuuguuucaaaaauuauuguuug

SEQ ID NO: 970703 - RNA, 19 nt, Human
gaugaaagcuuacauggaa

SEQ ID NO: 970704 - RNA, 19 nt, Human
ggaaguaugaaaacaaccc

SEQ ID NO: 970705 - RNA, 19 nt, Human
ggggacgcggcuccgcggg

SEQ ID NO: 970706 - RNA, 18 nt, Human
guaggaaaacugagggcc

SEQ ID NO: 970707 - RNA, 19 nt, Human
uaaauucucaggaaaauga

SEQ ID NO: 970708 - RNA, 24 nt, Human
uaacuaaauauaugagcagcugaa

SEQ ID NO: 970709 - RNA, 18 nt, Human
uaagaaaaacacagagac

SEQ ID NO: 970710 - RNA, 20 nt, Human
uaauaugugacauuucccuu

SEQ ID NO: 970711 - RNA, 24 nt, Human
uaccacugaagucacuggguacaa

SEQ ID NO: 970712 - RNA, 21 nt, Human
uaccuaagugacuaaccaauu

SEQ ID NO: 970713 - RNA, 24 nt, Human
uaggaagagcuaauaaaaaguuaa

SEQ ID NO: 970714 - RNA, 23 nt, Human
uagggcaggggcccggggcugcc

SEQ ID NO: 970715 - RNA, 22 nt, Human
uaucacugaugcaaaaaaagga

SEQ ID NO: 970716 - RNA, 25 nt, Human
uaucacugaugcaaaaaaaggaagu

SEQ ID NO: 970717 - RNA, 23 nt, Human
ucucaaaacuuccuagcucaucu

SEQ ID NO: 970718 - RNA, 25 nt, Human
ucugaauuggagagaaaccgggguc

SEQ ID NO: 970719 - RNA, 25 nt, Human
ugcaaaaaaaggaaguaugaaaaca

SEQ ID NO: 970720 - RNA, 31 nt, Human
ugcaaaauaaaaacgaguuuaugcucuuaaa

SEQ ID NO: 970721 - RNA, 19 nt, Human
ugccuugcgggacauaggg

SEQ ID NO: 970722 - RNA, 26 nt, Human
ugccuugcgggacauagggcaggggc

SEQ ID NO: 970723 - RNA, 21 nt, Human
uggaaagaaccagauuagaag

SEQ ID NO: 970724 - RNA, 23 nt, Human
uggaaagaaccagauuagaagca

SEQ ID NO: 970725 - RNA, 22 nt, Human
ugggcaugaacaaaaacugacc

SEQ ID NO: 970726 - RNA, 18 nt, Human
uuggaauuuguugaugaa

SEQ ID NO: 970727 - RNA, 21 nt, Human
uuguaucuuccuccuaaucaa

SEQ ID NO: 970728 - RNA, 18 nt, Human
uuucauaauguucaaaag

SEQ ID NO: 970729 - RNA, 20 nt, Human
uuuguugaugaaagcuuaca

SEQ ID NO: 970730 - RNA, 19 nt, Human
aaaaaccucaaaucuuuaa

SEQ ID NO: 970731 - RNA, 19 nt, Human
aaacaaacaugguaaaaac

SEQ ID NO: 970732 - RNA, 23 nt, Human
aaacagccccagggcccgagagc

SEQ ID NO: 970733 - RNA, 23 nt, Human
aaagugcaucgggacuggccccc

SEQ ID NO: 970734 - RNA, 20 nt, Human
aacaugguaaaaacagcccu

SEQ ID NO: 970735 - RNA, 23 nt, Human
aagcugguuucuuucgugacaca

SEQ ID NO: 970736 - RNA, 22 nt, Human
agacaccugagcuucaaaaaca

SEQ ID NO: 970737 - RNA, 23 nt, Human
aggcacuuugaguggugggaccc

SEQ ID NO: 970738 - RNA, 20 nt, Human
caaagcugggcccauaacac

SEQ ID NO: 970739 - RNA, 22 nt, Human
caccugagcuucaaaaacaaac

SEQ ID NO: 970740 - RNA, 20 nt, Human
cagccccgcccccccacccc

SEQ ID NO: 970741 - RNA, 21 nt, Human
cagccccgcccccccacccca

SEQ ID NO: 970742 - RNA, 23 nt, Human
cagccccgcccccccaccccaag

SEQ ID NO: 970743 - RNA, 19 nt, Human
cagggucagccccgccccc

SEQ ID NO: 970744 - RNA, 23 nt, Human
ccaccccaaguaaaagcagaccc

SEQ ID NO: 970745 - RNA, 18 nt, Human
cccccaaagcugggccca

SEQ ID NO: 970746 - RNA, 22 nt, Human
cccccaaagcugggcccauaag

SEQ ID NO: 970747 - RNA, 19 nt, Human
cccccagggcccuuggggc

SEQ ID NO: 970748 - RNA, 21 nt, Human
cccccccaccccaaguaaaag

SEQ ID NO: 970749 - RNA, 24 nt, Human
cccccccaccccaaguaaaagcag

SEQ ID NO: 970750 - RNA, 20 nt, Human
ccccgcccccccaccccaag

SEQ ID NO: 970751 - RNA, 22 nt, Human
ccccgcccccccaccccaagua

SEQ ID NO: 970752 - RNA, 24 nt, Human
ccccgcccccccaccccaaguaaa

SEQ ID NO: 970753 - RNA, 20 nt, Human
ccccgggccuggaggggggg

SEQ ID NO: 970754 - RNA, 22 nt, Human
ccccucuccaacaccccucaaa

SEQ ID NO: 970755 - RNA, 21 nt, Human
ccccuggggcuguccucgggc

SEQ ID NO: 970756 - RNA, 19 nt, Human
ccucgggcuguuucagccc

SEQ ID NO: 970757 - RNA, 19 nt, Human
cgcccccccaccccaagua

SEQ ID NO: 970758 - RNA, 23 nt, Human
cgggaggguggcugcccccaggg

SEQ ID NO: 970759 - RNA, 18 nt, Human
gacagcggugugguuugg

SEQ ID NO: 970760 - RNA, 24 nt, Human
gaggggguggggagggagaaggug

SEQ ID NO: 970761 - RNA, 18 nt, Human
gccccgcccccccacccc

SEQ ID NO: 970762 - RNA, 23 nt, Human
gcccuuggggcuaaggggacagc

SEQ ID NO: 970763 - RNA, 19 nt, Human
ggacagcggugugguuugg

SEQ ID NO: 970764 - RNA, 22 nt, Human
ggaggguucagggucagccccg

SEQ ID NO: 970765 - RNA, 21 nt, Human
ggaguccccucuccaacaccc

SEQ ID NO: 970766 - RNA, 19 nt, Human
ggggguggggagggagaag

SEQ ID NO: 970767 - RNA, 19 nt, Human
gggguggggagggagaagg

SEQ ID NO: 970768 - RNA, 24 nt, Human
guaaaaacagccccagggcccgag

SEQ ID NO: 970769 - RNA, 23 nt, Human
gugcagcccagacgugagacacc

SEQ ID NO: 970770 - RNA, 20 nt, Human
uaaaaacagccccagggccc

SEQ ID NO: 970771 - RNA, 19 nt, Human
uaaaagcagacccugcagc

SEQ ID NO: 970772 - RNA, 24 nt, Human
ucaaaaacaaacaugguaaaaaca

SEQ ID NO: 970773 - RNA, 23 nt, Human
uccaacaccccucaaagugcauc

SEQ ID NO: 970774 - RNA, 20 nt, Human
ugagacaccugagcuucaaa

SEQ ID NO: 970775 - RNA, 23 nt, Human
uggaaaaaccucaaaucuuuaau

SEQ ID NO: 970776 - RNA, 21 nt, Human
uggcugcccccagggcccuug

SEQ ID NO: 970777 - RNA, 23 nt, Human
uggcugcccccagggcccuuggg

SEQ ID NO: 970778 - RNA, 23 nt, Human
uggcugcccccagggcccuuggg

SEQ ID NO: 970779 - RNA, 18 nt, Human
uggggagggagaaggugg

SEQ ID NO: 970780 - RNA, 21 nt, Human
uugaguggugggaccccuccc

SEQ ID NO: 970781 - RNA, 24 nt, Human
uuuuuuuuuucuggaaaaaccuca

SEQ ID NO: 970782 - RNA, 18 nt, Human
uuuuuuuuuuuuuuucug

SEQ ID NO: 970783 - RNA, 21 nt, Human
agggaccccagacucugccaa

SEQ ID NO: 970784 - RNA, 23 nt, Human
ccagggaccccagacucugccaa

SEQ ID NO: 970785 - RNA, 24 nt, Human
ccagggaccccagacucugccaag

SEQ ID NO: 970786 - RNA, 18 nt, Human
ggcucaguccagggaccc

SEQ ID NO: 970787 - RNA, 20 nt, Human
ucaauucauuuaagcuuccc

SEQ ID NO: 970788 - RNA, 18 nt, Human
ugcauagcuucaauucau

SEQ ID NO: 970789 - RNA, 24 nt, Human
uuuaagcuucccaauaauggguaa

SEQ ID NO: 970790 - RNA, 20 nt, Human
aaaaaacuuaguuugucaac

SEQ ID NO: 970791 - RNA, 22 nt, Human
aaccaucuuuucaucuaaucug

SEQ ID NO: 970792 - RNA, 19 nt, Human
aauggcuuugguuggauug

SEQ ID NO: 970793 - RNA, 19 nt, Human
acaaagcaggagagcugag

SEQ ID NO: 970794 - RNA, 19 nt, Human
acaaagcaggagagcugag

SEQ ID NO: 970795 - RNA, 22 nt, Human
acccugccaccccuguuaucuc

SEQ ID NO: 970796 - RNA, 19 nt, Human
agaaagggcaguuggaagu

SEQ ID NO: 970797 - RNA, 18 nt, Human
agaaaggugagaaaaagg

SEQ ID NO: 970798 - RNA, 20 nt, Human
agaagaaagggcaguuggaa

SEQ ID NO: 970799 - RNA, 23 nt, Human
agagagucccaucuaacucaaaa

SEQ ID NO: 970800 - RNA, 21 nt, Human
agagucccaucuaacucaaaa

SEQ ID NO: 970801 - RNA, 21 nt, Human
agccaucagaagaaagggcag

SEQ ID NO: 970802 - RNA, 21 nt, Human
aggcagaaaggugagaaaaag

SEQ ID NO: 970803 - RNA, 18 nt, Human
aggcagugccuucuggug

SEQ ID NO: 970804 - RNA, 21 nt, Human
agggagcaagugcuggcuuca

SEQ ID NO: 970805 - RNA, 18 nt, Human
agggcgggcgccagggcc

SEQ ID NO: 970806 - RNA, 19 nt, Human
auggcuuccgaacuccagg

SEQ ID NO: 970807 - RNA, 24 nt, Human
auuaaaaauuuuuuuguaugaaug

SEQ ID NO: 970808 - RNA, 25 nt, Human
caagaacccuucucccuggcuugaa

SEQ ID NO: 970809 - RNA, 19 nt, Human
cacagcagcugucuuaaga

SEQ ID NO: 970810 - RNA, 20 nt, Human
cacagcagcugucuuaagac

SEQ ID NO: 970811 - RNA, 18 nt, Human
caccaagaacccuucucc

SEQ ID NO: 970812 - RNA, 18 nt, Human
caggagccugaaagcagu

SEQ ID NO: 970813 - RNA, 19 nt, Human
cagggcgggcgccagggcc

SEQ ID NO: 970814 - RNA, 23 nt, Human
cagucuaucagagaauaaaccag

SEQ ID NO: 970815 - RNA, 19 nt, Human
cagugauuuucucucuuuc

SEQ ID NO: 970816 - RNA, 22 nt, Human
ccaagaaagggaaauaggucuc

SEQ ID NO: 970817 - RNA, 19 nt, Human
ccagacacccacggccauc

SEQ ID NO: 970818 - RNA, 31 nt, Human
ccauccaucaugaaucaaugaaaucauuucc

SEQ ID NO: 970819 - RNA, 24 nt, Human
ccaugucccuccagccucagugcc

SEQ ID NO: 970820 - RNA, 23 nt, Human
cccugcaucaccaagaacccuuc

SEQ ID NO: 970821 - RNA, 24 nt, Human
ccuuuggucacagcagcugucuua

SEQ ID NO: 970822 - RNA, 20 nt, Human
cgccagggccgcgucugcuc

SEQ ID NO: 970823 - RNA, 22 nt, Human
cuccagccucagugccugcacg

SEQ ID NO: 970824 - RNA, 18 nt, Human
gcagaaaggugagaaaaa

SEQ ID NO: 970825 - RNA, 21 nt, Human
gcuccaugucccuccagccuc

SEQ ID NO: 970826 - RNA, 24 nt, Human
ggcacaaagcaggagagcugaggg

SEQ ID NO: 970827 - RNA, 21 nt, Human
gggcuccaugucccuccagcc

SEQ ID NO: 970828 - RNA, 20 nt, Human
uaaaccaggagccugaaagc

SEQ ID NO: 970829 - RNA, 18 nt, Human
uaaggcacaaagcaggag

SEQ ID NO: 970830 - RNA, 18 nt, Human
uaagguggaggaauagcc

SEQ ID NO: 970831 - RNA, 19 nt, Human
uagcuuggucucugucccu

SEQ ID NO: 970832 - RNA, 22 nt, Human
ucaaagacagaagaggucagga

SEQ ID NO: 970833 - RNA, 24 nt, Human
uccagagagucccaucuaacucaa

SEQ ID NO: 970834 - RNA, 21 nt, Human
uccagggagcaagugcuggcc

SEQ ID NO: 970835 - RNA, 20 nt, Human
ucccaaagcuuacaaccauc

SEQ ID NO: 970836 - RNA, 29 nt, Human
ucccucaaagacagaagaggucaggaagu

SEQ ID NO: 970837 - RNA, 19 nt, Human
ucuagcuuggucucugucc

SEQ ID NO: 970838 - RNA, 18 nt, Human
ugauuuucucucuuuccu

SEQ ID NO: 970839 - RNA, 20 nt, Human
ugcccugcaucaccaagaac

SEQ ID NO: 970840 - RNA, 22 nt, Human
ugccugggcccuacguaggcug

SEQ ID NO: 970841 - RNA, 20 nt, Human
ugcgcagggcgggcgccagg

SEQ ID NO: 970842 - RNA, 20 nt, Human
ugcuggcuucagcucaaagu

SEQ ID NO: 970843 - RNA, 20 nt, Human
uggaagagggggcuccaugu

SEQ ID NO: 970844 - RNA, 25 nt, Human
uggaaguauagugucuggaagaggg

SEQ ID NO: 970845 - RNA, 19 nt, Human
uggcuuugguuggauugca

SEQ ID NO: 970846 - RNA, 19 nt, Human
uucaacuauccagagaguc

SEQ ID NO: 970847 - RNA, 24 nt, Human
uucaacuauccagagagucccauc

SEQ ID NO: 970848 - RNA, 18 nt, Human
uuccaggggcugggaaua

SEQ ID NO: 970849 - RNA, 22 nt, Human
uuccugguuugagucacagaga

SEQ ID NO: 970850 - RNA, 19 nt, Human
uugaggccacgaagagcuu

SEQ ID NO: 970851 - RNA, 24 nt, Human
uugccaacuaggaguucaauggga

SEQ ID NO: 970852 - RNA, 22 nt, Human
acacacaccgacacucucacac

SEQ ID NO: 970853 - RNA, 20 nt, Human
acucacccccacacaugcac

SEQ ID NO: 970854 - RNA, 22 nt, Human
agacuggcacccaggguggcac

SEQ ID NO: 970855 - RNA, 19 nt, Human
agcccagagcuuugcggag

SEQ ID NO: 970856 - RNA, 20 nt, Human
aggcaccaacaucuaugcac

SEQ ID NO: 970857 - RNA, 21 nt, Human
auacccagauauccugcagcc

SEQ ID NO: 970858 - RNA, 24 nt, Human
cacaagcccagagcuuugcggagc

SEQ ID NO: 970859 - RNA, 18 nt, Human
cacacaugcacacacacc

SEQ ID NO: 970860 - RNA, 24 nt, Human
cacacaugcacacacaccgacacu

SEQ ID NO: 970861 - RNA, 19 nt, Human
cacacccucccuccccuga

SEQ ID NO: 970862 - RNA, 19 nt, Human
caccaggccuuccccauuc

SEQ ID NO: 970863 - RNA, 18 nt, Human
cacccuuacuccugccua

SEQ ID NO: 970864 - RNA, 24 nt, Human
cagucauauacccagacccacccu

SEQ ID NO: 970865 - RNA, 22 nt, Human
cauacccagauauccugcagcc

SEQ ID NO: 970866 - RNA, 21 nt, Human
ccccacacaugcacacacacc

SEQ ID NO: 970867 - RNA, 24 nt, Human
ccuuuccacaccaggccuucccca

SEQ ID NO: 970868 - RNA, 22 nt, Human
cuccugccuauccuagucaugu

SEQ ID NO: 970869 - RNA, 21 nt, Human
gaggucugcaggucagugggu

SEQ ID NO: 970870 - RNA, 24 nt, Human
gcaaggaggugugcaaauucagua

SEQ ID NO: 970871 - RNA, 21 nt, Human
gcacaccuguacacaaauaca

SEQ ID NO: 970872 - RNA, 20 nt, Human
gccugcacacagccucccac

SEQ ID NO: 970873 - RNA, 19 nt, Human
ggaagggaauuaauugugg

SEQ ID NO: 970874 - RNA, 19 nt, Human
uaacgcaggcaccaacauc

SEQ ID NO: 970875 - RNA, 22 nt, Human
uauccugcagccugcacacagc

SEQ ID NO: 970876 - RNA, 19 nt, Human
uaugcacaaacagcugcac

SEQ ID NO: 970877 - RNA, 20 nt, Human
uaugcacaaacagcugcaca

SEQ ID NO: 970878 - RNA, 22 nt, Human
ucacacaagcccagagcuuugc

SEQ ID NO: 970879 - RNA, 26 nt, Human
uccccauuccaggcuguagucugggg

SEQ ID NO: 970880 - RNA, 21 nt, Human
uccccugccuuuccacaccag

SEQ ID NO: 970881 - RNA, 20 nt, Human
ugaggagaugguaucuugga

SEQ ID NO: 970882 - RNA, 21 nt, Human
ugaggagaugguaucuuggag

SEQ ID NO: 970883 - RNA, 18 nt, Human
ugcacacacaccgacacu

SEQ ID NO: 970884 - RNA, 24 nt, Human
ugcacacacaccgacacucucaca

SEQ ID NO: 970885 - RNA, 21 nt, Human
ugcacauaccuacacacaccc

SEQ ID NO: 970886 - RNA, 23 nt, Human
ugcacaugcagacucacccccac

SEQ ID NO: 970887 - RNA, 23 nt, Human
ugcggagcuacagaaggagagac

SEQ ID NO: 970888 - RNA, 21 nt, Human
uggcacaggcacaugcacaua

SEQ ID NO: 970889 - RNA, 24 nt, Human
uguacaccugcaugggcuggcaca

SEQ ID NO: 970890 - RNA, 21 nt, Human
ugugcaaauucaguaacgcag

SEQ ID NO: 970891 - RNA, 21 nt, Human
uguggugguggccgaagaccu

SEQ ID NO: 970892 - RNA, 21 nt, Human
uguggugguggccgaagaccu

SEQ ID NO: 970893 - RNA, 24 nt, Human
uuaauuguggugguggccgaagac

SEQ ID NO: 970894 - RNA, 25 nt, Human
uuccacaccaggccuuccccauucu

SEQ ID NO: 970895 - RNA, 20 nt, Human
uugggaagggaauuaauugu

SEQ ID NO: 970896 - RNA, 20 nt, Human
aaaacucaaggaccaucccc

SEQ ID NO: 970897 - RNA, 24 nt, Human
auuucauucgcuaauggggagcaa

SEQ ID NO: 970898 - RNA, 21 nt, Human
caaaacucaaggaccaucccc

SEQ ID NO: 970899 - RNA, 22 nt, Human
caaaacucaaggaccauccccc

SEQ ID NO: 970900 - RNA, 24 nt, Human
caaggaccauccccccaucccuga

SEQ ID NO: 970901 - RNA, 22 nt, Human
caucccugacaaucuggggcgu

SEQ ID NO: 970902 - RNA, 21 nt, Human
ccugacaaucuggggcguccc

SEQ ID NO: 970903 - RNA, 18 nt, Human
cgagguggugaaagggug

SEQ ID NO: 970904 - RNA, 21 nt, Human
cgagguggugaaagggugcag

SEQ ID NO: 970905 - RNA, 18 nt, Human
cucaaggaccaucccccc

SEQ ID NO: 970906 - RNA, 21 nt, Human
gcugggauggaggcggcggcc

SEQ ID NO: 970907 - RNA, 21 nt, Human
ggagagcaugcaaaacucaag

SEQ ID NO: 970908 - RNA, 18 nt, Human
ggugcagaagugggaggg

SEQ ID NO: 970909 - RNA, 23 nt, Human
uggaggcggcggccgagccugga

SEQ ID NO: 970910 - RNA, 19 nt, Human
ugggauggaggcggcggcc

SEQ ID NO: 970911 - RNA, 19 nt, Human
ugggauggaggcggcggcc

SEQ ID NO: 970912 - RNA, 24 nt, Human
uuuuuuuuaggacugcaucaauuu

SEQ ID NO: 970913 - RNA, 19 nt, Human
aaaaaaacagccagagaac

SEQ ID NO: 970914 - RNA, 21 nt, Human
aaaaaacagccagagaacaau

SEQ ID NO: 970915 - RNA, 23 nt, Human
aaaaaagaaaaggaaggagagga

SEQ ID NO: 970916 - RNA, 21 nt, Human
aaaacauccaaaccagccccc

SEQ ID NO: 970917 - RNA, 19 nt, Human
aaacauccaaaccagcccc

SEQ ID NO: 970918 - RNA, 22 nt, Human
aaacauccaaaccagcccccac

SEQ ID NO: 970919 - RNA, 18 nt, Human
aaaccagcccccaccucc

SEQ ID NO: 970920 - RNA, 20 nt, Human
aaccagcccccaccuccccc

SEQ ID NO: 970921 - RNA, 21 nt, Human
aacccagaaggucgcugucac

SEQ ID NO: 970922 - RNA, 26 nt, Human
aagggcuggaaggcugguggccagcg

SEQ ID NO: 970923 - RNA, 18 nt, Human
acaaacaacgcaaaggcc

SEQ ID NO: 970924 - RNA, 19 nt, Human
acacaucuuaaauaaauaa

SEQ ID NO: 970925 - RNA, 19 nt, Human
acagcagcgccauggcccc

SEQ ID NO: 970926 - RNA, 22 nt, Human
accccccccacccucccggccu

SEQ ID NO: 970927 - RNA, 24 nt, Human
accugugcaccccccccacccucc

SEQ ID NO: 970928 - RNA, 22 nt, Human
acgggguccgggaaccagcugc

SEQ ID NO: 970929 - RNA, 23 nt, Human
acuccguggagcggcugccggcc

SEQ ID NO: 970930 - RNA, 22 nt, Human
acuuuucucacugcuguucagc

SEQ ID NO: 970931 - RNA, 24 nt, Human
agacaaucggcaggguccccuccu

SEQ ID NO: 970932 - RNA, 19 nt, Human
aggccagggccggccgggu

SEQ ID NO: 970933 - RNA, 19 nt, Human
agggaggucacucuuucca

SEQ ID NO: 970934 - RNA, 24 nt, Human
agggguucucagguuggcuucugu

SEQ ID NO: 970935 - RNA, 20 nt, Human
agucauuaauccuggcucca

SEQ ID NO: 970936 - RNA, 22 nt, Human
caaaccagcccccaccuccccc

SEQ ID NO: 970937 - RNA, 19 nt, Human
caaagggaggucacucuuu

SEQ ID NO: 970938 - RNA, 24 nt, Human
caccccccccacccucccggccuu

SEQ ID NO: 970939 - RNA, 19 nt, Human
caccuccccccgaaaaaaa

SEQ ID NO: 970940 - RNA, 24 nt, Human
cacgcccacguccccaucgcggca

SEQ ID NO: 970941 - RNA, 21 nt, Human
cagacccccuccacgggacug

SEQ ID NO: 970942 - RNA, 18 nt, Human
cagacuuuucucacugcu

SEQ ID NO: 970943 - RNA, 20 nt, Human
cagcccccaccucccccccc

SEQ ID NO: 970944 - RNA, 19 nt, Human
cagcguucugugccggcuc

SEQ ID NO: 970945 - RNA, 21 nt, Human
caggggacccggcuggacagc

SEQ ID NO: 970946 - RNA, 20 nt, Human
cauccaaaccagcccccacc

SEQ ID NO: 970947 - RNA, 22 nt, Human
cauggccccggagggcggcagg

SEQ ID NO: 970948 - RNA, 22 nt, Human
ccaaaccagcccccaccucccc

SEQ ID NO: 970949 - RNA, 24 nt, Human
ccaccuccccccgaaaaaaaagaa

SEQ ID NO: 970950 - RNA, 19 nt, Human
ccccaucgcggcagacaau

SEQ ID NO: 970951 - RNA, 18 nt, Human
cccccaccuccccccgaa

SEQ ID NO: 970952 - RNA, 18 nt, Human
ccccgaaaaaaaagaaaa

SEQ ID NO: 970953 - RNA, 19 nt, Human
ccccgaaaaaaaagaaaag

SEQ ID NO: 970954 - RNA, 19 nt, Human
ccccgcaggugcgggcggu

SEQ ID NO: 970955 - RNA, 22 nt, Human
ccccgcgcccggcucccugagg

SEQ ID NO: 970956 - RNA, 22 nt, Human
ccccggaaucccagcguugccc

SEQ ID NO: 970957 - RNA, 22 nt, Human
ccccgugcccgcucccucugcc

SEQ ID NO: 970958 - RNA, 18 nt, Human
cccgccaaucccagugcc

SEQ ID NO: 970959 - RNA, 24 nt, Human
cccgccucccgguccggccccggc

SEQ ID NO: 970960 - RNA, 18 nt, Human
cccgcucccucugccucc

SEQ ID NO: 970961 - RNA, 21 nt, Human
cccggaaucccagcguugccc

SEQ ID NO: 970962 - RNA, 19 nt, Human
cccggccccgcgccucacc

SEQ ID NO: 970963 - RNA, 19 nt, Human
cccuccgcgaaaauagcuu

SEQ ID NO: 970964 - RNA, 26 nt, Human
cccucugccuccacuuccccggaauc

SEQ ID NO: 970965 - RNA, 22 nt, Human
ccgaaaaaaaagaaaaggaagg

SEQ ID NO: 970966 - RNA, 20 nt, Human
ccggaacaucaugggugcug

SEQ ID NO: 970967 - RNA, 19 nt, Human
ccggaggugcuuccugccu

SEQ ID NO: 970968 - RNA, 18 nt, Human
ccggccccggccccgcgc

SEQ ID NO: 970969 - RNA, 23 nt, Human
ccggcucucggaaaacauccaaa

SEQ ID NO: 970970 - RNA, 19 nt, Human
ccgugcccgcucccucugc

SEQ ID NO: 970971 - RNA, 18 nt, Human
ccuccaaccggaggugcu

SEQ ID NO: 970972 - RNA, 19 nt, Human
ccuccacuuccccggaauc

SEQ ID NO: 970973 - RNA, 18 nt, Human
ccucccgguccggccccg

SEQ ID NO: 970974 - RNA, 21 nt, Human
ccucccgguccggccccggcc

SEQ ID NO: 970975 - RNA, 18 nt, Human
ccuccgcgaaaauagcuu

SEQ ID NO: 970976 - RNA, 25 nt, Human
ccugcagacuuuucucacugcuguu

SEQ ID NO: 970977 - RNA, 21 nt, Human
cgcaguacucgcucacuuuga

SEQ ID NO: 970978 - RNA, 20 nt, Human
cgccugagcgccggcugccc

SEQ ID NO: 970979 - RNA, 24 nt, Human
cggaaaacauccaaaccagccccc

SEQ ID NO: 970980 - RNA, 22 nt, Human
cggcccgggccggggugggcag

SEQ ID NO: 970981 - RNA, 22 nt, Human
cggcucucggaaaacauccaaa

SEQ ID NO: 970982 - RNA, 20 nt, Human
cgggggguccccgccucccg

SEQ ID NO: 970983 - RNA, 18 nt, Human
cguggagcggcugccggc

SEQ ID NO: 970984 - RNA, 24 nt, Human
cuaccugugcaccccccccacccu

SEQ ID NO: 970985 - RNA, 20 nt, Human
cuagacacaacugaaaaaaa

SEQ ID NO: 970986 - RNA, 22 nt, Human
cucccugggcggcugguccccg

SEQ ID NO: 970987 - RNA, 20 nt, Human
cuccucacccuuggcuucuc

SEQ ID NO: 970988 - RNA, 26 nt, Human
cuccugccggcucucuggggucgggg

SEQ ID NO: 970989 - RNA, 18 nt, Human
cucucuguugccccugcc

SEQ ID NO: 970990 - RNA, 23 nt, Human
cugaagccacagccagcgcagua

SEQ ID NO: 970991 - RNA, 19 nt, Human
cugccccgcaggugcgggc

SEQ ID NO: 970992 - RNA, 21 nt, Human
cuggaaaagccucuggggcga

SEQ ID NO: 970993 - RNA, 20 nt, Human
cuggcuccagauccucucuc

SEQ ID NO: 970994 - RNA, 22 nt, Human
cuguggcuggaaugccugagag

SEQ ID NO: 970995 - RNA, 19 nt, Human
cuuccugccuccucacccu

SEQ ID NO: 970996 - RNA, 25 nt, Human
cuugagaccguccccggcucucgga

SEQ ID NO: 970997 - RNA, 21 nt, Human
gaaaaaaacagccagagaaca

SEQ ID NO: 970998 - RNA, 21 nt, Human
gaaaacauccaaaccagcccc

SEQ ID NO: 970999 - RNA, 22 nt, Human
gaaaacauccaaaccagccccc

SEQ ID NO: 971000 - RNA, 18 nt, Human
gaacgcccggcauugucg

SEQ ID NO: 971001 - RNA, 19 nt, Human
gacccccuccacgggacug

SEQ ID NO: 971002 - RNA, 18 nt, Human
gacggugacuucggggcg

SEQ ID NO: 971003 - RNA, 20 nt, Human
gaugucguauuucaaagacu

SEQ ID NO: 971004 - RNA, 21 nt, Human
gcaguacucgcucacuuugau

SEQ ID NO: 971005 - RNA, 20 nt, Human
gccaggggcugggaugacgg

SEQ ID NO: 971006 - RNA, 18 nt, Human
gccgcucccacaggcugg

SEQ ID NO: 971007 - RNA, 21 nt, Human
gcgcagggccccgcgcccggc

SEQ ID NO: 971008 - RNA, 20 nt, Human
gcgcuggcucucugcuucuc

SEQ ID NO: 971009 - RNA, 18 nt, Human
gcggcccgggccggggug

SEQ ID NO: 971010 - RNA, 25 nt, Human
gcugggucuuguccccuuccuucug

SEQ ID NO: 971011 - RNA, 20 nt, Human
gcuuggacccgccaauccca

SEQ ID NO: 971012 - RNA, 23 nt, Human
ggaaaacauccaaaccagccccc

SEQ ID NO: 971013 - RNA, 24 nt, Human
ggaaaacauccaaaccagccccca

SEQ ID NO: 971014 - RNA, 22 nt, Human
ggaacaucaugggugcuggaaa

SEQ ID NO: 971015 - RNA, 18 nt, Human
ggcaggaaggccaggggc

SEQ ID NO: 971016 - RNA, 21 nt, Human
ggccaggggcugggaugacgg

SEQ ID NO: 971017 - RNA, 18 nt, Human
gggacccggcuggacagc

SEQ ID NO: 971018 - RNA, 19 nt, Human
gggccggggugggcagggg

SEQ ID NO: 971019 - RNA, 22 nt, Human
gugaggccagggccggccgggu

SEQ ID NO: 971020 - RNA, 21 nt, Human
gugcaccccccccacccuccc

SEQ ID NO: 971021 - RNA, 23 nt, Human
gugcgggcgguggggcggggggu

SEQ ID NO: 971022 - RNA, 20 nt, Human
guggagcggcugccggcccc

SEQ ID NO: 971023 - RNA, 26 nt, Human
guugugaagggugggcccagaccccc

SEQ ID NO: 971024 - RNA, 21 nt, Human
guuuccaaccugguugucggc

SEQ ID NO: 971025 - RNA, 20 nt, Human
ucaccgcggcccgggccggg

SEQ ID NO: 971026 - RNA, 19 nt, Human
ucaugggugcuggaaaagc

SEQ ID NO: 971027 - RNA, 31 nt, Human
uccaaaccagcccccaccuccccccgaaaag

SEQ ID NO: 971028 - RNA, 21 nt, Human
uccccccgaaaaaaaagaaaa

SEQ ID NO: 971029 - RNA, 19 nt, Human
ucccucugccuccacuucc

SEQ ID NO: 971030 - RNA, 20 nt, Human
ucccugagggcgccgcaggu

SEQ ID NO: 971031 - RNA, 18 nt, Human
ucccugggcggcuggucc

SEQ ID NO: 971032 - RNA, 19 nt, Human
ucccugggcggcugguccc

SEQ ID NO: 971033 - RNA, 23 nt, Human
ucccugggcggcugguccccgga

SEQ ID NO: 971034 - RNA, 26 nt, Human
uccggccccggccccgcgccgguucc

SEQ ID NO: 971035 - RNA, 19 nt, Human
uccguggagcggcugccgg

SEQ ID NO: 971036 - RNA, 23 nt, Human
ucucucuguugccccugccgcuc

SEQ ID NO: 971037 - RNA, 25 nt, Human
ucugccuccacuuccccggaauccc

SEQ ID NO: 971038 - RNA, 23 nt, Human
ucuguugccccugccgcucccac

SEQ ID NO: 971039 - RNA, 22 nt, Human
ugaaaaaaacagccagagaaca

SEQ ID NO: 971040 - RNA, 20 nt, Human
ugagcugaacagcagcgcca

SEQ ID NO: 971041 - RNA, 21 nt, Human
ugcaccccccccacccucccg

SEQ ID NO: 971042 - RNA, 19 nt, Human
ugccgcucccacaggcugg

SEQ ID NO: 971043 - RNA, 25 nt, Human
ugccggcgcuccgagccagcguucu

SEQ ID NO: 971044 - RNA, 22 nt, Human
ugccuccacuuccccggaaucc

SEQ ID NO: 971045 - RNA, 26 nt, Human
ugccugagcugaacagccggggguuc

SEQ ID NO: 971046 - RNA, 22 nt, Human
ugcugugccccugugccugagc

SEQ ID NO: 971047 - RNA, 19 nt, Human
uggaaagaagguguccugg

SEQ ID NO: 971048 - RNA, 22 nt, Human
uggaaugccugagagggucggg

SEQ ID NO: 971049 - RNA, 21 nt, Human
uggagcggcugccggccccgu

SEQ ID NO: 971050 - RNA, 21 nt, Human
uggcaguggcucugcucucuu

SEQ ID NO: 971051 - RNA, 19 nt, Human
uggccaggaggcccacggg

SEQ ID NO: 971052 - RNA, 21 nt, Human
uggcucucugcuucucugcug

SEQ ID NO: 971053 - RNA, 24 nt, Human
uggcuggcaagccugggugccucc

SEQ ID NO: 971054 - RNA, 21 nt, Human
uggcuucucgacaauuaguuu

SEQ ID NO: 971055 - RNA, 24 nt, Human
uggcuucucgacaauuaguuuuua

SEQ ID NO: 971056 - RNA, 19 nt, Human
uggcuucugugucuuuucc

SEQ ID NO: 971057 - RNA, 20 nt, Human
uggcuuggcucaggcagcag

SEQ ID NO: 971058 - RNA, 23 nt, Human
ugggaugacggugacuucggggc

SEQ ID NO: 971059 - RNA, 23 nt, Human
ugggcccagacccccuccacggg

SEQ ID NO: 971060 - RNA, 23 nt, Human
ugggugcuggaaaagccucuggg

SEQ ID NO: 971061 - RNA, 19 nt, Human
uguauuaaaaacaguccca

SEQ ID NO: 971062 - RNA, 23 nt, Human
ugucugaacuguccuugaaaggc

SEQ ID NO: 971063 - RNA, 23 nt, Human
ugugcaaaaggcaaagggagguc

SEQ ID NO: 971064 - RNA, 21 nt, Human
ugugcaccccccccacccucc

SEQ ID NO: 971065 - RNA, 22 nt, Human
uucaaagacuucccuccgcgaa

SEQ ID NO: 971066 - RNA, 20 nt, Human
uucccaaaccucugcugugc

SEQ ID NO: 971067 - RNA, 21 nt, Human
uucucugcuggccggcacugu

SEQ ID NO: 971068 - RNA, 19 nt, Human
uuggacccgccaaucccag

SEQ ID NO: 971069 - RNA, 20 nt, Human
uuucaaagacuucccuccgc

SEQ ID NO: 971070 - RNA, 18 nt, Human
uuuccggcgcgucaagcc

SEQ ID NO: 971071 - RNA, 21 nt, Human
aaagggaaagguggcaaaagg

SEQ ID NO: 971072 - RNA, 22 nt, Human
aaauagaaaugaggcuuauuua

SEQ ID NO: 971073 - RNA, 23 nt, Human
aaccacuuuucagcugagaacac

SEQ ID NO: 971074 - RNA, 26 nt, Human
aagaagaaauagaaaugaggggaccc

SEQ ID NO: 971075 - RNA, 23 nt, Human
acaaaacauagaguuagaugggu

SEQ ID NO: 971076 - RNA, 20 nt, Human
acaaguugccaagagggaaa

SEQ ID NO: 971077 - RNA, 18 nt, Human
agaagaaauagaaaugag

SEQ ID NO: 971078 - RNA, 19 nt, Human
agcugccaggaaaucagag

SEQ ID NO: 971079 - RNA, 19 nt, Human
aguugccaagagggaaaaa

SEQ ID NO: 971080 - RNA, 21 nt, Human
auagguuuuccccagcgaaag

SEQ ID NO: 971081 - RNA, 19 nt, Human
aucuggauguauaauaaau

SEQ ID NO: 971082 - RNA, 19 nt, Human
aucuuggagggacaugaag

SEQ ID NO: 971083 - RNA, 22 nt, Human
caaaauggaagcuugacacccc

SEQ ID NO: 971084 - RNA, 18 nt, Human
caguagguuccauagguu

SEQ ID NO: 971085 - RNA, 25 nt, Human
cauuuaauuaccaagguaagaauca

SEQ ID NO: 971086 - RNA, 18 nt, Human
ccaaaaaguuauuccauu

SEQ ID NO: 971087 - RNA, 19 nt, Human
ccagaguaacucugacaca

SEQ ID NO: 971088 - RNA, 24 nt, Human
cccuaaaauacucaauauaaaaca

SEQ ID NO: 971089 - RNA, 20 nt, Human
ccgaggaaggugaagggcgg

SEQ ID NO: 971090 - RNA, 23 nt, Human
ccuaaaauacucaauauaaaaca

SEQ ID NO: 971091 - RNA, 23 nt, Human
ccuguucugaguguauuuagaag

SEQ ID NO: 971092 - RNA, 19 nt, Human
cgauguggagguguccgcc

SEQ ID NO: 971093 - RNA, 19 nt, Human
cuaagagaccgggaagcca

SEQ ID NO: 971094 - RNA, 22 nt, Human
cuuuucagcugagaacacuugc

SEQ ID NO: 971095 - RNA, 21 nt, Human
gacacaaguugccaagaggga

SEQ ID NO: 971096 - RNA, 20 nt, Human
gaggcuuauuuaagguacaa

SEQ ID NO: 971097 - RNA, 20 nt, Human
gcggagugcguggccgcccc

SEQ ID NO: 971098 - RNA, 19 nt, Human
gcuccuggcgaccuucugg

SEQ ID NO: 971099 - RNA, 21 nt, Human
ggaaauaaagggaaagguggc

SEQ ID NO: 971100 - RNA, 20 nt, Human
gggaagccacaaaacauaga

SEQ ID NO: 971101 - RNA, 22 nt, Human
gguacacaugauucucugugca

SEQ ID NO: 971102 - RNA, 24 nt, Human
guaaagcaaaauaaauauauacaa

SEQ ID NO: 971103 - RNA, 22 nt, Human
gucuuuuaaagacuucccuaaa

SEQ ID NO: 971104 - RNA, 23 nt, Human
uagauaccaaaauggaagcuuga

SEQ ID NO: 971105 - RNA, 19 nt, Human
uagcucagcaagcagagac

SEQ ID NO: 971106 - RNA, 22 nt, Human
uauccuagaucauccuuaguua

SEQ ID NO: 971107 - RNA, 19 nt, Human
uauguuacccaaaauaggc

SEQ ID NO: 971108 - RNA, 18 nt, Human
ucacaagacuagauggag

SEQ ID NO: 971109 - RNA, 20 nt, Human
ucagaccagaguaacucuga

SEQ ID NO: 971110 - RNA, 21 nt, Human
ucagcaagacagguagggucg

SEQ ID NO: 971111 - RNA, 20 nt, Human
ucagcaagcagagacgauca

SEQ ID NO: 971112 - RNA, 24 nt, Human
ucuaagagaccgggaagccacaaa

SEQ ID NO: 971113 - RNA, 21 nt, Human
ucuccaugugcuauguuaccc

SEQ ID NO: 971114 - RNA, 18 nt, Human
ugagcugaacaucaguag

SEQ ID NO: 971115 - RNA, 25 nt, Human
ugagcugaacaucaguaggaaaauu

SEQ ID NO: 971116 - RNA, 23 nt, Human
ugccaagagggaaaaaauacuuc

SEQ ID NO: 971117 - RNA, 18 nt, Human
ugccaggaaaucagagcc

SEQ ID NO: 971118 - RNA, 21 nt, Human
uggaugggaauagauguggua

SEQ ID NO: 971119 - RNA, 20 nt, Human
uggcaaaaggcgauguggag

SEQ ID NO: 971120 - RNA, 25 nt, Human
uggcagugcccuauaacuuucagau

SEQ ID NO: 971121 - RNA, 23 nt, Human
uggcugcggaggccgggaaaaug

SEQ ID NO: 971122 - RNA, 18 nt, Human
uguauggccuuccagggu

SEQ ID NO: 971123 - RNA, 21 nt, Human
uguccgcccuuccgggguuuu

SEQ ID NO: 971124 - RNA, 19 nt, Human
ugugcaacuagcuggugga

SEQ ID NO: 971125 - RNA, 22 nt, Human
ugugucaaggucuggcugcgga

SEQ ID NO: 971126 - RNA, 22 nt, Human
uguuguauggccuuccaggguu

SEQ ID NO: 971127 - RNA, 18 nt, Human
uuagaaguagauaccaaa

SEQ ID NO: 971128 - RNA, 20 nt, Human
uuagaaguagauaccaaaau

SEQ ID NO: 971129 - RNA, 22 nt, Human
uugcuagauuacccaaaugugu

SEQ ID NO: 971130 - RNA, 24 nt, Human
uuuaaagacuucccuaaaauacuc

SEQ ID NO: 971131 - RNA, 25 nt, Human
uuuuuuuuuuuuuuuuuuucacaag

SEQ ID NO: 971132 - RNA, 22 nt, Human
aaaagaacaacuuuaguaugau

SEQ ID NO: 971133 - RNA, 19 nt, Human
aaacauauagcaaaucaca

SEQ ID NO: 971134 - RNA, 25 nt, Human
aaauggccaaugaaugucagcaaac

SEQ ID NO: 971135 - RNA, 19 nt, Human
aaauguaccuuacauuaac

SEQ ID NO: 971136 - RNA, 19 nt, Human
aacaccaccaccucacccc

SEQ ID NO: 971137 - RNA, 20 nt, Human
aacauucugaugacuacaga

SEQ ID NO: 971138 - RNA, 22 nt, Human
aagaagccucccaauacauuga

SEQ ID NO: 971139 - RNA, 22 nt, Human
aagcagcaaaaauacaccuuca

SEQ ID NO: 971140 - RNA, 19 nt, Human
aagccaaucaacaccacca

SEQ ID NO: 971141 - RNA, 19 nt, Human
aaugaaugucagcaaacac

SEQ ID NO: 971142 - RNA, 23 nt, Human
accaacuuaauucccugccccca

SEQ ID NO: 971143 - RNA, 20 nt, Human
accaccaccucaccccaaca

SEQ ID NO: 971144 - RNA, 25 nt, Human
accccaacaccuccuucuguccaac

SEQ ID NO: 971145 - RNA, 23 nt, Human
acuuucuguaauaaaaaagaagc

SEQ ID NO: 971146 - RNA, 23 nt, Human
agaaacagaaacaguuccuaaga

SEQ ID NO: 971147 - RNA, 25 nt, Human
agaaacagaaacaguuccuaagaca

SEQ ID NO: 971148 - RNA, 26 nt, Human
agaaagaaaacuacacauguaaaaaa

SEQ ID NO: 971149 - RNA, 24 nt, Human
agaauaagauuauauacauaaaca

SEQ ID NO: 971150 - RNA, 22 nt, Human
agacaagccaaucaacaccacc

SEQ ID NO: 971151 - RNA, 23 nt, Human
agacaagccaaucaacaccacca

SEQ ID NO: 971152 - RNA, 27 nt, Human
agcaaaaauacaccuucaucaucucac

SEQ ID NO: 971153 - RNA, 19 nt, Human
aggaauaacaugaaaaagc

SEQ ID NO: 971154 - RNA, 21 nt, Human
aggcggcagccucccgcgauc

SEQ ID NO: 971155 - RNA, 19 nt, Human
aguguaucuccacgauugu

SEQ ID NO: 971156 - RNA, 22 nt, Human
auaaaaaucaaauguaccuuac

SEQ ID NO: 971157 - RNA, 19 nt, Human
aucaacaccaccaccucac

SEQ ID NO: 971158 - RNA, 20 nt, Human
augacuacagaauaagauua

SEQ ID NO: 971159 - RNA, 26 nt, Human
caacaccaccaccucaccccaacacc

SEQ ID NO: 971160 - RNA, 25 nt, Human
caagccaaucaacaccaccaccuca

SEQ ID NO: 971161 - RNA, 21 nt, Human
caauaauauaaaugcuuugac

SEQ ID NO: 971162 - RNA, 21 nt, Human
cacucaacacuguauuaaaug

SEQ ID NO: 971163 - RNA, 20 nt, Human
cagaagauaccuuuuuccac

SEQ ID NO: 971164 - RNA, 22 nt, Human
cagcaaacaccugugugagcua

SEQ ID NO: 971165 - RNA, 20 nt, Human
caggcaguuuagcuauaagc

SEQ ID NO: 971166 - RNA, 24 nt, Human
cauuuuuguuugauguucugagaa

SEQ ID NO: 971167 - RNA, 22 nt, Human
cccaacaccuccuucuguccaa

SEQ ID NO: 971168 - RNA, 23 nt, Human
cccaccaacuuaauucccugccc

SEQ ID NO: 971169 - RNA, 21 nt, Human
ccccaacaccuccuucugucc

SEQ ID NO: 971170 - RNA, 22 nt, Human
ccccaacaccuccuucugucca

SEQ ID NO: 971171 - RNA, 21 nt, Human
cccguguaacagcuuugauuu

SEQ ID NO: 971172 - RNA, 22 nt, Human
ccugcacugaauguuuaucaaa

SEQ ID NO: 971173 - RNA, 20 nt, Human
cuagaacaggcaguuuagcu

SEQ ID NO: 971174 - RNA, 22 nt, Human
cucacacugcucuagcaaaacc

SEQ ID NO: 971175 - RNA, 21 nt, Human
gaggagacggcaggggaaaga

SEQ ID NO: 971176 - RNA, 21 nt, Human
gaggauggaagacgagaggga

SEQ ID NO: 971177 - RNA, 24 nt, Human
gaugaggagacggcaggggaaaga

SEQ ID NO: 971178 - RNA, 25 nt, Human
ggugcaggaugaggagacggcaggg

SEQ ID NO: 971179 - RNA, 19 nt, Human
guaaagcagcaaaaauaca

SEQ ID NO: 971180 - RNA, 22 nt, Human
guccacacacaagccccuucag

SEQ ID NO: 971181 - RNA, 23 nt, Human
guguaacagcuuugauuuauaug

SEQ ID NO: 971182 - RNA, 24 nt, Human
uaaaaaagaagccucccaauacau

SEQ ID NO: 971183 - RNA, 23 nt, Human
uaaacagaccagagacuuuggug

SEQ ID NO: 971184 - RNA, 21 nt, Human
uaaacauauagcaaaucacag

SEQ ID NO: 971185 - RNA, 18 nt, Human
uaaagaccagugggagug

SEQ ID NO: 971186 - RNA, 22 nt, Human
uaaagcagcaaaaauacaccuu

SEQ ID NO: 971187 - RNA, 23 nt, Human
uaaauuaaaagaacaacuuuagu

SEQ ID NO: 971188 - RNA, 21 nt, Human
uaaauuaaucagcacaagcua

SEQ ID NO: 971189 - RNA, 24 nt, Human
uaaccauuuccaauagaaaaagaa

SEQ ID NO: 971190 - RNA, 20 nt, Human
uaacuuguaaccauuuccaa

SEQ ID NO: 971191 - RNA, 22 nt, Human
uaauaaaaaagaagccucccaa

SEQ ID NO: 971192 - RNA, 21 nt, Human
uaauucccugcccccaccccc

SEQ ID NO: 971193 - RNA, 22 nt, Human
uacacauguaaaaaauaaaaau

SEQ ID NO: 971194 - RNA, 20 nt, Human
uaccuuacagaaacagaaac

SEQ ID NO: 971195 - RNA, 21 nt, Human
uaccuuacagaaacagaaaca

SEQ ID NO: 971196 - RNA, 22 nt, Human
uaccuuacagaaacagaaacag

SEQ ID NO: 971197 - RNA, 25 nt, Human
uaccuuacagaaacagaaacaguuc

SEQ ID NO: 971198 - RNA, 18 nt, Human
uauauacauaaacauaua

SEQ ID NO: 971199 - RNA, 23 nt, Human
ucaacaccaccaccucaccccaa

SEQ ID NO: 971200 - RNA, 20 nt, Human
ucaccccaacaccuccuucu

SEQ ID NO: 971201 - RNA, 24 nt, Human
ucagcaaacaccugugugagcuaa

SEQ ID NO: 971202 - RNA, 18 nt, Human
ucauauguaugucugccc

SEQ ID NO: 971203 - RNA, 19 nt, Human
ucccgaggcggcagccucc

SEQ ID NO: 971204 - RNA, 18 nt, Human
ucuaugauugaaauaaag

SEQ ID NO: 971205 - RNA, 22 nt, Human
ucugcccugcaguauauaugaa

SEQ ID NO: 971206 - RNA, 24 nt, Human
ucuuacuaugauuugaaaaaaagg

SEQ ID NO: 971207 - RNA, 18 nt, Human
ugaaauaaagccccucuc

SEQ ID NO: 971208 - RNA, 23 nt, Human
ugaagaaagaaaacuacacaugu

SEQ ID NO: 971209 - RNA, 21 nt, Human
ugacaaaaacagugauuuucc

SEQ ID NO: 971210 - RNA, 18 nt, Human
ugacaagaggauuuagga

SEQ ID NO: 971211 - RNA, 22 nt, Human
ugagagaagacauuaaauggug

SEQ ID NO: 971212 - RNA, 24 nt, Human
ugagcuaaacugaacuaauuccua

SEQ ID NO: 971213 - RNA, 21 nt, Human
ugaggauggaagacgagaggg

SEQ ID NO: 971214 - RNA, 24 nt, Human
ugaguaggaauuuuuaaauccauu

SEQ ID NO: 971215 - RNA, 19 nt, Human
ugccuggugauauuacugg

SEQ ID NO: 971216 - RNA, 21 nt, Human
uggguaguguaucuccacgau

SEQ ID NO: 971217 - RNA, 24 nt, Human
uggguaguguaucuccacgauugu

SEQ ID NO: 971218 - RNA, 21 nt, Human
uguaaguuuguuauagaagug

SEQ ID NO: 971219 - RNA, 21 nt, Human
ugugcauuucuucguaguguu

SEQ ID NO: 971220 - RNA, 19 nt, Human
uguucagaacacucuguuc

SEQ ID NO: 971221 - RNA, 22 nt, Human
uguucagaacacucuguucuua

SEQ ID NO: 971222 - RNA, 18 nt, Human
uuaaauggccaaugaaug

SEQ ID NO: 971223 - RNA, 21 nt, Human
uuaggaauaacaugaaaaagc

SEQ ID NO: 971224 - RNA, 23 nt, Human
uuauccccagacauuuguagaca

SEQ ID NO: 971225 - RNA, 22 nt, Human
uucaaugacaaaaguaugacaa

SEQ ID NO: 971226 - RNA, 22 nt, Human
uucugagaaugcaaauguuugg

SEQ ID NO: 971227 - RNA, 18 nt, Human
uugaagaagagcauugcc

SEQ ID NO: 971228 - RNA, 20 nt, Human
uugaagaagagcauugcccc

SEQ ID NO: 971229 - RNA, 22 nt, Human
uuggugcaagacugagagaaga

SEQ ID NO: 971230 - RNA, 23 nt, Human
uuguagacagauacauaugaaug

SEQ ID NO: 971231 - RNA, 19 nt, Human
uuguucaaugacaaaagua

SEQ ID NO: 971232 - RNA, 22 nt, Human
uuuaggaauaacaugaaaaagc

SEQ ID NO: 971233 - RNA, 19 nt, Human
uuucuuguagaucauccua

SEQ ID NO: 971234 - RNA, 19 nt, Human
aaagaaagcaggcaugaga

SEQ ID NO: 971235 - RNA, 24 nt, Human
aaagauugaggguguagacccaca

SEQ ID NO: 971236 - RNA, 21 nt, Human
aaaggugcagagaggagacag

SEQ ID NO: 971237 - RNA, 22 nt, Human
aacagacagaccacagaaggga

SEQ ID NO: 971238 - RNA, 24 nt, Human
aacagcuucagccaggaggaggca

SEQ ID NO: 971239 - RNA, 23 nt, Human
aagacagaugggcgggaggaggg

SEQ ID NO: 971240 - RNA, 21 nt, Human
aauggccugaaagauugaggg

SEQ ID NO: 971241 - RNA, 19 nt, Human
acaaagaaagcaggcauga

SEQ ID NO: 971242 - RNA, 20 nt, Human
acagacagaccacagaaggg

SEQ ID NO: 971243 - RNA, 21 nt, Human
acagagccagacagcucccca

SEQ ID NO: 971244 - RNA, 21 nt, Human
acagcacaggaacagacagac

SEQ ID NO: 971245 - RNA, 20 nt, Human
acaggagaaaagaggcagag

SEQ ID NO: 971246 - RNA, 21 nt, Human
acaggagaaaagaggcagaga

SEQ ID NO: 971247 - RNA, 22 nt, Human
acaggcagacucagaaacaaac

SEQ ID NO: 971248 - RNA, 18 nt, Human
agaaaaaggugcagagag

SEQ ID NO: 971249 - RNA, 21 nt, Human
agaaacagcacaggaacagac

SEQ ID NO: 971250 - RNA, 19 nt, Human
agaaagcaggcaugagaaa

SEQ ID NO: 971251 - RNA, 26 nt, Human
agacaggagacacaggcuggccaaga

SEQ ID NO: 971252 - RNA, 22 nt, Human
agacggacagcaggaugggaug

SEQ ID NO: 971253 - RNA, 21 nt, Human
agacucagaaacaaacaggug

SEQ ID NO: 971254 - RNA, 20 nt, Human
agacuccuggagggacagga

SEQ ID NO: 971255 - RNA, 18 nt, Human
agagacagggagaaaggg

SEQ ID NO: 971256 - RNA, 21 nt, Human
agagagaggcagauucaggca

SEQ ID NO: 971257 - RNA, 26 nt, Human
agaggcagauucaggcagagaggccu

SEQ ID NO: 971258 - RNA, 22 nt, Human
agaggccuggggacagcagggg

SEQ ID NO: 971259 - RNA, 21 nt, Human
agaugggcgggaggaggggau

SEQ ID NO: 971260 - RNA, 19 nt, Human
agccagacagcuccccaaa

SEQ ID NO: 971261 - RNA, 19 nt, Human
agcgguacuuuuuuuuuuu

SEQ ID NO: 971262 - RNA, 20 nt, Human
agcuagagagagugacaggc

SEQ ID NO: 971263 - RNA, 21 nt, Human
agcucagagagaugaaggggc

SEQ ID NO: 971264 - RNA, 21 nt, Human
aggaacagacagaccacagaa

SEQ ID NO: 971265 - RNA, 21 nt, Human
aggacugggcugggcaaaggc

SEQ ID NO: 971266 - RNA, 22 nt, Human
aggaggaggcagagaggacugg

SEQ ID NO: 971267 - RNA, 21 nt, Human
aggcagacagaggggaugacu

SEQ ID NO: 971268 - RNA, 22 nt, Human
aggcagagagacuccuggaggg

SEQ ID NO: 971269 - RNA, 18 nt, Human
aggcagagaggacugggc

SEQ ID NO: 971270 - RNA, 22 nt, Human
aggcagagaggacugggcuggg

SEQ ID NO: 971271 - RNA, 18 nt, Human
aggcagagaggccugggg

SEQ ID NO: 971272 - RNA, 19 nt, Human
aggcagagaggccugggga

SEQ ID NO: 971273 - RNA, 20 nt, Human
aggggagcuuggaagacagg

SEQ ID NO: 971274 - RNA, 19 nt, Human
agguggguagggauaggcu

SEQ ID NO: 971275 - RNA, 21 nt, Human
auggauggcagaaaaaggugc

SEQ ID NO: 971276 - RNA, 23 nt, Human
cacacaggcagacucagaaacaa

SEQ ID NO: 971277 - RNA, 23 nt, Human
caccugcagaaaggcaacaggca

SEQ ID NO: 971278 - RNA, 22 nt, Human
cagaagggacagaaagacagau

SEQ ID NO: 971279 - RNA, 23 nt, Human
cagaagggacagaaagacagaug

SEQ ID NO: 971280 - RNA, 24 nt, Human
cagagacagggagaaagggacaca

SEQ ID NO: 971281 - RNA, 21 nt, Human
cagagaggacugggcugggca

SEQ ID NO: 971282 - RNA, 21 nt, Human
cagccucugcugucccccgcc

SEQ ID NO: 971283 - RNA, 24 nt, Human
cagcucagagagaugaaggggcag

SEQ ID NO: 971284 - RNA, 24 nt, Human
caggagaaaagaggcagagagagg

SEQ ID NO: 971285 - RNA, 24 nt, Human
cagggaccugggccagcaggccuu

SEQ ID NO: 971286 - RNA, 19 nt, Human
cagguucgggcacccucuc

SEQ ID NO: 971287 - RNA, 25 nt, Human
cccacagcuagagagagugacaggc

SEQ ID NO: 971288 - RNA, 18 nt, Human
cccuaucuggacccacuu

SEQ ID NO: 971289 - RNA, 19 nt, Human
cccugggcgggggaagagg

SEQ ID NO: 971290 - RNA, 26 nt, Human
ccuccuccuccuccucuucuuccucc

SEQ ID NO: 971291 - RNA, 18 nt, Human
ccuccuucuggcccuggg

SEQ ID NO: 971292 - RNA, 18 nt, Human
ccuccuucuggcccuggg

SEQ ID NO: 971293 - RNA, 21 nt, Human
ccuccuucuggcccugggcgg

SEQ ID NO: 971294 - RNA, 24 nt, Human
ccugcagaaaggcaacaggcaauu

SEQ ID NO: 971295 - RNA, 21 nt, Human
cggcugccuaggcuccugcuc

SEQ ID NO: 971296 - RNA, 24 nt, Human
cgggggaagagguggagaaggggc

SEQ ID NO: 971297 - RNA, 19 nt, Human
cucagguucgggcacccuc

SEQ ID NO: 971298 - RNA, 20 nt, Human
cuccuccuccuccuccuccu

SEQ ID NO: 971299 - RNA, 20 nt, Human
cuccuccuccuccuccuccu

SEQ ID NO: 971300 - RNA, 26 nt, Human
cuccuccuccucuucuuccuccuccu

SEQ ID NO: 971301 - RNA, 21 nt, Human
cugaccccuccaugugcaugc

SEQ ID NO: 971302 - RNA, 24 nt, Human
cuggagggacaggagaaaagaggc

SEQ ID NO: 971303 - RNA, 20 nt, Human
cuggcccugggcgggggaag

SEQ ID NO: 971304 - RNA, 20 nt, Human
gaacagacagaccacagaag

SEQ ID NO: 971305 - RNA, 23 nt, Human
gacagagccagacagcuccccaa

SEQ ID NO: 971306 - RNA, 19 nt, Human
gagaaacagcacaggaaca

SEQ ID NO: 971307 - RNA, 20 nt, Human
gagcgguacuuuuuuuuuuu

SEQ ID NO: 971308 - RNA, 21 nt, Human
gagcgguacuuuuuuuuuuuu

SEQ ID NO: 971309 - RNA, 18 nt, Human
gagcuuggaagacaggca

SEQ ID NO: 971310 - RNA, 19 nt, Human
gaggcagagaggacugggc

SEQ ID NO: 971311 - RNA, 22 nt, Human
gaggccuggggacagcagggga

SEQ ID NO: 971312 - RNA, 22 nt, Human
gcacagggaccugggccagcag

SEQ ID NO: 971313 - RNA, 18 nt, Human
gcagacagaggggaugac

SEQ ID NO: 971314 - RNA, 21 nt, Human
gcagauucaggcagagaggcc

SEQ ID NO: 971315 - RNA, 18 nt, Human
gcaggaugggauggaugg

SEQ ID NO: 971316 - RNA, 25 nt, Human
gccucugcugucccccgccucugac

SEQ ID NO: 971317 - RNA, 22 nt, Human
gcgcccccuaucuggacccacu

SEQ ID NO: 971318 - RNA, 23 nt, Human
gcgggaggaggggaugcuagggg

SEQ ID NO: 971319 - RNA, 18 nt, Human
ggaacagacagaccacag

SEQ ID NO: 971320 - RNA, 19 nt, Human
ggaagacaggcagagacag

SEQ ID NO: 971321 - RNA, 25 nt, Human
ggagcgguacuuuuuuuuuuuuccu

SEQ ID NO: 971322 - RNA, 18 nt, Human
ggcaggagggacccuagg

SEQ ID NO: 971323 - RNA, 18 nt, Human
ggcgggaggaggggaugc

SEQ ID NO: 971324 - RNA, 25 nt, Human
gggacagagccagacagcuccccaa

SEQ ID NO: 971325 - RNA, 19 nt, Human
gggcaggagggacccuagg

SEQ ID NO: 971326 - RNA, 23 nt, Human
ggggacagcaggggaacaggugc

SEQ ID NO: 971327 - RNA, 19 nt, Human
ggggagcuuggaagacagg

SEQ ID NO: 971328 - RNA, 18 nt, Human
guaauccugacaaacagc

SEQ ID NO: 971329 - RNA, 19 nt, Human
guugggguugggauuaggg

SEQ ID NO: 971330 - RNA, 19 nt, Human
uaucuggacccacuuggag

SEQ ID NO: 971331 - RNA, 20 nt, Human
ucagagagaugaaggggcag

SEQ ID NO: 971332 - RNA, 20 nt, Human
uccacauguugggcaggagg

SEQ ID NO: 971333 - RNA, 18 nt, Human
uccuccucuucuuccucc

SEQ ID NO: 971334 - RNA, 23 nt, Human
ucuggcccugggcgggggaagag

SEQ ID NO: 971335 - RNA, 22 nt, Human
ucuucuuccuccuccucccccc

SEQ ID NO: 971336 - RNA, 21 nt, Human
ugacucacagagcagacggac

SEQ ID NO: 971337 - RNA, 19 nt, Human
ugagaaacagcacaggaac

SEQ ID NO: 971338 - RNA, 25 nt, Human
ugaggcagagagacuccccccgagg

SEQ ID NO: 971339 - RNA, 19 nt, Human
ugaggcagagagacuccug

SEQ ID NO: 971340 - RNA, 20 nt, Human
ugaggcagagagacuccugg

SEQ ID NO: 971341 - RNA, 20 nt, Human
ugcagccucugcuguccccc

SEQ ID NO: 971342 - RNA, 27 nt, Human
uggaagacaggcagagacagggagaaa

SEQ ID NO: 971343 - RNA, 20 nt, Human
uggauggcagaaaaaggugc

SEQ ID NO: 971344 - RNA, 24 nt, Human
ugggccagucugcagccucugcug

SEQ ID NO: 971345 - RNA, 24 nt, Human
uggggacagcaggggaacaggugc

SEQ ID NO: 971346 - RNA, 19 nt, Human
ugggggaaauggccugaaa

SEQ ID NO: 971347 - RNA, 24 nt, Human
ugggguugggauuagggccaugau

SEQ ID NO: 971348 - RNA, 22 nt, Human
uggguagggauaggcucgugga

SEQ ID NO: 971349 - RNA, 20 nt, Human
ugguugaggcagagagacuc

SEQ ID NO: 971350 - RNA, 26 nt, Human
ugugcaugcgcacagggaccugggcc

SEQ ID NO: 971351 - RNA, 21 nt, Human
uucuuccuccuccucccaugg

SEQ ID NO: 971352 - RNA, 18 nt, Human
uuuuuuuuuuuuuuuuug

SEQ ID NO: 971353 - RNA, 20 nt, Human
uuuuuuuuuuuuuuuuuggu

SEQ ID NO: 971354 - RNA, 22 nt, Human
uuuuuuuuuuuuuuuuugguag

SEQ ID NO: 971355 - RNA, 19 nt, Human
aaaccugggguccagucca

SEQ ID NO: 971356 - RNA, 21 nt, Human
aggaaaccugggguccagucc

SEQ ID NO: 971357 - RNA, 18 nt, Human
auucuccaauuaauagcu

SEQ ID NO: 971358 - RNA, 24 nt, Human
cacaguagcauaaaugggauaaga

SEQ ID NO: 971359 - RNA, 22 nt, Human
caucagaaaagccaggaaucuc

SEQ ID NO: 971360 - RNA, 24 nt, Human
cgugaguuucaggaggcuguuggu

SEQ ID NO: 971361 - RNA, 20 nt, Human
cugcucaaccuaaauaucuu

SEQ ID NO: 971362 - RNA, 22 nt, Human
guccuaaauagguccaucagaa

SEQ ID NO: 971363 - RNA, 19 nt, Human
uaggguaagcccaggaguc

SEQ ID NO: 971364 - RNA, 24 nt, Human
uagguccaucagaaaagccaggaa

SEQ ID NO: 971365 - RNA, 25 nt, Human
uagguccaucagaaaagccaggaau

SEQ ID NO: 971366 - RNA, 18 nt, Human
ucagaaaagccaggaauc

SEQ ID NO: 971367 - RNA, 18 nt, Human
uccagggugagaaauggg

SEQ ID NO: 971368 - RNA, 20 nt, Human
uccagggugagaaaugggau

SEQ ID NO: 971369 - RNA, 23 nt, Human
ucccuggggauagagagguuguc

SEQ ID NO: 971370 - RNA, 19 nt, Human
ugagaaaugggaucucaug

SEQ ID NO: 971371 - RNA, 18 nt, Human
ugaguaaagaaaugucug

SEQ ID NO: 971372 - RNA, 18 nt, Human
uguaaaggaaaccugggg

SEQ ID NO: 971373 - RNA, 19 nt, Human
uguaaaggaaaccuggggu

SEQ ID NO: 971374 - RNA, 24 nt, Human
uuguccuaaauagguccaucagaa

SEQ ID NO: 971375 - RNA, 22 nt, Human
uuugucuuaguccagggugaga

SEQ ID NO: 971376 - RNA, 19 nt, Human
aagagacagacguugauca

SEQ ID NO: 971377 - RNA, 22 nt, Human
aagaguccaccuccugguggcu

SEQ ID NO: 971378 - RNA, 23 nt, Human
aagcagggccagggguuggggga

SEQ ID NO: 971379 - RNA, 24 nt, Human
aagcauggccagggcuggucacac

SEQ ID NO: 971380 - RNA, 24 nt, Human
aagccacucacccagggucaccca

SEQ ID NO: 971381 - RNA, 18 nt, Human
aaggaacugaucaugcug

SEQ ID NO: 971382 - RNA, 26 nt, Human
acaccgcguaacgaacgaaugcagac

SEQ ID NO: 971383 - RNA, 24 nt, Human
accaagaucuccauccucgcagug

SEQ ID NO: 971384 - RNA, 25 nt, Human
acccuggaacucuacucugccacac

SEQ ID NO: 971385 - RNA, 23 nt, Human
accguguccuggcuggcuguugg

SEQ ID NO: 971386 - RNA, 18 nt, Human
acucagccacgcggaaca

SEQ ID NO: 971387 - RNA, 18 nt, Human
agaaacugugagaugaua

SEQ ID NO: 971388 - RNA, 25 nt, Human
agaccccugacucacaggacccguc

SEQ ID NO: 971389 - RNA, 23 nt, Human
agcaagcauggccagggcugguc

SEQ ID NO: 971390 - RNA, 22 nt, Human
agcaggacacuggggcagaggg

SEQ ID NO: 971391 - RNA, 18 nt, Human
agccacgcggaacagcag

SEQ ID NO: 971392 - RNA, 28 nt, Human
agcccgaggacaggagaacggcgggaaa

SEQ ID NO: 971393 - RNA, 23 nt, Human
aggggcuggaagcucagggagcc

SEQ ID NO: 971394 - RNA, 20 nt, Human
aggggggcuggcaguggccu

SEQ ID NO: 971395 - RNA, 19 nt, Human
agggugucaucagggcuga

SEQ ID NO: 971396 - RNA, 19 nt, Human
agugggugaggcugggggc

SEQ ID NO: 971397 - RNA, 19 nt, Human
caacaguagcugacugaua

SEQ ID NO: 971398 - RNA, 21 nt, Human
caagagacagacguugaucag

SEQ ID NO: 971399 - RNA, 22 nt, Human
cacagcaaauucacuuccuacu

SEQ ID NO: 971400 - RNA, 20 nt, Human
cacccagcaagcauggccag

SEQ ID NO: 971401 - RNA, 19 nt, Human
caccgcguaacgaacgaau

SEQ ID NO: 971402 - RNA, 19 nt, Human
caccguguccuggcuggcu

SEQ ID NO: 971403 - RNA, 21 nt, Human
caccucugcaugacaugggac

SEQ ID NO: 971404 - RNA, 24 nt, Human
cagacuccaagauggccccagaag

SEQ ID NO: 971405 - RNA, 23 nt, Human
cagccauacccugugagguccug

SEQ ID NO: 971406 - RNA, 25 nt, Human
cagccauacccugugagguccuggc

SEQ ID NO: 971407 - RNA, 26 nt, Human
cagcccgaggacaggagaacggcggg

SEQ ID NO: 971408 - RNA, 21 nt, Human
cagcgcuaaccgaucuggggc

SEQ ID NO: 971409 - RNA, 24 nt, Human
caggagagaugaggcagaugcacg

SEQ ID NO: 971410 - RNA, 26 nt, Human
caggcaucgcccaguguucccugggg

SEQ ID NO: 971411 - RNA, 18 nt, Human
cagggccaaaccaucugu

SEQ ID NO: 971412 - RNA, 18 nt, Human
cagggucacccagcaagc

SEQ ID NO: 971413 - RNA, 21 nt, Human
caggugacaaccgacaagucc

SEQ ID NO: 971414 - RNA, 23 nt, Human
cagucucgaccccacagacgcgg

SEQ ID NO: 971415 - RNA, 25 nt, Human
cauaucuccaccaaguauguaacca

SEQ ID NO: 971416 - RNA, 20 nt, Human
cauucggggcuggauuguuc

SEQ ID NO: 971417 - RNA, 19 nt, Human
ccacacucugggcugcuga

SEQ ID NO: 971418 - RNA, 21 nt, Human
ccagccaacagacacugacaa

SEQ ID NO: 971419 - RNA, 18 nt, Human
ccaggcccacccccuccc

SEQ ID NO: 971420 - RNA, 22 nt, Human
ccaggcccacccccucccuuuu

SEQ ID NO: 971421 - RNA, 18 nt, Human
ccaggccugcagucagag

SEQ ID NO: 971422 - RNA, 21 nt, Human
cccaagucccacgaugugcua

SEQ ID NO: 971423 - RNA, 20 nt, Human
ccccacagacgcggcccgga

SEQ ID NO: 971424 - RNA, 20 nt, Human
ccccagaagccccugccucu

SEQ ID NO: 971425 - RNA, 22 nt, Human
ccccgguugaacguugagauga

SEQ ID NO: 971426 - RNA, 19 nt, Human
cccuggaacucuacucugc

SEQ ID NO: 971427 - RNA, 28 nt, Human
cccuggaacucuacucugccacacuaac

SEQ ID NO: 971428 - RNA, 20 nt, Human
ccucgcuucaugcccuucuc

SEQ ID NO: 971429 - RNA, 30 nt, Human
ccucuugacagccauacccugugagguccu

SEQ ID NO: 971430 - RNA, 18 nt, Human
ccugcagugggugaggcu

SEQ ID NO: 971431 - RNA, 24 nt, Human
cgaaugcagacucagccacgcgga

SEQ ID NO: 971432 - RNA, 21 nt, Human
cgacaaguccaccuguuggga

SEQ ID NO: 971433 - RNA, 21 nt, Human
cgcggaacagcaggaaugcgg

SEQ ID NO: 971434 - RNA, 18 nt, Human
cguccugggcacugcagg

SEQ ID NO: 971435 - RNA, 21 nt, Human
cgugacaaccacaaugucccc

SEQ ID NO: 971436 - RNA, 20 nt, Human
cucugagggcugccccagcc

SEQ ID NO: 971437 - RNA, 27 nt, Human
cugagggcugccccagccaacagacac

SEQ ID NO: 971438 - RNA, 18 nt, Human
cugcagucagagggugac

SEQ ID NO: 971439 - RNA, 22 nt, Human
cuggaacucuacucugccacac

SEQ ID NO: 971440 - RNA, 20 nt, Human
cuggacacuaggcacgagga

SEQ ID NO: 971441 - RNA, 19 nt, Human
cuuaacucccucacugacc

SEQ ID NO: 971442 - RNA, 23 nt, Human
cuuggcaccgagaggcugcccuc

SEQ ID NO: 971443 - RNA, 23 nt, Human
cuugugagcuccugaagcagugc

SEQ ID NO: 971444 - RNA, 19 nt, Human
gaaggugcugacauucggg

SEQ ID NO: 971445 - RNA, 22 nt, Human
gacaaccaaugaggaacugaac

SEQ ID NO: 971446 - RNA, 21 nt, Human
gagcaccccccaucgugacaa

SEQ ID NO: 971447 - RNA, 19 nt, Human
gaggcugggggcucgggag

SEQ ID NO: 971448 - RNA, 21 nt, Human
gagggugacgggggugacacc

SEQ ID NO: 971449 - RNA, 20 nt, Human
gccaacagacacugacaaac

SEQ ID NO: 971450 - RNA, 18 nt, Human
gccacucacccaggguca

SEQ ID NO: 971451 - RNA, 19 nt, Human
gcccagagagaggaagcca

SEQ ID NO: 971452 - RNA, 20 nt, Human
gccccagaagccccugccuc

SEQ ID NO: 971453 - RNA, 18 nt, Human
gcggaacagcaggaaugg

SEQ ID NO: 971454 - RNA, 20 nt, Human
gcggagcaggggcuggaagc

SEQ ID NO: 971455 - RNA, 19 nt, Human
gcuggcaguggccucugcg

SEQ ID NO: 971456 - RNA, 18 nt, Human
ggaacaggucagcagagg

SEQ ID NO: 971457 - RNA, 23 nt, Human
ggagccacccuggaacucuacuc

SEQ ID NO: 971458 - RNA, 22 nt, Human
ggcagucccagcccuacccaca

SEQ ID NO: 971459 - RNA, 23 nt, Human
ggccagggguugggggauaagcu

SEQ ID NO: 971460 - RNA, 23 nt, Human
ggccagggguugggggauaagcu

SEQ ID NO: 971461 - RNA, 27 nt, Human
ggccgcgcagucucgaccccacagacg

SEQ ID NO: 971462 - RNA, 18 nt, Human
ggcucugagggcugcccc

SEQ ID NO: 971463 - RNA, 20 nt, Human
ggcuggaagcucagggagcc

SEQ ID NO: 971464 - RNA, 18 nt, Human
gggacccacacucugggc

SEQ ID NO: 971465 - RNA, 18 nt, Human
gggagggaagagcauggg

SEQ ID NO: 971466 - RNA, 18 nt, Human
ggggagggaagagcaugg

SEQ ID NO: 971467 - RNA, 18 nt, Human
gggggugacaccaugacc

SEQ ID NO: 971468 - RNA, 21 nt, Human
gugcugcugagcagugucucu

SEQ ID NO: 971469 - RNA, 23 nt, Human
guggccaggcucugagggcugcc

SEQ ID NO: 971470 - RNA, 19 nt, Human
gugucucuggccuccaccc

SEQ ID NO: 971471 - RNA, 21 nt, Human
uaaccagcaggacacuggggc

SEQ ID NO: 971472 - RNA, 21 nt, Human
uaagcuuagggcuuccaugcu

SEQ ID NO: 971473 - RNA, 24 nt, Human
ucacaaucacacagcaaauucacu

SEQ ID NO: 971474 - RNA, 21 nt, Human
ucacccagggucacccagcaa

SEQ ID NO: 971475 - RNA, 19 nt, Human
ucacuuccuacuuuccguc

SEQ ID NO: 971476 - RNA, 22 nt, Human
uccaccuguugggaaucccagg

SEQ ID NO: 971477 - RNA, 18 nt, Human
uccaggugcgggcuagcg

SEQ ID NO: 971478 - RNA, 22 nt, Human
uccccaggcaucgcccaguguu

SEQ ID NO: 971479 - RNA, 23 nt, Human
uccccgcagucgcccaggccugc

SEQ ID NO: 971480 - RNA, 18 nt, Human
ucccugggggcaguucac

SEQ ID NO: 971481 - RNA, 21 nt, Human
ucccugggggcaguucacgcu

SEQ ID NO: 971482 - RNA, 22 nt, Human
uccuccuuucuggacacuaggc

SEQ ID NO: 971483 - RNA, 24 nt, Human
uccucgcuucaugcccuucuccug

SEQ ID NO: 971484 - RNA, 19 nt, Human
ucucacugacacccagggu

SEQ ID NO: 971485 - RNA, 18 nt, Human
ucuccuggcacacccugg

SEQ ID NO: 971486 - RNA, 21 nt, Human
ucuccuggcacacccuggcuu

SEQ ID NO: 971487 - RNA, 19 nt, Human
ucucuggccuccacccacu

SEQ ID NO: 971488 - RNA, 21 nt, Human
ucugacaaccaaugaggaacu

SEQ ID NO: 971489 - RNA, 20 nt, Human
ucuggacacuaggcacgagg

SEQ ID NO: 971490 - RNA, 18 nt, Human
ucuggcacuggcccagag

SEQ ID NO: 971491 - RNA, 18 nt, Human
ugaagcagugcccagacc

SEQ ID NO: 971492 - RNA, 23 nt, Human
ugacaaacagacaccuucggucu

SEQ ID NO: 971493 - RNA, 19 nt, Human
ugacaggggacccacacuc

SEQ ID NO: 971494 - RNA, 20 nt, Human
ugacaugggacugugcccuc

SEQ ID NO: 971495 - RNA, 19 nt, Human
ugaccaugggggaaaaggg

SEQ ID NO: 971496 - RNA, 19 nt, Human
ugagagccuggcccugcag

SEQ ID NO: 971497 - RNA, 21 nt, Human
ugagagccuggcccugcagug

SEQ ID NO: 971498 - RNA, 22 nt, Human
ugagaucucacugacacccagg

SEQ ID NO: 971499 - RNA, 18 nt, Human
ugaggcagaugcacggga

SEQ ID NO: 971500 - RNA, 25 nt, Human
ugagggggagggaagagcaagcucc

SEQ ID NO: 971501 - RNA, 23 nt, Human
ugauuaggccaggcccacccccu

SEQ ID NO: 971502 - RNA, 31 nt, Human
ugauuuaaucccagacaacagcccuucuccc

SEQ ID NO: 971503 - RNA, 27 nt, Human
ugcccagaccccugacucacagaaacu

SEQ ID NO: 971504 - RNA, 21 nt, Human
ugcuaccgagcccaaccacac

SEQ ID NO: 971505 - RNA, 22 nt, Human
ugcuuucguugggaggaagaac

SEQ ID NO: 971506 - RNA, 22 nt, Human
uggaggcucaugucucagucca

SEQ ID NO: 971507 - RNA, 21 nt, Human
uggcggggauggcucuuggcc

SEQ ID NO: 971508 - RNA, 21 nt, Human
uggcuguggacugaggcaccg

SEQ ID NO: 971509 - RNA, 18 nt, Human
ugggaaucccaggucugg

SEQ ID NO: 971510 - RNA, 21 nt, Human
ugggcugcucuggucacugca

SEQ ID NO: 971511 - RNA, 19 nt, Human
uggggcagaggggaaggga

SEQ ID NO: 971512 - RNA, 18 nt, Human
ugggggauaagcuuaggg

SEQ ID NO: 971513 - RNA, 19 nt, Human
ugucacaucuggcacuggc

SEQ ID NO: 971514 - RNA, 23 nt, Human
ugucacaucuggcacuggcccag

SEQ ID NO: 971515 - RNA, 20 nt, Human
uguccuggcuggcuguuggc

SEQ ID NO: 971516 - RNA, 23 nt, Human
ugucucaguccagcaacucccgg

SEQ ID NO: 971517 - RNA, 20 nt, Human
ugugacugcugccuugugag

SEQ ID NO: 971518 - RNA, 22 nt, Human
ugugacugcugccuugugagcu

SEQ ID NO: 971519 - RNA, 20 nt, Human
uucaaugucacaucuggcac

SEQ ID NO: 971520 - RNA, 22 nt, Human
uuccagcuucaggacagagugu

SEQ ID NO: 971521 - RNA, 19 nt, Human
uucccugggggcaguucac

SEQ ID NO: 971522 - RNA, 18 nt, Human
uuggcaccgagaggcugc

SEQ ID NO: 971523 - RNA, 20 nt, Human
uugggaggaagaacaggggg

SEQ ID NO: 971524 - RNA, 23 nt, Human
uugggaggaagaacagggggucc

SEQ ID NO: 971525 - RNA, 26 nt, Human
uugucuggaaacauuuuuuauuuuca

SEQ ID NO: 971526 - RNA, 22 nt, Human
uuuccagcuucaggacagagug

SEQ ID NO: 971527 - RNA, 22 nt, Human
uuuuuuuuuuuuuuuugucugg

SEQ ID NO: 971528 - RNA, 18 nt, Human
uuuuuuuuuuuuuuuuug

SEQ ID NO: 971529 - RNA, 24 nt, Human
aaggauaaugggagaggggugggc

SEQ ID NO: 971530 - RNA, 23 nt, Human
acacaccuacaccuccccucaca

SEQ ID NO: 971531 - RNA, 23 nt, Human
acauaccacugcaccccuacaau

SEQ ID NO: 971532 - RNA, 22 nt, Human
aggaaaugguuucucuuucagg

SEQ ID NO: 971533 - RNA, 24 nt, Human
aucaaggaaaugguuucucuuuca

SEQ ID NO: 971534 - RNA, 19 nt, Human
auccugcucagucccaccc

SEQ ID NO: 971535 - RNA, 24 nt, Human
cacauaccacugcaccccuacaau

SEQ ID NO: 971536 - RNA, 26 nt, Human
cacccacacaccuacaccuccccuca

SEQ ID NO: 971537 - RNA, 25 nt, Human
caccuccccucacagcuccagagcc

SEQ ID NO: 971538 - RNA, 19 nt, Human
cacugcaccccuacaaugc

SEQ ID NO: 971539 - RNA, 21 nt, Human
cacugcaccccuacaaugccc

SEQ ID NO: 971540 - RNA, 20 nt, Human
cagcaaguuccuuacacaau

SEQ ID NO: 971541 - RNA, 22 nt, Human
cauccugcucagucccacccac

SEQ ID NO: 971542 - RNA, 23 nt, Human
cccacacaccuacaccuccccuc

SEQ ID NO: 971543 - RNA, 24 nt, Human
cccacccacccugggcagaagcug

SEQ ID NO: 971544 - RNA, 18 nt, Human
cccagaugccccaggccu

SEQ ID NO: 971545 - RNA, 22 nt, Human
cccugagcaacgcucuuggccu

SEQ ID NO: 971546 - RNA, 21 nt, Human
ccuacaaugcccagaugcccc

SEQ ID NO: 971547 - RNA, 22 nt, Human
ccuacaccuccccucacagcuc

SEQ ID NO: 971548 - RNA, 24 nt, Human
cugcaccccuacaaugcccagaug

SEQ ID NO: 971549 - RNA, 20 nt, Human
gcacagagcagucacccaca

SEQ ID NO: 971550 - RNA, 24 nt, Human
gcccugagcaacgcucuuggccua

SEQ ID NO: 971551 - RNA, 18 nt, Human
ggacguggagggcuggcg

SEQ ID NO: 971552 - RNA, 19 nt, Human
ggaggacguggagggcugg

SEQ ID NO: 971553 - RNA, 18 nt, Human
ggcagaagcugcccugag

SEQ ID NO: 971554 - RNA, 19 nt, Human
uacaaugcccagaugcccc

SEQ ID NO: 971555 - RNA, 19 nt, Human
ucccacccacccugggcag

SEQ ID NO: 971556 - RNA, 22 nt, Human
uccgagggaugcaacccacgcc

SEQ ID NO: 971557 - RNA, 20 nt, Human
ugccccaggccugagucagc

SEQ ID NO: 971558 - RNA, 20 nt, Human
uuuuuuuuuuuuaggagccu

SEQ ID NO: 971559 - RNA, 25 nt, Human
uuuuuuuuuuuuuuuuuuuuuuagg

SEQ ID NO: 971560 - RNA, 21 nt, Human
agccccccagcccagggcugg

SEQ ID NO: 971561 - RNA, 21 nt, Human
aggagccccccagcccagggc

SEQ ID NO: 971562 - RNA, 20 nt, Human
ccagcccagggcugggcucu

SEQ ID NO: 971563 - RNA, 18 nt, Human
cccagcccagggcugggc

SEQ ID NO: 971564 - RNA, 19 nt, Human
ccccagcccagggcugggc

SEQ ID NO: 971565 - RNA, 21 nt, Human
ccccccagcccagggcugggc

SEQ ID NO: 971566 - RNA, 23 nt, Human
cgggcagaagucaggggggccac

SEQ ID NO: 971567 - RNA, 25 nt, Human
cuaaggucuuggggucucugagggg

SEQ ID NO: 971568 - RNA, 24 nt, Human
cucugaggggcacugucuucaggg

SEQ ID NO: 971569 - RNA, 20 nt, Human
gggucucugaggggcacugu

SEQ ID NO: 971570 - RNA, 18 nt, Human
uaaggucuuggggucucu

SEQ ID NO: 971571 - RNA, 22 nt, Human
uaaggucuuggggucucugagg

SEQ ID NO: 971572 - RNA, 18 nt, Human
ucaaucccuaaggucuug

SEQ ID NO: 971573 - RNA, 23 nt, Human
ucccuaaggucuuggggucucug

SEQ ID NO: 971574 - RNA, 18 nt, Human
ucucugaggggcacuguc

SEQ ID NO: 971575 - RNA, 25 nt, Human
ucuuggggucucugaggggcacugu

SEQ ID NO: 971576 - RNA, 18 nt, Human
ugaggagccccccagccc

SEQ ID NO: 971577 - RNA, 24 nt, Human
ugaggcccaggugucaaucccuaa

SEQ ID NO: 971578 - RNA, 19 nt, Human
ccucaugcuguuuccuggg

SEQ ID NO: 971579 - RNA, 24 nt, Human
ccuggggucuccacucccagacuc

SEQ ID NO: 971580 - RNA, 20 nt, Human
cucacacccucaccucaugc

SEQ ID NO: 971581 - RNA, 20 nt, Human
ucccucacacccucaccuca

SEQ ID NO: 971582 - RNA, 18 nt, Human
uccuggggucuccacucc

SEQ ID NO: 971583 - RNA, 24 nt, Human
ucuccacucccagacuccuacucc

SEQ ID NO: 971584 - RNA, 18 nt, Human
ugcacagaaucucagaac

SEQ ID NO: 971585 - RNA, 28 nt, Human
aaaaggaaacagagcacggaugacagaa

SEQ ID NO: 971586 - RNA, 19 nt, Human
aaaggaagagggggucggc

SEQ ID NO: 971587 - RNA, 20 nt, Human
aaaggggaaaaggaagaggg

SEQ ID NO: 971588 - RNA, 18 nt, Human
aagcagcuuccaguuuua

SEQ ID NO: 971589 - RNA, 21 nt, Human
aaggaaacagagcacggauga

SEQ ID NO: 971590 - RNA, 20 nt, Human
aaggucccuuugugcuuccu

SEQ ID NO: 971591 - RNA, 20 nt, Human
acaccaaaaccucccucuuc

SEQ ID NO: 971592 - RNA, 23 nt, Human
agacaaauggaucuucuauuccc

SEQ ID NO: 971593 - RNA, 19 nt, Human
agccaguugcugcuccagg

SEQ ID NO: 971594 - RNA, 19 nt, Human
aggaugcacuuccaucccu

SEQ ID NO: 971595 - RNA, 23 nt, Human
agggcucugggguagggcagggg

SEQ ID NO: 971596 - RNA, 18 nt, Human
aggggcccgaguuucugc

SEQ ID NO: 971597 - RNA, 18 nt, Human
auggagacagugaggugg

SEQ ID NO: 971598 - RNA, 25 nt, Human
caagcgacgagaaaaacggugccuc

SEQ ID NO: 971599 - RNA, 18 nt, Human
cacuguggcuggcagaac

SEQ ID NO: 971600 - RNA, 27 nt, Human
caggaacaaagauaauguggagaagaa

SEQ ID NO: 971601 - RNA, 26 nt, Human
ccagccacagucucacagucuuccuc

SEQ ID NO: 971602 - RNA, 23 nt, Human
ccagggugagcuccgugguucag

SEQ ID NO: 971603 - RNA, 19 nt, Human
ccugaaucaggcccugggg

SEQ ID NO: 971604 - RNA, 18 nt, Human
ccugucccugcagaacac

SEQ ID NO: 971605 - RNA, 20 nt, Human
cgagaaaaacggugccucac

SEQ ID NO: 971606 - RNA, 23 nt, Human
cgcgaccucggcguccggacgcg

SEQ ID NO: 971607 - RNA, 22 nt, Human
cgcucccuuuucugagggcgga

SEQ ID NO: 971608 - RNA, 18 nt, Human
cggaugacagaaaugaca

SEQ ID NO: 971609 - RNA, 21 nt, Human
cggcagccuggcucaggaguc

SEQ ID NO: 971610 - RNA, 25 nt, Human
cggggaacaccgggcugagggaguc

SEQ ID NO: 971611 - RNA, 20 nt, Human
cucugggguagggcaggggc

SEQ ID NO: 971612 - RNA, 24 nt, Human
cugaaaguaauaauaggggcucac

SEQ ID NO: 971613 - RNA, 27 nt, Human
cuuggauccacauuugccccgucucuu

SEQ ID NO: 971614 - RNA, 22 nt, Human
cuuugguaugagcuagaucauc

SEQ ID NO: 971615 - RNA, 20 nt, Human
gaagagggggucggccagua

SEQ ID NO: 971616 - RNA, 22 nt, Human
gaagccgcgcggcgacggggga

SEQ ID NO: 971617 - RNA, 20 nt, Human
gaccucggcguccggacgcg

SEQ ID NO: 971618 - RNA, 18 nt, Human
gaccuggucauggcccug

SEQ ID NO: 971619 - RNA, 21 nt, Human
gagaaaaacggugccucacau

SEQ ID NO: 971620 - RNA, 25 nt, Human
gagucaguccugaaucaggcccugg

SEQ ID NO: 971621 - RNA, 22 nt, Human
gcggcgacgggggaggccuuca

SEQ ID NO: 971622 - RNA, 23 nt, Human
gcggcgacgggggaggccuucac

SEQ ID NO: 971623 - RNA, 21 nt, Human
ggagacagugagguggaaaac

SEQ ID NO: 971624 - RNA, 19 nt, Human
ggauggagacagugaggug

SEQ ID NO: 971625 - RNA, 18 nt, Human
ggcacagugaggacagag

SEQ ID NO: 971626 - RNA, 19 nt, Human
guccuuugguaugagcuag

SEQ ID NO: 971627 - RNA, 20 nt, Human
guggcuggcagaacugguac

SEQ ID NO: 971628 - RNA, 23 nt, Human
uaauguggagaagaaacuccaaa

SEQ ID NO: 971629 - RNA, 20 nt, Human
uacacaaagacaaauggauc

SEQ ID NO: 971630 - RNA, 20 nt, Human
uauguugaaucagaagccau

SEQ ID NO: 971631 - RNA, 19 nt, Human
ucacuaaaggggaaaagga

SEQ ID NO: 971632 - RNA, 23 nt, Human
ucagagguggaggauggagacag

SEQ ID NO: 971633 - RNA, 20 nt, Human
uccaaaaggaaacagagcac

SEQ ID NO: 971634 - RNA, 24 nt, Human
ucccagaggaccagggacaccucg

SEQ ID NO: 971635 - RNA, 19 nt, Human
uccccgaaagagggcuagg

SEQ ID NO: 971636 - RNA, 19 nt, Human
ucccucuucagaauggagg

SEQ ID NO: 971637 - RNA, 20 nt, Human
ucccucuucagaauggaggu

SEQ ID NO: 971638 - RNA, 20 nt, Human
ucccuguacuacaggguggc

SEQ ID NO: 971639 - RNA, 18 nt, Human
uccgugguucagucagag

SEQ ID NO: 971640 - RNA, 19 nt, Human
ugacagcuucuccugcagg

SEQ ID NO: 971641 - RNA, 19 nt, Human
ugagaucaacaucgcuccc

SEQ ID NO: 971642 - RNA, 21 nt, Human
ugagcuagaucauccaggccu

SEQ ID NO: 971643 - RNA, 22 nt, Human
ugagcuagaucauccaggccug

SEQ ID NO: 971644 - RNA, 21 nt, Human
ugaggacagaggcgggguccu

SEQ ID NO: 971645 - RNA, 21 nt, Human
ugagguggaaaacgugcuugc

SEQ ID NO: 971646 - RNA, 25 nt, Human
ugccccgucucuuaaguguccaucu

SEQ ID NO: 971647 - RNA, 27 nt, Human
ugccucacaugcuugagaugugacagc

SEQ ID NO: 971648 - RNA, 21 nt, Human
uggagaagaaacuccaaaagg

SEQ ID NO: 971649 - RNA, 21 nt, Human
uggauccacauuugccccguc

SEQ ID NO: 971650 - RNA, 26 nt, Human
uggcucaggagucagguagauagaug

SEQ ID NO: 971651 - RNA, 19 nt, Human
uggggacuacaggggaagc

SEQ ID NO: 971652 - RNA, 26 nt, Human
ugguggagagucaguccugaaucagg

SEQ ID NO: 971653 - RNA, 20 nt, Human
ugucacagacaaucugaaag

SEQ ID NO: 971654 - RNA, 20 nt, Human
ugugacagcuucuccugcag

SEQ ID NO: 971655 - RNA, 27 nt, Human
uucagaauggagguagacagauaaaaa

SEQ ID NO: 971656 - RNA, 18 nt, Human
uuuuuuuuuuuuaggucc

SEQ ID NO: 971657 - RNA, 21 nt, Human
uuuuuuuuuuuuuuuuuuagg

SEQ ID NO: 971658 - RNA, 18 nt, Human
aaaaauauacuucuucca

SEQ ID NO: 971659 - RNA, 21 nt, Human
aaagcgcuccgcccggggccg

SEQ ID NO: 971660 - RNA, 20 nt, Human
aagaaccugggagcgcgcag

SEQ ID NO: 971661 - RNA, 22 nt, Human
aagcacugaaaauaugagacau

SEQ ID NO: 971662 - RNA, 18 nt, Human
aaggaauucuagggucaa

SEQ ID NO: 971663 - RNA, 20 nt, Human
aaugccaauacauaauuuuu

SEQ ID NO: 971664 - RNA, 19 nt, Human
aauuuccuuuuucuuaggc

SEQ ID NO: 971665 - RNA, 23 nt, Human
acacacacacacauacacacaca

SEQ ID NO: 971666 - RNA, 23 nt, Human
acacacacacauacacacacaca

SEQ ID NO: 971667 - RNA, 21 nt, Human
acacauacacacacacacaua

SEQ ID NO: 971668 - RNA, 18 nt, Human
agaaagggagggugcggg

SEQ ID NO: 971669 - RNA, 21 nt, Human
agaaagggagggugcggggug

SEQ ID NO: 971670 - RNA, 21 nt, Human
agcacugaaaauaugagacau

SEQ ID NO: 971671 - RNA, 19 nt, Human
agcagguugagacagaugc

SEQ ID NO: 971672 - RNA, 20 nt, Human
aggaauucuagggucaaggu

SEQ ID NO: 971673 - RNA, 22 nt, Human
agggagggugcggggugggucg

SEQ ID NO: 971674 - RNA, 23 nt, Human
agggagggugcggggugggucgg

SEQ ID NO: 971675 - RNA, 23 nt, Human
agggugcagaaagggagggugcg

SEQ ID NO: 971676 - RNA, 21 nt, Human
caauacauaauuuuuugugug

SEQ ID NO: 971677 - RNA, 24 nt, Human
cacacacacacauacacacacaca

SEQ ID NO: 971678 - RNA, 22 nt, Human
cacacacauacacacacacaca

SEQ ID NO: 971679 - RNA, 19 nt, Human
cacacuaagaaaaaucagc

SEQ ID NO: 971680 - RNA, 18 nt, Human
cacuggauuuaagugugg

SEQ ID NO: 971681 - RNA, 21 nt, Human
cagauucccugaucacuuuuc

SEQ ID NO: 971682 - RNA, 20 nt, Human
cagggcaaacauuuuccccc

SEQ ID NO: 971683 - RNA, 22 nt, Human
caguaugagugagguguuuccu

SEQ ID NO: 971684 - RNA, 19 nt, Human
caguauuuuauuuagaugg

SEQ ID NO: 971685 - RNA, 23 nt, Human
cccauacuuacugguuccaaaaa

SEQ ID NO: 971686 - RNA, 22 nt, Human
cuacuauggaugagaaacaaag

SEQ ID NO: 971687 - RNA, 19 nt, Human
cugcacgcgaaagcgcucc

SEQ ID NO: 971688 - RNA, 21 nt, Human
gacucaucagugcauuagcaa

SEQ ID NO: 971689 - RNA, 18 nt, Human
gcaaacaaaguuuguauc

SEQ ID NO: 971690 - RNA, 20 nt, Human
gcuguguagcuaccucuccu

SEQ ID NO: 971691 - RNA, 23 nt, Human
ggaagucugugccucagcagguu

SEQ ID NO: 971692 - RNA, 20 nt, Human
ggagcggggccgggcgguca

SEQ ID NO: 971693 - RNA, 23 nt, Human
ggagugguggcugcacgcgaaag

SEQ ID NO: 971694 - RNA, 18 nt, Human
ggaugagaaacaaaguug

SEQ ID NO: 971695 - RNA, 21 nt, Human
ggcaaaacuuuauauacuuga

SEQ ID NO: 971696 - RNA, 22 nt, Human
ggggugugggugcgagggugca

SEQ ID NO: 971697 - RNA, 22 nt, Human
gggucggggugcagugcggagc

SEQ ID NO: 971698 - RNA, 22 nt, Human
ggugcgagggugcagaaaggga

SEQ ID NO: 971699 - RNA, 20 nt, Human
ggugcggggugggucggggu

SEQ ID NO: 971700 - RNA, 24 nt, Human
uaaagagagagaccuguagagaga

SEQ ID NO: 971701 - RNA, 25 nt, Human
uaaauaaaugccaauacauaauuuu

SEQ ID NO: 971702 - RNA, 19 nt, Human
uaaauacaauauaauauua

SEQ ID NO: 971703 - RNA, 20 nt, Human
uaaguaaagaccuugugacc

SEQ ID NO: 971704 - RNA, 22 nt, Human
uaaguuaacuucauuuuguuca

SEQ ID NO: 971705 - RNA, 23 nt, Human
uacuacuauggaugagaaacaaa

SEQ ID NO: 971706 - RNA, 20 nt, Human
uacugauugaagcuggaaga

SEQ ID NO: 971707 - RNA, 19 nt, Human
uagcaaacaaaguuuguau

SEQ ID NO: 971708 - RNA, 22 nt, Human
uagcaaacaaaguuuguaucaa

SEQ ID NO: 971709 - RNA, 20 nt, Human
uagcaugcuggguagcaugg

SEQ ID NO: 971710 - RNA, 24 nt, Human
uaggugcuuccuucuagcuuggcc

SEQ ID NO: 971711 - RNA, 18 nt, Human
uauaaugaaacuagacuc

SEQ ID NO: 971712 - RNA, 24 nt, Human
uaucauaacaaauauaaaaacucu

SEQ ID NO: 971713 - RNA, 18 nt, Human
uauuuuauuuagaugggg

SEQ ID NO: 971714 - RNA, 19 nt, Human
ucaagggagugacugaagu

SEQ ID NO: 971715 - RNA, 21 nt, Human
ucaauaccugagaaucgugga

SEQ ID NO: 971716 - RNA, 20 nt, Human
ucagcucaucacuucacuuu

SEQ ID NO: 971717 - RNA, 22 nt, Human
ucauagucacauaaaauucauu

SEQ ID NO: 971718 - RNA, 18 nt, Human
uccaagaaccugggagcg

SEQ ID NO: 971719 - RNA, 24 nt, Human
uccaauauuaacuuauguauuaau

SEQ ID NO: 971720 - RNA, 23 nt, Human
ucccccuguuucugucuauugug

SEQ ID NO: 971721 - RNA, 22 nt, Human
ucugugccucagcagguugaga

SEQ ID NO: 971722 - RNA, 20 nt, Human
ucuuaggcuuuuucacaucu

SEQ ID NO: 971723 - RNA, 20 nt, Human
ugaaaaagugccaaagagua

SEQ ID NO: 971724 - RNA, 23 nt, Human
ugaaaaucaggucuacugauuga

SEQ ID NO: 971725 - RNA, 18 nt, Human
ugagaaagcacugaaaau

SEQ ID NO: 971726 - RNA, 24 nt, Human
ugagaaagcacugaaaauaugaga

SEQ ID NO: 971727 - RNA, 21 nt, Human
ugagaaauugaauuacgugga

SEQ ID NO: 971728 - RNA, 23 nt, Human
ugagaaauugaauuacguggaag

SEQ ID NO: 971729 - RNA, 23 nt, Human
ugaggguaggugaggaauaaugg

SEQ ID NO: 971730 - RNA, 23 nt, Human
ugaguguguauguguaacaccag

SEQ ID NO: 971731 - RNA, 22 nt, Human
ugcauaaguaaagaccuuguga

SEQ ID NO: 971732 - RNA, 19 nt, Human
ugcauaccaucucuccaga

SEQ ID NO: 971733 - RNA, 21 nt, Human
ugcauaccaucucuccagaac

SEQ ID NO: 971734 - RNA, 22 nt, Human
ugcauaccaucucuccagaacu

SEQ ID NO: 971735 - RNA, 23 nt, Human
ugccauuaauaaaagaauaacaa

SEQ ID NO: 971736 - RNA, 24 nt, Human
ugccauuaauaaaagaauaacaaa

SEQ ID NO: 971737 - RNA, 21 nt, Human
ugcuauaaugaaacuagacuc

SEQ ID NO: 971738 - RNA, 22 nt, Human
uggaaacauacaaauuagccca

SEQ ID NO: 971739 - RNA, 20 nt, Human
uggaugagaaacaaaguugu

SEQ ID NO: 971740 - RNA, 20 nt, Human
uguuacuuauuuuaucaugg

SEQ ID NO: 971741 - RNA, 23 nt, Human
uuaaugaauuucuugccccuuuc

SEQ ID NO: 971742 - RNA, 19 nt, Human
uuagcagugugccucucau

SEQ ID NO: 971743 - RNA, 20 nt, Human
uucaagggagugacugaagu

SEQ ID NO: 971744 - RNA, 20 nt, Human
uucaagggagugacugaagu

SEQ ID NO: 971745 - RNA, 24 nt, Human
uucaagggagugacugaaguuauu

SEQ ID NO: 971746 - RNA, 19 nt, Human
uuccugaugcacauggugg

SEQ ID NO: 971747 - RNA, 22 nt, Human
uugaauuacguggaagaaauuu

SEQ ID NO: 971748 - RNA, 20 nt, Human
uuucuugccccuuucucuuu

SEQ ID NO: 971749 - RNA, 23 nt, Human
uuugcccgugcucagaauauuac

SEQ ID NO: 971750 - RNA, 23 nt, Human
aagagccccagauggcugguggg

SEQ ID NO: 971751 - RNA, 23 nt, Human
aaggaagaagagccccagauggc

SEQ ID NO: 971752 - RNA, 20 nt, Human
agaaaggaagaagagcccca

SEQ ID NO: 971753 - RNA, 21 nt, Human
agaaaggaagaagagccccag

SEQ ID NO: 971754 - RNA, 19 nt, Human
auacacggggggaagaaag

SEQ ID NO: 971755 - RNA, 19 nt, Human
ccccagauggcugguggcc

SEQ ID NO: 971756 - RNA, 22 nt, Human
aaauaccccucuugucuuaucc

SEQ ID NO: 971757 - RNA, 21 nt, Human
aaggaugagagggcccgaagc

SEQ ID NO: 971758 - RNA, 20 nt, Human
acacucuuggcacuggccuu

SEQ ID NO: 971759 - RNA, 25 nt, Human
agcagguggacuccaaaauaccccu

SEQ ID NO: 971760 - RNA, 20 nt, Human
aggcacacaggcaccaucca

SEQ ID NO: 971761 - RNA, 20 nt, Human
caacaaccccugagcugaaa

SEQ ID NO: 971762 - RNA, 20 nt, Human
cacuccaggucgggggcagg

SEQ ID NO: 971763 - RNA, 21 nt, Human
ccacccagcuucccaaggguc

SEQ ID NO: 971764 - RNA, 19 nt, Human
ccacuccaggucgggggca

SEQ ID NO: 971765 - RNA, 21 nt, Human
ccagcuucccaagggucucag

SEQ ID NO: 971766 - RNA, 24 nt, Human
cccuccacagccauccccaaggcc

SEQ ID NO: 971767 - RNA, 23 nt, Human
ccgaagccagcaagucucgcccc

SEQ ID NO: 971768 - RNA, 21 nt, Human
ccucuugucuuauccacucca

SEQ ID NO: 971769 - RNA, 20 nt, Human
cgccccaccuaccagccccc

SEQ ID NO: 971770 - RNA, 21 nt, Human
cguucccuccacagccauccc

SEQ ID NO: 971771 - RNA, 24 nt, Human
cuaccagcccccacccagcuuccc

SEQ ID NO: 971772 - RNA, 20 nt, Human
cuuccgccacguucccucca

SEQ ID NO: 971773 - RNA, 19 nt, Human
cuuggcacuggccuuucac

SEQ ID NO: 971774 - RNA, 26 nt, Human
gccccaccuaccagcccccacccagc

SEQ ID NO: 971775 - RNA, 20 nt, Human
ggacuccaaaauaccccucu

SEQ ID NO: 971776 - RNA, 19 nt, Human
ggaugagagggcccgaagc

SEQ ID NO: 971777 - RNA, 18 nt, Human
ggcagggaagcacauggg

SEQ ID NO: 971778 - RNA, 19 nt, Human
gggcagggaagcacauggg

SEQ ID NO: 971779 - RNA, 23 nt, Human
uccaaaauaccccucuugucuua

SEQ ID NO: 971780 - RNA, 31 nt, Human
uccaaaauaccccucuugucuuauccacucu

SEQ ID NO: 971781 - RNA, 22 nt, Human
uccaggucgggggcagggaagc

SEQ ID NO: 971782 - RNA, 24 nt, Human
uccgccacguucccuccacagcca

SEQ ID NO: 971783 - RNA, 23 nt, Human
ugccagagguccagucaggggag

SEQ ID NO: 971784 - RNA, 18 nt, Human
uggacuccaaaauacccc

SEQ ID NO: 971785 - RNA, 19 nt, Human
uuaauggaaugaaggauga

SEQ ID NO: 971786 - RNA, 18 nt, Human
uuuuuuuuuuuuuugcgg

SEQ ID NO: 971787 - RNA, 18 nt, Human
uuuuuuuuuuuuuuuuug

SEQ ID NO: 971788 - RNA, 21 nt, Human
uuuuuuuuuuuuuuuuugcgg

SEQ ID NO: 971789 - RNA, 22 nt, Human
uuuuuuuuuuuuuuuuugcggg

SEQ ID NO: 971790 - RNA, 21 nt, Human
aaaaaaggaaaaagaaaaaga

SEQ ID NO: 971791 - RNA, 23 nt, Human
aaaaccaccauugagcacccuac

SEQ ID NO: 971792 - RNA, 24 nt, Human
aaaagaaaaagaaaacccucagaa

SEQ ID NO: 971793 - RNA, 25 nt, Human
aaaagucaccuauagaaaauugcac

SEQ ID NO: 971794 - RNA, 23 nt, Human
aaaccuacggacucucucccuag

SEQ ID NO: 971795 - RNA, 23 nt, Human
aaaugcuagaauugauuaaagcc

SEQ ID NO: 971796 - RNA, 20 nt, Human
aaccuacggacucucucccu

SEQ ID NO: 971797 - RNA, 23 nt, Human
aagaaauuaguucaaaauaaagc

SEQ ID NO: 971798 - RNA, 20 nt, Human
aagacucugacccccagccc

SEQ ID NO: 971799 - RNA, 22 nt, Human
aagacucugacccccagccccc

SEQ ID NO: 971800 - RNA, 25 nt, Human
aagacucugacccccagccccccac

SEQ ID NO: 971801 - RNA, 25 nt, Human
aagcacaaaaagccagcagcacuuc

SEQ ID NO: 971802 - RNA, 24 nt, Human
aaucacuugaauccagaaggcaga

SEQ ID NO: 971803 - RNA, 24 nt, Human
aaugauguuucuugccacugugga

SEQ ID NO: 971804 - RNA, 20 nt, Human
acaaucauauauuuuuuuca

SEQ ID NO: 971805 - RNA, 25 nt, Human
accuaccuucauguccccucccccc

SEQ ID NO: 971806 - RNA, 21 nt, Human
acguacauaacuuagagaggu

SEQ ID NO: 971807 - RNA, 22 nt, Human
acucuuuguggucagcuuuuga

SEQ ID NO: 971808 - RNA, 24 nt, Human
acugcacuccagcccaggcaacag

SEQ ID NO: 971809 - RNA, 18 nt, Human
acuugaauccagaaggca

SEQ ID NO: 971810 - RNA, 24 nt, Human
acuugaggucgggaguucaagacc

SEQ ID NO: 971811 - RNA, 21 nt, Human
agaaugcauguaacauacugu

SEQ ID NO: 971812 - RNA, 26 nt, Human
agacagaucacuugaggucgggaguu

SEQ ID NO: 971813 - RNA, 18 nt, Human
agagguugcagugagcug

SEQ ID NO: 971814 - RNA, 22 nt, Human
agagguugcagugagcugagau

SEQ ID NO: 971815 - RNA, 23 nt, Human
agagguugcagugagcugagauc

SEQ ID NO: 971816 - RNA, 24 nt, Human
agagguugcagugagcugagauca

SEQ ID NO: 971817 - RNA, 20 nt, Human
agagguugcagugagcuggc

SEQ ID NO: 971818 - RNA, 23 nt, Human
agaucacuugaggucgggaguuc

SEQ ID NO: 971819 - RNA, 18 nt, Human
agcaccaaaauguagugg

SEQ ID NO: 971820 - RNA, 18 nt, Human
agccuagguuaagaaauu

SEQ ID NO: 971821 - RNA, 22 nt, Human
agccuggccaacauggggaaac

SEQ ID NO: 971822 - RNA, 18 nt, Human
aggaaaaagaaaaagaaa

SEQ ID NO: 971823 - RNA, 23 nt, Human
aggaaaaagaaaaagaaaacccu

SEQ ID NO: 971824 - RNA, 22 nt, Human
aggaagagaaaacguuuuaaaa

SEQ ID NO: 971825 - RNA, 21 nt, Human
aggauccuaauuuuuccaucu

SEQ ID NO: 971826 - RNA, 22 nt, Human
aggauccuaauuuuuccaucuu

SEQ ID NO: 971827 - RNA, 22 nt, Human
aggcaacagaacaagacucuga

SEQ ID NO: 971828 - RNA, 19 nt, Human
aggcagagguugcagugag

SEQ ID NO: 971829 - RNA, 20 nt, Human
aggcagagguugcagugagc

SEQ ID NO: 971830 - RNA, 24 nt, Human
aggcagagguugcagugagcugag

SEQ ID NO: 971831 - RNA, 18 nt, Human
aggcaggagaaucacuug

SEQ ID NO: 971832 - RNA, 23 nt, Human
aggcaggagaaucacuugaaucc

SEQ ID NO: 971833 - RNA, 24 nt, Human
aggcaggagaaucacuugaaucca

SEQ ID NO: 971834 - RNA, 21 nt, Human
aggccgagguagacagaucac

SEQ ID NO: 971835 - RNA, 24 nt, Human
aggcugaggcaggagaaucacuug

SEQ ID NO: 971836 - RNA, 22 nt, Human
agguagacagaucacuugaggg

SEQ ID NO: 971837 - RNA, 22 nt, Human
agguagacagaucacuugaggu

SEQ ID NO: 971838 - RNA, 26 nt, Human
agguagacagaucacuugaggucggg

SEQ ID NO: 971839 - RNA, 20 nt, Human
aguauguauaguccauuugu

SEQ ID NO: 971840 - RNA, 22 nt, Human
auagaaaacaugagcuguaaca

SEQ ID NO: 971841 - RNA, 23 nt, Human
aucaugccacugcacuccagccc

SEQ ID NO: 971842 - RNA, 21 nt, Human
aucuccugaaacuuacuaaca

SEQ ID NO: 971843 - RNA, 21 nt, Human
augcauguaacauacugugga

SEQ ID NO: 971844 - RNA, 25 nt, Human
augccacugcacuccagcccaggca

SEQ ID NO: 971845 - RNA, 18 nt, Human
auguccccuccccccuaa

SEQ ID NO: 971846 - RNA, 24 nt, Human
caaaaaaaaaaaaaaaggaaaaag

SEQ ID NO: 971847 - RNA, 23 nt, Human
caacacugaauuuggugaaacac

SEQ ID NO: 971848 - RNA, 24 nt, Human
caagaggcugaggcaggagaauca

SEQ ID NO: 971849 - RNA, 25 nt, Human
caauagaaauuaaaugggucauagu

SEQ ID NO: 971850 - RNA, 21 nt, Human
caauguauuaaaaaugcauau

SEQ ID NO: 971851 - RNA, 18 nt, Human
cacacaaauaaauaaggu

SEQ ID NO: 971852 - RNA, 23 nt, Human
cacaccuguaaucucagcacuuu

SEQ ID NO: 971853 - RNA, 22 nt, Human
cacccuacaauaugccaagcac

SEQ ID NO: 971854 - RNA, 18 nt, Human
caccuguaaucucagcac

SEQ ID NO: 971855 - RNA, 22 nt, Human
caccuguaaucucagcacuuua

SEQ ID NO: 971856 - RNA, 19 nt, Human
caccuguagucccagcuac

SEQ ID NO: 971857 - RNA, 22 nt, Human
caccuguagucccagcuacuca

SEQ ID NO: 971858 - RNA, 19 nt, Human
cacugcacuccagcccagg

SEQ ID NO: 971859 - RNA, 21 nt, Human
cacugcacuccagcccaggca

SEQ ID NO: 971860 - RNA, 22 nt, Human
cacugcacuccagcccaggcaa

SEQ ID NO: 971861 - RNA, 23 nt, Human
cacugcacuccagcccaggcaac

SEQ ID NO: 971862 - RNA, 26 nt, Human
cacugcacuccagcccaggcaacaga

SEQ ID NO: 971863 - RNA, 23 nt, Human
cacuugaggucgggaguucaaga

SEQ ID NO: 971864 - RNA, 19 nt, Human
cagaacaagacucugaccc

SEQ ID NO: 971865 - RNA, 23 nt, Human
cagaacaagacucugacccccag

SEQ ID NO: 971866 - RNA, 24 nt, Human
cagaacaagacucugacccccagc

SEQ ID NO: 971867 - RNA, 24 nt, Human
cagaucacuugaggucgggaguuc

SEQ ID NO: 971868 - RNA, 18 nt, Human
cagcacuuuaggaggccg

SEQ ID NO: 971869 - RNA, 24 nt, Human
cagcacuuuaggaggccgagguag

SEQ ID NO: 971870 - RNA, 18 nt, Human
cagcagcacuguauguga

SEQ ID NO: 971871 - RNA, 20 nt, Human
cagcccaggcaacagaacaa

SEQ ID NO: 971872 - RNA, 21 nt, Human
cagccccccaccaaaaaaaaa

SEQ ID NO: 971873 - RNA, 24 nt, Human
cagccuggccaacauggggaaacu

SEQ ID NO: 971874 - RNA, 24 nt, Human
cagcuacucaagaggcugaggcag

SEQ ID NO: 971875 - RNA, 24 nt, Human
caugagcuguaacaaaugcacgau

SEQ ID NO: 971876 - RNA, 25 nt, Human
cauguacacacagaaaauguuccau

SEQ ID NO: 971877 - RNA, 26 nt, Human
ccaagcacucuguugaaaucugugcu

SEQ ID NO: 971878 - RNA, 24 nt, Human
ccaccaaaaaaaaaaaaaaaggaa

SEQ ID NO: 971879 - RNA, 19 nt, Human
ccacugcacuccagcccag

SEQ ID NO: 971880 - RNA, 20 nt, Human
ccacugcacuccagcccagg

SEQ ID NO: 971881 - RNA, 20 nt, Human
ccacugcacuccagcccagg

SEQ ID NO: 971882 - RNA, 21 nt, Human
ccacugcacuccagcccaggc

SEQ ID NO: 971883 - RNA, 24 nt, Human
ccacugcacuccagcccaggcaac

SEQ ID NO: 971884 - RNA, 18 nt, Human
ccagccccccaccaaaaa

SEQ ID NO: 971885 - RNA, 28 nt, Human
ccagccccccaccaaaaaaaaaaaaaaa

SEQ ID NO: 971886 - RNA, 26 nt, Human
cccaccaaaaaaaaaaaaaaaggaaa

SEQ ID NO: 971887 - RNA, 18 nt, Human
ccccaccaaaaaaaaaaa

SEQ ID NO: 971888 - RNA, 22 nt, Human
ccccaccaaaaaaaaaaaaaaa

SEQ ID NO: 971889 - RNA, 21 nt, Human
cccccuauucuaaaaaaaauc

SEQ ID NO: 971890 - RNA, 22 nt, Human
ccgagguagacagaucacuuga

SEQ ID NO: 971891 - RNA, 25 nt, Human
ccuacaauaugccaagcacucuguu

SEQ ID NO: 971892 - RNA, 28 nt, Human
ccuaccuucauguccccuccccccuaaa

SEQ ID NO: 971893 - RNA, 21 nt, Human
ccuacggacucucucccuaga

SEQ ID NO: 971894 - RNA, 20 nt, Human
ccuggccaacauggggaaac

SEQ ID NO: 971895 - RNA, 24 nt, Human
ccuggccaacauggggaaacuucg

SEQ ID NO: 971896 - RNA, 22 nt, Human
ccuguagucccagcuacucaag

SEQ ID NO: 971897 - RNA, 24 nt, Human
cgagguagacagaucacuugaggu

SEQ ID NO: 971898 - RNA, 20 nt, Human
cgccucuacuaaaaauacaa

SEQ ID NO: 971899 - RNA, 23 nt, Human
cggcuggcuccgccucgccuccu

SEQ ID NO: 971900 - RNA, 21 nt, Human
cgggcaccuguagucccagcu

SEQ ID NO: 971901 - RNA, 23 nt, Human
cuaaaaagaaauauaauaagcac

SEQ ID NO: 971902 - RNA, 21 nt, Human
cuauucuaaaaaaaaucacau

SEQ ID NO: 971903 - RNA, 22 nt, Human
cucacaccuguaaucucagcac

SEQ ID NO: 971904 - RNA, 24 nt, Human
cucacaccuguaaucucagcacuu

SEQ ID NO: 971905 - RNA, 20 nt, Human
cucuacuaaaaauacaaaaa

SEQ ID NO: 971906 - RNA, 19 nt, Human
cugaauugcaaaagucacc

SEQ ID NO: 971907 - RNA, 26 nt, Human
cuuaaacuucuuugggucacaguuuu

SEQ ID NO: 971908 - RNA, 23 nt, Human
gaaaaagaaaacccucagaaugu

SEQ ID NO: 971909 - RNA, 23 nt, Human
gaccugucuucaaagaaaacccu

SEQ ID NO: 971910 - RNA, 21 nt, Human
gacucugacccccagcccccc

SEQ ID NO: 971911 - RNA, 23 nt, Human
gagaucaugccacugcacuccag

SEQ ID NO: 971912 - RNA, 23 nt, Human
gagguagacagaucacuugaggu

SEQ ID NO: 971913 - RNA, 23 nt, Human
gaucacuugaggucgggaguuca

SEQ ID NO: 971914 - RNA, 24 nt, Human
gaucacuugaggucgggaguucaa

SEQ ID NO: 971915 - RNA, 21 nt, Human
gauguaaauguuuuccauuau

SEQ ID NO: 971916 - RNA, 22 nt, Human
gcaggagaaucacuugaaucca

SEQ ID NO: 971917 - RNA, 22 nt, Human
gcauguacauguacacacagug

SEQ ID NO: 971918 - RNA, 20 nt, Human
gcugagaucaugccacugca

SEQ ID NO: 971919 - RNA, 18 nt, Human
ggauuugauguaaauguu

SEQ ID NO: 971920 - RNA, 19 nt, Human
ggcaccuguagucccagcu

SEQ ID NO: 971921 - RNA, 23 nt, Human
ggcacgguggcucacaccuguaa

SEQ ID NO: 971922 - RNA, 21 nt, Human
ggccgggcacgguggcucaca

SEQ ID NO: 971923 - RNA, 21 nt, Human
ggcgggcaccuguagucccag

SEQ ID NO: 971924 - RNA, 25 nt, Human
gggaaaagagguacucaaaacucaa

SEQ ID NO: 971925 - RNA, 21 nt, Human
gggaaacuucgccucuacuaa

SEQ ID NO: 971926 - RNA, 24 nt, Human
gguggcgggcaccuguagucccag

SEQ ID NO: 971927 - RNA, 23 nt, Human
gguggcucacaccuguaaucuca

SEQ ID NO: 971928 - RNA, 24 nt, Human
gguggcucacaccuguaaucucag

SEQ ID NO: 971929 - RNA, 22 nt, Human
ggugugguggcgggcaccugua

SEQ ID NO: 971930 - RNA, 20 nt, Human
gugaaacacaauagaaauua

SEQ ID NO: 971931 - RNA, 24 nt, Human
guugcagugagcugagaucaugcc

SEQ ID NO: 971932 - RNA, 22 nt, Human
uaaaaagaaauauaauaagcac

SEQ ID NO: 971933 - RNA, 25 nt, Human
uaaagaacauuaaugacuaaguuca

SEQ ID NO: 971934 - RNA, 23 nt, Human
uaaaugggucauaguuuucuucc

SEQ ID NO: 971935 - RNA, 19 nt, Human
uaauaagcacauggcugag

SEQ ID NO: 971936 - RNA, 27 nt, Human
uacaauaccauaaauuaucuccaaggg

SEQ ID NO: 971937 - RNA, 21 nt, Human
uacaauaugccaagcacucug

SEQ ID NO: 971938 - RNA, 22 nt, Human
uacguacauaacuuagagaggu

SEQ ID NO: 971939 - RNA, 21 nt, Human
uagaaugggccgggcacggug

SEQ ID NO: 971940 - RNA, 20 nt, Human
uagauauucuuucauuuaau

SEQ ID NO: 971941 - RNA, 24 nt, Human
uaggaggccgagguagacagauca

SEQ ID NO: 971942 - RNA, 21 nt, Human
uaggauccuaauuuuuccauc

SEQ ID NO: 971943 - RNA, 18 nt, Human
uaggugugugugugugug

SEQ ID NO: 971944 - RNA, 23 nt, Human
uauaaagaacauuaaugacuaag

SEQ ID NO: 971945 - RNA, 22 nt, Human
uauaauugugaaauagagacuc

SEQ ID NO: 971946 - RNA, 24 nt, Human
ucaaucacaaggaagagaaaacgu

SEQ ID NO: 971947 - RNA, 24 nt, Human
ucaccuauagaaaauugcacaccu

SEQ ID NO: 971948 - RNA, 23 nt, Human
ucacuugaggucgggaguucaag

SEQ ID NO: 971949 - RNA, 18 nt, Human
ucccucggcuggcuccgc

SEQ ID NO: 971950 - RNA, 20 nt, Human
ucuuugggucacaguuuucc

SEQ ID NO: 971951 - RNA, 18 nt, Human
ugaaaagaauuucuuucc

SEQ ID NO: 971952 - RNA, 21 nt, Human
ugaaauagagacucuuaggug

SEQ ID NO: 971953 - RNA, 18 nt, Human
ugaauuuggugaaacaca

SEQ ID NO: 971954 - RNA, 19 nt, Human
ugacccccagccccccacc

SEQ ID NO: 971955 - RNA, 22 nt, Human
ugagcugagaucaugccacugc

SEQ ID NO: 971956 - RNA, 20 nt, Human
ugaggcaggagaaucacuug

SEQ ID NO: 971957 - RNA, 24 nt, Human
ugaggcaggagaaucacuugaauc

SEQ ID NO: 971958 - RNA, 25 nt, Human
ugaggcaggagaaucacuugaaucc

SEQ ID NO: 971959 - RNA, 23 nt, Human
ugccaagcacucuguugaaaucu

SEQ ID NO: 971960 - RNA, 24 nt, Human
ugccacugcacuccagcccaggca

SEQ ID NO: 971961 - RNA, 20 nt, Human
ugcccaaaucuucccugaau

SEQ ID NO: 971962 - RNA, 21 nt, Human
uggcucacaccuguaaucuca

SEQ ID NO: 971963 - RNA, 22 nt, Human
uggcucacaccuguaaucucag

SEQ ID NO: 971964 - RNA, 24 nt, Human
uggcucacaccuguaaucucagca

SEQ ID NO: 971965 - RNA, 24 nt, Human
ugguagcaggugcacucuccccug

SEQ ID NO: 971966 - RNA, 24 nt, Human
ugguggcgggcaccuguaguccca

SEQ ID NO: 971967 - RNA, 23 nt, Human
ugugguggcgggcaccuguaguc

SEQ ID NO: 971968 - RNA, 20 nt, Human
uuaaaugugaaaaaaaucac

SEQ ID NO: 971969 - RNA, 18 nt, Human
uucauauagaaaacauga

SEQ ID NO: 971970 - RNA, 19 nt, Human
uucaucuucaaucacaagg

SEQ ID NO: 971971 - RNA, 21 nt, Human
uucaucuucaaucacaaggaa

SEQ ID NO: 971972 - RNA, 22 nt, Human
uuccauauaauuuugguuucau

SEQ ID NO: 971973 - RNA, 27 nt, Human
uugacugguagcaggugcacucucccc

SEQ ID NO: 971974 - RNA, 18 nt, Human
uugcagugagcugagauc

SEQ ID NO: 971975 - RNA, 20 nt, Human
uugcagugagcugagaucau

SEQ ID NO: 971976 - RNA, 21 nt, Human
uugcagugagcugagaucaug

SEQ ID NO: 971977 - RNA, 23 nt, Human
uuuauaaaaucugguauaacuga

SEQ ID NO: 971978 - RNA, 21 nt, Human
uuucccacucauauuugugga

SEQ ID NO: 971979 - RNA, 21 nt, Human
uuuuuccaucuuauuucacuu

SEQ ID NO: 971980 - RNA, 23 nt, Human
aaacaacauguaaacagaaacaa

SEQ ID NO: 971981 - RNA, 22 nt, Human
aaacagaaacaacugcuucagu

SEQ ID NO: 971982 - RNA, 22 nt, Human
aacaacugcuucagucucuaca

SEQ ID NO: 971983 - RNA, 21 nt, Human
aacccaguccacauuuuagga

SEQ ID NO: 971984 - RNA, 20 nt, Human
agggcagugcuaagacagga

SEQ ID NO: 971985 - RNA, 21 nt, Human
auaaacaacauguaaacagaa

SEQ ID NO: 971986 - RNA, 23 nt, Human
caggaagagcuagcagggcagug

SEQ ID NO: 971987 - RNA, 20 nt, Human
ccgccgcguccccgcucccu

SEQ ID NO: 971988 - RNA, 22 nt, Human
cggccgcccgucgguccgucgg

SEQ ID NO: 971989 - RNA, 20 nt, Human
gcagugcuaagacaggaaac

SEQ ID NO: 971990 - RNA, 22 nt, Human
uaaacaacauguaaacagaaac

SEQ ID NO: 971991 - RNA, 19 nt, Human
uaagacaggaaacccaguc

SEQ ID NO: 971992 - RNA, 22 nt, Human
uccagaaaaaaacaaaacaaaa

SEQ ID NO: 971993 - RNA, 24 nt, Human
ucccugcgcugccccgucuguccg

SEQ ID NO: 971994 - RNA, 25 nt, Human
ugccaaaacaccuccucaauaaaca

SEQ ID NO: 971995 - RNA, 23 nt, Human
ugccccgucuguccggccggccg

SEQ ID NO: 971996 - RNA, 21 nt, Human
uuccagaaaaaaacaaaacaa

SEQ ID NO: 971997 - RNA, 20 nt, Human
uuugccaaaacaccuccuca

SEQ ID NO: 971998 - RNA, 23 nt, Human
uuuuuuuuuuuuuuuuuuaacag

SEQ ID NO: 971999 - RNA, 19 nt, Human
aaagugcugggauuacaga

SEQ ID NO: 972000 - RNA, 26 nt, Human
aaauagccauaaauuuaaaaaacuuc

SEQ ID NO: 972001 - RNA, 22 nt, Human
aacacuuauccacagauucuca

SEQ ID NO: 972002 - RNA, 25 nt, Human
aagcaaugcaaugucaauguaaaau

SEQ ID NO: 972003 - RNA, 18 nt, Human
aagugcugggauuacaga

SEQ ID NO: 972004 - RNA, 26 nt, Human
aagugcugggauuacagauguaagcc

SEQ ID NO: 972005 - RNA, 24 nt, Human
aauuuuguauuuuuaguagagaug

SEQ ID NO: 972006 - RNA, 18 nt, Human
acagauguaagccaccau

SEQ ID NO: 972007 - RNA, 19 nt, Human
acccaggcuggaguacagu

SEQ ID NO: 972008 - RNA, 18 nt, Human
acuuugucacccaggcug

SEQ ID NO: 972009 - RNA, 25 nt, Human
acuuugucacccaggcuggaguaca

SEQ ID NO: 972010 - RNA, 19 nt, Human
agaaacucuucuuuaaugu

SEQ ID NO: 972011 - RNA, 23 nt, Human
aggugauccacccccucagccuc

SEQ ID NO: 972012 - RNA, 25 nt, Human
agguguggaaauuacugacaaagcc

SEQ ID NO: 972013 - RNA, 20 nt, Human
aguacaguggugcaaucuug

SEQ ID NO: 972014 - RNA, 24 nt, Human
aguacaguggugcaaucuuggcuc

SEQ ID NO: 972015 - RNA, 21 nt, Human
augggguuucuccauguuggu

SEQ ID NO: 972016 - RNA, 24 nt, Human
augggguuucuccauguuggucag

SEQ ID NO: 972017 - RNA, 21 nt, Human
auuauuuugaacaucuucuuu

SEQ ID NO: 972018 - RNA, 21 nt, Human
auugccaagaucucaagucca

SEQ ID NO: 972019 - RNA, 20 nt, Human
caaaacaacaucuucugaac

SEQ ID NO: 972020 - RNA, 24 nt, Human
caaagugcugggauuacagaugua

SEQ ID NO: 972021 - RNA, 22 nt, Human
caagcaauucuccugccucagc

SEQ ID NO: 972022 - RNA, 20 nt, Human
caaggauuuuuacuuaaaca

SEQ ID NO: 972023 - RNA, 25 nt, Human
caauagcugagauuaccagcaugug

SEQ ID NO: 972024 - RNA, 18 nt, Human
caccaugcccggcucaca

SEQ ID NO: 972025 - RNA, 21 nt, Human
cacugcaaccuccgccucccg

SEQ ID NO: 972026 - RNA, 23 nt, Human
cacugcaaccuccgccucccggg

SEQ ID NO: 972027 - RNA, 21 nt, Human
ccaaagugcugggauuacaga

SEQ ID NO: 972028 - RNA, 22 nt, Human
ccaaagugcugggauuacagau

SEQ ID NO: 972029 - RNA, 24 nt, Human
ccaaagugcugggauuacagaugu

SEQ ID NO: 972030 - RNA, 18 nt, Human
ccaccaugcccggcucac

SEQ ID NO: 972031 - RNA, 19 nt, Human
ccauguuggucaggcuggu

SEQ ID NO: 972032 - RNA, 20 nt, Human
ccauguuggucaggcugguc

SEQ ID NO: 972033 - RNA, 24 nt, Human
ccccucagccucccaaagugcugg

SEQ ID NO: 972034 - RNA, 24 nt, Human
cccgaccucaggugauccaccccc

SEQ ID NO: 972035 - RNA, 26 nt, Human
cccgaccucaggugauccacccccuc

SEQ ID NO: 972036 - RNA, 23 nt, Human
cccggguucaagcaauucuccug

SEQ ID NO: 972037 - RNA, 26 nt, Human
ccgccucccggguucaagcaauucuu

SEQ ID NO: 972038 - RNA, 24 nt, Human
ccucccggguucaagcaauucucc

SEQ ID NO: 972039 - RNA, 22 nt, Human
cgaccucaggugauccaccccc

SEQ ID NO: 972040 - RNA, 20 nt, Human
cuaaaacuuccugauaauga

SEQ ID NO: 972041 - RNA, 24 nt, Human
cuaauuuuguauuuuuaguagaga

SEQ ID NO: 972042 - RNA, 24 nt, Human
cucaagaauugugcgacucauaga

SEQ ID NO: 972043 - RNA, 24 nt, Human
cucacugcaaccuccgccucccgg

SEQ ID NO: 972044 - RNA, 22 nt, Human
cuccauguuggucaggcugguc

SEQ ID NO: 972045 - RNA, 19 nt, Human
cuccuggaugugucucaua

SEQ ID NO: 972046 - RNA, 24 nt, Human
cugaacacaaacacuuauccacag

SEQ ID NO: 972047 - RNA, 23 nt, Human
cugcaaccuccgccucccggguu

SEQ ID NO: 972048 - RNA, 24 nt, Human
cugcaaccuccgccucccggguuc

SEQ ID NO: 972049 - RNA, 23 nt, Human
cugccucagccuccucaauagcu

SEQ ID NO: 972050 - RNA, 23 nt, Human
gaccucaggugauccacccccuc

SEQ ID NO: 972051 - RNA, 24 nt, Human
gagaugggguuucuccauguuggu

SEQ ID NO: 972052 - RNA, 18 nt, Human
gauuacagauguaagcca

SEQ ID NO: 972053 - RNA, 24 nt, Human
gauuacagauguaagccaccaugc

SEQ ID NO: 972054 - RNA, 23 nt, Human
gcuggucuagaacucccgaccuc

SEQ ID NO: 972055 - RNA, 24 nt, Human
ggauuacagauguaagccaccaug

SEQ ID NO: 972056 - RNA, 18 nt, Human
gggguuucuccauguugg

SEQ ID NO: 972057 - RNA, 22 nt, Human
gggguuucuccauguuggucag

SEQ ID NO: 972058 - RNA, 23 nt, Human
ggugauccacccccucagccucc

SEQ ID NO: 972059 - RNA, 22 nt, Human
guaaaauaaauuucuuucucuc

SEQ ID NO: 972060 - RNA, 24 nt, Human
gugaaacaggugguuguucuaaug

SEQ ID NO: 972061 - RNA, 23 nt, Human
gugauccacccccucagccuccc

SEQ ID NO: 972062 - RNA, 18 nt, Human
uaaaaugcauauguuuag

SEQ ID NO: 972063 - RNA, 24 nt, Human
uaaauuucuuucucuccucuuugc

SEQ ID NO: 972064 - RNA, 22 nt, Human
uaacuccuggaugugucucaua

SEQ ID NO: 972065 - RNA, 20 nt, Human
uaaggggaagcaaugcaaug

SEQ ID NO: 972066 - RNA, 23 nt, Human
uacagauguaagccaccaugccc

SEQ ID NO: 972067 - RNA, 19 nt, Human
uacaguggugcaaucuugg

SEQ ID NO: 972068 - RNA, 22 nt, Human
uacaguggugcaaucuuggcuc

SEQ ID NO: 972069 - RNA, 23 nt, Human
uaccagcaugugccaccaugccc

SEQ ID NO: 972070 - RNA, 20 nt, Human
uagagaaugaccacauagua

SEQ ID NO: 972071 - RNA, 24 nt, Human
uaguagagaugggguuucuccaug

SEQ ID NO: 972072 - RNA, 23 nt, Human
uauuauuuugaacaucuucuuug

SEQ ID NO: 972073 - RNA, 24 nt, Human
ucaauagcugagauuaccagcaug

SEQ ID NO: 972074 - RNA, 23 nt, Human
ucacugcaaccuccgccucccgg

SEQ ID NO: 972075 - RNA, 24 nt, Human
ucacugcaaccuccgccucccggg

SEQ ID NO: 972076 - RNA, 25 nt, Human
ucacugcaaccuccgccucccgggu

SEQ ID NO: 972077 - RNA, 27 nt, Human
ucacugcaaccuccgccucccggguuc

SEQ ID NO: 972078 - RNA, 25 nt, Human
ucagaaaaugaaguaaaaaucccua

SEQ ID NO: 972079 - RNA, 18 nt, Human
ucagccucccaaagugcu

SEQ ID NO: 972080 - RNA, 18 nt, Human
ucagccuccucaauagcu

SEQ ID NO: 972081 - RNA, 21 nt, Human
ucagccuccucaauagcugag

SEQ ID NO: 972082 - RNA, 18 nt, Human
ucaguugucucuuuugca

SEQ ID NO: 972083 - RNA, 18 nt, Human
uccacccccucagccucc

SEQ ID NO: 972084 - RNA, 18 nt, Human
ucccaaagugcugggauu

SEQ ID NO: 972085 - RNA, 23 nt, Human
ucccaaagugcugggauuacaga

SEQ ID NO: 972086 - RNA, 21 nt, Human
ucccggguucaagcaauucuc

SEQ ID NO: 972087 - RNA, 24 nt, Human
ucccggguucaagcaauucuccug

SEQ ID NO: 972088 - RNA, 24 nt, Human
uccgccucccggguucaagcaauu

SEQ ID NO: 972089 - RNA, 24 nt, Human
ucuagaaacaucaguuguaaaucu

SEQ ID NO: 972090 - RNA, 24 nt, Human
ucuccugccucagccuccucaaua

SEQ ID NO: 972091 - RNA, 24 nt, Human
ucugacuuugucacccaggcugga

SEQ ID NO: 972092 - RNA, 31 nt, Human
ugaaaaaacaucugacauaauaaauucucaa

SEQ ID NO: 972093 - RNA, 24 nt, Human
ugaacaucuucuuuguugguuauu

SEQ ID NO: 972094 - RNA, 25 nt, Human
ugaagagauauuuuaacagaagaau

SEQ ID NO: 972095 - RNA, 18 nt, Human
ugacaaagccuagauaua

SEQ ID NO: 972096 - RNA, 21 nt, Human
ugacaaagccuagauauagaa

SEQ ID NO: 972097 - RNA, 24 nt, Human
ugacuuugucacccaggcuggagu

SEQ ID NO: 972098 - RNA, 24 nt, Human
ugagauuaccagcaugugccacca

SEQ ID NO: 972099 - RNA, 22 nt, Human
ugaugugaaaaaaaaaaaugaa

SEQ ID NO: 972100 - RNA, 19 nt, Human
ugccaagaucucaagucca

SEQ ID NO: 972101 - RNA, 21 nt, Human
ugccucagccuccucaauagc

SEQ ID NO: 972102 - RNA, 24 nt, Human
ugccucagccuccucaauagcuga

SEQ ID NO: 972103 - RNA, 18 nt, Human
ugcugggauuacagaugu

SEQ ID NO: 972104 - RNA, 24 nt, Human
ugcugggauuacagauguaagcca

SEQ ID NO: 972105 - RNA, 19 nt, Human
ugcuuuuuuucagaauuga

SEQ ID NO: 972106 - RNA, 24 nt, Human
uggaguacaguggugcaaucuugg

SEQ ID NO: 972107 - RNA, 22 nt, Human
ugggauuacagauguaagccac

SEQ ID NO: 972108 - RNA, 24 nt, Human
ugggauuacagauguaagccacca

SEQ ID NO: 972109 - RNA, 25 nt, Human
ugggauuacagauguaagccaccau

SEQ ID NO: 972110 - RNA, 24 nt, Human
ugggguuucuccauguuggucagg

SEQ ID NO: 972111 - RNA, 21 nt, Human
uggucaggcuggucuagaacu

SEQ ID NO: 972112 - RNA, 23 nt, Human
uggucuagaacucccgaccucag

SEQ ID NO: 972113 - RNA, 21 nt, Human
uguauuuuuaguagagauggg

SEQ ID NO: 972114 - RNA, 20 nt, Human
uguuuaucaccaaaguugua

SEQ ID NO: 972115 - RNA, 20 nt, Human
uuaaagcaugaguguuuguu

SEQ ID NO: 972116 - RNA, 18 nt, Human
uuaguagagaugggguuu

SEQ ID NO: 972117 - RNA, 24 nt, Human
uuaguagagaugggguuucuccau

SEQ ID NO: 972118 - RNA, 21 nt, Human
uucaagcaauucuccugccuc

SEQ ID NO: 972119 - RNA, 24 nt, Human
uucaagcaauucuccugccucagc

SEQ ID NO: 972120 - RNA, 21 nt, Human
uucuuucucuccucuuugcca

SEQ ID NO: 972121 - RNA, 23 nt, Human
uuguauuuuuaguagagaugggg

SEQ ID NO: 972122 - RNA, 21 nt, Human
uuucuccauguuggucaggcu

SEQ ID NO: 972123 - RNA, 19 nt, Human
uuuuguauuuuuaguagag

SEQ ID NO: 972124 - RNA, 20 nt, Human
uuuuguauuuuuaguagaga

SEQ ID NO: 972125 - RNA, 22 nt, Human
uuuuuaguagagaugggguuuc

SEQ ID NO: 972126 - RNA, 23 nt, Human
uuuuuuuuuuuuuuggagaugga

SEQ ID NO: 972127 - RNA, 18 nt, Human
agagagcuguugcaaacc

SEQ ID NO: 972128 - RNA, 19 nt, Human
cagcauuuaggugugacga

SEQ ID NO: 972129 - RNA, 18 nt, Human
ccaccaccaccaucacag

SEQ ID NO: 972130 - RNA, 25 nt, Human
gaucagagagcuguugcaaaccuag

SEQ ID NO: 972131 - RNA, 19 nt, Human
gccgaguuggguuggagcu

SEQ ID NO: 972132 - RNA, 21 nt, Human
ggggucaggaguacucuccau

SEQ ID NO: 972133 - RNA, 19 nt, Human
ggugaggcggaguuaagcc

SEQ ID NO: 972134 - RNA, 19 nt, Human
uagcaggaauugaagaaga

SEQ ID NO: 972135 - RNA, 24 nt, Human
ucacaggggagggcuagcuguugc

SEQ ID NO: 972136 - RNA, 23 nt, Human
uggacugggcucggugaggcgga

SEQ ID NO: 972137 - RNA, 19 nt, Human
agggaggggggugaggaag

SEQ ID NO: 972138 - RNA, 23 nt, Human
aggggggugaggaagguacgcga

SEQ ID NO: 972139 - RNA, 19 nt, Human
cccccgcgggcugcccgcc

SEQ ID NO: 972140 - RNA, 22 nt, Human
ccccgcgggcugcccgccggcc

SEQ ID NO: 972141 - RNA, 18 nt, Human
ggagugggcaagggaggg

SEQ ID NO: 972142 - RNA, 18 nt, Human
uccuccugauaggccaga

SEQ ID NO: 972143 - RNA, 18 nt, Human
ugaggaagguacgcgaug

SEQ ID NO: 972144 - RNA, 22 nt, Human
acagcacuccaggauguggcag

SEQ ID NO: 972145 - RNA, 20 nt, Human
agaguccuccucgucccccc

SEQ ID NO: 972146 - RNA, 18 nt, Human
agcaggaggcccugagcc

SEQ ID NO: 972147 - RNA, 20 nt, Human
agcaggaggcccugagccug

SEQ ID NO: 972148 - RNA, 25 nt, Human
aggagaccccgggccccaggacccc

SEQ ID NO: 972149 - RNA, 21 nt, Human
cacagcacuccaggauguggc

SEQ ID NO: 972150 - RNA, 22 nt, Human
cacagcacuccaggauguggca

SEQ ID NO: 972151 - RNA, 18 nt, Human
cagcgccaccuugggcgg

SEQ ID NO: 972152 - RNA, 21 nt, Human
ccccaggacccuggcgucggg

SEQ ID NO: 972153 - RNA, 24 nt, Human
ccccaggccgacuccuccggcccu

SEQ ID NO: 972154 - RNA, 20 nt, Human
cccccaggccgacuccuccg

SEQ ID NO: 972155 - RNA, 24 nt, Human
cccccaggccgacuccuccggccc

SEQ ID NO: 972156 - RNA, 20 nt, Human
ccccccaggccgacuccucc

SEQ ID NO: 972157 - RNA, 21 nt, Human
cccgggccccaggacccuggc

SEQ ID NO: 972158 - RNA, 18 nt, Human
ccuccucguccccccagg

SEQ ID NO: 972159 - RNA, 25 nt, Human
cgagcaggaggcccugagccugacg

SEQ ID NO: 972160 - RNA, 26 nt, Human
cgagcaggaggcccugagccugacgc

SEQ ID NO: 972161 - RNA, 20 nt, Human
cggagaggcugaggccauca

SEQ ID NO: 972162 - RNA, 23 nt, Human
cggcggcggcggcggcguccccg

SEQ ID NO: 972163 - RNA, 22 nt, Human
cguggcaggcacggagaggcug

SEQ ID NO: 972164 - RNA, 24 nt, Human
cucggcggcggcggcggcgucccc

SEQ ID NO: 972165 - RNA, 28 nt, Human
cucugugccaggcccucacagcacuccc

SEQ ID NO: 972166 - RNA, 19 nt, Human
cuuccggauccacucggcg

SEQ ID NO: 972167 - RNA, 29 nt, Human
gauccacucggcggcggcggcggcgacga

SEQ ID NO: 972168 - RNA, 20 nt, Human
gccaccuugggcgggcugug

SEQ ID NO: 972169 - RNA, 20 nt, Human
gcccagcggcggcuccuucc

SEQ ID NO: 972170 - RNA, 19 nt, Human
ggagaggcugaggccauca

SEQ ID NO: 972171 - RNA, 21 nt, Human
ggcaggagcuggucaccugcg

SEQ ID NO: 972172 - RNA, 19 nt, Human
ggggcagcgccaccuuggg

SEQ ID NO: 972173 - RNA, 24 nt, Human
gggguguagccagccgugcgcggg

SEQ ID NO: 972174 - RNA, 24 nt, Human
ggguuggagcagcgagcaggaggc

SEQ ID NO: 972175 - RNA, 24 nt, Human
uaccgcacgacguaggagaccccg

SEQ ID NO: 972176 - RNA, 19 nt, Human
ucacagcacuccaggaugu

SEQ ID NO: 972177 - RNA, 22 nt, Human
ucacagcacuccaggauguggc

SEQ ID NO: 972178 - RNA, 20 nt, Human
ucauguccgugucuccgccu

SEQ ID NO: 972179 - RNA, 21 nt, Human
uccaaagaguccuccucgucc

SEQ ID NO: 972180 - RNA, 20 nt, Human
uccacucggcggcggcggcg

SEQ ID NO: 972181 - RNA, 18 nt, Human
uccccccaggccgacucc

SEQ ID NO: 972182 - RNA, 21 nt, Human
uccggcccugccagccuuucu

SEQ ID NO: 972183 - RNA, 23 nt, Human
ucucugguugaugggguccuugg

SEQ ID NO: 972184 - RNA, 18 nt, Human
ugacgcgggguccguguc

SEQ ID NO: 972185 - RNA, 23 nt, Human
ugaugaugcucugugccaggccc

SEQ ID NO: 972186 - RNA, 24 nt, Human
ugaugggguccuuggcgacguagg

SEQ ID NO: 972187 - RNA, 18 nt, Human
ugcagcccauguaccgca

SEQ ID NO: 972188 - RNA, 22 nt, Human
ugccaggcccucacagcacucc

SEQ ID NO: 972189 - RNA, 20 nt, Human
ugcuccaaagaguccuccuc

SEQ ID NO: 972190 - RNA, 19 nt, Human
uggagcagcgagcaggagg

SEQ ID NO: 972191 - RNA, 22 nt, Human
ugggggcagcgccaccuugggc

SEQ ID NO: 972192 - RNA, 19 nt, Human
uguaccgcacgacguagga

SEQ ID NO: 972193 - RNA, 21 nt, Human
uguggugguuggcgaugaccu

SEQ ID NO: 972194 - RNA, 22 nt, Human
uuuguggaugaagcugcccuuc

SEQ ID NO: 972195 - RNA, 23 nt, Human
accaccccacccaggagggccca

SEQ ID NO: 972196 - RNA, 21 nt, Human
accuugcuccuccaagcgacg

SEQ ID NO: 972197 - RNA, 23 nt, Human
caccaccccacccaggagggccc

SEQ ID NO: 972198 - RNA, 23 nt, Human
caccccacccaggagggcccagc

SEQ ID NO: 972199 - RNA, 19 nt, Human
cagccgcugaccauccccc

SEQ ID NO: 972200 - RNA, 22 nt, Human
ccacccaggagggcccagcugc

SEQ ID NO: 972201 - RNA, 21 nt, Human
ccaccccacccaggagggccc

SEQ ID NO: 972202 - RNA, 24 nt, Human
cccacccaggagggcccagcugcc

SEQ ID NO: 972203 - RNA, 21 nt, Human
cccagcugcccaggagccguc

SEQ ID NO: 972204 - RNA, 19 nt, Human
ccccagcccagcugcuggc

SEQ ID NO: 972205 - RNA, 24 nt, Human
cccccagcuauggcgcaauuugcu

SEQ ID NO: 972206 - RNA, 19 nt, Human
ccccgcugcccccagcuag

SEQ ID NO: 972207 - RNA, 22 nt, Human
cccucaccggccuguccacgcc

SEQ ID NO: 972208 - RNA, 20 nt, Human
ccggggccgccuccaggugc

SEQ ID NO: 972209 - RNA, 22 nt, Human
ccggggccgccuccaggugcag

SEQ ID NO: 972210 - RNA, 20 nt, Human
ccuccaagcgacggcgccug

SEQ ID NO: 972211 - RNA, 25 nt, Human
ccugcaccccagcccagcugcuggc

SEQ ID NO: 972212 - RNA, 24 nt, Human
ccuugggcggagggggcucggcuc

SEQ ID NO: 972213 - RNA, 23 nt, Human
cgcagcucaggccucgcccaccc

SEQ ID NO: 972214 - RNA, 21 nt, Human
cgggcuugcgcgcggcgcccc

SEQ ID NO: 972215 - RNA, 24 nt, Human
cucacagcgucccgcucgcgagcc

SEQ ID NO: 972216 - RNA, 21 nt, Human
cugcaccccagcccagcugcu

SEQ ID NO: 972217 - RNA, 24 nt, Human
cugcugcagcggcuggggccccuu

SEQ ID NO: 972218 - RNA, 20 nt, Human
gagggcgccuugggcggagg

SEQ ID NO: 972219 - RNA, 25 nt, Human
gccagacggcagcagccgcugacca

SEQ ID NO: 972220 - RNA, 20 nt, Human
gccccugcgggcugggaggc

SEQ ID NO: 972221 - RNA, 25 nt, Human
gccucgcccacccccgcugccccca

SEQ ID NO: 972222 - RNA, 23 nt, Human
gcugcagcggcuggggccccuug

SEQ ID NO: 972223 - RNA, 22 nt, Human
ggacuuccggagagggcagccc

SEQ ID NO: 972224 - RNA, 24 nt, Human
gggcggagggggcucggcuccucu

SEQ ID NO: 972225 - RNA, 18 nt, Human
gggcugggaggcaccuug

SEQ ID NO: 972226 - RNA, 20 nt, Human
gggcugggaggcaccuugcu

SEQ ID NO: 972227 - RNA, 19 nt, Human
ggggcagagccaccgaaga

SEQ ID NO: 972228 - RNA, 18 nt, Human
ucccgcucgcgagccaga

SEQ ID NO: 972229 - RNA, 22 nt, Human
uccgcugcugcagcggcugggg

SEQ ID NO: 972230 - RNA, 18 nt, Human
uccggggccgccuccagg

SEQ ID NO: 972231 - RNA, 23 nt, Human
ucuggcaccaccccacccaggag

SEQ ID NO: 972232 - RNA, 22 nt, Human
ugaugaccugcaccccagccca

SEQ ID NO: 972233 - RNA, 24 nt, Human
ugaugaccugcaccccagcccagc

SEQ ID NO: 972234 - RNA, 23 nt, Human
ugcccccagcuauggcgcaauuu

SEQ ID NO: 972235 - RNA, 21 nt, Human
ugugcaaggacuuccggagag

SEQ ID NO: 972236 - RNA, 22 nt, Human
uuccggagagggcagcccgcag

SEQ ID NO: 972237 - RNA, 23 nt, Human
aaaaaaggaaaacaccuagaagg

SEQ ID NO: 972238 - RNA, 20 nt, Human
aaaaacaaaaaaggaaaaca

SEQ ID NO: 972239 - RNA, 25 nt, Human
aaaacaaaaaaaacaaaaaaggaaa

SEQ ID NO: 972240 - RNA, 24 nt, Human
aaaacaaaaaaggaaaacaccuag

SEQ ID NO: 972241 - RNA, 24 nt, Human
aaaacaaaacaaaacaaaaaaaac

SEQ ID NO: 972242 - RNA, 22 nt, Human
aaaacaccuagaaggugaggca

SEQ ID NO: 972243 - RNA, 18 nt, Human
aaaaccaagacauaagua

SEQ ID NO: 972244 - RNA, 18 nt, Human
aaacaaaaaaaacaaaaa

SEQ ID NO: 972245 - RNA, 21 nt, Human
aaacaaaaaaggaaaacaccu

SEQ ID NO: 972246 - RNA, 25 nt, Human
aaacaaaaaaggaaaacaccuagaa

SEQ ID NO: 972247 - RNA, 19 nt, Human
aaacaaaacaaaacaaaaa

SEQ ID NO: 972248 - RNA, 24 nt, Human
aaacaaaacaaaacaaaaaaaaca

SEQ ID NO: 972249 - RNA, 22 nt, Human
aaagagguuguuccuauuuaaa

SEQ ID NO: 972250 - RNA, 22 nt, Human
aacacagauagcuaaaccuaua

SEQ ID NO: 972251 - RNA, 20 nt, Human
aaccauguuuuuaauucuaa

SEQ ID NO: 972252 - RNA, 21 nt, Human
aacucacagccugcaggccuc

SEQ ID NO: 972253 - RNA, 20 nt, Human
aacugcaagaaagugcuaca

SEQ ID NO: 972254 - RNA, 22 nt, Human
aagagaagcaaaaauuccaaaa

SEQ ID NO: 972255 - RNA, 25 nt, Human
aagagaagcaaaaauuccaaaacaa

SEQ ID NO: 972256 - RNA, 21 nt, Human
aagcaaaaauuccaaaacaac

SEQ ID NO: 972257 - RNA, 24 nt, Human
aagcaaaaauuccaaaacaaccau

SEQ ID NO: 972258 - RNA, 23 nt, Human
aagcaaaaauuccaaaacaaccc

SEQ ID NO: 972259 - RNA, 20 nt, Human
aagcucgcucccacccggcc

SEQ ID NO: 972260 - RNA, 22 nt, Human
acaaaaaaggaaaacaccuaga

SEQ ID NO: 972261 - RNA, 18 nt, Human
acaaaacaaaaaaaacaa

SEQ ID NO: 972262 - RNA, 22 nt, Human
acaaaacaaaaaaaacaaaaaa

SEQ ID NO: 972263 - RNA, 26 nt, Human
acaaaacaaaacaaaaaaaacaaaaa

SEQ ID NO: 972264 - RNA, 23 nt, Human
acaaacaagguucagcauccaaa

SEQ ID NO: 972265 - RNA, 18 nt, Human
acauuuuucaacccagca

SEQ ID NO: 972266 - RNA, 22 nt, Human
acgguaagagaagcaaaaauuc

SEQ ID NO: 972267 - RNA, 22 nt, Human
agaagccgagcccucccgccuc

SEQ ID NO: 972268 - RNA, 21 nt, Human
agaaggugaggcaggugauug

SEQ ID NO: 972269 - RNA, 24 nt, Human
agagcugauccaccaaaagaaaau

SEQ ID NO: 972270 - RNA, 18 nt, Human
agcgucugucuuaguucg

SEQ ID NO: 972271 - RNA, 20 nt, Human
agcuaucugagagacugugg

SEQ ID NO: 972272 - RNA, 21 nt, Human
aggaaaacaccuagaagguga

SEQ ID NO: 972273 - RNA, 25 nt, Human
auaaaaccaagacauaaguagccuc

SEQ ID NO: 972274 - RNA, 22 nt, Human
auaaauauaacucacagccugc

SEQ ID NO: 972275 - RNA, 25 nt, Human
auauauguauauauauuuauauaaa

SEQ ID NO: 972276 - RNA, 21 nt, Human
auuucuccaacaguuuucagg

SEQ ID NO: 972277 - RNA, 19 nt, Human
caacuacagaauuuaggca

SEQ ID NO: 972278 - RNA, 23 nt, Human
caagacauaaguagccucauuuc

SEQ ID NO: 972279 - RNA, 23 nt, Human
caagaugcuacuuugccaacaug

SEQ ID NO: 972280 - RNA, 23 nt, Human
caagguucagcauccaaaguuuu

SEQ ID NO: 972281 - RNA, 22 nt, Human
cacaccagcaaccacaugauaa

SEQ ID NO: 972282 - RNA, 24 nt, Human
caccaagaugcuacuuugccaaca

SEQ ID NO: 972283 - RNA, 18 nt, Human
caccagcaaccacaugau

SEQ ID NO: 972284 - RNA, 20 nt, Human
caccagcaaccacaugauaa

SEQ ID NO: 972285 - RNA, 22 nt, Human
cacccggccugauccgacgggu

SEQ ID NO: 972286 - RNA, 20 nt, Human
cagcagagcuucaacuacag

SEQ ID NO: 972287 - RNA, 22 nt, Human
cauaaguagccucauuucaaaa

SEQ ID NO: 972288 - RNA, 21 nt, Human
ccaaacccacgcacagaaugc

SEQ ID NO: 972289 - RNA, 21 nt, Human
ccaccaaaagaaaauuauccc

SEQ ID NO: 972290 - RNA, 20 nt, Human
ccaggggcggcggccacucu

SEQ ID NO: 972291 - RNA, 18 nt, Human
cccgcaagcucgcuccca

SEQ ID NO: 972292 - RNA, 21 nt, Human
cccgggcuccggcccgcggug

SEQ ID NO: 972293 - RNA, 22 nt, Human
cccgugucacggcgagucucca

SEQ ID NO: 972294 - RNA, 20 nt, Human
cccuccgccgagcccggccc

SEQ ID NO: 972295 - RNA, 22 nt, Human
ccggcuggcggcggcgggcgcg

SEQ ID NO: 972296 - RNA, 22 nt, Human
ccucgccuccggcccacccucc

SEQ ID NO: 972297 - RNA, 19 nt, Human
ccuggcaaacucuucuucc

SEQ ID NO: 972298 - RNA, 18 nt, Human
cgcggugggcgccucgcc

SEQ ID NO: 972299 - RNA, 22 nt, Human
cggccacucugggagagagaag

SEQ ID NO: 972300 - RNA, 20 nt, Human
cggcccccgcagcuccggcc

SEQ ID NO: 972301 - RNA, 19 nt, Human
cggccggcggccucggagg

SEQ ID NO: 972302 - RNA, 23 nt, Human
cggccggcggccucggaggcggg

SEQ ID NO: 972303 - RNA, 20 nt, Human
cgggagaaggcggggcggcg

SEQ ID NO: 972304 - RNA, 21 nt, Human
cuaaagauguuuuugucccug

SEQ ID NO: 972305 - RNA, 24 nt, Human
cugauccaccaaaagaaaauuauc

SEQ ID NO: 972306 - RNA, 27 nt, Human
cuggcggcggcgggcgcggcgucccuc

SEQ ID NO: 972307 - RNA, 20 nt, Human
cugucucagacagcaaagua

SEQ ID NO: 972308 - RNA, 22 nt, Human
cuugcacuuaaggacuaaaaac

SEQ ID NO: 972309 - RNA, 24 nt, Human
cuuucaaaacauuuuucaacccag

SEQ ID NO: 972310 - RNA, 21 nt, Human
gaagcaaaaauuccaaaacaa

SEQ ID NO: 972311 - RNA, 24 nt, Human
gaagcaaaaauuccaaaacaacca

SEQ ID NO: 972312 - RNA, 20 nt, Human
gagcccggcccgcgagccgc

SEQ ID NO: 972313 - RNA, 21 nt, Human
gagcuaucugagagacugugg

SEQ ID NO: 972314 - RNA, 19 nt, Human
gauugucuucaugagcuau

SEQ ID NO: 972315 - RNA, 18 nt, Human
gcggccucggaggcgggc

SEQ ID NO: 972316 - RNA, 21 nt, Human
gcggcgucccucggcccccgc

SEQ ID NO: 972317 - RNA, 22 nt, Human
gcuggcggcggcgggcgcggcg

SEQ ID NO: 972318 - RNA, 20 nt, Human
ggaacaaaauaaaaccaaga

SEQ ID NO: 972319 - RNA, 27 nt, Human
ggcagaagaugagaacagaagggaccc

SEQ ID NO: 972320 - RNA, 20 nt, Human
gggcgcggcgucccucggcc

SEQ ID NO: 972321 - RNA, 18 nt, Human
guccaaguaaauuaugcu

SEQ ID NO: 972322 - RNA, 21 nt, Human
uaaaaaacaaacuuggccaga

SEQ ID NO: 972323 - RNA, 23 nt, Human
uaaaaccaagacauaaguagccu

SEQ ID NO: 972324 - RNA, 24 nt, Human
uaaaaccaagacauaaguagccuc

SEQ ID NO: 972325 - RNA, 23 nt, Human
uaaaaccaagacauaaguagcug

SEQ ID NO: 972326 - RNA, 23 nt, Human
uaaacagaauuagcuaagaugga

SEQ ID NO: 972327 - RNA, 19 nt, Human
uaaaucaucuaaaucacug

SEQ ID NO: 972328 - RNA, 18 nt, Human
uaaauuuuucaccagccu

SEQ ID NO: 972329 - RNA, 25 nt, Human
uaacucacagccugcaggccucuga

SEQ ID NO: 972330 - RNA, 23 nt, Human
uaacugaaaacaaacuuucacaa

SEQ ID NO: 972331 - RNA, 25 nt, Human
uaacugcaagaaagugcuacagaca

SEQ ID NO: 972332 - RNA, 24 nt, Human
uaagaagaauuuauuaauacuuag

SEQ ID NO: 972333 - RNA, 22 nt, Human
uaagagaagcaaaaauuccaaa

SEQ ID NO: 972334 - RNA, 18 nt, Human
uaagaugaauauacaaag

SEQ ID NO: 972335 - RNA, 21 nt, Human
uaagaugaauauacaaaguca

SEQ ID NO: 972336 - RNA, 19 nt, Human
uaagccucauaagggacua

SEQ ID NO: 972337 - RNA, 21 nt, Human
uaaguguaugaauuuacaacc

SEQ ID NO: 972338 - RNA, 22 nt, Human
uacaaagucaccuuagucacca

SEQ ID NO: 972339 - RNA, 19 nt, Human
uacaguaacacauucaugu

SEQ ID NO: 972340 - RNA, 18 nt, Human
uacauaauauguauauau

SEQ ID NO: 972341 - RNA, 18 nt, Human
uacauaauauguauauau

SEQ ID NO: 972342 - RNA, 18 nt, Human
uacauaauauguauauau

SEQ ID NO: 972343 - RNA, 22 nt, Human
uauauguauauauauuuauaua

SEQ ID NO: 972344 - RNA, 18 nt, Human
uauguauauauguauaua

SEQ ID NO: 972345 - RNA, 24 nt, Human
uauguauauauguauauauauuua

SEQ ID NO: 972346 - RNA, 20 nt, Human
uauguauauauguauauauu

SEQ ID NO: 972347 - RNA, 24 nt, Human
ucaaaucaaacugaaugauuuaaa

SEQ ID NO: 972348 - RNA, 18 nt, Human
ucccacucaaaucaaacu

SEQ ID NO: 972349 - RNA, 21 nt, Human
ucccacucaaaucaaacugaa

SEQ ID NO: 972350 - RNA, 21 nt, Human
ucccucggcccccgcagcucc

SEQ ID NO: 972351 - RNA, 18 nt, Human
ucccuguugaucaaaaag

SEQ ID NO: 972352 - RNA, 22 nt, Human
uccgagcggucaggacucccgc

SEQ ID NO: 972353 - RNA, 24 nt, Human
uccuccgccgccguccgcucccgc

SEQ ID NO: 972354 - RNA, 21 nt, Human
ucuccuccgccgccguccgcu

SEQ ID NO: 972355 - RNA, 24 nt, Human
ugacauacugaaagagccaaaccc

SEQ ID NO: 972356 - RNA, 27 nt, Human
ugaggcaggugauugucuucaugagcu

SEQ ID NO: 972357 - RNA, 21 nt, Human
uggaacaaaauaaaaccaaga

SEQ ID NO: 972358 - RNA, 24 nt, Human
uggcggcggcgggcgcggcguccc

SEQ ID NO: 972359 - RNA, 20 nt, Human
ugggaauaggauaaaauuug

SEQ ID NO: 972360 - RNA, 24 nt, Human
uguauacaguaacacauucaugug

SEQ ID NO: 972361 - RNA, 19 nt, Human
uguauauauguauauauau

SEQ ID NO: 972362 - RNA, 21 nt, Human
ugucccuguugaucaaaaaga

SEQ ID NO: 972363 - RNA, 26 nt, Human
uuaaaaacaaaacaaaacaaaaaaaa

SEQ ID NO: 972364 - RNA, 30 nt, Human
uuaaaaacaaaacaaaacaaaaaaaacaaa

SEQ ID NO: 972365 - RNA, 23 nt, Human
uuaauaauuacacacaccagcaa

SEQ ID NO: 972366 - RNA, 22 nt, Human
uuauacugucauuuuuaucaua

SEQ ID NO: 972367 - RNA, 19 nt, Human
uucccugcucucccgcgcg

SEQ ID NO: 972368 - RNA, 21 nt, Human
uuccuguuccuguaguuuccu

SEQ ID NO: 972369 - RNA, 23 nt, Human
uuuaaauuuuucaccagccucaa

SEQ ID NO: 972370 - RNA, 22 nt, Human
uuuaagaugaauauacaaaguc

SEQ ID NO: 972371 - RNA, 23 nt, Human
uuuccuggcaaacucuucuucca

SEQ ID NO: 972372 - RNA, 19 nt, Human
uuuucccuucaucuuugcu

SEQ ID NO: 972373 - RNA, 23 nt, Human
uuuuucaucuuuccaaacuuugu

SEQ ID NO: 972374 - RNA, 20 nt, Human
uuuuucucuuuuaaaagagg

SEQ ID NO: 972375 - RNA, 23 nt, Human
cccuacagcuguauucuuggacu

SEQ ID NO: 972376 - RNA, 22 nt, Human
gacccuacagcuguauucuugg

SEQ ID NO: 972377 - RNA, 19 nt, Human
uagaggaggcgguguacgg

SEQ ID NO: 972378 - RNA, 22 nt, Human
uuaaagcaaugacccuacagcu

SEQ ID NO: 972379 - RNA, 19 nt, Human
uuuaagagguaaagaggaa

SEQ ID NO: 972380 - RNA, 21 nt, Human
aacuggcacuucuugaaagcc

SEQ ID NO: 972381 - RNA, 23 nt, Human
aacuggcacuucuugaaagccug

SEQ ID NO: 972382 - RNA, 19 nt, Human
acagagcaggacuccagag

SEQ ID NO: 972383 - RNA, 25 nt, Human
accuggaccacacagagcaggacuc

SEQ ID NO: 972384 - RNA, 22 nt, Human
cucaggguggaaaggaccugga

SEQ ID NO: 972385 - RNA, 21 nt, Human
cugugugccaagccuuucccc

SEQ ID NO: 972386 - RNA, 19 nt, Human
gacuccagagccuccucca

SEQ ID NO: 972387 - RNA, 24 nt, Human
gagcaggacuccagagccuccucc

SEQ ID NO: 972388 - RNA, 21 nt, Human
ucagugguggagccaagucuc

SEQ ID NO: 972389 - RNA, 23 nt, Human
uggaccacacagagcaggacucc

SEQ ID NO: 972390 - RNA, 19 nt, Human
aaggauuuuucuaucuaca

SEQ ID NO: 972391 - RNA, 22 nt, Human
aucaauaagaagcugaaaagaa

SEQ ID NO: 972392 - RNA, 26 nt, Human
auccaagccaaucucguaauguuuac

SEQ ID NO: 972393 - RNA, 28 nt, Human
ucugaaauauuuauuaaagccaggcagc

SEQ ID NO: 972394 - RNA, 19 nt, Human
uugugaggcaucugaaaua

SEQ ID NO: 972395 - RNA, 22 nt, Human
uuuugugaggcaucugaaauau

SEQ ID NO: 972396 - RNA, 21 nt, Human
uuuuuuuuuuuuuuugugagg

SEQ ID NO: 972397 - RNA, 22 nt, Human
uuuuuuuuuuuuuuuugugagg

SEQ ID NO: 972398 - RNA, 18 nt, Human
uuuuuuuuuuuuuuuuug

SEQ ID NO: 972399 - RNA, 19 nt, Human
uuuuuuuuuuuuuuuuugu

SEQ ID NO: 972400 - RNA, 19 nt, Human
aaagacuggugaaacccua

SEQ ID NO: 972401 - RNA, 19 nt, Human
aaagugcugguauuacagg

SEQ ID NO: 972402 - RNA, 24 nt, Human
aaagugcugguauuacaggcguga

SEQ ID NO: 972403 - RNA, 19 nt, Human
aaccugcucuuucacucug

SEQ ID NO: 972404 - RNA, 19 nt, Human
aaccugcucuuucacucuu

SEQ ID NO: 972405 - RNA, 20 nt, Human
aaguagcugggacuacaggc

SEQ ID NO: 972406 - RNA, 22 nt, Human
aaguagcugggacuacaggcau

SEQ ID NO: 972407 - RNA, 24 nt, Human
aaguagcugggacuacaggcaugc

SEQ ID NO: 972408 - RNA, 24 nt, Human
aagugauccgccugccucagccuc

SEQ ID NO: 972409 - RNA, 22 nt, Human
aaguucuccaaguacccaccgg

SEQ ID NO: 972410 - RNA, 24 nt, Human
acaggcauccuggagauuaucucc

SEQ ID NO: 972411 - RNA, 24 nt, Human
acccaggcuggagugcaguggcau

SEQ ID NO: 972412 - RNA, 21 nt, Human
agcaauucuuccugccucggc

SEQ ID NO: 972413 - RNA, 18 nt, Human
aggaagcuucaggacuac

SEQ ID NO: 972414 - RNA, 23 nt, Human
aggaagcuucaggacuacaccaa

SEQ ID NO: 972415 - RNA, 25 nt, Human
aggcuggagugcaguggcaugaucu

SEQ ID NO: 972416 - RNA, 24 nt, Human
agugauccgccugccucagccucc

SEQ ID NO: 972417 - RNA, 20 nt, Human
agugcaguggcaugaucucg

SEQ ID NO: 972418 - RNA, 23 nt, Human
agugcaguggcaugaucucggcu

SEQ ID NO: 972419 - RNA, 24 nt, Human
agugcaguggcaugaucucggcuc

SEQ ID NO: 972420 - RNA, 24 nt, Human
aguggcaugaucucggcucacugc

SEQ ID NO: 972421 - RNA, 24 nt, Human
aguggcucugucacccaggcugga

SEQ ID NO: 972422 - RNA, 21 nt, Human
auggagcuugaguucuugagc

SEQ ID NO: 972423 - RNA, 20 nt, Human
auggaguuuugccacguugg

SEQ ID NO: 972424 - RNA, 24 nt, Human
auggaguuuugccacguuggccag

SEQ ID NO: 972425 - RNA, 20 nt, Human
auuacaggcgugagcacugc

SEQ ID NO: 972426 - RNA, 24 nt, Human
caaagugcugguauuacaggcgug

SEQ ID NO: 972427 - RNA, 27 nt, Human
caaguacccaccggacucaggagcccc

SEQ ID NO: 972428 - RNA, 22 nt, Human
caagugauccgccugccucagc

SEQ ID NO: 972429 - RNA, 20 nt, Human
caccaaagaagcagaaccug

SEQ ID NO: 972430 - RNA, 23 nt, Human
cacguuggccaggcuaguuucaa

SEQ ID NO: 972431 - RNA, 24 nt, Human
cacuaugccuggcuaauuuuugua

SEQ ID NO: 972432 - RNA, 19 nt, Human
caggcgugagcacugcggc

SEQ ID NO: 972433 - RNA, 24 nt, Human
cagggaucuuucuucacaggcauc

SEQ ID NO: 972434 - RNA, 22 nt, Human
ccaaagugcugguauuacaggc

SEQ ID NO: 972435 - RNA, 24 nt, Human
ccaaagugcugguauuacaggcgu

SEQ ID NO: 972436 - RNA, 19 nt, Human
ccacguuggccaggcuagu

SEQ ID NO: 972437 - RNA, 23 nt, Human
cccaaguagcugggacuacaggc

SEQ ID NO: 972438 - RNA, 24 nt, Human
cccaaguagcugggacuacaggca

SEQ ID NO: 972439 - RNA, 24 nt, Human
cccagguucaagcaauucuuccug

SEQ ID NO: 972440 - RNA, 26 nt, Human
ccgccugccucagccucccaaagugc

SEQ ID NO: 972441 - RNA, 22 nt, Human
ccucccagguucaagcaauucu

SEQ ID NO: 972442 - RNA, 18 nt, Human
ccugaccucaagugaucc

SEQ ID NO: 972443 - RNA, 21 nt, Human
ccugaccucaagugauccgcc

SEQ ID NO: 972444 - RNA, 23 nt, Human
ccugaccucaagugauccgccug

SEQ ID NO: 972445 - RNA, 18 nt, Human
ccugcucuuucacucugu

SEQ ID NO: 972446 - RNA, 18 nt, Human
cgcucugaauaaugggau

SEQ ID NO: 972447 - RNA, 21 nt, Human
cuacaccaaagaagcagaacc

SEQ ID NO: 972448 - RNA, 23 nt, Human
cucaagugauccgccugccucag

SEQ ID NO: 972449 - RNA, 22 nt, Human
cuccaaguacccaccggacuca

SEQ ID NO: 972450 - RNA, 26 nt, Human
cuccugaccucaagugauccgccugc

SEQ ID NO: 972451 - RNA, 18 nt, Human
cucugucacccaggcugg

SEQ ID NO: 972452 - RNA, 23 nt, Human
cugccucagccucccaaagugcu

SEQ ID NO: 972453 - RNA, 24 nt, Human
cugccucagccucccaaagugcug

SEQ ID NO: 972454 - RNA, 23 nt, Human
cuggaagucuucuggccugcugg

SEQ ID NO: 972455 - RNA, 24 nt, Human
cuggagugcaguggcaugaucucg

SEQ ID NO: 972456 - RNA, 22 nt, Human
cuguugcauuguguggagugca

SEQ ID NO: 972457 - RNA, 18 nt, Human
gaaugaguuucccuggaa

SEQ ID NO: 972458 - RNA, 24 nt, Human
gaccucaagugauccgccugccuc

SEQ ID NO: 972459 - RNA, 19 nt, Human
gacuacaggcaugcaccac

SEQ ID NO: 972460 - RNA, 20 nt, Human
gcaccacuaugccuggcuaa

SEQ ID NO: 972461 - RNA, 22 nt, Human
gcagacucugccucccagguuc

SEQ ID NO: 972462 - RNA, 20 nt, Human
gccuagugcaucccggcugc

SEQ ID NO: 972463 - RNA, 23 nt, Human
gcuaguuucaaacuccugaccuc

SEQ ID NO: 972464 - RNA, 20 nt, Human
gcucugucacccaggcugga

SEQ ID NO: 972465 - RNA, 25 nt, Human
gcucugucacccaggcuggagugca

SEQ ID NO: 972466 - RNA, 19 nt, Human
gcuggagugcaguggcaug

SEQ ID NO: 972467 - RNA, 24 nt, Human
ggacuacaggcaugcaccacuaug

SEQ ID NO: 972468 - RNA, 20 nt, Human
ggagcccagcuggcuuugcc

SEQ ID NO: 972469 - RNA, 22 nt, Human
ggaguuuugccacguuggccag

SEQ ID NO: 972470 - RNA, 24 nt, Human
ggcucugucacccaggcuggagug

SEQ ID NO: 972471 - RNA, 18 nt, Human
gugauccgccugccucag

SEQ ID NO: 972472 - RNA, 24 nt, Human
gugauccgccugccucagccuccc

SEQ ID NO: 972473 - RNA, 19 nt, Human
guucuccaaguacccaccg

SEQ ID NO: 972474 - RNA, 24 nt, Human
uaauagagauggaguuuugccacg

SEQ ID NO: 972475 - RNA, 24 nt, Human
uaauuuuuguauuuuuaauagaga

SEQ ID NO: 972476 - RNA, 22 nt, Human
uacaggcaugcaccacuaugcc

SEQ ID NO: 972477 - RNA, 22 nt, Human
uagagauggaguuuugccacgu

SEQ ID NO: 972478 - RNA, 19 nt, Human
uauuacaggcgugagcacu

SEQ ID NO: 972479 - RNA, 21 nt, Human
uauuacaggcgugagcacugc

SEQ ID NO: 972480 - RNA, 22 nt, Human
ucaagugauccgccugccucag

SEQ ID NO: 972481 - RNA, 24 nt, Human
ucacccaggcuggagugcaguggc

SEQ ID NO: 972482 - RNA, 19 nt, Human
ucacugcagacucugccuc

SEQ ID NO: 972483 - RNA, 24 nt, Human
ucacugcagacucugccucccagg

SEQ ID NO: 972484 - RNA, 19 nt, Human
ucauccaucauuuucaccu

SEQ ID NO: 972485 - RNA, 19 nt, Human
uccaaguacccaccggacu

SEQ ID NO: 972486 - RNA, 19 nt, Human
uccauacgcgcucugaaua

SEQ ID NO: 972487 - RNA, 24 nt, Human
uccauuuucaucuuggaggaguca

SEQ ID NO: 972488 - RNA, 24 nt, Human
ucccaaagugcugguauuacaggc

SEQ ID NO: 972489 - RNA, 24 nt, Human
ucccaaguagcugggacuacaggc

SEQ ID NO: 972490 - RNA, 20 nt, Human
ucccagguucaagcaauucu

SEQ ID NO: 972491 - RNA, 25 nt, Human
ucccagguucaagcaauucuuccug

SEQ ID NO: 972492 - RNA, 24 nt, Human
ucggaguucccugggaaagacugg

SEQ ID NO: 972493 - RNA, 23 nt, Human
ucuccaaguacccaccggacucu

SEQ ID NO: 972494 - RNA, 23 nt, Human
ucuccucuguuguaucuccugga

SEQ ID NO: 972495 - RNA, 22 nt, Human
ucucgacaaugaaacaucuccu

SEQ ID NO: 972496 - RNA, 24 nt, Human
ucugucacccaggcuggagugcag

SEQ ID NO: 972497 - RNA, 22 nt, Human
ucuucacaggcauccuggagau

SEQ ID NO: 972498 - RNA, 21 nt, Human
ugaaacccuacaagcguuucc

SEQ ID NO: 972499 - RNA, 23 nt, Human
ugaaugaguuucccuggaagucu

SEQ ID NO: 972500 - RNA, 18 nt, Human
ugaccucaagugauccgc

SEQ ID NO: 972501 - RNA, 24 nt, Human
ugaccucaagugauccgccugccu

SEQ ID NO: 972502 - RNA, 24 nt, Human
ugccacguuggccaggcuaguuuc

SEQ ID NO: 972503 - RNA, 31 nt, Human
ugccacguuggccaggcuaguuucaaacucc

SEQ ID NO: 972504 - RNA, 24 nt, Human
ugccucagccucccaaagugcugg

SEQ ID NO: 972505 - RNA, 21 nt, Human
ugccucggcaucccaaguagc

SEQ ID NO: 972506 - RNA, 21 nt, Human
ugcucucgacaaugaaacauc

SEQ ID NO: 972507 - RNA, 19 nt, Human
uggagugcaguggcaugau

SEQ ID NO: 972508 - RNA, 24 nt, Human
uggagugcaguggcaugaucucgg

SEQ ID NO: 972509 - RNA, 24 nt, Human
uggaguuuugccacguuggccagg

SEQ ID NO: 972510 - RNA, 24 nt, Human
uggccaggcuaguuucaaacuccu

SEQ ID NO: 972511 - RNA, 24 nt, Human
uggcucugucacccaggcuggagu

SEQ ID NO: 972512 - RNA, 21 nt, Human
ugggaaagacuggugaaaccc

SEQ ID NO: 972513 - RNA, 21 nt, Human
ugggacuacaggcaugcacca

SEQ ID NO: 972514 - RNA, 23 nt, Human
ugggacuacaggcaugcaccacu

SEQ ID NO: 972515 - RNA, 24 nt, Human
ugggacuacaggcaugcaccacua

SEQ ID NO: 972516 - RNA, 20 nt, Human
ugguauuacaggcgugagca

SEQ ID NO: 972517 - RNA, 22 nt, Human
ugguauuacaggcgugagcacu

SEQ ID NO: 972518 - RNA, 23 nt, Human
ugguauuacaggcgugagcacug

SEQ ID NO: 972519 - RNA, 18 nt, Human
uuaauagagauggaguuu

SEQ ID NO: 972520 - RNA, 18 nt, Human
uuaauagagauggaguuu

SEQ ID NO: 972521 - RNA, 22 nt, Human
uucaagcaauucuuccugccuc

SEQ ID NO: 972522 - RNA, 20 nt, Human
uucuugguucacucgcucau

SEQ ID NO: 972523 - RNA, 21 nt, Human
uucuugguucacucgcucauu

SEQ ID NO: 972524 - RNA, 23 nt, Human
uugagacggaguggcucugucac

SEQ ID NO: 972525 - RNA, 24 nt, Human
uuucacucuguugcauugugugga

SEQ ID NO: 972526 - RNA, 21 nt, Human
uuucccuggaagucuucuggc

SEQ ID NO: 972527 - RNA, 21 nt, Human
uuuuuaauagagauggaguuu

SEQ ID NO: 972528 - RNA, 20 nt, Human
uuuuuguauuuuuaauagag

SEQ ID NO: 972529 - RNA, 23 nt, Human
uuuuuguauuuuuaauagagaug

SEQ ID NO: 972530 - RNA, 23 nt, Human
uuuuuuuuuuugagacggagugg

SEQ ID NO: 972531 - RNA, 22 nt, Human
uuuuuuuuuuuuuugagacgga

SEQ ID NO: 972532 - RNA, 18 nt, Human
uuuuuuuuuuuuuuuuug

SEQ ID NO: 972533 - RNA, 24 nt, Human
aaagugcugggauuacaggcguga

SEQ ID NO: 972534 - RNA, 19 nt, Human
aagugcugggauuacaggc

SEQ ID NO: 972535 - RNA, 19 nt, Human
aagugcugggauuacaggc

SEQ ID NO: 972536 - RNA, 26 nt, Human
aagugcugggauuacaggcgugagcu

SEQ ID NO: 972537 - RNA, 28 nt, Human
acccaggcuggauggagugcaguggugu

SEQ ID NO: 972538 - RNA, 18 nt, Human
acccugucacccaggcug

SEQ ID NO: 972539 - RNA, 18 nt, Human
acugcaagcuccgccucc

SEQ ID NO: 972540 - RNA, 18 nt, Human
agcuccgccuccuggguu

SEQ ID NO: 972541 - RNA, 24 nt, Human
agcuccgccuccuggguucacacu

SEQ ID NO: 972542 - RNA, 21 nt, Human
agcuucacuaaucccaaacaa

SEQ ID NO: 972543 - RNA, 22 nt, Human
agguccuuuuuguacaucuggc

SEQ ID NO: 972544 - RNA, 18 nt, Human
aguagcugggacuacagg

SEQ ID NO: 972545 - RNA, 19 nt, Human
aguagcugggacuacaggc

SEQ ID NO: 972546 - RNA, 19 nt, Human
agugcaguggugugaucuc

SEQ ID NO: 972547 - RNA, 20 nt, Human
agugcaguggugugaucucg

SEQ ID NO: 972548 - RNA, 23 nt, Human
agugcaguggugugaucucggcu

SEQ ID NO: 972549 - RNA, 24 nt, Human
agugcaguggugugaucucggcuc

SEQ ID NO: 972550 - RNA, 24 nt, Human
caaagugcugggauuacaggcgug

SEQ ID NO: 972551 - RNA, 18 nt, Human
caaggaaaaagguuuuuc

SEQ ID NO: 972552 - RNA, 22 nt, Human
cacacuuuucuccugccucagc

SEQ ID NO: 972553 - RNA, 18 nt, Human
cacccugucacccaggcu

SEQ ID NO: 972554 - RNA, 22 nt, Human
cacccugucacccaggcuggau

SEQ ID NO: 972555 - RNA, 18 nt, Human
caccguguuaaccaggau

SEQ ID NO: 972556 - RNA, 24 nt, Human
caccguguuaaccaggauggucuc

SEQ ID NO: 972557 - RNA, 22 nt, Human
cagaaagaaauagcauuucuua

SEQ ID NO: 972558 - RNA, 19 nt, Human
cagacccugaaccagcccc

SEQ ID NO: 972559 - RNA, 20 nt, Human
cagccuccugaguagcuggg

SEQ ID NO: 972560 - RNA, 21 nt, Human
caggcgcccgccaccacgccc

SEQ ID NO: 972561 - RNA, 22 nt, Human
ccaaagugcugggauuacaggc

SEQ ID NO: 972562 - RNA, 22 nt, Human
ccaaagugcugggauuacaggc

SEQ ID NO: 972563 - RNA, 24 nt, Human
ccaaagugcugggauuacaggcgu

SEQ ID NO: 972564 - RNA, 22 nt, Human
cccaaacaacccccaaacucug

SEQ ID NO: 972565 - RNA, 22 nt, Human
cccaaacaacccccaaaggccc

SEQ ID NO: 972566 - RNA, 23 nt, Human
ccccaaacucuguuucagacccu

SEQ ID NO: 972567 - RNA, 20 nt, Human
cccccaaacucuguuucaga

SEQ ID NO: 972568 - RNA, 24 nt, Human
cccccaaacucuguuucagacccu

SEQ ID NO: 972569 - RNA, 21 nt, Human
cccgccaccacgcccagcuaa

SEQ ID NO: 972570 - RNA, 24 nt, Human
cccuugugauccgcccgccucggc

SEQ ID NO: 972571 - RNA, 22 nt, Human
ccuccuggguucacacuuuucu

SEQ ID NO: 972572 - RNA, 23 nt, Human
ccugaguagcugggacuacaggc

SEQ ID NO: 972573 - RNA, 23 nt, Human
ccugaguagcugggacuacaggc

SEQ ID NO: 972574 - RNA, 23 nt, Human
ccugccucagccuccugaguagc

SEQ ID NO: 972575 - RNA, 28 nt, Human
ccugucacccaggcuggauggagugcag

SEQ ID NO: 972576 - RNA, 20 nt, Human
ccuugugauccgcccgccuc

SEQ ID NO: 972577 - RNA, 19 nt, Human
cgccuccuggguucacacu

SEQ ID NO: 972578 - RNA, 24 nt, Human
cgccucggccucccaaagugcugg

SEQ ID NO: 972579 - RNA, 23 nt, Human
cgggguuucaccguguuaaccag

SEQ ID NO: 972580 - RNA, 24 nt, Human
cucagccuccugaguagcugggac

SEQ ID NO: 972581 - RNA, 24 nt, Human
cuccugcccuugugauccgcccgc

SEQ ID NO: 972582 - RNA, 23 nt, Human
cugccucagccuccugaguagcu

SEQ ID NO: 972583 - RNA, 24 nt, Human
cuggcggcaaaggcaguagcuucu

SEQ ID NO: 972584 - RNA, 25 nt, Human
gaguagcugggacuacaggcgcccg

SEQ ID NO: 972585 - RNA, 19 nt, Human
gauuacaggcgugagcuac

SEQ ID NO: 972586 - RNA, 21 nt, Human
gauuacaggcgugagcuacca

SEQ ID NO: 972587 - RNA, 18 nt, Human
ggauggagugcaguggug

SEQ ID NO: 972588 - RNA, 23 nt, Human
gggguuucaccguguuaaccagg

SEQ ID NO: 972589 - RNA, 22 nt, Human
ggguuucaccguguuaaccagg

SEQ ID NO: 972590 - RNA, 23 nt, Human
guauaaacacaaacauuuaaagc

SEQ ID NO: 972591 - RNA, 24 nt, Human
gugauccgcccgccucggccuccc

SEQ ID NO: 972592 - RNA, 21 nt, Human
gugaucucggcucacugcaag

SEQ ID NO: 972593 - RNA, 22 nt, Human
guugcgcugcagcaguuugcug

SEQ ID NO: 972594 - RNA, 24 nt, Human
guuuuaguagagucgggguuucac

SEQ ID NO: 972595 - RNA, 23 nt, Human
uaaacacaaacauuuaaagcuag

SEQ ID NO: 972596 - RNA, 24 nt, Human
uacaggcgcccgccaccacgccca

SEQ ID NO: 972597 - RNA, 23 nt, Human
uagcuucacuaaucccaaacaac

SEQ ID NO: 972598 - RNA, 21 nt, Human
uaguagagucgggguuucacc

SEQ ID NO: 972599 - RNA, 24 nt, Human
uaguagagucgggguuucaccgug

SEQ ID NO: 972600 - RNA, 25 nt, Human
uaguagagucgggguuucaccgugu

SEQ ID NO: 972601 - RNA, 24 nt, Human
ucaccguguuaaccaggauggucu

SEQ ID NO: 972602 - RNA, 18 nt, Human
ucacugcaagcuccgccu

SEQ ID NO: 972603 - RNA, 23 nt, Human
ucacugcaagcuccgccuccugg

SEQ ID NO: 972604 - RNA, 24 nt, Human
ucacugcaagcuccgccuccuggg

SEQ ID NO: 972605 - RNA, 23 nt, Human
ucagccuccugaguagcugggac

SEQ ID NO: 972606 - RNA, 24 nt, Human
ucccaaacaacccccaaacucugu

SEQ ID NO: 972607 - RNA, 24 nt, Human
ucccaaagugcugggauuacaggc

SEQ ID NO: 972608 - RNA, 23 nt, Human
ucccacaguugauaaaaaucuau

SEQ ID NO: 972609 - RNA, 24 nt, Human
uccugaguagcugggacuacaggc

SEQ ID NO: 972610 - RNA, 24 nt, Human
uccuggguucacacuuuucuccug

SEQ ID NO: 972611 - RNA, 18 nt, Human
ucggccucccaaagugcu

SEQ ID NO: 972612 - RNA, 24 nt, Human
ucucacccugucacccaggcugga

SEQ ID NO: 972613 - RNA, 25 nt, Human
ucucacccugucacccaggcuggau

SEQ ID NO: 972614 - RNA, 26 nt, Human
ucucacccugucacccaggcuggaug

SEQ ID NO: 972615 - RNA, 24 nt, Human
ucuccugccucagccuccugagua

SEQ ID NO: 972616 - RNA, 22 nt, Human
ucuguuucagacccugaaccag

SEQ ID NO: 972617 - RNA, 18 nt, Human
ugagacagagucucaccc

SEQ ID NO: 972618 - RNA, 22 nt, Human
ugagacagagucucacccuguc

SEQ ID NO: 972619 - RNA, 24 nt, Human
ugccucagccuccugaguagcugg

SEQ ID NO: 972620 - RNA, 20 nt, Human
ugcugggauuacaggcguga

SEQ ID NO: 972621 - RNA, 19 nt, Human
uggagugcaguggugugau

SEQ ID NO: 972622 - RNA, 23 nt, Human
uggagugcaguggugugaucucg

SEQ ID NO: 972623 - RNA, 24 nt, Human
uggagugcaguggugugaucucgg

SEQ ID NO: 972624 - RNA, 23 nt, Human
uggauggagugcaguggugugau

SEQ ID NO: 972625 - RNA, 21 nt, Human
ugggacuacaggcgcccgcca

SEQ ID NO: 972626 - RNA, 22 nt, Human
ugggacuacaggcgcccgccac

SEQ ID NO: 972627 - RNA, 24 nt, Human
ugggacuacaggcgcccgccacca

SEQ ID NO: 972628 - RNA, 18 nt, Human
ugggauuacaggcgugag

SEQ ID NO: 972629 - RNA, 19 nt, Human
ugggauuacaggcgugagc

SEQ ID NO: 972630 - RNA, 22 nt, Human
ugggauuacaggcgugagcuac

SEQ ID NO: 972631 - RNA, 23 nt, Human
ugggauuacaggcgugagcuacc

SEQ ID NO: 972632 - RNA, 24 nt, Human
ugggauuacaggcgugagcuacca

SEQ ID NO: 972633 - RNA, 21 nt, Human
uguuucagacccugaaccagc

SEQ ID NO: 972634 - RNA, 22 nt, Human
uuaguagagucgggguuucacc

SEQ ID NO: 972635 - RNA, 24 nt, Human
uuaguagagucgggguuucaccgu

SEQ ID NO: 972636 - RNA, 18 nt, Human
uugcaaggaaaaagguuu

SEQ ID NO: 972637 - RNA, 24 nt, Human
uuuguacaucuggcccacugauua

SEQ ID NO: 972638 - RNA, 22 nt, Human
uuuguaguuuuaguagagucgg

SEQ ID NO: 972639 - RNA, 18 nt, Human
uuuuguaguuuuaguaga

SEQ ID NO: 972640 - RNA, 21 nt, Human
uuuuuuguaguuuuaguagag

SEQ ID NO: 972641 - RNA, 20 nt, Human
uuuuuuuuuuugagacagag

SEQ ID NO: 972642 - RNA, 26 nt, Human
uuuuuuuuuuuugagacagagucuca

SEQ ID NO: 972643 - RNA, 18 nt, Human
uuuuuuuuuuuuuuuuug

SEQ ID NO: 972644 - RNA, 24 nt, Human
aaaagaaaaaaaauaugcauauga

SEQ ID NO: 972645 - RNA, 22 nt, Human
aacacaauuacugucauaaacc

SEQ ID NO: 972646 - RNA, 22 nt, Human
aagcacaucauaacaacagcac

SEQ ID NO: 972647 - RNA, 19 nt, Human
agacuugaacagguuggua

SEQ ID NO: 972648 - RNA, 18 nt, Human
agcagccuuucuugucau

SEQ ID NO: 972649 - RNA, 19 nt, Human
agucgaagaacuggaaccg

SEQ ID NO: 972650 - RNA, 23 nt, Human
agucucuuuuuuuuuuuuuauuu

SEQ ID NO: 972651 - RNA, 19 nt, Human
aucaaccugcuuuucacca

SEQ ID NO: 972652 - RNA, 22 nt, Human
aucauaggaaauaaaaacccac

SEQ ID NO: 972653 - RNA, 24 nt, Human
aucuuccuuucacuaaucacguuc

SEQ ID NO: 972654 - RNA, 20 nt, Human
augaaauaagagcauuuuga

SEQ ID NO: 972655 - RNA, 21 nt, Human
augaagagugcgcuacccaag

SEQ ID NO: 972656 - RNA, 21 nt, Human
auucauuacacuugugcugcc

SEQ ID NO: 972657 - RNA, 23 nt, Human
caaacagauaacaacagucgaag

SEQ ID NO: 972658 - RNA, 21 nt, Human
caaauaacugcacuaagguau

SEQ ID NO: 972659 - RNA, 19 nt, Human
caacgagccaaaguaccac

SEQ ID NO: 972660 - RNA, 18 nt, Human
caagcuauuuccuucccc

SEQ ID NO: 972661 - RNA, 19 nt, Human
caauacuaggcaccauaaa

SEQ ID NO: 972662 - RNA, 21 nt, Human
caccuggacacagugaaaauu

SEQ ID NO: 972663 - RNA, 22 nt, Human
caguacagaccaacacggucaa

SEQ ID NO: 972664 - RNA, 18 nt, Human
cauaaaauguaaacacaa

SEQ ID NO: 972665 - RNA, 27 nt, Human
caugauaacuacuucccuuauaugcaa

SEQ ID NO: 972666 - RNA, 22 nt, Human
ccaaaguaccaccuggacacag

SEQ ID NO: 972667 - RNA, 22 nt, Human
ccgauacugcaagauaccacuc

SEQ ID NO: 972668 - RNA, 20 nt, Human
ccgccgggaccgcgggcgga

SEQ ID NO: 972669 - RNA, 24 nt, Human
ccuuauaugcaaacauuagagcua

SEQ ID NO: 972670 - RNA, 20 nt, Human
cggcggcggacgcuggcugg

SEQ ID NO: 972671 - RNA, 23 nt, Human
cugcccuugacauaaaaugauuu

SEQ ID NO: 972672 - RNA, 19 nt, Human
cuuucuugucaucugaugg

SEQ ID NO: 972673 - RNA, 18 nt, Human
gaacgcaccuggcgccgc

SEQ ID NO: 972674 - RNA, 23 nt, Human
gaacgcaccuggcgccgccggga

SEQ ID NO: 972675 - RNA, 22 nt, Human
gacgcuggcuggagccgggcag

SEQ ID NO: 972676 - RNA, 24 nt, Human
gagcagcuucucaaauaaugcagu

SEQ ID NO: 972677 - RNA, 23 nt, Human
gaggaaaacugauuuugcaaguu

SEQ ID NO: 972678 - RNA, 23 nt, Human
gcaaagcugcccuugacauaaaa

SEQ ID NO: 972679 - RNA, 18 nt, Human
ggaagaggauguuuggag

SEQ ID NO: 972680 - RNA, 24 nt, Human
ggaguuuaggcuacagagcauuca

SEQ ID NO: 972681 - RNA, 20 nt, Human
ggcggacucagcccaggaag

SEQ ID NO: 972682 - RNA, 21 nt, Human
ggcggcggcggacgcuggcug

SEQ ID NO: 972683 - RNA, 20 nt, Human
gggcggggagccuggggcag

SEQ ID NO: 972684 - RNA, 25 nt, Human
gugcaguuuguccagccaguggaag

SEQ ID NO: 972685 - RNA, 23 nt, Human
uaaaaacccacaaaugaaaaggu

SEQ ID NO: 972686 - RNA, 20 nt, Human
uaaaacagacaaguauuuug

SEQ ID NO: 972687 - RNA, 22 nt, Human
uaaacacaauuacugucauaaa

SEQ ID NO: 972688 - RNA, 18 nt, Human
uaacaacagcacagugaa

SEQ ID NO: 972689 - RNA, 22 nt, Human
uaacauuuugucaauacuaggc

SEQ ID NO: 972690 - RNA, 18 nt, Human
uaagaagagauccaaauu

SEQ ID NO: 972691 - RNA, 23 nt, Human
uacaggauuacuggcuaauuuug

SEQ ID NO: 972692 - RNA, 19 nt, Human
uacuaggcaccauaaaaug

SEQ ID NO: 972693 - RNA, 25 nt, Human
uaugaauaaacaggggaacuagaug

SEQ ID NO: 972694 - RNA, 30 nt, Human
uaugauuaaacauuugaucauacaguaccc

SEQ ID NO: 972695 - RNA, 24 nt, Human
uauugagaggaaaacugauuuugc

SEQ ID NO: 972696 - RNA, 21 nt, Human
ucaaccugcuuuucaccacau

SEQ ID NO: 972697 - RNA, 28 nt, Human
uccaaauuacaagagaggcagauaaaaa

SEQ ID NO: 972698 - RNA, 18 nt, Human
ucggcagcggggcgggga

SEQ ID NO: 972699 - RNA, 22 nt, Human
ucuucauuuguucugcauguuu

SEQ ID NO: 972700 - RNA, 20 nt, Human
ugaaugaugaaauaagagca

SEQ ID NO: 972701 - RNA, 20 nt, Human
ugcaaacauuagagcuauaa

SEQ ID NO: 972702 - RNA, 19 nt, Human
ugcauguuuucucuacaac

SEQ ID NO: 972703 - RNA, 20 nt, Human
ugcccgaccucgagugucac

SEQ ID NO: 972704 - RNA, 24 nt, Human
ugcguuucagcaaggaaugucagg

SEQ ID NO: 972705 - RNA, 20 nt, Human
uggaaccgaaagcaaauaac

SEQ ID NO: 972706 - RNA, 26 nt, Human
uggaugguugguacaaaauguauguu

SEQ ID NO: 972707 - RNA, 20 nt, Human
uggguaaaaagaaaaaaaau

SEQ ID NO: 972708 - RNA, 25 nt, Human
ugguugguacaaaauguauguuuug

SEQ ID NO: 972709 - RNA, 18 nt, Human
ugucaggugguaguucug

SEQ ID NO: 972710 - RNA, 26 nt, Human
ugucauaaaccuagauauaccggcgc

SEQ ID NO: 972711 - RNA, 23 nt, Human
uguuuggaguuuaggcuacagag

SEQ ID NO: 972712 - RNA, 22 nt, Human
uuaauaugaacaaauggguaaa

SEQ ID NO: 972713 - RNA, 26 nt, Human
uuaggcuacagagcauucagguauug

SEQ ID NO: 972714 - RNA, 20 nt, Human
uuccccuucagguucucgug

SEQ ID NO: 972715 - RNA, 19 nt, Human
uuccugacuuugcaauacu

SEQ ID NO: 972716 - RNA, 19 nt, Human
uuuuuuuuuuuuuuuuuaa

SEQ ID NO: 972717 - RNA, 21 nt, Human
aaacagguaucguguguuccc

SEQ ID NO: 972718 - RNA, 22 nt, Human
aagaagccgccgccgccgccaa

SEQ ID NO: 972719 - RNA, 27 nt, Human
acgcacaugcauccacacuuaacuaca

SEQ ID NO: 972720 - RNA, 18 nt, Human
caacaguacugccagcaa

SEQ ID NO: 972721 - RNA, 19 nt, Human
caacggaaaagaaaaacag

SEQ ID NO: 972722 - RNA, 22 nt, Human
caccgcccccccuucacacaca

SEQ ID NO: 972723 - RNA, 18 nt, Human
caggacagggccagucac

SEQ ID NO: 972724 - RNA, 20 nt, Human
ccaccgcccccccuucacac

SEQ ID NO: 972725 - RNA, 19 nt, Human
ccagucacaaacaguccua

SEQ ID NO: 972726 - RNA, 23 nt, Human
ccccgccccuccgcgcggggccg

SEQ ID NO: 972727 - RNA, 20 nt, Human
cccgccccuccgcgcggggc

SEQ ID NO: 972728 - RNA, 19 nt, Human
cccgcccgccucggccacc

SEQ ID NO: 972729 - RNA, 22 nt, Human
cccggcgccucccccgccccuc

SEQ ID NO: 972730 - RNA, 23 nt, Human
cccggcgccucccccgccccucc

SEQ ID NO: 972731 - RNA, 21 nt, Human
ccgccgccgccgccaaacgag

SEQ ID NO: 972732 - RNA, 18 nt, Human
ccgcgcccccgcugcgcg

SEQ ID NO: 972733 - RNA, 21 nt, Human
ccuccgcgcggggccgggggc

SEQ ID NO: 972734 - RNA, 25 nt, Human
cgcaacaguacugccagcaacggaa

SEQ ID NO: 972735 - RNA, 22 nt, Human
cgccgggcccccggcgagucug

SEQ ID NO: 972736 - RNA, 20 nt, Human
cggcgccgucgacuucccgg

SEQ ID NO: 972737 - RNA, 21 nt, Human
cggcgccucccccgccccucc

SEQ ID NO: 972738 - RNA, 19 nt, Human
cggggucgagacuggaaug

SEQ ID NO: 972739 - RNA, 24 nt, Human
cugcgcgcgcgcucgccggcuccc

SEQ ID NO: 972740 - RNA, 24 nt, Human
cuucacacacacgcgcgccacccc

SEQ ID NO: 972741 - RNA, 18 nt, Human
gacuucccggcgccuccc

SEQ ID NO: 972742 - RNA, 20 nt, Human
gacuucccggcgccuccccc

SEQ ID NO: 972743 - RNA, 19 nt, Human
gcagacaguggccuccugc

SEQ ID NO: 972744 - RNA, 22 nt, Human
gccacccgcgcccccgcugcgc

SEQ ID NO: 972745 - RNA, 24 nt, Human
gccaccgcccccccuucacacaca

SEQ ID NO: 972746 - RNA, 20 nt, Human
gcccgccucggccaccgccc

SEQ ID NO: 972747 - RNA, 18 nt, Human
gccggcuccccucccccu

SEQ ID NO: 972748 - RNA, 24 nt, Human
gccucggccaccgcccccccuuca

SEQ ID NO: 972749 - RNA, 21 nt, Human
gcgcggggccgggggcagaau

SEQ ID NO: 972750 - RNA, 26 nt, Human
gcgcucgccggcuccccucccccuca

SEQ ID NO: 972751 - RNA, 22 nt, Human
gcucgccggcuccccucccccu

SEQ ID NO: 972752 - RNA, 22 nt, Human
ggcuccccucccccucagcacc

SEQ ID NO: 972753 - RNA, 19 nt, Human
guaggaggaguggacggug

SEQ ID NO: 972754 - RNA, 30 nt, Human
uaagacaguuaaugcuguuacagaugcuac

SEQ ID NO: 972755 - RNA, 22 nt, Human
uacugccagcaacggaaaagaa

SEQ ID NO: 972756 - RNA, 18 nt, Human
uauuacuguuugacaucc

SEQ ID NO: 972757 - RNA, 24 nt, Human
ucagcucuggaacgaggggcucgg

SEQ ID NO: 972758 - RNA, 20 nt, Human
uccaaacugcggcgcaacag

SEQ ID NO: 972759 - RNA, 20 nt, Human
ucccggcgccucccccgccc

SEQ ID NO: 972760 - RNA, 22 nt, Human
ucgcgcgcgcgcccgcccgccu

SEQ ID NO: 972761 - RNA, 22 nt, Human
ugacauccagugacacugacau

SEQ ID NO: 972762 - RNA, 19 nt, Human
uguuugacauccagugaca

SEQ ID NO: 972763 - RNA, 21 nt, Human
uuacuccaagucugaaacuac

SEQ ID NO: 972764 - RNA, 19 nt, Human
uucccggcgccucccccgc

SEQ ID NO: 972765 - RNA, 22 nt, Human
uugacauccagugacacugaca

SEQ ID NO: 972766 - RNA, 23 nt, Human
aaaaaaguauuuagaacacacaa

SEQ ID NO: 972767 - RNA, 24 nt, Human
aaaguauuuagaacacacaaaaca

SEQ ID NO: 972768 - RNA, 23 nt, Human
aaggugacugacugagccauuag

SEQ ID NO: 972769 - RNA, 19 nt, Human
acacacaaaacaaggcaac

SEQ ID NO: 972770 - RNA, 20 nt, Human
accacguaacaccauuaaaa

SEQ ID NO: 972771 - RNA, 21 nt, Human
agaaacaagauccaaagaaaa

SEQ ID NO: 972772 - RNA, 18 nt, Human
auccaaagaaaagagcca

SEQ ID NO: 972773 - RNA, 22 nt, Human
caaagaaaagagccaucuucac

SEQ ID NO: 972774 - RNA, 21 nt, Human
cacaaaccacguaacaccauu

SEQ ID NO: 972775 - RNA, 18 nt, Human
ccccgccccucgcguccg

SEQ ID NO: 972776 - RNA, 20 nt, Human
ccuuugguggugugauaugg

SEQ ID NO: 972777 - RNA, 23 nt, Human
cgcccgcagcuccggcuucgcuu

SEQ ID NO: 972778 - RNA, 21 nt, Human
gaaaaagcgcccgcagcuccg

SEQ ID NO: 972779 - RNA, 23 nt, Human
gccaucuucacaacacuuaagaa

SEQ ID NO: 972780 - RNA, 30 nt, Human
ggacaagaaaaaaaauuaauacacaaaccc

SEQ ID NO: 972781 - RNA, 18 nt, Human
ggcuagaaacaagaucca

SEQ ID NO: 972782 - RNA, 19 nt, Human
uaagaaugaaucugagaca

SEQ ID NO: 972783 - RNA, 18 nt, Human
uagaacacacaaaacaag

SEQ ID NO: 972784 - RNA, 21 nt, Human
uagaacacacaaaacaaggca

SEQ ID NO: 972785 - RNA, 27 nt, Human
uagaacacacaaaacaaggcaaccggc

SEQ ID NO: 972786 - RNA, 18 nt, Human
uaggcucaugaugcuaaa

SEQ ID NO: 972787 - RNA, 19 nt, Human
uaggcucaugaugcuaaau

SEQ ID NO: 972788 - RNA, 26 nt, Human
uauggacaagaaaaaaaauuaauaca

SEQ ID NO: 972789 - RNA, 24 nt, Human
ucaguuccuuaagaaugaaucuga

SEQ ID NO: 972790 - RNA, 22 nt, Human
ucccgcgcucgccccgccccuc

SEQ ID NO: 972791 - RNA, 21 nt, Human
aaaacaaaaacccagaaaaaa

SEQ ID NO: 972792 - RNA, 21 nt, Human
aaaacaaaacaaaacaaaaac

SEQ ID NO: 972793 - RNA, 23 nt, Human
aaaacaaaacaaaacaaaaaccc

SEQ ID NO: 972794 - RNA, 23 nt, Human
aaaacaaaacaaaacaaaaaccc

SEQ ID NO: 972795 - RNA, 20 nt, Human
aaacaaaacaaaaacccaga

SEQ ID NO: 972796 - RNA, 20 nt, Human
aaacaaaacaaaaacccaga

SEQ ID NO: 972797 - RNA, 21 nt, Human
aaacaaaacaaaaacccagaa

SEQ ID NO: 972798 - RNA, 21 nt, Human
aaacaaaacaaaaacccagaa

SEQ ID NO: 972799 - RNA, 26 nt, Human
aaacaaaacaaaaacccagaaaaaaa

SEQ ID NO: 972800 - RNA, 19 nt, Human
aaacaaaacaaaacaaaaa

SEQ ID NO: 972801 - RNA, 19 nt, Human
aaacaaaacaaaacaaaaa

SEQ ID NO: 972802 - RNA, 23 nt, Human
aaacaaaacaaaacaaaaaccca

SEQ ID NO: 972803 - RNA, 23 nt, Human
aaacaaaacaaaacaaaaaccca

SEQ ID NO: 972804 - RNA, 25 nt, Human
aaacaggagagacuuuuucccaagg

SEQ ID NO: 972805 - RNA, 25 nt, Human
aaacaggagagacuuuuucccaagg

SEQ ID NO: 972806 - RNA, 20 nt, Human
aaacucacuguaaacaacag

SEQ ID NO: 972807 - RNA, 18 nt, Human
aaacuugcugcucuccuu

SEQ ID NO: 972808 - RNA, 23 nt, Human
aaagaaaacaaaacaaaacaaaa

SEQ ID NO: 972809 - RNA, 24 nt, Human
aaagaaaacaaaacaaaacaaaaa

SEQ ID NO: 972810 - RNA, 27 nt, Human
aaagaaaacaaaacaaaacaaaaaccc

SEQ ID NO: 972811 - RNA, 27 nt, Human
aaagaaaacaaaacaaaacaaaaaccc

SEQ ID NO: 972812 - RNA, 21 nt, Human
aaagccagcaaggacugggaa

SEQ ID NO: 972813 - RNA, 18 nt, Human
aacaaaaacccagaaaaa

SEQ ID NO: 972814 - RNA, 18 nt, Human
aacaaaaacccagaaaaa

SEQ ID NO: 972815 - RNA, 19 nt, Human
aacaaaaacccagaaaaaa

SEQ ID NO: 972816 - RNA, 22 nt, Human
aacaaaacaaaacaaaaaccca

SEQ ID NO: 972817 - RNA, 21 nt, Human
aaccaaugaguucaucaacgg

SEQ ID NO: 972818 - RNA, 18 nt, Human
aaccacacacaguucagc

SEQ ID NO: 972819 - RNA, 18 nt, Human
aaccacacacaguucagc

SEQ ID NO: 972820 - RNA, 19 nt, Human
aacucacuguaaacaacag

SEQ ID NO: 972821 - RNA, 19 nt, Human
aacucacuguaaacaacag

SEQ ID NO: 972822 - RNA, 20 nt, Human
aagaaaacaaaacaaaacaa

SEQ ID NO: 972823 - RNA, 20 nt, Human
aagaaaacaaaacaaaacaa

SEQ ID NO: 972824 - RNA, 23 nt, Human
aagcccuugccugggaaugaggg

SEQ ID NO: 972825 - RNA, 21 nt, Human
aagccuuuuuuuuuuuucucc

SEQ ID NO: 972826 - RNA, 20 nt, Human
aaggacugggaaagccagca

SEQ ID NO: 972827 - RNA, 19 nt, Human
aauguacauuuauucuuaa

SEQ ID NO: 972828 - RNA, 19 nt, Human
aauguacauuuauucuuaa

SEQ ID NO: 972829 - RNA, 18 nt, Human
acaaaacaaaacaaaaac

SEQ ID NO: 972830 - RNA, 18 nt, Human
acaaaacaaaacaaaaac

SEQ ID NO: 972831 - RNA, 25 nt, Human
acaaaacaaaacaaaaacccagaaa

SEQ ID NO: 972832 - RNA, 22 nt, Human
acaaggaacagaaaggcgugag

SEQ ID NO: 972833 - RNA, 22 nt, Human
acaaggaacagaaaggcgugag

SEQ ID NO: 972834 - RNA, 19 nt, Human
acacaguucagcagucacc

SEQ ID NO: 972835 - RNA, 18 nt, Human
acaguaucagguguacag

SEQ ID NO: 972836 - RNA, 21 nt, Human
accaaacuguggggauccaag

SEQ ID NO: 972837 - RNA, 22 nt, Human
accaaacuguggggauccaaga

SEQ ID NO: 972838 - RNA, 24 nt, Human
accgagauguccaacagccgugau

SEQ ID NO: 972839 - RNA, 21 nt, Human
accuuggccaaggcaagcagc

SEQ ID NO: 972840 - RNA, 24 nt, Human
acucuacugcacaggccucuccag

SEQ ID NO: 972841 - RNA, 24 nt, Human
acucuacugcacaggccucuccag

SEQ ID NO: 972842 - RNA, 21 nt, Human
acuggauucugaggugguuuu

SEQ ID NO: 972843 - RNA, 21 nt, Human
acuggauucugaggugguuuu

SEQ ID NO: 972844 - RNA, 25 nt, Human
agaaaacaaaacaaaacaaaaaaga

SEQ ID NO: 972845 - RNA, 24 nt, Human
agaaagaaaacaaaacaaaacaaa

SEQ ID NO: 972846 - RNA, 25 nt, Human
agaaagaaaacaaaacaaaacaaaa

SEQ ID NO: 972847 - RNA, 18 nt, Human
agaacuuuuucacaccuc

SEQ ID NO: 972848 - RNA, 18 nt, Human
agaacuuuuucacaccuc

SEQ ID NO: 972849 - RNA, 19 nt, Human
agaaggguacacagugggg

SEQ ID NO: 972850 - RNA, 18 nt, Human
agaccagacuugagggac

SEQ ID NO: 972851 - RNA, 22 nt, Human
agagaaacaggagagacuuuuu

SEQ ID NO: 972852 - RNA, 22 nt, Human
agagaaacaggagagacuuuuu

SEQ ID NO: 972853 - RNA, 26 nt, Human
agcacaggguaaacuggauucugagg

SEQ ID NO: 972854 - RNA, 26 nt, Human
agcacaggguaaacuggauucugagg

SEQ ID NO: 972855 - RNA, 26 nt, Human
aggaacagaaaggcgugaggugaugg

SEQ ID NO: 972856 - RNA, 26 nt, Human
aggaacagaaaggcgugaggugaugg

SEQ ID NO: 972857 - RNA, 22 nt, Human
aggaagcccaggagguugccga

SEQ ID NO: 972858 - RNA, 20 nt, Human
aggagagacuuuuucccaag

SEQ ID NO: 972859 - RNA, 20 nt, Human
aggagagacuuuuucccaag

SEQ ID NO: 972860 - RNA, 24 nt, Human
aggaggaggaggcggcggcggcgg

SEQ ID NO: 972861 - RNA, 21 nt, Human
aggaggcuggccuggcucugc

SEQ ID NO: 972862 - RNA, 18 nt, Human
aggcgccggcggcucagc

SEQ ID NO: 972863 - RNA, 21 nt, Human
aggcggcggcggcggccgagg

SEQ ID NO: 972864 - RNA, 23 nt, Human
aggcugucccccugagccagguu

SEQ ID NO: 972865 - RNA, 19 nt, Human
agggagaagcuggacagca

SEQ ID NO: 972866 - RNA, 24 nt, Human
aggguguuguagguucacacauga

SEQ ID NO: 972867 - RNA, 24 nt, Human
aggugggggccccuccuggucugu

SEQ ID NO: 972868 - RNA, 21 nt, Human
agguugaaggucaugaugcug

SEQ ID NO: 972869 - RNA, 21 nt, Human
aguaaacucugagugguucuc

SEQ ID NO: 972870 - RNA, 22 nt, Human
aucacaaaugacuugugaaacc

SEQ ID NO: 972871 - RNA, 24 nt, Human
augcucaguggugucccccccacc

SEQ ID NO: 972872 - RNA, 21 nt, Human
auggagggaggggagguggaa

SEQ ID NO: 972873 - RNA, 21 nt, Human
auggagggaggggagguggaa

SEQ ID NO: 972874 - RNA, 21 nt, Human
auguacaacgucauauauaua

SEQ ID NO: 972875 - RNA, 22 nt, Human
auuccccccaagcccuugccug

SEQ ID NO: 972876 - RNA, 19 nt, Human
caaaaaaggaaaaaaagga

SEQ ID NO: 972877 - RNA, 23 nt, Human
caaaaaaggaaaaaaaggaggaa

SEQ ID NO: 972878 - RNA, 22 nt, Human
caaaugacuugugaaaccaaug

SEQ ID NO: 972879 - RNA, 21 nt, Human
caagagaauccugccagucca

SEQ ID NO: 972880 - RNA, 21 nt, Human
caagaggggcgauaucuggca

SEQ ID NO: 972881 - RNA, 27 nt, Human
caagcccuugccugggaaugagggggg

SEQ ID NO: 972882 - RNA, 26 nt, Human
caaggcaagcagcgcgcgggcagccc

SEQ ID NO: 972883 - RNA, 21 nt, Human
cacacacacgggggggggagg

SEQ ID NO: 972884 - RNA, 21 nt, Human
cacacacacgggggggggagg

SEQ ID NO: 972885 - RNA, 26 nt, Human
cacacacacgggggggggaggugucc

SEQ ID NO: 972886 - RNA, 26 nt, Human
cacacacacgggggggggaggugucc

SEQ ID NO: 972887 - RNA, 20 nt, Human
cacacaguucagcagucacc

SEQ ID NO: 972888 - RNA, 20 nt, Human
cacacaguucagcagucacc

SEQ ID NO: 972889 - RNA, 22 nt, Human
cacacuaguuggcucaaagggu

SEQ ID NO: 972890 - RNA, 18 nt, Human
cacaguucagcagucacc

SEQ ID NO: 972891 - RNA, 21 nt, Human
cacccaccucauacuccuuua

SEQ ID NO: 972892 - RNA, 23 nt, Human
caccccgccccggggcccagucc

SEQ ID NO: 972893 - RNA, 20 nt, Human
caccucauacuccuuuaaaa

SEQ ID NO: 972894 - RNA, 25 nt, Human
caccuugcugaaccucccaggaucc

SEQ ID NO: 972895 - RNA, 19 nt, Human
cacuuuguugcagcucacc

SEQ ID NO: 972896 - RNA, 20 nt, Human
cagaaaggcgugaggugaug

SEQ ID NO: 972897 - RNA, 27 nt, Human
cagcacaggguaaacuggauucugagg

SEQ ID NO: 972898 - RNA, 24 nt, Human
cagcaggaucagcuugcccaggau

SEQ ID NO: 972899 - RNA, 18 nt, Human
cagcaggccacugucaaa

SEQ ID NO: 972900 - RNA, 18 nt, Human
caggaugagcagcagccc

SEQ ID NO: 972901 - RNA, 19 nt, Human
caggugggggccccuccug

SEQ ID NO: 972902 - RNA, 26 nt, Human
cauauauauacacacguggcagcgua

SEQ ID NO: 972903 - RNA, 21 nt, Human
caucaacggugauaccgagau

SEQ ID NO: 972904 - RNA, 20 nt, Human
caucaggugggggccccucc

SEQ ID NO: 972905 - RNA, 18 nt, Human
cauuggggcccagggugg

SEQ ID NO: 972906 - RNA, 21 nt, Human
ccaaucaaaaacaguacauca

SEQ ID NO: 972907 - RNA, 18 nt, Human
ccacacacgcacacacac

SEQ ID NO: 972908 - RNA, 18 nt, Human
ccacacacgcacacacac

SEQ ID NO: 972909 - RNA, 24 nt, Human
ccacacuaguuggcucaaagggug

SEQ ID NO: 972910 - RNA, 20 nt, Human
ccagucucugcggggaaagg

SEQ ID NO: 972911 - RNA, 23 nt, Human
ccaugugcucucugccaggagac

SEQ ID NO: 972912 - RNA, 18 nt, Human
cccaccccgccccggggc

SEQ ID NO: 972913 - RNA, 19 nt, Human
cccaggaugagcagcagcc

SEQ ID NO: 972914 - RNA, 27 nt, Human
ccccacccgcccgggcgggccucgcgg

SEQ ID NO: 972915 - RNA, 23 nt, Human
ccccacccuccaugggagcugga

SEQ ID NO: 972916 - RNA, 26 nt, Human
cccccaagcccuugccugggaaugag

SEQ ID NO: 972917 - RNA, 23 nt, Human
ccccccgccccgccggcucaggc

SEQ ID NO: 972918 - RNA, 19 nt, Human
cccgccccgccggcucagg

SEQ ID NO: 972919 - RNA, 20 nt, Human
cccgccgcaucauguccaca

SEQ ID NO: 972920 - RNA, 21 nt, Human
cccgccgcaucauguccacag

SEQ ID NO: 972921 - RNA, 22 nt, Human
cccggagcaucuccaagcaguc

SEQ ID NO: 972922 - RNA, 23 nt, Human
ccgccccgccggcucaggcuccg

SEQ ID NO: 972923 - RNA, 21 nt, Human
ccucccaccccgccccggggc

SEQ ID NO: 972924 - RNA, 19 nt, Human
ccucucccccccgccccgc

SEQ ID NO: 972925 - RNA, 19 nt, Human
ccugaggggaguaagguga

SEQ ID NO: 972926 - RNA, 19 nt, Human
ccugaggggaguaagguga

SEQ ID NO: 972927 - RNA, 21 nt, Human
ccugcuuccguucugggugcu

SEQ ID NO: 972928 - RNA, 22 nt, Human
ccuggccccgcugugacucucc

SEQ ID NO: 972929 - RNA, 23 nt, Human
ccuguacagcaucgcaccaagag

SEQ ID NO: 972930 - RNA, 23 nt, Human
ccuguacagcaucgcaccaagag

SEQ ID NO: 972931 - RNA, 18 nt, Human
ccuugauggccucugaac

SEQ ID NO: 972932 - RNA, 19 nt, Human
ccuuggccaaggcaagcag

SEQ ID NO: 972933 - RNA, 22 nt, Human
cgauuagaaagaaaacaaaaca

SEQ ID NO: 972934 - RNA, 22 nt, Human
cgauuagaaagaaaacaaaaca

SEQ ID NO: 972935 - RNA, 18 nt, Human
cggccgaggcgccggcgg

SEQ ID NO: 972936 - RNA, 18 nt, Human
cuccaagcagucccacca

SEQ ID NO: 972937 - RNA, 19 nt, Human
cucccccccucccaccccg

SEQ ID NO: 972938 - RNA, 21 nt, Human
cuccuggucuguugucccugg

SEQ ID NO: 972939 - RNA, 20 nt, Human
cucgcggggcuccgcugcuc

SEQ ID NO: 972940 - RNA, 20 nt, Human
cucugugcugggcuaaugcc

SEQ ID NO: 972941 - RNA, 20 nt, Human
cucuucuaguuuaggaccua

SEQ ID NO: 972942 - RNA, 23 nt, Human
cugaaccucccaggauccaguag

SEQ ID NO: 972943 - RNA, 22 nt, Human
cugccaggcugucccccugagc

SEQ ID NO: 972944 - RNA, 23 nt, Human
cugccaggcugucccccugagcc

SEQ ID NO: 972945 - RNA, 18 nt, Human
cuggcacaaaugacaggc

SEQ ID NO: 972946 - RNA, 19 nt, Human
cuggccccgcugugacucu

SEQ ID NO: 972947 - RNA, 18 nt, Human
cuguacagcaucgcacca

SEQ ID NO: 972948 - RNA, 19 nt, Human
cuguacagcaucgcaccaa

SEQ ID NO: 972949 - RNA, 19 nt, Human
cuguacagcaucgcaccaa

SEQ ID NO: 972950 - RNA, 19 nt, Human
cuucaacugaaccuagaac

SEQ ID NO: 972951 - RNA, 19 nt, Human
cuucaacugaaccuagaac

SEQ ID NO: 972952 - RNA, 26 nt, Human
cuucgucuucucccccccucccaccc

SEQ ID NO: 972953 - RNA, 23 nt, Human
cuugcugaaccucccaggaucca

SEQ ID NO: 972954 - RNA, 19 nt, Human
cuuggccaaggcaagcagc

SEQ ID NO: 972955 - RNA, 22 nt, Human
gaaaacaaaacaaaacaaaaac

SEQ ID NO: 972956 - RNA, 22 nt, Human
gaaaacaaaacaaaacaaaaac

SEQ ID NO: 972957 - RNA, 19 nt, Human
gaaugaggggggcggugga

SEQ ID NO: 972958 - RNA, 22 nt, Human
gacagcacaggguaaacuggau

SEQ ID NO: 972959 - RNA, 22 nt, Human
gacagcacaggguaaacuggau

SEQ ID NO: 972960 - RNA, 22 nt, Human
gaccagucucugcggggaaagg

SEQ ID NO: 972961 - RNA, 20 nt, Human
gacccggcucucccggcuca

SEQ ID NO: 972962 - RNA, 18 nt, Human
gaccgaguagacaacaug

SEQ ID NO: 972963 - RNA, 21 nt, Human
gagaaagaggucaggguguug

SEQ ID NO: 972964 - RNA, 21 nt, Human
gagaaagaggucaggguguug

SEQ ID NO: 972965 - RNA, 22 nt, Human
gagcaguccaccacaaauggaa

SEQ ID NO: 972966 - RNA, 21 nt, Human
gaggagagagaaacaggagag

SEQ ID NO: 972967 - RNA, 23 nt, Human
gaggagagagaaacaggagagac

SEQ ID NO: 972968 - RNA, 23 nt, Human
gaggagagagaaacaggagagac

SEQ ID NO: 972969 - RNA, 18 nt, Human
gaggaggaggaggcggcg

SEQ ID NO: 972970 - RNA, 19 nt, Human
gaggaggcuggccuggcuc

SEQ ID NO: 972971 - RNA, 20 nt, Human
gaggaggcuggccuggcucu

SEQ ID NO: 972972 - RNA, 24 nt, Human
gaggcggcggcggcggccgaggcg

SEQ ID NO: 972973 - RNA, 20 nt, Human
gaguagacaacaugucaucc

SEQ ID NO: 972974 - RNA, 23 nt, Human
gauugugaauguacaacaauaaa

SEQ ID NO: 972975 - RNA, 23 nt, Human
gauugugaauguacaacaauaaa

SEQ ID NO: 972976 - RNA, 19 nt, Human
gcaaggcuguccucuagga

SEQ ID NO: 972977 - RNA, 21 nt, Human
gcagagcuuugucuuuucaaa

SEQ ID NO: 972978 - RNA, 21 nt, Human
gcagagcuuugucuuuucaaa

SEQ ID NO: 972979 - RNA, 24 nt, Human
gcagagcuuugucuuuucaaagga

SEQ ID NO: 972980 - RNA, 24 nt, Human
gcagagcuuugucuuuucaaagga

SEQ ID NO: 972981 - RNA, 26 nt, Human
gcccugucuucgucuucucccccccu

SEQ ID NO: 972982 - RNA, 19 nt, Human
gcggaggaggaggaggcgg

SEQ ID NO: 972983 - RNA, 19 nt, Human
gcggcggcggcggccgagg

SEQ ID NO: 972984 - RNA, 22 nt, Human
gcugaagggcaaacugcccagu

SEQ ID NO: 972985 - RNA, 25 nt, Human
ggaaaagccuuuuuuuuuuuucucc

SEQ ID NO: 972986 - RNA, 18 nt, Human
ggacccggcucucccggc

SEQ ID NO: 972987 - RNA, 18 nt, Human
ggacugggaaagccagca

SEQ ID NO: 972988 - RNA, 22 nt, Human
ggaggagagagaaacaggagag

SEQ ID NO: 972989 - RNA, 22 nt, Human
ggaggagagagaaacaggagag

SEQ ID NO: 972990 - RNA, 18 nt, Human
ggaggaggcuggccuggc

SEQ ID NO: 972991 - RNA, 18 nt, Human
ggagggaggggaggugga

SEQ ID NO: 972992 - RNA, 18 nt, Human
ggagggaggggaggugga

SEQ ID NO: 972993 - RNA, 21 nt, Human
ggcagcguagccgcugcagcu

SEQ ID NO: 972994 - RNA, 20 nt, Human
ggccccgcugugacucuccg

SEQ ID NO: 972995 - RNA, 20 nt, Human
ggcggaggaggaggaggcgg

SEQ ID NO: 972996 - RNA, 20 nt, Human
ggcggcggcggcggccgagg

SEQ ID NO: 972997 - RNA, 21 nt, Human
ggcggcggcggcggccgaggc

SEQ ID NO: 972998 - RNA, 23 nt, Human
ggcucaggcuccgggcuggcggc

SEQ ID NO: 972999 - RNA, 20 nt, Human
ggcugaagggggguguggcc

SEQ ID NO: 973000 - RNA, 18 nt, Human
ggcuggugggcagggugc

SEQ ID NO: 973001 - RNA, 25 nt, Human
gggaaaagccuuuuuuuuuuuucuc

SEQ ID NO: 973002 - RNA, 19 nt, Human
gggcuggcggcggcggagg

SEQ ID NO: 973003 - RNA, 20 nt, Human
gggggccccuccuggucugu

SEQ ID NO: 973004 - RNA, 21 nt, Human
ggguggaaaagggguccuggg

SEQ ID NO: 973005 - RNA, 23 nt, Human
gucaccuuuuuuguccuucagaa

SEQ ID NO: 973006 - RNA, 23 nt, Human
gucaccuuuuuuguccuucagaa

SEQ ID NO: 973007 - RNA, 23 nt, Human
gucacugaggaagcgcaccauag

SEQ ID NO: 973008 - RNA, 21 nt, Human
guccugaggggaguaagguga

SEQ ID NO: 973009 - RNA, 21 nt, Human
guccugaggggaguaagguga

SEQ ID NO: 973010 - RNA, 21 nt, Human
gugauaccgagauguccaacu

SEQ ID NO: 973011 - RNA, 21 nt, Human
gugauggagggaggggaggug

SEQ ID NO: 973012 - RNA, 21 nt, Human
gugauggagggaggggaggug

SEQ ID NO: 973013 - RNA, 21 nt, Human
guguuguagguucacacauga

SEQ ID NO: 973014 - RNA, 21 nt, Human
guguuguagguucacacauga

SEQ ID NO: 973015 - RNA, 20 nt, Human
uaaacaacaguaacuuuggu

SEQ ID NO: 973016 - RNA, 20 nt, Human
uaaacaacaguaacuuuggu

SEQ ID NO: 973017 - RNA, 22 nt, Human
uaaggugaggacaaggaacaga

SEQ ID NO: 973018 - RNA, 22 nt, Human
uacaacgucauauauauacaca

SEQ ID NO: 973019 - RNA, 22 nt, Human
uacaacgucauauauauacaca

SEQ ID NO: 973020 - RNA, 21 nt, Human
uacaguaucagguguacagua

SEQ ID NO: 973021 - RNA, 21 nt, Human
uacaguaucagguguacagua

SEQ ID NO: 973022 - RNA, 18 nt, Human
uacaguauguuuacagua

SEQ ID NO: 973023 - RNA, 18 nt, Human
uacaguauguuuacagua

SEQ ID NO: 973024 - RNA, 22 nt, Human
uacaugaaagggucuacacucu

SEQ ID NO: 973025 - RNA, 27 nt, Human
uaccacagccaucucccggcacaccgg

SEQ ID NO: 973026 - RNA, 25 nt, Human
uagaaagaaaacaaaacaaaacaaa

SEQ ID NO: 973027 - RNA, 25 nt, Human
uagaaagaaaacaaaacaaaacaaa

SEQ ID NO: 973028 - RNA, 22 nt, Human
uagcaacccugggagcugacug

SEQ ID NO: 973029 - RNA, 22 nt, Human
ucaaaaacaguacaucacaaau

SEQ ID NO: 973030 - RNA, 22 nt, Human
ucacugaaaaaaucucaauugu

SEQ ID NO: 973031 - RNA, 23 nt, Human
ucagcagucaccuuuuuuguccu

SEQ ID NO: 973032 - RNA, 23 nt, Human
ucagcagucaccuuuuuuguccu

SEQ ID NO: 973033 - RNA, 20 nt, Human
uccacacacgcacacacaca

SEQ ID NO: 973034 - RNA, 20 nt, Human
uccacacacgcacacacaca

SEQ ID NO: 973035 - RNA, 22 nt, Human
uccacacacgcacacacacagu

SEQ ID NO: 973036 - RNA, 19 nt, Human
uccacauuguuguccugga

SEQ ID NO: 973037 - RNA, 20 nt, Human
uccccagggccuggccccgc

SEQ ID NO: 973038 - RNA, 24 nt, Human
uccccagggccuggccccgcugug

SEQ ID NO: 973039 - RNA, 20 nt, Human
uccccccaagcccuugccug

SEQ ID NO: 973040 - RNA, 18 nt, Human
ucccccccgccccgccgg

SEQ ID NO: 973041 - RNA, 20 nt, Human
ucccccccgccccgccggcu

SEQ ID NO: 973042 - RNA, 21 nt, Human
ucccccgggcugcccucccca

SEQ ID NO: 973043 - RNA, 21 nt, Human
ucccccugagccagguuggcc

SEQ ID NO: 973044 - RNA, 23 nt, Human
ucccggcucauuccccccaagcc

SEQ ID NO: 973045 - RNA, 21 nt, Human
uccgcggagagacccggcccu

SEQ ID NO: 973046 - RNA, 21 nt, Human
uccgguggcucugugcugggc

SEQ ID NO: 973047 - RNA, 22 nt, Human
ucgcuccucucccccccgcccc

SEQ ID NO: 973048 - RNA, 18 nt, Human
ucgggacccggcucuccc

SEQ ID NO: 973049 - RNA, 19 nt, Human
ucguacagaguaaacucug

SEQ ID NO: 973050 - RNA, 21 nt, Human
ucuacugcacaggccucucca

SEQ ID NO: 973051 - RNA, 21 nt, Human
ucuacugcacaggccucucca

SEQ ID NO: 973052 - RNA, 19 nt, Human
ucuaggaagcccaggaggu

SEQ ID NO: 973053 - RNA, 23 nt, Human
ucuccaggcggcugaaggggggu

SEQ ID NO: 973054 - RNA, 24 nt, Human
ucuccaggcggcugaaggggggug

SEQ ID NO: 973055 - RNA, 21 nt, Human
ucuccagugaacagggucugu

SEQ ID NO: 973056 - RNA, 18 nt, Human
ucucccccccucccaccc

SEQ ID NO: 973057 - RNA, 19 nt, Human
ucucccccccucccacccc

SEQ ID NO: 973058 - RNA, 21 nt, Human
ucucccggcucauucccccca

SEQ ID NO: 973059 - RNA, 21 nt, Human
ucugcacugcaauggcacgag

SEQ ID NO: 973060 - RNA, 23 nt, Human
ucuguaggcucgggacccggcuc

SEQ ID NO: 973061 - RNA, 21 nt, Human
ugacccagcguuuucuguuuc

SEQ ID NO: 973062 - RNA, 21 nt, Human
ugacccagcguuuucuguuuc

SEQ ID NO: 973063 - RNA, 21 nt, Human
ugagcagcagcccuggguguu

SEQ ID NO: 973064 - RNA, 23 nt, Human
ugaggugauggagggaggggagg

SEQ ID NO: 973065 - RNA, 23 nt, Human
ugaggugauggagggaggggagg

SEQ ID NO: 973066 - RNA, 23 nt, Human
ugauggccucugaacucuuagcu

SEQ ID NO: 973067 - RNA, 18 nt, Human
ugauguuccgguggcucu

SEQ ID NO: 973068 - RNA, 19 nt, Human
ugcagcucaccccuugguc

SEQ ID NO: 973069 - RNA, 23 nt, Human
ugcauguggaggaggcuggccug

SEQ ID NO: 973070 - RNA, 19 nt, Human
ugccaaagaucucaaucag

SEQ ID NO: 973071 - RNA, 20 nt, Human
ugccaaagaucucaaucagg

SEQ ID NO: 973072 - RNA, 24 nt, Human
ugcccaggaugagcagcagcccug

SEQ ID NO: 973073 - RNA, 21 nt, Human
ugcccuccccacccgcccggg

SEQ ID NO: 973074 - RNA, 20 nt, Human
ugccugggaaugaggggggc

SEQ ID NO: 973075 - RNA, 22 nt, Human
ugcuagaccgaguagacaacau

SEQ ID NO: 973076 - RNA, 22 nt, Human
ugcuauacaacuucuccaggcg

SEQ ID NO: 973077 - RNA, 21 nt, Human
ugcucccggcucuguaggcuc

SEQ ID NO: 973078 - RNA, 24 nt, Human
ugcugaguuugcugaggguuucca

SEQ ID NO: 973079 - RNA, 21 nt, Human
uggaaacuugcugcucuccuu

SEQ ID NO: 973080 - RNA, 18 nt, Human
uggagggaggggaggugg

SEQ ID NO: 973081 - RNA, 18 nt, Human
uggagggaggggaggugg

SEQ ID NO: 973082 - RNA, 19 nt, Human
uggagggaggggaggugga

SEQ ID NO: 973083 - RNA, 19 nt, Human
uggagggaggggaggugga

SEQ ID NO: 973084 - RNA, 20 nt, Human
uggcacgagcugccaggcug

SEQ ID NO: 973085 - RNA, 22 nt, Human
uggcagcguagccgcugcagcu

SEQ ID NO: 973086 - RNA, 21 nt, Human
uggccaaggcaagcagcgcgc

SEQ ID NO: 973087 - RNA, 26 nt, Human
uggcggcggcggaggaggaggaggcg

SEQ ID NO: 973088 - RNA, 18 nt, Human
uggcuuguccuugccuga

SEQ ID NO: 973089 - RNA, 21 nt, Human
ugggagcuggacuagacaccu

SEQ ID NO: 973090 - RNA, 23 nt, Human
ugggaggaggaccaaacuguggg

SEQ ID NO: 973091 - RNA, 23 nt, Human
ugggaggaggaccaaacuguggg

SEQ ID NO: 973092 - RNA, 22 nt, Human
uggggauccaaggguaugugca

SEQ ID NO: 973093 - RNA, 22 nt, Human
uggggauccaaggguaugugca

SEQ ID NO: 973094 - RNA, 29 nt, Human
ugggggaaaagccuuuuuuuuuuuucucc

SEQ ID NO: 973095 - RNA, 22 nt, Human
ugggugcuuguggugcagcagg

SEQ ID NO: 973096 - RNA, 19 nt, Human
ugguccuguuccuccuccu

SEQ ID NO: 973097 - RNA, 22 nt, Human
uguacaacaauaaaccacacac

SEQ ID NO: 973098 - RNA, 22 nt, Human
uguacaacaauaaaccacacac

SEQ ID NO: 973099 - RNA, 21 nt, Human
uguccuggaugcugaguuugc

SEQ ID NO: 973100 - RNA, 26 nt, Human
ugucuucgucuucucccccccuccca

SEQ ID NO: 973101 - RNA, 21 nt, Human
ugugauccguuuuucuggagg

SEQ ID NO: 973102 - RNA, 18 nt, Human
uguguggcggcaaggcug

SEQ ID NO: 973103 - RNA, 23 nt, Human
uguucacaacugcgaacuucuug

SEQ ID NO: 973104 - RNA, 23 nt, Human
uguucacaacugcgaacuucuug

SEQ ID NO: 973105 - RNA, 20 nt, Human
uuacaguaucagguguacag

SEQ ID NO: 973106 - RNA, 23 nt, Human
uucaaagagggugggguaggguc

SEQ ID NO: 973107 - RNA, 23 nt, Human
uucaaagagggugggguaggguc

SEQ ID NO: 973108 - RNA, 22 nt, Human
uuccccaaacucacuguaaaca

SEQ ID NO: 973109 - RNA, 25 nt, Human
uucgucuucucccccccucccaccc

SEQ ID NO: 973110 - RNA, 18 nt, Human
uucucccccccucccacc

SEQ ID NO: 973111 - RNA, 21 nt, Human
uugaaauacaaauaugcagau

SEQ ID NO: 973112 - RNA, 21 nt, Human
uugaaauacaaauaugcagau

SEQ ID NO: 973113 - RNA, 20 nt, Human
uugcccaggaugagcagcag

SEQ ID NO: 973114 - RNA, 22 nt, Human
uugcccaggaugagcagcagcc

SEQ ID NO: 973115 - RNA, 23 nt, Human
uugccgauacugcccuucugcac

SEQ ID NO: 973116 - RNA, 22 nt, Human
uuggcuccugcaagauugugaa

SEQ ID NO: 973117 - RNA, 22 nt, Human
uuggcuccugcaagauugugaa

SEQ ID NO: 973118 - RNA, 18 nt, Human
uuuacuggaagcuuguca

SEQ ID NO: 973119 - RNA, 18 nt, Human
uuuuccccaaacucacug

SEQ ID NO: 973120 - RNA, 18 nt, Human
uuuuccccaaacucacug

SEQ ID NO: 973121 - RNA, 22 nt, Human
uuuuuuuuuuuuuuaccauuaa

SEQ ID NO: 973122 - RNA, 24 nt, Human
aaaaaagucaaaaaagaacccaga

SEQ ID NO: 973123 - RNA, 22 nt, Human
aaaacaaccccccucccaaaag

SEQ ID NO: 973124 - RNA, 18 nt, Human
aaacaaccccccucccaa

SEQ ID NO: 973125 - RNA, 24 nt, Human
aaacaaccccccucccaaaagaag

SEQ ID NO: 973126 - RNA, 18 nt, Human
aaacccaaaagauuuaag

SEQ ID NO: 973127 - RNA, 23 nt, Human
aaacccaaaagauuuaagacuaa

SEQ ID NO: 973128 - RNA, 21 nt, Human
aaagaaauugauccaaaguuc

SEQ ID NO: 973129 - RNA, 23 nt, Human
aaccuucauucaaacccaaaaga

SEQ ID NO: 973130 - RNA, 20 nt, Human
aagaaaacaaccccccuccc

SEQ ID NO: 973131 - RNA, 25 nt, Human
aagaggaaaaaaguaaucuuucugg

SEQ ID NO: 973132 - RNA, 25 nt, Human
aagcagucaggaagaaccuaggauc

SEQ ID NO: 973133 - RNA, 20 nt, Human
aagccaccgacgaaagagag

SEQ ID NO: 973134 - RNA, 22 nt, Human
acacaucuauuuccacaaaaca

SEQ ID NO: 973135 - RNA, 25 nt, Human
acagaagaaaacaaccccccuccca

SEQ ID NO: 973136 - RNA, 21 nt, Human
accacuuuuaccccaucccca

SEQ ID NO: 973137 - RNA, 19 nt, Human
agaaaacaaccccccuccc

SEQ ID NO: 973138 - RNA, 20 nt, Human
agaaaacaaccccccuccca

SEQ ID NO: 973139 - RNA, 19 nt, Human
agaaaauaaacagaagaaa

SEQ ID NO: 973140 - RNA, 19 nt, Human
agaaaauaaacagaagaaa

SEQ ID NO: 973141 - RNA, 21 nt, Human
agaaaauaaacagaagaaaac

SEQ ID NO: 973142 - RNA, 26 nt, Human
agaagaaaacaaccccccucccaaaa

SEQ ID NO: 973143 - RNA, 30 nt, Human
agauauauuacaugcaggauuuaauauuuu

SEQ ID NO: 973144 - RNA, 21 nt, Human
aggaagaaccuaggaucaaug

SEQ ID NO: 973145 - RNA, 18 nt, Human
aguugguccaacuaagau

SEQ ID NO: 973146 - RNA, 22 nt, Human
auuuguugauccaacaguacgu

SEQ ID NO: 973147 - RNA, 19 nt, Human
caaauugcaaacacaucua

SEQ ID NO: 973148 - RNA, 22 nt, Human
cagaagaaaacaaccccccucc

SEQ ID NO: 973149 - RNA, 23 nt, Human
caguacguuaaccacuuuuaccc

SEQ ID NO: 973150 - RNA, 21 nt, Human
cauccaaaugcauuugggaau

SEQ ID NO: 973151 - RNA, 23 nt, Human
cauuugcugugaacaguuggaga

SEQ ID NO: 973152 - RNA, 25 nt, Human
ccaccgacgaaagagagacccacaa

SEQ ID NO: 973153 - RNA, 19 nt, Human
cccaaaagaaguaugacac

SEQ ID NO: 973154 - RNA, 21 nt, Human
gaaaaaaaaaaagucaaaaaa

SEQ ID NO: 973155 - RNA, 20 nt, Human
gauguaaaagcccacccaaa

SEQ ID NO: 973156 - RNA, 23 nt, Human
gcaagauguaaaagcccacccaa

SEQ ID NO: 973157 - RNA, 24 nt, Human
ggaaaaaaaaaaagucaaaaaaga

SEQ ID NO: 973158 - RNA, 19 nt, Human
ggauugggaaaaaaaaaaa

SEQ ID NO: 973159 - RNA, 25 nt, Human
guaaaaccuucauucaaacccaaaa

SEQ ID NO: 973160 - RNA, 23 nt, Human
guaauuuugccuucuggacagaa

SEQ ID NO: 973161 - RNA, 18 nt, Human
guaucuucuuuggaugga

SEQ ID NO: 973162 - RNA, 21 nt, Human
gucaaaaaagaacccagauuc

SEQ ID NO: 973163 - RNA, 20 nt, Human
uaaaagcccacccaaaucac

SEQ ID NO: 973164 - RNA, 24 nt, Human
uaacuuggggggaaaaaagauaau

SEQ ID NO: 973165 - RNA, 18 nt, Human
uaagaaaaaaguacucug

SEQ ID NO: 973166 - RNA, 24 nt, Human
uaauaaaaacaaguaucuucucca

SEQ ID NO: 973167 - RNA, 18 nt, Human
uaggaucaauggaaauag

SEQ ID NO: 973168 - RNA, 22 nt, Human
uauauacauuuauuacccaccc

SEQ ID NO: 973169 - RNA, 25 nt, Human
ucaaacccaaaagauuuaagacuaa

SEQ ID NO: 973170 - RNA, 23 nt, Human
ucucuaaauuacaaauuuggcuc

SEQ ID NO: 973171 - RNA, 18 nt, Human
ucucucuuuuaaaaaaaa

SEQ ID NO: 973172 - RNA, 21 nt, Human
ugaaaaagaaauugauccaaa

SEQ ID NO: 973173 - RNA, 23 nt, Human
ugaaaaagaaauugauccaaagu

SEQ ID NO: 973174 - RNA, 18 nt, Human
ugcguuuguuuguuuuug

SEQ ID NO: 973175 - RNA, 21 nt, Human
ugcugugcaaguuccaccccu

SEQ ID NO: 973176 - RNA, 21 nt, Human
uggaauuaagauguaacugua

SEQ ID NO: 973177 - RNA, 19 nt, Human
uggauugggaaaaaaaaaa

SEQ ID NO: 973178 - RNA, 23 nt, Human
uguacuguaguaaugccuacugc

SEQ ID NO: 973179 - RNA, 24 nt, Human
uguaugagaguagcauaguuuaua

SEQ ID NO: 973180 - RNA, 21 nt, Human
uuaaugagcuaguuuuuggga

SEQ ID NO: 973181 - RNA, 20 nt, Human
uucaugcaaugguaggcaag

SEQ ID NO: 973182 - RNA, 19 nt, Human
uucugucuucaaacuguau

SEQ ID NO: 973183 - RNA, 23 nt, Human
uucuuuggauggaauuaagaugu

SEQ ID NO: 973184 - RNA, 18 nt, Human
uugaagaaaccccaaugu

SEQ ID NO: 973185 - RNA, 19 nt, Human
uugaagaaaccccaauguu

SEQ ID NO: 973186 - RNA, 20 nt, Human
uuucuggaacaucauuuuuc

SEQ ID NO: 973187 - RNA, 18 nt, Human
uuugcugugcaaguucca

SEQ ID NO: 973188 - RNA, 25 nt, Human
aaaagggccaggagguagggggaag

SEQ ID NO: 973189 - RNA, 21 nt, Human
aaacaggucuccaauauccuu

SEQ ID NO: 973190 - RNA, 26 nt, Human
aacauacucacaugcacacaugcgga

SEQ ID NO: 973191 - RNA, 21 nt, Human
aacccauaacugucugucccc

SEQ ID NO: 973192 - RNA, 22 nt, Human
aacccauaacugucugucccca

SEQ ID NO: 973193 - RNA, 18 nt, Human
aagcacagagccugacaa

SEQ ID NO: 973194 - RNA, 25 nt, Human
acacacauacauacccacacacaca

SEQ ID NO: 973195 - RNA, 32 nt, Human
acacaugcggauacauacauacacacauacag

SEQ ID NO: 973196 - RNA, 20 nt, Human
acccacuguaucuccuuacu

SEQ ID NO: 973197 - RNA, 21 nt, Human
acccauaacugucugucccca

SEQ ID NO: 973198 - RNA, 21 nt, Human
accuuugcccagcucaggggu

SEQ ID NO: 973199 - RNA, 19 nt, Human
acucuguauuccaagcaca

SEQ ID NO: 973200 - RNA, 19 nt, Human
agcugggaucagaagcucu

SEQ ID NO: 973201 - RNA, 19 nt, Human
aggaaggggguguguguga

SEQ ID NO: 973202 - RNA, 21 nt, Human
aggagguagggggaagguugg

SEQ ID NO: 973203 - RNA, 22 nt, Human
aggcacagaaggucaaaugacu

SEQ ID NO: 973204 - RNA, 24 nt, Human
agggauccagacagggcgggaggg

SEQ ID NO: 973205 - RNA, 19 nt, Human
agggccaggagguaggggg

SEQ ID NO: 973206 - RNA, 21 nt, Human
aguaagugauaaaaaguggga

SEQ ID NO: 973207 - RNA, 23 nt, Human
auacauacacacauacauaccca

SEQ ID NO: 973208 - RNA, 25 nt, Human
augcacacaugcggauacauacaua

SEQ ID NO: 973209 - RNA, 20 nt, Human
caaaugacuugcccaagguc

SEQ ID NO: 973210 - RNA, 23 nt, Human
cacccacuucucaaauucaaagu

SEQ ID NO: 973211 - RNA, 24 nt, Human
cagaacccauaacugucugucccc

SEQ ID NO: 973212 - RNA, 18 nt, Human
cagcucagcaccuccuuu

SEQ ID NO: 973213 - RNA, 25 nt, Human
cagcuuagggauccagacagggcgg

SEQ ID NO: 973214 - RNA, 23 nt, Human
caggagguagggggaagguuggg

SEQ ID NO: 973215 - RNA, 21 nt, Human
cagguaacugccuaagacucc

SEQ ID NO: 973216 - RNA, 22 nt, Human
cauacauacccacacacacagu

SEQ ID NO: 973217 - RNA, 20 nt, Human
caugaacccacuguaucucc

SEQ ID NO: 973218 - RNA, 21 nt, Human
caugaacccacuguaucuccu

SEQ ID NO: 973219 - RNA, 22 nt, Human
ccacgaagggauaaggccucca

SEQ ID NO: 973220 - RNA, 18 nt, Human
ccaggagguagggggaag

SEQ ID NO: 973221 - RNA, 24 nt, Human
ccagugaggagcuugacaucauua

SEQ ID NO: 973222 - RNA, 18 nt, Human
ccauaacugucugucccc

SEQ ID NO: 973223 - RNA, 23 nt, Human
cccacacacacagugggcaagag

SEQ ID NO: 973224 - RNA, 22 nt, Human
cccagagcucaugcuccacucc

SEQ ID NO: 973225 - RNA, 18 nt, Human
cccagauuggggcucagg

SEQ ID NO: 973226 - RNA, 27 nt, Human
cccaugacuacaccaaaaagggccagg

SEQ ID NO: 973227 - RNA, 22 nt, Human
ccugaguaccuuugcccagcuc

SEQ ID NO: 973228 - RNA, 23 nt, Human
cggcaccuagugggcuccacgaa

SEQ ID NO: 973229 - RNA, 19 nt, Human
cggcggcaguaggacaggc

SEQ ID NO: 973230 - RNA, 21 nt, Human
cuagugccugaccaaauccua

SEQ ID NO: 973231 - RNA, 23 nt, Human
cuauagucauucaugaacccacu

SEQ ID NO: 973232 - RNA, 25 nt, Human
cuccagugaggagcuugagguaccc

SEQ ID NO: 973233 - RNA, 24 nt, Human
cucuccccuauuuccucacaaccc

SEQ ID NO: 973234 - RNA, 21 nt, Human
cugggaucagaagcucucagg

SEQ ID NO: 973235 - RNA, 22 nt, Human
cugucuguccccagagcucaug

SEQ ID NO: 973236 - RNA, 19 nt, Human
gagcucaugcuccacuccu

SEQ ID NO: 973237 - RNA, 24 nt, Human
gaggaaacugaggcacagaagguc

SEQ ID NO: 973238 - RNA, 22 nt, Human
gaggaagggggugugugugaug

SEQ ID NO: 973239 - RNA, 24 nt, Human
gaucacccacuucucaaauucaaa

SEQ ID NO: 973240 - RNA, 20 nt, Human
gcucucuuggaaucaaauuc

SEQ ID NO: 973241 - RNA, 22 nt, Human
ggacuuaacuuuuaaaaagcaa

SEQ ID NO: 973242 - RNA, 18 nt, Human
ggaggaagggggugugug

SEQ ID NO: 973243 - RNA, 18 nt, Human
ggugugugugaugaacag

SEQ ID NO: 973244 - RNA, 25 nt, Human
uaaaucccaugacuacaccaaaaag

SEQ ID NO: 973245 - RNA, 19 nt, Human
uaacugccuaagacuccua

SEQ ID NO: 973246 - RNA, 22 nt, Human
uaauagcugggaucagaagcuc

SEQ ID NO: 973247 - RNA, 27 nt, Human
uacauacacacauacauacccacacac

SEQ ID NO: 973248 - RNA, 26 nt, Human
uacauacauacacacauacauaccca

SEQ ID NO: 973249 - RNA, 27 nt, Human
uacauacauacacacauacauacccac

SEQ ID NO: 973250 - RNA, 21 nt, Human
uaccuuugcccagcucagggg

SEQ ID NO: 973251 - RNA, 30 nt, Human
uacucacaugcacacaugcggauacauaca

SEQ ID NO: 973252 - RNA, 24 nt, Human
uauacagauuggaauuaaagugug

SEQ ID NO: 973253 - RNA, 24 nt, Human
uaugacauucagcuaacuauaguc

SEQ ID NO: 973254 - RNA, 29 nt, Human
ucacaugcacacaugcggauacauacaua

SEQ ID NO: 973255 - RNA, 19 nt, Human
ucagcagggcauucagcac

SEQ ID NO: 973256 - RNA, 26 nt, Human
ucaggcacccgguuaccagacaugau

SEQ ID NO: 973257 - RNA, 22 nt, Human
uccaagcacagagccugacaaa

SEQ ID NO: 973258 - RNA, 20 nt, Human
uccaggaagccuagagggga

SEQ ID NO: 973259 - RNA, 18 nt, Human
ucccaugacuacaccaaa

SEQ ID NO: 973260 - RNA, 22 nt, Human
ucgcacccggcuuugcugccuc

SEQ ID NO: 973261 - RNA, 23 nt, Human
ucucagggguccaggcaugaggg

SEQ ID NO: 973262 - RNA, 24 nt, Human
ucuccuuacuaggaggguagagau

SEQ ID NO: 973263 - RNA, 19 nt, Human
ugaauacacaaaugaguga

SEQ ID NO: 973264 - RNA, 20 nt, Human
ugaccuccaggaagccuaga

SEQ ID NO: 973265 - RNA, 22 nt, Human
ugacuacaccaaaaagggccag

SEQ ID NO: 973266 - RNA, 23 nt, Human
ugacuacaccaaaaagggccagg

SEQ ID NO: 973267 - RNA, 22 nt, Human
ugaggaaacugaggcacagaag

SEQ ID NO: 973268 - RNA, 24 nt, Human
ugagguagguaauauuguuagccc

SEQ ID NO: 973269 - RNA, 26 nt, Human
ugagguuaguuccuaaaaugaaccuc

SEQ ID NO: 973270 - RNA, 21 nt, Human
ugcccaaggucaaacaacuag

SEQ ID NO: 973271 - RNA, 20 nt, Human
uggaauuaaagugugauggu

SEQ ID NO: 973272 - RNA, 21 nt, Human
uggcccaggauaccucucccu

SEQ ID NO: 973273 - RNA, 27 nt, Human
ugggaccagaacccauaacugucuguc

SEQ ID NO: 973274 - RNA, 21 nt, Human
ugggauguggcccaggauacc

SEQ ID NO: 973275 - RNA, 21 nt, Human
ugggcaagaggcccaaggggc

SEQ ID NO: 973276 - RNA, 23 nt, Human
ugucaaggucuagcuuaaaugug

SEQ ID NO: 973277 - RNA, 24 nt, Human
uuaccagguagaccccaucagugc

SEQ ID NO: 973278 - RNA, 22 nt, Human
uuagaauggacuuaacuuuuaa

SEQ ID NO: 973279 - RNA, 24 nt, Human
uuaguuccuaaaaugaaccucaca

SEQ ID NO: 973280 - RNA, 22 nt, Human
uucagaggccagaauacucccu

SEQ ID NO: 973281 - RNA, 23 nt, Human
uucaugcauauuuggguaauuag

SEQ ID NO: 973282 - RNA, 18 nt, Human
uugcccaaggucaaacaa

SEQ ID NO: 973283 - RNA, 21 nt, Human
uuuugcaaacauacucacaug

SEQ ID NO: 973284 - RNA, 20 nt, Human
aaacaggccacaaaccaguu

SEQ ID NO: 973285 - RNA, 22 nt, Human
aaacaggccacaaaccaguucg

SEQ ID NO: 973286 - RNA, 22 nt, Human
aagcuccuccgggucacaaagg

SEQ ID NO: 973287 - RNA, 18 nt, Human
accacaccgcucucaaca

SEQ ID NO: 973288 - RNA, 19 nt, Human
acgcacccccaaaagcucc

SEQ ID NO: 973289 - RNA, 25 nt, Human
acgcacccccaaaagcuccuccggg

SEQ ID NO: 973290 - RNA, 22 nt, Human
agcaaaccucugacaggaauca

SEQ ID NO: 973291 - RNA, 19 nt, Human
augaagaaauaacuuugua

SEQ ID NO: 973292 - RNA, 20 nt, Human
caacaccuaccacaccgcuc

SEQ ID NO: 973293 - RNA, 21 nt, Human
caccauagcggcuacaacacc

SEQ ID NO: 973294 - RNA, 21 nt, Human
caccgcucucaacacccgcgc

SEQ ID NO: 973295 - RNA, 24 nt, Human
ccacaauaauuggaccauaauuag

SEQ ID NO: 973296 - RNA, 23 nt, Human
ccacaccgcucucaacacccgcg

SEQ ID NO: 973297 - RNA, 20 nt, Human
cccuaauauauaaaagaccc

SEQ ID NO: 973298 - RNA, 20 nt, Human
cgcuacaaagcgaacuucac

SEQ ID NO: 973299 - RNA, 22 nt, Human
cuacaaagcgaacuucaccaua

SEQ ID NO: 973300 - RNA, 21 nt, Human
gcuacaacaccuaccacaccg

SEQ ID NO: 973301 - RNA, 18 nt, Human
ggucacaaaggcagggaa

SEQ ID NO: 973302 - RNA, 21 nt, Human
ggucagcaaaccucugacagg

SEQ ID NO: 973303 - RNA, 22 nt, Human
ucagcuacauuuaucauguaau

SEQ ID NO: 973304 - RNA, 22 nt, Human
ucaggccaggggcuugacgcac

SEQ ID NO: 973305 - RNA, 23 nt, Human
ucccuaauauauaaaagacccgc

SEQ ID NO: 973306 - RNA, 24 nt, Human
ucgcugccucaggccaggggcuug

SEQ ID NO: 973307 - RNA, 25 nt, Human
ucucuagccggggccgcuacaaagc

SEQ ID NO: 973308 - RNA, 24 nt, Human
aaaaaccaagugguugccaacuua

SEQ ID NO: 973309 - RNA, 23 nt, Human
aaacagaaaccaguuucaugauc

SEQ ID NO: 973310 - RNA, 20 nt, Human
aaaccaguuucaugaucuag

SEQ ID NO: 973311 - RNA, 20 nt, Human
acagugggacuacauccugg

SEQ ID NO: 973312 - RNA, 24 nt, Human
accccuaaauagaugcuccucaac

SEQ ID NO: 973313 - RNA, 23 nt, Human
agaaaaaaaucaguaauacacug

SEQ ID NO: 973314 - RNA, 22 nt, Human
agagccccgcuuaacacuccgc

SEQ ID NO: 973315 - RNA, 25 nt, Human
agccaucgaaagacacgaguggcaa

SEQ ID NO: 973316 - RNA, 18 nt, Human
agccuugauagcacaacc

SEQ ID NO: 973317 - RNA, 22 nt, Human
agccuugauagcacaaccuugc

SEQ ID NO: 973318 - RNA, 19 nt, Human
aggacuuugccucaacuaa

SEQ ID NO: 973319 - RNA, 18 nt, Human
aggcaaacauuacucaag

SEQ ID NO: 973320 - RNA, 25 nt, Human
auaccgaaaguccuuccaaaaacca

SEQ ID NO: 973321 - RNA, 22 nt, Human
caauaccgaaaguccuuccaaa

SEQ ID NO: 973322 - RNA, 22 nt, Human
cacgaagguaugcugagccuug

SEQ ID NO: 973323 - RNA, 18 nt, Human
ccaagauuaguuggcagg

SEQ ID NO: 973324 - RNA, 20 nt, Human
cccacugaagaaaggaacaa

SEQ ID NO: 973325 - RNA, 22 nt, Human
cccgccccacccggggaaaucu

SEQ ID NO: 973326 - RNA, 19 nt, Human
ccgcgcccgccccacccgg

SEQ ID NO: 973327 - RNA, 19 nt, Human
ccucaacuaacauacuuuu

SEQ ID NO: 973328 - RNA, 18 nt, Human
cgaaagacacgaguggca

SEQ ID NO: 973329 - RNA, 28 nt, Human
cuaaguggaaugccuuaaagaaucuauc

SEQ ID NO: 973330 - RNA, 18 nt, Human
cucaacagugggacuaca

SEQ ID NO: 973331 - RNA, 25 nt, Human
gaaccaguguaaaucagaggccauu

SEQ ID NO: 973332 - RNA, 20 nt, Human
gagccaucgaaagacacgag

SEQ ID NO: 973333 - RNA, 24 nt, Human
gaugcuccucaacagugggacuac

SEQ ID NO: 973334 - RNA, 19 nt, Human
gcaagaaggcaggacuggu

SEQ ID NO: 973335 - RNA, 20 nt, Human
gcccacugaagaaaggaaca

SEQ ID NO: 973336 - RNA, 22 nt, Human
gcuuagaggcagcgggacuucg

SEQ ID NO: 973337 - RNA, 22 nt, Human
ggauaaaccuaucauaaaguug

SEQ ID NO: 973338 - RNA, 22 nt, Human
ggcagcgggacuucgggaaggg

SEQ ID NO: 973339 - RNA, 20 nt, Human
gugguugccaacuuaugucc

SEQ ID NO: 973340 - RNA, 18 nt, Human
uaaagaaucuauccaaga

SEQ ID NO: 973341 - RNA, 22 nt, Human
uaaccccuaaauagaugcuccu

SEQ ID NO: 973342 - RNA, 23 nt, Human
uaaccccuaaauagaugcuccuu

SEQ ID NO: 973343 - RNA, 19 nt, Human
uaaucuagaagcaauuaua

SEQ ID NO: 973344 - RNA, 24 nt, Human
uagcauuauaacauucuugagcca

SEQ ID NO: 973345 - RNA, 28 nt, Human
uaggauaaauacccagaaauuuaacagc

SEQ ID NO: 973346 - RNA, 24 nt, Human
ucaacuugaagaaucuucagcaua

SEQ ID NO: 973347 - RNA, 21 nt, Human
ucagcccgcgggccgcuacac

SEQ ID NO: 973348 - RNA, 21 nt, Human
uccgagagccccgcuuaacac

SEQ ID NO: 973349 - RNA, 18 nt, Human
ucuccauagucugcuacu

SEQ ID NO: 973350 - RNA, 21 nt, Human
ucugcuacuuacaagauuguc

SEQ ID NO: 973351 - RNA, 19 nt, Human
ucuuuauuuaaaaguccau

SEQ ID NO: 973352 - RNA, 24 nt, Human
ugaaaugcauuuaguacccggaua

SEQ ID NO: 973353 - RNA, 21 nt, Human
ugacaacugcauaaaacagaa

SEQ ID NO: 973354 - RNA, 25 nt, Human
uggcaagaaggcaggacugguuucu

SEQ ID NO: 973355 - RNA, 24 nt, Human
ugguaaaucaaaggcccacgaagg

SEQ ID NO: 973356 - RNA, 23 nt, Human
ugguuuacaaaaauauguucaua

SEQ ID NO: 973357 - RNA, 20 nt, Human
uucaugaucuaguuuaggga

SEQ ID NO: 973358 - RNA, 22 nt, Human
uuuacaaauagaaaaaaaucag

SEQ ID NO: 973359 - RNA, 26 nt, Human
uuuuuuuuuuuuuuuugcuuucuuua

SEQ ID NO: 973360 - RNA, 18 nt, Human
uuuuuuuuuuuuuuuuug

SEQ ID NO: 973361 - RNA, 23 nt, Human
uuuuuuuuuuuuuuuuuugcuuu

SEQ ID NO: 973362 - RNA, 21 nt, Human
aaaccggagccccagccccua

SEQ ID NO: 973363 - RNA, 22 nt, Human
aaagagagagaaaucagccagu

SEQ ID NO: 973364 - RNA, 23 nt, Human
aaagugcuggcauuacaguguga

SEQ ID NO: 973365 - RNA, 21 nt, Human
aaccccugucccaccugaccc

SEQ ID NO: 973366 - RNA, 19 nt, Human
aaccggagccccagccccu

SEQ ID NO: 973367 - RNA, 22 nt, Human
aacugaagcccagaggggccca

SEQ ID NO: 973368 - RNA, 22 nt, Human
aagagcaauguggggaauuacc

SEQ ID NO: 973369 - RNA, 25 nt, Human
aagcaauccuccuaccucagcuucc

SEQ ID NO: 973370 - RNA, 25 nt, Human
aagcaauccuccugccuuagccucc

SEQ ID NO: 973371 - RNA, 19 nt, Human
aaguaaacugcccaagguc

SEQ ID NO: 973372 - RNA, 26 nt, Human
acaaagcacagagagguuaaguaaac

SEQ ID NO: 973373 - RNA, 20 nt, Human
acaagacaaggcaucagccg

SEQ ID NO: 973374 - RNA, 18 nt, Human
accaagcacauuauccca

SEQ ID NO: 973375 - RNA, 20 nt, Human
accagcuaggcagaugcucu

SEQ ID NO: 973376 - RNA, 22 nt, Human
accauuuuacccucccaucccc

SEQ ID NO: 973377 - RNA, 22 nt, Human
acugaagcccagaggggcccag

SEQ ID NO: 973378 - RNA, 23 nt, Human
acugcacccggcccuguacacac

SEQ ID NO: 973379 - RNA, 21 nt, Human
agaccucaacccucagcccca

SEQ ID NO: 973380 - RNA, 21 nt, Human
aguggggaaacugaagcccag

SEQ ID NO: 973381 - RNA, 21 nt, Human
auagaaaguacaagacuugga

SEQ ID NO: 973382 - RNA, 21 nt, Human
auccuccugccuuagccuccc

SEQ ID NO: 973383 - RNA, 21 nt, Human
augagucuuguaccccaugac

SEQ ID NO: 973384 - RNA, 21 nt, Human
auuacagugugagccacugca

SEQ ID NO: 973385 - RNA, 23 nt, Human
caaagugcuggcauuacagugug

SEQ ID NO: 973386 - RNA, 22 nt, Human
caacagcacugaaaguuugcug

SEQ ID NO: 973387 - RNA, 27 nt, Human
caagcaauccuccuaccucagcuuccc

SEQ ID NO: 973388 - RNA, 28 nt, Human
caagcaauccuccuaccucagcuuccca

SEQ ID NO: 973389 - RNA, 22 nt, Human
caagcaauccuccugccuuagc

SEQ ID NO: 973390 - RNA, 27 nt, Human
caagcaauccuccugccuuagccuccc

SEQ ID NO: 973391 - RNA, 27 nt, Human
caagcaauccuccugccuuagccuccc

SEQ ID NO: 973392 - RNA, 25 nt, Human
caccucuuuccccaugcccucaacc

SEQ ID NO: 973393 - RNA, 18 nt, Human
cagaacccagagucuucc

SEQ ID NO: 973394 - RNA, 18 nt, Human
cagacacaagacaaggca

SEQ ID NO: 973395 - RNA, 22 nt, Human
cagagccagagccuuguccuga

SEQ ID NO: 973396 - RNA, 23 nt, Human
cagagucuagccauuuacaauca

SEQ ID NO: 973397 - RNA, 23 nt, Human
cagaugguggcuccucucacccc

SEQ ID NO: 973398 - RNA, 20 nt, Human
cagcagacugcgugucuggg

SEQ ID NO: 973399 - RNA, 19 nt, Human
cagccaauagaaccuccca

SEQ ID NO: 973400 - RNA, 24 nt, Human
cagccaggccuccagggaggccaa

SEQ ID NO: 973401 - RNA, 22 nt, Human
caggauguacacuuuaauguuu

SEQ ID NO: 973402 - RNA, 28 nt, Human
caggcaauaggcuucacccccugaaagg

SEQ ID NO: 973403 - RNA, 19 nt, Human
caggccucagaccuguguu

SEQ ID NO: 973404 - RNA, 21 nt, Human
caggccuccagggaggccagg

SEQ ID NO: 973405 - RNA, 23 nt, Human
cauguuacccaggcuggucucaa

SEQ ID NO: 973406 - RNA, 24 nt, Human
cauguuacccaggcuggucucaaa

SEQ ID NO: 973407 - RNA, 20 nt, Human
ccaaagugcuggcauuacag

SEQ ID NO: 973408 - RNA, 23 nt, Human
ccaaagugcuggcauuacagugu

SEQ ID NO: 973409 - RNA, 19 nt, Human
ccacugcacccggcccugu

SEQ ID NO: 973410 - RNA, 21 nt, Human
cccagaauguccuccccagcu

SEQ ID NO: 973411 - RNA, 20 nt, Human
cccagccucagcagaaccca

SEQ ID NO: 973412 - RNA, 18 nt, Human
ccccagaauguccucccc

SEQ ID NO: 973413 - RNA, 19 nt, Human
ccccagccccuaugagccc

SEQ ID NO: 973414 - RNA, 25 nt, Human
ccccaggccugccucuggagcagug

SEQ ID NO: 973415 - RNA, 20 nt, Human
ccccaugaacugguggcccu

SEQ ID NO: 973416 - RNA, 20 nt, Human
ccccaugcccucaccagcua

SEQ ID NO: 973417 - RNA, 24 nt, Human
ccccauguuacccaggcuggucuc

SEQ ID NO: 973418 - RNA, 27 nt, Human
ccccauguuacccaggcuggucucaaa

SEQ ID NO: 973419 - RNA, 21 nt, Human
ccccugaaaccggagccccag

SEQ ID NO: 973420 - RNA, 23 nt, Human
ccccugaaaccggagccccagcc

SEQ ID NO: 973421 - RNA, 25 nt, Human
ccccugaaaccggagccccagcccc

SEQ ID NO: 973422 - RNA, 20 nt, Human
ccccugucccaccugacccg

SEQ ID NO: 973423 - RNA, 22 nt, Human
cccucagccccagaauguccuc

SEQ ID NO: 973424 - RNA, 20 nt, Human
cccugccagcuaccaagcac

SEQ ID NO: 973425 - RNA, 18 nt, Human
ccggaggguugcccaggc

SEQ ID NO: 973426 - RNA, 19 nt, Human
ccggcaccagagucuagcc

SEQ ID NO: 973427 - RNA, 24 nt, Human
ccguaguaaauggaagcucccuuc

SEQ ID NO: 973428 - RNA, 19 nt, Human
ccucagaccuguguuuugg

SEQ ID NO: 973429 - RNA, 25 nt, Human
ccucccauccccaacuagauugggc

SEQ ID NO: 973430 - RNA, 24 nt, Human
ccuccuaccucagcuucccaagua

SEQ ID NO: 973431 - RNA, 18 nt, Human
ccuuacaaauacucaagg

SEQ ID NO: 973432 - RNA, 22 nt, Human
ccuuacagcugcagaaccccug

SEQ ID NO: 973433 - RNA, 26 nt, Human
cguuaccaacugcaagaucucaggca

SEQ ID NO: 973434 - RNA, 24 nt, Human
cucaagcaauccuccuaccucagc

SEQ ID NO: 973435 - RNA, 24 nt, Human
cucaagcaauccuccugccuuagc

SEQ ID NO: 973436 - RNA, 22 nt, Human
cucagccaauagaaccucccag

SEQ ID NO: 973437 - RNA, 24 nt, Human
cucagcuucccaaguagcugggac

SEQ ID NO: 973438 - RNA, 24 nt, Human
cugaaaccggagccccagccccua

SEQ ID NO: 973439 - RNA, 25 nt, Human
cugaaaccggagccccagccccuau

SEQ ID NO: 973440 - RNA, 20 nt, Human
cugagggcuuggggacacag

SEQ ID NO: 973441 - RNA, 24 nt, Human
cugcaucaaaaucugcgucucacc

SEQ ID NO: 973442 - RNA, 23 nt, Human
cugccuuagccucccaaagugcu

SEQ ID NO: 973443 - RNA, 24 nt, Human
cugccuuagccucccaaagugcug

SEQ ID NO: 973444 - RNA, 23 nt, Human
cuggcugguggcuggcucucccc

SEQ ID NO: 973445 - RNA, 22 nt, Human
cuguuccaaagagagagaaauc

SEQ ID NO: 973446 - RNA, 20 nt, Human
gaaaccggagccccagcccc

SEQ ID NO: 973447 - RNA, 21 nt, Human
gaaaccggagccccagccccu

SEQ ID NO: 973448 - RNA, 18 nt, Human
gaacugguggcccuggaa

SEQ ID NO: 973449 - RNA, 18 nt, Human
gaauguccuccccagcuc

SEQ ID NO: 973450 - RNA, 19 nt, Human
gagcagccaggccuccagg

SEQ ID NO: 973451 - RNA, 22 nt, Human
gauuggauuauggugagaaguu

SEQ ID NO: 973452 - RNA, 18 nt, Human
gcauuacagugugagcca

SEQ ID NO: 973453 - RNA, 22 nt, Human
gccugggcaugugugggggccu

SEQ ID NO: 973454 - RNA, 23 nt, Human
gcucugucgcccagacugugcag

SEQ ID NO: 973455 - RNA, 25 nt, Human
ggaaacugaagcccagaggggccca

SEQ ID NO: 973456 - RNA, 28 nt, Human
ggcaugagagcagccaggccuccaggga

SEQ ID NO: 973457 - RNA, 20 nt, Human
ggcaugugugggggccugag

SEQ ID NO: 973458 - RNA, 26 nt, Human
gggaggccaggacagcguggcgggcg

SEQ ID NO: 973459 - RNA, 22 nt, Human
gggcucaagcaauccuccuacc

SEQ ID NO: 973460 - RNA, 18 nt, Human
ggggaaacugaagcccag

SEQ ID NO: 973461 - RNA, 20 nt, Human
ggggcccaggccuugaagug

SEQ ID NO: 973462 - RNA, 23 nt, Human
guggugcagucacagcucacugc

SEQ ID NO: 973463 - RNA, 22 nt, Human
uacagugugagccacugcaccc

SEQ ID NO: 973464 - RNA, 24 nt, Human
uaccucagcuucccaaguagcugg

SEQ ID NO: 973465 - RNA, 22 nt, Human
uagagguaggaucuccccaugu

SEQ ID NO: 973466 - RNA, 20 nt, Human
uagaugcaaaugccuaggac

SEQ ID NO: 973467 - RNA, 24 nt, Human
uagcugggaccgcaggcaaacacc

SEQ ID NO: 973468 - RNA, 23 nt, Human
uaggacagugccuggaacaucga

SEQ ID NO: 973469 - RNA, 21 nt, Human
uaguaaauggaagcucccuuc

SEQ ID NO: 973470 - RNA, 22 nt, Human
uaguaaauggaagcucccuucu

SEQ ID NO: 973471 - RNA, 19 nt, Human
uagucuguugucggggagg

SEQ ID NO: 973472 - RNA, 24 nt, Human
uaucccagcuucccacugugccag

SEQ ID NO: 973473 - RNA, 18 nt, Human
uaucucccucaucccccu

SEQ ID NO: 973474 - RNA, 20 nt, Human
uaugaauccagagcugaccc

SEQ ID NO: 973475 - RNA, 25 nt, Human
uauugccagaaagcucuccaaagag

SEQ ID NO: 973476 - RNA, 23 nt, Human
ucaaaaucugcgucucaccagga

SEQ ID NO: 973477 - RNA, 18 nt, Human
ucaacccucagccccaga

SEQ ID NO: 973478 - RNA, 20 nt, Human
ucaagggccugggcaugugu

SEQ ID NO: 973479 - RNA, 21 nt, Human
ucaccagcuaggcagaugcuc

SEQ ID NO: 973480 - RNA, 23 nt, Human
ucacugcagccugacuucauggg

SEQ ID NO: 973481 - RNA, 22 nt, Human
ucagaaguggcuguucuuacga

SEQ ID NO: 973482 - RNA, 19 nt, Human
ucagccaguuguccauuca

SEQ ID NO: 973483 - RNA, 22 nt, Human
ucagccgacaaccaaaggcaaa

SEQ ID NO: 973484 - RNA, 19 nt, Human
ucaggcaauaggcuucacc

SEQ ID NO: 973485 - RNA, 22 nt, Human
ucccaaagugcuggcauuacag

SEQ ID NO: 973486 - RNA, 25 nt, Human
ucccaaagugcuggcauuacagugu

SEQ ID NO: 973487 - RNA, 24 nt, Human
ucccaaguagcugggaccgcaggc

SEQ ID NO: 973488 - RNA, 22 nt, Human
uccccaacuagauugggcaccu

SEQ ID NO: 973489 - RNA, 19 nt, Human
uccccagcucugucgcaga

SEQ ID NO: 973490 - RNA, 22 nt, Human
uccccgaaggucgcugcuucug

SEQ ID NO: 973491 - RNA, 20 nt, Human
ucccggguggccccaggccu

SEQ ID NO: 973492 - RNA, 19 nt, Human
ucccguguuuugcugcugc

SEQ ID NO: 973493 - RNA, 18 nt, Human
ucccugggaggcauagaa

SEQ ID NO: 973494 - RNA, 18 nt, Human
ucccugggaggcauagaa

SEQ ID NO: 973495 - RNA, 19 nt, Human
ucccugucuugaaacccca

SEQ ID NO: 973496 - RNA, 18 nt, Human
uccggaggguugcccagg

SEQ ID NO: 973497 - RNA, 22 nt, Human
uccuaggcccguaguaaaugga

SEQ ID NO: 973498 - RNA, 27 nt, Human
uccuccugccuuagccucccaaagugc

SEQ ID NO: 973499 - RNA, 22 nt, Human
ucuaugggcagaccucaacccu

SEQ ID NO: 973500 - RNA, 18 nt, Human
ucucaccccugaaaccgg

SEQ ID NO: 973501 - RNA, 21 nt, Human
ucuccccgaaggucgcugcuu

SEQ ID NO: 973502 - RNA, 18 nt, Human
ucucucugagcccagccu

SEQ ID NO: 973503 - RNA, 22 nt, Human
ucugagacugagggcuugggga

SEQ ID NO: 973504 - RNA, 21 nt, Human
ucugugccaagaaaaccaaac

SEQ ID NO: 973505 - RNA, 18 nt, Human
ucuugcucugucgcccag

SEQ ID NO: 973506 - RNA, 19 nt, Human
ucuugcucugucgcccaga

SEQ ID NO: 973507 - RNA, 21 nt, Human
ucuugcucugucgcccagacu

SEQ ID NO: 973508 - RNA, 25 nt, Human
ucuugcucugucgcccagacugugc

SEQ ID NO: 973509 - RNA, 23 nt, Human
ugaaaccccagcccuugauauca

SEQ ID NO: 973510 - RNA, 23 nt, Human
ugaagcccagaggggcccaggcc

SEQ ID NO: 973511 - RNA, 24 nt, Human
ugaauccagagcugaccccggcac

SEQ ID NO: 973512 - RNA, 18 nt, Human
ugaauggagaguccggag

SEQ ID NO: 973513 - RNA, 19 nt, Human
ugacugcagucaugggaug

SEQ ID NO: 973514 - RNA, 21 nt, Human
ugagccccugccagcuaccaa

SEQ ID NO: 973515 - RNA, 24 nt, Human
ugaggaaagccucccggguggccc

SEQ ID NO: 973516 - RNA, 22 nt, Human
ugcaguggugcagucacagcuc

SEQ ID NO: 973517 - RNA, 18 nt, Human
ugccaagaaaaccaaaca

SEQ ID NO: 973518 - RNA, 21 nt, Human
ugccaguggggaaacugaagc

SEQ ID NO: 973519 - RNA, 18 nt, Human
ugccuggaacaucgaggc

SEQ ID NO: 973520 - RNA, 24 nt, Human
ugccuuagccucccaaagugcugg

SEQ ID NO: 973521 - RNA, 21 nt, Human
ugcucugucgcccagacugug

SEQ ID NO: 973522 - RNA, 19 nt, Human
uggacaggacaaaacuugu

SEQ ID NO: 973523 - RNA, 20 nt, Human
uggagggugcuccuuggaca

SEQ ID NO: 973524 - RNA, 22 nt, Human
uggauggacagcuaggggaucc

SEQ ID NO: 973525 - RNA, 20 nt, Human
uggcauuacagugugagcca

SEQ ID NO: 973526 - RNA, 23 nt, Human
uggcauuacagugugagccacug

SEQ ID NO: 973527 - RNA, 24 nt, Human
uggcuccucucaccccugaaaccc

SEQ ID NO: 973528 - RNA, 18 nt, Human
ugggaagggaugaaggga

SEQ ID NO: 973529 - RNA, 18 nt, Human
ugggaccgcaggcaaaca

SEQ ID NO: 973530 - RNA, 20 nt, Human
ugggaccgcaggcaaacacc

SEQ ID NO: 973531 - RNA, 19 nt, Human
ugggccccacaguucccug

SEQ ID NO: 973532 - RNA, 21 nt, Human
uggggaaacugaagcccagag

SEQ ID NO: 973533 - RNA, 24 nt, Human
uggugcagucacagcucacugcag

SEQ ID NO: 973534 - RNA, 18 nt, Human
ugucgcccagacugugca

SEQ ID NO: 973535 - RNA, 23 nt, Human
ugugcaguggugcagucacagcu

SEQ ID NO: 973536 - RNA, 20 nt, Human
ugugccaagaaaaccaaaca

SEQ ID NO: 973537 - RNA, 18 nt, Human
ugugggggccugagucca

SEQ ID NO: 973538 - RNA, 23 nt, Human
uguuugaggagcacugagacuca

SEQ ID NO: 973539 - RNA, 20 nt, Human
uguuuugggaagggaugaag

SEQ ID NO: 973540 - RNA, 20 nt, Human
uuagcuuaucccagcuuccc

SEQ ID NO: 973541 - RNA, 20 nt, Human
uucaccaacuugaagacugc

SEQ ID NO: 973542 - RNA, 25 nt, Human
uucaugggcucaagcaauccuccua

SEQ ID NO: 973543 - RNA, 24 nt, Human
uuccagggcugagaucuugccgua

SEQ ID NO: 973544 - RNA, 18 nt, Human
uugcccaggccacugcag

SEQ ID NO: 973545 - RNA, 20 nt, Human
uuguauucucucucugagcc

SEQ ID NO: 973546 - RNA, 19 nt, Human
uuuagaguaucuugcagcu

SEQ ID NO: 973547 - RNA, 19 nt, Human
aaacacaccauaccuacca

SEQ ID NO: 973548 - RNA, 22 nt, Human
aacaaacacaccauaccuacca

SEQ ID NO: 973549 - RNA, 18 nt, Human
aacaggcuucaaagucag

SEQ ID NO: 973550 - RNA, 19 nt, Human
aagaaaacacucaccuggc

SEQ ID NO: 973551 - RNA, 18 nt, Human
aagcaggcccuaacucca

SEQ ID NO: 973552 - RNA, 20 nt, Human
aagcugccugaggcagccca

SEQ ID NO: 973553 - RNA, 24 nt, Human
acagaacaaacacaccauaccuac

SEQ ID NO: 973554 - RNA, 19 nt, Human
acagagccaaagguccugg

SEQ ID NO: 973555 - RNA, 18 nt, Human
accaggugacuccagccc

SEQ ID NO: 973556 - RNA, 28 nt, Human
agaagacagcaggaaaaugccgguaccc

SEQ ID NO: 973557 - RNA, 22 nt, Human
agcaagaaaacuaaacgcacag

SEQ ID NO: 973558 - RNA, 22 nt, Human
agcacagagccucagcuccccc

SEQ ID NO: 973559 - RNA, 23 nt, Human
agcacagagccucagcuccccca

SEQ ID NO: 973560 - RNA, 26 nt, Human
aggaaaaugccauccuuuaacagcca

SEQ ID NO: 973561 - RNA, 19 nt, Human
aggauaccagaggcaggag

SEQ ID NO: 973562 - RNA, 22 nt, Human
aggcaggaggagggucacuugg

SEQ ID NO: 973563 - RNA, 25 nt, Human
agggaaaaagggccuugcccugagg

SEQ ID NO: 973564 - RNA, 27 nt, Human
cacaccauaccuaccaucaggcaccag

SEQ ID NO: 973565 - RNA, 25 nt, Human
caccagacgccucaaaacgccugga

SEQ ID NO: 973566 - RNA, 24 nt, Human
caccauaccuaccaucaggcacca

SEQ ID NO: 973567 - RNA, 19 nt, Human
cacggccccggagcucaga

SEQ ID NO: 973568 - RNA, 18 nt, Human
cacucaggugacagugac

SEQ ID NO: 973569 - RNA, 22 nt, Human
cagaaaugugaagcuggccuuc

SEQ ID NO: 973570 - RNA, 18 nt, Human
cagcaagaaaacuaaacg

SEQ ID NO: 973571 - RNA, 19 nt, Human
cagcaagaaaacuaaacgc

SEQ ID NO: 973572 - RNA, 21 nt, Human
cagcaagaaaacuaaacgcac

SEQ ID NO: 973573 - RNA, 21 nt, Human
cagcacagagccucagcuccc

SEQ ID NO: 973574 - RNA, 24 nt, Human
cagcauuagaaaacauggcaacca

SEQ ID NO: 973575 - RNA, 18 nt, Human
cagcugugggcugggggu

SEQ ID NO: 973576 - RNA, 20 nt, Human
caggacccucagcugccuga

SEQ ID NO: 973577 - RNA, 20 nt, Human
caggugacagugacccaagc

SEQ ID NO: 973578 - RNA, 25 nt, Human
cauagcccaagcacauccugaugcc

SEQ ID NO: 973579 - RNA, 22 nt, Human
cauggcaaccacccguuuccac

SEQ ID NO: 973580 - RNA, 23 nt, Human
ccaacgacuagggccccgggggc

SEQ ID NO: 973581 - RNA, 23 nt, Human
ccauccuuuaacagccaaaaauc

SEQ ID NO: 973582 - RNA, 19 nt, Human
cccccaggacccucagcug

SEQ ID NO: 973583 - RNA, 19 nt, Human
ccccggagcucagaccagc

SEQ ID NO: 973584 - RNA, 20 nt, Human
ccccggagcucagaccagcc

SEQ ID NO: 973585 - RNA, 22 nt, Human
ccccugggggacagaacaaaca

SEQ ID NO: 973586 - RNA, 24 nt, Human
cccggagcucagaccagccuggga

SEQ ID NO: 973587 - RNA, 21 nt, Human
ccuaccaucaggcaccagacg

SEQ ID NO: 973588 - RNA, 20 nt, Human
ccucugcucuccaguggggc

SEQ ID NO: 973589 - RNA, 24 nt, Human
ccucugcucuccaguggggccugg

SEQ ID NO: 973590 - RNA, 24 nt, Human
ccuggagcuagggccggaaaaggc

SEQ ID NO: 973591 - RNA, 21 nt, Human
ccugggguuggccccaagagc

SEQ ID NO: 973592 - RNA, 21 nt, Human
ccugggguuggccccaagagc

SEQ ID NO: 973593 - RNA, 18 nt, Human
cgacuagggccccggggg

SEQ ID NO: 973594 - RNA, 22 nt, Human
cuccagugagaugccccagcug

SEQ ID NO: 973595 - RNA, 19 nt, Human
cucccgcucagcaagaaaa

SEQ ID NO: 973596 - RNA, 28 nt, Human
cuccuuuguucuggcaaaaagcuagaga

SEQ ID NO: 973597 - RNA, 20 nt, Human
cucuagcccccuugcuaccu

SEQ ID NO: 973598 - RNA, 24 nt, Human
cugccugaggcagcccagcugcac

SEQ ID NO: 973599 - RNA, 21 nt, Human
cugggcucaggguuuauggcc

SEQ ID NO: 973600 - RNA, 23 nt, Human
cuucaggggcaccaggugacucc

SEQ ID NO: 973601 - RNA, 24 nt, Human
gaaaaaccacuauucaaaucccug

SEQ ID NO: 973602 - RNA, 23 nt, Human
gaaaaugccauccuuuaacagcc

SEQ ID NO: 973603 - RNA, 20 nt, Human
gaauggaacgugaaggaccc

SEQ ID NO: 973604 - RNA, 20 nt, Human
gcaggaggagggucacuugg

SEQ ID NO: 973605 - RNA, 18 nt, Human
gccccagcugugggcugg

SEQ ID NO: 973606 - RNA, 19 nt, Human
gccccggagcucagaccag

SEQ ID NO: 973607 - RNA, 25 nt, Human
gcucaggguuuauggccaccauagc

SEQ ID NO: 973608 - RNA, 20 nt, Human
ggacuucgcagcacgcagac

SEQ ID NO: 973609 - RNA, 18 nt, Human
ggagggaaaaagggccuu

SEQ ID NO: 973610 - RNA, 21 nt, Human
gggcaccaggugacuccagcc

SEQ ID NO: 973611 - RNA, 21 nt, Human
gggcagccgcggacuucgcag

SEQ ID NO: 973612 - RNA, 21 nt, Human
ggugauggacagagccaaagg

SEQ ID NO: 973613 - RNA, 22 nt, Human
guccugggguuggccccaagag

SEQ ID NO: 973614 - RNA, 23 nt, Human
uaaacgcacagaagacagcagga

SEQ ID NO: 973615 - RNA, 22 nt, Human
uagaaaacauggcaaccacccg

SEQ ID NO: 973616 - RNA, 20 nt, Human
uagcccccuugcuaccucuc

SEQ ID NO: 973617 - RNA, 18 nt, Human
ucacuugggaggggaggu

SEQ ID NO: 973618 - RNA, 19 nt, Human
ucacuugggaggggaggug

SEQ ID NO: 973619 - RNA, 19 nt, Human
ucacuugggaggggaggug

SEQ ID NO: 973620 - RNA, 24 nt, Human
ucacuugggaggggagguggaauc

SEQ ID NO: 973621 - RNA, 19 nt, Human
ucagaauacagccaucagc

SEQ ID NO: 973622 - RNA, 21 nt, Human
ucagcaagaaaacuaaacgca

SEQ ID NO: 973623 - RNA, 18 nt, Human
ucagcagaaaugugaagc

SEQ ID NO: 973624 - RNA, 22 nt, Human
ucagcucccccaggacccucag

SEQ ID NO: 973625 - RNA, 19 nt, Human
ucagguccucugcucucca

SEQ ID NO: 973626 - RNA, 21 nt, Human
uccagugagaugccccagcug

SEQ ID NO: 973627 - RNA, 21 nt, Human
ucccccaggacccucagcugc

SEQ ID NO: 973628 - RNA, 23 nt, Human
ucccgcucagcaagaaaacuaaa

SEQ ID NO: 973629 - RNA, 22 nt, Human
ucugccugcgucgcagcuuccg

SEQ ID NO: 973630 - RNA, 27 nt, Human
ugaagaaaacacucaccuggcuggagg

SEQ ID NO: 973631 - RNA, 22 nt, Human
ugagagcaguucauuuuggcac

SEQ ID NO: 973632 - RNA, 19 nt, Human
ugagaugccccagcugugg

SEQ ID NO: 973633 - RNA, 21 nt, Human
ugcagcuccccagcauuagaa

SEQ ID NO: 973634 - RNA, 20 nt, Human
ugcgucgcagcuuccgcacg

SEQ ID NO: 973635 - RNA, 23 nt, Human
uggaacccaacgacuagggcccc

SEQ ID NO: 973636 - RNA, 24 nt, Human
uggaaucucccuccucuagccccc

SEQ ID NO: 973637 - RNA, 19 nt, Human
uggcaaaaagcuagagaaa

SEQ ID NO: 973638 - RNA, 24 nt, Human
uggcaaaaagcuagagaaaaacca

SEQ ID NO: 973639 - RNA, 18 nt, Human
uggcacuccaagcugccu

SEQ ID NO: 973640 - RNA, 22 nt, Human
uggccuucagcuucugcccagg

SEQ ID NO: 973641 - RNA, 20 nt, Human
uuagaaaacauggcaaccac

SEQ ID NO: 973642 - RNA, 19 nt, Human
uugcuaccucuuaacaggc

SEQ ID NO: 973643 - RNA, 22 nt, Human
aacucuagcagcccccucacag

SEQ ID NO: 973644 - RNA, 24 nt, Human
acacccgaggagaagaacucuagc

SEQ ID NO: 973645 - RNA, 20 nt, Human
acauagucaaaccugagcau

SEQ ID NO: 973646 - RNA, 19 nt, Human
acauugagaggaaguggga

SEQ ID NO: 973647 - RNA, 25 nt, Human
accacccuaacauccucauucacca

SEQ ID NO: 973648 - RNA, 20 nt, Human
acccuaacauccucauucac

SEQ ID NO: 973649 - RNA, 22 nt, Human
accugcacucuccggaacccac

SEQ ID NO: 973650 - RNA, 22 nt, Human
acgccaaggccgcaggcccaac

SEQ ID NO: 973651 - RNA, 23 nt, Human
agauuuuauacaaaaagcugggg

SEQ ID NO: 973652 - RNA, 26 nt, Human
agcaugggguggcuggucccuggaga

SEQ ID NO: 973653 - RNA, 21 nt, Human
aggaaggccuuggagcagagc

SEQ ID NO: 973654 - RNA, 23 nt, Human
aggcaggccuccggagaaggaag

SEQ ID NO: 973655 - RNA, 24 nt, Human
aggcugcuucucacacacccgagg

SEQ ID NO: 973656 - RNA, 21 nt, Human
caaaagcccccgcucugaaca

SEQ ID NO: 973657 - RNA, 19 nt, Human
cacccgaggagaagaacuc

SEQ ID NO: 973658 - RNA, 18 nt, Human
caugcagguaguaggugc

SEQ ID NO: 973659 - RNA, 21 nt, Human
ccacugcgacagcaaaagccc

SEQ ID NO: 973660 - RNA, 21 nt, Human
cccacugcgacagcaaaagcu

SEQ ID NO: 973661 - RNA, 22 nt, Human
ccuaacauccucauucaccaga

SEQ ID NO: 973662 - RNA, 20 nt, Human
ccuccggagaaggaagugaa

SEQ ID NO: 973663 - RNA, 23 nt, Human
cgacuccccgaacccgggguccu

SEQ ID NO: 973664 - RNA, 18 nt, Human
cucagccagguacuggac

SEQ ID NO: 973665 - RNA, 19 nt, Human
cuccucugucuccuugucg

SEQ ID NO: 973666 - RNA, 22 nt, Human
cucuccggaacccacugcgaca

SEQ ID NO: 973667 - RNA, 25 nt, Human
cuuacggccuucuuugcgacucccc

SEQ ID NO: 973668 - RNA, 18 nt, Human
cuucagcagcucagccag

SEQ ID NO: 973669 - RNA, 20 nt, Human
cuucuuugcgacuccccgaa

SEQ ID NO: 973670 - RNA, 20 nt, Human
gaagaaaacauugagaggaa

SEQ ID NO: 973671 - RNA, 19 nt, Human
gagcagagcugggugagca

SEQ ID NO: 973672 - RNA, 24 nt, Human
gcagcccccucacaguuguagcuc

SEQ ID NO: 973673 - RNA, 18 nt, Human
gcaggguuuuguugucaa

SEQ ID NO: 973674 - RNA, 19 nt, Human
gcccuucucuucuucgucc

SEQ ID NO: 973675 - RNA, 22 nt, Human
gcugcuucucacacacccgagg

SEQ ID NO: 973676 - RNA, 18 nt, Human
gcuggcuaccagcuccuc

SEQ ID NO: 973677 - RNA, 23 nt, Human
ggacauagucaaaccugagcaug

SEQ ID NO: 973678 - RNA, 18 nt, Human
gggaaagaaugcgguguu

SEQ ID NO: 973679 - RNA, 22 nt, Human
gggcagcgcaggguuuuguugu

SEQ ID NO: 973680 - RNA, 25 nt, Human
gggguggcuggucccuggagauucc

SEQ ID NO: 973681 - RNA, 19 nt, Human
gguggcuggucccuggaga

SEQ ID NO: 973682 - RNA, 22 nt, Human
guacuggaccacccuaacaucc

SEQ ID NO: 973683 - RNA, 19 nt, Human
guccaggaugcucguguag

SEQ ID NO: 973684 - RNA, 19 nt, Human
gugcagcuucagcagcuca

SEQ ID NO: 973685 - RNA, 26 nt, Human
guuguagcuccuccggagcucucuga

SEQ ID NO: 973686 - RNA, 21 nt, Human
uauaugaagaaaacauugaga

SEQ ID NO: 973687 - RNA, 24 nt, Human
ucaccugcacucuccggaacccac

SEQ ID NO: 973688 - RNA, 23 nt, Human
ucagauuuuauacaaaaagcugg

SEQ ID NO: 973689 - RNA, 18 nt, Human
uccucugucuccuugucg

SEQ ID NO: 973690 - RNA, 21 nt, Human
uccucugucuccuugucgugg

SEQ ID NO: 973691 - RNA, 23 nt, Human
ugaagaaaacauugagaggaagu

SEQ ID NO: 973692 - RNA, 18 nt, Human
ugagaggaagugggaaag

SEQ ID NO: 973693 - RNA, 20 nt, Human
ugagaggaagugggaaagaa

SEQ ID NO: 973694 - RNA, 28 nt, Human
ugagaggaagugggaaagaaugcggugg

SEQ ID NO: 973695 - RNA, 18 nt, Human
ugcgacagcaaaagcccc

SEQ ID NO: 973696 - RNA, 20 nt, Human
uggcuaccagcuccucuguc

SEQ ID NO: 973697 - RNA, 22 nt, Human
ugguggcagaagguguagagga

SEQ ID NO: 973698 - RNA, 24 nt, Human
uuccugcauguagugcagcuucag

SEQ ID NO: 973699 - RNA, 22 nt, Human
uuguagcuccuccggagcucuc

SEQ ID NO: 973700 - RNA, 19 nt, Human
aaacaaaacacgcaaguaa

SEQ ID NO: 973701 - RNA, 22 nt, Human
aaaccaaaaacaaaacacgcaa

SEQ ID NO: 973702 - RNA, 30 nt, Human
aacacccucccccacccccccaaaacccuu

SEQ ID NO: 973703 - RNA, 19 nt, Human
aaccaaaaacaaaacacgc

SEQ ID NO: 973704 - RNA, 20 nt, Human
aauggcauggggcaauauag

SEQ ID NO: 973705 - RNA, 21 nt, Human
acaacacccucccccaccccc

SEQ ID NO: 973706 - RNA, 18 nt, Human
acacagucaugaaccgcg

SEQ ID NO: 973707 - RNA, 19 nt, Human
acacagucaugaaccgcgc

SEQ ID NO: 973708 - RNA, 19 nt, Human
acccaccaaugcugggccc

SEQ ID NO: 973709 - RNA, 29 nt, Human
acccccccaaaacccucuaaaaguuguca

SEQ ID NO: 973710 - RNA, 18 nt, Human
acccucccccaccccccc

SEQ ID NO: 973711 - RNA, 25 nt, Human
agagaauaaagucuuucuucccuuu

SEQ ID NO: 973712 - RNA, 19 nt, Human
agaggucacacccaaucug

SEQ ID NO: 973713 - RNA, 24 nt, Human
agaguuucccuguuggcaccgcac

SEQ ID NO: 973714 - RNA, 18 nt, Human
aggcagagggagagaaau

SEQ ID NO: 973715 - RNA, 18 nt, Human
agggaggugaagaguuuc

SEQ ID NO: 973716 - RNA, 19 nt, Human
agugcccaccacccacagc

SEQ ID NO: 973717 - RNA, 18 nt, Human
auaaacaaacagcaaugc

SEQ ID NO: 973718 - RNA, 24 nt, Human
auaaaucucuuucuucucaggccc

SEQ ID NO: 973719 - RNA, 23 nt, Human
auccugccucccuggacucucca

SEQ ID NO: 973720 - RNA, 23 nt, Human
aucucuuucuucucaggccccaa

SEQ ID NO: 973721 - RNA, 22 nt, Human
caaaacccucuaaaaguuguca

SEQ ID NO: 973722 - RNA, 24 nt, Human
caacaacacccucccccacccccc

SEQ ID NO: 973723 - RNA, 21 nt, Human
caacacccucccccacccccc

SEQ ID NO: 973724 - RNA, 24 nt, Human
caacgcugaagguuaggugucugg

SEQ ID NO: 973725 - RNA, 21 nt, Human
caaugccaaugccuguacaaa

SEQ ID NO: 973726 - RNA, 22 nt, Human
cacagcgcgccucccuuccuuc

SEQ ID NO: 973727 - RNA, 22 nt, Human
cacccucccccacccccccaaa

SEQ ID NO: 973728 - RNA, 21 nt, Human
caccgcaccccucagugcagg

SEQ ID NO: 973729 - RNA, 20 nt, Human
cagcgcgccucccuuccuuc

SEQ ID NO: 973730 - RNA, 19 nt, Human
caggauagaguccuggauu

SEQ ID NO: 973731 - RNA, 24 nt, Human
cauccugccucccuggacucucca

SEQ ID NO: 973732 - RNA, 19 nt, Human
ccagggcaguuuccaucuc

SEQ ID NO: 973733 - RNA, 19 nt, Human
cccaaaacccucuaaaagu

SEQ ID NO: 973734 - RNA, 20 nt, Human
cccaaaacccucuaaaaguu

SEQ ID NO: 973735 - RNA, 23 nt, Human
cccaacaacacccucccccaccc

SEQ ID NO: 973736 - RNA, 24 nt, Human
cccaccagaaaagaacucguggag

SEQ ID NO: 973737 - RNA, 26 nt, Human
cccacccccccaaaacccucuaaaag

SEQ ID NO: 973738 - RNA, 20 nt, Human
ccccaacaacacccuccccc

SEQ ID NO: 973739 - RNA, 24 nt, Human
ccccaacaacacccucccccaccc

SEQ ID NO: 973740 - RNA, 21 nt, Human
cccccacccccccaaaacccc

SEQ ID NO: 973741 - RNA, 23 nt, Human
cccccacccccccaaaacccucu

SEQ ID NO: 973742 - RNA, 21 nt, Human
ccccccaaaacccucuaaaag

SEQ ID NO: 973743 - RNA, 21 nt, Human
cccucccccacccccccaaaa

SEQ ID NO: 973744 - RNA, 19 nt, Human
ccgcaccccucagugcagg

SEQ ID NO: 973745 - RNA, 23 nt, Human
ccucccuggacaaggccgagagc

SEQ ID NO: 973746 - RNA, 18 nt, Human
ccucugagagccgguacc

SEQ ID NO: 973747 - RNA, 24 nt, Human
ccugcggcgggggcucgcagaggc

SEQ ID NO: 973748 - RNA, 23 nt, Human
ccuguuggcaccgcaccccucag

SEQ ID NO: 973749 - RNA, 19 nt, Human
ccuuuucuucuuugccucc

SEQ ID NO: 973750 - RNA, 18 nt, Human
cggcggggcccaggcggc

SEQ ID NO: 973751 - RNA, 20 nt, Human
cucccaccagaaaagaacuc

SEQ ID NO: 973752 - RNA, 18 nt, Human
cuccuuagcccaaccucc

SEQ ID NO: 973753 - RNA, 26 nt, Human
cucuccuuagcccaaccucccuggac

SEQ ID NO: 973754 - RNA, 19 nt, Human
cugggcccuuugggggucc

SEQ ID NO: 973755 - RNA, 24 nt, Human
cuguccuguccccuccccugcuua

SEQ ID NO: 973756 - RNA, 19 nt, Human
cuuagcccaaccucccugg

SEQ ID NO: 973757 - RNA, 21 nt, Human
gaaauaaacaaacagcaaugc

SEQ ID NO: 973758 - RNA, 19 nt, Human
gagaaauaaacaaacagca

SEQ ID NO: 973759 - RNA, 18 nt, Human
gagcaggaaugcacggac

SEQ ID NO: 973760 - RNA, 22 nt, Human
gcagcgagcgggguucgcgggc

SEQ ID NO: 973761 - RNA, 18 nt, Human
gcaggcuuucuguccugu

SEQ ID NO: 973762 - RNA, 19 nt, Human
gcccuuggguuuucugcuc

SEQ ID NO: 973763 - RNA, 18 nt, Human
gcggcggcggggagcggg

SEQ ID NO: 973764 - RNA, 20 nt, Human
ggagcgcgagcgugugcucu

SEQ ID NO: 973765 - RNA, 23 nt, Human
ggggagcgggccgugguccugcg

SEQ ID NO: 973766 - RNA, 21 nt, Human
guccuuuucuucuuugccucc

SEQ ID NO: 973767 - RNA, 18 nt, Human
gugauccauccugccucc

SEQ ID NO: 973768 - RNA, 22 nt, Human
uaaaaugaaaccaaaaacaaaa

SEQ ID NO: 973769 - RNA, 23 nt, Human
uaaaaugaaaccaaaaacaaaac

SEQ ID NO: 973770 - RNA, 25 nt, Human
uaaacaaacagcaaugccaaugccu

SEQ ID NO: 973771 - RNA, 24 nt, Human
uacaauaagagagagaauaaaguc

SEQ ID NO: 973772 - RNA, 22 nt, Human
uacacaagggucagucuccaaa

SEQ ID NO: 973773 - RNA, 21 nt, Human
uagcagauccaaaaacuuaca

SEQ ID NO: 973774 - RNA, 19 nt, Human
uccagagugcccaccaccc

SEQ ID NO: 973775 - RNA, 25 nt, Human
uccagagugcccaccacccacagca

SEQ ID NO: 973776 - RNA, 21 nt, Human
ucccccacccccccaaaaccc

SEQ ID NO: 973777 - RNA, 22 nt, Human
ucccuuccuuccuucgcucggg

SEQ ID NO: 973778 - RNA, 23 nt, Human
uccguguguccuuuucuucuuug

SEQ ID NO: 973779 - RNA, 22 nt, Human
uccugccucccuggacucucca

SEQ ID NO: 973780 - RNA, 22 nt, Human
ucgcucggggcccucgcggcgg

SEQ ID NO: 973781 - RNA, 20 nt, Human
ucucaggccccaacaacacc

SEQ ID NO: 973782 - RNA, 21 nt, Human
ucucaggccccaacaacaccc

SEQ ID NO: 973783 - RNA, 22 nt, Human
ucucaggccccaacaacacccu

SEQ ID NO: 973784 - RNA, 24 nt, Human
ucucaggccccaacaacacccucc

SEQ ID NO: 973785 - RNA, 18 nt, Human
ucuucccuuuccuuuucc

SEQ ID NO: 973786 - RNA, 21 nt, Human
ucuucuuugccuccccucuca

SEQ ID NO: 973787 - RNA, 22 nt, Human
ugaaaccaaaaacaaaacacgc

SEQ ID NO: 973788 - RNA, 19 nt, Human
ugacguaaugcaaauccuu

SEQ ID NO: 973789 - RNA, 19 nt, Human
ugcacggacccucugagag

SEQ ID NO: 973790 - RNA, 18 nt, Human
ugcggucaggggacacag

SEQ ID NO: 973791 - RNA, 23 nt, Human
uggacaaggccgagagccaagug

SEQ ID NO: 973792 - RNA, 19 nt, Human
uguacaaaagaacuauaca

SEQ ID NO: 973793 - RNA, 19 nt, Human
uguccuguccccuccccug

SEQ ID NO: 973794 - RNA, 20 nt, Human
uuaaaagugcaaacauggug

SEQ ID NO: 973795 - RNA, 23 nt, Human
uuaaaggcccuuccguguguccu

SEQ ID NO: 973796 - RNA, 24 nt, Human
uuaaaggcccuuccguguguccuu

SEQ ID NO: 973797 - RNA, 19 nt, Human
uuagaaagcuggacuaugu

SEQ ID NO: 973798 - RNA, 23 nt, Human
uuaggugucuggugauccauccu

SEQ ID NO: 973799 - RNA, 18 nt, Human
uuggggguccggagagca

SEQ ID NO: 973800 - RNA, 20 nt, Human
uuuacauauauauuuauaua

SEQ ID NO: 973801 - RNA, 23 nt, Human
uuugcuccgagggucacuaagau

SEQ ID NO: 973802 - RNA, 22 nt, Human
aaaacaagacaaacuaacagaa

SEQ ID NO: 973803 - RNA, 22 nt, Human
aaaaucccaagaaacaaaccag

SEQ ID NO: 973804 - RNA, 23 nt, Human
aaaauggaaaagcaaagauccuu

SEQ ID NO: 973805 - RNA, 21 nt, Human
aaacaagacaaacuaacagaa

SEQ ID NO: 973806 - RNA, 19 nt, Human
aaacuaacagaaaauccca

SEQ ID NO: 973807 - RNA, 18 nt, Human
aaagcaaaacaagacaaa

SEQ ID NO: 973808 - RNA, 19 nt, Human
aacaccagccccgggggca

SEQ ID NO: 973809 - RNA, 18 nt, Human
aagaucuuuuuccaacca

SEQ ID NO: 973810 - RNA, 26 nt, Human
aagcacaaccacgggacgcaccgcgc

SEQ ID NO: 973811 - RNA, 19 nt, Human
aagcaucacaacaucacaa

SEQ ID NO: 973812 - RNA, 19 nt, Human
aaggcgaagaaauuaagcc

SEQ ID NO: 973813 - RNA, 19 nt, Human
aaggcgaagaaauuaagcc

SEQ ID NO: 973814 - RNA, 23 nt, Human
aauugcucuuuggugagggaaau

SEQ ID NO: 973815 - RNA, 19 nt, Human
acaagacaaacuaacagaa

SEQ ID NO: 973816 - RNA, 22 nt, Human
acaagccuguuagccagcucgg

SEQ ID NO: 973817 - RNA, 31 nt, Human
acacgcacgcacucauacccacgcgcgcggg

SEQ ID NO: 973818 - RNA, 20 nt, Human
acagauuuccaaggucaaaa

SEQ ID NO: 973819 - RNA, 26 nt, Human
acccagagguccuccgcguucuuugc

SEQ ID NO: 973820 - RNA, 22 nt, Human
accccggagcuucccggauccu

SEQ ID NO: 973821 - RNA, 18 nt, Human
accuuccgguagcccugg

SEQ ID NO: 973822 - RNA, 23 nt, Human
acugcagccgggagagcccagug

SEQ ID NO: 973823 - RNA, 24 nt, Human
agaaaggaaccguggggacccuca

SEQ ID NO: 973824 - RNA, 23 nt, Human
agacaagccuguuagccagcucg

SEQ ID NO: 973825 - RNA, 21 nt, Human
agacacugggugcccugagcu

SEQ ID NO: 973826 - RNA, 20 nt, Human
agcgggggccaccagggcug

SEQ ID NO: 973827 - RNA, 18 nt, Human
agcucuggggcccaggcc

SEQ ID NO: 973828 - RNA, 19 nt, Human
aggcagccucccaccaucc

SEQ ID NO: 973829 - RNA, 25 nt, Human
agguaggaggaucaggagaauaaug

SEQ ID NO: 973830 - RNA, 24 nt, Human
auaaaagauuauccaaaaaguuua

SEQ ID NO: 973831 - RNA, 21 nt, Human
auacagauuuccaaggucaaa

SEQ ID NO: 973832 - RNA, 18 nt, Human
aucacaaaaucauucuac

SEQ ID NO: 973833 - RNA, 22 nt, Human
aucacaaaaucauucuacaagg

SEQ ID NO: 973834 - RNA, 20 nt, Human
auccgaacgacucucuggga

SEQ ID NO: 973835 - RNA, 18 nt, Human
caaaacaagacaaacuaa

SEQ ID NO: 973836 - RNA, 19 nt, Human
caaaacucaaaacagaagc

SEQ ID NO: 973837 - RNA, 20 nt, Human
caaaacucaaaacagaagcu

SEQ ID NO: 973838 - RNA, 21 nt, Human
caaaacucaaaacagaagcuu

SEQ ID NO: 973839 - RNA, 27 nt, Human
caaacuaacagaaaaucccaagaaaca

SEQ ID NO: 973840 - RNA, 24 nt, Human
caagaaacaaaccagcccaugcau

SEQ ID NO: 973841 - RNA, 21 nt, Human
caagcaucacaacaucacaaa

SEQ ID NO: 973842 - RNA, 28 nt, Human
caagccccagggcaaaacucaaaacaga

SEQ ID NO: 973843 - RNA, 23 nt, Human
cacacacacacgugcacacuuac

SEQ ID NO: 973844 - RNA, 31 nt, Human
cacacacgugcacacuuacacacacgcacag

SEQ ID NO: 973845 - RNA, 24 nt, Human
cacacuuacacacacgcacaccca

SEQ ID NO: 973846 - RNA, 18 nt, Human
caccagggcugcgcagug

SEQ ID NO: 973847 - RNA, 23 nt, Human
caccagggcugcgcaguggccug

SEQ ID NO: 973848 - RNA, 22 nt, Human
cacccaggcacacgcacgcacu

SEQ ID NO: 973849 - RNA, 18 nt, Human
caccgcucccggcggccc

SEQ ID NO: 973850 - RNA, 20 nt, Human
cacgcacucauacccacgcg

SEQ ID NO: 973851 - RNA, 18 nt, Human
cagcuccccugcaggcac

SEQ ID NO: 973852 - RNA, 20 nt, Human
cagcuccccugcaggcaccc

SEQ ID NO: 973853 - RNA, 22 nt, Human
caggcacacgcacgcacucaua

SEQ ID NO: 973854 - RNA, 20 nt, Human
caggccugaggguggcagcu

SEQ ID NO: 973855 - RNA, 25 nt, Human
cagggcaaaacucaaaacagaagcu

SEQ ID NO: 973856 - RNA, 19 nt, Human
caguggccuguccgggcug

SEQ ID NO: 973857 - RNA, 23 nt, Human
ccaaaagucugagccgagauaga

SEQ ID NO: 973858 - RNA, 22 nt, Human
ccaagcacaaccacgggacgca

SEQ ID NO: 973859 - RNA, 21 nt, Human
ccacauacagauuuccaaggu

SEQ ID NO: 973860 - RNA, 23 nt, Human
ccagcccaugcauguuaacugcc

SEQ ID NO: 973861 - RNA, 23 nt, Human
ccauccgaacgacucucugggac

SEQ ID NO: 973862 - RNA, 21 nt, Human
ccaugcauguuaacugccugu

SEQ ID NO: 973863 - RNA, 18 nt, Human
ccccaccucccagcgccc

SEQ ID NO: 973864 - RNA, 21 nt, Human
cccccagccccaccucccagc

SEQ ID NO: 973865 - RNA, 18 nt, Human
cccccggcugccaacacc

SEQ ID NO: 973866 - RNA, 23 nt, Human
cccccggcugccaacaccagccc

SEQ ID NO: 973867 - RNA, 24 nt, Human
cccccggcugccaacaccagcccc

SEQ ID NO: 973868 - RNA, 21 nt, Human
ccccggcugccaacaccagcc

SEQ ID NO: 973869 - RNA, 19 nt, Human
ccccucuccucccccagcc

SEQ ID NO: 973870 - RNA, 21 nt, Human
cccgcccgccucucucccucc

SEQ ID NO: 973871 - RNA, 18 nt, Human
cccgcgcgcacucucaca

SEQ ID NO: 973872 - RNA, 22 nt, Human
cccucccgcccgccucucuccc

SEQ ID NO: 973873 - RNA, 20 nt, Human
ccgcgcccgcuccgcuccgg

SEQ ID NO: 973874 - RNA, 23 nt, Human
ccgcgcccuccucacgccccagg

SEQ ID NO: 973875 - RNA, 21 nt, Human
ccgcugccgcgcccgcuccgc

SEQ ID NO: 973876 - RNA, 20 nt, Human
ccucaggcaccuccccccgg

SEQ ID NO: 973877 - RNA, 18 nt, Human
ccucccccucuccucccc

SEQ ID NO: 973878 - RNA, 18 nt, Human
ccuguagggucggccgua

SEQ ID NO: 973879 - RNA, 23 nt, Human
ccuucaguaaggagacugcucau

SEQ ID NO: 973880 - RNA, 30 nt, Human
cgcgcgcacucucacacacacacgugcaca

SEQ ID NO: 973881 - RNA, 21 nt, Human
cggugcccgcugcggcccaga

SEQ ID NO: 973882 - RNA, 19 nt, Human
cucccccagccccaccucc

SEQ ID NO: 973883 - RNA, 20 nt, Human
cucucagacuguccuccaaa

SEQ ID NO: 973884 - RNA, 18 nt, Human
cugcagccgggagagccc

SEQ ID NO: 973885 - RNA, 23 nt, Human
cugguucuguggcuccaaaggcu

SEQ ID NO: 973886 - RNA, 18 nt, Human
cugugccuccuuccccgc

SEQ ID NO: 973887 - RNA, 20 nt, Human
gaaggcgaagaaauuaagcc

SEQ ID NO: 973888 - RNA, 21 nt, Human
gaauuuacauuuaaaguacaa

SEQ ID NO: 973889 - RNA, 19 nt, Human
gagagcccagugggcgagc

SEQ ID NO: 973890 - RNA, 19 nt, Human
gagcgcggcugggcgggcg

SEQ ID NO: 973891 - RNA, 19 nt, Human
gagcucuggggcccaggcc

SEQ ID NO: 973892 - RNA, 20 nt, Human
gagguggagcgggggccacc

SEQ ID NO: 973893 - RNA, 18 nt, Human
gauccuccccucccgccc

SEQ ID NO: 973894 - RNA, 24 nt, Human
gcaaaacaagacaaacuaacagaa

SEQ ID NO: 973895 - RNA, 20 nt, Human
gcaaaacucaaaacagaagc

SEQ ID NO: 973896 - RNA, 20 nt, Human
gcaaauacuauguguuucug

SEQ ID NO: 973897 - RNA, 20 nt, Human
gcaagaagccuuacgcgaug

SEQ ID NO: 973898 - RNA, 19 nt, Human
gcacacccaggcacacgca

SEQ ID NO: 973899 - RNA, 23 nt, Human
gccaacaccagccccgggggcac

SEQ ID NO: 973900 - RNA, 21 nt, Human
gccagcucggucacaccgcga

SEQ ID NO: 973901 - RNA, 19 nt, Human
gcccaggccugaggguggc

SEQ ID NO: 973902 - RNA, 19 nt, Human
gcccugagcucuggggccc

SEQ ID NO: 973903 - RNA, 24 nt, Human
gccggagugcauagagcucuacug

SEQ ID NO: 973904 - RNA, 20 nt, Human
gccugaggguggcagcuggu

SEQ ID NO: 973905 - RNA, 24 nt, Human
gcgcggcugggcgggcgcguggag

SEQ ID NO: 973906 - RNA, 25 nt, Human
ggagcgggggccaccagggcugcga

SEQ ID NO: 973907 - RNA, 21 nt, Human
ggagcuuccaacaugauucca

SEQ ID NO: 973908 - RNA, 18 nt, Human
ggauccuccccucccgcc

SEQ ID NO: 973909 - RNA, 20 nt, Human
ggggcccaggccugagggug

SEQ ID NO: 973910 - RNA, 18 nt, Human
guggaggggcggcuccgc

SEQ ID NO: 973911 - RNA, 19 nt, Human
guggaggggcggcuccgcg

SEQ ID NO: 973912 - RNA, 20 nt, Human
gugugggcauuccacuccua

SEQ ID NO: 973913 - RNA, 22 nt, Human
uaaaauggaaaagcaaagaucc

SEQ ID NO: 973914 - RNA, 18 nt, Human
uaaauaagcaagaagccu

SEQ ID NO: 973915 - RNA, 20 nt, Human
uaacuggauagcuuuagugg

SEQ ID NO: 973916 - RNA, 28 nt, Human
uaagcaagaagccuuacgcuguaaugac

SEQ ID NO: 973917 - RNA, 32 nt, Human
uacacacacgcacacccaggcacacgcacggu

SEQ ID NO: 973918 - RNA, 27 nt, Human
uacacacacgcacacccaggcacacgg

SEQ ID NO: 973919 - RNA, 18 nt, Human
uaccccggagcuucccgg

SEQ ID NO: 973920 - RNA, 18 nt, Human
uaggaucauaacuguuuc

SEQ ID NO: 973921 - RNA, 23 nt, Human
uaugagcaagaucucuggaaagc

SEQ ID NO: 973922 - RNA, 18 nt, Human
uauguguuucuguuuuug

SEQ ID NO: 973923 - RNA, 22 nt, Human
uccacaagcaucacaacaucac

SEQ ID NO: 973924 - RNA, 21 nt, Human
uccaccacauacagauuucca

SEQ ID NO: 973925 - RNA, 23 nt, Human
uccauggacauguggagcuucca

SEQ ID NO: 973926 - RNA, 22 nt, Human
uccccaccgcucccggcggccc

SEQ ID NO: 973927 - RNA, 18 nt, Human
ucccccagccccaccucc

SEQ ID NO: 973928 - RNA, 19 nt, Human
ucccccagccccaccuccc

SEQ ID NO: 973929 - RNA, 23 nt, Human
ucccccagccccaccucccagcg

SEQ ID NO: 973930 - RNA, 23 nt, Human
ucccccucuccucccccagcccc

SEQ ID NO: 973931 - RNA, 22 nt, Human
uccccugcaggcacccagaggu

SEQ ID NO: 973932 - RNA, 22 nt, Human
ucccggauccuccccucccgcc

SEQ ID NO: 973933 - RNA, 18 nt, Human
uccgcgaugcucucccca

SEQ ID NO: 973934 - RNA, 18 nt, Human
uccggugcccgcugcggc

SEQ ID NO: 973935 - RNA, 18 nt, Human
uccuaggcagccucccac

SEQ ID NO: 973936 - RNA, 21 nt, Human
ucgcuccugucaaauaccccg

SEQ ID NO: 973937 - RNA, 24 nt, Human
ucggccguacaucacaaacuucca

SEQ ID NO: 973938 - RNA, 24 nt, Human
ucuacaaagugaauuuacauuuaa

SEQ ID NO: 973939 - RNA, 24 nt, Human
ucucuggaaagcaaaacaagacaa

SEQ ID NO: 973940 - RNA, 21 nt, Human
ucugaagccagcucuccauuu

SEQ ID NO: 973941 - RNA, 21 nt, Human
ugaagaucuuuuuccaaccaa

SEQ ID NO: 973942 - RNA, 20 nt, Human
ugagggaaauuucccaugug

SEQ ID NO: 973943 - RNA, 22 nt, Human
ugauuaaauucaaaggucagaa

SEQ ID NO: 973944 - RNA, 21 nt, Human
ugcaaauacuauguguuucug

SEQ ID NO: 973945 - RNA, 27 nt, Human
ugcacacuuacacacacgcacacccag

SEQ ID NO: 973946 - RNA, 19 nt, Human
ugcacuuaacuggauagcu

SEQ ID NO: 973947 - RNA, 21 nt, Human
ugcagccggagugcauagagc

SEQ ID NO: 973948 - RNA, 23 nt, Human
ugcauucagaaaagcagaaagga

SEQ ID NO: 973949 - RNA, 22 nt, Human
ugccaacaccagccccgggggc

SEQ ID NO: 973950 - RNA, 23 nt, Human
ugcccugagcucuggggcccagg

SEQ ID NO: 973951 - RNA, 20 nt, Human
ugccuccuaggcagccuccc

SEQ ID NO: 973952 - RNA, 20 nt, Human
ugccuucgggguaugagcca

SEQ ID NO: 973953 - RNA, 21 nt, Human
ugcggcccagaggccucccug

SEQ ID NO: 973954 - RNA, 18 nt, Human
uggaaagcaaaacaagac

SEQ ID NO: 973955 - RNA, 21 nt, Human
uggaggggcggcuccgcgaug

SEQ ID NO: 973956 - RNA, 20 nt, Human
uggcauguacuugagcuggu

SEQ ID NO: 973957 - RNA, 19 nt, Human
ugggccccucccaggcacu

SEQ ID NO: 973958 - RNA, 18 nt, Human
uggggcccaggccugagg

SEQ ID NO: 973959 - RNA, 20 nt, Human
ugugauuaauuuucugaagc

SEQ ID NO: 973960 - RNA, 21 nt, Human
uuauccaaaaaguuuaggauc

SEQ ID NO: 973961 - RNA, 22 nt, Human
uucaaauacuucuccaccacau

SEQ ID NO: 973962 - RNA, 19 nt, Human
uuccauggacauguggagc

SEQ ID NO: 973963 - RNA, 21 nt, Human
uuucugaagccagcucuccau

SEQ ID NO: 973964 - RNA, 22 nt, Human
ccaggcucgguaagggccgcgc

SEQ ID NO: 973965 - RNA, 22 nt, Human
cccccgggugggcggcucccgg

SEQ ID NO: 973966 - RNA, 25 nt, Human
cccccgggugggcggcucccgguuc

SEQ ID NO: 973967 - RNA, 18 nt, Human
cccuggggguccggagag

SEQ ID NO: 973968 - RNA, 18 nt, Human
cgacucccgcguuccccc

SEQ ID NO: 973969 - RNA, 19 nt, Human
cgcccaggcucgguaaggg

SEQ ID NO: 973970 - RNA, 22 nt, Human
cgcccccgggugggcggcuccc

SEQ ID NO: 973971 - RNA, 21 nt, Human
cggcucccgguuccuuuuccu

SEQ ID NO: 973972 - RNA, 23 nt, Human
cggcucgaacucuccagcgacgg

SEQ ID NO: 973973 - RNA, 18 nt, Human
cuaggacccugggggucc

SEQ ID NO: 973974 - RNA, 24 nt, Human
cuccagcgacggccgcgggguacc

SEQ ID NO: 973975 - RNA, 24 nt, Human
gcaaccggccggcuguucccaauc

SEQ ID NO: 973976 - RNA, 22 nt, Human
gcgcacaggugggcaccaagcc

SEQ ID NO: 973977 - RNA, 22 nt, Human
gcuaggacccuggggguccgga

SEQ ID NO: 973978 - RNA, 22 nt, Human
ggcggcgcgcacaggugggcac

SEQ ID NO: 973979 - RNA, 22 nt, Human
ggggacgggggcggccggcggc

SEQ ID NO: 973980 - RNA, 24 nt, Human
gggugggcggcucccgguuccuuu

SEQ ID NO: 973981 - RNA, 19 nt, Human
ucccccggcaaccggccgg

SEQ ID NO: 973982 - RNA, 19 nt, Human
ucuccagcgacggccgcgg

SEQ ID NO: 973983 - RNA, 22 nt, Human
ugggcggcucccgguuccuuuu

SEQ ID NO: 973984 - RNA, 22 nt, Human
uuccuccaagcucguccccggc

SEQ ID NO: 973985 - RNA, 20 nt, Human
uuuuuuuuuuuuaaagggcc

SEQ ID NO: 973986 - RNA, 21 nt, Human
uuuuuuuuuuuuuaaagggcc

SEQ ID NO: 973987 - RNA, 24 nt, Human
uuuuuuuuuuuuuuuuuuaaaggg

SEQ ID NO: 973988 - RNA, 19 nt, Human
aaaaaaaaaaaaaaugcaa

SEQ ID NO: 973989 - RNA, 21 nt, Human
aaaaaaaaaaaaaaugcaaua

SEQ ID NO: 973990 - RNA, 22 nt, Human
aaacaacaagacgcuugacuug

SEQ ID NO: 973991 - RNA, 21 nt, Human
aacagcuacguacaaaaaagu

SEQ ID NO: 973992 - RNA, 18 nt, Human
aagcagcaccaggagcgg

SEQ ID NO: 973993 - RNA, 25 nt, Human
aagcagcaccaggagcggcagaaga

SEQ ID NO: 973994 - RNA, 21 nt, Human
acaugugcuacccuauacccu

SEQ ID NO: 973995 - RNA, 22 nt, Human
agcaacaaaggcaaaaucagaa

SEQ ID NO: 973996 - RNA, 25 nt, Human
agcaccaggagcggcagaagaagga

SEQ ID NO: 973997 - RNA, 22 nt, Human
agcagcaccaggagcggcagaa

SEQ ID NO: 973998 - RNA, 22 nt, Human
aguuaaaaaaaaaaaaaaugca

SEQ ID NO: 973999 - RNA, 24 nt, Human
caaacgagcacacaagcagcacca

SEQ ID NO: 974000 - RNA, 18 nt, Human
caauaaaggaauggggaa

SEQ ID NO: 974001 - RNA, 20 nt, Human
cacaagcagcaccaggagcg

SEQ ID NO: 974002 - RNA, 24 nt, Human
cacaagcagcaccaggagcggcag

SEQ ID NO: 974003 - RNA, 25 nt, Human
cacagaaucaguauuuuuccccauc

SEQ ID NO: 974004 - RNA, 23 nt, Human
cagcaacaaaggcaaaaucagaa

SEQ ID NO: 974005 - RNA, 18 nt, Human
caggagcggcagaagaag

SEQ ID NO: 974006 - RNA, 23 nt, Human
caggagcggcagaagaaggaggc

SEQ ID NO: 974007 - RNA, 20 nt, Human
cagucugucagaaacaccaa

SEQ ID NO: 974008 - RNA, 18 nt, Human
caugccacuaauggagaa

SEQ ID NO: 974009 - RNA, 25 nt, Human
ccagguccgcaccaaacgagcacac

SEQ ID NO: 974010 - RNA, 19 nt, Human
cucagaauaaagaaaacag

SEQ ID NO: 974011 - RNA, 19 nt, Human
cuggaguaaagaagcaggu

SEQ ID NO: 974012 - RNA, 21 nt, Human
cuugaaauguuacuucuaagc

SEQ ID NO: 974013 - RNA, 20 nt, Human
gagaaaggggguauuuucac

SEQ ID NO: 974014 - RNA, 19 nt, Human
gagcaugccacuaauggag

SEQ ID NO: 974015 - RNA, 21 nt, Human
gaggcggcagcgguggacgag

SEQ ID NO: 974016 - RNA, 18 nt, Human
gaguaaagaagcagguuc

SEQ ID NO: 974017 - RNA, 21 nt, Human
gcagaagaaggaggcggcagc

SEQ ID NO: 974018 - RNA, 18 nt, Human
gcggcagcgguggacgag

SEQ ID NO: 974019 - RNA, 20 nt, Human
ggaaaacuaucuaggauucu

SEQ ID NO: 974020 - RNA, 21 nt, Human
ggaccuagagaaacuuuugga

SEQ ID NO: 974021 - RNA, 25 nt, Human
ggcuguuuaguuaaaaaaaaaaaaa

SEQ ID NO: 974022 - RNA, 23 nt, Human
gguauuuucacagaaucaguauu

SEQ ID NO: 974023 - RNA, 19 nt, Human
uaaaauucuccaauugaac

SEQ ID NO: 974024 - RNA, 19 nt, Human
uaagagcugaaugagcaug

SEQ ID NO: 974025 - RNA, 20 nt, Human
uaauauuucucagaauaaag

SEQ ID NO: 974026 - RNA, 21 nt, Human
uagagaaacuuuuggaacaag

SEQ ID NO: 974027 - RNA, 23 nt, Human
uaguagucaggaugugguggaac

SEQ ID NO: 974028 - RNA, 24 nt, Human
uauacagaaaauaccuggaaaucc

SEQ ID NO: 974029 - RNA, 25 nt, Human
ucaauuuucuauuuaauauuucuca

SEQ ID NO: 974030 - RNA, 20 nt, Human
ucagcaacaaaggcaaaauc

SEQ ID NO: 974031 - RNA, 21 nt, Human
ucagcugccgcuucacaaaag

SEQ ID NO: 974032 - RNA, 24 nt, Human
uccucagcugccgcuucacaaaag

SEQ ID NO: 974033 - RNA, 20 nt, Human
ucuggaguaaagaagcaggu

SEQ ID NO: 974034 - RNA, 20 nt, Human
ugcuacccuauacccuaugc

SEQ ID NO: 974035 - RNA, 19 nt, Human
uggggaagggggaaaugaa

SEQ ID NO: 974036 - RNA, 26 nt, Human
uucacagaaucaguauuuuuccccau

SEQ ID NO: 974037 - RNA, 23 nt, Human
uuucacagaaucaguauuuuucc

SEQ ID NO: 974038 - RNA, 22 nt, Human
uuuccuugccacaugugcuacc

SEQ ID NO: 974039 - RNA, 18 nt, Human
uuuuuuuuuuuuuuuuug

SEQ ID NO: 974040 - RNA, 26 nt, Human
aaagcuggcaaaaaaaaaaaaaagca

SEQ ID NO: 974041 - RNA, 19 nt, Human
agcuggcaaaaaaaaaaaa

SEQ ID NO: 974042 - RNA, 22 nt, Human
cucuccgggagcaggccccagc

SEQ ID NO: 974043 - RNA, 19 nt, Human
cuggcaaaaaaaaaaaaaa

SEQ ID NO: 974044 - RNA, 19 nt, Human
cuggcaaaaaaaaaaaaaa

SEQ ID NO: 974045 - RNA, 18 nt, Human
gcaaaaaaaaaaaaaagc

SEQ ID NO: 974046 - RNA, 24 nt, Human
ucuccgggagcaggccccagcucu

SEQ ID NO: 974047 - RNA, 27 nt, Human
ugaauaugcuucauuuaaguacaugcu

SEQ ID NO: 974048 - RNA, 26 nt, Human
aaacaggaguagugucaaaagggacc

SEQ ID NO: 974049 - RNA, 20 nt, Human
aaaggggcaauguuaaaagg

SEQ ID NO: 974050 - RNA, 22 nt, Human
aaagguaacuguucuauaagga

SEQ ID NO: 974051 - RNA, 20 nt, Human
aaagucucccaaggaaacac

SEQ ID NO: 974052 - RNA, 22 nt, Human
aagaaauccaaaaagaguaaaa

SEQ ID NO: 974053 - RNA, 21 nt, Human
aaggauggguagguauccugg

SEQ ID NO: 974054 - RNA, 23 nt, Human
agaaagcaggaaucaggagggcc

SEQ ID NO: 974055 - RNA, 23 nt, Human
agaauacguuucccagcgaccag

SEQ ID NO: 974056 - RNA, 23 nt, Human
agccaggucuucugacuugcacu

SEQ ID NO: 974057 - RNA, 23 nt, Human
agcgaccagggugcacagaagga

SEQ ID NO: 974058 - RNA, 20 nt, Human
aggaaucaggagggcaaaca

SEQ ID NO: 974059 - RNA, 20 nt, Human
aggagggcaaacaggaguag

SEQ ID NO: 974060 - RNA, 19 nt, Human
agggcaaacaggaguagug

SEQ ID NO: 974061 - RNA, 22 nt, Human
caaucaaaaaguuccaaguuuc

SEQ ID NO: 974062 - RNA, 22 nt, Human
cacagaaggaccuuuugcucca

SEQ ID NO: 974063 - RNA, 21 nt, Human
cacucuuaauuucauguccca

SEQ ID NO: 974064 - RNA, 22 nt, Human
cacuggauuuuuccucugaucc

SEQ ID NO: 974065 - RNA, 19 nt, Human
cagggugcacagaaggacc

SEQ ID NO: 974066 - RNA, 27 nt, Human
ccaaaaagaguaaaauguaggccaggc

SEQ ID NO: 974067 - RNA, 21 nt, Human
cugaggcauagagagguuuau

SEQ ID NO: 974068 - RNA, 22 nt, Human
cugcagauucccuacaaagugg

SEQ ID NO: 974069 - RNA, 19 nt, Human
cugcagccucccauaagaa

SEQ ID NO: 974070 - RNA, 19 nt, Human
cuuuugcuccaguccagga

SEQ ID NO: 974071 - RNA, 24 nt, Human
gaaugugucccaugcaaggcccca

SEQ ID NO: 974072 - RNA, 24 nt, Human
gaguagugucaaaacugccauggc

SEQ ID NO: 974073 - RNA, 25 nt, Human
gucacacuggauuuuuccucugauc

SEQ ID NO: 974074 - RNA, 19 nt, Human
gucccaugcuuugucuugg

SEQ ID NO: 974075 - RNA, 22 nt, Human
uaaucugcugguccagcucccc

SEQ ID NO: 974076 - RNA, 21 nt, Human
ucacacuggauuuuuccucug

SEQ ID NO: 974077 - RNA, 22 nt, Human
ucccagcgaccagggugcacag

SEQ ID NO: 974078 - RNA, 22 nt, Human
ucccuacaaagugggguccccu

SEQ ID NO: 974079 - RNA, 20 nt, Human
ucuguaagcucauaaucugc

SEQ ID NO: 974080 - RNA, 24 nt, Human
ugaaaagccaggucuucugacuug

SEQ ID NO: 974081 - RNA, 24 nt, Human
ugaggaagaaauccaaaaagagua

SEQ ID NO: 974082 - RNA, 22 nt, Human
uggcaagauauuuccucugaaa

SEQ ID NO: 974083 - RNA, 23 nt, Human
ugucacacuggauuuuuccucug

SEQ ID NO: 974084 - RNA, 18 nt, Human
ugucacaugacaggcacu

SEQ ID NO: 974085 - RNA, 21 nt, Human
ugucacaugacaggcacugca

SEQ ID NO: 974086 - RNA, 24 nt, Human
ugucccaugcaaggccccaagggc

SEQ ID NO: 974087 - RNA, 23 nt, Human
ugucuuggucccugugaggaaag

SEQ ID NO: 974088 - RNA, 24 nt, Human
uuaaaagguaaagaaagcaggaau

SEQ ID NO: 974089 - RNA, 24 nt, Human
uuagaaguuacugucuagggcacu

SEQ ID NO: 974090 - RNA, 18 nt, Human
uugcacucugucacacug

SEQ ID NO: 974091 - RNA, 25 nt, Human
caccacagcggccggggcuggggcc

SEQ ID NO: 974092 - RNA, 23 nt, Human
ccggcggcgggggcggcgggggc

SEQ ID NO: 974093 - RNA, 21 nt, Human
cgacggcgaggcgcggcggag

SEQ ID NO: 974094 - RNA, 20 nt, Human
cgccucggccgccacggccg

SEQ ID NO: 974095 - RNA, 22 nt, Human
cggcgaggcgcggcggagucac

SEQ ID NO: 974096 - RNA, 18 nt, Human
cggggcuggggcccgagc

SEQ ID NO: 974097 - RNA, 19 nt, Human
gccucggccgccacggccg

SEQ ID NO: 974098 - RNA, 18 nt, Human
gcgggggcggcgggcggc

SEQ ID NO: 974099 - RNA, 18 nt, Human
ggccggggcuggggcccg

SEQ ID NO: 974100 - RNA, 19 nt, Human
ggcggcgggggcggcgggc

SEQ ID NO: 974101 - RNA, 18 nt, Human
gggcggcacgggggcgac

SEQ ID NO: 974102 - RNA, 20 nt, Human
gggggcggcgggggcggcgg

SEQ ID NO: 974103 - RNA, 22 nt, Human
gggggcggcgggggcggcgggc

SEQ ID NO: 974104 - RNA, 19 nt, Human
aaacagaaggaggagcccc

SEQ ID NO: 974105 - RNA, 20 nt, Human
aaacagaaggaggagcccca

SEQ ID NO: 974106 - RNA, 19 nt, Human
aaacgcccaagauaugcag

SEQ ID NO: 974107 - RNA, 20 nt, Human
aaaggucacaugggccagug

SEQ ID NO: 974108 - RNA, 23 nt, Human
aaauggcaaaggucacaugggcc

SEQ ID NO: 974109 - RNA, 19 nt, Human
aacaaaagagcaagauggc

SEQ ID NO: 974110 - RNA, 21 nt, Human
aagaaccagaaacaauuacag

SEQ ID NO: 974111 - RNA, 19 nt, Human
aagacaagggccuuguggc

SEQ ID NO: 974112 - RNA, 22 nt, Human
aagcagccuuuuugcugaaagc

SEQ ID NO: 974113 - RNA, 22 nt, Human
aagggccuuguggcuccaacua

SEQ ID NO: 974114 - RNA, 18 nt, Human
aaguuaccuugcaagaag

SEQ ID NO: 974115 - RNA, 18 nt, Human
acguggggaagaggggcu

SEQ ID NO: 974116 - RNA, 18 nt, Human
acuuguggagguuuccuu

SEQ ID NO: 974117 - RNA, 18 nt, Human
agaaauagaggcucaugg

SEQ ID NO: 974118 - RNA, 22 nt, Human
agaaaugcaacucuucuuauuc

SEQ ID NO: 974119 - RNA, 21 nt, Human
agaaggaggagccccacugcc

SEQ ID NO: 974120 - RNA, 18 nt, Human
agaaucccugagguggcu

SEQ ID NO: 974121 - RNA, 22 nt, Human
agaaucccugagguggcuggaa

SEQ ID NO: 974122 - RNA, 22 nt, Human
agcaaaaaugucuuaagaccua

SEQ ID NO: 974123 - RNA, 21 nt, Human
aggaagaccauugugcagcug

SEQ ID NO: 974124 - RNA, 20 nt, Human
aggauggggggcuggaggga

SEQ ID NO: 974125 - RNA, 19 nt, Human
aggcacuguuauuuuaagu

SEQ ID NO: 974126 - RNA, 21 nt, Human
aguaaguggaaccgugcacaa

SEQ ID NO: 974127 - RNA, 22 nt, Human
auggggggcuggagggaagcgg

SEQ ID NO: 974128 - RNA, 27 nt, Human
augugcucagagugugugugugugugu

SEQ ID NO: 974129 - RNA, 22 nt, Human
auugugcagcugcaucugugca

SEQ ID NO: 974130 - RNA, 22 nt, Human
caacaaaagagcaagauggcac

SEQ ID NO: 974131 - RNA, 23 nt, Human
caacaaaagagcaagauggcaca

SEQ ID NO: 974132 - RNA, 22 nt, Human
cacaauagaguggaaauccguc

SEQ ID NO: 974133 - RNA, 19 nt, Human
caccaaacgacuggcucac

SEQ ID NO: 974134 - RNA, 18 nt, Human
cagaaggaggagccccac

SEQ ID NO: 974135 - RNA, 19 nt, Human
cagaaucccugagguggcu

SEQ ID NO: 974136 - RNA, 24 nt, Human
cagacaaaaacucuaauaagcauu

SEQ ID NO: 974137 - RNA, 20 nt, Human
caggagacccccgguaccaa

SEQ ID NO: 974138 - RNA, 18 nt, Human
ccacugccgccgccgucc

SEQ ID NO: 974139 - RNA, 21 nt, Human
ccccacugccgccgccgucca

SEQ ID NO: 974140 - RNA, 21 nt, Human
ccccgcccgccgaccccgcgg

SEQ ID NO: 974141 - RNA, 19 nt, Human
ccuaaacaaagguguggga

SEQ ID NO: 974142 - RNA, 22 nt, Human
ccuaggaaaaugugggacaaac

SEQ ID NO: 974143 - RNA, 24 nt, Human
cgagccaguggaagaccuguugca

SEQ ID NO: 974144 - RNA, 19 nt, Human
cgcagugagcagugcuggu

SEQ ID NO: 974145 - RNA, 23 nt, Human
cgccgaccccgcggucgucgcgc

SEQ ID NO: 974146 - RNA, 22 nt, Human
cggucugggaaacagaaggagg

SEQ ID NO: 974147 - RNA, 22 nt, Human
cguccagggccucgccccgccc

SEQ ID NO: 974148 - RNA, 24 nt, Human
cucucggucugggaaacagaagga

SEQ ID NO: 974149 - RNA, 19 nt, Human
cugccaacaaaagagcaag

SEQ ID NO: 974150 - RNA, 21 nt, Human
cugugcaauacuccauuccca

SEQ ID NO: 974151 - RNA, 28 nt, Human
gaaacaauuacaguaaguggaaccgugc

SEQ ID NO: 974152 - RNA, 23 nt, Human
gccgccgccguccagggccucgg

SEQ ID NO: 974153 - RNA, 25 nt, Human
gccuuguggcuccaacuauuuuguu

SEQ ID NO: 974154 - RNA, 22 nt, Human
gcggggacaucugccaacaaaa

SEQ ID NO: 974155 - RNA, 19 nt, Human
ggaaacagaaggaggagcc

SEQ ID NO: 974156 - RNA, 23 nt, Human
ggaaauggcaaaggucacauggg

SEQ ID NO: 974157 - RNA, 24 nt, Human
ggaaguacugggaaauggcaaagg

SEQ ID NO: 974158 - RNA, 19 nt, Human
gggaaauggcaaaggucac

SEQ ID NO: 974159 - RNA, 21 nt, Human
gugugugugugugugugugag

SEQ ID NO: 974160 - RNA, 20 nt, Human
gugugugugugugugugugu

SEQ ID NO: 974161 - RNA, 21 nt, Human
gugugugugugugugugugug

SEQ ID NO: 974162 - RNA, 23 nt, Human
uaaacaaaugucuaguucgauaa

SEQ ID NO: 974163 - RNA, 20 nt, Human
uaaugccgagcucaucuaau

SEQ ID NO: 974164 - RNA, 22 nt, Human
uacauggaagguguuagaggaa

SEQ ID NO: 974165 - RNA, 19 nt, Human
uagagugccaguccuaaaa

SEQ ID NO: 974166 - RNA, 21 nt, Human
uagaguggaaauccgucuguc

SEQ ID NO: 974167 - RNA, 18 nt, Human
uauuuuguuggauguacc

SEQ ID NO: 974168 - RNA, 23 nt, Human
uauuuuguuuuuuuaaaaagaca

SEQ ID NO: 974169 - RNA, 23 nt, Human
ucacccaauuccccacacauuuc

SEQ ID NO: 974170 - RNA, 22 nt, Human
ucagacaaaaacucuaauaagc

SEQ ID NO: 974171 - RNA, 23 nt, Human
ucagacaaaaacucuaauaagca

SEQ ID NO: 974172 - RNA, 27 nt, Human
ucagcgucauuuauagagugccagucc

SEQ ID NO: 974173 - RNA, 18 nt, Human
ucagucacuuucaccauc

SEQ ID NO: 974174 - RNA, 19 nt, Human
uccuucuauacaaagucag

SEQ ID NO: 974175 - RNA, 22 nt, Human
ugaguguuauguuuaaaauuuc

SEQ ID NO: 974176 - RNA, 24 nt, Human
ugaugcuucugcaugauuucuuuu

SEQ ID NO: 974177 - RNA, 18 nt, Human
ugcuggaagaacuuggug

SEQ ID NO: 974178 - RNA, 18 nt, Human
ugggaaggacccuccucc

SEQ ID NO: 974179 - RNA, 18 nt, Human
ugggaggaugaaagaauc

SEQ ID NO: 974180 - RNA, 20 nt, Human
uggugugaagcccuccuacu

SEQ ID NO: 974181 - RNA, 18 nt, Human
uguaaagggaaguacugg

SEQ ID NO: 974182 - RNA, 33 nt, Human
ugugcucagaguguguguguguguguguguggu

SEQ ID NO: 974183 - RNA, 21 nt, Human
uguggagguuuccuuugcuuu

SEQ ID NO: 974184 - RNA, 19 nt, Human
ugugugugugugugugaau

SEQ ID NO: 974185 - RNA, 18 nt, Human
ugugugugugugugugug

SEQ ID NO: 974186 - RNA, 18 nt, Human
ugugugugugugugugug

SEQ ID NO: 974187 - RNA, 18 nt, Human
ugugugugugugugugug

SEQ ID NO: 974188 - RNA, 18 nt, Human
ugugugugugugugugug

SEQ ID NO: 974189 - RNA, 18 nt, Human
ugugugugugugugugug

SEQ ID NO: 974190 - RNA, 18 nt, Human
ugugugugugugugugug

SEQ ID NO: 974191 - RNA, 18 nt, Human
ugugugugugugugugug

SEQ ID NO: 974192 - RNA, 18 nt, Human
ugugugugugugugugug

SEQ ID NO: 974193 - RNA, 18 nt, Human
ugugugugugugugugug

SEQ ID NO: 974194 - RNA, 18 nt, Human
ugugugugugugugugug

SEQ ID NO: 974195 - RNA, 18 nt, Human
ugugugugugugugugug

SEQ ID NO: 974196 - RNA, 20 nt, Human
ugugugugugugugugugug

SEQ ID NO: 974197 - RNA, 21 nt, Human
ugugugugugugugugugugu

SEQ ID NO: 974198 - RNA, 21 nt, Human
ugugugugugugugugugugu

SEQ ID NO: 974199 - RNA, 21 nt, Human
ugugugugugugugugugugu

SEQ ID NO: 974200 - RNA, 21 nt, Human
ugugugugugugugugugugu

SEQ ID NO: 974201 - RNA, 21 nt, Human
ugugugugugugugugugugu

SEQ ID NO: 974202 - RNA, 21 nt, Human
ugugugugugugugugugugu

SEQ ID NO: 974203 - RNA, 21 nt, Human
ugugugugugugugugugugu

SEQ ID NO: 974204 - RNA, 21 nt, Human
ugugugugugugugugugugu

SEQ ID NO: 974205 - RNA, 21 nt, Human
ugugugugugugugugugugu

SEQ ID NO: 974206 - RNA, 21 nt, Human
ugugugugugugugugugugu

SEQ ID NO: 974207 - RNA, 21 nt, Human
ugugugugugugugugugugu

SEQ ID NO: 974208 - RNA, 21 nt, Human
ugugugugugugugugugugu

SEQ ID NO: 974209 - RNA, 21 nt, Human
ugugugugugugugugugugu

SEQ ID NO: 974210 - RNA, 21 nt, Human
ugugugugugugugugugugu

SEQ ID NO: 974211 - RNA, 21 nt, Human
ugugugugugugugugugugu

SEQ ID NO: 974212 - RNA, 21 nt, Human
ugugugugugugugugugugu

SEQ ID NO: 974213 - RNA, 21 nt, Human
ugugugugugugugugugugu

SEQ ID NO: 974214 - RNA, 21 nt, Human
ugugugugugugugugugugu

SEQ ID NO: 974215 - RNA, 21 nt, Human
ugugugugugugugugugugu

SEQ ID NO: 974216 - RNA, 22 nt, Human
ugugugugugugugugugugug

SEQ ID NO: 974217 - RNA, 22 nt, Human
ugugugugugugugugugugug

SEQ ID NO: 974218 - RNA, 22 nt, Human
ugugugugugugugugugugug

SEQ ID NO: 974219 - RNA, 22 nt, Human
ugugugugugugugugugugug

SEQ ID NO: 974220 - RNA, 22 nt, Human
ugugugugugugugugugugug

SEQ ID NO: 974221 - RNA, 22 nt, Human
ugugugugugugugugugugug

SEQ ID NO: 974222 - RNA, 22 nt, Human
ugugugugugugugugugugug

SEQ ID NO: 974223 - RNA, 22 nt, Human
ugugugugugugugugugugug

SEQ ID NO: 974224 - RNA, 22 nt, Human
ugugugugugugugugugugug

SEQ ID NO: 974225 - RNA, 23 nt, Human
uguguguguguguguguguguug

SEQ ID NO: 974226 - RNA, 21 nt, Human
uuaaaaucagucacuuucacc

SEQ ID NO: 974227 - RNA, 24 nt, Human
uuccaggagucgcagugagcagug

SEQ ID NO: 974228 - RNA, 18 nt, Human
uuuaaucaggcccucaca

SEQ ID NO: 974229 - RNA, 21 nt, Human
uuucccauucuaacacugauc

SEQ ID NO: 974230 - RNA, 18 nt, Human
aaacacacaaagaaacac

SEQ ID NO: 974231 - RNA, 22 nt, Human
aaacacacaaagaaacacuaaa

SEQ ID NO: 974232 - RNA, 22 nt, Human
aaacugaaauacaaagaaagcc

SEQ ID NO: 974233 - RNA, 23 nt, Human
aaacugaaauacaaagaaagcca

SEQ ID NO: 974234 - RNA, 19 nt, Human
aaagauacaauucucugaa

SEQ ID NO: 974235 - RNA, 19 nt, Human
aacaaaaccuacuuugagc

SEQ ID NO: 974236 - RNA, 22 nt, Human
aaccacuuuuaaaugguaccau

SEQ ID NO: 974237 - RNA, 18 nt, Human
acaauuucaagaguaggg

SEQ ID NO: 974238 - RNA, 18 nt, Human
acagaagaaaagauaauu

SEQ ID NO: 974239 - RNA, 27 nt, Human
acagacaguaugacaacaaauuaaaac

SEQ ID NO: 974240 - RNA, 25 nt, Human
acaguaaaagauacaauucucugaa

SEQ ID NO: 974241 - RNA, 23 nt, Human
acugaaauacaaagaaagccagu

SEQ ID NO: 974242 - RNA, 18 nt, Human
acuggguuuuuaaacuga

SEQ ID NO: 974243 - RNA, 21 nt, Human
agaacacuagucuacaaaaca

SEQ ID NO: 974244 - RNA, 21 nt, Human
agauguacuaaaaacccacag

SEQ ID NO: 974245 - RNA, 22 nt, Human
agcccuggccgggccccgcucc

SEQ ID NO: 974246 - RNA, 19 nt, Human
agguagcuucaaagagaag

SEQ ID NO: 974247 - RNA, 18 nt, Human
agguguuuauugcaucuc

SEQ ID NO: 974248 - RNA, 22 nt, Human
agguguuuauugcaucucagag

SEQ ID NO: 974249 - RNA, 19 nt, Human
augacacaaacagacccuu

SEQ ID NO: 974250 - RNA, 21 nt, Human
auggaagaacacuagucuaca

SEQ ID NO: 974251 - RNA, 18 nt, Human
auucagucacaaauauug

SEQ ID NO: 974252 - RNA, 19 nt, Human
auuuaugaguguuuuccuu

SEQ ID NO: 974253 - RNA, 22 nt, Human
caaaaaagcacuaacggcauca

SEQ ID NO: 974254 - RNA, 21 nt, Human
caagguguuuauugcaucuca

SEQ ID NO: 974255 - RNA, 21 nt, Human
cacaaauaauccaaauacacu

SEQ ID NO: 974256 - RNA, 23 nt, Human
cacacaaagaaacacuaaauuaa

SEQ ID NO: 974257 - RNA, 21 nt, Human
cacacugaaaaaguuuuguau

SEQ ID NO: 974258 - RNA, 24 nt, Human
cacuaaauuaacagauguacuaaa

SEQ ID NO: 974259 - RNA, 22 nt, Human
caguaugacaacaaauuaaaac

SEQ ID NO: 974260 - RNA, 21 nt, Human
cauuuaugcaucaaaaucuua

SEQ ID NO: 974261 - RNA, 24 nt, Human
ccaaaaaagcacuaacggcaucag

SEQ ID NO: 974262 - RNA, 25 nt, Human
ccauacaucuauuaaauaauuugaa

SEQ ID NO: 974263 - RNA, 21 nt, Human
ccauucauuguuuacaucgua

SEQ ID NO: 974264 - RNA, 20 nt, Human
ccccagaagccaguacccgc

SEQ ID NO: 974265 - RNA, 21 nt, Human
ccccagaagccaguacccgcc

SEQ ID NO: 974266 - RNA, 22 nt, Human
ccccagaagccaguacccgccc

SEQ ID NO: 974267 - RNA, 21 nt, Human
cccccgggcgcaaagucucca

SEQ ID NO: 974268 - RNA, 21 nt, Human
ccccgcuccucagcuccgcgg

SEQ ID NO: 974269 - RNA, 20 nt, Human
ccccugagcggcgccgcccg

SEQ ID NO: 974270 - RNA, 23 nt, Human
ccccuggccccagaagccaguac

SEQ ID NO: 974271 - RNA, 22 nt, Human
cccuggccgggccccgcuccuc

SEQ ID NO: 974272 - RNA, 22 nt, Human
ccgcgcgcagccccggugcccc

SEQ ID NO: 974273 - RNA, 20 nt, Human
ccgcggucccggcgcccacc

SEQ ID NO: 974274 - RNA, 19 nt, Human
ccggcgcccaccgccccug

SEQ ID NO: 974275 - RNA, 25 nt, Human
ccggugcccccgggcgcaaagucuc

SEQ ID NO: 974276 - RNA, 18 nt, Human
ccucagcuccgcgguccc

SEQ ID NO: 974277 - RNA, 20 nt, Human
ccucagcuccgcggucccgg

SEQ ID NO: 974278 - RNA, 22 nt, Human
ccuggccccuggccccagaagc

SEQ ID NO: 974279 - RNA, 19 nt, Human
ccuucaaaaacacagacgu

SEQ ID NO: 974280 - RNA, 18 nt, Human
cgaccgcgcgcagccccg

SEQ ID NO: 974281 - RNA, 22 nt, Human
cggcgcccaccgccccuggccc

SEQ ID NO: 974282 - RNA, 26 nt, Human
cuccgcggucccggcgcccaccgccc

SEQ ID NO: 974283 - RNA, 21 nt, Human
cugagcggcgccgcccgccgc

SEQ ID NO: 974284 - RNA, 24 nt, Human
cuuaacauauacagugccacaaaa

SEQ ID NO: 974285 - RNA, 18 nt, Human
gagcggagcccgggccgc

SEQ ID NO: 974286 - RNA, 22 nt, Human
ggccccuggccccagaagccag

SEQ ID NO: 974287 - RNA, 19 nt, Human
guaaauucagauacaacca

SEQ ID NO: 974288 - RNA, 22 nt, Human
gugaaguccaaaaaagcacuaa

SEQ ID NO: 974289 - RNA, 21 nt, Human
guugaaggauggaagaacacu

SEQ ID NO: 974290 - RNA, 21 nt, Human
uaacagagauacagaagaaaa

SEQ ID NO: 974291 - RNA, 22 nt, Human
uaacagauguacuaaaaaccca

SEQ ID NO: 974292 - RNA, 24 nt, Human
uaacagauguacuaaaaacccaca

SEQ ID NO: 974293 - RNA, 22 nt, Human
uaagguagcuucaaagagaagu

SEQ ID NO: 974294 - RNA, 19 nt, Human
uacaaaacacacaaagaaa

SEQ ID NO: 974295 - RNA, 22 nt, Human
uacaaaacacacaaagaaacac

SEQ ID NO: 974296 - RNA, 23 nt, Human
uacauugaaaccuucaaaaacac

SEQ ID NO: 974297 - RNA, 19 nt, Human
uauucagucacaaauauug

SEQ ID NO: 974298 - RNA, 22 nt, Human
ucagcuccgcggucccggcgcc

SEQ ID NO: 974299 - RNA, 24 nt, Human
ucaggugaaguccaaaaaagcacu

SEQ ID NO: 974300 - RNA, 23 nt, Human
ucagucacaaauauugcagcuua

SEQ ID NO: 974301 - RNA, 30 nt, Human
ucgcgucuaccgccuccucuucccgccccu

SEQ ID NO: 974302 - RNA, 25 nt, Human
ugaaaaauaggcaaacaccuuucca

SEQ ID NO: 974303 - RNA, 24 nt, Human
ugaauaaauaggucaauuuagaug

SEQ ID NO: 974304 - RNA, 23 nt, Human
ugccacaaaaauaaacauuucuc

SEQ ID NO: 974305 - RNA, 25 nt, Human
ugcgaccgcgcgcagccccggugcc

SEQ ID NO: 974306 - RNA, 19 nt, Human
uggaagaacacuagucuac

SEQ ID NO: 974307 - RNA, 21 nt, Human
uggccccuggccccagaagcc

SEQ ID NO: 974308 - RNA, 28 nt, Human
uggccccuggccccagaagccaguaccc

SEQ ID NO: 974309 - RNA, 22 nt, Human
uguaacagagauacagaagaaa

SEQ ID NO: 974310 - RNA, 25 nt, Human
uuaaagaauacaguauguacaguaa

SEQ ID NO: 974311 - RNA, 20 nt, Human
uuaacagauguacuaaaaac

SEQ ID NO: 974312 - RNA, 18 nt, Human
uuccaaauagcucgccac

SEQ ID NO: 974313 - RNA, 22 nt, Human
uucuguggucgcgucuaccgcc

SEQ ID NO: 974314 - RNA, 19 nt, Human
uuguucaagguguuuauug

SEQ ID NO: 974315 - RNA, 23 nt, Human
uuucacggcuguguuacacauuu

SEQ ID NO: 974316 - RNA, 25 nt, Human
uuugaagucuccaaacucauuuauu

SEQ ID NO: 974317 - RNA, 27 nt, Human
uuuuucguucuugauaagguagcuuca

SEQ ID NO: 974318 - RNA, 21 nt, Human
aaaaacaguugagccaacaac

SEQ ID NO: 974319 - RNA, 19 nt, Human
aaaaugcugggauuacagg

SEQ ID NO: 974320 - RNA, 21 nt, Human
aaaaugcugggauuacaggca

SEQ ID NO: 974321 - RNA, 23 nt, Human
aaaaugcugggauuacaggcaug

SEQ ID NO: 974322 - RNA, 24 nt, Human
aaaaugcugggauuacaggcaugc

SEQ ID NO: 974323 - RNA, 22 nt, Human
aaaauuaaaaacuacaccaggc

SEQ ID NO: 974324 - RNA, 18 nt, Human
aaagaauauuuaauugcg

SEQ ID NO: 974325 - RNA, 19 nt, Human
aaaugcugggauuacaggc

SEQ ID NO: 974326 - RNA, 18 nt, Human
aacagaguggcauauuca

SEQ ID NO: 974327 - RNA, 20 nt, Human
aacauagcgauacuccaucu

SEQ ID NO: 974328 - RNA, 20 nt, Human
aauaucaacuauucuguacc

SEQ ID NO: 974329 - RNA, 19 nt, Human
acaggcgcccgccaccacg

SEQ ID NO: 974330 - RNA, 19 nt, Human
acgggguuucacuguguua

SEQ ID NO: 974331 - RNA, 20 nt, Human
acgggguuucacuguguuag

SEQ ID NO: 974332 - RNA, 21 nt, Human
acgggguuucacuguguuagu

SEQ ID NO: 974333 - RNA, 25 nt, Human
acucuguugcccaggcuggagugca

SEQ ID NO: 974334 - RNA, 18 nt, Human
acuggguucacaccauuc

SEQ ID NO: 974335 - RNA, 24 nt, Human
acuguguuagucacgauggucucg

SEQ ID NO: 974336 - RNA, 20 nt, Human
agaaaguacuuaaauacuua

SEQ ID NO: 974337 - RNA, 24 nt, Human
agccugagcaacauagcgauacuc

SEQ ID NO: 974338 - RNA, 23 nt, Human
aggaguucaagaccagccugagc

SEQ ID NO: 974339 - RNA, 18 nt, Human
aggcaggaggauagcuug

SEQ ID NO: 974340 - RNA, 24 nt, Human
aggcaggaggauagcuugagccca

SEQ ID NO: 974341 - RNA, 27 nt, Human
aggcaggaggauagcuugagcccagga

SEQ ID NO: 974342 - RNA, 24 nt, Human
aggcugaggcaggaggauagcuug

SEQ ID NO: 974343 - RNA, 25 nt, Human
aggcuggagugcaguggcacgaucu

SEQ ID NO: 974344 - RNA, 22 nt, Human
aggcuggguacaguagcucaca

SEQ ID NO: 974345 - RNA, 26 nt, Human
aguaauaauaaacaagcacuaaagaa

SEQ ID NO: 974346 - RNA, 24 nt, Human
aguacuuugggaggcugaggcagg

SEQ ID NO: 974347 - RNA, 24 nt, Human
aguagcucacaccuauaaucccag

SEQ ID NO: 974348 - RNA, 18 nt, Human
aguagcugggauuacagg

SEQ ID NO: 974349 - RNA, 20 nt, Human
agugcaguggcacgaucucg

SEQ ID NO: 974350 - RNA, 23 nt, Human
agugcaguggcacgaucucggcu

SEQ ID NO: 974351 - RNA, 24 nt, Human
agugcaguggcacgaucucggcuc

SEQ ID NO: 974352 - RNA, 20 nt, Human
auuaaaaacuacaccaggcu

SEQ ID NO: 974353 - RNA, 19 nt, Human
auuauccgacuguagauac

SEQ ID NO: 974354 - RNA, 24 nt, Human
caaaaugcugggauuacaggcaug

SEQ ID NO: 974355 - RNA, 23 nt, Human
caacccaaacuuuuuuuuuuuuu

SEQ ID NO: 974356 - RNA, 19 nt, Human
caagaaauaaccuacagau

SEQ ID NO: 974357 - RNA, 22 nt, Human
cacaccauucuccugccucagc

SEQ ID NO: 974358 - RNA, 24 nt, Human
cacaccuauaaucccaguacuuug

SEQ ID NO: 974359 - RNA, 19 nt, Human
caccuauaaucccaguacu

SEQ ID NO: 974360 - RNA, 24 nt, Human
caccuauaaucccaguacuuuggg

SEQ ID NO: 974361 - RNA, 24 nt, Human
caccucggccucccaaaaugcugg

SEQ ID NO: 974362 - RNA, 24 nt, Human
cacucuguugcccaggcuggagug

SEQ ID NO: 974363 - RNA, 24 nt, Human
cacuguguuagucacgauggucuc

SEQ ID NO: 974364 - RNA, 21 nt, Human
caggcgcccgccaccacgccu

SEQ ID NO: 974365 - RNA, 24 nt, Human
caguacuuugggaggcugaggcag

SEQ ID NO: 974366 - RNA, 25 nt, Human
caguacuuugggaggcugaggcagg

SEQ ID NO: 974367 - RNA, 26 nt, Human
caucucuauuagggaaaaaaaaaaaa

SEQ ID NO: 974368 - RNA, 23 nt, Human
ccaaaaugcugggauuacaggca

SEQ ID NO: 974369 - RNA, 24 nt, Human
ccaaaaugcugggauuacaggcau

SEQ ID NO: 974370 - RNA, 22 nt, Human
ccaugcuggaaaacagcaugaa

SEQ ID NO: 974371 - RNA, 24 nt, Human
cccaaaaugcugggauuacaggca

SEQ ID NO: 974372 - RNA, 24 nt, Human
cccaaacuuuaaaucccuuaauaa

SEQ ID NO: 974373 - RNA, 19 nt, Human
cccaggcuggagugcagug

SEQ ID NO: 974374 - RNA, 23 nt, Human
cccgaguagcugggauuacaggc

SEQ ID NO: 974375 - RNA, 24 nt, Human
cccgaguagcugggauuacaggcg

SEQ ID NO: 974376 - RNA, 22 nt, Human
ccgaguagcugggauuacaggc

SEQ ID NO: 974377 - RNA, 22 nt, Human
cgcccaccucggccucccaaaa

SEQ ID NO: 974378 - RNA, 22 nt, Human
cucacaccuauaaucccaguac

SEQ ID NO: 974379 - RNA, 24 nt, Human
cucacaccuauaaucccaguacuu

SEQ ID NO: 974380 - RNA, 24 nt, Human
cucacucuguugcccaggcuggag

SEQ ID NO: 974381 - RNA, 24 nt, Human
cucagcuucccgaguagcugggau

SEQ ID NO: 974382 - RNA, 22 nt, Human
cuccugaccucgugauccgccc

SEQ ID NO: 974383 - RNA, 23 nt, Human
cugccucagcuucccgaguagcu

SEQ ID NO: 974384 - RNA, 20 nt, Human
cuugagcccaggaguucaag

SEQ ID NO: 974385 - RNA, 18 nt, Human
cuuuuuuuuuuuuuuuug

SEQ ID NO: 974386 - RNA, 22 nt, Human
gaccucgugauccgcccaccuc

SEQ ID NO: 974387 - RNA, 22 nt, Human
gaccucgugauccgcccaccuc

SEQ ID NO: 974388 - RNA, 24 nt, Human
gaccucgugauccgcccaccucgg

SEQ ID NO: 974389 - RNA, 25 nt, Human
gaguagcugggauuacaggcgcccg

SEQ ID NO: 974390 - RNA, 18 nt, Human
gauuacaggcgcccgcca

SEQ ID NO: 974391 - RNA, 22 nt, Human
gcccaggaguucaagaccagcc

SEQ ID NO: 974392 - RNA, 19 nt, Human
gcccaggcuggagugcagu

SEQ ID NO: 974393 - RNA, 24 nt, Human
gccucagcuucccgaguagcuggg

SEQ ID NO: 974394 - RNA, 19 nt, Human
gcuggagugcaguggcacg

SEQ ID NO: 974395 - RNA, 22 nt, Human
ggaaaaaaaaaaaacaguugag

SEQ ID NO: 974396 - RNA, 19 nt, Human
ggaaaacagcaugaaguau

SEQ ID NO: 974397 - RNA, 22 nt, Human
gggaaaaaaaaaaaacaguuga

SEQ ID NO: 974398 - RNA, 18 nt, Human
guagcugggauuacaggc

SEQ ID NO: 974399 - RNA, 24 nt, Human
gugauccgcccaccucggccuccc

SEQ ID NO: 974400 - RNA, 20 nt, Human
uaaaaaauaaagcaaggcaa

SEQ ID NO: 974401 - RNA, 21 nt, Human
uaaacaagcacuaaagaauau

SEQ ID NO: 974402 - RNA, 23 nt, Human
uaaauauacaaaauaaaaaaucc

SEQ ID NO: 974403 - RNA, 24 nt, Human
uaauuuuucguauuuuuauuagag

SEQ ID NO: 974404 - RNA, 25 nt, Human
uaauuuuucguauuuuuauuagaga

SEQ ID NO: 974405 - RNA, 18 nt, Human
uaauuuuuuguacuuuua

SEQ ID NO: 974406 - RNA, 22 nt, Human
uacaggcgcccgccaccacgcc

SEQ ID NO: 974407 - RNA, 23 nt, Human
uacauugugaacuuccuaaguua

SEQ ID NO: 974408 - RNA, 22 nt, Human
uagagacgggguuucacugugu

SEQ ID NO: 974409 - RNA, 22 nt, Human
uagcucacaccuauaaucccag

SEQ ID NO: 974410 - RNA, 24 nt, Human
uauaguaucacaaaaccuuauagg

SEQ ID NO: 974411 - RNA, 25 nt, Human
uauuagaaaguacuuaaauacuuaa

SEQ ID NO: 974412 - RNA, 22 nt, Human
uauuagagacgggguuucacug

SEQ ID NO: 974413 - RNA, 24 nt, Human
uauuagagacgggguuucacugug

SEQ ID NO: 974414 - RNA, 23 nt, Human
ucaacugugaaacagguuaaggc

SEQ ID NO: 974415 - RNA, 21 nt, Human
ucacaccauucuccugccuca

SEQ ID NO: 974416 - RNA, 24 nt, Human
ucacucuguugcccaggcuggagu

SEQ ID NO: 974417 - RNA, 20 nt, Human
ucagcuucccgaguagcugg

SEQ ID NO: 974418 - RNA, 20 nt, Human
uccaagaaauaaccuacaga

SEQ ID NO: 974419 - RNA, 24 nt, Human
ucccaaaaugcugggauuacaggc

SEQ ID NO: 974420 - RNA, 24 nt, Human
ucccgaguagcugggauuacaggc

SEQ ID NO: 974421 - RNA, 18 nt, Human
ucggccucccaaaaugcu

SEQ ID NO: 974422 - RNA, 23 nt, Human
ucucacucuguugcccaggcugg

SEQ ID NO: 974423 - RNA, 24 nt, Human
ucucacucuguugcccaggcugga

SEQ ID NO: 974424 - RNA, 26 nt, Human
ucucacucuguugcccaggcuggagu

SEQ ID NO: 974425 - RNA, 27 nt, Human
ucucacucuguugcccaggcuggagug

SEQ ID NO: 974426 - RNA, 18 nt, Human
ucuguugcccaggcugga

SEQ ID NO: 974427 - RNA, 24 nt, Human
ucuguugcccaggcuggagugcag

SEQ ID NO: 974428 - RNA, 24 nt, Human
ugaacuuccuaaguuaucaaucac

SEQ ID NO: 974429 - RNA, 22 nt, Human
ugaaguauaaucaacugugaaa

SEQ ID NO: 974430 - RNA, 22 nt, Human
ugagacgaagucucacucuguu

SEQ ID NO: 974431 - RNA, 23 nt, Human
ugagcccaggaguucaagaccag

SEQ ID NO: 974432 - RNA, 24 nt, Human
ugaggcaggaggauagcuugagcc

SEQ ID NO: 974433 - RNA, 25 nt, Human
ugaggcaggaggauagcuugagccc

SEQ ID NO: 974434 - RNA, 24 nt, Human
ugauccgcccaccucggccuccca

SEQ ID NO: 974435 - RNA, 22 nt, Human
ugcaguggcacgaucucggcuc

SEQ ID NO: 974436 - RNA, 18 nt, Human
ugcccaggcuggagugca

SEQ ID NO: 974437 - RNA, 22 nt, Human
ugcccaggcuggagugcagugg

SEQ ID NO: 974438 - RNA, 24 nt, Human
ugcccaggcuggagugcaguggca

SEQ ID NO: 974439 - RNA, 24 nt, Human
ugccucagcuucccgaguagcugg

SEQ ID NO: 974440 - RNA, 18 nt, Human
ugcugggauuacaggcau

SEQ ID NO: 974441 - RNA, 23 nt, Human
uggagugcaguggcacgaucucg

SEQ ID NO: 974442 - RNA, 24 nt, Human
uggagugcaguggcacgaucucgg

SEQ ID NO: 974443 - RNA, 20 nt, Human
ugggaggcugaggcaggagg

SEQ ID NO: 974444 - RNA, 22 nt, Human
ugggaggcugaggcaggaggau

SEQ ID NO: 974445 - RNA, 21 nt, Human
ugggauuacaggcaugcaacc

SEQ ID NO: 974446 - RNA, 22 nt, Human
ugggauuacaggcaugcaaccc

SEQ ID NO: 974447 - RNA, 23 nt, Human
ugggauuacaggcaugcaaccca

SEQ ID NO: 974448 - RNA, 21 nt, Human
ugggauuacaggcgcccgcca

SEQ ID NO: 974449 - RNA, 22 nt, Human
ugggauuacaggcgcccgccac

SEQ ID NO: 974450 - RNA, 24 nt, Human
ugggauuacaggcgcccgccacca

SEQ ID NO: 974451 - RNA, 20 nt, Human
uggguucacaccauucuccu

SEQ ID NO: 974452 - RNA, 18 nt, Human
uuagagacgggguuucac

SEQ ID NO: 974453 - RNA, 24 nt, Human
uuauuagagacgggguuucacugu

SEQ ID NO: 974454 - RNA, 22 nt, Human
uucaauacacaaaauaucaauc

SEQ ID NO: 974455 - RNA, 21 nt, Human
uucacuguguuagucacgaug

SEQ ID NO: 974456 - RNA, 21 nt, Human
uuccaagaaauaaccuacaga

SEQ ID NO: 974457 - RNA, 22 nt, Human
uugagcccaggaguucaagacc

SEQ ID NO: 974458 - RNA, 24 nt, Human
uugcccaggcuggagugcaguggc

SEQ ID NO: 974459 - RNA, 24 nt, Human
uuugcuaauaaaugaaaauuuuau

SEQ ID NO: 974460 - RNA, 21 nt, Human
uuuucguauuuuuauuagaga

SEQ ID NO: 974461 - RNA, 24 nt, Human
uuuuuauuagagacgggguuucac

SEQ ID NO: 974462 - RNA, 26 nt, Human
uuuuuuuuuuuugagacgaagucuca

SEQ ID NO: 974463 - RNA, 23 nt, Human
uuuuuuuuuuuuuuugcuaauaa

SEQ ID NO: 974464 - RNA, 18 nt, Human
uuuuuuuuuuuuuuuuug

SEQ ID NO: 974465 - RNA, 20 nt, Human
uuuuuuuuuuuuuuuuugcu

SEQ ID NO: 974466 - RNA, 23 nt, Human
uuuuuuuuuuuuuuuuuugcuaa

SEQ ID NO: 974467 - RNA, 19 nt, Human
aaagagaaagagaauggua

SEQ ID NO: 974468 - RNA, 25 nt, Human
accuggcagcagggaguaaccacga

SEQ ID NO: 974469 - RNA, 21 nt, Human
agaaugguaacuuuauucaug

SEQ ID NO: 974470 - RNA, 20 nt, Human
agacccccaaaguauggggc

SEQ ID NO: 974471 - RNA, 22 nt, Human
aucaucucaaggaccuuccccc

SEQ ID NO: 974472 - RNA, 23 nt, Human
auggucacagaauacccccggga

SEQ ID NO: 974473 - RNA, 22 nt, Human
cacaguggggcuuggggacugg

SEQ ID NO: 974474 - RNA, 23 nt, Human
cagcccuguccgccuguccuuga

SEQ ID NO: 974475 - RNA, 26 nt, Human
cagcuauggccccccagcagacaaca

SEQ ID NO: 974476 - RNA, 19 nt, Human
cagggaguaaccacgacug

SEQ ID NO: 974477 - RNA, 22 nt, Human
cccacagcugagcaucaucuca

SEQ ID NO: 974478 - RNA, 21 nt, Human
ccccgggaaggggaaggaccu

SEQ ID NO: 974479 - RNA, 23 nt, Human
ccccuguacaacggggguuccau

SEQ ID NO: 974480 - RNA, 18 nt, Human
ccgcucagaaagaggcag

SEQ ID NO: 974481 - RNA, 18 nt, Human
ccugcaacccccacccaa

SEQ ID NO: 974482 - RNA, 20 nt, Human
cgagcagaaccgaggggcag

SEQ ID NO: 974483 - RNA, 19 nt, Human
cuggccccgagguguacag

SEQ ID NO: 974484 - RNA, 22 nt, Human
cuggccccgagguguacaggaa

SEQ ID NO: 974485 - RNA, 22 nt, Human
gaccuggcagcagggaguaacc

SEQ ID NO: 974486 - RNA, 23 nt, Human
gagccagggccagccgagcagaa

SEQ ID NO: 974487 - RNA, 20 nt, Human
gcaacccccacccaaccccu

SEQ ID NO: 974488 - RNA, 19 nt, Human
gccagccgagcagaaccga

SEQ ID NO: 974489 - RNA, 18 nt, Human
gccagcuauggcccccca

SEQ ID NO: 974490 - RNA, 19 nt, Human
gccugguguggccuccugc

SEQ ID NO: 974491 - RNA, 24 nt, Human
gcuugugaguggaguccugcaacc

SEQ ID NO: 974492 - RNA, 19 nt, Human
ggacugggggaggccagcc

SEQ ID NO: 974493 - RNA, 21 nt, Human
ggaguccugcaacccccaccc

SEQ ID NO: 974494 - RNA, 19 nt, Human
gggacugggggaggccagc

SEQ ID NO: 974495 - RNA, 21 nt, Human
gggauccucagaaagagccag

SEQ ID NO: 974496 - RNA, 19 nt, Human
uccugcaacccccacccaa

SEQ ID NO: 974497 - RNA, 19 nt, Human
ugagacccccaaaguaugg

SEQ ID NO: 974498 - RNA, 19 nt, Human
ugaguggaguccugcaacc

SEQ ID NO: 974499 - RNA, 21 nt, Human
uggaguccugcaacccccacc

SEQ ID NO: 974500 - RNA, 22 nt, Human
uggaguccugcaacccccaccc

SEQ ID NO: 974501 - RNA, 21 nt, Human
uggccccccagcagacaacaa

SEQ ID NO: 974502 - RNA, 18 nt, Human
ugggcagugccagcuaug

SEQ ID NO: 974503 - RNA, 20 nt, Human
ugggcagugccagcuauggc

SEQ ID NO: 974504 - RNA, 18 nt, Human
ugggggaggccagcccug

SEQ ID NO: 974505 - RNA, 19 nt, Human
ugggggaggccagcccugu

SEQ ID NO: 974506 - RNA, 19 nt, Human
ugguguggccuccugcccg

SEQ ID NO: 974507 - RNA, 21 nt, Human
uuccauuucugagacccccaa

SEQ ID NO: 974508 - RNA, 23 nt, Human
uucccccaugacgggauccucag

SEQ ID NO: 974509 - RNA, 18 nt, Human
aaaguaaaaauuuaggua

SEQ ID NO: 974510 - RNA, 18 nt, Human
aaaucuaugguuugcugg

SEQ ID NO: 974511 - RNA, 22 nt, Human
aaggcauggauugggagaaaga

SEQ ID NO: 974512 - RNA, 20 nt, Human
acuacaacucaacucaaaau

SEQ ID NO: 974513 - RNA, 24 nt, Human
agaagguguagcucucacauucuu

SEQ ID NO: 974514 - RNA, 19 nt, Human
aggaauuucuuuugacuug

SEQ ID NO: 974515 - RNA, 23 nt, Human
aguuuuccauguguaagauaaau

SEQ ID NO: 974516 - RNA, 20 nt, Human
auaacugauacauaacacac

SEQ ID NO: 974517 - RNA, 22 nt, Human
auacagaaaguaaaaauuuagg

SEQ ID NO: 974518 - RNA, 19 nt, Human
aucaaaauuuagcccaugg

SEQ ID NO: 974519 - RNA, 21 nt, Human
aucuuuagcaaaaaacucugg

SEQ ID NO: 974520 - RNA, 21 nt, Human
auggaauuucggguuggguaa

SEQ ID NO: 974521 - RNA, 21 nt, Human
auuaacuuuucuccucaguuu

SEQ ID NO: 974522 - RNA, 23 nt, Human
caguuucaccagggaacaauaau

SEQ ID NO: 974523 - RNA, 20 nt, Human
cuagacauaccagaaacucg

SEQ ID NO: 974524 - RNA, 23 nt, Human
cuccucaguuucaccagggaaca

SEQ ID NO: 974525 - RNA, 19 nt, Human
cuuaaguucucuauaguga

SEQ ID NO: 974526 - RNA, 18 nt, Human
gagaacacuagacauacc

SEQ ID NO: 974527 - RNA, 19 nt, Human
gagaaugaauagggaaggc

SEQ ID NO: 974528 - RNA, 21 nt, Human
gagaaugaauagggaaggccg

SEQ ID NO: 974529 - RNA, 22 nt, Human
uaaaacauacuucacugucaaa

SEQ ID NO: 974530 - RNA, 18 nt, Human
uaacauaagccagccucu

SEQ ID NO: 974531 - RNA, 22 nt, Human
uaacuuuucuccucaguuucac

SEQ ID NO: 974532 - RNA, 21 nt, Human
uaagguaaccauccaagagaa

SEQ ID NO: 974533 - RNA, 18 nt, Human
uaaguccauaaaacauac

SEQ ID NO: 974534 - RNA, 21 nt, Human
uacaacucaacucaaaauggg

SEQ ID NO: 974535 - RNA, 23 nt, Human
uauaaaauuaaacuauguuauaa

SEQ ID NO: 974536 - RNA, 20 nt, Human
uaucuggaauaaauauaaaa

SEQ ID NO: 974537 - RNA, 20 nt, Human
uaucuggaauaaauauaaaa

SEQ ID NO: 974538 - RNA, 20 nt, Human
ucaaaacacuuccacuacuu

SEQ ID NO: 974539 - RNA, 22 nt, Human
ucacugucaaacacauaggcuu

SEQ ID NO: 974540 - RNA, 20 nt, Human
ucagucaaauuuaaauacaa

SEQ ID NO: 974541 - RNA, 23 nt, Human
ucuccaagccaauggacuuaacu

SEQ ID NO: 974542 - RNA, 23 nt, Human
ucuuagccauccagauauucagu

SEQ ID NO: 974543 - RNA, 24 nt, Human
ugaaaugaaugaauaagauaaaau

SEQ ID NO: 974544 - RNA, 18 nt, Human
ugaaugagaacacuagac

SEQ ID NO: 974545 - RNA, 21 nt, Human
ugagaacacuagacauaccag

SEQ ID NO: 974546 - RNA, 25 nt, Human
ugagaacacuagacauaccagaaac

SEQ ID NO: 974547 - RNA, 24 nt, Human
ugagcaaaggauuuaaagucagaa

SEQ ID NO: 974548 - RNA, 22 nt, Human
ugcuugucaucuccaagccaau

SEQ ID NO: 974549 - RNA, 26 nt, Human
uggguaaaaagcacuaaauuaaauac

SEQ ID NO: 974550 - RNA, 25 nt, Human
uuaaauacaaccuuggaagccucau

SEQ ID NO: 974551 - RNA, 19 nt, Human
uuagaaauaagguaaccau

SEQ ID NO: 974552 - RNA, 22 nt, Human
uuaucaaucugcucaauuuuag

SEQ ID NO: 974553 - RNA, 26 nt, Human
uuuuuuuuuuuuuucuuaaaucaggg

SEQ ID NO: 974554 - RNA, 20 nt, Human
aaaccaagaccgugccggga

SEQ ID NO: 974555 - RNA, 22 nt, Human
aacacaccccgagauguuagaa

SEQ ID NO: 974556 - RNA, 23 nt, Human
aacuuuauuccuccaaguguuca

SEQ ID NO: 974557 - RNA, 24 nt, Human
aagccacauggaaacuggccaccc

SEQ ID NO: 974558 - RNA, 18 nt, Human
accccgagauguuagaaa

SEQ ID NO: 974559 - RNA, 19 nt, Human
acccugggacaggaaccuc

SEQ ID NO: 974560 - RNA, 18 nt, Human
agauguuagaaaccaagc

SEQ ID NO: 974561 - RNA, 23 nt, Human
aggcagggaguggaugaacaagg

SEQ ID NO: 974562 - RNA, 18 nt, Human
agucggcaggcccgccuc

SEQ ID NO: 974563 - RNA, 19 nt, Human
caagaacaucucccgccug

SEQ ID NO: 974564 - RNA, 24 nt, Human
cacacagucagucggcaggcccgc

SEQ ID NO: 974565 - RNA, 24 nt, Human
cagaccccacaaacuccugcuaug

SEQ ID NO: 974566 - RNA, 19 nt, Human
caggaaccucagaccccac

SEQ ID NO: 974567 - RNA, 21 nt, Human
caggaaccucagaccccacaa

SEQ ID NO: 974568 - RNA, 22 nt, Human
ccaaaacacaccccgagauguu

SEQ ID NO: 974569 - RNA, 20 nt, Human
ccaaaacacaccccgagauu

SEQ ID NO: 974570 - RNA, 21 nt, Human
ccacaaacuccugcuaugugc

SEQ ID NO: 974571 - RNA, 24 nt, Human
ccgcccaugggggauggcaggagc

SEQ ID NO: 974572 - RNA, 19 nt, Human
ccgccucuguucacugcgg

SEQ ID NO: 974573 - RNA, 19 nt, Human
ccucagaccccacaaacuc

SEQ ID NO: 974574 - RNA, 20 nt, Human
ccuccaaaacacaccccgag

SEQ ID NO: 974575 - RNA, 20 nt, Human
ccuccaaguguucaggugug

SEQ ID NO: 974576 - RNA, 21 nt, Human
ccugccuccaaaacacacccc

SEQ ID NO: 974577 - RNA, 19 nt, Human
ccuggccucuggcugccuc

SEQ ID NO: 974578 - RNA, 24 nt, Human
ccuggccucuggcugccucucuug

SEQ ID NO: 974579 - RNA, 21 nt, Human
ccuucagacacacccgcccau

SEQ ID NO: 974580 - RNA, 20 nt, Human
cgugccgggaucccauucuc

SEQ ID NO: 974581 - RNA, 18 nt, Human
gaccuggucagucagcgg

SEQ ID NO: 974582 - RNA, 22 nt, Human
gaucccauucuccuucagacac

SEQ ID NO: 974583 - RNA, 24 nt, Human
gccccaagaacaucucccgccugc

SEQ ID NO: 974584 - RNA, 22 nt, Human
gccuaagccccaagaacaucuc

SEQ ID NO: 974585 - RNA, 19 nt, Human
gccuccaaaacacaccccg

SEQ ID NO: 974586 - RNA, 25 nt, Human
ggaccuggucagucagcggccagca

SEQ ID NO: 974587 - RNA, 21 nt, Human
ggcugccucucuugcaggcug

SEQ ID NO: 974588 - RNA, 23 nt, Human
uaaaaacagaacuuuauuccucc

SEQ ID NO: 974589 - RNA, 23 nt, Human
uaggccaggcacagaaucgggga

SEQ ID NO: 974590 - RNA, 21 nt, Human
ucucgucagcagggccacggg

SEQ ID NO: 974591 - RNA, 24 nt, Human
ucucucgucagcagggccacgggc

SEQ ID NO: 974592 - RNA, 23 nt, Human
ucucuugcaggcugggggugggc

SEQ ID NO: 974593 - RNA, 22 nt, Human
ucugccaggagccuaagcccca

SEQ ID NO: 974594 - RNA, 18 nt, Human
ugaacaaggacaggcccc

SEQ ID NO: 974595 - RNA, 18 nt, Human
ugagaaagugcuuguccu

SEQ ID NO: 974596 - RNA, 19 nt, Human
ugagaaagugcuuguccug

SEQ ID NO: 974597 - RNA, 19 nt, Human
ugccacacagucagucggc

SEQ ID NO: 974598 - RNA, 25 nt, Human
ugccaggagccuaagccccaagaac

SEQ ID NO: 974599 - RNA, 21 nt, Human
ugccgggaucccauucuccuu

SEQ ID NO: 974600 - RNA, 21 nt, Human
ugcuaugugcucugccaggag

SEQ ID NO: 974601 - RNA, 21 nt, Human
uggaugaacaaggacaggccc

SEQ ID NO: 974602 - RNA, 23 nt, Human
ugggacaggaaccucagacccca

SEQ ID NO: 974603 - RNA, 18 nt, Human
uguucaggugugcacuug

SEQ ID NO: 974604 - RNA, 22 nt, Human
uuuuuuuuuuuccacaauuaaa

SEQ ID NO: 974605 - RNA, 18 nt, Human
agaagggagagacaauaa

SEQ ID NO: 974606 - RNA, 23 nt, Human
aggaggccuggccacaggugccc

SEQ ID NO: 974607 - RNA, 25 nt, Human
caauaagcaucuuuauuauccaaau

SEQ ID NO: 974608 - RNA, 23 nt, Human
cacccacggccucgcgccggccc

SEQ ID NO: 974609 - RNA, 18 nt, Human
cagcuggcugguccugga

SEQ ID NO: 974610 - RNA, 21 nt, Human
ccagguaugaaaaugaccaag

SEQ ID NO: 974611 - RNA, 18 nt, Human
ccccgcgcgccagucccg

SEQ ID NO: 974612 - RNA, 25 nt, Human
ccccgcuacuccacgcgucggccca

SEQ ID NO: 974613 - RNA, 22 nt, Human
ccccucaggcuucccgcucucc

SEQ ID NO: 974614 - RNA, 20 nt, Human
cccgcccccucaggcuuccc

SEQ ID NO: 974615 - RNA, 19 nt, Human
cccgccgccggcauccucg

SEQ ID NO: 974616 - RNA, 24 nt, Human
cccgcgcgccagucccggcagccg

SEQ ID NO: 974617 - RNA, 20 nt, Human
cccggcagccguccuucccg

SEQ ID NO: 974618 - RNA, 21 nt, Human
cccggcagccguccuucccgu

SEQ ID NO: 974619 - RNA, 18 nt, Human
ccgccgccggcauccucg

SEQ ID NO: 974620 - RNA, 18 nt, Human
ccggcccgccccgccccg

SEQ ID NO: 974621 - RNA, 22 nt, Human
ccucgcgccggccccgcccccu

SEQ ID NO: 974622 - RNA, 23 nt, Human
ccucgugccgcacccacggccuc

SEQ ID NO: 974623 - RNA, 20 nt, Human
cucgugccgcacccacggcc

SEQ ID NO: 974624 - RNA, 19 nt, Human
cucugcauaacagcagaac

SEQ ID NO: 974625 - RNA, 24 nt, Human
cuucccgcucuccccgcuacucca

SEQ ID NO: 974626 - RNA, 22 nt, Human
gagcccagucugcagggaacac

SEQ ID NO: 974627 - RNA, 24 nt, Human
gccacaggugcccccuguauacaa

SEQ ID NO: 974628 - RNA, 22 nt, Human
gcugccaggguggaugagaagu

SEQ ID NO: 974629 - RNA, 21 nt, Human
ggaugagaagucacuccugag

SEQ ID NO: 974630 - RNA, 20 nt, Human
ggaugucgggcugagcccag

SEQ ID NO: 974631 - RNA, 23 nt, Human
guaaauucccagaacuggagaag

SEQ ID NO: 974632 - RNA, 27 nt, Human
guaaauucccagaacuggagaagggag

SEQ ID NO: 974633 - RNA, 24 nt, Human
guguccccgcgcgccagucccggc

SEQ ID NO: 974634 - RNA, 23 nt, Human
uccaugcuggaucugcacaaggg

SEQ ID NO: 974635 - RNA, 20 nt, Human
uccccgcuacuccacgcguc

SEQ ID NO: 974636 - RNA, 22 nt, Human
ucccggcagccguccuucccgu

SEQ ID NO: 974637 - RNA, 23 nt, Human
uccuggagcucccaggaggaggc

SEQ ID NO: 974638 - RNA, 19 nt, Human
ugaaaaugaccaaggcucc

SEQ ID NO: 974639 - RNA, 25 nt, Human
ugaaaaugaccaaggcuccuugcug

SEQ ID NO: 974640 - RNA, 18 nt, Human
ugagaagucacuccugag

SEQ ID NO: 974641 - RNA, 26 nt, Human
ugcauaacagcagaaccuacuagcug

SEQ ID NO: 974642 - RNA, 21 nt, Human
ugccaggguggaugagaaguc

SEQ ID NO: 974643 - RNA, 20 nt, Human
ugcuggaucugcacaagggc

SEQ ID NO: 974644 - RNA, 19 nt, Human
uggcucugcauaacagcag

SEQ ID NO: 974645 - RNA, 19 nt, Human
ugggcagaggagugucccc

SEQ ID NO: 974646 - RNA, 22 nt, Human
ugggcagaggaguguccccggc

SEQ ID NO: 974647 - RNA, 23 nt, Human
aaaaacaccugguccacaaagcu

SEQ ID NO: 974648 - RNA, 19 nt, Human
aaaacaccugguccacaaa

SEQ ID NO: 974649 - RNA, 25 nt, Human
aaacugaaguacaguuaauaugauc

SEQ ID NO: 974650 - RNA, 20 nt, Human
aaagaacagauccacagcca

SEQ ID NO: 974651 - RNA, 22 nt, Human
aaagcaccaacuaaaaccacaa

SEQ ID NO: 974652 - RNA, 23 nt, Human
aagaaaaacaccugguccacaaa

SEQ ID NO: 974653 - RNA, 18 nt, Human
aagaacagauccacagcc

SEQ ID NO: 974654 - RNA, 24 nt, Human
aagaggcauuacagagagcaccau

SEQ ID NO: 974655 - RNA, 20 nt, Human
aagcucaagagcucaaacaa

SEQ ID NO: 974656 - RNA, 18 nt, Human
aauaaaguaacuguacaa

SEQ ID NO: 974657 - RNA, 20 nt, Human
acaaagaacagauccacagc

SEQ ID NO: 974658 - RNA, 18 nt, Human
agagauaacauuugaaua

SEQ ID NO: 974659 - RNA, 18 nt, Human
aggaaaugacgaguuuaa

SEQ ID NO: 974660 - RNA, 18 nt, Human
aggaauucuuucacaaag

SEQ ID NO: 974661 - RNA, 20 nt, Human
aguuuccuaggcagcaguuc

SEQ ID NO: 974662 - RNA, 24 nt, Human
auauauacauacauacacacuaua

SEQ ID NO: 974663 - RNA, 28 nt, Human
auauauacauacauacacacuauaugua

SEQ ID NO: 974664 - RNA, 22 nt, Human
caaagaacagauccacagccaa

SEQ ID NO: 974665 - RNA, 23 nt, Human
caaucaaagacuuccaagaagga

SEQ ID NO: 974666 - RNA, 28 nt, Human
cagaaaaaguuuaacaaacauuagucag

SEQ ID NO: 974667 - RNA, 22 nt, Human
cagcacccacugguagcaacca

SEQ ID NO: 974668 - RNA, 22 nt, Human
caguacauucccaccccccaaa

SEQ ID NO: 974669 - RNA, 26 nt, Human
cauauauacauacauacacacuauau

SEQ ID NO: 974670 - RNA, 22 nt, Human
cccccaaaaaaauaagugcaaa

SEQ ID NO: 974671 - RNA, 22 nt, Human
ccucucucaacaacuuuuuaaa

SEQ ID NO: 974672 - RNA, 22 nt, Human
ccugguccacaaagcuuaacac

SEQ ID NO: 974673 - RNA, 24 nt, Human
cugacugcaguacauucccacccc

SEQ ID NO: 974674 - RNA, 20 nt, Human
cugcucuucaaaugcaggga

SEQ ID NO: 974675 - RNA, 22 nt, Human
cuugagcaggugccauaaagca

SEQ ID NO: 974676 - RNA, 19 nt, Human
gaaaaacaccugguccaca

SEQ ID NO: 974677 - RNA, 20 nt, Human
gaaagacuuaaggcaguaag

SEQ ID NO: 974678 - RNA, 18 nt, Human
gaagguaaauacaaccuc

SEQ ID NO: 974679 - RNA, 21 nt, Human
gaggaaagacuuaaggcagua

SEQ ID NO: 974680 - RNA, 18 nt, Human
gcaguaagaggcauuaca

SEQ ID NO: 974681 - RNA, 24 nt, Human
guuguguacaugcuccauggagaa

SEQ ID NO: 974682 - RNA, 23 nt, Human
uaaaguaacuguacaaagagaac

SEQ ID NO: 974683 - RNA, 24 nt, Human
uaacacacaauuuacauauauaca

SEQ ID NO: 974684 - RNA, 19 nt, Human
uaacuguacaaagagaaca

SEQ ID NO: 974685 - RNA, 25 nt, Human
uacauacauacacacuauauguaag

SEQ ID NO: 974686 - RNA, 19 nt, Human
uagcaaccaggauccuucu

SEQ ID NO: 974687 - RNA, 25 nt, Human
uauauacauacauacacacuauaug

SEQ ID NO: 974688 - RNA, 26 nt, Human
uauauacauacauacacacuauaugg

SEQ ID NO: 974689 - RNA, 22 nt, Human
ucaacuucuaagcucaagagcu

SEQ ID NO: 974690 - RNA, 18 nt, Human
ucacaaagaacagaucca

SEQ ID NO: 974691 - RNA, 25 nt, Human
ucagcacccacugguagcaaccagg

SEQ ID NO: 974692 - RNA, 18 nt, Human
uccacaaagcuuaacacc

SEQ ID NO: 974693 - RNA, 20 nt, Human
uccacaaagcuuaacaccua

SEQ ID NO: 974694 - RNA, 21 nt, Human
ucgccccaaaagaaaaacacc

SEQ ID NO: 974695 - RNA, 24 nt, Human
ucugaaagcaccaacuaaaaccac

SEQ ID NO: 974696 - RNA, 28 nt, Human
ugaaagcaccaacuaaaacuggagaccc

SEQ ID NO: 974697 - RNA, 21 nt, Human
ugaaguacaguuaauaugauc

SEQ ID NO: 974698 - RNA, 22 nt, Human
ugccacagaaaaaguuuaacaa

SEQ ID NO: 974699 - RNA, 18 nt, Human
ugggcgaaagaaaacaga

SEQ ID NO: 974700 - RNA, 22 nt, Human
uguggccaaggugccacagaaa

SEQ ID NO: 974701 - RNA, 23 nt, Human
uuaacaccuauauaaauaaagua

SEQ ID NO: 974702 - RNA, 20 nt, Human
uucacaaagaacagauccac

SEQ ID NO: 974703 - RNA, 19 nt, Human
aaaaggacaaaggagacaa

SEQ ID NO: 974704 - RNA, 23 nt, Human
aaacaguuccacacccaaaacua

SEQ ID NO: 974705 - RNA, 23 nt, Human
aaagaaacaguuccacacccaaa

SEQ ID NO: 974706 - RNA, 21 nt, Human
aaaggggaggccccaaagauu

SEQ ID NO: 974707 - RNA, 22 nt, Human
aaagugcuguaagauaccccug

SEQ ID NO: 974708 - RNA, 20 nt, Human
aacucaagcccggcuucccc

SEQ ID NO: 974709 - RNA, 21 nt, Human
aacucaagcccggcuucccca

SEQ ID NO: 974710 - RNA, 27 nt, Human
aagauaccccugcgcuuguggcaauug

SEQ ID NO: 974711 - RNA, 19 nt, Human
aagaucccuccccgccucc

SEQ ID NO: 974712 - RNA, 22 nt, Human
aaggaaaagggucacuguggag

SEQ ID NO: 974713 - RNA, 21 nt, Human
aauaaacuccacucaagccca

SEQ ID NO: 974714 - RNA, 20 nt, Human
acacacaugcacuccagagc

SEQ ID NO: 974715 - RNA, 23 nt, Human
acacagaacccacacugcccucc

SEQ ID NO: 974716 - RNA, 23 nt, Human
acacaugcacuccagagcugggc

SEQ ID NO: 974717 - RNA, 25 nt, Human
acagaacccacacugcccuccgcca

SEQ ID NO: 974718 - RNA, 21 nt, Human
acagacagacacagaacccac

SEQ ID NO: 974719 - RNA, 20 nt, Human
acagacgcaagacacagaca

SEQ ID NO: 974720 - RNA, 23 nt, Human
acaggagcagaggggccugaagc

SEQ ID NO: 974721 - RNA, 18 nt, Human
acagguucccaccaccca

SEQ ID NO: 974722 - RNA, 20 nt, Human
acaugcacuccagagcuggg

SEQ ID NO: 974723 - RNA, 21 nt, Human
accaaaacacaagacacaaua

SEQ ID NO: 974724 - RNA, 21 nt, Human
accaaccccaaagugaacaua

SEQ ID NO: 974725 - RNA, 19 nt, Human
acccacacugcccuccgcc

SEQ ID NO: 974726 - RNA, 19 nt, Human
acccuuggauggcugagaa

SEQ ID NO: 974727 - RNA, 23 nt, Human
accuuggaaggcugggggagccc

SEQ ID NO: 974728 - RNA, 19 nt, Human
acucaagcccggcuucccc

SEQ ID NO: 974729 - RNA, 18 nt, Human
acucaccuccuccacagg

SEQ ID NO: 974730 - RNA, 23 nt, Human
agaagggcagagcccaugaguua

SEQ ID NO: 974731 - RNA, 19 nt, Human
agacagcaagcagccaccu

SEQ ID NO: 974732 - RNA, 22 nt, Human
agacagccagagacuuccugag

SEQ ID NO: 974733 - RNA, 24 nt, Human
agacagccagagacuuccugagca

SEQ ID NO: 974734 - RNA, 25 nt, Human
agacagccagagacuuccugagcaa

SEQ ID NO: 974735 - RNA, 23 nt, Human
agagccaaggggacagaggggcc

SEQ ID NO: 974736 - RNA, 24 nt, Human
agagggggcuccugccccgagggc

SEQ ID NO: 974737 - RNA, 19 nt, Human
agaucccuccccgccuccc

SEQ ID NO: 974738 - RNA, 24 nt, Human
agaucccuccccgccuccccacuu

SEQ ID NO: 974739 - RNA, 21 nt, Human
agcagaaguugggcccgaggg

SEQ ID NO: 974740 - RNA, 18 nt, Human
aggaccaggaaccccaaa

SEQ ID NO: 974741 - RNA, 23 nt, Human
aggacccugauacucagacccac

SEQ ID NO: 974742 - RNA, 20 nt, Human
aggccucaggcaucuggguu

SEQ ID NO: 974743 - RNA, 22 nt, Human
aggccucaggcaucuggguuug

SEQ ID NO: 974744 - RNA, 21 nt, Human
aggccucaggcccaaccacag

SEQ ID NO: 974745 - RNA, 22 nt, Human
aggcugagggcaggaggaaaag

SEQ ID NO: 974746 - RNA, 25 nt, Human
aucuggguuugguuuggcugggcug

SEQ ID NO: 974747 - RNA, 20 nt, Human
augcacuccagagcugggcc

SEQ ID NO: 974748 - RNA, 22 nt, Human
caacaacccugaguccacuggc

SEQ ID NO: 974749 - RNA, 18 nt, Human
caaccacagcccaguccu

SEQ ID NO: 974750 - RNA, 23 nt, Human
caaccagauggguguaaccccug

SEQ ID NO: 974751 - RNA, 22 nt, Human
caacccugaguccacuggcccu

SEQ ID NO: 974752 - RNA, 21 nt, Human
caagaucccuccccgccuccc

SEQ ID NO: 974753 - RNA, 21 nt, Human
caaggcggggggagcuuugga

SEQ ID NO: 974754 - RNA, 21 nt, Human
cacacccaaaacuaaauaaau

SEQ ID NO: 974755 - RNA, 18 nt, Human
cacacccagaagugccaa

SEQ ID NO: 974756 - RNA, 22 nt, Human
cacacccccuugcuguucaguc

SEQ ID NO: 974757 - RNA, 24 nt, Human
cacagaggcuucaggagcagggcc

SEQ ID NO: 974758 - RNA, 18 nt, Human
cacagcccaguccuccac

SEQ ID NO: 974759 - RNA, 25 nt, Human
cacagcccaguccuccacagguggc

SEQ ID NO: 974760 - RNA, 19 nt, Human
cacaggccucaggcccaac

SEQ ID NO: 974761 - RNA, 22 nt, Human
cacccaacuuaaaaccacaacu

SEQ ID NO: 974762 - RNA, 23 nt, Human
caccugagcagcagcugccgcac

SEQ ID NO: 974763 - RNA, 24 nt, Human
cacugcccuccgccaccuugcgcc

SEQ ID NO: 974764 - RNA, 23 nt, Human
cacuggacaggauggugcagggc

SEQ ID NO: 974765 - RNA, 20 nt, Human
cagaacccacacugcccucc

SEQ ID NO: 974766 - RNA, 20 nt, Human
cagaauaccccacccuccuc

SEQ ID NO: 974767 - RNA, 20 nt, Human
cagacagacacagaacccac

SEQ ID NO: 974768 - RNA, 21 nt, Human
cagacagagugaaggccgugc

SEQ ID NO: 974769 - RNA, 18 nt, Human
cagcccaguccuccacag

SEQ ID NO: 974770 - RNA, 19 nt, Human
caggagagcccccgaaaga

SEQ ID NO: 974771 - RNA, 22 nt, Human
cauccugccagaauaccccacc

SEQ ID NO: 974772 - RNA, 19 nt, Human
cauggcaccugagcagcag

SEQ ID NO: 974773 - RNA, 22 nt, Human
cauggcaccugagcagcagcug

SEQ ID NO: 974774 - RNA, 20 nt, Human
ccaaccccaaagugaacaua

SEQ ID NO: 974775 - RNA, 24 nt, Human
ccaaccccaaagugaacauagugc

SEQ ID NO: 974776 - RNA, 19 nt, Human
ccacacugcccuccgccac

SEQ ID NO: 974777 - RNA, 19 nt, Human
ccacagcccaguccuccuu

SEQ ID NO: 974778 - RNA, 22 nt, Human
ccaccaaaacacaagacacaau

SEQ ID NO: 974779 - RNA, 21 nt, Human
ccaccggccaccacaguccca

SEQ ID NO: 974780 - RNA, 22 nt, Human
ccaccggccaccacagucccag

SEQ ID NO: 974781 - RNA, 22 nt, Human
ccacugacaagaagaaaagccc

SEQ ID NO: 974782 - RNA, 21 nt, Human
ccagaauaccccacccuccuc

SEQ ID NO: 974783 - RNA, 22 nt, Human
ccagacagagugaaggccgugc

SEQ ID NO: 974784 - RNA, 19 nt, Human
ccagagguggggccuagcc

SEQ ID NO: 974785 - RNA, 24 nt, Human
cccagcccugucacauccaccaaa

SEQ ID NO: 974786 - RNA, 18 nt, Human
cccaggagagcccccgaa

SEQ ID NO: 974787 - RNA, 20 nt, Human
ccccaaauuaggaugggcug

SEQ ID NO: 974788 - RNA, 23 nt, Human
ccccacaugaagacagccagaga

SEQ ID NO: 974789 - RNA, 22 nt, Human
ccccaggacccugauacucaga

SEQ ID NO: 974790 - RNA, 21 nt, Human
ccccaucuuugcccucccagc

SEQ ID NO: 974791 - RNA, 23 nt, Human
cccccagagguggggccuagccu

SEQ ID NO: 974792 - RNA, 18 nt, Human
cccccgaaagagaggacc

SEQ ID NO: 974793 - RNA, 21 nt, Human
cccccgaaagagaggacccuc

SEQ ID NO: 974794 - RNA, 18 nt, Human
ccccgaaagagaggaccc

SEQ ID NO: 974795 - RNA, 22 nt, Human
ccccgccccaucuuugcccucc

SEQ ID NO: 974796 - RNA, 25 nt, Human
ccccuuggguuucugccccugccuc

SEQ ID NO: 974797 - RNA, 19 nt, Human
cccgagcccuagaacucag

SEQ ID NO: 974798 - RNA, 21 nt, Human
cccgagcccuagaacucagga

SEQ ID NO: 974799 - RNA, 25 nt, Human
cccuccacugacaagaagaaaagcc

SEQ ID NO: 974800 - RNA, 23 nt, Human
cccucccagccccauguguaccc

SEQ ID NO: 974801 - RNA, 22 nt, Human
cccugaccaaggcggggggagc

SEQ ID NO: 974802 - RNA, 18 nt, Human
cccugaguccacuggccc

SEQ ID NO: 974803 - RNA, 22 nt, Human
cccugcgcuuguggcaauuggg

SEQ ID NO: 974804 - RNA, 18 nt, Human
ccgaccaucaacuuccca

SEQ ID NO: 974805 - RNA, 18 nt, Human
ccgcugccggaaugggcc

SEQ ID NO: 974806 - RNA, 20 nt, Human
ccuaugggcaacucaagccc

SEQ ID NO: 974807 - RNA, 25 nt, Human
ccuaugggcaacucaagcccggcuu

SEQ ID NO: 974808 - RNA, 18 nt, Human
ccuccccgccuccccacu

SEQ ID NO: 974809 - RNA, 23 nt, Human
ccuccccgccuccccacuuccca

SEQ ID NO: 974810 - RNA, 21 nt, Human
ccuccuaccccagcacugagc

SEQ ID NO: 974811 - RNA, 21 nt, Human
ccucgugacccacaccggugg

SEQ ID NO: 974812 - RNA, 23 nt, Human
ccucucaacaacccugaguccac

SEQ ID NO: 974813 - RNA, 24 nt, Human
ccucugcagucgcugcugcagccg

SEQ ID NO: 974814 - RNA, 19 nt, Human
ccugaguccagcccugccu

SEQ ID NO: 974815 - RNA, 21 nt, Human
ccugagucccaaggugggcag

SEQ ID NO: 974816 - RNA, 27 nt, Human
ccugccagaauaccccacccuccucca

SEQ ID NO: 974817 - RNA, 22 nt, Human
ccuggcagaccacggcugccuc

SEQ ID NO: 974818 - RNA, 24 nt, Human
ccugucacauccaccaaaacacaa

SEQ ID NO: 974819 - RNA, 24 nt, Human
ccuugcgcccagccccgucucucc

SEQ ID NO: 974820 - RNA, 22 nt, Human
ccuuggccccagaaccuugcag

SEQ ID NO: 974821 - RNA, 23 nt, Human
ccuuggguuucugccccugccuc

SEQ ID NO: 974822 - RNA, 23 nt, Human
cgagcagaagggcagagcccaug

SEQ ID NO: 974823 - RNA, 21 nt, Human
cgccccaucuuugcccuccca

SEQ ID NO: 974824 - RNA, 23 nt, Human
cgccgcugccggaaugggccccc

SEQ ID NO: 974825 - RNA, 20 nt, Human
cgccuggcccugaucagcga

SEQ ID NO: 974826 - RNA, 21 nt, Human
cggcccagugguucuggccuc

SEQ ID NO: 974827 - RNA, 19 nt, Human
cuaaaaguaaucaguccaa

SEQ ID NO: 974828 - RNA, 24 nt, Human
cuacaauaaacuccacucaagccc

SEQ ID NO: 974829 - RNA, 22 nt, Human
cucaccuccuccacaggccuca

SEQ ID NO: 974830 - RNA, 20 nt, Human
cucagacccacacacccccu

SEQ ID NO: 974831 - RNA, 21 nt, Human
cuccagccuguggccuugacc

SEQ ID NO: 974832 - RNA, 21 nt, Human
cuccuaccccagcacugagcu

SEQ ID NO: 974833 - RNA, 22 nt, Human
cucgcaccacuccggcccggcu

SEQ ID NO: 974834 - RNA, 22 nt, Human
cucgccgaccaucaacuuccca

SEQ ID NO: 974835 - RNA, 22 nt, Human
cucugugcagagcccgggcccc

SEQ ID NO: 974836 - RNA, 20 nt, Human
cugaagcuugacuaaauucc

SEQ ID NO: 974837 - RNA, 25 nt, Human
cugaagcuugacuaaauuccagugg

SEQ ID NO: 974838 - RNA, 23 nt, Human
cugagucccaaggugggcagcag

SEQ ID NO: 974839 - RNA, 21 nt, Human
cugauacucagacccacacac

SEQ ID NO: 974840 - RNA, 18 nt, Human
cugaucagcgaccugcgg

SEQ ID NO: 974841 - RNA, 19 nt, Human
cugaucagcgaccugcgga

SEQ ID NO: 974842 - RNA, 20 nt, Human
cugccgcaccuccaccgccu

SEQ ID NO: 974843 - RNA, 19 nt, Human
cugccuccucuucuugugc

SEQ ID NO: 974844 - RNA, 20 nt, Human
cugcgauucauccugccaga

SEQ ID NO: 974845 - RNA, 21 nt, Human
cuggagcaggaccaggaaccc

SEQ ID NO: 974846 - RNA, 21 nt, Human
cuggcccugucugaagagcca

SEQ ID NO: 974847 - RNA, 18 nt, Human
cuggccgggcaguagugc

SEQ ID NO: 974848 - RNA, 18 nt, Human
cugguguaccuccugccu

SEQ ID NO: 974849 - RNA, 29 nt, Human
cuguggccccagcccugucaccgguuccg

SEQ ID NO: 974850 - RNA, 21 nt, Human
cuuaaaaccacaacugucagg

SEQ ID NO: 974851 - RNA, 18 nt, Human
cuucccaguuggcccgug

SEQ ID NO: 974852 - RNA, 25 nt, Human
gaaaaaaagaaacaguuccacaccc

SEQ ID NO: 974853 - RNA, 21 nt, Human
gaaccaaccccaaagugaaca

SEQ ID NO: 974854 - RNA, 22 nt, Human
gaaccaaccccaaagugaacau

SEQ ID NO: 974855 - RNA, 18 nt, Human
gacacacccagaagugcc

SEQ ID NO: 974856 - RNA, 18 nt, Human
gaccaggaaccccaaauu

SEQ ID NO: 974857 - RNA, 20 nt, Human
gagacuuccugagcagggcu

SEQ ID NO: 974858 - RNA, 18 nt, Human
gagagauuuuauguuguc

SEQ ID NO: 974859 - RNA, 22 nt, Human
gagagcccccgaaagagaggac

SEQ ID NO: 974860 - RNA, 21 nt, Human
gagcaggaccaggaaccccaa

SEQ ID NO: 974861 - RNA, 18 nt, Human
gagcugcucccuccacug

SEQ ID NO: 974862 - RNA, 22 nt, Human
gcacaggaggcuggguccgcag

SEQ ID NO: 974863 - RNA, 20 nt, Human
gcagcagagacagaguagac

SEQ ID NO: 974864 - RNA, 18 nt, Human
gcagccccagccaggccu

SEQ ID NO: 974865 - RNA, 19 nt, Human
gcaggugccccgccucacg

SEQ ID NO: 974866 - RNA, 25 nt, Human
gccacaguguccugcgggggcagcc

SEQ ID NO: 974867 - RNA, 22 nt, Human
gcccagccccgucucuccucca

SEQ ID NO: 974868 - RNA, 27 nt, Human
gcccaucgaaggccccaggagagcccc

SEQ ID NO: 974869 - RNA, 23 nt, Human
gccccgccccaucuuugcccucc

SEQ ID NO: 974870 - RNA, 18 nt, Human
gcccgagcccuagaacuc

SEQ ID NO: 974871 - RNA, 23 nt, Human
gcccuagaacucaggagaagcca

SEQ ID NO: 974872 - RNA, 24 nt, Human
gccgacuggccuugggcugggagc

SEQ ID NO: 974873 - RNA, 19 nt, Human
gccgcaggcgccgcugccg

SEQ ID NO: 974874 - RNA, 23 nt, Human
gccggcccagugguucuggccuc

SEQ ID NO: 974875 - RNA, 20 nt, Human
gccucaggcccaaccacagc

SEQ ID NO: 974876 - RNA, 18 nt, Human
gccuugggcugggagcag

SEQ ID NO: 974877 - RNA, 18 nt, Human
gcgccuaccugcucugcc

SEQ ID NO: 974878 - RNA, 18 nt, Human
gcgggggcagccccagcc

SEQ ID NO: 974879 - RNA, 21 nt, Human
gcguguggcagagggggcucc

SEQ ID NO: 974880 - RNA, 19 nt, Human
ggaaaggggaggccccaaa

SEQ ID NO: 974881 - RNA, 25 nt, Human
ggagaagccacgucuggccgcuagg

SEQ ID NO: 974882 - RNA, 19 nt, Human
ggagaagggaggggggaac

SEQ ID NO: 974883 - RNA, 21 nt, Human
ggagcagggagggugcagggc

SEQ ID NO: 974884 - RNA, 22 nt, Human
ggagcuuuggaggcacaaagcg

SEQ ID NO: 974885 - RNA, 22 nt, Human
ggcaagguggcuuggaagagac

SEQ ID NO: 974886 - RNA, 20 nt, Human
ggcaggaaggaaaaggguca

SEQ ID NO: 974887 - RNA, 20 nt, Human
ggcagucauggccucuggcu

SEQ ID NO: 974888 - RNA, 21 nt, Human
ggcauggccacaguguccugc

SEQ ID NO: 974889 - RNA, 22 nt, Human
ggccucaggcccaaccacagcc

SEQ ID NO: 974890 - RNA, 20 nt, Human
ggccuggcagaccacggcug

SEQ ID NO: 974891 - RNA, 18 nt, Human
ggcuuccauggcuucagc

SEQ ID NO: 974892 - RNA, 18 nt, Human
ggcuuggaagagacggca

SEQ ID NO: 974893 - RNA, 24 nt, Human
gggaagggugugucagugagaagc

SEQ ID NO: 974894 - RNA, 23 nt, Human
gggacacuguuccucaggaccuc

SEQ ID NO: 974895 - RNA, 18 nt, Human
gggagaaaucuacaauaa

SEQ ID NO: 974896 - RNA, 21 nt, Human
gggaugccuuucuccaacccc

SEQ ID NO: 974897 - RNA, 18 nt, Human
ggggaaaggggaggcccc

SEQ ID NO: 974898 - RNA, 24 nt, Human
ggggcagucauggccucuggcuuu

SEQ ID NO: 974899 - RNA, 23 nt, Human
gggggcuccugccccgagggcug

SEQ ID NO: 974900 - RNA, 18 nt, Human
gggucccccuucccugcu

SEQ ID NO: 974901 - RNA, 22 nt, Human
ggucccccuucccugcucucca

SEQ ID NO: 974902 - RNA, 20 nt, Human
guaagacacagggucccucc

SEQ ID NO: 974903 - RNA, 22 nt, Human
guacaacucugucugaacaaaa

SEQ ID NO: 974904 - RNA, 18 nt, Human
guccucgugacccacacc

SEQ ID NO: 974905 - RNA, 24 nt, Human
gugaaggggauggccuaauauggg

SEQ ID NO: 974906 - RNA, 21 nt, Human
gugaaugugccccagacagag

SEQ ID NO: 974907 - RNA, 19 nt, Human
guggcuucaguacgcgcca

SEQ ID NO: 974908 - RNA, 19 nt, Human
gugguuccuggggacacug

SEQ ID NO: 974909 - RNA, 20 nt, Human
guuccacacccaaaacuaaa

SEQ ID NO: 974910 - RNA, 26 nt, Human
uaagacacagggucccuccaaccccc

SEQ ID NO: 974911 - RNA, 22 nt, Human
uaagauaccccugcgcuugugg

SEQ ID NO: 974912 - RNA, 21 nt, Human
uacaauaaacuccacucaagc

SEQ ID NO: 974913 - RNA, 18 nt, Human
uaccccacccuccuccag

SEQ ID NO: 974914 - RNA, 24 nt, Human
uacgcagcuccgugagugcgcggc

SEQ ID NO: 974915 - RNA, 21 nt, Human
uagagagauuuuauguuguca

SEQ ID NO: 974916 - RNA, 19 nt, Human
uagcagcagagacagagga

SEQ ID NO: 974917 - RNA, 20 nt, Human
uaggacuccuggagcaggac

SEQ ID NO: 974918 - RNA, 22 nt, Human
ucaagaucccuccccgccuccc

SEQ ID NO: 974919 - RNA, 22 nt, Human
ucagacccacacacccccuugc

SEQ ID NO: 974920 - RNA, 23 nt, Human
ucagacccacacacccccuugcu

SEQ ID NO: 974921 - RNA, 21 nt, Human
ucagaggcugagggcaggagg

SEQ ID NO: 974922 - RNA, 22 nt, Human
uccacacccaaaacuaaauaaa

SEQ ID NO: 974923 - RNA, 22 nt, Human
uccacaggccucaggcccaacc

SEQ ID NO: 974924 - RNA, 22 nt, Human
uccacugacaagaagaaaagcc

SEQ ID NO: 974925 - RNA, 20 nt, Human
uccagagcugggccagggcc

SEQ ID NO: 974926 - RNA, 18 nt, Human
uccagcugggagcuggga

SEQ ID NO: 974927 - RNA, 22 nt, Human
ucccaggccgacuggccuuggg

SEQ ID NO: 974928 - RNA, 22 nt, Human
ucccagggccugucccagggcu

SEQ ID NO: 974929 - RNA, 18 nt, Human
uccccacuucccacaucc

SEQ ID NO: 974930 - RNA, 22 nt, Human
uccccaggacccugauacucag

SEQ ID NO: 974931 - RNA, 23 nt, Human
uccccgccuccccacuucccaca

SEQ ID NO: 974932 - RNA, 27 nt, Human
uccccgccuccccacuucccacauccc

SEQ ID NO: 974933 - RNA, 22 nt, Human
uccccuaggucagagagggggu

SEQ ID NO: 974934 - RNA, 18 nt, Human
uccgcagccagucccggc

SEQ ID NO: 974935 - RNA, 26 nt, Human
uccgcagccccgccggcucgcaccac

SEQ ID NO: 974936 - RNA, 20 nt, Human
uccugagucccaaggugggc

SEQ ID NO: 974937 - RNA, 23 nt, Human
uccuggagcaggaccaggaaccc

SEQ ID NO: 974938 - RNA, 23 nt, Human
uccuggggacacuguuccucagg

SEQ ID NO: 974939 - RNA, 21 nt, Human
ucgccgaccaucaacuuccca

SEQ ID NO: 974940 - RNA, 23 nt, Human
ucuccaaccccugcuccuuccac

SEQ ID NO: 974941 - RNA, 21 nt, Human
ucucugggcagaggccccugg

SEQ ID NO: 974942 - RNA, 21 nt, Human
ucuggguuugguuuggcuggg

SEQ ID NO: 974943 - RNA, 21 nt, Human
ugaacagacagacacagaacc

SEQ ID NO: 974944 - RNA, 23 nt, Human
ugaagacagccagagacuuccug

SEQ ID NO: 974945 - RNA, 18 nt, Human
ugaagagccaaggggaca

SEQ ID NO: 974946 - RNA, 19 nt, Human
ugaagagugggugggacaa

SEQ ID NO: 974947 - RNA, 20 nt, Human
ugacaagaagaaaagcccau

SEQ ID NO: 974948 - RNA, 24 nt, Human
ugacacacccagaagugccaagag

SEQ ID NO: 974949 - RNA, 26 nt, Human
ugacacacccagaagugccaagagga

SEQ ID NO: 974950 - RNA, 23 nt, Human
ugacugacacacccagaagugcc

SEQ ID NO: 974951 - RNA, 19 nt, Human
ugagauggccucaccuugg

SEQ ID NO: 974952 - RNA, 21 nt, Human
ugagcagcagcugccgcaccu

SEQ ID NO: 974953 - RNA, 22 nt, Human
ugagcagcagcugccgcaccuc

SEQ ID NO: 974954 - RNA, 21 nt, Human
ugagcuccugagucccaaggu

SEQ ID NO: 974955 - RNA, 18 nt, Human
ugagcuugccgggcuuag

SEQ ID NO: 974956 - RNA, 23 nt, Human
ugaggagacuacgcagcuccgug

SEQ ID NO: 974957 - RNA, 22 nt, Human
ugaguccagcccugccucccag

SEQ ID NO: 974958 - RNA, 21 nt, Human
ugagugcgcggcacaggaggc

SEQ ID NO: 974959 - RNA, 24 nt, Human
ugcauuguccccuaggucagagag

SEQ ID NO: 974960 - RNA, 21 nt, Human
ugccagaauaccccacccucc

SEQ ID NO: 974961 - RNA, 25 nt, Human
ugccauugacuccucucaacaaccc

SEQ ID NO: 974962 - RNA, 19 nt, Human
ugcucugccacgccccugc

SEQ ID NO: 974963 - RNA, 18 nt, Human
uggagacccuuggauggc

SEQ ID NO: 974964 - RNA, 26 nt, Human
uggagacccuuggauggccgguagac

SEQ ID NO: 974965 - RNA, 25 nt, Human
uggagacccuuggauggccgguagc

SEQ ID NO: 974966 - RNA, 22 nt, Human
uggagcaggaccaggaacccca

SEQ ID NO: 974967 - RNA, 24 nt, Human
uggagcaggaccaggaaccccaaa

SEQ ID NO: 974968 - RNA, 22 nt, Human
uggcccucgcucccuccccucc

SEQ ID NO: 974969 - RNA, 22 nt, Human
uggccgcuaggcuccagaaggu

SEQ ID NO: 974970 - RNA, 21 nt, Human
uggcgcagcgccucugcaguc

SEQ ID NO: 974971 - RNA, 19 nt, Human
uggcuacacucaccuccuc

SEQ ID NO: 974972 - RNA, 26 nt, Human
uggcugagaaccaaccccaaagugaa

SEQ ID NO: 974973 - RNA, 22 nt, Human
uggcuggucugaggcccugacc

SEQ ID NO: 974974 - RNA, 19 nt, Human
ugggacaaccagaugggug

SEQ ID NO: 974975 - RNA, 22 nt, Human
ugggagcagggagggugcaggg

SEQ ID NO: 974976 - RNA, 19 nt, Human
ugggaugccuuucuccaac

SEQ ID NO: 974977 - RNA, 18 nt, Human
ugggcagaggccccuggg

SEQ ID NO: 974978 - RNA, 22 nt, Human
ugggccagccgcccccucccag

SEQ ID NO: 974979 - RNA, 23 nt, Human
ugggcugggagcagggagggugc

SEQ ID NO: 974980 - RNA, 21 nt, Human
ugggcuggggcuuauuccaca

SEQ ID NO: 974981 - RNA, 19 nt, Human
uggggcuuauuccacaaag

SEQ ID NO: 974982 - RNA, 18 nt, Human
ugggugggacaaccagau

SEQ ID NO: 974983 - RNA, 21 nt, Human
uggguuucugccccugccucc

SEQ ID NO: 974984 - RNA, 18 nt, Human
ugguggauucuccagcug

SEQ ID NO: 974985 - RNA, 23 nt, Human
ugguucuggccucugcucugagc

SEQ ID NO: 974986 - RNA, 21 nt, Human
ugucacauccaccaaaacaca

SEQ ID NO: 974987 - RNA, 22 nt, Human
uguggcaauugggaagggugug

SEQ ID NO: 974988 - RNA, 19 nt, Human
uucauacauuucuuuucuc

SEQ ID NO: 974989 - RNA, 18 nt, Human
uuccauggcuucagcugc

SEQ ID NO: 974990 - RNA, 20 nt, Human
uucggcaggacaccccagga

SEQ ID NO: 974991 - RNA, 20 nt, Human
uucugggggcagucauggcc

SEQ ID NO: 974992 - RNA, 24 nt, Human
uugcaguuugucccaccccucccc

SEQ ID NO: 974993 - RNA, 20 nt, Human
uugggaagggugugucagug

SEQ ID NO: 974994 - RNA, 22 nt, Human
uugggcugggagcagggagggu

SEQ ID NO: 974995 - RNA, 23 nt, Human
uuucagaggcugagggcaggagg

SEQ ID NO: 974996 - RNA, 19 nt, Human
uuugucccaccccucccca

SEQ ID NO: 974997 - RNA, 20 nt, Human
aaaaaaccauugaaaccaaa

SEQ ID NO: 974998 - RNA, 19 nt, Human
aaaacagcugcaacaaaga

SEQ ID NO: 974999 - RNA, 18 nt, Human
aaaguagcagagucagug

SEQ ID NO: 975000 - RNA, 18 nt, Human
aagcauuuuuucucucuc

SEQ ID NO: 975001 - RNA, 22 nt, Human
aagcugccuuauaaaucuaagu

SEQ ID NO: 975002 - RNA, 21 nt, Human
aaggagcccgagccggcaccc

SEQ ID NO: 975003 - RNA, 24 nt, Human
aaggagcccgagccggcacccaac

SEQ ID NO: 975004 - RNA, 19 nt, Human
aaugaaaauaacaaaagag

SEQ ID NO: 975005 - RNA, 22 nt, Human
acacacauacagaaaaauacaa

SEQ ID NO: 975006 - RNA, 22 nt, Human
acacaugacucggggcugaaga

SEQ ID NO: 975007 - RNA, 24 nt, Human
acaccagagagugugucucagagc

SEQ ID NO: 975008 - RNA, 23 nt, Human
acacugcugauccuaaagugagc

SEQ ID NO: 975009 - RNA, 19 nt, Human
acagaaaaauacaagacug

SEQ ID NO: 975010 - RNA, 19 nt, Human
accacacaacuaauaaggc

SEQ ID NO: 975011 - RNA, 20 nt, Human
accacacaacuaauaaggcu

SEQ ID NO: 975012 - RNA, 24 nt, Human
accacacaacuaauaaggcuauaa

SEQ ID NO: 975013 - RNA, 19 nt, Human
acggagcauccagcagccc

SEQ ID NO: 975014 - RNA, 21 nt, Human
acuaucuaugugaaccacaca

SEQ ID NO: 975015 - RNA, 26 nt, Human
acuaugacauacaaaacaugcacaau

SEQ ID NO: 975016 - RNA, 19 nt, Human
acugcucugagcaggaagc

SEQ ID NO: 975017 - RNA, 20 nt, Human
agaaaaaggcaaagugaaaa

SEQ ID NO: 975018 - RNA, 19 nt, Human
agaaugccacaacagauga

SEQ ID NO: 975019 - RNA, 22 nt, Human
agacacucacuguccucugcuc

SEQ ID NO: 975020 - RNA, 20 nt, Human
agacauacacucucuaagua

SEQ ID NO: 975021 - RNA, 22 nt, Human
agaguggggaagggcccugggu

SEQ ID NO: 975022 - RNA, 21 nt, Human
agcauuggaagcaacugacca

SEQ ID NO: 975023 - RNA, 22 nt, Human
agcuaccggaggccaccgagcg

SEQ ID NO: 975024 - RNA, 22 nt, Human
aggagcauuuccgcaggagccu

SEQ ID NO: 975025 - RNA, 21 nt, Human
aggcaaagugaaaaacaauuc

SEQ ID NO: 975026 - RNA, 24 nt, Human
aggccaccgagcgcugccaccacc

SEQ ID NO: 975027 - RNA, 20 nt, Human
aggcuuugugcauuuuuguu

SEQ ID NO: 975028 - RNA, 20 nt, Human
aggggccagcccgccagccc

SEQ ID NO: 975029 - RNA, 24 nt, Human
agugaaaaacaauuccagaaaaaa

SEQ ID NO: 975030 - RNA, 23 nt, Human
aucacaaugaacuagagcuguag

SEQ ID NO: 975031 - RNA, 22 nt, Human
aucugcaugguuugccugagcu

SEQ ID NO: 975032 - RNA, 18 nt, Human
augaaaaaacagcaacug

SEQ ID NO: 975033 - RNA, 18 nt, Human
augcaacuuuugaagaca

SEQ ID NO: 975034 - RNA, 24 nt, Human
augcaguucuuuggugaugugccc

SEQ ID NO: 975035 - RNA, 22 nt, Human
auugcuccuaacgcccacuuua

SEQ ID NO: 975036 - RNA, 18 nt, Human
caaguaacuguuuagagc

SEQ ID NO: 975037 - RNA, 20 nt, Human
cacacauacagaaaaauaca

SEQ ID NO: 975038 - RNA, 23 nt, Human
cacaugcuaucaccaauguugcu

SEQ ID NO: 975039 - RNA, 18 nt, Human
caccaauguugcuaagca

SEQ ID NO: 975040 - RNA, 23 nt, Human
caccaauguugcuaagcacugcu

SEQ ID NO: 975041 - RNA, 21 nt, Human
cacuaucuaugugaaccacac

SEQ ID NO: 975042 - RNA, 18 nt, Human
cacucccccucugugguc

SEQ ID NO: 975043 - RNA, 21 nt, Human
cacugcaugaaaaaacagcaa

SEQ ID NO: 975044 - RNA, 18 nt, Human
cagacacucacuguccuc

SEQ ID NO: 975045 - RNA, 19 nt, Human
cagcuaccggaggccaccg

SEQ ID NO: 975046 - RNA, 19 nt, Human
caggggccagcccgccagc

SEQ ID NO: 975047 - RNA, 23 nt, Human
caucaucacuucaucacauuaca

SEQ ID NO: 975048 - RNA, 24 nt, Human
caucaucacuucaucacauuacaa

SEQ ID NO: 975049 - RNA, 18 nt, Human
ccacagucacucccccuc

SEQ ID NO: 975050 - RNA, 22 nt, Human
ccagaaaaaaaaguuacgaagc

SEQ ID NO: 975051 - RNA, 18 nt, Human
ccagaucaaagcggccaa

SEQ ID NO: 975052 - RNA, 20 nt, Human
ccagcccgccagccccucug

SEQ ID NO: 975053 - RNA, 22 nt, Human
ccagcccgccagccccucugcc

SEQ ID NO: 975054 - RNA, 20 nt, Human
cccaacuccguguccaucac

SEQ ID NO: 975055 - RNA, 21 nt, Human
cccucccggccgccgaaaccc

SEQ ID NO: 975056 - RNA, 21 nt, Human
cccugggucccagccacaugc

SEQ ID NO: 975057 - RNA, 23 nt, Human
ccgaaacccccucgugccgaauu

SEQ ID NO: 975058 - RNA, 18 nt, Human
ccgcaggagccugggcaa

SEQ ID NO: 975059 - RNA, 18 nt, Human
ccgcgcccgggccugcca

SEQ ID NO: 975060 - RNA, 19 nt, Human
ccugaagggagcgccuccu

SEQ ID NO: 975061 - RNA, 23 nt, Human
cgacauacuaugacauacaaaac

SEQ ID NO: 975062 - RNA, 20 nt, Human
cggccgccgaaacccccucg

SEQ ID NO: 975063 - RNA, 20 nt, Human
cggcugggaaagaaaagugu

SEQ ID NO: 975064 - RNA, 22 nt, Human
cuaaagugagcaccauauauac

SEQ ID NO: 975065 - RNA, 23 nt, Human
cuagccuaggucuagaaaguaaa

SEQ ID NO: 975066 - RNA, 24 nt, Human
cucugcccacauggucagccacag

SEQ ID NO: 975067 - RNA, 22 nt, Human
cugcucaagaauuucaagcaag

SEQ ID NO: 975068 - RNA, 20 nt, Human
cuuuggugaugugcccacuc

SEQ ID NO: 975069 - RNA, 18 nt, Human
gaaaaacaauuccagaaa

SEQ ID NO: 975070 - RNA, 23 nt, Human
gacauacuaugacauacaaaaca

SEQ ID NO: 975071 - RNA, 18 nt, Human
gagccggcacccaacucc

SEQ ID NO: 975072 - RNA, 20 nt, Human
gagcguccguccgcagcggc

SEQ ID NO: 975073 - RNA, 26 nt, Human
gaucugcaugguuugccugagcuuuc

SEQ ID NO: 975074 - RNA, 24 nt, Human
gcacaaagaccaugcauugucaca

SEQ ID NO: 975075 - RNA, 19 nt, Human
gccagcccgccagccccuc

SEQ ID NO: 975076 - RNA, 24 nt, Human
gccccuuccauaaucagcaauuug

SEQ ID NO: 975077 - RNA, 24 nt, Human
gccgccgaaacccccucgugccga

SEQ ID NO: 975078 - RNA, 19 nt, Human
gccuaggguuuccacauca

SEQ ID NO: 975079 - RNA, 19 nt, Human
ggaaaacagcugcaacaaa

SEQ ID NO: 975080 - RNA, 21 nt, Human
ggaaagaaaagugucuagcag

SEQ ID NO: 975081 - RNA, 19 nt, Human
ggacggagcauccagcagc

SEQ ID NO: 975082 - RNA, 20 nt, Human
ggcacaaggucgcuagcugg

SEQ ID NO: 975083 - RNA, 19 nt, Human
gggaagggcccuggguccc

SEQ ID NO: 975084 - RNA, 19 nt, Human
ggggcugaagaguggggaa

SEQ ID NO: 975085 - RNA, 22 nt, Human
gguuaagggguacaaguaacug

SEQ ID NO: 975086 - RNA, 21 nt, Human
gucaacacugcugauccuaaa

SEQ ID NO: 975087 - RNA, 23 nt, Human
gugaaaaacaauuccagaaaaaa

SEQ ID NO: 975088 - RNA, 20 nt, Human
guuuuggcagaaaaaggcaa

SEQ ID NO: 975089 - RNA, 21 nt, Human
uaaacaaaggaguaagacacc

SEQ ID NO: 975090 - RNA, 21 nt, Human
uaagacaaacaggugugggua

SEQ ID NO: 975091 - RNA, 22 nt, Human
uaagacucccagggcacugcau

SEQ ID NO: 975092 - RNA, 21 nt, Human
uacaaggagcccgagccggca

SEQ ID NO: 975093 - RNA, 21 nt, Human
uacaguguccuacaagauaga

SEQ ID NO: 975094 - RNA, 22 nt, Human
uacauaauuauauauauauaca

SEQ ID NO: 975095 - RNA, 21 nt, Human
uaccccaagggucaaccacac

SEQ ID NO: 975096 - RNA, 21 nt, Human
uaccugucaauguuuacacaa

SEQ ID NO: 975097 - RNA, 20 nt, Human
uagaauugccagaaguacau

SEQ ID NO: 975098 - RNA, 18 nt, Human
uagagcuguagcuuaaaa

SEQ ID NO: 975099 - RNA, 22 nt, Human
uagcuuaagacaaacaggugug

SEQ ID NO: 975100 - RNA, 22 nt, Human
uaguucuucuaucuacauggaa

SEQ ID NO: 975101 - RNA, 18 nt, Human
uauaaaaaaccauugaaa

SEQ ID NO: 975102 - RNA, 22 nt, Human
uauaagaauaucuggugaauac

SEQ ID NO: 975103 - RNA, 18 nt, Human
uauauauacacacauaca

SEQ ID NO: 975104 - RNA, 24 nt, Human
uauccugcaaacugcauacugaau

SEQ ID NO: 975105 - RNA, 18 nt, Human
uaucuggugaauacaaaa

SEQ ID NO: 975106 - RNA, 22 nt, Human
uaugacauacaaaacaugcaca

SEQ ID NO: 975107 - RNA, 24 nt, Human
uauuuggauuuuuuuucccauuug

SEQ ID NO: 975108 - RNA, 24 nt, Human
ucaaccagcauuggaagcaacuga

SEQ ID NO: 975109 - RNA, 23 nt, Human
ucacaggaaaaaguauuuacacu

SEQ ID NO: 975110 - RNA, 19 nt, Human
ucacauuacaaaauaagau

SEQ ID NO: 975111 - RNA, 21 nt, Human
ucacauuacaaaauaagauug

SEQ ID NO: 975112 - RNA, 21 nt, Human
uccaaggcuauacauaaucac

SEQ ID NO: 975113 - RNA, 24 nt, Human
uccacaauauuuaauuuauacacu

SEQ ID NO: 975114 - RNA, 24 nt, Human
ucggcacgaggccgcgcccgggcc

SEQ ID NO: 975115 - RNA, 24 nt, Human
ucggucucacagcuauucuuaaaa

SEQ ID NO: 975116 - RNA, 22 nt, Human
ucuaaguagaguuaagacauca

SEQ ID NO: 975117 - RNA, 20 nt, Human
ucucaguccgucaccucaga

SEQ ID NO: 975118 - RNA, 25 nt, Human
ucuguacuaggcccuauaguucuuc

SEQ ID NO: 975119 - RNA, 21 nt, Human
ugaaaaaacagcaacuggccc

SEQ ID NO: 975120 - RNA, 18 nt, Human
ugaagaguggggaagggc

SEQ ID NO: 975121 - RNA, 23 nt, Human
ugcacaaagaccaugcauuguca

SEQ ID NO: 975122 - RNA, 21 nt, Human
ugcccacauggucagccacag

SEQ ID NO: 975123 - RNA, 22 nt, Human
ugccugagcuuugaacagucag

SEQ ID NO: 975124 - RNA, 23 nt, Human
ugcuagcggccagauggggccac

SEQ ID NO: 975125 - RNA, 18 nt, Human
uggaaaacagcugcaaca

SEQ ID NO: 975126 - RNA, 19 nt, Human
uggaaaacagcugcaacaa

SEQ ID NO: 975127 - RNA, 18 nt, Human
uggcuccaggccuguggg

SEQ ID NO: 975128 - RNA, 19 nt, Human
uggggaagggcccuggguc

SEQ ID NO: 975129 - RNA, 21 nt, Human
uggucuccugaagggagcgcc

SEQ ID NO: 975130 - RNA, 19 nt, Human
uggugaugugcccacucuc

SEQ ID NO: 975131 - RNA, 22 nt, Human
uguacaggaauagguuaaagca

SEQ ID NO: 975132 - RNA, 24 nt, Human
uguggucuccugaagggagcgccu

SEQ ID NO: 975133 - RNA, 18 nt, Human
ugugguuuaagguucuca

SEQ ID NO: 975134 - RNA, 23 nt, Human
uguuagacagacauacacucucu

SEQ ID NO: 975135 - RNA, 21 nt, Human
uuaaaauaguaaaaccaaaug

SEQ ID NO: 975136 - RNA, 19 nt, Human
uucuggcccuuuauaagau

SEQ ID NO: 975137 - RNA, 24 nt, Human
uuuacacugcuuggaaaacagcug

SEQ ID NO: 975138 - RNA, 18 nt, Human
uuugccaacauuugugug

SEQ ID NO: 975139 - RNA, 20 nt, Human
aagaaccaaaagcaggaaac

SEQ ID NO: 975140 - RNA, 20 nt, Human
aagcaggaaacggagccagg

SEQ ID NO: 975141 - RNA, 24 nt, Human
agaauacaaauaaaaguuuauugu

SEQ ID NO: 975142 - RNA, 24 nt, Human
agcgagguagaaggcgcacgaacc

SEQ ID NO: 975143 - RNA, 23 nt, Human
auaauuuaaguccuucacaaaaa

SEQ ID NO: 975144 - RNA, 23 nt, Human
auaguucaccaaggcuaaagaaa

SEQ ID NO: 975145 - RNA, 25 nt, Human
caaaacaaacacuguaaauaacacc

SEQ ID NO: 975146 - RNA, 18 nt, Human
cagcuucgcgcuucgucc

SEQ ID NO: 975147 - RNA, 19 nt, Human
caggaaaaccgaaacagcg

SEQ ID NO: 975148 - RNA, 24 nt, Human
caucucuaacuauuaaaaugaccc

SEQ ID NO: 975149 - RNA, 20 nt, Human
ccaaaagcaggaaacggagc

SEQ ID NO: 975150 - RNA, 18 nt, Human
ccaccuaaggccuacgcc

SEQ ID NO: 975151 - RNA, 19 nt, Human
gaaacagcgagguagaagg

SEQ ID NO: 975152 - RNA, 19 nt, Human
gaacccaccuaaggccuac

SEQ ID NO: 975153 - RNA, 24 nt, Human
gagguagaaggcgcacgaacccac

SEQ ID NO: 975154 - RNA, 22 nt, Human
ggagacaguaaaaaaucccagc

SEQ ID NO: 975155 - RNA, 19 nt, Human
uaaaaugacccagccaaau

SEQ ID NO: 975156 - RNA, 21 nt, Human
uaaguccuucacaaaaauuuc

SEQ ID NO: 975157 - RNA, 19 nt, Human
uucgcgcuucguccgcucc

SEQ ID NO: 975158 - RNA, 20 nt, Human
uucguccgcucccagcugca

SEQ ID NO: 975159 - RNA, 23 nt, Human
uuuuuuuuuuuugcacagaauac

SEQ ID NO: 975160 - RNA, 23 nt, Human
uuuuuuuuuuuuuuuuugcacag

SEQ ID NO: 975161 - RNA, 27 nt, Human
uuuuuuuuuuuuuuuuuuuuuuugggg

SEQ ID NO: 975162 - RNA, 20 nt, Human
aaacaaacacaaccuguaca

SEQ ID NO: 975163 - RNA, 18 nt, Human
aaagcaaaagaaacaaaa

SEQ ID NO: 975164 - RNA, 27 nt, Human
aaccuguacaaaaaauaucccaaaucu

SEQ ID NO: 975165 - RNA, 25 nt, Human
aagcaaaagaaacaaaaguaagaca

SEQ ID NO: 975166 - RNA, 21 nt, Human
aagccucugagccuauuaugg

SEQ ID NO: 975167 - RNA, 22 nt, Human
aagcgccuacuccaggggcucc

SEQ ID NO: 975168 - RNA, 20 nt, Human
accauauucaaauaaggcag

SEQ ID NO: 975169 - RNA, 18 nt, Human
acccuuaauuuagaagac

SEQ ID NO: 975170 - RNA, 21 nt, Human
aggaaacuacuaaaacuuuga

SEQ ID NO: 975171 - RNA, 23 nt, Human
aguaggucuuuucucuuuuauuc

SEQ ID NO: 975172 - RNA, 18 nt, Human
augaauggccggaagcgc

SEQ ID NO: 975173 - RNA, 18 nt, Human
augcagcugggcugaagc

SEQ ID NO: 975174 - RNA, 18 nt, Human
caacaaagcaaugacccu

SEQ ID NO: 975175 - RNA, 21 nt, Human
caacuaugcagcugggcugaa

SEQ ID NO: 975176 - RNA, 19 nt, Human
caacuuuuuaccagguacc

SEQ ID NO: 975177 - RNA, 22 nt, Human
cacuaaguuucagccaaccaaa

SEQ ID NO: 975178 - RNA, 18 nt, Human
cagccaaccaaagacagc

SEQ ID NO: 975179 - RNA, 23 nt, Human
cagcugggcugaagccucugagc

SEQ ID NO: 975180 - RNA, 23 nt, Human
ccaaagacagcgaacuguucaaa

SEQ ID NO: 975181 - RNA, 19 nt, Human
ccaaccaaagacagcgaac

SEQ ID NO: 975182 - RNA, 21 nt, Human
cgccgucacccucuggguccg

SEQ ID NO: 975183 - RNA, 24 nt, Human
cuaaaacuuugauauacuaaauag

SEQ ID NO: 975184 - RNA, 21 nt, Human
cuagaccccaucccauaagga

SEQ ID NO: 975185 - RNA, 21 nt, Human
cuagcggcgccgucacccucu

SEQ ID NO: 975186 - RNA, 28 nt, Human
cucacugugguaauuucgugaaugugga

SEQ ID NO: 975187 - RNA, 18 nt, Human
cugaacuguaacuaaucc

SEQ ID NO: 975188 - RNA, 20 nt, Human
gacaacaaagcaaugacccu

SEQ ID NO: 975189 - RNA, 24 nt, Human
gacccuuaauuuagaagacaacuu

SEQ ID NO: 975190 - RNA, 21 nt, Human
gagcgcgcggagcacuggggg

SEQ ID NO: 975191 - RNA, 23 nt, Human
gcuagacaacaaagcaaugaccc

SEQ ID NO: 975192 - RNA, 19 nt, Human
gcucaauuaaacucugccc

SEQ ID NO: 975193 - RNA, 22 nt, Human
guuaaguuuagccuaaagucuc

SEQ ID NO: 975194 - RNA, 24 nt, Human
uaaacaaacacaaccuguacagcg

SEQ ID NO: 975195 - RNA, 25 nt, Human
uaaaucuucaacuaugcagcugggc

SEQ ID NO: 975196 - RNA, 23 nt, Human
uaaggcaaacgcugaacuguaac

SEQ ID NO: 975197 - RNA, 24 nt, Human
uaaucuagugaccauuaacuccaa

SEQ ID NO: 975198 - RNA, 20 nt, Human
uaccagguaccuaagacucc

SEQ ID NO: 975199 - RNA, 25 nt, Human
uacccuacucuuguggcaaucacua

SEQ ID NO: 975200 - RNA, 20 nt, Human
uagaagacaacuuuuuacca

SEQ ID NO: 975201 - RNA, 19 nt, Human
uagcggcgccgucacccuc

SEQ ID NO: 975202 - RNA, 19 nt, Human
uaugaauggccggaagcgc

SEQ ID NO: 975203 - RNA, 19 nt, Human
ucaggggcuaccugauuug

SEQ ID NO: 975204 - RNA, 23 nt, Human
ucaucauaaaaagaaaaagaaaa

SEQ ID NO: 975205 - RNA, 24 nt, Human
ucaucauaaaaagaaaaagaaaaa

SEQ ID NO: 975206 - RNA, 26 nt, Human
uccccuguggguaggugccacagaau

SEQ ID NO: 975207 - RNA, 21 nt, Human
ucucuuuuauucucaaagaac

SEQ ID NO: 975208 - RNA, 19 nt, Human
ugauuugugaauuguccuu

SEQ ID NO: 975209 - RNA, 25 nt, Human
ugccacagaaugaagaguaaagcaa

SEQ ID NO: 975210 - RNA, 19 nt, Human
uggaggaaacuacuaaaac

SEQ ID NO: 975211 - RNA, 26 nt, Human
uggaguaaaacucaggaaaggagaau

SEQ ID NO: 975212 - RNA, 24 nt, Human
uuaaaaagcaaaagaaacaaaagu

SEQ ID NO: 975213 - RNA, 22 nt, Human
uuaaaaccugaucaacuaaaaa

SEQ ID NO: 975214 - RNA, 20 nt, Human
uuagaagacaacuuuuuacc

SEQ ID NO: 975215 - RNA, 26 nt, Human
uucaacuaugcagcugggcugaagcc

SEQ ID NO: 975216 - RNA, 19 nt, Human
uuuacauaucucaaguuca

SEQ ID NO: 975217 - RNA, 20 nt, Human
uuucucaguacauagaacug

SEQ ID NO: 975218 - RNA, 21 nt, Human
uuuuccauacaucacuuuccu

SEQ ID NO: 975219 - RNA, 24 nt, Human
ucaacaccaauggcagcggucuuc

SEQ ID NO: 975220 - RNA, 24 nt, Human
acaaaguucuguucaacuuagaaa

SEQ ID NO: 975221 - RNA, 28 nt, Human
agcacccacuccaaugaacucagauaac

SEQ ID NO: 975222 - RNA, 22 nt, Human
aggaagagaguucggcucuggc

SEQ ID NO: 975223 - RNA, 22 nt, Human
caaaguucuguucaacuuagaa

SEQ ID NO: 975224 - RNA, 23 nt, Human
cugcgaaagaugcuacggcgaag

SEQ ID NO: 975225 - RNA, 20 nt, Human
gaaagaugcuacggcgaagg

SEQ ID NO: 975226 - RNA, 24 nt, Human
ggcaggaagagaguucggcucugg

SEQ ID NO: 975227 - RNA, 18 nt, Human
uccgcugcgaaagaugcu

SEQ ID NO: 975228 - RNA, 22 nt, Human
ucuaaagagaaagauggcaaaa

SEQ ID NO: 975229 - RNA, 21 nt, Human
uggcaaaagauaccuagauau

SEQ ID NO: 975230 - RNA, 23 nt, Human
uuccccugaucuaaagagaaaga

SEQ ID NO: 975231 - RNA, 18 nt, Human
uaaaaaaaaucccccaca

SEQ ID NO: 975232 - RNA, 21 nt, Human
uaaaaaaaaucccccacaaaa

SEQ ID NO: 975233 - RNA, 21 nt, Human
aaacuggaaugagagcugaua

SEQ ID NO: 975234 - RNA, 22 nt, Human
aacccuuugaaaucaaugucaa

SEQ ID NO: 975235 - RNA, 21 nt, Human
aauaugaaaauguacaugacc

SEQ ID NO: 975236 - RNA, 18 nt, Human
caggcccuauggagagag

SEQ ID NO: 975237 - RNA, 19 nt, Human
cucccgcuguaggcccggc

SEQ ID NO: 975238 - RNA, 24 nt, Human
gaacgcaacgcacggcuuuccuca

SEQ ID NO: 975239 - RNA, 21 nt, Human
gaugccuuggaacgcaacgca

SEQ ID NO: 975240 - RNA, 23 nt, Human
gcaacgcacggcuuuccucacgc

SEQ ID NO: 975241 - RNA, 21 nt, Human
ggcuuuccucacgcucccgcu

SEQ ID NO: 975242 - RNA, 22 nt, Human
uaacaaaaagucuaauaugaaa

SEQ ID NO: 975243 - RNA, 22 nt, Human
uaagauucuuucacuuuaaugc

SEQ ID NO: 975244 - RNA, 25 nt, Human
uauauucagaacaucugagaaagca

SEQ ID NO: 975245 - RNA, 22 nt, Human
ucacagaugccuuggaacgcaa

SEQ ID NO: 975246 - RNA, 18 nt, Human
ucacgcucccgcuguagg

SEQ ID NO: 975247 - RNA, 20 nt, Human
ucagaacaucugagaaagca

SEQ ID NO: 975248 - RNA, 23 nt, Human
ucuauauucagaacaucugagaa

SEQ ID NO: 975249 - RNA, 18 nt, Human
uggaaugagagcugauau

SEQ ID NO: 975250 - RNA, 21 nt, Human
uggagagaggacauggguuuc

SEQ ID NO: 975251 - RNA, 19 nt, Human
uuagaaaaaacuggaaugg

SEQ ID NO: 975252 - RNA, 22 nt, Human
uuuuuuuuuuuuucgcauuuaa

SEQ ID NO: 975253 - RNA, 18 nt, Human
uuuuuuuuuuuuuuuucg

SEQ ID NO: 975254 - RNA, 20 nt, Human
uuuuuuuuuuuuuuuuucgc

SEQ ID NO: 975255 - RNA, 24 nt, Human
aacccccagacuccgacccgcgcu

SEQ ID NO: 975256 - RNA, 20 nt, Human
accauguuuucuuuguuugc

SEQ ID NO: 975257 - RNA, 21 nt, Human
agagggagcagggcgcggguc

SEQ ID NO: 975258 - RNA, 20 nt, Human
cccccagacuccgacccgcc

SEQ ID NO: 975259 - RNA, 20 nt, Human
cccuacuuggagcagaucga

SEQ ID NO: 975260 - RNA, 26 nt, Human
gggcgcgaacccccagacuccgaccc

SEQ ID NO: 975261 - RNA, 20 nt, Human
uggagcagaucgagucucag

SEQ ID NO: 975262 - RNA, 20 nt, Human
uucaaaauaccauguuuucu

SEQ ID NO: 975263 - RNA, 24 nt, Human
aaaaaaacacacacggacagucgg

SEQ ID NO: 975264 - RNA, 18 nt, Human
aaccaaaaaaaacacaca

SEQ ID NO: 975265 - RNA, 26 nt, Human
aagcaacccugaacccuggggagggu

SEQ ID NO: 975266 - RNA, 21 nt, Human
acaggaacccuucacaguuga

SEQ ID NO: 975267 - RNA, 23 nt, Human
acccuucucuccccagccuggag

SEQ ID NO: 975268 - RNA, 20 nt, Human
agaacgggagggcgcuaaac

SEQ ID NO: 975269 - RNA, 21 nt, Human
agacaaauggacagaacggga

SEQ ID NO: 975270 - RNA, 18 nt, Human
agaggcuggaucauggug

SEQ ID NO: 975271 - RNA, 23 nt, Human
aggaacccuucacaguugacguc

SEQ ID NO: 975272 - RNA, 23 nt, Human
caaauggacagaacgggagggcg

SEQ ID NO: 975273 - RNA, 22 nt, Human
caacagguacaaaauguuucaa

SEQ ID NO: 975274 - RNA, 19 nt, Human
caaccaaaaaaaacacacc

SEQ ID NO: 975275 - RNA, 19 nt, Human
cacccuucucuccccagcc

SEQ ID NO: 975276 - RNA, 25 nt, Human
cacccuucucuccccagccuggaga

SEQ ID NO: 975277 - RNA, 18 nt, Human
caccuccaugccuucugc

SEQ ID NO: 975278 - RNA, 18 nt, Human
caggagugugaggcagag

SEQ ID NO: 975279 - RNA, 22 nt, Human
ccaaaaaaaacacacacggaca

SEQ ID NO: 975280 - RNA, 19 nt, Human
ccaaccaaaaaaaacacac

SEQ ID NO: 975281 - RNA, 21 nt, Human
ccagccagcacagggaagcug

SEQ ID NO: 975282 - RNA, 22 nt, Human
ccucgccuggucacccuucucu

SEQ ID NO: 975283 - RNA, 23 nt, Human
ccucgccuggucacccuucucuc

SEQ ID NO: 975284 - RNA, 24 nt, Human
cgggagggcgcuaaacgcaaucac

SEQ ID NO: 975285 - RNA, 23 nt, Human
cuccccagccuggagacagacca

SEQ ID NO: 975286 - RNA, 21 nt, Human
cuccucgccuggucacccuuc

SEQ ID NO: 975287 - RNA, 22 nt, Human
cucuccccagccuggagacaga

SEQ ID NO: 975288 - RNA, 22 nt, Human
cugcaaagcaacccugaacccu

SEQ ID NO: 975289 - RNA, 18 nt, Human
gacagucggcagacaaga

SEQ ID NO: 975290 - RNA, 20 nt, Human
gcaaagcaacccugaacccu

SEQ ID NO: 975291 - RNA, 21 nt, Human
gcaaagcaacccugaacccug

SEQ ID NO: 975292 - RNA, 24 nt, Human
ggggacuccagccagcacagggaa

SEQ ID NO: 975293 - RNA, 19 nt, Human
ggggaggguggguucagag

SEQ ID NO: 975294 - RNA, 20 nt, Human
ggguggugaggaccgggaag

SEQ ID NO: 975295 - RNA, 22 nt, Human
gguggcugauaucucuggggac

SEQ ID NO: 975296 - RNA, 22 nt, Human
gguggugaggaccgggaaggaa

SEQ ID NO: 975297 - RNA, 19 nt, Human
uaaaaucaacagguacaaa

SEQ ID NO: 975298 - RNA, 22 nt, Human
uaaaaucaacagguacaaaaug

SEQ ID NO: 975299 - RNA, 20 nt, Human
uaaacgcaaucacaggaacc

SEQ ID NO: 975300 - RNA, 23 nt, Human
uaaacugauaaauaaaaucaaca

SEQ ID NO: 975301 - RNA, 21 nt, Human
uagaaaaauaaacugauaaau

SEQ ID NO: 975302 - RNA, 26 nt, Human
ucacccuucucuccccagccuggaga

SEQ ID NO: 975303 - RNA, 18 nt, Human
ucaugguggggcagaggg

SEQ ID NO: 975304 - RNA, 22 nt, Human
uuuuuuuuuuuuuuuuuuucag

SEQ ID NO: 975305 - RNA, 22 nt, Human
aagagaaaaaccagacucccca

SEQ ID NO: 975306 - RNA, 22 nt, Human
aagcgcccagggcagagggcag

SEQ ID NO: 975307 - RNA, 22 nt, Human
accccaggguacuccagcuuca

SEQ ID NO: 975308 - RNA, 21 nt, Human
agaccaauccagucucccuca

SEQ ID NO: 975309 - RNA, 24 nt, Human
aggagagagacaggaugaagagaa

SEQ ID NO: 975310 - RNA, 26 nt, Human
aggcagucgguggaggcccagcucag

SEQ ID NO: 975311 - RNA, 21 nt, Human
aggccggggcggggcccggga

SEQ ID NO: 975312 - RNA, 19 nt, Human
agggcagcgggggcccggc

SEQ ID NO: 975313 - RNA, 23 nt, Human
aucuccucuucuuucucuugcug

SEQ ID NO: 975314 - RNA, 20 nt, Human
caccccaucacaggcagagu

SEQ ID NO: 975315 - RNA, 18 nt, Human
cacucuguccugcgucug

SEQ ID NO: 975316 - RNA, 22 nt, Human
cagcccaggggugagcaggcag

SEQ ID NO: 975317 - RNA, 19 nt, Human
cagccgccacccuaccccg

SEQ ID NO: 975318 - RNA, 19 nt, Human
caggcagaguccacucugu

SEQ ID NO: 975319 - RNA, 23 nt, Human
cagugcuggggagggggccucgg

SEQ ID NO: 975320 - RNA, 22 nt, Human
ccccaggguacuccagcuucag

SEQ ID NO: 975321 - RNA, 23 nt, Human
ccccaggguacuccagcuucaga

SEQ ID NO: 975322 - RNA, 18 nt, Human
ccccgggccgccgcgcuc

SEQ ID NO: 975323 - RNA, 19 nt, Human
cccucagcccaggggugag

SEQ ID NO: 975324 - RNA, 20 nt, Human
ccgccgcgcucgcccugucc

SEQ ID NO: 975325 - RNA, 21 nt, Human
ccgccgcgcucgcccuguccc

SEQ ID NO: 975326 - RNA, 18 nt, Human
ccgcuccgaccaagcgcc

SEQ ID NO: 975327 - RNA, 18 nt, Human
ccucuccucucccuuccc

SEQ ID NO: 975328 - RNA, 21 nt, Human
ccuuguuccucuccucucccu

SEQ ID NO: 975329 - RNA, 22 nt, Human
cgcccagggcagagggcagcgg

SEQ ID NO: 975330 - RNA, 21 nt, Human
cggcagcucagcuguuggcug

SEQ ID NO: 975331 - RNA, 18 nt, Human
cggcugggccagccgcca

SEQ ID NO: 975332 - RNA, 20 nt, Human
cggggcggggcccgggagcc

SEQ ID NO: 975333 - RNA, 22 nt, Human
cugggccccaagaccaauccag

SEQ ID NO: 975334 - RNA, 18 nt, Human
cuggggagggggccucgg

SEQ ID NO: 975335 - RNA, 24 nt, Human
cugggggcggggcuacccuggggu

SEQ ID NO: 975336 - RNA, 21 nt, Human
cuuucucuugcugcugacccc

SEQ ID NO: 975337 - RNA, 23 nt, Human
gaggggggcagcaggaaggccac

SEQ ID NO: 975338 - RNA, 21 nt, Human
gcaaaugcaggaggccggggc

SEQ ID NO: 975339 - RNA, 20 nt, Human
gcagcaggaaggccacccca

SEQ ID NO: 975340 - RNA, 27 nt, Human
gcagcaggaaggccaccccaucacagg

SEQ ID NO: 975341 - RNA, 22 nt, Human
gccccaagaccaauccagucuc

SEQ ID NO: 975342 - RNA, 22 nt, Human
gcccugucccgcuuugcccagc

SEQ ID NO: 975343 - RNA, 21 nt, Human
gccgccgcgcucgcccugucc

SEQ ID NO: 975344 - RNA, 19 nt, Human
gccucgggcaaaugcagga

SEQ ID NO: 975345 - RNA, 18 nt, Human
ggacaccccucuucaggg

SEQ ID NO: 975346 - RNA, 24 nt, Human
ggcaaaugcaggaggccggggcgg

SEQ ID NO: 975347 - RNA, 18 nt, Human
ggccaccccaucacaggc

SEQ ID NO: 975348 - RNA, 18 nt, Human
gggcagagggcagcgggg

SEQ ID NO: 975349 - RNA, 20 nt, Human
gggcagagggcagcgggggc

SEQ ID NO: 975350 - RNA, 23 nt, Human
gguggcagggcugaggggaaaaa

SEQ ID NO: 975351 - RNA, 18 nt, Human
gguguggccagugcuggg

SEQ ID NO: 975352 - RNA, 24 nt, Human
gguugggguuucggaggcccuugu

SEQ ID NO: 975353 - RNA, 18 nt, Human
guccugggccccaagacc

SEQ ID NO: 975354 - RNA, 19 nt, Human
ucaggauccgcacaggggc

SEQ ID NO: 975355 - RNA, 21 nt, Human
uccugggccccaagaccaauc

SEQ ID NO: 975356 - RNA, 21 nt, Human
ucgccuccgagcccccgggcc

SEQ ID NO: 975357 - RNA, 21 nt, Human
ucucccuucccucagcccagg

SEQ ID NO: 975358 - RNA, 20 nt, Human
ucuggguccugggccccaag

SEQ ID NO: 975359 - RNA, 20 nt, Human
ucuguccugcgucugggucc

SEQ ID NO: 975360 - RNA, 22 nt, Human
ucuguguacacaaaauaucucu

SEQ ID NO: 975361 - RNA, 22 nt, Human
ucuucuuucucuugcugcugac

SEQ ID NO: 975362 - RNA, 21 nt, Human
ugaagagaaaaaccagacucc

SEQ ID NO: 975363 - RNA, 24 nt, Human
ugagcaggcagucgguggaggccc

SEQ ID NO: 975364 - RNA, 24 nt, Human
ugccugugugcucacaggcuguuu

SEQ ID NO: 975365 - RNA, 22 nt, Human
ugcuggggagggggccucgggc

SEQ ID NO: 975366 - RNA, 23 nt, Human
uggacaccccucuucagggcuag

SEQ ID NO: 975367 - RNA, 27 nt, Human
uggcuggggucaggauccgcacagggg

SEQ ID NO: 975368 - RNA, 21 nt, Human
uggcuuaggggccucgaggag

SEQ ID NO: 975369 - RNA, 20 nt, Human
ugggaccucuggggguggcu

SEQ ID NO: 975370 - RNA, 22 nt, Human
ugggggcggggcuacccugggg

SEQ ID NO: 975371 - RNA, 20 nt, Human
ugggguguggccagugcugg

SEQ ID NO: 975372 - RNA, 21 nt, Human
uggguccugggccccaagacc

SEQ ID NO: 975373 - RNA, 19 nt, Human
ugguggaggggggcagcag

SEQ ID NO: 975374 - RNA, 24 nt, Human
ugucauggacaccccucuucaggg

SEQ ID NO: 975375 - RNA, 23 nt, Human
uguggccagugcuggggaggggg

SEQ ID NO: 975376 - RNA, 20 nt, Human
uguuuauuuauccaagagua

SEQ ID NO: 975377 - RNA, 23 nt, Human
uugcccagcccgcuccgaccaag

SEQ ID NO: 975378 - RNA, 19 nt, Human
aagauaaaaacaauuggaa

SEQ ID NO: 975379 - RNA, 23 nt, Human
aagcaacugagugagaacaagcu

SEQ ID NO: 975380 - RNA, 19 nt, Human
aauuccucccagaccccua

SEQ ID NO: 975381 - RNA, 21 nt, Human
acacaagggcaaauuuacauc

SEQ ID NO: 975382 - RNA, 22 nt, Human
accacaaaggaugucguuugaa

SEQ ID NO: 975383 - RNA, 25 nt, Human
acugaaggacagagacuguguucca

SEQ ID NO: 975384 - RNA, 18 nt, Human
agaauuccucccagaccc

SEQ ID NO: 975385 - RNA, 22 nt, Human
agaauuguuucucacaccauau

SEQ ID NO: 975386 - RNA, 22 nt, Human
agucauggggugugucaaugaa

SEQ ID NO: 975387 - RNA, 22 nt, Human
auauuauuuucucuacaaaagg

SEQ ID NO: 975388 - RNA, 21 nt, Human
aucagcaaauuaaagugcauc

SEQ ID NO: 975389 - RNA, 22 nt, Human
caaaaaagcuguacugaaggac

SEQ ID NO: 975390 - RNA, 23 nt, Human
caaaauaccuaaaacaaccugca

SEQ ID NO: 975391 - RNA, 20 nt, Human
caaagcaacugagugagaac

SEQ ID NO: 975392 - RNA, 23 nt, Human
cagugauccaagggagaauaguc

SEQ ID NO: 975393 - RNA, 24 nt, Human
cauucuguuuauuucaagaagugu

SEQ ID NO: 975394 - RNA, 21 nt, Human
ccuccagaauuccucccagac

SEQ ID NO: 975395 - RNA, 19 nt, Human
ccucccagaccccuauaga

SEQ ID NO: 975396 - RNA, 18 nt, Human
cgggggacauuuuaguuc

SEQ ID NO: 975397 - RNA, 20 nt, Human
cuccuccagaauuccuccca

SEQ ID NO: 975398 - RNA, 21 nt, Human
cugaguaaauugcacaccucu

SEQ ID NO: 975399 - RNA, 21 nt, Human
gaaauuuuccaucacucauaa

SEQ ID NO: 975400 - RNA, 22 nt, Human
gaccccuauagaaaaaugauuc

SEQ ID NO: 975401 - RNA, 18 nt, Human
gagcaagaguacuccuca

SEQ ID NO: 975402 - RNA, 21 nt, Human
gaggggguaauagggaggcac

SEQ ID NO: 975403 - RNA, 25 nt, Human
gcaauacacuuacugguacaaagca

SEQ ID NO: 975404 - RNA, 20 nt, Human
uaaaacaaccugcauaguug

SEQ ID NO: 975405 - RNA, 22 nt, Human
uaaaacaaccugcauaguuggc

SEQ ID NO: 975406 - RNA, 22 nt, Human
uaaggaagggggccgggaggcg

SEQ ID NO: 975407 - RNA, 22 nt, Human
uaaggcuuucaaauuucccagc

SEQ ID NO: 975408 - RNA, 27 nt, Human
uaaucuguggagcaagaguacuccucu

SEQ ID NO: 975409 - RNA, 21 nt, Human
uacaaagcaacugagugagaa

SEQ ID NO: 975410 - RNA, 21 nt, Human
uacaaaucucuuucaaaccaa

SEQ ID NO: 975411 - RNA, 19 nt, Human
uacaucagcaaauuaaagu

SEQ ID NO: 975412 - RNA, 18 nt, Human
uagaugucuuuucagucu

SEQ ID NO: 975413 - RNA, 19 nt, Human
uagcucuccacccucuuuu

SEQ ID NO: 975414 - RNA, 18 nt, Human
uaggacaaaauaccuaaa

SEQ ID NO: 975415 - RNA, 19 nt, Human
uaggacaaaauaccuaaaa

SEQ ID NO: 975416 - RNA, 21 nt, Human
uagguaaaauacaaaucucuu

SEQ ID NO: 975417 - RNA, 20 nt, Human
ucaaaaaagcuguacugaag

SEQ ID NO: 975418 - RNA, 21 nt, Human
ucaaaaaagcuguacugaagg

SEQ ID NO: 975419 - RNA, 20 nt, Human
ucaaaccaaggaagaaauga

SEQ ID NO: 975420 - RNA, 20 nt, Human
ucacauuguaucuaucaugg

SEQ ID NO: 975421 - RNA, 18 nt, Human
uccaagggagaauagucc

SEQ ID NO: 975422 - RNA, 23 nt, Human
uccacaugaccuucuuuuucugc

SEQ ID NO: 975423 - RNA, 19 nt, Human
uccacccucuuuucacaaa

SEQ ID NO: 975424 - RNA, 23 nt, Human
ucccucauaauacaagauagggc

SEQ ID NO: 975425 - RNA, 22 nt, Human
uccuuuggaaguucuucggaau

SEQ ID NO: 975426 - RNA, 23 nt, Human
ucuacaaaagguuuuggguucac

SEQ ID NO: 975427 - RNA, 22 nt, Human
ucuccacccucuuuucacaaaa

SEQ ID NO: 975428 - RNA, 27 nt, Human
ucugccgaaauuuugauuugccuccaa

SEQ ID NO: 975429 - RNA, 19 nt, Human
ugaaggacagagacugugu

SEQ ID NO: 975430 - RNA, 21 nt, Human
ugagaacaagcuguucuguuc

SEQ ID NO: 975431 - RNA, 23 nt, Human
ugaguagcucuccacccucuuuu

SEQ ID NO: 975432 - RNA, 24 nt, Human
ugagugagaacaagcuguucuguu

SEQ ID NO: 975433 - RNA, 20 nt, Human
ugccgagcaaugaaauuaga

SEQ ID NO: 975434 - RNA, 23 nt, Human
uggaccuuugagcauuucaaccc

SEQ ID NO: 975435 - RNA, 23 nt, Human
uggcauauuugauugacuuuggc

SEQ ID NO: 975436 - RNA, 22 nt, Human
uguagagggagggguacuuuuc

SEQ ID NO: 975437 - RNA, 23 nt, Human
ugucccucauaauacaagauagg

SEQ ID NO: 975438 - RNA, 20 nt, Human
ugugucaaugaagaguucag

SEQ ID NO: 975439 - RNA, 19 nt, Human
uuauauuauuuucucuaca

SEQ ID NO: 975440 - RNA, 22 nt, Human
uucaaaccaaggaagaaaugag

SEQ ID NO: 975441 - RNA, 28 nt, Human
uucaaauaauuuauucuuuugucuccac

SEQ ID NO: 975442 - RNA, 21 nt, Human
uuccaaaacaguugcaauccc

SEQ ID NO: 975443 - RNA, 20 nt, Human
uucccagccuuucacauuua

SEQ ID NO: 975444 - RNA, 26 nt, Human
uucucgggcaaucucaacauucuggg

SEQ ID NO: 975445 - RNA, 18 nt, Human
uugcuggggucacuucuc

SEQ ID NO: 975446 - RNA, 24 nt, Human
uuucacauuguaucuaucaugggu

SEQ ID NO: 975447 - RNA, 21 nt, Human
uuuuaugucccucauaauaca

SEQ ID NO: 975448 - RNA, 19 nt, Human
uuuugagguuccacaugac

SEQ ID NO: 975449 - RNA, 23 nt, Human
auaaaacaacacaaaguugcaau

SEQ ID NO: 975450 - RNA, 19 nt, Human
cacaacuauaggcucauca

SEQ ID NO: 975451 - RNA, 21 nt, Human
uaucacaacuauaggcucauu

SEQ ID NO: 975452 - RNA, 19 nt, Human
ucagcacucaacagaaaca

SEQ ID NO: 975453 - RNA, 19 nt, Human
aacaccagacccaaaaccc

SEQ ID NO: 975454 - RNA, 22 nt, Human
aacccgcuuuucuucacgcucu

SEQ ID NO: 975455 - RNA, 21 nt, Human
acgcagcaacaccagacccaa

SEQ ID NO: 975456 - RNA, 22 nt, Human
acgcggguucuccuagaaacaa

SEQ ID NO: 975457 - RNA, 18 nt, Human
agcaauacuggcagucgc

SEQ ID NO: 975458 - RNA, 18 nt, Human
agcugcccuaccaacccc

SEQ ID NO: 975459 - RNA, 20 nt, Human
aggugccaaugaagauucgg

SEQ ID NO: 975460 - RNA, 19 nt, Human
agguggaccucuaaugccu

SEQ ID NO: 975461 - RNA, 21 nt, Human
caaaagccuuaaaggugccaa

SEQ ID NO: 975462 - RNA, 24 nt, Human
caaaagccuuaaaggugccaauga

SEQ ID NO: 975463 - RNA, 18 nt, Human
caacagcagcagcugcua

SEQ ID NO: 975464 - RNA, 19 nt, Human
caacagcagcagcugcuac

SEQ ID NO: 975465 - RNA, 23 nt, Human
caacaguaugcuaaggucuuggu

SEQ ID NO: 975466 - RNA, 21 nt, Human
caacagucaugauugcuguuc

SEQ ID NO: 975467 - RNA, 22 nt, Human
caaccccagggccuccagcagc

SEQ ID NO: 975468 - RNA, 21 nt, Human
cagauuccucgcuacuccaaa

SEQ ID NO: 975469 - RNA, 18 nt, Human
cagcaacaccagacccaa

SEQ ID NO: 975470 - RNA, 22 nt, Human
cagcaacaccagacccaaaacc

SEQ ID NO: 975471 - RNA, 25 nt, Human
cagcaauacuggcagucgcagcaac

SEQ ID NO: 975472 - RNA, 21 nt, Human
cagcagcagcugcuacagugc

SEQ ID NO: 975473 - RNA, 20 nt, Human
cagcaucuugcuacucuugc

SEQ ID NO: 975474 - RNA, 24 nt, Human
caucucauucuauagucaaugugc

SEQ ID NO: 975475 - RNA, 20 nt, Human
caucuugcuacucuugccaa

SEQ ID NO: 975476 - RNA, 22 nt, Human
caucuugcuacucuugccaaca

SEQ ID NO: 975477 - RNA, 27 nt, Human
ccaaauccaauguccacaguuaaaacu

SEQ ID NO: 975478 - RNA, 21 nt, Human
ccacagucauggauaccaagu

SEQ ID NO: 975479 - RNA, 18 nt, Human
ccaccaaauccaaugucc

SEQ ID NO: 975480 - RNA, 21 nt, Human
ccacgcagcaacaccagaccc

SEQ ID NO: 975481 - RNA, 21 nt, Human
cccacgcagcaacaccagacc

SEQ ID NO: 975482 - RNA, 23 nt, Human
ccccacgcagcaacaccagaccc

SEQ ID NO: 975483 - RNA, 24 nt, Human
ccccagggccuccagcagcuccag

SEQ ID NO: 975484 - RNA, 27 nt, Human
ccccagggccuccagcagcuccagcaa

SEQ ID NO: 975485 - RNA, 26 nt, Human
cccccaacuccucggacagggccugc

SEQ ID NO: 975486 - RNA, 23 nt, Human
cccucgagcagggggaagcccaa

SEQ ID NO: 975487 - RNA, 18 nt, Human
ccugccaauccagcaggg

SEQ ID NO: 975488 - RNA, 20 nt, Human
ccugcugggaugguccccca

SEQ ID NO: 975489 - RNA, 24 nt, Human
cgucacugaccgcuccucagacag

SEQ ID NO: 975490 - RNA, 23 nt, Human
cuccacagucauggauaccaagu

SEQ ID NO: 975491 - RNA, 18 nt, Human
cucuaccagcugcccuac

SEQ ID NO: 975492 - RNA, 20 nt, Human
cugcagcaucuugcuacucu

SEQ ID NO: 975493 - RNA, 18 nt, Human
gacagggccugccaaucc

SEQ ID NO: 975494 - RNA, 21 nt, Human
gaccgcuccucagacagaugc

SEQ ID NO: 975495 - RNA, 19 nt, Human
gcaacaccagacccaaaac

SEQ ID NO: 975496 - RNA, 21 nt, Human
gcagcaacaccagacccaaaa

SEQ ID NO: 975497 - RNA, 20 nt, Human
gccaauccagcaggggccug

SEQ ID NO: 975498 - RNA, 19 nt, Human
gcuacagugccucuucccu

SEQ ID NO: 975499 - RNA, 19 nt, Human
gcugcagcaucuugcuacu

SEQ ID NO: 975500 - RNA, 24 nt, Human
ggaacaaaaagcucacaaacacuc

SEQ ID NO: 975501 - RNA, 19 nt, Human
ggaggagccauaaugccug

SEQ ID NO: 975502 - RNA, 24 nt, Human
ggcagucgcagcaacagcagcagc

SEQ ID NO: 975503 - RNA, 24 nt, Human
gggaauuggcacaccagcugguac

SEQ ID NO: 975504 - RNA, 19 nt, Human
gggccuccagcagcuccag

SEQ ID NO: 975505 - RNA, 21 nt, Human
gggccugccaauccagcaggg

SEQ ID NO: 975506 - RNA, 20 nt, Human
gggcuccagcaauacuggca

SEQ ID NO: 975507 - RNA, 18 nt, Human
uaaaacuugaugcuucug

SEQ ID NO: 975508 - RNA, 22 nt, Human
uaccagcugcccuaccaacccc

SEQ ID NO: 975509 - RNA, 24 nt, Human
uaccagcugcccuaccaaccccag

SEQ ID NO: 975510 - RNA, 20 nt, Human
uacuggcagucgcagcaaca

SEQ ID NO: 975511 - RNA, 24 nt, Human
uagauggagccugguuuuugcuug

SEQ ID NO: 975512 - RNA, 18 nt, Human
ucccggaggcggcaugcc

SEQ ID NO: 975513 - RNA, 22 nt, Human
ucccuguggagucauuaccugc

SEQ ID NO: 975514 - RNA, 21 nt, Human
ucuccuagaaacaaugcaagc

SEQ ID NO: 975515 - RNA, 23 nt, Human
ucuccuagaaacaaugcaagcuc

SEQ ID NO: 975516 - RNA, 22 nt, Human
ucuuugggggguggccccucca

SEQ ID NO: 975517 - RNA, 23 nt, Human
ugagauggaucaacaguaugcua

SEQ ID NO: 975518 - RNA, 21 nt, Human
ugcaagcugggcagaagcuuc

SEQ ID NO: 975519 - RNA, 19 nt, Human
ugcaggggaaaaagugacu

SEQ ID NO: 975520 - RNA, 27 nt, Human
ugcccuaccaaccccagggccuccagc

SEQ ID NO: 975521 - RNA, 20 nt, Human
ugccuggaggugggguugcu

SEQ ID NO: 975522 - RNA, 21 nt, Human
ugggggcggagugccccgucc

SEQ ID NO: 975523 - RNA, 20 nt, Human
ugguacccgagcaaugccag

SEQ ID NO: 975524 - RNA, 21 nt, Human
uguuggggcuccagcaauacu

SEQ ID NO: 975525 - RNA, 20 nt, Human
uucaaagaguagauggagcc

SEQ ID NO: 975526 - RNA, 23 nt, Human
uuccugggggagguggaccucua

SEQ ID NO: 975527 - RNA, 21 nt, Human
uugcucugccgacgggugggg

SEQ ID NO: 975528 - RNA, 24 nt, Human
uugguggacgcauuccugggggag

SEQ ID NO: 975529 - RNA, 20 nt, Human
aaacaaauaguugcaccaag

SEQ ID NO: 975530 - RNA, 27 nt, Human
agaagcacaaacacaacccacucuuua

SEQ ID NO: 975531 - RNA, 18 nt, Human
agcaagagguuacuuugc

SEQ ID NO: 975532 - RNA, 23 nt, Human
caaaguagaauuuucuauccccc

SEQ ID NO: 975533 - RNA, 23 nt, Human
caagagguuacuuugcccacucc

SEQ ID NO: 975534 - RNA, 21 nt, Human
caggacaguuccaguauguga

SEQ ID NO: 975535 - RNA, 27 nt, Human
cauuaaccccaaacuacuagugucaca

SEQ ID NO: 975536 - RNA, 19 nt, Human
gagaagcacaaacacaacc

SEQ ID NO: 975537 - RNA, 19 nt, Human
gagaagcacaaacacaacc

SEQ ID NO: 975538 - RNA, 20 nt, Human
gcacaaacacaacccacucu

SEQ ID NO: 975539 - RNA, 27 nt, Human
ggguaagaguucauucacuuuggagag

SEQ ID NO: 975540 - RNA, 19 nt, Human
uacuuugcccacuccaaau

SEQ ID NO: 975541 - RNA, 24 nt, Human
uccaaauuaaaacagagcacaaaa

SEQ ID NO: 975542 - RNA, 19 nt, Human
ugaaacaaauaguugcacc

SEQ ID NO: 975543 - RNA, 21 nt, Human
ugaacaucuuccuccucacug

SEQ ID NO: 975544 - RNA, 22 nt, Human
ugggagaagcacaaacacaacc

SEQ ID NO: 975545 - RNA, 24 nt, Human
ugggagaagcacaaacacaaccca

SEQ ID NO: 975546 - RNA, 25 nt, Human
uugaaacaaauaguugcaccaagca

SEQ ID NO: 975547 - RNA, 18 nt, Human
uuuuuuuuuuuuuuuuug

SEQ ID NO: 975548 - RNA, 19 nt, Human
uuuuuuuuuuuuuuuuugu

SEQ ID NO: 975549 - RNA, 23 nt, Human
aaaaaaaagacauuuuaugaaaa

SEQ ID NO: 975550 - RNA, 20 nt, Human
aaaacauguaagucauuuca

SEQ ID NO: 975551 - RNA, 26 nt, Human
aaagaaaaaaaggacaaauuaaagaa

SEQ ID NO: 975552 - RNA, 21 nt, Human
aaggauaguauuguauucaca

SEQ ID NO: 975553 - RNA, 28 nt, Human
aaggauaguauuguauucacaggaucaa

SEQ ID NO: 975554 - RNA, 26 nt, Human
aaguaaccaccacugauacugaaagu

SEQ ID NO: 975555 - RNA, 18 nt, Human
acauggaugaaacuuggg

SEQ ID NO: 975556 - RNA, 18 nt, Human
accaaagaaaaaaaggac

SEQ ID NO: 975557 - RNA, 22 nt, Human
accaaagaaaaaaaggacaaau

SEQ ID NO: 975558 - RNA, 23 nt, Human
acccaaaagcauaguguuuugcc

SEQ ID NO: 975559 - RNA, 21 nt, Human
accuaaaauaagacaacauaa

SEQ ID NO: 975560 - RNA, 24 nt, Human
acugccccacugauacaagaagga

SEQ ID NO: 975561 - RNA, 25 nt, Human
agaaaaaaaggacaaauuaaagaaa

SEQ ID NO: 975562 - RNA, 23 nt, Human
agacaacauaaaaauaccacuaa

SEQ ID NO: 975563 - RNA, 22 nt, Human
agauaucuuugggacacuaaaa

SEQ ID NO: 975564 - RNA, 26 nt, Human
augauaaugaaaacaaauuauuuguc

SEQ ID NO: 975565 - RNA, 22 nt, Human
caacauaaaaauaccacuaaua

SEQ ID NO: 975566 - RNA, 19 nt, Human
caaggcaggagucccugac

SEQ ID NO: 975567 - RNA, 23 nt, Human
caccuccauucucucacugagga

SEQ ID NO: 975568 - RNA, 22 nt, Human
caccuccauucucucacuggcc

SEQ ID NO: 975569 - RNA, 22 nt, Human
cacugccccacugauacaagaa

SEQ ID NO: 975570 - RNA, 23 nt, Human
cagcacaggacacgaucaaucuu

SEQ ID NO: 975571 - RNA, 19 nt, Human
caggagucccugaccucac

SEQ ID NO: 975572 - RNA, 19 nt, Human
cgugaaacagaauacugga

SEQ ID NO: 975573 - RNA, 21 nt, Human
cgugaaacagaauacuggaaa

SEQ ID NO: 975574 - RNA, 23 nt, Human
cuaguuaucugaaaauaucuucc

SEQ ID NO: 975575 - RNA, 24 nt, Human
cucuaugacuggacauaauuugcu

SEQ ID NO: 975576 - RNA, 22 nt, Human
cugauacugaaaguuaucuagu

SEQ ID NO: 975577 - RNA, 20 nt, Human
cuggacauaauuugcuauuc

SEQ ID NO: 975578 - RNA, 19 nt, Human
gauacauuuccaucuaagc

SEQ ID NO: 975579 - RNA, 21 nt, Human
gauggcagaggcaaggcagga

SEQ ID NO: 975580 - RNA, 21 nt, Human
gugaacucaaauacauauugc

SEQ ID NO: 975581 - RNA, 23 nt, Human
gugaacucaaauacauauugcug

SEQ ID NO: 975582 - RNA, 20 nt, Human
gugcaggggagguauccaca

SEQ ID NO: 975583 - RNA, 21 nt, Human
uaaaacagaaauagugugaac

SEQ ID NO: 975584 - RNA, 23 nt, Human
uaaaacagaaauagugugaacuu

SEQ ID NO: 975585 - RNA, 24 nt, Human
uaaguaaccaccacugauacugaa

SEQ ID NO: 975586 - RNA, 23 nt, Human
uaauaaguaaccaccacugauac

SEQ ID NO: 975587 - RNA, 24 nt, Human
uaauguuuuagaccaaagaaaaaa

SEQ ID NO: 975588 - RNA, 18 nt, Human
uacaccguguuuauggua

SEQ ID NO: 975589 - RNA, 19 nt, Human
uaccacuaauaaacaaccc

SEQ ID NO: 975590 - RNA, 18 nt, Human
uagcaagucgacauccuu

SEQ ID NO: 975591 - RNA, 25 nt, Human
uauuacaguuauaaguaauauuacu

SEQ ID NO: 975592 - RNA, 18 nt, Human
ucacugaggagccccugc

SEQ ID NO: 975593 - RNA, 23 nt, Human
ucacugaggagccccugcagaag

SEQ ID NO: 975594 - RNA, 20 nt, Human
ucacuggaagugauggcaga

SEQ ID NO: 975595 - RNA, 25 nt, Human
ucaggcacauaucugagagaggcag

SEQ ID NO: 975596 - RNA, 19 nt, Human
uccacaaaauaucaggcac

SEQ ID NO: 975597 - RNA, 18 nt, Human
ucuacacuguuacucuuc

SEQ ID NO: 975598 - RNA, 19 nt, Human
ucugaaauuagcaagucga

SEQ ID NO: 975599 - RNA, 20 nt, Human
ucuuugggacacuaaaaaaa

SEQ ID NO: 975600 - RNA, 24 nt, Human
ugaauaauuauuucugaaauuagc

SEQ ID NO: 975601 - RNA, 18 nt, Human
uguuacucuucauagggu

SEQ ID NO: 975602 - RNA, 21 nt, Human
uuaaauaccuaacaucaugac

SEQ ID NO: 975603 - RNA, 21 nt, Human
uuaaaugcuacuuaguuaccu

SEQ ID NO: 975604 - RNA, 22 nt, Human
uuagaccaaagaaaaaaaggac

SEQ ID NO: 975605 - RNA, 25 nt, Human
uucaaguagaugcuuuaaaaggggc

SEQ ID NO: 975606 - RNA, 23 nt, Human
uuccucugauuuaaguaauaagu

SEQ ID NO: 975607 - RNA, 22 nt, Human
uugaaacaagcauuguaaagac

SEQ ID NO: 975608 - RNA, 23 nt, Human
uugaaacaagcauuguaaagacu

SEQ ID NO: 975609 - RNA, 23 nt, Human
uuuuggauaaugaaaauguauuu

SEQ ID NO: 975610 - RNA, 22 nt, Human
aaagcccuccacucugaacuaa

SEQ ID NO: 975611 - RNA, 18 nt, Human
aaaggcccugggcuguua

SEQ ID NO: 975612 - RNA, 21 nt, Human
aaaguaaauauucaucccccu

SEQ ID NO: 975613 - RNA, 24 nt, Human
aaccagaagagacaguaacagccc

SEQ ID NO: 975614 - RNA, 20 nt, Human
aagaaaggagcccacucuaa

SEQ ID NO: 975615 - RNA, 23 nt, Human
aagaggccagccucccacaaaca

SEQ ID NO: 975616 - RNA, 21 nt, Human
aagcccuggaggcagggagcu

SEQ ID NO: 975617 - RNA, 18 nt, Human
aaggagguaggcaagagg

SEQ ID NO: 975618 - RNA, 18 nt, Human
accagcuccccacagcga

SEQ ID NO: 975619 - RNA, 21 nt, Human
accagcuccccacagcgacac

SEQ ID NO: 975620 - RNA, 25 nt, Human
accagcuccccacagcgacaccgcc

SEQ ID NO: 975621 - RNA, 18 nt, Human
acgccccgccccuacagg

SEQ ID NO: 975622 - RNA, 21 nt, Human
acugcacugcgcaacacagca

SEQ ID NO: 975623 - RNA, 24 nt, Human
agaaacaaagcccuugcaccccac

SEQ ID NO: 975624 - RNA, 22 nt, Human
agacaggguaggauagccagga

SEQ ID NO: 975625 - RNA, 20 nt, Human
agcaaaaacugaagccagcc

SEQ ID NO: 975626 - RNA, 27 nt, Human
agccacuucucucucauuggucccaac

SEQ ID NO: 975627 - RNA, 23 nt, Human
aggagaagaaaaggauuccaaaa

SEQ ID NO: 975628 - RNA, 25 nt, Human
aggagaagaaaaggauuccaaaaag

SEQ ID NO: 975629 - RNA, 21 nt, Human
aggagugggcgacagggaggg

SEQ ID NO: 975630 - RNA, 19 nt, Human
agguaggcaagaggccagc

SEQ ID NO: 975631 - RNA, 21 nt, Human
aguagagcaaugcagaaugcc

SEQ ID NO: 975632 - RNA, 21 nt, Human
aucuccauccccagagcccuc

SEQ ID NO: 975633 - RNA, 19 nt, Human
caaaauaaaggcccugggc

SEQ ID NO: 975634 - RNA, 23 nt, Human
caaaauaaaggcccugggcuguu

SEQ ID NO: 975635 - RNA, 21 nt, Human
caaaugaccugcagaaacuca

SEQ ID NO: 975636 - RNA, 19 nt, Human
cacaaaccuaagaguagag

SEQ ID NO: 975637 - RNA, 27 nt, Human
cacacacacaaaccuaagaguagagcu

SEQ ID NO: 975638 - RNA, 22 nt, Human
caccauauagccagaucacggc

SEQ ID NO: 975639 - RNA, 22 nt, Human
cacugcgcaacacagcagagac

SEQ ID NO: 975640 - RNA, 24 nt, Human
cagaaacaaagcccuugcaccccc

SEQ ID NO: 975641 - RNA, 22 nt, Human
cagcaaaaacugaagccagcca

SEQ ID NO: 975642 - RNA, 24 nt, Human
cagcagcaggagucacagcaccag

SEQ ID NO: 975643 - RNA, 23 nt, Human
cagccaggcuaaggucucgggac

SEQ ID NO: 975644 - RNA, 22 nt, Human
cagccccggacagccuuuccca

SEQ ID NO: 975645 - RNA, 22 nt, Human
cauacaaaugaccugcagaaac

SEQ ID NO: 975646 - RNA, 20 nt, Human
caucuccauccccagagccc

SEQ ID NO: 975647 - RNA, 21 nt, Human
caucugagaacagcaccagcu

SEQ ID NO: 975648 - RNA, 22 nt, Human
ccacagcgacaccgcccgcgcc

SEQ ID NO: 975649 - RNA, 25 nt, Human
ccacagcgacaccgcccgcgcccca

SEQ ID NO: 975650 - RNA, 20 nt, Human
ccacauaccugcccugugcc

SEQ ID NO: 975651 - RNA, 24 nt, Human
cccacaaacaaagugcucuagggc

SEQ ID NO: 975652 - RNA, 24 nt, Human
cccacagcgacaccgcccgcgccc

SEQ ID NO: 975653 - RNA, 18 nt, Human
ccccaaucccgggugccc

SEQ ID NO: 975654 - RNA, 19 nt, Human
ccccacugcacugcgcaac

SEQ ID NO: 975655 - RNA, 27 nt, Human
ccccagagcccucucuuucaggagacu

SEQ ID NO: 975656 - RNA, 18 nt, Human
ccccgccccuacaggccc

SEQ ID NO: 975657 - RNA, 24 nt, Human
cccgcaucuucucugaccaucuca

SEQ ID NO: 975658 - RNA, 20 nt, Human
cccgccccuacaggcccggg

SEQ ID NO: 975659 - RNA, 24 nt, Human
cccgcgccccaccauauagccaga

SEQ ID NO: 975660 - RNA, 23 nt, Human
cccgggcucugagugggauuccc

SEQ ID NO: 975661 - RNA, 23 nt, Human
ccgcgccccaccauauagccaga

SEQ ID NO: 975662 - RNA, 19 nt, Human
ccucgugccgaaucuuggc

SEQ ID NO: 975663 - RNA, 21 nt, Human
ccugaguaagucuccuggccc

SEQ ID NO: 975664 - RNA, 20 nt, Human
ccugcagaaacucagauccc

SEQ ID NO: 975665 - RNA, 18 nt, Human
ccuggcccgcaucuucuc

SEQ ID NO: 975666 - RNA, 22 nt, Human
cuacagcaaaaacugaagccag

SEQ ID NO: 975667 - RNA, 23 nt, Human
cuagaagacacuaagcagcccag

SEQ ID NO: 975668 - RNA, 19 nt, Human
cuggucaccugaggagaua

SEQ ID NO: 975669 - RNA, 19 nt, Human
gacuggagucgggaucccc

SEQ ID NO: 975670 - RNA, 23 nt, Human
gagaagaaaaggauuccaaaaag

SEQ ID NO: 975671 - RNA, 22 nt, Human
gagcccacagacaggguaggau

SEQ ID NO: 975672 - RNA, 18 nt, Human
gaucacggcuucuccuuc

SEQ ID NO: 975673 - RNA, 19 nt, Human
gccagccacuucucucuca

SEQ ID NO: 975674 - RNA, 22 nt, Human
gcccgggcucugagugggauuc

SEQ ID NO: 975675 - RNA, 28 nt, Human
gccucccacaaacaaagugcucuagggc

SEQ ID NO: 975676 - RNA, 19 nt, Human
ggaaggaaacaucugagaa

SEQ ID NO: 975677 - RNA, 21 nt, Human
ggagucgggauccccccucca

SEQ ID NO: 975678 - RNA, 20 nt, Human
ggagugggcgacagggaggg

SEQ ID NO: 975679 - RNA, 19 nt, Human
ggauacaacauaaccacuc

SEQ ID NO: 975680 - RNA, 20 nt, Human
ggcagggagcugcuaccaaa

SEQ ID NO: 975681 - RNA, 20 nt, Human
ggcgacagggaggggaagga

SEQ ID NO: 975682 - RNA, 20 nt, Human
ggcuguuacuguucccgucu

SEQ ID NO: 975683 - RNA, 18 nt, Human
ggugcacgacgggagacg

SEQ ID NO: 975684 - RNA, 23 nt, Human
gucucaggcuccacucagccagg

SEQ ID NO: 975685 - RNA, 23 nt, Human
uaaaagagcccacagacagggua

SEQ ID NO: 975686 - RNA, 22 nt, Human
uaaauccccagcagcaggaguc

SEQ ID NO: 975687 - RNA, 24 nt, Human
uaaccacucccagugggaugaugu

SEQ ID NO: 975688 - RNA, 19 nt, Human
uaagucuccuggcccgcaa

SEQ ID NO: 975689 - RNA, 21 nt, Human
uaccaaaggagaagaaaagga

SEQ ID NO: 975690 - RNA, 18 nt, Human
uagaagacacuaagcagc

SEQ ID NO: 975691 - RNA, 25 nt, Human
ucagcccaagcagaggugacuagaa

SEQ ID NO: 975692 - RNA, 21 nt, Human
uccaaaaagaaaggagcccac

SEQ ID NO: 975693 - RNA, 18 nt, Human
uccauccccagagcccuc

SEQ ID NO: 975694 - RNA, 19 nt, Human
uccccaaaacuggucaccu

SEQ ID NO: 975695 - RNA, 20 nt, Human
uccccacagcgacaccgccc

SEQ ID NO: 975696 - RNA, 21 nt, Human
ucccgggugcccgggacgccc

SEQ ID NO: 975697 - RNA, 22 nt, Human
ucggcuccuaccagcucuggcu

SEQ ID NO: 975698 - RNA, 25 nt, Human
ucggcuccuaccagcucuggcucuc

SEQ ID NO: 975699 - RNA, 21 nt, Human
ucuccauccccagagcccucu

SEQ ID NO: 975700 - RNA, 22 nt, Human
ucuccuuccgggugagucgccg

SEQ ID NO: 975701 - RNA, 20 nt, Human
ucucgggacauaaaucccca

SEQ ID NO: 975702 - RNA, 21 nt, Human
ucucuuucaggcaggcagaaa

SEQ ID NO: 975703 - RNA, 25 nt, Human
ucugagaacagcaccagcuccccac

SEQ ID NO: 975704 - RNA, 19 nt, Human
ugaaagaaaaagcaaggag

SEQ ID NO: 975705 - RNA, 19 nt, Human
ugaaagaaaaagcaaggag

SEQ ID NO: 975706 - RNA, 22 nt, Human
ugaccugcagaaacucagaucc

SEQ ID NO: 975707 - RNA, 23 nt, Human
ugaccugcagaaacucagauccc

SEQ ID NO: 975708 - RNA, 21 nt, Human
ugacuagaagacacuaagcag

SEQ ID NO: 975709 - RNA, 20 nt, Human
ugagaacagcaccagcuccc

SEQ ID NO: 975710 - RNA, 19 nt, Human
ugcggaaaagauggccaca

SEQ ID NO: 975711 - RNA, 24 nt, Human
ugcuaccaaaggagaagaaaagga

SEQ ID NO: 975712 - RNA, 23 nt, Human
ugcuguggccagccacuucucuc

SEQ ID NO: 975713 - RNA, 27 nt, Human
uggaagaggcauaaggggcuguaaugg

SEQ ID NO: 975714 - RNA, 20 nt, Human
uggaaggaaacaucugagaa

SEQ ID NO: 975715 - RNA, 19 nt, Human
uggagaugaagaauggcag

SEQ ID NO: 975716 - RNA, 18 nt, Human
uggcggaagcccuggagg

SEQ ID NO: 975717 - RNA, 22 nt, Human
ugguaucagugaaagaaaaagc

SEQ ID NO: 975718 - RNA, 18 nt, Human
uguuacuguucccgucug

SEQ ID NO: 975719 - RNA, 21 nt, Human
uguuacuguucccgucugguc

SEQ ID NO: 975720 - RNA, 21 nt, Human
uguuguuucucaucuccaucc

SEQ ID NO: 975721 - RNA, 20 nt, Human
uuauuucaggccaaagcccu

SEQ ID NO: 975722 - RNA, 21 nt, Human
uuccaaaaagaaaggagccca

SEQ ID NO: 975723 - RNA, 18 nt, Human
aagagcauuaacauuuca

SEQ ID NO: 975724 - RNA, 21 nt, Human
aaucaaggcuaucuuaucacu

SEQ ID NO: 975725 - RNA, 21 nt, Human
aggaauucacuaucucaaacc

SEQ ID NO: 975726 - RNA, 19 nt, Human
aggcaaacucacuaaaucu

SEQ ID NO: 975727 - RNA, 21 nt, Human
auaaagaagaauauaucaccc

SEQ ID NO: 975728 - RNA, 26 nt, Human
cauguaaacauuaaaaacucaacuaa

SEQ ID NO: 975729 - RNA, 20 nt, Human
cuuugguacuagaaagucau

SEQ ID NO: 975730 - RNA, 18 nt, Human
gagcauuaacauuucaaa

SEQ ID NO: 975731 - RNA, 21 nt, Human
gauauaaagaagaauauauca

SEQ ID NO: 975732 - RNA, 24 nt, Human
uaaauguaauuggauaaaauacaa

SEQ ID NO: 975733 - RNA, 21 nt, Human
uaacacacauacauauauaca

SEQ ID NO: 975734 - RNA, 21 nt, Human
uauguaaacuuuauacaugug

SEQ ID NO: 975735 - RNA, 22 nt, Human
ugaguccacuuagagaacaacu

SEQ ID NO: 975736 - RNA, 29 nt, Human
uggugauuuaacacacauacauauauaca

SEQ ID NO: 975737 - RNA, 25 nt, Human
uucuugcucuuuucuauauguuuua

SEQ ID NO: 975738 - RNA, 21 nt, Human
uuuaaaauaguauuugccacu

SEQ ID NO: 975739 - RNA, 22 nt, Human
uuuaaaauaguauuugccacuc

SEQ ID NO: 975740 - RNA, 21 nt, Human
aggcauccuugcugaacaccu

SEQ ID NO: 975741 - RNA, 19 nt, Human
auauaucuauauacauaua

SEQ ID NO: 975742 - RNA, 20 nt, Human
auccagaaagaauaacuuug

SEQ ID NO: 975743 - RNA, 22 nt, Human
auccagcaccuccgccugcagc

SEQ ID NO: 975744 - RNA, 26 nt, Human
cacagucaaauauuuaagaaaaaaaa

SEQ ID NO: 975745 - RNA, 19 nt, Human
cagaaagaauaacuuuggu

SEQ ID NO: 975746 - RNA, 19 nt, Human
cagugaccuggaauaccug

SEQ ID NO: 975747 - RNA, 21 nt, Human
ccaagccagauaucucucugu

SEQ ID NO: 975748 - RNA, 21 nt, Human
ccugcagcagggcggaagagc

SEQ ID NO: 975749 - RNA, 23 nt, Human
cucguccagauccagcaccuccg

SEQ ID NO: 975750 - RNA, 21 nt, Human
gcauguuccacagucaaauau

SEQ ID NO: 975751 - RNA, 21 nt, Human
uaagaaaaaaaaucuauaugc

SEQ ID NO: 975752 - RNA, 20 nt, Human
uaccugagauuucaaguugu

SEQ ID NO: 975753 - RNA, 19 nt, Human
uauaugcaauuauuggcac

SEQ ID NO: 975754 - RNA, 21 nt, Human
uauuuaaaauggcauguucca

SEQ ID NO: 975755 - RNA, 20 nt, Human
ucccaaagaucaaacagaag

SEQ ID NO: 975756 - RNA, 22 nt, Human
uccucguccagauccagcaccu

SEQ ID NO: 975757 - RNA, 20 nt, Human
ucguccucguccagauccag

SEQ ID NO: 975758 - RNA, 26 nt, Human
ucucccaaagaucaaacagaaguugg

SEQ ID NO: 975759 - RNA, 18 nt, Human
ugaggcauccuugcugaa

SEQ ID NO: 975760 - RNA, 22 nt, Human
ugucagugaccuggaauaccug

SEQ ID NO: 975761 - RNA, 22 nt, Human
uuaagaacauaauuaaaaccaa

SEQ ID NO: 975762 - RNA, 22 nt, Human
uucaaguuguugguuuuccaga

SEQ ID NO: 975763 - RNA, 19 nt, Human
uugguuuuccagaugggua

SEQ ID NO: 975764 - RNA, 21 nt, Human
cagggagcaccaccucagccu

SEQ ID NO: 975765 - RNA, 21 nt, Human
ugacuuccucccgcgccaccc

SEQ ID NO: 975766 - RNA, 19 nt, Human
cagcugucaggaacuccca

SEQ ID NO: 975767 - RNA, 22 nt, Human
cccgcagcgccgccaucuugug

SEQ ID NO: 975768 - RNA, 24 nt, Human
uucuacuucuagaauccagcuguc

SEQ ID NO: 975769 - RNA, 18 nt, Human
agccuggucagccgcgca

SEQ ID NO: 975770 - RNA, 25 nt, Human
agccuggucagccgcgcagaggccc

SEQ ID NO: 975771 - RNA, 21 nt, Human
cauuaaaaaggcacauuggaa

SEQ ID NO: 975772 - RNA, 23 nt, Human
ccccgaguccccgcuccgcagac

SEQ ID NO: 975773 - RNA, 25 nt, Human
ccccgaguccccgcuccgcagaccc

SEQ ID NO: 975774 - RNA, 19 nt, Human
ccccgcaccccgggccgcc

SEQ ID NO: 975775 - RNA, 20 nt, Human
ccccgcaccccgggccgccc

SEQ ID NO: 975776 - RNA, 23 nt, Human
cccgccgaggccccgaguccccg

SEQ ID NO: 975777 - RNA, 21 nt, Human
cccuccucccggccgggcugg

SEQ ID NO: 975778 - RNA, 19 nt, Human
ccgccccgccugcgugugc

SEQ ID NO: 975779 - RNA, 21 nt, Human
ccgccgaggccccgagucccc

SEQ ID NO: 975780 - RNA, 18 nt, Human
ccgggccgccccgccugc

SEQ ID NO: 975781 - RNA, 19 nt, Human
ccgggcuggagacccgagc

SEQ ID NO: 975782 - RNA, 23 nt, Human
cgaccccggacagcuccggccgg

SEQ ID NO: 975783 - RNA, 19 nt, Human
cgccgaggccccgaguccc

SEQ ID NO: 975784 - RNA, 24 nt, Human
cgccgaggccccgaguccccgcuc

SEQ ID NO: 975785 - RNA, 20 nt, Human
cggcucacgaccccggacag

SEQ ID NO: 975786 - RNA, 24 nt, Human
cucucaauagaagacacuagacac

SEQ ID NO: 975787 - RNA, 24 nt, Human
gccccgaguccccgcuccgcagac

SEQ ID NO: 975788 - RNA, 23 nt, Human
ggcggcgcugacgcucugggagc

SEQ ID NO: 975789 - RNA, 18 nt, Human
uaccuguguauguagaua

SEQ ID NO: 975790 - RNA, 21 nt, Human
uacucucaauagaagacacua

SEQ ID NO: 975791 - RNA, 19 nt, Human
ucacagaaauaaagaccac

SEQ ID NO: 975792 - RNA, 22 nt, Human
ucacgaccccggacagcuccgg

SEQ ID NO: 975793 - RNA, 23 nt, Human
ucacgaccccggacagcuccggc

SEQ ID NO: 975794 - RNA, 22 nt, Human
uccgcagacccggucccuccuc

SEQ ID NO: 975795 - RNA, 25 nt, Human
uccucacagaaauaaagaccacgau

SEQ ID NO: 975796 - RNA, 22 nt, Human
uccugcccccgccccuccgcgg

SEQ ID NO: 975797 - RNA, 24 nt, Human
uggaaauaagcuuaauuaauagua

SEQ ID NO: 975798 - RNA, 21 nt, Human
ugugcgcgccccgccgaggcc

SEQ ID NO: 975799 - RNA, 22 nt, Human
uuaaaaaggcacauuggaaaua

SEQ ID NO: 975800 - RNA, 21 nt, Human
uuaauuaauaguaguacucuc

SEQ ID NO: 975801 - RNA, 26 nt, Human
aaaaaacaacaacagcaacaacaaaa

SEQ ID NO: 975802 - RNA, 19 nt, Human
aaaaaacacacccaggaca

SEQ ID NO: 975803 - RNA, 18 nt, Human
aaaaacaacaacagcaac

SEQ ID NO: 975804 - RNA, 22 nt, Human
aaaacaacaacagcaacaaaac

SEQ ID NO: 975805 - RNA, 21 nt, Human
aaaacccaggagucugaggau

SEQ ID NO: 975806 - RNA, 23 nt, Human
aaacaacaacagcaacaacaaaa

SEQ ID NO: 975807 - RNA, 22 nt, Human
aacaacaaaaacccaggagucu

SEQ ID NO: 975808 - RNA, 21 nt, Human
aacaacaacagcaacaacaaa

SEQ ID NO: 975809 - RNA, 23 nt, Human
aacaacaacagcaacaacaaaaa

SEQ ID NO: 975810 - RNA, 23 nt, Human
aacaacagcaacaacaaaaaccc

SEQ ID NO: 975811 - RNA, 23 nt, Human
aacacaccuuuuaaaaaacaaca

SEQ ID NO: 975812 - RNA, 19 nt, Human
aacagcaacaacaaaaacc

SEQ ID NO: 975813 - RNA, 24 nt, Human
aaccucacccccccaaacuguuca

SEQ ID NO: 975814 - RNA, 18 nt, Human
acaaaauaaauuaccaua

SEQ ID NO: 975815 - RNA, 20 nt, Human
acaacaacagcaacaacaaa

SEQ ID NO: 975816 - RNA, 22 nt, Human
acaacagcaacaacaaaaaccc

SEQ ID NO: 975817 - RNA, 27 nt, Human
acaacagcaacaacaaaaacccaggag

SEQ ID NO: 975818 - RNA, 22 nt, Human
acacugcuucuggccugcaggc

SEQ ID NO: 975819 - RNA, 24 nt, Human
acagcaacaacaaaaacccaggag

SEQ ID NO: 975820 - RNA, 23 nt, Human
acccaggacaacauuucuuugau

SEQ ID NO: 975821 - RNA, 21 nt, Human
acccagggcccccagccggcc

SEQ ID NO: 975822 - RNA, 18 nt, Human
acugcuucuggccugcag

SEQ ID NO: 975823 - RNA, 24 nt, Human
agauugaaaaaacacacccaggac

SEQ ID NO: 975824 - RNA, 21 nt, Human
agcaacaacaaaaacccagga

SEQ ID NO: 975825 - RNA, 22 nt, Human
aggaaguguguaacacugcuuc

SEQ ID NO: 975826 - RNA, 22 nt, Human
caaaaacccaggagucugagga

SEQ ID NO: 975827 - RNA, 20 nt, Human
caacaacagcaacaacaaaa

SEQ ID NO: 975828 - RNA, 25 nt, Human
caacagcaacaacaaaaacccagga

SEQ ID NO: 975829 - RNA, 19 nt, Human
cacugagaugccccgaggg

SEQ ID NO: 975830 - RNA, 24 nt, Human
cagcaacaacaaaaacccaggagu

SEQ ID NO: 975831 - RNA, 25 nt, Human
cagcaacaacaaaaacccaggaguc

SEQ ID NO: 975832 - RNA, 21 nt, Human
cagcguacccagggcccccag

SEQ ID NO: 975833 - RNA, 18 nt, Human
ccccgagggcugcgcggg

SEQ ID NO: 975834 - RNA, 23 nt, Human
ccccgagggcugcgcgggucucc

SEQ ID NO: 975835 - RNA, 24 nt, Human
cccuccgccggacgcgccgccucc

SEQ ID NO: 975836 - RNA, 18 nt, Human
ccgcuccccucaacccuc

SEQ ID NO: 975837 - RNA, 24 nt, Human
ccucccccgacccgggggaggggg

SEQ ID NO: 975838 - RNA, 25 nt, Human
cgccgcccguguucuggccugucgc

SEQ ID NO: 975839 - RNA, 22 nt, Human
cugcuucuggccugcaggcugg

SEQ ID NO: 975840 - RNA, 18 nt, Human
cuucuggccugcaggcug

SEQ ID NO: 975841 - RNA, 21 nt, Human
cuucuggccugcaggcugggg

SEQ ID NO: 975842 - RNA, 26 nt, Human
gacacauucaaagcuaguuaacuuga

SEQ ID NO: 975843 - RNA, 22 nt, Human
gacgcgccgccucccccgaccc

SEQ ID NO: 975844 - RNA, 18 nt, Human
ggagucugaggauuuccu

SEQ ID NO: 975845 - RNA, 19 nt, Human
gggaggggguggggaauga

SEQ ID NO: 975846 - RNA, 19 nt, Human
ggggaggggguggggaaug

SEQ ID NO: 975847 - RNA, 20 nt, Human
ggggaggggguggggaauga

SEQ ID NO: 975848 - RNA, 21 nt, Human
uaaaugaaaccucaccccccc

SEQ ID NO: 975849 - RNA, 22 nt, Human
uaaaugaaaccucaccccccca

SEQ ID NO: 975850 - RNA, 24 nt, Human
uagcuccuccaggaaguguguaac

SEQ ID NO: 975851 - RNA, 23 nt, Human
uccaacugugggaaacaaaucuc

SEQ ID NO: 975852 - RNA, 20 nt, Human
ucugaggauuuccuuagcuc

SEQ ID NO: 975853 - RNA, 23 nt, Human
ucuggccugucgcggucuggucu

SEQ ID NO: 975854 - RNA, 21 nt, Human
ugaaaaaacacacccaggaca

SEQ ID NO: 975855 - RNA, 19 nt, Human
ugaaaccucacccccccaa

SEQ ID NO: 975856 - RNA, 18 nt, Human
ugccccgcuccccucaac

SEQ ID NO: 975857 - RNA, 23 nt, Human
uggaaauaggguuuugacaaucc

SEQ ID NO: 975858 - RNA, 25 nt, Human
uggcagacaaaauaaauuaccauaa

SEQ ID NO: 975859 - RNA, 18 nt, Human
uuaaaugaaaccucaccc

SEQ ID NO: 975860 - RNA, 24 nt, Human
uuaaaugaaaccucacccccccaa

SEQ ID NO: 975861 - RNA, 23 nt, Human
uuagaagauugaaaaaacacacc

SEQ ID NO: 975862 - RNA, 18 nt, Human
uucaaguggcagacaaaa

SEQ ID NO: 975863 - RNA, 21 nt, Human
uuuuucaggauuccagauuuu

SEQ ID NO: 975864 - RNA, 21 nt, Human
uuuuuuuuuuucaggauucca

SEQ ID NO: 975865 - RNA, 23 nt, Human
uuuuuuuuuuuuuuuuuuucagg

SEQ ID NO: 975866 - RNA, 21 nt, Human
aaaaagcaaacaaaaaaucau

SEQ ID NO: 975867 - RNA, 23 nt, Human
aaaauguauccugagauaaaaua

SEQ ID NO: 975868 - RNA, 18 nt, Human
aagagccuugcaaggccu

SEQ ID NO: 975869 - RNA, 21 nt, Human
aaggaguugaugucggggcug

SEQ ID NO: 975870 - RNA, 23 nt, Human
acaaagaacgauguaugccaaau

SEQ ID NO: 975871 - RNA, 21 nt, Human
acccagaacccuacgcgguuc

SEQ ID NO: 975872 - RNA, 18 nt, Human
acuugcuggaugcuagaa

SEQ ID NO: 975873 - RNA, 21 nt, Human
acuuucaacaaagaauucuag

SEQ ID NO: 975874 - RNA, 25 nt, Human
agacauucuccaagguuccaauguc

SEQ ID NO: 975875 - RNA, 27 nt, Human
aggaguugucaaaauacuuucaaaaug

SEQ ID NO: 975876 - RNA, 19 nt, Human
auacauguugaugcaaauu

SEQ ID NO: 975877 - RNA, 18 nt, Human
cacauacaacugugaggc

SEQ ID NO: 975878 - RNA, 25 nt, Human
cacccaaucacaacgaccgauaccc

SEQ ID NO: 975879 - RNA, 23 nt, Human
cacuaugcuagauuuauuucccc

SEQ ID NO: 975880 - RNA, 22 nt, Human
ccaauguccagcugaggcacag

SEQ ID NO: 975881 - RNA, 21 nt, Human
ccagacucuaguuucacuaau

SEQ ID NO: 975882 - RNA, 23 nt, Human
cccagaacccuacgcgguucaaa

SEQ ID NO: 975883 - RNA, 23 nt, Human
ccccucacauacaacugugaggc

SEQ ID NO: 975884 - RNA, 22 nt, Human
cccguggacggccaaucacagg

SEQ ID NO: 975885 - RNA, 18 nt, Human
cccugagcacuuuuucuu

SEQ ID NO: 975886 - RNA, 22 nt, Human
ccguuuguuggcgaccuucccc

SEQ ID NO: 975887 - RNA, 23 nt, Human
ccucccccuuucgguuaagagcc

SEQ ID NO: 975888 - RNA, 24 nt, Human
cgcgguucaaaacgcagcugucug

SEQ ID NO: 975889 - RNA, 20 nt, Human
cuacccagaacccuacgcgg

SEQ ID NO: 975890 - RNA, 20 nt, Human
cuccaagguuccaaugucca

SEQ ID NO: 975891 - RNA, 27 nt, Human
cuccucaucacugucggugacauugac

SEQ ID NO: 975892 - RNA, 24 nt, Human
cugugaagacauucuccaagguuc

SEQ ID NO: 975893 - RNA, 21 nt, Human
cuugcaaggccuuugcuaccc

SEQ ID NO: 975894 - RNA, 22 nt, Human
gaagacauucuccaagguucca

SEQ ID NO: 975895 - RNA, 20 nt, Human
gaaguuccauucauguucuc

SEQ ID NO: 975896 - RNA, 24 nt, Human
gaauucuaggcuuuuuuuuuucuc

SEQ ID NO: 975897 - RNA, 18 nt, Human
gcaaggccuuugcuaccc

SEQ ID NO: 975898 - RNA, 20 nt, Human
gcuuuuuuuuuucucauacc

SEQ ID NO: 975899 - RNA, 20 nt, Human
guuccaauguccagcugagg

SEQ ID NO: 975900 - RNA, 24 nt, Human
uaaguuuucuuccccacuguggcu

SEQ ID NO: 975901 - RNA, 20 nt, Human
uacauaaaaagcaaacaaaa

SEQ ID NO: 975902 - RNA, 26 nt, Human
uacauaaaaagcaaacaaaaaaucau

SEQ ID NO: 975903 - RNA, 27 nt, Human
uacccagaacccuacgcgguucaaaac

SEQ ID NO: 975904 - RNA, 22 nt, Human
uagcugaagaaucacccaggug

SEQ ID NO: 975905 - RNA, 20 nt, Human
uauuuugcauguuccaggau

SEQ ID NO: 975906 - RNA, 24 nt, Human
ucaaaucacgacugaaaacuuuca

SEQ ID NO: 975907 - RNA, 22 nt, Human
uccccuuuccccucacauacaa

SEQ ID NO: 975908 - RNA, 24 nt, Human
ucccugagcacuuuuucuucuucc

SEQ ID NO: 975909 - RNA, 21 nt, Human
ucucauaccaacugacccaga

SEQ ID NO: 975910 - RNA, 20 nt, Human
ugaaacauccagacucuagu

SEQ ID NO: 975911 - RNA, 25 nt, Human
ugaagacauucuccaagguuccaau

SEQ ID NO: 975912 - RNA, 19 nt, Human
ugcuagaaggaguugaugu

SEQ ID NO: 975913 - RNA, 19 nt, Human
uggacggccaaucacaggc

SEQ ID NO: 975914 - RNA, 21 nt, Human
uuaaauuuagcaaccaagucc

SEQ ID NO: 975915 - RNA, 21 nt, Human
uucccccucccccuuucgguu

SEQ ID NO: 975916 - RNA, 24 nt, Human
uuccuccucaucacugucggugac

SEQ ID NO: 975917 - RNA, 19 nt, Human
uuuguuggcgaccuucccc

SEQ ID NO: 975918 - RNA, 18 nt, Human
uuuuccggcucuuccugg

SEQ ID NO: 975919 - RNA, 22 nt, Human
aaaaaacucaaguucaugaaaa

SEQ ID NO: 975920 - RNA, 20 nt, Human
aaaaaucagggaaaacuuaa

SEQ ID NO: 975921 - RNA, 25 nt, Human
aaaagaaaaaaaaaguaagacaaaa

SEQ ID NO: 975922 - RNA, 26 nt, Human
aaaagaaaaaaaaaguaagacaaaaa

SEQ ID NO: 975923 - RNA, 22 nt, Human
aaaauaauucagaauaaaaaca

SEQ ID NO: 975924 - RNA, 19 nt, Human
aaauaucagccccagcacc

SEQ ID NO: 975925 - RNA, 18 nt, Human
aacaaaaaacucaaguuc

SEQ ID NO: 975926 - RNA, 23 nt, Human
aacaacaacaacaacaauaacaa

SEQ ID NO: 975927 - RNA, 24 nt, Human
aacaacaacaacaacaauaacaau

SEQ ID NO: 975928 - RNA, 31 nt, Human
aacaacaacaacaacaauaacaauaacaacu

SEQ ID NO: 975929 - RNA, 26 nt, Human
aacaacaauaacaauaacaacaaaag

SEQ ID NO: 975930 - RNA, 22 nt, Human
aacauccaaaagaaaaaaaaag

SEQ ID NO: 975931 - RNA, 18 nt, Human
aaccuguaggccggcaca

SEQ ID NO: 975932 - RNA, 22 nt, Human
acaauaacaauaacaacaaaaa

SEQ ID NO: 975933 - RNA, 22 nt, Human
acaauaacaauaacaacaaaac

SEQ ID NO: 975934 - RNA, 18 nt, Human
agacaaaaauauaagacu

SEQ ID NO: 975935 - RNA, 24 nt, Human
agaugccaaagauugucuaagacu

SEQ ID NO: 975936 - RNA, 21 nt, Human
aggcaaacacaauugggucca

SEQ ID NO: 975937 - RNA, 22 nt, Human
auaacucuuuguuggggagggg

SEQ ID NO: 975938 - RNA, 26 nt, Human
auuggguccaugcacuguggcaaccu

SEQ ID NO: 975939 - RNA, 24 nt, Human
caaaagaaaaaaaaaguaagacaa

SEQ ID NO: 975940 - RNA, 18 nt, Human
caacaacaacaacaauaa

SEQ ID NO: 975941 - RNA, 21 nt, Human
caacaacaacaacaauaacaa

SEQ ID NO: 975942 - RNA, 22 nt, Human
caacauccaaaagaaaaaaaaa

SEQ ID NO: 975943 - RNA, 18 nt, Human
caaguccuggugucucau

SEQ ID NO: 975944 - RNA, 22 nt, Human
caaguucaugaaaaaucaggga

SEQ ID NO: 975945 - RNA, 19 nt, Human
cacacgccguggacuuguu

SEQ ID NO: 975946 - RNA, 19 nt, Human
cagcacccagaaaucacug

SEQ ID NO: 975947 - RNA, 23 nt, Human
ccaucuaaaacaguaacuuaaac

SEQ ID NO: 975948 - RNA, 22 nt, Human
ccuaaauuaaaaaaacaacaac

SEQ ID NO: 975949 - RNA, 24 nt, Human
ccuuaccauuuucuggaaaaaaaa

SEQ ID NO: 975950 - RNA, 19 nt, Human
cuugucuccagauuccuga

SEQ ID NO: 975951 - RNA, 20 nt, Human
gcacccagaaaucacuggua

SEQ ID NO: 975952 - RNA, 26 nt, Human
gcagugucuccuuuaagacuuucaaa

SEQ ID NO: 975953 - RNA, 19 nt, Human
ggcgguugcucuggugugu

SEQ ID NO: 975954 - RNA, 22 nt, Human
uaaaaaaacaacaacaacaaca

SEQ ID NO: 975955 - RNA, 18 nt, Human
uaaaacaguaacuuaaac

SEQ ID NO: 975956 - RNA, 26 nt, Human
uaaaacaguaacuuaaaccuuuauca

SEQ ID NO: 975957 - RNA, 20 nt, Human
uaaauaugcacaaaaaauau

SEQ ID NO: 975958 - RNA, 24 nt, Human
uaacaacaaaaaacucaaguucau

SEQ ID NO: 975959 - RNA, 23 nt, Human
uaacaauaacaacaaaaaacuca

SEQ ID NO: 975960 - RNA, 22 nt, Human
uaaccccaucuaaaacaguaac

SEQ ID NO: 975961 - RNA, 22 nt, Human
uaagacaaaaauauaagacuug

SEQ ID NO: 975962 - RNA, 23 nt, Human
uaagaccauucugcugauguagu

SEQ ID NO: 975963 - RNA, 20 nt, Human
uacaugcagcugcacacgcc

SEQ ID NO: 975964 - RNA, 24 nt, Human
uagcaaguggacccuugacauucu

SEQ ID NO: 975965 - RNA, 19 nt, Human
ucagccccagcacccagaa

SEQ ID NO: 975966 - RNA, 21 nt, Human
ucaggguuaaaggcaaaggga

SEQ ID NO: 975967 - RNA, 22 nt, Human
ucaugaaaaaucagggaaaacu

SEQ ID NO: 975968 - RNA, 27 nt, Human
uccaaaagaaaaaaaaaguaagacaaa

SEQ ID NO: 975969 - RNA, 20 nt, Human
ugagaauguuuaaccccauc

SEQ ID NO: 975970 - RNA, 23 nt, Human
ugaguaccuuaccauuuucugga

SEQ ID NO: 975971 - RNA, 25 nt, Human
ugcacaaaaaauaucagccccagca

SEQ ID NO: 975972 - RNA, 23 nt, Human
ugccaccaacaauugaaaaaaaa

SEQ ID NO: 975973 - RNA, 25 nt, Human
uggaaugaauaaauuauuuaagaua

SEQ ID NO: 975974 - RNA, 18 nt, Human
uggacccuugacauucug

SEQ ID NO: 975975 - RNA, 23 nt, Human
uguggcgguugcucuggugugug

SEQ ID NO: 975976 - RNA, 27 nt, Human
uuuaagacuuucaaaauauuaagauuc

SEQ ID NO: 975977 - RNA, 19 nt, Human
aaaauuauaaauguaggcu

SEQ ID NO: 975978 - RNA, 22 nt, Human
agaagggaccuuggcuaucaag

SEQ ID NO: 975979 - RNA, 23 nt, Human
agagggcgcgagggcugaccgga

SEQ ID NO: 975980 - RNA, 20 nt, Human
agcggugggaggaaagcugg

SEQ ID NO: 975981 - RNA, 21 nt, Human
agggcgcgagggcugaccgga

SEQ ID NO: 975982 - RNA, 23 nt, Human
augagucccuuugaaauuuugug

SEQ ID NO: 975983 - RNA, 20 nt, Human
caacagccuguuuuguuuuu

SEQ ID NO: 975984 - RNA, 22 nt, Human
cagcuuaggccaaaggcucugg

SEQ ID NO: 975985 - RNA, 20 nt, Human
caguucagaccucccugccc

SEQ ID NO: 975986 - RNA, 20 nt, Human
ccucccugcccugagcggug

SEQ ID NO: 975987 - RNA, 22 nt, Human
ccucgugguccuugggcugugc

SEQ ID NO: 975988 - RNA, 21 nt, Human
cguggggaaggggauagaggc

SEQ ID NO: 975989 - RNA, 20 nt, Human
cucaaggcacaagaaggaga

SEQ ID NO: 975990 - RNA, 23 nt, Human
cuccucugccacucaaggcacaa

SEQ ID NO: 975991 - RNA, 23 nt, Human
cuguuuuguuuuuaaacaucaua

SEQ ID NO: 975992 - RNA, 23 nt, Human
cuuggcuaucaagucuguccccc

SEQ ID NO: 975993 - RNA, 21 nt, Human
gagagggcgcgagggcugacc

SEQ ID NO: 975994 - RNA, 18 nt, Human
gccucgcuucgccuggcg

SEQ ID NO: 975995 - RNA, 21 nt, Human
gccucgugguccuugggcugu

SEQ ID NO: 975996 - RNA, 20 nt, Human
ggcugcaggggcuggaacgu

SEQ ID NO: 975997 - RNA, 18 nt, Human
ggcugggcgcgguggcuc

SEQ ID NO: 975998 - RNA, 19 nt, Human
gggcaggcgcggaccuggc

SEQ ID NO: 975999 - RNA, 19 nt, Human
ggggcuggaacguggggaa

SEQ ID NO: 976000 - RNA, 18 nt, Human
gguaaaagagaaugaaaa

SEQ ID NO: 976001 - RNA, 23 nt, Human
guaggcugggcgcgguggcucuu

SEQ ID NO: 976002 - RNA, 28 nt, Human
uaauaaacaaauuaacaaaaaaaaagaa

SEQ ID NO: 976003 - RNA, 23 nt, Human
uaaucuugagagaacccuaaauc

SEQ ID NO: 976004 - RNA, 24 nt, Human
uaccaagaaaagacgucagugaac

SEQ ID NO: 976005 - RNA, 26 nt, Human
uaugagucccuuugaaauuuuguggu

SEQ ID NO: 976006 - RNA, 24 nt, Human
uauguaaugaaacuaauacacuga

SEQ ID NO: 976007 - RNA, 23 nt, Human
ucaaucccauuuucugugauaua

SEQ ID NO: 976008 - RNA, 18 nt, Human
uccuauguaaugaaacua

SEQ ID NO: 976009 - RNA, 23 nt, Human
ucuggggccgcaguucagaccuc

SEQ ID NO: 976010 - RNA, 21 nt, Human
ugagagaacccuaaaucagaa

SEQ ID NO: 976011 - RNA, 19 nt, Human
ugcaggggcuggaacgugg

SEQ ID NO: 976012 - RNA, 21 nt, Human
uggaagggggugcagaaagug

SEQ ID NO: 976013 - RNA, 20 nt, Human
ugggaggaaagcuggugugg

SEQ ID NO: 976014 - RNA, 18 nt, Human
uguccccccauuaguuuc

SEQ ID NO: 976015 - RNA, 24 nt, Human
ugugggcugcaggggcuggaacgu

SEQ ID NO: 976016 - RNA, 23 nt, Human
uuacaacagccuguuuuguuuuu

SEQ ID NO: 976017 - RNA, 20 nt, Human
uucuccuauguaaugaaacu

SEQ ID NO: 976018 - RNA, 24 nt, Human
uuuuuuuuuuuacaacagccuguu

SEQ ID NO: 976019 - RNA, 22 nt, Human
uuuuuuuuuuuuacaacagccu

SEQ ID NO: 976020 - RNA, 24 nt, Human
aaagcuuggcugguuuucagacaa

SEQ ID NO: 976021 - RNA, 20 nt, Human
aagcugccaacugccccucg

SEQ ID NO: 976022 - RNA, 22 nt, Human
aagucaguggcaaaccagcggc

SEQ ID NO: 976023 - RNA, 18 nt, Human
acauauguuugcacagga

SEQ ID NO: 976024 - RNA, 25 nt, Human
acuccgagaagagucagaugaugga

SEQ ID NO: 976025 - RNA, 22 nt, Human
agguggccacggaagugggaaa

SEQ ID NO: 976026 - RNA, 20 nt, Human
agugggaaagugaaggcaag

SEQ ID NO: 976027 - RNA, 21 nt, Human
auaacauauguuugcacagga

SEQ ID NO: 976028 - RNA, 27 nt, Human
caagugaccucauuuugaagucagugg

SEQ ID NO: 976029 - RNA, 26 nt, Human
cacuuacucuucccuggcugaugaga

SEQ ID NO: 976030 - RNA, 22 nt, Human
ccaacugccccucggugcucag

SEQ ID NO: 976031 - RNA, 24 nt, Human
ccaagugaccucauuuugaaguca

SEQ ID NO: 976032 - RNA, 19 nt, Human
cccuggcugaugagauacu

SEQ ID NO: 976033 - RNA, 22 nt, Human
cugcauggagguggccacggaa

SEQ ID NO: 976034 - RNA, 20 nt, Human
cugccccguuccuuccugca

SEQ ID NO: 976035 - RNA, 20 nt, Human
gaugaaggaggcucagagaa

SEQ ID NO: 976036 - RNA, 23 nt, Human
gcugaugagauacuugggguugu

SEQ ID NO: 976037 - RNA, 19 nt, Human
ggaaagugaaggcaagaag

SEQ ID NO: 976038 - RNA, 19 nt, Human
ggacacucaugcaccaccg

SEQ ID NO: 976039 - RNA, 18 nt, Human
ggugaagcugccaacugc

SEQ ID NO: 976040 - RNA, 18 nt, Human
ucagagaaaagccccucc

SEQ ID NO: 976041 - RNA, 20 nt, Human
ucagucaaagaggaaaagga

SEQ ID NO: 976042 - RNA, 23 nt, Human
ucccacaaaauaugagacuccga

SEQ ID NO: 976043 - RNA, 20 nt, Human
ucccuggcugaugagauacu

SEQ ID NO: 976044 - RNA, 23 nt, Human
ucccuggcugaugagauacuugg

SEQ ID NO: 976045 - RNA, 19 nt, Human
ucccugugaucccacuuac

SEQ ID NO: 976046 - RNA, 20 nt, Human
ucgcugccaacauccuuccc

SEQ ID NO: 976047 - RNA, 23 nt, Human
ucgcugccaacauccuucccugu

SEQ ID NO: 976048 - RNA, 21 nt, Human
ucggugcucagucaaagagga

SEQ ID NO: 976049 - RNA, 18 nt, Human
ucuuugggcagaugaagg

SEQ ID NO: 976050 - RNA, 21 nt, Human
uggugucgcugccaacauccu

SEQ ID NO: 976051 - RNA, 21 nt, Human
ugucuggagcagcccucagga

SEQ ID NO: 976052 - RNA, 23 nt, Human
uucaugaugauugaauuuccuuu

SEQ ID NO: 976053 - RNA, 22 nt, Human
uucugcauggagguggccacgg

SEQ ID NO: 976054 - RNA, 26 nt, Human
uuggcugguuuucagacaaaaggucu

SEQ ID NO: 976055 - RNA, 19 nt, Human
uuuuuuuuuuuuaacagga

SEQ ID NO: 976056 - RNA, 22 nt, Human
uuuuuuuuuuuuuuuaacagga

SEQ ID NO: 976057 - RNA, 23 nt, Human
uuuuuuuuuuuuuuuuuaacagg

SEQ ID NO: 976058 - RNA, 26 nt, Human
aaaaaaaacaaaaaaaaacaaccaaa

SEQ ID NO: 976059 - RNA, 27 nt, Human
aaaaaaaacaaaaaaaaacaaccaaaa

SEQ ID NO: 976060 - RNA, 28 nt, Human
aaaaaaacaaaaaaaaacaaccaaaaaa

SEQ ID NO: 976061 - RNA, 23 nt, Human
aaaaaacaaccaaaaaaacccac

SEQ ID NO: 976062 - RNA, 20 nt, Human
aaaaacaaccaaaaaaaccc

SEQ ID NO: 976063 - RNA, 27 nt, Human
aaaaacaaccaaaaaaacccacauaug

SEQ ID NO: 976064 - RNA, 20 nt, Human
aaaaaggaaaaagaaaaaaa

SEQ ID NO: 976065 - RNA, 24 nt, Human
aaaacaaaaaaaaacaaccaaaaa

SEQ ID NO: 976066 - RNA, 30 nt, Human
aaaacaaaaaaaaacaaccaaaaaaacccc

SEQ ID NO: 976067 - RNA, 22 nt, Human
aaaagaaaaaaaaaacaaaaaa

SEQ ID NO: 976068 - RNA, 22 nt, Human
aaaagcaaaacaagccaauugc

SEQ ID NO: 976069 - RNA, 18 nt, Human
aaacaagccaauugcucu

SEQ ID NO: 976070 - RNA, 28 nt, Human
aaaggaaaaagaaaaaaaaaacaaaaaa

SEQ ID NO: 976071 - RNA, 25 nt, Human
aacaauaacaaaagcaaaacaagcc

SEQ ID NO: 976072 - RNA, 20 nt, Human
aaccucauggccaggauccc

SEQ ID NO: 976073 - RNA, 21 nt, Human
aaccucugugguccuguuucu

SEQ ID NO: 976074 - RNA, 21 nt, Human
aagaaaaaaaaaacaaaaaaa

SEQ ID NO: 976075 - RNA, 20 nt, Human
aagaaaaggaaaagaacgau

SEQ ID NO: 976076 - RNA, 21 nt, Human
aagaauaacacaacauuuccu

SEQ ID NO: 976077 - RNA, 21 nt, Human
acaauaacaaaagcaaaacaa

SEQ ID NO: 976078 - RNA, 23 nt, Human
acacagaguuuacugggucagau

SEQ ID NO: 976079 - RNA, 21 nt, Human
acagggaagaacaauaacaaa

SEQ ID NO: 976080 - RNA, 24 nt, Human
aggaaaaagaaaaaaaaaacaaaa

SEQ ID NO: 976081 - RNA, 28 nt, Human
aggaaaaagaaaaaaaaaacaaaaaaaa

SEQ ID NO: 976082 - RNA, 22 nt, Human
agggggggaaggggaaagagcu

SEQ ID NO: 976083 - RNA, 20 nt, Human
auauauacuggguguguaug

SEQ ID NO: 976084 - RNA, 24 nt, Human
aucucccacaagguuuccuuguua

SEQ ID NO: 976085 - RNA, 21 nt, Human
caaaaaggaaaaagaaaaaaa

SEQ ID NO: 976086 - RNA, 26 nt, Human
caacauaagaaaaggaaaagaacgau

SEQ ID NO: 976087 - RNA, 22 nt, Human
caagaauaacacaacauuuccu

SEQ ID NO: 976088 - RNA, 18 nt, Human
caccucauucaacuuccu

SEQ ID NO: 976089 - RNA, 22 nt, Human
cagcuggaucucccacaagguu

SEQ ID NO: 976090 - RNA, 23 nt, Human
cagcuggaucucccacaagguuu

SEQ ID NO: 976091 - RNA, 23 nt, Human
caguaguuucccccucgagacuu

SEQ ID NO: 976092 - RNA, 20 nt, Human
ccaaaaaggaaaaagaaaaa

SEQ ID NO: 976093 - RNA, 18 nt, Human
ccugacacguuuccaaaa

SEQ ID NO: 976094 - RNA, 19 nt, Human
ccugcacugccagcuccua

SEQ ID NO: 976095 - RNA, 27 nt, Human
cuggguguguaugugugugugugugug

SEQ ID NO: 976096 - RNA, 18 nt, Human
cuuucaguaaggugaggc

SEQ ID NO: 976097 - RNA, 22 nt, Human
gaaaggggaaaaggggaagggg

SEQ ID NO: 976098 - RNA, 22 nt, Human
gaugcaaaauauuuauuccaag

SEQ ID NO: 976099 - RNA, 23 nt, Human
gcagcacgacuuaugaugaagca

SEQ ID NO: 976100 - RNA, 23 nt, Human
ggaaaggggaaaaggggaagggg

SEQ ID NO: 976101 - RNA, 18 nt, Human
ggaagaacaauaacaaaa

SEQ ID NO: 976102 - RNA, 22 nt, Human
ggggaaagagcuguaucuaugu

SEQ ID NO: 976103 - RNA, 18 nt, Human
ggggaaggggaaagagcu

SEQ ID NO: 976104 - RNA, 18 nt, Human
ggggggaaggggaaagag

SEQ ID NO: 976105 - RNA, 19 nt, Human
guuaguuauuuuaugcagu

SEQ ID NO: 976106 - RNA, 20 nt, Human
uaaaaaaucugucccaccac

SEQ ID NO: 976107 - RNA, 21 nt, Human
uaaaaaaucugucccaccaca

SEQ ID NO: 976108 - RNA, 25 nt, Human
uaaaaaaucugucccaccacacaaa

SEQ ID NO: 976109 - RNA, 20 nt, Human
uaaagcagauaacagggaag

SEQ ID NO: 976110 - RNA, 19 nt, Human
uaaaguuacccgagcagcc

SEQ ID NO: 976111 - RNA, 22 nt, Human
uaacacaacauuuccuauaucc

SEQ ID NO: 976112 - RNA, 18 nt, Human
uaaccuggccggcagcac

SEQ ID NO: 976113 - RNA, 23 nt, Human
uagaagcuguugcugcagaccag

SEQ ID NO: 976114 - RNA, 20 nt, Human
uaguagaagcuguugcugca

SEQ ID NO: 976115 - RNA, 23 nt, Human
uaugugugugugugugugagugu

SEQ ID NO: 976116 - RNA, 25 nt, Human
uaugugugugugugugugagugugu

SEQ ID NO: 976117 - RNA, 21 nt, Human
uauuuuacagcuguacccaaa

SEQ ID NO: 976118 - RNA, 22 nt, Human
ucacucucucaguccccucaac

SEQ ID NO: 976119 - RNA, 18 nt, Human
ucccacaagguuuccuug

SEQ ID NO: 976120 - RNA, 24 nt, Human
ucccuaaacacacagaguuuacug

SEQ ID NO: 976121 - RNA, 21 nt, Human
ucccugcacugccagcuccua

SEQ ID NO: 976122 - RNA, 24 nt, Human
ucgaucacucucucaguccccuca

SEQ ID NO: 976123 - RNA, 21 nt, Human
ucuuugggauaugauuauuuc

SEQ ID NO: 976124 - RNA, 23 nt, Human
ugaguguguuuaaaaaaucuguc

SEQ ID NO: 976125 - RNA, 21 nt, Human
ugcaguaguuucccccucgag

SEQ ID NO: 976126 - RNA, 22 nt, Human
ugggucagauuuaacugugagc

SEQ ID NO: 976127 - RNA, 20 nt, Human
uguguaugugugugugugug

SEQ ID NO: 976128 - RNA, 21 nt, Human
uguguaugugugugugugugu

SEQ ID NO: 976129 - RNA, 19 nt, Human
ugugugugugugagugugu

SEQ ID NO: 976130 - RNA, 20 nt, Human
ugugugugugugugugagug

SEQ ID NO: 976131 - RNA, 19 nt, Human
uuaaaaagggggggaaggg

SEQ ID NO: 976132 - RNA, 20 nt, Human
uucccugcacugccagcucc

SEQ ID NO: 976133 - RNA, 20 nt, Human
uucccuugugaaugaaguau

SEQ ID NO: 976134 - RNA, 23 nt, Human
uuuuuuuuuuuuacugaugcaaa

SEQ ID NO: 976135 - RNA, 23 nt, Human
uuuuuuuuuuuuuuuuuuacuga

SEQ ID NO: 976136 - RNA, 18 nt, Human
aagcaggcaucagggagg

SEQ ID NO: 976137 - RNA, 22 nt, Human
aagggagcaauuaaauaaaacu

SEQ ID NO: 976138 - RNA, 24 nt, Human
aauaacaaggaaaggaagaaggga

SEQ ID NO: 976139 - RNA, 21 nt, Human
acaagcaauguguuuuuaaac

SEQ ID NO: 976140 - RNA, 19 nt, Human
acaaggaaaggaagaaggg

SEQ ID NO: 976141 - RNA, 19 nt, Human
acccucaacugaaagcagg

SEQ ID NO: 976142 - RNA, 20 nt, Human
agagcuggaaugugcuggag

SEQ ID NO: 976143 - RNA, 21 nt, Human
agagcuugggccgggcagggg

SEQ ID NO: 976144 - RNA, 22 nt, Human
agagggaggaggugcaggaugu

SEQ ID NO: 976145 - RNA, 24 nt, Human
aggagagguuguggcggggcuggg

SEQ ID NO: 976146 - RNA, 19 nt, Human
aggcccaaggcagccacag

SEQ ID NO: 976147 - RNA, 18 nt, Human
aggccgggagcucguggu

SEQ ID NO: 976148 - RNA, 22 nt, Human
agggagagggaggaggugcagg

SEQ ID NO: 976149 - RNA, 25 nt, Human
agggaggaggugcaggaugugcagg

SEQ ID NO: 976150 - RNA, 22 nt, Human
aggggaagggccaaggcagagc

SEQ ID NO: 976151 - RNA, 18 nt, Human
aggggugaggugaaggga

SEQ ID NO: 976152 - RNA, 20 nt, Human
auaaaacauaccucaagcag

SEQ ID NO: 976153 - RNA, 20 nt, Human
auaacaaggaaaggaagaag

SEQ ID NO: 976154 - RNA, 21 nt, Human
aucaaucgucccagccaauga

SEQ ID NO: 976155 - RNA, 21 nt, Human
aucauugcccccaacccucaa

SEQ ID NO: 976156 - RNA, 20 nt, Human
auccagaauaccaacucaau

SEQ ID NO: 976157 - RNA, 22 nt, Human
aucugaaguagagaguauaagg

SEQ ID NO: 976158 - RNA, 19 nt, Human
auggaguggagguggcccc

SEQ ID NO: 976159 - RNA, 21 nt, Human
auggcaugacgcgacuccggc

SEQ ID NO: 976160 - RNA, 20 nt, Human
caacuaaauuuauuagcaaa

SEQ ID NO: 976161 - RNA, 20 nt, Human
caagaauuuaaaacaaaaca

SEQ ID NO: 976162 - RNA, 24 nt, Human
cacaagaauuuaaaacaaaacaag

SEQ ID NO: 976163 - RNA, 18 nt, Human
cacacaguacacaguguu

SEQ ID NO: 976164 - RNA, 18 nt, Human
cacaguggccggcagggc

SEQ ID NO: 976165 - RNA, 18 nt, Human
caccaggggcccagggag

SEQ ID NO: 976166 - RNA, 20 nt, Human
cacggccaguguccacaguc

SEQ ID NO: 976167 - RNA, 19 nt, Human
cagagccaaggggcuucag

SEQ ID NO: 976168 - RNA, 24 nt, Human
cagccaaugauaauccauuuccaa

SEQ ID NO: 976169 - RNA, 21 nt, Human
cagcccagugcugaccaacaa

SEQ ID NO: 976170 - RNA, 22 nt, Human
caggcccaaggcagccacaggg

SEQ ID NO: 976171 - RNA, 21 nt, Human
cagggccagggaggugcagga

SEQ ID NO: 976172 - RNA, 18 nt, Human
cauugcccccaacccuca

SEQ ID NO: 976173 - RNA, 19 nt, Human
ccaacacucuaaacuuucu

SEQ ID NO: 976174 - RNA, 22 nt, Human
ccagaauaccaacucaauacag

SEQ ID NO: 976175 - RNA, 20 nt, Human
ccagugcugaccaacaaagu

SEQ ID NO: 976176 - RNA, 25 nt, Human
ccugugagccagccaacacucuaaa

SEQ ID NO: 976177 - RNA, 19 nt, Human
cggggcugggcacauggag

SEQ ID NO: 976178 - RNA, 19 nt, Human
cucaaaaauaacaagcaau

SEQ ID NO: 976179 - RNA, 18 nt, Human
cuggacuccaccauuauu

SEQ ID NO: 976180 - RNA, 24 nt, Human
gaagggccaaggcagagccaaggg

SEQ ID NO: 976181 - RNA, 21 nt, Human
gaauaacaaggaaaggaagaa

SEQ ID NO: 976182 - RNA, 19 nt, Human
gacaguugcagaacaggag

SEQ ID NO: 976183 - RNA, 20 nt, Human
gaggacaauacagggaacag

SEQ ID NO: 976184 - RNA, 18 nt, Human
gaggacacagguggggga

SEQ ID NO: 976185 - RNA, 24 nt, Human
gaggugggugccaagccccagggc

SEQ ID NO: 976186 - RNA, 21 nt, Human
gcacacaagaauuuaaaacaa

SEQ ID NO: 976187 - RNA, 18 nt, Human
gcccccuucaucgcacac

SEQ ID NO: 976188 - RNA, 20 nt, Human
gccucaaaaauaacaagcaa

SEQ ID NO: 976189 - RNA, 18 nt, Human
gcuugggccgggcagggg

SEQ ID NO: 976190 - RNA, 22 nt, Human
ggacaguugcagaacaggagug

SEQ ID NO: 976191 - RNA, 24 nt, Human
ggagcggggaucgggguggggggu

SEQ ID NO: 976192 - RNA, 20 nt, Human
ggaggugcaggagagggggc

SEQ ID NO: 976193 - RNA, 20 nt, Human
ggcaggggugaggugaaggg

SEQ ID NO: 976194 - RNA, 19 nt, Human
ggccucccgccgcaguugg

SEQ ID NO: 976195 - RNA, 21 nt, Human
gggacaguugcagaacaggag

SEQ ID NO: 976196 - RNA, 18 nt, Human
gggcaggggugaggugaa

SEQ ID NO: 976197 - RNA, 18 nt, Human
ggggaucggggugggggg

SEQ ID NO: 976198 - RNA, 21 nt, Human
ggugaagggagagggaggagg

SEQ ID NO: 976199 - RNA, 18 nt, Human
guucuccauagaaaaaga

SEQ ID NO: 976200 - RNA, 22 nt, Human
uaaaacaaaacaagacacugca

SEQ ID NO: 976201 - RNA, 22 nt, Human
uaccucaagcaguuacaacuaa

SEQ ID NO: 976202 - RNA, 19 nt, Human
uagauucgcccccuucauc

SEQ ID NO: 976203 - RNA, 19 nt, Human
uaguaauugaaauuacugc

SEQ ID NO: 976204 - RNA, 19 nt, Human
ucagggccucccgccgcag

SEQ ID NO: 976205 - RNA, 28 nt, Human
ucauaugcucaucauugcccccaacccu

SEQ ID NO: 976206 - RNA, 25 nt, Human
uccacagucugggcaggccgggagc

SEQ ID NO: 976207 - RNA, 21 nt, Human
uccauagaaaaagagggggau

SEQ ID NO: 976208 - RNA, 20 nt, Human
uccuguggggacaguugcag

SEQ ID NO: 976209 - RNA, 23 nt, Human
ugaaagcaggcaucagggaggug

SEQ ID NO: 976210 - RNA, 22 nt, Human
ugaaaugcauguuuuuccuuug

SEQ ID NO: 976211 - RNA, 19 nt, Human
ugcagccugugagccagcc

SEQ ID NO: 976212 - RNA, 19 nt, Human
ugccucaggcaacuaaauu

SEQ ID NO: 976213 - RNA, 19 nt, Human
uggaaugugcuggaggaga

SEQ ID NO: 976214 - RNA, 22 nt, Human
uggaaugugcuggaggagaggu

SEQ ID NO: 976215 - RNA, 22 nt, Human
uggccccgaguuucuccagagg

SEQ ID NO: 976216 - RNA, 21 nt, Human
ugggagcggggaucgggggga

SEQ ID NO: 976217 - RNA, 18 nt, Human
ugggcacauggaguggag

SEQ ID NO: 976218 - RNA, 19 nt, Human
ugggcacauggaguggagg

SEQ ID NO: 976219 - RNA, 21 nt, Human
ugggcaggccgggagcucgug

SEQ ID NO: 976220 - RNA, 29 nt, Human
ugggggacugcaucuucagggccccaguc

SEQ ID NO: 976221 - RNA, 18 nt, Human
ugggugucuuuacuuuuu

SEQ ID NO: 976222 - RNA, 19 nt, Human
uuaaagcacacacaguaca

SEQ ID NO: 976223 - RNA, 22 nt, Human
uuaauuuaaaagccucaaaaau

SEQ ID NO: 976224 - RNA, 24 nt, Human
uucauaugcucaucauugccccca

SEQ ID NO: 976225 - RNA, 24 nt, Human
uuguaucauccagaauaccaacuc

SEQ ID NO: 976226 - RNA, 22 nt, Human
uugucugauagauucgcccccu

SEQ ID NO: 976227 - RNA, 21 nt, Human
uuuaaacauguaguagacaca

SEQ ID NO: 976228 - RNA, 24 nt, Human
uuugcuccucgacggagugaaaug

SEQ ID NO: 976229 - RNA, 20 nt, Human
aaaaaagcacacaagacaca

SEQ ID NO: 976230 - RNA, 22 nt, Human
aaaagcacacaagacacaaaca

SEQ ID NO: 976231 - RNA, 22 nt, Human
aaauggagacucagucaaaaaa

SEQ ID NO: 976232 - RNA, 21 nt, Human
aacugcaugccucaagucccu

SEQ ID NO: 976233 - RNA, 24 nt, Human
aagaagaaaaaggcacagauuuaa

SEQ ID NO: 976234 - RNA, 23 nt, Human
aaguaaauggagacucagucaaa

SEQ ID NO: 976235 - RNA, 25 nt, Human
aauaacaacaaaaaagcacacaaga

SEQ ID NO: 976236 - RNA, 26 nt, Human
acaacaaaaaagcacacaagacacaa

SEQ ID NO: 976237 - RNA, 27 nt, Human
acaacaaaaaagcacacaagacacaaa

SEQ ID NO: 976238 - RNA, 20 nt, Human
agaaaaacaaaagucuuuca

SEQ ID NO: 976239 - RNA, 18 nt, Human
agaagaaaaaggcacaga

SEQ ID NO: 976240 - RNA, 23 nt, Human
agccuuucucacagcugcuuucc

SEQ ID NO: 976241 - RNA, 21 nt, Human
agucaagaaaaacaaaagucu

SEQ ID NO: 976242 - RNA, 19 nt, Human
augaaguaaauggagacuc

SEQ ID NO: 976243 - RNA, 24 nt, Human
caacaaaaaagcacacaagacaca

SEQ ID NO: 976244 - RNA, 19 nt, Human
caagaagaaaaaggcacag

SEQ ID NO: 976245 - RNA, 22 nt, Human
caagacacaaacacucuucaac

SEQ ID NO: 976246 - RNA, 27 nt, Human
cacaagacacaaacacucuucaacagg

SEQ ID NO: 976247 - RNA, 19 nt, Human
cagcugggauaaacauccu

SEQ ID NO: 976248 - RNA, 24 nt, Human
ccuuucucacagcugcuuuccucg

SEQ ID NO: 976249 - RNA, 21 nt, Human
cucaagaagaaaaaggcacga

SEQ ID NO: 976250 - RNA, 28 nt, Human
cugacagccuuucucacagcugcuuucc

SEQ ID NO: 976251 - RNA, 23 nt, Human
cugaugggaguuguaccucuuuc

SEQ ID NO: 976252 - RNA, 22 nt, Human
cuggaguuucccacugugcugg

SEQ ID NO: 976253 - RNA, 20 nt, Human
cuggcgguggugcugcugca

SEQ ID NO: 976254 - RNA, 20 nt, Human
cuuucucacagcugcuuucc

SEQ ID NO: 976255 - RNA, 20 nt, Human
cuuucugacaaaauagcugg

SEQ ID NO: 976256 - RNA, 20 nt, Human
gcaguguugugugagcugga

SEQ ID NO: 976257 - RNA, 22 nt, Human
guggugcugcugcagcugggau

SEQ ID NO: 976258 - RNA, 22 nt, Human
uaagaaagaacuacagcuuugg

SEQ ID NO: 976259 - RNA, 19 nt, Human
uacuaagaaagaacuacag

SEQ ID NO: 976260 - RNA, 24 nt, Human
uagcaaaccgagccaggaccuccc

SEQ ID NO: 976261 - RNA, 19 nt, Human
uauaagguuuaguuggugu

SEQ ID NO: 976262 - RNA, 26 nt, Human
ucacuggugaccugacagccuuucuc

SEQ ID NO: 976263 - RNA, 23 nt, Human
ucccuauauagcaaaccgagcca

SEQ ID NO: 976264 - RNA, 24 nt, Human
ucccuguggagcacucuggcagcu

SEQ ID NO: 976265 - RNA, 23 nt, Human
ucuggaaacuuuuccauuucccu

SEQ ID NO: 976266 - RNA, 23 nt, Human
ugaaguaaauggagacucaguca

SEQ ID NO: 976267 - RNA, 21 nt, Human
ugacaaaauagcuggaaagga

SEQ ID NO: 976268 - RNA, 22 nt, Human
ugaccugacagccuuucucaca

SEQ ID NO: 976269 - RNA, 23 nt, Human
ugagcuggaguuucccacugugc

SEQ ID NO: 976270 - RNA, 21 nt, Human
ugccucaagucccuguggagc

SEQ ID NO: 976271 - RNA, 19 nt, Human
uggaaaggaggagggacca

SEQ ID NO: 976272 - RNA, 21 nt, Human
uggcccaucugaugggaguug

SEQ ID NO: 976273 - RNA, 26 nt, Human
ugugagcuggaguuucccacugugcu

SEQ ID NO: 976274 - RNA, 19 nt, Human
ugugcuggcgguggugcug

SEQ ID NO: 976275 - RNA, 22 nt, Human
uucaccguccuuacaaagucgg

SEQ ID NO: 976276 - RNA, 21 nt, Human
uucaggaauaucccuagcugc

SEQ ID NO: 976277 - RNA, 24 nt, Human
uucaugaauuaagucaagaaaaac

SEQ ID NO: 976278 - RNA, 23 nt, Human
uuuuuuaagcucauaagucuuuu

SEQ ID NO: 976279 - RNA, 24 nt, Human
uuuuuuaagcucauaagucuuuuu

SEQ ID NO: 976280 - RNA, 25 nt, Human
uuuuuuuuuuuuuuuuaaaguuuuu

SEQ ID NO: 976281 - RNA, 23 nt, Human
aacaaacucaugaucucagagaa

SEQ ID NO: 976282 - RNA, 21 nt, Human
caggaagaaaugacauuaaua

SEQ ID NO: 976283 - RNA, 24 nt, Human
ccucugagaucucuguaaucucag

SEQ ID NO: 976284 - RNA, 20 nt, Human
uaauaguuagaacacauaac

SEQ ID NO: 976285 - RNA, 24 nt, Human
ucuccgagcuggugccgccgguuc

SEQ ID NO: 976286 - RNA, 24 nt, Human
ucuuccuuccucaggaagaaauga

SEQ ID NO: 976287 - RNA, 20 nt, Human
ucuuuaaaaaaaaaaaaaaa

SEQ ID NO: 976288 - RNA, 23 nt, Human
ugagacaaguguaaacaaacuca

SEQ ID NO: 976289 - RNA, 18 nt, Human
ugccuauggaaccuccuu

SEQ ID NO: 976290 - RNA, 19 nt, Human
ugcuuauuaaacaaaugcu

SEQ ID NO: 976291 - RNA, 23 nt, Human
uggguaaccguuuuuucuuuaaa

SEQ ID NO: 976292 - RNA, 18 nt, Human
ugguaagaacugccuaug

SEQ ID NO: 976293 - RNA, 18 nt, Human
uuuuuuuuuugggggaug

SEQ ID NO: 976294 - RNA, 18 nt, Human
uuuuuuuuuuuuuggggg

SEQ ID NO: 976295 - RNA, 20 nt, Human
uuuuuuuuuuuuuuggggga

SEQ ID NO: 976296 - RNA, 20 nt, Human
uuuuuuuuuuuuuuuggggg

SEQ ID NO: 976297 - RNA, 21 nt, Human
uuuuuuuuuuuuuuuuugggg

SEQ ID NO: 976298 - RNA, 22 nt, Human
uuuuuuuuuuuuuuuuuggggg

SEQ ID NO: 976299 - RNA, 23 nt, Human
aaaauaguccuauccccacacug

SEQ ID NO: 976300 - RNA, 19 nt, Human
aaacaggcaaaucaccuaa

SEQ ID NO: 976301 - RNA, 20 nt, Human
aaacaggcaaaucaccuaag

SEQ ID NO: 976302 - RNA, 26 nt, Human
aaagcauuucuauauuacauuguucu

SEQ ID NO: 976303 - RNA, 22 nt, Human
aacuguacuggaaaaaugcacu

SEQ ID NO: 976304 - RNA, 24 nt, Human
aacuguacuggaaaaaugcacuga

SEQ ID NO: 976305 - RNA, 22 nt, Human
caaaacaggcaaaucaccuaag

SEQ ID NO: 976306 - RNA, 23 nt, Human
cccacacugcauuuccuucacac

SEQ ID NO: 976307 - RNA, 20 nt, Human
ccugaaauaaguguugagaa

SEQ ID NO: 976308 - RNA, 21 nt, Human
gcggcuccugaggacagguac

SEQ ID NO: 976309 - RNA, 26 nt, Human
uaacuguacuggaaaaaugcacugau

SEQ ID NO: 976310 - RNA, 19 nt, Human
uaagacaaaacaggcaaau

SEQ ID NO: 976311 - RNA, 23 nt, Human
uaccugaaauaaguguugagaac

SEQ ID NO: 976312 - RNA, 24 nt, Human
ucuaaaguaugauuuacuuuagca

SEQ ID NO: 976313 - RNA, 21 nt, Human
ugaggacagguacgucgaagc

SEQ ID NO: 976314 - RNA, 22 nt, Human
ugcacuuagaagauuuguuggg

SEQ ID NO: 976315 - RNA, 27 nt, Human
uguuggggguacuuuaggaggucuacc

SEQ ID NO: 976316 - RNA, 19 nt, Human
uucaugucuuacaaacuuu

SEQ ID NO: 976317 - RNA, 21 nt, Human
uuuauuguuaucauuaucguu

SEQ ID NO: 976318 - RNA, 27 nt, Human
aaaaagaaacaaauuuucucuggaaaa

SEQ ID NO: 976319 - RNA, 21 nt, Human
aaaaugcauauaugaauuuua

SEQ ID NO: 976320 - RNA, 18 nt, Human
aaacaaggccacauaagc

SEQ ID NO: 976321 - RNA, 19 nt, Human
aaacaaggccacauaagcc

SEQ ID NO: 976322 - RNA, 20 nt, Human
aaaccacaccacaaauuucc

SEQ ID NO: 976323 - RNA, 19 nt, Human
aacugauugaaacuuaugc

SEQ ID NO: 976324 - RNA, 22 nt, Human
acauacacuuuuuuauaucccu

SEQ ID NO: 976325 - RNA, 23 nt, Human
accacaccacaaauuuccaggua

SEQ ID NO: 976326 - RNA, 25 nt, Human
acucucaaaaaauuuuaaaaagaaa

SEQ ID NO: 976327 - RNA, 27 nt, Human
agaaccaaagccccuaaauucuacuga

SEQ ID NO: 976328 - RNA, 23 nt, Human
agagauuaagaaggcuaaaacaa

SEQ ID NO: 976329 - RNA, 24 nt, Human
cacaagguacccuagccgaagcag

SEQ ID NO: 976330 - RNA, 20 nt, Human
caguagaaaagccgacucaa

SEQ ID NO: 976331 - RNA, 22 nt, Human
ccacaccacaaauuuccaggua

SEQ ID NO: 976332 - RNA, 19 nt, Human
ccacauaagccuggcuggc

SEQ ID NO: 976333 - RNA, 18 nt, Human
ccccuaaauucuacugaa

SEQ ID NO: 976334 - RNA, 24 nt, Human
cccuagccgaagcaguagaaaagc

SEQ ID NO: 976335 - RNA, 19 nt, Human
cgaagcaguagaaaagccg

SEQ ID NO: 976336 - RNA, 20 nt, Human
cgcaaaugaaaaagcuaaac

SEQ ID NO: 976337 - RNA, 22 nt, Human
cuacugaacauacuucaaacau

SEQ ID NO: 976338 - RNA, 20 nt, Human
cucagagauauuuucacugu

SEQ ID NO: 976339 - RNA, 22 nt, Human
cuggcuggccuucaaaaauaaa

SEQ ID NO: 976340 - RNA, 23 nt, Human
gaaaaagaaaucgcuucauggga

SEQ ID NO: 976341 - RNA, 21 nt, Human
gaaaaucuguaagaaccaaag

SEQ ID NO: 976342 - RNA, 24 nt, Human
gaacauacuucaaacauuuugccu

SEQ ID NO: 976343 - RNA, 19 nt, Human
gcaguagaaaagccgacuc

SEQ ID NO: 976344 - RNA, 18 nt, Human
uacccuagccgaagcagu

SEQ ID NO: 976345 - RNA, 25 nt, Human
uacccuagccgaagcaguagaaaag

SEQ ID NO: 976346 - RNA, 19 nt, Human
uagaaaagccgacucaaug

SEQ ID NO: 976347 - RNA, 23 nt, Human
uaggucgcaaaugaaaaagcuaa

SEQ ID NO: 976348 - RNA, 21 nt, Human
uauaucccuaaagauuacaaa

SEQ ID NO: 976349 - RNA, 24 nt, Human
ucaaacagauucuggaaaaagaaa

SEQ ID NO: 976350 - RNA, 24 nt, Human
uccacauacacuuuuuuauauccc

SEQ ID NO: 976351 - RNA, 24 nt, Human
uccacauauacuuuuuuauauccc

SEQ ID NO: 976352 - RNA, 26 nt, Human
uccagguaaaacugauugaaacuuau

SEQ ID NO: 976353 - RNA, 19 nt, Human
ucccuaaagauuacaaaaa

SEQ ID NO: 976354 - RNA, 22 nt, Human
ucuggaaaaagaaaucgcuuca

SEQ ID NO: 976355 - RNA, 23 nt, Human
ucuguaagaaccaaagccccuaa

SEQ ID NO: 976356 - RNA, 19 nt, Human
ugaaaaagcuaaacauuug

SEQ ID NO: 976357 - RNA, 21 nt, Human
uggaaaaagaaaucgcuucau

SEQ ID NO: 976358 - RNA, 18 nt, Human
uguaagaaccaaagcccc

SEQ ID NO: 976359 - RNA, 23 nt, Human
uguacuuacaugacuugaaaauc

SEQ ID NO: 976360 - RNA, 22 nt, Human
gggauggagaugggaacucugg

SEQ ID NO: 976361 - RNA, 22 nt, Human
ugaggaggaaggggcugaugcc

SEQ ID NO: 976362 - RNA, 18 nt, Human
ugccucugaauguccccu

SEQ ID NO: 976363 - RNA, 23 nt, Human
uggagaugggaacucugggagcu

SEQ ID NO: 976364 - RNA, 18 nt, Human
uggggauggagaugggaa

SEQ ID NO: 976365 - RNA, 21 nt, Human
uggugaggaggaaggggcuga

SEQ ID NO: 976366 - RNA, 19 nt, Human
uuuuuuuuuuuggggguaa

SEQ ID NO: 976367 - RNA, 19 nt, Human
uuuuuuuuuuuuugggggu

SEQ ID NO: 976368 - RNA, 20 nt, Human
uuuuuuuuuuuuuuuggggg

SEQ ID NO: 976369 - RNA, 20 nt, Human
acaguauuuauugaauguaa

SEQ ID NO: 976370 - RNA, 26 nt, Human
cagccccauggggaagaaaauuccaa

SEQ ID NO: 976371 - RNA, 22 nt, Human
ccccauggggaagaaaauucca

SEQ ID NO: 976372 - RNA, 18 nt, Human
guaaaguaccccagcccc

SEQ ID NO: 976373 - RNA, 19 nt, Human
uaaaguaccccagccccau

SEQ ID NO: 976374 - RNA, 21 nt, Human
uacccaccugugcauucacac

SEQ ID NO: 976375 - RNA, 18 nt, Human
uuuuuuuuuuuuuuuuug

SEQ ID NO: 976376 - RNA, 23 nt, Human
uuuuuuuuuuuuuuuuuuugggu

SEQ ID NO: 976377 - RNA, 26 nt, Human
uuuuuuuuuuuuuuuuuuuuuuuggg

SEQ ID NO: 976378 - RNA, 21 nt, Human
acuuuauuuucauugccgaag

SEQ ID NO: 976379 - RNA, 18 nt, Human
caguagguuuuuggagcu

SEQ ID NO: 976380 - RNA, 18 nt, Human
cccuaugcauacccuccu

SEQ ID NO: 976381 - RNA, 19 nt, Human
uagguuuuuggagcuuuug

SEQ ID NO: 976382 - RNA, 21 nt, Human
ucuacaguagguuuuuggagc

SEQ ID NO: 976383 - RNA, 21 nt, Human
acaaagccccacugcugacca

SEQ ID NO: 976384 - RNA, 27 nt, Human
acaggcagugucccagccaauggcagc

SEQ ID NO: 976385 - RNA, 20 nt, Human
acgucacaaagccccacugc

SEQ ID NO: 976386 - RNA, 24 nt, Human
cccacugcugaccacucccugggc

SEQ ID NO: 976387 - RNA, 23 nt, Human
cucccugggcuugcgggcgaggg

SEQ ID NO: 976388 - RNA, 24 nt, Human
gacaaggcaaagccacacccuuga

SEQ ID NO: 976389 - RNA, 20 nt, Human
gacgucacaaagccccacug

SEQ ID NO: 976390 - RNA, 18 nt, Human
gaucugccgccgcuccuc

SEQ ID NO: 976391 - RNA, 18 nt, Human
gcccaagguugagagaug

SEQ ID NO: 976392 - RNA, 18 nt, Human
gcgggcgagggguggcag

SEQ ID NO: 976393 - RNA, 22 nt, Human
ucaaugucagcggcaggcuuuu

SEQ ID NO: 976394 - RNA, 24 nt, Human
ucacaaagccccacugcugaccac

SEQ ID NO: 976395 - RNA, 19 nt, Human
ucauacaggcaguguccca

SEQ ID NO: 976396 - RNA, 28 nt, Human
ucucaaacuuuauugucauuccaacgug

SEQ ID NO: 976397 - RNA, 23 nt, Human
ugucccagccaauggcagcccua

SEQ ID NO: 976398 - RNA, 22 nt, Human
aaacacccaagaaaaagggagc

SEQ ID NO: 976399 - RNA, 22 nt, Human
aaauuacuaugaauuaaacuuc

SEQ ID NO: 976400 - RNA, 19 nt, Human
aacaauacaaaugcauuau

SEQ ID NO: 976401 - RNA, 18 nt, Human
acagaggaggaugcugga

SEQ ID NO: 976402 - RNA, 22 nt, Human
agaauuuggagguuggcaccag

SEQ ID NO: 976403 - RNA, 27 nt, Human
agauauugaaaauaauacacguaaacc

SEQ ID NO: 976404 - RNA, 19 nt, Human
aguauuucagacugucauc

SEQ ID NO: 976405 - RNA, 23 nt, Human
cacguaaaccacaaaagaguagc

SEQ ID NO: 976406 - RNA, 26 nt, Human
cauuuuuguuuccaaaguuaauguua

SEQ ID NO: 976407 - RNA, 19 nt, Human
cucugcuucuuugcccaga

SEQ ID NO: 976408 - RNA, 21 nt, Human
cugcugcucugucaacuagug

SEQ ID NO: 976409 - RNA, 19 nt, Human
cuggacccagagccacugc

SEQ ID NO: 976410 - RNA, 18 nt, Human
gcaggcuggccucucaug

SEQ ID NO: 976411 - RNA, 21 nt, Human
gccacugcagaaaauugaagu

SEQ ID NO: 976412 - RNA, 19 nt, Human
ggacccagagccacugcag

SEQ ID NO: 976413 - RNA, 23 nt, Human
ggacccagagccacugcagaaaa

SEQ ID NO: 976414 - RNA, 19 nt, Human
gggcuggacccagagccac

SEQ ID NO: 976415 - RNA, 20 nt, Human
guaaaccacaaaagaguagc

SEQ ID NO: 976416 - RNA, 23 nt, Human
gucaucguuuuuguugcagauuc

SEQ ID NO: 976417 - RNA, 20 nt, Human
uaaaccacaaaagaguagca

SEQ ID NO: 976418 - RNA, 20 nt, Human
uaaggggcuggacccagagc

SEQ ID NO: 976419 - RNA, 23 nt, Human
uaaggggcuggacccagagccac

SEQ ID NO: 976420 - RNA, 24 nt, Human
uaauacacguaaaccacaaaagag

SEQ ID NO: 976421 - RNA, 21 nt, Human
uacaaguaucacagcugcaua

SEQ ID NO: 976422 - RNA, 24 nt, Human
uagaacagaggaggaugcuggaaa

SEQ ID NO: 976423 - RNA, 20 nt, Human
uauaaaucuacaaguaucac

SEQ ID NO: 976424 - RNA, 22 nt, Human
uaucacagcugcauauauuucu

SEQ ID NO: 976425 - RNA, 24 nt, Human
uauuaugaacaauacaaaugcauu

SEQ ID NO: 976426 - RNA, 19 nt, Human
ucuguucacaauguacagu

SEQ ID NO: 976427 - RNA, 20 nt, Human
ugacaaacacccaagaaaaa

SEQ ID NO: 976428 - RNA, 24 nt, Human
ugacaaacacccaagaaaaacucu

SEQ ID NO: 976429 - RNA, 21 nt, Human
ugacagacgagaauuuggagg

SEQ ID NO: 976430 - RNA, 24 nt, Human
uggauuuuuauggacucuuuauua

SEQ ID NO: 976431 - RNA, 19 nt, Human
uucuuugcccagaggcaca

SEQ ID NO: 976432 - RNA, 19 nt, Human
uuuggauuuuuauggacuc

SEQ ID NO: 976433 - RNA, 18 nt, Human
uuuuuuuuuuuuuuuuug

SEQ ID NO: 976434 - RNA, 25 nt, Human
uuuuuuuuuuuuuuuuuuggauuuu

SEQ ID NO: 976435 - RNA, 22 nt, Human
agaggaaaagaaaacuuaagag

SEQ ID NO: 976436 - RNA, 19 nt, Human
aggaaaagaaaacuuaaga

SEQ ID NO: 976437 - RNA, 21 nt, Human
aggaaaagaaaacuuaagagu

SEQ ID NO: 976438 - RNA, 20 nt, Human
auaaucuucucucuuucagu

SEQ ID NO: 976439 - RNA, 20 nt, Human
auaccuucuuucuuccuuua

SEQ ID NO: 976440 - RNA, 19 nt, Human
aucuucucgaaguuuuguu

SEQ ID NO: 976441 - RNA, 22 nt, Human
caucuugaucucccuggcuuca

SEQ ID NO: 976442 - RNA, 23 nt, Human
ccauugaugcugugacuuucuuu

SEQ ID NO: 976443 - RNA, 19 nt, Human
cgcgcuagccuccagcagc

SEQ ID NO: 976444 - RNA, 21 nt, Human
cggccccucuggagaggaaaa

SEQ ID NO: 976445 - RNA, 19 nt, Human
cuccagcagccgccgcgcc

SEQ ID NO: 976446 - RNA, 23 nt, Human
cuccagcagccgccgcgcccacc

SEQ ID NO: 976447 - RNA, 22 nt, Human
cucuggagaggaaaagaaaacu

SEQ ID NO: 976448 - RNA, 22 nt, Human
cugcuuguuuucucauccuuaa

SEQ ID NO: 976449 - RNA, 19 nt, Human
cuuaagauagcauuccacu

SEQ ID NO: 976450 - RNA, 20 nt, Human
gauguuugccagauucuuug

SEQ ID NO: 976451 - RNA, 23 nt, Human
gggucgcgcuagccuccagcagc

SEQ ID NO: 976452 - RNA, 20 nt, Human
guuuuguuaaaaccuccucc

SEQ ID NO: 976453 - RNA, 23 nt, Human
uaaaaccuccuccauugaugcug

SEQ ID NO: 976454 - RNA, 18 nt, Human
uauuagguaauucuugga

SEQ ID NO: 976455 - RNA, 24 nt, Human
ucucuuucaguuuguaauaaagau

SEQ ID NO: 976456 - RNA, 18 nt, Human
ugaaacugcuuguuuucu

SEQ ID NO: 976457 - RNA, 21 nt, Human
ugugauguuugccagauucuu

SEQ ID NO: 976458 - RNA, 24 nt, Human
uguuugauaaucuucucucuuuca

SEQ ID NO: 976459 - RNA, 24 nt, Human
uuaaaaccuccuccauugaugcug

SEQ ID NO: 976460 - RNA, 22 nt, Human
uucauuuguuugauaaucuucu

SEQ ID NO: 976461 - RNA, 22 nt, Human
uuuguuaaaaccuccuccauug

SEQ ID NO: 976462 - RNA, 19 nt, Human
acgagguggcggcggcggu

SEQ ID NO: 976463 - RNA, 23 nt, Human
aggagacgagguggcggcggcgg

SEQ ID NO: 976464 - RNA, 21 nt, Human
aggccggggcccgcgguccag

SEQ ID NO: 976465 - RNA, 19 nt, Human
aggcggggagaccuggggc

SEQ ID NO: 976466 - RNA, 23 nt, Human
cggggaggagacgagguggcggc

SEQ ID NO: 976467 - RNA, 25 nt, Human
gagguggcggcggcgguggcagcaa

SEQ ID NO: 976468 - RNA, 22 nt, Human
gagugaccccggccacgggccc

SEQ ID NO: 976469 - RNA, 20 nt, Human
gcggggagaccuggggcugg

SEQ ID NO: 976470 - RNA, 25 nt, Human
gcgguggcagcaguggcccccaggc

SEQ ID NO: 976471 - RNA, 24 nt, Human
gcugggcggggacggggaggagac

SEQ ID NO: 976472 - RNA, 21 nt, Human
ggcggcggggagugaccccgg

SEQ ID NO: 976473 - RNA, 22 nt, Human
gggcggcggggagugaccccgg

SEQ ID NO: 976474 - RNA, 24 nt, Human
gggcggcggggagugaccccggcc

SEQ ID NO: 976475 - RNA, 20 nt, Human
ggggcugggcggggacgggg

SEQ ID NO: 976476 - RNA, 22 nt, Human
guggcggcggcgguggcagcag

SEQ ID NO: 976477 - RNA, 20 nt, Human
uggcagcaguggcccccagg

SEQ ID NO: 976478 - RNA, 23 nt, Human
uggcggcggcgguggcagcagug

SEQ ID NO: 976479 - RNA, 24 nt, Human
uggcggcggcgguggcagcagugg

SEQ ID NO: 976480 - RNA, 23 nt, Human
ugggcggggacggggaggagacg

SEQ ID NO: 976481 - RNA, 20 nt, Human
uggggcugggcggggacggg

SEQ ID NO: 976482 - RNA, 22 nt, Human
aaagauguuucuagagccugaa

SEQ ID NO: 976483 - RNA, 20 nt, Human
aaccacaaauauauggcccu

SEQ ID NO: 976484 - RNA, 20 nt, Human
aauaccuaucucccuuacac

SEQ ID NO: 976485 - RNA, 19 nt, Human
aaugcagauggggauggag

SEQ ID NO: 976486 - RNA, 21 nt, Human
acaagucacugucuacacuua

SEQ ID NO: 976487 - RNA, 26 nt, Human
acauacacgcagcgcaguucagugua

SEQ ID NO: 976488 - RNA, 19 nt, Human
acuuuaggggcaccugaaa

SEQ ID NO: 976489 - RNA, 24 nt, Human
agaccaacuccaaauuguggaugu

SEQ ID NO: 976490 - RNA, 21 nt, Human
agagguagggaagggggaagu

SEQ ID NO: 976491 - RNA, 19 nt, Human
agggaagggggaagugagg

SEQ ID NO: 976492 - RNA, 19 nt, Human
agggaagggggaagugagg

SEQ ID NO: 976493 - RNA, 19 nt, Human
agguagggaagggggaagu

SEQ ID NO: 976494 - RNA, 21 nt, Human
auauggcccugcgccaaagac

SEQ ID NO: 976495 - RNA, 18 nt, Human
augcaucacuucacauuc

SEQ ID NO: 976496 - RNA, 18 nt, Human
auggcccugcgccaaaga

SEQ ID NO: 976497 - RNA, 20 nt, Human
caaauauauggcccugcgcc

SEQ ID NO: 976498 - RNA, 23 nt, Human
caauaugugcugucuuuccuaca

SEQ ID NO: 976499 - RNA, 19 nt, Human
caggucaaaauuccuacua

SEQ ID NO: 976500 - RNA, 18 nt, Human
caguucucucaauuguaa

SEQ ID NO: 976501 - RNA, 24 nt, Human
ccaaagacagcagauguucuuugg

SEQ ID NO: 976502 - RNA, 18 nt, Human
ccugaaaccacaaauaua

SEQ ID NO: 976503 - RNA, 23 nt, Human
ccugaagacuuccucuugagggu

SEQ ID NO: 976504 - RNA, 19 nt, Human
ccugcugagaccaacucca

SEQ ID NO: 976505 - RNA, 19 nt, Human
ccuggccugaauaucagaa

SEQ ID NO: 976506 - RNA, 27 nt, Human
ccuguaacaauaugugcugucuuuccu

SEQ ID NO: 976507 - RNA, 23 nt, Human
cgacagaagcaguggcuuacauu

SEQ ID NO: 976508 - RNA, 22 nt, Human
cgccaaagacagcagauguucu

SEQ ID NO: 976509 - RNA, 21 nt, Human
cuacuaaguugcauguuaugc

SEQ ID NO: 976510 - RNA, 22 nt, Human
cucaauaccuaucucccuuaca

SEQ ID NO: 976511 - RNA, 25 nt, Human
cugaaaccacaaauauauggccccu

SEQ ID NO: 976512 - RNA, 25 nt, Human
cugaaaccacaaauauauggcccug

SEQ ID NO: 976513 - RNA, 19 nt, Human
cugcaaugggguccugcug

SEQ ID NO: 976514 - RNA, 24 nt, Human
cugcugagaccaacuccaaauugu

SEQ ID NO: 976515 - RNA, 18 nt, Human
cuggccugaauaucagaa

SEQ ID NO: 976516 - RNA, 19 nt, Human
cuuuguaugagccuguaac

SEQ ID NO: 976517 - RNA, 24 nt, Human
gagguagggaagggggaagugagg

SEQ ID NO: 976518 - RNA, 21 nt, Human
gauggagguagagggcuuccc

SEQ ID NO: 976519 - RNA, 20 nt, Human
gcagauuuuuucucccaucu

SEQ ID NO: 976520 - RNA, 23 nt, Human
gcuccuauagacacuuuaggggc

SEQ ID NO: 976521 - RNA, 20 nt, Human
gggaagggggaagugagggu

SEQ ID NO: 976522 - RNA, 19 nt, Human
guacaagucacugucuaca

SEQ ID NO: 976523 - RNA, 23 nt, Human
gugcugucuuuccuacaacacag

SEQ ID NO: 976524 - RNA, 20 nt, Human
uaaaauaagagccaauuauc

SEQ ID NO: 976525 - RNA, 22 nt, Human
uaaaauaagagccaauuaucau

SEQ ID NO: 976526 - RNA, 23 nt, Human
uaaggagaaagagguagggaagg

SEQ ID NO: 976527 - RNA, 24 nt, Human
uacagaguggcucugcaagagaga

SEQ ID NO: 976528 - RNA, 25 nt, Human
ucacauucccacucucccuuucuca

SEQ ID NO: 976529 - RNA, 23 nt, Human
ucaguaaggagaaagagguaggg

SEQ ID NO: 976530 - RNA, 20 nt, Human
ucccuuacacauguguaagg

SEQ ID NO: 976531 - RNA, 21 nt, Human
uccuauagacacuuuaggggc

SEQ ID NO: 976532 - RNA, 21 nt, Human
ucuacuuaggaagguaagaac

SEQ ID NO: 976533 - RNA, 21 nt, Human
ucuagagccugaagacuuccu

SEQ ID NO: 976534 - RNA, 20 nt, Human
ucucaauaccuaucucccuu

SEQ ID NO: 976535 - RNA, 18 nt, Human
ucuguggguguccuggcc

SEQ ID NO: 976536 - RNA, 24 nt, Human
ugaaaccacaaauauauggcccug

SEQ ID NO: 976537 - RNA, 19 nt, Human
ugaaguacaaagguugacu

SEQ ID NO: 976538 - RNA, 20 nt, Human
ugagacuggaggaaaugaau

SEQ ID NO: 976539 - RNA, 21 nt, Human
ugauacacacacacaagcuug

SEQ ID NO: 976540 - RNA, 24 nt, Human
uggaggaaaugaaugcagaugggg

SEQ ID NO: 976541 - RNA, 20 nt, Human
ugggaugaaguacaaagguu

SEQ ID NO: 976542 - RNA, 18 nt, Human
uggggauggagguagagg

SEQ ID NO: 976543 - RNA, 18 nt, Human
ugugcugucuuuccuaca

SEQ ID NO: 976544 - RNA, 24 nt, Human
uuaguggucgugaauauuuuucuc

SEQ ID NO: 976545 - RNA, 20 nt, Human
uucaguguacaagucacugu

SEQ ID NO: 976546 - RNA, 20 nt, Human
acccaacugggcuagaaaug

SEQ ID NO: 976547 - RNA, 21 nt, Human
agaaaugaaguauaaagagaa

SEQ ID NO: 976548 - RNA, 18 nt, Human
agguggugguggcggccg

SEQ ID NO: 976549 - RNA, 24 nt, Human
caccugaaagaaacuucauacuug

SEQ ID NO: 976550 - RNA, 19 nt, Human
cagagcaagauuaugaaga

SEQ ID NO: 976551 - RNA, 21 nt, Human
cucagagcaagauuaugaaga

SEQ ID NO: 976552 - RNA, 21 nt, Human
cugagguggugguggcggccu

SEQ ID NO: 976553 - RNA, 20 nt, Human
gaacuaaaucuauacacagc

SEQ ID NO: 976554 - RNA, 24 nt, Human
uaacucauaaugaauuauaaaacu

SEQ ID NO: 976555 - RNA, 24 nt, Human
uauaaaacuuugauaguuacauug

SEQ ID NO: 976556 - RNA, 20 nt, Human
uccccaucucagagcaagau

SEQ ID NO: 976557 - RNA, 18 nt, Human
uguucuguuccccaucuc

SEQ ID NO: 976558 - RNA, 19 nt, Human
aaaguccccucgagugcac

SEQ ID NO: 976559 - RNA, 19 nt, Human
aacucuggcauggaaacau

SEQ ID NO: 976560 - RNA, 23 nt, Human
agcaggacaccggcaggggaaag

SEQ ID NO: 976561 - RNA, 21 nt, Human
aggaacagcaaggcaggcuuc

SEQ ID NO: 976562 - RNA, 24 nt, Human
aucacagaccaguaucuacuccaa

SEQ ID NO: 976563 - RNA, 18 nt, Human
caaaccagugcuacccag

SEQ ID NO: 976564 - RNA, 23 nt, Human
caaagucuuuuauuuaaaauuuu

SEQ ID NO: 976565 - RNA, 19 nt, Human
cagcgggcggacuacugga

SEQ ID NO: 976566 - RNA, 22 nt, Human
cccacacaaacucuggcaugga

SEQ ID NO: 976567 - RNA, 21 nt, Human
cgaaaacuauggcaucuuccc

SEQ ID NO: 976568 - RNA, 22 nt, Human
cgaaaacuauggcaucuuccca

SEQ ID NO: 976569 - RNA, 18 nt, Human
cgcgaugaccagcgggcg

SEQ ID NO: 976570 - RNA, 19 nt, Human
gagcaggacaccggcaggg

SEQ ID NO: 976571 - RNA, 21 nt, Human
gagcaggacaccggcagggga

SEQ ID NO: 976572 - RNA, 24 nt, Human
ggugcacaugcgcccgcccacaca

SEQ ID NO: 976573 - RNA, 20 nt, Human
ucacagaccaguaucuacca

SEQ ID NO: 976574 - RNA, 19 nt, Human
ucgagugcacucuguggug

SEQ ID NO: 976575 - RNA, 22 nt, Human
ucucuguaggcacuuuagaagu

SEQ ID NO: 976576 - RNA, 21 nt, Human
aaaaaaaaaaaaggaaccuca

SEQ ID NO: 976577 - RNA, 20 nt, Human
aaaaauggcagaaaauacau

SEQ ID NO: 976578 - RNA, 27 nt, Human
aaacagaaacagaagauuagaggccua

SEQ ID NO: 976579 - RNA, 22 nt, Human
aaacagaagauuagaggcccua

SEQ ID NO: 976580 - RNA, 21 nt, Human
aaagaacacuucagcccaaaa

SEQ ID NO: 976581 - RNA, 21 nt, Human
aaagcuaaugagaccccaccc

SEQ ID NO: 976582 - RNA, 20 nt, Human
aacccacuccucacucuccc

SEQ ID NO: 976583 - RNA, 23 nt, Human
aacccacuccucacucuccccag

SEQ ID NO: 976584 - RNA, 27 nt, Human
aacccugcucuucuccaccauccagac

SEQ ID NO: 976585 - RNA, 18 nt, Human
aagauuagaggccuaacu

SEQ ID NO: 976586 - RNA, 21 nt, Human
aagcaaacugaauggguggga

SEQ ID NO: 976587 - RNA, 24 nt, Human
aaggaguguaucuacugcuucucu

SEQ ID NO: 976588 - RNA, 20 nt, Human
acaaagaacacuucagccca

SEQ ID NO: 976589 - RNA, 19 nt, Human
acacugcaggaaccacuuc

SEQ ID NO: 976590 - RNA, 18 nt, Human
accaguuccuacauuccu

SEQ ID NO: 976591 - RNA, 21 nt, Human
acccacuccucacucucccca

SEQ ID NO: 976592 - RNA, 23 nt, Human
accccacuaccauaauaaaacag

SEQ ID NO: 976593 - RNA, 19 nt, Human
accccucuuccuccucuca

SEQ ID NO: 976594 - RNA, 18 nt, Human
acccuggguucacucagc

SEQ ID NO: 976595 - RNA, 20 nt, Human
agaagguagcuaaaggcaag

SEQ ID NO: 976596 - RNA, 21 nt, Human
agacaaaacucccugagucua

SEQ ID NO: 976597 - RNA, 21 nt, Human
agagcaccaaaggaaaaagac

SEQ ID NO: 976598 - RNA, 24 nt, Human
agauacaccaccacccuggguuca

SEQ ID NO: 976599 - RNA, 21 nt, Human
agauauugagggcuguaagcc

SEQ ID NO: 976600 - RNA, 27 nt, Human
agcuucacuccucugucugaggcccca

SEQ ID NO: 976601 - RNA, 22 nt, Human
aggaaaaagacuguccaaagaa

SEQ ID NO: 976602 - RNA, 24 nt, Human
aggaaagaugccccaaaacuuaaa

SEQ ID NO: 976603 - RNA, 19 nt, Human
aggagucucuaaccuuucc

SEQ ID NO: 976604 - RNA, 20 nt, Human
aggauguuuccuguugcaaa

SEQ ID NO: 976605 - RNA, 18 nt, Human
aggcacccccccagcccc

SEQ ID NO: 976606 - RNA, 18 nt, Human
aggggcuauggccagagg

SEQ ID NO: 976607 - RNA, 22 nt, Human
aguagagggaguccagccccca

SEQ ID NO: 976608 - RNA, 19 nt, Human
auaaaacaggauguuuccu

SEQ ID NO: 976609 - RNA, 22 nt, Human
aucauagcaacaugcaaacacc

SEQ ID NO: 976610 - RNA, 18 nt, Human
aucucacccaccuacccc

SEQ ID NO: 976611 - RNA, 24 nt, Human
auguauagagacauuuuugguugu

SEQ ID NO: 976612 - RNA, 24 nt, Human
caaagggcucuuucccugguguuu

SEQ ID NO: 976613 - RNA, 18 nt, Human
caacccacuccucacucu

SEQ ID NO: 976614 - RNA, 23 nt, Human
caacccacuccucacucucccca

SEQ ID NO: 976615 - RNA, 19 nt, Human
caagagagcaccaaaggaa

SEQ ID NO: 976616 - RNA, 22 nt, Human
cacaagguuaugucuuccucag

SEQ ID NO: 976617 - RNA, 23 nt, Human
caccaaaggaaaaagacugucca

SEQ ID NO: 976618 - RNA, 25 nt, Human
caccaccacccuggguucacucagc

SEQ ID NO: 976619 - RNA, 18 nt, Human
cacccccccagccccugc

SEQ ID NO: 976620 - RNA, 23 nt, Human
caccugagaaaacugaaagugcc

SEQ ID NO: 976621 - RNA, 21 nt, Human
cacuaccauaauaaaacagga

SEQ ID NO: 976622 - RNA, 18 nt, Human
cagauacaccaccacccu

SEQ ID NO: 976623 - RNA, 21 nt, Human
cagauacaccaccacccuggg

SEQ ID NO: 976624 - RNA, 18 nt, Human
caggaccagagagagagg

SEQ ID NO: 976625 - RNA, 21 nt, Human
caggagacaggaacucauucc

SEQ ID NO: 976626 - RNA, 19 nt, Human
caggugaagagcuaccucu

SEQ ID NO: 976627 - RNA, 22 nt, Human
cagugggaccuggucuucagac

SEQ ID NO: 976628 - RNA, 26 nt, Human
ccaauccuaccauacccuguucauau

SEQ ID NO: 976629 - RNA, 20 nt, Human
ccagaccccucuuccuccuc

SEQ ID NO: 976630 - RNA, 20 nt, Human
ccaggaaggaggagaagggc

SEQ ID NO: 976631 - RNA, 21 nt, Human
ccaggaaggaggagaagggca

SEQ ID NO: 976632 - RNA, 20 nt, Human
ccaggaggggcuauggccag

SEQ ID NO: 976633 - RNA, 19 nt, Human
cccacuccucacucucccc

SEQ ID NO: 976634 - RNA, 24 nt, Human
cccacuccucacucuccccagaua

SEQ ID NO: 976635 - RNA, 21 nt, Human
cccagaccaucauucaggaga

SEQ ID NO: 976636 - RNA, 20 nt, Human
ccccaaagggcucuuucccu

SEQ ID NO: 976637 - RNA, 23 nt, Human
ccccagauacaccaccacccugg

SEQ ID NO: 976638 - RNA, 22 nt, Human
ccgaagaucacggugaccagag

SEQ ID NO: 976639 - RNA, 22 nt, Human
ccuauuuaucucaccauccuca

SEQ ID NO: 976640 - RNA, 23 nt, Human
cgaagaacaccugagaaaacuga

SEQ ID NO: 976641 - RNA, 21 nt, Human
cuagagccucucccugcuccc

SEQ ID NO: 976642 - RNA, 21 nt, Human
cuaggagucucuaaccuuucc

SEQ ID NO: 976643 - RNA, 25 nt, Human
cuaguucugccgcauucuggguuuc

SEQ ID NO: 976644 - RNA, 18 nt, Human
cucaucugucuuguucug

SEQ ID NO: 976645 - RNA, 20 nt, Human
cuccccuuuccccaauccua

SEQ ID NO: 976646 - RNA, 19 nt, Human
cuccucugucugaggcccc

SEQ ID NO: 976647 - RNA, 21 nt, Human
cugaauuaaagaauuguuugg

SEQ ID NO: 976648 - RNA, 18 nt, Human
cugcaggaaccacuucuc

SEQ ID NO: 976649 - RNA, 18 nt, Human
cugccuuccuaauuaccc

SEQ ID NO: 976650 - RNA, 18 nt, Human
cugcuccuacguuguuuu

SEQ ID NO: 976651 - RNA, 22 nt, Human
cugcuucucucuccccuuuccc

SEQ ID NO: 976652 - RNA, 22 nt, Human
cugguucaaggagggaucuggu

SEQ ID NO: 976653 - RNA, 22 nt, Human
cuguugcaaagcuaaugagacc

SEQ ID NO: 976654 - RNA, 23 nt, Human
cuuaagacuccuaaacucacaga

SEQ ID NO: 976655 - RNA, 26 nt, Human
cuucacuccucugucugaggccccaa

SEQ ID NO: 976656 - RNA, 20 nt, Human
gaaaaagacuguccaaagaa

SEQ ID NO: 976657 - RNA, 22 nt, Human
gaaaaagacuguccaaagaaca

SEQ ID NO: 976658 - RNA, 20 nt, Human
gaccccacccuucuugucuc

SEQ ID NO: 976659 - RNA, 23 nt, Human
gacccugaaaaauggcagaaaau

SEQ ID NO: 976660 - RNA, 24 nt, Human
gagagcaccaaaggaaaaagacug

SEQ ID NO: 976661 - RNA, 20 nt, Human
gagggcaggaaagaugcccc

SEQ ID NO: 976662 - RNA, 20 nt, Human
gaggguuuccuaggcuucag

SEQ ID NO: 976663 - RNA, 19 nt, Human
gaggugggcaggcaggcac

SEQ ID NO: 976664 - RNA, 22 nt, Human
gaugaacaggaccagagagaga

SEQ ID NO: 976665 - RNA, 20 nt, Human
gcacccagaccaucauucag

SEQ ID NO: 976666 - RNA, 27 nt, Human
gcuucagcuuugauaaucucacccacc

SEQ ID NO: 976667 - RNA, 22 nt, Human
ggcacccccccagccccugcuu

SEQ ID NO: 976668 - RNA, 20 nt, Human
ggcuggaaacagaauggggg

SEQ ID NO: 976669 - RNA, 21 nt, Human
gggagguuggcagagggcagg

SEQ ID NO: 976670 - RNA, 21 nt, Human
guaaugcacaaaauaggaaac

SEQ ID NO: 976671 - RNA, 21 nt, Human
gucugaggccccaaagggcuc

SEQ ID NO: 976672 - RNA, 22 nt, Human
uaaacagaaacagaagauuaga

SEQ ID NO: 976673 - RNA, 29 nt, Human
uaaacagaaacagaagauuagaggcuguc

SEQ ID NO: 976674 - RNA, 23 nt, Human
uaauagggauagaguuaagggcg

SEQ ID NO: 976675 - RNA, 21 nt, Human
uacguuguuuucccauuuaaa

SEQ ID NO: 976676 - RNA, 19 nt, Human
uagaaugaggccgaagauc

SEQ ID NO: 976677 - RNA, 21 nt, Human
uagacccugaaaaauggcaga

SEQ ID NO: 976678 - RNA, 21 nt, Human
uagcuaaaggcaagagagcac

SEQ ID NO: 976679 - RNA, 24 nt, Human
uagcuaaaggcaagagagcaccaa

SEQ ID NO: 976680 - RNA, 18 nt, Human
uaggcagauagggaaaag

SEQ ID NO: 976681 - RNA, 25 nt, Human
uagggcacaaaaauagagcuuaaaa

SEQ ID NO: 976682 - RNA, 18 nt, Human
uauuuaaaaguccaacaa

SEQ ID NO: 976683 - RNA, 23 nt, Human
uauuuaaaaguccaacaacuuuu

SEQ ID NO: 976684 - RNA, 18 nt, Human
ucacagaugauuguuuuc

SEQ ID NO: 976685 - RNA, 19 nt, Human
ucacccaccuaccccauuu

SEQ ID NO: 976686 - RNA, 22 nt, Human
uccaccauccagacguucagcu

SEQ ID NO: 976687 - RNA, 24 nt, Human
uccaccauccagacguucagcuac

SEQ ID NO: 976688 - RNA, 21 nt, Human
uccccaauccuaccauacccu

SEQ ID NO: 976689 - RNA, 18 nt, Human
uccccagauacaccacca

SEQ ID NO: 976690 - RNA, 22 nt, Human
uccccagauacaccaccacccu

SEQ ID NO: 976691 - RNA, 31 nt, Human
uccccagauacaccaccacccuggguucacu

SEQ ID NO: 976692 - RNA, 24 nt, Human
ucccugguguuuggacaacccacu

SEQ ID NO: 976693 - RNA, 18 nt, Human
uccguggccgccagugug

SEQ ID NO: 976694 - RNA, 22 nt, Human
uccuagagaacuccuaucucag

SEQ ID NO: 976695 - RNA, 22 nt, Human
uccucaaugaucagaaguccac

SEQ ID NO: 976696 - RNA, 18 nt, Human
uccuguaaugcacaaaau

SEQ ID NO: 976697 - RNA, 18 nt, Human
ucggaacccugcucuucu

SEQ ID NO: 976698 - RNA, 27 nt, Human
ucuaggacuagggcacaaaaauagagc

SEQ ID NO: 976699 - RNA, 19 nt, Human
ucuccaggaggggcuaugg

SEQ ID NO: 976700 - RNA, 23 nt, Human
ucuccccagauacaccaccaccc

SEQ ID NO: 976701 - RNA, 20 nt, Human
ucucuaaccuuuccacccua

SEQ ID NO: 976702 - RNA, 21 nt, Human
ucuggguuucuuuccagaccc

SEQ ID NO: 976703 - RNA, 19 nt, Human
ugaaggucagugucucaga

SEQ ID NO: 976704 - RNA, 22 nt, Human
ugaauuaaagaauuguuuggag

SEQ ID NO: 976705 - RNA, 20 nt, Human
ugaucaguccugcugccuug

SEQ ID NO: 976706 - RNA, 22 nt, Human
ugcuccuacguuguuuucccau

SEQ ID NO: 976707 - RNA, 19 nt, Human
ugcugugaggaucuuaaga

SEQ ID NO: 976708 - RNA, 23 nt, Human
uggaaauuugaaaaaaaaaaaaa

SEQ ID NO: 976709 - RNA, 22 nt, Human
uggaaucccuggaaccuuuaac

SEQ ID NO: 976710 - RNA, 19 nt, Human
uggaaugucaucaggugaa

SEQ ID NO: 976711 - RNA, 23 nt, Human
uggcacccagaccaucauucagg

SEQ ID NO: 976712 - RNA, 21 nt, Human
uggcagagggcaggaaagaug

SEQ ID NO: 976713 - RNA, 23 nt, Human
ugggcuggaaacagaaugggggu

SEQ ID NO: 976714 - RNA, 20 nt, Human
uggguuucuuuccagacccc

SEQ ID NO: 976715 - RNA, 19 nt, Human
ugguguuagcagagagaua

SEQ ID NO: 976716 - RNA, 21 nt, Human
uguaaugcacaaaauaggaaa

SEQ ID NO: 976717 - RNA, 21 nt, Human
ugucaaaggcaucucgguugu

SEQ ID NO: 976718 - RNA, 18 nt, Human
ugucauaacuagaguggg

SEQ ID NO: 976719 - RNA, 21 nt, Human
ugugaaaccuuguucuagagc

SEQ ID NO: 976720 - RNA, 23 nt, Human
uguucuagagccucucccugcuc

SEQ ID NO: 976721 - RNA, 18 nt, Human
uuagacccugaaaaaugg

SEQ ID NO: 976722 - RNA, 21 nt, Human
uuaggcagauagggaaaagag

SEQ ID NO: 976723 - RNA, 19 nt, Human
uucaagauggcagaaccau

SEQ ID NO: 976724 - RNA, 21 nt, Human
uuccagguuccuagagaacuc

SEQ ID NO: 976725 - RNA, 23 nt, Human
uuccagguuccuagagaacuccu

SEQ ID NO: 976726 - RNA, 23 nt, Human
uuccuaggcuucagcgcucccuc

SEQ ID NO: 976727 - RNA, 25 nt, Human
uugcugggaagcugguaaacagaaa

SEQ ID NO: 976728 - RNA, 20 nt, Human
uuggacaacccacuccucac

SEQ ID NO: 976729 - RNA, 19 nt, Human
uuucagagcaaccagcuug

SEQ ID NO: 976730 - RNA, 23 nt, Human
uuuccacccuauccuguuaaccc

SEQ ID NO: 976731 - RNA, 19 nt, Human
uuuggacaacccacuccuc

SEQ ID NO: 976732 - RNA, 21 nt, Human
auacugcauuucaacuuuaaa

SEQ ID NO: 976733 - RNA, 21 nt, Human
ggccaaaggaugcagaaggau

SEQ ID NO: 976734 - RNA, 22 nt, Human
uaacaggaucguuuauaaaaca

SEQ ID NO: 976735 - RNA, 23 nt, Human
uauaaggugaagaaagcuuuuua

SEQ ID NO: 976736 - RNA, 18 nt, Human
ugaagaaagcuuuuuaac

SEQ ID NO: 976737 - RNA, 19 nt, Human
ugcagaaggauauauggug

SEQ ID NO: 976738 - RNA, 20 nt, Human
uuaaaauaaacaacaaaagc

SEQ ID NO: 976739 - RNA, 19 nt, Human
uucccagaguuuuuaugug

SEQ ID NO: 976740 - RNA, 18 nt, Human
aaaaaggucccaggccuc

SEQ ID NO: 976741 - RNA, 21 nt, Human
aaaaaugaggggacagaugug

SEQ ID NO: 976742 - RNA, 24 nt, Human
aaagaaaucccagagggaccccag

SEQ ID NO: 976743 - RNA, 25 nt, Human
aaggggcagcagaauaguuccagag

SEQ ID NO: 976744 - RNA, 22 nt, Human
acacgcacucacgcaugucccc

SEQ ID NO: 976745 - RNA, 22 nt, Human
acuccagacacauaaaaagggg

SEQ ID NO: 976746 - RNA, 21 nt, Human
agagaagcucuugggacucug

SEQ ID NO: 976747 - RNA, 18 nt, Human
agcacugcuacccugccu

SEQ ID NO: 976748 - RNA, 20 nt, Human
caacacagccauagaugggc

SEQ ID NO: 976749 - RNA, 28 nt, Human
cacacgcacucacgcauguccccgcgcg

SEQ ID NO: 976750 - RNA, 18 nt, Human
cacccaaaacaugaggau

SEQ ID NO: 976751 - RNA, 20 nt, Human
cacccaccacacgcacucag

SEQ ID NO: 976752 - RNA, 18 nt, Human
cagaauaguuccagagaa

SEQ ID NO: 976753 - RNA, 23 nt, Human
cagacaggcccgggcugggcuuc

SEQ ID NO: 976754 - RNA, 21 nt, Human
cagcagaauaguuccagagaa

SEQ ID NO: 976755 - RNA, 18 nt, Human
cagcagggcccccacccc

SEQ ID NO: 976756 - RNA, 21 nt, Human
cagcgaucuuaaaaagguccc

SEQ ID NO: 976757 - RNA, 23 nt, Human
ccccuuaccccaaaaggugggga

SEQ ID NO: 976758 - RNA, 24 nt, Human
ccccuuaccccaaaagguggggau

SEQ ID NO: 976759 - RNA, 18 nt, Human
ccggcggacugcaggcag

SEQ ID NO: 976760 - RNA, 18 nt, Human
ccuggcugggacgugagg

SEQ ID NO: 976761 - RNA, 22 nt, Human
cuccacccaccacacgcacuca

SEQ ID NO: 976762 - RNA, 21 nt, Human
cuggcuccacccaccacacgc

SEQ ID NO: 976763 - RNA, 23 nt, Human
cuggcuccacccaccacacgcac

SEQ ID NO: 976764 - RNA, 24 nt, Human
cuuaccccaaaagguggggaugcg

SEQ ID NO: 976765 - RNA, 19 nt, Human
gaacuggaagacgccggcg

SEQ ID NO: 976766 - RNA, 21 nt, Human
gacaaagaaaucccagaggga

SEQ ID NO: 976767 - RNA, 22 nt, Human
gaguauagugguccauaggucc

SEQ ID NO: 976768 - RNA, 18 nt, Human
gauaacagcucccagagg

SEQ ID NO: 976769 - RNA, 20 nt, Human
gcacuccccuuaccccaaaa

SEQ ID NO: 976770 - RNA, 23 nt, Human
gcagcacuccccuuaccccaaaa

SEQ ID NO: 976771 - RNA, 22 nt, Human
gcagggcccccaccccagauga

SEQ ID NO: 976772 - RNA, 19 nt, Human
gcccgggcugggcuugggg

SEQ ID NO: 976773 - RNA, 19 nt, Human
ggagccucgggugugcuca

SEQ ID NO: 976774 - RNA, 24 nt, Human
ggcgcgccaggaguuccuugugcu

SEQ ID NO: 976775 - RNA, 20 nt, Human
gggcucaggguugccagcag

SEQ ID NO: 976776 - RNA, 18 nt, Human
ggggacagaugugacaac

SEQ ID NO: 976777 - RNA, 18 nt, Human
uacccugccuccccgagu

SEQ ID NO: 976778 - RNA, 22 nt, Human
uaggucaugcgcuugcgguucc

SEQ ID NO: 976779 - RNA, 23 nt, Human
ucaggcccggcggacugcaggca

SEQ ID NO: 976780 - RNA, 23 nt, Human
ucccagacaggcccgggcugggc

SEQ ID NO: 976781 - RNA, 18 nt, Human
ucccccagcggcuccgca

SEQ ID NO: 976782 - RNA, 21 nt, Human
ucgggugugcucaggcccggc

SEQ ID NO: 976783 - RNA, 24 nt, Human
ucugacaagagggaaccuuggaca

SEQ ID NO: 976784 - RNA, 19 nt, Human
ugacaaagaaaucccagag

SEQ ID NO: 976785 - RNA, 22 nt, Human
ugacaaagaaaucccagaggga

SEQ ID NO: 976786 - RNA, 19 nt, Human
ugacaagagggaaccuugg

SEQ ID NO: 976787 - RNA, 21 nt, Human
ugaggaucccagggagucugu

SEQ ID NO: 976788 - RNA, 21 nt, Human
ugauuggggaacuccagacac

SEQ ID NO: 976789 - RNA, 21 nt, Human
ugcgcuugaccuugcggaucu

SEQ ID NO: 976790 - RNA, 20 nt, Human
uggcagggcagcacuccccu

SEQ ID NO: 976791 - RNA, 22 nt, Human
uggccccagcggcgcgccagga

SEQ ID NO: 976792 - RNA, 21 nt, Human
ugggagccucgggugugcuca

SEQ ID NO: 976793 - RNA, 20 nt, Human
ugggcuuggggauuauggca

SEQ ID NO: 976794 - RNA, 21 nt, Human
uuccagagaauugggggaucu

SEQ ID NO: 976795 - RNA, 22 nt, Human
uuccagggggauccuggcuggg

SEQ ID NO: 976796 - RNA, 21 nt, Human
aaccaguucugcuggcagaga

SEQ ID NO: 976797 - RNA, 19 nt, Human
agaguuagggugaggggga

SEQ ID NO: 976798 - RNA, 25 nt, Human
agauacauacaucucaaaaaaggca

SEQ ID NO: 976799 - RNA, 20 nt, Human
agcggagcugcuggacuagg

SEQ ID NO: 976800 - RNA, 22 nt, Human
agcugcuggacuagggugaaaa

SEQ ID NO: 976801 - RNA, 19 nt, Human
aggcaauaacgaaaacauc

SEQ ID NO: 976802 - RNA, 22 nt, Human
agggugagggggaaaaugguua

SEQ ID NO: 976803 - RNA, 18 nt, Human
aucacaagcacucucuga

SEQ ID NO: 976804 - RNA, 22 nt, Human
auucuccaauuugaaacuuuuc

SEQ ID NO: 976805 - RNA, 23 nt, Human
caaaaaaggcaauaacgaaaaca

SEQ ID NO: 976806 - RNA, 21 nt, Human
cagaacaaaaccaguucugcu

SEQ ID NO: 976807 - RNA, 23 nt, Human
cagaacaaaaccaguucugcugg

SEQ ID NO: 976808 - RNA, 25 nt, Human
cccauccuaauccacaaagacugcc

SEQ ID NO: 976809 - RNA, 18 nt, Human
cugaccgccgaggcugca

SEQ ID NO: 976810 - RNA, 22 nt, Human
cugcuggacuagggugaaaauu

SEQ ID NO: 976811 - RNA, 18 nt, Human
ggguguguguggugugug

SEQ ID NO: 976812 - RNA, 20 nt, Human
guguguggugugugugugua

SEQ ID NO: 976813 - RNA, 26 nt, Human
uaaacuggaaagcaaucaagucuuua

SEQ ID NO: 976814 - RNA, 18 nt, Human
uaaaugacuaugauacua

SEQ ID NO: 976815 - RNA, 22 nt, Human
uacgugaaaucacaagcacucu

SEQ ID NO: 976816 - RNA, 18 nt, Human
uagggugagggggaaaau

SEQ ID NO: 976817 - RNA, 31 nt, Human
uauauauguauacacacauauagauauaaca

SEQ ID NO: 976818 - RNA, 21 nt, Human
uauauguauacacacauauag

SEQ ID NO: 976819 - RNA, 24 nt, Human
uauauguauacacacauauagaua

SEQ ID NO: 976820 - RNA, 22 nt, Human
uauauguauacacacauauagg

SEQ ID NO: 976821 - RNA, 24 nt, Human
ucaaaaaaggcaauaacgaaaaca

SEQ ID NO: 976822 - RNA, 23 nt, Human
uccaccauccaagugucucuuuu

SEQ ID NO: 976823 - RNA, 20 nt, Human
ucucaaaaaaggcaauaacg

SEQ ID NO: 976824 - RNA, 23 nt, Human
ucuguacuauucagaacaaaacc

SEQ ID NO: 976825 - RNA, 25 nt, Human
ucuguguguauauauuauauaugua

SEQ ID NO: 976826 - RNA, 23 nt, Human
ugaaaucacaagcacucucugac

SEQ ID NO: 976827 - RNA, 25 nt, Human
ugaaaucacaagcacucucugaccg

SEQ ID NO: 976828 - RNA, 18 nt, Human
ugcauuguggcggcagaa

SEQ ID NO: 976829 - RNA, 24 nt, Human
uggcagagauuguggguucgcagg

SEQ ID NO: 976830 - RNA, 21 nt, Human
ugguguguggugugugugugu

SEQ ID NO: 976831 - RNA, 24 nt, Human
uguacacuuguaucuguguguaua

SEQ ID NO: 976832 - RNA, 22 nt, Human
ugugguguguggugugugugug

SEQ ID NO: 976833 - RNA, 20 nt, Human
ugugguguguguguguacac

SEQ ID NO: 976834 - RNA, 21 nt, Human
ugugguguguguguguacacu

SEQ ID NO: 976835 - RNA, 22 nt, Human
ugugguguguguguguacacuu

SEQ ID NO: 976836 - RNA, 22 nt, Human
ugugguguguguguguacacuu

SEQ ID NO: 976837 - RNA, 22 nt, Human
uguguacacuuguaucugugug

SEQ ID NO: 976838 - RNA, 25 nt, Human
uguguacacuuguaucuguguguau

SEQ ID NO: 976839 - RNA, 28 nt, Human
uguguacacuuguaucuguguguauaua

SEQ ID NO: 976840 - RNA, 18 nt, Human
uguguauauauuauauau

SEQ ID NO: 976841 - RNA, 18 nt, Human
uguguauauauuauauau

SEQ ID NO: 976842 - RNA, 19 nt, Human
uguguauauauuauauaug

SEQ ID NO: 976843 - RNA, 18 nt, Human
uguguggugugugugugu

SEQ ID NO: 976844 - RNA, 23 nt, Human
uguguguauauauuauauaugua

SEQ ID NO: 976845 - RNA, 21 nt, Human
uuagggugagggggaaaaugg

SEQ ID NO: 976846 - RNA, 22 nt, Human
auccucuccaugcccaccacug

SEQ ID NO: 976847 - RNA, 18 nt, Human
ccacuguucuccagcuga

SEQ ID NO: 976848 - RNA, 22 nt, Human
cccaccacuguucuccagcuga

SEQ ID NO: 976849 - RNA, 19 nt, Human
cuugaggugcuccuguggg

SEQ ID NO: 976850 - RNA, 20 nt, Human
ucauauccucuccaugccca

SEQ ID NO: 976851 - RNA, 18 nt, Human
ucaugucauauccucucc

SEQ ID NO: 976852 - RNA, 23 nt, Human
uccaugcccaccacuguucucca

SEQ ID NO: 976853 - RNA, 23 nt, Human
ucuccaugcccaccacuguucuc

SEQ ID NO: 976854 - RNA, 22 nt, Human
ugucauauccucuccaugccca

SEQ ID NO: 976855 - RNA, 23 nt, Human
uuuuuuuuucaguugggcuggaa

SEQ ID NO: 976856 - RNA, 20 nt, Human
uuuuuuuuuuuuucaguugg

SEQ ID NO: 976857 - RNA, 24 nt, Human
uuuuuuuuuuuuuuuucaguuggg

SEQ ID NO: 976858 - RNA, 22 nt, Human
uuuuuuuuuuuuuuuuuuucag

SEQ ID NO: 976859 - RNA, 20 nt, Human
aaaaccacaaugagauacca

SEQ ID NO: 976860 - RNA, 23 nt, Human
aaacaaacuaccugcacccaugc

SEQ ID NO: 976861 - RNA, 19 nt, Human
aaacauggaaucaaaccaa

SEQ ID NO: 976862 - RNA, 20 nt, Human
aaacuggaagccagucugga

SEQ ID NO: 976863 - RNA, 18 nt, Human
aaagauacaugcaugugu

SEQ ID NO: 976864 - RNA, 20 nt, Human
aaaugugguacauauaugcc

SEQ ID NO: 976865 - RNA, 19 nt, Human
aacaaugagaacacgugga

SEQ ID NO: 976866 - RNA, 25 nt, Human
aacagaggaagauaacaauaacaau

SEQ ID NO: 976867 - RNA, 19 nt, Human
aaccugcagguccugcaca

SEQ ID NO: 976868 - RNA, 20 nt, Human
acucaucucacuccccaucu

SEQ ID NO: 976869 - RNA, 27 nt, Human
acuuuacuggaaaaaauugagagugac

SEQ ID NO: 976870 - RNA, 18 nt, Human
agccacaguaguaaccag

SEQ ID NO: 976871 - RNA, 18 nt, Human
agggacauggaugaagcu

SEQ ID NO: 976872 - RNA, 20 nt, Human
auaccaucucaugccaguca

SEQ ID NO: 976873 - RNA, 22 nt, Human
augcagccauaaaaagaaauga

SEQ ID NO: 976874 - RNA, 24 nt, Human
augcagccauaaaaagaaaugaga

SEQ ID NO: 976875 - RNA, 25 nt, Human
caaaacggauggauauugugcauca

SEQ ID NO: 976876 - RNA, 22 nt, Human
caaacaaacuaccugcacccau

SEQ ID NO: 976877 - RNA, 18 nt, Human
cagaaacaacagaugcug

SEQ ID NO: 976878 - RNA, 24 nt, Human
cagcaaaguaacgcaggaacaaaa

SEQ ID NO: 976879 - RNA, 23 nt, Human
cauaugaaaaaaagcucaacacc

SEQ ID NO: 976880 - RNA, 22 nt, Human
ccuggaacucugaacucucaaa

SEQ ID NO: 976881 - RNA, 22 nt, Human
cgcaggaacaaaaguaaauacc

SEQ ID NO: 976882 - RNA, 21 nt, Human
cuaccugcacccaugcccuuu

SEQ ID NO: 976883 - RNA, 23 nt, Human
cucaaacaaacuaccugcaccca

SEQ ID NO: 976884 - RNA, 18 nt, Human
cuggaacucugaacucuc

SEQ ID NO: 976885 - RNA, 20 nt, Human
gaacaaaaguaaauaccaca

SEQ ID NO: 976886 - RNA, 22 nt, Human
gagaaaugcaaaucaaaaccac

SEQ ID NO: 976887 - RNA, 20 nt, Human
gagaugaacaaugagaacac

SEQ ID NO: 976888 - RNA, 23 nt, Human
gcaucaaaagagccaaagaugga

SEQ ID NO: 976889 - RNA, 24 nt, Human
gccaauuccugaaagaucuagaag

SEQ ID NO: 976890 - RNA, 21 nt, Human
gcguucuguucugggaagggc

SEQ ID NO: 976891 - RNA, 19 nt, Human
ggagaugaacaaugagaac

SEQ ID NO: 976892 - RNA, 21 nt, Human
gucagguacaggaacaguacu

SEQ ID NO: 976893 - RNA, 26 nt, Human
guggacuguugagggggcagggggag

SEQ ID NO: 976894 - RNA, 23 nt, Human
uaaaagguccccaauaggauuga

SEQ ID NO: 976895 - RNA, 22 nt, Human
uaaacugggaguucuagaaguu

SEQ ID NO: 976896 - RNA, 18 nt, Human
uaaagaaaaugugguaca

SEQ ID NO: 976897 - RNA, 25 nt, Human
uaaagaaaaugugguacauauaugc

SEQ ID NO: 976898 - RNA, 22 nt, Human
uaaauugguucaaccauugugg

SEQ ID NO: 976899 - RNA, 19 nt, Human
uaauggguugauaggugca

SEQ ID NO: 976900 - RNA, 20 nt, Human
uacaauagcaaaaacaugga

SEQ ID NO: 976901 - RNA, 23 nt, Human
uaccacauguucucacuugcaag

SEQ ID NO: 976902 - RNA, 26 nt, Human
uagcaaaaacauggaaucaaaccaaa

SEQ ID NO: 976903 - RNA, 24 nt, Human
uauaaagauacaugcauguguaug

SEQ ID NO: 976904 - RNA, 21 nt, Human
uauuaaaaaguccagaaacaa

SEQ ID NO: 976905 - RNA, 21 nt, Human
ucaaaguucugauugucuuca

SEQ ID NO: 976906 - RNA, 21 nt, Human
ucagagaaaugcaaaucaaaa

SEQ ID NO: 976907 - RNA, 23 nt, Human
ucagagaaaugcaaaucaaaacc

SEQ ID NO: 976908 - RNA, 22 nt, Human
ucagcaaaguaacgcaggaaca

SEQ ID NO: 976909 - RNA, 23 nt, Human
uccccaauaggauugagccacag

SEQ ID NO: 976910 - RNA, 24 nt, Human
uccugggaaaucucucaaacaaac

SEQ ID NO: 976911 - RNA, 21 nt, Human
ucuucucucuucccuucucuu

SEQ ID NO: 976912 - RNA, 20 nt, Human
ugaaaaaaagcucaacaccg

SEQ ID NO: 976913 - RNA, 24 nt, Human
ugaaagaucuagaaccagaaauac

SEQ ID NO: 976914 - RNA, 23 nt, Human
ugcacccaugcccuuuucccagg

SEQ ID NO: 976915 - RNA, 21 nt, Human
uggaaaaaauugagagugaca

SEQ ID NO: 976916 - RNA, 20 nt, Human
uggaauacuaugcagccaua

SEQ ID NO: 976917 - RNA, 21 nt, Human
uggaaucaaaccaaauaucca

SEQ ID NO: 976918 - RNA, 20 nt, Human
uggauaaagaaaauguggua

SEQ ID NO: 976919 - RNA, 19 nt, Human
ugggaagggcuaagaucuu

SEQ ID NO: 976920 - RNA, 25 nt, Human
ugggaagggcuaagaucuuggaaug

SEQ ID NO: 976921 - RNA, 18 nt, Human
uuaugcggccaacaaaca

SEQ ID NO: 976922 - RNA, 22 nt, Human
uucacugcagcacuauuuacaa

SEQ ID NO: 976923 - RNA, 24 nt, Human
uuuaaaaagaaaauuuguaagccu

SEQ ID NO: 976924 - RNA, 18 nt, Human
uuucccaggguuaguuuc

SEQ ID NO: 976925 - RNA, 21 nt, Human
aaaguuuuucccagcccaggc

SEQ ID NO: 976926 - RNA, 26 nt, Human
aacaaaaagcaacucuuuacagcacu

SEQ ID NO: 976927 - RNA, 25 nt, Human
aagcaacucuuuacagcacaaacua

SEQ ID NO: 976928 - RNA, 20 nt, Human
acaaaaagcaacucuuuaca

SEQ ID NO: 976929 - RNA, 21 nt, Human
acagggaaguccuuccuccca

SEQ ID NO: 976930 - RNA, 24 nt, Human
agagaggauagagaggccaaacag

SEQ ID NO: 976931 - RNA, 24 nt, Human
agaggaagagaggauagagaggcc

SEQ ID NO: 976932 - RNA, 24 nt, Human
aggaagcagggccaggugagagcc

SEQ ID NO: 976933 - RNA, 21 nt, Human
aggcaagagucugguuccaaa

SEQ ID NO: 976934 - RNA, 21 nt, Human
aggguggggcugaucaagggc

SEQ ID NO: 976935 - RNA, 22 nt, Human
caaaaagcaacucuuuacagca

SEQ ID NO: 976936 - RNA, 22 nt, Human
caagagucugguuccaaaguuu

SEQ ID NO: 976937 - RNA, 23 nt, Human
caagagucugguuccaaaguuuu

SEQ ID NO: 976938 - RNA, 21 nt, Human
caccaugggguagggacaggc

SEQ ID NO: 976939 - RNA, 19 nt, Human
cagagcgcgggccucuggg

SEQ ID NO: 976940 - RNA, 20 nt, Human
cagaggaaacaaaacuccaa

SEQ ID NO: 976941 - RNA, 26 nt, Human
cagcugagcuucuccuggcucugucu

SEQ ID NO: 976942 - RNA, 18 nt, Human
ccagcccaggccucugcc

SEQ ID NO: 976943 - RNA, 23 nt, Human
cccaaggguuuucugcuccuucc

SEQ ID NO: 976944 - RNA, 24 nt, Human
cccagcccaggccucugccuuggc

SEQ ID NO: 976945 - RNA, 25 nt, Human
ccccacuccucuuccuagcaccaug

SEQ ID NO: 976946 - RNA, 19 nt, Human
ccccaggggggucaccuuc

SEQ ID NO: 976947 - RNA, 24 nt, Human
ccuccaaacuccuaugcaggcagg

SEQ ID NO: 976948 - RNA, 18 nt, Human
ccuugggggugggggcug

SEQ ID NO: 976949 - RNA, 23 nt, Human
cgacccggugcucggagagcugg

SEQ ID NO: 976950 - RNA, 18 nt, Human
cugaggcacagugggccu

SEQ ID NO: 976951 - RNA, 21 nt, Human
cugguuccaaaguuuuuccca

SEQ ID NO: 976952 - RNA, 22 nt, Human
cuugggggugggggcugcggaa

SEQ ID NO: 976953 - RNA, 19 nt, Human
gaagcagggccaggugaga

SEQ ID NO: 976954 - RNA, 20 nt, Human
gacaggguuggggccuccag

SEQ ID NO: 976955 - RNA, 24 nt, Human
gccaggguggggcugaucaagggc

SEQ ID NO: 976956 - RNA, 18 nt, Human
gcuggugaccugcgcagg

SEQ ID NO: 976957 - RNA, 19 nt, Human
ggaagaggagcucgggagg

SEQ ID NO: 976958 - RNA, 18 nt, Human
ggugcucggagagcuggg

SEQ ID NO: 976959 - RNA, 18 nt, Human
gucucugaggcacagugg

SEQ ID NO: 976960 - RNA, 24 nt, Human
gucugcuggucuaggccagggugg

SEQ ID NO: 976961 - RNA, 27 nt, Human
uaaacaaaaagcaacucuuuacagcac

SEQ ID NO: 976962 - RNA, 19 nt, Human
uaaauaaacaaaaagcaac

SEQ ID NO: 976963 - RNA, 23 nt, Human
uaggccaggguggggcugaucaa

SEQ ID NO: 976964 - RNA, 23 nt, Human
uccccuccucuucacccaugcca

SEQ ID NO: 976965 - RNA, 22 nt, Human
ucggagagcuggggcucggccg

SEQ ID NO: 976966 - RNA, 21 nt, Human
ucuccuggcucugucugcugg

SEQ ID NO: 976967 - RNA, 24 nt, Human
ucuccuggcucugucugcuggucu

SEQ ID NO: 976968 - RNA, 24 nt, Human
ucucugaggcacagugggccuggg

SEQ ID NO: 976969 - RNA, 19 nt, Human
ugaacagaggaaacaaaac

SEQ ID NO: 976970 - RNA, 18 nt, Human
ugacaccaccccacuccu

SEQ ID NO: 976971 - RNA, 24 nt, Human
ugacaccaccccacuccucuuccu

SEQ ID NO: 976972 - RNA, 22 nt, Human
ugagcuucuccuggcucugucu

SEQ ID NO: 976973 - RNA, 23 nt, Human
ugccacagcauuaaauaaacaaa

SEQ ID NO: 976974 - RNA, 19 nt, Human
uggagcccuggucucugag

SEQ ID NO: 976975 - RNA, 18 nt, Human
uggcaagcaggaagcagg

SEQ ID NO: 976976 - RNA, 20 nt, Human
uggcaagcaggaagcagggc

SEQ ID NO: 976977 - RNA, 24 nt, Human
uggggcugaucaagggcagagagc

SEQ ID NO: 976978 - RNA, 21 nt, Human
uggucuaggccaggguggggc

SEQ ID NO: 976979 - RNA, 18 nt, Human
uucccagcccaggccucu

SEQ ID NO: 976980 - RNA, 24 nt, Human
uuccuccaaacuccuaugcaggca

SEQ ID NO: 976981 - RNA, 24 nt, Human
uuggagaaccuugggggugggggc

SEQ ID NO: 976982 - RNA, 23 nt, Human
uugggggugggggcugcggaaug

SEQ ID NO: 976983 - RNA, 21 nt, Human
uuggguggggccggguccgcc

SEQ ID NO: 976984 - RNA, 18 nt, Human
aaaacuauuaguaaccau

SEQ ID NO: 976985 - RNA, 22 nt, Human
aaacacagucacguggaaaugc

SEQ ID NO: 976986 - RNA, 22 nt, Human
aaaccaggacacggaaggaaga

SEQ ID NO: 976987 - RNA, 22 nt, Human
aagcuccacaagcucuuaguga

SEQ ID NO: 976988 - RNA, 21 nt, Human
aauauccaguccuacaguaau

SEQ ID NO: 976989 - RNA, 19 nt, Human
acaacuucaugacaucucu

SEQ ID NO: 976990 - RNA, 20 nt, Human
acacggaaggaagaacugga

SEQ ID NO: 976991 - RNA, 26 nt, Human
acaguaaagaacugaaaggucuacac

SEQ ID NO: 976992 - RNA, 18 nt, Human
acauuucuuuuguuguug

SEQ ID NO: 976993 - RNA, 21 nt, Human
accaccuucugguuucauuug

SEQ ID NO: 976994 - RNA, 24 nt, Human
accaccuucugguuucauuugacc

SEQ ID NO: 976995 - RNA, 24 nt, Human
accccaaaaauguugccugucagc

SEQ ID NO: 976996 - RNA, 20 nt, Human
acuagaaugcaggcaaaaag

SEQ ID NO: 976997 - RNA, 19 nt, Human
agaaaggagagccagcccg

SEQ ID NO: 976998 - RNA, 23 nt, Human
auaaaaccacagaaaggagagcc

SEQ ID NO: 976999 - RNA, 18 nt, Human
augggacaaaaggaaccg

SEQ ID NO: 977000 - RNA, 22 nt, Human
caaaauaauacaguauagcccc

SEQ ID NO: 977001 - RNA, 24 nt, Human
caaacuccguuaaugcuguugaag

SEQ ID NO: 977002 - RNA, 22 nt, Human
caagauagagaaugaagaccug

SEQ ID NO: 977003 - RNA, 23 nt, Human
cacacacaaaaguaaguuucaaa

SEQ ID NO: 977004 - RNA, 24 nt, Human
cacacacaaaaguaaguuucaaac

SEQ ID NO: 977005 - RNA, 27 nt, Human
cacacacacacaaaaguaaguuucaaa

SEQ ID NO: 977006 - RNA, 20 nt, Human
caccguguuggccaugugau

SEQ ID NO: 977007 - RNA, 21 nt, Human
caccguguuggccaugugauc

SEQ ID NO: 977008 - RNA, 25 nt, Human
cacugaaccagggcacugggacaac

SEQ ID NO: 977009 - RNA, 19 nt, Human
cagcaauaccucgacuuuu

SEQ ID NO: 977010 - RNA, 19 nt, Human
cagcagguuaauuuucuuc

SEQ ID NO: 977011 - RNA, 24 nt, Human
cagcucauuucugcagcguggcca

SEQ ID NO: 977012 - RNA, 22 nt, Human
caggaaauuauugugcaugugc

SEQ ID NO: 977013 - RNA, 18 nt, Human
caggagacacugaaccag

SEQ ID NO: 977014 - RNA, 22 nt, Human
caguaguacacauuucucuaug

SEQ ID NO: 977015 - RNA, 24 nt, Human
caguauuuacaagcauucuuauac

SEQ ID NO: 977016 - RNA, 18 nt, Human
cauaaagugaagugaaag

SEQ ID NO: 977017 - RNA, 21 nt, Human
caucgcucuuuucccauuucu

SEQ ID NO: 977018 - RNA, 20 nt, Human
caucuucaucucccaggccu

SEQ ID NO: 977019 - RNA, 25 nt, Human
caugucacccugaaugccagcaaua

SEQ ID NO: 977020 - RNA, 22 nt, Human
cauuuccuucccccuugugccc

SEQ ID NO: 977021 - RNA, 23 nt, Human
cauuuuaaaaacucaagccuggg

SEQ ID NO: 977022 - RNA, 25 nt, Human
ccaaagccacacacacacaaaagua

SEQ ID NO: 977023 - RNA, 19 nt, Human
cccaaaucauccaauacac

SEQ ID NO: 977024 - RNA, 18 nt, Human
cccacguaugagccaaac

SEQ ID NO: 977025 - RNA, 21 nt, Human
cccaggccuucuucugcagcc

SEQ ID NO: 977026 - RNA, 19 nt, Human
cccauuaaauaaaaccaca

SEQ ID NO: 977027 - RNA, 19 nt, Human
cccauuucuggaaucuucu

SEQ ID NO: 977028 - RNA, 22 nt, Human
ccucgcgcacggacgcugacuc

SEQ ID NO: 977029 - RNA, 26 nt, Human
cgccaugccuuucaugaaacggugcu

SEQ ID NO: 977030 - RNA, 21 nt, Human
cgggauagaaacacagucacg

SEQ ID NO: 977031 - RNA, 20 nt, Human
cuagguaccaaauuguggcu

SEQ ID NO: 977032 - RNA, 21 nt, Human
cucauagcccucaucauugcu

SEQ ID NO: 977033 - RNA, 19 nt, Human
cucuauaugaccgaauagc

SEQ ID NO: 977034 - RNA, 22 nt, Human
cucucagugcaaacgagcaauu

SEQ ID NO: 977035 - RNA, 19 nt, Human
cucuuuaaugcacuuggca

SEQ ID NO: 977036 - RNA, 22 nt, Human
cuggaagcuaugccuaaaguca

SEQ ID NO: 977037 - RNA, 22 nt, Human
cuguacacugucacaacccuuc

SEQ ID NO: 977038 - RNA, 19 nt, Human
cugugcugugagcccccag

SEQ ID NO: 977039 - RNA, 24 nt, Human
cuuccaaagccacacacacacaaa

SEQ ID NO: 977040 - RNA, 22 nt, Human
cuuuucaucuucaucucccagg

SEQ ID NO: 977041 - RNA, 20 nt, Human
gaaaccaaaccuacucacuc

SEQ ID NO: 977042 - RNA, 20 nt, Human
gaacacagcauucagucugu

SEQ ID NO: 977043 - RNA, 19 nt, Human
gaaguguggaggggggugg

SEQ ID NO: 977044 - RNA, 21 nt, Human
gacacugacagggaguuaagc

SEQ ID NO: 977045 - RNA, 23 nt, Human
gaccagccagacauuucuuuugu

SEQ ID NO: 977046 - RNA, 24 nt, Human
gaccugucauccacucaggagaca

SEQ ID NO: 977047 - RNA, 20 nt, Human
gaggggggugguagaaaggg

SEQ ID NO: 977048 - RNA, 22 nt, Human
gcuuccaaagccacacacacac

SEQ ID NO: 977049 - RNA, 20 nt, Human
ggagagccagcccggcucag

SEQ ID NO: 977050 - RNA, 21 nt, Human
ggaggggggugguagaaaggg

SEQ ID NO: 977051 - RNA, 24 nt, Human
ggaguuaagccauggagagggaag

SEQ ID NO: 977052 - RNA, 22 nt, Human
ggcaaaaaucugaucuaaugca

SEQ ID NO: 977053 - RNA, 18 nt, Human
gugcccuucuggguaguc

SEQ ID NO: 977054 - RNA, 20 nt, Human
guuugagacccuagguacca

SEQ ID NO: 977055 - RNA, 21 nt, Human
uaaaacugaacaagaaaccag

SEQ ID NO: 977056 - RNA, 21 nt, Human
uaagccauggagagggaagca

SEQ ID NO: 977057 - RNA, 21 nt, Human
uaagcugcucuaggggagggc

SEQ ID NO: 977058 - RNA, 24 nt, Human
uacaaaauuuucugcuauuuugcu

SEQ ID NO: 977059 - RNA, 24 nt, Human
uacacuaucauaaagugaagugaa

SEQ ID NO: 977060 - RNA, 19 nt, Human
uacacugucacaacccuuc

SEQ ID NO: 977061 - RNA, 27 nt, Human
uacaguaauauaguuagaaaaauaaaa

SEQ ID NO: 977062 - RNA, 21 nt, Human
uagaaaaauaaaaggcuuaaa

SEQ ID NO: 977063 - RNA, 19 nt, Human
uagaaacacagucacgugg

SEQ ID NO: 977064 - RNA, 25 nt, Human
uagaaugcaggcaaaaagucccuua

SEQ ID NO: 977065 - RNA, 19 nt, Human
uagcugagaccagccagac

SEQ ID NO: 977066 - RNA, 21 nt, Human
uagcugagaccagccagacau

SEQ ID NO: 977067 - RNA, 18 nt, Human
uagguucugugcugugag

SEQ ID NO: 977068 - RNA, 23 nt, Human
uaguaccaucaugucacccugaa

SEQ ID NO: 977069 - RNA, 24 nt, Human
uauauuacaguauuuacaagcauu

SEQ ID NO: 977070 - RNA, 21 nt, Human
uaugaacguacccuccacgug

SEQ ID NO: 977071 - RNA, 20 nt, Human
uauuucauaaguauaaguaa

SEQ ID NO: 977072 - RNA, 18 nt, Human
ucagacucuagcugagac

SEQ ID NO: 977073 - RNA, 19 nt, Human
ucagauacgcacacaugcu

SEQ ID NO: 977074 - RNA, 21 nt, Human
ucagcucuuccaagucugugc

SEQ ID NO: 977075 - RNA, 24 nt, Human
ucaguugaagagugucagcaggug

SEQ ID NO: 977076 - RNA, 23 nt, Human
ucaucgcucuuuucccauuucug

SEQ ID NO: 977077 - RNA, 21 nt, Human
uccaagcaacaacauuuaaaa

SEQ ID NO: 977078 - RNA, 19 nt, Human
uccaagucugugcuagauu

SEQ ID NO: 977079 - RNA, 23 nt, Human
uccacaagcucuuagugaauuac

SEQ ID NO: 977080 - RNA, 19 nt, Human
uccuuuguccugaaacucc

SEQ ID NO: 977081 - RNA, 23 nt, Human
ucgauacgaacacagcauucagu

SEQ ID NO: 977082 - RNA, 22 nt, Human
ucguggugcugacuacagacau

SEQ ID NO: 977083 - RNA, 21 nt, Human
ucuacaacuuuaacugugcca

SEQ ID NO: 977084 - RNA, 22 nt, Human
ucugcagauuguuucauaugaa

SEQ ID NO: 977085 - RNA, 22 nt, Human
ucugguuucauuugaaauccuu

SEQ ID NO: 977086 - RNA, 24 nt, Human
ugaacaagaaaccaggacacggaa

SEQ ID NO: 977087 - RNA, 21 nt, Human
ugaaccagggcacugggacaa

SEQ ID NO: 977088 - RNA, 18 nt, Human
ugacuacagacauguccu

SEQ ID NO: 977089 - RNA, 22 nt, Human
ugacuacagacauguccuaugg

SEQ ID NO: 977090 - RNA, 24 nt, Human
ugacuacagacauguccuauggcc

SEQ ID NO: 977091 - RNA, 21 nt, Human
ugagacauuugaggcauacaa

SEQ ID NO: 977092 - RNA, 19 nt, Human
ugagcagcacacaacuuca

SEQ ID NO: 977093 - RNA, 23 nt, Human
ugccaugugcccuuucuuacccc

SEQ ID NO: 977094 - RNA, 23 nt, Human
ugcccaaaucauccaauacacug

SEQ ID NO: 977095 - RNA, 20 nt, Human
ugccuugggagaguuaauuc

SEQ ID NO: 977096 - RNA, 18 nt, Human
ugcucaggccuggaggga

SEQ ID NO: 977097 - RNA, 19 nt, Human
ugcuuagggcugugcugac

SEQ ID NO: 977098 - RNA, 27 nt, Human
uggaaagccauuuuauuuuucucuaaa

SEQ ID NO: 977099 - RNA, 18 nt, Human
uggaaaugccaauaugac

SEQ ID NO: 977100 - RNA, 23 nt, Human
uggaacaaugugaugcggcaaaa

SEQ ID NO: 977101 - RNA, 21 nt, Human
uggagagggaagcacagguuu

SEQ ID NO: 977102 - RNA, 24 nt, Human
uggccaacagcugccacuguacac

SEQ ID NO: 977103 - RNA, 20 nt, Human
ugucagcaggugcuucuagg

SEQ ID NO: 977104 - RNA, 18 nt, Human
uguccugaaacucccaca

SEQ ID NO: 977105 - RNA, 19 nt, Human
uguucugugcugugguaag

SEQ ID NO: 977106 - RNA, 20 nt, Human
uuaagccauggagagggaag

SEQ ID NO: 977107 - RNA, 22 nt, Human
uucaaaccauaguccagugcuu

SEQ ID NO: 977108 - RNA, 19 nt, Human
uucaucuucaucucccagg

SEQ ID NO: 977109 - RNA, 23 nt, Human
uuccaaagccacacacacacaaa

SEQ ID NO: 977110 - RNA, 19 nt, Human
uugcuuuagcaaacagcaa

SEQ ID NO: 977111 - RNA, 31 nt, Human
uugcuuugugaaugugaaugaaagucuuauu

SEQ ID NO: 977112 - RNA, 18 nt, Human
uuuagcaaacagcaauaa

SEQ ID NO: 977113 - RNA, 23 nt, Human
uuucauaugaacguacccuccac

SEQ ID NO: 977114 - RNA, 23 nt, Human
uuucaucuucaucucccaggccu

SEQ ID NO: 977115 - RNA, 19 nt, Human
uuucugcuauuuugcuuua

SEQ ID NO: 977116 - RNA, 22 nt, Human
uuugagacccuagguaccaaag

SEQ ID NO: 977117 - RNA, 20 nt, Human
uuuucccauuucuggaaucu

SEQ ID NO: 977118 - RNA, 23 nt, Human
aaacagccucccccagggagggu

SEQ ID NO: 977119 - RNA, 19 nt, Human
aaagugcuggaauuacagg

SEQ ID NO: 977120 - RNA, 23 nt, Human
aacauuucaucauguuggccagg

SEQ ID NO: 977121 - RNA, 19 nt, Human
aagauacccuguccccacc

SEQ ID NO: 977122 - RNA, 21 nt, Human
aagauacccuguccccaccua

SEQ ID NO: 977123 - RNA, 26 nt, Human
aagcagggcacucugguccagcuggg

SEQ ID NO: 977124 - RNA, 26 nt, Human
aagugcuggaauuacaggccugaacc

SEQ ID NO: 977125 - RNA, 24 nt, Human
acaacauuucaucauguuggccag

SEQ ID NO: 977126 - RNA, 18 nt, Human
accacgccuggccagacc

SEQ ID NO: 977127 - RNA, 29 nt, Human
acccacccuguucccuccccuuccucccu

SEQ ID NO: 977128 - RNA, 19 nt, Human
agaagaaacagccuccccc

SEQ ID NO: 977129 - RNA, 18 nt, Human
agagcguccuagccugau

SEQ ID NO: 977130 - RNA, 22 nt, Human
agcucuggggccaggaaacagu

SEQ ID NO: 977131 - RNA, 25 nt, Human
aggugauccucccuccucggccucc

SEQ ID NO: 977132 - RNA, 19 nt, Human
auauauguauauauguaca

SEQ ID NO: 977133 - RNA, 18 nt, Human
aucauguuggccaggcug

SEQ ID NO: 977134 - RNA, 25 nt, Human
aucauguuggccaggcuggucucaa

SEQ ID NO: 977135 - RNA, 25 nt, Human
auguaucuauauauguauauaugua

SEQ ID NO: 977136 - RNA, 22 nt, Human
caaacaggugggggugccuccc

SEQ ID NO: 977137 - RNA, 24 nt, Human
caaagugcuggaauuacaggccug

SEQ ID NO: 977138 - RNA, 24 nt, Human
caacauuucaucauguuggccagg

SEQ ID NO: 977139 - RNA, 19 nt, Human
caaggaauccugagaagaa

SEQ ID NO: 977140 - RNA, 20 nt, Human
caccuagacguccacugggg

SEQ ID NO: 977141 - RNA, 19 nt, Human
cacucugguccagcuggga

SEQ ID NO: 977142 - RNA, 19 nt, Human
cacuggggaagggaaacug

SEQ ID NO: 977143 - RNA, 20 nt, Human
cagaggcaagcagggcacuc

SEQ ID NO: 977144 - RNA, 18 nt, Human
cagaugccucugcugccu

SEQ ID NO: 977145 - RNA, 24 nt, Human
caguagagacaacauuucaucaug

SEQ ID NO: 977146 - RNA, 24 nt, Human
caucauguuggccaggcuggucuc

SEQ ID NO: 977147 - RNA, 22 nt, Human
caucgccucccgcgcgccggac

SEQ ID NO: 977148 - RNA, 18 nt, Human
cauguuggccaggcuggu

SEQ ID NO: 977149 - RNA, 21 nt, Human
cauguuggccaggcuggucuc

SEQ ID NO: 977150 - RNA, 24 nt, Human
cauguuggccaggcuggucucaaa

SEQ ID NO: 977151 - RNA, 19 nt, Human
ccaaagugcuggaauuaca

SEQ ID NO: 977152 - RNA, 24 nt, Human
ccaaagugcuggaauuacaggccu

SEQ ID NO: 977153 - RNA, 22 nt, Human
ccacaaagggagagcagaggca

SEQ ID NO: 977154 - RNA, 19 nt, Human
ccccuuccucccuggcaag

SEQ ID NO: 977155 - RNA, 21 nt, Human
ccgcgcgccggacccgcgucc

SEQ ID NO: 977156 - RNA, 21 nt, Human
ccucccaggaggacccugccu

SEQ ID NO: 977157 - RNA, 20 nt, Human
ccucccuccucggccuccca

SEQ ID NO: 977158 - RNA, 18 nt, Human
ccugaccucaggugaucc

SEQ ID NO: 977159 - RNA, 18 nt, Human
ccugaccucaggugaucc

SEQ ID NO: 977160 - RNA, 21 nt, Human
ccuguucccuccccuuccucc

SEQ ID NO: 977161 - RNA, 21 nt, Human
cguccuagccugauacagggc

SEQ ID NO: 977162 - RNA, 18 nt, Human
cucagagcguccuagccu

SEQ ID NO: 977163 - RNA, 20 nt, Human
cucccgcgcgccggacccgc

SEQ ID NO: 977164 - RNA, 21 nt, Human
cucccuggcaaggaauccuga

SEQ ID NO: 977165 - RNA, 19 nt, Human
cugugccaggaucuagaac

SEQ ID NO: 977166 - RNA, 21 nt, Human
gaagaaacagccucccccagg

SEQ ID NO: 977167 - RNA, 19 nt, Human
gaccucaggugauccuccc

SEQ ID NO: 977168 - RNA, 24 nt, Human
gauuacagguuccugccacuauac

SEQ ID NO: 977169 - RNA, 20 nt, Human
gccuacucagagacuuccca

SEQ ID NO: 977170 - RNA, 20 nt, Human
gcggggccgucaucgccucc

SEQ ID NO: 977171 - RNA, 20 nt, Human
gcugccugaguccccacaaa

SEQ ID NO: 977172 - RNA, 23 nt, Human
gcuggucucaaacuccugaccuc

SEQ ID NO: 977173 - RNA, 22 nt, Human
ggaauccugagaagaaacagcc

SEQ ID NO: 977174 - RNA, 21 nt, Human
ggcaaggaauccugagaagaa

SEQ ID NO: 977175 - RNA, 24 nt, Human
ggcuggucucaaacuccugaccuc

SEQ ID NO: 977176 - RNA, 18 nt, Human
guagcugggauuacaggu

SEQ ID NO: 977177 - RNA, 19 nt, Human
gugccucccaggaggaccc

SEQ ID NO: 977178 - RNA, 24 nt, Human
uaauuuuugcauuuucaguagaga

SEQ ID NO: 977179 - RNA, 18 nt, Human
uauaaauguaucuauaua

SEQ ID NO: 977180 - RNA, 21 nt, Human
uauauagacuguguguauaua

SEQ ID NO: 977181 - RNA, 20 nt, Human
uauauauguauauauguaca

SEQ ID NO: 977182 - RNA, 24 nt, Human
uauguacaugcacagcucagagcg

SEQ ID NO: 977183 - RNA, 24 nt, Human
ucaguagagacaacauuucaucau

SEQ ID NO: 977184 - RNA, 24 nt, Human
ucccaaagugcuggaauuacaggc

SEQ ID NO: 977185 - RNA, 19 nt, Human
ucccagaugccucugcugc

SEQ ID NO: 977186 - RNA, 21 nt, Human
ucccgcgcgccggacccgcgg

SEQ ID NO: 977187 - RNA, 21 nt, Human
uccucggccucccaaagugcu

SEQ ID NO: 977188 - RNA, 22 nt, Human
uccuggaggccuggccaccugg

SEQ ID NO: 977189 - RNA, 23 nt, Human
ucuauauauguauauauguacau

SEQ ID NO: 977190 - RNA, 26 nt, Human
ugaacccaaaugagcucuggggccag

SEQ ID NO: 977191 - RNA, 18 nt, Human
ugaccucaggugauccuc

SEQ ID NO: 977192 - RNA, 20 nt, Human
ugaccucaggugauccuccc

SEQ ID NO: 977193 - RNA, 21 nt, Human
ugaccucaggugauccucccu

SEQ ID NO: 977194 - RNA, 24 nt, Human
ugaccucaggugauccucccuccu

SEQ ID NO: 977195 - RNA, 22 nt, Human
ugagaagaaacagccuccccca

SEQ ID NO: 977196 - RNA, 22 nt, Human
ugauccucccuccucggccucc

SEQ ID NO: 977197 - RNA, 18 nt, Human
ugccaggaucuagaaccu

SEQ ID NO: 977198 - RNA, 21 nt, Human
ugccuggugccuccuggaggc

SEQ ID NO: 977199 - RNA, 21 nt, Human
uggaauuacaggccugaacca

SEQ ID NO: 977200 - RNA, 24 nt, Human
uggaauuacaggccugaaccacca

SEQ ID NO: 977201 - RNA, 21 nt, Human
uggcaaggaauccugagaaga

SEQ ID NO: 977202 - RNA, 24 nt, Human
uggccaggcuggucucaaacuccu

SEQ ID NO: 977203 - RNA, 19 nt, Human
ugggauuacagguuccugc

SEQ ID NO: 977204 - RNA, 21 nt, Human
ugggauuacagguuccugcca

SEQ ID NO: 977205 - RNA, 22 nt, Human
ugggauuacagguuccugccac

SEQ ID NO: 977206 - RNA, 24 nt, Human
ugggauuacagguuccugccacua

SEQ ID NO: 977207 - RNA, 18 nt, Human
uguagcugggauuacagg

SEQ ID NO: 977208 - RNA, 18 nt, Human
uguagcugggauuacagg

SEQ ID NO: 977209 - RNA, 25 nt, Human
uguagcugggauuacagguuccugc

SEQ ID NO: 977210 - RNA, 23 nt, Human
uguauauauguacaugcacagcu

SEQ ID NO: 977211 - RNA, 19 nt, Human
uguguauauauuauaaaug

SEQ ID NO: 977212 - RNA, 21 nt, Human
uguguauauauuauaaaugua

SEQ ID NO: 977213 - RNA, 20 nt, Human
uguguguauauauuauaaau

SEQ ID NO: 977214 - RNA, 19 nt, Human
uugaagugcgccugaaccc

SEQ ID NO: 977215 - RNA, 23 nt, Human
uuucaucauguuggccaggcugu

SEQ ID NO: 977216 - RNA, 23 nt, Human
uuuucaguagagacaacauuuca

SEQ ID NO: 977217 - RNA, 22 nt, Human
aaacgagauuuccaaagucagg

SEQ ID NO: 977218 - RNA, 24 nt, Human
aauccccacaguaucaaacucaga

SEQ ID NO: 977219 - RNA, 23 nt, Human
acccugagagcggcggcgacagc

SEQ ID NO: 977220 - RNA, 21 nt, Human
auuucauuuucccuccccccg

SEQ ID NO: 977221 - RNA, 24 nt, Human
caaagggaacacagugacgcagca

SEQ ID NO: 977222 - RNA, 21 nt, Human
caacagaguaaaagcuccaca

SEQ ID NO: 977223 - RNA, 20 nt, Human
caaugcagucucuuccccuc

SEQ ID NO: 977224 - RNA, 22 nt, Human
cacaguaucaaacucagacagg

SEQ ID NO: 977225 - RNA, 19 nt, Human
caguaucaaacucagacag

SEQ ID NO: 977226 - RNA, 24 nt, Human
caguaucaaacucagacaggccaa

SEQ ID NO: 977227 - RNA, 19 nt, Human
cauacuguccgcaacaucc

SEQ ID NO: 977228 - RNA, 23 nt, Human
cauccgggaccugcgggaccgcc

SEQ ID NO: 977229 - RNA, 25 nt, Human
ccucacaacagaguaaaagcuccac

SEQ ID NO: 977230 - RNA, 21 nt, Human
ccugguggucaguggcagcaa

SEQ ID NO: 977231 - RNA, 20 nt, Human
cgccuaaacugaauccccac

SEQ ID NO: 977232 - RNA, 18 nt, Human
cugaauccccacaguauc

SEQ ID NO: 977233 - RNA, 21 nt, Human
cugguggucaguggcagcaac

SEQ ID NO: 977234 - RNA, 22 nt, Human
gucaguggcagcaacaguggcu

SEQ ID NO: 977235 - RNA, 18 nt, Human
ucacccugagagcggcgg

SEQ ID NO: 977236 - RNA, 20 nt, Human
ucagggggcaaagauuucug

SEQ ID NO: 977237 - RNA, 25 nt, Human
uccccgucccccugcgcuugccuca

SEQ ID NO: 977238 - RNA, 18 nt, Human
uccgaaguaccaccgcug

SEQ ID NO: 977239 - RNA, 21 nt, Human
uccgcaacauccgggaccugc

SEQ ID NO: 977240 - RNA, 18 nt, Human
ucuguucccucuucaccc

SEQ ID NO: 977241 - RNA, 25 nt, Human
ugcagacaggugucuccgaaguacc

SEQ ID NO: 977242 - RNA, 23 nt, Human
ugcugguccccgucccccugcgc

SEQ ID NO: 977243 - RNA, 23 nt, Human
uggucaguggcagcaacaguggc

SEQ ID NO: 977244 - RNA, 22 nt, Human
uuaaaagucuggggccacaaug

SEQ ID NO: 977245 - RNA, 18 nt, Human
uuaaacggagucuuacaa

SEQ ID NO: 977246 - RNA, 20 nt, Human
uuuucccuccccccguuucc

SEQ ID NO: 977247 - RNA, 23 nt, Human
agucccgccgcugcgcugccucc

SEQ ID NO: 977248 - RNA, 19 nt, Human
caaaagucaauuuaaaaag

SEQ ID NO: 977249 - RNA, 24 nt, Human
caaaagucaauuuaaaaagucgaa

SEQ ID NO: 977250 - RNA, 20 nt, Human
caguaccagcucauaaaaag

SEQ ID NO: 977251 - RNA, 18 nt, Human
cccgccgcugcgcugccu

SEQ ID NO: 977252 - RNA, 21 nt, Human
gaccggacaggcgcgggcggc

SEQ ID NO: 977253 - RNA, 18 nt, Human
gccgcugcgcugccuccg

SEQ ID NO: 977254 - RNA, 20 nt, Human
ggaccggacaggcgcgggcg

SEQ ID NO: 977255 - RNA, 22 nt, Human
ggaccggacaggcgcgggcggc

SEQ ID NO: 977256 - RNA, 26 nt, Human
ggcgcgggcggccgggcuacgacugg

SEQ ID NO: 977257 - RNA, 21 nt, Human
gucaauuuaaaaagucgaagu

SEQ ID NO: 977258 - RNA, 18 nt, Human
ucccgccgcugcgcugcc

SEQ ID NO: 977259 - RNA, 19 nt, Human
ucggcgggguaggcucgga

SEQ ID NO: 977260 - RNA, 20 nt, Human
uuguagaaaaucaaugacac

SEQ ID NO: 977261 - RNA, 24 nt, Human
uuuuuuuuuuuuuuuuuuacacag

SEQ ID NO: 977262 - RNA, 18 nt, Human
agccgcgccagcgcagcc

SEQ ID NO: 977263 - RNA, 21 nt, Human
aggagcagaaaggccgccaaa

SEQ ID NO: 977264 - RNA, 19 nt, Human
aggccgccaaaagccgcgc

SEQ ID NO: 977265 - RNA, 20 nt, Human
aggccgccaaaagccgcgcc

SEQ ID NO: 977266 - RNA, 18 nt, Human
caccugggccgcgaggag

SEQ ID NO: 977267 - RNA, 18 nt, Human
ccgccaccgcugccgcca

SEQ ID NO: 977268 - RNA, 19 nt, Human
ccggugcccgccgcaacca

SEQ ID NO: 977269 - RNA, 25 nt, Human
gcgaggagcagaaaggccgccaaaa

SEQ ID NO: 977270 - RNA, 19 nt, Human
aacaggacuggucaaaccc

SEQ ID NO: 977271 - RNA, 22 nt, Human
aacaugauuuuuauuuuuccgu

SEQ ID NO: 977272 - RNA, 21 nt, Human
acccagagccugcgucacccc

SEQ ID NO: 977273 - RNA, 23 nt, Human
acccugguuuucacacccuccau

SEQ ID NO: 977274 - RNA, 20 nt, Human
agaugccugggaacagaacg

SEQ ID NO: 977275 - RNA, 21 nt, Human
agccugcgucaccccacccug

SEQ ID NO: 977276 - RNA, 25 nt, Human
aggccuggaggcgagguaggagagu

SEQ ID NO: 977277 - RNA, 18 nt, Human
agggaaugaggaagaggu

SEQ ID NO: 977278 - RNA, 18 nt, Human
auccacauccuggagcag

SEQ ID NO: 977279 - RNA, 18 nt, Human
caccagguggcagaaggg

SEQ ID NO: 977280 - RNA, 21 nt, Human
caccagguggcagaagggaac

SEQ ID NO: 977281 - RNA, 20 nt, Human
cacccuccauccacauccuu

SEQ ID NO: 977282 - RNA, 18 nt, Human
cagaacaggacuggucaa

SEQ ID NO: 977283 - RNA, 21 nt, Human
cagcccaggacccagcugccu

SEQ ID NO: 977284 - RNA, 22 nt, Human
caggaaauauugagaacaccac

SEQ ID NO: 977285 - RNA, 26 nt, Human
caugacccagagccugcgucacccca

SEQ ID NO: 977286 - RNA, 20 nt, Human
ccaccuuacggguucagaau

SEQ ID NO: 977287 - RNA, 21 nt, Human
ccagcccaggacccagcugcc

SEQ ID NO: 977288 - RNA, 21 nt, Human
cccagcugccugcucucccua

SEQ ID NO: 977289 - RNA, 18 nt, Human
ccccaaagcugggguggg

SEQ ID NO: 977290 - RNA, 25 nt, Human
ccccacccugguuuucacacccucc

SEQ ID NO: 977291 - RNA, 18 nt, Human
cccccaaagcuggggugg

SEQ ID NO: 977292 - RNA, 19 nt, Human
ccguagcccugccccagcg

SEQ ID NO: 977293 - RNA, 23 nt, Human
cgggcaggaagaccgggugggag

SEQ ID NO: 977294 - RNA, 23 nt, Human
gaacaccaccuuacggguucaga

SEQ ID NO: 977295 - RNA, 19 nt, Human
gagaacaccaccuuacggg

SEQ ID NO: 977296 - RNA, 23 nt, Human
gaggagggaccagcccaguggcg

SEQ ID NO: 977297 - RNA, 18 nt, Human
gaguggaggagggaccag

SEQ ID NO: 977298 - RNA, 21 nt, Human
gccugggcugaugugucaccc

SEQ ID NO: 977299 - RNA, 22 nt, Human
gcuuuauaggggaggaguggag

SEQ ID NO: 977300 - RNA, 18 nt, Human
gggaacagaacggcugag

SEQ ID NO: 977301 - RNA, 19 nt, Human
gggcgaugugaggacuaag

SEQ ID NO: 977302 - RNA, 18 nt, Human
gggcgugggugccuggag

SEQ ID NO: 977303 - RNA, 21 nt, Human
gguucagaauaaaaccgaggg

SEQ ID NO: 977304 - RNA, 23 nt, Human
uacggguucagaauaaaaccgag

SEQ ID NO: 977305 - RNA, 23 nt, Human
uaguccuccagcccaggacccag

SEQ ID NO: 977306 - RNA, 20 nt, Human
uaucaugacccagagccugc

SEQ ID NO: 977307 - RNA, 25 nt, Human
ucacggggaaucagaggguggagag

SEQ ID NO: 977308 - RNA, 20 nt, Human
ugagucugggugccugggga

SEQ ID NO: 977309 - RNA, 20 nt, Human
ugaugugucaccccugaagg

SEQ ID NO: 977310 - RNA, 19 nt, Human
ugccuggagaugccuggga

SEQ ID NO: 977311 - RNA, 18 nt, Human
ugccugggaacagaacgg

SEQ ID NO: 977312 - RNA, 20 nt, Human
uggcagaagggaacacagua

SEQ ID NO: 977313 - RNA, 23 nt, Human
ugggcugagucugggugccuggg

SEQ ID NO: 977314 - RNA, 21 nt, Human
uggggaccccaggaggcuuua

SEQ ID NO: 977315 - RNA, 23 nt, Human
uggggaccccaggaggcuuuaua

SEQ ID NO: 977316 - RNA, 21 nt, Human
uggggugggcugagucugggu

SEQ ID NO: 977317 - RNA, 19 nt, Human
ugugucaccccugaaggug

SEQ ID NO: 977318 - RNA, 19 nt, Human
uuccugccgccggccacca

SEQ ID NO: 977319 - RNA, 19 nt, Human
aaaaacagccacaacuuga

SEQ ID NO: 977320 - RNA, 22 nt, Human
aaaacaaaaacaaaaacaaaaa

SEQ ID NO: 977321 - RNA, 23 nt, Human
aaaacaaaaacaaaaacaaaaaa

SEQ ID NO: 977322 - RNA, 20 nt, Human
aaaagcaccacaauuugugg

SEQ ID NO: 977323 - RNA, 24 nt, Human
aaaauauaucccccaugcuacuua

SEQ ID NO: 977324 - RNA, 18 nt, Human
aaacaaaaaacagccaca

SEQ ID NO: 977325 - RNA, 22 nt, Human
aaacaaaaacaaaaaacagcca

SEQ ID NO: 977326 - RNA, 23 nt, Human
aaacaaaaacaaaaaacagccac

SEQ ID NO: 977327 - RNA, 31 nt, Human
aaacaaaaacaaaaacaaaaaacagccacaa

SEQ ID NO: 977328 - RNA, 21 nt, Human
aaacagccacaacuugaaagc

SEQ ID NO: 977329 - RNA, 23 nt, Human
aaacaguugcuuuuuaaaaaacc

SEQ ID NO: 977330 - RNA, 27 nt, Human
aaagaaaaaauacacuuggcaucucca

SEQ ID NO: 977331 - RNA, 25 nt, Human
aaagaaaacaaaaacaaaaacaaaa

SEQ ID NO: 977332 - RNA, 22 nt, Human
aaagaagccagcgcaggggcgg

SEQ ID NO: 977333 - RNA, 23 nt, Human
aacaaaaacaaaaaacagccaca

SEQ ID NO: 977334 - RNA, 19 nt, Human
aagaagccagcgcaggggc

SEQ ID NO: 977335 - RNA, 23 nt, Human
aagaaggaagguggcugaguccu

SEQ ID NO: 977336 - RNA, 20 nt, Human
aagcauggggugaagaagga

SEQ ID NO: 977337 - RNA, 25 nt, Human
aagcccacggucuggcugacccuaa

SEQ ID NO: 977338 - RNA, 18 nt, Human
aaggauuugucuaugcuu

SEQ ID NO: 977339 - RNA, 25 nt, Human
acaaaaacaaaaacaaaaacaaaaa

SEQ ID NO: 977340 - RNA, 20 nt, Human
acagccacaacuugaaagcu

SEQ ID NO: 977341 - RNA, 19 nt, Human
agaaaaaauacacuuggca

SEQ ID NO: 977342 - RNA, 24 nt, Human
agaaaacaaaaacaaaaacaaaaa

SEQ ID NO: 977343 - RNA, 18 nt, Human
agaaagaaaaaauacacu

SEQ ID NO: 977344 - RNA, 23 nt, Human
agaaaucaugaagagccuucagc

SEQ ID NO: 977345 - RNA, 18 nt, Human
agcauggggugaagaagg

SEQ ID NO: 977346 - RNA, 19 nt, Human
aggaaagagaaaaauccau

SEQ ID NO: 977347 - RNA, 22 nt, Human
aggagaaagaaggagagggcag

SEQ ID NO: 977348 - RNA, 22 nt, Human
agggcagugguuaaaggaaaau

SEQ ID NO: 977349 - RNA, 22 nt, Human
aggggaagagaaggugggaaac

SEQ ID NO: 977350 - RNA, 22 nt, Human
agggggaaagaaccuugaagga

SEQ ID NO: 977351 - RNA, 22 nt, Human
auaaaauauacaaaaagcacca

SEQ ID NO: 977352 - RNA, 20 nt, Human
aucaacuugaguuauccaag

SEQ ID NO: 977353 - RNA, 25 nt, Human
caaaaaacagccacaacuugaaagc

SEQ ID NO: 977354 - RNA, 27 nt, Human
caaaaacaaaaacaaaaaacagccaca

SEQ ID NO: 977355 - RNA, 28 nt, Human
caaaaacaaaaacaaaaacaaaaaacca

SEQ ID NO: 977356 - RNA, 21 nt, Human
caaaaagcaccacaauuugug

SEQ ID NO: 977357 - RNA, 21 nt, Human
caaaacugagggggaaagaac

SEQ ID NO: 977358 - RNA, 18 nt, Human
caaagcaagcccacgguc

SEQ ID NO: 977359 - RNA, 18 nt, Human
caacaacaaaacugaggg

SEQ ID NO: 977360 - RNA, 19 nt, Human
caagcccacggucuggcug

SEQ ID NO: 977361 - RNA, 19 nt, Human
cagaacaaaaaggcuacac

SEQ ID NO: 977362 - RNA, 25 nt, Human
cagaacaaaaaggcuacacaaaagc

SEQ ID NO: 977363 - RNA, 23 nt, Human
cagccacaacuugaaagcuaaaa

SEQ ID NO: 977364 - RNA, 19 nt, Human
cagcuucccaguccacucu

SEQ ID NO: 977365 - RNA, 24 nt, Human
cauaaaauauacaaaaagcaccac

SEQ ID NO: 977366 - RNA, 20 nt, Human
cccaaagcaagcccacgguc

SEQ ID NO: 977367 - RNA, 26 nt, Human
cccaaucaaaacaacucuaaaucacu

SEQ ID NO: 977368 - RNA, 18 nt, Human
cuaaagaaaacaaaaaca

SEQ ID NO: 977369 - RNA, 22 nt, Human
cuacacaaaagcccacuggcuc

SEQ ID NO: 977370 - RNA, 18 nt, Human
cugcgcccucugcaaucc

SEQ ID NO: 977371 - RNA, 18 nt, Human
cuugcugaagaucaucca

SEQ ID NO: 977372 - RNA, 24 nt, Human
gaaaacaaaaacaaaaacaaaaac

SEQ ID NO: 977373 - RNA, 26 nt, Human
gacuuuugucuuaaaaauagucagaa

SEQ ID NO: 977374 - RNA, 18 nt, Human
gagagggcagugguuaaa

SEQ ID NO: 977375 - RNA, 21 nt, Human
gagcccaaagcaagcccacgg

SEQ ID NO: 977376 - RNA, 24 nt, Human
gagggccgaggagaaagaagccag

SEQ ID NO: 977377 - RNA, 22 nt, Human
gauagcccuaacuggagacaga

SEQ ID NO: 977378 - RNA, 21 nt, Human
gcagaacaaaaaggcuacaca

SEQ ID NO: 977379 - RNA, 24 nt, Human
gcagaacaaaaaggcuacacaaaa

SEQ ID NO: 977380 - RNA, 21 nt, Human
gcucuuguugaaagugggagc

SEQ ID NO: 977381 - RNA, 24 nt, Human
ggagguacaacccaccuccaaaaa

SEQ ID NO: 977382 - RNA, 22 nt, Human
ggcaaggaaaacacagaagaga

SEQ ID NO: 977383 - RNA, 19 nt, Human
ggccgaggagaaagaagcc

SEQ ID NO: 977384 - RNA, 26 nt, Human
gguuucugagaaaucaugaagagccu

SEQ ID NO: 977385 - RNA, 22 nt, Human
guaagacaacaacaaaacugag

SEQ ID NO: 977386 - RNA, 18 nt, Human
guggguguauguucaugu

SEQ ID NO: 977387 - RNA, 24 nt, Human
uaaaauauacaaaaagcaccacaa

SEQ ID NO: 977388 - RNA, 31 nt, Human
uaaagaaaacaaaaacaaaaacaaaaacaaa

SEQ ID NO: 977389 - RNA, 21 nt, Human
uaaaggaaaagcuggguucac

SEQ ID NO: 977390 - RNA, 18 nt, Human
uaagacaacaacaaaacu

SEQ ID NO: 977391 - RNA, 21 nt, Human
uaagacaacaacaaaacugag

SEQ ID NO: 977392 - RNA, 18 nt, Human
uacacaaaagcccacugg

SEQ ID NO: 977393 - RNA, 23 nt, Human
uacguuauagcaaaaaauauauc

SEQ ID NO: 977394 - RNA, 20 nt, Human
uagcaaaaaauauauccccc

SEQ ID NO: 977395 - RNA, 20 nt, Human
uagcccuaacuggagacaga

SEQ ID NO: 977396 - RNA, 22 nt, Human
uaugcuuuaaaggaaaagcugg

SEQ ID NO: 977397 - RNA, 25 nt, Human
uauuuuguuauauucaaacaugagu

SEQ ID NO: 977398 - RNA, 20 nt, Human
ucaacagucuuuugcaauaa

SEQ ID NO: 977399 - RNA, 25 nt, Human
ucaacagucuuuugcaauaaauacc

SEQ ID NO: 977400 - RNA, 21 nt, Human
ucacuguagucuggauguggg

SEQ ID NO: 977401 - RNA, 18 nt, Human
uccaugaguuagaccuug

SEQ ID NO: 977402 - RNA, 23 nt, Human
ucuaaaauuacauagaaagaaaa

SEQ ID NO: 977403 - RNA, 26 nt, Human
ucuaaagaaaacaaaaacaaaaacaa

SEQ ID NO: 977404 - RNA, 18 nt, Human
ucugaaauccuuuucgga

SEQ ID NO: 977405 - RNA, 24 nt, Human
ucugcauuauaguuaacauaugua

SEQ ID NO: 977406 - RNA, 25 nt, Human
ugaaggagaaagaaggagagggcag

SEQ ID NO: 977407 - RNA, 18 nt, Human
ugagggggaaagaaccuu

SEQ ID NO: 977408 - RNA, 23 nt, Human
ugcagaacaaaaaggcuacacaa

SEQ ID NO: 977409 - RNA, 27 nt, Human
ugcagaacaaaaaggcuacacaaaagc

SEQ ID NO: 977410 - RNA, 21 nt, Human
uggcaaucaguggaaaccugg

SEQ ID NO: 977411 - RNA, 20 nt, Human
uggcaucuccagaguaagac

SEQ ID NO: 977412 - RNA, 20 nt, Human
uggcaugcaucugaaauccu

SEQ ID NO: 977413 - RNA, 24 nt, Human
uggcugacccuaagcaaggauuug

SEQ ID NO: 977414 - RNA, 21 nt, Human
uggcugaguccuucacaaaua

SEQ ID NO: 977415 - RNA, 21 nt, Human
uggguguauguucauguacac

SEQ ID NO: 977416 - RNA, 21 nt, Human
uggugagaagcauggggugaa

SEQ ID NO: 977417 - RNA, 22 nt, Human
uuaaaaauagucagaauucaac

SEQ ID NO: 977418 - RNA, 21 nt, Human
uucaacagucuuuugcaauaa

SEQ ID NO: 977419 - RNA, 22 nt, Human
uuucccugcucccacgguaccc

SEQ ID NO: 977420 - RNA, 22 nt, Human
uuugucuuaaaaauagucagaa

SEQ ID NO: 977421 - RNA, 18 nt, Human
aaaaaaagagaauucgga

SEQ ID NO: 977422 - RNA, 21 nt, Human
aaacagcaaagacuaucccaa

SEQ ID NO: 977423 - RNA, 20 nt, Human
aagaaagaaaaaauccucau

SEQ ID NO: 977424 - RNA, 20 nt, Human
aagaggccgaagcgccaacg

SEQ ID NO: 977425 - RNA, 23 nt, Human
aagcauuucaccgcaaacagcaa

SEQ ID NO: 977426 - RNA, 18 nt, Human
accaacuuccgagcaauc

SEQ ID NO: 977427 - RNA, 23 nt, Human
agaaaaaauccucauuacuguaa

SEQ ID NO: 977428 - RNA, 20 nt, Human
agaaaauaaagguugaauuu

SEQ ID NO: 977429 - RNA, 24 nt, Human
auggacaaaaagcauuucaccgca

SEQ ID NO: 977430 - RNA, 22 nt, Human
caaacaaaaacuuugccuagga

SEQ ID NO: 977431 - RNA, 18 nt, Human
caccgcaaacagcaaaga

SEQ ID NO: 977432 - RNA, 26 nt, Human
caccgcaaacagcaaagacuauccca

SEQ ID NO: 977433 - RNA, 18 nt, Human
caucugaacuccgugauc

SEQ ID NO: 977434 - RNA, 19 nt, Human
caugggucaccaaguucug

SEQ ID NO: 977435 - RNA, 20 nt, Human
ccaacuuccgagcaaucggc

SEQ ID NO: 977436 - RNA, 22 nt, Human
ccgcaaacagcaaagacuaucc

SEQ ID NO: 977437 - RNA, 25 nt, Human
cgauuaacagugccaagauuauaac

SEQ ID NO: 977438 - RNA, 19 nt, Human
cggcgggagaaaaaaagag

SEQ ID NO: 977439 - RNA, 23 nt, Human
cucuggagaaaacaauggaaaaa

SEQ ID NO: 977440 - RNA, 22 nt, Human
cuguaaggcaaaauacaaucua

SEQ ID NO: 977441 - RNA, 19 nt, Human
cuuggauucucuucuuucu

SEQ ID NO: 977442 - RNA, 21 nt, Human
gaagcgccaacggcaaguccc

SEQ ID NO: 977443 - RNA, 18 nt, Human
ggagccagauuccccgcu

SEQ ID NO: 977444 - RNA, 19 nt, Human
guaaggcaaaauacaaucu

SEQ ID NO: 977445 - RNA, 22 nt, Human
uaaaaggggcaaaauuuguaag

SEQ ID NO: 977446 - RNA, 23 nt, Human
uaaacaauauguugaaaaaauua

SEQ ID NO: 977447 - RNA, 21 nt, Human
uaaauccagucucgaugcaaa

SEQ ID NO: 977448 - RNA, 23 nt, Human
uacaauauacaugaaguccaaag

SEQ ID NO: 977449 - RNA, 28 nt, Human
uauuuccucuuuuuucucaaugaacaag

SEQ ID NO: 977450 - RNA, 25 nt, Human
ucccuuggauucucuucuuucugcg

SEQ ID NO: 977451 - RNA, 25 nt, Human
uccucauuacuguaauauuccugau

SEQ ID NO: 977452 - RNA, 24 nt, Human
ucggagcuggagacgacuccccuu

SEQ ID NO: 977453 - RNA, 23 nt, Human
ucucauacuuugagcuccauuag

SEQ ID NO: 977454 - RNA, 19 nt, Human
ugccuaggagugucugugu

SEQ ID NO: 977455 - RNA, 25 nt, Human
uggcacaacuuguuuuucacaguug

SEQ ID NO: 977456 - RNA, 20 nt, Human
uguauuaaaaaaagaaagaa

SEQ ID NO: 977457 - RNA, 21 nt, Human
uucacaaacaaaaacuuugcc

SEQ ID NO: 977458 - RNA, 19 nt, Human
uucucaaugaacaagaggc

SEQ ID NO: 977459 - RNA, 19 nt, Human
uugaauuuuacuguaacug

SEQ ID NO: 977460 - RNA, 19 nt, Human
uuucacaguugcaaauauu

SEQ ID NO: 977461 - RNA, 22 nt, Human
uuugcagcaacuaucacauccu

SEQ ID NO: 977462 - RNA, 24 nt, Human
aaaaaaaaaucaaaacucugugga

SEQ ID NO: 977463 - RNA, 19 nt, Human
aaaaaccuuuccccuaccc

SEQ ID NO: 977464 - RNA, 20 nt, Human
aaaaacgaaaaacuaggaau

SEQ ID NO: 977465 - RNA, 22 nt, Human
aaaaccucugaccuugcugcag

SEQ ID NO: 977466 - RNA, 21 nt, Human
aaaaggaaacaaguuguuuua

SEQ ID NO: 977467 - RNA, 19 nt, Human
aaaauccaaggcaugccgg

SEQ ID NO: 977468 - RNA, 26 nt, Human
aaacaaaaguagaaauaaagggaccc

SEQ ID NO: 977469 - RNA, 25 nt, Human
aaaccaucuccagucccuucaguac

SEQ ID NO: 977470 - RNA, 21 nt, Human
aaaccucugaccuugcugcag

SEQ ID NO: 977471 - RNA, 18 nt, Human
aaacuggaaaugcuacgg

SEQ ID NO: 977472 - RNA, 25 nt, Human
aaagacaauggaaaagaggaagggg

SEQ ID NO: 977473 - RNA, 19 nt, Human
aaagugcaacuugccacug

SEQ ID NO: 977474 - RNA, 24 nt, Human
aaagugcuaagauuacaggcguga

SEQ ID NO: 977475 - RNA, 20 nt, Human
aaauaaaaguuuucagaacc

SEQ ID NO: 977476 - RNA, 21 nt, Human
aacaaacuggaaaugcuacgg

SEQ ID NO: 977477 - RNA, 21 nt, Human
aacaaguaccuacccacugga

SEQ ID NO: 977478 - RNA, 23 nt, Human
aacacuuugggagguugagcggg

SEQ ID NO: 977479 - RNA, 19 nt, Human
aaccagcguggccacagcg

SEQ ID NO: 977480 - RNA, 20 nt, Human
aaccagggcggcgcagacgg

SEQ ID NO: 977481 - RNA, 22 nt, Human
aacccuggaagaaccugaaaaa

SEQ ID NO: 977482 - RNA, 20 nt, Human
aaccuccaccucccggguuc

SEQ ID NO: 977483 - RNA, 23 nt, Human
aagaaaaauuuccccccaaacca

SEQ ID NO: 977484 - RNA, 19 nt, Human
aagaaacccaaacccagcc

SEQ ID NO: 977485 - RNA, 23 nt, Human
aagaaacccaaacccagccuggc

SEQ ID NO: 977486 - RNA, 18 nt, Human
aagaagaacaagcuagaa

SEQ ID NO: 977487 - RNA, 21 nt, Human
aagagaagaaacccaaaccca

SEQ ID NO: 977488 - RNA, 22 nt, Human
aagcaaaccaaaacccagaaaa

SEQ ID NO: 977489 - RNA, 18 nt, Human
aagcaaaccaagaagaac

SEQ ID NO: 977490 - RNA, 23 nt, Human
aagcaagaaccccacacaaaagc

SEQ ID NO: 977491 - RNA, 25 nt, Human
aagcaaggcaagacacugcacgcag

SEQ ID NO: 977492 - RNA, 18 nt, Human
aagcagaagaaguucuaa

SEQ ID NO: 977493 - RNA, 23 nt, Human
aagcagguugaaagcaaaccaag

SEQ ID NO: 977494 - RNA, 21 nt, Human
aagcgugaucauaagugaacc

SEQ ID NO: 977495 - RNA, 19 nt, Human
aaggaaaaaauaaguccuu

SEQ ID NO: 977496 - RNA, 20 nt, Human
aaggaaaaagcaaaccaaaa

SEQ ID NO: 977497 - RNA, 27 nt, Human
aaggaaaaagcaaaccaaaacccagaa

SEQ ID NO: 977498 - RNA, 22 nt, Human
aaggagaagaagguauagaaga

SEQ ID NO: 977499 - RNA, 20 nt, Human
aaguaccugcacgauacuau

SEQ ID NO: 977500 - RNA, 19 nt, Human
aaguagcugggacuacagg

SEQ ID NO: 977501 - RNA, 20 nt, Human
aaguagcugggacuacaggc

SEQ ID NO: 977502 - RNA, 25 nt, Human
aaguagcugggacuacaggcaccca

SEQ ID NO: 977503 - RNA, 18 nt, Human
aaguuuuugggcucaaag

SEQ ID NO: 977504 - RNA, 25 nt, Human
aauaaaaagugaaaaacuaugcaua

SEQ ID NO: 977505 - RNA, 23 nt, Human
aauaugacccucccuuccuccaa

SEQ ID NO: 977506 - RNA, 18 nt, Human
acacaaagcaagaacccc

SEQ ID NO: 977507 - RNA, 24 nt, Human
acacaacaaaauccaaggcaugcc

SEQ ID NO: 977508 - RNA, 21 nt, Human
acacauuuaaaaaagcagaaa

SEQ ID NO: 977509 - RNA, 21 nt, Human
acagcagaaaauggcaacgca

SEQ ID NO: 977510 - RNA, 21 nt, Human
acaggcacccaccaccacacc

SEQ ID NO: 977511 - RNA, 18 nt, Human
acaggcgugagcaccaua

SEQ ID NO: 977512 - RNA, 22 nt, Human
acaucuacuaaaacaaacaaac

SEQ ID NO: 977513 - RNA, 19 nt, Human
acauuuaaaaaagcagaaa

SEQ ID NO: 977514 - RNA, 21 nt, Human
accaaaacccagaaaaauccg

SEQ ID NO: 977515 - RNA, 21 nt, Human
accaaguuuuugggcucaaag

SEQ ID NO: 977516 - RNA, 27 nt, Human
accacacaaagcaagaaccccacacaa

SEQ ID NO: 977517 - RNA, 18 nt, Human
accacacccugccccugc

SEQ ID NO: 977518 - RNA, 18 nt, Human
accacagccucagacuca

SEQ ID NO: 977519 - RNA, 22 nt, Human
accauauuggccaggcuggucu

SEQ ID NO: 977520 - RNA, 24 nt, Human
accauauuggccaggcuggucuug

SEQ ID NO: 977521 - RNA, 21 nt, Human
acccaccuuggccucccaauc

SEQ ID NO: 977522 - RNA, 19 nt, Human
acccaggcuggagugcaau

SEQ ID NO: 977523 - RNA, 24 nt, Human
accucgugauccacccaccuuggc

SEQ ID NO: 977524 - RNA, 22 nt, Human
accugaggccugucccccauga

SEQ ID NO: 977525 - RNA, 24 nt, Human
accuggcuaauuuuuuuguauuuu

SEQ ID NO: 977526 - RNA, 18 nt, Human
acgggguuucacuauguu

SEQ ID NO: 977527 - RNA, 23 nt, Human
acgggguuucacuauguuggcca

SEQ ID NO: 977528 - RNA, 24 nt, Human
acgggguuucacuauguuggccag

SEQ ID NO: 977529 - RNA, 22 nt, Human
acuaaaacaaacaaacaaauaa

SEQ ID NO: 977530 - RNA, 24 nt, Human
acuauguuggccaggcuggucucg

SEQ ID NO: 977531 - RNA, 18 nt, Human
acucugucacccaggcug

SEQ ID NO: 977532 - RNA, 25 nt, Human
acucugucacccaggcuggagugua

SEQ ID NO: 977533 - RNA, 22 nt, Human
acuguaaccuccgccuccuggg

SEQ ID NO: 977534 - RNA, 21 nt, Human
acuuugggagguugagcgggg

SEQ ID NO: 977535 - RNA, 22 nt, Human
agaaacccaaacccagccuggc

SEQ ID NO: 977536 - RNA, 21 nt, Human
agaaccccacacaaaagcugg

SEQ ID NO: 977537 - RNA, 21 nt, Human
agaagaacaagcuagaacagg

SEQ ID NO: 977538 - RNA, 19 nt, Human
agaagagaagaaacccaaa

SEQ ID NO: 977539 - RNA, 20 nt, Human
agaaucagaagagaagaaac

SEQ ID NO: 977540 - RNA, 19 nt, Human
agacauccaucaagcaggu

SEQ ID NO: 977541 - RNA, 22 nt, Human
agacgccggucggaggaaccgg

SEQ ID NO: 977542 - RNA, 18 nt, Human
agagaaccagguuuccag

SEQ ID NO: 977543 - RNA, 18 nt, Human
agagccaaagacaaugga

SEQ ID NO: 977544 - RNA, 22 nt, Human
agagccccaagguccccacccc

SEQ ID NO: 977545 - RNA, 18 nt, Human
agaggaaggggggggcgg

SEQ ID NO: 977546 - RNA, 24 nt, Human
agauuacaggcgugagcaccauac

SEQ ID NO: 977547 - RNA, 22 nt, Human
agauucuccugccucagccucc

SEQ ID NO: 977548 - RNA, 26 nt, Human
agccaaacaggccauuggugacagga

SEQ ID NO: 977549 - RNA, 19 nt, Human
agccauuuccuucauagcc

SEQ ID NO: 977550 - RNA, 19 nt, Human
agcucuuccaagcucuucc

SEQ ID NO: 977551 - RNA, 22 nt, Human
agcugaaugccugugucucugg

SEQ ID NO: 977552 - RNA, 23 nt, Human
aggaaaaaauaaguccuugagaa

SEQ ID NO: 977553 - RNA, 26 nt, Human
aggaaaaagcaaaccaaaacccagaa

SEQ ID NO: 977554 - RNA, 23 nt, Human
aggaaacacacucagccagaagc

SEQ ID NO: 977555 - RNA, 18 nt, Human
aggaaggggggggcggag

SEQ ID NO: 977556 - RNA, 18 nt, Human
aggaaggggggggcggag

SEQ ID NO: 977557 - RNA, 18 nt, Human
aggacacguagugggcag

SEQ ID NO: 977558 - RNA, 23 nt, Human
aggacccugaaaaaaagccccaa

SEQ ID NO: 977559 - RNA, 19 nt, Human
aggagaagaagguauagaa

SEQ ID NO: 977560 - RNA, 28 nt, Human
aggcaagcgugaucauaagugaaccaga

SEQ ID NO: 977561 - RNA, 23 nt, Human
aggcagaaggaggaacgaggcuu

SEQ ID NO: 977562 - RNA, 25 nt, Human
aggcagaaggaggaacgaggggacc

SEQ ID NO: 977563 - RNA, 19 nt, Human
aggccacuuccucagauaa

SEQ ID NO: 977564 - RNA, 18 nt, Human
aggcuggagugcaguggc

SEQ ID NO: 977565 - RNA, 19 nt, Human
agggagaaggaggggcugg

SEQ ID NO: 977566 - RNA, 19 nt, Human
agggagggagggagaaggg

SEQ ID NO: 977567 - RNA, 22 nt, Human
agggaggggcccugggaaaagu

SEQ ID NO: 977568 - RNA, 25 nt, Human
agggaggggcccugggaaaaguucu

SEQ ID NO: 977569 - RNA, 19 nt, Human
aggggcagggggaaaaaag

SEQ ID NO: 977570 - RNA, 19 nt, Human
aguagcugggacuacaggc

SEQ ID NO: 977571 - RNA, 21 nt, Human
aguccagaaguuugagaccag

SEQ ID NO: 977572 - RNA, 23 nt, Human
agucugugacucaguaagaaccg

SEQ ID NO: 977573 - RNA, 24 nt, Human
agugcaauggugcggucucagcug

SEQ ID NO: 977574 - RNA, 21 nt, Human
agugcaguggcgcaaucaaag

SEQ ID NO: 977575 - RNA, 18 nt, Human
aguggcgcgaucuuggcu

SEQ ID NO: 977576 - RNA, 23 nt, Human
aguggcucacaccuguaauccca

SEQ ID NO: 977577 - RNA, 23 nt, Human
aguguaguggcgcgaucuuggcu

SEQ ID NO: 977578 - RNA, 24 nt, Human
aguguaguggcgcgaucuuggcuc

SEQ ID NO: 977579 - RNA, 23 nt, Human
auagccuggcagcuuugcuccug

SEQ ID NO: 977580 - RNA, 23 nt, Human
auauuggccaggcuggucuugaa

SEQ ID NO: 977581 - RNA, 19 nt, Human
aucauagcuaccuaccucg

SEQ ID NO: 977582 - RNA, 22 nt, Human
augcacuacugaguggcaaagu

SEQ ID NO: 977583 - RNA, 19 nt, Human
augggguuuaccauauugg

SEQ ID NO: 977584 - RNA, 23 nt, Human
augggguuuaccauauuggccag

SEQ ID NO: 977585 - RNA, 19 nt, Human
auuaaaaaaaaaaaaaaaa

SEQ ID NO: 977586 - RNA, 22 nt, Human
auuaaaaaaaaaaaaaaaauca

SEQ ID NO: 977587 - RNA, 20 nt, Human
caaaaggaaacaaguuguuu

SEQ ID NO: 977588 - RNA, 19 nt, Human
caaaauaaauauucuauac

SEQ ID NO: 977589 - RNA, 28 nt, Human
caaaccaaaacccagaaaaauccguguu

SEQ ID NO: 977590 - RNA, 28 nt, Human
caaaccaacggauagguuugaacaacga

SEQ ID NO: 977591 - RNA, 21 nt, Human
caaaccaagaagaacaagcua

SEQ ID NO: 977592 - RNA, 19 nt, Human
caaaccacacccugccccu

SEQ ID NO: 977593 - RNA, 24 nt, Human
caaagcaagaaccccacacaaaag

SEQ ID NO: 977594 - RNA, 23 nt, Human
caaaggcaugaaccagaaggcua

SEQ ID NO: 977595 - RNA, 24 nt, Human
caaagugcuaagauuacaggcgug

SEQ ID NO: 977596 - RNA, 19 nt, Human
caacaaaauccaaggcaug

SEQ ID NO: 977597 - RNA, 21 nt, Human
caacacagaaagaccccacau

SEQ ID NO: 977598 - RNA, 23 nt, Human
caacacuuugggagguugagcgg

SEQ ID NO: 977599 - RNA, 22 nt, Human
caagaucaccaaagugcaacuu

SEQ ID NO: 977600 - RNA, 21 nt, Human
caagccaguuuauccuucugu

SEQ ID NO: 977601 - RNA, 20 nt, Human
caagccgaggcaucguccag

SEQ ID NO: 977602 - RNA, 24 nt, Human
caaggcugggcacaguggcucaca

SEQ ID NO: 977603 - RNA, 23 nt, Human
caaguauguacacaaaaagucag

SEQ ID NO: 977604 - RNA, 20 nt, Human
caagugauucuucugccuca

SEQ ID NO: 977605 - RNA, 22 nt, Human
caagugauucuucugccucagc

SEQ ID NO: 977606 - RNA, 21 nt, Human
caaguuguuuuauuauuauuu

SEQ ID NO: 977607 - RNA, 23 nt, Human
cacaacaaaauccaaggcaugcc

SEQ ID NO: 977608 - RNA, 24 nt, Human
cacacaaagcaagaaccccacaca

SEQ ID NO: 977609 - RNA, 24 nt, Human
cacaccuguaaucccaacacuuug

SEQ ID NO: 977610 - RNA, 25 nt, Human
cacaggcaagccaguuuauccuucu

SEQ ID NO: 977611 - RNA, 22 nt, Human
caccaagaucaccaaagugcaa

SEQ ID NO: 977612 - RNA, 20 nt, Human
caccaugccuggcuauuuug

SEQ ID NO: 977613 - RNA, 18 nt, Human
cacccaccaccacaccug

SEQ ID NO: 977614 - RNA, 24 nt, Human
cacccaggcuggaguguaguggcg

SEQ ID NO: 977615 - RNA, 19 nt, Human
cacccccuuccugcucagg

SEQ ID NO: 977616 - RNA, 23 nt, Human
caccugccucagccucccaaagu

SEQ ID NO: 977617 - RNA, 19 nt, Human
caccuguaaucccaacacu

SEQ ID NO: 977618 - RNA, 24 nt, Human
caccuguaaucccaacacuuuggg

SEQ ID NO: 977619 - RNA, 23 nt, Human
cacgcaguuacccacagcagaaa

SEQ ID NO: 977620 - RNA, 19 nt, Human
cacuauacacaaaaggcua

SEQ ID NO: 977621 - RNA, 21 nt, Human
cacuauacacaaaaggcuaug

SEQ ID NO: 977622 - RNA, 21 nt, Human
cacuauguuggccaggcuggu

SEQ ID NO: 977623 - RNA, 24 nt, Human
cacuauguuggccaggcuggucuc

SEQ ID NO: 977624 - RNA, 18 nt, Human
cacucaugaccacugacc

SEQ ID NO: 977625 - RNA, 22 nt, Human
cacucugucacccaggcuggag

SEQ ID NO: 977626 - RNA, 23 nt, Human
cacucugucacccaggcuggagu

SEQ ID NO: 977627 - RNA, 21 nt, Human
cacuguaaccuccaccucccg

SEQ ID NO: 977628 - RNA, 23 nt, Human
cacuguaaccuccaccucccggg

SEQ ID NO: 977629 - RNA, 21 nt, Human
cagaacaaacuggaaaugcua

SEQ ID NO: 977630 - RNA, 25 nt, Human
cagaacacccccgagaguuaguuga

SEQ ID NO: 977631 - RNA, 19 nt, Human
cagaacccccaccuacccc

SEQ ID NO: 977632 - RNA, 21 nt, Human
cagaaucagaagagaagaaac

SEQ ID NO: 977633 - RNA, 23 nt, Human
cagagcacuggggcuucgacaca

SEQ ID NO: 977634 - RNA, 21 nt, Human
cagcacagaaggagaacagga

SEQ ID NO: 977635 - RNA, 30 nt, Human
cagcagaaucagaagagaagaaacccaaaa

SEQ ID NO: 977636 - RNA, 24 nt, Human
cagcagcagcgugaaggcgaggcu

SEQ ID NO: 977637 - RNA, 21 nt, Human
cagccacccuccaccuccccu

SEQ ID NO: 977638 - RNA, 18 nt, Human
cagccucaggaggcuaaa

SEQ ID NO: 977639 - RNA, 22 nt, Human
cagcggcaaccagggcggcgca

SEQ ID NO: 977640 - RNA, 21 nt, Human
cagcucaggcucuggccaugg

SEQ ID NO: 977641 - RNA, 23 nt, Human
cagcugcaguuuccggauaugug

SEQ ID NO: 977642 - RNA, 18 nt, Human
cagcuucuccuacccuuc

SEQ ID NO: 977643 - RNA, 18 nt, Human
caggaaacacacucagcc

SEQ ID NO: 977644 - RNA, 23 nt, Human
caggaaacacacucagccagaag

SEQ ID NO: 977645 - RNA, 20 nt, Human
caggaaacagcagcuccccu

SEQ ID NO: 977646 - RNA, 20 nt, Human
caggccuggaaguuggcccu

SEQ ID NO: 977647 - RNA, 21 nt, Human
cagggacaaagugggguggag

SEQ ID NO: 977648 - RNA, 21 nt, Human
cagggcucaaacccaguggcc

SEQ ID NO: 977649 - RNA, 20 nt, Human
caggggcagggggaaaaaag

SEQ ID NO: 977650 - RNA, 19 nt, Human
caguacacuucugauacau

SEQ ID NO: 977651 - RNA, 23 nt, Human
caguggcuccuaaauccauccug

SEQ ID NO: 977652 - RNA, 19 nt, Human
cauagcuaccuaccucgcu

SEQ ID NO: 977653 - RNA, 24 nt, Human
cauauuggccaggcuggucuugaa

SEQ ID NO: 977654 - RNA, 19 nt, Human
caucagggacaaagugggg

SEQ ID NO: 977655 - RNA, 25 nt, Human
caucugaggaaaaccaucuccaguc

SEQ ID NO: 977656 - RNA, 23 nt, Human
caugcacuacugaguggcaaagu

SEQ ID NO: 977657 - RNA, 27 nt, Human
cauuuaaaaaagcagaaaucguacagg

SEQ ID NO: 977658 - RNA, 19 nt, Human
ccaaaccacacccugcccc

SEQ ID NO: 977659 - RNA, 22 nt, Human
ccaaagugcuaagauuacaggc

SEQ ID NO: 977660 - RNA, 24 nt, Human
ccaaagugcuaagauuacaggcgu

SEQ ID NO: 977661 - RNA, 22 nt, Human
ccaagaagcugagaaaaacaau

SEQ ID NO: 977662 - RNA, 22 nt, Human
ccaaggcuggagugcaguggcg

SEQ ID NO: 977663 - RNA, 20 nt, Human
ccaagggucuucuuuaaagg

SEQ ID NO: 977664 - RNA, 24 nt, Human
ccaaguuuuugggcucaaagccac

SEQ ID NO: 977665 - RNA, 24 nt, Human
ccacccaccuuggccucccaaucu

SEQ ID NO: 977666 - RNA, 20 nt, Human
ccaccccugguuagggcugu

SEQ ID NO: 977667 - RNA, 24 nt, Human
ccaccucccggguucaagugauuc

SEQ ID NO: 977668 - RNA, 26 nt, Human
ccaccugccucagccucccaaagugc

SEQ ID NO: 977669 - RNA, 21 nt, Human
ccacugggucaaguuucccau

SEQ ID NO: 977670 - RNA, 21 nt, Human
ccagaaaaauccguguuuaca

SEQ ID NO: 977671 - RNA, 18 nt, Human
ccagcucuuccaagcucu

SEQ ID NO: 977672 - RNA, 24 nt, Human
ccaguucccagggugcucgcggaa

SEQ ID NO: 977673 - RNA, 25 nt, Human
ccauucuuaaaaguaggcaagcgug

SEQ ID NO: 977674 - RNA, 22 nt, Human
cccaaaccacacccugccccug

SEQ ID NO: 977675 - RNA, 22 nt, Human
cccaaacccagccuggcucagc

SEQ ID NO: 977676 - RNA, 23 nt, Human
cccaaguagcugggacuacaggc

SEQ ID NO: 977677 - RNA, 24 nt, Human
cccaaguagcugggacuacaggca

SEQ ID NO: 977678 - RNA, 19 nt, Human
cccagcucuuccaagcucu

SEQ ID NO: 977679 - RNA, 23 nt, Human
ccccaaaccacacccugccccug

SEQ ID NO: 977680 - RNA, 18 nt, Human
ccccacaugccugcuagg

SEQ ID NO: 977681 - RNA, 19 nt, Human
cccccaaaccacacccugc

SEQ ID NO: 977682 - RNA, 23 nt, Human
ccccugcuggggcuuccuaacac

SEQ ID NO: 977683 - RNA, 21 nt, Human
ccccuggaaaaaccuuucccc

SEQ ID NO: 977684 - RNA, 23 nt, Human
cccgaguagcugggacuacaggc

SEQ ID NO: 977685 - RNA, 24 nt, Human
cccgaguagcugggacuacaggcg

SEQ ID NO: 977686 - RNA, 22 nt, Human
cccggguucaagugauucuucu

SEQ ID NO: 977687 - RNA, 23 nt, Human
cccggguucaagugauucuucug

SEQ ID NO: 977688 - RNA, 20 nt, Human
cccuccaccuccccucuucc

SEQ ID NO: 977689 - RNA, 21 nt, Human
cccuccaccuccccucuucca

SEQ ID NO: 977690 - RNA, 18 nt, Human
cccuccgugccaugcagc

SEQ ID NO: 977691 - RNA, 23 nt, Human
ccuaugguuacaaucaacuuacu

SEQ ID NO: 977692 - RNA, 23 nt, Human
ccuccccucuuccauucuuaaaa

SEQ ID NO: 977693 - RNA, 21 nt, Human
ccucccggguucaagugauuc

SEQ ID NO: 977694 - RNA, 23 nt, Human
ccuccgccuccuggguucgagau

SEQ ID NO: 977695 - RNA, 22 nt, Human
ccuccuggguucgagauucucc

SEQ ID NO: 977696 - RNA, 22 nt, Human
ccucggauggcaucaguagccu

SEQ ID NO: 977697 - RNA, 22 nt, Human
ccugaaaaaguuuucaaggcug

SEQ ID NO: 977698 - RNA, 22 nt, Human
ccugaagccggggcagguuagc

SEQ ID NO: 977699 - RNA, 19 nt, Human
ccugaccucgugauccacc

SEQ ID NO: 977700 - RNA, 22 nt, Human
ccugaccucgugauccacccac

SEQ ID NO: 977701 - RNA, 21 nt, Human
ccugaccucgugauccaccug

SEQ ID NO: 977702 - RNA, 23 nt, Human
ccugccucagccucccaaguagc

SEQ ID NO: 977703 - RNA, 22 nt, Human
ccugcuaggcucucgcugccca

SEQ ID NO: 977704 - RNA, 18 nt, Human
ccuggcuauuuuguaguu

SEQ ID NO: 977705 - RNA, 20 nt, Human
ccuucaugugcccugggggu

SEQ ID NO: 977706 - RNA, 18 nt, Human
cgacugacaggcuccaca

SEQ ID NO: 977707 - RNA, 18 nt, Human
cgccgcuguacucgcaga

SEQ ID NO: 977708 - RNA, 25 nt, Human
cgccuccuggguucgagauucuccu

SEQ ID NO: 977709 - RNA, 21 nt, Human
cggacaacacagaaagacccc

SEQ ID NO: 977710 - RNA, 18 nt, Human
cggagaaacaggcuucua

SEQ ID NO: 977711 - RNA, 18 nt, Human
cggggaggcagaaggagg

SEQ ID NO: 977712 - RNA, 24 nt, Human
cgggguuucacuauguuggccagg

SEQ ID NO: 977713 - RNA, 20 nt, Human
cggguucaagugauucuucu

SEQ ID NO: 977714 - RNA, 21 nt, Human
cguccuggaucccaggugccc

SEQ ID NO: 977715 - RNA, 24 nt, Human
cgugauccaccugccucagccucc

SEQ ID NO: 977716 - RNA, 19 nt, Human
cgugcagaugugcacuauc

SEQ ID NO: 977717 - RNA, 20 nt, Human
cuaaaacaaacaaacaaaua

SEQ ID NO: 977718 - RNA, 21 nt, Human
cuaaaaccucugaccuugcug

SEQ ID NO: 977719 - RNA, 22 nt, Human
cuaaaaccucugaccuugcugc

SEQ ID NO: 977720 - RNA, 23 nt, Human
cucaaagccacacucaugaccac

SEQ ID NO: 977721 - RNA, 22 nt, Human
cucacaccuguaaucccaacac

SEQ ID NO: 977722 - RNA, 24 nt, Human
cucacaccuguaaucccaacacuu

SEQ ID NO: 977723 - RNA, 24 nt, Human
cucacucugucacccaggcuggag

SEQ ID NO: 977724 - RNA, 24 nt, Human
cucacuguaaccuccaccucccgg

SEQ ID NO: 977725 - RNA, 24 nt, Human
cucagccucccaaguagcugggac

SEQ ID NO: 977726 - RNA, 24 nt, Human
cucagccucccgaguagcugggac

SEQ ID NO: 977727 - RNA, 23 nt, Human
cucaggcucuggccaugggggau

SEQ ID NO: 977728 - RNA, 19 nt, Human
cucaugcacuuccaguuuc

SEQ ID NO: 977729 - RNA, 20 nt, Human
cucaugguggcccccaggcc

SEQ ID NO: 977730 - RNA, 18 nt, Human
cuccugaccucgugaucc

SEQ ID NO: 977731 - RNA, 24 nt, Human
cuccugaccucgugauccaccugc

SEQ ID NO: 977732 - RNA, 19 nt, Human
cuccuggguucgagauucu

SEQ ID NO: 977733 - RNA, 24 nt, Human
cugacuguaaccuccgccuccugg

SEQ ID NO: 977734 - RNA, 23 nt, Human
cugccucagccucccaaagugcu

SEQ ID NO: 977735 - RNA, 24 nt, Human
cugccucagccucccaaagugcua

SEQ ID NO: 977736 - RNA, 23 nt, Human
cugccucagccucccaaguagcu

SEQ ID NO: 977737 - RNA, 23 nt, Human
cugccucagccucccgaguagcu

SEQ ID NO: 977738 - RNA, 18 nt, Human
cugccuccccugcuaucc

SEQ ID NO: 977739 - RNA, 18 nt, Human
cugccuccccugcuaucc

SEQ ID NO: 977740 - RNA, 19 nt, Human
cugcugccucccucccagc

SEQ ID NO: 977741 - RNA, 18 nt, Human
cuggaaaaaccuuucccc

SEQ ID NO: 977742 - RNA, 19 nt, Human
cugggucccucaguggcuc

SEQ ID NO: 977743 - RNA, 21 nt, Human
cuguaaccuccaccucccggg

SEQ ID NO: 977744 - RNA, 21 nt, Human
cuguacggagaaacaggcuuc

SEQ ID NO: 977745 - RNA, 22 nt, Human
cuuccagcuucuccuacccuuc

SEQ ID NO: 977746 - RNA, 21 nt, Human
cuuccuggggguggccaaaag

SEQ ID NO: 977747 - RNA, 24 nt, Human
cuugcucugucacccaggcuggag

SEQ ID NO: 977748 - RNA, 21 nt, Human
cuuuccccuacccucucccca

SEQ ID NO: 977749 - RNA, 23 nt, Human
gaaaaagcaaaccaaaacccaga

SEQ ID NO: 977750 - RNA, 22 nt, Human
gaaaccacaaacauauaggaaa

SEQ ID NO: 977751 - RNA, 21 nt, Human
gaaccagguuuccaggcagag

SEQ ID NO: 977752 - RNA, 19 nt, Human
gaccacagccucagacuca

SEQ ID NO: 977753 - RNA, 23 nt, Human
gaccaccaagaucaccaaagugc

SEQ ID NO: 977754 - RNA, 20 nt, Human
gaccagcucaggcucuggcc

SEQ ID NO: 977755 - RNA, 20 nt, Human
gacccugaaaaaaagcccca

SEQ ID NO: 977756 - RNA, 21 nt, Human
gaccucgugauccacccaccu

SEQ ID NO: 977757 - RNA, 21 nt, Human
gaccucgugauccacccaccu

SEQ ID NO: 977758 - RNA, 24 nt, Human
gaccucgugauccacccaccuugg

SEQ ID NO: 977759 - RNA, 25 nt, Human
gaccucgugauccacccaccuuggc

SEQ ID NO: 977760 - RNA, 22 nt, Human
gaccucgugauccaccugccuc

SEQ ID NO: 977761 - RNA, 24 nt, Human
gaccucgugauccaccugccucag

SEQ ID NO: 977762 - RNA, 24 nt, Human
gacuacaggcgugcgccaccaugc

SEQ ID NO: 977763 - RNA, 24 nt, Human
gagauucuccugccucagccuccc

SEQ ID NO: 977764 - RNA, 18 nt, Human
gaggaaggggggggcgga

SEQ ID NO: 977765 - RNA, 20 nt, Human
gaguagcugggacuacaggc

SEQ ID NO: 977766 - RNA, 24 nt, Human
gaguagcugggacuacaggcgugc

SEQ ID NO: 977767 - RNA, 24 nt, Human
gaucacuugaguccagaaguuuga

SEQ ID NO: 977768 - RNA, 21 nt, Human
gauucuucugccucagccucc

SEQ ID NO: 977769 - RNA, 23 nt, Human
gcaauugaggaaccagcguggcc

SEQ ID NO: 977770 - RNA, 22 nt, Human
gcagaacacccccgagaguuag

SEQ ID NO: 977771 - RNA, 22 nt, Human
gcagaaucagaagagaagaaac

SEQ ID NO: 977772 - RNA, 21 nt, Human
gcaguggcgcaaucaaaguau

SEQ ID NO: 977773 - RNA, 20 nt, Human
gcaguuacccacagcagaaa

SEQ ID NO: 977774 - RNA, 21 nt, Human
gccagacacuuccugggacag

SEQ ID NO: 977775 - RNA, 18 nt, Human
gccccuggaaaaaccuuu

SEQ ID NO: 977776 - RNA, 20 nt, Human
gccgccgcuguacucgcaga

SEQ ID NO: 977777 - RNA, 18 nt, Human
gccuggaaguuggcccug

SEQ ID NO: 977778 - RNA, 20 nt, Human
gccuuugaggagcugcaggg

SEQ ID NO: 977779 - RNA, 21 nt, Human
gcgcgaucuuggcucacugua

SEQ ID NO: 977780 - RNA, 27 nt, Human
gcucugucacccaggcuggagugcaau

SEQ ID NO: 977781 - RNA, 19 nt, Human
gcuggagugcaguggcgca

SEQ ID NO: 977782 - RNA, 20 nt, Human
gcugggcacaguggcucaca

SEQ ID NO: 977783 - RNA, 23 nt, Human
gcuggucucgaacuccugaccuc

SEQ ID NO: 977784 - RNA, 23 nt, Human
gcuggucuugaacuccugaccuc

SEQ ID NO: 977785 - RNA, 20 nt, Human
gcuguccuuccagcuucucc

SEQ ID NO: 977786 - RNA, 22 nt, Human
gcuugucaaaggcaugaaccag

SEQ ID NO: 977787 - RNA, 18 nt, Human
ggaaaacaaaauaccaca

SEQ ID NO: 977788 - RNA, 23 nt, Human
ggaaaugggcuacagugaggggg

SEQ ID NO: 977789 - RNA, 25 nt, Human
ggaaugcuguccuuccagcuucucc

SEQ ID NO: 977790 - RNA, 21 nt, Human
ggacaacacagaaagacccca

SEQ ID NO: 977791 - RNA, 26 nt, Human
ggacacguagugggcaggcgagucug

SEQ ID NO: 977792 - RNA, 24 nt, Human
ggacuacaggcgugcgccaccaug

SEQ ID NO: 977793 - RNA, 20 nt, Human
ggagggagaaggaggggcug

SEQ ID NO: 977794 - RNA, 18 nt, Human
ggagggagggagggagaa

SEQ ID NO: 977795 - RNA, 19 nt, Human
ggagggagggagggagaag

SEQ ID NO: 977796 - RNA, 18 nt, Human
ggaggggcccugggaaaa

SEQ ID NO: 977797 - RNA, 18 nt, Human
ggaggggcugggaaggca

SEQ ID NO: 977798 - RNA, 20 nt, Human
ggaggggcugggaaggcauu

SEQ ID NO: 977799 - RNA, 23 nt, Human
ggaucacuugaguccagaaguuu

SEQ ID NO: 977800 - RNA, 20 nt, Human
ggccuggaaguuggcccugu

SEQ ID NO: 977801 - RNA, 24 nt, Human
ggcggagggagggagggagaagga

SEQ ID NO: 977802 - RNA, 24 nt, Human
ggcuggucucgaacuccugaccuc

SEQ ID NO: 977803 - RNA, 24 nt, Human
ggcuggucuugaacuccugaccuc

SEQ ID NO: 977804 - RNA, 27 nt, Human
gggaaaaaaggaaaaagcaaaccaaaa

SEQ ID NO: 977805 - RNA, 22 nt, Human
gggaggcagaaggaggaacgag

SEQ ID NO: 977806 - RNA, 24 nt, Human
gggagguugagcgggggaggauca

SEQ ID NO: 977807 - RNA, 21 nt, Human
gggauuggucuucacccccuu

SEQ ID NO: 977808 - RNA, 24 nt, Human
gggcacaguggcucacaccuguaa

SEQ ID NO: 977809 - RNA, 22 nt, Human
gggcagccagagcccccuagaa

SEQ ID NO: 977810 - RNA, 22 nt, Human
gggcccccucaucugaggaaaa

SEQ ID NO: 977811 - RNA, 19 nt, Human
gggcugagggcaugguggg

SEQ ID NO: 977812 - RNA, 24 nt, Human
ggggguagggagugggcagacuag

SEQ ID NO: 977813 - RNA, 21 nt, Human
gggguuuaccauauuggccag

SEQ ID NO: 977814 - RNA, 23 nt, Human
gggguuucacuauguuggccagg

SEQ ID NO: 977815 - RNA, 18 nt, Human
ggguagcucuucugacuc

SEQ ID NO: 977816 - RNA, 20 nt, Human
gggucacaagcaucgcccca

SEQ ID NO: 977817 - RNA, 24 nt, Human
gggugugugugugugugugugugg

SEQ ID NO: 977818 - RNA, 22 nt, Human
ggguucaagugauucuucugcc

SEQ ID NO: 977819 - RNA, 23 nt, Human
ggguucaagugauucuucugccu

SEQ ID NO: 977820 - RNA, 21 nt, Human
ggguuuaccauauuggccagg

SEQ ID NO: 977821 - RNA, 19 nt, Human
ggucucgaacuccugaccu

SEQ ID NO: 977822 - RNA, 19 nt, Human
ggucuugaacuccugaccu

SEQ ID NO: 977823 - RNA, 21 nt, Human
ggugugugugugugugugugu

SEQ ID NO: 977824 - RNA, 18 nt, Human
guagggaacagaaaccaa

SEQ ID NO: 977825 - RNA, 19 nt, Human
guccuuccagcuucuccua

SEQ ID NO: 977826 - RNA, 18 nt, Human
gugagcagcagaaucaga

SEQ ID NO: 977827 - RNA, 24 nt, Human
gugauccacccaccuuggccuccc

SEQ ID NO: 977828 - RNA, 24 nt, Human
gugauccaccugccucagccuccc

SEQ ID NO: 977829 - RNA, 24 nt, Human
gugauucuucugccucagccuccc

SEQ ID NO: 977830 - RNA, 23 nt, Human
gugcaguggcgcaaucaaaguau

SEQ ID NO: 977831 - RNA, 32 nt, Human
gugggguagggguguguguguguguguguggu

SEQ ID NO: 977832 - RNA, 21 nt, Human
gugugugugugugugugugag

SEQ ID NO: 977833 - RNA, 20 nt, Human
gugugugugugugugugugu

SEQ ID NO: 977834 - RNA, 21 nt, Human
gugugugugugugugugugug

SEQ ID NO: 977835 - RNA, 21 nt, Human
gugugugugugugugugugug

SEQ ID NO: 977836 - RNA, 21 nt, Human
guucgagauucuccugccuca

SEQ ID NO: 977837 - RNA, 21 nt, Human
uaaaagaaggccagccccagc

SEQ ID NO: 977838 - RNA, 23 nt, Human
uaaaaugaaagcagaacugcuua

SEQ ID NO: 977839 - RNA, 22 nt, Human
uaaagacgggguuucacuaugu

SEQ ID NO: 977840 - RNA, 21 nt, Human
uaacacgggcagccagagccc

SEQ ID NO: 977841 - RNA, 24 nt, Human
uaacacgggcagccagagcccccu

SEQ ID NO: 977842 - RNA, 20 nt, Human
uaagaaauuuggccaaaguc

SEQ ID NO: 977843 - RNA, 23 nt, Human
uaagauuacaggcgugagcacca

SEQ ID NO: 977844 - RNA, 24 nt, Human
uaagauuacaggcgugagcaccau

SEQ ID NO: 977845 - RNA, 19 nt, Human
uaagugaaccagacacaca

SEQ ID NO: 977846 - RNA, 18 nt, Human
uacacaaaaagucagggu

SEQ ID NO: 977847 - RNA, 20 nt, Human
uaccaaaggaccaaaggaag

SEQ ID NO: 977848 - RNA, 18 nt, Human
uaccacacaaagcaagaa

SEQ ID NO: 977849 - RNA, 18 nt, Human
uaccacacaaagcaagaa

SEQ ID NO: 977850 - RNA, 22 nt, Human
uaccacacaaagcaagaacccc

SEQ ID NO: 977851 - RNA, 21 nt, Human
uaccauauuggccaggcuggu

SEQ ID NO: 977852 - RNA, 24 nt, Human
uaccauauuggccaggcuggucuu

SEQ ID NO: 977853 - RNA, 27 nt, Human
uaccauauuggccaggcuggucuugaa

SEQ ID NO: 977854 - RNA, 22 nt, Human
uacccugguacucaguuaacaa

SEQ ID NO: 977855 - RNA, 23 nt, Human
uaccuaugguuacaaucaacuua

SEQ ID NO: 977856 - RNA, 19 nt, Human
uagagaugggguuuaccau

SEQ ID NO: 977857 - RNA, 24 nt, Human
uaguaaagacgggguuucacuaug

SEQ ID NO: 977858 - RNA, 22 nt, Human
uaguagagaugggguuuaccau

SEQ ID NO: 977859 - RNA, 22 nt, Human
uaguagagaugggguuuaccau

SEQ ID NO: 977860 - RNA, 23 nt, Human
uaguagagaugggguuuaccaua

SEQ ID NO: 977861 - RNA, 18 nt, Human
uaugacagugagcagcag

SEQ ID NO: 977862 - RNA, 21 nt, Human
uaugacccucccuuccuccaa

SEQ ID NO: 977863 - RNA, 18 nt, Human
uauguacacaaaaaguca

SEQ ID NO: 977864 - RNA, 24 nt, Human
uauguuggccaggcuggucucgaa

SEQ ID NO: 977865 - RNA, 19 nt, Human
uauuuuguaguuuaguaga

SEQ ID NO: 977866 - RNA, 21 nt, Human
uauuuuguaguuuaguagaga

SEQ ID NO: 977867 - RNA, 21 nt, Human
uauuuuguaguuuaguagaga

SEQ ID NO: 977868 - RNA, 23 nt, Human
ucaagaacauccauacauccggc

SEQ ID NO: 977869 - RNA, 21 nt, Human
ucaagcagguugaaagcaaac

SEQ ID NO: 977870 - RNA, 19 nt, Human
ucaagugauucuucugccu

SEQ ID NO: 977871 - RNA, 22 nt, Human
ucaccaaagugcaacuugccac

SEQ ID NO: 977872 - RNA, 18 nt, Human
ucacccaggcuggagugc

SEQ ID NO: 977873 - RNA, 24 nt, Human
ucacccaggcuggaguguaguggc

SEQ ID NO: 977874 - RNA, 25 nt, Human
ucacccccuuccugcucaggaaagc

SEQ ID NO: 977875 - RNA, 22 nt, Human
ucacuauguuggccaggcuggu

SEQ ID NO: 977876 - RNA, 24 nt, Human
ucacucugucacccaggcuggagu

SEQ ID NO: 977877 - RNA, 23 nt, Human
ucacuguaaccuccaccucccgg

SEQ ID NO: 977878 - RNA, 24 nt, Human
ucacuguaaccuccaccucccggg

SEQ ID NO: 977879 - RNA, 25 nt, Human
ucacuguaaccuccaccucccgggu

SEQ ID NO: 977880 - RNA, 21 nt, Human
ucagaagagaagaaacccaaa

SEQ ID NO: 977881 - RNA, 24 nt, Human
ucagagccccaagguccccacccc

SEQ ID NO: 977882 - RNA, 20 nt, Human
ucagccucaggaggcuaaaa

SEQ ID NO: 977883 - RNA, 20 nt, Human
ucagccucccaaguagcugg

SEQ ID NO: 977884 - RNA, 23 nt, Human
ucagccucccgaguagcugggac

SEQ ID NO: 977885 - RNA, 23 nt, Human
ucaguuaacaauuccucccaggc

SEQ ID NO: 977886 - RNA, 19 nt, Human
uccaagcucuuccgacucc

SEQ ID NO: 977887 - RNA, 24 nt, Human
ucccaaagugcuaagauuacaggc

SEQ ID NO: 977888 - RNA, 24 nt, Human
ucccaaguagcugggacuacaggc

SEQ ID NO: 977889 - RNA, 23 nt, Human
uccccccaaaccacacccugccc

SEQ ID NO: 977890 - RNA, 22 nt, Human
uccccuacccucuccccagcuc

SEQ ID NO: 977891 - RNA, 25 nt, Human
uccccuacccucuccccagcucuuc

SEQ ID NO: 977892 - RNA, 24 nt, Human
ucccgaguagcugggacuacaggc

SEQ ID NO: 977893 - RNA, 18 nt, Human
ucccggaggcaccucugu

SEQ ID NO: 977894 - RNA, 20 nt, Human
ucccggguucaagugauucu

SEQ ID NO: 977895 - RNA, 24 nt, Human
ucccggguucaagugauucuucug

SEQ ID NO: 977896 - RNA, 22 nt, Human
ucccugcgcuccacagcgccag

SEQ ID NO: 977897 - RNA, 22 nt, Human
uccuaaauccauccuguggcuc

SEQ ID NO: 977898 - RNA, 23 nt, Human
uccucuuguugauagggagggaa

SEQ ID NO: 977899 - RNA, 22 nt, Human
uccugaauccucaugguggccc

SEQ ID NO: 977900 - RNA, 19 nt, Human
uccuggaucccaggugccc

SEQ ID NO: 977901 - RNA, 22 nt, Human
uccuggguucgagauucuccug

SEQ ID NO: 977902 - RNA, 18 nt, Human
ucgccaaggcuggagugc

SEQ ID NO: 977903 - RNA, 20 nt, Human
ucgggccugcuggucuuggc

SEQ ID NO: 977904 - RNA, 21 nt, Human
ucuagcugggccucacucgag

SEQ ID NO: 977905 - RNA, 23 nt, Human
ucucacucugucacccaggcugg

SEQ ID NO: 977906 - RNA, 24 nt, Human
ucucacucugucacccaggcugga

SEQ ID NO: 977907 - RNA, 26 nt, Human
ucucacucugucacccaggcuggagu

SEQ ID NO: 977908 - RNA, 27 nt, Human
ucucacucugucacccaggcuggagug

SEQ ID NO: 977909 - RNA, 24 nt, Human
ucuccagucccuucaguacacuuc

SEQ ID NO: 977910 - RNA, 26 nt, Human
ucuccugccucagccucccaaguagc

SEQ ID NO: 977911 - RNA, 19 nt, Human
ucucgaacuccugaccucg

SEQ ID NO: 977912 - RNA, 23 nt, Human
ucucuggggaccagcucaggcuc

SEQ ID NO: 977913 - RNA, 19 nt, Human
ucugagugcugggucccuc

SEQ ID NO: 977914 - RNA, 24 nt, Human
ucugagugcugggucccucagugg

SEQ ID NO: 977915 - RNA, 24 nt, Human
ucugccaaugggaggugcugccuc

SEQ ID NO: 977916 - RNA, 24 nt, Human
ucugucacccaggcuggagugcaa

SEQ ID NO: 977917 - RNA, 24 nt, Human
ucugucacccaggcuggaguguag

SEQ ID NO: 977918 - RNA, 23 nt, Human
ucugugacucaguaagaaccgaa

SEQ ID NO: 977919 - RNA, 19 nt, Human
ucuguucucaguggcuccc

SEQ ID NO: 977920 - RNA, 20 nt, Human
ucuguuuuguuuuuuuuuug

SEQ ID NO: 977921 - RNA, 21 nt, Human
ucuuaaaaguaggcaagcgug

SEQ ID NO: 977922 - RNA, 19 nt, Human
ucuugaacuccugaccucg

SEQ ID NO: 977923 - RNA, 23 nt, Human
ucuugcucugucacccaggcugg

SEQ ID NO: 977924 - RNA, 24 nt, Human
ucuugcucugucacccaggcugga

SEQ ID NO: 977925 - RNA, 24 nt, Human
ucuuggacaagucauuaucuagcu

SEQ ID NO: 977926 - RNA, 19 nt, Human
ugaaaaaaagccccaaagu

SEQ ID NO: 977927 - RNA, 25 nt, Human
ugaaaaagaaaaauuuccccccaaa

SEQ ID NO: 977928 - RNA, 27 nt, Human
ugaaaaagaaaaauuuccccccaaacc

SEQ ID NO: 977929 - RNA, 24 nt, Human
ugaaauagaaauauuuaauugccc

SEQ ID NO: 977930 - RNA, 23 nt, Human
ugaaaucagcccuuccugggggu

SEQ ID NO: 977931 - RNA, 19 nt, Human
ugaaauguucaagaacauc

SEQ ID NO: 977932 - RNA, 19 nt, Human
ugaaccagaaggcuaguga

SEQ ID NO: 977933 - RNA, 18 nt, Human
ugaagaaagggagccaca

SEQ ID NO: 977934 - RNA, 20 nt, Human
ugaauccucaugguggcccc

SEQ ID NO: 977935 - RNA, 22 nt, Human
ugaaugccugugucucugggga

SEQ ID NO: 977936 - RNA, 18 nt, Human
ugacagugagcagcagaa

SEQ ID NO: 977937 - RNA, 24 nt, Human
ugacuguaaccuccgccuccuggg

SEQ ID NO: 977938 - RNA, 25 nt, Human
ugacuucaggcuccagccauuuccu

SEQ ID NO: 977939 - RNA, 22 nt, Human
ugagaacagcagcagcgugaag

SEQ ID NO: 977940 - RNA, 24 nt, Human
ugagaacagcagcagcgugaaggc

SEQ ID NO: 977941 - RNA, 22 nt, Human
ugagacggaaucuugcucuguc

SEQ ID NO: 977942 - RNA, 22 nt, Human
ugagacggagucucacucuguc

SEQ ID NO: 977943 - RNA, 23 nt, Human
ugaggaaccagcguggccacagc

SEQ ID NO: 977944 - RNA, 20 nt, Human
ugagggggaaaugaaguugg

SEQ ID NO: 977945 - RNA, 23 nt, Human
ugaguccuuuagcaccuugagag

SEQ ID NO: 977946 - RNA, 19 nt, Human
ugauagggagggaaauugu

SEQ ID NO: 977947 - RNA, 24 nt, Human
ugauccacccaccuuggccuccca

SEQ ID NO: 977948 - RNA, 21 nt, Human
ugcagaugcaauauuucacau

SEQ ID NO: 977949 - RNA, 22 nt, Human
ugcagccacccuccaccucccc

SEQ ID NO: 977950 - RNA, 23 nt, Human
ugcagucuucuuagaugucagaa

SEQ ID NO: 977951 - RNA, 23 nt, Human
ugcaugcaacaaguaccuaccca

SEQ ID NO: 977952 - RNA, 24 nt, Human
ugccaaugggaggugcugccucuc

SEQ ID NO: 977953 - RNA, 18 nt, Human
ugccaggaaauagggucu

SEQ ID NO: 977954 - RNA, 20 nt, Human
ugccaggaaauagggucucu

SEQ ID NO: 977955 - RNA, 23 nt, Human
ugccaggaaauagggucucuguc

SEQ ID NO: 977956 - RNA, 23 nt, Human
ugcccuagugaaucguacagugu

SEQ ID NO: 977957 - RNA, 19 nt, Human
ugcccugggggucacgucc

SEQ ID NO: 977958 - RNA, 24 nt, Human
ugccucagccucccaaagugcuaa

SEQ ID NO: 977959 - RNA, 24 nt, Human
ugccucagccucccaaguagcugg

SEQ ID NO: 977960 - RNA, 24 nt, Human
ugccucagccucccgaguagcugg

SEQ ID NO: 977961 - RNA, 24 nt, Human
ugccucaugcacuuccaguuucac

SEQ ID NO: 977962 - RNA, 23 nt, Human
ugcuaagauuacaggcgugagca

SEQ ID NO: 977963 - RNA, 24 nt, Human
ugcucugucacccaggcuggagug

SEQ ID NO: 977964 - RNA, 23 nt, Human
ugcugcccacgcccgccagacac

SEQ ID NO: 977965 - RNA, 21 nt, Human
ugcugggucccucaguggcuc

SEQ ID NO: 977966 - RNA, 19 nt, Human
uggaaaugggcuacaguga

SEQ ID NO: 977967 - RNA, 26 nt, Human
uggaagggagaagugcacugagcagu

SEQ ID NO: 977968 - RNA, 18 nt, Human
uggacucuuagagagcac

SEQ ID NO: 977969 - RNA, 26 nt, Human
uggagugaccauuaaaaaaaaaaaaa

SEQ ID NO: 977970 - RNA, 18 nt, Human
uggagugcaauggugcgg

SEQ ID NO: 977971 - RNA, 20 nt, Human
uggagugcaauggugcgguc

SEQ ID NO: 977972 - RNA, 23 nt, Human
uggagugcaauggugcggucuca

SEQ ID NO: 977973 - RNA, 24 nt, Human
uggagugcaauggugcggucucag

SEQ ID NO: 977974 - RNA, 18 nt, Human
uggagugcaguggcgcaa

SEQ ID NO: 977975 - RNA, 19 nt, Human
uggagugcaguggcgcaau

SEQ ID NO: 977976 - RNA, 21 nt, Human
uggagugcaguggcgcaauca

SEQ ID NO: 977977 - RNA, 20 nt, Human
uggcaaaguagggaacagaa

SEQ ID NO: 977978 - RNA, 23 nt, Human
uggcaucaguagccucccuuaca

SEQ ID NO: 977979 - RNA, 24 nt, Human
uggccaggcuggucucgaacuccu

SEQ ID NO: 977980 - RNA, 24 nt, Human
uggccaggcuggucuugaacuccu

SEQ ID NO: 977981 - RNA, 24 nt, Human
uggcgcgaucuuggcucacuguaa

SEQ ID NO: 977982 - RNA, 21 nt, Human
uggcucacaccuguaauccca

SEQ ID NO: 977983 - RNA, 21 nt, Human
uggcugcuuugcagaugacgc

SEQ ID NO: 977984 - RNA, 19 nt, Human
ugggaaaaguucugaggcc

SEQ ID NO: 977985 - RNA, 19 nt, Human
ugggacuacaggcacccac

SEQ ID NO: 977986 - RNA, 21 nt, Human
ugggacuacaggcacccacca

SEQ ID NO: 977987 - RNA, 24 nt, Human
ugggacuacaggcacccaccacca

SEQ ID NO: 977988 - RNA, 18 nt, Human
ugggacuacaggcgugcg

SEQ ID NO: 977989 - RNA, 21 nt, Human
ugggacuacaggcgugcgcca

SEQ ID NO: 977990 - RNA, 22 nt, Human
ugggacuacaggcgugcgccac

SEQ ID NO: 977991 - RNA, 24 nt, Human
ugggacuacaggcgugcgccacca

SEQ ID NO: 977992 - RNA, 25 nt, Human
ugggacuacaggcgugcgccaccau

SEQ ID NO: 977993 - RNA, 18 nt, Human
ugggagaaccaaggaugg

SEQ ID NO: 977994 - RNA, 22 nt, Human
ugggagggcuuugcuacccaag

SEQ ID NO: 977995 - RNA, 20 nt, Human
uggggaccagcucaggcucu

SEQ ID NO: 977996 - RNA, 23 nt, Human
uggggaggaaggaccagauacac

SEQ ID NO: 977997 - RNA, 19 nt, Human
ugggggucacguccugaau

SEQ ID NO: 977998 - RNA, 24 nt, Human
ugggguaggggugugugugugugu

SEQ ID NO: 977999 - RNA, 23 nt, Human
ugggguggaaaugggcuacagug

SEQ ID NO: 978000 - RNA, 18 nt, Human
ugggguggagugagaugg

SEQ ID NO: 978001 - RNA, 18 nt, Human
ugggguggagugagaugg

SEQ ID NO: 978002 - RNA, 23 nt, Human
ugggguuuaccauauuggccagg

SEQ ID NO: 978003 - RNA, 23 nt, Human
uggucgccaaggcuggagugcag

SEQ ID NO: 978004 - RNA, 18 nt, Human
uguacucgcagacgccgg

SEQ ID NO: 978005 - RNA, 20 nt, Human
uguacucgcagacgccgguc

SEQ ID NO: 978006 - RNA, 19 nt, Human
uguauacacagcuuaugua

SEQ ID NO: 978007 - RNA, 21 nt, Human
uguauuuuuaguaaagacggg

SEQ ID NO: 978008 - RNA, 20 nt, Human
ugucacccaggcuggagugc

SEQ ID NO: 978009 - RNA, 22 nt, Human
ugucagaagagaaccagguuuc

SEQ ID NO: 978010 - RNA, 26 nt, Human
ugucauugccuuaguuuauuuuuucu

SEQ ID NO: 978011 - RNA, 20 nt, Human
ugucccugccagccccagcc

SEQ ID NO: 978012 - RNA, 25 nt, Human
ugucccugccagccccagcuugcau

SEQ ID NO: 978013 - RNA, 18 nt, Human
uguggugggguggaaaug

SEQ ID NO: 978014 - RNA, 19 nt, Human
uguguauacacagcuuaug

SEQ ID NO: 978015 - RNA, 21 nt, Human
uguguauacacagcuuaugua

SEQ ID NO: 978016 - RNA, 23 nt, Human
uguguguauacacagcuuaugua

SEQ ID NO: 978017 - RNA, 18 nt, Human
uguguguguguauacaca

SEQ ID NO: 978018 - RNA, 18 nt, Human
uguguguguguguguaua

SEQ ID NO: 978019 - RNA, 19 nt, Human
uguguguguguguguauac

SEQ ID NO: 978020 - RNA, 22 nt, Human
uguguguguguguguauacaca

SEQ ID NO: 978021 - RNA, 18 nt, Human
ugugugugugugugugug

SEQ ID NO: 978022 - RNA, 18 nt, Human
ugugugugugugugugug

SEQ ID NO: 978023 - RNA, 18 nt, Human
ugugugugugugugugug

SEQ ID NO: 978024 - RNA, 18 nt, Human
ugugugugugugugugug

SEQ ID NO: 978025 - RNA, 18 nt, Human
ugugugugugugugugug

SEQ ID NO: 978026 - RNA, 18 nt, Human
ugugugugugugugugug

SEQ ID NO: 978027 - RNA, 18 nt, Human
ugugugugugugugugug

SEQ ID NO: 978028 - RNA, 18 nt, Human
ugugugugugugugugug

SEQ ID NO: 978029 - RNA, 18 nt, Human
ugugugugugugugugug

SEQ ID NO: 978030 - RNA, 18 nt, Human
ugugugugugugugugug

SEQ ID NO: 978031 - RNA, 18 nt, Human
ugugugugugugugugug

SEQ ID NO: 978032 - RNA, 22 nt, Human
uguguguguguguguguguaua

SEQ ID NO: 978033 - RNA, 21 nt, Human
ugugugugugugugugugugu

SEQ ID NO: 978034 - RNA, 21 nt, Human
ugugugugugugugugugugu

SEQ ID NO: 978035 - RNA, 21 nt, Human
ugugugugugugugugugugu

SEQ ID NO: 978036 - RNA, 21 nt, Human
ugugugugugugugugugugu

SEQ ID NO: 978037 - RNA, 21 nt, Human
ugugugugugugugugugugu

SEQ ID NO: 978038 - RNA, 21 nt, Human
ugugugugugugugugugugu

SEQ ID NO: 978039 - RNA, 21 nt, Human
ugugugugugugugugugugu

SEQ ID NO: 978040 - RNA, 21 nt, Human
ugugugugugugugugugugu

SEQ ID NO: 978041 - RNA, 21 nt, Human
ugugugugugugugugugugu

SEQ ID NO: 978042 - RNA, 21 nt, Human
ugugugugugugugugugugu

SEQ ID NO: 978043 - RNA, 21 nt, Human
ugugugugugugugugugugu

SEQ ID NO: 978044 - RNA, 21 nt, Human
ugugugugugugugugugugu

SEQ ID NO: 978045 - RNA, 21 nt, Human
ugugugugugugugugugugu

SEQ ID NO: 978046 - RNA, 21 nt, Human
ugugugugugugugugugugu

SEQ ID NO: 978047 - RNA, 21 nt, Human
ugugugugugugugugugugu

SEQ ID NO: 978048 - RNA, 21 nt, Human
ugugugugugugugugugugu

SEQ ID NO: 978049 - RNA, 21 nt, Human
ugugugugugugugugugugu

SEQ ID NO: 978050 - RNA, 21 nt, Human
ugugugugugugugugugugu

SEQ ID NO: 978051 - RNA, 21 nt, Human
ugugugugugugugugugugu

SEQ ID NO: 978052 - RNA, 22 nt, Human
ugugugugugugugugugugua

SEQ ID NO: 978053 - RNA, 22 nt, Human
ugugugugugugugugugugug

SEQ ID NO: 978054 - RNA, 22 nt, Human
ugugugugugugugugugugug

SEQ ID NO: 978055 - RNA, 22 nt, Human
ugugugugugugugugugugug

SEQ ID NO: 978056 - RNA, 22 nt, Human
ugugugugugugugugugugug

SEQ ID NO: 978057 - RNA, 22 nt, Human
ugugugugugugugugugugug

SEQ ID NO: 978058 - RNA, 22 nt, Human
ugugugugugugugugugugug

SEQ ID NO: 978059 - RNA, 22 nt, Human
ugugugugugugugugugugug

SEQ ID NO: 978060 - RNA, 24 nt, Human
uuaaaaaaaaaaaaaaaaucaaaa

SEQ ID NO: 978061 - RNA, 21 nt, Human
uuacauuaaagauacagacac

SEQ ID NO: 978062 - RNA, 21 nt, Human
uuaguaaagacgggguuucac

SEQ ID NO: 978063 - RNA, 24 nt, Human
uuaguaaagacgggguuucacuau

SEQ ID NO: 978064 - RNA, 18 nt, Human
uuaguagagaugggguuu

SEQ ID NO: 978065 - RNA, 23 nt, Human
uuaguagagaugggguuuaccau

SEQ ID NO: 978066 - RNA, 22 nt, Human
uucaaaaggccaauaaaauaaa

SEQ ID NO: 978067 - RNA, 21 nt, Human
uucaaaauaaauauucuauac

SEQ ID NO: 978068 - RNA, 23 nt, Human
uucaagugauucuucugccucag

SEQ ID NO: 978069 - RNA, 24 nt, Human
uucaagugauucuucugccucagc

SEQ ID NO: 978070 - RNA, 21 nt, Human
uucacaaacagaagaacucuu

SEQ ID NO: 978071 - RNA, 23 nt, Human
uucacacaaaccaacggauaggu

SEQ ID NO: 978072 - RNA, 29 nt, Human
uucaggacccugaaaaaaagccccaaagg

SEQ ID NO: 978073 - RNA, 22 nt, Human
uuccucggauggcaucaguagc

SEQ ID NO: 978074 - RNA, 20 nt, Human
uuccuuuucuucuugguuuu

SEQ ID NO: 978075 - RNA, 18 nt, Human
uucuacaccuuccccaag

SEQ ID NO: 978076 - RNA, 18 nt, Human
uugaaagcaaaccaagaa

SEQ ID NO: 978077 - RNA, 24 nt, Human
uugcucugucacccaggcuggagu

SEQ ID NO: 978078 - RNA, 21 nt, Human
uuggacaagucauuaucuagc

SEQ ID NO: 978079 - RNA, 26 nt, Human
uuggcccugucccugccagccccagc

SEQ ID NO: 978080 - RNA, 23 nt, Human
uuguauuuuuaguaaagacgggg

SEQ ID NO: 978081 - RNA, 21 nt, Human
uugugcccaucuuuucucugg

SEQ ID NO: 978082 - RNA, 24 nt, Human
uuuaguagagaugggguuuaccau

SEQ ID NO: 978083 - RNA, 24 nt, Human
uuucacuauguuggccaggcuggu

SEQ ID NO: 978084 - RNA, 22 nt, Human
uuucagaaccacugaagcuccu

SEQ ID NO: 978085 - RNA, 20 nt, Human
uuuguaacaugaaaccaagc

SEQ ID NO: 978086 - RNA, 22 nt, Human
uuuguaacaugaaaccaagcug

SEQ ID NO: 978087 - RNA, 18 nt, Human
uuugugcauugccaccug

SEQ ID NO: 978088 - RNA, 19 nt, Human
uuuuguaguuuaguagaga

SEQ ID NO: 978089 - RNA, 21 nt, Human
uuuuguauuuuuaguaaagac

SEQ ID NO: 978090 - RNA, 24 nt, Human
uuuuuaguaaagacgggguuucac

SEQ ID NO: 978091 - RNA, 19 nt, Human
aacaaaaccaaacagcuau

SEQ ID NO: 978092 - RNA, 19 nt, Human
aagcugccucaagauuagg

SEQ ID NO: 978093 - RNA, 19 nt, Human
aauucucaacucagaagcu

SEQ ID NO: 978094 - RNA, 25 nt, Human
auuuuuguuguuuauagucuuuaau

SEQ ID NO: 978095 - RNA, 23 nt, Human
caaaccgaccuaaggucaccccg

SEQ ID NO: 978096 - RNA, 20 nt, Human
caacucagaagcugccucaa

SEQ ID NO: 978097 - RNA, 23 nt, Human
cacagcucagccccuccccuccc

SEQ ID NO: 978098 - RNA, 24 nt, Human
cacagcucagccccuccccucccu

SEQ ID NO: 978099 - RNA, 18 nt, Human
ccccgcucuccucacagc

SEQ ID NO: 978100 - RNA, 21 nt, Human
ccggcucgcuuuggccccucc

SEQ ID NO: 978101 - RNA, 20 nt, Human
cgggcggcggcggggcccgg

SEQ ID NO: 978102 - RNA, 20 nt, Human
cucagccccuccccucccuc

SEQ ID NO: 978103 - RNA, 26 nt, Human
cucccacaaugcaccgggcgcggccg

SEQ ID NO: 978104 - RNA, 19 nt, Human
cuucaguuaauguaacagg

SEQ ID NO: 978105 - RNA, 18 nt, Human
gccugcgggagccggccg

SEQ ID NO: 978106 - RNA, 20 nt, Human
gcgccuggggccgggggcuc

SEQ ID NO: 978107 - RNA, 19 nt, Human
gcggggcccgggcgccugg

SEQ ID NO: 978108 - RNA, 21 nt, Human
ggcccgggcgccuggggccgg

SEQ ID NO: 978109 - RNA, 18 nt, Human
ggccgcgggccucccaca

SEQ ID NO: 978110 - RNA, 21 nt, Human
ggccgggggcucgccugccuc

SEQ ID NO: 978111 - RNA, 23 nt, Human
gggaaauagaucuauuuaaaaac

SEQ ID NO: 978112 - RNA, 18 nt, Human
guaacaggaaaaaaaggc

SEQ ID NO: 978113 - RNA, 18 nt, Human
uaaaaugccgcgccgcgc

SEQ ID NO: 978114 - RNA, 24 nt, Human
uaaaaugccgcgccgcgcgcgggc

SEQ ID NO: 978115 - RNA, 22 nt, Human
uaacaggaaaaaaaggcaaugg

SEQ ID NO: 978116 - RNA, 23 nt, Human
uaacaggaaaaaaaggcaaugga

SEQ ID NO: 978117 - RNA, 23 nt, Human
uacaaaccgaccuaaggucaccc

SEQ ID NO: 978118 - RNA, 19 nt, Human
uggccccuccgccuuccuc

SEQ ID NO: 978119 - RNA, 19 nt, Human
uguaacaggaaaaaaaggc

SEQ ID NO: 978120 - RNA, 24 nt, Human
uguagacacaaugagauuuuuguu

SEQ ID NO: 978121 - RNA, 18 nt, Human
uucuugggccccgcucuc

SEQ ID NO: 978122 - RNA, 22 nt, Human
uuuggccccuccgccuuccucc

SEQ ID NO: 978123 - RNA, 20 nt, Human
aaaauaaaaagacuagcagg

SEQ ID NO: 978124 - RNA, 23 nt, Human
aaaauggugauuuucagauuugu

SEQ ID NO: 978125 - RNA, 19 nt, Human
aaagugcuaggauuacagg

SEQ ID NO: 978126 - RNA, 24 nt, Human
aaagugcuaggauuacagguguga

SEQ ID NO: 978127 - RNA, 22 nt, Human
aacauuuuuuucuuagaugggg

SEQ ID NO: 978128 - RNA, 21 nt, Human
aaccagaauuugcgcacaucc

SEQ ID NO: 978129 - RNA, 22 nt, Human
aacccuacaaauccuugcaaaa

SEQ ID NO: 978130 - RNA, 19 nt, Human
aaccgccacugcugcuugg

SEQ ID NO: 978131 - RNA, 22 nt, Human
aagaaaauggaauaagaccaaa

SEQ ID NO: 978132 - RNA, 26 nt, Human
aagcaaaaaguugaaaaaggggaccc

SEQ ID NO: 978133 - RNA, 22 nt, Human
aagcaaagugagucaccuucgu

SEQ ID NO: 978134 - RNA, 24 nt, Human
aagcaaucugccugcuucagccuc

SEQ ID NO: 978135 - RNA, 20 nt, Human
aaguagcugggauugcaggc

SEQ ID NO: 978136 - RNA, 19 nt, Human
aaguaggugggauuauagg

SEQ ID NO: 978137 - RNA, 23 nt, Human
aagugcuuuaaaaaggggguggg

SEQ ID NO: 978138 - RNA, 19 nt, Human
aaguguugggauuacaggu

SEQ ID NO: 978139 - RNA, 19 nt, Human
aaucauggcucacugcagc

SEQ ID NO: 978140 - RNA, 19 nt, Human
aaucuucaugaauguggac

SEQ ID NO: 978141 - RNA, 20 nt, Human
aauuccugugccucagccuc

SEQ ID NO: 978142 - RNA, 22 nt, Human
acaaacauaucacagcugauga

SEQ ID NO: 978143 - RNA, 22 nt, Human
acagaagugugguuccuggaac

SEQ ID NO: 978144 - RNA, 24 nt, Human
accacaaccuccuucuuacuuuaa

SEQ ID NO: 978145 - RNA, 27 nt, Human
accacaaccuccuucuuacuuuaaccu

SEQ ID NO: 978146 - RNA, 22 nt, Human
accaggcgcaaggcaggcucug

SEQ ID NO: 978147 - RNA, 24 nt, Human
accauguuggccaggcuggucuug

SEQ ID NO: 978148 - RNA, 22 nt, Human
acccaggcuggagugcaggggu

SEQ ID NO: 978149 - RNA, 20 nt, Human
accccacccaccuccccgaa

SEQ ID NO: 978150 - RNA, 19 nt, Human
acccuagccccagaugcca

SEQ ID NO: 978151 - RNA, 18 nt, Human
acgggguuucaccauguu

SEQ ID NO: 978152 - RNA, 23 nt, Human
acgggguuucaccauguuggcca

SEQ ID NO: 978153 - RNA, 24 nt, Human
acgggguuucaccauguuggccag

SEQ ID NO: 978154 - RNA, 18 nt, Human
acucugucacccaggcug

SEQ ID NO: 978155 - RNA, 20 nt, Human
acugcagugcaaaagcuaug

SEQ ID NO: 978156 - RNA, 27 nt, Human
agaaaaaaauaaaaaauauguagacag

SEQ ID NO: 978157 - RNA, 19 nt, Human
agaaaguacagagguccug

SEQ ID NO: 978158 - RNA, 26 nt, Human
agaagaaaauggaauaagagggaccc

SEQ ID NO: 978159 - RNA, 22 nt, Human
agaauccuguuuuaaaauccuu

SEQ ID NO: 978160 - RNA, 24 nt, Human
agacaggcagacccuagccccaga

SEQ ID NO: 978161 - RNA, 19 nt, Human
agaccaaacccuugggaga

SEQ ID NO: 978162 - RNA, 22 nt, Human
agacccuagccccagaugccag

SEQ ID NO: 978163 - RNA, 22 nt, Human
agaguuccucugagggagcacu

SEQ ID NO: 978164 - RNA, 19 nt, Human
agccaccgcacucggccug

SEQ ID NO: 978165 - RNA, 18 nt, Human
agccagggucucacucug

SEQ ID NO: 978166 - RNA, 21 nt, Human
aggcgguggcagcggcggcgg

SEQ ID NO: 978167 - RNA, 25 nt, Human
aggcuggagugcaguggugugaucu

SEQ ID NO: 978168 - RNA, 19 nt, Human
agggggugggacguguuac

SEQ ID NO: 978169 - RNA, 21 nt, Human
aggugcccgccaccacgccca

SEQ ID NO: 978170 - RNA, 19 nt, Human
aguacuuuggggguuaugg

SEQ ID NO: 978171 - RNA, 20 nt, Human
agugcaguggcacaaucucg

SEQ ID NO: 978172 - RNA, 23 nt, Human
agugcaguggugugaucuuggcu

SEQ ID NO: 978173 - RNA, 24 nt, Human
agugcaguggugugaucuuggcuc

SEQ ID NO: 978174 - RNA, 24 nt, Human
auccaggcugcggagccagggcca

SEQ ID NO: 978175 - RNA, 24 nt, Human
aucgacucagaugaucaguuuugg

SEQ ID NO: 978176 - RNA, 18 nt, Human
augagguuucgccauguu

SEQ ID NO: 978177 - RNA, 24 nt, Human
augagguuucgccauguuggccag

SEQ ID NO: 978178 - RNA, 24 nt, Human
auggcucacugcagccuugaccuc

SEQ ID NO: 978179 - RNA, 20 nt, Human
auggcuggauucuucaaaca

SEQ ID NO: 978180 - RNA, 18 nt, Human
auugcauccucugccucu

SEQ ID NO: 978181 - RNA, 24 nt, Human
auuuuaguagagaugagguuucgc

SEQ ID NO: 978182 - RNA, 25 nt, Human
caaaaagacaaacugauccugggua

SEQ ID NO: 978183 - RNA, 24 nt, Human
caaacaacaacugcccauaacccu

SEQ ID NO: 978184 - RNA, 23 nt, Human
caaaggaaggauuagaagcaguu

SEQ ID NO: 978185 - RNA, 19 nt, Human
caaaggagcuagcuuaagc

SEQ ID NO: 978186 - RNA, 22 nt, Human
caagcgauucuccugccucagc

SEQ ID NO: 978187 - RNA, 22 nt, Human
caagugagccaccugccucagc

SEQ ID NO: 978188 - RNA, 24 nt, Human
cacagcugaugacaacacacccag

SEQ ID NO: 978189 - RNA, 18 nt, Human
cacaggagauuugucucu

SEQ ID NO: 978190 - RNA, 24 nt, Human
caccaugcccggcuaauuuuugua

SEQ ID NO: 978191 - RNA, 21 nt, Human
caccauguuggccaggcuggu

SEQ ID NO: 978192 - RNA, 22 nt, Human
caccauguuggccaggcugguc

SEQ ID NO: 978193 - RNA, 24 nt, Human
caccauguuggccaggcuggucuu

SEQ ID NO: 978194 - RNA, 21 nt, Human
caccccacccaccuccccgaa

SEQ ID NO: 978195 - RNA, 24 nt, Human
caccccacccaccuccccgaaacc

SEQ ID NO: 978196 - RNA, 25 nt, Human
cacuagaaaauucagcuaggcugaa

SEQ ID NO: 978197 - RNA, 23 nt, Human
cacucugucacccaggcuggagu

SEQ ID NO: 978198 - RNA, 24 nt, Human
cacucugucacccaggcuggagug

SEQ ID NO: 978199 - RNA, 21 nt, Human
cacugcaaccuccgccuccug

SEQ ID NO: 978200 - RNA, 23 nt, Human
cacugcaaccuccgccuccuggg

SEQ ID NO: 978201 - RNA, 22 nt, Human
cacugcagccuugaccucccag

SEQ ID NO: 978202 - RNA, 18 nt, Human
cacugccacugccccugc

SEQ ID NO: 978203 - RNA, 23 nt, Human
cacugccacugccccugccccuc

SEQ ID NO: 978204 - RNA, 20 nt, Human
cagccuugaccucccaggcu

SEQ ID NO: 978205 - RNA, 24 nt, Human
cagccuugaccucccaggcucaag

SEQ ID NO: 978206 - RNA, 20 nt, Human
caggugagccacugcgccca

SEQ ID NO: 978207 - RNA, 20 nt, Human
caguacuuuggggguuaugg

SEQ ID NO: 978208 - RNA, 24 nt, Human
caucaagaauaaaagagaacuagc

SEQ ID NO: 978209 - RNA, 21 nt, Human
caugacacaaacauagagccc

SEQ ID NO: 978210 - RNA, 20 nt, Human
cauggcucacugcagccuug

SEQ ID NO: 978211 - RNA, 24 nt, Human
cauguuggccagacuguucucgaa

SEQ ID NO: 978212 - RNA, 24 nt, Human
cauguuggccaggcuggucuugaa

SEQ ID NO: 978213 - RNA, 18 nt, Human
cauuuuuuucuuagaugg

SEQ ID NO: 978214 - RNA, 21 nt, Human
ccaaagugcuaggauuacagg

SEQ ID NO: 978215 - RNA, 24 nt, Human
ccaaagugcuaggauuacaggugu

SEQ ID NO: 978216 - RNA, 21 nt, Human
ccaaaguguugggauuacagg

SEQ ID NO: 978217 - RNA, 21 nt, Human
ccaaaguguugggauuacagg

SEQ ID NO: 978218 - RNA, 22 nt, Human
ccaaaguguugggauuacaggu

SEQ ID NO: 978219 - RNA, 21 nt, Human
ccaaguaggugggauuauagg

SEQ ID NO: 978220 - RNA, 21 nt, Human
ccaaguaggugggauuauagg

SEQ ID NO: 978221 - RNA, 18 nt, Human
ccaugggcacacauuuca

SEQ ID NO: 978222 - RNA, 22 nt, Human
cccaccaggagugcacaucacu

SEQ ID NO: 978223 - RNA, 19 nt, Human
cccagaccuagccagagac

SEQ ID NO: 978224 - RNA, 22 nt, Human
cccagccaugggcacacauuuc

SEQ ID NO: 978225 - RNA, 22 nt, Human
cccaggcucaagugauucuccc

SEQ ID NO: 978226 - RNA, 24 nt, Human
ccccauucacaaccccuuugggcu

SEQ ID NO: 978227 - RNA, 21 nt, Human
cccgccaccacgcccagcuaa

SEQ ID NO: 978228 - RNA, 22 nt, Human
cccuagccccagaugccagauu

SEQ ID NO: 978229 - RNA, 24 nt, Human
cccucugucgccaaggcuggagug

SEQ ID NO: 978230 - RNA, 20 nt, Human
ccgcagaggaccggucucgg

SEQ ID NO: 978231 - RNA, 24 nt, Human
ccucccaggcucaagugauucucc

SEQ ID NO: 978232 - RNA, 19 nt, Human
ccuccgccuccuggguuca

SEQ ID NO: 978233 - RNA, 24 nt, Human
ccuccuggguucaagcgauucucc

SEQ ID NO: 978234 - RNA, 21 nt, Human
ccucugccucuuggguucaag

SEQ ID NO: 978235 - RNA, 22 nt, Human
ccucuuggguucaagcaauucc

SEQ ID NO: 978236 - RNA, 22 nt, Human
ccugaaauguaaggcuaagugu

SEQ ID NO: 978237 - RNA, 23 nt, Human
ccugaccucaagugagccaccug

SEQ ID NO: 978238 - RNA, 24 nt, Human
ccugacguagcugggauuacaggc

SEQ ID NO: 978239 - RNA, 21 nt, Human
ccuggccucaagcaaucugcc

SEQ ID NO: 978240 - RNA, 23 nt, Human
ccuggccucaagcaaucugccug

SEQ ID NO: 978241 - RNA, 23 nt, Human
ccuggguucaagcgauucuccug

SEQ ID NO: 978242 - RNA, 20 nt, Human
cgcaccccacccaccucccc

SEQ ID NO: 978243 - RNA, 21 nt, Human
cgcaccccacccaccuccccg

SEQ ID NO: 978244 - RNA, 24 nt, Human
cgccaaggcuggagugcaguggug

SEQ ID NO: 978245 - RNA, 22 nt, Human
cgccauguuggccagacuguuc

SEQ ID NO: 978246 - RNA, 24 nt, Human
cgccauguuggccagacuguucuc

SEQ ID NO: 978247 - RNA, 27 nt, Human
cgccauguuggccagacuguucucgaa

SEQ ID NO: 978248 - RNA, 24 nt, Human
cggaucacuaggaaccagaaaucc

SEQ ID NO: 978249 - RNA, 24 nt, Human
cgggguuucaccauguuggccagg

SEQ ID NO: 978250 - RNA, 24 nt, Human
cucaaguagcugggauugcaggcu

SEQ ID NO: 978251 - RNA, 24 nt, Human
cucacucugucacccaggcuggag

SEQ ID NO: 978252 - RNA, 24 nt, Human
cucacugcaaccuccgccuccugg

SEQ ID NO: 978253 - RNA, 21 nt, Human
cucacugcagccuugaccucc

SEQ ID NO: 978254 - RNA, 24 nt, Human
cucagccucucaaguagcugggau

SEQ ID NO: 978255 - RNA, 19 nt, Human
cucaucccccugguuuuca

SEQ ID NO: 978256 - RNA, 24 nt, Human
cucauugcauccucugccucuugg

SEQ ID NO: 978257 - RNA, 23 nt, Human
cuccaagucccgcuccgcacccc

SEQ ID NO: 978258 - RNA, 19 nt, Human
cucccaggcucaagugauu

SEQ ID NO: 978259 - RNA, 25 nt, Human
cucccaggcucaagugauucuccca

SEQ ID NO: 978260 - RNA, 19 nt, Human
cuccccauucacaaccccu

SEQ ID NO: 978261 - RNA, 24 nt, Human
cucccucugucgccaaggcuggag

SEQ ID NO: 978262 - RNA, 23 nt, Human
cuccuggccucaagcaaucugcc

SEQ ID NO: 978263 - RNA, 21 nt, Human
cuccuggguucaagcgauucu

SEQ ID NO: 978264 - RNA, 21 nt, Human
cugacauuugaauuugcagug

SEQ ID NO: 978265 - RNA, 24 nt, Human
cugacguagcugggauuacaggca

SEQ ID NO: 978266 - RNA, 23 nt, Human
cugcaaccuccgccuccuggguu

SEQ ID NO: 978267 - RNA, 21 nt, Human
cugccacugccccugccccuc

SEQ ID NO: 978268 - RNA, 18 nt, Human
cugccccugccccucacc

SEQ ID NO: 978269 - RNA, 23 nt, Human
cugccucagccucccaaagugcu

SEQ ID NO: 978270 - RNA, 18 nt, Human
cugcggagccagggccag

SEQ ID NO: 978271 - RNA, 18 nt, Human
cugcuucagccucccaaa

SEQ ID NO: 978272 - RNA, 24 nt, Human
cugcuucagccucccaaaguguug

SEQ ID NO: 978273 - RNA, 18 nt, Human
cuggccucaagcaaucug

SEQ ID NO: 978274 - RNA, 19 nt, Human
cugggcacugagcauccac

SEQ ID NO: 978275 - RNA, 20 nt, Human
cuucaaagcccagcaccacc

SEQ ID NO: 978276 - RNA, 23 nt, Human
cuucaugcaagccaaaauaaaaa

SEQ ID NO: 978277 - RNA, 19 nt, Human
cuugcaaaacaacaguuac

SEQ ID NO: 978278 - RNA, 18 nt, Human
cuugcuguguugcccagg

SEQ ID NO: 978279 - RNA, 24 nt, Human
gaccucaagugagccaccugccuc

SEQ ID NO: 978280 - RNA, 21 nt, Human
gacguagcugggauuacaggc

SEQ ID NO: 978281 - RNA, 23 nt, Human
gacguagcugggauuacaggcau

SEQ ID NO: 978282 - RNA, 24 nt, Human
gacuacaggcaggcaccaccaugc

SEQ ID NO: 978283 - RNA, 24 nt, Human
gagacgggguuucaccauguuggc

SEQ ID NO: 978284 - RNA, 22 nt, Human
gagaggggaauggccugugugg

SEQ ID NO: 978285 - RNA, 18 nt, Human
gagguuucgccauguugg

SEQ ID NO: 978286 - RNA, 22 nt, Human
gagguuucgccauguuggccag

SEQ ID NO: 978287 - RNA, 20 nt, Human
gagucuugaaucaggcugug

SEQ ID NO: 978288 - RNA, 18 nt, Human
gauuacaggcaugugcca

SEQ ID NO: 978289 - RNA, 24 nt, Human
gauuacaggcaugugccaccaugc

SEQ ID NO: 978290 - RNA, 20 nt, Human
gauuacaggugagccacugc

SEQ ID NO: 978291 - RNA, 18 nt, Human
gauuacaggugugagcca

SEQ ID NO: 978292 - RNA, 22 nt, Human
gauuacaggugugagccaccgc

SEQ ID NO: 978293 - RNA, 23 nt, Human
gauuacaggugugagccaccgca

SEQ ID NO: 978294 - RNA, 22 nt, Human
gcaaccuccgccuccuggguuc

SEQ ID NO: 978295 - RNA, 24 nt, Human
gcaaucugccugcuucagccuccc

SEQ ID NO: 978296 - RNA, 23 nt, Human
gccaaggcuggagugcaguggug

SEQ ID NO: 978297 - RNA, 24 nt, Human
gccaaggcuggagugcaguggugu

SEQ ID NO: 978298 - RNA, 24 nt, Human
gccauguuggccagacuguucucg

SEQ ID NO: 978299 - RNA, 22 nt, Human
gccucagccucccaaagugcua

SEQ ID NO: 978300 - RNA, 26 nt, Human
gcgguggcagcggcggcggcugcucc

SEQ ID NO: 978301 - RNA, 19 nt, Human
gcuagagugcaguggcaca

SEQ ID NO: 978302 - RNA, 21 nt, Human
gcucaagugauucucccacac

SEQ ID NO: 978303 - RNA, 21 nt, Human
gcucacugcagccuugaccuc

SEQ ID NO: 978304 - RNA, 22 nt, Human
gcucacugcagccuugaccucc

SEQ ID NO: 978305 - RNA, 20 nt, Human
gcucugucacccaggcuaga

SEQ ID NO: 978306 - RNA, 19 nt, Human
gcuggagugcaggggugca

SEQ ID NO: 978307 - RNA, 19 nt, Human
ggaaaaccacuacucucac

SEQ ID NO: 978308 - RNA, 24 nt, Human
ggauuacaggcaugugccaccaug

SEQ ID NO: 978309 - RNA, 22 nt, Human
ggauuacaggugugagccaccg

SEQ ID NO: 978310 - RNA, 23 nt, Human
ggccucagccucucaaguagcug

SEQ ID NO: 978311 - RNA, 20 nt, Human
ggccuguaacaugacuuuca

SEQ ID NO: 978312 - RNA, 18 nt, Human
ggcgguggcagcggcggc

SEQ ID NO: 978313 - RNA, 23 nt, Human
ggcgguggcagcggcggcggcug

SEQ ID NO: 978314 - RNA, 22 nt, Human
ggcuggagugcaguggugugau

SEQ ID NO: 978315 - RNA, 24 nt, Human
ggcuggucuugaauuccugaccuc

SEQ ID NO: 978316 - RNA, 18 nt, Human
gggaauggccuguguggu

SEQ ID NO: 978317 - RNA, 23 nt, Human
gggacugaaaaaaaaaaucccug

SEQ ID NO: 978318 - RNA, 20 nt, Human
gggccuucacagagggcggg

SEQ ID NO: 978319 - RNA, 18 nt, Human
gggcggggcccucuccgc

SEQ ID NO: 978320 - RNA, 24 nt, Human
gggcggggcccucuccgcagagga

SEQ ID NO: 978321 - RNA, 23 nt, Human
gggguuucaccauguuggccagg

SEQ ID NO: 978322 - RNA, 22 nt, Human
gggucuugcuguguugcccagg

SEQ ID NO: 978323 - RNA, 19 nt, Human
ggucuugaauuccugaccu

SEQ ID NO: 978324 - RNA, 21 nt, Human
ggugagauuuagcaaaggaag

SEQ ID NO: 978325 - RNA, 23 nt, Human
guagagacgggguuucaccaugu

SEQ ID NO: 978326 - RNA, 18 nt, Human
guagcugggauuacaggc

SEQ ID NO: 978327 - RNA, 19 nt, Human
guagcugggauuacaggca

SEQ ID NO: 978328 - RNA, 20 nt, Human
guagcugggauuacaggcau

SEQ ID NO: 978329 - RNA, 22 nt, Human
guagcugggauuacaggcaugu

SEQ ID NO: 978330 - RNA, 18 nt, Human
guagcugggauugcaggc

SEQ ID NO: 978331 - RNA, 24 nt, Human
gugagccaccugccucagccuccc

SEQ ID NO: 978332 - RNA, 24 nt, Human
gugccucagccuccugacguagcu

SEQ ID NO: 978333 - RNA, 19 nt, Human
guggcagcggcggcggcug

SEQ ID NO: 978334 - RNA, 18 nt, Human
uaaauaggaacaugauaa

SEQ ID NO: 978335 - RNA, 21 nt, Human
uaacucauacucaagacauua

SEQ ID NO: 978336 - RNA, 22 nt, Human
uaagauggcugcugggcacuga

SEQ ID NO: 978337 - RNA, 22 nt, Human
uaaugugcacaaacauaucaca

SEQ ID NO: 978338 - RNA, 24 nt, Human
uaauuuuuguaauuuuaguagaga

SEQ ID NO: 978339 - RNA, 24 nt, Human
uaauuuuuugucuuuuuaguagag

SEQ ID NO: 978340 - RNA, 24 nt, Human
uacaaacagaaccaaggcgucuga

SEQ ID NO: 978341 - RNA, 21 nt, Human
uacacuguuuuuccauucugu

SEQ ID NO: 978342 - RNA, 23 nt, Human
uacaggcaggcaccaccaugccc

SEQ ID NO: 978343 - RNA, 23 nt, Human
uacaggcaugugccaccaugccc

SEQ ID NO: 978344 - RNA, 22 nt, Human
uacaggugagccacugcgccca

SEQ ID NO: 978345 - RNA, 21 nt, Human
uacaggugugagccaccgcac

SEQ ID NO: 978346 - RNA, 21 nt, Human
uacaggugugagccaccgcac

SEQ ID NO: 978347 - RNA, 22 nt, Human
uacaggugugagccaccgcacu

SEQ ID NO: 978348 - RNA, 19 nt, Human
uaccuccccauucacaacc

SEQ ID NO: 978349 - RNA, 24 nt, Human
uacuuuaaccuauacaugcuaaau

SEQ ID NO: 978350 - RNA, 19 nt, Human
uagaagcaguuuuuuacua

SEQ ID NO: 978351 - RNA, 20 nt, Human
uagaagcaguuuuuuacuau

SEQ ID NO: 978352 - RNA, 22 nt, Human
uagagacgggguuucaccaugu

SEQ ID NO: 978353 - RNA, 22 nt, Human
uagagaugagguuucgccaugu

SEQ ID NO: 978354 - RNA, 22 nt, Human
uagagcuugggaagaaccagaa

SEQ ID NO: 978355 - RNA, 23 nt, Human
uagagugcaguggcacaaucucg

SEQ ID NO: 978356 - RNA, 18 nt, Human
uaggauuacaggugugag

SEQ ID NO: 978357 - RNA, 19 nt, Human
uaggauuacaggugugagc

SEQ ID NO: 978358 - RNA, 22 nt, Human
uaggauuacaggugugagccac

SEQ ID NO: 978359 - RNA, 23 nt, Human
uaggauuacaggugugagccacc

SEQ ID NO: 978360 - RNA, 24 nt, Human
uaggauuacaggugugagccaccg

SEQ ID NO: 978361 - RNA, 26 nt, Human
uagggaggagggccagguaaguaucc

SEQ ID NO: 978362 - RNA, 19 nt, Human
uaggugcccgccaccacgc

SEQ ID NO: 978363 - RNA, 24 nt, Human
uaguagagacgggguuucaccaug

SEQ ID NO: 978364 - RNA, 24 nt, Human
uaguagagaugagguuucgccaug

SEQ ID NO: 978365 - RNA, 19 nt, Human
uaucaauuuggaaaaaggg

SEQ ID NO: 978366 - RNA, 23 nt, Human
uaucacagcugaugacaacacac

SEQ ID NO: 978367 - RNA, 21 nt, Human
uaucuucaaagcccagcacca

SEQ ID NO: 978368 - RNA, 22 nt, Human
uaugguaggaaacuagaugugc

SEQ ID NO: 978369 - RNA, 21 nt, Human
ucaaacaacaacugcccauaa

SEQ ID NO: 978370 - RNA, 19 nt, Human
ucaaagcccagcaccacca

SEQ ID NO: 978371 - RNA, 19 nt, Human
ucaagcgauucuccugccu

SEQ ID NO: 978372 - RNA, 23 nt, Human
ucaagugauucucccacacaggu

SEQ ID NO: 978373 - RNA, 18 nt, Human
ucacccaggcuggagugc

SEQ ID NO: 978374 - RNA, 21 nt, Human
ucacgugagauggccacagaa

SEQ ID NO: 978375 - RNA, 24 nt, Human
ucacucugucacccaggcuggagu

SEQ ID NO: 978376 - RNA, 23 nt, Human
ucacugcaaccuccgccuccugg

SEQ ID NO: 978377 - RNA, 24 nt, Human
ucacugcaaccuccgccuccuggg

SEQ ID NO: 978378 - RNA, 25 nt, Human
ucacugcaaccuccgccuccugggu

SEQ ID NO: 978379 - RNA, 27 nt, Human
ucacugcaaccuccgccuccuggguuc

SEQ ID NO: 978380 - RNA, 19 nt, Human
ucacugcagccuugaccuc

SEQ ID NO: 978381 - RNA, 23 nt, Human
ucacugcagccuugaccucccag

SEQ ID NO: 978382 - RNA, 24 nt, Human
ucacugcagccuugaccucccagg

SEQ ID NO: 978383 - RNA, 20 nt, Human
ucaugguuaaccgguaucug

SEQ ID NO: 978384 - RNA, 24 nt, Human
ucauugcauccucugccucuuggg

SEQ ID NO: 978385 - RNA, 23 nt, Human
uccauggaagccacucauccccc

SEQ ID NO: 978386 - RNA, 23 nt, Human
ucccaaagugcuaggauuacagg

SEQ ID NO: 978387 - RNA, 23 nt, Human
ucccaaaguguugggauuacagg

SEQ ID NO: 978388 - RNA, 21 nt, Human
ucccaggcucaagugauucuc

SEQ ID NO: 978389 - RNA, 23 nt, Human
ucccaggcucaagugauucuccc

SEQ ID NO: 978390 - RNA, 21 nt, Human
uccgcaccccacccaccuccc

SEQ ID NO: 978391 - RNA, 21 nt, Human
uccuggguucaagcgauucuc

SEQ ID NO: 978392 - RNA, 24 nt, Human
uccuggguucaagcgauucuccug

SEQ ID NO: 978393 - RNA, 26 nt, Human
uccuugguucuuucauucaucuuuuu

SEQ ID NO: 978394 - RNA, 18 nt, Human
ucgccaaggcuggagugc

SEQ ID NO: 978395 - RNA, 19 nt, Human
ucgccauguuggccagacu

SEQ ID NO: 978396 - RNA, 24 nt, Human
ucucaaguagcugggauugcaggc

SEQ ID NO: 978397 - RNA, 23 nt, Human
ucucacucugucacccaggcugg

SEQ ID NO: 978398 - RNA, 24 nt, Human
ucucacucugucacccaggcugga

SEQ ID NO: 978399 - RNA, 26 nt, Human
ucucacucugucacccaggcuggagu

SEQ ID NO: 978400 - RNA, 27 nt, Human
ucucacucugucacccaggcuggagug

SEQ ID NO: 978401 - RNA, 24 nt, Human
ucucccucugucgccaaggcugga

SEQ ID NO: 978402 - RNA, 21 nt, Human
ucucgaacuccuggccucaag

SEQ ID NO: 978403 - RNA, 24 nt, Human
ucugccucuuggguucaagcaauu

SEQ ID NO: 978404 - RNA, 26 nt, Human
ucuguaggcgguggcagcggcggcgg

SEQ ID NO: 978405 - RNA, 20 nt, Human
ucuguagguucugggacuga

SEQ ID NO: 978406 - RNA, 24 nt, Human
ucugucacccaggcuagagugcag

SEQ ID NO: 978407 - RNA, 24 nt, Human
ucugucacccaggcuggagugcag

SEQ ID NO: 978408 - RNA, 24 nt, Human
ucugucgccaaggcuggagugcag

SEQ ID NO: 978409 - RNA, 18 nt, Human
ucuugcuguguugcccag

SEQ ID NO: 978410 - RNA, 19 nt, Human
ucuugcuguguugcccagg

SEQ ID NO: 978411 - RNA, 22 nt, Human
ucuuggguucaagcaauuccug

SEQ ID NO: 978412 - RNA, 23 nt, Human
ugaaaaagcaaagugagucaccu

SEQ ID NO: 978413 - RNA, 21 nt, Human
ugaaaacagucaaaauagaaa

SEQ ID NO: 978414 - RNA, 27 nt, Human
ugaagguacagaaagaaagaaaggcca

SEQ ID NO: 978415 - RNA, 19 nt, Human
ugacacaaacauagagccc

SEQ ID NO: 978416 - RNA, 24 nt, Human
ugaccucaagugagccaccugccu

SEQ ID NO: 978417 - RNA, 24 nt, Human
ugacguagcugggauuacaggcau

SEQ ID NO: 978418 - RNA, 24 nt, Human
ugacuaaacauaacucauacucaa

SEQ ID NO: 978419 - RNA, 19 nt, Human
ugagauggccacagaagug

SEQ ID NO: 978420 - RNA, 22 nt, Human
ugagauggccacagaagugugg

SEQ ID NO: 978421 - RNA, 22 nt, Human
ugaggcaaugucuuucacguga

SEQ ID NO: 978422 - RNA, 23 nt, Human
ugagguuucgccauguuggccag

SEQ ID NO: 978423 - RNA, 18 nt, Human
ugaugauaccuaggauau

SEQ ID NO: 978424 - RNA, 21 nt, Human
ugcaggcugcauccgcaccca

SEQ ID NO: 978425 - RNA, 20 nt, Human
ugcagugacuucaugcaagc

SEQ ID NO: 978426 - RNA, 20 nt, Human
ugcauccucugccucuuggg

SEQ ID NO: 978427 - RNA, 23 nt, Human
ugcccauaacccuacaaauccuu

SEQ ID NO: 978428 - RNA, 24 nt, Human
ugcccggcuaauuuuuguaauuuu

SEQ ID NO: 978429 - RNA, 20 nt, Human
ugccucagccuaccaaguag

SEQ ID NO: 978430 - RNA, 24 nt, Human
ugccucagccucccaaagugcuag

SEQ ID NO: 978431 - RNA, 25 nt, Human
ugccucagccuccugacguagcugg

SEQ ID NO: 978432 - RNA, 24 nt, Human
ugcuaggauuacaggugugagcca

SEQ ID NO: 978433 - RNA, 24 nt, Human
ugcucugucacccaggcuagagug

SEQ ID NO: 978434 - RNA, 21 nt, Human
ugcuguguugcccaggcuacg

SEQ ID NO: 978435 - RNA, 24 nt, Human
ugcuguguugcccaggcuacgcuc

SEQ ID NO: 978436 - RNA, 24 nt, Human
ugcuucagccucccaaaguguugg

SEQ ID NO: 978437 - RNA, 25 nt, Human
uggaagccacucaucccccuggucg

SEQ ID NO: 978438 - RNA, 24 nt, Human
uggaauuuuaaaaaucaagaacuu

SEQ ID NO: 978439 - RNA, 21 nt, Human
uggagugcaggggugcaauca

SEQ ID NO: 978440 - RNA, 24 nt, Human
uggagugcaggggugcaaucaugg

SEQ ID NO: 978441 - RNA, 19 nt, Human
uggagugcaguggugugau

SEQ ID NO: 978442 - RNA, 23 nt, Human
uggagugcaguggugugaucuug

SEQ ID NO: 978443 - RNA, 24 nt, Human
uggagugcaguggugugaucuugg

SEQ ID NO: 978444 - RNA, 24 nt, Human
uggcacaaucucgucucacugcaa

SEQ ID NO: 978445 - RNA, 18 nt, Human
uggcagcggcggcggcug

SEQ ID NO: 978446 - RNA, 24 nt, Human
uggccagacuguucucgaacuccu

SEQ ID NO: 978447 - RNA, 24 nt, Human
uggccaggcuggucuugaauuccu

SEQ ID NO: 978448 - RNA, 25 nt, Human
uggccucaagcaaucugccugcuuc

SEQ ID NO: 978449 - RNA, 24 nt, Human
ugggacuacaggcaggcaccacca

SEQ ID NO: 978450 - RNA, 18 nt, Human
ugggauuacaggcaugug

SEQ ID NO: 978451 - RNA, 22 nt, Human
ugggauuacaggcaugugccac

SEQ ID NO: 978452 - RNA, 24 nt, Human
ugggauuacaggcaugugccacca

SEQ ID NO: 978453 - RNA, 20 nt, Human
ugggauuacaggugagccac

SEQ ID NO: 978454 - RNA, 21 nt, Human
ugggauuacaggugagccacu

SEQ ID NO: 978455 - RNA, 22 nt, Human
ugggauuacaggugagccacug

SEQ ID NO: 978456 - RNA, 21 nt, Human
ugggauuauaggugcccgcca

SEQ ID NO: 978457 - RNA, 22 nt, Human
ugggauuauaggugcccgccac

SEQ ID NO: 978458 - RNA, 24 nt, Human
ugggauuauaggugcccgccacca

SEQ ID NO: 978459 - RNA, 24 nt, Human
uggggguuauggagacuagaagcu

SEQ ID NO: 978460 - RNA, 24 nt, Human
uggggucuugcuguguugcccagg

SEQ ID NO: 978461 - RNA, 23 nt, Human
uggguucaagcgauucuccugcc

SEQ ID NO: 978462 - RNA, 24 nt, Human
uggguucaagcgauucuccugccu

SEQ ID NO: 978463 - RNA, 18 nt, Human
uguauuuauauauacuug

SEQ ID NO: 978464 - RNA, 21 nt, Human
ugucacccaggcuggagugca

SEQ ID NO: 978465 - RNA, 19 nt, Human
uguguaggaugcuucuguu

SEQ ID NO: 978466 - RNA, 22 nt, Human
uguguugcccaggcuacgcuca

SEQ ID NO: 978467 - RNA, 24 nt, Human
uguguugcccaggcuacgcucaaa

SEQ ID NO: 978468 - RNA, 24 nt, Human
uguucagaauuucucagaaaaaaa

SEQ ID NO: 978469 - RNA, 22 nt, Human
uguugcccaggcuacgcucaaa

SEQ ID NO: 978470 - RNA, 22 nt, Human
uuaaaaaacauuuuuuucuuag

SEQ ID NO: 978471 - RNA, 21 nt, Human
uuaaaguucucagaugcugac

SEQ ID NO: 978472 - RNA, 18 nt, Human
uuaaaugccgguacugac

SEQ ID NO: 978473 - RNA, 18 nt, Human
uuaguagagacgggguuu

SEQ ID NO: 978474 - RNA, 22 nt, Human
uuaguagagacgggguuucacc

SEQ ID NO: 978475 - RNA, 24 nt, Human
uuaguagagacgggguuucaccau

SEQ ID NO: 978476 - RNA, 18 nt, Human
uuaguagagaugagguuu

SEQ ID NO: 978477 - RNA, 22 nt, Human
uuaguagagaugagguuucgcc

SEQ ID NO: 978478 - RNA, 24 nt, Human
uuaguagagaugagguuucgccau

SEQ ID NO: 978479 - RNA, 22 nt, Human
uucaaacaacaacugcccauaa

SEQ ID NO: 978480 - RNA, 23 nt, Human
uucaagcaauuccugugccucag

SEQ ID NO: 978481 - RNA, 21 nt, Human
uucaagcgauucuccugccuc

SEQ ID NO: 978482 - RNA, 23 nt, Human
uucaagcgauucuccugccucag

SEQ ID NO: 978483 - RNA, 26 nt, Human
uucaagcgauucuccugccucagccu

SEQ ID NO: 978484 - RNA, 18 nt, Human
uuccuggcagcaccaggc

SEQ ID NO: 978485 - RNA, 22 nt, Human
uuccuggcagcaccaggcgcaa

SEQ ID NO: 978486 - RNA, 23 nt, Human
uucucagaugcugacagugacua

SEQ ID NO: 978487 - RNA, 24 nt, Human
uugaaggaaaaccacuacucucac

SEQ ID NO: 978488 - RNA, 22 nt, Human
uugagaaauuuagaugcaggcu

SEQ ID NO: 978489 - RNA, 19 nt, Human
uugagacacaguuuugcuc

SEQ ID NO: 978490 - RNA, 21 nt, Human
uugagacacaguuuugcucug

SEQ ID NO: 978491 - RNA, 24 nt, Human
uugcauccucugccucuuggguuc

SEQ ID NO: 978492 - RNA, 22 nt, Human
uugcucugucacccaggcuaga

SEQ ID NO: 978493 - RNA, 21 nt, Human
uugggaagaaccagaauuugc

SEQ ID NO: 978494 - RNA, 23 nt, Human
uugggauuacaggugagccacug

SEQ ID NO: 978495 - RNA, 26 nt, Human
uuuaaaggugagauuuagcaaaggaa

SEQ ID NO: 978496 - RNA, 24 nt, Human
uuucaccauguuggccaggcuggu

SEQ ID NO: 978497 - RNA, 22 nt, Human
uuucauucaucuuuuucuguuc

SEQ ID NO: 978498 - RNA, 21 nt, Human
uuucgccauguuggccagacu

SEQ ID NO: 978499 - RNA, 20 nt, Human
uuuguagagacagggucuau

SEQ ID NO: 978500 - RNA, 22 nt, Human
uuuguagagacagggucuaucu

SEQ ID NO: 978501 - RNA, 19 nt, Human
uuuugcucugucacccagg

SEQ ID NO: 978502 - RNA, 23 nt, Human
uuuugcucugucacccaggcuag

SEQ ID NO: 978503 - RNA, 24 nt, Human
uuuugcucugucacccaggcuaga

SEQ ID NO: 978504 - RNA, 20 nt, Human
uuuuguaauuuuaguagaga

SEQ ID NO: 978505 - RNA, 24 nt, Human
uuuuuaguagagacgggguuucac

SEQ ID NO: 978506 - RNA, 20 nt, Human
uuuuuguaauuuuaguagag

SEQ ID NO: 978507 - RNA, 21 nt, Human
uuuuugucuuuuuaguagaga

SEQ ID NO: 978508 - RNA, 24 nt, Human
uuuuuugucuuuuuaguagagacg

SEQ ID NO: 978509 - RNA, 22 nt, Human
uuuuuuuaaaagccaaaggagc

SEQ ID NO: 978510 - RNA, 22 nt, Human
agaaccccugaccaaagacaac

SEQ ID NO: 978511 - RNA, 19 nt, Human
agacagggguccccaggua

SEQ ID NO: 978512 - RNA, 23 nt, Human
auggcugaaaaucugucaagcac

SEQ ID NO: 978513 - RNA, 21 nt, Human
cacuuuggcucuuauugaucc

SEQ ID NO: 978514 - RNA, 21 nt, Human
cagccagcugauacugacauc

SEQ ID NO: 978515 - RNA, 24 nt, Human
cagguagacagaaccccugaccaa

SEQ ID NO: 978516 - RNA, 19 nt, Human
ccccagguagacagaaccc

SEQ ID NO: 978517 - RNA, 21 nt, Human
ccugccucacgcucccaagaa

SEQ ID NO: 978518 - RNA, 18 nt, Human
ccuuuauuuuuguuuuga

SEQ ID NO: 978519 - RNA, 20 nt, Human
cgcucaaaauuccacugccc

SEQ ID NO: 978520 - RNA, 22 nt, Human
cucagggccuccaggcagccag

SEQ ID NO: 978521 - RNA, 19 nt, Human
cuccaggcagccaguuuug

SEQ ID NO: 978522 - RNA, 23 nt, Human
gaacauggucauggcugaaaauc

SEQ ID NO: 978523 - RNA, 19 nt, Human
gcucagggccuccaggcag

SEQ ID NO: 978524 - RNA, 22 nt, Human
ggucauggcugaaaaucuguca

SEQ ID NO: 978525 - RNA, 23 nt, Human
ucccaagaaccugcuccugcagg

SEQ ID NO: 978526 - RNA, 20 nt, Human
uccccagguagacagaaccc

SEQ ID NO: 978527 - RNA, 23 nt, Human
uccccagguagacagaaccccug

SEQ ID NO: 978528 - RNA, 22 nt, Human
ucccuggugugcagacaggggu

SEQ ID NO: 978529 - RNA, 24 nt, Human
ucccuggugugcagacaggggucc

SEQ ID NO: 978530 - RNA, 21 nt, Human
uccugccucacgcucccaaga

SEQ ID NO: 978531 - RNA, 20 nt, Human
uccuuuuguaaaaaugggac

SEQ ID NO: 978532 - RNA, 23 nt, Human
ugaccaaagacaacaggaggcau

SEQ ID NO: 978533 - RNA, 21 nt, Human
uggcucagggccuccaggcag

SEQ ID NO: 978534 - RNA, 20 nt, Human
uuggcucuuauugaucccug

SEQ ID NO: 978535 - RNA, 23 nt, Human
uuuuuuuuuuuuuuuuuuccuuu

SEQ ID NO: 978536 - RNA, 24 nt, Human
uuuuuuuuuuuuuuuuuuccuuuu

SEQ ID NO: 978537 - RNA, 21 nt, Human
aaaaaucaaaguuugcaaaaa

SEQ ID NO: 978538 - RNA, 27 nt, Human
aaaccaguuuucaaauaguaaagccag

SEQ ID NO: 978539 - RNA, 20 nt, Human
aagaaauagguaaaagauua

SEQ ID NO: 978540 - RNA, 23 nt, Human
acacacacacacacacacacaca

SEQ ID NO: 978541 - RNA, 23 nt, Human
acacacacacacacacacgugug

SEQ ID NO: 978542 - RNA, 23 nt, Human
acacacacacacacacacgugug

SEQ ID NO: 978543 - RNA, 31 nt, Human
acaccuuacacacacacacacacacacacag

SEQ ID NO: 978544 - RNA, 31 nt, Human
agacaccuuacacacacacacacacacacag

SEQ ID NO: 978545 - RNA, 23 nt, Human
auaaaucuuugaaacaaguucag

SEQ ID NO: 978546 - RNA, 24 nt, Human
auauuccucauugccccaaaucag

SEQ ID NO: 978547 - RNA, 20 nt, Human
cacacacacacacacacaca

SEQ ID NO: 978548 - RNA, 20 nt, Human
cacacacacacacacacaca

SEQ ID NO: 978549 - RNA, 20 nt, Human
cacacacacacacacacaca

SEQ ID NO: 978550 - RNA, 22 nt, Human
cacacacacacacacacacaca

SEQ ID NO: 978551 - RNA, 26 nt, Human
cacacacacacacacacacacacacg

SEQ ID NO: 978552 - RNA, 26 nt, Human
cacacacacacacacacacacacgug

SEQ ID NO: 978553 - RNA, 26 nt, Human
cacacacacacacacacgugugcacg

SEQ ID NO: 978554 - RNA, 26 nt, Human
cacacacacacacacgugugcacgcc

SEQ ID NO: 978555 - RNA, 31 nt, Human
ccaaugacaaaaaacaauuuggccucuccuu

SEQ ID NO: 978556 - RNA, 19 nt, Human
ccgagcacuguuccgcgcc

SEQ ID NO: 978557 - RNA, 21 nt, Human
cuccuaaaauaagaacaugaa

SEQ ID NO: 978558 - RNA, 18 nt, Human
cugccaggagggaacacu

SEQ ID NO: 978559 - RNA, 22 nt, Human
gcacgccaaugacaaaaaacaa

SEQ ID NO: 978560 - RNA, 19 nt, Human
ggugugggcgccgggagag

SEQ ID NO: 978561 - RNA, 22 nt, Human
uaaaauaagaacaugaagaccc

SEQ ID NO: 978562 - RNA, 23 nt, Human
uaagaaauagguaaaagauuaua

SEQ ID NO: 978563 - RNA, 21 nt, Human
uaagaacaugaagacccuuaa

SEQ ID NO: 978564 - RNA, 31 nt, Human
uaagacaccuuacacacacacacacacacag

SEQ ID NO: 978565 - RNA, 20 nt, Human
uacacacacacacacacaca

SEQ ID NO: 978566 - RNA, 25 nt, Human
uacacacacacacacacacacacac

SEQ ID NO: 978567 - RNA, 21 nt, Human
uaugcaaaaguaugccuucaa

SEQ ID NO: 978568 - RNA, 21 nt, Human
ucaguauuuuuuuuauuucua

SEQ ID NO: 978569 - RNA, 19 nt, Human
ugauacacaaaccaguuuu

SEQ ID NO: 978570 - RNA, 18 nt, Human
ugauauaugauaugauac

SEQ ID NO: 978571 - RNA, 20 nt, Human
ugauaugauacacaaaccag

SEQ ID NO: 978572 - RNA, 21 nt, Human
ugauaugauacacaaaccagu

SEQ ID NO: 978573 - RNA, 18 nt, Human
ugcugccaggagggaaca

SEQ ID NO: 978574 - RNA, 21 nt, Human
agaagccauccaagaugagca

SEQ ID NO: 978575 - RNA, 24 nt, Human
agcccaucaugaguagcccacaug

SEQ ID NO: 978576 - RNA, 23 nt, Human
aggcauuuggucaccauuaccca

SEQ ID NO: 978577 - RNA, 19 nt, Human
aguagcccacaugguugcu

SEQ ID NO: 978578 - RNA, 22 nt, Human
caaggaacucuuuacaaggaua

SEQ ID NO: 978579 - RNA, 23 nt, Human
cacugcguuggcgcagcaaaaac

SEQ ID NO: 978580 - RNA, 22 nt, Human
cagcaaaaaccuuccucgugcc

SEQ ID NO: 978581 - RNA, 21 nt, Human
cugcaguuuuggcccagaagc

SEQ ID NO: 978582 - RNA, 22 nt, Human
guugcuguucaaagguacugaa

SEQ ID NO: 978583 - RNA, 19 nt, Human
uauucagaaaauaaaagua

SEQ ID NO: 978584 - RNA, 24 nt, Human
ucaccauuacccaucaaggaacuc

SEQ ID NO: 978585 - RNA, 27 nt, Human
ucaggccgggcgugagcggagccuucg

SEQ ID NO: 978586 - RNA, 20 nt, Human
ucccaaagaaucaagcccau

SEQ ID NO: 978587 - RNA, 24 nt, Human
ugcaguuuuggcccagaagccauc

SEQ ID NO: 978588 - RNA, 23 nt, Human
uggcccagaagccauccaagaug

SEQ ID NO: 978589 - RNA, 21 nt, Human
uucaaagguacugaaaaggga

SEQ ID NO: 978590 - RNA, 21 nt, Human
uuccaaguccuucgugcugcu

SEQ ID NO: 978591 - RNA, 23 nt, Human
uuggcgcagcaaaaaccuuccuc

SEQ ID NO: 978592 - RNA, 27 nt, Human
aaaaaaaaagauuuuuaaaaauaaaga

SEQ ID NO: 978593 - RNA, 20 nt, Human
aaaaacauggaaucaaccca

SEQ ID NO: 978594 - RNA, 24 nt, Human
aaaauagcaucuucaacuuagaug

SEQ ID NO: 978595 - RNA, 18 nt, Human
aaagauacaagcaugugu

SEQ ID NO: 978596 - RNA, 22 nt, Human
aacacaggaacagaaaaccaaa

SEQ ID NO: 978597 - RNA, 19 nt, Human
aaccugcacauccugcaca

SEQ ID NO: 978598 - RNA, 22 nt, Human
aagccauuauccucagcaaacu

SEQ ID NO: 978599 - RNA, 23 nt, Human
aaggcaggaggaucacuugaggc

SEQ ID NO: 978600 - RNA, 25 nt, Human
aaggcaggaggaucacuugaggcca

SEQ ID NO: 978601 - RNA, 23 nt, Human
aagucagucuccaauccugcugc

SEQ ID NO: 978602 - RNA, 18 nt, Human
acagcacuuugggaggcc

SEQ ID NO: 978603 - RNA, 22 nt, Human
acaggaacagaaaaccaaacac

SEQ ID NO: 978604 - RNA, 18 nt, Human
acagggaggggaacaacc

SEQ ID NO: 978605 - RNA, 24 nt, Human
acuguacuccugccugggcaacag

SEQ ID NO: 978606 - RNA, 25 nt, Human
acuguacuccugccugggcaacaga

SEQ ID NO: 978607 - RNA, 19 nt, Human
acuucacugauugcccaca

SEQ ID NO: 978608 - RNA, 20 nt, Human
agaaaaccaaacacugcaug

SEQ ID NO: 978609 - RNA, 20 nt, Human
agacugccauuggcucaucc

SEQ ID NO: 978610 - RNA, 24 nt, Human
agaucacuugagccugggaggcag

SEQ ID NO: 978611 - RNA, 23 nt, Human
agaugggaugagaauucaggugg

SEQ ID NO: 978612 - RNA, 25 nt, Human
agcaaaaacauggaaucaacccaaa

SEQ ID NO: 978613 - RNA, 18 nt, Human
agccagguguaauggugu

SEQ ID NO: 978614 - RNA, 21 nt, Human
agccagguguaaugguguguc

SEQ ID NO: 978615 - RNA, 20 nt, Human
aggagggcagaucacuugag

SEQ ID NO: 978616 - RNA, 18 nt, Human
aggcaggaggaucacuug

SEQ ID NO: 978617 - RNA, 20 nt, Human
aggcagugguugcagugagc

SEQ ID NO: 978618 - RNA, 21 nt, Human
aggcagugguugcagugagcu

SEQ ID NO: 978619 - RNA, 24 nt, Human
aggcagugguugcagugagcugag

SEQ ID NO: 978620 - RNA, 21 nt, Human
aggcugaggagggcagaucac

SEQ ID NO: 978621 - RNA, 20 nt, Human
aggggaacaacacacacugg

SEQ ID NO: 978622 - RNA, 18 nt, Human
auaaacuucacugauugc

SEQ ID NO: 978623 - RNA, 24 nt, Human
auggagcuagaagccauuauccuc

SEQ ID NO: 978624 - RNA, 18 nt, Human
augguacauacacaccac

SEQ ID NO: 978625 - RNA, 24 nt, Human
auggugugucccuguggucucagc

SEQ ID NO: 978626 - RNA, 18 nt, Human
auuggcucauccugcaua

SEQ ID NO: 978627 - RNA, 18 nt, Human
caaacuaacacaggaaca

SEQ ID NO: 978628 - RNA, 21 nt, Human
caacagagccagacccugucu

SEQ ID NO: 978629 - RNA, 18 nt, Human
caacagcaaaaacaugga

SEQ ID NO: 978630 - RNA, 28 nt, Human
caacagcaaaaacauggaaucaacccaa

SEQ ID NO: 978631 - RNA, 22 nt, Human
caacauagaaagaucccaucuc

SEQ ID NO: 978632 - RNA, 20 nt, Human
caaggcaggaggaucacuug

SEQ ID NO: 978633 - RNA, 24 nt, Human
cacaccuguaaucacagcacuuug

SEQ ID NO: 978634 - RNA, 27 nt, Human
cacagcacuuugggaggccaaggcagg

SEQ ID NO: 978635 - RNA, 19 nt, Human
cacaggaacagaaaaccaa

SEQ ID NO: 978636 - RNA, 20 nt, Human
cacaggaacagaaaaccaaa

SEQ ID NO: 978637 - RNA, 19 nt, Human
caccuguaaucacagcacu

SEQ ID NO: 978638 - RNA, 24 nt, Human
caccuguaaucacagcacuuuggg

SEQ ID NO: 978639 - RNA, 20 nt, Human
cacuguacuccugccugggc

SEQ ID NO: 978640 - RNA, 23 nt, Human
cacuguacuccugccugggcaac

SEQ ID NO: 978641 - RNA, 24 nt, Human
cacuguacuccugccugggcaaca

SEQ ID NO: 978642 - RNA, 24 nt, Human
cacuugaggccagccuaggcaaca

SEQ ID NO: 978643 - RNA, 18 nt, Human
cagaaaaccaaacacugc

SEQ ID NO: 978644 - RNA, 21 nt, Human
cagacuccccagguaucaccc

SEQ ID NO: 978645 - RNA, 24 nt, Human
cagcacuuugggaggccaaggcag

SEQ ID NO: 978646 - RNA, 25 nt, Human
cagcacuuugggaggccaaggcagg

SEQ ID NO: 978647 - RNA, 27 nt, Human
cauccugcacauguaucccagaacuua

SEQ ID NO: 978648 - RNA, 22 nt, Human
ccaaagccuucacccuaaacca

SEQ ID NO: 978649 - RNA, 21 nt, Human
ccaccugaggcagaacuucca

SEQ ID NO: 978650 - RNA, 20 nt, Human
ccacuguacuccugccuggg

SEQ ID NO: 978651 - RNA, 21 nt, Human
ccacuguacuccugccugggc

SEQ ID NO: 978652 - RNA, 24 nt, Human
ccacuguacuccugccugggcaac

SEQ ID NO: 978653 - RNA, 23 nt, Human
ccaggaaccgagaagagaaugac

SEQ ID NO: 978654 - RNA, 21 nt, Human
cccaucucuacuaaaauacaa

SEQ ID NO: 978655 - RNA, 22 nt, Human
ccccagcccgcagucacaaguc

SEQ ID NO: 978656 - RNA, 21 nt, Human
ccuacugggaaugccccccca

SEQ ID NO: 978657 - RNA, 19 nt, Human
ccucuggcuucacauuccu

SEQ ID NO: 978658 - RNA, 24 nt, Human
ccuguaaucacagcacuuugggag

SEQ ID NO: 978659 - RNA, 22 nt, Human
ccuguggucucagcuacuuagg

SEQ ID NO: 978660 - RNA, 19 nt, Human
cgaaaccucuggcuucaca

SEQ ID NO: 978661 - RNA, 18 nt, Human
cgagaagagaaugacccc

SEQ ID NO: 978662 - RNA, 18 nt, Human
cgagaagagaaugacccc

SEQ ID NO: 978663 - RNA, 21 nt, Human
cucacuugcccagggggugga

SEQ ID NO: 978664 - RNA, 21 nt, Human
cucuuugcauuuugcagaugc

SEQ ID NO: 978665 - RNA, 19 nt, Human
cuggauaaagaaaacaugg

SEQ ID NO: 978666 - RNA, 18 nt, Human
cuggcugggcaugguggu

SEQ ID NO: 978667 - RNA, 21 nt, Human
cuggggccuguuaggggggug

SEQ ID NO: 978668 - RNA, 22 nt, Human
cuuuuuggcuaugcccaccuga

SEQ ID NO: 978669 - RNA, 22 nt, Human
gaacagaaaaccaaacacugca

SEQ ID NO: 978670 - RNA, 19 nt, Human
gaucacuugaggccagccu

SEQ ID NO: 978671 - RNA, 21 nt, Human
gaucacuugaggccagccuag

SEQ ID NO: 978672 - RNA, 26 nt, Human
gaucacuugaggccagccuaggcaaa

SEQ ID NO: 978673 - RNA, 22 nt, Human
gauccaauuccccaggaaccga

SEQ ID NO: 978674 - RNA, 24 nt, Human
gccacuguacuccugccugggcaa

SEQ ID NO: 978675 - RNA, 20 nt, Human
ggauggagcuagaagccauu

SEQ ID NO: 978676 - RNA, 19 nt, Human
ggaugucacgaauccgaaa

SEQ ID NO: 978677 - RNA, 18 nt, Human
ggcagaucacuugagccu

SEQ ID NO: 978678 - RNA, 24 nt, Human
gggcauggugguucacaccuguaa

SEQ ID NO: 978679 - RNA, 21 nt, Human
ggggcuugguagagagggccc

SEQ ID NO: 978680 - RNA, 24 nt, Human
ggugguucacaccuguaaucacag

SEQ ID NO: 978681 - RNA, 24 nt, Human
guacuccugccugggcaacagagc

SEQ ID NO: 978682 - RNA, 21 nt, Human
gucacaagucagucuccaauc

SEQ ID NO: 978683 - RNA, 23 nt, Human
gugguucacaccuguaaucacag

SEQ ID NO: 978684 - RNA, 19 nt, Human
uaaaauacaacaauuagcc

SEQ ID NO: 978685 - RNA, 23 nt, Human
uacuccugccugggcaacagagc

SEQ ID NO: 978686 - RNA, 18 nt, Human
uacugggaaugccccccc

SEQ ID NO: 978687 - RNA, 20 nt, Human
uagccagcccccaucugaaa

SEQ ID NO: 978688 - RNA, 18 nt, Human
uagccccucagcugcacu

SEQ ID NO: 978689 - RNA, 24 nt, Human
uaggaggcugaggagggcagauca

SEQ ID NO: 978690 - RNA, 24 nt, Human
uagguuuuaacuggcugcucagug

SEQ ID NO: 978691 - RNA, 24 nt, Human
uaugagguaguucucuuugcauuu

SEQ ID NO: 978692 - RNA, 19 nt, Human
uaugcccaccugaggcaga

SEQ ID NO: 978693 - RNA, 20 nt, Human
uaugcccaccugaggcagaa

SEQ ID NO: 978694 - RNA, 24 nt, Human
ucacaagucagucuccaauccugc

SEQ ID NO: 978695 - RNA, 23 nt, Human
ucacaccuguaaucacagcacuu

SEQ ID NO: 978696 - RNA, 19 nt, Human
ucacccaaagccuucaccc

SEQ ID NO: 978697 - RNA, 25 nt, Human
ucacccaaagccuucacccuaaacc

SEQ ID NO: 978698 - RNA, 18 nt, Human
ucacccuaaaccacccug

SEQ ID NO: 978699 - RNA, 22 nt, Human
ucacuugagccugggaggcagu

SEQ ID NO: 978700 - RNA, 22 nt, Human
ucagcaaacuaacacaggaaca

SEQ ID NO: 978701 - RNA, 24 nt, Human
ucccuguggucucagcuacuuagg

SEQ ID NO: 978702 - RNA, 18 nt, Human
ucuugagacugccauugg

SEQ ID NO: 978703 - RNA, 24 nt, Human
ugaacaaugagaauacauggacac

SEQ ID NO: 978704 - RNA, 24 nt, Human
ugagccugggaggcagugguugca

SEQ ID NO: 978705 - RNA, 22 nt, Human
ugaucucugucuccagacuccc

SEQ ID NO: 978706 - RNA, 19 nt, Human
uggaaucaacccaaaugcc

SEQ ID NO: 978707 - RNA, 20 nt, Human
uggauaaagaaaacauggua

SEQ ID NO: 978708 - RNA, 24 nt, Human
ugggaggcagugguugcagugagc

SEQ ID NO: 978709 - RNA, 24 nt, Human
ugggaggccaaggcaggaggauca

SEQ ID NO: 978710 - RNA, 22 nt, Human
ugguacauacacaccacggaau

SEQ ID NO: 978711 - RNA, 21 nt, Human
uggugugucccuguggucuca

SEQ ID NO: 978712 - RNA, 19 nt, Human
ugguucacaccuguaauca

SEQ ID NO: 978713 - RNA, 24 nt, Human
ugguucacaccuguaaucacagca

SEQ ID NO: 978714 - RNA, 18 nt, Human
uguuaggggggugcggga

SEQ ID NO: 978715 - RNA, 21 nt, Human
uguucagaguuuuuauuaggg

SEQ ID NO: 978716 - RNA, 20 nt, Human
uucagaguuuuuauuagggc

SEQ ID NO: 978717 - RNA, 19 nt, Human
uucauuacauaaacuucac

SEQ ID NO: 978718 - RNA, 21 nt, Human
uuccacagguaaggugucgcc

SEQ ID NO: 978719 - RNA, 24 nt, Human
uugagccugggaggcagugguugc

SEQ ID NO: 978720 - RNA, 20 nt, Human
uugcagugagcugagauaau

SEQ ID NO: 978721 - RNA, 21 nt, Human
uugcagugagcugagauaaug

SEQ ID NO: 978722 - RNA, 23 nt, Human
uugcagugagcugagauaaugcc

SEQ ID NO: 978723 - RNA, 19 nt, Human
uuuuuggcuaugcccaccu

SEQ ID NO: 978724 - RNA, 22 nt, Human
aagggccccacacuaucucccu

SEQ ID NO: 978725 - RNA, 20 nt, Human
agggagguggggagguggag

SEQ ID NO: 978726 - RNA, 21 nt, Human
aggugaggggcgaagagcugg

SEQ ID NO: 978727 - RNA, 24 nt, Human
caacccucccccagucaucccacu

SEQ ID NO: 978728 - RNA, 19 nt, Human
caccccuccucuccuccac

SEQ ID NO: 978729 - RNA, 23 nt, Human
cacccugugcuugggugggcgcu

SEQ ID NO: 978730 - RNA, 21 nt, Human
cagaguuucaaagaggugagg

SEQ ID NO: 978731 - RNA, 18 nt, Human
cagggggcucuccucuuc

SEQ ID NO: 978732 - RNA, 21 nt, Human
cccacacuaucucccucagca

SEQ ID NO: 978733 - RNA, 20 nt, Human
cccuccucuccuccaccucc

SEQ ID NO: 978734 - RNA, 20 nt, Human
cccugcagcaacccuccccc

SEQ ID NO: 978735 - RNA, 21 nt, Human
cccugcagcaacccuccccca

SEQ ID NO: 978736 - RNA, 26 nt, Human
ccucaagggccccacacuaucucccu

SEQ ID NO: 978737 - RNA, 21 nt, Human
ccuccaccuccucccacucca

SEQ ID NO: 978738 - RNA, 20 nt, Human
ccucccacuccacccugugc

SEQ ID NO: 978739 - RNA, 21 nt, Human
ccucccccagucaucccacug

SEQ ID NO: 978740 - RNA, 20 nt, Human
ccucuccuccaccuccuccc

SEQ ID NO: 978741 - RNA, 21 nt, Human
cguccagaguuucaaagaggu

SEQ ID NO: 978742 - RNA, 19 nt, Human
cuccucccacuccacccug

SEQ ID NO: 978743 - RNA, 21 nt, Human
cuccucuccuccaccuccucc

SEQ ID NO: 978744 - RNA, 21 nt, Human
cuggacccagcacagacaccc

SEQ ID NO: 978745 - RNA, 22 nt, Human
cuggcaccccuccucuccucca

SEQ ID NO: 978746 - RNA, 18 nt, Human
cuuuaaugaaauugggga

SEQ ID NO: 978747 - RNA, 22 nt, Human
gacaggcuugggggcaagggag

SEQ ID NO: 978748 - RNA, 22 nt, Human
gagggagguggggagguggagc

SEQ ID NO: 978749 - RNA, 21 nt, Human
gcaccccuccucuccuccacc

SEQ ID NO: 978750 - RNA, 18 nt, Human
ggacacggggcagggcag

SEQ ID NO: 978751 - RNA, 23 nt, Human
ggcacaaacagaagggaggggca

SEQ ID NO: 978752 - RNA, 23 nt, Human
ggcaccccuccucuccuccaccu

SEQ ID NO: 978753 - RNA, 20 nt, Human
ggcagggcagggcagggggc

SEQ ID NO: 978754 - RNA, 23 nt, Human
ggcagggggcucuccucuucccu

SEQ ID NO: 978755 - RNA, 22 nt, Human
gggacaggcuugggggcaaggg

SEQ ID NO: 978756 - RNA, 23 nt, Human
gggagggagguggggagguggag

SEQ ID NO: 978757 - RNA, 21 nt, Human
gggaggggcacuggggacagg

SEQ ID NO: 978758 - RNA, 23 nt, Human
ggggagaggggcacaaacagaag

SEQ ID NO: 978759 - RNA, 20 nt, Human
ggggagggagguggggaggu

SEQ ID NO: 978760 - RNA, 20 nt, Human
guccagaguuucaaagaggu

SEQ ID NO: 978761 - RNA, 19 nt, Human
gugcuugggugggcgcugg

SEQ ID NO: 978762 - RNA, 19 nt, Human
uaaugaaauuggggagagg

SEQ ID NO: 978763 - RNA, 23 nt, Human
ucaagggccccacacuaucuccc

SEQ ID NO: 978764 - RNA, 24 nt, Human
ucaucccacugacgggggagggag

SEQ ID NO: 978765 - RNA, 19 nt, Human
uccagaguuucaaagaggu

SEQ ID NO: 978766 - RNA, 21 nt, Human
uccuccaccuccucccacucc

SEQ ID NO: 978767 - RNA, 26 nt, Human
ucuggcaccccuccucuccuccaccu

SEQ ID NO: 978768 - RNA, 18 nt, Human
ugcuugggugggcgcugg

SEQ ID NO: 978769 - RNA, 24 nt, Human
aagcauggauaucccugcucauac

SEQ ID NO: 978770 - RNA, 20 nt, Human
aaggcagcuccucuuccccc

SEQ ID NO: 978771 - RNA, 23 nt, Human
aagggcaucauagcugcagguga

SEQ ID NO: 978772 - RNA, 19 nt, Human
aauacccucccccauccuu

SEQ ID NO: 978773 - RNA, 20 nt, Human
acccccaaaggaagaauggg

SEQ ID NO: 978774 - RNA, 18 nt, Human
agcucaggagggagccgg

SEQ ID NO: 978775 - RNA, 23 nt, Human
agcuccucuucccccucaucccc

SEQ ID NO: 978776 - RNA, 19 nt, Human
aggcagcuccucuuccccc

SEQ ID NO: 978777 - RNA, 19 nt, Human
aggcagcuccucuuccccc

SEQ ID NO: 978778 - RNA, 18 nt, Human
auaugugugugugugugu

SEQ ID NO: 978779 - RNA, 23 nt, Human
auaugugugugugugugugugua

SEQ ID NO: 978780 - RNA, 19 nt, Human
augucccugucuguaaaca

SEQ ID NO: 978781 - RNA, 20 nt, Human
augugugugugugugugugu

SEQ ID NO: 978782 - RNA, 24 nt, Human
auguguguguguguguguguaugu

SEQ ID NO: 978783 - RNA, 21 nt, Human
caaaaggcagcuccucuuccc

SEQ ID NO: 978784 - RNA, 18 nt, Human
cagcuccucuucccccuc

SEQ ID NO: 978785 - RNA, 21 nt, Human
cagcuuccacaucauaccccc

SEQ ID NO: 978786 - RNA, 19 nt, Human
caggagggagccggggccu

SEQ ID NO: 978787 - RNA, 22 nt, Human
cauaagcauggauaucccugcu

SEQ ID NO: 978788 - RNA, 20 nt, Human
cauacccccaaaggaagaau

SEQ ID NO: 978789 - RNA, 23 nt, Human
cauccuuaacucuagaaccccgg

SEQ ID NO: 978790 - RNA, 19 nt, Human
ccacaucauacccccaaag

SEQ ID NO: 978791 - RNA, 19 nt, Human
ccauccuuaacucuagaac

SEQ ID NO: 978792 - RNA, 22 nt, Human
cccccaaaggaagaaugggggu

SEQ ID NO: 978793 - RNA, 18 nt, Human
ccucccccauccuuaacu

SEQ ID NO: 978794 - RNA, 22 nt, Human
ccucccccauccuuaacucuag

SEQ ID NO: 978795 - RNA, 23 nt, Human
ccuuaacucuagaaccccgguuu

SEQ ID NO: 978796 - RNA, 26 nt, Human
cucccccauccuuaacucuagaaccc

SEQ ID NO: 978797 - RNA, 24 nt, Human
cugaaaccagcuuccacaucauac

SEQ ID NO: 978798 - RNA, 23 nt, Human
cugaacacaacuggcucccuugg

SEQ ID NO: 978799 - RNA, 20 nt, Human
gacuucaagcauucuucaaa

SEQ ID NO: 978800 - RNA, 25 nt, Human
gcgcagcucaggagggagggaacgc

SEQ ID NO: 978801 - RNA, 22 nt, Human
gggccuccaaaaggcagcuccu

SEQ ID NO: 978802 - RNA, 23 nt, Human
gggcuccagcaaguggauaugug

SEQ ID NO: 978803 - RNA, 21 nt, Human
gggcugaaaccagcuuccaca

SEQ ID NO: 978804 - RNA, 22 nt, Human
guguguguguguauguguugug

SEQ ID NO: 978805 - RNA, 21 nt, Human
guguguguguguguguaugug

SEQ ID NO: 978806 - RNA, 20 nt, Human
uaaggcauauggugaggaca

SEQ ID NO: 978807 - RNA, 20 nt, Human
uacccccaaaggaagaaugg

SEQ ID NO: 978808 - RNA, 23 nt, Human
uacccccaaaggaagaauggggg

SEQ ID NO: 978809 - RNA, 18 nt, Human
uagaauggggauaaggca

SEQ ID NO: 978810 - RNA, 19 nt, Human
uagcugcaggugaaggggg

SEQ ID NO: 978811 - RNA, 18 nt, Human
uaugugugugugugugug

SEQ ID NO: 978812 - RNA, 24 nt, Human
ucuauaugugucucauuuguuccc

SEQ ID NO: 978813 - RNA, 21 nt, Human
ucuccaggccaggaagggccc

SEQ ID NO: 978814 - RNA, 19 nt, Human
ugaggagucagacugaggc

SEQ ID NO: 978815 - RNA, 25 nt, Human
ugaggagucagacugaggcaguaua

SEQ ID NO: 978816 - RNA, 19 nt, Human
ugcugaggggguuggggac

SEQ ID NO: 978817 - RNA, 21 nt, Human
uggcacggcgcagcucaggag

SEQ ID NO: 978818 - RNA, 18 nt, Human
uggggacaagccacaggg

SEQ ID NO: 978819 - RNA, 24 nt, Human
uggggaggaggugggaagcugugg

SEQ ID NO: 978820 - RNA, 25 nt, Human
ugugauaugugugugugugugugug

SEQ ID NO: 978821 - RNA, 19 nt, Human
uguguauguguugugugug

SEQ ID NO: 978822 - RNA, 24 nt, Human
uguguauguguuguguguguguaa

SEQ ID NO: 978823 - RNA, 21 nt, Human
ugugugaaaacugugauaugu

SEQ ID NO: 978824 - RNA, 22 nt, Human
uguguguauguguugugugugu

SEQ ID NO: 978825 - RNA, 23 nt, Human
uguguguauguguugugugugug

SEQ ID NO: 978826 - RNA, 22 nt, Human
uguguguguauguguugugugu

SEQ ID NO: 978827 - RNA, 22 nt, Human
uguguguguauguguugugugu

SEQ ID NO: 978828 - RNA, 22 nt, Human
ugugugugucugaacacaacug

SEQ ID NO: 978829 - RNA, 21 nt, Human
uguguguguguguguguaugu

SEQ ID NO: 978830 - RNA, 18 nt, Human
ugugugugugugugugug

SEQ ID NO: 978831 - RNA, 20 nt, Human
uguuguguguguguaaaagg

SEQ ID NO: 978832 - RNA, 21 nt, Human
uuaacucuagaaccccgguuu

SEQ ID NO: 978833 - RNA, 27 nt, Human
accaugcgcaccaccuuccgggccaca

SEQ ID NO: 978834 - RNA, 19 nt, Human
caacggcgcuccugagcaa

SEQ ID NO: 978835 - RNA, 20 nt, Human
caccaugcgcaccaccuucc

SEQ ID NO: 978836 - RNA, 24 nt, Human
caccaugcgcaccaccuuccgggc

SEQ ID NO: 978837 - RNA, 24 nt, Human
caccccguuuccaacggcgcuccu

SEQ ID NO: 978838 - RNA, 20 nt, Human
caccuuccgggccacacccc

SEQ ID NO: 978839 - RNA, 24 nt, Human
ccaugcgcaccaccuuccgggcca

SEQ ID NO: 978840 - RNA, 26 nt, Human
ccaugcgcaccaccuuccgggccaca

SEQ ID NO: 978841 - RNA, 18 nt, Human
ccccguuuccaacggcgc

SEQ ID NO: 978842 - RNA, 19 nt, Human
cuuucugccgcugcuccuc

SEQ ID NO: 978843 - RNA, 21 nt, Human
cuuucugccgcugcuccucgu

SEQ ID NO: 978844 - RNA, 21 nt, Human
ucaccaugcgcaccaccuucc

SEQ ID NO: 978845 - RNA, 23 nt, Human
aaaaagagccccaccaaacagaa

SEQ ID NO: 978846 - RNA, 22 nt, Human
aaaaccacaggagcuuucacug

SEQ ID NO: 978847 - RNA, 21 nt, Human
aagaagagguggucugcagag

SEQ ID NO: 978848 - RNA, 21 nt, Human
aagaagcaaaggggaguggag

SEQ ID NO: 978849 - RNA, 19 nt, Human
aagauggguugggggaaga

SEQ ID NO: 978850 - RNA, 23 nt, Human
aagucacaguuggaacaucuggg

SEQ ID NO: 978851 - RNA, 18 nt, Human
aaucacuuugucugcccc

SEQ ID NO: 978852 - RNA, 19 nt, Human
acagaagaguuaggaauca

SEQ ID NO: 978853 - RNA, 19 nt, Human
agaagaagagguggucugc

SEQ ID NO: 978854 - RNA, 23 nt, Human
agaagaagagguggucugcagag

SEQ ID NO: 978855 - RNA, 24 nt, Human
agagaugcugguuccagcugcagg

SEQ ID NO: 978856 - RNA, 21 nt, Human
agauggugaaggguguuucag

SEQ ID NO: 978857 - RNA, 20 nt, Human
agcucccagaagaagaggug

SEQ ID NO: 978858 - RNA, 18 nt, Human
aggcagagucuggugcua

SEQ ID NO: 978859 - RNA, 24 nt, Human
aggcucccccaagcaggacugcac

SEQ ID NO: 978860 - RNA, 23 nt, Human
agguggccggcaccagcuggagc

SEQ ID NO: 978861 - RNA, 19 nt, Human
agucaucacaagaggaggg

SEQ ID NO: 978862 - RNA, 22 nt, Human
auaaaaagagccccaccaaaca

SEQ ID NO: 978863 - RNA, 18 nt, Human
caacagucgaugacaggc

SEQ ID NO: 978864 - RNA, 24 nt, Human
caagaucgaaucacuuugucugcc

SEQ ID NO: 978865 - RNA, 21 nt, Human
caagguaggagcuguaggccc

SEQ ID NO: 978866 - RNA, 22 nt, Human
cacuccugcaaaguggaggcuc

SEQ ID NO: 978867 - RNA, 20 nt, Human
caggcccccaggguucuuca

SEQ ID NO: 978868 - RNA, 25 nt, Human
caggcccccaggguucuucacuccu

SEQ ID NO: 978869 - RNA, 18 nt, Human
cagggcaggacagggacc

SEQ ID NO: 978870 - RNA, 24 nt, Human
cccaagguaggagcuguaggcccc

SEQ ID NO: 978871 - RNA, 24 nt, Human
cccaccaaacagaagaguuaggaa

SEQ ID NO: 978872 - RNA, 20 nt, Human
cccaucaaggcgccagggag

SEQ ID NO: 978873 - RNA, 23 nt, Human
ccccuccugccuucccucuucuu

SEQ ID NO: 978874 - RNA, 19 nt, Human
ccuccugccuucccucuuc

SEQ ID NO: 978875 - RNA, 18 nt, Human
ccugccuucccucuucuu

SEQ ID NO: 978876 - RNA, 23 nt, Human
ccuucccucuucuuggggauccc

SEQ ID NO: 978877 - RNA, 19 nt, Human
cgaugacaggcugagguca

SEQ ID NO: 978878 - RNA, 22 nt, Human
cggcaccagcuggagcggcccc

SEQ ID NO: 978879 - RNA, 18 nt, Human
cuucacuccugcaaagug

SEQ ID NO: 978880 - RNA, 21 nt, Human
cuuuggccccucccccagucc

SEQ ID NO: 978881 - RNA, 21 nt, Human
gcaguaaguggacggggguac

SEQ ID NO: 978882 - RNA, 19 nt, Human
gccccuccugccuucccuc

SEQ ID NO: 978883 - RNA, 18 nt, Human
gcguuucuucuuuucuuu

SEQ ID NO: 978884 - RNA, 18 nt, Human
gcuacaggcccccagggu

SEQ ID NO: 978885 - RNA, 19 nt, Human
ggaagaggagauaccccau

SEQ ID NO: 978886 - RNA, 28 nt, Human
ggcaaagugaacuguagucaucacaaga

SEQ ID NO: 978887 - RNA, 18 nt, Human
ggcaccuaugaacuggug

SEQ ID NO: 978888 - RNA, 19 nt, Human
ggcguuucuucuuuucuuu

SEQ ID NO: 978889 - RNA, 23 nt, Human
gggaguggagguggccggcacca

SEQ ID NO: 978890 - RNA, 18 nt, Human
uaaaaagagccccaccaa

SEQ ID NO: 978891 - RNA, 25 nt, Human
uaaaaagagccccaccaaacagaag

SEQ ID NO: 978892 - RNA, 25 nt, Human
uaggaggaggaaggaucuuccaaau

SEQ ID NO: 978893 - RNA, 21 nt, Human
uagggacagcaagaagcaaag

SEQ ID NO: 978894 - RNA, 21 nt, Human
uccccauccgaccuuagggac

SEQ ID NO: 978895 - RNA, 22 nt, Human
ucccugcuuuggccccuccccc

SEQ ID NO: 978896 - RNA, 20 nt, Human
uccuggaggaggaagggagg

SEQ ID NO: 978897 - RNA, 27 nt, Human
ucucucccaggcaagggaaggaggggc

SEQ ID NO: 978898 - RNA, 18 nt, Human
ucugcagccccugagggc

SEQ ID NO: 978899 - RNA, 18 nt, Human
ucugugguggagacggca

SEQ ID NO: 978900 - RNA, 22 nt, Human
ugagcaaaaccacaggagcuuu

SEQ ID NO: 978901 - RNA, 22 nt, Human
ugagggcccaagguaggagcug

SEQ ID NO: 978902 - RNA, 25 nt, Human
ugcugguuccagcugcagggagggg

SEQ ID NO: 978903 - RNA, 23 nt, Human
ugcuuuggccccucccccagucc

SEQ ID NO: 978904 - RNA, 18 nt, Human
uggaaggugagcagaggc

SEQ ID NO: 978905 - RNA, 20 nt, Human
uggagguggccggcaccagc

SEQ ID NO: 978906 - RNA, 24 nt, Human
uggagguggccggcaccagcugga

SEQ ID NO: 978907 - RNA, 20 nt, Human
uggccccucccccagucccc

SEQ ID NO: 978908 - RNA, 22 nt, Human
uggcugagcaaaaccacaggag

SEQ ID NO: 978909 - RNA, 23 nt, Human
ugggggaauguucugggcucuuu

SEQ ID NO: 978910 - RNA, 18 nt, Human
uggguugggggaagagga

SEQ ID NO: 978911 - RNA, 25 nt, Human
ugucccugcuuuggccccuccccca

SEQ ID NO: 978912 - RNA, 23 nt, Human
ugucuagguaggcucucucccag

SEQ ID NO: 978913 - RNA, 23 nt, Human
uuaguccaggcccucgcggagca

SEQ ID NO: 978914 - RNA, 26 nt, Human
uuccucugcagccccugagggcccaa

SEQ ID NO: 978915 - RNA, 26 nt, Human
uuccucugcagccccugagggccccg

SEQ ID NO: 978916 - RNA, 19 nt, Human
uuccuggaggaggaaggga

SEQ ID NO: 978917 - RNA, 21 nt, Human
uucuuggggaucccaagaugg

SEQ ID NO: 978918 - RNA, 18 nt, Human
uuggaacaucugggggaa

SEQ ID NO: 978919 - RNA, 23 nt, Human
uugucugccccuggaaguuuagg

SEQ ID NO: 978920 - RNA, 20 nt, Human
aaaaaaccauuuagugccuu

SEQ ID NO: 978921 - RNA, 22 nt, Human
aaaagaauguucacuguagaaa

SEQ ID NO: 978922 - RNA, 19 nt, Human
aacauggugaaacccuguc

SEQ ID NO: 978923 - RNA, 20 nt, Human
aacauggugaaacccugucu

SEQ ID NO: 978924 - RNA, 21 nt, Human
aacauggugaaacccugucuc

SEQ ID NO: 978925 - RNA, 21 nt, Human
aacuggccuggaagccuugcc

SEQ ID NO: 978926 - RNA, 23 nt, Human
acagagggagauucugucucaaa

SEQ ID NO: 978927 - RNA, 24 nt, Human
acagagggagauucugucucaaaa

SEQ ID NO: 978928 - RNA, 18 nt, Human
acgugaaagaaagaauag

SEQ ID NO: 978929 - RNA, 22 nt, Human
acuccagccugggggacagagg

SEQ ID NO: 978930 - RNA, 18 nt, Human
acugcacuccagccuggg

SEQ ID NO: 978931 - RNA, 24 nt, Human
acugcacuccagccugggggacag

SEQ ID NO: 978932 - RNA, 22 nt, Human
agaccaggcgugguggcucaug

SEQ ID NO: 978933 - RNA, 24 nt, Human
agaccaggcgugguggcucaugcc

SEQ ID NO: 978934 - RNA, 24 nt, Human
agagcuugcagugagccgagaucg

SEQ ID NO: 978935 - RNA, 24 nt, Human
agccugggggacagagggagauuc

SEQ ID NO: 978936 - RNA, 21 nt, Human
aggcagagcuugcagugagcc

SEQ ID NO: 978937 - RNA, 24 nt, Human
aggcagagcuugcagugagccgag

SEQ ID NO: 978938 - RNA, 20 nt, Human
aggcagcucggugggagcgc

SEQ ID NO: 978939 - RNA, 24 nt, Human
aggcaggagaagggcgugaacccg

SEQ ID NO: 978940 - RNA, 25 nt, Human
aggcaggagaagggcgugaacccgg

SEQ ID NO: 978941 - RNA, 26 nt, Human
aggcagguggaucacgaggucaggag

SEQ ID NO: 978942 - RNA, 21 nt, Human
aggccgaggcagguggaucac

SEQ ID NO: 978943 - RNA, 24 nt, Human
aggcgcagaggcucugguuugucu

SEQ ID NO: 978944 - RNA, 24 nt, Human
aggcgugguggcucaugccuguca

SEQ ID NO: 978945 - RNA, 18 nt, Human
aggcugaggcaggagaag

SEQ ID NO: 978946 - RNA, 24 nt, Human
agguggaucacgaggucaggagau

SEQ ID NO: 978947 - RNA, 22 nt, Human
auccacucuccccacuccccaa

SEQ ID NO: 978948 - RNA, 25 nt, Human
auccuuuuuaaaaaguucauagaag

SEQ ID NO: 978949 - RNA, 24 nt, Human
aucgcaccacugcacuccagccug

SEQ ID NO: 978950 - RNA, 26 nt, Human
caccacugcacuccagccugggggac

SEQ ID NO: 978951 - RNA, 21 nt, Human
caccuguagucccagcuacuc

SEQ ID NO: 978952 - RNA, 24 nt, Human
caccuguagucccagcuacucggg

SEQ ID NO: 978953 - RNA, 18 nt, Human
cacugcacuccagccugg

SEQ ID NO: 978954 - RNA, 19 nt, Human
cacugcacuccagccuggg

SEQ ID NO: 978955 - RNA, 22 nt, Human
cacugcacuccagccuggggga

SEQ ID NO: 978956 - RNA, 24 nt, Human
cacugcacuccagccugggggaca

SEQ ID NO: 978957 - RNA, 20 nt, Human
cagaagaaaauaaauaucac

SEQ ID NO: 978958 - RNA, 25 nt, Human
cagcacuuuggggaggccgaggcag

SEQ ID NO: 978959 - RNA, 26 nt, Human
cagcacuuuggggaggccgaggcagg

SEQ ID NO: 978960 - RNA, 22 nt, Human
cagccugggggacagagggaga

SEQ ID NO: 978961 - RNA, 24 nt, Human
cagcuacucgggaggcugaggcag

SEQ ID NO: 978962 - RNA, 19 nt, Human
caggguccaggacagcaga

SEQ ID NO: 978963 - RNA, 24 nt, Human
cauccacucuccccacuccccaaa

SEQ ID NO: 978964 - RNA, 24 nt, Human
caugccugucaucccagcacuuug

SEQ ID NO: 978965 - RNA, 19 nt, Human
ccacugcacuccagccugg

SEQ ID NO: 978966 - RNA, 20 nt, Human
ccacugcacuccagccuggg

SEQ ID NO: 978967 - RNA, 22 nt, Human
ccacugcacuccagccuggggg

SEQ ID NO: 978968 - RNA, 24 nt, Human
ccacugcacuccagccugggggac

SEQ ID NO: 978969 - RNA, 25 nt, Human
ccacugcacuccagccugggggaca

SEQ ID NO: 978970 - RNA, 21 nt, Human
cccugcaggcaacccuuccug

SEQ ID NO: 978971 - RNA, 22 nt, Human
ccuccgggagcacugccagggg

SEQ ID NO: 978972 - RNA, 24 nt, Human
ccugcaggcaacccuuccugaccc

SEQ ID NO: 978973 - RNA, 22 nt, Human
ccuggcuaacauggugaaaccc

SEQ ID NO: 978974 - RNA, 22 nt, Human
ccuggcuaacauggugaaaccc

SEQ ID NO: 978975 - RNA, 24 nt, Human
ccuggcuaacauggugaaacccug

SEQ ID NO: 978976 - RNA, 21 nt, Human
ccuguagucccagcuacucgg

SEQ ID NO: 978977 - RNA, 22 nt, Human
ccugucaucccagcacuuuggg

SEQ ID NO: 978978 - RNA, 21 nt, Human
ccuuuuuaaaaaguucauaga

SEQ ID NO: 978979 - RNA, 24 nt, Human
cgagaccauccuggcuaacauggu

SEQ ID NO: 978980 - RNA, 24 nt, Human
cgaggcagguggaucacgagguca

SEQ ID NO: 978981 - RNA, 21 nt, Human
cgcaccacugcacuccagccu

SEQ ID NO: 978982 - RNA, 22 nt, Human
cuaguaacaaaaguaaaaaaga

SEQ ID NO: 978983 - RNA, 20 nt, Human
cuaguccauccacucucccc

SEQ ID NO: 978984 - RNA, 24 nt, Human
cucaugccugucaucccagcacuu

SEQ ID NO: 978985 - RNA, 28 nt, Human
cucugcccaggccuuccugggccccucc

SEQ ID NO: 978986 - RNA, 22 nt, Human
cuggccccgggaucauuuucca

SEQ ID NO: 978987 - RNA, 24 nt, Human
cuggcuaacauggugaaacccugu

SEQ ID NO: 978988 - RNA, 18 nt, Human
cugguuugucuguccugg

SEQ ID NO: 978989 - RNA, 19 nt, Human
cuugcagugagccgagauc

SEQ ID NO: 978990 - RNA, 21 nt, Human
cuugcagugagccgagaucgc

SEQ ID NO: 978991 - RNA, 20 nt, Human
gaacccgggaggcagagcuu

SEQ ID NO: 978992 - RNA, 23 nt, Human
gagaucgcaccacugcacuccag

SEQ ID NO: 978993 - RNA, 20 nt, Human
gcaccacugcacuccagccu

SEQ ID NO: 978994 - RNA, 20 nt, Human
gccgagaucgcaccacugca

SEQ ID NO: 978995 - RNA, 24 nt, Human
gcuaacauggugaaacccugucuc

SEQ ID NO: 978996 - RNA, 18 nt, Human
ggaaaaaaccauuuagug

SEQ ID NO: 978997 - RNA, 18 nt, Human
ggagcacugccaggggcc

SEQ ID NO: 978998 - RNA, 21 nt, Human
ggagggcaccuguagucccag

SEQ ID NO: 978999 - RNA, 18 nt, Human
ggcaacccuuccugaccc

SEQ ID NO: 979000 - RNA, 19 nt, Human
ggcaccuguagucccagcu

SEQ ID NO: 979001 - RNA, 20 nt, Human
ggcagcucggugggagcgcu

SEQ ID NO: 979002 - RNA, 25 nt, Human
ggccugggccaacuggccuggaagc

SEQ ID NO: 979003 - RNA, 21 nt, Human
ggcucaugccugucaucccag

SEQ ID NO: 979004 - RNA, 20 nt, Human
ggcugaggcaggagaagggc

SEQ ID NO: 979005 - RNA, 23 nt, Human
gggaggccgaggcagguggauca

SEQ ID NO: 979006 - RNA, 21 nt, Human
gggccccuccgggagcacugc

SEQ ID NO: 979007 - RNA, 24 nt, Human
ggggaggccgaggcagguggauca

SEQ ID NO: 979008 - RNA, 18 nt, Human
ggggccugggccaacugg

SEQ ID NO: 979009 - RNA, 24 nt, Human
gguggagggcaccuguagucccag

SEQ ID NO: 979010 - RNA, 24 nt, Human
gguggcucaugccugucaucccag

SEQ ID NO: 979011 - RNA, 19 nt, Human
gugaaagaaagaauagccc

SEQ ID NO: 979012 - RNA, 22 nt, Human
guggagggcaccuguaguccca

SEQ ID NO: 979013 - RNA, 22 nt, Human
uaacauggugaaacccugucuc

SEQ ID NO: 979014 - RNA, 24 nt, Human
uaacauggugaaacccugucucua

SEQ ID NO: 979015 - RNA, 23 nt, Human
uagaccaggcgugguggcucaug

SEQ ID NO: 979016 - RNA, 18 nt, Human
ucacgaggucaggagauc

SEQ ID NO: 979017 - RNA, 24 nt, Human
ucacgaggucaggagaucgagacc

SEQ ID NO: 979018 - RNA, 22 nt, Human
ucaugccugucaucccagcacu

SEQ ID NO: 979019 - RNA, 19 nt, Human
uccacucuccccacucccc

SEQ ID NO: 979020 - RNA, 22 nt, Human
uccauccacucuccccacuccc

SEQ ID NO: 979021 - RNA, 21 nt, Human
ucccuguggaggcgcagaggc

SEQ ID NO: 979022 - RNA, 23 nt, Human
ucgcaccacugcacuccagccug

SEQ ID NO: 979023 - RNA, 22 nt, Human
ucucuauuaaauauacaaaaaa

SEQ ID NO: 979024 - RNA, 22 nt, Human
ucugucucaaaaaaaaaaaaaa

SEQ ID NO: 979025 - RNA, 22 nt, Human
ugagccgagaucgcaccacugc

SEQ ID NO: 979026 - RNA, 24 nt, Human
ugaggcaggagaagggcgugaacc

SEQ ID NO: 979027 - RNA, 25 nt, Human
ugaggcaggagaagggcgugaaccc

SEQ ID NO: 979028 - RNA, 21 nt, Human
ugccaggggccugggccaacu

SEQ ID NO: 979029 - RNA, 21 nt, Human
uggagggcaccuguaguccca

SEQ ID NO: 979030 - RNA, 21 nt, Human
uggcucaugccugucauccca

SEQ ID NO: 979031 - RNA, 24 nt, Human
uggcucaugccugucaucccagca

SEQ ID NO: 979032 - RNA, 24 nt, Human
ugguggagggcaccuguaguccca

SEQ ID NO: 979033 - RNA, 24 nt, Human
ugguggcucaugccugucauccca

SEQ ID NO: 979034 - RNA, 23 nt, Human
uguagguuguuugcuauuucaga

SEQ ID NO: 979035 - RNA, 23 nt, Human
uucaaucuaguaacaaaaguaaa

SEQ ID NO: 979036 - RNA, 21 nt, Human
uuccugggccccuccgggagc

SEQ ID NO: 979037 - RNA, 18 nt, Human
uugcagugagccgagauc

SEQ ID NO: 979038 - RNA, 19 nt, Human
uugcagugagccgagaucg

SEQ ID NO: 979039 - RNA, 22 nt, Human
uugcagugagccgagaucgcac

SEQ ID NO: 979040 - RNA, 21 nt, Human
uuuaucagcaaacauguaggu

SEQ ID NO: 979041 - RNA, 20 nt, Human
uuugcacgugaaagaaagaa

SEQ ID NO: 979042 - RNA, 20 nt, Human
uuuggggaggccgaggcagg

SEQ ID NO: 979043 - RNA, 22 nt, Human
uuuuaaaaaguucauagaccag

SEQ ID NO: 979044 - RNA, 23 nt, Human
aaaaagaggcccagagcuguggg

SEQ ID NO: 979045 - RNA, 22 nt, Human
aaagaaaacgugaaaaggcaac

SEQ ID NO: 979046 - RNA, 26 nt, Human
aaaucaacuuuaaguaaagcagcugg

SEQ ID NO: 979047 - RNA, 22 nt, Human
aacgccauaaaaaaaaguuaaa

SEQ ID NO: 979048 - RNA, 21 nt, Human
aacgugaaaaggcaacaauaa

SEQ ID NO: 979049 - RNA, 19 nt, Human
aagaagcccccaucucccc

SEQ ID NO: 979050 - RNA, 24 nt, Human
aagaaggggaggcugagggaggac

SEQ ID NO: 979051 - RNA, 22 nt, Human
aagcagcugggaggagaggggg

SEQ ID NO: 979052 - RNA, 25 nt, Human
aagcagcugggaggagaggggggaa

SEQ ID NO: 979053 - RNA, 21 nt, Human
aagcugcucccacuucuucug

SEQ ID NO: 979054 - RNA, 18 nt, Human
aaggggaguuugggcagg

SEQ ID NO: 979055 - RNA, 18 nt, Human
aaguuacaguagcugcuc

SEQ ID NO: 979056 - RNA, 19 nt, Human
acacacacauaccccagag

SEQ ID NO: 979057 - RNA, 20 nt, Human
acacauaccccagagccacc

SEQ ID NO: 979058 - RNA, 21 nt, Human
acagcagugugaggaagaagc

SEQ ID NO: 979059 - RNA, 19 nt, Human
acccagaaucucccccaca

SEQ ID NO: 979060 - RNA, 24 nt, Human
accccaaacuggggcaagacagca

SEQ ID NO: 979061 - RNA, 22 nt, Human
acccugcucacugcaacuuggg

SEQ ID NO: 979062 - RNA, 19 nt, Human
acgcccucccaccccaacc

SEQ ID NO: 979063 - RNA, 24 nt, Human
agaccugagucccaagcuccccug

SEQ ID NO: 979064 - RNA, 21 nt, Human
agagggccccaacugcuuccu

SEQ ID NO: 979065 - RNA, 21 nt, Human
agcagcugggaggagaggggg

SEQ ID NO: 979066 - RNA, 24 nt, Human
agcuagucuccaggagaaagccca

SEQ ID NO: 979067 - RNA, 22 nt, Human
agcugcaugccugggacagcgc

SEQ ID NO: 979068 - RNA, 20 nt, Human
agcugcucacucccugggag

SEQ ID NO: 979069 - RNA, 19 nt, Human
aggagaggggggaagacaa

SEQ ID NO: 979070 - RNA, 20 nt, Human
aggagccccuggagguccaa

SEQ ID NO: 979071 - RNA, 19 nt, Human
aggcaggcaggcccauuuc

SEQ ID NO: 979072 - RNA, 21 nt, Human
aggccuguguguggggaggug

SEQ ID NO: 979073 - RNA, 23 nt, Human
aggcuggcaagagggccccaacu

SEQ ID NO: 979074 - RNA, 22 nt, Human
agggaaggggaguuugggcagg

SEQ ID NO: 979075 - RNA, 23 nt, Human
agggcucaguccuguggcugccc

SEQ ID NO: 979076 - RNA, 24 nt, Human
aggggcugggcaguuacagaccug

SEQ ID NO: 979077 - RNA, 22 nt, Human
agggggaggagggggguggggc

SEQ ID NO: 979078 - RNA, 19 nt, Human
agugaaacaagagcagaga

SEQ ID NO: 979079 - RNA, 28 nt, Human
caaacccagaaucucccccacacacugg

SEQ ID NO: 979080 - RNA, 20 nt, Human
caacuugggccccaggcagc

SEQ ID NO: 979081 - RNA, 20 nt, Human
cacacaacacacauuauaag

SEQ ID NO: 979082 - RNA, 23 nt, Human
cacacaacacacauuauaagcac

SEQ ID NO: 979083 - RNA, 24 nt, Human
cacacacacauaccccagagccac

SEQ ID NO: 979084 - RNA, 20 nt, Human
cacacacccacacacacaua

SEQ ID NO: 979085 - RNA, 24 nt, Human
cacacacccacacacacauacccc

SEQ ID NO: 979086 - RNA, 23 nt, Human
cacacauuauaagcacuuugccu

SEQ ID NO: 979087 - RNA, 23 nt, Human
cacacccacacacacauacccca

SEQ ID NO: 979088 - RNA, 24 nt, Human
cacacucacauucaagcacacaca

SEQ ID NO: 979089 - RNA, 18 nt, Human
cacagggcugaccugggg

SEQ ID NO: 979090 - RNA, 25 nt, Human
cacccacacacacauaccccagagc

SEQ ID NO: 979091 - RNA, 22 nt, Human
cacccauaagccccagcuaguc

SEQ ID NO: 979092 - RNA, 20 nt, Human
cacccccucccagaccccac

SEQ ID NO: 979093 - RNA, 21 nt, Human
cacccccucccagaccccacc

SEQ ID NO: 979094 - RNA, 21 nt, Human
cacccucaaggucuaccccaa

SEQ ID NO: 979095 - RNA, 19 nt, Human
cacccuccccaccccguug

SEQ ID NO: 979096 - RNA, 22 nt, Human
caccucaacucaucccugacac

SEQ ID NO: 979097 - RNA, 21 nt, Human
cacucaggcgcacacacccac

SEQ ID NO: 979098 - RNA, 19 nt, Human
cagacacagggcugaccug

SEQ ID NO: 979099 - RNA, 22 nt, Human
cagcaacagaaaugggaggugg

SEQ ID NO: 979100 - RNA, 23 nt, Human
cagcccuaaagggcaaaaagagg

SEQ ID NO: 979101 - RNA, 26 nt, Human
cagcgcccccuguccgucugcuaggg

SEQ ID NO: 979102 - RNA, 23 nt, Human
cagcuagucuccaggagaaagcc

SEQ ID NO: 979103 - RNA, 18 nt, Human
cagcugcaugccugggac

SEQ ID NO: 979104 - RNA, 25 nt, Human
caggagaaagcccagaaaggugacu

SEQ ID NO: 979105 - RNA, 22 nt, Human
caggguaaaagacccucccccc

SEQ ID NO: 979106 - RNA, 21 nt, Human
cauaaaaucuucccccauccc

SEQ ID NO: 979107 - RNA, 24 nt, Human
ccaaggccacgcucacacaacaca

SEQ ID NO: 979108 - RNA, 18 nt, Human
ccacgcucacacaacaca

SEQ ID NO: 979109 - RNA, 21 nt, Human
ccagccccacagaaggccugu

SEQ ID NO: 979110 - RNA, 21 nt, Human
cccacacacacauaccccaga

SEQ ID NO: 979111 - RNA, 25 nt, Human
cccacacacacauaccccagagcca

SEQ ID NO: 979112 - RNA, 19 nt, Human
cccacuucuucugaccccc

SEQ ID NO: 979113 - RNA, 20 nt, Human
cccacuucuucugaccccca

SEQ ID NO: 979114 - RNA, 24 nt, Human
cccagccccacagaaggccugugu

SEQ ID NO: 979115 - RNA, 19 nt, Human
cccaggggcccagccaguu

SEQ ID NO: 979116 - RNA, 23 nt, Human
cccagugcacaggcccagcuacu

SEQ ID NO: 979117 - RNA, 20 nt, Human
cccauaagccccagcuaguc

SEQ ID NO: 979118 - RNA, 23 nt, Human
cccauaagccccagcuagucucc

SEQ ID NO: 979119 - RNA, 25 nt, Human
cccauaagccccagcuagucuccaa

SEQ ID NO: 979120 - RNA, 25 nt, Human
ccccaaagggggaggaggggggugg

SEQ ID NO: 979121 - RNA, 18 nt, Human
ccccaggaaccugcccag

SEQ ID NO: 979122 - RNA, 20 nt, Human
cccccugaggggcagagcca

SEQ ID NO: 979123 - RNA, 23 nt, Human
ccccgccucccuccugcggcccg

SEQ ID NO: 979124 - RNA, 23 nt, Human
ccccuccagcaacagaaauggga

SEQ ID NO: 979125 - RNA, 18 nt, Human
ccccugaggggcagagcc

SEQ ID NO: 979126 - RNA, 22 nt, Human
ccccugaggggcagagccaggg

SEQ ID NO: 979127 - RNA, 20 nt, Human
ccccugcucucuggccccug

SEQ ID NO: 979128 - RNA, 20 nt, Human
cccggggccccugcacgccc

SEQ ID NO: 979129 - RNA, 23 nt, Human
cccuaugcuggcccacccucaag

SEQ ID NO: 979130 - RNA, 21 nt, Human
cccucccagaccccacccugc

SEQ ID NO: 979131 - RNA, 26 nt, Human
cccucccagaccccacccugcucacu

SEQ ID NO: 979132 - RNA, 21 nt, Human
cccuguggcccggguugcccc

SEQ ID NO: 979133 - RNA, 20 nt, Human
cccuguuucugaaaaagcuc

SEQ ID NO: 979134 - RNA, 20 nt, Human
ccgagacggcggguggaggg

SEQ ID NO: 979135 - RNA, 18 nt, Human
ccgcagccgccgccaucg

SEQ ID NO: 979136 - RNA, 24 nt, Human
ccgcagccgccgccaucggcuucc

SEQ ID NO: 979137 - RNA, 21 nt, Human
ccgcuaucgcugccgcggccg

SEQ ID NO: 979138 - RNA, 20 nt, Human
ccucccagaccccacccugc

SEQ ID NO: 979139 - RNA, 20 nt, Human
ccuccccgccucccuccugc

SEQ ID NO: 979140 - RNA, 28 nt, Human
ccugacgcccucccaccccaaccccgac

SEQ ID NO: 979141 - RNA, 19 nt, Human
ccugccucucacccccucc

SEQ ID NO: 979142 - RNA, 23 nt, Human
ccugccucucacccccucccaga

SEQ ID NO: 979143 - RNA, 26 nt, Human
cgcacacacccacacacacauacccc

SEQ ID NO: 979144 - RNA, 19 nt, Human
cgccaucggcuucccggcu

SEQ ID NO: 979145 - RNA, 18 nt, Human
cgcccccuguccgucugc

SEQ ID NO: 979146 - RNA, 22 nt, Human
cgcccgggccgaccugggcccu

SEQ ID NO: 979147 - RNA, 24 nt, Human
cgcccucccaccccaaccccgaca

SEQ ID NO: 979148 - RNA, 19 nt, Human
cgccucccuccugcggccc

SEQ ID NO: 979149 - RNA, 21 nt, Human
cgcgcgcagcgcccccugucc

SEQ ID NO: 979150 - RNA, 18 nt, Human
cgcugccgcggccgccgc

SEQ ID NO: 979151 - RNA, 19 nt, Human
cggcuucccggcucaaccc

SEQ ID NO: 979152 - RNA, 22 nt, Human
cguuggggaauggccugagggc

SEQ ID NO: 979153 - RNA, 24 nt, Human
cuagcaacagcccuaaagggcaaa

SEQ ID NO: 979154 - RNA, 23 nt, Human
cucccagaccccacccugcucac

SEQ ID NO: 979155 - RNA, 20 nt, Human
cuccccugcucucuggcccc

SEQ ID NO: 979156 - RNA, 22 nt, Human
cucucccuagcaacagcccuaa

SEQ ID NO: 979157 - RNA, 22 nt, Human
cugacacacgcauguccuccca

SEQ ID NO: 979158 - RNA, 19 nt, Human
cugccgcggccgccgcugc

SEQ ID NO: 979159 - RNA, 21 nt, Human
cugccugacgcccucccaccc

SEQ ID NO: 979160 - RNA, 19 nt, Human
cuggcccccugaggggcag

SEQ ID NO: 979161 - RNA, 21 nt, Human
cuggcggcggagggauccccc

SEQ ID NO: 979162 - RNA, 20 nt, Human
cuggggagccugagggcucc

SEQ ID NO: 979163 - RNA, 23 nt, Human
cuguccgucugcuagggcggcgc

SEQ ID NO: 979164 - RNA, 20 nt, Human
cuuggcaccccaaacugggg

SEQ ID NO: 979165 - RNA, 19 nt, Human
gaagacaagggggagaagg

SEQ ID NO: 979166 - RNA, 22 nt, Human
gacccagccugugacagacaca

SEQ ID NO: 979167 - RNA, 22 nt, Human
gaccuggggucagcaaggaggc

SEQ ID NO: 979168 - RNA, 24 nt, Human
gacgagaaaaacgccauaaaaaaa

SEQ ID NO: 979169 - RNA, 20 nt, Human
gagaagggaacgcugguggu

SEQ ID NO: 979170 - RNA, 19 nt, Human
gagaggggggaagacaagg

SEQ ID NO: 979171 - RNA, 21 nt, Human
gagcagagaaaaggggcuggg

SEQ ID NO: 979172 - RNA, 18 nt, Human
gaggagaggggggaagac

SEQ ID NO: 979173 - RNA, 18 nt, Human
gagggccccaacugcuuc

SEQ ID NO: 979174 - RNA, 21 nt, Human
gagucccaagcuccccugcuc

SEQ ID NO: 979175 - RNA, 23 nt, Human
gaugguggagugaaacaagagca

SEQ ID NO: 979176 - RNA, 24 nt, Human
gcaagacagcaaugaggguuagag

SEQ ID NO: 979177 - RNA, 22 nt, Human
gcaaggcagggcaggcggcccc

SEQ ID NO: 979178 - RNA, 21 nt, Human
gcacacacccacacacacaua

SEQ ID NO: 979179 - RNA, 23 nt, Human
gcacacacccacacacacauacc

SEQ ID NO: 979180 - RNA, 19 nt, Human
gcagcugcaugccugggac

SEQ ID NO: 979181 - RNA, 28 nt, Human
gcagggcaggcggccccaggaaccugcc

SEQ ID NO: 979182 - RNA, 25 nt, Human
gccacgcucacacaacacacauuau

SEQ ID NO: 979183 - RNA, 20 nt, Human
gcccgggccgaccugggccc

SEQ ID NO: 979184 - RNA, 18 nt, Human
gccgcugcgaacccgggg

SEQ ID NO: 979185 - RNA, 19 nt, Human
gccugugacagacacaggg

SEQ ID NO: 979186 - RNA, 24 nt, Human
gcgcccccuguccgucugcuaggg

SEQ ID NO: 979187 - RNA, 21 nt, Human
gcggccccaggaaccugccca

SEQ ID NO: 979188 - RNA, 19 nt, Human
gcugcaaugcccaugcgug

SEQ ID NO: 979189 - RNA, 21 nt, Human
ggacgggcagucagcgaggaa

SEQ ID NO: 979190 - RNA, 22 nt, Human
ggaggacagccccuccagcaac

SEQ ID NO: 979191 - RNA, 24 nt, Human
ggaggagaggggggaagacaaggg

SEQ ID NO: 979192 - RNA, 20 nt, Human
ggagguggggcgggaagaag

SEQ ID NO: 979193 - RNA, 19 nt, Human
ggcaggggcugcuggccgc

SEQ ID NO: 979194 - RNA, 23 nt, Human
ggcagucagcgaggaaucggagc

SEQ ID NO: 979195 - RNA, 25 nt, Human
ggcccagcuacucaggagcugaagg

SEQ ID NO: 979196 - RNA, 19 nt, Human
ggccccugauuugccaugc

SEQ ID NO: 979197 - RNA, 22 nt, Human
ggcgagggggucccaggaagga

SEQ ID NO: 979198 - RNA, 18 nt, Human
ggcucaguccuguggcug

SEQ ID NO: 979199 - RNA, 21 nt, Human
ggcucaguccuguggcugccc

SEQ ID NO: 979200 - RNA, 20 nt, Human
ggcuucccggcucaacccgg

SEQ ID NO: 979201 - RNA, 19 nt, Human
gggaagaaggggaggcuga

SEQ ID NO: 979202 - RNA, 22 nt, Human
gggaagaaggggaggcugaggg

SEQ ID NO: 979203 - RNA, 24 nt, Human
gggaaguagaaaccacugacauac

SEQ ID NO: 979204 - RNA, 21 nt, Human
gggaggcugagggaggacggg

SEQ ID NO: 979205 - RNA, 22 nt, Human
gggcaagacagcaaugaggguu

SEQ ID NO: 979206 - RNA, 21 nt, Human
gggcaggcggccccaggaacc

SEQ ID NO: 979207 - RNA, 20 nt, Human
gggcccagccaguucugggg

SEQ ID NO: 979208 - RNA, 21 nt, Human
ggggaauggccugagggcccc

SEQ ID NO: 979209 - RNA, 26 nt, Human
guccucccaaggccacgcucacacaa

SEQ ID NO: 979210 - RNA, 21 nt, Human
guccuguggcugcccguuccu

SEQ ID NO: 979211 - RNA, 27 nt, Human
gugcccagccccacagaaggccugugu

SEQ ID NO: 979212 - RNA, 23 nt, Human
guggagggggccgggaccacgcg

SEQ ID NO: 979213 - RNA, 23 nt, Human
guggagugaaacaagagcagaga

SEQ ID NO: 979214 - RNA, 25 nt, Human
uaaagggcaaaaagaggcccagagc

SEQ ID NO: 979215 - RNA, 22 nt, Human
uaacuaggcugugcauaaaauc

SEQ ID NO: 979216 - RNA, 21 nt, Human
uaagccccagcuagucuccag

SEQ ID NO: 979217 - RNA, 26 nt, Human
uaaguaaagcagcugggaggagaggg

SEQ ID NO: 979218 - RNA, 19 nt, Human
uaaguggugccaucccuug

SEQ ID NO: 979219 - RNA, 19 nt, Human
uaccccaaagggggaggag

SEQ ID NO: 979220 - RNA, 19 nt, Human
uaccccagagccaccgagg

SEQ ID NO: 979221 - RNA, 23 nt, Human
uauauuuauagauuuguuuucac

SEQ ID NO: 979222 - RNA, 21 nt, Human
ucaaaggucuccuccccaugg

SEQ ID NO: 979223 - RNA, 22 nt, Human
ucaaaggucuccuccccauggg

SEQ ID NO: 979224 - RNA, 22 nt, Human
ucacugcaacuugggccccagg

SEQ ID NO: 979225 - RNA, 22 nt, Human
ucccaggaaggaggacagcccc

SEQ ID NO: 979226 - RNA, 22 nt, Human
ucccaggaaggaggacagcccc

SEQ ID NO: 979227 - RNA, 22 nt, Human
uccccaggggcccagccaguuc

SEQ ID NO: 979228 - RNA, 18 nt, Human
ucccccggcuuucuccug

SEQ ID NO: 979229 - RNA, 19 nt, Human
ucccccggcuuucuccugg

SEQ ID NO: 979230 - RNA, 19 nt, Human
ucccccggggggcaggggc

SEQ ID NO: 979231 - RNA, 25 nt, Human
uccccgccucccuccugcggccccc

SEQ ID NO: 979232 - RNA, 21 nt, Human
uccccugcucucuggccccug

SEQ ID NO: 979233 - RNA, 18 nt, Human
ucccgcugcugcuagugc

SEQ ID NO: 979234 - RNA, 18 nt, Human
ucccucuucccucucccu

SEQ ID NO: 979235 - RNA, 18 nt, Human
uccuccccgccucccucc

SEQ ID NO: 979236 - RNA, 22 nt, Human
uccugccucucacccccuccca

SEQ ID NO: 979237 - RNA, 19 nt, Human
ucucccucuucccucuccc

SEQ ID NO: 979238 - RNA, 19 nt, Human
ucugacccccauuccugcc

SEQ ID NO: 979239 - RNA, 20 nt, Human
ucuggggagccugagggcuc

SEQ ID NO: 979240 - RNA, 22 nt, Human
ucuuuggcuggagugagagggc

SEQ ID NO: 979241 - RNA, 25 nt, Human
ugaaacaagagcagagaagggaggc

SEQ ID NO: 979242 - RNA, 18 nt, Human
ugaagggggagaggacag

SEQ ID NO: 979243 - RNA, 24 nt, Human
ugacccccauuccugccucucacc

SEQ ID NO: 979244 - RNA, 23 nt, Human
ugacgcccucccaccccaacccc

SEQ ID NO: 979245 - RNA, 21 nt, Human
ugacuuccaucuuggcacccc

SEQ ID NO: 979246 - RNA, 18 nt, Human
ugagagggcucaguccug

SEQ ID NO: 979247 - RNA, 18 nt, Human
ugagggaggacgggugga

SEQ ID NO: 979248 - RNA, 19 nt, Human
ugauacauuuauugaaaga

SEQ ID NO: 979249 - RNA, 22 nt, Human
ugauucacucacugggucugau

SEQ ID NO: 979250 - RNA, 22 nt, Human
ugcacaggcccagcuacucagg

SEQ ID NO: 979251 - RNA, 25 nt, Human
ugcauaaaaucuucccccaucccuu

SEQ ID NO: 979252 - RNA, 23 nt, Human
ugccaugccccagccuugaaagc

SEQ ID NO: 979253 - RNA, 18 nt, Human
ugccccagccuugaaagc

SEQ ID NO: 979254 - RNA, 20 nt, Human
ugccccaggccgcgcgcagc

SEQ ID NO: 979255 - RNA, 20 nt, Human
ugcccguuccuccuccccgc

SEQ ID NO: 979256 - RNA, 20 nt, Human
ugccucugccugacgcccuc

SEQ ID NO: 979257 - RNA, 19 nt, Human
ugccugauucacucacugg

SEQ ID NO: 979258 - RNA, 19 nt, Human
ugccugggacagcgcaagg

SEQ ID NO: 979259 - RNA, 23 nt, Human
uggaggcaggcaggcccauuucu

SEQ ID NO: 979260 - RNA, 19 nt, Human
uggagugaaacaagagcag

SEQ ID NO: 979261 - RNA, 21 nt, Human
uggcccacccucaaggucuac

SEQ ID NO: 979262 - RNA, 23 nt, Human
uggccccugauuugccaugcccc

SEQ ID NO: 979263 - RNA, 18 nt, Human
ugggacagcgcaaggcug

SEQ ID NO: 979264 - RNA, 18 nt, Human
ugggagguggggcgggaa

SEQ ID NO: 979265 - RNA, 24 nt, Human
ugggcaaacccagaaucuccccca

SEQ ID NO: 979266 - RNA, 19 nt, Human
ugggcaguuacagaccuga

SEQ ID NO: 979267 - RNA, 22 nt, Human
ugggccaucuguccagggcggc

SEQ ID NO: 979268 - RNA, 23 nt, Human
uggggcgggaagaaggggaggcu

SEQ ID NO: 979269 - RNA, 21 nt, Human
uggggucagcaaggaggcugg

SEQ ID NO: 979270 - RNA, 19 nt, Human
uggugguucccuccaaccc

SEQ ID NO: 979271 - RNA, 20 nt, Human
uguccagggcggcgggcgga

SEQ ID NO: 979272 - RNA, 18 nt, Human
ugugaggaagaagccccc

SEQ ID NO: 979273 - RNA, 19 nt, Human
uguguggggagguggggca

SEQ ID NO: 979274 - RNA, 29 nt, Human
uucccccaucccuucaccuaaucacagaa

SEQ ID NO: 979275 - RNA, 23 nt, Human
uuccugccccuguggcccggguu

SEQ ID NO: 979276 - RNA, 24 nt, Human
uuuauugaaagaguauuuuuuuuu

SEQ ID NO: 979277 - RNA, 27 nt, Human
uuucaccccacugcugcccuguuucug

SEQ ID NO: 979278 - RNA, 18 nt, Human
uuucuggcuccccuuugg

SEQ ID NO: 979279 - RNA, 19 nt, Human
uuuggcuggagugagaggg

SEQ ID NO: 979280 - RNA, 20 nt, Human
uuuggucucccucuucccuc

SEQ ID NO: 979281 - RNA, 18 nt, Human
aagcggcggcgaggaggc

SEQ ID NO: 979282 - RNA, 19 nt, Human
aagcggcggcgaggaggcu

SEQ ID NO: 979283 - RNA, 19 nt, Human
acccaguucgcaucuggaa

SEQ ID NO: 979284 - RNA, 19 nt, Human
acccugaaaccugcccagg

SEQ ID NO: 979285 - RNA, 21 nt, Human
acccugaaaccugcccaggcu

SEQ ID NO: 979286 - RNA, 21 nt, Human
acccugaaaccugcccaggcu

SEQ ID NO: 979287 - RNA, 18 nt, Human
accuccacccccugcccc

SEQ ID NO: 979288 - RNA, 19 nt, Human
accuccacccccugccccu

SEQ ID NO: 979289 - RNA, 22 nt, Human
agaagugcugcucuuucagaug

SEQ ID NO: 979290 - RNA, 22 nt, Human
agaagugcugcucuuucagaug

SEQ ID NO: 979291 - RNA, 19 nt, Human
agacugggcugggccagag

SEQ ID NO: 979292 - RNA, 19 nt, Human
agacugggcugggccagag

SEQ ID NO: 979293 - RNA, 18 nt, Human
agaggaagcggcggcgag

SEQ ID NO: 979294 - RNA, 20 nt, Human
aggcaguccccucggguggg

SEQ ID NO: 979295 - RNA, 21 nt, Human
caagcgucguccacaggccuu

SEQ ID NO: 979296 - RNA, 22 nt, Human
caauccaccggggaaaggccac

SEQ ID NO: 979297 - RNA, 22 nt, Human
caggccggugaccccaaccucc

SEQ ID NO: 979298 - RNA, 22 nt, Human
caggccggugaccccaaccucc

SEQ ID NO: 979299 - RNA, 20 nt, Human
ccaagcaggccggugacccc

SEQ ID NO: 979300 - RNA, 20 nt, Human
ccaagcaggccggugacccc

SEQ ID NO: 979301 - RNA, 18 nt, Human
ccacaggccuuggccagc

SEQ ID NO: 979302 - RNA, 18 nt, Human
ccacaggccuuggccagc

SEQ ID NO: 979303 - RNA, 21 nt, Human
cccacuggcacccugaaaccu

SEQ ID NO: 979304 - RNA, 21 nt, Human
cccacuggcacccugaaaccu

SEQ ID NO: 979305 - RNA, 21 nt, Human
ccccaaccuccacccccugcc

SEQ ID NO: 979306 - RNA, 21 nt, Human
ccccaaccuccacccccugcc

SEQ ID NO: 979307 - RNA, 23 nt, Human
ccccaaccuccacccccugcccc

SEQ ID NO: 979308 - RNA, 23 nt, Human
ccccaaccuccacccccugcccc

SEQ ID NO: 979309 - RNA, 23 nt, Human
cccgccccgcgccuucucgagag

SEQ ID NO: 979310 - RNA, 18 nt, Human
cccugaaaccugcccagg

SEQ ID NO: 979311 - RNA, 20 nt, Human
cgccgcgggcucgaccgccc

SEQ ID NO: 979312 - RNA, 20 nt, Human
cgccgcgggcucgaccgccc

SEQ ID NO: 979313 - RNA, 19 nt, Human
cggccggggcgcugcgcgg

SEQ ID NO: 979314 - RNA, 23 nt, Human
cggcggcgaggaggcuuccggcc

SEQ ID NO: 979315 - RNA, 24 nt, Human
cuuuaauagcugagaagugcugcu

SEQ ID NO: 979316 - RNA, 23 nt, Human
gagaagugcugcucuuucagaug

SEQ ID NO: 979317 - RNA, 21 nt, Human
gccaagcaggccggugacccc

SEQ ID NO: 979318 - RNA, 21 nt, Human
gccaagcaggccggugacccc

SEQ ID NO: 979319 - RNA, 24 nt, Human
gcccgccccgcgccuucucgagag

SEQ ID NO: 979320 - RNA, 26 nt, Human
gggccagagaccaauccaccggggaa

SEQ ID NO: 979321 - RNA, 25 nt, Human
gggccagagaccaauccacggggga

SEQ ID NO: 979322 - RNA, 21 nt, Human
gugaccccaaccuccaccccc

SEQ ID NO: 979323 - RNA, 21 nt, Human
gugaccccaaccuccaccccc

SEQ ID NO: 979324 - RNA, 22 nt, Human
gugaccccaaccuccacccccu

SEQ ID NO: 979325 - RNA, 19 nt, Human
uaggaccucgccaucuccc

SEQ ID NO: 979326 - RNA, 24 nt, Human
uccacaggccuuggccagcggggg

SEQ ID NO: 979327 - RNA, 24 nt, Human
uccacaggccuuggccagcggggg

SEQ ID NO: 979328 - RNA, 23 nt, Human
uccagggggccuuuaauagcuga

SEQ ID NO: 979329 - RNA, 23 nt, Human
uccagggggccuuuaauagcuga

SEQ ID NO: 979330 - RNA, 18 nt, Human
uccucuaggaccucgcca

SEQ ID NO: 979331 - RNA, 23 nt, Human
ucucugggucguucuuugguuac

SEQ ID NO: 979332 - RNA, 26 nt, Human
ucuuuuuuuuuuuuuucuauccaggg

SEQ ID NO: 979333 - RNA, 18 nt, Human
ugccaagcaggccgguga

SEQ ID NO: 979334 - RNA, 18 nt, Human
ugccaagcaggccgguga

SEQ ID NO: 979335 - RNA, 21 nt, Human
ugcccaggcugggccgcaagc

SEQ ID NO: 979336 - RNA, 21 nt, Human
ugcccaggcugggccgccagc

SEQ ID NO: 979337 - RNA, 18 nt, Human
uggaaggccaggcagucc

SEQ ID NO: 979338 - RNA, 18 nt, Human
uggccggcugggaagcgc

SEQ ID NO: 979339 - RNA, 21 nt, Human
ugggccagagaccaauccacc

SEQ ID NO: 979340 - RNA, 23 nt, Human
uuuaauagcugagaagugcugcu

SEQ ID NO: 979341 - RNA, 19 nt, Human
aaaauacacuuucccccca

SEQ ID NO: 979342 - RNA, 23 nt, Human
aaacagaagaaaaucuaaagcaa

SEQ ID NO: 979343 - RNA, 24 nt, Human
aaacauauaaugauuuccacaaaa

SEQ ID NO: 979344 - RNA, 23 nt, Human
aagaaagcugggagcagacagac

SEQ ID NO: 979345 - RNA, 21 nt, Human
aagacaccgcuaaagccgugg

SEQ ID NO: 979346 - RNA, 20 nt, Human
aagcaaacauauaaugauua

SEQ ID NO: 979347 - RNA, 24 nt, Human
aagcaaacauauaaugauuuccac

SEQ ID NO: 979348 - RNA, 25 nt, Human
aagcaagaaaaauacacuuuccccc

SEQ ID NO: 979349 - RNA, 19 nt, Human
aagcugggagcagacagac

SEQ ID NO: 979350 - RNA, 19 nt, Human
aaggaaagagugcaugaua

SEQ ID NO: 979351 - RNA, 21 nt, Human
aaggaaggaaaaagaaaagga

SEQ ID NO: 979352 - RNA, 19 nt, Human
acgucgucaacucccacca

SEQ ID NO: 979353 - RNA, 18 nt, Human
acuacugaccaggacugu

SEQ ID NO: 979354 - RNA, 23 nt, Human
acuuugaaguuuauuuuacagca

SEQ ID NO: 979355 - RNA, 21 nt, Human
agaagaaaaggaaagagugca

SEQ ID NO: 979356 - RNA, 25 nt, Human
agcaagaaaaauacacuuucccccc

SEQ ID NO: 979357 - RNA, 20 nt, Human
aggaaggaaaaagaaaagga

SEQ ID NO: 979358 - RNA, 18 nt, Human
agguaugaccccacaacc

SEQ ID NO: 979359 - RNA, 20 nt, Human
augauaagcaagaaaaauac

SEQ ID NO: 979360 - RNA, 18 nt, Human
augcaaugcuuggccuuc

SEQ ID NO: 979361 - RNA, 22 nt, Human
caaaagacaccgcuaaagccgu

SEQ ID NO: 979362 - RNA, 21 nt, Human
cacaacccaacuucccgaacu

SEQ ID NO: 979363 - RNA, 19 nt, Human
cacgucgucaacucccacc

SEQ ID NO: 979364 - RNA, 18 nt, Human
cagaagaaaaucuaaagc

SEQ ID NO: 979365 - RNA, 20 nt, Human
ccacaacccaacuucccgaa

SEQ ID NO: 979366 - RNA, 21 nt, Human
ccagcaccacgucgucaacuc

SEQ ID NO: 979367 - RNA, 22 nt, Human
cccaagaaagcugggagcagac

SEQ ID NO: 979368 - RNA, 21 nt, Human
cccacaacccaacuucccgaa

SEQ ID NO: 979369 - RNA, 27 nt, Human
cccacgccgucggaagaaacccaagaa

SEQ ID NO: 979370 - RNA, 25 nt, Human
ccguggcccugaggggccgggaauu

SEQ ID NO: 979371 - RNA, 23 nt, Human
cgaagaacucgcaaaagacaccg

SEQ ID NO: 979372 - RNA, 21 nt, Human
cgccgucggaagaaacccaag

SEQ ID NO: 979373 - RNA, 23 nt, Human
cggaagaaacccaagaaagcugg

SEQ ID NO: 979374 - RNA, 18 nt, Human
gaaaaagaaaaggagggg

SEQ ID NO: 979375 - RNA, 21 nt, Human
gaaggaaggaaaaagaaaagg

SEQ ID NO: 979376 - RNA, 26 nt, Human
gaaggaaggaaaaagaaaaggagggg

SEQ ID NO: 979377 - RNA, 21 nt, Human
gaccccacaacccaacuuccc

SEQ ID NO: 979378 - RNA, 18 nt, Human
gagaagaaaaggaaagag

SEQ ID NO: 979379 - RNA, 21 nt, Human
gagauaauuaaaaaccuuuaa

SEQ ID NO: 979380 - RNA, 20 nt, Human
gauggugaaaacagaagaaa

SEQ ID NO: 979381 - RNA, 19 nt, Human
ggcgagaagaaaaggaaag

SEQ ID NO: 979382 - RNA, 24 nt, Human
uaaagcaaacauauaaugauuucc

SEQ ID NO: 979383 - RNA, 20 nt, Human
uagcgaggccccacgccguc

SEQ ID NO: 979384 - RNA, 23 nt, Human
uagguauucaacugagucaguuu

SEQ ID NO: 979385 - RNA, 23 nt, Human
uaugaccccacaacccaacuucc

SEQ ID NO: 979386 - RNA, 22 nt, Human
ugaaaacagaagaaaaucuaaa

SEQ ID NO: 979387 - RNA, 19 nt, Human
ugaccccacaacccaacuu

SEQ ID NO: 979388 - RNA, 20 nt, Human
ugaccccacaacccaacuuc

SEQ ID NO: 979389 - RNA, 24 nt, Human
ugauaagcaagaaaaauacacuuu

SEQ ID NO: 979390 - RNA, 26 nt, Human
ugauaagcaagaaaaauacacuuucc

SEQ ID NO: 979391 - RNA, 19 nt, Human
uguuaugauggugaaaaca

SEQ ID NO: 979392 - RNA, 23 nt, Human
uuuccacaaaaaccauguauuuc

SEQ ID NO: 979393 - RNA, 20 nt, Human
uuucucccuuauauuaaagg

SEQ ID NO: 979394 - RNA, 21 nt, Human
aaaguacuuucugucccaaca

SEQ ID NO: 979395 - RNA, 21 nt, Human
aacuaauccauagcccuucug

SEQ ID NO: 979396 - RNA, 19 nt, Human
aagacagaaaaugggcagg

SEQ ID NO: 979397 - RNA, 23 nt, Human
acaccuugguuaauuaaagacag

SEQ ID NO: 979398 - RNA, 18 nt, Human
acaugccaaaauucauau

SEQ ID NO: 979399 - RNA, 18 nt, Human
agacagaaaaugggcagg

SEQ ID NO: 979400 - RNA, 18 nt, Human
agaguggaaaaguaaaga

SEQ ID NO: 979401 - RNA, 19 nt, Human
aguaaagagaagcaaggcc

SEQ ID NO: 979402 - RNA, 23 nt, Human
auaaggcaaagcauacuuguuag

SEQ ID NO: 979403 - RNA, 28 nt, Human
cacaacagcauacauuuuaugcuccaaa

SEQ ID NO: 979404 - RNA, 20 nt, Human
caguucaaacuaauccauag

SEQ ID NO: 979405 - RNA, 19 nt, Human
ccucuaagcuucugaacag

SEQ ID NO: 979406 - RNA, 22 nt, Human
ccucuaagcuucugaacagccc

SEQ ID NO: 979407 - RNA, 24 nt, Human
ccucuaagcuucugaacagcccac

SEQ ID NO: 979408 - RNA, 22 nt, Human
cucaacaagcugauacuacaaa

SEQ ID NO: 979409 - RNA, 21 nt, Human
cugaaaacauuugcaucccua

SEQ ID NO: 979410 - RNA, 27 nt, Human
cugauacuacaaaucccuuauauuaac

SEQ ID NO: 979411 - RNA, 21 nt, Human
gaaaaguaaagagaagcaagg

SEQ ID NO: 979412 - RNA, 25 nt, Human
ggaaaaguaaagagaagccgguacc

SEQ ID NO: 979413 - RNA, 23 nt, Human
gggcaggggugucacagaaguau

SEQ ID NO: 979414 - RNA, 20 nt, Human
gguuacauuuaauguucuuc

SEQ ID NO: 979415 - RNA, 19 nt, Human
uaaagacagaaaaugggca

SEQ ID NO: 979416 - RNA, 21 nt, Human
uaacaguugugacagucacac

SEQ ID NO: 979417 - RNA, 23 nt, Human
uaacugcugcuucugaucacuga

SEQ ID NO: 979418 - RNA, 22 nt, Human
uaaguacacgacaaagucuuca

SEQ ID NO: 979419 - RNA, 19 nt, Human
uacacaguauguauaacaa

SEQ ID NO: 979420 - RNA, 21 nt, Human
uacagauggaaaauauguagu

SEQ ID NO: 979421 - RNA, 20 nt, Human
uacauuuuaugcuccaaaau

SEQ ID NO: 979422 - RNA, 24 nt, Human
uagcccuucugagaaacuacagau

SEQ ID NO: 979423 - RNA, 21 nt, Human
uagucacaauuacuuucagau

SEQ ID NO: 979424 - RNA, 21 nt, Human
uaguuuacuggaaaacauaac

SEQ ID NO: 979425 - RNA, 25 nt, Human
uauaauugagacuacacugcuauac

SEQ ID NO: 979426 - RNA, 25 nt, Human
uauacaaaacauauuucaauguagu

SEQ ID NO: 979427 - RNA, 19 nt, Human
ucacagaaguaugcaagga

SEQ ID NO: 979428 - RNA, 23 nt, Human
ucagaacccggcccaacaaacua

SEQ ID NO: 979429 - RNA, 28 nt, Human
ucuccaguuucuaagacagaugcauuuc

SEQ ID NO: 979430 - RNA, 21 nt, Human
ugaaauacaaauauaauuauc

SEQ ID NO: 979431 - RNA, 23 nt, Human
ugacagucacaccuaacaccuug

SEQ ID NO: 979432 - RNA, 24 nt, Human
ugcuccaaaauacauggaucugac

SEQ ID NO: 979433 - RNA, 21 nt, Human
uggaaaaguaaagagaagcaa

SEQ ID NO: 979434 - RNA, 18 nt, Human
uguucaauuuccaaaagu

SEQ ID NO: 979435 - RNA, 20 nt, Human
uuuaaauguggaaauaaggc

SEQ ID NO: 979436 - RNA, 20 nt, Human
aaaaaaaaacaagaucuaga

SEQ ID NO: 979437 - RNA, 19 nt, Human
aaaaaagacaguagcuuaa

SEQ ID NO: 979438 - RNA, 21 nt, Human
aaaaaauaacgaaccaaccaa

SEQ ID NO: 979439 - RNA, 21 nt, Human
aaaacaaaacaaaacaagacc

SEQ ID NO: 979440 - RNA, 23 nt, Human
aaaacaaaacaagaccaacaaaa

SEQ ID NO: 979441 - RNA, 22 nt, Human
aaaacagcugaaaacccaaagu

SEQ ID NO: 979442 - RNA, 22 nt, Human
aaacaaaacaaaacaagaccaa

SEQ ID NO: 979443 - RNA, 25 nt, Human
aaacaaaacaaaacaagaccaacaa

SEQ ID NO: 979444 - RNA, 19 nt, Human
aaacaaaacaagaccaaca

SEQ ID NO: 979445 - RNA, 21 nt, Human
aaacaaaacaagaccaacaaa

SEQ ID NO: 979446 - RNA, 19 nt, Human
aaacagacaaugcccucag

SEQ ID NO: 979447 - RNA, 25 nt, Human
aaagaaucagaaucucaagaucuau

SEQ ID NO: 979448 - RNA, 18 nt, Human
aaagcaggggacuguuug

SEQ ID NO: 979449 - RNA, 18 nt, Human
aaauaaaacaaaacaacc

SEQ ID NO: 979450 - RNA, 23 nt, Human
aacaaaacaaaacaagaccaaca

SEQ ID NO: 979451 - RNA, 22 nt, Human
aacaaaacaaccaaccaaaaua

SEQ ID NO: 979452 - RNA, 18 nt, Human
aacaacagaaacagucca

SEQ ID NO: 979453 - RNA, 22 nt, Human
aacaacagaaacaguccaggaa

SEQ ID NO: 979454 - RNA, 27 nt, Human
aacaacagaaacaguccaggaagauga

SEQ ID NO: 979455 - RNA, 19 nt, Human
aacaagaccaacaaaaaaa

SEQ ID NO: 979456 - RNA, 19 nt, Human
aacaagaucuagaaacucu

SEQ ID NO: 979457 - RNA, 22 nt, Human
aacacagagaacaacagaaaca

SEQ ID NO: 979458 - RNA, 24 nt, Human
aaccaaaaaacaaaacaaaacaag

SEQ ID NO: 979459 - RNA, 22 nt, Human
aaccaaccaaccaaaaaacaaa

SEQ ID NO: 979460 - RNA, 19 nt, Human
aagaagcggcugugacccc

SEQ ID NO: 979461 - RNA, 20 nt, Human
aagacauacaggaaaggacu

SEQ ID NO: 979462 - RNA, 18 nt, Human
aagcaaacccaaaugaac

SEQ ID NO: 979463 - RNA, 24 nt, Human
aagcaaacccaaaugaacauguug

SEQ ID NO: 979464 - RNA, 23 nt, Human
aagcauuuccaaaaugaaguuac

SEQ ID NO: 979465 - RNA, 22 nt, Human
acaaaaaaaagugccaucccac

SEQ ID NO: 979466 - RNA, 26 nt, Human
acaaaacaaaacaagaccaacaaaaa

SEQ ID NO: 979467 - RNA, 19 nt, Human
acaagaccaacaaaaaaaa

SEQ ID NO: 979468 - RNA, 18 nt, Human
acccugaaaagggaagag

SEQ ID NO: 979469 - RNA, 20 nt, Human
accuggaagaucaagaucuc

SEQ ID NO: 979470 - RNA, 19 nt, Human
agaaaacagacaaugcccu

SEQ ID NO: 979471 - RNA, 20 nt, Human
agaaaacagacaaugcccuc

SEQ ID NO: 979472 - RNA, 26 nt, Human
agaacaacagaaacaguccaggaaga

SEQ ID NO: 979473 - RNA, 19 nt, Human
agaauuccuguaauuccac

SEQ ID NO: 979474 - RNA, 26 nt, Human
agagaacaacagaaacaguccaggaa

SEQ ID NO: 979475 - RNA, 19 nt, Human
agagcccaaccaaggccaa

SEQ ID NO: 979476 - RNA, 18 nt, Human
agcuguacaugaaagcag

SEQ ID NO: 979477 - RNA, 24 nt, Human
auacaaaaacaaaaaauaaaacaa

SEQ ID NO: 979478 - RNA, 23 nt, Human
augcagcccggacacagcaaguu

SEQ ID NO: 979479 - RNA, 24 nt, Human
auggcuguggggaucuccacaggg

SEQ ID NO: 979480 - RNA, 22 nt, Human
caaaaaaaagugccaucccacc

SEQ ID NO: 979481 - RNA, 24 nt, Human
caaaaaacaaaacaaaacaagacc

SEQ ID NO: 979482 - RNA, 22 nt, Human
caaaaaauaaaacaaaacaacc

SEQ ID NO: 979483 - RNA, 23 nt, Human
caaaacaaaacaagaccaacaaa

SEQ ID NO: 979484 - RNA, 25 nt, Human
caaaacaaccaaccaaaauaacucu

SEQ ID NO: 979485 - RNA, 24 nt, Human
caaagaaaacagacaaugcccuca

SEQ ID NO: 979486 - RNA, 19 nt, Human
caaccaaaaaacaaaacaa

SEQ ID NO: 979487 - RNA, 25 nt, Human
caaccaaaaaacaaaacaaaacaag

SEQ ID NO: 979488 - RNA, 26 nt, Human
caaccaaaaaacaaaacaaaacaaga

SEQ ID NO: 979489 - RNA, 23 nt, Human
caaccaaccaaaauaacucuggu

SEQ ID NO: 979490 - RNA, 24 nt, Human
caagaccaacaaaaaaaagugcca

SEQ ID NO: 979491 - RNA, 26 nt, Human
caagaccaacaaaaaaaagugccauc

SEQ ID NO: 979492 - RNA, 22 nt, Human
caccccuccccuugguucuuuc

SEQ ID NO: 979493 - RNA, 20 nt, Human
cacccugaaaagggaagagg

SEQ ID NO: 979494 - RNA, 21 nt, Human
cagagcccaaccaaggccaaa

SEQ ID NO: 979495 - RNA, 26 nt, Human
cagcugccuauuuccacaucuuucaa

SEQ ID NO: 979496 - RNA, 18 nt, Human
ccaaaaugaaguuacagg

SEQ ID NO: 979497 - RNA, 21 nt, Human
ccaaccaaaaaacaaaacaaa

SEQ ID NO: 979498 - RNA, 22 nt, Human
ccaaccaaccaaaaaacaaaac

SEQ ID NO: 979499 - RNA, 24 nt, Human
ccaaccaaccaaaaaacaaaacaa

SEQ ID NO: 979500 - RNA, 19 nt, Human
ccuggaagaucaagaucua

SEQ ID NO: 979501 - RNA, 19 nt, Human
cuggucuuaggguaauaga

SEQ ID NO: 979502 - RNA, 20 nt, Human
cuggucuuaggguaauagaa

SEQ ID NO: 979503 - RNA, 22 nt, Human
gaaaaagcuguacaugaaagca

SEQ ID NO: 979504 - RNA, 22 nt, Human
gaaaacccaaaguggauuagaa

SEQ ID NO: 979505 - RNA, 21 nt, Human
gaaaagggaagaggaaaaugc

SEQ ID NO: 979506 - RNA, 19 nt, Human
gauguaaaaacagcugaaa

SEQ ID NO: 979507 - RNA, 24 nt, Human
gcaaacccaaaugaacauguugga

SEQ ID NO: 979508 - RNA, 23 nt, Human
gcaggaaaaaaugugaacacaga

SEQ ID NO: 979509 - RNA, 20 nt, Human
gcauuuacaaagaaaacaga

SEQ ID NO: 979510 - RNA, 18 nt, Human
ggaaaggacuguuuauag

SEQ ID NO: 979511 - RNA, 22 nt, Human
ggaagagcuucacccugaaaag

SEQ ID NO: 979512 - RNA, 21 nt, Human
gggaaagcucugaaacccaga

SEQ ID NO: 979513 - RNA, 24 nt, Human
ggggacuguuuggaaaagaaucag

SEQ ID NO: 979514 - RNA, 26 nt, Human
gguaauagaagacauacaggaaagga

SEQ ID NO: 979515 - RNA, 23 nt, Human
guaaaaacagcugaaaacccaaa

SEQ ID NO: 979516 - RNA, 21 nt, Human
gucagugugugaucucugcug

SEQ ID NO: 979517 - RNA, 22 nt, Human
uaaaacaaaaaagccucaagua

SEQ ID NO: 979518 - RNA, 25 nt, Human
uaaaaugguacccaaauuugguguu

SEQ ID NO: 979519 - RNA, 22 nt, Human
uaagcaaacccaaaugaacaug

SEQ ID NO: 979520 - RNA, 23 nt, Human
uagaagauaauucaguucuaguc

SEQ ID NO: 979521 - RNA, 19 nt, Human
uauguagggaaauagcagc

SEQ ID NO: 979522 - RNA, 19 nt, Human
ucaacuguuaaaauagggc

SEQ ID NO: 979523 - RNA, 23 nt, Human
ucaaguugcaccucuguggcuuu

SEQ ID NO: 979524 - RNA, 25 nt, Human
ucaaucaugucaaaauuaugguuaa

SEQ ID NO: 979525 - RNA, 19 nt, Human
ucaguauuacuuacuggag

SEQ ID NO: 979526 - RNA, 21 nt, Human
ucauccugauccuuuaguuau

SEQ ID NO: 979527 - RNA, 20 nt, Human
uccaugcugaagaagcggcu

SEQ ID NO: 979528 - RNA, 23 nt, Human
uccccaaggcccacuugguccau

SEQ ID NO: 979529 - RNA, 21 nt, Human
uccuaaaaaaaaaauugcaaa

SEQ ID NO: 979530 - RNA, 20 nt, Human
uccuuugucacuguggugga

SEQ ID NO: 979531 - RNA, 23 nt, Human
ucgagaacgcugcaauccccaag

SEQ ID NO: 979532 - RNA, 21 nt, Human
ucuacaggaacaugucugauu

SEQ ID NO: 979533 - RNA, 22 nt, Human
ucugaaacccagaucuccguuc

SEQ ID NO: 979534 - RNA, 22 nt, Human
ucugcuguggugcugggcaggg

SEQ ID NO: 979535 - RNA, 19 nt, Human
ugaaagcaggggacuguuu

SEQ ID NO: 979536 - RNA, 21 nt, Human
ugagaaaaucagaaaggcaaa

SEQ ID NO: 979537 - RNA, 21 nt, Human
ugaguaaagugccagccaugg

SEQ ID NO: 979538 - RNA, 23 nt, Human
ugcaaugaguaaagugccagcca

SEQ ID NO: 979539 - RNA, 23 nt, Human
ugcuugaaggggaagggcggagg

SEQ ID NO: 979540 - RNA, 21 nt, Human
ugcuuuagauguaaaaacagc

SEQ ID NO: 979541 - RNA, 22 nt, Human
ugguggcuugcuagcagagccu

SEQ ID NO: 979542 - RNA, 25 nt, Human
ugugaacacagagaacaacagaaac

SEQ ID NO: 979543 - RNA, 19 nt, Human
ugugguggauaaaugacaa

SEQ ID NO: 979544 - RNA, 19 nt, Human
uuaagacccuuucccccuc

SEQ ID NO: 979545 - RNA, 21 nt, Human
uuccacaauugugauuuuacu

SEQ ID NO: 979546 - RNA, 19 nt, Human
uugcaaagucuuuucucaa

SEQ ID NO: 979547 - RNA, 20 nt, Human
uugcaccucuguggcuuucc

SEQ ID NO: 979548 - RNA, 23 nt, Human
uuuuccuuugucacuguggugga

SEQ ID NO: 979549 - RNA, 21 nt, Human
aaacaacaguaccucaaagca

SEQ ID NO: 979550 - RNA, 23 nt, Human
aaaccaaaacacuuuaauuuuua

SEQ ID NO: 979551 - RNA, 18 nt, Human
aaagaaugagagucaccg

SEQ ID NO: 979552 - RNA, 19 nt, Human
aaagaaugagagucaccgu

SEQ ID NO: 979553 - RNA, 20 nt, Human
aaagaggcuaauauaccucu

SEQ ID NO: 979554 - RNA, 21 nt, Human
aaagggaaaaucauuuucuca

SEQ ID NO: 979555 - RNA, 22 nt, Human
aaagucaaaaacgaggcaccuu

SEQ ID NO: 979556 - RNA, 19 nt, Human
aaauguuaauggacaaagu

SEQ ID NO: 979557 - RNA, 24 nt, Human
aacacguuucuccaauuuaaucua

SEQ ID NO: 979558 - RNA, 21 nt, Human
aacaguaccucaaagcaaaag

SEQ ID NO: 979559 - RNA, 23 nt, Human
aagaaacaaugcuuagagacaug

SEQ ID NO: 979560 - RNA, 18 nt, Human
aagaaugagagucaccgu

SEQ ID NO: 979561 - RNA, 20 nt, Human
aagacaaaagacuacccuuc

SEQ ID NO: 979562 - RNA, 19 nt, Human
aagcaaaauaaaggucuga

SEQ ID NO: 979563 - RNA, 20 nt, Human
aaugggacugcuaaauuaua

SEQ ID NO: 979564 - RNA, 21 nt, Human
acaacacuuguuagcuuuuca

SEQ ID NO: 979565 - RNA, 19 nt, Human
acaaccaagauugccugcc

SEQ ID NO: 979566 - RNA, 24 nt, Human
acaugcaacauaggcuacaaagca

SEQ ID NO: 979567 - RNA, 26 nt, Human
agacaaaagacuacccuuccccagga

SEQ ID NO: 979568 - RNA, 18 nt, Human
agaggaggcaacaugaca

SEQ ID NO: 979569 - RNA, 21 nt, Human
agaggcuaauauaccucuaua

SEQ ID NO: 979570 - RNA, 23 nt, Human
aggaucacagugcacaaaaagca

SEQ ID NO: 979571 - RNA, 27 nt, Human
aguuacaaaaccugccaaaacacaaag

SEQ ID NO: 979572 - RNA, 20 nt, Human
aucacagugcacaaaaagca

SEQ ID NO: 979573 - RNA, 18 nt, Human
aucuuauaacccagagcc

SEQ ID NO: 979574 - RNA, 22 nt, Human
auuuuagaaugagaaacauauc

SEQ ID NO: 979575 - RNA, 24 nt, Human
caaaaucacaaaugggacugcuaa

SEQ ID NO: 979576 - RNA, 21 nt, Human
caaagcacucaagacuuggua

SEQ ID NO: 979577 - RNA, 25 nt, Human
caaagcacucaagacuugguagcuu

SEQ ID NO: 979578 - RNA, 24 nt, Human
caagagauuuuucuucucuaaucc

SEQ ID NO: 979579 - RNA, 21 nt, Human
cacaaccaagauugccugccc

SEQ ID NO: 979580 - RNA, 22 nt, Human
caccguuuagguccaauguacu

SEQ ID NO: 979581 - RNA, 24 nt, Human
cacguaaagcuaccuauggaauga

SEQ ID NO: 979582 - RNA, 20 nt, Human
cagaaugaggccacaagauu

SEQ ID NO: 979583 - RNA, 21 nt, Human
ccacugcacugcaaauuguau

SEQ ID NO: 979584 - RNA, 23 nt, Human
cccaggaucacagugcacaaaaa

SEQ ID NO: 979585 - RNA, 18 nt, Human
ccuguuaaagaaugagag

SEQ ID NO: 979586 - RNA, 19 nt, Human
cuggaaaaaucagaaaaua

SEQ ID NO: 979587 - RNA, 23 nt, Human
cugugugcaaccugcaaagggaa

SEQ ID NO: 979588 - RNA, 24 nt, Human
cuugguagcuuuucugaaauuuga

SEQ ID NO: 979589 - RNA, 19 nt, Human
gaaaauauucacaaccaag

SEQ ID NO: 979590 - RNA, 18 nt, Human
gaaugaaugugaucacug

SEQ ID NO: 979591 - RNA, 19 nt, Human
ggaaaaucauuuucucaac

SEQ ID NO: 979592 - RNA, 18 nt, Human
guagcuuuucugaaauuu

SEQ ID NO: 979593 - RNA, 21 nt, Human
gucacacaacacaagaaacaa

SEQ ID NO: 979594 - RNA, 20 nt, Human
gucaguaaacuacuuagcug

SEQ ID NO: 979595 - RNA, 20 nt, Human
guuaaagaaugagagucacc

SEQ ID NO: 979596 - RNA, 20 nt, Human
uaaaaagacauucaauccag

SEQ ID NO: 979597 - RNA, 18 nt, Human
uaaaaauaugcaaaauca

SEQ ID NO: 979598 - RNA, 20 nt, Human
uaaaaauaugcaaaaucacu

SEQ ID NO: 979599 - RNA, 18 nt, Human
uaagacaacugcaagcac

SEQ ID NO: 979600 - RNA, 23 nt, Human
uacaaaaccugccaaaacacaaa

SEQ ID NO: 979601 - RNA, 19 nt, Human
uagcugaagacaaaagacu

SEQ ID NO: 979602 - RNA, 19 nt, Human
uaggcuacaaagcacucaa

SEQ ID NO: 979603 - RNA, 20 nt, Human
ucaaagcaaaauaaaggucc

SEQ ID NO: 979604 - RNA, 21 nt, Human
ucccuuuuguucagaaugagg

SEQ ID NO: 979605 - RNA, 22 nt, Human
ucuggaaaaaaaaaaaccaaaa

SEQ ID NO: 979606 - RNA, 19 nt, Human
ugaaaagacuguuauggaa

SEQ ID NO: 979607 - RNA, 21 nt, Human
ugacaugguacugagccauca

SEQ ID NO: 979608 - RNA, 26 nt, Human
ugacuucuaaagaggcuaauauaccu

SEQ ID NO: 979609 - RNA, 23 nt, Human
ugagaaacauaucuuuucuuccu

SEQ ID NO: 979610 - RNA, 19 nt, Human
ugagaaguauucugcccac

SEQ ID NO: 979611 - RNA, 19 nt, Human
ugcaaaaucacaaauggga

SEQ ID NO: 979612 - RNA, 20 nt, Human
ugcacaacuccuuggagcag

SEQ ID NO: 979613 - RNA, 18 nt, Human
ugccaaaacacaaagggg

SEQ ID NO: 979614 - RNA, 18 nt, Human
ugccaaaacacaaagggg

SEQ ID NO: 979615 - RNA, 24 nt, Human
ugccauauagagaaugacaucuua

SEQ ID NO: 979616 - RNA, 19 nt, Human
ugcccuugcuuucaagccu

SEQ ID NO: 979617 - RNA, 23 nt, Human
uggaaagacaaugaaaaagcuag

SEQ ID NO: 979618 - RNA, 27 nt, Human
uggaaagacaaugaaaaagcuaguaaa

SEQ ID NO: 979619 - RNA, 23 nt, Human
uggaaaguaacauuuacagggug

SEQ ID NO: 979620 - RNA, 21 nt, Human
uggaaugaaugugaucacugu

SEQ ID NO: 979621 - RNA, 19 nt, Human
ugggaacauuugcuagcuc

SEQ ID NO: 979622 - RNA, 19 nt, Human
uguuaaagaaugagagucc

SEQ ID NO: 979623 - RNA, 19 nt, Human
uguuaggacugggauucaa

SEQ ID NO: 979624 - RNA, 19 nt, Human
uguucagaaugaggccaca

SEQ ID NO: 979625 - RNA, 19 nt, Human
uuaaagaaugagagucacc

SEQ ID NO: 979626 - RNA, 19 nt, Human
uuacaaaaccugccaaaac

SEQ ID NO: 979627 - RNA, 19 nt, Human
uucuucauaaauaguuaca

SEQ ID NO: 979628 - RNA, 18 nt, Human
uugguuccaacuugauaa

SEQ ID NO: 979629 - RNA, 23 nt, Human
uuuccagaagaaaauggucaguu

SEQ ID NO: 979630 - RNA, 19 nt, Human
uuuuucuucucuaaucccu

SEQ ID NO: 979631 - RNA, 18 nt, Human
uuuuuuuuuuuuuuucug

SEQ ID NO: 979632 - RNA, 28 nt, Human
aaaaccuucuacuuuaacauuccuagaa

SEQ ID NO: 979633 - RNA, 18 nt, Human
aacuucuacccccaaccc

SEQ ID NO: 979634 - RNA, 22 nt, Human
aagaacuucuacccccaaccca

SEQ ID NO: 979635 - RNA, 20 nt, Human
aagcagaaauaugggaucug

SEQ ID NO: 979636 - RNA, 20 nt, Human
aagcuauauuaucccugaag

SEQ ID NO: 979637 - RNA, 23 nt, Human
accagggcaaaggaaagugacuu

SEQ ID NO: 979638 - RNA, 19 nt, Human
acuucuacccccaacccac

SEQ ID NO: 979639 - RNA, 27 nt, Human
agacaagaaaagauguauauggccuga

SEQ ID NO: 979640 - RNA, 20 nt, Human
aggaugccuggaaacacugc

SEQ ID NO: 979641 - RNA, 25 nt, Human
cauuuccuccuuuuauuagguccca

SEQ ID NO: 979642 - RNA, 18 nt, Human
ccacugcccaaggccugu

SEQ ID NO: 979643 - RNA, 19 nt, Human
ccagauguuacgacgucca

SEQ ID NO: 979644 - RNA, 19 nt, Human
ccagggcaaaggaaaguga

SEQ ID NO: 979645 - RNA, 19 nt, Human
ccccaacccacugcccaag

SEQ ID NO: 979646 - RNA, 20 nt, Human
ccccaacccacugcccaagg

SEQ ID NO: 979647 - RNA, 21 nt, Human
cccuugacuuuaaccaugccc

SEQ ID NO: 979648 - RNA, 19 nt, Human
cccuuuuucucucuccucc

SEQ ID NO: 979649 - RNA, 21 nt, Human
ccucagucccuaccuagcuuc

SEQ ID NO: 979650 - RNA, 18 nt, Human
ccuccucuuucuccuucc

SEQ ID NO: 979651 - RNA, 21 nt, Human
ccugaaguaccagggcaaagg

SEQ ID NO: 979652 - RNA, 19 nt, Human
ccugucccuagaacugugg

SEQ ID NO: 979653 - RNA, 21 nt, Human
ccuuccucucugcuccucuca

SEQ ID NO: 979654 - RNA, 24 nt, Human
ccuuccucucugcuccucucauca

SEQ ID NO: 979655 - RNA, 22 nt, Human
cuagaggagcuuuucccuugac

SEQ ID NO: 979656 - RNA, 23 nt, Human
cucagagaaggguuuuagaaaga

SEQ ID NO: 979657 - RNA, 18 nt, Human
cuccuuccucucugcucc

SEQ ID NO: 979658 - RNA, 20 nt, Human
cucuuucuccuuccucucug

SEQ ID NO: 979659 - RNA, 23 nt, Human
cuugacuuuaaccaugcccuggc

SEQ ID NO: 979660 - RNA, 21 nt, Human
gaaagugacuuucagaaguca

SEQ ID NO: 979661 - RNA, 19 nt, Human
gggaaacuauuacacaguc

SEQ ID NO: 979662 - RNA, 19 nt, Human
guccacaucugccaaaagu

SEQ ID NO: 979663 - RNA, 23 nt, Human
gugaggggaagcagaaauauggg

SEQ ID NO: 979664 - RNA, 19 nt, Human
uaaagcuauauuaucccug

SEQ ID NO: 979665 - RNA, 18 nt, Human
uaggucccaguuucagcu

SEQ ID NO: 979666 - RNA, 24 nt, Human
uauggccugaaguaccagggcaaa

SEQ ID NO: 979667 - RNA, 22 nt, Human
uauuuugugcccuuuuucucuc

SEQ ID NO: 979668 - RNA, 19 nt, Human
ucaauuggaaaaaaccuuc

SEQ ID NO: 979669 - RNA, 19 nt, Human
ucacccaccucagaguccu

SEQ ID NO: 979670 - RNA, 20 nt, Human
ucccuagaacugugggaaaa

SEQ ID NO: 979671 - RNA, 18 nt, Human
ucuaaaagugaggggaag

SEQ ID NO: 979672 - RNA, 21 nt, Human
ucucucagagaaggguuuuag

SEQ ID NO: 979673 - RNA, 23 nt, Human
ugaaagggaggauuauggagaca

SEQ ID NO: 979674 - RNA, 23 nt, Human
ugaggggaagcagaaauauggga

SEQ ID NO: 979675 - RNA, 18 nt, Human
ugccuggaaacacugcag

SEQ ID NO: 979676 - RNA, 23 nt, Human
uggcuccuggucugucccggccu

SEQ ID NO: 979677 - RNA, 20 nt, Human
uggcuccuggucugucccuc

SEQ ID NO: 979678 - RNA, 23 nt, Human
ugggaaaacauuuccuccuuuua

SEQ ID NO: 979679 - RNA, 18 nt, Human
ugggaucuguuuuauggu

SEQ ID NO: 979680 - RNA, 19 nt, Human
uguauauggccugaaguac

SEQ ID NO: 979681 - RNA, 23 nt, Human
uucuacuuuaacauuccuagaac

SEQ ID NO: 979682 - RNA, 24 nt, Human
uuucucucuccuccucuuucuccu

SEQ ID NO: 979683 - RNA, 22 nt, Human
acccccaccccucggccuaagc

SEQ ID NO: 979684 - RNA, 22 nt, Human
acucgcuccgucucccgcuacc

SEQ ID NO: 979685 - RNA, 21 nt, Human
ccccaccccucggccuaagcc

SEQ ID NO: 979686 - RNA, 21 nt, Human
cccccggcgcgacccccaccc

SEQ ID NO: 979687 - RNA, 19 nt, Human
ccgcggccgcuggacucgc

SEQ ID NO: 979688 - RNA, 18 nt, Human
ccuccgggucugcccgcg

SEQ ID NO: 979689 - RNA, 27 nt, Human
cggcccccggcgcgacccccaccccuu

SEQ ID NO: 979690 - RNA, 20 nt, Human
gacggcguggugcucuuucu

SEQ ID NO: 979691 - RNA, 20 nt, Human
ggcgcgacccccaccccucg

SEQ ID NO: 979692 - RNA, 18 nt, Human
ucucccgcuaccgcugcu

SEQ ID NO: 979693 - RNA, 18 nt, Human
ucucccgcuaccgcugcu

SEQ ID NO: 979694 - RNA, 24 nt, Human
ucucccgcuaccgcugcuaccacc

SEQ ID NO: 979695 - RNA, 20 nt, Human
uuuuuuuuuuuuuuugccuu

SEQ ID NO: 979696 - RNA, 22 nt, Human
uuuuuuuuuuuuuuugccuuaa

SEQ ID NO: 979697 - RNA, 24 nt, Human
aacagagugagacuccgugucaaa

SEQ ID NO: 979698 - RNA, 20 nt, Human
aacauggugaaacuccgucu

SEQ ID NO: 979699 - RNA, 21 nt, Human
aacauggugaaacuccgucuc

SEQ ID NO: 979700 - RNA, 26 nt, Human
aacccaaagcccggcagcgcaggccc

SEQ ID NO: 979701 - RNA, 20 nt, Human
aacuugcucccuuaaggcca

SEQ ID NO: 979702 - RNA, 20 nt, Human
aagaagccugguuccgcagc

SEQ ID NO: 979703 - RNA, 24 nt, Human
aagaccaaaggaucagacagagga

SEQ ID NO: 979704 - RNA, 21 nt, Human
aagcccaucuaaugguguccu

SEQ ID NO: 979705 - RNA, 24 nt, Human
aauacaauuaaaguagaaacacaa

SEQ ID NO: 979706 - RNA, 22 nt, Human
aaugcguuuauuucuccaguuu

SEQ ID NO: 979707 - RNA, 24 nt, Human
aauggcgugaacccaggaggcaga

SEQ ID NO: 979708 - RNA, 20 nt, Human
aaugguguccugaagacugu

SEQ ID NO: 979709 - RNA, 24 nt, Human
acagagugagacuccgugucaaaa

SEQ ID NO: 979710 - RNA, 19 nt, Human
acauggugaaacuccgucu

SEQ ID NO: 979711 - RNA, 24 nt, Human
acuccagccugggcaacagaguga

SEQ ID NO: 979712 - RNA, 24 nt, Human
acuccgucucuacuaaaaauacaa

SEQ ID NO: 979713 - RNA, 24 nt, Human
acugcacuccagccugggcaacag

SEQ ID NO: 979714 - RNA, 24 nt, Human
acugcacuccagccugggcaacag

SEQ ID NO: 979715 - RNA, 24 nt, Human
acuucagccugguagcaaagacca

SEQ ID NO: 979716 - RNA, 23 nt, Human
agagaaaaaaggcaagacuagga

SEQ ID NO: 979717 - RNA, 21 nt, Human
agagagcggcagaggcccaga

SEQ ID NO: 979718 - RNA, 24 nt, Human
agagccugcagugagccgagaucg

SEQ ID NO: 979719 - RNA, 20 nt, Human
agaggcccagaacccaaagc

SEQ ID NO: 979720 - RNA, 20 nt, Human
agagggugguuggcuacuac

SEQ ID NO: 979721 - RNA, 20 nt, Human
agcacugugggaggcugagg

SEQ ID NO: 979722 - RNA, 24 nt, Human
agccugggcaacagagugagacuc

SEQ ID NO: 979723 - RNA, 18 nt, Human
agccugguagcaaagacc

SEQ ID NO: 979724 - RNA, 19 nt, Human
agccugguagcaaagacca

SEQ ID NO: 979725 - RNA, 19 nt, Human
agcggcagaggcccagaac

SEQ ID NO: 979726 - RNA, 24 nt, Human
aggagggcggaucaugaggucagg

SEQ ID NO: 979727 - RNA, 18 nt, Human
aggcagagccugcaguga

SEQ ID NO: 979728 - RNA, 21 nt, Human
aggcagagccugcagugagcc

SEQ ID NO: 979729 - RNA, 24 nt, Human
aggcagagccugcagugagccgag

SEQ ID NO: 979730 - RNA, 24 nt, Human
aggcaggagaauggcgugaaccca

SEQ ID NO: 979731 - RNA, 27 nt, Human
aggcaggagaauggcgugaacccagga

SEQ ID NO: 979732 - RNA, 24 nt, Human
aggcgucguggugggcgccuguag

SEQ ID NO: 979733 - RNA, 22 nt, Human
agggaacggcagugggguggcu

SEQ ID NO: 979734 - RNA, 22 nt, Human
agggagaaguaguaaaggcucc

SEQ ID NO: 979735 - RNA, 24 nt, Human
aguggcucaugccucuaaucccag

SEQ ID NO: 979736 - RNA, 20 nt, Human
auaaaaccucccaaacaugu

SEQ ID NO: 979737 - RNA, 24 nt, Human
aucgugccacugcacuccagccug

SEQ ID NO: 979738 - RNA, 24 nt, Human
aucuauacaacagcuccaugaggc

SEQ ID NO: 979739 - RNA, 25 nt, Human
auggaucugggaucuauacaacagc

SEQ ID NO: 979740 - RNA, 18 nt, Human
cacagugggaaagucacc

SEQ ID NO: 979741 - RNA, 22 nt, Human
cacuccagccugggcaacagag

SEQ ID NO: 979742 - RNA, 24 nt, Human
cacuccagccugggcaacagagug

SEQ ID NO: 979743 - RNA, 19 nt, Human
cacugcacuccagccuggg

SEQ ID NO: 979744 - RNA, 21 nt, Human
cacugcacuccagccugggca

SEQ ID NO: 979745 - RNA, 22 nt, Human
cacugcacuccagccugggcaa

SEQ ID NO: 979746 - RNA, 23 nt, Human
cacugcacuccagccugggcaac

SEQ ID NO: 979747 - RNA, 24 nt, Human
cacugcacuccagccugggcaaca

SEQ ID NO: 979748 - RNA, 20 nt, Human
cacugcuauaagaugcagac

SEQ ID NO: 979749 - RNA, 23 nt, Human
cagaacaugaaugaaaccaggga

SEQ ID NO: 979750 - RNA, 22 nt, Human
cagagagcggcagaggcccaga

SEQ ID NO: 979751 - RNA, 23 nt, Human
cagaggcccagaacccaaagccc

SEQ ID NO: 979752 - RNA, 23 nt, Human
cagcacugugggaggcugaggag

SEQ ID NO: 979753 - RNA, 24 nt, Human
cagcacugugggaggcugaggagg

SEQ ID NO: 979754 - RNA, 22 nt, Human
cagcuccaugaggcaggacaau

SEQ ID NO: 979755 - RNA, 23 nt, Human
caguggcucgguccuccaagccc

SEQ ID NO: 979756 - RNA, 18 nt, Human
cauaaaaccucccaaaca

SEQ ID NO: 979757 - RNA, 22 nt, Human
caugccucuaaucccagcacug

SEQ ID NO: 979758 - RNA, 22 nt, Human
cauuugaagcuccuuucugccc

SEQ ID NO: 979759 - RNA, 21 nt, Human
ccaaaaggucuagacugccag

SEQ ID NO: 979760 - RNA, 22 nt, Human
ccaagccccaugggggccaggc

SEQ ID NO: 979761 - RNA, 20 nt, Human
ccacugcacuccagccuggg

SEQ ID NO: 979762 - RNA, 21 nt, Human
ccacugcacuccagccugggc

SEQ ID NO: 979763 - RNA, 23 nt, Human
ccacugcacuccagccugggcaa

SEQ ID NO: 979764 - RNA, 24 nt, Human
ccacugcacuccagccugggcaac

SEQ ID NO: 979765 - RNA, 18 nt, Human
ccauuucaguuuccucau

SEQ ID NO: 979766 - RNA, 19 nt, Human
cccaaacaugugagaaguu

SEQ ID NO: 979767 - RNA, 19 nt, Human
cccaaagcccggcagcgca

SEQ ID NO: 979768 - RNA, 19 nt, Human
cccagaacccaaagcccgg

SEQ ID NO: 979769 - RNA, 18 nt, Human
cccugucgugcuucccuc

SEQ ID NO: 979770 - RNA, 22 nt, Human
ccgcagcguccaauggcccagc

SEQ ID NO: 979771 - RNA, 20 nt, Human
ccuagcuaacauggugaaac

SEQ ID NO: 979772 - RNA, 23 nt, Human
ccuagcuaacauggugaaacucc

SEQ ID NO: 979773 - RNA, 24 nt, Human
ccuagcuaacauggugaaacuccg

SEQ ID NO: 979774 - RNA, 22 nt, Human
ccucuaugccucagacaggaac

SEQ ID NO: 979775 - RNA, 21 nt, Human
ccugccucuaugccucagaca

SEQ ID NO: 979776 - RNA, 22 nt, Human
ccugggcaacagagugagacuc

SEQ ID NO: 979777 - RNA, 19 nt, Human
ccuguagucccagcuacuc

SEQ ID NO: 979778 - RNA, 21 nt, Human
ccuguagucccagcuacucgg

SEQ ID NO: 979779 - RNA, 22 nt, Human
ccuguagucccagcuacucggg

SEQ ID NO: 979780 - RNA, 18 nt, Human
ccuuggauacugggcuca

SEQ ID NO: 979781 - RNA, 24 nt, Human
cgagaccauccuagcuaacauggu

SEQ ID NO: 979782 - RNA, 24 nt, Human
cgccuguagucccagcuacucggg

SEQ ID NO: 979783 - RNA, 21 nt, Human
cggcagugggguggcuugggc

SEQ ID NO: 979784 - RNA, 24 nt, Human
cguggugggcgccuguagucccag

SEQ ID NO: 979785 - RNA, 22 nt, Human
cgugucaaaaaaaaagaaauaa

SEQ ID NO: 979786 - RNA, 20 nt, Human
cguucccggcagcucagcac

SEQ ID NO: 979787 - RNA, 19 nt, Human
cucacacccuccucagaac

SEQ ID NO: 979788 - RNA, 23 nt, Human
cucaugccucuaaucccagcacu

SEQ ID NO: 979789 - RNA, 19 nt, Human
cuccucagaacaugaauga

SEQ ID NO: 979790 - RNA, 18 nt, Human
cucuaaucccagcacugu

SEQ ID NO: 979791 - RNA, 22 nt, Human
cugcagugagccgagaucgugc

SEQ ID NO: 979792 - RNA, 19 nt, Human
cuugcuccaggggccgggc

SEQ ID NO: 979793 - RNA, 19 nt, Human
gaaacuccgucucuacuaa

SEQ ID NO: 979794 - RNA, 18 nt, Human
gaacccaaagcccggcag

SEQ ID NO: 979795 - RNA, 23 nt, Human
gagaucgugccacugcacuccag

SEQ ID NO: 979796 - RNA, 21 nt, Human
gaggcccagaacccaaagccc

SEQ ID NO: 979797 - RNA, 25 nt, Human
gcaaaccucaggggaaggggaacgc

SEQ ID NO: 979798 - RNA, 24 nt, Human
gcacuccagccugggcaacagagu

SEQ ID NO: 979799 - RNA, 21 nt, Human
gcagaggcccagaacccaaag

SEQ ID NO: 979800 - RNA, 23 nt, Human
gcagcgcaggcccaguagcccgc

SEQ ID NO: 979801 - RNA, 22 nt, Human
gcaggagaauggcgugaaccca

SEQ ID NO: 979802 - RNA, 22 nt, Human
gccacugcacuccagccugggc

SEQ ID NO: 979803 - RNA, 24 nt, Human
gccacugcacuccagccugggcaa

SEQ ID NO: 979804 - RNA, 20 nt, Human
gccgagaucgugccacugca

SEQ ID NO: 979805 - RNA, 24 nt, Human
gcuaacauggugaaacuccgucuc

SEQ ID NO: 979806 - RNA, 18 nt, Human
gcugaauuacacccauuu

SEQ ID NO: 979807 - RNA, 22 nt, Human
gcugaggcaggagaauggcgug

SEQ ID NO: 979808 - RNA, 20 nt, Human
ggagaaguaguaaaggcucc

SEQ ID NO: 979809 - RNA, 23 nt, Human
ggagggcggaucaugaggucagg

SEQ ID NO: 979810 - RNA, 21 nt, Human
ggcagaggcccagaacccaaa

SEQ ID NO: 979811 - RNA, 23 nt, Human
ggccagagagcggcagaggccca

SEQ ID NO: 979812 - RNA, 21 nt, Human
ggccgggcgcaguggcucaug

SEQ ID NO: 979813 - RNA, 23 nt, Human
ggccgggcgcaguggcucaugcc

SEQ ID NO: 979814 - RNA, 23 nt, Human
ggcgcaguggcucaugccucuaa

SEQ ID NO: 979815 - RNA, 21 nt, Human
ggcggaucaugaggucaggag

SEQ ID NO: 979816 - RNA, 20 nt, Human
ggugagagucacauaaaggu

SEQ ID NO: 979817 - RNA, 22 nt, Human
guggugggcgccuguaguccca

SEQ ID NO: 979818 - RNA, 22 nt, Human
guuugucaaccuuguuucacuu

SEQ ID NO: 979819 - RNA, 21 nt, Human
uaaaggcucccuccucggccc

SEQ ID NO: 979820 - RNA, 22 nt, Human
uaacauggugaaacuccgucuc

SEQ ID NO: 979821 - RNA, 24 nt, Human
uaacauggugaaacuccgucucua

SEQ ID NO: 979822 - RNA, 22 nt, Human
uacaacagcuccaugaggcagg

SEQ ID NO: 979823 - RNA, 19 nt, Human
uagcaaagaccaaaggauc

SEQ ID NO: 979824 - RNA, 22 nt, Human
uagcaaagaccaaaggaucaga

SEQ ID NO: 979825 - RNA, 25 nt, Human
uagcaaagaccaaaggaucagacag

SEQ ID NO: 979826 - RNA, 22 nt, Human
uaucacagccauuugaagcucc

SEQ ID NO: 979827 - RNA, 21 nt, Human
uaugcgcagcauuuuuuuggc

SEQ ID NO: 979828 - RNA, 23 nt, Human
ucagcccugucgugcuucccuca

SEQ ID NO: 979829 - RNA, 22 nt, Human
ucagccugguagcaaagaccaa

SEQ ID NO: 979830 - RNA, 18 nt, Human
ucaugaggucaggagauc

SEQ ID NO: 979831 - RNA, 24 nt, Human
ucaugaggucaggagaucgagacc

SEQ ID NO: 979832 - RNA, 23 nt, Human
uccagccugggcaacagagugag

SEQ ID NO: 979833 - RNA, 24 nt, Human
uccagccugggcaacagagugaga

SEQ ID NO: 979834 - RNA, 23 nt, Human
uccuuggauacugggcucagcuc

SEQ ID NO: 979835 - RNA, 23 nt, Human
ucgugccacugcacuccagccug

SEQ ID NO: 979836 - RNA, 23 nt, Human
ucuagacugccagcagaggcccu

SEQ ID NO: 979837 - RNA, 18 nt, Human
ucuaugccucagacagga

SEQ ID NO: 979838 - RNA, 22 nt, Human
ucucuacuaaaaauacaaaaaa

SEQ ID NO: 979839 - RNA, 24 nt, Human
ugaaaauacaaacuaaagcucgca

SEQ ID NO: 979840 - RNA, 20 nt, Human
ugaagcuccuuucugcccaa

SEQ ID NO: 979841 - RNA, 23 nt, Human
ugaagcuccuuucugcccaaaag

SEQ ID NO: 979842 - RNA, 25 nt, Human
ugagccaggcgucguggugggcgcc

SEQ ID NO: 979843 - RNA, 22 nt, Human
ugagccgagaucgugccacugc

SEQ ID NO: 979844 - RNA, 24 nt, Human
ugaggagggcggaucaugagguca

SEQ ID NO: 979845 - RNA, 18 nt, Human
ugaggcaggacaaucaua

SEQ ID NO: 979846 - RNA, 20 nt, Human
ugaggcaggacaaucauaug

SEQ ID NO: 979847 - RNA, 23 nt, Human
ugaggcaggagaauggcgugaac

SEQ ID NO: 979848 - RNA, 24 nt, Human
ugaggcaggagaauggcgugaacc

SEQ ID NO: 979849 - RNA, 25 nt, Human
ugaggcaggagaauggcgugaaccc

SEQ ID NO: 979850 - RNA, 23 nt, Human
ugcaaugcucauuugacugggcc

SEQ ID NO: 979851 - RNA, 19 nt, Human
ugcacugaauuucucuugc

SEQ ID NO: 979852 - RNA, 24 nt, Human
ugccacugcacuccagccugggca

SEQ ID NO: 979853 - RNA, 20 nt, Human
ugccacuuagagaaaaaagg

SEQ ID NO: 979854 - RNA, 18 nt, Human
ugccaggaggucagaagg

SEQ ID NO: 979855 - RNA, 23 nt, Human
ugccaggaggucagaaggugagg

SEQ ID NO: 979856 - RNA, 24 nt, Human
ugccucuaaucccagcacuguggg

SEQ ID NO: 979857 - RNA, 21 nt, Human
ugcucagagagggaacggcag

SEQ ID NO: 979858 - RNA, 21 nt, Human
uggccucagcacaacaaccag

SEQ ID NO: 979859 - RNA, 21 nt, Human
uggcuacuacauggacaaagu

SEQ ID NO: 979860 - RNA, 21 nt, Human
uggcucaugccucuaauccca

SEQ ID NO: 979861 - RNA, 22 nt, Human
uggcucaugccucuaaucccag

SEQ ID NO: 979862 - RNA, 24 nt, Human
uggcucaugccucuaaucccagca

SEQ ID NO: 979863 - RNA, 22 nt, Human
ugggaaagcccaucuaauggug

SEQ ID NO: 979864 - RNA, 19 nt, Human
ugggaggcugaggagggcg

SEQ ID NO: 979865 - RNA, 24 nt, Human
ugggaggcugaggagggcggauca

SEQ ID NO: 979866 - RNA, 19 nt, Human
ugggaucuauacaacagcu

SEQ ID NO: 979867 - RNA, 21 nt, Human
uggugggcgccuguaguccca

SEQ ID NO: 979868 - RNA, 28 nt, Human
ugucaaaaaaaaagaaauaacuugcucc

SEQ ID NO: 979869 - RNA, 18 nt, Human
uuugaagcuccuuucugc

SEQ ID NO: 979870 - RNA, 22 nt, Human
aaaacccugacaaaaucagagg

SEQ ID NO: 979871 - RNA, 26 nt, Human
aaaagcauaaacaauuuauacgucaa

SEQ ID NO: 979872 - RNA, 19 nt, Human
aaaauaaacaacuugccaa

SEQ ID NO: 979873 - RNA, 22 nt, Human
aaaauggacagcacauuaaaua

SEQ ID NO: 979874 - RNA, 19 nt, Human
aaacaagggucaaagccag

SEQ ID NO: 979875 - RNA, 22 nt, Human
aaacacacaaacacacaaaaaa

SEQ ID NO: 979876 - RNA, 24 nt, Human
aaagugcugggauuacaggcguga

SEQ ID NO: 979877 - RNA, 18 nt, Human
aaauagaaaugaaguggc

SEQ ID NO: 979878 - RNA, 25 nt, Human
aaaugaccaucagcuaaacaagggu

SEQ ID NO: 979879 - RNA, 18 nt, Human
aacacaggcaaguccuuu

SEQ ID NO: 979880 - RNA, 20 nt, Human
aacugacccaacgcacagaa

SEQ ID NO: 979881 - RNA, 19 nt, Human
aagacuguuggcaugaguu

SEQ ID NO: 979882 - RNA, 19 nt, Human
aagcacccgacucuggaua

SEQ ID NO: 979883 - RNA, 20 nt, Human
aagggcuccagccagaaugu

SEQ ID NO: 979884 - RNA, 19 nt, Human
aagugcugggauuacaggc

SEQ ID NO: 979885 - RNA, 19 nt, Human
aagugcugggauuacaggc

SEQ ID NO: 979886 - RNA, 28 nt, Human
acaaacacacaaaaaaggcauauucccu

SEQ ID NO: 979887 - RNA, 30 nt, Human
acacaaacacacaaaaaaggcauauucccu

SEQ ID NO: 979888 - RNA, 24 nt, Human
acaccaccaagcgcugucucacgc

SEQ ID NO: 979889 - RNA, 21 nt, Human
acagcaccaaaaguaucacac

SEQ ID NO: 979890 - RNA, 20 nt, Human
acgggguuucuccauguugg

SEQ ID NO: 979891 - RNA, 21 nt, Human
acgggguuucuccauguuggu

SEQ ID NO: 979892 - RNA, 24 nt, Human
acgggguuucuccauguuggucag

SEQ ID NO: 979893 - RNA, 19 nt, Human
agaaaaaaacaaagcacca

SEQ ID NO: 979894 - RNA, 23 nt, Human
agaaaaacccugacaaaaucaga

SEQ ID NO: 979895 - RNA, 20 nt, Human
agaugcccucccacccaccc

SEQ ID NO: 979896 - RNA, 22 nt, Human
agcaccaaaaguaucacaccac

SEQ ID NO: 979897 - RNA, 21 nt, Human
aggcaaguccuuuaaucugug

SEQ ID NO: 979898 - RNA, 19 nt, Human
aggcgugaaccaccacgcc

SEQ ID NO: 979899 - RNA, 26 nt, Human
agggcuccagccagaaugucgacauc

SEQ ID NO: 979900 - RNA, 24 nt, Human
aggugauccgcccgcuucggccuc

SEQ ID NO: 979901 - RNA, 18 nt, Human
aguagcugggauuacagg

SEQ ID NO: 979902 - RNA, 22 nt, Human
auacacaacauucaagauauuc

SEQ ID NO: 979903 - RNA, 20 nt, Human
aucuuguccaccuuaauccc

SEQ ID NO: 979904 - RNA, 20 nt, Human
aucuuguccaccuuaauccc

SEQ ID NO: 979905 - RNA, 24 nt, Human
augggugaugagcuuuugcauacc

SEQ ID NO: 979906 - RNA, 22 nt, Human
auuuuguauuuuuaguagggac

SEQ ID NO: 979907 - RNA, 26 nt, Human
caaaaugacccccaaagcuagcuaga

SEQ ID NO: 979908 - RNA, 24 nt, Human
caaagugcugggauuacaggcgug

SEQ ID NO: 979909 - RNA, 19 nt, Human
caacccacacuacaacacu

SEQ ID NO: 979910 - RNA, 23 nt, Human
caauaggaagaagaaugagcguc

SEQ ID NO: 979911 - RNA, 21 nt, Human
cacaaacacacaaaaaaggca

SEQ ID NO: 979912 - RNA, 21 nt, Human
caccacaaccucugucuccug

SEQ ID NO: 979913 - RNA, 23 nt, Human
caccacaaccucugucuccuggg

SEQ ID NO: 979914 - RNA, 24 nt, Human
caccaccaagcgcugucucacgcc

SEQ ID NO: 979915 - RNA, 21 nt, Human
caccuuaaucccauucacaga

SEQ ID NO: 979916 - RNA, 19 nt, Human
cacugcaugaggaggaaaa

SEQ ID NO: 979917 - RNA, 22 nt, Human
cagcaccaaaaguaucacacca

SEQ ID NO: 979918 - RNA, 26 nt, Human
cagcacuuaaaaaaacacacaaacac

SEQ ID NO: 979919 - RNA, 18 nt, Human
caggaaaagaacacaauc

SEQ ID NO: 979920 - RNA, 24 nt, Human
caguuaaagaaaaguugacaaccc

SEQ ID NO: 979921 - RNA, 19 nt, Human
caugucuuccuuugcuucu

SEQ ID NO: 979922 - RNA, 22 nt, Human
ccaaagugcugggauuacaggc

SEQ ID NO: 979923 - RNA, 22 nt, Human
ccaaagugcugggauuacaggc

SEQ ID NO: 979924 - RNA, 24 nt, Human
ccaaagugcugggauuacaggcgu

SEQ ID NO: 979925 - RNA, 24 nt, Human
ccaaucccagaaaugaccaucagc

SEQ ID NO: 979926 - RNA, 21 nt, Human
ccacaaccucugucuccuggg

SEQ ID NO: 979927 - RNA, 23 nt, Human
ccacaaccucugucuccuggguu

SEQ ID NO: 979928 - RNA, 24 nt, Human
ccacaaccucugucuccuggguuc

SEQ ID NO: 979929 - RNA, 24 nt, Human
ccaccacaaccucugucuccuggg

SEQ ID NO: 979930 - RNA, 18 nt, Human
ccaguguuaaggguuuua

SEQ ID NO: 979931 - RNA, 19 nt, Human
ccauguuggucaggcuggu

SEQ ID NO: 979932 - RNA, 22 nt, Human
ccauguuggucaggcuggucuc

SEQ ID NO: 979933 - RNA, 23 nt, Human
ccauguuggucaggcuggucucg

SEQ ID NO: 979934 - RNA, 25 nt, Human
cccacacuacaacacugcaugagga

SEQ ID NO: 979935 - RNA, 24 nt, Human
cccaccacaaccucugucuccugg

SEQ ID NO: 979936 - RNA, 19 nt, Human
cccaucauaaagacuguug

SEQ ID NO: 979937 - RNA, 18 nt, Human
ccccuggaugaacacgcu

SEQ ID NO: 979938 - RNA, 18 nt, Human
ccccuggaugaacacgcu

SEQ ID NO: 979939 - RNA, 18 nt, Human
cccgaccucaggugaucc

SEQ ID NO: 979940 - RNA, 22 nt, Human
cccgaccucaggugauccgccc

SEQ ID NO: 979941 - RNA, 23 nt, Human
cccgaguagcugggauuacaggu

SEQ ID NO: 979942 - RNA, 24 nt, Human
cccgaguagcugggauuacaggua

SEQ ID NO: 979943 - RNA, 21 nt, Human
ccgaguagcugggauuacagg

SEQ ID NO: 979944 - RNA, 24 nt, Human
ccgaguagcugggauuacagguau

SEQ ID NO: 979945 - RNA, 24 nt, Human
ccuaucaacuuagaauugggcuua

SEQ ID NO: 979946 - RNA, 24 nt, Human
ccuccagauuuccucauaggggcu

SEQ ID NO: 979947 - RNA, 21 nt, Human
ccucccacccaccccaucgag

SEQ ID NO: 979948 - RNA, 24 nt, Human
ccugccucagguucccgaguagcu

SEQ ID NO: 979949 - RNA, 23 nt, Human
ccuggguucaagccauucuccug

SEQ ID NO: 979950 - RNA, 24 nt, Human
cgaccucaggugauccgcccgcuu

SEQ ID NO: 979951 - RNA, 18 nt, Human
cgagaucuguccuguccc

SEQ ID NO: 979952 - RNA, 24 nt, Human
cgggguuucuccauguuggucagg

SEQ ID NO: 979953 - RNA, 21 nt, Human
cucacaaauaacaagacaaau

SEQ ID NO: 979954 - RNA, 24 nt, Human
cuccaggggcugcaugugugucca

SEQ ID NO: 979955 - RNA, 24 nt, Human
cuccaggggcugcauguguguccu

SEQ ID NO: 979956 - RNA, 24 nt, Human
cuccauguuggucaggcuggucuc

SEQ ID NO: 979957 - RNA, 26 nt, Human
cucccgaccucaggugauccgcccgc

SEQ ID NO: 979958 - RNA, 28 nt, Human
cuggcuaauuuuguauuuuuaguaggga

SEQ ID NO: 979959 - RNA, 18 nt, Human
cugucucacgccaguggu

SEQ ID NO: 979960 - RNA, 21 nt, Human
cuguggccucucccgugggag

SEQ ID NO: 979961 - RNA, 24 nt, Human
cuuaaucccaucauaaagacuguu

SEQ ID NO: 979962 - RNA, 23 nt, Human
cuuauuuauuuauuuauuuauuu

SEQ ID NO: 979963 - RNA, 23 nt, Human
cuucccagagagcugccccuuuc

SEQ ID NO: 979964 - RNA, 20 nt, Human
cuugguaguucuuggaaauc

SEQ ID NO: 979965 - RNA, 22 nt, Human
gaaaaaaacaaagcaccaucaa

SEQ ID NO: 979966 - RNA, 24 nt, Human
gaacagguggacugugguguccuc

SEQ ID NO: 979967 - RNA, 22 nt, Human
gacaaaaugacccccaaagcua

SEQ ID NO: 979968 - RNA, 19 nt, Human
gaccaucagcuaaacaagg

SEQ ID NO: 979969 - RNA, 21 nt, Human
gaccucaggugauccgcccgc

SEQ ID NO: 979970 - RNA, 22 nt, Human
gaccucaggugauccgcccgcu

SEQ ID NO: 979971 - RNA, 24 nt, Human
gaccucaggugauccgcccgcuuc

SEQ ID NO: 979972 - RNA, 21 nt, Human
gacgggguuucuccauguugg

SEQ ID NO: 979973 - RNA, 22 nt, Human
gacgggguuucuccauguuggu

SEQ ID NO: 979974 - RNA, 21 nt, Human
gacugguauucaacacaggca

SEQ ID NO: 979975 - RNA, 25 nt, Human
gagaauguccuagaacaggacuggu

SEQ ID NO: 979976 - RNA, 24 nt, Human
gaguagcugggauuacagguaugc

SEQ ID NO: 979977 - RNA, 21 nt, Human
gauuacaggcgugaaccacca

SEQ ID NO: 979978 - RNA, 24 nt, Human
gauuacagguaugcaccaccauac

SEQ ID NO: 979979 - RNA, 23 nt, Human
gcacgcuucacaugcagacgugg

SEQ ID NO: 979980 - RNA, 23 nt, Human
gccucagguucccgaguagcugg

SEQ ID NO: 979981 - RNA, 23 nt, Human
gcuggucucgaacucccgaccuc

SEQ ID NO: 979982 - RNA, 18 nt, Human
ggaaguggccaucugugg

SEQ ID NO: 979983 - RNA, 19 nt, Human
ggagauguuuauccuuuuc

SEQ ID NO: 979984 - RNA, 19 nt, Human
ggauuacaggcgugaacca

SEQ ID NO: 979985 - RNA, 19 nt, Human
ggcugcauguguguccagc

SEQ ID NO: 979986 - RNA, 23 nt, Human
gggguuucuccauguuggucagg

SEQ ID NO: 979987 - RNA, 20 nt, Human
ggugcaauggugcgaucuug

SEQ ID NO: 979988 - RNA, 20 nt, Human
gguggcggcgcggggcucag

SEQ ID NO: 979989 - RNA, 19 nt, Human
guacuguacucacaaauaa

SEQ ID NO: 979990 - RNA, 18 nt, Human
guagcugggauuacaggu

SEQ ID NO: 979991 - RNA, 19 nt, Human
gucagaaaaaaacaaagca

SEQ ID NO: 979992 - RNA, 20 nt, Human
guggucaucgagguggauac

SEQ ID NO: 979993 - RNA, 23 nt, Human
uaaaaaaacacacaaacacacaa

SEQ ID NO: 979994 - RNA, 19 nt, Human
uaaaauaaacaacuugcca

SEQ ID NO: 979995 - RNA, 21 nt, Human
uaaaauaaacaacuugccaac

SEQ ID NO: 979996 - RNA, 19 nt, Human
uaacaccaaaaaucaugua

SEQ ID NO: 979997 - RNA, 23 nt, Human
uaacagaaacugacccaacgcac

SEQ ID NO: 979998 - RNA, 21 nt, Human
uaacgcguuugucaauuagca

SEQ ID NO: 979999 - RNA, 19 nt, Human
uaacugaaauugcuaacgc

SEQ ID NO: 980000 - RNA, 18 nt, Human
uaagagauuacaccaaaa

SEQ ID NO: 980001 - RNA, 19 nt, Human
uaagagauuacaccaaaag

SEQ ID NO: 980002 - RNA, 26 nt, Human
uaagagauuacaccaaaagcauaaac

SEQ ID NO: 980003 - RNA, 23 nt, Human
uaaguguccuuuucuuucagaaa

SEQ ID NO: 980004 - RNA, 25 nt, Human
uacaauacuauacacagcaccaaaa

SEQ ID NO: 980005 - RNA, 27 nt, Human
uacacagcaccaaaaguaucacaccac

SEQ ID NO: 980006 - RNA, 22 nt, Human
uacagguaugcaccaccauacc

SEQ ID NO: 980007 - RNA, 24 nt, Human
uaguagggacgggguuucuccaug

SEQ ID NO: 980008 - RNA, 24 nt, Human
uaucacaccaccaagcgcugucuc

SEQ ID NO: 980009 - RNA, 20 nt, Human
ucaauaaauagaaaugaagu

SEQ ID NO: 980010 - RNA, 22 nt, Human
ucacacagaauuuaaaugggau

SEQ ID NO: 980011 - RNA, 22 nt, Human
ucacaccaccaagcgcugucuc

SEQ ID NO: 980012 - RNA, 23 nt, Human
ucacucuuguugccuaggcucgg

SEQ ID NO: 980013 - RNA, 24 nt, Human
ucagcauuuauccaaagauuuuuu

SEQ ID NO: 980014 - RNA, 18 nt, Human
uccaggggcugcaugugu

SEQ ID NO: 980015 - RNA, 25 nt, Human
uccauagaaguagucagaaaaaaac

SEQ ID NO: 980016 - RNA, 24 nt, Human
ucccaaagugcugggauuacaggc

SEQ ID NO: 980017 - RNA, 24 nt, Human
ucccagagagcugccccuuuccuu

SEQ ID NO: 980018 - RNA, 23 nt, Human
ucccgaguagcugggauuacagg

SEQ ID NO: 980019 - RNA, 24 nt, Human
ucccgaguagcugggauuacaggu

SEQ ID NO: 980020 - RNA, 21 nt, Human
uccuggguucaagccauucuc

SEQ ID NO: 980021 - RNA, 24 nt, Human
uccuggguucaagccauucuccug

SEQ ID NO: 980022 - RNA, 20 nt, Human
uccuucagcaauaccgcugg

SEQ ID NO: 980023 - RNA, 20 nt, Human
ucuggaaguggccaucugug

SEQ ID NO: 980024 - RNA, 23 nt, Human
ucugucagcauuuauccaaagau

SEQ ID NO: 980025 - RNA, 18 nt, Human
ucuuggaaaucugucagc

SEQ ID NO: 980026 - RNA, 21 nt, Human
ugaaauugcuaacgcguuugu

SEQ ID NO: 980027 - RNA, 21 nt, Human
ugaacacgcuaccacaagggc

SEQ ID NO: 980028 - RNA, 18 nt, Human
ugaaccaccacgccaaga

SEQ ID NO: 980029 - RNA, 26 nt, Human
ugaagaaccaguuuauuaagagauua

SEQ ID NO: 980030 - RNA, 21 nt, Human
ugacaaaaugacccccaaagc

SEQ ID NO: 980031 - RNA, 24 nt, Human
ugacaaaaugacccccaaagcuag

SEQ ID NO: 980032 - RNA, 19 nt, Human
ugcaaauuaggucuaugaa

SEQ ID NO: 980033 - RNA, 19 nt, Human
ugcauguguguccagcugu

SEQ ID NO: 980034 - RNA, 23 nt, Human
ugcccccuauucacgccuacacg

SEQ ID NO: 980035 - RNA, 24 nt, Human
ugccuaggcucgggugcaauggug

SEQ ID NO: 980036 - RNA, 21 nt, Human
ugccucagguucccgaguagc

SEQ ID NO: 980037 - RNA, 24 nt, Human
ugccucagguucccgaguagcugg

SEQ ID NO: 980038 - RNA, 23 nt, Human
ugcugggauuacaggcgugaacc

SEQ ID NO: 980039 - RNA, 19 nt, Human
uggcaugaguucugaugua

SEQ ID NO: 980040 - RNA, 19 nt, Human
uggcgagagacaggcaaug

SEQ ID NO: 980041 - RNA, 19 nt, Human
ugggauuacaggcgugaac

SEQ ID NO: 980042 - RNA, 22 nt, Human
ugggauuacaggcgugaaccac

SEQ ID NO: 980043 - RNA, 23 nt, Human
ugggauuacaggcgugaaccacc

SEQ ID NO: 980044 - RNA, 24 nt, Human
ugggauuacaggcgugaaccacca

SEQ ID NO: 980045 - RNA, 24 nt, Human
ugggauuacaggcgugaaccacca

SEQ ID NO: 980046 - RNA, 21 nt, Human
ugggauuacagguaugcacca

SEQ ID NO: 980047 - RNA, 24 nt, Human
ugggauuacagguaugcaccacca

SEQ ID NO: 980048 - RNA, 23 nt, Human
uggucaggcuggucucgaacucc

SEQ ID NO: 980049 - RNA, 19 nt, Human
uggucucgaacucccgacc

SEQ ID NO: 980050 - RNA, 24 nt, Human
uggugcgaucuugccccaccacaa

SEQ ID NO: 980051 - RNA, 21 nt, Human
uguauuuuuaguagggacggg

SEQ ID NO: 980052 - RNA, 23 nt, Human
ugucacaauucaccagagcugcc

SEQ ID NO: 980053 - RNA, 25 nt, Human
ugucagaauuaauucaagcaaaaca

SEQ ID NO: 980054 - RNA, 19 nt, Human
ugucuccuggguucaagcc

SEQ ID NO: 980055 - RNA, 20 nt, Human
uguuuaacauuuucaguggg

SEQ ID NO: 980056 - RNA, 26 nt, Human
uuacuuuuaacuuuuaaaacaaaaca

SEQ ID NO: 980057 - RNA, 18 nt, Human
uuaguagggacgggguuu

SEQ ID NO: 980058 - RNA, 24 nt, Human
uuaguagggacgggguuucuccau

SEQ ID NO: 980059 - RNA, 19 nt, Human
uuauuuauuuauuuauuua

SEQ ID NO: 980060 - RNA, 25 nt, Human
uuauuuauuuauuuauuuauuuauu

SEQ ID NO: 980061 - RNA, 27 nt, Human
uuauuuauuuauuuauuuauuuuuuug

SEQ ID NO: 980062 - RNA, 21 nt, Human
uucaagccauucuccugccuc

SEQ ID NO: 980063 - RNA, 22 nt, Human
uucacucuuguugccuaggcuc

SEQ ID NO: 980064 - RNA, 19 nt, Human
uucauguuggccuaagcuu

SEQ ID NO: 980065 - RNA, 19 nt, Human
uucggccucccaaagugcu

SEQ ID NO: 980066 - RNA, 20 nt, Human
uugguaguucuuggaaaucu

SEQ ID NO: 980067 - RNA, 21 nt, Human
uuucuccauguuggucaggcu

SEQ ID NO: 980068 - RNA, 18 nt, Human
uuugaccuguucaauaaa

SEQ ID NO: 980069 - RNA, 22 nt, Human
uuugcuucuucacuggccuucc

SEQ ID NO: 980070 - RNA, 24 nt, Human
uuugucaauuagcaauuaagaacu

SEQ ID NO: 980071 - RNA, 19 nt, Human
uuuuaguccccgauugagu

SEQ ID NO: 980072 - RNA, 20 nt, Human
uuuuguauuuuuaguaggga

SEQ ID NO: 980073 - RNA, 22 nt, Human
uuuuuaguagggacgggguuuc

SEQ ID NO: 980074 - RNA, 21 nt, Human
aacucgacccacgauaggugg

SEQ ID NO: 980075 - RNA, 20 nt, Human
aaguagacuugaacauccca

SEQ ID NO: 980076 - RNA, 18 nt, Human
agcuuuauuucaaagcaa

SEQ ID NO: 980077 - RNA, 20 nt, Human
aggaaagaggacaccugggc

SEQ ID NO: 980078 - RNA, 18 nt, Human
ccaagcaacucgacccac

SEQ ID NO: 980079 - RNA, 18 nt, Human
ccaagcaacucgacccac

SEQ ID NO: 980080 - RNA, 24 nt, Human
cccacgauagguggggccgggguc

SEQ ID NO: 980081 - RNA, 19 nt, Human
ccggaaccacgaccgccaa

SEQ ID NO: 980082 - RNA, 22 nt, Human
cgaccgccaagcaacucgaccc

SEQ ID NO: 980083 - RNA, 22 nt, Human
cgauagguggggccuacgcucu

SEQ ID NO: 980084 - RNA, 19 nt, Human
gaaccacgaccgccaagca

SEQ ID NO: 980085 - RNA, 21 nt, Human
gcaaucugaaaacagcagucc

SEQ ID NO: 980086 - RNA, 21 nt, Human
gcuaaguuaguagcuuucuuc

SEQ ID NO: 980087 - RNA, 18 nt, Human
gcuuaauuauuuaaaaaa

SEQ ID NO: 980088 - RNA, 19 nt, Human
ggaaccacgaccgccaagc

SEQ ID NO: 980089 - RNA, 18 nt, Human
gugaugucuuuguuaucc

SEQ ID NO: 980090 - RNA, 24 nt, Human
uaggaaggagcacacagucgaccu

SEQ ID NO: 980091 - RNA, 22 nt, Human
ucaacuuauugagggauuugcu

SEQ ID NO: 980092 - RNA, 18 nt, Human
ugguaaagacccugucuc

SEQ ID NO: 980093 - RNA, 21 nt, Human
uuacuccucacgacagccaaa

SEQ ID NO: 980094 - RNA, 20 nt, Human
uuccugcccaacaccuacug

SEQ ID NO: 980095 - RNA, 21 nt, Human
uuuauagaaaaauaagcuuua

SEQ ID NO: 980096 - RNA, 23 nt, Human
aacccuccuuccuccagggaggc

SEQ ID NO: 980097 - RNA, 23 nt, Human
aacuagaccccuuaaagggccua

SEQ ID NO: 980098 - RNA, 25 nt, Human
acaaggaagaaaggucucucccuca

SEQ ID NO: 980099 - RNA, 20 nt, Human
agagagcgggguggcgggag

SEQ ID NO: 980100 - RNA, 21 nt, Human
aggcaccccuaacccuccuuc

SEQ ID NO: 980101 - RNA, 20 nt, Human
caauucugcucuuccaauaa

SEQ ID NO: 980102 - RNA, 24 nt, Human
caccccuaacccuccuuccuccag

SEQ ID NO: 980103 - RNA, 23 nt, Human
caucagugucuguggacguaguc

SEQ ID NO: 980104 - RNA, 20 nt, Human
ccagggccucgcaaacggca

SEQ ID NO: 980105 - RNA, 19 nt, Human
ccccuaacccuccuuccuc

SEQ ID NO: 980106 - RNA, 18 nt, Human
ccugaagagccugagaga

SEQ ID NO: 980107 - RNA, 20 nt, Human
cgcaaacggcaacuagaccc

SEQ ID NO: 980108 - RNA, 22 nt, Human
gaaacucaagacagagauccuc

SEQ ID NO: 980109 - RNA, 22 nt, Human
gcgggguggcgggagucggggg

SEQ ID NO: 980110 - RNA, 19 nt, Human
gcuucagcugauggggaag

SEQ ID NO: 980111 - RNA, 19 nt, Human
ggccugguaaguggagcug

SEQ ID NO: 980112 - RNA, 22 nt, Human
gggaaggagaaacucaagacag

SEQ ID NO: 980113 - RNA, 18 nt, Human
gggccucgcaaacggcaa

SEQ ID NO: 980114 - RNA, 18 nt, Human
uagaccccuuaaagggcc

SEQ ID NO: 980115 - RNA, 21 nt, Human
ucaacaaggaagaaaggucuc

SEQ ID NO: 980116 - RNA, 21 nt, Human
ucaauucugcucuuccaauac

SEQ ID NO: 980117 - RNA, 19 nt, Human
uccaauacuugaggauagg

SEQ ID NO: 980118 - RNA, 21 nt, Human
uccggcgccguacgggaggag

SEQ ID NO: 980119 - RNA, 24 nt, Human
ucugaagagugcuucagcugaugg

SEQ ID NO: 980120 - RNA, 23 nt, Human
ugaagagccugagagagcggggu

SEQ ID NO: 980121 - RNA, 23 nt, Human
ugaggauaggcaccccuaacccu

SEQ ID NO: 980122 - RNA, 22 nt, Human
ugcuucagcugauggggaagga

SEQ ID NO: 980123 - RNA, 19 nt, Human
ugguaaguggagcugggau

SEQ ID NO: 980124 - RNA, 19 nt, Human
ugucuguggacguagucuc

SEQ ID NO: 980125 - RNA, 18 nt, Human
uuuuuuuuuuuuuuuuug

SEQ ID NO: 980126 - RNA, 23 nt, Human
uuuuuuuuuuuuuuuuugacaug

SEQ ID NO: 980127 - RNA, 22 nt, Human
aaaaagacaaguuaaacaacaa

SEQ ID NO: 980128 - RNA, 25 nt, Human
aaacagaacaauacauucaaagaaa

SEQ ID NO: 980129 - RNA, 19 nt, Human
aacagaacaauacauucaa

SEQ ID NO: 980130 - RNA, 25 nt, Human
aagucguuuaaaaccuauuuaaaau

SEQ ID NO: 980131 - RNA, 19 nt, Human
aaucaucugaaauaacaca

SEQ ID NO: 980132 - RNA, 23 nt, Human
ccacagaagccgccgcacaggcu

SEQ ID NO: 980133 - RNA, 24 nt, Human
ccccgcaaacaaaagucguuuaaa

SEQ ID NO: 980134 - RNA, 18 nt, Human
cccgcaaacaaaagucgu

SEQ ID NO: 980135 - RNA, 18 nt, Human
cccgcaaacaaaagucgu

SEQ ID NO: 980136 - RNA, 23 nt, Human
ccgccgcacaggcucacaaacag

SEQ ID NO: 980137 - RNA, 21 nt, Human
ccggcccacagaagccgccgc

SEQ ID NO: 980138 - RNA, 21 nt, Human
cuaauacauucucauauuaca

SEQ ID NO: 980139 - RNA, 23 nt, Human
cucacaaacagcaacaacaacga

SEQ ID NO: 980140 - RNA, 20 nt, Human
gaccuaauucgguuuuccuu

SEQ ID NO: 980141 - RNA, 23 nt, Human
gccgcacaggcucacaaacagca

SEQ ID NO: 980142 - RNA, 19 nt, Human
uaaaagccccgcaaacaaa

SEQ ID NO: 980143 - RNA, 23 nt, Human
uaacaaaaagacaaguuaaacaa

SEQ ID NO: 980144 - RNA, 23 nt, Human
ucacaaacagcaacaacaacgac

SEQ ID NO: 980145 - RNA, 19 nt, Human
ugaaauaacacaaacagaa

SEQ ID NO: 980146 - RNA, 21 nt, Human
ugaaauaacacaaacagaaca

SEQ ID NO: 980147 - RNA, 27 nt, Human
ugcauaacaaaaagacaaguuaaacaa

SEQ ID NO: 980148 - RNA, 22 nt, Human
uguacuaauacauucucauauu

SEQ ID NO: 980149 - RNA, 19 nt, Human
uuuuuuuuuuuuuuuugcu

SEQ ID NO: 980150 - RNA, 18 nt, Human
uuuuuuuuuuuuuuuuug

SEQ ID NO: 980151 - RNA, 24 nt, Human
uuuuuuuuuuuuuuuuugcucuuu

SEQ ID NO: 980152 - RNA, 21 nt, Human
aaccgcgacgagaagcugguc

SEQ ID NO: 980153 - RNA, 23 nt, Human
accuggggcucagggcagccgcu

SEQ ID NO: 980154 - RNA, 20 nt, Human
agaagggacagaggaaaggg

SEQ ID NO: 980155 - RNA, 18 nt, Human
agagaaagaagggacaga

SEQ ID NO: 980156 - RNA, 21 nt, Human
agagaaagaagggacagagga

SEQ ID NO: 980157 - RNA, 22 nt, Human
agagcuccauggggcucugccc

SEQ ID NO: 980158 - RNA, 21 nt, Human
agaggaaaggggcugccccaa

SEQ ID NO: 980159 - RNA, 24 nt, Human
agccaggcucucguccucgcagcc

SEQ ID NO: 980160 - RNA, 20 nt, Human
agccgcuuccccacccagca

SEQ ID NO: 980161 - RNA, 20 nt, Human
aggaagggacagagaaagaa

SEQ ID NO: 980162 - RNA, 21 nt, Human
aggaagggacagagaaagaag

SEQ ID NO: 980163 - RNA, 23 nt, Human
aggcccaggcuggggcagcccug

SEQ ID NO: 980164 - RNA, 21 nt, Human
aggcucucguccucgcagccu

SEQ ID NO: 980165 - RNA, 19 nt, Human
aggcugcagaacguguggc

SEQ ID NO: 980166 - RNA, 19 nt, Human
agggacagagaaagaaggg

SEQ ID NO: 980167 - RNA, 22 nt, Human
caagaaggcaguuccacuggga

SEQ ID NO: 980168 - RNA, 23 nt, Human
caagagaggcccaggcuggggca

SEQ ID NO: 980169 - RNA, 21 nt, Human
cacagcagcagaggggcccua

SEQ ID NO: 980170 - RNA, 23 nt, Human
cagaaaggacugucccagccucg

SEQ ID NO: 980171 - RNA, 24 nt, Human
cagcaggggcugggccccacgcuc

SEQ ID NO: 980172 - RNA, 29 nt, Human
cagcccccgcugcgcgcuccgccagcccg

SEQ ID NO: 980173 - RNA, 25 nt, Human
cagccucgggagcaagagauggcuc

SEQ ID NO: 980174 - RNA, 21 nt, Human
cagcuguccucaucccugccc

SEQ ID NO: 980175 - RNA, 24 nt, Human
caggacgaagugccaggcccugcu

SEQ ID NO: 980176 - RNA, 20 nt, Human
caggcucggccccgccccac

SEQ ID NO: 980177 - RNA, 24 nt, Human
cagugcagucccagcaggggcugg

SEQ ID NO: 980178 - RNA, 19 nt, Human
ccacagaaaggacuguccc

SEQ ID NO: 980179 - RNA, 19 nt, Human
ccacccagcacagcagcag

SEQ ID NO: 980180 - RNA, 21 nt, Human
ccacccccaggcccgcccgca

SEQ ID NO: 980181 - RNA, 25 nt, Human
ccacgcucacacucgucuuccucuc

SEQ ID NO: 980182 - RNA, 18 nt, Human
ccaggcccgcccgcagug

SEQ ID NO: 980183 - RNA, 18 nt, Human
ccaggcuggggcagcccu

SEQ ID NO: 980184 - RNA, 24 nt, Human
cccagcuguccucaucccugccca

SEQ ID NO: 980185 - RNA, 25 nt, Human
cccaggcuggggcagcccugagagc

SEQ ID NO: 980186 - RNA, 25 nt, Human
ccccacccugggccucacgcacccc

SEQ ID NO: 980187 - RNA, 24 nt, Human
ccccgccccacccugggccucacg

SEQ ID NO: 980188 - RNA, 23 nt, Human
ccccgcugcgcgcuccgccagcc

SEQ ID NO: 980189 - RNA, 21 nt, Human
cccgccccacccugggccuca

SEQ ID NO: 980190 - RNA, 22 nt, Human
cccgcccgcagugcagucccag

SEQ ID NO: 980191 - RNA, 28 nt, Human
cccugcccacccccaggcccgcccgcag

SEQ ID NO: 980192 - RNA, 22 nt, Human
ccgcugcgcgcuccgccagccc

SEQ ID NO: 980193 - RNA, 28 nt, Human
ccgcugcgcgcuccgccagcccggcccu

SEQ ID NO: 980194 - RNA, 21 nt, Human
ccgugccagguguccaggugc

SEQ ID NO: 980195 - RNA, 23 nt, Human
ccucaucccugcccagcaggcug

SEQ ID NO: 980196 - RNA, 19 nt, Human
ccucccacaagaccugggg

SEQ ID NO: 980197 - RNA, 20 nt, Human
ccuccggacgggccucaucc

SEQ ID NO: 980198 - RNA, 19 nt, Human
ccugggggcagccaggguc

SEQ ID NO: 980199 - RNA, 21 nt, Human
cgaaccgcgacgagaagcugg

SEQ ID NO: 980200 - RNA, 22 nt, Human
cgugccagguguccaggugcac

SEQ ID NO: 980201 - RNA, 25 nt, Human
cuagagccacggcccgggcaucugc

SEQ ID NO: 980202 - RNA, 18 nt, Human
cucacacucgucuuccuc

SEQ ID NO: 980203 - RNA, 18 nt, Human
cucagggcagccgcuucc

SEQ ID NO: 980204 - RNA, 20 nt, Human
cucgcagccucccacaagac

SEQ ID NO: 980205 - RNA, 19 nt, Human
cucugcccugcccaccccc

SEQ ID NO: 980206 - RNA, 22 nt, Human
gaaagaagggacagaggaaagg

SEQ ID NO: 980207 - RNA, 22 nt, Human
gaagggacagagaaagaaggga

SEQ ID NO: 980208 - RNA, 20 nt, Human
gacagaggaaaggggcugcc

SEQ ID NO: 980209 - RNA, 24 nt, Human
gagaggcccaggcuggggcagccc

SEQ ID NO: 980210 - RNA, 22 nt, Human
gaguguggcuggaaggaaggga

SEQ ID NO: 980211 - RNA, 21 nt, Human
gccagcccggcccugacccac

SEQ ID NO: 980212 - RNA, 26 nt, Human
gccccagcccaagaaggcaguuccac

SEQ ID NO: 980213 - RNA, 26 nt, Human
gcccccacagaaaggacugucccagc

SEQ ID NO: 980214 - RNA, 22 nt, Human
gcccuugugguggaggaggccu

SEQ ID NO: 980215 - RNA, 21 nt, Human
gccugggggcagccagggucg

SEQ ID NO: 980216 - RNA, 21 nt, Human
ggaagggacagagaaagaagg

SEQ ID NO: 980217 - RNA, 26 nt, Human
ggccaugguggaaagaaucugcagcc

SEQ ID NO: 980218 - RNA, 27 nt, Human
ggcccaggcuggggcagcccugagagc

SEQ ID NO: 980219 - RNA, 23 nt, Human
gggcagccagggucgcagugagc

SEQ ID NO: 980220 - RNA, 24 nt, Human
gguggaaagaaucugcagcccccg

SEQ ID NO: 980221 - RNA, 22 nt, Human
gugguggaggaggccugggggc

SEQ ID NO: 980222 - RNA, 23 nt, Human
ucccacaagaccuggggcucagg

SEQ ID NO: 980223 - RNA, 23 nt, Human
ucccagacccagucgaaaucugc

SEQ ID NO: 980224 - RNA, 24 nt, Human
uccgggggcgucuggccauggugg

SEQ ID NO: 980225 - RNA, 24 nt, Human
ucuccgcagcggcagucccugccc

SEQ ID NO: 980226 - RNA, 19 nt, Human
ugccccagcccaagaaggc

SEQ ID NO: 980227 - RNA, 20 nt, Human
uggaaagaaucugcagcccc

SEQ ID NO: 980228 - RNA, 19 nt, Human
uggaggaggccugggggca

SEQ ID NO: 980229 - RNA, 23 nt, Human
uggccgaaccgcgacgagaagcu

SEQ ID NO: 980230 - RNA, 24 nt, Human
ugucacagcucagcaggguggcug

SEQ ID NO: 980231 - RNA, 18 nt, Human
aaacaggaaacaaacuug

SEQ ID NO: 980232 - RNA, 23 nt, Human
aaacaggaaacaaacuuguagaa

SEQ ID NO: 980233 - RNA, 22 nt, Human
aaacuuguagaagucuccuaaa

SEQ ID NO: 980234 - RNA, 21 nt, Human
aagccggaaggugucuccaca

SEQ ID NO: 980235 - RNA, 23 nt, Human
aagcgccuguucgggaagaaucc

SEQ ID NO: 980236 - RNA, 22 nt, Human
aaguggcacagaguccuaaaac

SEQ ID NO: 980237 - RNA, 24 nt, Human
acaauagaaagucuccugccuaaa

SEQ ID NO: 980238 - RNA, 22 nt, Human
accgggcugcggcaggggccca

SEQ ID NO: 980239 - RNA, 19 nt, Human
accuccacagccucuaccg

SEQ ID NO: 980240 - RNA, 19 nt, Human
acggggcugggaaccaggc

SEQ ID NO: 980241 - RNA, 24 nt, Human
acggggcugggaaccaggcuuccg

SEQ ID NO: 980242 - RNA, 19 nt, Human
agagguggcagcagcagug

SEQ ID NO: 980243 - RNA, 22 nt, Human
agaguccuaaaacggugugaca

SEQ ID NO: 980244 - RNA, 20 nt, Human
agcagcauuccugcgagagg

SEQ ID NO: 980245 - RNA, 23 nt, Human
aggaaggccccccaacccaggac

SEQ ID NO: 980246 - RNA, 19 nt, Human
aggcagugcugucuggggc

SEQ ID NO: 980247 - RNA, 19 nt, Human
aggcuuccggacgguagac

SEQ ID NO: 980248 - RNA, 21 nt, Human
agggcugccucgagggcagua

SEQ ID NO: 980249 - RNA, 27 nt, Human
aggggcacggcgucaggcuucccaagg

SEQ ID NO: 980250 - RNA, 18 nt, Human
aggugucugacuugggag

SEQ ID NO: 980251 - RNA, 20 nt, Human
augcccccaguucccccguu

SEQ ID NO: 980252 - RNA, 23 nt, Human
caaaccagucagacucaucuucc

SEQ ID NO: 980253 - RNA, 22 nt, Human
caagcugauaaauaaacagcac

SEQ ID NO: 980254 - RNA, 21 nt, Human
cacggggcugggaaccaggcu

SEQ ID NO: 980255 - RNA, 27 nt, Human
cacuccaggaaggccccccaacccagg

SEQ ID NO: 980256 - RNA, 19 nt, Human
cacugcacuguccacuugc

SEQ ID NO: 980257 - RNA, 22 nt, Human
cacuggcuaauuucucccuggc

SEQ ID NO: 980258 - RNA, 23 nt, Human
caggagggucgggcccugcggug

SEQ ID NO: 980259 - RNA, 19 nt, Human
caggauuuccaggaggugc

SEQ ID NO: 980260 - RNA, 23 nt, Human
ccaagcuccauaaaagagagggc

SEQ ID NO: 980261 - RNA, 23 nt, Human
ccacugcugugaugauuuccagu

SEQ ID NO: 980262 - RNA, 22 nt, Human
ccagagacccugacacuccagg

SEQ ID NO: 980263 - RNA, 23 nt, Human
ccaggcucucuguggcuccgaag

SEQ ID NO: 980264 - RNA, 22 nt, Human
cccagagacccugacacuccag

SEQ ID NO: 980265 - RNA, 22 nt, Human
ccccaguucccccguuagcacc

SEQ ID NO: 980266 - RNA, 22 nt, Human
cccccaguucccccguuagcac

SEQ ID NO: 980267 - RNA, 18 nt, Human
cccuggcaaggcguaugg

SEQ ID NO: 980268 - RNA, 22 nt, Human
ccgcugcaggccaccgcuaccu

SEQ ID NO: 980269 - RNA, 21 nt, Human
ccugacacuccaggaaggccc

SEQ ID NO: 980270 - RNA, 21 nt, Human
cgcccuggcaaggcguauggg

SEQ ID NO: 980271 - RNA, 22 nt, Human
cggggaggaggccgcugcaggc

SEQ ID NO: 980272 - RNA, 21 nt, Human
cuccccguagccaggaauggg

SEQ ID NO: 980273 - RNA, 25 nt, Human
cucccuggcccugucugcaacgggg

SEQ ID NO: 980274 - RNA, 22 nt, Human
cucgugggagccuccacucccc

SEQ ID NO: 980275 - RNA, 23 nt, Human
cucuccgcauuccucuuuuaaaa

SEQ ID NO: 980276 - RNA, 21 nt, Human
cugccgccgccgccucccccu

SEQ ID NO: 980277 - RNA, 20 nt, Human
cugcgguugggccuccuggg

SEQ ID NO: 980278 - RNA, 18 nt, Human
cuggcagguccuggacuc

SEQ ID NO: 980279 - RNA, 21 nt, Human
cuguggcuccgaaggaggugu

SEQ ID NO: 980280 - RNA, 22 nt, Human
gacaggagggucgggcccugcg

SEQ ID NO: 980281 - RNA, 18 nt, Human
gacugugaaugacaggag

SEQ ID NO: 980282 - RNA, 19 nt, Human
gaggaggccgcugcaggcc

SEQ ID NO: 980283 - RNA, 19 nt, Human
gaggggucugcugccgccg

SEQ ID NO: 980284 - RNA, 21 nt, Human
gcagcagcaguggcggcggag

SEQ ID NO: 980285 - RNA, 25 nt, Human
gccacggggcugggaaccaggcuuc

SEQ ID NO: 980286 - RNA, 24 nt, Human
gcccugucugcaacggggcacaca

SEQ ID NO: 980287 - RNA, 18 nt, Human
ggaggaagaggcagugcu

SEQ ID NO: 980288 - RNA, 18 nt, Human
ggcagcagcaguggcggc

SEQ ID NO: 980289 - RNA, 24 nt, Human
ggcagguccuggacucccuggaga

SEQ ID NO: 980290 - RNA, 18 nt, Human
ggcagugggguggggagg

SEQ ID NO: 980291 - RNA, 19 nt, Human
ggcagugggguggggagga

SEQ ID NO: 980292 - RNA, 21 nt, Human
gggaggaagaggcagugcugu

SEQ ID NO: 980293 - RNA, 22 nt, Human
gguccuggacucccuggagagg

SEQ ID NO: 980294 - RNA, 21 nt, Human
guccuggacucccuggagagg

SEQ ID NO: 980295 - RNA, 24 nt, Human
guggcagcagcaguggcggcggag

SEQ ID NO: 980296 - RNA, 20 nt, Human
guggcagcagcaguggcggg

SEQ ID NO: 980297 - RNA, 22 nt, Human
gugggguggggaggaagaggca

SEQ ID NO: 980298 - RNA, 23 nt, Human
uaaggaaacaggcucucugauca

SEQ ID NO: 980299 - RNA, 19 nt, Human
uaccgggcugcggcagggg

SEQ ID NO: 980300 - RNA, 18 nt, Human
uaccucgugggagccucc

SEQ ID NO: 980301 - RNA, 24 nt, Human
uagaaagucuccugccuaaauguu

SEQ ID NO: 980302 - RNA, 21 nt, Human
ucaguggcugggaaggggagc

SEQ ID NO: 980303 - RNA, 21 nt, Human
ucauucaucagucaaauucac

SEQ ID NO: 980304 - RNA, 22 nt, Human
uccacagccucuaccgggcugc

SEQ ID NO: 980305 - RNA, 19 nt, Human
uccacccuuccagucacaa

SEQ ID NO: 980306 - RNA, 21 nt, Human
uccaggaaggccccccaaccc

SEQ ID NO: 980307 - RNA, 21 nt, Human
ucccauauccacccuuccagu

SEQ ID NO: 980308 - RNA, 18 nt, Human
ucccugaagagagguguc

SEQ ID NO: 980309 - RNA, 21 nt, Human
ucccugaagagaggugucugg

SEQ ID NO: 980310 - RNA, 24 nt, Human
uccucuccgcauuccucuuuuaaa

SEQ ID NO: 980311 - RNA, 22 nt, Human
ucugcgguugggccuccuggga

SEQ ID NO: 980312 - RNA, 22 nt, Human
ucugcugccgccgccgccuccc

SEQ ID NO: 980313 - RNA, 22 nt, Human
ucugugcugcccaucaggcuug

SEQ ID NO: 980314 - RNA, 22 nt, Human
ucuguggcuccgaaggaggugu

SEQ ID NO: 980315 - RNA, 24 nt, Human
ucugugucugugcugcccaucagg

SEQ ID NO: 980316 - RNA, 18 nt, Human
ugaaugacaaacuuuauu

SEQ ID NO: 980317 - RNA, 20 nt, Human
ugaaugacaaacuuuauuaa

SEQ ID NO: 980318 - RNA, 24 nt, Human
ugacaaacuuuauuagaaacgcuc

SEQ ID NO: 980319 - RNA, 18 nt, Human
ugacuugggagggcugcc

SEQ ID NO: 980320 - RNA, 20 nt, Human
ugaguguccuggggagccag

SEQ ID NO: 980321 - RNA, 21 nt, Human
ugaguguccuggggagccagg

SEQ ID NO: 980322 - RNA, 22 nt, Human
ugaguguccuggggagccagga

SEQ ID NO: 980323 - RNA, 19 nt, Human
ugaguguccuggggagccg

SEQ ID NO: 980324 - RNA, 18 nt, Human
ugaguguccuggggagcg

SEQ ID NO: 980325 - RNA, 24 nt, Human
ugcacuggcuaauuucucccuggc

SEQ ID NO: 980326 - RNA, 21 nt, Human
ugccaugggacugugaaugac

SEQ ID NO: 980327 - RNA, 19 nt, Human
ugcccagagacccugacac

SEQ ID NO: 980328 - RNA, 19 nt, Human
ugccgcacccugaauggac

SEQ ID NO: 980329 - RNA, 22 nt, Human
ugcgguugggccuccugggaac

SEQ ID NO: 980330 - RNA, 22 nt, Human
uggcaagagaccuuucguuucc

SEQ ID NO: 980331 - RNA, 20 nt, Human
uggcugggaaggggagcacg

SEQ ID NO: 980332 - RNA, 19 nt, Human
ugggagccuccacuccccg

SEQ ID NO: 980333 - RNA, 21 nt, Human
ugggccuccugggaacagucu

SEQ ID NO: 980334 - RNA, 27 nt, Human
uggggaggaagaggcagugcugucugg

SEQ ID NO: 980335 - RNA, 18 nt, Human
uggggcaaaccagucaga

SEQ ID NO: 980336 - RNA, 21 nt, Human
uggggcucugauaucccacug

SEQ ID NO: 980337 - RNA, 19 nt, Human
ugggguggggaggaagagg

SEQ ID NO: 980338 - RNA, 22 nt, Human
ugguggcaggauuuccaggagg

SEQ ID NO: 980339 - RNA, 18 nt, Human
ugucugaaacauauaaga

SEQ ID NO: 980340 - RNA, 18 nt, Human
uguuuuauucauucucuu

SEQ ID NO: 980341 - RNA, 20 nt, Human
uugggugucacaaugccccc

SEQ ID NO: 980342 - RNA, 20 nt, Human
uuuccaaaguugguaccaca

SEQ ID NO: 980343 - RNA, 20 nt, Human
uuuuuuuuuuuugaaggacu

SEQ ID NO: 980344 - RNA, 21 nt, Human
uuuuuuuuuuuuuuuugaagg

SEQ ID NO: 980345 - RNA, 18 nt, Human
uuuuuuuuuuuuuuuuug

SEQ ID NO: 980346 - RNA, 21 nt, Human
aaagaguauuuuaauucuugu

SEQ ID NO: 980347 - RNA, 24 nt, Human
cuaacccgagcagcccagccacgc

SEQ ID NO: 980348 - RNA, 30 nt, Human
cuguaccaaaugauggccaaagaagaaucc

SEQ ID NO: 980349 - RNA, 20 nt, Human
uggaaaugagacuguaccaa

SEQ ID NO: 980350 - RNA, 25 nt, Human
aaacgugaaaaaaaggauggaauaa

SEQ ID NO: 980351 - RNA, 23 nt, Human
aaagucccuacuuauuucuacuu

SEQ ID NO: 980352 - RNA, 28 nt, Human
acauauacauacacacauaauuauuugc

SEQ ID NO: 980353 - RNA, 26 nt, Human
agagcaggaaauaaaaagggggaccc

SEQ ID NO: 980354 - RNA, 24 nt, Human
auaaagcagugauauacacagcac

SEQ ID NO: 980355 - RNA, 18 nt, Human
auguauguauguguauau

SEQ ID NO: 980356 - RNA, 24 nt, Human
auuuuauuccuauccaugauugca

SEQ ID NO: 980357 - RNA, 26 nt, Human
cacacauauacauacacacauaauua

SEQ ID NO: 980358 - RNA, 18 nt, Human
caggagcaacuuguaaua

SEQ ID NO: 980359 - RNA, 21 nt, Human
cagugauauacacagcacaaa

SEQ ID NO: 980360 - RNA, 23 nt, Human
ccacacauauacauacacacaua

SEQ ID NO: 980361 - RNA, 21 nt, Human
cccacacauauacauacacac

SEQ ID NO: 980362 - RNA, 24 nt, Human
cccacacauauacauacacacaua

SEQ ID NO: 980363 - RNA, 18 nt, Human
cccacugucacgcaccug

SEQ ID NO: 980364 - RNA, 18 nt, Human
cucccacugucacgcacc

SEQ ID NO: 980365 - RNA, 21 nt, Human
cucucaaauaagcgauuuuau

SEQ ID NO: 980366 - RNA, 23 nt, Human
cuugugccgagagcagcucccac

SEQ ID NO: 980367 - RNA, 21 nt, Human
gcuugugccgagagcagcucc

SEQ ID NO: 980368 - RNA, 18 nt, Human
ggagcaacuuguaauaau

SEQ ID NO: 980369 - RNA, 18 nt, Human
uaacaucugaguucaccu

SEQ ID NO: 980370 - RNA, 19 nt, Human
uacacagcacaaaauaguu

SEQ ID NO: 980371 - RNA, 23 nt, Human
uacaguacauucucuuucccaca

SEQ ID NO: 980372 - RNA, 27 nt, Human
uaguucugugaagggcugacucacugu

SEQ ID NO: 980373 - RNA, 24 nt, Human
uauguauguguauaugucuguaua

SEQ ID NO: 980374 - RNA, 20 nt, Human
uauguguauaugucuguaua

SEQ ID NO: 980375 - RNA, 20 nt, Human
uauguguauaugucuguaua

SEQ ID NO: 980376 - RNA, 22 nt, Human
uauguguauaugucuguauaac

SEQ ID NO: 980377 - RNA, 22 nt, Human
ucacauuuggacccgcuuucuu

SEQ ID NO: 980378 - RNA, 19 nt, Human
uccguaguaguucugugaa

SEQ ID NO: 980379 - RNA, 19 nt, Human
ugagauuccuuuguuuaac

SEQ ID NO: 980380 - RNA, 19 nt, Human
ugauauacacagcacaaaa

SEQ ID NO: 980381 - RNA, 23 nt, Human
ugauugcagacauuuacaaaacc

SEQ ID NO: 980382 - RNA, 22 nt, Human
ugccgagagcagcucccacugu

SEQ ID NO: 980383 - RNA, 23 nt, Human
ugccgagagcagcucccacuguc

SEQ ID NO: 980384 - RNA, 18 nt, Human
uguaaacgugaaaaaaag

SEQ ID NO: 980385 - RNA, 25 nt, Human
ugucuguauaacauacacauauaca

SEQ ID NO: 980386 - RNA, 18 nt, Human
uguuuaacuguacacugu

SEQ ID NO: 980387 - RNA, 26 nt, Human
uucccacacauauacauacacacaua

SEQ ID NO: 980388 - RNA, 23 nt, Human
agcugccccucgcucccggcccc

SEQ ID NO: 980389 - RNA, 19 nt, Human
auggaauaaaaaguuuggc

SEQ ID NO: 980390 - RNA, 24 nt, Human
cagggaagagggcgccgagccucg

SEQ ID NO: 980391 - RNA, 20 nt, Human
ccaggcgcuggcuccgcgcu

SEQ ID NO: 980392 - RNA, 19 nt, Human
ccccccaggcgcuggcucc

SEQ ID NO: 980393 - RNA, 30 nt, Human
ccccccaggcgcuggcuccgcgcucuuucc

SEQ ID NO: 980394 - RNA, 20 nt, Human
ccccucccucccccccaggc

SEQ ID NO: 980395 - RNA, 18 nt, Human
ccccucgcucccggcccc

SEQ ID NO: 980396 - RNA, 23 nt, Human
ccgccgccgccgccgccgccgcu

SEQ ID NO: 980397 - RNA, 27 nt, Human
ccgccgccgccgccgcuaccgcuccgg

SEQ ID NO: 980398 - RNA, 18 nt, Human
ccgcgcucuuuccagcug

SEQ ID NO: 980399 - RNA, 19 nt, Human
ccgcgcucuuuccagcugu

SEQ ID NO: 980400 - RNA, 21 nt, Human
ccucgccgccgccgccgccgc

SEQ ID NO: 980401 - RNA, 22 nt, Human
ccucgccgcgcuccccucccuc

SEQ ID NO: 980402 - RNA, 27 nt, Human
ccucgccgcgcuccccucccucccccc

SEQ ID NO: 980403 - RNA, 27 nt, Human
cgccgagccucgccgccgccgccgccg

SEQ ID NO: 980404 - RNA, 23 nt, Human
cgccgccgccgccgccgcuaccg

SEQ ID NO: 980405 - RNA, 21 nt, Human
cgcgcuccccucccucccccc

SEQ ID NO: 980406 - RNA, 24 nt, Human
cggcgcucgcucgcucucucgcuc

SEQ ID NO: 980407 - RNA, 22 nt, Human
cucgcucgcuggcgcucuccuc

SEQ ID NO: 980408 - RNA, 23 nt, Human
cucgcucgcuggcgcucuccucg

SEQ ID NO: 980409 - RNA, 18 nt, Human
cucgcuggcgcucuccuc

SEQ ID NO: 980410 - RNA, 19 nt, Human
cuggcgcucuccucgccgc

SEQ ID NO: 980411 - RNA, 20 nt, Human
gaaacuaaaauugggaaagg

SEQ ID NO: 980412 - RNA, 23 nt, Human
gcgcuggcuccgcgcucuuucca

SEQ ID NO: 980413 - RNA, 24 nt, Human
ggggcguggauggggugggagggg

SEQ ID NO: 980414 - RNA, 25 nt, Human
ucgccgccgccgccgccgccgccgg

SEQ ID NO: 980415 - RNA, 24 nt, Human
ucgccgccgccgccgccgccggcg

SEQ ID NO: 980416 - RNA, 18 nt, Human
uggggugggaggggguug

SEQ ID NO: 980417 - RNA, 19 nt, Human
uggggugggaggggguuga

SEQ ID NO: 980418 - RNA, 21 nt, Human
uggggugggaggggguugagg

SEQ ID NO: 980419 - RNA, 22 nt, Human
uggggugggaggggguugaggg

SEQ ID NO: 980420 - RNA, 24 nt, Human
uuuuuuuuuuuuuuguuuuaugga

SEQ ID NO: 980421 - RNA, 24 nt, Human
uuuuuuuuuuuuuuuuguuuuaug

SEQ ID NO: 980422 - RNA, 18 nt, Human
uuuuuuuuuuuuuuuuug

SEQ ID NO: 980423 - RNA, 24 nt, Human
uuuuuuuuuuuuuuuuuuuguuuu

SEQ ID NO: 980424 - RNA, 18 nt, Human
agagaggcccggggcugc

SEQ ID NO: 980425 - RNA, 21 nt, Human
aggcgggcacggcaggcaucg

SEQ ID NO: 980426 - RNA, 23 nt, Human
aggggcgcugggcagaagccuag

SEQ ID NO: 980427 - RNA, 22 nt, Human
auacagaaaagaacgucucuga

SEQ ID NO: 980428 - RNA, 23 nt, Human
caaauggcaggaaggguccauac

SEQ ID NO: 980429 - RNA, 24 nt, Human
caagccuugauuggccaggagucc

SEQ ID NO: 980430 - RNA, 24 nt, Human
cagaaaagaacgucucugaggucc

SEQ ID NO: 980431 - RNA, 22 nt, Human
cagcggcggcuccagcuccggc

SEQ ID NO: 980432 - RNA, 19 nt, Human
ccaggcgggcacggcaggc

SEQ ID NO: 980433 - RNA, 21 nt, Human
ccccaaagagccuuucucucu

SEQ ID NO: 980434 - RNA, 20 nt, Human
ccccccaaagagccuuucuc

SEQ ID NO: 980435 - RNA, 21 nt, Human
ccccgagccccaggcgggcac

SEQ ID NO: 980436 - RNA, 21 nt, Human
ccccucgcccugagcaggggc

SEQ ID NO: 980437 - RNA, 21 nt, Human
ccccugacguccuggggagag

SEQ ID NO: 980438 - RNA, 22 nt, Human
ccgcgggccgcgcuugccgucg

SEQ ID NO: 980439 - RNA, 23 nt, Human
ccucaccgccccgagccccaggc

SEQ ID NO: 980440 - RNA, 20 nt, Human
ccucccagcugggcaagccu

SEQ ID NO: 980441 - RNA, 18 nt, Human
cgccgccgccgccggggc

SEQ ID NO: 980442 - RNA, 20 nt, Human
cgccgcgggccgcgcuugcc

SEQ ID NO: 980443 - RNA, 30 nt, Human
cgcggcggcggcggcagcggcggcuccuuu

SEQ ID NO: 980444 - RNA, 22 nt, Human
cggccgcaggguggcuuuuuuu

SEQ ID NO: 980445 - RNA, 21 nt, Human
cggcggcagcggcggcuccag

SEQ ID NO: 980446 - RNA, 20 nt, Human
cuaggcccgcagagaggccc

SEQ ID NO: 980447 - RNA, 23 nt, Human
cuccacgccgccgccgccggggc

SEQ ID NO: 980448 - RNA, 21 nt, Human
gccccgagccccaggcgggca

SEQ ID NO: 980449 - RNA, 25 nt, Human
gcggcggcagcggcggcuccagcuc

SEQ ID NO: 980450 - RNA, 20 nt, Human
gcuccacgccgccgccgccg

SEQ ID NO: 980451 - RNA, 20 nt, Human
ggagaggggccccccaaaga

SEQ ID NO: 980452 - RNA, 21 nt, Human
ggccgcggcggcggcggcagc

SEQ ID NO: 980453 - RNA, 20 nt, Human
gggagaggggccccccaaag

SEQ ID NO: 980454 - RNA, 20 nt, Human
gggccccccaaagagccuuu

SEQ ID NO: 980455 - RNA, 22 nt, Human
uaccccgcgccccgggccucac

SEQ ID NO: 980456 - RNA, 18 nt, Human
ucaccgccccgagcccca

SEQ ID NO: 980457 - RNA, 25 nt, Human
uccacgccgccgccgccggggccca

SEQ ID NO: 980458 - RNA, 27 nt, Human
uccacgccgccgccgccggggcccaca

SEQ ID NO: 980459 - RNA, 21 nt, Human
uggcaggaaggguccauacag

SEQ ID NO: 980460 - RNA, 24 nt, Human
uuaauaaaaugguaagagucuuuc

SEQ ID NO: 980461 - RNA, 22 nt, Human
uuuuuuuuuuuuuuuuuaccaa

SEQ ID NO: 980462 - RNA, 20 nt, Human
aaaaaacaaacaccagcuua

SEQ ID NO: 980463 - RNA, 20 nt, Human
aaaaccaaaugggaaaccau

SEQ ID NO: 980464 - RNA, 22 nt, Human
aaacaucuccaucuaauaaaga

SEQ ID NO: 980465 - RNA, 25 nt, Human
aaccucauaaaauucuauccuacug

SEQ ID NO: 980466 - RNA, 20 nt, Human
aaccuccccaagaauuaaga

SEQ ID NO: 980467 - RNA, 21 nt, Human
aaccuccccaagaauuaagag

SEQ ID NO: 980468 - RNA, 22 nt, Human
aauagcaaagugccuaaguuuc

SEQ ID NO: 980469 - RNA, 19 nt, Human
aauuacauuugucuugggu

SEQ ID NO: 980470 - RNA, 20 nt, Human
acauauaaaaccaaauggga

SEQ ID NO: 980471 - RNA, 24 nt, Human
acauuguacacuguauacaguagc

SEQ ID NO: 980472 - RNA, 19 nt, Human
agacagaaaaagaaacagg

SEQ ID NO: 980473 - RNA, 23 nt, Human
agacagaaaaagaaacaucucca

SEQ ID NO: 980474 - RNA, 21 nt, Human
augaaaaauacugacauacaa

SEQ ID NO: 980475 - RNA, 24 nt, Human
augcaaaaaguaaaaguacauagu

SEQ ID NO: 980476 - RNA, 18 nt, Human
caacagaacaguuuuucu

SEQ ID NO: 980477 - RNA, 19 nt, Human
cagaaaaagaaacaucucc

SEQ ID NO: 980478 - RNA, 20 nt, Human
cagaaaaagaaacaucucca

SEQ ID NO: 980479 - RNA, 20 nt, Human
cagcaguggagggaaaaauc

SEQ ID NO: 980480 - RNA, 23 nt, Human
cauuuugaaaaaacaaacaccag

SEQ ID NO: 980481 - RNA, 18 nt, Human
ccaaaagaaaaauacuac

SEQ ID NO: 980482 - RNA, 19 nt, Human
gaacuaaaaucauuuuaug

SEQ ID NO: 980483 - RNA, 21 nt, Human
guaaagcaacaaggcuuacag

SEQ ID NO: 980484 - RNA, 20 nt, Human
guagcccagcucaacagcaa

SEQ ID NO: 980485 - RNA, 20 nt, Human
uaaaaccaaaugggaaacca

SEQ ID NO: 980486 - RNA, 22 nt, Human
uaaggcacauuuccaaaagaaa

SEQ ID NO: 980487 - RNA, 19 nt, Human
uagaagacagaaaaagaaa

SEQ ID NO: 980488 - RNA, 20 nt, Human
uagaagacagaaaaagaaac

SEQ ID NO: 980489 - RNA, 19 nt, Human
uauaaaaccaaaugggaaa

SEQ ID NO: 980490 - RNA, 23 nt, Human
uauuacacagcuaauaggaucca

SEQ ID NO: 980491 - RNA, 23 nt, Human
ugacauuaauuaacagcagugga

SEQ ID NO: 980492 - RNA, 24 nt, Human
ugcacaguaaauaccucauagagg

SEQ ID NO: 980493 - RNA, 21 nt, Human
uuagucuagaagacagaaaaa

SEQ ID NO: 980494 - RNA, 21 nt, Human
uuccaaaagaaaaauacuaca

SEQ ID NO: 980495 - RNA, 23 nt, Human
uuggguaaagcaacaaggcuuac

SEQ ID NO: 980496 - RNA, 22 nt, Human
aaccuucuccuccccaccaccc

SEQ ID NO: 980497 - RNA, 22 nt, Human
aaggaguuguggauccucuuca

SEQ ID NO: 980498 - RNA, 22 nt, Human
aaggaguuguggauccucuuca

SEQ ID NO: 980499 - RNA, 24 nt, Human
aagguaccuucagucccucuacca

SEQ ID NO: 980500 - RNA, 24 nt, Human
aagguaccuucagucccucuacca

SEQ ID NO: 980501 - RNA, 23 nt, Human
acggagcaccgcaaagcucugcc

SEQ ID NO: 980502 - RNA, 18 nt, Human
agaaaggacaaaaagaag

SEQ ID NO: 980503 - RNA, 18 nt, Human
agaaaggacaaaaagaag

SEQ ID NO: 980504 - RNA, 24 nt, Human
agaccucuggcaugucacuggucu

SEQ ID NO: 980505 - RNA, 20 nt, Human
agaggaaaugcagggcucuc

SEQ ID NO: 980506 - RNA, 22 nt, Human
agaggacaggaggugcagggag

SEQ ID NO: 980507 - RNA, 25 nt, Human
agauacuguaaggcuaugaaaaacu

SEQ ID NO: 980508 - RNA, 25 nt, Human
agauacuguaaggcuaugaaaaacu

SEQ ID NO: 980509 - RNA, 25 nt, Human
aggacaaaaagaagacuaucucugg

SEQ ID NO: 980510 - RNA, 19 nt, Human
aggaggugcagggaggggg

SEQ ID NO: 980511 - RNA, 22 nt, Human
aggcuguaggaggugaggcugu

SEQ ID NO: 980512 - RNA, 22 nt, Human
aggcuguaggaggugaggcugu

SEQ ID NO: 980513 - RNA, 18 nt, Human
agggagggggcgggggug

SEQ ID NO: 980514 - RNA, 20 nt, Human
agggagggggcggggguggg

SEQ ID NO: 980515 - RNA, 19 nt, Human
aggggugggaggugaggcu

SEQ ID NO: 980516 - RNA, 19 nt, Human
aggggugggaggugaggcu

SEQ ID NO: 980517 - RNA, 25 nt, Human
augccuacaaccuucuccuccccac

SEQ ID NO: 980518 - RNA, 28 nt, Human
cacccgggccuggcaccuccucgggggc

SEQ ID NO: 980519 - RNA, 27 nt, Human
cacggagcaccgcaaagcucugccuuc

SEQ ID NO: 980520 - RNA, 20 nt, Human
cacggccccuucccucaacc

SEQ ID NO: 980521 - RNA, 27 nt, Human
cagcagcaaagaccuggaccgguggag

SEQ ID NO: 980522 - RNA, 27 nt, Human
cagcagcaaagaccuggaccgguggag

SEQ ID NO: 980523 - RNA, 22 nt, Human
cagcuccaaggagggcuccaga

SEQ ID NO: 980524 - RNA, 25 nt, Human
caggacagccccacggagcaccgca

SEQ ID NO: 980525 - RNA, 19 nt, Human
cagggagggggcgggggug

SEQ ID NO: 980526 - RNA, 26 nt, Human
caugccuacaaccuucuccuccccac

SEQ ID NO: 980527 - RNA, 24 nt, Human
ccaaggaguuguggauccucuucu

SEQ ID NO: 980528 - RNA, 24 nt, Human
ccaaggaguuguggauccucuucu

SEQ ID NO: 980529 - RNA, 18 nt, Human
ccacggagcaccgcaaag

SEQ ID NO: 980530 - RNA, 21 nt, Human
ccacugucaugcacgcuggcc

SEQ ID NO: 980531 - RNA, 20 nt, Human
ccaugccuacaaccuucucc

SEQ ID NO: 980532 - RNA, 21 nt, Human
ccccaaagguaccuucagucc

SEQ ID NO: 980533 - RNA, 21 nt, Human
ccccaaagguaccuucagucc

SEQ ID NO: 980534 - RNA, 25 nt, Human
ccccaaagguaccuucagucccucu

SEQ ID NO: 980535 - RNA, 25 nt, Human
ccccaaagguaccuucagucccucu

SEQ ID NO: 980536 - RNA, 28 nt, Human
ccccaaagguaccuucagucccucuacc

SEQ ID NO: 980537 - RNA, 28 nt, Human
ccccaaagguaccuucagucccucuacc

SEQ ID NO: 980538 - RNA, 24 nt, Human
ccccacgggcguggaggcgccgcu

SEQ ID NO: 980539 - RNA, 23 nt, Human
cccgggccuggcaccuccucggg

SEQ ID NO: 980540 - RNA, 28 nt, Human
cccucuaccacaucccaguuagaaaguc

SEQ ID NO: 980541 - RNA, 28 nt, Human
cccucuaccacaucccaguuagaaaguc

SEQ ID NO: 980542 - RNA, 18 nt, Human
cccugcuccugcuccugg

SEQ ID NO: 980543 - RNA, 19 nt, Human
cccuucccucaaccccgcg

SEQ ID NO: 980544 - RNA, 19 nt, Human
cccuucccucaaccccgcg

SEQ ID NO: 980545 - RNA, 19 nt, Human
ccggaaccugggcguagag

SEQ ID NO: 980546 - RNA, 21 nt, Human
ccugcagucccaggacagccc

SEQ ID NO: 980547 - RNA, 26 nt, Human
ccugccccugcuccugcuccuggaag

SEQ ID NO: 980548 - RNA, 20 nt, Human
ccuucgcuggaccgccuggu

SEQ ID NO: 980549 - RNA, 21 nt, Human
cgaacggcucacugugaccaa

SEQ ID NO: 980550 - RNA, 20 nt, Human
cgcugcccgggggcgaacgg

SEQ ID NO: 980551 - RNA, 18 nt, Human
cggccccuucccucaacc

SEQ ID NO: 980552 - RNA, 19 nt, Human
cggccccuucccucaaccc

SEQ ID NO: 980553 - RNA, 22 nt, Human
cgggcguggaggcgccgcugcc

SEQ ID NO: 980554 - RNA, 23 nt, Human
cuccacugucaugcacgcuggcc

SEQ ID NO: 980555 - RNA, 21 nt, Human
cugagaggaaugugugcggca

SEQ ID NO: 980556 - RNA, 18 nt, Human
cugccccugccccugccc

SEQ ID NO: 980557 - RNA, 19 nt, Human
cugccccugccccugcccc

SEQ ID NO: 980558 - RNA, 19 nt, Human
cugccccugccccugcucc

SEQ ID NO: 980559 - RNA, 19 nt, Human
cugccccugcuccugcucc

SEQ ID NO: 980560 - RNA, 18 nt, Human
cugcccgggggcgaacgg

SEQ ID NO: 980561 - RNA, 24 nt, Human
cuggcaccgggcacggccccuucc

SEQ ID NO: 980562 - RNA, 24 nt, Human
cuggcaccgggcacggccccuucc

SEQ ID NO: 980563 - RNA, 21 nt, Human
cugugaccagggccauggagc

SEQ ID NO: 980564 - RNA, 23 nt, Human
gacaaaaagaagacuaucucugg

SEQ ID NO: 980565 - RNA, 20 nt, Human
gaccucaugaccccucggag

SEQ ID NO: 980566 - RNA, 20 nt, Human
gaggauccugccugccuuug

SEQ ID NO: 980567 - RNA, 20 nt, Human
gaggcccccuguccaccugc

SEQ ID NO: 980568 - RNA, 26 nt, Human
gauccugccugccuuugggggccacc

SEQ ID NO: 980569 - RNA, 27 nt, Human
gauccugccugccuuugggggccacca

SEQ ID NO: 980570 - RNA, 21 nt, Human
gcaugugugagggcucaggcc

SEQ ID NO: 980571 - RNA, 19 nt, Human
gccagcccuuccagccucc

SEQ ID NO: 980572 - RNA, 19 nt, Human
gccagcccuuccagccucc

SEQ ID NO: 980573 - RNA, 21 nt, Human
gcccugugaucuggcguggug

SEQ ID NO: 980574 - RNA, 21 nt, Human
gcccugugaucuggcguggug

SEQ ID NO: 980575 - RNA, 22 nt, Human
gccgcugcccgggggcgaacgg

SEQ ID NO: 980576 - RNA, 19 nt, Human
gcggagcugagaggaaugu

SEQ ID NO: 980577 - RNA, 18 nt, Human
gcuggccugucucaccac

SEQ ID NO: 980578 - RNA, 18 nt, Human
gcuggggccugaggaucc

SEQ ID NO: 980579 - RNA, 21 nt, Human
ggagucgacuccuucgcugga

SEQ ID NO: 980580 - RNA, 25 nt, Human
ggcagacaugggccugggacuuaag

SEQ ID NO: 980581 - RNA, 25 nt, Human
ggcagacaugggccugggacuuaag

SEQ ID NO: 980582 - RNA, 21 nt, Human
ggccuggcaccuccucggggg

SEQ ID NO: 980583 - RNA, 20 nt, Human
ggcguggaggcgccgcugcc

SEQ ID NO: 980584 - RNA, 20 nt, Human
ggcuggggccugaggauccu

SEQ ID NO: 980585 - RNA, 23 nt, Human
ggcuggggccugaggauccugcc

SEQ ID NO: 980586 - RNA, 23 nt, Human
ggcuggggccugaggauccugcc

SEQ ID NO: 980587 - RNA, 21 nt, Human
gggcggagcugagaggaaugu

SEQ ID NO: 980588 - RNA, 23 nt, Human
gggcgggggugggaggcgugacc

SEQ ID NO: 980589 - RNA, 19 nt, Human
gggcucucccugccccugc

SEQ ID NO: 980590 - RNA, 21 nt, Human
gggcugcagaggcucuucaug

SEQ ID NO: 980591 - RNA, 18 nt, Human
ggggcgggggugggaggc

SEQ ID NO: 980592 - RNA, 21 nt, Human
gugcagggagggggcgggggu

SEQ ID NO: 980593 - RNA, 20 nt, Human
guggagguggaugagggaag

SEQ ID NO: 980594 - RNA, 20 nt, Human
guggagguggaugagggaag

SEQ ID NO: 980595 - RNA, 23 nt, Human
uagccagaggccagaaaggacaa

SEQ ID NO: 980596 - RNA, 23 nt, Human
uagccagaggccagaaaggacaa

SEQ ID NO: 980597 - RNA, 19 nt, Human
uaugaaaaacugacuagcc

SEQ ID NO: 980598 - RNA, 19 nt, Human
uaugaaaaacugacuagcc

SEQ ID NO: 980599 - RNA, 24 nt, Human
ucacuggucucugaggugcucucc

SEQ ID NO: 980600 - RNA, 24 nt, Human
ucccucaaccccgcggacaguccu

SEQ ID NO: 980601 - RNA, 24 nt, Human
ucccucaaccccgcggacaguccu

SEQ ID NO: 980602 - RNA, 18 nt, Human
uccucgggggcggcccuu

SEQ ID NO: 980603 - RNA, 18 nt, Human
uccuggacccgcaggacc

SEQ ID NO: 980604 - RNA, 22 nt, Human
ucgcuggagucgacuccuucgc

SEQ ID NO: 980605 - RNA, 19 nt, Human
ucuucagugucaggggagc

SEQ ID NO: 980606 - RNA, 19 nt, Human
ucuucagugucaggggagc

SEQ ID NO: 980607 - RNA, 19 nt, Human
ugaaaaacugacuagccag

SEQ ID NO: 980608 - RNA, 19 nt, Human
ugaaaaacugacuagccag

SEQ ID NO: 980609 - RNA, 20 nt, Human
ugagaggaaugugugcggca

SEQ ID NO: 980610 - RNA, 26 nt, Human
ugaggcccccuguccaccugcuggcc

SEQ ID NO: 980611 - RNA, 19 nt, Human
ugcagggagggggcggggg

SEQ ID NO: 980612 - RNA, 21 nt, Human
ugccccugccccugccccugc

SEQ ID NO: 980613 - RNA, 23 nt, Human
ugccccugccccugccccugcuc

SEQ ID NO: 980614 - RNA, 20 nt, Human
ugccccugccccugcuccug

SEQ ID NO: 980615 - RNA, 23 nt, Human
ugccccugccccugcuccugcuc

SEQ ID NO: 980616 - RNA, 23 nt, Human
ugcccuggaggguaaccacugac

SEQ ID NO: 980617 - RNA, 23 nt, Human
ugccuacaaccuucuccucccca

SEQ ID NO: 980618 - RNA, 18 nt, Human
uggcaccgggcacggccc

SEQ ID NO: 980619 - RNA, 21 nt, Human
uggcccaggcucuucuuucgg

SEQ ID NO: 980620 - RNA, 22 nt, Human
uggcccaggcucuucuuucggg

SEQ ID NO: 980621 - RNA, 21 nt, Human
ugggaagagaagaccucuggc

SEQ ID NO: 980622 - RNA, 19 nt, Human
ugggaagggcugcagaggc

SEQ ID NO: 980623 - RNA, 21 nt, Human
ugggacuuaaggcuguaggag

SEQ ID NO: 980624 - RNA, 21 nt, Human
ugggacuuaaggcuguaggag

SEQ ID NO: 980625 - RNA, 18 nt, Human
uggucccagggccccacg

SEQ ID NO: 980626 - RNA, 19 nt, Human
uguagugacggguaugggg

SEQ ID NO: 980627 - RNA, 19 nt, Human
uguagugacggguaugggg

SEQ ID NO: 980628 - RNA, 18 nt, Human
ugucacaggaggucuggg

SEQ ID NO: 980629 - RNA, 18 nt, Human
ugucacaggaggucuggg

SEQ ID NO: 980630 - RNA, 23 nt, Human
ugugaccagggccauggagccag

SEQ ID NO: 980631 - RNA, 21 nt, Human
ugugggaagggcugcagaggc

SEQ ID NO: 980632 - RNA, 24 nt, Human
uucccucaaccccgcggacagucc

SEQ ID NO: 980633 - RNA, 24 nt, Human
uucccucaaccccgcggacagucc

SEQ ID NO: 980634 - RNA, 18 nt, Human
uugccuggccuggcuggu

SEQ ID NO: 980635 - RNA, 22 nt, Human
uugccuggccuggcugguucca

SEQ ID NO: 980636 - RNA, 22 nt, Human
uugccuggccuggcugguucca

SEQ ID NO: 980637 - RNA, 22 nt, Human
uugguccuugcaagcuguggga

SEQ ID NO: 980638 - RNA, 19 nt, Human
uuucucaguacaaagccag

SEQ ID NO: 980639 - RNA, 19 nt, Human
uuucucaguacaaagccag

SEQ ID NO: 980640 - RNA, 19 nt, Human
aaaaagcgcagcgagaaca

SEQ ID NO: 980641 - RNA, 23 nt, Human
aaaaauaaaaagcgcagcgagaa

SEQ ID NO: 980642 - RNA, 22 nt, Human
aaccaaaacacaaaacgaaaaa

SEQ ID NO: 980643 - RNA, 23 nt, Human
caaccaaaacacaaaacgaaaaa

SEQ ID NO: 980644 - RNA, 19 nt, Human
caagaaugagcuagaacgg

SEQ ID NO: 980645 - RNA, 22 nt, Human
ccagccugacgcagcaaaaggc

SEQ ID NO: 980646 - RNA, 18 nt, Human
ccucucuauggcaagagu

SEQ ID NO: 980647 - RNA, 24 nt, Human
cucccaggccacacgacugacagc

SEQ ID NO: 980648 - RNA, 22 nt, Human
gucuugacacgucugggguccc

SEQ ID NO: 980649 - RNA, 20 nt, Human
guuuaagggaaaucaagaug

SEQ ID NO: 980650 - RNA, 26 nt, Human
uaaaaagcgcagcgagaacagaggua

SEQ ID NO: 980651 - RNA, 26 nt, Human
uaaggggucgauccaaauccacagug

SEQ ID NO: 980652 - RNA, 23 nt, Human
uacucagcagugcuuggggcugu

SEQ ID NO: 980653 - RNA, 22 nt, Human
uauggcaagaguaggggaaaag

SEQ ID NO: 980654 - RNA, 19 nt, Human
ucaagauguaaggggucga

SEQ ID NO: 980655 - RNA, 23 nt, Human
ucccuggaacaagccuuggucau

SEQ ID NO: 980656 - RNA, 22 nt, Human
ugccaccaccaggacucuucug

SEQ ID NO: 980657 - RNA, 20 nt, Human
ugugcgccuaugugugcacg

SEQ ID NO: 980658 - RNA, 21 nt, Human
uuaaaagucuugacacgucug

SEQ ID NO: 980659 - RNA, 25 nt, Human
uucuucuccuccucucuauggcaag

SEQ ID NO: 980660 - RNA, 20 nt, Human
uucuugaagacacgguggga

SEQ ID NO: 980661 - RNA, 23 nt, Human
uuuuuuuuuuuugggacuacuca

SEQ ID NO: 980662 - RNA, 18 nt, Human
uuuuuuuuuuuuuuuuug

SEQ ID NO: 980663 - RNA, 26 nt, Human
uuuuuuuuuuuuuuuuuuuuuuuggg

SEQ ID NO: 980664 - RNA, 20 nt, Human
aaaaagaacucucacaaaaa

SEQ ID NO: 980665 - RNA, 24 nt, Human
aaaaagccaaagaauggcuuuacc

SEQ ID NO: 980666 - RNA, 23 nt, Human
aaacacccaaacccugcaugcac

SEQ ID NO: 980667 - RNA, 25 nt, Human
aaacaugccuagaucacuucagaac

SEQ ID NO: 980668 - RNA, 20 nt, Human
aaaccaaaauccaacagaac

SEQ ID NO: 980669 - RNA, 22 nt, Human
aaagaaaaaaaaaaaaaaagaa

SEQ ID NO: 980670 - RNA, 20 nt, Human
aaagcaaaacaaaauuaaac

SEQ ID NO: 980671 - RNA, 20 nt, Human
aacaaaguauccacaaauag

SEQ ID NO: 980672 - RNA, 19 nt, Human
aacacuucugugaccugcu

SEQ ID NO: 980673 - RNA, 19 nt, Human
aacagcaucugucuggggc

SEQ ID NO: 980674 - RNA, 20 nt, Human
aacaugccuagaucacuuca

SEQ ID NO: 980675 - RNA, 21 nt, Human
aacccucuccccacccugcca

SEQ ID NO: 980676 - RNA, 18 nt, Human
aaccugccuccuucagga

SEQ ID NO: 980677 - RNA, 22 nt, Human
aacuguuuuuauauauguacau

SEQ ID NO: 980678 - RNA, 27 nt, Human
aacuuccaggcaaacccucuccccacc

SEQ ID NO: 980679 - RNA, 18 nt, Human
aagaaaauauggccauua

SEQ ID NO: 980680 - RNA, 21 nt, Human
aagcaaaacaaaauuaaacaa

SEQ ID NO: 980681 - RNA, 26 nt, Human
aagcagaaagaaaaaaaaagggaccc

SEQ ID NO: 980682 - RNA, 23 nt, Human
aauaugggugucagaggaguuga

SEQ ID NO: 980683 - RNA, 21 nt, Human
aaucugcugcuucaggucagg

SEQ ID NO: 980684 - RNA, 22 nt, Human
acacacauacacacugaaaaac

SEQ ID NO: 980685 - RNA, 25 nt, Human
acacugcagagcacauuuuucuggc

SEQ ID NO: 980686 - RNA, 18 nt, Human
acagaacauaaaaaucaa

SEQ ID NO: 980687 - RNA, 20 nt, Human
acauauuacaccugccccuu

SEQ ID NO: 980688 - RNA, 27 nt, Human
accaucaacauauuguacagauuccua

SEQ ID NO: 980689 - RNA, 23 nt, Human
acggcagcaccagucaaaugccu

SEQ ID NO: 980690 - RNA, 18 nt, Human
acuacagccaccaucaac

SEQ ID NO: 980691 - RNA, 18 nt, Human
acugagcaacagcacagg

SEQ ID NO: 980692 - RNA, 24 nt, Human
acuguuuuuauauauguacauaug

SEQ ID NO: 980693 - RNA, 23 nt, Human
acuucugugaccugcuacaucuc

SEQ ID NO: 980694 - RNA, 23 nt, Human
agaaaaaaaaaaaaaaagaaaag

SEQ ID NO: 980695 - RNA, 18 nt, Human
agaggagagucuucugga

SEQ ID NO: 980696 - RNA, 21 nt, Human
agagugcuggaugggagggca

SEQ ID NO: 980697 - RNA, 24 nt, Human
agagugcuggaugggagggcagga

SEQ ID NO: 980698 - RNA, 22 nt, Human
agauaugccaagcaaaccaaaa

SEQ ID NO: 980699 - RNA, 18 nt, Human
agccaaaaaccugucucc

SEQ ID NO: 980700 - RNA, 19 nt, Human
agccugaggcacugagauc

SEQ ID NO: 980701 - RNA, 21 nt, Human
aggaagauuaaggaaggagau

SEQ ID NO: 980702 - RNA, 24 nt, Human
aggacucacaggacagccagggca

SEQ ID NO: 980703 - RNA, 18 nt, Human
aggagcuggugauuggaa

SEQ ID NO: 980704 - RNA, 18 nt, Human
aggcaggcaggcacuggg

SEQ ID NO: 980705 - RNA, 25 nt, Human
aucaaaaagcaaaacaaaauuaaac

SEQ ID NO: 980706 - RNA, 20 nt, Human
augaucccaaacauuuagaa

SEQ ID NO: 980707 - RNA, 25 nt, Human
auguuagaacaaguccuacaaaaca

SEQ ID NO: 980708 - RNA, 24 nt, Human
auuaaacacaguggaggggagaag

SEQ ID NO: 980709 - RNA, 23 nt, Human
auucugggagucugaaaaggcuu

SEQ ID NO: 980710 - RNA, 27 nt, Human
caaaaugagaagcagguggcagcugac

SEQ ID NO: 980711 - RNA, 23 nt, Human
caaacccugcaugcaccagaaac

SEQ ID NO: 980712 - RNA, 27 nt, Human
caacaguagcaaaacgacagcauccua

SEQ ID NO: 980713 - RNA, 18 nt, Human
caagccucuucaguuuca

SEQ ID NO: 980714 - RNA, 23 nt, Human
caaguggaacaucccaaccacca

SEQ ID NO: 980715 - RNA, 24 nt, Human
cacacaaauauccaggaaucacaa

SEQ ID NO: 980716 - RNA, 25 nt, Human
cacacugaaaaacacccaaacccug

SEQ ID NO: 980717 - RNA, 23 nt, Human
cacauacacacugaaaaacaccc

SEQ ID NO: 980718 - RNA, 25 nt, Human
cacaugcacauacacuccuccaaaa

SEQ ID NO: 980719 - RNA, 20 nt, Human
caccaucaaaaagcaaaacc

SEQ ID NO: 980720 - RNA, 21 nt, Human
cacccaaacccugcaugcacc

SEQ ID NO: 980721 - RNA, 19 nt, Human
caccuugcaauagcucuuc

SEQ ID NO: 980722 - RNA, 18 nt, Human
cacugaaaaacacccaaa

SEQ ID NO: 980723 - RNA, 24 nt, Human
cacugcagagcacauuuuucuggc

SEQ ID NO: 980724 - RNA, 20 nt, Human
cagaagcaccuugcaauagc

SEQ ID NO: 980725 - RNA, 21 nt, Human
cagacccagccuuggcuuccc

SEQ ID NO: 980726 - RNA, 20 nt, Human
cagcuuuaucuccaccccuc

SEQ ID NO: 980727 - RNA, 22 nt, Human
caggacacagacggaagucagc

SEQ ID NO: 980728 - RNA, 22 nt, Human
caguagcaaaacgacagcaucc

SEQ ID NO: 980729 - RNA, 24 nt, Human
cauacacacugaaaaacacccaaa

SEQ ID NO: 980730 - RNA, 24 nt, Human
caugacgucaagggaccccacacc

SEQ ID NO: 980731 - RNA, 23 nt, Human
ccaaaaaagccaaagaauggcuu

SEQ ID NO: 980732 - RNA, 22 nt, Human
ccacaaguggaugccacucucu

SEQ ID NO: 980733 - RNA, 21 nt, Human
ccagucacccuccauuuccag

SEQ ID NO: 980734 - RNA, 23 nt, Human
ccauucaccauuacaaccaucac

SEQ ID NO: 980735 - RNA, 21 nt, Human
ccccauacaccaaaacaucaa

SEQ ID NO: 980736 - RNA, 18 nt, Human
ccccuggcugaggccucc

SEQ ID NO: 980737 - RNA, 25 nt, Human
cccuccgaaucugcuuccuucccuc

SEQ ID NO: 980738 - RNA, 21 nt, Human
cccugcaugcaccagaaacag

SEQ ID NO: 980739 - RNA, 23 nt, Human
ccgacaagaugaugcacauuuua

SEQ ID NO: 980740 - RNA, 22 nt, Human
ccuacaaaacaaagcagaaaga

SEQ ID NO: 980741 - RNA, 21 nt, Human
ccucagagccugaggcacuga

SEQ ID NO: 980742 - RNA, 22 nt, Human
ccugucucaagccuccucagaa

SEQ ID NO: 980743 - RNA, 19 nt, Human
cgcaccuccccuggacacu

SEQ ID NO: 980744 - RNA, 21 nt, Human
cuacaaaacaaagcagaaaga

SEQ ID NO: 980745 - RNA, 24 nt, Human
cuaggagcuuccacucugggcaac

SEQ ID NO: 980746 - RNA, 21 nt, Human
cucacaggacagccagggcac

SEQ ID NO: 980747 - RNA, 18 nt, Human
cucacauauacuuccugg

SEQ ID NO: 980748 - RNA, 21 nt, Human
cucacauauacuuccuggcug

SEQ ID NO: 980749 - RNA, 24 nt, Human
cugaaaaacacccaaacccugcau

SEQ ID NO: 980750 - RNA, 25 nt, Human
cugaaaaacagcaauuugccuuuga

SEQ ID NO: 980751 - RNA, 22 nt, Human
cugccauaaguuccugcccuuc

SEQ ID NO: 980752 - RNA, 21 nt, Human
cugcgcaccuccccuggacac

SEQ ID NO: 980753 - RNA, 18 nt, Human
cugcggcuggaugaaggc

SEQ ID NO: 980754 - RNA, 23 nt, Human
cuuccaggcaaacccucucccca

SEQ ID NO: 980755 - RNA, 21 nt, Human
gaaaauuuuuuuuccccacag

SEQ ID NO: 980756 - RNA, 22 nt, Human
gaaacaguaaaaugaccaaaau

SEQ ID NO: 980757 - RNA, 20 nt, Human
gaacaaggaaauccauaacc

SEQ ID NO: 980758 - RNA, 21 nt, Human
gaacauuaaacacaguggagg

SEQ ID NO: 980759 - RNA, 25 nt, Human
gaagagcucuggaaauccauaaccc

SEQ ID NO: 980760 - RNA, 21 nt, Human
gaagggaaaacaaaguccaag

SEQ ID NO: 980761 - RNA, 18 nt, Human
gacacagacggcagcacc

SEQ ID NO: 980762 - RNA, 18 nt, Human
gagaagcagguggcagcu

SEQ ID NO: 980763 - RNA, 24 nt, Human
gagccagggccagucacccuccau

SEQ ID NO: 980764 - RNA, 18 nt, Human
gaggacacagacggcagc

SEQ ID NO: 980765 - RNA, 18 nt, Human
gcaaacccucuccccacc

SEQ ID NO: 980766 - RNA, 23 nt, Human
gcagccucuccacccccaacuuu

SEQ ID NO: 980767 - RNA, 21 nt, Human
gcucuggguaguuugcaaaau

SEQ ID NO: 980768 - RNA, 19 nt, Human
gcugcggcuggaugaaggc

SEQ ID NO: 980769 - RNA, 18 nt, Human
ggaacaucuccaaucccc

SEQ ID NO: 980770 - RNA, 23 nt, Human
ggagcaccugcuuuaauaaaaca

SEQ ID NO: 980771 - RNA, 23 nt, Human
ggcaacucacauauacuuccugg

SEQ ID NO: 980772 - RNA, 20 nt, Human
ggcccaaagaauuauucaag

SEQ ID NO: 980773 - RNA, 20 nt, Human
gggugucucugaggaaaaag

SEQ ID NO: 980774 - RNA, 22 nt, Human
gguuucuguccaaccugcuucc

SEQ ID NO: 980775 - RNA, 26 nt, Human
gugguuucuguccaaccugcuuccuu

SEQ ID NO: 980776 - RNA, 24 nt, Human
uaaaaauuuauucaaucuguaaca

SEQ ID NO: 980777 - RNA, 25 nt, Human
uaaaaguuugggguggcuuggggca

SEQ ID NO: 980778 - RNA, 18 nt, Human
uaaaugauaaaaaaagua

SEQ ID NO: 980779 - RNA, 18 nt, Human
uaacccaggaacacccaa

SEQ ID NO: 980780 - RNA, 18 nt, Human
uaacguggacaucaacga

SEQ ID NO: 980781 - RNA, 18 nt, Human
uaacuuccaggcaaaccc

SEQ ID NO: 980782 - RNA, 22 nt, Human
uaagacacaccaucacugagga

SEQ ID NO: 980783 - RNA, 19 nt, Human
uacacucuggaacaccgga

SEQ ID NO: 980784 - RNA, 20 nt, Human
uacauauuacaccugccccu

SEQ ID NO: 980785 - RNA, 23 nt, Human
uacccaacagcaucugucugggg

SEQ ID NO: 980786 - RNA, 20 nt, Human
uaccccauacaccaaaacau

SEQ ID NO: 980787 - RNA, 21 nt, Human
uaccccauacaccaaaacauc

SEQ ID NO: 980788 - RNA, 18 nt, Human
uaccucagagccugaggc

SEQ ID NO: 980789 - RNA, 22 nt, Human
uacucagucaauccucaguaac

SEQ ID NO: 980790 - RNA, 20 nt, Human
uagaacaaguccuacaaaac

SEQ ID NO: 980791 - RNA, 24 nt, Human
uagaucacuucagaacugaaaucc

SEQ ID NO: 980792 - RNA, 21 nt, Human
uauaaaaaggcagaaagacuu

SEQ ID NO: 980793 - RNA, 24 nt, Human
uauaaaagucugaagagaagacag

SEQ ID NO: 980794 - RNA, 24 nt, Human
uauauauguacauauguguacaca

SEQ ID NO: 980795 - RNA, 23 nt, Human
uauccaccaucaaaaagcaaaac

SEQ ID NO: 980796 - RNA, 21 nt, Human
uauguacauauguguacacau

SEQ ID NO: 980797 - RNA, 18 nt, Human
ucacaagggcugaccaug

SEQ ID NO: 980798 - RNA, 21 nt, Human
ucagaaggcccaaagaauuau

SEQ ID NO: 980799 - RNA, 23 nt, Human
ucagacccagccuuggcuuccac

SEQ ID NO: 980800 - RNA, 18 nt, Human
ucagaggagagucuucug

SEQ ID NO: 980801 - RNA, 21 nt, Human
ucagcuauguaaauaacccag

SEQ ID NO: 980802 - RNA, 20 nt, Human
ucauaccaccuaacaaaaca

SEQ ID NO: 980803 - RNA, 21 nt, Human
ucauuucuggugucuguguuu

SEQ ID NO: 980804 - RNA, 19 nt, Human
ucauuugggguccuguuuu

SEQ ID NO: 980805 - RNA, 22 nt, Human
uccaccaucaaaaagcaaaaca

SEQ ID NO: 980806 - RNA, 24 nt, Human
uccaccaucaaaaagcaaaacaaa

SEQ ID NO: 980807 - RNA, 21 nt, Human
uccccagcuuuaucuccaccc

SEQ ID NO: 980808 - RNA, 20 nt, Human
uccgaaucugcuuccuuccc

SEQ ID NO: 980809 - RNA, 24 nt, Human
uccucagaugaaacaggugaacac

SEQ ID NO: 980810 - RNA, 19 nt, Human
ucuccaaaaaucaagaaag

SEQ ID NO: 980811 - RNA, 23 nt, Human
ucuccaauccccagcuuuaucuc

SEQ ID NO: 980812 - RNA, 20 nt, Human
ucugcuuccuucccucaauu

SEQ ID NO: 980813 - RNA, 20 nt, Human
ucuggggccugugagcagag

SEQ ID NO: 980814 - RNA, 25 nt, Human
ucuguaacaagaacauugaaucugc

SEQ ID NO: 980815 - RNA, 21 nt, Human
ucuucaguuucaaugagaugc

SEQ ID NO: 980816 - RNA, 18 nt, Human
ugaaaaacacccaaaccc

SEQ ID NO: 980817 - RNA, 21 nt, Human
ugaaaaacacccaaacccugc

SEQ ID NO: 980818 - RNA, 28 nt, Human
ugaaaaacacccaaacccugcaugcacc

SEQ ID NO: 980819 - RNA, 24 nt, Human
ugaaaaacagcaauuugccuuuga

SEQ ID NO: 980820 - RNA, 20 nt, Human
ugaacaagacacuaagacag

SEQ ID NO: 980821 - RNA, 20 nt, Human
ugaaugacagauauucugua

SEQ ID NO: 980822 - RNA, 19 nt, Human
ugacgucaagggaccccac

SEQ ID NO: 980823 - RNA, 18 nt, Human
ugacugaaaaacagcaau

SEQ ID NO: 980824 - RNA, 20 nt, Human
ugagaugcagagguguuuca

SEQ ID NO: 980825 - RNA, 21 nt, Human
ugaggaaaaaguuacuaaugc

SEQ ID NO: 980826 - RNA, 22 nt, Human
ugaggaaaugacaacuauuucc

SEQ ID NO: 980827 - RNA, 27 nt, Human
ugaggacacagacggcagcuggagacc

SEQ ID NO: 980828 - RNA, 25 nt, Human
ugaggagagaugaauauuacgguac

SEQ ID NO: 980829 - RNA, 18 nt, Human
ugaggcacugagaucuuc

SEQ ID NO: 980830 - RNA, 20 nt, Human
ugaggcacugagaucuucag

SEQ ID NO: 980831 - RNA, 24 nt, Human
ugaggcacugagaucuucaggcug

SEQ ID NO: 980832 - RNA, 19 nt, Human
ugaucccaaacauuuagaa

SEQ ID NO: 980833 - RNA, 23 nt, Human
ugccaucugcccccaccaaacuc

SEQ ID NO: 980834 - RNA, 24 nt, Human
ugccucaggucuggaaaccaaacc

SEQ ID NO: 980835 - RNA, 22 nt, Human
ugcuuucuuaaaaaaagaacuc

SEQ ID NO: 980836 - RNA, 18 nt, Human
uggaaauccauaacccug

SEQ ID NO: 980837 - RNA, 20 nt, Human
uggacacugcucagcuaugu

SEQ ID NO: 980838 - RNA, 22 nt, Human
uggaugggagggcaggacacag

SEQ ID NO: 980839 - RNA, 25 nt, Human
uggcuuccacacaacuucacagcuc

SEQ ID NO: 980840 - RNA, 20 nt, Human
uggcuuggggcaaagguaac

SEQ ID NO: 980841 - RNA, 20 nt, Human
uggggaaggaaaauaaacug

SEQ ID NO: 980842 - RNA, 19 nt, Human
uggggacaacagcaugggg

SEQ ID NO: 980843 - RNA, 21 nt, Human
uggggacaacagcauggggaa

SEQ ID NO: 980844 - RNA, 24 nt, Human
uggggcacugagaaaaugaggcug

SEQ ID NO: 980845 - RNA, 22 nt, Human
ugguuuaaaaagagagagagag

SEQ ID NO: 980846 - RNA, 18 nt, Human
uguaacgauacacucugg

SEQ ID NO: 980847 - RNA, 20 nt, Human
uguaagaagcuacaagaggc

SEQ ID NO: 980848 - RNA, 19 nt, Human
uguacacaugcacauacac

SEQ ID NO: 980849 - RNA, 23 nt, Human
ugucagacccagccuuggcuucc

SEQ ID NO: 980850 - RNA, 24 nt, Human
ugucuuacuguaacgauacacucu

SEQ ID NO: 980851 - RNA, 20 nt, Human
uuaaacauauguaacaauuc

SEQ ID NO: 980852 - RNA, 22 nt, Human
uuaaagcaaagcggaaccugcc

SEQ ID NO: 980853 - RNA, 18 nt, Human
uuaguggguuuuguccca

SEQ ID NO: 980854 - RNA, 21 nt, Human
uucagggccaguuacccaguu

SEQ ID NO: 980855 - RNA, 18 nt, Human
uucuacauggaagagcuc

SEQ ID NO: 980856 - RNA, 21 nt, Human
uucuggcugaccuuuagcccc

SEQ ID NO: 980857 - RNA, 21 nt, Human
uugaaaauuuuuuuuccccac

SEQ ID NO: 980858 - RNA, 19 nt, Human
uuuuagcaagugguuucug

SEQ ID NO: 980859 - RNA, 18 nt, Human
aaaaagucugaccagcac

SEQ ID NO: 980860 - RNA, 18 nt, Human
acaacauuacaaauaauc

SEQ ID NO: 980861 - RNA, 21 nt, Human
aggacaaaaaccuugggucca

SEQ ID NO: 980862 - RNA, 27 nt, Human
aguaauaagaaucuacuucaaaagaaa

SEQ ID NO: 980863 - RNA, 23 nt, Human
agugaaggaaaggacaaaaaccu

SEQ ID NO: 980864 - RNA, 18 nt, Human
auggaaaccugggaaacc

SEQ ID NO: 980865 - RNA, 19 nt, Human
auuccacucauuaaaaaac

SEQ ID NO: 980866 - RNA, 22 nt, Human
caaaaaaagucugaccagcacc

SEQ ID NO: 980867 - RNA, 20 nt, Human
caauacauaaacugccucaa

SEQ ID NO: 980868 - RNA, 21 nt, Human
cacaaaugggaagcaucuuga

SEQ ID NO: 980869 - RNA, 23 nt, Human
cacaguaugacugaguaauaaga

SEQ ID NO: 980870 - RNA, 21 nt, Human
cagcaagguccgccgaggcuc

SEQ ID NO: 980871 - RNA, 22 nt, Human
cccucugcaucgcuuccucucg

SEQ ID NO: 980872 - RNA, 25 nt, Human
ccucucgcguuaaagagacagaggc

SEQ ID NO: 980873 - RNA, 20 nt, Human
cguuaguaaccaugcugcac

SEQ ID NO: 980874 - RNA, 22 nt, Human
cuccccccagaauauuuaggcu

SEQ ID NO: 980875 - RNA, 23 nt, Human
cugcaucgcuuccucucgcguua

SEQ ID NO: 980876 - RNA, 19 nt, Human
guacggaguccuccaggua

SEQ ID NO: 980877 - RNA, 23 nt, Human
guuaaccauaauagucccacagu

SEQ ID NO: 980878 - RNA, 24 nt, Human
guucuguuaaccauaauaguccca

SEQ ID NO: 980879 - RNA, 18 nt, Human
uaaaugagagaaucuaac

SEQ ID NO: 980880 - RNA, 23 nt, Human
uaagcauaaucaguuauggacag

SEQ ID NO: 980881 - RNA, 26 nt, Human
uaccaauaaaacagcauguucugaaa

SEQ ID NO: 980882 - RNA, 22 nt, Human
uaccccacuccccccagaauau

SEQ ID NO: 980883 - RNA, 24 nt, Human
uaccccacuccccccagaauauuu

SEQ ID NO: 980884 - RNA, 21 nt, Human
uauaccccacuccccccagaa

SEQ ID NO: 980885 - RNA, 21 nt, Human
uauuauaccccacucccccca

SEQ ID NO: 980886 - RNA, 20 nt, Human
uccacauggaaaccugggaa

SEQ ID NO: 980887 - RNA, 19 nt, Human
ucuaacaaaaaaagucuga

SEQ ID NO: 980888 - RNA, 23 nt, Human
ucuacuucaaaagaaaaaaaaaa

SEQ ID NO: 980889 - RNA, 24 nt, Human
ucuacuucaaaagaaaaaaaaaaa

SEQ ID NO: 980890 - RNA, 21 nt, Human
uggaaaccugggaaacccaau

SEQ ID NO: 980891 - RNA, 22 nt, Human
uucugauuuuaauauuagucug

SEQ ID NO: 980892 - RNA, 18 nt, Human
aaaaauaaagccagagac

SEQ ID NO: 980893 - RNA, 26 nt, Human
aaaaauaaagccagagacccuccccc

SEQ ID NO: 980894 - RNA, 18 nt, Human
aagccagagacccucccc

SEQ ID NO: 980895 - RNA, 21 nt, Human
aagccagagacccucccccaa

SEQ ID NO: 980896 - RNA, 24 nt, Human
acagcagaaaaauaaagccagaga

SEQ ID NO: 980897 - RNA, 22 nt, Human
acccucccccaaccccugguuu

SEQ ID NO: 980898 - RNA, 19 nt, Human
acgccgcgggcgggacggc

SEQ ID NO: 980899 - RNA, 23 nt, Human
acuuuaaaaaauauaaaauagga

SEQ ID NO: 980900 - RNA, 21 nt, Human
agagacccucccccaaccccu

SEQ ID NO: 980901 - RNA, 28 nt, Human
agagguaggaggugcgaguucagguccu

SEQ ID NO: 980902 - RNA, 24 nt, Human
agccagagacccucccccaacccc

SEQ ID NO: 980903 - RNA, 21 nt, Human
aggggccagccggaggggugg

SEQ ID NO: 980904 - RNA, 21 nt, Human
aggggucugcggccucgucuc

SEQ ID NO: 980905 - RNA, 24 nt, Human
aggggucugcggccucgucuccag

SEQ ID NO: 980906 - RNA, 22 nt, Human
agguaggaggugcgaguucagg

SEQ ID NO: 980907 - RNA, 22 nt, Human
auaaagccagagacccuccccc

SEQ ID NO: 980908 - RNA, 23 nt, Human
auaaagccagagacccuccccca

SEQ ID NO: 980909 - RNA, 21 nt, Human
caccaggagggggaggacccc

SEQ ID NO: 980910 - RNA, 23 nt, Human
cagcagaaaaauaaagccagaga

SEQ ID NO: 980911 - RNA, 25 nt, Human
cagcagaaaaauaaagccagagacc

SEQ ID NO: 980912 - RNA, 22 nt, Human
ccagagacccucccccaacccc

SEQ ID NO: 980913 - RNA, 23 nt, Human
ccaggccggggaggguacccaca

SEQ ID NO: 980914 - RNA, 21 nt, Human
cccccucaagaggugagaagg

SEQ ID NO: 980915 - RNA, 21 nt, Human
ccgcucccuccaacccaggcc

SEQ ID NO: 980916 - RNA, 21 nt, Human
ccggaggggugggccauagcg

SEQ ID NO: 980917 - RNA, 19 nt, Human
cgccucgccccuacaccca

SEQ ID NO: 980918 - RNA, 20 nt, Human
cgggcgggacggcggggggc

SEQ ID NO: 980919 - RNA, 25 nt, Human
cguccgggggugcgcuggcggcggg

SEQ ID NO: 980920 - RNA, 21 nt, Human
cuccggggcgcuccggggcgg

SEQ ID NO: 980921 - RNA, 18 nt, Human
cucgccccuacacccauc

SEQ ID NO: 980922 - RNA, 26 nt, Human
cuggcuccagauacaguuaagcugcu

SEQ ID NO: 980923 - RNA, 22 nt, Human
gagggggaggacccccucaaga

SEQ ID NO: 980924 - RNA, 26 nt, Human
gaggggugggccauagcguccggggg

SEQ ID NO: 980925 - RNA, 23 nt, Human
gcuacaacaaccagggggaccca

SEQ ID NO: 980926 - RNA, 19 nt, Human
gggagcaccaggaggggga

SEQ ID NO: 980927 - RNA, 22 nt, Human
gggggugcgcuggcggcggggc

SEQ ID NO: 980928 - RNA, 24 nt, Human
uaacacggcaucccaguuaaugcu

SEQ ID NO: 980929 - RNA, 22 nt, Human
uccaacccaggccggggagggu

SEQ ID NO: 980930 - RNA, 18 nt, Human
uccgcucccuccaaccca

SEQ ID NO: 980931 - RNA, 22 nt, Human
ucuccagccgagggcgggaggc

SEQ ID NO: 980932 - RNA, 18 nt, Human
ugguuugugcaaagauac

SEQ ID NO: 980933 - RNA, 20 nt, Human
uuccaggcaaguaauaacaa

SEQ ID NO: 980934 - RNA, 22 nt, Human
cgcggccuccgcacagcggccg

SEQ ID NO: 980935 - RNA, 21 nt, Human
cgcuaccgcaucccggggggc

SEQ ID NO: 980936 - RNA, 21 nt, Human
cuccgcacagcggccgcuacc

SEQ ID NO: 980937 - RNA, 20 nt, Human
gcagcugcuucgcggccucc

SEQ ID NO: 980938 - RNA, 19 nt, Human
ggccugcguccccucuccc

SEQ ID NO: 980939 - RNA, 20 nt, Human
gggcugcggagaggaaggcg

SEQ ID NO: 980940 - RNA, 23 nt, Human
aaaaagacauuuaaaaaauaggc

SEQ ID NO: 980941 - RNA, 23 nt, Human
aaaaaggaugcuucuauuaagga

SEQ ID NO: 980942 - RNA, 23 nt, Human
aaacagcagcaaaauacugaaac

SEQ ID NO: 980943 - RNA, 25 nt, Human
aacaaaaaaaccuacacacaacuga

SEQ ID NO: 980944 - RNA, 25 nt, Human
aacaaaacaaaaaaaccuacacaca

SEQ ID NO: 980945 - RNA, 23 nt, Human
aacacaauuuucacaaauguacu

SEQ ID NO: 980946 - RNA, 23 nt, Human
aagaugcgcauuaaacagcagca

SEQ ID NO: 980947 - RNA, 23 nt, Human
aauucuguaauuacaccuuacug

SEQ ID NO: 980948 - RNA, 21 nt, Human
acaaagaaaaacuucauccaa

SEQ ID NO: 980949 - RNA, 22 nt, Human
acaaagaaaaacuucauccaaa

SEQ ID NO: 980950 - RNA, 21 nt, Human
acaguaacaacaacaaaaugc

SEQ ID NO: 980951 - RNA, 23 nt, Human
acauacauacacacgcacacaca

SEQ ID NO: 980952 - RNA, 21 nt, Human
accaacugcucacauacauac

SEQ ID NO: 980953 - RNA, 19 nt, Human
agaaaaugucaaaaaggaa

SEQ ID NO: 980954 - RNA, 19 nt, Human
agcaacaauggacaacaca

SEQ ID NO: 980955 - RNA, 19 nt, Human
agcagaccccuggcaucug

SEQ ID NO: 980956 - RNA, 22 nt, Human
agcccaauuaaaaacucaaaca

SEQ ID NO: 980957 - RNA, 21 nt, Human
aggggagguuauacugaaaag

SEQ ID NO: 980958 - RNA, 18 nt, Human
aguaacaacaacaaaaug

SEQ ID NO: 980959 - RNA, 21 nt, Human
auagagcuuucucaaaaucaa

SEQ ID NO: 980960 - RNA, 23 nt, Human
auccaugcuuuaugaacacauua

SEQ ID NO: 980961 - RNA, 22 nt, Human
caaaaaaaccuacacacaacug

SEQ ID NO: 980962 - RNA, 20 nt, Human
caaaacaaaaaaaccuacac

SEQ ID NO: 980963 - RNA, 24 nt, Human
caaaacaaaaaaaccuacacacaa

SEQ ID NO: 980964 - RNA, 19 nt, Human
caaaacucccaaaagauua

SEQ ID NO: 980965 - RNA, 21 nt, Human
caaaauacugaaacaauucua

SEQ ID NO: 980966 - RNA, 22 nt, Human
caacaaaaugcugauuugugcc

SEQ ID NO: 980967 - RNA, 18 nt, Human
caacaagcaaaacuccca

SEQ ID NO: 980968 - RNA, 23 nt, Human
caacaagcaaaacucccaaaaga

SEQ ID NO: 980969 - RNA, 23 nt, Human
caacacaacacaauuuucacaaa

SEQ ID NO: 980970 - RNA, 21 nt, Human
cacaacacaauuuucacaaau

SEQ ID NO: 980971 - RNA, 21 nt, Human
cacaaguaggaguugccuucu

SEQ ID NO: 980972 - RNA, 22 nt, Human
cacuaauucccaucaggccgaa

SEQ ID NO: 980973 - RNA, 24 nt, Human
cacuccagagcuaccucuggguca

SEQ ID NO: 980974 - RNA, 22 nt, Human
cagcagcaaaauacugaaacaa

SEQ ID NO: 980975 - RNA, 20 nt, Human
cagugugguuuugcagcugc

SEQ ID NO: 980976 - RNA, 27 nt, Human
cauacacacgcacacacauagauuuua

SEQ ID NO: 980977 - RNA, 21 nt, Human
ccagucucaagcacuuaagaa

SEQ ID NO: 980978 - RNA, 21 nt, Human
cccuauuugcaaagugauuaa

SEQ ID NO: 980979 - RNA, 21 nt, Human
cgccacagacucugauugcuc

SEQ ID NO: 980980 - RNA, 20 nt, Human
cguuuuguuuuuuugucugu

SEQ ID NO: 980981 - RNA, 25 nt, Human
cucacauacauacacacgcacacac

SEQ ID NO: 980982 - RNA, 24 nt, Human
cucccaaaagauuagguaagaaaa

SEQ ID NO: 980983 - RNA, 23 nt, Human
cugaaaacauaguugguguagca

SEQ ID NO: 980984 - RNA, 22 nt, Human
cuguucucaaucuaugcuaaaa

SEQ ID NO: 980985 - RNA, 22 nt, Human
cuucagaagugggagggcugau

SEQ ID NO: 980986 - RNA, 24 nt, Human
ggaaaaaaucagaaaaugucaaaa

SEQ ID NO: 980987 - RNA, 22 nt, Human
ggagagaaaaauucucucucaa

SEQ ID NO: 980988 - RNA, 23 nt, Human
uaaacagcagcaaaauacugaaa

SEQ ID NO: 980989 - RNA, 19 nt, Human
uaaggcucucggcggcucg

SEQ ID NO: 980990 - RNA, 27 nt, Human
uaauacaguaacaacaacaaaaugcuu

SEQ ID NO: 980991 - RNA, 23 nt, Human
uacaccuuacuguaucaugcccu

SEQ ID NO: 980992 - RNA, 20 nt, Human
uacaguaacaacaacaaaau

SEQ ID NO: 980993 - RNA, 29 nt, Human
uacauacacacgcacacacauagauuuua

SEQ ID NO: 980994 - RNA, 22 nt, Human
uacauuaaacaaaaaaccaugc

SEQ ID NO: 980995 - RNA, 23 nt, Human
uaccagguauuccauaaaacucu

SEQ ID NO: 980996 - RNA, 19 nt, Human
uagcaaaugaauauaucaa

SEQ ID NO: 980997 - RNA, 22 nt, Human
uagcaaaugaauauaucaaaac

SEQ ID NO: 980998 - RNA, 21 nt, Human
uaggaguugccuucuauggug

SEQ ID NO: 980999 - RNA, 18 nt, Human
uauuacagauauagaguu

SEQ ID NO: 981000 - RNA, 22 nt, Human
uauuucguuuuguuuuuuuguc

SEQ ID NO: 981001 - RNA, 23 nt, Human
uauuuuacuucacccuccaucca

SEQ ID NO: 981002 - RNA, 20 nt, Human
ucaaaaaggaagagacaaca

SEQ ID NO: 981003 - RNA, 21 nt, Human
ucaaaacaaaacaaaaaaacc

SEQ ID NO: 981004 - RNA, 27 nt, Human
ucaaaacaaaacaaaaaaaccuacaca

SEQ ID NO: 981005 - RNA, 20 nt, Human
uccuugaagccacugggaag

SEQ ID NO: 981006 - RNA, 23 nt, Human
uccuugaagccacugggaaguuu

SEQ ID NO: 981007 - RNA, 19 nt, Human
ucgccacagacucugauug

SEQ ID NO: 981008 - RNA, 25 nt, Human
ucgggcgguaauggcguuacucuuc

SEQ ID NO: 981009 - RNA, 25 nt, Human
ucuaaaaucacuccagagcuaccuc

SEQ ID NO: 981010 - RNA, 21 nt, Human
ucuaugcuaaaaaaaaaaaau

SEQ ID NO: 981011 - RNA, 24 nt, Human
ugaaaaggagaaugaagaggucag

SEQ ID NO: 981012 - RNA, 26 nt, Human
ugaaacaauucuauugcuaaaaagca

SEQ ID NO: 981013 - RNA, 24 nt, Human
ugaacacauuauucucacacaucc

SEQ ID NO: 981014 - RNA, 23 nt, Human
ugaagaugcgcauuaaacagcag

SEQ ID NO: 981015 - RNA, 21 nt, Human
ugacaaauaauaaauucuaca

SEQ ID NO: 981016 - RNA, 22 nt, Human
ugagugaguaggucuaaaauca

SEQ ID NO: 981017 - RNA, 23 nt, Human
ugccagagagauccccaaauucc

SEQ ID NO: 981018 - RNA, 20 nt, Human
ugccaucaauugaaauuuga

SEQ ID NO: 981019 - RNA, 26 nt, Human
ugcucacauacauacacacgcacaca

SEQ ID NO: 981020 - RNA, 25 nt, Human
ugcucacauacauacacacgcacag

SEQ ID NO: 981021 - RNA, 25 nt, Human
ugcuugaacaaaccauguguggaag

SEQ ID NO: 981022 - RNA, 22 nt, Human
uggcguuacucuucauccgggu

SEQ ID NO: 981023 - RNA, 19 nt, Human
uggcucagauguuuaaaua

SEQ ID NO: 981024 - RNA, 21 nt, Human
ugugugggcaugagcauaggg

SEQ ID NO: 981025 - RNA, 20 nt, Human
uucguaaauucuguaauuac

SEQ ID NO: 981026 - RNA, 24 nt, Human
uuucguuuuguuuuuuugucugug

SEQ ID NO: 981027 - RNA, 20 nt, Human
uuucugcuaaauacuuacug

SEQ ID NO: 981028 - RNA, 20 nt, Human
uuuguuaaaaaaggggguag

SEQ ID NO: 981029 - RNA, 21 nt, Human
uuuguuaaaaaaggggguagg

SEQ ID NO: 981030 - RNA, 18 nt, Human
uuuugggggaaaaaauca

SEQ ID NO: 981031 - RNA, 19 nt, Human
aaaaaaagaacuuuuccac

SEQ ID NO: 981032 - RNA, 19 nt, Human
aaaaaacagccaauaaaca

SEQ ID NO: 981033 - RNA, 21 nt, Human
aaaaaugcugacaagcacuaa

SEQ ID NO: 981034 - RNA, 21 nt, Human
aaaacaccaagauuaaaaaca

SEQ ID NO: 981035 - RNA, 18 nt, Human
aaacaaauacugaauuac

SEQ ID NO: 981036 - RNA, 24 nt, Human
aaaugcaagagauugcucucagcu

SEQ ID NO: 981037 - RNA, 24 nt, Human
aacagccaauaaacaaauacugaa

SEQ ID NO: 981038 - RNA, 19 nt, Human
aaccaguuauuaacuuccu

SEQ ID NO: 981039 - RNA, 19 nt, Human
aaccugugaacuaaagagu

SEQ ID NO: 981040 - RNA, 23 nt, Human
aagaaaaaaaaaagagaaaaaaa

SEQ ID NO: 981041 - RNA, 19 nt, Human
aaguagcugagauuacagg

SEQ ID NO: 981042 - RNA, 25 nt, Human
aaguagcugagauuacaggcaccca

SEQ ID NO: 981043 - RNA, 18 nt, Human
aaguuauuuucuccucuu

SEQ ID NO: 981044 - RNA, 21 nt, Human
aauuccucacaguaaaguacu

SEQ ID NO: 981045 - RNA, 20 nt, Human
acaaugauuccugugucuua

SEQ ID NO: 981046 - RNA, 19 nt, Human
acacaaauuccaugccacc

SEQ ID NO: 981047 - RNA, 24 nt, Human
acagaacuuuuagacaagaguaga

SEQ ID NO: 981048 - RNA, 19 nt, Human
acaggcacccaccaucacg

SEQ ID NO: 981049 - RNA, 21 nt, Human
accacaggccacccauagaca

SEQ ID NO: 981050 - RNA, 18 nt, Human
acgggguuucaccauguu

SEQ ID NO: 981051 - RNA, 23 nt, Human
acgggguuucaccauguuggcca

SEQ ID NO: 981052 - RNA, 24 nt, Human
acgggguuucaccauguuggccag

SEQ ID NO: 981053 - RNA, 21 nt, Human
acuauauuaggaauauucggc

SEQ ID NO: 981054 - RNA, 20 nt, Human
acucauuuuccuacaaaucu

SEQ ID NO: 981055 - RNA, 19 nt, Human
acuuguaaacauuaagcuu

SEQ ID NO: 981056 - RNA, 24 nt, Human
agaaaaaaagaacuuuuccacaag

SEQ ID NO: 981057 - RNA, 29 nt, Human
agacaagaguagaggggaaaagggacccc

SEQ ID NO: 981058 - RNA, 22 nt, Human
agagaaaaaaagaacuuuucca

SEQ ID NO: 981059 - RNA, 18 nt, Human
agagguucuuucucuuac

SEQ ID NO: 981060 - RNA, 20 nt, Human
agccauacaguggaacagug

SEQ ID NO: 981061 - RNA, 22 nt, Human
aggccaaagccauacaguggaa

SEQ ID NO: 981062 - RNA, 19 nt, Human
aggcucuagacuauaaaaa

SEQ ID NO: 981063 - RNA, 22 nt, Human
aguucuccugcuucagccuccc

SEQ ID NO: 981064 - RNA, 24 nt, Human
auuuugguauuuuuaguagagacg

SEQ ID NO: 981065 - RNA, 19 nt, Human
caacaguaaagaaaacuuu

SEQ ID NO: 981066 - RNA, 24 nt, Human
cacaacaguaaacaaauuuugcuc

SEQ ID NO: 981067 - RNA, 25 nt, Human
cacaggccacccauagacacaaagc

SEQ ID NO: 981068 - RNA, 21 nt, Human
caccaaagaaaaguaaagaau

SEQ ID NO: 981069 - RNA, 23 nt, Human
caccaaagaaaaguaaagaauug

SEQ ID NO: 981070 - RNA, 18 nt, Human
caccaagauuaaaaacag

SEQ ID NO: 981071 - RNA, 21 nt, Human
caccauguuggccaggaguuc

SEQ ID NO: 981072 - RNA, 23 nt, Human
caccauguuggccaggaguucaa

SEQ ID NO: 981073 - RNA, 18 nt, Human
cacccaccaucacgccug

SEQ ID NO: 981074 - RNA, 22 nt, Human
cacggguaaaaaaaugcaagag

SEQ ID NO: 981075 - RNA, 21 nt, Human
cacugcaaccucugccuccug

SEQ ID NO: 981076 - RNA, 23 nt, Human
cacugcaaccucugccuccuggg

SEQ ID NO: 981077 - RNA, 20 nt, Human
cacuguauuauaccaagaau

SEQ ID NO: 981078 - RNA, 22 nt, Human
cagcuggaucccaagggcuaaa

SEQ ID NO: 981079 - RNA, 21 nt, Human
caggcacccaccaucacgccu

SEQ ID NO: 981080 - RNA, 22 nt, Human
caggcaguucuccugcuucagc

SEQ ID NO: 981081 - RNA, 19 nt, Human
caggccaaagccauacagu

SEQ ID NO: 981082 - RNA, 19 nt, Human
caggcgagaacagggaacg

SEQ ID NO: 981083 - RNA, 20 nt, Human
caguucuccugcuucagccu

SEQ ID NO: 981084 - RNA, 19 nt, Human
cauacaguggaacagugug

SEQ ID NO: 981085 - RNA, 22 nt, Human
caucacgccuggcuaauuuugg

SEQ ID NO: 981086 - RNA, 23 nt, Human
ccaaguagcugagauuacaggca

SEQ ID NO: 981087 - RNA, 24 nt, Human
ccacaagucucucuccucuaguug

SEQ ID NO: 981088 - RNA, 19 nt, Human
ccaucuauacagcacucca

SEQ ID NO: 981089 - RNA, 23 nt, Human
cccaacacauccgauagcaugga

SEQ ID NO: 981090 - RNA, 19 nt, Human
cccaaguagcugagauuac

SEQ ID NO: 981091 - RNA, 24 nt, Human
cccaaguagcugagauuacaggca

SEQ ID NO: 981092 - RNA, 18 nt, Human
ccccugggaagaggauuc

SEQ ID NO: 981093 - RNA, 21 nt, Human
ccucccuggccacucaggcca

SEQ ID NO: 981094 - RNA, 19 nt, Human
ccucugccuccuggguuca

SEQ ID NO: 981095 - RNA, 24 nt, Human
cgggguuucaccauguuggccagg

SEQ ID NO: 981096 - RNA, 23 nt, Human
cuaguuggaaaauuagagaaauc

SEQ ID NO: 981097 - RNA, 24 nt, Human
cucacugcaaccucugccuccugg

SEQ ID NO: 981098 - RNA, 18 nt, Human
cuccagggugugagaccc

SEQ ID NO: 981099 - RNA, 21 nt, Human
cucccaaguagcugagauuac

SEQ ID NO: 981100 - RNA, 21 nt, Human
cucccgaugaauaauuuuuau

SEQ ID NO: 981101 - RNA, 21 nt, Human
cuccuggguucaggcaguucu

SEQ ID NO: 981102 - RNA, 20 nt, Human
cugacaagcacuaaaaucac

SEQ ID NO: 981103 - RNA, 19 nt, Human
cugcaaccucugccuccug

SEQ ID NO: 981104 - RNA, 23 nt, Human
cugcaaccucugccuccuggguu

SEQ ID NO: 981105 - RNA, 24 nt, Human
cugcaaccucugccuccuggguuc

SEQ ID NO: 981106 - RNA, 23 nt, Human
cugcuucagccucccaaguagcu

SEQ ID NO: 981107 - RNA, 21 nt, Human
cuugcucacaaucaaugggaa

SEQ ID NO: 981108 - RNA, 20 nt, Human
cuuuuauuucaugggugcug

SEQ ID NO: 981109 - RNA, 22 nt, Human
gacagaucaaggaaacaaguua

SEQ ID NO: 981110 - RNA, 24 nt, Human
gagacgggguuucaccauguuggc

SEQ ID NO: 981111 - RNA, 22 nt, Human
gcaaccucugccuccuggguuc

SEQ ID NO: 981112 - RNA, 24 nt, Human
gcugauaccccuauuucaccaccu

SEQ ID NO: 981113 - RNA, 20 nt, Human
ggcugauaccccuauuucac

SEQ ID NO: 981114 - RNA, 18 nt, Human
gggcuaaagagauaaaua

SEQ ID NO: 981115 - RNA, 23 nt, Human
gggguuucaccauguuggccagg

SEQ ID NO: 981116 - RNA, 23 nt, Human
guagagacgggguuucaccaugu

SEQ ID NO: 981117 - RNA, 22 nt, Human
uaacuguaccuuacagugauau

SEQ ID NO: 981118 - RNA, 19 nt, Human
uaagaaaaaaaaaagagaa

SEQ ID NO: 981119 - RNA, 20 nt, Human
uaagacaaaaauucuacagc

SEQ ID NO: 981120 - RNA, 23 nt, Human
uaauuuugguauuuuuaguagag

SEQ ID NO: 981121 - RNA, 24 nt, Human
uaauuuugguauuuuuaguagaga

SEQ ID NO: 981122 - RNA, 18 nt, Human
uacacaaauuccaugcca

SEQ ID NO: 981123 - RNA, 22 nt, Human
uacagaaaguuggaaaacacca

SEQ ID NO: 981124 - RNA, 18 nt, Human
uacagcacauugcaagac

SEQ ID NO: 981125 - RNA, 20 nt, Human
uacuaccuuggcugcccuuc

SEQ ID NO: 981126 - RNA, 22 nt, Human
uagagacgggguuucaccaugu

SEQ ID NO: 981127 - RNA, 23 nt, Human
uagcugauauugcuaaagagcuu

SEQ ID NO: 981128 - RNA, 20 nt, Human
uaggaaaaauucacaacagu

SEQ ID NO: 981129 - RNA, 24 nt, Human
uaguagagacgggguuucaccaug

SEQ ID NO: 981130 - RNA, 26 nt, Human
uaguagagacgggguuucaccauguu

SEQ ID NO: 981131 - RNA, 21 nt, Human
uaguggacacugaugguuugu

SEQ ID NO: 981132 - RNA, 23 nt, Human
uauaauaaauaauaacagcucgg

SEQ ID NO: 981133 - RNA, 23 nt, Human
uauaauucucaguugcagaaaau

SEQ ID NO: 981134 - RNA, 22 nt, Human
uaugcacagaaauguaucuauu

SEQ ID NO: 981135 - RNA, 22 nt, Human
uauggucuggcuuuuuuuuuua

SEQ ID NO: 981136 - RNA, 22 nt, Human
uauuucaccaccucaucuaagc

SEQ ID NO: 981137 - RNA, 19 nt, Human
uauuucagaucacaaauuc

SEQ ID NO: 981138 - RNA, 25 nt, Human
uauuucaugggugcuggguaugugg

SEQ ID NO: 981139 - RNA, 22 nt, Human
ucaaaccaacauggcaggguca

SEQ ID NO: 981140 - RNA, 24 nt, Human
ucacugcaaccucugccuccuggg

SEQ ID NO: 981141 - RNA, 25 nt, Human
ucacugcaaccucugccuccugggu

SEQ ID NO: 981142 - RNA, 27 nt, Human
ucacugcaaccucugccuccuggguuc

SEQ ID NO: 981143 - RNA, 18 nt, Human
ucagccucccaaguagcu

SEQ ID NO: 981144 - RNA, 21 nt, Human
ucagccucccaaguagcugag

SEQ ID NO: 981145 - RNA, 24 nt, Human
ucccaaguagcugagauuacaggc

SEQ ID NO: 981146 - RNA, 18 nt, Human
ucccuggccacucaggcc

SEQ ID NO: 981147 - RNA, 21 nt, Human
uccuggguucaggcaguucuc

SEQ ID NO: 981148 - RNA, 24 nt, Human
uccuggguucaggcaguucuccug

SEQ ID NO: 981149 - RNA, 24 nt, Human
uccuuggagaguucucagaauugc

SEQ ID NO: 981150 - RNA, 21 nt, Human
ucucacccuugccacccaggc

SEQ ID NO: 981151 - RNA, 22 nt, Human
ucucacccuugccacccaggca

SEQ ID NO: 981152 - RNA, 18 nt, Human
ucugacagaucaaggaaa

SEQ ID NO: 981153 - RNA, 22 nt, Human
ucugacagaucaaggaaacaag

SEQ ID NO: 981154 - RNA, 23 nt, Human
ucugacagaucaaggaaacaagu

SEQ ID NO: 981155 - RNA, 25 nt, Human
ugaaauauaauucucaguugcagaa

SEQ ID NO: 981156 - RNA, 18 nt, Human
ugaaugacaacugcuauc

SEQ ID NO: 981157 - RNA, 19 nt, Human
ugagauuacaggcacccac

SEQ ID NO: 981158 - RNA, 21 nt, Human
ugagauuacaggcacccacca

SEQ ID NO: 981159 - RNA, 22 nt, Human
ugagauuacaggcacccaccau

SEQ ID NO: 981160 - RNA, 27 nt, Human
ugccaccagucaaacuauggucuggcc

SEQ ID NO: 981161 - RNA, 24 nt, Human
ugcuucagccucccaaguagcuga

SEQ ID NO: 981162 - RNA, 23 nt, Human
uggaaaacaccaagauuaaaaac

SEQ ID NO: 981163 - RNA, 23 nt, Human
ugggaaccugugaacuaaagagu

SEQ ID NO: 981164 - RNA, 24 nt, Human
ugguaacaaauaguggacacugau

SEQ ID NO: 981165 - RNA, 23 nt, Human
ugucaaaaaacagccaauaaaca

SEQ ID NO: 981166 - RNA, 21 nt, Human
ugucaauauucaggaaagagg

SEQ ID NO: 981167 - RNA, 28 nt, Human
uuacuaagucagauugaguaggucgcau

SEQ ID NO: 981168 - RNA, 18 nt, Human
uuaguagagacgggguuu

SEQ ID NO: 981169 - RNA, 22 nt, Human
uuaguagagacgggguuucacc

SEQ ID NO: 981170 - RNA, 24 nt, Human
uuaguagagacgggguuucaccau

SEQ ID NO: 981171 - RNA, 24 nt, Human
uucaauccccugggaagaggauuc

SEQ ID NO: 981172 - RNA, 24 nt, Human
uuccuuuggggugcugcuuguagg

SEQ ID NO: 981173 - RNA, 19 nt, Human
uuucaccauguuggccagg

SEQ ID NO: 981174 - RNA, 18 nt, Human
uuuccuacaaaucuucag

SEQ ID NO: 981175 - RNA, 24 nt, Human
uuuuuaguagagacgggguuucac

SEQ ID NO: 981176 - RNA, 23 nt, Human
uagaggguuuuucucaggggcuu

SEQ ID NO: 981177 - RNA, 20 nt, Human
uuucuagaggguuuuucuca

SEQ ID NO: 981178 - RNA, 21 nt, Human
acacccccgcacccccaugug

SEQ ID NO: 981179 - RNA, 19 nt, Human
accuacacccccgcacccc

SEQ ID NO: 981180 - RNA, 19 nt, Human
accuacacccccgcacccc

SEQ ID NO: 981181 - RNA, 25 nt, Human
agaaagggagggaagcggaagggaa

SEQ ID NO: 981182 - RNA, 18 nt, Human
agggaaaaagcgcaugug

SEQ ID NO: 981183 - RNA, 19 nt, Human
agggaugggcccaagucuc

SEQ ID NO: 981184 - RNA, 18 nt, Human
cacccacggcugguuggg

SEQ ID NO: 981185 - RNA, 20 nt, Human
caccuacacccccgcacccc

SEQ ID NO: 981186 - RNA, 21 nt, Human
cagcagcacgcggcagcuucg

SEQ ID NO: 981187 - RNA, 21 nt, Human
cagcgaguuuauugcagguuc

SEQ ID NO: 981188 - RNA, 21 nt, Human
cagcucccgggaucgcgggga

SEQ ID NO: 981189 - RNA, 21 nt, Human
cccccgcacccccaugugccc

SEQ ID NO: 981190 - RNA, 21 nt, Human
ccccgcacccccaugugccca

SEQ ID NO: 981191 - RNA, 19 nt, Human
ccccucuggucucgcccuc

SEQ ID NO: 981192 - RNA, 21 nt, Human
cccgggaucgcggggaacgug

SEQ ID NO: 981193 - RNA, 22 nt, Human
ccuccgcgcagaggcugagagu

SEQ ID NO: 981194 - RNA, 21 nt, Human
ccuggcccagugcccuuggcc

SEQ ID NO: 981195 - RNA, 23 nt, Human
cgcuuggcaccuacacccccgca

SEQ ID NO: 981196 - RNA, 23 nt, Human
cggccggacuccaaucucggguc

SEQ ID NO: 981197 - RNA, 23 nt, Human
cucccgggaucgcggggaacgug

SEQ ID NO: 981198 - RNA, 18 nt, Human
gaaucgcggaugcgcaug

SEQ ID NO: 981199 - RNA, 21 nt, Human
gcaccuacacccccgcacccc

SEQ ID NO: 981200 - RNA, 24 nt, Human
gcagcagcacgcggcagcuucgca

SEQ ID NO: 981201 - RNA, 24 nt, Human
gggaacguggauuccgaacaaggg

SEQ ID NO: 981202 - RNA, 28 nt, Human
ucccccgugggaagaaagggagggaagc

SEQ ID NO: 981203 - RNA, 22 nt, Human
ucccgggaucgcggggaacgug

SEQ ID NO: 981204 - RNA, 21 nt, Human
uccgcaaaugggggccaccgu

SEQ ID NO: 981205 - RNA, 22 nt, Human
ugcgcaugcgccuccagcuccc

SEQ ID NO: 981206 - RNA, 20 nt, Human
ugcucaagaaaugcaugacu

SEQ ID NO: 981207 - RNA, 22 nt, Human
ugcuuccguccccucuggucuc

SEQ ID NO: 981208 - RNA, 21 nt, Human
uggcccagugcccuuggcugc

SEQ ID NO: 981209 - RNA, 22 nt, Human
uggcugcaggaauggcuggaac

SEQ ID NO: 981210 - RNA, 18 nt, Human
ugggaagaaagggaggga

SEQ ID NO: 981211 - RNA, 23 nt, Human
uugcgcgugcgccgcccuggccc

SEQ ID NO: 981212 - RNA, 20 nt, Human
uuuuuuuuuuuuuuuuccau

SEQ ID NO: 981213 - RNA, 24 nt, Human
uuuuuuuuuuuuuuuuuuuccaug

SEQ ID NO: 981214 - RNA, 20 nt, Human
aaaauacaacagaaacacua

SEQ ID NO: 981215 - RNA, 20 nt, Human
aaacacucagaacugcccuc

SEQ ID NO: 981216 - RNA, 21 nt, Human
aaagcaguugggagaugccua

SEQ ID NO: 981217 - RNA, 20 nt, Human
aacaggaaacagagugaggg

SEQ ID NO: 981218 - RNA, 23 nt, Human
acuguugugaacacuugcuuuca

SEQ ID NO: 981219 - RNA, 21 nt, Human
aggaaacagagugaggggggc

SEQ ID NO: 981220 - RNA, 18 nt, Human
aucagugaaaacgcuaau

SEQ ID NO: 981221 - RNA, 24 nt, Human
caaaauacaacagaaacacuaaca

SEQ ID NO: 981222 - RNA, 23 nt, Human
cacuaacaucgaacucuuggcac

SEQ ID NO: 981223 - RNA, 19 nt, Human
caucagugaaaacgcuaau

SEQ ID NO: 981224 - RNA, 20 nt, Human
cauguguguguguuugugua

SEQ ID NO: 981225 - RNA, 22 nt, Human
cgcgcgcaugugugucugugug

SEQ ID NO: 981226 - RNA, 25 nt, Human
cgcgcgcgcgcaugugugucugugu

SEQ ID NO: 981227 - RNA, 23 nt, Human
cgcgcgcgcgcgcgcaugggucc

SEQ ID NO: 981228 - RNA, 24 nt, Human
cgcuaauaucuaacagaauggcac

SEQ ID NO: 981229 - RNA, 18 nt, Human
cucaucagugaaaacgcu

SEQ ID NO: 981230 - RNA, 21 nt, Human
cucugucucugauuuuggaag

SEQ ID NO: 981231 - RNA, 25 nt, Human
cugguacuuggugugugugugugug

SEQ ID NO: 981232 - RNA, 33 nt, Human; identical to SEQ ID NO: 379763

SEQ ID NO: 981233 - RNA, 24 nt, Human
gaacaggaaacagagugagggggg

SEQ ID NO: 981234 - RNA, 24 nt, Human
gaacucuuggcacacuaagaaaaa

SEQ ID NO: 981235 - RNA, 24 nt, Human
gacgauacuuguuuucugagguag

SEQ ID NO: 981236 - RNA, 22 nt, Human
ggagaugccuauacugguacuu

SEQ ID NO: 981237 - RNA, 19 nt, Human
gucuguguggcaugugugu

SEQ ID NO: 981238 - RNA, 23 nt, Human
gugugugugugugcgcgcgcgcg

SEQ ID NO: 981239 - RNA, 20 nt, Human
gugugugugugugugugugu

SEQ ID NO: 981240 - RNA, 21 nt, Human
gugugugugugugugugugug

SEQ ID NO: 981241 - RNA, 21 nt, Human
gugugugugugugugugugug

SEQ ID NO: 981242 - RNA, 21 nt, Human
gugugugugugugugugugug

SEQ ID NO: 981243 - RNA, 19 nt, Human
uaaacacucagaacugccc

SEQ ID NO: 981244 - RNA, 24 nt, Human
ugcgcgcgcgcgcgcgcaugugug

SEQ ID NO: 981245 - RNA, 25 nt, Human
uggauacacaaaccgaaauaugcau

SEQ ID NO: 981246 - RNA, 21 nt, Human
uggcagugacugauagagggg

SEQ ID NO: 981247 - RNA, 18 nt, Human
ugggaagagaggagggua

SEQ ID NO: 981248 - RNA, 21 nt, Human
ugggagaugccuauacuggua

SEQ ID NO: 981249 - RNA, 22 nt, Human
uggugugugugugugugugugu

SEQ ID NO: 981250 - RNA, 22 nt, Human
ugugcgcgcgcgcgcgcgcaug

SEQ ID NO: 981251 - RNA, 24 nt, Human
ugugcgcgcgcgcgcgcgcaugug

SEQ ID NO: 981252 - RNA, 19 nt, Human
ugugucuguguggcaugug

SEQ ID NO: 981253 - RNA, 24 nt, Human
ugugugcgcgcgcgcgcgcgcaug

SEQ ID NO: 981254 - RNA, 19 nt, Human
uguguggcaugugugugug

SEQ ID NO: 981255 - RNA, 25 nt, Human
ugugugucuguguggcaugugugug

SEQ ID NO: 981256 - RNA, 18 nt, Human
ugugugugugugugugcg

SEQ ID NO: 981257 - RNA, 18 nt, Human
ugugugugugugugugug

SEQ ID NO: 981258 - RNA, 18 nt, Human
ugugugugugugugugug

SEQ ID NO: 981259 - RNA, 18 nt, Human
ugugugugugugugugug

SEQ ID NO: 981260 - RNA, 18 nt, Human
ugugugugugugugugug

SEQ ID NO: 981261 - RNA, 18 nt, Human
ugugugugugugugugug

SEQ ID NO: 981262 - RNA, 18 nt, Human
ugugugugugugugugug

SEQ ID NO: 981263 - RNA, 18 nt, Human
ugugugugugugugugug

SEQ ID NO: 981264 - RNA, 18 nt, Human
ugugugugugugugugug

SEQ ID NO: 981265 - RNA, 21 nt, Human
ugugugugugugugugugugu

SEQ ID NO: 981266 - RNA, 21 nt, Human
ugugugugugugugugugugu

SEQ ID NO: 981267 - RNA, 21 nt, Human
ugugugugugugugugugugu

SEQ ID NO: 981268 - RNA, 21 nt, Human
ugugugugugugugugugugu

SEQ ID NO: 981269 - RNA, 21 nt, Human
ugugugugugugugugugugu

SEQ ID NO: 981270 - RNA, 21 nt, Human
ugugugugugugugugugugu

SEQ ID NO: 981271 - RNA, 21 nt, Human
ugugugugugugugugugugu

SEQ ID NO: 981272 - RNA, 21 nt, Human
ugugugugugugugugugugu

SEQ ID NO: 981273 - RNA, 21 nt, Human
ugugugugugugugugugugu

SEQ ID NO: 981274 - RNA, 21 nt, Human
ugugugugugugugugugugu

SEQ ID NO: 981275 - RNA, 21 nt, Human
ugugugugugugugugugugu

SEQ ID NO: 981276 - RNA, 21 nt, Human
ugugugugugugugugugugu

SEQ ID NO: 981277 - RNA, 21 nt, Human
ugugugugugugugugugugu

SEQ ID NO: 981278 - RNA, 21 nt, Human
ugugugugugugugugugugu

SEQ ID NO: 981279 - RNA, 22 nt, Human
ugugugugugugugugugugug

SEQ ID NO: 981280 - RNA, 22 nt, Human
ugugugugugugugugugugug

SEQ ID NO: 981281 - RNA, 22 nt, Human
ugugugugugugugugugugug

SEQ ID NO: 981282 - RNA, 22 nt, Human
ugugugugugugugugugugug

SEQ ID NO: 981283 - RNA, 24 nt, Human
uuggaagaaucgaaagaaucagag

SEQ ID NO: 981284 - RNA, 18 nt, Human
uuggugugugugugugug

SEQ ID NO: 981285 - RNA, 19 nt, Human
aaaaaacaucccuucacca

SEQ ID NO: 981286 - RNA, 26 nt, Human
aaaaaauccaaaaugauuaguaaaga

SEQ ID NO: 981287 - RNA, 21 nt, Human
aaaaagacaagucaaaaugca

SEQ ID NO: 981288 - RNA, 24 nt, Human
aaaaguacuaccuuauuucccuua

SEQ ID NO: 981289 - RNA, 19 nt, Human
aaacaccaaagggaauccc

SEQ ID NO: 981290 - RNA, 22 nt, Human
aacacaaacuuuauccucaaau

SEQ ID NO: 981291 - RNA, 23 nt, Human
aacuccacaaugaauaacugugg

SEQ ID NO: 981292 - RNA, 22 nt, Human
aacucuacacauuaacaaaaga

SEQ ID NO: 981293 - RNA, 27 nt, Human
aagaaaaagauaaagcauuuaaaaaga

SEQ ID NO: 981294 - RNA, 25 nt, Human
aagaaaaguaagggagaccgguacc

SEQ ID NO: 981295 - RNA, 23 nt, Human
aagaacacacaagcucaaaugca

SEQ ID NO: 981296 - RNA, 21 nt, Human
aagcaaacacagauuugggca

SEQ ID NO: 981297 - RNA, 23 nt, Human
aagcaaacacagauuugggcaau

SEQ ID NO: 981298 - RNA, 20 nt, Human
aagcaaaguacagaaggccc

SEQ ID NO: 981299 - RNA, 20 nt, Human
aagcagaaagcaaacacaga

SEQ ID NO: 981300 - RNA, 25 nt, Human
aagcagaaagcaaacacagauuugg

SEQ ID NO: 981301 - RNA, 21 nt, Human
aagcaugcuccaucagcauaa

SEQ ID NO: 981302 - RNA, 21 nt, Human
aagcauuuaaaaagacaaguc

SEQ ID NO: 981303 - RNA, 18 nt, Human
aauaaggaauccagaaga

SEQ ID NO: 981304 - RNA, 22 nt, Human
acacugguuuguauuauugcga

SEQ ID NO: 981305 - RNA, 23 nt, Human
acagcaaaggguuagaaccugaa

SEQ ID NO: 981306 - RNA, 18 nt, Human
acuaccuuauuucccuua

SEQ ID NO: 981307 - RNA, 22 nt, Human
acugaaauacggguggucccag

SEQ ID NO: 981308 - RNA, 22 nt, Human
acuggacaacaagagaacuaag

SEQ ID NO: 981309 - RNA, 20 nt, Human
agaaagcaaacacagauuug

SEQ ID NO: 981310 - RNA, 18 nt, Human
agaaagcaagcagaggug

SEQ ID NO: 981311 - RNA, 22 nt, Human
agaaagcaagcagaggugggga

SEQ ID NO: 981312 - RNA, 18 nt, Human
agaaggucagagguacac

SEQ ID NO: 981313 - RNA, 25 nt, Human
agaauggaagucuaacacuuaaaua

SEQ ID NO: 981314 - RNA, 22 nt, Human
agcagugaugaugccgguggaa

SEQ ID NO: 981315 - RNA, 25 nt, Human
aggaaagagaauuuuaagcauagaa

SEQ ID NO: 981316 - RNA, 22 nt, Human
aucccucuuuccaaugucuucu

SEQ ID NO: 981317 - RNA, 18 nt, Human
auguagcaagcagaaagc

SEQ ID NO: 981318 - RNA, 20 nt, Human
auugaaacacugguagaaag

SEQ ID NO: 981319 - RNA, 18 nt, Human
caaaaaaaacaucccuuc

SEQ ID NO: 981320 - RNA, 24 nt, Human
caaaaaaaacaucccuucaccaca

SEQ ID NO: 981321 - RNA, 18 nt, Human
caaagcaccccagcucuc

SEQ ID NO: 981322 - RNA, 21 nt, Human
caagacagaacagacuagaac

SEQ ID NO: 981323 - RNA, 26 nt, Human
caagacagaacagacuagaaccuccc

SEQ ID NO: 981324 - RNA, 25 nt, Human
caggaaccacauauccaaccuucag

SEQ ID NO: 981325 - RNA, 21 nt, Human
cagguacaaugccuauacuua

SEQ ID NO: 981326 - RNA, 20 nt, Human
caucaggaaccacauaucca

SEQ ID NO: 981327 - RNA, 22 nt, Human
caucaggaaccacauauccaac

SEQ ID NO: 981328 - RNA, 21 nt, Human
cauuuucuuuaucauuggagg

SEQ ID NO: 981329 - RNA, 23 nt, Human
ccacaguguaagauuuaagggca

SEQ ID NO: 981330 - RNA, 26 nt, Human
ccacauauccaacacaaacuuuaucc

SEQ ID NO: 981331 - RNA, 24 nt, Human
ccagaauggaagucuaacacuuaa

SEQ ID NO: 981332 - RNA, 21 nt, Human
ccagguccuacugaaauacgg

SEQ ID NO: 981333 - RNA, 21 nt, Human
cccggccgcuggcuccuccca

SEQ ID NO: 981334 - RNA, 24 nt, Human
cccuacaauuaccauauguauuac

SEQ ID NO: 981335 - RNA, 19 nt, Human
cccucuuuccaaugucuuc

SEQ ID NO: 981336 - RNA, 18 nt, Human
ccggccgcuggcuccucc

SEQ ID NO: 981337 - RNA, 21 nt, Human
ccgguggaaaaagccugucuu

SEQ ID NO: 981338 - RNA, 27 nt, Human
ccuucaccacaguguaagauuuaaggg

SEQ ID NO: 981339 - RNA, 22 nt, Human
cggccgcuggcuccucccaccc

SEQ ID NO: 981340 - RNA, 22 nt, Human
cuacacauuaacaaaagaacac

SEQ ID NO: 981341 - RNA, 20 nt, Human
cuuccaaucccuacccaggu

SEQ ID NO: 981342 - RNA, 24 nt, Human
gaaaaagccugucuuuagcucaag

SEQ ID NO: 981343 - RNA, 23 nt, Human
gaauuuacuucacugcuccuacc

SEQ ID NO: 981344 - RNA, 20 nt, Human
gagaaaggagaacucuacac

SEQ ID NO: 981345 - RNA, 23 nt, Human
gagguggugggcgaaacuggggg

SEQ ID NO: 981346 - RNA, 21 nt, Human
gauuaguaaagaaaaauauaa

SEQ ID NO: 981347 - RNA, 26 nt, Human
gcaagacagaacagacuagaaccucc

SEQ ID NO: 981348 - RNA, 22 nt, Human
gcaagcagaaagcaaacacaga

SEQ ID NO: 981349 - RNA, 19 nt, Human
gcugaauacaaagacaaug

SEQ ID NO: 981350 - RNA, 21 nt, Human
gcuggcucggcgugaccgcgc

SEQ ID NO: 981351 - RNA, 20 nt, Human
ggaaauaauaugaaaaacac

SEQ ID NO: 981352 - RNA, 22 nt, Human
ggaaauaauaugaaaaacacuu

SEQ ID NO: 981353 - RNA, 22 nt, Human
gggaaucccucuuuccaauguc

SEQ ID NO: 981354 - RNA, 29 nt, Human
gggagagggguagggauuaucuucaaagg

SEQ ID NO: 981355 - RNA, 19 nt, Human
guaaagaaaaauauaagaa

SEQ ID NO: 981356 - RNA, 21 nt, Human
gucagguacaaugccuauacu

SEQ ID NO: 981357 - RNA, 24 nt, Human
uaaaaagacaagucaaaaugcauc

SEQ ID NO: 981358 - RNA, 22 nt, Human
uaaaaagcaugcuccaucagca

SEQ ID NO: 981359 - RNA, 25 nt, Human
uaacaggcccuuuaaauuuguuuua

SEQ ID NO: 981360 - RNA, 18 nt, Human
uaacuuuuauuucacuca

SEQ ID NO: 981361 - RNA, 21 nt, Human
uaagagcugaauacaaagaca

SEQ ID NO: 981362 - RNA, 22 nt, Human
uaaguagaagaccaaacaccaa

SEQ ID NO: 981363 - RNA, 20 nt, Human
uaaguagaagaccaaacacu

SEQ ID NO: 981364 - RNA, 21 nt, Human
uagaagaccaaacaccaaagg

SEQ ID NO: 981365 - RNA, 25 nt, Human
uagcagugaugaugccgguggaaaa

SEQ ID NO: 981366 - RNA, 21 nt, Human
uauaaaaagaaaaguacuacc

SEQ ID NO: 981367 - RNA, 22 nt, Human
ucaaaugaguuauguuugccuc

SEQ ID NO: 981368 - RNA, 22 nt, Human
ucagaaaugugguauuuuagaa

SEQ ID NO: 981369 - RNA, 20 nt, Human
uccauagaauuuacuucacu

SEQ ID NO: 981370 - RNA, 22 nt, Human
uccccggccgcuggcuccuccc

SEQ ID NO: 981371 - RNA, 23 nt, Human
ucgagaaaggagaacucuacaca

SEQ ID NO: 981372 - RNA, 21 nt, Human
ucuuuaaagaaaaagauaaag

SEQ ID NO: 981373 - RNA, 18 nt, Human
ugaaacacugguagaaac

SEQ ID NO: 981374 - RNA, 25 nt, Human
ugaaugaauacccuaauggcaaacc

SEQ ID NO: 981375 - RNA, 18 nt, Human
ugaaugcacaacagaaaa

SEQ ID NO: 981376 - RNA, 19 nt, Human
ugaguguuuuuaaaggauu

SEQ ID NO: 981377 - RNA, 22 nt, Human
ugaguuaagccaaguacacacu

SEQ ID NO: 981378 - RNA, 21 nt, Human
ugaucuagguugcuuuuccuu

SEQ ID NO: 981379 - RNA, 20 nt, Human
ugccaaguacuuccaauccc

SEQ ID NO: 981380 - RNA, 18 nt, Human
ugccucgcacuaauaacu

SEQ ID NO: 981381 - RNA, 18 nt, Human
ugcugcugcccugccaag

SEQ ID NO: 981382 - RNA, 20 nt, Human
uggacaacaagagaacuaag

SEQ ID NO: 981383 - RNA, 19 nt, Human
uggaggggagggaaagaaa

SEQ ID NO: 981384 - RNA, 19 nt, Human
uggccaaguaagaaacuac

SEQ ID NO: 981385 - RNA, 21 nt, Human
uggugggcgaaacuggggggg

SEQ ID NO: 981386 - RNA, 20 nt, Human
uuaacaggcccuuuaaauuu

SEQ ID NO: 981387 - RNA, 20 nt, Human
uucuugaguuaagccaagua

SEQ ID NO: 981388 - RNA, 20 nt, Human
uugaaacacugguagaaacg

SEQ ID NO: 981389 - RNA, 19 nt, Human
uugaaugcacaacagaaaa

SEQ ID NO: 981390 - RNA, 20 nt, Human
uugcuuuuccuucagcaagg

SEQ ID NO: 981391 - RNA, 22 nt, Human
uuuacuucacugcuccuaccac

SEQ ID NO: 981392 - RNA, 22 nt, Human
uuuuuuuuuuuuuuuuuuucag

SEQ ID NO: 981393 - RNA, 23 nt, Human
aaauccaggcucuuuuuucuggg

SEQ ID NO: 981394 - RNA, 18 nt, Human
aagauuucacaacuguaa

SEQ ID NO: 981395 - RNA, 23 nt, Human
acccaucaccccauuuaauuaaa

SEQ ID NO: 981396 - RNA, 21 nt, Human
aggcaaggagaccauggcagc

SEQ ID NO: 981397 - RNA, 20 nt, Human
aucccuggccucaggaccua

SEQ ID NO: 981398 - RNA, 27 nt, Human
ggacuggaagaguguuuuugagccucu

SEQ ID NO: 981399 - RNA, 24 nt, Human
guagaguugucaaauagcuuaaag

SEQ ID NO: 981400 - RNA, 24 nt, Human
uaucaagaagcuuuuggacuggaa

SEQ ID NO: 981401 - RNA, 18 nt, Human
ucuguaaauccaggcucu

SEQ ID NO: 981402 - RNA, 21 nt, Human
ucuguagugaaguuaaguaau

SEQ ID NO: 981403 - RNA, 19 nt, Human
uggaagaguguuuuucagc

SEQ ID NO: 981404 - RNA, 22 nt, Human
uggccacccaucaccccauuua

SEQ ID NO: 981405 - RNA, 25 nt, Human
uucaagauuucacaacuguaaacuc

SEQ ID NO: 981406 - RNA, 20 nt, Human
aaaggagccaaaaugcggug

SEQ ID NO: 981407 - RNA, 20 nt, Human
aacaacccugugagguaggg

SEQ ID NO: 981408 - RNA, 20 nt, Human
aacaacccugugagguaggg

SEQ ID NO: 981409 - RNA, 25 nt, Human
aacagccccuguaaguagcccuggc

SEQ ID NO: 981410 - RNA, 18 nt, Human
aacuauccuggcuuaaaa

SEQ ID NO: 981411 - RNA, 18 nt, Human
aacuauccuggcuuaaaa

SEQ ID NO: 981412 - RNA, 18 nt, Human
aacugccaagccuacugc

SEQ ID NO: 981413 - RNA, 21 nt, Human
aacugccaagccuacugcuca

SEQ ID NO: 981414 - RNA, 21 nt, Human
aacugccaagccuacugcuca

SEQ ID NO: 981415 - RNA, 22 nt, Human
aagcaauccugcagagccgccc

SEQ ID NO: 981416 - RNA, 19 nt, Human
aagcauucucccacuggcc

SEQ ID NO: 981417 - RNA, 19 nt, Human
aagcauucucccacuggcc

SEQ ID NO: 981418 - RNA, 22 nt, Human
aagccuacugcucaugaccugu

SEQ ID NO: 981419 - RNA, 22 nt, Human
aagccuacugcucaugaccugu

SEQ ID NO: 981420 - RNA, 18 nt, Human
aaggagccaaaaugcggu

SEQ ID NO: 981421 - RNA, 18 nt, Human
aaggagccaaaaugcggu

SEQ ID NO: 981422 - RNA, 21 nt, Human
aauguuggauaacaagaaaga

SEQ ID NO: 981423 - RNA, 19 nt, Human
acacagagguguacauaua

SEQ ID NO: 981424 - RNA, 22 nt, Human
acacuguaacagauuaagagca

SEQ ID NO: 981425 - RNA, 20 nt, Human
acagaguucuccguaagcaa

SEQ ID NO: 981426 - RNA, 20 nt, Human
acagaguucuccguaagcaa

SEQ ID NO: 981427 - RNA, 25 nt, Human
acagcaccagagaacaaugugaugc

SEQ ID NO: 981428 - RNA, 25 nt, Human
acagcaccagagaacaaugugaugc

SEQ ID NO: 981429 - RNA, 25 nt, Human
acauugguaucucuccucaguugag

SEQ ID NO: 981430 - RNA, 18 nt, Human
acccugggcgccugggcc

SEQ ID NO: 981431 - RNA, 19 nt, Human
acccugggcgccugggccc

SEQ ID NO: 981432 - RNA, 19 nt, Human
acccugggcgccugggccc

SEQ ID NO: 981433 - RNA, 20 nt, Human
acuguauaaguucgcaaggc

SEQ ID NO: 981434 - RNA, 18 nt, Human
agaugugccaugcuuaug

SEQ ID NO: 981435 - RNA, 20 nt, Human
agccaaauuacagcaccaga

SEQ ID NO: 981436 - RNA, 20 nt, Human
agccaaauuacagcaccaga

SEQ ID NO: 981437 - RNA, 18 nt, Human
aggagcugggaggggaga

SEQ ID NO: 981438 - RNA, 21 nt, Human
aggagcugggaggggagaagg

SEQ ID NO: 981439 - RNA, 22 nt, Human
aggagcugggaggggagaagga

SEQ ID NO: 981440 - RNA, 22 nt, Human
aggaugcaggaagggcauggug

SEQ ID NO: 981441 - RNA, 22 nt, Human
aggaugcaggaagggcauggug

SEQ ID NO: 981442 - RNA, 19 nt, Human
aggcagaucagagaugguu

SEQ ID NO: 981443 - RNA, 26 nt, Human
aguaauaugcccuguccccugaaagg

SEQ ID NO: 981444 - RNA, 26 nt, Human
aguaauaugcccuguccccugaaagg

SEQ ID NO: 981445 - RNA, 18 nt, Human
auacccaugauuucagga

SEQ ID NO: 981446 - RNA, 18 nt, Human
auacccaugauuucagga

SEQ ID NO: 981447 - RNA, 20 nt, Human
augaaauacgggagagcuuc

SEQ ID NO: 981448 - RNA, 21 nt, Human
augaaauacgggagagcuuca

SEQ ID NO: 981449 - RNA, 21 nt, Human
augaaauacgggagagcuuca

SEQ ID NO: 981450 - RNA, 21 nt, Human
augaagaaaaaaggaagacaa

SEQ ID NO: 981451 - RNA, 23 nt, Human
augaccugugguuguuuuuaacu

SEQ ID NO: 981452 - RNA, 23 nt, Human
augcauuccugggcaggucggug

SEQ ID NO: 981453 - RNA, 23 nt, Human
augcauuccugggcaggucggug

SEQ ID NO: 981454 - RNA, 22 nt, Human
auggagcagcuggacauuagag

SEQ ID NO: 981455 - RNA, 22 nt, Human
auggagcagcuggacauuagag

SEQ ID NO: 981456 - RNA, 20 nt, Human
auuaucucugagcaucucgg

SEQ ID NO: 981457 - RNA, 20 nt, Human
auuaucucugagcaucucgg

SEQ ID NO: 981458 - RNA, 21 nt, Human
auuguuucuccugccuugagu

SEQ ID NO: 981459 - RNA, 23 nt, Human
caaacucauuuucccacuuccca

SEQ ID NO: 981460 - RNA, 23 nt, Human
caaacucauuuucccacuuccca

SEQ ID NO: 981461 - RNA, 19 nt, Human
caaauaaucuacacaaguc

SEQ ID NO: 981462 - RNA, 26 nt, Human
caacagccccuguaaguagcccuggc

SEQ ID NO: 981463 - RNA, 26 nt, Human
caacagccccuguaaguagcccuggc

SEQ ID NO: 981464 - RNA, 22 nt, Human
cacaacaacccugugagguagg

SEQ ID NO: 981465 - RNA, 22 nt, Human
cacaacaacccugugagguagg

SEQ ID NO: 981466 - RNA, 22 nt, Human
cacacacacacacagaggugua

SEQ ID NO: 981467 - RNA, 22 nt, Human
cacacacacacacagaggugua

SEQ ID NO: 981468 - RNA, 19 nt, Human
caccuucuauucguuucca

SEQ ID NO: 981469 - RNA, 25 nt, Human
cacuuccauucuaugaguauaucga

SEQ ID NO: 981470 - RNA, 22 nt, Human
cagaguucuccguaagcaaucc

SEQ ID NO: 981471 - RNA, 22 nt, Human
cagaguucuccguaagcaaucc

SEQ ID NO: 981472 - RNA, 22 nt, Human
cagcacagcuuuagcaaaaaua

SEQ ID NO: 981473 - RNA, 19 nt, Human
cagccugagcacaaccaug

SEQ ID NO: 981474 - RNA, 19 nt, Human
cagccugagcacaaccaug

SEQ ID NO: 981475 - RNA, 25 nt, Human
cagcuuuagcaaaaauacccaugau

SEQ ID NO: 981476 - RNA, 22 nt, Human
cagugcguggcucagccagaac

SEQ ID NO: 981477 - RNA, 20 nt, Human
caguggugaagaauuaccau

SEQ ID NO: 981478 - RNA, 22 nt, Human
cauggugaggagagaucagugg

SEQ ID NO: 981479 - RNA, 22 nt, Human
cauggugaggagagaucagugg

SEQ ID NO: 981480 - RNA, 26 nt, Human
caugucauaguauguaaguggcucuu

SEQ ID NO: 981481 - RNA, 24 nt, Human
cauucagccuagcuccugcagcca

SEQ ID NO: 981482 - RNA, 24 nt, Human
cauucagccuagcuccugcagcca

SEQ ID NO: 981483 - RNA, 22 nt, Human
ccaaaggagccaaaaugcggug

SEQ ID NO: 981484 - RNA, 22 nt, Human
ccagaacucaaaccuaggucuu

SEQ ID NO: 981485 - RNA, 18 nt, Human
ccaguacauugguaucuc

SEQ ID NO: 981486 - RNA, 25 nt, Human
cccaaguguaucuccuauauucugc

SEQ ID NO: 981487 - RNA, 24 nt, Human
ccccaacagccccuguaaguagcc

SEQ ID NO: 981488 - RNA, 24 nt, Human
ccccaacagccccuguaaguagcc

SEQ ID NO: 981489 - RNA, 19 nt, Human
cccgacccuccacuuggga

SEQ ID NO: 981490 - RNA, 19 nt, Human
cccgacccuccacuuggga

SEQ ID NO: 981491 - RNA, 18 nt, Human
ccgucucugugcagcugg

SEQ ID NO: 981492 - RNA, 21 nt, Human
ccuaggaauaacaauauucau

SEQ ID NO: 981493 - RNA, 21 nt, Human
ccuaggaauaacaauauucau

SEQ ID NO: 981494 - RNA, 19 nt, Human
ccuccaagccuucugcaua

SEQ ID NO: 981495 - RNA, 20 nt, Human
ccucccugucagccugagca

SEQ ID NO: 981496 - RNA, 20 nt, Human
ccucccugucagccugagca

SEQ ID NO: 981497 - RNA, 22 nt, Human
ccugcaggcaacucuuugguuu

SEQ ID NO: 981498 - RNA, 22 nt, Human
ccugcaggcaacucuuugguuu

SEQ ID NO: 981499 - RNA, 18 nt, Human
ccuguaaguagcccuggc

SEQ ID NO: 981500 - RNA, 18 nt, Human
ccuguaaguagcccuggc

SEQ ID NO: 981501 - RNA, 24 nt, Human
cgggagagcuucacauuacaccgu

SEQ ID NO: 981502 - RNA, 24 nt, Human
cgggagagcuucacauuacaccgu

SEQ ID NO: 981503 - RNA, 25 nt, Human
cucaggcugcauaggaguucugcuc

SEQ ID NO: 981504 - RNA, 25 nt, Human
cucaggcugcauaggaguucugcuc

SEQ ID NO: 981505 - RNA, 19 nt, Human
cucauuuucccacuuccca

SEQ ID NO: 981506 - RNA, 21 nt, Human
cucuguuccucgaaggagaac

SEQ ID NO: 981507 - RNA, 18 nt, Human
cugagcacaaccaugagg

SEQ ID NO: 981508 - RNA, 23 nt, Human
cugaggaugcccaggguuggggg

SEQ ID NO: 981509 - RNA, 20 nt, Human
cuggaaaagaccaaguggug

SEQ ID NO: 981510 - RNA, 23 nt, Human
cuggccaaacagaaaggcuaagc

SEQ ID NO: 981511 - RNA, 23 nt, Human
cuggccaaacagaaaggcuaagc

SEQ ID NO: 981512 - RNA, 18 nt, Human
cuguagaagagcaaaauc

SEQ ID NO: 981513 - RNA, 18 nt, Human
cuguagaagagcaaaauc

SEQ ID NO: 981514 - RNA, 18 nt, Human
cugugguuguuuuuaacu

SEQ ID NO: 981515 - RNA, 19 nt, Human
cuguguaacagauugcugc

SEQ ID NO: 981516 - RNA, 19 nt, Human
cuguguaacagauugcugc

SEQ ID NO: 981517 - RNA, 20 nt, Human
cuucacauuacacagagacc

SEQ ID NO: 981518 - RNA, 20 nt, Human
cuucacauuacacagagacc

SEQ ID NO: 981519 - RNA, 24 nt, Human
cuucaugcugaggacuuuggugcu

SEQ ID NO: 981520 - RNA, 21 nt, Human
cuuccuuuucacucuuugccc

SEQ ID NO: 981521 - RNA, 21 nt, Human
cuuccuuuucacucuuugccc

SEQ ID NO: 981522 - RNA, 21 nt, Human
cuugacuucaaccccaacagc

SEQ ID NO: 981523 - RNA, 21 nt, Human
cuugacuucaaccccaacagc

SEQ ID NO: 981524 - RNA, 19 nt, Human
gaacaaaggaagcuccuuu

SEQ ID NO: 981525 - RNA, 19 nt, Human
gaacaaaggaagcuccuuu

SEQ ID NO: 981526 - RNA, 18 nt, Human
gaagaaaaaaggaagaca

SEQ ID NO: 981527 - RNA, 26 nt, Human
gaagcuuuuucauaugcaaaaugcuu

SEQ ID NO: 981528 - RNA, 26 nt, Human
gaagcuuuuucauaugcaaaaugcuu

SEQ ID NO: 981529 - RNA, 20 nt, Human
gacccugggcgccugggccu

SEQ ID NO: 981530 - RNA, 20 nt, Human
gacccugggcgccugggccu

SEQ ID NO: 981531 - RNA, 21 nt, Human
gacuguauaaguucgcaaggc

SEQ ID NO: 981532 - RNA, 21 nt, Human
gacuguauaaguucgcaaggc

SEQ ID NO: 981533 - RNA, 24 nt, Human
gagcacaaccaugagguuacacac

SEQ ID NO: 981534 - RNA, 24 nt, Human
gagcacaaccaugagguuacacac

SEQ ID NO: 981535 - RNA, 20 nt, Human
gagcugggaggggagaagga

SEQ ID NO: 981536 - RNA, 20 nt, Human
gcaauccugcagagccgccc

SEQ ID NO: 981537 - RNA, 20 nt, Human
gcaauccugcagagccgccc

SEQ ID NO: 981538 - RNA, 26 nt, Human
gcacagcuuuagcaaaaagggaacgc

SEQ ID NO: 981539 - RNA, 19 nt, Human
gcuuauauuaucucugagc

SEQ ID NO: 981540 - RNA, 19 nt, Human
gcuuauauuaucucugagc

SEQ ID NO: 981541 - RNA, 18 nt, Human
ggaacugccugcuacuac

SEQ ID NO: 981542 - RNA, 18 nt, Human
ggaacugccugcuacuac

SEQ ID NO: 981543 - RNA, 20 nt, Human
ggaagacaauuucaucuaca

SEQ ID NO: 981544 - RNA, 20 nt, Human
ggaagacaauuucaucuaca

SEQ ID NO: 981545 - RNA, 23 nt, Human
ggacaggaaaccgggagucggga

SEQ ID NO: 981546 - RNA, 19 nt, Human
ggagagcuucacauuacac

SEQ ID NO: 981547 - RNA, 27 nt, Human
ggaggccucugccccgacccuccacuu

SEQ ID NO: 981548 - RNA, 27 nt, Human
ggaggccucugccccgacccuccacuu

SEQ ID NO: 981549 - RNA, 19 nt, Human
ggcaccagagucccagcac

SEQ ID NO: 981550 - RNA, 19 nt, Human
gggagucgggaauccuggg

SEQ ID NO: 981551 - RNA, 21 nt, Human
gggagucgggaauccugggau

SEQ ID NO: 981552 - RNA, 18 nt, Human
gguaaagggauagaaaag

SEQ ID NO: 981553 - RNA, 18 nt, Human
guccuuucucuaacgggu

SEQ ID NO: 981554 - RNA, 18 nt, Human
gugggugguugggggaag

SEQ ID NO: 981555 - RNA, 18 nt, Human
gugggugguugggggaag

SEQ ID NO: 981556 - RNA, 23 nt, Human
guucugcucauccuccucucccc

SEQ ID NO: 981557 - RNA, 23 nt, Human
guucugcucauccuccucucccc

SEQ ID NO: 981558 - RNA, 21 nt, Human
uaaaagugccuucccauguac

SEQ ID NO: 981559 - RNA, 22 nt, Human
uaaauaaccuuucagcaucuac

SEQ ID NO: 981560 - RNA, 23 nt, Human
uaaauuguuucuccugccuugag

SEQ ID NO: 981561 - RNA, 23 nt, Human
uaacagauuaagagcaccuucua

SEQ ID NO: 981562 - RNA, 19 nt, Human
uaacugccaagccuacugc

SEQ ID NO: 981563 - RNA, 24 nt, Human
uaagcugaaugaagaaaaaaggaa

SEQ ID NO: 981564 - RNA, 24 nt, Human
uaagcugaaugaagaaaaaaggaa

SEQ ID NO: 981565 - RNA, 25 nt, Human
uaaguggcucuuuaccagucaccca

SEQ ID NO: 981566 - RNA, 29 nt, Human
uacacacacacacacagagguguacauag

SEQ ID NO: 981567 - RNA, 29 nt, Human
uacacacacacacacagagguguacauag

SEQ ID NO: 981568 - RNA, 23 nt, Human
uaccagucacccaaguguaucuc

SEQ ID NO: 981569 - RNA, 19 nt, Human
uacugcucaugaccugugg

SEQ ID NO: 981570 - RNA, 19 nt, Human
uacugcucaugaccugugg

SEQ ID NO: 981571 - RNA, 24 nt, Human
uaucagccgucucugugcagcugg

SEQ ID NO: 981572 - RNA, 20 nt, Human
uauuaggguaaauauaucac

SEQ ID NO: 981573 - RNA, 20 nt, Human
uauuaggguaaauauaucac

SEQ ID NO: 981574 - RNA, 25 nt, Human
uauucugcuccucugaaaagauuua

SEQ ID NO: 981575 - RNA, 23 nt, Human
ucaaagccugaggaugcccaggg

SEQ ID NO: 981576 - RNA, 23 nt, Human
ucaaauccuguguauucuccuca

SEQ ID NO: 981577 - RNA, 21 nt, Human
ucacaggugaaaaaggucuga

SEQ ID NO: 981578 - RNA, 18 nt, Human
ucacucuuugcccucccu

SEQ ID NO: 981579 - RNA, 18 nt, Human
ucacucuuugcccucccu

SEQ ID NO: 981580 - RNA, 24 nt, Human
ucccugaccucaaagguaaaggga

SEQ ID NO: 981581 - RNA, 26 nt, Human
ucccugggaggcauucagccuagcuc

SEQ ID NO: 981582 - RNA, 26 nt, Human
ucccugggaggcauucagccuagcuc

SEQ ID NO: 981583 - RNA, 21 nt, Human
ucgcaggcgccaggagcuggg

SEQ ID NO: 981584 - RNA, 19 nt, Human
ucuacaguuguccuuuuug

SEQ ID NO: 981585 - RNA, 19 nt, Human
ucuacaguuguccuuuuug

SEQ ID NO: 981586 - RNA, 18 nt, Human
ucucuaacggguauggaa

SEQ ID NO: 981587 - RNA, 19 nt, Human
ucucugagcaucucggugg

SEQ ID NO: 981588 - RNA, 19 nt, Human
ucucugagcaucucggugg

SEQ ID NO: 981589 - RNA, 24 nt, Human
ucucugugcagcugggauaagggu

SEQ ID NO: 981590 - RNA, 24 nt, Human
ucugaaacaguccuugucuucaac

SEQ ID NO: 981591 - RNA, 24 nt, Human
ucugaaacaguccuugucuucaac

SEQ ID NO: 981592 - RNA, 22 nt, Human
ucugcucauccuccucucccca

SEQ ID NO: 981593 - RNA, 21 nt, Human
ucuucuggaggcuguuucugg

SEQ ID NO: 981594 - RNA, 21 nt, Human
ucuucuggaggcuguuucugg

SEQ ID NO: 981595 - RNA, 21 nt, Human
ugaagcaauguuggauaacaa

SEQ ID NO: 981596 - RNA, 21 nt, Human
ugaagcaauguuggauaacaa

SEQ ID NO: 981597 - RNA, 19 nt, Human
ugacuucaaccccaacagg

SEQ ID NO: 981598 - RNA, 19 nt, Human
ugacuucaaccccaacagg

SEQ ID NO: 981599 - RNA, 22 nt, Human
ugagaauggcuaucauugcugu

SEQ ID NO: 981600 - RNA, 22 nt, Human
ugagaauggcuaucauugcugu

SEQ ID NO: 981601 - RNA, 18 nt, Human
ugauuggcagguauaggg

SEQ ID NO: 981602 - RNA, 23 nt, Human
ugcaaaaugcuuuagcauauaug

SEQ ID NO: 981603 - RNA, 23 nt, Human
ugcaaaaugcuuuagcauauaug

SEQ ID NO: 981604 - RNA, 19 nt, Human
ugcagccaaauuacagcac

SEQ ID NO: 981605 - RNA, 19 nt, Human
ugcagccaaauuacagcac

SEQ ID NO: 981606 - RNA, 24 nt, Human
ugccccgacccuccacuugggaac

SEQ ID NO: 981607 - RNA, 24 nt, Human
ugccccgacccuccacuugggaac

SEQ ID NO: 981608 - RNA, 25 nt, Human
ugccuugagugccuguuuaaauaac

SEQ ID NO: 981609 - RNA, 27 nt, Human
ugcugcucucuguuccucccaucagug

SEQ ID NO: 981610 - RNA, 22 nt, Human
uggaggccucugccccgacccu

SEQ ID NO: 981611 - RNA, 22 nt, Human
uggaggccucugccccgacccu

SEQ ID NO: 981612 - RNA, 23 nt, Human
uggcuuauauuaucucugagcau

SEQ ID NO: 981613 - RNA, 24 nt, Human
ugggacccugggcgccugggccuu

SEQ ID NO: 981614 - RNA, 24 nt, Human
ugggacccugggcgccugggccuu

SEQ ID NO: 981615 - RNA, 20 nt, Human
ugggaggggagaaggacagg

SEQ ID NO: 981616 - RNA, 21 nt, Human
ugggaggggagaaggacagga

SEQ ID NO: 981617 - RNA, 21 nt, Human
uggguaaacagaaacaugaug

SEQ ID NO: 981618 - RNA, 18 nt, Human
uggguuagaaaacuggag

SEQ ID NO: 981619 - RNA, 18 nt, Human
uggguuagaaaacuggag

SEQ ID NO: 981620 - RNA, 18 nt, Human
ugguuucauuuucucugu

SEQ ID NO: 981621 - RNA, 21 nt, Human
uguaaguggcucuuuaccagu

SEQ ID NO: 981622 - RNA, 24 nt, Human
uguagaagagcaaaauccugcugg

SEQ ID NO: 981623 - RNA, 24 nt, Human
uguagaagagcaaaauccugcugg

SEQ ID NO: 981624 - RNA, 18 nt, Human
uguaucuccuauauucug

SEQ ID NO: 981625 - RNA, 19 nt, Human
uguccuuucucuaacgggu

SEQ ID NO: 981626 - RNA, 18 nt, Human
ugucugaaggacguaaaa

SEQ ID NO: 981627 - RNA, 18 nt, Human
uuagcaaaaauacccaug

SEQ ID NO: 981628 - RNA, 18 nt, Human
uuagcaaaaauacccaug

SEQ ID NO: 981629 - RNA, 19 nt, Human
uucauuguuuaauucuaaa

SEQ ID NO: 981630 - RNA, 22 nt, Human
uuccacagcucuaugaauugcu

SEQ ID NO: 981631 - RNA, 23 nt, Human
uuccagugcugaagaugaaagaa

SEQ ID NO: 981632 - RNA, 23 nt, Human
uucugcucauccuccucucccca

SEQ ID NO: 981633 - RNA, 23 nt, Human
uucugcucauccuccucucccca

SEQ ID NO: 981634 - RNA, 20 nt, Human
uugguggaggccucugcccc

SEQ ID NO: 981635 - RNA, 24 nt, Human
uuuaaauaaccuuucagcaucuac

SEQ ID NO: 981636 - RNA, 24 nt, Human
uuucucuguuccucgaaggagaac

SEQ ID NO: 981637 - RNA, 25 nt, Human
uuucugagguuuuuauuuaaaugca

SEQ ID NO: 981638 - RNA, 25 nt, Human
uuucugagguuuuuauuuaaaugca

SEQ ID NO: 981639 - RNA, 24 nt, Human
caagcaauaaaaguggucuccucc

SEQ ID NO: 981640 - RNA, 19 nt, Human
ccauccacccagacaagca

SEQ ID NO: 981641 - RNA, 22 nt, Human
cccauccacccagacaagcaau

SEQ ID NO: 981642 - RNA, 21 nt, Human
ccccauccacccagacaagca

SEQ ID NO: 981643 - RNA, 27 nt, Human
cccucagccccuccugccccauccacc

SEQ ID NO: 981644 - RNA, 19 nt, Human
cccugugcaugcuucugcu

SEQ ID NO: 981645 - RNA, 18 nt, Human
ccuccugccccauccacc

SEQ ID NO: 981646 - RNA, 23 nt, Human
ccuccugccccauccacccagac

SEQ ID NO: 981647 - RNA, 25 nt, Human
ccuccugccccauccacccagacaa

SEQ ID NO: 981648 - RNA, 18 nt, Human
gcuuucagccccagccuc

SEQ ID NO: 981649 - RNA, 20 nt, Human
uucugcuuucagccccagcc

SEQ ID NO: 981650 - RNA, 19 nt, Human
aaaggaagaagagccaaag

SEQ ID NO: 981651 - RNA, 19 nt, Human
acagaaacaacccccagau

SEQ ID NO: 981652 - RNA, 21 nt, Human
acagaaacaacccccagauca

SEQ ID NO: 981653 - RNA, 21 nt, Human
acccacagaaacaacccccag

SEQ ID NO: 981654 - RNA, 22 nt, Human
agaaacaacccccagaucagcc

SEQ ID NO: 981655 - RNA, 18 nt, Human
agagccaaagggucagag

SEQ ID NO: 981656 - RNA, 24 nt, Human
agaguacaaaggaagaagagccaa

SEQ ID NO: 981657 - RNA, 23 nt, Human
aucccuuccuuuccuuuuuccua

SEQ ID NO: 981658 - RNA, 22 nt, Human
caacccccagaucagccagaga

SEQ ID NO: 981659 - RNA, 24 nt, Human
caacccccagaucagccagagaga

SEQ ID NO: 981660 - RNA, 19 nt, Human
cacagaaacaacccccaga

SEQ ID NO: 981661 - RNA, 23 nt, Human
cacccacagaaacaacccccaga

SEQ ID NO: 981662 - RNA, 26 nt, Human
cagugaauucuuucucauuucacugu

SEQ ID NO: 981663 - RNA, 19 nt, Human
caguuacccaucauguagg

SEQ ID NO: 981664 - RNA, 18 nt, Human
caucauguagggcagaau

SEQ ID NO: 981665 - RNA, 23 nt, Human
caucauguagggcagaauggagc

SEQ ID NO: 981666 - RNA, 19 nt, Human
ccacagaaacaacccccag

SEQ ID NO: 981667 - RNA, 20 nt, Human
ccagagagaugagguauggc

SEQ ID NO: 981668 - RNA, 19 nt, Human
ccagugaauucuuucucau

SEQ ID NO: 981669 - RNA, 21 nt, Human
ccagugaauucuuucucauuu

SEQ ID NO: 981670 - RNA, 18 nt, Human
cccuuccuuuccuuuuuc

SEQ ID NO: 981671 - RNA, 19 nt, Human
ccuagaucgaaccaggaga

SEQ ID NO: 981672 - RNA, 20 nt, Human
ccugugucaggcacugggcu

SEQ ID NO: 981673 - RNA, 18 nt, Human
cucugugccaagcaccug

SEQ ID NO: 981674 - RNA, 20 nt, Human
cucugugccaagcaccuguc

SEQ ID NO: 981675 - RNA, 20 nt, Human
cugagugcuuaaaggacuuu

SEQ ID NO: 981676 - RNA, 19 nt, Human
cuucucugugccaagcacc

SEQ ID NO: 981677 - RNA, 24 nt, Human
gagcaggugccagcugaagaguac

SEQ ID NO: 981678 - RNA, 18 nt, Human
gaucacaguuacccauca

SEQ ID NO: 981679 - RNA, 26 nt, Human
guuugauaaacucccagugaauucuu

SEQ ID NO: 981680 - RNA, 22 nt, Human
uacccaucauguagggcagaau

SEQ ID NO: 981681 - RNA, 24 nt, Human
ucccuuccuuuccuuuuuccuaga

SEQ ID NO: 981682 - RNA, 22 nt, Human
ucugugccaagcaccugucagg

SEQ ID NO: 981683 - RNA, 20 nt, Human
ugauggcuggcaucucccgu

SEQ ID NO: 981684 - RNA, 18 nt, Human
ugcacaguuccuguguca

SEQ ID NO: 981685 - RNA, 21 nt, Human
uucacuguuuacuuuuaaauc

SEQ ID NO: 981686 - RNA, 18 nt, Human
uugcuccuucucugugcc

SEQ ID NO: 981687 - RNA, 18 nt, Human
uuuuuuuuuuuuuuuuug

SEQ ID NO: 981688 - RNA, 24 nt, Human
uuuuuuuuuuuuuuuuuugacuuu

SEQ ID NO: 981689 - RNA, 22 nt, Human
acaaaaucaaauacacagaucc

SEQ ID NO: 981690 - RNA, 20 nt, Human
acacagauccagcagaucca

SEQ ID NO: 981691 - RNA, 19 nt, Human
acagagcacuuccaaguca

SEQ ID NO: 981692 - RNA, 25 nt, Human
acagauccagcagauccagauaugu

SEQ ID NO: 981693 - RNA, 25 nt, Human
accaaaaugcaagaacacauucuuu

SEQ ID NO: 981694 - RNA, 21 nt, Human
accacaggacacuaagccuca

SEQ ID NO: 981695 - RNA, 18 nt, Human
accuccuagaaacuggag

SEQ ID NO: 981696 - RNA, 20 nt, Human
agagcacuuccaagucauau

SEQ ID NO: 981697 - RNA, 20 nt, Human
agcagauccagauaugugaa

SEQ ID NO: 981698 - RNA, 23 nt, Human
agcagauccagauaugugaacca

SEQ ID NO: 981699 - RNA, 21 nt, Human
aggggcuuuauuuuguuuagu

SEQ ID NO: 981700 - RNA, 23 nt, Human
auauauacauaucuauacaacca

SEQ ID NO: 981701 - RNA, 25 nt, Human
caacagcaacacaaaauguacucaa

SEQ ID NO: 981702 - RNA, 21 nt, Human
caacauaucucuuaaguaggu

SEQ ID NO: 981703 - RNA, 20 nt, Human
caagaacacauucuuuagga

SEQ ID NO: 981704 - RNA, 22 nt, Human
cacagauccagcagauccagau

SEQ ID NO: 981705 - RNA, 21 nt, Human
cacaggacacuaagccucagg

SEQ ID NO: 981706 - RNA, 25 nt, Human
cacuucagccuugaaauguggaccc

SEQ ID NO: 981707 - RNA, 18 nt, Human
cagauccagcagauccag

SEQ ID NO: 981708 - RNA, 21 nt, Human
cauucuuuaggagaaaggcag

SEQ ID NO: 981709 - RNA, 18 nt, Human
gucacauuuaaaguacaa

SEQ ID NO: 981710 - RNA, 26 nt, Human
uaaaugcaaagaggggcuuuauuuug

SEQ ID NO: 981711 - RNA, 19 nt, Human
uaaccgaagaaacugccaa

SEQ ID NO: 981712 - RNA, 23 nt, Human
uaagccucagguaccuaaauauc

SEQ ID NO: 981713 - RNA, 24 nt, Human
uaaguuaaaacagcuucuuuguuc

SEQ ID NO: 981714 - RNA, 19 nt, Human
uacacagauccagcagauc

SEQ ID NO: 981715 - RNA, 20 nt, Human
uaggaauaauuaaccgaaga

SEQ ID NO: 981716 - RNA, 19 nt, Human
uaggaugucaucuaucuua

SEQ ID NO: 981717 - RNA, 21 nt, Human
uagguuauuucaaccaaaaug

SEQ ID NO: 981718 - RNA, 22 nt, Human
uaucgaauguaaauuauuuuca

SEQ ID NO: 981719 - RNA, 18 nt, Human
uaugugaaccauauauac

SEQ ID NO: 981720 - RNA, 24 nt, Human
ucaaauacacagauccagcagauc

SEQ ID NO: 981721 - RNA, 22 nt, Human
ucaaugaauucggugagggucc

SEQ ID NO: 981722 - RNA, 23 nt, Human
ucaucuaucuuacaugcagaccc

SEQ ID NO: 981723 - RNA, 22 nt, Human
uccuagaaacuggagaauuacc

SEQ ID NO: 981724 - RNA, 21 nt, Human
ucucaggggcuaccuaucgcu

SEQ ID NO: 981725 - RNA, 19 nt, Human
ugaaacgguagaaauaggu

SEQ ID NO: 981726 - RNA, 21 nt, Human
ugaaacgguagaaauagguac

SEQ ID NO: 981727 - RNA, 25 nt, Human
ugagggucccacacccucaaauccu

SEQ ID NO: 981728 - RNA, 25 nt, Human
ugcaagaacacauucuuuaggagaa

SEQ ID NO: 981729 - RNA, 23 nt, Human
ugcucccacaacugggaacacau

SEQ ID NO: 981730 - RNA, 20 nt, Human
ugugaaccauauauacauaa

SEQ ID NO: 981731 - RNA, 20 nt, Human
uuauauauacacuauacacu

SEQ ID NO: 981732 - RNA, 21 nt, Human
uugaaauguggacccaaaaaa

SEQ ID NO: 981733 - RNA, 23 nt, Human
uuuccuguggaguuauagugaua

SEQ ID NO: 981734 - RNA, 19 nt, Human
aaaaaaagacugugacaga

SEQ ID NO: 981735 - RNA, 22 nt, Human
aaaaaaggugucagaccucuga

SEQ ID NO: 981736 - RNA, 19 nt, Human
aaaaaggugucagaccucu

SEQ ID NO: 981737 - RNA, 19 nt, Human
aaacguuugcccugccucc

SEQ ID NO: 981738 - RNA, 23 nt, Human
aacaaacauuuaucaaaugccag

SEQ ID NO: 981739 - RNA, 19 nt, Human
aacacggugaaaccucauc

SEQ ID NO: 981740 - RNA, 20 nt, Human
aacacggugaaaccucaucu

SEQ ID NO: 981741 - RNA, 21 nt, Human
aacacggugaaaccucaucuc

SEQ ID NO: 981742 - RNA, 21 nt, Human
aacaucuaaauccucacaucu

SEQ ID NO: 981743 - RNA, 19 nt, Human
aacccugggggugggcuga

SEQ ID NO: 981744 - RNA, 25 nt, Human
aagauacuaauccucacaucauuug

SEQ ID NO: 981745 - RNA, 25 nt, Human
aagcaaaaaaggugucagaccucug

SEQ ID NO: 981746 - RNA, 22 nt, Human
aagcaaaugcaacaaaugaaau

SEQ ID NO: 981747 - RNA, 24 nt, Human
aaggaaagaaacaauugaaaauau

SEQ ID NO: 981748 - RNA, 19 nt, Human
aaggagcacgaagaacagg

SEQ ID NO: 981749 - RNA, 18 nt, Human
aaggaugaggagagaugg

SEQ ID NO: 981750 - RNA, 22 nt, Human
aaucaauuuuuaaggaaacaga

SEQ ID NO: 981751 - RNA, 18 nt, Human
aaucgcuugaaccuggga

SEQ ID NO: 981752 - RNA, 24 nt, Human
aaucgcuugaaccugggaggcaga

SEQ ID NO: 981753 - RNA, 24 nt, Human
acagagcaagacuccaucucaaaa

SEQ ID NO: 981754 - RNA, 18 nt, Human
accaaggcaugaagcaac

SEQ ID NO: 981755 - RNA, 19 nt, Human
accauugcacuccagccug

SEQ ID NO: 981756 - RNA, 24 nt, Human
accucaucucuacuaaaaaugcaa

SEQ ID NO: 981757 - RNA, 24 nt, Human
accucgagaggccugaggcaagga

SEQ ID NO: 981758 - RNA, 25 nt, Human
acgaagaacaggcacggagcccaag

SEQ ID NO: 981759 - RNA, 18 nt, Human
acggagcccaaggaaugc

SEQ ID NO: 981760 - RNA, 23 nt, Human
acuaaauacagagcuaggcccag

SEQ ID NO: 981761 - RNA, 18 nt, Human
acugccuaaucgccacuu

SEQ ID NO: 981762 - RNA, 20 nt, Human
agaccaggugaaucucaagg

SEQ ID NO: 981763 - RNA, 18 nt, Human
agagguugcagugagucg

SEQ ID NO: 981764 - RNA, 24 nt, Human
agagguugcagugagucgaaauug

SEQ ID NO: 981765 - RNA, 20 nt, Human
agaucacuugaggucaggaa

SEQ ID NO: 981766 - RNA, 22 nt, Human
agaucacuugaggucaggaguu

SEQ ID NO: 981767 - RNA, 22 nt, Human
agccggaagacggggaggucug

SEQ ID NO: 981768 - RNA, 24 nt, Human
agccuaugacauaauuccagacca

SEQ ID NO: 981769 - RNA, 23 nt, Human
agccuggccaacacggugaaacc

SEQ ID NO: 981770 - RNA, 24 nt, Human
agccugggugacagagcaagacuc

SEQ ID NO: 981771 - RNA, 20 nt, Human
aggaaagaaacaauugaaaa

SEQ ID NO: 981772 - RNA, 22 nt, Human
aggaguuuugagaccagccugg

SEQ ID NO: 981773 - RNA, 19 nt, Human
aggcagagguugcagugag

SEQ ID NO: 981774 - RNA, 22 nt, Human
aggcagagguugcagugagucg

SEQ ID NO: 981775 - RNA, 22 nt, Human
aggcaggagaaucgcuugaacc

SEQ ID NO: 981776 - RNA, 24 nt, Human
aggcaggagaaucgcuugaaccug

SEQ ID NO: 981777 - RNA, 25 nt, Human
aggcgccaaucacaggguccugagg

SEQ ID NO: 981778 - RNA, 22 nt, Human
aggcgggcagaucacuugaggu

SEQ ID NO: 981779 - RNA, 23 nt, Human
aggcgggcagaucacuugagguc

SEQ ID NO: 981780 - RNA, 26 nt, Human
aggcgggcagaucacuugaggucagg

SEQ ID NO: 981781 - RNA, 24 nt, Human
aggugcaguggcucacgccuguaa

SEQ ID NO: 981782 - RNA, 24 nt, Human
aguggcucacgccuguaaucccag

SEQ ID NO: 981783 - RNA, 23 nt, Human
auaguuaagacaacaauugggga

SEQ ID NO: 981784 - RNA, 22 nt, Human
aucuaaauccucacaucucuac

SEQ ID NO: 981785 - RNA, 24 nt, Human
augucucuucaaguucaacaaaca

SEQ ID NO: 981786 - RNA, 19 nt, Human
auuccuugcacaggaccua

SEQ ID NO: 981787 - RNA, 24 nt, Human
auugcaccauugcacuccagccug

SEQ ID NO: 981788 - RNA, 21 nt, Human
auugcacuccagccuggguga

SEQ ID NO: 981789 - RNA, 24 nt, Human
auugcacuccagccugggugacag

SEQ ID NO: 981790 - RNA, 27 nt, Human
caaaugcaacaaaugaaauaugcacaa

SEQ ID NO: 981791 - RNA, 18 nt, Human
cacaaggcuguccuugga

SEQ ID NO: 981792 - RNA, 24 nt, Human
cacgccuguaaucccagcacuuug

SEQ ID NO: 981793 - RNA, 22 nt, Human
cacuccagccugggugacagag

SEQ ID NO: 981794 - RNA, 23 nt, Human
cacuccagccugggugacagagc

SEQ ID NO: 981795 - RNA, 20 nt, Human
cacuugaggucaggaguuuu

SEQ ID NO: 981796 - RNA, 24 nt, Human
cagaucacuugaggucaggaguuu

SEQ ID NO: 981797 - RNA, 22 nt, Human
cagcacuuugggagcccgaggc

SEQ ID NO: 981798 - RNA, 24 nt, Human
cagcacuuugggagcccgaggcgg

SEQ ID NO: 981799 - RNA, 18 nt, Human
caggcacggagcccaagg

SEQ ID NO: 981800 - RNA, 24 nt, Human
caggcacggagcccaaggaaugcc

SEQ ID NO: 981801 - RNA, 22 nt, Human
caucagaaaaucaaacuucagc

SEQ ID NO: 981802 - RNA, 19 nt, Human
cauccaucaccaaggcaug

SEQ ID NO: 981803 - RNA, 19 nt, Human
cauugcacuccagccuggg

SEQ ID NO: 981804 - RNA, 21 nt, Human
cauugcacuccagccugggug

SEQ ID NO: 981805 - RNA, 22 nt, Human
cauugcacuccagccuggguga

SEQ ID NO: 981806 - RNA, 20 nt, Human
cauuuaucaaaugccaggca

SEQ ID NO: 981807 - RNA, 19 nt, Human
cauuucauacauaacagcc

SEQ ID NO: 981808 - RNA, 20 nt, Human
ccagaccaggugaaucucaa

SEQ ID NO: 981809 - RNA, 20 nt, Human
ccauugcacuccagccuggg

SEQ ID NO: 981810 - RNA, 21 nt, Human
ccauugcacuccagccugggu

SEQ ID NO: 981811 - RNA, 21 nt, Human
ccauugcacuccagccugggu

SEQ ID NO: 981812 - RNA, 22 nt, Human
ccauugcacuccagccugggug

SEQ ID NO: 981813 - RNA, 23 nt, Human
ccauugcacuccagccuggguga

SEQ ID NO: 981814 - RNA, 23 nt, Human
ccauugcacuccagccuggguga

SEQ ID NO: 981815 - RNA, 24 nt, Human
ccauugcacuccagccugggugac

SEQ ID NO: 981816 - RNA, 25 nt, Human
ccauugcacuccagccugggugaca

SEQ ID NO: 981817 - RNA, 26 nt, Human
ccauugcacuccagccugggugacag

SEQ ID NO: 981818 - RNA, 21 nt, Human
ccgagacaaggagguaccaca

SEQ ID NO: 981819 - RNA, 22 nt, Human
ccucggucacgguccgccggcg

SEQ ID NO: 981820 - RNA, 24 nt, Human
ccuggccaacacggugaaaccuca

SEQ ID NO: 981821 - RNA, 25 nt, Human
ccugggaggcagagguugcagugag

SEQ ID NO: 981822 - RNA, 22 nt, Human
ccugggugacagagcaagacuc

SEQ ID NO: 981823 - RNA, 23 nt, Human
cgaaaggagcacgaagaacaggc

SEQ ID NO: 981824 - RNA, 20 nt, Human
cgagcagaaauaacaaaggc

SEQ ID NO: 981825 - RNA, 24 nt, Human
cgaggcgggcagaucacuugaggu

SEQ ID NO: 981826 - RNA, 26 nt, Human
cgaggcgggcagaucacuugagguca

SEQ ID NO: 981827 - RNA, 23 nt, Human
cgccuguaaucccagcacuuugg

SEQ ID NO: 981828 - RNA, 24 nt, Human
cgccuguaaucccagcacuuuggg

SEQ ID NO: 981829 - RNA, 18 nt, Human
cggaagacggggaggucu

SEQ ID NO: 981830 - RNA, 24 nt, Human
cgggcagaucacuugaggucagga

SEQ ID NO: 981831 - RNA, 22 nt, Human
cucacgccuguaaucccagcac

SEQ ID NO: 981832 - RNA, 24 nt, Human
cucacgccuguaaucccagcacuu

SEQ ID NO: 981833 - RNA, 22 nt, Human
cugcaacagaggccaggugcag

SEQ ID NO: 981834 - RNA, 23 nt, Human
cuggccaacacggugaaaccuca

SEQ ID NO: 981835 - RNA, 22 nt, Human
gaaagaaacaauugaaaauaug

SEQ ID NO: 981836 - RNA, 20 nt, Human
gaaauaacaaaggcaaaagg

SEQ ID NO: 981837 - RNA, 22 nt, Human
gaacuaaauucccauacggcca

SEQ ID NO: 981838 - RNA, 19 nt, Human
gaagaacaggcacggagcc

SEQ ID NO: 981839 - RNA, 23 nt, Human
gaagaacaggcacggagcccaag

SEQ ID NO: 981840 - RNA, 23 nt, Human
gagaaucgcuugaaccugggagg

SEQ ID NO: 981841 - RNA, 22 nt, Human
gaucacuugaggucaggaguuu

SEQ ID NO: 981842 - RNA, 24 nt, Human
gaucacuugaggucaggaguuuug

SEQ ID NO: 981843 - RNA, 25 nt, Human
gaucacuugaggucaggaguuuuga

SEQ ID NO: 981844 - RNA, 18 nt, Human
gcaaacagcuucacuucu

SEQ ID NO: 981845 - RNA, 24 nt, Human
gcacuccagccugggugacagagc

SEQ ID NO: 981846 - RNA, 22 nt, Human
gcacuuugggagcccgaggcgg

SEQ ID NO: 981847 - RNA, 23 nt, Human
gcagaucacuugaggucaggagu

SEQ ID NO: 981848 - RNA, 21 nt, Human
gcauuaaaggaguggucuaaa

SEQ ID NO: 981849 - RNA, 19 nt, Human
gccacuuucauuauaaaca

SEQ ID NO: 981850 - RNA, 18 nt, Human
gcccaguuuguauuguac

SEQ ID NO: 981851 - RNA, 21 nt, Human
gcccugccuccacauuuuaca

SEQ ID NO: 981852 - RNA, 19 nt, Human
gcuccaaaaggguaaggaa

SEQ ID NO: 981853 - RNA, 21 nt, Human
gcuccaaaaggguaaggaaga

SEQ ID NO: 981854 - RNA, 20 nt, Human
ggacagugcuuuggucugau

SEQ ID NO: 981855 - RNA, 21 nt, Human
ggaccuagcaaauaauuggua

SEQ ID NO: 981856 - RNA, 23 nt, Human
ggagaacauucgcaaaacucaag

SEQ ID NO: 981857 - RNA, 25 nt, Human
ggcagaucacuugaggucaggaguu

SEQ ID NO: 981858 - RNA, 20 nt, Human
gggaaccacuggucucaaaa

SEQ ID NO: 981859 - RNA, 24 nt, Human
gguggcaugugcguguaaucccag

SEQ ID NO: 981860 - RNA, 19 nt, Human
gucagaccucugaucuuau

SEQ ID NO: 981861 - RNA, 23 nt, Human
guccguggauuugggucagaggc

SEQ ID NO: 981862 - RNA, 20 nt, Human
guggaaaacuauaaaaacug

SEQ ID NO: 981863 - RNA, 20 nt, Human
guguuuagcuauuuccuguu

SEQ ID NO: 981864 - RNA, 21 nt, Human
uaacaugucuagucauaguua

SEQ ID NO: 981865 - RNA, 23 nt, Human
uaaccuaugaacucagaaacccu

SEQ ID NO: 981866 - RNA, 19 nt, Human
uaagaacaggagucaaauc

SEQ ID NO: 981867 - RNA, 21 nt, Human
uaagacugcaacagaggccag

SEQ ID NO: 981868 - RNA, 20 nt, Human
uacaguaucuuaaaacagua

SEQ ID NO: 981869 - RNA, 22 nt, Human
uagcugggugugguggcaugug

SEQ ID NO: 981870 - RNA, 18 nt, Human
uauguuuuaaaggcugcc

SEQ ID NO: 981871 - RNA, 22 nt, Human
uauuaguaauggguucccaaug

SEQ ID NO: 981872 - RNA, 21 nt, Human
uauuuuggucugcauuaaagg

SEQ ID NO: 981873 - RNA, 18 nt, Human
ucacaucauuugccuucu

SEQ ID NO: 981874 - RNA, 23 nt, Human
ucaggacaugauguaaaguugaa

SEQ ID NO: 981875 - RNA, 19 nt, Human
ucagguggcugaggcagga

SEQ ID NO: 981876 - RNA, 24 nt, Human
uccagccugggugacagagcaaga

SEQ ID NO: 981877 - RNA, 21 nt, Human
uccaucaccaaggcaugaagc

SEQ ID NO: 981878 - RNA, 18 nt, Human
ucccaaugaccugagcca

SEQ ID NO: 981879 - RNA, 25 nt, Human
ucccauacggccacuuuauggaaac

SEQ ID NO: 981880 - RNA, 25 nt, Human
uccgagcagaaauaacaaaggcaaa

SEQ ID NO: 981881 - RNA, 27 nt, Human
uccgagcagaaauaacaaagggaguuc

SEQ ID NO: 981882 - RNA, 18 nt, Human
ucgcuugaaccugggagg

SEQ ID NO: 981883 - RNA, 23 nt, Human
ucuagagaagaaaauaaauggau

SEQ ID NO: 981884 - RNA, 19 nt, Human
ucucaaaaauaaauaaaua

SEQ ID NO: 981885 - RNA, 21 nt, Human
ucucuacuaaaaaugcaaaaa

SEQ ID NO: 981886 - RNA, 22 nt, Human
ucugaucuuauaaauaagacac

SEQ ID NO: 981887 - RNA, 25 nt, Human
ucuggaauuaggaaaaaccgggguc

SEQ ID NO: 981888 - RNA, 19 nt, Human
ugaaaccucaucucuacua

SEQ ID NO: 981889 - RNA, 24 nt, Human
ugaaccugggaggcagagguugca

SEQ ID NO: 981890 - RNA, 22 nt, Human
ugaaggguggcuugguugugga

SEQ ID NO: 981891 - RNA, 23 nt, Human
ugaaucucaagauacuaauccuc

SEQ ID NO: 981892 - RNA, 22 nt, Human
ugaaugcuuuaucuuccuuaca

SEQ ID NO: 981893 - RNA, 21 nt, Human
ugacagaaaggguuuagagaa

SEQ ID NO: 981894 - RNA, 20 nt, Human
ugaccaagcaaaugcaacaa

SEQ ID NO: 981895 - RNA, 23 nt, Human
ugagaccagccuggccaacacgg

SEQ ID NO: 981896 - RNA, 24 nt, Human
ugagaccagccuggccaacacggu

SEQ ID NO: 981897 - RNA, 24 nt, Human
ugaggcaggagaaucgcuugaacc

SEQ ID NO: 981898 - RNA, 25 nt, Human
ugaggcaggagaaucgcuugaaccu

SEQ ID NO: 981899 - RNA, 24 nt, Human
ugagucaguacuccaacuuagugg

SEQ ID NO: 981900 - RNA, 18 nt, Human
ugauggaugaguaaccac

SEQ ID NO: 981901 - RNA, 31 nt, Human
ugcaacagaggccaggugcaguggcucacgg

SEQ ID NO: 981902 - RNA, 21 nt, Human
ugcaccauugcacuccagccu

SEQ ID NO: 981903 - RNA, 22 nt, Human
ugcacuccagccugggugacag

SEQ ID NO: 981904 - RNA, 24 nt, Human
ugcacuccagccugggugacagag

SEQ ID NO: 981905 - RNA, 25 nt, Human
ugcaucagaaaaucaaacuucagca

SEQ ID NO: 981906 - RNA, 22 nt, Human
ugcccaagucccuccagggguu

SEQ ID NO: 981907 - RNA, 20 nt, Human
ugcccgaaaggagcacgaag

SEQ ID NO: 981908 - RNA, 24 nt, Human
ugcguguaaucccagcuacucagg

SEQ ID NO: 981909 - RNA, 23 nt, Human
ugcuaaagaguuacaauuggcaa

SEQ ID NO: 981910 - RNA, 19 nt, Human
uggaaaacuauaaaaacug

SEQ ID NO: 981911 - RNA, 24 nt, Human
uggaugcaaaaguaaaaugcaacc

SEQ ID NO: 981912 - RNA, 22 nt, Human
uggcaugugcguguaaucccag

SEQ ID NO: 981913 - RNA, 22 nt, Human
uggcucacgccuguaaucccag

SEQ ID NO: 981914 - RNA, 24 nt, Human
uggcucacgccuguaaucccagca

SEQ ID NO: 981915 - RNA, 24 nt, Human
uggcugaggcaggagaaucgcuug

SEQ ID NO: 981916 - RNA, 24 nt, Human
ugggagcccgaggcgggcagauca

SEQ ID NO: 981917 - RNA, 24 nt, Human
ugggaggcagagguugcagugagu

SEQ ID NO: 981918 - RNA, 18 nt, Human
ugggugugguggcaugug

SEQ ID NO: 981919 - RNA, 24 nt, Human
ugguggcaugugcguguaauccca

SEQ ID NO: 981920 - RNA, 21 nt, Human
uguaaucccagcuacucaggu

SEQ ID NO: 981921 - RNA, 22 nt, Human
uguuuggugacguccaguuccu

SEQ ID NO: 981922 - RNA, 19 nt, Human
uuaauggacugcuguccuc

SEQ ID NO: 981923 - RNA, 19 nt, Human
uuagcugggugugguggca

SEQ ID NO: 981924 - RNA, 20 nt, Human
uuagcugggugugguggcau

SEQ ID NO: 981925 - RNA, 24 nt, Human
uuagcugggugugguggcaugugc

SEQ ID NO: 981926 - RNA, 22 nt, Human
uuagguauuaguaauggguucc

SEQ ID NO: 981927 - RNA, 19 nt, Human
uucaggacaugauguaaag

SEQ ID NO: 981928 - RNA, 22 nt, Human
uuccuuaugcuucaagcuccaa

SEQ ID NO: 981929 - RNA, 19 nt, Human
uucuccuguucaacagagg

SEQ ID NO: 981930 - RNA, 24 nt, Human
uugaaccugggaggcagagguugc

SEQ ID NO: 981931 - RNA, 23 nt, Human
uugcaccauugcacuccagccug

SEQ ID NO: 981932 - RNA, 22 nt, Human
uugcagugagucgaaauugcac

SEQ ID NO: 981933 - RNA, 19 nt, Human
uuucgcaaaguccguggau

SEQ ID NO: 981934 - RNA, 20 nt, Human
accucagcacccugagggcc

SEQ ID NO: 981935 - RNA, 18 nt, Human
agagacacaaccaccaug

SEQ ID NO: 981936 - RNA, 22 nt, Human
agcacccugagggccugaacuc

SEQ ID NO: 981937 - RNA, 20 nt, Human
auaaagagacacaaccacca

SEQ ID NO: 981938 - RNA, 19 nt, Human
caacggagcugcaauccua

SEQ ID NO: 981939 - RNA, 24 nt, Human
caacggagcugcaauccuaacccg

SEQ ID NO: 981940 - RNA, 20 nt, Human
cacaguauauaggccucuag

SEQ ID NO: 981941 - RNA, 18 nt, Human
cagaucacaucaaaaguu

SEQ ID NO: 981942 - RNA, 19 nt, Human
cagcaaaauaaucaagugc

SEQ ID NO: 981943 - RNA, 18 nt, Human
cagcacccugagggccug

SEQ ID NO: 981944 - RNA, 23 nt, Human
caggcauaaagagacacaaccac

SEQ ID NO: 981945 - RNA, 18 nt, Human
cauacaagcuaucacagu

SEQ ID NO: 981946 - RNA, 21 nt, Human
caucaaaaguuguuuuucccc

SEQ ID NO: 981947 - RNA, 28 nt, Human
ccgaccaucgaccuaguuuccccccaaa

SEQ ID NO: 981948 - RNA, 20 nt, Human
gcagguaaaucaaggaagaa

SEQ ID NO: 981949 - RNA, 25 nt, Human
gccucuagcucuaaauaauagaguu

SEQ ID NO: 981950 - RNA, 20 nt, Human
ggaaaaccucagcacccuga

SEQ ID NO: 981951 - RNA, 22 nt, Human
ggguggucgccgggggucgagg

SEQ ID NO: 981952 - RNA, 18 nt, Human
guaaauuuucuucagacu

SEQ ID NO: 981953 - RNA, 21 nt, Human
gucgccggggguucgggagcg

SEQ ID NO: 981954 - RNA, 23 nt, Human
gucuccgguguguuauucccgau

SEQ ID NO: 981955 - RNA, 21 nt, Human
guggucgccggggguucggga

SEQ ID NO: 981956 - RNA, 18 nt, Human
uaaaauaaccucaaaggc

SEQ ID NO: 981957 - RNA, 24 nt, Human
uagcucuaaauaauagaguuccuu

SEQ ID NO: 981958 - RNA, 18 nt, Human
ucaaaggcaauccucagc

SEQ ID NO: 981959 - RNA, 24 nt, Human
ucagcacccugagggccugaacuc

SEQ ID NO: 981960 - RNA, 23 nt, Human
uccagauuuguaaauuuucuuca

SEQ ID NO: 981961 - RNA, 22 nt, Human
ucccacaaaggaaaaccucagc

SEQ ID NO: 981962 - RNA, 21 nt, Human
ucugucacugcaaaaagggau

SEQ ID NO: 981963 - RNA, 24 nt, Human
ucuucugucacugcaaaaagggau

SEQ ID NO: 981964 - RNA, 24 nt, Human
ugauuaaaaaacaaaucagaucac

SEQ ID NO: 981965 - RNA, 22 nt, Human
ugcuguacaacucaaaacuuuu

SEQ ID NO: 981966 - RNA, 24 nt, Human
uucacaaugcagcaaaauaaucaa

SEQ ID NO: 981967 - RNA, 18 nt, Human
uuccccccaaaagucucc

SEQ ID NO: 981968 - RNA, 24 nt, Human
uucucccacaaaggaaaaccucag

SEQ ID NO: 981969 - RNA, 21 nt, Human
uuguuuuuccccauacaagcu

SEQ ID NO: 981970 - RNA, 18 nt, Human
aaaaguucugcuuauaag

SEQ ID NO: 981971 - RNA, 26 nt, Human
aaacaacauaggcaauacuuuugcac

SEQ ID NO: 981972 - RNA, 19 nt, Human
aaacagaaauccagcagag

SEQ ID NO: 981973 - RNA, 20 nt, Human
aaagccuuuugguauucacc

SEQ ID NO: 981974 - RNA, 21 nt, Human
aacaguacaauuaggacaauu

SEQ ID NO: 981975 - RNA, 23 nt, Human
aacugccccucaaugcacuugau

SEQ ID NO: 981976 - RNA, 30 nt, Human
aagcauuuaaauuuagaaugcuaaaaacag

SEQ ID NO: 981977 - RNA, 22 nt, Human
aaucuguacagaauuucacugu

SEQ ID NO: 981978 - RNA, 20 nt, Human
acaaagaaguacuccuuuca

SEQ ID NO: 981979 - RNA, 24 nt, Human
accuaugguuuuuggcuaccacag

SEQ ID NO: 981980 - RNA, 19 nt, Human
agaggaaauguacuguaac

SEQ ID NO: 981981 - RNA, 18 nt, Human
aggaaauguacuguaacc

SEQ ID NO: 981982 - RNA, 21 nt, Human
auccuuaacauuguuuucugg

SEQ ID NO: 981983 - RNA, 21 nt, Human
aucuguaccaaaugccucuuc

SEQ ID NO: 981984 - RNA, 24 nt, Human
augguggcuugccuucuuucuucu

SEQ ID NO: 981985 - RNA, 23 nt, Human
caaaucagaaaacaguacaauua

SEQ ID NO: 981986 - RNA, 18 nt, Human
caaucgccuuccccagca

SEQ ID NO: 981987 - RNA, 24 nt, Human
caggcaaacaaaacugccccucaa

SEQ ID NO: 981988 - RNA, 25 nt, Human
cagguuagaguaauauauaaaacag

SEQ ID NO: 981989 - RNA, 23 nt, Human
ccaacuaacagcgcauaaauaaa

SEQ ID NO: 981990 - RNA, 26 nt, Human
ccaaucgccuuccccagcaguucccc

SEQ ID NO: 981991 - RNA, 25 nt, Human
ccaucugaagauauucuuguauugc

SEQ ID NO: 981992 - RNA, 19 nt, Human
ccccagcaguucccccacc

SEQ ID NO: 981993 - RNA, 24 nt, Human
ccuuccccagcaguucccccacca

SEQ ID NO: 981994 - RNA, 26 nt, Human
cucagcaguucuaguuaaugcagugg

SEQ ID NO: 981995 - RNA, 18 nt, Human
cuuuugguauucacccau

SEQ ID NO: 981996 - RNA, 21 nt, Human
gaaaaaacuaaacaaacugcg

SEQ ID NO: 981997 - RNA, 20 nt, Human
gaaauaaucgauucaaaagc

SEQ ID NO: 981998 - RNA, 22 nt, Human
gaacaccucaaugucagaaaua

SEQ ID NO: 981999 - RNA, 18 nt, Human
gacaaaauacaguggcau

SEQ ID NO: 982000 - RNA, 19 nt, Human
gaugccaaucgccuucccc

SEQ ID NO: 982001 - RNA, 23 nt, Human
gauuucugacuaaaaacugaaag

SEQ ID NO: 982002 - RNA, 20 nt, Human
gcaaacaaaacugccccuca

SEQ ID NO: 982003 - RNA, 18 nt, Human
ggccucggaagggaugga

SEQ ID NO: 982004 - RNA, 22 nt, Human
uaaauacaaaucagaaaacagu

SEQ ID NO: 982005 - RNA, 24 nt, Human
uaaauguaagagaauucauaucug

SEQ ID NO: 982006 - RNA, 24 nt, Human
uaaccugaagacugcuugcaaaga

SEQ ID NO: 982007 - RNA, 24 nt, Human
uaagaaaaaacuaaacaaacugcg

SEQ ID NO: 982008 - RNA, 23 nt, Human
uaagaaaaacuguagcuuaucau

SEQ ID NO: 982009 - RNA, 20 nt, Human
uacaaaucagaaaacaguac

SEQ ID NO: 982010 - RNA, 18 nt, Human
uacaguggcauuacugga

SEQ ID NO: 982011 - RNA, 22 nt, Human
uaccucaagaacugagagacga

SEQ ID NO: 982012 - RNA, 19 nt, Human
uagaaaaugacuucaccac

SEQ ID NO: 982013 - RNA, 19 nt, Human
uagaaaaugacuucaccac

SEQ ID NO: 982014 - RNA, 22 nt, Human
uagaucccuauucccacacucu

SEQ ID NO: 982015 - RNA, 24 nt, Human
uaucccaucuaauuuacauacaga

SEQ ID NO: 982016 - RNA, 21 nt, Human
uauucccacacucuaauaagc

SEQ ID NO: 982017 - RNA, 19 nt, Human
uccccagcaguucccccac

SEQ ID NO: 982018 - RNA, 19 nt, Human
ucgaugccaaucgccuucc

SEQ ID NO: 982019 - RNA, 21 nt, Human
ucgaugccaaucgccuucccc

SEQ ID NO: 982020 - RNA, 22 nt, Human
ucuagcugccuaagccucgcaa

SEQ ID NO: 982021 - RNA, 22 nt, Human
ucuccacaauuacaauauuuaa

SEQ ID NO: 982022 - RNA, 24 nt, Human
ucugcaaacauacuacaauaagcu

SEQ ID NO: 982023 - RNA, 23 nt, Human
ugaaauaaucgauucaaaagcca

SEQ ID NO: 982024 - RNA, 20 nt, Human
ugacaauagauagauacaca

SEQ ID NO: 982025 - RNA, 21 nt, Human
ugagacugguuaccuucuggc

SEQ ID NO: 982026 - RNA, 24 nt, Human
ugcaaagacagauagauaaaacaa

SEQ ID NO: 982027 - RNA, 25 nt, Human
ugcaaagacagauagauaaaacaau

SEQ ID NO: 982028 - RNA, 23 nt, Human
ugcgcaauuauaaaaucagcacc

SEQ ID NO: 982029 - RNA, 22 nt, Human
uggcuugccuucuuuuggaagc

SEQ ID NO: 982030 - RNA, 18 nt, Human
uggggcgggggagaagca

SEQ ID NO: 982031 - RNA, 25 nt, Human
ugguaagcauaagcaugucauauuc

SEQ ID NO: 982032 - RNA, 24 nt, Human
uuuggagacaaaauacaguggcau

SEQ ID NO: 982033 - RNA, 26 nt, Human
uuuuauuuggagacaaaauacagugg

SEQ ID NO: 982034 - RNA, 22 nt, Human
uuuuuuuuuuuuaaaaaaaagc

SEQ ID NO: 982035 - RNA, 25 nt, Human
aaacaaugcccaacucuuuccccuc

SEQ ID NO: 982036 - RNA, 24 nt, Human
acuccaaacagaacaggaaaaagg

SEQ ID NO: 982037 - RNA, 21 nt, Human
agaacaggaaaaaggcaaggg

SEQ ID NO: 982038 - RNA, 20 nt, Human
agccucguguggccucaagc

SEQ ID NO: 982039 - RNA, 23 nt, Human
agcgcaaucccaacggcucgccc

SEQ ID NO: 982040 - RNA, 21 nt, Human
agguagggaguggagcugggg

SEQ ID NO: 982041 - RNA, 21 nt, Human
agguuagguuagaaaaacaau

SEQ ID NO: 982042 - RNA, 21 nt, Human
agguuuggaagugugcgagcu

SEQ ID NO: 982043 - RNA, 19 nt, Human
cagaagacacgcugugcgc

SEQ ID NO: 982044 - RNA, 21 nt, Human
ccagggcugaagccuggggga

SEQ ID NO: 982045 - RNA, 24 nt, Human
cgagguuuggaagugugcgagcug

SEQ ID NO: 982046 - RNA, 18 nt, Human
cguuugagucacgccgcu

SEQ ID NO: 982047 - RNA, 18 nt, Human
gacagggucucucggcuu

SEQ ID NO: 982048 - RNA, 27 nt, Human
gagguagggaguggagcuggggagggg

SEQ ID NO: 982049 - RNA, 21 nt, Human
ggaguggagcuggggaggggc

SEQ ID NO: 982050 - RNA, 18 nt, Human
gggaguggagcuggggag

SEQ ID NO: 982051 - RNA, 21 nt, Human
gggcuugggcacgcgggcggc

SEQ ID NO: 982052 - RNA, 19 nt, Human
gguagggaguggagcuggg

SEQ ID NO: 982053 - RNA, 23 nt, Human
gguagggaguggagcuggggagg

SEQ ID NO: 982054 - RNA, 21 nt, Human
uaggcugagaaagauguucca

SEQ ID NO: 982055 - RNA, 20 nt, Human
uagggaguggagcuggggag

SEQ ID NO: 982056 - RNA, 20 nt, Human
ucacauucuugagguaggga

SEQ ID NO: 982057 - RNA, 18 nt, Human
uccaaacagaacaggaaa

SEQ ID NO: 982058 - RNA, 26 nt, Human
uccaaacagaacaggaaaaaggcaag

SEQ ID NO: 982059 - RNA, 19 nt, Human
ucccaacggcucgcccagg

SEQ ID NO: 982060 - RNA, 23 nt, Human
uccugcccucucacgugggcuug

SEQ ID NO: 982061 - RNA, 20 nt, Human
ucuccacuccaaacagaaca

SEQ ID NO: 982062 - RNA, 21 nt, Human
ucuccacuccaaacagaacag

SEQ ID NO: 982063 - RNA, 22 nt, Human
ugagcgaaucauuaggacacaa

SEQ ID NO: 982064 - RNA, 19 nt, Human
ugagguagggaguggagcu

SEQ ID NO: 982065 - RNA, 21 nt, Human
ugcugcccuucuccacuccaa

SEQ ID NO: 982066 - RNA, 19 nt, Human
uggagcuggggaggggccc

SEQ ID NO: 982067 - RNA, 19 nt, Human
uggggaggggcccagaguc

SEQ ID NO: 982068 - RNA, 21 nt, Human
uuggaagugugcgagcugaug

SEQ ID NO: 982069 - RNA, 21 nt, Human
uuuuccaaauggucacauucu

SEQ ID NO: 982070 - RNA, 28 nt, Human
aaaaaaaaaccuuuuauggccuuguaga

SEQ ID NO: 982071 - RNA, 19 nt, Human
aaaaaaccuuuuauggccu

SEQ ID NO: 982072 - RNA, 24 nt, Human
aaaaacaaauggaccauaucuuca

SEQ ID NO: 982073 - RNA, 23 nt, Human
aaacaacacaccacuaaaaacac

SEQ ID NO: 982074 - RNA, 21 nt, Human
aaacacacuuaucauccaugc

SEQ ID NO: 982075 - RNA, 20 nt, Human
aagacaaugacauaaacuga

SEQ ID NO: 982076 - RNA, 23 nt, Human
aaggauaugcagcaucucugcac

SEQ ID NO: 982077 - RNA, 22 nt, Human
acaauacugcaaacacaaccgc

SEQ ID NO: 982078 - RNA, 24 nt, Human
accacauugcaggaagaaaaacaa

SEQ ID NO: 982079 - RNA, 21 nt, Human
accugcuauuauuccacaggc

SEQ ID NO: 982080 - RNA, 18 nt, Human
acugcacuccagccuggg

SEQ ID NO: 982081 - RNA, 18 nt, Human
acugcacuccagccuggg

SEQ ID NO: 982082 - RNA, 18 nt, Human
acugcacuccagccuggg

SEQ ID NO: 982083 - RNA, 19 nt, Human
acugcacuccagccugggu

SEQ ID NO: 982084 - RNA, 21 nt, Human
acugcacuccagccuggguga

SEQ ID NO: 982085 - RNA, 22 nt, Human
acugcacuccagccugggugac

SEQ ID NO: 982086 - RNA, 23 nt, Human
acugcacuccagccugggugaca

SEQ ID NO: 982087 - RNA, 24 nt, Human
acugcacuccagccugggugacag

SEQ ID NO: 982088 - RNA, 26 nt, Human
acugcacuccagccugggugacagag

SEQ ID NO: 982089 - RNA, 20 nt, Human
agaaaacaaucccuacuggu

SEQ ID NO: 982090 - RNA, 26 nt, Human
agagcagcuuuggauuuuuuuuaaau

SEQ ID NO: 982091 - RNA, 24 nt, Human
agcagcuuuggauuuuuuuuaaau

SEQ ID NO: 982092 - RNA, 20 nt, Human
agccugggugacagagcgag

SEQ ID NO: 982093 - RNA, 21 nt, Human
aggaagaaaaacaaauggacc

SEQ ID NO: 982094 - RNA, 20 nt, Human
agugagagcaaaagugacaa

SEQ ID NO: 982095 - RNA, 19 nt, Human
auacugcaaacacaaccgc

SEQ ID NO: 982096 - RNA, 22 nt, Human
auacugcuaauuuuuccacuua

SEQ ID NO: 982097 - RNA, 24 nt, Human
aucaugcuacugcacuccagccug

SEQ ID NO: 982098 - RNA, 21 nt, Human
aucccuacugguuuacuacca

SEQ ID NO: 982099 - RNA, 18 nt, Human
aucgagagcagcuuugga

SEQ ID NO: 982100 - RNA, 21 nt, Human
augggcguccucccaaggccu

SEQ ID NO: 982101 - RNA, 23 nt, Human
auuauuauucaacauaacaguga

SEQ ID NO: 982102 - RNA, 18 nt, Human
auucacacgcaaucccau

SEQ ID NO: 982103 - RNA, 21 nt, Human
caaacucacucugucgaucau

SEQ ID NO: 982104 - RNA, 23 nt, Human
caaauggaccauaucuucauuag

SEQ ID NO: 982105 - RNA, 24 nt, Human
caaccgcaauuuaaggagccaaaa

SEQ ID NO: 982106 - RNA, 24 nt, Human
caacgguacuugaaucaccucuuu

SEQ ID NO: 982107 - RNA, 26 nt, Human
cacaccacauugcaggaagaaaaaca

SEQ ID NO: 982108 - RNA, 27 nt, Human
cacaccacauugcaggaagaaaaacaa

SEQ ID NO: 982109 - RNA, 23 nt, Human
caccacauugcaggaagaaaaac

SEQ ID NO: 982110 - RNA, 25 nt, Human
caccacauugcaggaagaaaaacaa

SEQ ID NO: 982111 - RNA, 24 nt, Human
caccgcaccugcccggcucuugcc

SEQ ID NO: 982112 - RNA, 22 nt, Human
cacuccagccugggugacagag

SEQ ID NO: 982113 - RNA, 24 nt, Human
cacuccagccugggugacagagcg

SEQ ID NO: 982114 - RNA, 19 nt, Human
cagaaaacauuuuuguucc

SEQ ID NO: 982115 - RNA, 19 nt, Human
caggcggccgcuacggcca

SEQ ID NO: 982116 - RNA, 18 nt, Human
cauguaggaaagaaaaug

SEQ ID NO: 982117 - RNA, 23 nt, Human
ccaaaaagaaauaugcuggcaac

SEQ ID NO: 982118 - RNA, 23 nt, Human
ccaaacucucacaguuauauaga

SEQ ID NO: 982119 - RNA, 22 nt, Human
ccauuguuuuucccaaucugaa

SEQ ID NO: 982120 - RNA, 22 nt, Human
cccgccgggugacccgcggccg

SEQ ID NO: 982121 - RNA, 24 nt, Human
cccgccgggugacccgcggccgcg

SEQ ID NO: 982122 - RNA, 22 nt, Human
ccgccgggugacccgcggccgc

SEQ ID NO: 982123 - RNA, 19 nt, Human
ccgcgcuccugucccaacu

SEQ ID NO: 982124 - RNA, 23 nt, Human
ccggcuagccacgaagccgggga

SEQ ID NO: 982125 - RNA, 22 nt, Human
ccucccaaucuaucugucgccu

SEQ ID NO: 982126 - RNA, 24 nt, Human
ccuccgaccaugggcguccuccca

SEQ ID NO: 982127 - RNA, 18 nt, Human
ccugggugacagagcgag

SEQ ID NO: 982128 - RNA, 22 nt, Human
ccuuuaaaaaaacaaauauaga

SEQ ID NO: 982129 - RNA, 21 nt, Human
cgccgggugacccgcggccgc

SEQ ID NO: 982130 - RNA, 22 nt, Human
cgcuccugucccaacuuuucuc

SEQ ID NO: 982131 - RNA, 21 nt, Human
cggccuccgucccugcacuuc

SEQ ID NO: 982132 - RNA, 20 nt, Human
cuaaaugcuuacacacaaaa

SEQ ID NO: 982133 - RNA, 21 nt, Human
cuaaaugcuuuaucacacauc

SEQ ID NO: 982134 - RNA, 20 nt, Human
cuacugcacuccagccuggg

SEQ ID NO: 982135 - RNA, 21 nt, Human
cuacugcacuccagccugggu

SEQ ID NO: 982136 - RNA, 24 nt, Human
cuacugcacuccagccugggugac

SEQ ID NO: 982137 - RNA, 20 nt, Human
cuccugucccaacuuuucuc

SEQ ID NO: 982138 - RNA, 24 nt, Human
cugaauaauacacuuaugaaggcu

SEQ ID NO: 982139 - RNA, 23 nt, Human
cuggacugaaaaaaaaaaaaaaa

SEQ ID NO: 982140 - RNA, 18 nt, Human
cuuaugaaggcuuucaag

SEQ ID NO: 982141 - RNA, 19 nt, Human
cuucacaguuggcaugacu

SEQ ID NO: 982142 - RNA, 19 nt, Human
cuuuccagcgcuaggaccc

SEQ ID NO: 982143 - RNA, 22 nt, Human
gaaaaaggaacauauuuauaau

SEQ ID NO: 982144 - RNA, 22 nt, Human
gaauaaaaaacagaacaugaga

SEQ ID NO: 982145 - RNA, 23 nt, Human
gacccgcggccgcggcucccuag

SEQ ID NO: 982146 - RNA, 21 nt, Human
gaucaugcuacugcacuccag

SEQ ID NO: 982147 - RNA, 24 nt, Human
gcacuccagccugggugacagagc

SEQ ID NO: 982148 - RNA, 24 nt, Human
gccaccuuuccagcgcuaggaccc

SEQ ID NO: 982149 - RNA, 19 nt, Human
gcuacugcacuccagccug

SEQ ID NO: 982150 - RNA, 24 nt, Human
gcuacugcacuccagccuggguga

SEQ ID NO: 982151 - RNA, 24 nt, Human
gcuuagcaacgguacuugaaucac

SEQ ID NO: 982152 - RNA, 21 nt, Human
gcuucagaaaaacugcuucaa

SEQ ID NO: 982153 - RNA, 19 nt, Human
ggacugaaaaaaaaaaaaa

SEQ ID NO: 982154 - RNA, 20 nt, Human
gggcguccucccaaggccuu

SEQ ID NO: 982155 - RNA, 18 nt, Human
uaaaaaaacaacacacca

SEQ ID NO: 982156 - RNA, 22 nt, Human
uaaaaaaacaacacaccacuaa

SEQ ID NO: 982157 - RNA, 20 nt, Human
uaaaaaacagaacaugagaa

SEQ ID NO: 982158 - RNA, 24 nt, Human
uaaacuaacucaaaaugcaggcuu

SEQ ID NO: 982159 - RNA, 18 nt, Human
uaaauaccagagauacau

SEQ ID NO: 982160 - RNA, 21 nt, Human
uaagaaauuccauauauaugc

SEQ ID NO: 982161 - RNA, 20 nt, Human
uaagacaaaacuaacugaaa

SEQ ID NO: 982162 - RNA, 22 nt, Human
uaagacaaaacuaacugaaagc

SEQ ID NO: 982163 - RNA, 18 nt, Human
uaagacaaugacauaaac

SEQ ID NO: 982164 - RNA, 23 nt, Human
uaagacaaugacauaaacugagc

SEQ ID NO: 982165 - RNA, 21 nt, Human
uacugcacuccagccugggug

SEQ ID NO: 982166 - RNA, 23 nt, Human
uacugcacuccagccugggugac

SEQ ID NO: 982167 - RNA, 25 nt, Human
uacugcacuccagccugggugacag

SEQ ID NO: 982168 - RNA, 19 nt, Human
uaggaccccggcuagccac

SEQ ID NO: 982169 - RNA, 19 nt, Human
uaucacaaggacugaauaa

SEQ ID NO: 982170 - RNA, 22 nt, Human
uaucacacaucugcauuuacaa

SEQ ID NO: 982171 - RNA, 23 nt, Human
uaugcagcaucucugcacaccac

SEQ ID NO: 982172 - RNA, 22 nt, Human
uauguuuccauacauguaugua

SEQ ID NO: 982173 - RNA, 23 nt, Human
ucaaauucacacgcaaucccaua

SEQ ID NO: 982174 - RNA, 22 nt, Human
ucaauagccucccaaucuaucu

SEQ ID NO: 982175 - RNA, 24 nt, Human
ucacacgcaaucccauaaaaagga

SEQ ID NO: 982176 - RNA, 24 nt, Human
ucacagaaaacauuuuuguuccuu

SEQ ID NO: 982177 - RNA, 23 nt, Human
ucaugcuacugcacuccagccug

SEQ ID NO: 982178 - RNA, 18 nt, Human
uccagccugggugacaga

SEQ ID NO: 982179 - RNA, 22 nt, Human
uccagccugggugacagagcga

SEQ ID NO: 982180 - RNA, 23 nt, Human
uccagccugggugacagagcgag

SEQ ID NO: 982181 - RNA, 22 nt, Human
uccauacauguauguauuugca

SEQ ID NO: 982182 - RNA, 18 nt, Human
ucccggggcgagaucccu

SEQ ID NO: 982183 - RNA, 25 nt, Human
ucccuagaccgcuccgcuucggccu

SEQ ID NO: 982184 - RNA, 24 nt, Human
uccugucccaacuuuucucccggg

SEQ ID NO: 982185 - RNA, 21 nt, Human
ucucacaguuauauagaaucu

SEQ ID NO: 982186 - RNA, 21 nt, Human
ucugcacaccacauugcagga

SEQ ID NO: 982187 - RNA, 19 nt, Human
ugaaagcaucuuuaagcug

SEQ ID NO: 982188 - RNA, 23 nt, Human
ugaaauggauuuaguagaaagaa

SEQ ID NO: 982189 - RNA, 26 nt, Human
ugaauaaaaaacagaacaugagauau

SEQ ID NO: 982190 - RNA, 22 nt, Human
ugacccgcggccgcggcucccu

SEQ ID NO: 982191 - RNA, 21 nt, Human
ugagagcaaaagugacaauac

SEQ ID NO: 982192 - RNA, 23 nt, Human
uggcaugacuguuugggggacug

SEQ ID NO: 982193 - RNA, 19 nt, Human
ugggagaaaaaaaguaaga

SEQ ID NO: 982194 - RNA, 21 nt, Human
ugggcguccucccaaggccuu

SEQ ID NO: 982195 - RNA, 22 nt, Human
uguaggaaagaaaauguuuuuc

SEQ ID NO: 982196 - RNA, 23 nt, Human
uguccauuguuuuucccaaucug

SEQ ID NO: 982197 - RNA, 19 nt, Human
ugucccaacuuuucucccg

SEQ ID NO: 982198 - RNA, 26 nt, Human
ugucgcugccccugucccagacuuuu

SEQ ID NO: 982199 - RNA, 21 nt, Human
uguuccuuccagauugcucuu

SEQ ID NO: 982200 - RNA, 21 nt, Human
uucagugcucuuaugacauuu

SEQ ID NO: 982201 - RNA, 25 nt, Human
uuccucagggaauggaaauguuuug

SEQ ID NO: 982202 - RNA, 18 nt, Human
uuucccaaucugaauaug

SEQ ID NO: 982203 - RNA, 20 nt, Human
uuuuuuuuuuuuuuuuuugg

SEQ ID NO: 982204 - RNA, 22 nt, Human
aaaaacaaaaacucuggcccuc

SEQ ID NO: 982205 - RNA, 24 nt, Human
aaaacaaaaacaaaaacaaaaacu

SEQ ID NO: 982206 - RNA, 25 nt, Human
aaaacaaaaacaaaaacaaaaacuc

SEQ ID NO: 982207 - RNA, 23 nt, Human
aaacaaaaacaaaaacaaaaaca

SEQ ID NO: 982208 - RNA, 26 nt, Human
aaacaaaaacaaaaacaaaaacucug

SEQ ID NO: 982209 - RNA, 31 nt, Human
aaacaguagcaagcaggaaaacaaaaacaaa

SEQ ID NO: 982210 - RNA, 20 nt, Human
aaauucaugucccuggccag

SEQ ID NO: 982211 - RNA, 19 nt, Human
aacagagugaaacuccauc

SEQ ID NO: 982212 - RNA, 20 nt, Human
aacagagugaaacuccaucu

SEQ ID NO: 982213 - RNA, 21 nt, Human
aacagagugaaacuccaucuc

SEQ ID NO: 982214 - RNA, 25 nt, Human
aacaguagcaagcaggaaaacaaaa

SEQ ID NO: 982215 - RNA, 18 nt, Human
aagagcacucccaguagc

SEQ ID NO: 982216 - RNA, 20 nt, Human
aagagcacucccaguagccc

SEQ ID NO: 982217 - RNA, 23 nt, Human
aagcagcugggacugcucgaugc

SEQ ID NO: 982218 - RNA, 27 nt, Human
aaggaaccaguccggaggggcgcaggc

SEQ ID NO: 982219 - RNA, 25 nt, Human
acaaaaacaaaaacaaaaacaaaaa

SEQ ID NO: 982220 - RNA, 23 nt, Human
acacauccauccacaucccaaca

SEQ ID NO: 982221 - RNA, 18 nt, Human
acagcucaggcccagcag

SEQ ID NO: 982222 - RNA, 24 nt, Human
acaggcaacaagaaggucaaggaa

SEQ ID NO: 982223 - RNA, 24 nt, Human
acauagccaaguaucguucacacc

SEQ ID NO: 982224 - RNA, 22 nt, Human
accacaaaacaguagcaagcag

SEQ ID NO: 982225 - RNA, 18 nt, Human
accgcaacuccuucgcac

SEQ ID NO: 982226 - RNA, 22 nt, Human
acgagacagacagcucaggccc

SEQ ID NO: 982227 - RNA, 21 nt, Human
acgcacacacacacacacaua

SEQ ID NO: 982228 - RNA, 23 nt, Human
acgcacacacacacacacauauu

SEQ ID NO: 982229 - RNA, 21 nt, Human
acgcggcgugagcucucggag

SEQ ID NO: 982230 - RNA, 21 nt, Human
acgcggcgugagcucucggag

SEQ ID NO: 982231 - RNA, 21 nt, Human
agaagcgccagcaggcccccg

SEQ ID NO: 982232 - RNA, 19 nt, Human
agacagacagcucaggccc

SEQ ID NO: 982233 - RNA, 22 nt, Human
agacagacagcucaggcccagc

SEQ ID NO: 982234 - RNA, 20 nt, Human
agagcacucccaguagcccc

SEQ ID NO: 982235 - RNA, 23 nt, Human
agcaagcaggaaaacaaaaacaa

SEQ ID NO: 982236 - RNA, 22 nt, Human
agcagcugggacugcucgaugc

SEQ ID NO: 982237 - RNA, 19 nt, Human
agcgucccccuaaauggcc

SEQ ID NO: 982238 - RNA, 21 nt, Human
aggaaaacaaaaacaaaaaca

SEQ ID NO: 982239 - RNA, 23 nt, Human
aggaagaaaaacuuuuuagagga

SEQ ID NO: 982240 - RNA, 23 nt, Human
aggaggaggauuuaaaacuuggu

SEQ ID NO: 982241 - RNA, 19 nt, Human
aggaguucaagaccagccu

SEQ ID NO: 982242 - RNA, 22 nt, Human
aggcaacaagaaggucaaggaa

SEQ ID NO: 982243 - RNA, 19 nt, Human
aggcacuuaacauagccaa

SEQ ID NO: 982244 - RNA, 19 nt, Human
aggcagaggcauggccagg

SEQ ID NO: 982245 - RNA, 19 nt, Human
aggcagaggcauggccagg

SEQ ID NO: 982246 - RNA, 23 nt, Human
aggcggccgaggagaacgcggcg

SEQ ID NO: 982247 - RNA, 23 nt, Human
aggcggccgaggagaacgcggcg

SEQ ID NO: 982248 - RNA, 26 nt, Human
agggacucuucccugacuucugucag

SEQ ID NO: 982249 - RNA, 21 nt, Human
auaaaagcaaggugcggacaa

SEQ ID NO: 982250 - RNA, 24 nt, Human
auaagcaaaaccagcucggucaaa

SEQ ID NO: 982251 - RNA, 22 nt, Human
auagccaaguaucguucacacc

SEQ ID NO: 982252 - RNA, 22 nt, Human
augcacacauccauccacaucc

SEQ ID NO: 982253 - RNA, 25 nt, Human
caaaaacaaaaacaaaaacaaaaac

SEQ ID NO: 982254 - RNA, 26 nt, Human
caaaaacaaaaacaaaaacaaaaacu

SEQ ID NO: 982255 - RNA, 22 nt, Human
caaaaacaaaaacucuggcccu

SEQ ID NO: 982256 - RNA, 24 nt, Human
caaaacaguagcaagcaggaaaac

SEQ ID NO: 982257 - RNA, 21 nt, Human
caaauugcagcaugaccauaa

SEQ ID NO: 982258 - RNA, 20 nt, Human
caacaccacaaaacaguagc

SEQ ID NO: 982259 - RNA, 21 nt, Human
caagagcacucccaguagccc

SEQ ID NO: 982260 - RNA, 18 nt, Human
caagcaggaaaacaaaaa

SEQ ID NO: 982261 - RNA, 18 nt, Human
caaggaaccagucagccc

SEQ ID NO: 982262 - RNA, 18 nt, Human
caaggcagaggcauggcc

SEQ ID NO: 982263 - RNA, 18 nt, Human
caaggcagaggcauggcc

SEQ ID NO: 982264 - RNA, 19 nt, Human
cacaaaacaguagcaagca

SEQ ID NO: 982265 - RNA, 18 nt, Human
cacacacacacacacaua

SEQ ID NO: 982266 - RNA, 19 nt, Human
cacacauccauccacaucc

SEQ ID NO: 982267 - RNA, 26 nt, Human
cacacccauucacaucaugauuguua

SEQ ID NO: 982268 - RNA, 23 nt, Human
caccacaaaacaguagcaagcag

SEQ ID NO: 982269 - RNA, 21 nt, Human
cacuggggcagcuacuuccuu

SEQ ID NO: 982270 - RNA, 19 nt, Human
cacuugugcaugugugugc

SEQ ID NO: 982271 - RNA, 23 nt, Human
cacuuuuauuuuggcucugaaga

SEQ ID NO: 982272 - RNA, 22 nt, Human
cacuuuucaacaccacaaaaca

SEQ ID NO: 982273 - RNA, 26 nt, Human
cagaccccaagugcagaaucaaauug

SEQ ID NO: 982274 - RNA, 19 nt, Human
cagaggcauggccaggacg

SEQ ID NO: 982275 - RNA, 19 nt, Human
cagaggcauggccaggacg

SEQ ID NO: 982276 - RNA, 18 nt, Human
cagcaggcccccgccccg

SEQ ID NO: 982277 - RNA, 18 nt, Human
cagcaggcccccgccccg

SEQ ID NO: 982278 - RNA, 23 nt, Human
cagcaggcccccgccccgcgucc

SEQ ID NO: 982279 - RNA, 23 nt, Human
cagcaggcccccgccccgcgucc

SEQ ID NO: 982280 - RNA, 22 nt, Human
caggagccgccgcucaucuguu

SEQ ID NO: 982281 - RNA, 19 nt, Human
caugaccauaagcaaaacc

SEQ ID NO: 982282 - RNA, 22 nt, Human
ccagcccccauuccucugacuu

SEQ ID NO: 982283 - RNA, 18 nt, Human
ccagcgggcgcccggggc

SEQ ID NO: 982284 - RNA, 19 nt, Human
ccaggcacuccugggcccg

SEQ ID NO: 982285 - RNA, 21 nt, Human
ccaggcggccagcagccuccg

SEQ ID NO: 982286 - RNA, 19 nt, Human
ccccaagugcagaaucaaa

SEQ ID NO: 982287 - RNA, 18 nt, Human
ccccgcguccccgccagc

SEQ ID NO: 982288 - RNA, 18 nt, Human
ccccgcguccccgccagc

SEQ ID NO: 982289 - RNA, 19 nt, Human
ccccgcguccccgccagcc

SEQ ID NO: 982290 - RNA, 19 nt, Human
ccccgcguccccgccagcc

SEQ ID NO: 982291 - RNA, 19 nt, Human
ccccgcguccccgccagcc

SEQ ID NO: 982292 - RNA, 19 nt, Human
ccccgcguccccgccagcc

SEQ ID NO: 982293 - RNA, 22 nt, Human
cccgcagggcccgccgcgagcu

SEQ ID NO: 982294 - RNA, 22 nt, Human
cccgcagggcccgccgcgagcu

SEQ ID NO: 982295 - RNA, 21 nt, Human
cccggggccgggaugcagggc

SEQ ID NO: 982296 - RNA, 19 nt, Human
ccgcgccuuccgcgacugc

SEQ ID NO: 982297 - RNA, 20 nt, Human
ccgcggccaggagccgccgc

SEQ ID NO: 982298 - RNA, 22 nt, Human
ccgcggccaggagccgccgcuc

SEQ ID NO: 982299 - RNA, 20 nt, Human
ccgcguccccgccagccagg

SEQ ID NO: 982300 - RNA, 20 nt, Human
ccgcguccccgccagccagg

SEQ ID NO: 982301 - RNA, 20 nt, Human
ccggaggggcgcaggcggug

SEQ ID NO: 982302 - RNA, 21 nt, Human
ccuccagcgggcgcccggggc

SEQ ID NO: 982303 - RNA, 21 nt, Human
ccucccgcagggcccgccgcg

SEQ ID NO: 982304 - RNA, 21 nt, Human
ccucccgcagggcccgccgcg

SEQ ID NO: 982305 - RNA, 19 nt, Human
ccuccgcgggagcaugccg

SEQ ID NO: 982306 - RNA, 19 nt, Human
ccuccgcgggagcaugccg

SEQ ID NO: 982307 - RNA, 22 nt, Human
ccuccgcgggagcaugccgccu

SEQ ID NO: 982308 - RNA, 22 nt, Human
ccuccgcgggagcaugccgccu

SEQ ID NO: 982309 - RNA, 19 nt, Human
cgaugcaucucuccucuuc

SEQ ID NO: 982310 - RNA, 20 nt, Human
cgcacacacacacacacaua

SEQ ID NO: 982311 - RNA, 21 nt, Human
cgcacacacacacacacauau

SEQ ID NO: 982312 - RNA, 22 nt, Human
cgcacacacacacacacauauu

SEQ ID NO: 982313 - RNA, 20 nt, Human
cgccccgcguccccgccagc

SEQ ID NO: 982314 - RNA, 20 nt, Human
cgccccgcguccccgccagc

SEQ ID NO: 982315 - RNA, 25 nt, Human
cgcgcgccgcacgcgcaggcccgug

SEQ ID NO: 982316 - RNA, 25 nt, Human
cgcgcgccgcacgcgcaggcccgug

SEQ ID NO: 982317 - RNA, 23 nt, Human
cuccuucgcacuugugcaugugu

SEQ ID NO: 982318 - RNA, 18 nt, Human
cucuacuuaaaaaaaaaa

SEQ ID NO: 982319 - RNA, 22 nt, Human
cucugaagagaggaagaaaaac

SEQ ID NO: 982320 - RNA, 23 nt, Human
cugcucgaugcaucucuccucuu

SEQ ID NO: 982321 - RNA, 21 nt, Human
cuggcccucaagacuccagaa

SEQ ID NO: 982322 - RNA, 24 nt, Human
gaaaacaaaaacaaaaacaaaaac

SEQ ID NO: 982323 - RNA, 23 nt, Human
gaacaggcaacaagaaggucaag

SEQ ID NO: 982324 - RNA, 20 nt, Human
gaagcgccagcaggcccccg

SEQ ID NO: 982325 - RNA, 22 nt, Human
gaccauaagcaaaaccagcucg

SEQ ID NO: 982326 - RNA, 18 nt, Human
gacgcggagaaggcaaga

SEQ ID NO: 982327 - RNA, 24 nt, Human
gaggaagaaaaacuuuuuagagga

SEQ ID NO: 982328 - RNA, 18 nt, Human
gaugcaucucuccucuuc

SEQ ID NO: 982329 - RNA, 21 nt, Human
gcaagacauacacuggggcag

SEQ ID NO: 982330 - RNA, 26 nt, Human
gcaggaaaacaaaaacaaaaacaaaa

SEQ ID NO: 982331 - RNA, 27 nt, Human
gcaggaaaacaaaaacaaaaacaaaaa

SEQ ID NO: 982332 - RNA, 21 nt, Human
gcagggcccgccgcgagcuuc

SEQ ID NO: 982333 - RNA, 21 nt, Human
gcagggcccgccgcgagcuuc

SEQ ID NO: 982334 - RNA, 23 nt, Human
gcauggcccaggaguucaagacc

SEQ ID NO: 982335 - RNA, 22 nt, Human
gcccaggaguucaagaccagcc

SEQ ID NO: 982336 - RNA, 18 nt, Human
gcccccgccccgcguccc

SEQ ID NO: 982337 - RNA, 18 nt, Human
gcccccgccccgcguccc

SEQ ID NO: 982338 - RNA, 25 nt, Human
gcccgggcagcagaccagucagccc

SEQ ID NO: 982339 - RNA, 18 nt, Human
gccgauucacaggaaacu

SEQ ID NO: 982340 - RNA, 19 nt, Human
gcucgaugcaucucuccuc

SEQ ID NO: 982341 - RNA, 24 nt, Human
ggacucuucccugacuucugucag

SEQ ID NO: 982342 - RNA, 18 nt, Human
ggaguggcccagccccca

SEQ ID NO: 982343 - RNA, 19 nt, Human
ggcccagcagcacgcaagc

SEQ ID NO: 982344 - RNA, 18 nt, Human
ggccgaggagaacgcggc

SEQ ID NO: 982345 - RNA, 18 nt, Human
ggccgaggagaacgcggc

SEQ ID NO: 982346 - RNA, 18 nt, Human
ggcggccagcagccuccg

SEQ ID NO: 982347 - RNA, 18 nt, Human
gggagcaugccgccuccc

SEQ ID NO: 982348 - RNA, 18 nt, Human
gggagcaugccgccuccc

SEQ ID NO: 982349 - RNA, 20 nt, Human
gguccuggaaagaagaagua

SEQ ID NO: 982350 - RNA, 21 nt, Human
gugggauuuggaaugucagca

SEQ ID NO: 982351 - RNA, 29 nt, Human
gugugcgcucgcagacgcacacacacaca

SEQ ID NO: 982352 - RNA, 23 nt, Human
guuaggaaggaggcaaugaucca

SEQ ID NO: 982353 - RNA, 22 nt, Human
uaacauaaaccaaaucuccacu

SEQ ID NO: 982354 - RNA, 20 nt, Human
uaacccagggacucuucccu

SEQ ID NO: 982355 - RNA, 18 nt, Human
uaacuguacagacagacc

SEQ ID NO: 982356 - RNA, 22 nt, Human
uaacuguacagacagaccccaa

SEQ ID NO: 982357 - RNA, 20 nt, Human
uaagucagaacauggagcaa

SEQ ID NO: 982358 - RNA, 24 nt, Human
uaaugguaacauaaaccaaaucuc

SEQ ID NO: 982359 - RNA, 31 nt, Human
uagcaagcaggaaaacaaaaacaaaaacaaa

SEQ ID NO: 982360 - RNA, 19 nt, Human
uaucuaaaaggauuagucu

SEQ ID NO: 982361 - RNA, 21 nt, Human
ucacacccauucacaucauga

SEQ ID NO: 982362 - RNA, 26 nt, Human
ucacggucccgcggccaggagccgcc

SEQ ID NO: 982363 - RNA, 20 nt, Human
ucagagaagcaaauggaggu

SEQ ID NO: 982364 - RNA, 19 nt, Human
ucaggcccagcagcacgca

SEQ ID NO: 982365 - RNA, 20 nt, Human
uccaagggaguggcccagcc

SEQ ID NO: 982366 - RNA, 21 nt, Human
ucccacaaauguagccuucuu

SEQ ID NO: 982367 - RNA, 18 nt, Human
uccccuucuggccugagg

SEQ ID NO: 982368 - RNA, 21 nt, Human
uccucugaggggagagucggu

SEQ ID NO: 982369 - RNA, 23 nt, Human
ucgcacuugugcaugugugugcg

SEQ ID NO: 982370 - RNA, 21 nt, Human
ucuacuuaaaaaaaaaaaaaa

SEQ ID NO: 982371 - RNA, 24 nt, Human
ucuccucugaggggagagucgacu

SEQ ID NO: 982372 - RNA, 23 nt, Human
ucucuacuuaaaaaaaaaaaaaa

SEQ ID NO: 982373 - RNA, 18 nt, Human
ucugaagagaggaagaaa

SEQ ID NO: 982374 - RNA, 19 nt, Human
ucuuccaacaaugacgcgg

SEQ ID NO: 982375 - RNA, 19 nt, Human
ugaaaagcagcugggacug

SEQ ID NO: 982376 - RNA, 19 nt, Human
ugaacaguguaguucacuu

SEQ ID NO: 982377 - RNA, 21 nt, Human
ugaauauagaagaacuggccg

SEQ ID NO: 982378 - RNA, 19 nt, Human
ugacaacacucccacaaau

SEQ ID NO: 982379 - RNA, 25 nt, Human
ugacaacacucccacaaauguagcc

SEQ ID NO: 982380 - RNA, 22 nt, Human
ugagacagggcuagaagcaccu

SEQ ID NO: 982381 - RNA, 22 nt, Human
ugaguaacuguacagacagacc

SEQ ID NO: 982382 - RNA, 19 nt, Human
ugauaacggacugagacag

SEQ ID NO: 982383 - RNA, 21 nt, Human
ugcacacauccauccacaucc

SEQ ID NO: 982384 - RNA, 21 nt, Human
ugcagaaucaaauugcccuaa

SEQ ID NO: 982385 - RNA, 20 nt, Human
ugcgcgcgccgcacgcgcag

SEQ ID NO: 982386 - RNA, 20 nt, Human
ugcgcgcgccgcacgcgcag

SEQ ID NO: 982387 - RNA, 21 nt, Human
ugcgcgcgccgcacgcgcagg

SEQ ID NO: 982388 - RNA, 21 nt, Human
ugcgcgcgccgcacgcgcagg

SEQ ID NO: 982389 - RNA, 18 nt, Human
uggaaagaagaaguaaua

SEQ ID NO: 982390 - RNA, 20 nt, Human
uggaaugucagcagaggaaa

SEQ ID NO: 982391 - RNA, 19 nt, Human
uggaccuggagaacugaag

SEQ ID NO: 982392 - RNA, 19 nt, Human
uggcaugucccccuucuac

SEQ ID NO: 982393 - RNA, 21 nt, Human
uggccagaagcgccagcaggc

SEQ ID NO: 982394 - RNA, 21 nt, Human
uggccagaagcgccagcaggc

SEQ ID NO: 982395 - RNA, 20 nt, Human
uggccaggacggccgugcag

SEQ ID NO: 982396 - RNA, 20 nt, Human
uggccaggacggccgugcag

SEQ ID NO: 982397 - RNA, 22 nt, Human
uggcccaggaguucaagaccag

SEQ ID NO: 982398 - RNA, 20 nt, Human
uggccgauucacaggaaacu

SEQ ID NO: 982399 - RNA, 22 nt, Human
ugucacaguuaggagugaaauc

SEQ ID NO: 982400 - RNA, 22 nt, Human
ugucccuggccaggcauggccc

SEQ ID NO: 982401 - RNA, 22 nt, Human
ugugcaggcagggagggggaac

SEQ ID NO: 982402 - RNA, 19 nt, Human
ugugcaugugugugcgcuc

SEQ ID NO: 982403 - RNA, 25 nt, Human
ugugcgcucgcagacgcacacacac

SEQ ID NO: 982404 - RNA, 28 nt, Human
ugugugcgcucgcagacgcacacacaca

SEQ ID NO: 982405 - RNA, 19 nt, Human
uuagaggaacuuaauggua

SEQ ID NO: 982406 - RNA, 25 nt, Human
uuaugcacacauccauccacauccc

SEQ ID NO: 982407 - RNA, 23 nt, Human
uucaacaccacaaaacaguagca

SEQ ID NO: 982408 - RNA, 22 nt, Human
uucgcacuugugcaugugugug

SEQ ID NO: 982409 - RNA, 18 nt, Human
uuuuuuuuuuuuuuuuug

SEQ ID NO: 982410 - RNA, 20 nt, Human
uuuuuuuuuuuuuuuuuugg

SEQ ID NO: 982411 - RNA, 23 nt, Human
aaagaagaaauucagggcuugag

SEQ ID NO: 982412 - RNA, 19 nt, Human
aaagaagccacugcccuga

SEQ ID NO: 982413 - RNA, 23 nt, Human
aagaaaaagaggucuacuuccua

SEQ ID NO: 982414 - RNA, 20 nt, Human
aagaaagaaauggaguccua

SEQ ID NO: 982415 - RNA, 18 nt, Human
accccuauaccucccagc

SEQ ID NO: 982416 - RNA, 19 nt, Human
agaagccacugcccugagc

SEQ ID NO: 982417 - RNA, 18 nt, Human
agaguaggggaggagacu

SEQ ID NO: 982418 - RNA, 18 nt, Human
agcaggcagccuccagga

SEQ ID NO: 982419 - RNA, 18 nt, Human
aggaaaagaagaaauuca

SEQ ID NO: 982420 - RNA, 21 nt, Human
aggaaaagaagaaauucaggg

SEQ ID NO: 982421 - RNA, 27 nt, Human
aggaaagaagaaagcaaguuauccuag

SEQ ID NO: 982422 - RNA, 23 nt, Human
agggcuugagccaggaguaaagg

SEQ ID NO: 982423 - RNA, 18 nt, Human
auggcucagcaucuguuc

SEQ ID NO: 982424 - RNA, 22 nt, Human
auucagggcuugagccaggagu

SEQ ID NO: 982425 - RNA, 19 nt, Human
cacaugguaggcuaaggca

SEQ ID NO: 982426 - RNA, 21 nt, Human
cacaugguaggcuaaggcaga

SEQ ID NO: 982427 - RNA, 18 nt, Human
cauuuuaugggggaggaa

SEQ ID NO: 982428 - RNA, 19 nt, Human
ccccgcgcccuccaauggc

SEQ ID NO: 982429 - RNA, 19 nt, Human
ccccgcgcccuccaauggc

SEQ ID NO: 982430 - RNA, 18 nt, Human
ccccugcaggaaaagaag

SEQ ID NO: 982431 - RNA, 21 nt, Human
cccuccaauggcucuggucgc

SEQ ID NO: 982432 - RNA, 20 nt, Human
ccuccaggauccuauuuaga

SEQ ID NO: 982433 - RNA, 21 nt, Human
cucccagcacagcaggcagcc

SEQ ID NO: 982434 - RNA, 21 nt, Human
cuguacccauguuaugcuuuc

SEQ ID NO: 982435 - RNA, 19 nt, Human
cuuccauacuggaaagaag

SEQ ID NO: 982436 - RNA, 21 nt, Human
gacaugaaggaauggaagaaa

SEQ ID NO: 982437 - RNA, 20 nt, Human
gagcccuccaaguaccuguc

SEQ ID NO: 982438 - RNA, 18 nt, Human
gagucacacaggccugag

SEQ ID NO: 982439 - RNA, 22 nt, Human
gcccugagcccuccaaguaccu

SEQ ID NO: 982440 - RNA, 21 nt, Human
gccugcccccaggaccccuau

SEQ ID NO: 982441 - RNA, 20 nt, Human
ggcagaguaggggaggagac

SEQ ID NO: 982442 - RNA, 19 nt, Human
ucauuguuguccccucugu

SEQ ID NO: 982443 - RNA, 22 nt, Human
uccccgcgcccuccaauggcuc

SEQ ID NO: 982444 - RNA, 19 nt, Human
ugaaggaauggaagaaaga

SEQ ID NO: 982445 - RNA, 20 nt, Human
ugaaggaauggaagaaagaa

SEQ ID NO: 982446 - RNA, 21 nt, Human
ugcccugagcccuccaaguac

SEQ ID NO: 982447 - RNA, 21 nt, Human
ugcuccccaccaaggccaaug

SEQ ID NO: 982448 - RNA, 20 nt, Human
uggaagaaagaaauggaguc

SEQ ID NO: 982449 - RNA, 24 nt, Human
uggaagaaagaaauggaguccuau

SEQ ID NO: 982450 - RNA, 23 nt, Human
ugugucugugcuccccaccaagg

SEQ ID NO: 982451 - RNA, 22 nt, Human
uguuguccccucuguacccaug

SEQ ID NO: 982452 - RNA, 22 nt, Human
uuagccuaaccaacuauuaaaa

SEQ ID NO: 982453 - RNA, 26 nt, Human
uugcaguccccgcgcccuccaauggc

SEQ ID NO: 982454 - RNA, 18 nt, Human
aaaagggaggagggaaaa

SEQ ID NO: 982455 - RNA, 21 nt, Human
aaacccucacucaaaccggcg

SEQ ID NO: 982456 - RNA, 19 nt, Human
aaacgugggcaacagcauc

SEQ ID NO: 982457 - RNA, 22 nt, Human
aacacuguuuacacaaaugugu

SEQ ID NO: 982458 - RNA, 24 nt, Human
aacagcaucauagacuugaaugaa

SEQ ID NO: 982459 - RNA, 21 nt, Human
aaccccucuucucauccccac

SEQ ID NO: 982460 - RNA, 19 nt, Human
aagcagccaagcaaggacu

SEQ ID NO: 982461 - RNA, 30 nt, Human
aagcagccaagcaaggacuaauucagagcc

SEQ ID NO: 982462 - RNA, 18 nt, Human
aagcccaaggccaagcag

SEQ ID NO: 982463 - RNA, 19 nt, Human
acacaagcacaugcaugcc

SEQ ID NO: 982464 - RNA, 26 nt, Human
acacacacaagcacaugcaugccugc

SEQ ID NO: 982465 - RNA, 25 nt, Human
acacacacacacacaagcacaugca

SEQ ID NO: 982466 - RNA, 33 nt, Human
acacacacacacacacacaagcacaugcauggu

SEQ ID NO: 982467 - RNA, 33 nt, Human
acacacacacacacacacacacaagcacauggu

SEQ ID NO: 982468 - RNA, 22 nt, Human
acauagacccacacacucucuc

SEQ ID NO: 982469 - RNA, 26 nt, Human
accguccggcagccgggccggcucug

SEQ ID NO: 982470 - RNA, 21 nt, Human
acuccggagugaaacuucagc

SEQ ID NO: 982471 - RNA, 20 nt, Human
agacguuaccugucuccccu

SEQ ID NO: 982472 - RNA, 25 nt, Human
agagaggcaagcaaagaaggcugau

SEQ ID NO: 982473 - RNA, 21 nt, Human
agagggaggagcguguggggu

SEQ ID NO: 982474 - RNA, 26 nt, Human
agcaucauagacuugaaugaagccca

SEQ ID NO: 982475 - RNA, 26 nt, Human
agcccaaggccaagcagccaagcaag

SEQ ID NO: 982476 - RNA, 22 nt, Human
aggcaagaggaccaacccucca

SEQ ID NO: 982477 - RNA, 21 nt, Human
aggcaagcaaagaaggcuggg

SEQ ID NO: 982478 - RNA, 21 nt, Human
aucuuuucuaccucuuugucg

SEQ ID NO: 982479 - RNA, 20 nt, Human
auguguggucuuuguacaaa

SEQ ID NO: 982480 - RNA, 25 nt, Human
caaaaaaaccccucuucucaucccc

SEQ ID NO: 982481 - RNA, 26 nt, Human
caaaaaaaccccucuucucaucccca

SEQ ID NO: 982482 - RNA, 21 nt, Human
caagucccggggccccugucc

SEQ ID NO: 982483 - RNA, 20 nt, Human
cacacacacacacacacaca

SEQ ID NO: 982484 - RNA, 20 nt, Human
cacacacacacacacacaca

SEQ ID NO: 982485 - RNA, 22 nt, Human
cacacacacacacacacacaca

SEQ ID NO: 982486 - RNA, 19 nt, Human
cacagagagucuggagucc

SEQ ID NO: 982487 - RNA, 22 nt, Human
cacagccaguuacgcaacagcg

SEQ ID NO: 982488 - RNA, 22 nt, Human
cacaugcaugccugcaaaggug

SEQ ID NO: 982489 - RNA, 23 nt, Human
cacccaccauauccuagacccaa

SEQ ID NO: 982490 - RNA, 22 nt, Human
cacuccggagugaaacuucagc

SEQ ID NO: 982491 - RNA, 21 nt, Human
cagaacacagccaguuacgca

SEQ ID NO: 982492 - RNA, 22 nt, Human
cagaacacagccaguuacgcaa

SEQ ID NO: 982493 - RNA, 22 nt, Human
caggaaggagcggagagcagcg

SEQ ID NO: 982494 - RNA, 20 nt, Human
cauauuguuuccaaagagaa

SEQ ID NO: 982495 - RNA, 22 nt, Human
cauccccaccucccuucagaga

SEQ ID NO: 982496 - RNA, 25 nt, Human
caucucauucaaauagcugcugagc

SEQ ID NO: 982497 - RNA, 20 nt, Human
caugcacaaggacacacaca

SEQ ID NO: 982498 - RNA, 20 nt, Human
ccaagcagccaagcaaggac

SEQ ID NO: 982499 - RNA, 18 nt, Human
ccaaggccaagcagccaa

SEQ ID NO: 982500 - RNA, 22 nt, Human
ccacccaccauauccuagaccc

SEQ ID NO: 982501 - RNA, 18 nt, Human
ccaccgcugcugcagcca

SEQ ID NO: 982502 - RNA, 24 nt, Human
ccagaacacagccaguuacgcaac

SEQ ID NO: 982503 - RNA, 19 nt, Human
ccagcaggcccucggcggc

SEQ ID NO: 982504 - RNA, 23 nt, Human
cccaccauauccuagacccaauc

SEQ ID NO: 982505 - RNA, 19 nt, Human
ccccucuucucauccccac

SEQ ID NO: 982506 - RNA, 19 nt, Human
cccgcgccagcagcccucc

SEQ ID NO: 982507 - RNA, 23 nt, Human
cccuccaagucccggggccccug

SEQ ID NO: 982508 - RNA, 20 nt, Human
cccucccagccccgcuugcu

SEQ ID NO: 982509 - RNA, 21 nt, Human
cccucggcggcggcucccagg

SEQ ID NO: 982510 - RNA, 26 nt, Human
ccuagacccaaucuuuucuaccucuu

SEQ ID NO: 982511 - RNA, 21 nt, Human
ccucccagccccgcuugcucc

SEQ ID NO: 982512 - RNA, 23 nt, Human
cggcgccgggcgugggggcugcc

SEQ ID NO: 982513 - RNA, 18 nt, Human
cggcggcagcggcggcug

SEQ ID NO: 982514 - RNA, 20 nt, Human
cgggcggcgccgggcguggg

SEQ ID NO: 982515 - RNA, 21 nt, Human
cggggccccuguccacccacc

SEQ ID NO: 982516 - RNA, 23 nt, Human
cuacaggccuugccacagcagug

SEQ ID NO: 982517 - RNA, 22 nt, Human
cucauccccaccucccuucaga

SEQ ID NO: 982518 - RNA, 30 nt, Human
cucaugcacaaggacacacacacacacaca

SEQ ID NO: 982519 - RNA, 19 nt, Human
cuccaggccccaccuccag

SEQ ID NO: 982520 - RNA, 26 nt, Human
cugcgccccgcggcucucgcucccgg

SEQ ID NO: 982521 - RNA, 23 nt, Human
cuugccacagcagugaauauccu

SEQ ID NO: 982522 - RNA, 21 nt, Human
gaaaaugaacccccagccucc

SEQ ID NO: 982523 - RNA, 22 nt, Human
gaaaaugaacccccagccuccc

SEQ ID NO: 982524 - RNA, 19 nt, Human
gaaccggggcgggucagaa

SEQ ID NO: 982525 - RNA, 22 nt, Human
gaccauacacagccggcgagcc

SEQ ID NO: 982526 - RNA, 24 nt, Human
gaggcaagaggaccaacccuccaa

SEQ ID NO: 982527 - RNA, 18 nt, Human
gaugccaugaucugaaaa

SEQ ID NO: 982528 - RNA, 21 nt, Human
gauuugcagcuugucuuucac

SEQ ID NO: 982529 - RNA, 33 nt, Human
gcacaaggacacacacacacacacacacacagu

SEQ ID NO: 982530 - RNA, 19 nt, Human
gcagccaagcaaggacuaa

SEQ ID NO: 982531 - RNA, 20 nt, Human
gccaccgcugcugcagccac

SEQ ID NO: 982532 - RNA, 21 nt, Human
gccagcagcccucccagcccc

SEQ ID NO: 982533 - RNA, 22 nt, Human
gcccagacgcgcucucauaggg

SEQ ID NO: 982534 - RNA, 18 nt, Human
ggaaaucccaaaccuggg

SEQ ID NO: 982535 - RNA, 18 nt, Human
ggaugccaugaucugaaa

SEQ ID NO: 982536 - RNA, 18 nt, Human
ggccaccgcugcugcagc

SEQ ID NO: 982537 - RNA, 18 nt, Human
ggcggcggcagcggcggc

SEQ ID NO: 982538 - RNA, 24 nt, Human
ggcucuggaaaucccaaaccuggg

SEQ ID NO: 982539 - RNA, 19 nt, Human
gggaggagggaaaaguugg

SEQ ID NO: 982540 - RNA, 18 nt, Human
gggcggcgccgggcgugg

SEQ ID NO: 982541 - RNA, 25 nt, Human
uacaaaaaaaccccucuucucaucc

SEQ ID NO: 982542 - RNA, 19 nt, Human
uacauagacccacacacuc

SEQ ID NO: 982543 - RNA, 23 nt, Human
uaccugucuccccuccccuucug

SEQ ID NO: 982544 - RNA, 18 nt, Human
uaggguucacagagaguc

SEQ ID NO: 982545 - RNA, 18 nt, Human
ucaaaccagaucagcuuu

SEQ ID NO: 982546 - RNA, 22 nt, Human
ucacagagagucuggaguccac

SEQ ID NO: 982547 - RNA, 19 nt, Human
ucacugcaguuuuuuguuu

SEQ ID NO: 982548 - RNA, 23 nt, Human
ucagaaacccucacucaaaccgg

SEQ ID NO: 982549 - RNA, 18 nt, Human
ucagagcagcucagaaac

SEQ ID NO: 982550 - RNA, 19 nt, Human
ucauaggguucacagagag

SEQ ID NO: 982551 - RNA, 24 nt, Human
uccccuccccuucugaaucaucuc

SEQ ID NO: 982552 - RNA, 19 nt, Human
ucccggaaccggggcgggu

SEQ ID NO: 982553 - RNA, 19 nt, Human
ucccggccgggguuccugg

SEQ ID NO: 982554 - RNA, 24 nt, Human
ucccugccucgcccucagucgccc

SEQ ID NO: 982555 - RNA, 22 nt, Human
uccuagacccaaucuuuucuac

SEQ ID NO: 982556 - RNA, 20 nt, Human
ucgcucccggccgggguucc

SEQ ID NO: 982557 - RNA, 22 nt, Human
ucggcguugccgggaaaucccg

SEQ ID NO: 982558 - RNA, 19 nt, Human
ucuacaggccuugccacag

SEQ ID NO: 982559 - RNA, 23 nt, Human
ucucucucucuuaggagggcaaa

SEQ ID NO: 982560 - RNA, 23 nt, Human
ucucucugucucucucucuuagg

SEQ ID NO: 982561 - RNA, 23 nt, Human
ucucugucucucucucuuaggag

SEQ ID NO: 982562 - RNA, 18 nt, Human
ucuggcgcgugucaucuu

SEQ ID NO: 982563 - RNA, 18 nt, Human
ucugucucucugucucuc

SEQ ID NO: 982564 - RNA, 20 nt, Human
ucuuucucucucucugucuc

SEQ ID NO: 982565 - RNA, 18 nt, Human
ucuuuugagccccuucag

SEQ ID NO: 982566 - RNA, 20 nt, Human
ugaacccccagccucccuuc

SEQ ID NO: 982567 - RNA, 19 nt, Human
ugagcagaugaggggccca

SEQ ID NO: 982568 - RNA, 19 nt, Human
ugcacaaggacacacacac

SEQ ID NO: 982569 - RNA, 30 nt, Human
ugcacaaggacacacacacacacacacaca

SEQ ID NO: 982570 - RNA, 30 nt, Human
ugcacaaggacacacacacacacacacagu

SEQ ID NO: 982571 - RNA, 21 nt, Human
ugccacagcagugaauauccu

SEQ ID NO: 982572 - RNA, 27 nt, Human
ugccccugacugcgaguccuacagccu

SEQ ID NO: 982573 - RNA, 22 nt, Human
ugccucgcccucagucgccggc

SEQ ID NO: 982574 - RNA, 20 nt, Human
ugccugcagugacagaggcu

SEQ ID NO: 982575 - RNA, 22 nt, Human
ugcuccaggccccaccuccagc

SEQ ID NO: 982576 - RNA, 18 nt, Human
ugcugagcagaugagggg

SEQ ID NO: 982577 - RNA, 19 nt, Human
ugggagcaaggccucacca

SEQ ID NO: 982578 - RNA, 19 nt, Human
uggggccgcaccguccggc

SEQ ID NO: 982579 - RNA, 21 nt, Human
uguacaaaguacaaaaaaacc

SEQ ID NO: 982580 - RNA, 22 nt, Human
uguacaaaguacaaaaaaaccc

SEQ ID NO: 982581 - RNA, 23 nt, Human
uucacugcaguuuuuuguuuuug

SEQ ID NO: 982582 - RNA, 18 nt, Human
uuccaaagagaagcgugg

SEQ ID NO: 982583 - RNA, 20 nt, Human
uuccuggcggcggcggcagc

SEQ ID NO: 982584 - RNA, 21 nt, Human
uugaaugaagcccaaggccaa

SEQ ID NO: 982585 - RNA, 22 nt, Human
uuguacaaaguacaaaaaaacc

SEQ ID NO: 982586 - RNA, 23 nt, Human
uuugcagcuugucuuucacugca

SEQ ID NO: 982587 - RNA, 26 nt, Human
aaaaagacaaauacaggacuucaugg

SEQ ID NO: 982588 - RNA, 21 nt, Human
aaaacuccuagguacaucaga

SEQ ID NO: 982589 - RNA, 18 nt, Human
aagagacucugaucagca

SEQ ID NO: 982590 - RNA, 24 nt, Human
aaggaucaacaggucuuggucagc

SEQ ID NO: 982591 - RNA, 23 nt, Human
aaggggcuuggugacuggccucg

SEQ ID NO: 982592 - RNA, 18 nt, Human
acccuuaacaaucacggg

SEQ ID NO: 982593 - RNA, 22 nt, Human
agacauguuuaaaaaaagagaa

SEQ ID NO: 982594 - RNA, 21 nt, Human
agagagaagggauggggcucu

SEQ ID NO: 982595 - RNA, 21 nt, Human
agagagaagggauggggcucu

SEQ ID NO: 982596 - RNA, 18 nt, Human
agccuuaggaagggaagc

SEQ ID NO: 982597 - RNA, 22 nt, Human
agcuugguuccuucccacuucu

SEQ ID NO: 982598 - RNA, 22 nt, Human
aggaagggaagcaucacucagg

SEQ ID NO: 982599 - RNA, 20 nt, Human
aggaguucuuucucuccuac

SEQ ID NO: 982600 - RNA, 23 nt, Human
aggaucaacaggucuuggucagc

SEQ ID NO: 982601 - RNA, 24 nt, Human
agggcugggauucggaaggaucuc

SEQ ID NO: 982602 - RNA, 19 nt, Human
agguggccgcccgagcugg

SEQ ID NO: 982603 - RNA, 19 nt, Human
agguggccgcccgagcugg

SEQ ID NO: 982604 - RNA, 22 nt, Human
auaguaacagcaguaaauaaac

SEQ ID NO: 982605 - RNA, 24 nt, Human
auaguaacagcaguaaauaaacac

SEQ ID NO: 982606 - RNA, 18 nt, Human
auguccaugguuagacaa

SEQ ID NO: 982607 - RNA, 20 nt, Human
auucacaugagaguuccuac

SEQ ID NO: 982608 - RNA, 20 nt, Human
auucucaccuccaaccccgu

SEQ ID NO: 982609 - RNA, 23 nt, Human
auucuugucuuuagcuuuaaagg

SEQ ID NO: 982610 - RNA, 23 nt, Human
caaaacuccuagguacaucagaa

SEQ ID NO: 982611 - RNA, 24 nt, Human
caccuccaaccccguuggaggccc

SEQ ID NO: 982612 - RNA, 23 nt, Human
caccucuacccuaccugggauuc

SEQ ID NO: 982613 - RNA, 22 nt, Human
cacuuugaaaaacaggcagggg

SEQ ID NO: 982614 - RNA, 19 nt, Human
cagccuuuacaugcgacau

SEQ ID NO: 982615 - RNA, 19 nt, Human
cagcuguucuuagaaagca

SEQ ID NO: 982616 - RNA, 20 nt, Human
cagugaggccugugucagcu

SEQ ID NO: 982617 - RNA, 22 nt, Human
ccagggcugggauucggaagga

SEQ ID NO: 982618 - RNA, 19 nt, Human
cccaagagacucugaucag

SEQ ID NO: 982619 - RNA, 18 nt, Human
ccccagauccuggaggac

SEQ ID NO: 982620 - RNA, 18 nt, Human
ccccagauccuggaggac

SEQ ID NO: 982621 - RNA, 23 nt, Human
cccccuggccuuaguggaaacuc

SEQ ID NO: 982622 - RNA, 20 nt, Human
cccccuggccuuaguggaac

SEQ ID NO: 982623 - RNA, 21 nt, Human
cccguuggaggcccccuggcc

SEQ ID NO: 982624 - RNA, 24 nt, Human
cccuggccuuaguggaaacucauc

SEQ ID NO: 982625 - RNA, 19 nt, Human
ccgcccccgaaauaugacc

SEQ ID NO: 982626 - RNA, 20 nt, Human
ccuacauguaguaaaaagac

SEQ ID NO: 982627 - RNA, 22 nt, Human
ccuccaaccccguuggaggccc

SEQ ID NO: 982628 - RNA, 18 nt, Human
ccuguaucuggaagaaaa

SEQ ID NO: 982629 - RNA, 24 nt, Human
ccuuaguggaaacucaucuccuug

SEQ ID NO: 982630 - RNA, 18 nt, Human
cgccugcgcgcccggaag

SEQ ID NO: 982631 - RNA, 19 nt, Human
cuccaaccccguuggaggc

SEQ ID NO: 982632 - RNA, 19 nt, Human
cucccauagaauggauuac

SEQ ID NO: 982633 - RNA, 20 nt, Human
gaaauaugaccuacuugaaa

SEQ ID NO: 982634 - RNA, 21 nt, Human
gagagaagggucaccgcggca

SEQ ID NO: 982635 - RNA, 21 nt, Human
gagagaagggucaccgcggca

SEQ ID NO: 982636 - RNA, 19 nt, Human
gauucucaccuccaacccc

SEQ ID NO: 982637 - RNA, 21 nt, Human
gcaguaaauaaacacuuugaa

SEQ ID NO: 982638 - RNA, 21 nt, Human
ggauucggaaggaucucggca

SEQ ID NO: 982639 - RNA, 23 nt, Human
ggcagagagagaagggauggggc

SEQ ID NO: 982640 - RNA, 23 nt, Human
ggcagagagagaagggauggggc

SEQ ID NO: 982641 - RNA, 24 nt, Human
gggcuuggugacuggccucgguuc

SEQ ID NO: 982642 - RNA, 18 nt, Human
gguguccgaaaugguggc

SEQ ID NO: 982643 - RNA, 18 nt, Human
gguguccgaaaugguggc

SEQ ID NO: 982644 - RNA, 18 nt, Human
guagaaugccuauaccua

SEQ ID NO: 982645 - RNA, 20 nt, Human
guagaaugccuauaccuaca

SEQ ID NO: 982646 - RNA, 19 nt, Human
guaguaaaaagacaaauac

SEQ ID NO: 982647 - RNA, 19 nt, Human
uaaaaugggauaaauacuc

SEQ ID NO: 982648 - RNA, 20 nt, Human
uaaaaugggauaaauacuca

SEQ ID NO: 982649 - RNA, 26 nt, Human
uacaucagaaugcaaaauauaaaaug

SEQ ID NO: 982650 - RNA, 25 nt, Human
uacuacaguacucauucacaugaga

SEQ ID NO: 982651 - RNA, 24 nt, Human
uagaaugccuauaccuacauuggu

SEQ ID NO: 982652 - RNA, 24 nt, Human
uauucuugucuuuagcuuuaaagg

SEQ ID NO: 982653 - RNA, 24 nt, Human
ucaaaguauucuacacaguagaag

SEQ ID NO: 982654 - RNA, 22 nt, Human
ucauggucacuuuuuuugguug

SEQ ID NO: 982655 - RNA, 24 nt, Human
uccaugguuagacaauucaaggac

SEQ ID NO: 982656 - RNA, 18 nt, Human
ucuaaagccauuuccaaa

SEQ ID NO: 982657 - RNA, 18 nt, Human
ucuuagaaagcauuccau

SEQ ID NO: 982658 - RNA, 22 nt, Human
ugaaaaacaggcagguaucccc

SEQ ID NO: 982659 - RNA, 18 nt, Human
ugauauucuugucuuuag

SEQ ID NO: 982660 - RNA, 23 nt, Human
ugcauaaaaugggauaaauacuc

SEQ ID NO: 982661 - RNA, 19 nt, Human
ugcaucacugcucgaaagc

SEQ ID NO: 982662 - RNA, 18 nt, Human
ugcccaagagacucugau

SEQ ID NO: 982663 - RNA, 18 nt, Human
uggaagaaaauuaaguca

SEQ ID NO: 982664 - RNA, 20 nt, Human
ugucagcuugguuccuuccc

SEQ ID NO: 982665 - RNA, 20 nt, Human
uguccgaaaugguggcagag

SEQ ID NO: 982666 - RNA, 20 nt, Human
uguccgaaaugguggcagag

SEQ ID NO: 982667 - RNA, 18 nt, Human
uuaaacaccuagcuaccu

SEQ ID NO: 982668 - RNA, 19 nt, Human
uuacuacaguacucauuca

SEQ ID NO: 982669 - RNA, 18 nt, Human
uucaaaggguagaaugcc

SEQ ID NO: 982670 - RNA, 24 nt, Human
uucuaaagccauuuccaaaaaauc

SEQ ID NO: 982671 - RNA, 18 nt, Human
uuggaggcccccuggccu

SEQ ID NO: 982672 - RNA, 20 nt, Human
uugucugcgcacccgccccu

SEQ ID NO: 982673 - RNA, 23 nt, Human
uuuccaaaaaaucaauggcaaca

SEQ ID NO: 982674 - RNA, 25 nt, Human
aaaaaaagaaaaaucagccucaaag

SEQ ID NO: 982675 - RNA, 26 nt, Human
aaaaaagaaaaaucagccucaaagga

SEQ ID NO: 982676 - RNA, 24 nt, Human
aaaugacacuccucccuccacccu

SEQ ID NO: 982677 - RNA, 25 nt, Human
aagcacccccucggccccugccucc

SEQ ID NO: 982678 - RNA, 18 nt, Human
acacuccucccuccaccc

SEQ ID NO: 982679 - RNA, 18 nt, Human
acagagcggccgacaccc

SEQ ID NO: 982680 - RNA, 23 nt, Human
acagcaccagaggcugcugcacc

SEQ ID NO: 982681 - RNA, 25 nt, Human
accccugagaccccacggccccagg

SEQ ID NO: 982682 - RNA, 20 nt, Human
acuuaaaaaaaagaaaaauc

SEQ ID NO: 982683 - RNA, 27 nt, Human
agaaaugacacuccucccuccacccuc

SEQ ID NO: 982684 - RNA, 23 nt, Human
agaauccugcgugugacaucccc

SEQ ID NO: 982685 - RNA, 22 nt, Human
agcacccccucggccccugccu

SEQ ID NO: 982686 - RNA, 19 nt, Human
agcucugggggcccugccu

SEQ ID NO: 982687 - RNA, 21 nt, Human
aggggccacucccuuggacag

SEQ ID NO: 982688 - RNA, 24 nt, Human
auaagguuucccccaagugggcag

SEQ ID NO: 982689 - RNA, 23 nt, Human
caaggccccacacaagaaacuga

SEQ ID NO: 982690 - RNA, 18 nt, Human
cacccccucggccccugc

SEQ ID NO: 982691 - RNA, 24 nt, Human
caccucccccacaacagagcggcc

SEQ ID NO: 982692 - RNA, 19 nt, Human
cacuccucccuccacccuc

SEQ ID NO: 982693 - RNA, 25 nt, Human
cacuccucccuccacccucgccaag

SEQ ID NO: 982694 - RNA, 26 nt, Human
cacuguguggcccagcucugggggcu

SEQ ID NO: 982695 - RNA, 20 nt, Human
cagaauucaccaggcacccc

SEQ ID NO: 982696 - RNA, 22 nt, Human
cagcaccagaggcugcugcacc

SEQ ID NO: 982697 - RNA, 24 nt, Human
cagcaccagaggcugcugcaccag

SEQ ID NO: 982698 - RNA, 25 nt, Human
cagcaccagaggcugcugcaccaga

SEQ ID NO: 982699 - RNA, 20 nt, Human
caggaguccaugucaggcag

SEQ ID NO: 982700 - RNA, 22 nt, Human
ccacucuuccuuuuugcucgcc

SEQ ID NO: 982701 - RNA, 24 nt, Human
ccagcccagacaguacaauggcuc

SEQ ID NO: 982702 - RNA, 22 nt, Human
ccaggcaccccugagaccccac

SEQ ID NO: 982703 - RNA, 19 nt, Human
cccacacaagaaacugaau

SEQ ID NO: 982704 - RNA, 23 nt, Human
cccacagaauccugcgugugaca

SEQ ID NO: 982705 - RNA, 25 nt, Human
cccacagaauccugcgugugacauc

SEQ ID NO: 982706 - RNA, 18 nt, Human
cccacucuuccuuuuugc

SEQ ID NO: 982707 - RNA, 19 nt, Human
cccacucuuccuuuuugcu

SEQ ID NO: 982708 - RNA, 18 nt, Human
cccagcacccacugugug

SEQ ID NO: 982709 - RNA, 21 nt, Human
cccagcacccacuguguggcc

SEQ ID NO: 982710 - RNA, 18 nt, Human
ccccaagugggcaggagu

SEQ ID NO: 982711 - RNA, 21 nt, Human
ccccacggccccaggggucuc

SEQ ID NO: 982712 - RNA, 21 nt, Human
cccccaagugggcaggagucc

SEQ ID NO: 982713 - RNA, 23 nt, Human
cccccaagugggcaggaguccau

SEQ ID NO: 982714 - RNA, 24 nt, Human
cccccacaacagagcggccgacac

SEQ ID NO: 982715 - RNA, 22 nt, Human
cccccucggccccugccuccuc

SEQ ID NO: 982716 - RNA, 18 nt, Human
ccccuccuccucccacuc

SEQ ID NO: 982717 - RNA, 20 nt, Human
ccccuccuccucccacucuu

SEQ ID NO: 982718 - RNA, 19 nt, Human
ccccucggccccugccucc

SEQ ID NO: 982719 - RNA, 19 nt, Human
ccccucuuccuccuccucc

SEQ ID NO: 982720 - RNA, 22 nt, Human
ccccugagaccccacggcccca

SEQ ID NO: 982721 - RNA, 25 nt, Human
ccccugccuccucuccacccuucuc

SEQ ID NO: 982722 - RNA, 18 nt, Human
ccccuuggacuccucucc

SEQ ID NO: 982723 - RNA, 21 nt, Human
cccugccuugcccugccccuc

SEQ ID NO: 982724 - RNA, 19 nt, Human
ccguuccgcgaacacacac

SEQ ID NO: 982725 - RNA, 20 nt, Human
ccucacauggagaagccagg

SEQ ID NO: 982726 - RNA, 22 nt, Human
ccucccugguucaccuccccca

SEQ ID NO: 982727 - RNA, 22 nt, Human
ccuccucuuccuccuucgccgc

SEQ ID NO: 982728 - RNA, 24 nt, Human
ccuccucuuccuccuucgccgcuu

SEQ ID NO: 982729 - RNA, 19 nt, Human
ccucggccccugccuccuc

SEQ ID NO: 982730 - RNA, 19 nt, Human
ccugccuccucuccacccu

SEQ ID NO: 982731 - RNA, 23 nt, Human
ccuuugugcuccccucuuccucc

SEQ ID NO: 982732 - RNA, 26 nt, Human
cgaggcucuuuucucucucucuuuuc

SEQ ID NO: 982733 - RNA, 22 nt, Human
cgccaggacgcagcuuuaccaa

SEQ ID NO: 982734 - RNA, 26 nt, Human
cgccgcuuccccuccuccucccacuc

SEQ ID NO: 982735 - RNA, 18 nt, Human
cggccccugccuccucuc

SEQ ID NO: 982736 - RNA, 21 nt, Human
cuccccucuuccuccuccucc

SEQ ID NO: 982737 - RNA, 20 nt, Human
cuccucccuccacccucgcc

SEQ ID NO: 982738 - RNA, 24 nt, Human
cuccuguccuggaauccagccgcc

SEQ ID NO: 982739 - RNA, 21 nt, Human
cucucucucucucucucugcc

SEQ ID NO: 982740 - RNA, 19 nt, Human
cucugccuuuauuuguccc

SEQ ID NO: 982741 - RNA, 19 nt, Human
cugcgugugacaucccccc

SEQ ID NO: 982742 - RNA, 21 nt, Human
cuuccuuuuugcucgccuuuu

SEQ ID NO: 982743 - RNA, 20 nt, Human
cuucuuuccuuucccauccc

SEQ ID NO: 982744 - RNA, 20 nt, Human
cuuuauuuguccccuuggac

SEQ ID NO: 982745 - RNA, 23 nt, Human
gaccccacggccccaggggucuc

SEQ ID NO: 982746 - RNA, 18 nt, Human
gagaagccagguuuccag

SEQ ID NO: 982747 - RNA, 19 nt, Human
gauaacgaaauccuaaggg

SEQ ID NO: 982748 - RNA, 22 nt, Human
gcccagcacccacuguguggcc

SEQ ID NO: 982749 - RNA, 22 nt, Human
gcucuuuucucucucucuuuuc

SEQ ID NO: 982750 - RNA, 19 nt, Human
ggcgaggcccagcacccac

SEQ ID NO: 982751 - RNA, 23 nt, Human
gggccacucccuuggacaguguc

SEQ ID NO: 982752 - RNA, 22 nt, Human
ggggcgaggcccagcacccacu

SEQ ID NO: 982753 - RNA, 19 nt, Human
gggggcccugccuugcccu

SEQ ID NO: 982754 - RNA, 21 nt, Human
uaaaaaaaagaaaaaucagcc

SEQ ID NO: 982755 - RNA, 21 nt, Human
uaagugcagaauucaccaggc

SEQ ID NO: 982756 - RNA, 18 nt, Human
uagaacuuaaaaaaaaga

SEQ ID NO: 982757 - RNA, 18 nt, Human
uagauauaacuggauaaa

SEQ ID NO: 982758 - RNA, 22 nt, Human
ucaccaggcaccccugagaccc

SEQ ID NO: 982759 - RNA, 24 nt, Human
ucauaggggccacucccuuggaca

SEQ ID NO: 982760 - RNA, 20 nt, Human
uccacaguccccacagaauc

SEQ ID NO: 982761 - RNA, 19 nt, Human
ucccccacaacagagcggc

SEQ ID NO: 982762 - RNA, 24 nt, Human
ucccccccagcccagacaguacaa

SEQ ID NO: 982763 - RNA, 21 nt, Human
uccccucuuccuccuccuccu

SEQ ID NO: 982764 - RNA, 22 nt, Human
ucccugguucaccucccccaca

SEQ ID NO: 982765 - RNA, 19 nt, Human
ucccuuagagauuuucagc

SEQ ID NO: 982766 - RNA, 24 nt, Human
uccgcgaacacacaccucgaugaa

SEQ ID NO: 982767 - RNA, 18 nt, Human
uccuccuccuccucuucc

SEQ ID NO: 982768 - RNA, 22 nt, Human
uccuccucuuccuccuucgccg

SEQ ID NO: 982769 - RNA, 24 nt, Human
uccuuuuugcucgccuuuucccuu

SEQ ID NO: 982770 - RNA, 22 nt, Human
ucgccgcuuccccuccuccucc

SEQ ID NO: 982771 - RNA, 19 nt, Human
ucgccuuuucccuccuccu

SEQ ID NO: 982772 - RNA, 21 nt, Human
ucucucuuuucuuccucuccc

SEQ ID NO: 982773 - RNA, 21 nt, Human
ucuuccuccuccuccucuucc

SEQ ID NO: 982774 - RNA, 23 nt, Human
ucuuuucuuccucucccucucuc

SEQ ID NO: 982775 - RNA, 21 nt, Human
ugaaccgcaaggccccacaca

SEQ ID NO: 982776 - RNA, 25 nt, Human
ugaagcagugguuaaaauauaaacc

SEQ ID NO: 982777 - RNA, 27 nt, Human
ugagaccccacggccccaggggucucc

SEQ ID NO: 982778 - RNA, 18 nt, Human
ugcccugccccucccugg

SEQ ID NO: 982779 - RNA, 22 nt, Human
ugcccugccccucccugguuca

SEQ ID NO: 982780 - RNA, 18 nt, Human
uggaaucgccaggacgca

SEQ ID NO: 982781 - RNA, 18 nt, Human
uggauaaauaaaaaaagu

SEQ ID NO: 982782 - RNA, 22 nt, Human
uggcccagcucugggggcccug

SEQ ID NO: 982783 - RNA, 22 nt, Human
uguaaaaggucagcauuuccug

SEQ ID NO: 982784 - RNA, 25 nt, Human
uucaccaggcaccccugagacccca

SEQ ID NO: 982785 - RNA, 19 nt, Human
uuccuccuucgccgcuucc

SEQ ID NO: 982786 - RNA, 24 nt, Human
uugcccugccccucccugguucaa

SEQ ID NO: 982787 - RNA, 24 nt, Human
uuugcucgccuuuucccuccuccu

SEQ ID NO: 982788 - RNA, 18 nt, Human
uuuugcucgccuuuuccc

SEQ ID NO: 982789 - RNA, 18 nt, Human
uuuuuuuaaacccccuuu

SEQ ID NO: 982790 - RNA, 19 nt, Human
uuuuuuuuuuuuaaacccc

SEQ ID NO: 982791 - RNA, 20 nt, Human
cacacagcaaggggcgggag

SEQ ID NO: 982792 - RNA, 19 nt, Human
cagggccuggauugagccc

SEQ ID NO: 982793 - RNA, 21 nt, Human
ccuggauugagcccacacagc

SEQ ID NO: 982794 - RNA, 24 nt, Human
ggaaacauguuaacagggccugga

SEQ ID NO: 982795 - RNA, 26 nt, Human
uaacucccaauguuggguuucccucc

SEQ ID NO: 982796 - RNA, 28 nt, Human
uauuuuauuggagaugagcaggggaggc

SEQ ID NO: 982797 - RNA, 22 nt, Human
aaaagcuuuuggccacuugaga

SEQ ID NO: 982798 - RNA, 18 nt, Human
aagcaaagcgcucagugc

SEQ ID NO: 982799 - RNA, 20 nt, Human
accuggacugcugucugauc

SEQ ID NO: 982800 - RNA, 24 nt, Human
agccaaaaaaaaaaaaaauggucc

SEQ ID NO: 982801 - RNA, 22 nt, Human
caaaaaaaaaaaaaauggucca

SEQ ID NO: 982802 - RNA, 22 nt, Human
caacuaacccccaucaagugcc

SEQ ID NO: 982803 - RNA, 21 nt, Human
caagugccagacccucccagu

SEQ ID NO: 982804 - RNA, 24 nt, Human
cagcaaagcaguccauuuucccuu

SEQ ID NO: 982805 - RNA, 22 nt, Human
caggcaggcugccaagcaacua

SEQ ID NO: 982806 - RNA, 19 nt, Human
caggcugccaagcaacuaa

SEQ ID NO: 982807 - RNA, 19 nt, Human
ccaagcaacuaacccccau

SEQ ID NO: 982808 - RNA, 21 nt, Human
ccagccaaaaaaaaaaaaaaa

SEQ ID NO: 982809 - RNA, 27 nt, Human
cccagccaaaaaaaaaaaaaauggucc

SEQ ID NO: 982810 - RNA, 24 nt, Human
ccccaucaagugccagacccuccc

SEQ ID NO: 982811 - RNA, 23 nt, Human
cccgcgagcgccccguccgcuga

SEQ ID NO: 982812 - RNA, 21 nt, Human
ccucccaguguucugagaguc

SEQ ID NO: 982813 - RNA, 20 nt, Human
cucccaguguucugagaguc

SEQ ID NO: 982814 - RNA, 21 nt, Human
cuguuggcaagggaaggugaa

SEQ ID NO: 982815 - RNA, 18 nt, Human
gcgcucagugcauugggg

SEQ ID NO: 982816 - RNA, 19 nt, Human
ggaggauuugggcuggagc

SEQ ID NO: 982817 - RNA, 19 nt, Human
uaccuggugacaucauccu

SEQ ID NO: 982818 - RNA, 20 nt, Human
uaccuggugacaucauccug

SEQ ID NO: 982819 - RNA, 23 nt, Human
ucacuuuagcaucugggguagga

SEQ ID NO: 982820 - RNA, 22 nt, Human
ucuccaugcuaaacagccugcg

SEQ ID NO: 982821 - RNA, 28 nt, Human
ucucuacccagccaaaaaaaaaaaaaaa

SEQ ID NO: 982822 - RNA, 22 nt, Human
ucuguuggcaagggaaggugaa

SEQ ID NO: 982823 - RNA, 24 nt, Human
ugaagaagcaaagcgcucagugca

SEQ ID NO: 982824 - RNA, 18 nt, Human
ugacaagguggugauaca

SEQ ID NO: 982825 - RNA, 21 nt, Human
ugccagacccucccaguguuc

SEQ ID NO: 982826 - RNA, 22 nt, Human
ugccagacccucccaguguucu

SEQ ID NO: 982827 - RNA, 24 nt, Human
ugccuuugaccuggacugcugucu

SEQ ID NO: 982828 - RNA, 18 nt, Human
uggcaagggaaggugaag

SEQ ID NO: 982829 - RNA, 19 nt, Human
ugggguaggaugugccacc

SEQ ID NO: 982830 - RNA, 24 nt, Human
uuaccuggugacaucauccuguug

SEQ ID NO: 982831 - RNA, 22 nt, Human
uuugccuuugaccuggacugcu

SEQ ID NO: 982832 - RNA, 22 nt, Human
aaaaggccagcauaguacagug

SEQ ID NO: 982833 - RNA, 24 nt, Human
aaguaugaacaaaauuagaacugg

SEQ ID NO: 982834 - RNA, 24 nt, Human
aagugccaaaagcaaaaccaagga

SEQ ID NO: 982835 - RNA, 22 nt, Human
acaccugcccaggcuuccacag

SEQ ID NO: 982836 - RNA, 22 nt, Human
accccaucccacaaaauccaca

SEQ ID NO: 982837 - RNA, 19 nt, Human
agcuacacaacucaaagag

SEQ ID NO: 982838 - RNA, 22 nt, Human
aggggugggguagaaaagagga

SEQ ID NO: 982839 - RNA, 22 nt, Human
agguucuuucccacuccccacc

SEQ ID NO: 982840 - RNA, 23 nt, Human
agguucuuucccacuccccaccc

SEQ ID NO: 982841 - RNA, 24 nt, Human
agugccaaaagcaaaaccaaggaa

SEQ ID NO: 982842 - RNA, 21 nt, Human
auggacucuccccucuaccuc

SEQ ID NO: 982843 - RNA, 26 nt, Human
auggagcagggcuaacccauagagaa

SEQ ID NO: 982844 - RNA, 23 nt, Human
caaacaggaagccugcggcuuau

SEQ ID NO: 982845 - RNA, 21 nt, Human
cacaaaauccacaaucucaga

SEQ ID NO: 982846 - RNA, 20 nt, Human
cacagugcagccugccaggc

SEQ ID NO: 982847 - RNA, 21 nt, Human
cacccaggcagagccaggagc

SEQ ID NO: 982848 - RNA, 26 nt, Human
caccccaucccacaaaauccacaauc

SEQ ID NO: 982849 - RNA, 27 nt, Human
cagaaauacuaccacgacuucuacuau

SEQ ID NO: 982850 - RNA, 18 nt, Human
cagagaagugccaaaagc

SEQ ID NO: 982851 - RNA, 23 nt, Human
ccagaagccucugcuccauuuug

SEQ ID NO: 982852 - RNA, 22 nt, Human
ccaucccacaaaauccacaauc

SEQ ID NO: 982853 - RNA, 22 nt, Human
ccccaucccacaaaauccacaa

SEQ ID NO: 982854 - RNA, 19 nt, Human
ccucaccccaucccacaaa

SEQ ID NO: 982855 - RNA, 22 nt, Human
ccugccaggccagcagcaaacu

SEQ ID NO: 982856 - RNA, 23 nt, Human
ccuggcuauaguaaaugauccca

SEQ ID NO: 982857 - RNA, 20 nt, Human
cuaaaucucaguuagcuaaa

SEQ ID NO: 982858 - RNA, 21 nt, Human
cuaacuagugcuggcccagaa

SEQ ID NO: 982859 - RNA, 23 nt, Human
cucaaagagucaaaccagagcag

SEQ ID NO: 982860 - RNA, 28 nt, Human
cuccccucuaccucaccccaucccacaa

SEQ ID NO: 982861 - RNA, 24 nt, Human
cugccaggccagcagcaaacuaac

SEQ ID NO: 982862 - RNA, 18 nt, Human
cugcccaggcuuccacag

SEQ ID NO: 982863 - RNA, 20 nt, Human
cuguguggaauucugucuau

SEQ ID NO: 982864 - RNA, 21 nt, Human
cuuuggcuaaaaacaaaccuu

SEQ ID NO: 982865 - RNA, 27 nt, Human
cuuuucagacccacccaggcagagcca

SEQ ID NO: 982866 - RNA, 21 nt, Human
gaaucaaauguaagucaguau

SEQ ID NO: 982867 - RNA, 23 nt, Human
gacaugguggaaguacuuuuccu

SEQ ID NO: 982868 - RNA, 18 nt, Human
gacugcuccuuauggagc

SEQ ID NO: 982869 - RNA, 19 nt, Human
gacuguuccaaacucuccc

SEQ ID NO: 982870 - RNA, 21 nt, Human
gaggaaaaggccagcauagua

SEQ ID NO: 982871 - RNA, 22 nt, Human
gagucacagggagcugaggaua

SEQ ID NO: 982872 - RNA, 19 nt, Human
gcagccugccaggccagca

SEQ ID NO: 982873 - RNA, 18 nt, Human
gccccaggaaggccugcu

SEQ ID NO: 982874 - RNA, 22 nt, Human
gccugagcaguuccaacuaucc

SEQ ID NO: 982875 - RNA, 19 nt, Human
gcuggggccuuuuucuccc

SEQ ID NO: 982876 - RNA, 20 nt, Human
gcuuccccuucccaccauga

SEQ ID NO: 982877 - RNA, 19 nt, Human
gcuuuaaagaacuucaaca

SEQ ID NO: 982878 - RNA, 18 nt, Human
ggaaguacuuuuccuggc

SEQ ID NO: 982879 - RNA, 19 nt, Human
ggagcucccuacaagggcu

SEQ ID NO: 982880 - RNA, 19 nt, Human
ggagucacagggagcugag

SEQ ID NO: 982881 - RNA, 24 nt, Human
ggccugcuuagggaucuggaguca

SEQ ID NO: 982882 - RNA, 20 nt, Human
ggcuuauccagguggggaca

SEQ ID NO: 982883 - RNA, 23 nt, Human
ggucgguggggaggucccaaggu

SEQ ID NO: 982884 - RNA, 27 nt, Human
uaaaaaaggggcuaaugcuaaaucuca

SEQ ID NO: 982885 - RNA, 19 nt, Human
uaaagaacuucaacacagg

SEQ ID NO: 982886 - RNA, 18 nt, Human
uaacccauagaguagccc

SEQ ID NO: 982887 - RNA, 19 nt, Human
uaacccauagaguagcccu

SEQ ID NO: 982888 - RNA, 23 nt, Human
uaacuagugcuggcccagaagcc

SEQ ID NO: 982889 - RNA, 21 nt, Human
uacacaacucaaagagucaaa

SEQ ID NO: 982890 - RNA, 18 nt, Human
uagcacauggcagagccu

SEQ ID NO: 982891 - RNA, 24 nt, Human
uagcacauggcagagccuagaauc

SEQ ID NO: 982892 - RNA, 21 nt, Human
uagguguuucugacugcauuu

SEQ ID NO: 982893 - RNA, 19 nt, Human
uagguucuuucccacuccc

SEQ ID NO: 982894 - RNA, 18 nt, Human
ucaaucucacugccugau

SEQ ID NO: 982895 - RNA, 18 nt, Human
ucaaucucacugccugau

SEQ ID NO: 982896 - RNA, 19 nt, Human
ucaaucucacugccugaug

SEQ ID NO: 982897 - RNA, 18 nt, Human
ucaggccaggccccagga

SEQ ID NO: 982898 - RNA, 22 nt, Human
uccacaaucucagagcugugca

SEQ ID NO: 982899 - RNA, 20 nt, Human
ucccaagguuugaaguggga

SEQ ID NO: 982900 - RNA, 19 nt, Human
ucccacuccccacccagga

SEQ ID NO: 982901 - RNA, 26 nt, Human
ucccacuccccacccaggaguaagga

SEQ ID NO: 982902 - RNA, 22 nt, Human
ucuggguauugagguuucacua

SEQ ID NO: 982903 - RNA, 20 nt, Human
ugaacaaaauuagaacuggg

SEQ ID NO: 982904 - RNA, 22 nt, Human
ugacaugaaucaaauguaaguc

SEQ ID NO: 982905 - RNA, 19 nt, Human
ugaccccuuagagacuccu

SEQ ID NO: 982906 - RNA, 21 nt, Human
ugacucccaagcuacacaacu

SEQ ID NO: 982907 - RNA, 21 nt, Human
ugagccagaggaaaaggccag

SEQ ID NO: 982908 - RNA, 20 nt, Human
ugagccagaggaaaaggccg

SEQ ID NO: 982909 - RNA, 21 nt, Human
ugcagaagaaaccagaagcuu

SEQ ID NO: 982910 - RNA, 19 nt, Human
ugcauuugagggcuauuuu

SEQ ID NO: 982911 - RNA, 26 nt, Human
ugccagggacuguuccaaacucuccc

SEQ ID NO: 982912 - RNA, 19 nt, Human
ugccaugcucuccauagag

SEQ ID NO: 982913 - RNA, 27 nt, Human
ugccaugcucuccauagaggcaauaua

SEQ ID NO: 982914 - RNA, 21 nt, Human
ugcuuuggcuaaaaacaaacc

SEQ ID NO: 982915 - RNA, 23 nt, Human
uggagcagggcuaacccauagag

SEQ ID NO: 982916 - RNA, 21 nt, Human
ugggguagaaaagaggaagcu

SEQ ID NO: 982917 - RNA, 19 nt, Human
ugucuugcguauuuccuuc

SEQ ID NO: 982918 - RNA, 24 nt, Human
ugugcagaagaaaccagaagcuuc

SEQ ID NO: 982919 - RNA, 21 nt, Human
uucacuaagaauucuaggugu

SEQ ID NO: 982920 - RNA, 19 nt, Human
uucaggccaggccccagga

SEQ ID NO: 982921 - RNA, 25 nt, Human
uuccaggcccacagcugcagccugc

SEQ ID NO: 982922 - RNA, 23 nt, Human
uuucagacccacccaggcagagc

SEQ ID NO: 982923 - RNA, 19 nt, Human
uuuuccaggcccacagcug

SEQ ID NO: 982924 - RNA, 24 nt, Human
aaaaaaaaaaaaaaaaagguggga

SEQ ID NO: 982925 - RNA, 27 nt, Human
aaaaaaaaaaaaaaggugggaggguag

SEQ ID NO: 982926 - RNA, 21 nt, Human
aaaaaaaaaaaggugggaggg

SEQ ID NO: 982927 - RNA, 23 nt, Human
aaaaaaagguggggaguggaggg

SEQ ID NO: 982928 - RNA, 25 nt, Human
aaacugucucauuucaaugauuuuu

SEQ ID NO: 982929 - RNA, 27 nt, Human
aacaaaagcuacccuuauacaacccac

SEQ ID NO: 982930 - RNA, 23 nt, Human
aacaacaaaagcuacccuuauac

SEQ ID NO: 982931 - RNA, 20 nt, Human
aacagcuuucaacccugugu

SEQ ID NO: 982932 - RNA, 18 nt, Human
aacuaagcaacaagacag

SEQ ID NO: 982933 - RNA, 23 nt, Human
aaugcacaugcuccccugaaagg

SEQ ID NO: 982934 - RNA, 23 nt, Human
acaaagcagaaauaaauaggcag

SEQ ID NO: 982935 - RNA, 21 nt, Human
acaagaaauuuuugcaagccc

SEQ ID NO: 982936 - RNA, 21 nt, Human
acccuuuucaguucuuuaugc

SEQ ID NO: 982937 - RNA, 24 nt, Human
acuccagaacccuuuucaguucuu

SEQ ID NO: 982938 - RNA, 21 nt, Human
acugaaaacagcccacagucu

SEQ ID NO: 982939 - RNA, 19 nt, Human
agaugccacuugaacauga

SEQ ID NO: 982940 - RNA, 21 nt, Human
agccuccuccacucuaagcag

SEQ ID NO: 982941 - RNA, 22 nt, Human
agguggggaguggagggugggg

SEQ ID NO: 982942 - RNA, 18 nt, Human
agucacuuaaauaagcag

SEQ ID NO: 982943 - RNA, 21 nt, Human
aguuucaacucuuccacuugc

SEQ ID NO: 982944 - RNA, 23 nt, Human
auaaauaucagccaauauaaaua

SEQ ID NO: 982945 - RNA, 21 nt, Human
auaagcagaaacucccuagau

SEQ ID NO: 982946 - RNA, 23 nt, Human
auauacaucacugagaacaaagc

SEQ ID NO: 982947 - RNA, 21 nt, Human
caaaaaucagcacaaucccac

SEQ ID NO: 982948 - RNA, 23 nt, Human
caacaagacagcuuacacagcuc

SEQ ID NO: 982949 - RNA, 23 nt, Human
caacauaaagcaguaaauauccc

SEQ ID NO: 982950 - RNA, 25 nt, Human
caacauaaagcaguaaauaucccuu

SEQ ID NO: 982951 - RNA, 18 nt, Human
caauugccugaaucccca

SEQ ID NO: 982952 - RNA, 21 nt, Human
cacaacuuuuccccucuccaa

SEQ ID NO: 982953 - RNA, 19 nt, Human
caccaaccccagcucccgc

SEQ ID NO: 982954 - RNA, 21 nt, Human
cagcacaaucccacacaauaa

SEQ ID NO: 982955 - RNA, 19 nt, Human
cagcagugccggcccccag

SEQ ID NO: 982956 - RNA, 23 nt, Human
cagcagugggccuugcuaacagc

SEQ ID NO: 982957 - RNA, 19 nt, Human
cagcgccgccgccgcagca

SEQ ID NO: 982958 - RNA, 20 nt, Human
cagcgccgccgccgcagcag

SEQ ID NO: 982959 - RNA, 25 nt, Human
caguaaaucacagugaaagcccugg

SEQ ID NO: 982960 - RNA, 24 nt, Human
cauauacaucacugagaacaaagc

SEQ ID NO: 982961 - RNA, 23 nt, Human
cauccccccgcccccuccggccc

SEQ ID NO: 982962 - RNA, 19 nt, Human
cauuuuauaaacucuauac

SEQ ID NO: 982963 - RNA, 28 nt, Human
ccaaacaccaaccccagcucccgcgccu

SEQ ID NO: 982964 - RNA, 27 nt, Human
ccaaacauccaucugcauugcaguaac

SEQ ID NO: 982965 - RNA, 26 nt, Human
cccacagucucuuuggccagccuccu

SEQ ID NO: 982966 - RNA, 26 nt, Human
ccccauauccccccaccucggcuuaa

SEQ ID NO: 982967 - RNA, 19 nt, Human
ccccgcccccuccggcccg

SEQ ID NO: 982968 - RNA, 19 nt, Human
cccgcgccgccgccgccgc

SEQ ID NO: 982969 - RNA, 18 nt, Human
cccggcugcguucauugg

SEQ ID NO: 982970 - RNA, 21 nt, Human
ccgcccccgccgccucagaca

SEQ ID NO: 982971 - RNA, 21 nt, Human
ccgcccccuccggcccgcgcu

SEQ ID NO: 982972 - RNA, 18 nt, Human
ccgccgccgccgcggcgc

SEQ ID NO: 982973 - RNA, 23 nt, Human
ccgccggcgacuccuccggccgc

SEQ ID NO: 982974 - RNA, 22 nt, Human
ccgccucagacacgggcucccg

SEQ ID NO: 982975 - RNA, 18 nt, Human
ccgcgccgccgccgccgc

SEQ ID NO: 982976 - RNA, 18 nt, Human
ccgcgcuggucguaguac

SEQ ID NO: 982977 - RNA, 20 nt, Human
ccggcccccagcugguccug

SEQ ID NO: 982978 - RNA, 27 nt, Human
ccgguuauuuaaaaaaaaaaaaaaaaa

SEQ ID NO: 982979 - RNA, 26 nt, Human
ccugaauccccauauccccccaccuc

SEQ ID NO: 982980 - RNA, 21 nt, Human
ccuugcuaacagcuccuccca

SEQ ID NO: 982981 - RNA, 19 nt, Human
cgagaccgggauccgcugc

SEQ ID NO: 982982 - RNA, 19 nt, Human
cgccccggccgccugcagc

SEQ ID NO: 982983 - RNA, 18 nt, Human
cgccgccgccgccgcggc

SEQ ID NO: 982984 - RNA, 24 nt, Human
cgccgccgccgccgcggcgcaucc

SEQ ID NO: 982985 - RNA, 19 nt, Human
cgccugcagcucgccggcu

SEQ ID NO: 982986 - RNA, 21 nt, Human
cgcggcgcauccccccgcccc

SEQ ID NO: 982987 - RNA, 24 nt, Human
cgcugcucuggcgccgccaaacac

SEQ ID NO: 982988 - RNA, 21 nt, Human
cggcccccagcugguccugcu

SEQ ID NO: 982989 - RNA, 19 nt, Human
cggccgcccccgccgccuc

SEQ ID NO: 982990 - RNA, 21 nt, Human
cggccuccggagcucugaucc

SEQ ID NO: 982991 - RNA, 22 nt, Human
cggccuccggagcucugauccc

SEQ ID NO: 982992 - RNA, 21 nt, Human
cggcgcauccccccgcccccu

SEQ ID NO: 982993 - RNA, 23 nt, Human
cggugcacgacacccgcgcugcu

SEQ ID NO: 982994 - RNA, 19 nt, Human
cucgcacauucgcucgcau

SEQ ID NO: 982995 - RNA, 22 nt, Human
cucuaagcagcagugccggccc

SEQ ID NO: 982996 - RNA, 19 nt, Human
cugcggcgagaccgggauc

SEQ ID NO: 982997 - RNA, 24 nt, Human
cuguagcuuuccaaaacucaauaa

SEQ ID NO: 982998 - RNA, 23 nt, Human
cuuuaugcacaacuuuuccccuc

SEQ ID NO: 982999 - RNA, 21 nt, Human
cuuuuccacaguacacauuuu

SEQ ID NO: 983000 - RNA, 19 nt, Human
gaaaacaguccccuaucca

SEQ ID NO: 983001 - RNA, 19 nt, Human
gaaagcgcagcggcgcccc

SEQ ID NO: 983002 - RNA, 19 nt, Human
gaaauagaaggauaaaguu

SEQ ID NO: 983003 - RNA, 19 nt, Human
gaaauuuuugcaagcccau

SEQ ID NO: 983004 - RNA, 21 nt, Human
gaauccccauauccccccacc

SEQ ID NO: 983005 - RNA, 19 nt, Human
gagacaucaggaaauuguu

SEQ ID NO: 983006 - RNA, 24 nt, Human
gaugaaggcgccgaggagaagccg

SEQ ID NO: 983007 - RNA, 22 nt, Human
gcacaacuuuuccccucuccaa

SEQ ID NO: 983008 - RNA, 18 nt, Human
gcagcagccagccccacg

SEQ ID NO: 983009 - RNA, 19 nt, Human
gcagcggcgccccggccgc

SEQ ID NO: 983010 - RNA, 22 nt, Human
gccagccuggucccaucggcac

SEQ ID NO: 983011 - RNA, 21 nt, Human
gccgaggagaagccgggugaa

SEQ ID NO: 983012 - RNA, 22 nt, Human
gccuugcuaacagcuccuccca

SEQ ID NO: 983013 - RNA, 20 nt, Human
gcgccaccaccgccgccggg

SEQ ID NO: 983014 - RNA, 23 nt, Human
gcgccgccaaacaccaaccccag

SEQ ID NO: 983015 - RNA, 22 nt, Human
ggaaaacaguagugcaauuacg

SEQ ID NO: 983016 - RNA, 20 nt, Human
ggagcagcagugggccuugc

SEQ ID NO: 983017 - RNA, 19 nt, Human
gguccugcuccagagcucc

SEQ ID NO: 983018 - RNA, 21 nt, Human
gguuauuuaaaaaaaaaaaaa

SEQ ID NO: 983019 - RNA, 24 nt, Human
gucucuuuggccagccuccuccac

SEQ ID NO: 983020 - RNA, 19 nt, Human
uaaaaacccauuuugaucu

SEQ ID NO: 983021 - RNA, 21 nt, Human
uaaauaggcagaaaugacugu

SEQ ID NO: 983022 - RNA, 23 nt, Human
uaagcagaaacucccuagauguu

SEQ ID NO: 983023 - RNA, 19 nt, Human
uaagcagcagugccggccc

SEQ ID NO: 983024 - RNA, 18 nt, Human
uaaggaaaauauugcuuu

SEQ ID NO: 983025 - RNA, 22 nt, Human
uaucaacaaaaaucagcacaau

SEQ ID NO: 983026 - RNA, 23 nt, Human
uauuaucuuuuccacaguacaca

SEQ ID NO: 983027 - RNA, 18 nt, Human
ucaacaaaaaucagcaca

SEQ ID NO: 983028 - RNA, 19 nt, Human
ucagcacaaucccacacaa

SEQ ID NO: 983029 - RNA, 20 nt, Human
ucccacacaauaaugucuuc

SEQ ID NO: 983030 - RNA, 18 nt, Human
ucccgcgccgccgccgcc

SEQ ID NO: 983031 - RNA, 24 nt, Human
uccgccgggacgccucccuccccu

SEQ ID NO: 983032 - RNA, 25 nt, Human
uccgccgggacgccucccuccccuc

SEQ ID NO: 983033 - RNA, 27 nt, Human
ucgcacauucgcucgcauaccaauccc

SEQ ID NO: 983034 - RNA, 18 nt, Human
ucggcaccggcggccucc

SEQ ID NO: 983035 - RNA, 20 nt, Human
ugaaaacaguccccuaucca

SEQ ID NO: 983036 - RNA, 23 nt, Human
ugaauccccauauccccccaccu

SEQ ID NO: 983037 - RNA, 19 nt, Human
ugaaugaacacuccagaac

SEQ ID NO: 983038 - RNA, 23 nt, Human
ugaauuuacaaauguguauacug

SEQ ID NO: 983039 - RNA, 18 nt, Human
ugacugaaaacagcccac

SEQ ID NO: 983040 - RNA, 19 nt, Human
ugacugaaaacagcccaca

SEQ ID NO: 983041 - RNA, 22 nt, Human
ugcaaaacgcuauguucauuuc

SEQ ID NO: 983042 - RNA, 22 nt, Human
ugcggcgagaccgggauccgcu

SEQ ID NO: 983043 - RNA, 22 nt, Human
ugcuccagagcucccuucucac

SEQ ID NO: 983044 - RNA, 24 nt, Human
ugcugcggcgagaccgggauccgc

SEQ ID NO: 983045 - RNA, 19 nt, Human
uggagggugggggauaaua

SEQ ID NO: 983046 - RNA, 19 nt, Human
uggggaguggagggugggg

SEQ ID NO: 983047 - RNA, 20 nt, Human
uggggaguggaggguggggg

SEQ ID NO: 983048 - RNA, 21 nt, Human
uucaacccuguguuccucaac

SEQ ID NO: 983049 - RNA, 23 nt, Human
uuccuaaaauuaaaccaaaaaaa

SEQ ID NO: 983050 - RNA, 23 nt, Human
uuuaaaaaaaaaaaaaaaaaggu

SEQ ID NO: 983051 - RNA, 27 nt, Human
uuuaaaaaaaaaaaaaaaaagguggga

SEQ ID NO: 983052 - RNA, 20 nt, Human
uuuacauuucaaacuacaua

SEQ ID NO: 983053 - RNA, 24 nt, Human
uuucaacccuguguuccucaaccc

SEQ ID NO: 983054 - RNA, 23 nt, Human
uuugcaagcccaugcuggcuuac

SEQ ID NO: 983055 - RNA, 18 nt, Human
uuugcaguuauucaaagu

SEQ ID NO: 983056 - RNA, 20 nt, Human
uuugcaguuauucaaagugu

SEQ ID NO: 983057 - RNA, 20 nt, Human
uuuuuuuuuuuccagucugg

SEQ ID NO: 983058 - RNA, 19 nt, Human
aaacauacacaaaaauaca

SEQ ID NO: 983059 - RNA, 24 nt, Human
aaauauugagaauauuagugaacu

SEQ ID NO: 983060 - RNA, 18 nt, Human
aacuauauagcauaaaac

SEQ ID NO: 983061 - RNA, 19 nt, Human
aacucucacaaacauacac

SEQ ID NO: 983062 - RNA, 23 nt, Human
acacaauguugcuguauuacuaa

SEQ ID NO: 983063 - RNA, 23 nt, Human
acacacacacacacacacacaca

SEQ ID NO: 983064 - RNA, 23 nt, Human
acacacacacacacacacacaca

SEQ ID NO: 983065 - RNA, 23 nt, Human
acacacacacacacacacacaca

SEQ ID NO: 983066 - RNA, 23 nt, Human
acacacacacacacacacacaca

SEQ ID NO: 983067 - RNA, 23 nt, Human
acacacacacacacacacacaca

SEQ ID NO: 983068 - RNA, 23 nt, Human
acacacacacacacacacacaca

SEQ ID NO: 983069 - RNA, 23 nt, Human
acacacacacacacacacacaca

SEQ ID NO: 983070 - RNA, 21 nt, Human
acacuacuauucucccagaac

SEQ ID NO: 983071 - RNA, 19 nt, Human
acagaacccuuuuaacaag

SEQ ID NO: 983072 - RNA, 18 nt, Human
acccagguguuguuacac

SEQ ID NO: 983073 - RNA, 21 nt, Human
acucacacacauucacauaca

SEQ ID NO: 983074 - RNA, 20 nt, Human
acuuaggucccaguuuuuuc

SEQ ID NO: 983075 - RNA, 18 nt, Human
acuuaguacuguuaauga

SEQ ID NO: 983076 - RNA, 26 nt, Human
agaaaaaaaucuucguuaacuauaaa

SEQ ID NO: 983077 - RNA, 20 nt, Human
agaguugacccagguguugu

SEQ ID NO: 983078 - RNA, 23 nt, Human
aggaaaaugggguuuuaaauaga

SEQ ID NO: 983079 - RNA, 19 nt, Human
aggaacaucuaguuguuca

SEQ ID NO: 983080 - RNA, 24 nt, Human
agucauagggcugugaguuggguu

SEQ ID NO: 983081 - RNA, 25 nt, Human
aguuuuuucuuuuuuuuucuuuuuu

SEQ ID NO: 983082 - RNA, 30 nt, Human
auagaaaaaaaucuucguuaacuauaaacc

SEQ ID NO: 983083 - RNA, 21 nt, Human
augaaguaauacucuaaaagu

SEQ ID NO: 983084 - RNA, 23 nt, Human
caaagcauuuagcauuaaauauu

SEQ ID NO: 983085 - RNA, 31 nt, Human
cacaaauacacacacacacacacacacacag

SEQ ID NO: 983086 - RNA, 18 nt, Human
cacacacacacacacaca

SEQ ID NO: 983087 - RNA, 20 nt, Human
cacacacacacacacacaca

SEQ ID NO: 983088 - RNA, 20 nt, Human
cacacacacacacacacaca

SEQ ID NO: 983089 - RNA, 20 nt, Human
cacacacacacacacacaca

SEQ ID NO: 983090 - RNA, 20 nt, Human
cacacacacacacacacaca

SEQ ID NO: 983091 - RNA, 20 nt, Human
cacacacacacacacacaca

SEQ ID NO: 983092 - RNA, 20 nt, Human
cacacacacacacacacaca

SEQ ID NO: 983093 - RNA, 20 nt, Human
cacacacacacacacacaca

SEQ ID NO: 983094 - RNA, 20 nt, Human
cacacacacacacacacaca

SEQ ID NO: 983095 - RNA, 20 nt, Human
cacacacacacacacacaca

SEQ ID NO: 983096 - RNA, 20 nt, Human
cacacacacacacacacaca

SEQ ID NO: 983097 - RNA, 22 nt, Human
cacacacacacacacacacaca

SEQ ID NO: 983098 - RNA, 22 nt, Human
cacacacacacacacacacaca

SEQ ID NO: 983099 - RNA, 26 nt, Human
cacacacacacacacacacacacaca

SEQ ID NO: 983100 - RNA, 26 nt, Human
cacacacacacacacacacacacaca

SEQ ID NO: 983101 - RNA, 26 nt, Human
cacacacacacacacacacacacaca

SEQ ID NO: 983102 - RNA, 26 nt, Human
cacacacacacacacacacacacaca

SEQ ID NO: 983103 - RNA, 26 nt, Human
cacacacacacacacacacacacaca

SEQ ID NO: 983104 - RNA, 26 nt, Human
cacacacacacacacacacacacaca

SEQ ID NO: 983105 - RNA, 26 nt, Human
cacacacacacacacacacacacacg

SEQ ID NO: 983106 - RNA, 26 nt, Human
cacacacacacacacacacacacgug

SEQ ID NO: 983107 - RNA, 26 nt, Human
cacacacacacacacacacacgugug

SEQ ID NO: 983108 - RNA, 26 nt, Human
cacacacacacacacacacgugugua

SEQ ID NO: 983109 - RNA, 26 nt, Human
cacacacacacacacacguguguaug

SEQ ID NO: 983110 - RNA, 25 nt, Human
cacacacacacacacguguguaugu

SEQ ID NO: 983111 - RNA, 20 nt, Human
cacacacacacguguguaug

SEQ ID NO: 983112 - RNA, 22 nt, Human
cagaucccuuccacuuaguacu

SEQ ID NO: 983113 - RNA, 23 nt, Human
caguauacgacaguuuacaaaau

SEQ ID NO: 983114 - RNA, 21 nt, Human
cucacaaacauacacaaaaau

SEQ ID NO: 983115 - RNA, 23 nt, Human
cugucuguaucgcauaccaaaac

SEQ ID NO: 983116 - RNA, 20 nt, Human
gaaaacagaugucuucuguc

SEQ ID NO: 983117 - RNA, 21 nt, Human
gacccagguguuguuacacag

SEQ ID NO: 983118 - RNA, 33 nt, Human
gcacacaaauacacacacacacacacacacagu

SEQ ID NO: 983119 - RNA, 23 nt, Human
gguuggggauggaguagacauug

SEQ ID NO: 983120 - RNA, 20 nt, Human
uaaaagguuuuaggugaguu

SEQ ID NO: 983121 - RNA, 20 nt, Human
uaaagaaaaugucuaggaac

SEQ ID NO: 983122 - RNA, 18 nt, Human
uaaaugcaccaaccaaag

SEQ ID NO: 983123 - RNA, 18 nt, Human
uaacaaagaauuaugaug

SEQ ID NO: 983124 - RNA, 18 nt, Human
uaaccagaacagauuuuu

SEQ ID NO: 983125 - RNA, 22 nt, Human
uaaccagaacagauuuuuauua

SEQ ID NO: 983126 - RNA, 25 nt, Human
uacacacacacacacacacacacac

SEQ ID NO: 983127 - RNA, 23 nt, Human
uacacagugucugucauccuuag

SEQ ID NO: 983128 - RNA, 23 nt, Human
uacagccaagguuguuugaugcc

SEQ ID NO: 983129 - RNA, 22 nt, Human
uaccaaaacuauauagcauaaa

SEQ ID NO: 983130 - RNA, 21 nt, Human
uagaguugaccagaggcacac

SEQ ID NO: 983131 - RNA, 18 nt, Human
uagcaagguuuauaacca

SEQ ID NO: 983132 - RNA, 21 nt, Human
uagcauaaaacuugaaccaca

SEQ ID NO: 983133 - RNA, 22 nt, Human
uagcauuaaauauugagaauau

SEQ ID NO: 983134 - RNA, 24 nt, Human
uagcauuguagaugugaguucugg

SEQ ID NO: 983135 - RNA, 24 nt, Human
uaggucccaguuuuuucuuuuuuu

SEQ ID NO: 983136 - RNA, 24 nt, Human
uauauauguguaugugaauacaca

SEQ ID NO: 983137 - RNA, 22 nt, Human
uauguauuuuucauaagaaaag

SEQ ID NO: 983138 - RNA, 18 nt, Human
uauuccauacacuacuau

SEQ ID NO: 983139 - RNA, 19 nt, Human
uccauacacuacuauucuc

SEQ ID NO: 983140 - RNA, 24 nt, Human
uccuuagaguugaccagaggcaca

SEQ ID NO: 983141 - RNA, 22 nt, Human
ugaaaaaccagucuauaaccug

SEQ ID NO: 983142 - RNA, 22 nt, Human
ugaaaucauuguuuacaugcaa

SEQ ID NO: 983143 - RNA, 23 nt, Human
ugaauaaucauugugcaucucca

SEQ ID NO: 983144 - RNA, 19 nt, Human
ugaccagaggcacacaaau

SEQ ID NO: 983145 - RNA, 23 nt, Human
uggaguuuccaagaaauccacau

SEQ ID NO: 983146 - RNA, 20 nt, Human
uguuuacaugcaaauaugua

SEQ ID NO: 983147 - RNA, 24 nt, Human
uguuugccuuuguacauauauaua

SEQ ID NO: 983148 - RNA, 21 nt, Human
uuaugcauaugcuuuuuuccu

SEQ ID NO: 983149 - RNA, 19 nt, Human
uuccugaguuuuucaaagg

SEQ ID NO: 983150 - RNA, 25 nt, Human
uuggaaccauaaagaaaaugucuag

SEQ ID NO: 983151 - RNA, 18 nt, Human
uuggauacuuaaaugcac

SEQ ID NO: 983152 - RNA, 21 nt, Human
uuucuuuuuuuuuuuggcccu

SEQ ID NO: 983153 - RNA, 19 nt, Human
uuuuucuuuuuuuuuuugg

SEQ ID NO: 983154 - RNA, 18 nt, Human
aagaaagcagaagaaaag

SEQ ID NO: 983155 - RNA, 22 nt, Human
aagcagaagaaaagaugcagga

SEQ ID NO: 983156 - RNA, 21 nt, Human
accaaccugcuuccacuuuau

SEQ ID NO: 983157 - RNA, 22 nt, Human
acccccacucaguaaguccccu

SEQ ID NO: 983158 - RNA, 21 nt, Human
agggaagaaagcagaagaaaa

SEQ ID NO: 983159 - RNA, 23 nt, Human
auggguggugauuccaaugaggg

SEQ ID NO: 983160 - RNA, 22 nt, Human
caacccccacccacccccacuc

SEQ ID NO: 983161 - RNA, 25 nt, Human
caccaguuucccuuuucccaacccc

SEQ ID NO: 983162 - RNA, 21 nt, Human
cacuaugugagcucaacaguc

SEQ ID NO: 983163 - RNA, 24 nt, Human
caguaaguccccuugcccagguuu

SEQ ID NO: 983164 - RNA, 25 nt, Human
ccaaugagggaugggaaccucuuuc

SEQ ID NO: 983165 - RNA, 23 nt, Human
ccacccacccccacucaguaagu

SEQ ID NO: 983166 - RNA, 21 nt, Human
cccaacccccacccaccccca

SEQ ID NO: 983167 - RNA, 20 nt, Human
ccccacccacccccacucag

SEQ ID NO: 983168 - RNA, 19 nt, Human
cccccacccacccccacuc

SEQ ID NO: 983169 - RNA, 21 nt, Human
ccccgcuacccccaaguguaa

SEQ ID NO: 983170 - RNA, 20 nt, Human
ccugaccccgcuacccccaa

SEQ ID NO: 983171 - RNA, 22 nt, Human
cuuccaggagaugcgcuggggg

SEQ ID NO: 983172 - RNA, 21 nt, Human
gaaccucuuuccaaggcacaa

SEQ ID NO: 983173 - RNA, 19 nt, Human
ggaagaaagcagaagaaaa

SEQ ID NO: 983174 - RNA, 20 nt, Human
gggaagaaagcagaagaaaa

SEQ ID NO: 983175 - RNA, 18 nt, Human
uacaccaaccugcuucca

SEQ ID NO: 983176 - RNA, 18 nt, Human
ucccaacccccacccacc

SEQ ID NO: 983177 - RNA, 19 nt, Human
ucccaacccccacccaccc

SEQ ID NO: 983178 - RNA, 21 nt, Human
ucccaacccccacccaccccc

SEQ ID NO: 983179 - RNA, 20 nt, Human
ugcgcugggggcccagcgga

SEQ ID NO: 983180 - RNA, 19 nt, Human
ugucucagucauccucuuc

SEQ ID NO: 983181 - RNA, 19 nt, Human
uuccaggagaugcgcuggg

SEQ ID NO: 983182 - RNA, 18 nt, Human
uucccuuuucccaacccc

SEQ ID NO: 983183 - RNA, 19 nt, Human
uuuucccaacccccacccu

SEQ ID NO: 983184 - RNA, 19 nt, Human
aaaaacacaacagaaacca

SEQ ID NO: 983185 - RNA, 23 nt, Human
aaaaacacaacagaaaccaaauc

SEQ ID NO: 983186 - RNA, 18 nt, Human
aaaaagacauuaucaaac

SEQ ID NO: 983187 - RNA, 21 nt, Human
aaaagcugacaccuaaaccca

SEQ ID NO: 983188 - RNA, 24 nt, Human
aaacacaacagaaaccaaaucaag

SEQ ID NO: 983189 - RNA, 22 nt, Human
aaacaggauguagaauucaaag

SEQ ID NO: 983190 - RNA, 21 nt, Human
aaauauuuaaugcacugagcc

SEQ ID NO: 983191 - RNA, 19 nt, Human
aagaaacucagcagaaaca

SEQ ID NO: 983192 - RNA, 22 nt, Human
aagaaacucagcagaaacaggc

SEQ ID NO: 983193 - RNA, 22 nt, Human
aagaaagugaauacaaauaucu

SEQ ID NO: 983194 - RNA, 24 nt, Human
aagugaauacaaauaucuuuguac

SEQ ID NO: 983195 - RNA, 22 nt, Human
agacuaaaauuuugccaaaaac

SEQ ID NO: 983196 - RNA, 18 nt, Human
agagugugagagagaaca

SEQ ID NO: 983197 - RNA, 21 nt, Human
aggcaaaaacacaacagaaac

SEQ ID NO: 983198 - RNA, 24 nt, Human
aggcaaaaacacaacagaaaccaa

SEQ ID NO: 983199 - RNA, 19 nt, Human
aggugccaacaucucccuu

SEQ ID NO: 983200 - RNA, 23 nt, Human
aguaagaaaauauuuaaaaaaga

SEQ ID NO: 983201 - RNA, 27 nt, Human
augcagauauagauacacauaugaaua

SEQ ID NO: 983202 - RNA, 20 nt, Human
caaaaacacaacagaaacca

SEQ ID NO: 983203 - RNA, 19 nt, Human
caaauccaaagugaaaaag

SEQ ID NO: 983204 - RNA, 24 nt, Human
caagcauggggggaggugccagga

SEQ ID NO: 983205 - RNA, 23 nt, Human
caagguaaccagaguguugauca

SEQ ID NO: 983206 - RNA, 21 nt, Human
cacuuugggacaaaagcaaua

SEQ ID NO: 983207 - RNA, 25 nt, Human
cgcccccggcuccuagugccggucc

SEQ ID NO: 983208 - RNA, 20 nt, Human
cucaaaagcugacaccuaaa

SEQ ID NO: 983209 - RNA, 21 nt, Human
cuguaccuguuaaauauccug

SEQ ID NO: 983210 - RNA, 19 nt, Human
cuucaaacacccgcucucc

SEQ ID NO: 983211 - RNA, 22 nt, Human
gaaaaauuaccaccucucuuac

SEQ ID NO: 983212 - RNA, 23 nt, Human
gacaagcauggggggaggugcca

SEQ ID NO: 983213 - RNA, 21 nt, Human
gaugagggaagcagcucaaaa

SEQ ID NO: 983214 - RNA, 26 nt, Human
gcaaaaacacaacagaaaccaaauca

SEQ ID NO: 983215 - RNA, 21 nt, Human
gcacuuuuacuuggauuuuuu

SEQ ID NO: 983216 - RNA, 22 nt, Human
ggaagcagcucaaaagcugaca

SEQ ID NO: 983217 - RNA, 19 nt, Human
gguauagagugugagagag

SEQ ID NO: 983218 - RNA, 21 nt, Human
guaaauuuuuuauggacaaag

SEQ ID NO: 983219 - RNA, 18 nt, Human
uaaagaaagugaauacaa

SEQ ID NO: 983220 - RNA, 26 nt, Human
uacaacugaacuguucaauccuaauc

SEQ ID NO: 983221 - RNA, 21 nt, Human
uacugguuauccacuuccagu

SEQ ID NO: 983222 - RNA, 26 nt, Human
uagaugucuguuuagacuaaaauuuu

SEQ ID NO: 983223 - RNA, 24 nt, Human
uaggcaaaaacacaacaaccccgg

SEQ ID NO: 983224 - RNA, 24 nt, Human
uaggcaaaaacacaacagaaacca

SEQ ID NO: 983225 - RNA, 20 nt, Human
uauccugguuggcaacuuuu

SEQ ID NO: 983226 - RNA, 25 nt, Human
ucaauccuaaucaaauaaaacuauu

SEQ ID NO: 983227 - RNA, 22 nt, Human
uccacuuccaguacauguacca

SEQ ID NO: 983228 - RNA, 22 nt, Human
uccacuuccaguacauguacca

SEQ ID NO: 983229 - RNA, 22 nt, Human
uccgcggagccuucaaacaccc

SEQ ID NO: 983230 - RNA, 25 nt, Human
ucucucucucucugcucuaggggau

SEQ ID NO: 983231 - RNA, 24 nt, Human
ugauaagaaacucagcagaaacag

SEQ ID NO: 983232 - RNA, 21 nt, Human
ugaucagaucacacugauacc

SEQ ID NO: 983233 - RNA, 18 nt, Human
ugccaaaaacaaauccaa

SEQ ID NO: 983234 - RNA, 19 nt, Human
ugccaaaaacaaauccaaa

SEQ ID NO: 983235 - RNA, 24 nt, Human
uggccagagguccauaaauaauau

SEQ ID NO: 983236 - RNA, 20 nt, Human
uggggggaggugccaggaag

SEQ ID NO: 983237 - RNA, 21 nt, Human
uggucacuguggggcauagau

SEQ ID NO: 983238 - RNA, 25 nt, Human
uguaguuuuggcacuuuuacuugga

SEQ ID NO: 983239 - RNA, 19 nt, Human
ugugaugagggaagcagcu

SEQ ID NO: 983240 - RNA, 24 nt, Human
uguugaucagaucacacugauacc

SEQ ID NO: 983241 - RNA, 18 nt, Human
uucucauucuggagaaac

SEQ ID NO: 983242 - RNA, 24 nt, Human
uugaagagaaaaaaaauuaggguu

SEQ ID NO: 983243 - RNA, 22 nt, Human
uugccaaaaacaaauccaaagu

SEQ ID NO: 983244 - RNA, 19 nt, Human
uugggacaaaguaccuccu

SEQ ID NO: 983245 - RNA, 21 nt, Human
uuugccaaaaacaaauccaaa

SEQ ID NO: 983246 - RNA, 19 nt, Human
uuuggcacuuuuacuugga

SEQ ID NO: 983247 - RNA, 19 nt, Human
acaauuuuacuuuuuguca

SEQ ID NO: 983248 - RNA, 21 nt, Human
agacaagggccgacgguugug

SEQ ID NO: 983249 - RNA, 22 nt, Human
caagggccgacgguugugaccu

SEQ ID NO: 983250 - RNA, 21 nt, Human
cagggagcuccgaacguggca

SEQ ID NO: 983251 - RNA, 22 nt, Human
cccacgccgggggccgccacaa

SEQ ID NO: 983252 - RNA, 24 nt, Human
ccgacgguugugaccuggcuucuc

SEQ ID NO: 983253 - RNA, 19 nt, Human
cuccagggggccgcugucc

SEQ ID NO: 983254 - RNA, 19 nt, Human
cucccgggacugcccccuc

SEQ ID NO: 983255 - RNA, 21 nt, Human
cucccgggacugcccccucca

SEQ ID NO: 983256 - RNA, 22 nt, Human
ugaaaucauaacaugcuagcaa

SEQ ID NO: 983257 - RNA, 23 nt, Human
ugaccuggcuucucgugaaguga

SEQ ID NO: 983258 - RNA, 21 nt, Human
uggaaaagugcauuuacaaua

SEQ ID NO: 983259 - RNA, 18 nt, Human
aaccccgacccccaccac

SEQ ID NO: 983260 - RNA, 22 nt, Human
accccgacccccaccacacaca

SEQ ID NO: 983261 - RNA, 23 nt, Human
acugcaccaugccccccaacccc

SEQ ID NO: 983262 - RNA, 24 nt, Human
caccaugccccccaaccccgaccc

SEQ ID NO: 983263 - RNA, 22 nt, Human
caugccccccaaccccgacccc

SEQ ID NO: 983264 - RNA, 18 nt, Human
ccaaccccgacccccacc

SEQ ID NO: 983265 - RNA, 24 nt, Human
ccaaccccgacccccaccacacac

SEQ ID NO: 983266 - RNA, 26 nt, Human
cccaaccccgacccccaccacacaca

SEQ ID NO: 983267 - RNA, 28 nt, Human
cccaaccccgacccccaccacacacaac

SEQ ID NO: 983268 - RNA, 20 nt, Human
ccccaaccccgacccccacc

SEQ ID NO: 983269 - RNA, 21 nt, Human
ccccaccacacacaacggggc

SEQ ID NO: 983270 - RNA, 21 nt, Human
cccccaaccccgacccccacc

SEQ ID NO: 983271 - RNA, 23 nt, Human
cccccaaccccgacccccaccac

SEQ ID NO: 983272 - RNA, 18 nt, Human
ccccccaaccccgacccc

SEQ ID NO: 983273 - RNA, 19 nt, Human
ccccccaaccccgaccccc

SEQ ID NO: 983274 - RNA, 23 nt, Human
cugcaccaugccccccaaccccg

SEQ ID NO: 983275 - RNA, 20 nt, Human
gacugcaccaugccccccaa

SEQ ID NO: 983276 - RNA, 18 nt, Human
gccccccaaccccgaccc

SEQ ID NO: 983277 - RNA, 25 nt, Human
guuuacgugaaggccgacugcacca

SEQ ID NO: 983278 - RNA, 25 nt, Human
ugaaggccgacugcaccaugccccc

SEQ ID NO: 983279 - RNA, 19 nt, Human
ccucucagcucaugcugcc

SEQ ID NO: 983280 - RNA, 21 nt, Human
ccucucagcucaugcugccuc

SEQ ID NO: 983281 - RNA, 22 nt, Human
ccuuggccugcuccuuuucucc

SEQ ID NO: 983282 - RNA, 18 nt, Human
cgcccuuggccugcuccu

SEQ ID NO: 983283 - RNA, 20 nt, Human
gccugcuccuuuucucccca

SEQ ID NO: 983284 - RNA, 20 nt, Human
gccuuccuaucacccucuca

SEQ ID NO: 983285 - RNA, 19 nt, Human
ggagagcacuugccauugc

SEQ ID NO: 983286 - RNA, 24 nt, Human
ggccugcuccuuuucuccccaagg

SEQ ID NO: 983287 - RNA, 23 nt, Human
uccuaucacccucucagcucaug

SEQ ID NO: 983288 - RNA, 21 nt, Human
ugccucugagaggcagcucua

SEQ ID NO: 983289 - RNA, 21 nt, Human
uuggccugcuccuuuucuccc

SEQ ID NO: 983290 - RNA, 22 nt, Human
aagguggacagcggugccuucc

SEQ ID NO: 983291 - RNA, 19 nt, Human
acccaacccccaacccagc

SEQ ID NO: 983292 - RNA, 19 nt, Human
acugccuuccuucucuggc

SEQ ID NO: 983293 - RNA, 23 nt, Human
agauuucuagcacuuuaaagcuu

SEQ ID NO: 983294 - RNA, 23 nt, Human
aggaggauaaauggugcccaagg

SEQ ID NO: 983295 - RNA, 22 nt, Human
aggcugcccucuacagccccga

SEQ ID NO: 983296 - RNA, 23 nt, Human
agucgcacgacugucucagccuu

SEQ ID NO: 983297 - RNA, 21 nt, Human
agucuggccuggucuggccuc

SEQ ID NO: 983298 - RNA, 19 nt, Human
caacccagccugguccccu

SEQ ID NO: 983299 - RNA, 21 nt, Human
caacccccaacccagccuggu

SEQ ID NO: 983300 - RNA, 23 nt, Human
caacccccaacccagccuggucc

SEQ ID NO: 983301 - RNA, 19 nt, Human
cagcaccugcuccggguca

SEQ ID NO: 983302 - RNA, 24 nt, Human
cagccugguccccugacccucagu

SEQ ID NO: 983303 - RNA, 22 nt, Human
cagcggugccuuccugcugcuc

SEQ ID NO: 983304 - RNA, 22 nt, Human
caggaaugcccagugccucuga

SEQ ID NO: 983305 - RNA, 21 nt, Human
caucucauucccugggccgca

SEQ ID NO: 983306 - RNA, 19 nt, Human
ccacccaacccccaaccca

SEQ ID NO: 983307 - RNA, 24 nt, Human
ccagugccucugaggcugcccucu

SEQ ID NO: 983308 - RNA, 24 nt, Human
cccaacccagccugguccccugac

SEQ ID NO: 983309 - RNA, 27 nt, Human
cccaacccccaacccagccuggucccc

SEQ ID NO: 983310 - RNA, 20 nt, Human
ccccacccaacccccaaccc

SEQ ID NO: 983311 - RNA, 19 nt, Human
cccccaacccagccugguc

SEQ ID NO: 983312 - RNA, 21 nt, Human
cccgcgagcccguggcccagc

SEQ ID NO: 983313 - RNA, 20 nt, Human
cccguccagccccacccaac

SEQ ID NO: 983314 - RNA, 18 nt, Human
cccugggccgcaagaagc

SEQ ID NO: 983315 - RNA, 20 nt, Human
ccgaggcgcaugggccagca

SEQ ID NO: 983316 - RNA, 19 nt, Human
ccucguccccguccagccc

SEQ ID NO: 983317 - RNA, 19 nt, Human
ccuuccugcugcucuuccu

SEQ ID NO: 983318 - RNA, 21 nt, Human
cuggagucggagccggggucc

SEQ ID NO: 983319 - RNA, 22 nt, Human
cuggccaggccugcuguuccug

SEQ ID NO: 983320 - RNA, 18 nt, Human
cuggcuccacccuugacu

SEQ ID NO: 983321 - RNA, 18 nt, Human
cuuccugcucuugcuguc

SEQ ID NO: 983322 - RNA, 19 nt, Human
gaagcucuuucccgccucc

SEQ ID NO: 983323 - RNA, 23 nt, Human
gagugcccgcgagcccguggccc

SEQ ID NO: 983324 - RNA, 23 nt, Human
gcagggucacgcaacugccccgg

SEQ ID NO: 983325 - RNA, 19 nt, Human
gccccacccaacccccaac

SEQ ID NO: 983326 - RNA, 19 nt, Human
ggagagagaagaagcugau

SEQ ID NO: 983327 - RNA, 20 nt, Human
uacagccccgaggcgcaugg

SEQ ID NO: 983328 - RNA, 22 nt, Human
ucccgccuccucuccgcgccuc

SEQ ID NO: 983329 - RNA, 18 nt, Human
uccugcugcucuuccugc

SEQ ID NO: 983330 - RNA, 20 nt, Human
uccuuugggcuggccaggcc

SEQ ID NO: 983331 - RNA, 22 nt, Human
ucuccaguugccaugcuacucc

SEQ ID NO: 983332 - RNA, 20 nt, Human
ucucuggcuccacccuugac

SEQ ID NO: 983333 - RNA, 24 nt, Human
ucugaggcugcccucuacagcccc

SEQ ID NO: 983334 - RNA, 19 nt, Human
ucuggccucccagcagggu

SEQ ID NO: 983335 - RNA, 21 nt, Human
ucuucagagcuugggcuuuaa

SEQ ID NO: 983336 - RNA, 19 nt, Human
ugaaagaagcacauauggg

SEQ ID NO: 983337 - RNA, 22 nt, Human
ugaaagaagcacauauggggca

SEQ ID NO: 983338 - RNA, 26 nt, Human
ugacccucagucuggccuggucuggc

SEQ ID NO: 983339 - RNA, 19 nt, Human
ugcccaagguggacagcgg

SEQ ID NO: 983340 - RNA, 22 nt, Human
ugcccagagcuggagucggagc

SEQ ID NO: 983341 - RNA, 29 nt, Human
ugcccagugccucugaggcugcccucuac

SEQ ID NO: 983342 - RNA, 18 nt, Human
ugccuuccuucucuggcu

SEQ ID NO: 983343 - RNA, 18 nt, Human
ugcggccaguggggaccc

SEQ ID NO: 983344 - RNA, 19 nt, Human
uggccaggccugcuguucc

SEQ ID NO: 983345 - RNA, 22 nt, Human
uggccuggucuggccucccagc

SEQ ID NO: 983346 - RNA, 21 nt, Human
ugguccccugacccucagucu

SEQ ID NO: 983347 - RNA, 23 nt, Human
uguuuugaggcuucuuuaaaagu

SEQ ID NO: 983348 - RNA, 23 nt, Human
uugaggcuucuuuaaaaguuuau

SEQ ID NO: 983349 - RNA, 22 nt, Human
uugcggccaguggggacccucu

SEQ ID NO: 983350 - RNA, 20 nt, Human
uuuuuuuuuuuuuuuuuggu

SEQ ID NO: 983351 - RNA, 20 nt, Human
uuuuuuuuuuuuuuuuuugg

SEQ ID NO: 983352 - RNA, 24 nt, Human
acacacacuuucuccgagagcccu

SEQ ID NO: 983353 - RNA, 26 nt, Human
cacacuuuauuaagaaaggaauacac

SEQ ID NO: 983354 - RNA, 23 nt, Human
ccagcgucucucugcccuguggu

SEQ ID NO: 983355 - RNA, 18 nt, Human
ccugugguuguggagaac

SEQ ID NO: 983356 - RNA, 20 nt, Human
gagagcuggagguggagcca

SEQ ID NO: 983357 - RNA, 24 nt, Human
ucucaggcagaacacgcucugaga

SEQ ID NO: 983358 - RNA, 19 nt, Human
uggcgcccagcaggguggu

SEQ ID NO: 983359 - RNA, 19 nt, Human
ugucccgcuuuucccuuaa

SEQ ID NO: 983360 - RNA, 21 nt, Human
uguggagaacuggcgcccagc

SEQ ID NO: 983361 - RNA, 22 nt, Human
acaacagcacacugcaggggug

SEQ ID NO: 983362 - RNA, 19 nt, Human
accgcagccucuguucgcc

SEQ ID NO: 983363 - RNA, 21 nt, Human
accuggcaugugaggcccacg

SEQ ID NO: 983364 - RNA, 27 nt, Human
agaagacccaggcguagcucaugaggg

SEQ ID NO: 983365 - RNA, 20 nt, Human
agacccuccgccagcagccc

SEQ ID NO: 983366 - RNA, 23 nt, Human
aggaggaggcagagcugcccuga

SEQ ID NO: 983367 - RNA, 22 nt, Human
aggcagagcugcccugauaguu

SEQ ID NO: 983368 - RNA, 21 nt, Human
aggcgacggcgagggcggugc

SEQ ID NO: 983369 - RNA, 18 nt, Human
agggaggagggcaguggg

SEQ ID NO: 983370 - RNA, 27 nt, Human
caacaccacaaggcaaaucuauggcca

SEQ ID NO: 983371 - RNA, 21 nt, Human
cacgccggcggcuggagcccc

SEQ ID NO: 983372 - RNA, 19 nt, Human
cagaacaaaaacaaacgac

SEQ ID NO: 983373 - RNA, 20 nt, Human
caugggaggaggaggcagag

SEQ ID NO: 983374 - RNA, 28 nt, Human
cccggggaccccgggccucccagcccgc

SEQ ID NO: 983375 - RNA, 18 nt, Human
ccgcggagaggcgcggag

SEQ ID NO: 983376 - RNA, 20 nt, Human
ccucccagcccgcgaagcaa

SEQ ID NO: 983377 - RNA, 21 nt, Human
ccucccagcccgcgaagcaac

SEQ ID NO: 983378 - RNA, 24 nt, Human
ccucugggggcugcccuguugccu

SEQ ID NO: 983379 - RNA, 21 nt, Human
ccuguugccucuccccaccuc

SEQ ID NO: 983380 - RNA, 23 nt, Human
cucaauguucuaugaaaacuaac

SEQ ID NO: 983381 - RNA, 26 nt, Human
cucaugagggccacgccggcggcugg

SEQ ID NO: 983382 - RNA, 22 nt, Human
cucccagcccgcgaagcaacgg

SEQ ID NO: 983383 - RNA, 23 nt, Human
cugauccaacaccacaaggcaaa

SEQ ID NO: 983384 - RNA, 21 nt, Human
cugcaggcacgacauagcaca

SEQ ID NO: 983385 - RNA, 21 nt, Human
cugcagggguggaaggagacg

SEQ ID NO: 983386 - RNA, 23 nt, Human
gaagcaacggugguggcggcagc

SEQ ID NO: 983387 - RNA, 18 nt, Human
gacacaguaccugaucca

SEQ ID NO: 983388 - RNA, 19 nt, Human
gaggaggaggcagagcugc

SEQ ID NO: 983389 - RNA, 18 nt, Human
gaugacacaaguacuuau

SEQ ID NO: 983390 - RNA, 23 nt, Human
gccucagacccuccgccagcagc

SEQ ID NO: 983391 - RNA, 18 nt, Human
ggagagggaggagggcag

SEQ ID NO: 983392 - RNA, 22 nt, Human
ggagcucagaacaaaaacaaac

SEQ ID NO: 983393 - RNA, 18 nt, Human
ggaggaggaggcagagcu

SEQ ID NO: 983394 - RNA, 21 nt, Human
ggaggaggaggcagagcugcc

SEQ ID NO: 983395 - RNA, 22 nt, Human
ggugguggcggcagcgaccgga

SEQ ID NO: 983396 - RNA, 24 nt, Human
guugccucuccccaccucauggga

SEQ ID NO: 983397 - RNA, 22 nt, Human
uaugagcagacacaguaccugg

SEQ ID NO: 983398 - RNA, 20 nt, Human
uauggagcucagaacaaaaa

SEQ ID NO: 983399 - RNA, 24 nt, Human
ucaauuuucuuaaaaaacaaaaca

SEQ ID NO: 983400 - RNA, 24 nt, Human
ucaugggccccgggaggacagcgg

SEQ ID NO: 983401 - RNA, 24 nt, Human
ucccugcaggcacgacauagcaca

SEQ ID NO: 983402 - RNA, 24 nt, Human
ucuuauggagcucagaacaaaaac

SEQ ID NO: 983403 - RNA, 22 nt, Human
ugaccuggcaugugaggcccac

SEQ ID NO: 983404 - RNA, 24 nt, Human
ugagcagacacaguaccugaucca

SEQ ID NO: 983405 - RNA, 21 nt, Human
ugcugggccaggagagggagg

SEQ ID NO: 983406 - RNA, 21 nt, Human
uggaaggagacggugaccugg

SEQ ID NO: 983407 - RNA, 23 nt, Human
uggaaggagacggugaccuggug

SEQ ID NO: 983408 - RNA, 24 nt, Human
uggaaggagacggugaccugguga

SEQ ID NO: 983409 - RNA, 19 nt, Human
uuuuuuuuuuuuuuugucu

SEQ ID NO: 983410 - RNA, 24 nt, Human
uuuuuuuuuuuuuuuugucuccaa

SEQ ID NO: 983411 - RNA, 18 nt, Human
uuuuuuuuuuuuuuuuug

SEQ ID NO: 983412 - RNA, 19 nt, Human
uuuuuuuuuuuuuuuuugu

SEQ ID NO: 983413 - RNA, 19 nt, Human
aaacaagcgaugcugucag

SEQ ID NO: 983414 - RNA, 20 nt, Human
acaguagcucgccagccccc

SEQ ID NO: 983415 - RNA, 22 nt, Human
accaggcaggcuguucuugcuu

SEQ ID NO: 983416 - RNA, 24 nt, Human
agaauccauaaauuaaaacggcaa

SEQ ID NO: 983417 - RNA, 22 nt, Human
agcaacagcaggagcggaggga

SEQ ID NO: 983418 - RNA, 20 nt, Human
agccagagaggagcgccaga

SEQ ID NO: 983419 - RNA, 20 nt, Human
aggagcgccagagcccacag

SEQ ID NO: 983420 - RNA, 21 nt, Human
aggagcgccagagcccacagc

SEQ ID NO: 983421 - RNA, 22 nt, Human
aggaggcucccccgagccuggc

SEQ ID NO: 983422 - RNA, 19 nt, Human
aggcaagggaggcgcgggu

SEQ ID NO: 983423 - RNA, 19 nt, Human
aggcagaggcagagacaga

SEQ ID NO: 983424 - RNA, 19 nt, Human
agguagucgaagagcucac

SEQ ID NO: 983425 - RNA, 21 nt, Human
aggugcggcguggaggcggug

SEQ ID NO: 983426 - RNA, 22 nt, Human
caacagcaggagcggagggagg

SEQ ID NO: 983427 - RNA, 23 nt, Human
caccagguagucgaagagcucac

SEQ ID NO: 983428 - RNA, 19 nt, Human
cagagacagagagaaaaga

SEQ ID NO: 983429 - RNA, 24 nt, Human
cagcaacagcaggagcggagggag

SEQ ID NO: 983430 - RNA, 18 nt, Human
cagccgcugucagugcug

SEQ ID NO: 983431 - RNA, 19 nt, Human
cagcuuuaggacguggggg

SEQ ID NO: 983432 - RNA, 18 nt, Human
cauguuaacuuuucggga

SEQ ID NO: 983433 - RNA, 20 nt, Human
ccacaggccggccccaacgc

SEQ ID NO: 983434 - RNA, 19 nt, Human
ccagggaggcggggcacgg

SEQ ID NO: 983435 - RNA, 20 nt, Human
cccagcccagcggccuggcc

SEQ ID NO: 983436 - RNA, 20 nt, Human
cccagcggccuggccugcug

SEQ ID NO: 983437 - RNA, 22 nt, Human
ccccaacgccccuuuccuuucc

SEQ ID NO: 983438 - RNA, 19 nt, Human
ccccagaaggccaccaggc

SEQ ID NO: 983439 - RNA, 23 nt, Human
ccccagaaggccaccaggcaggc

SEQ ID NO: 983440 - RNA, 19 nt, Human
ccccagcccccccacugcc

SEQ ID NO: 983441 - RNA, 18 nt, Human
cccccgcgccccaccagc

SEQ ID NO: 983442 - RNA, 18 nt, Human
cccccgcgccccaccagc

SEQ ID NO: 983443 - RNA, 19 nt, Human
ccccgcgccccaccagcuc

SEQ ID NO: 983444 - RNA, 19 nt, Human
ccccuuuccuuuccuccca

SEQ ID NO: 983445 - RNA, 18 nt, Human
ccgcagcagcugccuucc

SEQ ID NO: 983446 - RNA, 24 nt, Human
ccgcgccccaccagcucuguccuc

SEQ ID NO: 983447 - RNA, 18 nt, Human
ccgggucggccgggcugg

SEQ ID NO: 983448 - RNA, 22 nt, Human
ccgugggcacuccgcuuggcgg

SEQ ID NO: 983449 - RNA, 22 nt, Human
ccucagagggcgcccuggcccc

SEQ ID NO: 983450 - RNA, 22 nt, Human
ccucccacgggccgugcggagc

SEQ ID NO: 983451 - RNA, 19 nt, Human
ccugaacagaggugcggag

SEQ ID NO: 983452 - RNA, 19 nt, Human
ccuggccccagaaggccac

SEQ ID NO: 983453 - RNA, 19 nt, Human
ccuggccccagccccccca

SEQ ID NO: 983454 - RNA, 22 nt, Human
cgaggcagccgcugucagugcu

SEQ ID NO: 983455 - RNA, 21 nt, Human
cgcagcccacaggccggcccc

SEQ ID NO: 983456 - RNA, 24 nt, Human
cgcagcccacaggccggccccaac

SEQ ID NO: 983457 - RNA, 21 nt, Human
cgccagagcccacagccgccc

SEQ ID NO: 983458 - RNA, 18 nt, Human
cgccccgucaucauuucc

SEQ ID NO: 983459 - RNA, 22 nt, Human
cggaggcggcgcggccagggag

SEQ ID NO: 983460 - RNA, 23 nt, Human
cggcagcaacagcaggagcggag

SEQ ID NO: 983461 - RNA, 22 nt, Human
cggggccagggccagcggccgc

SEQ ID NO: 983462 - RNA, 24 nt, Human
cucagagggcgcccuggccccagc

SEQ ID NO: 983463 - RNA, 21 nt, Human
cuccggggccagggccagcgg

SEQ ID NO: 983464 - RNA, 20 nt, Human
cugcccguucuucucgucac

SEQ ID NO: 983465 - RNA, 20 nt, Human
cuuuccucccaggcucugag

SEQ ID NO: 983466 - RNA, 20 nt, Human
cuuuucgggauaauuccugg

SEQ ID NO: 983467 - RNA, 20 nt, Human
gacacgcagacggcagggga

SEQ ID NO: 983468 - RNA, 19 nt, Human
gagcccacagccgccccag

SEQ ID NO: 983469 - RNA, 21 nt, Human
gcagccgcugucagugcugug

SEQ ID NO: 983470 - RNA, 19 nt, Human
gccagcccccccgcgcccc

SEQ ID NO: 983471 - RNA, 24 nt, Human
gccccaacgccccuuuccuuuccu

SEQ ID NO: 983472 - RNA, 18 nt, Human
gcccuggccccagccccc

SEQ ID NO: 983473 - RNA, 21 nt, Human
gcccuggccccagccccccca

SEQ ID NO: 983474 - RNA, 18 nt, Human
gccggccccaacgccccu

SEQ ID NO: 983475 - RNA, 26 nt, Human
gccggccccaacgccccuuuccuuuc

SEQ ID NO: 983476 - RNA, 23 nt, Human
gcgcagcccacaggccggcccca

SEQ ID NO: 983477 - RNA, 24 nt, Human
gcgcggccgcggguccacucgggg

SEQ ID NO: 983478 - RNA, 20 nt, Human
gcgggcggcgaggcagccgc

SEQ ID NO: 983479 - RNA, 20 nt, Human
ggagaauccauaaauuaaaa

SEQ ID NO: 983480 - RNA, 28 nt, Human
ggaggcggggcacgggccucccaagggg

SEQ ID NO: 983481 - RNA, 18 nt, Human
ggcaagggaggcgcgggu

SEQ ID NO: 983482 - RNA, 24 nt, Human
ggcagaggcagagacagagagaaa

SEQ ID NO: 983483 - RNA, 22 nt, Human
ggccccagaaggccaccaggca

SEQ ID NO: 983484 - RNA, 24 nt, Human
ggccugcugggaaggcucuggugc

SEQ ID NO: 983485 - RNA, 18 nt, Human
ggcggcgcggccagggag

SEQ ID NO: 983486 - RNA, 21 nt, Human
ggcggguccgcagcagcugcc

SEQ ID NO: 983487 - RNA, 20 nt, Human
ggcggugggcgggcccaucu

SEQ ID NO: 983488 - RNA, 24 nt, Human
ggcuggaggaggcucccccgagcc

SEQ ID NO: 983489 - RNA, 23 nt, Human
gggccagggccagcggccgcgga

SEQ ID NO: 983490 - RNA, 21 nt, Human
gggcgugcugggggccugggc

SEQ ID NO: 983491 - RNA, 23 nt, Human
gggggccugggccgccugcccgu

SEQ ID NO: 983492 - RNA, 23 nt, Human
guccacucggggcagggcgggcg

SEQ ID NO: 983493 - RNA, 19 nt, Human
gugggcgggcccaucuugg

SEQ ID NO: 983494 - RNA, 23 nt, Human
uaaauaacacugaucccagccca

SEQ ID NO: 983495 - RNA, 19 nt, Human
ucagagacaggcagaggca

SEQ ID NO: 983496 - RNA, 24 nt, Human
ucccagcccagcggccuggccugc

SEQ ID NO: 983497 - RNA, 21 nt, Human
ucccccgagccuggccuuccu

SEQ ID NO: 983498 - RNA, 24 nt, Human
ucccugaacagaggugcggagaau

SEQ ID NO: 983499 - RNA, 18 nt, Human
uccuggccccagaaggcc

SEQ ID NO: 983500 - RNA, 26 nt, Human
ucguccagcaggagguuuucagguug

SEQ ID NO: 983501 - RNA, 18 nt, Human
ucucguccagcaggaggu

SEQ ID NO: 983502 - RNA, 19 nt, Human
ucugcgaugcggauguugu

SEQ ID NO: 983503 - RNA, 19 nt, Human
ugaggcaagggaggcgcgg

SEQ ID NO: 983504 - RNA, 23 nt, Human
ugccggaagaacuuccgagccuc

SEQ ID NO: 983505 - RNA, 23 nt, Human
ugcggagaauccauaaauuaaaa

SEQ ID NO: 983506 - RNA, 23 nt, Human
ugcugggaaggcucuggugccgc

SEQ ID NO: 983507 - RNA, 20 nt, Human
ugcugggggccugggccgcc

SEQ ID NO: 983508 - RNA, 19 nt, Human
uggacggggcgcugggcug

SEQ ID NO: 983509 - RNA, 21 nt, Human
uggcagaaguccagcgcagag

SEQ ID NO: 983510 - RNA, 18 nt, Human
ugggcugggccucacugc

SEQ ID NO: 983511 - RNA, 21 nt, Human
uguccucagagggcgcccugg

SEQ ID NO: 983512 - RNA, 18 nt, Human
uguucuugcugagggguc

SEQ ID NO: 983513 - RNA, 24 nt, Human
aaaaaacacugucaagauggccau

SEQ ID NO: 983514 - RNA, 22 nt, Human
aaaaacagagaggaaauuagac

SEQ ID NO: 983515 - RNA, 21 nt, Human
aaaaauauccaaauauuccuu

SEQ ID NO: 983516 - RNA, 21 nt, Human
aaacacacaaaagaaaaaaca

SEQ ID NO: 983517 - RNA, 23 nt, Human
aaaggccuagcccauuugagaac

SEQ ID NO: 983518 - RNA, 23 nt, Human
aauaauuaaacacacaaaagaaa

SEQ ID NO: 983519 - RNA, 23 nt, Human
aaugaguuucuuuuuaaugguuu

SEQ ID NO: 983520 - RNA, 21 nt, Human
acaaagcaaaauagcauaaau

SEQ ID NO: 983521 - RNA, 21 nt, Human
acauaaagcccuucagugcug

SEQ ID NO: 983522 - RNA, 19 nt, Human
aggauuaaaaauauccaaa

SEQ ID NO: 983523 - RNA, 25 nt, Human
caaaaaaacaaaauuucaaagggua

SEQ ID NO: 983524 - RNA, 24 nt, Human
caagagaauacacuucuuuuguuc

SEQ ID NO: 983525 - RNA, 22 nt, Human
caccacagagggaaacucuggg

SEQ ID NO: 983526 - RNA, 20 nt, Human
cagaaacauccugugacaac

SEQ ID NO: 983527 - RNA, 23 nt, Human
cauaauaauuaaacacacaaaag

SEQ ID NO: 983528 - RNA, 24 nt, Human
cauugucacuuuuugaccucugcc

SEQ ID NO: 983529 - RNA, 23 nt, Human
ccaaacaucaaaaaucaaaaaaa

SEQ ID NO: 983530 - RNA, 18 nt, Human
ccuaaauauauauaguuc

SEQ ID NO: 983531 - RNA, 24 nt, Human
cgaaggccgaaaggaggaaaggag

SEQ ID NO: 983532 - RNA, 19 nt, Human
cggccggggacagagagag

SEQ ID NO: 983533 - RNA, 20 nt, Human
cuagugguuucuuggucucc

SEQ ID NO: 983534 - RNA, 18 nt, Human
cuccagaauaguuaaaaa

SEQ ID NO: 983535 - RNA, 21 nt, Human
cuccagaauaguuaaaaacag

SEQ ID NO: 983536 - RNA, 24 nt, Human
cuggucccaaugcaaucauauaaa

SEQ ID NO: 983537 - RNA, 23 nt, Human
cuguacaaugcaacaauagcuuu

SEQ ID NO: 983538 - RNA, 23 nt, Human
cuugaaaauccauuucauaacag

SEQ ID NO: 983539 - RNA, 21 nt, Human
gacggcgaaggccgaaaggag

SEQ ID NO: 983540 - RNA, 22 nt, Human
gcacagugaaauuuauuugucu

SEQ ID NO: 983541 - RNA, 19 nt, Human
ggcaccacagagggaaacu

SEQ ID NO: 983542 - RNA, 23 nt, Human
ggcauguaccauugucacuuuuu

SEQ ID NO: 983543 - RNA, 21 nt, Human
gggaaacucugggaacucgga

SEQ ID NO: 983544 - RNA, 22 nt, Human
guaugcagcugacagaacaaga

SEQ ID NO: 983545 - RNA, 20 nt, Human
uaaaaacagagaggaaauua

SEQ ID NO: 983546 - RNA, 24 nt, Human
uaaaacaugaaacaauauuaacaa

SEQ ID NO: 983547 - RNA, 18 nt, Human
uacacauaaaacaugaaa

SEQ ID NO: 983548 - RNA, 20 nt, Human
uacacauaauaauuaaacac

SEQ ID NO: 983549 - RNA, 26 nt, Human
uaccaaacaucaaaaaucaaaaaaac

SEQ ID NO: 983550 - RNA, 23 nt, Human
uagcauaaauaaauaaguuuacc

SEQ ID NO: 983551 - RNA, 20 nt, Human
uagggcaccacagagggaaa

SEQ ID NO: 983552 - RNA, 23 nt, Human
ucaacagaaacauccugugacaa

SEQ ID NO: 983553 - RNA, 23 nt, Human
ucaauauaaaaaaggccuagccc

SEQ ID NO: 983554 - RNA, 21 nt, Human
uccagaauaguuaaaaacaga

SEQ ID NO: 983555 - RNA, 25 nt, Human
ucuuugguuuuaaacacgauagauc

SEQ ID NO: 983556 - RNA, 22 nt, Human
ucuuuuguucuccucaucuuag

SEQ ID NO: 983557 - RNA, 23 nt, Human
ugaaacaauauuaacaaauuaca

SEQ ID NO: 983558 - RNA, 19 nt, Human
ugaaugcacagcagauaca

SEQ ID NO: 983559 - RNA, 24 nt, Human
ugacagaacaagagaauacacuuc

SEQ ID NO: 983560 - RNA, 24 nt, Human
uggcacagugaaauuuauuugucu

SEQ ID NO: 983561 - RNA, 25 nt, Human
uggcacagugaaauuuauuugucuu

SEQ ID NO: 983562 - RNA, 18 nt, Human
uguauuaaguuuuuauuu

SEQ ID NO: 983563 - RNA, 19 nt, Human
ugucaagauggccauaugu

SEQ ID NO: 983564 - RNA, 22 nt, Human
uuaaacacacaaaagaaaaaac

SEQ ID NO: 983565 - RNA, 19 nt, Human
uuaaucuuuuuuuuuucag

SEQ ID NO: 983566 - RNA, 21 nt, Human
uuaccuaaauauauauaguuc

SEQ ID NO: 983567 - RNA, 26 nt, Human
uucuuuuguucuccucaucuuagagu

SEQ ID NO: 983568 - RNA, 22 nt, Human
uuggucuccagaauaguuaaaa

SEQ ID NO: 983569 - RNA, 22 nt, Human
aaaaggacaaaauaggaccaca

SEQ ID NO: 983570 - RNA, 24 nt, Human
aaaaggacaaaauaggaccacaaa

SEQ ID NO: 983571 - RNA, 21 nt, Human
aaaauaaaguagaaucaaaga

SEQ ID NO: 983572 - RNA, 20 nt, Human
aacaaaagcaacuuuaaaaa

SEQ ID NO: 983573 - RNA, 23 nt, Human
aacaaaagcaacuuuaaaaaugu

SEQ ID NO: 983574 - RNA, 23 nt, Human
aagaaaaccaggccaaaaaggau

SEQ ID NO: 983575 - RNA, 19 nt, Human
acaugaaaaggacaaaaua

SEQ ID NO: 983576 - RNA, 21 nt, Human
acuuugagaaacuuccagaag

SEQ ID NO: 983577 - RNA, 25 nt, Human
agaaaagaaauaaccauuuagagaa

SEQ ID NO: 983578 - RNA, 27 nt, Human
agaaagaaaagaaauaaccauuuagag

SEQ ID NO: 983579 - RNA, 20 nt, Human
agacaugaaaaggacaaaau

SEQ ID NO: 983580 - RNA, 18 nt, Human
agaucucaguugaggagg

SEQ ID NO: 983581 - RNA, 19 nt, Human
agcaaaaauaaaaaugagu

SEQ ID NO: 983582 - RNA, 25 nt, Human
aggaagaaaaccaggccaaaaagga

SEQ ID NO: 983583 - RNA, 20 nt, Human
auugauuauuagagcaaauu

SEQ ID NO: 983584 - RNA, 20 nt, Human
caaaauaggaccacaaaacu

SEQ ID NO: 983585 - RNA, 18 nt, Human
caaguuggaaagaucuca

SEQ ID NO: 983586 - RNA, 20 nt, Human
cacuguuugaggaagaaaac

SEQ ID NO: 983587 - RNA, 21 nt, Human
cacuguuugaggaagaaaacc

SEQ ID NO: 983588 - RNA, 19 nt, Human
cagaaagaaaagaaauaac

SEQ ID NO: 983589 - RNA, 20 nt, Human
ccacuuuuuaaaaauaaagu

SEQ ID NO: 983590 - RNA, 23 nt, Human
cguaguggguuaugaaauccauu

SEQ ID NO: 983591 - RNA, 20 nt, Human
gacaaaauaggaccacaaaa

SEQ ID NO: 983592 - RNA, 20 nt, Human
gacaugaaaaggacaaaaua

SEQ ID NO: 983593 - RNA, 25 nt, Human
gagcugcagaaagaaaagaaauaac

SEQ ID NO: 983594 - RNA, 26 nt, Human
gaggaagaaaaccaggccaaaaagga

SEQ ID NO: 983595 - RNA, 20 nt, Human
gagugugugugugcgugugu

SEQ ID NO: 983596 - RNA, 25 nt, Human
ggaaagaucucaguugaggaggaag

SEQ ID NO: 983597 - RNA, 22 nt, Human
ggaaaucagagaaaagcuagca

SEQ ID NO: 983598 - RNA, 18 nt, Human
gugugugugugcgugugu

SEQ ID NO: 983599 - RNA, 20 nt, Human
uaaaacagcaucuuaucaaa

SEQ ID NO: 983600 - RNA, 25 nt, Human
uaaaacagcaucuuaucaaacugcg

SEQ ID NO: 983601 - RNA, 25 nt, Human
uaaaguagaaucaaagagauaauau

SEQ ID NO: 983602 - RNA, 22 nt, Human
uagaagcauccuguauagacug

SEQ ID NO: 983603 - RNA, 18 nt, Human
uaggaccacaaaacuggu

SEQ ID NO: 983604 - RNA, 22 nt, Human
uauauguauagagugugugugu

SEQ ID NO: 983605 - RNA, 21 nt, Human
uauguauagagugugugugug

SEQ ID NO: 983606 - RNA, 18 nt, Human
ucaguugaggaggaagaa

SEQ ID NO: 983607 - RNA, 19 nt, Human
uccuggaaaucagagaaaa

SEQ ID NO: 983608 - RNA, 22 nt, Human
ugaaaagcauggucuaaaacag

SEQ ID NO: 983609 - RNA, 22 nt, Human
ugaaaaggacaaaauaggacca

SEQ ID NO: 983610 - RNA, 23 nt, Human
ugagagcugcagaaagaaaagaa

SEQ ID NO: 983611 - RNA, 19 nt, Human
ugaggaagaaaaccaggcc

SEQ ID NO: 983612 - RNA, 24 nt, Human
ugaggaggaagaaaaauacacucu

SEQ ID NO: 983613 - RNA, 23 nt, Human
ugcaacaaaagcaacuuuaaaaa

SEQ ID NO: 983614 - RNA, 23 nt, Human
ugcagaaagaaaagaaauaacca

SEQ ID NO: 983615 - RNA, 19 nt, Human
uggcaaguuggaaagaucu

SEQ ID NO: 983616 - RNA, 19 nt, Human
uggcagcauuuuacuuaac

SEQ ID NO: 983617 - RNA, 22 nt, Human
ugugguuuuuaaaaaggcuuaa

SEQ ID NO: 983618 - RNA, 24 nt, Human
uuaaaaauaaaguagaaucaaaga

SEQ ID NO: 983619 - RNA, 20 nt, Human
uuccagaaguaauugggagu

SEQ ID NO: 983620 - RNA, 26 nt, Human
uuuuuauauugagcaaaaauaaaaau

SEQ ID NO: 983621 - RNA, 22 nt, Human
aaacagaacuauuaaacacaca

SEQ ID NO: 983622 - RNA, 20 nt, Human
aaacauccugcaucugggag

SEQ ID NO: 983623 - RNA, 25 nt, Human
aaacauccugcaucugggagaagga

SEQ ID NO: 983624 - RNA, 21 nt, Human
aaagauacacucuccacgccc

SEQ ID NO: 983625 - RNA, 31 nt, Human
aacuauuaaacacacacacacauacacacag

SEQ ID NO: 983626 - RNA, 24 nt, Human
aagagcuauagauccagggacagu

SEQ ID NO: 983627 - RNA, 21 nt, Human
aaggaagaaaguagagacggu

SEQ ID NO: 983628 - RNA, 18 nt, Human
aaggagcuccagaaagga

SEQ ID NO: 983629 - RNA, 23 nt, Human
acacacacacauacacacacaca

SEQ ID NO: 983630 - RNA, 23 nt, Human
acacacacacauauacacacaca

SEQ ID NO: 983631 - RNA, 23 nt, Human
acacacacauacacacacacaua

SEQ ID NO: 983632 - RNA, 19 nt, Human
acacucuccacgcccaccc

SEQ ID NO: 983633 - RNA, 18 nt, Human
accccaaaaaaagauaca

SEQ ID NO: 983634 - RNA, 25 nt, Human
accccaaaaaaagauacacucucca

SEQ ID NO: 983635 - RNA, 19 nt, Human
acugguugaaaacauccug

SEQ ID NO: 983636 - RNA, 19 nt, Human
agaagcugaaagagggguu

SEQ ID NO: 983637 - RNA, 22 nt, Human
agaaggaagaaaguagagacgg

SEQ ID NO: 983638 - RNA, 22 nt, Human
agcuucaaguauggugaggcac

SEQ ID NO: 983639 - RNA, 22 nt, Human
auacacacacacauauacacac

SEQ ID NO: 983640 - RNA, 31 nt, Human
auuaaacacacacacacauacacacacacag

SEQ ID NO: 983641 - RNA, 21 nt, Human
cacaacaucugggacgccccc

SEQ ID NO: 983642 - RNA, 22 nt, Human
cacacacacacauacacacaca

SEQ ID NO: 983643 - RNA, 24 nt, Human
cacacacacacauacacacacaca

SEQ ID NO: 983644 - RNA, 28 nt, Human
cacacacacacauacacacacacauaua

SEQ ID NO: 983645 - RNA, 28 nt, Human
cacacacauacacacacacauauacaca

SEQ ID NO: 983646 - RNA, 20 nt, Human
cacacaccccaaaaaaagag

SEQ ID NO: 983647 - RNA, 22 nt, Human
cacacauacacacacacauaua

SEQ ID NO: 983648 - RNA, 26 nt, Human
cacacauauacacacacaccccaaaa

SEQ ID NO: 983649 - RNA, 22 nt, Human
cacacauauacacacacacccu

SEQ ID NO: 983650 - RNA, 25 nt, Human
cacauacacacacacauauacacac

SEQ ID NO: 983651 - RNA, 18 nt, Human
cacauauacacacacacc

SEQ ID NO: 983652 - RNA, 22 nt, Human
cauauacacacacaccccaaaa

SEQ ID NO: 983653 - RNA, 19 nt, Human
caucugggacgcccccagc

SEQ ID NO: 983654 - RNA, 23 nt, Human
ccacagccuagagcugagacagg

SEQ ID NO: 983655 - RNA, 22 nt, Human
cccagccuaggagcuccaagcu

SEQ ID NO: 983656 - RNA, 18 nt, Human
ccccaaaaaaagauacac

SEQ ID NO: 983657 - RNA, 23 nt, Human
ccccaaaaaaagauacacucucc

SEQ ID NO: 983658 - RNA, 19 nt, Human
cccuuguccugggagcuuc

SEQ ID NO: 983659 - RNA, 25 nt, Human
ccuagagcugagacaggccgggguc

SEQ ID NO: 983660 - RNA, 23 nt, Human
ccucaggccaagggacggauucc

SEQ ID NO: 983661 - RNA, 27 nt, Human
cgcccccagccuaggagcuccaagcuc

SEQ ID NO: 983662 - RNA, 21 nt, Human
cuagagcugagacaggcucug

SEQ ID NO: 983663 - RNA, 21 nt, Human
cuagucucuuuagcucucagu

SEQ ID NO: 983664 - RNA, 19 nt, Human
gagaaaaggccccuggaug

SEQ ID NO: 983665 - RNA, 19 nt, Human
gcaccuccaacaccacaua

SEQ ID NO: 983666 - RNA, 24 nt, Human
gcaggucccuagaguuaaaggcac

SEQ ID NO: 983667 - RNA, 21 nt, Human
ggugaggcacaacuuuuauua

SEQ ID NO: 983668 - RNA, 18 nt, Human
guugaguuggcggcuugu

SEQ ID NO: 983669 - RNA, 19 nt, Human
uaagaaagagcuggcaacc

SEQ ID NO: 983670 - RNA, 23 nt, Human
uaaggcaaaaaccugcugggaag

SEQ ID NO: 983671 - RNA, 24 nt, Human
uaaucccucaauaacagggacuga

SEQ ID NO: 983672 - RNA, 18 nt, Human
uagaaggaagaaaguaga

SEQ ID NO: 983673 - RNA, 25 nt, Human
uauacacacacaccccaaaaaaaga

SEQ ID NO: 983674 - RNA, 18 nt, Human
ucaguugaguuggcggcu

SEQ ID NO: 983675 - RNA, 21 nt, Human
ugagguuuuucccuaaggucc

SEQ ID NO: 983676 - RNA, 18 nt, Human
ugaguuggcggcuugugu

SEQ ID NO: 983677 - RNA, 22 nt, Human
uggcaaccaaaguuggaggcug

SEQ ID NO: 983678 - RNA, 24 nt, Human
uguaguagaauaagaaagagcugg

SEQ ID NO: 983679 - RNA, 24 nt, Human
uuacaaacagaacuauuaaacaca

SEQ ID NO: 983680 - RNA, 23 nt, Human
uuccacaacaucugggacgcccc

SEQ ID NO: 983681 - RNA, 21 nt, Human
uugaaaacauccugcaucugg

SEQ ID NO: 983682 - RNA, 18 nt, Human
aaaaaccaaaaacacacg

SEQ ID NO: 983683 - RNA, 21 nt, Human
aaaaaccaaaaacacacgguu

SEQ ID NO: 983684 - RNA, 20 nt, Human
aaaauaauggcacaauaaua

SEQ ID NO: 983685 - RNA, 25 nt, Human
aaaccaaaaacacacgguuuauaau

SEQ ID NO: 983686 - RNA, 21 nt, Human
aaagaaacaaaccaaaaaugg

SEQ ID NO: 983687 - RNA, 25 nt, Human
aaagggcagacacagucuuuaauug

SEQ ID NO: 983688 - RNA, 19 nt, Human
aacaacuuucuagaaaacc

SEQ ID NO: 983689 - RNA, 21 nt, Human
aaccucagcaaaaguuaauau

SEQ ID NO: 983690 - RNA, 24 nt, Human
acccccuggccugcauuuacuucc

SEQ ID NO: 983691 - RNA, 23 nt, Human
accugaguucucuugguuauggg

SEQ ID NO: 983692 - RNA, 22 nt, Human
acuuagguaaaucaguuucuuu

SEQ ID NO: 983693 - RNA, 23 nt, Human
agaaaaaguauagaaauaaauga

SEQ ID NO: 983694 - RNA, 19 nt, Human
agcaaaacaguuauuuuga

SEQ ID NO: 983695 - RNA, 22 nt, Human
aggaaaggaaaauucuacucag

SEQ ID NO: 983696 - RNA, 19 nt, Human
aggcagaauggaccuuaau

SEQ ID NO: 983697 - RNA, 20 nt, Human
auacaauaaaacaccaaaag

SEQ ID NO: 983698 - RNA, 22 nt, Human
augaaacacuguggagcuaccc

SEQ ID NO: 983699 - RNA, 18 nt, Human
auguuaauuaaaggcagu

SEQ ID NO: 983700 - RNA, 21 nt, Human
auuccuuuuuaaagcagcaau

SEQ ID NO: 983701 - RNA, 24 nt, Human
caaaagacagauagcugcugcucc

SEQ ID NO: 983702 - RNA, 19 nt, Human
caaaguagcuuuccagaac

SEQ ID NO: 983703 - RNA, 21 nt, Human
caacaaaguagcuuuccagaa

SEQ ID NO: 983704 - RNA, 24 nt, Human
caacaaaguagcuuuccagaacua

SEQ ID NO: 983705 - RNA, 20 nt, Human
cacacgguuuauaauaaaac

SEQ ID NO: 983706 - RNA, 24 nt, Human
cacagcacacacaggcagaaugga

SEQ ID NO: 983707 - RNA, 18 nt, Human
caccaccaucuucaggag

SEQ ID NO: 983708 - RNA, 21 nt, Human
cagaaauaagugcacuucuaa

SEQ ID NO: 983709 - RNA, 18 nt, Human
cagcacacacaggcagaa

SEQ ID NO: 983710 - RNA, 23 nt, Human
cagcagcaacauuuauaaaagcu

SEQ ID NO: 983711 - RNA, 18 nt, Human
cagcucccuucuccccgc

SEQ ID NO: 983712 - RNA, 21 nt, Human
cagcucccuucuccccgcucc

SEQ ID NO: 983713 - RNA, 20 nt, Human
cauaagauuugcaguaaaac

SEQ ID NO: 983714 - RNA, 24 nt, Human
ccaaccaauuccuauaguagucuu

SEQ ID NO: 983715 - RNA, 20 nt, Human
ccaagcaagccuggugaugc

SEQ ID NO: 983716 - RNA, 22 nt, Human
ccaagugucucauauuuauauu

SEQ ID NO: 983717 - RNA, 24 nt, Human
ccagaacuacccuuccagugccaa

SEQ ID NO: 983718 - RNA, 24 nt, Human
ccauaaucaaauuaaaauaaugcc

SEQ ID NO: 983719 - RNA, 23 nt, Human
cccagcagcaacauuuauaaaag

SEQ ID NO: 983720 - RNA, 21 nt, Human
ccccaaagauugugaaucacu

SEQ ID NO: 983721 - RNA, 19 nt, Human
ccccgggaggugggacccg

SEQ ID NO: 983722 - RNA, 23 nt, Human
ccccuauccucucaucacaaccc

SEQ ID NO: 983723 - RNA, 19 nt, Human
cccgcccccgggagguggg

SEQ ID NO: 983724 - RNA, 19 nt, Human
cccgcuccgcccucgcccc

SEQ ID NO: 983725 - RNA, 21 nt, Human
cccugaacucucgcgagccuu

SEQ ID NO: 983726 - RNA, 20 nt, Human
cccuuuaauaagcugaccuc

SEQ ID NO: 983727 - RNA, 24 nt, Human
ccgcuccgcccucgccccgccccc

SEQ ID NO: 983728 - RNA, 18 nt, Human
ccggucgcgcccgcggcc

SEQ ID NO: 983729 - RNA, 18 nt, Human
ccucgccccgcccccggg

SEQ ID NO: 983730 - RNA, 19 nt, Human
ccucgccccgcccccggga

SEQ ID NO: 983731 - RNA, 19 nt, Human
cuaccugaguucucuuggu

SEQ ID NO: 983732 - RNA, 21 nt, Human
cuagacccauaagauuugcag

SEQ ID NO: 983733 - RNA, 22 nt, Human
cuccugaauugauuagaggugu

SEQ ID NO: 983734 - RNA, 22 nt, Human
cugcaguguuaccuacagguua

SEQ ID NO: 983735 - RNA, 21 nt, Human
gaucuuugguacauuuggagc

SEQ ID NO: 983736 - RNA, 18 nt, Human
gcacggaccgcagccggc

SEQ ID NO: 983737 - RNA, 19 nt, Human
gccacagcacacacaggca

SEQ ID NO: 983738 - RNA, 23 nt, Human
ggaacucaaaacaaaaaaugcuc

SEQ ID NO: 983739 - RNA, 24 nt, Human
ggagaaaaccccaaagauugugaa

SEQ ID NO: 983740 - RNA, 20 nt, Human
ggggaguugggggaaacagg

SEQ ID NO: 983741 - RNA, 24 nt, Human
guugacuagauaggguuuugucau

SEQ ID NO: 983742 - RNA, 24 nt, Human
guuuguuucauuaagauuuuucag

SEQ ID NO: 983743 - RNA, 18 nt, Human
uaaaaaguaaacuuaggu

SEQ ID NO: 983744 - RNA, 23 nt, Human
uaaagggcagacacagucuuuaa

SEQ ID NO: 983745 - RNA, 22 nt, Human
uaaauaaacacaacaggaaaau

SEQ ID NO: 983746 - RNA, 26 nt, Human
uaaaugaaacccuaucuuaggccuua

SEQ ID NO: 983747 - RNA, 21 nt, Human
uaacggaaacugccuccgguc

SEQ ID NO: 983748 - RNA, 21 nt, Human
uaagcuagaaaagauuauuua

SEQ ID NO: 983749 - RNA, 22 nt, Human
uaauacaaagguuuuuaauaaa

SEQ ID NO: 983750 - RNA, 22 nt, Human
uacucaaaaaauccagacuaga

SEQ ID NO: 983751 - RNA, 18 nt, Human
uaguagucccaagugucu

SEQ ID NO: 983752 - RNA, 21 nt, Human
uaucaaagaucugucaggucu

SEQ ID NO: 983753 - RNA, 24 nt, Human
uaugggaaauauauaauagagaaa

SEQ ID NO: 983754 - RNA, 23 nt, Human
ucaaaaaauccagacuagaaaaa

SEQ ID NO: 983755 - RNA, 18 nt, Human
ucacaagaaaaucaacuu

SEQ ID NO: 983756 - RNA, 22 nt, Human
ucaguguauuguuaucuacgcc

SEQ ID NO: 983757 - RNA, 23 nt, Human
uccaaaccaauagggcaauguuc

SEQ ID NO: 983758 - RNA, 19 nt, Human
uccauuaacaguuaugaca

SEQ ID NO: 983759 - RNA, 18 nt, Human
uccccgcuccgcccucgc

SEQ ID NO: 983760 - RNA, 21 nt, Human
uccccgcuccgcccucgcccc

SEQ ID NO: 983761 - RNA, 21 nt, Human
uccccuauccucucaucacaa

SEQ ID NO: 983762 - RNA, 19 nt, Human
uccgcacggaccgcagccg

SEQ ID NO: 983763 - RNA, 20 nt, Human
ucuacagauguccaaaccaa

SEQ ID NO: 983764 - RNA, 22 nt, Human
ugauauguaacaacuuucuaga

SEQ ID NO: 983765 - RNA, 18 nt, Human
ugauauguguuucuccug

SEQ ID NO: 983766 - RNA, 21 nt, Human
uggcacaauaauacaaguacu

SEQ ID NO: 983767 - RNA, 19 nt, Human
ugggggaguugggggaaac

SEQ ID NO: 983768 - RNA, 19 nt, Human
uggggugagaaaaucucau

SEQ ID NO: 983769 - RNA, 27 nt, Human
uuaacaaaaauaauaaaauauuaaaaa

SEQ ID NO: 983770 - RNA, 21 nt, Human
uuagagauuuacauaaaaaua

SEQ ID NO: 983771 - RNA, 23 nt, Human
uucuacaagcagccuucaugguc

SEQ ID NO: 983772 - RNA, 26 nt, Human
uucuauauacuuagaaaaaccaaaaa

SEQ ID NO: 983773 - RNA, 21 nt, Human
uugcaucaugaaucaaauucu

SEQ ID NO: 983774 - RNA, 20 nt, Human
uugguagccagggaccucua

SEQ ID NO: 983775 - RNA, 20 nt, Human
uuuucagaaauaagugcacu

SEQ ID NO: 983776 - RNA, 23 nt, Human
uuuuucauaaaaaucuaaaauau

SEQ ID NO: 983777 - RNA, 27 nt, Human
aaaacccuuccaauuuucacuccaccu

SEQ ID NO: 983778 - RNA, 26 nt, Human
aaacagacuaaaagaauaagcaucca

SEQ ID NO: 983779 - RNA, 25 nt, Human
aaauacuccaaagacagacccaaaa

SEQ ID NO: 983780 - RNA, 25 nt, Human
aacaacaaugaaaggagaaauaggc

SEQ ID NO: 983781 - RNA, 23 nt, Human
aauaacaacaaugaaaggagaaa

SEQ ID NO: 983782 - RNA, 24 nt, Human
aaugguaccauccugggagcccac

SEQ ID NO: 983783 - RNA, 23 nt, Human
accauccugggagcccaccuccu

SEQ ID NO: 983784 - RNA, 21 nt, Human
acuaaaagaauaagcauccaa

SEQ ID NO: 983785 - RNA, 19 nt, Human
agaaagagggaggguugaa

SEQ ID NO: 983786 - RNA, 21 nt, Human
agacagacccaaaacuuuuug

SEQ ID NO: 983787 - RNA, 22 nt, Human
agagaauaaagcagaacucgga

SEQ ID NO: 983788 - RNA, 27 nt, Human
aggaaaugggagugagggggugggagg

SEQ ID NO: 983789 - RNA, 24 nt, Human
aggagaaauaggcuucuggauaga

SEQ ID NO: 983790 - RNA, 21 nt, Human
agucagauuguaaauugguuu

SEQ ID NO: 983791 - RNA, 18 nt, Human
agugagggggugggagga

SEQ ID NO: 983792 - RNA, 23 nt, Human
aucaccuuuagaauaacaaaucc

SEQ ID NO: 983793 - RNA, 30 nt, Human
aucguuguguaaacaauagaauggaaugaa

SEQ ID NO: 983794 - RNA, 19 nt, Human
caccucccucucccaagag

SEQ ID NO: 983795 - RNA, 24 nt, Human
ccagaguaaagcagccucaggcac

SEQ ID NO: 983796 - RNA, 21 nt, Human
cccgcccgccgccgccgccgc

SEQ ID NO: 983797 - RNA, 19 nt, Human
cccgccgccgccgccgccg

SEQ ID NO: 983798 - RNA, 26 nt, Human
ccgcccgccgccgccgccgccgccgg

SEQ ID NO: 983799 - RNA, 18 nt, Human
ccgccgccgccgccgccg

SEQ ID NO: 983800 - RNA, 18 nt, Human
ccgccgccgccgccgccg

SEQ ID NO: 983801 - RNA, 18 nt, Human
ccgccgccgccgccgccg

SEQ ID NO: 983802 - RNA, 23 nt, Human
ccgccgccgccgccgccgccgcc

SEQ ID NO: 983803 - RNA, 24 nt, Human
ccgccgccgccgccgccgccgccg

SEQ ID NO: 983804 - RNA, 24 nt, Human
ccgccgccgccgccgccgccgccg

SEQ ID NO: 983805 - RNA, 24 nt, Human
ccgccgccgccgccgccgccgccg

SEQ ID NO: 983806 - RNA, 26 nt, Human
ccgccgccgccgccgccgccgccguc

SEQ ID NO: 983807 - RNA, 22 nt, Human
ccgccgccgccgccgccgccgu

SEQ ID NO: 983808 - RNA, 24 nt, Human
ccgccgccgccgccguccccgccg

SEQ ID NO: 983809 - RNA, 18 nt, Human
ccgccgccgccguccccg

SEQ ID NO: 983810 - RNA, 19 nt, Human
ccgccgccgccguccccgc

SEQ ID NO: 983811 - RNA, 23 nt, Human
ccgccgccguccccgccgaagcc

SEQ ID NO: 983812 - RNA, 22 nt, Human
ccgccguccccgccgaagccag

SEQ ID NO: 983813 - RNA, 21 nt, Human
ccucucggccggcgcacgccc

SEQ ID NO: 983814 - RNA, 23 nt, Human
cgccgccgccgccgccguccccg

SEQ ID NO: 983815 - RNA, 19 nt, Human
cuccaaagacagacccaaa

SEQ ID NO: 983816 - RNA, 18 nt, Human
gauugcuagagaauaaag

SEQ ID NO: 983817 - RNA, 18 nt, Human
ggaaaugggagugagggg

SEQ ID NO: 983818 - RNA, 20 nt, Human
ggaaaugggagugagggggu

SEQ ID NO: 983819 - RNA, 23 nt, Human
ggaggaaaugggcagaaagaggg

SEQ ID NO: 983820 - RNA, 22 nt, Human
ggaguagggguggcgguggggc

SEQ ID NO: 983821 - RNA, 22 nt, Human
gggggugggaggaaaugggcag

SEQ ID NO: 983822 - RNA, 19 nt, Human
ggggugggaggaaaugggc

SEQ ID NO: 983823 - RNA, 19 nt, Human
guauugauucuugaaccuu

SEQ ID NO: 983824 - RNA, 26 nt, Human
uaaaagaggcaguauugucagaugua

SEQ ID NO: 983825 - RNA, 19 nt, Human
uaaagcagaacucggagug

SEQ ID NO: 983826 - RNA, 22 nt, Human
uaaauaagaccaccugagugua

SEQ ID NO: 983827 - RNA, 23 nt, Human
uaacagaaauaacaacaaugaaa

SEQ ID NO: 983828 - RNA, 23 nt, Human
uaaggagagccaaaucagagaug

SEQ ID NO: 983829 - RNA, 21 nt, Human
uacuccaaagacagacccaaa

SEQ ID NO: 983830 - RNA, 18 nt, Human
uaggaaagagcaauggua

SEQ ID NO: 983831 - RNA, 22 nt, Human
uaggcuucuggauagaaaauuc

SEQ ID NO: 983832 - RNA, 19 nt, Human
uagggguggcgguggggca

SEQ ID NO: 983833 - RNA, 21 nt, Human
uauacagucaagcagggggcu

SEQ ID NO: 983834 - RNA, 22 nt, Human
uauuugcuuuuugaaguacauu

SEQ ID NO: 983835 - RNA, 20 nt, Human
uccccgccgaagccagcuag

SEQ ID NO: 983836 - RNA, 22 nt, Human
ucggccggcgcacgcccucccc

SEQ ID NO: 983837 - RNA, 18 nt, Human
ugaaaaauaaaauucaca

SEQ ID NO: 983838 - RNA, 22 nt, Human
ugaaaggagaaauaggcuucug

SEQ ID NO: 983839 - RNA, 22 nt, Human
ugagggggugggaggaaauggg

SEQ ID NO: 983840 - RNA, 21 nt, Human
ugcagcuguggcauuugcuug

SEQ ID NO: 983841 - RNA, 18 nt, Human
ugcggaggagagcaggag

SEQ ID NO: 983842 - RNA, 20 nt, Human
ugcggaggagagcaggagga

SEQ ID NO: 983843 - RNA, 24 nt, Human
ugggaggaaaugggcagaaagagg

SEQ ID NO: 983844 - RNA, 25 nt, Human
ugggaggaaaugggcagaaagaggg

SEQ ID NO: 983845 - RNA, 20 nt, Human
ugggcagaaagagggagggu

SEQ ID NO: 983846 - RNA, 21 nt, Human
ugggcagaaagagggaggguu

SEQ ID NO: 983847 - RNA, 27 nt, Human
uguguaaacaauagaauggaaugaaau

SEQ ID NO: 983848 - RNA, 26 nt, Human
uguugccaauaaauaagaccaccuga

SEQ ID NO: 983849 - RNA, 27 nt, Human
uuacauuaaauuguaugcaaauggcuc

SEQ ID NO: 983850 - RNA, 22 nt, Human
uucaaguaaaacucagauucug

SEQ ID NO: 983851 - RNA, 24 nt, Human
uucagauucuuuucacuuaaggga

SEQ ID NO: 983852 - RNA, 19 nt, Human
uugaagccggccucuucac

SEQ ID NO: 983853 - RNA, 24 nt, Human
uuugcaaggcaccucccucuccca

SEQ ID NO: 983854 - RNA, 25 nt, Human
uuuugcuaggaaaugggagugaggg

SEQ ID NO: 983855 - RNA, 20 nt, Human
aaagacagccucccccaccg

SEQ ID NO: 983856 - RNA, 19 nt, Human
aaccucuagaccaugcagc

SEQ ID NO: 983857 - RNA, 23 nt, Human
aacgaaacaaaaccaaaacccga

SEQ ID NO: 983858 - RNA, 24 nt, Human
aacgaaacaaaaccaaaacccgaa

SEQ ID NO: 983859 - RNA, 24 nt, Human
aagcaugaagcugggggcgggggu

SEQ ID NO: 983860 - RNA, 19 nt, Human
aagcugggggcgggggugg

SEQ ID NO: 983861 - RNA, 27 nt, Human
aaggaacucagcccagagggugugggc

SEQ ID NO: 983862 - RNA, 21 nt, Human
aaggcccaggguguccaccuc

SEQ ID NO: 983863 - RNA, 23 nt, Human
aagggaaagaaggaacucagccc

SEQ ID NO: 983864 - RNA, 23 nt, Human
aaguugagggcccuggcucuggg

SEQ ID NO: 983865 - RNA, 19 nt, Human
acaaaaccaaaacccgaac

SEQ ID NO: 983866 - RNA, 19 nt, Human
accaucaccccccuccccc

SEQ ID NO: 983867 - RNA, 23 nt, Human
acccagccgcgcccggccuggug

SEQ ID NO: 983868 - RNA, 21 nt, Human
accuuacccgcugcccuucca

SEQ ID NO: 983869 - RNA, 22 nt, Human
acuguccaugcugcccacaacc

SEQ ID NO: 983870 - RNA, 21 nt, Human
agagggcacaggaggggccag

SEQ ID NO: 983871 - RNA, 25 nt, Human
agaggugaacgaaacaaaaccaaaa

SEQ ID NO: 983872 - RNA, 19 nt, Human
agccucccccaccgccauc

SEQ ID NO: 983873 - RNA, 18 nt, Human
aggaauaucccagcccuc

SEQ ID NO: 983874 - RNA, 20 nt, Human
aggacccgugaucccacgcc

SEQ ID NO: 983875 - RNA, 19 nt, Human
aggauggaaguugagggcc

SEQ ID NO: 983876 - RNA, 19 nt, Human
aggcaccaucaccccccuc

SEQ ID NO: 983877 - RNA, 18 nt, Human
aggccuccacccacagcc

SEQ ID NO: 983878 - RNA, 22 nt, Human
aggcucccaggcaccaucaccc

SEQ ID NO: 983879 - RNA, 25 nt, Human
aggcuggagaggcgcaaguggcggc

SEQ ID NO: 983880 - RNA, 21 nt, Human
agggcagagggcacaggaggg

SEQ ID NO: 983881 - RNA, 20 nt, Human
aggguguuggggcuggcuug

SEQ ID NO: 983882 - RNA, 20 nt, Human
aucaccccccucccccgucg

SEQ ID NO: 983883 - RNA, 19 nt, Human
caaccacauuaaggaaagc

SEQ ID NO: 983884 - RNA, 22 nt, Human
caaccucuagaccaugcagccu

SEQ ID NO: 983885 - RNA, 18 nt, Human
cacacgcaggcucccagg

SEQ ID NO: 983886 - RNA, 22 nt, Human
cacagcccccucugggugccaa

SEQ ID NO: 983887 - RNA, 19 nt, Human
cacauuaaggaaagcugca

SEQ ID NO: 983888 - RNA, 20 nt, Human
cacauuaaggaaagcugcag

SEQ ID NO: 983889 - RNA, 26 nt, Human
caccaugaggaauaucccagcccuca

SEQ ID NO: 983890 - RNA, 18 nt, Human
caccgccaccucucucac

SEQ ID NO: 983891 - RNA, 19 nt, Human
caccgccaccucucucaca

SEQ ID NO: 983892 - RNA, 19 nt, Human
caccgccauccuccagcug

SEQ ID NO: 983893 - RNA, 22 nt, Human
cagcacuccaaagggcucuagg

SEQ ID NO: 983894 - RNA, 19 nt, Human
cagccucccccaccgccau

SEQ ID NO: 983895 - RNA, 21 nt, Human
cagccugcucaugggucccug

SEQ ID NO: 983896 - RNA, 20 nt, Human
cagccuuggguucccauccc

SEQ ID NO: 983897 - RNA, 21 nt, Human
cagcggucccacaaaaucccc

SEQ ID NO: 983898 - RNA, 19 nt, Human
caggaugggcgccgcccgu

SEQ ID NO: 983899 - RNA, 19 nt, Human
caggcccccaacugcaggc

SEQ ID NO: 983900 - RNA, 25 nt, Human
caggcucccaggcaccaucaccccc

SEQ ID NO: 983901 - RNA, 24 nt, Human
cauuaaggaaagcugcagccccca

SEQ ID NO: 983902 - RNA, 20 nt, Human
ccacagcccccucugggugc

SEQ ID NO: 983903 - RNA, 21 nt, Human
ccaccagggcagagggcacag

SEQ ID NO: 983904 - RNA, 22 nt, Human
ccagcagacucagggcaggccc

SEQ ID NO: 983905 - RNA, 22 nt, Human
cccaacugcaggcuuccaggaa

SEQ ID NO: 983906 - RNA, 25 nt, Human
cccacaaccucuagaccaugcagcc

SEQ ID NO: 983907 - RNA, 22 nt, Human
cccacccgccugccaguucaac

SEQ ID NO: 983908 - RNA, 22 nt, Human
cccccgggggacccagccgcgc

SEQ ID NO: 983909 - RNA, 30 nt, Human
cccccgggggacccagccgcgcccggccuu

SEQ ID NO: 983910 - RNA, 18 nt, Human
cccccgucgccccucccu

SEQ ID NO: 983911 - RNA, 20 nt, Human
cccccuggaaagacagcagg

SEQ ID NO: 983912 - RNA, 22 nt, Human
cccccuuggggcucccugagga

SEQ ID NO: 983913 - RNA, 19 nt, Human
ccccuggaaagacagcagg

SEQ ID NO: 983914 - RNA, 20 nt, Human
cccgcugcccuuccaacacc

SEQ ID NO: 983915 - RNA, 22 nt, Human
cccgcugcccuuccaacaccug

SEQ ID NO: 983916 - RNA, 18 nt, Human
cccuggguuuaccacggu

SEQ ID NO: 983917 - RNA, 18 nt, Human
ccggccaaggccucccgc

SEQ ID NO: 983918 - RNA, 20 nt, Human
ccguccuccaaggccagcac

SEQ ID NO: 983919 - RNA, 18 nt, Human
ccucccgcaggauggaag

SEQ ID NO: 983920 - RNA, 24 nt, Human
ccugcugaccccugagcccugcag

SEQ ID NO: 983921 - RNA, 24 nt, Human
ccugggccagaggcucuuuggaac

SEQ ID NO: 983922 - RNA, 20 nt, Human
ccuuggggcucccugaggag

SEQ ID NO: 983923 - RNA, 18 nt, Human
cgaaacaaaaccaaaacc

SEQ ID NO: 983924 - RNA, 19 nt, Human
cgaaacaaaaccaaaaccc

SEQ ID NO: 983925 - RNA, 21 nt, Human
cgccagguggucucagaggac

SEQ ID NO: 983926 - RNA, 18 nt, Human
cggcuggugcugcagugc

SEQ ID NO: 983927 - RNA, 21 nt, Human
cgggggugggggaggaggaac

SEQ ID NO: 983928 - RNA, 20 nt, Human
cucuagaccaugcagccugc

SEQ ID NO: 983929 - RNA, 20 nt, Human
cugcccugaccugcacgugc

SEQ ID NO: 983930 - RNA, 20 nt, Human
cuggagaggcgcaaguggcg

SEQ ID NO: 983931 - RNA, 19 nt, Human
cuggguccuaagagaacuc

SEQ ID NO: 983932 - RNA, 18 nt, Human
cuucccuuucugaguccc

SEQ ID NO: 983933 - RNA, 20 nt, Human
cuuucugagucccacaaaag

SEQ ID NO: 983934 - RNA, 22 nt, Human
gaaacaaaaccaaaacccgaac

SEQ ID NO: 983935 - RNA, 20 nt, Human
gaacgaaacaaaaccaaaac

SEQ ID NO: 983936 - RNA, 20 nt, Human
gaaggguguuggggcuggcu

SEQ ID NO: 983937 - RNA, 18 nt, Human
gacacuggcagugcccgg

SEQ ID NO: 983938 - RNA, 18 nt, Human
gagaagcaugaagcuggg

SEQ ID NO: 983939 - RNA, 21 nt, Human
gagagggagauggggcagugg

SEQ ID NO: 983940 - RNA, 20 nt, Human
gagcugcagacggcuggugc

SEQ ID NO: 983941 - RNA, 26 nt, Human
gaggggccugggccagaggcucuuug

SEQ ID NO: 983942 - RNA, 21 nt, Human
gaggugaacgaaacaaaacca

SEQ ID NO: 983943 - RNA, 18 nt, Human
gcagacggcuggugcugc

SEQ ID NO: 983944 - RNA, 18 nt, Human
gcccacuccccagcagac

SEQ ID NO: 983945 - RNA, 23 nt, Human
gcccacuccccagcagacucagg

SEQ ID NO: 983946 - RNA, 21 nt, Human
gcccccaacugcaggcuucca

SEQ ID NO: 983947 - RNA, 19 nt, Human
gcccucaguucugcuuccc

SEQ ID NO: 983948 - RNA, 20 nt, Human
gcccuggguuuaccacgguc

SEQ ID NO: 983949 - RNA, 25 nt, Human
gccuccacccacagcccccucuggg

SEQ ID NO: 983950 - RNA, 20 nt, Human
gccugcggaggcuggagagg

SEQ ID NO: 983951 - RNA, 18 nt, Human
ggagaagugggggaugcu

SEQ ID NO: 983952 - RNA, 18 nt, Human
ggccugggccagaggcuc

SEQ ID NO: 983953 - RNA, 27 nt, Human
ggcgggggugggggaggaggaacaaaa

SEQ ID NO: 983954 - RNA, 20 nt, Human
gggagagggagauggggcag

SEQ ID NO: 983955 - RNA, 18 nt, Human
gggagauggggcaguggg

SEQ ID NO: 983956 - RNA, 19 nt, Human
gggcacaggaggggccagc

SEQ ID NO: 983957 - RNA, 19 nt, Human
gggcaggagaggccuggag

SEQ ID NO: 983958 - RNA, 19 nt, Human
gggcccccgggggacccag

SEQ ID NO: 983959 - RNA, 18 nt, Human
gggcgggggugggggagg

SEQ ID NO: 983960 - RNA, 23 nt, Human
gggcugucuugguggggagaggg

SEQ ID NO: 983961 - RNA, 24 nt, Human
gggugugggcaggagaggccugga

SEQ ID NO: 983962 - RNA, 19 nt, Human
ggugccaagugggaagggu

SEQ ID NO: 983963 - RNA, 22 nt, Human
gguggggagagggagauggggc

SEQ ID NO: 983964 - RNA, 23 nt, Human
ggugugggcaggagaggccugga

SEQ ID NO: 983965 - RNA, 26 nt, Human
ggugugggcaggagaggccuggaguc

SEQ ID NO: 983966 - RNA, 23 nt, Human
gucgccccucccucauggggagc

SEQ ID NO: 983967 - RNA, 22 nt, Human
gugggucccugcugaccccuga

SEQ ID NO: 983968 - RNA, 25 nt, Human
gugguacaaagacagccucccccac

SEQ ID NO: 983969 - RNA, 24 nt, Human
uaagagaacucagccgcccccuuc

SEQ ID NO: 983970 - RNA, 23 nt, Human
uaucccagcccucaguucugcuu

SEQ ID NO: 983971 - RNA, 26 nt, Human
ucaccccccucccccgucgccccucc

SEQ ID NO: 983972 - RNA, 22 nt, Human
ucaccgccaccucucucacagg

SEQ ID NO: 983973 - RNA, 21 nt, Human
ucacgcccggcggcuccugca

SEQ ID NO: 983974 - RNA, 21 nt, Human
uccaccucacgccaggugguc

SEQ ID NO: 983975 - RNA, 18 nt, Human
ucccagcuggcugcuccu

SEQ ID NO: 983976 - RNA, 21 nt, Human
ucccccgucgccccucccuca

SEQ ID NO: 983977 - RNA, 21 nt, Human
ucccugaggaggacuuguggc

SEQ ID NO: 983978 - RNA, 22 nt, Human
ucccugggugugacucuggaag

SEQ ID NO: 983979 - RNA, 22 nt, Human
ucuugguggggagagggagaug

SEQ ID NO: 983980 - RNA, 22 nt, Human
ugaacgaaacaaaaccaaaacc

SEQ ID NO: 983981 - RNA, 19 nt, Human
ugaagcugggggcgggggu

SEQ ID NO: 983982 - RNA, 28 nt, Human
ugaccagacagcccagcguuguaaugac

SEQ ID NO: 983983 - RNA, 19 nt, Human
ugaucccacgccaccgccc

SEQ ID NO: 983984 - RNA, 19 nt, Human
ugcagacggcuggugcugc

SEQ ID NO: 983985 - RNA, 18 nt, Human
ugcauauuacaguaggcu

SEQ ID NO: 983986 - RNA, 19 nt, Human
ugcccacuccccagcagac

SEQ ID NO: 983987 - RNA, 24 nt, Human
ugcccacuccccagcagacucagg

SEQ ID NO: 983988 - RNA, 21 nt, Human
ugcccggccaaggccucccgc

SEQ ID NO: 983989 - RNA, 21 nt, Human
uggagaagugggggaugcugc

SEQ ID NO: 983990 - RNA, 23 nt, Human
uggagaagugggggaugcugcag

SEQ ID NO: 983991 - RNA, 22 nt, Human
uggagucaggccuccacccaca

SEQ ID NO: 983992 - RNA, 22 nt, Human
uggcagagaaugcccacucccc

SEQ ID NO: 983993 - RNA, 19 nt, Human
uggcagugcccggccaagg

SEQ ID NO: 983994 - RNA, 23 nt, Human
uggcagugcccggccaaggccuc

SEQ ID NO: 983995 - RNA, 20 nt, Human
ugggaaggguguuggggcug

SEQ ID NO: 983996 - RNA, 21 nt, Human
ugggaaggguguuggggcugg

SEQ ID NO: 983997 - RNA, 22 nt, Human
ugggcguccaagggaaagaagg

SEQ ID NO: 983998 - RNA, 19 nt, Human
uggggagagggagaugggg

SEQ ID NO: 983999 - RNA, 22 nt, Human
uggggagccccuucccccugga

SEQ ID NO: 984000 - RNA, 20 nt, Human
uucccuuucugagucccaca

SEQ ID NO: 984001 - RNA, 23 nt, Human
uucugcuucccuuucugaguccc

SEQ ID NO: 984002 - RNA, 18 nt, Human
aaacaccaaaagcagagg

SEQ ID NO: 984003 - RNA, 20 nt, Human
aacguggagcugcuggagcu

SEQ ID NO: 984004 - RNA, 21 nt, Human
aacguggagcugcuggagcug

SEQ ID NO: 984005 - RNA, 21 nt, Human
aacucucuccucuccccucuc

SEQ ID NO: 984006 - RNA, 27 nt, Human
aagcaacaccacugguacucacaaccc

SEQ ID NO: 984007 - RNA, 20 nt, Human
acaccaaaagcagaggaaac

SEQ ID NO: 984008 - RNA, 23 nt, Human
accccccuccccccaaaccccag

SEQ ID NO: 984009 - RNA, 26 nt, Human
acucucuccucuccccucucccaccc

SEQ ID NO: 984010 - RNA, 22 nt, Human
agagaugugaaaaucagaucug

SEQ ID NO: 984011 - RNA, 18 nt, Human
agccgcugccccacccag

SEQ ID NO: 984012 - RNA, 18 nt, Human
aguuagaagcgagcugcu

SEQ ID NO: 984013 - RNA, 24 nt, Human
auggugccuggaggcucaaugucc

SEQ ID NO: 984014 - RNA, 20 nt, Human
cacacacagaccucauccca

SEQ ID NO: 984015 - RNA, 24 nt, Human
caccaaaagcagaggaaacgcccc

SEQ ID NO: 984016 - RNA, 21 nt, Human
cacccaggacucuguccuuca

SEQ ID NO: 984017 - RNA, 20 nt, Human
caccccccuccccccaaacc

SEQ ID NO: 984018 - RNA, 21 nt, Human
caucccaccugcugcagggug

SEQ ID NO: 984019 - RNA, 18 nt, Human
ccaaacucucuccucucc

SEQ ID NO: 984020 - RNA, 19 nt, Human
ccaccccccuccccccaaa

SEQ ID NO: 984021 - RNA, 23 nt, Human
ccaccccccuccccccaaacccc

SEQ ID NO: 984022 - RNA, 26 nt, Human
cccaccccgucauuguuccccggaaa

SEQ ID NO: 984023 - RNA, 22 nt, Human
ccccccaaaccccagugcuggg

SEQ ID NO: 984024 - RNA, 20 nt, Human
ccccccuccccccaaacccc

SEQ ID NO: 984025 - RNA, 22 nt, Human
ccccccuccccccaaaccccag

SEQ ID NO: 984026 - RNA, 27 nt, Human
ccccccuccccccaaaccggguccuuc

SEQ ID NO: 984027 - RNA, 24 nt, Human
cccccuccccccaaaccccagugc

SEQ ID NO: 984028 - RNA, 21 nt, Human
ccugcagccgcugccccaccc

SEQ ID NO: 984029 - RNA, 24 nt, Human
ccuugaguucuucuccaucucccu

SEQ ID NO: 984030 - RNA, 23 nt, Human
ccuuggccaccccccucccccca

SEQ ID NO: 984031 - RNA, 18 nt, Human
cgccccuuggccaccccc

SEQ ID NO: 984032 - RNA, 23 nt, Human
cggcgggcgaggcugccuggaac

SEQ ID NO: 984033 - RNA, 23 nt, Human
cgggcgaggcugccuggaacgug

SEQ ID NO: 984034 - RNA, 21 nt, Human
cucaucccaccugcugcaggg

SEQ ID NO: 984035 - RNA, 21 nt, Human
cucuguccuucacccugaagu

SEQ ID NO: 984036 - RNA, 22 nt, Human
cuuggccaccccccucccccca

SEQ ID NO: 984037 - RNA, 22 nt, Human
gaaacgccccuuggccaccccc

SEQ ID NO: 984038 - RNA, 18 nt, Human
gagcgcagccggcgggcg

SEQ ID NO: 984039 - RNA, 18 nt, Human
gcgcagccggcgggcgag

SEQ ID NO: 984040 - RNA, 23 nt, Human
ggaaacgccccuuggccaccccc

SEQ ID NO: 984041 - RNA, 20 nt, Human
ggagcugcuggagcuguccg

SEQ ID NO: 984042 - RNA, 20 nt, Human
ggagcugcuggagcuguccg

SEQ ID NO: 984043 - RNA, 18 nt, Human
ggcaggguugcaaugucc

SEQ ID NO: 984044 - RNA, 23 nt, Human
ggcaggguugcaauguccuugag

SEQ ID NO: 984045 - RNA, 19 nt, Human
uacaaacaccaaaagcaga

SEQ ID NO: 984046 - RNA, 18 nt, Human
uagaagcgagcugcucuc

SEQ ID NO: 984047 - RNA, 23 nt, Human
ucacuggucaauucuuaacaugu

SEQ ID NO: 984048 - RNA, 19 nt, Human
uccagguagagaugugaaa

SEQ ID NO: 984049 - RNA, 21 nt, Human
ucccaccugcugcagggugga

SEQ ID NO: 984050 - RNA, 19 nt, Human
uccccggaaacaaauagga

SEQ ID NO: 984051 - RNA, 22 nt, Human
ucuguccuucacccugaaguuc

SEQ ID NO: 984052 - RNA, 21 nt, Human
ugaaaguuacagagugggucu

SEQ ID NO: 984053 - RNA, 22 nt, Human
ugaccuggaaaguucuuuggcc

SEQ ID NO: 984054 - RNA, 21 nt, Human
ugccuggaggcucaaugucca

SEQ ID NO: 984055 - RNA, 20 nt, Human
uggagcugcuggagcugucc

SEQ ID NO: 984056 - RNA, 22 nt, Human
uggcugaaucuagcugaaaguu

SEQ ID NO: 984057 - RNA, 27 nt, Human
ugggagcgcagccggcgggcgaggcug

SEQ ID NO: 984058 - RNA, 23 nt, Human
ugggucugucaccagcuugggac

SEQ ID NO: 984059 - RNA, 19 nt, Human
ugguucacacacacacaca

SEQ ID NO: 984060 - RNA, 18 nt, Human
uguacaaacaccaaaagc

SEQ ID NO: 984061 - RNA, 22 nt, Human
uuagaagcgagcugcucucuuc

SEQ ID NO: 984062 - RNA, 27 nt, Human
uucacacacacacacagaccucauccc

SEQ ID NO: 984063 - RNA, 21 nt, Human
uucuuaacauguacaaacacc

SEQ ID NO: 984064 - RNA, 25 nt, Human
uucuucuccaucucccuuucccaaa

SEQ ID NO: 984065 - RNA, 24 nt, Human
uuggccaccccccuccccccaaac

SEQ ID NO: 984066 - RNA, 18 nt, Human
uuuuuuuuuuuuggaguc

SEQ ID NO: 984067 - RNA, 18 nt, Human
uuuuuuuuuuuuuuuuug

SEQ ID NO: 984068 - RNA, 22 nt, Human
uuuuuuuuuuuuuuuuuggagu

SEQ ID NO: 984069 - RNA, 20 nt, Human
acaaagccuuguccagagaa

SEQ ID NO: 984070 - RNA, 19 nt, Human
acucagcuggggaccggga

SEQ ID NO: 984071 - RNA, 19 nt, Human
agacacgccccgcgccucc

SEQ ID NO: 984072 - RNA, 19 nt, Human
agcagggcagggcaggccu

SEQ ID NO: 984073 - RNA, 18 nt, Human
agccugggccacaugcuu

SEQ ID NO: 984074 - RNA, 19 nt, Human
agcgccagggaagcagcag

SEQ ID NO: 984075 - RNA, 21 nt, Human
augcugcccugggccccagcu

SEQ ID NO: 984076 - RNA, 21 nt, Human
cacacaaggaccaaaccagcu

SEQ ID NO: 984077 - RNA, 22 nt, Human
cacccagcucagcgcugggcac

SEQ ID NO: 984078 - RNA, 20 nt, Human
caccgugcacccagcucagc

SEQ ID NO: 984079 - RNA, 21 nt, Human
caccuccuccuccaagaggcc

SEQ ID NO: 984080 - RNA, 21 nt, Human
cacgccccgcgccuccgcgcg

SEQ ID NO: 984081 - RNA, 21 nt, Human
cagaugaacaccuccuccucc

SEQ ID NO: 984082 - RNA, 19 nt, Human
cagcaggcccugcuccuuc

SEQ ID NO: 984083 - RNA, 27 nt, Human
cagcaggcccugcuccuucccaugccc

SEQ ID NO: 984084 - RNA, 25 nt, Human
cagcagggcagggcaggccuggcuc

SEQ ID NO: 984085 - RNA, 18 nt, Human
cagccaggauccccaggu

SEQ ID NO: 984086 - RNA, 18 nt, Human
cagccuccugcagccucc

SEQ ID NO: 984087 - RNA, 19 nt, Human
cagcgccagggaagcagca

SEQ ID NO: 984088 - RNA, 23 nt, Human
caggaaggugggccagccaggau

SEQ ID NO: 984089 - RNA, 18 nt, Human
cagugggcccuacgcggc

SEQ ID NO: 984090 - RNA, 19 nt, Human
cagugggcccuacgcggcc

SEQ ID NO: 984091 - RNA, 20 nt, Human
ccagcagggcagggcaggcc

SEQ ID NO: 984092 - RNA, 19 nt, Human
ccaucccucuccaaucccc

SEQ ID NO: 984093 - RNA, 20 nt, Human
ccccaucccucuccaauccc

SEQ ID NO: 984094 - RNA, 19 nt, Human
ccccgcgccuccgcgcggc

SEQ ID NO: 984095 - RNA, 20 nt, Human
ccccgcgccuccgcgcggcg

SEQ ID NO: 984096 - RNA, 23 nt, Human
ccccgcgccuccgcgcggcgccc

SEQ ID NO: 984097 - RNA, 24 nt, Human
ccccgcgccuccgcgcggcgcccu

SEQ ID NO: 984098 - RNA, 26 nt, Human
cccgcagagcuuagagccugggccac

SEQ ID NO: 984099 - RNA, 18 nt, Human
cccgcgcggccacccgcg

SEQ ID NO: 984100 - RNA, 24 nt, Human
cccucacacaaggaccaaaccagc

SEQ ID NO: 984101 - RNA, 22 nt, Human
ccucacacaaggaccaaaccag

SEQ ID NO: 984102 - RNA, 25 nt, Human
ccugcagccuccauucaugggcucu

SEQ ID NO: 984103 - RNA, 22 nt, Human
cuccccaucccucuccaauccc

SEQ ID NO: 984104 - RNA, 20 nt, Human
cuccuucccaugcccaaucc

SEQ ID NO: 984105 - RNA, 22 nt, Human
cucucuguggugcagaugaaca

SEQ ID NO: 984106 - RNA, 20 nt, Human
cugcugcuuccggcuucacc

SEQ ID NO: 984107 - RNA, 21 nt, Human
cuggaaagucagccaaggcug

SEQ ID NO: 984108 - RNA, 23 nt, Human
cuugcaaaccucugguaagaagc

SEQ ID NO: 984109 - RNA, 18 nt, Human
gaccucuucuuggagcug

SEQ ID NO: 984110 - RNA, 18 nt, Human
gacugggcucuggaaagu

SEQ ID NO: 984111 - RNA, 21 nt, Human
gcacucagcuggggaccggga

SEQ ID NO: 984112 - RNA, 20 nt, Human
gcaggcccugcuccuuccca

SEQ ID NO: 984113 - RNA, 22 nt, Human
gcccuacgcggccccgcccucc

SEQ ID NO: 984114 - RNA, 19 nt, Human
gccuucccuucccucccca

SEQ ID NO: 984115 - RNA, 22 nt, Human
ggacaaagccuuguccagagaa

SEQ ID NO: 984116 - RNA, 21 nt, Human
ggagacacgccccgcgccucc

SEQ ID NO: 984117 - RNA, 23 nt, Human
ggcaggccuggcucuccuccugg

SEQ ID NO: 984118 - RNA, 23 nt, Human
ggcccugcuccuucccaugccca

SEQ ID NO: 984119 - RNA, 18 nt, Human
ggccuggcucuccuccug

SEQ ID NO: 984120 - RNA, 21 nt, Human
uagagccugggccacaugcuu

SEQ ID NO: 984121 - RNA, 21 nt, Human
ucagccuccugcagccuccau

SEQ ID NO: 984122 - RNA, 23 nt, Human
ucaugcugcccugggccccagcu

SEQ ID NO: 984123 - RNA, 18 nt, Human
uccccagguaacuucgcc

SEQ ID NO: 984124 - RNA, 25 nt, Human
uccccaucccucuccaauccccgca

SEQ ID NO: 984125 - RNA, 19 nt, Human
uccuggcugcugcuuccgg

SEQ ID NO: 984126 - RNA, 22 nt, Human
ucgccacagggaccucuucuug

SEQ ID NO: 984127 - RNA, 25 nt, Human
ucuccagucaggaagccagcagggc

SEQ ID NO: 984128 - RNA, 21 nt, Human
ucuguggguccugucucucca

SEQ ID NO: 984129 - RNA, 23 nt, Human
ugcaaaccucugguaagaagcac

SEQ ID NO: 984130 - RNA, 20 nt, Human
uggagcugccuucccuuccc

SEQ ID NO: 984131 - RNA, 18 nt, Human
uggugcagaugaacaccu

SEQ ID NO: 984132 - RNA, 20 nt, Human
ugucaggcuguuucuguggg

SEQ ID NO: 984133 - RNA, 22 nt, Human
uguccagagaaccacuguaggg

SEQ ID NO: 984134 - RNA, 21 nt, Human
uguggguccugucucuccagu

SEQ ID NO: 984135 - RNA, 21 nt, Human
uucccuccccaucccucucca

SEQ ID NO: 984136 - RNA, 20 nt, Human
uuguuagggccucaacucuc

SEQ ID NO: 984137 - RNA, 23 nt, Human
aagcuagagccagaaucaggaaa

SEQ ID NO: 984138 - RNA, 18 nt, Human
agaaucaggaaaaucugc

SEQ ID NO: 984139 - RNA, 22 nt, Human
cagaaucaggaaaaucugcuuc

SEQ ID NO: 984140 - RNA, 24 nt, Human
cccaccgccgcagcgaccuccgga

SEQ ID NO: 984141 - RNA, 23 nt, Human
ccccagacucccuggccaagccc

SEQ ID NO: 984142 - RNA, 20 nt, Human
cccuggccaagcccagcucc

SEQ ID NO: 984143 - RNA, 19 nt, Human
ccuccggaaccaacgagac

SEQ ID NO: 984144 - RNA, 22 nt, Human
ccuccggaaccaacgagacgag

SEQ ID NO: 984145 - RNA, 22 nt, Human
ccuuguccccagacucccuggc

SEQ ID NO: 984146 - RNA, 23 nt, Human
cuagagccagaaucaggaaaauc

SEQ ID NO: 984147 - RNA, 23 nt, Human
cucccuggccaagcccagcuccc

SEQ ID NO: 984148 - RNA, 20 nt, Human
uauuacacgacuaaaguuca

SEQ ID NO: 984149 - RNA, 19 nt, Human
uccccagacucccuggcca

SEQ ID NO: 984150 - RNA, 19 nt, Human
ucccuggccaagcccagcu

SEQ ID NO: 984151 - RNA, 18 nt, Human
uguccccagacucccugg

SEQ ID NO: 984152 - RNA, 24 nt, Human
uuccuuguccccagacucccuggc

SEQ ID NO: 984153 - RNA, 25 nt, Human
uuuuuuuucagguuugccacuggug

SEQ ID NO: 984154 - RNA, 23 nt, Human
uuuuuuuuuuuuuuuuuuucagg

SEQ ID NO: 984155 - RNA, 21 nt, Human
aaaaaaaaaaagcuuugagga

SEQ ID NO: 984156 - RNA, 24 nt, Human
aaaaagcuuugaggaaugagagag

SEQ ID NO: 984157 - RNA, 19 nt, Human
aaaaggcccaggccgggau

SEQ ID NO: 984158 - RNA, 23 nt, Human
aacccagcgccgcgcccugguau

SEQ ID NO: 984159 - RNA, 20 nt, Human
aagaacagaaaagaaacccc

SEQ ID NO: 984160 - RNA, 21 nt, Human
aagaacagaaaagaaacccca

SEQ ID NO: 984161 - RNA, 23 nt, Human
aaggugcugggcagccacgggcg

SEQ ID NO: 984162 - RNA, 20 nt, Human
acagaaaagaaaccccagga

SEQ ID NO: 984163 - RNA, 19 nt, Human
accccgccagcaccaagcc

SEQ ID NO: 984164 - RNA, 21 nt, Human
acgcagccccaccgcgccucc

SEQ ID NO: 984165 - RNA, 21 nt, Human
acgccugggccuccaccggcc

SEQ ID NO: 984166 - RNA, 25 nt, Human
acgcgccccgccuuccccagcaccc

SEQ ID NO: 984167 - RNA, 21 nt, Human
acucgcccggcccuuucuaca

SEQ ID NO: 984168 - RNA, 23 nt, Human
agcagcuggaccccgccagcacc

SEQ ID NO: 984169 - RNA, 18 nt, Human
agccaggaaaaaaaaaaa

SEQ ID NO: 984170 - RNA, 19 nt, Human
aggaaaggugucgccggcg

SEQ ID NO: 984171 - RNA, 23 nt, Human
aggccagggcagggcagggcaga

SEQ ID NO: 984172 - RNA, 21 nt, Human
agggcagggcagagcagagga

SEQ ID NO: 984173 - RNA, 18 nt, Human
agggccaccccugguguc

SEQ ID NO: 984174 - RNA, 19 nt, Human
agggcgcugcugcggucag

SEQ ID NO: 984175 - RNA, 24 nt, Human
aggguggggcuggcaugugggggc

SEQ ID NO: 984176 - RNA, 23 nt, Human
agucuacaucuggauuaacaggg

SEQ ID NO: 984177 - RNA, 18 nt, Human
auagugcaaacaggaaaa

SEQ ID NO: 984178 - RNA, 22 nt, Human
auggggugggggugccauagga

SEQ ID NO: 984179 - RNA, 28 nt, Human
caaaaagaaauagugcaaacaggaaaaa

SEQ ID NO: 984180 - RNA, 22 nt, Human
caacaguggaacccuucaucau

SEQ ID NO: 984181 - RNA, 22 nt, Human
caacauagaaugcaggcccccu

SEQ ID NO: 984182 - RNA, 19 nt, Human
caauggaaucgcugaaguu

SEQ ID NO: 984183 - RNA, 21 nt, Human
caccgagauaaaaggcccagg

SEQ ID NO: 984184 - RNA, 24 nt, Human
caccgcgccuccugcacguacgca

SEQ ID NO: 984185 - RNA, 20 nt, Human
cacgaaagggaugggguggg

SEQ ID NO: 984186 - RNA, 21 nt, Human
cacgugccuugguugcagagu

SEQ ID NO: 984187 - RNA, 20 nt, Human
cagcaccaagcccugggcag

SEQ ID NO: 984188 - RNA, 21 nt, Human
cagcacccagcuccgggcugc

SEQ ID NO: 984189 - RNA, 18 nt, Human
cagccaggaaaaaaaaaa

SEQ ID NO: 984190 - RNA, 21 nt, Human
cagccccccaguuugcagucu

SEQ ID NO: 984191 - RNA, 20 nt, Human
cagcuccgggcugcuuuccc

SEQ ID NO: 984192 - RNA, 18 nt, Human
cagggccaauguuacaaa

SEQ ID NO: 984193 - RNA, 18 nt, Human
ccaccccuggugucuccu

SEQ ID NO: 984194 - RNA, 24 nt, Human
cccaccaacauagaaugcaggccc

SEQ ID NO: 984195 - RNA, 21 nt, Human
cccagccaggaaaaaaaaaaa

SEQ ID NO: 984196 - RNA, 18 nt, Human
ccccagcacccagcuccg

SEQ ID NO: 984197 - RNA, 21 nt, Human
ccccccagccaggaaaaaaaa

SEQ ID NO: 984198 - RNA, 19 nt, Human
cccccuccuccacgcagcc

SEQ ID NO: 984199 - RNA, 19 nt, Human
ccccgccagcaccaagccc

SEQ ID NO: 984200 - RNA, 21 nt, Human
ccccgccuuccccagcaccca

SEQ ID NO: 984201 - RNA, 23 nt, Human
cccgccccccagccaggaaaaaa

SEQ ID NO: 984202 - RNA, 23 nt, Human
cccuacccaucccaggugcucaa

SEQ ID NO: 984203 - RNA, 24 nt, Human
cccuucccgccccccagccaggaa

SEQ ID NO: 984204 - RNA, 20 nt, Human
ccggaaugcacgugccuugg

SEQ ID NO: 984205 - RNA, 21 nt, Human
ccuccacgcagccccaccgcg

SEQ ID NO: 984206 - RNA, 19 nt, Human
ccugcgggaugggcggcuu

SEQ ID NO: 984207 - RNA, 19 nt, Human
ccuugcgcgcgcuccccgc

SEQ ID NO: 984208 - RNA, 19 nt, Human
cgaguaacacucgcccggc

SEQ ID NO: 984209 - RNA, 21 nt, Human
cgcagccccaccgcgccuccu

SEQ ID NO: 984210 - RNA, 24 nt, Human
cgcagggacgcaggggcacgggga

SEQ ID NO: 984211 - RNA, 22 nt, Human
cgcccggcccuuucuacagcgg

SEQ ID NO: 984212 - RNA, 21 nt, Human
cgccgggccagcuccgccucu

SEQ ID NO: 984213 - RNA, 20 nt, Human
cgcugaaguuucagagcaag

SEQ ID NO: 984214 - RNA, 19 nt, Human
cgcugcugcggucaguggc

SEQ ID NO: 984215 - RNA, 23 nt, Human
cggcagcaccgagauaaaaggcc

SEQ ID NO: 984216 - RNA, 20 nt, Human
cgggaguggcacgaaaggga

SEQ ID NO: 984217 - RNA, 25 nt, Human
cgggcugcuuucccaaguguggcaa

SEQ ID NO: 984218 - RNA, 19 nt, Human
cgugccuugguugcagagu

SEQ ID NO: 984219 - RNA, 21 nt, Human
cguggcccccuccuccacgca

SEQ ID NO: 984220 - RNA, 23 nt, Human
cuccugcacguacgcagcccccc

SEQ ID NO: 984221 - RNA, 29 nt, Human
cugaaguuucagagcaaggaggagauucg

SEQ ID NO: 984222 - RNA, 26 nt, Human
cugagggagggcgccggggcaggcca

SEQ ID NO: 984223 - RNA, 19 nt, Human
cugcgggaugggcggcuuc

SEQ ID NO: 984224 - RNA, 21 nt, Human
cuggaccccgccagcaccaag

SEQ ID NO: 984225 - RNA, 26 nt, Human
cuuauacacacugggguggggguggg

SEQ ID NO: 984226 - RNA, 20 nt, Human
cuugcgccuugagacucucc

SEQ ID NO: 984227 - RNA, 21 nt, Human
cuuugaggaaugagagagggu

SEQ ID NO: 984228 - RNA, 23 nt, Human
gaaaggcacaggcugaaugcagg

SEQ ID NO: 984229 - RNA, 18 nt, Human
gaacagaaaagaaacccc

SEQ ID NO: 984230 - RNA, 27 nt, Human
gagaugggucgaagaaggugcugggcc

SEQ ID NO: 984231 - RNA, 19 nt, Human
gcaacccagcgccgcgccc

SEQ ID NO: 984232 - RNA, 19 nt, Human
gcagagcagaggaggaggg

SEQ ID NO: 984233 - RNA, 20 nt, Human
gcccaggccgggaugaccgc

SEQ ID NO: 984234 - RNA, 24 nt, Human
gcccccuccuccacgcagccccac

SEQ ID NO: 984235 - RNA, 24 nt, Human
gccccgccuuccccagcacccagc

SEQ ID NO: 984236 - RNA, 20 nt, Human
gcgaguaacacucgcccggc

SEQ ID NO: 984237 - RNA, 24 nt, Human
gcgccuccugcacguacgcagccc

SEQ ID NO: 984238 - RNA, 21 nt, Human
gcgcgccgggccagcuccgcc

SEQ ID NO: 984239 - RNA, 23 nt, Human
gcguccggaccgacuggagggug

SEQ ID NO: 984240 - RNA, 18 nt, Human
ggaggagggauuggagca

SEQ ID NO: 984241 - RNA, 19 nt, Human
ggagggauuggagcagcug

SEQ ID NO: 984242 - RNA, 26 nt, Human
ggaggguggggcuggcaugugggggc

SEQ ID NO: 984243 - RNA, 24 nt, Human
gggacgggaguggcacgaaaggga

SEQ ID NO: 984244 - RNA, 24 nt, Human
gggauucccggcacuccuccgccc

SEQ ID NO: 984245 - RNA, 21 nt, Human
gggcagagcagaggaggaggg

SEQ ID NO: 984246 - RNA, 24 nt, Human
ggggcacggggauggucggccggg

SEQ ID NO: 984247 - RNA, 24 nt, Human
ggggcaggccagggcagggcaggg

SEQ ID NO: 984248 - RNA, 19 nt, Human
gggguggggacgggagugg

SEQ ID NO: 984249 - RNA, 19 nt, Human
ggggugggggugccauaga

SEQ ID NO: 984250 - RNA, 20 nt, Human
ggggugggggugccauagga

SEQ ID NO: 984251 - RNA, 20 nt, Human
gggguggggguggggacggg

SEQ ID NO: 984252 - RNA, 19 nt, Human
ggguggggguggggacggg

SEQ ID NO: 984253 - RNA, 24 nt, Human
guaacacucgcccggcccuuucua

SEQ ID NO: 984254 - RNA, 22 nt, Human
guggcaacccagcgccgcgccc

SEQ ID NO: 984255 - RNA, 22 nt, Human
uaaauaaauuuaagacauacaa

SEQ ID NO: 984256 - RNA, 21 nt, Human
ucacugaguggcaagcuacgu

SEQ ID NO: 984257 - RNA, 19 nt, Human
uccacgcagccccaccgcg

SEQ ID NO: 984258 - RNA, 20 nt, Human
uccacgcagccccaccgcgg

SEQ ID NO: 984259 - RNA, 18 nt, Human
uccccagcacccagcucc

SEQ ID NO: 984260 - RNA, 21 nt, Human
ucccccggcagcaccgagaua

SEQ ID NO: 984261 - RNA, 22 nt, Human
ucccccggcagcaccgagauaa

SEQ ID NO: 984262 - RNA, 26 nt, Human
uccgaaaagaacagaaaagaaacccc

SEQ ID NO: 984263 - RNA, 20 nt, Human
uccuccacgcagccccaccg

SEQ ID NO: 984264 - RNA, 21 nt, Human
ucuauguacaacacgauagaa

SEQ ID NO: 984265 - RNA, 19 nt, Human
ugaggagggccgggcacag

SEQ ID NO: 984266 - RNA, 22 nt, Human
ugcaaacaggaaaacugaugca

SEQ ID NO: 984267 - RNA, 24 nt, Human
ugcaggcccccucccaggagguuc

SEQ ID NO: 984268 - RNA, 21 nt, Human
uggcaugugggggcugggcgg

SEQ ID NO: 984269 - RNA, 23 nt, Human
uggcccccuacccaucccaggug

SEQ ID NO: 984270 - RNA, 21 nt, Human
uggcugagggugcucuguggg

SEQ ID NO: 984271 - RNA, 19 nt, Human
ugggccuccaccggcccaa

SEQ ID NO: 984272 - RNA, 19 nt, Human
ugggcggcuucuccuggcu

SEQ ID NO: 984273 - RNA, 22 nt, Human
uggggcuggcaugugggggcug

SEQ ID NO: 984274 - RNA, 24 nt, Human
uggggcuggcaugugggggcuggg

SEQ ID NO: 984275 - RNA, 26 nt, Human
uggggcuggcaugugggggcugggcg

SEQ ID NO: 984276 - RNA, 19 nt, Human
ugggggcugggcgggccuu

SEQ ID NO: 984277 - RNA, 18 nt, Human
uggggguggggacgggag

SEQ ID NO: 984278 - RNA, 24 nt, Human
uucagagcaaggaggagauucgaa

SEQ ID NO: 984279 - RNA, 23 nt, Human
uuccccagcacccagcuccgggc

SEQ ID NO: 984280 - RNA, 21 nt, Human
uucccgccccccagccaggaa

SEQ ID NO: 984281 - RNA, 22 nt, Human
uuccuugggcccucccaucucc

SEQ ID NO: 984282 - RNA, 18 nt, Human
uugcagagugagccccuc

SEQ ID NO: 984283 - RNA, 23 nt, Human
uugcagucugcccuucccgcccc

SEQ ID NO: 984284 - RNA, 24 nt, Human
uugcagucugcccuucccgccccc

SEQ ID NO: 984285 - RNA, 26 nt, Human
uugguuccauuucgguuaaguccacu

SEQ ID NO: 984286 - RNA, 24 nt, Human
uugguugcagagugagccccucgu

SEQ ID NO: 984287 - RNA, 20 nt, Human
aacauggcaaaaccccgucu

SEQ ID NO: 984288 - RNA, 21 nt, Human
aacauggcaaaaccccgucuc

SEQ ID NO: 984289 - RNA, 22 nt, Human
aacuaagaaucagugacugcau

SEQ ID NO: 984290 - RNA, 23 nt, Human
aagaagcaacaguugaggccagg

SEQ ID NO: 984291 - RNA, 25 nt, Human
aaucaaaaaguaggaaagauguuuc

SEQ ID NO: 984292 - RNA, 18 nt, Human
accucgcccgcucgcguc

SEQ ID NO: 984293 - RNA, 21 nt, Human
acucuauacauccuucacaaa

SEQ ID NO: 984294 - RNA, 18 nt, Human
acucuguguuacaacaaa

SEQ ID NO: 984295 - RNA, 20 nt, Human
acuuuuauuucccuagaaca

SEQ ID NO: 984296 - RNA, 18 nt, Human
agaaagcaggauaaaaag

SEQ ID NO: 984297 - RNA, 24 nt, Human
agcaccuugggaggcugaggcagg

SEQ ID NO: 984298 - RNA, 24 nt, Human
agccaggucaacauggcaaaaccc

SEQ ID NO: 984299 - RNA, 21 nt, Human
aggaguucgagaccagccagg

SEQ ID NO: 984300 - RNA, 24 nt, Human
aggcacaguggcucgugccuguaa

SEQ ID NO: 984301 - RNA, 18 nt, Human
aggcaggcggaucacuug

SEQ ID NO: 984302 - RNA, 21 nt, Human
aggcaggcggaucacuugcgu

SEQ ID NO: 984303 - RNA, 26 nt, Human
aggcaggcggaucacuugcguucagg

SEQ ID NO: 984304 - RNA, 19 nt, Human
aggccaggcacaguggcuc

SEQ ID NO: 984305 - RNA, 21 nt, Human
aggccaggcacaguggcucgu

SEQ ID NO: 984306 - RNA, 21 nt, Human
aggcugaggcaggcggaucac

SEQ ID NO: 984307 - RNA, 24 nt, Human
aggcugaggcaggcggaucacuug

SEQ ID NO: 984308 - RNA, 23 nt, Human
aguggcucgugccuguaauccca

SEQ ID NO: 984309 - RNA, 24 nt, Human
aguggcucgugccuguaaucccag

SEQ ID NO: 984310 - RNA, 24 nt, Human
aucacuugcguucaggaguucgag

SEQ ID NO: 984311 - RNA, 18 nt, Human
auccuuuccccucuuucu

SEQ ID NO: 984312 - RNA, 19 nt, Human
auuaaaaaaaauaacuaca

SEQ ID NO: 984313 - RNA, 20 nt, Human
caaaaaguaggaaagauguu

SEQ ID NO: 984314 - RNA, 20 nt, Human
caacaguugaggccaggcac

SEQ ID NO: 984315 - RNA, 22 nt, Human
caacaguugaggccaggcacag

SEQ ID NO: 984316 - RNA, 24 nt, Human
cagcaccuugggaggcugaggcag

SEQ ID NO: 984317 - RNA, 24 nt, Human
cagcaccuugggaggcugaggcag

SEQ ID NO: 984318 - RNA, 21 nt, Human
cagcggcggcggcugcggcgg

SEQ ID NO: 984319 - RNA, 23 nt, Human
caucaggaaccaggcaguacucu

SEQ ID NO: 984320 - RNA, 21 nt, Human
ccaccucgcccgcucgcgucu

SEQ ID NO: 984321 - RNA, 18 nt, Human
ccagccaggucaacaugg

SEQ ID NO: 984322 - RNA, 20 nt, Human
ccagcggcggcggcugcggc

SEQ ID NO: 984323 - RNA, 27 nt, Human
ccagcggcggcggcugcggcggcuuuu

SEQ ID NO: 984324 - RNA, 24 nt, Human
ccaggucaacauggcaaaaccccg

SEQ ID NO: 984325 - RNA, 23 nt, Human
cccaaauuaaagugcccuggggc

SEQ ID NO: 984326 - RNA, 19 nt, Human
ccgccgccgccaccucgcc

SEQ ID NO: 984327 - RNA, 21 nt, Human
ccgccgcgcucugcccgcgcc

SEQ ID NO: 984328 - RNA, 22 nt, Human
ccgccgcgcucugcccgcgccc

SEQ ID NO: 984329 - RNA, 19 nt, Human
ccgcgccgccgcgcucugc

SEQ ID NO: 984330 - RNA, 24 nt, Human
cggaucacuugcguucaggaguuc

SEQ ID NO: 984331 - RNA, 20 nt, Human
cgugccuguaaucccagcac

SEQ ID NO: 984332 - RNA, 24 nt, Human
cgugccuguaaucccagcaccuug

SEQ ID NO: 984333 - RNA, 23 nt, Human
cuccgccgccgccgccaccucgc

SEQ ID NO: 984334 - RNA, 24 nt, Human
cucgugccuguaaucccagcaccu

SEQ ID NO: 984335 - RNA, 21 nt, Human
cuuuuuccgauccuuuccccu

SEQ ID NO: 984336 - RNA, 23 nt, Human
gaacacaccuuuauaagaagcaa

SEQ ID NO: 984337 - RNA, 24 nt, Human
gaucacuugcguucaggaguucga

SEQ ID NO: 984338 - RNA, 18 nt, Human
gccgccgccgccaccucg

SEQ ID NO: 984339 - RNA, 22 nt, Human
gccgccgcgcucugcccgcgcc

SEQ ID NO: 984340 - RNA, 21 nt, Human
gccugaguccccugacagcuc

SEQ ID NO: 984341 - RNA, 23 nt, Human
ggaucacuugcguucaggaguuc

SEQ ID NO: 984342 - RNA, 21 nt, Human
gucaacauggcaaaaccccgu

SEQ ID NO: 984343 - RNA, 19 nt, Human
gugccuguaaucccagcac

SEQ ID NO: 984344 - RNA, 22 nt, Human
uaaguuauuuuccagaaaugag

SEQ ID NO: 984345 - RNA, 20 nt, Human
uacucuguguuacaacaaag

SEQ ID NO: 984346 - RNA, 18 nt, Human
uagaacagaagggcuggu

SEQ ID NO: 984347 - RNA, 19 nt, Human
uagcaaaugucugaaggcu

SEQ ID NO: 984348 - RNA, 24 nt, Human
ucacagaacugguuucuuuuuuuu

SEQ ID NO: 984349 - RNA, 19 nt, Human
ucccgcuccgccgccgccg

SEQ ID NO: 984350 - RNA, 22 nt, Human
uccucauaagccugaguccccu

SEQ ID NO: 984351 - RNA, 22 nt, Human
ucgugccuguaaucccagcacc

SEQ ID NO: 984352 - RNA, 23 nt, Human
ucuauaguauuuuagcuucuuuu

SEQ ID NO: 984353 - RNA, 24 nt, Human
ugaggcaggcggaucacuugcguu

SEQ ID NO: 984354 - RNA, 21 nt, Human
ugccuguaaucccagcaccuu

SEQ ID NO: 984355 - RNA, 23 nt, Human
ugccuguaaucccagcaccuugg

SEQ ID NO: 984356 - RNA, 23 nt, Human
ugccuguaaucccagcaccuugg

SEQ ID NO: 984357 - RNA, 24 nt, Human
ugccuguaaucccagcaccuuggg

SEQ ID NO: 984358 - RNA, 22 nt, Human
uggcucgugccuguaaucccag

SEQ ID NO: 984359 - RNA, 24 nt, Human
uggcucgugccuguaaucccagca

SEQ ID NO: 984360 - RNA, 18 nt, Human
ugggaggcugaggcaggc

SEQ ID NO: 984361 - RNA, 20 nt, Human
ugggaggcugaggcaggcgg

SEQ ID NO: 984362 - RNA, 24 nt, Human
ugggaggcugaggcaggcggauca

SEQ ID NO: 984363 - RNA, 25 nt, Human
uugggaggcugaggcaggcggauca

SEQ ID NO: 984364 - RNA, 22 nt, Human
aaaaaaauguucaguguagaaa

SEQ ID NO: 984365 - RNA, 24 nt, Human
aaaagcaaauaaaguauuuuccuu

SEQ ID NO: 984366 - RNA, 24 nt, Human
aaaauacuuugugauucucacuaa

SEQ ID NO: 984367 - RNA, 24 nt, Human
aagaacauacccaauuuuaacuaa

SEQ ID NO: 984368 - RNA, 20 nt, Human
aagcacacacauaguaaaca

SEQ ID NO: 984369 - RNA, 22 nt, Human
aaggguuuuaacaaaaccaaaa

SEQ ID NO: 984370 - RNA, 18 nt, Human
aauaacuggcucagauuu

SEQ ID NO: 984371 - RNA, 23 nt, Human
aauaauaaaguaaaugggaggaa

SEQ ID NO: 984372 - RNA, 22 nt, Human
acaaggguuuuaacaaaaccaa

SEQ ID NO: 984373 - RNA, 21 nt, Human
acccaauuuuaacuaaaaagu

SEQ ID NO: 984374 - RNA, 21 nt, Human
agaauaacaaaugagcaccau

SEQ ID NO: 984375 - RNA, 22 nt, Human
agcacugugacuaucacuuuuu

SEQ ID NO: 984376 - RNA, 21 nt, Human
aggugacgguggcggcccggg

SEQ ID NO: 984377 - RNA, 18 nt, Human
aguauauguauauauaca

SEQ ID NO: 984378 - RNA, 23 nt, Human
auaaauuucuaaacugagaugaa

SEQ ID NO: 984379 - RNA, 19 nt, Human
auauguguauauauacaca

SEQ ID NO: 984380 - RNA, 20 nt, Human
auauguguauauauacacaa

SEQ ID NO: 984381 - RNA, 25 nt, Human
aucaaguuaaaaaaaauguucagug

SEQ ID NO: 984382 - RNA, 20 nt, Human
caaaaacuaaaaugacugaa

SEQ ID NO: 984383 - RNA, 21 nt, Human
caaaagcaacauaauaaugaa

SEQ ID NO: 984384 - RNA, 19 nt, Human
caaagacugaaauuaucaa

SEQ ID NO: 984385 - RNA, 23 nt, Human
caacauaauaaugaaaaauucaa

SEQ ID NO: 984386 - RNA, 19 nt, Human
caacuagauaacuuagcac

SEQ ID NO: 984387 - RNA, 23 nt, Human
caaggguuuuaacaaaaccaaaa

SEQ ID NO: 984388 - RNA, 24 nt, Human
cacacauauguguauauauacaca

SEQ ID NO: 984389 - RNA, 18 nt, Human
cacauauguguauauaua

SEQ ID NO: 984390 - RNA, 22 nt, Human
cacaucguucaaaauuugcuac

SEQ ID NO: 984391 - RNA, 23 nt, Human
cacuucaacccccuauugcuugu

SEQ ID NO: 984392 - RNA, 26 nt, Human
cacuugcagguacaaagaugcagaga

SEQ ID NO: 984393 - RNA, 18 nt, Human
cagcggcagcggccgagg

SEQ ID NO: 984394 - RNA, 18 nt, Human
cauacacacauaugugua

SEQ ID NO: 984395 - RNA, 21 nt, Human
cccagaaugguuuaacuugac

SEQ ID NO: 984396 - RNA, 21 nt, Human
cccagaaugguuuaacuugac

SEQ ID NO: 984397 - RNA, 21 nt, Human
cccagaaugguuuaacuugac

SEQ ID NO: 984398 - RNA, 22 nt, Human
ccgaggugacgguggcggcccu

SEQ ID NO: 984399 - RNA, 20 nt, Human
ccuaggagccccgaagcggc

SEQ ID NO: 984400 - RNA, 18 nt, Human
ccuccuuuaauucugacu

SEQ ID NO: 984401 - RNA, 31 nt, Human
ccugacaaacugcauacacacauauguguag

SEQ ID NO: 984402 - RNA, 21 nt, Human
cgacagcggcagcggccgagg

SEQ ID NO: 984403 - RNA, 18 nt, Human
cucaaauaagacucuguu

SEQ ID NO: 984404 - RNA, 22 nt, Human
cugcauacacacauauguguau

SEQ ID NO: 984405 - RNA, 22 nt, Human
cuguaaagucuaucccuauucc

SEQ ID NO: 984406 - RNA, 20 nt, Human
cuucugagauucucuuucuu

SEQ ID NO: 984407 - RNA, 18 nt, Human
gaaagcauaaacaaugua

SEQ ID NO: 984408 - RNA, 24 nt, Human
gaggugacgguggcggcccggggc

SEQ ID NO: 984409 - RNA, 20 nt, Human
gauggcgacagcggcagcgg

SEQ ID NO: 984410 - RNA, 22 nt, Human
ggauggggaaacaaggcgaugg

SEQ ID NO: 984411 - RNA, 19 nt, Human
guauauguauauauacauc

SEQ ID NO: 984412 - RNA, 19 nt, Human
gugguuguuauuacaaucc

SEQ ID NO: 984413 - RNA, 23 nt, Human
guuaaucagaaauacuggcuacu

SEQ ID NO: 984414 - RNA, 19 nt, Human
uaaaacacaauuccaucaa

SEQ ID NO: 984415 - RNA, 21 nt, Human
uaaaacacaauuccaucaaga

SEQ ID NO: 984416 - RNA, 21 nt, Human
uaaaaugacagaacaaaggcg

SEQ ID NO: 984417 - RNA, 20 nt, Human
uaaacuggaaaacacuaugg

SEQ ID NO: 984418 - RNA, 19 nt, Human
uaaaguacaacagggauuc

SEQ ID NO: 984419 - RNA, 22 nt, Human
uaaauuucuaaacugagaugaa

SEQ ID NO: 984420 - RNA, 22 nt, Human
uaacuaaaaaguagugaaacag

SEQ ID NO: 984421 - RNA, 18 nt, Human
uaacugaaagaaaaugcu

SEQ ID NO: 984422 - RNA, 25 nt, Human
uaacugaaagaaaaugcucaagcac

SEQ ID NO: 984423 - RNA, 18 nt, Human
uaauaguagccaacuaga

SEQ ID NO: 984424 - RNA, 24 nt, Human
uacaauaauaaaguaaaugggagg

SEQ ID NO: 984425 - RNA, 20 nt, Human
uacaauaucaccaacugaaa

SEQ ID NO: 984426 - RNA, 25 nt, Human
uacaauaucaccaacugaaaguuuc

SEQ ID NO: 984427 - RNA, 27 nt, Human
uacaauaucaccaacugaaaguuucua

SEQ ID NO: 984428 - RNA, 19 nt, Human
uacuguguguuaaaugugu

SEQ ID NO: 984429 - RNA, 22 nt, Human
uagaauacaauaucaccaacug

SEQ ID NO: 984430 - RNA, 20 nt, Human
uauacaauauauguauauau

SEQ ID NO: 984431 - RNA, 24 nt, Human
uauauacacaaaaaaguauaugua

SEQ ID NO: 984432 - RNA, 23 nt, Human
uauauauuagcagcaaacuacuu

SEQ ID NO: 984433 - RNA, 23 nt, Human
uaucaccaacugaaaguuucuaa

SEQ ID NO: 984434 - RNA, 25 nt, Human
uauuaagaacauacccaauuuuaac

SEQ ID NO: 984435 - RNA, 22 nt, Human
uauuuaacucauucacaaaacu

SEQ ID NO: 984436 - RNA, 22 nt, Human
ucacuuuuuaaagaauuaaaau

SEQ ID NO: 984437 - RNA, 18 nt, Human
ucauuaagauguauggcu

SEQ ID NO: 984438 - RNA, 23 nt, Human
ucccaaaucccagaaugguuuaa

SEQ ID NO: 984439 - RNA, 22 nt, Human
ucuuuacaacaagcuuucacuu

SEQ ID NO: 984440 - RNA, 22 nt, Human
ugaaaaagguuuuuacaaaacu

SEQ ID NO: 984441 - RNA, 18 nt, Human
ugaaaaauaaagcaauac

SEQ ID NO: 984442 - RNA, 25 nt, Human
ugaaaaauaaagcaauacaucucaa

SEQ ID NO: 984443 - RNA, 25 nt, Human
ugaaaauucugaggccaaagagcug

SEQ ID NO: 984444 - RNA, 23 nt, Human
ugaaacaucuuuuuuacaccuuu

SEQ ID NO: 984445 - RNA, 25 nt, Human
ugaaacaucuuuuuuacaccuuuaa

SEQ ID NO: 984446 - RNA, 19 nt, Human
ugacgguggcggcccgggg

SEQ ID NO: 984447 - RNA, 18 nt, Human
ugacucagcuauaaguaa

SEQ ID NO: 984448 - RNA, 21 nt, Human
ugacucagcuauaaguaauau

SEQ ID NO: 984449 - RNA, 21 nt, Human
ugacuucauguaguuuccccc

SEQ ID NO: 984450 - RNA, 21 nt, Human
ugagaauaacaaaugagcacc

SEQ ID NO: 984451 - RNA, 20 nt, Human
ugagacacacaagacuauca

SEQ ID NO: 984452 - RNA, 23 nt, Human
ugagaugaagccaaaccucucau

SEQ ID NO: 984453 - RNA, 28 nt, Human
ugcauacacacauauguguauauuacau

SEQ ID NO: 984454 - RNA, 23 nt, Human
uggcgacagcggcagcggccgag

SEQ ID NO: 984455 - RNA, 28 nt, Human
uguauauauacacaaaaaaguauaugua

SEQ ID NO: 984456 - RNA, 19 nt, Human
ugucauaacuuucauuuuu

SEQ ID NO: 984457 - RNA, 23 nt, Human
uuaaaaaggagcuguuuuuuaaa

SEQ ID NO: 984458 - RNA, 25 nt, Human
uuaaaacacaauuccauccaccuag

SEQ ID NO: 984459 - RNA, 26 nt, Human
uuaagaacauacccaauuuuaacuaa

SEQ ID NO: 984460 - RNA, 23 nt, Human
uuaguccuuuauucugugauuug

SEQ ID NO: 984461 - RNA, 20 nt, Human
uuauuacagaaaucucacua

SEQ ID NO: 984462 - RNA, 22 nt, Human
uuccccauaaauuuaauuucca

SEQ ID NO: 984463 - RNA, 21 nt, Human
uugaauaaauuucuaaacuga

SEQ ID NO: 984464 - RNA, 25 nt, Human
uuguguguguguaaacucaauuuuu

SEQ ID NO: 984465 - RNA, 18 nt, Human
uuuuaacaauaaaacugu

SEQ ID NO: 984466 - RNA, 19 nt, Human
agcuugcagcaaccugaac

SEQ ID NO: 984467 - RNA, 23 nt, Human
cagcaaccugaacaaaccuuagu

SEQ ID NO: 984468 - RNA, 22 nt, Human
cguuuucuucuauucaguccca

SEQ ID NO: 984469 - RNA, 22 nt, Human
cuugcagcaaccugaacaaacc

SEQ ID NO: 984470 - RNA, 20 nt, Human
gggcaggacgagaugauucu

SEQ ID NO: 984471 - RNA, 18 nt, Human
uagaaggugaagaugaug

SEQ ID NO: 984472 - RNA, 19 nt, Human
uauacuucaacaaauguuc

SEQ ID NO: 984473 - RNA, 23 nt, Human
ucuucuguaucucuugugugcag

SEQ ID NO: 984474 - RNA, 19 nt, Human
ugcccuacuuacucaacag

SEQ ID NO: 984475 - RNA, 21 nt, Human
ugcccuacuuacucaacaggg

SEQ ID NO: 984476 - RNA, 22 nt, Human
uugaaacagaccucaggcucac

SEQ ID NO: 984477 - RNA, 20 nt, Human
uugaaacagaccucaggcuu

SEQ ID NO: 984478 - RNA, 21 nt, Human
aaaaaaaaaaaaagaagaaga

SEQ ID NO: 984479 - RNA, 19 nt, Human
aaaaaaaaaaagaagaaga

SEQ ID NO: 984480 - RNA, 23 nt, Human
aaaaaaaaaaagaagaagaagaa

SEQ ID NO: 984481 - RNA, 21 nt, Human
aaaaaaaaaagaagaagaaga

SEQ ID NO: 984482 - RNA, 19 nt, Human
aaaaaaaagaagaagaaga

SEQ ID NO: 984483 - RNA, 19 nt, Human
aaaaaaaagaagaagaaga

SEQ ID NO: 984484 - RNA, 18 nt, Human
aaaaaagaagaagaagaa

SEQ ID NO: 984485 - RNA, 19 nt, Human
aaaaaagaagaagaagaag

SEQ ID NO: 984486 - RNA, 18 nt, Human
aaaaagaagaagaagaag

SEQ ID NO: 984487 - RNA, 22 nt, Human
aaaaagcuacucuuggagcuca

SEQ ID NO: 984488 - RNA, 20 nt, Human
aaaacaaaaaccuuacaaaa

SEQ ID NO: 984489 - RNA, 25 nt, Human
aaaagaagaagaagaagagaaaaaa

SEQ ID NO: 984490 - RNA, 24 nt, Human
aaaauaucacauagugauaggaug

SEQ ID NO: 984491 - RNA, 18 nt, Human
aaacuauaaaauacucca

SEQ ID NO: 984492 - RNA, 21 nt, Human
aaacucgcaaacugaucaggg

SEQ ID NO: 984493 - RNA, 19 nt, Human
aaagaagaagaagaagaga

SEQ ID NO: 984494 - RNA, 25 nt, Human
aaagaccaacaaaaagugaaauaaa

SEQ ID NO: 984495 - RNA, 20 nt, Human
aaagacuuauaaaaacuaga

SEQ ID NO: 984496 - RNA, 24 nt, Human
aacaaaaagugaaauaaagggacc

SEQ ID NO: 984497 - RNA, 24 nt, Human
aaccccacuguuucauuuuaauac

SEQ ID NO: 984498 - RNA, 22 nt, Human
aaccgauaaacagaagaucacu

SEQ ID NO: 984499 - RNA, 22 nt, Human
aaccuuacaaaacucaucaaaa

SEQ ID NO: 984500 - RNA, 22 nt, Human
aacucgcaaacugaucagaaaa

SEQ ID NO: 984501 - RNA, 18 nt, Human
aagaagaagaagaagaga

SEQ ID NO: 984502 - RNA, 21 nt, Human
aagaagaagaagagaaaaaaa

SEQ ID NO: 984503 - RNA, 21 nt, Human
aagaagaagagaaaaaaaaaa

SEQ ID NO: 984504 - RNA, 22 nt, Human
aagaagaagagaaaaaaaaaac

SEQ ID NO: 984505 - RNA, 21 nt, Human
aagagcaccacauuccuaacc

SEQ ID NO: 984506 - RNA, 22 nt, Human
aagagcaccacauuccuaaccc

SEQ ID NO: 984507 - RNA, 24 nt, Human
aaugcuaaaauauuuuaaguuaaa

SEQ ID NO: 984508 - RNA, 22 nt, Human
acaaaauacaguaauuacaguu

SEQ ID NO: 984509 - RNA, 19 nt, Human
acacaaacaaaaucuuuag

SEQ ID NO: 984510 - RNA, 21 nt, Human
acagggauaacuagucaaaac

SEQ ID NO: 984511 - RNA, 24 nt, Human
agaaaaaaaaaacuuuuuugaaag

SEQ ID NO: 984512 - RNA, 21 nt, Human
aggcaaaagaaggaaagaaag

SEQ ID NO: 984513 - RNA, 21 nt, Human
aggcaaaagaaggaaagaaag

SEQ ID NO: 984514 - RNA, 20 nt, Human
aguaauuacaguuaacuuaa

SEQ ID NO: 984515 - RNA, 18 nt, Human
agugguuacagggcaacg

SEQ ID NO: 984516 - RNA, 20 nt, Human
auaaagaccaacaaaaagug

SEQ ID NO: 984517 - RNA, 22 nt, Human
caaaauacaguaauuacaguua

SEQ ID NO: 984518 - RNA, 23 nt, Human
caagagcaccacauuccuaaccc

SEQ ID NO: 984519 - RNA, 24 nt, Human
caagagcaccacauuccuaacccc

SEQ ID NO: 984520 - RNA, 31 nt, Human
cacacagaguccaaaaaaaaaaaaaaaaaaa

SEQ ID NO: 984521 - RNA, 23 nt, Human
cagaagaucacuaagagaugaaa

SEQ ID NO: 984522 - RNA, 20 nt, Human
cagagcagggagcugccggc

SEQ ID NO: 984523 - RNA, 24 nt, Human
cagauauacgcucaguucacaucc

SEQ ID NO: 984524 - RNA, 27 nt, Human
caggcagaucacauguaacgcacaggc

SEQ ID NO: 984525 - RNA, 19 nt, Human
caggcagaucacauguagu

SEQ ID NO: 984526 - RNA, 23 nt, Human
caggccacaaauacuggaguccu

SEQ ID NO: 984527 - RNA, 23 nt, Human
ccaaaaaaaaaaaaaaaaaaaaa

SEQ ID NO: 984528 - RNA, 19 nt, Human
ccacauuccuaaccccuaa

SEQ ID NO: 984529 - RNA, 22 nt, Human
ccccagauagccuucaccaggc

SEQ ID NO: 984530 - RNA, 19 nt, Human
ccgacagcugggggaaggg

SEQ ID NO: 984531 - RNA, 19 nt, Human
ccuaaccccuaaggcagca

SEQ ID NO: 984532 - RNA, 25 nt, Human
ccuaaccccuaaggcagcacacaga

SEQ ID NO: 984533 - RNA, 19 nt, Human
cggccggggcgcagggcga

SEQ ID NO: 984534 - RNA, 21 nt, Human
cuaaauauauaaaaagacuua

SEQ ID NO: 984535 - RNA, 19 nt, Human
cuuuuuuuuuuuuuuuuaa

SEQ ID NO: 984536 - RNA, 22 nt, Human
gaagaagaagaagagaaaaaaa

SEQ ID NO: 984537 - RNA, 19 nt, Human
gacccucuuucuguccaag

SEQ ID NO: 984538 - RNA, 23 nt, Human
gaucacuaagagaugaaaaaaag

SEQ ID NO: 984539 - RNA, 21 nt, Human
ggagaggggcggggaaggggu

SEQ ID NO: 984540 - RNA, 20 nt, Human
ggagaggguggccccgcgcu

SEQ ID NO: 984541 - RNA, 25 nt, Human
ggaguccuuuuuucuucuccucugg

SEQ ID NO: 984542 - RNA, 19 nt, Human
gggaagggccggagagggu

SEQ ID NO: 984543 - RNA, 22 nt, Human
gggauaacuagucaaaacacag

SEQ ID NO: 984544 - RNA, 21 nt, Human
gggcggaggccggccgggaga

SEQ ID NO: 984545 - RNA, 21 nt, Human
ggggaagggccggagagggug

SEQ ID NO: 984546 - RNA, 20 nt, Human
ggguggccccgcgcuggcug

SEQ ID NO: 984547 - RNA, 18 nt, Human
guaaaccaagauauauau

SEQ ID NO: 984548 - RNA, 21 nt, Human
uaaaacaaaaaccuuacaaaa

SEQ ID NO: 984549 - RNA, 22 nt, Human
uaaaacaaaaaccuuacaaaac

SEQ ID NO: 984550 - RNA, 18 nt, Human
uaaaagggaaucuguggc

SEQ ID NO: 984551 - RNA, 19 nt, Human
uaaaagggaaucuguggca

SEQ ID NO: 984552 - RNA, 21 nt, Human
uaaaauacuccauuuuuaguc

SEQ ID NO: 984553 - RNA, 23 nt, Human
uaaguuaaauuuucuuuuucuuu

SEQ ID NO: 984554 - RNA, 27 nt, Human
uacacuuaauaguccuugguuuaugaa

SEQ ID NO: 984555 - RNA, 22 nt, Human
uaugugaugaugaaaguuauuu

SEQ ID NO: 984556 - RNA, 22 nt, Human
uauuaggcaaaagaaggaaaga

SEQ ID NO: 984557 - RNA, 18 nt, Human
ucacuaagagaugaaaaa

SEQ ID NO: 984558 - RNA, 20 nt, Human
ucacuucccccaacaagagc

SEQ ID NO: 984559 - RNA, 18 nt, Human
ucaguaaccuuucugaug

SEQ ID NO: 984560 - RNA, 23 nt, Human
uccaaaaaaaaaaaaaaaaaaaa

SEQ ID NO: 984561 - RNA, 22 nt, Human
uccaaaauagauauacagguuc

SEQ ID NO: 984562 - RNA, 18 nt, Human
ucuuggagcucacuuccc

SEQ ID NO: 984563 - RNA, 18 nt, Human
ucuuuuuuuuuuuuuuuu

SEQ ID NO: 984564 - RNA, 18 nt, Human
ugaaauaaauaauaggcc

SEQ ID NO: 984565 - RNA, 25 nt, Human
ugacauuaagaugugauuuccacca

SEQ ID NO: 984566 - RNA, 20 nt, Human
ugauggcagugaugcagacc

SEQ ID NO: 984567 - RNA, 22 nt, Human
ugcaaauaaaacuuuacuccaa

SEQ ID NO: 984568 - RNA, 20 nt, Human
ugcagaaaaacuucaauaca

SEQ ID NO: 984569 - RNA, 21 nt, Human
uggaaggacuuagcugagcug

SEQ ID NO: 984570 - RNA, 20 nt, Human
uggaguacuaaaccccacug

SEQ ID NO: 984571 - RNA, 20 nt, Human
uggaguacuaaaccccacug

SEQ ID NO: 984572 - RNA, 18 nt, Human
uggcagugaugcagaccc

SEQ ID NO: 984573 - RNA, 19 nt, Human
uggcugcggggcggaggcc

SEQ ID NO: 984574 - RNA, 24 nt, Human
uggcuuaaagacaccuaaaaacag

SEQ ID NO: 984575 - RNA, 18 nt, Human
ugggucagagcagggagc

SEQ ID NO: 984576 - RNA, 21 nt, Human
uguauguuugcuaugugguac

SEQ ID NO: 984577 - RNA, 22 nt, Human
ugucauaucaguaaccuuucug

SEQ ID NO: 984578 - RNA, 23 nt, Human
uuaagcacaucuaaaaaaauaaa

SEQ ID NO: 984579 - RNA, 24 nt, Human
uuuaaguuaaauuuucuuuuucuu

SEQ ID NO: 984580 - RNA, 20 nt, Human
uuuuucuuugucccacaaaa

SEQ ID NO: 984581 - RNA, 27 nt, Human
uuuuuuuuuuuaaagcaaaauaaguuu

SEQ ID NO: 984582 - RNA, 18 nt, Human
caacuaaccaucuuucca

SEQ ID NO: 984583 - RNA, 24 nt, Human
cacggauggagaaggaaaccuguu

SEQ ID NO: 984584 - RNA, 20 nt, Human
cccggcgccuccugcggccg

SEQ ID NO: 984585 - RNA, 18 nt, Human
ccgcucccggcgccuccu

SEQ ID NO: 984586 - RNA, 21 nt, Human
ccggcgccuccugcggccgag

SEQ ID NO: 984587 - RNA, 22 nt, Human
cggcacgaggugggaaucuauc

SEQ ID NO: 984588 - RNA, 22 nt, Human
cggcuccgcucccggcgccucc

SEQ ID NO: 984589 - RNA, 30 nt, Human
cuccacggccgcccgagcuccgcgccgccu

SEQ ID NO: 984590 - RNA, 19 nt, Human
cuucccagcgcgcuccaug

SEQ ID NO: 984591 - RNA, 20 nt, Human
gaguuccuccacggccgccc

SEQ ID NO: 984592 - RNA, 21 nt, Human
gcgguggcggcccgggccggc

SEQ ID NO: 984593 - RNA, 19 nt, Human
uacugaagaaucaucggac

SEQ ID NO: 984594 - RNA, 25 nt, Human
uaucuuuacugaagaaucaucggac

SEQ ID NO: 984595 - RNA, 18 nt, Human
uccauggucugggauggg

SEQ ID NO: 984596 - RNA, 21 nt, Human
uccauggucugggaugggcgg

SEQ ID NO: 984597 - RNA, 19 nt, Human
uccccugugggcgcacgga

SEQ ID NO: 984598 - RNA, 20 nt, Human
ugccuggacugggagcgaga

SEQ ID NO: 984599 - RNA, 20 nt, Human
ugccuggacugggagcgaga

SEQ ID NO: 984600 - RNA, 24 nt, Human
ugggaugggcgguggcggcccggg

SEQ ID NO: 984601 - RNA, 24 nt, Human
uggucugggaugggcgguggcggc

SEQ ID NO: 984602 - RNA, 19 nt, Human
uuccuccacggccgcccga

SEQ ID NO: 984603 - RNA, 18 nt, Human
aaaaaucuuccugccuuc

SEQ ID NO: 984604 - RNA, 18 nt, Human
aaacagggaucauagaac

SEQ ID NO: 984605 - RNA, 24 nt, Human
aaaguguugggauuacaaguguga

SEQ ID NO: 984606 - RNA, 21 nt, Human
aacaacaacaacaacaacaaa

SEQ ID NO: 984607 - RNA, 22 nt, Human
aacaacaacaacaacaacaaga

SEQ ID NO: 984608 - RNA, 20 nt, Human
aacaacaacaacaacaagau

SEQ ID NO: 984609 - RNA, 27 nt, Human
aacagcucuauccuguuguucuuuuuu

SEQ ID NO: 984610 - RNA, 24 nt, Human
aaccacaagugaacaacaacaaca

SEQ ID NO: 984611 - RNA, 20 nt, Human
aacugggaagagcaagggcg

SEQ ID NO: 984612 - RNA, 23 nt, Human
aagaggaagcaaaauccacauaa

SEQ ID NO: 984613 - RNA, 21 nt, Human
aagcacuugcccuugaaaaca

SEQ ID NO: 984614 - RNA, 22 nt, Human
aagcagccgccagccgggaccc

SEQ ID NO: 984615 - RNA, 20 nt, Human
aagggcggggaaggagcuaa

SEQ ID NO: 984616 - RNA, 18 nt, Human
aagguagggggcagcccu

SEQ ID NO: 984617 - RNA, 18 nt, Human
aaguaacucuaucucaga

SEQ ID NO: 984618 - RNA, 24 nt, Human
aagucuaacaucacuauuugaaac

SEQ ID NO: 984619 - RNA, 24 nt, Human
aagugcaacagugcaaagaaacuu

SEQ ID NO: 984620 - RNA, 21 nt, Human
aaguguugggauuacaagugu

SEQ ID NO: 984621 - RNA, 26 nt, Human
aaguguugggauuacaagugugagcc

SEQ ID NO: 984622 - RNA, 23 nt, Human
aauaacagaaggagaacagaaga

SEQ ID NO: 984623 - RNA, 25 nt, Human
aauaacagaaggagaacagaagaaa

SEQ ID NO: 984624 - RNA, 19 nt, Human
acaacaacaacaacaacaa

SEQ ID NO: 984625 - RNA, 22 nt, Human
acaacaacaacaacaacaacaa

SEQ ID NO: 984626 - RNA, 23 nt, Human
acaacaacaacaacaacaacaag

SEQ ID NO: 984627 - RNA, 25 nt, Human
acaacaacaacaacaacaagauuaa

SEQ ID NO: 984628 - RNA, 22 nt, Human
acaguauuacagaacaaaagca

SEQ ID NO: 984629 - RNA, 21 nt, Human
acaucacuauuugaaaccagu

SEQ ID NO: 984630 - RNA, 22 nt, Human
accacauuaggauguuaacuca

SEQ ID NO: 984631 - RNA, 22 nt, Human
accaggaauguagaaccacaag

SEQ ID NO: 984632 - RNA, 19 nt, Human
accucuuuggcaacuacca

SEQ ID NO: 984633 - RNA, 19 nt, Human
agaaggagaacagaagaaa

SEQ ID NO: 984634 - RNA, 18 nt, Human
agaccaccuaggagaacu

SEQ ID NO: 984635 - RNA, 18 nt, Human
agcucagcgggagaacga

SEQ ID NO: 984636 - RNA, 24 nt, Human
agguuuauuaagaccaccuaggag

SEQ ID NO: 984637 - RNA, 20 nt, Human
aguaauuuuauugaaacauc

SEQ ID NO: 984638 - RNA, 24 nt, Human
aguguugggauuacaagugugagc

SEQ ID NO: 984639 - RNA, 21 nt, Human
augaagggcaaucagaauaca

SEQ ID NO: 984640 - RNA, 21 nt, Human
auguuaacucauaaaaacaua

SEQ ID NO: 984641 - RNA, 21 nt, Human
auugcacucagccaucucuac

SEQ ID NO: 984642 - RNA, 24 nt, Human
caaaguguugggauuacaagugug

SEQ ID NO: 984643 - RNA, 19 nt, Human
caaaugauguauccaaguc

SEQ ID NO: 984644 - RNA, 18 nt, Human
caacaacaacaacaacaa

SEQ ID NO: 984645 - RNA, 25 nt, Human
caacaacaacaacaacaacaagauu

SEQ ID NO: 984646 - RNA, 28 nt, Human
caacaaccacaggucacacaguauuuua

SEQ ID NO: 984647 - RNA, 21 nt, Human
caacuaccacaaauucuaggc

SEQ ID NO: 984648 - RNA, 21 nt, Human
caagggcggggaaggagcuaa

SEQ ID NO: 984649 - RNA, 24 nt, Human
cacuauuugaaaccaguguuauuu

SEQ ID NO: 984650 - RNA, 23 nt, Human
cagaacaaaagcauggucacuuu

SEQ ID NO: 984651 - RNA, 22 nt, Human
cagaauacaagaggaagcaaaa

SEQ ID NO: 984652 - RNA, 18 nt, Human
cagccgggacccgcaggc

SEQ ID NO: 984653 - RNA, 18 nt, Human
cauauuugcucuccauga

SEQ ID NO: 984654 - RNA, 23 nt, Human
cauucccaacaauuccuauuugc

SEQ ID NO: 984655 - RNA, 23 nt, Human
cauuuaaaauccaggccaaguuc

SEQ ID NO: 984656 - RNA, 18 nt, Human
ccaaaccaacccucaccu

SEQ ID NO: 984657 - RNA, 21 nt, Human
ccaaaguguugggauuacaag

SEQ ID NO: 984658 - RNA, 21 nt, Human
ccaaaguguugggauuacaag

SEQ ID NO: 984659 - RNA, 24 nt, Human
ccaaaguguugggauuacaagugu

SEQ ID NO: 984660 - RNA, 23 nt, Human
ccaaccucaaucuaucuuuaaaa

SEQ ID NO: 984661 - RNA, 24 nt, Human
ccacaagugaacaacaacaacaac

SEQ ID NO: 984662 - RNA, 24 nt, Human
ccuaaacaaauuauguucccuuua

SEQ ID NO: 984663 - RNA, 22 nt, Human
ccucccgccucagccuuccaaa

SEQ ID NO: 984664 - RNA, 23 nt, Human
ccucccgccucagccuuccaaag

SEQ ID NO: 984665 - RNA, 24 nt, Human
ccugccuucaaaugcccagcaacc

SEQ ID NO: 984666 - RNA, 19 nt, Human
cuaauucugccuuucuaug

SEQ ID NO: 984667 - RNA, 28 nt, Human
cucuuuggcaacuaccacaaauucuagg

SEQ ID NO: 984668 - RNA, 23 nt, Human
cugauccucccgccucagccuuc

SEQ ID NO: 984669 - RNA, 24 nt, Human
cugauccucccgccucagccuucc

SEQ ID NO: 984670 - RNA, 18 nt, Human
cugaucuugaacucuugg

SEQ ID NO: 984671 - RNA, 19 nt, Human
cugaucuugaacucuuggg

SEQ ID NO: 984672 - RNA, 20 nt, Human
cugguguccaguuuucuugg

SEQ ID NO: 984673 - RNA, 21 nt, Human
gaaaacagcucagcgggagaa

SEQ ID NO: 984674 - RNA, 21 nt, Human
gaagcagccgccagccgggac

SEQ ID NO: 984675 - RNA, 19 nt, Human
gacgaggagcugagaccug

SEQ ID NO: 984676 - RNA, 18 nt, Human
gauuacaagugugagcca

SEQ ID NO: 984677 - RNA, 22 nt, Human
gauuacaagugugagccauugc

SEQ ID NO: 984678 - RNA, 23 nt, Human
gauuacaagugugagccauugca

SEQ ID NO: 984679 - RNA, 22 nt, Human
gcagacaggugggagagggagc

SEQ ID NO: 984680 - RNA, 23 nt, Human
gccucagccuuccaaaguguugg

SEQ ID NO: 984681 - RNA, 20 nt, Human
gccuguggaaaagggaagug

SEQ ID NO: 984682 - RNA, 22 nt, Human
ggaauaauuuuaaaccaaccuc

SEQ ID NO: 984683 - RNA, 22 nt, Human
ggcaaucagaauacaagaggaa

SEQ ID NO: 984684 - RNA, 20 nt, Human
gggaaggagcuaaggcugcg

SEQ ID NO: 984685 - RNA, 22 nt, Human
gggucuugcuauacugcccagg

SEQ ID NO: 984686 - RNA, 19 nt, Human
guagaaccacaagugaaca

SEQ ID NO: 984687 - RNA, 20 nt, Human
guagccaaauccucuaauuc

SEQ ID NO: 984688 - RNA, 21 nt, Human
guagggggcagcccuuugaca

SEQ ID NO: 984689 - RNA, 20 nt, Human
uaaguuaauuccuaauuuga

SEQ ID NO: 984690 - RNA, 25 nt, Human
uaauguuaauuaaauuaacuuccuu

SEQ ID NO: 984691 - RNA, 20 nt, Human
uacaccgcucuccuaccgga

SEQ ID NO: 984692 - RNA, 19 nt, Human
uacaccuauuccgucucca

SEQ ID NO: 984693 - RNA, 22 nt, Human
uaccagaaaguaacucuaucuc

SEQ ID NO: 984694 - RNA, 21 nt, Human
uacugauccucccgccucagc

SEQ ID NO: 984695 - RNA, 20 nt, Human
uagaaccaaggaauuaucuc

SEQ ID NO: 984696 - RNA, 22 nt, Human
uagcagauaaugaaguaaacuu

SEQ ID NO: 984697 - RNA, 21 nt, Human
uagguuaagucuaacaucacu

SEQ ID NO: 984698 - RNA, 24 nt, Human
uauacugcccaggcugaucuugaa

SEQ ID NO: 984699 - RNA, 22 nt, Human
uaucucagaugcuaguaaaaag

SEQ ID NO: 984700 - RNA, 19 nt, Human
uauuauagaguuucugaca

SEQ ID NO: 984701 - RNA, 22 nt, Human
ucaaaauagauagagaauaggc

SEQ ID NO: 984702 - RNA, 23 nt, Human
ucaacaagcacuugcccuugaaa

SEQ ID NO: 984703 - RNA, 22 nt, Human
ucacuaaaggaugaaccaaagu

SEQ ID NO: 984704 - RNA, 22 nt, Human
ucacuuuauuuuacccaaaugc

SEQ ID NO: 984705 - RNA, 19 nt, Human
ucagauagagacuucucau

SEQ ID NO: 984706 - RNA, 21 nt, Human
ucagcgggagaacgaucggag

SEQ ID NO: 984707 - RNA, 23 nt, Human
uccaauauacuggguaccagaaa

SEQ ID NO: 984708 - RNA, 21 nt, Human
ucucaugacagcacauuaccu

SEQ ID NO: 984709 - RNA, 20 nt, Human
ucuccaaaccaacccucacc

SEQ ID NO: 984710 - RNA, 18 nt, Human
ucuccaugaucaccauua

SEQ ID NO: 984711 - RNA, 23 nt, Human
ucuugcuauacugcccaggcuga

SEQ ID NO: 984712 - RNA, 20 nt, Human
ugaacaacaacaacaacaac

SEQ ID NO: 984713 - RNA, 20 nt, Human
ugacagcacauuaccuaaua

SEQ ID NO: 984714 - RNA, 20 nt, Human
ugacgaggagcugagaccug

SEQ ID NO: 984715 - RNA, 21 nt, Human
ugacgaggagcugagaccugc

SEQ ID NO: 984716 - RNA, 23 nt, Human
ugagaaaucaauagaaucaauaa

SEQ ID NO: 984717 - RNA, 24 nt, Human
ugcccaggcugaucuugaacucuu

SEQ ID NO: 984718 - RNA, 21 nt, Human
ugccuucaaaugcccagcaac

SEQ ID NO: 984719 - RNA, 27 nt, Human
ugcuauacugcccaggcugaucuugaa

SEQ ID NO: 984720 - RNA, 21 nt, Human
uggaauuuucaguaaacacuu

SEQ ID NO: 984721 - RNA, 25 nt, Human
uggacaacauuuauauuacaagaca

SEQ ID NO: 984722 - RNA, 20 nt, Human
uggagauggggucuugcuau

SEQ ID NO: 984723 - RNA, 19 nt, Human
ugggauuacaagugugagc

SEQ ID NO: 984724 - RNA, 21 nt, Human
ugggauuacaagugugagcca

SEQ ID NO: 984725 - RNA, 21 nt, Human
ugggauuacaagugugagcca

SEQ ID NO: 984726 - RNA, 22 nt, Human
ugggauuacaagugugagccau

SEQ ID NO: 984727 - RNA, 24 nt, Human
ugggauuacaagugugagccauug

SEQ ID NO: 984728 - RNA, 24 nt, Human
uggggucuugcuauacugcccagg

SEQ ID NO: 984729 - RNA, 21 nt, Human
ugucauuugucaaaacaagaa

SEQ ID NO: 984730 - RNA, 22 nt, Human
uguccaguuuucuuggaagucu

SEQ ID NO: 984731 - RNA, 21 nt, Human
ugucuaaaacuaugcauggag

SEQ ID NO: 984732 - RNA, 23 nt, Human
uguucuaggccuguggaaaaggg

SEQ ID NO: 984733 - RNA, 24 nt, Human
uguugggauuacaagugugagcca

SEQ ID NO: 984734 - RNA, 20 nt, Human
uuaaaaaaaaaauggagaug

SEQ ID NO: 984735 - RNA, 22 nt, Human
uuaaaaaucuuccugccuucaa

SEQ ID NO: 984736 - RNA, 24 nt, Human
uuagaaauucaaauaaaaauguua

SEQ ID NO: 984737 - RNA, 22 nt, Human
uucaaggaaaggcagcuacacc

SEQ ID NO: 984738 - RNA, 18 nt, Human
uucaucauucaccaggaa

SEQ ID NO: 984739 - RNA, 19 nt, Human
uucaucauucaccaggaau

SEQ ID NO: 984740 - RNA, 19 nt, Human
uucuugugaucaguuuguu

SEQ ID NO: 984741 - RNA, 21 nt, Human
uuuaaaaaucuuccugccuuc

SEQ ID NO: 984742 - RNA, 21 nt, Human
uuuaaacccagauuaguaaca

SEQ ID NO: 984743 - RNA, 20 nt, Human
uuuuucuuuccuacaauguu

SEQ ID NO: 984744 - RNA, 21 nt, Human
aaggaaacaaagaaguaauca

SEQ ID NO: 984745 - RNA, 18 nt, Human
aaucauuuguugagagac

SEQ ID NO: 984746 - RNA, 21 nt, Human
agacagacaagaagccacaag

SEQ ID NO: 984747 - RNA, 23 nt, Human
agacagacaagaagccacaagga

SEQ ID NO: 984748 - RNA, 21 nt, Human
aggccugcugugccccugcug

SEQ ID NO: 984749 - RNA, 21 nt, Human
aggggcucuugaggccugcug

SEQ ID NO: 984750 - RNA, 22 nt, Human
aucuucccugaagcuaccgguu

SEQ ID NO: 984751 - RNA, 21 nt, Human
cacccacuccugcauucaguc

SEQ ID NO: 984752 - RNA, 19 nt, Human
ccugcugccaaggcagccu

SEQ ID NO: 984753 - RNA, 22 nt, Human
cuaccgggaugggaaaggucag

SEQ ID NO: 984754 - RNA, 24 nt, Human
cucgugcugggcccccguggcccu

SEQ ID NO: 984755 - RNA, 19 nt, Human
cugugccccugcugccaag

SEQ ID NO: 984756 - RNA, 19 nt, Human
cugugccccugcugccaag

SEQ ID NO: 984757 - RNA, 19 nt, Human
gagacguuauuaacuauga

SEQ ID NO: 984758 - RNA, 19 nt, Human
gcagccucaaguucaagga

SEQ ID NO: 984759 - RNA, 22 nt, Human
ggaugggaaaggucagugucuu

SEQ ID NO: 984760 - RNA, 18 nt, Human
gugcugggcccccguggc

SEQ ID NO: 984761 - RNA, 21 nt, Human
uaccaugcuccagcacuggaa

SEQ ID NO: 984762 - RNA, 22 nt, Human
ucagugucuuccuuugaacccu

SEQ ID NO: 984763 - RNA, 25 nt, Human
ucucgugcugggcccccguggcccc

SEQ ID NO: 984764 - RNA, 18 nt, Human
ugacucagacagacaaga

SEQ ID NO: 984765 - RNA, 18 nt, Human
ugaggccugcugugcccc

SEQ ID NO: 984766 - RNA, 23 nt, Human
uggggaauacgucugucugucug

SEQ ID NO: 984767 - RNA, 23 nt, Human
uguauucguugacucagacagac

SEQ ID NO: 984768 - RNA, 24 nt, Human
ugugaauuuucucuucuauaaucc

SEQ ID NO: 984769 - RNA, 24 nt, Human
uuaggggcucuugaggccugcugu

SEQ ID NO: 984770 - RNA, 21 nt, Human
uucaaggagcagcuaaucacc

SEQ ID NO: 984771 - RNA, 18 nt, Human
uucccugaagcuaccggg

SEQ ID NO: 984772 - RNA, 21 nt, Human
uuccuuugaacccugagacaa

SEQ ID NO: 984773 - RNA, 22 nt, Human
uuuuuuaaggggcuguaauuau

SEQ ID NO: 984774 - RNA, 18 nt, Human
uuuuuuuuuuuaaggggc

SEQ ID NO: 984775 - RNA, 19 nt, Human
uuuuuuuuuuuaaggggcu

SEQ ID NO: 984776 - RNA, 22 nt, Human
aaacacugaaacacaaaauucc

SEQ ID NO: 984777 - RNA, 25 nt, Human
acacacacacacacaugcacacccu

SEQ ID NO: 984778 - RNA, 19 nt, Human
acugaaacacaaaauucca

SEQ ID NO: 984779 - RNA, 22 nt, Human
agacauggggugucugccaugg

SEQ ID NO: 984780 - RNA, 18 nt, Human
agggguggggcugccugg

SEQ ID NO: 984781 - RNA, 19 nt, Human
agggguggggcugccuggg

SEQ ID NO: 984782 - RNA, 20 nt, Human
aggggugguggggguauugc

SEQ ID NO: 984783 - RNA, 20 nt, Human
cacacacacacacacacaca

SEQ ID NO: 984784 - RNA, 20 nt, Human
cacacacacacacacacaca

SEQ ID NO: 984785 - RNA, 20 nt, Human
cacacacacacacacacaca

SEQ ID NO: 984786 - RNA, 20 nt, Human
cacacacacacacacacaca

SEQ ID NO: 984787 - RNA, 22 nt, Human
cacacacacacacacacacaca

SEQ ID NO: 984788 - RNA, 22 nt, Human
cacacacacacacacacacaca

SEQ ID NO: 984789 - RNA, 22 nt, Human
cacacacacacacacacacaca

SEQ ID NO: 984790 - RNA, 26 nt, Human
cacacacacacacacacacacacaca

SEQ ID NO: 984791 - RNA, 26 nt, Human
cacacacacacacacacacacacaug

SEQ ID NO: 984792 - RNA, 26 nt, Human
cacacacacacacacacacacaugca

SEQ ID NO: 984793 - RNA, 26 nt, Human
cacacacacacacacacacaugcaca

SEQ ID NO: 984794 - RNA, 25 nt, Human
cacacacacacacacaugcacaccc

SEQ ID NO: 984795 - RNA, 24 nt, Human
cacacacacaugcacacccuccug

SEQ ID NO: 984796 - RNA, 23 nt, Human
cacacccuccugggacaugccac

SEQ ID NO: 984797 - RNA, 21 nt, Human
cacagaucuguggucucacgc

SEQ ID NO: 984798 - RNA, 22 nt, Human
cacccaagguggggguggaggg

SEQ ID NO: 984799 - RNA, 23 nt, Human
cagacacaaagggcucagguauc

SEQ ID NO: 984800 - RNA, 23 nt, Human
caugugccggcggcaugcauggu

SEQ ID NO: 984801 - RNA, 20 nt, Human
ccuccuccuccuccuagucc

SEQ ID NO: 984802 - RNA, 25 nt, Human
ccuggacacacacacacacacacag

SEQ ID NO: 984803 - RNA, 21 nt, Human
ccugggccucccuggauccuc

SEQ ID NO: 984804 - RNA, 23 nt, Human
cggcaugcauguuggugugcaug

SEQ ID NO: 984805 - RNA, 18 nt, Human
cucccuggauccucugag

SEQ ID NO: 984806 - RNA, 23 nt, Human
cuccuccuccuccuccuaguccu

SEQ ID NO: 984807 - RNA, 21 nt, Human
cuccugggacaugccacagcc

SEQ ID NO: 984808 - RNA, 19 nt, Human
cugccucugcugcugcucc

SEQ ID NO: 984809 - RNA, 20 nt, Human
cuguguguaccugggccucc

SEQ ID NO: 984810 - RNA, 18 nt, Human
gagggggugcucuggugc

SEQ ID NO: 984811 - RNA, 22 nt, Human
gcacgcacacacacuguucaca

SEQ ID NO: 984812 - RNA, 24 nt, Human
gcuccuccuccuccuccuaguccu

SEQ ID NO: 984813 - RNA, 18 nt, Human
gggagagagaaggguggg

SEQ ID NO: 984814 - RNA, 25 nt, Human
ggggauggagugaaagggguggugg

SEQ ID NO: 984815 - RNA, 24 nt, Human
ggggguggaggagggguggggcug

SEQ ID NO: 984816 - RNA, 21 nt, Human
gggguggaggagggguggggc

SEQ ID NO: 984817 - RNA, 20 nt, Human
ggguggaggagggguggggc

SEQ ID NO: 984818 - RNA, 23 nt, Human
gguccauggcccggugaggucca

SEQ ID NO: 984819 - RNA, 18 nt, Human
gucuacacaacagccccc

SEQ ID NO: 984820 - RNA, 20 nt, Human
gucugggagagagaagggug

SEQ ID NO: 984821 - RNA, 19 nt, Human
gugcucuggugcaucacac

SEQ ID NO: 984822 - RNA, 23 nt, Human
uagguucaaacacugaaacacaa

SEQ ID NO: 984823 - RNA, 21 nt, Human
ucacagaggacagagagggcg

SEQ ID NO: 984824 - RNA, 21 nt, Human
uccuccugccucugcugcugc

SEQ ID NO: 984825 - RNA, 31 nt, Human
ugcaucacacacaucacacgcacacgcacgg

SEQ ID NO: 984826 - RNA, 19 nt, Human
ugcauguuggugugcaugu

SEQ ID NO: 984827 - RNA, 18 nt, Human
ugcggggacggggggggg

SEQ ID NO: 984828 - RNA, 26 nt, Human
uggacacacacacacacacacacaca

SEQ ID NO: 984829 - RNA, 26 nt, Human
uggacacacacacacacacacacaca

SEQ ID NO: 984830 - RNA, 25 nt, Human
uggacacacacacacacacacacag

SEQ ID NO: 984831 - RNA, 20 nt, Human
uggaggagggguggggcugc

SEQ ID NO: 984832 - RNA, 20 nt, Human
ugggagagagaagggugggg

SEQ ID NO: 984833 - RNA, 22 nt, Human
ugggagagagaagggugggggg

SEQ ID NO: 984834 - RNA, 22 nt, Human
uggggguggagggggugcucug

SEQ ID NO: 984835 - RNA, 19 nt, Human
ugggguguccacacgucuc

SEQ ID NO: 984836 - RNA, 22 nt, Human
uguggucucacgcacgcacaca

SEQ ID NO: 984837 - RNA, 25 nt, Human
uguguccacagaucuguggucucac

SEQ ID NO: 984838 - RNA, 24 nt, Human
aaaaauacaaacaacaacaaaaac

SEQ ID NO: 984839 - RNA, 23 nt, Human
aaacaacaacaaaaaccuucaca

SEQ ID NO: 984840 - RNA, 21 nt, Human
aacagggaggaagaaagcugg

SEQ ID NO: 984841 - RNA, 23 nt, Human
aaccugccaagcucauuaaccga

SEQ ID NO: 984842 - RNA, 18 nt, Human
aagaaccugccaagcuca

SEQ ID NO: 984843 - RNA, 18 nt, Human
aagaauucagugagacaa

SEQ ID NO: 984844 - RNA, 22 nt, Human
aaggaaacaaaggaacgggucg

SEQ ID NO: 984845 - RNA, 18 nt, Human
aaggagacugccagagac

SEQ ID NO: 984846 - RNA, 21 nt, Human
aaguagccuuugcaaaggaag

SEQ ID NO: 984847 - RNA, 19 nt, Human
aauacaaacaacaacaaaa

SEQ ID NO: 984848 - RNA, 20 nt, Human
acaauuagaauacaucugga

SEQ ID NO: 984849 - RNA, 22 nt, Human
acaauuagaauacaucuggaac

SEQ ID NO: 984850 - RNA, 19 nt, Human
acacacacacuuaugugua

SEQ ID NO: 984851 - RNA, 26 nt, Human
acacagagaaaaaucaaaguugcccc

SEQ ID NO: 984852 - RNA, 22 nt, Human
acuccaugagguagaaaaauac

SEQ ID NO: 984853 - RNA, 19 nt, Human
agacugccagagaccagca

SEQ ID NO: 984854 - RNA, 25 nt, Human
agagcaaaggccuuuaguuauuuug

SEQ ID NO: 984855 - RNA, 24 nt, Human
agagcuuucccaagugcaaggcau

SEQ ID NO: 984856 - RNA, 19 nt, Human
agccucugguguuccccaa

SEQ ID NO: 984857 - RNA, 20 nt, Human
aggaagaaagcugggugggu

SEQ ID NO: 984858 - RNA, 21 nt, Human
aggcaccaggugggaaagggu

SEQ ID NO: 984859 - RNA, 24 nt, Human
aggcucuggggagaacucaggguc

SEQ ID NO: 984860 - RNA, 23 nt, Human
auccagaaaacaaguuucuugau

SEQ ID NO: 984861 - RNA, 23 nt, Human
augaaauauuuccagagcuuagg

SEQ ID NO: 984862 - RNA, 20 nt, Human
caaaaucaaggagacugcca

SEQ ID NO: 984863 - RNA, 20 nt, Human
caaaaucaaggagacugccg

SEQ ID NO: 984864 - RNA, 26 nt, Human
caaagcggaaaauauacaugguaccc

SEQ ID NO: 984865 - RNA, 22 nt, Human
caaaggaagcuaauggacagug

SEQ ID NO: 984866 - RNA, 21 nt, Human
caacaaacaggauuggcaucc

SEQ ID NO: 984867 - RNA, 20 nt, Human
cacauuuccacagugauuca

SEQ ID NO: 984868 - RNA, 24 nt, Human
cagacacuacacuugaagauuucc

SEQ ID NO: 984869 - RNA, 21 nt, Human
cagaguucucauuuuauucuc

SEQ ID NO: 984870 - RNA, 21 nt, Human
cagggcuagauuguuagcuga

SEQ ID NO: 984871 - RNA, 22 nt, Human
cauucucaucugaagacaaggg

SEQ ID NO: 984872 - RNA, 22 nt, Human
cccaacugacucagcccugcag

SEQ ID NO: 984873 - RNA, 19 nt, Human
ccccaggccucaaugucag

SEQ ID NO: 984874 - RNA, 24 nt, Human
cccccaagcugaacaacuaagagc

SEQ ID NO: 984875 - RNA, 18 nt, Human
ccgccgcgcccucgugcc

SEQ ID NO: 984876 - RNA, 18 nt, Human
ccugcagaugggacaucc

SEQ ID NO: 984877 - RNA, 20 nt, Human
ccuucuuguugccaaacuua

SEQ ID NO: 984878 - RNA, 18 nt, Human
cggcggcgggcggcggcc

SEQ ID NO: 984879 - RNA, 25 nt, Human
cucaucugaagacaaggguggccac

SEQ ID NO: 984880 - RNA, 26 nt, Human
cugacacacaacagggaggaagaaag

SEQ ID NO: 984881 - RNA, 18 nt, Human
cuuuuuuuuuuugagguc

SEQ ID NO: 984882 - RNA, 20 nt, Human
gagcccauccacugucugac

SEQ ID NO: 984883 - RNA, 19 nt, Human
gccccaagacaauagucuc

SEQ ID NO: 984884 - RNA, 19 nt, Human
ggaagaaagcugggugggu

SEQ ID NO: 984885 - RNA, 22 nt, Human
gggcaggaggaggcucugggga

SEQ ID NO: 984886 - RNA, 18 nt, Human
gguacuugagagcuggug

SEQ ID NO: 984887 - RNA, 18 nt, Human
gugagacaaagaaccugc

SEQ ID NO: 984888 - RNA, 21 nt, Human
guggggcaggaggaggcucug

SEQ ID NO: 984889 - RNA, 21 nt, Human
uaagcaaauguccuuuaccca

SEQ ID NO: 984890 - RNA, 26 nt, Human
uaagccccaggccucaaugucagagg

SEQ ID NO: 984891 - RNA, 22 nt, Human
uacaacacagagaaaaaucaaa

SEQ ID NO: 984892 - RNA, 21 nt, Human
uacacaauuagaauacaucug

SEQ ID NO: 984893 - RNA, 20 nt, Human
uacccaaaaucaaggagacu

SEQ ID NO: 984894 - RNA, 18 nt, Human
uagccucugguguucccc

SEQ ID NO: 984895 - RNA, 18 nt, Human
ucagaggagagcaaaggc

SEQ ID NO: 984896 - RNA, 22 nt, Human
ucaggaaggccauucagacucc

SEQ ID NO: 984897 - RNA, 20 nt, Human
ucauccagaaaacaaguuuc

SEQ ID NO: 984898 - RNA, 19 nt, Human
ucauccuggucccuccuug

SEQ ID NO: 984899 - RNA, 20 nt, Human
ucauuuuauucucccaguau

SEQ ID NO: 984900 - RNA, 21 nt, Human
uccaugagguagaaaaauaca

SEQ ID NO: 984901 - RNA, 24 nt, Human
uccaugauaagaauucagugagac

SEQ ID NO: 984902 - RNA, 19 nt, Human
ucccaagugcaaggcauaa

SEQ ID NO: 984903 - RNA, 19 nt, Human
uccccaacugacucagccc

SEQ ID NO: 984904 - RNA, 21 nt, Human
ucccucauguuuucaggacau

SEQ ID NO: 984905 - RNA, 20 nt, Human
ucugggagaauacuccauga

SEQ ID NO: 984906 - RNA, 21 nt, Human
ugaauacaccagugucaugaa

SEQ ID NO: 984907 - RNA, 23 nt, Human
ugacacacaacagggaggaagaa

SEQ ID NO: 984908 - RNA, 20 nt, Human
ugacaucauagccaugggca

SEQ ID NO: 984909 - RNA, 20 nt, Human
ugacucagcccugcagaugg

SEQ ID NO: 984910 - RNA, 18 nt, Human
ugagacaaagaaccugcc

SEQ ID NO: 984911 - RNA, 28 nt, Human
ugagagacuacaacacagagaaaaauca

SEQ ID NO: 984912 - RNA, 19 nt, Human
ugagugcuggauugugacc

SEQ ID NO: 984913 - RNA, 19 nt, Human
ugcagguaagcaaaugucc

SEQ ID NO: 984914 - RNA, 23 nt, Human
ugccccccaagcugaacaacuaa

SEQ ID NO: 984915 - RNA, 20 nt, Human
ugcuaagcagaaaaacuuaa

SEQ ID NO: 984916 - RNA, 18 nt, Human
ugguggggcaggaggagg

SEQ ID NO: 984917 - RNA, 20 nt, Human
ugucagaggagagcaaaggc

SEQ ID NO: 984918 - RNA, 22 nt, Human
ugucagaggagagcaaaggccu

SEQ ID NO: 984919 - RNA, 23 nt, Human
ugucagaggagagcaaaggccuu

SEQ ID NO: 984920 - RNA, 21 nt, Human
ugucaugaaauauuuccagag

SEQ ID NO: 984921 - RNA, 23 nt, Human
uguguacauacauuucauacaca

SEQ ID NO: 984922 - RNA, 18 nt, Human
uuacugagggauguucuc

SEQ ID NO: 984923 - RNA, 21 nt, Human
uuagcucacuccagaguucuc

SEQ ID NO: 984924 - RNA, 23 nt, Human
uuggccccaagacaauagucuca

SEQ ID NO: 984925 - RNA, 23 nt, Human
uuguugccaaacuuagaagaauc

SEQ ID NO: 984926 - RNA, 20 nt, Human
uuuacaucuaaaaaauacaa

SEQ ID NO: 984927 - RNA, 24 nt, Human
uuuccuagcggcugcugcugcugu

SEQ ID NO: 984928 - RNA, 20 nt, Human
aaucaggacagugcaggccu

SEQ ID NO: 984929 - RNA, 18 nt, Human
acacccccacgagccgcc

SEQ ID NO: 984930 - RNA, 21 nt, Human
acacccccacgagccgccaga

SEQ ID NO: 984931 - RNA, 23 nt, Human
acagucaaugggaaggcgccgac

SEQ ID NO: 984932 - RNA, 25 nt, Human
accccaacacccccacgagccgcca

SEQ ID NO: 984933 - RNA, 21 nt, Human
accccgcucacacucugacac

SEQ ID NO: 984934 - RNA, 19 nt, Human
agaagaacugucugcccuu

SEQ ID NO: 984935 - RNA, 18 nt, Human
agagaaggccaggcccug

SEQ ID NO: 984936 - RNA, 21 nt, Human
caagguuccacagguuggaau

SEQ ID NO: 984937 - RNA, 23 nt, Human
cacccccacgagccgccagaggc

SEQ ID NO: 984938 - RNA, 20 nt, Human
cacuccccucccucccccug

SEQ ID NO: 984939 - RNA, 25 nt, Human
caggcccuggguuccuggugcuccu

SEQ ID NO: 984940 - RNA, 18 nt, Human
cccagaagaacugucugc

SEQ ID NO: 984941 - RNA, 21 nt, Human
ccccaacacccccacgagccg

SEQ ID NO: 984942 - RNA, 23 nt, Human
ccccaacacccccacgagccgcc

SEQ ID NO: 984943 - RNA, 24 nt, Human
ccccacgagccgccagaggcuccu

SEQ ID NO: 984944 - RNA, 19 nt, Human
ccccagaagaacugucugc

SEQ ID NO: 984945 - RNA, 30 nt, Human
ccccgcucacacucugacacuccccucccu

SEQ ID NO: 984946 - RNA, 20 nt, Human
ccccggggaccccccaaggu

SEQ ID NO: 984947 - RNA, 24 nt, Human
ccccucccucccccugcggacccc

SEQ ID NO: 984948 - RNA, 21 nt, Human
cccucaaauuuggaauucccg

SEQ ID NO: 984949 - RNA, 22 nt, Human
ccgcccacagucaaugggaagg

SEQ ID NO: 984950 - RNA, 24 nt, Human
ccggccaaucaggacagugcagga

SEQ ID NO: 984951 - RNA, 22 nt, Human
ccugccccccaggcugcuggga

SEQ ID NO: 984952 - RNA, 19 nt, Human
cgccgaccccggggacccc

SEQ ID NO: 984953 - RNA, 20 nt, Human
cucacacucugacacucccc

SEQ ID NO: 984954 - RNA, 18 nt, Human
cugucugcccuucugcau

SEQ ID NO: 984955 - RNA, 22 nt, Human
gaaggccaggcccuggguuccu

SEQ ID NO: 984956 - RNA, 22 nt, Human
gcaggccucccccaggcauuga

SEQ ID NO: 984957 - RNA, 23 nt, Human
gcaggccucccccaggcauugag

SEQ ID NO: 984958 - RNA, 21 nt, Human
gcucucccuccccggcgccag

SEQ ID NO: 984959 - RNA, 19 nt, Human
ggaauucccguaccccgcu

SEQ ID NO: 984960 - RNA, 22 nt, Human
ggcugcugggagagaaggccag

SEQ ID NO: 984961 - RNA, 23 nt, Human
ucaggacagugcaggccuccccc

SEQ ID NO: 984962 - RNA, 18 nt, Human
ucccccugcggaccccaa

SEQ ID NO: 984963 - RNA, 23 nt, Human
ucccccugcggaccccaacaccc

SEQ ID NO: 984964 - RNA, 26 nt, Human
uccccggcgccagagccgggaggccc

SEQ ID NO: 984965 - RNA, 18 nt, Human
ucccucccccugcggacc

SEQ ID NO: 984966 - RNA, 21 nt, Human
ugaaugagcagcugccaaccc

SEQ ID NO: 984967 - RNA, 21 nt, Human
ugacacuccccucccuccccc

SEQ ID NO: 984968 - RNA, 19 nt, Human
ugaggaagggguccgacug

SEQ ID NO: 984969 - RNA, 28 nt, Human
ugcaggccucccccaggcauugaggccu

SEQ ID NO: 984970 - RNA, 19 nt, Human
ugggaaggcgccgaccccg

SEQ ID NO: 984971 - RNA, 18 nt, Human
uuggaauucccguacccc

SEQ ID NO: 984972 - RNA, 29 nt, Human
uuuuuuuuaugcucuuuuuuuguuuuuuu

SEQ ID NO: 984973 - RNA, 26 nt, Human
uuuuuuuuuuuuuuuuaugcucuuuu

SEQ ID NO: 984974 - RNA, 23 nt, Human
aaggggugggggaucaggggcag

SEQ ID NO: 984975 - RNA, 22 nt, Human
acaaccucccccacuggccccc

SEQ ID NO: 984976 - RNA, 19 nt, Human
agaggaagaaagaggucaa

SEQ ID NO: 984977 - RNA, 21 nt, Human
aggcaaggggugggggaucag

SEQ ID NO: 984978 - RNA, 23 nt, Human
aggcaaggggugggggaucaggg

SEQ ID NO: 984979 - RNA, 25 nt, Human
aggcaaggggugggggaucaggggc

SEQ ID NO: 984980 - RNA, 22 nt, Human
aggcagcugaagggcucagggc

SEQ ID NO: 984981 - RNA, 23 nt, Human
aggcagcugaagggcucagggcu

SEQ ID NO: 984982 - RNA, 20 nt, Human
aggggugggggaucaggggc

SEQ ID NO: 984983 - RNA, 23 nt, Human
augucagggguugugcaggcagc

SEQ ID NO: 984984 - RNA, 22 nt, Human
caaccucccccacuggccccca

SEQ ID NO: 984985 - RNA, 22 nt, Human
caaggggugggggaucaggggc

SEQ ID NO: 984986 - RNA, 23 nt, Human
caaggggugggggaucaggggca

SEQ ID NO: 984987 - RNA, 23 nt, Human
cacaggcucaguggcagcacugg

SEQ ID NO: 984988 - RNA, 18 nt, Human
cacauuuggcagauugag

SEQ ID NO: 984989 - RNA, 23 nt, Human
caccagcagccaaugucaggggu

SEQ ID NO: 984990 - RNA, 22 nt, Human
cagaguucaaaucuagaacccu

SEQ ID NO: 984991 - RNA, 21 nt, Human
cagcacauuuggcagauugag

SEQ ID NO: 984992 - RNA, 26 nt, Human
cagcuggccucugcucccuuccaguc

SEQ ID NO: 984993 - RNA, 21 nt, Human
cagucuugcuguaauugggag

SEQ ID NO: 984994 - RNA, 22 nt, Human
caguuccagggaaacagggccu

SEQ ID NO: 984995 - RNA, 19 nt, Human
ccagcuggccucugcuccc

SEQ ID NO: 984996 - RNA, 23 nt, Human
ccagggaaacagggccuuucucc

SEQ ID NO: 984997 - RNA, 18 nt, Human
cccccagcuggccucugc

SEQ ID NO: 984998 - RNA, 18 nt, Human
cccuuugcugccaacgcu

SEQ ID NO: 984999 - RNA, 22 nt, Human
cccuuugcugccaacgcuuccu

SEQ ID NO: 985000 - RNA, 25 nt, Human
ccucugcucccuuccagucacuuca

SEQ ID NO: 985001 - RNA, 21 nt, Human
ccugcacaggcucaguggcag

SEQ ID NO: 985002 - RNA, 18 nt, Human
cgggagaggcuggagagg

SEQ ID NO: 985003 - RNA, 26 nt, Human
cugcacaggcucaguggcagcacugg

SEQ ID NO: 985004 - RNA, 19 nt, Human
cuggcccccagcuggccuc

SEQ ID NO: 985005 - RNA, 26 nt, Human
cuguaauugggagaaaaccggggucc

SEQ ID NO: 985006 - RNA, 25 nt, Human
gcccccagcuggccucugcucccuu

SEQ ID NO: 985007 - RNA, 21 nt, Human
ggaaacaaccucccccacugg

SEQ ID NO: 985008 - RNA, 19 nt, Human
ggacaggguggccagaggc

SEQ ID NO: 985009 - RNA, 21 nt, Human
ggggugggggaucaggggcag

SEQ ID NO: 985010 - RNA, 21 nt, Human
gggugguggggggaggacagg

SEQ ID NO: 985011 - RNA, 19 nt, Human
ggugaaagaggaagaaaga

SEQ ID NO: 985012 - RNA, 20 nt, Human
ggugguggggggaggacagg

SEQ ID NO: 985013 - RNA, 19 nt, Human
guggaaacaaccuccccca

SEQ ID NO: 985014 - RNA, 19 nt, Human
guggccagaggcaaggggu

SEQ ID NO: 985015 - RNA, 20 nt, Human
uaagggcaucaucucccuuu

SEQ ID NO: 985016 - RNA, 21 nt, Human
uaggccugagggugguggggg

SEQ ID NO: 985017 - RNA, 26 nt, Human
ucacucacaggaagguggguaagggc

SEQ ID NO: 985018 - RNA, 23 nt, Human
ucagggcucccugccucacaugg

SEQ ID NO: 985019 - RNA, 21 nt, Human
ucaggggcaguggucauucuu

SEQ ID NO: 985020 - RNA, 27 nt, Human
ucaguggcagcacuggccacuugccuu

SEQ ID NO: 985021 - RNA, 18 nt, Human
ucauucuuagcaguucca

SEQ ID NO: 985022 - RNA, 24 nt, Human
ucccaaaccccaacagagugccuc

SEQ ID NO: 985023 - RNA, 23 nt, Human
ucccaaguacccugcacaggcuc

SEQ ID NO: 985024 - RNA, 23 nt, Human
ucccaaguacccugcacaggcuu

SEQ ID NO: 985025 - RNA, 21 nt, Human
uggaaacaaccucccccacug

SEQ ID NO: 985026 - RNA, 18 nt, Human
uggcagcacuggccacuu

SEQ ID NO: 985027 - RNA, 18 nt, Human
uggccagaggcaaggggu

SEQ ID NO: 985028 - RNA, 20 nt, Human
ugggaaaauuggucccuggg

SEQ ID NO: 985029 - RNA, 22 nt, Human
ugggaaaauuggucccuggggc

SEQ ID NO: 985030 - RNA, 22 nt, Human
ugggagaaaacgagcugcagca

SEQ ID NO: 985031 - RNA, 18 nt, Human
ugguggggggaggacagg

SEQ ID NO: 985032 - RNA, 20 nt, Human
ugugcaggcagcugaagggg

SEQ ID NO: 985033 - RNA, 19 nt, Human
uucacagcagaguucaaau

SEQ ID NO: 985034 - RNA, 20 nt, Human
uucacagcagaguucaaauc

SEQ ID NO: 985035 - RNA, 22 nt, Human
aaaacaccaguggagucuguaa

SEQ ID NO: 985036 - RNA, 19 nt, Human
aaacgaaacauacccagaa

SEQ ID NO: 985037 - RNA, 20 nt, Human
aacuguuucugagccuucug

SEQ ID NO: 985038 - RNA, 25 nt, Human
acagcaaugggaaacgaaacauacc

SEQ ID NO: 985039 - RNA, 18 nt, Human
acagggcgcccgugccuc

SEQ ID NO: 985040 - RNA, 20 nt, Human
accccgccuguucccgcagc

SEQ ID NO: 985041 - RNA, 22 nt, Human
accccgccuguucccgcagcug

SEQ ID NO: 985042 - RNA, 20 nt, Human
agaagaaaagagcugccaaa

SEQ ID NO: 985043 - RNA, 19 nt, Human
agccaggagugcagacauc

SEQ ID NO: 985044 - RNA, 22 nt, Human
caccuccuccgcgcacagggcg

SEQ ID NO: 985045 - RNA, 21 nt, Human
cacgugcucagcuucuccucc

SEQ ID NO: 985046 - RNA, 23 nt, Human
cagcaaugggaaacgaaacauac

SEQ ID NO: 985047 - RNA, 19 nt, Human
cagcagcuaguucuccucc

SEQ ID NO: 985048 - RNA, 23 nt, Human
cagcuucuccuccuccccucggu

SEQ ID NO: 985049 - RNA, 20 nt, Human
cauggaaugagcaacagcaa

SEQ ID NO: 985050 - RNA, 22 nt, Human
cauggggcuucuguuguccagc

SEQ ID NO: 985051 - RNA, 25 nt, Human
ccaguggagucuguaagucccuccu

SEQ ID NO: 985052 - RNA, 21 nt, Human
cccggccgccuucaccuccuc

SEQ ID NO: 985053 - RNA, 22 nt, Human
cccggccgccuucaccuccucc

SEQ ID NO: 985054 - RNA, 23 nt, Human
cccggccgccuucaccuccuccg

SEQ ID NO: 985055 - RNA, 21 nt, Human
cccgugccucccggucucccu

SEQ ID NO: 985056 - RNA, 23 nt, Human
cccgugccucccggucucccucc

SEQ ID NO: 985057 - RNA, 21 nt, Human
ccuccgcgcacagggcgcccg

SEQ ID NO: 985058 - RNA, 21 nt, Human
ccucuucccacuggcccuucc

SEQ ID NO: 985059 - RNA, 18 nt, Human
cgcugggauggaggagcc

SEQ ID NO: 985060 - RNA, 21 nt, Human
cuacagcaaugggaaacgaaa

SEQ ID NO: 985061 - RNA, 21 nt, Human
cucagcuucuccuccuccccu

SEQ ID NO: 985062 - RNA, 20 nt, Human
cucccuccgcccaccccgcc

SEQ ID NO: 985063 - RNA, 27 nt, Human
cuccgcccaccccgccuguucccgcag

SEQ ID NO: 985064 - RNA, 23 nt, Human
cuccucagcaaacgaggucccgg

SEQ ID NO: 985065 - RNA, 22 nt, Human
cugagccuucuguccucaauaa

SEQ ID NO: 985066 - RNA, 31 nt, Human
cuguaagucccuccucagcaaacgagguccu

SEQ ID NO: 985067 - RNA, 21 nt, Human
cuucuguuguccagcugcagc

SEQ ID NO: 985068 - RNA, 20 nt, Human
gagugcagacaucuauuucc

SEQ ID NO: 985069 - RNA, 18 nt, Human
gcaacagcaaaacaccag

SEQ ID NO: 985070 - RNA, 18 nt, Human
gcacggggaagggucuga

SEQ ID NO: 985071 - RNA, 19 nt, Human
gcugguccagcccucgugc

SEQ ID NO: 985072 - RNA, 19 nt, Human
ggaggaacucgcacccaga

SEQ ID NO: 985073 - RNA, 21 nt, Human
ggagucuguaagucccuccuc

SEQ ID NO: 985074 - RNA, 25 nt, Human
ggcaaugucacacgugcucagcuuc

SEQ ID NO: 985075 - RNA, 22 nt, Human
ggccccggccgccuucaccucc

SEQ ID NO: 985076 - RNA, 24 nt, Human
gggacagcggugcacugucugagc

SEQ ID NO: 985077 - RNA, 20 nt, Human
gggcacgcgcacaggccagg

SEQ ID NO: 985078 - RNA, 20 nt, Human
gggugaagccgagcagcggg

SEQ ID NO: 985079 - RNA, 20 nt, Human
ggugcacaggacggccgcug

SEQ ID NO: 985080 - RNA, 21 nt, Human
gucccggaaggcaaggcagca

SEQ ID NO: 985081 - RNA, 23 nt, Human
uaagaaaugcuacagcaauggga

SEQ ID NO: 985082 - RNA, 25 nt, Human
uacagcaaugggaaacgaaacauac

SEQ ID NO: 985083 - RNA, 22 nt, Human
ucacaaacuguuucugagccuu

SEQ ID NO: 985084 - RNA, 22 nt, Human
ucagugcagcaguauguuucca

SEQ ID NO: 985085 - RNA, 18 nt, Human
uccagcugcagccaggag

SEQ ID NO: 985086 - RNA, 20 nt, Human
uccaggauaggaaugugagu

SEQ ID NO: 985087 - RNA, 24 nt, Human
ucccggucucccuccgcccacccc

SEQ ID NO: 985088 - RNA, 20 nt, Human
ucuguaagucccuccucagc

SEQ ID NO: 985089 - RNA, 18 nt, Human
ucugucacaaacuguuuc

SEQ ID NO: 985090 - RNA, 22 nt, Human
ugccaaagaugcauggaaugag

SEQ ID NO: 985091 - RNA, 19 nt, Human
ugcccgcgccuuagucugg

SEQ ID NO: 985092 - RNA, 19 nt, Human
ugggugaagccgagcagcg

SEQ ID NO: 985093 - RNA, 22 nt, Human
ugucacaaacuguuucugagcc

SEQ ID NO: 985094 - RNA, 21 nt, Human
uguucccgcagcugcccgcgc

SEQ ID NO: 985095 - RNA, 19 nt, Human
uguuguccagcugcagcca

SEQ ID NO: 985096 - RNA, 19 nt, Human
uuccagcgcugggauggag

SEQ ID NO: 985097 - RNA, 23 nt, Human
uuccucuucccacuggcccuucc

SEQ ID NO: 985098 - RNA, 23 nt, Human
uuuuuuuuuuuuuuugaccugga

SEQ ID NO: 985099 - RNA, 18 nt, Human
uuuuuuuuuuuuuuuuug

SEQ ID NO: 985100 - RNA, 24 nt, Human
uuuuuuuuuuuuuuuuugaccugg

SEQ ID NO: 985101 - RNA, 18 nt, Human
aaaaaugacaaauccagu

SEQ ID NO: 985102 - RNA, 23 nt, Human
acaaauccaguaauaaucauaaa

SEQ ID NO: 985103 - RNA, 22 nt, Human
aguaauaaucauaaacaguucc

SEQ ID NO: 985104 - RNA, 22 nt, Human
caaaaaugacaaauccaguaau

SEQ ID NO: 985105 - RNA, 22 nt, Human
caccuuccacucccaaccuacu

SEQ ID NO: 985106 - RNA, 21 nt, Human
cagcaugagacuuuuagauau

SEQ ID NO: 985107 - RNA, 18 nt, Human
ccaccaccuuccacuccc

SEQ ID NO: 985108 - RNA, 23 nt, Human
ccaccaccuuccacucccaaccu

SEQ ID NO: 985109 - RNA, 18 nt, Human
cccacaugcggagcagga

SEQ ID NO: 985110 - RNA, 18 nt, Human
ccccacaugcggagcagg

SEQ ID NO: 985111 - RNA, 23 nt, Human
ccuuaagaaauguauuugaaaag

SEQ ID NO: 985112 - RNA, 26 nt, Human
ccuuuuuuuuuuuuuuuuuuuuuuuu

SEQ ID NO: 985113 - RNA, 21 nt, Human
gccaccaccuuccacucccaa

SEQ ID NO: 985114 - RNA, 24 nt, Human
ggagcaggagccaccaccuuccac

SEQ ID NO: 985115 - RNA, 21 nt, Human
uacacuuagaggaaacaauuc

SEQ ID NO: 985116 - RNA, 23 nt, Human
uagguggcugugaaaaauuaccc

SEQ ID NO: 985117 - RNA, 21 nt, Human
uauauuuauuuccucuuagaa

SEQ ID NO: 985118 - RNA, 22 nt, Human
uauuaguaagaaucucuaaacc

SEQ ID NO: 985119 - RNA, 20 nt, Human
uauuuuacacauaaacugaa

SEQ ID NO: 985120 - RNA, 21 nt, Human
uauuuuacacauaaacugaau

SEQ ID NO: 985121 - RNA, 20 nt, Human
uccaaaggugaaaaaauuuc

SEQ ID NO: 985122 - RNA, 24 nt, Human
uccccacaugcggagcaggagcug

SEQ ID NO: 985123 - RNA, 18 nt, Human
uccuuuuuuuuuuuuuuu

SEQ ID NO: 985124 - RNA, 21 nt, Human
ucuaauauauucuccuccaaa

SEQ ID NO: 985125 - RNA, 18 nt, Human
ucuacaaagcagcagcaa

SEQ ID NO: 985126 - RNA, 25 nt, Human
uggcaaaacaguacacacugugaaa

SEQ ID NO: 985127 - RNA, 21 nt, Human
uuaacauuucuucucaucauc

SEQ ID NO: 985128 - RNA, 19 nt, Human
uuuaaaaucauucuuuccc

SEQ ID NO: 985129 - RNA, 18 nt, Human
uuuacaguuuuuuacuuu

SEQ ID NO: 985130 - RNA, 25 nt, Human
uuuuuuuuuuuuuuuuuuaauuuuu

SEQ ID NO: 985131 - RNA, 26 nt, Human
aaaagaaaaagaacaauaacacagaa

SEQ ID NO: 985132 - RNA, 21 nt, Human
aacacuuuuuacauaaaacau

SEQ ID NO: 985133 - RNA, 23 nt, Human
aagaaaaagaacaauaacacaga

SEQ ID NO: 985134 - RNA, 24 nt, Human
acuguauuuuaacacuaaagaaaa

SEQ ID NO: 985135 - RNA, 23 nt, Human
acuuagaagaauauucugaggag

SEQ ID NO: 985136 - RNA, 24 nt, Human
agaauaaagcuuuaucuucguauu

SEQ ID NO: 985137 - RNA, 19 nt, Human
aggagaagcaaaaaagacu

SEQ ID NO: 985138 - RNA, 20 nt, Human
aggaguguuugaaagcucug

SEQ ID NO: 985139 - RNA, 23 nt, Human
auaacacagaacacaguauucuu

SEQ ID NO: 985140 - RNA, 25 nt, Human
auguauuuggugcugaagauaaacc

SEQ ID NO: 985141 - RNA, 24 nt, Human
auugcaaguuacguuuuguaggag

SEQ ID NO: 985142 - RNA, 21 nt, Human
caaaaaagacuggcugcgacg

SEQ ID NO: 985143 - RNA, 19 nt, Human
caaaguuacuucaucaaaa

SEQ ID NO: 985144 - RNA, 19 nt, Human
caacaauaauaaacuggca

SEQ ID NO: 985145 - RNA, 20 nt, Human
caccuucagccauccacugg

SEQ ID NO: 985146 - RNA, 22 nt, Human
cacuaaaaagaaaaagaacaau

SEQ ID NO: 985147 - RNA, 22 nt, Human
gaaaaagaacaauaacacagaa

SEQ ID NO: 985148 - RNA, 19 nt, Human
gaaagaaagaagauaacug

SEQ ID NO: 985149 - RNA, 20 nt, Human
gaagauaaacacuuuuuaca

SEQ ID NO: 985150 - RNA, 20 nt, Human
uaaguccuugguauauaugc

SEQ ID NO: 985151 - RNA, 24 nt, Human
uaugacagaaucaugaagacuugc

SEQ ID NO: 985152 - RNA, 23 nt, Human
uccaacaauaauaaacuggcaaa

SEQ ID NO: 985153 - RNA, 26 nt, Human
uccacacacuaaaaagaaaaagaaca

SEQ ID NO: 985154 - RNA, 18 nt, Human
ucugaggaguguuugaaa

SEQ ID NO: 985155 - RNA, 20 nt, Human
ugacagaaucaugaagacuu

SEQ ID NO: 985156 - RNA, 22 nt, Human
ugcgacgaaagaaagaagauaa

SEQ ID NO: 985157 - RNA, 19 nt, Human
uggugcugaagauaaacac

SEQ ID NO: 985158 - RNA, 20 nt, Human
uggugcugaagauaaacacu

SEQ ID NO: 985159 - RNA, 22 nt, Human
uuacuucaucaaaauacuuaga

SEQ ID NO: 985160 - RNA, 23 nt, Human
uuagaagaauauucugaggagug

SEQ ID NO: 985161 - RNA, 24 nt, Human
uuuuuuuuuuuuuuucauauuggg

SEQ ID NO: 985162 - RNA, 23 nt, Human
acagaagcaaacugcugcugggu

SEQ ID NO: 985163 - RNA, 18 nt, Human
cagcggcagcggcaaggg

SEQ ID NO: 985164 - RNA, 23 nt, Human
caggacaucuuccaccuuguuuu

SEQ ID NO: 985165 - RNA, 22 nt, Human
cugcuggguuacaugucuacgu

SEQ ID NO: 985166 - RNA, 20 nt, Human
uaauucaggacaucuuccac

SEQ ID NO: 985167 - RNA, 24 nt, Human
uaggcugauuaaucaguggacaac

SEQ ID NO: 985168 - RNA, 22 nt, Human
ucuguaauacaauguggugaaa

SEQ ID NO: 985169 - RNA, 24 nt, Human
ugcugcuggguuacaugucuacgu

SEQ ID NO: 985170 - RNA, 23 nt, Human
aaaaaaaaaacacauucaaauaa

SEQ ID NO: 985171 - RNA, 22 nt, Human
aaaaaaaaacacauucaaauaa

SEQ ID NO: 985172 - RNA, 22 nt, Human
aaaaucacaaauaaggcuucug

SEQ ID NO: 985173 - RNA, 20 nt, Human
aaacucggcacggggcagua

SEQ ID NO: 985174 - RNA, 23 nt, Human
acauauguuagaauuagaaaccu

SEQ ID NO: 985175 - RNA, 23 nt, Human
acggaaaaauggcuuucuuucuc

SEQ ID NO: 985176 - RNA, 23 nt, Human
aggaggcggaggaggagcagcgg

SEQ ID NO: 985177 - RNA, 20 nt, Human
aggaugaggaguaagagaga

SEQ ID NO: 985178 - RNA, 24 nt, Human
aggcaaaugguaaaaacacaugga

SEQ ID NO: 985179 - RNA, 23 nt, Human
aguaagagagaaacgaggagaga

SEQ ID NO: 985180 - RNA, 20 nt, Human
agugacagaaaaguaugaga

SEQ ID NO: 985181 - RNA, 26 nt, Human
auagaccacuccccaaagucugcaaa

SEQ ID NO: 985182 - RNA, 25 nt, Human
caaaaauggaagcuuccacucccaa

SEQ ID NO: 985183 - RNA, 25 nt, Human
cacaauuugaucuucaguguugucu

SEQ ID NO: 985184 - RNA, 21 nt, Human
cacggggcaguagggcgggcg

SEQ ID NO: 985185 - RNA, 25 nt, Human
caucauggaaaaaaaaaacacauuc

SEQ ID NO: 985186 - RNA, 23 nt, Human
ccaccaaaauucuuguaaaugaa

SEQ ID NO: 985187 - RNA, 24 nt, Human
cccaaaaucacaaauaaggcuucu

SEQ ID NO: 985188 - RNA, 20 nt, Human
ccccaaagucugcaaaacac

SEQ ID NO: 985189 - RNA, 19 nt, Human
cccccuccccuuuucuucc

SEQ ID NO: 985190 - RNA, 18 nt, Human
ccuuucccacaacaaaau

SEQ ID NO: 985191 - RNA, 23 nt, Human
cuaaacacaauuugaucuucagu

SEQ ID NO: 985192 - RNA, 19 nt, Human
cucccaaaaucacaaauaa

SEQ ID NO: 985193 - RNA, 19 nt, Human
cuugaaauaucuuaauaac

SEQ ID NO: 985194 - RNA, 18 nt, Human
ggaaggaggcggaggagg

SEQ ID NO: 985195 - RNA, 19 nt, Human
ggcaggcuuacagugacag

SEQ ID NO: 985196 - RNA, 19 nt, Human
ggcggaggaggagcagcgg

SEQ ID NO: 985197 - RNA, 19 nt, Human
gggaaggaggcggaggagg

SEQ ID NO: 985198 - RNA, 28 nt, Human
ggggcaguagggcgggcgcgggcagggg

SEQ ID NO: 985199 - RNA, 18 nt, Human
gugauucuugccuucccc

SEQ ID NO: 985200 - RNA, 21 nt, Human
uaaacaaaaauuuuauccaaa

SEQ ID NO: 985201 - RNA, 21 nt, Human
uaaggcaaaugguaaaaacac

SEQ ID NO: 985202 - RNA, 18 nt, Human
uaaggcuucugguuuucu

SEQ ID NO: 985203 - RNA, 26 nt, Human
uacagugacagaaaaguaugagaaca

SEQ ID NO: 985204 - RNA, 27 nt, Human
uaccaaaauuuaaacaaaaggacauac

SEQ ID NO: 985205 - RNA, 22 nt, Human
uagaccacuccccaaagucugc

SEQ ID NO: 985206 - RNA, 23 nt, Human
ucaggauucauuuuugacacaaa

SEQ ID NO: 985207 - RNA, 20 nt, Human
ucaucuugaaauaucuuaau

SEQ ID NO: 985208 - RNA, 22 nt, Human
uccacucccaaaaucacaaaua

SEQ ID NO: 985209 - RNA, 26 nt, Human
uccccaaagucugcaaaacacugccu

SEQ ID NO: 985210 - RNA, 20 nt, Human
uccccaaagucugcaaaacc

SEQ ID NO: 985211 - RNA, 23 nt, Human
ucuugccuucccccuccccuuuu

SEQ ID NO: 985212 - RNA, 19 nt, Human
ugacagaaaaguaugagaa

SEQ ID NO: 985213 - RNA, 18 nt, Human
uggaagcuuccacuccca

SEQ ID NO: 985214 - RNA, 20 nt, Human
ugggaggaugaggaguaaga

SEQ ID NO: 985215 - RNA, 21 nt, Human
uguaaaugaagcaggacuuga

SEQ ID NO: 985216 - RNA, 22 nt, Human
uuaaacaaaaauuuuauccaaa

SEQ ID NO: 985217 - RNA, 22 nt, Human
uuagaauuagaaaccuguaaaa

SEQ ID NO: 985218 - RNA, 21 nt, Human
uuagaugcccaccaaaauucu

SEQ ID NO: 985219 - RNA, 18 nt, Human
uucccccuccccuuuucu

SEQ ID NO: 985220 - RNA, 18 nt, Human
uugauuucaaauucuguc

SEQ ID NO: 985221 - RNA, 22 nt, Human
uuuguauagauaaaaaucuacc

SEQ ID NO: 985222 - RNA, 18 nt, Human
aaaaaaaccaaaaaccag

SEQ ID NO: 985223 - RNA, 22 nt, Human
aaaaaaaccaaaaaccaguuug

SEQ ID NO: 985224 - RNA, 23 nt, Human
aaaaaaccaaaaaccaguuuguu

SEQ ID NO: 985225 - RNA, 26 nt, Human
aacaaguuuuauuuaaauaaggguuu

SEQ ID NO: 985226 - RNA, 18 nt, Human
accccauccucuccucuc

SEQ ID NO: 985227 - RNA, 22 nt, Human
acugaaggggaaaaaaaaacca

SEQ ID NO: 985228 - RNA, 19 nt, Human
aggaaauccucacuuaagc

SEQ ID NO: 985229 - RNA, 21 nt, Human
aggggaaaaaaaaaccaaaaa

SEQ ID NO: 985230 - RNA, 19 nt, Human
agucagguuggagacacca

SEQ ID NO: 985231 - RNA, 20 nt, Human
aguuuuauuuaaauaagggu

SEQ ID NO: 985232 - RNA, 21 nt, Human
caagccagauguccuaucacc

SEQ ID NO: 985233 - RNA, 20 nt, Human
caaguuaaaagcggacccca

SEQ ID NO: 985234 - RNA, 23 nt, Human
caccaaaagcucccuucuaguag

SEQ ID NO: 985235 - RNA, 20 nt, Human
cagcauggcucuuuucaguu

SEQ ID NO: 985236 - RNA, 21 nt, Human
cagcuagcuacaugacugaug

SEQ ID NO: 985237 - RNA, 20 nt, Human
cauuauacaagcugugaggg

SEQ ID NO: 985238 - RNA, 20 nt, Human
ccaaguuaaaagcggacccc

SEQ ID NO: 985239 - RNA, 21 nt, Human
ccauccucuccucucagauuc

SEQ ID NO: 985240 - RNA, 25 nt, Human
ccccaaaugguuacauuauacaagc

SEQ ID NO: 985241 - RNA, 23 nt, Human
ccuuaccccauccucuccucuca

SEQ ID NO: 985242 - RNA, 19 nt, Human
cgagggggcucaaggggga

SEQ ID NO: 985243 - RNA, 18 nt, Human
cucacauucugauguuug

SEQ ID NO: 985244 - RNA, 23 nt, Human
cucucagauucaccgaggacugu

SEQ ID NO: 985245 - RNA, 24 nt, Human
cuuaccccauccucuccucucaga

SEQ ID NO: 985246 - RNA, 19 nt, Human
gaaaaaaaaaccaaaaacc

SEQ ID NO: 985247 - RNA, 23 nt, Human
gaaggcggcggcggcgguggcgg

SEQ ID NO: 985248 - RNA, 22 nt, Human
gcgagggggcucaagggggagg

SEQ ID NO: 985249 - RNA, 24 nt, Human
gcggaaggcggcggcggcgguggc

SEQ ID NO: 985250 - RNA, 19 nt, Human
gcggcggcgguggcgggag

SEQ ID NO: 985251 - RNA, 24 nt, Human
gcggcggcgguggcgggagaaggc

SEQ ID NO: 985252 - RNA, 22 nt, Human
gcucaagggggaggcugcugaa

SEQ ID NO: 985253 - RNA, 21 nt, Human
gcucugggcuuggcugaaaca

SEQ ID NO: 985254 - RNA, 21 nt, Human
gcugcuauuaaguugcaagcu

SEQ ID NO: 985255 - RNA, 20 nt, Human
ggagacaccaggggaucuac

SEQ ID NO: 985256 - RNA, 18 nt, Human
ggcggcggcggcgguggc

SEQ ID NO: 985257 - RNA, 19 nt, Human
gggaaaaaaaaaccaaaaa

SEQ ID NO: 985258 - RNA, 19 nt, Human
gggaagcgagggggcucaa

SEQ ID NO: 985259 - RNA, 22 nt, Human
gggagagcugaggagguuccgg

SEQ ID NO: 985260 - RNA, 18 nt, Human
guuucaggcuugacacug

SEQ ID NO: 985261 - RNA, 24 nt, Human
uagucagguuggagacaccagggg

SEQ ID NO: 985262 - RNA, 22 nt, Human
ucaccgaggacuguucaggugg

SEQ ID NO: 985263 - RNA, 21 nt, Human
ucucuuaggguagggaacucu

SEQ ID NO: 985264 - RNA, 19 nt, Human
ugacaagggagagaaggga

SEQ ID NO: 985265 - RNA, 20 nt, Human
ugacaagggagagaagggaa

SEQ ID NO: 985266 - RNA, 25 nt, Human
ugccuuaccccauccucuccucuca

SEQ ID NO: 985267 - RNA, 26 nt, Human
ugucuggucgaacagaccuuuguggc

SEQ ID NO: 985268 - RNA, 20 nt, Human
ugugagguuuuuaaaccugu

SEQ ID NO: 985269 - RNA, 24 nt, Human
uguggcaagccagauggcggcucu

SEQ ID NO: 985270 - RNA, 20 nt, Human
uuaggguagggaacucugca

SEQ ID NO: 985271 - RNA, 23 nt, Human
uucaagacuagacagcauggcuc

SEQ ID NO: 985272 - RNA, 22 nt, Human
uucaggcuugacacugccaggc

SEQ ID NO: 985273 - RNA, 20 nt, Human
uuuuuuuucugaaaacaagu

SEQ ID NO: 985274 - RNA, 23 nt, Human
uuuuuuuuuucugaaaacaaguu

SEQ ID NO: 985275 - RNA, 18 nt, Human
uuuuuuuuuuuuuuucug

SEQ ID NO: 985276 - RNA, 18 nt, Human
caauucauaacugcccuc

SEQ ID NO: 985277 - RNA, 24 nt, Human
uauaaauucauuugauugcccaaa

SEQ ID NO: 985278 - RNA, 20 nt, Human
aaaaaaaaaauuagccggga

SEQ ID NO: 985279 - RNA, 24 nt, Human
aaaaaaaauuaacuugaaccaaaa

SEQ ID NO: 985280 - RNA, 20 nt, Human
aaacccugcuggccagcaaa

SEQ ID NO: 985281 - RNA, 22 nt, Human
aaaccuacauuuauugaaaaug

SEQ ID NO: 985282 - RNA, 20 nt, Human
aacacggugaaaccucgucu

SEQ ID NO: 985283 - RNA, 21 nt, Human
aacacggugaaaccucgucuc

SEQ ID NO: 985284 - RNA, 21 nt, Human
aagaagucauuuuuuuuuuaa

SEQ ID NO: 985285 - RNA, 21 nt, Human
aagcagagcuugcagugagcc

SEQ ID NO: 985286 - RNA, 24 nt, Human
aagcagagcuugcagugagccgag

SEQ ID NO: 985287 - RNA, 24 nt, Human
aauggcgugaacccaggaagcaga

SEQ ID NO: 985288 - RNA, 24 nt, Human
aauguuaguguauuaucaugugag

SEQ ID NO: 985289 - RNA, 18 nt, Human
acacggugaaaccucguc

SEQ ID NO: 985290 - RNA, 19 nt, Human
acacggugaaaccucgucu

SEQ ID NO: 985291 - RNA, 22 nt, Human
acacuaccacacuauccagccc

SEQ ID NO: 985292 - RNA, 20 nt, Human
acagagcgagacuccgucuc

SEQ ID NO: 985293 - RNA, 23 nt, Human
acagagcgagacuccgucucaaa

SEQ ID NO: 985294 - RNA, 24 nt, Human
acagagcgagacuccgucucaaaa

SEQ ID NO: 985295 - RNA, 20 nt, Human
acagcagaggcggccacaaa

SEQ ID NO: 985296 - RNA, 21 nt, Human
accacacuaccacacuaucca

SEQ ID NO: 985297 - RNA, 19 nt, Human
accacacuauccagcccuc

SEQ ID NO: 985298 - RNA, 21 nt, Human
acccugcuggccagcaaacag

SEQ ID NO: 985299 - RNA, 24 nt, Human
accucgucucuacuaagaauacaa

SEQ ID NO: 985300 - RNA, 24 nt, Human
acugcacuccagccugggcgacag

SEQ ID NO: 985301 - RNA, 26 nt, Human
acugcacuccagccugggcgacagag

SEQ ID NO: 985302 - RNA, 21 nt, Human
agaauggacaaccaugugaag

SEQ ID NO: 985303 - RNA, 24 nt, Human
agagcuugcagugagccgagaucg

SEQ ID NO: 985304 - RNA, 23 nt, Human
agaggcggccacaaacccugcug

SEQ ID NO: 985305 - RNA, 23 nt, Human
agccgggagugguggugggcgcc

SEQ ID NO: 985306 - RNA, 24 nt, Human
agccugggcgacagagcgagacuc

SEQ ID NO: 985307 - RNA, 24 nt, Human
aggcggguggaucauggggucagg

SEQ ID NO: 985308 - RNA, 19 nt, Human
aggcugaggcaggggaaug

SEQ ID NO: 985309 - RNA, 20 nt, Human
aggcugaggcggguggauca

SEQ ID NO: 985310 - RNA, 22 nt, Human
aggcugaggcggguggaucaug

SEQ ID NO: 985311 - RNA, 24 nt, Human
aucgugccacugcacuccagccug

SEQ ID NO: 985312 - RNA, 22 nt, Human
auguuaguguauuaucauguga

SEQ ID NO: 985313 - RNA, 24 nt, Human
caaacacaguaaacuauucugaua

SEQ ID NO: 985314 - RNA, 18 nt, Human
caaacccugcuggccagc

SEQ ID NO: 985315 - RNA, 23 nt, Human
caaccaugugaagcagcucaggu

SEQ ID NO: 985316 - RNA, 23 nt, Human
cacacuaccacacuauccagccc

SEQ ID NO: 985317 - RNA, 24 nt, Human
cacacugcaaaccccuccacccac

SEQ ID NO: 985318 - RNA, 18 nt, Human
caccaccuugccuccagc

SEQ ID NO: 985319 - RNA, 27 nt, Human
caccccaaccagcaccaaggccucuac

SEQ ID NO: 985320 - RNA, 19 nt, Human
cacccugcugccugucacc

SEQ ID NO: 985321 - RNA, 21 nt, Human
cacccugcugccugucaccac

SEQ ID NO: 985322 - RNA, 24 nt, Human
cacccugcugccugucaccaccuu

SEQ ID NO: 985323 - RNA, 23 nt, Human
cacuccagccugggcgacagagc

SEQ ID NO: 985324 - RNA, 24 nt, Human
cacuccagccugggcgacagagcg

SEQ ID NO: 985325 - RNA, 27 nt, Human
cacugcaaaccccuccacccacccuca

SEQ ID NO: 985326 - RNA, 19 nt, Human
cacugcacuccagccuggg

SEQ ID NO: 985327 - RNA, 20 nt, Human
cacugcacuccagccugggc

SEQ ID NO: 985328 - RNA, 22 nt, Human
cacugcacuccagccugggcga

SEQ ID NO: 985329 - RNA, 23 nt, Human
cacugcacuccagccugggcgac

SEQ ID NO: 985330 - RNA, 24 nt, Human
cacugcacuccagccugggcgaca

SEQ ID NO: 985331 - RNA, 26 nt, Human
cacuggcaguuuccugaggaacugca

SEQ ID NO: 985332 - RNA, 21 nt, Human
cagaauggacaaccaugugaa

SEQ ID NO: 985333 - RNA, 18 nt, Human
cagcccccuccucaccag

SEQ ID NO: 985334 - RNA, 24 nt, Human
cagcuacucgggaggcugaggcag

SEQ ID NO: 985335 - RNA, 19 nt, Human
cagucagcauauggcugcg

SEQ ID NO: 985336 - RNA, 21 nt, Human
cauuuuuuuuuuaauugggaa

SEQ ID NO: 985337 - RNA, 20 nt, Human
ccacugcacuccagccuggg

SEQ ID NO: 985338 - RNA, 21 nt, Human
ccacugcacuccagccugggc

SEQ ID NO: 985339 - RNA, 21 nt, Human
ccacugcacuccagccugggc

SEQ ID NO: 985340 - RNA, 24 nt, Human
ccacugcacuccagccugggcgac

SEQ ID NO: 985341 - RNA, 21 nt, Human
cccauagucccagcuacucgg

SEQ ID NO: 985342 - RNA, 18 nt, Human
cccuccacccacccucaa

SEQ ID NO: 985343 - RNA, 21 nt, Human
cccuccacccacccucaacuc

SEQ ID NO: 985344 - RNA, 23 nt, Human
cccuccacccacccucaacucac

SEQ ID NO: 985345 - RNA, 22 nt, Human
ccucuagcacaggccugucugg

SEQ ID NO: 985346 - RNA, 23 nt, Human
ccugaggaacugcagcccccucc

SEQ ID NO: 985347 - RNA, 18 nt, Human
ccugcugccugucaccac

SEQ ID NO: 985348 - RNA, 21 nt, Human
ccuggcuaacacggugaaacc

SEQ ID NO: 985349 - RNA, 24 nt, Human
ccuggcuaacacggugaaaccucg

SEQ ID NO: 985350 - RNA, 22 nt, Human
ccugggcgacagagcgagacuc

SEQ ID NO: 985351 - RNA, 24 nt, Human
cgagaacauccuggcuaacacggu

SEQ ID NO: 985352 - RNA, 24 nt, Human
cgagaucgugccacugcacuccag

SEQ ID NO: 985353 - RNA, 22 nt, Human
cggguggaucauggggucagga

SEQ ID NO: 985354 - RNA, 18 nt, Human
cucaaaaaaaaaaaaaaa

SEQ ID NO: 985355 - RNA, 23 nt, Human
cuccagccuuuuaaaauaauuuu

SEQ ID NO: 985356 - RNA, 23 nt, Human
cuccaugucgccacccugcugcc

SEQ ID NO: 985357 - RNA, 19 nt, Human
cuccgucucaaaaaaaaaa

SEQ ID NO: 985358 - RNA, 25 nt, Human
cucuacuaagaauacaaaaaaaaaa

SEQ ID NO: 985359 - RNA, 20 nt, Human
cugcaaaccccuccacccac

SEQ ID NO: 985360 - RNA, 19 nt, Human
cugcagcccccuccucacc

SEQ ID NO: 985361 - RNA, 22 nt, Human
cugcaggccccaccccaaccag

SEQ ID NO: 985362 - RNA, 24 nt, Human
cugcugccugucaccaccuugccu

SEQ ID NO: 985363 - RNA, 26 nt, Human
cugcugccugucaccaccuugccucc

SEQ ID NO: 985364 - RNA, 18 nt, Human
cuggcuaacacggugaaa

SEQ ID NO: 985365 - RNA, 22 nt, Human
cuucagucagcauauggcugcg

SEQ ID NO: 985366 - RNA, 21 nt, Human
cuugaaccaaaacuuaaucug

SEQ ID NO: 985367 - RNA, 24 nt, Human
cuugcagugagccgagaucgugcc

SEQ ID NO: 985368 - RNA, 18 nt, Human
cuuuaagccccagaaugg

SEQ ID NO: 985369 - RNA, 19 nt, Human
gaaaccucgucucuacuaa

SEQ ID NO: 985370 - RNA, 18 nt, Human
gacuuuguccacuggcag

SEQ ID NO: 985371 - RNA, 18 nt, Human
gagcuugcagugagccga

SEQ ID NO: 985372 - RNA, 24 nt, Human
gcacuccagccugggcgacagagc

SEQ ID NO: 985373 - RNA, 23 nt, Human
gcaggucuaggcugaggcgggug

SEQ ID NO: 985374 - RNA, 24 nt, Human
gccacauucccacacugcaaaccc

SEQ ID NO: 985375 - RNA, 22 nt, Human
gccacugcacuccagccugggc

SEQ ID NO: 985376 - RNA, 24 nt, Human
gccacugcacuccagccugggcga

SEQ ID NO: 985377 - RNA, 23 nt, Human
gcccauagucccagcuacucggg

SEQ ID NO: 985378 - RNA, 20 nt, Human
gccgagaucgugccacugca

SEQ ID NO: 985379 - RNA, 19 nt, Human
gcuaacacggugaaaccuc

SEQ ID NO: 985380 - RNA, 24 nt, Human
ggguggaucauggggucaggagau

SEQ ID NO: 985381 - RNA, 24 nt, Human
uaacaaaccuacauuuauugaaaa

SEQ ID NO: 985382 - RNA, 24 nt, Human
uaacacggugaaaccucgucucua

SEQ ID NO: 985383 - RNA, 20 nt, Human
uaagaauacaaaaaaaaaaa

SEQ ID NO: 985384 - RNA, 20 nt, Human
uacuuggucuggucccaguu

SEQ ID NO: 985385 - RNA, 22 nt, Human
uagagugaauaagagcaaacac

SEQ ID NO: 985386 - RNA, 19 nt, Human
uaguagagugaauaagagc

SEQ ID NO: 985387 - RNA, 21 nt, Human
uauacuggguaauaaacuaaa

SEQ ID NO: 985388 - RNA, 20 nt, Human
ucaaaaaaaaaaaaaaaaaa

SEQ ID NO: 985389 - RNA, 21 nt, Human
ucaaaaaaaaaaaaaaaaaaa

SEQ ID NO: 985390 - RNA, 24 nt, Human
ucagcaggucuaggcugaggcggg

SEQ ID NO: 985391 - RNA, 20 nt, Human
ucaggucaacugcagggcca

SEQ ID NO: 985392 - RNA, 23 nt, Human
ucaguaacuaagacucugcaggc

SEQ ID NO: 985393 - RNA, 24 nt, Human
ucauggggucaggagaucgagaac

SEQ ID NO: 985394 - RNA, 20 nt, Human
uccaccacacuaccacacua

SEQ ID NO: 985395 - RNA, 21 nt, Human
uccaccacacuaccacacuau

SEQ ID NO: 985396 - RNA, 23 nt, Human
uccaccacacuaccacacuaucc

SEQ ID NO: 985397 - RNA, 25 nt, Human
uccacccacccucaacucacacaca

SEQ ID NO: 985398 - RNA, 18 nt, Human
uccacuggcaguuuccug

SEQ ID NO: 985399 - RNA, 19 nt, Human
uccacuggcaguuuccuga

SEQ ID NO: 985400 - RNA, 23 nt, Human
uccagccugggcgacagagcgag

SEQ ID NO: 985401 - RNA, 24 nt, Human
uccagccugggcgacagagcgaga

SEQ ID NO: 985402 - RNA, 20 nt, Human
ucccacacugcaaaccccuc

SEQ ID NO: 985403 - RNA, 23 nt, Human
ucccacacugcaaaccccuccac

SEQ ID NO: 985404 - RNA, 23 nt, Human
uccgucucaaaaaaaaaaaaaaa

SEQ ID NO: 985405 - RNA, 23 nt, Human
ucgugccacugcacuccagccug

SEQ ID NO: 985406 - RNA, 18 nt, Human
ucuauccaccacacuacc

SEQ ID NO: 985407 - RNA, 25 nt, Human
ucuccaugucgccacccugcugccu

SEQ ID NO: 985408 - RNA, 22 nt, Human
ucucuacuaagaauacaaaaaa

SEQ ID NO: 985409 - RNA, 19 nt, Human
ucugcaggccccaccccaa

SEQ ID NO: 985410 - RNA, 18 nt, Human
ugaagcagcucaggucaa

SEQ ID NO: 985411 - RNA, 21 nt, Human
ugaauaagagcaaacacagua

SEQ ID NO: 985412 - RNA, 22 nt, Human
ugagccgagaucgugccacugc

SEQ ID NO: 985413 - RNA, 25 nt, Human
ugaggaacugcagcccccuccucaa

SEQ ID NO: 985414 - RNA, 23 nt, Human
ugaggcaggggaauggcgugaac

SEQ ID NO: 985415 - RNA, 24 nt, Human
ugaggcaggggaauggcgugaacc

SEQ ID NO: 985416 - RNA, 25 nt, Human
ugaggcaggggaauggcgugaaccc

SEQ ID NO: 985417 - RNA, 22 nt, Human
ugaggcggguggaucauggggu

SEQ ID NO: 985418 - RNA, 24 nt, Human
ugaggcggguggaucaugggguca

SEQ ID NO: 985419 - RNA, 20 nt, Human
ugauuuauugagcuucccuc

SEQ ID NO: 985420 - RNA, 25 nt, Human
ugccuccagccuuuuaaaauaauuu

SEQ ID NO: 985421 - RNA, 27 nt, Human
ugccugucaccaccuugccuccagccu

SEQ ID NO: 985422 - RNA, 21 nt, Human
uggcaaugauaccaggauugu

SEQ ID NO: 985423 - RNA, 21 nt, Human
uguaagaaaucagagggcucu

SEQ ID NO: 985424 - RNA, 22 nt, Human
uguagaaaauguaaauaugaug

SEQ ID NO: 985425 - RNA, 22 nt, Human
uguuaugagaauuaaacuuuca

SEQ ID NO: 985426 - RNA, 24 nt, Human
uuagccgggagugguggugggcgc

SEQ ID NO: 985427 - RNA, 24 nt, Human
uugcaggccucccgacucagguuc

SEQ ID NO: 985428 - RNA, 21 nt, Human
uugcagugagccgagaucgug

SEQ ID NO: 985429 - RNA, 22 nt, Human
uugcagugagccgagaucgugc

SEQ ID NO: 985430 - RNA, 23 nt, Human
uuuauugagcuucccucucucca

SEQ ID NO: 985431 - RNA, 18 nt, Human
uuuuuuaguagagugaau

SEQ ID NO: 985432 - RNA, 22 nt, Human
uuuuuuuuuuuuuugcacugga

SEQ ID NO: 985433 - RNA, 23 nt, Human
uuuuuuuuuuuuuuuugcacugg

SEQ ID NO: 985434 - RNA, 22 nt, Human
uuuuuuuuuuuuuuuuugcacu

SEQ ID NO: 985435 - RNA, 25 nt, Human
uuuuuuuuuuuuuuuuuugcacugg

SEQ ID NO: 985436 - RNA, 20 nt, Human
uuuuuuuuuuuuuuuuuugg

SEQ ID NO: 985437 - RNA, 19 nt, Human
aaacaaaaacacaagcuuc

SEQ ID NO: 985438 - RNA, 19 nt, Human
aaacaaguguccagauucc

SEQ ID NO: 985439 - RNA, 19 nt, Human
aacugaaugauaaagaccc

SEQ ID NO: 985440 - RNA, 19 nt, Human
aagaagugaacuccgucag

SEQ ID NO: 985441 - RNA, 19 nt, Human
aagcagccucccucacaga

SEQ ID NO: 985442 - RNA, 21 nt, Human
aagcagccucccucacagaaa

SEQ ID NO: 985443 - RNA, 19 nt, Human
acagaaagcagccucccuc

SEQ ID NO: 985444 - RNA, 22 nt, Human
acagaaagcagccucccucaca

SEQ ID NO: 985445 - RNA, 21 nt, Human
acccaacucauccucuguucu

SEQ ID NO: 985446 - RNA, 21 nt, Human
accucaccuuuacucccucag

SEQ ID NO: 985447 - RNA, 21 nt, Human
acucccaccugccagccucac

SEQ ID NO: 985448 - RNA, 19 nt, Human
acuuuuggcuaguagacug

SEQ ID NO: 985449 - RNA, 26 nt, Human
agcaaggaauaaaugaaugcauacag

SEQ ID NO: 985450 - RNA, 22 nt, Human
aggcaaggugcugccgagccca

SEQ ID NO: 985451 - RNA, 20 nt, Human
aguugcauauauuacaggcu

SEQ ID NO: 985452 - RNA, 23 nt, Human
augacagacaaccccggucccca

SEQ ID NO: 985453 - RNA, 21 nt, Human
augcaagcaagcacagaagga

SEQ ID NO: 985454 - RNA, 24 nt, Human
caaacaaaaacacaagcuucucuc

SEQ ID NO: 985455 - RNA, 22 nt, Human
caaacugaaugauaaagacccg

SEQ ID NO: 985456 - RNA, 20 nt, Human
caagaacggagaccccuucc

SEQ ID NO: 985457 - RNA, 20 nt, Human
caagcaagcacagaaggauc

SEQ ID NO: 985458 - RNA, 23 nt, Human
cacagaaagcagccucccucaca

SEQ ID NO: 985459 - RNA, 21 nt, Human
cacgcuucuccccauuacaaa

SEQ ID NO: 985460 - RNA, 19 nt, Human
cagaaagcagccucccuca

SEQ ID NO: 985461 - RNA, 20 nt, Human
cagaaagcagccucccucac

SEQ ID NO: 985462 - RNA, 20 nt, Human
cagaaggaucauguguagug

SEQ ID NO: 985463 - RNA, 22 nt, Human
cagaauggcugugccuuagaua

SEQ ID NO: 985464 - RNA, 18 nt, Human
cagcaaggaauaaaugaa

SEQ ID NO: 985465 - RNA, 20 nt, Human
caucacacucccuccgcuca

SEQ ID NO: 985466 - RNA, 21 nt, Human
caugcgaugccacgugccacc

SEQ ID NO: 985467 - RNA, 22 nt, Human
cauuaguaggcuaucacuucag

SEQ ID NO: 985468 - RNA, 23 nt, Human
ccacauaaaugacagacaacccc

SEQ ID NO: 985469 - RNA, 25 nt, Human
ccccauuacaaacaaaaacacaagc

SEQ ID NO: 985470 - RNA, 23 nt, Human
ccccgcuguuucacacgcugcuu

SEQ ID NO: 985471 - RNA, 24 nt, Human
ccccuuggaaaugaacuuuuauuu

SEQ ID NO: 985472 - RNA, 20 nt, Human
cccgcacgcgcccgcgcccg

SEQ ID NO: 985473 - RNA, 22 nt, Human
cccgcacgcgcccgcgcccgcg

SEQ ID NO: 985474 - RNA, 26 nt, Human
cccggcucgcagcccgcacgcgcccg

SEQ ID NO: 985475 - RNA, 22 nt, Human
cccuccgcucacgccgcucuuc

SEQ ID NO: 985476 - RNA, 18 nt, Human
ccgccgccgccucccggc

SEQ ID NO: 985477 - RNA, 18 nt, Human
ccgccgccgccucccggc

SEQ ID NO: 985478 - RNA, 20 nt, Human
ccgccgccgccucccggcuc

SEQ ID NO: 985479 - RNA, 18 nt, Human
ccgccgccgucgccgucg

SEQ ID NO: 985480 - RNA, 24 nt, Human
ccgccgccgucgccgucgccgccg

SEQ ID NO: 985481 - RNA, 18 nt, Human
ccgccgucgccgucgccg

SEQ ID NO: 985482 - RNA, 24 nt, Human
ccgccgucgccgucgccgccgccg

SEQ ID NO: 985483 - RNA, 23 nt, Human
ccucaccaggcagacuucccuca

SEQ ID NO: 985484 - RNA, 20 nt, Human
ccuccugaccaccacuuugg

SEQ ID NO: 985485 - RNA, 19 nt, Human
cgcccgcgcccgcgcccgc

SEQ ID NO: 985486 - RNA, 19 nt, Human
cgggguuggcuggcuacug

SEQ ID NO: 985487 - RNA, 18 nt, Human
cucaccuuuacucccuca

SEQ ID NO: 985488 - RNA, 22 nt, Human
cucaccuuuacucccucagaua

SEQ ID NO: 985489 - RNA, 18 nt, Human
cucaguaacauccauaca

SEQ ID NO: 985490 - RNA, 21 nt, Human
cucgcaaaaugguccucccac

SEQ ID NO: 985491 - RNA, 24 nt, Human
cugccagccucaccaggcagacuu

SEQ ID NO: 985492 - RNA, 22 nt, Human
gaaauuucacagaaagcagccu

SEQ ID NO: 985493 - RNA, 24 nt, Human
gaagguucugaagaagugaacucc

SEQ ID NO: 985494 - RNA, 18 nt, Human
gacugcauuagacuccca

SEQ ID NO: 985495 - RNA, 19 nt, Human
gagaaaauuaggcagugaa

SEQ ID NO: 985496 - RNA, 19 nt, Human
gauuccccccaacagaccc

SEQ ID NO: 985497 - RNA, 24 nt, Human
gauuccccccaacagacccaacuc

SEQ ID NO: 985498 - RNA, 21 nt, Human
gcagcccgcacgcgcccgcgc

SEQ ID NO: 985499 - RNA, 22 nt, Human
gccgccgccgucgccgucgccg

SEQ ID NO: 985500 - RNA, 24 nt, Human
gccgucgccgucgccgccgccgcc

SEQ ID NO: 985501 - RNA, 25 nt, Human
gccgucgccgucgccgccgccgccu

SEQ ID NO: 985502 - RNA, 19 nt, Human
gccucccggcucgcagccc

SEQ ID NO: 985503 - RNA, 19 nt, Human
gccucccucacagaaacac

SEQ ID NO: 985504 - RNA, 24 nt, Human
ggaaucaucacacucccuccgcuc

SEQ ID NO: 985505 - RNA, 22 nt, Human
gugaaacagggcuacacucgca

SEQ ID NO: 985506 - RNA, 18 nt, Human
guggccgacucuccaccc

SEQ ID NO: 985507 - RNA, 25 nt, Human
uacacucgcaaaaugguccucccac

SEQ ID NO: 985508 - RNA, 18 nt, Human
uacagcaccaagaacgga

SEQ ID NO: 985509 - RNA, 20 nt, Human
ucaaauacagcaccaagaac

SEQ ID NO: 985510 - RNA, 19 nt, Human
uccagauuccccccaacag

SEQ ID NO: 985511 - RNA, 20 nt, Human
uccccauuacaaacaaaaac

SEQ ID NO: 985512 - RNA, 21 nt, Human
ucccucacagaaacacaggcu

SEQ ID NO: 985513 - RNA, 18 nt, Human
uccgagcgcaacucgguc

SEQ ID NO: 985514 - RNA, 24 nt, Human
uccgucagaauaaacaagugucca

SEQ ID NO: 985515 - RNA, 24 nt, Human
uccucccacggcugagcgccucag

SEQ ID NO: 985516 - RNA, 20 nt, Human
ucgccgucgccgccgccgcc

SEQ ID NO: 985517 - RNA, 26 nt, Human
ucgccgucgccgccgccgccucccgg

SEQ ID NO: 985518 - RNA, 22 nt, Human
ucuacacccguuucaaauacag

SEQ ID NO: 985519 - RNA, 23 nt, Human
ucuccccauuacaaacaaaaaca

SEQ ID NO: 985520 - RNA, 19 nt, Human
ugaagaagugaacuccguc

SEQ ID NO: 985521 - RNA, 21 nt, Human
ugaaugcauacaggacuuuug

SEQ ID NO: 985522 - RNA, 19 nt, Human
ugagguggacagacacgca

SEQ ID NO: 985523 - RNA, 22 nt, Human
ugagguggacagacacgcaggc

SEQ ID NO: 985524 - RNA, 19 nt, Human
ugccaccugccuggccacg

SEQ ID NO: 985525 - RNA, 19 nt, Human
uggaacugcaauguggaga

SEQ ID NO: 985526 - RNA, 19 nt, Human
uuccagugaaaagcucuau

SEQ ID NO: 985527 - RNA, 21 nt, Human
uuucacagaaagcagccuccc

SEQ ID NO: 985528 - RNA, 19 nt, Human
aaaccacacaagacacaaa

SEQ ID NO: 985529 - RNA, 22 nt, Human
aaagaaauauggcuuaugagaa

SEQ ID NO: 985530 - RNA, 19 nt, Human
aacacagugaaacccuguc

SEQ ID NO: 985531 - RNA, 20 nt, Human
aacacagugaaacccugucu

SEQ ID NO: 985532 - RNA, 21 nt, Human
aacacagugaaacccugucuc

SEQ ID NO: 985533 - RNA, 23 nt, Human
aagacacaaauagcauggugaca

SEQ ID NO: 985534 - RNA, 22 nt, Human
aagagacaggguuuugcuacau

SEQ ID NO: 985535 - RNA, 24 nt, Human
aagugauccacccgccucagccuc

SEQ ID NO: 985536 - RNA, 24 nt, Human
aauugcuugaacucuggaggugga

SEQ ID NO: 985537 - RNA, 20 nt, Human
acaaaccacacaagacacaa

SEQ ID NO: 985538 - RNA, 20 nt, Human
acagagugagacuccgcuuc

SEQ ID NO: 985539 - RNA, 25 nt, Human
acagagugagacuccgcuuccaaaa

SEQ ID NO: 985540 - RNA, 20 nt, Human
acaggguuuugcuacauugg

SEQ ID NO: 985541 - RNA, 24 nt, Human
acaggguuuugcuacauuggccag

SEQ ID NO: 985542 - RNA, 19 nt, Human
acauuggccaggcuggucu

SEQ ID NO: 985543 - RNA, 20 nt, Human
acauuggccaggcuggucuu

SEQ ID NO: 985544 - RNA, 22 nt, Human
accacugcacuccagccugggc

SEQ ID NO: 985545 - RNA, 22 nt, Human
acccgccucagccucccaaagu

SEQ ID NO: 985546 - RNA, 24 nt, Human
acccugucucuacuaaaaauacaa

SEQ ID NO: 985547 - RNA, 22 nt, Human
acccuguuuuaaaccaaaguua

SEQ ID NO: 985548 - RNA, 24 nt, Human
acuccagccugggcaacagaguga

SEQ ID NO: 985549 - RNA, 25 nt, Human
acuccgcuuccaaaaaauauuuaca

SEQ ID NO: 985550 - RNA, 24 nt, Human
acugcacuccagccugggcaacag

SEQ ID NO: 985551 - RNA, 24 nt, Human
acugcacuccagccugggcaacag

SEQ ID NO: 985552 - RNA, 19 nt, Human
agacagucaacaaucaaag

SEQ ID NO: 985553 - RNA, 21 nt, Human
agacggagacggggcgagaga

SEQ ID NO: 985554 - RNA, 24 nt, Human
agcacuuugggaggccgaggcagg

SEQ ID NO: 985555 - RNA, 22 nt, Human
agcccgucgucaucagugagga

SEQ ID NO: 985556 - RNA, 24 nt, Human
agccugggcaacagagugagacuc

SEQ ID NO: 985557 - RNA, 23 nt, Human
aggaaaucgagaccguccuggcc

SEQ ID NO: 985558 - RNA, 19 nt, Human
aggcagaucacuaggucag

SEQ ID NO: 985559 - RNA, 20 nt, Human
aggcaggcagaucacuaggu

SEQ ID NO: 985560 - RNA, 24 nt, Human
aggcaggcagaucacuaggucagg

SEQ ID NO: 985561 - RNA, 24 nt, Human
aggcuguggcaggagaauugcuug

SEQ ID NO: 985562 - RNA, 22 nt, Human
aggugagacaauuauuuuugaa

SEQ ID NO: 985563 - RNA, 19 nt, Human
agguggaggcugcagugag

SEQ ID NO: 985564 - RNA, 24 nt, Human
agguggaggcugcagugagccaag

SEQ ID NO: 985565 - RNA, 24 nt, Human
auugcaccacugcacuccagccug

SEQ ID NO: 985566 - RNA, 28 nt, Human
auugcaccacugcacuccagccugggca

SEQ ID NO: 985567 - RNA, 24 nt, Human
caacacagugaaacccugucucua

SEQ ID NO: 985568 - RNA, 24 nt, Human
caacagagugagacuccgcuucca

SEQ ID NO: 985569 - RNA, 24 nt, Human
caagacacaaauagcauggugaca

SEQ ID NO: 985570 - RNA, 23 nt, Human
cacccgccucagccucccaaagu

SEQ ID NO: 985571 - RNA, 19 nt, Human
cacccuguuuuaaaccaaa

SEQ ID NO: 985572 - RNA, 20 nt, Human
caccugcuugugaauuccug

SEQ ID NO: 985573 - RNA, 22 nt, Human
cacuccagccugggcaacagag

SEQ ID NO: 985574 - RNA, 22 nt, Human
cacuccagccugggcaacagag

SEQ ID NO: 985575 - RNA, 24 nt, Human
cacuccagccugggcaacagagug

SEQ ID NO: 985576 - RNA, 19 nt, Human
cacugcacuccagccuggg

SEQ ID NO: 985577 - RNA, 21 nt, Human
cacugcacuccagccugggca

SEQ ID NO: 985578 - RNA, 22 nt, Human
cacugcacuccagccugggcaa

SEQ ID NO: 985579 - RNA, 23 nt, Human
cacugcacuccagccugggcaac

SEQ ID NO: 985580 - RNA, 24 nt, Human
cacugcacuccagccugggcaaca

SEQ ID NO: 985581 - RNA, 23 nt, Human
cacuucaaaccauacugccucgc

SEQ ID NO: 985582 - RNA, 23 nt, Human
cagaucacuaggucaggaaaucg

SEQ ID NO: 985583 - RNA, 23 nt, Human
cagcaagacuuuaaagcacuuga

SEQ ID NO: 985584 - RNA, 24 nt, Human
cagcacuuugggaggccgaggcag

SEQ ID NO: 985585 - RNA, 25 nt, Human
cagcacuuugggaggccgaggcagg

SEQ ID NO: 985586 - RNA, 24 nt, Human
caggguuuugcuacauuggccagg

SEQ ID NO: 985587 - RNA, 19 nt, Human
cagucgucgccugcaggug

SEQ ID NO: 985588 - RNA, 18 nt, Human
caguuuuuacagcaagac

SEQ ID NO: 985589 - RNA, 22 nt, Human
cauuggccaggcuggucuugaa

SEQ ID NO: 985590 - RNA, 19 nt, Human
ccacccgccucagccuccc

SEQ ID NO: 985591 - RNA, 20 nt, Human
ccacugcacuccagccuggg

SEQ ID NO: 985592 - RNA, 20 nt, Human
ccacugcacuccagccuggg

SEQ ID NO: 985593 - RNA, 21 nt, Human
ccacugcacuccagccugggc

SEQ ID NO: 985594 - RNA, 23 nt, Human
ccacugcacuccagccugggcaa

SEQ ID NO: 985595 - RNA, 24 nt, Human
ccacugcacuccagccugggcaac

SEQ ID NO: 985596 - RNA, 23 nt, Human
ccagagggucccugcccgaccgg

SEQ ID NO: 985597 - RNA, 18 nt, Human
cccggccucaagugaucc

SEQ ID NO: 985598 - RNA, 22 nt, Human
cccggccucaagugauccaccc

SEQ ID NO: 985599 - RNA, 23 nt, Human
cccggccucaagugauccacccg

SEQ ID NO: 985600 - RNA, 22 nt, Human
ccucaagugauccacccgccuc

SEQ ID NO: 985601 - RNA, 24 nt, Human
ccucgcgccgccgccucaggccuc

SEQ ID NO: 985602 - RNA, 22 nt, Human
ccuggccaacacagugaaaccc

SEQ ID NO: 985603 - RNA, 24 nt, Human
ccuggccaacacagugaaacccug

SEQ ID NO: 985604 - RNA, 22 nt, Human
ccugggcaacagagugagacuc

SEQ ID NO: 985605 - RNA, 19 nt, Human
ccuguagucccagcuacuc

SEQ ID NO: 985606 - RNA, 21 nt, Human
ccuguagucccagcuacucag

SEQ ID NO: 985607 - RNA, 24 nt, Human
cgagaccguccuggccaacacagu

SEQ ID NO: 985608 - RNA, 21 nt, Human
cgagagacaaccugcacaugc

SEQ ID NO: 985609 - RNA, 24 nt, Human
cgaggcaggcagaucacuagguca

SEQ ID NO: 985610 - RNA, 24 nt, Human
cgccuguagucccagcuacucagg

SEQ ID NO: 985611 - RNA, 25 nt, Human
cgcuuccaaaaaauauuuacaaggg

SEQ ID NO: 985612 - RNA, 18 nt, Human
cuacucaggaggcugugg

SEQ ID NO: 985613 - RNA, 23 nt, Human
cucccggccucaagugauccacc

SEQ ID NO: 985614 - RNA, 22 nt, Human
cugcagugagccaagauugcac

SEQ ID NO: 985615 - RNA, 18 nt, Human
cugccucgcgccgccgcc

SEQ ID NO: 985616 - RNA, 18 nt, Human
cuggccaacacagugaaa

SEQ ID NO: 985617 - RNA, 20 nt, Human
cugggugugguggugugcgc

SEQ ID NO: 985618 - RNA, 21 nt, Human
cugggugugguggugugcgcc

SEQ ID NO: 985619 - RNA, 24 nt, Human
cuuaagcagcagcuccaacagccc

SEQ ID NO: 985620 - RNA, 22 nt, Human
cuuuucgagagagauucacccu

SEQ ID NO: 985621 - RNA, 19 nt, Human
gaaacccugucucuacuaa

SEQ ID NO: 985622 - RNA, 19 nt, Human
gacaggguuuugcuacauu

SEQ ID NO: 985623 - RNA, 23 nt, Human
gagacaauuauuuuugaaacuaa

SEQ ID NO: 985624 - RNA, 18 nt, Human
gaggcugcagugagccaa

SEQ ID NO: 985625 - RNA, 23 nt, Human
gaggcugcagugagccaagauug

SEQ ID NO: 985626 - RNA, 24 nt, Human
gaucacuaggucaggaaaucgaga

SEQ ID NO: 985627 - RNA, 24 nt, Human
gcacuccagccugggcaacagagu

SEQ ID NO: 985628 - RNA, 19 nt, Human
gcauagcaauggcagucug

SEQ ID NO: 985629 - RNA, 24 nt, Human
gccaacacagugaaacccugucuc

SEQ ID NO: 985630 - RNA, 23 nt, Human
gccuguagucccagcuacucagg

SEQ ID NO: 985631 - RNA, 23 nt, Human
gcuggucuugaacucccggccuc

SEQ ID NO: 985632 - RNA, 20 nt, Human
gcuugaacucuggaggugga

SEQ ID NO: 985633 - RNA, 22 nt, Human
ggaggcugcagugagccaagau

SEQ ID NO: 985634 - RNA, 24 nt, Human
ggaggcugcagugagccaagauug

SEQ ID NO: 985635 - RNA, 20 nt, Human
ggcaggagaauugcuugaac

SEQ ID NO: 985636 - RNA, 24 nt, Human
ggcuggucuugaacucccggccuc

SEQ ID NO: 985637 - RNA, 22 nt, Human
gugaauuccugcaacuauguaa

SEQ ID NO: 985638 - RNA, 24 nt, Human
gugauccacccgccucagccuccc

SEQ ID NO: 985639 - RNA, 24 nt, Human
guggcaggagaauugcuugaacuc

SEQ ID NO: 985640 - RNA, 18 nt, Human
guggugugcgccuguagu

SEQ ID NO: 985641 - RNA, 23 nt, Human
guggugugcgccuguagucccag

SEQ ID NO: 985642 - RNA, 23 nt, Human
uaaaagaaaaaucaauggcuuua

SEQ ID NO: 985643 - RNA, 24 nt, Human
uacauuggccaggcuggucuugaa

SEQ ID NO: 985644 - RNA, 18 nt, Human
uagaaacugggaaacuca

SEQ ID NO: 985645 - RNA, 25 nt, Human
ucaaaccauacugccucgcgccgcc

SEQ ID NO: 985646 - RNA, 20 nt, Human
ucacccuguuuuaaaccaaa

SEQ ID NO: 985647 - RNA, 24 nt, Human
ucacuaggucaggaaaucgagacc

SEQ ID NO: 985648 - RNA, 21 nt, Human
ucacuguggguggcugucucc

SEQ ID NO: 985649 - RNA, 21 nt, Human
uccacccgccucagccuccca

SEQ ID NO: 985650 - RNA, 23 nt, Human
uccagccugggcaacagagugag

SEQ ID NO: 985651 - RNA, 24 nt, Human
uccagccugggcaacagagugaga

SEQ ID NO: 985652 - RNA, 22 nt, Human
ucgcgccgccgccucaggccuc

SEQ ID NO: 985653 - RNA, 24 nt, Human
ucucacuguggguggcugucuccu

SEQ ID NO: 985654 - RNA, 22 nt, Human
ucucuacuaaaaauacaaaaaa

SEQ ID NO: 985655 - RNA, 18 nt, Human
ucuggagguggaggcugc

SEQ ID NO: 985656 - RNA, 22 nt, Human
ucuguagaaacugggaaacuca

SEQ ID NO: 985657 - RNA, 20 nt, Human
ucuguggugagggcuuaagc

SEQ ID NO: 985658 - RNA, 22 nt, Human
ugacaugcaaagaaauauggcu

SEQ ID NO: 985659 - RNA, 21 nt, Human
ugcaccacugcacuccagccu

SEQ ID NO: 985660 - RNA, 23 nt, Human
uggagguggaggcugcagugagc

SEQ ID NO: 985661 - RNA, 25 nt, Human
uggcaggagaauugcuugaacucug

SEQ ID NO: 985662 - RNA, 20 nt, Human
uggcagucuguagaaacugg

SEQ ID NO: 985663 - RNA, 24 nt, Human
uggccaacacagugaaacccuguc

SEQ ID NO: 985664 - RNA, 23 nt, Human
uggccaggcuggucuugaacucc

SEQ ID NO: 985665 - RNA, 20 nt, Human
ugggaggccgaggcaggcag

SEQ ID NO: 985666 - RNA, 24 nt, Human
ugggaggccgaggcaggcagauca

SEQ ID NO: 985667 - RNA, 24 nt, Human
ugguggugugcgccuguaguccca

SEQ ID NO: 985668 - RNA, 21 nt, Human
uggugugcgccuguaguccca

SEQ ID NO: 985669 - RNA, 24 nt, Human
uggugugcgccuguagucccagcu

SEQ ID NO: 985670 - RNA, 22 nt, Human
uuaucugggugugguggugugc

SEQ ID NO: 985671 - RNA, 21 nt, Human
uucacccuguuuuaaaccaaa

SEQ ID NO: 985672 - RNA, 23 nt, Human
uugcaccacugcacuccagccug

SEQ ID NO: 985673 - RNA, 31 nt, Human
uugcaccacugcacuccagccugggcaacaa

SEQ ID NO: 985674 - RNA, 24 nt, Human
uugcuugaacucuggagguggagg

SEQ ID NO: 985675 - RNA, 25 nt, Human
uugggaggccgaggcaggcagauca

SEQ ID NO: 985676 - RNA, 22 nt, Human
acccuuggaggcacugcugcgc

SEQ ID NO: 985677 - RNA, 18 nt, Human
caagaaaucaccuuaaua

SEQ ID NO: 985678 - RNA, 25 nt, Human
cacaagaaaucaccuuaauauaaca

SEQ ID NO: 985679 - RNA, 23 nt, Human
ccuuuccuguuguugcaggcacu

SEQ ID NO: 985680 - RNA, 20 nt, Human
cucugcuuuaagaacccuug

SEQ ID NO: 985681 - RNA, 19 nt, Human
uaagaacccuuggaggcac

SEQ ID NO: 985682 - RNA, 20 nt, Human
uuuuuuuuuuuuuugucaga

SEQ ID NO: 985683 - RNA, 20 nt, Human
uuuuuuuuuuuuuuugucag

SEQ ID NO: 985684 - RNA, 20 nt, Human
uuuuuuuuuuuuuuugucag

SEQ ID NO: 985685 - RNA, 19 nt, Human
uuuuuuuuuuuuuuuuugu

SEQ ID NO: 985686 - RNA, 27 nt, Human
uuuuuuuuuuuuuuuuuuuuuuugggg

SEQ ID NO: 985687 - RNA, 20 nt, Human
aaaucccucccaccccaccu

SEQ ID NO: 985688 - RNA, 24 nt, Human
aagaacaacagggagauagacgac

SEQ ID NO: 985689 - RNA, 24 nt, Human
aagcacacuacaaaggcugcaauc

SEQ ID NO: 985690 - RNA, 19 nt, Human
aagcagaggcaggaggugg

SEQ ID NO: 985691 - RNA, 22 nt, Human
aagcagaggcaggagguggaga

SEQ ID NO: 985692 - RNA, 22 nt, Human
aaguugaugggguuacugagcc

SEQ ID NO: 985693 - RNA, 26 nt, Human
acaaagccucaggauuucuucaaggg

SEQ ID NO: 985694 - RNA, 22 nt, Human
acaccagggccaccaaguugau

SEQ ID NO: 985695 - RNA, 19 nt, Human
accaacccaaaucccuccc

SEQ ID NO: 985696 - RNA, 19 nt, Human
acccaaaucccucccaccc

SEQ ID NO: 985697 - RNA, 18 nt, Human
agaaaaggaccuaccucc

SEQ ID NO: 985698 - RNA, 19 nt, Human
agaagaaaauagacaagca

SEQ ID NO: 985699 - RNA, 22 nt, Human
agaagaaaauagacaagcaggg

SEQ ID NO: 985700 - RNA, 18 nt, Human
agacaccagggccaccaa

SEQ ID NO: 985701 - RNA, 20 nt, Human
agccucuggaucagcacccu

SEQ ID NO: 985702 - RNA, 19 nt, Human
aggaagagccgugaagaga

SEQ ID NO: 985703 - RNA, 18 nt, Human
aggcacagaccugggcca

SEQ ID NO: 985704 - RNA, 19 nt, Human
aggcccaagggucuccagu

SEQ ID NO: 985705 - RNA, 18 nt, Human
aguuccagaacaagaaau

SEQ ID NO: 985706 - RNA, 21 nt, Human
aguucuguucauuuaguucca

SEQ ID NO: 985707 - RNA, 24 nt, Human
auaagcagaggcaggagguggaga

SEQ ID NO: 985708 - RNA, 22 nt, Human
caacccaaaucccucccacccc

SEQ ID NO: 985709 - RNA, 22 nt, Human
caagaaauaagcagaggcagga

SEQ ID NO: 985710 - RNA, 19 nt, Human
caaggagcacucuacaaag

SEQ ID NO: 985711 - RNA, 20 nt, Human
caccaacccaaaucccuccc

SEQ ID NO: 985712 - RNA, 26 nt, Human
caccaacccaaaucccucccacccca

SEQ ID NO: 985713 - RNA, 23 nt, Human
caccagggccaccaaguugaugg

SEQ ID NO: 985714 - RNA, 22 nt, Human
caccuuggccgaaaaaugggau

SEQ ID NO: 985715 - RNA, 19 nt, Human
cagggagauagacgaccac

SEQ ID NO: 985716 - RNA, 24 nt, Human
cauccuacucucuccucaauucca

SEQ ID NO: 985717 - RNA, 22 nt, Human
ccaccaacccaaaucccuccca

SEQ ID NO: 985718 - RNA, 25 nt, Human
ccagaacaagaaauaagcagaggca

SEQ ID NO: 985719 - RNA, 18 nt, Human
cccaaaucccucccaccc

SEQ ID NO: 985720 - RNA, 23 nt, Human
cccaagguccccuacuaggccgg

SEQ ID NO: 985721 - RNA, 24 nt, Human
cccaccccaccuguaguccaaaga

SEQ ID NO: 985722 - RNA, 26 nt, Human
cccuacuaggccggaggagaaaagga

SEQ ID NO: 985723 - RNA, 19 nt, Human
cccucccaccccaccugua

SEQ ID NO: 985724 - RNA, 21 nt, Human
ccucccaccccaccuguaguc

SEQ ID NO: 985725 - RNA, 20 nt, Human
cgccgaugggaagaacaacg

SEQ ID NO: 985726 - RNA, 22 nt, Human
cuccuacaggggcacaaacaag

SEQ ID NO: 985727 - RNA, 22 nt, Human
cuucaagggauacugcugugcc

SEQ ID NO: 985728 - RNA, 18 nt, Human
gaacaagaaauaagcaga

SEQ ID NO: 985729 - RNA, 21 nt, Human
gaacuuucucgagguucauau

SEQ ID NO: 985730 - RNA, 23 nt, Human
gaaggcacagaccugggccacgg

SEQ ID NO: 985731 - RNA, 22 nt, Human
gaccacagccugugcacccggu

SEQ ID NO: 985732 - RNA, 21 nt, Human
gugaagagaagaaaauagaca

SEQ ID NO: 985733 - RNA, 23 nt, Human
uaauccaccaacccaaaucccuc

SEQ ID NO: 985734 - RNA, 24 nt, Human
uagacaagcaggggagggaagaau

SEQ ID NO: 985735 - RNA, 21 nt, Human
ucauggccuucagaacuuucu

SEQ ID NO: 985736 - RNA, 26 nt, Human
uccaccaacccaaaucccucccaccc

SEQ ID NO: 985737 - RNA, 23 nt, Human
ucccaccccaccuguaguccaaa

SEQ ID NO: 985738 - RNA, 20 nt, Human
ucuccagugagugcuugaga

SEQ ID NO: 985739 - RNA, 19 nt, Human
ugagacagucaagagggag

SEQ ID NO: 985740 - RNA, 18 nt, Human
ugagccucuggaucagca

SEQ ID NO: 985741 - RNA, 22 nt, Human
ugagccucuggaucaggacccu

SEQ ID NO: 985742 - RNA, 24 nt, Human
ugauaggaagcaaggaagcacacu

SEQ ID NO: 985743 - RNA, 22 nt, Human
ugcugugccaggucucgagggc

SEQ ID NO: 985744 - RNA, 21 nt, Human
uggaagagggaggcaaggcag

SEQ ID NO: 985745 - RNA, 19 nt, Human
ugggaagaacaacagggag

SEQ ID NO: 985746 - RNA, 23 nt, Human
ugugagacaccagggccaccaag

SEQ ID NO: 985747 - RNA, 21 nt, Human
ugugcugcucucucaacaguc

SEQ ID NO: 985748 - RNA, 26 nt, Human
ugugcugcucucucaacagucagcug

SEQ ID NO: 985749 - RNA, 18 nt, Human
uuugaaguucuguucauu

SEQ ID NO: 985750 - RNA, 22 nt, Human
aaaaagcaaggugaaaagaaau

SEQ ID NO: 985751 - RNA, 20 nt, Human
aaaauucuuucacaacagcc

SEQ ID NO: 985752 - RNA, 18 nt, Human
aacagaauuuuacauaug

SEQ ID NO: 985753 - RNA, 22 nt, Human
aagcaacacaauuuccaaaacu

SEQ ID NO: 985754 - RNA, 20 nt, Human
aauugcugcaacuuuuacag

SEQ ID NO: 985755 - RNA, 25 nt, Human
acaaaauggagacauaaauuauguc

SEQ ID NO: 985756 - RNA, 21 nt, Human
acaacaaaauggagacauaaa

SEQ ID NO: 985757 - RNA, 18 nt, Human
accauaguugaaaaugcu

SEQ ID NO: 985758 - RNA, 24 nt, Human
agaaaaauucuuucacaacagcca

SEQ ID NO: 985759 - RNA, 22 nt, Human
aggacacuagccuaaacuaaaa

SEQ ID NO: 985760 - RNA, 23 nt, Human
aggcagaguguucuauuguuccu

SEQ ID NO: 985761 - RNA, 23 nt, Human
agguucuagcagaagaaacauuu

SEQ ID NO: 985762 - RNA, 25 nt, Human
augaaaaaaagcaaggugaaaagaa

SEQ ID NO: 985763 - RNA, 19 nt, Human
caacaaaaauaacaggccg

SEQ ID NO: 985764 - RNA, 23 nt, Human
caagcaaauuaaggaugaaaaaa

SEQ ID NO: 985765 - RNA, 18 nt, Human
caaguaacugauguagug

SEQ ID NO: 985766 - RNA, 18 nt, Human
cagauugcagcaaaugua

SEQ ID NO: 985767 - RNA, 19 nt, Human
cagccccaggaaauagcua

SEQ ID NO: 985768 - RNA, 21 nt, Human
ccaccucuaagaggcaggaca

SEQ ID NO: 985769 - RNA, 25 nt, Human
ccucuaagaggcaggacacuagccu

SEQ ID NO: 985770 - RNA, 22 nt, Human
ccugaaauuugaaacauaguac

SEQ ID NO: 985771 - RNA, 24 nt, Human
cuaacucuauuucuuaaaagcaac

SEQ ID NO: 985772 - RNA, 21 nt, Human
cuagccaauaaauugcugcaa

SEQ ID NO: 985773 - RNA, 19 nt, Human
cuccugaaacuuaaacucu

SEQ ID NO: 985774 - RNA, 20 nt, Human
cugacuagaauacagcaaua

SEQ ID NO: 985775 - RNA, 21 nt, Human
cuuaaacucugaauagcaaca

SEQ ID NO: 985776 - RNA, 22 nt, Human
cuuaaacucugaauagcaacag

SEQ ID NO: 985777 - RNA, 18 nt, Human
cuucuccuuuggcuugag

SEQ ID NO: 985778 - RNA, 23 nt, Human
gaaaaaaagcaaggugaaaagaa

SEQ ID NO: 985779 - RNA, 18 nt, Human
gaaaagaaauaggaaaaa

SEQ ID NO: 985780 - RNA, 22 nt, Human
gaacagguaugagguucuagca

SEQ ID NO: 985781 - RNA, 23 nt, Human
gaagaaacauuugcauaaaugug

SEQ ID NO: 985782 - RNA, 22 nt, Human
gauaaauggagaaugagaaaga

SEQ ID NO: 985783 - RNA, 24 nt, Human
ggcagaguguucuauuguuccugu

SEQ ID NO: 985784 - RNA, 20 nt, Human
gggcaaaagaaccuucagau

SEQ ID NO: 985785 - RNA, 24 nt, Human
gguaugagguucuagcagaagaaa

SEQ ID NO: 985786 - RNA, 21 nt, Human
ggugaaaagaaauaggaaaaa

SEQ ID NO: 985787 - RNA, 18 nt, Human
guuccuguuuucuccuga

SEQ ID NO: 985788 - RNA, 22 nt, Human
uaaaagcaacacaauuuccaaa

SEQ ID NO: 985789 - RNA, 20 nt, Human
uaacaggcagaguguucuau

SEQ ID NO: 985790 - RNA, 19 nt, Human
uacacaaugccaccucuaa

SEQ ID NO: 985791 - RNA, 23 nt, Human
uaugucauaacagaauuuuacau

SEQ ID NO: 985792 - RNA, 21 nt, Human
ucaaaaauuuucuaugacuag

SEQ ID NO: 985793 - RNA, 19 nt, Human
ucaaagcucagauuuacac

SEQ ID NO: 985794 - RNA, 27 nt, Human
ucaaagcucagauuuacacaaugccac

SEQ ID NO: 985795 - RNA, 21 nt, Human
ucuggucugacuagaauacag

SEQ ID NO: 985796 - RNA, 21 nt, Human
ucuguucuuacugucuucucc

SEQ ID NO: 985797 - RNA, 19 nt, Human
ugaaaaugcugacacaaau

SEQ ID NO: 985798 - RNA, 22 nt, Human
ugaauagcaacagauugcagca

SEQ ID NO: 985799 - RNA, 23 nt, Human
ugaugcagaauucuuaauggcac

SEQ ID NO: 985800 - RNA, 20 nt, Human
ugucuucuccuuuggcuuga

SEQ ID NO: 985801 - RNA, 22 nt, Human
uuauuuggcaauaauaaacuga

SEQ ID NO: 985802 - RNA, 19 nt, Human
uuccaaaacuuucuugcuc

SEQ ID NO: 985803 - RNA, 25 nt, Human
uucuaugacuagccaauaaauugcu

SEQ ID NO: 985804 - RNA, 21 nt, Human
uucuuucacaacagccaggaa

SEQ ID NO: 985805 - RNA, 21 nt, Human
uugacagaggaucucuuggua

SEQ ID NO: 985806 - RNA, 27 nt, Human
uuuuuuuuuuuuuuuuuuuuccugggg

SEQ ID NO: 985807 - RNA, 24 nt, Human
aaauggggaguacagcuucaucuc

SEQ ID NO: 985808 - RNA, 19 nt, Human
aacagguccuagccaauga

SEQ ID NO: 985809 - RNA, 18 nt, Human
aacugugggaggcagggu

SEQ ID NO: 985810 - RNA, 20 nt, Human
aagggagauggauggguccc

SEQ ID NO: 985811 - RNA, 22 nt, Human
aaguggaggccagagggcugag

SEQ ID NO: 985812 - RNA, 20 nt, Human
aaugauggggaaggcaggaa

SEQ ID NO: 985813 - RNA, 20 nt, Human
acaaaaaaaagagcaaacag

SEQ ID NO: 985814 - RNA, 30 nt, Human
acacacaugcacacgcacacgcacacacag

SEQ ID NO: 985815 - RNA, 21 nt, Human
acacagcuaagacaccaaacc

SEQ ID NO: 985816 - RNA, 22 nt, Human
acacaguccugcggagcugccu

SEQ ID NO: 985817 - RNA, 21 nt, Human
acacgcacacgcacacacagc

SEQ ID NO: 985818 - RNA, 20 nt, Human
acagaggcuauuguguggaa

SEQ ID NO: 985819 - RNA, 18 nt, Human
acagguagggagcauggg

SEQ ID NO: 985820 - RNA, 22 nt, Human
acaugcacacacauauguaagu

SEQ ID NO: 985821 - RNA, 18 nt, Human
acuacaacacgucacagc

SEQ ID NO: 985822 - RNA, 20 nt, Human
agagggaaugauggggaagg

SEQ ID NO: 985823 - RNA, 22 nt, Human
agagggcugagguuuauugcuu

SEQ ID NO: 985824 - RNA, 23 nt, Human
agcaugggagggcagcugugcua

SEQ ID NO: 985825 - RNA, 20 nt, Human
aggaaaguggaggccagagg

SEQ ID NO: 985826 - RNA, 18 nt, Human
aggaacugugggaggcag

SEQ ID NO: 985827 - RNA, 20 nt, Human
aggaacugugggaggcaggg

SEQ ID NO: 985828 - RNA, 21 nt, Human
aggaaggaguuguuggucuca

SEQ ID NO: 985829 - RNA, 28 nt, Human
aggagucccgggcgaggacggggguccc

SEQ ID NO: 985830 - RNA, 23 nt, Human
agggagcaugggagggcagcugu

SEQ ID NO: 985831 - RNA, 23 nt, Human
agggccccugcuuccugccucug

SEQ ID NO: 985832 - RNA, 21 nt, Human
aggggaaggggagccagauug

SEQ ID NO: 985833 - RNA, 19 nt, Human
agggggagaaggauggggc

SEQ ID NO: 985834 - RNA, 22 nt, Human
agggggagaaggauggggcuca

SEQ ID NO: 985835 - RNA, 20 nt, Human
aggucaggauggcagggcag

SEQ ID NO: 985836 - RNA, 25 nt, Human
aguauacauacacauucacacacag

SEQ ID NO: 985837 - RNA, 19 nt, Human
aguggaggccagagggcug

SEQ ID NO: 985838 - RNA, 18 nt, Human
aguguuacaaaaugggga

SEQ ID NO: 985839 - RNA, 26 nt, Human
aguucaguuggguggauggggaaggg

SEQ ID NO: 985840 - RNA, 19 nt, Human
auggcacaugcacacacau

SEQ ID NO: 985841 - RNA, 22 nt, Human
cacacagcuaagacaccaaaca

SEQ ID NO: 985842 - RNA, 21 nt, Human
cacaguccugcggagcugccu

SEQ ID NO: 985843 - RNA, 22 nt, Human
cacaugcacacacauauguaag

SEQ ID NO: 985844 - RNA, 20 nt, Human
caccaaagaaagcagccaca

SEQ ID NO: 985845 - RNA, 18 nt, Human
caccagagccccagcccc

SEQ ID NO: 985846 - RNA, 19 nt, Human
caccagagccccagccccu

SEQ ID NO: 985847 - RNA, 28 nt, Human
cacggggaguggggagugagggcucugg

SEQ ID NO: 985848 - RNA, 19 nt, Human
cacugcccaaccucucccc

SEQ ID NO: 985849 - RNA, 19 nt, Human
cacugggucuucuccaccu

SEQ ID NO: 985850 - RNA, 18 nt, Human
cagaaaccagauuagggg

SEQ ID NO: 985851 - RNA, 24 nt, Human
cagaggcuauuguguggaagggua

SEQ ID NO: 985852 - RNA, 18 nt, Human
cagcauguggggagugag

SEQ ID NO: 985853 - RNA, 25 nt, Human
cagcuucaucucaaaacugggauga

SEQ ID NO: 985854 - RNA, 25 nt, Human
cagggcacacacucauacacugggc

SEQ ID NO: 985855 - RNA, 19 nt, Human
cagggcagggaggggaagg

SEQ ID NO: 985856 - RNA, 21 nt, Human
caguuggguggauggggaagg

SEQ ID NO: 985857 - RNA, 22 nt, Human
cauacacauucacacacagucc

SEQ ID NO: 985858 - RNA, 26 nt, Human
cauacacauucacacacaguccugcg

SEQ ID NO: 985859 - RNA, 24 nt, Human
cauauuugcagcccaaauugagag

SEQ ID NO: 985860 - RNA, 26 nt, Human
caugcacacgcacacgcacacacagc

SEQ ID NO: 985861 - RNA, 26 nt, Human
cauuaggggucccucacucacugccc

SEQ ID NO: 985862 - RNA, 23 nt, Human
ccaaucccaaagcccuagagagg

SEQ ID NO: 985863 - RNA, 23 nt, Human
ccacaggguuggggcacuggacg

SEQ ID NO: 985864 - RNA, 18 nt, Human
ccagggccuaggcagagg

SEQ ID NO: 985865 - RNA, 22 nt, Human
ccauggucuacaccagagcccc

SEQ ID NO: 985866 - RNA, 22 nt, Human
cccauggcacaugcacacacau

SEQ ID NO: 985867 - RNA, 22 nt, Human
ccuagggcuccuccaucccagg

SEQ ID NO: 985868 - RNA, 19 nt, Human
ccuccaucccaggcucaac

SEQ ID NO: 985869 - RNA, 23 nt, Human
ccuccaucccaggcucaacacag

SEQ ID NO: 985870 - RNA, 21 nt, Human
ccugugcuguaguggguggag

SEQ ID NO: 985871 - RNA, 21 nt, Human
cucacagugugccugccaauc

SEQ ID NO: 985872 - RNA, 28 nt, Human
cucacugcccaaccucuccccacucaga

SEQ ID NO: 985873 - RNA, 19 nt, Human
cugccaggagggccccugc

SEQ ID NO: 985874 - RNA, 20 nt, Human
cugcuccccucccugugagg

SEQ ID NO: 985875 - RNA, 19 nt, Human
cugcuuccugccucugccc

SEQ ID NO: 985876 - RNA, 20 nt, Human
cugcuuccugccucugcccc

SEQ ID NO: 985877 - RNA, 20 nt, Human
cuuccugccucugccccagc

SEQ ID NO: 985878 - RNA, 21 nt, Human
gacagggggagcaggggaaug

SEQ ID NO: 985879 - RNA, 18 nt, Human
gagagcaagggagaugga

SEQ ID NO: 985880 - RNA, 19 nt, Human
gaggagggaaggagauggg

SEQ ID NO: 985881 - RNA, 21 nt, Human
gaggagggaaggagaugggcc

SEQ ID NO: 985882 - RNA, 19 nt, Human
gagggcacccgaggcccac

SEQ ID NO: 985883 - RNA, 21 nt, Human
gagggcugagguuuauugcuu

SEQ ID NO: 985884 - RNA, 21 nt, Human
gauuuguuuccguuuuauuuu

SEQ ID NO: 985885 - RNA, 21 nt, Human
gcggcagcggcgacugcuccc

SEQ ID NO: 985886 - RNA, 23 nt, Human
ggaaccccuggaacagggaagca

SEQ ID NO: 985887 - RNA, 18 nt, Human
ggaaggagaugggccuug

SEQ ID NO: 985888 - RNA, 21 nt, Human
ggacaguauagugauaccccc

SEQ ID NO: 985889 - RNA, 19 nt, Human
ggacgggggucccggccgc

SEQ ID NO: 985890 - RNA, 19 nt, Human
ggaggccagagggcugagg

SEQ ID NO: 985891 - RNA, 24 nt, Human
ggagggcaccaaagaaagcagcca

SEQ ID NO: 985892 - RNA, 22 nt, Human
ggagggcagcugugcuauuccc

SEQ ID NO: 985893 - RNA, 18 nt, Human
ggaggucaggauggcagg

SEQ ID NO: 985894 - RNA, 19 nt, Human
ggcagagggaaugaugggg

SEQ ID NO: 985895 - RNA, 19 nt, Human
gggaaggaaggaguuguug

SEQ ID NO: 985896 - RNA, 25 nt, Human
gggaaugauggggaaggcaggaagc

SEQ ID NO: 985897 - RNA, 22 nt, Human
gggagagugaccacaggguugg

SEQ ID NO: 985898 - RNA, 20 nt, Human
gggagugagggcucuggagg

SEQ ID NO: 985899 - RNA, 24 nt, Human
gggcacuggagaaggcagucuuuu

SEQ ID NO: 985900 - RNA, 24 nt, Human
gggcagggaggggaaggaaggagu

SEQ ID NO: 985901 - RNA, 19 nt, Human
gggcagugggaaaugggga

SEQ ID NO: 985902 - RNA, 19 nt, Human
ggggagagugaccacaggg

SEQ ID NO: 985903 - RNA, 21 nt, Human
ggggaggaacugugggaggca

SEQ ID NO: 985904 - RNA, 20 nt, Human
ggggaguggggagugagggc

SEQ ID NO: 985905 - RNA, 19 nt, Human
gggggucccggccgcgggc

SEQ ID NO: 985906 - RNA, 31 nt, Human
gggguuuacacacaugcacacgcacacgcag

SEQ ID NO: 985907 - RNA, 19 nt, Human
gguuucaccagggccuagg

SEQ ID NO: 985908 - RNA, 21 nt, Human
gucuucuccaccuccugcuuc

SEQ ID NO: 985909 - RNA, 21 nt, Human
guuacaaaauggggagaguga

SEQ ID NO: 985910 - RNA, 24 nt, Human
guuuacacacaugcacacgcacag

SEQ ID NO: 985911 - RNA, 19 nt, Human
uaaaaacuacaacacguca

SEQ ID NO: 985912 - RNA, 25 nt, Human
uacacacaugcacacgcacacgcac

SEQ ID NO: 985913 - RNA, 23 nt, Human
uacccaguucaguuggguggaug

SEQ ID NO: 985914 - RNA, 21 nt, Human
uaggcagagggaaugaugggg

SEQ ID NO: 985915 - RNA, 22 nt, Human
uaggggaggaacugugggaggc

SEQ ID NO: 985916 - RNA, 27 nt, Human
uaggggucccucacucacugcccaacc

SEQ ID NO: 985917 - RNA, 24 nt, Human
uauucuggaaccccuggaacaggg

SEQ ID NO: 985918 - RNA, 22 nt, Human
ucaaaaagaccccuccccacag

SEQ ID NO: 985919 - RNA, 21 nt, Human
ucacugcccaaccucucccca

SEQ ID NO: 985920 - RNA, 27 nt, Human
ucacugcccaaccucuccccacucaga

SEQ ID NO: 985921 - RNA, 20 nt, Human
ucaguuggguggauggggaa

SEQ ID NO: 985922 - RNA, 21 nt, Human
uccaacaggagaugugagagg

SEQ ID NO: 985923 - RNA, 24 nt, Human
uccacaagccucuggagaccuggu

SEQ ID NO: 985924 - RNA, 19 nt, Human
uccauggucuacaccagag

SEQ ID NO: 985925 - RNA, 20 nt, Human
ucccaaagcccuagagaccc

SEQ ID NO: 985926 - RNA, 22 nt, Human
ucccaaagcccuagagaccccu

SEQ ID NO: 985927 - RNA, 22 nt, Human
ucccaggcuggccuagggcucc

SEQ ID NO: 985928 - RNA, 19 nt, Human
uccccaggagagcaaggga

SEQ ID NO: 985929 - RNA, 20 nt, Human
ucccucacucacugcccacc

SEQ ID NO: 985930 - RNA, 21 nt, Human
ucccugcauuaggggucccuc

SEQ ID NO: 985931 - RNA, 20 nt, Human
ucccugugaggggacagguu

SEQ ID NO: 985932 - RNA, 22 nt, Human
ucuagguuccccggguaaggag

SEQ ID NO: 985933 - RNA, 20 nt, Human
ucuuccacaagccucuggag

SEQ ID NO: 985934 - RNA, 21 nt, Human
ugaggagggaaggagaugggc

SEQ ID NO: 985935 - RNA, 19 nt, Human
ugagggacaagggcacagg

SEQ ID NO: 985936 - RNA, 21 nt, Human
ugcaaagucaagggcaguggg

SEQ ID NO: 985937 - RNA, 20 nt, Human
ugcccacgggguuuacacac

SEQ ID NO: 985938 - RNA, 25 nt, Human
ugccccagcucuuugugcuuuuugg

SEQ ID NO: 985939 - RNA, 19 nt, Human
ugccucugccccagcucuu

SEQ ID NO: 985940 - RNA, 29 nt, Human
ugccugccaaucccaaagcccuagagacc

SEQ ID NO: 985941 - RNA, 19 nt, Human
ugcuuccugccucugcccc

SEQ ID NO: 985942 - RNA, 22 nt, Human
uggaugggucccucccaggggu

SEQ ID NO: 985943 - RNA, 24 nt, Human
uggcagggcagggaggggaaggaa

SEQ ID NO: 985944 - RNA, 20 nt, Human
uggggagugagggacaaggg

SEQ ID NO: 985945 - RNA, 21 nt, Human
uggggagugagggcucuggag

SEQ ID NO: 985946 - RNA, 23 nt, Human
ugggucuucuccaccuccugcuu

SEQ ID NO: 985947 - RNA, 22 nt, Human
ugguacaguguuacaaaauggg

SEQ ID NO: 985948 - RNA, 20 nt, Human
uguaaguauacauacacauu

SEQ ID NO: 985949 - RNA, 23 nt, Human
ugugcaaagucaagggcaguggg

SEQ ID NO: 985950 - RNA, 20 nt, Human
ugugcauccgcugaaauuac

SEQ ID NO: 985951 - RNA, 24 nt, Human
ugugggacucuuaucccaggcugg

SEQ ID NO: 985952 - RNA, 20 nt, Human
uguggggagugagggacaag

SEQ ID NO: 985953 - RNA, 23 nt, Human
uuacaaacaucuaaaaacuacaa

SEQ ID NO: 985954 - RNA, 18 nt, Human
uucacugggucuucucca

SEQ ID NO: 985955 - RNA, 22 nt, Human
uugcagcccaaauugagaggaa

SEQ ID NO: 985956 - RNA, 28 nt, Human
uugugugugcauccgcugaaauuacccu

SEQ ID NO: 985957 - RNA, 22 nt, Human
uuuugagcacagacaccaaaga

SEQ ID NO: 985958 - RNA, 20 nt, Human
uuuuuuguuauuuucacuuu

SEQ ID NO: 985959 - RNA, 22 nt, Human
aaaaagaaguggauggccagaa

SEQ ID NO: 985960 - RNA, 21 nt, Human
aaaaauauauacuucaagccc

SEQ ID NO: 985961 - RNA, 21 nt, Human
aaacaaaagaucaaaaaucag

SEQ ID NO: 985962 - RNA, 18 nt, Human
aaacauauugacagcuga

SEQ ID NO: 985963 - RNA, 23 nt, Human
aaaccaaauggaguuagccccca

SEQ ID NO: 985964 - RNA, 22 nt, Human
aagacgcauuuaucucagcagg

SEQ ID NO: 985965 - RNA, 18 nt, Human
aagcacugaagaaaaaca

SEQ ID NO: 985966 - RNA, 20 nt, Human
acacugguucccccccccuu

SEQ ID NO: 985967 - RNA, 21 nt, Human
acagagcaauaaauguuagua

SEQ ID NO: 985968 - RNA, 24 nt, Human
acuccaauggacucuguuucaaaa

SEQ ID NO: 985969 - RNA, 19 nt, Human
acuuccccaucccucccuc

SEQ ID NO: 985970 - RNA, 20 nt, Human
agacucacacaauucucuuu

SEQ ID NO: 985971 - RNA, 21 nt, Human
agaucagaguauccucaaugc

SEQ ID NO: 985972 - RNA, 20 nt, Human
agcacugaagauggugagcu

SEQ ID NO: 985973 - RNA, 21 nt, Human
aguuuuuuaagugguagcugc

SEQ ID NO: 985974 - RNA, 20 nt, Human
auaaaacacugagagaaaga

SEQ ID NO: 985975 - RNA, 23 nt, Human
augcauuucaguguccuggacaa

SEQ ID NO: 985976 - RNA, 20 nt, Human
auggaaagcaacuauuucca

SEQ ID NO: 985977 - RNA, 27 nt, Human
auguugcucaaauacuuggcuuucuag

SEQ ID NO: 985978 - RNA, 21 nt, Human
auucuguuuuaaauuuuugga

SEQ ID NO: 985979 - RNA, 21 nt, Human
cacaaagaaaagugccuggau

SEQ ID NO: 985980 - RNA, 18 nt, Human
cacauuguuuuuggguag

SEQ ID NO: 985981 - RNA, 18 nt, Human
caccugaguuacaaacau

SEQ ID NO: 985982 - RNA, 22 nt, Human
cacuacacucccuaacucccac

SEQ ID NO: 985983 - RNA, 21 nt, Human
cacugcaaaucaacucaaaca

SEQ ID NO: 985984 - RNA, 19 nt, Human
cacuguauucauauggaaa

SEQ ID NO: 985985 - RNA, 18 nt, Human
cagaaaguuaaauggcug

SEQ ID NO: 985986 - RNA, 25 nt, Human
cagaaauaaauauccuucuuaaaug

SEQ ID NO: 985987 - RNA, 22 nt, Human
cagaaugcuguacauugucccc

SEQ ID NO: 985988 - RNA, 19 nt, Human
cagcacuccaauguuaauc

SEQ ID NO: 985989 - RNA, 26 nt, Human
cagcacuccaauguuaauccaauuuu

SEQ ID NO: 985990 - RNA, 19 nt, Human
cauuucaguguccuggaca

SEQ ID NO: 985991 - RNA, 22 nt, Human
ccaaaauauggcuaaaaugcug

SEQ ID NO: 985992 - RNA, 20 nt, Human
ccaacagaaaguuaaauggc

SEQ ID NO: 985993 - RNA, 18 nt, Human
ccauugagagcacugcaa

SEQ ID NO: 985994 - RNA, 19 nt, Human
cccauugagagcacugcaa

SEQ ID NO: 985995 - RNA, 18 nt, Human
cccccaaaucagucaccu

SEQ ID NO: 985996 - RNA, 19 nt, Human
cccccaacccacaccccug

SEQ ID NO: 985997 - RNA, 18 nt, Human
cccuaacucccacuccaa

SEQ ID NO: 985998 - RNA, 22 nt, Human
ccuaacucccacuccaauggac

SEQ ID NO: 985999 - RNA, 18 nt, Human
ccugcaaaagucugcaga

SEQ ID NO: 986000 - RNA, 21 nt, Human
cuacaccugcacaaagaaaag

SEQ ID NO: 986001 - RNA, 23 nt, Human
cuaguucuugcaggcugauguuc

SEQ ID NO: 986002 - RNA, 18 nt, Human
cucaaugcuacuauguca

SEQ ID NO: 986003 - RNA, 20 nt, Human
cucaugagaccugaccaucu

SEQ ID NO: 986004 - RNA, 20 nt, Human
cucccaaaauauggcuaaaa

SEQ ID NO: 986005 - RNA, 19 nt, Human
cucccccaacccacacccc

SEQ ID NO: 986006 - RNA, 20 nt, Human
cucccccaacccacaccccu

SEQ ID NO: 986007 - RNA, 25 nt, Human
cucuuccaugcagucaagacuucag

SEQ ID NO: 986008 - RNA, 18 nt, Human
cugcagagcuuggcugca

SEQ ID NO: 986009 - RNA, 24 nt, Human
cuguacauugucccccagugaccu

SEQ ID NO: 986010 - RNA, 22 nt, Human
cuuccccaucccucccucaguc

SEQ ID NO: 986011 - RNA, 20 nt, Human
cuugaaguuaaacacgcagc

SEQ ID NO: 986012 - RNA, 20 nt, Human
gaaagcaacuauuuccaagc

SEQ ID NO: 986013 - RNA, 18 nt, Human
gaacaugaagugaaaaag

SEQ ID NO: 986014 - RNA, 21 nt, Human
gaacuguggcuacacuucccc

SEQ ID NO: 986015 - RNA, 21 nt, Human
gagcuuggcugcacccuuuac

SEQ ID NO: 986016 - RNA, 22 nt, Human
gagcuuucuggaggaaccuggg

SEQ ID NO: 986017 - RNA, 20 nt, Human
gaguuuguuaauucauccuc

SEQ ID NO: 986018 - RNA, 23 nt, Human
gcaaaacagaaauaaauauccuu

SEQ ID NO: 986019 - RNA, 18 nt, Human
gcaaagaguaccagaggc

SEQ ID NO: 986020 - RNA, 22 nt, Human
gcaaguuuuuuaagugguagcu

SEQ ID NO: 986021 - RNA, 23 nt, Human
gccacuguauucauauggaaagu

SEQ ID NO: 986022 - RNA, 25 nt, Human
ggaaagccucaucccuuuaacccuc

SEQ ID NO: 986023 - RNA, 22 nt, Human
ggacugggaagacuugaaguua

SEQ ID NO: 986024 - RNA, 19 nt, Human
ggcuauuucaauaaccauc

SEQ ID NO: 986025 - RNA, 20 nt, Human
guaguggcaaaguaaaaugc

SEQ ID NO: 986026 - RNA, 22 nt, Human
gugagcuugaguuucacaaguc

SEQ ID NO: 986027 - RNA, 23 nt, Human
uaaaaugccagcacugaagaugg

SEQ ID NO: 986028 - RNA, 22 nt, Human
uaaacuaggggucacaaaguca

SEQ ID NO: 986029 - RNA, 18 nt, Human
uaagaaguagcccgguac

SEQ ID NO: 986030 - RNA, 19 nt, Human
uaaguccuugcacuugacu

SEQ ID NO: 986031 - RNA, 18 nt, Human
uaccacuagaacaaacaa

SEQ ID NO: 986032 - RNA, 24 nt, Human
uaccagaggccacugaacacaucu

SEQ ID NO: 986033 - RNA, 19 nt, Human
ucagagucaauaugucuuc

SEQ ID NO: 986034 - RNA, 21 nt, Human
ucaguguccuggacaagauuc

SEQ ID NO: 986035 - RNA, 21 nt, Human
ucccagacucacacaauucuc

SEQ ID NO: 986036 - RNA, 25 nt, Human
ucccccaacccacaccccuguuuau

SEQ ID NO: 986037 - RNA, 24 nt, Human
ucccccagugaccugccacagaga

SEQ ID NO: 986038 - RNA, 18 nt, Human
uccccuccauugucagac

SEQ ID NO: 986039 - RNA, 20 nt, Human
ucgagccuuucauuauugac

SEQ ID NO: 986040 - RNA, 19 nt, Human
ucuauugcugaccuucauc

SEQ ID NO: 986041 - RNA, 20 nt, Human
ucucccuguacagaaaaaaa

SEQ ID NO: 986042 - RNA, 19 nt, Human
ucugcagagcuuggcugca

SEQ ID NO: 986043 - RNA, 19 nt, Human
ugaagaaaaacauauuugg

SEQ ID NO: 986044 - RNA, 22 nt, Human
ugaauagagcaaaacagaaaua

SEQ ID NO: 986045 - RNA, 18 nt, Human
ugcagauaccaguugugg

SEQ ID NO: 986046 - RNA, 18 nt, Human
ugcuugcauuucauuuga

SEQ ID NO: 986047 - RNA, 23 nt, Human
uggaaagccuaggagacauagga

SEQ ID NO: 986048 - RNA, 20 nt, Human
uggacucuguuucaaaagcu

SEQ ID NO: 986049 - RNA, 23 nt, Human
uggcaauauuugcagauaccagu

SEQ ID NO: 986050 - RNA, 19 nt, Human
uggugagcuugaguuucac

SEQ ID NO: 986051 - RNA, 21 nt, Human
ugucccgaagcuaucauagga

SEQ ID NO: 986052 - RNA, 19 nt, Human
uguccuaagcuccuccccc

SEQ ID NO: 986053 - RNA, 23 nt, Human
ugugaacagauuugcuaaacaaa

SEQ ID NO: 986054 - RNA, 24 nt, Human
uuaauucauccucccaacagaaag

SEQ ID NO: 986055 - RNA, 19 nt, Human
uuaccacuagaacaaacaa

SEQ ID NO: 986056 - RNA, 21 nt, Human
uuaccacuagaacaaacaaaa

SEQ ID NO: 986057 - RNA, 23 nt, Human
uucaaagcuggacuucaggaaac

SEQ ID NO: 986058 - RNA, 22 nt, Human
uugacagcugaagugggucccc

SEQ ID NO: 986059 - RNA, 21 nt, Human
uuguccuaagcuccuccccca

SEQ ID NO: 986060 - RNA, 21 nt, Human
uuucaauaaccaucauucauu

SEQ ID NO: 986061 - RNA, 22 nt, Human
uuuccugggaccucaaacacca

SEQ ID NO: 986062 - RNA, 23 nt, Human
aaaccagcagcaucacagcuuga

SEQ ID NO: 986063 - RNA, 20 nt, Human
aagcggaaaugaaaggccgc

SEQ ID NO: 986064 - RNA, 23 nt, Human
accagcagcaucacagcuugagc

SEQ ID NO: 986065 - RNA, 23 nt, Human
acccccuuguccuccccaccccc

SEQ ID NO: 986066 - RNA, 18 nt, Human
agccccuuacccaccccc

SEQ ID NO: 986067 - RNA, 25 nt, Human
cacagcuugagccccuuacccaccc

SEQ ID NO: 986068 - RNA, 21 nt, Human
cacccccuuguccuccccacc

SEQ ID NO: 986069 - RNA, 28 nt, Human
cacccccuuguccuccccaccccccacu

SEQ ID NO: 986070 - RNA, 19 nt, Human
cacuagagauaaaaccagc

SEQ ID NO: 986071 - RNA, 22 nt, Human
cacuagagauaaaaccagcagc

SEQ ID NO: 986072 - RNA, 21 nt, Human
ccacccccuuguccuccccac

SEQ ID NO: 986073 - RNA, 23 nt, Human
ccccuuguccuccccacccccca

SEQ ID NO: 986074 - RNA, 22 nt, Human
ccgcugcgcucgcgcgcggccc

SEQ ID NO: 986075 - RNA, 20 nt, Human
ccucccaccgcugcgcucgc

SEQ ID NO: 986076 - RNA, 19 nt, Human
ccuccccaccccccacucu

SEQ ID NO: 986077 - RNA, 21 nt, Human
ccuccccaccccccacucuuc

SEQ ID NO: 986078 - RNA, 24 nt, Human
ccuuacccacccccuuguccuccc

SEQ ID NO: 986079 - RNA, 20 nt, Human
ccuuguccuccccacccccc

SEQ ID NO: 986080 - RNA, 18 nt, Human
cgcgcggcccgcaccgga

SEQ ID NO: 986081 - RNA, 20 nt, Human
cucgaagcuuccgcucaugc

SEQ ID NO: 986082 - RNA, 19 nt, Human
gcucgcgcgcggcccgcac

SEQ ID NO: 986083 - RNA, 18 nt, Human
uccuccccaccccccacu

SEQ ID NO: 986084 - RNA, 23 nt, Human
uccuccccaccccccacucuucu

SEQ ID NO: 986085 - RNA, 21 nt, Human
ugagccccuuacccacccccu

SEQ ID NO: 986086 - RNA, 19 nt, Human
ugccucgaagcuuccgcuc

SEQ ID NO: 986087 - RNA, 22 nt, Human
uggugaggccaagccuggggcc

SEQ ID NO: 986088 - RNA, 24 nt, Human
aaaauaccuggcaagugaauaguu

SEQ ID NO: 986089 - RNA, 19 nt, Human
aaagugcugggauuacagg

SEQ ID NO: 986090 - RNA, 24 nt, Human
aaagugcugggauuacaggccuga

SEQ ID NO: 986091 - RNA, 19 nt, Human
aagugcugggauuacaggc

SEQ ID NO: 986092 - RNA, 19 nt, Human
aagugcugggauuacaggc

SEQ ID NO: 986093 - RNA, 26 nt, Human
aagugcugggauuacaggccugagcc

SEQ ID NO: 986094 - RNA, 19 nt, Human
aauugugugaugcuuauau

SEQ ID NO: 986095 - RNA, 22 nt, Human
acaggguuucacuauguuggca

SEQ ID NO: 986096 - RNA, 23 nt, Human
acaggguuucacuauguuggcaa

SEQ ID NO: 986097 - RNA, 24 nt, Human
acaggguuucacuauguuggcaag

SEQ ID NO: 986098 - RNA, 19 nt, Human
acccaggcuggagugcagu

SEQ ID NO: 986099 - RNA, 24 nt, Human
acuauguuggcaaggcuggucucg

SEQ ID NO: 986100 - RNA, 18 nt, Human
acucuaucacccaggcug

SEQ ID NO: 986101 - RNA, 25 nt, Human
acucuaucacccaggcuggagugca

SEQ ID NO: 986102 - RNA, 19 nt, Human
agcacugguugccuuugac

SEQ ID NO: 986103 - RNA, 25 nt, Human
aggcuggagugcaguggcgcgaucu

SEQ ID NO: 986104 - RNA, 21 nt, Human
agugcaguggcgcgaucucag

SEQ ID NO: 986105 - RNA, 23 nt, Human
agugcaguggcgcgaucucagcu

SEQ ID NO: 986106 - RNA, 24 nt, Human
agugcaguggcgcgaucucagcuc

SEQ ID NO: 986107 - RNA, 18 nt, Human
aucucacucuaucaccca

SEQ ID NO: 986108 - RNA, 24 nt, Human
caaagugcugggauuacaggccug

SEQ ID NO: 986109 - RNA, 20 nt, Human
caacuugaaaaaagaauaau

SEQ ID NO: 986110 - RNA, 24 nt, Human
caccaugcccggcuaauuuuugua

SEQ ID NO: 986111 - RNA, 24 nt, Human
cacccaggcuggagugcaguggcg

SEQ ID NO: 986112 - RNA, 24 nt, Human
caccucggccucccaaagugcugg

SEQ ID NO: 986113 - RNA, 19 nt, Human
cacgcauggccugcacagu

SEQ ID NO: 986114 - RNA, 24 nt, Human
cacuauguuggcaaggcuggucuc

SEQ ID NO: 986115 - RNA, 23 nt, Human
cacucuaucacccaggcuggagu

SEQ ID NO: 986116 - RNA, 24 nt, Human
cacucuaucacccaggcuggagug

SEQ ID NO: 986117 - RNA, 18 nt, Human
cagagaccgcagcgagca

SEQ ID NO: 986118 - RNA, 19 nt, Human
caggguuucacuauguugg

SEQ ID NO: 986119 - RNA, 24 nt, Human
caggguuucacuauguuggcaagg

SEQ ID NO: 986120 - RNA, 19 nt, Human
caggugccugccaccaugc

SEQ ID NO: 986121 - RNA, 23 nt, Human
caggugccugccaccaugcccgg

SEQ ID NO: 986122 - RNA, 19 nt, Human
ccaaagugcugggauuaca

SEQ ID NO: 986123 - RNA, 22 nt, Human
ccaaagugcugggauuacaggc

SEQ ID NO: 986124 - RNA, 24 nt, Human
ccaaagugcugggauuacaggccu

SEQ ID NO: 986125 - RNA, 19 nt, Human
ccccagagaccgcagcgag

SEQ ID NO: 986126 - RNA, 23 nt, Human
ccccagagaccgcagcgagcacu

SEQ ID NO: 986127 - RNA, 21 nt, Human
ccgccgccgcggucccgaucc

SEQ ID NO: 986128 - RNA, 19 nt, Human
ccucugccuccuggguuca

SEQ ID NO: 986129 - RNA, 19 nt, Human
cgcagcgagcacugguugc

SEQ ID NO: 986130 - RNA, 22 nt, Human
cuaguaccugggauuacaggug

SEQ ID NO: 986131 - RNA, 20 nt, Human
cucacucuaucacccaggcc

SEQ ID NO: 986132 - RNA, 18 nt, Human
cuccuggguucaaaagcc

SEQ ID NO: 986133 - RNA, 21 nt, Human
cuccuggguucaaaagccucc

SEQ ID NO: 986134 - RNA, 24 nt, Human
cucgcugcaaccucugccuccugg

SEQ ID NO: 986135 - RNA, 21 nt, Human
cugcaaccucugccuccuggg

SEQ ID NO: 986136 - RNA, 23 nt, Human
cugcaaccucugccuccuggguu

SEQ ID NO: 986137 - RNA, 24 nt, Human
cugcaaccucugccuccuggguuc

SEQ ID NO: 986138 - RNA, 24 nt, Human
gaccuccggugaucugcccaccuc

SEQ ID NO: 986139 - RNA, 21 nt, Human
gaggcaaguuucaacuugaaa

SEQ ID NO: 986140 - RNA, 18 nt, Human
gauuacaggccugagcca

SEQ ID NO: 986141 - RNA, 21 nt, Human
gauuacaggccugagccacca

SEQ ID NO: 986142 - RNA, 18 nt, Human
gauuacaggugccugcca

SEQ ID NO: 986143 - RNA, 24 nt, Human
gauuacaggugccugccaccaugc

SEQ ID NO: 986144 - RNA, 18 nt, Human
gauucaguaauugucaac

SEQ ID NO: 986145 - RNA, 22 nt, Human
gcccggcuaauuuuuguauuuu

SEQ ID NO: 986146 - RNA, 19 nt, Human
gcuggagugcaguggcgcg

SEQ ID NO: 986147 - RNA, 21 nt, Human
gcugggauuacaggccugagc

SEQ ID NO: 986148 - RNA, 23 nt, Human
gcuggucucgaacuccugaccuc

SEQ ID NO: 986149 - RNA, 19 nt, Human
ggauuacaggccugagcca

SEQ ID NO: 986150 - RNA, 24 nt, Human
ggcuggucucgaacuccugaccuc

SEQ ID NO: 986151 - RNA, 19 nt, Human
ggucucgaacuccugaccu

SEQ ID NO: 986152 - RNA, 21 nt, Human
guacagauauuuagaaaacca

SEQ ID NO: 986153 - RNA, 22 nt, Human
guagguacuuuaacacccucau

SEQ ID NO: 986154 - RNA, 24 nt, Human
gugaucugcccaccucggccuccc

SEQ ID NO: 986155 - RNA, 22 nt, Human
uaaagacaggguuucacuaugu

SEQ ID NO: 986156 - RNA, 28 nt, Human
uaaguagguacuuuaacacuguaaugac

SEQ ID NO: 986157 - RNA, 24 nt, Human
uaauuuuuguauuuuuaguaaaga

SEQ ID NO: 986158 - RNA, 19 nt, Human
uagaagaggcaaguuucaa

SEQ ID NO: 986159 - RNA, 24 nt, Human
uaguaaagacaggguuucacuaug

SEQ ID NO: 986160 - RNA, 20 nt, Human
uaguaccugggauuacaggu

SEQ ID NO: 986161 - RNA, 26 nt, Human
uaguaccugggauuacaggugccugc

SEQ ID NO: 986162 - RNA, 19 nt, Human
uauuuuaucuuuuggcuuu

SEQ ID NO: 986163 - RNA, 21 nt, Human
uauuuuaucuuuuggcuuuca

SEQ ID NO: 986164 - RNA, 23 nt, Human
ucaaaagccucccuaguaccugg

SEQ ID NO: 986165 - RNA, 22 nt, Human
ucaacuugaaaaaagaauaauu

SEQ ID NO: 986166 - RNA, 22 nt, Human
ucacccaggcuggagugcagug

SEQ ID NO: 986167 - RNA, 18 nt, Human
ucacuauguuggcaaggc

SEQ ID NO: 986168 - RNA, 22 nt, Human
ucacuauguuggcaaggcuggu

SEQ ID NO: 986169 - RNA, 24 nt, Human
ucacucuaucacccaggcuggagu

SEQ ID NO: 986170 - RNA, 24 nt, Human
uccacucugcgcgacucccaggga

SEQ ID NO: 986171 - RNA, 24 nt, Human
ucccaaagugcugggauuacaggc

SEQ ID NO: 986172 - RNA, 18 nt, Human
ucccgauccccagagacc

SEQ ID NO: 986173 - RNA, 24 nt, Human
ucccuaguaccugggauuacaggu

SEQ ID NO: 986174 - RNA, 25 nt, Human
ucccuaguaccugggauuacaggug

SEQ ID NO: 986175 - RNA, 24 nt, Human
ucgcugcaaccucugccuccuggg

SEQ ID NO: 986176 - RNA, 25 nt, Human
ucgcugcaaccucugccuccugggu

SEQ ID NO: 986177 - RNA, 18 nt, Human
ucggccucccaaagugcu

SEQ ID NO: 986178 - RNA, 24 nt, Human
ucuaucacccaggcuggagugcag

SEQ ID NO: 986179 - RNA, 23 nt, Human
ucucacucuaucacccaggcugg

SEQ ID NO: 986180 - RNA, 24 nt, Human
ucucacucuaucacccaggcugga

SEQ ID NO: 986181 - RNA, 26 nt, Human
ucucacucuaucacccaggcuggagu

SEQ ID NO: 986182 - RNA, 27 nt, Human
ucucacucuaucacccaggcuggagug

SEQ ID NO: 986183 - RNA, 21 nt, Human
ugaaaaaagaauaauuuugaa

SEQ ID NO: 986184 - RNA, 22 nt, Human
ugaccucauggaaaacagaacu

SEQ ID NO: 986185 - RNA, 20 nt, Human
ugaccuccggugaucugccc

SEQ ID NO: 986186 - RNA, 24 nt, Human
ugaucugcccaccucggccuccca

SEQ ID NO: 986187 - RNA, 22 nt, Human
ugcaguggcgcgaucucagcuc

SEQ ID NO: 986188 - RNA, 24 nt, Human
ugcccggcuaauuuuuguauuuuu

SEQ ID NO: 986189 - RNA, 25 nt, Human
ugccuccuggguucaaaagccuccc

SEQ ID NO: 986190 - RNA, 23 nt, Human
uggagugcaguggcgcgaucuca

SEQ ID NO: 986191 - RNA, 24 nt, Human
uggagugcaguggcgcgaucucag

SEQ ID NO: 986192 - RNA, 24 nt, Human
uggcaaggcuggucucgaacuccu

SEQ ID NO: 986193 - RNA, 24 nt, Human
uggcgcgaucucagcucgcugcaa

SEQ ID NO: 986194 - RNA, 18 nt, Human
ugggauuacaggccugag

SEQ ID NO: 986195 - RNA, 19 nt, Human
ugggauuacaggccugagc

SEQ ID NO: 986196 - RNA, 21 nt, Human
ugggauuacaggccugagcca

SEQ ID NO: 986197 - RNA, 22 nt, Human
ugggauuacaggccugagccac

SEQ ID NO: 986198 - RNA, 24 nt, Human
ugggauuacaggccugagccacca

SEQ ID NO: 986199 - RNA, 21 nt, Human
ugggauuacaggugccugcca

SEQ ID NO: 986200 - RNA, 22 nt, Human
ugggauuacaggugccugccac

SEQ ID NO: 986201 - RNA, 24 nt, Human
ugggauuacaggugccugccacca

SEQ ID NO: 986202 - RNA, 25 nt, Human
ugggauuacaggugccugccaccau

SEQ ID NO: 986203 - RNA, 23 nt, Human
uuaaaauggaauguggaguacag

SEQ ID NO: 986204 - RNA, 21 nt, Human
uuaguaaagacaggguuucac

SEQ ID NO: 986205 - RNA, 24 nt, Human
uuaguaaagacaggguuucacuau

SEQ ID NO: 986206 - RNA, 21 nt, Human
uuucacuauguuggcaaggcu

SEQ ID NO: 986207 - RNA, 24 nt, Human
uuuuuaguaaagacaggguuucac

SEQ ID NO: 986208 - RNA, 20 nt, Human
uuuuuguauuuuuaguaaag

SEQ ID NO: 986209 - RNA, 23 nt, Human
uuuuuguauuuuuaguaaagaca

SEQ ID NO: 986210 - RNA, 26 nt, Human
uuuuuuuuuuuugagacugaaucuca

SEQ ID NO: 986211 - RNA, 18 nt, Human
uuuuuuuuuuuuuuuuug

SEQ ID NO: 986212 - RNA, 21 nt, Human
ccaauucaauuaguucucuua

SEQ ID NO: 986213 - RNA, 20 nt, Human
gccuaaacaguccuaugaag

SEQ ID NO: 986214 - RNA, 25 nt, Human
gcuuuuccacccccacccccagauu

SEQ ID NO: 986215 - RNA, 26 nt, Human
uaaauaccaaaacguucaaacagagg

SEQ ID NO: 986216 - RNA, 19 nt, Human
uaccaaaacguucaaacag

SEQ ID NO: 986217 - RNA, 24 nt, Human
ucgcaguugcuuuuccacccccac

SEQ ID NO: 986218 - RNA, 22 nt, Human
ugcccaaugaaaacuugcucug

SEQ ID NO: 986219 - RNA, 22 nt, Human
ugcuuuuccacccccaccccca

SEQ ID NO: 986220 - RNA, 20 nt, Human
uguccggagguauuucaagg

SEQ ID NO: 986221 - RNA, 21 nt, Human
uuagguaaaaugauuucucuc

SEQ ID NO: 986222 - RNA, 23 nt, Human
uucaaggaugcugccaauucaau

SEQ ID NO: 986223 - RNA, 21 nt, Human
uuccacccccacccccagauc

SEQ ID NO: 986224 - RNA, 20 nt, Human
uuuuuuuuuuuuuuugugca

SEQ ID NO: 986225 - RNA, 19 nt, Human
uuuuuuuuuuuuuuuuugu

SEQ ID NO: 986226 - RNA, 20 nt, Human
uuuuuuuuuuuuuuuuuugg

SEQ ID NO: 986227 - RNA, 18 nt, Human
aaacauccaucaaacacc

SEQ ID NO: 986228 - RNA, 20 nt, Human
aacacucguggcacaaaaga

SEQ ID NO: 986229 - RNA, 22 nt, Human
aagagcagaauuaaauguaaua

SEQ ID NO: 986230 - RNA, 21 nt, Human
aaguuucuggcacucuugucu

SEQ ID NO: 986231 - RNA, 24 nt, Human
aauugcuuuucuacauaaccccau

SEQ ID NO: 986232 - RNA, 22 nt, Human
accccaugcugauggguuuuau

SEQ ID NO: 986233 - RNA, 18 nt, Human
agacaggaggcucaucuu

SEQ ID NO: 986234 - RNA, 19 nt, Human
aggaguuaguccuugacca

SEQ ID NO: 986235 - RNA, 23 nt, Human
agugcauaugugaggguuguugc

SEQ ID NO: 986236 - RNA, 18 nt, Human
agugcccaucccucuggc

SEQ ID NO: 986237 - RNA, 27 nt, Human
agugucaaaggcagugugguagagaga

SEQ ID NO: 986238 - RNA, 23 nt, Human
auaaaacauccaucaaacaccag

SEQ ID NO: 986239 - RNA, 22 nt, Human
aucaagagcagaauuaaaugua

SEQ ID NO: 986240 - RNA, 21 nt, Human
auguaauggaaauuggcuauc

SEQ ID NO: 986241 - RNA, 19 nt, Human
cacaugugccccucaaaaa

SEQ ID NO: 986242 - RNA, 20 nt, Human
cacucuugucugguuggaag

SEQ ID NO: 986243 - RNA, 21 nt, Human
cagcugcuccuucugcuucug

SEQ ID NO: 986244 - RNA, 24 nt, Human
cagggaaagugaaagacauaaaac

SEQ ID NO: 986245 - RNA, 22 nt, Human
caugagguaagaucuuugggaa

SEQ ID NO: 986246 - RNA, 20 nt, Human
ccacagguagacugucaagu

SEQ ID NO: 986247 - RNA, 20 nt, Human
cccggagcugggccaguucc

SEQ ID NO: 986248 - RNA, 18 nt, Human
ccugacaguuauaccaca

SEQ ID NO: 986249 - RNA, 21 nt, Human
ccugacaguuauaccacaggu

SEQ ID NO: 986250 - RNA, 18 nt, Human
cugcuccuucugcuucug

SEQ ID NO: 986251 - RNA, 22 nt, Human
cugucaaguugggaagagugaa

SEQ ID NO: 986252 - RNA, 18 nt, Human
cuuuuuuuuuuuaggagu

SEQ ID NO: 986253 - RNA, 19 nt, Human
gaccuguuucaccagcagg

SEQ ID NO: 986254 - RNA, 18 nt, Human
gaguugcuuuuuuuuuuu

SEQ ID NO: 986255 - RNA, 21 nt, Human
gccaguuccucugagagcugg

SEQ ID NO: 986256 - RNA, 25 nt, Human
gcuuaguuuuuuguuguuguuguuu

SEQ ID NO: 986257 - RNA, 20 nt, Human
ggaagagugaaucaauaacu

SEQ ID NO: 986258 - RNA, 24 nt, Human
gggccuuuacuuagguuagaaaua

SEQ ID NO: 986259 - RNA, 22 nt, Human
gucgccggcuuuccuggagaaa

SEQ ID NO: 986260 - RNA, 24 nt, Human
guguaagugcuuaaaauggaauaa

SEQ ID NO: 986261 - RNA, 21 nt, Human
uaaaacauccaucaaacacca

SEQ ID NO: 986262 - RNA, 20 nt, Human
uaaaauggaauaaauugcuu

SEQ ID NO: 986263 - RNA, 20 nt, Human
uaacacucguggcacaaaag

SEQ ID NO: 986264 - RNA, 31 nt, Human
uaaccagauaaaauuccuguuuuuucccaag

SEQ ID NO: 986265 - RNA, 18 nt, Human
uaaggcaagauuuaaauu

SEQ ID NO: 986266 - RNA, 18 nt, Human
uaaggcaagauuuaaauu

SEQ ID NO: 986267 - RNA, 19 nt, Human
uaaggcaagauuuaaauuu

SEQ ID NO: 986268 - RNA, 21 nt, Human
uagaagaguccuucagaugac

SEQ ID NO: 986269 - RNA, 21 nt, Human
uagaaucuuuuuaagcagguc

SEQ ID NO: 986270 - RNA, 24 nt, Human
uauaugggucagcauauccuugaa

SEQ ID NO: 986271 - RNA, 20 nt, Human
ucaagucuaguuguuuuaga

SEQ ID NO: 986272 - RNA, 22 nt, Human
ucagagguuuuauuuccccagu

SEQ ID NO: 986273 - RNA, 18 nt, Human
ucagccaguauuugcaac

SEQ ID NO: 986274 - RNA, 21 nt, Human
ucaguaucaacagcagaugaa

SEQ ID NO: 986275 - RNA, 19 nt, Human
uccccaguauguuuuucac

SEQ ID NO: 986276 - RNA, 19 nt, Human
uccuggagaaagugcccau

SEQ ID NO: 986277 - RNA, 19 nt, Human
ucugauaggcaucccggag

SEQ ID NO: 986278 - RNA, 21 nt, Human
ucugcuucugauaggcauccc

SEQ ID NO: 986279 - RNA, 24 nt, Human
ugaaagacauaaaacacugaauca

SEQ ID NO: 986280 - RNA, 19 nt, Human
ugaaauagaauccagcaaa

SEQ ID NO: 986281 - RNA, 24 nt, Human
ugaaauagaauccagcaaagaguu

SEQ ID NO: 986282 - RNA, 24 nt, Human
ugaguagaucauucugacccagaa

SEQ ID NO: 986283 - RNA, 21 nt, Human
ugauaagaguugcuuggacgc

SEQ ID NO: 986284 - RNA, 23 nt, Human
ugauaagaguugcuuuggacguc

SEQ ID NO: 986285 - RNA, 21 nt, Human
ugauccuuugcuaagaaguuu

SEQ ID NO: 986286 - RNA, 19 nt, Human
ugccuccggccaacucuag

SEQ ID NO: 986287 - RNA, 21 nt, Human
uggaagaguacauccaaaggg

SEQ ID NO: 986288 - RNA, 19 nt, Human
uggcuucuagaagaguccu

SEQ ID NO: 986289 - RNA, 22 nt, Human
uggcuucuagaagaguccuuca

SEQ ID NO: 986290 - RNA, 23 nt, Human
uggcuucuagaagaguccuucag

SEQ ID NO: 986291 - RNA, 19 nt, Human
ugggaaaaucugaauagcg

SEQ ID NO: 986292 - RNA, 21 nt, Human
ugggcagagagucgccggcuu

SEQ ID NO: 986293 - RNA, 22 nt, Human
uguaaacccauguaauggaaau

SEQ ID NO: 986294 - RNA, 22 nt, Human
uguucugccuccggccaacucu

SEQ ID NO: 986295 - RNA, 23 nt, Human
uguuguccauggucuuugacuau

SEQ ID NO: 986296 - RNA, 22 nt, Human
uuaaauuuggaaaaggugcuug

SEQ ID NO: 986297 - RNA, 20 nt, Human
uucaugagguaagaucuuug

SEQ ID NO: 986298 - RNA, 22 nt, Human
uucugccuccggccaacucuag

SEQ ID NO: 986299 - RNA, 19 nt, Human
uugaaggccucuaucacca

SEQ ID NO: 986300 - RNA, 22 nt, Human
uuuuuuuuuuaacuugggacca

SEQ ID NO: 986301 - RNA, 25 nt, Human
uuuuuuuuuuuuuuuuuaacuuggg

SEQ ID NO: 986302 - RNA, 20 nt, Human
aaaccuucuuguugucuguu

SEQ ID NO: 986303 - RNA, 21 nt, Human
aagcugccacaccgagggcuc

SEQ ID NO: 986304 - RNA, 21 nt, Human
aagcugccacaccgagggcuu

SEQ ID NO: 986305 - RNA, 22 nt, Human
aaggaaaacaagguaaaaagga

SEQ ID NO: 986306 - RNA, 20 nt, Human
aauuacagccaucuaauucc

SEQ ID NO: 986307 - RNA, 20 nt, Human
aucuaauuccucucccagca

SEQ ID NO: 986308 - RNA, 20 nt, Human
caccaugggaaagcugccca

SEQ ID NO: 986309 - RNA, 21 nt, Human
ccaaaaugaaagaacauuaga

SEQ ID NO: 986310 - RNA, 18 nt, Human
ccaaaggaaaacaaggua

SEQ ID NO: 986311 - RNA, 21 nt, Human
ccaccucugaagccauaauuu

SEQ ID NO: 986312 - RNA, 23 nt, Human
ccagcaccuugauggucaccaaa

SEQ ID NO: 986313 - RNA, 21 nt, Human
cuaauuccucucccagcaccu

SEQ ID NO: 986314 - RNA, 21 nt, Human
gagcagcaccaugggaaagcu

SEQ ID NO: 986315 - RNA, 18 nt, Human
ggaaaacaagguaaaaag

SEQ ID NO: 986316 - RNA, 20 nt, Human
ggaaaacaagguaaaaaggg

SEQ ID NO: 986317 - RNA, 22 nt, Human
uaaaacaucaugccccaaagga

SEQ ID NO: 986318 - RNA, 21 nt, Human
uaaagcugccacaccgagggc

SEQ ID NO: 986319 - RNA, 22 nt, Human
uaacuuugaauuacagccaucu

SEQ ID NO: 986320 - RNA, 19 nt, Human
uaauuccucucccagcacc

SEQ ID NO: 986321 - RNA, 25 nt, Human
ucccccgucacuguuuaucuuccac

SEQ ID NO: 986322 - RNA, 25 nt, Human
uccuuggcugugcacagaaugggcc

SEQ ID NO: 986323 - RNA, 25 nt, Human
ucuaaagcaaagguuaaaacaucau

SEQ ID NO: 986324 - RNA, 20 nt, Human
ucuuccaaaccuucuuguug

SEQ ID NO: 986325 - RNA, 24 nt, Human
ugaaagaacauuagaguacagaaa

SEQ ID NO: 986326 - RNA, 19 nt, Human
ugacauggugcuugggagg

SEQ ID NO: 986327 - RNA, 19 nt, Human
ugggaaagcugcccagaug

SEQ ID NO: 986328 - RNA, 24 nt, Human
ugguuggagcagcaccaugggaaa

SEQ ID NO: 986329 - RNA, 24 nt, Human
uguuuguucccccgucacuguuua

SEQ ID NO: 986330 - RNA, 23 nt, Human
uucagagucucaaaccagauuuc

SEQ ID NO: 986331 - RNA, 18 nt, Human
uucuccagguuucccgag

SEQ ID NO: 986332 - RNA, 22 nt, Human
uuggagcagcaccaugggaaag

SEQ ID NO: 986333 - RNA, 18 nt, Human
uuggagguccuuacucaa

SEQ ID NO: 986334 - RNA, 20 nt, Human
uuugcacacaugugaucugg

SEQ ID NO: 986335 - RNA, 20 nt, Human
aaaaacaucccuaucaaguc

SEQ ID NO: 986336 - RNA, 18 nt, Human
aaacaucccuaucaaguc

SEQ ID NO: 986337 - RNA, 23 nt, Human
aacaaaccagaauucacaaagug

SEQ ID NO: 986338 - RNA, 21 nt, Human
aacacaaucugaaagcugccc

SEQ ID NO: 986339 - RNA, 18 nt, Human
aaccccccgcccccaccc

SEQ ID NO: 986340 - RNA, 19 nt, Human
aaccccccgcccccacccc

SEQ ID NO: 986341 - RNA, 22 nt, Human
acacuaagucacucagauuggu

SEQ ID NO: 986342 - RNA, 22 nt, Human
accacugcucauugaccauacc

SEQ ID NO: 986343 - RNA, 23 nt, Human
accccccgcccccacccccgccg

SEQ ID NO: 986344 - RNA, 22 nt, Human
acugacauuuccagagaucccu

SEQ ID NO: 986345 - RNA, 26 nt, Human
agcccagaagaagucugcacaggucc

SEQ ID NO: 986346 - RNA, 20 nt, Human
agcugauuggaguaaaacug

SEQ ID NO: 986347 - RNA, 18 nt, Human
aggaacacaaucugaaag

SEQ ID NO: 986348 - RNA, 18 nt, Human
aggcaggugguguagcac

SEQ ID NO: 986349 - RNA, 23 nt, Human
agucaaaagcuccagcuaaaauc

SEQ ID NO: 986350 - RNA, 19 nt, Human
caaacaaaccagaauucac

SEQ ID NO: 986351 - RNA, 21 nt, Human
caaccccccgcccccaccccc

SEQ ID NO: 986352 - RNA, 24 nt, Human
caaccccccgcccccacccccgcc

SEQ ID NO: 986353 - RNA, 22 nt, Human
caagucgguaguuuggcauuua

SEQ ID NO: 986354 - RNA, 21 nt, Human
cauguccaucucaguugaaga

SEQ ID NO: 986355 - RNA, 26 nt, Human
cauuagucaaaagcuccagcuaaaau

SEQ ID NO: 986356 - RNA, 22 nt, Human
ccaaacaguuaaaacccaaagc

SEQ ID NO: 986357 - RNA, 21 nt, Human
ccacacagguucccugcuccu

SEQ ID NO: 986358 - RNA, 27 nt, Human
ccagagaucccuaaacuaaucaacuag

SEQ ID NO: 986359 - RNA, 23 nt, Human
cccacccccgccguggccaaaca

SEQ ID NO: 986360 - RNA, 22 nt, Human
ccccacccccgccguggccaaa

SEQ ID NO: 986361 - RNA, 20 nt, Human
ccccccgcccccacccccgc

SEQ ID NO: 986362 - RNA, 21 nt, Human
ccccccgcccccacccccgcc

SEQ ID NO: 986363 - RNA, 24 nt, Human
ccccccgcccccacccccgccgug

SEQ ID NO: 986364 - RNA, 26 nt, Human
ccccccgcccccacccccgccguggc

SEQ ID NO: 986365 - RNA, 20 nt, Human
cccccgcccccacccccgcc

SEQ ID NO: 986366 - RNA, 18 nt, Human
cccggggcaccugccaca

SEQ ID NO: 986367 - RNA, 23 nt, Human
cccgugcuggguaagcccagaag

SEQ ID NO: 986368 - RNA, 23 nt, Human
cccugcuccuggggaggaacaca

SEQ ID NO: 986369 - RNA, 19 nt, Human
cccugggcuccagggagcc

SEQ ID NO: 986370 - RNA, 20 nt, Human
cccugggcuccagggagccc

SEQ ID NO: 986371 - RNA, 21 nt, Human
ccguggccaaacaguuaaaac

SEQ ID NO: 986372 - RNA, 22 nt, Human
cgcccggccgaggggcaagggc

SEQ ID NO: 986373 - RNA, 28 nt, Human
cucauugaccauaccuacauuauaauaa

SEQ ID NO: 986374 - RNA, 23 nt, Human
cugaaagcugcccugggcuccag

SEQ ID NO: 986375 - RNA, 19 nt, Human
cugcacaggucccgggacc

SEQ ID NO: 986376 - RNA, 20 nt, Human
cuggguaagcccagaagaag

SEQ ID NO: 986377 - RNA, 18 nt, Human
gccccgcuugccuggcuc

SEQ ID NO: 986378 - RNA, 20 nt, Human
gcccugggcuccagggagcc

SEQ ID NO: 986379 - RNA, 19 nt, Human
ggaggaacacaaucugaaa

SEQ ID NO: 986380 - RNA, 18 nt, Human
gugcugggcacccuuggc

SEQ ID NO: 986381 - RNA, 23 nt, Human
guuuggcauuuacuuuacauuag

SEQ ID NO: 986382 - RNA, 24 nt, Human
uaaaaaauaugcacaaauaaccac

SEQ ID NO: 986383 - RNA, 19 nt, Human
uaaaacccaaagcaaagca

SEQ ID NO: 986384 - RNA, 21 nt, Human
uaaaacccaaagcaaagcauc

SEQ ID NO: 986385 - RNA, 20 nt, Human
uaaaagagcagagcuaggua

SEQ ID NO: 986386 - RNA, 19 nt, Human
uaaagcaauauaaaagagc

SEQ ID NO: 986387 - RNA, 18 nt, Human
uaacuuacaaaaacaucc

SEQ ID NO: 986388 - RNA, 24 nt, Human
uaagcccagaagaagucugcacag

SEQ ID NO: 986389 - RNA, 18 nt, Human
uacaaaaacaucccuauc

SEQ ID NO: 986390 - RNA, 22 nt, Human
uaccaaccccccgcccccaccc

SEQ ID NO: 986391 - RNA, 23 nt, Human
uaccaaccccccgcccccacccc

SEQ ID NO: 986392 - RNA, 19 nt, Human
ucaaaagcuccagcuaaaa

SEQ ID NO: 986393 - RNA, 18 nt, Human
ucaacuaguucugccaaa

SEQ ID NO: 986394 - RNA, 24 nt, Human
uccagagaucccuaaacuaaucaa

SEQ ID NO: 986395 - RNA, 24 nt, Human
uccgcccggccgaggggcaagggc

SEQ ID NO: 986396 - RNA, 23 nt, Human
ugaaagcugcccugggcuccagg

SEQ ID NO: 986397 - RNA, 18 nt, Human
ugcacaaauaaccacauc

SEQ ID NO: 986398 - RNA, 24 nt, Human
ugcacaaauaaccacauccaugca

SEQ ID NO: 986399 - RNA, 20 nt, Human
ugcccugggcuccagggagc

SEQ ID NO: 986400 - RNA, 19 nt, Human
ugcucgcuugcuucuauaa

SEQ ID NO: 986401 - RNA, 21 nt, Human
uggguaagcccagaagaaguc

SEQ ID NO: 986402 - RNA, 19 nt, Human
uuuguuuuuuaaugagaaa

SEQ ID NO: 986403 - RNA, 32 nt, Human
uuuuuuuuuuuucuggcuaauuuuguuuuuuu

SEQ ID NO: 986404 - RNA, 18 nt, Human
uuuuuuuuuuuuuuucug

SEQ ID NO: 986405 - RNA, 25 nt, Human
uuuuuuuuuuuuuuucuggcuaauu

SEQ ID NO: 986406 - RNA, 20 nt, Human
caccugagggcccgcccuuc

SEQ ID NO: 986407 - RNA, 19 nt, Human
cacugggaggugggagcca

SEQ ID NO: 986408 - RNA, 25 nt, Human
cggcaccugagaaggggccgccccc

SEQ ID NO: 986409 - RNA, 21 nt, Human
gaaucgcggucuccccuuuaa

SEQ ID NO: 986410 - RNA, 20 nt, Human
gcuucaggccagcccugggc

SEQ ID NO: 986411 - RNA, 18 nt, Human
ggaccuggaauggcagug

SEQ ID NO: 986412 - RNA, 21 nt, Human
ggaggugggagccagggugcu

SEQ ID NO: 986413 - RNA, 18 nt, Human
ggccacugggagguggga

SEQ ID NO: 986414 - RNA, 20 nt, Human
uaaggaccuggaauggcagu

SEQ ID NO: 986415 - RNA, 22 nt, Human
ucaggccagcccugggcuuggc

SEQ ID NO: 986416 - RNA, 18 nt, Human
uccuuuggggccacuggg

SEQ ID NO: 986417 - RNA, 22 nt, Human
uccuuuggggccacugggaggu

SEQ ID NO: 986418 - RNA, 23 nt, Human
uggaauggcagugcugagguuug

SEQ ID NO: 986419 - RNA, 18 nt, Human
ugggagccagggugcugg

SEQ ID NO: 986420 - RNA, 19 nt, Human
ugggagccagggugcuggg

SEQ ID NO: 986421 - RNA, 19 nt, Human
uuagaaucgcggucucccc

SEQ ID NO: 986422 - RNA, 21 nt, Human
aaaaaagacaaaaacauuuaa

SEQ ID NO: 986423 - RNA, 18 nt, Human
aaaaauuuuauucucugu

SEQ ID NO: 986424 - RNA, 20 nt, Human
aaaauaaauaaggcaauucc

SEQ ID NO: 986425 - RNA, 21 nt, Human
aaacccagaaacacuggccug

SEQ ID NO: 986426 - RNA, 18 nt, Human
aaagagguuauagggaaa

SEQ ID NO: 986427 - RNA, 20 nt, Human
aaauauauuuugguggcuga

SEQ ID NO: 986428 - RNA, 22 nt, Human
aacauauagacaagcaaaccca

SEQ ID NO: 986429 - RNA, 18 nt, Human
aacaugaacugaacagcc

SEQ ID NO: 986430 - RNA, 18 nt, Human
aaccacagaaugaaaucc

SEQ ID NO: 986431 - RNA, 18 nt, Human
aagcaacuuuggaggagc

SEQ ID NO: 986432 - RNA, 19 nt, Human
aagcuaagguuaagcuaac

SEQ ID NO: 986433 - RNA, 21 nt, Human
acaaaauaggcuacaagguca

SEQ ID NO: 986434 - RNA, 21 nt, Human
accagucugcgugaacugcac

SEQ ID NO: 986435 - RNA, 23 nt, Human
acccaucuugcucucucccccaa

SEQ ID NO: 986436 - RNA, 22 nt, Human
acgguguaugccaccggcuccc

SEQ ID NO: 986437 - RNA, 18 nt, Human
acugcagccuucaaagcu

SEQ ID NO: 986438 - RNA, 24 nt, Human
agacaaacauauagacaagcaaac

SEQ ID NO: 986439 - RNA, 25 nt, Human
agacaaacauauagacaagcaaacc

SEQ ID NO: 986440 - RNA, 19 nt, Human
agacaagcaaacccagaaa

SEQ ID NO: 986441 - RNA, 19 nt, Human
agacaagcaaacccagaaa

SEQ ID NO: 986442 - RNA, 21 nt, Human
agacaagcaaacccagaaaca

SEQ ID NO: 986443 - RNA, 24 nt, Human
agacaucccccagucacguaaggg

SEQ ID NO: 986444 - RNA, 21 nt, Human
agagaacagcaggaacaaaau

SEQ ID NO: 986445 - RNA, 19 nt, Human
agauacaacaggcgguaca

SEQ ID NO: 986446 - RNA, 23 nt, Human
agcaggaacaaaauaggcuacaa

SEQ ID NO: 986447 - RNA, 18 nt, Human
aggagcuuacuuuucccc

SEQ ID NO: 986448 - RNA, 20 nt, Human
agggaugacacuugaucacu

SEQ ID NO: 986449 - RNA, 22 nt, Human
auaaaacaaaagacaaaucucc

SEQ ID NO: 986450 - RNA, 22 nt, Human
aucagcuucuccaaggaaccca

SEQ ID NO: 986451 - RNA, 27 nt, Human
aucauauaaagcacguaaaugccacca

SEQ ID NO: 986452 - RNA, 19 nt, Human
aucugcuccaaauggauuc

SEQ ID NO: 986453 - RNA, 20 nt, Human
aucuugcucucucccccaaa

SEQ ID NO: 986454 - RNA, 21 nt, Human
augccaccggcucccucggga

SEQ ID NO: 986455 - RNA, 22 nt, Human
auguuagagaacagcaggaaca

SEQ ID NO: 986456 - RNA, 18 nt, Human
auuccagaccuuguaaca

SEQ ID NO: 986457 - RNA, 21 nt, Human
auuguccuuuuuuuuuuuuuu

SEQ ID NO: 986458 - RNA, 25 nt, Human
caaauaaaacaaaagacaaaucucc

SEQ ID NO: 986459 - RNA, 19 nt, Human
cacauagcacuuuccaucc

SEQ ID NO: 986460 - RNA, 19 nt, Human
caccaacggcauccugauc

SEQ ID NO: 986461 - RNA, 23 nt, Human
cagaaugaaaucccccaagaugg

SEQ ID NO: 986462 - RNA, 19 nt, Human
cagcaggaacaaaauaggc

SEQ ID NO: 986463 - RNA, 22 nt, Human
caggaagguucccauuccuuga

SEQ ID NO: 986464 - RNA, 19 nt, Human
caggacagcuacuaauggu

SEQ ID NO: 986465 - RNA, 18 nt, Human
caggagccuucagcuagu

SEQ ID NO: 986466 - RNA, 22 nt, Human
ccaaauccaaucuauguuguuc

SEQ ID NO: 986467 - RNA, 23 nt, Human
cccaauaaucuuugcagcuuucc

SEQ ID NO: 986468 - RNA, 18 nt, Human
cccacugcgggcgggggc

SEQ ID NO: 986469 - RNA, 21 nt, Human
cccccaaacucuguuaaggac

SEQ ID NO: 986470 - RNA, 21 nt, Human
cccccagucaacacaauucug

SEQ ID NO: 986471 - RNA, 24 nt, Human
ccccgcgcgcccgcaacuugccag

SEQ ID NO: 986472 - RNA, 21 nt, Human
cccgcgcgcccgcaacuugcc

SEQ ID NO: 986473 - RNA, 22 nt, Human
cccgcgcgcccgcaacuugcca

SEQ ID NO: 986474 - RNA, 19 nt, Human
ccgcgcgcccgcaacuugc

SEQ ID NO: 986475 - RNA, 20 nt, Human
ccggacagacgaggcugaaa

SEQ ID NO: 986476 - RNA, 21 nt, Human
cgaaacauuuaaaaaaccaca

SEQ ID NO: 986477 - RNA, 26 nt, Human
cuccaaauccaaucuauguuguucac

SEQ ID NO: 986478 - RNA, 21 nt, Human
cuccccaaaauguuauaccaa

SEQ ID NO: 986479 - RNA, 19 nt, Human
cugaucaccuaaacaccgc

SEQ ID NO: 986480 - RNA, 24 nt, Human
cuuuccaucccgaagcuccagccg

SEQ ID NO: 986481 - RNA, 18 nt, Human
gaagauggugauguaaaa

SEQ ID NO: 986482 - RNA, 20 nt, Human
gacaagcaaacccagaaaca

SEQ ID NO: 986483 - RNA, 21 nt, Human
gagaagauggugauguaaaag

SEQ ID NO: 986484 - RNA, 25 nt, Human
gcaaacccagaaacacuggccuggu

SEQ ID NO: 986485 - RNA, 23 nt, Human
gcauagcccaggcaagaugaucc

SEQ ID NO: 986486 - RNA, 23 nt, Human
gcuacuaauggucacaacgaccu

SEQ ID NO: 986487 - RNA, 18 nt, Human
ggacuaggcuugggguca

SEQ ID NO: 986488 - RNA, 21 nt, Human
guagcaucaaagacgaaacau

SEQ ID NO: 986489 - RNA, 27 nt, Human
uaaaaugcaaauaaaacaaaagacaaa

SEQ ID NO: 986490 - RNA, 18 nt, Human
uaagaagcccuggauggu

SEQ ID NO: 986491 - RNA, 21 nt, Human
uaagcuaacgguguaugccac

SEQ ID NO: 986492 - RNA, 21 nt, Human
uaagguuaagcuaacggugua

SEQ ID NO: 986493 - RNA, 20 nt, Human
uaauucaaucauuaaccaaa

SEQ ID NO: 986494 - RNA, 24 nt, Human
uacaggaauugcuuaagcugaugu

SEQ ID NO: 986495 - RNA, 24 nt, Human
uaccuacuaccaacuccaaaucca

SEQ ID NO: 986496 - RNA, 23 nt, Human
uagacaagcaaacccagaaacac

SEQ ID NO: 986497 - RNA, 20 nt, Human
uagcaucaaagacgaaacau

SEQ ID NO: 986498 - RNA, 25 nt, Human
uaggacagacaucccccagucacgu

SEQ ID NO: 986499 - RNA, 19 nt, Human
uaguaauugauagggcaug

SEQ ID NO: 986500 - RNA, 23 nt, Human
uauagacaagcaaacccagaaac

SEQ ID NO: 986501 - RNA, 24 nt, Human
uaucuguuuucaaauuuaucuccu

SEQ ID NO: 986502 - RNA, 25 nt, Human
uaugaaauuccagaugucuaauugg

SEQ ID NO: 986503 - RNA, 18 nt, Human
uauuuuaagaauaggcaa

SEQ ID NO: 986504 - RNA, 18 nt, Human
ucacggauuccuuuuuuu

SEQ ID NO: 986505 - RNA, 20 nt, Human
ucuaacaaugagaaucaaua

SEQ ID NO: 986506 - RNA, 22 nt, Human
ucuaagacauggcacaggagcc

SEQ ID NO: 986507 - RNA, 22 nt, Human
ucuauguuguucacuaaauuug

SEQ ID NO: 986508 - RNA, 20 nt, Human
ugaacugaacagccauuuaa

SEQ ID NO: 986509 - RNA, 22 nt, Human
ugaaguaccuaaaccagucugc

SEQ ID NO: 986510 - RNA, 21 nt, Human
ugaauaggugagaagugcugu

SEQ ID NO: 986511 - RNA, 21 nt, Human
ugaaugaauucuucaauuuca

SEQ ID NO: 986512 - RNA, 19 nt, Human
ugacagaugcacaaacguu

SEQ ID NO: 986513 - RNA, 23 nt, Human
ugacagugacaaugaaaacuaau

SEQ ID NO: 986514 - RNA, 19 nt, Human
ugaguaaccaucuuacuga

SEQ ID NO: 986515 - RNA, 20 nt, Human
ugccaccaacggcauccuga

SEQ ID NO: 986516 - RNA, 20 nt, Human
ugcccgcgacagcuccccgc

SEQ ID NO: 986517 - RNA, 22 nt, Human
ugcccgcgacagcuccccgcgc

SEQ ID NO: 986518 - RNA, 24 nt, Human
uggaacgaagagaaaaccuaaaaa

SEQ ID NO: 986519 - RNA, 23 nt, Human
uggauuccagaccuuguaacauu

SEQ ID NO: 986520 - RNA, 20 nt, Human
uggcugcuuccgacucugau

SEQ ID NO: 986521 - RNA, 23 nt, Human
uguacacacuuaaacaugaaggc

SEQ ID NO: 986522 - RNA, 25 nt, Human
uguccuuuuuuuuuuuuuuaagaga

SEQ ID NO: 986523 - RNA, 20 nt, Human
uguuacagagguaaaaauca

SEQ ID NO: 986524 - RNA, 20 nt, Human
uucaaauuuaucuccuuuuu

SEQ ID NO: 986525 - RNA, 24 nt, Human
uucacuacugaacuucuuauuaaa

SEQ ID NO: 986526 - RNA, 23 nt, Human
uugauagggcaugcaaugucuaa

SEQ ID NO: 986527 - RNA, 19 nt, Human
uuuuuuaagagaauucugg

SEQ ID NO: 986528 - RNA, 25 nt, Human
aaagugcugggauuuacaggcauga

SEQ ID NO: 986529 - RNA, 20 nt, Human
aagugcugggauuuacaggc

SEQ ID NO: 986530 - RNA, 20 nt, Human
agaauagcagggguggaggg

SEQ ID NO: 986531 - RNA, 23 nt, Human
agacaccacaaaguagcuuucuc

SEQ ID NO: 986532 - RNA, 18 nt, Human
agacauggcagaauagca

SEQ ID NO: 986533 - RNA, 22 nt, Human
agagagagggaaagacauggca

SEQ ID NO: 986534 - RNA, 23 nt, Human
aguuauuauuuuaauaaaugaga

SEQ ID NO: 986535 - RNA, 20 nt, Human
auguugcccaggcuggucuc

SEQ ID NO: 986536 - RNA, 25 nt, Human
caaagugcugggauuuacaggcaug

SEQ ID NO: 986537 - RNA, 23 nt, Human
caaggaagaucauuaaaaagaaa

SEQ ID NO: 986538 - RNA, 21 nt, Human
caccacaaaguagcuuucuca

SEQ ID NO: 986539 - RNA, 23 nt, Human
cagaauagcagggguggagggug

SEQ ID NO: 986540 - RNA, 18 nt, Human
cagcuaagaaaaaaggua

SEQ ID NO: 986541 - RNA, 20 nt, Human
caugccagcuaagaaaaaag

SEQ ID NO: 986542 - RNA, 23 nt, Human
ccaaagugcugggauuuacaggc

SEQ ID NO: 986543 - RNA, 25 nt, Human
ccaaagugcugggauuuacaggcau

SEQ ID NO: 986544 - RNA, 20 nt, Human
ccaaggaagaucauuaaaaa

SEQ ID NO: 986545 - RNA, 22 nt, Human
ccuauggugacaggaagacuca

SEQ ID NO: 986546 - RNA, 20 nt, Human
ccuggacucaagcaaucucc

SEQ ID NO: 986547 - RNA, 26 nt, Human
cucaagcaaucucccacuucaggcua

SEQ ID NO: 986548 - RNA, 20 nt, Human
cucccacuucaggcuaccaa

SEQ ID NO: 986549 - RNA, 22 nt, Human
cucccuuguuccuacuacauuu

SEQ ID NO: 986550 - RNA, 22 nt, Human
gcaugccagcuaagaaaaaagg

SEQ ID NO: 986551 - RNA, 20 nt, Human
gcuauguugcccaggcuggu

SEQ ID NO: 986552 - RNA, 24 nt, Human
guuuugcuauguugcccaggcugg

SEQ ID NO: 986553 - RNA, 24 nt, Human
uaaaggccacaauaauuucccaag

SEQ ID NO: 986554 - RNA, 24 nt, Human
uacaggcaugagccaccucuccca

SEQ ID NO: 986555 - RNA, 28 nt, Human
uacuauaauauuugcauacguaugugua

SEQ ID NO: 986556 - RNA, 22 nt, Human
uagaaauuaaauaaaggccaca

SEQ ID NO: 986557 - RNA, 22 nt, Human
uagagaugagguuuugcuaugu

SEQ ID NO: 986558 - RNA, 18 nt, Human
uauguguauauauguauu

SEQ ID NO: 986559 - RNA, 25 nt, Human
uauguugcccaggcuggucuccugg

SEQ ID NO: 986560 - RNA, 25 nt, Human
uauguugcccaggcuggucuccugg

SEQ ID NO: 986561 - RNA, 26 nt, Human
uauguugcccaggcuggucuccugga

SEQ ID NO: 986562 - RNA, 19 nt, Human
uccucauuuguucuaagcc

SEQ ID NO: 986563 - RNA, 18 nt, Human
ucuucucacucuuugucg

SEQ ID NO: 986564 - RNA, 24 nt, Human
ugagguuuugcuauguugcccagg

SEQ ID NO: 986565 - RNA, 18 nt, Human
ugcauacguauguguaua

SEQ ID NO: 986566 - RNA, 24 nt, Human
ugcauacguauguguauauaugua

SEQ ID NO: 986567 - RNA, 18 nt, Human
ugcccaggcuggucuccu

SEQ ID NO: 986568 - RNA, 24 nt, Human
ugcuauguugcccaggcuggucuc

SEQ ID NO: 986569 - RNA, 20 nt, Human
uggacucaagcaaucuccca

SEQ ID NO: 986570 - RNA, 24 nt, Human
uggucuccuggacucaagcaaucu

SEQ ID NO: 986571 - RNA, 21 nt, Human
uugcuauguugcccaggcugg

SEQ ID NO: 986572 - RNA, 23 nt, Human
uuugcauacguauguguauauau

SEQ ID NO: 986573 - RNA, 26 nt, Human
uuugcauacguauguguauauauuac

SEQ ID NO: 986574 - RNA, 19 nt, Human
uuuugcuauguugcccagg

SEQ ID NO: 986575 - RNA, 23 nt, Human
uuuugcuauguugcccaggcugg

SEQ ID NO: 986576 - RNA, 24 nt, Human
aaaaauauuauacuccuuggaccc

SEQ ID NO: 986577 - RNA, 19 nt, Human
aaaggauaccagagaagga

SEQ ID NO: 986578 - RNA, 24 nt, Human
aaagugcuaggauuccaggcauga

SEQ ID NO: 986579 - RNA, 21 nt, Human
aacacuaguaauagagauaag

SEQ ID NO: 986580 - RNA, 25 nt, Human
aagcaaagcaaacacaagaaaaaaa

SEQ ID NO: 986581 - RNA, 25 nt, Human
aagcaguccuccuaccucagccucc

SEQ ID NO: 986582 - RNA, 25 nt, Human
aagcaguccuccuaccucagccucc

SEQ ID NO: 986583 - RNA, 24 nt, Human
aaguaacuggggagggaggguggg

SEQ ID NO: 986584 - RNA, 18 nt, Human
accagagaaggaggugcu

SEQ ID NO: 986585 - RNA, 20 nt, Human
acccuacagucuccacacac

SEQ ID NO: 986586 - RNA, 19 nt, Human
acccuucugucuucugccu

SEQ ID NO: 986587 - RNA, 18 nt, Human
accuuuaugugcguccug

SEQ ID NO: 986588 - RNA, 23 nt, Human
acuauguugcucaggcuggucuc

SEQ ID NO: 986589 - RNA, 24 nt, Human
acuccuuggacccagauuaggagg

SEQ ID NO: 986590 - RNA, 23 nt, Human
agacagggucucacuauguugcu

SEQ ID NO: 986591 - RNA, 19 nt, Human
agcaaacacaagaaaaaaa

SEQ ID NO: 986592 - RNA, 21 nt, Human
agcacaaauccuaagucuccu

SEQ ID NO: 986593 - RNA, 18 nt, Human
agcugcucccuguccuuc

SEQ ID NO: 986594 - RNA, 24 nt, Human
aggaacgugggagaagccgguacc

SEQ ID NO: 986595 - RNA, 19 nt, Human
aggagacaguaauauuuua

SEQ ID NO: 986596 - RNA, 22 nt, Human
aggaggugcuucugacugcccu

SEQ ID NO: 986597 - RNA, 19 nt, Human
aggauagugaaaaauauag

SEQ ID NO: 986598 - RNA, 19 nt, Human
aggcaugaaccaccauacc

SEQ ID NO: 986599 - RNA, 21 nt, Human
agggacucaagaaacacugca

SEQ ID NO: 986600 - RNA, 24 nt, Human
auaacgguacaugucuauuuuggg

SEQ ID NO: 986601 - RNA, 26 nt, Human
augggcaacuggagauguacucacuu

SEQ ID NO: 986602 - RNA, 23 nt, Human
auguacucacuuaguuccuuaag

SEQ ID NO: 986603 - RNA, 21 nt, Human
caaaaagcaaagcaaacacaa

SEQ ID NO: 986604 - RNA, 25 nt, Human
caaagcaaacacaagaaaaaaaauc

SEQ ID NO: 986605 - RNA, 24 nt, Human
caaagugcuaggauuccaggcaug

SEQ ID NO: 986606 - RNA, 23 nt, Human
caacaugguguguggccaauuaa

SEQ ID NO: 986607 - RNA, 24 nt, Human
caacucccggccucaagcaguccu

SEQ ID NO: 986608 - RNA, 23 nt, Human
caagaaacacugcaaacaauuca

SEQ ID NO: 986609 - RNA, 27 nt, Human
caagcaguccuccuaccucagccuccc

SEQ ID NO: 986610 - RNA, 20 nt, Human
cacaaucagccccuguaguc

SEQ ID NO: 986611 - RNA, 24 nt, Human
cacuauguugcucaggcuggucuc

SEQ ID NO: 986612 - RNA, 20 nt, Human
cacuucauagccagcugggu

SEQ ID NO: 986613 - RNA, 23 nt, Human
cagcugaggaaaacaaacuuauu

SEQ ID NO: 986614 - RNA, 24 nt, Human
cagggucucacuauguugcucagg

SEQ ID NO: 986615 - RNA, 19 nt, Human
cauguacaccuuuaugugc

SEQ ID NO: 986616 - RNA, 24 nt, Human
ccaaagugcuaggauuccaggcau

SEQ ID NO: 986617 - RNA, 21 nt, Human
ccaggcaugaaccaccauacc

SEQ ID NO: 986618 - RNA, 20 nt, Human
cccggccucaagcaguccuc

SEQ ID NO: 986619 - RNA, 22 nt, Human
ccggccucaagcaguccuccua

SEQ ID NO: 986620 - RNA, 26 nt, Human
ccuccuaccucagccucccaaagugc

SEQ ID NO: 986621 - RNA, 18 nt, Human
ccugaagccugcacccuu

SEQ ID NO: 986622 - RNA, 19 nt, Human
ccugaagccugcacccuuc

SEQ ID NO: 986623 - RNA, 19 nt, Human
ccuuggacccagauuagga

SEQ ID NO: 986624 - RNA, 27 nt, Human
cguggaucuucucccugcucugugccu

SEQ ID NO: 986625 - RNA, 22 nt, Human
cuauauacauuccaacaauccu

SEQ ID NO: 986626 - RNA, 24 nt, Human
cucaagcaguccuccuaccucagc

SEQ ID NO: 986627 - RNA, 25 nt, Human
cucacccuacagucuccacacacau

SEQ ID NO: 986628 - RNA, 21 nt, Human
cucaggcuggucuccaacucc

SEQ ID NO: 986629 - RNA, 20 nt, Human
cucccggccucaagcagucc

SEQ ID NO: 986630 - RNA, 23 nt, Human
cucccugcucugugccuucugau

SEQ ID NO: 986631 - RNA, 18 nt, Human
cugacugcccuccuucca

SEQ ID NO: 986632 - RNA, 20 nt, Human
cugagccgugcaugccgcgc

SEQ ID NO: 986633 - RNA, 21 nt, Human
cugcacccuucugucuucugc

SEQ ID NO: 986634 - RNA, 22 nt, Human
cugcacccuucugucuucugcc

SEQ ID NO: 986635 - RNA, 19 nt, Human
cuguagucagucaguaaac

SEQ ID NO: 986636 - RNA, 23 nt, Human
cuuucaguaccauuauucacuuc

SEQ ID NO: 986637 - RNA, 25 nt, Human
gaaccaccauacccggccccauuua

SEQ ID NO: 986638 - RNA, 19 nt, Human
gacccucuuucuuacccac

SEQ ID NO: 986639 - RNA, 20 nt, Human
gagacagggucucacuaugu

SEQ ID NO: 986640 - RNA, 22 nt, Human
gagcguggaucuucucccugcu

SEQ ID NO: 986641 - RNA, 24 nt, Human
gauuccaggcaugaaccaccauac

SEQ ID NO: 986642 - RNA, 23 nt, Human
gcccuccuuccacuggagaaucc

SEQ ID NO: 986643 - RNA, 18 nt, Human
gcucugugccuucugaug

SEQ ID NO: 986644 - RNA, 23 nt, Human
gcuggucuccaacucccggccuc

SEQ ID NO: 986645 - RNA, 20 nt, Human
ggagcauccguuagaagaag

SEQ ID NO: 986646 - RNA, 18 nt, Human
ggaggacagcuguuaugu

SEQ ID NO: 986647 - RNA, 22 nt, Human
ggauuccaggcaugaaccacca

SEQ ID NO: 986648 - RNA, 22 nt, Human
ggcaaaggauaccagagaagga

SEQ ID NO: 986649 - RNA, 19 nt, Human
ggccucaagcaguccuccu

SEQ ID NO: 986650 - RNA, 18 nt, Human
ggggagggagggugggaa

SEQ ID NO: 986651 - RNA, 21 nt, Human
ggucuucagguuuacuuucag

SEQ ID NO: 986652 - RNA, 18 nt, Human
guaaaaacaucuggcaaa

SEQ ID NO: 986653 - RNA, 18 nt, Human
gucagacucagacuuaaa

SEQ ID NO: 986654 - RNA, 21 nt, Human
guuauguuacauaaaggcuga

SEQ ID NO: 986655 - RNA, 24 nt, Human
uaaaauagaucugagaaaggucuu

SEQ ID NO: 986656 - RNA, 19 nt, Human
uaaacauaucuccugcaua

SEQ ID NO: 986657 - RNA, 23 nt, Human
uaauagagauaaggcacuaccua

SEQ ID NO: 986658 - RNA, 24 nt, Human
uaccucagccucccaaagugcuag

SEQ ID NO: 986659 - RNA, 18 nt, Human
uacuguguacccucaaac

SEQ ID NO: 986660 - RNA, 18 nt, Human
uagaugauuuuucuugga

SEQ ID NO: 986661 - RNA, 23 nt, Human
uagccagcugggugacaacaugg

SEQ ID NO: 986662 - RNA, 21 nt, Human
uaggauagugaaaaauauagc

SEQ ID NO: 986663 - RNA, 24 nt, Human
uaggauuccaggcaugaaccacca

SEQ ID NO: 986664 - RNA, 23 nt, Human
uaguaauagagauaaggcacuac

SEQ ID NO: 986665 - RNA, 19 nt, Human
uauguugcucaggcugguc

SEQ ID NO: 986666 - RNA, 24 nt, Human
uauguugcucaggcuggucuccaa

SEQ ID NO: 986667 - RNA, 20 nt, Human
ucaaaccaggcaaguuuuuc

SEQ ID NO: 986668 - RNA, 25 nt, Human
ucacuuuccuggaucacucucaacu

SEQ ID NO: 986669 - RNA, 27 nt, Human
ucagacucagacuuaaaauagaucuga

SEQ ID NO: 986670 - RNA, 18 nt, Human
ucagccucccaaagugcu

SEQ ID NO: 986671 - RNA, 20 nt, Human
ucaugucgaauauuuuccau

SEQ ID NO: 986672 - RNA, 20 nt, Human
ucaugugguuucuccaggug

SEQ ID NO: 986673 - RNA, 25 nt, Human
uccaacaauccuccgaguaucuucu

SEQ ID NO: 986674 - RNA, 29 nt, Human
uccaggcaugaaccaccauacccggcccu

SEQ ID NO: 986675 - RNA, 24 nt, Human
ucccaaagugcuaggauuccaggc

SEQ ID NO: 986676 - RNA, 25 nt, Human
uccuuggacccagauuaggagguga

SEQ ID NO: 986677 - RNA, 25 nt, Human
ucgaauacaaauaguaaagugaagg

SEQ ID NO: 986678 - RNA, 23 nt, Human
ucucacuauguugcucaggcugg

SEQ ID NO: 986679 - RNA, 24 nt, Human
ucucacuauguugcucaggcuggu

SEQ ID NO: 986680 - RNA, 24 nt, Human
ucuccaacucccggccucaagcag

SEQ ID NO: 986681 - RNA, 23 nt, Human
ucugucuucugccugucagagca

SEQ ID NO: 986682 - RNA, 24 nt, Human
ugaaacaauagccauguacaccuu

SEQ ID NO: 986683 - RNA, 25 nt, Human
ugaaacaauagccauguacaccuuu

SEQ ID NO: 986684 - RNA, 18 nt, Human
ugacagaccagagcugcu

SEQ ID NO: 986685 - RNA, 22 nt, Human
ugagacagggucucacuauguu

SEQ ID NO: 986686 - RNA, 23 nt, Human
ugagacggcaaaggauaccagag

SEQ ID NO: 986687 - RNA, 23 nt, Human
ugagagaauagaauugcaaggaa

SEQ ID NO: 986688 - RNA, 21 nt, Human
ugagauugacagaccagagcu

SEQ ID NO: 986689 - RNA, 19 nt, Human
ugcuaggcauucucaggga

SEQ ID NO: 986690 - RNA, 21 nt, Human
ugcucaggcuggucuccaacu

SEQ ID NO: 986691 - RNA, 20 nt, Human
ugcucugugccuucugauga

SEQ ID NO: 986692 - RNA, 25 nt, Human
ugcugugaucuuuuuccgagcgugg

SEQ ID NO: 986693 - RNA, 26 nt, Human
ugcuucacuuuccuggaucacucuca

SEQ ID NO: 986694 - RNA, 23 nt, Human
ugggagaagcaguuguccucccg

SEQ ID NO: 986695 - RNA, 18 nt, Human
uggggagggaggguggga

SEQ ID NO: 986696 - RNA, 19 nt, Human
ugucaaaaagcaaagcaaa

SEQ ID NO: 986697 - RNA, 25 nt, Human
ugucaaaaagcaaagcaaacacaag

SEQ ID NO: 986698 - RNA, 23 nt, Human
uguuugauaucacugaucacugu

SEQ ID NO: 986699 - RNA, 19 nt, Human
uuaaaguuuacaagguaac

SEQ ID NO: 986700 - RNA, 25 nt, Human
uucacuuguuuuucugacaggcuuu

SEQ ID NO: 986701 - RNA, 23 nt, Human
uucaugucgaauauuuuccaugg

SEQ ID NO: 986702 - RNA, 21 nt, Human
uuccugauguuugauaucacu

SEQ ID NO: 986703 - RNA, 19 nt, Human
uugacucauuaaaaauauu

SEQ ID NO: 986704 - RNA, 19 nt, Human
uugcuuccuucacuuguuu

SEQ ID NO: 986705 - RNA, 21 nt, Human
uuggggugcuccuggauuuuu

SEQ ID NO: 986706 - RNA, 23 nt, Human
uuugauaucacugaucacugucu

SEQ ID NO: 986707 - RNA, 18 nt, Human
aaaaauguguaucauuuc

SEQ ID NO: 986708 - RNA, 25 nt, Human
aaaacagaaaaaaauauacaccuag

SEQ ID NO: 986709 - RNA, 25 nt, Human
aaaagcaucaaaaauaaggcaacag

SEQ ID NO: 986710 - RNA, 24 nt, Human
aaacaagaaugaauauuaagaaac

SEQ ID NO: 986711 - RNA, 19 nt, Human
aaacagcuuagugaaaaaa

SEQ ID NO: 986712 - RNA, 24 nt, Human
aaagauauacauucuuauauugac

SEQ ID NO: 986713 - RNA, 22 nt, Human
aacauauacuucauacagugua

SEQ ID NO: 986714 - RNA, 19 nt, Human
aagcaaaaugugaauaagc

SEQ ID NO: 986715 - RNA, 22 nt, Human
aagcagcaaaguuuuaaaccca

SEQ ID NO: 986716 - RNA, 19 nt, Human
acaguguauuucucccuuu

SEQ ID NO: 986717 - RNA, 22 nt, Human
acauggaaagcaaucuuaauuu

SEQ ID NO: 986718 - RNA, 21 nt, Human
accccugaacuuucaaauuua

SEQ ID NO: 986719 - RNA, 21 nt, Human
accugaaucccuguacaacaa

SEQ ID NO: 986720 - RNA, 19 nt, Human
acugcgugcgccgcgcccc

SEQ ID NO: 986721 - RNA, 21 nt, Human
acuuacaaagaggcugggucu

SEQ ID NO: 986722 - RNA, 22 nt, Human
agcaucaaaaauaaggcaacag

SEQ ID NO: 986723 - RNA, 24 nt, Human
agcaugagcaacaaaggacaggaa

SEQ ID NO: 986724 - RNA, 18 nt, Human
caaaaagauuaggaagca

SEQ ID NO: 986725 - RNA, 18 nt, Human
caaaaauaaggcaacagc

SEQ ID NO: 986726 - RNA, 24 nt, Human
caaaggacaggaaacaaauaucac

SEQ ID NO: 986727 - RNA, 19 nt, Human
cacuaagaguaaugcccau

SEQ ID NO: 986728 - RNA, 19 nt, Human
cacuuuggaaggcaaacag

SEQ ID NO: 986729 - RNA, 27 nt, Human
caucaaaaauaaggcaacagcaagaug

SEQ ID NO: 986730 - RNA, 24 nt, Human
cccaccaauauauugacaaagcca

SEQ ID NO: 986731 - RNA, 18 nt, Human
ccgcgcccccuucccugc

SEQ ID NO: 986732 - RNA, 18 nt, Human
ccgcgcccccuucccugc

SEQ ID NO: 986733 - RNA, 21 nt, Human
ccugaacuuucaaauuuacau

SEQ ID NO: 986734 - RNA, 21 nt, Human
cgcccccuucccugcgguuca

SEQ ID NO: 986735 - RNA, 20 nt, Human
cuuuggaaggcaaacagcuu

SEQ ID NO: 986736 - RNA, 21 nt, Human
gaaauuuccaaaucccugcuc

SEQ ID NO: 986737 - RNA, 23 nt, Human
gaagauacauguuaaggcuuaag

SEQ ID NO: 986738 - RNA, 21 nt, Human
gcaugagcaacaaaggacagg

SEQ ID NO: 986739 - RNA, 23 nt, Human
gccgcgcccccuucccugcgguu

SEQ ID NO: 986740 - RNA, 21 nt, Human
uaaacagcaugagcaacaaag

SEQ ID NO: 986741 - RNA, 26 nt, Human
uaaauuucaaacauggaaagcaaucu

SEQ ID NO: 986742 - RNA, 24 nt, Human
uaauagaccccugaacuuucaaau

SEQ ID NO: 986743 - RNA, 24 nt, Human
uacaacaaaaagauuaggaagcaa

SEQ ID NO: 986744 - RNA, 21 nt, Human
uagaaacaaauaaugcuucuc

SEQ ID NO: 986745 - RNA, 25 nt, Human
uagcaagccuauuaaaccacuagca

SEQ ID NO: 986746 - RNA, 19 nt, Human
ucaaaaauaaggcaacagc

SEQ ID NO: 986747 - RNA, 21 nt, Human
ucaaaauagcaacuucauuga

SEQ ID NO: 986748 - RNA, 22 nt, Human
ucaagguguuggcaacauguca

SEQ ID NO: 986749 - RNA, 22 nt, Human
ucaaugcuaaacucaaaauagc

SEQ ID NO: 986750 - RNA, 22 nt, Human
ucaugaauaaaagcaucaaaaa

SEQ ID NO: 986751 - RNA, 26 nt, Human
uccaaaucccugcucccaacacaauu

SEQ ID NO: 986752 - RNA, 18 nt, Human
ucccuguacaacaaaaag

SEQ ID NO: 986753 - RNA, 22 nt, Human
uccuacauauuuauguaaucaa

SEQ ID NO: 986754 - RNA, 22 nt, Human
ugaaugaagauacauguuaagg

SEQ ID NO: 986755 - RNA, 19 nt, Human
ugcccauacauauaaagau

SEQ ID NO: 986756 - RNA, 19 nt, Human
uggaaggcaaacagcuuag

SEQ ID NO: 986757 - RNA, 19 nt, Human
ugggucucagccugcacuu

SEQ ID NO: 986758 - RNA, 19 nt, Human
ugguaaauuucaaacaugg

SEQ ID NO: 986759 - RNA, 23 nt, Human
ugugcaaagacaauacacucauc

SEQ ID NO: 986760 - RNA, 20 nt, Human
uguuguaagaauaagaaacc

SEQ ID NO: 986761 - RNA, 19 nt, Human
uuagaaaaacagaaaaaaa

SEQ ID NO: 986762 - RNA, 22 nt, Human
uucaaacauggaaagcaaucuu

SEQ ID NO: 986763 - RNA, 21 nt, Human
uucauaauagaccccugaacu

SEQ ID NO: 986764 - RNA, 21 nt, Human
uucuaggaaaggcacaggcuu

SEQ ID NO: 986765 - RNA, 19 nt, Human
uucuugucaugaauaaaag

SEQ ID NO: 986766 - RNA, 19 nt, Human
aaagaagacccaggcccua

SEQ ID NO: 986767 - RNA, 22 nt, Human
aacagcccagccccucugcuuc

SEQ ID NO: 986768 - RNA, 24 nt, Human
aagcggcuuccugggacugcggga

SEQ ID NO: 986769 - RNA, 18 nt, Human
aagcucugccugcucucc

SEQ ID NO: 986770 - RNA, 21 nt, Human
aaggcccagcccgagagccuc

SEQ ID NO: 986771 - RNA, 22 nt, Human
aaggcgauggaucuugaagcca

SEQ ID NO: 986772 - RNA, 22 nt, Human
accauccugccuccaguccccu

SEQ ID NO: 986773 - RNA, 18 nt, Human
accccgugaucgagagcc

SEQ ID NO: 986774 - RNA, 22 nt, Human
acccugccucuccaucacccca

SEQ ID NO: 986775 - RNA, 19 nt, Human
acccuggggcccuggacac

SEQ ID NO: 986776 - RNA, 24 nt, Human
acucacuguuucucaaacacacca

SEQ ID NO: 986777 - RNA, 24 nt, Human
acugagcacaaggaccugggucug

SEQ ID NO: 986778 - RNA, 18 nt, Human
acugcacuccagccugaa

SEQ ID NO: 986779 - RNA, 19 nt, Human
acugcacuccagccugaag

SEQ ID NO: 986780 - RNA, 22 nt, Human
acugcacuccagccugaaggag

SEQ ID NO: 986781 - RNA, 21 nt, Human
acuugccccagaaucccccuc

SEQ ID NO: 986782 - RNA, 18 nt, Human
agaccugccugaggcauc

SEQ ID NO: 986783 - RNA, 18 nt, Human
agagaccaggauggguca

SEQ ID NO: 986784 - RNA, 18 nt, Human
agagaggggagagggcag

SEQ ID NO: 986785 - RNA, 19 nt, Human
agagccacgcccacuccuc

SEQ ID NO: 986786 - RNA, 21 nt, Human
agagggcagggggggagucag

SEQ ID NO: 986787 - RNA, 22 nt, Human
agagggcagggggggagucagu

SEQ ID NO: 986788 - RNA, 27 nt, Human
agaggggagagggcagggggggaguca

SEQ ID NO: 986789 - RNA, 24 nt, Human
agcaaguaacagaaaaccgcucaa

SEQ ID NO: 986790 - RNA, 19 nt, Human
agcaggagcagacccuggg

SEQ ID NO: 986791 - RNA, 18 nt, Human
agcccuuucuugccucca

SEQ ID NO: 986792 - RNA, 18 nt, Human
agcuagucuuccugaugc

SEQ ID NO: 986793 - RNA, 21 nt, Human
aggcaaagucuuaaacggcuc

SEQ ID NO: 986794 - RNA, 21 nt, Human
aggcaagaagcggcuuccugg

SEQ ID NO: 986795 - RNA, 24 nt, Human
agggagagaggggagagggcaggg

SEQ ID NO: 986796 - RNA, 20 nt, Human
agggggagggagagagggga

SEQ ID NO: 986797 - RNA, 25 nt, Human
agggggagggagagaggggagaggg

SEQ ID NO: 986798 - RNA, 21 nt, Human
auccuuucaaacucucuccca

SEQ ID NO: 986799 - RNA, 24 nt, Human
aucgcgccacugcacuccagccug

SEQ ID NO: 986800 - RNA, 18 nt, Human
auggagcugagaucgcgc

SEQ ID NO: 986801 - RNA, 19 nt, Human
caagcuggcugaagcaaca

SEQ ID NO: 986802 - RNA, 21 nt, Human
caaguaacagaaaaccgcuca

SEQ ID NO: 986803 - RNA, 25 nt, Human
cacaccaagcccuuucuugccuccc

SEQ ID NO: 986804 - RNA, 18 nt, Human
caccaugcggcccacucc

SEQ ID NO: 986805 - RNA, 19 nt, Human
caccccuccaaggcccagc

SEQ ID NO: 986806 - RNA, 19 nt, Human
caccccuccaaggcccagc

SEQ ID NO: 986807 - RNA, 19 nt, Human
caccccugccacccccagg

SEQ ID NO: 986808 - RNA, 21 nt, Human
cacccuggccuuccccggcuu

SEQ ID NO: 986809 - RNA, 19 nt, Human
caccgcacagccacugggu

SEQ ID NO: 986810 - RNA, 21 nt, Human
caccgcacagccacuggguua

SEQ ID NO: 986811 - RNA, 18 nt, Human
cacugcacuccagccuga

SEQ ID NO: 986812 - RNA, 19 nt, Human
cacugcacuccagccugaa

SEQ ID NO: 986813 - RNA, 25 nt, Human
cacugcacuccagccugaaggaguu

SEQ ID NO: 986814 - RNA, 19 nt, Human
cagaaccugagagggaggc

SEQ ID NO: 986815 - RNA, 20 nt, Human
cagagccacgcccacuccuc

SEQ ID NO: 986816 - RNA, 19 nt, Human
cagccaccugggcuguccu

SEQ ID NO: 986817 - RNA, 20 nt, Human
cagcccaccaagaccucugc

SEQ ID NO: 986818 - RNA, 22 nt, Human
cagcccaccaagaccucugcug

SEQ ID NO: 986819 - RNA, 19 nt, Human
cagggggggagucaguggc

SEQ ID NO: 986820 - RNA, 20 nt, Human
cagugggccugcaagggcau

SEQ ID NO: 986821 - RNA, 24 nt, Human
cauccugccuccaguccccugggc

SEQ ID NO: 986822 - RNA, 23 nt, Human
ccacacuugcguggcuuccucca

SEQ ID NO: 986823 - RNA, 21 nt, Human
ccaccaugcccuacucacugu

SEQ ID NO: 986824 - RNA, 21 nt, Human
ccaccccugccacccccaggc

SEQ ID NO: 986825 - RNA, 18 nt, Human
ccacugcacuccagccug

SEQ ID NO: 986826 - RNA, 19 nt, Human
ccacugcacuccagccuga

SEQ ID NO: 986827 - RNA, 20 nt, Human
ccacugcacuccagccugaa

SEQ ID NO: 986828 - RNA, 22 nt, Human
ccacugcacuccagccugaagg

SEQ ID NO: 986829 - RNA, 22 nt, Human
ccacugcacuccagccugaagg

SEQ ID NO: 986830 - RNA, 23 nt, Human
ccacugcacuccagccugaagga

SEQ ID NO: 986831 - RNA, 24 nt, Human
ccacugcacuccagccugaaggag

SEQ ID NO: 986832 - RNA, 25 nt, Human
ccacugcacuccagccugaaggagu

SEQ ID NO: 986833 - RNA, 20 nt, Human
ccaugugucuccuggcccug

SEQ ID NO: 986834 - RNA, 20 nt, Human
cccaaaauucuuucuccacu

SEQ ID NO: 986835 - RNA, 18 nt, Human
cccaagugcccuucagcu

SEQ ID NO: 986836 - RNA, 21 nt, Human
cccaccugcuggccuggguga

SEQ ID NO: 986837 - RNA, 22 nt, Human
cccacgagcccgacgcagggca

SEQ ID NO: 986838 - RNA, 19 nt, Human
cccagaaucccccucucag

SEQ ID NO: 986839 - RNA, 23 nt, Human
cccagccacagcugguccucagc

SEQ ID NO: 986840 - RNA, 24 nt, Human
cccaggcugagaccugccugaggc

SEQ ID NO: 986841 - RNA, 24 nt, Human
ccccaccccugccacccccaggcu

SEQ ID NO: 986842 - RNA, 23 nt, Human
ccccaccgagcagaugauacccc

SEQ ID NO: 986843 - RNA, 18 nt, Human
cccccaggcugagaccug

SEQ ID NO: 986844 - RNA, 22 nt, Human
cccccucuuccugccccaacuu

SEQ ID NO: 986845 - RNA, 22 nt, Human
ccccucguacuccaggccccug

SEQ ID NO: 986846 - RNA, 25 nt, Human
cccgcaagaaacuacuugccccaga

SEQ ID NO: 986847 - RNA, 20 nt, Human
cccgugaucgagagccgccu

SEQ ID NO: 986848 - RNA, 21 nt, Human
cccucagagcccccugagucc

SEQ ID NO: 986849 - RNA, 23 nt, Human
cccucagagcccccugaguccac

SEQ ID NO: 986850 - RNA, 19 nt, Human
cccugcccccacagcgauc

SEQ ID NO: 986851 - RNA, 21 nt, Human
ccgguccccaccacggcuguc

SEQ ID NO: 986852 - RNA, 22 nt, Human
ccuacucacuguuucucaaaca

SEQ ID NO: 986853 - RNA, 18 nt, Human
ccuccggggcaggggagc

SEQ ID NO: 986854 - RNA, 24 nt, Human
ccuccggggcaggggagcuagucu

SEQ ID NO: 986855 - RNA, 24 nt, Human
ccuccuuccuagccuggcauucag

SEQ ID NO: 986856 - RNA, 24 nt, Human
ccucugcugcaaucuggacagaga

SEQ ID NO: 986857 - RNA, 21 nt, Human
ccuggcccugggcugaccucc

SEQ ID NO: 986858 - RNA, 20 nt, Human
ccugggaaggcccuucgccc

SEQ ID NO: 986859 - RNA, 19 nt, Human
ccuggggcccuggacacag

SEQ ID NO: 986860 - RNA, 18 nt, Human
ccugggucuccauagcuc

SEQ ID NO: 986861 - RNA, 22 nt, Human
ccuuccacccuggccuuccccg

SEQ ID NO: 986862 - RNA, 26 nt, Human
ccuuccgcugccaccccuccaaggcc

SEQ ID NO: 986863 - RNA, 20 nt, Human
ccuucggccuccuacucacu

SEQ ID NO: 986864 - RNA, 20 nt, Human
ccuuggggcugggccauggc

SEQ ID NO: 986865 - RNA, 23 nt, Human
ccuuguccaccacaucuucgcag

SEQ ID NO: 986866 - RNA, 18 nt, Human
ccuuuuuccuucucugcc

SEQ ID NO: 986867 - RNA, 25 nt, Human
cgcccuuaaccccaucaggaagucc

SEQ ID NO: 986868 - RNA, 20 nt, Human
cgggaggagcaggguugagg

SEQ ID NO: 986869 - RNA, 21 nt, Human
cguguuaccccugcuggugcc

SEQ ID NO: 986870 - RNA, 22 nt, Human
cucccguaacuugcucauccuu

SEQ ID NO: 986871 - RNA, 26 nt, Human
cuccggggcaggggagcuagucuucc

SEQ ID NO: 986872 - RNA, 25 nt, Human
cucucugccccaccccugccacccc

SEQ ID NO: 986873 - RNA, 18 nt, Human
cucugcugcaaucuggac

SEQ ID NO: 986874 - RNA, 23 nt, Human
cugagcacaaggaccugggucug

SEQ ID NO: 986875 - RNA, 24 nt, Human
cugcaaagccuuguccagccaugu

SEQ ID NO: 986876 - RNA, 23 nt, Human
cugcagugggcugagaacugcau

SEQ ID NO: 986877 - RNA, 25 nt, Human
cugccaccccuccaaggcccagccc

SEQ ID NO: 986878 - RNA, 23 nt, Human
cugccugcucuccuccuacuggg

SEQ ID NO: 986879 - RNA, 25 nt, Human
cugccugcucuccuccuacuggggc

SEQ ID NO: 986880 - RNA, 22 nt, Human
cugcuucugggugggagccccc

SEQ ID NO: 986881 - RNA, 21 nt, Human
cuggaagcccccucuuccugc

SEQ ID NO: 986882 - RNA, 24 nt, Human
cuggacacagagccacgcccacuc

SEQ ID NO: 986883 - RNA, 20 nt, Human
cuggccuaccgggaggagca

SEQ ID NO: 986884 - RNA, 22 nt, Human
cuggcgucccucaagccgcccu

SEQ ID NO: 986885 - RNA, 24 nt, Human
cuggggacaggccauggugcaguc

SEQ ID NO: 986886 - RNA, 18 nt, Human
cuuaaccccaucaggaag

SEQ ID NO: 986887 - RNA, 21 nt, Human
cuugcucauccuucaggaccu

SEQ ID NO: 986888 - RNA, 19 nt, Human
gaagcccccucuuccugcc

SEQ ID NO: 986889 - RNA, 19 nt, Human
gaccugacucauuuucccu

SEQ ID NO: 986890 - RNA, 21 nt, Human
gagaccugccugaggcaucuu

SEQ ID NO: 986891 - RNA, 23 nt, Human
gagagccuccuuguccaccacau

SEQ ID NO: 986892 - RNA, 23 nt, Human
gagaucgcgccacugcacuccag

SEQ ID NO: 986893 - RNA, 19 nt, Human
gagcccccagggugccccu

SEQ ID NO: 986894 - RNA, 21 nt, Human
gagcugagaucgcgccacugc

SEQ ID NO: 986895 - RNA, 22 nt, Human
gagggcagggggggagucagug

SEQ ID NO: 986896 - RNA, 19 nt, Human
gaggguccaugcugucacc

SEQ ID NO: 986897 - RNA, 20 nt, Human
gcacuccagccugaaggagu

SEQ ID NO: 986898 - RNA, 18 nt, Human
gcagggcaugagaguucc

SEQ ID NO: 986899 - RNA, 19 nt, Human
gcccacucccguaacuugc

SEQ ID NO: 986900 - RNA, 19 nt, Human
gcccagccacagcuggucc

SEQ ID NO: 986901 - RNA, 24 nt, Human
gccccagaaucccccucucagauu

SEQ ID NO: 986902 - RNA, 23 nt, Human
gcccccugaguccacacagcugg

SEQ ID NO: 986903 - RNA, 20 nt, Human
gcccgacgcagggcaugaga

SEQ ID NO: 986904 - RNA, 23 nt, Human
gcccugggcugaccuccugcugu

SEQ ID NO: 986905 - RNA, 19 nt, Human
gcccuuucuugccuccaug

SEQ ID NO: 986906 - RNA, 22 nt, Human
gccuacccugccucuccaucac

SEQ ID NO: 986907 - RNA, 18 nt, Human
gccuaccgggaggagcag

SEQ ID NO: 986908 - RNA, 19 nt, Human
gccuuggggcugggccaug

SEQ ID NO: 986909 - RNA, 20 nt, Human
gcggcccacucccguaacuu

SEQ ID NO: 986910 - RNA, 18 nt, Human
gcucaggcugggcccgcu

SEQ ID NO: 986911 - RNA, 20 nt, Human
gcugagaucgcgccacugca

SEQ ID NO: 986912 - RNA, 22 nt, Human
ggaacaggggcagccagccuga

SEQ ID NO: 986913 - RNA, 23 nt, Human
ggagagaccauuaugagcccaag

SEQ ID NO: 986914 - RNA, 19 nt, Human
ggaggccccuggguaaggc

SEQ ID NO: 986915 - RNA, 21 nt, Human
ggagggagagaggggagaggg

SEQ ID NO: 986916 - RNA, 25 nt, Human
ggagggagagaggggagagggcagg

SEQ ID NO: 986917 - RNA, 20 nt, Human
ggcagggggggagucagugg

SEQ ID NO: 986918 - RNA, 20 nt, Human
ggccauaggguagacagccc

SEQ ID NO: 986919 - RNA, 24 nt, Human
ggcccuuccuguuucccuagcccu

SEQ ID NO: 986920 - RNA, 22 nt, Human
ggccgguaggcugcugcccggg

SEQ ID NO: 986921 - RNA, 19 nt, Human
ggccugggucuccauagcu

SEQ ID NO: 986922 - RNA, 21 nt, Human
gggaggccccuggguaaggcu

SEQ ID NO: 986923 - RNA, 23 nt, Human
ggggagggagagaggggagaggg

SEQ ID NO: 986924 - RNA, 19 nt, Human
ggguggccccaccgagcag

SEQ ID NO: 986925 - RNA, 21 nt, Human
gggugggagcccccagggugc

SEQ ID NO: 986926 - RNA, 20 nt, Human
gguaggcugcugcccgggcc

SEQ ID NO: 986927 - RNA, 21 nt, Human
ggucaugaggacucugccagg

SEQ ID NO: 986928 - RNA, 18 nt, Human
guaaccaaagacugaugc

SEQ ID NO: 986929 - RNA, 21 nt, Human
guccaugcugucaccuguggg

SEQ ID NO: 986930 - RNA, 22 nt, Human
gugguuccuucggccuccuacu

SEQ ID NO: 986931 - RNA, 20 nt, Human
guguuaccccugcuggugcc

SEQ ID NO: 986932 - RNA, 21 nt, Human
guguuaccccugcuggugccu

SEQ ID NO: 986933 - RNA, 18 nt, Human
uaaacggcucugacccca

SEQ ID NO: 986934 - RNA, 24 nt, Human
uaacaaaaagauaaagcauugcaa

SEQ ID NO: 986935 - RNA, 20 nt, Human
uaaccaaagacugaugccag

SEQ ID NO: 986936 - RNA, 24 nt, Human
uaagcuucugccaccaccaugccc

SEQ ID NO: 986937 - RNA, 19 nt, Human
uagcaaguaacagaaaacc

SEQ ID NO: 986938 - RNA, 21 nt, Human
uagcaaguaacagaaaaccgc

SEQ ID NO: 986939 - RNA, 19 nt, Human
uagcccagcucggcagcug

SEQ ID NO: 986940 - RNA, 18 nt, Human
uagccccuccucccccca

SEQ ID NO: 986941 - RNA, 19 nt, Human
ucagcccuucccagcacuc

SEQ ID NO: 986942 - RNA, 23 nt, Human
ucaggccaaggcgauggaucuug

SEQ ID NO: 986943 - RNA, 19 nt, Human
ucagucucaggcuccccuu

SEQ ID NO: 986944 - RNA, 20 nt, Human
ucaguucuuuuccugccccu

SEQ ID NO: 986945 - RNA, 20 nt, Human
uccacacagcugggcugcca

SEQ ID NO: 986946 - RNA, 18 nt, Human
uccacucccucaccaugc

SEQ ID NO: 986947 - RNA, 25 nt, Human
uccacucccucaccaugcggcccac

SEQ ID NO: 986948 - RNA, 19 nt, Human
uccaggccccugcccccac

SEQ ID NO: 986949 - RNA, 21 nt, Human
uccaguuggcauacccggucc

SEQ ID NO: 986950 - RNA, 18 nt, Human
ucccaggcugcaaagccu

SEQ ID NO: 986951 - RNA, 18 nt, Human
ucccaggucuggaauucc

SEQ ID NO: 986952 - RNA, 21 nt, Human
ucccaucaggccucagccacc

SEQ ID NO: 986953 - RNA, 20 nt, Human
ucccauggagcugagaucgc

SEQ ID NO: 986954 - RNA, 19 nt, Human
ucccucaagccgcccuucc

SEQ ID NO: 986955 - RNA, 21 nt, Human
ucccuggaagcccccucuucc

SEQ ID NO: 986956 - RNA, 21 nt, Human
ucccuggaagcccccucuucc

SEQ ID NO: 986957 - RNA, 18 nt, Human
uccgcugccaccccucca

SEQ ID NO: 986958 - RNA, 22 nt, Human
uccucagucucaggcuccccuu

SEQ ID NO: 986959 - RNA, 21 nt, Human
uccugccauugcucaggcugg

SEQ ID NO: 986960 - RNA, 21 nt, Human
uccugccauugcucaggcugg

SEQ ID NO: 986961 - RNA, 23 nt, Human
uccuuugguucaacuuguucugu

SEQ ID NO: 986962 - RNA, 19 nt, Human
uccuuuuuccuucucugcc

SEQ ID NO: 986963 - RNA, 18 nt, Human
ucggccuccuacucacug

SEQ ID NO: 986964 - RNA, 22 nt, Human
ucuauuugcuucuuuccagagg

SEQ ID NO: 986965 - RNA, 22 nt, Human
ucuccggccccgagaaaggccc

SEQ ID NO: 986966 - RNA, 18 nt, Human
ucugccaccaccaugccc

SEQ ID NO: 986967 - RNA, 19 nt, Human
ucugccagccacagcuccc

SEQ ID NO: 986968 - RNA, 22 nt, Human
ucugggccaggagaucuggagc

SEQ ID NO: 986969 - RNA, 21 nt, Human
ucugggugggagcccccaggg

SEQ ID NO: 986970 - RNA, 19 nt, Human
ucuuaaacggcucugaccc

SEQ ID NO: 986971 - RNA, 18 nt, Human
ucuucgcaggcacgugca

SEQ ID NO: 986972 - RNA, 22 nt, Human
ucuucguguuaccccugcuggu

SEQ ID NO: 986973 - RNA, 26 nt, Human
ucuuucuccacuuucccaggucugga

SEQ ID NO: 986974 - RNA, 22 nt, Human
ucuuuggaccucugguucuugc

SEQ ID NO: 986975 - RNA, 22 nt, Human
ugagaacacucacccgcaagaa

SEQ ID NO: 986976 - RNA, 23 nt, Human
ugagaacacucacccgcaagaaa

SEQ ID NO: 986977 - RNA, 19 nt, Human
ugagagggaggccccuggg

SEQ ID NO: 986978 - RNA, 22 nt, Human
ugagcucagcccuucccagcac

SEQ ID NO: 986979 - RNA, 19 nt, Human
ugcaaggcaccucaaggca

SEQ ID NO: 986980 - RNA, 21 nt, Human
ugcaguuccuuuugccuggaa

SEQ ID NO: 986981 - RNA, 22 nt, Human
ugccaaauguccauaaaggacu

SEQ ID NO: 986982 - RNA, 22 nt, Human
ugccccaacuuuauuuugguuc

SEQ ID NO: 986983 - RNA, 18 nt, Human
ugcccgggccuggucucu

SEQ ID NO: 986984 - RNA, 19 nt, Human
ugccuccaguccccugggc

SEQ ID NO: 986985 - RNA, 24 nt, Human
ugccuucuauuugcuucuuuccag

SEQ ID NO: 986986 - RNA, 21 nt, Human
ugcgcaggacugagcacaagg

SEQ ID NO: 986987 - RNA, 27 nt, Human
uggagcaccccacacagcugugacccc

SEQ ID NO: 986988 - RNA, 23 nt, Human
uggagcccugcugugguuccuuc

SEQ ID NO: 986989 - RNA, 22 nt, Human
uggccccaccgagcagaugaua

SEQ ID NO: 986990 - RNA, 20 nt, Human
uggcccugggcugaccuccu

SEQ ID NO: 986991 - RNA, 24 nt, Human
ugggcugccaucagcacugagcag

SEQ ID NO: 986992 - RNA, 23 nt, Human
uggggacaggccauggugcaguc

SEQ ID NO: 986993 - RNA, 21 nt, Human
uggguugaggccuuuaggaga

SEQ ID NO: 986994 - RNA, 21 nt, Human
ugucaaagaggcccuuccugu

SEQ ID NO: 986995 - RNA, 18 nt, Human
ugucagguagggaaagcc

SEQ ID NO: 986996 - RNA, 25 nt, Human
ugucagguagggaaagccaccaucc

SEQ ID NO: 986997 - RNA, 21 nt, Human
uucccuagcccucagagcccc

SEQ ID NO: 986998 - RNA, 20 nt, Human
uucccuucgucggcuaagcc

SEQ ID NO: 986999 - RNA, 18 nt, Human
uugccuccaugcuuuuac

SEQ ID NO: 987000 - RNA, 21 nt, Human
uugcucauccuucaggaccug

SEQ ID NO: 987001 - RNA, 22 nt, Human
uugguucuagaaucauuccagu

SEQ ID NO: 987002 - RNA, 20 nt, Human
uuguucuagccccuccuccc

SEQ ID NO: 987003 - RNA, 23 nt, Human
uuucuccacuuucccaggucugg

SEQ ID NO: 987004 - RNA, 27 nt, Human
aaaaaaaaggugaaaaauaggggaccc

SEQ ID NO: 987005 - RNA, 23 nt, Human
aaaaagcugaggccccagauuuc

SEQ ID NO: 987006 - RNA, 20 nt, Human
aaagaaaaaauaaugaccac

SEQ ID NO: 987007 - RNA, 23 nt, Human
aaagagcaaaacuccgucuaaaa

SEQ ID NO: 987008 - RNA, 25 nt, Human
aaagccaaauucuucuuugcaucca

SEQ ID NO: 987009 - RNA, 18 nt, Human
aacaaagagcaaaacucc

SEQ ID NO: 987010 - RNA, 21 nt, Human
aacaacagaacccaggaaucc

SEQ ID NO: 987011 - RNA, 26 nt, Human
aacaacagaacccaggaauccugguu

SEQ ID NO: 987012 - RNA, 19 nt, Human
aacauggugaaaccccauc

SEQ ID NO: 987013 - RNA, 20 nt, Human
aacauggugaaaccccaucu

SEQ ID NO: 987014 - RNA, 21 nt, Human
aacauggugaaaccccaucuc

SEQ ID NO: 987015 - RNA, 21 nt, Human
aacauggugaaaccccaucuc

SEQ ID NO: 987016 - RNA, 20 nt, Human
aaccaaagagaagaaaccag

SEQ ID NO: 987017 - RNA, 23 nt, Human
aaccaaagagaagaaaccaguau

SEQ ID NO: 987018 - RNA, 21 nt, Human
aacccagccaaugacucacag

SEQ ID NO: 987019 - RNA, 22 nt, Human
aaccucagugaugaagguuucc

SEQ ID NO: 987020 - RNA, 19 nt, Human
aagaagaagaaugaaagga

SEQ ID NO: 987021 - RNA, 26 nt, Human
aagagaagaaaccaguauggugaaga

SEQ ID NO: 987022 - RNA, 27 nt, Human
aagagaagaaaccaguauggugaagag

SEQ ID NO: 987023 - RNA, 22 nt, Human
aagagguggagucacagauuaa

SEQ ID NO: 987024 - RNA, 24 nt, Human
aagcacaaaauucaguccaagagc

SEQ ID NO: 987025 - RNA, 20 nt, Human
aaucagaacccagccaauga

SEQ ID NO: 987026 - RNA, 18 nt, Human
aaucgcuugaacuuggga

SEQ ID NO: 987027 - RNA, 24 nt, Human
aaucgcuugaacuugggaggcgga

SEQ ID NO: 987028 - RNA, 18 nt, Human
acagguuuugaacacuau

SEQ ID NO: 987029 - RNA, 22 nt, Human
accaguauggugaagagaucuc

SEQ ID NO: 987030 - RNA, 24 nt, Human
accccaucucuacuaaaaguacaa

SEQ ID NO: 987031 - RNA, 19 nt, Human
acuacaaugucucaugcau

SEQ ID NO: 987032 - RNA, 21 nt, Human
acucagcaaggcucauaauuu

SEQ ID NO: 987033 - RNA, 18 nt, Human
acugcacuccagccuggg

SEQ ID NO: 987034 - RNA, 23 nt, Human
acugcacuccagccugggcaaca

SEQ ID NO: 987035 - RNA, 26 nt, Human
acuggaacgcugagaagggaccgguc

SEQ ID NO: 987036 - RNA, 21 nt, Human
agaaaggagguugcagaggac

SEQ ID NO: 987037 - RNA, 19 nt, Human
agaaaugcucacuggcauc

SEQ ID NO: 987038 - RNA, 24 nt, Human
agaagaaaccaguauggugaagag

SEQ ID NO: 987039 - RNA, 19 nt, Human
agaagaagaagaaugaaag

SEQ ID NO: 987040 - RNA, 22 nt, Human
agaaucgcuugaacuugggagg

SEQ ID NO: 987041 - RNA, 21 nt, Human
agacaggagaaucgcuugaac

SEQ ID NO: 987042 - RNA, 24 nt, Human
agacaggagaaucgcuugaacuug

SEQ ID NO: 987043 - RNA, 22 nt, Human
agaccagccuggccaacauggu

SEQ ID NO: 987044 - RNA, 26 nt, Human
agagaagaaaccaguauggugaagag

SEQ ID NO: 987045 - RNA, 23 nt, Human
agagcagggggcuuaugaaaugc

SEQ ID NO: 987046 - RNA, 22 nt, Human
agccuggccaacauggugaaac

SEQ ID NO: 987047 - RNA, 24 nt, Human
agccuggccaacauggugaaaccc

SEQ ID NO: 987048 - RNA, 18 nt, Human
aggaauucaaaaccuagc

SEQ ID NO: 987049 - RNA, 24 nt, Human
aggcauguuggugggcaccuguaa

SEQ ID NO: 987050 - RNA, 21 nt, Human
aggccgaggaggguagaucac

SEQ ID NO: 987051 - RNA, 21 nt, Human
aggcggagguugcagugagcc

SEQ ID NO: 987052 - RNA, 24 nt, Human
aggcggagguugcagugagccgag

SEQ ID NO: 987053 - RNA, 24 nt, Human
aggcugagacaggagaaucgcuug

SEQ ID NO: 987054 - RNA, 21 nt, Human
agggaccggucuaucucagag

SEQ ID NO: 987055 - RNA, 18 nt, Human
agguugcagaggacgggu

SEQ ID NO: 987056 - RNA, 24 nt, Human
aguacuuugggaggccgaggaggg

SEQ ID NO: 987057 - RNA, 20 nt, Human
auaacagacaacucuccuuc

SEQ ID NO: 987058 - RNA, 24 nt, Human
aucgugccacugcacuccagccug

SEQ ID NO: 987059 - RNA, 18 nt, Human
auggugaagagaucucua

SEQ ID NO: 987060 - RNA, 24 nt, Human
auucaagugaaaacagacagaggg

SEQ ID NO: 987061 - RNA, 19 nt, Human
auugucuuucuucucuacc

SEQ ID NO: 987062 - RNA, 22 nt, Human
caacaacagaacccaggaaucc

SEQ ID NO: 987063 - RNA, 24 nt, Human
caacauggugaaaccccaucucua

SEQ ID NO: 987064 - RNA, 22 nt, Human
cacauacagugcuccacccucu

SEQ ID NO: 987065 - RNA, 18 nt, Human
caccuguaaucccagcua

SEQ ID NO: 987066 - RNA, 24 nt, Human
caccuguaaucccagcuacccagg

SEQ ID NO: 987067 - RNA, 25 nt, Human
cacuccagccugggcaacaaagagc

SEQ ID NO: 987068 - RNA, 18 nt, Human
cacugcacuccagccugg

SEQ ID NO: 987069 - RNA, 19 nt, Human
cacugcacuccagccuggg

SEQ ID NO: 987070 - RNA, 21 nt, Human
cacugcacuccagccugggca

SEQ ID NO: 987071 - RNA, 23 nt, Human
cacugcacuccagccugggcaac

SEQ ID NO: 987072 - RNA, 24 nt, Human
cacugcacuccagccugggcaaca

SEQ ID NO: 987073 - RNA, 22 nt, Human
cacuuggcaggggcuggccaac

SEQ ID NO: 987074 - RNA, 21 nt, Human
cagaacccagccaaugacuca

SEQ ID NO: 987075 - RNA, 26 nt, Human
cagaauccaugguucuggaaaugcca

SEQ ID NO: 987076 - RNA, 27 nt, Human
cagagagugccuacagguuuugaacac

SEQ ID NO: 987077 - RNA, 22 nt, Human
cagauuaaugagggcagacucc

SEQ ID NO: 987078 - RNA, 20 nt, Human
cagcauuggaacuggcugca

SEQ ID NO: 987079 - RNA, 20 nt, Human
caggccuguaaucccaguac

SEQ ID NO: 987080 - RNA, 24 nt, Human
caggccuguaaucccaguacuuug

SEQ ID NO: 987081 - RNA, 23 nt, Human
caguacuuugggaggccgaggag

SEQ ID NO: 987082 - RNA, 24 nt, Human
caguacuuugggaggccgaggagg

SEQ ID NO: 987083 - RNA, 22 nt, Human
caguauggugaagagaucucua

SEQ ID NO: 987084 - RNA, 23 nt, Human
cagugaacauaacagacaacucu

SEQ ID NO: 987085 - RNA, 21 nt, Human
caugagacagcuuuaucccag

SEQ ID NO: 987086 - RNA, 26 nt, Human
cauugagaacucagcuaggacuuuaa

SEQ ID NO: 987087 - RNA, 22 nt, Human
ccaaaaaaaagaagaagaagaa

SEQ ID NO: 987088 - RNA, 19 nt, Human
ccaaaggcagaauccaugg

SEQ ID NO: 987089 - RNA, 20 nt, Human
ccacugcacuccagccuggg

SEQ ID NO: 987090 - RNA, 21 nt, Human
ccacugcacuccagccugggc

SEQ ID NO: 987091 - RNA, 22 nt, Human
ccacugcacuccagccugggca

SEQ ID NO: 987092 - RNA, 23 nt, Human
ccacugcacuccagccugggcaa

SEQ ID NO: 987093 - RNA, 24 nt, Human
ccacugcacuccagccugggcaac

SEQ ID NO: 987094 - RNA, 19 nt, Human
ccagaguuuuaauauuaau

SEQ ID NO: 987095 - RNA, 23 nt, Human
ccagccuugcaaacacaucuguc

SEQ ID NO: 987096 - RNA, 18 nt, Human
cccaggacuccuuuacaa

SEQ ID NO: 987097 - RNA, 20 nt, Human
ccccccaaaaaaaagaagaa

SEQ ID NO: 987098 - RNA, 26 nt, Human
ccccccaaaaaaaagaagaagaagaa

SEQ ID NO: 987099 - RNA, 19 nt, Human
cccccccaaaaaaaagaag

SEQ ID NO: 987100 - RNA, 25 nt, Human
cccccccaaaaaaaagaagaagaaa

SEQ ID NO: 987101 - RNA, 19 nt, Human
cccccgccccgcccccccc

SEQ ID NO: 987102 - RNA, 21 nt, Human
ccccgccccgccccccccaaa

SEQ ID NO: 987103 - RNA, 20 nt, Human
cccgccccccccaaaaaaaa

SEQ ID NO: 987104 - RNA, 22 nt, Human
cccgccccgccccccccaaaaa

SEQ ID NO: 987105 - RNA, 22 nt, Human
cccgcucccggcgaggggcugg

SEQ ID NO: 987106 - RNA, 20 nt, Human
cccgggccgggcccgccucc

SEQ ID NO: 987107 - RNA, 23 nt, Human
cccuuacccaucuuguccagaaa

SEQ ID NO: 987108 - RNA, 23 nt, Human
ccuggccaacauggugaaacccc

SEQ ID NO: 987109 - RNA, 24 nt, Human
ccuggccaacauggugaaacccca

SEQ ID NO: 987110 - RNA, 21 nt, Human
ccuguaaucccagcuacccag

SEQ ID NO: 987111 - RNA, 24 nt, Human
ccuguaaucccagcuacccaggag

SEQ ID NO: 987112 - RNA, 24 nt, Human
cgagaucgugccacugcacuccag

SEQ ID NO: 987113 - RNA, 19 nt, Human
cgcagccgcucaccuuccc

SEQ ID NO: 987114 - RNA, 27 nt, Human
cgcccagcccaccugaaaggacaccuc

SEQ ID NO: 987115 - RNA, 22 nt, Human
cgccccgccccccccaaaaaaa

SEQ ID NO: 987116 - RNA, 21 nt, Human
cgcuugaacuugggaggcgga

SEQ ID NO: 987117 - RNA, 23 nt, Human
cuaaaacuuugagaucccucccc

SEQ ID NO: 987118 - RNA, 24 nt, Human
cucaggccuguaaucccaguacuu

SEQ ID NO: 987119 - RNA, 21 nt, Human
cuccacauacagugcuccacc

SEQ ID NO: 987120 - RNA, 24 nt, Human
cuccaggcgagcccaggaaucugc

SEQ ID NO: 987121 - RNA, 19 nt, Human
cuccuagcugauucucugu

SEQ ID NO: 987122 - RNA, 21 nt, Human
cugcaaaacacacacuuagca

SEQ ID NO: 987123 - RNA, 20 nt, Human
cugccgggugacugcccugc

SEQ ID NO: 987124 - RNA, 18 nt, Human
cugccuacucugccagcc

SEQ ID NO: 987125 - RNA, 18 nt, Human
cugccuacucugccagcc

SEQ ID NO: 987126 - RNA, 23 nt, Human
cuggccaacauggugaaacccca

SEQ ID NO: 987127 - RNA, 18 nt, Human
cugucuuagggcagugga

SEQ ID NO: 987128 - RNA, 23 nt, Human
cuuagcauuugacaacaggaaac

SEQ ID NO: 987129 - RNA, 24 nt, Human
cuuuuugggcauucucagcugcca

SEQ ID NO: 987130 - RNA, 20 nt, Human
gaagaaaccaguauggugaa

SEQ ID NO: 987131 - RNA, 21 nt, Human
gaauucaaaaccuagcugcug

SEQ ID NO: 987132 - RNA, 23 nt, Human
gagaucccucccccgccccgccc

SEQ ID NO: 987133 - RNA, 23 nt, Human
gagguugcagugagccgagaucg

SEQ ID NO: 987134 - RNA, 23 nt, Human
gaucaccugagaucuggaguuga

SEQ ID NO: 987135 - RNA, 26 nt, Human
gauuuucuauccccguagaaaucucc

SEQ ID NO: 987136 - RNA, 24 nt, Human
gccaacauggugaaaccccaucuc

SEQ ID NO: 987137 - RNA, 22 nt, Human
gccacugcacuccagccugggc

SEQ ID NO: 987138 - RNA, 24 nt, Human
gccacugcacuccagccugggcaa

SEQ ID NO: 987139 - RNA, 20 nt, Human
gcccagcccaccugaaauuc

SEQ ID NO: 987140 - RNA, 20 nt, Human
gccgagaucgugccacugca

SEQ ID NO: 987141 - RNA, 30 nt, Human
ggaauuucuccacauacagugcuccacccu

SEQ ID NO: 987142 - RNA, 20 nt, Human
ggagguugcagugagccgag

SEQ ID NO: 987143 - RNA, 22 nt, Human
ggagguugcagugagccgagau

SEQ ID NO: 987144 - RNA, 23 nt, Human
ggagguugcagugagccgagauc

SEQ ID NO: 987145 - RNA, 24 nt, Human
ggagguugcagugagccgagaucg

SEQ ID NO: 987146 - RNA, 19 nt, Human
ggagucacagauuaaugag

SEQ ID NO: 987147 - RNA, 21 nt, Human
ggauccgggcgagccagcagc

SEQ ID NO: 987148 - RNA, 19 nt, Human
ggcaccuguaaucccagcu

SEQ ID NO: 987149 - RNA, 19 nt, Human
ggccgggcgcgguggcuca

SEQ ID NO: 987150 - RNA, 23 nt, Human
ggccuguaaucccaguacuuugg

SEQ ID NO: 987151 - RNA, 24 nt, Human
ggccuguaaucccaguacuuuggg

SEQ ID NO: 987152 - RNA, 23 nt, Human
ggcgcgguggcucaggccuguaa

SEQ ID NO: 987153 - RNA, 21 nt, Human
ggcucaggccuguaaucccag

SEQ ID NO: 987154 - RNA, 23 nt, Human
gguggcucaggccuguaauccca

SEQ ID NO: 987155 - RNA, 24 nt, Human
gguggcucaggccuguaaucccag

SEQ ID NO: 987156 - RNA, 20 nt, Human
ggugggugugacaucuagca

SEQ ID NO: 987157 - RNA, 19 nt, Human
guggaauauuguagaagga

SEQ ID NO: 987158 - RNA, 23 nt, Human
guggcucaggccuguaaucccag

SEQ ID NO: 987159 - RNA, 24 nt, Human
guugcagugagccgagaucgugcc

SEQ ID NO: 987160 - RNA, 24 nt, Human
guuggugggcaccuguaaucccag

SEQ ID NO: 987161 - RNA, 18 nt, Human
uaaaaagcugaggcccca

SEQ ID NO: 987162 - RNA, 18 nt, Human
uaaaacaggcauaggaac

SEQ ID NO: 987163 - RNA, 21 nt, Human
uaaauuaaaaagcugaggccc

SEQ ID NO: 987164 - RNA, 23 nt, Human
uaacaagguaggaauucaaaacc

SEQ ID NO: 987165 - RNA, 23 nt, Human
uaacagacaacucuccuucaaaa

SEQ ID NO: 987166 - RNA, 23 nt, Human
uacagccacauuuuacccaggac

SEQ ID NO: 987167 - RNA, 22 nt, Human
uaccaagaagagaaugcugguc

SEQ ID NO: 987168 - RNA, 24 nt, Human
uagaaggaauuucuccacauacag

SEQ ID NO: 987169 - RNA, 27 nt, Human
uagaucaccugagaucuggaguugaag

SEQ ID NO: 987170 - RNA, 24 nt, Human
uagcaaucagaacccagccaauga

SEQ ID NO: 987171 - RNA, 21 nt, Human
uagccagagagugccuacagg

SEQ ID NO: 987172 - RNA, 20 nt, Human
uagcugcugguuauuuaccc

SEQ ID NO: 987173 - RNA, 22 nt, Human
uagcuugacugcuaagacaucc

SEQ ID NO: 987174 - RNA, 25 nt, Human
uaggccgggcgcgguggcucaggcc

SEQ ID NO: 987175 - RNA, 19 nt, Human
uagggcaguggauuagggu

SEQ ID NO: 987176 - RNA, 25 nt, Human
uauccacucagcaaggcucauaauu

SEQ ID NO: 987177 - RNA, 24 nt, Human
uauuuuuucuguuuuuucagagga

SEQ ID NO: 987178 - RNA, 20 nt, Human
ucaaaauguaucucauuucu

SEQ ID NO: 987179 - RNA, 22 nt, Human
ucaagugaaaacagacagaggg

SEQ ID NO: 987180 - RNA, 21 nt, Human
ucagaacccagccaaugacuc

SEQ ID NO: 987181 - RNA, 24 nt, Human
ucagaacccagccaaugacucaca

SEQ ID NO: 987182 - RNA, 22 nt, Human
ucaggccuguaaucccaguacu

SEQ ID NO: 987183 - RNA, 21 nt, Human
uccaaagugucacaccagaca

SEQ ID NO: 987184 - RNA, 18 nt, Human
uccaagagaaauggaccc

SEQ ID NO: 987185 - RNA, 21 nt, Human
uccaggauacuuucacuuccu

SEQ ID NO: 987186 - RNA, 21 nt, Human
uccaugauucccacauuuagc

SEQ ID NO: 987187 - RNA, 21 nt, Human
ucccccgccccgcccccccca

SEQ ID NO: 987188 - RNA, 19 nt, Human
uccccgggccgggcccgcc

SEQ ID NO: 987189 - RNA, 19 nt, Human
uccccgggccgggcccgcc

SEQ ID NO: 987190 - RNA, 26 nt, Human
uccccguagaaaucucugaagaaaga

SEQ ID NO: 987191 - RNA, 18 nt, Human
uccugcucugucuugcuu

SEQ ID NO: 987192 - RNA, 24 nt, Human
uccuucaauaacacagaugagcaa

SEQ ID NO: 987193 - RNA, 24 nt, Human
ucgcuugaacuugggaggcggagg

SEQ ID NO: 987194 - RNA, 23 nt, Human
ucgugccacugcacuccagccug

SEQ ID NO: 987195 - RNA, 25 nt, Human
ucuaagauguucuguggcggaaccu

SEQ ID NO: 987196 - RNA, 23 nt, Human
ucucagagucacuuuggugaugc

SEQ ID NO: 987197 - RNA, 21 nt, Human
ucucuacuaaaaguacaaaaa

SEQ ID NO: 987198 - RNA, 21 nt, Human
ucucugcaucuggccuaaccc

SEQ ID NO: 987199 - RNA, 21 nt, Human
ucuguaaucccugcuaaguga

SEQ ID NO: 987200 - RNA, 22 nt, Human
ucuuuuucugccuacucugcca

SEQ ID NO: 987201 - RNA, 23 nt, Human
ugaaaaauaggccgggcgcggug

SEQ ID NO: 987202 - RNA, 19 nt, Human
ugaaaccccaucucuacua

SEQ ID NO: 987203 - RNA, 20 nt, Human
ugaagaaagaaccagaucac

SEQ ID NO: 987204 - RNA, 22 nt, Human
ugaauauauauggagcacccau

SEQ ID NO: 987205 - RNA, 21 nt, Human
ugaccaaaugaugaugggugg

SEQ ID NO: 987206 - RNA, 19 nt, Human
ugagacagcuuuaucccag

SEQ ID NO: 987207 - RNA, 20 nt, Human
ugagacaggagaaucgcuug

SEQ ID NO: 987208 - RNA, 23 nt, Human
ugagacaggagaaucgcuugaac

SEQ ID NO: 987209 - RNA, 19 nt, Human
ugagagagccaucccagcc

SEQ ID NO: 987210 - RNA, 22 nt, Human
ugagccgagaucgugccacugc

SEQ ID NO: 987211 - RNA, 18 nt, Human
ugagguguccagcauugg

SEQ ID NO: 987212 - RNA, 18 nt, Human
ugaugaagguuuccaauu

SEQ ID NO: 987213 - RNA, 23 nt, Human
ugcugguggccucagaguuuguu

SEQ ID NO: 987214 - RNA, 26 nt, Human
ugcugguggccucagaguuuguuuuu

SEQ ID NO: 987215 - RNA, 19 nt, Human
uggaauauuguagaaggaa

SEQ ID NO: 987216 - RNA, 21 nt, Human
uggagcacccaugagacagcu

SEQ ID NO: 987217 - RNA, 18 nt, Human
uggaguugauaauucugg

SEQ ID NO: 987218 - RNA, 24 nt, Human
uggccaacauggugaaaccccauc

SEQ ID NO: 987219 - RNA, 22 nt, Human
uggcucaggccuguaaucccag

SEQ ID NO: 987220 - RNA, 24 nt, Human
uggcucaggccuguaaucccagua

SEQ ID NO: 987221 - RNA, 20 nt, Human
ugggaggccgaggaggguag

SEQ ID NO: 987222 - RNA, 24 nt, Human
ugggaggccgaggaggguagauca

SEQ ID NO: 987223 - RNA, 29 nt, Human
ugggaggcggagguugcagugacaacggu

SEQ ID NO: 987224 - RNA, 24 nt, Human
ugggaggcggagguugcagugagc

SEQ ID NO: 987225 - RNA, 21 nt, Human
ugggaucggggccccgcccag

SEQ ID NO: 987226 - RNA, 18 nt, Human
ugggugugacaucuagca

SEQ ID NO: 987227 - RNA, 21 nt, Human
uggugggcaccuguaauccca

SEQ ID NO: 987228 - RNA, 22 nt, Human
uggugggcaccuguaaucccag

SEQ ID NO: 987229 - RNA, 20 nt, Human
ugguuauuuacccauucaag

SEQ ID NO: 987230 - RNA, 22 nt, Human
ugguugagguguccagcauugg

SEQ ID NO: 987231 - RNA, 18 nt, Human
uguuagggauggucuccc

SEQ ID NO: 987232 - RNA, 24 nt, Human
uuagccaggcauguuggugggcac

SEQ ID NO: 987233 - RNA, 18 nt, Human
uuaguucaugacugcaaa

SEQ ID NO: 987234 - RNA, 20 nt, Human
uucgaccaggaauaccgacu

SEQ ID NO: 987235 - RNA, 24 nt, Human
uugaacuugggaggcggagguugc

SEQ ID NO: 987236 - RNA, 23 nt, Human
uugagaucccucccccgccccgc

SEQ ID NO: 987237 - RNA, 18 nt, Human
uugcagugagccgagauc

SEQ ID NO: 987238 - RNA, 21 nt, Human
uugcagugagccgagaucgug

SEQ ID NO: 987239 - RNA, 22 nt, Human
uugcagugagccgagaucgugc

SEQ ID NO: 987240 - RNA, 24 nt, Human
uuggaacuggcugcaccaugguuu

SEQ ID NO: 987241 - RNA, 23 nt, Human
uugggacuccaucaaggacugug

SEQ ID NO: 987242 - RNA, 19 nt, Human
uuuaauuuggauucuggaa

SEQ ID NO: 987243 - RNA, 23 nt, Human
aaaaugcagccgcagucccacca

SEQ ID NO: 987244 - RNA, 20 nt, Human
aaacaaaugugaucauuaac

SEQ ID NO: 987245 - RNA, 23 nt, Human
aaacaagaaacccucacaaccac

SEQ ID NO: 987246 - RNA, 22 nt, Human
aaagaucuaaaggaaacaagaa

SEQ ID NO: 987247 - RNA, 24 nt, Human
aacaauuuuuuuuuuccuaaacug

SEQ ID NO: 987248 - RNA, 26 nt, Human
aacugcuauuuggauuucaaaacucc

SEQ ID NO: 987249 - RNA, 22 nt, Human
aagaaacccucacaaccacuga

SEQ ID NO: 987250 - RNA, 19 nt, Human
aaggaaacaagaaacccuc

SEQ ID NO: 987251 - RNA, 22 nt, Human
acaaagauccuguuuucaaaca

SEQ ID NO: 987252 - RNA, 20 nt, Human
acaggugugugaacagauuu

SEQ ID NO: 987253 - RNA, 18 nt, Human
accagcagacccauaaaa

SEQ ID NO: 987254 - RNA, 18 nt, Human
acuggggucggggugggg

SEQ ID NO: 987255 - RNA, 19 nt, Human
agccccuuucuccccuucc

SEQ ID NO: 987256 - RNA, 18 nt, Human
agcuugcuggagacgcag

SEQ ID NO: 987257 - RNA, 23 nt, Human
aggcucuuccauggauucacccu

SEQ ID NO: 987258 - RNA, 18 nt, Human
aggugguuucggagaugg

SEQ ID NO: 987259 - RNA, 24 nt, Human
caaaaacaucaccuugggagacac

SEQ ID NO: 987260 - RNA, 22 nt, Human
caaaagacuaagacagaucuga

SEQ ID NO: 987261 - RNA, 24 nt, Human
caaagagaacauugcugaguccca

SEQ ID NO: 987262 - RNA, 21 nt, Human
caacacgggacugaggguccc

SEQ ID NO: 987263 - RNA, 19 nt, Human
caaccacugaaacaaacaa

SEQ ID NO: 987264 - RNA, 18 nt, Human
caacucccgagugcuccu

SEQ ID NO: 987265 - RNA, 22 nt, Human
caacuucugggcuuuccacccu

SEQ ID NO: 987266 - RNA, 20 nt, Human
caagaaacccucacaaccac

SEQ ID NO: 987267 - RNA, 21 nt, Human
cacaaccacugaaacaaacaa

SEQ ID NO: 987268 - RNA, 21 nt, Human
caccucacaaaggcucuucca

SEQ ID NO: 987269 - RNA, 18 nt, Human
cacgccuccuccuuuucc

SEQ ID NO: 987270 - RNA, 18 nt, Human
cacugugucgccacaagu

SEQ ID NO: 987271 - RNA, 21 nt, Human
cagaaccgccggucccuggcu

SEQ ID NO: 987272 - RNA, 18 nt, Human
cagcggugcagagccacu

SEQ ID NO: 987273 - RNA, 22 nt, Human
cagggcacugaaaaugcagccg

SEQ ID NO: 987274 - RNA, 23 nt, Human
caggguuguggagcuugcuggag

SEQ ID NO: 987275 - RNA, 21 nt, Human
ccaccucuuuccaaaaaacug

SEQ ID NO: 987276 - RNA, 22 nt, Human
ccacugagcaacucccgagugc

SEQ ID NO: 987277 - RNA, 21 nt, Human
ccauaaaaagugaaaaaccac

SEQ ID NO: 987278 - RNA, 19 nt, Human
ccauggauucaccccauuc

SEQ ID NO: 987279 - RNA, 18 nt, Human
ccccuuucuccccuuccc

SEQ ID NO: 987280 - RNA, 22 nt, Human
ccgcagucccaccacgccuccu

SEQ ID NO: 987281 - RNA, 19 nt, Human
ccgcugcugccgccacugc

SEQ ID NO: 987282 - RNA, 23 nt, Human
ccugguuuuagggguugguggga

SEQ ID NO: 987283 - RNA, 18 nt, Human
cgagugcuccuaggccca

SEQ ID NO: 987284 - RNA, 21 nt, Human
cgcagucccaccacgccuccu

SEQ ID NO: 987285 - RNA, 19 nt, Human
cgguugaacaagugcaaag

SEQ ID NO: 987286 - RNA, 19 nt, Human
cucacaaaggcucuuccau

SEQ ID NO: 987287 - RNA, 22 nt, Human
cucacaaaggcucuuccaugga

SEQ ID NO: 987288 - RNA, 20 nt, Human
cucccagaaccgccgguccc

SEQ ID NO: 987289 - RNA, 19 nt, Human
cuccuggaaccccggcguc

SEQ ID NO: 987290 - RNA, 19 nt, Human
cucggcccugccauccuaa

SEQ ID NO: 987291 - RNA, 20 nt, Human
cucuggcagccccuuucucc

SEQ ID NO: 987292 - RNA, 23 nt, Human
cugaaaaugcagccgcaguccca

SEQ ID NO: 987293 - RNA, 18 nt, Human
cuggagcagcgcgugggg

SEQ ID NO: 987294 - RNA, 18 nt, Human
cuggcagccccuuucucc

SEQ ID NO: 987295 - RNA, 22 nt, Human
cugggcuuuccacccuuugucu

SEQ ID NO: 987296 - RNA, 21 nt, Human
cugggguuauacaaacugaga

SEQ ID NO: 987297 - RNA, 24 nt, Human
cuguaccuuguauuuucuagaacc

SEQ ID NO: 987298 - RNA, 22 nt, Human
cuguucuugauuuuccacuguu

SEQ ID NO: 987299 - RNA, 21 nt, Human
cuuuauuggucgcugcuccuc

SEQ ID NO: 987300 - RNA, 19 nt, Human
gacacaaaagacuaagaca

SEQ ID NO: 987301 - RNA, 18 nt, Human
gagcuucaaagacuagua

SEQ ID NO: 987302 - RNA, 18 nt, Human
gaggugguuucggagaug

SEQ ID NO: 987303 - RNA, 19 nt, Human
gaggugguuucggagaugg

SEQ ID NO: 987304 - RNA, 18 nt, Human
gcacagcugcucccagaa

SEQ ID NO: 987305 - RNA, 19 nt, Human
gcagacccauaaaaaguga

SEQ ID NO: 987306 - RNA, 24 nt, Human
gcagcauuucagaaacucaaucca

SEQ ID NO: 987307 - RNA, 25 nt, Human
gcugaacugaaucauuccuaaagaa

SEQ ID NO: 987308 - RNA, 21 nt, Human
ggaaagccagcgaggaagggg

SEQ ID NO: 987309 - RNA, 22 nt, Human
ggagacacaaaagacuaagaca

SEQ ID NO: 987310 - RNA, 22 nt, Human
ggaggugguuucggagaugggc

SEQ ID NO: 987311 - RNA, 23 nt, Human
gggcuuuccacccuuugucuuuu

SEQ ID NO: 987312 - RNA, 21 nt, Human
uaacucaacagaaaugugcua

SEQ ID NO: 987313 - RNA, 21 nt, Human
uaagacacaggugugugaaca

SEQ ID NO: 987314 - RNA, 19 nt, Human
uaagacagaucugaccaca

SEQ ID NO: 987315 - RNA, 21 nt, Human
uacaacacagaauaguucaaa

SEQ ID NO: 987316 - RNA, 24 nt, Human
uagcagcucggcccugccauccua

SEQ ID NO: 987317 - RNA, 22 nt, Human
uaggcauuuuaaacagcagcuu

SEQ ID NO: 987318 - RNA, 23 nt, Human
uauagaacuaaaguuuaagauga

SEQ ID NO: 987319 - RNA, 20 nt, Human
uccaccucuuuccaaaaaac

SEQ ID NO: 987320 - RNA, 22 nt, Human
uccaccucuuuccaaaaaacug

SEQ ID NO: 987321 - RNA, 18 nt, Human
uccaugcgcuuacugggg

SEQ ID NO: 987322 - RNA, 20 nt, Human
uccauggauucaccccauuc

SEQ ID NO: 987323 - RNA, 18 nt, Human
ucccaccacgccuccucc

SEQ ID NO: 987324 - RNA, 19 nt, Human
ucccaccacgccuccuccu

SEQ ID NO: 987325 - RNA, 21 nt, Human
ucccagaaccgccggucccug

SEQ ID NO: 987326 - RNA, 24 nt, Human
ucccagcgugguuuauguccugcc

SEQ ID NO: 987327 - RNA, 20 nt, Human
ucccuggagcagcgcguggg

SEQ ID NO: 987328 - RNA, 21 nt, Human
uccuaaagaaagugacuaagu

SEQ ID NO: 987329 - RNA, 23 nt, Human
ucucaugguguuggaggugguuu

SEQ ID NO: 987330 - RNA, 23 nt, Human
ucuuacuuuacaaucaagauuau

SEQ ID NO: 987331 - RNA, 22 nt, Human
ugaaacaaacaacacugaagua

SEQ ID NO: 987332 - RNA, 18 nt, Human
ugaacaagugcaaagaga

SEQ ID NO: 987333 - RNA, 19 nt, Human
ugaacugaaucauuccuaa

SEQ ID NO: 987334 - RNA, 23 nt, Human
ugacuaaguucccaugaggaauc

SEQ ID NO: 987335 - RNA, 19 nt, Human
ugagucccauuuguguuau

SEQ ID NO: 987336 - RNA, 21 nt, Human
ugcagccgcagucccaccacg

SEQ ID NO: 987337 - RNA, 23 nt, Human
ugccucuugcaaguaguacacac

SEQ ID NO: 987338 - RNA, 20 nt, Human
uggauuucaaaacuccccau

SEQ ID NO: 987339 - RNA, 18 nt, Human
uggggucgggguggggga

SEQ ID NO: 987340 - RNA, 20 nt, Human
ugguguuggaggugguuucg

SEQ ID NO: 987341 - RNA, 21 nt, Human
uucaaagacuaguaauucacc

SEQ ID NO: 987342 - RNA, 21 nt, Human
uucagaaacucaauccaccuc

SEQ ID NO: 987343 - RNA, 28 nt, Human
uucauggggaaagccagcgaggaagggg

SEQ ID NO: 987344 - RNA, 18 nt, Human
uuuaagaugaauauuguc

SEQ ID NO: 987345 - RNA, 18 nt, Human
uuuccaaaaaacuguacc

SEQ ID NO: 987346 - RNA, 21 nt, Human
uuuucuagaaccaacuucugg

SEQ ID NO: 987347 - RNA, 22 nt, Human
aaaaauaauagcaacaaaugug

SEQ ID NO: 987348 - RNA, 19 nt, Human
aaaacacacaaaaaugaaa

SEQ ID NO: 987349 - RNA, 19 nt, Human
aaaggcagaguaguccaca

SEQ ID NO: 987350 - RNA, 19 nt, Human
aagaagcacaugcagauug

SEQ ID NO: 987351 - RNA, 18 nt, Human
aagcagcagcagaaauuc

SEQ ID NO: 987352 - RNA, 20 nt, Human
acacaugauggcaaacaaga

SEQ ID NO: 987353 - RNA, 19 nt, Human
acagagcuucagaccacaa

SEQ ID NO: 987354 - RNA, 25 nt, Human
agaaaaacaaucauauauaugcagg

SEQ ID NO: 987355 - RNA, 19 nt, Human
aggaagauuaaaacacaca

SEQ ID NO: 987356 - RNA, 18 nt, Human
aggaugcuguauuccuug

SEQ ID NO: 987357 - RNA, 23 nt, Human
aggcagaaaaacaccaguaguuu

SEQ ID NO: 987358 - RNA, 21 nt, Human
aggcagaguaguccacaugca

SEQ ID NO: 987359 - RNA, 19 nt, Human
agguuguguaggcacugug

SEQ ID NO: 987360 - RNA, 21 nt, Human
auacauaagaagaacaguaua

SEQ ID NO: 987361 - RNA, 21 nt, Human
aucagauuccaccgguuuagu

SEQ ID NO: 987362 - RNA, 24 nt, Human
auggcaaacaagaacauuuugcuu

SEQ ID NO: 987363 - RNA, 18 nt, Human
caaaacaagccaacaacu

SEQ ID NO: 987364 - RNA, 21 nt, Human
caacagagcuucagaccacaa

SEQ ID NO: 987365 - RNA, 18 nt, Human
caagaucagauuccaccg

SEQ ID NO: 987366 - RNA, 25 nt, Human
caaggguaccagacccucuuaacug

SEQ ID NO: 987367 - RNA, 25 nt, Human
cacaacagagcuucagaccacaaag

SEQ ID NO: 987368 - RNA, 24 nt, Human
cacucacucucugguccagucuua

SEQ ID NO: 987369 - RNA, 20 nt, Human
cacugcaggcugaaaaacua

SEQ ID NO: 987370 - RNA, 19 nt, Human
cagcacacucacucucugg

SEQ ID NO: 987371 - RNA, 19 nt, Human
caguggaggagccagugga

SEQ ID NO: 987372 - RNA, 19 nt, Human
caucaccuaccuccgaguc

SEQ ID NO: 987373 - RNA, 19 nt, Human
caucuggacagucaagauu

SEQ ID NO: 987374 - RNA, 18 nt, Human
ccaaggcaaaguuagaau

SEQ ID NO: 987375 - RNA, 23 nt, Human
ccagcccucggccuggcggugca

SEQ ID NO: 987376 - RNA, 20 nt, Human
ccuagcuuguucaaauaucu

SEQ ID NO: 987377 - RNA, 19 nt, Human
ccuaugguggcuuccagca

SEQ ID NO: 987378 - RNA, 23 nt, Human
ccuccgagucgcugccgggcagg

SEQ ID NO: 987379 - RNA, 18 nt, Human
cgcggcgcguuaccuucc

SEQ ID NO: 987380 - RNA, 22 nt, Human
cggcgcguuaccuucccccggg

SEQ ID NO: 987381 - RNA, 21 nt, Human
cucaaggcagaaaaacaccag

SEQ ID NO: 987382 - RNA, 22 nt, Human
cucaaggcagaaaaacaccagu

SEQ ID NO: 987383 - RNA, 20 nt, Human
cucagaauuauaaaauaaac

SEQ ID NO: 987384 - RNA, 24 nt, Human
cugaauuguaccuauggccagugg

SEQ ID NO: 987385 - RNA, 22 nt, Human
cugcaaccaggaagauuaaaac

SEQ ID NO: 987386 - RNA, 26 nt, Human
cugcaaccaggaagauuaaaacacac

SEQ ID NO: 987387 - RNA, 18 nt, Human
cugcaaggguaccagacc

SEQ ID NO: 987388 - RNA, 23 nt, Human
cugcaaggguaccagacccucuu

SEQ ID NO: 987389 - RNA, 18 nt, Human
cugcgacuuuuucccaca

SEQ ID NO: 987390 - RNA, 22 nt, Human
cuggcccccagcccucggccug

SEQ ID NO: 987391 - RNA, 24 nt, Human
cuguuuguuuucucaaggcagaaa

SEQ ID NO: 987392 - RNA, 20 nt, Human
gcagccccgggcgcggcgcg

SEQ ID NO: 987393 - RNA, 19 nt, Human
gcccccagcccucggccug

SEQ ID NO: 987394 - RNA, 19 nt, Human
gguccuuuuuuuuuuuuau

SEQ ID NO: 987395 - RNA, 20 nt, Human
gugaaacacaugauggcaaa

SEQ ID NO: 987396 - RNA, 23 nt, Human
gugaaacacaugauggcaaacaa

SEQ ID NO: 987397 - RNA, 19 nt, Human
guuuguuuucucaaggcag

SEQ ID NO: 987398 - RNA, 23 nt, Human
guuuguuuucucaaggcagaaaa

SEQ ID NO: 987399 - RNA, 22 nt, Human
uaaaaaaauaaacucauaaaaa

SEQ ID NO: 987400 - RNA, 18 nt, Human
uaaaaauacaggcuugag

SEQ ID NO: 987401 - RNA, 22 nt, Human
uaaaacacacaaaaaugaaaua

SEQ ID NO: 987402 - RNA, 18 nt, Human
uaaaggcagaguagucca

SEQ ID NO: 987403 - RNA, 21 nt, Human
uaacaauaccccauguuuaau

SEQ ID NO: 987404 - RNA, 23 nt, Human
uaacuguuuguuuucucaaggca

SEQ ID NO: 987405 - RNA, 24 nt, Human
uaagaaaaacaaucauauauaugc

SEQ ID NO: 987406 - RNA, 19 nt, Human
uaagugcucuuucccauga

SEQ ID NO: 987407 - RNA, 22 nt, Human
uaaguugaaaacauacuuuuau

SEQ ID NO: 987408 - RNA, 19 nt, Human
uacauuugaggcuuguuuu

SEQ ID NO: 987409 - RNA, 21 nt, Human
uagcaagauccuaagugcucu

SEQ ID NO: 987410 - RNA, 23 nt, Human
uagcaaggaguugaaccaaauac

SEQ ID NO: 987411 - RNA, 18 nt, Human
uauaguaaaguuauaaga

SEQ ID NO: 987412 - RNA, 23 nt, Human
ucaguggaggagccaguggaauu

SEQ ID NO: 987413 - RNA, 18 nt, Human
ucucagggcugaacaacu

SEQ ID NO: 987414 - RNA, 22 nt, Human
ucugcaccugucgucaauucau

SEQ ID NO: 987415 - RNA, 22 nt, Human
ugaacaacuaagacugcaacca

SEQ ID NO: 987416 - RNA, 19 nt, Human
ugaagcagcagcagaaauu

SEQ ID NO: 987417 - RNA, 22 nt, Human
ugaauuguaccuauggccagug

SEQ ID NO: 987418 - RNA, 23 nt, Human
ugagaaaauggauuaucagguug

SEQ ID NO: 987419 - RNA, 18 nt, Human
uggccaguggguggcacu

SEQ ID NO: 987420 - RNA, 18 nt, Human
uguaccuauggccagugg

SEQ ID NO: 987421 - RNA, 18 nt, Human
uguuuagugagcaugagg

SEQ ID NO: 987422 - RNA, 20 nt, Human
uguuuguuuucucaaggcag

SEQ ID NO: 987423 - RNA, 22 nt, Human
uguuuguuuucucaaggcagaa

SEQ ID NO: 987424 - RNA, 24 nt, Human
uguuuguuuucucaaggcagaaaa

SEQ ID NO: 987425 - RNA, 20 nt, Human
uuaaucuaugaacaaacaug

SEQ ID NO: 987426 - RNA, 21 nt, Human
uuaaucuaugaacaaacaugg

SEQ ID NO: 987427 - RNA, 23 nt, Human
uucuuaacaauaccccauguuua

SEQ ID NO: 987428 - RNA, 24 nt, Human
uucuuacaauugucagaaaacauu

SEQ ID NO: 987429 - RNA, 22 nt, Human
uugaaaauauaaauuauuuaga

SEQ ID NO: 987430 - RNA, 18 nt, Human
uuguccaccuacucagau

SEQ ID NO: 987431 - RNA, 24 nt, Human
uuuuccuagcuuguucaaauaucu

SEQ ID NO: 987432 - RNA, 21 nt, Human
aaccuggaaccuugaggccuu

SEQ ID NO: 987433 - RNA, 22 nt, Human
aagaggagauaacccaccagag

SEQ ID NO: 987434 - RNA, 21 nt, Human
acaucucaaagaggagauaac

SEQ ID NO: 987435 - RNA, 23 nt, Human
agauaccaauaggcgguuaagcc

SEQ ID NO: 987436 - RNA, 20 nt, Human
cacugcauggaccaagcgcu

SEQ ID NO: 987437 - RNA, 18 nt, Human
cacugcauggaccaagcu

SEQ ID NO: 987438 - RNA, 19 nt, Human
cagugccucacgccugcug

SEQ ID NO: 987439 - RNA, 18 nt, Human
caugaaaagcucagcccg

SEQ ID NO: 987440 - RNA, 23 nt, Human
ccagcaggggcaacgccucuucc

SEQ ID NO: 987441 - RNA, 25 nt, Human
cccugcaccugguucguagccccuc

SEQ ID NO: 987442 - RNA, 21 nt, Human
ccucuucccuccuuagaucca

SEQ ID NO: 987443 - RNA, 21 nt, Human
ggaccaagcgcucacgcccuu

SEQ ID NO: 987444 - RNA, 24 nt, Human
uaacccaccagaggcuuagguaac

SEQ ID NO: 987445 - RNA, 19 nt, Human
ucaaaggggucuccagcug

SEQ ID NO: 987446 - RNA, 20 nt, Human
uggaaccuugaggccuucau

SEQ ID NO: 987447 - RNA, 28 nt, Human
ugggacagggccgcagauggagacugcu

SEQ ID NO: 987448 - RNA, 19 nt, Human
uucguagccccucugcaga

SEQ ID NO: 987449 - RNA, 21 nt, Human
uuuauuaaaaucuggccauuu

SEQ ID NO: 987450 - RNA, 19 nt, Human
aaaaaguuguuuuaaaagc

SEQ ID NO: 987451 - RNA, 21 nt, Human
aaaacaaccagacaaggagag

SEQ ID NO: 987452 - RNA, 18 nt, Human
aaaacaggaacugaaagc

SEQ ID NO: 987453 - RNA, 18 nt, Human
aaaagaagaacaagucug

SEQ ID NO: 987454 - RNA, 21 nt, Human
aaaagagcaaguuacagcccg

SEQ ID NO: 987455 - RNA, 18 nt, Human
aaagaaaagcauuagacc

SEQ ID NO: 987456 - RNA, 22 nt, Human
aaagaaaagcauuagaccaaag

SEQ ID NO: 987457 - RNA, 20 nt, Human
aaaugcuuauucuugagacu

SEQ ID NO: 987458 - RNA, 22 nt, Human
aagaaaaaauggacucugaaaa

SEQ ID NO: 987459 - RNA, 21 nt, Human
aagaagaacaagucugcauca

SEQ ID NO: 987460 - RNA, 21 nt, Human
aagcagcuccauuauaagagu

SEQ ID NO: 987461 - RNA, 21 nt, Human
aagcaggaagucagaauaaca

SEQ ID NO: 987462 - RNA, 24 nt, Human
aagcaggaagucagaauaacaggg

SEQ ID NO: 987463 - RNA, 31 nt, Human
aauacauguuuguacacacacacacacagug

SEQ ID NO: 987464 - RNA, 23 nt, Human
acacacacacacacacacacaca

SEQ ID NO: 987465 - RNA, 23 nt, Human
acacacacacacacacacacaca

SEQ ID NO: 987466 - RNA, 23 nt, Human
acacacacacacacacacacaca

SEQ ID NO: 987467 - RNA, 23 nt, Human
acacacacacacacacacacaua

SEQ ID NO: 987468 - RNA, 23 nt, Human
acacacacacacacacacauaca

SEQ ID NO: 987469 - RNA, 23 nt, Human
acacacacacacacauacacaca

SEQ ID NO: 987470 - RNA, 25 nt, Human
acacacacacacacauacacacaua

SEQ ID NO: 987471 - RNA, 23 nt, Human
acacacacacauacacacauaca

SEQ ID NO: 987472 - RNA, 27 nt, Human
acacacacauacacacauacacacaua

SEQ ID NO: 987473 - RNA, 18 nt, Human
acacacauacacacauac

SEQ ID NO: 987474 - RNA, 23 nt, Human
acacaccccagacgcaaacacua

SEQ ID NO: 987475 - RNA, 24 nt, Human
acacauacacacauacacauuaaa

SEQ ID NO: 987476 - RNA, 23 nt, Human
acauacacacauacacacauaca

SEQ ID NO: 987477 - RNA, 22 nt, Human
accacuguggcugcccuuaauc

SEQ ID NO: 987478 - RNA, 23 nt, Human
accagaguugccuguaaucccag

SEQ ID NO: 987479 - RNA, 19 nt, Human
accccgcucgacggccgag

SEQ ID NO: 987480 - RNA, 22 nt, Human
acccugcuucccagagccuuaa

SEQ ID NO: 987481 - RNA, 18 nt, Human
acgcuuaugagaauagaa

SEQ ID NO: 987482 - RNA, 23 nt, Human
acuagauuauacacagaaacauu

SEQ ID NO: 987483 - RNA, 23 nt, Human
agacagaagauaaaaaggggacc

SEQ ID NO: 987484 - RNA, 24 nt, Human
agacagaugugguacaugaggaaa

SEQ ID NO: 987485 - RNA, 20 nt, Human
agaccaaagcaagguggaaa

SEQ ID NO: 987486 - RNA, 24 nt, Human
agcacuuugggaggcugaggcagg

SEQ ID NO: 987487 - RNA, 24 nt, Human
agccugggcaacacagggcgacuc

SEQ ID NO: 987488 - RNA, 19 nt, Human
aggaaaucaguuagcagcu

SEQ ID NO: 987489 - RNA, 23 nt, Human
aggaacugaaagcucaucaagca

SEQ ID NO: 987490 - RNA, 23 nt, Human
aggaguucaagaccagccugggc

SEQ ID NO: 987491 - RNA, 22 nt, Human
aggcaggaggaucucuugagcc

SEQ ID NO: 987492 - RNA, 23 nt, Human
aggcaggaggaucucuugagccu

SEQ ID NO: 987493 - RNA, 24 nt, Human
aggcaggaggaucucuugagccua

SEQ ID NO: 987494 - RNA, 24 nt, Human
aggcugaggcaggaggaucucuug

SEQ ID NO: 987495 - RNA, 18 nt, Human
agggagacucugucuaca

SEQ ID NO: 987496 - RNA, 29 nt, Human
agucaaaauacauuaucuaauuaaagugg

SEQ ID NO: 987497 - RNA, 22 nt, Human
agucucuucucuccucuccuuu

SEQ ID NO: 987498 - RNA, 33 nt, Human
auacauguuuguacacacacacacacacacagu

SEQ ID NO: 987499 - RNA, 20 nt, Human
auagcaaaaacaggaacuga

SEQ ID NO: 987500 - RNA, 22 nt, Human
auagcaaaaacaggaacugaaa

SEQ ID NO: 987501 - RNA, 21 nt, Human
augaaacuuagcucacuagac

SEQ ID NO: 987502 - RNA, 18 nt, Human
augagaauagaaagguca

SEQ ID NO: 987503 - RNA, 19 nt, Human
caaaaacaggaacugaaag

SEQ ID NO: 987504 - RNA, 22 nt, Human
caaaacaaccagacaaggagag

SEQ ID NO: 987505 - RNA, 26 nt, Human
caaaagcagcuccauuauaagagucc

SEQ ID NO: 987506 - RNA, 19 nt, Human
caaacacuaagacagaugu

SEQ ID NO: 987507 - RNA, 20 nt, Human
cacacacacacacacacaca

SEQ ID NO: 987508 - RNA, 20 nt, Human
cacacacacacacacacaca

SEQ ID NO: 987509 - RNA, 20 nt, Human
cacacacacacacacacaca

SEQ ID NO: 987510 - RNA, 20 nt, Human
cacacacacacacacacaca

SEQ ID NO: 987511 - RNA, 20 nt, Human
cacacacacacacacacaca

SEQ ID NO: 987512 - RNA, 20 nt, Human
cacacacacacacacacaca

SEQ ID NO: 987513 - RNA, 20 nt, Human
cacacacacacacacacaca

SEQ ID NO: 987514 - RNA, 22 nt, Human
cacacacacacacacacacaca

SEQ ID NO: 987515 - RNA, 22 nt, Human
cacacacacacacacacacaca

SEQ ID NO: 987516 - RNA, 22 nt, Human
cacacacacacacacacacaca

SEQ ID NO: 987517 - RNA, 22 nt, Human
cacacacacacacacacacaca

SEQ ID NO: 987518 - RNA, 26 nt, Human
cacacacacacacacacacacacaca

SEQ ID NO: 987519 - RNA, 26 nt, Human
cacacacacacacacacacacacaca

SEQ ID NO: 987520 - RNA, 26 nt, Human
cacacacacacacacacacacacaua

SEQ ID NO: 987521 - RNA, 22 nt, Human
cacacacacacacacacacaua

SEQ ID NO: 987522 - RNA, 26 nt, Human
cacacacacacacacacacauacaca

SEQ ID NO: 987523 - RNA, 20 nt, Human
cacacacacacacacacaua

SEQ ID NO: 987524 - RNA, 19 nt, Human
cacacacacacacacauac

SEQ ID NO: 987525 - RNA, 28 nt, Human
cacacacacacacacauacacacauaca

SEQ ID NO: 987526 - RNA, 28 nt, Human
cacacacacacauacacacauacacaca

SEQ ID NO: 987527 - RNA, 22 nt, Human
cacacacacauacacacauaca

SEQ ID NO: 987528 - RNA, 20 nt, Human
cacagggcgacucagucucu

SEQ ID NO: 987529 - RNA, 24 nt, Human
cagcacuuugggaggcugaggcag

SEQ ID NO: 987530 - RNA, 25 nt, Human
cagcacuuugggaggcugaggcagg

SEQ ID NO: 987531 - RNA, 23 nt, Human
cagucucuucucuccucuccuuu

SEQ ID NO: 987532 - RNA, 27 nt, Human
cagucucuucucuccucuccuuugaaa

SEQ ID NO: 987533 - RNA, 19 nt, Human
cauaagaaaaaauggacuc

SEQ ID NO: 987534 - RNA, 18 nt, Human
cauaaugagauuugcaga

SEQ ID NO: 987535 - RNA, 21 nt, Human
cauacauacaguagaaaccac

SEQ ID NO: 987536 - RNA, 22 nt, Human
cauuacaauugcaauccacacc

SEQ ID NO: 987537 - RNA, 22 nt, Human
cccagagccuuaaaacccagac

SEQ ID NO: 987538 - RNA, 23 nt, Human
ccccaacauuccugucuuuacua

SEQ ID NO: 987539 - RNA, 18 nt, Human
ccccagacgcaaacacua

SEQ ID NO: 987540 - RNA, 21 nt, Human
cccgggaucccaaguuaugcc

SEQ ID NO: 987541 - RNA, 24 nt, Human
cccucgccagggcuggaccugcag

SEQ ID NO: 987542 - RNA, 19 nt, Human
ccucucugcuauacacucc

SEQ ID NO: 987543 - RNA, 21 nt, Human
ccuuccauuacaauugcaauc

SEQ ID NO: 987544 - RNA, 26 nt, Human
cuagaaaaguuaaauuuaaaagccaa

SEQ ID NO: 987545 - RNA, 19 nt, Human
cuauacacuccuuccacac

SEQ ID NO: 987546 - RNA, 18 nt, Human
cucucacugggcauccuc

SEQ ID NO: 987547 - RNA, 18 nt, Human
cugaggcaggaggaucuc

SEQ ID NO: 987548 - RNA, 20 nt, Human
cuguuugauaacacacccca

SEQ ID NO: 987549 - RNA, 21 nt, Human
cuuagagcccuuaacaguccc

SEQ ID NO: 987550 - RNA, 24 nt, Human
cuucaaaacaaccagacaaggaga

SEQ ID NO: 987551 - RNA, 23 nt, Human
cuucccagagccuuaaaacccag

SEQ ID NO: 987552 - RNA, 24 nt, Human
gaaacugcuuaaaaacuagaaaag

SEQ ID NO: 987553 - RNA, 22 nt, Human
gacucuguugaaagggauuucc

SEQ ID NO: 987554 - RNA, 23 nt, Human
gagcccuuaacaguccccagccu

SEQ ID NO: 987555 - RNA, 19 nt, Human
gagcuaccagaguugccug

SEQ ID NO: 987556 - RNA, 20 nt, Human
gauaacacuuggcucuucug

SEQ ID NO: 987557 - RNA, 18 nt, Human
gcagaaaauucagcaugg

SEQ ID NO: 987558 - RNA, 18 nt, Human
gccucaacacacuacacc

SEQ ID NO: 987559 - RNA, 20 nt, Human
gccugggcaacacagggcga

SEQ ID NO: 987560 - RNA, 19 nt, Human
gccuguaaucccagcacuu

SEQ ID NO: 987561 - RNA, 28 nt, Human
ggaaacaauagcaaaaacaggaaccggu

SEQ ID NO: 987562 - RNA, 22 nt, Human
guaccagaagaugaaacuuagc

SEQ ID NO: 987563 - RNA, 23 nt, Human
gucucuucucuccucuccuuuga

SEQ ID NO: 987564 - RNA, 20 nt, Human
gugggaaacaaaagagcaag

SEQ ID NO: 987565 - RNA, 24 nt, Human
guugccuguaaucccagcacuuug

SEQ ID NO: 987566 - RNA, 24 nt, Human
uaaacuagauuauacacagaaaca

SEQ ID NO: 987567 - RNA, 20 nt, Human
uacacacacacacacacaca

SEQ ID NO: 987568 - RNA, 25 nt, Human
uacacacacacacacacacacacac

SEQ ID NO: 987569 - RNA, 22 nt, Human
uacacacauacacacauacaca

SEQ ID NO: 987570 - RNA, 24 nt, Human
uacacacauacacacauacacauu

SEQ ID NO: 987571 - RNA, 20 nt, Human
uacccucagucacucugguc

SEQ ID NO: 987572 - RNA, 23 nt, Human
uacuaaccaacccugcuucccag

SEQ ID NO: 987573 - RNA, 22 nt, Human
uagcaaaaacaggaacugaaag

SEQ ID NO: 987574 - RNA, 21 nt, Human
uagcaagacagaagauaaaaa

SEQ ID NO: 987575 - RNA, 18 nt, Human
ucaaaauacauuaucuaa

SEQ ID NO: 987576 - RNA, 19 nt, Human
ucaaaauacauuaucuaau

SEQ ID NO: 987577 - RNA, 25 nt, Human
ucacuagacccuucuuugaaaagcc

SEQ ID NO: 987578 - RNA, 19 nt, Human
ucagucucuucucuccucu

SEQ ID NO: 987579 - RNA, 18 nt, Human
ucccagagccuuaaaacc

SEQ ID NO: 987580 - RNA, 26 nt, Human
uccccaacauuccugucuuuacuguc

SEQ ID NO: 987581 - RNA, 23 nt, Human
ucccccaaaggucuaguaaagau

SEQ ID NO: 987582 - RNA, 24 nt, Human
uccucugagaucagcuagaagcuc

SEQ ID NO: 987583 - RNA, 21 nt, Human
uccuuccacacacaacuuugg

SEQ ID NO: 987584 - RNA, 23 nt, Human
ucucuugagccuaggaguucaag

SEQ ID NO: 987585 - RNA, 24 nt, Human
ucuugagccuaggaguucaagacc

SEQ ID NO: 987586 - RNA, 23 nt, Human
ugagccuaggaguucaagaccag

SEQ ID NO: 987587 - RNA, 20 nt, Human
ugaggcaggaggaucucuug

SEQ ID NO: 987588 - RNA, 24 nt, Human
ugaggcaggaggaucucuugagcc

SEQ ID NO: 987589 - RNA, 25 nt, Human
ugaggcaggaggaucucuugagccu

SEQ ID NO: 987590 - RNA, 18 nt, Human
ugauagcaagacagaaga

SEQ ID NO: 987591 - RNA, 24 nt, Human
ugcagaaaauucagcaugggcugg

SEQ ID NO: 987592 - RNA, 21 nt, Human
ugcccuuaauccagugugcuu

SEQ ID NO: 987593 - RNA, 23 nt, Human
ugccuguaaucccagcacuuugg

SEQ ID NO: 987594 - RNA, 23 nt, Human
ugccuguaaucccagcacuuugg

SEQ ID NO: 987595 - RNA, 24 nt, Human
ugccuguaaucccagcacuuuggg

SEQ ID NO: 987596 - RNA, 24 nt, Human
ugcucuugauuucuucacuuccuc

SEQ ID NO: 987597 - RNA, 21 nt, Human
ugcuuuucaaaagcagcucca

SEQ ID NO: 987598 - RNA, 25 nt, Human
uggaaaaagcuugggaauucuguua

SEQ ID NO: 987599 - RNA, 21 nt, Human
uggcucuucugguugacacag

SEQ ID NO: 987600 - RNA, 20 nt, Human
ugggaggcugaggcaggagg

SEQ ID NO: 987601 - RNA, 23 nt, Human
ugggaggcugaggcaggaggauc

SEQ ID NO: 987602 - RNA, 23 nt, Human
ugggauguagaccaugcucuguu

SEQ ID NO: 987603 - RNA, 25 nt, Human
uguacacacacacacacacacacac

SEQ ID NO: 987604 - RNA, 25 nt, Human
uguacacacacacacacacacacag

SEQ ID NO: 987605 - RNA, 25 nt, Human
ugucuacauucccuuagagcccuua

SEQ ID NO: 987606 - RNA, 21 nt, Human
uguggcugacuggccaacgcc

SEQ ID NO: 987607 - RNA, 21 nt, Human
uuacagcccgggaucccaagu

SEQ ID NO: 987608 - RNA, 19 nt, Human
uucccagagccuuaaaacc

SEQ ID NO: 987609 - RNA, 21 nt, Human
uucccagagccuuaaaaccca

SEQ ID NO: 987610 - RNA, 23 nt, Human
uuuacuaaccaacccugcuuccc

SEQ ID NO: 987611 - RNA, 23 nt, Human
uuuauuuuuucuuuuucuuuuuu

SEQ ID NO: 987612 - RNA, 22 nt, Human
uuucaaagaaaagcauuagacu

SEQ ID NO: 987613 - RNA, 24 nt, Human
uuugacaagugagaaagcuuuauu

SEQ ID NO: 987614 - RNA, 19 nt, Human
uuugcagaaaauacauguu

SEQ ID NO: 987615 - RNA, 24 nt, Human
uuuuucuucuacucuucuuucuuc

SEQ ID NO: 987616 - RNA, 23 nt, Human
uuuuuuuuuuuuuuuuugacaag

SEQ ID NO: 987617 - RNA, 27 nt, Human
uuuuuuuuuuuuuuuuuuuuuuugggg

SEQ ID NO: 987618 - RNA, 18 nt, Human
aaauccuccuaaccccuc

SEQ ID NO: 987619 - RNA, 24 nt, Human
aacccaccaauuccagacacauua

SEQ ID NO: 987620 - RNA, 18 nt, Human
acaaauggcuaaaggccc

SEQ ID NO: 987621 - RNA, 22 nt, Human
agagacaaauggcuaaaggccc

SEQ ID NO: 987622 - RNA, 18 nt, Human
agcaucaaaaccaagccu

SEQ ID NO: 987623 - RNA, 21 nt, Human
agcccagcccaguagcugcuc

SEQ ID NO: 987624 - RNA, 22 nt, Human
agccucuggaccagccauuccu

SEQ ID NO: 987625 - RNA, 24 nt, Human
aggcccuggcaccauuccuggaug

SEQ ID NO: 987626 - RNA, 22 nt, Human
agugguggaaauccaagaagga

SEQ ID NO: 987627 - RNA, 19 nt, Human
caagaccaagaacccacca

SEQ ID NO: 987628 - RNA, 25 nt, Human
cagaauccuuggcaggcagagcuuc

SEQ ID NO: 987629 - RNA, 21 nt, Human
cagcaagaccaagaacccacc

SEQ ID NO: 987630 - RNA, 21 nt, Human
caucugcgcacgcacgcacgg

SEQ ID NO: 987631 - RNA, 26 nt, Human
ccauuccuucucucucuccaaguccu

SEQ ID NO: 987632 - RNA, 21 nt, Human
cccagcagugaccagcugguc

SEQ ID NO: 987633 - RNA, 23 nt, Human
ccccaucugccacuggaaccaga

SEQ ID NO: 987634 - RNA, 19 nt, Human
ccccuaagcaggcuaaccu

SEQ ID NO: 987635 - RNA, 19 nt, Human
ccccucuggccagugcccc

SEQ ID NO: 987636 - RNA, 23 nt, Human
ccgcagcccagcccaguagcugc

SEQ ID NO: 987637 - RNA, 23 nt, Human
ccgugugggcuccuagcaggccc

SEQ ID NO: 987638 - RNA, 19 nt, Human
ccuacauuccagguacccc

SEQ ID NO: 987639 - RNA, 20 nt, Human
ccuucucucucuccaagucc

SEQ ID NO: 987640 - RNA, 20 nt, Human
cgcacgcacgcacggugcug

SEQ ID NO: 987641 - RNA, 23 nt, Human
cuagcccuuccccuaagcaggcu

SEQ ID NO: 987642 - RNA, 18 nt, Human
cuggucucagcuuccagc

SEQ ID NO: 987643 - RNA, 19 nt, Human
cuuccagugagagggagug

SEQ ID NO: 987644 - RNA, 24 nt, Human
cuucccagggccaggcagaauccu

SEQ ID NO: 987645 - RNA, 23 nt, Human
cuucucuucccagggccaggcag

SEQ ID NO: 987646 - RNA, 18 nt, Human
cuuggauuugggacugga

SEQ ID NO: 987647 - RNA, 24 nt, Human
gagcauggcuaaaacacuggguac

SEQ ID NO: 987648 - RNA, 23 nt, Human
gcagugaccagcuggucucagcu

SEQ ID NO: 987649 - RNA, 18 nt, Human
ggagaucaaccacuucca

SEQ ID NO: 987650 - RNA, 23 nt, Human
ggagugugaggagagacaaaugg

SEQ ID NO: 987651 - RNA, 20 nt, Human
ggguaucagguagggcuagc

SEQ ID NO: 987652 - RNA, 19 nt, Human
gguauuggaaggcugaugg

SEQ ID NO: 987653 - RNA, 20 nt, Human
guccugagucugaagaacuu

SEQ ID NO: 987654 - RNA, 21 nt, Human
guuucagggaagugguggaaa

SEQ ID NO: 987655 - RNA, 22 nt, Human
uaaaggcccuggcaccauuccu

SEQ ID NO: 987656 - RNA, 22 nt, Human
uaaccccucuggccagugcccc

SEQ ID NO: 987657 - RNA, 21 nt, Human
uacaugaacaucucuccccuu

SEQ ID NO: 987658 - RNA, 23 nt, Human
uagagugugguuaaagaaucuug

SEQ ID NO: 987659 - RNA, 24 nt, Human
uagagugugguuaaagaaucuugg

SEQ ID NO: 987660 - RNA, 18 nt, Human
uccaaauccuccuaaccc

SEQ ID NO: 987661 - RNA, 23 nt, Human
ucccuggagaucaaccacuucca

SEQ ID NO: 987662 - RNA, 25 nt, Human
ucucucucuccaaguccuuuuuccu

SEQ ID NO: 987663 - RNA, 21 nt, Human
ucucuucccagggccaggcag

SEQ ID NO: 987664 - RNA, 24 nt, Human
ucugaagaacuuuuagaguguggu

SEQ ID NO: 987665 - RNA, 23 nt, Human
ucuggccagugccccaucugcca

SEQ ID NO: 987666 - RNA, 18 nt, Human
ugaacaucucuccccuuc

SEQ ID NO: 987667 - RNA, 24 nt, Human
ugaagucagcaagaccaagaaccc

SEQ ID NO: 987668 - RNA, 25 nt, Human
ugccccaucugccacuggaaccagu

SEQ ID NO: 987669 - RNA, 19 nt, Human
uggcugugggcagcuuccg

SEQ ID NO: 987670 - RNA, 18 nt, Human
uguggaggucaggguugg

SEQ ID NO: 987671 - RNA, 19 nt, Human
ugugggcuccuagcaggcc

SEQ ID NO: 987672 - RNA, 24 nt, Human
uguuuaaaauacccuuaaaccugg

SEQ ID NO: 987673 - RNA, 18 nt, Human
uuaaaccugguauuggaa

SEQ ID NO: 987674 - RNA, 24 nt, Human
uuaaaccugguauuggaaggcuga

SEQ ID NO: 987675 - RNA, 22 nt, Human
uucagggaagugguggaaaucc

SEQ ID NO: 987676 - RNA, 19 nt, Human
uuccagguaccccuagccc

SEQ ID NO: 987677 - RNA, 25 nt, Human
uugaagucagcaagaccaagaaccc

SEQ ID NO: 987678 - RNA, 27 nt, Human
uugaagucagcaagaccaagaacccac

SEQ ID NO: 987679 - RNA, 22 nt, Human
uuggaaggcugaugaugcagca

SEQ ID NO: 987680 - RNA, 18 nt, Human
uuugaggcucuggugucu

SEQ ID NO: 987681 - RNA, 24 nt, Human
aaaaagcaccgcggccacaggccc

SEQ ID NO: 987682 - RNA, 19 nt, Human
aagcaccgcggccacaggc

SEQ ID NO: 987683 - RNA, 18 nt, Human
aagcggagaggucaccgu

SEQ ID NO: 987684 - RNA, 18 nt, Human
acagggcacagagucaga

SEQ ID NO: 987685 - RNA, 18 nt, Human
agacccuaggcagccgga

SEQ ID NO: 987686 - RNA, 22 nt, Human
agcuucccagacccuaggcagc

SEQ ID NO: 987687 - RNA, 18 nt, Human
aggagccccggagaggga

SEQ ID NO: 987688 - RNA, 19 nt, Human
aggagcgcgacgguggggg

SEQ ID NO: 987689 - RNA, 19 nt, Human
ccagacccuaggcagccgg

SEQ ID NO: 987690 - RNA, 20 nt, Human
cccacgagcucagggacagg

SEQ ID NO: 987691 - RNA, 21 nt, Human
ccgagcagcaagauucugagc

SEQ ID NO: 987692 - RNA, 21 nt, Human
gaacagcaaauguuuagagga

SEQ ID NO: 987693 - RNA, 21 nt, Human
gagcugggggaaaauuaaaaa

SEQ ID NO: 987694 - RNA, 18 nt, Human
gaggggugggagcaggag

SEQ ID NO: 987695 - RNA, 19 nt, Human
gauucugagcugggggaaa

SEQ ID NO: 987696 - RNA, 21 nt, Human
ggggaaaauuaaaaagcaccg

SEQ ID NO: 987697 - RNA, 22 nt, Human
ggggggccggaggggugggagc

SEQ ID NO: 987698 - RNA, 20 nt, Human
uagaauguauauucaaaaac

SEQ ID NO: 987699 - RNA, 21 nt, Human
ucccguugaguuguugcucuc

SEQ ID NO: 987700 - RNA, 18 nt, Human
uccuucgguuauuuuggc

SEQ ID NO: 987701 - RNA, 19 nt, Human
ucuggugaacggucuuucc

SEQ ID NO: 987702 - RNA, 23 nt, Human
ugcccgagcuucccagacccuag

SEQ ID NO: 987703 - RNA, 19 nt, Human
ugggggggccggaggggug

SEQ ID NO: 987704 - RNA, 20 nt, Human
ugggggggccggaggggugg

SEQ ID NO: 987705 - RNA, 24 nt, Human
ugggggggccggaggggugggagc

SEQ ID NO: 987706 - RNA, 19 nt, Human
uguuccacgggucaucuuc

SEQ ID NO: 987707 - RNA, 18 nt, Human
uuagaggagccaagucug

SEQ ID NO: 987708 - RNA, 23 nt, Human
uuggcagcagggcguaacccuuc

SEQ ID NO: 987709 - RNA, 22 nt, Human
uuucaugguuacagcauauaau

SEQ ID NO: 987710 - RNA, 25 nt, Human
uuuuuuuuuuuuuuuuuuuucaugg

SEQ ID NO: 987711 - RNA, 20 nt, Human
aaaaggugaauucgugaaau

SEQ ID NO: 987712 - RNA, 23 nt, Human
aaacacaagaugaaaaucaagca

SEQ ID NO: 987713 - RNA, 22 nt, Human
aaaccagacacaggaacuccaa

SEQ ID NO: 987714 - RNA, 25 nt, Human
aagaugaaaaucaagcagaaaaaga

SEQ ID NO: 987715 - RNA, 23 nt, Human
aagcaaaacacaagaugaaaauc

SEQ ID NO: 987716 - RNA, 26 nt, Human
aagcagaaaaagaaaauaagggaccc

SEQ ID NO: 987717 - RNA, 23 nt, Human
aagcagaaaaagaaaauaauaua

SEQ ID NO: 987718 - RNA, 20 nt, Human
aagcauuuuuaaaaggcugu

SEQ ID NO: 987719 - RNA, 24 nt, Human
aaguacugacaggcugcaaacacc

SEQ ID NO: 987720 - RNA, 22 nt, Human
aaugauaauacugaauuccaaa

SEQ ID NO: 987721 - RNA, 23 nt, Human
aauuuuuauuuaagaacugaaaa

SEQ ID NO: 987722 - RNA, 24 nt, Human
acacgacuucaucucaaaggauac

SEQ ID NO: 987723 - RNA, 19 nt, Human
acagugguucuuuaaaaug

SEQ ID NO: 987724 - RNA, 19 nt, Human
accagacacaggaacucca

SEQ ID NO: 987725 - RNA, 22 nt, Human
acuaacacaauuuacagacuuc

SEQ ID NO: 987726 - RNA, 21 nt, Human
acuuccaucugcagccuucau

SEQ ID NO: 987727 - RNA, 18 nt, Human
auaaccuuauuuugagac

SEQ ID NO: 987728 - RNA, 21 nt, Human
auccagaauacaacaggugac

SEQ ID NO: 987729 - RNA, 22 nt, Human
auccugaucugccucucuucca

SEQ ID NO: 987730 - RNA, 18 nt, Human
auucacauacauuuaucu

SEQ ID NO: 987731 - RNA, 23 nt, Human
auuuaguggcuuacgaccaacac

SEQ ID NO: 987732 - RNA, 21 nt, Human
cacaagaugaaaaucaagcag

SEQ ID NO: 987733 - RNA, 22 nt, Human
cacaguuacaaguucuggagac

SEQ ID NO: 987734 - RNA, 25 nt, Human
caccaguaacaaccugccuggagcc

SEQ ID NO: 987735 - RNA, 20 nt, Human
cagaauacaacaggugacua

SEQ ID NO: 987736 - RNA, 20 nt, Human
cagcuguucggcucucccgg

SEQ ID NO: 987737 - RNA, 20 nt, Human
caggcugcaaacaccaguaa

SEQ ID NO: 987738 - RNA, 23 nt, Human
cagugaacucucuucagcuguuc

SEQ ID NO: 987739 - RNA, 22 nt, Human
cauccugaucugccucucuucc

SEQ ID NO: 987740 - RNA, 18 nt, Human
cauuacucugggcaucac

SEQ ID NO: 987741 - RNA, 21 nt, Human
ccagcuucaagagacugucca

SEQ ID NO: 987742 - RNA, 22 nt, Human
ccaguaacaaccugccuggagc

SEQ ID NO: 987743 - RNA, 19 nt, Human
cccaugcuaaaaccacagu

SEQ ID NO: 987744 - RNA, 20 nt, Human
ccuaaacuuaacacaguggu

SEQ ID NO: 987745 - RNA, 21 nt, Human
cuagaaccuauuccaguacug

SEQ ID NO: 987746 - RNA, 21 nt, Human
cucaaauaaguccucccaugc

SEQ ID NO: 987747 - RNA, 23 nt, Human
cucacagauuaauaagagcaguu

SEQ ID NO: 987748 - RNA, 19 nt, Human
cucccaugcuaaaaccaca

SEQ ID NO: 987749 - RNA, 22 nt, Human
cucuuuugguaagaggcuggag

SEQ ID NO: 987750 - RNA, 22 nt, Human
cugcaaacaccaguaacaaccu

SEQ ID NO: 987751 - RNA, 24 nt, Human
gaaccgagccagggaccagugacc

SEQ ID NO: 987752 - RNA, 19 nt, Human
gagccuugaccuugaaaac

SEQ ID NO: 987753 - RNA, 18 nt, Human
gcacacccagauaaucca

SEQ ID NO: 987754 - RNA, 21 nt, Human
gcugcuauaacaaauuacugu

SEQ ID NO: 987755 - RNA, 24 nt, Human
gcuuacgaccaacacaaauuuauc

SEQ ID NO: 987756 - RNA, 23 nt, Human
ggaauaaacaggaaaaccagaca

SEQ ID NO: 987757 - RNA, 23 nt, Human
ggagacugggcgcaggauggggg

SEQ ID NO: 987758 - RNA, 21 nt, Human
ggaugggccauuacucugggc

SEQ ID NO: 987759 - RNA, 22 nt, Human
ggcuuacgaccaacacaagguu

SEQ ID NO: 987760 - RNA, 21 nt, Human
gggaauaaacaggaaaaccag

SEQ ID NO: 987761 - RNA, 23 nt, Human
gggaauaaacaggaaaaccagac

SEQ ID NO: 987762 - RNA, 20 nt, Human
gguggacacccggccgcugc

SEQ ID NO: 987763 - RNA, 19 nt, Human
guacugcaaguacugacag

SEQ ID NO: 987764 - RNA, 22 nt, Human
guuuaucauaaacauucacaua

SEQ ID NO: 987765 - RNA, 20 nt, Human
uaaaaagaaaucauagaaaa

SEQ ID NO: 987766 - RNA, 23 nt, Human
uaaagccucuuuugguaagaggc

SEQ ID NO: 987767 - RNA, 25 nt, Human
uaacagaugacuauaauauacuacc

SEQ ID NO: 987768 - RNA, 21 nt, Human
uaagguaguauuucucaaaua

SEQ ID NO: 987769 - RNA, 20 nt, Human
uaaguccucccaugcuaaaa

SEQ ID NO: 987770 - RNA, 18 nt, Human
uacaaaaacaaagcaaaa

SEQ ID NO: 987771 - RNA, 20 nt, Human
uagaaccuauuccaguacug

SEQ ID NO: 987772 - RNA, 18 nt, Human
uauuucacucuacuggaa

SEQ ID NO: 987773 - RNA, 20 nt, Human
uauuucacucuacuggaaua

SEQ ID NO: 987774 - RNA, 22 nt, Human
ucacauacuacugcccaggaau

SEQ ID NO: 987775 - RNA, 26 nt, Human
ucacuaccuggcaaugcuacaauuua

SEQ ID NO: 987776 - RNA, 22 nt, Human
ucccagcaacagcaagucaagu

SEQ ID NO: 987777 - RNA, 18 nt, Human
ucccagggcuggggaguc

SEQ ID NO: 987778 - RNA, 21 nt, Human
ucccagggcuggggagucggg

SEQ ID NO: 987779 - RNA, 18 nt, Human
uccucccagcaacagcaa

SEQ ID NO: 987780 - RNA, 18 nt, Human
ucuacuggaauaguccca

SEQ ID NO: 987781 - RNA, 21 nt, Human
ucugcagccuucauuccccuu

SEQ ID NO: 987782 - RNA, 20 nt, Human
ucugccucucuuccacuuuu

SEQ ID NO: 987783 - RNA, 18 nt, Human
ucuucauccaucauauuu

SEQ ID NO: 987784 - RNA, 28 nt, Human
ugaaauuuuaagauuguguauaacacau

SEQ ID NO: 987785 - RNA, 20 nt, Human
ugacgcgcagacacuagccu

SEQ ID NO: 987786 - RNA, 21 nt, Human
ugaucaauugggcacacccag

SEQ ID NO: 987787 - RNA, 23 nt, Human
ugccuggagccuugaccuugaaa

SEQ ID NO: 987788 - RNA, 25 nt, Human
ugccuggagccuugaccuugaaaac

SEQ ID NO: 987789 - RNA, 26 nt, Human
ugccuggagccuugaccuugaaaacc

SEQ ID NO: 987790 - RNA, 27 nt, Human
ugcuaaaaccacagugacgcgcagaca

SEQ ID NO: 987791 - RNA, 19 nt, Human
uggcagagcacguccucuc

SEQ ID NO: 987792 - RNA, 22 nt, Human
ugggcacacccagauaauccag

SEQ ID NO: 987793 - RNA, 19 nt, Human
uggggagucgggguuaggg

SEQ ID NO: 987794 - RNA, 20 nt, Human
uguucggcucucccggcuca

SEQ ID NO: 987795 - RNA, 22 nt, Human
uuaaaauguuuaaauauuuguc

SEQ ID NO: 987796 - RNA, 25 nt, Human
uuaaagccucuuuugguaagaggcu

SEQ ID NO: 987797 - RNA, 19 nt, Human
uuagaugcugaauauagac

SEQ ID NO: 987798 - RNA, 21 nt, Human
uugauuuuauuauguacaugg

SEQ ID NO: 987799 - RNA, 22 nt, Human
uuggcucaugaccuccccuucc

SEQ ID NO: 987800 - RNA, 23 nt, Human
uuggcucaugaccuccccuuccu

SEQ ID NO: 987801 - RNA, 21 nt, Human
uuguagguuaacaagucaaac

SEQ ID NO: 987802 - RNA, 18 nt, Human
uuucuggauauuucuuug

SEQ ID NO: 987803 - RNA, 18 nt, Human
acccaucccuuucccuug

SEQ ID NO: 987804 - RNA, 20 nt, Human
ccaccuucugaaggcaacuu

SEQ ID NO: 987805 - RNA, 19 nt, Human
ccaucccuuucccuugucc

SEQ ID NO: 987806 - RNA, 19 nt, Human
cugguaccagccuggggga

SEQ ID NO: 987807 - RNA, 22 nt, Human
ggggaugggaggagucccaugg

SEQ ID NO: 987808 - RNA, 20 nt, Human
gucccaggacugcaccagaa

SEQ ID NO: 987809 - RNA, 24 nt, Human
guccuugucccaggacugcaccag

SEQ ID NO: 987810 - RNA, 18 nt, Human
guuuguuucuagcuuccc

SEQ ID NO: 987811 - RNA, 22 nt, Human
uugucccaggacugcaccagaa

SEQ ID NO: 987812 - RNA, 24 nt, Human
uuuuuuuuuuuuuuuuuuacuuga

SEQ ID NO: 987813 - RNA, 20 nt, Human
aaaaacaaaaacaaaacaga

SEQ ID NO: 987814 - RNA, 23 nt, Human
aaaaacaaaaacaaaacagaaga

SEQ ID NO: 987815 - RNA, 18 nt, Human
aaaagagacaguguuagc

SEQ ID NO: 987816 - RNA, 18 nt, Human
aaaauacgaaccaugcca

SEQ ID NO: 987817 - RNA, 23 nt, Human
aaaaucccucccuacccugcaau

SEQ ID NO: 987818 - RNA, 23 nt, Human
aaaauguugacaaaguuuauaca

SEQ ID NO: 987819 - RNA, 21 nt, Human
aaaauuacaugggaaauggaa

SEQ ID NO: 987820 - RNA, 23 nt, Human
aaacaaaaacaaaacagaagaua

SEQ ID NO: 987821 - RNA, 24 nt, Human
aaacaaaacagaagauaaaacugg

SEQ ID NO: 987822 - RNA, 20 nt, Human
aaacagaagauaaaacuggg

SEQ ID NO: 987823 - RNA, 19 nt, Human
aaaugaaaugucacaagga

SEQ ID NO: 987824 - RNA, 20 nt, Human
aaaugcugauaauugcacuu

SEQ ID NO: 987825 - RNA, 27 nt, Human
aacaaagauggaaaauaaagaauacaa

SEQ ID NO: 987826 - RNA, 21 nt, Human
aacuuuagcuuaacuuaaaau

SEQ ID NO: 987827 - RNA, 19 nt, Human
aaguuuagacgucuuuacc

SEQ ID NO: 987828 - RNA, 23 nt, Human
acaaaaauagauacauauaaaua

SEQ ID NO: 987829 - RNA, 26 nt, Human
acaaucagacuaaaagcucuuucuga

SEQ ID NO: 987830 - RNA, 21 nt, Human
acacaguaauaacuccaaaac

SEQ ID NO: 987831 - RNA, 21 nt, Human
acaguacacaaaaauagauac

SEQ ID NO: 987832 - RNA, 19 nt, Human
accacacuaugaaaaugca

SEQ ID NO: 987833 - RNA, 21 nt, Human
acucacucuuuuccuuuucaa

SEQ ID NO: 987834 - RNA, 18 nt, Human
agaaaacaaagauggaaa

SEQ ID NO: 987835 - RNA, 20 nt, Human
agaauaaaucuacuguugaa

SEQ ID NO: 987836 - RNA, 23 nt, Human
agacgucuuuacccaauaauacc

SEQ ID NO: 987837 - RNA, 18 nt, Human
agaugccagugaugcacu

SEQ ID NO: 987838 - RNA, 20 nt, Human
aggcucagaccauuuaaauc

SEQ ID NO: 987839 - RNA, 22 nt, Human
auaaaaucagcuugaugcuuaa

SEQ ID NO: 987840 - RNA, 25 nt, Human
augaaggaaaaucccucccuaauuc

SEQ ID NO: 987841 - RNA, 20 nt, Human
augucacaaggaugaaggaa

SEQ ID NO: 987842 - RNA, 18 nt, Human
caaaaaaugcuuuaguac

SEQ ID NO: 987843 - RNA, 22 nt, Human
caaaacaucaugaugauaaaaa

SEQ ID NO: 987844 - RNA, 22 nt, Human
caaaauaucccagcuauauaau

SEQ ID NO: 987845 - RNA, 21 nt, Human
caaaugcaaaaacaaaguuaa

SEQ ID NO: 987846 - RNA, 18 nt, Human
caaggaugaaggaaaauc

SEQ ID NO: 987847 - RNA, 24 nt, Human
cacaagauugucaaaaagcggcag

SEQ ID NO: 987848 - RNA, 23 nt, Human
cacacaugucacuaaucuuacuu

SEQ ID NO: 987849 - RNA, 19 nt, Human
caccaauaagaagaaacca

SEQ ID NO: 987850 - RNA, 24 nt, Human
cacucuuuuccuuuucaaucaccu

SEQ ID NO: 987851 - RNA, 23 nt, Human
cacuugaaaaagucaucgacaga

SEQ ID NO: 987852 - RNA, 23 nt, Human
cacuuuguuaucuuuuccuuacu

SEQ ID NO: 987853 - RNA, 21 nt, Human
caggcuaaaagaauaaaucua

SEQ ID NO: 987854 - RNA, 24 nt, Human
cagguaaaaaugcaaaaaauugug

SEQ ID NO: 987855 - RNA, 23 nt, Human
cauauaaauauuaagaaugagga

SEQ ID NO: 987856 - RNA, 21 nt, Human
ccaauuugaaagauaggcaua

SEQ ID NO: 987857 - RNA, 24 nt, Human
ccauuuuccauguauaaaacucuc

SEQ ID NO: 987858 - RNA, 25 nt, Human
ccuccuaucacauaaguagagaauc

SEQ ID NO: 987859 - RNA, 23 nt, Human
ccugcaaucuuuaagcauaccca

SEQ ID NO: 987860 - RNA, 21 nt, Human
cuacaguacuuacuacauacc

SEQ ID NO: 987861 - RNA, 21 nt, Human
cuagauuuuaaaauguuaauu

SEQ ID NO: 987862 - RNA, 23 nt, Human
cuccucagcaaugcaaaacugua

SEQ ID NO: 987863 - RNA, 21 nt, Human
ggaaacaaucagacuaaaagc

SEQ ID NO: 987864 - RNA, 21 nt, Human
gggucugaagauggaauccca

SEQ ID NO: 987865 - RNA, 19 nt, Human
guucacucacucuuuuccu

SEQ ID NO: 987866 - RNA, 24 nt, Human
uaaaacuuuagcuuaacuuaaaau

SEQ ID NO: 987867 - RNA, 21 nt, Human
uaaaauacacaguaauaacuc

SEQ ID NO: 987868 - RNA, 18 nt, Human
uaaaauacgaaccaugcc

SEQ ID NO: 987869 - RNA, 21 nt, Human
uaaaguacuauggccaugaaa

SEQ ID NO: 987870 - RNA, 24 nt, Human
uaaauaucuaaauauaaacccaca

SEQ ID NO: 987871 - RNA, 22 nt, Human
uaaguuagacuagcaccagcca

SEQ ID NO: 987872 - RNA, 21 nt, Human
uacacaugaauuaaguuagac

SEQ ID NO: 987873 - RNA, 19 nt, Human
uaccacacuaugaaaaugc

SEQ ID NO: 987874 - RNA, 25 nt, Human
uacccuccauacaaauugucauagc

SEQ ID NO: 987875 - RNA, 18 nt, Human
uaggcauaggcucagacc

SEQ ID NO: 987876 - RNA, 21 nt, Human
uaucacauuacaauuugugca

SEQ ID NO: 987877 - RNA, 22 nt, Human
uaugugaugcaaagaggcaaug

SEQ ID NO: 987878 - RNA, 20 nt, Human
ucacaaggaugaaggaaaau

SEQ ID NO: 987879 - RNA, 21 nt, Human
ucacauuacaauuugugcaag

SEQ ID NO: 987880 - RNA, 21 nt, Human
ucaugaucacauccauuuguu

SEQ ID NO: 987881 - RNA, 22 nt, Human
uccauacaaauugucauagcca

SEQ ID NO: 987882 - RNA, 20 nt, Human
ucccauucgguguuggggaa

SEQ ID NO: 987883 - RNA, 23 nt, Human
ucuaaaauacacaguaauaacuc

SEQ ID NO: 987884 - RNA, 18 nt, Human
ucuagaaaugcuguccau

SEQ ID NO: 987885 - RNA, 21 nt, Human
ucugaagauggaaucccauuc

SEQ ID NO: 987886 - RNA, 24 nt, Human
ugaaaaacgagguaugugaugcaa

SEQ ID NO: 987887 - RNA, 24 nt, Human
ugaaaaacgagguaugugaugcaa

SEQ ID NO: 987888 - RNA, 21 nt, Human
ugaaauacugucagcacucuu

SEQ ID NO: 987889 - RNA, 20 nt, Human
ugaaaugucacaaggaugaa

SEQ ID NO: 987890 - RNA, 22 nt, Human
ugaauggacagguagauggaag

SEQ ID NO: 987891 - RNA, 19 nt, Human
ugacaucagguaaaaaugc

SEQ ID NO: 987892 - RNA, 21 nt, Human
ugaccaauaaaaucagcuuga

SEQ ID NO: 987893 - RNA, 25 nt, Human
ugaugauaaaaacaaaaacaaaaca

SEQ ID NO: 987894 - RNA, 19 nt, Human
ugccaggaaaaaaaaaugc

SEQ ID NO: 987895 - RNA, 19 nt, Human
uggaaucccauucgguguu

SEQ ID NO: 987896 - RNA, 20 nt, Human
uggcugggucugaagaugga

SEQ ID NO: 987897 - RNA, 21 nt, Human
uguaccaauaaugaauggaca

SEQ ID NO: 987898 - RNA, 20 nt, Human
ugucauagccaaaagaucaa

SEQ ID NO: 987899 - RNA, 22 nt, Human
ugucauguuuucaaguaauaca

SEQ ID NO: 987900 - RNA, 21 nt, Human
ugugaaaucacaagaguucaa

SEQ ID NO: 987901 - RNA, 23 nt, Human
ugugaaaucacaagaguucaaca

SEQ ID NO: 987902 - RNA, 22 nt, Human
uguuagagaggucacagcuaag

SEQ ID NO: 987903 - RNA, 22 nt, Human
uuaagugcaaaaauggaaaaaa

SEQ ID NO: 987904 - RNA, 22 nt, Human
uuacugaaaugaaaugucacaa

SEQ ID NO: 987905 - RNA, 23 nt, Human
uuacuuuucuaggaccucuucug

SEQ ID NO: 987906 - RNA, 21 nt, Human
uuaguaccuagaaagcuaugg

SEQ ID NO: 987907 - RNA, 22 nt, Human
uuauaagagugcauaguugucc

SEQ ID NO: 987908 - RNA, 23 nt, Human
uuauacagagauuacagacauac

SEQ ID NO: 987909 - RNA, 25 nt, Human
uuaugccaggaaaaaaaaaugcuga

SEQ ID NO: 987910 - RNA, 18 nt, Human
uugagggcaaaaucuguc

SEQ ID NO: 987911 - RNA, 20 nt, Human
uugcccccacaggacuacag

SEQ ID NO: 987912 - RNA, 22 nt, Human
uugcuaacucaauguucuaugu

SEQ ID NO: 987913 - RNA, 23 nt, Human
uuguccugauucaucugguaccu

SEQ ID NO: 987914 - RNA, 22 nt, Human
aaagagaucaccuucugacuuc

SEQ ID NO: 987915 - RNA, 24 nt, Human
aaagugcugggauuauaggcauga

SEQ ID NO: 987916 - RNA, 20 nt, Human
aaccuccaccucccugguuc

SEQ ID NO: 987917 - RNA, 24 nt, Human
aagcaauccgcccaucuuggccuc

SEQ ID NO: 987918 - RNA, 19 nt, Human
aaguagcugggauuacagg

SEQ ID NO: 987919 - RNA, 26 nt, Human
aaguagcugggauuacaggcgcacgc

SEQ ID NO: 987920 - RNA, 19 nt, Human
aagugcugggauuauaggc

SEQ ID NO: 987921 - RNA, 21 nt, Human
aagugcugggauuauaggcau

SEQ ID NO: 987922 - RNA, 21 nt, Human
acaguggcacaaucucggcuc

SEQ ID NO: 987923 - RNA, 24 nt, Human
accagguuggccagacuggucucg

SEQ ID NO: 987924 - RNA, 18 nt, Human
accugguuaauuuagggc

SEQ ID NO: 987925 - RNA, 23 nt, Human
acuggucucgaacuccugaccuc

SEQ ID NO: 987926 - RNA, 24 nt, Human
aggacagaaauacagugaaaaaaa

SEQ ID NO: 987927 - RNA, 20 nt, Human
aggcaugagccaccacgccc

SEQ ID NO: 987928 - RNA, 18 nt, Human
auccaauaugcuucaguc

SEQ ID NO: 987929 - RNA, 20 nt, Human
augaugggauuuagugccuu

SEQ ID NO: 987930 - RNA, 18 nt, Human
augggguuucaccagguu

SEQ ID NO: 987931 - RNA, 24 nt, Human
augggguuucaccagguuggccag

SEQ ID NO: 987932 - RNA, 24 nt, Human
caaagugcugggauuauaggcaug

SEQ ID NO: 987933 - RNA, 24 nt, Human
caccagguuggccagacuggucuc

SEQ ID NO: 987934 - RNA, 24 nt, Human
cacgccaccacgccuggcuaauuu

SEQ ID NO: 987935 - RNA, 23 nt, Human
cauuucauagcucccaguccacc

SEQ ID NO: 987936 - RNA, 24 nt, Human
ccaaagugcugggauuauaggcau

SEQ ID NO: 987937 - RNA, 22 nt, Human
ccaaguagcugggauuacaggc

SEQ ID NO: 987938 - RNA, 23 nt, Human
cccaaguagcugggauuacaggc

SEQ ID NO: 987939 - RNA, 23 nt, Human
cccaaguagcugggauuacaggc

SEQ ID NO: 987940 - RNA, 22 nt, Human
cccaucuuggccucccaaagug

SEQ ID NO: 987941 - RNA, 20 nt, Human
cccugguucaagcaauuccc

SEQ ID NO: 987942 - RNA, 23 nt, Human
cccugguucaagcaauuccccug

SEQ ID NO: 987943 - RNA, 26 nt, Human
ccuacaccauguucaacguccagaaa

SEQ ID NO: 987944 - RNA, 24 nt, Human
ccucaaugaugggauuuagugccu

SEQ ID NO: 987945 - RNA, 18 nt, Human
ccugaccucaagcaaucc

SEQ ID NO: 987946 - RNA, 23 nt, Human
ccugaccucaagcaauccgccca

SEQ ID NO: 987947 - RNA, 22 nt, Human
cuacuccuacaccauguucaac

SEQ ID NO: 987948 - RNA, 24 nt, Human
cucaagcaauccgcccaucuuggc

SEQ ID NO: 987949 - RNA, 25 nt, Human
cucacugcaaccuccaccucccugg

SEQ ID NO: 987950 - RNA, 28 nt, Human
cucccaguccacccuggaugugcauuuc

SEQ ID NO: 987951 - RNA, 23 nt, Human
cuccugaccucaagcaauccgcc

SEQ ID NO: 987952 - RNA, 24 nt, Human
cugcaaccuccaccucccugguuc

SEQ ID NO: 987953 - RNA, 24 nt, Human
cugguguacaguggcacaaucucu

SEQ ID NO: 987954 - RNA, 23 nt, Human
cuuccgucccuguugcuuuucua

SEQ ID NO: 987955 - RNA, 18 nt, Human
cuugaucuuggaccuucc

SEQ ID NO: 987956 - RNA, 23 nt, Human
gaacuccugaccucaagcaaucc

SEQ ID NO: 987957 - RNA, 23 nt, Human
gaccucaagcaauccgcccaucu

SEQ ID NO: 987958 - RNA, 20 nt, Human
gagaugggguuucaccaggu

SEQ ID NO: 987959 - RNA, 18 nt, Human
gauuacaggcgcacgcca

SEQ ID NO: 987960 - RNA, 21 nt, Human
gauuauaggcaugagccacca

SEQ ID NO: 987961 - RNA, 22 nt, Human
gauuauaggcaugagccaccac

SEQ ID NO: 987962 - RNA, 18 nt, Human
gcccuggagcauuuuuuu

SEQ ID NO: 987963 - RNA, 20 nt, Human
gcgucagccucccaaguagc

SEQ ID NO: 987964 - RNA, 22 nt, Human
gcgucagccucccaaguagcug

SEQ ID NO: 987965 - RNA, 25 nt, Human
gcucugucacccaggcugguguaca

SEQ ID NO: 987966 - RNA, 19 nt, Human
ggagcauuuaggaggugau

SEQ ID NO: 987967 - RNA, 19 nt, Human
ggauuauaggcaugagcca

SEQ ID NO: 987968 - RNA, 18 nt, Human
gggguuucaccagguugg

SEQ ID NO: 987969 - RNA, 22 nt, Human
gggguuucaccagguuggccag

SEQ ID NO: 987970 - RNA, 19 nt, Human
ggucucgaacuccugaccu

SEQ ID NO: 987971 - RNA, 20 nt, Human
ggucucgaacuccugaccuc

SEQ ID NO: 987972 - RNA, 24 nt, Human
guuuuagcagagaugggguuucac

SEQ ID NO: 987973 - RNA, 21 nt, Human
uaaauaaauccaauaugcuuc

SEQ ID NO: 987974 - RNA, 22 nt, Human
uaaguuaaagaacaguuauuca

SEQ ID NO: 987975 - RNA, 22 nt, Human
uacaggcgcacgccaccacgcc

SEQ ID NO: 987976 - RNA, 23 nt, Human
uagcagagaugggguuucaccag

SEQ ID NO: 987977 - RNA, 26 nt, Human
uagcagagaugggguuucaccagguu

SEQ ID NO: 987978 - RNA, 19 nt, Human
uaggaggacagaaauacag

SEQ ID NO: 987979 - RNA, 21 nt, Human
uaggaggacagaaauacagug

SEQ ID NO: 987980 - RNA, 19 nt, Human
ucacccaggcugguguaca

SEQ ID NO: 987981 - RNA, 19 nt, Human
ucacugcaaccuccaccuc

SEQ ID NO: 987982 - RNA, 24 nt, Human
ucacugcaaccuccaccucccugg

SEQ ID NO: 987983 - RNA, 24 nt, Human
ucacugcaaccuccaccucccugg

SEQ ID NO: 987984 - RNA, 25 nt, Human
ucacugcaaccuccaccucccuggu

SEQ ID NO: 987985 - RNA, 28 nt, Human
ucacugcaaccuccaccucccugguuca

SEQ ID NO: 987986 - RNA, 18 nt, Human
ucagccucccaaguagcu

SEQ ID NO: 987987 - RNA, 20 nt, Human
ucagccucccaaguagcugg

SEQ ID NO: 987988 - RNA, 24 nt, Human
ucauguugaagcuuaauccucagu

SEQ ID NO: 987989 - RNA, 24 nt, Human
ucccaaagugcugggauuauaggc

SEQ ID NO: 987990 - RNA, 24 nt, Human
ucccaaguagcugggauuacaggc

SEQ ID NO: 987991 - RNA, 19 nt, Human
ucccugguucaagcaauuc

SEQ ID NO: 987992 - RNA, 24 nt, Human
ucccugguucaagcaauuccccug

SEQ ID NO: 987993 - RNA, 22 nt, Human
ucccuuguaggaggacagaaau

SEQ ID NO: 987994 - RNA, 21 nt, Human
uccgcccaucuuggccuccca

SEQ ID NO: 987995 - RNA, 21 nt, Human
uccuuccgucccuguugcuuu

SEQ ID NO: 987996 - RNA, 24 nt, Human
ucuacuccuacaccauguucaacg

SEQ ID NO: 987997 - RNA, 18 nt, Human
ucuccuuccgucccuguu

SEQ ID NO: 987998 - RNA, 21 nt, Human
ucucgaacuccugaccucaag

SEQ ID NO: 987999 - RNA, 24 nt, Human
ucugucacccaggcugguguacag

SEQ ID NO: 988000 - RNA, 19 nt, Human
ucuugcucugucacccagg

SEQ ID NO: 988001 - RNA, 22 nt, Human
ucuugcucugucacccaggcug

SEQ ID NO: 988002 - RNA, 23 nt, Human
ucuugcucugucacccaggcugg

SEQ ID NO: 988003 - RNA, 24 nt, Human
ucuugcucugucacccaggcuggu

SEQ ID NO: 988004 - RNA, 26 nt, Human
ucuugcucugucacccaggcuggugu

SEQ ID NO: 988005 - RNA, 20 nt, Human
ucuuggccucccaaagugcu

SEQ ID NO: 988006 - RNA, 21 nt, Human
ugaagcuuaauccucagugca

SEQ ID NO: 988007 - RNA, 25 nt, Human
ugaccucaagcaauccgcccaucuu

SEQ ID NO: 988008 - RNA, 22 nt, Human
ugacugcuaugguuuggauguu

SEQ ID NO: 988009 - RNA, 23 nt, Human
ugagauaagagucuugcucuguc

SEQ ID NO: 988010 - RNA, 18 nt, Human
ugcauuucuugcaacauc

SEQ ID NO: 988011 - RNA, 24 nt, Human
ugcgucagccucccaaguagcugg

SEQ ID NO: 988012 - RNA, 22 nt, Human
ugcucugucacccaggcuggug

SEQ ID NO: 988013 - RNA, 22 nt, Human
uggagcauuuuuuuuuuuuuuu

SEQ ID NO: 988014 - RNA, 24 nt, Human
uggcacaaucucggcucacugcaa

SEQ ID NO: 988015 - RNA, 24 nt, Human
uggccagacuggucucgaacuccu

SEQ ID NO: 988016 - RNA, 22 nt, Human
ugggauuacaggcgcacgccac

SEQ ID NO: 988017 - RNA, 24 nt, Human
ugggauuacaggcgcacgccacca

SEQ ID NO: 988018 - RNA, 18 nt, Human
ugggauuauaggcaugag

SEQ ID NO: 988019 - RNA, 19 nt, Human
ugggauuauaggcaugagc

SEQ ID NO: 988020 - RNA, 22 nt, Human
ugggauuauaggcaugagccac

SEQ ID NO: 988021 - RNA, 23 nt, Human
ugggauuauaggcaugagccacc

SEQ ID NO: 988022 - RNA, 24 nt, Human
ugggauuauaggcaugagccacca

SEQ ID NO: 988023 - RNA, 19 nt, Human
ugggguuucaccagguugg

SEQ ID NO: 988024 - RNA, 21 nt, Human
uuacuucucauuuaaagcccu

SEQ ID NO: 988025 - RNA, 22 nt, Human
uuagaaaauuuuacuucucauu

SEQ ID NO: 988026 - RNA, 26 nt, Human
uuagacacaccaucucuguguuuguc

SEQ ID NO: 988027 - RNA, 18 nt, Human
uuagcagagaugggguuu

SEQ ID NO: 988028 - RNA, 22 nt, Human
uuagcagagaugggguuucacc

SEQ ID NO: 988029 - RNA, 23 nt, Human
uuagcagagaugggguuucacca

SEQ ID NO: 988030 - RNA, 18 nt, Human
uucaagcaauuccccugc

SEQ ID NO: 988031 - RNA, 24 nt, Human
uugcuuuucuacuccuacaccaug

SEQ ID NO: 988032 - RNA, 23 nt, Human
uuggauguuuguguccucuucaa

SEQ ID NO: 988033 - RNA, 21 nt, Human
uuucaccagguuggccagacu

SEQ ID NO: 988034 - RNA, 23 nt, Human
uuucauagcucccaguccacccu

SEQ ID NO: 988035 - RNA, 23 nt, Human
uuugaaaaauucuuaaaaagaaa

SEQ ID NO: 988036 - RNA, 18 nt, Human
uuuuguaguuuuagcaga

SEQ ID NO: 988037 - RNA, 25 nt, Human
uuuuuuuuuuuugagauaagagucu

SEQ ID NO: 988038 - RNA, 20 nt, Human
uuuuuuuuuuuuuuugagau

SEQ ID NO: 988039 - RNA, 21 nt, Human
aaucaaggggccucgauuuca

SEQ ID NO: 988040 - RNA, 20 nt, Human
agaaacaaucaaggggccuc

SEQ ID NO: 988041 - RNA, 23 nt, Human
aggauauuccacauacauuauca

SEQ ID NO: 988042 - RNA, 20 nt, Human
caauggcaggauauuccaca

SEQ ID NO: 988043 - RNA, 18 nt, Human
cccucugcagccauucug

SEQ ID NO: 988044 - RNA, 21 nt, Human
ccuuguggguagaagaggggu

SEQ ID NO: 988045 - RNA, 20 nt, Human
gaacccgaaagaucucagug

SEQ ID NO: 988046 - RNA, 18 nt, Human
gacuggaaaaucagucca

SEQ ID NO: 988047 - RNA, 21 nt, Human
gauauuccacauacauuauca

SEQ ID NO: 988048 - RNA, 20 nt, Human
ggacuggaaaaucaguccag

SEQ ID NO: 988049 - RNA, 24 nt, Human
ggccuguucaccccucugcagcca

SEQ ID NO: 988050 - RNA, 18 nt, Human
gggaaaggacuaggggug

SEQ ID NO: 988051 - RNA, 21 nt, Human
guaucacagcaccccaaauau

SEQ ID NO: 988052 - RNA, 20 nt, Human
gugcaggguguuucacagaa

SEQ ID NO: 988053 - RNA, 18 nt, Human
ucaguggggaaaggacua

SEQ ID NO: 988054 - RNA, 20 nt, Human
uguucaccccucugcagcca

SEQ ID NO: 988055 - RNA, 23 nt, Human
aaaaaccagaaacuugacgagca

SEQ ID NO: 988056 - RNA, 24 nt, Human
aaaaauaauugaaaaccuaaacaa

SEQ ID NO: 988057 - RNA, 24 nt, Human
aaauuugggaugaugaaaggaaag

SEQ ID NO: 988058 - RNA, 23 nt, Human
aacaaaauucaaaguuacagcug

SEQ ID NO: 988059 - RNA, 19 nt, Human
aacuguauaacccagagca

SEQ ID NO: 988060 - RNA, 21 nt, Human
aagccacaccaaucaucauaa

SEQ ID NO: 988061 - RNA, 26 nt, Human
aaggaaaaaaacugacccaaaaauau

SEQ ID NO: 988062 - RNA, 26 nt, Human
aaucagacccaccaagugguacagca

SEQ ID NO: 988063 - RNA, 18 nt, Human
acaggaacacaaacaucu

SEQ ID NO: 988064 - RNA, 21 nt, Human
accaaucuagcuuuacaaaga

SEQ ID NO: 988065 - RNA, 19 nt, Human
accaauguuaccugacuua

SEQ ID NO: 988066 - RNA, 19 nt, Human
accccccaccccgccccca

SEQ ID NO: 988067 - RNA, 21 nt, Human
acuccguccagaccccccacc

SEQ ID NO: 988068 - RNA, 18 nt, Human
agaagcggcggcuccucc

SEQ ID NO: 988069 - RNA, 20 nt, Human
agaccccccaccccgccccc

SEQ ID NO: 988070 - RNA, 23 nt, Human
agaccccccaccccgcccccacc

SEQ ID NO: 988071 - RNA, 19 nt, Human
agcacuccagcugaccccc

SEQ ID NO: 988072 - RNA, 22 nt, Human
agcaggaggacgcggaggcccg

SEQ ID NO: 988073 - RNA, 20 nt, Human
agccacgguggcacugaaca

SEQ ID NO: 988074 - RNA, 19 nt, Human
aggaauuaaauguaggcgu

SEQ ID NO: 988075 - RNA, 20 nt, Human
aggaauuaaauguaggcguu

SEQ ID NO: 988076 - RNA, 24 nt, Human
agucaacuuguacacaaaacuuag

SEQ ID NO: 988077 - RNA, 21 nt, Human
aucaucacugggaguuuuccu

SEQ ID NO: 988078 - RNA, 26 nt, Human
augccuguuacaagcaugaugcauug

SEQ ID NO: 988079 - RNA, 24 nt, Human
caaaaauaauugaaaaccuaaaca

SEQ ID NO: 988080 - RNA, 23 nt, Human
caaaauaaauaccccgccacuug

SEQ ID NO: 988081 - RNA, 19 nt, Human
caaaauagauuaucuaaca

SEQ ID NO: 988082 - RNA, 23 nt, Human
cacaucagguucagaaucagacc

SEQ ID NO: 988083 - RNA, 20 nt, Human
cacgcgcucagccgcgcgca

SEQ ID NO: 988084 - RNA, 19 nt, Human
cacugaaagccaacaaaau

SEQ ID NO: 988085 - RNA, 21 nt, Human
cagaccccccaccccgccccc

SEQ ID NO: 988086 - RNA, 21 nt, Human
cagagaaaaaccagaaacuug

SEQ ID NO: 988087 - RNA, 24 nt, Human
cagagcgaggucagaagcggcggc

SEQ ID NO: 988088 - RNA, 23 nt, Human
cagcacaguaacaacccauggaa

SEQ ID NO: 988089 - RNA, 22 nt, Human
cagccauaacaauuaaauuucu

SEQ ID NO: 988090 - RNA, 24 nt, Human
cagguucagaaucagacccaccaa

SEQ ID NO: 988091 - RNA, 19 nt, Human
cauaacacaaaaagaacag

SEQ ID NO: 988092 - RNA, 24 nt, Human
cauccauagaacuaaaauggauuu

SEQ ID NO: 988093 - RNA, 22 nt, Human
cauucuaacaaaacccuucugg

SEQ ID NO: 988094 - RNA, 24 nt, Human
cauuuucaauacuucaacuacuuu

SEQ ID NO: 988095 - RNA, 25 nt, Human
ccaaucaucauaacaaagacuaugc

SEQ ID NO: 988096 - RNA, 19 nt, Human
ccaccaaucuagcuuuaca

SEQ ID NO: 988097 - RNA, 20 nt, Human
ccacuugccacucaugcuuc

SEQ ID NO: 988098 - RNA, 23 nt, Human
ccagcugacccccccggcaguca

SEQ ID NO: 988099 - RNA, 19 nt, Human
ccccaccgcgucuaccaaa

SEQ ID NO: 988100 - RNA, 21 nt, Human
cccccaccccgcccccaccgc

SEQ ID NO: 988101 - RNA, 19 nt, Human
ccccccaccccgcccccac

SEQ ID NO: 988102 - RNA, 25 nt, Human
ccccgcccccaccgcgucuaccaaa

SEQ ID NO: 988103 - RNA, 21 nt, Human
cccuucaggccuugggaccua

SEQ ID NO: 988104 - RNA, 19 nt, Human
ccgccgccgccccugcccc

SEQ ID NO: 988105 - RNA, 20 nt, Human
ccgccgccgccccugcccgg

SEQ ID NO: 988106 - RNA, 18 nt, Human
ccgcgcgcaccggagcca

SEQ ID NO: 988107 - RNA, 18 nt, Human
ccucagggcggcgcgcag

SEQ ID NO: 988108 - RNA, 21 nt, Human
ccuucaggccuugggaccuag

SEQ ID NO: 988109 - RNA, 22 nt, Human
cgcacacagugcucucuccaca

SEQ ID NO: 988110 - RNA, 19 nt, Human
cgcggaggcccggagccgg

SEQ ID NO: 988111 - RNA, 18 nt, Human
cuauagaaagcaaggcua

SEQ ID NO: 988112 - RNA, 22 nt, Human
cuccguccagaccccccacccc

SEQ ID NO: 988113 - RNA, 24 nt, Human
cuccucagccgcagucgcgccgcc

SEQ ID NO: 988114 - RNA, 18 nt, Human
cucuauagaaagcaaggc

SEQ ID NO: 988115 - RNA, 20 nt, Human
cucuccacauggacucacug

SEQ ID NO: 988116 - RNA, 19 nt, Human
cuuugagggguuuuacaac

SEQ ID NO: 988117 - RNA, 20 nt, Human
gaagacaggcaaaagacuua

SEQ ID NO: 988118 - RNA, 23 nt, Human
gaccacugaaagccaacaaaauu

SEQ ID NO: 988119 - RNA, 22 nt, Human
gaccccccaccccgcccccacc

SEQ ID NO: 988120 - RNA, 23 nt, Human
gagcaggaggacgcggaggcccg

SEQ ID NO: 988121 - RNA, 20 nt, Human
gagccagagcgaggucagaa

SEQ ID NO: 988122 - RNA, 24 nt, Human
gagcgaggucagaagcggcggcuc

SEQ ID NO: 988123 - RNA, 25 nt, Human
gccagagcgaggucagaagcggcgg

SEQ ID NO: 988124 - RNA, 19 nt, Human
gccgcugcgcacacagugc

SEQ ID NO: 988125 - RNA, 18 nt, Human
gcucucuccacauggacu

SEQ ID NO: 988126 - RNA, 19 nt, Human
gcuuuugggaucaaaacug

SEQ ID NO: 988127 - RNA, 19 nt, Human
gggcgcuccucagggcggc

SEQ ID NO: 988128 - RNA, 21 nt, Human
guaaagugucuccccuacccc

SEQ ID NO: 988129 - RNA, 20 nt, Human
guccugccagcaggaucagc

SEQ ID NO: 988130 - RNA, 22 nt, Human
gugcaugcucuauagaaagcaa

SEQ ID NO: 988131 - RNA, 18 nt, Human
gugcugcugccgcugcgc

SEQ ID NO: 988132 - RNA, 21 nt, Human
guuguauaaaacaccaccaau

SEQ ID NO: 988133 - RNA, 23 nt, Human
uaaagccacaccaaucaucauaa

SEQ ID NO: 988134 - RNA, 21 nt, Human
uaaagugucuccccuaccccu

SEQ ID NO: 988135 - RNA, 22 nt, Human
uaaagugucuccccuaccccuc

SEQ ID NO: 988136 - RNA, 22 nt, Human
uaaauaaaagccugacaguuac

SEQ ID NO: 988137 - RNA, 19 nt, Human
uaaaugagagcagagaaaa

SEQ ID NO: 988138 - RNA, 25 nt, Human
uaagcugaguaaauaaguuguauaa

SEQ ID NO: 988139 - RNA, 23 nt, Human
uaagcuugauucagaaaccccua

SEQ ID NO: 988140 - RNA, 20 nt, Human
uacagcacaguaacaaccca

SEQ ID NO: 988141 - RNA, 21 nt, Human
uagagacuccguccagacccc

SEQ ID NO: 988142 - RNA, 22 nt, Human
uagcaugaccacugaaagccaa

SEQ ID NO: 988143 - RNA, 22 nt, Human
uagcuuuacaaagauuguguuu

SEQ ID NO: 988144 - RNA, 19 nt, Human
uaggccagauccaaagcca

SEQ ID NO: 988145 - RNA, 19 nt, Human
uaugccaauuuaggaauag

SEQ ID NO: 988146 - RNA, 22 nt, Human
uccagaccccccaccccgcccc

SEQ ID NO: 988147 - RNA, 19 nt, Human
uccguccagaccccccacc

SEQ ID NO: 988148 - RNA, 18 nt, Human
ucuauagaaagcaaggcu

SEQ ID NO: 988149 - RNA, 28 nt, Human
ucucaacaaagaucucaacgagucucaa

SEQ ID NO: 988150 - RNA, 20 nt, Human
ucucaagaagacaggcaaaa

SEQ ID NO: 988151 - RNA, 19 nt, Human
ucuccccuaccccuccugg

SEQ ID NO: 988152 - RNA, 19 nt, Human
ucugugcugcugccgcugc

SEQ ID NO: 988153 - RNA, 19 nt, Human
ugaaaggaaaggcaggacu

SEQ ID NO: 988154 - RNA, 22 nt, Human
ugaaauauuuccauccauagaa

SEQ ID NO: 988155 - RNA, 18 nt, Human
ugagagcagagaaaaacc

SEQ ID NO: 988156 - RNA, 21 nt, Human
ugaguaaauaaguuguauaaa

SEQ ID NO: 988157 - RNA, 25 nt, Human
uggaaagaacaucgagaaaugaagg

SEQ ID NO: 988158 - RNA, 24 nt, Human
ugggaugaugaaaggaaaggcagg

SEQ ID NO: 988159 - RNA, 18 nt, Human
uggguagguagcaugacc

SEQ ID NO: 988160 - RNA, 23 nt, Human
uggguagguagcaugaccacuga

SEQ ID NO: 988161 - RNA, 25 nt, Human
ugucuccccuaccccuccuggagau

SEQ ID NO: 988162 - RNA, 22 nt, Human
uuaaccacaggaacacaaacau

SEQ ID NO: 988163 - RNA, 21 nt, Human
uuccauaaaaaaauacuggua

SEQ ID NO: 988164 - RNA, 23 nt, Human
agcauuguucuccagcucuuuug

SEQ ID NO: 988165 - RNA, 18 nt, Human
aggucuccagcacguugc

SEQ ID NO: 988166 - RNA, 21 nt, Human
cauuguucuccagcucuuuug

SEQ ID NO: 988167 - RNA, 18 nt, Human
uaagaaaugaguucaauu

SEQ ID NO: 988168 - RNA, 19 nt, Human
uaagaaaugaguucaauug

SEQ ID NO: 988169 - RNA, 18 nt, Human
uccagcacguugccuagc

SEQ ID NO: 988170 - RNA, 19 nt, Human
uccagcacguugccuagca

SEQ ID NO: 988171 - RNA, 23 nt, Human
ugaguucaauugaacccauuuaa

SEQ ID NO: 988172 - RNA, 22 nt, Human
agacgagacuccucugaaguuc

SEQ ID NO: 988173 - RNA, 19 nt, Human
agacuggaagcugaaagau

SEQ ID NO: 988174 - RNA, 19 nt, Human
cugccuccuggucacuuug

SEQ ID NO: 988175 - RNA, 19 nt, Human
gaaguucuucucugccucc

SEQ ID NO: 988176 - RNA, 22 nt, Human
gacuggcaccaugauggucuca

SEQ ID NO: 988177 - RNA, 24 nt, Human
uaaaaauugcuuucuguuucuaga

SEQ ID NO: 988178 - RNA, 24 nt, Human
uaggagaaugggguccuagacugg

SEQ ID NO: 988179 - RNA, 19 nt, Human
ucugcagucccggacccuc

SEQ ID NO: 988180 - RNA, 18 nt, Human
ugaaagauacugcaauag

SEQ ID NO: 988181 - RNA, 22 nt, Human
ugaccauagcugccuaaaaauu

SEQ ID NO: 988182 - RNA, 23 nt, Human
uuaaagcccauuuuauuuugggu

SEQ ID NO: 988183 - RNA, 20 nt, Human
aaaacaguuugguuccaguu

SEQ ID NO: 988184 - RNA, 22 nt, Human
aaacaggcagauuaaaugaaca

SEQ ID NO: 988185 - RNA, 19 nt, Human
aaagggaccaggagguggg

SEQ ID NO: 988186 - RNA, 24 nt, Human
aaagugcugggauuacaggcguga

SEQ ID NO: 988187 - RNA, 20 nt, Human
aaauaacucugcacaaggca

SEQ ID NO: 988188 - RNA, 20 nt, Human
aacaacaucuguuuuucccu

SEQ ID NO: 988189 - RNA, 18 nt, Human
aacagguaaauccccaga

SEQ ID NO: 988190 - RNA, 21 nt, Human
aaccaaccauuagauuucuau

SEQ ID NO: 988191 - RNA, 24 nt, Human
aagaaaaccacuacgaaaggucac

SEQ ID NO: 988192 - RNA, 22 nt, Human
aagaccagaaccaauuagaaaa

SEQ ID NO: 988193 - RNA, 25 nt, Human
aagcaagaaaaccacuacgaauugc

SEQ ID NO: 988194 - RNA, 25 nt, Human
aagcuagcauuuguuucuugagaac

SEQ ID NO: 988195 - RNA, 24 nt, Human
aaggaggauugaaaaugugguucc

SEQ ID NO: 988196 - RNA, 19 nt, Human
aagugcugggauuacaggc

SEQ ID NO: 988197 - RNA, 19 nt, Human
aagugcugggauuacaggc

SEQ ID NO: 988198 - RNA, 26 nt, Human
aagugcugggauuacaggcgugagcc

SEQ ID NO: 988199 - RNA, 22 nt, Human
aauuagaaaguaggguugggcu

SEQ ID NO: 988200 - RNA, 22 nt, Human
acaugacauauccucucacucu

SEQ ID NO: 988201 - RNA, 22 nt, Human
acccgaacucuaccacacacgc

SEQ ID NO: 988202 - RNA, 23 nt, Human
accucggccucccaaagugcugg

SEQ ID NO: 988203 - RNA, 18 nt, Human
acgggguuucacuguguu

SEQ ID NO: 988204 - RNA, 19 nt, Human
acgggguuucacuguguua

SEQ ID NO: 988205 - RNA, 20 nt, Human
acgggguuucacuguguuag

SEQ ID NO: 988206 - RNA, 24 nt, Human
acgggguuucacuguguuagccag

SEQ ID NO: 988207 - RNA, 20 nt, Human
acugcaagcucugccucccg

SEQ ID NO: 988208 - RNA, 22 nt, Human
agaaaaagacauaaucuccaaa

SEQ ID NO: 988209 - RNA, 25 nt, Human
agaacuaauaaggaacuaaagauaa

SEQ ID NO: 988210 - RNA, 18 nt, Human
agacaggaaaguaaugug

SEQ ID NO: 988211 - RNA, 22 nt, Human
agagagauuuuaagagcaccau

SEQ ID NO: 988212 - RNA, 24 nt, Human
agcuggguaguucuggcucucuug

SEQ ID NO: 988213 - RNA, 27 nt, Human
aggaaaaggccaacuugacgcacaaaa

SEQ ID NO: 988214 - RNA, 22 nt, Human
aggaggcaagaacacuggggcu

SEQ ID NO: 988215 - RNA, 20 nt, Human
aggcguuuggagaugaaaga

SEQ ID NO: 988216 - RNA, 23 nt, Human
aggcguuuggagaugaaagaggg

SEQ ID NO: 988217 - RNA, 19 nt, Human
aguaauuuauucauucaca

SEQ ID NO: 988218 - RNA, 18 nt, Human
aguagcugggacuacagg

SEQ ID NO: 988219 - RNA, 18 nt, Human
agugcugggauuacaggc

SEQ ID NO: 988220 - RNA, 21 nt, Human
auaaagcacaaugucuaccuu

SEQ ID NO: 988221 - RNA, 21 nt, Human
auacagagcacgucuggcuga

SEQ ID NO: 988222 - RNA, 18 nt, Human
aucaucuguauucagcau

SEQ ID NO: 988223 - RNA, 23 nt, Human
auccgggaagagggugugggugg

SEQ ID NO: 988224 - RNA, 24 nt, Human
auuuuuguauuuuuaguagagacg

SEQ ID NO: 988225 - RNA, 19 nt, Human
caaaacaggcagauuaaau

SEQ ID NO: 988226 - RNA, 21 nt, Human
caaagccccaggauuuuggca

SEQ ID NO: 988227 - RNA, 24 nt, Human
caaagugcugggauuacaggcgug

SEQ ID NO: 988228 - RNA, 18 nt, Human
caaauaacucugcacaag

SEQ ID NO: 988229 - RNA, 22 nt, Human
caaauagccauacacaugaagc

SEQ ID NO: 988230 - RNA, 24 nt, Human
caacugacaugagagagauuuuaa

SEQ ID NO: 988231 - RNA, 21 nt, Human
caagcaaacuccagccaccca

SEQ ID NO: 988232 - RNA, 24 nt, Human
cacaagaguuaagcaccuaccuaa

SEQ ID NO: 988233 - RNA, 21 nt, Human
cacaaggcugucauggagcag

SEQ ID NO: 988234 - RNA, 24 nt, Human
caccacacccggcuaauuuuugua

SEQ ID NO: 988235 - RNA, 26 nt, Human
caccaccaaaucaguguguuuuuaau

SEQ ID NO: 988236 - RNA, 20 nt, Human
caccagcauuucuguaauga

SEQ ID NO: 988237 - RNA, 22 nt, Human
cacccaccucggccucccaaag

SEQ ID NO: 988238 - RNA, 23 nt, Human
cacccaccucggccucccaaagu

SEQ ID NO: 988239 - RNA, 22 nt, Human
cacccagauuggagugugcagu

SEQ ID NO: 988240 - RNA, 20 nt, Human
cacccuucuccugccucagc

SEQ ID NO: 988241 - RNA, 19 nt, Human
cacucaaaugaaaccacuc

SEQ ID NO: 988242 - RNA, 23 nt, Human
cacugcaagcucugccucccggg

SEQ ID NO: 988243 - RNA, 22 nt, Human
cacuggggcucaucuuggaggc

SEQ ID NO: 988244 - RNA, 18 nt, Human
cacuguguuagccaggau

SEQ ID NO: 988245 - RNA, 19 nt, Human
cacuguguuagccaggaug

SEQ ID NO: 988246 - RNA, 24 nt, Human
cacuguguuagccaggauggucuc

SEQ ID NO: 988247 - RNA, 20 nt, Human
cagccuccugaguagcuggg

SEQ ID NO: 988248 - RNA, 22 nt, Human
cagcugcagcaaaggcauggcu

SEQ ID NO: 988249 - RNA, 22 nt, Human
cagugaaggaggauugaaaaug

SEQ ID NO: 988250 - RNA, 19 nt, Human
caugaagcaaagcaacagc

SEQ ID NO: 988251 - RNA, 20 nt, Human
caugacccugagugugaaua

SEQ ID NO: 988252 - RNA, 19 nt, Human
caugucuuagcagugaaag

SEQ ID NO: 988253 - RNA, 22 nt, Human
ccaaagugcugggauuacaggc

SEQ ID NO: 988254 - RNA, 22 nt, Human
ccaaagugcugggauuacaggc

SEQ ID NO: 988255 - RNA, 24 nt, Human
ccaaagugcugggauuacaggcgu

SEQ ID NO: 988256 - RNA, 22 nt, Human
ccacacagaauuugccuaucac

SEQ ID NO: 988257 - RNA, 22 nt, Human
ccugaccucgugauccacccac

SEQ ID NO: 988258 - RNA, 23 nt, Human
ccugaguagcugggacuacaggu

SEQ ID NO: 988259 - RNA, 24 nt, Human
ccugaguagcugggacuacaggug

SEQ ID NO: 988260 - RNA, 24 nt, Human
ccugcacugcaggguggguaaagg

SEQ ID NO: 988261 - RNA, 23 nt, Human
ccugccucagccuccugaguagc

SEQ ID NO: 988262 - RNA, 25 nt, Human
cgaaggcacucaaaugaaaccaguc

SEQ ID NO: 988263 - RNA, 18 nt, Human
cgacaccacacccggcua

SEQ ID NO: 988264 - RNA, 24 nt, Human
cgggguuucacuguguuagccagg

SEQ ID NO: 988265 - RNA, 21 nt, Human
cgugcuaaaaaacccgaacuc

SEQ ID NO: 988266 - RNA, 23 nt, Human
cuaauuuuuguauuuuuaguaga

SEQ ID NO: 988267 - RNA, 24 nt, Human
cucacugcaagcucugccucccgg

SEQ ID NO: 988268 - RNA, 20 nt, Human
cucagacauucugauuuaau

SEQ ID NO: 988269 - RNA, 24 nt, Human
cucagccuccugaguagcugggac

SEQ ID NO: 988270 - RNA, 21 nt, Human
cucccggguucccacccuucu

SEQ ID NO: 988271 - RNA, 18 nt, Human
cuccugaccucgugaucc

SEQ ID NO: 988272 - RNA, 25 nt, Human
cuccugaccucgugauccacccacc

SEQ ID NO: 988273 - RNA, 23 nt, Human
cugccucagccuccugaguagcu

SEQ ID NO: 988274 - RNA, 19 nt, Human
cuggccaccacaagaguuc

SEQ ID NO: 988275 - RNA, 21 nt, Human
cuuuuuuuuuuuuuuuugagg

SEQ ID NO: 988276 - RNA, 21 nt, Human
gaaaagacaccaaccaaccau

SEQ ID NO: 988277 - RNA, 22 nt, Human
gaacaauguugaaauuguucuc

SEQ ID NO: 988278 - RNA, 21 nt, Human
gaccaggaggugggaggugac

SEQ ID NO: 988279 - RNA, 22 nt, Human
gaccucgugauccacccaccuc

SEQ ID NO: 988280 - RNA, 22 nt, Human
gaccucgugauccacccaccuc

SEQ ID NO: 988281 - RNA, 24 nt, Human
gaccucgugauccacccaccucgg

SEQ ID NO: 988282 - RNA, 24 nt, Human
gaccucgugauccacccaccucgg

SEQ ID NO: 988283 - RNA, 19 nt, Human
gaggcggagucucggucuu

SEQ ID NO: 988284 - RNA, 25 nt, Human
gaguagcugggacuacaggugcccg

SEQ ID NO: 988285 - RNA, 18 nt, Human
gauuacaggcgugagcca

SEQ ID NO: 988286 - RNA, 19 nt, Human
gauuacaggcgugagccac

SEQ ID NO: 988287 - RNA, 22 nt, Human
gauuacaggcgugagccacugc

SEQ ID NO: 988288 - RNA, 26 nt, Human
gcaaagccccaggauuuuggcaaaga

SEQ ID NO: 988289 - RNA, 21 nt, Human
gcaagaaaaccacuacgaauu

SEQ ID NO: 988290 - RNA, 20 nt, Human
gccuuaauauuauuuuuuga

SEQ ID NO: 988291 - RNA, 18 nt, Human
gcugaacaugugaaucau

SEQ ID NO: 988292 - RNA, 21 nt, Human
gcugaauacagagcacgucug

SEQ ID NO: 988293 - RNA, 21 nt, Human
gcuggcaaguuggugcuuguu

SEQ ID NO: 988294 - RNA, 19 nt, Human
ggaaugggcuuuucccagu

SEQ ID NO: 988295 - RNA, 19 nt, Human
ggauuccagcagaguucug

SEQ ID NO: 988296 - RNA, 23 nt, Human
gggguuucacuguguuagccagg

SEQ ID NO: 988297 - RNA, 20 nt, Human
ggucucgaucuccugaccuc

SEQ ID NO: 988298 - RNA, 23 nt, Human
guagagacgggguuucacugugu

SEQ ID NO: 988299 - RNA, 24 nt, Human
gugauccacccaccucggccuccc

SEQ ID NO: 988300 - RNA, 23 nt, Human
gugcaguggcacaaucucggcuc

SEQ ID NO: 988301 - RNA, 20 nt, Human
gugcuaaaaaacccgaacuc

SEQ ID NO: 988302 - RNA, 19 nt, Human
uaaaaaacccgaacucuac

SEQ ID NO: 988303 - RNA, 21 nt, Human
uaaaaaacccgaacucuacca

SEQ ID NO: 988304 - RNA, 21 nt, Human
uaaaguuuccuuuugggacua

SEQ ID NO: 988305 - RNA, 22 nt, Human
uaaauccccagaugaaaaagag

SEQ ID NO: 988306 - RNA, 25 nt, Human
uaaccucuccaaaaaagaccagaac

SEQ ID NO: 988307 - RNA, 24 nt, Human
uaagaaaaagacauaaucuccaaa

SEQ ID NO: 988308 - RNA, 28 nt, Human
uaagaaaaagacauaaucuccaaauaaa

SEQ ID NO: 988309 - RNA, 19 nt, Human
uaagcaagaaaaccacuac

SEQ ID NO: 988310 - RNA, 21 nt, Human
uaagcaagaaaaccacuacga

SEQ ID NO: 988311 - RNA, 24 nt, Human
uaauuuuuguauuuuuaguagaga

SEQ ID NO: 988312 - RNA, 20 nt, Human
uacacaugaagcaaagcaac

SEQ ID NO: 988313 - RNA, 19 nt, Human
uacaggcgugagccacugc

SEQ ID NO: 988314 - RNA, 23 nt, Human
uacaggcgugagccacugcgccc

SEQ ID NO: 988315 - RNA, 23 nt, Human
uacaggugcccgacaccacaccc

SEQ ID NO: 988316 - RNA, 22 nt, Human
uacauggcuggcaaguuggugc

SEQ ID NO: 988317 - RNA, 25 nt, Human
uagaaaaaggaaaaggccaacuuga

SEQ ID NO: 988318 - RNA, 21 nt, Human
uagccauacacaugaagcaaa

SEQ ID NO: 988319 - RNA, 21 nt, Human
uaggauuccagcagaguuccu

SEQ ID NO: 988320 - RNA, 21 nt, Human
uagguuucuucucugacaccu

SEQ ID NO: 988321 - RNA, 20 nt, Human
uaguagagacgggguuucac

SEQ ID NO: 988322 - RNA, 24 nt, Human
uaguagagacgggguuucacugug

SEQ ID NO: 988323 - RNA, 21 nt, Human
uauaaucauggggguggaggg

SEQ ID NO: 988324 - RNA, 22 nt, Human
uauaugcaugccaaauauugga

SEQ ID NO: 988325 - RNA, 19 nt, Human
uaucugaagacuugacugg

SEQ ID NO: 988326 - RNA, 20 nt, Human
ucaaggauaagcauacugca

SEQ ID NO: 988327 - RNA, 21 nt, Human
ucaaggauaagcauacugcaa

SEQ ID NO: 988328 - RNA, 18 nt, Human
ucacugcaagcucugccu

SEQ ID NO: 988329 - RNA, 18 nt, Human
ucacugcaagcucugccu

SEQ ID NO: 988330 - RNA, 24 nt, Human
ucacugcaagcucugccucccggg

SEQ ID NO: 988331 - RNA, 24 nt, Human
ucacuguguuagccaggauggucu

SEQ ID NO: 988332 - RNA, 23 nt, Human
ucagccuccugaguagcugggac

SEQ ID NO: 988333 - RNA, 23 nt, Human
ucagcugcagcaaaggcauggcu

SEQ ID NO: 988334 - RNA, 24 nt, Human
ucccaaagugcugggauuacaggc

SEQ ID NO: 988335 - RNA, 21 nt, Human
ucccggguucccacccuucuc

SEQ ID NO: 988336 - RNA, 24 nt, Human
ucccggguucccacccuucuccug

SEQ ID NO: 988337 - RNA, 24 nt, Human
uccugaguagcugggacuacaggu

SEQ ID NO: 988338 - RNA, 18 nt, Human
ucggccucccaaagugcu

SEQ ID NO: 988339 - RNA, 19 nt, Human
ucggucuuucacccagauu

SEQ ID NO: 988340 - RNA, 26 nt, Human
ucuaaccucuccaaaaaagaccagaa

SEQ ID NO: 988341 - RNA, 22 nt, Human
ucucacucuugguuaagcuuca

SEQ ID NO: 988342 - RNA, 21 nt, Human
ucuccaaaaaagaccagaacc

SEQ ID NO: 988343 - RNA, 25 nt, Human
ucuccaaaaaagaccagaaccaauu

SEQ ID NO: 988344 - RNA, 24 nt, Human
ucuccugccucagccuccugagua

SEQ ID NO: 988345 - RNA, 24 nt, Human
ucucggucuuucacccagauugga

SEQ ID NO: 988346 - RNA, 20 nt, Human
ucucuugaggucuuggucaa

SEQ ID NO: 988347 - RNA, 22 nt, Human
ucuuucuuucuuucuuucuuuc

SEQ ID NO: 988348 - RNA, 22 nt, Human
ucuuucuuucuuucuuucuuuc

SEQ ID NO: 988349 - RNA, 22 nt, Human
ucuuucuuucuuucuuucuuuu

SEQ ID NO: 988350 - RNA, 19 nt, Human
ugaaaagacaccaaccaac

SEQ ID NO: 988351 - RNA, 21 nt, Human
ugaaaagacaccaaccaacca

SEQ ID NO: 988352 - RNA, 25 nt, Human
ugaaaagacaccaaccaaccauuag

SEQ ID NO: 988353 - RNA, 25 nt, Human
ugaaagggaccaggaggugggaggu

SEQ ID NO: 988354 - RNA, 18 nt, Human
ugaacagguaaaucccca

SEQ ID NO: 988355 - RNA, 21 nt, Human
ugaacagguaaauccccagau

SEQ ID NO: 988356 - RNA, 22 nt, Human
ugaacaugacauauccucucac

SEQ ID NO: 988357 - RNA, 21 nt, Human
ugaagacuugacuggaggcug

SEQ ID NO: 988358 - RNA, 18 nt, Human
ugagaaagaacuuccaca

SEQ ID NO: 988359 - RNA, 22 nt, Human
ugagagagauuuuaagagcacc

SEQ ID NO: 988360 - RNA, 20 nt, Human
ugagaguguugaugccugug

SEQ ID NO: 988361 - RNA, 23 nt, Human
ugagugugaauaccuccuuaaau

SEQ ID NO: 988362 - RNA, 24 nt, Human
ugauccacccaccucggccuccca

SEQ ID NO: 988363 - RNA, 18 nt, Human
ugcagugccucuaccggc

SEQ ID NO: 988364 - RNA, 22 nt, Human
ugcaguggcacaaucucggcuc

SEQ ID NO: 988365 - RNA, 23 nt, Human
ugcaugacccugagugugaauac

SEQ ID NO: 988366 - RNA, 24 nt, Human
ugccucagccuccugaguagcugg

SEQ ID NO: 988367 - RNA, 21 nt, Human
ugccucccggguucccacccu

SEQ ID NO: 988368 - RNA, 22 nt, Human
ugccucuaccggccucucucug

SEQ ID NO: 988369 - RNA, 19 nt, Human
ugccuuggugucuucaugg

SEQ ID NO: 988370 - RNA, 20 nt, Human
ugccuuggugucuucauggc

SEQ ID NO: 988371 - RNA, 20 nt, Human
ugcuaaaaaacccgaacucu

SEQ ID NO: 988372 - RNA, 24 nt, Human
ugcuaaaaaacccgaacucuacca

SEQ ID NO: 988373 - RNA, 19 nt, Human
ugcugggaaaacaggucac

SEQ ID NO: 988374 - RNA, 24 nt, Human
ugcugggauuacaggcgugagcca

SEQ ID NO: 988375 - RNA, 23 nt, Human
uggaccuccccugcuuaucucac

SEQ ID NO: 988376 - RNA, 23 nt, Human
uggcaaaaggcacaaggcuguca

SEQ ID NO: 988377 - RNA, 21 nt, Human
uggcaaguuggugcuuguuag

SEQ ID NO: 988378 - RNA, 24 nt, Human
uggcacaaucucggcucacugcaa

SEQ ID NO: 988379 - RNA, 19 nt, Human
uggcaggagucugggcuga

SEQ ID NO: 988380 - RNA, 19 nt, Human
uggcugaagagcgacuaua

SEQ ID NO: 988381 - RNA, 20 nt, Human
ugggacuacaggugcccgac

SEQ ID NO: 988382 - RNA, 24 nt, Human
ugggacuacaggugcccgacacca

SEQ ID NO: 988383 - RNA, 18 nt, Human
ugggaggugacgcuggca

SEQ ID NO: 988384 - RNA, 18 nt, Human
ugggauuacaggcgugag

SEQ ID NO: 988385 - RNA, 19 nt, Human
ugggauuacaggcgugagc

SEQ ID NO: 988386 - RNA, 21 nt, Human
ugggauuacaggcgugagcca

SEQ ID NO: 988387 - RNA, 22 nt, Human
ugggauuacaggcgugagccac

SEQ ID NO: 988388 - RNA, 22 nt, Human
ugggauuacaggcgugagccac

SEQ ID NO: 988389 - RNA, 24 nt, Human
ugggauuacaggcgugagccacug

SEQ ID NO: 988390 - RNA, 26 nt, Human
ugggauuacaggcgugagccacugcg

SEQ ID NO: 988391 - RNA, 24 nt, Human
uggguaaaggauagaauugcaagc

SEQ ID NO: 988392 - RNA, 19 nt, Human
uggguggcuguguguacaa

SEQ ID NO: 988393 - RNA, 26 nt, Human
ugguaggagcaggguuaaccggaacg

SEQ ID NO: 988394 - RNA, 23 nt, Human
uguauaguuaucugucgcuaugu

SEQ ID NO: 988395 - RNA, 21 nt, Human
uguauuuuuaguagagacggg

SEQ ID NO: 988396 - RNA, 20 nt, Human
ugugcagugccucuaccggc

SEQ ID NO: 988397 - RNA, 22 nt, Human
ugugcaguggcacaaucucggc

SEQ ID NO: 988398 - RNA, 23 nt, Human
ugugcaguggcacaaucucggcu

SEQ ID NO: 988399 - RNA, 18 nt, Human
uguggguggguggguggc

SEQ ID NO: 988400 - RNA, 22 nt, Human
uguuagaaguucagaaauuuag

SEQ ID NO: 988401 - RNA, 20 nt, Human
uguuuagugaagccaaaagc

SEQ ID NO: 988402 - RNA, 27 nt, Human
uuaaaugaacagguaaauccccagaug

SEQ ID NO: 988403 - RNA, 24 nt, Human
uuaauccuggccucagguuacacu

SEQ ID NO: 988404 - RNA, 23 nt, Human
uuacaccagcauuucuguaauga

SEQ ID NO: 988405 - RNA, 18 nt, Human
uuaguagagacgggguuu

SEQ ID NO: 988406 - RNA, 21 nt, Human
uuaguagagacgggguuucac

SEQ ID NO: 988407 - RNA, 21 nt, Human
uuaguagagacgggguuucac

SEQ ID NO: 988408 - RNA, 24 nt, Human
uuaguagagacgggguuucacugu

SEQ ID NO: 988409 - RNA, 19 nt, Human
uuaucuaauaguguuagaa

SEQ ID NO: 988410 - RNA, 21 nt, Human
uucaagcaaacuccagccacc

SEQ ID NO: 988411 - RNA, 24 nt, Human
uucaagcaaacuccagccacccac

SEQ ID NO: 988412 - RNA, 21 nt, Human
uucacuguguuagccaggaug

SEQ ID NO: 988413 - RNA, 21 nt, Human
uucuuacaauaagcaagaaaa

SEQ ID NO: 988414 - RNA, 20 nt, Human
uugcaagcagaaauuguauu

SEQ ID NO: 988415 - RNA, 21 nt, Human
uugcaagcagaaauuguauuu

SEQ ID NO: 988416 - RNA, 24 nt, Human
uuggcaagcccccaggaaaugaaa

SEQ ID NO: 988417 - RNA, 20 nt, Human
uugguuccaguuugauggac

SEQ ID NO: 988418 - RNA, 19 nt, Human
uuguauugugucucuaacc

SEQ ID NO: 988419 - RNA, 23 nt, Human
uuguauuuuuaguagagacgggg

SEQ ID NO: 988420 - RNA, 23 nt, Human
uugugcagugccucuaccggccu

SEQ ID NO: 988421 - RNA, 23 nt, Human
uuguuuagugaagccaaaagccu

SEQ ID NO: 988422 - RNA, 19 nt, Human
uuucacuguguuagccagg

SEQ ID NO: 988423 - RNA, 23 nt, Human
uuuguaucuucuaggcuacuggg

SEQ ID NO: 988424 - RNA, 24 nt, Human
uuuuuaguagagacgggguuucac

SEQ ID NO: 988425 - RNA, 20 nt, Human
uuuuuguauuuuuaguagag

SEQ ID NO: 988426 - RNA, 18 nt, Human
uuuuuuuuuuugaggcgg

SEQ ID NO: 988427 - RNA, 23 nt, Human
aaaaaaccaaacuaggccaggcg

SEQ ID NO: 988428 - RNA, 23 nt, Human
aaaaacaaaacaaaaacaaauca

SEQ ID NO: 988429 - RNA, 24 nt, Human
aaaaagaaaagaagcaugaaaaga

SEQ ID NO: 988430 - RNA, 24 nt, Human
aaaaagaaaagaagcaugaaaaga

SEQ ID NO: 988431 - RNA, 26 nt, Human
aaaaagaaaagaagcaugaaaagaca

SEQ ID NO: 988432 - RNA, 22 nt, Human
aaaacaaaacaaaaacaaauca

SEQ ID NO: 988433 - RNA, 28 nt, Human
aaaagaaaagaagcaugaaaagacaaaa

SEQ ID NO: 988434 - RNA, 28 nt, Human
aaaagaaaagaagcaugaaaagacaaaa

SEQ ID NO: 988435 - RNA, 21 nt, Human
aaaagaagcaugaaaagacaa

SEQ ID NO: 988436 - RNA, 22 nt, Human
aaaauaaaucacacaacaaugu

SEQ ID NO: 988437 - RNA, 22 nt, Human
aaacaaaacaaaaacaaaucaa

SEQ ID NO: 988438 - RNA, 26 nt, Human
aaagaaaagaagcaugaaaagacaaa

SEQ ID NO: 988439 - RNA, 26 nt, Human
aaagaaaagaagcaugaaaagacaaa

SEQ ID NO: 988440 - RNA, 21 nt, Human
aaauaaaucacacaacaaugu

SEQ ID NO: 988441 - RNA, 24 nt, Human
aacaaaaacaaaucaaaucaaucg

SEQ ID NO: 988442 - RNA, 20 nt, Human
aacacggugaaaccccgucu

SEQ ID NO: 988443 - RNA, 21 nt, Human
aacacggugaaaccccgucuc

SEQ ID NO: 988444 - RNA, 19 nt, Human
aaccccaucucggggacca

SEQ ID NO: 988445 - RNA, 19 nt, Human
aagaagcaugaaaagacaa

SEQ ID NO: 988446 - RNA, 19 nt, Human
aagaagcaugaaaagacaa

SEQ ID NO: 988447 - RNA, 23 nt, Human
aagagcccaguucagugucuggc

SEQ ID NO: 988448 - RNA, 24 nt, Human
aauggcaugaaccugggaggcgga

SEQ ID NO: 988449 - RNA, 21 nt, Human
acaaaacaaaaacaaaucaaa

SEQ ID NO: 988450 - RNA, 21 nt, Human
acagcccggggcgggaggcgg

SEQ ID NO: 988451 - RNA, 21 nt, Human
acagccuccaaggccaccccc

SEQ ID NO: 988452 - RNA, 24 nt, Human
acagugcgagacucccucucaaaa

SEQ ID NO: 988453 - RNA, 21 nt, Human
acauacccgguggacuggcca

SEQ ID NO: 988454 - RNA, 31 nt, Human
accaaacuaggccaggcgcaguggcucacgg

SEQ ID NO: 988455 - RNA, 24 nt, Human
accccgucucuacuaaaaauacaa

SEQ ID NO: 988456 - RNA, 18 nt, Human
acugcacuccagccuggg

SEQ ID NO: 988457 - RNA, 24 nt, Human
acugcacuccagccugggugacag

SEQ ID NO: 988458 - RNA, 22 nt, Human
acuuuggggauaaaaagaaaag

SEQ ID NO: 988459 - RNA, 22 nt, Human
acuuuggggauaaaaagaaaag

SEQ ID NO: 988460 - RNA, 20 nt, Human
agaaaagaagcaugaaaaga

SEQ ID NO: 988461 - RNA, 20 nt, Human
agaaaagaagcaugaaaaga

SEQ ID NO: 988462 - RNA, 18 nt, Human
agaagcaugaaaagacaa

SEQ ID NO: 988463 - RNA, 19 nt, Human
agaaguccuugaaggggag

SEQ ID NO: 988464 - RNA, 22 nt, Human
agacagggguaggggauuaggg

SEQ ID NO: 988465 - RNA, 20 nt, Human
agcccagcagggcuuccugu

SEQ ID NO: 988466 - RNA, 18 nt, Human
agccuacuggaguuugcc

SEQ ID NO: 988467 - RNA, 24 nt, Human
agccugggugacagugcgagacuc

SEQ ID NO: 988468 - RNA, 23 nt, Human
agcugggcgugguggugggugcc

SEQ ID NO: 988469 - RNA, 18 nt, Human
aggagcugcggguaggag

SEQ ID NO: 988470 - RNA, 22 nt, Human
aggcaggagaauggcaugaacc

SEQ ID NO: 988471 - RNA, 24 nt, Human
aggcaggagaauggcaugaaccug

SEQ ID NO: 988472 - RNA, 21 nt, Human
aggccgaggcggguggaucac

SEQ ID NO: 988473 - RNA, 24 nt, Human
aggcgcaguggcucacgccuguaa

SEQ ID NO: 988474 - RNA, 24 nt, Human
aggcggagcuugcagugagccgag

SEQ ID NO: 988475 - RNA, 24 nt, Human
aggcggguggaucacgaggucagg

SEQ ID NO: 988476 - RNA, 19 nt, Human
aggcugaggcaggagaaug

SEQ ID NO: 988477 - RNA, 24 nt, Human
aguggcucacgccuguaaucccgg

SEQ ID NO: 988478 - RNA, 24 nt, Human
aucaugccacugcacuccagccug

SEQ ID NO: 988479 - RNA, 22 nt, Human
augccacugcacuccagccugg

SEQ ID NO: 988480 - RNA, 24 nt, Human
auggggauccuguggagcucccug

SEQ ID NO: 988481 - RNA, 22 nt, Human
caacugauucuccugccucagc

SEQ ID NO: 988482 - RNA, 22 nt, Human
cacagcagucacuuuauucuua

SEQ ID NO: 988483 - RNA, 20 nt, Human
cacagccuccaaggccaccc

SEQ ID NO: 988484 - RNA, 20 nt, Human
cacgccuguaaucccggcac

SEQ ID NO: 988485 - RNA, 24 nt, Human
cacgccuguaaucccggcacuuug

SEQ ID NO: 988486 - RNA, 20 nt, Human
cacuccagccugggugacag

SEQ ID NO: 988487 - RNA, 21 nt, Human
cacuccagccugggugacagu

SEQ ID NO: 988488 - RNA, 22 nt, Human
cacuccagccugggugacagug

SEQ ID NO: 988489 - RNA, 21 nt, Human
cacugcaaccuccgccuccca

SEQ ID NO: 988490 - RNA, 19 nt, Human
cacugcacuccagccuggg

SEQ ID NO: 988491 - RNA, 19 nt, Human
cacugcacuccagccuggg

SEQ ID NO: 988492 - RNA, 22 nt, Human
cacugcacuccagccuggguga

SEQ ID NO: 988493 - RNA, 23 nt, Human
cacugcacuccagccugggugac

SEQ ID NO: 988494 - RNA, 24 nt, Human
cacugcacuccagccugggugaca

SEQ ID NO: 988495 - RNA, 24 nt, Human
cacugcacuccagccugggugaca

SEQ ID NO: 988496 - RNA, 20 nt, Human
cagaaacgaaguccccucca

SEQ ID NO: 988497 - RNA, 19 nt, Human
cagcagggcuuccuguguc

SEQ ID NO: 988498 - RNA, 24 nt, Human
cagcuacucaggaggcugaggcag

SEQ ID NO: 988499 - RNA, 21 nt, Human
caugaaccugggaggcggagc

SEQ ID NO: 988500 - RNA, 20 nt, Human
ccacugcacuccagccuggg

SEQ ID NO: 988501 - RNA, 20 nt, Human
ccacugcacuccagccuggg

SEQ ID NO: 988502 - RNA, 21 nt, Human
ccacugcacuccagccugggu

SEQ ID NO: 988503 - RNA, 21 nt, Human
ccacugcacuccagccugggu

SEQ ID NO: 988504 - RNA, 23 nt, Human
ccacugcacuccagccuggguga

SEQ ID NO: 988505 - RNA, 24 nt, Human
ccacugcacuccagccugggugac

SEQ ID NO: 988506 - RNA, 18 nt, Human
ccaggagcugcggguagg

SEQ ID NO: 988507 - RNA, 25 nt, Human
ccccaggggccgcgggagggggcgg

SEQ ID NO: 988508 - RNA, 19 nt, Human
cccccgcccccucuaccuc

SEQ ID NO: 988509 - RNA, 24 nt, Human
cccccgcccccucuaccuccucgc

SEQ ID NO: 988510 - RNA, 23 nt, Human
cccccgggacugugcauccugcu

SEQ ID NO: 988511 - RNA, 21 nt, Human
ccccgcccccucuaccuccuc

SEQ ID NO: 988512 - RNA, 18 nt, Human
ccccggggcacagcccgg

SEQ ID NO: 988513 - RNA, 21 nt, Human
ccccggggcacagcccggggc

SEQ ID NO: 988514 - RNA, 18 nt, Human
cccgcccccucuaccucc

SEQ ID NO: 988515 - RNA, 20 nt, Human
cccgcccccucuaccuccuc

SEQ ID NO: 988516 - RNA, 24 nt, Human
cccucucaaaaaaaaacaaaacaa

SEQ ID NO: 988517 - RNA, 18 nt, Human
ccgccucccagguucaac

SEQ ID NO: 988518 - RNA, 24 nt, Human
ccgccucccagguucaacugauuc

SEQ ID NO: 988519 - RNA, 24 nt, Human
ccgggggugggaagaaggugggcc

SEQ ID NO: 988520 - RNA, 24 nt, Human
ccucccagguucaacugauucucc

SEQ ID NO: 988521 - RNA, 22 nt, Human
ccucccuuccccuccccuaggc

SEQ ID NO: 988522 - RNA, 21 nt, Human
ccuccuacggccccaggggcu

SEQ ID NO: 988523 - RNA, 23 nt, Human
ccuggcuaacacggugaaacccc

SEQ ID NO: 988524 - RNA, 24 nt, Human
ccuggcuaacacggugaaaccccg

SEQ ID NO: 988525 - RNA, 22 nt, Human
ccugggugacagugcgagacuc

SEQ ID NO: 988526 - RNA, 19 nt, Human
ccuguaguaucagcuacuc

SEQ ID NO: 988527 - RNA, 20 nt, Human
ccuugaaggggagacagggg

SEQ ID NO: 988528 - RNA, 23 nt, Human
cgacccccgcccccucuaccucc

SEQ ID NO: 988529 - RNA, 24 nt, Human
cgagaccauccuggcuaacacggu

SEQ ID NO: 988530 - RNA, 23 nt, Human
cgagacucccucucaaaaaaaaa

SEQ ID NO: 988531 - RNA, 19 nt, Human
cgcccccucuaccuccucg

SEQ ID NO: 988532 - RNA, 18 nt, Human
cgccuguaaucccggcac

SEQ ID NO: 988533 - RNA, 23 nt, Human
cgccuguaaucccggcacuuugg

SEQ ID NO: 988534 - RNA, 24 nt, Human
cgccuguaaucccggcacuuuggg

SEQ ID NO: 988535 - RNA, 24 nt, Human
cggcacuuugggaggccgaggcgg

SEQ ID NO: 988536 - RNA, 19 nt, Human
cguaaauuuuuuuucuuuu

SEQ ID NO: 988537 - RNA, 19 nt, Human
cguaaauuuuuuuucuuuu

SEQ ID NO: 988538 - RNA, 19 nt, Human
cgucaagagcccaguucag

SEQ ID NO: 988539 - RNA, 23 nt, Human
cuagcccagcagggcuuccugug

SEQ ID NO: 988540 - RNA, 22 nt, Human
cucacgccuguaaucccggcac

SEQ ID NO: 988541 - RNA, 24 nt, Human
cucacgccuguaaucccggcacuu

SEQ ID NO: 988542 - RNA, 24 nt, Human
cucacugcaaccuccgccucccag

SEQ ID NO: 988543 - RNA, 19 nt, Human
cuccaaccccaucucgggg

SEQ ID NO: 988544 - RNA, 19 nt, Human
cucccucucaaaaaaaaac

SEQ ID NO: 988545 - RNA, 21 nt, Human
cuccgcgcugcaguuagcccc

SEQ ID NO: 988546 - RNA, 18 nt, Human
cucuuguugcccaggcug

SEQ ID NO: 988547 - RNA, 23 nt, Human
cugauucuccugccucagccucc

SEQ ID NO: 988548 - RNA, 24 nt, Human
cugauucuccugccucagccuccc

SEQ ID NO: 988549 - RNA, 23 nt, Human
cugcaaccuccgccucccagguu

SEQ ID NO: 988550 - RNA, 24 nt, Human
cugcaaccuccgccucccagguuc

SEQ ID NO: 988551 - RNA, 23 nt, Human
cugcggccuccuacggccccagg

SEQ ID NO: 988552 - RNA, 18 nt, Human
cuggcuaacacggugaaa

SEQ ID NO: 988553 - RNA, 24 nt, Human
cuugcagugagccgagaucaugcc

SEQ ID NO: 988554 - RNA, 21 nt, Human
gacccccgcccccucuaccuc

SEQ ID NO: 988555 - RNA, 23 nt, Human
gagaucaugccacugcacuccag

SEQ ID NO: 988556 - RNA, 18 nt, Human
gagcgccaggagcugcgg

SEQ ID NO: 988557 - RNA, 21 nt, Human
gagcucccugggauguucuga

SEQ ID NO: 988558 - RNA, 18 nt, Human
gagcuugcagugagccga

SEQ ID NO: 988559 - RNA, 22 nt, Human
gagcuugcagugagccgagauc

SEQ ID NO: 988560 - RNA, 23 nt, Human
gaggcggguggaucacgagguca

SEQ ID NO: 988561 - RNA, 21 nt, Human
gaggggaagaggaagacccag

SEQ ID NO: 988562 - RNA, 24 nt, Human
gauuagggagugggggaugguaaa

SEQ ID NO: 988563 - RNA, 23 nt, Human
gcacuuugggaggccgaggcggg

SEQ ID NO: 988564 - RNA, 19 nt, Human
gccacugcacuccagccug

SEQ ID NO: 988565 - RNA, 24 nt, Human
gccacugcacuccagccuggguga

SEQ ID NO: 988566 - RNA, 20 nt, Human
gccgagaucaugccacugca

SEQ ID NO: 988567 - RNA, 20 nt, Human
gcgcaguggcucacgccugu

SEQ ID NO: 988568 - RNA, 24 nt, Human
gcuaacacggugaaaccccgucuc

SEQ ID NO: 988569 - RNA, 30 nt, Human
gcuggaaugcaauggugcagucucagcucc

SEQ ID NO: 988570 - RNA, 19 nt, Human
ggagacagggguaggggau

SEQ ID NO: 988571 - RNA, 18 nt, Human
ggagcuugcagugagccg

SEQ ID NO: 988572 - RNA, 24 nt, Human
ggagcuugcagugagccgagauca

SEQ ID NO: 988573 - RNA, 18 nt, Human
ggauuggaaagccuguug

SEQ ID NO: 988574 - RNA, 19 nt, Human
gggccgcgggagggggcgg

SEQ ID NO: 988575 - RNA, 21 nt, Human
gguaaagaggggaagaggaag

SEQ ID NO: 988576 - RNA, 19 nt, Human
gguaggggauuagggagug

SEQ ID NO: 988577 - RNA, 21 nt, Human
gguggaucacgaggucaggag

SEQ ID NO: 988578 - RNA, 21 nt, Human
guucagugucuggcacagaag

SEQ ID NO: 988579 - RNA, 25 nt, Human
uaaaaccccugaaaggugacuagcc

SEQ ID NO: 988580 - RNA, 20 nt, Human
uaaacuguacacuuaaaaau

SEQ ID NO: 988581 - RNA, 20 nt, Human
uaaacuguacacuuaaaaau

SEQ ID NO: 988582 - RNA, 22 nt, Human
uaacacggugaaaccccgucuc

SEQ ID NO: 988583 - RNA, 24 nt, Human
uaacacggugaaaccccgucucua

SEQ ID NO: 988584 - RNA, 20 nt, Human
uaggaggggcgagagaaagg

SEQ ID NO: 988585 - RNA, 20 nt, Human
uaggccucaggcuagcccag

SEQ ID NO: 988586 - RNA, 19 nt, Human
uagugcgacccccgccccc

SEQ ID NO: 988587 - RNA, 23 nt, Human
ucaaaaaaaaacaaaacaaaaac

SEQ ID NO: 988588 - RNA, 24 nt, Human
ucaaaaaaaaacaaaacaaaaaca

SEQ ID NO: 988589 - RNA, 25 nt, Human
ucaacugauucuccugccucagccu

SEQ ID NO: 988590 - RNA, 18 nt, Human
ucacgaggucaggagauc

SEQ ID NO: 988591 - RNA, 24 nt, Human
ucacgaggucaggagaucgagacc

SEQ ID NO: 988592 - RNA, 22 nt, Human
ucacgccuguaaucccggcacu

SEQ ID NO: 988593 - RNA, 22 nt, Human
ucacucuuguugcccaggcugg

SEQ ID NO: 988594 - RNA, 23 nt, Human
ucacucuuguugcccaggcugga

SEQ ID NO: 988595 - RNA, 19 nt, Human
ucacugcaaccuccgccuc

SEQ ID NO: 988596 - RNA, 24 nt, Human
ucacugcaaccuccgccucccagg

SEQ ID NO: 988597 - RNA, 25 nt, Human
ucacugcaaccuccgccucccaggu

SEQ ID NO: 988598 - RNA, 27 nt, Human
ucacugcaaccuccgccucccagguuc

SEQ ID NO: 988599 - RNA, 27 nt, Human
ucagcucacugcaaccuccgccuccca

SEQ ID NO: 988600 - RNA, 22 nt, Human
ucaggcgagccccggggcacag

SEQ ID NO: 988601 - RNA, 23 nt, Human
ucaugccacugcacuccagccug

SEQ ID NO: 988602 - RNA, 23 nt, Human
uccagccugggugacagugcgag

SEQ ID NO: 988603 - RNA, 24 nt, Human
uccagccugggugacagugcgaga

SEQ ID NO: 988604 - RNA, 21 nt, Human
ucccagguucaacugauucuc

SEQ ID NO: 988605 - RNA, 24 nt, Human
ucccagguucaacugauucuccug

SEQ ID NO: 988606 - RNA, 18 nt, Human
ucgcugcggccuccuacg

SEQ ID NO: 988607 - RNA, 25 nt, Human
ucucaaaaaaaaacaaaacaaaaac

SEQ ID NO: 988608 - RNA, 26 nt, Human
ucucaaaaaaaaacaaaacaaaaaca

SEQ ID NO: 988609 - RNA, 26 nt, Human
ucucaaaaaaaaacaaaacaaaaaca

SEQ ID NO: 988610 - RNA, 19 nt, Human
ucuccugccucagccuccc

SEQ ID NO: 988611 - RNA, 22 nt, Human
ucucuacuaaaaauacaaaaaa

SEQ ID NO: 988612 - RNA, 19 nt, Human
ucucuagggacacccuagu

SEQ ID NO: 988613 - RNA, 22 nt, Human
ucuuguugcccaggcuggaaug

SEQ ID NO: 988614 - RNA, 20 nt, Human
ucuuucagauuuucugugug

SEQ ID NO: 988615 - RNA, 20 nt, Human
ucuuucagauuuucugugug

SEQ ID NO: 988616 - RNA, 22 nt, Human
ugaaaagacaaaaaauaaauca

SEQ ID NO: 988617 - RNA, 22 nt, Human
ugaaaagacaaaaaauaaauca

SEQ ID NO: 988618 - RNA, 20 nt, Human
ugaaaggugacuagccgugg

SEQ ID NO: 988619 - RNA, 21 nt, Human
ugaaaggugacuagccguggc

SEQ ID NO: 988620 - RNA, 21 nt, Human
ugagaugcaguuucacucuug

SEQ ID NO: 988621 - RNA, 21 nt, Human
ugagaugcaguuucacucuug

SEQ ID NO: 988622 - RNA, 22 nt, Human
ugagccgagaucaugccacugc

SEQ ID NO: 988623 - RNA, 23 nt, Human
ugaggcaggagaauggcaugaac

SEQ ID NO: 988624 - RNA, 24 nt, Human
ugaggcaggagaauggcaugaacc

SEQ ID NO: 988625 - RNA, 25 nt, Human
ugaggcaggagaauggcaugaaccu

SEQ ID NO: 988626 - RNA, 20 nt, Human
ugauucuccugccucagccu

SEQ ID NO: 988627 - RNA, 20 nt, Human
ugcaguugacgcgggggcgg

SEQ ID NO: 988628 - RNA, 21 nt, Human
ugcccaggcuggaaugcaaug

SEQ ID NO: 988629 - RNA, 18 nt, Human
ugccucagccucccaugg

SEQ ID NO: 988630 - RNA, 22 nt, Human
ugccuguaguaucagcuacuca

SEQ ID NO: 988631 - RNA, 24 nt, Human
ugccuguaguaucagcuacucagg

SEQ ID NO: 988632 - RNA, 19 nt, Human
ugcggguaggaggggcgag

SEQ ID NO: 988633 - RNA, 20 nt, Human
uggcucacgccuguaauccc

SEQ ID NO: 988634 - RNA, 24 nt, Human
uggcucacgccuguaaucccggca

SEQ ID NO: 988635 - RNA, 19 nt, Human
ugggaagaaggugggccuc

SEQ ID NO: 988636 - RNA, 23 nt, Human
ugggaggccgaggcggguggauc

SEQ ID NO: 988637 - RNA, 24 nt, Human
ugggaggccgaggcggguggauca

SEQ ID NO: 988638 - RNA, 29 nt, Human
ugggaggcggagcuugcagugacaacggu

SEQ ID NO: 988639 - RNA, 24 nt, Human
ugggaggcggagcuugcagugagc

SEQ ID NO: 988640 - RNA, 22 nt, Human
uggggauaaaaagaaaagaagc

SEQ ID NO: 988641 - RNA, 22 nt, Human
uggggauaaaaagaaaagaagc

SEQ ID NO: 988642 - RNA, 18 nt, Human
uggggugcggguggucgg

SEQ ID NO: 988643 - RNA, 25 nt, Human
uggguaacacuacuaaacuguacac

SEQ ID NO: 988644 - RNA, 25 nt, Human
uggguaacacuacuaaacuguacac

SEQ ID NO: 988645 - RNA, 20 nt, Human
ugguaaagaggggaagagga

SEQ ID NO: 988646 - RNA, 24 nt, Human
uggugcagucucagcucacugcaa

SEQ ID NO: 988647 - RNA, 18 nt, Human
ugguggugggugccugua

SEQ ID NO: 988648 - RNA, 23 nt, Human
uguaugauucuuucagauuuucu

SEQ ID NO: 988649 - RNA, 23 nt, Human
uguaugauucuuucagauuuucu

SEQ ID NO: 988650 - RNA, 18 nt, Human
ugugagcaaccgccccgg

SEQ ID NO: 988651 - RNA, 18 nt, Human
uguggaaucagaauuugu

SEQ ID NO: 988652 - RNA, 22 nt, Human
uguugcccaggcuggaaugcaa

SEQ ID NO: 988653 - RNA, 24 nt, Human
uuagcugggcgugguggugggugc

SEQ ID NO: 988654 - RNA, 18 nt, Human
uuagggagugggggaugg

SEQ ID NO: 988655 - RNA, 18 nt, Human
uucaacugauucuccugc

SEQ ID NO: 988656 - RNA, 23 nt, Human
uucaacugauucuccugccucag

SEQ ID NO: 988657 - RNA, 24 nt, Human
uucacucuuguugcccaggcugga

SEQ ID NO: 988658 - RNA, 20 nt, Human
uugaaggggagacaggggua

SEQ ID NO: 988659 - RNA, 18 nt, Human
uugcagugagccgagauc

SEQ ID NO: 988660 - RNA, 20 nt, Human
uugcagugagccgagaucau

SEQ ID NO: 988661 - RNA, 21 nt, Human
uugcagugagccgagaucaug

SEQ ID NO: 988662 - RNA, 18 nt, Human
uugcccaggcuggaaugc

SEQ ID NO: 988663 - RNA, 19 nt, Human
uuggcggccgagaucuccg

SEQ ID NO: 988664 - RNA, 23 nt, Human
uuggcggccgagaucuccgcgcu

SEQ ID NO: 988665 - RNA, 23 nt, Human
uugggacauacccgguggacugg

SEQ ID NO: 988666 - RNA, 25 nt, Human
uugggaggccgaggcggguggauca

SEQ ID NO: 988667 - RNA, 24 nt, Human
uuucacucuuguugcccaggcugg

SEQ ID NO: 988668 - RNA, 18 nt, Human
uuuuucuuuuuuuuuuug

SEQ ID NO: 988669 - RNA, 18 nt, Human
uuuuucuuuuuuuuuuug

SEQ ID NO: 988670 - RNA, 19 nt, Human
uuuuuucuuuuuuuuuuug

SEQ ID NO: 988671 - RNA, 23 nt, Human
uuuuuucuuuuuuuuuuugagau

SEQ ID NO: 988672 - RNA, 21 nt, Human
uuuuuuuuuuuuuuaggugga

SEQ ID NO: 988673 - RNA, 21 nt, Human
uuuuuuuuuuuuuuuuuuagg

SEQ ID NO: 988674 - RNA, 21 nt, Human
aaaauaaaggcugaaaacuuu

SEQ ID NO: 988675 - RNA, 20 nt, Human
acccuaaaaucaaaggcaua

SEQ ID NO: 988676 - RNA, 23 nt, Human
caaaggcauaaaaauaaaggcug

SEQ ID NO: 988677 - RNA, 27 nt, Human
caaaggcauaaaaauaaaggcugaaaa

SEQ ID NO: 988678 - RNA, 23 nt, Human
caauaucacccuaaaaucaaagg

SEQ ID NO: 988679 - RNA, 24 nt, Human
caggcaauuacaugcaccaauauc

SEQ ID NO: 988680 - RNA, 22 nt, Human
cauaccuaacacauuaaauacu

SEQ ID NO: 988681 - RNA, 26 nt, Human
gcugaaaacuuuguguuucuccaucu

SEQ ID NO: 988682 - RNA, 18 nt, Human
uaaaaucaaaggcauaaa

SEQ ID NO: 988683 - RNA, 18 nt, Human
uaaaaucaaaggcauaaa

SEQ ID NO: 988684 - RNA, 20 nt, Human
uaacacauuaaauacuacuu

SEQ ID NO: 988685 - RNA, 24 nt, Human
uacuuuagaaaauauacaauuauu

SEQ ID NO: 988686 - RNA, 27 nt, Human
uacuuuauccuuuaaauagucaaaagu

SEQ ID NO: 988687 - RNA, 18 nt, Human
uaucacccuaaaaucaaa

SEQ ID NO: 988688 - RNA, 22 nt, Human
ucacccuaaaaucaaaggcaua

SEQ ID NO: 988689 - RNA, 22 nt, Human
uccccagaugguaauuuucgga

SEQ ID NO: 988690 - RNA, 21 nt, Human
uuauauaugguuuccccagau

SEQ ID NO: 988691 - RNA, 24 nt, Human
uuauguguggucauuaaaacccag

SEQ ID NO: 988692 - RNA, 22 nt, Human
cuauacauauauaugcaguauu

SEQ ID NO: 988693 - RNA, 28 nt, Human
gcgcagcuuccgggaaagggggaacgcc

SEQ ID NO: 988694 - RNA, 21 nt, Human
uaagcacacuugauauauaug

SEQ ID NO: 988695 - RNA, 21 nt, Human
uauacauauauaugcaguauu

SEQ ID NO: 988696 - RNA, 26 nt, Human
uaugugucagagucuauacauauaua

SEQ ID NO: 988697 - RNA, 28 nt, Human
uaugugucagagucuauacauauauaug

SEQ ID NO: 988698 - RNA, 19 nt, Human
ucaaaugaagcucaccugc

SEQ ID NO: 988699 - RNA, 23 nt, Human
uccacagccgggacccguuaccc

SEQ ID NO: 988700 - RNA, 21 nt, Human
uccagaaaguuucuauuucau

SEQ ID NO: 988701 - RNA, 21 nt, Human
uccagaaaguuucuauuucau

SEQ ID NO: 988702 - RNA, 25 nt, Human
uggagaagcuuccggccggaaacgc

SEQ ID NO: 988703 - RNA, 23 nt, Human
uuccacagccgggacccguuacc

SEQ ID NO: 988704 - RNA, 23 nt, Human
uuuccagaaaguuucuauuucau

SEQ ID NO: 988705 - RNA, 20 nt, Human
uuuucuaagcacacuugaua

SEQ ID NO: 988706 - RNA, 19 nt, Human
aaagcacauggaaaauuca

SEQ ID NO: 988707 - RNA, 22 nt, Human
aacaaaacaaaaaaacuuauaa

SEQ ID NO: 988708 - RNA, 21 nt, Human
aacauccaccaaaggcuuuca

SEQ ID NO: 988709 - RNA, 26 nt, Human
aaccucgcuccuucgacuagcuccua

SEQ ID NO: 988710 - RNA, 21 nt, Human
aagaguacuguagaaaagcca

SEQ ID NO: 988711 - RNA, 24 nt, Human
aagcacauggaaaauucagaaaua

SEQ ID NO: 988712 - RNA, 22 nt, Human
aagccacugucuuuucaguagu

SEQ ID NO: 988713 - RNA, 23 nt, Human
aagcuaccauccgccgacaucuu

SEQ ID NO: 988714 - RNA, 22 nt, Human
aauucuucacagaggacaaagc

SEQ ID NO: 988715 - RNA, 26 nt, Human
acagcggaugaaauaguuuauccaga

SEQ ID NO: 988716 - RNA, 21 nt, Human
agaaauaaaaacacaccacca

SEQ ID NO: 988717 - RNA, 21 nt, Human
agucuuuggcaccucacacuc

SEQ ID NO: 988718 - RNA, 23 nt, Human
auaauucuucacagaggacaaag

SEQ ID NO: 988719 - RNA, 18 nt, Human
auccuuuccccccucccu

SEQ ID NO: 988720 - RNA, 24 nt, Human
caaaacaaaaaaacuuauaauuua

SEQ ID NO: 988721 - RNA, 21 nt, Human
caagggcucgaagcuaccauc

SEQ ID NO: 988722 - RNA, 24 nt, Human
caccaccauauaaagaaaucaaaa

SEQ ID NO: 988723 - RNA, 21 nt, Human
caccauauaaagaaaucaaaa

SEQ ID NO: 988724 - RNA, 21 nt, Human
caccucacacucuccacuccc

SEQ ID NO: 988725 - RNA, 22 nt, Human
cacugucuuuucaguaguucca

SEQ ID NO: 988726 - RNA, 19 nt, Human
cauaacauccaccaaaggc

SEQ ID NO: 988727 - RNA, 22 nt, Human
caucuugauuugaaaauaauuu

SEQ ID NO: 988728 - RNA, 19 nt, Human
ccagaacuacaaaacacau

SEQ ID NO: 988729 - RNA, 23 nt, Human
ccagaacuacaaaacacauuuuc

SEQ ID NO: 988730 - RNA, 21 nt, Human
ccccccucccuuuuauaauuc

SEQ ID NO: 988731 - RNA, 19 nt, Human
cccgccucaaccucgcucc

SEQ ID NO: 988732 - RNA, 25 nt, Human
cccgccucaaccucgcuccuucgac

SEQ ID NO: 988733 - RNA, 20 nt, Human
ccucacacucuccacucccc

SEQ ID NO: 988734 - RNA, 23 nt, Human
cgccucaaccucgcuccuucgac

SEQ ID NO: 988735 - RNA, 20 nt, Human
cuaauuagaucccaacugua

SEQ ID NO: 988736 - RNA, 20 nt, Human
cuagucuuuggcaccucaca

SEQ ID NO: 988737 - RNA, 22 nt, Human
cuccccugcgguccccaaguca

SEQ ID NO: 988738 - RNA, 23 nt, Human
cucuccacuccccugcggucccc

SEQ ID NO: 988739 - RNA, 21 nt, Human
cuuuggcaccucacacucucc

SEQ ID NO: 988740 - RNA, 22 nt, Human
gaaaacaaaacaaaaaaacuua

SEQ ID NO: 988741 - RNA, 23 nt, Human
gaacagauauaaaaaauauucuu

SEQ ID NO: 988742 - RNA, 23 nt, Human
gccaaauugucuauuuccagguu

SEQ ID NO: 988743 - RNA, 21 nt, Human
gguugcaccacagauuuggca

SEQ ID NO: 988744 - RNA, 22 nt, Human
guuuuuaaaugcuuaugguaug

SEQ ID NO: 988745 - RNA, 28 nt, Human
uaaaaaagaauugcuuccccaaaucuca

SEQ ID NO: 988746 - RNA, 22 nt, Human
uaaacaaauauuaaagcacaug

SEQ ID NO: 988747 - RNA, 25 nt, Human
uaacauaaaucaaaugcuuagaacu

SEQ ID NO: 988748 - RNA, 23 nt, Human
uaauuagaucccaacuguauaaa

SEQ ID NO: 988749 - RNA, 21 nt, Human
uagaaauaauuuuggaaacag

SEQ ID NO: 988750 - RNA, 22 nt, Human
uauccagaacuacaaaacacau

SEQ ID NO: 988751 - RNA, 18 nt, Human
ucacacucuccacucccc

SEQ ID NO: 988752 - RNA, 19 nt, Human
ucacuggagauagugguug

SEQ ID NO: 988753 - RNA, 23 nt, Human
ucagaaauaaaaacacaccacca

SEQ ID NO: 988754 - RNA, 19 nt, Human
ucaguaguuccaaauggug

SEQ ID NO: 988755 - RNA, 24 nt, Human
uccccaagucacgucucgcagcug

SEQ ID NO: 988756 - RNA, 21 nt, Human
ucgcugcccgccucaaccucg

SEQ ID NO: 988757 - RNA, 21 nt, Human
ugcccaggugagcgaccugac

SEQ ID NO: 988758 - RNA, 23 nt, Human
uggaaaacaaaacaaaaaaacuu

SEQ ID NO: 988759 - RNA, 24 nt, Human
uggaaaacaaaacaaaaaaacuua

SEQ ID NO: 988760 - RNA, 19 nt, Human
ugucacagagaugcuccuc

SEQ ID NO: 988761 - RNA, 21 nt, Human
uucagaaauaaaaacacacca

SEQ ID NO: 988762 - RNA, 21 nt, Human
uuccccccucccuuuuauaau

SEQ ID NO: 988763 - RNA, 24 nt, Human
uuccuaauuagaucccaacuguau

SEQ ID NO: 988764 - RNA, 21 nt, Human
uucuuuguucauaaauucuga

SEQ ID NO: 988765 - RNA, 21 nt, Human
uuugccccauaacauccacca

SEQ ID NO: 988766 - RNA, 22 nt, Human
aaaaaaaauccugguucucugu

SEQ ID NO: 988767 - RNA, 22 nt, Human
aaaaagccacaccucugaaugg

SEQ ID NO: 988768 - RNA, 21 nt, Human
aacaauaauuaaaaaaaaucc

SEQ ID NO: 988769 - RNA, 21 nt, Human
aagccacaccucugaaugguc

SEQ ID NO: 988770 - RNA, 22 nt, Human
aaggauugcaacuggaggcuuu

SEQ ID NO: 988771 - RNA, 23 nt, Human
aauaacucuuuucagaaaacaga

SEQ ID NO: 988772 - RNA, 24 nt, Human
aaucugucacccgaaauuucccuu

SEQ ID NO: 988773 - RNA, 22 nt, Human
aaugagggcccaggagagaggg

SEQ ID NO: 988774 - RNA, 24 nt, Human
acccacccacccacuuccagaaac

SEQ ID NO: 988775 - RNA, 19 nt, Human
acgauuuguuucacaaagu

SEQ ID NO: 988776 - RNA, 24 nt, Human
acguggaaaaagccacaccucuga

SEQ ID NO: 988777 - RNA, 24 nt, Human
agacaggaaggugcucgcaugcgg

SEQ ID NO: 988778 - RNA, 18 nt, Human
agacguggaaaaagccac

SEQ ID NO: 988779 - RNA, 24 nt, Human
agcagagaaggugcccucugccag

SEQ ID NO: 988780 - RNA, 18 nt, Human
aggagaaaaagacgugga

SEQ ID NO: 988781 - RNA, 21 nt, Human
aggagaaaaagacguggaaaa

SEQ ID NO: 988782 - RNA, 22 nt, Human
agugaagggggaccugcccgga

SEQ ID NO: 988783 - RNA, 28 nt, Human
caaaaccagugccaggagucaaaccugg

SEQ ID NO: 988784 - RNA, 23 nt, Human
caccaucacugcaggagcccaaa

SEQ ID NO: 988785 - RNA, 24 nt, Human
cacucuaauucuugaucacucauc

SEQ ID NO: 988786 - RNA, 22 nt, Human
cagcucauugaaggauugcaac

SEQ ID NO: 988787 - RNA, 22 nt, Human
caggagagaggggaggaggggg

SEQ ID NO: 988788 - RNA, 19 nt, Human
cagggcacucuaauucuug

SEQ ID NO: 988789 - RNA, 22 nt, Human
cagugccaggagucaaaccuga

SEQ ID NO: 988790 - RNA, 21 nt, Human
caucauugccucucuccuguu

SEQ ID NO: 988791 - RNA, 21 nt, Human
ccaaguaucaaaaccagugcc

SEQ ID NO: 988792 - RNA, 19 nt, Human
ccacccacccacuuccaga

SEQ ID NO: 988793 - RNA, 19 nt, Human
ccaggaucaugcccucccc

SEQ ID NO: 988794 - RNA, 21 nt, Human
ccaggaucaugcccuccccuu

SEQ ID NO: 988795 - RNA, 25 nt, Human
ccaggaucaugcccuccccuuuccu

SEQ ID NO: 988796 - RNA, 22 nt, Human
ccaggcggcuccggcucccccc

SEQ ID NO: 988797 - RNA, 22 nt, Human
ccaguccguuccaacaaaguua

SEQ ID NO: 988798 - RNA, 18 nt, Human
cccaaccuuggccuucga

SEQ ID NO: 988799 - RNA, 21 nt, Human
cccaaccuuggccuucgacac

SEQ ID NO: 988800 - RNA, 22 nt, Human
cccaauacacugugcuaccaaa

SEQ ID NO: 988801 - RNA, 19 nt, Human
cccacccacccacuuccag

SEQ ID NO: 988802 - RNA, 21 nt, Human
cccacccacccacuuccagaa

SEQ ID NO: 988803 - RNA, 22 nt, Human
cccacccacccacuuccagaaa

SEQ ID NO: 988804 - RNA, 19 nt, Human
ccccaaccuuggccuucga

SEQ ID NO: 988805 - RNA, 19 nt, Human
ccccgccgccgccgccucc

SEQ ID NO: 988806 - RNA, 21 nt, Human
ccccgccgccgccgccuccgg

SEQ ID NO: 988807 - RNA, 22 nt, Human
ccccgccgccgccgccuccggg

SEQ ID NO: 988808 - RNA, 20 nt, Human
cccgaaauuucccuuucucc

SEQ ID NO: 988809 - RNA, 23 nt, Human
cccucuaaccaaaccuagccccc

SEQ ID NO: 988810 - RNA, 22 nt, Human
cccugcggcgccacuucuccug

SEQ ID NO: 988811 - RNA, 18 nt, Human
ccgccgccgccgccuccg

SEQ ID NO: 988812 - RNA, 18 nt, Human
ccgccgccuccgggaucg

SEQ ID NO: 988813 - RNA, 24 nt, Human
ccgccuccgggaucggguugcuuc

SEQ ID NO: 988814 - RNA, 20 nt, Human
ccgccuccgucgucucugcc

SEQ ID NO: 988815 - RNA, 21 nt, Human
ccucccaccugagggcuggac

SEQ ID NO: 988816 - RNA, 18 nt, Human
ccuccgucgucucugccg

SEQ ID NO: 988817 - RNA, 19 nt, Human
ccuccgucgucucugccgc

SEQ ID NO: 988818 - RNA, 19 nt, Human
ccucuaaccaaaccuagcc

SEQ ID NO: 988819 - RNA, 25 nt, Human
ccucugaauggucauucagaaauuc

SEQ ID NO: 988820 - RNA, 25 nt, Human
cgaggucacggcagagucuccauga

SEQ ID NO: 988821 - RNA, 24 nt, Human
cucaaucaaacccacccacccacu

SEQ ID NO: 988822 - RNA, 21 nt, Human
cuccugagggugcucuacagc

SEQ ID NO: 988823 - RNA, 20 nt, Human
cucuaaccaaaccuagcccc

SEQ ID NO: 988824 - RNA, 22 nt, Human
cucucuccuguuccccucccca

SEQ ID NO: 988825 - RNA, 18 nt, Human
cugcggcgccacuucucc

SEQ ID NO: 988826 - RNA, 20 nt, Human
gaaaaagccacaccucugaa

SEQ ID NO: 988827 - RNA, 20 nt, Human
gagaggggaggagggggcuc

SEQ ID NO: 988828 - RNA, 20 nt, Human
gagcaguucauugcaggaga

SEQ ID NO: 988829 - RNA, 22 nt, Human
gagcauaguuugauaugcgugc

SEQ ID NO: 988830 - RNA, 18 nt, Human
gcgugaccccugcggcgc

SEQ ID NO: 988831 - RNA, 21 nt, Human
ggaucggguugcuuccgccuc

SEQ ID NO: 988832 - RNA, 23 nt, Human
ggccuucgacacuggggggcugg

SEQ ID NO: 988833 - RNA, 23 nt, Human
guucucaaucaaacccacccacc

SEQ ID NO: 988834 - RNA, 19 nt, Human
uaacucuuuucagaaaaca

SEQ ID NO: 988835 - RNA, 24 nt, Human
uacacugugcuaccaaauucucug

SEQ ID NO: 988836 - RNA, 19 nt, Human
uaccaaauucucugaauuc

SEQ ID NO: 988837 - RNA, 25 nt, Human
ucaaacccacccacccacuuccaga

SEQ ID NO: 988838 - RNA, 20 nt, Human
ucaaucaaacccacccaccc

SEQ ID NO: 988839 - RNA, 23 nt, Human
ucagauggugaaaaugagagaca

SEQ ID NO: 988840 - RNA, 25 nt, Human
ucagauggugaaaaugagagacagg

SEQ ID NO: 988841 - RNA, 22 nt, Human
ucagccagggugaucaaucugu

SEQ ID NO: 988842 - RNA, 23 nt, Human
ucaugcccuccccuuuccucauu

SEQ ID NO: 988843 - RNA, 27 nt, Human
uccccccgccgccgccgccuccgggau

SEQ ID NO: 988844 - RNA, 18 nt, Human
ucccucugccaacaagga

SEQ ID NO: 988845 - RNA, 19 nt, Human
uccucauucccgccccaca

SEQ ID NO: 988846 - RNA, 22 nt, Human
uccuguuccccuccccaaccuu

SEQ ID NO: 988847 - RNA, 24 nt, Human
ucuacagccgcccucuaaccaaac

SEQ ID NO: 988848 - RNA, 22 nt, Human
ucuaucuuguuacuuauuacuc

SEQ ID NO: 988849 - RNA, 23 nt, Human
ucucaaucaaacccacccaccca

SEQ ID NO: 988850 - RNA, 23 nt, Human
ucucuccuguuccccuccccaac

SEQ ID NO: 988851 - RNA, 27 nt, Human
ucuguaauuacggaaaaggaaagacua

SEQ ID NO: 988852 - RNA, 21 nt, Human
ugaaagauuaaaagcagagaa

SEQ ID NO: 988853 - RNA, 21 nt, Human
ugcguacauacuuacgauuug

SEQ ID NO: 988854 - RNA, 21 nt, Human
ugcgugaccccugcggcgcca

SEQ ID NO: 988855 - RNA, 28 nt, Human
uggaaaaagccacaccucugaauggugg

SEQ ID NO: 988856 - RNA, 23 nt, Human
uucucugaauucccugaaccuca

SEQ ID NO: 988857 - RNA, 21 nt, Human
uuuuccacaaauuagaacuug

SEQ ID NO: 988858 - RNA, 18 nt, Human
uuuuuuuuuuuuuuuuug

SEQ ID NO: 988859 - RNA, 19 nt, Human
cacucacgagcucacacuc

SEQ ID NO: 988860 - RNA, 18 nt, Human
cggcggcgggggcggugg

SEQ ID NO: 988861 - RNA, 24 nt, Human
gcggcgggggcgguggcggcggcg

SEQ ID NO: 988862 - RNA, 23 nt, Human
ggcggcgggggcgguggcggcgg

SEQ ID NO: 988863 - RNA, 24 nt, Human
gggcgguggcggcggcgcccacuc

SEQ ID NO: 988864 - RNA, 22 nt, Human
uuacaaggaacgaaggggccac

SEQ ID NO: 988865 - RNA, 23 nt, Human
aaaacagguguguuuauauucuc

SEQ ID NO: 988866 - RNA, 26 nt, Human
aaacaaauacauccaaaaaggguuuc

SEQ ID NO: 988867 - RNA, 22 nt, Human
aaacagguguguuuauauucuc

SEQ ID NO: 988868 - RNA, 20 nt, Human
aaagaaacaaauacauccaa

SEQ ID NO: 988869 - RNA, 20 nt, Human
aacaagcuaauaugaucuga

SEQ ID NO: 988870 - RNA, 20 nt, Human
aaccuaggccuucugacuug

SEQ ID NO: 988871 - RNA, 20 nt, Human
aacugacccaaaacuaccug

SEQ ID NO: 988872 - RNA, 24 nt, Human
aagcucaaauuuuuauuaaccuug

SEQ ID NO: 988873 - RNA, 23 nt, Human
aaugaaugggaucuagaaaggga

SEQ ID NO: 988874 - RNA, 23 nt, Human
accaauugaacccucacaacagc

SEQ ID NO: 988875 - RNA, 21 nt, Human
acugaaaaacacuaaaacuga

SEQ ID NO: 988876 - RNA, 19 nt, Human
agaaacaaauacauccaaa

SEQ ID NO: 988877 - RNA, 20 nt, Human
agagaaacaagccuaugggg

SEQ ID NO: 988878 - RNA, 19 nt, Human
agaggagagcucgcgggcu

SEQ ID NO: 988879 - RNA, 21 nt, Human
agcauuuuacaauucugaaag

SEQ ID NO: 988880 - RNA, 24 nt, Human
aggcagaaaagugucucaaaaaca

SEQ ID NO: 988881 - RNA, 19 nt, Human
agggguaaaacccaacugc

SEQ ID NO: 988882 - RNA, 20 nt, Human
aggugcagaaaaugaauggg

SEQ ID NO: 988883 - RNA, 18 nt, Human
agguguguuuauauucuc

SEQ ID NO: 988884 - RNA, 18 nt, Human
aguauacugggcucaaaa

SEQ ID NO: 988885 - RNA, 20 nt, Human
agugaggagaacaaggcuaa

SEQ ID NO: 988886 - RNA, 22 nt, Human
agugaggagaacaaggcuaaga

SEQ ID NO: 988887 - RNA, 23 nt, Human
auagcaauggagagaaacaagcc

SEQ ID NO: 988888 - RNA, 23 nt, Human
caaaagcacaguaaagcuuaaca

SEQ ID NO: 988889 - RNA, 18 nt, Human
caaaaguauguugaacuu

SEQ ID NO: 988890 - RNA, 21 nt, Human
caagcagcagugaucaaaaca

SEQ ID NO: 988891 - RNA, 19 nt, Human
cacacaguugguaaaugau

SEQ ID NO: 988892 - RNA, 25 nt, Human
cacauauaccaauugaacccucaca

SEQ ID NO: 988893 - RNA, 20 nt, Human
caguauacugggcucaaaac

SEQ ID NO: 988894 - RNA, 21 nt, Human
cauaaaaacuaagggguaaaa

SEQ ID NO: 988895 - RNA, 22 nt, Human
cccaaaacuaccugucaaaagc

SEQ ID NO: 988896 - RNA, 20 nt, Human
ccucagcaacaagcuaauau

SEQ ID NO: 988897 - RNA, 21 nt, Human
cgaaaaauacugcagcuacau

SEQ ID NO: 988898 - RNA, 28 nt, Human
cgggcuccucgcucaggcuccaccccuu

SEQ ID NO: 988899 - RNA, 27 nt, Human
cucuccucuaaauccauccuuuccaaa

SEQ ID NO: 988900 - RNA, 24 nt, Human
cugugagguaggcaggguaggugu

SEQ ID NO: 988901 - RNA, 20 nt, Human
cuguuuugaggauccuuggc

SEQ ID NO: 988902 - RNA, 19 nt, Human
cuuacagucauauagcauu

SEQ ID NO: 988903 - RNA, 19 nt, Human
cuuacagucauauagcauu

SEQ ID NO: 988904 - RNA, 18 nt, Human
cuuguucuucagugguuu

SEQ ID NO: 988905 - RNA, 19 nt, Human
gaacaaaugcaauaauucc

SEQ ID NO: 988906 - RNA, 19 nt, Human
gaauauaacugacccaaaa

SEQ ID NO: 988907 - RNA, 20 nt, Human
ggaugaaccauuagugucuu

SEQ ID NO: 988908 - RNA, 23 nt, Human
ggcuguagaaucugaaacuuaaa

SEQ ID NO: 988909 - RNA, 20 nt, Human
gguaaaaaggaacacuuguu

SEQ ID NO: 988910 - RNA, 20 nt, Human
gugaaaaacagcaaaugcaa

SEQ ID NO: 988911 - RNA, 22 nt, Human
guugaguuuggaaguuaaggaa

SEQ ID NO: 988912 - RNA, 22 nt, Human
uaaaauuccagguauggccuuc

SEQ ID NO: 988913 - RNA, 18 nt, Human
uaaauccauccuuuccaa

SEQ ID NO: 988914 - RNA, 23 nt, Human
uaacaggcauaaaaacuaagggg

SEQ ID NO: 988915 - RNA, 20 nt, Human
uaagaaaaacaaaacaggug

SEQ ID NO: 988916 - RNA, 21 nt, Human
uacugcagcuacauuucaguc

SEQ ID NO: 988917 - RNA, 23 nt, Human
uagaaggcagaaaagugucucaa

SEQ ID NO: 988918 - RNA, 25 nt, Human
uauacugggcucaaaaccaacuuuc

SEQ ID NO: 988919 - RNA, 25 nt, Human
ucaaaagcuuugccaucuuucccaa

SEQ ID NO: 988920 - RNA, 22 nt, Human
ucaaguaauaauauccuaugcu

SEQ ID NO: 988921 - RNA, 23 nt, Human
ucgcgggcuccucgcucaggcuc

SEQ ID NO: 988922 - RNA, 18 nt, Human
ugaacccucacaacagcc

SEQ ID NO: 988923 - RNA, 19 nt, Human
ugaacccucacaacagccc

SEQ ID NO: 988924 - RNA, 20 nt, Human
ugaaguaaggucacacaguu

SEQ ID NO: 988925 - RNA, 23 nt, Human
ugaauauaacugacccaaaacua

SEQ ID NO: 988926 - RNA, 20 nt, Human
ugaaugggaucuagaaaggg

SEQ ID NO: 988927 - RNA, 24 nt, Human
ugacgaaaaauacugcagcuacau

SEQ ID NO: 988928 - RNA, 18 nt, Human
ugagguaggcaggguagg

SEQ ID NO: 988929 - RNA, 21 nt, Human
ugaguuuggaaguuaaggaag

SEQ ID NO: 988930 - RNA, 18 nt, Human
ugcagaaaaugaauggga

SEQ ID NO: 988931 - RNA, 23 nt, Human
ugccuagguccaguguaauuacu

SEQ ID NO: 988932 - RNA, 20 nt, Human
ugcuagugaggagaacaagg

SEQ ID NO: 988933 - RNA, 23 nt, Human
uggaaaacagggaaagguguuca

SEQ ID NO: 988934 - RNA, 21 nt, Human
uggaagaguuaucaacuugga

SEQ ID NO: 988935 - RNA, 23 nt, Human
ugucaaagauaaaucugcugacu

SEQ ID NO: 988936 - RNA, 18 nt, Human
uuaaagugaaucacgaaa

SEQ ID NO: 988937 - RNA, 22 nt, Human
uuaacugacgaaaaauacugca

SEQ ID NO: 988938 - RNA, 23 nt, Human
uucacauauaccaauugaacccu

SEQ ID NO: 988939 - RNA, 22 nt, Human
uuucacauauaccaauugaacc

SEQ ID NO: 988940 - RNA, 23 nt, Human
uuucagguuugauccugucuuau

SEQ ID NO: 988941 - RNA, 19 nt, Human
uuuuuuuuuuuuuuuuuaa

SEQ ID NO: 988942 - RNA, 19 nt, Human
aaacagcacaacucucugc

SEQ ID NO: 988943 - RNA, 19 nt, Human
aaacagcauaacucucugc

SEQ ID NO: 988944 - RNA, 22 nt, Human
aaagaacaucaugggcugucac

SEQ ID NO: 988945 - RNA, 22 nt, Human
aagaaugggagaaacagcacaa

SEQ ID NO: 988946 - RNA, 21 nt, Human
aagaaugggagaaacagcaua

SEQ ID NO: 988947 - RNA, 20 nt, Human
aaggacacguugaaguguuu

SEQ ID NO: 988948 - RNA, 23 nt, Human
acagagaccggaaagaacaucau

SEQ ID NO: 988949 - RNA, 19 nt, Human
acucuguuccuugcagucu

SEQ ID NO: 988950 - RNA, 22 nt, Human
acucuguuccuugcagucuguu

SEQ ID NO: 988951 - RNA, 20 nt, Human
agaguucuuuuacauccggu

SEQ ID NO: 988952 - RNA, 20 nt, Human
agaguucuuuuacauccggu

SEQ ID NO: 988953 - RNA, 18 nt, Human
agauagcacaagcuaugg

SEQ ID NO: 988954 - RNA, 24 nt, Human
agccagaguucuuuuacauccggu

SEQ ID NO: 988955 - RNA, 24 nt, Human
agccagaguucuuuuacauccggu

SEQ ID NO: 988956 - RNA, 21 nt, Human
agccagccagacacuggagag

SEQ ID NO: 988957 - RNA, 24 nt, Human
agugccccaggaagcaaggaacag

SEQ ID NO: 988958 - RNA, 20 nt, Human
aguucuuuacaagucucaua

SEQ ID NO: 988959 - RNA, 28 nt, Human
cacaaauccagguacacagagacuaucu

SEQ ID NO: 988960 - RNA, 22 nt, Human
cacauuaaaaaagcgaagauaa

SEQ ID NO: 988961 - RNA, 22 nt, Human
ccagaagacacggauuuauuca

SEQ ID NO: 988962 - RNA, 23 nt, Human
ccccaggaagcaaggaacagcag

SEQ ID NO: 988963 - RNA, 21 nt, Human
cucucugcuccuucuagucca

SEQ ID NO: 988964 - RNA, 21 nt, Human
cucucugcuccuucuagucca

SEQ ID NO: 988965 - RNA, 21 nt, Human
cuguuucuuucuucuauggug

SEQ ID NO: 988966 - RNA, 21 nt, Human
gaagcauuuuauugccuggac

SEQ ID NO: 988967 - RNA, 19 nt, Human
gacauuugaggccacauua

SEQ ID NO: 988968 - RNA, 21 nt, Human
ggacuuggcaaacagauggug

SEQ ID NO: 988969 - RNA, 19 nt, Human
ggagagagagagaccgagc

SEQ ID NO: 988970 - RNA, 19 nt, Human
ggagagagagagaccgagc

SEQ ID NO: 988971 - RNA, 18 nt, Human
ggagccagccagacacug

SEQ ID NO: 988972 - RNA, 24 nt, Human
gugccccaggaagcaaggaacagc

SEQ ID NO: 988973 - RNA, 18 nt, Human
guugaaguguuuuucaug

SEQ ID NO: 988974 - RNA, 19 nt, Human
uaauacauuuucauuaauc

SEQ ID NO: 988975 - RNA, 27 nt, Human
uauccucacugaggagggcuuuccaca

SEQ ID NO: 988976 - RNA, 22 nt, Human
ucacugcaaguucaaaacgugu

SEQ ID NO: 988977 - RNA, 20 nt, Human
ucaguuggagacauucugaa

SEQ ID NO: 988978 - RNA, 18 nt, Human
uccuucuaguccacuggg

SEQ ID NO: 988979 - RNA, 18 nt, Human
uccuucuaguccacuggg

SEQ ID NO: 988980 - RNA, 19 nt, Human
ucuguccuuggagggucuc

SEQ ID NO: 988981 - RNA, 19 nt, Human
ucuguccuuggagggucuc

SEQ ID NO: 988982 - RNA, 23 nt, Human
ucuguuccuugcagucuguuucu

SEQ ID NO: 988983 - RNA, 23 nt, Human
ugaaguguuuuucaugauuuuuu

SEQ ID NO: 988984 - RNA, 21 nt, Human
ugagagaguggaacuaugaca

SEQ ID NO: 988985 - RNA, 22 nt, Human
ugaguuaauauugauguaauac

SEQ ID NO: 988986 - RNA, 23 nt, Human
ugccuggacuuggcaaacagaug

SEQ ID NO: 988987 - RNA, 22 nt, Human
uggcaugacauuugaggccaca

SEQ ID NO: 988988 - RNA, 20 nt, Human
ugggagaaacagcacaacuc

SEQ ID NO: 988989 - RNA, 22 nt, Human
ugggagaaacagcacaacucuc

SEQ ID NO: 988990 - RNA, 20 nt, Human
ugggagaaacagcauaacuc

SEQ ID NO: 988991 - RNA, 22 nt, Human
ugggagaaacagcauaacucuc

SEQ ID NO: 988992 - RNA, 25 nt, Human
uucugagucaguuggagacauucug

SEQ ID NO: 988993 - RNA, 22 nt, Human
uugcacaaauccagguacacag

SEQ ID NO: 988994 - RNA, 18 nt, Human
uuuuuuuuuuuuuuuuug

SEQ ID NO: 988995 - RNA, 22 nt, Human
uuuuuuuuuuuuuuuuugccag

SEQ ID NO: 988996 - RNA, 20 nt, Human
aaaaaucuaaaguguuuaaa

SEQ ID NO: 988997 - RNA, 20 nt, Human
aaaacaaacuaaaaaaaccc

SEQ ID NO: 988998 - RNA, 20 nt, Human
aaacauuugacaucaccaaa

SEQ ID NO: 988999 - RNA, 25 nt, Human
aaacauuugacaucaccaaauucaa

SEQ ID NO: 989000 - RNA, 24 nt, Human
aaacuaaaaaaacccuagaaacau

SEQ ID NO: 989001 - RNA, 23 nt, Human
aaauagcugugaaacuagauuuu

SEQ ID NO: 989002 - RNA, 22 nt, Human
aauccagaaaaaaauucaaaua

SEQ ID NO: 989003 - RNA, 24 nt, Human
acacaguaaaaauuaaagccaugu

SEQ ID NO: 989004 - RNA, 23 nt, Human
acaggucucuucuccagguuaca

SEQ ID NO: 989005 - RNA, 18 nt, Human
acccuagaaacauuugac

SEQ ID NO: 989006 - RNA, 24 nt, Human
acuagauuuuccuauaaaugaucu

SEQ ID NO: 989007 - RNA, 24 nt, Human
acuauaaaggauggaguaaaugac

SEQ ID NO: 989008 - RNA, 24 nt, Human
acuucagaaaaauaaaaugaggaa

SEQ ID NO: 989009 - RNA, 26 nt, Human
agaaaaaaauucaaauagcugugaaa

SEQ ID NO: 989010 - RNA, 24 nt, Human
caaacuaaaaaaacccuagaaaca

SEQ ID NO: 989011 - RNA, 25 nt, Human
caaacuaaaaaaacccuagaaacau

SEQ ID NO: 989012 - RNA, 22 nt, Human
cacuucagaaaaauaaaaugag

SEQ ID NO: 989013 - RNA, 23 nt, Human
cauuugacaucaccaaauucaac

SEQ ID NO: 989014 - RNA, 21 nt, Human
cuguuuggaauuccagcagau

SEQ ID NO: 989015 - RNA, 24 nt, Human
gaaaaaaauucaaauagcugugaa

SEQ ID NO: 989016 - RNA, 22 nt, Human
gaaagaacagaaugaucuuuua

SEQ ID NO: 989017 - RNA, 26 nt, Human
gccuuuauuuuacuugaaaauaguuc

SEQ ID NO: 989018 - RNA, 22 nt, Human
ggaacuucuguuuggaauucca

SEQ ID NO: 989019 - RNA, 18 nt, Human
guagacuauuccucugua

SEQ ID NO: 989020 - RNA, 24 nt, Human
uaaaaacaaacuaaaaaaacccua

SEQ ID NO: 989021 - RNA, 22 nt, Human
uacaaucaaguauuuauaguau

SEQ ID NO: 989022 - RNA, 21 nt, Human
uagcacuguaaacaugaauac

SEQ ID NO: 989023 - RNA, 22 nt, Human
uagcacuguaaacaugaauaca

SEQ ID NO: 989024 - RNA, 25 nt, Human
uauggaacuucuguuuggaauucca

SEQ ID NO: 989025 - RNA, 24 nt, Human
uccagaaaaaaauucaaauagcug

SEQ ID NO: 989026 - RNA, 24 nt, Human
ucuguaaagaugaagacaguuacu

SEQ ID NO: 989027 - RNA, 18 nt, Human
ugaagacaguuacacagu

SEQ ID NO: 989028 - RNA, 26 nt, Human
ugacaggucucuucuccagguuacaa

SEQ ID NO: 989029 - RNA, 18 nt, Human
uggaacuucuguuuggaa

SEQ ID NO: 989030 - RNA, 18 nt, Human
uucaaagagaauaucacc

SEQ ID NO: 989031 - RNA, 25 nt, Human
uucaucauguagcuauacacacagu

SEQ ID NO: 989032 - RNA, 20 nt, Human
uuccucuguaaagaugaaga

SEQ ID NO: 989033 - RNA, 22 nt, Human
uucuucuuuuaggcuuauuucu

SEQ ID NO: 989034 - RNA, 21 nt, Human
uuuauguugucugcuauuuuc

SEQ ID NO: 989035 - RNA, 23 nt, Human
uuuauguugucugcuauuuucua

SEQ ID NO: 989036 - RNA, 22 nt, Human
aaaaaaaagauaaaggacaaga

SEQ ID NO: 989037 - RNA, 24 nt, Human
aagguccuucccuuguuuccccgg

SEQ ID NO: 989038 - RNA, 19 nt, Human
accaugguagggaggcggg

SEQ ID NO: 989039 - RNA, 19 nt, Human
accccaagaccccauccug

SEQ ID NO: 989040 - RNA, 24 nt, Human
accccauccugauccuuccugcca

SEQ ID NO: 989041 - RNA, 19 nt, Human
acggcacaggacgucagac

SEQ ID NO: 989042 - RNA, 18 nt, Human
agaccccuggcaccaugg

SEQ ID NO: 989043 - RNA, 20 nt, Human
agaggggcaaggagaccuuu

SEQ ID NO: 989044 - RNA, 22 nt, Human
aggcauccugaccccaagaccc

SEQ ID NO: 989045 - RNA, 18 nt, Human
agggagaggggcaaggag

SEQ ID NO: 989046 - RNA, 23 nt, Human
aggggagcuggagccuacaucuu

SEQ ID NO: 989047 - RNA, 25 nt, Human
aucccaauuaaaaaaaaaaaaaaaa

SEQ ID NO: 989048 - RNA, 19 nt, Human
cacaucucccuccuuuccu

SEQ ID NO: 989049 - RNA, 21 nt, Human
caccccugcccugcccagcuc

SEQ ID NO: 989050 - RNA, 22 nt, Human
cacccuuccccucccccagggg

SEQ ID NO: 989051 - RNA, 19 nt, Human
caccucuuccucggcuuuc

SEQ ID NO: 989052 - RNA, 18 nt, Human
cagcgccuccgcuuccgc

SEQ ID NO: 989053 - RNA, 19 nt, Human
cagcgccuccgcuuccgcc

SEQ ID NO: 989054 - RNA, 21 nt, Human
cagcugagaggggcucccacg

SEQ ID NO: 989055 - RNA, 18 nt, Human
caggcuccacccaccccu

SEQ ID NO: 989056 - RNA, 20 nt, Human
ccaagaccccauccugaucc

SEQ ID NO: 989057 - RNA, 23 nt, Human
ccaagguccuucccuuguuuccc

SEQ ID NO: 989058 - RNA, 26 nt, Human
ccacccaccccugcccugcccagcuc

SEQ ID NO: 989059 - RNA, 28 nt, Human
cccaauuaaaaaaaaaaaaaaaagauaa

SEQ ID NO: 989060 - RNA, 19 nt, Human
cccaccccugcccugccca

SEQ ID NO: 989061 - RNA, 24 nt, Human
cccaccccugcccugcccagcuca

SEQ ID NO: 989062 - RNA, 21 nt, Human
cccacgacugccccccaggcc

SEQ ID NO: 989063 - RNA, 18 nt, Human
cccagcccugaucccaau

SEQ ID NO: 989064 - RNA, 22 nt, Human
ccccacagcugagaggggcucc

SEQ ID NO: 989065 - RNA, 21 nt, Human
ccccagcgccuccgcuuccgc

SEQ ID NO: 989066 - RNA, 22 nt, Human
ccccagcgccuccgcuuccgcc

SEQ ID NO: 989067 - RNA, 24 nt, Human
ccccagcgccuccgcuuccgccug

SEQ ID NO: 989068 - RNA, 24 nt, Human
cccccaggccugggagcagccccc

SEQ ID NO: 989069 - RNA, 21 nt, Human
ccccccaggccugggagcagc

SEQ ID NO: 989070 - RNA, 26 nt, Human
ccccgccccagcccugauccgguucc

SEQ ID NO: 989071 - RNA, 18 nt, Human
ccccuugccaccucuucc

SEQ ID NO: 989072 - RNA, 20 nt, Human
cccuggaggggaggggguga

SEQ ID NO: 989073 - RNA, 18 nt, Human
cccugggggcccugagag

SEQ ID NO: 989074 - RNA, 21 nt, Human
ccucaggccccagaccugcuc

SEQ ID NO: 989075 - RNA, 20 nt, Human
ccuccuuuccuagguggcgg

SEQ ID NO: 989076 - RNA, 21 nt, Human
ccucggcuuucgcccuuccug

SEQ ID NO: 989077 - RNA, 18 nt, Human
ccugaggggcgggcccgg

SEQ ID NO: 989078 - RNA, 29 nt, Human
ccugaucccaauuaaaaaaaaaaaaaaag

SEQ ID NO: 989079 - RNA, 22 nt, Human
ccugauccuuccugccaguaag

SEQ ID NO: 989080 - RNA, 22 nt, Human
ccugcccugcccagcucaucug

SEQ ID NO: 989081 - RNA, 18 nt, Human
ccugggagcagccccuuc

SEQ ID NO: 989082 - RNA, 21 nt, Human
ccugggggcccugagaguggg

SEQ ID NO: 989083 - RNA, 18 nt, Human
cgccugggguccuccagc

SEQ ID NO: 989084 - RNA, 20 nt, Human
cggcacaggacgucagacag

SEQ ID NO: 989085 - RNA, 22 nt, Human
cuagacccacccuuccccuccc

SEQ ID NO: 989086 - RNA, 19 nt, Human
cuccagcucagugcccucc

SEQ ID NO: 989087 - RNA, 23 nt, Human
cucccacgacugccccccaggcc

SEQ ID NO: 989088 - RNA, 22 nt, Human
cucccugccucaggccccagac

SEQ ID NO: 989089 - RNA, 21 nt, Human
gacccacccuuccccuccccc

SEQ ID NO: 989090 - RNA, 23 nt, Human
gacccacccuuccccucccccag

SEQ ID NO: 989091 - RNA, 20 nt, Human
gaccucgcgguccaguccuc

SEQ ID NO: 989092 - RNA, 21 nt, Human
gagcagccccuuccaaggucc

SEQ ID NO: 989093 - RNA, 23 nt, Human
gcccugggccacuggccagcccc

SEQ ID NO: 989094 - RNA, 20 nt, Human
gcggcucugccaagcaggga

SEQ ID NO: 989095 - RNA, 20 nt, Human
gcuuccgccugggguccucc

SEQ ID NO: 989096 - RNA, 20 nt, Human
ggaggcggggcucccaggcc

SEQ ID NO: 989097 - RNA, 23 nt, Human
ggcaggucugagggccucacugu

SEQ ID NO: 989098 - RNA, 19 nt, Human
gggaagagacccaggcauc

SEQ ID NO: 989099 - RNA, 20 nt, Human
gggaagagacccaggcaucc

SEQ ID NO: 989100 - RNA, 18 nt, Human
ggggagggggugacaacc

SEQ ID NO: 989101 - RNA, 18 nt, Human
gggggcccugagaguggg

SEQ ID NO: 989102 - RNA, 21 nt, Human
guaugucuagacccacccuuc

SEQ ID NO: 989103 - RNA, 22 nt, Human
guggggccuggccugguagggg

SEQ ID NO: 989104 - RNA, 20 nt, Human
uagacccacccuuccccucc

SEQ ID NO: 989105 - RNA, 21 nt, Human
uaucugaacgggauggagacu

SEQ ID NO: 989106 - RNA, 22 nt, Human
uccacccaccccugcccugccc

SEQ ID NO: 989107 - RNA, 19 nt, Human
uccagcggcucugccaagc

SEQ ID NO: 989108 - RNA, 20 nt, Human
ucccacgacugccccccagg

SEQ ID NO: 989109 - RNA, 23 nt, Human
ucccccaggggacuagaugaaua

SEQ ID NO: 989110 - RNA, 20 nt, Human
uccccgccccagcccugauc

SEQ ID NO: 989111 - RNA, 20 nt, Human
uccccuggaggggagggggu

SEQ ID NO: 989112 - RNA, 20 nt, Human
uccccuugccaccucuuccu

SEQ ID NO: 989113 - RNA, 22 nt, Human
ucccugccucaggccccagacc

SEQ ID NO: 989114 - RNA, 18 nt, Human
uccuccagcggcucugcc

SEQ ID NO: 989115 - RNA, 22 nt, Human
uccucggcuuucgcccuuccug

SEQ ID NO: 989116 - RNA, 21 nt, Human
ucgagggcgacagcugccgaa

SEQ ID NO: 989117 - RNA, 19 nt, Human
ucgccaagcuggcccuggg

SEQ ID NO: 989118 - RNA, 23 nt, Human
ucgccaagcuggcccugggccac

SEQ ID NO: 989119 - RNA, 19 nt, Human
ugaauauuugacacgcaca

SEQ ID NO: 989120 - RNA, 19 nt, Human
ugacacgcacaucucccuc

SEQ ID NO: 989121 - RNA, 23 nt, Human
ugaccccaagaccccauccugau

SEQ ID NO: 989122 - RNA, 23 nt, Human
ugccucaggccccagaccugcuc

SEQ ID NO: 989123 - RNA, 19 nt, Human
ugggccacuggccagcccc

SEQ ID NO: 989124 - RNA, 21 nt, Human
ugggggcccugagaguggggc

SEQ ID NO: 989125 - RNA, 21 nt, Human
uggggucugaaccccgaauau

SEQ ID NO: 989126 - RNA, 21 nt, Human
uuccggauuucugauuguggg

SEQ ID NO: 989127 - RNA, 22 nt, Human
uugacacgcacaucucccuccu

SEQ ID NO: 989128 - RNA, 22 nt, Human
aaaaaauacaaauuccuaccau

SEQ ID NO: 989129 - RNA, 22 nt, Human
aagaagggggcucuccaagcac

SEQ ID NO: 989130 - RNA, 24 nt, Human
aauacaaauuccuaccauuaaacu

SEQ ID NO: 989131 - RNA, 22 nt, Human
ccuucuccacaguccuacgcug

SEQ ID NO: 989132 - RNA, 19 nt, Human
ccuugcccaccgcccuucu

SEQ ID NO: 989133 - RNA, 21 nt, Human
ccuugcccaccgcccuucucc

SEQ ID NO: 989134 - RNA, 25 nt, Human
ccuugcccaccgcccuucuccacag

SEQ ID NO: 989135 - RNA, 23 nt, Human
cuaccauuaaacuggcuugguug

SEQ ID NO: 989136 - RNA, 20 nt, Human
cuccuugcccaccgcccuuc

SEQ ID NO: 989137 - RNA, 31 nt, Human
cuccuugcccaccgcccuucuccacaguccc

SEQ ID NO: 989138 - RNA, 22 nt, Human
ggaguagcugugggggcuuggg

SEQ ID NO: 989139 - RNA, 22 nt, Human
ggggaagggugucguuucuuuc

SEQ ID NO: 989140 - RNA, 24 nt, Human
gucauguauucugaacaaaggcaa

SEQ ID NO: 989141 - RNA, 20 nt, Human
uagguuucuucccuguuccc

SEQ ID NO: 989142 - RNA, 18 nt, Human
uccacaguccuacgcugc

SEQ ID NO: 989143 - RNA, 20 nt, Human
ucuccaagcacaccuggcag

SEQ ID NO: 989144 - RNA, 21 nt, Human
ucuccacaguccuacgcugcu

SEQ ID NO: 989145 - RNA, 22 nt, Human
ucuccacaguccuacgcugcuu

SEQ ID NO: 989146 - RNA, 22 nt, Human
ugaacaaaggcaaaaaauacaa

SEQ ID NO: 989147 - RNA, 21 nt, Human
ugcccaccgcccuucuccaca

SEQ ID NO: 989148 - RNA, 24 nt, Human
uggaguagcugugggggcuugggg

SEQ ID NO: 989149 - RNA, 24 nt, Human
ugucguuucuuucuaguagucuca

SEQ ID NO: 989150 - RNA, 20 nt, Human
uuccuaccauuaaacuggcu

SEQ ID NO: 989151 - RNA, 21 nt, Human
uucuaguagucucaugucgcu

SEQ ID NO: 989152 - RNA, 18 nt, Human
uuguuguuuggguuggag

SEQ ID NO: 989153 - RNA, 18 nt, Human
agccuggaagagguggua

SEQ ID NO: 989154 - RNA, 23 nt, Human
ccaaagaccucccggacacccuu

SEQ ID NO: 989155 - RNA, 23 nt, Human
cccagaccgcgaugcccaaagac

SEQ ID NO: 989156 - RNA, 18 nt, Human
ccccggccugcucgaccu

SEQ ID NO: 989157 - RNA, 20 nt, Human
cccucagggcagagaaggcu

SEQ ID NO: 989158 - RNA, 19 nt, Human
ccucccggacacccccggc

SEQ ID NO: 989159 - RNA, 21 nt, Human
ccucccggacacccccggccu

SEQ ID NO: 989160 - RNA, 22 nt, Human
cgacccucagggcagagaaggc

SEQ ID NO: 989161 - RNA, 24 nt, Human
cucgaccuucgacccucagggccg

SEQ ID NO: 989162 - RNA, 18 nt, Human
gaccucccggacaccccc

SEQ ID NO: 989163 - RNA, 18 nt, Human
gucccaaccccagaccgc

SEQ ID NO: 989164 - RNA, 20 nt, Human
uacgcauuuuuuuucuuuau

SEQ ID NO: 989165 - RNA, 21 nt, Human
uagccaugcucauugaagcua

SEQ ID NO: 989166 - RNA, 21 nt, Human
ucccaggcgcuuacacguccc

SEQ ID NO: 989167 - RNA, 21 nt, Human
ucuuuauuggcagcccggagc

SEQ ID NO: 989168 - RNA, 20 nt, Human
ugcccaaagaccucccggac

SEQ ID NO: 989169 - RNA, 22 nt, Human
ugcccaaagaccucccggacac

SEQ ID NO: 989170 - RNA, 18 nt, Human
uggaagaggugguagcca

SEQ ID NO: 989171 - RNA, 20 nt, Human
aaaaaaaacacugggacaug

SEQ ID NO: 989172 - RNA, 23 nt, Human
aaaaaacacugggacaugccccc

SEQ ID NO: 989173 - RNA, 20 nt, Human
aaaaacaacaaaaaaaacac

SEQ ID NO: 989174 - RNA, 21 nt, Human
aaucaggacuggagaagggac

SEQ ID NO: 989175 - RNA, 19 nt, Human
acaacaaaaaaaacacugg

SEQ ID NO: 989176 - RNA, 19 nt, Human
acaacaaaaaaaacacugg

SEQ ID NO: 989177 - RNA, 23 nt, Human
aguaaucaggacuggagaaggga

SEQ ID NO: 989178 - RNA, 19 nt, Human
augguguugcaaucucucc

SEQ ID NO: 989179 - RNA, 18 nt, Human
caaaaaaaacacugggac

SEQ ID NO: 989180 - RNA, 18 nt, Human
caaaaaaaacacugggac

SEQ ID NO: 989181 - RNA, 19 nt, Human
caaaaaaaacacugggaca

SEQ ID NO: 989182 - RNA, 22 nt, Human
ccccggcugccgcugacgugau

SEQ ID NO: 989183 - RNA, 18 nt, Human
cccgcuuccuucucuccu

SEQ ID NO: 989184 - RNA, 22 nt, Human
cccgcuuccuucucuccuucca

SEQ ID NO: 989185 - RNA, 20 nt, Human
ccuucucuccuuccagcguc

SEQ ID NO: 989186 - RNA, 23 nt, Human
cugcgcacaggcuccuggcuccc

SEQ ID NO: 989187 - RNA, 21 nt, Human
cuucuugugcgccaccgucac

SEQ ID NO: 989188 - RNA, 22 nt, Human
gaugguguugcaaucucuccug

SEQ ID NO: 989189 - RNA, 20 nt, Human
gcacaggcuccuggcucccu

SEQ ID NO: 989190 - RNA, 20 nt, Human
gccugcgcacaggcuccugg

SEQ ID NO: 989191 - RNA, 22 nt, Human
gggcgggggcucucggaccccc

SEQ ID NO: 989192 - RNA, 19 nt, Human
ggggcggguuggggcgggg

SEQ ID NO: 989193 - RNA, 18 nt, Human
gggggcucucggaccccc

SEQ ID NO: 989194 - RNA, 26 nt, Human
guaaucaggacuggagaagggacgau

SEQ ID NO: 989195 - RNA, 24 nt, Human
uaaaaacaacaaaaaaaacacugg

SEQ ID NO: 989196 - RNA, 20 nt, Human
ucuacuugcuggcaagccgg

SEQ ID NO: 989197 - RNA, 18 nt, Human
ucucaguuaaggccugga

SEQ ID NO: 989198 - RNA, 20 nt, Human
ucuccuuccagcgucuucug

SEQ ID NO: 989199 - RNA, 24 nt, Human
ugagaagcacacuucccgcuuccu

SEQ ID NO: 989200 - RNA, 22 nt, Human
ugcaaguuggaguucguaagaa

SEQ ID NO: 989201 - RNA, 22 nt, Human
uggcaagccgguuuccucccug

SEQ ID NO: 989202 - RNA, 21 nt, Human
ugggaugguguugcaaucucu

SEQ ID NO: 989203 - RNA, 21 nt, Human
uggggcggguuggggcggggg

SEQ ID NO: 989204 - RNA, 21 nt, Human
uuaguaucuaaaaacaacaaa

SEQ ID NO: 989205 - RNA, 20 nt, Human
uucccgcuuccuucucuccu

SEQ ID NO: 989206 - RNA, 23 nt, Human
uugcuggcaagccgguuuccucc

SEQ ID NO: 989207 - RNA, 23 nt, Human
aaaaauaaaauacucauagcacc

SEQ ID NO: 989208 - RNA, 23 nt, Human
aagaaaaauaaaauacucauagc

SEQ ID NO: 989209 - RNA, 19 nt, Human
aagaacaucacaugugcaa

SEQ ID NO: 989210 - RNA, 19 nt, Human
aagaacaucacaugugcaa

SEQ ID NO: 989211 - RNA, 19 nt, Human
aagaacaucacaugugcaa

SEQ ID NO: 989212 - RNA, 19 nt, Human
aagaacaucacaugugcaa

SEQ ID NO: 989213 - RNA, 19 nt, Human
aagaacaucacaugugcaa

SEQ ID NO: 989214 - RNA, 18 nt, Human
aaguagcccaaccaaugg

SEQ ID NO: 989215 - RNA, 22 nt, Human
aauaauggcaacagaagaggaa

SEQ ID NO: 989216 - RNA, 26 nt, Human
accucacaauuccaggguauuuacug

SEQ ID NO: 989217 - RNA, 23 nt, Human
accugggguguuugcaguugguu

SEQ ID NO: 989218 - RNA, 21 nt, Human
acuaaguacagggaccaaaac

SEQ ID NO: 989219 - RNA, 18 nt, Human
acugguccgugccugacc

SEQ ID NO: 989220 - RNA, 20 nt, Human
acugguccgugccugaccuc

SEQ ID NO: 989221 - RNA, 20 nt, Human
agcaaggaugacuccgacau

SEQ ID NO: 989222 - RNA, 22 nt, Human
agccagacaagcgcugggaagg

SEQ ID NO: 989223 - RNA, 22 nt, Human
agcccaaccaauggcuuugcag

SEQ ID NO: 989224 - RNA, 20 nt, Human
agccucagagaaggaucagc

SEQ ID NO: 989225 - RNA, 18 nt, Human
aggcaggccacugaacca

SEQ ID NO: 989226 - RNA, 21 nt, Human
auaauggcaacagaagaggaa

SEQ ID NO: 989227 - RNA, 20 nt, Human
aucaccccucaccacuccac

SEQ ID NO: 989228 - RNA, 24 nt, Human
augaucuccaaggucuccccaggc

SEQ ID NO: 989229 - RNA, 21 nt, Human
auggcaacagaagaggaaguc

SEQ ID NO: 989230 - RNA, 20 nt, Human
caaaacauagcaagugcuca

SEQ ID NO: 989231 - RNA, 22 nt, Human
caaaacauagcaagugcucaag

SEQ ID NO: 989232 - RNA, 19 nt, Human
caaagcuucuuuuccuuag

SEQ ID NO: 989233 - RNA, 23 nt, Human
caacacuaaguacagggaccaaa

SEQ ID NO: 989234 - RNA, 21 nt, Human
caagcaaggaccugagccuca

SEQ ID NO: 989235 - RNA, 27 nt, Human
caagcaaggaccugagccucagagaag

SEQ ID NO: 989236 - RNA, 21 nt, Human
caagcgaugcugcagcaagga

SEQ ID NO: 989237 - RNA, 21 nt, Human
caagcgaugcugcagcaagga

SEQ ID NO: 989238 - RNA, 24 nt, Human
caagcgaugcugcagcaaggaaga

SEQ ID NO: 989239 - RNA, 22 nt, Human
caagcgaugcugcagcaaggau

SEQ ID NO: 989240 - RNA, 22 nt, Human
caagcgaugcugcagcaaggau

SEQ ID NO: 989241 - RNA, 20 nt, Human
cacagcccacaggugguccu

SEQ ID NO: 989242 - RNA, 25 nt, Human
cacauucuuagagcuauaccucaca

SEQ ID NO: 989243 - RNA, 20 nt, Human
cacugaaccacucugacccu

SEQ ID NO: 989244 - RNA, 20 nt, Human
cagcaaggaagacuccgacg

SEQ ID NO: 989245 - RNA, 18 nt, Human
cagcacacaaugucccag

SEQ ID NO: 989246 - RNA, 21 nt, Human
caggccacugaaccacucuga

SEQ ID NO: 989247 - RNA, 18 nt, Human
caggcccuuucucuccca

SEQ ID NO: 989248 - RNA, 19 nt, Human
cagggaccaaaacauagca

SEQ ID NO: 989249 - RNA, 19 nt, Human
caggggcugcugcccuccg

SEQ ID NO: 989250 - RNA, 21 nt, Human
cagugaucauuuuuaaccucu

SEQ ID NO: 989251 - RNA, 20 nt, Human
cagugggucugccagccaag

SEQ ID NO: 989252 - RNA, 21 nt, Human
cauguaguuuggggcacaucc

SEQ ID NO: 989253 - RNA, 19 nt, Human
ccacugaaccacucugacc

SEQ ID NO: 989254 - RNA, 21 nt, Human
ccagccaagggugaggaaggc

SEQ ID NO: 989255 - RNA, 19 nt, Human
cccacaggugguccuggcc

SEQ ID NO: 989256 - RNA, 21 nt, Human
cccacaggugguccuggcccu

SEQ ID NO: 989257 - RNA, 22 nt, Human
cccagggcugggccacuggucc

SEQ ID NO: 989258 - RNA, 23 nt, Human
ccccaaagcuucuuuuccuuaga

SEQ ID NO: 989259 - RNA, 19 nt, Human
ccucagagaaggaucagcu

SEQ ID NO: 989260 - RNA, 23 nt, Human
ccuccgcccagagccugacacac

SEQ ID NO: 989261 - RNA, 19 nt, Human
cuacugggcaguugggaga

SEQ ID NO: 989262 - RNA, 21 nt, Human
cugcagcaaggaagacuccga

SEQ ID NO: 989263 - RNA, 22 nt, Human
cugcagcaaggaugacuccgac

SEQ ID NO: 989264 - RNA, 22 nt, Human
cugcagcaaggaugacuccgac

SEQ ID NO: 989265 - RNA, 22 nt, Human
cugcagcaaggaugacuccgac

SEQ ID NO: 989266 - RNA, 22 nt, Human
cugcagcaaggaugacucugac

SEQ ID NO: 989267 - RNA, 18 nt, Human
cuggccaagaugaucucc

SEQ ID NO: 989268 - RNA, 25 nt, Human
gaaaaauaaaauacucauagcaccc

SEQ ID NO: 989269 - RNA, 20 nt, Human
gacccucuguuuccucaucu

SEQ ID NO: 989270 - RNA, 20 nt, Human
gagaaggaucagcuauagca

SEQ ID NO: 989271 - RNA, 22 nt, Human
gcaacagaagaggaagucugaa

SEQ ID NO: 989272 - RNA, 19 nt, Human
gccucagagaaggaucagc

SEQ ID NO: 989273 - RNA, 23 nt, Human
gccucugcucccaggggagggaa

SEQ ID NO: 989274 - RNA, 21 nt, Human
gcuuguuuacaugccaaagug

SEQ ID NO: 989275 - RNA, 18 nt, Human
ggaccugagccucagaga

SEQ ID NO: 989276 - RNA, 21 nt, Human
ggcuguggggaggggaggugg

SEQ ID NO: 989277 - RNA, 25 nt, Human
gggaaacugagggccagagagggga

SEQ ID NO: 989278 - RNA, 18 nt, Human
gggcugcugcccuccgcc

SEQ ID NO: 989279 - RNA, 24 nt, Human
gggcugcugcccuccgcccagagc

SEQ ID NO: 989280 - RNA, 19 nt, Human
gggcugggccacugguccg

SEQ ID NO: 989281 - RNA, 19 nt, Human
guccuggggagucacaccc

SEQ ID NO: 989282 - RNA, 21 nt, Human
gugaggaaggcuguggggagg

SEQ ID NO: 989283 - RNA, 20 nt, Human
gugaugggacacccagggcu

SEQ ID NO: 989284 - RNA, 21 nt, Human
gugaugggacacccagggcug

SEQ ID NO: 989285 - RNA, 27 nt, Human
guuccagguuacccuauaggacccccu

SEQ ID NO: 989286 - RNA, 22 nt, Human
uaaaauacucauagcacccuuc

SEQ ID NO: 989287 - RNA, 23 nt, Human
uaaaauacucauagcacccuucu

SEQ ID NO: 989288 - RNA, 24 nt, Human
uaaccucuggugaugauucuauug

SEQ ID NO: 989289 - RNA, 21 nt, Human
uaaguccuggcugauguucug

SEQ ID NO: 989290 - RNA, 18 nt, Human
uacaaggagaagccagac

SEQ ID NO: 989291 - RNA, 19 nt, Human
uacaaggagaagccagaca

SEQ ID NO: 989292 - RNA, 19 nt, Human
uacugggcaguugggagac

SEQ ID NO: 989293 - RNA, 23 nt, Human
uaucacaucaccccucaccacuc

SEQ ID NO: 989294 - RNA, 18 nt, Human
ucaagcaaggaccugagc

SEQ ID NO: 989295 - RNA, 18 nt, Human
ucacauguaguuuggggc

SEQ ID NO: 989296 - RNA, 19 nt, Human
ucaguuggacauaaacauc

SEQ ID NO: 989297 - RNA, 22 nt, Human
ucccugcugcuggggcauacaa

SEQ ID NO: 989298 - RNA, 23 nt, Human
ugaaagaaaaauaaaauacucau

SEQ ID NO: 989299 - RNA, 20 nt, Human
ugaugugguaaagggaccag

SEQ ID NO: 989300 - RNA, 18 nt, Human
ugccaaagugcucugugg

SEQ ID NO: 989301 - RNA, 20 nt, Human
ugccuaugaagaaguagccc

SEQ ID NO: 989302 - RNA, 19 nt, Human
ugcucuguggaagagguga

SEQ ID NO: 989303 - RNA, 18 nt, Human
ugcugggauggacauuac

SEQ ID NO: 989304 - RNA, 21 nt, Human
ugcuggggcauacaaggagaa

SEQ ID NO: 989305 - RNA, 20 nt, Human
uggcaacagaagaggaaguc

SEQ ID NO: 989306 - RNA, 18 nt, Human
ugggucugccagccaagg

SEQ ID NO: 989307 - RNA, 21 nt, Human
uguggggaggggagguggcca

SEQ ID NO: 989308 - RNA, 23 nt, Human
uuuugauuuccaccauuuacauu

SEQ ID NO: 989309 - RNA, 18 nt, Human
uuuuuuuuuuuuuuuuug

SEQ ID NO: 989310 - RNA, 23 nt, Human
uuuuuuuuuuuuuuuuuugauuu

SEQ ID NO: 989311 - RNA, 22 nt, Human
acauagcaguggucaaaaauaa

SEQ ID NO: 989312 - RNA, 18 nt, Human
agaaggaggggcggagag

SEQ ID NO: 989313 - RNA, 25 nt, Human
cauagcaguggucaaaaauaaugga

SEQ ID NO: 989314 - RNA, 20 nt, Human
cccaggauuuaaugcaaaaa

SEQ ID NO: 989315 - RNA, 24 nt, Human
ccccaggauuuaaugcaaaaaccc

SEQ ID NO: 989316 - RNA, 22 nt, Human
cuacuugaacacauagcagugg

SEQ ID NO: 989317 - RNA, 19 nt, Human
uaaaauggaccccaggauu

SEQ ID NO: 989318 - RNA, 24 nt, Human
uguaaaauggaccccaggauuuaa

SEQ ID NO: 989319 - RNA, 23 nt, Human
uuuuuuuuuuuuagaugaacuca

SEQ ID NO: 989320 - RNA, 20 nt, Human
aaaaugcugaaaacauacac

SEQ ID NO: 989321 - RNA, 22 nt, Human
aaagcccuggcgugguggcuca

SEQ ID NO: 989322 - RNA, 22 nt, Human
aaaugcugaaaacauacacagu

SEQ ID NO: 989323 - RNA, 19 nt, Human
aacauggcgaaaccccguc

SEQ ID NO: 989324 - RNA, 20 nt, Human
aacauggcgaaaccccgucu

SEQ ID NO: 989325 - RNA, 21 nt, Human
aacauggcgaaaccccgucuc

SEQ ID NO: 989326 - RNA, 22 nt, Human
aagcggguggaucaccugaggu

SEQ ID NO: 989327 - RNA, 26 nt, Human
aagcggguggaucaccugaggucagg

SEQ ID NO: 989328 - RNA, 21 nt, Human
acaaagcaauauaaucacccu

SEQ ID NO: 989329 - RNA, 22 nt, Human
accccgucucuacuaaaaauac

SEQ ID NO: 989330 - RNA, 23 nt, Human
acccuccuucccccuuacugcuu

SEQ ID NO: 989331 - RNA, 22 nt, Human
acgcugggggacggaguaagac

SEQ ID NO: 989332 - RNA, 24 nt, Human
acggaguaagacucagucucaaag

SEQ ID NO: 989333 - RNA, 22 nt, Human
agcaaaaaugcuuuaguguuau

SEQ ID NO: 989334 - RNA, 24 nt, Human
agcacuuugggaagcugaagcggg

SEQ ID NO: 989335 - RNA, 23 nt, Human
aucacccuccuucccccuuacug

SEQ ID NO: 989336 - RNA, 24 nt, Human
aucaccugaggucaggaguucgag

SEQ ID NO: 989337 - RNA, 25 nt, Human
caaagcaauauaaucacccuccuuc

SEQ ID NO: 989338 - RNA, 24 nt, Human
caacauggcgaaaccccgucucua

SEQ ID NO: 989339 - RNA, 23 nt, Human
caaguaucacaaaccauuacaaa

SEQ ID NO: 989340 - RNA, 20 nt, Human
cacccuccuucccccuuacu

SEQ ID NO: 989341 - RNA, 23 nt, Human
caccugaggucaggaguucgaga

SEQ ID NO: 989342 - RNA, 24 nt, Human
cacgccuguaaugccagcacuuug

SEQ ID NO: 989343 - RNA, 24 nt, Human
cagcacuuugggaagcugaagcgg

SEQ ID NO: 989344 - RNA, 20 nt, Human
cagcccggacaacauggcga

SEQ ID NO: 989345 - RNA, 22 nt, Human
cagcgcgccaccacgcuggggg

SEQ ID NO: 989346 - RNA, 19 nt, Human
caggaguucgagagcagcc

SEQ ID NO: 989347 - RNA, 20 nt, Human
cccuccuucccccuuacugc

SEQ ID NO: 989348 - RNA, 23 nt, Human
ccuccuucccccuuacugcuuca

SEQ ID NO: 989349 - RNA, 19 nt, Human
cgaaaauagcaaaaaugcu

SEQ ID NO: 989350 - RNA, 24 nt, Human
cgccuguaaugccagcacuuuggg

SEQ ID NO: 989351 - RNA, 24 nt, Human
cggguggaucaccugaggucagga

SEQ ID NO: 989352 - RNA, 19 nt, Human
cuagccuuaaaaugcugaa

SEQ ID NO: 989353 - RNA, 24 nt, Human
cucacgccuguaaugccagcacuu

SEQ ID NO: 989354 - RNA, 21 nt, Human
gaucaccugaggucaggaguu

SEQ ID NO: 989355 - RNA, 24 nt, Human
gaucaccugaggucaggaguucga

SEQ ID NO: 989356 - RNA, 21 nt, Human
gcccuggcgugguggcucacg

SEQ ID NO: 989357 - RNA, 20 nt, Human
gcgccaccacgcugggggac

SEQ ID NO: 989358 - RNA, 24 nt, Human
gcgccuguaaucccagcgcgccac

SEQ ID NO: 989359 - RNA, 22 nt, Human
ggaaaguauuugguaggaguga

SEQ ID NO: 989360 - RNA, 24 nt, Human
gguggcgcgcgccuguaaucccag

SEQ ID NO: 989361 - RNA, 24 nt, Human
gguggcucacgccuguaaugccag

SEQ ID NO: 989362 - RNA, 23 nt, Human
guggcgcgcgccuguaaucccag

SEQ ID NO: 989363 - RNA, 23 nt, Human
uagccuuaaaaugcugaaaacau

SEQ ID NO: 989364 - RNA, 22 nt, Human
uauuugguaggagugaagaaca

SEQ ID NO: 989365 - RNA, 27 nt, Human
ucacccuccuucccccuuacugcuuca

SEQ ID NO: 989366 - RNA, 20 nt, Human
ugaagcggguggaucaccug

SEQ ID NO: 989367 - RNA, 21 nt, Human
ugaagcggguggaucaccuga

SEQ ID NO: 989368 - RNA, 24 nt, Human
ugaagcggguggaucaccugaggu

SEQ ID NO: 989369 - RNA, 26 nt, Human
ugaagcggguggaucaccugagguca

SEQ ID NO: 989370 - RNA, 18 nt, Human
ugacgaaaauagcaaaaa

SEQ ID NO: 989371 - RNA, 24 nt, Human
uggaucaccugaggucaggaguuc

SEQ ID NO: 989372 - RNA, 21 nt, Human
uggcgcgcgccuguaauccca

SEQ ID NO: 989373 - RNA, 22 nt, Human
uggcgcgcgccuguaaucccag

SEQ ID NO: 989374 - RNA, 24 nt, Human
uggcgcgcgccuguaaucccagcg

SEQ ID NO: 989375 - RNA, 24 nt, Human
uggcgugguggcucacgccuguaa

SEQ ID NO: 989376 - RNA, 22 nt, Human
uggcucacgccuguaaugccag

SEQ ID NO: 989377 - RNA, 24 nt, Human
uggcucacgccuguaaugccagca

SEQ ID NO: 989378 - RNA, 24 nt, Human
ugggaagcugaagcggguggauca

SEQ ID NO: 989379 - RNA, 18 nt, Human
ugguaggagugaagaaca

SEQ ID NO: 989380 - RNA, 24 nt, Human
ugguggcgcgcgccuguaauccca

SEQ ID NO: 989381 - RNA, 18 nt, Human
ugguggcucacgccugua

SEQ ID NO: 989382 - RNA, 19 nt, Human
uucgcgugguggcgcgcgc

SEQ ID NO: 989383 - RNA, 22 nt, Human
uuugguaggagugaagaacaga

SEQ ID NO: 989384 - RNA, 25 nt, Human
agaauccaaaauaugagaucugccc

SEQ ID NO: 989385 - RNA, 22 nt, Human
caaaauaugagaucugcccgcg

SEQ ID NO: 989386 - RNA, 19 nt, Human
ccagcagcagccccuccag

SEQ ID NO: 989387 - RNA, 20 nt, Human
ccagcagcagccccuccagc

SEQ ID NO: 989388 - RNA, 24 nt, Human
cccgcggagacuccagguguuccc

SEQ ID NO: 989389 - RNA, 19 nt, Human
cuauuauguauaagccuag

SEQ ID NO: 989390 - RNA, 21 nt, Human
cuuuauuauugcuauuaugua

SEQ ID NO: 989391 - RNA, 20 nt, Human
gccuuuauuauugcuauuau

SEQ ID NO: 989392 - RNA, 18 nt, Human
gguguucccagcagcagc

SEQ ID NO: 989393 - RNA, 19 nt, Human
uaggacaaguuguaaaccc

SEQ ID NO: 989394 - RNA, 23 nt, Human
uauccagaauccaaaauaugaga

SEQ ID NO: 989395 - RNA, 19 nt, Human
ucaaagccuuuauuauugc

SEQ ID NO: 989396 - RNA, 21 nt, Human
uccaaaauaugagaucugccc

SEQ ID NO: 989397 - RNA, 21 nt, Human
uuuauuuccggugaaccccag

SEQ ID NO: 989398 - RNA, 19 nt, Human
aaauuaauaggaugaauga

SEQ ID NO: 989399 - RNA, 24 nt, Human
aacccuguuuuucccccacaguau

SEQ ID NO: 989400 - RNA, 18 nt, Human
aagaaaaacaaaaagaac

SEQ ID NO: 989401 - RNA, 21 nt, Human
acauacacccccuauuauaug

SEQ ID NO: 989402 - RNA, 19 nt, Human
acccuguuuuucccccaca

SEQ ID NO: 989403 - RNA, 21 nt, Human
accgacagaggcagccaaaaa

SEQ ID NO: 989404 - RNA, 18 nt, Human
acugcaagaaaaagaagc

SEQ ID NO: 989405 - RNA, 19 nt, Human
agaaucaaccccguaacaa

SEQ ID NO: 989406 - RNA, 23 nt, Human
agccccuucuaaaaagcucccau

SEQ ID NO: 989407 - RNA, 18 nt, Human
aggaggcaugaaagccaa

SEQ ID NO: 989408 - RNA, 23 nt, Human
aggcucauuuucccaaaucaaaa

SEQ ID NO: 989409 - RNA, 18 nt, Human
agugagagauucaucaag

SEQ ID NO: 989410 - RNA, 26 nt, Human
aguugauacuacucagagcaagauag

SEQ ID NO: 989411 - RNA, 20 nt, Human
aguugauuguagcacaacug

SEQ ID NO: 989412 - RNA, 21 nt, Human
aguuuaaacaaaauucacaca

SEQ ID NO: 989413 - RNA, 20 nt, Human
aucaucaucauccuucuucu

SEQ ID NO: 989414 - RNA, 21 nt, Human
aucauccuucuucuuuuucug

SEQ ID NO: 989415 - RNA, 22 nt, Human
auggaguuucaaccuuggccag

SEQ ID NO: 989416 - RNA, 24 nt, Human
auggcugguaccuccuccaaacac

SEQ ID NO: 989417 - RNA, 24 nt, Human
auuucagcagcuucuuuacagucu

SEQ ID NO: 989418 - RNA, 21 nt, Human
caaagcacuggaguucgguuu

SEQ ID NO: 989419 - RNA, 22 nt, Human
caaaggcaaaaagaugagucuc

SEQ ID NO: 989420 - RNA, 25 nt, Human
caaaggcaaaaagaugagucucuau

SEQ ID NO: 989421 - RNA, 23 nt, Human
caacaucacuccauuuuuuccac

SEQ ID NO: 989422 - RNA, 20 nt, Human
caaguaaaccugaaagaaaa

SEQ ID NO: 989423 - RNA, 21 nt, Human
caccuguguauuucacagaag

SEQ ID NO: 989424 - RNA, 22 nt, Human
cacucaugaagccagggaugac

SEQ ID NO: 989425 - RNA, 24 nt, Human
cagcaggauaaaaaacguaaaaca

SEQ ID NO: 989426 - RNA, 22 nt, Human
cagcauauuacauugccucugg

SEQ ID NO: 989427 - RNA, 18 nt, Human
cauguuccacaaaaaggu

SEQ ID NO: 989428 - RNA, 24 nt, Human
ccaacaacucuuugugcucaguga

SEQ ID NO: 989429 - RNA, 21 nt, Human
ccccuucuaaaaagcucccau

SEQ ID NO: 989430 - RNA, 23 nt, Human
cccuacccggacaccuccuuuuu

SEQ ID NO: 989431 - RNA, 18 nt, Human
ccgaccgccgccgcugcc

SEQ ID NO: 989432 - RNA, 19 nt, Human
ccgaccgccgccgcugccg

SEQ ID NO: 989433 - RNA, 19 nt, Human
ccgaccgccgccgcugccg

SEQ ID NO: 989434 - RNA, 19 nt, Human
ccgccgccaccaccaggcc

SEQ ID NO: 989435 - RNA, 23 nt, Human
ccgccgccaccaccaggccucgg

SEQ ID NO: 989436 - RNA, 23 nt, Human
ccgccgccaccaccaggccucgg

SEQ ID NO: 989437 - RNA, 18 nt, Human
ccgccgccgcugccguuc

SEQ ID NO: 989438 - RNA, 20 nt, Human
ccgccgccgcugccguuccg

SEQ ID NO: 989439 - RNA, 22 nt, Human
ccgcugccguuccguagcugcu

SEQ ID NO: 989440 - RNA, 26 nt, Human
ccuauggucagaaucaaccccguaac

SEQ ID NO: 989441 - RNA, 21 nt, Human
ccuccuaucuccucaucauca

SEQ ID NO: 989442 - RNA, 20 nt, Human
ccuccuuuuuccucguuguc

SEQ ID NO: 989443 - RNA, 23 nt, Human
ccucgggugucgccgcguugccc

SEQ ID NO: 989444 - RNA, 19 nt, Human
ccucuguuuccaccugugu

SEQ ID NO: 989445 - RNA, 18 nt, Human
ccugccaccagccuugcc

SEQ ID NO: 989446 - RNA, 24 nt, Human
ccugccaccagccuugcccucaau

SEQ ID NO: 989447 - RNA, 18 nt, Human
cgaccgccgccgcugccg

SEQ ID NO: 989448 - RNA, 23 nt, Human
cuacucagagcaagauaguacag

SEQ ID NO: 989449 - RNA, 22 nt, Human
cucaaaggcaaaaagaugaguc

SEQ ID NO: 989450 - RNA, 23 nt, Human
cucaaaggcaaaaagaugagucc

SEQ ID NO: 989451 - RNA, 24 nt, Human
cucccgccaccacccggcucgguc

SEQ ID NO: 989452 - RNA, 18 nt, Human
cugcaagaaaaagaagcu

SEQ ID NO: 989453 - RNA, 23 nt, Human
cugcaagaaaaagaagcuggucu

SEQ ID NO: 989454 - RNA, 23 nt, Human
cugcauuuuuuuucucuucuucu

SEQ ID NO: 989455 - RNA, 18 nt, Human
cuuauuugcucagaucuu

SEQ ID NO: 989456 - RNA, 25 nt, Human
cuuccaauaccuccauacaugucug

SEQ ID NO: 989457 - RNA, 19 nt, Human
gaacagaccgacagaggca

SEQ ID NO: 989458 - RNA, 20 nt, Human
gaguucgguuuguacuucuc

SEQ ID NO: 989459 - RNA, 21 nt, Human
gcauuuuuuuucucuucuucu

SEQ ID NO: 989460 - RNA, 22 nt, Human
gcguugcccuacccggacaccu

SEQ ID NO: 989461 - RNA, 19 nt, Human
ggacuaguguucuuuccca

SEQ ID NO: 989462 - RNA, 20 nt, Human
ggaguuucaaccuuggccag

SEQ ID NO: 989463 - RNA, 19 nt, Human
gugaauuuuggaaacacaa

SEQ ID NO: 989464 - RNA, 18 nt, Human
uaaaauggaugcugucga

SEQ ID NO: 989465 - RNA, 20 nt, Human
uaaagaaaaacaaaaagaaa

SEQ ID NO: 989466 - RNA, 23 nt, Human
uaacaaguuuggccaaacaaugc

SEQ ID NO: 989467 - RNA, 22 nt, Human
uaauaaaacauaacaaagcacu

SEQ ID NO: 989468 - RNA, 24 nt, Human
uagcagcuuuaauuuuuuaagaaa

SEQ ID NO: 989469 - RNA, 23 nt, Human
uagcucuuugucagacauguuug

SEQ ID NO: 989470 - RNA, 20 nt, Human
uagugauucacauugcauac

SEQ ID NO: 989471 - RNA, 21 nt, Human
uaugcugucugagauauagua

SEQ ID NO: 989472 - RNA, 25 nt, Human
uauuacauugccucuggcuugcacc

SEQ ID NO: 989473 - RNA, 18 nt, Human
uauuugaaggcaagaaca

SEQ ID NO: 989474 - RNA, 22 nt, Human
uauuugaaggcaagaacauuua

SEQ ID NO: 989475 - RNA, 23 nt, Human
ucaagagacccuuucuucucaaa

SEQ ID NO: 989476 - RNA, 20 nt, Human
uccacauaugaucuaagggu

SEQ ID NO: 989477 - RNA, 19 nt, Human
ucccaacaauaagaacuuc

SEQ ID NO: 989478 - RNA, 20 nt, Human
ucccccacuacgggucuccg

SEQ ID NO: 989479 - RNA, 23 nt, Human
ucccugacaccagcacuuagccc

SEQ ID NO: 989480 - RNA, 18 nt, Human
uccggcugcucccgcugc

SEQ ID NO: 989481 - RNA, 25 nt, Human
uccuucuucuuuuucugauuucucu

SEQ ID NO: 989482 - RNA, 22 nt, Human
ucuuuuuuccuuucucacuuaa

SEQ ID NO: 989483 - RNA, 23 nt, Human
ugaaagguuugcauuguuguuuu

SEQ ID NO: 989484 - RNA, 21 nt, Human
ugaauauucauucuaagacaa

SEQ ID NO: 989485 - RNA, 23 nt, Human
ugacaagaguagcuuaggacguc

SEQ ID NO: 989486 - RNA, 23 nt, Human
ugagaauauuaagccugaggcua

SEQ ID NO: 989487 - RNA, 21 nt, Human
ugcaagaaaaagaagcugguc

SEQ ID NO: 989488 - RNA, 19 nt, Human
ugccucuggcuugcaccuc

SEQ ID NO: 989489 - RNA, 23 nt, Human
ugcugcuuuucuuuuucugcauu

SEQ ID NO: 989490 - RNA, 26 nt, Human
ugcuucagccuugaauaucucgaucc

SEQ ID NO: 989491 - RNA, 23 nt, Human
ugcuuuguuagcuguaacagccu

SEQ ID NO: 989492 - RNA, 23 nt, Human
uggaaacacaagcguauugaaca

SEQ ID NO: 989493 - RNA, 26 nt, Human
ugguagucaggaguucugggaugacu

SEQ ID NO: 989494 - RNA, 26 nt, Human
uguaacugcaagaaaaagaagcuggu

SEQ ID NO: 989495 - RNA, 18 nt, Human
ugucuuuuuuccuuucuc

SEQ ID NO: 989496 - RNA, 20 nt, Human
ugugcucagugaaagaaucc

SEQ ID NO: 989497 - RNA, 27 nt, Human
uguuguagguuucucugggggugaccc

SEQ ID NO: 989498 - RNA, 20 nt, Human
uguuguuuuaguucuucaag

SEQ ID NO: 989499 - RNA, 20 nt, Human
uuagccccuucuaaaaagcu

SEQ ID NO: 989500 - RNA, 20 nt, Human
uucaaguuuuaguuaaaauu

SEQ ID NO: 989501 - RNA, 24 nt, Human
uucacacauacacccccuauuaua

SEQ ID NO: 989502 - RNA, 18 nt, Human
uucacagaagcccaacac

SEQ ID NO: 989503 - RNA, 18 nt, Human
uuccuuuuuucacucuug

SEQ ID NO: 989504 - RNA, 24 nt, Human
uucucugcugcuuuucuuuuucug

SEQ ID NO: 989505 - RNA, 26 nt, Human
uuucucuucuucuaucugggcuuucu

SEQ ID NO: 989506 - RNA, 23 nt, Human
uuuuuguuuuuuugccaucuguu

SEQ ID NO: 989507 - RNA, 23 nt, Human
aaagagcccggcgcaccggagcc

SEQ ID NO: 989508 - RNA, 21 nt, Human
aaccaauggcgacuagagagc

SEQ ID NO: 989509 - RNA, 19 nt, Human
acagagcugcaaccccaug

SEQ ID NO: 989510 - RNA, 21 nt, Human
accuuacaaccuaggacauca

SEQ ID NO: 989511 - RNA, 18 nt, Human
agaauauacucuaacaca

SEQ ID NO: 989512 - RNA, 21 nt, Human
agcacugcgguggcggcagca

SEQ ID NO: 989513 - RNA, 20 nt, Human
agcauccagucauagaaaug

SEQ ID NO: 989514 - RNA, 20 nt, Human
agcauccagucauagaaaug

SEQ ID NO: 989515 - RNA, 20 nt, Human
agcauccagucauagaaaug

SEQ ID NO: 989516 - RNA, 22 nt, Human
agcauccagucauagaaauggc

SEQ ID NO: 989517 - RNA, 22 nt, Human
agcauccagucauagaaauggc

SEQ ID NO: 989518 - RNA, 22 nt, Human
agcauccagucauagaaauggc

SEQ ID NO: 989519 - RNA, 23 nt, Human
agccgucuguggggaccagccuc

SEQ ID NO: 989520 - RNA, 23 nt, Human
agccgucuguggggaccagccuc

SEQ ID NO: 989521 - RNA, 25 nt, Human
aggcccggccgugcggcggccgaaa

SEQ ID NO: 989522 - RNA, 18 nt, Human
aguccugccccucgccuu

SEQ ID NO: 989523 - RNA, 20 nt, Human
aguccugccccucgccuucc

SEQ ID NO: 989524 - RNA, 19 nt, Human
caaccuaggacaucaaugc

SEQ ID NO: 989525 - RNA, 25 nt, Human
cagccucuuuagggagaaacaguuu

SEQ ID NO: 989526 - RNA, 31 nt, Human
cagccucuuuagggagaaacaguuuaugacu

SEQ ID NO: 989527 - RNA, 31 nt, Human; identical to SEQ ID NO: 989526

SEQ ID NO: 989528 - RNA, 23 nt, Human
caggagggcagccugugaggccc

SEQ ID NO: 989529 - RNA, 21 nt, Human
ccccacacugaggccacuguc

SEQ ID NO: 989530 - RNA, 21 nt, Human
cccggcgcaccggagcagccg

SEQ ID NO: 989531 - RNA, 23 nt, Human
cccggcgcaccggagcagccgcg

SEQ ID NO: 989532 - RNA, 19 nt, Human
cccugggccgccucugccc

SEQ ID NO: 989533 - RNA, 18 nt, Human
ccucgccuuccaggcuga

SEQ ID NO: 989534 - RNA, 24 nt, Human
ccuuagcaccuuacaaccuaggac

SEQ ID NO: 989535 - RNA, 18 nt, Human
cgcgugccgccccugggc

SEQ ID NO: 989536 - RNA, 19 nt, Human
cggcagcagcggagcuggg

SEQ ID NO: 989537 - RNA, 21 nt, Human
cggcagcagcggagcuggggu

SEQ ID NO: 989538 - RNA, 21 nt, Human
cggccgaaaagagcccggcgc

SEQ ID NO: 989539 - RNA, 19 nt, Human
cucagcauccagucauaga

SEQ ID NO: 989540 - RNA, 21 nt, Human
cucagcauccagucauagaag

SEQ ID NO: 989541 - RNA, 21 nt, Human
cucagcauccagucauagaag

SEQ ID NO: 989542 - RNA, 19 nt, Human
cuggcauuccccacacuga

SEQ ID NO: 989543 - RNA, 24 nt, Human
cuggccguguucugagccucucuc

SEQ ID NO: 989544 - RNA, 19 nt, Human
cuuagccucaccucauggc

SEQ ID NO: 989545 - RNA, 20 nt, Human
cuuagccucaccucauggcc

SEQ ID NO: 989546 - RNA, 20 nt, Human
cuuagccucaccucauggcc

SEQ ID NO: 989547 - RNA, 23 nt, Human
gaaacauauacacuccuguggcc

SEQ ID NO: 989548 - RNA, 20 nt, Human
gaacagagcugcaaccccau

SEQ ID NO: 989549 - RNA, 22 nt, Human
gagcacugcgguggcggcagca

SEQ ID NO: 989550 - RNA, 21 nt, Human
gaguccugccccucgccuucc

SEQ ID NO: 989551 - RNA, 24 nt, Human
gcaagccgucuguggggaccagcc

SEQ ID NO: 989552 - RNA, 24 nt, Human
gcaagccgucuguggggaccagcc

SEQ ID NO: 989553 - RNA, 24 nt, Human
gcaagccgucuguggggaccagcc

SEQ ID NO: 989554 - RNA, 23 nt, Human
gccucuuuagggagaaacaguuu

SEQ ID NO: 989555 - RNA, 18 nt, Human
gcuggcauuccccuuagc

SEQ ID NO: 989556 - RNA, 18 nt, Human
ggcagcagcggagcuggg

SEQ ID NO: 989557 - RNA, 19 nt, Human
ggccgaaaagagcccggcg

SEQ ID NO: 989558 - RNA, 26 nt, Human
ggccgaaaagagcccggcgcaccgga

SEQ ID NO: 989559 - RNA, 23 nt, Human
uacaaccuaggacaucaaugcca

SEQ ID NO: 989560 - RNA, 21 nt, Human
uaccuggccguguucugagcc

SEQ ID NO: 989561 - RNA, 19 nt, Human
uaggacaucaaugccacac

SEQ ID NO: 989562 - RNA, 21 nt, Human
ugaacagagcugcaaccccau

SEQ ID NO: 989563 - RNA, 21 nt, Human
ugccccgccgccgcggagucc

SEQ ID NO: 989564 - RNA, 28 nt, Human
ugcggcggccgaaaagagcccggcgcac

SEQ ID NO: 989565 - RNA, 20 nt, Human
uggaaaguuuagguaaccaa

SEQ ID NO: 989566 - RNA, 24 nt, Human
uggaaaguuuagguaaccaauggc

SEQ ID NO: 989567 - RNA, 22 nt, Human
uggaccucugaaccagcaggcu

SEQ ID NO: 989568 - RNA, 22 nt, Human
uggaccucugaaccagcaggcu

SEQ ID NO: 989569 - RNA, 22 nt, Human
uggaccucugaaccagcaggcu

SEQ ID NO: 989570 - RNA, 19 nt, Human
uggccugggacaaguuggu

SEQ ID NO: 989571 - RNA, 18 nt, Human
uggcggcagcagcggagc

SEQ ID NO: 989572 - RNA, 20 nt, Human
uggcggcagcagcggagcug

SEQ ID NO: 989573 - RNA, 23 nt, Human
uggcggcagcagcggagcugggg

SEQ ID NO: 989574 - RNA, 21 nt, Human
uggggaccagccucuuuaggg

SEQ ID NO: 989575 - RNA, 21 nt, Human
uggggaccagccucuuuaggg

SEQ ID NO: 989576 - RNA, 20 nt, Human
ugucuggggaguccugcccc

SEQ ID NO: 989577 - RNA, 24 nt, Human
uguggggaccagccucuuuaggga

SEQ ID NO: 989578 - RNA, 24 nt, Human
uguggggaccagccucuuuaggga

SEQ ID NO: 989579 - RNA, 19 nt, Human
uucauuucuucaaaaacug

SEQ ID NO: 989580 - RNA, 19 nt, Human
uucauuucuucaaaaacug

SEQ ID NO: 989581 - RNA, 20 nt, Human
uucuuuucuuuuuuucuaua

SEQ ID NO: 989582 - RNA, 26 nt, Human
aaaaaaaaaaaaaaaagcaaaacaaa

SEQ ID NO: 989583 - RNA, 25 nt, Human
aaaaaaaaaaaaauuagcagcuuaa

SEQ ID NO: 989584 - RNA, 25 nt, Human
aaaaaaaaaaagcaaaacaaaaaag

SEQ ID NO: 989585 - RNA, 27 nt, Human
aaaaaaaagcaaaacaaaaaaacaaaa

SEQ ID NO: 989586 - RNA, 23 nt, Human
aaaaaaauauaaacaagaaacug

SEQ ID NO: 989587 - RNA, 24 nt, Human
aaaaaacguagucacaaguaccac

SEQ ID NO: 989588 - RNA, 20 nt, Human
aaaaagcaaaacaaaaaaac

SEQ ID NO: 989589 - RNA, 19 nt, Human
aaaacaaaaccaacagagc

SEQ ID NO: 989590 - RNA, 25 nt, Human
aaaacaaacaaacaacaaaaaaccc

SEQ ID NO: 989591 - RNA, 23 nt, Human
aaaaccaacagagcauaauaccc

SEQ ID NO: 989592 - RNA, 22 nt, Human
aaaagaaaaaaaaaaaaaaaag

SEQ ID NO: 989593 - RNA, 21 nt, Human
aaaagcaaaacaaaaaaacaa

SEQ ID NO: 989594 - RNA, 20 nt, Human
aaaauucugaaucacugcua

SEQ ID NO: 989595 - RNA, 25 nt, Human
aaacaaaaaaacaaaaccaacagag

SEQ ID NO: 989596 - RNA, 18 nt, Human
aaacaaaaccaacagagc

SEQ ID NO: 989597 - RNA, 27 nt, Human
aaacaaaaccaacagagcauaauaccc

SEQ ID NO: 989598 - RNA, 19 nt, Human
aaacaaacaaacaacaaaa

SEQ ID NO: 989599 - RNA, 25 nt, Human
aaacaaacaaacaacaaaaaaccca

SEQ ID NO: 989600 - RNA, 20 nt, Human
aaacaaacaacaaaaaaccc

SEQ ID NO: 989601 - RNA, 24 nt, Human
aaacaaacaacaaaaaacccaaaa

SEQ ID NO: 989602 - RNA, 25 nt, Human
aaacaaacaacaaaaaacccaaaac

SEQ ID NO: 989603 - RNA, 21 nt, Human
aaacaaagcaaaacaaacaaa

SEQ ID NO: 989604 - RNA, 24 nt, Human
aaagcaaaacaaacaaacaacaaa

SEQ ID NO: 989605 - RNA, 22 nt, Human
aacaaaaaaacaaaaccaacag

SEQ ID NO: 989606 - RNA, 21 nt, Human
aacaaacaaacaacaaaaaac

SEQ ID NO: 989607 - RNA, 24 nt, Human
aacaaacaacaaaaaacccaaaac

SEQ ID NO: 989608 - RNA, 23 nt, Human
aacaacaaaaaacccaaaacuac

SEQ ID NO: 989609 - RNA, 21 nt, Human
aagcaaaacaaaaaaacaaaa

SEQ ID NO: 989610 - RNA, 19 nt, Human
aagcaaaacaaacaaacaa

SEQ ID NO: 989611 - RNA, 22 nt, Human
aagcaaaacaaacaaacaacaa

SEQ ID NO: 989612 - RNA, 23 nt, Human
aagccacaucaccaaaaaacaaa

SEQ ID NO: 989613 - RNA, 22 nt, Human
aauaacagaggucaaccacaga

SEQ ID NO: 989614 - RNA, 23 nt, Human
aaucucuuaaaaaacaaagcaaa

SEQ ID NO: 989615 - RNA, 22 nt, Human
aaucuucgagauauaaauuuga

SEQ ID NO: 989616 - RNA, 25 nt, Human
acaaaaccaacagagcauaauaccc

SEQ ID NO: 989617 - RNA, 18 nt, Human
acaaaaccaucgugaaug

SEQ ID NO: 989618 - RNA, 19 nt, Human
acaaacaacaaaaaaccca

SEQ ID NO: 989619 - RNA, 25 nt, Human
acaaagcaaaacaaacaaacaacaa

SEQ ID NO: 989620 - RNA, 26 nt, Human
acaaagcaaaacaaacaaacaacaaa

SEQ ID NO: 989621 - RNA, 27 nt, Human
acaaagcaaaacaaacaaacaacaaaa

SEQ ID NO: 989622 - RNA, 21 nt, Human
acaaaugcagaaucagagcag

SEQ ID NO: 989623 - RNA, 19 nt, Human
acaacaaaaaacccaaaac

SEQ ID NO: 989624 - RNA, 20 nt, Human
acaacacaggauauaaccca

SEQ ID NO: 989625 - RNA, 19 nt, Human
acaaggaaauuccccuccu

SEQ ID NO: 989626 - RNA, 21 nt, Human
accaaaaaacaaaaaagaaaa

SEQ ID NO: 989627 - RNA, 22 nt, Human
acucagcauauuagguuuccua

SEQ ID NO: 989628 - RNA, 24 nt, Human
agaaaaaaaaaaaaaaaagcaaaa

SEQ ID NO: 989629 - RNA, 20 nt, Human
agaaaacaacaugagagauu

SEQ ID NO: 989630 - RNA, 20 nt, Human
agaagguuagugcaauuaua

SEQ ID NO: 989631 - RNA, 18 nt, Human
agaauucacaagcuguga

SEQ ID NO: 989632 - RNA, 20 nt, Human
agcaaaacaaaaaaacaaaa

SEQ ID NO: 989633 - RNA, 26 nt, Human
agcaaaacaaaaaaacaaaaccaaca

SEQ ID NO: 989634 - RNA, 30 nt, Human
agcaaaacaaaaaaacaaaaccaacagagg

SEQ ID NO: 989635 - RNA, 23 nt, Human
agcaaaacaaacaaacaacaaaa

SEQ ID NO: 989636 - RNA, 25 nt, Human
agggaaaaaaagaauauaauccaug

SEQ ID NO: 989637 - RNA, 24 nt, Human
auaaaauguaccaaacaucuaccc

SEQ ID NO: 989638 - RNA, 25 nt, Human
augcaccaacugaauauaugcuccc

SEQ ID NO: 989639 - RNA, 18 nt, Human
auucaaaggggagaaaca

SEQ ID NO: 989640 - RNA, 25 nt, Human
auuuaauuuccaauucccccuucca

SEQ ID NO: 989641 - RNA, 21 nt, Human
auuuuaggggcacagcagauu

SEQ ID NO: 989642 - RNA, 19 nt, Human
caaaaaagaaaaaaaaaaa

SEQ ID NO: 989643 - RNA, 19 nt, Human
caaaacaaaaaaacaaaac

SEQ ID NO: 989644 - RNA, 21 nt, Human
caaaacaaaaaaacaaaacca

SEQ ID NO: 989645 - RNA, 21 nt, Human
caaacaacaaaaaacccaaaa

SEQ ID NO: 989646 - RNA, 24 nt, Human
caaacaacaaaaaacccaaaacua

SEQ ID NO: 989647 - RNA, 23 nt, Human
caacaaaaaacccaaaacuacgu

SEQ ID NO: 989648 - RNA, 20 nt, Human
caacacaggauauaacccau

SEQ ID NO: 989649 - RNA, 23 nt, Human
caaccacagauguggaccuccag

SEQ ID NO: 989650 - RNA, 24 nt, Human
caaccacagauguggaccuccagc

SEQ ID NO: 989651 - RNA, 23 nt, Human
caacugaauauaugcucugggag

SEQ ID NO: 989652 - RNA, 22 nt, Human
caagugccagauacucagcaua

SEQ ID NO: 989653 - RNA, 22 nt, Human
cacagaaugauggacacuucga

SEQ ID NO: 989654 - RNA, 24 nt, Human
cacaucaccaaaaaacaaaaaaga

SEQ ID NO: 989655 - RNA, 19 nt, Human
cagaggucaaccacagaug

SEQ ID NO: 989656 - RNA, 23 nt, Human
cagcaauaaaagcaggaauucaa

SEQ ID NO: 989657 - RNA, 20 nt, Human
caguacaugggucagggaca

SEQ ID NO: 989658 - RNA, 22 nt, Human
cauauaaacauggccucaugca

SEQ ID NO: 989659 - RNA, 24 nt, Human
ccaauucccccuuccacaacaugc

SEQ ID NO: 989660 - RNA, 19 nt, Human
ccaccgccuccaaccaccc

SEQ ID NO: 989661 - RNA, 22 nt, Human
ccaccgccuccaaccaccccca

SEQ ID NO: 989662 - RNA, 24 nt, Human
ccccuccucgccgccgccgccacu

SEQ ID NO: 989663 - RNA, 26 nt, Human
ccgccgccgccaccgccuccaaccac

SEQ ID NO: 989664 - RNA, 22 nt, Human
ccgccuccaaccacccccaaaa

SEQ ID NO: 989665 - RNA, 19 nt, Human
ccuacguaagucacagggu

SEQ ID NO: 989666 - RNA, 19 nt, Human
cgccaccgccuccaaccac

SEQ ID NO: 989667 - RNA, 23 nt, Human
cgccgccgccaccgccuccaacc

SEQ ID NO: 989668 - RNA, 18 nt, Human
cgugaaugacugccucuc

SEQ ID NO: 989669 - RNA, 21 nt, Human
cgugaaugacugccucucuug

SEQ ID NO: 989670 - RNA, 26 nt, Human
cuccucgccgccgccgccaccgccuc

SEQ ID NO: 989671 - RNA, 22 nt, Human
cucuuaaaaaacaaagcaaaac

SEQ ID NO: 989672 - RNA, 23 nt, Human
cucuucagaaaugacauaccugg

SEQ ID NO: 989673 - RNA, 18 nt, Human
cuggaaacgguggccucc

SEQ ID NO: 989674 - RNA, 22 nt, Human
cuuaaaccaugaggucacaaca

SEQ ID NO: 989675 - RNA, 24 nt, Human
gcaagaacaaacuacugcugcaag

SEQ ID NO: 989676 - RNA, 19 nt, Human
ggagccauaaaauguacca

SEQ ID NO: 989677 - RNA, 20 nt, Human
ggcuguaguggacuggccau

SEQ ID NO: 989678 - RNA, 20 nt, Human
gggaauggaggcacaaggaa

SEQ ID NO: 989679 - RNA, 21 nt, Human
gggaauggaggcacaaggaaa

SEQ ID NO: 989680 - RNA, 18 nt, Human
gugaacagaauucacaag

SEQ ID NO: 989681 - RNA, 18 nt, Human
gugcaacugaauauccgg

SEQ ID NO: 989682 - RNA, 18 nt, Human
guuaaucaugacaagccu

SEQ ID NO: 989683 - RNA, 23 nt, Human
uaaaaaacaaagcaaaacaaaca

SEQ ID NO: 989684 - RNA, 26 nt, Human
uaaaaaacaaagcaaaacaaacaaac

SEQ ID NO: 989685 - RNA, 22 nt, Human
uaaaaagagcuggcacaaaacc

SEQ ID NO: 989686 - RNA, 26 nt, Human
uaaaaggccucaaaauaauuagugac

SEQ ID NO: 989687 - RNA, 21 nt, Human
uaaaaucuucgagauauaaau

SEQ ID NO: 989688 - RNA, 25 nt, Human
uaaacaauaacagaggucaaccaca

SEQ ID NO: 989689 - RNA, 22 nt, Human
uaaaccaaaaacgaaauuuuaa

SEQ ID NO: 989690 - RNA, 23 nt, Human
uaagccacaucaccaaaaaacaa

SEQ ID NO: 989691 - RNA, 22 nt, Human
uaagguagcaaacauuuugcca

SEQ ID NO: 989692 - RNA, 22 nt, Human
uacacagaaugauggacacuuc

SEQ ID NO: 989693 - RNA, 23 nt, Human
uaccaauagcaaaugcuacccua

SEQ ID NO: 989694 - RNA, 20 nt, Human
uaccacaaaugcagaaucag

SEQ ID NO: 989695 - RNA, 22 nt, Human
uagcaaagcaacgaaugcugaa

SEQ ID NO: 989696 - RNA, 20 nt, Human
uauacacuguauguauauau

SEQ ID NO: 989697 - RNA, 19 nt, Human
uauaguagugauuacuaaa

SEQ ID NO: 989698 - RNA, 21 nt, Human
uauauacacuguauguauaua

SEQ ID NO: 989699 - RNA, 20 nt, Human
uauccaaaacuucuaaaugc

SEQ ID NO: 989700 - RNA, 27 nt, Human
ucaccaaaaaacaaaaaagaaaaaaaa

SEQ ID NO: 989701 - RNA, 23 nt, Human
ucauuugucuguauauguuacuc

SEQ ID NO: 989702 - RNA, 20 nt, Human
ucccaaaaaagaaacuauug

SEQ ID NO: 989703 - RNA, 18 nt, Human
ucgccgccgccgccaccg

SEQ ID NO: 989704 - RNA, 25 nt, Human
ucgccgccgccgccaccgccuccaa

SEQ ID NO: 989705 - RNA, 23 nt, Human
ucuaugguaauuaaaaaaaaagu

SEQ ID NO: 989706 - RNA, 22 nt, Human
ucucuguacauacaaacugcuc

SEQ ID NO: 989707 - RNA, 18 nt, Human
ucuuuuguuugagauugu

SEQ ID NO: 989708 - RNA, 20 nt, Human
ugaaaucaaucaaagcugca

SEQ ID NO: 989709 - RNA, 27 nt, Human
ugaacagaauucacaagcugugacaaa

SEQ ID NO: 989710 - RNA, 22 nt, Human
ugcaacugaauauccggucacc

SEQ ID NO: 989711 - RNA, 21 nt, Human
ugcuggaaacgguggccucca

SEQ ID NO: 989712 - RNA, 19 nt, Human
uggcagaaauaugucccaa

SEQ ID NO: 989713 - RNA, 18 nt, Human
uggcagugcauugaugug

SEQ ID NO: 989714 - RNA, 19 nt, Human
uggccaugguucaaguggg

SEQ ID NO: 989715 - RNA, 20 nt, Human
uggccuccaacgccgcuccc

SEQ ID NO: 989716 - RNA, 19 nt, Human
uguaaguccauuuucucug

SEQ ID NO: 989717 - RNA, 23 nt, Human
uguauaaagaaaacaacaugaga

SEQ ID NO: 989718 - RNA, 19 nt, Human
uuaagccacaucaccaaaa

SEQ ID NO: 989719 - RNA, 20 nt, Human
uugcuaagcucaacaauaag

SEQ ID NO: 989720 - RNA, 20 nt, Human
uuuaagaaaauacuugauau

SEQ ID NO: 989721 - RNA, 25 nt, Human
uuucacaauagugcacauuuuuacc

SEQ ID NO: 989722 - RNA, 24 nt, Human
aaaggugcucaguuagagauucua

SEQ ID NO: 989723 - RNA, 18 nt, Human
acacuguagccgugaaug

SEQ ID NO: 989724 - RNA, 20 nt, Human
agguagugcacacugugaca

SEQ ID NO: 989725 - RNA, 23 nt, Human
agguuuggaauaaaauccaaagg

SEQ ID NO: 989726 - RNA, 19 nt, Human
auaaaacacauuagcucaa

SEQ ID NO: 989727 - RNA, 23 nt, Human
auuauuguugguccaguuuuccu

SEQ ID NO: 989728 - RNA, 24 nt, Human
cacauuagcucaaaauggaaaaaa

SEQ ID NO: 989729 - RNA, 24 nt, Human
cccgccccggcccguugcuaggag

SEQ ID NO: 989730 - RNA, 24 nt, Human
cccgcgacaauaaauagacuagag

SEQ ID NO: 989731 - RNA, 24 nt, Human
cccguugcuaggagcccccgaggc

SEQ ID NO: 989732 - RNA, 24 nt, Human
ccggcccguugcuaggagcccccg

SEQ ID NO: 989733 - RNA, 19 nt, Human
ccuugcuuuguuguuccgg

SEQ ID NO: 989734 - RNA, 21 nt, Human
cggaugcgaaggagaagcugg

SEQ ID NO: 989735 - RNA, 18 nt, Human
cucaaaauggaaaaaaau

SEQ ID NO: 989736 - RNA, 24 nt, Human
cucaaaauggaaaaaaauaacaau

SEQ ID NO: 989737 - RNA, 20 nt, Human
cuuccuugcuuuguuguucc

SEQ ID NO: 989738 - RNA, 20 nt, Human
cuugcuuuguuguuccgggu

SEQ ID NO: 989739 - RNA, 24 nt, Human
cuuguaaacuuccuuuuauauuac

SEQ ID NO: 989740 - RNA, 18 nt, Human
gaauuacugcgaaaauaa

SEQ ID NO: 989741 - RNA, 22 nt, Human
gccccggcccguugcuaggagc

SEQ ID NO: 989742 - RNA, 21 nt, Human
gcgaaggagaagcuggaggac

SEQ ID NO: 989743 - RNA, 20 nt, Human
gcgaggcggccgcagcuucc

SEQ ID NO: 989744 - RNA, 20 nt, Human
gcucugcuuauggggacaug

SEQ ID NO: 989745 - RNA, 22 nt, Human
gcuggaggacaaggaugaggau

SEQ ID NO: 989746 - RNA, 18 nt, Human
ggaacucccgccccggcc

SEQ ID NO: 989747 - RNA, 19 nt, Human
gugcagcagguuuaaaagg

SEQ ID NO: 989748 - RNA, 20 nt, Human
uaaaacacauuagcucaaaa

SEQ ID NO: 989749 - RNA, 24 nt, Human
uaaaagcagcaauaucaugucuug

SEQ ID NO: 989750 - RNA, 22 nt, Human
uaaaaggugcucaguuagagau

SEQ ID NO: 989751 - RNA, 22 nt, Human
uacagcaagguuuggaauaaaa

SEQ ID NO: 989752 - RNA, 21 nt, Human
uagaauguccuuuuguaaaag

SEQ ID NO: 989753 - RNA, 24 nt, Human
uagcucaaaauggaaaaaaauaac

SEQ ID NO: 989754 - RNA, 22 nt, Human
uccccagucuccauggaacucc

SEQ ID NO: 989755 - RNA, 21 nt, Human
uccuugcuuuguuguuccggg

SEQ ID NO: 989756 - RNA, 19 nt, Human
ucuccauggaacucccgcc

SEQ ID NO: 989757 - RNA, 23 nt, Human
ucugcuuauggggacaugagaau

SEQ ID NO: 989758 - RNA, 20 nt, Human
ugaggaugagacgggcgcgc

SEQ ID NO: 989759 - RNA, 22 nt, Human
ugaggaugagacgggcgcgcuc

SEQ ID NO: 989760 - RNA, 22 nt, Human
ugcacauucaauugaaaaagau

SEQ ID NO: 989761 - RNA, 24 nt, Human
uggcugaggacgcggcggcagcgc

SEQ ID NO: 989762 - RNA, 18 nt, Human
ugggaagagggagcggug

SEQ ID NO: 989763 - RNA, 19 nt, Human
uguuguuccgggugcgagg

SEQ ID NO: 989764 - RNA, 23 nt, Human
uuccuugcuuuguuguuccgggu

SEQ ID NO: 989765 - RNA, 25 nt, Human
uuggaauaaaauccaaagggacuuu

SEQ ID NO: 989766 - RNA, 23 nt, Human
uuuuuuuuuuuuuuuuuaucuuu

SEQ ID NO: 989767 - RNA, 18 nt, Human
aacaaacuucugucaccu

SEQ ID NO: 989768 - RNA, 18 nt, Human
aacaggauaacagaggga

SEQ ID NO: 989769 - RNA, 23 nt, Human
aaccauugaagguuucugagcag

SEQ ID NO: 989770 - RNA, 19 nt, Human
aaccuccugagaucaagcg

SEQ ID NO: 989771 - RNA, 18 nt, Human
aagcagaagugugaaccu

SEQ ID NO: 989772 - RNA, 25 nt, Human
aagcgauccucuuaccuuggccucc

SEQ ID NO: 989773 - RNA, 19 nt, Human
aaguaguugggacuauagg

SEQ ID NO: 989774 - RNA, 23 nt, Human
acaaagcaggaagcaguggccuu

SEQ ID NO: 989775 - RNA, 19 nt, Human
acccaggcuggagugcaau

SEQ ID NO: 989776 - RNA, 19 nt, Human
acugcagccucaaccuccu

SEQ ID NO: 989777 - RNA, 22 nt, Human
agaaaaugguggagagaugcaa

SEQ ID NO: 989778 - RNA, 18 nt, Human
agaagaaaaugguggaga

SEQ ID NO: 989779 - RNA, 24 nt, Human
agacacacucacagguaacaaaaa

SEQ ID NO: 989780 - RNA, 22 nt, Human
agccucaaccuccugagaucaa

SEQ ID NO: 989781 - RNA, 24 nt, Human
agcuggucucgaacuccugaccuc

SEQ ID NO: 989782 - RNA, 25 nt, Human
agcuuuauucuuuuuguuaaccuua

SEQ ID NO: 989783 - RNA, 21 nt, Human
aggaagugaggcuuuccagaa

SEQ ID NO: 989784 - RNA, 22 nt, Human
aggauaacagagggaccuaagc

SEQ ID NO: 989785 - RNA, 20 nt, Human
aggauuccuuucuuucuuuc

SEQ ID NO: 989786 - RNA, 21 nt, Human
aggauuccuuucuuucuuucu

SEQ ID NO: 989787 - RNA, 21 nt, Human
aggcuuaaacuaccacaccca

SEQ ID NO: 989788 - RNA, 23 nt, Human
agggaccuaagcuggggaagugg

SEQ ID NO: 989789 - RNA, 18 nt, Human
agggcugagauuauaggc

SEQ ID NO: 989790 - RNA, 20 nt, Human
aggugagcucuauggcagag

SEQ ID NO: 989791 - RNA, 18 nt, Human
agugcagaagaaaauggu

SEQ ID NO: 989792 - RNA, 18 nt, Human
auaauucacugcagccuc

SEQ ID NO: 989793 - RNA, 18 nt, Human
aucauaauucacugcagc

SEQ ID NO: 989794 - RNA, 21 nt, Human
aucuaccacccaggcuggagu

SEQ ID NO: 989795 - RNA, 24 nt, Human
aucuaccacccaggcuggagugca

SEQ ID NO: 989796 - RNA, 21 nt, Human
augaauguucagagaacagag

SEQ ID NO: 989797 - RNA, 25 nt, Human
caaagacaagaaggcuaggccucac

SEQ ID NO: 989798 - RNA, 26 nt, Human
caaagcagaagugugaaccugagccc

SEQ ID NO: 989799 - RNA, 19 nt, Human
caaaugaucuaacuagcau

SEQ ID NO: 989800 - RNA, 22 nt, Human
caacaggauaacagagggaccu

SEQ ID NO: 989801 - RNA, 22 nt, Human
caaccuccugagaucaagcgau

SEQ ID NO: 989802 - RNA, 24 nt, Human
caaccuccugagaucaagcgaucc

SEQ ID NO: 989803 - RNA, 20 nt, Human
cacauacuuuccaggcuuca

SEQ ID NO: 989804 - RNA, 24 nt, Human
caccuccaccuccagcuaguggga

SEQ ID NO: 989805 - RNA, 20 nt, Human
cacuaaggcacaggcaaggu

SEQ ID NO: 989806 - RNA, 24 nt, Human
cacuuuguugcacaagcuggucuc

SEQ ID NO: 989807 - RNA, 19 nt, Human
cagaagaaaaugguggaga

SEQ ID NO: 989808 - RNA, 23 nt, Human
cagccucaaccuccugagaucaa

SEQ ID NO: 989809 - RNA, 21 nt, Human
caggccaccaugcccagcuaa

SEQ ID NO: 989810 - RNA, 24 nt, Human
cauccaaacugaacccucucccag

SEQ ID NO: 989811 - RNA, 22 nt, Human
cauccuggucucaaagcagaag

SEQ ID NO: 989812 - RNA, 18 nt, Human
ccacacauacuuuccagg

SEQ ID NO: 989813 - RNA, 23 nt, Human
ccugaccucaagcgauccucuua

SEQ ID NO: 989814 - RNA, 24 nt, Human
ccuugaucuaccacccaggcugga

SEQ ID NO: 989815 - RNA, 18 nt, Human
cuagcaucauccaaacug

SEQ ID NO: 989816 - RNA, 23 nt, Human
cuagcaucauccaaacugaaccc

SEQ ID NO: 989817 - RNA, 21 nt, Human
cucaaagcagaagugugaacc

SEQ ID NO: 989818 - RNA, 24 nt, Human
cucaagcgauccucuuaccuuggc

SEQ ID NO: 989819 - RNA, 18 nt, Human
cucacagguaacaaaaau

SEQ ID NO: 989820 - RNA, 26 nt, Human
cucacagguaacaaaaauacaaggca

SEQ ID NO: 989821 - RNA, 18 nt, Human
cuccacagaaaaggaagu

SEQ ID NO: 989822 - RNA, 23 nt, Human
cuccacagaaaaggaagugaggc

SEQ ID NO: 989823 - RNA, 18 nt, Human
cucccaguaugacuucug

SEQ ID NO: 989824 - RNA, 24 nt, Human
cucuaaguaguugggacuauaggc

SEQ ID NO: 989825 - RNA, 23 nt, Human
cugagcccuguggccacacauac

SEQ ID NO: 989826 - RNA, 22 nt, Human
gaaaaugggagugcagaagaaa

SEQ ID NO: 989827 - RNA, 27 nt, Human
gaaaaugguggagagaugccgguaccc

SEQ ID NO: 989828 - RNA, 19 nt, Human
gaggcaaaaacaacgggag

SEQ ID NO: 989829 - RNA, 26 nt, Human
gagggaccuaagcuggggaagugguu

SEQ ID NO: 989830 - RNA, 18 nt, Human
gaugguacuuaacaaacu

SEQ ID NO: 989831 - RNA, 23 nt, Human
gcacaagcuggucucgaacuccu

SEQ ID NO: 989832 - RNA, 22 nt, Human
gcucuauggcagaggcaaaaac

SEQ ID NO: 989833 - RNA, 24 nt, Human
ggacuauaggcacaggccaccaug

SEQ ID NO: 989834 - RNA, 20 nt, Human
ggcuuacaccccauccuggu

SEQ ID NO: 989835 - RNA, 20 nt, Human
gggagaacagcgagcagaga

SEQ ID NO: 989836 - RNA, 26 nt, Human
gguaauggugaaccauugaagguuuc

SEQ ID NO: 989837 - RNA, 19 nt, Human
ggucucgaacuccugaccu

SEQ ID NO: 989838 - RNA, 18 nt, Human
gugguuucaggccagaug

SEQ ID NO: 989839 - RNA, 21 nt, Human
uaacaaaaauacaaggcaaaa

SEQ ID NO: 989840 - RNA, 19 nt, Human
uaacagagggaccuaagcu

SEQ ID NO: 989841 - RNA, 23 nt, Human
uaacuagcaucauccaaacugaa

SEQ ID NO: 989842 - RNA, 19 nt, Human
uaaggcacaggcaagguau

SEQ ID NO: 989843 - RNA, 20 nt, Human
uaccacccaggcuggagugc

SEQ ID NO: 989844 - RNA, 22 nt, Human
uagagacaggcucucacuuugu

SEQ ID NO: 989845 - RNA, 19 nt, Human
ucacugcagccucaaccuc

SEQ ID NO: 989846 - RNA, 20 nt, Human
ucacugcagccucaaccucc

SEQ ID NO: 989847 - RNA, 22 nt, Human
ucacugcagccucaaccuccug

SEQ ID NO: 989848 - RNA, 24 nt, Human
ucagcagaucagauguuggaugca

SEQ ID NO: 989849 - RNA, 24 nt, Human
ucuaaguaguugggacuauaggca

SEQ ID NO: 989850 - RNA, 18 nt, Human
ucuaccacccaggcugga

SEQ ID NO: 989851 - RNA, 24 nt, Human
ucuaccacccaggcuggagugcaa

SEQ ID NO: 989852 - RNA, 28 nt, Human
ucuauggcagaggcaaaaaccggggucc

SEQ ID NO: 989853 - RNA, 23 nt, Human
ucucacuuuguugcacaagcugg

SEQ ID NO: 989854 - RNA, 21 nt, Human
ucucgaacuccugaccucaag

SEQ ID NO: 989855 - RNA, 22 nt, Human
ucuuucuuucuuucuuucuuuu

SEQ ID NO: 989856 - RNA, 24 nt, Human
ugaaccugagcccuguggccacac

SEQ ID NO: 989857 - RNA, 19 nt, Human
ugaagguuucugagcagag

SEQ ID NO: 989858 - RNA, 18 nt, Human
ugaccucaagcgauccuc

SEQ ID NO: 989859 - RNA, 21 nt, Human
ugaccucaagcgauccucuua

SEQ ID NO: 989860 - RNA, 22 nt, Human
ugagauuauaggcuuaaacuac

SEQ ID NO: 989861 - RNA, 22 nt, Human
ugaucuaacuagcaucauccaa

SEQ ID NO: 989862 - RNA, 24 nt, Human
ugaucuaccacccaggcuggagug

SEQ ID NO: 989863 - RNA, 20 nt, Human
uggcaagaauaagcugcaga

SEQ ID NO: 989864 - RNA, 21 nt, Human
uggcaagaauaagcugcagag

SEQ ID NO: 989865 - RNA, 18 nt, Human
uggcagaggcaaaaacaa

SEQ ID NO: 989866 - RNA, 19 nt, Human
uggcagaggcaaaaacaac

SEQ ID NO: 989867 - RNA, 24 nt, Human
ugggaagggagauuccacagucug

SEQ ID NO: 989868 - RNA, 21 nt, Human
ugggacuauaggcacaggcca

SEQ ID NO: 989869 - RNA, 22 nt, Human
ugggacuauaggcacaggccac

SEQ ID NO: 989870 - RNA, 24 nt, Human
ugggacuauaggcacaggccacca

SEQ ID NO: 989871 - RNA, 22 nt, Human
ugugcaaagaggcuccuaggau

SEQ ID NO: 989872 - RNA, 20 nt, Human
uguugcacaagcuggucucg

SEQ ID NO: 989873 - RNA, 20 nt, Human
uuccacagucugacucacua

SEQ ID NO: 989874 - RNA, 18 nt, Human
uucuuuuuuuucaaauga

SEQ ID NO: 989875 - RNA, 22 nt, Human
uuucagccaggcucugggaggu

SEQ ID NO: 989876 - RNA, 18 nt, Human
uuugagaauaagaggcag

SEQ ID NO: 989877 - RNA, 21 nt, Human
uuugccgagagccguuaccca

SEQ ID NO: 989878 - RNA, 22 nt, Human
uuuuuuuuuuuuuuuuuuucag

SEQ ID NO: 989879 - RNA, 21 nt, Human
aaaaacacacacccacacaca

SEQ ID NO: 989880 - RNA, 23 nt, Human
aaaauccuucuugagccccacuu

SEQ ID NO: 989881 - RNA, 19 nt, Human
aaacacacacccacacaca

SEQ ID NO: 989882 - RNA, 22 nt, Human
aaacacacacccacacacaacc

SEQ ID NO: 989883 - RNA, 24 nt, Human
aaagcuccuucaugcccaagacuu

SEQ ID NO: 989884 - RNA, 24 nt, Human
aaauccuucuugagccccacuucc

SEQ ID NO: 989885 - RNA, 23 nt, Human
aaccaaaagcaagacgcagcacc

SEQ ID NO: 989886 - RNA, 18 nt, Human
aagaaaaaacacacaccc

SEQ ID NO: 989887 - RNA, 20 nt, Human
aagacgcagcaccagguaaa

SEQ ID NO: 989888 - RNA, 23 nt, Human
acacaaccaccacaaacaauauc

SEQ ID NO: 989889 - RNA, 18 nt, Human
acacacccacacacaacc

SEQ ID NO: 989890 - RNA, 24 nt, Human
acacccacacacaaccaccacaaa

SEQ ID NO: 989891 - RNA, 20 nt, Human
acagagaagggccagaggga

SEQ ID NO: 989892 - RNA, 24 nt, Human
accccaaaauccuucuugagcccc

SEQ ID NO: 989893 - RNA, 24 nt, Human
agaaaaagaaaaaacacacaccca

SEQ ID NO: 989894 - RNA, 21 nt, Human
agacaaaaggaauauauccag

SEQ ID NO: 989895 - RNA, 19 nt, Human
agagaagggccagagggag

SEQ ID NO: 989896 - RNA, 18 nt, Human
agagggagcgggggccuu

SEQ ID NO: 989897 - RNA, 22 nt, Human
aggccagcuguccaaagucagg

SEQ ID NO: 989898 - RNA, 21 nt, Human
agggcagaggauggggcaagg

SEQ ID NO: 989899 - RNA, 23 nt, Human
agggggagcccaggccagcuguc

SEQ ID NO: 989900 - RNA, 20 nt, Human
agugaugaagacaaaaggaa

SEQ ID NO: 989901 - RNA, 24 nt, Human
caaaaagcuccuucaugcccaaga

SEQ ID NO: 989902 - RNA, 25 nt, Human
caaaaagcuccuucaugcccaagac

SEQ ID NO: 989903 - RNA, 23 nt, Human
caaccaccacaaacaauaucuug

SEQ ID NO: 989904 - RNA, 21 nt, Human
caaggggacaccccucucagg

SEQ ID NO: 989905 - RNA, 21 nt, Human
cacacaaccaccacaaacaau

SEQ ID NO: 989906 - RNA, 22 nt, Human
cacacacaaccaccacaaacaa

SEQ ID NO: 989907 - RNA, 23 nt, Human
cacacacaaccaccacaaacaau

SEQ ID NO: 989908 - RNA, 24 nt, Human
cacuagaugcaaaaagcuccuuca

SEQ ID NO: 989909 - RNA, 23 nt, Human
cagagaagggccagagggagcgg

SEQ ID NO: 989910 - RNA, 23 nt, Human
caggugaguccuuucccugaccc

SEQ ID NO: 989911 - RNA, 21 nt, Human
cagguuucaucgugggccagg

SEQ ID NO: 989912 - RNA, 22 nt, Human
cauucaaaaaaaauaaaaagaa

SEQ ID NO: 989913 - RNA, 23 nt, Human
ccacuagaugcaaaaagcuccuu

SEQ ID NO: 989914 - RNA, 21 nt, Human
ccagccccuuuucucugaucc

SEQ ID NO: 989915 - RNA, 27 nt, Human
cccaaaauccuucuugagccccacuuc

SEQ ID NO: 989916 - RNA, 21 nt, Human
cccacaccugaccccucccac

SEQ ID NO: 989917 - RNA, 24 nt, Human
cccacaccugaccccucccaccca

SEQ ID NO: 989918 - RNA, 21 nt, Human
cccacuuccccaaccaacuac

SEQ ID NO: 989919 - RNA, 25 nt, Human
cccaugucccacaccugaccccucc

SEQ ID NO: 989920 - RNA, 22 nt, Human
ccccauucaaaaaaaauaaaaa

SEQ ID NO: 989921 - RNA, 24 nt, Human
cccgccccuccgcgcgcgagaggg

SEQ ID NO: 989922 - RNA, 20 nt, Human
ccgucgaggacccgccccuc

SEQ ID NO: 989923 - RNA, 18 nt, Human
ccuccaaccuaauaacac

SEQ ID NO: 989924 - RNA, 24 nt, Human
ccuccaaccuaauaacacuguuuc

SEQ ID NO: 989925 - RNA, 22 nt, Human
ccucccacccacuagaugcaaa

SEQ ID NO: 989926 - RNA, 22 nt, Human
ccucucagguuucaucgugggc

SEQ ID NO: 989927 - RNA, 18 nt, Human
ccugaccccucccaccca

SEQ ID NO: 989928 - RNA, 21 nt, Human
cgcggcagcucucgggcuucc

SEQ ID NO: 989929 - RNA, 24 nt, Human
cgcggcagcucucgggcuuccucu

SEQ ID NO: 989930 - RNA, 23 nt, Human
cucccaugucccacaccugaccc

SEQ ID NO: 989931 - RNA, 25 nt, Human
cuguaguuagggcagaggauggggc

SEQ ID NO: 989932 - RNA, 22 nt, Human
gaaaaagaaaaaacacacaccc

SEQ ID NO: 989933 - RNA, 18 nt, Human
gaaaguggagucuccugc

SEQ ID NO: 989934 - RNA, 18 nt, Human
gaggauggggcaagggga

SEQ ID NO: 989935 - RNA, 21 nt, Human
gcagggagcagggggcggggg

SEQ ID NO: 989936 - RNA, 23 nt, Human
gccauuccccccuuuccagcccc

SEQ ID NO: 989937 - RNA, 22 nt, Human
ggcagggagcagggggcggggg

SEQ ID NO: 989938 - RNA, 20 nt, Human
ggcgggcuggcaccuucccg

SEQ ID NO: 989939 - RNA, 23 nt, Human
ggcgggggacccgagggccgggu

SEQ ID NO: 989940 - RNA, 19 nt, Human
gggcagggagcagggggcg

SEQ ID NO: 989941 - RNA, 21 nt, Human
gggccagagggagcgggggcc

SEQ ID NO: 989942 - RNA, 22 nt, Human
gggcgggcuggcaccuucccgu

SEQ ID NO: 989943 - RNA, 19 nt, Human
gggcugggaugggcaggga

SEQ ID NO: 989944 - RNA, 24 nt, Human
ggggacccgagggccggguggggg

SEQ ID NO: 989945 - RNA, 19 nt, Human
gucgaggacccgccccucc

SEQ ID NO: 989946 - RNA, 18 nt, Human
guucuuuuuggaucaggg

SEQ ID NO: 989947 - RNA, 19 nt, Human
uaaaaagaaagaaaaagaa

SEQ ID NO: 989948 - RNA, 23 nt, Human
uagccgucgaggacccgccccuc

SEQ ID NO: 989949 - RNA, 22 nt, Human
ucccacaccugaccccucccac

SEQ ID NO: 989950 - RNA, 23 nt, Human
ucccacaccugaccccucccacc

SEQ ID NO: 989951 - RNA, 26 nt, Human
ucccccauucaaaaaaaauaaaaaga

SEQ ID NO: 989952 - RNA, 21 nt, Human
ucccguagccgucgaggaccc

SEQ ID NO: 989953 - RNA, 18 nt, Human
ucccugacccuggcgggc

SEQ ID NO: 989954 - RNA, 22 nt, Human
ucuccagcuggaaaccaaaagc

SEQ ID NO: 989955 - RNA, 18 nt, Human
ucuccugcucccaugucc

SEQ ID NO: 989956 - RNA, 19 nt, Human
ugaaaguuacuguacaaag

SEQ ID NO: 989957 - RNA, 20 nt, Human
ugagcagggggagcccaggc

SEQ ID NO: 989958 - RNA, 18 nt, Human
ugaugaagacaaaaggaa

SEQ ID NO: 989959 - RNA, 20 nt, Human
uggcuucuacgcccucgucc

SEQ ID NO: 989960 - RNA, 24 nt, Human
ugggaugggcagggagcagggggc

SEQ ID NO: 989961 - RNA, 21 nt, Human
ugggcugggaugggcagggag

SEQ ID NO: 989962 - RNA, 23 nt, Human
ugucccacaccugaccccuccca

SEQ ID NO: 989963 - RNA, 23 nt, Human
uuacuguacaaaggaagaaagug

SEQ ID NO: 989964 - RNA, 19 nt, Human
uucccugacccuggcgggc

SEQ ID NO: 989965 - RNA, 27 nt, Human
uuuccagccccuuuucucuggggccgc

SEQ ID NO: 989966 - RNA, 23 nt, Human
uuucccaaauuagucgguguccu

SEQ ID NO: 989967 - RNA, 22 nt, Human
uuuuuuuuuuuuuuuuuaacag

SEQ ID NO: 989968 - RNA, 27 nt, Human
aaaaaaacccuuuaaaaauaccccuca

SEQ ID NO: 989969 - RNA, 18 nt, Human
aaaaauaccccucaggug

SEQ ID NO: 989970 - RNA, 21 nt, Human
aaacccucucaauaacucaua

SEQ ID NO: 989971 - RNA, 18 nt, Human
aacaauagacccaggucc

SEQ ID NO: 989972 - RNA, 21 nt, Human
aaccagauucucagcuccccu

SEQ ID NO: 989973 - RNA, 22 nt, Human
aacccuccacucccaucccacc

SEQ ID NO: 989974 - RNA, 18 nt, Human
aaggagugggccuccugc

SEQ ID NO: 989975 - RNA, 23 nt, Human
acacacacacacacacacacaca

SEQ ID NO: 989976 - RNA, 23 nt, Human
acacacacacacacacacacaca

SEQ ID NO: 989977 - RNA, 23 nt, Human
acacacacacacacacacacaca

SEQ ID NO: 989978 - RNA, 23 nt, Human
acacacacacacacacacacaca

SEQ ID NO: 989979 - RNA, 23 nt, Human
acacacacacacacacacacaca

SEQ ID NO: 989980 - RNA, 29 nt, Human
acacacacacacacacacacacacuggaa

SEQ ID NO: 989981 - RNA, 20 nt, Human
acucuaaggugugcacagag

SEQ ID NO: 989982 - RNA, 22 nt, Human
acucuccagaagucaaaggagu

SEQ ID NO: 989983 - RNA, 19 nt, Human
agacccagguccugcagcc

SEQ ID NO: 989984 - RNA, 20 nt, Human
agagaacuccccaccuggcc

SEQ ID NO: 989985 - RNA, 21 nt, Human
auacauacaugcucguguaua

SEQ ID NO: 989986 - RNA, 25 nt, Human
auacauacaugcucguguauacaca

SEQ ID NO: 989987 - RNA, 22 nt, Human
auagacccagguccugcagcca

SEQ ID NO: 989988 - RNA, 23 nt, Human
augaccucaguuguaugucagaa

SEQ ID NO: 989989 - RNA, 23 nt, Human
augucaagagaugucagauaaca

SEQ ID NO: 989990 - RNA, 19 nt, Human
caaagagaaggccaggaac

SEQ ID NO: 989991 - RNA, 22 nt, Human
caaauacauacaugcucgugua

SEQ ID NO: 989992 - RNA, 18 nt, Human
cacacacacacacacaca

SEQ ID NO: 989993 - RNA, 20 nt, Human
cacacacacacacacacaca

SEQ ID NO: 989994 - RNA, 20 nt, Human
cacacacacacacacacaca

SEQ ID NO: 989995 - RNA, 20 nt, Human
cacacacacacacacacaca

SEQ ID NO: 989996 - RNA, 20 nt, Human
cacacacacacacacacaca

SEQ ID NO: 989997 - RNA, 20 nt, Human
cacacacacacacacacaca

SEQ ID NO: 989998 - RNA, 20 nt, Human
cacacacacacacacacaca

SEQ ID NO: 989999 - RNA, 20 nt, Human
cacacacacacacacacaca

SEQ ID NO: 990000 - RNA, 20 nt, Human
cacacacacacacacacaca

SEQ ID NO: 990001 - RNA, 20 nt, Human
cacacacacacacacacaca

SEQ ID NO: 990002 - RNA, 20 nt, Human
cacacacacacacacacaca

SEQ ID NO: 990003 - RNA, 22 nt, Human
cacacacacacacacacacaca

SEQ ID NO: 990004 - RNA, 22 nt, Human
cacacacacacacacacacaca

SEQ ID NO: 990005 - RNA, 22 nt, Human
cacacacacacacacacacaca

SEQ ID NO: 990006 - RNA, 22 nt, Human
cacacacacacacacacacaca

SEQ ID NO: 990007 - RNA, 26 nt, Human
cacacacacacacacacacacacaca

SEQ ID NO: 990008 - RNA, 26 nt, Human
cacacacacacacacacacacacaca

SEQ ID NO: 990009 - RNA, 26 nt, Human
cacacacacacacacacacacacaca

SEQ ID NO: 990010 - RNA, 27 nt, Human
cacacacacacacacacacacacacug

SEQ ID NO: 990011 - RNA, 21 nt, Human
cacacacacacuggaauaccu

SEQ ID NO: 990012 - RNA, 18 nt, Human
cacagacucuccagaagu

SEQ ID NO: 990013 - RNA, 19 nt, Human
cacagaguccucacacccc

SEQ ID NO: 990014 - RNA, 22 nt, Human
cacuucuuagauaaauguggug

SEQ ID NO: 990015 - RNA, 24 nt, Human
ccacccacgggcaugucaagagau

SEQ ID NO: 990016 - RNA, 23 nt, Human
ccagcagugagaaucuuucccca

SEQ ID NO: 990017 - RNA, 21 nt, Human
cccacagagguuaauacugga

SEQ ID NO: 990018 - RNA, 24 nt, Human
cccacagagguuaauacuggagca

SEQ ID NO: 990019 - RNA, 23 nt, Human
cccacccacgggcaugucaagag

SEQ ID NO: 990020 - RNA, 25 nt, Human
ccccuugcaaagagaaggccaggaa

SEQ ID NO: 990021 - RNA, 26 nt, Human
cccuugcaaagagaaggccaggaacc

SEQ ID NO: 990022 - RNA, 20 nt, Human
ccucaggugacauuuagccc

SEQ ID NO: 990023 - RNA, 18 nt, Human
ccugcagccaaaaucacu

SEQ ID NO: 990024 - RNA, 23 nt, Human
ccugcagccaaaaucacuucuua

SEQ ID NO: 990025 - RNA, 21 nt, Human
cucacugagcagccagcugua

SEQ ID NO: 990026 - RNA, 25 nt, Human
cugcuaccaaaaccagauucucagc

SEQ ID NO: 990027 - RNA, 24 nt, Human
gagaacuccccaccuggccccuga

SEQ ID NO: 990028 - RNA, 22 nt, Human
gagaaucuucccaccccagcag

SEQ ID NO: 990029 - RNA, 19 nt, Human
gcgggcacagcacacaacg

SEQ ID NO: 990030 - RNA, 20 nt, Human
gcuccccuugcaaagagaag

SEQ ID NO: 990031 - RNA, 22 nt, Human
ggaaaaaaaaacccuuuaaaaa

SEQ ID NO: 990032 - RNA, 23 nt, Human
ggccacucacugagcagccagcu

SEQ ID NO: 990033 - RNA, 26 nt, Human
gggaaaaaaaaacccuuuaaaaauac

SEQ ID NO: 990034 - RNA, 20 nt, Human
gguuaauacuggagcaacac

SEQ ID NO: 990035 - RNA, 21 nt, Human
guagagugcaggccacccaca

SEQ ID NO: 990036 - RNA, 21 nt, Human
uaaaacccucucaauaacuca

SEQ ID NO: 990037 - RNA, 24 nt, Human
uaacaauagacccagguccugcag

SEQ ID NO: 990038 - RNA, 23 nt, Human
uacaaaaucugaaugaugacaga

SEQ ID NO: 990039 - RNA, 25 nt, Human
uacacacacacacacacacacacac

SEQ ID NO: 990040 - RNA, 18 nt, Human
uagagugcaggccaccca

SEQ ID NO: 990041 - RNA, 18 nt, Human
uagcccaugacccuuucc

SEQ ID NO: 990042 - RNA, 25 nt, Human
uauacacacacacacacacacacac

SEQ ID NO: 990043 - RNA, 23 nt, Human
uaucaaaguacacauuguggcuu

SEQ ID NO: 990044 - RNA, 22 nt, Human
ucaaaguacacauuguggcuua

SEQ ID NO: 990045 - RNA, 18 nt, Human
uccacucccaucccaccc

SEQ ID NO: 990046 - RNA, 21 nt, Human
ucccggggcuauggaggagac

SEQ ID NO: 990047 - RNA, 18 nt, Human
ucucacagacucuccaga

SEQ ID NO: 990048 - RNA, 22 nt, Human
ugaguaaaucaaccauuauaaa

SEQ ID NO: 990049 - RNA, 21 nt, Human
ugcaaagagaaggccaggaac

SEQ ID NO: 990050 - RNA, 21 nt, Human
ugcacagaguccucacacccc

SEQ ID NO: 990051 - RNA, 31 nt, Human
ugcucguguauacacacacacacacacacag

SEQ ID NO: 990052 - RNA, 19 nt, Human
ugguguuuuuuuuccuugu

SEQ ID NO: 990053 - RNA, 24 nt, Human
uguauacacacacacacacacaca

SEQ ID NO: 990054 - RNA, 19 nt, Human
ugucagaagauggaugcuc

SEQ ID NO: 990055 - RNA, 19 nt, Human
uucccuccucuugaaggga

SEQ ID NO: 990056 - RNA, 21 nt, Human
acgcugggcugcaggcccggc

SEQ ID NO: 990057 - RNA, 21 nt, Human
cccgccaccaccacugcagcc

SEQ ID NO: 990058 - RNA, 22 nt, Human
cccgccaccaccacugcagccg

SEQ ID NO: 990059 - RNA, 24 nt, Human
cccgccaccaccacugcagccgca

SEQ ID NO: 990060 - RNA, 24 nt, Human
ccgccaccaccacugcagccgcag

SEQ ID NO: 990061 - RNA, 21 nt, Human
ggcugcaggcccggcuggggg

SEQ ID NO: 990062 - RNA, 22 nt, Human
ggcugggggaacccucauucuu

SEQ ID NO: 990063 - RNA, 21 nt, Human
uucagaugagauccaugagga

SEQ ID NO: 990064 - RNA, 18 nt, Human
uuuuuuuuuuuuuuuuug

SEQ ID NO: 990065 - RNA, 23 nt, Human
uuuuuuuuuuuuuuuuuuguguu

SEQ ID NO: 990066 - RNA, 21 nt, Human
agccgggcaggaccccggccc

SEQ ID NO: 990067 - RNA, 22 nt, Human
agccgggcaggaccccggcccc

SEQ ID NO: 990068 - RNA, 19 nt, Human
aggcugcagcacaucuaca

SEQ ID NO: 990069 - RNA, 20 nt, Human
ccccgcgcccgucgcgcccg

SEQ ID NO: 990070 - RNA, 19 nt, Human
cccggccccggccgucgcc

SEQ ID NO: 990071 - RNA, 20 nt, Human
cccgucgcgcccgccuccgc

SEQ ID NO: 990072 - RNA, 24 nt, Human
ccgucgccaccucccacacccgcc

SEQ ID NO: 990073 - RNA, 21 nt, Human
ccgucgcgcccgccuccgcag

SEQ ID NO: 990074 - RNA, 20 nt, Human
ccucaggagcagcgaccccc

SEQ ID NO: 990075 - RNA, 23 nt, Human
ccucccacacccgccgcagccga

SEQ ID NO: 990076 - RNA, 23 nt, Human
cgacccccgcgcccgucgcgccc

SEQ ID NO: 990077 - RNA, 22 nt, Human
gacccccgcgcccgucgcgccc

SEQ ID NO: 990078 - RNA, 22 nt, Human
gcaaaaagaaacauuuaauaau

SEQ ID NO: 990079 - RNA, 19 nt, Human
ggcagaaaggugcaauccg

SEQ ID NO: 990080 - RNA, 22 nt, Human
ggccccggccgucgccaccucc

SEQ ID NO: 990081 - RNA, 22 nt, Human
gggaaagggcagaaaggugcaa

SEQ ID NO: 990082 - RNA, 20 nt, Human
gucgcgcccgccuccgcagc

SEQ ID NO: 990083 - RNA, 19 nt, Human
uccaggcaggcagguugag

SEQ ID NO: 990084 - RNA, 20 nt, Human
uccaggcaggcagguugagg

SEQ ID NO: 990085 - RNA, 26 nt, Human
uccgcagccgggcaggaccccggccc

SEQ ID NO: 990086 - RNA, 25 nt, Human
uccgcagccgggcaggaccgggguc

SEQ ID NO: 990087 - RNA, 18 nt, Human
ugagggggaaagggcaga

SEQ ID NO: 990088 - RNA, 19 nt, Human
ugagggggaaagggcagaa

SEQ ID NO: 990089 - RNA, 18 nt, Human
uuuggcaaaaagaaacau

SEQ ID NO: 990090 - RNA, 20 nt, Human
uuuuuuuuuuuuuuuuuugg

SEQ ID NO: 990091 - RNA, 24 nt, Human
uuuuuuuuuuuuuuuuuuguuuuu

SEQ ID NO: 990092 - RNA, 18 nt, Human
aacagggaauagcagaga

SEQ ID NO: 990093 - RNA, 21 nt, Human
aagcgauucucccaccucagc

SEQ ID NO: 990094 - RNA, 25 nt, Human
aagcgauucucccaccucagccucc

SEQ ID NO: 990095 - RNA, 24 nt, Human
aauagcagagaguuugggaagaga

SEQ ID NO: 990096 - RNA, 21 nt, Human
accacaauuacuuuugcagca

SEQ ID NO: 990097 - RNA, 24 nt, Human
acuucugggguuaagcgauucucc

SEQ ID NO: 990098 - RNA, 18 nt, Human
agagggauaugaucugga

SEQ ID NO: 990099 - RNA, 22 nt, Human
agauuacagccauaaaccaccg

SEQ ID NO: 990100 - RNA, 24 nt, Human
agcgauucucccaccucagccucc

SEQ ID NO: 990101 - RNA, 18 nt, Human
agcgcuuccucuuucuuc

SEQ ID NO: 990102 - RNA, 23 nt, Human
auaccaucccacucagacagagu

SEQ ID NO: 990103 - RNA, 20 nt, Human
aucaauacaaauucucagca

SEQ ID NO: 990104 - RNA, 18 nt, Human
auggaaguaauaucugcu

SEQ ID NO: 990105 - RNA, 22 nt, Human
caaaaguaacugcaaaaaccac

SEQ ID NO: 990106 - RNA, 20 nt, Human
caaagcaaacgucugccagc

SEQ ID NO: 990107 - RNA, 25 nt, Human
caccucagccucccagaguuugcag

SEQ ID NO: 990108 - RNA, 18 nt, Human
cacgugugacucggaggu

SEQ ID NO: 990109 - RNA, 19 nt, Human
ccagaugggagagaaggaa

SEQ ID NO: 990110 - RNA, 20 nt, Human
ccucaaaggcccccacagcc

SEQ ID NO: 990111 - RNA, 22 nt, Human
ccucaaaggcccccacagccag

SEQ ID NO: 990112 - RNA, 26 nt, Human
cucauaccaucccacucagacagagu

SEQ ID NO: 990113 - RNA, 18 nt, Human
cuuccucuuucuucuucc

SEQ ID NO: 990114 - RNA, 18 nt, Human
cuugcuguguugccuggg

SEQ ID NO: 990115 - RNA, 25 nt, Human
gagaauucuuccucuaacucauacc

SEQ ID NO: 990116 - RNA, 18 nt, Human
gaggugggggugggguaa

SEQ ID NO: 990117 - RNA, 23 nt, Human
gaugaggaaagaguagggaagaa

SEQ ID NO: 990118 - RNA, 24 nt, Human
gauuacagccauaaaccaccgugc

SEQ ID NO: 990119 - RNA, 24 nt, Human
gcagcaguagggccucgggggcag

SEQ ID NO: 990120 - RNA, 20 nt, Human
gcauuuuucaauuuggaaaa

SEQ ID NO: 990121 - RNA, 24 nt, Human
ggaauagcagagaguuugggaaga

SEQ ID NO: 990122 - RNA, 27 nt, Human
ggggcagcaguagggccucgggggcag

SEQ ID NO: 990123 - RNA, 21 nt, Human
gugaacagggaauagcagaga

SEQ ID NO: 990124 - RNA, 27 nt, Human
uaagcgauucucccaccucagccuccc

SEQ ID NO: 990125 - RNA, 24 nt, Human
uaauuugcaagagaauucuuccuc

SEQ ID NO: 990126 - RNA, 22 nt, Human
uagcagagaguuugggaagaga

SEQ ID NO: 990127 - RNA, 23 nt, Human
uauagagauggggucuugcugug

SEQ ID NO: 990128 - RNA, 24 nt, Human
uauagagauggggucuugcugugu

SEQ ID NO: 990129 - RNA, 25 nt, Human
ucaaagcaaacgucugccagcccac

SEQ ID NO: 990130 - RNA, 24 nt, Human
ucauucuccaauuaggcuccccca

SEQ ID NO: 990131 - RNA, 26 nt, Human
ucccccauuaaccaauuguuucuaau

SEQ ID NO: 990132 - RNA, 19 nt, Human
ucucccaccucagccuccc

SEQ ID NO: 990133 - RNA, 22 nt, Human
ucuggaguccucaaaggccccc

SEQ ID NO: 990134 - RNA, 18 nt, Human
ucuugcuguguugccugg

SEQ ID NO: 990135 - RNA, 22 nt, Human
ucuugcuguguugccugggcug

SEQ ID NO: 990136 - RNA, 24 nt, Human
ucuugcuguguugccugggcugga

SEQ ID NO: 990137 - RNA, 20 nt, Human
ugaacagggaauagcagaga

SEQ ID NO: 990138 - RNA, 21 nt, Human
ugacucggagguggggguggg

SEQ ID NO: 990139 - RNA, 22 nt, Human
ugcccagcccucugcaguuucu

SEQ ID NO: 990140 - RNA, 20 nt, Human
ugccugggcuggacucaaac

SEQ ID NO: 990141 - RNA, 19 nt, Human
ugcuguguugccugggcug

SEQ ID NO: 990142 - RNA, 24 nt, Human
ugggcuggacucaaacuucugggg

SEQ ID NO: 990143 - RNA, 24 nt, Human
ugggcuggacucaaacuucugggg

SEQ ID NO: 990144 - RNA, 19 nt, Human
uuauagagauggggucuug

SEQ ID NO: 990145 - RNA, 23 nt, Human
uuauagagauggggucuugcugu

SEQ ID NO: 990146 - RNA, 18 nt, Human
uuugcagcaaccuaauac

SEQ ID NO: 990147 - RNA, 18 nt, Human
uuuuuauagagauggggu

SEQ ID NO: 990148 - RNA, 19 nt, Human
uuuuuauagagaugggguc

SEQ ID NO: 990149 - RNA, 21 nt, Human
uuuuucuuuuuauagagaugg

SEQ ID NO: 990150 - RNA, 25 nt, Human
aaaaaaacaagauaaucugcuuugc

SEQ ID NO: 990151 - RNA, 20 nt, Human
aacuacagguauuaaauacu

SEQ ID NO: 990152 - RNA, 21 nt, Human
acuacagguauuaaauacuga

SEQ ID NO: 990153 - RNA, 18 nt, Human
caccgcagccgggucccc

SEQ ID NO: 990154 - RNA, 22 nt, Human
cagccaccgcagccgggucccc

SEQ ID NO: 990155 - RNA, 23 nt, Human
cuacagguauuaaauacugaaaa

SEQ ID NO: 990156 - RNA, 21 nt, Human
cuacuuugcuuccccaggaac

SEQ ID NO: 990157 - RNA, 21 nt, Human
cucgucagucccgcagccacc

SEQ ID NO: 990158 - RNA, 24 nt, Human
uagcaaacaaauuucaacuuugau

SEQ ID NO: 990159 - RNA, 22 nt, Human
uaugcaaaaaaacaagauaauc

SEQ ID NO: 990160 - RNA, 20 nt, Human
ucccgcagccaccgcagccg

SEQ ID NO: 990161 - RNA, 24 nt, Human
ugcauacaggcaacaugcuauaua

SEQ ID NO: 990162 - RNA, 23 nt, Human
uggcauauuuguuuauuucucag

SEQ ID NO: 990163 - RNA, 24 nt, Human
uggcauauuuguuuauuucucagu

SEQ ID NO: 990164 - RNA, 23 nt, Human
uuaaauacugaaaagaguuaaca

SEQ ID NO: 990165 - RNA, 18 nt, Human
uugcuuccccaggaacuu

SEQ ID NO: 990166 - RNA, 21 nt, Human
aggcaaaaucacagggccagc

SEQ ID NO: 990167 - RNA, 25 nt, Human
auuacaacuaggguguuuuuaaaaa

SEQ ID NO: 990168 - RNA, 22 nt, Human
caacuuugcaccaaguuaaagg

SEQ ID NO: 990169 - RNA, 19 nt, Human
cacaugacaccugcagaau

SEQ ID NO: 990170 - RNA, 22 nt, Human
cagcacaugacaccugcagaau

SEQ ID NO: 990171 - RNA, 25 nt, Human
ccaaguuaaagguucugguguccau

SEQ ID NO: 990172 - RNA, 22 nt, Human
ccaaugcaaaaauccccccaga

SEQ ID NO: 990173 - RNA, 23 nt, Human
ccagcggucgcagcucugucuuu

SEQ ID NO: 990174 - RNA, 21 nt, Human
ccccaacccgcauugacuuug

SEQ ID NO: 990175 - RNA, 20 nt, Human
gcaaaaauccccccagauuu

SEQ ID NO: 990176 - RNA, 22 nt, Human
gcaaaaauccccccagauuuua

SEQ ID NO: 990177 - RNA, 20 nt, Human
ggacaggaagucuggggugg

SEQ ID NO: 990178 - RNA, 24 nt, Human
gguaguggcugggugugggaggca

SEQ ID NO: 990179 - RNA, 21 nt, Human
uaguggcugggugugggaggc

SEQ ID NO: 990180 - RNA, 24 nt, Human
ugacuuugccaaugcaaaaauccc

SEQ ID NO: 990181 - RNA, 18 nt, Human
ugccaaugcaaaaauccc

SEQ ID NO: 990182 - RNA, 22 nt, Human
ugggaggcaaaaucacagggcc

SEQ ID NO: 990183 - RNA, 25 nt, Human
ugucccagcggucgcagcucugucu

SEQ ID NO: 990184 - RNA, 23 nt, Human
uuaaagguucugguguccauugg

SEQ ID NO: 990185 - RNA, 23 nt, Human
uucuccaagcugggagguagugg

SEQ ID NO: 990186 - RNA, 20 nt, Human
uucugaauucugagguguuc

SEQ ID NO: 990187 - RNA, 25 nt, Human
uuuuuuuuuuuuuuuuuuucuuuuu

SEQ ID NO: 990188 - RNA, 22 nt, Human
aaaaagaaauacacacagaaga

SEQ ID NO: 990189 - RNA, 19 nt, Human
aaaacaaaaagaaauacac

SEQ ID NO: 990190 - RNA, 25 nt, Human
aaaacaaaaagaaauacacacagaa

SEQ ID NO: 990191 - RNA, 22 nt, Human
aacaaaaagaaauacacacaga

SEQ ID NO: 990192 - RNA, 19 nt, Human
aaugcggggguugggagga

SEQ ID NO: 990193 - RNA, 24 nt, Human
acaaaaagaaauacacacagaaga

SEQ ID NO: 990194 - RNA, 18 nt, Human
acaggagacagaaagugc

SEQ ID NO: 990195 - RNA, 21 nt, Human
accacagcaccuacaggacga

SEQ ID NO: 990196 - RNA, 20 nt, Human
accauaaaaacaaaaagaaa

SEQ ID NO: 990197 - RNA, 23 nt, Human
acggacccaggugacaggagcca

SEQ ID NO: 990198 - RNA, 23 nt, Human
agaaagugcaagagagguaagag

SEQ ID NO: 990199 - RNA, 19 nt, Human
agaagaagcaugugaggug

SEQ ID NO: 990200 - RNA, 22 nt, Human
agaagagacaggagacagaaag

SEQ ID NO: 990201 - RNA, 27 nt, Human
agacagaaagugcaagagaggggaccc

SEQ ID NO: 990202 - RNA, 24 nt, Human
agacaggagacagaaagugcaaga

SEQ ID NO: 990203 - RNA, 19 nt, Human
agaggaccgcuuucuccac

SEQ ID NO: 990204 - RNA, 21 nt, Human
agcaccuacaggacgaauagc

SEQ ID NO: 990205 - RNA, 21 nt, Human
agccgcccgcgcccugcccgg

SEQ ID NO: 990206 - RNA, 19 nt, Human
aggacagaggacgaagaag

SEQ ID NO: 990207 - RNA, 22 nt, Human
aggacagaggacgaagaagaac

SEQ ID NO: 990208 - RNA, 22 nt, Human
agugcaagagagguaagagaga

SEQ ID NO: 990209 - RNA, 20 nt, Human
caaggacggggaggaacaca

SEQ ID NO: 990210 - RNA, 20 nt, Human
cacagcaccuacaggacgaa

SEQ ID NO: 990211 - RNA, 23 nt, Human
cagaggacagaggacgaagaaga

SEQ ID NO: 990212 - RNA, 19 nt, Human
caggaaaugucacaauggc

SEQ ID NO: 990213 - RNA, 24 nt, Human
caggagccagaccauggggcuggu

SEQ ID NO: 990214 - RNA, 18 nt, Human
ccgcgcccugcccggccc

SEQ ID NO: 990215 - RNA, 25 nt, Human
ccugccacucugggauugugaaggg

SEQ ID NO: 990216 - RNA, 18 nt, Human
cgcugaggaaguggcagg

SEQ ID NO: 990217 - RNA, 23 nt, Human
cggacccaggugacaggagccag

SEQ ID NO: 990218 - RNA, 27 nt, Human
cggggccgccgcucucggagccccuag

SEQ ID NO: 990219 - RNA, 26 nt, Human
cuccaaaaaccauaaaaacaaaaaga

SEQ ID NO: 990220 - RNA, 20 nt, Human
cucggagccccuagccgccc

SEQ ID NO: 990221 - RNA, 19 nt, Human
gacagaggacgaagaagaa

SEQ ID NO: 990222 - RNA, 24 nt, Human
gacgcugguggcagcaaaucaggc

SEQ ID NO: 990223 - RNA, 25 nt, Human
gcaggcaccuugagucccuuuaaau

SEQ ID NO: 990224 - RNA, 24 nt, Human
gccccuagccgcccgcgcccugcc

SEQ ID NO: 990225 - RNA, 19 nt, Human
ggaggaaaccauuucagag

SEQ ID NO: 990226 - RNA, 23 nt, Human
ggccgcgggccggggccgccgcu

SEQ ID NO: 990227 - RNA, 21 nt, Human
ggcggcaggggcgagaagaga

SEQ ID NO: 990228 - RNA, 25 nt, Human
uaccagccacuuuacagaacagucc

SEQ ID NO: 990229 - RNA, 23 nt, Human
uacugguuacaucuacaaacugu

SEQ ID NO: 990230 - RNA, 23 nt, Human
ucaggccaagaugucuucucaca

SEQ ID NO: 990231 - RNA, 30 nt, Human
uccaaaaaccauaaaaacaaaaagaaauag

SEQ ID NO: 990232 - RNA, 24 nt, Human
uccaccacagcaccuacaggacga

SEQ ID NO: 990233 - RNA, 22 nt, Human
uccauccaccacagcaccuaca

SEQ ID NO: 990234 - RNA, 19 nt, Human
ucgcugaggaaguggcagg

SEQ ID NO: 990235 - RNA, 22 nt, Human
ucgcugaggaaguggcaggcac

SEQ ID NO: 990236 - RNA, 18 nt, Human
ucgggcccacugagggag

SEQ ID NO: 990237 - RNA, 19 nt, Human
ucuccacugaaagcugggg

SEQ ID NO: 990238 - RNA, 22 nt, Human
ucugcccagguccauccaccac

SEQ ID NO: 990239 - RNA, 20 nt, Human
ucugggauugugaagggaug

SEQ ID NO: 990240 - RNA, 20 nt, Human
ucuucucacauggugauggc

SEQ ID NO: 990241 - RNA, 19 nt, Human
ugacaggagccagaccaug

SEQ ID NO: 990242 - RNA, 19 nt, Human
ugacaggagccagaccaug

SEQ ID NO: 990243 - RNA, 20 nt, Human
ugaggaaguggcaggcaccu

SEQ ID NO: 990244 - RNA, 21 nt, Human
ugaggugauggggaagggaac

SEQ ID NO: 990245 - RNA, 24 nt, Human
ugaggugauggggaagggaacagg

SEQ ID NO: 990246 - RNA, 18 nt, Human
ugcaagagagguaagaga

SEQ ID NO: 990247 - RNA, 18 nt, Human
ugcaagagagguaagaga

SEQ ID NO: 990248 - RNA, 19 nt, Human
ugcccagguccauccacca

SEQ ID NO: 990249 - RNA, 24 nt, Human
ugcggggguugggaggaaaccauu

SEQ ID NO: 990250 - RNA, 18 nt, Human
uggagucggggaagcugg

SEQ ID NO: 990251 - RNA, 19 nt, Human
uggcaggcaccuugagucc

SEQ ID NO: 990252 - RNA, 21 nt, Human
uggggaagggaacagggucuc

SEQ ID NO: 990253 - RNA, 21 nt, Human
uggguaacaggaaaugucaca

SEQ ID NO: 990254 - RNA, 18 nt, Human
ugugaaaauaaacaacug

SEQ ID NO: 990255 - RNA, 22 nt, Human
ugugacagccugcaggggucgg

SEQ ID NO: 990256 - RNA, 23 nt, Human
uguuaccagccacuuuacagaac

SEQ ID NO: 990257 - RNA, 25 nt, Human
uguuuuguuuuuuaaaaaagccuua

SEQ ID NO: 990258 - RNA, 23 nt, Human
uucucacauggugauggccucac

SEQ ID NO: 990259 - RNA, 22 nt, Human
uuguuguuuuguuuuguuuuuu

SEQ ID NO: 990260 - RNA, 18 nt, Human
uuuacagaacaguccaga

SEQ ID NO: 990261 - RNA, 22 nt, Human
uuuacagaacaguccagagugg

SEQ ID NO: 990262 - RNA, 24 nt, Human
uuuguuguuuuguuuuguuuuuua

SEQ ID NO: 990263 - RNA, 23 nt, Human
uuuucuuuuucuucugaaucauu

SEQ ID NO: 990264 - RNA, 19 nt, Human
uuuuuuguuguuuuguuuu

SEQ ID NO: 990265 - RNA, 18 nt, Human
uuuuuuuuuuuuuucuug

SEQ ID NO: 990266 - RNA, 19 nt, Human
uuuuuuuuuuuuuucuugc

SEQ ID NO: 990267 - RNA, 20 nt, Human
aaagcacaccuccccaccca

SEQ ID NO: 990268 - RNA, 19 nt, Human
aacacuuuccucauaucua

SEQ ID NO: 990269 - RNA, 24 nt, Human
aaccgccggccgggaugcagccuc

SEQ ID NO: 990270 - RNA, 22 nt, Human
acaggcacaaacacuuuccuca

SEQ ID NO: 990271 - RNA, 19 nt, Human
agcacaccuccccacccac

SEQ ID NO: 990272 - RNA, 21 nt, Human
cccgggccgcgccuccccaga

SEQ ID NO: 990273 - RNA, 23 nt, Human
cgaugagcuuugguuuaaggcuu

SEQ ID NO: 990274 - RNA, 22 nt, Human
cgcgaggcuccggaaccgccgg

SEQ ID NO: 990275 - RNA, 18 nt, Human
cggaaccgccggccggga

SEQ ID NO: 990276 - RNA, 23 nt, Human
cuaaagcacaccuccccacccac

SEQ ID NO: 990277 - RNA, 21 nt, Human
cuccagaaggcagaucucccu

SEQ ID NO: 990278 - RNA, 22 nt, Human
cucggauaucuguuucugauga

SEQ ID NO: 990279 - RNA, 20 nt, Human
gagcgucccgggccgcgccu

SEQ ID NO: 990280 - RNA, 25 nt, Human
ggaaaaagcaaacccauuucacaaa

SEQ ID NO: 990281 - RNA, 24 nt, Human
uaaagcacaccuccccacccacuc

SEQ ID NO: 990282 - RNA, 23 nt, Human
ucacauccauuacauuuauuaca

SEQ ID NO: 990283 - RNA, 20 nt, Human
uccccagacgcgaggcuccg

SEQ ID NO: 990284 - RNA, 22 nt, Human
ucuaaagcacaccuccccaccc

SEQ ID NO: 990285 - RNA, 23 nt, Human
ucuaaagcacaccuccccaccca

SEQ ID NO: 990286 - RNA, 24 nt, Human
ucucccgggaggacggcgcagucu

SEQ ID NO: 990287 - RNA, 18 nt, Human
ugagcuuugguuuaaggg

SEQ ID NO: 990288 - RNA, 24 nt, Human
ugguggucuucuaaugagaaaucu

SEQ ID NO: 990289 - RNA, 24 nt, Human
uguaggaaaagggaaaaagcaaac

SEQ ID NO: 990290 - RNA, 24 nt, Human
uucaucucagguuauuuuuuuaag

SEQ ID NO: 990291 - RNA, 25 nt, Human
aaaaaauaaaauuccuuacuuaaaa

SEQ ID NO: 990292 - RNA, 20 nt, Human
aaaguugcaacuaaaaccag

SEQ ID NO: 990293 - RNA, 22 nt, Human
aaauauaaaagguuuaccaacu

SEQ ID NO: 990294 - RNA, 19 nt, Human
aacaagaguacucuuucca

SEQ ID NO: 990295 - RNA, 18 nt, Human
aacuccagcaaucacaac

SEQ ID NO: 990296 - RNA, 26 nt, Human
aaguuuucuuucuggaucaauauacu

SEQ ID NO: 990297 - RNA, 19 nt, Human
acacacuuauaucacagaa

SEQ ID NO: 990298 - RNA, 19 nt, Human
acucacgagagaaaauaau

SEQ ID NO: 990299 - RNA, 21 nt, Human
agaaaaaagacaguaagaaaa

SEQ ID NO: 990300 - RNA, 20 nt, Human
aggcagcaggcuggauuuga

SEQ ID NO: 990301 - RNA, 20 nt, Human
auaaacacaauuccuagcuc

SEQ ID NO: 990302 - RNA, 19 nt, Human
auaaaguuugcaugaaccu

SEQ ID NO: 990303 - RNA, 19 nt, Human
auaauauaaggaaacaaga

SEQ ID NO: 990304 - RNA, 23 nt, Human
auaauauaaggaaacaagaguac

SEQ ID NO: 990305 - RNA, 22 nt, Human
caaagcaaguauuaugcuggca

SEQ ID NO: 990306 - RNA, 24 nt, Human
caacuuuauccuuucuuaauuuua

SEQ ID NO: 990307 - RNA, 23 nt, Human
caauuccuagcucacaggccaua

SEQ ID NO: 990308 - RNA, 21 nt, Human
cacacacuuauaucacagaac

SEQ ID NO: 990309 - RNA, 24 nt, Human
caggccauaaaaagcaggcagcag

SEQ ID NO: 990310 - RNA, 22 nt, Human
cccgaccccaaucucggagagc

SEQ ID NO: 990311 - RNA, 21 nt, Human
ccuccuggcaauacacaacuc

SEQ ID NO: 990312 - RNA, 24 nt, Human
ccuccuggcaauacacaacuccag

SEQ ID NO: 990313 - RNA, 27 nt, Human
cuaaacacaaaauaaaguuugcaugaa

SEQ ID NO: 990314 - RNA, 20 nt, Human
cuucagguauugagaccuaa

SEQ ID NO: 990315 - RNA, 22 nt, Human
gaacccgcgugcgacccuccgg

SEQ ID NO: 990316 - RNA, 24 nt, Human
gcaacauaaaauaauaugcauaaa

SEQ ID NO: 990317 - RNA, 24 nt, Human
ggcuucuacaauuuguaacaauuu

SEQ ID NO: 990318 - RNA, 24 nt, Human
uaaaaaaagggaaaagcuauagaa

SEQ ID NO: 990319 - RNA, 28 nt, Human
uaaaaagauacuaaauauaaaagguuua

SEQ ID NO: 990320 - RNA, 20 nt, Human
uaaaaagcaggcagcaggcu

SEQ ID NO: 990321 - RNA, 25 nt, Human
uaaaauaauaugcauaaaucuggca

SEQ ID NO: 990322 - RNA, 24 nt, Human
uaaacacaaaauaaaguuugcaug

SEQ ID NO: 990323 - RNA, 26 nt, Human
uaaacacaaaauaaaguuugcaugaa

SEQ ID NO: 990324 - RNA, 26 nt, Human
uaccuuugucaaagguaaaaugauuc

SEQ ID NO: 990325 - RNA, 24 nt, Human
uacguuaugcaaaguguuucaaau

SEQ ID NO: 990326 - RNA, 23 nt, Human
uaggaacuguaauuuaccuagaa

SEQ ID NO: 990327 - RNA, 24 nt, Human
uauagaacaaauguuucgucuuaa

SEQ ID NO: 990328 - RNA, 21 nt, Human
uaucacagaacaccguggcuu

SEQ ID NO: 990329 - RNA, 18 nt, Human
ucaauauacucacgagag

SEQ ID NO: 990330 - RNA, 21 nt, Human
ucacgagagaaaauaauucag

SEQ ID NO: 990331 - RNA, 24 nt, Human
ucacuuauauguacaaccaucaac

SEQ ID NO: 990332 - RNA, 22 nt, Human
ucagucccuuuuauacaaaguu

SEQ ID NO: 990333 - RNA, 24 nt, Human
ucauaaaagucuuuaaaaaaaaac

SEQ ID NO: 990334 - RNA, 18 nt, Human
ugaggcagugacccgacc

SEQ ID NO: 990335 - RNA, 20 nt, Human
uggcaauacacaacuccagc

SEQ ID NO: 990336 - RNA, 19 nt, Human
uggcagaaguccaugagcu

SEQ ID NO: 990337 - RNA, 26 nt, Human
uggcuucuacaauuuguaacaauuuu

SEQ ID NO: 990338 - RNA, 22 nt, Human
uguaacaauuuugaaaacgaaa

SEQ ID NO: 990339 - RNA, 22 nt, Human
uguuucaacaaacuuuauuuau

SEQ ID NO: 990340 - RNA, 20 nt, Human
uguuucgucuuaaaauauau

SEQ ID NO: 990341 - RNA, 24 nt, Human
uuaaaacacacauaauacaaguuu

SEQ ID NO: 990342 - RNA, 19 nt, Human
uucauagucugauuuaccu

SEQ ID NO: 990343 - RNA, 19 nt, Human
uuccaaagcaaguauuaug

SEQ ID NO: 990344 - RNA, 18 nt, Human
uuccagagacuuuggaga

SEQ ID NO: 990345 - RNA, 22 nt, Human
uucugccugcuuuaugaaaaac

SEQ ID NO: 990346 - RNA, 23 nt, Human
uugcaacuaaaaccagcaaucac

SEQ ID NO: 990347 - RNA, 24 nt, Human
uuuauaaauuucucagucccuuuu

SEQ ID NO: 990348 - RNA, 22 nt, Human
uuuccugugccuauccauugug

SEQ ID NO: 990349 - RNA, 18 nt, Human
aaacaccacaguuuguga

SEQ ID NO: 990350 - RNA, 19 nt, Human
aaacaccacaguuugugac

SEQ ID NO: 990351 - RNA, 21 nt, Human
aaagaaaguacaaaggauguc

SEQ ID NO: 990352 - RNA, 21 nt, Human
aaauuuuuagcacacagguuu

SEQ ID NO: 990353 - RNA, 22 nt, Human
aagauggcuucauccccaaaug

SEQ ID NO: 990354 - RNA, 18 nt, Human
aaguaaugaaugacucuu

SEQ ID NO: 990355 - RNA, 21 nt, Human
aauaaagaauuuaauguacag

SEQ ID NO: 990356 - RNA, 19 nt, Human
acuaauuauuaagauggcu

SEQ ID NO: 990357 - RNA, 23 nt, Human
aucuggaaaauuuuuagcacaca

SEQ ID NO: 990358 - RNA, 18 nt, Human
auuaacaguauuuauuga

SEQ ID NO: 990359 - RNA, 19 nt, Human
cagcagcacgugacucaga

SEQ ID NO: 990360 - RNA, 29 nt, Human
caguaaauucucucccauacaaaggucuu

SEQ ID NO: 990361 - RNA, 21 nt, Human
ccaauuaacaguauuuauuga

SEQ ID NO: 990362 - RNA, 21 nt, Human
ccaggcucaggucgguggucg

SEQ ID NO: 990363 - RNA, 19 nt, Human
cccgccgcccgcgcccucg

SEQ ID NO: 990364 - RNA, 24 nt, Human
ccgcccgcgcccucgacggccgcc

SEQ ID NO: 990365 - RNA, 25 nt, Human
ccgcccgcgcccucgacggccgccu

SEQ ID NO: 990366 - RNA, 23 nt, Human
ccucgacggccgccucgccgccu

SEQ ID NO: 990367 - RNA, 24 nt, Human
cgcccgcgcccucgacggccgccu

SEQ ID NO: 990368 - RNA, 18 nt, Human
cgccgcguccccgccgcc

SEQ ID NO: 990369 - RNA, 26 nt, Human
cgccgcguccccgccgcccgcgcccu

SEQ ID NO: 990370 - RNA, 20 nt, Human
cgguggucgugaagcucagc

SEQ ID NO: 990371 - RNA, 25 nt, Human
cguccccgccgcccgcgcccucgac

SEQ ID NO: 990372 - RNA, 19 nt, Human
cgugaagcucagccccggc

SEQ ID NO: 990373 - RNA, 19 nt, Human
cuacuggagucccgucagc

SEQ ID NO: 990374 - RNA, 18 nt, Human
cucaaagucccuacugga

SEQ ID NO: 990375 - RNA, 21 nt, Human
cucagccccggcucgcccagc

SEQ ID NO: 990376 - RNA, 21 nt, Human
cucgacggccgccucgccgcc

SEQ ID NO: 990377 - RNA, 20 nt, Human
gcgccgcguccccgccgccc

SEQ ID NO: 990378 - RNA, 23 nt, Human
uaaagccacucauugaaaaaccc

SEQ ID NO: 990379 - RNA, 19 nt, Human
uaacaguauuuauugaggg

SEQ ID NO: 990380 - RNA, 20 nt, Human
uacaaaaugugcucucaaag

SEQ ID NO: 990381 - RNA, 19 nt, Human
ucauguuaagaaaacauga

SEQ ID NO: 990382 - RNA, 19 nt, Human
uccugcacguugcaauaca

SEQ ID NO: 990383 - RNA, 21 nt, Human
ucgguggucgugaagcucagc

SEQ ID NO: 990384 - RNA, 23 nt, Human
ugaaaaacccaauuccaaacacc

SEQ ID NO: 990385 - RNA, 19 nt, Human
ugacucagagucaugacaa

SEQ ID NO: 990386 - RNA, 21 nt, Human
ugacucagagucaugacaagg

SEQ ID NO: 990387 - RNA, 20 nt, Human
ugagaaaaugcuuacuaauu

SEQ ID NO: 990388 - RNA, 21 nt, Human
uuacuaauuauuaagauggcu

SEQ ID NO: 990389 - RNA, 20 nt, Human
aaaaaaaaaauguguuuggu

SEQ ID NO: 990390 - RNA, 19 nt, Human
aaaaagaaacacagacaga

SEQ ID NO: 990391 - RNA, 19 nt, Human
aaaaaguauucucucccuc

SEQ ID NO: 990392 - RNA, 19 nt, Human
aaaaaguauucucucccuc

SEQ ID NO: 990393 - RNA, 27 nt, Human
aaaaaucaaaggucucaacucugagcu

SEQ ID NO: 990394 - RNA, 20 nt, Human
aaaacccuucgcucccuaga

SEQ ID NO: 990395 - RNA, 19 nt, Human
aaaaggccuugaaccagag

SEQ ID NO: 990396 - RNA, 22 nt, Human
aaacaccagaggccugcaucuu

SEQ ID NO: 990397 - RNA, 27 nt, Human
aaacagcaguccagcugccaaggaaca

SEQ ID NO: 990398 - RNA, 22 nt, Human
aaacagccgagaguucacacaa

SEQ ID NO: 990399 - RNA, 18 nt, Human
aaaccagccuugcauaga

SEQ ID NO: 990400 - RNA, 22 nt, Human
aaacugaaguggugagagccca

SEQ ID NO: 990401 - RNA, 22 nt, Human
aaacugaaguggugagagccca

SEQ ID NO: 990402 - RNA, 20 nt, Human
aaaguccaaaaagaaaggga

SEQ ID NO: 990403 - RNA, 18 nt, Human
aaauauucucccucuucc

SEQ ID NO: 990404 - RNA, 23 nt, Human
aaaucacuuaagcccaggaguuc

SEQ ID NO: 990405 - RNA, 22 nt, Human
aaaugcaagagauugcucagcu

SEQ ID NO: 990406 - RNA, 18 nt, Human
aacaaaaacaacuuuguu

SEQ ID NO: 990407 - RNA, 19 nt, Human
aacacggugaaacccuguc

SEQ ID NO: 990408 - RNA, 20 nt, Human
aacacggugaaacccugucu

SEQ ID NO: 990409 - RNA, 21 nt, Human
aacacggugaaacccugucuc

SEQ ID NO: 990410 - RNA, 20 nt, Human
aacauggugaaaccucgucu

SEQ ID NO: 990411 - RNA, 21 nt, Human
aacauggugaaaccucgucuc

SEQ ID NO: 990412 - RNA, 22 nt, Human
aaccaagaaguaucugagacag

SEQ ID NO: 990413 - RNA, 22 nt, Human
aaccaagaaguaucugagacag

SEQ ID NO: 990414 - RNA, 21 nt, Human
aaccagccuugcauagaaaau

SEQ ID NO: 990415 - RNA, 23 nt, Human
aacccccaacauacacacacccc

SEQ ID NO: 990416 - RNA, 23 nt, Human
aaccuggauccugcgcugcucgg

SEQ ID NO: 990417 - RNA, 22 nt, Human
aacuaugaagaaauuaccguac

SEQ ID NO: 990418 - RNA, 21 nt, Human
aacugaaguggugagagccca

SEQ ID NO: 990419 - RNA, 21 nt, Human
aacugaaguggugagagccca

SEQ ID NO: 990420 - RNA, 26 nt, Human
aagaaaguaaaggaauauagaauggc

SEQ ID NO: 990421 - RNA, 19 nt, Human
aagaaauuaccguaccuuu

SEQ ID NO: 990422 - RNA, 23 nt, Human
aagaaucacuugaacccgggagg

SEQ ID NO: 990423 - RNA, 29 nt, Human
aagaggcagcagagcugugcgugcgguaa

SEQ ID NO: 990424 - RNA, 24 nt, Human
aagcagguggaucacuuggucagg

SEQ ID NO: 990425 - RNA, 19 nt, Human
aagcguuccagggaagacc

SEQ ID NO: 990426 - RNA, 19 nt, Human
aaggaaaggaaaacuguau

SEQ ID NO: 990427 - RNA, 24 nt, Human
aaggggaugacuuggcuugaagga

SEQ ID NO: 990428 - RNA, 24 nt, Human
aaggggaugacuuggcuugaagga

SEQ ID NO: 990429 - RNA, 19 nt, Human
aaggugaccgggcguggug

SEQ ID NO: 990430 - RNA, 24 nt, Human
aaggugaccgggcgugguggcuca

SEQ ID NO: 990431 - RNA, 24 nt, Human
aagugaaagcaaguuuauuaagaa

SEQ ID NO: 990432 - RNA, 24 nt, Human
aagugaaagcaaguuuauuaagaa

SEQ ID NO: 990433 - RNA, 21 nt, Human
aauaaaauaacuguagucuua

SEQ ID NO: 990434 - RNA, 24 nt, Human
aaucacuuaagcccaggaguucga

SEQ ID NO: 990435 - RNA, 24 nt, Human
aaucacuuaagcccaggaguucga

SEQ ID NO: 990436 - RNA, 25 nt, Human
aaucacuuaagcccaggaguucgaa

SEQ ID NO: 990437 - RNA, 23 nt, Human
aaucacuugaacccgggagguga

SEQ ID NO: 990438 - RNA, 23 nt, Human
aaucccuacagcaagcuaagaaa

SEQ ID NO: 990439 - RNA, 21 nt, Human
aaucugcaauggcagcugcuc

SEQ ID NO: 990440 - RNA, 21 nt, Human
aaucugcaauggcagcugcuc

SEQ ID NO: 990441 - RNA, 18 nt, Human
acaaaggugaaggaaagg

SEQ ID NO: 990442 - RNA, 21 nt, Human
acaagcuguagagaaaagaaa

SEQ ID NO: 990443 - RNA, 20 nt, Human
acacaaaagggaaggacuaa

SEQ ID NO: 990444 - RNA, 24 nt, Human
acacacaccccuacacacaaugca

SEQ ID NO: 990445 - RNA, 24 nt, Human
acagagcaagacucagucucaaaa

SEQ ID NO: 990446 - RNA, 18 nt, Human
accaagaaccucccauuc

SEQ ID NO: 990447 - RNA, 18 nt, Human
accccuuuccucuucacu

SEQ ID NO: 990448 - RNA, 18 nt, Human
acccuaagagagggagag

SEQ ID NO: 990449 - RNA, 18 nt, Human
acccuaagagagggagag

SEQ ID NO: 990450 - RNA, 24 nt, Human
acccugucucuacuaaaaauacaa

SEQ ID NO: 990451 - RNA, 24 nt, Human
accucgucucuacuaaaaauacaa

SEQ ID NO: 990452 - RNA, 19 nt, Human
acucccucuuuccucucug

SEQ ID NO: 990453 - RNA, 23 nt, Human
acucccugauuucugcaagacca

SEQ ID NO: 990454 - RNA, 24 nt, Human
acucucugggcaaaaaaucaaagg

SEQ ID NO: 990455 - RNA, 24 nt, Human
acugcacucuggccuggcacagag

SEQ ID NO: 990456 - RNA, 18 nt, Human
acugcauuccagccugag

SEQ ID NO: 990457 - RNA, 24 nt, Human
acugcauuccagccugagugacag

SEQ ID NO: 990458 - RNA, 23 nt, Human
acuuguccccucgugugcuccca

SEQ ID NO: 990459 - RNA, 19 nt, Human
agaaaacaagguggaggca

SEQ ID NO: 990460 - RNA, 21 nt, Human
agaaaacaggacaaaggugac

SEQ ID NO: 990461 - RNA, 23 nt, Human
agaaaauaaaucacaagacauga

SEQ ID NO: 990462 - RNA, 21 nt, Human
agaaacacagacagauggaca

SEQ ID NO: 990463 - RNA, 18 nt, Human
agaaagagcacuggggca

SEQ ID NO: 990464 - RNA, 19 nt, Human
agaagucgaauugaaucca

SEQ ID NO: 990465 - RNA, 18 nt, Human
agacaagccacuuauucu

SEQ ID NO: 990466 - RNA, 18 nt, Human
agacaccaagaaccuccc

SEQ ID NO: 990467 - RNA, 22 nt, Human
agacagauggacaagagccaga

SEQ ID NO: 990468 - RNA, 25 nt, Human
agacaggagaaaucacuuaagccca

SEQ ID NO: 990469 - RNA, 22 nt, Human
agaccaggccagacaccaagaa

SEQ ID NO: 990470 - RNA, 21 nt, Human
agaccgauuaaagagaaguaa

SEQ ID NO: 990471 - RNA, 27 nt, Human
agagaagccagccuggggacagaggac

SEQ ID NO: 990472 - RNA, 28 nt, Human
agagaagccagccuggggacagaggaca

SEQ ID NO: 990473 - RNA, 18 nt, Human
agaggacagaggagaccc

SEQ ID NO: 990474 - RNA, 23 nt, Human
agagucuguguuucucagauggc

SEQ ID NO: 990475 - RNA, 24 nt, Human
agaguucacacaaaagggaaggac

SEQ ID NO: 990476 - RNA, 20 nt, Human
agcaaggucuuugugacgug

SEQ ID NO: 990477 - RNA, 20 nt, Human
agcaaggucuuugugacgug

SEQ ID NO: 990478 - RNA, 24 nt, Human
agcacuggggcaggaaaccuggau

SEQ ID NO: 990479 - RNA, 20 nt, Human
agcacuuugggaggccgaag

SEQ ID NO: 990480 - RNA, 24 nt, Human
agcacuuugggaggccgagguagg

SEQ ID NO: 990481 - RNA, 25 nt, Human
agcagcacagccccacaccaaccuu

SEQ ID NO: 990482 - RNA, 21 nt, Human
agcagugaggacaaccagaga

SEQ ID NO: 990483 - RNA, 21 nt, Human
agcagugaggacaaccagaga

SEQ ID NO: 990484 - RNA, 18 nt, Human
agccagacagccagcagc

SEQ ID NO: 990485 - RNA, 21 nt, Human
agccagacagccagcagccuc

SEQ ID NO: 990486 - RNA, 21 nt, Human
agccagagaacaccagagaca

SEQ ID NO: 990487 - RNA, 24 nt, Human
agccagcagccucuuuccagcccu

SEQ ID NO: 990488 - RNA, 24 nt, Human
agccugagugacagagcaagacuc

SEQ ID NO: 990489 - RNA, 20 nt, Human
agccuggcaugguggugggc

SEQ ID NO: 990490 - RNA, 23 nt, Human
agccuggccaacauggugaaacc

SEQ ID NO: 990491 - RNA, 23 nt, Human
agccuggccaacauggugaaacc

SEQ ID NO: 990492 - RNA, 25 nt, Human
agccuggccaacauggugaaaccuc

SEQ ID NO: 990493 - RNA, 22 nt, Human
agccugugcaauauagugggau

SEQ ID NO: 990494 - RNA, 20 nt, Human
agccuuguaaagcacagggc

SEQ ID NO: 990495 - RNA, 25 nt, Human
agccuuuaguguuugagggggcagc

SEQ ID NO: 990496 - RNA, 25 nt, Human
agccuuuaguguuugagggggcagc

SEQ ID NO: 990497 - RNA, 24 nt, Human
agcggcucacgccuguaaucccag

SEQ ID NO: 990498 - RNA, 24 nt, Human
agcugccaaggaacauuucauaua

SEQ ID NO: 990499 - RNA, 20 nt, Human
agcuuccugugcugcucuuu

SEQ ID NO: 990500 - RNA, 20 nt, Human
agcuuccugugcugcucuuu

SEQ ID NO: 990501 - RNA, 22 nt, Human
agcuuucuucugaguuuucacc

SEQ ID NO: 990502 - RNA, 22 nt, Human
aggaguucgaaaccagccuggu

SEQ ID NO: 990503 - RNA, 20 nt, Human
aggaguuugagaccagccug

SEQ ID NO: 990504 - RNA, 24 nt, Human
aggaucgcuugagcucaggaguuu

SEQ ID NO: 990505 - RNA, 18 nt, Human
aggcagaagaaucacuug

SEQ ID NO: 990506 - RNA, 24 nt, Human
aggcagaagaaucacuugaacccg

SEQ ID NO: 990507 - RNA, 22 nt, Human
aggcagcagagcugugcgugcg

SEQ ID NO: 990508 - RNA, 20 nt, Human
aggcaggaagccgugacagc

SEQ ID NO: 990509 - RNA, 19 nt, Human
aggcaggaggaucgcuuga

SEQ ID NO: 990510 - RNA, 23 nt, Human
aggcaggaggaucgcuugagcuc

SEQ ID NO: 990511 - RNA, 24 nt, Human
aggccaaggcaggaggaucgcuug

SEQ ID NO: 990512 - RNA, 19 nt, Human
aggccagacaccaagaacc

SEQ ID NO: 990513 - RNA, 21 nt, Human
aggccaggugcgguggcucgu

SEQ ID NO: 990514 - RNA, 21 nt, Human
aggccccgguuggcagaaaca

SEQ ID NO: 990515 - RNA, 21 nt, Human
aggccgagguaggcggaucac

SEQ ID NO: 990516 - RNA, 22 nt, Human
aggccucaaguccugauaacag

SEQ ID NO: 990517 - RNA, 25 nt, Human
aggccucaaguccugauaacagucu

SEQ ID NO: 990518 - RNA, 24 nt, Human
aggcggaucacgaggucaggagau

SEQ ID NO: 990519 - RNA, 24 nt, Human
aggcugaagugggaggaucucuug

SEQ ID NO: 990520 - RNA, 24 nt, Human
aggcugaggcagaagaaucacuug

SEQ ID NO: 990521 - RNA, 19 nt, Human
aggggccucuuccucugug

SEQ ID NO: 990522 - RNA, 24 nt, Human
agguaggcggaucacgaggucagg

SEQ ID NO: 990523 - RNA, 21 nt, Human
aggugaaggcugcagugagcc

SEQ ID NO: 990524 - RNA, 24 nt, Human
aggugaaggcugcagugagccgag

SEQ ID NO: 990525 - RNA, 24 nt, Human
aggugcgguggcucgugccuguaa

SEQ ID NO: 990526 - RNA, 24 nt, Human
agguggaucacuuggucaggaguu

SEQ ID NO: 990527 - RNA, 21 nt, Human
aguggcugccugguccccaca

SEQ ID NO: 990528 - RNA, 18 nt, Human
aguguuugagggggcagc

SEQ ID NO: 990529 - RNA, 18 nt, Human
aguguuugagggggcagc

SEQ ID NO: 990530 - RNA, 25 nt, Human
auaaacucuuuaaaacuggauucug

SEQ ID NO: 990531 - RNA, 21 nt, Human
auaaauuuuucuucaggaaaa

SEQ ID NO: 990532 - RNA, 26 nt, Human
auauaaaucaggcugggagugguggc

SEQ ID NO: 990533 - RNA, 21 nt, Human
aucacuuggucaggaguucaa

SEQ ID NO: 990534 - RNA, 24 nt, Human
aucauccaucaccccuucccacug

SEQ ID NO: 990535 - RNA, 19 nt, Human
auccuguccaggcucuucu

SEQ ID NO: 990536 - RNA, 24 nt, Human
aucgcgccacugcauuccagccug

SEQ ID NO: 990537 - RNA, 20 nt, Human
aucgcuugagcucaggaguu

SEQ ID NO: 990538 - RNA, 24 nt, Human
aucgcuugagcucaggaguuugag

SEQ ID NO: 990539 - RNA, 21 nt, Human
augcacgcauacacauacaca

SEQ ID NO: 990540 - RNA, 22 nt, Human
augcacgcauacacauacacag

SEQ ID NO: 990541 - RNA, 18 nt, Human
auggcagcugcucuuggc

SEQ ID NO: 990542 - RNA, 19 nt, Human
auucaucccccggaaaccu

SEQ ID NO: 990543 - RNA, 18 nt, Human
auuccacccugauuuaga

SEQ ID NO: 990544 - RNA, 19 nt, Human
auucugcuccucugugagu

SEQ ID NO: 990545 - RNA, 24 nt, Human
auugcaccacugcacucuggccug

SEQ ID NO: 990546 - RNA, 21 nt, Human
auuggcuuauccaacucuggc

SEQ ID NO: 990547 - RNA, 20 nt, Human
caaaaagaaacacagacaga

SEQ ID NO: 990548 - RNA, 28 nt, Human
caaacagcaguccagcugccaaggaaca

SEQ ID NO: 990549 - RNA, 18 nt, Human
caaagcagcccugagggc

SEQ ID NO: 990550 - RNA, 18 nt, Human
caaagcagcccugagggc

SEQ ID NO: 990551 - RNA, 23 nt, Human
caaauccuuggcuggagggaugc

SEQ ID NO: 990552 - RNA, 24 nt, Human
caacauggugaaaccucgucucua

SEQ ID NO: 990553 - RNA, 21 nt, Human
caaccacuucaucucacccua

SEQ ID NO: 990554 - RNA, 21 nt, Human
caaccacuucaucucacccua

SEQ ID NO: 990555 - RNA, 22 nt, Human
caagaaaaguuauacaagaaaa

SEQ ID NO: 990556 - RNA, 24 nt, Human
caagaccagccuggccaacauggu

SEQ ID NO: 990557 - RNA, 20 nt, Human
caagaccaggccagacacca

SEQ ID NO: 990558 - RNA, 21 nt, Human
caagacucagucucaaaaaaa

SEQ ID NO: 990559 - RNA, 21 nt, Human
caagcucagccaaggugggcc

SEQ ID NO: 990560 - RNA, 23 nt, Human
caagcuguagagaaaagaaaaca

SEQ ID NO: 990561 - RNA, 21 nt, Human
cacacaaaagggaaggacuaa

SEQ ID NO: 990562 - RNA, 21 nt, Human
cacaccuguagucucagcacc

SEQ ID NO: 990563 - RNA, 24 nt, Human
cacaccuguagucucagcaccgug

SEQ ID NO: 990564 - RNA, 23 nt, Human
cacagacagauggacaagagcca

SEQ ID NO: 990565 - RNA, 19 nt, Human
cacagauauuugaugcuca

SEQ ID NO: 990566 - RNA, 18 nt, Human
cacauacaugcaacauac

SEQ ID NO: 990567 - RNA, 22 nt, Human
cacauacaugcaacauacagcc

SEQ ID NO: 990568 - RNA, 20 nt, Human
cacauacucacgcauccuuu

SEQ ID NO: 990569 - RNA, 19 nt, Human
caccaagaaccucccauuc

SEQ ID NO: 990570 - RNA, 18 nt, Human
caccacugcacucuggcc

SEQ ID NO: 990571 - RNA, 18 nt, Human
caccagagcaagcucagc

SEQ ID NO: 990572 - RNA, 19 nt, Human
caccccagucccuccauca

SEQ ID NO: 990573 - RNA, 21 nt, Human
caccccagucccuccaucaaa

SEQ ID NO: 990574 - RNA, 20 nt, Human
caccuguaaucccagcuacu

SEQ ID NO: 990575 - RNA, 21 nt, Human
caccuguaaucccagcuacuu

SEQ ID NO: 990576 - RNA, 23 nt, Human
caccuguaaucccagcuacuugg

SEQ ID NO: 990577 - RNA, 24 nt, Human
caccuguaaucccagcuacuuggg

SEQ ID NO: 990578 - RNA, 21 nt, Human
caccuguagucucagcaccgu

SEQ ID NO: 990579 - RNA, 24 nt, Human
caccuguagucucagcaccguggg

SEQ ID NO: 990580 - RNA, 24 nt, Human
cacgccuguaaucccagcacuuug

SEQ ID NO: 990581 - RNA, 24 nt, Human
cacgccuguaaucccagcacuuug

SEQ ID NO: 990582 - RNA, 18 nt, Human
cacugcacucuggccugg

SEQ ID NO: 990583 - RNA, 20 nt, Human
cacugcacucuggccuggca

SEQ ID NO: 990584 - RNA, 22 nt, Human
cacugcacucuggccuggcaca

SEQ ID NO: 990585 - RNA, 23 nt, Human
cacugcacucuggccuggcacag

SEQ ID NO: 990586 - RNA, 19 nt, Human
cacugcauuccagccugag

SEQ ID NO: 990587 - RNA, 19 nt, Human
cacugcauuccagccugag

SEQ ID NO: 990588 - RNA, 21 nt, Human
cacugcauuccagccugagug

SEQ ID NO: 990589 - RNA, 24 nt, Human
cacugcauuccagccugagugaca

SEQ ID NO: 990590 - RNA, 25 nt, Human
cacugcauuccagccugagugacag

SEQ ID NO: 990591 - RNA, 22 nt, Human
cacuucaacucccugcugaggg

SEQ ID NO: 990592 - RNA, 24 nt, Human
cacuuguccccucgugugcuccca

SEQ ID NO: 990593 - RNA, 19 nt, Human
cagaaagagcacuggggca

SEQ ID NO: 990594 - RNA, 23 nt, Human
cagacagauggacaagagccaga

SEQ ID NO: 990595 - RNA, 19 nt, Human
cagaggaggcuggggagug

SEQ ID NO: 990596 - RNA, 21 nt, Human
cagauccagaggcgaaugaga

SEQ ID NO: 990597 - RNA, 21 nt, Human
cagauccagaggcgaaugaga

SEQ ID NO: 990598 - RNA, 21 nt, Human
cagauccagaggcgaaugaga

SEQ ID NO: 990599 - RNA, 18 nt, Human
cagcaagcuaagaaagga

SEQ ID NO: 990600 - RNA, 22 nt, Human
cagcacaauccaacaaggugcu

SEQ ID NO: 990601 - RNA, 25 nt, Human
cagcacagccccacaccaaccuuca

SEQ ID NO: 990602 - RNA, 24 nt, Human
cagcacuuugggaggccgaagcag

SEQ ID NO: 990603 - RNA, 26 nt, Human
cagcacuuugggaggccgaagcaggu

SEQ ID NO: 990604 - RNA, 21 nt, Human
cagcacuuugggaggccgagg

SEQ ID NO: 990605 - RNA, 28 nt, Human
cagcacuuugggaggccgagguaggcgg

SEQ ID NO: 990606 - RNA, 21 nt, Human
cagcagccucuuuccagcccu

SEQ ID NO: 990607 - RNA, 21 nt, Human
cagccagcagccucuuuccag

SEQ ID NO: 990608 - RNA, 21 nt, Human
cagccagcagccucuuuccag

SEQ ID NO: 990609 - RNA, 23 nt, Human
cagccagcagccucuuuccagcc

SEQ ID NO: 990610 - RNA, 18 nt, Human
cagcccugaaccagcccu

SEQ ID NO: 990611 - RNA, 19 nt, Human
cagcccugaguccaauucc

SEQ ID NO: 990612 - RNA, 19 nt, Human
cagccucuuuccagcccug

SEQ ID NO: 990613 - RNA, 21 nt, Human
cagccucuuuccagcccuguu

SEQ ID NO: 990614 - RNA, 24 nt, Human
cagcuacuugggaggcugaggcag

SEQ ID NO: 990615 - RNA, 23 nt, Human
cagggcccuggccccauuuuccu

SEQ ID NO: 990616 - RNA, 20 nt, Human
caggggaacaaccuauaauu

SEQ ID NO: 990617 - RNA, 22 nt, Human
cagguggaucacuuggucagga

SEQ ID NO: 990618 - RNA, 26 nt, Human
cauacacauacucacgcauccuuugc

SEQ ID NO: 990619 - RNA, 22 nt, Human
caucucucuuuuuggggucucc

SEQ ID NO: 990620 - RNA, 21 nt, Human
caucuuguaaaccaagaaguu

SEQ ID NO: 990621 - RNA, 18 nt, Human
caugaaacuggccucacc

SEQ ID NO: 990622 - RNA, 20 nt, Human
caugguccccucuccuugaa

SEQ ID NO: 990623 - RNA, 18 nt, Human
caugucuguagucuuagc

SEQ ID NO: 990624 - RNA, 23 nt, Human
cauuccagccugagugacagagc

SEQ ID NO: 990625 - RNA, 22 nt, Human
cauucugucuccaugccagagg

SEQ ID NO: 990626 - RNA, 25 nt, Human
ccaaaacccuucgcucccuagacca

SEQ ID NO: 990627 - RNA, 18 nt, Human
ccaagaaccucccauucg

SEQ ID NO: 990628 - RNA, 23 nt, Human
ccaaggugggccaagccaggccc

SEQ ID NO: 990629 - RNA, 21 nt, Human
ccaauucauccuguccaggcu

SEQ ID NO: 990630 - RNA, 21 nt, Human
ccaauuccacccugauuuaga

SEQ ID NO: 990631 - RNA, 19 nt, Human
ccacugcacucuggccugg

SEQ ID NO: 990632 - RNA, 19 nt, Human
ccacugcacucuggccugg

SEQ ID NO: 990633 - RNA, 20 nt, Human
ccacugcacucuggccuggc

SEQ ID NO: 990634 - RNA, 18 nt, Human
ccacugcauuccagccug

SEQ ID NO: 990635 - RNA, 20 nt, Human
ccacugcauuccagccugag

SEQ ID NO: 990636 - RNA, 20 nt, Human
ccacugcauuccagccugag

SEQ ID NO: 990637 - RNA, 20 nt, Human
ccacugcauuccagccugag

SEQ ID NO: 990638 - RNA, 21 nt, Human
ccacugcauuccagccugagu

SEQ ID NO: 990639 - RNA, 24 nt, Human
ccacugcauuccagccugagugac

SEQ ID NO: 990640 - RNA, 19 nt, Human
ccagagaacaccagagaca

SEQ ID NO: 990641 - RNA, 22 nt, Human
ccaggagguugagacuacagug

SEQ ID NO: 990642 - RNA, 18 nt, Human
ccauaguccugugacuug

SEQ ID NO: 990643 - RNA, 23 nt, Human
cccacacauaccuccuuacacag

SEQ ID NO: 990644 - RNA, 19 nt, Human
cccauggaaagaagucgaa

SEQ ID NO: 990645 - RNA, 19 nt, Human
cccccggaaaccucagccc

SEQ ID NO: 990646 - RNA, 19 nt, Human
ccccuauucaaaauggagu

SEQ ID NO: 990647 - RNA, 19 nt, Human
ccccuauucaaaauggagu

SEQ ID NO: 990648 - RNA, 22 nt, Human
ccccuuuccucuucacuguuga

SEQ ID NO: 990649 - RNA, 18 nt, Human
cccuccaucaaagaucug

SEQ ID NO: 990650 - RNA, 20 nt, Human
cccuccuucugccuuuuguc

SEQ ID NO: 990651 - RNA, 20 nt, Human
cccuccuucugccuuuuguc

SEQ ID NO: 990652 - RNA, 20 nt, Human
cccuccuucugccuuuuguc

SEQ ID NO: 990653 - RNA, 20 nt, Human
cccuccuucugccuuuuguc

SEQ ID NO: 990654 - RNA, 21 nt, Human
cccuccuucugccuuuuguca

SEQ ID NO: 990655 - RNA, 21 nt, Human
cccuccuucugccuuuuguca

SEQ ID NO: 990656 - RNA, 19 nt, Human
cccucuguccuccuccucc

SEQ ID NO: 990657 - RNA, 19 nt, Human
cccucuguccuccuccucc

SEQ ID NO: 990658 - RNA, 19 nt, Human
cccugagggcugcugguug

SEQ ID NO: 990659 - RNA, 19 nt, Human
cccugagggcugcugguug

SEQ ID NO: 990660 - RNA, 22 nt, Human
ccgggaggugaaggcugcagug

SEQ ID NO: 990661 - RNA, 27 nt, Human
ccuacacacaaugcacgcauacacaua

SEQ ID NO: 990662 - RNA, 23 nt, Human
ccuccuccuccucugguuguucc

SEQ ID NO: 990663 - RNA, 23 nt, Human
ccuccuccuccucugguuguucc

SEQ ID NO: 990664 - RNA, 21 nt, Human
ccuccugucucauccugugac

SEQ ID NO: 990665 - RNA, 21 nt, Human
ccuccugucucauccugugac

SEQ ID NO: 990666 - RNA, 22 nt, Human
ccucugaaaguagcauuggccu

SEQ ID NO: 990667 - RNA, 22 nt, Human
ccucugaaaguagcauuggccu

SEQ ID NO: 990668 - RNA, 25 nt, Human
ccucuguccuccuccuccucugguu

SEQ ID NO: 990669 - RNA, 22 nt, Human
ccucugugaguugagugaggau

SEQ ID NO: 990670 - RNA, 22 nt, Human
ccucuucccauucugcuccucu

SEQ ID NO: 990671 - RNA, 22 nt, Human
ccugagugacagagcaagacuc

SEQ ID NO: 990672 - RNA, 21 nt, Human
ccuggccaacauggugaaacc

SEQ ID NO: 990673 - RNA, 24 nt, Human
ccuggccaacauggugaaaccucg

SEQ ID NO: 990674 - RNA, 22 nt, Human
ccuggcuaacacggugaaaccc

SEQ ID NO: 990675 - RNA, 24 nt, Human
ccuggcuaacacggugaaacccug

SEQ ID NO: 990676 - RNA, 20 nt, Human
ccuguaaucccagcacuuug

SEQ ID NO: 990677 - RNA, 22 nt, Human
ccuguaaucccagcacuuuggg

SEQ ID NO: 990678 - RNA, 21 nt, Human
ccuguaaucccagcuacuugg

SEQ ID NO: 990679 - RNA, 22 nt, Human
ccugugacuugccagguucauc

SEQ ID NO: 990680 - RNA, 18 nt, Human
ccuguugccaaccacuuc

SEQ ID NO: 990681 - RNA, 18 nt, Human
ccuguugccaaccacuuc

SEQ ID NO: 990682 - RNA, 21 nt, Human
ccuucuaccacgagagaagcc

SEQ ID NO: 990683 - RNA, 22 nt, Human
ccuucuggaaucuucucccaca

SEQ ID NO: 990684 - RNA, 21 nt, Human
ccuuggacuuggccauccacu

SEQ ID NO: 990685 - RNA, 20 nt, Human
ccuuuguuuauccagugcaa

SEQ ID NO: 990686 - RNA, 21 nt, Human
cgaaaacagccgagaguucac

SEQ ID NO: 990687 - RNA, 21 nt, Human
cgaaaccagccuggucaauaa

SEQ ID NO: 990688 - RNA, 24 nt, Human
cgaagcagguggaucacuugguca

SEQ ID NO: 990689 - RNA, 24 nt, Human
cgagguaggcggaucacgagguca

SEQ ID NO: 990690 - RNA, 19 nt, Human
cgaucguuuaacagccauc

SEQ ID NO: 990691 - RNA, 18 nt, Human
cgccuguaaucccagcac

SEQ ID NO: 990692 - RNA, 23 nt, Human
cgccuguaaucccagcacuuugg

SEQ ID NO: 990693 - RNA, 24 nt, Human
cgccuguaaucccagcacuuuggg

SEQ ID NO: 990694 - RNA, 21 nt, Human
cggaaaccucagcccugaacc

SEQ ID NO: 990695 - RNA, 18 nt, Human
cggcauaaagaguacguc

SEQ ID NO: 990696 - RNA, 24 nt, Human
cggcucacgccuguaaucccagca

SEQ ID NO: 990697 - RNA, 20 nt, Human
cgugccuguaaucccagcac

SEQ ID NO: 990698 - RNA, 24 nt, Human
cgugccuguaaucccagcacuuug

SEQ ID NO: 990699 - RNA, 19 nt, Human
cuaacuccaaaguuaucaa

SEQ ID NO: 990700 - RNA, 21 nt, Human
cuaagaaaggaaaagguccau

SEQ ID NO: 990701 - RNA, 31 nt, Human
cuacacacaaugcacgcauacacauacacag

SEQ ID NO: 990702 - RNA, 18 nt, Human
cucaaaaaaaaaaaaaaa

SEQ ID NO: 990703 - RNA, 18 nt, Human
cucaaaaaaaaaaaaaaa

SEQ ID NO: 990704 - RNA, 19 nt, Human
cucacaccuguagucucag

SEQ ID NO: 990705 - RNA, 22 nt, Human
cucacgccuguaaucccagcac

SEQ ID NO: 990706 - RNA, 22 nt, Human
cucacgccuguaaucccagcac

SEQ ID NO: 990707 - RNA, 24 nt, Human
cucacgccuguaaucccagcacuu

SEQ ID NO: 990708 - RNA, 24 nt, Human
cucacgccuguaaucccagcacuu

SEQ ID NO: 990709 - RNA, 20 nt, Human
cucacuaaguccucuuccca

SEQ ID NO: 990710 - RNA, 20 nt, Human
cucacuaaguccucuuccca

SEQ ID NO: 990711 - RNA, 24 nt, Human
cucagucucaaaaaaaaaaaaaaa

SEQ ID NO: 990712 - RNA, 26 nt, Human
cucagucucaaaaaaaaaaaaaaaaa

SEQ ID NO: 990713 - RNA, 23 nt, Human
cuccagcagcacagccccacacc

SEQ ID NO: 990714 - RNA, 22 nt, Human
cuccaugccagaggucugugcc

SEQ ID NO: 990715 - RNA, 22 nt, Human
cucccacauggcacagauauuu

SEQ ID NO: 990716 - RNA, 24 nt, Human
cuccuaucugaugcacaguggcug

SEQ ID NO: 990717 - RNA, 18 nt, Human
cucggaugcacuuggcug

SEQ ID NO: 990718 - RNA, 23 nt, Human
cucgugccuguaaucccagcacu

SEQ ID NO: 990719 - RNA, 24 nt, Human
cucgugccuguaaucccagcacuu

SEQ ID NO: 990720 - RNA, 25 nt, Human
cucucugcuucauccacguccuuuc

SEQ ID NO: 990721 - RNA, 25 nt, Human
cucucugcuucauccacguccuuuc

SEQ ID NO: 990722 - RNA, 25 nt, Human
cucucugcuucauccacguccuuuc

SEQ ID NO: 990723 - RNA, 22 nt, Human
cucuguccuccuccuccucugg

SEQ ID NO: 990724 - RNA, 23 nt, Human
cucugugucaccucucccaaaca

SEQ ID NO: 990725 - RNA, 20 nt, Human
cucuuuccuuugcugcuuuc

SEQ ID NO: 990726 - RNA, 23 nt, Human
cucuuugacgugccaggccuggg

SEQ ID NO: 990727 - RNA, 21 nt, Human
cugaauggauagacauggacc

SEQ ID NO: 990728 - RNA, 22 nt, Human
cugacaauucagcaacuccagc

SEQ ID NO: 990729 - RNA, 22 nt, Human
cugacccuagcaccagagcaag

SEQ ID NO: 990730 - RNA, 23 nt, Human
cugaugcugaauggauagacaug

SEQ ID NO: 990731 - RNA, 20 nt, Human
cugcagugagccgagaucgc

SEQ ID NO: 990732 - RNA, 22 nt, Human
cugcagugagccgagaucgcgc

SEQ ID NO: 990733 - RNA, 20 nt, Human
cugcccggggcaggcuucaa

SEQ ID NO: 990734 - RNA, 22 nt, Human
cugccucugcacuuccaacccc

SEQ ID NO: 990735 - RNA, 20 nt, Human
cugcucuuuuuggggucucc

SEQ ID NO: 990736 - RNA, 18 nt, Human
cuggaacaaagaggcugc

SEQ ID NO: 990737 - RNA, 20 nt, Human
cuggaauaaaauccagauuu

SEQ ID NO: 990738 - RNA, 19 nt, Human
cuggagccucuuugacgug

SEQ ID NO: 990739 - RNA, 21 nt, Human
cuggauccugcgcugcucgga

SEQ ID NO: 990740 - RNA, 24 nt, Human
cuggauccugcgcugcucggaugc

SEQ ID NO: 990741 - RNA, 18 nt, Human
cuggcaugguggugggca

SEQ ID NO: 990742 - RNA, 18 nt, Human
cuggcuaacacggugaaa

SEQ ID NO: 990743 - RNA, 24 nt, Human
cuggcuaacacggugaaacccugu

SEQ ID NO: 990744 - RNA, 20 nt, Human
cuggggcaggaaaccuggau

SEQ ID NO: 990745 - RNA, 21 nt, Human
cuguaaucccagcuacuuggg

SEQ ID NO: 990746 - RNA, 25 nt, Human
cuguccaggcucuucuagagcagcu

SEQ ID NO: 990747 - RNA, 24 nt, Human
cuuaguagcccagcccugugguua

SEQ ID NO: 990748 - RNA, 19 nt, Human
cuucagggcccuggcccca

SEQ ID NO: 990749 - RNA, 19 nt, Human
cuuccaaccccaguggggu

SEQ ID NO: 990750 - RNA, 22 nt, Human
cuuccaguguaacucuuuuugg

SEQ ID NO: 990751 - RNA, 22 nt, Human
cuuccaguguaacucuuuuugg

SEQ ID NO: 990752 - RNA, 19 nt, Human
cuucuagagcagcuggucu

SEQ ID NO: 990753 - RNA, 21 nt, Human
cuucuguucagggauaaaaau

SEQ ID NO: 990754 - RNA, 23 nt, Human
cuugagcucaggaguuugagacc

SEQ ID NO: 990755 - RNA, 20 nt, Human
cuugccagguucaucaucca

SEQ ID NO: 990756 - RNA, 20 nt, Human
cuuggacuuggccauccacu

SEQ ID NO: 990757 - RNA, 20 nt, Human
gaaaacaugucccuugagcc

SEQ ID NO: 990758 - RNA, 19 nt, Human
gaaaccucgucucuacuaa

SEQ ID NO: 990759 - RNA, 24 nt, Human
gaaaucacuuaagcccaggaguuc

SEQ ID NO: 990760 - RNA, 20 nt, Human
gaaaugaaaacaagcuguag

SEQ ID NO: 990761 - RNA, 19 nt, Human
gaacacgcccauggaaaga

SEQ ID NO: 990762 - RNA, 23 nt, Human
gaagcagguggaucacuugguca

SEQ ID NO: 990763 - RNA, 24 nt, Human
gaaggcugcagugagccgagaucg

SEQ ID NO: 990764 - RNA, 18 nt, Human
gaaucugcaauggcagcu

SEQ ID NO: 990765 - RNA, 18 nt, Human
gaaucugcaauggcagcu

SEQ ID NO: 990766 - RNA, 25 nt, Human
gacaacgaaaacagccgagaguuca

SEQ ID NO: 990767 - RNA, 18 nt, Human
gacagagcaagacucagu

SEQ ID NO: 990768 - RNA, 21 nt, Human
gaccgggcgugguggcucacg

SEQ ID NO: 990769 - RNA, 24 nt, Human
gacuuucugggcaaaaaucaaagg

SEQ ID NO: 990770 - RNA, 24 nt, Human
gagagaagccagccuggggacaga

SEQ ID NO: 990771 - RNA, 23 nt, Human
gagaucgcgccacugcauuccag

SEQ ID NO: 990772 - RNA, 20 nt, Human
gagcaagacucagucucaaa

SEQ ID NO: 990773 - RNA, 19 nt, Human
gagcuguuuuuuuuuuuuu

SEQ ID NO: 990774 - RNA, 21 nt, Human
gagcuuucuucugaguuuuca

SEQ ID NO: 990775 - RNA, 26 nt, Human
gaggcgaaugagacaggcacgugccu

SEQ ID NO: 990776 - RNA, 26 nt, Human
gaggcgaaugagacaggcacgugccu

SEQ ID NO: 990777 - RNA, 26 nt, Human
gaggcgaaugagacaggcacgugccu

SEQ ID NO: 990778 - RNA, 19 nt, Human
gagggcagcuucuggaaca

SEQ ID NO: 990779 - RNA, 23 nt, Human
gagguaggcggaucacgagguca

SEQ ID NO: 990780 - RNA, 19 nt, Human
gagugaaguggagacauuc

SEQ ID NO: 990781 - RNA, 18 nt, Human
gaguucacacaaaaggga

SEQ ID NO: 990782 - RNA, 22 nt, Human
gaucacuuggucaggaguucaa

SEQ ID NO: 990783 - RNA, 24 nt, Human
gaucacuuggucaggaguucaaga

SEQ ID NO: 990784 - RNA, 24 nt, Human
gaucgcuugagcucaggaguuuga

SEQ ID NO: 990785 - RNA, 19 nt, Human
gcaacauacagccaagucc

SEQ ID NO: 990786 - RNA, 19 nt, Human
gcacguggaaggagaacca

SEQ ID NO: 990787 - RNA, 23 nt, Human
gcagaagaaucacuugaacccgg

SEQ ID NO: 990788 - RNA, 18 nt, Human
gcauccuuugcaaacacc

SEQ ID NO: 990789 - RNA, 24 nt, Human
gcauuccagccugagugacagagc

SEQ ID NO: 990790 - RNA, 24 nt, Human
gccaacauggugaaaccucgucuc

SEQ ID NO: 990791 - RNA, 21 nt, Human
gccacugcauuccagccugag

SEQ ID NO: 990792 - RNA, 23 nt, Human
gccagcagccucuuuccagcccu

SEQ ID NO: 990793 - RNA, 24 nt, Human
gcccaggagguugagacuacagug

SEQ ID NO: 990794 - RNA, 22 nt, Human
gcccaggaguucgaaaccagcc

SEQ ID NO: 990795 - RNA, 18 nt, Human
gcccccaacccccaacau

SEQ ID NO: 990796 - RNA, 19 nt, Human
gcccuggccccauuuuccu

SEQ ID NO: 990797 - RNA, 20 nt, Human
gcccuggccccauuuuccua

SEQ ID NO: 990798 - RNA, 20 nt, Human
gccgagaucgcgccacugca

SEQ ID NO: 990799 - RNA, 21 nt, Human
gccuggguuugaucuugagga

SEQ ID NO: 990800 - RNA, 22 nt, Human
gcgaaugagacaggcacgugcc

SEQ ID NO: 990801 - RNA, 22 nt, Human
gcgaaugagacaggcacgugcc

SEQ ID NO: 990802 - RNA, 22 nt, Human
gcgaaugagacaggcacgugcc

SEQ ID NO: 990803 - RNA, 24 nt, Human
gcuaacacggugaaacccugucuc

SEQ ID NO: 990804 - RNA, 21 nt, Human
gcuaagaaaggaaaaggucca

SEQ ID NO: 990805 - RNA, 26 nt, Human
gcucagcuucagcaaagagggaacgc

SEQ ID NO: 990806 - RNA, 21 nt, Human
gcugcagugagccgagaucgc

SEQ ID NO: 990807 - RNA, 22 nt, Human
gcugcucuuuuuggggucuccc

SEQ ID NO: 990808 - RNA, 19 nt, Human
gcugggugcagcggcucac

SEQ ID NO: 990809 - RNA, 18 nt, Human
ggaaaaaaggacgugacu

SEQ ID NO: 990810 - RNA, 21 nt, Human
ggaaaaaaggacgugacucga

SEQ ID NO: 990811 - RNA, 26 nt, Human
ggaaaugaaaacaagcuguagagaaa

SEQ ID NO: 990812 - RNA, 22 nt, Human
ggacuacaggcaagguauaaac

SEQ ID NO: 990813 - RNA, 22 nt, Human
ggacuacaggcaagguauaaac

SEQ ID NO: 990814 - RNA, 26 nt, Human
ggacuacaggcaagguauaaacuggu

SEQ ID NO: 990815 - RNA, 26 nt, Human
ggacuacaggcaagguauaaacuggu

SEQ ID NO: 990816 - RNA, 22 nt, Human
ggagaaaucacuuaagcccagg

SEQ ID NO: 990817 - RNA, 23 nt, Human
ggagagcuguuuuuuuuuuuuuu

SEQ ID NO: 990818 - RNA, 22 nt, Human
ggagugguggcucacaccugua

SEQ ID NO: 990819 - RNA, 24 nt, Human
ggauagaauguuaaacacauucuu

SEQ ID NO: 990820 - RNA, 22 nt, Human
ggauccugcgcugcucggaugc

SEQ ID NO: 990821 - RNA, 22 nt, Human
ggaucgcuugagcucaggaguu

SEQ ID NO: 990822 - RNA, 21 nt, Human
ggaugacuuggcuugaaggaa

SEQ ID NO: 990823 - RNA, 21 nt, Human
ggaugacuuggcuugaaggaa

SEQ ID NO: 990824 - RNA, 24 nt, Human
ggcaccuguaaucccagcuacuug

SEQ ID NO: 990825 - RNA, 23 nt, Human
ggcaugguggugggcaccuguaa

SEQ ID NO: 990826 - RNA, 23 nt, Human
ggcgugguggcucacgccuguaa

SEQ ID NO: 990827 - RNA, 21 nt, Human
ggcucacaccuguagucucag

SEQ ID NO: 990828 - RNA, 20 nt, Human
ggcucacgccuguaauccca

SEQ ID NO: 990829 - RNA, 23 nt, Human
ggcucacgccuguaaucccagca

SEQ ID NO: 990830 - RNA, 21 nt, Human
ggcucgugccuguaaucccag

SEQ ID NO: 990831 - RNA, 18 nt, Human
ggcugggugcagcggcuc

SEQ ID NO: 990832 - RNA, 19 nt, Human
gggacagaggacagaggaa

SEQ ID NO: 990833 - RNA, 19 nt, Human
gggacagaggacagaggag

SEQ ID NO: 990834 - RNA, 24 nt, Human
gggagugguggcucacaccuguag

SEQ ID NO: 990835 - RNA, 18 nt, Human
gggcaggaaaccuggauc

SEQ ID NO: 990836 - RNA, 19 nt, Human
ggggcaggaaaccuggauc

SEQ ID NO: 990837 - RNA, 21 nt, Human
ggguaacuuccugaugugucc

SEQ ID NO: 990838 - RNA, 21 nt, Human
ggguaacuuccugaugugucc

SEQ ID NO: 990839 - RNA, 24 nt, Human
gggugcagcggcucacgccuguaa

SEQ ID NO: 990840 - RNA, 24 nt, Human
gguggcucacaccuguagucucag

SEQ ID NO: 990841 - RNA, 24 nt, Human
gguggcucacgccuguaaucccag

SEQ ID NO: 990842 - RNA, 23 nt, Human
gguggcucgugccuguaauccca

SEQ ID NO: 990843 - RNA, 24 nt, Human
gguggcucgugccuguaaucccag

SEQ ID NO: 990844 - RNA, 24 nt, Human
gguggugggcaccuguaaucccag

SEQ ID NO: 990845 - RNA, 20 nt, Human
guaccuuuguuuauccagug

SEQ ID NO: 990846 - RNA, 20 nt, Human
guacuccaucguugccucuu

SEQ ID NO: 990847 - RNA, 24 nt, Human
guaguuaugaggccuggugcugug

SEQ ID NO: 990848 - RNA, 24 nt, Human
guccucuucccauucugcuccucu

SEQ ID NO: 990849 - RNA, 24 nt, Human
guccucuucccauucugcuccucu

SEQ ID NO: 990850 - RNA, 25 nt, Human
gucucccuccuucugccuuuuguca

SEQ ID NO: 990851 - RNA, 25 nt, Human
gucucccuccuucugccuuuuguca

SEQ ID NO: 990852 - RNA, 21 nt, Human
gugaaacccugucucuacuaa

SEQ ID NO: 990853 - RNA, 21 nt, Human
gugaaaccucgucucuacuaa

SEQ ID NO: 990854 - RNA, 19 nt, Human
gugccucucugcuucaucc

SEQ ID NO: 990855 - RNA, 19 nt, Human
gugccucucugcuucaucc

SEQ ID NO: 990856 - RNA, 19 nt, Human
gugccucucugcuucaucc

SEQ ID NO: 990857 - RNA, 19 nt, Human
gugccuguaaucccagcac

SEQ ID NO: 990858 - RNA, 20 nt, Human
gugcgguaaacaaacagcag

SEQ ID NO: 990859 - RNA, 24 nt, Human
gugcugcucuuuuuggggucuccc

SEQ ID NO: 990860 - RNA, 19 nt, Human
guggaucacuuggucagga

SEQ ID NO: 990861 - RNA, 23 nt, Human
guggaucacuuggucaggaguuc

SEQ ID NO: 990862 - RNA, 23 nt, Human
guggcucacaccuguagucucag

SEQ ID NO: 990863 - RNA, 23 nt, Human
guggugggcaccuguaaucccag

SEQ ID NO: 990864 - RNA, 25 nt, Human
guguuuauuuauuuauuuauuuauu

SEQ ID NO: 990865 - RNA, 20 nt, Human
uaaaaauacaaaaauuagcc

SEQ ID NO: 990866 - RNA, 21 nt, Human
uaaaaauacaaaaauuagccu

SEQ ID NO: 990867 - RNA, 21 nt, Human
uaaaauaacuguagucuuagc

SEQ ID NO: 990868 - RNA, 22 nt, Human
uaaaauacucugugucaccucu

SEQ ID NO: 990869 - RNA, 25 nt, Human
uaaacuaugaagaaauuaccguacc

SEQ ID NO: 990870 - RNA, 21 nt, Human
uaaaguccaaaaagaaaggga

SEQ ID NO: 990871 - RNA, 20 nt, Human
uaaagugaaagcaaguuuaa

SEQ ID NO: 990872 - RNA, 20 nt, Human
uaaagugaaagcaaguuuaa

SEQ ID NO: 990873 - RNA, 22 nt, Human
uaacacggugaaacccugucuc

SEQ ID NO: 990874 - RNA, 24 nt, Human
uaacacggugaaacccugucucua

SEQ ID NO: 990875 - RNA, 19 nt, Human
uaaccaagaggcagcagag

SEQ ID NO: 990876 - RNA, 22 nt, Human
uaaccaagaggcagcagagcug

SEQ ID NO: 990877 - RNA, 20 nt, Human
uaaccuguagaaaacaggac

SEQ ID NO: 990878 - RNA, 21 nt, Human
uaaccuguagaaaacaggaca

SEQ ID NO: 990879 - RNA, 18 nt, Human
uaacucagcaaacauuuc

SEQ ID NO: 990880 - RNA, 24 nt, Human
uaacuguagucuuagcugcuuggg

SEQ ID NO: 990881 - RNA, 21 nt, Human
uaagaaaggaaaagguccauu

SEQ ID NO: 990882 - RNA, 23 nt, Human
uaagaaaguaaaggaauauagaa

SEQ ID NO: 990883 - RNA, 23 nt, Human
uaagaaaguaaaggaauauagaa

SEQ ID NO: 990884 - RNA, 22 nt, Human
uaagaauaaaauaacuguaguc

SEQ ID NO: 990885 - RNA, 23 nt, Human
uaagcccaggaguucgaaaccag

SEQ ID NO: 990886 - RNA, 18 nt, Human
uaagcuuccugaugcuca

SEQ ID NO: 990887 - RNA, 19 nt, Human
uaagguagaaggaauuaaa

SEQ ID NO: 990888 - RNA, 19 nt, Human
uaagguagaaggaauuaaa

SEQ ID NO: 990889 - RNA, 19 nt, Human
uaagguagaaggaauuaaa

SEQ ID NO: 990890 - RNA, 19 nt, Human
uaagguagaaggaauuaaa

SEQ ID NO: 990891 - RNA, 18 nt, Human
uacacagguccauuauug

SEQ ID NO: 990892 - RNA, 19 nt, Human
uacaccugucugccucugc

SEQ ID NO: 990893 - RNA, 22 nt, Human
uacagugagccgugauugcacc

SEQ ID NO: 990894 - RNA, 24 nt, Human
uaccaggugccugauaaaugucag

SEQ ID NO: 990895 - RNA, 23 nt, Human
uaccugcuuauaaacaccagaau

SEQ ID NO: 990896 - RNA, 22 nt, Human
uaccuuuguuuauccagugcaa

SEQ ID NO: 990897 - RNA, 18 nt, Human
uacucugugucaccucuc

SEQ ID NO: 990898 - RNA, 24 nt, Human
uagaaaacaggacaaaggugaccg

SEQ ID NO: 990899 - RNA, 19 nt, Human
uagaaggaauuaaauuaug

SEQ ID NO: 990900 - RNA, 19 nt, Human
uagcucacugguguaacca

SEQ ID NO: 990901 - RNA, 18 nt, Human
uagcugcuugggaggcug

SEQ ID NO: 990902 - RNA, 21 nt, Human
uagcuggacucucugggcaaa

SEQ ID NO: 990903 - RNA, 22 nt, Human
uagcuggacuuucugggcaaaa

SEQ ID NO: 990904 - RNA, 19 nt, Human
uaguacaaaaggccuugaa

SEQ ID NO: 990905 - RNA, 22 nt, Human
uaguauguuagcuggacuuucu

SEQ ID NO: 990906 - RNA, 21 nt, Human
uagugggaucccaucucucuu

SEQ ID NO: 990907 - RNA, 27 nt, Human
uauagugggaucccaucucucuuuuug

SEQ ID NO: 990908 - RNA, 25 nt, Human
uauccaccagacuagauuccccagu

SEQ ID NO: 990909 - RNA, 22 nt, Human
uaucugaugcacaguggcugcc

SEQ ID NO: 990910 - RNA, 20 nt, Human
ucaaaauggagucacucuga

SEQ ID NO: 990911 - RNA, 20 nt, Human
ucaaaauggagucacucuga

SEQ ID NO: 990912 - RNA, 23 nt, Human
ucaaagaucugccuuaauaccaa

SEQ ID NO: 990913 - RNA, 20 nt, Human
ucaccacugcuguccccucu

SEQ ID NO: 990914 - RNA, 21 nt, Human
ucaccacugcuguccccucuu

SEQ ID NO: 990915 - RNA, 27 nt, Human
ucacccuaagagagggagagcuguuuu

SEQ ID NO: 990916 - RNA, 27 nt, Human
ucacccuaagagagggagagcuguuuu

SEQ ID NO: 990917 - RNA, 23 nt, Human
ucacgaggucaggagauggaguc

SEQ ID NO: 990918 - RNA, 18 nt, Human
ucacucacucagcaaaca

SEQ ID NO: 990919 - RNA, 24 nt, Human
ucacuuggucaggaguucaagacc

SEQ ID NO: 990920 - RNA, 24 nt, Human
ucagauggccauucccagcuuuug

SEQ ID NO: 990921 - RNA, 19 nt, Human
ucagcccaaaugugggaca

SEQ ID NO: 990922 - RNA, 24 nt, Human
ucaggcugggagugguggcucaca

SEQ ID NO: 990923 - RNA, 21 nt, Human
ucagggauaaaaauaagcccu

SEQ ID NO: 990924 - RNA, 23 nt, Human
ucagggcccuggccccauuuucc

SEQ ID NO: 990925 - RNA, 25 nt, Human
ucagucucaaaaaaaaaaaaaaaaa

SEQ ID NO: 990926 - RNA, 21 nt, Human
ucauucaucccccggaaaccu

SEQ ID NO: 990927 - RNA, 19 nt, Human
uccaaaaagaaagggagaa

SEQ ID NO: 990928 - RNA, 19 nt, Human
uccacuuaagauuaaaguc

SEQ ID NO: 990929 - RNA, 19 nt, Human
uccagccugagugacagag

SEQ ID NO: 990930 - RNA, 24 nt, Human
uccagccugagugacagagcaaga

SEQ ID NO: 990931 - RNA, 26 nt, Human
uccauaggcaaagcagcccugagggc

SEQ ID NO: 990932 - RNA, 26 nt, Human
uccauaggcaaagcagcccugagggc

SEQ ID NO: 990933 - RNA, 22 nt, Human
uccccagcuucuguuguaacuc

SEQ ID NO: 990934 - RNA, 22 nt, Human
uccccagcuucuguuguaacuc

SEQ ID NO: 990935 - RNA, 19 nt, Human
uccccucuuuggcuccaca

SEQ ID NO: 990936 - RNA, 19 nt, Human
ucccuaagcuuccugaugc

SEQ ID NO: 990937 - RNA, 20 nt, Human
ucccuacagcaagcuaagaa

SEQ ID NO: 990938 - RNA, 27 nt, Human
ucccuacagcaagcuaagaaaggaaaa

SEQ ID NO: 990939 - RNA, 18 nt, Human
ucccuagaccacugcucu

SEQ ID NO: 990940 - RNA, 18 nt, Human
ucccucuguccuccuccu

SEQ ID NO: 990941 - RNA, 18 nt, Human
ucccucuguccuccuccu

SEQ ID NO: 990942 - RNA, 21 nt, Human
ucccucuguccuccuccuccu

SEQ ID NO: 990943 - RNA, 20 nt, Human
ucccugcugaggguugaauc

SEQ ID NO: 990944 - RNA, 24 nt, Human
uccuccuccuccucugguuguucc

SEQ ID NO: 990945 - RNA, 22 nt, Human
uccucugguuguuccccagcac

SEQ ID NO: 990946 - RNA, 22 nt, Human
uccucugguuguuccccagcac

SEQ ID NO: 990947 - RNA, 23 nt, Human
uccucugugaguugagugaggau

SEQ ID NO: 990948 - RNA, 23 nt, Human
uccucugugaguugagugaggau

SEQ ID NO: 990949 - RNA, 23 nt, Human
uccuggaugcagcagauccagag

SEQ ID NO: 990950 - RNA, 23 nt, Human
uccuggaugcagcagauccagag

SEQ ID NO: 990951 - RNA, 23 nt, Human
uccuggaugcagcagauccagag

SEQ ID NO: 990952 - RNA, 19 nt, Human
uccuuggcuggagggaugc

SEQ ID NO: 990953 - RNA, 21 nt, Human
uccuuugcaaacaccagaggc

SEQ ID NO: 990954 - RNA, 23 nt, Human
ucgcgccacugcauuccagccug

SEQ ID NO: 990955 - RNA, 19 nt, Human
ucgcuugagcucaggaguu

SEQ ID NO: 990956 - RNA, 21 nt, Human
ucgcuugagcucaggaguuug

SEQ ID NO: 990957 - RNA, 23 nt, Human
ucggaugcacuuggcugugugac

SEQ ID NO: 990958 - RNA, 22 nt, Human
ucgugccuguaaucccagcacu

SEQ ID NO: 990959 - RNA, 19 nt, Human
ucuagagcagcuggucucc

SEQ ID NO: 990960 - RNA, 20 nt, Human
ucucacccuaagagagggag

SEQ ID NO: 990961 - RNA, 23 nt, Human
ucucagauggccauucccagcuu

SEQ ID NO: 990962 - RNA, 21 nt, Human
ucuccacaccccagucccucc

SEQ ID NO: 990963 - RNA, 20 nt, Human
ucucccacacauaccuccuu

SEQ ID NO: 990964 - RNA, 21 nt, Human
ucucccacacauaccuccuua

SEQ ID NO: 990965 - RNA, 20 nt, Human
ucucccuccuucugccuuuu

SEQ ID NO: 990966 - RNA, 20 nt, Human
ucucccuccuucugccuuuu

SEQ ID NO: 990967 - RNA, 20 nt, Human
ucucccuccuucugccuuuu

SEQ ID NO: 990968 - RNA, 20 nt, Human
ucucccuccuucugccuuuu

SEQ ID NO: 990969 - RNA, 21 nt, Human
ucucuacuaaaaauacaaaaa

SEQ ID NO: 990970 - RNA, 21 nt, Human
ucucuacuaaaaauacaaaaa

SEQ ID NO: 990971 - RNA, 23 nt, Human
ucucuacuaaaaauacaaaaauu

SEQ ID NO: 990972 - RNA, 22 nt, Human
ucucugggcaaaaaaucaaagg

SEQ ID NO: 990973 - RNA, 24 nt, Human
ucugagcuuucuucugaguuuuca

SEQ ID NO: 990974 - RNA, 19 nt, Human
ucugcacucucaccucccc

SEQ ID NO: 990975 - RNA, 19 nt, Human
ucugcacuuccaaccccag

SEQ ID NO: 990976 - RNA, 20 nt, Human
ucugcccccaacccccaaca

SEQ ID NO: 990977 - RNA, 18 nt, Human
ucuguagucuuagcugcu

SEQ ID NO: 990978 - RNA, 19 nt, Human
ucuguccuccuccuccucu

SEQ ID NO: 990979 - RNA, 21 nt, Human
ucuguccuccuccuccucucc

SEQ ID NO: 990980 - RNA, 21 nt, Human
ucuuccucugugucacucugg

SEQ ID NO: 990981 - RNA, 24 nt, Human
ucuucucccacacauaccuccuua

SEQ ID NO: 990982 - RNA, 18 nt, Human
ucuuguaaaccaagaagu

SEQ ID NO: 990983 - RNA, 18 nt, Human
ucuuguaaaccaagaagu

SEQ ID NO: 990984 - RNA, 22 nt, Human
ucuuugacgugccaggccuggg

SEQ ID NO: 990985 - RNA, 20 nt, Human
ucuuuggcuccacacacacu

SEQ ID NO: 990986 - RNA, 25 nt, Human
ugaaagcaaguuuauuaagaaagua

SEQ ID NO: 990987 - RNA, 25 nt, Human
ugaaagcaaguuuauuaagaaagua

SEQ ID NO: 990988 - RNA, 23 nt, Human
ugaagaaauuaccguaccuuugu

SEQ ID NO: 990989 - RNA, 18 nt, Human
ugaagcacaaucccuaca

SEQ ID NO: 990990 - RNA, 22 nt, Human
ugaagcacaaucccuacagcaa

SEQ ID NO: 990991 - RNA, 23 nt, Human
ugaagcguuccagggaagacccc

SEQ ID NO: 990992 - RNA, 21 nt, Human
ugaaggaaggaggggcucuuc

SEQ ID NO: 990993 - RNA, 21 nt, Human
ugaaggaaggaggggcucuuc

SEQ ID NO: 990994 - RNA, 18 nt, Human
ugaagugggaggaucucu

SEQ ID NO: 990995 - RNA, 24 nt, Human
ugaagugggaggaucucuugagcc

SEQ ID NO: 990996 - RNA, 21 nt, Human
ugaauggauagacauggacca

SEQ ID NO: 990997 - RNA, 21 nt, Human
ugacaauucagcaacuccagc

SEQ ID NO: 990998 - RNA, 24 nt, Human
ugacagcaccugcaguuuaccagc

SEQ ID NO: 990999 - RNA, 21 nt, Human
ugacccuagcaccagagcaag

SEQ ID NO: 991000 - RNA, 21 nt, Human
ugaccuuggacuuggccaucc

SEQ ID NO: 991001 - RNA, 19 nt, Human
ugacucgaaucugcaaugg

SEQ ID NO: 991002 - RNA, 19 nt, Human
ugacucgaaucugcaaugg

SEQ ID NO: 991003 - RNA, 22 nt, Human
ugacucgaaucugcaauggcag

SEQ ID NO: 991004 - RNA, 22 nt, Human
ugacucgaaucugcaauggcag

SEQ ID NO: 991005 - RNA, 19 nt, Human
ugacuugacacaugugggc

SEQ ID NO: 991006 - RNA, 25 nt, Human
ugagaagcugagacaggagaaauca

SEQ ID NO: 991007 - RNA, 25 nt, Human
ugagacaggagaaaucacuuaagcc

SEQ ID NO: 991008 - RNA, 19 nt, Human
ugagacaggcacgugccuc

SEQ ID NO: 991009 - RNA, 23 nt, Human
ugagaccagccugugcaauauag

SEQ ID NO: 991010 - RNA, 19 nt, Human
ugagauagcaugaaaacag

SEQ ID NO: 991011 - RNA, 25 nt, Human
ugagcccaggagguugagacuacag

SEQ ID NO: 991012 - RNA, 22 nt, Human
ugagccgagaucgcgccacugc

SEQ ID NO: 991013 - RNA, 20 nt, Human
ugaggcagaagaaucacuug

SEQ ID NO: 991014 - RNA, 24 nt, Human
ugaggcagaagaaucacuugaacc

SEQ ID NO: 991015 - RNA, 25 nt, Human
ugaggcagaagaaucacuugaaccc

SEQ ID NO: 991016 - RNA, 19 nt, Human
ugaggccaggugcgguggc

SEQ ID NO: 991017 - RNA, 24 nt, Human
ugaggccaggugcgguggcucgug

SEQ ID NO: 991018 - RNA, 18 nt, Human
ugaguuuuccaggaaagg

SEQ ID NO: 991019 - RNA, 19 nt, Human
ugaguuuuccaggaaaggg

SEQ ID NO: 991020 - RNA, 22 nt, Human
ugaugaaccagugcuggaagcu

SEQ ID NO: 991021 - RNA, 19 nt, Human
ugaugacaaagagacagcg

SEQ ID NO: 991022 - RNA, 20 nt, Human
ugaugcugaauggauagaca

SEQ ID NO: 991023 - RNA, 22 nt, Human
ugauugcaccacugcacucugg

SEQ ID NO: 991024 - RNA, 20 nt, Human
ugcaagagauugcucagcug

SEQ ID NO: 991025 - RNA, 21 nt, Human
ugcacgcauacacauacacau

SEQ ID NO: 991026 - RNA, 21 nt, Human
ugcagacaacgaaaacagccg

SEQ ID NO: 991027 - RNA, 20 nt, Human
ugcaucugauucagggcugu

SEQ ID NO: 991028 - RNA, 20 nt, Human
ugccaagguuaaggacaugu

SEQ ID NO: 991029 - RNA, 20 nt, Human
ugccaagguuaaggacaugu

SEQ ID NO: 991030 - RNA, 20 nt, Human
ugccucugcacuuccaaccc

SEQ ID NO: 991031 - RNA, 21 nt, Human
ugccucugcucugaaauauuu

SEQ ID NO: 991032 - RNA, 23 nt, Human
ugccuguaaucccagcacuuugg

SEQ ID NO: 991033 - RNA, 23 nt, Human
ugccuguaaucccagcacuuugg

SEQ ID NO: 991034 - RNA, 24 nt, Human
ugccuguaaucccagcacuuuggg

SEQ ID NO: 991035 - RNA, 20 nt, Human
ugcucggaugcacuuggcug

SEQ ID NO: 991036 - RNA, 20 nt, Human
ugcucggaugcacuuggcug

SEQ ID NO: 991037 - RNA, 23 nt, Human
ugcugccuugcaccugcugcaug

SEQ ID NO: 991038 - RNA, 22 nt, Human
ugcugcucuuuuuggggucucc

SEQ ID NO: 991039 - RNA, 21 nt, Human
ugcuggugggagugucuuuua

SEQ ID NO: 991040 - RNA, 21 nt, Human
ugcuggugggagugucuuuua

SEQ ID NO: 991041 - RNA, 21 nt, Human
ugcuucuaacucagcaaacau

SEQ ID NO: 991042 - RNA, 20 nt, Human
uggaaggagaaccaauucau

SEQ ID NO: 991043 - RNA, 20 nt, Human
uggaauaaaauccagauucc

SEQ ID NO: 991044 - RNA, 27 nt, Human
uggacaagagccagagaacaccagaga

SEQ ID NO: 991045 - RNA, 22 nt, Human
uggaucacuuggucaggaguuc

SEQ ID NO: 991046 - RNA, 19 nt, Human
uggcacagagggagauaac

SEQ ID NO: 991047 - RNA, 24 nt, Human
uggcagcugcucuuggcccagugu

SEQ ID NO: 991048 - RNA, 24 nt, Human
uggcagcugcucuuggcccagugu

SEQ ID NO: 991049 - RNA, 19 nt, Human
uggcaugguggugggcacc

SEQ ID NO: 991050 - RNA, 24 nt, Human
uggcaugguggugggcaccuguaa

SEQ ID NO: 991051 - RNA, 24 nt, Human
uggccaacauggugaaaccucguc

SEQ ID NO: 991052 - RNA, 21 nt, Human
uggcucacaccuguagucuca

SEQ ID NO: 991053 - RNA, 24 nt, Human
uggcucacaccuguagucucagca

SEQ ID NO: 991054 - RNA, 24 nt, Human
uggcucacgccuguaaucccagca

SEQ ID NO: 991055 - RNA, 20 nt, Human
uggcucacuugaaucaauuu

SEQ ID NO: 991056 - RNA, 22 nt, Human
uggcucgugccuguaaucccag

SEQ ID NO: 991057 - RNA, 24 nt, Human
uggcucgugccuguaaucccagca

SEQ ID NO: 991058 - RNA, 23 nt, Human
uggcugagggcagcuucuggaac

SEQ ID NO: 991059 - RNA, 19 nt, Human
uggcuggagggaugcaaga

SEQ ID NO: 991060 - RNA, 23 nt, Human
ugggaggccaaggcaggaggauc

SEQ ID NO: 991061 - RNA, 24 nt, Human
ugggaggccgaagcagguggauca

SEQ ID NO: 991062 - RNA, 19 nt, Human
ugggaggccgagguaggcg

SEQ ID NO: 991063 - RNA, 24 nt, Human
ugggaggccgagguaggcggauca

SEQ ID NO: 991064 - RNA, 18 nt, Human
ugggaggcugaaguggga

SEQ ID NO: 991065 - RNA, 19 nt, Human
ugggaggcugaagugggag

SEQ ID NO: 991066 - RNA, 24 nt, Human
ugggaggcugaggcagaagaauca

SEQ ID NO: 991067 - RNA, 24 nt, Human
ugggcugcagaaagagcacugggg

SEQ ID NO: 991068 - RNA, 20 nt, Human
ugggcugggugcagcggcuc

SEQ ID NO: 991069 - RNA, 20 nt, Human
uggggcaggaaaccuggauc

SEQ ID NO: 991070 - RNA, 20 nt, Human
uggggucucccuccuucugc

SEQ ID NO: 991071 - RNA, 20 nt, Human
uggggucucccuccuucugc

SEQ ID NO: 991072 - RNA, 20 nt, Human
uggggucucccuccuucugc

SEQ ID NO: 991073 - RNA, 20 nt, Human
uggggucucccuccuucugc

SEQ ID NO: 991074 - RNA, 22 nt, Human
uggggucucccuccuucugccu

SEQ ID NO: 991075 - RNA, 22 nt, Human
uggggucucccuccuucugccu

SEQ ID NO: 991076 - RNA, 22 nt, Human
uggggucucccuccuucugccu

SEQ ID NO: 991077 - RNA, 19 nt, Human
uggugagagcccaagggga

SEQ ID NO: 991078 - RNA, 19 nt, Human
uggugagagcccaagggga

SEQ ID NO: 991079 - RNA, 24 nt, Human
ugguggcucacaccuguagucuca

SEQ ID NO: 991080 - RNA, 24 nt, Human
ugguggcucacgccuguaauccca

SEQ ID NO: 991081 - RNA, 22 nt, Human
uggugggcaccuguaaucccag

SEQ ID NO: 991082 - RNA, 18 nt, Human
ugguggguuuugacuggc

SEQ ID NO: 991083 - RNA, 18 nt, Human
ugguggguuuugacuggc

SEQ ID NO: 991084 - RNA, 24 nt, Human
ugguggugggcaccuguaauccca

SEQ ID NO: 991085 - RNA, 22 nt, Human
ugguguaaccaagaggcagcag

SEQ ID NO: 991086 - RNA, 21 nt, Human
uguagaaaacaggacaaaggu

SEQ ID NO: 991087 - RNA, 22 nt, Human
uguagaaaacaggacaaaggug

SEQ ID NO: 991088 - RNA, 23 nt, Human
ugucaccuuucauuucuucaaua

SEQ ID NO: 991089 - RNA, 21 nt, Human
ugucucaggccucaaguccug

SEQ ID NO: 991090 - RNA, 24 nt, Human
ugucuguagucuuagcugcuuggg

SEQ ID NO: 991091 - RNA, 22 nt, Human
ugugccaggcaucuuacaaagg

SEQ ID NO: 991092 - RNA, 19 nt, Human
ugugcugauggaauugaug

SEQ ID NO: 991093 - RNA, 19 nt, Human
ugugcugauggaauugaug

SEQ ID NO: 991094 - RNA, 18 nt, Human
uguggcuugucauggagc

SEQ ID NO: 991095 - RNA, 23 nt, Human
uguguagcuggaaggugaacuga

SEQ ID NO: 991096 - RNA, 18 nt, Human
uguuccaaauugcugucc

SEQ ID NO: 991097 - RNA, 22 nt, Human
uguugccaaccacuucaucuca

SEQ ID NO: 991098 - RNA, 20 nt, Human
uguugcuuuuguacuucugu

SEQ ID NO: 991099 - RNA, 23 nt, Human
uguuugagggggcagcuuccugu

SEQ ID NO: 991100 - RNA, 23 nt, Human
uguuugagggggcagcuuccugu

SEQ ID NO: 991101 - RNA, 20 nt, Human
uuaaacacauucuuaaauug

SEQ ID NO: 991102 - RNA, 21 nt, Human
uuaguagcccagcccuguggu

SEQ ID NO: 991103 - RNA, 24 nt, Human
uuagucaauagcuggcaaaaagaa

SEQ ID NO: 991104 - RNA, 24 nt, Human
uuauuuauuuauuuauuuauuuuu

SEQ ID NO: 991105 - RNA, 20 nt, Human
uuauuuauuuauuuauuuuu

SEQ ID NO: 991106 - RNA, 20 nt, Human
uuauuuauuuauuuauuuuu

SEQ ID NO: 991107 - RNA, 22 nt, Human
uuauuuauuuauuuauuuuuca

SEQ ID NO: 991108 - RNA, 20 nt, Human
uucagggauaaaaauaagcc

SEQ ID NO: 991109 - RNA, 22 nt, Human
uucagggauaaaaauaagcccu

SEQ ID NO: 991110 - RNA, 22 nt, Human
uucaucacucacucagcaaaca

SEQ ID NO: 991111 - RNA, 20 nt, Human
uuccaggaaagggguggaca

SEQ ID NO: 991112 - RNA, 22 nt, Human
uuccucaaccccuuugcaccuc

SEQ ID NO: 991113 - RNA, 24 nt, Human
uuccuccaccacgucgucacucag

SEQ ID NO: 991114 - RNA, 26 nt, Human
uuccugauguguccaugucauuugua

SEQ ID NO: 991115 - RNA, 26 nt, Human
uuccugauguguccaugucauuugua

SEQ ID NO: 991116 - RNA, 19 nt, Human
uuccuugugaaaaguucuu

SEQ ID NO: 991117 - RNA, 23 nt, Human
uucgaaaccagccuggucaauaa

SEQ ID NO: 991118 - RNA, 20 nt, Human
uucuagagcagcuggucucc

SEQ ID NO: 991119 - RNA, 20 nt, Human
uucugucuccaugccagagg

SEQ ID NO: 991120 - RNA, 18 nt, Human
uugaaggaaggaggggcu

SEQ ID NO: 991121 - RNA, 18 nt, Human
uugaaggaaggaggggcu

SEQ ID NO: 991122 - RNA, 19 nt, Human
uugaucuugaggaauggug

SEQ ID NO: 991123 - RNA, 20 nt, Human
uugcagguguguagcuggaa

SEQ ID NO: 991124 - RNA, 24 nt, Human
uugcagguguguagcuggaaggug

SEQ ID NO: 991125 - RNA, 20 nt, Human
uugccaaccacuucaucuca

SEQ ID NO: 991126 - RNA, 21 nt, Human
uuggauuuggguucuggcacu

SEQ ID NO: 991127 - RNA, 25 nt, Human
uugggaggccgagguaggcggauca

SEQ ID NO: 991128 - RNA, 25 nt, Human
uugggaggcugaggcagaagaauca

SEQ ID NO: 991129 - RNA, 18 nt, Human
uugguggguuuugacugg

SEQ ID NO: 991130 - RNA, 18 nt, Human
uugguggguuuugacugg

SEQ ID NO: 991131 - RNA, 18 nt, Human
uuuaggagaaaaucagaa

SEQ ID NO: 991132 - RNA, 22 nt, Human
uuuccagcccuguuccuccacc

SEQ ID NO: 991133 - RNA, 21 nt, Human
uuuccuggcucacuugaauca

SEQ ID NO: 991134 - RNA, 21 nt, Human
uuucugggcaaaaaucaaagg

SEQ ID NO: 991135 - RNA, 20 nt, Human
uuuggcuccacacacacucu

SEQ ID NO: 991136 - RNA, 25 nt, Human
uuuggggucucccuccuucugccuu

SEQ ID NO: 991137 - RNA, 25 nt, Human
uuuggggucucccuccuucugccuu

SEQ ID NO: 991138 - RNA, 25 nt, Human
uuugucaccuuucauuucuucaaua

SEQ ID NO: 991139 - RNA, 25 nt, Human
uuugucaccuuucauuucuucaaua

SEQ ID NO: 991140 - RNA, 25 nt, Human
uuugucaccuuucauuucuucaaua

SEQ ID NO: 991141 - RNA, 25 nt, Human
uuugucaccuuucauuucuucaaua

SEQ ID NO: 991142 - RNA, 20 nt, Human
uuuuccacuuuacuuagcug

SEQ ID NO: 991143 - RNA, 27 nt, Human
uuuucgaucguuuaacagccauccauc

SEQ ID NO: 991144 - RNA, 18 nt, Human
uuuuuuuuuuuuuuuucg

SEQ ID NO: 991145 - RNA, 28 nt, Human
uuuuuuuuuuuuuuuuuccuuuuuuuua

SEQ ID NO: 991146 - RNA, 28 nt, Human
uuuuuuuuuuuuuuuuuccuuuuuuuua

SEQ ID NO: 991147 - RNA, 19 nt, Human
uuuuuuuuuuuuuuuuucg

SEQ ID NO: 991148 - RNA, 21 nt, Human
uuuuuuuuuuuuuuuuucgau

SEQ ID NO: 991149 - RNA, 18 nt, Human
uuuuuuuuuuuuuuuuug

SEQ ID NO: 991150 - RNA, 18 nt, Human
uuuuuuuuuuuuuuuuug

SEQ ID NO: 991151 - RNA, 18 nt, Human
uuuuuuuuuuuuuuuuug

SEQ ID NO: 991152 - RNA, 18 nt, Human
uuuuuuuuuuuuuuuuug

SEQ ID NO: 991153 - RNA, 20 nt, Human
uuuuuuuuuuuuuuuuuggu

SEQ ID NO: 991154 - RNA, 23 nt, Human
uuuuuuuuuuuuuuuuuggugag

SEQ ID NO: 991155 - RNA, 23 nt, Human
uuuuuuuuuuuuuuuuuuccuuu

SEQ ID NO: 991156 - RNA, 25 nt, Human
uuuuuuuuuuuuuuuuuuccuuuuu

SEQ ID NO: 991157 - RNA, 23 nt, Human
uuuuuuuuuuuuuuuuuuuaagg

SEQ ID NO: 991158 - RNA, 25 nt, Human
uuuuuuuuuuuuuuuuuuuuuaagg

SEQ ID NO: 991159 - RNA, 26 nt, Human
aaagaagagauuccauguuccgucgg

SEQ ID NO: 991160 - RNA, 24 nt, Human
aaagugcuaggaugacaggcguga

SEQ ID NO: 991161 - RNA, 22 nt, Human
aacauccauucauaagagugac

SEQ ID NO: 991162 - RNA, 18 nt, Human
acgggguuucaccauguu

SEQ ID NO: 991163 - RNA, 19 nt, Human
acgggguuucaccauguug

SEQ ID NO: 991164 - RNA, 22 nt, Human
acgggguuucaccauguugccc

SEQ ID NO: 991165 - RNA, 24 nt, Human
acgggguuucaccauguugcccgg

SEQ ID NO: 991166 - RNA, 23 nt, Human
acuccuuagccucccgaggagcu

SEQ ID NO: 991167 - RNA, 20 nt, Human
acuuuauuaggaauguuaau

SEQ ID NO: 991168 - RNA, 23 nt, Human
agcugugugcuccaacucugagg

SEQ ID NO: 991169 - RNA, 23 nt, Human
aggcgugagucaccgcgcccggc

SEQ ID NO: 991170 - RNA, 24 nt, Human
caaagugcuaggaugacaggcgug

SEQ ID NO: 991171 - RNA, 22 nt, Human
caagugauucagccgccucggc

SEQ ID NO: 991172 - RNA, 24 nt, Human
caccauguugcccgggcugaucuc

SEQ ID NO: 991173 - RNA, 27 nt, Human
caccauguugcccgggcugaucucaaa

SEQ ID NO: 991174 - RNA, 21 nt, Human
caggcauccaccaucacgcuc

SEQ ID NO: 991175 - RNA, 24 nt, Human
cauguugcccgggcugaucucaaa

SEQ ID NO: 991176 - RNA, 24 nt, Human
ccaaagugcuaggaugacaggcgu

SEQ ID NO: 991177 - RNA, 26 nt, Human
ccaacucugaggcgcacagaaccaac

SEQ ID NO: 991178 - RNA, 24 nt, Human
ccgaggagcuaggauuacaggcau

SEQ ID NO: 991179 - RNA, 23 nt, Human
ccgccucggccucccaaagugcu

SEQ ID NO: 991180 - RNA, 24 nt, Human
cgccucggccucccaaagugcuag

SEQ ID NO: 991181 - RNA, 24 nt, Human
cgggguuucaccauguugcccggg

SEQ ID NO: 991182 - RNA, 21 nt, Human
cucaagugauucagccgccuc

SEQ ID NO: 991183 - RNA, 22 nt, Human
gacgggguuucaccauguugcc

SEQ ID NO: 991184 - RNA, 23 nt, Human
gagacgggguuucaccauguugc

SEQ ID NO: 991185 - RNA, 22 nt, Human
gaugacaggcgugagucaccgc

SEQ ID NO: 991186 - RNA, 23 nt, Human
gcugaucucaaacuccuaaccuc

SEQ ID NO: 991187 - RNA, 18 nt, Human
gcugugugcuccaacucu

SEQ ID NO: 991188 - RNA, 18 nt, Human
ggacauccaguacaaaga

SEQ ID NO: 991189 - RNA, 19 nt, Human
ggauuacaggcauccacca

SEQ ID NO: 991190 - RNA, 23 nt, Human
gggguuucaccauguugcccggg

SEQ ID NO: 991191 - RNA, 22 nt, Human
ggguuucaccauguugcccggg

SEQ ID NO: 991192 - RNA, 21 nt, Human
guagagacgggguuucaccau

SEQ ID NO: 991193 - RNA, 22 nt, Human
guagagacgggguuucaccaug

SEQ ID NO: 991194 - RNA, 24 nt, Human
guuucaccauguugcccgggcuga

SEQ ID NO: 991195 - RNA, 24 nt, Human
uaaccucaagugauucagccgccu

SEQ ID NO: 991196 - RNA, 25 nt, Human
uaaccucaagugauucagccgccuc

SEQ ID NO: 991197 - RNA, 23 nt, Human
uaauuuuucuauuuuuguagaga

SEQ ID NO: 991198 - RNA, 21 nt, Human
uagagacgggguuucaccaug

SEQ ID NO: 991199 - RNA, 22 nt, Human
uagagacgggguuucaccaugu

SEQ ID NO: 991200 - RNA, 22 nt, Human
uagccucccgaggagcuaggau

SEQ ID NO: 991201 - RNA, 21 nt, Human
uaggauuacaggcauccacca

SEQ ID NO: 991202 - RNA, 22 nt, Human
uaggauuacaggcauccaccau

SEQ ID NO: 991203 - RNA, 24 nt, Human
ucccaaagugcuaggaugacaggc

SEQ ID NO: 991204 - RNA, 19 nt, Human
ucccgaggagcuaggauua

SEQ ID NO: 991205 - RNA, 23 nt, Human
ucccgaggagcuaggauuacagg

SEQ ID NO: 991206 - RNA, 24 nt, Human
ucccgaggagcuaggauuacaggc

SEQ ID NO: 991207 - RNA, 18 nt, Human
ucggccucccaaagugcu

SEQ ID NO: 991208 - RNA, 18 nt, Human
uggaaagauuuuguaagg

SEQ ID NO: 991209 - RNA, 21 nt, Human
uguaagggugcaaauaagacu

SEQ ID NO: 991210 - RNA, 24 nt, Human
uguagagacgggguuucaccaugu

SEQ ID NO: 991211 - RNA, 20 nt, Human
uguccauuaaaaguauaacc

SEQ ID NO: 991212 - RNA, 24 nt, Human
uuguagagacgggguuucaccaug

SEQ ID NO: 991213 - RNA, 21 nt, Human
uuucaccauguugcccgggcu

SEQ ID NO: 991214 - RNA, 24 nt, Human
uuuguagagacgggguuucaccau

SEQ ID NO: 991215 - RNA, 23 nt, Human
uuuuuguagagacgggguuucac

SEQ ID NO: 991216 - RNA, 25 nt, Human
uuuuuuuuuuuuuuuuuuuuuaagg

SEQ ID NO: 991217 - RNA, 22 nt, Human
aaaagcgcagggaaguuccgcc

SEQ ID NO: 991218 - RNA, 22 nt, Human
aacaguaaacaugauaaauuuc

SEQ ID NO: 991219 - RNA, 18 nt, Human
aacauuucagagacuuuc

SEQ ID NO: 991220 - RNA, 22 nt, Human
accguaaagaguauggucugaa

SEQ ID NO: 991221 - RNA, 25 nt, Human
accguaaagaguauggucugaaaag

SEQ ID NO: 991222 - RNA, 19 nt, Human
accuuuugcgacgcgccuc

SEQ ID NO: 991223 - RNA, 21 nt, Human
agcaccacuaccccucauggu

SEQ ID NO: 991224 - RNA, 21 nt, Human
agggcaaagaaggauuaaaaa

SEQ ID NO: 991225 - RNA, 23 nt, Human
auacagaaagucaugaaucuaau

SEQ ID NO: 991226 - RNA, 21 nt, Human
aucaaauuuuuuuuuauuuuu

SEQ ID NO: 991227 - RNA, 22 nt, Human
caaaagaaaagagugcacuuca

SEQ ID NO: 991228 - RNA, 21 nt, Human
caggagacuucuuccuggcua

SEQ ID NO: 991229 - RNA, 20 nt, Human
cccuagcaccacuaccccuc

SEQ ID NO: 991230 - RNA, 20 nt, Human
ccuauauugccuaaaaacga

SEQ ID NO: 991231 - RNA, 23 nt, Human
cuaauuccaaaagaaaagagugc

SEQ ID NO: 991232 - RNA, 21 nt, Human
cuaugccaguacugaaacucu

SEQ ID NO: 991233 - RNA, 21 nt, Human
gccaguacugaaacucuccca

SEQ ID NO: 991234 - RNA, 20 nt, Human
ggcacugaguucaaaaccag

SEQ ID NO: 991235 - RNA, 19 nt, Human
guacugaaacucucccaaa

SEQ ID NO: 991236 - RNA, 19 nt, Human
uaaaaagcaauauucuaca

SEQ ID NO: 991237 - RNA, 24 nt, Human
uaagacauccuauauugccuaaaa

SEQ ID NO: 991238 - RNA, 19 nt, Human
uaggagaaaggguuucaga

SEQ ID NO: 991239 - RNA, 24 nt, Human
uaggagaaaggguuucagaaagaa

SEQ ID NO: 991240 - RNA, 27 nt, Human
uauugccuaaaaacgaacauuucagag

SEQ ID NO: 991241 - RNA, 26 nt, Human
ucaaaaccagugaagguugccuucuc

SEQ ID NO: 991242 - RNA, 18 nt, Human
ucagaaagaauuuugaca

SEQ ID NO: 991243 - RNA, 22 nt, Human
ucagagacuuucuuaggcacug

SEQ ID NO: 991244 - RNA, 22 nt, Human
ucaggagacuucuuccuggcua

SEQ ID NO: 991245 - RNA, 19 nt, Human
ucucccuagcaccacuacc

SEQ ID NO: 991246 - RNA, 22 nt, Human
ugaaaagcgcagggaaguuccg

SEQ ID NO: 991247 - RNA, 23 nt, Human
ugaguucaaaaccagugaagguu

SEQ ID NO: 991248 - RNA, 18 nt, Human
ugauagcauaucagaucu

SEQ ID NO: 991249 - RNA, 21 nt, Human
ugccaguacugaaacucuccc

SEQ ID NO: 991250 - RNA, 18 nt, Human
uucuuugacaacugucuc

SEQ ID NO: 991251 - RNA, 22 nt, Human
aacagaaugacaaagaacccau

SEQ ID NO: 991252 - RNA, 21 nt, Human
acagaaugacaaagaacccau

SEQ ID NO: 991253 - RNA, 24 nt, Human
acuuaaaggcauauuaaagaaaaa

SEQ ID NO: 991254 - RNA, 24 nt, Human
agaaaaagacuuuuauacauagua

SEQ ID NO: 991255 - RNA, 21 nt, Human
aggcacauagaucucuuggcu

SEQ ID NO: 991256 - RNA, 23 nt, Human
agggcauuccaggcagcaggaaa

SEQ ID NO: 991257 - RNA, 20 nt, Human
aucucaacggacagaauagg

SEQ ID NO: 991258 - RNA, 22 nt, Human
caacggacagaauagguaacau

SEQ ID NO: 991259 - RNA, 25 nt, Human
cacaccaccacagugagccccgccg

SEQ ID NO: 991260 - RNA, 21 nt, Human
cauaguaacaaacugcaggua

SEQ ID NO: 991261 - RNA, 28 nt, Human
cccacucacaccaccacagugagccccg

SEQ ID NO: 991262 - RNA, 19 nt, Human
ccucccacucacaccacca

SEQ ID NO: 991263 - RNA, 19 nt, Human
ccuucggucuccauccucg

SEQ ID NO: 991264 - RNA, 20 nt, Human
cgccgccucccacucacacc

SEQ ID NO: 991265 - RNA, 19 nt, Human
cgcgccucaccccagcugc

SEQ ID NO: 991266 - RNA, 21 nt, Human
cucccacucacaccaccacag

SEQ ID NO: 991267 - RNA, 21 nt, Human
gacagaauagguaacauagaa

SEQ ID NO: 991268 - RNA, 18 nt, Human
gagccccgccggcggcgc

SEQ ID NO: 991269 - RNA, 22 nt, Human
gccgccucccacucacaccacc

SEQ ID NO: 991270 - RNA, 20 nt, Human
gccucgcgccucaccccagc

SEQ ID NO: 991271 - RNA, 22 nt, Human
gucgagugcgccgccucgcgcc

SEQ ID NO: 991272 - RNA, 21 nt, Human
uaacagaaugacaaagaaccc

SEQ ID NO: 991273 - RNA, 18 nt, Human
ugacaaagaacccaucag

SEQ ID NO: 991274 - RNA, 19 nt, Human
uuacucauuuuccagggua

SEQ ID NO: 991275 - RNA, 26 nt, Human
uuauacuaacagaaugacaaagaacc

SEQ ID NO: 991276 - RNA, 21 nt, Human
uuuauacauaguaacaaacug

SEQ ID NO: 991277 - RNA, 19 nt, Human
uuucugcuguacucuuuga

SEQ ID NO: 991278 - RNA, 19 nt, Human
uuuuuuuuuuuuuuuuguu

SEQ ID NO: 991279 - RNA, 22 nt, Human
uuuuuuuuuuuuuuuuguuagg

SEQ ID NO: 991280 - RNA, 18 nt, Human
aaaacaaaguuuguaagg

SEQ ID NO: 991281 - RNA, 18 nt, Human
aaaacagccagaacacau

SEQ ID NO: 991282 - RNA, 21 nt, Human
aaaaggccagcucagccaagc

SEQ ID NO: 991283 - RNA, 20 nt, Human
aaacaaaaagcuuuggaaac

SEQ ID NO: 991284 - RNA, 26 nt, Human
aauuaaaaauaauuuccucaccuagc

SEQ ID NO: 991285 - RNA, 25 nt, Human
accacaucuauacuucacaagcauc

SEQ ID NO: 991286 - RNA, 20 nt, Human
accgcagcucccgauaccga

SEQ ID NO: 991287 - RNA, 21 nt, Human
agaaaugcacaccuaguccuc

SEQ ID NO: 991288 - RNA, 20 nt, Human
agaaguccacaaaaaaggac

SEQ ID NO: 991289 - RNA, 20 nt, Human
agacacaugaaaaaaaucag

SEQ ID NO: 991290 - RNA, 21 nt, Human
agacacaugaaaaaaaucagg

SEQ ID NO: 991291 - RNA, 20 nt, Human
agagagaaguccacaaaaaa

SEQ ID NO: 991292 - RNA, 20 nt, Human
agaugcaguacaguugguga

SEQ ID NO: 991293 - RNA, 19 nt, Human
auagccaagaaagaaagaa

SEQ ID NO: 991294 - RNA, 25 nt, Human
auuaaaaauaauuuccucaccuagc

SEQ ID NO: 991295 - RNA, 23 nt, Human
auuaucguucaaaaacaaacacu

SEQ ID NO: 991296 - RNA, 19 nt, Human
auucuguaaacaaaaagcu

SEQ ID NO: 991297 - RNA, 24 nt, Human
caacgcugagagaucacugggaaa

SEQ ID NO: 991298 - RNA, 21 nt, Human
caagaaagaaagaauguacag

SEQ ID NO: 991299 - RNA, 20 nt, Human
cacugaaaagucuugccugc

SEQ ID NO: 991300 - RNA, 18 nt, Human
cacugaaacccaacuccc

SEQ ID NO: 991301 - RNA, 23 nt, Human
cacugcuacaaaaaauaaacaga

SEQ ID NO: 991302 - RNA, 19 nt, Human
cagcagaaucuuacaccgc

SEQ ID NO: 991303 - RNA, 20 nt, Human
cagcagaaucuuacaccgcu

SEQ ID NO: 991304 - RNA, 19 nt, Human
cagccaagcuuccuucugg

SEQ ID NO: 991305 - RNA, 21 nt, Human
cagcucagccaagcuuccuuc

SEQ ID NO: 991306 - RNA, 19 nt, Human
cagguccaaaauaaaguga

SEQ ID NO: 991307 - RNA, 24 nt, Human
caucaugaacugcguuccacaagg

SEQ ID NO: 991308 - RNA, 22 nt, Human
cauuccuauguuaaaaggccag

SEQ ID NO: 991309 - RNA, 22 nt, Human
ccacaaaaaaggacauguaaag

SEQ ID NO: 991310 - RNA, 18 nt, Human
ccacugaaacccaacucc

SEQ ID NO: 991311 - RNA, 22 nt, Human
ccagcgagaccagauguucuaa

SEQ ID NO: 991312 - RNA, 20 nt, Human
ccccacugaaacccaacucc

SEQ ID NO: 991313 - RNA, 22 nt, Human
ccccacugaaacccaacuccca

SEQ ID NO: 991314 - RNA, 21 nt, Human
ccggccggagccaccgcagcu

SEQ ID NO: 991315 - RNA, 19 nt, Human
cgacugaaagcucaguucu

SEQ ID NO: 991316 - RNA, 18 nt, Human
cggccggagccaccgcag

SEQ ID NO: 991317 - RNA, 25 nt, Human
cuacugcucuguggcacguuuccug

SEQ ID NO: 991318 - RNA, 19 nt, Human
cucagauuuuagucuaugg

SEQ ID NO: 991319 - RNA, 22 nt, Human
cucagccaagcuuccuucugga

SEQ ID NO: 991320 - RNA, 23 nt, Human
cuccaaagagagaaguccacaaa

SEQ ID NO: 991321 - RNA, 21 nt, Human
cugaaacccaacucccaaugc

SEQ ID NO: 991322 - RNA, 23 nt, Human
cugaaacccaacucccaaugcug

SEQ ID NO: 991323 - RNA, 20 nt, Human
gaaggucaaguuguugagac

SEQ ID NO: 991324 - RNA, 20 nt, Human
gauguacaaugcacauucug

SEQ ID NO: 991325 - RNA, 18 nt, Human
gccaggacaaccggccgg

SEQ ID NO: 991326 - RNA, 22 nt, Human
gcugagagaucacugggaaaaa

SEQ ID NO: 991327 - RNA, 21 nt, Human
ggaaaacaaaguuuguaaggg

SEQ ID NO: 991328 - RNA, 23 nt, Human
ggagaaaugcacaccuaguccuc

SEQ ID NO: 991329 - RNA, 19 nt, Human
ggguguggggugggggcgg

SEQ ID NO: 991330 - RNA, 27 nt, Human
guguggggugggggcgggcgggggggc

SEQ ID NO: 991331 - RNA, 18 nt, Human
guuaaaaaauucucagau

SEQ ID NO: 991332 - RNA, 22 nt, Human
guucucugagauuuuucagaau

SEQ ID NO: 991333 - RNA, 18 nt, Human
uaaacagauaguugugug

SEQ ID NO: 991334 - RNA, 23 nt, Human
uacacauauacaaaucucagaca

SEQ ID NO: 991335 - RNA, 21 nt, Human
uaccuggagccgacugaaagc

SEQ ID NO: 991336 - RNA, 21 nt, Human
uaccuuuagcauuaaacauuu

SEQ ID NO: 991337 - RNA, 24 nt, Human
uccacaaaaaaggacauguaaagg

SEQ ID NO: 991338 - RNA, 23 nt, Human
ucgagaucacagcagguccaaaa

SEQ ID NO: 991339 - RNA, 24 nt, Human
ucggccacugcuacaaaaaauaaa

SEQ ID NO: 991340 - RNA, 23 nt, Human
ucuaaguauagacaugccccacu

SEQ ID NO: 991341 - RNA, 21 nt, Human
ucuccaaagagagaaguccac

SEQ ID NO: 991342 - RNA, 22 nt, Human
ucugaauagccaagaaagaaag

SEQ ID NO: 991343 - RNA, 24 nt, Human
ucuguaaacaaaaagcuuuggaaa

SEQ ID NO: 991344 - RNA, 20 nt, Human
ugacucaugaaaaucuucau

SEQ ID NO: 991345 - RNA, 19 nt, Human
ugagaacacaagucaaaua

SEQ ID NO: 991346 - RNA, 21 nt, Human
ugagaacacaagucaaauaca

SEQ ID NO: 991347 - RNA, 26 nt, Human
ugagaacacaagucaaauacauuuaa

SEQ ID NO: 991348 - RNA, 18 nt, Human
ugcugagaacacaaguca

SEQ ID NO: 991349 - RNA, 18 nt, Human
ugggggcgggcggggggg

SEQ ID NO: 991350 - RNA, 25 nt, Human
uggggugggggcgggcgggggggcu

SEQ ID NO: 991351 - RNA, 26 nt, Human
uggggugggggcgggcgggggggcug

SEQ ID NO: 991352 - RNA, 24 nt, Human
uguacccaaccauucuauuuuucu

SEQ ID NO: 991353 - RNA, 18 nt, Human
uguggaaaagagaggaug

SEQ ID NO: 991354 - RNA, 21 nt, Human
uuccugaugaaaagcuaggag

SEQ ID NO: 991355 - RNA, 21 nt, Human
uuucuaaacuucuaaccugaa

SEQ ID NO: 991356 - RNA, 18 nt, Human
uuuguaaggguucaguuc

SEQ ID NO: 991357 - RNA, 19 nt, Human
aaacaagagcagagaggcc

SEQ ID NO: 991358 - RNA, 26 nt, Human
aaacagaaagcaguacauauacagag

SEQ ID NO: 991359 - RNA, 23 nt, Human
aaagugcugagggccaaacggga

SEQ ID NO: 991360 - RNA, 24 nt, Human
aacacagaggcaggguaagaggga

SEQ ID NO: 991361 - RNA, 20 nt, Human
aaccugggggagcuggagcu

SEQ ID NO: 991362 - RNA, 23 nt, Human
aagaggccggggugacuggagca

SEQ ID NO: 991363 - RNA, 23 nt, Human
aaggugugcugaaguggcaggag

SEQ ID NO: 991364 - RNA, 24 nt, Human
aaugagaaaacuggcagggaagga

SEQ ID NO: 991365 - RNA, 19 nt, Human
aauguggagugggggaaag

SEQ ID NO: 991366 - RNA, 19 nt, Human
acaaugcaacaaaacagaa

SEQ ID NO: 991367 - RNA, 20 nt, Human
acacaggcccugcuggcacu

SEQ ID NO: 991368 - RNA, 21 nt, Human
acagaaagcaguacauauaca

SEQ ID NO: 991369 - RNA, 18 nt, Human
accccuuuccugccccuc

SEQ ID NO: 991370 - RNA, 22 nt, Human
accuagcugcaacugugugcac

SEQ ID NO: 991371 - RNA, 23 nt, Human
acgcagcuccaggcccgcccucc

SEQ ID NO: 991372 - RNA, 22 nt, Human
acuagugcaagaaaguccuacu

SEQ ID NO: 991373 - RNA, 19 nt, Human
acuggagcagaagacccug

SEQ ID NO: 991374 - RNA, 21 nt, Human
acugggcaaggccuugggcug

SEQ ID NO: 991375 - RNA, 22 nt, Human
agagaggaugggagucuccaag

SEQ ID NO: 991376 - RNA, 24 nt, Human
agagaggaugggagucuccaaggg

SEQ ID NO: 991377 - RNA, 24 nt, Human
agagcuucuccccucugugccccc

SEQ ID NO: 991378 - RNA, 23 nt, Human
agcccccacuuccucccuuuuuu

SEQ ID NO: 991379 - RNA, 19 nt, Human
agcucucccuuccccaucc

SEQ ID NO: 991380 - RNA, 21 nt, Human
agcuggguaagggaggaaggg

SEQ ID NO: 991381 - RNA, 20 nt, Human
aggacacaggcccugcuggc

SEQ ID NO: 991382 - RNA, 19 nt, Human
aggcaggguaagagggagg

SEQ ID NO: 991383 - RNA, 22 nt, Human
aggcaggguaagagggagggca

SEQ ID NO: 991384 - RNA, 25 nt, Human
aggcuggggacggggacaggguggg

SEQ ID NO: 991385 - RNA, 22 nt, Human
aggguggugggguggauggggg

SEQ ID NO: 991386 - RNA, 19 nt, Human
aggugugcugaaguggcag

SEQ ID NO: 991387 - RNA, 20 nt, Human
aguccucuagccugacucaa

SEQ ID NO: 991388 - RNA, 20 nt, Human
caacaaaacagaaagcagua

SEQ ID NO: 991389 - RNA, 21 nt, Human
caaggccagcucucccuuccc

SEQ ID NO: 991390 - RNA, 19 nt, Human
cacacagcagaccagagca

SEQ ID NO: 991391 - RNA, 21 nt, Human
cacagcagaccagagcaaggc

SEQ ID NO: 991392 - RNA, 20 nt, Human
cacagcuuaacuggggcccc

SEQ ID NO: 991393 - RNA, 20 nt, Human
cacgcagcuccaggcccgcc

SEQ ID NO: 991394 - RNA, 18 nt, Human
cacuaaaggcucccuggc

SEQ ID NO: 991395 - RNA, 22 nt, Human
cacugggcaaggccuugggcug

SEQ ID NO: 991396 - RNA, 24 nt, Human
cagagcaaggcuaauggcucccaa

SEQ ID NO: 991397 - RNA, 19 nt, Human
cagaggcaggguaagaggg

SEQ ID NO: 991398 - RNA, 18 nt, Human
cagcccccacuuccuccc

SEQ ID NO: 991399 - RNA, 25 nt, Human
cagcccccacuuccucccuuuuuuu

SEQ ID NO: 991400 - RNA, 21 nt, Human
cagccuuuuguuuugaggccc

SEQ ID NO: 991401 - RNA, 20 nt, Human
cagcuccaggcccgcccucc

SEQ ID NO: 991402 - RNA, 21 nt, Human
cagcuccaggcccgcccuccc

SEQ ID NO: 991403 - RNA, 21 nt, Human
cagcugaaaagagcacucuag

SEQ ID NO: 991404 - RNA, 19 nt, Human
cagcuuaacuggggccccg

SEQ ID NO: 991405 - RNA, 19 nt, Human
caggacacaggcccugcug

SEQ ID NO: 991406 - RNA, 19 nt, Human
caggcccaaagugcugagg

SEQ ID NO: 991407 - RNA, 22 nt, Human
caguaacccauagagucaggga

SEQ ID NO: 991408 - RNA, 24 nt, Human
caugggaggagccccuccccccca

SEQ ID NO: 991409 - RNA, 24 nt, Human
cauucuguuggagcugcuuuuggg

SEQ ID NO: 991410 - RNA, 21 nt, Human
ccaagcaccugccccuuuacu

SEQ ID NO: 991411 - RNA, 22 nt, Human
ccacugggcaaggccuugggcu

SEQ ID NO: 991412 - RNA, 22 nt, Human
ccagcacucuuccccuccccag

SEQ ID NO: 991413 - RNA, 21 nt, Human
ccaggcccaaagugcugaggg

SEQ ID NO: 991414 - RNA, 20 nt, Human
cccaaagugcugagggccaa

SEQ ID NO: 991415 - RNA, 23 nt, Human
cccaaggccaagaucuccagggc

SEQ ID NO: 991416 - RNA, 23 nt, Human
cccacaaugcaacaaaacagaaa

SEQ ID NO: 991417 - RNA, 21 nt, Human
cccacacagcagaccagagca

SEQ ID NO: 991418 - RNA, 26 nt, Human
cccacacagcagaccagagcaaggcu

SEQ ID NO: 991419 - RNA, 18 nt, Human
cccagguggggcaaggug

SEQ ID NO: 991420 - RNA, 21 nt, Human
cccauagagucagggauggaa

SEQ ID NO: 991421 - RNA, 20 nt, Human
ccccaacccacacagcagac

SEQ ID NO: 991422 - RNA, 24 nt, Human
ccccaacccacacagcagaccaga

SEQ ID NO: 991423 - RNA, 20 nt, Human
ccccaaggccaagaucucca

SEQ ID NO: 991424 - RNA, 23 nt, Human
cccccacuuccucccuuuuuuug

SEQ ID NO: 991425 - RNA, 20 nt, Human
cccccgcccccaccuuaucc

SEQ ID NO: 991426 - RNA, 20 nt, Human
ccccucccccccaaccuggg

SEQ ID NO: 991427 - RNA, 19 nt, Human
ccccucugugccccccaac

SEQ ID NO: 991428 - RNA, 21 nt, Human
ccccuuuccccugccacuggg

SEQ ID NO: 991429 - RNA, 20 nt, Human
cccgcccccaccuuauccua

SEQ ID NO: 991430 - RNA, 21 nt, Human
cccgcccccaccuuauccuac

SEQ ID NO: 991431 - RNA, 19 nt, Human
cccucccccccaaccuggg

SEQ ID NO: 991432 - RNA, 19 nt, Human
cccuuuacuucccaguccc

SEQ ID NO: 991433 - RNA, 22 nt, Human
ccgcccccaccuuauccuacac

SEQ ID NO: 991434 - RNA, 22 nt, Human
ccuaccucaacacuuaucgccc

SEQ ID NO: 991435 - RNA, 19 nt, Human
ccucccccccaaccugggg

SEQ ID NO: 991436 - RNA, 23 nt, Human
ccucccuuuuuuugcuaagcccc

SEQ ID NO: 991437 - RNA, 19 nt, Human
ccucucccccuuccguauc

SEQ ID NO: 991438 - RNA, 19 nt, Human
ccucuccucucccccuucc

SEQ ID NO: 991439 - RNA, 19 nt, Human
ccucuccucucccccuucc

SEQ ID NO: 991440 - RNA, 21 nt, Human
ccugaggcccucuggccauuc

SEQ ID NO: 991441 - RNA, 19 nt, Human
ccugccacugggcaaggcc

SEQ ID NO: 991442 - RNA, 21 nt, Human
ccugugcucuuuccccagagg

SEQ ID NO: 991443 - RNA, 25 nt, Human
ccuuuuucuccuggaugaguuuugc

SEQ ID NO: 991444 - RNA, 22 nt, Human
cgcagcuccaggcccgcccucc

SEQ ID NO: 991445 - RNA, 19 nt, Human
cuagaaaggagccagcacu

SEQ ID NO: 991446 - RNA, 22 nt, Human
cucaacacuuaucgcccaucuc

SEQ ID NO: 991447 - RNA, 24 nt, Human
cuccaggcccgcccucccauucac

SEQ ID NO: 991448 - RNA, 25 nt, Human
cuccaggcccgcccucccauucacu

SEQ ID NO: 991449 - RNA, 24 nt, Human
cucccugaggcccucuggccauuc

SEQ ID NO: 991450 - RNA, 19 nt, Human
cucccuggccugucccagg

SEQ ID NO: 991451 - RNA, 25 nt, Human
cucuccucucccccuuccguaucuc

SEQ ID NO: 991452 - RNA, 20 nt, Human
cugcagggccaaggcugggu

SEQ ID NO: 991453 - RNA, 20 nt, Human
cuggugcuucacgugugaug

SEQ ID NO: 991454 - RNA, 20 nt, Human
cugugugcaccucaucuccc

SEQ ID NO: 991455 - RNA, 23 nt, Human
cuuugagguggagugaggugccc

SEQ ID NO: 991456 - RNA, 18 nt, Human
gaccaaggccagcucucc

SEQ ID NO: 991457 - RNA, 20 nt, Human
gagcacucuagggcaugggg

SEQ ID NO: 991458 - RNA, 23 nt, Human
gagcugaugucagugugguggag

SEQ ID NO: 991459 - RNA, 23 nt, Human
gaggucuguccucccucccuacu

SEQ ID NO: 991460 - RNA, 20 nt, Human
gaugcaggaguuagaaggca

SEQ ID NO: 991461 - RNA, 19 nt, Human
gcacuuggugagggggaag

SEQ ID NO: 991462 - RNA, 20 nt, Human
gccauugcacugucugccgu

SEQ ID NO: 991463 - RNA, 18 nt, Human
gcccaucuccccaaagcc

SEQ ID NO: 991464 - RNA, 20 nt, Human
gcccucccauucacucacua

SEQ ID NO: 991465 - RNA, 20 nt, Human
gccuugggcuggucugagcc

SEQ ID NO: 991466 - RNA, 18 nt, Human
gcucugggcaaugccacc

SEQ ID NO: 991467 - RNA, 23 nt, Human
gcugaaguggcaggagggccagu

SEQ ID NO: 991468 - RNA, 20 nt, Human
gcuuaagucccuccucccca

SEQ ID NO: 991469 - RNA, 18 nt, Human
ggagcccaagcaccugcc

SEQ ID NO: 991470 - RNA, 22 nt, Human
ggagugaggugccccuuucccc

SEQ ID NO: 991471 - RNA, 24 nt, Human
ggcagggcccagggguaggguugg

SEQ ID NO: 991472 - RNA, 22 nt, Human
ggccuugggcuggucugagcca

SEQ ID NO: 991473 - RNA, 22 nt, Human
ggcuaggacaagauaggggagu

SEQ ID NO: 991474 - RNA, 21 nt, Human
gggacggggacagggugggga

SEQ ID NO: 991475 - RNA, 25 nt, Human
gggacggggacaggguggggauagg

SEQ ID NO: 991476 - RNA, 22 nt, Human
gggaguauaaggaccugggcca

SEQ ID NO: 991477 - RNA, 19 nt, Human
gggcaaugccaccagguuc

SEQ ID NO: 991478 - RNA, 18 nt, Human
ggggaagagaggauggga

SEQ ID NO: 991479 - RNA, 19 nt, Human
ggggaagagaggaugggag

SEQ ID NO: 991480 - RNA, 21 nt, Human
ggggguccgggcuggagggaa

SEQ ID NO: 991481 - RNA, 20 nt, Human
gggguccgggcuggagggaa

SEQ ID NO: 991482 - RNA, 22 nt, Human
gggguggggguagguugggggg

SEQ ID NO: 991483 - RNA, 19 nt, Human
ggguggggguagguugggg

SEQ ID NO: 991484 - RNA, 25 nt, Human
ggguuaaacaagagcagagaggccu

SEQ ID NO: 991485 - RNA, 23 nt, Human
ggucugagccaggggucuccugg

SEQ ID NO: 991486 - RNA, 21 nt, Human
gguggugggguggaugggggc

SEQ ID NO: 991487 - RNA, 20 nt, Human
guaggcuggggacggggaca

SEQ ID NO: 991488 - RNA, 26 nt, Human
gugaauaccuuugguaggcuggggac

SEQ ID NO: 991489 - RNA, 22 nt, Human
gugaggugccccuuuccccugc

SEQ ID NO: 991490 - RNA, 20 nt, Human
gugauggucccagguggggc

SEQ ID NO: 991491 - RNA, 19 nt, Human
gugccccccaacauucccu

SEQ ID NO: 991492 - RNA, 20 nt, Human
uaagccccauagaugggagg

SEQ ID NO: 991493 - RNA, 23 nt, Human
uacagggugaagaggaguauggg

SEQ ID NO: 991494 - RNA, 21 nt, Human
uaccauuuauuucuuuauggg

SEQ ID NO: 991495 - RNA, 21 nt, Human
uagagucagggauggaaaggu

SEQ ID NO: 991496 - RNA, 23 nt, Human
uaggaacuagugcaagaaagucc

SEQ ID NO: 991497 - RNA, 20 nt, Human
uaggggaguauaaggaccug

SEQ ID NO: 991498 - RNA, 20 nt, Human
uagggugguggggcacagcc

SEQ ID NO: 991499 - RNA, 24 nt, Human
uaggguggugggguggaugggggc

SEQ ID NO: 991500 - RNA, 26 nt, Human
uaggguggugggguggaugggggcag

SEQ ID NO: 991501 - RNA, 19 nt, Human
uaucgcccaucuccccaaa

SEQ ID NO: 991502 - RNA, 22 nt, Human
ucacugauuuggggagcaguuc

SEQ ID NO: 991503 - RNA, 22 nt, Human
ucagugugguggaggucugucc

SEQ ID NO: 991504 - RNA, 25 nt, Human
uccagggcaagaguggcccuuggga

SEQ ID NO: 991505 - RNA, 23 nt, Human
ucccagucccuuuuccccuucug

SEQ ID NO: 991506 - RNA, 24 nt, Human
ucccaugggaggagccccuccccc

SEQ ID NO: 991507 - RNA, 20 nt, Human
uccccaacccacacagcaga

SEQ ID NO: 991508 - RNA, 21 nt, Human
uccccaacccacacagcagac

SEQ ID NO: 991509 - RNA, 25 nt, Human
uccccauccgcuucuugguuucacu

SEQ ID NO: 991510 - RNA, 25 nt, Human
ucccuaagcugaccaaggccagcuc

SEQ ID NO: 991511 - RNA, 18 nt, Human
ucccuccuccccauggag

SEQ ID NO: 991512 - RNA, 24 nt, Human
ucccugaggcccucuggccauucu

SEQ ID NO: 991513 - RNA, 19 nt, Human
ucccuggacuuucucuugc

SEQ ID NO: 991514 - RNA, 23 nt, Human
ucccuggggucagggcuuuuggc

SEQ ID NO: 991515 - RNA, 21 nt, Human
ucccuuuuccccuucugagga

SEQ ID NO: 991516 - RNA, 18 nt, Human
ucgagccuaccucaacac

SEQ ID NO: 991517 - RNA, 18 nt, Human
ucuccucuccucuccccc

SEQ ID NO: 991518 - RNA, 28 nt, Human
ucugccccacaaugcaacaaaacagaaa

SEQ ID NO: 991519 - RNA, 18 nt, Human
ucuggagagcucugggca

SEQ ID NO: 991520 - RNA, 18 nt, Human
ucugugaugggaggcagg

SEQ ID NO: 991521 - RNA, 21 nt, Human
ugacagcacauuaucuuuagu

SEQ ID NO: 991522 - RNA, 21 nt, Human
ugaccaaggccagcucucccu

SEQ ID NO: 991523 - RNA, 19 nt, Human
ugaccaggcccaaagugcu

SEQ ID NO: 991524 - RNA, 22 nt, Human
ugacuggagcagaagacccugc

SEQ ID NO: 991525 - RNA, 24 nt, Human
ugagcagccuccuucccugggguc

SEQ ID NO: 991526 - RNA, 21 nt, Human
ugagccaggggucuccugggc

SEQ ID NO: 991527 - RNA, 25 nt, Human
ugaugggaggcaggggcagccggag

SEQ ID NO: 991528 - RNA, 21 nt, Human
ugcaacugugugcaccucauc

SEQ ID NO: 991529 - RNA, 20 nt, Human
ugccccaaggccaagaucuc

SEQ ID NO: 991530 - RNA, 18 nt, Human
ugccccacaaugcaacaa

SEQ ID NO: 991531 - RNA, 19 nt, Human
ugccccuuuacuuauacau

SEQ ID NO: 991532 - RNA, 19 nt, Human
ugcccggcucugcugucug

SEQ ID NO: 991533 - RNA, 25 nt, Human
ugccuagggugguggggcacagcuu

SEQ ID NO: 991534 - RNA, 22 nt, Human
uggaaaggugugaauaccuuug

SEQ ID NO: 991535 - RNA, 22 nt, Human
uggaaaggugugaauaccuuug

SEQ ID NO: 991536 - RNA, 19 nt, Human
uggagcagaagacccugcu

SEQ ID NO: 991537 - RNA, 26 nt, Human
uggagcccaagcaccugccccgaggg

SEQ ID NO: 991538 - RNA, 18 nt, Human
uggaggccugggcuagga

SEQ ID NO: 991539 - RNA, 18 nt, Human
uggcagggaaggacuccc

SEQ ID NO: 991540 - RNA, 21 nt, Human
uggcagggaaggacuccccuc

SEQ ID NO: 991541 - RNA, 19 nt, Human
uggcaggggugggcauauc

SEQ ID NO: 991542 - RNA, 20 nt, Human
ugggaccuagccgaggccca

SEQ ID NO: 991543 - RNA, 19 nt, Human
ugggaggcaggggcagccg

SEQ ID NO: 991544 - RNA, 18 nt, Human
ugggauccccccuacucc

SEQ ID NO: 991545 - RNA, 24 nt, Human
ugggcaaggccuugggcuggucug

SEQ ID NO: 991546 - RNA, 21 nt, Human
ugggcuggucugagccagggg

SEQ ID NO: 991547 - RNA, 22 nt, Human
ugggcuggucugagccaggggu

SEQ ID NO: 991548 - RNA, 18 nt, Human
uggggacggggacagggu

SEQ ID NO: 991549 - RNA, 19 nt, Human
uggggacggggacagggug

SEQ ID NO: 991550 - RNA, 20 nt, Human
uguaggcagggcccaggggu

SEQ ID NO: 991551 - RNA, 24 nt, Human
ugucugugaugggaggcaggggca

SEQ ID NO: 991552 - RNA, 21 nt, Human
ugugaauaccuuugguaggcu

SEQ ID NO: 991553 - RNA, 19 nt, Human
uguguaggcagggcccagg

SEQ ID NO: 991554 - RNA, 21 nt, Human
uguuggagcugcuuuuggggu

SEQ ID NO: 991555 - RNA, 20 nt, Human
uuaucaucaagucuuaccau

SEQ ID NO: 991556 - RNA, 21 nt, Human
uucucgagccuaccucaacac

SEQ ID NO: 991557 - RNA, 24 nt, Human
uucuguaccccuuuccugccccuc

SEQ ID NO: 991558 - RNA, 18 nt, Human
uuucccccgcccccaccu

SEQ ID NO: 991559 - RNA, 23 nt, Human
uuucccccgcccccaccuuaucc

SEQ ID NO: 991560 - RNA, 19 nt, Human
cacacagaaccacuacgca

SEQ ID NO: 991561 - RNA, 24 nt, Human
ccacacagaaccacuacgcaagcu

SEQ ID NO: 991562 - RNA, 19 nt, Human
ccccaacuggagcuuccag

SEQ ID NO: 991563 - RNA, 23 nt, Human
cgggaugggagccuccuuacccc

SEQ ID NO: 991564 - RNA, 24 nt, Human
uaccccaacuggagcuuccagcuc

SEQ ID NO: 991565 - RNA, 26 nt, Human
ucagcgccacacagaaccacuacgca

SEQ ID NO: 991566 - RNA, 22 nt, Human
uuuuuuuuuuuuuuuacuguuu

SEQ ID NO: 991567 - RNA, 21 nt, Human
aaccagaagggucagaaaccc

SEQ ID NO: 991568 - RNA, 21 nt, Human
aacccugcccuccuccugcca

SEQ ID NO: 991569 - RNA, 21 nt, Human
acccaacccugcccuccuccu

SEQ ID NO: 991570 - RNA, 20 nt, Human
agaaaccagaagggucagaa

SEQ ID NO: 991571 - RNA, 23 nt, Human
auccucugcauuuauuccauuca

SEQ ID NO: 991572 - RNA, 21 nt, Human
caccaccuccuuucccgcuuc

SEQ ID NO: 991573 - RNA, 20 nt, Human
cacccaacccugcccuccuc

SEQ ID NO: 991574 - RNA, 24 nt, Human
cagaagggucagaaaccccuaggc

SEQ ID NO: 991575 - RNA, 23 nt, Human
cauuuauuccauucauuucucuc

SEQ ID NO: 991576 - RNA, 21 nt, Human
ccaacccugcccuccuccugc

SEQ ID NO: 991577 - RNA, 24 nt, Human
cccaacccugcccuccuccugcag

SEQ ID NO: 991578 - RNA, 18 nt, Human
cccugcccuccuccugca

SEQ ID NO: 991579 - RNA, 19 nt, Human
ccuccugcaguccuccaag

SEQ ID NO: 991580 - RNA, 22 nt, Human
ccuccuuucccgcuucgcucuc

SEQ ID NO: 991581 - RNA, 21 nt, Human
ccuuccauugcccacccaacc

SEQ ID NO: 991582 - RNA, 23 nt, Human
cuccuuucccgcuucgcucuucc

SEQ ID NO: 991583 - RNA, 18 nt, Human
cucuccgcgccccccgcu

SEQ ID NO: 991584 - RNA, 21 nt, Human
cucuccucccuccuuccauug

SEQ ID NO: 991585 - RNA, 20 nt, Human
cuucgcucuccgcgcccccc

SEQ ID NO: 991586 - RNA, 23 nt, Human
gaaaccagaagggucagaaaccc

SEQ ID NO: 991587 - RNA, 22 nt, Human
gacaccaccuccuuucccgcuu

SEQ ID NO: 991588 - RNA, 20 nt, Human
gcgccccccgcucugagcuc

SEQ ID NO: 991589 - RNA, 23 nt, Human
uauuccauucauuucucuccucc

SEQ ID NO: 991590 - RNA, 18 nt, Human
ucagaaaccccuaggccu

SEQ ID NO: 991591 - RNA, 21 nt, Human
ucauuucucuccucccuccuu

SEQ ID NO: 991592 - RNA, 20 nt, Human
uccauucauuucucuccucc

SEQ ID NO: 991593 - RNA, 26 nt, Human
uggcaccaccgguugcuaggcaacca

SEQ ID NO: 991594 - RNA, 22 nt, Human
uguucacagacaccaccuccuu

SEQ ID NO: 991595 - RNA, 18 nt, Human
uuuuuuuuuuuuuuuuug

SEQ ID NO: 991596 - RNA, 22 nt, Human
cacuauuuguaaaucucuccug

SEQ ID NO: 991597 - RNA, 20 nt, Human
cccggcgaggggcgggaagg

SEQ ID NO: 991598 - RNA, 22 nt, Human
gaaggggcugugggaggaaggg

SEQ ID NO: 991599 - RNA, 23 nt, Human
ggcgggaaggggcugugggagga

SEQ ID NO: 991600 - RNA, 20 nt, Human
ggcugugggaggaagggguc

SEQ ID NO: 991601 - RNA, 18 nt, Human
gguaucaaaaccacaccc

SEQ ID NO: 991602 - RNA, 23 nt, Human
uaacuuagggguaucaaaaccac

SEQ ID NO: 991603 - RNA, 19 nt, Human
ucaaaaccacacccggugg

SEQ ID NO: 991604 - RNA, 26 nt, Human
ucagccuuaacuuagggguaucaaaa

SEQ ID NO: 991605 - RNA, 22 nt, Human
ugacuauauuagcauucgguuc

SEQ ID NO: 991606 - RNA, 19 nt, Human
ugcugagacagugcucugg

SEQ ID NO: 991607 - RNA, 22 nt, Human
ugggaggaaggggucgcagccu

SEQ ID NO: 991608 - RNA, 20 nt, Human
uuuguaaaucucuccugucc

SEQ ID NO: 991609 - RNA, 23 nt, Human
agaaaaucccucauuucauccac

SEQ ID NO: 991610 - RNA, 22 nt, Human
aucccucauuucauccacaauc

SEQ ID NO: 991611 - RNA, 23 nt, Human
caagaaaaucccucauuucaucc

SEQ ID NO: 991612 - RNA, 23 nt, Human
ccauggggaaggcuuggccucca

SEQ ID NO: 991613 - RNA, 20 nt, Human
cccucauuucauccacaauc

SEQ ID NO: 991614 - RNA, 29 nt, Human
cuuggccuccacuguggccuuccuguuuu

SEQ ID NO: 991615 - RNA, 18 nt, Human
uuaaugugauaauggauu

SEQ ID NO: 991616 - RNA, 22 nt, Human
uuggccuccacuguggccuucc

SEQ ID NO: 991617 - RNA, 19 nt, Human
aaaaaaaaaaaaaaagagg

SEQ ID NO: 991618 - RNA, 22 nt, Human
aaaaaaaaaaagacuuaaagag

SEQ ID NO: 991619 - RNA, 19 nt, Human
aaaaagacuuaaagagcac

SEQ ID NO: 991620 - RNA, 20 nt, Human
aaaauaagcacugagucuug

SEQ ID NO: 991621 - RNA, 23 nt, Human
aaacacccauucuacacagauaa

SEQ ID NO: 991622 - RNA, 19 nt, Human
aaacagaaagacuaaaaac

SEQ ID NO: 991623 - RNA, 21 nt, Human
aaagaagccaaaccaaaacca

SEQ ID NO: 991624 - RNA, 25 nt, Human
aaagaagccaaaccaaaaccauuua

SEQ ID NO: 991625 - RNA, 22 nt, Human
aaccuuuguuuugugccauccu

SEQ ID NO: 991626 - RNA, 20 nt, Human
aacguggugaaaccccgucu

SEQ ID NO: 991627 - RNA, 21 nt, Human
aacguggugaaaccccgucuc

SEQ ID NO: 991628 - RNA, 25 nt, Human
aagaaggaaauauaaaauguuuaga

SEQ ID NO: 991629 - RNA, 18 nt, Human
aagaccagccuggccaac

SEQ ID NO: 991630 - RNA, 23 nt, Human
aagaucacgccacugcacuccag

SEQ ID NO: 991631 - RNA, 22 nt, Human
aaggggauuaaaaaaaaaaaga

SEQ ID NO: 991632 - RNA, 23 nt, Human
aaguaauccagagcugaaacuga

SEQ ID NO: 991633 - RNA, 24 nt, Human
aaucacuugaacccgggagacgga

SEQ ID NO: 991634 - RNA, 18 nt, Human
acaaaacagaucuguaga

SEQ ID NO: 991635 - RNA, 21 nt, Human
accccgucucuacuaaaacua

SEQ ID NO: 991636 - RNA, 18 nt, Human
acgccacugcacuccagc

SEQ ID NO: 991637 - RNA, 21 nt, Human
acgccacugcacuccagccug

SEQ ID NO: 991638 - RNA, 22 nt, Human
acggaaguugcagugagccaag

SEQ ID NO: 991639 - RNA, 28 nt, Human
acuccgucucaaaaaaaaaaaaaaaaaa

SEQ ID NO: 991640 - RNA, 18 nt, Human
acugcacuccagccuggg

SEQ ID NO: 991641 - RNA, 25 nt, Human
acugcacuccagccuggguaacaag

SEQ ID NO: 991642 - RNA, 22 nt, Human
agaaucacuugaacccgggaga

SEQ ID NO: 991643 - RNA, 24 nt, Human
agacggaaguugcagugagccaag

SEQ ID NO: 991644 - RNA, 21 nt, Human
agaguagccagccaucuuaaa

SEQ ID NO: 991645 - RNA, 19 nt, Human
agccaucuuaaaaaugccc

SEQ ID NO: 991646 - RNA, 22 nt, Human
agccuggccaacguggugaaac

SEQ ID NO: 991647 - RNA, 24 nt, Human
agccuggccaacguggugaaaccc

SEQ ID NO: 991648 - RNA, 18 nt, Human
aggcaggagaaucacuug

SEQ ID NO: 991649 - RNA, 24 nt, Human
aggcaggagaaucacuugaacccg

SEQ ID NO: 991650 - RNA, 24 nt, Human
aggcugaggcaggagaaucacuug

SEQ ID NO: 991651 - RNA, 21 nt, Human
aggggauuaaaaaaaaaaaga

SEQ ID NO: 991652 - RNA, 21 nt, Human
aguagccagccaucuuaaaaa

SEQ ID NO: 991653 - RNA, 18 nt, Human
agucaugguccauucagg

SEQ ID NO: 991654 - RNA, 24 nt, Human
aucacgccacugcacuccagccug

SEQ ID NO: 991655 - RNA, 18 nt, Human
aucccaucucuguccccu

SEQ ID NO: 991656 - RNA, 18 nt, Human
auccugaagacuugcaca

SEQ ID NO: 991657 - RNA, 18 nt, Human
auccugaagacuugcaca

SEQ ID NO: 991658 - RNA, 22 nt, Human
aucucuguccccugaaauuccc

SEQ ID NO: 991659 - RNA, 24 nt, Human
caacaaaucccaucucuguccccu

SEQ ID NO: 991660 - RNA, 24 nt, Human
caacguggugaaaccccgucucua

SEQ ID NO: 991661 - RNA, 24 nt, Human
caacugaaguaauccagagcugaa

SEQ ID NO: 991662 - RNA, 22 nt, Human
caaggcaggcaaauguuucucc

SEQ ID NO: 991663 - RNA, 21 nt, Human
cacagauaaaaaccuucacaa

SEQ ID NO: 991664 - RNA, 19 nt, Human
caccuauaaacccagcuac

SEQ ID NO: 991665 - RNA, 24 nt, Human
caccuauaaacccagcuacuuggg

SEQ ID NO: 991666 - RNA, 24 nt, Human
cacuccagccuggguaacaagagc

SEQ ID NO: 991667 - RNA, 19 nt, Human
cacugcacuccagccuggg

SEQ ID NO: 991668 - RNA, 19 nt, Human
cacugcacuccagccuggg

SEQ ID NO: 991669 - RNA, 22 nt, Human
cacugcacuccagccuggguaa

SEQ ID NO: 991670 - RNA, 23 nt, Human
cacugcacuccagccuggguaac

SEQ ID NO: 991671 - RNA, 24 nt, Human
cacugcacuccagccuggguaaca

SEQ ID NO: 991672 - RNA, 20 nt, Human
cagauaaaaaccuucacaaa

SEQ ID NO: 991673 - RNA, 24 nt, Human
cagcuacuugggaggcugaggcag

SEQ ID NO: 991674 - RNA, 18 nt, Human
caggaugcaacauauaua

SEQ ID NO: 991675 - RNA, 21 nt, Human
caguauaaaaaguacaaaaca

SEQ ID NO: 991676 - RNA, 18 nt, Human
ccacucagauguugucaa

SEQ ID NO: 991677 - RNA, 20 nt, Human
ccacugcacuccagccuggg

SEQ ID NO: 991678 - RNA, 20 nt, Human
ccacugcacuccagccuggg

SEQ ID NO: 991679 - RNA, 20 nt, Human
ccacugcacuccagccuggg

SEQ ID NO: 991680 - RNA, 21 nt, Human
ccacugcacuccagccugggu

SEQ ID NO: 991681 - RNA, 22 nt, Human
ccacugcacuccagccugggua

SEQ ID NO: 991682 - RNA, 24 nt, Human
ccacugcacuccagccuggguaac

SEQ ID NO: 991683 - RNA, 20 nt, Human
ccauccugaagacuugcaca

SEQ ID NO: 991684 - RNA, 21 nt, Human
cccccucaagcgcucccuccu

SEQ ID NO: 991685 - RNA, 22 nt, Human
ccccgucucuacuaaaacuaaa

SEQ ID NO: 991686 - RNA, 21 nt, Human
ccccugaaauuccccuaguuu

SEQ ID NO: 991687 - RNA, 23 nt, Human
cccucauuuugaaaagacugaac

SEQ ID NO: 991688 - RNA, 22 nt, Human
cccuucuacauaaaaaccucag

SEQ ID NO: 991689 - RNA, 24 nt, Human
ccucaaagacugugggagagccaa

SEQ ID NO: 991690 - RNA, 19 nt, Human
ccucaagcgcucccuccuc

SEQ ID NO: 991691 - RNA, 26 nt, Human
ccucaagcgcucccuccuccucaacu

SEQ ID NO: 991692 - RNA, 23 nt, Human
ccuggccaacguggugaaacccc

SEQ ID NO: 991693 - RNA, 24 nt, Human
ccuggccaacguggugaaaccccg

SEQ ID NO: 991694 - RNA, 26 nt, Human
cgccacugcacuccagccuggguaac

SEQ ID NO: 991695 - RNA, 18 nt, Human
cuacucuagaaauugucu

SEQ ID NO: 991696 - RNA, 25 nt, Human
cucaaaacagaaagacuaaaaacua

SEQ ID NO: 991697 - RNA, 25 nt, Human
cucaagcgcucccuccuccucaacu

SEQ ID NO: 991698 - RNA, 19 nt, Human
cuccgucucaaaaaaaaaa

SEQ ID NO: 991699 - RNA, 26 nt, Human
cucugguuuggguucaagugagaggc

SEQ ID NO: 991700 - RNA, 24 nt, Human
cuggcuucagaguuugugggagug

SEQ ID NO: 991701 - RNA, 21 nt, Human
gaaggggauuaaaaaaaaaaa

SEQ ID NO: 991702 - RNA, 18 nt, Human
gaaguugcagugagccaa

SEQ ID NO: 991703 - RNA, 19 nt, Human
gaaguugcagugagccaag

SEQ ID NO: 991704 - RNA, 25 nt, Human
gacuugccauuuccccaagaggagc

SEQ ID NO: 991705 - RNA, 22 nt, Human
gagggucauuuaagaccagccu

SEQ ID NO: 991706 - RNA, 22 nt, Human
gcaggagaaucacuugaacccg

SEQ ID NO: 991707 - RNA, 24 nt, Human
gccaacguggugaaaccccgucuc

SEQ ID NO: 991708 - RNA, 20 nt, Human
gccaagaucacgccacugca

SEQ ID NO: 991709 - RNA, 19 nt, Human
gccacugcacuccagccug

SEQ ID NO: 991710 - RNA, 21 nt, Human
gccacugcacuccagccuggg

SEQ ID NO: 991711 - RNA, 19 nt, Human
gcggagugcacgccaggcc

SEQ ID NO: 991712 - RNA, 23 nt, Human
gcugaaacugaauugugcagauu

SEQ ID NO: 991713 - RNA, 20 nt, Human
ggaaguugcagugagccaag

SEQ ID NO: 991714 - RNA, 24 nt, Human
ggaaguugcagugagccaagauca

SEQ ID NO: 991715 - RNA, 20 nt, Human
ggguucaagugagaggcuuu

SEQ ID NO: 991716 - RNA, 23 nt, Human
ggucaacugaaguaauccagagc

SEQ ID NO: 991717 - RNA, 19 nt, Human
guagcuuugugguuuuuca

SEQ ID NO: 991718 - RNA, 19 nt, Human
guuuggguucaagugagag

SEQ ID NO: 991719 - RNA, 23 nt, Human
guuuugugccauccugaagacuu

SEQ ID NO: 991720 - RNA, 23 nt, Human
uaaaaaaaaaaagacuuaaagag

SEQ ID NO: 991721 - RNA, 21 nt, Human
uaaaaaugccccaaccacugc

SEQ ID NO: 991722 - RNA, 22 nt, Human
uaaaagaagccaaaccaaaacc

SEQ ID NO: 991723 - RNA, 19 nt, Human
uaaacccagcuacuuggga

SEQ ID NO: 991724 - RNA, 25 nt, Human
uaaacccagcuacuugggaggcuga

SEQ ID NO: 991725 - RNA, 23 nt, Human
uaaagacuugccauuuccccaag

SEQ ID NO: 991726 - RNA, 23 nt, Human
uaaauaaauacagaaguagagau

SEQ ID NO: 991727 - RNA, 19 nt, Human
uaacacaaacaaaagucga

SEQ ID NO: 991728 - RNA, 18 nt, Human
uaagaaaugugccccaag

SEQ ID NO: 991729 - RNA, 23 nt, Human
uaauaggcuaaaacaagucaaac

SEQ ID NO: 991730 - RNA, 22 nt, Human
uacagagugaaagaaaauaaaa

SEQ ID NO: 991731 - RNA, 22 nt, Human
uacaguacauccuacaggcaaa

SEQ ID NO: 991732 - RNA, 23 nt, Human
uaggcuaaaacaagucaaacacc

SEQ ID NO: 991733 - RNA, 20 nt, Human
uaucauacaacaaaucccaa

SEQ ID NO: 991734 - RNA, 19 nt, Human
uaucucaauguucagaaag

SEQ ID NO: 991735 - RNA, 21 nt, Human
ucaaaaaaaaaaaaaaaaaaa

SEQ ID NO: 991736 - RNA, 23 nt, Human
ucaacccauucaaaacuacucua

SEQ ID NO: 991737 - RNA, 18 nt, Human
ucaacucacuguauaguc

SEQ ID NO: 991738 - RNA, 23 nt, Human
ucacgccacugcacuccagccug

SEQ ID NO: 991739 - RNA, 22 nt, Human
uccccaagaggagcuuugauuc

SEQ ID NO: 991740 - RNA, 21 nt, Human
ucccuccuccucaacugccuu

SEQ ID NO: 991741 - RNA, 23 nt, Human
uccgucucaaaaaaaaaaaaaaa

SEQ ID NO: 991742 - RNA, 18 nt, Human
uccucaacugccuugucu

SEQ ID NO: 991743 - RNA, 20 nt, Human
ucucuacuaaaacuaaaaaa

SEQ ID NO: 991744 - RNA, 19 nt, Human
ucuuaggauugaagagcuc

SEQ ID NO: 991745 - RNA, 23 nt, Human
ucuuaggucaauuagcuguccac

SEQ ID NO: 991746 - RNA, 20 nt, Human
ucuucugggcaauagucugg

SEQ ID NO: 991747 - RNA, 20 nt, Human
ugaggcaggagaaucacuug

SEQ ID NO: 991748 - RNA, 24 nt, Human
ugaggcaggagaaucacuugaacc

SEQ ID NO: 991749 - RNA, 25 nt, Human
ugaggcaggagaaucacuugaaccc

SEQ ID NO: 991750 - RNA, 22 nt, Human
ugcaacagaaagcucagucugu

SEQ ID NO: 991751 - RNA, 23 nt, Human
ugccuugucuagaaagauagucu

SEQ ID NO: 991752 - RNA, 22 nt, Human
uggaaggggaaaaagaagacug

SEQ ID NO: 991753 - RNA, 24 nt, Human
uggccaacguggugaaaccccguc

SEQ ID NO: 991754 - RNA, 19 nt, Human
ugggaggcugaggcaggag

SEQ ID NO: 991755 - RNA, 20 nt, Human
ugggaggcugaggcaggaga

SEQ ID NO: 991756 - RNA, 24 nt, Human
ugggaggcugaggcaggagaauca

SEQ ID NO: 991757 - RNA, 18 nt, Human
ugggggaaaucaacccau

SEQ ID NO: 991758 - RNA, 20 nt, Human
uggguucaagugagaggcuu

SEQ ID NO: 991759 - RNA, 21 nt, Human
uggucugaagucuuaggucaa

SEQ ID NO: 991760 - RNA, 24 nt, Human
uggugaaucagagacagggaucuu

SEQ ID NO: 991761 - RNA, 18 nt, Human
uguccccgaggugcggag

SEQ ID NO: 991762 - RNA, 19 nt, Human
uguccccugaaauuccccu

SEQ ID NO: 991763 - RNA, 19 nt, Human
uuaaaaaugccccaaccac

SEQ ID NO: 991764 - RNA, 19 nt, Human
uucaggguugaagcuguuu

SEQ ID NO: 991765 - RNA, 20 nt, Human
uuccaaaagaaggaaauaua

SEQ ID NO: 991766 - RNA, 22 nt, Human
uugaaaagacugaacuggcaau

SEQ ID NO: 991767 - RNA, 20 nt, Human
uugcagugagccaagaucac

SEQ ID NO: 991768 - RNA, 25 nt, Human
uugggaggcugaggcaggagaauca

SEQ ID NO: 991769 - RNA, 24 nt, Human
aagaacacaaaaacaauuuuuaua

SEQ ID NO: 991770 - RNA, 24 nt, Human
accugggcgaagucugucuccggc

SEQ ID NO: 991771 - RNA, 18 nt, Human
aggaaggacggggcgggg

SEQ ID NO: 991772 - RNA, 18 nt, Human
agugaccgcccgggaagg

SEQ ID NO: 991773 - RNA, 23 nt, Human
caccugggcgaagucugucuccg

SEQ ID NO: 991774 - RNA, 21 nt, Human
cccacggcugagccgcggccg

SEQ ID NO: 991775 - RNA, 21 nt, Human
ccccagccccgcguuagagcc

SEQ ID NO: 991776 - RNA, 25 nt, Human
cccccagccccgcguuagagcccac

SEQ ID NO: 991777 - RNA, 18 nt, Human
ccccuacuacccgucacc

SEQ ID NO: 991778 - RNA, 27 nt, Human
cccugacugccaaaucacauuccuucc

SEQ ID NO: 991779 - RNA, 20 nt, Human
ccggcccccagccccgcguu

SEQ ID NO: 991780 - RNA, 20 nt, Human
cggggcagcagggcccgacc

SEQ ID NO: 991781 - RNA, 20 nt, Human
cugguguggcggcaaggucc

SEQ ID NO: 991782 - RNA, 23 nt, Human
gaaggacggggcggggcagcagg

SEQ ID NO: 991783 - RNA, 21 nt, Human
gagcccacggcugagccgcgg

SEQ ID NO: 991784 - RNA, 22 nt, Human
gagccgcggccgccuucuuuag

SEQ ID NO: 991785 - RNA, 25 nt, Human
gcccccagccccgcguuagagccca

SEQ ID NO: 991786 - RNA, 19 nt, Human
gcgccgcucgugccgaauu

SEQ ID NO: 991787 - RNA, 18 nt, Human
gcggggcagcagggcccg

SEQ ID NO: 991788 - RNA, 24 nt, Human
ggaaggacggggcggggcagcagg

SEQ ID NO: 991789 - RNA, 20 nt, Human
ggaaggaggaaggacggggc

SEQ ID NO: 991790 - RNA, 22 nt, Human
ggcugguguggcggcaaggucc

SEQ ID NO: 991791 - RNA, 19 nt, Human
uaaacucuaaaagugagcc

SEQ ID NO: 991792 - RNA, 19 nt, Human
uccucagagacucugacuu

SEQ ID NO: 991793 - RNA, 19 nt, Human
ucuuuaggccgccagagcc

SEQ ID NO: 991794 - RNA, 22 nt, Human
ugaaguaaacucuaaaagugag

SEQ ID NO: 991795 - RNA, 20 nt, Human
uguggcggcaagguccgggg

SEQ ID NO: 991796 - RNA, 23 nt, Human
uuuuuuuuuuuuuuuuuaucuuu

SEQ ID NO: 991797 - RNA, 23 nt, Human
aaaaaaaaaaaucaacagaagca

SEQ ID NO: 991798 - RNA, 20 nt, Human
aaaaaaaaucaacagaagca

SEQ ID NO: 991799 - RNA, 18 nt, Human
aagaaaaggcaagagaca

SEQ ID NO: 991800 - RNA, 24 nt, Human
aagaggaggagacggcggcaaaga

SEQ ID NO: 991801 - RNA, 23 nt, Human
aagcaaaucagucccuguauaaa

SEQ ID NO: 991802 - RNA, 18 nt, Human
aagcaccccaauauucag

SEQ ID NO: 991803 - RNA, 22 nt, Human
acaaaaccagccccacucccaa

SEQ ID NO: 991804 - RNA, 19 nt, Human
acagggcagcugguagcuc

SEQ ID NO: 991805 - RNA, 22 nt, Human
acauguugauaaauacauagaa

SEQ ID NO: 991806 - RNA, 20 nt, Human
accagcgaagccaacagggc

SEQ ID NO: 991807 - RNA, 24 nt, Human
accaugcaguaagugcaaacagca

SEQ ID NO: 991808 - RNA, 18 nt, Human
acuuuuuucuucuuuuaa

SEQ ID NO: 991809 - RNA, 20 nt, Human
agaccugggguggggaaaga

SEQ ID NO: 991810 - RNA, 21 nt, Human
agacggcggcaaagagggagc

SEQ ID NO: 991811 - RNA, 24 nt, Human
agaggaggagacggcggcaaagag

SEQ ID NO: 991812 - RNA, 26 nt, Human
agcucagccuagaacuagacauccuc

SEQ ID NO: 991813 - RNA, 18 nt, Human
aggaagggaagcaaauca

SEQ ID NO: 991814 - RNA, 18 nt, Human
aggcaagagacagaccug

SEQ ID NO: 991815 - RNA, 27 nt, Human
aggcaagagacagaccuggggugggga

SEQ ID NO: 991816 - RNA, 24 nt, Human
agucugaaaaugucuugggaaagu

SEQ ID NO: 991817 - RNA, 19 nt, Human
auaaauaugaaaauagauu

SEQ ID NO: 991818 - RNA, 21 nt, Human
caacagggcagcugguagcuc

SEQ ID NO: 991819 - RNA, 18 nt, Human
caagaggaggagacggcg

SEQ ID NO: 991820 - RNA, 20 nt, Human
cacucccaaccacaagguug

SEQ ID NO: 991821 - RNA, 23 nt, Human
cacugggagcccagaaguugagc

SEQ ID NO: 991822 - RNA, 24 nt, Human
cacuuuuuucuucuuuuaagaagg

SEQ ID NO: 991823 - RNA, 18 nt, Human
cagaagccggcgacucag

SEQ ID NO: 991824 - RNA, 22 nt, Human
caggaaaaggucuuugaauagu

SEQ ID NO: 991825 - RNA, 23 nt, Human
cagucggggccgcuccccccgcc

SEQ ID NO: 991826 - RNA, 20 nt, Human
cauggccccacagucggggc

SEQ ID NO: 991827 - RNA, 22 nt, Human
ccagccccacucccaaccacaa

SEQ ID NO: 991828 - RNA, 24 nt, Human
cccaagaaaaggcaagagacagac

SEQ ID NO: 991829 - RNA, 23 nt, Human
cccacucccaaccacaagguuga

SEQ ID NO: 991830 - RNA, 21 nt, Human
ccccaagaaaaggcaagagac

SEQ ID NO: 991831 - RNA, 22 nt, Human
ccccaagaaaaggcaagagaca

SEQ ID NO: 991832 - RNA, 20 nt, Human
ccccaaggugaggcagggac

SEQ ID NO: 991833 - RNA, 23 nt, Human
cccuaacuaggaaggccucucac

SEQ ID NO: 991834 - RNA, 19 nt, Human
cccuagggccuacaaaacc

SEQ ID NO: 991835 - RNA, 22 nt, Human
cccuagggccuacaaaaccagc

SEQ ID NO: 991836 - RNA, 25 nt, Human
ccuacaaaaccagccccacucccaa

SEQ ID NO: 991837 - RNA, 18 nt, Human
ccucacagcucguuggug

SEQ ID NO: 991838 - RNA, 21 nt, Human
cucugguccuaucuggggaag

SEQ ID NO: 991839 - RNA, 27 nt, Human
cugggagcccagaaguugagccuggcc

SEQ ID NO: 991840 - RNA, 22 nt, Human
cuggggaaguacacuggagagg

SEQ ID NO: 991841 - RNA, 21 nt, Human
gaaggccucucacugcugccu

SEQ ID NO: 991842 - RNA, 19 nt, Human
gacucagcuaggcuagcgg

SEQ ID NO: 991843 - RNA, 21 nt, Human
gagggucuggugggaggcaga

SEQ ID NO: 991844 - RNA, 22 nt, Human
gccucccgucauacacagccaa

SEQ ID NO: 991845 - RNA, 21 nt, Human
gcggcggcggcgaacgaggag

SEQ ID NO: 991846 - RNA, 18 nt, Human
gcugccuugcuguccccu

SEQ ID NO: 991847 - RNA, 18 nt, Human
ggaaacagccaugaccau

SEQ ID NO: 991848 - RNA, 24 nt, Human
ggaggcagaccuccuugcuggauu

SEQ ID NO: 991849 - RNA, 23 nt, Human
ggcaagaggaggagacggcggca

SEQ ID NO: 991850 - RNA, 18 nt, Human
ggcacugggagcccagaa

SEQ ID NO: 991851 - RNA, 20 nt, Human
ggcggcggcgaacgaggaga

SEQ ID NO: 991852 - RNA, 20 nt, Human
gggaaagaaccgggguaaua

SEQ ID NO: 991853 - RNA, 18 nt, Human
gggaaguacacuggagag

SEQ ID NO: 991854 - RNA, 24 nt, Human
ggucuggugggaggcagaccuccu

SEQ ID NO: 991855 - RNA, 21 nt, Human
gguuugacacugaggcaggac

SEQ ID NO: 991856 - RNA, 21 nt, Human
uacaaaaaaaaaaaucaacag

SEQ ID NO: 991857 - RNA, 25 nt, Human
uacaaaaaaaaaaaucaacagaagc

SEQ ID NO: 991858 - RNA, 27 nt, Human
uacaaaaaaaaaaaucaacagaagcaa

SEQ ID NO: 991859 - RNA, 23 nt, Human
uacaaaaccagccccacucccaa

SEQ ID NO: 991860 - RNA, 28 nt, Human
uacaaaaccagccccacucccaaccaca

SEQ ID NO: 991861 - RNA, 20 nt, Human
uacacuggagagggucuggu

SEQ ID NO: 991862 - RNA, 22 nt, Human
uagaagcaggcccuagggccua

SEQ ID NO: 991863 - RNA, 31 nt, Human
uauaugccccaagaaaaggcaagagacagag

SEQ ID NO: 991864 - RNA, 18 nt, Human
ucacuuuuuucuucuuuu

SEQ ID NO: 991865 - RNA, 22 nt, Human
ucacuuuuuucuucuuuuaaga

SEQ ID NO: 991866 - RNA, 23 nt, Human
ucccaaagcuccagccauggcag

SEQ ID NO: 991867 - RNA, 23 nt, Human
uccccaaggugaggcagggacug

SEQ ID NO: 991868 - RNA, 24 nt, Human
ucccuguauaaaccauuuaaccaa

SEQ ID NO: 991869 - RNA, 25 nt, Human
ucguugguggcagcggcuccuuagc

SEQ ID NO: 991870 - RNA, 27 nt, Human
ugacacugaggcaggacugagcagcca

SEQ ID NO: 991871 - RNA, 20 nt, Human
ugagcagccagaggggugcc

SEQ ID NO: 991872 - RNA, 18 nt, Human
ugaggcagggacuaaacc

SEQ ID NO: 991873 - RNA, 18 nt, Human
ugcauagaaauguaguga

SEQ ID NO: 991874 - RNA, 19 nt, Human
ugccuugcuguccccuugc

SEQ ID NO: 991875 - RNA, 22 nt, Human
uggcaggaagggaagcaaauca

SEQ ID NO: 991876 - RNA, 18 nt, Human
ugggcacugggagcccag

SEQ ID NO: 991877 - RNA, 25 nt, Human
uggggaaagaaccgggguaauagcc

SEQ ID NO: 991878 - RNA, 27 nt, Human
uggugggaggcagaccuccuugcugga

SEQ ID NO: 991879 - RNA, 22 nt, Human
ugguuugacacugaggcaggac

SEQ ID NO: 991880 - RNA, 19 nt, Human
uguucccaaagcuccagcc

SEQ ID NO: 991881 - RNA, 23 nt, Human
aaaaacaaacagaagcccugaca

SEQ ID NO: 991882 - RNA, 22 nt, Human
aaacaaacagaagcccugacag

SEQ ID NO: 991883 - RNA, 19 nt, Human
aaacagaagcccugacagc

SEQ ID NO: 991884 - RNA, 18 nt, Human
agccugggcacaguggcu

SEQ ID NO: 991885 - RNA, 22 nt, Human
cacucugccuggugcccacagc

SEQ ID NO: 991886 - RNA, 23 nt, Human
cauacccccacacccgacagccg

SEQ ID NO: 991887 - RNA, 19 nt, Human
ccacacccgacagccggcg

SEQ ID NO: 991888 - RNA, 24 nt, Human
cccacccacagggucucccuggac

SEQ ID NO: 991889 - RNA, 20 nt, Human
ccccacacccgacagccggc

SEQ ID NO: 991890 - RNA, 20 nt, Human
cccccacacccgacagccgg

SEQ ID NO: 991891 - RNA, 19 nt, Human
cucccuggacuggcggggg

SEQ ID NO: 991892 - RNA, 18 nt, Human
gaagccgaguccuccggg

SEQ ID NO: 991893 - RNA, 20 nt, Human
gagcugccugagcuuccugc

SEQ ID NO: 991894 - RNA, 18 nt, Human
gggcaggggccugaccua

SEQ ID NO: 991895 - RNA, 22 nt, Human
ggggucaggcagugggcagggg

SEQ ID NO: 991896 - RNA, 18 nt, Human
ggggugggggucaggcag

SEQ ID NO: 991897 - RNA, 24 nt, Human
ggugggggucaggcagugggcagg

SEQ ID NO: 991898 - RNA, 20 nt, Human
gugcggcgggucggguuagc

SEQ ID NO: 991899 - RNA, 20 nt, Human
uaaaaaacaaacagaagccc

SEQ ID NO: 991900 - RNA, 22 nt, Human
uaaaaaacaaacagaagcccug

SEQ ID NO: 991901 - RNA, 28 nt, Human
ucucccuggacuggcggggggugggggu

SEQ ID NO: 991902 - RNA, 23 nt, Human
ugcauaguuuaaaaaacaaacag

SEQ ID NO: 991903 - RNA, 20 nt, Human
ugccugagcuuccugcuuag

SEQ ID NO: 991904 - RNA, 24 nt, Human
ugccugagcuuccugcuuaggggc

SEQ ID NO: 991905 - RNA, 19 nt, Human
ugccuggugcccacagccu

SEQ ID NO: 991906 - RNA, 21 nt, Human
ugcucugaccuggccugggug

SEQ ID NO: 991907 - RNA, 18 nt, Human
uggaggagcugccugagc

SEQ ID NO: 991908 - RNA, 22 nt, Human
ugggcaggggccugaccuaggc

SEQ ID NO: 991909 - RNA, 24 nt, Human
ugggggucaggcagugggcagggg

SEQ ID NO: 991910 - RNA, 22 nt, Human
uuuaaaaaacaaacagaagccc

SEQ ID NO: 991911 - RNA, 23 nt, Human
aaauguacccucaggcccucacc

SEQ ID NO: 991912 - RNA, 22 nt, Human
aaaugucuuuuuaaaaaacucc

SEQ ID NO: 991913 - RNA, 24 nt, Human
aaccaggcccacccccacccuucc

SEQ ID NO: 991914 - RNA, 21 nt, Human
aagaaucugucccccaccccc

SEQ ID NO: 991915 - RNA, 23 nt, Human
aagaauuaaggcuggggauuuug

SEQ ID NO: 991916 - RNA, 26 nt, Human
aagcgaacaugggcuucgcuccccca

SEQ ID NO: 991917 - RNA, 23 nt, Human
aauguuaaaacuaaaacugagcu

SEQ ID NO: 991918 - RNA, 20 nt, Human
accagagcuuggcggaagcc

SEQ ID NO: 991919 - RNA, 22 nt, Human
accagagcuuggcggaagccua

SEQ ID NO: 991920 - RNA, 20 nt, Human
acccagccccagccccaccu

SEQ ID NO: 991921 - RNA, 23 nt, Human
acccagccccagccccaccugac

SEQ ID NO: 991922 - RNA, 19 nt, Human
acccaguccagccacgugg

SEQ ID NO: 991923 - RNA, 20 nt, Human
accggucuggguccugaagc

SEQ ID NO: 991924 - RNA, 23 nt, Human
acgagaauggaggccacgacauc

SEQ ID NO: 991925 - RNA, 20 nt, Human
acgcagcaggcagaggaggg

SEQ ID NO: 991926 - RNA, 19 nt, Human
acgcgugcccaguacaagg

SEQ ID NO: 991927 - RNA, 24 nt, Human
acuagccaugcucaaaaaaaaaaa

SEQ ID NO: 991928 - RNA, 18 nt, Human
acucugguggguggaggg

SEQ ID NO: 991929 - RNA, 21 nt, Human
agaaaucaauuucaaccacca

SEQ ID NO: 991930 - RNA, 20 nt, Human
agaacagauacugcagggga

SEQ ID NO: 991931 - RNA, 19 nt, Human
agacagauccaaacccacu

SEQ ID NO: 991932 - RNA, 19 nt, Human
agaggagggggcggggggc

SEQ ID NO: 991933 - RNA, 21 nt, Human
agaggagggggcggggggccc

SEQ ID NO: 991934 - RNA, 22 nt, Human
agauacugcaggggaacaagcc

SEQ ID NO: 991935 - RNA, 27 nt, Human
agccacguggccaaucucagcagccuc

SEQ ID NO: 991936 - RNA, 21 nt, Human
agccccaccccccaccccccc

SEQ ID NO: 991937 - RNA, 18 nt, Human
aggaggcgguggcggcgg

SEQ ID NO: 991938 - RNA, 23 nt, Human
aggauaagugaagaggugaaagg

SEQ ID NO: 991939 - RNA, 23 nt, Human
aggcacgggcggcuccagcugga

SEQ ID NO: 991940 - RNA, 19 nt, Human
aggcagaggagggggcggg

SEQ ID NO: 991941 - RNA, 21 nt, Human
aggcagaggagggggcggggg

SEQ ID NO: 991942 - RNA, 24 nt, Human
aggcagaggagggggcggggggcc

SEQ ID NO: 991943 - RNA, 24 nt, Human
aggccagcuccccugggcuccuuc

SEQ ID NO: 991944 - RNA, 21 nt, Human
aggggaacaagccccaccccc

SEQ ID NO: 991945 - RNA, 19 nt, Human
auagaaaucuggcugcaga

SEQ ID NO: 991946 - RNA, 19 nt, Human
auccuguccacccagcccc

SEQ ID NO: 991947 - RNA, 24 nt, Human
auuagugaacuaagaacagcguca

SEQ ID NO: 991948 - RNA, 20 nt, Human
caaaaaaaaaaauauucuuc

SEQ ID NO: 991949 - RNA, 21 nt, Human
caagccccaccccccaccccc

SEQ ID NO: 991950 - RNA, 22 nt, Human
caagccccaccccccacccccc

SEQ ID NO: 991951 - RNA, 23 nt, Human
caagccccaccccccaccccccc

SEQ ID NO: 991952 - RNA, 25 nt, Human
caagccccaccccccaccccccccc

SEQ ID NO: 991953 - RNA, 18 nt, Human
cacacguggccaucaggu

SEQ ID NO: 991954 - RNA, 21 nt, Human
cacagccacaaaccgcuguuc

SEQ ID NO: 991955 - RNA, 25 nt, Human
cacccagccccagccccaccugacu

SEQ ID NO: 991956 - RNA, 18 nt, Human
cacccccacccuucccca

SEQ ID NO: 991957 - RNA, 21 nt, Human
caccccccaccccccccagcu

SEQ ID NO: 991958 - RNA, 18 nt, Human
caccccccauuuccagcu

SEQ ID NO: 991959 - RNA, 22 nt, Human
cagaguuucuggcaaagccaug

SEQ ID NO: 991960 - RNA, 19 nt, Human
cagcagccucccguggcca

SEQ ID NO: 991961 - RNA, 21 nt, Human
cagcagccucccguggccaag

SEQ ID NO: 991962 - RNA, 18 nt, Human
cagccaccgcgcugugcu

SEQ ID NO: 991963 - RNA, 21 nt, Human
cagcgguggcggcggcugggc

SEQ ID NO: 991964 - RNA, 19 nt, Human
cagcucuaagucaggaagc

SEQ ID NO: 991965 - RNA, 20 nt, Human
caggcccacccccacccuuc

SEQ ID NO: 991966 - RNA, 20 nt, Human
caggggaacaagccccaccc

SEQ ID NO: 991967 - RNA, 20 nt, Human
caguacaaggugucuggcug

SEQ ID NO: 991968 - RNA, 18 nt, Human
ccaccccccacccccccc

SEQ ID NO: 991969 - RNA, 18 nt, Human
ccagcugcugcucccagg

SEQ ID NO: 991970 - RNA, 18 nt, Human
ccagcuggaaggggcaga

SEQ ID NO: 991971 - RNA, 19 nt, Human
ccaguacaaggugucuggc

SEQ ID NO: 991972 - RNA, 24 nt, Human
ccaugcucaaaaaaaaaaauauuc

SEQ ID NO: 991973 - RNA, 20 nt, Human
ccauucgccacaucuggucc

SEQ ID NO: 991974 - RNA, 19 nt, Human
cccacccccacccuucccc

SEQ ID NO: 991975 - RNA, 21 nt, Human
cccacccccacccuuccccac

SEQ ID NO: 991976 - RNA, 19 nt, Human
cccaccccccacccccccc

SEQ ID NO: 991977 - RNA, 20 nt, Human
cccaccccccacccccccca

SEQ ID NO: 991978 - RNA, 20 nt, Human
ccccaccccccacccccccc

SEQ ID NO: 991979 - RNA, 20 nt, Human
ccccaccccccacccccccc

SEQ ID NO: 991980 - RNA, 22 nt, Human
ccccaccccccaccccccccag

SEQ ID NO: 991981 - RNA, 25 nt, Human
ccccaccccccaccccccccagcuc

SEQ ID NO: 991982 - RNA, 18 nt, Human
ccccaccccccccagcuc

SEQ ID NO: 991983 - RNA, 18 nt, Human
ccccagcugcugcuccca

SEQ ID NO: 991984 - RNA, 23 nt, Human
ccccaggccagcuccccugggcu

SEQ ID NO: 991985 - RNA, 23 nt, Human
cccccaccccccauuuccagcuc

SEQ ID NO: 991986 - RNA, 21 nt, Human
ccccccaccccccccagcucu

SEQ ID NO: 991987 - RNA, 22 nt, Human
ccccuggaggcacgggcggcuc

SEQ ID NO: 991988 - RNA, 23 nt, Human
ccccugggcuccuucccauggcu

SEQ ID NO: 991989 - RNA, 23 nt, Human
cccguggccaaggcacacguggc

SEQ ID NO: 991990 - RNA, 19 nt, Human
ccguaugguggccaagggc

SEQ ID NO: 991991 - RNA, 25 nt, Human
ccucacccaccuggaucugaugcgg

SEQ ID NO: 991992 - RNA, 18 nt, Human
ccuccugcccucacccac

SEQ ID NO: 991993 - RNA, 18 nt, Human
ccucuuggccccuggagg

SEQ ID NO: 991994 - RNA, 19 nt, Human
ccuguccacccagccccag

SEQ ID NO: 991995 - RNA, 18 nt, Human
cggcggcagcgguggcgg

SEQ ID NO: 991996 - RNA, 27 nt, Human
cggcggcggcagcgguggcggcggcug

SEQ ID NO: 991997 - RNA, 20 nt, Human
cggguuccacucuggugggu

SEQ ID NO: 991998 - RNA, 24 nt, Human
cguggccaaucucagcagccuccc

SEQ ID NO: 991999 - RNA, 22 nt, Human
cuaaaacugagcucuaggcuau

SEQ ID NO: 992000 - RNA, 18 nt, Human
cuaaagaaaggaaacgga

SEQ ID NO: 992001 - RNA, 21 nt, Human
cuaggaccacugggacugcuc

SEQ ID NO: 992002 - RNA, 24 nt, Human
cucaccuaccagagcaaauaucac

SEQ ID NO: 992003 - RNA, 19 nt, Human
cugauccuguccacccagc

SEQ ID NO: 992004 - RNA, 22 nt, Human
cugggcagaccuggccccucug

SEQ ID NO: 992005 - RNA, 22 nt, Human
cugggcuuucaagggaauccug

SEQ ID NO: 992006 - RNA, 18 nt, Human
gaacaagccccacccccc

SEQ ID NO: 992007 - RNA, 25 nt, Human
gaacaagccccaccccccacccccc

SEQ ID NO: 992008 - RNA, 21 nt, Human
gaacaugggcuucgcuccccc

SEQ ID NO: 992009 - RNA, 20 nt, Human
gaauggcagaccagagccgg

SEQ ID NO: 992010 - RNA, 19 nt, Human
gagcaugacuuccuauuuc

SEQ ID NO: 992011 - RNA, 20 nt, Human
gaggagggggcggggggccc

SEQ ID NO: 992012 - RNA, 18 nt, Human
gauccuguguagaaaagg

SEQ ID NO: 992013 - RNA, 23 nt, Human
gcagaccuggccccucugcccug

SEQ ID NO: 992014 - RNA, 18 nt, Human
gcagcaggcagaggaggg

SEQ ID NO: 992015 - RNA, 24 nt, Human
gcagcgguggcggcggcugggccc

SEQ ID NO: 992016 - RNA, 21 nt, Human
gcagcuuccccagcugcugcu

SEQ ID NO: 992017 - RNA, 23 nt, Human
gccagugugcagacccagccacc

SEQ ID NO: 992018 - RNA, 20 nt, Human
gcccacccccacccuucccc

SEQ ID NO: 992019 - RNA, 18 nt, Human
gccccgcucugaggaggc

SEQ ID NO: 992020 - RNA, 22 nt, Human
gccccuggaggcacgggcggcu

SEQ ID NO: 992021 - RNA, 18 nt, Human
gcccuggggagggccggg

SEQ ID NO: 992022 - RNA, 20 nt, Human
gcggcggcagcgguggcggc

SEQ ID NO: 992023 - RNA, 27 nt, Human
gcggcggcggagcucggcggcggcagc

SEQ ID NO: 992024 - RNA, 19 nt, Human
gcgguggcggcggcugggc

SEQ ID NO: 992025 - RNA, 19 nt, Human
gcucugaggaggcgguggc

SEQ ID NO: 992026 - RNA, 21 nt, Human
ggaacaagccccaccccccac

SEQ ID NO: 992027 - RNA, 18 nt, Human
ggacugcucacccugccu

SEQ ID NO: 992028 - RNA, 24 nt, Human
ggagaaauguacccucaggcccuc

SEQ ID NO: 992029 - RNA, 18 nt, Human
ggaggcgguggcggcggc

SEQ ID NO: 992030 - RNA, 19 nt, Human
ggcggcagcgguggcggcg

SEQ ID NO: 992031 - RNA, 18 nt, Human
ggcugccuccacgcagca

SEQ ID NO: 992032 - RNA, 18 nt, Human
gggcagauccacgcugcc

SEQ ID NO: 992033 - RNA, 21 nt, Human
gggcggggggcccuggggagg

SEQ ID NO: 992034 - RNA, 23 nt, Human
gggcggggggcccuggggagggc

SEQ ID NO: 992035 - RNA, 22 nt, Human
ggggcggggggcccuggggagg

SEQ ID NO: 992036 - RNA, 18 nt, Human
gucugacgcgugcccagu

SEQ ID NO: 992037 - RNA, 19 nt, Human
gugggcggcagcuucccca

SEQ ID NO: 992038 - RNA, 26 nt, Human
uaaauccacuagccaugcucaaaaaa

SEQ ID NO: 992039 - RNA, 21 nt, Human
uaacauggggcaaccaggccc

SEQ ID NO: 992040 - RNA, 26 nt, Human
uaagaacagcgucacgugguggccau

SEQ ID NO: 992041 - RNA, 20 nt, Human
uaaguuugacuccagcagug

SEQ ID NO: 992042 - RNA, 20 nt, Human
uacaguaccaggauggcugg

SEQ ID NO: 992043 - RNA, 24 nt, Human
uagcaagucagguaaaaaaauuuc

SEQ ID NO: 992044 - RNA, 23 nt, Human
uagccaugcucaaaaaaaaaaau

SEQ ID NO: 992045 - RNA, 24 nt, Human
ucacgugguggccaugccuggccu

SEQ ID NO: 992046 - RNA, 23 nt, Human
ucacucucggagcugggccacag

SEQ ID NO: 992047 - RNA, 22 nt, Human
ucagcagccucccguggccaag

SEQ ID NO: 992048 - RNA, 19 nt, Human
uccacccagccccagcccc

SEQ ID NO: 992049 - RNA, 18 nt, Human
uccacucuggugggugga

SEQ ID NO: 992050 - RNA, 23 nt, Human
uccagccacguggccaaucucag

SEQ ID NO: 992051 - RNA, 21 nt, Human
ucccagcacuucuacugauuc

SEQ ID NO: 992052 - RNA, 21 nt, Human
uccccagcugcugcucccagc

SEQ ID NO: 992053 - RNA, 22 nt, Human
ucccccaccccccauuuccagc

SEQ ID NO: 992054 - RNA, 21 nt, Human
ucgccacaucugguccgugcc

SEQ ID NO: 992055 - RNA, 21 nt, Human
ucggcggcggcggagcucggc

SEQ ID NO: 992056 - RNA, 20 nt, Human
ucugaggaggcgguggcggc

SEQ ID NO: 992057 - RNA, 25 nt, Human
ucugguccgugccagaucccugcac

SEQ ID NO: 992058 - RNA, 20 nt, Human
ucuucgggaccagagcuugg

SEQ ID NO: 992059 - RNA, 22 nt, Human
ugaagaggugaaaggccgauca

SEQ ID NO: 992060 - RNA, 21 nt, Human
ugacagcagugguaaacgcug

SEQ ID NO: 992061 - RNA, 18 nt, Human
ugacuuccuauuucagua

SEQ ID NO: 992062 - RNA, 18 nt, Human
ugcgcaguugcagcugcu

SEQ ID NO: 992063 - RNA, 18 nt, Human
ugcucggcggcggcggag

SEQ ID NO: 992064 - RNA, 18 nt, Human
uggcuaaagaaaggaaac

SEQ ID NO: 992065 - RNA, 18 nt, Human
ugggaagagcaugacuuc

SEQ ID NO: 992066 - RNA, 19 nt, Human
ugggcagauccacgcugcc

SEQ ID NO: 992067 - RNA, 18 nt, Human
uggguggagggugggaag

SEQ ID NO: 992068 - RNA, 21 nt, Human
ugguggguggagggugggaag

SEQ ID NO: 992069 - RNA, 19 nt, Human
ugucccugggacguaugcu

SEQ ID NO: 992070 - RNA, 21 nt, Human
uguuuuauaaaaaggaaaguu

SEQ ID NO: 992071 - RNA, 19 nt, Human
uuaaggcuggggauuuugc

SEQ ID NO: 992072 - RNA, 23 nt, Human
uucaaagugagguuacuguuucu

SEQ ID NO: 992073 - RNA, 21 nt, Human
uucaaccaccaucaaccccua

SEQ ID NO: 992074 - RNA, 20 nt, Human
uucagcaggagaaaaaagaa

SEQ ID NO: 992075 - RNA, 22 nt, Human
uucuagacagauccaaacccac

SEQ ID NO: 992076 - RNA, 21 nt, Human
uugcaguugcagguguucagc

SEQ ID NO: 992077 - RNA, 23 nt, Human
uugcaguugcagguguucagcug

SEQ ID NO: 992078 - RNA, 23 nt, Human
uuugcaguugcagguguucagcu

SEQ ID NO: 992079 - RNA, 24 nt, Human
aacaguacaagugaaauauuuaaa

SEQ ID NO: 992080 - RNA, 18 nt, Human
aagaagaugcaaaaauca

SEQ ID NO: 992081 - RNA, 22 nt, Human
acacuguuucauccaauaagcc

SEQ ID NO: 992082 - RNA, 18 nt, Human
agaaaugaucugccuggc

SEQ ID NO: 992083 - RNA, 20 nt, Human
agcuacuacagugaaccccc

SEQ ID NO: 992084 - RNA, 21 nt, Human
aggagaaaugaucugccuggc

SEQ ID NO: 992085 - RNA, 19 nt, Human
caagacaagaacaguuacc

SEQ ID NO: 992086 - RNA, 25 nt, Human
cacguggaacauuuucuggcguccg

SEQ ID NO: 992087 - RNA, 20 nt, Human
cagcaacaguacaagugaaa

SEQ ID NO: 992088 - RNA, 19 nt, Human
cauuguacaguacuugaca

SEQ ID NO: 992089 - RNA, 18 nt, Human
cuacagugaaccccacgc

SEQ ID NO: 992090 - RNA, 23 nt, Human
cuugacaauacauuucaacaaac

SEQ ID NO: 992091 - RNA, 23 nt, Human
gcaagacaagaacaguuaccuuc

SEQ ID NO: 992092 - RNA, 23 nt, Human
gccaggucaagcggaaguaaaac

SEQ ID NO: 992093 - RNA, 22 nt, Human
uaggaaucugaaacaaaacgaa

SEQ ID NO: 992094 - RNA, 19 nt, Human
ucaacaaacugaaaggcaa

SEQ ID NO: 992095 - RNA, 18 nt, Human
ucaggcccgcuccaagaa

SEQ ID NO: 992096 - RNA, 19 nt, Human
ucaugucauaguuuccaaa

SEQ ID NO: 992097 - RNA, 25 nt, Human
ucuaaaaagcuuaaaucauauuaaa

SEQ ID NO: 992098 - RNA, 22 nt, Human
ugaaaggcaaaccaguaaauca

SEQ ID NO: 992099 - RNA, 24 nt, Human
ugaucaaauccacaauuaauugaa

SEQ ID NO: 992100 - RNA, 20 nt, Human
uuucauuuuauucaauugug

SEQ ID NO: 992101 - RNA, 21 nt, Human
uuuuuuuuuuuuuuuuuauuu

SEQ ID NO: 992102 - RNA, 26 nt, Human
aagagaagauggaaaugaggggaccc

SEQ ID NO: 992103 - RNA, 25 nt, Human
aagagcuauuucuuaugcuguaccu

SEQ ID NO: 992104 - RNA, 24 nt, Human
aauggagaaaggcaaugaccaccu

SEQ ID NO: 992105 - RNA, 24 nt, Human
acagagcauaauugcauagcacca

SEQ ID NO: 992106 - RNA, 20 nt, Human
acuccguagucaaagaagaa

SEQ ID NO: 992107 - RNA, 22 nt, Human
acuuucugucucugggcuuucu

SEQ ID NO: 992108 - RNA, 23 nt, Human
agagcauaauugcauagcaccag

SEQ ID NO: 992109 - RNA, 22 nt, Human
caaacagcaccaaauuauaauc

SEQ ID NO: 992110 - RNA, 25 nt, Human
caaagcaacauaugaaacacagagc

SEQ ID NO: 992111 - RNA, 23 nt, Human
ccaaagcaacauaugaaacacag

SEQ ID NO: 992112 - RNA, 20 nt, Human
ccaaguugcugcuuuuaaaa

SEQ ID NO: 992113 - RNA, 23 nt, Human
cuuuaagaaaaaaaauaagccaa

SEQ ID NO: 992114 - RNA, 22 nt, Human
cuuucugucucugggcuuucug

SEQ ID NO: 992115 - RNA, 18 nt, Human
gcaacauaugaaacacag

SEQ ID NO: 992116 - RNA, 19 nt, Human
gcgaauucuucuguugcuu

SEQ ID NO: 992117 - RNA, 22 nt, Human
gugaaaguugaagagaagaugg

SEQ ID NO: 992118 - RNA, 20 nt, Human
uacuuucugucucugggcuu

SEQ ID NO: 992119 - RNA, 24 nt, Human
ucuguagcugaggccuugcagaac

SEQ ID NO: 992120 - RNA, 21 nt, Human
ucuucuguugcuucuaucagu

SEQ ID NO: 992121 - RNA, 21 nt, Human
ugaaaguugaagagaagaugg

SEQ ID NO: 992122 - RNA, 20 nt, Human
ugaacaacacauuccuuuaa

SEQ ID NO: 992123 - RNA, 24 nt, Human
ugaacaacacauuccuuuaagaaa

SEQ ID NO: 992124 - RNA, 24 nt, Human
ugaggccuugcagaacuuuccagg

SEQ ID NO: 992125 - RNA, 20 nt, Human
uggagaaaggcaaugaccac

SEQ ID NO: 992126 - RNA, 20 nt, Human
uuaacacuuugcagucauua

SEQ ID NO: 992127 - RNA, 21 nt, Human
uuaacacuuugcagucauuag

SEQ ID NO: 992128 - RNA, 20 nt, Human
aagcugccaccagagacuaa

SEQ ID NO: 992129 - RNA, 22 nt, Human
aauuauaucuggauccuuggug

SEQ ID NO: 992130 - RNA, 21 nt, Human
agaagcugccaccagagacua

SEQ ID NO: 992131 - RNA, 22 nt, Human
agagaacuccuuugccaggaaa

SEQ ID NO: 992132 - RNA, 20 nt, Human
aggaaagaacaucaacuugg

SEQ ID NO: 992133 - RNA, 22 nt, Human
caagucucugacugguucugga

SEQ ID NO: 992134 - RNA, 18 nt, Human
cccuagguuccacugcuc

SEQ ID NO: 992135 - RNA, 22 nt, Human
cccugugcaaaagcuagaacag

SEQ ID NO: 992136 - RNA, 18 nt, Human
ccgcuccuacaccagaac

SEQ ID NO: 992137 - RNA, 19 nt, Human
ccuacaccagaacccggaa

SEQ ID NO: 992138 - RNA, 21 nt, Human
ccucaugaccuggccugaugu

SEQ ID NO: 992139 - RNA, 23 nt, Human
ccucuuaggggcaagucucugac

SEQ ID NO: 992140 - RNA, 22 nt, Human
ccuugaaaucaucaggaacaag

SEQ ID NO: 992141 - RNA, 21 nt, Human
cucaguguuggcugagguaga

SEQ ID NO: 992142 - RNA, 21 nt, Human
cugcuauggaggaacuacaga

SEQ ID NO: 992143 - RNA, 24 nt, Human
cuucacaauacauggacauauuua

SEQ ID NO: 992144 - RNA, 20 nt, Human
cuucugcuacugacugaacu

SEQ ID NO: 992145 - RNA, 23 nt, Human
cuugaauuuuucugcucagauuu

SEQ ID NO: 992146 - RNA, 25 nt, Human
cuugaauuuuucugcucagauuuua

SEQ ID NO: 992147 - RNA, 24 nt, Human
gagaagacgccgcuccuacaccag

SEQ ID NO: 992148 - RNA, 21 nt, Human
gagugcuagaagucaggccuc

SEQ ID NO: 992149 - RNA, 19 nt, Human
gcuauggaggaacuacaga

SEQ ID NO: 992150 - RNA, 19 nt, Human
guggucccuagguuccacu

SEQ ID NO: 992151 - RNA, 21 nt, Human
uacaucccucuuaggggcaag

SEQ ID NO: 992152 - RNA, 21 nt, Human
uaccucuguccacugguuccc

SEQ ID NO: 992153 - RNA, 20 nt, Human
uagaagcugccaccagagac

SEQ ID NO: 992154 - RNA, 20 nt, Human
uagggcucaaacucaggagu

SEQ ID NO: 992155 - RNA, 21 nt, Human
ucaaacucaggagugcuagaa

SEQ ID NO: 992156 - RNA, 20 nt, Human
uccagcguaccaaauucagc

SEQ ID NO: 992157 - RNA, 22 nt, Human
uccaugauauccacuguccuug

SEQ ID NO: 992158 - RNA, 19 nt, Human
ucccuagguuccacugcuc

SEQ ID NO: 992159 - RNA, 21 nt, Human
uccuuggggcgcccaauucau

SEQ ID NO: 992160 - RNA, 18 nt, Human
ugaaaucaucaggaacaa

SEQ ID NO: 992161 - RNA, 19 nt, Human
ugacaaguaaaguggaaau

SEQ ID NO: 992162 - RNA, 18 nt, Human
ugacugaacucguuguga

SEQ ID NO: 992163 - RNA, 18 nt, Human
ugaguaaagaaguuaccc

SEQ ID NO: 992164 - RNA, 19 nt, Human
ugauauccacuguccuugg

SEQ ID NO: 992165 - RNA, 19 nt, Human
ugccaggaaagaacaucaa

SEQ ID NO: 992166 - RNA, 20 nt, Human
ugccaggaaagaacaucaac

SEQ ID NO: 992167 - RNA, 21 nt, Human
uggucccuagguuccacugcu

SEQ ID NO: 992168 - RNA, 23 nt, Human
ugugcaaaagcauuuaaaucaaa

SEQ ID NO: 992169 - RNA, 24 nt, Human
uuaaugcaucucuuaguuuuuucc

SEQ ID NO: 992170 - RNA, 19 nt, Human
uuucgggaagaaccagauu

SEQ ID NO: 992171 - RNA, 23 nt, Human
uuuuuauacuugaauuuuucugc

SEQ ID NO: 992172 - RNA, 20 nt, Human
agccguucgcaaaacuacuu

SEQ ID NO: 992173 - RNA, 18 nt, Human
ccggccacagcgauucuc

SEQ ID NO: 992174 - RNA, 19 nt, Human
ccggccacagcgauucucu

SEQ ID NO: 992175 - RNA, 19 nt, Human
ccuccggaagccccgggcc

SEQ ID NO: 992176 - RNA, 21 nt, Human
ccuccucgcggcuuaccgccu

SEQ ID NO: 992177 - RNA, 22 nt, Human
cgcaaaacuacuugucccauca

SEQ ID NO: 992178 - RNA, 18 nt, Human
cgccuagugccaggugcu

SEQ ID NO: 992179 - RNA, 18 nt, Human
cgugaguccuuuccuccu

SEQ ID NO: 992180 - RNA, 20 nt, Human
cuccgccuagugccaggugc

SEQ ID NO: 992181 - RNA, 19 nt, Human
cuucuugucucgacgcccc

SEQ ID NO: 992182 - RNA, 18 nt, Human
gaccucuucaaucaguag

SEQ ID NO: 992183 - RNA, 22 nt, Human
gccccgggccucagagcuuccg

SEQ ID NO: 992184 - RNA, 23 nt, Human
ggacgugaguccuuuccuccucg

SEQ ID NO: 992185 - RNA, 23 nt, Human
ucagcagccgaggacggcgggac

SEQ ID NO: 992186 - RNA, 19 nt, Human
uccacagcgggacgugagu

SEQ ID NO: 992187 - RNA, 23 nt, Human
ucguccggccacagcgauucucu

SEQ ID NO: 992188 - RNA, 23 nt, Human
acagaacagugagggugcaggga

SEQ ID NO: 992189 - RNA, 18 nt, Human
acagugagggugcaggga

SEQ ID NO: 992190 - RNA, 19 nt, Human
agagcaaggccucgggguc

SEQ ID NO: 992191 - RNA, 20 nt, Human
agagcaaggccucggggucu

SEQ ID NO: 992192 - RNA, 22 nt, Human
agaguggaggcccgcacgggag

SEQ ID NO: 992193 - RNA, 21 nt, Human
agggugcagggagcaaggacg

SEQ ID NO: 992194 - RNA, 18 nt, Human
agguagaaaaagugcaca

SEQ ID NO: 992195 - RNA, 19 nt, Human
caagcacaaacccagccuc

SEQ ID NO: 992196 - RNA, 20 nt, Human
ccuccgggggagagggcgag

SEQ ID NO: 992197 - RNA, 20 nt, Human
ccucggggucuggaggaccc

SEQ ID NO: 992198 - RNA, 18 nt, Human
cgggagggcgcggccucc

SEQ ID NO: 992199 - RNA, 21 nt, Human
cggggcucuccaguggguggg

SEQ ID NO: 992200 - RNA, 21 nt, Human
gccucccgcucugagagcaag

SEQ ID NO: 992201 - RNA, 26 nt, Human
gcuggaauugcaaggacccuccccca

SEQ ID NO: 992202 - RNA, 18 nt, Human
ggacccggcuuuuccggg

SEQ ID NO: 992203 - RNA, 20 nt, Human
gggcgcggccuccgggggag

SEQ ID NO: 992204 - RNA, 19 nt, Human
ggucuggaggacccggcuu

SEQ ID NO: 992205 - RNA, 21 nt, Human
ucgcuggaauugcaaggaccc

SEQ ID NO: 992206 - RNA, 21 nt, Human
ugagggugcagggagcaagga

SEQ ID NO: 992207 - RNA, 20 nt, Human
uuccgggagggcgcggccuc

SEQ ID NO: 992208 - RNA, 19 nt, Human
uuuuuuuuuuuagaggugg

SEQ ID NO: 992209 - RNA, 18 nt, Human
uuuuuuuuuuuuagaggu

SEQ ID NO: 992210 - RNA, 22 nt, Human
uuuuuuuuuuuuuuuuuagagg

SEQ ID NO: 992211 - RNA, 20 nt, Human
aaaaagaaaaaaaaaaaucc

SEQ ID NO: 992212 - RNA, 24 nt, Human
aaaaagaaaacaguuuagcaaaaa

SEQ ID NO: 992213 - RNA, 20 nt, Human
aaacaaacaaaaaacaaaaa

SEQ ID NO: 992214 - RNA, 23 nt, Human
aaacaaacaaaaaacaaaaaaca

SEQ ID NO: 992215 - RNA, 24 nt, Human
aaacaaacaaacaaacaaaaaaca

SEQ ID NO: 992216 - RNA, 23 nt, Human
aaaccaaacaccuuuugaucuua

SEQ ID NO: 992217 - RNA, 20 nt, Human
aaaccaaaccaaugauaaaa

SEQ ID NO: 992218 - RNA, 20 nt, Human
aaacggaaacccaggacagc

SEQ ID NO: 992219 - RNA, 24 nt, Human
aaagaggcugggcgugguggcuca

SEQ ID NO: 992220 - RNA, 26 nt, Human
aacaaacaaacaaaaaacaaaaaaca

SEQ ID NO: 992221 - RNA, 18 nt, Human
aaccagaauucagcagca

SEQ ID NO: 992222 - RNA, 19 nt, Human
aaccuuuucuccuugugcc

SEQ ID NO: 992223 - RNA, 20 nt, Human
aagauggugaaaccccgucu

SEQ ID NO: 992224 - RNA, 18 nt, Human
aagcagcagaagcagcag

SEQ ID NO: 992225 - RNA, 23 nt, Human
aaugauaaaacaaccauuuggaa

SEQ ID NO: 992226 - RNA, 22 nt, Human
aauugcuugaacccgggcugga

SEQ ID NO: 992227 - RNA, 25 nt, Human
acaaaaaacaaaacagcaaaagaaa

SEQ ID NO: 992228 - RNA, 22 nt, Human
acaaacaaacaaacaaaaaaca

SEQ ID NO: 992229 - RNA, 19 nt, Human
acagaaacagcacaggggc

SEQ ID NO: 992230 - RNA, 23 nt, Human
acagagcaugacucugucucaaa

SEQ ID NO: 992231 - RNA, 24 nt, Human
acagagcaugacucugucucaaaa

SEQ ID NO: 992232 - RNA, 18 nt, Human
accaaacccaagcagagu

SEQ ID NO: 992233 - RNA, 19 nt, Human
acccacccaaaaaaacuac

SEQ ID NO: 992234 - RNA, 18 nt, Human
accccgucucuacuaaaa

SEQ ID NO: 992235 - RNA, 19 nt, Human
acccgggcuggaguacagu

SEQ ID NO: 992236 - RNA, 23 nt, Human
acucagaaguuggggagccucug

SEQ ID NO: 992237 - RNA, 24 nt, Human
acugcacuccagcccgggugacag

SEQ ID NO: 992238 - RNA, 26 nt, Human
acugcacuccagcccgggugacagag

SEQ ID NO: 992239 - RNA, 18 nt, Human
acugcagagacuuagcug

SEQ ID NO: 992240 - RNA, 22 nt, Human
agaaaaaaaagaaaaaaaaaaa

SEQ ID NO: 992241 - RNA, 18 nt, Human
agagcaugacucugucuc

SEQ ID NO: 992242 - RNA, 18 nt, Human
agagggcacgggaggaag

SEQ ID NO: 992243 - RNA, 22 nt, Human
agcaaaaaucuaaacauucaac

SEQ ID NO: 992244 - RNA, 24 nt, Human
agcaaaaaucuaaacauucaacug

SEQ ID NO: 992245 - RNA, 24 nt, Human
agcaaaagaaaaaaugggggaaag

SEQ ID NO: 992246 - RNA, 20 nt, Human
agcaaugaaacagcaaaaga

SEQ ID NO: 992247 - RNA, 19 nt, Human
agcacaggggcagcuugga

SEQ ID NO: 992248 - RNA, 23 nt, Human
agccagacaugguggcgggugcc

SEQ ID NO: 992249 - RNA, 24 nt, Human
agccuggccaagauggugaaaccc

SEQ ID NO: 992250 - RNA, 27 nt, Human
aggaggcuucuaacccuuuuccagccc

SEQ ID NO: 992251 - RNA, 23 nt, Human
aggcaaauaauugcuugaacccg

SEQ ID NO: 992252 - RNA, 18 nt, Human
aggcaacacagagagccc

SEQ ID NO: 992253 - RNA, 24 nt, Human
aggcaacacagagagcccaggaaa

SEQ ID NO: 992254 - RNA, 18 nt, Human
aggcauccugcagcaguu

SEQ ID NO: 992255 - RNA, 23 nt, Human
aggcugaggcaaauaauugcuug

SEQ ID NO: 992256 - RNA, 21 nt, Human
agggaaaaacacuaaagaaaa

SEQ ID NO: 992257 - RNA, 23 nt, Human
aggucaggaguuccaagaccagc

SEQ ID NO: 992258 - RNA, 18 nt, Human
agugcaguggugccagcu

SEQ ID NO: 992259 - RNA, 20 nt, Human
aucgcaccacugcacuccag

SEQ ID NO: 992260 - RNA, 22 nt, Human
augcagugcacucucguucccc

SEQ ID NO: 992261 - RNA, 22 nt, Human
auggcuucagggaucuucccag

SEQ ID NO: 992262 - RNA, 24 nt, Human
augggccccucuaauccaaguugc

SEQ ID NO: 992263 - RNA, 24 nt, Human
auuaaaagaaaaaccaaacaccuu

SEQ ID NO: 992264 - RNA, 20 nt, Human
caaaaaaagggaaaaagaaa

SEQ ID NO: 992265 - RNA, 22 nt, Human
caaaaaacaaaaaacaaaacag

SEQ ID NO: 992266 - RNA, 23 nt, Human
caaaacggaaacccaggacagcu

SEQ ID NO: 992267 - RNA, 25 nt, Human
caaaacggaaacccaggacagcugg

SEQ ID NO: 992268 - RNA, 25 nt, Human
caaaagacaaaaaaguuauuuacag

SEQ ID NO: 992269 - RNA, 24 nt, Human
caaacaaacaaaaaacaaaaaaca

SEQ ID NO: 992270 - RNA, 27 nt, Human
caaacaaacaaaaaacaaaaaacaaaa

SEQ ID NO: 992271 - RNA, 20 nt, Human
caaacaaacaaacaaaaaac

SEQ ID NO: 992272 - RNA, 18 nt, Human
caaaccaaugauaaaaca

SEQ ID NO: 992273 - RNA, 19 nt, Human
caaaccacagcaaaaaaag

SEQ ID NO: 992274 - RNA, 24 nt, Human
caaccaaacccaagcagagucugc

SEQ ID NO: 992275 - RNA, 26 nt, Human
caaccaaacccaagcagagucugccc

SEQ ID NO: 992276 - RNA, 23 nt, Human
caaccauuuggaauuucacacua

SEQ ID NO: 992277 - RNA, 24 nt, Human
caagauggugaaaccccgucucua

SEQ ID NO: 992278 - RNA, 23 nt, Human
cacaccuggcuugacagaaacag

SEQ ID NO: 992279 - RNA, 21 nt, Human
cacagcaaaaaaagggaaaaa

SEQ ID NO: 992280 - RNA, 26 nt, Human
caccacugcacuccagcccgggugac

SEQ ID NO: 992281 - RNA, 22 nt, Human
cacccaaaaaaacuacaauaaa

SEQ ID NO: 992282 - RNA, 22 nt, Human
cacuccagcccgggugacagag

SEQ ID NO: 992283 - RNA, 22 nt, Human
cacucucguuccccacaccugg

SEQ ID NO: 992284 - RNA, 19 nt, Human
cacugcacuccagcccggg

SEQ ID NO: 992285 - RNA, 21 nt, Human
cacugcacuccagcccgggug

SEQ ID NO: 992286 - RNA, 23 nt, Human
cacugcacuccagcccgggugac

SEQ ID NO: 992287 - RNA, 24 nt, Human
cacugcacuccagcccgggugaca

SEQ ID NO: 992288 - RNA, 25 nt, Human
cacugcacuccagcccgggugacag

SEQ ID NO: 992289 - RNA, 18 nt, Human
cacugggcaggggcuucu

SEQ ID NO: 992290 - RNA, 19 nt, Human
cagaaacagcacaggggca

SEQ ID NO: 992291 - RNA, 21 nt, Human
cagagucagcagaggagaggg

SEQ ID NO: 992292 - RNA, 18 nt, Human
cagcaaaaaaagggaaaa

SEQ ID NO: 992293 - RNA, 19 nt, Human
cagcaaaagaggcugggcg

SEQ ID NO: 992294 - RNA, 20 nt, Human
cagcacaggggcagcuugga

SEQ ID NO: 992295 - RNA, 22 nt, Human
cagcagaagcagcagcaccaug

SEQ ID NO: 992296 - RNA, 25 nt, Human
cagcagcaccaugcuugucuccgau

SEQ ID NO: 992297 - RNA, 22 nt, Human
cagcaguggacaccauuccugc

SEQ ID NO: 992298 - RNA, 19 nt, Human
cagccccaccuucucugaa

SEQ ID NO: 992299 - RNA, 21 nt, Human
cauuuuacauaauggggaaau

SEQ ID NO: 992300 - RNA, 22 nt, Human
ccaaaacggaaacccaggacag

SEQ ID NO: 992301 - RNA, 25 nt, Human
ccacccaaaaaaacuacaauaaaaa

SEQ ID NO: 992302 - RNA, 20 nt, Human
ccacugcacuccagcccggg

SEQ ID NO: 992303 - RNA, 21 nt, Human
ccacugcacuccagcccgggu

SEQ ID NO: 992304 - RNA, 24 nt, Human
ccacugcacuccagcccgggugac

SEQ ID NO: 992305 - RNA, 25 nt, Human
ccacugcacuccagcccgggugaca

SEQ ID NO: 992306 - RNA, 21 nt, Human
ccagaguucccuacuacaggc

SEQ ID NO: 992307 - RNA, 23 nt, Human
ccagaguucccuacuacaggcau

SEQ ID NO: 992308 - RNA, 18 nt, Human
ccagcagauggcucacuu

SEQ ID NO: 992309 - RNA, 23 nt, Human
ccagugacacuacucaggacaaa

SEQ ID NO: 992310 - RNA, 19 nt, Human
ccauuccugcuuuccccaa

SEQ ID NO: 992311 - RNA, 20 nt, Human
cccaaaaaaacuacaauaaa

SEQ ID NO: 992312 - RNA, 18 nt, Human
cccaaaguuuccugccac

SEQ ID NO: 992313 - RNA, 21 nt, Human
cccagaaaguacagaacacau

SEQ ID NO: 992314 - RNA, 19 nt, Human
ccccaaaguuuccugccac

SEQ ID NO: 992315 - RNA, 24 nt, Human
ccccacccacccaaaaaaacuaca

SEQ ID NO: 992316 - RNA, 25 nt, Human
ccccacccacccaaaaaaacuacaa

SEQ ID NO: 992317 - RNA, 20 nt, Human
cccccacccacccaaaaaaa

SEQ ID NO: 992318 - RNA, 23 nt, Human
ccccgucucuacuaaaagccaga

SEQ ID NO: 992319 - RNA, 18 nt, Human
cccggccugacacucggc

SEQ ID NO: 992320 - RNA, 19 nt, Human
ccuauaaucccagcuacuc

SEQ ID NO: 992321 - RNA, 21 nt, Human
ccuauaaucccagcuacucgg

SEQ ID NO: 992322 - RNA, 22 nt, Human
ccuauaaucccagcuacucggg

SEQ ID NO: 992323 - RNA, 23 nt, Human
ccucaguggcagugguggguccu

SEQ ID NO: 992324 - RNA, 22 nt, Human
ccugaccagcagauggcucacu

SEQ ID NO: 992325 - RNA, 18 nt, Human
ccugagcccagcccagga

SEQ ID NO: 992326 - RNA, 23 nt, Human
ccuggccaagauggugaaacccc

SEQ ID NO: 992327 - RNA, 24 nt, Human
ccuggccaagauggugaaaccccg

SEQ ID NO: 992328 - RNA, 18 nt, Human
ccuucagcgauccguuca

SEQ ID NO: 992329 - RNA, 23 nt, Human
ccuugugccugaccuggugauuu

SEQ ID NO: 992330 - RNA, 21 nt, Human
cgcaccacugcacuccagccc

SEQ ID NO: 992331 - RNA, 21 nt, Human
cggcgcggggcgucccggcgg

SEQ ID NO: 992332 - RNA, 20 nt, Human
cgggaggcugaggcaaauaa

SEQ ID NO: 992333 - RNA, 21 nt, Human
cgggaggcugaggcaaauaau

SEQ ID NO: 992334 - RNA, 19 nt, Human
cgggcuggaguacagugag

SEQ ID NO: 992335 - RNA, 20 nt, Human
cucaaaaaaacaaacaaaca

SEQ ID NO: 992336 - RNA, 19 nt, Human
cucagugcacuggggggag

SEQ ID NO: 992337 - RNA, 23 nt, Human
cugagcccagcccaggaaaccag

SEQ ID NO: 992338 - RNA, 27 nt, Human
cugcagcaguugcaccagaccugggcu

SEQ ID NO: 992339 - RNA, 18 nt, Human
cugcccccugcuguggcu

SEQ ID NO: 992340 - RNA, 22 nt, Human
cugcggcagacaagccaaugcg

SEQ ID NO: 992341 - RNA, 22 nt, Human
cugcuguggcuuucuacccuuc

SEQ ID NO: 992342 - RNA, 21 nt, Human
cuguggcuuucuacccuucug

SEQ ID NO: 992343 - RNA, 22 nt, Human
cuuccuguugaagaccucugga

SEQ ID NO: 992344 - RNA, 22 nt, Human
gaaccaaaacggaaacccagga

SEQ ID NO: 992345 - RNA, 21 nt, Human
gaagaggcugggcaaauggca

SEQ ID NO: 992346 - RNA, 23 nt, Human
gaaggcaguuccuccgcagcagu

SEQ ID NO: 992347 - RNA, 20 nt, Human
gacugcccccugcuguggcu

SEQ ID NO: 992348 - RNA, 21 nt, Human
gcaacagaugggcgacucaga

SEQ ID NO: 992349 - RNA, 25 nt, Human
gcaaugaaacagcaaaagaggcugg

SEQ ID NO: 992350 - RNA, 20 nt, Human
gcaccacugcacuccagccc

SEQ ID NO: 992351 - RNA, 18 nt, Human
gcacgggaggaagaagcc

SEQ ID NO: 992352 - RNA, 24 nt, Human
gcacuccagcccgggugacagagc

SEQ ID NO: 992353 - RNA, 24 nt, Human
gccaagauggugaaaccccgucuc

SEQ ID NO: 992354 - RNA, 24 nt, Human
gcucacugacagggcugggaugga

SEQ ID NO: 992355 - RNA, 18 nt, Human
gcucccucaccacccucc

SEQ ID NO: 992356 - RNA, 20 nt, Human
gcugagaucgcaccacugca

SEQ ID NO: 992357 - RNA, 20 nt, Human
gcuggaacaaagguguccca

SEQ ID NO: 992358 - RNA, 25 nt, Human
gcuggaguacagugagcugagaucg

SEQ ID NO: 992359 - RNA, 19 nt, Human
gcugggcgugguggcucac

SEQ ID NO: 992360 - RNA, 20 nt, Human
gcuguggcuuucuacccuuc

SEQ ID NO: 992361 - RNA, 22 nt, Human
gcuguggcuuucuacccuucug

SEQ ID NO: 992362 - RNA, 21 nt, Human
gcuuaaaaaaacaaaaaaaaa

SEQ ID NO: 992363 - RNA, 23 nt, Human
gcuucuaacccuuuuccagcccc

SEQ ID NO: 992364 - RNA, 21 nt, Human
ggaguacagugagcugagauc

SEQ ID NO: 992365 - RNA, 22 nt, Human
ggaguacagugagcugagaucg

SEQ ID NO: 992366 - RNA, 20 nt, Human
ggccaagauggugaaacccc

SEQ ID NO: 992367 - RNA, 23 nt, Human
ggcccccaucacagugcaguggu

SEQ ID NO: 992368 - RNA, 20 nt, Human
ggcucacgaggucaggaguu

SEQ ID NO: 992369 - RNA, 18 nt, Human
ggcuggaguacagugagc

SEQ ID NO: 992370 - RNA, 22 nt, Human
ggcuggaguacagugagcugag

SEQ ID NO: 992371 - RNA, 23 nt, Human
ggcuucuaacccuuuuccagccc

SEQ ID NO: 992372 - RNA, 20 nt, Human
gggaaaugccaaccagaauu

SEQ ID NO: 992373 - RNA, 22 nt, Human
gggagcggggggcgccgggggc

SEQ ID NO: 992374 - RNA, 19 nt, Human
gggauggaagaggcugggc

SEQ ID NO: 992375 - RNA, 21 nt, Human
gggcaaaaguguucaagaaca

SEQ ID NO: 992376 - RNA, 20 nt, Human
gggcaaauggcagcaucagu

SEQ ID NO: 992377 - RNA, 18 nt, Human
gggcaggggcuucuguaa

SEQ ID NO: 992378 - RNA, 18 nt, Human
gggcugggauggaagagg

SEQ ID NO: 992379 - RNA, 24 nt, Human
gguggcgggugccuauaaucccag

SEQ ID NO: 992380 - RNA, 19 nt, Human
gguggcucacgaggucagg

SEQ ID NO: 992381 - RNA, 24 nt, Human
gguuguuuuuuuuuuuuuuucccu

SEQ ID NO: 992382 - RNA, 21 nt, Human
guaggaggugcugggagcuuc

SEQ ID NO: 992383 - RNA, 25 nt, Human
guuuacuucccccacccacccaaaa

SEQ ID NO: 992384 - RNA, 23 nt, Human
uaaaagaaaaaccaaacaccuuu

SEQ ID NO: 992385 - RNA, 18 nt, Human
uaaaagaauucaaaacug

SEQ ID NO: 992386 - RNA, 21 nt, Human
uaaaagccagacaugguggcg

SEQ ID NO: 992387 - RNA, 23 nt, Human
uacaauaaaaauuaaaagaaaaa

SEQ ID NO: 992388 - RNA, 19 nt, Human
uacaggcauccugcagcag

SEQ ID NO: 992389 - RNA, 24 nt, Human
uacccuucugugccugcggcagaa

SEQ ID NO: 992390 - RNA, 22 nt, Human
uagaaaguugagucagagucug

SEQ ID NO: 992391 - RNA, 26 nt, Human
uagaaaguugagucagagucugcugg

SEQ ID NO: 992392 - RNA, 20 nt, Human
uagcaaaaaucuaaacauuc

SEQ ID NO: 992393 - RNA, 21 nt, Human
uagcaauaaccuaggauuagu

SEQ ID NO: 992394 - RNA, 24 nt, Human
uauuuuggcuagcaauaaccuagg

SEQ ID NO: 992395 - RNA, 21 nt, Human
ucaagaacaaagggaaaaaca

SEQ ID NO: 992396 - RNA, 22 nt, Human
ucaagaacaaagggaaaaacac

SEQ ID NO: 992397 - RNA, 26 nt, Human
ucacacucccacagcaacagaugggc

SEQ ID NO: 992398 - RNA, 25 nt, Human
ucacgaggucaggaguuccaagacc

SEQ ID NO: 992399 - RNA, 20 nt, Human
ucacugggcaggggcuucug

SEQ ID NO: 992400 - RNA, 22 nt, Human
ucagcgauccguucacacuccc

SEQ ID NO: 992401 - RNA, 18 nt, Human
ucaggaaaacuaaaggcu

SEQ ID NO: 992402 - RNA, 22 nt, Human
ucagucuaguuuacuuccccca

SEQ ID NO: 992403 - RNA, 20 nt, Human
ucccaaguaggaggugcugg

SEQ ID NO: 992404 - RNA, 22 nt, Human
ucccagcggcuuucggguccac

SEQ ID NO: 992405 - RNA, 22 nt, Human
ucccggcggggagcggggggcg

SEQ ID NO: 992406 - RNA, 23 nt, Human
ucccuacuacaggcauccugcag

SEQ ID NO: 992407 - RNA, 20 nt, Human
uccuugugccugaccuggug

SEQ ID NO: 992408 - RNA, 22 nt, Human
ucgggaggcugaggcaaauaau

SEQ ID NO: 992409 - RNA, 20 nt, Human
ucucaaaaaaacaaacaaac

SEQ ID NO: 992410 - RNA, 24 nt, Human
ucucaaaaaaacaaacaaacaaac

SEQ ID NO: 992411 - RNA, 19 nt, Human
ucucuacuaaaagccagac

SEQ ID NO: 992412 - RNA, 21 nt, Human
ucugcccuacccaacacccca

SEQ ID NO: 992413 - RNA, 23 nt, Human
ugaaacaaagacaaucccagcug

SEQ ID NO: 992414 - RNA, 24 nt, Human
ugaaacagcaaaagaggcugggcg

SEQ ID NO: 992415 - RNA, 24 nt, Human
ugaaggcaguuccuccgcagcagu

SEQ ID NO: 992416 - RNA, 18 nt, Human
ugacaaaagacaaaaaag

SEQ ID NO: 992417 - RNA, 21 nt, Human
ugacaaaagacaaaaaaguua

SEQ ID NO: 992418 - RNA, 23 nt, Human
ugacauaugggccccucuaaucc

SEQ ID NO: 992419 - RNA, 24 nt, Human
ugagaucgcaccacugcacuccag

SEQ ID NO: 992420 - RNA, 22 nt, Human
ugagcugagaucgcaccacugc

SEQ ID NO: 992421 - RNA, 23 nt, Human
ugaggcaaauaauugcuugaacc

SEQ ID NO: 992422 - RNA, 23 nt, Human
ugaggcaaauaauugcuugaacc

SEQ ID NO: 992423 - RNA, 24 nt, Human
ugaggcaaauaauugcuugaaccc

SEQ ID NO: 992424 - RNA, 24 nt, Human
ugcagggcaaaaguguucaagaac

SEQ ID NO: 992425 - RNA, 23 nt, Human
ugccaccauugugggaaaagcug

SEQ ID NO: 992426 - RNA, 22 nt, Human
ugcccggccugacacucggccu

SEQ ID NO: 992427 - RNA, 24 nt, Human
ugccuauaaucccagcuacucggg

SEQ ID NO: 992428 - RNA, 21 nt, Human
ugcuuuccccaaaguuuccug

SEQ ID NO: 992429 - RNA, 18 nt, Human
uggaagaggcugggcaaa

SEQ ID NO: 992430 - RNA, 23 nt, Human
uggaggacuuccugaccagcaga

SEQ ID NO: 992431 - RNA, 19 nt, Human
uggcagcaucaguuaaccu

SEQ ID NO: 992432 - RNA, 21 nt, Human
uggcccagugacacuacucag

SEQ ID NO: 992433 - RNA, 24 nt, Human
uggcgggugccuauaaucccagcu

SEQ ID NO: 992434 - RNA, 22 nt, Human
uggcucacgaggucaggaguuc

SEQ ID NO: 992435 - RNA, 18 nt, Human
uggcuucagggaucuucc

SEQ ID NO: 992436 - RNA, 19 nt, Human
uggcuucagggaucuuccc

SEQ ID NO: 992437 - RNA, 21 nt, Human
ugggaaaagcugccucucugg

SEQ ID NO: 992438 - RNA, 21 nt, Human
ugggggaaagggaggagcaua

SEQ ID NO: 992439 - RNA, 21 nt, Human
ugguggcucacgaggucagga

SEQ ID NO: 992440 - RNA, 18 nt, Human
uguuuggcagugauccau

SEQ ID NO: 992441 - RNA, 22 nt, Human
uucaagaacaaagggaaaaaca

SEQ ID NO: 992442 - RNA, 19 nt, Human
uuccaagaccagccuggcc

SEQ ID NO: 992443 - RNA, 21 nt, Human
uucccagcggcuuucgggucc

SEQ ID NO: 992444 - RNA, 24 nt, Human
uuccugcuuuccccaaaguuuccu

SEQ ID NO: 992445 - RNA, 20 nt, Human
uugaucuuaucuuucucugc

SEQ ID NO: 992446 - RNA, 23 nt, Human
uugcucagugcacuggggggagg

SEQ ID NO: 992447 - RNA, 19 nt, Human
uugcuugaacccgggcugg

SEQ ID NO: 992448 - RNA, 22 nt, Human
uugcuugaacccgggcuggagu

SEQ ID NO: 992449 - RNA, 19 nt, Human
uuugacaaaagacaaaaaa

SEQ ID NO: 992450 - RNA, 24 nt, Human
uuuucuccuugugccugaccuggu

SEQ ID NO: 992451 - RNA, 18 nt, Human
uuuuuuuuuuuuucccug

SEQ ID NO: 992452 - RNA, 18 nt, Human
uuuuuuuuuuuuuuucug

SEQ ID NO: 992453 - RNA, 24 nt, Human
ugaacauaaacagguuuaccacag

SEQ ID NO: 992454 - RNA, 21 nt, Human
uuuuuuuuuuuuuugggguga

SEQ ID NO: 992455 - RNA, 22 nt, Human
uuuuuuuuuuuuuuuuuggggu

SEQ ID NO: 992456 - RNA, 22 nt, Human
acaaacagcuuugcuaacagag

SEQ ID NO: 992457 - RNA, 18 nt, Human
cugcaucgacuagcagca

SEQ ID NO: 992458 - RNA, 27 nt, Human
cuuaucguuacuguuguuuccgagaaa

SEQ ID NO: 992459 - RNA, 20 nt, Human
uuuuuuggggugaauaaaca

SEQ ID NO: 992460 - RNA, 18 nt, Human
uuuuuuuuuuuuuuuuug

SEQ ID NO: 992461 - RNA, 24 nt, Human
uuuuuuuuuuuuuuuuugggguga

SEQ ID NO: 992462 - RNA, 25 nt, Human
uuuuuuuuuuuuuuuuuuuuugggg

SEQ ID NO: 992463 - RNA, 21 nt, Human
aaaauaaucagaaaaucaaga

SEQ ID NO: 992464 - RNA, 21 nt, Human
aaacaaaucagcagggaggac

SEQ ID NO: 992465 - RNA, 20 nt, Human
aaacgagagcagcacaaucc

SEQ ID NO: 992466 - RNA, 24 nt, Human
aaagcccaaagcagcccccuaccu

SEQ ID NO: 992467 - RNA, 18 nt, Human
aagcagcccccuaccucu

SEQ ID NO: 992468 - RNA, 24 nt, Human
aagugcaggugcaaagcccaaagc

SEQ ID NO: 992469 - RNA, 19 nt, Human
aaguggaaguugauucacu

SEQ ID NO: 992470 - RNA, 21 nt, Human
aaugccacagucaaggaccaa

SEQ ID NO: 992471 - RNA, 26 nt, Human
accaaagugcaggugcaaagcccagu

SEQ ID NO: 992472 - RNA, 22 nt, Human
agcacaauccauuggugacguu

SEQ ID NO: 992473 - RNA, 19 nt, Human
agcucuuugcccauuggca

SEQ ID NO: 992474 - RNA, 19 nt, Human
auagcgcuuccgcccucua

SEQ ID NO: 992475 - RNA, 23 nt, Human
auggaagccaccagcauaaauaa

SEQ ID NO: 992476 - RNA, 20 nt, Human
caaggacaaaaaaaucaaag

SEQ ID NO: 992477 - RNA, 21 nt, Human
caccacagccacaacagucug

SEQ ID NO: 992478 - RNA, 19 nt, Human
cagagcccgggccccaggg

SEQ ID NO: 992479 - RNA, 18 nt, Human
cagaggaggaacggaugg

SEQ ID NO: 992480 - RNA, 23 nt, Human
cagcacaauccauuggugacguu

SEQ ID NO: 992481 - RNA, 22 nt, Human
cagcagcgcagccugcccaggc

SEQ ID NO: 992482 - RNA, 21 nt, Human
cagcauaaauaaagggaacac

SEQ ID NO: 992483 - RNA, 21 nt, Human
cagcccagacccgccacuaaa

SEQ ID NO: 992484 - RNA, 24 nt, Human
cagcgcagccugcccaaccccugg

SEQ ID NO: 992485 - RNA, 29 nt, Human
cauauuuauuuuaaaaaucugugauggga

SEQ ID NO: 992486 - RNA, 24 nt, Human
cccaaagcagcccccuaccucugc

SEQ ID NO: 992487 - RNA, 21 nt, Human
ccccccguuuuucguccccuc

SEQ ID NO: 992488 - RNA, 24 nt, Human
cccccuaccucugccagcccagac

SEQ ID NO: 992489 - RNA, 22 nt, Human
ccccucuccagucccgccccug

SEQ ID NO: 992490 - RNA, 18 nt, Human
cccgccacuaaauucuag

SEQ ID NO: 992491 - RNA, 20 nt, Human
ccgccaagacgaagggcggg

SEQ ID NO: 992492 - RNA, 21 nt, Human
ccgcugccgccaagacgaagg

SEQ ID NO: 992493 - RNA, 20 nt, Human
ccuacagagcccgggcccca

SEQ ID NO: 992494 - RNA, 26 nt, Human
cgcgagauccgcgcgcggggccccuc

SEQ ID NO: 992495 - RNA, 18 nt, Human
cucaaggacaaaaaaauc

SEQ ID NO: 992496 - RNA, 21 nt, Human
cucaaggacaaaaaaaucaaa

SEQ ID NO: 992497 - RNA, 21 nt, Human
cuccgccucguacuuccgaga

SEQ ID NO: 992498 - RNA, 23 nt, Human
cugcgcgcgucucucagucuccc

SEQ ID NO: 992499 - RNA, 18 nt, Human
cuggagcucccucgccuc

SEQ ID NO: 992500 - RNA, 19 nt, Human
cuggccccccguuuuucgu

SEQ ID NO: 992501 - RNA, 22 nt, Human
cuuccgagaccuuacaggcaga

SEQ ID NO: 992502 - RNA, 22 nt, Human
gccaccagcauaaauaaaggga

SEQ ID NO: 992503 - RNA, 21 nt, Human
gcggggccccucuccaguccc

SEQ ID NO: 992504 - RNA, 25 nt, Human
gcugaaacgagagcagcacaaucca

SEQ ID NO: 992505 - RNA, 21 nt, Human
ggcagcugcugaugucggcgc

SEQ ID NO: 992506 - RNA, 22 nt, Human
ggccccagggaggguggucagc

SEQ ID NO: 992507 - RNA, 22 nt, Human
gggaacacagaagaacaauguc

SEQ ID NO: 992508 - RNA, 26 nt, Human
gggaggcgagccucuucuuccugguu

SEQ ID NO: 992509 - RNA, 24 nt, Human
gguacaacuaaguggaaguugauu

SEQ ID NO: 992510 - RNA, 25 nt, Human
uaaaauaaucagaaaaucaagaaga

SEQ ID NO: 992511 - RNA, 19 nt, Human
uagggggcagcugcugaug

SEQ ID NO: 992512 - RNA, 20 nt, Human
uaguagaaaagcacuuccac

SEQ ID NO: 992513 - RNA, 18 nt, Human
ucagcagggaggacaagg

SEQ ID NO: 992514 - RNA, 24 nt, Human
uccccaucuucuaugucuucugua

SEQ ID NO: 992515 - RNA, 23 nt, Human
uccgcgcgcggggccccucucca

SEQ ID NO: 992516 - RNA, 22 nt, Human
ucguccccuccgccucguacuu

SEQ ID NO: 992517 - RNA, 22 nt, Human
ucucaagcuacauaaaauaauc

SEQ ID NO: 992518 - RNA, 22 nt, Human
ucucaugcuagacagguuagac

SEQ ID NO: 992519 - RNA, 21 nt, Human
ucuccaccacagccacaacag

SEQ ID NO: 992520 - RNA, 23 nt, Human
ucuccagucccgccccugcugcg

SEQ ID NO: 992521 - RNA, 20 nt, Human
ucucccgcugccgccaagac

SEQ ID NO: 992522 - RNA, 18 nt, Human
ucugugaugggacagugg

SEQ ID NO: 992523 - RNA, 22 nt, Human
ugaaacgagagcagcacaaucc

SEQ ID NO: 992524 - RNA, 25 nt, Human
ugaaacgagagcagcacaauccauu

SEQ ID NO: 992525 - RNA, 22 nt, Human
ugcagagagaaacagugcagag

SEQ ID NO: 992526 - RNA, 19 nt, Human
ugcccaggcugggaucucc

SEQ ID NO: 992527 - RNA, 24 nt, Human
ugcuguuuugguuugcugcugaag

SEQ ID NO: 992528 - RNA, 19 nt, Human
uggaagccaccagcauaaa

SEQ ID NO: 992529 - RNA, 20 nt, Human
uggaaguugauucacuuugu

SEQ ID NO: 992530 - RNA, 23 nt, Human
ugggaggcgagccucuucuuccu

SEQ ID NO: 992531 - RNA, 19 nt, Human
ugguuugcugcugaagucu

SEQ ID NO: 992532 - RNA, 25 nt, Human
uuagaaacaaaucagcagggaggac

SEQ ID NO: 992533 - RNA, 18 nt, Human
uuccccaucuucuauguc

SEQ ID NO: 992534 - RNA, 23 nt, Human
uucguccccuccgccucguacuu

SEQ ID NO: 992535 - RNA, 21 nt, Human
uuuuucguccccuccgccucg

SEQ ID NO: 992536 - RNA, 21 nt, Human
cuccuuuauugccacauucac

SEQ ID NO: 992537 - RNA, 24 nt, Human
gaucucuucuccuuuauugccacc

SEQ ID NO: 992538 - RNA, 19 nt, Human
gguaaaagcuaaagaaaau

SEQ ID NO: 992539 - RNA, 19 nt, Human
aaacaaaaaaaaacacagg

SEQ ID NO: 992540 - RNA, 25 nt, Human
aaacaaacaaauaaaaccuccaaaa

SEQ ID NO: 992541 - RNA, 25 nt, Human
aaacacccacagguguggaggggca

SEQ ID NO: 992542 - RNA, 18 nt, Human
aaaguacagaggcacacc

SEQ ID NO: 992543 - RNA, 24 nt, Human
aaagugcugggauuacaggcguga

SEQ ID NO: 992544 - RNA, 21 nt, Human
aacacacccguaagacacaga

SEQ ID NO: 992545 - RNA, 19 nt, Human
aacacagugaaaccccauc

SEQ ID NO: 992546 - RNA, 20 nt, Human
aacacagugaaaccccaucu

SEQ ID NO: 992547 - RNA, 20 nt, Human
aacacagugaaaccccaucu

SEQ ID NO: 992548 - RNA, 21 nt, Human
aacacagugaaaccccaucuc

SEQ ID NO: 992549 - RNA, 18 nt, Human
aacacagugaaagugucu

SEQ ID NO: 992550 - RNA, 19 nt, Human
aacacagugaaagugucuc

SEQ ID NO: 992551 - RNA, 18 nt, Human
aagaggaaggcuucuguc

SEQ ID NO: 992552 - RNA, 23 nt, Human
aagaucuuuuacuuuggugcucu

SEQ ID NO: 992553 - RNA, 25 nt, Human
aagcaauccucccaccucagccucc

SEQ ID NO: 992554 - RNA, 24 nt, Human
aagcauagucaucauugaaaucac

SEQ ID NO: 992555 - RNA, 20 nt, Human
aagcaugcaccacugcaucc

SEQ ID NO: 992556 - RNA, 25 nt, Human
aagcgauccucccgcuucagccucc

SEQ ID NO: 992557 - RNA, 18 nt, Human
aagggguuucaccauguu

SEQ ID NO: 992558 - RNA, 20 nt, Human
aagggguuucaccauguugg

SEQ ID NO: 992559 - RNA, 24 nt, Human
aagggguuucaccauguuggccag

SEQ ID NO: 992560 - RNA, 19 nt, Human
aaguagcugggauuauagg

SEQ ID NO: 992561 - RNA, 19 nt, Human
aagugcugggauuacaggc

SEQ ID NO: 992562 - RNA, 19 nt, Human
aagugcugggauuacaggc

SEQ ID NO: 992563 - RNA, 18 nt, Human
aaugucuggguguaaagc

SEQ ID NO: 992564 - RNA, 18 nt, Human
aauuacaagcaugcacca

SEQ ID NO: 992565 - RNA, 18 nt, Human
aauugccugaacccggga

SEQ ID NO: 992566 - RNA, 22 nt, Human
aauuuuguauuuuuaguagaga

SEQ ID NO: 992567 - RNA, 19 nt, Human
acaaaaaaaaacacaggga

SEQ ID NO: 992568 - RNA, 18 nt, Human
acaaaggcaaacaacaga

SEQ ID NO: 992569 - RNA, 22 nt, Human
acagagcaaggcugucucacaa

SEQ ID NO: 992570 - RNA, 21 nt, Human
acaggcacccaccaccacacc

SEQ ID NO: 992571 - RNA, 19 nt, Human
acagugaaaccccaucucc

SEQ ID NO: 992572 - RNA, 24 nt, Human
accauguuggccaggcugcucuug

SEQ ID NO: 992573 - RNA, 23 nt, Human
acccaggcuggagugcaguggug

SEQ ID NO: 992574 - RNA, 24 nt, Human
acccaggcuggagugcaguggugu

SEQ ID NO: 992575 - RNA, 22 nt, Human
acccguaagacacagaucgcuc

SEQ ID NO: 992576 - RNA, 19 nt, Human
accuuacccccaacccugu

SEQ ID NO: 992577 - RNA, 21 nt, Human
acguucauuuuuucuaacugg

SEQ ID NO: 992578 - RNA, 21 nt, Human
acucugaugaguugcacacua

SEQ ID NO: 992579 - RNA, 24 nt, Human
acugcacuccagccugggcaacag

SEQ ID NO: 992580 - RNA, 24 nt, Human
acugcacuccagccugggcaacag

SEQ ID NO: 992581 - RNA, 18 nt, Human
acuuugggccagaugcag

SEQ ID NO: 992582 - RNA, 19 nt, Human
agaaagaaguagacauagg

SEQ ID NO: 992583 - RNA, 22 nt, Human
agagguuuugcuuauggccagu

SEQ ID NO: 992584 - RNA, 25 nt, Human
agaucacuugaagucaggaguuuga

SEQ ID NO: 992585 - RNA, 24 nt, Human
agcaauucuugugccucagcuucc

SEQ ID NO: 992586 - RNA, 23 nt, Human
agcacagugguucacaccuguaa

SEQ ID NO: 992587 - RNA, 24 nt, Human
agcagcucaugccugcaaucccag

SEQ ID NO: 992588 - RNA, 19 nt, Human
agccaccacaccuggccua

SEQ ID NO: 992589 - RNA, 21 nt, Human
agccaggaguucaagaccagc

SEQ ID NO: 992590 - RNA, 24 nt, Human
agccuggccaacacagugaaaccc

SEQ ID NO: 992591 - RNA, 22 nt, Human
agccugggcagcauagugagac

SEQ ID NO: 992592 - RNA, 24 nt, Human
agccugggcagcauagugagaccc

SEQ ID NO: 992593 - RNA, 25 nt, Human
agccugggcagcauagugagacccu

SEQ ID NO: 992594 - RNA, 23 nt, Human
aggaguucaagaccagccugggc

SEQ ID NO: 992595 - RNA, 20 nt, Human
aggaguuugagaccagccug

SEQ ID NO: 992596 - RNA, 24 nt, Human
aggauagcuugaagccaggaguuc

SEQ ID NO: 992597 - RNA, 24 nt, Human
aggcaaacaacagauuaaaaagca

SEQ ID NO: 992598 - RNA, 24 nt, Human
aggcacagucgcucaugccuguaa

SEQ ID NO: 992599 - RNA, 18 nt, Human
aggcaggaggaucacuug

SEQ ID NO: 992600 - RNA, 24 nt, Human
aggccgagguugcagugagcugag

SEQ ID NO: 992601 - RNA, 26 nt, Human
aggcgggcagaucacuugaagucagg

SEQ ID NO: 992602 - RNA, 18 nt, Human
agggaccucugccuagga

SEQ ID NO: 992603 - RNA, 24 nt, Human
agggguuucaccauguuggccagg

SEQ ID NO: 992604 - RNA, 24 nt, Human
aggugaucugcccaccucagccuc

SEQ ID NO: 992605 - RNA, 19 nt, Human
aguacagaggcacaccacc

SEQ ID NO: 992606 - RNA, 23 nt, Human
agucgcucaugccuguaauccca

SEQ ID NO: 992607 - RNA, 24 nt, Human
agucgcucaugccuguaaucccag

SEQ ID NO: 992608 - RNA, 19 nt, Human
agugcaguggcaugaucuc

SEQ ID NO: 992609 - RNA, 21 nt, Human
agugcaguggcaugaucucag

SEQ ID NO: 992610 - RNA, 23 nt, Human
agugcaguggcaugaucucagcu

SEQ ID NO: 992611 - RNA, 20 nt, Human
agugcaguggugugaucaug

SEQ ID NO: 992612 - RNA, 23 nt, Human
agugcaguggugugaucauggcu

SEQ ID NO: 992613 - RNA, 24 nt, Human
agugcaguggugugaucauggcuc

SEQ ID NO: 992614 - RNA, 18 nt, Human
agugcugggauuacaggc

SEQ ID NO: 992615 - RNA, 24 nt, Human
aguggcaugaucucagcucacugc

SEQ ID NO: 992616 - RNA, 24 nt, Human
agugguucacaccuguaaucccag

SEQ ID NO: 992617 - RNA, 20 nt, Human
aucacuugaagucaggaguu

SEQ ID NO: 992618 - RNA, 24 nt, Human
aucacuugaagucaggaguuugag

SEQ ID NO: 992619 - RNA, 19 nt, Human
augccugcaaucccagcac

SEQ ID NO: 992620 - RNA, 19 nt, Human
augccuguaaucccagcac

SEQ ID NO: 992621 - RNA, 18 nt, Human
augggguuucgccauguu

SEQ ID NO: 992622 - RNA, 23 nt, Human
augggguuucgccauguuggcca

SEQ ID NO: 992623 - RNA, 24 nt, Human
augggguuucgccauguuggccag

SEQ ID NO: 992624 - RNA, 21 nt, Human
auguuuuagugcugcagaggu

SEQ ID NO: 992625 - RNA, 21 nt, Human
auucuccugccucagccuccc

SEQ ID NO: 992626 - RNA, 24 nt, Human
auuucgucacugcacuccagccug

SEQ ID NO: 992627 - RNA, 27 nt, Human
caaacaaauaaaaccuccaaaaacaaa

SEQ ID NO: 992628 - RNA, 18 nt, Human
caaaggccgcagggaccu

SEQ ID NO: 992629 - RNA, 24 nt, Human
caacagacaggccugggcaacaca

SEQ ID NO: 992630 - RNA, 22 nt, Human
caaccaauucuccugccucagc

SEQ ID NO: 992631 - RNA, 27 nt, Human
caagaaacaaauaaaaaaugggcugaa

SEQ ID NO: 992632 - RNA, 20 nt, Human
caagaccagccugggcagca

SEQ ID NO: 992633 - RNA, 18 nt, Human
caagcuaaacauccccuu

SEQ ID NO: 992634 - RNA, 20 nt, Human
caaggcaggaggaucacuug

SEQ ID NO: 992635 - RNA, 25 nt, Human
caaggcaggaggaucacuugaggcc

SEQ ID NO: 992636 - RNA, 24 nt, Human
caagguuucaccauguugcccagg

SEQ ID NO: 992637 - RNA, 23 nt, Human
caaguacccagagacgcaaaaua

SEQ ID NO: 992638 - RNA, 24 nt, Human
cacaccuguaaucccagcacuuug

SEQ ID NO: 992639 - RNA, 24 nt, Human
cacaucuguaaucccagcuacuug

SEQ ID NO: 992640 - RNA, 23 nt, Human
caccacaccuggccuaaaacucu

SEQ ID NO: 992641 - RNA, 26 nt, Human
caccacugcauccagaccgggugucc

SEQ ID NO: 992642 - RNA, 24 nt, Human
caccauguugcccaggcuggucuc

SEQ ID NO: 992643 - RNA, 27 nt, Human
caccauguugcccaggcuggucucaaa

SEQ ID NO: 992644 - RNA, 22 nt, Human
caccauguuggccaggcugcuc

SEQ ID NO: 992645 - RNA, 23 nt, Human
caccauguuggccaggcugcucu

SEQ ID NO: 992646 - RNA, 24 nt, Human
caccauguuggccaggcugcucuu

SEQ ID NO: 992647 - RNA, 31 nt, Human; identical to SEQ ID NO: 734034

SEQ ID NO: 992648 - RNA, 18 nt, Human
cacccaccaccacaccug

SEQ ID NO: 992649 - RNA, 21 nt, Human
cacccaggcuggagugcagug

SEQ ID NO: 992650 - RNA, 24 nt, Human
caccucagccucccaaagugcugg

SEQ ID NO: 992651 - RNA, 24 nt, Human
caccucagccucccaaguagcugg

SEQ ID NO: 992652 - RNA, 19 nt, Human
caccuguaaucccagcacu

SEQ ID NO: 992653 - RNA, 24 nt, Human
caccuguaaucccagcacuuuggg

SEQ ID NO: 992654 - RNA, 21 nt, Human
cacuauaccgccaugguucca

SEQ ID NO: 992655 - RNA, 23 nt, Human
cacuccagccugggcaacagagc

SEQ ID NO: 992656 - RNA, 24 nt, Human
cacucccuaaucucaaaccacucc

SEQ ID NO: 992657 - RNA, 23 nt, Human
cacucugucacccaggcuggagu

SEQ ID NO: 992658 - RNA, 24 nt, Human
cacucugucacccaggcuggagug

SEQ ID NO: 992659 - RNA, 18 nt, Human
cacugcacuccagccugg

SEQ ID NO: 992660 - RNA, 19 nt, Human
cacugcacuccagccuggg

SEQ ID NO: 992661 - RNA, 20 nt, Human
cacugcacuccagccugggc

SEQ ID NO: 992662 - RNA, 21 nt, Human
cacugcacuccagccugggca

SEQ ID NO: 992663 - RNA, 22 nt, Human
cacugcacuccagccugggcaa

SEQ ID NO: 992664 - RNA, 23 nt, Human
cacugcacuccagccugggcaac

SEQ ID NO: 992665 - RNA, 24 nt, Human
cacugcacuccagccugggcaaca

SEQ ID NO: 992666 - RNA, 26 nt, Human
cacugcacuccagccugggcaacaga

SEQ ID NO: 992667 - RNA, 21 nt, Human
cacuguaaccucugccuccug

SEQ ID NO: 992668 - RNA, 23 nt, Human
cacuguaaccucugccuccuggg

SEQ ID NO: 992669 - RNA, 21 nt, Human
cacuugaagucaggaguuuga

SEQ ID NO: 992670 - RNA, 23 nt, Human
cacuugaagucaggaguuugaga

SEQ ID NO: 992671 - RNA, 24 nt, Human
cagcacuuuagcaggccaaggcgg

SEQ ID NO: 992672 - RNA, 22 nt, Human
cagcacuuugggagauccaagg

SEQ ID NO: 992673 - RNA, 25 nt, Human
cagcacuuugggagauccaaggcag

SEQ ID NO: 992674 - RNA, 21 nt, Human
cagcaucucugccuauucugc

SEQ ID NO: 992675 - RNA, 25 nt, Human
cagccucgaccucccuggacucaag

SEQ ID NO: 992676 - RNA, 22 nt, Human
cagcuuccugaguagcugaaag

SEQ ID NO: 992677 - RNA, 19 nt, Human
caggguuaaauggauuaag

SEQ ID NO: 992678 - RNA, 20 nt, Human
caucugaacauagugugacc

SEQ ID NO: 992679 - RNA, 23 nt, Human
caucuguaaucccagcuacuugg

SEQ ID NO: 992680 - RNA, 19 nt, Human
caugccugcaaucccagca

SEQ ID NO: 992681 - RNA, 20 nt, Human
caugccuguaaucccagcac

SEQ ID NO: 992682 - RNA, 23 nt, Human
caugccuguaaucccagcacuuu

SEQ ID NO: 992683 - RNA, 18 nt, Human
caugucuggcuaauuuuu

SEQ ID NO: 992684 - RNA, 23 nt, Human
cauguugcccaggcuggucucaa

SEQ ID NO: 992685 - RNA, 24 nt, Human
cauguugcccaggcuggucucaaa

SEQ ID NO: 992686 - RNA, 24 nt, Human
cauguuggccagacuggucucgaa

SEQ ID NO: 992687 - RNA, 24 nt, Human
cauguuggccaggcugcucuugaa

SEQ ID NO: 992688 - RNA, 24 nt, Human
ccaaaaacaaaaaaaaacacaggg

SEQ ID NO: 992689 - RNA, 20 nt, Human
ccaaagugcugggauuacag

SEQ ID NO: 992690 - RNA, 22 nt, Human
ccaaagugcugggauuacaggc

SEQ ID NO: 992691 - RNA, 22 nt, Human
ccaaagugcugggauuacaggc

SEQ ID NO: 992692 - RNA, 24 nt, Human
ccaaagugcugggauuacaggcgu

SEQ ID NO: 992693 - RNA, 22 nt, Human
ccaagcagcugugauuacaggc

SEQ ID NO: 992694 - RNA, 20 nt, Human
ccacugccuucuggcuucug

SEQ ID NO: 992695 - RNA, 19 nt, Human
ccagacuguauacaucuau

SEQ ID NO: 992696 - RNA, 22 nt, Human
ccauguuggccagacuggucuc

SEQ ID NO: 992697 - RNA, 23 nt, Human
ccauguuggccagacuggucucg

SEQ ID NO: 992698 - RNA, 23 nt, Human
cccaacccugugcucccugaaac

SEQ ID NO: 992699 - RNA, 24 nt, Human
cccaagcgauccucccgcuucagc

SEQ ID NO: 992700 - RNA, 22 nt, Human
cccaaguagcugggauuauagg

SEQ ID NO: 992701 - RNA, 23 nt, Human
cccaaguagcugggauuauaggu

SEQ ID NO: 992702 - RNA, 24 nt, Human
cccaaguagcugggauuauaggug

SEQ ID NO: 992703 - RNA, 21 nt, Human
cccacaaccuuccagauuggg

SEQ ID NO: 992704 - RNA, 23 nt, Human
cccacagguguggaggggcaacc

SEQ ID NO: 992705 - RNA, 20 nt, Human
cccaccucagccucccaagu

SEQ ID NO: 992706 - RNA, 19 nt, Human
cccauucuuucucugcccu

SEQ ID NO: 992707 - RNA, 21 nt, Human
cccauucuuucucugcccugu

SEQ ID NO: 992708 - RNA, 19 nt, Human
cccccagcccgacacccau

SEQ ID NO: 992709 - RNA, 22 nt, Human
cccggcuggaaugcaguggcac

SEQ ID NO: 992710 - RNA, 24 nt, Human
ccgcuucagccucccaaagugcua

SEQ ID NO: 992711 - RNA, 24 nt, Human
ccuccuggguucaaccaauucucc

SEQ ID NO: 992712 - RNA, 19 nt, Human
ccucugccuccuggguuca

SEQ ID NO: 992713 - RNA, 24 nt, Human
ccugaccucaggugaucugcccac

SEQ ID NO: 992714 - RNA, 20 nt, Human
ccuggacucaagcaauccuc

SEQ ID NO: 992715 - RNA, 18 nt, Human
ccuggcauuaaggucagg

SEQ ID NO: 992716 - RNA, 24 nt, Human
ccuggccaacacagugaaacccca

SEQ ID NO: 992717 - RNA, 23 nt, Human
ccuggguucaaccaauucuccug

SEQ ID NO: 992718 - RNA, 22 nt, Human
ccuuuaguuuuguuugccaaaa

SEQ ID NO: 992719 - RNA, 24 nt, Human
cgagaccagcucggucacuaacuc

SEQ ID NO: 992720 - RNA, 27 nt, Human
cgcaucugcagacuauaccacccaagg

SEQ ID NO: 992721 - RNA, 24 nt, Human
cgccauguuggccagacuggucuc

SEQ ID NO: 992722 - RNA, 27 nt, Human
cgccauguuggccagacuggucucgaa

SEQ ID NO: 992723 - RNA, 21 nt, Human
cgggaggccgagguugcagug

SEQ ID NO: 992724 - RNA, 24 nt, Human
cgggaggccgagguugcagugagc

SEQ ID NO: 992725 - RNA, 28 nt, Human
cgggaggccgagguugcagugagcugag

SEQ ID NO: 992726 - RNA, 21 nt, Human
cuaaagcacagcacuuaauuc

SEQ ID NO: 992727 - RNA, 19 nt, Human
cucaaaagacccgcccacc

SEQ ID NO: 992728 - RNA, 24 nt, Human
cucaaaagacccgcccaccucugc

SEQ ID NO: 992729 - RNA, 21 nt, Human
cucaagcaauccucccaccuc

SEQ ID NO: 992730 - RNA, 24 nt, Human
cucaagcaauccucccaccucagc

SEQ ID NO: 992731 - RNA, 21 nt, Human
cucacugcagccucgaccucc

SEQ ID NO: 992732 - RNA, 24 nt, Human
cucacuguaaccucugccuccugg

SEQ ID NO: 992733 - RNA, 24 nt, Human
cucagccucccaaguagcugggau

SEQ ID NO: 992734 - RNA, 24 nt, Human
cucaugccugcaaucccagcacuu

SEQ ID NO: 992735 - RNA, 24 nt, Human
cucaugccuguaaucccagcacuu

SEQ ID NO: 992736 - RNA, 19 nt, Human
cucccagagucucuuccuu

SEQ ID NO: 992737 - RNA, 21 nt, Human
cuccuggguucaaccaauucu

SEQ ID NO: 992738 - RNA, 19 nt, Human
cucuauugccugggcugga

SEQ ID NO: 992739 - RNA, 24 nt, Human
cugcagccuccaccucccauguuc

SEQ ID NO: 992740 - RNA, 23 nt, Human
cugcagcuccuuuaagcacucug

SEQ ID NO: 992741 - RNA, 23 nt, Human
cugccucagccucccaagcagcu

SEQ ID NO: 992742 - RNA, 24 nt, Human
cuggagugcaguggcaugaucuca

SEQ ID NO: 992743 - RNA, 23 nt, Human
cuggccaacacagugaaacccca

SEQ ID NO: 992744 - RNA, 24 nt, Human
cuguaaccucugccuccuggguuc

SEQ ID NO: 992745 - RNA, 19 nt, Human
cuucugaccuucucuccac

SEQ ID NO: 992746 - RNA, 18 nt, Human
cuugaagccaggaguuca

SEQ ID NO: 992747 - RNA, 23 nt, Human
cuugaagucaggaguuugagacc

SEQ ID NO: 992748 - RNA, 25 nt, Human
gaaagaccugaccaucccccagccc

SEQ ID NO: 992749 - RNA, 19 nt, Human
gaagggguuucaccauguu

SEQ ID NO: 992750 - RNA, 22 nt, Human
gaagggguuucaccauguuggc

SEQ ID NO: 992751 - RNA, 20 nt, Human
gacacacacacaaaaauaua

SEQ ID NO: 992752 - RNA, 24 nt, Human
gaccucaggugaucugcccaccuc

SEQ ID NO: 992753 - RNA, 22 nt, Human
gagagaugggguuucgccaugu

SEQ ID NO: 992754 - RNA, 18 nt, Human
gagaugggguuucgccau

SEQ ID NO: 992755 - RNA, 24 nt, Human
gagaugggguuucgccauguuggc

SEQ ID NO: 992756 - RNA, 21 nt, Human
gagguugcagugagcugagau

SEQ ID NO: 992757 - RNA, 19 nt, Human
gagguugcagugagcuggc

SEQ ID NO: 992758 - RNA, 24 nt, Human
gaucacuugaagucaggaguuuga

SEQ ID NO: 992759 - RNA, 19 nt, Human
gaucacuugaggccaacag

SEQ ID NO: 992760 - RNA, 19 nt, Human
gaucauggcucacugcagc

SEQ ID NO: 992761 - RNA, 22 nt, Human
gaucucugcucacuguaaccuc

SEQ ID NO: 992762 - RNA, 18 nt, Human
gauuacaggcacccacca

SEQ ID NO: 992763 - RNA, 21 nt, Human
gauuacaggcacccaccacca

SEQ ID NO: 992764 - RNA, 18 nt, Human
gauuacaggcgugagcca

SEQ ID NO: 992765 - RNA, 21 nt, Human
gauuacaggcgugagccacca

SEQ ID NO: 992766 - RNA, 22 nt, Human
gauuacaggcgugagccaccac

SEQ ID NO: 992767 - RNA, 24 nt, Human
gcacuccagccugggcaacagagc

SEQ ID NO: 992768 - RNA, 22 nt, Human
gcagccuccaccucccauguuc

SEQ ID NO: 992769 - RNA, 27 nt, Human
gcagcgcuagaggaauuaaagacacac

SEQ ID NO: 992770 - RNA, 26 nt, Human
gcaucugcagacuauaccacccaagg

SEQ ID NO: 992771 - RNA, 22 nt, Human
gccuaaaacucuuuuuguuuug

SEQ ID NO: 992772 - RNA, 18 nt, Human
gccucagcuuccugagua

SEQ ID NO: 992773 - RNA, 18 nt, Human
gccugggcaacacaguga

SEQ ID NO: 992774 - RNA, 24 nt, Human
gccugggcuggagugcaguggcau

SEQ ID NO: 992775 - RNA, 24 nt, Human
gcgauccucccgcuucagccuccc

SEQ ID NO: 992776 - RNA, 21 nt, Human
gcucacugcagccucgaccuc

SEQ ID NO: 992777 - RNA, 20 nt, Human
gcucaugccuguaaucccag

SEQ ID NO: 992778 - RNA, 22 nt, Human
gcucaugccuguaaucccagca

SEQ ID NO: 992779 - RNA, 19 nt, Human
gcuccuuuaagcacucugg

SEQ ID NO: 992780 - RNA, 22 nt, Human
gcucucauucccauaaacccac

SEQ ID NO: 992781 - RNA, 25 nt, Human
gcuggaaugcaguggcacgaucucu

SEQ ID NO: 992782 - RNA, 19 nt, Human
gcuggagugcaguggcaug

SEQ ID NO: 992783 - RNA, 23 nt, Human
gcuucagccucccaaagugcuaa

SEQ ID NO: 992784 - RNA, 21 nt, Human
ggaucacuugaggccaacaga

SEQ ID NO: 992785 - RNA, 19 nt, Human
ggauuacaggcgugagcca

SEQ ID NO: 992786 - RNA, 24 nt, Human
ggauuauaggugcaugccaucaug

SEQ ID NO: 992787 - RNA, 25 nt, Human
ggcagaucacuugaagucaggaguu

SEQ ID NO: 992788 - RNA, 21 nt, Human
ggcgcacaucuguaaucccag

SEQ ID NO: 992789 - RNA, 24 nt, Human
ggcuggagugcaguggcaugaucu

SEQ ID NO: 992790 - RNA, 22 nt, Human
ggcuggagugcaguggugugau

SEQ ID NO: 992791 - RNA, 22 nt, Human
gggguuucaccauguuggccag

SEQ ID NO: 992792 - RNA, 23 nt, Human
gggguuucaccauguuggccagg

SEQ ID NO: 992793 - RNA, 22 nt, Human
gggguuucgccauguuggccag

SEQ ID NO: 992794 - RNA, 18 nt, Human
ggguguugcucaugauag

SEQ ID NO: 992795 - RNA, 22 nt, Human
gguccaauccuguuuacaaaua

SEQ ID NO: 992796 - RNA, 19 nt, Human
ggucucgaacuccugaccu

SEQ ID NO: 992797 - RNA, 20 nt, Human
ggucucgaacuccugaccuc

SEQ ID NO: 992798 - RNA, 21 nt, Human
guagagacaagguuucaccau

SEQ ID NO: 992799 - RNA, 26 nt, Human
guagagagagaugggguuucgccaug

SEQ ID NO: 992800 - RNA, 24 nt, Human
gucacugcacuccagccugggcaa

SEQ ID NO: 992801 - RNA, 24 nt, Human
gugaucugcccaccucagccuccc

SEQ ID NO: 992802 - RNA, 22 nt, Human
guguauacauaucuaaagcaca

SEQ ID NO: 992803 - RNA, 18 nt, Human
guguugaucagaaaauuc

SEQ ID NO: 992804 - RNA, 19 nt, Human
guugcagugagcugagauu

SEQ ID NO: 992805 - RNA, 20 nt, Human
guuuauggccagacucuggg

SEQ ID NO: 992806 - RNA, 24 nt, Human
guuucaccauguugcccaggcugg

SEQ ID NO: 992807 - RNA, 26 nt, Human
uaaaaacaaacaaauaaaaccuccaa

SEQ ID NO: 992808 - RNA, 21 nt, Human
uaaaauuacaagcaugcacca

SEQ ID NO: 992809 - RNA, 24 nt, Human
uaaaauuacaagcaugcaccacug

SEQ ID NO: 992810 - RNA, 24 nt, Human
uaaaauuacaagcaugcaccacug

SEQ ID NO: 992811 - RNA, 25 nt, Human
uaaacaaaugcuugaaggcagcaug

SEQ ID NO: 992812 - RNA, 19 nt, Human
uaaacccacaaccuuccag

SEQ ID NO: 992813 - RNA, 31 nt, Human
uaaacuccuuuaguuuuguuugccaaaaaag

SEQ ID NO: 992814 - RNA, 21 nt, Human
uaaagacacacacacaaaaau

SEQ ID NO: 992815 - RNA, 24 nt, Human
uaaauuuuguauuuuuaguagaga

SEQ ID NO: 992816 - RNA, 22 nt, Human
uaacugugucauagaaugauug

SEQ ID NO: 992817 - RNA, 22 nt, Human
uaagcgguuuuccgcccugggc

SEQ ID NO: 992818 - RNA, 20 nt, Human
uaaucuguaaccuuaccccc

SEQ ID NO: 992819 - RNA, 24 nt, Human
uaauuuucauauuuuuaguagaga

SEQ ID NO: 992820 - RNA, 22 nt, Human
uacaggcgugagccaccacacc

SEQ ID NO: 992821 - RNA, 22 nt, Human
uacaggcgugagccaccacacc

SEQ ID NO: 992822 - RNA, 23 nt, Human
uacaggcgugagccaccacaccu

SEQ ID NO: 992823 - RNA, 21 nt, Human
uaccuucugaccuucucucca

SEQ ID NO: 992824 - RNA, 22 nt, Human
uagagaagggguuucaccaugu

SEQ ID NO: 992825 - RNA, 22 nt, Human
uagagacaagguuucaccaugu

SEQ ID NO: 992826 - RNA, 24 nt, Human
uagcaggccaaggcgggcagauca

SEQ ID NO: 992827 - RNA, 23 nt, Human
uagcuugaagccaggaguucaag

SEQ ID NO: 992828 - RNA, 21 nt, Human
uaggagacuccauuuuguucu

SEQ ID NO: 992829 - RNA, 24 nt, Human
uaguagagaagggguuucaccaug

SEQ ID NO: 992830 - RNA, 28 nt, Human
uaguagagagagaugggguuucgccaug

SEQ ID NO: 992831 - RNA, 23 nt, Human
uagucugaaauauggccucgugg

SEQ ID NO: 992832 - RNA, 20 nt, Human
uauacaaaggcaaacaacag

SEQ ID NO: 992833 - RNA, 24 nt, Human
uaucacucugucacccaggcugga

SEQ ID NO: 992834 - RNA, 24 nt, Human
uauggccagacucuggggggcuug

SEQ ID NO: 992835 - RNA, 18 nt, Human
uauguguauacauaucua

SEQ ID NO: 992836 - RNA, 22 nt, Human
uauguguauacauaucuaaagc

SEQ ID NO: 992837 - RNA, 19 nt, Human
uauugccugggcuggagug

SEQ ID NO: 992838 - RNA, 20 nt, Human
uauugccugggcuggagugc

SEQ ID NO: 992839 - RNA, 20 nt, Human
ucaaaacauuuucacuguau

SEQ ID NO: 992840 - RNA, 25 nt, Human
ucaaccaauucuccugccucagccu

SEQ ID NO: 992841 - RNA, 23 nt, Human
ucacaccuguaaucccagcacuu

SEQ ID NO: 992842 - RNA, 24 nt, Human
ucacccaggcuggagugcaguggu

SEQ ID NO: 992843 - RNA, 20 nt, Human
ucacucugucacccaggcug

SEQ ID NO: 992844 - RNA, 22 nt, Human
ucacucugucacccaggcugga

SEQ ID NO: 992845 - RNA, 24 nt, Human
ucacucugucacccaggcuggagu

SEQ ID NO: 992846 - RNA, 20 nt, Human
ucacugcacuccagccuggg

SEQ ID NO: 992847 - RNA, 21 nt, Human
ucacugcacuccagccugggc

SEQ ID NO: 992848 - RNA, 24 nt, Human
ucacugcacuccagccugggcaac

SEQ ID NO: 992849 - RNA, 18 nt, Human
ucacugcagccuccaccu

SEQ ID NO: 992850 - RNA, 19 nt, Human
ucacugcagccuccaccuc

SEQ ID NO: 992851 - RNA, 22 nt, Human
ucacugcagccuccaccuccca

SEQ ID NO: 992852 - RNA, 27 nt, Human
ucacugcagccuccaccucccauguuc

SEQ ID NO: 992853 - RNA, 19 nt, Human
ucacugcagccucgaccuc

SEQ ID NO: 992854 - RNA, 24 nt, Human
ucacuguaaccucugccuccuggg

SEQ ID NO: 992855 - RNA, 25 nt, Human
ucacuguaaccucugccuccugggu

SEQ ID NO: 992856 - RNA, 22 nt, Human
ucacuguauguaggagccuagc

SEQ ID NO: 992857 - RNA, 18 nt, Human
ucagccucccaaagugcu

SEQ ID NO: 992858 - RNA, 22 nt, Human
ucagccucccaaagugcuaaaa

SEQ ID NO: 992859 - RNA, 20 nt, Human
ucagccucccaagcagcugg

SEQ ID NO: 992860 - RNA, 20 nt, Human
ucagccucccaaguagcugg

SEQ ID NO: 992861 - RNA, 22 nt, Human
ucagcuuccugaguagcugaaa

SEQ ID NO: 992862 - RNA, 22 nt, Human
ucaugccugcaaucccagcacu

SEQ ID NO: 992863 - RNA, 22 nt, Human
ucaugccuguaaucccagcacu

SEQ ID NO: 992864 - RNA, 22 nt, Human
ucauucccauaaacccacaacc

SEQ ID NO: 992865 - RNA, 21 nt, Human
uccaaaaacaaguuuguagag

SEQ ID NO: 992866 - RNA, 24 nt, Human
uccaaggcaggaggaucacuugag

SEQ ID NO: 992867 - RNA, 24 nt, Human
ucccaaagugcugggauuacaggc

SEQ ID NO: 992868 - RNA, 23 nt, Human
ucccaaguagcugggauuauagg

SEQ ID NO: 992869 - RNA, 24 nt, Human
ucccaaguagcugggauuauaggu

SEQ ID NO: 992870 - RNA, 20 nt, Human
ucccagcacuuuaggaugcc

SEQ ID NO: 992871 - RNA, 20 nt, Human
ucccauguuccagcaauucu

SEQ ID NO: 992872 - RNA, 24 nt, Human
ucccuggacucaagcaauccuccc

SEQ ID NO: 992873 - RNA, 25 nt, Human
ucccuggacucaagcaauccuccca

SEQ ID NO: 992874 - RNA, 19 nt, Human
uccugaacucaaaagaccc

SEQ ID NO: 992875 - RNA, 21 nt, Human
uccuggguucaaccaauucuc

SEQ ID NO: 992876 - RNA, 24 nt, Human
uccuggguucaaccaauucuccug

SEQ ID NO: 992877 - RNA, 22 nt, Human
uccuucuagauacucuuuuauu

SEQ ID NO: 992878 - RNA, 24 nt, Human
uccuuggcaucuggcucaugauaa

SEQ ID NO: 992879 - RNA, 22 nt, Human
ucgccauguuggccagacuggu

SEQ ID NO: 992880 - RNA, 24 nt, Human
ucgccauguuggccagacuggucu

SEQ ID NO: 992881 - RNA, 24 nt, Human
ucgcucaugccuguaaucccagca

SEQ ID NO: 992882 - RNA, 24 nt, Human
ucuauugccugggcuggagugcag

SEQ ID NO: 992883 - RNA, 21 nt, Human
ucucaaacucuugagcccaag

SEQ ID NO: 992884 - RNA, 19 nt, Human
ucucgaacuccugaccuca

SEQ ID NO: 992885 - RNA, 19 nt, Human
ucucgcaggagucgggauc

SEQ ID NO: 992886 - RNA, 24 nt, Human
ucucgcucucuuaccccggcugga

SEQ ID NO: 992887 - RNA, 21 nt, Human
ucugcccaccucagccuccca

SEQ ID NO: 992888 - RNA, 21 nt, Human
ucuguaaucccagcuacuugg

SEQ ID NO: 992889 - RNA, 18 nt, Human
ucuguaugcugaaugcug

SEQ ID NO: 992890 - RNA, 24 nt, Human
ucugucacccaggcuggagugcag

SEQ ID NO: 992891 - RNA, 23 nt, Human
ucugugacagcuucuugaucugu

SEQ ID NO: 992892 - RNA, 18 nt, Human
ucuuacucuauugccugg

SEQ ID NO: 992893 - RNA, 23 nt, Human
ucuuacucuauugccugggcugg

SEQ ID NO: 992894 - RNA, 24 nt, Human
ucuuacucuauugccugggcugga

SEQ ID NO: 992895 - RNA, 23 nt, Human
ucuugaacuccugaacucaaaag

SEQ ID NO: 992896 - RNA, 19 nt, Human
ucuugugccucagcuuccu

SEQ ID NO: 992897 - RNA, 19 nt, Human
ugaaaccccaucuccacua

SEQ ID NO: 992898 - RNA, 22 nt, Human
ugaaaccccaucuccacuaaaa

SEQ ID NO: 992899 - RNA, 24 nt, Human
ugaaaguacagaggcacaccacca

SEQ ID NO: 992900 - RNA, 23 nt, Human
ugaaaguacagaggcacaccagu

SEQ ID NO: 992901 - RNA, 19 nt, Human
ugaaaucacagagcuucca

SEQ ID NO: 992902 - RNA, 20 nt, Human
ugaaaucacagagcuuccaa

SEQ ID NO: 992903 - RNA, 18 nt, Human
ugaaggcagcaugcuccu

SEQ ID NO: 992904 - RNA, 18 nt, Human
ugaccucaggugaucugc

SEQ ID NO: 992905 - RNA, 21 nt, Human
ugaccucaggugaucugccca

SEQ ID NO: 992906 - RNA, 24 nt, Human
ugaccucaggugaucugcccaccu

SEQ ID NO: 992907 - RNA, 21 nt, Human
ugacugguugucccgcuuucc

SEQ ID NO: 992908 - RNA, 24 nt, Human
ugagacacaagaauugccugaacc

SEQ ID NO: 992909 - RNA, 18 nt, Human
ugagaccagccuggccaa

SEQ ID NO: 992910 - RNA, 24 nt, Human
ugagaccagccuggccaacacagu

SEQ ID NO: 992911 - RNA, 24 nt, Human
ugagagcccccaacagagauuuac

SEQ ID NO: 992912 - RNA, 18 nt, Human
ugagaugccguuaaucug

SEQ ID NO: 992913 - RNA, 18 nt, Human
ugagaugccguuaaucug

SEQ ID NO: 992914 - RNA, 21 nt, Human
ugagaugccguuaaucuguaa

SEQ ID NO: 992915 - RNA, 24 nt, Human
ugagauuucgucacugcacuccag

SEQ ID NO: 992916 - RNA, 22 nt, Human
ugagcugagauuucgucacugc

SEQ ID NO: 992917 - RNA, 20 nt, Human
ugaggugccacuauaccgcc

SEQ ID NO: 992918 - RNA, 24 nt, Human
ugaucugcccaccucagccuccca

SEQ ID NO: 992919 - RNA, 18 nt, Human
ugcaaaggccgcagggac

SEQ ID NO: 992920 - RNA, 19 nt, Human
ugcagagguuuugcuuaug

SEQ ID NO: 992921 - RNA, 22 nt, Human
ugcaguggcaugaucucagcuc

SEQ ID NO: 992922 - RNA, 23 nt, Human
ugcaguggugugaucauggcuca

SEQ ID NO: 992923 - RNA, 24 nt, Human
ugcccaggcuggucucaaacucuu

SEQ ID NO: 992924 - RNA, 28 nt, Human
ugcccaggcuggucucaaacucuugagc

SEQ ID NO: 992925 - RNA, 19 nt, Human
ugcccugugcaacucugau

SEQ ID NO: 992926 - RNA, 20 nt, Human
ugccguacuuaacauuucua

SEQ ID NO: 992927 - RNA, 25 nt, Human
ugccucagccucccaagcagcugug

SEQ ID NO: 992928 - RNA, 22 nt, Human
ugccucagcuuccugaguagcu

SEQ ID NO: 992929 - RNA, 24 nt, Human
ugccucagcuuccugaguagcuga

SEQ ID NO: 992930 - RNA, 18 nt, Human
ugccugggcuggagugca

SEQ ID NO: 992931 - RNA, 19 nt, Human
ugccugggcuggagugcag

SEQ ID NO: 992932 - RNA, 20 nt, Human
ugccugggcuggagugcagu

SEQ ID NO: 992933 - RNA, 21 nt, Human
ugccugggcuggagugcagug

SEQ ID NO: 992934 - RNA, 22 nt, Human
ugccugggcuggagugcagugg

SEQ ID NO: 992935 - RNA, 24 nt, Human
ugccugggcuggagugcaguggca

SEQ ID NO: 992936 - RNA, 18 nt, Human
ugcuaaaauuacaagcau

SEQ ID NO: 992937 - RNA, 24 nt, Human
ugcugggauuacaggcgugagcca

SEQ ID NO: 992938 - RNA, 26 nt, Human
uggaaggcugagacacaagaauugcc

SEQ ID NO: 992939 - RNA, 24 nt, Human
uggaaugcaguggcacgaucucug

SEQ ID NO: 992940 - RNA, 19 nt, Human
uggagugcaguggcaugau

SEQ ID NO: 992941 - RNA, 24 nt, Human
uggagugcaguggcaugaucucag

SEQ ID NO: 992942 - RNA, 19 nt, Human
uggagugcaguggugugau

SEQ ID NO: 992943 - RNA, 21 nt, Human
uggagugcaguggugugauca

SEQ ID NO: 992944 - RNA, 24 nt, Human
uggagugcaguggugugaucaugg

SEQ ID NO: 992945 - RNA, 24 nt, Human
uggcacgaucucugcucacuguaa

SEQ ID NO: 992946 - RNA, 23 nt, Human
uggcaugaucucagcucacugca

SEQ ID NO: 992947 - RNA, 24 nt, Human
uggccagacuggucucgaacuccu

SEQ ID NO: 992948 - RNA, 24 nt, Human
uggccaggcugcucuugaacuccu

SEQ ID NO: 992949 - RNA, 23 nt, Human
uggccaguuuuggggccaguuua

SEQ ID NO: 992950 - RNA, 22 nt, Human
uggcgcacaucuguaaucccag

SEQ ID NO: 992951 - RNA, 24 nt, Human
uggcucacugcagccucgaccucc

SEQ ID NO: 992952 - RNA, 19 nt, Human
ugggaaacaaagggauggg

SEQ ID NO: 992953 - RNA, 18 nt, Human
ugggauuacaggcgugag

SEQ ID NO: 992954 - RNA, 19 nt, Human
ugggauuacaggcgugagc

SEQ ID NO: 992955 - RNA, 22 nt, Human
ugggauuacaggcgugagccac

SEQ ID NO: 992956 - RNA, 23 nt, Human
ugggauuacaggcgugagccacc

SEQ ID NO: 992957 - RNA, 24 nt, Human
ugggauuacaggcgugagccacca

SEQ ID NO: 992958 - RNA, 19 nt, Human
ugggauuauaggugcaugc

SEQ ID NO: 992959 - RNA, 22 nt, Human
ugggauuauaggugcaugccau

SEQ ID NO: 992960 - RNA, 24 nt, Human
ugggauuauaggugcaugccauca

SEQ ID NO: 992961 - RNA, 21 nt, Human
uggggaaaagagagaucagau

SEQ ID NO: 992962 - RNA, 23 nt, Human
ugggguuucgccauguuggccag

SEQ ID NO: 992963 - RNA, 20 nt, Human
uggguucaaccaauucuccu

SEQ ID NO: 992964 - RNA, 24 nt, Human
ugguggcgcacaucuguaauccca

SEQ ID NO: 992965 - RNA, 24 nt, Human
uggugugaucauggcucacugcag

SEQ ID NO: 992966 - RNA, 21 nt, Human
ugguucacaccuguaauccca

SEQ ID NO: 992967 - RNA, 22 nt, Human
ugguucacaccuguaaucccag

SEQ ID NO: 992968 - RNA, 24 nt, Human
ugguucacaccuguaaucccagca

SEQ ID NO: 992969 - RNA, 19 nt, Human
ugucauagaaugauugcau

SEQ ID NO: 992970 - RNA, 23 nt, Human
ugucucugugucucuuuuccaag

SEQ ID NO: 992971 - RNA, 19 nt, Human
ugucucuuuuccaagucuc

SEQ ID NO: 992972 - RNA, 21 nt, Human
ugugacagcuucuugaucugu

SEQ ID NO: 992973 - RNA, 25 nt, Human
ugugcucccugaaacaugugcugug

SEQ ID NO: 992974 - RNA, 23 nt, Human
uguuacugugucuguguagaaag

SEQ ID NO: 992975 - RNA, 19 nt, Human
uguuuaugaugcagagacc

SEQ ID NO: 992976 - RNA, 24 nt, Human
uuacaagcaugcaccacugcaucc

SEQ ID NO: 992977 - RNA, 24 nt, Human
uuacucuauugccugggcuggagu

SEQ ID NO: 992978 - RNA, 18 nt, Human
uuaguagagaagggguuu

SEQ ID NO: 992979 - RNA, 22 nt, Human
uuaguagagaagggguuucacc

SEQ ID NO: 992980 - RNA, 24 nt, Human
uuaguagagaagggguuucaccau

SEQ ID NO: 992981 - RNA, 28 nt, Human
uuaguagagagagaugggguuucgccau

SEQ ID NO: 992982 - RNA, 18 nt, Human
uucaaccaauucuccugc

SEQ ID NO: 992983 - RNA, 22 nt, Human
uuccacugccuucuggcuucug

SEQ ID NO: 992984 - RNA, 19 nt, Human
uuccagcaauucuugugcc

SEQ ID NO: 992985 - RNA, 23 nt, Human
uuccagcaauucuugugccucag

SEQ ID NO: 992986 - RNA, 24 nt, Human
uucccauucuuucucugcccugug

SEQ ID NO: 992987 - RNA, 23 nt, Human
uucuugugccucagcuuccugag

SEQ ID NO: 992988 - RNA, 22 nt, Human
uugaagccaggaguucaagacc

SEQ ID NO: 992989 - RNA, 21 nt, Human
uugcagugagcugagauuucc

SEQ ID NO: 992990 - RNA, 21 nt, Human
uugcagugagcugagauuucg

SEQ ID NO: 992991 - RNA, 22 nt, Human
uugcagugagcugagauuucgu

SEQ ID NO: 992992 - RNA, 24 nt, Human
uugccugaacccgggaggccgagg

SEQ ID NO: 992993 - RNA, 24 nt, Human
uugccugggcuggagugcaguggc

SEQ ID NO: 992994 - RNA, 23 nt, Human
uuggaaggcugagacacaagaau

SEQ ID NO: 992995 - RNA, 24 nt, Human
uuggaaggcugagacacaagaauu

SEQ ID NO: 992996 - RNA, 22 nt, Human
uuggggccaguuuauggccaga

SEQ ID NO: 992997 - RNA, 23 nt, Human
uuguaaacuccuuuaguuuuguu

SEQ ID NO: 992998 - RNA, 24 nt, Human
uuguagagacaagguuucaccaug

SEQ ID NO: 992999 - RNA, 24 nt, Human
uuuaaggcauugagauguuuaugu

SEQ ID NO: 993000 - RNA, 23 nt, Human
uuucaccauguugcccaggcugg

SEQ ID NO: 993001 - RNA, 24 nt, Human
uuucaccauguugcccaggcuggu

SEQ ID NO: 993002 - RNA, 21 nt, Human
uuucaccauguuggccaggcu

SEQ ID NO: 993003 - RNA, 21 nt, Human
uuucgccauguuggccagacu

SEQ ID NO: 993004 - RNA, 24 nt, Human
uuugccguacuuaacauuucuacc

SEQ ID NO: 993005 - RNA, 24 nt, Human
uuuguagagacaagguuucaccau

SEQ ID NO: 993006 - RNA, 20 nt, Human
uuuucauauuuuuaguagag

SEQ ID NO: 993007 - RNA, 19 nt, Human
uuuuguauuuuuaguagag

SEQ ID NO: 993008 - RNA, 25 nt, Human
uuuuguuuguggcuuaagaaugccu

SEQ ID NO: 993009 - RNA, 24 nt, Human
uuuuuaguagagaagggguuucac

SEQ ID NO: 993010 - RNA, 28 nt, Human
uuuuuaguagagagagaugggguuucgc

SEQ ID NO: 993011 - RNA, 24 nt, Human
uuuuuuguagagacaagguuucac

SEQ ID NO: 993012 - RNA, 21 nt, Human
aaaaagcucagaauaaucaca

SEQ ID NO: 993013 - RNA, 21 nt, Human
agcccgcccucccuucuccag

SEQ ID NO: 993014 - RNA, 21 nt, Human
ccaggccaaaaagcucagaau

SEQ ID NO: 993015 - RNA, 23 nt, Human
cccgcccucccuucuccaggcca

SEQ ID NO: 993016 - RNA, 19 nt, Human
ccucauccuucuuuuggcc

SEQ ID NO: 993017 - RNA, 21 nt, Human
cuccaggccaaaaagcucaga

SEQ ID NO: 993018 - RNA, 19 nt, Human
cucccuucuccaggccaaa

SEQ ID NO: 993019 - RNA, 23 nt, Human
cuccucauccuucuuuuggccuu

SEQ ID NO: 993020 - RNA, 19 nt, Human
cuucuagcccgcccucccu

SEQ ID NO: 993021 - RNA, 19 nt, Human
ucuccaggccaaaaagcuc

SEQ ID NO: 993022 - RNA, 18 nt, Human
uguccuccucauccuucu

SEQ ID NO: 993023 - RNA, 23 nt, Human
uuuuuuggaugcaaaaauaaaua

SEQ ID NO: 993024 - RNA, 18 nt, Human
uuuuuuuuuuuuuuuuug

SEQ ID NO: 993025 - RNA, 18 nt, Human
uuuuuuuuuuuuuuuuug

SEQ ID NO: 993026 - RNA, 18 nt, Human
aaacccgcgccuccuccg

SEQ ID NO: 993027 - RNA, 18 nt, Human
aagaagaaacccgcgccu

SEQ ID NO: 993028 - RNA, 23 nt, Human
aagaggagaggggagguggcggg

SEQ ID NO: 993029 - RNA, 21 nt, Human
acucccccaagccgucuacug

SEQ ID NO: 993030 - RNA, 24 nt, Human
agacugaugugggagggggcggcc

SEQ ID NO: 993031 - RNA, 20 nt, Human
aggaagagggggcaggcggc

SEQ ID NO: 993032 - RNA, 20 nt, Human
aggcaccccuggaacaaggg

SEQ ID NO: 993033 - RNA, 23 nt, Human
agggcugggccaagguugggggu

SEQ ID NO: 993034 - RNA, 26 nt, Human
agguggcgggaggggggagcaggggc

SEQ ID NO: 993035 - RNA, 21 nt, Human
caagggggccacauggcgggg

SEQ ID NO: 993036 - RNA, 23 nt, Human
caagggucuggagacugaugugg

SEQ ID NO: 993037 - RNA, 25 nt, Human
cagaacuuccagauacuguccacac

SEQ ID NO: 993038 - RNA, 18 nt, Human
ccacacucccuccccugg

SEQ ID NO: 993039 - RNA, 20 nt, Human
ccagauacuguccacacucc

SEQ ID NO: 993040 - RNA, 18 nt, Human
ccagcgaguggguguccc

SEQ ID NO: 993041 - RNA, 18 nt, Human
cccaggagggaggguggg

SEQ ID NO: 993042 - RNA, 22 nt, Human
ccccuggggacgucuggguccg

SEQ ID NO: 993043 - RNA, 19 nt, Human
ccccugggucucugccucu

SEQ ID NO: 993044 - RNA, 21 nt, Human
cccugcuggguccgugucucc

SEQ ID NO: 993045 - RNA, 19 nt, Human
cccugggucucugccucuc

SEQ ID NO: 993046 - RNA, 20 nt, Human
ccgcggcucauccugccagg

SEQ ID NO: 993047 - RNA, 24 nt, Human
ccguccugaagcccucccuccucc

SEQ ID NO: 993048 - RNA, 18 nt, Human
ccgugucuccgcuccucg

SEQ ID NO: 993049 - RNA, 26 nt, Human
ccuccccugggcagaggagaggaggc

SEQ ID NO: 993050 - RNA, 24 nt, Human
ccucugaagccccaagggucugga

SEQ ID NO: 993051 - RNA, 27 nt, Human
ccugaagcccucccuccuccaucaagg

SEQ ID NO: 993052 - RNA, 19 nt, Human
cggaaaagaagaaacccgc

SEQ ID NO: 993053 - RNA, 20 nt, Human
cggccgagccccccucugcu

SEQ ID NO: 993054 - RNA, 24 nt, Human
cggccucugaagccccaagggucu

SEQ ID NO: 993055 - RNA, 25 nt, Human
cguccugaagcccucccuccuccaa

SEQ ID NO: 993056 - RNA, 24 nt, Human
cucccuccccugggcagaggagag

SEQ ID NO: 993057 - RNA, 19 nt, Human
cuccgaggagccuaggagc

SEQ ID NO: 993058 - RNA, 21 nt, Human
cuccuugaaggggcucaggca

SEQ ID NO: 993059 - RNA, 20 nt, Human
cugaagcccucccuccucca

SEQ ID NO: 993060 - RNA, 22 nt, Human
cugacgccccguccugaagccc

SEQ ID NO: 993061 - RNA, 22 nt, Human
cugggccaagguuggggguggg

SEQ ID NO: 993062 - RNA, 20 nt, Human
cuggguccgacauggcaggg

SEQ ID NO: 993063 - RNA, 26 nt, Human
cugucccguccucuccgggggccgcg

SEQ ID NO: 993064 - RNA, 23 nt, Human
cuguugcugcugaacuccagagc

SEQ ID NO: 993065 - RNA, 19 nt, Human
gacugaugugggagggggg

SEQ ID NO: 993066 - RNA, 18 nt, Human
gagccccccucugcuccc

SEQ ID NO: 993067 - RNA, 19 nt, Human
gagccuccgacucccccaa

SEQ ID NO: 993068 - RNA, 22 nt, Human
gagggccuggcgggaaccgggg

SEQ ID NO: 993069 - RNA, 21 nt, Human
gcauaggaagagggggcaggc

SEQ ID NO: 993070 - RNA, 18 nt, Human
gcgagugggugucccgag

SEQ ID NO: 993071 - RNA, 19 nt, Human
gcugggccaagguuggggg

SEQ ID NO: 993072 - RNA, 20 nt, Human
ggagaagaggagaggggagg

SEQ ID NO: 993073 - RNA, 24 nt, Human
ggagaggggagguggcgggagggg

SEQ ID NO: 993074 - RNA, 24 nt, Human
ggagcggccucugaagccccaagg

SEQ ID NO: 993075 - RNA, 24 nt, Human
ggagguggcgggaggggggagcag

SEQ ID NO: 993076 - RNA, 21 nt, Human
ggcaguggcggggcacgcagg

SEQ ID NO: 993077 - RNA, 23 nt, Human
ggcugggccaagguugggggugg

SEQ ID NO: 993078 - RNA, 19 nt, Human
gggaacaagaugggggugg

SEQ ID NO: 993079 - RNA, 18 nt, Human
gggcagaggagaggaggc

SEQ ID NO: 993080 - RNA, 19 nt, Human
gggcagccccaaaggcaca

SEQ ID NO: 993081 - RNA, 21 nt, Human
gggcucagggcugggccaagg

SEQ ID NO: 993082 - RNA, 24 nt, Human
gggggucccaggagggaggguggg

SEQ ID NO: 993083 - RNA, 24 nt, Human
gggguggggugucugccggggagc

SEQ ID NO: 993084 - RNA, 23 nt, Human
ggguuggggcuccuugaaggggc

SEQ ID NO: 993085 - RNA, 23 nt, Human
gguuggggcuccuugaaggggcu

SEQ ID NO: 993086 - RNA, 19 nt, Human
guccgugucuccgcuccuc

SEQ ID NO: 993087 - RNA, 20 nt, Human
guccugaagcccucccuccu

SEQ ID NO: 993088 - RNA, 23 nt, Human
gugaggggagaagaggagagggg

SEQ ID NO: 993089 - RNA, 20 nt, Human
gugggagggggcggccgagc

SEQ ID NO: 993090 - RNA, 24 nt, Human
guuuuuccugcugcuguugcugcc

SEQ ID NO: 993091 - RNA, 21 nt, Human
uaggagcggccucugaagccc

SEQ ID NO: 993092 - RNA, 25 nt, Human
ucagaggcugucccguccucuccgg

SEQ ID NO: 993093 - RNA, 21 nt, Human
ucagaguuuuuaauuauuauu

SEQ ID NO: 993094 - RNA, 18 nt, Human
uccacacucccuccccug

SEQ ID NO: 993095 - RNA, 22 nt, Human
uccacacucccuccccugggca

SEQ ID NO: 993096 - RNA, 19 nt, Human
uccccugggcagaggagag

SEQ ID NO: 993097 - RNA, 21 nt, Human
ucccuggggccuccuggccau

SEQ ID NO: 993098 - RNA, 24 nt, Human
ucccuggggcucagggcugggcca

SEQ ID NO: 993099 - RNA, 20 nt, Human
uccuccaucaaggcugggga

SEQ ID NO: 993100 - RNA, 19 nt, Human
uccugcugcuguugcugcu

SEQ ID NO: 993101 - RNA, 20 nt, Human
ucuccgaggaaaguuugcuc

SEQ ID NO: 993102 - RNA, 21 nt, Human
ucuggagacugaugugggagg

SEQ ID NO: 993103 - RNA, 20 nt, Human
ugaagccccaagggucugga

SEQ ID NO: 993104 - RNA, 19 nt, Human
ugacgcaaggccgggcagc

SEQ ID NO: 993105 - RNA, 21 nt, Human
ugaugugggagggggcggccg

SEQ ID NO: 993106 - RNA, 19 nt, Human
ugccggggagccuccgacu

SEQ ID NO: 993107 - RNA, 23 nt, Human
uggcgggaggggggagcaggggc

SEQ ID NO: 993108 - RNA, 19 nt, Human
ugggagggggcggccgagc

SEQ ID NO: 993109 - RNA, 22 nt, Human
ugggcagaggagaggaggcacc

SEQ ID NO: 993110 - RNA, 22 nt, Human
uggggaugaugaggagaugggg

SEQ ID NO: 993111 - RNA, 25 nt, Human
uggggguggggugucugcccccccg

SEQ ID NO: 993112 - RNA, 20 nt, Human
ugggugaggggagaagagga

SEQ ID NO: 993113 - RNA, 25 nt, Human
ugggugaggggagaagaggagaggg

SEQ ID NO: 993114 - RNA, 23 nt, Human
ugucccguccucuccgggggccg

SEQ ID NO: 993115 - RNA, 21 nt, Human
uguugcugcugaacuccagag

SEQ ID NO: 993116 - RNA, 23 nt, Human
uuaauaacaaccugaaucccaga

SEQ ID NO: 993117 - RNA, 18 nt, Human
uuacugagccuugaacuc

SEQ ID NO: 993118 - RNA, 21 nt, Human
uugcaaacucuggggccucgg

SEQ ID NO: 993119 - RNA, 26 nt, Human
uuuuccugcugcuguugcugcugaac

SEQ ID NO: 993120 - RNA, 25 nt, Human
uuuuuuuuuuuucuucagaguuuuu

SEQ ID NO: 993121 - RNA, 24 nt, Human
uuuuuuuuuuuuuuuuuucuucag

SEQ ID NO: 993122 - RNA, 25 nt, Human
aaccauuuccucaacuuuucuucug

SEQ ID NO: 993123 - RNA, 18 nt, Human
aagaguagcuuagaggag

SEQ ID NO: 993124 - RNA, 19 nt, Human
aagaguagcuuagaggagg

SEQ ID NO: 993125 - RNA, 20 nt, Human
aagaguagcuuagaggaggg

SEQ ID NO: 993126 - RNA, 18 nt, Human
acaccuugccaccccagg

SEQ ID NO: 993127 - RNA, 21 nt, Human
accucaaagcccgagagucuc

SEQ ID NO: 993128 - RNA, 26 nt, Human
accucggugacauuaaggccccgucg

SEQ ID NO: 993129 - RNA, 19 nt, Human
agaccccuagaaagcaggc

SEQ ID NO: 993130 - RNA, 23 nt, Human
agccuugagaaccugucucaaca

SEQ ID NO: 993131 - RNA, 20 nt, Human
aggagggggaagaaacaggc

SEQ ID NO: 993132 - RNA, 19 nt, Human
aggcagcgcuggagagaga

SEQ ID NO: 993133 - RNA, 19 nt, Human
aggcagcgcuggagagaga

SEQ ID NO: 993134 - RNA, 18 nt, Human
aggggggguggcaaggga

SEQ ID NO: 993135 - RNA, 23 nt, Human
agguaugcaucuuccccugagcc

SEQ ID NO: 993136 - RNA, 19 nt, Human
aguggacuccguuagaccc

SEQ ID NO: 993137 - RNA, 18 nt, Human
augaggggcacacugugu

SEQ ID NO: 993138 - RNA, 19 nt, Human
augcaucuuccccugagcc

SEQ ID NO: 993139 - RNA, 22 nt, Human
cacaggaggcacucuacccucu

SEQ ID NO: 993140 - RNA, 25 nt, Human
caccuugccaccccaggaggcuacu

SEQ ID NO: 993141 - RNA, 18 nt, Human
cacuaccggccagcggaa

SEQ ID NO: 993142 - RNA, 19 nt, Human
cagaguucccuuccccuuc

SEQ ID NO: 993143 - RNA, 26 nt, Human
cagcggaacuucaggucucaccucaa

SEQ ID NO: 993144 - RNA, 20 nt, Human
cagcuccuggggcgucaacu

SEQ ID NO: 993145 - RNA, 18 nt, Human
ccacugcugcugaugucc

SEQ ID NO: 993146 - RNA, 18 nt, Human
ccacugcugcugaugucc

SEQ ID NO: 993147 - RNA, 21 nt, Human
ccaggggagaggggcggccca

SEQ ID NO: 993148 - RNA, 18 nt, Human
ccccuaaacuuccacagg

SEQ ID NO: 993149 - RNA, 23 nt, Human
ccccucucuacaccuugccaccc

SEQ ID NO: 993150 - RNA, 19 nt, Human
ccccugagccuugagaacc

SEQ ID NO: 993151 - RNA, 18 nt, Human
cccucucuacaccuugcc

SEQ ID NO: 993152 - RNA, 20 nt, Human
ccuaaacuuccacaggaggc

SEQ ID NO: 993153 - RNA, 21 nt, Human
ccuaaacuuccacaggaggca

SEQ ID NO: 993154 - RNA, 20 nt, Human
ccucggugacauuaaggccc

SEQ ID NO: 993155 - RNA, 21 nt, Human
ccucucuacaccuugccaccc

SEQ ID NO: 993156 - RNA, 21 nt, Human
ccuuccacugcugcugauguc

SEQ ID NO: 993157 - RNA, 21 nt, Human
cggguguccuuucaacgcccc

SEQ ID NO: 993158 - RNA, 23 nt, Human
cuagaguucuaacagcgauuccc

SEQ ID NO: 993159 - RNA, 24 nt, Human
cuccaggucagggaacaaauuugc

SEQ ID NO: 993160 - RNA, 21 nt, Human
cucccuggaaaaacuuaugag

SEQ ID NO: 993161 - RNA, 21 nt, Human
cuggugcucagcuccuggggc

SEQ ID NO: 993162 - RNA, 21 nt, Human
cuuccacugcugcugaugucc

SEQ ID NO: 993163 - RNA, 23 nt, Human
gaagcagccagggagggcucaag

SEQ ID NO: 993164 - RNA, 18 nt, Human
gacggaugagcgagagga

SEQ ID NO: 993165 - RNA, 20 nt, Human
gagagucuccucgcgggacc

SEQ ID NO: 993166 - RNA, 19 nt, Human
gcacaguggcaaagucaga

SEQ ID NO: 993167 - RNA, 22 nt, Human
gccucuccucaucuucuaacuc

SEQ ID NO: 993168 - RNA, 20 nt, Human
gccuggugcucagcuccugg

SEQ ID NO: 993169 - RNA, 21 nt, Human
gccuggugcucagcuccuggg

SEQ ID NO: 993170 - RNA, 18 nt, Human
gcggggagggggcagcug

SEQ ID NO: 993171 - RNA, 24 nt, Human
gcggguguccuuucaacgcccccc

SEQ ID NO: 993172 - RNA, 19 nt, Human
ggaacaaauuugccccuaa

SEQ ID NO: 993173 - RNA, 19 nt, Human
ggcacagugggcccaggag

SEQ ID NO: 993174 - RNA, 21 nt, Human
gggagaggggcggcccacaga

SEQ ID NO: 993175 - RNA, 23 nt, Human
gggcggggagggggcagcuguug

SEQ ID NO: 993176 - RNA, 20 nt, Human
ggggagggggcagcuguugg

SEQ ID NO: 993177 - RNA, 19 nt, Human
guccuuucaacgccccccu

SEQ ID NO: 993178 - RNA, 20 nt, Human
gugcucagcuccuggggcgu

SEQ ID NO: 993179 - RNA, 23 nt, Human
uaacagcaagggaagagcauucu

SEQ ID NO: 993180 - RNA, 19 nt, Human
uacugcccuuuucucucua

SEQ ID NO: 993181 - RNA, 21 nt, Human
uagaaagcaggccggguagcg

SEQ ID NO: 993182 - RNA, 21 nt, Human
uagaauuucuagaguucuaac

SEQ ID NO: 993183 - RNA, 24 nt, Human
uagaauuucuagaguucuaacagc

SEQ ID NO: 993184 - RNA, 23 nt, Human
uagcggguguccuuucaacgccc

SEQ ID NO: 993185 - RNA, 22 nt, Human
ucaacuuuucuucuguuuccca

SEQ ID NO: 993186 - RNA, 25 nt, Human
uccacugcugcugauguccucaauu

SEQ ID NO: 993187 - RNA, 18 nt, Human
ucccaaggcagggaaauc

SEQ ID NO: 993188 - RNA, 22 nt, Human
ucccaaggcagggaaaucccug

SEQ ID NO: 993189 - RNA, 18 nt, Human
ucccacaucccaaggcag

SEQ ID NO: 993190 - RNA, 18 nt, Human
uccccugagccuugagaa

SEQ ID NO: 993191 - RNA, 19 nt, Human
uccuuucaacgccccccuc

SEQ ID NO: 993192 - RNA, 20 nt, Human
ucugacagugacaggucucc

SEQ ID NO: 993193 - RNA, 23 nt, Human
ucugacagugacaggucuccagu

SEQ ID NO: 993194 - RNA, 23 nt, Human
ugaauaacagcaagggaagagca

SEQ ID NO: 993195 - RNA, 26 nt, Human
ugccccuaaacuuccacaggaggcac

SEQ ID NO: 993196 - RNA, 24 nt, Human
ugcuacacuaccggccagcggaac

SEQ ID NO: 993197 - RNA, 18 nt, Human
uggagagagaggagucac

SEQ ID NO: 993198 - RNA, 19 nt, Human
uggagagagaggagucacu

SEQ ID NO: 993199 - RNA, 23 nt, Human
uggcaagggauuuuccugugcuu

SEQ ID NO: 993200 - RNA, 18 nt, Human
uggcagaaucaauggcau

SEQ ID NO: 993201 - RNA, 25 nt, Human
uggcaucgaccaagggagggggggu

SEQ ID NO: 993202 - RNA, 24 nt, Human
uuccccugagccuugagaaccugu

SEQ ID NO: 993203 - RNA, 18 nt, Human
uugcugaguucccaagga

SEQ ID NO: 993204 - RNA, 22 nt, Human
uuucuaacccucuccaggucag

SEQ ID NO: 993205 - RNA, 25 nt, Human
uuuugaggaaagccauauuugggua

SEQ ID NO: 993206 - RNA, 22 nt, Human
uuuuuugaggaaagccauauuu

SEQ ID NO: 993207 - RNA, 24 nt, Human
uuuuuuuuuuuuugaggaaagcca

SEQ ID NO: 993208 - RNA, 19 nt, Human
uuuuuuuuuuuuuugagga

SEQ ID NO: 993209 - RNA, 21 nt, Human
uuuuuuuuuuuuuuuuugagg

SEQ ID NO: 993210 - RNA, 19 nt, Human
aaaaaguucucuucagaaa

SEQ ID NO: 993211 - RNA, 19 nt, Human
acaacacacuuuccgcaug

SEQ ID NO: 993212 - RNA, 19 nt, Human
acacacacacuugucugcg

SEQ ID NO: 993213 - RNA, 21 nt, Human
acacacacacuugucugcgua

SEQ ID NO: 993214 - RNA, 20 nt, Human
acacgcugagacaaagaggg

SEQ ID NO: 993215 - RNA, 24 nt, Human
acagagaaaggacugcucucugaa

SEQ ID NO: 993216 - RNA, 23 nt, Human
acaggggagagcacagcccagug

SEQ ID NO: 993217 - RNA, 19 nt, Human
accccaagccuucccucuc

SEQ ID NO: 993218 - RNA, 24 nt, Human
agaaacuccucuuucccccaccuc

SEQ ID NO: 993219 - RNA, 19 nt, Human
agaaagacagcaggcacca

SEQ ID NO: 993220 - RNA, 24 nt, Human
agaaagacagcaggcaccaagaaa

SEQ ID NO: 993221 - RNA, 27 nt, Human
agaaaggacugcucucugaagggugaa

SEQ ID NO: 993222 - RNA, 20 nt, Human
agagccccuccgcaccucau

SEQ ID NO: 993223 - RNA, 24 nt, Human
agagccccuccgcaccucauucuu

SEQ ID NO: 993224 - RNA, 24 nt, Human
agcaggagggaggcagugcuugga

SEQ ID NO: 993225 - RNA, 27 nt, Human
agcagucgggugggggagaccggugcc

SEQ ID NO: 993226 - RNA, 22 nt, Human
agccccagcuaccacuacagcc

SEQ ID NO: 993227 - RNA, 21 nt, Human
aggcacugcuucuccuccccc

SEQ ID NO: 993228 - RNA, 21 nt, Human
aggcagccacaggcccugggg

SEQ ID NO: 993229 - RNA, 24 nt, Human
aggcagccacaggcccugggguga

SEQ ID NO: 993230 - RNA, 19 nt, Human
aggcagugcuuggaucagc

SEQ ID NO: 993231 - RNA, 20 nt, Human
agggaggucaacgugcuggc

SEQ ID NO: 993232 - RNA, 23 nt, Human
aggguggggugggggcuggaggu

SEQ ID NO: 993233 - RNA, 19 nt, Human
cacauaacacgcugagaca

SEQ ID NO: 993234 - RNA, 21 nt, Human
cacauaacacgcugagacaaa

SEQ ID NO: 993235 - RNA, 27 nt, Human
caccaagaagagagagcccccacccca

SEQ ID NO: 993236 - RNA, 24 nt, Human
caccaggcacugcacuugggcucc

SEQ ID NO: 993237 - RNA, 19 nt, Human
caccagugaggccagaucc

SEQ ID NO: 993238 - RNA, 25 nt, Human
caccuggacagagcaggagggaggc

SEQ ID NO: 993239 - RNA, 19 nt, Human
cacgcugagacaaagaggg

SEQ ID NO: 993240 - RNA, 18 nt, Human
cagcaaccuagagugucc

SEQ ID NO: 993241 - RNA, 18 nt, Human
cagcagcaccggagagcc

SEQ ID NO: 993242 - RNA, 19 nt, Human
cagcagcaccggagagccc

SEQ ID NO: 993243 - RNA, 22 nt, Human
cagcagcaccggagagccccuc

SEQ ID NO: 993244 - RNA, 18 nt, Human
cagccacaccuucuccgu

SEQ ID NO: 993245 - RNA, 22 nt, Human
cagccacaccuucuccgucuca

SEQ ID NO: 993246 - RNA, 28 nt, Human
cagcuaccacuacagcccccucccacuc

SEQ ID NO: 993247 - RNA, 21 nt, Human
caggcacugcacuugggcucc

SEQ ID NO: 993248 - RNA, 26 nt, Human
caggguagaagccaagagucuggcau

SEQ ID NO: 993249 - RNA, 18 nt, Human
cauccaggauggccccau

SEQ ID NO: 993250 - RNA, 20 nt, Human
caucggguaaacaggggaga

SEQ ID NO: 993251 - RNA, 22 nt, Human
ccacaccuucuccgucucauuc

SEQ ID NO: 993252 - RNA, 19 nt, Human
ccacauccaggauggcccc

SEQ ID NO: 993253 - RNA, 18 nt, Human
ccagaccacaugguguug

SEQ ID NO: 993254 - RNA, 19 nt, Human
ccagcaaccuagagugucc

SEQ ID NO: 993255 - RNA, 19 nt, Human
cccaauccuccccauggac

SEQ ID NO: 993256 - RNA, 23 nt, Human
cccacggugacacaggguagaag

SEQ ID NO: 993257 - RNA, 21 nt, Human
ccccaagccuucccucucaag

SEQ ID NO: 993258 - RNA, 22 nt, Human
ccccagcuaccacuacagcccc

SEQ ID NO: 993259 - RNA, 20 nt, Human
cccgagucguucuugggagc

SEQ ID NO: 993260 - RNA, 21 nt, Human
cccuccgcaccucauucuuaa

SEQ ID NO: 993261 - RNA, 26 nt, Human
cccuccgcaccucauucuuaagaacc

SEQ ID NO: 993262 - RNA, 19 nt, Human
cccuggggugagagggcug

SEQ ID NO: 993263 - RNA, 21 nt, Human
ccucuucugcugcaaucuguu

SEQ ID NO: 993264 - RNA, 21 nt, Human
cgcuaugagccaggcacaggg

SEQ ID NO: 993265 - RNA, 20 nt, Human
cucaacccagcccagcagca

SEQ ID NO: 993266 - RNA, 26 nt, Human
cucauccacauccaggauggccccau

SEQ ID NO: 993267 - RNA, 22 nt, Human
cucucugaagggugaagaugga

SEQ ID NO: 993268 - RNA, 22 nt, Human
cugcuucuccucccccaauccu

SEQ ID NO: 993269 - RNA, 21 nt, Human
cuggcuccaugcagugccagg

SEQ ID NO: 993270 - RNA, 21 nt, Human
cuucacacgcaccuuccccuc

SEQ ID NO: 993271 - RNA, 22 nt, Human
cuucagaaacuccucuuucccc

SEQ ID NO: 993272 - RNA, 27 nt, Human
cuucagaaacuccucuuucccccaccu

SEQ ID NO: 993273 - RNA, 22 nt, Human
gaaacuccucuuucccccaccu

SEQ ID NO: 993274 - RNA, 18 nt, Human
gacacgggcucaggacac

SEQ ID NO: 993275 - RNA, 21 nt, Human
gacccggcucuccucaccagc

SEQ ID NO: 993276 - RNA, 22 nt, Human
gagacagaggagcaaaaaguuc

SEQ ID NO: 993277 - RNA, 18 nt, Human
gagcacagcccagugagu

SEQ ID NO: 993278 - RNA, 20 nt, Human
gagcaggagggaggcagugc

SEQ ID NO: 993279 - RNA, 25 nt, Human
gaggguggggugggggcuggaggug

SEQ ID NO: 993280 - RNA, 21 nt, Human
gaugggagcagcaccaggcac

SEQ ID NO: 993281 - RNA, 25 nt, Human
gcacugcuucuccucccccaauccu

SEQ ID NO: 993282 - RNA, 22 nt, Human
gccaggcacaggggaaggcacu

SEQ ID NO: 993283 - RNA, 18 nt, Human
gcccaggcagccacaggc

SEQ ID NO: 993284 - RNA, 22 nt, Human
ggagagaaggggggcggcagau

SEQ ID NO: 993285 - RNA, 19 nt, Human
ggcccuggggugagagggc

SEQ ID NO: 993286 - RNA, 24 nt, Human
ggccucuucugcugcaaucuguuc

SEQ ID NO: 993287 - RNA, 22 nt, Human
ggcucuccucaccagcgucucc

SEQ ID NO: 993288 - RNA, 18 nt, Human
ggcuggaggugcggaugg

SEQ ID NO: 993289 - RNA, 25 nt, Human
gggagguuggaagaaugacacgggc

SEQ ID NO: 993290 - RNA, 21 nt, Human
gggccaagaaccagcaggcug

SEQ ID NO: 993291 - RNA, 18 nt, Human
gggggccaagaaccagca

SEQ ID NO: 993292 - RNA, 19 nt, Human
gggugggggcuggaggugc

SEQ ID NO: 993293 - RNA, 21 nt, Human
gguagaagccaagagucuggc

SEQ ID NO: 993294 - RNA, 22 nt, Human
gucaggguguuucccaugcaga

SEQ ID NO: 993295 - RNA, 23 nt, Human
gugcuuggaucagcccugaacug

SEQ ID NO: 993296 - RNA, 20 nt, Human
gugggggcugggaccuccag

SEQ ID NO: 993297 - RNA, 24 nt, Human
uaaauaggucauugcacauaacac

SEQ ID NO: 993298 - RNA, 18 nt, Human
uaagaaccuggacccggc

SEQ ID NO: 993299 - RNA, 27 nt, Human
uaaugagcaccggccaaaacuuccauc

SEQ ID NO: 993300 - RNA, 24 nt, Human
uagggugggggcugggaccuccag

SEQ ID NO: 993301 - RNA, 19 nt, Human
ucaccagcgucuccagcug

SEQ ID NO: 993302 - RNA, 22 nt, Human
ucaccagcgucuccagcugcac

SEQ ID NO: 993303 - RNA, 18 nt, Human
ucauacaggucuccucau

SEQ ID NO: 993304 - RNA, 23 nt, Human
uccacacacacacuugucugcgg

SEQ ID NO: 993305 - RNA, 24 nt, Human
uccacacacacacuugucugcgua

SEQ ID NO: 993306 - RNA, 25 nt, Human
uccacacacacacuugucugcguag

SEQ ID NO: 993307 - RNA, 24 nt, Human
uccaucuucaguuuuucugaucac

SEQ ID NO: 993308 - RNA, 19 nt, Human
uccccucaggcaaguugag

SEQ ID NO: 993309 - RNA, 19 nt, Human
uccgucucauuccaggccu

SEQ ID NO: 993310 - RNA, 18 nt, Human
uccucaaccccaagccuu

SEQ ID NO: 993311 - RNA, 20 nt, Human
uccucccccaauccucccca

SEQ ID NO: 993312 - RNA, 24 nt, Human
ugaacugcuguaguuggaaugggu

SEQ ID NO: 993313 - RNA, 21 nt, Human
ugaauccucauaacaacacac

SEQ ID NO: 993314 - RNA, 24 nt, Human
ugaauccucauaacaacacacuuu

SEQ ID NO: 993315 - RNA, 20 nt, Human
ugacagaagaaggucagggg

SEQ ID NO: 993316 - RNA, 20 nt, Human
ugacagaagaaggucagggu

SEQ ID NO: 993317 - RNA, 20 nt, Human
ugagacaaagaggguggggu

SEQ ID NO: 993318 - RNA, 24 nt, Human
ugagcuccucagauuugaguugac

SEQ ID NO: 993319 - RNA, 19 nt, Human
ugcccacggugacacaggg

SEQ ID NO: 993320 - RNA, 22 nt, Human
ugcugcaaucuguucuucuguu

SEQ ID NO: 993321 - RNA, 21 nt, Human
ugcuucuccucccccaauccu

SEQ ID NO: 993322 - RNA, 24 nt, Human
uggaagaaugacacgggcucagga

SEQ ID NO: 993323 - RNA, 22 nt, Human
uggaauggguuuaccuuaaaua

SEQ ID NO: 993324 - RNA, 19 nt, Human
ugggagaggugcccaggca

SEQ ID NO: 993325 - RNA, 26 nt, Human
ugggauaagugugugggggcagggag

SEQ ID NO: 993326 - RNA, 22 nt, Human
ugggggagaccggugccccacc

SEQ ID NO: 993327 - RNA, 18 nt, Human
uggggugagagggcugcc

SEQ ID NO: 993328 - RNA, 18 nt, Human
uggggugggggcuggagg

SEQ ID NO: 993329 - RNA, 23 nt, Human
uggggugggggcuggaggugcgg

SEQ ID NO: 993330 - RNA, 23 nt, Human
ugguccagcuucacacgcaccuu

SEQ ID NO: 993331 - RNA, 22 nt, Human
ugucccaguaggcaaccugucc

SEQ ID NO: 993332 - RNA, 19 nt, Human
ugucugggauaagugugug

SEQ ID NO: 993333 - RNA, 22 nt, Human
aaaaugaagaaaaagaagagga

SEQ ID NO: 993334 - RNA, 18 nt, Human
aaacccaggaaugaacag

SEQ ID NO: 993335 - RNA, 18 nt, Human
aaagaaaaugcccagagg

SEQ ID NO: 993336 - RNA, 21 nt, Human
aaaugaagaaaaagaagagga

SEQ ID NO: 993337 - RNA, 26 nt, Human
aacucuuugcauauaauuucagagaa

SEQ ID NO: 993338 - RNA, 27 nt, Human
aagaaaaagaagaggaugacgcagaga

SEQ ID NO: 993339 - RNA, 24 nt, Human
aagaaaaagcaaaaaugaagaaaa

SEQ ID NO: 993340 - RNA, 21 nt, Human
aagcaaaaacuaacaaacagc

SEQ ID NO: 993341 - RNA, 20 nt, Human
aagcgaagaaaaagcaaaaa

SEQ ID NO: 993342 - RNA, 21 nt, Human
aagcuuucuuuuaauauauac

SEQ ID NO: 993343 - RNA, 23 nt, Human
aaucuuuacaaccauuuuguggg

SEQ ID NO: 993344 - RNA, 19 nt, Human
aaugaagaaaaagaagagg

SEQ ID NO: 993345 - RNA, 25 nt, Human
agaaaaagcaaaaaugaagaaaaag

SEQ ID NO: 993346 - RNA, 28 nt, Human
agaaaaaugugugaugaagacccacaac

SEQ ID NO: 993347 - RNA, 24 nt, Human
agagaagaacucaagcgaagaaaa

SEQ ID NO: 993348 - RNA, 18 nt, Human
agcaaaaacuaacaaaca

SEQ ID NO: 993349 - RNA, 28 nt, Human
agcgaagaaaaagcaaaaaugaagaaaa

SEQ ID NO: 993350 - RNA, 24 nt, Human
caagcugguggaaaaagugguuca

SEQ ID NO: 993351 - RNA, 21 nt, Human
cacuaugccacauaucaugcc

SEQ ID NO: 993352 - RNA, 23 nt, Human
cacuucacucccuugauacagcc

SEQ ID NO: 993353 - RNA, 25 nt, Human
cacuucacucccuugauacagccca

SEQ ID NO: 993354 - RNA, 24 nt, Human
cagaauguaccaucuuccaugccu

SEQ ID NO: 993355 - RNA, 18 nt, Human
cagcccaagauagagcag

SEQ ID NO: 993356 - RNA, 26 nt, Human
caucucacacuuuaagagccucugug

SEQ ID NO: 993357 - RNA, 21 nt, Human
caugccuagagaugaaaccga

SEQ ID NO: 993358 - RNA, 19 nt, Human
ccaugccuagagaugaaac

SEQ ID NO: 993359 - RNA, 22 nt, Human
cuaccagaugucgauuugcacu

SEQ ID NO: 993360 - RNA, 25 nt, Human
cucuccaucucacacuuuaagagcc

SEQ ID NO: 993361 - RNA, 20 nt, Human
cuuccaugccuagagaugaa

SEQ ID NO: 993362 - RNA, 19 nt, Human
gaaagcacgggcaggcugu

SEQ ID NO: 993363 - RNA, 23 nt, Human
gaaagcacgggcaggcuguuaga

SEQ ID NO: 993364 - RNA, 21 nt, Human
gacccuacucuucggccccac

SEQ ID NO: 993365 - RNA, 21 nt, Human
gacgauacaaaugccaaugac

SEQ ID NO: 993366 - RNA, 19 nt, Human
gauacaguacaagcuuucu

SEQ ID NO: 993367 - RNA, 18 nt, Human
gcugcugccugggggcga

SEQ ID NO: 993368 - RNA, 21 nt, Human
gcuuggaaagcacgggcaggc

SEQ ID NO: 993369 - RNA, 30 nt, Human
ggaaugaacaguuuuuuuuuuuuuuuuuuu

SEQ ID NO: 993370 - RNA, 23 nt, Human
guuuuuuuuuuuuuuuuuuuggg

SEQ ID NO: 993371 - RNA, 23 nt, Human
uaaacagcaucuauuacaaucua

SEQ ID NO: 993372 - RNA, 21 nt, Human
uaaagcaaaaacuaacaaaca

SEQ ID NO: 993373 - RNA, 22 nt, Human
uaaagcaaaaacuaacaaacag

SEQ ID NO: 993374 - RNA, 20 nt, Human
uaacaaacagcugaaagaaa

SEQ ID NO: 993375 - RNA, 20 nt, Human
uacagaaugacgauacaaau

SEQ ID NO: 993376 - RNA, 19 nt, Human
uacugcacaaaacccagga

SEQ ID NO: 993377 - RNA, 23 nt, Human
uacugccaucgagggcucagaau

SEQ ID NO: 993378 - RNA, 20 nt, Human
uauacagaaaaaugugugau

SEQ ID NO: 993379 - RNA, 18 nt, Human
uccaugccuagagaugaa

SEQ ID NO: 993380 - RNA, 19 nt, Human
ucccugaagcgcagcgcuu

SEQ ID NO: 993381 - RNA, 25 nt, Human
ucuucggccccaccagcucuccauc

SEQ ID NO: 993382 - RNA, 23 nt, Human
ugaagacccacaacucuuugcau

SEQ ID NO: 993383 - RNA, 22 nt, Human
ugacgcagagaauuacagacuc

SEQ ID NO: 993384 - RNA, 22 nt, Human
ugcaauuuccacuuuaccacca

SEQ ID NO: 993385 - RNA, 22 nt, Human
ugcacaaaacccaggaaugaac

SEQ ID NO: 993386 - RNA, 20 nt, Human
ugccaucgagggcucagaau

SEQ ID NO: 993387 - RNA, 27 nt, Human
ugccccuaaaccacauuaaaauaacuu

SEQ ID NO: 993388 - RNA, 18 nt, Human
uggaaaggucuguuuaug

SEQ ID NO: 993389 - RNA, 25 nt, Human
uggauauaaacuaaguaauuuacag

SEQ ID NO: 993390 - RNA, 18 nt, Human
uggcagagaaaauaaaua

SEQ ID NO: 993391 - RNA, 24 nt, Human
uggccuuugaaaacuauuaaucac

SEQ ID NO: 993392 - RNA, 24 nt, Human
uguauacugcacaaaacccaggaa

SEQ ID NO: 993393 - RNA, 22 nt, Human
ugugggaaaauguauacugcac

SEQ ID NO: 993394 - RNA, 19 nt, Human
uucagagaagaacucaagc

SEQ ID NO: 993395 - RNA, 26 nt, Human
uucagagaagaacucaagcgaagaaa

SEQ ID NO: 993396 - RNA, 22 nt, Human
uugaucacacuaugccacauau

SEQ ID NO: 993397 - RNA, 22 nt, Human
uugccccuaaaccacauuaaaa

SEQ ID NO: 993398 - RNA, 19 nt, Human
uuuuuuuuuuuuuuuuugc

SEQ ID NO: 993399 - RNA, 21 nt, Human
uuuuuuuuuuuuuuuuugcaa

SEQ ID NO: 993400 - RNA, 23 nt, Human
aaaacaaaaaugcaaaaacaaag

SEQ ID NO: 993401 - RNA, 20 nt, Human
aaacaaaaaugcaaaaacaa

SEQ ID NO: 993402 - RNA, 24 nt, Human
aaagaagauaacucuagaaaaaga

SEQ ID NO: 993403 - RNA, 18 nt, Human
aacuuuuguuuuccaagg

SEQ ID NO: 993404 - RNA, 23 nt, Human
aagaaacugcaggcaaacuaaag

SEQ ID NO: 993405 - RNA, 21 nt, Human
aauaaagaagauaacucuaga

SEQ ID NO: 993406 - RNA, 27 nt, Human
aauaaagaagauaacucuagaaaaaga

SEQ ID NO: 993407 - RNA, 19 nt, Human
accuccacauccccaaaaa

SEQ ID NO: 993408 - RNA, 18 nt, Human
caaaacaaaaaugcaaaa

SEQ ID NO: 993409 - RNA, 21 nt, Human
cacaagaaacugcaggcaaac

SEQ ID NO: 993410 - RNA, 20 nt, Human
cacuauauaacagaauaaaa

SEQ ID NO: 993411 - RNA, 21 nt, Human
ccaauucuuugggcccucuua

SEQ ID NO: 993412 - RNA, 24 nt, Human
ccgccgccgccgcgcucagcgccg

SEQ ID NO: 993413 - RNA, 18 nt, Human
ccgccgcgcucagcgccg

SEQ ID NO: 993414 - RNA, 20 nt, Human
cgccgcucccgccgccgccg

SEQ ID NO: 993415 - RNA, 20 nt, Human
cgcucccgccgccgccgcgc

SEQ ID NO: 993416 - RNA, 18 nt, Human
cuaacccaggcggggccu

SEQ ID NO: 993417 - RNA, 22 nt, Human
cugccuguggccgaagcccuuu

SEQ ID NO: 993418 - RNA, 21 nt, Human
cuggaaagacuaggaauaaua

SEQ ID NO: 993419 - RNA, 30 nt, Human
cuggaaagacuaggaauaauaaagaagaua

SEQ ID NO: 993420 - RNA, 18 nt, Human
cuguggccgaagcccuuu

SEQ ID NO: 993421 - RNA, 24 nt, Human
cuucgugccaggcuguggggcuuc

SEQ ID NO: 993422 - RNA, 19 nt, Human
cuuuaagcccacguugugg

SEQ ID NO: 993423 - RNA, 19 nt, Human
gaccugccuguggccgaag

SEQ ID NO: 993424 - RNA, 22 nt, Human
gccgccgcgcucagcgccgucu

SEQ ID NO: 993425 - RNA, 24 nt, Human
ggcugcuaggcugcuggcugcuug

SEQ ID NO: 993426 - RNA, 20 nt, Human
uaaaacuuuuguuuuccaag

SEQ ID NO: 993427 - RNA, 19 nt, Human
uaaaguaacaaauaugcac

SEQ ID NO: 993428 - RNA, 22 nt, Human
uaacaaauaugcacacagauuc

SEQ ID NO: 993429 - RNA, 20 nt, Human
uaacaggacaacauuugucc

SEQ ID NO: 993430 - RNA, 23 nt, Human
uaauguuuauuuccuuccagccu

SEQ ID NO: 993431 - RNA, 24 nt, Human
uacaacaaaagaaauauugugcaa

SEQ ID NO: 993432 - RNA, 20 nt, Human
uagaagaaucacauugaaaa

SEQ ID NO: 993433 - RNA, 24 nt, Human
uagauauauuuaaucacuacaucc

SEQ ID NO: 993434 - RNA, 19 nt, Human
uauaaaguacaacaaaaga

SEQ ID NO: 993435 - RNA, 22 nt, Human
ucaaaacaaaaaugcaaaaaca

SEQ ID NO: 993436 - RNA, 18 nt, Human
uccacuauauaacagaau

SEQ ID NO: 993437 - RNA, 19 nt, Human
ucgugccaggcuguggggc

SEQ ID NO: 993438 - RNA, 24 nt, Human
ucuacccaacuaccuccacauccc

SEQ ID NO: 993439 - RNA, 22 nt, Human
ugaugucagaaaucuacaccca

SEQ ID NO: 993440 - RNA, 18 nt, Human
ugcuggcugcuuggccac

SEQ ID NO: 993441 - RNA, 22 nt, Human
uggucucaaguauaaacagcaa

SEQ ID NO: 993442 - RNA, 23 nt, Human
ugugauaagaaaugaaaccugcc

SEQ ID NO: 993443 - RNA, 21 nt, Human
ugugcaaauuguaagucacaa

SEQ ID NO: 993444 - RNA, 24 nt, Human
uucaaaacaaaaaugcaaaaacaa

SEQ ID NO: 993445 - RNA, 26 nt, Human
uucuaauaauuuuucuacccaacuac

SEQ ID NO: 993446 - RNA, 23 nt, Human
uucuuugggcccucuuagcaaua

SEQ ID NO: 993447 - RNA, 19 nt, Human
uuggucucaaguauaaaca

SEQ ID NO: 993448 - RNA, 26 nt, Human
aaaaaaaaaaaaaccaaaacaaaaaa

SEQ ID NO: 993449 - RNA, 24 nt, Human
aaaaaaaaaaccaaaacaaaaaaa

SEQ ID NO: 993450 - RNA, 24 nt, Human
aaccagcuccccgaucuuccccua

SEQ ID NO: 993451 - RNA, 23 nt, Human
accagcuccccgaucuuccccua

SEQ ID NO: 993452 - RNA, 19 nt, Human
agcuccccgaucuuccccu

SEQ ID NO: 993453 - RNA, 21 nt, Human
aucuuccccuaggccgccagu

SEQ ID NO: 993454 - RNA, 21 nt, Human
caaaaaaacuucugaaacugc

SEQ ID NO: 993455 - RNA, 22 nt, Human
ccaaaacaaaaaaacuucugaa

SEQ ID NO: 993456 - RNA, 21 nt, Human
ccagcuccccgaucuuccccu

SEQ ID NO: 993457 - RNA, 23 nt, Human
cccggagcuccugcggccggcac

SEQ ID NO: 993458 - RNA, 18 nt, Human
cccuaggccgccaagacc

SEQ ID NO: 993459 - RNA, 21 nt, Human
cccuaggccgccaagaccguu

SEQ ID NO: 993460 - RNA, 23 nt, Human
ccggccgggagcaacaaagcggc

SEQ ID NO: 993461 - RNA, 28 nt, Human
cgggagcaacaaagcggccgcggggcgu

SEQ ID NO: 993462 - RNA, 25 nt, Human
cgggcggcggcggcggcggcaaccc

SEQ ID NO: 993463 - RNA, 25 nt, Human
cuuuaaaaaaaaaaaaaccaaaaca

SEQ ID NO: 993464 - RNA, 29 nt, Human
cuuuaaaaaaaaaaaaaccaaaacaaaaa

SEQ ID NO: 993465 - RNA, 22 nt, Human
gcagcagcggccgcacgugggc

SEQ ID NO: 993466 - RNA, 20 nt, Human
gcggcggcggcaacccggag

SEQ ID NO: 993467 - RNA, 21 nt, Human
gcggcggcggcggcggcaacc

SEQ ID NO: 993468 - RNA, 22 nt, Human
ggcggcggcggcggcggcaacc

SEQ ID NO: 993469 - RNA, 19 nt, Human
gggagaggaauccaucagu

SEQ ID NO: 993470 - RNA, 25 nt, Human
gggcugcgggcggcggcggcggcgg

SEQ ID NO: 993471 - RNA, 23 nt, Human
uaaaaaaaaaaaaaccaaaacaa

SEQ ID NO: 993472 - RNA, 25 nt, Human
ucugaaacugcaaaagguccugaac

SEQ ID NO: 993473 - RNA, 22 nt, Human
ucuuuaaaaaaaaaaaaaccaa

SEQ ID NO: 993474 - RNA, 25 nt, Human
ugaggcagugggagaggaauccauc

SEQ ID NO: 993475 - RNA, 22 nt, Human
ugcaaaagguccugaacggggu

SEQ ID NO: 993476 - RNA, 26 nt, Human
uggaaagaggcuuuuuaaaaauccca

SEQ ID NO: 993477 - RNA, 23 nt, Human
uuaaaaaucccaugagugauguc

SEQ ID NO: 993478 - RNA, 22 nt, Human
aaacagcuguaaccaggcacgc

SEQ ID NO: 993479 - RNA, 24 nt, Human
agacauccccccacccgaccaggg

SEQ ID NO: 993480 - RNA, 18 nt, Human
aggagcccaaaggacuuu

SEQ ID NO: 993481 - RNA, 23 nt, Human
agguauccagacauccccccacc

SEQ ID NO: 993482 - RNA, 19 nt, Human
agugagggaccgaggggcg

SEQ ID NO: 993483 - RNA, 18 nt, Human
caaaauccucaccaagga

SEQ ID NO: 993484 - RNA, 18 nt, Human
caaagggaggaggagccu

SEQ ID NO: 993485 - RNA, 18 nt, Human
cacagaggagguauccag

SEQ ID NO: 993486 - RNA, 21 nt, Human
cacccgaccagggucaagagc

SEQ ID NO: 993487 - RNA, 22 nt, Human
cacucccgacgagcaccgcacu

SEQ ID NO: 993488 - RNA, 18 nt, Human
cagcggcaggagcccaaa

SEQ ID NO: 993489 - RNA, 19 nt, Human
ccccacccgaccaggguca

SEQ ID NO: 993490 - RNA, 21 nt, Human
cgccguguggccggagggaga

SEQ ID NO: 993491 - RNA, 18 nt, Human
cggccgcugcgcuauggc

SEQ ID NO: 993492 - RNA, 20 nt, Human
cuccucagacucccagaaau

SEQ ID NO: 993493 - RNA, 21 nt, Human
gaagugccagugagggaccga

SEQ ID NO: 993494 - RNA, 22 nt, Human
gacauccuucaggucaccuuua

SEQ ID NO: 993495 - RNA, 21 nt, Human
gcuggcagcggcaggagccca

SEQ ID NO: 993496 - RNA, 21 nt, Human
guacuccucagacucccagaa

SEQ ID NO: 993497 - RNA, 20 nt, Human
ucaaaauccucaccaaggac

SEQ ID NO: 993498 - RNA, 19 nt, Human
uccaucuuccaccuguagg

SEQ ID NO: 993499 - RNA, 18 nt, Human
ucccagaugguauucagc

SEQ ID NO: 993500 - RNA, 21 nt, Human
uggccaguucuuuccacagag

SEQ ID NO: 993501 - RNA, 19 nt, Human
uguauuuacagacuccagc

SEQ ID NO: 993502 - RNA, 22 nt, Human
uguggccggagggagaagugcc

SEQ ID NO: 993503 - RNA, 24 nt, Human
uguguauuuacagacuccagcagg

SEQ ID NO: 993504 - RNA, 22 nt, Human
uuuuuuuuuuuuuuuuugcauu

SEQ ID NO: 993505 - RNA, 25 nt, Human
uuuuuuuuuuuuuuuuuugcauuaa

SEQ ID NO: 993506 - RNA, 20 nt, Human
uuuuuuuuuuuuuuuuuugg

SEQ ID NO: 993507 - RNA, 23 nt, Human
aaacaaugacaauagcaacauca

SEQ ID NO: 993508 - RNA, 19 nt, Human
aaacccuccauuuguuuuc

SEQ ID NO: 993509 - RNA, 22 nt, Human
aagaagagggagagagaugggg

SEQ ID NO: 993510 - RNA, 19 nt, Human
aaggaccuggacagaggca

SEQ ID NO: 993511 - RNA, 23 nt, Human
aaugacaauagcaacaucaaaga

SEQ ID NO: 993512 - RNA, 18 nt, Human
accauaacagacacagaa

SEQ ID NO: 993513 - RNA, 21 nt, Human
agagggagagagauggggaac

SEQ ID NO: 993514 - RNA, 23 nt, Human
agagggagagagauggggaacgg

SEQ ID NO: 993515 - RNA, 23 nt, Human
aggaagaggaagguuuuuaccaa

SEQ ID NO: 993516 - RNA, 20 nt, Human
auauuguugugucucaggga

SEQ ID NO: 993517 - RNA, 20 nt, Human
caaaauguaacacagagaca

SEQ ID NO: 993518 - RNA, 18 nt, Human
caacgacgcggugcugcc

SEQ ID NO: 993519 - RNA, 22 nt, Human
caaugacaauagcaacaucaaa

SEQ ID NO: 993520 - RNA, 18 nt, Human
caauugcuggacucaggg

SEQ ID NO: 993521 - RNA, 22 nt, Human
cacacacaacauuaaguuccac

SEQ ID NO: 993522 - RNA, 19 nt, Human
caccccaaaacaaugacaa

SEQ ID NO: 993523 - RNA, 19 nt, Human
cagagacaccaagugagca

SEQ ID NO: 993524 - RNA, 22 nt, Human
cauagaucaccauaacagacac

SEQ ID NO: 993525 - RNA, 21 nt, Human
ccaaaauguaacacagagaca

SEQ ID NO: 993526 - RNA, 20 nt, Human
ccaagcagcgaguccagagc

SEQ ID NO: 993527 - RNA, 21 nt, Human
ccaggacacgcucccuuagga

SEQ ID NO: 993528 - RNA, 22 nt, Human
ccccaaaacaaugacaauagca

SEQ ID NO: 993529 - RNA, 22 nt, Human
cgccgcgaccgacaaaggaaag

SEQ ID NO: 993530 - RNA, 22 nt, Human
cgcuguauguggcaccccaaaa

SEQ ID NO: 993531 - RNA, 21 nt, Human
cgucaacgacgcggugcugcc

SEQ ID NO: 993532 - RNA, 19 nt, Human
gacaauagcaacaucaaag

SEQ ID NO: 993533 - RNA, 22 nt, Human
gcccaagaagagggagagagau

SEQ ID NO: 993534 - RNA, 19 nt, Human
ggacucagggcugccacaa

SEQ ID NO: 993535 - RNA, 18 nt, Human
ggaggucaaaagagauac

SEQ ID NO: 993536 - RNA, 18 nt, Human
gggaacggucugugggug

SEQ ID NO: 993537 - RNA, 18 nt, Human
gggaggcccaagaagagg

SEQ ID NO: 993538 - RNA, 21 nt, Human
uaaaagacgcuguauguggca

SEQ ID NO: 993539 - RNA, 22 nt, Human
uaaaagacgcuguauguggcac

SEQ ID NO: 993540 - RNA, 23 nt, Human
uaacacagagacaccaagugagc

SEQ ID NO: 993541 - RNA, 19 nt, Human
uaacagacacagaaaucau

SEQ ID NO: 993542 - RNA, 24 nt, Human
uaacagacacagaaaucaugaaaa

SEQ ID NO: 993543 - RNA, 22 nt, Human
uaauaaaacgagguaugccaua

SEQ ID NO: 993544 - RNA, 20 nt, Human
uauugcuaaaaaaugcugag

SEQ ID NO: 993545 - RNA, 23 nt, Human
ugacaauagcaacaucaaagaag

SEQ ID NO: 993546 - RNA, 19 nt, Human
ugcugccuuuuuuccgagc

SEQ ID NO: 993547 - RNA, 19 nt, Human
ugcuggacucagggcugcc

SEQ ID NO: 993548 - RNA, 19 nt, Human
ugcuggacucagggcugcc

SEQ ID NO: 993549 - RNA, 27 nt, Human
uggaggaagaggaagguuuuuaccaag

SEQ ID NO: 993550 - RNA, 24 nt, Human
uggcgccgcgaccgacaaaggaaa

SEQ ID NO: 993551 - RNA, 18 nt, Human
ugugucucagggaauagg

SEQ ID NO: 993552 - RNA, 24 nt, Human
uuaaaaauacuuuauugcuaaaaa

SEQ ID NO: 993553 - RNA, 20 nt, Human
auaccuuauauaauaaaaug

SEQ ID NO: 993554 - RNA, 18 nt, Human
uaaaaagcaguucucagg

SEQ ID NO: 993555 - RNA, 18 nt, Human
uaaaauguaucaggaaaa

SEQ ID NO: 993556 - RNA, 18 nt, Human
uaccuuauauaauaaaau

SEQ ID NO: 993557 - RNA, 22 nt, Human
aacacagccaccuguuccaaca

SEQ ID NO: 993558 - RNA, 19 nt, Human
acagagcuccuccaagcca

SEQ ID NO: 993559 - RNA, 22 nt, Human
acagagcuccuccaagccaugc

SEQ ID NO: 993560 - RNA, 22 nt, Human
acgcggucgccccgccagcgcc

SEQ ID NO: 993561 - RNA, 24 nt, Human
agagaugggagacuguguguauga

SEQ ID NO: 993562 - RNA, 21 nt, Human
agagcuccuccaagccaugcu

SEQ ID NO: 993563 - RNA, 25 nt, Human
agagcuccuccaagccaugcuggau

SEQ ID NO: 993564 - RNA, 19 nt, Human
agcagcaccguuacgcggu

SEQ ID NO: 993565 - RNA, 18 nt, Human
agccgcccucggccgggg

SEQ ID NO: 993566 - RNA, 19 nt, Human
agcuccuccaagccaugcu

SEQ ID NO: 993567 - RNA, 18 nt, Human
agcuuccaguagaggccg

SEQ ID NO: 993568 - RNA, 23 nt, Human
aggcagcuucggcgcagguagcg

SEQ ID NO: 993569 - RNA, 22 nt, Human
agggggaggggaggagagaugg

SEQ ID NO: 993570 - RNA, 23 nt, Human
cagccccccgccccggggucccc

SEQ ID NO: 993571 - RNA, 19 nt, Human
cagcgccagaaccagccgu

SEQ ID NO: 993572 - RNA, 21 nt, Human
cagcgccggccacagcccccc

SEQ ID NO: 993573 - RNA, 23 nt, Human
cagcggcuucagcuuguggcugc

SEQ ID NO: 993574 - RNA, 23 nt, Human
caugggccaggccucucuuccag

SEQ ID NO: 993575 - RNA, 21 nt, Human
ccagagcaggaacacagccac

SEQ ID NO: 993576 - RNA, 18 nt, Human
ccagccccgcagcagcgg

SEQ ID NO: 993577 - RNA, 20 nt, Human
cccagggggaggggaggagg

SEQ ID NO: 993578 - RNA, 22 nt, Human
cccccgccccgggguccccugc

SEQ ID NO: 993579 - RNA, 24 nt, Human
cccgggggcgcagccugcuccgga

SEQ ID NO: 993580 - RNA, 19 nt, Human
cccgggguccccugcgccc

SEQ ID NO: 993581 - RNA, 23 nt, Human
cccucggccgggggcggcggggc

SEQ ID NO: 993582 - RNA, 25 nt, Human
ccggggcgcggucgggcagggggcc

SEQ ID NO: 993583 - RNA, 18 nt, Human
ccguacaugugccugccc

SEQ ID NO: 993584 - RNA, 22 nt, Human
ccguggcgcuucugccagcgcc

SEQ ID NO: 993585 - RNA, 21 nt, Human
cgaccucucaccaacagagcu

SEQ ID NO: 993586 - RNA, 19 nt, Human
cgauagcagacaggaguuu

SEQ ID NO: 993587 - RNA, 19 nt, Human
cgccagcgccggccacagc

SEQ ID NO: 993588 - RNA, 21 nt, Human
cgccagcgccggccacagccc

SEQ ID NO: 993589 - RNA, 23 nt, Human
cgccagcgccggccacagccccc

SEQ ID NO: 993590 - RNA, 25 nt, Human
cgcggucgggcagggggccggcgcc

SEQ ID NO: 993591 - RNA, 25 nt, Human
cggccagcagcaccguuacgcgguc

SEQ ID NO: 993592 - RNA, 18 nt, Human
cgggcggcugagccaggc

SEQ ID NO: 993593 - RNA, 18 nt, Human
cgggcgggccgggcgcgg

SEQ ID NO: 993594 - RNA, 23 nt, Human
cggucagguuugcggccagcagc

SEQ ID NO: 993595 - RNA, 21 nt, Human
cguggcgcuucugccagcgcc

SEQ ID NO: 993596 - RNA, 19 nt, Human
cuccaagugcagcaggaga

SEQ ID NO: 993597 - RNA, 20 nt, Human
cuccuugacgggcgggccgg

SEQ ID NO: 993598 - RNA, 18 nt, Human
cugcugcaggcagcuucg

SEQ ID NO: 993599 - RNA, 18 nt, Human
cuggugcaggggcggagg

SEQ ID NO: 993600 - RNA, 19 nt, Human
cuguguguauguccccucc

SEQ ID NO: 993601 - RNA, 18 nt, Human
cuucugcugcaggcagcu

SEQ ID NO: 993602 - RNA, 19 nt, Human
gaacacagccaccuguucc

SEQ ID NO: 993603 - RNA, 25 nt, Human
gcagggcgaccucucaccaacagag

SEQ ID NO: 993604 - RNA, 19 nt, Human
gccacagccccccgccccg

SEQ ID NO: 993605 - RNA, 19 nt, Human
gccccgggguccccugcgc

SEQ ID NO: 993606 - RNA, 20 nt, Human
gcccgggggcgcagccugcu

SEQ ID NO: 993607 - RNA, 22 nt, Human
gccggcgccggagggcagcgcg

SEQ ID NO: 993608 - RNA, 22 nt, Human
gccgggggcggcggggccgggg

SEQ ID NO: 993609 - RNA, 21 nt, Human
gcggcggggccggggcgcggu

SEQ ID NO: 993610 - RNA, 24 nt, Human
gcggucgggcagggggccggcgcc

SEQ ID NO: 993611 - RNA, 21 nt, Human
gcucguccccguagccgcccu

SEQ ID NO: 993612 - RNA, 20 nt, Human
gcuugggcagggcggguggg

SEQ ID NO: 993613 - RNA, 19 nt, Human
ggcgcggucgggcaggggg

SEQ ID NO: 993614 - RNA, 19 nt, Human
ggcgggccgggcgcggggc

SEQ ID NO: 993615 - RNA, 24 nt, Human
ggcugggcggguccggcagccgcc

SEQ ID NO: 993616 - RNA, 19 nt, Human
ggcugggggcccggccucg

SEQ ID NO: 993617 - RNA, 20 nt, Human
ggcuugggcagggcgggugg

SEQ ID NO: 993618 - RNA, 19 nt, Human
ggggaggagagaugggaga

SEQ ID NO: 993619 - RNA, 25 nt, Human
guccccguagccgcccucggccggg

SEQ ID NO: 993620 - RNA, 20 nt, Human
guggcgcaggcugggcgggu

SEQ ID NO: 993621 - RNA, 23 nt, Human
uauguccccucccuccaagugca

SEQ ID NO: 993622 - RNA, 21 nt, Human
ugagaggagcaugggccaggc

SEQ ID NO: 993623 - RNA, 22 nt, Human
ugcaggggcggaggcccagccg

SEQ ID NO: 993624 - RNA, 19 nt, Human
ugccagugaggcagggcga

SEQ ID NO: 993625 - RNA, 19 nt, Human
ugcggugggccaccccagg

SEQ ID NO: 993626 - RNA, 20 nt, Human
uggcagcugggcuugggcag

SEQ ID NO: 993627 - RNA, 21 nt, Human
uggcagcugggcuugggcagg

SEQ ID NO: 993628 - RNA, 19 nt, Human
uggcgcaggcugggcgggu

SEQ ID NO: 993629 - RNA, 20 nt, Human
ugggcagggcgggugggccc

SEQ ID NO: 993630 - RNA, 25 nt, Human
ugggccaccagcagcacggccuucu

SEQ ID NO: 993631 - RNA, 18 nt, Human
ugguggcgcaggcugggc

SEQ ID NO: 993632 - RNA, 24 nt, Human
ugguugugguggcgcaggcugggc

SEQ ID NO: 993633 - RNA, 19 nt, Human
uguaugccccguacaugug

SEQ ID NO: 993634 - RNA, 20 nt, Human
ugugguggcgcaggcugggc

SEQ ID NO: 993635 - RNA, 24 nt, Human
uguuccaacaggcgcugugccuug

SEQ ID NO: 993636 - RNA, 22 nt, Human
uuccaacaggcgcugugccuug

SEQ ID NO: 993637 - RNA, 22 nt, Human
uuccuggaacccccuguaccca

SEQ ID NO: 993638 - RNA, 18 nt, Human
acacauacauacacacac

SEQ ID NO: 993639 - RNA, 24 nt, Human
acuuguuuauauauauauauauau

SEQ ID NO: 993640 - RNA, 28 nt, Human
auauacacauacauacacacacagucac

SEQ ID NO: 993641 - RNA, 19 nt, Human
auauauauauauauauaua

SEQ ID NO: 993642 - RNA, 19 nt, Human
auauauauauauauauaua

SEQ ID NO: 993643 - RNA, 19 nt, Human
auauauauauauauauaua

SEQ ID NO: 993644 - RNA, 19 nt, Human
auauauauauauauauaua

SEQ ID NO: 993645 - RNA, 19 nt, Human
auauauauauauauauaua

SEQ ID NO: 993646 - RNA, 19 nt, Human
auauauauauauauauaua

SEQ ID NO: 993647 - RNA, 19 nt, Human
auauauauauauauauaua

SEQ ID NO: 993648 - RNA, 19 nt, Human
auauauauauauauauaua

SEQ ID NO: 993649 - RNA, 19 nt, Human
auauauauauauauauaua

SEQ ID NO: 993650 - RNA, 19 nt, Human
auauauauauauauauaua

SEQ ID NO: 993651 - RNA, 19 nt, Human
auauauauauauauauaua

SEQ ID NO: 993652 - RNA, 19 nt, Human
auauauauauauauauaua

SEQ ID NO: 993653 - RNA, 27 nt, Human
aucuccuucuggccuccuaauccacug

SEQ ID NO: 993654 - RNA, 23 nt, Human
cacaaugcccacggagaccccaa

SEQ ID NO: 993655 - RNA, 19 nt, Human
cacuccgggaucuugaaga

SEQ ID NO: 993656 - RNA, 19 nt, Human
caggagacagcgcuaccac

SEQ ID NO: 993657 - RNA, 20 nt, Human
cccaacagggagcacguuua

SEQ ID NO: 993658 - RNA, 18 nt, Human
ccgccucccgagaggcuc

SEQ ID NO: 993659 - RNA, 23 nt, Human
cuucaccaggagacagcgcuacc

SEQ ID NO: 993660 - RNA, 18 nt, Human
gucacauuccagugugac

SEQ ID NO: 993661 - RNA, 19 nt, Human
uauauauauacacauacau

SEQ ID NO: 993662 - RNA, 18 nt, Human
uauauauauauauauaca

SEQ ID NO: 993663 - RNA, 19 nt, Human
uauauauauauauauauau

SEQ ID NO: 993664 - RNA, 19 nt, Human
uauauauauauauauauau

SEQ ID NO: 993665 - RNA, 19 nt, Human
uauauauauauauauauau

SEQ ID NO: 993666 - RNA, 19 nt, Human
uauauauauauauauauau

SEQ ID NO: 993667 - RNA, 19 nt, Human
uauauauauauauauauau

SEQ ID NO: 993668 - RNA, 19 nt, Human
uauauauauauauauauau

SEQ ID NO: 993669 - RNA, 19 nt, Human
uauauauauauauauauau

SEQ ID NO: 993670 - RNA, 19 nt, Human
uauauauauauauauauau

SEQ ID NO: 993671 - RNA, 23 nt, Human
uauauauauauauauauauauac

SEQ ID NO: 993672 - RNA, 19 nt, Human
uccgggaucuugaagacuc

SEQ ID NO: 993673 - RNA, 19 nt, Human
ugacaaauacuccuucacc

SEQ ID NO: 993674 - RNA, 21 nt, Human
uggccuccuaauccacugccu

SEQ ID NO: 993675 - RNA, 20 nt, Human
uguuuauauauauauauaua

SEQ ID NO: 993676 - RNA, 22 nt, Human
uguuuauauauauauauauaua

SEQ ID NO: 993677 - RNA, 21 nt, Human
uucacagaugacacccaacag

SEQ ID NO: 993678 - RNA, 19 nt, Human
uuuauauauauauauauau

SEQ ID NO: 993679 - RNA, 19 nt, Human
uuuauauauauauauauau

SEQ ID NO: 993680 - RNA, 20 nt, Human
acccuccuaagccccgggca

SEQ ID NO: 993681 - RNA, 22 nt, Human
accggaccgaggccgcuccaac

SEQ ID NO: 993682 - RNA, 26 nt, Human
accggugccacccuccuaagccccgg

SEQ ID NO: 993683 - RNA, 23 nt, Human
agaauaugaggcugacuugggca

SEQ ID NO: 993684 - RNA, 19 nt, Human
aggaaggcacagggcccca

SEQ ID NO: 993685 - RNA, 18 nt, Human
aggcaguacguacaugcg

SEQ ID NO: 993686 - RNA, 18 nt, Human
agggggcagggcgggggg

SEQ ID NO: 993687 - RNA, 19 nt, Human
cacacccccgagauccaag

SEQ ID NO: 993688 - RNA, 19 nt, Human
cacccccaacuccgaaguc

SEQ ID NO: 993689 - RNA, 20 nt, Human
cacccuccuaagccccgggc

SEQ ID NO: 993690 - RNA, 20 nt, Human
cagcaccggugccacccucc

SEQ ID NO: 993691 - RNA, 28 nt, Human
cagcuccuguggugucugaccacccccu

SEQ ID NO: 993692 - RNA, 22 nt, Human
ccagcaccggugccacccuccu

SEQ ID NO: 993693 - RNA, 20 nt, Human
cccaacuccgaaguccagac

SEQ ID NO: 993694 - RNA, 22 nt, Human
cccagcaccggugccacccucc

SEQ ID NO: 993695 - RNA, 24 nt, Human
ccccaaaggccugaaggaggugcc

SEQ ID NO: 993696 - RNA, 19 nt, Human
ccccacacccccgagaucc

SEQ ID NO: 993697 - RNA, 21 nt, Human
ccccacacccccgagauccaa

SEQ ID NO: 993698 - RNA, 18 nt, Human
cccccgagauccaagcug

SEQ ID NO: 993699 - RNA, 24 nt, Human
cccgugugucccagcaccggugcc

SEQ ID NO: 993700 - RNA, 18 nt, Human
ccgaaguccagacaagcu

SEQ ID NO: 993701 - RNA, 23 nt, Human
ccgagauccaagcugcacuggcu

SEQ ID NO: 993702 - RNA, 20 nt, Human
ccgcaggaggugacagcucc

SEQ ID NO: 993703 - RNA, 23 nt, Human
ccuguggugucugaccaccccca

SEQ ID NO: 993704 - RNA, 23 nt, Human
cgggcaggcaguacguacaugcg

SEQ ID NO: 993705 - RNA, 20 nt, Human
gaaaugaacaggguggggug

SEQ ID NO: 993706 - RNA, 23 nt, Human
gaaggaggugccacugggcugcc

SEQ ID NO: 993707 - RNA, 24 nt, Human
gcaguacguacaugcggaccccgc

SEQ ID NO: 993708 - RNA, 20 nt, Human
gcccagaauaugaggcugac

SEQ ID NO: 993709 - RNA, 21 nt, Human
ggacacagucccguguguccc

SEQ ID NO: 993710 - RNA, 19 nt, Human
ggcagggcgggggguggcg

SEQ ID NO: 993711 - RNA, 23 nt, Human
ggccugaaggaggugccacuggg

SEQ ID NO: 993712 - RNA, 24 nt, Human
ggcuggcagggggcagggcggggg

SEQ ID NO: 993713 - RNA, 19 nt, Human
gggccccacacccccgaga

SEQ ID NO: 993714 - RNA, 19 nt, Human
ggggguggcgaggacacag

SEQ ID NO: 993715 - RNA, 22 nt, Human
gucccgugugucccagcaccgg

SEQ ID NO: 993716 - RNA, 24 nt, Human
ucccagcaccggugccacccuccu

SEQ ID NO: 993717 - RNA, 23 nt, Human
uccuaagccccgggcaggcagua

SEQ ID NO: 993718 - RNA, 23 nt, Human
uggcagggggcagggcggggggu

SEQ ID NO: 993719 - RNA, 25 nt, Human
uggcagggggcagggcggggggugg

SEQ ID NO: 993720 - RNA, 20 nt, Human
uguccgcccagaauaugagg

SEQ ID NO: 993721 - RNA, 19 nt, Human
uuuuuuuuuuccguccucc

SEQ ID NO: 993722 - RNA, 21 nt, Human
uuuuuuuuuuuuuuuuuccgu

SEQ ID NO: 993723 - RNA, 27 nt, Human
uuuuuuuuuuuuuuuuuuuuuccgggg

SEQ ID NO: 993724 - RNA, 23 nt, Human
aaaaaaaaacaaggaugacagaa

SEQ ID NO: 993725 - RNA, 19 nt, Human
aaaacaaggaugacagaac

SEQ ID NO: 993726 - RNA, 28 nt, Human
aaauaccacaaggucaagucgaaaacac

SEQ ID NO: 993727 - RNA, 21 nt, Human
aacagcuuccugagugccuga

SEQ ID NO: 993728 - RNA, 23 nt, Human
aagaaaaauaccacaaggucaag

SEQ ID NO: 993729 - RNA, 18 nt, Human
aagcaaggcccuggugug

SEQ ID NO: 993730 - RNA, 21 nt, Human
aaggcuggaggcagagaagcc

SEQ ID NO: 993731 - RNA, 19 nt, Human
aagguagaacagcuuccug

SEQ ID NO: 993732 - RNA, 21 nt, Human
accccaaaggcuggaggcaga

SEQ ID NO: 993733 - RNA, 22 nt, Human
agagaagccaggcagcucccuc

SEQ ID NO: 993734 - RNA, 24 nt, Human
agagggccagcuguggucaggccu

SEQ ID NO: 993735 - RNA, 20 nt, Human
aggaaaaggcugggcugggc

SEQ ID NO: 993736 - RNA, 21 nt, Human
aggcagugugugccucucggc

SEQ ID NO: 993737 - RNA, 20 nt, Human
aggccaagaaaaauaccaca

SEQ ID NO: 993738 - RNA, 23 nt, Human
aggcccuggcagauguaaugagc

SEQ ID NO: 993739 - RNA, 21 nt, Human
aguccucuaacaacccugccu

SEQ ID NO: 993740 - RNA, 19 nt, Human
auccggggcuggcaucauc

SEQ ID NO: 993741 - RNA, 22 nt, Human
augggauuucacugcaucccag

SEQ ID NO: 993742 - RNA, 22 nt, Human
caagaaaaauaccacaagguca

SEQ ID NO: 993743 - RNA, 22 nt, Human
caagucgaaaacacgacauguu

SEQ ID NO: 993744 - RNA, 21 nt, Human
cacaacaccaaacaaccuaga

SEQ ID NO: 993745 - RNA, 21 nt, Human
cagaacacaaaacaagugaga

SEQ ID NO: 993746 - RNA, 18 nt, Human
cagagacacugucaccuc

SEQ ID NO: 993747 - RNA, 18 nt, Human
cagagagcagcccggauc

SEQ ID NO: 993748 - RNA, 23 nt, Human
cagcuuccugagugccugcagag

SEQ ID NO: 993749 - RNA, 22 nt, Human
caggacccuucacauguggccu

SEQ ID NO: 993750 - RNA, 21 nt, Human
caggagcagcaaaguguggcu

SEQ ID NO: 993751 - RNA, 21 nt, Human
cauccugucucccgaucugcu

SEQ ID NO: 993752 - RNA, 19 nt, Human
ccacagcaggacccuucac

SEQ ID NO: 993753 - RNA, 21 nt, Human
ccaguagcugcugugaccgag

SEQ ID NO: 993754 - RNA, 23 nt, Human
cccacaacaccaaacaaccuaga

SEQ ID NO: 993755 - RNA, 23 nt, Human
cccaucccccgcuucccugggag

SEQ ID NO: 993756 - RNA, 21 nt, Human
ccccucagcgacgucugaucu

SEQ ID NO: 993757 - RNA, 19 nt, Human
ccucucggccggcacagga

SEQ ID NO: 993758 - RNA, 22 nt, Human
ccucugugcccacaacaccaaa

SEQ ID NO: 993759 - RNA, 22 nt, Human
ccugaagcuuuguggagcugaa

SEQ ID NO: 993760 - RNA, 25 nt, Human
ccugagugccugcagagacacuguc

SEQ ID NO: 993761 - RNA, 24 nt, Human
cggauccggggcuggcaucauccu

SEQ ID NO: 993762 - RNA, 22 nt, Human
cucaagcucggccagguccagc

SEQ ID NO: 993763 - RNA, 21 nt, Human
cuggcacgggacguccucugu

SEQ ID NO: 993764 - RNA, 24 nt, Human
cugugcccacaacaccaaacaacc

SEQ ID NO: 993765 - RNA, 18 nt, Human
cuguggucaggccugaag

SEQ ID NO: 993766 - RNA, 23 nt, Human
cuucagauguuaucuuugggcca

SEQ ID NO: 993767 - RNA, 18 nt, Human
cuuggugaggaugacaca

SEQ ID NO: 993768 - RNA, 18 nt, Human
gagcagcccggauccggg

SEQ ID NO: 993769 - RNA, 19 nt, Human
gagggccagcuguggucag

SEQ ID NO: 993770 - RNA, 18 nt, Human
gagucaccaagaugacca

SEQ ID NO: 993771 - RNA, 18 nt, Human
gcacacaacuaggccaag

SEQ ID NO: 993772 - RNA, 28 nt, Human
gcagcccggauccggggcuggcaucauc

SEQ ID NO: 993773 - RNA, 18 nt, Human
gcaucauccuucccugca

SEQ ID NO: 993774 - RNA, 19 nt, Human
gccaguagcugcugugacc

SEQ ID NO: 993775 - RNA, 20 nt, Human
gcuggaggcagagaagccag

SEQ ID NO: 993776 - RNA, 20 nt, Human
gcuggaguccaggagcagca

SEQ ID NO: 993777 - RNA, 26 nt, Human
ggccacccggcacuauuuuuggaaua

SEQ ID NO: 993778 - RNA, 18 nt, Human
guccgccuugcccugccc

SEQ ID NO: 993779 - RNA, 21 nt, Human
uaggccaagaaaaauaccaca

SEQ ID NO: 993780 - RNA, 23 nt, Human
ucaccucugugcccacaacacca

SEQ ID NO: 993781 - RNA, 25 nt, Human
ucacugcaucccaggaaaaggcugg

SEQ ID NO: 993782 - RNA, 20 nt, Human
ucagcgccccaucccccgcu

SEQ ID NO: 993783 - RNA, 20 nt, Human
ucaguccgccuugcccugcc

SEQ ID NO: 993784 - RNA, 19 nt, Human
ucccucagaauaccaacga

SEQ ID NO: 993785 - RNA, 19 nt, Human
ucccugcaggcaauuacuc

SEQ ID NO: 993786 - RNA, 23 nt, Human
ucgaaaacacgacauguuaaaac

SEQ ID NO: 993787 - RNA, 19 nt, Human
ucugugcccacaacaccaa

SEQ ID NO: 993788 - RNA, 20 nt, Human
ucugugcccacaacaccaaa

SEQ ID NO: 993789 - RNA, 24 nt, Human
ugacagaacacaaaacaagugaga

SEQ ID NO: 993790 - RNA, 26 nt, Human
ugacagaacacaaaacaagugagaua

SEQ ID NO: 993791 - RNA, 19 nt, Human
ugacccuggagaacgagga

SEQ ID NO: 993792 - RNA, 20 nt, Human
ugagagaaucuggcacggga

SEQ ID NO: 993793 - RNA, 21 nt, Human
ugagagaaucuggcacgggac

SEQ ID NO: 993794 - RNA, 20 nt, Human
ugaggcaggcccuggcagau

SEQ ID NO: 993795 - RNA, 22 nt, Human
ugcauggaguuccaagguagaa

SEQ ID NO: 993796 - RNA, 18 nt, Human
ugcccugguauucgagac

SEQ ID NO: 993797 - RNA, 22 nt, Human
uggaggcagagaagccaggcag

SEQ ID NO: 993798 - RNA, 24 nt, Human
uggaguuccaagguagaacagcuu

SEQ ID NO: 993799 - RNA, 24 nt, Human
uggcacacaacuaggccaagaaaa

SEQ ID NO: 993800 - RNA, 21 nt, Human
uggcagauguaaugagcuugg

SEQ ID NO: 993801 - RNA, 22 nt, Human
ugggauuucacugcaucccagg

SEQ ID NO: 993802 - RNA, 21 nt, Human
ugugaaggcuggcuggagucc

SEQ ID NO: 993803 - RNA, 21 nt, Human
uguggcggugggggaggggag

SEQ ID NO: 993804 - RNA, 18 nt, Human
agcaccaacagacuugau

SEQ ID NO: 993805 - RNA, 26 nt, Human
cugacaauggguugauagccuucccc

SEQ ID NO: 993806 - RNA, 27 nt, Human
uccuuugcuucugucauucuccugggg

SEQ ID NO: 993807 - RNA, 20 nt, Human
uucaucuuuuacuuuuuagc

SEQ ID NO: 993808 - RNA, 22 nt, Human
aaguucauccaucaggacuucu

SEQ ID NO: 993809 - RNA, 18 nt, Human
acagucacaauugaagaa

SEQ ID NO: 993810 - RNA, 23 nt, Human
accuuugcuugaaugucuccaau

SEQ ID NO: 993811 - RNA, 18 nt, Human
aggcuggcgguuguuggg

SEQ ID NO: 993812 - RNA, 19 nt, Human
cacugaacaauaagaccuu

SEQ ID NO: 993813 - RNA, 19 nt, Human
cagaugguugaacauggug

SEQ ID NO: 993814 - RNA, 22 nt, Human
cauaaguugcuuuaaaauuaac

SEQ ID NO: 993815 - RNA, 24 nt, Human
caugacagaugguugaacauggug

SEQ ID NO: 993816 - RNA, 20 nt, Human
caugaguuuccuuucuguuc

SEQ ID NO: 993817 - RNA, 21 nt, Human
cgacaucaguacaaggcuggc

SEQ ID NO: 993818 - RNA, 20 nt, Human
cgaggaaaucuaaucccacg

SEQ ID NO: 993819 - RNA, 24 nt, Human
cucauuuccaauaaagcagcuguu

SEQ ID NO: 993820 - RNA, 26 nt, Human
cugguaaauagcaauuuuguuucucc

SEQ ID NO: 993821 - RNA, 24 nt, Human
cuucuauugugauuauuccuggua

SEQ ID NO: 993822 - RNA, 21 nt, Human
gaaaucuaaucccacgucccu

SEQ ID NO: 993823 - RNA, 18 nt, Human
gagggagggucagggucu

SEQ ID NO: 993824 - RNA, 21 nt, Human
ggaagcgaagcagugucaaca

SEQ ID NO: 993825 - RNA, 19 nt, Human
gggagggagggucaggguc

SEQ ID NO: 993826 - RNA, 21 nt, Human
guugcaucuuauuauuucacu

SEQ ID NO: 993827 - RNA, 21 nt, Human
ucaaaaguucauccaucagga

SEQ ID NO: 993828 - RNA, 19 nt, Human
ucuaaucccacgucccuaa

SEQ ID NO: 993829 - RNA, 19 nt, Human
ucuggacaggagccgcggc

SEQ ID NO: 993830 - RNA, 22 nt, Human
ucuucaagucuuggaugagacu

SEQ ID NO: 993831 - RNA, 18 nt, Human
ugaaucauaaggccucaa

SEQ ID NO: 993832 - RNA, 27 nt, Human
uggaugagacuguagagcggucuugug

SEQ ID NO: 993833 - RNA, 22 nt, Human
uggcaaucuuucaucaaaaguu

SEQ ID NO: 993834 - RNA, 19 nt, Human
ugggagcaguaaugucaag

SEQ ID NO: 993835 - RNA, 22 nt, Human
ugggagcaguaaugucaaguga

SEQ ID NO: 993836 - RNA, 19 nt, Human
ugggagggagggucagggu

SEQ ID NO: 993837 - RNA, 22 nt, Human
ugguggcuacugcuuucagggg

SEQ ID NO: 993838 - RNA, 21 nt, Human
ugucuccaauaaggccugauu

SEQ ID NO: 993839 - RNA, 18 nt, Human
uuaaacccuuagacgccg

SEQ ID NO: 993840 - RNA, 25 nt, Human
uuccugguaaauagcaauuuuguuu

SEQ ID NO: 993841 - RNA, 19 nt, Human
uuuccauuugccaaacagu

SEQ ID NO: 993842 - RNA, 18 nt, Human
uuuuuuuuuuuuuuuuug

SEQ ID NO: 993843 - RNA, 22 nt, Human
uccagaggggaaaauaagaaaa

SEQ ID NO: 993844 - RNA, 22 nt, Human
aaaccauucccugaacccucug

SEQ ID NO: 993845 - RNA, 21 nt, Human
aaacuacuacuucuagaugaa

SEQ ID NO: 993846 - RNA, 18 nt, Human
aagaagcaacucuguucc

SEQ ID NO: 993847 - RNA, 23 nt, Human
acuagaguacagagagcauuuua

SEQ ID NO: 993848 - RNA, 19 nt, Human
agaagggagcagggagagc

SEQ ID NO: 993849 - RNA, 20 nt, Human
aggaagaaacagguauggca

SEQ ID NO: 993850 - RNA, 23 nt, Human
aggcaggagacuagaguacagag

SEQ ID NO: 993851 - RNA, 18 nt, Human
agggaaggcaggcaaaga

SEQ ID NO: 993852 - RNA, 18 nt, Human
agguauggcaccguggcc

SEQ ID NO: 993853 - RNA, 26 nt, Human
aguggcacugggucgcucagcuuuaa

SEQ ID NO: 993854 - RNA, 24 nt, Human
aguucuaucacaaaggucuagaac

SEQ ID NO: 993855 - RNA, 19 nt, Human
caagcaauuccugagguga

SEQ ID NO: 993856 - RNA, 21 nt, Human
ccaauccugacucagacuacc

SEQ ID NO: 993857 - RNA, 26 nt, Human
ccuacuauccgaaaccauucccugaa

SEQ ID NO: 993858 - RNA, 24 nt, Human
ccucugaauucugaagcaugugga

SEQ ID NO: 993859 - RNA, 19 nt, Human
ccuggcccuaggagguaau

SEQ ID NO: 993860 - RNA, 21 nt, Human
cgaaaccauucccugaacccu

SEQ ID NO: 993861 - RNA, 23 nt, Human
cgaaaccauucccugaacccucu

SEQ ID NO: 993862 - RNA, 21 nt, Human
cuaccuaccuggcuuccuggc

SEQ ID NO: 993863 - RNA, 25 nt, Human
cuagaugaacacaggcucuugagga

SEQ ID NO: 993864 - RNA, 20 nt, Human
gaagcauguggauuucucag

SEQ ID NO: 993865 - RNA, 19 nt, Human
gaagggaaggcaggcaaag

SEQ ID NO: 993866 - RNA, 21 nt, Human
gagccugaguggagaagcuga

SEQ ID NO: 993867 - RNA, 18 nt, Human
gaggauaggaugaaggga

SEQ ID NO: 993868 - RNA, 23 nt, Human
gcagggagagccuacuauccgaa

SEQ ID NO: 993869 - RNA, 22 nt, Human
gcgaucugacucggcucccuuc

SEQ ID NO: 993870 - RNA, 18 nt, Human
gcucgggcuggaggagcc

SEQ ID NO: 993871 - RNA, 27 nt, Human
ggaggcuguugauccaauccugacuca

SEQ ID NO: 993872 - RNA, 21 nt, Human
guccauguaucaauccaagca

SEQ ID NO: 993873 - RNA, 21 nt, Human
gugagagcaagcaaagaggau

SEQ ID NO: 993874 - RNA, 20 nt, Human
uacuacuucuagaugaacac

SEQ ID NO: 993875 - RNA, 24 nt, Human
uacuugcagaacugaggaggcagg

SEQ ID NO: 993876 - RNA, 24 nt, Human
uaugagggaaaccagaaucaaacu

SEQ ID NO: 993877 - RNA, 22 nt, Human
uaugguaaugacggagcugcac

SEQ ID NO: 993878 - RNA, 21 nt, Human
ucacccggaugggugaggcuu

SEQ ID NO: 993879 - RNA, 18 nt, Human
ucaccuuuccuucccccu

SEQ ID NO: 993880 - RNA, 19 nt, Human
ucuucuggcucgggcugga

SEQ ID NO: 993881 - RNA, 20 nt, Human
ugaggaggcaggagacuaga

SEQ ID NO: 993882 - RNA, 18 nt, Human
uggacuuccacuucauuc

SEQ ID NO: 993883 - RNA, 23 nt, Human
uggcaacucccugucgcuccggu

SEQ ID NO: 993884 - RNA, 20 nt, Human
uguucuacccauccccuuuc

SEQ ID NO: 993885 - RNA, 23 nt, Human
uucccugaacccucugaauucug

SEQ ID NO: 993886 - RNA, 24 nt, Human
uucccugaacccucugaauucuga

SEQ ID NO: 993887 - RNA, 23 nt, Human
uuccugaggugagagcaagcaaa

SEQ ID NO: 993888 - RNA, 23 nt, Human
uucucagucuuguucuacccauc

SEQ ID NO: 993889 - RNA, 22 nt, Human
uuucugcuccuucccacucacc

SEQ ID NO: 993890 - RNA, 19 nt, Human
aacccacaggcaaagagga

SEQ ID NO: 993891 - RNA, 22 nt, Human
aacccacaggcaaagaggaaaa

SEQ ID NO: 993892 - RNA, 23 nt, Human
aaugacaauccugagagcugccc

SEQ ID NO: 993893 - RNA, 26 nt, Human
agacuggcuacuacucagcuccaggc

SEQ ID NO: 993894 - RNA, 18 nt, Human
agcccaccuggcuucauc

SEQ ID NO: 993895 - RNA, 18 nt, Human
aggaaggccaggccaggc

SEQ ID NO: 993896 - RNA, 19 nt, Human
aggcaaaagcgggaaaggc

SEQ ID NO: 993897 - RNA, 22 nt, Human
aggcaaaagcgggaaaggccug

SEQ ID NO: 993898 - RNA, 21 nt, Human
aggccagcaccccucgggaga

SEQ ID NO: 993899 - RNA, 22 nt, Human
aggccaggccaggccucuggga

SEQ ID NO: 993900 - RNA, 18 nt, Human
agggaugggagaagggaa

SEQ ID NO: 993901 - RNA, 21 nt, Human
agggaugggagaagggaagga

SEQ ID NO: 993902 - RNA, 19 nt, Human
aggggcagaggcacugcgg

SEQ ID NO: 993903 - RNA, 19 nt, Human
auuccagcauuuuuauuga

SEQ ID NO: 993904 - RNA, 20 nt, Human
caagagauagugguucccac

SEQ ID NO: 993905 - RNA, 24 nt, Human
cacgagggcuggggggcaggggcg

SEQ ID NO: 993906 - RNA, 18 nt, Human
cacuggccggagcgcccc

SEQ ID NO: 993907 - RNA, 22 nt, Human
cagaagccagauggggacagag

SEQ ID NO: 993908 - RNA, 23 nt, Human
cagaggcacugcgguguggacac

SEQ ID NO: 993909 - RNA, 21 nt, Human
cagcagaagccagauggggac

SEQ ID NO: 993910 - RNA, 20 nt, Human
cagcagggucggaccugagc

SEQ ID NO: 993911 - RNA, 22 nt, Human
cagcauuucccagcuuuugggg

SEQ ID NO: 993912 - RNA, 21 nt, Human
caggcccuuauuuccaauccu

SEQ ID NO: 993913 - RNA, 21 nt, Human
cagggaugggagaagggaagg

SEQ ID NO: 993914 - RNA, 21 nt, Human
cauuucccagcuuuugggggc

SEQ ID NO: 993915 - RNA, 25 nt, Human
ccccgcucggcccgcccccucauga

SEQ ID NO: 993916 - RNA, 22 nt, Human
ccgccccgcucggcccgccccc

SEQ ID NO: 993917 - RNA, 24 nt, Human
ccugagagcugcccugauagguga

SEQ ID NO: 993918 - RNA, 21 nt, Human
ccuguggucacagcagacugg

SEQ ID NO: 993919 - RNA, 21 nt, Human
cuccaaagaguacgauaaaaa

SEQ ID NO: 993920 - RNA, 18 nt, Human
cucugggaccagcuauag

SEQ ID NO: 993921 - RNA, 19 nt, Human
gacaauccugagagcugcc

SEQ ID NO: 993922 - RNA, 19 nt, Human
gacaauccugagagcugcc

SEQ ID NO: 993923 - RNA, 20 nt, Human
gcaaagaggaaaaugacaau

SEQ ID NO: 993924 - RNA, 20 nt, Human
gccagauggggacagagugu

SEQ ID NO: 993925 - RNA, 22 nt, Human
gguuuccacgguaaccaaagua

SEQ ID NO: 993926 - RNA, 26 nt, Human
uaagaaggcaaacccuggggaggcca

SEQ ID NO: 993927 - RNA, 22 nt, Human
uacagagaggcggcaggcagga

SEQ ID NO: 993928 - RNA, 24 nt, Human
uaguaaaagcuaaauucaaaagua

SEQ ID NO: 993929 - RNA, 23 nt, Human
ucacagcagacuggcuacuacuc

SEQ ID NO: 993930 - RNA, 22 nt, Human
uccacgguaaccaaaguaaggc

SEQ ID NO: 993931 - RNA, 19 nt, Human
ucccagaggccccaggcca

SEQ ID NO: 993932 - RNA, 19 nt, Human
ucccccgaggggcagaggc

SEQ ID NO: 993933 - RNA, 22 nt, Human
ucuccaaagaguacgauaaaaa

SEQ ID NO: 993934 - RNA, 24 nt, Human
ugagcuggggcccagcggucagca

SEQ ID NO: 993935 - RNA, 21 nt, Human
ugauaggugagccucgaaccu

SEQ ID NO: 993936 - RNA, 18 nt, Human
uggcuacuacucagcucc

SEQ ID NO: 993937 - RNA, 23 nt, Human
ugggagaagggaaggaaggccag

SEQ ID NO: 993938 - RNA, 18 nt, Human
uguggaaguggcguuacu

SEQ ID NO: 993939 - RNA, 18 nt, Human
uuacuguacagagaggcg

SEQ ID NO: 993940 - RNA, 27 nt, Human
uuuuuuuuuuuuuuuuuuuuuuugggg

SEQ ID NO: 993941 - RNA, 19 nt, Human
aaaaauugccaaacucucu

SEQ ID NO: 993942 - RNA, 18 nt, Human
aaaauucuccuuucuuuc

SEQ ID NO: 993943 - RNA, 23 nt, Human
aaacggaaugaaagaaaaaucug

SEQ ID NO: 993944 - RNA, 19 nt, Human
aagaaagaaauucaugguc

SEQ ID NO: 993945 - RNA, 21 nt, Human
aagaagauuuauaauagaaaa

SEQ ID NO: 993946 - RNA, 20 nt, Human
acaaauuuuaaggaagaggc

SEQ ID NO: 993947 - RNA, 19 nt, Human
acaacaauggaagaaagcc

SEQ ID NO: 993948 - RNA, 21 nt, Human
acaacaauggaagaaagccaa

SEQ ID NO: 993949 - RNA, 22 nt, Human
agaaaaagaaacaugguuuuug

SEQ ID NO: 993950 - RNA, 19 nt, Human
agccagccuaacgacggcg

SEQ ID NO: 993951 - RNA, 20 nt, Human
aggagaugucuuuuauuuca

SEQ ID NO: 993952 - RNA, 23 nt, Human
augaaggaaaaaaaaguggaaca

SEQ ID NO: 993953 - RNA, 25 nt, Human
caaaaaguuauacaagaaaaagaaa

SEQ ID NO: 993954 - RNA, 21 nt, Human
caaaucuuauauggauauucu

SEQ ID NO: 993955 - RNA, 18 nt, Human
cacuggcauuaagaaaac

SEQ ID NO: 993956 - RNA, 26 nt, Human
cagacacuuccacucagggccgucuc

SEQ ID NO: 993957 - RNA, 22 nt, Human
cagcuaaaaaucaauuuauguu

SEQ ID NO: 993958 - RNA, 26 nt, Human
caugaaggaaaaaaaaguggaacauu

SEQ ID NO: 993959 - RNA, 21 nt, Human
cauuaagaaaacccaagucuc

SEQ ID NO: 993960 - RNA, 19 nt, Human
ccaaacaaacagucuccau

SEQ ID NO: 993961 - RNA, 18 nt, Human
ccacuggagcuccuccuc

SEQ ID NO: 993962 - RNA, 19 nt, Human
cccgcugccgcugccgccg

SEQ ID NO: 993963 - RNA, 18 nt, Human
cccgcugccgcugccggg

SEQ ID NO: 993964 - RNA, 24 nt, Human
ccgccgccgccgccacuggagcuc

SEQ ID NO: 993965 - RNA, 20 nt, Human
ccgccgccgccgccacuggg

SEQ ID NO: 993966 - RNA, 18 nt, Human
ccgccgccgccgccgcca

SEQ ID NO: 993967 - RNA, 18 nt, Human
ccgcugccgccgccgccg

SEQ ID NO: 993968 - RNA, 18 nt, Human
ccgcugccgcugccgccg

SEQ ID NO: 993969 - RNA, 20 nt, Human
ccgcugccgcugccgccgcc

SEQ ID NO: 993970 - RNA, 24 nt, Human
ccgcugccgcugccgccgccgccg

SEQ ID NO: 993971 - RNA, 23 nt, Human
cgaggcuacagagccagccuaac

SEQ ID NO: 993972 - RNA, 18 nt, Human
cgccugcuggcgcugcug

SEQ ID NO: 993973 - RNA, 23 nt, Human
cucaaaaauucuccuuucuuucu

SEQ ID NO: 993974 - RNA, 26 nt, Human
cucaaaaauucuccuuucuuucucuc

SEQ ID NO: 993975 - RNA, 20 nt, Human
cugcccgcugccgcugccgc

SEQ ID NO: 993976 - RNA, 19 nt, Human
cugccgcugccgccgccgc

SEQ ID NO: 993977 - RNA, 19 nt, Human
cugguuuuaagaauuucua

SEQ ID NO: 993978 - RNA, 26 nt, Human
cuuaaucaggaaaaguagugaacacu

SEQ ID NO: 993979 - RNA, 23 nt, Human
gcccgcugccgcugccgccgccg

SEQ ID NO: 993980 - RNA, 20 nt, Human
gccgccgccgccgccgccac

SEQ ID NO: 993981 - RNA, 22 nt, Human
gccgcugccgccgccgccgccg

SEQ ID NO: 993982 - RNA, 23 nt, Human
gcgcugcuggagcugcugcccgc

SEQ ID NO: 993983 - RNA, 23 nt, Human
gcugaaaacaaaaaguuauacaa

SEQ ID NO: 993984 - RNA, 18 nt, Human
ggaaauacacauuucuga

SEQ ID NO: 993985 - RNA, 18 nt, Human
ggagcuccuccucucgcu

SEQ ID NO: 993986 - RNA, 24 nt, Human
gggcggcggggcguacagaagggc

SEQ ID NO: 993987 - RNA, 23 nt, Human
gguuuuuguuuugcaagauuuuu

SEQ ID NO: 993988 - RNA, 23 nt, Human
guggaaucacacacacacaaaug

SEQ ID NO: 993989 - RNA, 24 nt, Human
uaagaaaacccaagucucaaaaau

SEQ ID NO: 993990 - RNA, 20 nt, Human
uagaaaaaaguggcaaauug

SEQ ID NO: 993991 - RNA, 20 nt, Human
uauacaagaaaaagaaacau

SEQ ID NO: 993992 - RNA, 21 nt, Human
uauacaagaaaaagaaacaug

SEQ ID NO: 993993 - RNA, 24 nt, Human
uaucugaaaauugcacuaauacuu

SEQ ID NO: 993994 - RNA, 24 nt, Human
uauuguuaauuuucauacuuaaaa

SEQ ID NO: 993995 - RNA, 24 nt, Human
uccaaacggaaugaaagaaaaauc

SEQ ID NO: 993996 - RNA, 20 nt, Human
uccccauggugaacaaacau

SEQ ID NO: 993997 - RNA, 26 nt, Human
ucgcggcggcucccgcuuccaggguc

SEQ ID NO: 993998 - RNA, 19 nt, Human
ugagaacgagcucaugggc

SEQ ID NO: 993999 - RNA, 22 nt, Human
ugcuacaaaaacaacaauggaa

SEQ ID NO: 994000 - RNA, 20 nt, Human
ugcuguaaccacuaaaacaa

SEQ ID NO: 994001 - RNA, 19 nt, Human
uggaaucacacacacacaa

SEQ ID NO: 994002 - RNA, 22 nt, Human
uggaaucacacacacacaaaug

SEQ ID NO: 994003 - RNA, 21 nt, Human
ugucccgggguaagccgaggc

SEQ ID NO: 994004 - RNA, 19 nt, Human
ugugaaaugagcucacuga

SEQ ID NO: 994005 - RNA, 18 nt, Human
uguugcugaaaacaaaaa

SEQ ID NO: 994006 - RNA, 22 nt, Human
uuaauccuaaacauuacagggu

SEQ ID NO: 994007 - RNA, 23 nt, Human
uuaauccuaaacauuacagggua

SEQ ID NO: 994008 - RNA, 21 nt, Human
uuacaaccucuggauuaugga

SEQ ID NO: 994009 - RNA, 21 nt, Human
uucauggucacaaaauuuuaa

SEQ ID NO: 994010 - RNA, 19 nt, Human
uuccccagcacagaucccu

SEQ ID NO: 994011 - RNA, 21 nt, Human
uuucaaauguugcuguaacca

SEQ ID NO: 994012 - RNA, 24 nt, Human
uuuguaaacuuacucaugcaaaau

SEQ ID NO: 994013 - RNA, 22 nt, Human
uuuuaggagaugucuuuuauuu

SEQ ID NO: 994014 - RNA, 24 nt, Human
uuuuauuucagaauuaguucuuac

SEQ ID NO: 994015 - RNA, 25 nt, Human
uuuuuuuuuuuuuuuuuuuuuuagg

SEQ ID NO: 994016 - RNA, 18 nt, Human
aaaauacuugggccugcc

SEQ ID NO: 994017 - RNA, 19 nt, Human
aacccauuccuccucccug

SEQ ID NO: 994018 - RNA, 23 nt, Human
agaaacccguaucaucuuccaaa

SEQ ID NO: 994019 - RNA, 24 nt, Human
agaaggaaacaaaccaacugguua

SEQ ID NO: 994020 - RNA, 20 nt, Human
agcacagccuauuucuaaau

SEQ ID NO: 994021 - RNA, 24 nt, Human
agugaagaaaccagaguggugucu

SEQ ID NO: 994022 - RNA, 18 nt, Human
caugagguccaagccugu

SEQ ID NO: 994023 - RNA, 24 nt, Human
cauuccuccucccuggaaaaaaga

SEQ ID NO: 994024 - RNA, 19 nt, Human
cccauuccuccucccugga

SEQ ID NO: 994025 - RNA, 22 nt, Human
cccugaccaggagcgacagggc

SEQ ID NO: 994026 - RNA, 23 nt, Human
ccucaauacugaacacuagacac

SEQ ID NO: 994027 - RNA, 26 nt, Human
ccuccucccuggaaaaaagaaacccg

SEQ ID NO: 994028 - RNA, 18 nt, Human
ccugaguuaaggaagggg

SEQ ID NO: 994029 - RNA, 23 nt, Human
cgacagggcccccagugagaugg

SEQ ID NO: 994030 - RNA, 26 nt, Human
cuacccaacccauuccuccucccugg

SEQ ID NO: 994031 - RNA, 20 nt, Human
cucagaaggaaacaaaccaa

SEQ ID NO: 994032 - RNA, 19 nt, Human
cuggaaaacuuccucaccc

SEQ ID NO: 994033 - RNA, 22 nt, Human
cugguuaugccugggugguggc

SEQ ID NO: 994034 - RNA, 19 nt, Human
gcauggaagaugcccauug

SEQ ID NO: 994035 - RNA, 18 nt, Human
uaagcccugaccaggagc

SEQ ID NO: 994036 - RNA, 20 nt, Human
ucccuggagaaggcacugua

SEQ ID NO: 994037 - RNA, 19 nt, Human
ucugaaggaaccagacaga

SEQ ID NO: 994038 - RNA, 18 nt, Human
ucuuuucuuuugagaugc

SEQ ID NO: 994039 - RNA, 22 nt, Human
ucuuuucuuuugagaugcccgg

SEQ ID NO: 994040 - RNA, 20 nt, Human
ugaaugcagugaagaaaccg

SEQ ID NO: 994041 - RNA, 18 nt, Human
uggaaaacuuccucaccc

SEQ ID NO: 994042 - RNA, 19 nt, Human
ugggcugggggccuuugag

SEQ ID NO: 994043 - RNA, 20 nt, Human
ugggcugggggccuuugagu

SEQ ID NO: 994044 - RNA, 23 nt, Human
uuaaaaugugaauaacucaagua

SEQ ID NO: 994045 - RNA, 22 nt, Human
uuaaccugggauaucacagaaa

SEQ ID NO: 994046 - RNA, 20 nt, Human
uuacagcugacagcacagcc

SEQ ID NO: 994047 - RNA, 27 nt, Human
uucuuuguccucaauacugaacacuag

SEQ ID NO: 994048 - RNA, 22 nt, Human
uuugagaugcccggccugagca

SEQ ID NO: 994049 - RNA, 22 nt, Human
uuuuacagcugacagcacagcc

SEQ ID NO: 994050 - RNA, 24 nt, Human
aaagugcugggauuacagguguga

SEQ ID NO: 994051 - RNA, 20 nt, Human
aacaggcuucuuccaagcuc

SEQ ID NO: 994052 - RNA, 18 nt, Human
aagagcugggaggagugg

SEQ ID NO: 994053 - RNA, 18 nt, Human
aagugcugggauuacagg

SEQ ID NO: 994054 - RNA, 19 nt, Human
aagugcugggauuacaggu

SEQ ID NO: 994055 - RNA, 26 nt, Human
aagugcugggauuacaggugugagcc

SEQ ID NO: 994056 - RNA, 22 nt, Human
acagaagagcugggaggagugg

SEQ ID NO: 994057 - RNA, 21 nt, Human
acaggcugauauucagggaca

SEQ ID NO: 994058 - RNA, 18 nt, Human
accaugcccggcucauuu

SEQ ID NO: 994059 - RNA, 24 nt, Human
accauguuggccuggcuggucucg

SEQ ID NO: 994060 - RNA, 23 nt, Human
accggacgucccaggaacagcgg

SEQ ID NO: 994061 - RNA, 21 nt, Human
acgggguuucaccauguuggc

SEQ ID NO: 994062 - RNA, 22 nt, Human
acgggguuucaccauguuggcc

SEQ ID NO: 994063 - RNA, 24 nt, Human
acgggguuucaccauguuggccug

SEQ ID NO: 994064 - RNA, 25 nt, Human
acgggguuucaccauguuggccugg

SEQ ID NO: 994065 - RNA, 24 nt, Human
acucuugucccccaggcuggagug

SEQ ID NO: 994066 - RNA, 21 nt, Human
agaccagaaaucccaagucca

SEQ ID NO: 994067 - RNA, 24 nt, Human
agagauucucuugccucagccucc

SEQ ID NO: 994068 - RNA, 19 nt, Human
agccaccgcacccggccua

SEQ ID NO: 994069 - RNA, 23 nt, Human
agccaccgcacccggccuauauu

SEQ ID NO: 994070 - RNA, 22 nt, Human
agcucagagaggcugagagaug

SEQ ID NO: 994071 - RNA, 18 nt, Human
aggcccacuuagaccaga

SEQ ID NO: 994072 - RNA, 22 nt, Human
aggcuuaccacacaggccccag

SEQ ID NO: 994073 - RNA, 24 nt, Human
agguguuccgcccgccucagccuc

SEQ ID NO: 994074 - RNA, 23 nt, Human
agugcaauggcgcgaucuuggcu

SEQ ID NO: 994075 - RNA, 24 nt, Human
agugcaauggcgcgaucuuggcuc

SEQ ID NO: 994076 - RNA, 24 nt, Human
caaagugcugggauuacaggugug

SEQ ID NO: 994077 - RNA, 22 nt, Human
caagagauucucuugccucagc

SEQ ID NO: 994078 - RNA, 24 nt, Human
caagcucagagaggcugagagaug

SEQ ID NO: 994079 - RNA, 18 nt, Human
caccauguuggccuggcu

SEQ ID NO: 994080 - RNA, 24 nt, Human
caccauguuggccuggcuggucuc

SEQ ID NO: 994081 - RNA, 26 nt, Human
caccugaccucagguguuccgcccgc

SEQ ID NO: 994082 - RNA, 21 nt, Human
cagccuccuaacugggauaac

SEQ ID NO: 994083 - RNA, 18 nt, Human
cagguucaagagauucuc

SEQ ID NO: 994084 - RNA, 21 nt, Human
ccaaagugcugggauuacagg

SEQ ID NO: 994085 - RNA, 21 nt, Human
ccaaagugcugggauuacagg

SEQ ID NO: 994086 - RNA, 24 nt, Human
ccaaagugcugggauuacaggugu

SEQ ID NO: 994087 - RNA, 19 nt, Human
ccccaggcuggagugcaau

SEQ ID NO: 994088 - RNA, 21 nt, Human
ccccauccccaggaggcccac

SEQ ID NO: 994089 - RNA, 18 nt, Human
cccgcugaguccucuccu

SEQ ID NO: 994090 - RNA, 22 nt, Human
cccggguugaggacuccagagc

SEQ ID NO: 994091 - RNA, 26 nt, Human
ccgcccgccucagccucccaaagugc

SEQ ID NO: 994092 - RNA, 24 nt, Human
ccgccucagccucccaaagugcug

SEQ ID NO: 994093 - RNA, 20 nt, Human
ccugaccucagguguuccgg

SEQ ID NO: 994094 - RNA, 24 nt, Human
ccugauauuuaacaaggaaaaaaa

SEQ ID NO: 994095 - RNA, 20 nt, Human
ccugcuaccaugcccggcuc

SEQ ID NO: 994096 - RNA, 24 nt, Human
cgggguuucaccauguuggccugg

SEQ ID NO: 994097 - RNA, 21 nt, Human
cucagaacaggcuucuuccaa

SEQ ID NO: 994098 - RNA, 23 nt, Human
cucaguguaccaccccaucccca

SEQ ID NO: 994099 - RNA, 22 nt, Human
cucuugucccccaggcuggagu

SEQ ID NO: 994100 - RNA, 19 nt, Human
cugcaggggagaacuuucc

SEQ ID NO: 994101 - RNA, 24 nt, Human
cuugucccccaggcuggagugcaa

SEQ ID NO: 994102 - RNA, 24 nt, Human
gaccucagguguuccgcccgccuc

SEQ ID NO: 994103 - RNA, 18 nt, Human
gagacggggcccgcugag

SEQ ID NO: 994104 - RNA, 24 nt, Human
gagacgggguuucaccauguuggc

SEQ ID NO: 994105 - RNA, 18 nt, Human
gagccuuagcuucccaag

SEQ ID NO: 994106 - RNA, 20 nt, Human
gagccuuagcuucccaagug

SEQ ID NO: 994107 - RNA, 18 nt, Human
gauuacaggugugagcca

SEQ ID NO: 994108 - RNA, 22 nt, Human
gauuacaggugugagccaccgc

SEQ ID NO: 994109 - RNA, 23 nt, Human
gauuacaggugugagccaccgca

SEQ ID NO: 994110 - RNA, 22 nt, Human
gcaaccuccgccucucagguuc

SEQ ID NO: 994111 - RNA, 20 nt, Human
gccccaguaccuuucuacuc

SEQ ID NO: 994112 - RNA, 25 nt, Human
gcccggcucauuuuuuuuuguauuu

SEQ ID NO: 994113 - RNA, 23 nt, Human
gccucagccucccaaagugcugg

SEQ ID NO: 994114 - RNA, 19 nt, Human
gccuuagcuucccaagugg

SEQ ID NO: 994115 - RNA, 19 nt, Human
gcuggagugcaauggcgcg

SEQ ID NO: 994116 - RNA, 21 nt, Human
ggacaucgguguaaacaaaga

SEQ ID NO: 994117 - RNA, 22 nt, Human
ggcucagaagcucaguguacca

SEQ ID NO: 994118 - RNA, 23 nt, Human
gggguuucaccauguuggccugg

SEQ ID NO: 994119 - RNA, 23 nt, Human
guagagacgggguuucaccaugu

SEQ ID NO: 994120 - RNA, 24 nt, Human
guguuccgcccgccucagccuccc

SEQ ID NO: 994121 - RNA, 18 nt, Human
uaacagacaccugcuacc

SEQ ID NO: 994122 - RNA, 20 nt, Human
uaacagacaccugcuaccau

SEQ ID NO: 994123 - RNA, 23 nt, Human
uacaggugugagccaccgcaccc

SEQ ID NO: 994124 - RNA, 24 nt, Human
uaccaugcccggcucauuuuuuuu

SEQ ID NO: 994125 - RNA, 22 nt, Human
uagagacgggguuucaccaugu

SEQ ID NO: 994126 - RNA, 23 nt, Human
uagggugaggcucagaacaggcu

SEQ ID NO: 994127 - RNA, 24 nt, Human
uaguagagacgggguuucaccaug

SEQ ID NO: 994128 - RNA, 26 nt, Human
uaguagagacgggguuucaccauguu

SEQ ID NO: 994129 - RNA, 19 nt, Human
ucacugcaaccuccgccuc

SEQ ID NO: 994130 - RNA, 24 nt, Human
ucacugcaaccuccgccucucagg

SEQ ID NO: 994131 - RNA, 24 nt, Human
ucacugcaaccuccgccucucagg

SEQ ID NO: 994132 - RNA, 27 nt, Human
ucacugcaaccuccgccucucagguuc

SEQ ID NO: 994133 - RNA, 19 nt, Human
ucagagaggcugagagaug

SEQ ID NO: 994134 - RNA, 23 nt, Human
ucccaaagugcugggauuacagg

SEQ ID NO: 994135 - RNA, 18 nt, Human
ucccccaggcuggagugc

SEQ ID NO: 994136 - RNA, 21 nt, Human
uccgcccgccucagccuccca

SEQ ID NO: 994137 - RNA, 21 nt, Human
ucuacaaugaggcucagaagc

SEQ ID NO: 994138 - RNA, 25 nt, Human
ucuacucuacaaugaggcucagaag

SEQ ID NO: 994139 - RNA, 24 nt, Human
ucucacucuugucccccaggcugg

SEQ ID NO: 994140 - RNA, 25 nt, Human
ucucacucuugucccccaggcugga

SEQ ID NO: 994141 - RNA, 21 nt, Human
ucucagguucaagagauucuc

SEQ ID NO: 994142 - RNA, 24 nt, Human
ucucagguucaagagauucucuug

SEQ ID NO: 994143 - RNA, 18 nt, Human
ucuugucccccaggcugg

SEQ ID NO: 994144 - RNA, 18 nt, Human
ucuuuuuuuuuuuuuuug

SEQ ID NO: 994145 - RNA, 18 nt, Human
ugaccucagguguuccgc

SEQ ID NO: 994146 - RNA, 24 nt, Human
ugaccucagguguuccgcccgccu

SEQ ID NO: 994147 - RNA, 21 nt, Human
ugagagccuuagcuucccaag

SEQ ID NO: 994148 - RNA, 24 nt, Human
ugaggacuccagagcacagcugca

SEQ ID NO: 994149 - RNA, 21 nt, Human
ugcaggggagaacuuuccuga

SEQ ID NO: 994150 - RNA, 24 nt, Human
ugcugggauuacaggugugagcca

SEQ ID NO: 994151 - RNA, 23 nt, Human
uggagugcaauggcgcgaucuug

SEQ ID NO: 994152 - RNA, 24 nt, Human
uggagugcaauggcgcgaucuugg

SEQ ID NO: 994153 - RNA, 24 nt, Human
uggccuggcuggucucgaacaccu

SEQ ID NO: 994154 - RNA, 22 nt, Human
ugggauaacagacaccugcuac

SEQ ID NO: 994155 - RNA, 24 nt, Human
ugggauaacagacaccugcuacca

SEQ ID NO: 994156 - RNA, 18 nt, Human
ugggauuacaggugugag

SEQ ID NO: 994157 - RNA, 19 nt, Human
ugggauuacaggugugagc

SEQ ID NO: 994158 - RNA, 21 nt, Human
ugggauuacaggugugagcca

SEQ ID NO: 994159 - RNA, 22 nt, Human
ugggauuacaggugugagccac

SEQ ID NO: 994160 - RNA, 23 nt, Human
ugggauuacaggugugagccacc

SEQ ID NO: 994161 - RNA, 24 nt, Human
ugggauuacaggugugagccaccg

SEQ ID NO: 994162 - RNA, 21 nt, Human
ugggucaacugggugaugccc

SEQ ID NO: 994163 - RNA, 18 nt, Human
ugggugaugcccguuuug

SEQ ID NO: 994164 - RNA, 24 nt, Human
uguuccgcccgccucagccuccca

SEQ ID NO: 994165 - RNA, 19 nt, Human
uuagaccagaaaucccaag

SEQ ID NO: 994166 - RNA, 18 nt, Human
uuaguagagacgggguuu

SEQ ID NO: 994167 - RNA, 22 nt, Human
uuaguagagacgggguuucacc

SEQ ID NO: 994168 - RNA, 24 nt, Human
uuaguagagacgggguuucaccau

SEQ ID NO: 994169 - RNA, 21 nt, Human
uuauagagacggggcccgcug

SEQ ID NO: 994170 - RNA, 23 nt, Human
uucaagagauucucuugccucag

SEQ ID NO: 994171 - RNA, 24 nt, Human
uucuuuuuuuuuuuuuuugagacu

SEQ ID NO: 994172 - RNA, 23 nt, Human
uuguauuuuuaguagagacgggg

SEQ ID NO: 994173 - RNA, 21 nt, Human
uuucaccauguuggccuggcu

SEQ ID NO: 994174 - RNA, 18 nt, Human
uuugcaguugugggugaa

SEQ ID NO: 994175 - RNA, 24 nt, Human
uuuuuaguagagacgggguuucac

SEQ ID NO: 994176 - RNA, 21 nt, Human
uuuuuguauuuuuaguagaga

SEQ ID NO: 994177 - RNA, 21 nt, Human
uuuuuuguauuuuuaguagag

SEQ ID NO: 994178 - RNA, 24 nt, Human
uuuuuuguauuuuuaguagagacg

SEQ ID NO: 994179 - RNA, 24 nt, Human
uuuuuuuuguauuuuuaguagaga

SEQ ID NO: 994180 - RNA, 27 nt, Human
uuuuuuuuuuuuugagacuaagucuca

SEQ ID NO: 994181 - RNA, 21 nt, Human
uuuuuuuuuuuuuuuuugcag

SEQ ID NO: 994182 - RNA, 23 nt, Human
uuuuuuuuuuuuuuuuugcaguu

SEQ ID NO: 994183 - RNA, 20 nt, Human
uuuuuuuuuuuuuuuuuugg

SEQ ID NO: 994184 - RNA, 21 nt, Human
aaaacaaauggguacaagaca

SEQ ID NO: 994185 - RNA, 30 nt, Human
aaacaccaccagugcuucuugcccaaagcc

SEQ ID NO: 994186 - RNA, 22 nt, Human
aaagaaacaguuucuaaaugca

SEQ ID NO: 994187 - RNA, 18 nt, Human
aaagaccacccuaccucu

SEQ ID NO: 994188 - RNA, 21 nt, Human
aaccgcaguggucaaagcuuc

SEQ ID NO: 994189 - RNA, 20 nt, Human
aacugaugagaaccccaucu

SEQ ID NO: 994190 - RNA, 21 nt, Human
aacugaugagaaccccaucuu

SEQ ID NO: 994191 - RNA, 23 nt, Human
aagaaaauccucuccacagacca

SEQ ID NO: 994192 - RNA, 18 nt, Human
aagaacugaugagaaccc

SEQ ID NO: 994193 - RNA, 21 nt, Human
aagcagaauuacgguaacaac

SEQ ID NO: 994194 - RNA, 18 nt, Human
aagcagguuuucccuauu

SEQ ID NO: 994195 - RNA, 24 nt, Human
aagcagguuuucccuauucaauuu

SEQ ID NO: 994196 - RNA, 23 nt, Human
aagcauccaacgcuaaucacauu

SEQ ID NO: 994197 - RNA, 22 nt, Human
aaggcagaagcucaucuuucau

SEQ ID NO: 994198 - RNA, 22 nt, Human
aaugaucaucugguuucaccuu

SEQ ID NO: 994199 - RNA, 23 nt, Human
acaagacaucagcaacaaaaaaa

SEQ ID NO: 994200 - RNA, 19 nt, Human
acccaacucucaacucugc

SEQ ID NO: 994201 - RNA, 22 nt, Human
acccuggggugggagccacggg

SEQ ID NO: 994202 - RNA, 19 nt, Human
acugaaggcaacaacacaa

SEQ ID NO: 994203 - RNA, 26 nt, Human
acugggcuagugugggugugucucug

SEQ ID NO: 994204 - RNA, 22 nt, Human
acuguacuuuuccaccugaaag

SEQ ID NO: 994205 - RNA, 22 nt, Human
agaaaauccucuccacagacca

SEQ ID NO: 994206 - RNA, 22 nt, Human
agaacucgaucuacaaccccau

SEQ ID NO: 994207 - RNA, 18 nt, Human
agaauuacgguaacaacu

SEQ ID NO: 994208 - RNA, 24 nt, Human
agaccaaacaucuuuacuccccaa

SEQ ID NO: 994209 - RNA, 25 nt, Human
agaguucuuguuuccaaguuugggg

SEQ ID NO: 994210 - RNA, 24 nt, Human
agcccacaaaugccuucuacugaa

SEQ ID NO: 994211 - RNA, 21 nt, Human
aggcuuuuucuucaggagaga

SEQ ID NO: 994212 - RNA, 21 nt, Human
agugcccauggcugggucacu

SEQ ID NO: 994213 - RNA, 21 nt, Human
auaggcugcaaaacuugccaa

SEQ ID NO: 994214 - RNA, 22 nt, Human
augcagucccacaagcaucucu

SEQ ID NO: 994215 - RNA, 23 nt, Human
augcagucccacaagcaucucua

SEQ ID NO: 994216 - RNA, 21 nt, Human
caaaggcaccauuuccuguaa

SEQ ID NO: 994217 - RNA, 23 nt, Human
caaaggcaccauuuccuguaauu

SEQ ID NO: 994218 - RNA, 24 nt, Human
caacaaaaaaacacuaaaagauga

SEQ ID NO: 994219 - RNA, 24 nt, Human
caacuaaagagaaugguaaagcau

SEQ ID NO: 994220 - RNA, 18 nt, Human
caaguaaccaagaaaauc

SEQ ID NO: 994221 - RNA, 24 nt, Human
caagucccuguuugagacaaauaa

SEQ ID NO: 994222 - RNA, 19 nt, Human
cacaaugaguuggguagca

SEQ ID NO: 994223 - RNA, 18 nt, Human
cacucgccauucuuggca

SEQ ID NO: 994224 - RNA, 23 nt, Human
cacugcuuggcuaaccaaaguuu

SEQ ID NO: 994225 - RNA, 19 nt, Human
cagaaagcagguuuucccu

SEQ ID NO: 994226 - RNA, 20 nt, Human
cagcacaccggccagacccu

SEQ ID NO: 994227 - RNA, 23 nt, Human
cagcacaccggccagacccuggg

SEQ ID NO: 994228 - RNA, 23 nt, Human
cagcccaggaggugucugugccc

SEQ ID NO: 994229 - RNA, 22 nt, Human
caggagagaaggauauaaaggc

SEQ ID NO: 994230 - RNA, 19 nt, Human
caggagagacuaaccucac

SEQ ID NO: 994231 - RNA, 18 nt, Human
caggaggugucugugccc

SEQ ID NO: 994232 - RNA, 20 nt, Human
caggccgaggguagcggcag

SEQ ID NO: 994233 - RNA, 22 nt, Human
caggguuuugcccccaaacccu

SEQ ID NO: 994234 - RNA, 22 nt, Human
ccaacacccaugugccaccaag

SEQ ID NO: 994235 - RNA, 23 nt, Human
ccacugccacugggcuagugugg

SEQ ID NO: 994236 - RNA, 19 nt, Human
ccaggugcccagcagccgg

SEQ ID NO: 994237 - RNA, 23 nt, Human
cccagagaacagacacaggucau

SEQ ID NO: 994238 - RNA, 18 nt, Human
ccccaacacccaugugcc

SEQ ID NO: 994239 - RNA, 18 nt, Human
ccccaacacccaugugcc

SEQ ID NO: 994240 - RNA, 21 nt, Human
ccccaacacccaugugccacc

SEQ ID NO: 994241 - RNA, 24 nt, Human
ccccagcugccuagugcacuggug

SEQ ID NO: 994242 - RNA, 23 nt, Human
cccucuucacuuuaugcaguccc

SEQ ID NO: 994243 - RNA, 25 nt, Human
ccucacccaacucucaacucugcag

SEQ ID NO: 994244 - RNA, 22 nt, Human
ccuccuacaaugucccuuuaag

SEQ ID NO: 994245 - RNA, 21 nt, Human
ccuggggugggagccacgggc

SEQ ID NO: 994246 - RNA, 24 nt, Human
cgaggguagcggcaggcucugggc

SEQ ID NO: 994247 - RNA, 24 nt, Human
cgccccagcugccuagugcacugg

SEQ ID NO: 994248 - RNA, 20 nt, Human
cgugaugacugccucccuca

SEQ ID NO: 994249 - RNA, 23 nt, Human
cuaaagaccacccuaccucugau

SEQ ID NO: 994250 - RNA, 24 nt, Human
cuacaaccccauguaaaaaacaaa

SEQ ID NO: 994251 - RNA, 25 nt, Human
cucacucucauccaacaaccccuag

SEQ ID NO: 994252 - RNA, 20 nt, Human
cucccaugaaaaagcagaau

SEQ ID NO: 994253 - RNA, 21 nt, Human
cucucacuccaaacaugucua

SEQ ID NO: 994254 - RNA, 23 nt, Human
cucuccacagaccaacucuucag

SEQ ID NO: 994255 - RNA, 22 nt, Human
cugaaggcaacaacacaauuua

SEQ ID NO: 994256 - RNA, 23 nt, Human
cugaaggcaacaacacaauuuaa

SEQ ID NO: 994257 - RNA, 23 nt, Human
cugcugggcuccuuacaugggcc

SEQ ID NO: 994258 - RNA, 18 nt, Human
cugugcccacgaagccug

SEQ ID NO: 994259 - RNA, 19 nt, Human
cuucaaagguacugcuucc

SEQ ID NO: 994260 - RNA, 20 nt, Human
cuuucauucagucuauuugc

SEQ ID NO: 994261 - RNA, 19 nt, Human
gaaauuccaagugucuguu

SEQ ID NO: 994262 - RNA, 24 nt, Human
gaacuuguccaccaacuguguuuu

SEQ ID NO: 994263 - RNA, 21 nt, Human
gaagcucucccaggugcccuu

SEQ ID NO: 994264 - RNA, 20 nt, Human
gaaggcaacaacacaauuua

SEQ ID NO: 994265 - RNA, 22 nt, Human
gacaucagcaacaaaaaaacac

SEQ ID NO: 994266 - RNA, 24 nt, Human
gaccaaacaucuuuacuccccaaa

SEQ ID NO: 994267 - RNA, 20 nt, Human
gagagcuugucccauaaggg

SEQ ID NO: 994268 - RNA, 21 nt, Human
gcaagucuuugugcuaaagac

SEQ ID NO: 994269 - RNA, 18 nt, Human
gcagagaucucuucaaag

SEQ ID NO: 994270 - RNA, 18 nt, Human
gcaugcaagucuuugugc

SEQ ID NO: 994271 - RNA, 22 nt, Human
gcccacaaaugccuucuacuga

SEQ ID NO: 994272 - RNA, 20 nt, Human
gcccaggaggugucugugcc

SEQ ID NO: 994273 - RNA, 22 nt, Human
gcugccaucccacaucccccac

SEQ ID NO: 994274 - RNA, 21 nt, Human
gcuugguggugggcaggccga

SEQ ID NO: 994275 - RNA, 25 nt, Human
ggaaauugaggauuuaccauuuaga

SEQ ID NO: 994276 - RNA, 20 nt, Human
ggaaggugaggggcaccugu

SEQ ID NO: 994277 - RNA, 19 nt, Human
ggagaaagggcucugaaaa

SEQ ID NO: 994278 - RNA, 23 nt, Human
ggagagaaggauauaaaggcaga

SEQ ID NO: 994279 - RNA, 22 nt, Human
ggcacaaagggguuccagacgu

SEQ ID NO: 994280 - RNA, 24 nt, Human
ggccaguguguuauuccuucccaa

SEQ ID NO: 994281 - RNA, 21 nt, Human
ggccgaggguagcggcaggcu

SEQ ID NO: 994282 - RNA, 19 nt, Human
gggacagggagggcagaag

SEQ ID NO: 994283 - RNA, 21 nt, Human
gggcacucuggguguucugcc

SEQ ID NO: 994284 - RNA, 20 nt, Human
ggucuucuagcacugucacu

SEQ ID NO: 994285 - RNA, 22 nt, Human
gguuuucccuauucaauuucau

SEQ ID NO: 994286 - RNA, 21 nt, Human
guaaaaaacaaauggguacaa

SEQ ID NO: 994287 - RNA, 19 nt, Human
guaaaggaaagguccuaca

SEQ ID NO: 994288 - RNA, 18 nt, Human
gucaaagcuucaggcugu

SEQ ID NO: 994289 - RNA, 20 nt, Human
gugagcuguccugugacagg

SEQ ID NO: 994290 - RNA, 21 nt, Human
gugcagucuccacccgcguuu

SEQ ID NO: 994291 - RNA, 20 nt, Human
guggauguauauguuaaaag

SEQ ID NO: 994292 - RNA, 18 nt, Human
guggcagcagagagucgg

SEQ ID NO: 994293 - RNA, 26 nt, Human
gugggugugucucuguggcgucagcg

SEQ ID NO: 994294 - RNA, 21 nt, Human
guugcauuucaguccuaagca

SEQ ID NO: 994295 - RNA, 21 nt, Human
uaaaacuuuaaaagcauccuc

SEQ ID NO: 994296 - RNA, 22 nt, Human
uaaaaggagaaauuccaagugu

SEQ ID NO: 994297 - RNA, 24 nt, Human
uaaccaagaaaauccucuccacag

SEQ ID NO: 994298 - RNA, 24 nt, Human
uaaccaagaaaauccucuccacag

SEQ ID NO: 994299 - RNA, 21 nt, Human
uaagaauacaaaaauaggcug

SEQ ID NO: 994300 - RNA, 21 nt, Human
uacaugggcauucuugccuuu

SEQ ID NO: 994301 - RNA, 21 nt, Human
uacucacaagucccuguuuga

SEQ ID NO: 994302 - RNA, 19 nt, Human
uauauaaacacuaaaagga

SEQ ID NO: 994303 - RNA, 21 nt, Human
uauauguguguguguauauaa

SEQ ID NO: 994304 - RNA, 24 nt, Human
ucaaaagcaagaccucuccuggaa

SEQ ID NO: 994305 - RNA, 20 nt, Human
ucaaacucccaugaaaaagc

SEQ ID NO: 994306 - RNA, 20 nt, Human
ucaaagcuucaggcuguggc

SEQ ID NO: 994307 - RNA, 21 nt, Human
ucaaggauaagguccagagca

SEQ ID NO: 994308 - RNA, 18 nt, Human
ucacaaggaccagugaug

SEQ ID NO: 994309 - RNA, 22 nt, Human
ucagaaugaucaucugguuuca

SEQ ID NO: 994310 - RNA, 23 nt, Human
ucaguuguuugcagaaagcaggu

SEQ ID NO: 994311 - RNA, 28 nt, Human
uccaacacaggcuacucccccaacaccc

SEQ ID NO: 994312 - RNA, 21 nt, Human
ucccaggugcccagcagccgg

SEQ ID NO: 994313 - RNA, 25 nt, Human
uccccagagaacagacacaggucau

SEQ ID NO: 994314 - RNA, 24 nt, Human
ucccucuucacuuuaugcaguccc

SEQ ID NO: 994315 - RNA, 19 nt, Human
ucccuggguaggggagaag

SEQ ID NO: 994316 - RNA, 20 nt, Human
ucucagagcaaccggucuug

SEQ ID NO: 994317 - RNA, 23 nt, Human
ucucuggggucuucuagcacugu

SEQ ID NO: 994318 - RNA, 19 nt, Human
ucucugugcacgacuggcu

SEQ ID NO: 994319 - RNA, 22 nt, Human
ucugaacuauuuuauccauugg

SEQ ID NO: 994320 - RNA, 22 nt, Human
ucugcacguauauaaacacuaa

SEQ ID NO: 994321 - RNA, 23 nt, Human
ucugcagcccacaaaugccuucu

SEQ ID NO: 994322 - RNA, 18 nt, Human
ucuugcccaaagcccuug

SEQ ID NO: 994323 - RNA, 21 nt, Human
ugaaaaagcagaauuacggua

SEQ ID NO: 994324 - RNA, 19 nt, Human
ugaugagaaccccaucuug

SEQ ID NO: 994325 - RNA, 18 nt, Human
ugcaaaaccacagugagc

SEQ ID NO: 994326 - RNA, 21 nt, Human
ugcaugcagggcucuggaggu

SEQ ID NO: 994327 - RNA, 21 nt, Human
ugccaaguacucacaaguccc

SEQ ID NO: 994328 - RNA, 23 nt, Human
ugcuugguggugggcaggccgag

SEQ ID NO: 994329 - RNA, 19 nt, Human
uggaaggcagaaggggcca

SEQ ID NO: 994330 - RNA, 18 nt, Human
uggaaggugaggggcacc

SEQ ID NO: 994331 - RNA, 21 nt, Human
uggaaggugaggggcaccugu

SEQ ID NO: 994332 - RNA, 23 nt, Human
uggaaggugaggggcaccuguga

SEQ ID NO: 994333 - RNA, 23 nt, Human
uggaggugaggcacugggugguu

SEQ ID NO: 994334 - RNA, 21 nt, Human
uggcaauuccucaaagguuuu

SEQ ID NO: 994335 - RNA, 22 nt, Human
uggcacucugggaagcaggugg

SEQ ID NO: 994336 - RNA, 24 nt, Human
uggcugggucacuguagguccugc

SEQ ID NO: 994337 - RNA, 27 nt, Human
ugggaagcaggugguuuuuucgguuga

SEQ ID NO: 994338 - RNA, 22 nt, Human
ugggagccacgggcacucuggg

SEQ ID NO: 994339 - RNA, 21 nt, Human
ugggcuccuuacaugggcauu

SEQ ID NO: 994340 - RNA, 21 nt, Human
uggguagcaggagagaaggau

SEQ ID NO: 994341 - RNA, 18 nt, Human
uguauauauauauauaua

SEQ ID NO: 994342 - RNA, 23 nt, Human
uguauauauauauauauaaauua

SEQ ID NO: 994343 - RNA, 18 nt, Human
ugucacucugcccagccc

SEQ ID NO: 994344 - RNA, 22 nt, Human
uguccaccaacuguguuuugcu

SEQ ID NO: 994345 - RNA, 23 nt, Human
ugucugcgaggauucuggaagcu

SEQ ID NO: 994346 - RNA, 21 nt, Human
ugugcaaaaccacagugagcu

SEQ ID NO: 994347 - RNA, 18 nt, Human
uguguauauauauauaua

SEQ ID NO: 994348 - RNA, 20 nt, Human
uguguauauauauauauaua

SEQ ID NO: 994349 - RNA, 21 nt, Human
uguguauauauauauauauaa

SEQ ID NO: 994350 - RNA, 22 nt, Human
uguguauauauauauauauaaa

SEQ ID NO: 994351 - RNA, 24 nt, Human
uguguguauauauauauauauaac

SEQ ID NO: 994352 - RNA, 18 nt, Human
uguguguguauauauaua

SEQ ID NO: 994353 - RNA, 23 nt, Human
uguguguguguauauauauauau

SEQ ID NO: 994354 - RNA, 20 nt, Human
uguuaaaagcuugauucugu

SEQ ID NO: 994355 - RNA, 25 nt, Human
uguuugcagaaagcagguuuucccu

SEQ ID NO: 994356 - RNA, 20 nt, Human
uucaaaagcaagaccucucc

SEQ ID NO: 994357 - RNA, 18 nt, Human
uucaccacaaugaguugg

SEQ ID NO: 994358 - RNA, 21 nt, Human
uucacccuuacuaaugggcca

SEQ ID NO: 994359 - RNA, 26 nt, Human
uucagucuauuugcugccuuugacua

SEQ ID NO: 994360 - RNA, 22 nt, Human
uuccaagaagucaacaaauccc

SEQ ID NO: 994361 - RNA, 23 nt, Human
uucccaaaccauaggaggcucug

SEQ ID NO: 994362 - RNA, 21 nt, Human
uucuugcccaaagcccuugcc

SEQ ID NO: 994363 - RNA, 20 nt, Human
uucuuuuuccuucaccacaa

SEQ ID NO: 994364 - RNA, 21 nt, Human
uuggcucuuccacguggcagg

SEQ ID NO: 994365 - RNA, 22 nt, Human
uuuuucaguuguuugcagaaag

SEQ ID NO: 994366 - RNA, 18 nt, Human
caggcccacagaggcugg

SEQ ID NO: 994367 - RNA, 21 nt, Human
cccacagaggcuggaccucua

SEQ ID NO: 994368 - RNA, 19 nt, Human
cuaggcuuccagggggucc

SEQ ID NO: 994369 - RNA, 20 nt, Human
gagucuuagcuguggaucuc

SEQ ID NO: 994370 - RNA, 20 nt, Human
uugagguguugucaaaauca

SEQ ID NO: 994371 - RNA, 18 nt, Human
aaacagagcccucaguuc

SEQ ID NO: 994372 - RNA, 24 nt, Human
aaacuacagcuauuaagcugguag

SEQ ID NO: 994373 - RNA, 21 nt, Human
aaguauaguuaugauauagac

SEQ ID NO: 994374 - RNA, 20 nt, Human
aauaguguuuuccucaagua

SEQ ID NO: 994375 - RNA, 21 nt, Human
acuggagaagaaccaucccgg

SEQ ID NO: 994376 - RNA, 18 nt, Human
agcaaguaacaggaucug

SEQ ID NO: 994377 - RNA, 21 nt, Human
agccacagacuccucuaaccc

SEQ ID NO: 994378 - RNA, 20 nt, Human
aggaagaaaauuuaagacac

SEQ ID NO: 994379 - RNA, 19 nt, Human
auaguguuuuccucaagua

SEQ ID NO: 994380 - RNA, 21 nt, Human
cacaaacagagcccucaguuc

SEQ ID NO: 994381 - RNA, 24 nt, Human
cacaaacagagcccucaguucuga

SEQ ID NO: 994382 - RNA, 24 nt, Human
cacacgagcuggagucccaccacg

SEQ ID NO: 994383 - RNA, 22 nt, Human
cacagugcagggaaaacuacag

SEQ ID NO: 994384 - RNA, 23 nt, Human
cacuuauagccaaacuaucaagu

SEQ ID NO: 994385 - RNA, 21 nt, Human
cagcuguccccuggguucucc

SEQ ID NO: 994386 - RNA, 19 nt, Human
ccaucccggcggccuggca

SEQ ID NO: 994387 - RNA, 18 nt, Human
ccaugcaggcaggccugg

SEQ ID NO: 994388 - RNA, 22 nt, Human
ccgcguaggcgcgcagcuccgg

SEQ ID NO: 994389 - RNA, 18 nt, Human
ccggaccccgcuucugcu

SEQ ID NO: 994390 - RNA, 23 nt, Human
ccuaaagcuucaaaggaagaaaa

SEQ ID NO: 994391 - RNA, 21 nt, Human
cuccugcuccuacuccuccug

SEQ ID NO: 994392 - RNA, 20 nt, Human
gacacacgagcuggaguccc

SEQ ID NO: 994393 - RNA, 23 nt, Human
gacuccucuaacccagucccaca

SEQ ID NO: 994394 - RNA, 18 nt, Human
gcaggccugggagagucc

SEQ ID NO: 994395 - RNA, 21 nt, Human
gcuuuuggaaauaguguuuuc

SEQ ID NO: 994396 - RNA, 20 nt, Human
ggagaagaaccaucccggcg

SEQ ID NO: 994397 - RNA, 18 nt, Human
ggagucccaccacgucuc

SEQ ID NO: 994398 - RNA, 18 nt, Human
ggcaggaguggcuagucu

SEQ ID NO: 994399 - RNA, 19 nt, Human
uaacccagucccacaaaca

SEQ ID NO: 994400 - RNA, 21 nt, Human
uaacccagucccacaaacaga

SEQ ID NO: 994401 - RNA, 20 nt, Human
uccacugaagcaaguaacag

SEQ ID NO: 994402 - RNA, 22 nt, Human
uccaugaggacacacgagcugg

SEQ ID NO: 994403 - RNA, 20 nt, Human
uccccuggguucuccaugag

SEQ ID NO: 994404 - RNA, 20 nt, Human
uccccuggguucuccaugag

SEQ ID NO: 994405 - RNA, 23 nt, Human
uccccuggguucuccaugaggac

SEQ ID NO: 994406 - RNA, 21 nt, Human
uccugcuccuacuccuccugg

SEQ ID NO: 994407 - RNA, 18 nt, Human
ucugaacaaaaagccaca

SEQ ID NO: 994408 - RNA, 22 nt, Human
ucugcuccugcuccuacuccuc

SEQ ID NO: 994409 - RNA, 19 nt, Human
ugaaacaguccuugaaggc

SEQ ID NO: 994410 - RNA, 18 nt, Human
ugaggacacacgagcugg

SEQ ID NO: 994411 - RNA, 26 nt, Human
ugcaccagcuguccccuggguucucc

SEQ ID NO: 994412 - RNA, 21 nt, Human
ugccuugaaaagaugacacag

SEQ ID NO: 994413 - RNA, 24 nt, Human
ugcuccugcuccuacuccuccugg

SEQ ID NO: 994414 - RNA, 21 nt, Human
uggguucuccaugaggacaca

SEQ ID NO: 994415 - RNA, 20 nt, Human
uggguuuaaacaaacaacaa

SEQ ID NO: 994416 - RNA, 21 nt, Human
uucaaaggaagaaaauuuaag

SEQ ID NO: 994417 - RNA, 22 nt, Human
uucaaaggaagaaaauuuaaga

SEQ ID NO: 994418 - RNA, 20 nt, Human
uuggaaauaguguuuuccuc

SEQ ID NO: 994419 - RNA, 24 nt, Human
aaaaaaaaacaaaauaacaaaacu

SEQ ID NO: 994420 - RNA, 25 nt, Human
aaaaaaaaacaaaauaacaaaacuu

SEQ ID NO: 994421 - RNA, 19 nt, Human
aaccugaccccauccacac

SEQ ID NO: 994422 - RNA, 19 nt, Human
aagaaggaggcaggcucag

SEQ ID NO: 994423 - RNA, 19 nt, Human
aagcaaacagguaggaaac

SEQ ID NO: 994424 - RNA, 23 nt, Human
aagcaagaaggaggcaggcucag

SEQ ID NO: 994425 - RNA, 20 nt, Human
aagcuuaagaguaacagucu

SEQ ID NO: 994426 - RNA, 23 nt, Human
acaccaucacccccaaaaaaaaa

SEQ ID NO: 994427 - RNA, 21 nt, Human
accccauccacacaggaaaca

SEQ ID NO: 994428 - RNA, 24 nt, Human
acccccaaaaaaaaacaaaauaac

SEQ ID NO: 994429 - RNA, 25 nt, Human
agaaaagcccagucugggcuggguu

SEQ ID NO: 994430 - RNA, 19 nt, Human
agaaggaggcaggcucaga

SEQ ID NO: 994431 - RNA, 21 nt, Human
agaggagaggucaagggcuug

SEQ ID NO: 994432 - RNA, 19 nt, Human
agagggagggaggagacag

SEQ ID NO: 994433 - RNA, 21 nt, Human
agccccacccuccuuuccaga

SEQ ID NO: 994434 - RNA, 18 nt, Human
agcuugaggccccugagc

SEQ ID NO: 994435 - RNA, 21 nt, Human
agcuugaggccccugagcccc

SEQ ID NO: 994436 - RNA, 23 nt, Human
agcuugaggccccugagccccac

SEQ ID NO: 994437 - RNA, 19 nt, Human
aggaaacggaaaugagguu

SEQ ID NO: 994438 - RNA, 22 nt, Human
aggccagcugugccaggccccu

SEQ ID NO: 994439 - RNA, 23 nt, Human
aggccccugagccccacccuccu

SEQ ID NO: 994440 - RNA, 23 nt, Human
aggccccuggagggcaacagcuc

SEQ ID NO: 994441 - RNA, 19 nt, Human
agggaggagacagcugagg

SEQ ID NO: 994442 - RNA, 21 nt, Human
agggaggagacagcugagggg

SEQ ID NO: 994443 - RNA, 27 nt, Human
agguaggaaacggaaaugaggggaccc

SEQ ID NO: 994444 - RNA, 21 nt, Human
agguugggagugggggccagg

SEQ ID NO: 994445 - RNA, 22 nt, Human
aucacccccaaaaaaaaacaaa

SEQ ID NO: 994446 - RNA, 19 nt, Human
aucuucagcugaaauuggg

SEQ ID NO: 994447 - RNA, 24 nt, Human
caaguaggcacuguaauuucuucc

SEQ ID NO: 994448 - RNA, 18 nt, Human
cacaaccugaccccaucc

SEQ ID NO: 994449 - RNA, 19 nt, Human
cacagagcccagcuugagg

SEQ ID NO: 994450 - RNA, 21 nt, Human
caccaucacccccaaaaaaaa

SEQ ID NO: 994451 - RNA, 19 nt, Human
cacccccaaaaaaaaacaa

SEQ ID NO: 994452 - RNA, 21 nt, Human
cacggccccuccacuuccuuu

SEQ ID NO: 994453 - RNA, 20 nt, Human
cagucugggcuggguugggc

SEQ ID NO: 994454 - RNA, 23 nt, Human
caucaaugugaaaauuucucaaa

SEQ ID NO: 994455 - RNA, 23 nt, Human
ccaaggccagcugugccaggccc

SEQ ID NO: 994456 - RNA, 22 nt, Human
ccaucacccccaaaaaaaaaca

SEQ ID NO: 994457 - RNA, 21 nt, Human
cccacaaccugaccccaucca

SEQ ID NO: 994458 - RNA, 22 nt, Human
cccacaaccugaccccauccac

SEQ ID NO: 994459 - RNA, 19 nt, Human
ccccagaaaagcccagucu

SEQ ID NO: 994460 - RNA, 27 nt, Human
cccccaaaaaaaaacaaaauaacaaaa

SEQ ID NO: 994461 - RNA, 18 nt, Human
ccccugagccccacccuc

SEQ ID NO: 994462 - RNA, 20 nt, Human
ccccuggagggcaacagcuc

SEQ ID NO: 994463 - RNA, 19 nt, Human
cccugagcugccaaggugu

SEQ ID NO: 994464 - RNA, 23 nt, Human
ccuccgccugcugagaagcaaga

SEQ ID NO: 994465 - RNA, 21 nt, Human
cucagcuccccagaaaagccc

SEQ ID NO: 994466 - RNA, 24 nt, Human
cuccccagaaaagcccagucuggg

SEQ ID NO: 994467 - RNA, 24 nt, Human
cuccgcaucccacggccccuccac

SEQ ID NO: 994468 - RNA, 23 nt, Human
cucucuguuccgcuguccgggag

SEQ ID NO: 994469 - RNA, 21 nt, Human
cugaaauuggggccggggucc

SEQ ID NO: 994470 - RNA, 22 nt, Human
cuggggacccugagcugccaag

SEQ ID NO: 994471 - RNA, 24 nt, Human
cuggggcaagucgcuaucucuucu

SEQ ID NO: 994472 - RNA, 23 nt, Human
cugggguuggacuggggcaaguc

SEQ ID NO: 994473 - RNA, 21 nt, Human
cuuuccgccgcugccagcugc

SEQ ID NO: 994474 - RNA, 20 nt, Human
gagaagcaagaaggaggcag

SEQ ID NO: 994475 - RNA, 27 nt, Human
gaggcaggcucagagauguggccagaa

SEQ ID NO: 994476 - RNA, 23 nt, Human
gcacuguaauuucuuccaguccc

SEQ ID NO: 994477 - RNA, 18 nt, Human
gccccugagccccacccu

SEQ ID NO: 994478 - RNA, 20 nt, Human
gcuugaggccccugagcccc

SEQ ID NO: 994479 - RNA, 21 nt, Human
ggccuggcauggcccacaacc

SEQ ID NO: 994480 - RNA, 24 nt, Human
gggacuccuugcaguccuggugca

SEQ ID NO: 994481 - RNA, 23 nt, Human
gggcuggguugggcugauuggag

SEQ ID NO: 994482 - RNA, 18 nt, Human
gggggcccugaaucaguc

SEQ ID NO: 994483 - RNA, 22 nt, Human
gggggggaagcaaacagguagg

SEQ ID NO: 994484 - RNA, 18 nt, Human
gggucuggauagaggaga

SEQ ID NO: 994485 - RNA, 19 nt, Human
gguugggagugggggccag

SEQ ID NO: 994486 - RNA, 21 nt, Human
uaaacuccucagcuccccaga

SEQ ID NO: 994487 - RNA, 23 nt, Human
uaaacuccucagcuccccagaaa

SEQ ID NO: 994488 - RNA, 24 nt, Human
uaacagucuagagccaagguuggg

SEQ ID NO: 994489 - RNA, 19 nt, Human
uaagcuuuccgccgcugcc

SEQ ID NO: 994490 - RNA, 25 nt, Human
uaugaaaggauggaagaugaauacc

SEQ ID NO: 994491 - RNA, 18 nt, Human
uauucuaagaaaaagggg

SEQ ID NO: 994492 - RNA, 18 nt, Human
ucaacgcagcugacaggc

SEQ ID NO: 994493 - RNA, 20 nt, Human
ucacccccaaaaaaaaacaa

SEQ ID NO: 994494 - RNA, 19 nt, Human
uccacacaggaaacagcug

SEQ ID NO: 994495 - RNA, 19 nt, Human
uccagagggagggaggaga

SEQ ID NO: 994496 - RNA, 24 nt, Human
ucccacggccccuccacuuccuuu

SEQ ID NO: 994497 - RNA, 19 nt, Human
uccccagaaaagcccaguc

SEQ ID NO: 994498 - RNA, 18 nt, Human
uccgcaucccacggcccc

SEQ ID NO: 994499 - RNA, 24 nt, Human
uccgccugcugagaagcaagaagg

SEQ ID NO: 994500 - RNA, 20 nt, Human
uccucagcuccccagaaaag

SEQ ID NO: 994501 - RNA, 19 nt, Human
uccuggugcagcaauggca

SEQ ID NO: 994502 - RNA, 22 nt, Human
ucucuguuccgcuguccgggag

SEQ ID NO: 994503 - RNA, 22 nt, Human
ucugggaggugacggcuccucc

SEQ ID NO: 994504 - RNA, 23 nt, Human
ucuguuugucggcagcucucucu

SEQ ID NO: 994505 - RNA, 21 nt, Human
ugaaauuggggcagaugcugc

SEQ ID NO: 994506 - RNA, 23 nt, Human
ugaaauuggggcagaugcugcua

SEQ ID NO: 994507 - RNA, 19 nt, Human
ugagaagcaagaaggaggc

SEQ ID NO: 994508 - RNA, 20 nt, Human
ugagaagcaagaaggaggca

SEQ ID NO: 994509 - RNA, 22 nt, Human
ugagggggcccugaaucagucc

SEQ ID NO: 994510 - RNA, 21 nt, Human
ugccagcugcguucaggccgc

SEQ ID NO: 994511 - RNA, 23 nt, Human
uggaaaggcugaucuaagcuuuc

SEQ ID NO: 994512 - RNA, 19 nt, Human
ugggagugggggccaggcc

SEQ ID NO: 994513 - RNA, 19 nt, Human
uuuccaaguaggcacugua

SEQ ID NO: 994514 - RNA, 23 nt, Human
acuuccacauugcuguucuccau

SEQ ID NO: 994515 - RNA, 22 nt, Human
agaaagccuucuuuaaacaaaa

SEQ ID NO: 994516 - RNA, 23 nt, Human
aggcggccgcggcagcggaggcg

SEQ ID NO: 994517 - RNA, 21 nt, Human
aggcggccggcucggucugag

SEQ ID NO: 994518 - RNA, 23 nt, Human
agugcuuacaaaccauuugccac

SEQ ID NO: 994519 - RNA, 21 nt, Human
caaaccaccuguccagagcuu

SEQ ID NO: 994520 - RNA, 24 nt, Human
caaagugcuaccaggaggagaagu

SEQ ID NO: 994521 - RNA, 18 nt, Human
caaugaguaucugaaauc

SEQ ID NO: 994522 - RNA, 21 nt, Human
cacaaugggcaaacuugagcg

SEQ ID NO: 994523 - RNA, 18 nt, Human
cagaccuugacgcagccc

SEQ ID NO: 994524 - RNA, 19 nt, Human
cagcacacagcucucauga

SEQ ID NO: 994525 - RNA, 19 nt, Human
cagcugccgccccucgcgc

SEQ ID NO: 994526 - RNA, 21 nt, Human
caggucccaggaccugacccc

SEQ ID NO: 994527 - RNA, 18 nt, Human
caucagggagcaaucugc

SEQ ID NO: 994528 - RNA, 18 nt, Human
ccacauugcuguucucca

SEQ ID NO: 994529 - RNA, 19 nt, Human
ccaccuguccagagcuugg

SEQ ID NO: 994530 - RNA, 25 nt, Human
ccccacugcaagccacucuccaguu

SEQ ID NO: 994531 - RNA, 19 nt, Human
ccuugacgcagcccuuccc

SEQ ID NO: 994532 - RNA, 20 nt, Human
cggcaggaacgcgcggcggc

SEQ ID NO: 994533 - RNA, 19 nt, Human
cggggcugauggccagggc

SEQ ID NO: 994534 - RNA, 19 nt, Human
cugccgggccgcuccgcau

SEQ ID NO: 994535 - RNA, 20 nt, Human
cugcugcagcugccgccccu

SEQ ID NO: 994536 - RNA, 21 nt, Human
cugcugcagcugccgccccuc

SEQ ID NO: 994537 - RNA, 19 nt, Human
cuggguggcugauguccca

SEQ ID NO: 994538 - RNA, 19 nt, Human
cuguggccuucuuaucccc

SEQ ID NO: 994539 - RNA, 20 nt, Human
gccacucuccaguugggcag

SEQ ID NO: 994540 - RNA, 20 nt, Human
gcuuggugacaugcaaaacu

SEQ ID NO: 994541 - RNA, 22 nt, Human
ggacaaaguacuggcuuccccu

SEQ ID NO: 994542 - RNA, 22 nt, Human
ggagccgccaggucccaaaugg

SEQ ID NO: 994543 - RNA, 22 nt, Human
ggccagggcauagcaggcgggg

SEQ ID NO: 994544 - RNA, 22 nt, Human
ggccgcggcagcggaggcggcc

SEQ ID NO: 994545 - RNA, 23 nt, Human
ggcgggggccgaggaugucagcu

SEQ ID NO: 994546 - RNA, 20 nt, Human
gggaagugagguuaagaaag

SEQ ID NO: 994547 - RNA, 23 nt, Human
gggaugggggugaacaaaaagga

SEQ ID NO: 994548 - RNA, 22 nt, Human
gugcuuacaaaccauuugccac

SEQ ID NO: 994549 - RNA, 19 nt, Human
uaaguaugcuuauuccaug

SEQ ID NO: 994550 - RNA, 19 nt, Human
uaccaggaggagaagucca

SEQ ID NO: 994551 - RNA, 25 nt, Human
uaccaggaggagaaguccagucugc

SEQ ID NO: 994552 - RNA, 24 nt, Human
uccccacugcaagccacucuccag

SEQ ID NO: 994553 - RNA, 27 nt, Human
ucccggcccccgccgggucucgcguga

SEQ ID NO: 994554 - RNA, 18 nt, Human
ucgugcugcugcagcugc

SEQ ID NO: 994555 - RNA, 20 nt, Human
ugacgcagcccuucccaccc

SEQ ID NO: 994556 - RNA, 18 nt, Human
ugagguuaagaaagggga

SEQ ID NO: 994557 - RNA, 21 nt, Human
ugcaaugaguaucugaaaucc

SEQ ID NO: 994558 - RNA, 26 nt, Human
ugccacaaugggcaaacuugagcgac

SEQ ID NO: 994559 - RNA, 18 nt, Human
ugggaagugagguuaaga

SEQ ID NO: 994560 - RNA, 21 nt, Human
ugucccagaccuugacgcagc

SEQ ID NO: 994561 - RNA, 26 nt, Human
uguuagaaagccuucuuuaaacaaaa

SEQ ID NO: 994562 - RNA, 19 nt, Human
uuagaugcggggauggggg

SEQ ID NO: 994563 - RNA, 19 nt, Human
uuccaaguagacagcugaa

SEQ ID NO: 994564 - RNA, 22 nt, Human
uuggaaucggggcugauggcca

SEQ ID NO: 994565 - RNA, 19 nt, Human
aaaaaaaaaaaaaaaaaga

SEQ ID NO: 994566 - RNA, 19 nt, Human
aaaaaaaaaaaaaagaaaa

SEQ ID NO: 994567 - RNA, 19 nt, Human
aaaaaaaaaaagaaaaaga

SEQ ID NO: 994568 - RNA, 18 nt, Human
aaaacaaacacucaaaug

SEQ ID NO: 994569 - RNA, 23 nt, Human
aaaagaaaaagaaaacaaacacu

SEQ ID NO: 994570 - RNA, 22 nt, Human
aaacaaacacucaaaugcucuc

SEQ ID NO: 994571 - RNA, 19 nt, Human
aucaagcuacuuucuggga

SEQ ID NO: 994572 - RNA, 20 nt, Human
caacggcaccggcacccgcc

SEQ ID NO: 994573 - RNA, 19 nt, Human
ccaagauggcggccccucc

SEQ ID NO: 994574 - RNA, 21 nt, Human
cccgccuccgucauggcgggg

SEQ ID NO: 994575 - RNA, 24 nt, Human
cgacggcagcggcggcaacggcac

SEQ ID NO: 994576 - RNA, 20 nt, Human
cucaaaugcucucaaacuua

SEQ ID NO: 994577 - RNA, 24 nt, Human
cucccggauggcggcgugugauuc

SEQ ID NO: 994578 - RNA, 22 nt, Human
cuuccacugcuacuuuggacac

SEQ ID NO: 994579 - RNA, 23 nt, Human
gaccuggccgccgccgccgagcc

SEQ ID NO: 994580 - RNA, 21 nt, Human
gagacguggagagcugggacc

SEQ ID NO: 994581 - RNA, 18 nt, Human
gcagcggcggcaacggca

SEQ ID NO: 994582 - RNA, 20 nt, Human
ggccgccgccgccgagcccg

SEQ ID NO: 994583 - RNA, 23 nt, Human
gggcgagcgagagagcgagggcu

SEQ ID NO: 994584 - RNA, 18 nt, Human
gucauccuuccuucacug

SEQ ID NO: 994585 - RNA, 21 nt, Human
uaacaugguauuccuguuucu

SEQ ID NO: 994586 - RNA, 22 nt, Human
uauagucagaagugugcauuua

SEQ ID NO: 994587 - RNA, 26 nt, Human
uauucauuguccaugauccucucuca

SEQ ID NO: 994588 - RNA, 24 nt, Human
ucaaggggaugggggaggaaaccg

SEQ ID NO: 994589 - RNA, 19 nt, Human
uccaaacuuccacugcuac

SEQ ID NO: 994590 - RNA, 20 nt, Human
ucccugggccucccggaugg

SEQ ID NO: 994591 - RNA, 21 nt, Human
uccgucauggcgggggccgcg

SEQ ID NO: 994592 - RNA, 22 nt, Human
ugacacuaugaggaacuucagu

SEQ ID NO: 994593 - RNA, 20 nt, Human
ugcuacuuuggacacucauc

SEQ ID NO: 994594 - RNA, 20 nt, Human
uggagacguggagagcuggg

SEQ ID NO: 994595 - RNA, 18 nt, Human
uguccaugauccucucuc

SEQ ID NO: 994596 - RNA, 20 nt, Human
uucccugggccucccggaug

SEQ ID NO: 994597 - RNA, 22 nt, Human
uuguguaaaaaaaaaaaaaaaa

SEQ ID NO: 994598 - RNA, 19 nt, Human
aaacacuaacucuagugcc

SEQ ID NO: 994599 - RNA, 22 nt, Human
aaacaggagaccagacggagga

SEQ ID NO: 994600 - RNA, 20 nt, Human
aagaaaagaacaaguuuaaa

SEQ ID NO: 994601 - RNA, 22 nt, Human
aagcaagaaaauaaaagcaccu

SEQ ID NO: 994602 - RNA, 24 nt, Human
aagcaagaaaauaaaagcaccugg

SEQ ID NO: 994603 - RNA, 20 nt, Human
acaccauccccagcugagcc

SEQ ID NO: 994604 - RNA, 23 nt, Human
acaucucaguacucccacucaau

SEQ ID NO: 994605 - RNA, 24 nt, Human
accucauucuuuguccaauggcaa

SEQ ID NO: 994606 - RNA, 25 nt, Human
acucagagcagccacacacaguggc

SEQ ID NO: 994607 - RNA, 22 nt, Human
acuucaaauaaauuaaaaggga

SEQ ID NO: 994608 - RNA, 21 nt, Human
aucugaagcacugcaucaggg

SEQ ID NO: 994609 - RNA, 23 nt, Human
cacaguggccguugacgcuggaa

SEQ ID NO: 994610 - RNA, 20 nt, Human
cacugcaucagggacccccc

SEQ ID NO: 994611 - RNA, 22 nt, Human
cacugcaucagggaccccccug

SEQ ID NO: 994612 - RNA, 22 nt, Human
cagagcagccacacacaguggc

SEQ ID NO: 994613 - RNA, 24 nt, Human
cagcugagccuuugugcuacaagc

SEQ ID NO: 994614 - RNA, 20 nt, Human
ccaaacccgcugcugaacgc

SEQ ID NO: 994615 - RNA, 22 nt, Human
ccagacggaggagaaagcugca

SEQ ID NO: 994616 - RNA, 22 nt, Human
cccacacaucucaguacuccca

SEQ ID NO: 994617 - RNA, 20 nt, Human
ccccagcaaacucaaaguaa

SEQ ID NO: 994618 - RNA, 21 nt, Human
cccggggcggagccggggccu

SEQ ID NO: 994619 - RNA, 18 nt, Human
ccgccgccgccgccgcgc

SEQ ID NO: 994620 - RNA, 19 nt, Human
ccgccgcgcuccacgcucc

SEQ ID NO: 994621 - RNA, 21 nt, Human
ccgccgcgcuccacgcuccuc

SEQ ID NO: 994622 - RNA, 21 nt, Human
ccgcgcuccacgcuccucccg

SEQ ID NO: 994623 - RNA, 22 nt, Human
ccuaaacuuuauuaaaagaaaa

SEQ ID NO: 994624 - RNA, 21 nt, Human
ccuccgaagucaaacaccauc

SEQ ID NO: 994625 - RNA, 22 nt, Human
ccuccgaagucaaacaccaucc

SEQ ID NO: 994626 - RNA, 22 nt, Human
ccuccguugccuccuuugcagc

SEQ ID NO: 994627 - RNA, 19 nt, Human
cgccgcaaccccccgcccg

SEQ ID NO: 994628 - RNA, 19 nt, Human
cugcagucuucuaaccuca

SEQ ID NO: 994629 - RNA, 21 nt, Human
gcacugcaucagggacccccc

SEQ ID NO: 994630 - RNA, 22 nt, Human
gcccggggcggagccggggccu

SEQ ID NO: 994631 - RNA, 21 nt, Human
gccucuccugagcgccgcaac

SEQ ID NO: 994632 - RNA, 18 nt, Human
gccuuuuccuacaaggcc

SEQ ID NO: 994633 - RNA, 22 nt, Human
gcuccucccgggaggggccccg

SEQ ID NO: 994634 - RNA, 19 nt, Human
gcugccgccgccgccgccg

SEQ ID NO: 994635 - RNA, 18 nt, Human
ggcccggggcggagccgg

SEQ ID NO: 994636 - RNA, 24 nt, Human
ggcccggggcggagccggggccuc

SEQ ID NO: 994637 - RNA, 23 nt, Human
ggccuggccggagcugcccaagg

SEQ ID NO: 994638 - RNA, 20 nt, Human
gggccuuuuccuacaaggcc

SEQ ID NO: 994639 - RNA, 27 nt, Human
uaaaaaaauagcacuucaaauaaauua

SEQ ID NO: 994640 - RNA, 21 nt, Human
uaaaacacuaacucuagugcc

SEQ ID NO: 994641 - RNA, 22 nt, Human
uaaaagggacaaccgucaagug

SEQ ID NO: 994642 - RNA, 18 nt, Human
uaaauauagacacuggac

SEQ ID NO: 994643 - RNA, 20 nt, Human
uacagguuucaucagaucca

SEQ ID NO: 994644 - RNA, 19 nt, Human
uagagagacuccaagcugc

SEQ ID NO: 994645 - RNA, 20 nt, Human
uaugaccaaauguauucuuu

SEQ ID NO: 994646 - RNA, 21 nt, Human
uccaauggcaaaaacccacac

SEQ ID NO: 994647 - RNA, 21 nt, Human
ucccccugggcaggcccgggg

SEQ ID NO: 994648 - RNA, 19 nt, Human
uccccuaggagugccuuuc

SEQ ID NO: 994649 - RNA, 21 nt, Human
ucccuacugagaugagggaag

SEQ ID NO: 994650 - RNA, 18 nt, Human
uccugagcgccgcaaccc

SEQ ID NO: 994651 - RNA, 20 nt, Human
ugaacaguuuguggccuugg

SEQ ID NO: 994652 - RNA, 22 nt, Human
ugaggaucgugcaacuggugga

SEQ ID NO: 994653 - RNA, 23 nt, Human
ugccuccuuugcagcacugccau

SEQ ID NO: 994654 - RNA, 18 nt, Human
ugccucguacuugcuaau

SEQ ID NO: 994655 - RNA, 18 nt, Human
uggaaugaacauugccac

SEQ ID NO: 994656 - RNA, 18 nt, Human
uggcagagcagacugcuc

SEQ ID NO: 994657 - RNA, 20 nt, Human
uggccggagcugcccaaggu

SEQ ID NO: 994658 - RNA, 23 nt, Human
uggccggagcugcccaagguuuc

SEQ ID NO: 994659 - RNA, 22 nt, Human
uggcgcgcuucccccagcaaac

SEQ ID NO: 994660 - RNA, 19 nt, Human
uucacuuuaugaccaaaug

SEQ ID NO: 994661 - RNA, 24 nt, Human
uucacuuuaugaccaaauguauuc

SEQ ID NO: 994662 - RNA, 21 nt, Human
uucugcugccgccgccgccgc

SEQ ID NO: 994663 - RNA, 22 nt, Human
uugcagcacugccaucuaaacc

SEQ ID NO: 994664 - RNA, 23 nt, Human
uuggcagagcagacugcuccucc

SEQ ID NO: 994665 - RNA, 23 nt, Human
uuuccuacaaggccuggccggag

SEQ ID NO: 994666 - RNA, 22 nt, Human
aaaaaacggugaagagagcuga

SEQ ID NO: 994667 - RNA, 25 nt, Human
aaaaacggugaagagagccgguacc

SEQ ID NO: 994668 - RNA, 18 nt, Human
acucuggggaggggcagg

SEQ ID NO: 994669 - RNA, 19 nt, Human
acuuuggggagugcugggg

SEQ ID NO: 994670 - RNA, 24 nt, Human
acuuuggggagugcugggguuggg

SEQ ID NO: 994671 - RNA, 19 nt, Human
agcccagaaggcuuuggua

SEQ ID NO: 994672 - RNA, 18 nt, Human
agcugggggugggggaag

SEQ ID NO: 994673 - RNA, 24 nt, Human
aggcuguggggacuggcuggaagc

SEQ ID NO: 994674 - RNA, 23 nt, Human
aggggcaggcacuuggggggccc

SEQ ID NO: 994675 - RNA, 19 nt, Human
aggguggagugggcugggg

SEQ ID NO: 994676 - RNA, 20 nt, Human
aguggcacgcacagucucug

SEQ ID NO: 994677 - RNA, 23 nt, Human
caaaaaacggugaagagagcuga

SEQ ID NO: 994678 - RNA, 21 nt, Human
cacuugggguuggggagggga

SEQ ID NO: 994679 - RNA, 20 nt, Human
ccccgacagcccagaaggcu

SEQ ID NO: 994680 - RNA, 23 nt, Human
ccccgcccgccggcccgccgccc

SEQ ID NO: 994681 - RNA, 24 nt, Human
cccggcagauucagaucgagguac

SEQ ID NO: 994682 - RNA, 19 nt, Human
ccgccccgccgcuucucgg

SEQ ID NO: 994683 - RNA, 20 nt, Human
ccgcccgccggcccgccgcc

SEQ ID NO: 994684 - RNA, 21 nt, Human
ccgcccgccggcccgccgccc

SEQ ID NO: 994685 - RNA, 22 nt, Human
ccgccgccccgccgcuucucgg

SEQ ID NO: 994686 - RNA, 24 nt, Human
ccggcccgccgccccgccgcuucu

SEQ ID NO: 994687 - RNA, 22 nt, Human
ccuauggguagcuggggguggg

SEQ ID NO: 994688 - RNA, 22 nt, Human
cgccggcccgccgccccgccgc

SEQ ID NO: 994689 - RNA, 18 nt, Human
cugcgccccgcccgccgg

SEQ ID NO: 994690 - RNA, 22 nt, Human
cugcgcugccuggcucugcgcc

SEQ ID NO: 994691 - RNA, 26 nt, Human
cugcgcugccuggcucugcgccccgc

SEQ ID NO: 994692 - RNA, 19 nt, Human
cuggcucugcgccccgccc

SEQ ID NO: 994693 - RNA, 18 nt, Human
cuugggguuggggagggg

SEQ ID NO: 994694 - RNA, 22 nt, Human
cuuuggggagugcugggguugg

SEQ ID NO: 994695 - RNA, 20 nt, Human
gaaggcuuugguaguggcac

SEQ ID NO: 994696 - RNA, 21 nt, Human
gacugggcggggccaggcccu

SEQ ID NO: 994697 - RNA, 19 nt, Human
gcacuuggggggcccuagg

SEQ ID NO: 994698 - RNA, 20 nt, Human
gcacuuuggggagugcuggg

SEQ ID NO: 994699 - RNA, 21 nt, Human
gccccgcccgccggcccgccg

SEQ ID NO: 994700 - RNA, 21 nt, Human
gcccugggguuuggcaggcac

SEQ ID NO: 994701 - RNA, 20 nt, Human
ggcggggccaggcccugggg

SEQ ID NO: 994702 - RNA, 22 nt, Human
gggaggggcaggcacuuggggg

SEQ ID NO: 994703 - RNA, 25 nt, Human
ggggacaggggauguacugcggggg

SEQ ID NO: 994704 - RNA, 22 nt, Human
gggguugggcagguugggcccc

SEQ ID NO: 994705 - RNA, 24 nt, Human
ggguggagugggcuggggccccgg

SEQ ID NO: 994706 - RNA, 18 nt, Human
ggguuggggaggggacag

SEQ ID NO: 994707 - RNA, 20 nt, Human
guggagugggcuggggcccc

SEQ ID NO: 994708 - RNA, 23 nt, Human
guggcagcuucuuuucuccagcc

SEQ ID NO: 994709 - RNA, 23 nt, Human
uacucuggggaggggcaggcacu

SEQ ID NO: 994710 - RNA, 19 nt, Human
ugcgggacugggcggggcc

SEQ ID NO: 994711 - RNA, 21 nt, Human
uggcaggguggagugggcugg

SEQ ID NO: 994712 - RNA, 18 nt, Human
ugggccccgacagcccag

SEQ ID NO: 994713 - RNA, 20 nt, Human
ugggcuggggccccggcaga

SEQ ID NO: 994714 - RNA, 23 nt, Human
uggggacuggcuggaagcugcuu

SEQ ID NO: 994715 - RNA, 18 nt, Human
uggggaggggacagggga

SEQ ID NO: 994716 - RNA, 23 nt, Human
uggggaggggcaggcacuuggag

SEQ ID NO: 994717 - RNA, 22 nt, Human
uggggaggggcaggcacuuggg

SEQ ID NO: 994718 - RNA, 23 nt, Human
uggggaggggcaggcacuugggg

SEQ ID NO: 994719 - RNA, 25 nt, Human
uggggagugcugggguugaccacug

SEQ ID NO: 994720 - RNA, 19 nt, Human
ugggggugggggaagauag

SEQ ID NO: 994721 - RNA, 25 nt, Human
ugggguuuggcaggcacuuugggga

SEQ ID NO: 994722 - RNA, 21 nt, Human
uggguagcuggggguggggga

SEQ ID NO: 994723 - RNA, 23 nt, Human
ugguaguggcacgcacagucucu

SEQ ID NO: 994724 - RNA, 24 nt, Human
uugguaguggcacgcacagucucu

SEQ ID NO: 994725 - RNA, 19 nt, Human
uuuuuuuuuuuuuuuuugu

SEQ ID NO: 994726 - RNA, 22 nt, Human
uuuuuuuuuuuuuuuuuguagg

SEQ ID NO: 994727 - RNA, 25 nt, Human
aaagcgugcaaacaggggcgggaau

SEQ ID NO: 994728 - RNA, 18 nt, Human
aagagaaggaccaacaaa

SEQ ID NO: 994729 - RNA, 22 nt, Human
aaggagacgagcauuccacuga

SEQ ID NO: 994730 - RNA, 22 nt, Human
aaggagcuuacacacggaggca

SEQ ID NO: 994731 - RNA, 24 nt, Human
aagugcccagccucucaggaacac

SEQ ID NO: 994732 - RNA, 22 nt, Human
acaucacgaucaugcagccagu

SEQ ID NO: 994733 - RNA, 22 nt, Human
agacacggugaggcaugagggg

SEQ ID NO: 994734 - RNA, 19 nt, Human
agccagugccgacgggaca

SEQ ID NO: 994735 - RNA, 24 nt, Human
aggaagaagaauauucuaugacgu

SEQ ID NO: 994736 - RNA, 21 nt, Human
aggguccuggcagcucugagc

SEQ ID NO: 994737 - RNA, 24 nt, Human
cacaauaucauaaagagguccagg

SEQ ID NO: 994738 - RNA, 18 nt, Human
cacccgggagggaggugg

SEQ ID NO: 994739 - RNA, 23 nt, Human
cacccuggacgcuaaggagacga

SEQ ID NO: 994740 - RNA, 21 nt, Human
cacgaucaugcagccagugcc

SEQ ID NO: 994741 - RNA, 21 nt, Human
caggccuaagagaaggaccaa

SEQ ID NO: 994742 - RNA, 18 nt, Human
caguccaugaaacgugca

SEQ ID NO: 994743 - RNA, 21 nt, Human
cagucucauucucuccaaucu

SEQ ID NO: 994744 - RNA, 18 nt, Human
ccagugccgacgggacag

SEQ ID NO: 994745 - RNA, 21 nt, Human
ccaguucagccagggccaucc

SEQ ID NO: 994746 - RNA, 22 nt, Human
ccccuggggcucgccaucuggg

SEQ ID NO: 994747 - RNA, 21 nt, Human
ccccugggugagccagugcuc

SEQ ID NO: 994748 - RNA, 22 nt, Human
ccggaguccacacggguuugug

SEQ ID NO: 994749 - RNA, 19 nt, Human
ccugagucacccucccgga

SEQ ID NO: 994750 - RNA, 19 nt, Human
cgaucaugcagccagugcc

SEQ ID NO: 994751 - RNA, 22 nt, Human
cggcagaggaguuguggguagg

SEQ ID NO: 994752 - RNA, 21 nt, Human
cgggacagagaugugagaaca

SEQ ID NO: 994753 - RNA, 22 nt, Human
cucaucagucucauucucucca

SEQ ID NO: 994754 - RNA, 22 nt, Human
cuuccgucuucuccugagagga

SEQ ID NO: 994755 - RNA, 21 nt, Human
gaaacgugcaccccucucucc

SEQ ID NO: 994756 - RNA, 22 nt, Human
gacucugugugagcugaaacag

SEQ ID NO: 994757 - RNA, 21 nt, Human
guccaguucagccagggccau

SEQ ID NO: 994758 - RNA, 19 nt, Human
gucuucuccugagaggaag

SEQ ID NO: 994759 - RNA, 23 nt, Human
uaaaacauccuggaaucgcucau

SEQ ID NO: 994760 - RNA, 18 nt, Human
ucacccgggagggaggug

SEQ ID NO: 994761 - RNA, 22 nt, Human
ucacgaucaugcagccagugcc

SEQ ID NO: 994762 - RNA, 22 nt, Human
ucagaagauccccacuggcuug

SEQ ID NO: 994763 - RNA, 25 nt, Human
ucagucucauucucuccaaucuguc

SEQ ID NO: 994764 - RNA, 21 nt, Human
ucauaaagagguccaggagca

SEQ ID NO: 994765 - RNA, 19 nt, Human
ucauucucuccaaucuguc

SEQ ID NO: 994766 - RNA, 21 nt, Human
uccccuggggcucgccaucug

SEQ ID NO: 994767 - RNA, 23 nt, Human
ucugcaggguaaggagcccacag

SEQ ID NO: 994768 - RNA, 22 nt, Human
ugacaucacgaucaugcagcca

SEQ ID NO: 994769 - RNA, 21 nt, Human
ugagccagugcucaagacaug

SEQ ID NO: 994770 - RNA, 21 nt, Human
ugagcugaaacagccucugca

SEQ ID NO: 994771 - RNA, 21 nt, Human
ugcccagccucucaggaacac

SEQ ID NO: 994772 - RNA, 21 nt, Human
uggaaggaggaccugagucac

SEQ ID NO: 994773 - RNA, 20 nt, Human
uggaaucgcucaucagucuc

SEQ ID NO: 994774 - RNA, 20 nt, Human
ugucgaggcucuccagaagu

SEQ ID NO: 994775 - RNA, 20 nt, Human
uucagccagggccauccccu

SEQ ID NO: 994776 - RNA, 24 nt, Human
uuucuggcuuuuaugaaccauguc

SEQ ID NO: 994777 - RNA, 20 nt, Human
uuuucacccccugggugagc

SEQ ID NO: 994778 - RNA, 19 nt, Human
uuuucugggccacaaaaua

SEQ ID NO: 994779 - RNA, 18 nt, Human
aaaaacuaucaaggacaa

SEQ ID NO: 994780 - RNA, 19 nt, Human
aaaaagccauaaaacuauc

SEQ ID NO: 994781 - RNA, 23 nt, Human
aacucugcuaacucagaaucuua

SEQ ID NO: 994782 - RNA, 21 nt, Human
aagcagagaaguggaucagag

SEQ ID NO: 994783 - RNA, 21 nt, Human
acaaaugcuguucacuuucuc

SEQ ID NO: 994784 - RNA, 21 nt, Human
acaagaguuuccaaagacuug

SEQ ID NO: 994785 - RNA, 20 nt, Human
acuaaaaugcagauuccccg

SEQ ID NO: 994786 - RNA, 19 nt, Human
acuggagaaucguuaggac

SEQ ID NO: 994787 - RNA, 24 nt, Human
agaauacacuuuacguuacgccaa

SEQ ID NO: 994788 - RNA, 18 nt, Human
agagauaagaacugacuu

SEQ ID NO: 994789 - RNA, 18 nt, Human
agaguccaauaguucucu

SEQ ID NO: 994790 - RNA, 24 nt, Human
agccaacauagaaaauccaaccuc

SEQ ID NO: 994791 - RNA, 19 nt, Human
agcggugccuucucucccc

SEQ ID NO: 994792 - RNA, 21 nt, Human
agggugcggccuuucucagag

SEQ ID NO: 994793 - RNA, 24 nt, Human
caaaauacauggaauguuggcaca

SEQ ID NO: 994794 - RNA, 23 nt, Human
caacauagaaaauccaaccucuu

SEQ ID NO: 994795 - RNA, 20 nt, Human
caccugagaagcuacuaaaa

SEQ ID NO: 994796 - RNA, 20 nt, Human
cagauuccccgaccccaucc

SEQ ID NO: 994797 - RNA, 24 nt, Human
cagcgguccuuagcggugccuucu

SEQ ID NO: 994798 - RNA, 23 nt, Human
ccaauaguucucuuauguuuucu

SEQ ID NO: 994799 - RNA, 19 nt, Human
ccccucuucccuucgcucc

SEQ ID NO: 994800 - RNA, 18 nt, Human
cccucuucccuucgcucc

SEQ ID NO: 994801 - RNA, 18 nt, Human
cccuucgcuccugcugug

SEQ ID NO: 994802 - RNA, 19 nt, Human
ccgccggcuggcgccccug

SEQ ID NO: 994803 - RNA, 24 nt, Human
ccguugagugacagagauaagaac

SEQ ID NO: 994804 - RNA, 23 nt, Human
ccugagaagcuacuaaaaugcag

SEQ ID NO: 994805 - RNA, 21 nt, Human
cgaggagggggcgguggaaac

SEQ ID NO: 994806 - RNA, 19 nt, Human
cgccuggcggggccagcgg

SEQ ID NO: 994807 - RNA, 19 nt, Human
cuaaaaacauacccuuaca

SEQ ID NO: 994808 - RNA, 21 nt, Human
cuccccucuucccuucgcucc

SEQ ID NO: 994809 - RNA, 23 nt, Human
cuccugguauaauuuuauaauga

SEQ ID NO: 994810 - RNA, 21 nt, Human
cucgcgagaacgcgccccgag

SEQ ID NO: 994811 - RNA, 21 nt, Human
cucuucccuucgcuccugcug

SEQ ID NO: 994812 - RNA, 20 nt, Human
cugagcaucugaaucaccug

SEQ ID NO: 994813 - RNA, 23 nt, Human
cugcugugcgggaacuggagaau

SEQ ID NO: 994814 - RNA, 29 nt, Human
cuggagacgaccaucuuucucucagucag

SEQ ID NO: 994815 - RNA, 22 nt, Human
cuuaaaagaaaucuccugguag

SEQ ID NO: 994816 - RNA, 21 nt, Human
cuuauucauucagucccaaaa

SEQ ID NO: 994817 - RNA, 21 nt, Human
gaaauggggagggaggaggga

SEQ ID NO: 994818 - RNA, 21 nt, Human
gaauguuggcacaaaacugaa

SEQ ID NO: 994819 - RNA, 21 nt, Human
gaccccauccccuuagaguca

SEQ ID NO: 994820 - RNA, 19 nt, Human
gagaacgcgccccgagccc

SEQ ID NO: 994821 - RNA, 24 nt, Human
gaggaagcagagaaguggaucaga

SEQ ID NO: 994822 - RNA, 23 nt, Human
gccaauauucuauaaaaugaagg

SEQ ID NO: 994823 - RNA, 20 nt, Human
ggagggggcgguggaaaccu

SEQ ID NO: 994824 - RNA, 23 nt, Human
gggaggagggagagccaucaccu

SEQ ID NO: 994825 - RNA, 18 nt, Human
guggagcgaggagggggc

SEQ ID NO: 994826 - RNA, 18 nt, Human
guggagcgaggagggggc

SEQ ID NO: 994827 - RNA, 25 nt, Human
guuccuuuuaaaguuauuuuugauu

SEQ ID NO: 994828 - RNA, 22 nt, Human
uaaaagaugacaagaccgagac

SEQ ID NO: 994829 - RNA, 23 nt, Human
uaaaaugcagauuccccgacccc

SEQ ID NO: 994830 - RNA, 27 nt, Human
uaaaauuaucaaauggauaaaacauau

SEQ ID NO: 994831 - RNA, 22 nt, Human
uaaagaaugcuacaaaugccau

SEQ ID NO: 994832 - RNA, 21 nt, Human
uaacucagaaucuuaaaagaa

SEQ ID NO: 994833 - RNA, 19 nt, Human
uaacuguggaaaguacauc

SEQ ID NO: 994834 - RNA, 19 nt, Human
uagauuuaaagaaugcuac

SEQ ID NO: 994835 - RNA, 18 nt, Human
uagcggugccuucucucc

SEQ ID NO: 994836 - RNA, 20 nt, Human
uagucuaacaguaaaaagcc

SEQ ID NO: 994837 - RNA, 28 nt, Human
uauaaaaugaaggaccgaauauaacugc

SEQ ID NO: 994838 - RNA, 18 nt, Human
uauuucaugacauuccau

SEQ ID NO: 994839 - RNA, 18 nt, Human
ucacagcaaugccuccug

SEQ ID NO: 994840 - RNA, 19 nt, Human
ucacagcaaugccuccugg

SEQ ID NO: 994841 - RNA, 22 nt, Human
ucagccaacauagaaaauccaa

SEQ ID NO: 994842 - RNA, 21 nt, Human
ucuguggguuacucaaacuuc

SEQ ID NO: 994843 - RNA, 20 nt, Human
ugacagagauaagaacugac

SEQ ID NO: 994844 - RNA, 21 nt, Human
ugcaaaacuaguucaaagcaa

SEQ ID NO: 994845 - RNA, 26 nt, Human
ugccuucucuccccucuucccuucgc

SEQ ID NO: 994846 - RNA, 25 nt, Human
uggaaaaauaauuuagcuaaaccag

SEQ ID NO: 994847 - RNA, 18 nt, Human
uggcacaaaacugaagcu

SEQ ID NO: 994848 - RNA, 24 nt, Human
uggcacaaaacugaagcugcugua

SEQ ID NO: 994849 - RNA, 22 nt, Human
uggggagggaggagggagagcc

SEQ ID NO: 994850 - RNA, 21 nt, Human
uggggaggucggccgccuggc

SEQ ID NO: 994851 - RNA, 20 nt, Human
ugguauaauuuuauaaugaa

SEQ ID NO: 994852 - RNA, 20 nt, Human
uguaaaagaugacaagaccg

SEQ ID NO: 994853 - RNA, 21 nt, Human
uguaauccgccggcuggcgcc

SEQ ID NO: 994854 - RNA, 18 nt, Human
uguuggaguuucuuuguu

SEQ ID NO: 994855 - RNA, 23 nt, Human
uguuuccacaaaauaguuuugaa

SEQ ID NO: 994856 - RNA, 20 nt, Human
uuaaguguugagaaauaucu

SEQ ID NO: 994857 - RNA, 24 nt, Human
uuacgccaaugaaauggggaggga

SEQ ID NO: 994858 - RNA, 20 nt, Human
uuacuguaaaauuaucaaau

SEQ ID NO: 994859 - RNA, 21 nt, Human
uuagcggugccuucucucccc

SEQ ID NO: 994860 - RNA, 21 nt, Human
uuucacagcaaugccuccugg

SEQ ID NO: 994861 - RNA, 19 nt, Human
uuugcucauauucaaaaua

SEQ ID NO: 994862 - RNA, 25 nt, Human
aaacaggaaacaaauagaagggacc

SEQ ID NO: 994863 - RNA, 19 nt, Human
auuccuguccuucugccuc

SEQ ID NO: 994864 - RNA, 21 nt, Human
ccucauaugaaugaugaagau

SEQ ID NO: 994865 - RNA, 24 nt, Human
cucacaucuccuuuugauagccuu

SEQ ID NO: 994866 - RNA, 19 nt, Human
cuccacagauaggcauggu

SEQ ID NO: 994867 - RNA, 30 nt, Human
cucucucacaucuccuuuugauagccuuaa

SEQ ID NO: 994868 - RNA, 21 nt, Human
gacucaauacccucucucaca

SEQ ID NO: 994869 - RNA, 21 nt, Human
gcaugguguuagucauuaaaa

SEQ ID NO: 994870 - RNA, 23 nt, Human
ggaaacaaauagaauuauuccug

SEQ ID NO: 994871 - RNA, 20 nt, Human
ggccagacucaauacccucu

SEQ ID NO: 994872 - RNA, 18 nt, Human
uaaagguuguaucaaugu

SEQ ID NO: 994873 - RNA, 24 nt, Human
ucaauacccucucucacaucuccu

SEQ ID NO: 994874 - RNA, 25 nt, Human
ucaggccagacucaauacccucucu

SEQ ID NO: 994875 - RNA, 22 nt, Human
uccccaacuucccaaggacugu

SEQ ID NO: 994876 - RNA, 22 nt, Human
uccucauaugaaugaugaagau

SEQ ID NO: 994877 - RNA, 23 nt, Human
ugaaaaacaauuuccagguguga

SEQ ID NO: 994878 - RNA, 20 nt, Human
ugaucucagagcauuggcug

SEQ ID NO: 994879 - RNA, 22 nt, Human
ugaugaagaugagcucaaaacc

SEQ ID NO: 994880 - RNA, 21 nt, Human
ugccaugucuccguuguugag

SEQ ID NO: 994881 - RNA, 18 nt, Human
uguacaucccaacagugu

SEQ ID NO: 994882 - RNA, 23 nt, Human
uucaaaacaggaaacaaauagaa

SEQ ID NO: 994883 - RNA, 20 nt, Human
uucagguugguggcaaaagc

SEQ ID NO: 994884 - RNA, 18 nt, Human
uugccagcuucuccacag

SEQ ID NO: 994885 - RNA, 26 nt, Human
aaacagccaggccucuccuugguaac

SEQ ID NO: 994886 - RNA, 23 nt, Human
caguuguguuuugcaaagaaggg

SEQ ID NO: 994887 - RNA, 21 nt, Human
gaucagcuugagaugggccca

SEQ ID NO: 994888 - RNA, 20 nt, Human
ugaaauaugggcaaucucau

SEQ ID NO: 994889 - RNA, 21 nt, Human
ugagaugggcccaauagcauc

SEQ ID NO: 994890 - RNA, 19 nt, Human
aacuugcagcagcgcagaa

SEQ ID NO: 994891 - RNA, 20 nt, Human
acugaagugucaagagaacc

SEQ ID NO: 994892 - RNA, 22 nt, Human
agaaaugucauuccuuugcauc

SEQ ID NO: 994893 - RNA, 19 nt, Human
cagcgcagaaugguacccu

SEQ ID NO: 994894 - RNA, 23 nt, Human
cagcgcagaaugguacccucuau

SEQ ID NO: 994895 - RNA, 22 nt, Human
accuuaaaaggaugcaggaagc

SEQ ID NO: 994896 - RNA, 21 nt, Human
agauucagggacagcuccucu

SEQ ID NO: 994897 - RNA, 20 nt, Human
agcacuuugggaggccuagg

SEQ ID NO: 994898 - RNA, 20 nt, Human
agcgugguggcucacgcugg

SEQ ID NO: 994899 - RNA, 21 nt, Human
aggccuaggcggggggaucgc

SEQ ID NO: 994900 - RNA, 24 nt, Human
cacgcugguaaacccagcacuuug

SEQ ID NO: 994901 - RNA, 22 nt, Human
cagcacuuugggaggccuaggc

SEQ ID NO: 994902 - RNA, 24 nt, Human
cagcacuuugggaggccuaggcgg

SEQ ID NO: 994903 - RNA, 23 nt, Human
ccaagaugauagggaucugagga

SEQ ID NO: 994904 - RNA, 24 nt, Human
cucacgcugguaaacccagcacuu

SEQ ID NO: 994905 - RNA, 19 nt, Human
cugacuugcucugccccuc

SEQ ID NO: 994906 - RNA, 21 nt, Human
cugacuugcucugccccucug

SEQ ID NO: 994907 - RNA, 18 nt, Human
cuuaaaaggaugcaggaa

SEQ ID NO: 994908 - RNA, 18 nt, Human
cuuccugaaccucugggc

SEQ ID NO: 994909 - RNA, 18 nt, Human
cuugcucugccccucugu

SEQ ID NO: 994910 - RNA, 19 nt, Human
gaacagacuggggcacccc

SEQ ID NO: 994911 - RNA, 20 nt, Human
gaggaaggggcgccaaugcu

SEQ ID NO: 994912 - RNA, 19 nt, Human
gaugauagggaucugagga

SEQ ID NO: 994913 - RNA, 22 nt, Human
ggaagcccagcgugguggcuca

SEQ ID NO: 994914 - RNA, 19 nt, Human
gggaggccuaggcgggggg

SEQ ID NO: 994915 - RNA, 18 nt, Human
ggugauguggcagguggg

SEQ ID NO: 994916 - RNA, 24 nt, Human
gguggcucacgcugguaaacccag

SEQ ID NO: 994917 - RNA, 21 nt, Human
ucucaggcagacccucaggaa

SEQ ID NO: 994918 - RNA, 24 nt, Human
ugaaccucugggcuacuguuuccc

SEQ ID NO: 994919 - RNA, 21 nt, Human
ugcaggaagcccagcguggug

SEQ ID NO: 994920 - RNA, 28 nt, Human
ugcaggaagcccagcgugguggcucacg

SEQ ID NO: 994921 - RNA, 23 nt, Human
ugcucugccccucuguguccugg

SEQ ID NO: 994922 - RNA, 21 nt, Human
uggagauucagggacagcucc

SEQ ID NO: 994923 - RNA, 24 nt, Human
uggagauucagggacagcuccucu

SEQ ID NO: 994924 - RNA, 21 nt, Human
uggcucacgcugguaaaccca

SEQ ID NO: 994925 - RNA, 24 nt, Human
uggcucacgcugguaaacccagca

SEQ ID NO: 994926 - RNA, 23 nt, Human
ugggaggccuaggcggggggauc

SEQ ID NO: 994927 - RNA, 21 nt, Human
uuucccaagaugauagggauc

SEQ ID NO: 994928 - RNA, 24 nt, Human
aaagggaguauuacagagagaggc

SEQ ID NO: 994929 - RNA, 20 nt, Human
aagggaaggaaaccuggaca

SEQ ID NO: 994930 - RNA, 21 nt, Human
acaaggcagagacacagccuc

SEQ ID NO: 994931 - RNA, 20 nt, Human
acagguuggcuccagggaga

SEQ ID NO: 994932 - RNA, 20 nt, Human
acgcagggcuccccagcuuc

SEQ ID NO: 994933 - RNA, 23 nt, Human
acgggcagagaggagcaaaugca

SEQ ID NO: 994934 - RNA, 21 nt, Human
agacacagccucagauccccc

SEQ ID NO: 994935 - RNA, 22 nt, Human
agagggggccguggcacaggug

SEQ ID NO: 994936 - RNA, 22 nt, Human
agaggucucagcaguuggccuc

SEQ ID NO: 994937 - RNA, 24 nt, Human
agcggugggugccggcucccgcgc

SEQ ID NO: 994938 - RNA, 20 nt, Human
caaccacaugacaacucgcc

SEQ ID NO: 994939 - RNA, 25 nt, Human
cacagccucagaucccccgucaucu

SEQ ID NO: 994940 - RNA, 19 nt, Human
cagaucccccgucaucuuc

SEQ ID NO: 994941 - RNA, 24 nt, Human
cagcacugagaaaucacuuaaaac

SEQ ID NO: 994942 - RNA, 19 nt, Human
cagguuggcuccagggaga

SEQ ID NO: 994943 - RNA, 21 nt, Human
ccacugaauaagggggaugga

SEQ ID NO: 994944 - RNA, 21 nt, Human
ccaggcaaggccuugcuuccc

SEQ ID NO: 994945 - RNA, 23 nt, Human
cccagcggcggcuucagccccag

SEQ ID NO: 994946 - RNA, 21 nt, Human
cccccaggcuccggaucccug

SEQ ID NO: 994947 - RNA, 19 nt, Human
cccgaggucgcuacggccg

SEQ ID NO: 994948 - RNA, 20 nt, Human
cccucccuccuuugcguccc

SEQ ID NO: 994949 - RNA, 21 nt, Human
ccgccgucgccgccccuccag

SEQ ID NO: 994950 - RNA, 19 nt, Human
ccgucgccgccccuccagc

SEQ ID NO: 994951 - RNA, 21 nt, Human
ccuccagcggugggugccggc

SEQ ID NO: 994952 - RNA, 26 nt, Human
ccuccugcaagccgagaugccugcca

SEQ ID NO: 994953 - RNA, 19 nt, Human
ccucuaaagacaaggcaga

SEQ ID NO: 994954 - RNA, 24 nt, Human
cggcucccgcgccgcuuuuccccc

SEQ ID NO: 994955 - RNA, 23 nt, Human
cggcuucagccccagagggggcc

SEQ ID NO: 994956 - RNA, 21 nt, Human
cucagaucccccgucaucuuc

SEQ ID NO: 994957 - RNA, 18 nt, Human
cugaaguccucuaaagac

SEQ ID NO: 994958 - RNA, 24 nt, Human
cuggaacaaagacuaaggugcuac

SEQ ID NO: 994959 - RNA, 20 nt, Human
cuguugggcugacuccacgc

SEQ ID NO: 994960 - RNA, 23 nt, Human
cuucccucccuccuuugcguccc

SEQ ID NO: 994961 - RNA, 22 nt, Human
gaaggagagugguuucaccagc

SEQ ID NO: 994962 - RNA, 21 nt, Human
gacccagcggcggcuucagcc

SEQ ID NO: 994963 - RNA, 20 nt, Human
gagaggcuugggaaagggaa

SEQ ID NO: 994964 - RNA, 23 nt, Human
gccuagucagcaaggucggggag

SEQ ID NO: 994965 - RNA, 19 nt, Human
gcuuuucccccaggcuccg

SEQ ID NO: 994966 - RNA, 23 nt, Human
ggaaggagagugguuucaccagc

SEQ ID NO: 994967 - RNA, 21 nt, Human
gggucuggggcugcaggucug

SEQ ID NO: 994968 - RNA, 20 nt, Human
ggucuggggcugcaggucug

SEQ ID NO: 994969 - RNA, 20 nt, Human
uacagguuggcuccagggag

SEQ ID NO: 994970 - RNA, 19 nt, Human
ucccccaggcuccggaucc

SEQ ID NO: 994971 - RNA, 21 nt, Human
ucccuguguggcuccaggcgc

SEQ ID NO: 994972 - RNA, 24 nt, Human
ucgcuacggccgccgucgccgccc

SEQ ID NO: 994973 - RNA, 22 nt, Human
ucuaaagacaaggcagagacac

SEQ ID NO: 994974 - RNA, 23 nt, Human
ucuccuggaacaaagacuaaggu

SEQ ID NO: 994975 - RNA, 18 nt, Human
ucuuccacugaauaaggg

SEQ ID NO: 994976 - RNA, 24 nt, Human
ugacaacucgccaggcaaggccuu

SEQ ID NO: 994977 - RNA, 19 nt, Human
ugacuccacgcagggcucc

SEQ ID NO: 994978 - RNA, 20 nt, Human
ugcucagcucuccuggaaca

SEQ ID NO: 994979 - RNA, 26 nt, Human
ugcuucccucccuccuuugcguccca

SEQ ID NO: 994980 - RNA, 21 nt, Human
uggacaggcuuuucagcacug

SEQ ID NO: 994981 - RNA, 18 nt, Human
ugggccccagucuuggac

SEQ ID NO: 994982 - RNA, 18 nt, Human
aaaaagacagcugcuccu

SEQ ID NO: 994983 - RNA, 18 nt, Human
auucauaucauuuucccu

SEQ ID NO: 994984 - RNA, 22 nt, Human
cugcaauaugcucuggagcaac

SEQ ID NO: 994985 - RNA, 18 nt, Human
gauagguugaugcaucca

SEQ ID NO: 994986 - RNA, 19 nt, Human
uagguugaugcauccacag

SEQ ID NO: 994987 - RNA, 23 nt, Human
ucuguggucuagcuagccgagac

SEQ ID NO: 994988 - RNA, 21 nt, Human
ugccugcagagauuucucgug

SEQ ID NO: 994989 - RNA, 23 nt, Human
uugccugcagagauuucucgucg

SEQ ID NO: 994990 - RNA, 18 nt, Human
uuuaaauaucgcaaaggc

SEQ ID NO: 994991 - RNA, 18 nt, Human
uuugaguaaaaauacaca

SEQ ID NO: 994992 - RNA, 24 nt, Human
uuuuuuuuuuuuuuuuuuuuaacg

SEQ ID NO: 994993 - RNA, 18 nt, Human
aaaucaggaccaaaacua

SEQ ID NO: 994994 - RNA, 20 nt, Human
aagaaaaaucaggaccaaaa

SEQ ID NO: 994995 - RNA, 18 nt, Human
agagaagcugguaggaga

SEQ ID NO: 994996 - RNA, 19 nt, Human
agagaagcugguaggagag

SEQ ID NO: 994997 - RNA, 18 nt, Human
ccaaagggcaaaagggaa

SEQ ID NO: 994998 - RNA, 24 nt, Human
gaaggaaugcccaaagggcaaaaa

SEQ ID NO: 994999 - RNA, 19 nt, Human
ggcaugaagaaagggagag

SEQ ID NO: 995000 - RNA, 24 nt, Human
ucaaauauauaauccuuaugugau

SEQ ID NO: 995001 - RNA, 21 nt, Human
ugaagaaagggagagaacagc

SEQ ID NO: 995002 - RNA, 25 nt, Human
ugguaauuguaaaaagaaaaaucag

SEQ ID NO: 995003 - RNA, 22 nt, Human
uuuuuuuuuuuuuuuucuuuuu

SEQ ID NO: 995004 - RNA, 19 nt, Human
aaacucaaggcagucacaa

SEQ ID NO: 995005 - RNA, 19 nt, Human
aaggauuacuaggccaaua

SEQ ID NO: 995006 - RNA, 23 nt, Human
agagauaaaccaagccggccccc

SEQ ID NO: 995007 - RNA, 22 nt, Human
agagggaaggagggguggggag

SEQ ID NO: 995008 - RNA, 24 nt, Human
aggccgccagagauaaaccaagcc

SEQ ID NO: 995009 - RNA, 19 nt, Human
agggaaggaggggugggga

SEQ ID NO: 995010 - RNA, 22 nt, Human
agggaaggagggguggggaguc

SEQ ID NO: 995011 - RNA, 22 nt, Human
agggggucaagagggaaggagg

SEQ ID NO: 995012 - RNA, 19 nt, Human
augggggaaagguguaugg

SEQ ID NO: 995013 - RNA, 23 nt, Human
caaggcagucacaaaaacagguc

SEQ ID NO: 995014 - RNA, 26 nt, Human
gaucuuaugggggaaagguguauggg

SEQ ID NO: 995015 - RNA, 22 nt, Human
gggcaaucaaaccuaggggguc

SEQ ID NO: 995016 - RNA, 21 nt, Human
ucugaaggauuacuaggccaa

SEQ ID NO: 995017 - RNA, 22 nt, Human
ugagaacaaccaaauauauacu

SEQ ID NO: 995018 - RNA, 21 nt, Human
ugggggaaagguguaugggaa

SEQ ID NO: 995019 - RNA, 24 nt, Human
uuaugggggaaagguguaugggaa

SEQ ID NO: 995020 - RNA, 20 nt, Human
uuguuucggggaaagggcaa

SEQ ID NO: 995021 - RNA, 19 nt, Human
uuucggggaaagggcaauc

SEQ ID NO: 995022 - RNA, 19 nt, Human
ccugggcccuggcaggucu

SEQ ID NO: 995023 - RNA, 20 nt, Human
cuccugggcccuggcagguc

SEQ ID NO: 995024 - RNA, 18 nt, Human
ggcaggucuguaguggga

SEQ ID NO: 995025 - RNA, 18 nt, Human
gucgagcucuccugggcc

SEQ ID NO: 995026 - RNA, 23 nt, Human
ugggugggucgagcucuccuggg

SEQ ID NO: 995027 - RNA, 20 nt, Human
uggugugccugggugggucg

SEQ ID NO: 995028 - RNA, 21 nt, Human
uuuguaucugauuuuuuuucu

SEQ ID NO: 995029 - RNA, 21 nt, Human
aucuguccagggcuggaccag

SEQ ID NO: 995030 - RNA, 27 nt, Human
caggcgccucccccucgauacagcucc

SEQ ID NO: 995031 - RNA, 18 nt, Human
ccccgccgccgcccgggc

SEQ ID NO: 995032 - RNA, 20 nt, Human
cccgcgccgccggcccccgc

SEQ ID NO: 995033 - RNA, 22 nt, Human
ccgccggcccccgccgccgccc

SEQ ID NO: 995034 - RNA, 21 nt, Human
cggcccccgccgccgcccggg

SEQ ID NO: 995035 - RNA, 22 nt, Human
cgggcagccucugccgccuccg

SEQ ID NO: 995036 - RNA, 25 nt, Human
cuccgcgcucggcccggcgcuaccc

SEQ ID NO: 995037 - RNA, 21 nt, Human
cuguccagggcuggaccaggc

SEQ ID NO: 995038 - RNA, 19 nt, Human
gaccaggcgccucccccuc

SEQ ID NO: 995039 - RNA, 22 nt, Human
gagcagcagcuguccccaggcc

SEQ ID NO: 995040 - RNA, 21 nt, Human
gggcagccucugccgccuccg

SEQ ID NO: 995041 - RNA, 24 nt, Human
uccagggcuggaccaggcgccucc

SEQ ID NO: 995042 - RNA, 20 nt, Human
uccgcgcucggcccggcgcu

SEQ ID NO: 995043 - RNA, 23 nt, Human
uguccagggcuggaccaggcgcc

SEQ ID NO: 995044 - RNA, 20 nt, Human
uuuuuuuuuuuuaagagggu

SEQ ID NO: 995045 - RNA, 18 nt, Human
uuuuuuuuuuuuuaagag

SEQ ID NO: 995046 - RNA, 28 nt, Human
uuuuuuuuuuuuuuuuuuuuuaagaggg

SEQ ID NO: 995047 - RNA, 23 nt, Human
aagcaaggacagaaaucacagaa

SEQ ID NO: 995048 - RNA, 18 nt, Human
acccuccccaccugucuc

SEQ ID NO: 995049 - RNA, 20 nt, Human
aggaggcuaaggcuguuuug

SEQ ID NO: 995050 - RNA, 22 nt, Human
aggauguuggaggcuugggggu

SEQ ID NO: 995051 - RNA, 25 nt, Human
aggccuccagccagucccacagccc

SEQ ID NO: 995052 - RNA, 18 nt, Human
cacagcccccaggccagg

SEQ ID NO: 995053 - RNA, 22 nt, Human
caggccuccagccagucccaca

SEQ ID NO: 995054 - RNA, 22 nt, Human
ccagccagucccacagccccca

SEQ ID NO: 995055 - RNA, 23 nt, Human
ccaggacagggcacaaacguccc

SEQ ID NO: 995056 - RNA, 23 nt, Human
ccaguuccugauggaaagacagg

SEQ ID NO: 995057 - RNA, 24 nt, Human
ccccacccuccccaccugucucug

SEQ ID NO: 995058 - RNA, 18 nt, Human
ccccugaggcccagagcu

SEQ ID NO: 995059 - RNA, 19 nt, Human
ccccugaggcccagagcuc

SEQ ID NO: 995060 - RNA, 20 nt, Human
cccuacccccacccucccca

SEQ ID NO: 995061 - RNA, 19 nt, Human
ccuacccccacccucccca

SEQ ID NO: 995062 - RNA, 19 nt, Human
ccuacccccacccucccca

SEQ ID NO: 995063 - RNA, 28 nt, Human
ccuccaaauguaagcaaggacagaaauu

SEQ ID NO: 995064 - RNA, 21 nt, Human
ccuguccuccaaauguaagcc

SEQ ID NO: 995065 - RNA, 24 nt, Human
cgacucaugcguggucccuacccc

SEQ ID NO: 995066 - RNA, 24 nt, Human
cguggucccuacccccacccuccc

SEQ ID NO: 995067 - RNA, 23 nt, Human
cucaugcguggucccuaccccca

SEQ ID NO: 995068 - RNA, 24 nt, Human
cucaugcguggucccuacccccac

SEQ ID NO: 995069 - RNA, 23 nt, Human
cucccucagcugcagggucucac

SEQ ID NO: 995070 - RNA, 22 nt, Human
cucugacaacugacuuccuaaa

SEQ ID NO: 995071 - RNA, 22 nt, Human
cuuaccccugaggcccagagcu

SEQ ID NO: 995072 - RNA, 20 nt, Human
cuuuaaaaaguuaaaaagaa

SEQ ID NO: 995073 - RNA, 23 nt, Human
gaaaauaggagaccucggaaaga

SEQ ID NO: 995074 - RNA, 18 nt, Human
gaaaucacagaacugugg

SEQ ID NO: 995075 - RNA, 19 nt, Human
gcaacaaggaggcuaaggc

SEQ ID NO: 995076 - RNA, 21 nt, Human
ggaaagacaggauguuggagg

SEQ ID NO: 995077 - RNA, 24 nt, Human
ggccuccagccagucccacagccc

SEQ ID NO: 995078 - RNA, 23 nt, Human
ggcuugggggucaucccaaagag

SEQ ID NO: 995079 - RNA, 19 nt, Human
ggugcugaaaggcuggcuu

SEQ ID NO: 995080 - RNA, 23 nt, Human
uaaaaagaaaauaggagaccucg

SEQ ID NO: 995081 - RNA, 18 nt, Human
uaagagaagccaguuccu

SEQ ID NO: 995082 - RNA, 22 nt, Human
uaagagaagccaguuccugaug

SEQ ID NO: 995083 - RNA, 19 nt, Human
ucaugcguggucccuaccc

SEQ ID NO: 995084 - RNA, 19 nt, Human
ucccaaagaguugggcacu

SEQ ID NO: 995085 - RNA, 22 nt, Human
ucccacagcccccaggccaggc

SEQ ID NO: 995086 - RNA, 19 nt, Human
ucccuacccccacccuccc

SEQ ID NO: 995087 - RNA, 20 nt, Human
ucccuacccccacccucccc

SEQ ID NO: 995088 - RNA, 21 nt, Human
ucccuacccccacccucccca

SEQ ID NO: 995089 - RNA, 21 nt, Human
ucucugacaacugacuuccua

SEQ ID NO: 995090 - RNA, 23 nt, Human
ucugacaacugacuuccuaaaac

SEQ ID NO: 995091 - RNA, 19 nt, Human
ugacuuccuaaaacuccac

SEQ ID NO: 995092 - RNA, 24 nt, Human
ugaggcccagagcucuagacacag

SEQ ID NO: 995093 - RNA, 21 nt, Human
uuggcauaagagaagccaguu

SEQ ID NO: 995094 - RNA, 19 nt, Human
uuggccuuuggcucuuccc

SEQ ID NO: 995095 - RNA, 19 nt, Human
uuggcucuucccgggggcu

SEQ ID NO: 995096 - RNA, 18 nt, Human
uuuugugguggcacaguc

SEQ ID NO: 995097 - RNA, 24 nt, Human
aaagugcugggauuacaggcauga

SEQ ID NO: 995098 - RNA, 24 nt, Human
aaguaggugggacuacaggcaugc

SEQ ID NO: 995099 - RNA, 19 nt, Human
aagugcugggauuacaggc

SEQ ID NO: 995100 - RNA, 21 nt, Human
aagugcugggauuacaggcau

SEQ ID NO: 995101 - RNA, 26 nt, Human
aagugcugggauuacaggcaugagcc

SEQ ID NO: 995102 - RNA, 19 nt, Human
aaugcaguggcgugaucuc

SEQ ID NO: 995103 - RNA, 21 nt, Human
aaugcaguggcgugaucucag

SEQ ID NO: 995104 - RNA, 24 nt, Human
accauguuggccaggcuggucucg

SEQ ID NO: 995105 - RNA, 18 nt, Human
accggguuucaccauguu

SEQ ID NO: 995106 - RNA, 24 nt, Human
accggguuucaccauguuggccag

SEQ ID NO: 995107 - RNA, 21 nt, Human
acugcaaccucugccucccag

SEQ ID NO: 995108 - RNA, 22 nt, Human
acugcaaccucugccucccagg

SEQ ID NO: 995109 - RNA, 20 nt, Human
agcaauucuccugcuucagc

SEQ ID NO: 995110 - RNA, 21 nt, Human
aggcaugagccaccaugcccg

SEQ ID NO: 995111 - RNA, 22 nt, Human
aguagagaccggguuucaccau

SEQ ID NO: 995112 - RNA, 18 nt, Human
agugcugggauuacaggc

SEQ ID NO: 995113 - RNA, 24 nt, Human
aguggcgugaucucagcuuacugc

SEQ ID NO: 995114 - RNA, 24 nt, Human
caaagugcugggauuacaggcaug

SEQ ID NO: 995115 - RNA, 21 nt, Human
caaauuucuuauaccaaaaug

SEQ ID NO: 995116 - RNA, 20 nt, Human
caaccucugccucccagguu

SEQ ID NO: 995117 - RNA, 21 nt, Human
caccauguuggccaggcuggu

SEQ ID NO: 995118 - RNA, 24 nt, Human
caccauguuggccaggcuggucuc

SEQ ID NO: 995119 - RNA, 27 nt, Human
caccauguuggccaggcuggucucgaa

SEQ ID NO: 995120 - RNA, 24 nt, Human
cagaggcucuucuuggggcgguuc

SEQ ID NO: 995121 - RNA, 24 nt, Human
caugagccaccaugcccggccuau

SEQ ID NO: 995122 - RNA, 24 nt, Human
cauguuggccaggcuggucucgaa

SEQ ID NO: 995123 - RNA, 23 nt, Human
ccaaagugcugggauuacaggca

SEQ ID NO: 995124 - RNA, 24 nt, Human
ccaaagugcugggauuacaggcau

SEQ ID NO: 995125 - RNA, 24 nt, Human
cccaaagugcugggauuacaggca

SEQ ID NO: 995126 - RNA, 24 nt, Human
cccaaguaggugggacuacaggca

SEQ ID NO: 995127 - RNA, 23 nt, Human
cccagguucgagcaauucuccug

SEQ ID NO: 995128 - RNA, 24 nt, Human
ccccgcacauguuccagcagcccc

SEQ ID NO: 995129 - RNA, 24 nt, Human
cccgggccagaggcucuucuuggg

SEQ ID NO: 995130 - RNA, 21 nt, Human
ccgggccagaggcucuucuug

SEQ ID NO: 995131 - RNA, 24 nt, Human
ccucccagguucgagcaauucucc

SEQ ID NO: 995132 - RNA, 23 nt, Human
ccucgcucuccgcagggucugga

SEQ ID NO: 995133 - RNA, 22 nt, Human
cgcagggucuggauggcccccg

SEQ ID NO: 995134 - RNA, 24 nt, Human
cgcccucaaaccucggcgacgcuc

SEQ ID NO: 995135 - RNA, 22 nt, Human
cggguuucaccauguuggccag

SEQ ID NO: 995136 - RNA, 23 nt, Human
cggguuucaccauguuggccagg

SEQ ID NO: 995137 - RNA, 24 nt, Human
cugcaaccucugccucccagguuc

SEQ ID NO: 995138 - RNA, 24 nt, Human
cuggaaugcaguggcgugaucuca

SEQ ID NO: 995139 - RNA, 18 nt, Human
gauuacaggcaugagcca

SEQ ID NO: 995140 - RNA, 21 nt, Human
gauuacaggcaugagccacca

SEQ ID NO: 995141 - RNA, 24 nt, Human
gauuacaggcaugagccaccaugc

SEQ ID NO: 995142 - RNA, 22 nt, Human
gcaaccucugccucccagguuc

SEQ ID NO: 995143 - RNA, 20 nt, Human
gcccaggcuggaaugcagug

SEQ ID NO: 995144 - RNA, 24 nt, Human
gcccaggcuggaaugcaguggcgu

SEQ ID NO: 995145 - RNA, 21 nt, Human
gcgcgcaaaccugggaaggga

SEQ ID NO: 995146 - RNA, 25 nt, Human
gcucugucgcccaggcuggaaugca

SEQ ID NO: 995147 - RNA, 19 nt, Human
gcuggaaugcaguggcgug

SEQ ID NO: 995148 - RNA, 23 nt, Human
gcuggucucgaacuccuggccuc

SEQ ID NO: 995149 - RNA, 23 nt, Human
ggagucuugcucugucgcccagg

SEQ ID NO: 995150 - RNA, 24 nt, Human
ggauuacaggcaugagccaccaug

SEQ ID NO: 995151 - RNA, 22 nt, Human
ggcuggaaugcaguggcgugau

SEQ ID NO: 995152 - RNA, 24 nt, Human
ggcuggucucgaacuccuggccuc

SEQ ID NO: 995153 - RNA, 22 nt, Human
ggguuucaccauguuggccagg

SEQ ID NO: 995154 - RNA, 20 nt, Human
gguccggggaggcggcccuc

SEQ ID NO: 995155 - RNA, 24 nt, Human
gucuugcucugucgcccaggcugg

SEQ ID NO: 995156 - RNA, 24 nt, Human
uaauuuuugaauuuuuaguagaga

SEQ ID NO: 995157 - RNA, 23 nt, Human
uacaggcaugagccaccaugccc

SEQ ID NO: 995158 - RNA, 21 nt, Human
uacugcaaccucugccuccca

SEQ ID NO: 995159 - RNA, 23 nt, Human
uacugcaaccucugccucccagg

SEQ ID NO: 995160 - RNA, 22 nt, Human
uagagaccggguuucaccaugu

SEQ ID NO: 995161 - RNA, 24 nt, Human
uaguagagaccggguuucaccaug

SEQ ID NO: 995162 - RNA, 24 nt, Human
uauuuuauuuuugagauggagucu

SEQ ID NO: 995163 - RNA, 27 nt, Human
ucagcuuacugcaaccucugccuccca

SEQ ID NO: 995164 - RNA, 24 nt, Human
ucccaaagugcugggauuacaggc

SEQ ID NO: 995165 - RNA, 24 nt, Human
ucccaaguaggugggacuacaggc

SEQ ID NO: 995166 - RNA, 21 nt, Human
ucccagguucgagcaauucuc

SEQ ID NO: 995167 - RNA, 24 nt, Human
ucccagguucgagcaauucuccug

SEQ ID NO: 995168 - RNA, 20 nt, Human
uccuggccucccaaagugcu

SEQ ID NO: 995169 - RNA, 24 nt, Human
ucgcccaggcuggaaugcaguggc

SEQ ID NO: 995170 - RNA, 24 nt, Human
ucucgaacuccuggccucccaaag

SEQ ID NO: 995171 - RNA, 24 nt, Human
ucugucgcccaggcuggaaugcag

SEQ ID NO: 995172 - RNA, 22 nt, Human
ucuugcucugucgcccaggcug

SEQ ID NO: 995173 - RNA, 23 nt, Human
ucuugcucugucgcccaggcugg

SEQ ID NO: 995174 - RNA, 24 nt, Human
ucuugcucugucgcccaggcugga

SEQ ID NO: 995175 - RNA, 22 nt, Human
ugagauggagucuugcucuguc

SEQ ID NO: 995176 - RNA, 21 nt, Human
ugcaguggcgugaucucagcu

SEQ ID NO: 995177 - RNA, 24 nt, Human
ugcucugucgcccaggcuggaaug

SEQ ID NO: 995178 - RNA, 20 nt, Human
ugcuucagccucccaaguag

SEQ ID NO: 995179 - RNA, 19 nt, Human
uggaaugcaguggcgugau

SEQ ID NO: 995180 - RNA, 19 nt, Human
uggaaugcaguggcgugau

SEQ ID NO: 995181 - RNA, 24 nt, Human
uggaaugcaguggcgugaucucag

SEQ ID NO: 995182 - RNA, 23 nt, Human
uggagucuugcucugucgcccag

SEQ ID NO: 995183 - RNA, 24 nt, Human
uggagucuugcucugucgcccagg

SEQ ID NO: 995184 - RNA, 24 nt, Human
uggccaggcuggucucgaacuccu

SEQ ID NO: 995185 - RNA, 23 nt, Human
uggcccccgcgcgcaaaccuggg

SEQ ID NO: 995186 - RNA, 24 nt, Human
uggcgugaucucagcuuacugcaa

SEQ ID NO: 995187 - RNA, 21 nt, Human
ugggacuacaggcaugcccca

SEQ ID NO: 995188 - RNA, 18 nt, Human
ugggauuacaggcaugag

SEQ ID NO: 995189 - RNA, 22 nt, Human
ugggauuacaggcaugagccac

SEQ ID NO: 995190 - RNA, 23 nt, Human
ugggauuacaggcaugagccacc

SEQ ID NO: 995191 - RNA, 24 nt, Human
ugggauuacaggcaugagccacca

SEQ ID NO: 995192 - RNA, 25 nt, Human
ugggauuacaggcaugagccaccau

SEQ ID NO: 995193 - RNA, 21 nt, Human
ugggguucgcagaggggcgcc

SEQ ID NO: 995194 - RNA, 19 nt, Human
uuacugcaaccucugccuc

SEQ ID NO: 995195 - RNA, 24 nt, Human
uuacugcaaccucugccucccagg

SEQ ID NO: 995196 - RNA, 25 nt, Human
uuacugcaaccucugccucccaggu

SEQ ID NO: 995197 - RNA, 24 nt, Human
uuaguagagaccggguuucaccau

SEQ ID NO: 995198 - RNA, 24 nt, Human
uuucaccauguuggccaggcuggu

SEQ ID NO: 995199 - RNA, 24 nt, Human
uuuuuaguagagaccggguuucac

SEQ ID NO: 995200 - RNA, 20 nt, Human
uuuuugaauuuuuaguagag

SEQ ID NO: 995201 - RNA, 24 nt, Human
uuuuugagauggagucuugcucug

SEQ ID NO: 995202 - RNA, 23 nt, Human
uuuuuuuuuuuuuuuuuuauuuu

SEQ ID NO: 995203 - RNA, 19 nt, Human
aacccacacccaagaacuc

SEQ ID NO: 995204 - RNA, 22 nt, Human
aacugucggccccacgcucccc

SEQ ID NO: 995205 - RNA, 20 nt, Human
aauagauagaacccacaccc

SEQ ID NO: 995206 - RNA, 20 nt, Human
accuaaaauaauuaguauca

SEQ ID NO: 995207 - RNA, 21 nt, Human
accucacaagucucuaaaacc

SEQ ID NO: 995208 - RNA, 20 nt, Human
acucagagucccgccucucc

SEQ ID NO: 995209 - RNA, 19 nt, Human
acuuucucuuggggggggg

SEQ ID NO: 995210 - RNA, 24 nt, Human
agauagaacccacacccaagaacu

SEQ ID NO: 995211 - RNA, 23 nt, Human
agccagggugccagguguauuca

SEQ ID NO: 995212 - RNA, 21 nt, Human
aguagcuuuuuuucccccucu

SEQ ID NO: 995213 - RNA, 27 nt, Human
auaacaccaagaugaguuacauucaau

SEQ ID NO: 995214 - RNA, 20 nt, Human
auggaggaaaacauauuaca

SEQ ID NO: 995215 - RNA, 21 nt, Human
auuacauccuaaauaccacca

SEQ ID NO: 995216 - RNA, 25 nt, Human
auuugacucauucaaaucucccagg

SEQ ID NO: 995217 - RNA, 24 nt, Human
auuuguguggaagauaaaacacua

SEQ ID NO: 995218 - RNA, 19 nt, Human
caauagauagaacccacac

SEQ ID NO: 995219 - RNA, 25 nt, Human
cacaggccuagguaaaggacugucu

SEQ ID NO: 995220 - RNA, 21 nt, Human
cacgcuccccucccccagccc

SEQ ID NO: 995221 - RNA, 24 nt, Human
cauaugaaauucugguagccaggg

SEQ ID NO: 995222 - RNA, 21 nt, Human
caucucucucauagcugaggg

SEQ ID NO: 995223 - RNA, 21 nt, Human
caugaggaagagagcugcccc

SEQ ID NO: 995224 - RNA, 23 nt, Human
ccaaaauacacauuuggguagua

SEQ ID NO: 995225 - RNA, 19 nt, Human
cccacacccaagaacuccu

SEQ ID NO: 995226 - RNA, 22 nt, Human
ccucucguuaucucaugaggau

SEQ ID NO: 995227 - RNA, 21 nt, Human
ccuuucugcaauuaucccuca

SEQ ID NO: 995228 - RNA, 23 nt, Human
ccuuuugccuuuucacccccaaa

SEQ ID NO: 995229 - RNA, 19 nt, Human
cuaaaaccuuucugcaauu

SEQ ID NO: 995230 - RNA, 20 nt, Human
cuaaauaccaccaaauugcc

SEQ ID NO: 995231 - RNA, 21 nt, Human
cuacaugacauaugguuaugu

SEQ ID NO: 995232 - RNA, 23 nt, Human
cuaccaagcaauucuuacaaugu

SEQ ID NO: 995233 - RNA, 24 nt, Human
cucacaagucucuaaaaccuuucu

SEQ ID NO: 995234 - RNA, 21 nt, Human
cuccuuggggccuucaauaac

SEQ ID NO: 995235 - RNA, 18 nt, Human
cucucauagcugagggau

SEQ ID NO: 995236 - RNA, 25 nt, Human
gaacccacacccaagaacuccuugg

SEQ ID NO: 995237 - RNA, 19 nt, Human
gacuuuuccagaggcuaca

SEQ ID NO: 995238 - RNA, 20 nt, Human
gacuuuuggaaacuaagaug

SEQ ID NO: 995239 - RNA, 21 nt, Human
gagagucucgggaggcagccu

SEQ ID NO: 995240 - RNA, 20 nt, Human
gcaucuaucaugcugauuuc

SEQ ID NO: 995241 - RNA, 22 nt, Human
gccaaaauacacauuuggguag

SEQ ID NO: 995242 - RNA, 21 nt, Human
gccccacgcuccccuccccca

SEQ ID NO: 995243 - RNA, 22 nt, Human
gccccacgcuccccucccccag

SEQ ID NO: 995244 - RNA, 22 nt, Human
gcccuguguacuuucucuuggg

SEQ ID NO: 995245 - RNA, 18 nt, Human
ggaugugugcuucugugu

SEQ ID NO: 995246 - RNA, 22 nt, Human
gggaaaaaaaucguuaccucau

SEQ ID NO: 995247 - RNA, 23 nt, Human
gucccugagacccuuuucguggg

SEQ ID NO: 995248 - RNA, 21 nt, Human
gucggccccacgcuccccucc

SEQ ID NO: 995249 - RNA, 22 nt, Human
uaaaacaaguggauccauguua

SEQ ID NO: 995250 - RNA, 19 nt, Human
uaaauaccaccaaauugcc

SEQ ID NO: 995251 - RNA, 25 nt, Human
uaaauaccaccaaauugccaaaaua

SEQ ID NO: 995252 - RNA, 24 nt, Human
uaauaccuaaaauaauuaguauca

SEQ ID NO: 995253 - RNA, 22 nt, Human
uagaacccacacccaagaacuc

SEQ ID NO: 995254 - RNA, 24 nt, Human
uagaugucugacauuagauaacuc

SEQ ID NO: 995255 - RNA, 23 nt, Human
uagcagaaauggaggaaaacaua

SEQ ID NO: 995256 - RNA, 24 nt, Human
uccaagcaaggagagucucgggag

SEQ ID NO: 995257 - RNA, 23 nt, Human
uccacaggccuagguaaaggacu

SEQ ID NO: 995258 - RNA, 25 nt, Human
uccuaaauaccaccaaauugccaaa

SEQ ID NO: 995259 - RNA, 21 nt, Human
ucucaagguagucgcuagccc

SEQ ID NO: 995260 - RNA, 21 nt, Human
ugacacaauauuauucugccc

SEQ ID NO: 995261 - RNA, 20 nt, Human
ugacuuccuaauuuaacucc

SEQ ID NO: 995262 - RNA, 21 nt, Human
ugacuuccuaauuuaacuccu

SEQ ID NO: 995263 - RNA, 22 nt, Human
uguacuuucucuuggggggggg

SEQ ID NO: 995264 - RNA, 21 nt, Human
uucccaccuuaucccugagcu

SEQ ID NO: 995265 - RNA, 19 nt, Human
uuccuaucaauauggagau

SEQ ID NO: 995266 - RNA, 18 nt, Human
uuugugggaugggauaag

SEQ ID NO: 995267 - RNA, 20 nt, Human
acacaggacagaagccccuc

SEQ ID NO: 995268 - RNA, 23 nt, Human
agccaguaguggaggacggcgca

SEQ ID NO: 995269 - RNA, 24 nt, Human
caacacacaggacagaagccccuc

SEQ ID NO: 995270 - RNA, 18 nt, Human
cacaacacacaggacaga

SEQ ID NO: 995271 - RNA, 23 nt, Human
cacaacacacaggacagaagccc

SEQ ID NO: 995272 - RNA, 20 nt, Human
cagcgcccauaaaacccaag

SEQ ID NO: 995273 - RNA, 25 nt, Human
cagcgcccauaaaacccaagggaga

SEQ ID NO: 995274 - RNA, 25 nt, Human
caggacagaagccccucugggccgg

SEQ ID NO: 995275 - RNA, 20 nt, Human
ccacagcgcccauaaaaccc

SEQ ID NO: 995276 - RNA, 20 nt, Human
ccauccccucccacaacaca

SEQ ID NO: 995277 - RNA, 20 nt, Human
cccaagggagaauagaagag

SEQ ID NO: 995278 - RNA, 20 nt, Human
cccacagcgcccauaaaacc

SEQ ID NO: 995279 - RNA, 22 nt, Human
cccacagcgcccauaaaaccca

SEQ ID NO: 995280 - RNA, 25 nt, Human
cccauaaaacccaagggagaauaga

SEQ ID NO: 995281 - RNA, 20 nt, Human
ccccggcccacccgaggcuc

SEQ ID NO: 995282 - RNA, 18 nt, Human
ccccucccacaacacaca

SEQ ID NO: 995283 - RNA, 26 nt, Human
ccucccacaacacacaggacagaagc

SEQ ID NO: 995284 - RNA, 20 nt, Human
ccucccauccccucccacaa

SEQ ID NO: 995285 - RNA, 21 nt, Human
ccuucagggcccacagcgccc

SEQ ID NO: 995286 - RNA, 19 nt, Human
gacagaagccccucugggc

SEQ ID NO: 995287 - RNA, 23 nt, Human
gaggacggcgcagcaaccccggc

SEQ ID NO: 995288 - RNA, 18 nt, Human
gcgccucccauccccucc

SEQ ID NO: 995289 - RNA, 24 nt, Human
uacacgcacacucgaggggcgccu

SEQ ID NO: 995290 - RNA, 19 nt, Human
uagaagagacccccugaua

SEQ ID NO: 995291 - RNA, 23 nt, Human
uagccaguaguggaggacggcgc

SEQ ID NO: 995292 - RNA, 22 nt, Human
ucccacaacacacaggacagaa

SEQ ID NO: 995293 - RNA, 18 nt, Human
ugagggcacugggcccag

SEQ ID NO: 995294 - RNA, 20 nt, Human
uuuuuuuuuuucugggccuc

SEQ ID NO: 995295 - RNA, 18 nt, Human
uuuuuuuuuuuuuuucug

SEQ ID NO: 995296 - RNA, 26 nt, Human
uuuuuuuuuuuuuuuuuuuuucuggg

SEQ ID NO: 995297 - RNA, 19 nt, Human
aaagacucacacaggggca

SEQ ID NO: 995298 - RNA, 22 nt, Human
acauggccccucccuguauccc

SEQ ID NO: 995299 - RNA, 18 nt, Human
accucucuccucccccuc

SEQ ID NO: 995300 - RNA, 26 nt, Human
accucucuccucccccucaucccuca

SEQ ID NO: 995301 - RNA, 20 nt, Human
acuggcccagccuugacccc

SEQ ID NO: 995302 - RNA, 23 nt, Human
agcacaggaaaaaggugggacgg

SEQ ID NO: 995303 - RNA, 26 nt, Human
aggcuuccugcugcuucuagcagucu

SEQ ID NO: 995304 - RNA, 26 nt, Human
agggagaguggagaggguccugacuc

SEQ ID NO: 995305 - RNA, 25 nt, Human
aggggaguggagagggagaguggag

SEQ ID NO: 995306 - RNA, 19 nt, Human
aggggcagggaggggagag

SEQ ID NO: 995307 - RNA, 22 nt, Human
auaacagaaccuccuuggacca

SEQ ID NO: 995308 - RNA, 19 nt, Human
caagcccagcaagcuuggu

SEQ ID NO: 995309 - RNA, 24 nt, Human
caagcccagcaagcuugguuggaa

SEQ ID NO: 995310 - RNA, 19 nt, Human
caagcuugguuggaagaug

SEQ ID NO: 995311 - RNA, 23 nt, Human
cacacagggccagccacagccag

SEQ ID NO: 995312 - RNA, 24 nt, Human
caccucccagucacccucccuaaa

SEQ ID NO: 995313 - RNA, 22 nt, Human
cagcaagcuugguuggaagaug

SEQ ID NO: 995314 - RNA, 25 nt, Human
cagcuccuaccucucuccuccccuc

SEQ ID NO: 995315 - RNA, 20 nt, Human
caggagccucucagccaugg

SEQ ID NO: 995316 - RNA, 21 nt, Human
caggggcagggaggggagagg

SEQ ID NO: 995317 - RNA, 21 nt, Human
caguggguagugacuguuccu

SEQ ID NO: 995318 - RNA, 18 nt, Human
caucccucagcaaccacg

SEQ ID NO: 995319 - RNA, 21 nt, Human
caugaggcaguggugugcagu

SEQ ID NO: 995320 - RNA, 19 nt, Human
cauugagucucuagugaga

SEQ ID NO: 995321 - RNA, 21 nt, Human
ccacagcaugcccaaccaagu

SEQ ID NO: 995322 - RNA, 26 nt, Human
ccagcuccuaccucucuccucccccu

SEQ ID NO: 995323 - RNA, 24 nt, Human
cccacacagggccagccacagcca

SEQ ID NO: 995324 - RNA, 18 nt, Human
cccagccuugaccccauc

SEQ ID NO: 995325 - RNA, 29 nt, Human
cccagccuugaccccaucugccgguuccg

SEQ ID NO: 995326 - RNA, 18 nt, Human
ccccacacagggccagcc

SEQ ID NO: 995327 - RNA, 20 nt, Human
ccccacacagggccagccac

SEQ ID NO: 995328 - RNA, 18 nt, Human
ccucccagucacccuccc

SEQ ID NO: 995329 - RNA, 23 nt, Human
ccucccuaaaagacucacacagg

SEQ ID NO: 995330 - RNA, 22 nt, Human
ccucuagggaggcacuuagccc

SEQ ID NO: 995331 - RNA, 22 nt, Human
cuaaaagacucacacaggggca

SEQ ID NO: 995332 - RNA, 19 nt, Human
cuagagcacaggaaaaagg

SEQ ID NO: 995333 - RNA, 23 nt, Human
cuagcagucucuucaucuccagc

SEQ ID NO: 995334 - RNA, 22 nt, Human
cucccccucaucccucagcaac

SEQ ID NO: 995335 - RNA, 18 nt, Human
cuccuaccucucuccucc

SEQ ID NO: 995336 - RNA, 23 nt, Human
cuguuggcuggguggcuggccag

SEQ ID NO: 995337 - RNA, 21 nt, Human
gaggggagagggcagaagggc

SEQ ID NO: 995338 - RNA, 18 nt, Human
gccccaggaagcaugagg

SEQ ID NO: 995339 - RNA, 20 nt, Human
gcuccuaccucucuccuccc

SEQ ID NO: 995340 - RNA, 18 nt, Human
ggaggggagagggcagaa

SEQ ID NO: 995341 - RNA, 21 nt, Human
gucacccucccuaaaagacuc

SEQ ID NO: 995342 - RNA, 18 nt, Human
guguacccaccccacaca

SEQ ID NO: 995343 - RNA, 20 nt, Human
uagagcacaggaaaaaggug

SEQ ID NO: 995344 - RNA, 18 nt, Human
uagcagucucuucaucuc

SEQ ID NO: 995345 - RNA, 24 nt, Human
ucccucagcaaccacagcaugccc

SEQ ID NO: 995346 - RNA, 20 nt, Human
uccuagaccaacuccaaccc

SEQ ID NO: 995347 - RNA, 21 nt, Human
uccuagaccaacuccaaccuu

SEQ ID NO: 995348 - RNA, 26 nt, Human
uccuagaccaacuccaaccuucuugu

SEQ ID NO: 995349 - RNA, 26 nt, Human
ucgcacauggccccucccuguauccc

SEQ ID NO: 995350 - RNA, 19 nt, Human
ucucuccucccccucaucc

SEQ ID NO: 995351 - RNA, 20 nt, Human
ucuucugucauugagucucu

SEQ ID NO: 995352 - RNA, 26 nt, Human
ugaggucucccugguucgcacauggc

SEQ ID NO: 995353 - RNA, 21 nt, Human
ugagucucuagugagaaagag

SEQ ID NO: 995354 - RNA, 23 nt, Human
ugcaagcccagcaagcuugguug

SEQ ID NO: 995355 - RNA, 22 nt, Human
uggagagggagaguggagaggg

SEQ ID NO: 995356 - RNA, 19 nt, Human
uggagcugcuggaggcccc

SEQ ID NO: 995357 - RNA, 18 nt, Human
uggaggccccaggaagca

SEQ ID NO: 995358 - RNA, 18 nt, Human
uggugugcagugagacug

SEQ ID NO: 995359 - RNA, 21 nt, Human
uguccuagaccaacuccaacc

SEQ ID NO: 995360 - RNA, 23 nt, Human
uguccuagaccaacuccaaccuu

SEQ ID NO: 995361 - RNA, 22 nt, Human
uguuggcuggguggcuggccag

SEQ ID NO: 995362 - RNA, 19 nt, Human
uuguaaagccucagggucu

SEQ ID NO: 995363 - RNA, 24 nt, Human
uuuuuuuuuuuuuuuuuuuucaag

SEQ ID NO: 995364 - RNA, 19 nt, Human
ccacgagguguguuuuauu

SEQ ID NO: 995365 - RNA, 23 nt, Human
ccaucuugcagguggcucuuccu

SEQ ID NO: 995366 - RNA, 24 nt, Human
ccgauugggggggggucccuucag

SEQ ID NO: 995367 - RNA, 20 nt, Human
cgguggcaucggcgcggagu

SEQ ID NO: 995368 - RNA, 20 nt, Human
cuauaauaucccggggcaaa

SEQ ID NO: 995369 - RNA, 19 nt, Human
gcccgagauccuggugcuc

SEQ ID NO: 995370 - RNA, 21 nt, Human
gccgguggcaucggcgcggag

SEQ ID NO: 995371 - RNA, 20 nt, Human
guguccaucuugcagguggc

SEQ ID NO: 995372 - RNA, 24 nt, Human
uaauaucccggggcaaaccggaga

SEQ ID NO: 995373 - RNA, 19 nt, Human
uccaucuugcagguggcuc

SEQ ID NO: 995374 - RNA, 18 nt, Human
ucccggggcaaaccggag

SEQ ID NO: 995375 - RNA, 19 nt, Human
uugggggggggucccuuca

SEQ ID NO: 995376 - RNA, 24 nt, Human
uuuucuauaauaucccggggcaaa

SEQ ID NO: 995377 - RNA, 20 nt, Human
aaaaaacaagccuaaaauca

SEQ ID NO: 995378 - RNA, 23 nt, Human
aaaaaacaagccuaaaaucaaga

SEQ ID NO: 995379 - RNA, 20 nt, Human
aaagcugcaaaagcaugcaa

SEQ ID NO: 995380 - RNA, 20 nt, Human
aagcaauggaagcacccauc

SEQ ID NO: 995381 - RNA, 22 nt, Human
aagcaauggaagcacccaucau

SEQ ID NO: 995382 - RNA, 19 nt, Human
aaggaaacauuggcuaccu

SEQ ID NO: 995383 - RNA, 21 nt, Human
acaaaggucaucaauggugag

SEQ ID NO: 995384 - RNA, 26 nt, Human
caacuucaugaagauuaugaagcaau

SEQ ID NO: 995385 - RNA, 24 nt, Human
caagaacuacauacacaaagguca

SEQ ID NO: 995386 - RNA, 21 nt, Human
cuaaaaucucuacaaacacau

SEQ ID NO: 995387 - RNA, 20 nt, Human
gaaaugcaaauaaacuguga

SEQ ID NO: 995388 - RNA, 22 nt, Human
gaagauagccugaaagcuugaa

SEQ ID NO: 995389 - RNA, 21 nt, Human
gccuaaaaucucuacaaacac

SEQ ID NO: 995390 - RNA, 23 nt, Human
ggugagauuauugacagcaucug

SEQ ID NO: 995391 - RNA, 22 nt, Human
ucagguaaugucgaaaucugcu

SEQ ID NO: 995392 - RNA, 20 nt, Human
uccaguauaggaugcaagaa

SEQ ID NO: 995393 - RNA, 23 nt, Human
ugaaaagcugcaaaagcaugcaa

SEQ ID NO: 995394 - RNA, 24 nt, Human
ugacuagaagauagccugaaagcu

SEQ ID NO: 995395 - RNA, 21 nt, Human
uuacuacauuagaaaugcaaa

SEQ ID NO: 995396 - RNA, 20 nt, Human
uucgcggggcugagacccag

SEQ ID NO: 995397 - RNA, 22 nt, Human
aaaccaucacaaaaggccacau

SEQ ID NO: 995398 - RNA, 19 nt, Human
aaagaaguuccuggccucc

SEQ ID NO: 995399 - RNA, 23 nt, Human
aacacuguggcauuuuccccaga

SEQ ID NO: 995400 - RNA, 24 nt, Human
aacagaaaauaaaaccaucacaaa

SEQ ID NO: 995401 - RNA, 25 nt, Human
aagcacacagagaaacuguaagcca

SEQ ID NO: 995402 - RNA, 26 nt, Human
acaaagcacacagagaaacuguaagc

SEQ ID NO: 995403 - RNA, 22 nt, Human
acagacccccaaaauggcagcc

SEQ ID NO: 995404 - RNA, 18 nt, Human
acuggcuuuugcuguccc

SEQ ID NO: 995405 - RNA, 24 nt, Human
agaaaauaaaaccaucacaaaagg

SEQ ID NO: 995406 - RNA, 23 nt, Human
agagggccucgcugccaugagga

SEQ ID NO: 995407 - RNA, 22 nt, Human
agccaagacgaugaagcagucc

SEQ ID NO: 995408 - RNA, 24 nt, Human
agcucaugccccaacaacaaccag

SEQ ID NO: 995409 - RNA, 18 nt, Human
aggaggaaccuugggcug

SEQ ID NO: 995410 - RNA, 23 nt, Human
aggggagguggaauggcucuggc

SEQ ID NO: 995411 - RNA, 21 nt, Human
agggguucagaggauagcacc

SEQ ID NO: 995412 - RNA, 24 nt, Human
aucacaaauauuuucaggccauaa

SEQ ID NO: 995413 - RNA, 22 nt, Human
augcaauuccuucuuuccuggg

SEQ ID NO: 995414 - RNA, 21 nt, Human
augcugggggaggggaggugg

SEQ ID NO: 995415 - RNA, 25 nt, Human
caaagaguuacacgucuucccagua

SEQ ID NO: 995416 - RNA, 19 nt, Human
caaauaugacagcaaccac

SEQ ID NO: 995417 - RNA, 26 nt, Human
caacaccucuccgggccccgcgaucc

SEQ ID NO: 995418 - RNA, 23 nt, Human
caacagaaagagauuuccucaua

SEQ ID NO: 995419 - RNA, 20 nt, Human
caagcaguguauacacaagc

SEQ ID NO: 995420 - RNA, 21 nt, Human
cacaaaaaggacuagagcucc

SEQ ID NO: 995421 - RNA, 21 nt, Human
cacagccugacucaaagcaag

SEQ ID NO: 995422 - RNA, 21 nt, Human
caccaugaugacugacagcuc

SEQ ID NO: 995423 - RNA, 20 nt, Human
caccugggaacacucccggg

SEQ ID NO: 995424 - RNA, 19 nt, Human
cacucagaggcauuaacag

SEQ ID NO: 995425 - RNA, 19 nt, Human
cagaaagagauuuccucau

SEQ ID NO: 995426 - RNA, 22 nt, Human
cagacccccaaaauggcagccu

SEQ ID NO: 995427 - RNA, 18 nt, Human
cagcaaccacaaagcaca

SEQ ID NO: 995428 - RNA, 25 nt, Human
cagcaaccacaaagcacacagagaa

SEQ ID NO: 995429 - RNA, 20 nt, Human
cagccaagacgaugaagcag

SEQ ID NO: 995430 - RNA, 20 nt, Human
cagcuuguuuuucugucaau

SEQ ID NO: 995431 - RNA, 19 nt, Human
cauaaguacagacccccaa

SEQ ID NO: 995432 - RNA, 18 nt, Human
caugccccaacaacaacc

SEQ ID NO: 995433 - RNA, 25 nt, Human
ccaccugggaacacucccggguuac

SEQ ID NO: 995434 - RNA, 21 nt, Human
ccaggguaccaugggaugcag

SEQ ID NO: 995435 - RNA, 21 nt, Human
cccaaagaguuacacgucuuc

SEQ ID NO: 995436 - RNA, 19 nt, Human
ccccaacaacaaccagaaa

SEQ ID NO: 995437 - RNA, 22 nt, Human
ccccgcacaccuuccaagucca

SEQ ID NO: 995438 - RNA, 20 nt, Human
cccuccuuuuuuuuuuuucc

SEQ ID NO: 995439 - RNA, 22 nt, Human
cccuuuaaaaaggcagcugguu

SEQ ID NO: 995440 - RNA, 21 nt, Human
ccuucccuaucucaucuccaa

SEQ ID NO: 995441 - RNA, 25 nt, Human
ccuugagcuucuugcagagggccuc

SEQ ID NO: 995442 - RNA, 22 nt, Human
ccuugggcugaaucugacauca

SEQ ID NO: 995443 - RNA, 21 nt, Human
cguccauuuucccugagcuuc

SEQ ID NO: 995444 - RNA, 21 nt, Human
cucagaaucacaguccaugga

SEQ ID NO: 995445 - RNA, 20 nt, Human
cucagccaagacgaugaagc

SEQ ID NO: 995446 - RNA, 20 nt, Human
cuccaacaccucuccgggcc

SEQ ID NO: 995447 - RNA, 24 nt, Human
cugagagaugcugggggaggggag

SEQ ID NO: 995448 - RNA, 18 nt, Human
cuggcuuuugcuguccca

SEQ ID NO: 995449 - RNA, 22 nt, Human
cugggggaggggagguggaaug

SEQ ID NO: 995450 - RNA, 21 nt, Human
gaaaaaccaugaacuacaaac

SEQ ID NO: 995451 - RNA, 24 nt, Human
gaaaaacuuagggggcucuaaggg

SEQ ID NO: 995452 - RNA, 19 nt, Human
gaaaaugcauuuccccucc

SEQ ID NO: 995453 - RNA, 18 nt, Human
gaagaaauccaacaaaga

SEQ ID NO: 995454 - RNA, 20 nt, Human
gacuugugugucuuuucccu

SEQ ID NO: 995455 - RNA, 21 nt, Human
gagguggaauggcucuggcuu

SEQ ID NO: 995456 - RNA, 20 nt, Human
gaugcaauuccuucuuuccu

SEQ ID NO: 995457 - RNA, 21 nt, Human
gcaaauaugacagcaaccaca

SEQ ID NO: 995458 - RNA, 20 nt, Human
gcacaccuuccaaguccaaa

SEQ ID NO: 995459 - RNA, 20 nt, Human
gggggcucuaaggggaaagu

SEQ ID NO: 995460 - RNA, 24 nt, Human
uaacagaaaauaaaaccaucacaa

SEQ ID NO: 995461 - RNA, 19 nt, Human
uaucaaagaggccaauuua

SEQ ID NO: 995462 - RNA, 24 nt, Human
uaugacagcaaccacaaagcacac

SEQ ID NO: 995463 - RNA, 22 nt, Human
ucaacuuuaagagaauuagaug

SEQ ID NO: 995464 - RNA, 23 nt, Human
ucagaggcauuaacagaacacag

SEQ ID NO: 995465 - RNA, 19 nt, Human
ucagccaagacgaugaagc

SEQ ID NO: 995466 - RNA, 25 nt, Human
ucagccaagacgaugaagcaguccu

SEQ ID NO: 995467 - RNA, 21 nt, Human
ucagucucagcagccucagaa

SEQ ID NO: 995468 - RNA, 22 nt, Human
ucccaauaccaggguaccaugg

SEQ ID NO: 995469 - RNA, 21 nt, Human
ucccugagcuuccuugagcuu

SEQ ID NO: 995470 - RNA, 21 nt, Human
ucccugagcuuccuugagcuu

SEQ ID NO: 995471 - RNA, 23 nt, Human
ucccuguggucaggaacuugccc

SEQ ID NO: 995472 - RNA, 21 nt, Human
ucucagccaagacgaugaagc

SEQ ID NO: 995473 - RNA, 25 nt, Human
ucuccaacccacgcgacuugugugu

SEQ ID NO: 995474 - RNA, 20 nt, Human
ucuccugcucagacacccuu

SEQ ID NO: 995475 - RNA, 20 nt, Human
ugaauacguccauuuucccu

SEQ ID NO: 995476 - RNA, 21 nt, Human
ugaauuacacaaaaaggacua

SEQ ID NO: 995477 - RNA, 26 nt, Human
ugacagcaaccacaaagcacacagag

SEQ ID NO: 995478 - RNA, 22 nt, Human
ugaccauugccagucucauccc

SEQ ID NO: 995479 - RNA, 18 nt, Human
ugacucaaagcaaggaug

SEQ ID NO: 995480 - RNA, 19 nt, Human
ugagagaugcugggggagg

SEQ ID NO: 995481 - RNA, 26 nt, Human
ugaggaucuggcuucacaucucugag

SEQ ID NO: 995482 - RNA, 18 nt, Human
ugaguaaaggcuguguag

SEQ ID NO: 995483 - RNA, 21 nt, Human
ugccaugaggaucuggcuuca

SEQ ID NO: 995484 - RNA, 21 nt, Human
ugccccaacaacaaccagaaa

SEQ ID NO: 995485 - RNA, 23 nt, Human
ugccccaacaacaaccagaaaac

SEQ ID NO: 995486 - RNA, 25 nt, Human
ugccccaacaacaaccagaaaacag

SEQ ID NO: 995487 - RNA, 20 nt, Human
ugcuugguaggagaggagga

SEQ ID NO: 995488 - RNA, 24 nt, Human
uggaucacaaauauuuucaggcca

SEQ ID NO: 995489 - RNA, 18 nt, Human
uggcagccuuuaucucug

SEQ ID NO: 995490 - RNA, 20 nt, Human
uggcagccuuuaucucuggg

SEQ ID NO: 995491 - RNA, 24 nt, Human
uggcauuuuccccagagcugaaga

SEQ ID NO: 995492 - RNA, 21 nt, Human
uggcucuggcuucuccaaccc

SEQ ID NO: 995493 - RNA, 27 nt, Human
ugggaaaaacuuagggggcucuaaggg

SEQ ID NO: 995494 - RNA, 18 nt, Human
ugggggaggggagguggg

SEQ ID NO: 995495 - RNA, 25 nt, Human
uguggucaggaacuugcccacagcc

SEQ ID NO: 995496 - RNA, 21 nt, Human
uguuaacagaaaauaaaacca

SEQ ID NO: 995497 - RNA, 19 nt, Human
uguugcaguggcagcugag

SEQ ID NO: 995498 - RNA, 22 nt, Human
uugccagucucaucccugcucc

SEQ ID NO: 995499 - RNA, 24 nt, Human
uuucaggccauaaguacagacccc

SEQ ID NO: 995500 - RNA, 18 nt, Human
uuuuacuccucaguucaa

SEQ ID NO: 995501 - RNA, 22 nt, Human
aggaggaggggcucucgggggc

SEQ ID NO: 995502 - RNA, 21 nt, Human
agggcagcugccaaagguuuu

SEQ ID NO: 995503 - RNA, 22 nt, Human
aucucucuccccucuccccacc

SEQ ID NO: 995504 - RNA, 19 nt, Human
caccucucuuucucucucc

SEQ ID NO: 995505 - RNA, 18 nt, Human
cagcugcacugggaacug

SEQ ID NO: 995506 - RNA, 19 nt, Human
ccaccucucuuucucucuc

SEQ ID NO: 995507 - RNA, 23 nt, Human
ccaggaggaggggcucucggggg

SEQ ID NO: 995508 - RNA, 22 nt, Human
ccccuccucuccaucucucucc

SEQ ID NO: 995509 - RNA, 20 nt, Human
ccccucuccccaccucucuu

SEQ ID NO: 995510 - RNA, 18 nt, Human
ccccucugucucucucuc

SEQ ID NO: 995511 - RNA, 19 nt, Human
cccuccuccuuucccuccc

SEQ ID NO: 995512 - RNA, 19 nt, Human
cccucucucccucucuguc

SEQ ID NO: 995513 - RNA, 20 nt, Human
cccuuucugccuccucuguc

SEQ ID NO: 995514 - RNA, 24 nt, Human
ccuccugcucuaucucucucuguc

SEQ ID NO: 995515 - RNA, 18 nt, Human
ccucucuccuucucugcc

SEQ ID NO: 995516 - RNA, 18 nt, Human
ccucucuccuucucugcc

SEQ ID NO: 995517 - RNA, 22 nt, Human
ccucucugucucucugccucuc

SEQ ID NO: 995518 - RNA, 18 nt, Human
ccucucuuccccucuguc

SEQ ID NO: 995519 - RNA, 18 nt, Human
ccugucucuuuccuucuc

SEQ ID NO: 995520 - RNA, 21 nt, Human
ccuuucccucccugaccccca

SEQ ID NO: 995521 - RNA, 24 nt, Human
ccuuucugccuccucugucucucu

SEQ ID NO: 995522 - RNA, 20 nt, Human
cgggggcugugagcagcagg

SEQ ID NO: 995523 - RNA, 24 nt, Human
cucagagugccccgaccuccugcu

SEQ ID NO: 995524 - RNA, 25 nt, Human
cucauaucucucuccccucucccca

SEQ ID NO: 995525 - RNA, 26 nt, Human
cucauaucucucuccccucuccccac

SEQ ID NO: 995526 - RNA, 24 nt, Human
cuccccucuccccaccucucuuuc

SEQ ID NO: 995527 - RNA, 24 nt, Human
cucccuccuccuuucccucccuga

SEQ ID NO: 995528 - RNA, 20 nt, Human
cucuccccaccucucuuucu

SEQ ID NO: 995529 - RNA, 20 nt, Human
cucucucccucucugucucc

SEQ ID NO: 995530 - RNA, 22 nt, Human
cucugucuccucuguuucucuc

SEQ ID NO: 995531 - RNA, 18 nt, Human
cuuuccuucucugccucu

SEQ ID NO: 995532 - RNA, 18 nt, Human
gaacugggacucagagug

SEQ ID NO: 995533 - RNA, 18 nt, Human
gaccuacagcugcacugg

SEQ ID NO: 995534 - RNA, 22 nt, Human
gagcagcaggcacgaggacuuu

SEQ ID NO: 995535 - RNA, 21 nt, Human
gccccgaccuccugcucuauc

SEQ ID NO: 995536 - RNA, 24 nt, Human
uccaggaggaggggcucucggggg

SEQ ID NO: 995537 - RNA, 20 nt, Human
uccaucucucucccuccucc

SEQ ID NO: 995538 - RNA, 21 nt, Human
ucccucucucccucucugucu

SEQ ID NO: 995539 - RNA, 18 nt, Human
ucccucucugucuccucu

SEQ ID NO: 995540 - RNA, 18 nt, Human
ucccucugucucucucuc

SEQ ID NO: 995541 - RNA, 18 nt, Human
ucccuuucugccuccucu

SEQ ID NO: 995542 - RNA, 23 nt, Human
uccucugucucucucuccucaua

SEQ ID NO: 995543 - RNA, 21 nt, Human
ucuccccaccucucuuucucu

SEQ ID NO: 995544 - RNA, 19 nt, Human
ucuccccucuccccaccuc

SEQ ID NO: 995545 - RNA, 20 nt, Human
ucucccuccuccuuuccccc

SEQ ID NO: 995546 - RNA, 19 nt, Human
ucucucuccucauaucucu

SEQ ID NO: 995547 - RNA, 22 nt, Human
ucucucucucccucugucucuc

SEQ ID NO: 995548 - RNA, 19 nt, Human
ucugccuccucugucucuc

SEQ ID NO: 995549 - RNA, 18 nt, Human
ucugccucucuccuucuc

SEQ ID NO: 995550 - RNA, 21 nt, Human
ucugccugucucuuuccuucu

SEQ ID NO: 995551 - RNA, 20 nt, Human
ucugucccucucucccucuc

SEQ ID NO: 995552 - RNA, 19 nt, Human
ucugucuccucuguuucuc

SEQ ID NO: 995553 - RNA, 18 nt, Human
ucugucucucucucccuc

SEQ ID NO: 995554 - RNA, 20 nt, Human
ucugucucucucucccucuc

SEQ ID NO: 995555 - RNA, 26 nt, Human
ucugucucucucuccucauaucucuc

SEQ ID NO: 995556 - RNA, 20 nt, Human
ucugucucucugccucucuc

SEQ ID NO: 995557 - RNA, 22 nt, Human
ucuuuccuucucugccucuuuc

SEQ ID NO: 995558 - RNA, 20 nt, Human
ucuuucucucuccccuccuc

SEQ ID NO: 995559 - RNA, 18 nt, Human
ugacgaccuacagcugca

SEQ ID NO: 995560 - RNA, 21 nt, Human
ugccaaagguuuuauucucca

SEQ ID NO: 995561 - RNA, 23 nt, Human
ugccccgaccuccugcucuaucu

SEQ ID NO: 995562 - RNA, 22 nt, Human
ugggaacugggacucagagugc

SEQ ID NO: 995563 - RNA, 18 nt, Human
ugugagcagcaggcacga

SEQ ID NO: 995564 - RNA, 21 nt, Human
uucucucuccccuccucucca

SEQ ID NO: 995565 - RNA, 22 nt, Human
uuuuuuuuugaggaagggcagc

SEQ ID NO: 995566 - RNA, 22 nt, Human
uuuuuuuuuuuugaggaagggc

SEQ ID NO: 995567 - RNA, 19 nt, Human
uuuuuuuuuuuuuugagga

SEQ ID NO: 995568 - RNA, 21 nt, Human
uuuuuuuuuuuuuuuuugagg

SEQ ID NO: 995569 - RNA, 23 nt, Human
uuuuuuuuuuuuuuuuuuuuggg

SEQ ID NO: 995570 - RNA, 23 nt, Human
aacauacucuacaacauauaaga

SEQ ID NO: 995571 - RNA, 22 nt, Human
aacauauaagaaauuauuaaag

SEQ ID NO: 995572 - RNA, 18 nt, Human
agaguucuucccagccac

SEQ ID NO: 995573 - RNA, 20 nt, Human
agaguucuucccagccaccu

SEQ ID NO: 995574 - RNA, 19 nt, Human
caaaaaaaaaaacucaucc

SEQ ID NO: 995575 - RNA, 21 nt, Human
caaaaaaaaaaacucauccag

SEQ ID NO: 995576 - RNA, 26 nt, Human
cccccaaaucuuaugcugggaacaga

SEQ ID NO: 995577 - RNA, 19 nt, Human
cucauccagguucccccaa

SEQ ID NO: 995578 - RNA, 22 nt, Human
gaugcaaaaaaaaaaacucauc

SEQ ID NO: 995579 - RNA, 22 nt, Human
gcaaaaaaaaaaacucauccag

SEQ ID NO: 995580 - RNA, 23 nt, Human
uaaaaaaauacuugaaauuuauu

SEQ ID NO: 995581 - RNA, 28 nt, Human
ugcaaaaaaaaaaacucauccagguucc

SEQ ID NO: 995582 - RNA, 19 nt, Human
uguuggagaguucuuccca

SEQ ID NO: 995583 - RNA, 21 nt, Human
aaaaacagcugggggaggggc

SEQ ID NO: 995584 - RNA, 22 nt, Human
aaaaacagcugggggaggggca

SEQ ID NO: 995585 - RNA, 23 nt, Human
aaacgggggcugggauaaaagcu

SEQ ID NO: 995586 - RNA, 18 nt, Human
aaccagguugcugagcca

SEQ ID NO: 995587 - RNA, 21 nt, Human
aacccagcccagaaccuacaa

SEQ ID NO: 995588 - RNA, 20 nt, Human
aagcacuggcaccacaggga

SEQ ID NO: 995589 - RNA, 18 nt, Human
acaaagagcugaagaggc

SEQ ID NO: 995590 - RNA, 23 nt, Human
acagaaaccacugaaggcccaag

SEQ ID NO: 995591 - RNA, 23 nt, Human
agagcugaagaggcccuggguaa

SEQ ID NO: 995592 - RNA, 19 nt, Human
caaaaaacgggggcuggga

SEQ ID NO: 995593 - RNA, 25 nt, Human
caagauuagaacccagggacucacu

SEQ ID NO: 995594 - RNA, 19 nt, Human
cacaacccagcccagaacc

SEQ ID NO: 995595 - RNA, 20 nt, Human
cacaacccagcccagaaccu

SEQ ID NO: 995596 - RNA, 21 nt, Human
cacaacccagcccagaaccua

SEQ ID NO: 995597 - RNA, 23 nt, Human
cacaggccccuccccucugccaa

SEQ ID NO: 995598 - RNA, 18 nt, Human
caccgcaaguuccgcugc

SEQ ID NO: 995599 - RNA, 25 nt, Human
cacuggcaccacagggacacagaaa

SEQ ID NO: 995600 - RNA, 19 nt, Human
cagcaaaaaacgggggcug

SEQ ID NO: 995601 - RNA, 23 nt, Human
cagcagggccaggggcggggcuc

SEQ ID NO: 995602 - RNA, 19 nt, Human
cagcuccaccuccuccagg

SEQ ID NO: 995603 - RNA, 24 nt, Human
cagcuccccagucccccacaaccc

SEQ ID NO: 995604 - RNA, 19 nt, Human
cagcugcagcuccaccucc

SEQ ID NO: 995605 - RNA, 21 nt, Human
caggccccuccccucugccaa

SEQ ID NO: 995606 - RNA, 20 nt, Human
caugccugcacggccccaca

SEQ ID NO: 995607 - RNA, 20 nt, Human
ccaagucuucucccuaaagc

SEQ ID NO: 995608 - RNA, 21 nt, Human
ccacagggacacagaaaccac

SEQ ID NO: 995609 - RNA, 23 nt, Human
ccaccugccuccucacuggggca

SEQ ID NO: 995610 - RNA, 19 nt, Human
ccagaagcacuggcaccac

SEQ ID NO: 995611 - RNA, 18 nt, Human
ccaugccugcacggcccc

SEQ ID NO: 995612 - RNA, 22 nt, Human
cccaagauuagaacccagggac

SEQ ID NO: 995613 - RNA, 26 nt, Human
cccacaacccagcccagaaccuacaa

SEQ ID NO: 995614 - RNA, 26 nt, Human
cccaccaagucuucucccuaaagcuc

SEQ ID NO: 995615 - RNA, 23 nt, Human
cccagcugcagcuccaccuccuc

SEQ ID NO: 995616 - RNA, 19 nt, Human
ccccacaacccagcccaga

SEQ ID NO: 995617 - RNA, 24 nt, Human
ccccacaacccagcccagaaccua

SEQ ID NO: 995618 - RNA, 19 nt, Human
ccccaccaagucuucuccc

SEQ ID NO: 995619 - RNA, 21 nt, Human
cccccacaacccagcccagaa

SEQ ID NO: 995620 - RNA, 20 nt, Human
ccccccgacagccaccacgc

SEQ ID NO: 995621 - RNA, 19 nt, Human
cccccgacagccaccacgc

SEQ ID NO: 995622 - RNA, 18 nt, Human
ccccuccccucugccaag

SEQ ID NO: 995623 - RNA, 21 nt, Human
cccucugccaagcccagccuc

SEQ ID NO: 995624 - RNA, 18 nt, Human
ccgccggccccucacacc

SEQ ID NO: 995625 - RNA, 22 nt, Human
ccucacaccgcaaguuccgcug

SEQ ID NO: 995626 - RNA, 21 nt, Human
ccucccagggcagggccgcag

SEQ ID NO: 995627 - RNA, 20 nt, Human
ccugagaucuuggggcuggg

SEQ ID NO: 995628 - RNA, 20 nt, Human
ccuggaaagcagcaaaaaac

SEQ ID NO: 995629 - RNA, 24 nt, Human
ccuuccguaggcagagccauggau

SEQ ID NO: 995630 - RNA, 21 nt, Human
cucacagucccagcugcagcu

SEQ ID NO: 995631 - RNA, 21 nt, Human
cuccagccccaccaagucuuc

SEQ ID NO: 995632 - RNA, 21 nt, Human
cuccccagucccccacaaccc

SEQ ID NO: 995633 - RNA, 19 nt, Human
cuccgggccccgccggccc

SEQ ID NO: 995634 - RNA, 24 nt, Human
gcaaguuccgcugcuuccccgcgc

SEQ ID NO: 995635 - RNA, 18 nt, Human
gccccacauaaauaaccg

SEQ ID NO: 995636 - RNA, 18 nt, Human
gccugcacugcccagaag

SEQ ID NO: 995637 - RNA, 21 nt, Human
gccuugaaggcagaaggcccu

SEQ ID NO: 995638 - RNA, 23 nt, Human
gcuccagccccaccaagucuucu

SEQ ID NO: 995639 - RNA, 22 nt, Human
gcucccaccuccaggccuuggu

SEQ ID NO: 995640 - RNA, 18 nt, Human
gcugggcagggcuagggc

SEQ ID NO: 995641 - RNA, 18 nt, Human
gcugggccuggcagccgc

SEQ ID NO: 995642 - RNA, 23 nt, Human
ggaagccuucggaaccucccagg

SEQ ID NO: 995643 - RNA, 20 nt, Human
ggaccugcaggucacggggc

SEQ ID NO: 995644 - RNA, 23 nt, Human
ggaugggacaagccccauggggg

SEQ ID NO: 995645 - RNA, 22 nt, Human
ggcacaggccccuccccucugc

SEQ ID NO: 995646 - RNA, 19 nt, Human
ggcugggcagggcuagggc

SEQ ID NO: 995647 - RNA, 18 nt, Human
ggcugggcugggcagggc

SEQ ID NO: 995648 - RNA, 18 nt, Human
gggcacaggccccucccc

SEQ ID NO: 995649 - RNA, 23 nt, Human
gggcacaggccccuccccucugc

SEQ ID NO: 995650 - RNA, 21 nt, Human
gggcagacgcucccaccucca

SEQ ID NO: 995651 - RNA, 18 nt, Human
gggcucggagacuggcgg

SEQ ID NO: 995652 - RNA, 19 nt, Human
gggcugggccuggcagccg

SEQ ID NO: 995653 - RNA, 20 nt, Human
gucccagcugcagcuccacc

SEQ ID NO: 995654 - RNA, 25 nt, Human
uaaagcuccugagaucuuggggcug

SEQ ID NO: 995655 - RNA, 18 nt, Human
uaaauaagagaaacagga

SEQ ID NO: 995656 - RNA, 24 nt, Human
uagaagcccagcuccccagucccc

SEQ ID NO: 995657 - RNA, 24 nt, Human
ucaggccccugguggucgccggcc

SEQ ID NO: 995658 - RNA, 21 nt, Human
uccaggccuuggucuuugcug

SEQ ID NO: 995659 - RNA, 20 nt, Human
uccccgcgcgccccccgaca

SEQ ID NO: 995660 - RNA, 24 nt, Human
uccccgcgcgccccccgacagcca

SEQ ID NO: 995661 - RNA, 22 nt, Human
uccugagaucuuggggcugggc

SEQ ID NO: 995662 - RNA, 23 nt, Human
ugagccagaguggaagucagggc

SEQ ID NO: 995663 - RNA, 23 nt, Human
ugcauuaagccccuuccguaggc

SEQ ID NO: 995664 - RNA, 25 nt, Human
uggcaccacagggacacagaaacca

SEQ ID NO: 995665 - RNA, 21 nt, Human
ugggacaagccccaugggggc

SEQ ID NO: 995666 - RNA, 24 nt, Human
uggggaggggauugguagaagccc

SEQ ID NO: 995667 - RNA, 20 nt, Human
uggggcugggcugggcaggg

SEQ ID NO: 995668 - RNA, 23 nt, Human
uugaaggcagaaggcccuggaaa

SEQ ID NO: 995669 - RNA, 22 nt, Human
uugcugagccagaguggaaguc

SEQ ID NO: 995670 - RNA, 21 nt, Human
uugguagaagcccagcucccc

SEQ ID NO: 995671 - RNA, 19 nt, Human
uuuuuuuuuuuuuuuugca

SEQ ID NO: 995672 - RNA, 18 nt, Human
uuuuuuuuuuuuuuuuug

SEQ ID NO: 995673 - RNA, 19 nt, Human
uuuuuuuuuuuuuuuuugc

SEQ ID NO: 995674 - RNA, 23 nt, Human
aaaaaaagagagagagagaagga

SEQ ID NO: 995675 - RNA, 18 nt, Human
aaacaacaaaaaucagaa

SEQ ID NO: 995676 - RNA, 22 nt, Human
aaacaacaaaaaucagaaacag

SEQ ID NO: 995677 - RNA, 23 nt, Human
aaacaagacaucuuuuaaagcaa

SEQ ID NO: 995678 - RNA, 19 nt, Human
aaacacacacacacacccc

SEQ ID NO: 995679 - RNA, 19 nt, Human
aacaacaaaaaucagaaac

SEQ ID NO: 995680 - RNA, 27 nt, Human
aacaacaaaaaucagaaacagaagaaa

SEQ ID NO: 995681 - RNA, 26 nt, Human
aacaagacaucuuuuaaagcaaagcu

SEQ ID NO: 995682 - RNA, 22 nt, Human
aaccuggcaacugagcauuaga

SEQ ID NO: 995683 - RNA, 18 nt, Human
aagaacucaagcacuggc

SEQ ID NO: 995684 - RNA, 20 nt, Human
aagaaggcaaaauggagaaa

SEQ ID NO: 995685 - RNA, 24 nt, Human
aagugcagcaauguguuccagaac

SEQ ID NO: 995686 - RNA, 22 nt, Human
acaaaccccacccacacaaagg

SEQ ID NO: 995687 - RNA, 27 nt, Human
acaacaaaaaucagaaacagaagaaaa

SEQ ID NO: 995688 - RNA, 23 nt, Human
acacaaacacacacacacacccc

SEQ ID NO: 995689 - RNA, 24 nt, Human
acacacaaacacacacacacaccc

SEQ ID NO: 995690 - RNA, 25 nt, Human
acacacacacacaaacacacacaca

SEQ ID NO: 995691 - RNA, 26 nt, Human
acacacacacacacaaacacacacaa

SEQ ID NO: 995692 - RNA, 27 nt, Human
acacacacacacacacacaaacacaca

SEQ ID NO: 995693 - RNA, 29 nt, Human
acacacacacacacacacacaaacacaca

SEQ ID NO: 995694 - RNA, 23 nt, Human
acacacacacacacacacacaca

SEQ ID NO: 995695 - RNA, 23 nt, Human
acacacacacacacacacacaca

SEQ ID NO: 995696 - RNA, 23 nt, Human
acacacacacacacacacacaca

SEQ ID NO: 995697 - RNA, 23 nt, Human
acacacacacacacacacacaca

SEQ ID NO: 995698 - RNA, 24 nt, Human
acacacacacacacacacacacaa

SEQ ID NO: 995699 - RNA, 29 nt, Human
acacacacacacacacacacacaaacaca

SEQ ID NO: 995700 - RNA, 22 nt, Human
acacacacacacaccccaaaca

SEQ ID NO: 995701 - RNA, 23 nt, Human
acacacacacaccccaaacaaca

SEQ ID NO: 995702 - RNA, 18 nt, Human
acacugcauuuaugguaa

SEQ ID NO: 995703 - RNA, 24 nt, Human
accacuacccacaaaccccaccca

SEQ ID NO: 995704 - RNA, 23 nt, Human
agaagaaaauuaaaaaaccaccc

SEQ ID NO: 995705 - RNA, 23 nt, Human
agagagagagaaggagaaagaac

SEQ ID NO: 995706 - RNA, 20 nt, Human
auuacaguaacucaaugggg

SEQ ID NO: 995707 - RNA, 18 nt, Human
auuucacaacaguuacac

SEQ ID NO: 995708 - RNA, 21 nt, Human
caaaaaucagaaacagaagaa

SEQ ID NO: 995709 - RNA, 22 nt, Human
caaaauggagaaaauauggaac

SEQ ID NO: 995710 - RNA, 25 nt, Human
caaacacacacacacaccccaaaca

SEQ ID NO: 995711 - RNA, 25 nt, Human
caacaaaaaucagaaacagaagaaa

SEQ ID NO: 995712 - RNA, 21 nt, Human
cacaaaccccacccacacaaa

SEQ ID NO: 995713 - RNA, 20 nt, Human
cacacaaacacacacacaca

SEQ ID NO: 995714 - RNA, 23 nt, Human
cacacaaacacacacacacaccc

SEQ ID NO: 995715 - RNA, 21 nt, Human
cacacacaaacacacacacac

SEQ ID NO: 995716 - RNA, 25 nt, Human
cacacacaaacacacacacacaccc

SEQ ID NO: 995717 - RNA, 30 nt, Human
cacacacacacaaacacacacacacacccu

SEQ ID NO: 995718 - RNA, 28 nt, Human
cacacacacacacacaaacacacacaca

SEQ ID NO: 995719 - RNA, 20 nt, Human
cacacacacacacacacaca

SEQ ID NO: 995720 - RNA, 20 nt, Human
cacacacacacacacacaca

SEQ ID NO: 995721 - RNA, 20 nt, Human
cacacacacacacacacaca

SEQ ID NO: 995722 - RNA, 20 nt, Human
cacacacacacacacacaca

SEQ ID NO: 995723 - RNA, 20 nt, Human
cacacacacacacacacaca

SEQ ID NO: 995724 - RNA, 20 nt, Human
cacacacacacacacacaca

SEQ ID NO: 995725 - RNA, 20 nt, Human
cacacacacacacacacaca

SEQ ID NO: 995726 - RNA, 22 nt, Human
cacacacacacacacacacaca

SEQ ID NO: 995727 - RNA, 22 nt, Human
cacacacacacacacacacaca

SEQ ID NO: 995728 - RNA, 26 nt, Human
cacacacacacacacacacacacaca

SEQ ID NO: 995729 - RNA, 26 nt, Human
cacacacacacacacacacacacaca

SEQ ID NO: 995730 - RNA, 26 nt, Human
cacacacacacacacacacacacaca

SEQ ID NO: 995731 - RNA, 24 nt, Human
cacacacacacaccccaaacaaca

SEQ ID NO: 995732 - RNA, 20 nt, Human
cacacaccccaaacaacaaa

SEQ ID NO: 995733 - RNA, 27 nt, Human
cacaccccaaacaacaaaaaucagaaa

SEQ ID NO: 995734 - RNA, 21 nt, Human
cacacugcauuuaugguaagu

SEQ ID NO: 995735 - RNA, 24 nt, Human
caccaggaccaaggccuugagagc

SEQ ID NO: 995736 - RNA, 21 nt, Human
cacccacacaaagggagucca

SEQ ID NO: 995737 - RNA, 21 nt, Human
caccccaaacaacaaaaauca

SEQ ID NO: 995738 - RNA, 22 nt, Human
cacuacccacaaaccccaccca

SEQ ID NO: 995739 - RNA, 26 nt, Human
cagaagaguuauuuaaaaaaaaaaga

SEQ ID NO: 995740 - RNA, 23 nt, Human
cauaagaaggcaaaauggagaaa

SEQ ID NO: 995741 - RNA, 21 nt, Human
ccacuacccacaaaccccacc

SEQ ID NO: 995742 - RNA, 22 nt, Human
ccacuacccacaaaccccaccc

SEQ ID NO: 995743 - RNA, 23 nt, Human
ccacuacccacaaaccccaccca

SEQ ID NO: 995744 - RNA, 20 nt, Human
cccacaaaccccacccacac

SEQ ID NO: 995745 - RNA, 25 nt, Human
cccacacaaagggaguccacgccac

SEQ ID NO: 995746 - RNA, 22 nt, Human
ccuucaccacuacccacaaacc

SEQ ID NO: 995747 - RNA, 19 nt, Human
gaaccggcccacgcguccg

SEQ ID NO: 995748 - RNA, 20 nt, Human
gaacuuaaaaaacuuuagug

SEQ ID NO: 995749 - RNA, 21 nt, Human
gaauaugaacuauacaagaca

SEQ ID NO: 995750 - RNA, 21 nt, Human
gacaucuuuuaaagcaaagcu

SEQ ID NO: 995751 - RNA, 19 nt, Human
gagaaagaacucaagcacu

SEQ ID NO: 995752 - RNA, 19 nt, Human
gagagagagagaaggagaa

SEQ ID NO: 995753 - RNA, 20 nt, Human
gcauuacaguaacucaaugg

SEQ ID NO: 995754 - RNA, 21 nt, Human
ggagaaaauauggaacuuaaa

SEQ ID NO: 995755 - RNA, 31 nt, Human
guuaaacacacacacacacacacacacacag

SEQ ID NO: 995756 - RNA, 25 nt, Human
uaaaaaaaaaagagagagagagaaa

SEQ ID NO: 995757 - RNA, 22 nt, Human
uaaaaaaccacccugccacuaa

SEQ ID NO: 995758 - RNA, 24 nt, Human
uaaaguaauuggugaaggaauccc

SEQ ID NO: 995759 - RNA, 22 nt, Human
uaagaaggcaaaauggagaaaa

SEQ ID NO: 995760 - RNA, 20 nt, Human
uaagagccucacaauccagu

SEQ ID NO: 995761 - RNA, 23 nt, Human
uaaguaaauuuaaagugcacaga

SEQ ID NO: 995762 - RNA, 22 nt, Human
uacccacaaaccccacccacac

SEQ ID NO: 995763 - RNA, 18 nt, Human
ucagccaugaauaugaac

SEQ ID NO: 995764 - RNA, 23 nt, Human
uccugauggcuugaggauuucau

SEQ ID NO: 995765 - RNA, 24 nt, Human
ugcauuacaguaacucaauggggu

SEQ ID NO: 995766 - RNA, 20 nt, Human
uggaaagggcgccacuggca

SEQ ID NO: 995767 - RNA, 23 nt, Human
uggaaccuggcaacugagcauua

SEQ ID NO: 995768 - RNA, 19 nt, Human
uguggucaaguuucagcca

SEQ ID NO: 995769 - RNA, 27 nt, Human
uguuaaacacacacacacacacacaca

SEQ ID NO: 995770 - RNA, 27 nt, Human
uguuaaacacacacacacacacacaca

SEQ ID NO: 995771 - RNA, 19 nt, Human
uucaaguucuuugguggcc

SEQ ID NO: 995772 - RNA, 25 nt, Human
uucccagaagaguuauuuaaaaaaa

SEQ ID NO: 995773 - RNA, 23 nt, Human
uuuaagaaaauuuauaaaggaca

SEQ ID NO: 995774 - RNA, 22 nt, Human
uuuucugauaucgguccuucac

SEQ ID NO: 995775 - RNA, 26 nt, Human
aaaaaggaacuugaaaauaaaaagga

SEQ ID NO: 995776 - RNA, 21 nt, Human
aagauauccguaaaaucaaag

SEQ ID NO: 995777 - RNA, 24 nt, Human
aagaugccucuguuccugcacauu

SEQ ID NO: 995778 - RNA, 18 nt, Human
aauaaaaaggagggagga

SEQ ID NO: 995779 - RNA, 20 nt, Human
acccaggaagaugccucugu

SEQ ID NO: 995780 - RNA, 24 nt, Human
agguuccagucccucuaggaagcc

SEQ ID NO: 995781 - RNA, 18 nt, Human
auggggaacagaagcaag

SEQ ID NO: 995782 - RNA, 22 nt, Human
cacacacgcaagaauucggagc

SEQ ID NO: 995783 - RNA, 22 nt, Human
cacccucccucagccucaggag

SEQ ID NO: 995784 - RNA, 18 nt, Human
cacccuggucuuccaagc

SEQ ID NO: 995785 - RNA, 24 nt, Human
cacccuggucuuccaagcugggag

SEQ ID NO: 995786 - RNA, 20 nt, Human
cagcucuuggcugucuccag

SEQ ID NO: 995787 - RNA, 19 nt, Human
ccagucccucuaggaagcc

SEQ ID NO: 995788 - RNA, 25 nt, Human
cccucagccucaggagaauuagguu

SEQ ID NO: 995789 - RNA, 23 nt, Human
cccuccacccucccucagccuca

SEQ ID NO: 995790 - RNA, 21 nt, Human
ccuugagacccuccacccucc

SEQ ID NO: 995791 - RNA, 21 nt, Human
cgcaaggagaaauaaaaagga

SEQ ID NO: 995792 - RNA, 19 nt, Human
cgcccgucccccgccccuc

SEQ ID NO: 995793 - RNA, 30 nt, Human
cuguuagugcuccuggcacuccgucguggg

SEQ ID NO: 995794 - RNA, 21 nt, Human
cuugaaaauaaaaaggaggga

SEQ ID NO: 995795 - RNA, 18 nt, Human
gagccaaacccaggaaga

SEQ ID NO: 995796 - RNA, 18 nt, Human
gcgcccgucccccgcccc

SEQ ID NO: 995797 - RNA, 19 nt, Human
ggaaaagugaggaacgggg

SEQ ID NO: 995798 - RNA, 19 nt, Human
ggacccugccaacagcugu

SEQ ID NO: 995799 - RNA, 27 nt, Human
gggaaaagugaggaacggggagccggu

SEQ ID NO: 995800 - RNA, 24 nt, Human
gggaaugaaaagggaaaagugagg

SEQ ID NO: 995801 - RNA, 21 nt, Human
gggggugggaaugaaaaggga

SEQ ID NO: 995802 - RNA, 21 nt, Human
uacgggcaguggugcagaagg

SEQ ID NO: 995803 - RNA, 18 nt, Human
ugaaaauaaaaaggaggg

SEQ ID NO: 995804 - RNA, 24 nt, Human
uggcggggcggguaaggguacggg

SEQ ID NO: 995805 - RNA, 19 nt, Human
aaggaguuccuaaggauga

SEQ ID NO: 995806 - RNA, 21 nt, Human
aaggaguuccuaaggaugaug

SEQ ID NO: 995807 - RNA, 18 nt, Human
aaguggaacgucuacccc

SEQ ID NO: 995808 - RNA, 19 nt, Human
acugggcuggagcaggggc

SEQ ID NO: 995809 - RNA, 26 nt, Human
agaccaggucuccagcuccaccuggu

SEQ ID NO: 995810 - RNA, 18 nt, Human
aggcccuagagagaccag

SEQ ID NO: 995811 - RNA, 19 nt, Human
augauguauaguagcucuu

SEQ ID NO: 995812 - RNA, 22 nt, Human
augauguauaguagcucuuuuc

SEQ ID NO: 995813 - RNA, 22 nt, Human
cacaugguccaguguggccccu

SEQ ID NO: 995814 - RNA, 22 nt, Human
cacccacgauggcccuggacca

SEQ ID NO: 995815 - RNA, 22 nt, Human
cacccacgauggcccuggaccc

SEQ ID NO: 995816 - RNA, 21 nt, Human
cagaagccaaggagcauggga

SEQ ID NO: 995817 - RNA, 18 nt, Human
cagccuucagaagccaag

SEQ ID NO: 995818 - RNA, 23 nt, Human
caucaaauguccaugagugcaag

SEQ ID NO: 995819 - RNA, 25 nt, Human
ccaguguggccccuugauccucucu

SEQ ID NO: 995820 - RNA, 19 nt, Human
ccaugagugcaagagagca

SEQ ID NO: 995821 - RNA, 18 nt, Human
cccuggaccaaacgaagg

SEQ ID NO: 995822 - RNA, 19 nt, Human
ccucucuagcgcguagaag

SEQ ID NO: 995823 - RNA, 18 nt, Human
ccuggucaaggcggaagc

SEQ ID NO: 995824 - RNA, 23 nt, Human
cuaaggaugauggcacucuccuu

SEQ ID NO: 995825 - RNA, 22 nt, Human
cuagcgcguagaagcuuccucu

SEQ ID NO: 995826 - RNA, 21 nt, Human
cuagcggcaggugggaucucc

SEQ ID NO: 995827 - RNA, 18 nt, Human
cucuuuuccuccaagucc

SEQ ID NO: 995828 - RNA, 19 nt, Human
cuuggcccagccaaagggg

SEQ ID NO: 995829 - RNA, 19 nt, Human
gagcaugggagggaggaga

SEQ ID NO: 995830 - RNA, 23 nt, Human
gcccuagagagaccaggucucca

SEQ ID NO: 995831 - RNA, 22 nt, Human
gcccucagggaccuaggcuuuu

SEQ ID NO: 995832 - RNA, 22 nt, Human
ggaccuaggcuuuucaugcugg

SEQ ID NO: 995833 - RNA, 18 nt, Human
gggaaugugagaacuggg

SEQ ID NO: 995834 - RNA, 23 nt, Human
gggaggagacauuugccagugcc

SEQ ID NO: 995835 - RNA, 22 nt, Human
guugguaugggaaaaaacaaag

SEQ ID NO: 995836 - RNA, 24 nt, Human
uaggggaggguagaagcaguuggu

SEQ ID NO: 995837 - RNA, 24 nt, Human
uaguagcucuuuuccuccaagucc

SEQ ID NO: 995838 - RNA, 23 nt, Human
ucagccuucagaagccaaggagc

SEQ ID NO: 995839 - RNA, 22 nt, Human
uccaccuggucaaggcggaagc

SEQ ID NO: 995840 - RNA, 20 nt, Human
uccauacuaccagcaucaaa

SEQ ID NO: 995841 - RNA, 22 nt, Human
uccaucauccaggauggcugcc

SEQ ID NO: 995842 - RNA, 20 nt, Human
ucuccagcuccaccugguca

SEQ ID NO: 995843 - RNA, 18 nt, Human
uggccaggcccucaggga

SEQ ID NO: 995844 - RNA, 21 nt, Human
uggucaaggcggaagcggcga

SEQ ID NO: 995845 - RNA, 21 nt, Human
uguagugggcagacuagaucc

SEQ ID NO: 995846 - RNA, 22 nt, Human
uguggccaggcccucagggacc

SEQ ID NO: 995847 - RNA, 21 nt, Human
uuggcccagccaaaggggcuu

SEQ ID NO: 995848 - RNA, 27 nt, Human
uuuccuccaaguccucuuguuugagaa

SEQ ID NO: 995849 - RNA, 21 nt, Human
uuugccagugcccaacucugg

SEQ ID NO: 995850 - RNA, 18 nt, Human
aaagagagagaagagaag

SEQ ID NO: 995851 - RNA, 18 nt, Human
agaacuuggagugggggg

SEQ ID NO: 995852 - RNA, 20 nt, Human
agaagagaaggaaaaaaaga

SEQ ID NO: 995853 - RNA, 23 nt, Human
agacggagaccuggggugaggca

SEQ ID NO: 995854 - RNA, 21 nt, Human
agagcggggaggcagagaggu

SEQ ID NO: 995855 - RNA, 20 nt, Human
agagguaugagcuggggugg

SEQ ID NO: 995856 - RNA, 21 nt, Human
agagguggaggggacagaggc

SEQ ID NO: 995857 - RNA, 22 nt, Human
agccuggggcaugguggggcuc

SEQ ID NO: 995858 - RNA, 21 nt, Human
aggaaaagagagagaagagaa

SEQ ID NO: 995859 - RNA, 18 nt, Human
aggaagagagaacuugga

SEQ ID NO: 995860 - RNA, 22 nt, Human
aggaggagaggaagggacaaaa

SEQ ID NO: 995861 - RNA, 18 nt, Human
aggcagagagguaugagc

SEQ ID NO: 995862 - RNA, 22 nt, Human
aggcagagagguaugagcuggg

SEQ ID NO: 995863 - RNA, 23 nt, Human
aggcagagagguaugagcugggg

SEQ ID NO: 995864 - RNA, 21 nt, Human
agggaggcuggaggaggaagc

SEQ ID NO: 995865 - RNA, 23 nt, Human
aggggacagaggcugcagccugg

SEQ ID NO: 995866 - RNA, 20 nt, Human
agugggggggguaggaggag

SEQ ID NO: 995867 - RNA, 22 nt, Human
augggcacugccugagacugcc

SEQ ID NO: 995868 - RNA, 19 nt, Human
caaaaugucauuggucucu

SEQ ID NO: 995869 - RNA, 22 nt, Human
caacagccauauccucaacucu

SEQ ID NO: 995870 - RNA, 21 nt, Human
caacucuuaucuccuaacccc

SEQ ID NO: 995871 - RNA, 22 nt, Human
cacccauuauaaaaaucaaagg

SEQ ID NO: 995872 - RNA, 22 nt, Human
cagccuggggcaugguggggcu

SEQ ID NO: 995873 - RNA, 19 nt, Human
cauaaaugugccuccccag

SEQ ID NO: 995874 - RNA, 21 nt, Human
ccauauccucaacucuucaaa

SEQ ID NO: 995875 - RNA, 21 nt, Human
cccaacagccauauccucaac

SEQ ID NO: 995876 - RNA, 21 nt, Human
ccuugagagcggggaggcaga

SEQ ID NO: 995877 - RNA, 18 nt, Human
cuaaccccaaaguccuag

SEQ ID NO: 995878 - RNA, 22 nt, Human
cucaacucuucaaagauccucc

SEQ ID NO: 995879 - RNA, 24 nt, Human
cucagagguggaggggacagaggc

SEQ ID NO: 995880 - RNA, 18 nt, Human
cuccucagagguggaggg

SEQ ID NO: 995881 - RNA, 20 nt, Human
cugcagccuggggcauggug

SEQ ID NO: 995882 - RNA, 27 nt, Human
gaagguguggggggaguucggagggug

SEQ ID NO: 995883 - RNA, 24 nt, Human
gagaacuuggagugggggggguag

SEQ ID NO: 995884 - RNA, 23 nt, Human
gagaagagaaggaaaaaaagagu

SEQ ID NO: 995885 - RNA, 18 nt, Human
gccaguagguuuagcaga

SEQ ID NO: 995886 - RNA, 23 nt, Human
gccgucuccucacccagggaccc

SEQ ID NO: 995887 - RNA, 20 nt, Human
gcuggaggaggaagcagaga

SEQ ID NO: 995888 - RNA, 18 nt, Human
ggaagagagaacuuggag

SEQ ID NO: 995889 - RNA, 22 nt, Human
ggacaggaagagagaacuugga

SEQ ID NO: 995890 - RNA, 19 nt, Human
ggaggaggaagcagagagg

SEQ ID NO: 995891 - RNA, 20 nt, Human
ggaggcagagagguaugagc

SEQ ID NO: 995892 - RNA, 24 nt, Human
ggaggcuggaggaggaagcagaga

SEQ ID NO: 995893 - RNA, 24 nt, Human
gggagagggaaggaggagaggaag

SEQ ID NO: 995894 - RNA, 20 nt, Human
gggggguaggaggaggucaa

SEQ ID NO: 995895 - RNA, 25 nt, Human
gggggguaggaggaggucaagggag

SEQ ID NO: 995896 - RNA, 20 nt, Human
gguggggcuccagccgucuc

SEQ ID NO: 995897 - RNA, 19 nt, Human
gugccuccccagacgcucc

SEQ ID NO: 995898 - RNA, 23 nt, Human
guggcaaaaugucauuggucucu

SEQ ID NO: 995899 - RNA, 23 nt, Human
uaaaaaaugcuauaaauugguau

SEQ ID NO: 995900 - RNA, 20 nt, Human
uagcagagagaagucuccua

SEQ ID NO: 995901 - RNA, 18 nt, Human
uaggaggaggucaaggga

SEQ ID NO: 995902 - RNA, 24 nt, Human
uagugaugaaauccagggaaggga

SEQ ID NO: 995903 - RNA, 23 nt, Human
ucaacucuucaaagauccucccc

SEQ ID NO: 995904 - RNA, 27 nt, Human
ucccaacagccauauccucaacucuuc

SEQ ID NO: 995905 - RNA, 22 nt, Human
uccucacccagggaccccacag

SEQ ID NO: 995906 - RNA, 18 nt, Human
uccuugagagcggggagg

SEQ ID NO: 995907 - RNA, 20 nt, Human
ucuccuauuucuaacagagg

SEQ ID NO: 995908 - RNA, 19 nt, Human
ugagagcggggaggcagag

SEQ ID NO: 995909 - RNA, 18 nt, Human
ugccaggugggaagaacc

SEQ ID NO: 995910 - RNA, 18 nt, Human
ugggggggguaggaggag

SEQ ID NO: 995911 - RNA, 19 nt, Human
ugggggggguaggaggagg

SEQ ID NO: 995912 - RNA, 23 nt, Human
uggggugaggcagggauacaguc

SEQ ID NO: 995913 - RNA, 24 nt, Human
ugguaucaaaagaaaacccaaggg

SEQ ID NO: 995914 - RNA, 19 nt, Human
ugguggggcuccagccguc

SEQ ID NO: 995915 - RNA, 23 nt, Human
ugugccuccccagacgcuccuca

SEQ ID NO: 995916 - RNA, 21 nt, Human
ugugggacaggaagagagaac

SEQ ID NO: 995917 - RNA, 20 nt, Human
aaaaaaaucccaaaacaaaa

SEQ ID NO: 995918 - RNA, 23 nt, Human
aaaaaaucccaaaacaaaagaaa

SEQ ID NO: 995919 - RNA, 26 nt, Human
aaaaacaggaaauauuuagaaaacac

SEQ ID NO: 995920 - RNA, 21 nt, Human
aaaaagcacuucaagaucagg

SEQ ID NO: 995921 - RNA, 24 nt, Human
aaaaagcauucccaucauuauaaa

SEQ ID NO: 995922 - RNA, 23 nt, Human
aaacaaaagaaaaagcauuccca

SEQ ID NO: 995923 - RNA, 19 nt, Human
aaacguagaggccacugcu

SEQ ID NO: 995924 - RNA, 20 nt, Human
aacaggaaaaaauauacuua

SEQ ID NO: 995925 - RNA, 21 nt, Human
aaccaaguaaaaagaacagga

SEQ ID NO: 995926 - RNA, 22 nt, Human
aagaacacaguauuguauuagu

SEQ ID NO: 995927 - RNA, 21 nt, Human
aagcaauuccagauucacuca

SEQ ID NO: 995928 - RNA, 19 nt, Human
aagugaguaaagaucuuuc

SEQ ID NO: 995929 - RNA, 22 nt, Human
aauaaauacugggcuaguacaa

SEQ ID NO: 995930 - RNA, 22 nt, Human
acaaaagaaaaagcauucccau

SEQ ID NO: 995931 - RNA, 20 nt, Human
acaaagguaucacaaauuaa

SEQ ID NO: 995932 - RNA, 25 nt, Human
accaaguaaaaagaacaggaaaaaa

SEQ ID NO: 995933 - RNA, 19 nt, Human
acucccccuccccccaaaa

SEQ ID NO: 995934 - RNA, 21 nt, Human
agaaaauuuuccaacaugaaa

SEQ ID NO: 995935 - RNA, 20 nt, Human
agacagugauggggaauguc

SEQ ID NO: 995936 - RNA, 23 nt, Human
agcaacagcgccagcaaccggag

SEQ ID NO: 995937 - RNA, 24 nt, Human
agcaauaaaaccaaguaaaaagaa

SEQ ID NO: 995938 - RNA, 20 nt, Human
agcaccuguuucacugcacu

SEQ ID NO: 995939 - RNA, 23 nt, Human
agccagcaacagcgccagcaacc

SEQ ID NO: 995940 - RNA, 23 nt, Human
aggagcaggaagcaccuguuuca

SEQ ID NO: 995941 - RNA, 23 nt, Human
aguucuguugagggcauuacagu

SEQ ID NO: 995942 - RNA, 21 nt, Human
auacucccccuccccccaaaa

SEQ ID NO: 995943 - RNA, 25 nt, Human
auacucccccuccccccaaaacccc

SEQ ID NO: 995944 - RNA, 21 nt, Human
aucauuauaaaguaggcuauu

SEQ ID NO: 995945 - RNA, 22 nt, Human
augggcuacauaguugagagau

SEQ ID NO: 995946 - RNA, 21 nt, Human
auuacccuucccacccuggaa

SEQ ID NO: 995947 - RNA, 20 nt, Human
auuguaaacucauagaccac

SEQ ID NO: 995948 - RNA, 18 nt, Human
caaaaagcuaucugaaaa

SEQ ID NO: 995949 - RNA, 24 nt, Human
caaaaagcuaucugaaaaugcugc

SEQ ID NO: 995950 - RNA, 23 nt, Human
caaaacaaaagaaaaagcauucc

SEQ ID NO: 995951 - RNA, 22 nt, Human
caaaaccccaacuucccaacaa

SEQ ID NO: 995952 - RNA, 28 nt, Human
caacaaacaaaaagcuaucugaaaaugc

SEQ ID NO: 995953 - RNA, 20 nt, Human
caaggccccuccugccagcu

SEQ ID NO: 995954 - RNA, 25 nt, Human
caagucagaauguuaaacuucguuc

SEQ ID NO: 995955 - RNA, 21 nt, Human
cacagccagcaacagcgccag

SEQ ID NO: 995956 - RNA, 23 nt, Human
cacgcgcgccccucgcugggcuc

SEQ ID NO: 995957 - RNA, 24 nt, Human
cacuucaaaaaaaaaaaucccaaa

SEQ ID NO: 995958 - RNA, 21 nt, Human
cagaaacaacuccagaaaugc

SEQ ID NO: 995959 - RNA, 24 nt, Human
cagacugaauaaaacguaaaauaa

SEQ ID NO: 995960 - RNA, 20 nt, Human
cagcgccagcaaccggagca

SEQ ID NO: 995961 - RNA, 22 nt, Human
cagcuccguccagccccgggag

SEQ ID NO: 995962 - RNA, 23 nt, Human
cagggcccgggccgcuuggcucc

SEQ ID NO: 995963 - RNA, 26 nt, Human
ccaaaacaaaagaaaaagcauuccca

SEQ ID NO: 995964 - RNA, 18 nt, Human
ccaaaaccccaacuuccc

SEQ ID NO: 995965 - RNA, 24 nt, Human
ccaacaaacaaaaagcuaucugaa

SEQ ID NO: 995966 - RNA, 19 nt, Human
ccacagccagcaacagcgg

SEQ ID NO: 995967 - RNA, 21 nt, Human
ccaucggcaaauuaaaucuga

SEQ ID NO: 995968 - RNA, 24 nt, Human
ccaucggcaaauuaaaucugauaa

SEQ ID NO: 995969 - RNA, 21 nt, Human
cccaaaacaaaagaaaaagca

SEQ ID NO: 995970 - RNA, 24 nt, Human
cccaacuaacaacugaacauagcc

SEQ ID NO: 995971 - RNA, 24 nt, Human
cccaucauuauaaaguaggcuauu

SEQ ID NO: 995972 - RNA, 25 nt, Human
cccaucggcaaauuaaaucugauaa

SEQ ID NO: 995973 - RNA, 22 nt, Human
cccccaaaaccccaacuuccca

SEQ ID NO: 995974 - RNA, 23 nt, Human
cccccaaaaccccaacuucccaa

SEQ ID NO: 995975 - RNA, 25 nt, Human
cccccaaaaccccaacuucccaaca

SEQ ID NO: 995976 - RNA, 21 nt, Human
ccccccaaaaccccaacuucc

SEQ ID NO: 995977 - RNA, 20 nt, Human
cccccuccccccaaaacccc

SEQ ID NO: 995978 - RNA, 21 nt, Human
ccccgcgagcaggagggcgag

SEQ ID NO: 995979 - RNA, 19 nt, Human
ccccgggagcgcacgugac

SEQ ID NO: 995980 - RNA, 25 nt, Human
ccccucgcugggcucccugcccccc

SEQ ID NO: 995981 - RNA, 21 nt, Human
cccgcgcgugcgcaguggccg

SEQ ID NO: 995982 - RNA, 24 nt, Human
cccugccccccggcugccccgcgg

SEQ ID NO: 995983 - RNA, 18 nt, Human
cccuucccacccuggaaa

SEQ ID NO: 995984 - RNA, 19 nt, Human
ccgccgccacagccagcaa

SEQ ID NO: 995985 - RNA, 23 nt, Human
ccggcugccccgcggcggcggag

SEQ ID NO: 995986 - RNA, 19 nt, Human
ccuccccccaaaaccccaa

SEQ ID NO: 995987 - RNA, 22 nt, Human
ccuccccccaaaaccccaacuu

SEQ ID NO: 995988 - RNA, 23 nt, Human
ccuuuagauuuaagguaauuaga

SEQ ID NO: 995989 - RNA, 20 nt, Human
ccuuuugccacaggccugug

SEQ ID NO: 995990 - RNA, 18 nt, Human
cgcagucccauggccgcg

SEQ ID NO: 995991 - RNA, 18 nt, Human
cgccacagccagcaacag

SEQ ID NO: 995992 - RNA, 25 nt, Human
cguacuaauacucccccucccccca

SEQ ID NO: 995993 - RNA, 22 nt, Human
cuaauacucccccuccccccaa

SEQ ID NO: 995994 - RNA, 20 nt, Human
cucaggacaaggaacaugau

SEQ ID NO: 995995 - RNA, 18 nt, Human
cucgcugggcucccugcc

SEQ ID NO: 995996 - RNA, 23 nt, Human
cuggcacaaaaaguuaaauuuca

SEQ ID NO: 995997 - RNA, 24 nt, Human
cuuuauguacaaguuacugcaaag

SEQ ID NO: 995998 - RNA, 22 nt, Human
gaagacgcgcucagggcccggg

SEQ ID NO: 995999 - RNA, 18 nt, Human
gagauugccaagccauaa

SEQ ID NO: 996000 - RNA, 20 nt, Human
gagcacaggcguggucacca

SEQ ID NO: 996001 - RNA, 22 nt, Human
gcacuuugcucuaauuuucaca

SEQ ID NO: 996002 - RNA, 22 nt, Human
gcagaaaauuuuccaacaugaa

SEQ ID NO: 996003 - RNA, 23 nt, Human
gccccgcggcggcggaggcagcg

SEQ ID NO: 996004 - RNA, 19 nt, Human
gccccuccugccagcuccg

SEQ ID NO: 996005 - RNA, 21 nt, Human
gccugugggcaagaugauuuu

SEQ ID NO: 996006 - RNA, 21 nt, Human
gcugggcucccugccccccgg

SEQ ID NO: 996007 - RNA, 18 nt, Human
gcuuugaugauuuuaggu

SEQ ID NO: 996008 - RNA, 20 nt, Human
ggcggcggaggcagcgcgaa

SEQ ID NO: 996009 - RNA, 24 nt, Human
gugacgucgucccgcgcgugcgca

SEQ ID NO: 996010 - RNA, 25 nt, Human
uaaaacagauuuauauuacaaagca

SEQ ID NO: 996011 - RNA, 19 nt, Human
uaaaauaacacaguuugca

SEQ ID NO: 996012 - RNA, 21 nt, Human
uaaaucuucagcauauucaua

SEQ ID NO: 996013 - RNA, 24 nt, Human
uaagaauuaaaugaggguauggaa

SEQ ID NO: 996014 - RNA, 21 nt, Human
uaagcaaugguuuagauaaaa

SEQ ID NO: 996015 - RNA, 23 nt, Human
uaaucaggaccuaucauaguuag

SEQ ID NO: 996016 - RNA, 23 nt, Human
uaauggauguaugucucuguaac

SEQ ID NO: 996017 - RNA, 24 nt, Human
uaauuuacaucacagaaacaacuc

SEQ ID NO: 996018 - RNA, 19 nt, Human
uacaguuuuacaaaugaaa

SEQ ID NO: 996019 - RNA, 21 nt, Human
uacugggcuaguacaaaagcu

SEQ ID NO: 996020 - RNA, 23 nt, Human
uaguacagacaacccaguuuaac

SEQ ID NO: 996021 - RNA, 19 nt, Human
uauaaaaccuggaagcuua

SEQ ID NO: 996022 - RNA, 24 nt, Human
uauaaaguaggcuauuccaugcaa

SEQ ID NO: 996023 - RNA, 24 nt, Human
uaucaagucagaauguuaaacuuc

SEQ ID NO: 996024 - RNA, 24 nt, Human
uauucauucauggaaaaacacacu

SEQ ID NO: 996025 - RNA, 21 nt, Human
ucaaucuuucccaacuaacaa

SEQ ID NO: 996026 - RNA, 20 nt, Human
uccaacaugaaagcuagaaa

SEQ ID NO: 996027 - RNA, 22 nt, Human
uccaugaaaagaacacaauaau

SEQ ID NO: 996028 - RNA, 18 nt, Human
ucccaaaacaaaagaaaa

SEQ ID NO: 996029 - RNA, 18 nt, Human
ucccccuccccccaaaac

SEQ ID NO: 996030 - RNA, 21 nt, Human
ucccccuccccccaaaacccc

SEQ ID NO: 996031 - RNA, 22 nt, Human
ucccgcgcgugcgcaguggccg

SEQ ID NO: 996032 - RNA, 21 nt, Human
uccuggccgccgccacagcca

SEQ ID NO: 996033 - RNA, 21 nt, Human
ucuaaugacagauaaaggcuc

SEQ ID NO: 996034 - RNA, 19 nt, Human
ucucuguaacaagaugcuu

SEQ ID NO: 996035 - RNA, 25 nt, Human
ucucuguaacaagaugcuuaagcca

SEQ ID NO: 996036 - RNA, 22 nt, Human
ucugaaaaugcugccaugcuaa

SEQ ID NO: 996037 - RNA, 21 nt, Human
ugaaaaaauuuuguaaaccgc

SEQ ID NO: 996038 - RNA, 21 nt, Human
ugaagauggguauaauaguac

SEQ ID NO: 996039 - RNA, 19 nt, Human
ugauaacucaaucuuuccc

SEQ ID NO: 996040 - RNA, 19 nt, Human
uggccgggcaccggcuggg

SEQ ID NO: 996041 - RNA, 21 nt, Human
uguuucacugcacuugcccau

SEQ ID NO: 996042 - RNA, 20 nt, Human
uuaaagaacacaguauugua

SEQ ID NO: 996043 - RNA, 21 nt, Human
uucuuuaguaaucaggaccua

SEQ ID NO: 996044 - RNA, 20 nt, Human
uuuuccaacaugaaagcuag

SEQ ID NO: 996045 - RNA, 23 nt, Human
uuuuuuuuuuuuuuuuuuacaag

SEQ ID NO: 996046 - RNA, 20 nt, Human
auccagugcacaagcaguuc

SEQ ID NO: 996047 - RNA, 20 nt, Human
uggggccacauccagugcac

SEQ ID NO: 996048 - RNA, 18 nt, Human
aagaggcuggggugaggg

SEQ ID NO: 996049 - RNA, 21 nt, Human
aagcagcguuugccccagaac

SEQ ID NO: 996050 - RNA, 20 nt, Human
accccggagccuucgagccu

SEQ ID NO: 996051 - RNA, 19 nt, Human
acgaagcagcguuugcccc

SEQ ID NO: 996052 - RNA, 24 nt, Human
acgaagcagcguuugccccagaac

SEQ ID NO: 996053 - RNA, 19 nt, Human
acgcugggcacagaaggcc

SEQ ID NO: 996054 - RNA, 20 nt, Human
agaggcaggggggugggagg

SEQ ID NO: 996055 - RNA, 21 nt, Human
agaggcaggggggugggaggg

SEQ ID NO: 996056 - RNA, 18 nt, Human
aggaaucagggauauccu

SEQ ID NO: 996057 - RNA, 18 nt, Human
aggcaggggggugggagg

SEQ ID NO: 996058 - RNA, 19 nt, Human
aggcaggggggugggaggg

SEQ ID NO: 996059 - RNA, 21 nt, Human
aggcaggggggugggaggggc

SEQ ID NO: 996060 - RNA, 18 nt, Human
aggccaaaagggcaucua

SEQ ID NO: 996061 - RNA, 24 nt, Human
aggcuggggugagggugagcuggg

SEQ ID NO: 996062 - RNA, 21 nt, Human
caaggcccagggcaggugugc

SEQ ID NO: 996063 - RNA, 20 nt, Human
caaguacaaacgcugggcac

SEQ ID NO: 996064 - RNA, 22 nt, Human
cacgaagcagcguuugccccag

SEQ ID NO: 996065 - RNA, 27 nt, Human
cagagaggcagcccucagggcuccccc

SEQ ID NO: 996066 - RNA, 18 nt, Human
cagcguuugccccagaac

SEQ ID NO: 996067 - RNA, 18 nt, Human
cagcuuccaagaaacccc

SEQ ID NO: 996068 - RNA, 21 nt, Human
cagggcucccccacacccucc

SEQ ID NO: 996069 - RNA, 19 nt, Human
cauggcccuucagagaggc

SEQ ID NO: 996070 - RNA, 23 nt, Human
ccauggcccuucagagaggcagg

SEQ ID NO: 996071 - RNA, 18 nt, Human
cccacuguugggggaggc

SEQ ID NO: 996072 - RNA, 22 nt, Human
ccccagaacccagucaaggccc

SEQ ID NO: 996073 - RNA, 24 nt, Human
ccccagaacccagucaaggcccag

SEQ ID NO: 996074 - RNA, 25 nt, Human
ccucagggcucccccacacccuccu

SEQ ID NO: 996075 - RNA, 24 nt, Human
ccucgcucccucacaaaggccaaa

SEQ ID NO: 996076 - RNA, 22 nt, Human
ccuuagagggggcccuuggggg

SEQ ID NO: 996077 - RNA, 22 nt, Human
cgccccuuccucugggaucucc

SEQ ID NO: 996078 - RNA, 20 nt, Human
cuccuggggccugcacgggu

SEQ ID NO: 996079 - RNA, 20 nt, Human
cuggggugagggugagcugg

SEQ ID NO: 996080 - RNA, 22 nt, Human
cuuagagggggcccuuggggga

SEQ ID NO: 996081 - RNA, 18 nt, Human
gagagggccggggccagu

SEQ ID NO: 996082 - RNA, 21 nt, Human
gcaggggggugggaggggccg

SEQ ID NO: 996083 - RNA, 18 nt, Human
ggaagaggcuggggugag

SEQ ID NO: 996084 - RNA, 19 nt, Human
ggagcccaggaaucaggga

SEQ ID NO: 996085 - RNA, 20 nt, Human
ggaggaaaugggcccuugga

SEQ ID NO: 996086 - RNA, 19 nt, Human
ggaggcaaguacaaacgcu

SEQ ID NO: 996087 - RNA, 19 nt, Human
ggaguguguggcaggcccc

SEQ ID NO: 996088 - RNA, 24 nt, Human
ggcagagaggcagcccucagggcu

SEQ ID NO: 996089 - RNA, 18 nt, Human
ggcucccccacacccucc

SEQ ID NO: 996090 - RNA, 22 nt, Human
gggaggcaaguacaaacgcugg

SEQ ID NO: 996091 - RNA, 20 nt, Human
gggaguguguggcaggcccc

SEQ ID NO: 996092 - RNA, 21 nt, Human
gggaguguguggcaggccccu

SEQ ID NO: 996093 - RNA, 22 nt, Human
gggcaggugugcggagagggcc

SEQ ID NO: 996094 - RNA, 18 nt, Human
gggcaucuaggaggaaau

SEQ ID NO: 996095 - RNA, 24 nt, Human
gggccggggccagucgugggaaga

SEQ ID NO: 996096 - RNA, 19 nt, Human
gggcucccccacacccucc

SEQ ID NO: 996097 - RNA, 19 nt, Human
ggggaagaggcugggguga

SEQ ID NO: 996098 - RNA, 26 nt, Human
ggguggaggggagugagagccagcuu

SEQ ID NO: 996099 - RNA, 19 nt, Human
gggugggaggggccggugu

SEQ ID NO: 996100 - RNA, 20 nt, Human
guggggaagaggcuggggug

SEQ ID NO: 996101 - RNA, 19 nt, Human
uaccccggagccuucgagc

SEQ ID NO: 996102 - RNA, 20 nt, Human
ucagagaggcaggggggugg

SEQ ID NO: 996103 - RNA, 20 nt, Human
uccuaccucuagcugagggu

SEQ ID NO: 996104 - RNA, 23 nt, Human
ucgcucccucacaaaggccaaaa

SEQ ID NO: 996105 - RNA, 19 nt, Human
ucuaggaggaaaugggccc

SEQ ID NO: 996106 - RNA, 21 nt, Human
ugacuggcagagaggcagccc

SEQ ID NO: 996107 - RNA, 22 nt, Human
ugagcugggaguguguggcagg

SEQ ID NO: 996108 - RNA, 21 nt, Human
uggaggggagugagagccagc

SEQ ID NO: 996109 - RNA, 22 nt, Human
uggcagagaggcagcccucagg

SEQ ID NO: 996110 - RNA, 18 nt, Human
ugggaagagggugugagg

SEQ ID NO: 996111 - RNA, 19 nt, Human
ugggagcccaggaaucagg

SEQ ID NO: 996112 - RNA, 19 nt, Human
ugggcccuuggagccaggg

SEQ ID NO: 996113 - RNA, 23 nt, Human
uggggaagaggcuggggugaggg

SEQ ID NO: 996114 - RNA, 20 nt, Human
ugggggaggcagugaguuuu

SEQ ID NO: 996115 - RNA, 22 nt, Human
ugucacaggagcccagcagaag

SEQ ID NO: 996116 - RNA, 22 nt, Human
ugucuugugcccccgggggcca

SEQ ID NO: 996117 - RNA, 19 nt, Human
ugugcggagagggccgggg

SEQ ID NO: 996118 - RNA, 21 nt, Human
uguguggcaggccccugcggc

SEQ ID NO: 996119 - RNA, 22 nt, Human
aaagcggaccaaggcccgcgga

SEQ ID NO: 996120 - RNA, 23 nt, Human
aaaguccuuucccacccccuaac

SEQ ID NO: 996121 - RNA, 19 nt, Human
aaccacgacaacagcuagc

SEQ ID NO: 996122 - RNA, 24 nt, Human
aaguccuuucccacccccuaacgg

SEQ ID NO: 996123 - RNA, 19 nt, Human
caauaggcuuucugggguu

SEQ ID NO: 996124 - RNA, 18 nt, Human
cccgcccgcccuccucuc

SEQ ID NO: 996125 - RNA, 19 nt, Human
cccgcggacggcgcaacca

SEQ ID NO: 996126 - RNA, 22 nt, Human
cccuccucucgcagccgcagcc

SEQ ID NO: 996127 - RNA, 18 nt, Human
ccggacccuaaaggaccg

SEQ ID NO: 996128 - RNA, 23 nt, Human
ccucccgcgggcgcgcgcggagc

SEQ ID NO: 996129 - RNA, 28 nt, Human
ccuccgagcaaccacgacaacagcuagc

SEQ ID NO: 996130 - RNA, 20 nt, Human
cgaccuauggcaaaguccuu

SEQ ID NO: 996131 - RNA, 19 nt, Human
cgagaagaagccugcgucu

SEQ ID NO: 996132 - RNA, 21 nt, Human
cggaccaaggcccgcggacgg

SEQ ID NO: 996133 - RNA, 24 nt, Human
cgggcccggacccuaaaggaccgg

SEQ ID NO: 996134 - RNA, 24 nt, Human
cuaaaggaccgggcgguuccuccu

SEQ ID NO: 996135 - RNA, 24 nt, Human
cugcacacgugccuccgagcaacc

SEQ ID NO: 996136 - RNA, 18 nt, Human
gacaacagcuagccuccc

SEQ ID NO: 996137 - RNA, 19 nt, Human
gaccuauggcaaaguccuu

SEQ ID NO: 996138 - RNA, 18 nt, Human
ggcucugggagagagagg

SEQ ID NO: 996139 - RNA, 23 nt, Human
ucccgcccgcccuccucucgcag

SEQ ID NO: 996140 - RNA, 24 nt, Human
uggcaaaguccuuucccacccccu

SEQ ID NO: 996141 - RNA, 20 nt, Human
ugggaagacuaucuuuuuac

SEQ ID NO: 996142 - RNA, 23 nt, Human
uucccacccccuaacggaggcuc

SEQ ID NO: 996143 - RNA, 23 nt, Human
uuccccucgccgcuuccgggacu

SEQ ID NO: 996144 - RNA, 22 nt, Human
aaaaaaaaaaagaauccaaagg

SEQ ID NO: 996145 - RNA, 28 nt, Human
aaaagaauccaaaggcuaaacaugaugg

SEQ ID NO: 996146 - RNA, 18 nt, Human
aaaguggaaaaugugcag

SEQ ID NO: 996147 - RNA, 22 nt, Human
aacauggccaaaugcugcuccu

SEQ ID NO: 996148 - RNA, 21 nt, Human
aagaacauggccaaaugcugc

SEQ ID NO: 996149 - RNA, 24 nt, Human
aagccaacuccggaucacugccag

SEQ ID NO: 996150 - RNA, 19 nt, Human
acaaaagaacauggccaaa

SEQ ID NO: 996151 - RNA, 22 nt, Human
acagcauucuuacaguuugugc

SEQ ID NO: 996152 - RNA, 21 nt, Human
acugcuuucugacuggcuguu

SEQ ID NO: 996153 - RNA, 19 nt, Human
agaaaaaaaggggcggggg

SEQ ID NO: 996154 - RNA, 21 nt, Human
aggaauagaaggaaaaaaaaa

SEQ ID NO: 996155 - RNA, 18 nt, Human
agggcccguccugggugg

SEQ ID NO: 996156 - RNA, 21 nt, Human
aggggcggggggggggguugg

SEQ ID NO: 996157 - RNA, 27 nt, Human
auagaaaaacaaaagaacauggccaaa

SEQ ID NO: 996158 - RNA, 27 nt, Human
auuuuuuuuuuuuuuuuuaaacugggg

SEQ ID NO: 996159 - RNA, 24 nt, Human
caaaauggaaagccuauucaaagu

SEQ ID NO: 996160 - RNA, 24 nt, Human
caacaugaaaaaacuggugcaaca

SEQ ID NO: 996161 - RNA, 25 nt, Human
caacaugaaaaaacuggugcaacac

SEQ ID NO: 996162 - RNA, 19 nt, Human
caagaagguucaaagugag

SEQ ID NO: 996163 - RNA, 18 nt, Human
caccuuaacagcagaucc

SEQ ID NO: 996164 - RNA, 22 nt, Human
cacgauaccacaauaagguagg

SEQ ID NO: 996165 - RNA, 20 nt, Human
cagagaauagcuguucccac

SEQ ID NO: 996166 - RNA, 23 nt, Human
caggaaaaugcugaccccucuuu

SEQ ID NO: 996167 - RNA, 22 nt, Human
ccaaaacaaaauggaaagccua

SEQ ID NO: 996168 - RNA, 20 nt, Human
ccaggggcugagggccaugc

SEQ ID NO: 996169 - RNA, 23 nt, Human
cccauacugccgaugagacggag

SEQ ID NO: 996170 - RNA, 19 nt, Human
cccuggcugcaggcggcga

SEQ ID NO: 996171 - RNA, 24 nt, Human
cccuggcugcaggcggcgagcccc

SEQ ID NO: 996172 - RNA, 19 nt, Human
ccucgcgucugaggucccg

SEQ ID NO: 996173 - RNA, 19 nt, Human
cgacaagucacuuacaaca

SEQ ID NO: 996174 - RNA, 19 nt, Human
cgcacgccuccuaagaaca

SEQ ID NO: 996175 - RNA, 19 nt, Human
cgccuccuaagaacacccu

SEQ ID NO: 996176 - RNA, 21 nt, Human
cggucggugagucugcaucua

SEQ ID NO: 996177 - RNA, 21 nt, Human
cucaaaaaacaaacaaaaaaa

SEQ ID NO: 996178 - RNA, 26 nt, Human
cucuccguuauuuuguggcuguugau

SEQ ID NO: 996179 - RNA, 24 nt, Human
gaaaaacaaaagaacauggccaaa

SEQ ID NO: 996180 - RNA, 18 nt, Human
gaacauggccaaaugcug

SEQ ID NO: 996181 - RNA, 18 nt, Human
gaaggaaaaaaaaaaaaa

SEQ ID NO: 996182 - RNA, 23 nt, Human
gagcgcacgccuccuaagaacac

SEQ ID NO: 996183 - RNA, 20 nt, Human
gauccugaaguacugugguu

SEQ ID NO: 996184 - RNA, 22 nt, Human
gcagagaauagcuguucccaca

SEQ ID NO: 996185 - RNA, 22 nt, Human
gccacaguuuuucaaacugcag

SEQ ID NO: 996186 - RNA, 21 nt, Human
gcccguccuggguggcaggug

SEQ ID NO: 996187 - RNA, 22 nt, Human
gcuccuuuuucccagagauaga

SEQ ID NO: 996188 - RNA, 25 nt, Human
ggaaaaaaaaaaaaagaauccaaag

SEQ ID NO: 996189 - RNA, 18 nt, Human
ggacagcugccccccaua

SEQ ID NO: 996190 - RNA, 21 nt, Human
ggacaggaauagaaaaacaaa

SEQ ID NO: 996191 - RNA, 18 nt, Human
ggcugcaggcggcgagcc

SEQ ID NO: 996192 - RNA, 19 nt, Human
gggcugagggccaugcuuc

SEQ ID NO: 996193 - RNA, 21 nt, Human
ggggcggggggggggguuggg

SEQ ID NO: 996194 - RNA, 18 nt, Human
gggggggggguuggggag

SEQ ID NO: 996195 - RNA, 19 nt, Human
gucccggucggugagucug

SEQ ID NO: 996196 - RNA, 21 nt, Human
uaaaugauggaagaguaaaca

SEQ ID NO: 996197 - RNA, 21 nt, Human
uaagguaggcaacaucaaggc

SEQ ID NO: 996198 - RNA, 21 nt, Human
uaccacaauaagguaggcaac

SEQ ID NO: 996199 - RNA, 18 nt, Human
uagaaaaacaaaagaaca

SEQ ID NO: 996200 - RNA, 26 nt, Human
uagaaaaacaaaagaacauggccaaa

SEQ ID NO: 996201 - RNA, 23 nt, Human
uagaaggaaaaaaaaaaaaagaa

SEQ ID NO: 996202 - RNA, 22 nt, Human
uaguagagagcgcacgccuccu

SEQ ID NO: 996203 - RNA, 23 nt, Human
ucaaagugagaaccuccaaaaca

SEQ ID NO: 996204 - RNA, 20 nt, Human
ucccagagauagaaagcauc

SEQ ID NO: 996205 - RNA, 20 nt, Human
uccgacaagucacuuacaac

SEQ ID NO: 996206 - RNA, 21 nt, Human
uccgacaagucacuuacaaca

SEQ ID NO: 996207 - RNA, 20 nt, Human
uccuggguggcaggugggcu

SEQ ID NO: 996208 - RNA, 25 nt, Human
ucuuacaguuugugcuagaaucacu

SEQ ID NO: 996209 - RNA, 21 nt, Human
ucuuugauuugggacaggaau

SEQ ID NO: 996210 - RNA, 21 nt, Human
ugacugguuuuugcuguucug

SEQ ID NO: 996211 - RNA, 19 nt, Human
ugagaaccuccaaaacaaa

SEQ ID NO: 996212 - RNA, 18 nt, Human
ugcaaagggaaaagcuca

SEQ ID NO: 996213 - RNA, 18 nt, Human
ugccaggggcugagggcc

SEQ ID NO: 996214 - RNA, 23 nt, Human
ugcuauaacaggaaaaugcugac

SEQ ID NO: 996215 - RNA, 19 nt, Human
uggcugcaggcggcgagcc

SEQ ID NO: 996216 - RNA, 26 nt, Human
ugggguuuuucuuuuuuuccucuaag

SEQ ID NO: 996217 - RNA, 19 nt, Human
uguaguaucagugcuaaaa

SEQ ID NO: 996218 - RNA, 24 nt, Human
uucaaagugagaaccuccaaaaca

SEQ ID NO: 996219 - RNA, 18 nt, Human
uucaaguauucaaacuga

SEQ ID NO: 996220 - RNA, 19 nt, Human
uuggggaggaauagaagga

SEQ ID NO: 996221 - RNA, 22 nt, Human
uuuuacaacaugaaaaaacugg

SEQ ID NO: 996222 - RNA, 21 nt, Human
uuuuuuuuuuuuuuaaacugg

SEQ ID NO: 996223 - RNA, 21 nt, Human
aaaaacacaauaagcaacgua

SEQ ID NO: 996224 - RNA, 24 nt, Human
aaaauacaaacaacuuaauugcug

SEQ ID NO: 996225 - RNA, 18 nt, Human
aacuuacagguuucagcc

SEQ ID NO: 996226 - RNA, 18 nt, Human
aagaaaauauuuacauug

SEQ ID NO: 996227 - RNA, 19 nt, Human
acagcacaugauaugaaaa

SEQ ID NO: 996228 - RNA, 24 nt, Human
acauauacugugguuugauuugga

SEQ ID NO: 996229 - RNA, 23 nt, Human
agcacaugauaugaaaacuuaca

SEQ ID NO: 996230 - RNA, 21 nt, Human
aggggcgccgggacccagagc

SEQ ID NO: 996231 - RNA, 20 nt, Human
auaaaacagcauaaaaacac

SEQ ID NO: 996232 - RNA, 23 nt, Human
caacaccaacuuacagguuucag

SEQ ID NO: 996233 - RNA, 19 nt, Human
caacguagcaaugaauggu

SEQ ID NO: 996234 - RNA, 18 nt, Human
caccaguguuuacguuaa

SEQ ID NO: 996235 - RNA, 18 nt, Human
cacugcaguucuuauugc

SEQ ID NO: 996236 - RNA, 24 nt, Human
cagagcccgaggagcucgggagcc

SEQ ID NO: 996237 - RNA, 22 nt, Human
cauaaccaacaccaacuuacag

SEQ ID NO: 996238 - RNA, 21 nt, Human
cauuuuuguuuuaguuaagca

SEQ ID NO: 996239 - RNA, 22 nt, Human
cccuccuaugccacucuccuug

SEQ ID NO: 996240 - RNA, 18 nt, Human
ccgggacccgccuccucg

SEQ ID NO: 996241 - RNA, 23 nt, Human
ccuaucuaauagacacuugagag

SEQ ID NO: 996242 - RNA, 18 nt, Human
ccuccuaugccacucucc

SEQ ID NO: 996243 - RNA, 23 nt, Human
cgcggccggaggggcgccgggac

SEQ ID NO: 996244 - RNA, 23 nt, Human
cggccggaggggcgccgggaccc

SEQ ID NO: 996245 - RNA, 24 nt, Human
cgggacugggguucgccggggccg

SEQ ID NO: 996246 - RNA, 21 nt, Human
cggggccgggacccgccuccu

SEQ ID NO: 996247 - RNA, 22 nt, Human
gacacuugagaggaccguuuga

SEQ ID NO: 996248 - RNA, 22 nt, Human
ggaggggcgccgggacccagag

SEQ ID NO: 996249 - RNA, 18 nt, Human
ggcccggggccgggggcc

SEQ ID NO: 996250 - RNA, 20 nt, Human
ggccgggggccgggacuggg

SEQ ID NO: 996251 - RNA, 23 nt, Human
gggcccggggccgggggccggga

SEQ ID NO: 996252 - RNA, 20 nt, Human
gggcgcccggggguggcgcg

SEQ ID NO: 996253 - RNA, 18 nt, Human
gggggccgggacuggggu

SEQ ID NO: 996254 - RNA, 21 nt, Human
uaaaaaaggcaucacauaaaa

SEQ ID NO: 996255 - RNA, 23 nt, Human
uaaaaacaaagugauuuauaguc

SEQ ID NO: 996256 - RNA, 18 nt, Human
uacagcacaugauaugaa

SEQ ID NO: 996257 - RNA, 21 nt, Human
uagcaaugaaugguuuauguc

SEQ ID NO: 996258 - RNA, 23 nt, Human
uauuacaucauaauaaaaacucu

SEQ ID NO: 996259 - RNA, 20 nt, Human
ucaaaacacggaauauagua

SEQ ID NO: 996260 - RNA, 21 nt, Human
ucagguaguuacaacugugcu

SEQ ID NO: 996261 - RNA, 18 nt, Human
ucgccgccgcuagaucca

SEQ ID NO: 996262 - RNA, 19 nt, Human
ucgcggccggaggggcgcc

SEQ ID NO: 996263 - RNA, 21 nt, Human
ugaaauguguuuauucuauag

SEQ ID NO: 996264 - RNA, 18 nt, Human
ugaauaaauaaaaaaggc

SEQ ID NO: 996265 - RNA, 23 nt, Human
ugacaaaaaaaugccaucaacua

SEQ ID NO: 996266 - RNA, 22 nt, Human
ugacauaucauuuuauuugaaa

SEQ ID NO: 996267 - RNA, 22 nt, Human
uggcaaaagucugugauuuaca

SEQ ID NO: 996268 - RNA, 24 nt, Human
uggcaaaagucugugauuuacauu

SEQ ID NO: 996269 - RNA, 22 nt, Human
ugggcccggggccgggggccgg

SEQ ID NO: 996270 - RNA, 24 nt, Human
ugucaccaguguuuacguuaaagc

SEQ ID NO: 996271 - RNA, 19 nt, Human
aaaaaaaaaaagaaaaaga

SEQ ID NO: 996272 - RNA, 29 nt, Human
aaaaaaaaaagaaaaagaaauauaaaaga

SEQ ID NO: 996273 - RNA, 26 nt, Human
aaaaaaaucuggaacaauagaaacug

SEQ ID NO: 996274 - RNA, 25 nt, Human
aaaaaguucaugacccugcuccccg

SEQ ID NO: 996275 - RNA, 22 nt, Human
aaaaggacagcaaaccaaauac

SEQ ID NO: 996276 - RNA, 25 nt, Human
aaaaucccacccugccucucugccc

SEQ ID NO: 996277 - RNA, 18 nt, Human
aaacuaaaaucucuaaac

SEQ ID NO: 996278 - RNA, 19 nt, Human
aaaugcacucaacaccucc

SEQ ID NO: 996279 - RNA, 21 nt, Human
aacacacuugggugcuuugca

SEQ ID NO: 996280 - RNA, 20 nt, Human
aacauucugaauacaaaacc

SEQ ID NO: 996281 - RNA, 26 nt, Human
aaccaaauacacacacacacaccccu

SEQ ID NO: 996282 - RNA, 21 nt, Human
aagaaaaaaucuugaaaagaa

SEQ ID NO: 996283 - RNA, 20 nt, Human
aagcagggggcuauggacua

SEQ ID NO: 996284 - RNA, 24 nt, Human
aauauaaaacccaaaccaaccaaa

SEQ ID NO: 996285 - RNA, 26 nt, Human
aaucccacccugccucucugcccacc

SEQ ID NO: 996286 - RNA, 23 nt, Human
acaucauucuggacuaacaguuu

SEQ ID NO: 996287 - RNA, 19 nt, Human
accaguuccuucugcagug

SEQ ID NO: 996288 - RNA, 24 nt, Human
acccccagcccauuccccagccuc

SEQ ID NO: 996289 - RNA, 21 nt, Human
acccgcaccuucccgcgcccc

SEQ ID NO: 996290 - RNA, 21 nt, Human
acccugcucccuuggcuccug

SEQ ID NO: 996291 - RNA, 21 nt, Human
agaaaaaaaaaaaagaaaaag

SEQ ID NO: 996292 - RNA, 23 nt, Human
agaaaaaaaaaaaagaaaaagaa

SEQ ID NO: 996293 - RNA, 24 nt, Human
agacgguccugcccuccuggcccc

SEQ ID NO: 996294 - RNA, 19 nt, Human
agacugggcuggccccuga

SEQ ID NO: 996295 - RNA, 23 nt, Human
agagggaauggugggguggggcc

SEQ ID NO: 996296 - RNA, 21 nt, Human
agagggauagauagaggaugg

SEQ ID NO: 996297 - RNA, 18 nt, Human
agaguuggaggaacaagc

SEQ ID NO: 996298 - RNA, 21 nt, Human
agauggugcugggcugagaag

SEQ ID NO: 996299 - RNA, 28 nt, Human
agcacagggcacguguacagccuugggc

SEQ ID NO: 996300 - RNA, 19 nt, Human
aggaagggaggagcaggga

SEQ ID NO: 996301 - RNA, 24 nt, Human
aggaggaagggaggagcagggagc

SEQ ID NO: 996302 - RNA, 23 nt, Human
agggaguggggacuggggucaga

SEQ ID NO: 996303 - RNA, 19 nt, Human
agggauagauagaggaugg

SEQ ID NO: 996304 - RNA, 19 nt, Human
aggguggcccagacugggc

SEQ ID NO: 996305 - RNA, 22 nt, Human
agguaccaagaagcucucaacc

SEQ ID NO: 996306 - RNA, 24 nt, Human
aggugagcagcucccucugggcua

SEQ ID NO: 996307 - RNA, 25 nt, Human
agugugaaggaggaagggaggagca

SEQ ID NO: 996308 - RNA, 24 nt, Human
auaaaaaaaaguuuuccuacgaaa

SEQ ID NO: 996309 - RNA, 23 nt, Human
auucugaauacaaaacccuugau

SEQ ID NO: 996310 - RNA, 20 nt, Human
auugggacccugaugccaag

SEQ ID NO: 996311 - RNA, 20 nt, Human
caaagggguuggucuccccu

SEQ ID NO: 996312 - RNA, 23 nt, Human
caaauacacacacacacaccccu

SEQ ID NO: 996313 - RNA, 19 nt, Human
caacaacccgcaccuuccc

SEQ ID NO: 996314 - RNA, 24 nt, Human
caacauccagccuggggaagaagg

SEQ ID NO: 996315 - RNA, 22 nt, Human
caacauucugaauacaaaaccc

SEQ ID NO: 996316 - RNA, 18 nt, Human
caaccaaauaaaucacag

SEQ ID NO: 996317 - RNA, 23 nt, Human
caagccgaccugguguggguggg

SEQ ID NO: 996318 - RNA, 20 nt, Human
cacagacaucagcuccaggg

SEQ ID NO: 996319 - RNA, 25 nt, Human
caccacacacacugcccugcaaaag

SEQ ID NO: 996320 - RNA, 24 nt, Human
caccccucccuacccacaacaucc

SEQ ID NO: 996321 - RNA, 25 nt, Human
caccccucccuacccacaacaucca

SEQ ID NO: 996322 - RNA, 23 nt, Human
cacccugccucucugcccacccc

SEQ ID NO: 996323 - RNA, 21 nt, Human
cacggauccggcuuccccacc

SEQ ID NO: 996324 - RNA, 20 nt, Human
cacgggccagccucucccug

SEQ ID NO: 996325 - RNA, 18 nt, Human
cacuaacucuaaaauccc

SEQ ID NO: 996326 - RNA, 18 nt, Human
cacucauuaaagauguua

SEQ ID NO: 996327 - RNA, 22 nt, Human
cagacacuaacucuaaaauccc

SEQ ID NO: 996328 - RNA, 21 nt, Human
cagagaaucagcacagggcac

SEQ ID NO: 996329 - RNA, 19 nt, Human
cagaggcagugacacgggc

SEQ ID NO: 996330 - RNA, 22 nt, Human
cagcaacucccuguggcccagc

SEQ ID NO: 996331 - RNA, 21 nt, Human
cagcauccaaccuuucccaga

SEQ ID NO: 996332 - RNA, 19 nt, Human
cagccaacaacccgcaccu

SEQ ID NO: 996333 - RNA, 20 nt, Human
caggacaccacuccucgcag

SEQ ID NO: 996334 - RNA, 24 nt, Human
caggcuugccucaaugcccccuuc

SEQ ID NO: 996335 - RNA, 19 nt, Human
cagggcagugagaaggggu

SEQ ID NO: 996336 - RNA, 20 nt, Human
cagggcccggccgggacuac

SEQ ID NO: 996337 - RNA, 18 nt, Human
caucaagguccagugggg

SEQ ID NO: 996338 - RNA, 20 nt, Human
cauugccugccgggggaggu

SEQ ID NO: 996339 - RNA, 19 nt, Human
ccaaacuaagagaccccaa

SEQ ID NO: 996340 - RNA, 22 nt, Human
ccaaagucucaacuccaggcuc

SEQ ID NO: 996341 - RNA, 21 nt, Human
ccacuuugcaaagaagaaaaa

SEQ ID NO: 996342 - RNA, 24 nt, Human
cccagacugggcuggccccugaga

SEQ ID NO: 996343 - RNA, 26 nt, Human
cccauacacaucaauggccagggcca

SEQ ID NO: 996344 - RNA, 28 nt, Human
cccauacacaucaauggccagggccaug

SEQ ID NO: 996345 - RNA, 27 nt, Human
ccccaaagucucaacuccaggcucagg

SEQ ID NO: 996346 - RNA, 20 nt, Human
cccccagcccauuccccagc

SEQ ID NO: 996347 - RNA, 19 nt, Human
cccccgcacagacacuaac

SEQ ID NO: 996348 - RNA, 21 nt, Human
cccccgcacagacacuaacuc

SEQ ID NO: 996349 - RNA, 20 nt, Human
ccccgcacagacacuaacuc

SEQ ID NO: 996350 - RNA, 22 nt, Human
ccccgcgucgcccgagccacgg

SEQ ID NO: 996351 - RNA, 22 nt, Human
ccccucccuacccacaacaucc

SEQ ID NO: 996352 - RNA, 24 nt, Human
cccgcacagacacuaacucuaaaa

SEQ ID NO: 996353 - RNA, 20 nt, Human
cccgcaccuucccgcgcccc

SEQ ID NO: 996354 - RNA, 20 nt, Human
cccuacccacaacauccagc

SEQ ID NO: 996355 - RNA, 21 nt, Human
cccuccuggccccgcgucgcc

SEQ ID NO: 996356 - RNA, 21 nt, Human
cccugcgugaugcgucccucc

SEQ ID NO: 996357 - RNA, 20 nt, Human
cccugcuccccgggcuccuc

SEQ ID NO: 996358 - RNA, 22 nt, Human
ccgcacagacacuaacucuaaa

SEQ ID NO: 996359 - RNA, 24 nt, Human
ccgcacagacacuaacucuaaaau

SEQ ID NO: 996360 - RNA, 22 nt, Human
ccuagggagaaaacuagagaau

SEQ ID NO: 996361 - RNA, 20 nt, Human
ccuauucagguggcagggcc

SEQ ID NO: 996362 - RNA, 19 nt, Human
ccucacauauaaauaagga

SEQ ID NO: 996363 - RNA, 21 nt, Human
ccucccauuccgugccugggc

SEQ ID NO: 996364 - RNA, 18 nt, Human
ccuccgcccugcaggggc

SEQ ID NO: 996365 - RNA, 19 nt, Human
ccuccuggccccgcgucgc

SEQ ID NO: 996366 - RNA, 21 nt, Human
ccuccuggccccgcgucgccc

SEQ ID NO: 996367 - RNA, 22 nt, Human
ccuucugugcucgccggucgug

SEQ ID NO: 996368 - RNA, 18 nt, Human
ccuugggcuccaggcggc

SEQ ID NO: 996369 - RNA, 20 nt, Human
cgacccagaaucacauccag

SEQ ID NO: 996370 - RNA, 21 nt, Human
cgcgcaacggcagacgguaug

SEQ ID NO: 996371 - RNA, 22 nt, Human
cggcccgaagugagcaaaguca

SEQ ID NO: 996372 - RNA, 20 nt, Human
cggccgcggggcggcuucuc

SEQ ID NO: 996373 - RNA, 21 nt, Human
cggcuccccgucuuccccucc

SEQ ID NO: 996374 - RNA, 22 nt, Human
cgggagugcugaguccgucagg

SEQ ID NO: 996375 - RNA, 24 nt, Human
cgggcucggcagcggggggcccga

SEQ ID NO: 996376 - RNA, 24 nt, Human
cuaggagugugaaggaggaaggga

SEQ ID NO: 996377 - RNA, 24 nt, Human
cucaaugcccccuucccaucccua

SEQ ID NO: 996378 - RNA, 25 nt, Human
cucacauauaaauaaggacuugcga

SEQ ID NO: 996379 - RNA, 19 nt, Human
cuccccgggcuccucucca

SEQ ID NO: 996380 - RNA, 18 nt, Human
cuccucgcagcaucaagg

SEQ ID NO: 996381 - RNA, 19 nt, Human
cugcaguguuuuccucugg

SEQ ID NO: 996382 - RNA, 20 nt, Human
cugccucucugcccaccccc

SEQ ID NO: 996383 - RNA, 23 nt, Human
cugcucccuuggcuccuguccau

SEQ ID NO: 996384 - RNA, 24 nt, Human
cugggcccaagagcgcagcacugg

SEQ ID NO: 996385 - RNA, 18 nt, Human
cugugcucgccggucgug

SEQ ID NO: 996386 - RNA, 22 nt, Human
cuucugugcucgccggucguga

SEQ ID NO: 996387 - RNA, 26 nt, Human
cuuuccuuucucuuuucuguggucuu

SEQ ID NO: 996388 - RNA, 19 nt, Human
gaaacacacuugggugcuu

SEQ ID NO: 996389 - RNA, 18 nt, Human
gacagacugaacugggcc

SEQ ID NO: 996390 - RNA, 19 nt, Human
gagaaaaacacaucauucu

SEQ ID NO: 996391 - RNA, 21 nt, Human
gagcagcuccugugcccuucu

SEQ ID NO: 996392 - RNA, 18 nt, Human
gagccacggcuugccuca

SEQ ID NO: 996393 - RNA, 20 nt, Human
gaggaagggaggagcaggga

SEQ ID NO: 996394 - RNA, 20 nt, Human
gaggagggcuagaaggggau

SEQ ID NO: 996395 - RNA, 22 nt, Human
gagguagagcuggugccuacug

SEQ ID NO: 996396 - RNA, 22 nt, Human
gagugcgaggauagcuggguga

SEQ ID NO: 996397 - RNA, 21 nt, Human
gagugugaaggaggaagggag

SEQ ID NO: 996398 - RNA, 25 nt, Human
gauagauagaggauggggaaagggg

SEQ ID NO: 996399 - RNA, 19 nt, Human
gcagcaguucacaucugga

SEQ ID NO: 996400 - RNA, 19 nt, Human
gcaggagagcaagugcucu

SEQ ID NO: 996401 - RNA, 23 nt, Human
gccaaacaacaggaggguugaag

SEQ ID NO: 996402 - RNA, 18 nt, Human
gccagccccgcgccucag

SEQ ID NO: 996403 - RNA, 20 nt, Human
gccaggacauugccugccgg

SEQ ID NO: 996404 - RNA, 22 nt, Human
gccucagccaacaacccgcacc

SEQ ID NO: 996405 - RNA, 20 nt, Human
gcggagcagcuccugugccc

SEQ ID NO: 996406 - RNA, 22 nt, Human
gcggagcagcuccugugcccuu

SEQ ID NO: 996407 - RNA, 18 nt, Human
gcggcuucucccuccagg

SEQ ID NO: 996408 - RNA, 18 nt, Human
gcuccccgucuuccccuc

SEQ ID NO: 996409 - RNA, 18 nt, Human
gcugcagcucuuucuucc

SEQ ID NO: 996410 - RNA, 21 nt, Human
gcugcagcucuuucuucccua

SEQ ID NO: 996411 - RNA, 19 nt, Human
ggaacagauggugcugggc

SEQ ID NO: 996412 - RNA, 18 nt, Human
ggagaggaggcuggcagu

SEQ ID NO: 996413 - RNA, 19 nt, Human
ggagcagcuccugugcccu

SEQ ID NO: 996414 - RNA, 18 nt, Human
ggauggaguggguggggu

SEQ ID NO: 996415 - RNA, 23 nt, Human
ggaugggaggagggcuagaaggg

SEQ ID NO: 996416 - RNA, 20 nt, Human
ggcagacgguccugcccucc

SEQ ID NO: 996417 - RNA, 19 nt, Human
ggcagggcccgagaaggcc

SEQ ID NO: 996418 - RNA, 18 nt, Human
ggcccgagaaggccugcu

SEQ ID NO: 996419 - RNA, 20 nt, Human
gggaaaggggagaaaagguu

SEQ ID NO: 996420 - RNA, 18 nt, Human
gggacuggggucagaccu

SEQ ID NO: 996421 - RNA, 22 nt, Human
gggcacguguacagccuugggc

SEQ ID NO: 996422 - RNA, 20 nt, Human
gggccagggcccggccggga

SEQ ID NO: 996423 - RNA, 18 nt, Human
gggcccgagggcgggcgg

SEQ ID NO: 996424 - RNA, 27 nt, Human
gggcuaaggccaaacaacaggaggguu

SEQ ID NO: 996425 - RNA, 18 nt, Human
ggggcuuuggugcuuucu

SEQ ID NO: 996426 - RNA, 18 nt, Human
ggguggggugccaggggc

SEQ ID NO: 996427 - RNA, 24 nt, Human
gguccagugggguugggucagggc

SEQ ID NO: 996428 - RNA, 19 nt, Human
ggugggguggggccauagg

SEQ ID NO: 996429 - RNA, 19 nt, Human
gguugggucagggcaguga

SEQ ID NO: 996430 - RNA, 21 nt, Human
gucagggcagugagaaggggu

SEQ ID NO: 996431 - RNA, 19 nt, Human
guggucuugggugcuccug

SEQ ID NO: 996432 - RNA, 19 nt, Human
guggucuugggugcuccug

SEQ ID NO: 996433 - RNA, 19 nt, Human
guguggaugggaggagggc

SEQ ID NO: 996434 - RNA, 23 nt, Human
guguguguggaugggaggagggc

SEQ ID NO: 996435 - RNA, 18 nt, Human
guuuuauuucuccucuuu

SEQ ID NO: 996436 - RNA, 20 nt, Human
uaaaaucccacccugccucu

SEQ ID NO: 996437 - RNA, 21 nt, Human
uaaaaucccacccugccucuc

SEQ ID NO: 996438 - RNA, 20 nt, Human
uaaaauugaagcaaaaaugc

SEQ ID NO: 996439 - RNA, 21 nt, Human
uaaaauugaagcaaaaaugcc

SEQ ID NO: 996440 - RNA, 23 nt, Human
uaaacacaccaaugucccauucc

SEQ ID NO: 996441 - RNA, 25 nt, Human
uaaagaaaaaaguucaugacccugc

SEQ ID NO: 996442 - RNA, 20 nt, Human
uaagagaccccaaagucuca

SEQ ID NO: 996443 - RNA, 28 nt, Human
uacauguaagaaaaaaaaaaaagaaaaa

SEQ ID NO: 996444 - RNA, 18 nt, Human
uacauuuuucuuuuccuc

SEQ ID NO: 996445 - RNA, 27 nt, Human
uaccaagaagcucucaaccaggcaggg

SEQ ID NO: 996446 - RNA, 22 nt, Human
uacugcagggagaggaggcugg

SEQ ID NO: 996447 - RNA, 18 nt, Human
uagaaggggauguaaggc

SEQ ID NO: 996448 - RNA, 21 nt, Human
uaggggaacagauggugcugg

SEQ ID NO: 996449 - RNA, 22 nt, Human
ucaaaaacaaaacugcagaucc

SEQ ID NO: 996450 - RNA, 21 nt, Human
ucacaggccggugggcgagcg

SEQ ID NO: 996451 - RNA, 20 nt, Human
ucagcuccagggggagggug

SEQ ID NO: 996452 - RNA, 22 nt, Human
uccaaacuaagagaccccaaag

SEQ ID NO: 996453 - RNA, 19 nt, Human
uccaggcucagggcugccc

SEQ ID NO: 996454 - RNA, 21 nt, Human
uccaggcucagggcugccccc

SEQ ID NO: 996455 - RNA, 24 nt, Human
uccaggcuugccucaaugcccccu

SEQ ID NO: 996456 - RNA, 20 nt, Human
uccagggggagggugucaag

SEQ ID NO: 996457 - RNA, 21 nt, Human
uccagggggagggugucaagu

SEQ ID NO: 996458 - RNA, 21 nt, Human
ucccgggcgucgccgggccag

SEQ ID NO: 996459 - RNA, 18 nt, Human
ucccuacaugugagaaac

SEQ ID NO: 996460 - RNA, 22 nt, Human
ucccuggguaggauggaguggg

SEQ ID NO: 996461 - RNA, 18 nt, Human
uccugugcccuucugugc

SEQ ID NO: 996462 - RNA, 20 nt, Human
uccuucccgggcgucgccgg

SEQ ID NO: 996463 - RNA, 19 nt, Human
ucuaaaaucccacccugcc

SEQ ID NO: 996464 - RNA, 19 nt, Human
ucuaaaaucccacccugcc

SEQ ID NO: 996465 - RNA, 22 nt, Human
ucuccaggcuugccucaaugcc

SEQ ID NO: 996466 - RNA, 22 nt, Human
ucuccgcggcggcggggcgcuc

SEQ ID NO: 996467 - RNA, 21 nt, Human
ucucuaaacacaccaaugucc

SEQ ID NO: 996468 - RNA, 19 nt, Human
ucugcaguguuuuccucug

SEQ ID NO: 996469 - RNA, 20 nt, Human
ucugcaguguuuuccucugg

SEQ ID NO: 996470 - RNA, 25 nt, Human
ucugggcuaaggccaaaccgggguc

SEQ ID NO: 996471 - RNA, 18 nt, Human
ucuugggugcuccuggcc

SEQ ID NO: 996472 - RNA, 18 nt, Human
ugaaggaggaagggagga

SEQ ID NO: 996473 - RNA, 31 nt, Human
ugaaggaggaagggaggagcagggagcagcc

SEQ ID NO: 996474 - RNA, 19 nt, Human
ugagaaacaagccgaccug

SEQ ID NO: 996475 - RNA, 23 nt, Human
ugagaagggguggcaagagguac

SEQ ID NO: 996476 - RNA, 23 nt, Human
ugagacaagacagacugaacugg

SEQ ID NO: 996477 - RNA, 19 nt, Human
ugagcgcggggcggagguc

SEQ ID NO: 996478 - RNA, 21 nt, Human
ugagcgcggggcggaggucgc

SEQ ID NO: 996479 - RNA, 20 nt, Human
ugagggaaacaaaggguggc

SEQ ID NO: 996480 - RNA, 21 nt, Human
ugagguuggauggcuuugagu

SEQ ID NO: 996481 - RNA, 26 nt, Human
ugagugaaacacacuugggugcuuug

SEQ ID NO: 996482 - RNA, 22 nt, Human
ugcaaaaggacugccaauaccc

SEQ ID NO: 996483 - RNA, 25 nt, Human
ugcaaaaggacugccaauaccccca

SEQ ID NO: 996484 - RNA, 21 nt, Human
ugcagauuucuguuuuuguau

SEQ ID NO: 996485 - RNA, 20 nt, Human
ugcagggagaggaggcuggc

SEQ ID NO: 996486 - RNA, 23 nt, Human
ugccaauacccccagcccauucc

SEQ ID NO: 996487 - RNA, 22 nt, Human
ugccugggcuggaucuuuuuuc

SEQ ID NO: 996488 - RNA, 23 nt, Human
ugcugaguccgucaggacaccac

SEQ ID NO: 996489 - RNA, 22 nt, Human
ugcugggcugagaagccaggac

SEQ ID NO: 996490 - RNA, 23 nt, Human
uggaacaauagaaacuguacaga

SEQ ID NO: 996491 - RNA, 21 nt, Human
uggaguggguggggugccagg

SEQ ID NO: 996492 - RNA, 23 nt, Human
uggcagggcccgagaaggccugc

SEQ ID NO: 996493 - RNA, 22 nt, Human
uggcagugcuggccugggcugg

SEQ ID NO: 996494 - RNA, 24 nt, Human
uggccagggccaugaugauggucu

SEQ ID NO: 996495 - RNA, 18 nt, Human
uggcccagccugaaaggg

SEQ ID NO: 996496 - RNA, 26 nt, Human
uggccccacgggcagguaggggaacc

SEQ ID NO: 996497 - RNA, 18 nt, Human
ugggagccgaggaugagg

SEQ ID NO: 996498 - RNA, 23 nt, Human
ugggucagggcagugagaagggg

SEQ ID NO: 996499 - RNA, 24 nt, Human
ugggugggugccuguguguguggu

SEQ ID NO: 996500 - RNA, 20 nt, Human
uggucaaaaacaaaacugca

SEQ ID NO: 996501 - RNA, 19 nt, Human
uggugcugggcugagaagc

SEQ ID NO: 996502 - RNA, 20 nt, Human
uggugggguggggccauagg

SEQ ID NO: 996503 - RNA, 18 nt, Human
uguacauuuuucuuuucc

SEQ ID NO: 996504 - RNA, 19 nt, Human
ugucuugggcuaagccaca

SEQ ID NO: 996505 - RNA, 18 nt, Human
uguggaugggaggagggc

SEQ ID NO: 996506 - RNA, 19 nt, Human
ugugggagccgaggaugag

SEQ ID NO: 996507 - RNA, 20 nt, Human
uguggucuugggugcuccug

SEQ ID NO: 996508 - RNA, 21 nt, Human
uguggucuugggugcuccugg

SEQ ID NO: 996509 - RNA, 23 nt, Human
uugcacaacauucugaauacaaa

SEQ ID NO: 996510 - RNA, 21 nt, Human
uuuccucuuuuuuuuggccuu

SEQ ID NO: 996511 - RNA, 23 nt, Human
uuuccuucccgggcgucgccggg

SEQ ID NO: 996512 - RNA, 25 nt, Human
uuuggccuuuccuuucucuuuucug

SEQ ID NO: 996513 - RNA, 20 nt, Human
uuuguuuuguuuuuaaacua

SEQ ID NO: 996514 - RNA, 24 nt, Human
uuuuuuuuuuuucuuuuccucuuu

SEQ ID NO: 996515 - RNA, 25 nt, Human
uuuuuuuuuuuuuucuuuuccucuu

SEQ ID NO: 996516 - RNA, 19 nt, Human
aaaaaccacccccaaucga

SEQ ID NO: 996517 - RNA, 24 nt, Human
aaaauaaagcgcuugugaaaaaga

SEQ ID NO: 996518 - RNA, 25 nt, Human
aaacaggaaauaaagcauaaaauga

SEQ ID NO: 996519 - RNA, 21 nt, Human
aaacccagcucccaaacccac

SEQ ID NO: 996520 - RNA, 23 nt, Human
aaacccaggagcaggagcagcag

SEQ ID NO: 996521 - RNA, 19 nt, Human
aaagcuuuuacagggccac

SEQ ID NO: 996522 - RNA, 28 nt, Human
aaccggugcugguggccacaccugggcg

SEQ ID NO: 996523 - RNA, 24 nt, Human
aacuuccuccuucugcaucuucca

SEQ ID NO: 996524 - RNA, 26 nt, Human
aagcauaaaaugaaggaaaggggacc

SEQ ID NO: 996525 - RNA, 22 nt, Human
acaaacaccagacaugcaggug

SEQ ID NO: 996526 - RNA, 21 nt, Human
acaaucaaagaaaaaucugga

SEQ ID NO: 996527 - RNA, 19 nt, Human
acagagccacaugugcacg

SEQ ID NO: 996528 - RNA, 19 nt, Human
acagcucuauuccaauuac

SEQ ID NO: 996529 - RNA, 24 nt, Human
acaggcgggggcgggggagggugg

SEQ ID NO: 996530 - RNA, 20 nt, Human
accagacccaagcccugggc

SEQ ID NO: 996531 - RNA, 18 nt, Human
acccacugcagccucccc

SEQ ID NO: 996532 - RNA, 19 nt, Human
acccacuugugggcauucu

SEQ ID NO: 996533 - RNA, 19 nt, Human
accuccugcgcccccgccg

SEQ ID NO: 996534 - RNA, 19 nt, Human
acgcgccgggcgaccuccu

SEQ ID NO: 996535 - RNA, 21 nt, Human
acggaacauaccaucuagaac

SEQ ID NO: 996536 - RNA, 20 nt, Human
acggcagccuccggcgggcg

SEQ ID NO: 996537 - RNA, 25 nt, Human
agaccaggccaucugagacagggaa

SEQ ID NO: 996538 - RNA, 22 nt, Human
agaggagaggagggggagccuu

SEQ ID NO: 996539 - RNA, 18 nt, Human
agaggggagaggagagga

SEQ ID NO: 996540 - RNA, 22 nt, Human
agccaggccagaggccggcccc

SEQ ID NO: 996541 - RNA, 20 nt, Human
agccuggccaaccgugccag

SEQ ID NO: 996542 - RNA, 18 nt, Human
aggaaagaagaaucuuau

SEQ ID NO: 996543 - RNA, 23 nt, Human
aggaaauaaagcauaaaaugaag

SEQ ID NO: 996544 - RNA, 23 nt, Human
aggagggggagccuccggcgacc

SEQ ID NO: 996545 - RNA, 19 nt, Human
aggccuugcaaaaugugau

SEQ ID NO: 996546 - RNA, 20 nt, Human
aggcguaagaccaggccauc

SEQ ID NO: 996547 - RNA, 21 nt, Human
agggcgugaguuuucgucugg

SEQ ID NO: 996548 - RNA, 20 nt, Human
auaaagcgcuugugaaaaag

SEQ ID NO: 996549 - RNA, 25 nt, Human
aucaaagaaaaaucuggacaauggu

SEQ ID NO: 996550 - RNA, 22 nt, Human
aucaccucucaccccagccucg

SEQ ID NO: 996551 - RNA, 19 nt, Human
auccacaggaagcugcuca

SEQ ID NO: 996552 - RNA, 23 nt, Human
auggcaugcagauuauuuaaagu

SEQ ID NO: 996553 - RNA, 23 nt, Human
caaaggccuuuaggacccacagc

SEQ ID NO: 996554 - RNA, 24 nt, Human
caagacacuugaaccacaaacacc

SEQ ID NO: 996555 - RNA, 21 nt, Human
caagcccugggcaggggccag

SEQ ID NO: 996556 - RNA, 19 nt, Human
cacacccucucggaaucau

SEQ ID NO: 996557 - RNA, 19 nt, Human
cacacgggcugcucaaggg

SEQ ID NO: 996558 - RNA, 21 nt, Human
caccagacccaagcccugggc

SEQ ID NO: 996559 - RNA, 24 nt, Human
caccgaagcccccagcaaccggag

SEQ ID NO: 996560 - RNA, 23 nt, Human
caccgaagcccccagcacaguga

SEQ ID NO: 996561 - RNA, 18 nt, Human
caccucucaccccagccu

SEQ ID NO: 996562 - RNA, 18 nt, Human
cacgagaugggaggggag

SEQ ID NO: 996563 - RNA, 19 nt, Human
cacgggaaucuuguuggga

SEQ ID NO: 996564 - RNA, 19 nt, Human
cacgucccagggacaggag

SEQ ID NO: 996565 - RNA, 22 nt, Human
cacugugugggucccucgggcc

SEQ ID NO: 996566 - RNA, 24 nt, Human
cacuugaaccacaaacaccagaca

SEQ ID NO: 996567 - RNA, 18 nt, Human
cagacaccaggggccuaa

SEQ ID NO: 996568 - RNA, 24 nt, Human
cagcucccaaacccacugcagccu

SEQ ID NO: 996569 - RNA, 21 nt, Human
cagcugcucucuacagcaaga

SEQ ID NO: 996570 - RNA, 25 nt, Human
caggagagacggacggcagccuccg

SEQ ID NO: 996571 - RNA, 19 nt, Human
caggagcaggagcagcaga

SEQ ID NO: 996572 - RNA, 24 nt, Human
cagggccacgcucgccaggcuuuc

SEQ ID NO: 996573 - RNA, 22 nt, Human
caggggccuaaacccagcuccc

SEQ ID NO: 996574 - RNA, 18 nt, Human
cauaaaaugaaggaaaga

SEQ ID NO: 996575 - RNA, 21 nt, Human
caugucccucccccacggcca

SEQ ID NO: 996576 - RNA, 20 nt, Human
ccaacacccuggcagaagca

SEQ ID NO: 996577 - RNA, 22 nt, Human
ccacaccugggcgccuggacac

SEQ ID NO: 996578 - RNA, 19 nt, Human
ccacaugugcacgcgugug

SEQ ID NO: 996579 - RNA, 21 nt, Human
ccagcacgagaugggagggga

SEQ ID NO: 996580 - RNA, 22 nt, Human
ccaggccagaggccggccccac

SEQ ID NO: 996581 - RNA, 19 nt, Human
ccagggagcaucugcagag

SEQ ID NO: 996582 - RNA, 24 nt, Human
cccaagcccugggcaggggccagg

SEQ ID NO: 996583 - RNA, 26 nt, Human
cccacaugcacccaagaacaggugug

SEQ ID NO: 996584 - RNA, 20 nt, Human
cccacgcugaacccacgucc

SEQ ID NO: 996585 - RNA, 23 nt, Human
cccacgcugaacccacguccugg

SEQ ID NO: 996586 - RNA, 22 nt, Human
cccccacggccaccacacacuu

SEQ ID NO: 996587 - RNA, 23 nt, Human
cccccacggccaccacacacuuc

SEQ ID NO: 996588 - RNA, 23 nt, Human
cccccagcacagugaggccucug

SEQ ID NO: 996589 - RNA, 18 nt, Human
cccccgccccguccugga

SEQ ID NO: 996590 - RNA, 20 nt, Human
cccgccucagaaagcuuuua

SEQ ID NO: 996591 - RNA, 28 nt, Human
cccucagacaccaggggccuaaacccag

SEQ ID NO: 996592 - RNA, 21 nt, Human
ccgaaaacccacaugcaccca

SEQ ID NO: 996593 - RNA, 21 nt, Human
ccgaagcccccagcacaguga

SEQ ID NO: 996594 - RNA, 18 nt, Human
ccggagccccgccugagg

SEQ ID NO: 996595 - RNA, 20 nt, Human
ccggagccccgccugaggcu

SEQ ID NO: 996596 - RNA, 19 nt, Human
ccggccccacaccauccac

SEQ ID NO: 996597 - RNA, 20 nt, Human
ccucgcccacgcugaaccca

SEQ ID NO: 996598 - RNA, 24 nt, Human
ccucucaccccagccucgcaaggc

SEQ ID NO: 996599 - RNA, 19 nt, Human
ccugacaccuucauuccca

SEQ ID NO: 996600 - RNA, 23 nt, Human
ccugcgacggagacaguugucac

SEQ ID NO: 996601 - RNA, 20 nt, Human
ccugcgcccccgccggagcc

SEQ ID NO: 996602 - RNA, 23 nt, Human
ccuggaccgccaggaaccgaaaa

SEQ ID NO: 996603 - RNA, 23 nt, Human
cgaaaacccacaugcacccaaga

SEQ ID NO: 996604 - RNA, 20 nt, Human
cgacccgacagugacgcgcc

SEQ ID NO: 996605 - RNA, 18 nt, Human
cgccgggcgaccuccugc

SEQ ID NO: 996606 - RNA, 23 nt, Human
cgccgggucggcguguccaaaga

SEQ ID NO: 996607 - RNA, 22 nt, Human
cgccucagaaagcuuuuacagg

SEQ ID NO: 996608 - RNA, 23 nt, Human
cgccugaggcuccaagauggcac

SEQ ID NO: 996609 - RNA, 22 nt, Human
cgccuggacaccgaagccccca

SEQ ID NO: 996610 - RNA, 23 nt, Human
cgcuccaccaccuccaacacccu

SEQ ID NO: 996611 - RNA, 18 nt, Human
cggcaaaggguugcucuc

SEQ ID NO: 996612 - RNA, 23 nt, Human
cggcccccguggcucgccgaccc

SEQ ID NO: 996613 - RNA, 22 nt, Human
cuacagcaagagcauuuuccag

SEQ ID NO: 996614 - RNA, 21 nt, Human
cucaccccagccucgcaaggc

SEQ ID NO: 996615 - RNA, 25 nt, Human
cuccaacacccuggcagaagcagcu

SEQ ID NO: 996616 - RNA, 19 nt, Human
cuccaccaccuccaacacc

SEQ ID NO: 996617 - RNA, 18 nt, Human
cuccagguguggguucau

SEQ ID NO: 996618 - RNA, 19 nt, Human
cucccaaacccacugcagc

SEQ ID NO: 996619 - RNA, 23 nt, Human
cuccugcgcccccgccggagccu

SEQ ID NO: 996620 - RNA, 21 nt, Human
cucgccaggcuuuccucgccc

SEQ ID NO: 996621 - RNA, 21 nt, Human
cugaacccacguccugggcac

SEQ ID NO: 996622 - RNA, 22 nt, Human
cugacaccuucauucccaaugg

SEQ ID NO: 996623 - RNA, 21 nt, Human
cugcucaagggcuggcagcag

SEQ ID NO: 996624 - RNA, 18 nt, Human
cugcucucuacagcaaga

SEQ ID NO: 996625 - RNA, 24 nt, Human
cugcugaacaaauaccaugucuuu

SEQ ID NO: 996626 - RNA, 18 nt, Human
cuggacaguggccaggug

SEQ ID NO: 996627 - RNA, 25 nt, Human
cuucuacaguaagccacuucuacag

SEQ ID NO: 996628 - RNA, 24 nt, Human
cuucuacaguaagccuucaaacag

SEQ ID NO: 996629 - RNA, 21 nt, Human
cuugaaccacaaacaccagac

SEQ ID NO: 996630 - RNA, 22 nt, Human
cuugaaccacaaacaccagaca

SEQ ID NO: 996631 - RNA, 21 nt, Human
gacaccuucauucccaaugga

SEQ ID NO: 996632 - RNA, 19 nt, Human
gacaguggccaggugagcc

SEQ ID NO: 996633 - RNA, 21 nt, Human
gaccucauccacaccugacac

SEQ ID NO: 996634 - RNA, 19 nt, Human
gacgcgccgggcgaccucc

SEQ ID NO: 996635 - RNA, 22 nt, Human
gagaagagaagcucccugggag

SEQ ID NO: 996636 - RNA, 24 nt, Human
gagaaggagagacgcacgucccag

SEQ ID NO: 996637 - RNA, 19 nt, Human
gcaaggccugggcccucag

SEQ ID NO: 996638 - RNA, 22 nt, Human
gcagaagcagcugcucucuaca

SEQ ID NO: 996639 - RNA, 18 nt, Human
gccaccacacccucucgg

SEQ ID NO: 996640 - RNA, 22 nt, Human
gcccccacugugugggucccuc

SEQ ID NO: 996641 - RNA, 20 nt, Human
gcgcugagaccucccagcac

SEQ ID NO: 996642 - RNA, 18 nt, Human
gcucccaaacccacugca

SEQ ID NO: 996643 - RNA, 18 nt, Human
gcugccagcaugucccuc

SEQ ID NO: 996644 - RNA, 25 nt, Human
ggaaccgaaaacccacaugcaccca

SEQ ID NO: 996645 - RNA, 21 nt, Human
ggacaguggccaggugagcca

SEQ ID NO: 996646 - RNA, 22 nt, Human
ggagagcgcgcugagaccuccc

SEQ ID NO: 996647 - RNA, 20 nt, Human
ggagaggagaggagggggaa

SEQ ID NO: 996648 - RNA, 22 nt, Human
ggcaagggcgugaguuuucguc

SEQ ID NO: 996649 - RNA, 20 nt, Human
ggcggcaagcguggucaucg

SEQ ID NO: 996650 - RNA, 22 nt, Human
gggagggggcgacacgggugcu

SEQ ID NO: 996651 - RNA, 21 nt, Human
gggcgugaguuuucgucuggg

SEQ ID NO: 996652 - RNA, 21 nt, Human
ggggcgggggagggugggggu

SEQ ID NO: 996653 - RNA, 23 nt, Human
guggguucauucugccuucaggc

SEQ ID NO: 996654 - RNA, 20 nt, Human
uacaguaagccacuucuaca

SEQ ID NO: 996655 - RNA, 22 nt, Human
uaggagacacccacagagccac

SEQ ID NO: 996656 - RNA, 23 nt, Human
uaucaacaguauauuugacaaaa

SEQ ID NO: 996657 - RNA, 20 nt, Human
ucaaauuucugacugucaua

SEQ ID NO: 996658 - RNA, 22 nt, Human
ucaaauuucugacugucauaac

SEQ ID NO: 996659 - RNA, 22 nt, Human
ucagcucaccagacccaagccc

SEQ ID NO: 996660 - RNA, 19 nt, Human
ucaggccggagucugucac

SEQ ID NO: 996661 - RNA, 18 nt, Human
uccacaccugacacaggc

SEQ ID NO: 996662 - RNA, 22 nt, Human
uccacaggaagcugcucagcuc

SEQ ID NO: 996663 - RNA, 18 nt, Human
uccaccaccuccaacacc

SEQ ID NO: 996664 - RNA, 18 nt, Human
uccaccaccuccaacacc

SEQ ID NO: 996665 - RNA, 18 nt, Human
ucccagggacaggagagc

SEQ ID NO: 996666 - RNA, 22 nt, Human
uccggagccccgccugaggcuc

SEQ ID NO: 996667 - RNA, 19 nt, Human
uccuggaccgccaggaacc

SEQ ID NO: 996668 - RNA, 28 nt, Human
uccuggaccgccaggaaccgaaaacccc

SEQ ID NO: 996669 - RNA, 18 nt, Human
uccugggcacagcagcuc

SEQ ID NO: 996670 - RNA, 20 nt, Human
uccuguaggccaagaugcua

SEQ ID NO: 996671 - RNA, 22 nt, Human
uccuuggggagcgccgggucgg

SEQ ID NO: 996672 - RNA, 21 nt, Human
ucgccgacccgacagugacgc

SEQ ID NO: 996673 - RNA, 26 nt, Human
ucuacagcaagagcauuuuccagaac

SEQ ID NO: 996674 - RNA, 19 nt, Human
ugaaggaaagaagaaucuu

SEQ ID NO: 996675 - RNA, 24 nt, Human
ugagacagggaaucccaggggccc

SEQ ID NO: 996676 - RNA, 19 nt, Human
ugagccaggccagaggccg

SEQ ID NO: 996677 - RNA, 27 nt, Human
ugagcgccucccgccucagaaagcuuu

SEQ ID NO: 996678 - RNA, 20 nt, Human
ugaggcuccaagauggcaca

SEQ ID NO: 996679 - RNA, 23 nt, Human
ugagggagaaaaagacuaaaaug

SEQ ID NO: 996680 - RNA, 21 nt, Human
ugcaucacuugugagaagcuu

SEQ ID NO: 996681 - RNA, 23 nt, Human
ugccaggcccccuuccucacucc

SEQ ID NO: 996682 - RNA, 28 nt, Human
uggcagaagcagcugcucuccucccggg

SEQ ID NO: 996683 - RNA, 22 nt, Human
uggcagacaagccuguccuucu

SEQ ID NO: 996684 - RNA, 25 nt, Human
uggcagacaagccuguccuucugag

SEQ ID NO: 996685 - RNA, 23 nt, Human
uggcagucucacugcaccccagc

SEQ ID NO: 996686 - RNA, 18 nt, Human
uggccacaccugggcgcc

SEQ ID NO: 996687 - RNA, 24 nt, Human
ugggaggggagcccccgccccguc

SEQ ID NO: 996688 - RNA, 22 nt, Human
ugucccucccccacggccacca

SEQ ID NO: 996689 - RNA, 19 nt, Human
ugugggcauucucuuucug

SEQ ID NO: 996690 - RNA, 23 nt, Human
uucaaacccaggagcaggagcag

SEQ ID NO: 996691 - RNA, 18 nt, Human
uucaaaggaucaaaggcc

SEQ ID NO: 996692 - RNA, 20 nt, Human
uugcucucccuccagcgagg

SEQ ID NO: 996693 - RNA, 18 nt, Human
aaccaagaggugagcccc

SEQ ID NO: 996694 - RNA, 20 nt, Human
aagcagccagccagccagcc

SEQ ID NO: 996695 - RNA, 20 nt, Human
aagccacccccaaagcagcc

SEQ ID NO: 996696 - RNA, 18 nt, Human
acaaaaggcaccucuccc

SEQ ID NO: 996697 - RNA, 24 nt, Human
acaaaaggcaccucucccaguaca

SEQ ID NO: 996698 - RNA, 19 nt, Human
accagaggagggagggagg

SEQ ID NO: 996699 - RNA, 19 nt, Human
acccccaaagcagccuuaa

SEQ ID NO: 996700 - RNA, 24 nt, Human
agcaguggggaccugggcugcagg

SEQ ID NO: 996701 - RNA, 21 nt, Human
agccuggggcugaugagaucu

SEQ ID NO: 996702 - RNA, 24 nt, Human
aggaacagaggaaggauggagggc

SEQ ID NO: 996703 - RNA, 18 nt, Human
aggcagcggaggggcagu

SEQ ID NO: 996704 - RNA, 23 nt, Human
aggcagcggaggggcaguggggc

SEQ ID NO: 996705 - RNA, 18 nt, Human
aggguaucacucagugaa

SEQ ID NO: 996706 - RNA, 18 nt, Human
agugcuguggugcccggc

SEQ ID NO: 996707 - RNA, 21 nt, Human
aguggggaccugggcugcagg

SEQ ID NO: 996708 - RNA, 24 nt, Human
aucccacugccuccacacccccag

SEQ ID NO: 996709 - RNA, 21 nt, Human
augcagcagagcagggaaggg

SEQ ID NO: 996710 - RNA, 21 nt, Human
caaaaggcaccucucccagua

SEQ ID NO: 996711 - RNA, 20 nt, Human
caagcagccagccagccagc

SEQ ID NO: 996712 - RNA, 22 nt, Human
caccagaggagggagggagguc

SEQ ID NO: 996713 - RNA, 22 nt, Human
cacccuacccucaguggccagc

SEQ ID NO: 996714 - RNA, 23 nt, Human
caccuccacacccuacccucagu

SEQ ID NO: 996715 - RNA, 18 nt, Human
cacugcagcgcagaccug

SEQ ID NO: 996716 - RNA, 24 nt, Human
cacugcagcgcagaccuguccccc

SEQ ID NO: 996717 - RNA, 21 nt, Human
cagaauuuccacuguggccag

SEQ ID NO: 996718 - RNA, 18 nt, Human
cagcagagcagggaaggg

SEQ ID NO: 996719 - RNA, 19 nt, Human
cagcagagcagggaaggga

SEQ ID NO: 996720 - RNA, 20 nt, Human
cagccagccuguccuggggc

SEQ ID NO: 996721 - RNA, 22 nt, Human
cagugugggcucugaagggcuc

SEQ ID NO: 996722 - RNA, 19 nt, Human
caucccacugccuccacac

SEQ ID NO: 996723 - RNA, 20 nt, Human
caucccacugccuccacacc

SEQ ID NO: 996724 - RNA, 23 nt, Human
ccaaagcagccuuaacaccagag

SEQ ID NO: 996725 - RNA, 18 nt, Human
ccaaagccauggggcccc

SEQ ID NO: 996726 - RNA, 21 nt, Human
ccacacccccagccacagcug

SEQ ID NO: 996727 - RNA, 22 nt, Human
ccacccccaaagcagccuuaac

SEQ ID NO: 996728 - RNA, 25 nt, Human
ccacccccaaagcagccuuaacacc

SEQ ID NO: 996729 - RNA, 19 nt, Human
cccacugccuccacacccc

SEQ ID NO: 996730 - RNA, 21 nt, Human
cccacugccuccacaccccca

SEQ ID NO: 996731 - RNA, 18 nt, Human
cccagccacagcuggggc

SEQ ID NO: 996732 - RNA, 18 nt, Human
ccccaaagcagccuuaac

SEQ ID NO: 996733 - RNA, 19 nt, Human
ccgcugccaccaaccccgg

SEQ ID NO: 996734 - RNA, 24 nt, Human
ccggagcaggguaucacucaguga

SEQ ID NO: 996735 - RNA, 20 nt, Human
ccucaguggccagccaaagc

SEQ ID NO: 996736 - RNA, 21 nt, Human
cucaccugcagccuggggcuc

SEQ ID NO: 996737 - RNA, 20 nt, Human
cuccacacccccagccacag

SEQ ID NO: 996738 - RNA, 25 nt, Human
cuccacacccuacccucaguggcca

SEQ ID NO: 996739 - RNA, 22 nt, Human
cuccacaccuccacacccuacc

SEQ ID NO: 996740 - RNA, 24 nt, Human
cuccucagggggccuccacaccuc

SEQ ID NO: 996741 - RNA, 20 nt, Human
cucucccaguacaagaggau

SEQ ID NO: 996742 - RNA, 18 nt, Human
cugcagccuggggcugau

SEQ ID NO: 996743 - RNA, 21 nt, Human
cugccuccacacccccagcca

SEQ ID NO: 996744 - RNA, 21 nt, Human
cuucaaagaggaggaaaaggg

SEQ ID NO: 996745 - RNA, 29 nt, Human
cuucguaccugggccgccgcagcuccucc

SEQ ID NO: 996746 - RNA, 22 nt, Human
gaggaaaaggggguaacaagcc

SEQ ID NO: 996747 - RNA, 21 nt, Human
gaggagggagggaggucccag

SEQ ID NO: 996748 - RNA, 24 nt, Human
gaggagggagggaggucccagccu

SEQ ID NO: 996749 - RNA, 21 nt, Human
gaggggcaguggggcccagca

SEQ ID NO: 996750 - RNA, 20 nt, Human
gccacccccaaagcagccuu

SEQ ID NO: 996751 - RNA, 21 nt, Human
ggaggcagagcagccagaucc

SEQ ID NO: 996752 - RNA, 23 nt, Human
ggccagccaaagccauggggccc

SEQ ID NO: 996753 - RNA, 21 nt, Human
ggccagccuccagccaggccu

SEQ ID NO: 996754 - RNA, 20 nt, Human
ggucagcuggggugggaaag

SEQ ID NO: 996755 - RNA, 19 nt, Human
ggugugagagcagugggga

SEQ ID NO: 996756 - RNA, 20 nt, Human
uaacaagccacccccaaagc

SEQ ID NO: 996757 - RNA, 23 nt, Human
uaacaagccacccccaaagcagc

SEQ ID NO: 996758 - RNA, 21 nt, Human
uaagggugugagagcaguggg

SEQ ID NO: 996759 - RNA, 23 nt, Human
ucaucccacugccuccacacccc

SEQ ID NO: 996760 - RNA, 23 nt, Human
ucccccaguucaucccacugccu

SEQ ID NO: 996761 - RNA, 20 nt, Human
ucucgcccacugcgcgcaga

SEQ ID NO: 996762 - RNA, 20 nt, Human
ucugaagggcuccuuggggc

SEQ ID NO: 996763 - RNA, 23 nt, Human
uggcagugugggcucugaagggc

SEQ ID NO: 996764 - RNA, 21 nt, Human
uggggaccugggcugcagggu

SEQ ID NO: 996765 - RNA, 20 nt, Human
uggggugggaaaggaggcag

SEQ ID NO: 996766 - RNA, 23 nt, Human
uucaaagaggaggaaaagggggu

SEQ ID NO: 996767 - RNA, 23 nt, Human
uucucagcaaagucucauggucc

SEQ ID NO: 996768 - RNA, 23 nt, Human
uuuccacuguggccagccuccag

SEQ ID NO: 996769 - RNA, 19 nt, Human
agagucuagugaccuguuc

SEQ ID NO: 996770 - RNA, 20 nt, Human
agaguuggcaccuuugaugu

SEQ ID NO: 996771 - RNA, 20 nt, Human
aggaaggccugugaaacaug

SEQ ID NO: 996772 - RNA, 23 nt, Human
aggaaucaguguuauccuggaac

SEQ ID NO: 996773 - RNA, 22 nt, Human
auagcagaaaugugccaccaug

SEQ ID NO: 996774 - RNA, 22 nt, Human
auuugucaucaaauguacaacu

SEQ ID NO: 996775 - RNA, 24 nt, Human
caauguagagucuagugaccuguu

SEQ ID NO: 996776 - RNA, 24 nt, Human
ggacaccugaaauauaauuaaaug

SEQ ID NO: 996777 - RNA, 24 nt, Human
ggauuauaaagaagugcaaauuga

SEQ ID NO: 996778 - RNA, 19 nt, Human
uaagugaguauuuguucca

SEQ ID NO: 996779 - RNA, 19 nt, Human
uagcagaaaugugccacca

SEQ ID NO: 996780 - RNA, 22 nt, Human
uagcagaaaugugccaccaugg

SEQ ID NO: 996781 - RNA, 24 nt, Human
uaggaaggccugugaaacaugaca

SEQ ID NO: 996782 - RNA, 24 nt, Human
uauagcagaaaugugccaccaugg

SEQ ID NO: 996783 - RNA, 24 nt, Human
ucauuauagcagaaaugugccacc

SEQ ID NO: 996784 - RNA, 21 nt, Human
ucucacgcuguugucaggaau

SEQ ID NO: 996785 - RNA, 22 nt, Human
ugcaguaaaaagagaaaaaaag

SEQ ID NO: 996786 - RNA, 20 nt, Human
uuauucuauuuaaucuucau

SEQ ID NO: 996787 - RNA, 22 nt, Human
uuccaggcuucaaagcugcaca

SEQ ID NO: 996788 - RNA, 23 nt, Human
aaaaaaccaagucccugcccaga

SEQ ID NO: 996789 - RNA, 19 nt, Human
aaaccaagucccugcccag

SEQ ID NO: 996790 - RNA, 19 nt, Human
aaagaacuaugaagcccgg

SEQ ID NO: 996791 - RNA, 20 nt, Human
aaaggagggcccgaacagaa

SEQ ID NO: 996792 - RNA, 22 nt, Human
aagcuuuuuaaugcaacagcuu

SEQ ID NO: 996793 - RNA, 19 nt, Human
acagggugggaggccauca

SEQ ID NO: 996794 - RNA, 20 nt, Human
agaaggcacuggggcucaga

SEQ ID NO: 996795 - RNA, 18 nt, Human
agaaggcagcagcacaga

SEQ ID NO: 996796 - RNA, 21 nt, Human
agaugaacugcagugaguugg

SEQ ID NO: 996797 - RNA, 26 nt, Human
aggcagcagcacagagucaaggacaa

SEQ ID NO: 996798 - RNA, 19 nt, Human
aggcagggguuccaguugc

SEQ ID NO: 996799 - RNA, 18 nt, Human
agggauugaggagggggc

SEQ ID NO: 996800 - RNA, 20 nt, Human
aguuggggucuggggaagcu

SEQ ID NO: 996801 - RNA, 22 nt, Human
augaagcccggagaaggccacu

SEQ ID NO: 996802 - RNA, 22 nt, Human
auggcuucucuggguaaggucc

SEQ ID NO: 996803 - RNA, 19 nt, Human
caauucaaauuaacuucaa

SEQ ID NO: 996804 - RNA, 21 nt, Human
caccaaaggagggcccgaaca

SEQ ID NO: 996805 - RNA, 18 nt, Human
caccucuaggaggagcag

SEQ ID NO: 996806 - RNA, 21 nt, Human
cacgcuuagcucuagugggga

SEQ ID NO: 996807 - RNA, 22 nt, Human
cacugggcucuuuaaacagcuu

SEQ ID NO: 996808 - RNA, 19 nt, Human
cagcagcuguacaccugga

SEQ ID NO: 996809 - RNA, 24 nt, Human
caggagcucagguuguucagaaaa

SEQ ID NO: 996810 - RNA, 19 nt, Human
caggcugcuuuggaucagg

SEQ ID NO: 996811 - RNA, 18 nt, Human
cagggcagggacagcagc

SEQ ID NO: 996812 - RNA, 23 nt, Human
cccccuccuuccaccccggccca

SEQ ID NO: 996813 - RNA, 18 nt, Human
ccccucccaccucuagga

SEQ ID NO: 996814 - RNA, 21 nt, Human
ccccuccuuccaccccggccc

SEQ ID NO: 996815 - RNA, 23 nt, Human
cugaaaaggcauaaaugaaagca

SEQ ID NO: 996816 - RNA, 19 nt, Human
cugcagugaguuggggucu

SEQ ID NO: 996817 - RNA, 20 nt, Human
cugggggaauagggacagag

SEQ ID NO: 996818 - RNA, 19 nt, Human
gagcagguggcccauggcu

SEQ ID NO: 996819 - RNA, 18 nt, Human
gaucagcuagcugggcug

SEQ ID NO: 996820 - RNA, 20 nt, Human
gcaacaaccaugucuguguu

SEQ ID NO: 996821 - RNA, 21 nt, Human
uacagaguuccaggugcaaag

SEQ ID NO: 996822 - RNA, 19 nt, Human
uaggagacugugcaaggac

SEQ ID NO: 996823 - RNA, 21 nt, Human
ucaagggauugaggagggggc

SEQ ID NO: 996824 - RNA, 19 nt, Human
ucagagcucacuuggggca

SEQ ID NO: 996825 - RNA, 23 nt, Human
ucagggccuuagguuuauccccc

SEQ ID NO: 996826 - RNA, 19 nt, Human
ucuaggaggagcagccaca

SEQ ID NO: 996827 - RNA, 21 nt, Human
ucugccuucccaccaaaggag

SEQ ID NO: 996828 - RNA, 20 nt, Human
ugaaaaggcauaaaugaaag

SEQ ID NO: 996829 - RNA, 23 nt, Human
ugaccaaggaggccucuugcccc

SEQ ID NO: 996830 - RNA, 20 nt, Human
ugaguuuaauuugaacaagc

SEQ ID NO: 996831 - RNA, 21 nt, Human
ugcaaagcugaaaaggcauaa

SEQ ID NO: 996832 - RNA, 24 nt, Human
ugcccagaaagcauggacacugac

SEQ ID NO: 996833 - RNA, 23 nt, Human
uggagagacugcagcccuggaga

SEQ ID NO: 996834 - RNA, 24 nt, Human
uggccaggccggcgaguugggagc

SEQ ID NO: 996835 - RNA, 21 nt, Human
ugggagcuccuuccuuccucc

SEQ ID NO: 996836 - RNA, 18 nt, Human
ugggcucuuuaaacagcu

SEQ ID NO: 996837 - RNA, 23 nt, Human
ugggcucuuuaaacagcuuaggu

SEQ ID NO: 996838 - RNA, 21 nt, Human
ugucuguguuugacuacacug

SEQ ID NO: 996839 - RNA, 22 nt, Human
ugugaucagcuagcugggcugg

SEQ ID NO: 996840 - RNA, 25 nt, Human
ugugcaaggacaggacagggcaggg

SEQ ID NO: 996841 - RNA, 18 nt, Human
uuaauuugaacaagcaaa

SEQ ID NO: 996842 - RNA, 20 nt, Human
uuuuuuuuuuuuuuuuuugg

SEQ ID NO: 996843 - RNA, 22 nt, Human
aagggaggggggcucaggucuc

SEQ ID NO: 996844 - RNA, 19 nt, Human
agggaggggggcucagguc

SEQ ID NO: 996845 - RNA, 23 nt, Human
agguggagguggaaucggaaggg

SEQ ID NO: 996846 - RNA, 22 nt, Human
caaggggggagggaagggaggg

SEQ ID NO: 996847 - RNA, 23 nt, Human
caccccgugcgccacgcgcaacc

SEQ ID NO: 996848 - RNA, 20 nt, Human
cagaauccugcgugccccuc

SEQ ID NO: 996849 - RNA, 18 nt, Human
cagggggagguggaggug

SEQ ID NO: 996850 - RNA, 22 nt, Human
cccaaggggggagggaagggag

SEQ ID NO: 996851 - RNA, 22 nt, Human
cccacugggcaugcugccccug

SEQ ID NO: 996852 - RNA, 18 nt, Human
cccccaaggggggaggga

SEQ ID NO: 996853 - RNA, 23 nt, Human
ccccgugcgccacgcgcaaccga

SEQ ID NO: 996854 - RNA, 28 nt, Human
ccccucuguggcagggggagguggaggu

SEQ ID NO: 996855 - RNA, 20 nt, Human
ccccugcuacucagaauccc

SEQ ID NO: 996856 - RNA, 20 nt, Human
cccgaagcgccauucaguuc

SEQ ID NO: 996857 - RNA, 23 nt, Human
cccgggaccccaggcccacuggg

SEQ ID NO: 996858 - RNA, 21 nt, Human
cccgugcgccacgcgcaaccg

SEQ ID NO: 996859 - RNA, 24 nt, Human
cccucccgggaccccaggcccacu

SEQ ID NO: 996860 - RNA, 23 nt, Human
ccggggauggggaagcuccucuc

SEQ ID NO: 996861 - RNA, 26 nt, Human
ccucagcugcugggguggcggggucc

SEQ ID NO: 996862 - RNA, 21 nt, Human
ccucccgggaccccaggccca

SEQ ID NO: 996863 - RNA, 18 nt, Human
ccucugccccuggugcuc

SEQ ID NO: 996864 - RNA, 21 nt, Human
cgccugcucccggccugggcu

SEQ ID NO: 996865 - RNA, 23 nt, Human
cgcgcaaccgaacccgcugccgc

SEQ ID NO: 996866 - RNA, 23 nt, Human
cucagaaucccgaagcgccauuc

SEQ ID NO: 996867 - RNA, 21 nt, Human
cucccgggaccccaggcccac

SEQ ID NO: 996868 - RNA, 21 nt, Human
cugcccccucggggcgggccc

SEQ ID NO: 996869 - RNA, 18 nt, Human
cuggccgccucugccccu

SEQ ID NO: 996870 - RNA, 21 nt, Human
gaccggggauggggaagcucc

SEQ ID NO: 996871 - RNA, 19 nt, Human
gaggauggggacgccagga

SEQ ID NO: 996872 - RNA, 18 nt, Human
gagggaagggaggggggc

SEQ ID NO: 996873 - RNA, 18 nt, Human
gagguggagguggaggug

SEQ ID NO: 996874 - RNA, 22 nt, Human
gcgggcccaggcccuuuggagg

SEQ ID NO: 996875 - RNA, 20 nt, Human
gcucagaauccugcgugccc

SEQ ID NO: 996876 - RNA, 18 nt, Human
ggagggaagggagggggg

SEQ ID NO: 996877 - RNA, 22 nt, Human
ggagggaagggaggggggcuca

SEQ ID NO: 996878 - RNA, 19 nt, Human
ggcggcggcgccugcuccc

SEQ ID NO: 996879 - RNA, 23 nt, Human
ggcggcggcgccugcucccggcc

SEQ ID NO: 996880 - RNA, 20 nt, Human
gggaaaguggacggggcagg

SEQ ID NO: 996881 - RNA, 18 nt, Human
gggggagggaagggaggg

SEQ ID NO: 996882 - RNA, 20 nt, Human
guggaaggcgggggccagga

SEQ ID NO: 996883 - RNA, 19 nt, Human
uacucagaaucccgaagcg

SEQ ID NO: 996884 - RNA, 29 nt, Human
uauuuuuuguuguuuuuuguuuuuuuucu

SEQ ID NO: 996885 - RNA, 26 nt, Human
ucccaccccgugcgccacgcgcaacc

SEQ ID NO: 996886 - RNA, 27 nt, Human
ucccaccccgugcgccacgcgcaaccg

SEQ ID NO: 996887 - RNA, 18 nt, Human
uccccccccgacccccaa

SEQ ID NO: 996888 - RNA, 26 nt, Human
ucccgaagcgccauucaaccauuggg

SEQ ID NO: 996889 - RNA, 18 nt, Human
ucccgggaccccaggccc

SEQ ID NO: 996890 - RNA, 23 nt, Human
ucccgggaccccaggcccacugg

SEQ ID NO: 996891 - RNA, 18 nt, Human
ucgcugcccccucggggc

SEQ ID NO: 996892 - RNA, 19 nt, Human
ucgcuggcggcggcgccug

SEQ ID NO: 996893 - RNA, 24 nt, Human
ucgcuggcggcggcgccugcuccc

SEQ ID NO: 996894 - RNA, 22 nt, Human
ucuggccgccucugccccuggu

SEQ ID NO: 996895 - RNA, 21 nt, Human
uggaaggcgggggccaggagg

SEQ ID NO: 996896 - RNA, 24 nt, Human
uggagguggagguggaaucggaag

SEQ ID NO: 996897 - RNA, 23 nt, Human
ugggaaaguggacggggcagggu

SEQ ID NO: 996898 - RNA, 22 nt, Human
uggggaagcuccucucgcugcc

SEQ ID NO: 996899 - RNA, 21 nt, Human
uuguuguuuuuuguuuuuuuu

SEQ ID NO: 996900 - RNA, 22 nt, Human
uuuucuguaaaaugucccgguu

SEQ ID NO: 996901 - RNA, 20 nt, Human
uuuuuuuuuuuuuuucccac

SEQ ID NO: 996902 - RNA, 24 nt, Human
uuuuuuuuuuuuuuuuucccacgu

SEQ ID NO: 996903 - RNA, 19 nt, Human
aaaaagagggucagucugc

SEQ ID NO: 996904 - RNA, 19 nt, Human
aaaaagcacucuacauguc

SEQ ID NO: 996905 - RNA, 20 nt, Human
aaaagaaagauacagacaga

SEQ ID NO: 996906 - RNA, 25 nt, Human
aaaagaccccugaagaacacaaccc

SEQ ID NO: 996907 - RNA, 24 nt, Human
aaaagcugcaagacugcaaacuuc

SEQ ID NO: 996908 - RNA, 19 nt, Human
aacaccuagacaugaaaca

SEQ ID NO: 996909 - RNA, 25 nt, Human
aagaagggagaagaguagaagaaaa

SEQ ID NO: 996910 - RNA, 24 nt, Human
aauuuuacuuuaaucccccauuua

SEQ ID NO: 996911 - RNA, 19 nt, Human
acaaaaagcacucuacaug

SEQ ID NO: 996912 - RNA, 21 nt, Human
acaaaagaccccugaagaaca

SEQ ID NO: 996913 - RNA, 21 nt, Human
acaacaccacaaacagaaaua

SEQ ID NO: 996914 - RNA, 22 nt, Human
acaacaccacaaacagaaauac

SEQ ID NO: 996915 - RNA, 18 nt, Human
acaacccuucccucacca

SEQ ID NO: 996916 - RNA, 19 nt, Human
acugcaaacuuccuucaac

SEQ ID NO: 996917 - RNA, 23 nt, Human
agaaaauagucacagacaauuau

SEQ ID NO: 996918 - RNA, 20 nt, Human
agaaauacugauuuccacca

SEQ ID NO: 996919 - RNA, 19 nt, Human
agaacauaaucaacugcca

SEQ ID NO: 996920 - RNA, 18 nt, Human
agaguagaagaaaauguu

SEQ ID NO: 996921 - RNA, 24 nt, Human
agauacagacagaugcagcuuuca

SEQ ID NO: 996922 - RNA, 20 nt, Human
agaugcagcuuucagugcag

SEQ ID NO: 996923 - RNA, 23 nt, Human
agauguaacaaauaacaacacca

SEQ ID NO: 996924 - RNA, 24 nt, Human
agauguaacaaauaacaacaccac

SEQ ID NO: 996925 - RNA, 22 nt, Human
agcaucuucaaaaauaaguggc

SEQ ID NO: 996926 - RNA, 24 nt, Human
aggaagaccgagggagggaaggaa

SEQ ID NO: 996927 - RNA, 18 nt, Human
aggcuggagugcaguggc

SEQ ID NO: 996928 - RNA, 22 nt, Human
auauaucacacuuacucuaccu

SEQ ID NO: 996929 - RNA, 18 nt, Human
aucaacugccaacccccc

SEQ ID NO: 996930 - RNA, 18 nt, Human
aucaguuuuuauuugcau

SEQ ID NO: 996931 - RNA, 23 nt, Human
auggucuauaaaaguggaaaaug

SEQ ID NO: 996932 - RNA, 24 nt, Human
caaaagaaagauacagacagaugc

SEQ ID NO: 996933 - RNA, 21 nt, Human
caaaagaccccugaagaacac

SEQ ID NO: 996934 - RNA, 27 nt, Human
caaaauuccuuaagcacauguagccau

SEQ ID NO: 996935 - RNA, 19 nt, Human
caaauaacaacaccacaaa

SEQ ID NO: 996936 - RNA, 20 nt, Human
caacaccuagacaugaaaca

SEQ ID NO: 996937 - RNA, 22 nt, Human
caacagccacacccacaacacc

SEQ ID NO: 996938 - RNA, 25 nt, Human
caacccuucccucaccagaaaaauc

SEQ ID NO: 996939 - RNA, 21 nt, Human
cacaacaccuagacaugaaac

SEQ ID NO: 996940 - RNA, 24 nt, Human
cacaacaccuagacaugaaacaga

SEQ ID NO: 996941 - RNA, 22 nt, Human
cacauguagccauaguuaaagc

SEQ ID NO: 996942 - RNA, 24 nt, Human
cacauguccuucacgagaaauuuu

SEQ ID NO: 996943 - RNA, 24 nt, Human
cagccucgagcuccuggucucaag

SEQ ID NO: 996944 - RNA, 19 nt, Human
cauaaucaacugccaaccc

SEQ ID NO: 996945 - RNA, 24 nt, Human
caucuucaaaaauaaguggcucaa

SEQ ID NO: 996946 - RNA, 23 nt, Human
ccaaccccaagaugaaagaaggg

SEQ ID NO: 996947 - RNA, 22 nt, Human
ccacacccacaacaccuagaca

SEQ ID NO: 996948 - RNA, 19 nt, Human
ccacauguccuucacgaga

SEQ ID NO: 996949 - RNA, 21 nt, Human
ccaccaaguuucuaaaacugc

SEQ ID NO: 996950 - RNA, 24 nt, Human
ccagaaaaaucuagcauauaagca

SEQ ID NO: 996951 - RNA, 22 nt, Human
ccagaacauaaucaacugccaa

SEQ ID NO: 996952 - RNA, 24 nt, Human
cccacaacaccuagacaugaaaca

SEQ ID NO: 996953 - RNA, 24 nt, Human
cccaucauccaaaucaucuugaau

SEQ ID NO: 996954 - RNA, 19 nt, Human
cccccaucaauacucaguc

SEQ ID NO: 996955 - RNA, 23 nt, Human
cccccuuaaaaaaaaaaucaaca

SEQ ID NO: 996956 - RNA, 26 nt, Human
ccccugaagaacacaacccuucccuc

SEQ ID NO: 996957 - RNA, 23 nt, Human
ccccuuaaaaaaaaaaucaacaa

SEQ ID NO: 996958 - RNA, 25 nt, Human
ccucgagcuccuggucucaagccuc

SEQ ID NO: 996959 - RNA, 25 nt, Human
ccucuugccucagccucccuaguag

SEQ ID NO: 996960 - RNA, 21 nt, Human
cuauauugcccaggcuggagu

SEQ ID NO: 996961 - RNA, 22 nt, Human
cucuauccuacauuuuuaaaag

SEQ ID NO: 996962 - RNA, 26 nt, Human
cucuccccauccugaguauuucaaaa

SEQ ID NO: 996963 - RNA, 23 nt, Human
cugcagaaucagaggcauugugc

SEQ ID NO: 996964 - RNA, 20 nt, Human
cuucaacagccacacccaca

SEQ ID NO: 996965 - RNA, 20 nt, Human
cuuugucugguccacucccc

SEQ ID NO: 996966 - RNA, 21 nt, Human
gaaugacaguauagaauggca

SEQ ID NO: 996967 - RNA, 19 nt, Human
gcagcggucucaaacuucc

SEQ ID NO: 996968 - RNA, 26 nt, Human
gccacacccacaacaccuagacauga

SEQ ID NO: 996969 - RNA, 19 nt, Human
gcccaggcuggagugcagu

SEQ ID NO: 996970 - RNA, 24 nt, Human
gcuccuggucucaagccucuugcc

SEQ ID NO: 996971 - RNA, 22 nt, Human
gcuggagugcaguggcuauucg

SEQ ID NO: 996972 - RNA, 22 nt, Human
gggucuugcuauauugcccagg

SEQ ID NO: 996973 - RNA, 22 nt, Human
guaaauacagccaugcaaauaa

SEQ ID NO: 996974 - RNA, 22 nt, Human
guagaagaaaaugucaguguua

SEQ ID NO: 996975 - RNA, 20 nt, Human
uaaaaaaaaaaucaacaaau

SEQ ID NO: 996976 - RNA, 18 nt, Human
uaaaagcugcaagacugc

SEQ ID NO: 996977 - RNA, 19 nt, Human
uaacaaauaacaacaccac

SEQ ID NO: 996978 - RNA, 18 nt, Human
uaacaacaccacaaacag

SEQ ID NO: 996979 - RNA, 20 nt, Human
uaacaacaccacaaacagaa

SEQ ID NO: 996980 - RNA, 22 nt, Human
uaacaacaccacaaacagaaau

SEQ ID NO: 996981 - RNA, 25 nt, Human
uacuuacauuauucacacauauaua

SEQ ID NO: 996982 - RNA, 27 nt, Human
uaguagcugagacuauaaauaguauau

SEQ ID NO: 996983 - RNA, 18 nt, Human
uauauugcccaggcugga

SEQ ID NO: 996984 - RNA, 22 nt, Human
uauauugcccaggcuggagugc

SEQ ID NO: 996985 - RNA, 24 nt, Human
uauauugcccaggcuggagugcag

SEQ ID NO: 996986 - RNA, 20 nt, Human
uaucacacuuacucuaccuu

SEQ ID NO: 996987 - RNA, 22 nt, Human
uauuauagaaaauagucacaga

SEQ ID NO: 996988 - RNA, 19 nt, Human
uauugcccaggcuggagug

SEQ ID NO: 996989 - RNA, 18 nt, Human
uauuuugcaucugcauaa

SEQ ID NO: 996990 - RNA, 19 nt, Human
ucaacugccaaccccccuu

SEQ ID NO: 996991 - RNA, 23 nt, Human
ucaagguuagcucacuacaaaaa

SEQ ID NO: 996992 - RNA, 21 nt, Human
ucacacauauauagacggaau

SEQ ID NO: 996993 - RNA, 21 nt, Human
ucacagacaauuauaaacaca

SEQ ID NO: 996994 - RNA, 23 nt, Human
ucaccaaacagcgugcgaaggaa

SEQ ID NO: 996995 - RNA, 24 nt, Human
ucagugcaguuucaaacauuuuca

SEQ ID NO: 996996 - RNA, 23 nt, Human
ucauccagaacauaaucaacugc

SEQ ID NO: 996997 - RNA, 26 nt, Human
ucauccagaacauaaucaacugccaa

SEQ ID NO: 996998 - RNA, 24 nt, Human
uccaugagaauuuggaaugacagu

SEQ ID NO: 996999 - RNA, 20 nt, Human
uccuacauuuuuaaaagcuc

SEQ ID NO: 997000 - RNA, 24 nt, Human
uccucagcaucuucaaaaauaagu

SEQ ID NO: 997001 - RNA, 22 nt, Human
uccucugccaccgccucccugu

SEQ ID NO: 997002 - RNA, 18 nt, Human
uccuuaagcacauguagc

SEQ ID NO: 997003 - RNA, 22 nt, Human
uccuuagagaucaagguuagcu

SEQ ID NO: 997004 - RNA, 23 nt, Human
ucuugcuauauugcccaggcugg

SEQ ID NO: 997005 - RNA, 24 nt, Human
ucuugcuauauugcccaggcugga

SEQ ID NO: 997006 - RNA, 18 nt, Human
ugaaagaagggagaagag

SEQ ID NO: 997007 - RNA, 21 nt, Human
ugaaagaagggagaagaguaa

SEQ ID NO: 997008 - RNA, 22 nt, Human
ugaagaacacaacccuucccuc

SEQ ID NO: 997009 - RNA, 24 nt, Human
ugaagaccuggaccuggguaguua

SEQ ID NO: 997010 - RNA, 19 nt, Human
ugaauuauauuaacugcac

SEQ ID NO: 997011 - RNA, 24 nt, Human
ugcaaacuuccuucaacagccaca

SEQ ID NO: 997012 - RNA, 20 nt, Human
ugcaagaaaaucugcuguug

SEQ ID NO: 997013 - RNA, 21 nt, Human
ugcagcuuucagugcaguuuc

SEQ ID NO: 997014 - RNA, 19 nt, Human
ugcaugcugacaaugguuu

SEQ ID NO: 997015 - RNA, 18 nt, Human
ugcccaggcuggagugca

SEQ ID NO: 997016 - RNA, 21 nt, Human
ugcccaggcuggagugcagug

SEQ ID NO: 997017 - RNA, 22 nt, Human
ugcccaggcuggagugcagugg

SEQ ID NO: 997018 - RNA, 22 nt, Human
ugccucagccucccuaguagcu

SEQ ID NO: 997019 - RNA, 24 nt, Human
ugccucagccucccuaguagcuga

SEQ ID NO: 997020 - RNA, 25 nt, Human
ugcgaaggaagaccgagggagggaa

SEQ ID NO: 997021 - RNA, 24 nt, Human
ugcuauauugcccaggcuggagug

SEQ ID NO: 997022 - RNA, 25 nt, Human
ugcuauauugcccaggcuggagugc

SEQ ID NO: 997023 - RNA, 23 nt, Human
uggagugcaguggcuauucgcag

SEQ ID NO: 997024 - RNA, 22 nt, Human
uggcucaaaauuccuuaagcac

SEQ ID NO: 997025 - RNA, 21 nt, Human
uggcuccaagucuuacauccu

SEQ ID NO: 997026 - RNA, 24 nt, Human
uggggucuugcuauauugcccagg

SEQ ID NO: 997027 - RNA, 18 nt, Human
ugucugguccacuccccc

SEQ ID NO: 997028 - RNA, 24 nt, Human
uuaaaaaucccuuuaacauguucu

SEQ ID NO: 997029 - RNA, 25 nt, Human
uuaaauaaaccucuccccauccuga

SEQ ID NO: 997030 - RNA, 22 nt, Human
uuaagggguguaaaaaugcucc

SEQ ID NO: 997031 - RNA, 24 nt, Human
uuaauguaaauacagccaugcaaa

SEQ ID NO: 997032 - RNA, 22 nt, Human
uuacauacaagcaaucugcacu

SEQ ID NO: 997033 - RNA, 23 nt, Human
uuagcucacuacaaaaagcacuc

SEQ ID NO: 997034 - RNA, 24 nt, Human
uuagugaccuccucaauauuuucc

SEQ ID NO: 997035 - RNA, 23 nt, Human
uucacacauauauagacggaauc

SEQ ID NO: 997036 - RNA, 21 nt, Human
uugcacagggaauaaaagcug

SEQ ID NO: 997037 - RNA, 24 nt, Human
uugcccaggcuggagugcaguggc

SEQ ID NO: 997038 - RNA, 23 nt, Human
uugugcaugcugacaaugguuua

SEQ ID NO: 997039 - RNA, 27 nt, Human
accaaguguugucuuucuccuccaacu

SEQ ID NO: 997040 - RNA, 19 nt, Human
agauuggggaggcaagugg

SEQ ID NO: 997041 - RNA, 18 nt, Human
cagcgggggcuucuggga

SEQ ID NO: 997042 - RNA, 22 nt, Human
cucuuaauucuggaccaucacc

SEQ ID NO: 997043 - RNA, 18 nt, Human
ggaggcaaguggguguga

SEQ ID NO: 997044 - RNA, 19 nt, Human
gggaggcaaguggguguga

SEQ ID NO: 997045 - RNA, 22 nt, Human
ggggaacauugacagcgggggc

SEQ ID NO: 997046 - RNA, 23 nt, Human
uacacaggagcaagcagggugug

SEQ ID NO: 997047 - RNA, 21 nt, Human
uaucuggaacaauaugcaggg

SEQ ID NO: 997048 - RNA, 20 nt, Human
ucuggaccaucaccugauuc

SEQ ID NO: 997049 - RNA, 22 nt, Human
ugagcagcuuucauuuuuaucu

SEQ ID NO: 997050 - RNA, 24 nt, Human
aaaaaucagggaaaacaugaauaa

SEQ ID NO: 997051 - RNA, 20 nt, Human
accuugugcucaggcuccug

SEQ ID NO: 997052 - RNA, 19 nt, Human
acgcgcuggccgcagggcg

SEQ ID NO: 997053 - RNA, 18 nt, Human
acuacuugaggaccaaca

SEQ ID NO: 997054 - RNA, 21 nt, Human
agacauuuuaaagcaaaaucc

SEQ ID NO: 997055 - RNA, 19 nt, Human
agcagaauucuucagguac

SEQ ID NO: 997056 - RNA, 21 nt, Human
agcuuuaaaaaaacauuugga

SEQ ID NO: 997057 - RNA, 25 nt, Human
auaaaaaucagggaaaacaugaaua

SEQ ID NO: 997058 - RNA, 18 nt, Human
auacauauacauauauac

SEQ ID NO: 997059 - RNA, 19 nt, Human
auauacauauauacacaca

SEQ ID NO: 997060 - RNA, 26 nt, Human
cauauacauauauacacacauauuua

SEQ ID NO: 997061 - RNA, 23 nt, Human
cauauauacacacauauuuauag

SEQ ID NO: 997062 - RNA, 23 nt, Human
cauuaccuugcuaaaauuuccac

SEQ ID NO: 997063 - RNA, 24 nt, Human
ccacuaagcuacagcuucagauau

SEQ ID NO: 997064 - RNA, 20 nt, Human
ccucggggucuccgggcggc

SEQ ID NO: 997065 - RNA, 20 nt, Human
cuacccaaaucuaucacagu

SEQ ID NO: 997066 - RNA, 18 nt, Human
cuagcugaggaguuguau

SEQ ID NO: 997067 - RNA, 24 nt, Human
gagucgggggacgcgcuggccgca

SEQ ID NO: 997068 - RNA, 21 nt, Human
gccucggggucuccgggcggc

SEQ ID NO: 997069 - RNA, 19 nt, Human
ggaauucuuuuauggacuc

SEQ ID NO: 997070 - RNA, 18 nt, Human
gggcgguggcuggggucg

SEQ ID NO: 997071 - RNA, 21 nt, Human
gggcgguggcuggggucgggc

SEQ ID NO: 997072 - RNA, 18 nt, Human
guaacuuuuuauuaagaa

SEQ ID NO: 997073 - RNA, 18 nt, Human
uaaggcagacauuuuaaa

SEQ ID NO: 997074 - RNA, 23 nt, Human
uaaucugaagauauucuucugau

SEQ ID NO: 997075 - RNA, 21 nt, Human
uacaaacauacauauacauau

SEQ ID NO: 997076 - RNA, 19 nt, Human
uacacacauauuuauagcc

SEQ ID NO: 997077 - RNA, 20 nt, Human
uauugucacauuuuccaagu

SEQ ID NO: 997078 - RNA, 21 nt, Human
ucugaagauauucuucugauu

SEQ ID NO: 997079 - RNA, 20 nt, Human
ucuggacauuucugaacucg

SEQ ID NO: 997080 - RNA, 19 nt, Human
ucuuuuauggacucgagag

SEQ ID NO: 997081 - RNA, 22 nt, Human
ugaggaguuguauuuuguuguu

SEQ ID NO: 997082 - RNA, 18 nt, Human
uggcuggggucgggcgcc

SEQ ID NO: 997083 - RNA, 24 nt, Human
uguaaggcagacauuuuaaagcaa

SEQ ID NO: 997084 - RNA, 20 nt, Human
uuaaagcaaaauccauuacc

SEQ ID NO: 997085 - RNA, 18 nt, Human
uuggagccucggggucuc

SEQ ID NO: 997086 - RNA, 24 nt, Human
uuuguacaaacauacauauacaua

SEQ ID NO: 997087 - RNA, 19 nt, Human
aagcaaaaaccaaagaucu

SEQ ID NO: 997088 - RNA, 25 nt, Human
aagcaaaaaccaaagaucugaggag

SEQ ID NO: 997089 - RNA, 23 nt, Human
aagcauauuucauauuagaaaua

SEQ ID NO: 997090 - RNA, 26 nt, Human
aaguaccucuucaaaauugguccccu

SEQ ID NO: 997091 - RNA, 23 nt, Human
acaauuccaagugcuuauagcca

SEQ ID NO: 997092 - RNA, 18 nt, Human
agcaccaacacauacgcc

SEQ ID NO: 997093 - RNA, 23 nt, Human
auaaauuaaagcaaaaaccaaag

SEQ ID NO: 997094 - RNA, 19 nt, Human
caguauggaaaauacauuu

SEQ ID NO: 997095 - RNA, 21 nt, Human
caguccagagucucaccgccu

SEQ ID NO: 997096 - RNA, 20 nt, Human
ccaacacauacgcccggcag

SEQ ID NO: 997097 - RNA, 22 nt, Human
cccugcagcugccucuagcacc

SEQ ID NO: 997098 - RNA, 18 nt, Human
ccugcagcugccucuagc

SEQ ID NO: 997099 - RNA, 19 nt, Human
cucucaguccagagucuca

SEQ ID NO: 997100 - RNA, 20 nt, Human
uaaagcaaaaaccaaagauc

SEQ ID NO: 997101 - RNA, 20 nt, Human
uaacaagaaacuaugguccu

SEQ ID NO: 997102 - RNA, 27 nt, Human
uaacaagaaacuaugguccucaaauau

SEQ ID NO: 997103 - RNA, 27 nt, Human
uaagucagcaugagcaguaucaaagua

SEQ ID NO: 997104 - RNA, 22 nt, Human
uacaaauuaauaaauuuuaaac

SEQ ID NO: 997105 - RNA, 24 nt, Human
uacagaaaacccaguacaauucca

SEQ ID NO: 997106 - RNA, 20 nt, Human
uacgcaagccacacuucagc

SEQ ID NO: 997107 - RNA, 24 nt, Human
uaguuucuaaaacuuuacagaaaa

SEQ ID NO: 997108 - RNA, 24 nt, Human
uauuucauauuagaaauaguuauc

SEQ ID NO: 997109 - RNA, 18 nt, Human
ucaccgccuggaaggaaa

SEQ ID NO: 997110 - RNA, 24 nt, Human
ucaguagauccauuaaaauauaga

SEQ ID NO: 997111 - RNA, 23 nt, Human
ucgaacccuccuggcuuucaaaa

SEQ ID NO: 997112 - RNA, 21 nt, Human
ucugguacccaaaguguccuu

SEQ ID NO: 997113 - RNA, 19 nt, Human
ugaaagccacucucagucc

SEQ ID NO: 997114 - RNA, 23 nt, Human
ugaggagauccaagagaucaaga

SEQ ID NO: 997115 - RNA, 20 nt, Human
uggaaaauacauuuaauaaa

SEQ ID NO: 997116 - RNA, 19 nt, Human
uggaaggaaaggucggagg

SEQ ID NO: 997117 - RNA, 18 nt, Human
uggucccgagcggccccc

SEQ ID NO: 997118 - RNA, 18 nt, Human
uguaaccagagucugaag

SEQ ID NO: 997119 - RNA, 19 nt, Human
uguagcuaguuucuaaaac

SEQ ID NO: 997120 - RNA, 26 nt, Human
uuaaagcaaaaaccaaagaucugagg

SEQ ID NO: 997121 - RNA, 19 nt, Human
uucauauuagaaauaguua

SEQ ID NO: 997122 - RNA, 22 nt, Human
uuuuacugcuaguguuuuaagu

SEQ ID NO: 997123 - RNA, 18 nt, Human
uuuuuuuuuuuuuuucug

SEQ ID NO: 997124 - RNA, 18 nt, Human
uuuuuuuuuuuuuuucug

SEQ ID NO: 997125 - RNA, 21 nt, Human
aaaaagauucuauacccaaaa

SEQ ID NO: 997126 - RNA, 20 nt, Human
aaacaggcaaaaccccaaag

SEQ ID NO: 997127 - RNA, 20 nt, Human
aaacaggcaaaaccccaaag

SEQ ID NO: 997128 - RNA, 23 nt, Human
aaaccccaaagcggucuucaggg

SEQ ID NO: 997129 - RNA, 21 nt, Human
aacaagcaucucaccauggga

SEQ ID NO: 997130 - RNA, 23 nt, Human
aagaacgagacagagcaaaagga

SEQ ID NO: 997131 - RNA, 21 nt, Human
aagcaucucaccaugggaacc

SEQ ID NO: 997132 - RNA, 19 nt, Human
aaggccccaccccccccca

SEQ ID NO: 997133 - RNA, 20 nt, Human
aaucuugucuucucucgacc

SEQ ID NO: 997134 - RNA, 21 nt, Human
acccccccccacacacacaca

SEQ ID NO: 997135 - RNA, 24 nt, Human
acggagugagaccucuucucaaaa

SEQ ID NO: 997136 - RNA, 21 nt, Human
acgucccagggaucagggcag

SEQ ID NO: 997137 - RNA, 18 nt, Human
acugcacuccagcuugga

SEQ ID NO: 997138 - RNA, 24 nt, Human
acugcacuccagcuuggaugacgg

SEQ ID NO: 997139 - RNA, 18 nt, Human
agaaccacccagugcccc

SEQ ID NO: 997140 - RNA, 19 nt, Human
agaaccacccagugccccc

SEQ ID NO: 997141 - RNA, 18 nt, Human
agcggagguugcagugag

SEQ ID NO: 997142 - RNA, 23 nt, Human
agcggagguugcagugaguugag

SEQ ID NO: 997143 - RNA, 21 nt, Human
agcugggcacaguggcucaug

SEQ ID NO: 997144 - RNA, 24 nt, Human
agcuuggaugacggagugagaccu

SEQ ID NO: 997145 - RNA, 18 nt, Human
aggcaaaaccccaaagcg

SEQ ID NO: 997146 - RNA, 19 nt, Human
aggcaaggccucuggcgug

SEQ ID NO: 997147 - RNA, 22 nt, Human
aggcaugagaaucacucaaacc

SEQ ID NO: 997148 - RNA, 20 nt, Human
aggugcaaacaggcaaaacc

SEQ ID NO: 997149 - RNA, 23 nt, Human
aguggcucaugccuguaauccca

SEQ ID NO: 997150 - RNA, 24 nt, Human
aguggcucaugccuguaaucccag

SEQ ID NO: 997151 - RNA, 26 nt, Human
auccacgguugugaccauguauuacc

SEQ ID NO: 997152 - RNA, 24 nt, Human
augagaacacagugccccgcagcc

SEQ ID NO: 997153 - RNA, 24 nt, Human
auugcaccacugcacuccagcuug

SEQ ID NO: 997154 - RNA, 19 nt, Human
caagagugcucggcgggca

SEQ ID NO: 997155 - RNA, 22 nt, Human
cacccagugccccccagccugc

SEQ ID NO: 997156 - RNA, 19 nt, Human
cacccccccccacacacac

SEQ ID NO: 997157 - RNA, 24 nt, Human
cacccccccccacacacacacaca

SEQ ID NO: 997158 - RNA, 28 nt, Human
cacccccccccacacacacacacagguc

SEQ ID NO: 997159 - RNA, 22 nt, Human
caccuccagccccgauuuuaac

SEQ ID NO: 997160 - RNA, 22 nt, Human
cacuccagcuuggaugacggag

SEQ ID NO: 997161 - RNA, 22 nt, Human
cacuccagcuuggaugacggag

SEQ ID NO: 997162 - RNA, 24 nt, Human
cacuccagcuuggaugacggagug

SEQ ID NO: 997163 - RNA, 18 nt, Human
cacugcacuccagcuugg

SEQ ID NO: 997164 - RNA, 19 nt, Human
cacugcacuccagcuugga

SEQ ID NO: 997165 - RNA, 19 nt, Human
cacugcacuccagcuugga

SEQ ID NO: 997166 - RNA, 22 nt, Human
cacugcacuccagcuuggauga

SEQ ID NO: 997167 - RNA, 19 nt, Human
cagcccggugcugccacaa

SEQ ID NO: 997168 - RNA, 23 nt, Human
cauauuuauugccucacuguaaa

SEQ ID NO: 997169 - RNA, 19 nt, Human
caucauuuaagaucaucaa

SEQ ID NO: 997170 - RNA, 18 nt, Human
ccaaaagucuaaggugca

SEQ ID NO: 997171 - RNA, 20 nt, Human
ccacacacacacacagguca

SEQ ID NO: 997172 - RNA, 20 nt, Human
ccacccccccccacacacac

SEQ ID NO: 997173 - RNA, 21 nt, Human
ccacccccccccacacacaca

SEQ ID NO: 997174 - RNA, 19 nt, Human
ccacugcacuccagcuugg

SEQ ID NO: 997175 - RNA, 21 nt, Human
ccacugcacuccagcuuggau

SEQ ID NO: 997176 - RNA, 24 nt, Human
ccacugcacuccagcuuggaugac

SEQ ID NO: 997177 - RNA, 19 nt, Human
ccaggcgccccgcggccaa

SEQ ID NO: 997178 - RNA, 19 nt, Human
ccagggcuguauuagcagc

SEQ ID NO: 997179 - RNA, 23 nt, Human
cccaaaagucuaaggugcaaaca

SEQ ID NO: 997180 - RNA, 24 nt, Human
cccacacacacacacaggucagcu

SEQ ID NO: 997181 - RNA, 24 nt, Human
cccagcugggcacaguggcucaug

SEQ ID NO: 997182 - RNA, 24 nt, Human
cccagcugucuccuaccccaucug

SEQ ID NO: 997183 - RNA, 18 nt, Human
cccaugucauccuuccag

SEQ ID NO: 997184 - RNA, 27 nt, Human
ccccagccugcagcaagucccuggacu

SEQ ID NO: 997185 - RNA, 20 nt, Human
cccccacacacacacacagg

SEQ ID NO: 997186 - RNA, 21 nt, Human
cccccagccugcagcaagucc

SEQ ID NO: 997187 - RNA, 19 nt, Human
ccccccacacacacacaca

SEQ ID NO: 997188 - RNA, 28 nt, Human
ccccccacacacacacacaggucaggau

SEQ ID NO: 997189 - RNA, 25 nt, Human
cccgcagaagccacugagccaggcg

SEQ ID NO: 997190 - RNA, 19 nt, Human
ccgggagcggagguugcag

SEQ ID NO: 997191 - RNA, 21 nt, Human
ccucccagcugucuccuaccc

SEQ ID NO: 997192 - RNA, 19 nt, Human
ccuguaaucccagcuacuc

SEQ ID NO: 997193 - RNA, 21 nt, Human
ccuguaaucccagcuacucgg

SEQ ID NO: 997194 - RNA, 23 nt, Human
cgggagcggagguugcagugagu

SEQ ID NO: 997195 - RNA, 18 nt, Human
cuauaucccagcugggca

SEQ ID NO: 997196 - RNA, 21 nt, Human
cucaugccuguaaucccagcu

SEQ ID NO: 997197 - RNA, 21 nt, Human
cuccagcuuggaugacggagu

SEQ ID NO: 997198 - RNA, 21 nt, Human
cucuucucaaaaaaaagauuc

SEQ ID NO: 997199 - RNA, 23 nt, Human
cuuccagaacaagcacauccuag

SEQ ID NO: 997200 - RNA, 19 nt, Human
gaaggccccaccccccccc

SEQ ID NO: 997201 - RNA, 22 nt, Human
gaaggggauuuuuaaaaguuca

SEQ ID NO: 997202 - RNA, 24 nt, Human
gaccugccacuuuagacugaccuu

SEQ ID NO: 997203 - RNA, 24 nt, Human
gacggagugagaccucuucucaaa

SEQ ID NO: 997204 - RNA, 19 nt, Human
gagaaaaucuugucuucuc

SEQ ID NO: 997205 - RNA, 19 nt, Human
gagaaccacccagugcccc

SEQ ID NO: 997206 - RNA, 23 nt, Human
gagacagauacaaugauucacac

SEQ ID NO: 997207 - RNA, 20 nt, Human
gagcggagguugcagugagu

SEQ ID NO: 997208 - RNA, 24 nt, Human
gagguugcagugaguugaggauug

SEQ ID NO: 997209 - RNA, 24 nt, Human
gcacguuguugugucugcagcugu

SEQ ID NO: 997210 - RNA, 24 nt, Human
gcacuccagcuuggaugacggagu

SEQ ID NO: 997211 - RNA, 24 nt, Human
gccccacccccccccacacacaca

SEQ ID NO: 997212 - RNA, 18 nt, Human
gccccgcggccaagcggc

SEQ ID NO: 997213 - RNA, 19 nt, Human
gcuggaagcuaagucucac

SEQ ID NO: 997214 - RNA, 18 nt, Human
ggagguugcagugaguug

SEQ ID NO: 997215 - RNA, 20 nt, Human
ggagguugcagugaguugag

SEQ ID NO: 997216 - RNA, 25 nt, Human
ggagguugcagugaguugaggauug

SEQ ID NO: 997217 - RNA, 22 nt, Human
ggauugcaccacugcacuccag

SEQ ID NO: 997218 - RNA, 21 nt, Human
ggcuggaagcuaagucucacg

SEQ ID NO: 997219 - RNA, 23 nt, Human
gggaggcugaggcaugagaauca

SEQ ID NO: 997220 - RNA, 18 nt, Human
gggcacaguggcucaugc

SEQ ID NO: 997221 - RNA, 24 nt, Human
gggcacaguggcucaugccuguaa

SEQ ID NO: 997222 - RNA, 24 nt, Human
gguggcaaacauauuuauugccuc

SEQ ID NO: 997223 - RNA, 19 nt, Human
gugaaggccccaccccccc

SEQ ID NO: 997224 - RNA, 23 nt, Human
gugaaggccccacccccccccac

SEQ ID NO: 997225 - RNA, 26 nt, Human
uaaaauaagcaacguccuauacuucc

SEQ ID NO: 997226 - RNA, 22 nt, Human
uaaagaacgagacagagcaaaa

SEQ ID NO: 997227 - RNA, 23 nt, Human
uaagaguaucugagaaaggacua

SEQ ID NO: 997228 - RNA, 21 nt, Human
uaagcaacguccuauacuucc

SEQ ID NO: 997229 - RNA, 20 nt, Human
uaggauuucaaaugguucua

SEQ ID NO: 997230 - RNA, 20 nt, Human
ucacuguaaauagagaaaau

SEQ ID NO: 997231 - RNA, 20 nt, Human
ucaugccuguaaucccagcu

SEQ ID NO: 997232 - RNA, 24 nt, Human
uccagcuuggaugacggagugaga

SEQ ID NO: 997233 - RNA, 18 nt, Human
ucccagggaucagggcag

SEQ ID NO: 997234 - RNA, 19 nt, Human
ucccagggaucagggcagu

SEQ ID NO: 997235 - RNA, 21 nt, Human
ucccuggacuccuuuaguugu

SEQ ID NO: 997236 - RNA, 23 nt, Human
uccggucagacaccgucugcacc

SEQ ID NO: 997237 - RNA, 21 nt, Human
ucgaagcccgcagaagccacu

SEQ ID NO: 997238 - RNA, 25 nt, Human
ucgggaggcugaggcaugagaauca

SEQ ID NO: 997239 - RNA, 21 nt, Human
ucuaugauauaugguuggggg

SEQ ID NO: 997240 - RNA, 22 nt, Human
ucuucaggguucuucugaaagg

SEQ ID NO: 997241 - RNA, 21 nt, Human
ugagauauggcacaaggcagg

SEQ ID NO: 997242 - RNA, 21 nt, Human
ugagccaggcgccccgcggcc

SEQ ID NO: 997243 - RNA, 19 nt, Human
ugaggcaugagaaucacuc

SEQ ID NO: 997244 - RNA, 24 nt, Human
ugaggcaugagaaucacucaaacc

SEQ ID NO: 997245 - RNA, 20 nt, Human
ugaggcgcgggugcuguggg

SEQ ID NO: 997246 - RNA, 22 nt, Human
ugcaaacaggcaaaaccccaaa

SEQ ID NO: 997247 - RNA, 22 nt, Human
ugcaccacugcacuccagcuug

SEQ ID NO: 997248 - RNA, 18 nt, Human
ugcacguuguugugucug

SEQ ID NO: 997249 - RNA, 24 nt, Human
ugccuguaaucccagcuacucggg

SEQ ID NO: 997250 - RNA, 25 nt, Human
ugcuaaaugacaaaugcgcgcaaua

SEQ ID NO: 997251 - RNA, 21 nt, Human
uggcucaugccuguaauccca

SEQ ID NO: 997252 - RNA, 22 nt, Human
uggcucaugccuguaaucccag

SEQ ID NO: 997253 - RNA, 23 nt, Human
uguaaaaaaugcugcacguuguu

SEQ ID NO: 997254 - RNA, 23 nt, Human
uguguaaagaacgagacagagca

SEQ ID NO: 997255 - RNA, 19 nt, Human
ugugucugcagcugugcug

SEQ ID NO: 997256 - RNA, 23 nt, Human
uuaauucuaccauauuuuuaugu

SEQ ID NO: 997257 - RNA, 21 nt, Human
uuaggugaaggccccaccccc

SEQ ID NO: 997258 - RNA, 21 nt, Human
uucucaaaaaaaagauucuau

SEQ ID NO: 997259 - RNA, 23 nt, Human
uugcagugaguugaggauugcac

SEQ ID NO: 997260 - RNA, 19 nt, Human
uugcuaaaugacaaaugcg

SEQ ID NO: 997261 - RNA, 22 nt, Human
uuguguccuucccuuguuuuaa

SEQ ID NO: 997262 - RNA, 22 nt, Human
uuguucagucugggcccauguc

SEQ ID NO: 997263 - RNA, 22 nt, Human
uuguugugucugcagcugugcu

SEQ ID NO: 997264 - RNA, 21 nt, Human
aaacaucuaaaaccaggccca

SEQ ID NO: 997265 - RNA, 23 nt, Human
aagaaggcgauucgggaggccac

SEQ ID NO: 997266 - RNA, 22 nt, Human
aagcagagacagaggcucagag

SEQ ID NO: 997267 - RNA, 22 nt, Human
aagccaggcucagaacugccgg

SEQ ID NO: 997268 - RNA, 19 nt, Human
accggcuccagcuccugca

SEQ ID NO: 997269 - RNA, 19 nt, Human
accucaucccuuggcucca

SEQ ID NO: 997270 - RNA, 22 nt, Human
acgcagugccggacguggugcc

SEQ ID NO: 997271 - RNA, 26 nt, Human
acuaaaggacaagaacucuguuccua

SEQ ID NO: 997272 - RNA, 18 nt, Human
agaagccaucugcaggaa

SEQ ID NO: 997273 - RNA, 21 nt, Human
agacucagaugaggacuagcg

SEQ ID NO: 997274 - RNA, 26 nt, Human
agaggaagaaggcgauucgggaggcc

SEQ ID NO: 997275 - RNA, 24 nt, Human
agccggccccaaacccccaggggc

SEQ ID NO: 997276 - RNA, 21 nt, Human
agcugaguuuauuauacuugu

SEQ ID NO: 997277 - RNA, 24 nt, Human
aggcggagccaugcugccugagga

SEQ ID NO: 997278 - RNA, 21 nt, Human
aggcugcagggggaggucaag

SEQ ID NO: 997279 - RNA, 20 nt, Human
agguucuggggugaccaggg

SEQ ID NO: 997280 - RNA, 21 nt, Human
agguucuggggugaccagggg

SEQ ID NO: 997281 - RNA, 25 nt, Human
auaggaacauggcucagugcgggga

SEQ ID NO: 997282 - RNA, 21 nt, Human
caaagccaggcucagaacugc

SEQ ID NO: 997283 - RNA, 24 nt, Human
caacuccacugaaaacgcuccacu

SEQ ID NO: 997284 - RNA, 22 nt, Human
cacaaagcugggagugccaaag

SEQ ID NO: 997285 - RNA, 22 nt, Human
cacagccuggacaaccucaucc

SEQ ID NO: 997286 - RNA, 20 nt, Human
caccacaaaagagggaaaac

SEQ ID NO: 997287 - RNA, 23 nt, Human
cacugaaaacgcuccacuucccc

SEQ ID NO: 997288 - RNA, 21 nt, Human
cagaggcucagagaggcggag

SEQ ID NO: 997289 - RNA, 23 nt, Human
cagccuggacaaccucaucccuu

SEQ ID NO: 997290 - RNA, 23 nt, Human
cagcuccugcaggaggaucuccu

SEQ ID NO: 997291 - RNA, 22 nt, Human
ccacccguguugcuaaaaccau

SEQ ID NO: 997292 - RNA, 25 nt, Human
ccagcucguugagcacgcagugccg

SEQ ID NO: 997293 - RNA, 22 nt, Human
cccaaacccccaggggcaggag

SEQ ID NO: 997294 - RNA, 20 nt, Human
ccccuggguguggggugaag

SEQ ID NO: 997295 - RNA, 25 nt, Human
cccgaccaaggaggcaaggggcaag

SEQ ID NO: 997296 - RNA, 24 nt, Human
cccguguugcuaaaaccauggggg

SEQ ID NO: 997297 - RNA, 19 nt, Human
ccgacacuccguucaucuc

SEQ ID NO: 997298 - RNA, 19 nt, Human
ccggacguggugccgcugg

SEQ ID NO: 997299 - RNA, 25 nt, Human
ccggccccaaacccccaggggcagg

SEQ ID NO: 997300 - RNA, 20 nt, Human
ccuccaaugccaccugguug

SEQ ID NO: 997301 - RNA, 19 nt, Human
cgcggucccgccggcugcg

SEQ ID NO: 997302 - RNA, 18 nt, Human
cgcuccacuucccccucc

SEQ ID NO: 997303 - RNA, 19 nt, Human
cgggagggggcugcugagc

SEQ ID NO: 997304 - RNA, 18 nt, Human
cuaaaaccaugggggacc

SEQ ID NO: 997305 - RNA, 19 nt, Human
cuaaaaccaugggggaccc

SEQ ID NO: 997306 - RNA, 18 nt, Human
cucaacugacuuucccuc

SEQ ID NO: 997307 - RNA, 19 nt, Human
cucaucccuuggcuccagg

SEQ ID NO: 997308 - RNA, 18 nt, Human
cuccacuucccccuccau

SEQ ID NO: 997309 - RNA, 21 nt, Human
cuccaggcccagcugggccag

SEQ ID NO: 997310 - RNA, 25 nt, Human
cugaaaacgcuccacuucccccucc

SEQ ID NO: 997311 - RNA, 20 nt, Human
cugaacuuccaggaaggcau

SEQ ID NO: 997312 - RNA, 19 nt, Human
cugagcccagaauuugcug

SEQ ID NO: 997313 - RNA, 21 nt, Human
cugcagggggaggucaaggcu

SEQ ID NO: 997314 - RNA, 23 nt, Human
cugcugagccagacucacggugc

SEQ ID NO: 997315 - RNA, 20 nt, Human
cuucccccuccauggugucc

SEQ ID NO: 997316 - RNA, 27 nt, Human
gacccaggcugagacucagaugaggac

SEQ ID NO: 997317 - RNA, 18 nt, Human
gacccucgcuuccccgcu

SEQ ID NO: 997318 - RNA, 24 nt, Human
gacccucgcuuccccgcugccacc

SEQ ID NO: 997319 - RNA, 21 nt, Human
gagccaacuccacugaaaacg

SEQ ID NO: 997320 - RNA, 23 nt, Human
gaggacaccacucagagagucag

SEQ ID NO: 997321 - RNA, 20 nt, Human
gccaggcucagaacugccgg

SEQ ID NO: 997322 - RNA, 19 nt, Human
gcccgaguuugagaagcca

SEQ ID NO: 997323 - RNA, 19 nt, Human
gcuccacuucccccuccau

SEQ ID NO: 997324 - RNA, 18 nt, Human
ggacccucgcuuccccgc

SEQ ID NO: 997325 - RNA, 19 nt, Human
ggacguggugccgcuggag

SEQ ID NO: 997326 - RNA, 18 nt, Human
ggagaagccggccccaaa

SEQ ID NO: 997327 - RNA, 18 nt, Human
ggaggucaaggcucagug

SEQ ID NO: 997328 - RNA, 19 nt, Human
ggccacggucuugcagccg

SEQ ID NO: 997329 - RNA, 19 nt, Human
ggccccaaacccccagggg

SEQ ID NO: 997330 - RNA, 26 nt, Human
ggccccuggccuuuccugcauggccu

SEQ ID NO: 997331 - RNA, 19 nt, Human
ggcgcucuuccaugaugcc

SEQ ID NO: 997332 - RNA, 19 nt, Human
ggcggagccaugcugccug

SEQ ID NO: 997333 - RNA, 18 nt, Human
ggcucagugcggggagga

SEQ ID NO: 997334 - RNA, 18 nt, Human
gggagggggcugcugagc

SEQ ID NO: 997335 - RNA, 25 nt, Human
gggagugccaaagccaggcucagaa

SEQ ID NO: 997336 - RNA, 25 nt, Human
gggcaucauuauuggccccgcuguu

SEQ ID NO: 997337 - RNA, 19 nt, Human
ggggaggggacuuugugcu

SEQ ID NO: 997338 - RNA, 22 nt, Human
ggggaggucaaggcucagugag

SEQ ID NO: 997339 - RNA, 21 nt, Human
ggggugaagccgcccgggagg

SEQ ID NO: 997340 - RNA, 24 nt, Human
ggugccgcuggagcgggaggaagg

SEQ ID NO: 997341 - RNA, 20 nt, Human
ggugugggguggaggggagg

SEQ ID NO: 997342 - RNA, 21 nt, Human
ggugugggguggaggggagga

SEQ ID NO: 997343 - RNA, 21 nt, Human
gugccaaagccaggcucagaa

SEQ ID NO: 997344 - RNA, 18 nt, Human
guggccuagccgacacuc

SEQ ID NO: 997345 - RNA, 18 nt, Human
guggugcuguccagcaca

SEQ ID NO: 997346 - RNA, 23 nt, Human
uaaaaacaucuaaaaccaggccc

SEQ ID NO: 997347 - RNA, 23 nt, Human
uaaaaacaucuaaaaccaggccc

SEQ ID NO: 997348 - RNA, 19 nt, Human
uagcgcagggcaggauugg

SEQ ID NO: 997349 - RNA, 18 nt, Human
ucaaaaagacugagccca

SEQ ID NO: 997350 - RNA, 18 nt, Human
ucaggggcuguaaggcuc

SEQ ID NO: 997351 - RNA, 22 nt, Human
ucccaggccuguguccuccuca

SEQ ID NO: 997352 - RNA, 23 nt, Human
ucccucagccaccuucugggugu

SEQ ID NO: 997353 - RNA, 24 nt, Human
ucgcggucccgccggcugcgccac

SEQ ID NO: 997354 - RNA, 24 nt, Human
ugaaaacgcuccacuucccccucc

SEQ ID NO: 997355 - RNA, 18 nt, Human
ugacauaggaacauggcu

SEQ ID NO: 997356 - RNA, 19 nt, Human
ugaccagggguuucccugg

SEQ ID NO: 997357 - RNA, 22 nt, Human
ugagaagccaucugcaggaagg

SEQ ID NO: 997358 - RNA, 20 nt, Human
ugagaauguccaaagggaaa

SEQ ID NO: 997359 - RNA, 23 nt, Human
ugagguucuggggugaccagggg

SEQ ID NO: 997360 - RNA, 23 nt, Human
ugaguuauaauucacaguaagaa

SEQ ID NO: 997361 - RNA, 24 nt, Human
ugcccgaccaaggaggcaaggggc

SEQ ID NO: 997362 - RNA, 20 nt, Human
ugccgcuggagcgggaggaa

SEQ ID NO: 997363 - RNA, 19 nt, Human
uggagcgggaggaagggca

SEQ ID NO: 997364 - RNA, 24 nt, Human
uggagcgggaggaagggcaccacu

SEQ ID NO: 997365 - RNA, 19 nt, Human
uggccccuguaauucaccu

SEQ ID NO: 997366 - RNA, 19 nt, Human
uggccucaguucccucagc

SEQ ID NO: 997367 - RNA, 18 nt, Human
ugggguggaggggaggag

SEQ ID NO: 997368 - RNA, 25 nt, Human
uuaaaaacaucuaaaaccaggccca

SEQ ID NO: 997369 - RNA, 21 nt, Human
uuccuauuuuucccaggccug

SEQ ID NO: 997370 - RNA, 24 nt, Human
uuccugcauggccuggccaucagg

SEQ ID NO: 997371 - RNA, 21 nt, Human
uucuggaaacugagaaggcuc

SEQ ID NO: 997372 - RNA, 24 nt, Human
uugcagccguuggaggagaagagc

SEQ ID NO: 997373 - RNA, 25 nt, Human
uugcagccguuggaggagaagagcu

SEQ ID NO: 997374 - RNA, 21 nt, Human
uuggacccucgcuuccccgcu

SEQ ID NO: 997375 - RNA, 23 nt, Human
uuggcuccaggcccagcugggcc

SEQ ID NO: 997376 - RNA, 19 nt, Human
aaagagauuucuagccccc

SEQ ID NO: 997377 - RNA, 20 nt, Human
aacaacccuguggucaaaga

SEQ ID NO: 997378 - RNA, 18 nt, Human
aacucagagcaagagccu

SEQ ID NO: 997379 - RNA, 19 nt, Human
acgcugcuuacucaggaac

SEQ ID NO: 997380 - RNA, 27 nt, Human
acucagagcaagagccuucuccuacgg

SEQ ID NO: 997381 - RNA, 21 nt, Human
aguuugguuuaucaucacauc

SEQ ID NO: 997382 - RNA, 22 nt, Human
cagagccaugcucagggcacag

SEQ ID NO: 997383 - RNA, 23 nt, Human
cagcuuaccugucaacuacaggg

SEQ ID NO: 997384 - RNA, 21 nt, Human
cauaacucagagcaagagccu

SEQ ID NO: 997385 - RNA, 21 nt, Human
caugcucagggcacagauaga

SEQ ID NO: 997386 - RNA, 18 nt, Human
ccaaggugugcaagacga

SEQ ID NO: 997387 - RNA, 26 nt, Human
cccaacccugggaaggaugcccgaga

SEQ ID NO: 997388 - RNA, 19 nt, Human
cccccacgaggaacaaagc

SEQ ID NO: 997389 - RNA, 20 nt, Human
ccccuagagagggggaugga

SEQ ID NO: 997390 - RNA, 20 nt, Human
ccucugccccagccugaugc

SEQ ID NO: 997391 - RNA, 22 nt, Human
ccuguggucaaagacauggaag

SEQ ID NO: 997392 - RNA, 22 nt, Human
cuagagccugggcagcaacaac

SEQ ID NO: 997393 - RNA, 23 nt, Human
cuauuuguguaagacccaacccu

SEQ ID NO: 997394 - RNA, 21 nt, Human
cuccuuggcaccacaguccga

SEQ ID NO: 997395 - RNA, 22 nt, Human
cugcaaaucccacagucuguuc

SEQ ID NO: 997396 - RNA, 24 nt, Human
cuggaaagagauuucuagccccca

SEQ ID NO: 997397 - RNA, 24 nt, Human
gacaauagcuaugccucugccccc

SEQ ID NO: 997398 - RNA, 19 nt, Human
gagauuucuagcccccacg

SEQ ID NO: 997399 - RNA, 19 nt, Human
gcccccacgaggaacaaag

SEQ ID NO: 997400 - RNA, 21 nt, Human
gccugggguugggggauagcu

SEQ ID NO: 997401 - RNA, 18 nt, Human
ggaugggagucgagaugg

SEQ ID NO: 997402 - RNA, 18 nt, Human
ggcaugggaagugaugag

SEQ ID NO: 997403 - RNA, 23 nt, Human
gggcucugagaacacaugaagca

SEQ ID NO: 997404 - RNA, 21 nt, Human
uaacucagagcaagagccuuc

SEQ ID NO: 997405 - RNA, 23 nt, Human
uaacucagagcaagagccuucua

SEQ ID NO: 997406 - RNA, 21 nt, Human
uaauaaguuugguuuaucauc

SEQ ID NO: 997407 - RNA, 21 nt, Human
uaccagaccccugcuuagucc

SEQ ID NO: 997408 - RNA, 24 nt, Human
ucacuagcaagugcuaacauuugg

SEQ ID NO: 997409 - RNA, 18 nt, Human
ucagcagauagaugagac

SEQ ID NO: 997410 - RNA, 18 nt, Human
ucaucacaucaagauaaa

SEQ ID NO: 997411 - RNA, 22 nt, Human
uccaagagccccuagagagggg

SEQ ID NO: 997412 - RNA, 22 nt, Human
ucuagagugcaagguccaucca

SEQ ID NO: 997413 - RNA, 22 nt, Human
ucuagcccccacgaggaacaaa

SEQ ID NO: 997414 - RNA, 28 nt, Human
ucuagcccccacgaggaaccgggugucc

SEQ ID NO: 997415 - RNA, 21 nt, Human
ugcaagacgaccugggggcag

SEQ ID NO: 997416 - RNA, 25 nt, Human
uggaagaaacacucugcaaauccca

SEQ ID NO: 997417 - RNA, 27 nt, Human
uggaagaaacacucugcaaaucccacu

SEQ ID NO: 997418 - RNA, 20 nt, Human
ugggaaggaugcccgagaca

SEQ ID NO: 997419 - RNA, 24 nt, Human
ugggguugggggauagcuggggag

SEQ ID NO: 997420 - RNA, 19 nt, Human
uucacaaucuggaacugga

SEQ ID NO: 997421 - RNA, 20 nt, Human
uugacgaugaggaaauccuc

SEQ ID NO: 997422 - RNA, 20 nt, Human
uuuuuuuuuuuuuuuuuugg

SEQ ID NO: 997423 - RNA, 23 nt, Human
aaaaaaaaaagcucauaaaaugc

SEQ ID NO: 997424 - RNA, 19 nt, Human
aaaaaaacacacacgcaau

SEQ ID NO: 997425 - RNA, 25 nt, Human
aaaaaauuccccacccaaucaacca

SEQ ID NO: 997426 - RNA, 25 nt, Human
aaaaaauuccccacccaaucaacca

SEQ ID NO: 997427 - RNA, 23 nt, Human
aaaaauuccccacccaaucaacc

SEQ ID NO: 997428 - RNA, 23 nt, Human
aaaaauuccccacccaaucaacc

SEQ ID NO: 997429 - RNA, 22 nt, Human
aaaaugcaccacaacccaauua

SEQ ID NO: 997430 - RNA, 20 nt, Human
aaaaugcugacuaauguaua

SEQ ID NO: 997431 - RNA, 20 nt, Human
aaacaaugcuacacucauuu

SEQ ID NO: 997432 - RNA, 18 nt, Human
aaaugagaauaaugaaga

SEQ ID NO: 997433 - RNA, 18 nt, Human
aaaugagaauaaugaaga

SEQ ID NO: 997434 - RNA, 26 nt, Human
aacaaauaaauaaaggggaagucaaa

SEQ ID NO: 997435 - RNA, 21 nt, Human
aacacacaucuaaccucccca

SEQ ID NO: 997436 - RNA, 21 nt, Human
aacacacaucuaaccucccca

SEQ ID NO: 997437 - RNA, 28 nt, Human
aacccaaucacuuugcaucuuucugcaa

SEQ ID NO: 997438 - RNA, 28 nt, Human
aacccaaucacuuugcaucuuucugcaa

SEQ ID NO: 997439 - RNA, 19 nt, Human
aagaaacucauucacgaag

SEQ ID NO: 997440 - RNA, 20 nt, Human
aagaaacucauucacgaagc

SEQ ID NO: 997441 - RNA, 18 nt, Human
aagauaaauaauggaugg

SEQ ID NO: 997442 - RNA, 23 nt, Human
aagauagugucuaaauacacuga

SEQ ID NO: 997443 - RNA, 22 nt, Human
aagguucaguucugaacagcuc

SEQ ID NO: 997444 - RNA, 22 nt, Human
aaugcuaauguuaguguauaaa

SEQ ID NO: 997445 - RNA, 22 nt, Human
acaaaccaagagaaaccaacca

SEQ ID NO: 997446 - RNA, 23 nt, Human
acaaagcauaaaaaacuagcccc

SEQ ID NO: 997447 - RNA, 23 nt, Human
acaaagcauaaaaaacuagcccc

SEQ ID NO: 997448 - RNA, 18 nt, Human
acaccacauauuccagac

SEQ ID NO: 997449 - RNA, 18 nt, Human
acaccacauauuccagac

SEQ ID NO: 997450 - RNA, 19 nt, Human
acaggaacaguuugcaugg

SEQ ID NO: 997451 - RNA, 19 nt, Human
acaggaacaguuugcaugg

SEQ ID NO: 997452 - RNA, 20 nt, Human
accaaugcauggcccuauaa

SEQ ID NO: 997453 - RNA, 24 nt, Human
acgaagcacugcuuguguacacca

SEQ ID NO: 997454 - RNA, 24 nt, Human
acuaucuuaucucccaacucuggu

SEQ ID NO: 997455 - RNA, 26 nt, Human
acucauacacuccaagccugaaacaa

SEQ ID NO: 997456 - RNA, 26 nt, Human
acucauacacuccaagccugaaacaa

SEQ ID NO: 997457 - RNA, 21 nt, Human
acuuaaaaaaaaaaaaaacac

SEQ ID NO: 997458 - RNA, 19 nt, Human
acuuaaaaaaaaaaaaaca

SEQ ID NO: 997459 - RNA, 21 nt, Human
agaaaguccagccauaauucc

SEQ ID NO: 997460 - RNA, 23 nt, Human
agaagcagaaacaaugcugaaca

SEQ ID NO: 997461 - RNA, 23 nt, Human
agaagcagaaacaaugcugaaca

SEQ ID NO: 997462 - RNA, 21 nt, Human
agacacccccaaacacuguaa

SEQ ID NO: 997463 - RNA, 21 nt, Human
agagauuaucaaguacugguc

SEQ ID NO: 997464 - RNA, 18 nt, Human
agaggaaaucagucagag

SEQ ID NO: 997465 - RNA, 23 nt, Human
agcaccaacacugugaagaacag

SEQ ID NO: 997466 - RNA, 18 nt, Human
agcugccugccuuucaag

SEQ ID NO: 997467 - RNA, 18 nt, Human
agcugccugccuuucaag

SEQ ID NO: 997468 - RNA, 25 nt, Human
aggaagucgaaaacccaaucacuuu

SEQ ID NO: 997469 - RNA, 25 nt, Human
aggaagucgaaaacccaaucacuuu

SEQ ID NO: 997470 - RNA, 22 nt, Human
aggaggaagagaaguagcaagg

SEQ ID NO: 997471 - RNA, 22 nt, Human
aggaggaagagaaguagcaagg

SEQ ID NO: 997472 - RNA, 18 nt, Human
aggcaaaacagagcaaaa

SEQ ID NO: 997473 - RNA, 18 nt, Human
aggcaaaacagagcaaaa

SEQ ID NO: 997474 - RNA, 21 nt, Human
aggcaauuaaaaaaaaaaaaa

SEQ ID NO: 997475 - RNA, 21 nt, Human
agguacccagacggcaggcgc

SEQ ID NO: 997476 - RNA, 18 nt, Human
aguuacugaaaaaaaaug

SEQ ID NO: 997477 - RNA, 20 nt, Human
auaaaguguacagcugaccc

SEQ ID NO: 997478 - RNA, 23 nt, Human
auaauuuuaaaguaacauuacaa

SEQ ID NO: 997479 - RNA, 23 nt, Human
auaauuuuaaaguaacauuacaa

SEQ ID NO: 997480 - RNA, 18 nt, Human
aucaucaccagacagucc

SEQ ID NO: 997481 - RNA, 21 nt, Human
augcgaggugaggaguggaca

SEQ ID NO: 997482 - RNA, 26 nt, Human
caaaaaaaaaaaagcucauaaaaugc

SEQ ID NO: 997483 - RNA, 24 nt, Human
caaaaaaaguaaauguuaaaggca

SEQ ID NO: 997484 - RNA, 22 nt, Human
caaaaacaaacuuugagaaaca

SEQ ID NO: 997485 - RNA, 22 nt, Human
caaaaacaaacuuugagaaaca

SEQ ID NO: 997486 - RNA, 24 nt, Human
caaagaacagguguuaacacacaa

SEQ ID NO: 997487 - RNA, 25 nt, Human
caacaaauaaauaaaggggaaguca

SEQ ID NO: 997488 - RNA, 27 nt, Human
cacaaaccaagagaaaccaaccaacaa

SEQ ID NO: 997489 - RNA, 20 nt, Human
cacaaauaguaagagaaaac

SEQ ID NO: 997490 - RNA, 20 nt, Human
cacauuaagaaggcacaugu

SEQ ID NO: 997491 - RNA, 19 nt, Human
cacucauacacuccaagcc

SEQ ID NO: 997492 - RNA, 19 nt, Human
cacucauacacuccaagcc

SEQ ID NO: 997493 - RNA, 19 nt, Human
cacucuucacucagaugcc

SEQ ID NO: 997494 - RNA, 21 nt, Human
cagaaaccacaguaugauauu

SEQ ID NO: 997495 - RNA, 21 nt, Human
cagaaaccacaguaugauauu

SEQ ID NO: 997496 - RNA, 22 nt, Human
cagauuucagaagcagaaacaa

SEQ ID NO: 997497 - RNA, 22 nt, Human
cagauuucagaagcagaaacaa

SEQ ID NO: 997498 - RNA, 18 nt, Human
cagcaaaacccaucacaa

SEQ ID NO: 997499 - RNA, 27 nt, Human
cagcaaauaaauaaaggggaagucaaa

SEQ ID NO: 997500 - RNA, 18 nt, Human
caggagaugccuaacauc

SEQ ID NO: 997501 - RNA, 23 nt, Human
caggcaaaacagagcaaaacugg

SEQ ID NO: 997502 - RNA, 24 nt, Human
caggcaaaacagagcaaaacugga

SEQ ID NO: 997503 - RNA, 24 nt, Human
caggcaaaacagagcaaaacugga

SEQ ID NO: 997504 - RNA, 23 nt, Human
cauacacuccaagccugaaacac

SEQ ID NO: 997505 - RNA, 23 nt, Human
cauacacuccaagccugaaacac

SEQ ID NO: 997506 - RNA, 20 nt, Human
cauggcaacuaucaccuguu

SEQ ID NO: 997507 - RNA, 24 nt, Human
ccaaccuugaaaaaaagcccaacg

SEQ ID NO: 997508 - RNA, 24 nt, Human
ccaaccuugaaaaaaagcccaacg

SEQ ID NO: 997509 - RNA, 18 nt, Human
ccacgucaugcagucaca

SEQ ID NO: 997510 - RNA, 20 nt, Human
ccauaauuccauuauaucca

SEQ ID NO: 997511 - RNA, 25 nt, Human
cccaaccuugaaaaaaagcccaacg

SEQ ID NO: 997512 - RNA, 25 nt, Human
cccaaccuugaaaaaaagcccaacg

SEQ ID NO: 997513 - RNA, 18 nt, Human
ccccaccccaucaccaga

SEQ ID NO: 997514 - RNA, 24 nt, Human
ccccaccccaucaccagauucagu

SEQ ID NO: 997515 - RNA, 25 nt, Human
ccccaccccaucaccagauucagua

SEQ ID NO: 997516 - RNA, 22 nt, Human
cccccaggguucccugcaucaa

SEQ ID NO: 997517 - RNA, 23 nt, Human
cgaagcacugcuuguguacacca

SEQ ID NO: 997518 - RNA, 18 nt, Human
cggcugcgcugcaccucg

SEQ ID NO: 997519 - RNA, 25 nt, Human
cuacaacaccuguaaugucuguacc

SEQ ID NO: 997520 - RNA, 22 nt, Human
cuagguacaaagcauaaaaaac

SEQ ID NO: 997521 - RNA, 22 nt, Human
cucauacacuccaagccugaaa

SEQ ID NO: 997522 - RNA, 22 nt, Human
cucauacacuccaagccugaaa

SEQ ID NO: 997523 - RNA, 21 nt, Human
cucccaguacaaggagcaguc

SEQ ID NO: 997524 - RNA, 21 nt, Human
cucccaguacaaggagcaguc

SEQ ID NO: 997525 - RNA, 25 nt, Human
cucccaugcaaaggauacuguugca

SEQ ID NO: 997526 - RNA, 25 nt, Human
cucccaugcaaaggauacuguugca

SEQ ID NO: 997527 - RNA, 18 nt, Human
cuguauuguucagucugu

SEQ ID NO: 997528 - RNA, 26 nt, Human
cuuaaaaaaaaaaaaaacacacacgc

SEQ ID NO: 997529 - RNA, 25 nt, Human
cuuaaaaaaaaaaaaacacacacgc

SEQ ID NO: 997530 - RNA, 19 nt, Human
cuuaucucccaacucuggu

SEQ ID NO: 997531 - RNA, 24 nt, Human
gaaaaaccauacacacagaauaca

SEQ ID NO: 997532 - RNA, 21 nt, Human
gaaaacaaauacuaaaacuuc

SEQ ID NO: 997533 - RNA, 21 nt, Human
gaaaacaaauacuaaaacuuc

SEQ ID NO: 997534 - RNA, 19 nt, Human
gaagauaaauaauggaugg

SEQ ID NO: 997535 - RNA, 21 nt, Human
gacaucaucaccagacagucc

SEQ ID NO: 997536 - RNA, 20 nt, Human
gacucugugagggagguaaa

SEQ ID NO: 997537 - RNA, 19 nt, Human
gagaaacacauuaagaagg

SEQ ID NO: 997538 - RNA, 21 nt, Human
gccauaauuccauuauaucca

SEQ ID NO: 997539 - RNA, 19 nt, Human
gccccaccccaucaccaga

SEQ ID NO: 997540 - RNA, 19 nt, Human
gcugcgguggggccggcug

SEQ ID NO: 997541 - RNA, 25 nt, Human
ggagcgaggccggcucggcggggaa

SEQ ID NO: 997542 - RNA, 18 nt, Human
ggaguggacagaauuggc

SEQ ID NO: 997543 - RNA, 19 nt, Human
ggaguggacagaauuggcg

SEQ ID NO: 997544 - RNA, 18 nt, Human
ggauuggaaaaauguaua

SEQ ID NO: 997545 - RNA, 18 nt, Human
ggauuggaaaaauguaua

SEQ ID NO: 997546 - RNA, 21 nt, Human
ggcaaaacagagcaaaacugg

SEQ ID NO: 997547 - RNA, 19 nt, Human
ggccaguccaaguccuuuu

SEQ ID NO: 997548 - RNA, 18 nt, Human
ggcgggacugcugaggua

SEQ ID NO: 997549 - RNA, 18 nt, Human
gggacugcugagguagcu

SEQ ID NO: 997550 - RNA, 22 nt, Human
guggcagagaaagugccacggc

SEQ ID NO: 997551 - RNA, 18 nt, Human
guuugauuaugaaggcaa

SEQ ID NO: 997552 - RNA, 24 nt, Human
guuuucccacuaaucuauuuaaau

SEQ ID NO: 997553 - RNA, 24 nt, Human
guuuucccacuaaucuauuuaaau

SEQ ID NO: 997554 - RNA, 24 nt, Human
uaaaacaaaaaaugaaaagucacu

SEQ ID NO: 997555 - RNA, 18 nt, Human
uaaaacuucaggcaaaac

SEQ ID NO: 997556 - RNA, 18 nt, Human
uaaaacuucaggcaaaac

SEQ ID NO: 997557 - RNA, 18 nt, Human
uaaaaugcauuuuggcca

SEQ ID NO: 997558 - RNA, 22 nt, Human
uaaagacacccccaaacacugu

SEQ ID NO: 997559 - RNA, 19 nt, Human
uaaaguguacagcugaccc

SEQ ID NO: 997560 - RNA, 20 nt, Human
uaaaugcauugccacagaag

SEQ ID NO: 997561 - RNA, 20 nt, Human
uaaaugcauugccacagaag

SEQ ID NO: 997562 - RNA, 25 nt, Human
uaaccaguauuuaugggccuuauaa

SEQ ID NO: 997563 - RNA, 25 nt, Human
uaaccaguauuuaugggccuuauaa

SEQ ID NO: 997564 - RNA, 23 nt, Human
uaacucaugcccugccccuauaa

SEQ ID NO: 997565 - RNA, 19 nt, Human
uaauuggucucaaauuuca

SEQ ID NO: 997566 - RNA, 19 nt, Human
uaauuggucucaaauuuca

SEQ ID NO: 997567 - RNA, 21 nt, Human
uacaauacaaggcaauuaaaa

SEQ ID NO: 997568 - RNA, 20 nt, Human
uacaauagcaaaaaaaaaag

SEQ ID NO: 997569 - RNA, 19 nt, Human
uacacaaaucuguucaugu

SEQ ID NO: 997570 - RNA, 20 nt, Human
uacagugcaguacacaauua

SEQ ID NO: 997571 - RNA, 20 nt, Human
uacagugcaguacacaauua

SEQ ID NO: 997572 - RNA, 22 nt, Human
uacccagacggcaggcgcgggg

SEQ ID NO: 997573 - RNA, 22 nt, Human
uacuaaaacuucaggcaaaaca

SEQ ID NO: 997574 - RNA, 22 nt, Human
uacuaaaacuucaggcaaaaca

SEQ ID NO: 997575 - RNA, 20 nt, Human
uagaauccucacagugacuc

SEQ ID NO: 997576 - RNA, 22 nt, Human
uagacaacaaauaaauaaaggg

SEQ ID NO: 997577 - RNA, 22 nt, Human
uagacagcaaauaaauaaaggg

SEQ ID NO: 997578 - RNA, 23 nt, Human
uagcaaaaaaaaaagcucauaaa

SEQ ID NO: 997579 - RNA, 24 nt, Human
uagcaccaacacugugaagaacag

SEQ ID NO: 997580 - RNA, 21 nt, Human
uaguaagagaaaacaacuucu

SEQ ID NO: 997581 - RNA, 18 nt, Human
ucaauacuuacaugugcc

SEQ ID NO: 997582 - RNA, 19 nt, Human
ucaauacuuacaugugcca

SEQ ID NO: 997583 - RNA, 21 nt, Human
ucagaguuuuacauccugaag

SEQ ID NO: 997584 - RNA, 22 nt, Human
ucagaguuuuacauccugaaga

SEQ ID NO: 997585 - RNA, 21 nt, Human
ucagaugccaugaaagacauc

SEQ ID NO: 997586 - RNA, 18 nt, Human
uccaagccugaaacacac

SEQ ID NO: 997587 - RNA, 18 nt, Human
uccaagccugaaacacac

SEQ ID NO: 997588 - RNA, 19 nt, Human
uccaagccugaaacacaca

SEQ ID NO: 997589 - RNA, 19 nt, Human
uccaagccugaaacacaca

SEQ ID NO: 997590 - RNA, 22 nt, Human
ucccaaccuugaaaaaaagccc

SEQ ID NO: 997591 - RNA, 22 nt, Human
ucccaaccuugaaaaaaagccc

SEQ ID NO: 997592 - RNA, 24 nt, Human
ucgggucgugcgcccaggccggcc

SEQ ID NO: 997593 - RNA, 22 nt, Human
ucuaacucacuuugacaaaacu

SEQ ID NO: 997594 - RNA, 21 nt, Human
ucuaacucuuguucuaaagag

SEQ ID NO: 997595 - RNA, 23 nt, Human
ucuagguacaaagcauaaaaaac

SEQ ID NO: 997596 - RNA, 18 nt, Human
ucucccuaacucaugccc

SEQ ID NO: 997597 - RNA, 19 nt, Human
ucugaacagcuccacuuca

SEQ ID NO: 997598 - RNA, 21 nt, Human
ucugcaaaaaauuccccaccc

SEQ ID NO: 997599 - RNA, 21 nt, Human
ucugcaaaaaauuccccaccc

SEQ ID NO: 997600 - RNA, 25 nt, Human
ucuguucauguugccaaacaaaauc

SEQ ID NO: 997601 - RNA, 22 nt, Human
ucuucagucucccuaacucaug

SEQ ID NO: 997602 - RNA, 24 nt, Human
ugaaaaaaaaugugucgagaaaca

SEQ ID NO: 997603 - RNA, 20 nt, Human
ugaaaaaaagcccaacgaau

SEQ ID NO: 997604 - RNA, 20 nt, Human
ugaaaaaaagcccaacgaau

SEQ ID NO: 997605 - RNA, 23 nt, Human
ugaaaaaaagcccaacgaaugua

SEQ ID NO: 997606 - RNA, 23 nt, Human
ugaaaaaaagcccaacgaaugua

SEQ ID NO: 997607 - RNA, 19 nt, Human
ugaaaagcaagaagaguca

SEQ ID NO: 997608 - RNA, 19 nt, Human
ugaaaagcaagaagaguca

SEQ ID NO: 997609 - RNA, 22 nt, Human
ugaaaaugaaagaugccuauuc

SEQ ID NO: 997610 - RNA, 21 nt, Human
ugaaacacacaucuaaccucc

SEQ ID NO: 997611 - RNA, 21 nt, Human
ugaaacacacaucuaaccucc

SEQ ID NO: 997612 - RNA, 24 nt, Human
ugaaacacacaucuaaccucccca

SEQ ID NO: 997613 - RNA, 24 nt, Human
ugaaacacacaucuaaccucccca

SEQ ID NO: 997614 - RNA, 21 nt, Human
ugaagauacucuuccuugcuc

SEQ ID NO: 997615 - RNA, 21 nt, Human
ugaagauacucuuccuugcuc

SEQ ID NO: 997616 - RNA, 20 nt, Human
ugagaaaaaaaaacaaagcc

SEQ ID NO: 997617 - RNA, 24 nt, Human
ugaggaggaagagaaguagcaagg

SEQ ID NO: 997618 - RNA, 24 nt, Human
ugaggaggaagagaaguagcaagg

SEQ ID NO: 997619 - RNA, 20 nt, Human
ugcagaggagauggaaaaac

SEQ ID NO: 997620 - RNA, 24 nt, Human
ugccacggccccaccccaucacca

SEQ ID NO: 997621 - RNA, 21 nt, Human
ugcgaggugaggaguggacag

SEQ ID NO: 997622 - RNA, 20 nt, Human
ugcggaaaaaggaagugacu

SEQ ID NO: 997623 - RNA, 20 nt, Human
uggcccaaugguaccgacag

SEQ ID NO: 997624 - RNA, 21 nt, Human
uggugugguaaucccaaccuu

SEQ ID NO: 997625 - RNA, 21 nt, Human
uggugugguaaucccaaccuu

SEQ ID NO: 997626 - RNA, 18 nt, Human
uguaaauaucugucuucu

SEQ ID NO: 997627 - RNA, 18 nt, Human
uguaaauaucugucuucu

SEQ ID NO: 997628 - RNA, 18 nt, Human
ugucaacaaaaacaaacu

SEQ ID NO: 997629 - RNA, 18 nt, Human
ugucaacaaaaacaaacu

SEQ ID NO: 997630 - RNA, 21 nt, Human
ugucgagaaacacauuaagaa

SEQ ID NO: 997631 - RNA, 22 nt, Human
uguugcacauaaaagauauccu

SEQ ID NO: 997632 - RNA, 22 nt, Human
uguugcacauaaaagauauccu

SEQ ID NO: 997633 - RNA, 22 nt, Human
uguuugauuaugaaggcaacac

SEQ ID NO: 997634 - RNA, 25 nt, Human
uuaaggcaagacugagaguuuggcu

SEQ ID NO: 997635 - RNA, 25 nt, Human
uuaaggcaagacugagaguuuggcu

SEQ ID NO: 997636 - RNA, 20 nt, Human
uuacagacaugaauuuuucc

SEQ ID NO: 997637 - RNA, 21 nt, Human
uuacaugcaauguaugaaaaa

SEQ ID NO: 997638 - RNA, 22 nt, Human
uucaacuuaggugaaaagcaag

SEQ ID NO: 997639 - RNA, 24 nt, Human
uuccaaauauaaucucacaggucu

SEQ ID NO: 997640 - RNA, 18 nt, Human
uucgcugaaaguccccca

SEQ ID NO: 997641 - RNA, 22 nt, Human
uucuguguugugguuggccuug

SEQ ID NO: 997642 - RNA, 22 nt, Human
uucuguguugugguuggccuug

SEQ ID NO: 997643 - RNA, 18 nt, Human
uugagaaaaaaaaacaaa

SEQ ID NO: 997644 - RNA, 21 nt, Human
uugcagaggagauggaaaaac

SEQ ID NO: 997645 - RNA, 25 nt, Human
aaauguuagagguucaaaacacuuc

SEQ ID NO: 997646 - RNA, 19 nt, Human
aagacgcccacuggagaca

SEQ ID NO: 997647 - RNA, 21 nt, Human
aaggcaaaaaccuuuauucau

SEQ ID NO: 997648 - RNA, 26 nt, Human
acucucugcugucaucaucagcugau

SEQ ID NO: 997649 - RNA, 21 nt, Human
agaauagagccggggcccaag

SEQ ID NO: 997650 - RNA, 21 nt, Human
agggaagauuuagcuuuccaa

SEQ ID NO: 997651 - RNA, 19 nt, Human
cagaauagagccggggccc

SEQ ID NO: 997652 - RNA, 19 nt, Human
cagcccagaauagagccgg

SEQ ID NO: 997653 - RNA, 23 nt, Human
cccagaauagagccggggcccaa

SEQ ID NO: 997654 - RNA, 19 nt, Human
cccgcagaguuaggacagc

SEQ ID NO: 997655 - RNA, 22 nt, Human
cccgcagaguuaggacagcuca

SEQ ID NO: 997656 - RNA, 21 nt, Human
cccgcagcccagaauagagcc

SEQ ID NO: 997657 - RNA, 26 nt, Human
cccgcagcccagaauagagccggggc

SEQ ID NO: 997658 - RNA, 24 nt, Human
ccuccgaagauuaaaggaaagagc

SEQ ID NO: 997659 - RNA, 19 nt, Human
ccugccagcucucagaguc

SEQ ID NO: 997660 - RNA, 18 nt, Human
cugaaguuugauuuuggg

SEQ ID NO: 997661 - RNA, 26 nt, Human
gaauagagccggggcccaagacgccc

SEQ ID NO: 997662 - RNA, 24 nt, Human
gagccggggcccaagacgcccacu

SEQ ID NO: 997663 - RNA, 20 nt, Human
gcccugccacucucugcugu

SEQ ID NO: 997664 - RNA, 19 nt, Human
gcgagcccuucccaggccc

SEQ ID NO: 997665 - RNA, 18 nt, Human
uaagacaaggcaaaaacc

SEQ ID NO: 997666 - RNA, 19 nt, Human
uaagacaaggcaaaaaccu

SEQ ID NO: 997667 - RNA, 23 nt, Human
uaggacagcucauuuggcacccc

SEQ ID NO: 997668 - RNA, 21 nt, Human
uccuuggugguuaaaccugag

SEQ ID NO: 997669 - RNA, 18 nt, Human
ucuccugucuucucauuc

SEQ ID NO: 997670 - RNA, 18 nt, Human
ucuccugucuucucauuc

SEQ ID NO: 997671 - RNA, 22 nt, Human
ucuccugucuucucauucuucu

SEQ ID NO: 997672 - RNA, 18 nt, Human
ugaaacugaaguuugauu

SEQ ID NO: 997673 - RNA, 18 nt, Human
ugacuuuggguccucagc

SEQ ID NO: 997674 - RNA, 23 nt, Human
ugggaaguaaauguuagagguuc

SEQ ID NO: 997675 - RNA, 20 nt, Human
uggguccucagcccugccac

SEQ ID NO: 997676 - RNA, 23 nt, Human
uguuagagguucaaaacacuuaa

SEQ ID NO: 997677 - RNA, 23 nt, Human
uuggcacccggcgagcccuuccc

SEQ ID NO: 997678 - RNA, 19 nt, Human
aaaaccauaccaaggccau

SEQ ID NO: 997679 - RNA, 25 nt, Human
aaagaaaauaaacacagccuuagag

SEQ ID NO: 997680 - RNA, 23 nt, Human
aacacgcucaugagggcaaagga

SEQ ID NO: 997681 - RNA, 22 nt, Human
aagcggcgcuccuggggugcag

SEQ ID NO: 997682 - RNA, 22 nt, Human
aauagccauauaaaaaaugaga

SEQ ID NO: 997683 - RNA, 23 nt, Human
acacagccuuagagacccaugga

SEQ ID NO: 997684 - RNA, 25 nt, Human
acaguuauuaaaggcagaugacuuu

SEQ ID NO: 997685 - RNA, 27 nt, Human
agaaaauaaacacagccuuagagaccc

SEQ ID NO: 997686 - RNA, 22 nt, Human
agaaacagagacauagcaauau

SEQ ID NO: 997687 - RNA, 21 nt, Human
agaagcgguggaugaggcucc

SEQ ID NO: 997688 - RNA, 21 nt, Human
agacaagaauuugaaggcagc

SEQ ID NO: 997689 - RNA, 25 nt, Human
agagaaaaaauagccauauaaaaaa

SEQ ID NO: 997690 - RNA, 20 nt, Human
agaugucccacggagauucu

SEQ ID NO: 997691 - RNA, 20 nt, Human
aggaaaaaaaaaaguuuaaa

SEQ ID NO: 997692 - RNA, 25 nt, Human
aggaaaaaaaaaaguuuaaagaaaa

SEQ ID NO: 997693 - RNA, 23 nt, Human
aguacaaauaaaaccauaccaag

SEQ ID NO: 997694 - RNA, 19 nt, Human
caaaggaaaauauucucau

SEQ ID NO: 997695 - RNA, 20 nt, Human
caccaaaguacaaauaaaac

SEQ ID NO: 997696 - RNA, 24 nt, Human
cacgcucaugagggcaaaggaaaa

SEQ ID NO: 997697 - RNA, 19 nt, Human
cacuaagacccugaggccu

SEQ ID NO: 997698 - RNA, 23 nt, Human
cagacuugucuuaaauguuccau

SEQ ID NO: 997699 - RNA, 22 nt, Human
cagcagagaaaaaauagccaua

SEQ ID NO: 997700 - RNA, 21 nt, Human
cagcuauuauaaacacgcuca

SEQ ID NO: 997701 - RNA, 21 nt, Human
cagcucccagggucccauccc

SEQ ID NO: 997702 - RNA, 19 nt, Human
cagggucaggcccuuccgc

SEQ ID NO: 997703 - RNA, 18 nt, Human
cggugcauacugggaguu

SEQ ID NO: 997704 - RNA, 20 nt, Human
cuccuggggugcagaggauu

SEQ ID NO: 997705 - RNA, 23 nt, Human
cugcaguaauauugaugcuccag

SEQ ID NO: 997706 - RNA, 28 nt, Human
gaaaauaaacacagccuuagagacccag

SEQ ID NO: 997707 - RNA, 20 nt, Human
gagcccggggguccaagcgg

SEQ ID NO: 997708 - RNA, 18 nt, Human
gagggggcuucuugaggc

SEQ ID NO: 997709 - RNA, 18 nt, Human
gccugggaagcagccugg

SEQ ID NO: 997710 - RNA, 24 nt, Human
ggugcauacugggaguuguagucu

SEQ ID NO: 997711 - RNA, 25 nt, Human
uaaaaagcaggcaguagccaucucc

SEQ ID NO: 997712 - RNA, 24 nt, Human
uaaauacacaagauaaaaagcagg

SEQ ID NO: 997713 - RNA, 20 nt, Human
uacaaauaaaaccauaccaa

SEQ ID NO: 997714 - RNA, 19 nt, Human
uaccaaggccauauugcaa

SEQ ID NO: 997715 - RNA, 21 nt, Human
uagaaaaaaucaaauggagua

SEQ ID NO: 997716 - RNA, 19 nt, Human
uagccauauaaaaaaugag

SEQ ID NO: 997717 - RNA, 19 nt, Human
uagccaucuccaagauguu

SEQ ID NO: 997718 - RNA, 22 nt, Human
uauugagccugaggagaggaga

SEQ ID NO: 997719 - RNA, 24 nt, Human
uccaaucugaggagaggaaaaaaa

SEQ ID NO: 997720 - RNA, 21 nt, Human
uccagagagaugucccacgga

SEQ ID NO: 997721 - RNA, 18 nt, Human
uccauucuucaccuuaga

SEQ ID NO: 997722 - RNA, 18 nt, Human
ucccagggucccaucccc

SEQ ID NO: 997723 - RNA, 21 nt, Human
uccgugagaggcccgaccuag

SEQ ID NO: 997724 - RNA, 22 nt, Human
ucuauaguucagaaacagagac

SEQ ID NO: 997725 - RNA, 21 nt, Human
ugagaaaaggugagagauaga

SEQ ID NO: 997726 - RNA, 18 nt, Human
ugagagauagaaaaaauc

SEQ ID NO: 997727 - RNA, 18 nt, Human
ugaggcagugucuaucag

SEQ ID NO: 997728 - RNA, 22 nt, Human
ugaggccugggaagcagccugg

SEQ ID NO: 997729 - RNA, 24 nt, Human
ugcagaggauuugugacagccacg

SEQ ID NO: 997730 - RNA, 19 nt, Human
ugcaguacuuaaccugaaa

SEQ ID NO: 997731 - RNA, 21 nt, Human
ugcaguacuuaaccugaaaaa

SEQ ID NO: 997732 - RNA, 19 nt, Human
ugggaugacugagucugaa

SEQ ID NO: 997733 - RNA, 21 nt, Human
uggguggggucagagaagcgg

SEQ ID NO: 997734 - RNA, 21 nt, Human
ugugaaacaucagcagagaaa

SEQ ID NO: 997735 - RNA, 20 nt, Human
ugugacguuuucuccucuuu

SEQ ID NO: 997736 - RNA, 20 nt, Human
uguggaggccaugaaaggcg

SEQ ID NO: 997737 - RNA, 18 nt, Human
uuguaagaauggaaauaa

SEQ ID NO: 997738 - RNA, 22 nt, Human
uuguaagaauggaaauaaguuc

SEQ ID NO: 997739 - RNA, 27 nt, Human
aaaaaaaaaagaggaagaaugaccugg

SEQ ID NO: 997740 - RNA, 18 nt, Human
aagaaaaaacccccacac

SEQ ID NO: 997741 - RNA, 18 nt, Human
aagaaaaaacccccacac

SEQ ID NO: 997742 - RNA, 20 nt, Human
aagaaauagaaauuaauuca

SEQ ID NO: 997743 - RNA, 22 nt, Human
aaggggucaaacucacaaaauc

SEQ ID NO: 997744 - RNA, 19 nt, Human
aagugccggcgacgggaag

SEQ ID NO: 997745 - RNA, 21 nt, Human
aagugccggcgacgggaagcc

SEQ ID NO: 997746 - RNA, 24 nt, Human
acaacgguucugcaccaaaagaaa

SEQ ID NO: 997747 - RNA, 19 nt, Human
acucacaaaauccagugcc

SEQ ID NO: 997748 - RNA, 18 nt, Human
agaccccacugcacaacg

SEQ ID NO: 997749 - RNA, 23 nt, Human
aggaagaaugaccuggcagacag

SEQ ID NO: 997750 - RNA, 18 nt, Human
agggagcagucagcacca

SEQ ID NO: 997751 - RNA, 21 nt, Human
auauggaugguuuuuauaugg

SEQ ID NO: 997752 - RNA, 24 nt, Human
aucacuuuuaguuguaauguacac

SEQ ID NO: 997753 - RNA, 21 nt, Human
auuaaaaaaaaaagaggaaga

SEQ ID NO: 997754 - RNA, 22 nt, Human
caagauaggaauccaaugauuu

SEQ ID NO: 997755 - RNA, 22 nt, Human
cacaaaauccagugccuacaaa

SEQ ID NO: 997756 - RNA, 20 nt, Human
caccauccgggaggugcaag

SEQ ID NO: 997757 - RNA, 18 nt, Human
cacuauguacagaaagau

SEQ ID NO: 997758 - RNA, 19 nt, Human
cacugcacaacgguucugc

SEQ ID NO: 997759 - RNA, 22 nt, Human
cacugcacaacgguucugcacc

SEQ ID NO: 997760 - RNA, 30 nt, Human
cagcaccauccgggaggugcaagcagcggg

SEQ ID NO: 997761 - RNA, 20 nt, Human
cagccuccgcggcgcguccu

SEQ ID NO: 997762 - RNA, 21 nt, Human
cagcgggcgccgagccggggc

SEQ ID NO: 997763 - RNA, 19 nt, Human
cauccauggauuccucuuu

SEQ ID NO: 997764 - RNA, 27 nt, Human
cauucuuuccccaagaaaacuuuaagg

SEQ ID NO: 997765 - RNA, 25 nt, Human
ccaauuaaaaaaaaaagaggaagaa

SEQ ID NO: 997766 - RNA, 20 nt, Human
ccagugccuacaaaauacag

SEQ ID NO: 997767 - RNA, 23 nt, Human
ccccacacuuaaaaagucagggu

SEQ ID NO: 997768 - RNA, 22 nt, Human
cgaccccgaacagccuccgcgg

SEQ ID NO: 997769 - RNA, 19 nt, Human
cgggaggugcaagcagcgg

SEQ ID NO: 997770 - RNA, 23 nt, Human
cucccuuggcacaagauaggaau

SEQ ID NO: 997771 - RNA, 19 nt, Human
cucgaccccgaacagccuc

SEQ ID NO: 997772 - RNA, 19 nt, Human
cugcacaacgguucugcac

SEQ ID NO: 997773 - RNA, 25 nt, Human
cugcaccaaaagaaaaaugaggacc

SEQ ID NO: 997774 - RNA, 19 nt, Human
gaaaauuuguauuccuuaa

SEQ ID NO: 997775 - RNA, 19 nt, Human
gagaagaaaaaacccccac

SEQ ID NO: 997776 - RNA, 20 nt, Human
gccugccgggccggccgcgc

SEQ ID NO: 997777 - RNA, 19 nt, Human
ggaagagaagaaaaaaccc

SEQ ID NO: 997778 - RNA, 24 nt, Human
uaaaaacucccuuggcacaagaua

SEQ ID NO: 997779 - RNA, 22 nt, Human
uaaaacaccuaagugaugaagg

SEQ ID NO: 997780 - RNA, 22 nt, Human
uaagguaaacaucuuaaaacac

SEQ ID NO: 997781 - RNA, 18 nt, Human
ucagcaccauccgggagg

SEQ ID NO: 997782 - RNA, 25 nt, Human
uccucacgacucgccgccgccgccg

SEQ ID NO: 997783 - RNA, 20 nt, Human
ucgccgccgccgccgcuuag

SEQ ID NO: 997784 - RNA, 24 nt, Human
ugggaaccaaggguugguugguuu

SEQ ID NO: 997785 - RNA, 21 nt, Human
aaaauaacuggcaaucagaac

SEQ ID NO: 997786 - RNA, 22 nt, Human
aaaccaccagcauccccaccug

SEQ ID NO: 997787 - RNA, 18 nt, Human
aaaggcaccacggaagcu

SEQ ID NO: 997788 - RNA, 19 nt, Human
aagccaugaaauaauaaaa

SEQ ID NO: 997789 - RNA, 19 nt, Human
aagccccgaaggcgcccag

SEQ ID NO: 997790 - RNA, 27 nt, Human
acacucauacaagccaugaaauaauaa

SEQ ID NO: 997791 - RNA, 20 nt, Human
agaacccuaaagaaacacac

SEQ ID NO: 997792 - RNA, 19 nt, Human
agcggagggcacggcgccu

SEQ ID NO: 997793 - RNA, 19 nt, Human
auggccgccucuuccauga

SEQ ID NO: 997794 - RNA, 23 nt, Human
cagccucucucuccugccgcccc

SEQ ID NO: 997795 - RNA, 24 nt, Human
caggggaggccgcugcuucuugca

SEQ ID NO: 997796 - RNA, 26 nt, Human
cauacaagccaugaaauaauaaaaca

SEQ ID NO: 997797 - RNA, 23 nt, Human
caugacgggcaccuguguaggcc

SEQ ID NO: 997798 - RNA, 21 nt, Human
caugucaaaccaccagcaucc

SEQ ID NO: 997799 - RNA, 21 nt, Human
ccaccagcauccccaccugaa

SEQ ID NO: 997800 - RNA, 22 nt, Human
ccacgcgcuggacccgacccuc

SEQ ID NO: 997801 - RNA, 22 nt, Human
cccacgcgcuggacccgacccu

SEQ ID NO: 997802 - RNA, 18 nt, Human
ccccgaaggcgcccagcu

SEQ ID NO: 997803 - RNA, 22 nt, Human
ccggcagcaaaggcaccacgga

SEQ ID NO: 997804 - RNA, 21 nt, Human
cgaagugaagaaugacaaucc

SEQ ID NO: 997805 - RNA, 24 nt, Human
cgccccugcugggacggcagcccg

SEQ ID NO: 997806 - RNA, 20 nt, Human
cucccugaagcaccagcagc

SEQ ID NO: 997807 - RNA, 18 nt, Human
cugaaaggucccugugga

SEQ ID NO: 997808 - RNA, 18 nt, Human
cugaaugccccggaaguc

SEQ ID NO: 997809 - RNA, 21 nt, Human
cuguguaggccagccucucuc

SEQ ID NO: 997810 - RNA, 19 nt, Human
gaagcaccagcagcuguuc

SEQ ID NO: 997811 - RNA, 20 nt, Human
gcaggcccuggucaggccug

SEQ ID NO: 997812 - RNA, 22 nt, Human
gcuggacccgacccucagaagc

SEQ ID NO: 997813 - RNA, 22 nt, Human
ggcaaucagaacccuaaagaaa

SEQ ID NO: 997814 - RNA, 21 nt, Human
ggcagcaaaggcaccacggaa

SEQ ID NO: 997815 - RNA, 19 nt, Human
guccccaagggcugccggc

SEQ ID NO: 997816 - RNA, 18 nt, Human
uaaaacacagucaagguu

SEQ ID NO: 997817 - RNA, 22 nt, Human
uaaagaaacacacccagucaca

SEQ ID NO: 997818 - RNA, 25 nt, Human
uacaagccaugaaauaauaaaacac

SEQ ID NO: 997819 - RNA, 19 nt, Human
ucaagccccgaaggcgccc

SEQ ID NO: 997820 - RNA, 24 nt, Human
ucagaagcucaagccccgaaggcg

SEQ ID NO: 997821 - RNA, 23 nt, Human
ucuccugccgccccugcugggac

SEQ ID NO: 997822 - RNA, 21 nt, Human
ugaaauaauaaaacacaguca

SEQ ID NO: 997823 - RNA, 19 nt, Human
ugaagaaugacaaucccau

SEQ ID NO: 997824 - RNA, 18 nt, Human
ugaagcaccagcagcugu

SEQ ID NO: 997825 - RNA, 19 nt, Human
ugcaggcccuggucaggcc

SEQ ID NO: 997826 - RNA, 28 nt, Human
uggcaaucagaacccuaaagaaacacac

SEQ ID NO: 997827 - RNA, 18 nt, Human
uggccgccucuuccauga

SEQ ID NO: 997828 - RNA, 18 nt, Human
ugguccccaagggcugcc

SEQ ID NO: 997829 - RNA, 22 nt, Human
ugucugaaaggucccuguggag

SEQ ID NO: 997830 - RNA, 19 nt, Human
ugugcaggcccuggucagg

SEQ ID NO: 997831 - RNA, 23 nt, Human
aaaaaaggaaauauuauagaaga

SEQ ID NO: 997832 - RNA, 21 nt, Human
aaaauauguaccuuauaccaa

SEQ ID NO: 997833 - RNA, 21 nt, Human
aaacaauaauaaaacaaucac

SEQ ID NO: 997834 - RNA, 18 nt, Human
aaagcuaaauaaaagcac

SEQ ID NO: 997835 - RNA, 22 nt, Human
aacaccuguggcuuuuaaaauu

SEQ ID NO: 997836 - RNA, 23 nt, Human
aacuggcauuccagaucuggagc

SEQ ID NO: 997837 - RNA, 18 nt, Human
aagaaguagacuaguuca

SEQ ID NO: 997838 - RNA, 20 nt, Human
aagcaggaaaacaacuauga

SEQ ID NO: 997839 - RNA, 20 nt, Human
aagcaggaaaacaacuauga

SEQ ID NO: 997840 - RNA, 24 nt, Human
aaguaaaucuagccaugcuuuuaa

SEQ ID NO: 997841 - RNA, 28 nt, Human
aaguaggagacagguucuaaggucgacc

SEQ ID NO: 997842 - RNA, 23 nt, Human
aaguauagguagaugucuagaaa

SEQ ID NO: 997843 - RNA, 23 nt, Human
acaguagauuacuuuguuucuua

SEQ ID NO: 997844 - RNA, 21 nt, Human
accuucauccacucaccccac

SEQ ID NO: 997845 - RNA, 21 nt, Human
agaaagacagacuucuacaga

SEQ ID NO: 997846 - RNA, 21 nt, Human
agaagacaaaggucaaacugg

SEQ ID NO: 997847 - RNA, 22 nt, Human
agacuucuacagauccacuccu

SEQ ID NO: 997848 - RNA, 23 nt, Human
agauucaaagaggggaaaaaaag

SEQ ID NO: 997849 - RNA, 18 nt, Human
agccacccccaauaccca

SEQ ID NO: 997850 - RNA, 23 nt, Human
aguaaaucuagccaugcuuuuaa

SEQ ID NO: 997851 - RNA, 19 nt, Human
agugucaaacacaagagga

SEQ ID NO: 997852 - RNA, 23 nt, Human
auuauagcauuuuuauuuuccaa

SEQ ID NO: 997853 - RNA, 27 nt, Human
caacaaugguuccccuaaugugauuga

SEQ ID NO: 997854 - RNA, 21 nt, Human
caacauuguaggccauaauca

SEQ ID NO: 997855 - RNA, 19 nt, Human
caaugcauguugacaagau

SEQ ID NO: 997856 - RNA, 20 nt, Human
caccuucauccacucacccc

SEQ ID NO: 997857 - RNA, 24 nt, Human
caggaacuguuucuggcauuucua

SEQ ID NO: 997858 - RNA, 21 nt, Human
cauaauaaauauugagaccua

SEQ ID NO: 997859 - RNA, 24 nt, Human
cauuguaggccauaaucauauaca

SEQ ID NO: 997860 - RNA, 19 nt, Human
cauuuggcauaaacaauaa

SEQ ID NO: 997861 - RNA, 23 nt, Human
ccaauacccaccuucauccacuc

SEQ ID NO: 997862 - RNA, 19 nt, Human
ccacaaacuccauaaauug

SEQ ID NO: 997863 - RNA, 18 nt, Human
ccacccccaauacccacc

SEQ ID NO: 997864 - RNA, 21 nt, Human
ccacuggucucauaauaaaua

SEQ ID NO: 997865 - RNA, 23 nt, Human
ccagcccgccgccucguguccuc

SEQ ID NO: 997866 - RNA, 22 nt, Human
cccacaaacuccauaaauugac

SEQ ID NO: 997867 - RNA, 23 nt, Human
cccaccuucauccacucacccca

SEQ ID NO: 997868 - RNA, 21 nt, Human
cccacuugccacccccauuuc

SEQ ID NO: 997869 - RNA, 24 nt, Human
ccccaauacccaccuucauccacu

SEQ ID NO: 997870 - RNA, 20 nt, Human
ccuauacuacugauagaugg

SEQ ID NO: 997871 - RNA, 22 nt, Human
ccuauacuacugauagauggaa

SEQ ID NO: 997872 - RNA, 19 nt, Human
ccucugcagcacccccgcc

SEQ ID NO: 997873 - RNA, 18 nt, Human
ccugcagcccgucccggc

SEQ ID NO: 997874 - RNA, 23 nt, Human
cgccgcgccgcgcagagcuccuc

SEQ ID NO: 997875 - RNA, 22 nt, Human
cgccugcagcccgucccggcuc

SEQ ID NO: 997876 - RNA, 22 nt, Human
cuacagauccacuccucugaga

SEQ ID NO: 997877 - RNA, 22 nt, Human
cucaccccacuugccaccccca

SEQ ID NO: 997878 - RNA, 19 nt, Human
cucagcccugacauucagu

SEQ ID NO: 997879 - RNA, 23 nt, Human
cugcagcacccccgccugcagcc

SEQ ID NO: 997880 - RNA, 24 nt, Human
cuuucacagccacccccaauaccc

SEQ ID NO: 997881 - RNA, 25 nt, Human
gaaaacaacuaugacaaucuguagc

SEQ ID NO: 997882 - RNA, 18 nt, Human
gaaagacagacuucuaca

SEQ ID NO: 997883 - RNA, 20 nt, Human
gacuccaguugauucgguac

SEQ ID NO: 997884 - RNA, 21 nt, Human
gcauaaacaauaauaaaacaa

SEQ ID NO: 997885 - RNA, 18 nt, Human
ggcagaaaagagacuuga

SEQ ID NO: 997886 - RNA, 22 nt, Human
ggguagcagaacaaagguagga

SEQ ID NO: 997887 - RNA, 24 nt, Human
guccucugcagcacccccgccugc

SEQ ID NO: 997888 - RNA, 19 nt, Human
gugaucaaaagaauauguu

SEQ ID NO: 997889 - RNA, 23 nt, Human
guuaaaaaaaaauuuuuuuuuuu

SEQ ID NO: 997890 - RNA, 19 nt, Human
guuccacucucaagucacc

SEQ ID NO: 997891 - RNA, 20 nt, Human
uaaaaaaugcuuuaggucac

SEQ ID NO: 997892 - RNA, 20 nt, Human
uaaaagcacaucugguagaa

SEQ ID NO: 997893 - RNA, 24 nt, Human
uaaaauuuuaaccuggugaaaaau

SEQ ID NO: 997894 - RNA, 23 nt, Human
uaaagcaggaaaacaacuaugac

SEQ ID NO: 997895 - RNA, 22 nt, Human
uaagaaguagacuaguucauag

SEQ ID NO: 997896 - RNA, 18 nt, Human
uaauuacuauguuucuca

SEQ ID NO: 997897 - RNA, 22 nt, Human
uacaacaagcuguuuccagacc

SEQ ID NO: 997898 - RNA, 23 nt, Human
uacccaccuucauccacucaccc

SEQ ID NO: 997899 - RNA, 22 nt, Human
uaguuaagaaucaaauauacag

SEQ ID NO: 997900 - RNA, 20 nt, Human
uauguaccuuauaccaaaac

SEQ ID NO: 997901 - RNA, 20 nt, Human
uauuuucuucuacacuugag

SEQ ID NO: 997902 - RNA, 20 nt, Human
ucauaguucaaccuacugaa

SEQ ID NO: 997903 - RNA, 26 nt, Human
ucauccacucaccccacuugccaccc

SEQ ID NO: 997904 - RNA, 23 nt, Human
uccaaaauauuuuuuguagcuag

SEQ ID NO: 997905 - RNA, 25 nt, Human
uccaauacuauacaaaaaauagacu

SEQ ID NO: 997906 - RNA, 19 nt, Human
ucccaagaauagaggugaa

SEQ ID NO: 997907 - RNA, 22 nt, Human
ucugcagcacccccgccugcag

SEQ ID NO: 997908 - RNA, 21 nt, Human
ugaaaaguuaguagcagggca

SEQ ID NO: 997909 - RNA, 21 nt, Human
ugaaaugguuacugucacaaa

SEQ ID NO: 997910 - RNA, 23 nt, Human
ugaagacaacaaugguuccccua

SEQ ID NO: 997911 - RNA, 19 nt, Human
ugauucuccauuauuuucu

SEQ ID NO: 997912 - RNA, 25 nt, Human
ugcccuauuucccacaaacuccaua

SEQ ID NO: 997913 - RNA, 25 nt, Human
uggcagcauguuauuuuauaacugg

SEQ ID NO: 997914 - RNA, 21 nt, Human
uggcauuccagaucuggagca

SEQ ID NO: 997915 - RNA, 21 nt, Human
uguaaagcaggaaaacaacua

SEQ ID NO: 997916 - RNA, 22 nt, Human
uguuucuggcauuucuacuaau

SEQ ID NO: 997917 - RNA, 24 nt, Human
uuaagaaguagacuaguucauaga

SEQ ID NO: 997918 - RNA, 21 nt, Human
uuccagaucuggagcaauuuu

SEQ ID NO: 997919 - RNA, 19 nt, Human
uucuaaauccauccucacc

SEQ ID NO: 997920 - RNA, 18 nt, Human
uuuaccagcuucuagauc

SEQ ID NO: 997921 - RNA, 20 nt, Human
uuucccacaaacuccauaaa

SEQ ID NO: 997922 - RNA, 18 nt, Human
uuuuaagcauagacucca

SEQ ID NO: 997923 - RNA, 18 nt, Human
aagcaaaaaucaaagcaa

SEQ ID NO: 997924 - RNA, 21 nt, Human
aaggaggccaagcaaaaauca

SEQ ID NO: 997925 - RNA, 21 nt, Human
acacagacaggaauuaugacc

SEQ ID NO: 997926 - RNA, 23 nt, Human
acacagacaggaauuaugaccag

SEQ ID NO: 997927 - RNA, 21 nt, Human
agaacgcagcuggccccgccg

SEQ ID NO: 997928 - RNA, 21 nt, Human
agagaucacaaguaguuggau

SEQ ID NO: 997929 - RNA, 19 nt, Human
aggcagagaugggcugggu

SEQ ID NO: 997930 - RNA, 23 nt, Human
aggcagccgccacuagccgcuuc

SEQ ID NO: 997931 - RNA, 22 nt, Human
aggccaagcaaaaaucaaagca

SEQ ID NO: 997932 - RNA, 21 nt, Human
aguggccgguuucuggaugca

SEQ ID NO: 997933 - RNA, 24 nt, Human
augggcuggguaguggccgguuuc

SEQ ID NO: 997934 - RNA, 26 nt, Human
caacacaaauacaaauggaaaucauu

SEQ ID NO: 997935 - RNA, 26 nt, Human
caggcagccgccacuagccgcuucug

SEQ ID NO: 997936 - RNA, 19 nt, Human
caucauaaaggaggccaag

SEQ ID NO: 997937 - RNA, 19 nt, Human
cauccuguugaucugcuga

SEQ ID NO: 997938 - RNA, 19 nt, Human
ccaagcaaaaaucaaagca

SEQ ID NO: 997939 - RNA, 18 nt, Human
ccccgccgcucgcuccca

SEQ ID NO: 997940 - RNA, 19 nt, Human
cgcgugucgcgagcgcugc

SEQ ID NO: 997941 - RNA, 18 nt, Human
gagcgcugcgcggagggg

SEQ ID NO: 997942 - RNA, 19 nt, Human
gcagauggcagcugcgccc

SEQ ID NO: 997943 - RNA, 20 nt, Human
ggaaaucauuaaacuuucug

SEQ ID NO: 997944 - RNA, 19 nt, Human
ggccccgccgcucgcuccc

SEQ ID NO: 997945 - RNA, 24 nt, Human
ggguuggggacgcaggcagccgcc

SEQ ID NO: 997946 - RNA, 24 nt, Human
uaacaaugucaaggccuggguuuu

SEQ ID NO: 997947 - RNA, 21 nt, Human
uaauugcugaaauuaacauac

SEQ ID NO: 997948 - RNA, 21 nt, Human
uaugaauacugaaaugugaug

SEQ ID NO: 997949 - RNA, 18 nt, Human
ucaacacaaauacaaaug

SEQ ID NO: 997950 - RNA, 25 nt, Human
ucaacacaaauacaaauggaaauca

SEQ ID NO: 997951 - RNA, 20 nt, Human
ucccagagcagauggcagcu

SEQ ID NO: 997952 - RNA, 25 nt, Human
ugaacugaaagggacuguucauuca

SEQ ID NO: 997953 - RNA, 22 nt, Human
ugaagagcuccauccuguugaa

SEQ ID NO: 997954 - RNA, 24 nt, Human
ugaagagcuccauccuguugaucu

SEQ ID NO: 997955 - RNA, 21 nt, Human
ugauguaggugagagagauca

SEQ ID NO: 997956 - RNA, 23 nt, Human
uggcugacuucgagcugagggcu

SEQ ID NO: 997957 - RNA, 21 nt, Human
uggggacgcaggcagccgcca

SEQ ID NO: 997958 - RNA, 21 nt, Human
ugucaaggccuggguuuuucc

SEQ ID NO: 997959 - RNA, 22 nt, Human
ugugacagucaucuaugaauac

SEQ ID NO: 997960 - RNA, 18 nt, Human
aaaccacaauuuauuauc

SEQ ID NO: 997961 - RNA, 25 nt, Human
auagcucuauuucaaucauuuucac

SEQ ID NO: 997962 - RNA, 19 nt, Human
ccucuggguucacuccuga

SEQ ID NO: 997963 - RNA, 23 nt, Human
cuuccauauaguguuccauugca

SEQ ID NO: 997964 - RNA, 24 nt, Human
ucuccaggucuugggcacguucuc

SEQ ID NO: 997965 - RNA, 27 nt, Human
ugccucuggguucacuccugauaauuc

SEQ ID NO: 997966 - RNA, 22 nt, Human
uucacuuccauauaguguucca

SEQ ID NO: 997967 - RNA, 19 nt, Human
aacaaagccacccccucag

SEQ ID NO: 997968 - RNA, 19 nt, Human
aaggaaagccugggccaug

SEQ ID NO: 997969 - RNA, 22 nt, Human
acacaggucacgacccaauccc

SEQ ID NO: 997970 - RNA, 21 nt, Human
acccuccccacccacugcagc

SEQ ID NO: 997971 - RNA, 22 nt, Human
agcuguguggccugggccacug

SEQ ID NO: 997972 - RNA, 19 nt, Human
aggaaagccugggccaugu

SEQ ID NO: 997973 - RNA, 24 nt, Human
aggaggccaaagcaccauggggau

SEQ ID NO: 997974 - RNA, 21 nt, Human
aggggauugggagccccaggg

SEQ ID NO: 997975 - RNA, 22 nt, Human
agggugcccucagccaaccuug

SEQ ID NO: 997976 - RNA, 19 nt, Human
aguaugagagcagguggga

SEQ ID NO: 997977 - RNA, 23 nt, Human
agugagagcagagauggcaaagg

SEQ ID NO: 997978 - RNA, 24 nt, Human
agugagagcagagauggcaaaggg

SEQ ID NO: 997979 - RNA, 20 nt, Human
caagggugcagagaaggagg

SEQ ID NO: 997980 - RNA, 25 nt, Human
caccccuguaaaccacccuccccac

SEQ ID NO: 997981 - RNA, 21 nt, Human
cacccuccccacccacugcag

SEQ ID NO: 997982 - RNA, 25 nt, Human
cacccuccccacccacugcagcuca

SEQ ID NO: 997983 - RNA, 23 nt, Human
cagcagccagcccugggggagug

SEQ ID NO: 997984 - RNA, 23 nt, Human
cagccaaccuugccaagcauggc

SEQ ID NO: 997985 - RNA, 23 nt, Human
cagcccugcccucgugccaaggg

SEQ ID NO: 997986 - RNA, 19 nt, Human
ccagggagguggggccucc

SEQ ID NO: 997987 - RNA, 20 nt, Human
cccagugagagcagagaugg

SEQ ID NO: 997988 - RNA, 22 nt, Human
ccccagggagguggggccucca

SEQ ID NO: 997989 - RNA, 22 nt, Human
ccccuguaaaccacccucccca

SEQ ID NO: 997990 - RNA, 20 nt, Human
ccgcccagugagcugugugg

SEQ ID NO: 997991 - RNA, 18 nt, Human
ccucagcuaagcaucucc

SEQ ID NO: 997992 - RNA, 20 nt, Human
ccuccccuggggacucuggg

SEQ ID NO: 997993 - RNA, 26 nt, Human
ccugggacucccaggggaaaaucaga

SEQ ID NO: 997994 - RNA, 18 nt, Human
ccugggccacuguccucc

SEQ ID NO: 997995 - RNA, 22 nt, Human
ccuggggacucugggccugcug

SEQ ID NO: 997996 - RNA, 20 nt, Human
ccuguaaaccacccucccca

SEQ ID NO: 997997 - RNA, 21 nt, Human
ccuguaaaccacccuccccac

SEQ ID NO: 997998 - RNA, 24 nt, Human
cgaccugcaaauagucuaacaaag

SEQ ID NO: 997999 - RNA, 20 nt, Human
cuccacacaggucacgaccc

SEQ ID NO: 998000 - RNA, 23 nt, Human
cucucuggccuguccuccacagg

SEQ ID NO: 998001 - RNA, 26 nt, Human
cuuuuuuuuuuuuuuuuugcuccuuu

SEQ ID NO: 998002 - RNA, 20 nt, Human
cuuuuuuuuuuuuuuuuugg

SEQ ID NO: 998003 - RNA, 22 nt, Human
gaaaauauacacacuucagucc

SEQ ID NO: 998004 - RNA, 19 nt, Human
gagagcagagauggcaaag

SEQ ID NO: 998005 - RNA, 20 nt, Human
gagagccagcccugcccucg

SEQ ID NO: 998006 - RNA, 23 nt, Human
gaggggcugcacagagcaccccu

SEQ ID NO: 998007 - RNA, 19 nt, Human
gcaccauggggaugggaug

SEQ ID NO: 998008 - RNA, 24 nt, Human
gccacccccucagcuaagcaucuc

SEQ ID NO: 998009 - RNA, 19 nt, Human
ggaaggggaggaggguccc

SEQ ID NO: 998010 - RNA, 19 nt, Human
ggagccccagggagguggg

SEQ ID NO: 998011 - RNA, 19 nt, Human
ggagguggggccuccagac

SEQ ID NO: 998012 - RNA, 25 nt, Human
ggauggaggcauugggagagccagc

SEQ ID NO: 998013 - RNA, 20 nt, Human
ggcccagucccccaucucag

SEQ ID NO: 998014 - RNA, 23 nt, Human
gggagccccagggagguggggcc

SEQ ID NO: 998015 - RNA, 19 nt, Human
gggauugggagccccaggg

SEQ ID NO: 998016 - RNA, 22 nt, Human
ggggaugggauggaggcauugg

SEQ ID NO: 998017 - RNA, 20 nt, Human
ggugcccucagccaaccuug

SEQ ID NO: 998018 - RNA, 20 nt, Human
uaaaaaauagaucaagaaaa

SEQ ID NO: 998019 - RNA, 18 nt, Human
uaacaaagccacccccuc

SEQ ID NO: 998020 - RNA, 22 nt, Human
uacugcccacagaacgucccuu

SEQ ID NO: 998021 - RNA, 20 nt, Human
uagaucaagaaaauauacac

SEQ ID NO: 998022 - RNA, 22 nt, Human
ucacgacccaaucccccaggca

SEQ ID NO: 998023 - RNA, 21 nt, Human
ucagaggggcugcacagagca

SEQ ID NO: 998024 - RNA, 23 nt, Human
ucauggugggaacagggccacac

SEQ ID NO: 998025 - RNA, 18 nt, Human
uccacacaggucacgacc

SEQ ID NO: 998026 - RNA, 19 nt, Human
uccacaggcccuggcagcu

SEQ ID NO: 998027 - RNA, 21 nt, Human
uccccagugagagcagagauu

SEQ ID NO: 998028 - RNA, 21 nt, Human
uccccuggaccugggacuccc

SEQ ID NO: 998029 - RNA, 21 nt, Human
uccccuggggacucugggccu

SEQ ID NO: 998030 - RNA, 22 nt, Human
uccuccuuccccuggaccuggg

SEQ ID NO: 998031 - RNA, 18 nt, Human
ugagagcaggugggaagg

SEQ ID NO: 998032 - RNA, 20 nt, Human
ugagagcaggugggaagggg

SEQ ID NO: 998033 - RNA, 19 nt, Human
ugagagccgcccagugagc

SEQ ID NO: 998034 - RNA, 22 nt, Human
ugccaagggugcagagaaggag

SEQ ID NO: 998035 - RNA, 24 nt, Human
ugcuccuuuuccuuuuuauuaaaa

SEQ ID NO: 998036 - RNA, 21 nt, Human
uggaaggaaagccugggccau

SEQ ID NO: 998037 - RNA, 20 nt, Human
uggaggcauugggagagcca

SEQ ID NO: 998038 - RNA, 18 nt, Human
ugggaacagggccacaca

SEQ ID NO: 998039 - RNA, 23 nt, Human
ugggaacagggccacacagggcu

SEQ ID NO: 998040 - RNA, 23 nt, Human
uggggacucugggccugcuggcc

SEQ ID NO: 998041 - RNA, 21 nt, Human
uuccccuggaccugggacucc

SEQ ID NO: 998042 - RNA, 18 nt, Human
uuuuuugcuccuuuuccu

SEQ ID NO: 998043 - RNA, 23 nt, Human
uuuuuugcuccuuuuccuuuuua

SEQ ID NO: 998044 - RNA, 19 nt, Human
uuuuuuuuuuuuuuuugcu

SEQ ID NO: 998045 - RNA, 18 nt, Human
agagggagggggcggagc

SEQ ID NO: 998046 - RNA, 18 nt, Human
agaugggagaaucacuug

SEQ ID NO: 998047 - RNA, 26 nt, Human
agaugggagaaucacuugaauaccug

SEQ ID NO: 998048 - RNA, 22 nt, Human
agcuacucaggagaccgagaug

SEQ ID NO: 998049 - RNA, 22 nt, Human
agggagagggagggggcggagc

SEQ ID NO: 998050 - RNA, 24 nt, Human
caccuguagucccagcuacucagg

SEQ ID NO: 998051 - RNA, 24 nt, Human
caggagaccgagaugggagaauca

SEQ ID NO: 998052 - RNA, 21 nt, Human
ccuguagucccagcuacucag

SEQ ID NO: 998053 - RNA, 22 nt, Human
ggaauaaauaguaacuuauuua

SEQ ID NO: 998054 - RNA, 20 nt, Human
ggagagggagggggcggagc

SEQ ID NO: 998055 - RNA, 24 nt, Human
ggcggagcggaauaaauaguaacu

SEQ ID NO: 998056 - RNA, 24 nt, Human
gggcuuaguggcaugcaccuguag

SEQ ID NO: 998057 - RNA, 21 nt, Human
uaagaaaugcacuuggauucc

SEQ ID NO: 998058 - RNA, 24 nt, Human
uaguggcaugcaccuguaguccca

SEQ ID NO: 998059 - RNA, 22 nt, Human
uggcaugcaccuguagucccag

SEQ ID NO: 998060 - RNA, 21 nt, Human
uuguuucgugugcuuuuaaau

SEQ ID NO: 998061 - RNA, 23 nt, Human
uuuuuuuuuuuguuucgugugcu

SEQ ID NO: 998062 - RNA, 18 nt, Human
uuuuuuuuuuuuuguuuc

SEQ ID NO: 998063 - RNA, 18 nt, Human
uuuuuuuuuuuuuuuuug

SEQ ID NO: 998064 - RNA, 22 nt, Human
uuuuuuuuuuuuuuuuuuguuu

SEQ ID NO: 998065 - RNA, 22 nt, Human
aaaaagcaaguccuucaaccua

SEQ ID NO: 998066 - RNA, 23 nt, Human
aaaagagauaggcaggagauaua

SEQ ID NO: 998067 - RNA, 26 nt, Human
aacacuuccccgagcagauccugcca

SEQ ID NO: 998068 - RNA, 23 nt, Human
acuuccccgagcagauccugcca

SEQ ID NO: 998069 - RNA, 20 nt, Human
acuuuggaaugcaaaagaga

SEQ ID NO: 998070 - RNA, 22 nt, Human
aggcaggagauauaacgagguu

SEQ ID NO: 998071 - RNA, 20 nt, Human
auccugccagauuugguuca

SEQ ID NO: 998072 - RNA, 24 nt, Human
caaaaauacgcugcccaaaaagca

SEQ ID NO: 998073 - RNA, 22 nt, Human
caaaagagauaggcaggagaua

SEQ ID NO: 998074 - RNA, 28 nt, Human
caaaagaugcaugcaacauuucgacauu

SEQ ID NO: 998075 - RNA, 19 nt, Human
caaagaaaaaaucuuagac

SEQ ID NO: 998076 - RNA, 22 nt, Human
caacuaaaguucucugucuccu

SEQ ID NO: 998077 - RNA, 24 nt, Human
caccuccaaaaauacgcugcccaa

SEQ ID NO: 998078 - RNA, 19 nt, Human
ccgagcagauccugccaga

SEQ ID NO: 998079 - RNA, 22 nt, Human
ccuccaaaaauacgcugcccaa

SEQ ID NO: 998080 - RNA, 22 nt, Human
gccuuggucuucugcuguuuga

SEQ ID NO: 998081 - RNA, 25 nt, Human
ggaaaacacuuccccgagcagaucc

SEQ ID NO: 998082 - RNA, 19 nt, Human
gggaagccacuaauagaaa

SEQ ID NO: 998083 - RNA, 19 nt, Human
uaaaguucucugucuccuc

SEQ ID NO: 998084 - RNA, 19 nt, Human
uccccgagcagauccugcc

SEQ ID NO: 998085 - RNA, 20 nt, Human
ucuccucacgcagcagaggc

SEQ ID NO: 998086 - RNA, 23 nt, Human
aaacaauguaaugauucgguaaa

SEQ ID NO: 998087 - RNA, 18 nt, Human
aaccauaggggcugggag

SEQ ID NO: 998088 - RNA, 19 nt, Human
aaccugcgauugacagaaa

SEQ ID NO: 998089 - RNA, 21 nt, Human
aauagaacuucuugcuuaaaa

SEQ ID NO: 998090 - RNA, 21 nt, Human
agaaaaacucugaaaccugaa

SEQ ID NO: 998091 - RNA, 22 nt, Human
agagaacugcacggagugaaau

SEQ ID NO: 998092 - RNA, 18 nt, Human
aggaguuagaaauaaagc

SEQ ID NO: 998093 - RNA, 19 nt, Human
auagaacuucuugcuuaaa

SEQ ID NO: 998094 - RNA, 20 nt, Human
auagaacuucuugcuuaaaa

SEQ ID NO: 998095 - RNA, 25 nt, Human
cacaaaaauauccccgcagcucaua

SEQ ID NO: 998096 - RNA, 23 nt, Human
caccagaaagcagcauuggccuc

SEQ ID NO: 998097 - RNA, 18 nt, Human
cagaaaaaauuuucucau

SEQ ID NO: 998098 - RNA, 25 nt, Human
cagaauaauucugagcugccaguga

SEQ ID NO: 998099 - RNA, 21 nt, Human
cagcccggggugagagcgcgg

SEQ ID NO: 998100 - RNA, 22 nt, Human
cagucuugcuuugguucacacu

SEQ ID NO: 998101 - RNA, 24 nt, Human
cauuaaauagaacuucuugcuuaa

SEQ ID NO: 998102 - RNA, 25 nt, Human
cccaguuaaccacucauuuuggaag

SEQ ID NO: 998103 - RNA, 20 nt, Human
ccccgccgccccagcgcucc

SEQ ID NO: 998104 - RNA, 25 nt, Human
cccugaauaaccacugacgagguuu

SEQ ID NO: 998105 - RNA, 22 nt, Human
ccgccgcccgagagccggcucc

SEQ ID NO: 998106 - RNA, 21 nt, Human
cgccccagcgcucccgcaugg

SEQ ID NO: 998107 - RNA, 21 nt, Human
cuuguauuuguuuacuuauuu

SEQ ID NO: 998108 - RNA, 21 nt, Human
cuugugagcuuaagguuugcc

SEQ ID NO: 998109 - RNA, 24 nt, Human
gacccuuugccucuuuauuucuuc

SEQ ID NO: 998110 - RNA, 19 nt, Human
gagcacucaaaauuacuug

SEQ ID NO: 998111 - RNA, 23 nt, Human
gccccagcgcucccgcauggcac

SEQ ID NO: 998112 - RNA, 22 nt, Human
gccccgccgccccagcgcuccc

SEQ ID NO: 998113 - RNA, 19 nt, Human
gcucuaaaaaaacuuguca

SEQ ID NO: 998114 - RNA, 21 nt, Human
gggaaggaaacuucagcgccg

SEQ ID NO: 998115 - RNA, 19 nt, Human
uaaucaaauaaccugcgau

SEQ ID NO: 998116 - RNA, 18 nt, Human
uaauuuuuuuuccaccag

SEQ ID NO: 998117 - RNA, 21 nt, Human
uacaagaucuauaaaaugcuc

SEQ ID NO: 998118 - RNA, 19 nt, Human
uagaaauaaagccagccaa

SEQ ID NO: 998119 - RNA, 23 nt, Human
uagaaauaaagccagccaacuuu

SEQ ID NO: 998120 - RNA, 23 nt, Human
uagaaccaggccuuuaaaaggcc

SEQ ID NO: 998121 - RNA, 22 nt, Human
uaggaacuguaggaaagguuuu

SEQ ID NO: 998122 - RNA, 25 nt, Human
uauucuacagcuguagaagaaauca

SEQ ID NO: 998123 - RNA, 25 nt, Human
ucagaaaguguugguacguuguuca

SEQ ID NO: 998124 - RNA, 18 nt, Human
ucccaugaaaugcccagg

SEQ ID NO: 998125 - RNA, 23 nt, Human
ucccgcauggcacggggcgccag

SEQ ID NO: 998126 - RNA, 22 nt, Human
ucucuuaaugcacagguucugg

SEQ ID NO: 998127 - RNA, 18 nt, Human
ugacagaaaaaauuuucu

SEQ ID NO: 998128 - RNA, 18 nt, Human
ugauauacaugacaucuc

SEQ ID NO: 998129 - RNA, 19 nt, Human
ugcucagacccugaauaac

SEQ ID NO: 998130 - RNA, 21 nt, Human
uggcugccuccuuuuaguaaa

SEQ ID NO: 998131 - RNA, 18 nt, Human
uuagucaaaacaauguaa

SEQ ID NO: 998132 - RNA, 21 nt, Human
uucuucagaaugaccuucuga

SEQ ID NO: 998133 - RNA, 24 nt, Human
uuuuuuuuuuuuuuuuuucccaug

SEQ ID NO: 998134 - RNA, 23 nt, Human
aagcacccaggggucuaggaaug

SEQ ID NO: 998135 - RNA, 22 nt, Human
aagcacccgaagacccucggcc

SEQ ID NO: 998136 - RNA, 24 nt, Human
acacaaggccauccacuuccacgg

SEQ ID NO: 998137 - RNA, 23 nt, Human
acccccgcgaacaaagccccaac

SEQ ID NO: 998138 - RNA, 20 nt, Human
agcugugacccccgcgaaca

SEQ ID NO: 998139 - RNA, 19 nt, Human
aggacagcaagggcagcuu

SEQ ID NO: 998140 - RNA, 25 nt, Human
aggggccagaggggagaaccaagcu

SEQ ID NO: 998141 - RNA, 19 nt, Human
agguggcacagaccagagc

SEQ ID NO: 998142 - RNA, 19 nt, Human
agugucccccacccagggc

SEQ ID NO: 998143 - RNA, 18 nt, Human
caacggucgcagcgcgcc

SEQ ID NO: 998144 - RNA, 24 nt, Human
cacagcccuuggcuaagaccgucu

SEQ ID NO: 998145 - RNA, 21 nt, Human
cacccgaagacccucggccaa

SEQ ID NO: 998146 - RNA, 20 nt, Human
cacccucccaagcgcccaag

SEQ ID NO: 998147 - RNA, 26 nt, Human
caggaggcccuucuccuggagcagcc

SEQ ID NO: 998148 - RNA, 22 nt, Human
caggggucuaggaaugcucccc

SEQ ID NO: 998149 - RNA, 21 nt, Human
ccaaugccaccacagcccuug

SEQ ID NO: 998150 - RNA, 21 nt, Human
ccacagccagccuggccaagg

SEQ ID NO: 998151 - RNA, 24 nt, Human
ccacccagggccucucccuucacu

SEQ ID NO: 998152 - RNA, 19 nt, Human
cccacacaguggucugagc

SEQ ID NO: 998153 - RNA, 22 nt, Human
cccacagccagccuggccaagg

SEQ ID NO: 998154 - RNA, 19 nt, Human
cccacuuguacagugagac

SEQ ID NO: 998155 - RNA, 19 nt, Human
ccccaacccccagacaccg

SEQ ID NO: 998156 - RNA, 24 nt, Human
cccgcaggcugugcugugcaccuc

SEQ ID NO: 998157 - RNA, 19 nt, Human
cccuucacugcacaggaca

SEQ ID NO: 998158 - RNA, 19 nt, Human
ccucccacacaguggucug

SEQ ID NO: 998159 - RNA, 28 nt, Human
ccucccacacaguggucugagcagaggc

SEQ ID NO: 998160 - RNA, 22 nt, Human
cgaagacccucggccaaugcca

SEQ ID NO: 998161 - RNA, 18 nt, Human
cgugagccggcugugccu

SEQ ID NO: 998162 - RNA, 18 nt, Human
cucccacucugagugucc

SEQ ID NO: 998163 - RNA, 25 nt, Human
cugagugucccccacccagggccuc

SEQ ID NO: 998164 - RNA, 18 nt, Human
cugcucagccuuccuugc

SEQ ID NO: 998165 - RNA, 24 nt, Human
cugugccuggcugcccccaacccc

SEQ ID NO: 998166 - RNA, 21 nt, Human
gaacuuggcugcaggccgaca

SEQ ID NO: 998167 - RNA, 21 nt, Human
gacacccucccaagcgcccaa

SEQ ID NO: 998168 - RNA, 19 nt, Human
gaccagacccucccacagc

SEQ ID NO: 998169 - RNA, 24 nt, Human
gccgacacccucccaagcgcccaa

SEQ ID NO: 998170 - RNA, 24 nt, Human
gcucccacucugagugucccccac

SEQ ID NO: 998171 - RNA, 21 nt, Human
gcugcccccaacccccagaca

SEQ ID NO: 998172 - RNA, 21 nt, Human
ggccagaggggagaaccaagc

SEQ ID NO: 998173 - RNA, 22 nt, Human
gggaagcacccgaagacccucg

SEQ ID NO: 998174 - RNA, 21 nt, Human
guggccccuccgugagccggc

SEQ ID NO: 998175 - RNA, 19 nt, Human
uaagaccgucugccaagcc

SEQ ID NO: 998176 - RNA, 22 nt, Human
uaggaaugcucccccuucucuc

SEQ ID NO: 998177 - RNA, 24 nt, Human
uccacugugcuccugcuacaugga

SEQ ID NO: 998178 - RNA, 20 nt, Human
ucccaagcgcccaagcgcgg

SEQ ID NO: 998179 - RNA, 23 nt, Human
ucccaagcgcccaagcgcggccc

SEQ ID NO: 998180 - RNA, 18 nt, Human
ucccccgugacagugaac

SEQ ID NO: 998181 - RNA, 18 nt, Human
ucccccuucucuccaggg

SEQ ID NO: 998182 - RNA, 26 nt, Human
uccgugagccggcugugccuggcugc

SEQ ID NO: 998183 - RNA, 24 nt, Human
ucugugcagacaagcacccagggg

SEQ ID NO: 998184 - RNA, 22 nt, Human
ugaaugguuuaauaacucuguc

SEQ ID NO: 998185 - RNA, 18 nt, Human
ugcucuggccagcaggag

SEQ ID NO: 998186 - RNA, 19 nt, Human
ugcugggaugugcucccac

SEQ ID NO: 998187 - RNA, 21 nt, Human
uggcaagcucucacacuuuac

SEQ ID NO: 998188 - RNA, 21 nt, Human
ugggaccagacccucccacag

SEQ ID NO: 998189 - RNA, 22 nt, Human
ugggaccagacccucccacagc

SEQ ID NO: 998190 - RNA, 20 nt, Human
ugggcacugcugggaugugc

SEQ ID NO: 998191 - RNA, 19 nt, Human
uguacagugagacccuggc

SEQ ID NO: 998192 - RNA, 19 nt, Human
ugugguggccccuccguuc

SEQ ID NO: 998193 - RNA, 22 nt, Human
ugugguggccccuccguucaaa

SEQ ID NO: 998194 - RNA, 24 nt, Human
uugaaugguuuaauaacucugucu

SEQ ID NO: 998195 - RNA, 18 nt, Human
uuuuuuuuuuuuuuuuug

SEQ ID NO: 998196 - RNA, 20 nt, Human
aaaaagacagggucaaauga

SEQ ID NO: 998197 - RNA, 22 nt, Human
aaacaaaauugcacucuugaaa

SEQ ID NO: 998198 - RNA, 22 nt, Human
aaacaaaauugcacucuugaaa

SEQ ID NO: 998199 - RNA, 22 nt, Human
aaacaaauuauuaaaacagaga

SEQ ID NO: 998200 - RNA, 21 nt, Human
aaacaagcagcacccccaagg

SEQ ID NO: 998201 - RNA, 21 nt, Human
aaacagugaguugagaaaaug

SEQ ID NO: 998202 - RNA, 22 nt, Human
aaacauugcaagaccucaaaac

SEQ ID NO: 998203 - RNA, 19 nt, Human
aaacgcaggcucugcuugg

SEQ ID NO: 998204 - RNA, 22 nt, Human
aaacggaaaacagaacuauggu

SEQ ID NO: 998205 - RNA, 18 nt, Human
aaaguacugagcagcucu

SEQ ID NO: 998206 - RNA, 23 nt, Human
aaagugugugacauaggccaucc

SEQ ID NO: 998207 - RNA, 22 nt, Human
aaaugaaaaugaaaaccuucuc

SEQ ID NO: 998208 - RNA, 19 nt, Human
aacacacaucugcaagucc

SEQ ID NO: 998209 - RNA, 19 nt, Human
aacccagaggggaggaaac

SEQ ID NO: 998210 - RNA, 21 nt, Human
aacccagaggggaggaaacgg

SEQ ID NO: 998211 - RNA, 23 nt, Human
aagcagcggaggcuccagaagcc

SEQ ID NO: 998212 - RNA, 21 nt, Human
aaggauaaauaauucuucaga

SEQ ID NO: 998213 - RNA, 21 nt, Human
aaggauaaauaauucuucaga

SEQ ID NO: 998214 - RNA, 23 nt, Human
aaggggugguggaauggggcugc

SEQ ID NO: 998215 - RNA, 21 nt, Human
aaucccaaccuggccgccugu

SEQ ID NO: 998216 - RNA, 18 nt, Human
aaucccccagaggaguug

SEQ ID NO: 998217 - RNA, 18 nt, Human
aaucccccagaggaguug

SEQ ID NO: 998218 - RNA, 24 nt, Human
acaaacaaauuauuaaaacagaga

SEQ ID NO: 998219 - RNA, 18 nt, Human
acaagcagcacccccaag

SEQ ID NO: 998220 - RNA, 21 nt, Human
acaagcagcacccccaagcac

SEQ ID NO: 998221 - RNA, 19 nt, Human
acaagcccuagaaccagag

SEQ ID NO: 998222 - RNA, 23 nt, Human
acagugcagcaggagaaaugaaa

SEQ ID NO: 998223 - RNA, 21 nt, Human
accccggcucgcgcacgcggc

SEQ ID NO: 998224 - RNA, 18 nt, Human
acccugcuagaaaggccc

SEQ ID NO: 998225 - RNA, 22 nt, Human
acccugcuagaaaggcccuacu

SEQ ID NO: 998226 - RNA, 20 nt, Human
acgugugugugugugugugu

SEQ ID NO: 998227 - RNA, 20 nt, Human
acgugugugugugugugugu

SEQ ID NO: 998228 - RNA, 22 nt, Human
acucuugaauuuuagaaagaag

SEQ ID NO: 998229 - RNA, 19 nt, Human
agaaacacaaaaacauugc

SEQ ID NO: 998230 - RNA, 22 nt, Human
agaaacacaccugcgggccucc

SEQ ID NO: 998231 - RNA, 23 nt, Human
agacagacuagacacagugcagc

SEQ ID NO: 998232 - RNA, 18 nt, Human
agacaguaaacagugagu

SEQ ID NO: 998233 - RNA, 21 nt, Human
agagagaccauggccccaggc

SEQ ID NO: 998234 - RNA, 18 nt, Human
agagcccuucugacacac

SEQ ID NO: 998235 - RNA, 23 nt, Human
agaggcaccggcagagaagaggc

SEQ ID NO: 998236 - RNA, 21 nt, Human
agaggcaggagaagcugccug

SEQ ID NO: 998237 - RNA, 20 nt, Human
agauuaaaaagacaggguca

SEQ ID NO: 998238 - RNA, 21 nt, Human
agcgcgugacacaggccaucc

SEQ ID NO: 998239 - RNA, 24 nt, Human
aggaagaaaaaucauguuucuuuu

SEQ ID NO: 998240 - RNA, 24 nt, Human
aggaagaaaaaucauguuucuuuu

SEQ ID NO: 998241 - RNA, 20 nt, Human
aggagaaaggagggagaggc

SEQ ID NO: 998242 - RNA, 25 nt, Human
aggcagcuggcugucccaggggcug

SEQ ID NO: 998243 - RNA, 19 nt, Human
aggcaggagaagcugccug

SEQ ID NO: 998244 - RNA, 23 nt, Human
aggcaggagaagcugccugagca

SEQ ID NO: 998245 - RNA, 20 nt, Human
aggcaggagaagcugccugg

SEQ ID NO: 998246 - RNA, 22 nt, Human
aggccccgugggucccccacuu

SEQ ID NO: 998247 - RNA, 22 nt, Human
aggccuuaaaaauagacaauau

SEQ ID NO: 998248 - RNA, 26 nt, Human
aggcuccagaagccgacgguggagcc

SEQ ID NO: 998249 - RNA, 25 nt, Human
aggcuccaggcuucuaaucacaguu

SEQ ID NO: 998250 - RNA, 24 nt, Human
aggggagaaaggaggugucagccc

SEQ ID NO: 998251 - RNA, 23 nt, Human
agucauugaauuugcuguuggag

SEQ ID NO: 998252 - RNA, 23 nt, Human
agugggagcccuggcagguggug

SEQ ID NO: 998253 - RNA, 19 nt, Human
auauguuuuccaccuuaau

SEQ ID NO: 998254 - RNA, 19 nt, Human
auauguuuuccaccuuaau

SEQ ID NO: 998255 - RNA, 21 nt, Human
aucacugcccaaggggccacu

SEQ ID NO: 998256 - RNA, 27 nt, Human
auccccacguguguguguguguguggu

SEQ ID NO: 998257 - RNA, 21 nt, Human
augaccccgcugcggacagaa

SEQ ID NO: 998258 - RNA, 18 nt, Human
auggccccaggcuggccc

SEQ ID NO: 998259 - RNA, 21 nt, Human
auggggcagaauccaaacacc

SEQ ID NO: 998260 - RNA, 21 nt, Human
auggggcagggaaggagaaag

SEQ ID NO: 998261 - RNA, 24 nt, Human
caaaacacaaauaaauaccaaaua

SEQ ID NO: 998262 - RNA, 25 nt, Human
caaaacacaaauaaauaccaaauaa

SEQ ID NO: 998263 - RNA, 23 nt, Human
caaauaaauaccaaauaaaacca

SEQ ID NO: 998264 - RNA, 19 nt, Human
caaccaaacacaaagacaa

SEQ ID NO: 998265 - RNA, 24 nt, Human
caagaagggcacggggauggggca

SEQ ID NO: 998266 - RNA, 20 nt, Human
cacaaagacaaagcgcguga

SEQ ID NO: 998267 - RNA, 25 nt, Human
cacaaauuacccccaguagagggag

SEQ ID NO: 998268 - RNA, 21 nt, Human
cacacccucacugagccaccc

SEQ ID NO: 998269 - RNA, 18 nt, Human
cacagaccuucuccuaca

SEQ ID NO: 998270 - RNA, 19 nt, Human
cacagcauccaugagcgag

SEQ ID NO: 998271 - RNA, 18 nt, Human
cacaggccaagaagggca

SEQ ID NO: 998272 - RNA, 23 nt, Human
caccgagcugggccacacggggu

SEQ ID NO: 998273 - RNA, 18 nt, Human
caccucacagauacaaaa

SEQ ID NO: 998274 - RNA, 21 nt, Human
cacgucugcccugccaccgca

SEQ ID NO: 998275 - RNA, 20 nt, Human
cacgugugugugugugugug

SEQ ID NO: 998276 - RNA, 20 nt, Human
cacgugugugugugugugug

SEQ ID NO: 998277 - RNA, 18 nt, Human
cacugagccacccaaccc

SEQ ID NO: 998278 - RNA, 18 nt, Human
cagaacagagaccccgau

SEQ ID NO: 998279 - RNA, 22 nt, Human
cagaaccgaacagaggcaccgg

SEQ ID NO: 998280 - RNA, 18 nt, Human
cagaagccgacgguggag

SEQ ID NO: 998281 - RNA, 25 nt, Human
cagcaacagagagcucguccgaaca

SEQ ID NO: 998282 - RNA, 19 nt, Human
cagcagucacccgcccacc

SEQ ID NO: 998283 - RNA, 26 nt, Human
cagcaucagccuggacgaggcagcaa

SEQ ID NO: 998284 - RNA, 20 nt, Human
cagcgccaagugagggugcc

SEQ ID NO: 998285 - RNA, 21 nt, Human
cagcuguugggaucaguguac

SEQ ID NO: 998286 - RNA, 18 nt, Human
caggacccaaaucacugg

SEQ ID NO: 998287 - RNA, 22 nt, Human
caggagccccaguaugccacac

SEQ ID NO: 998288 - RNA, 21 nt, Human
caggaucagguggaaaaugcc

SEQ ID NO: 998289 - RNA, 18 nt, Human
caggcccccgagcagcgg

SEQ ID NO: 998290 - RNA, 20 nt, Human
caggcuccgcgggacaagcc

SEQ ID NO: 998291 - RNA, 18 nt, Human
cagggagcagcccgagcc

SEQ ID NO: 998292 - RNA, 19 nt, Human
cagggugggaccaggccgu

SEQ ID NO: 998293 - RNA, 21 nt, Human
cauaucaucacggacacaccc

SEQ ID NO: 998294 - RNA, 18 nt, Human
cauggagaccgaaggccg

SEQ ID NO: 998295 - RNA, 25 nt, Human
caugggacacguggccccuggccca

SEQ ID NO: 998296 - RNA, 22 nt, Human
ccaaaucacuggucacaaaauc

SEQ ID NO: 998297 - RNA, 20 nt, Human
ccaagcacacagugugcgcc

SEQ ID NO: 998298 - RNA, 20 nt, Human
ccacaggccaagaagggcac

SEQ ID NO: 998299 - RNA, 18 nt, Human
ccacugggccucagcugc

SEQ ID NO: 998300 - RNA, 19 nt, Human
ccagagcacggcgagcuga

SEQ ID NO: 998301 - RNA, 21 nt, Human
ccagccccgagacggccgagg

SEQ ID NO: 998302 - RNA, 23 nt, Human
ccagccccgagacggccgagggg

SEQ ID NO: 998303 - RNA, 20 nt, Human
ccagcuauccccacgugugu

SEQ ID NO: 998304 - RNA, 20 nt, Human
ccagcuauccccacgugugu

SEQ ID NO: 998305 - RNA, 20 nt, Human
ccaugggacacguggccccu

SEQ ID NO: 998306 - RNA, 20 nt, Human
cccaaggggccacugggccu

SEQ ID NO: 998307 - RNA, 18 nt, Human
cccaggccgaggguggag

SEQ ID NO: 998308 - RNA, 20 nt, Human
cccagggugacugaggaccc

SEQ ID NO: 998309 - RNA, 19 nt, Human
cccauccagacuccccuuc

SEQ ID NO: 998310 - RNA, 21 nt, Human
ccccacucucccuagcucucc

SEQ ID NO: 998311 - RNA, 21 nt, Human
ccccacucucccuagcucucc

SEQ ID NO: 998312 - RNA, 19 nt, Human
ccccaugacggggggcggg

SEQ ID NO: 998313 - RNA, 18 nt, Human
cccccacucucccuagcu

SEQ ID NO: 998314 - RNA, 18 nt, Human
cccccauaucaucacgga

SEQ ID NO: 998315 - RNA, 20 nt, Human
ccccgagacggccgaggcuu

SEQ ID NO: 998316 - RNA, 19 nt, Human
ccccguggccacccuuccc

SEQ ID NO: 998317 - RNA, 21 nt, Human
ccccucagcaggugcagaggu

SEQ ID NO: 998318 - RNA, 22 nt, Human
cccgagccacgguguccugaag

SEQ ID NO: 998319 - RNA, 19 nt, Human
cccgcacaccugccagccc

SEQ ID NO: 998320 - RNA, 21 nt, Human
cccgcacaccugccagccccg

SEQ ID NO: 998321 - RNA, 18 nt, Human
cccucagcaggugcagag

SEQ ID NO: 998322 - RNA, 22 nt, Human
ccggcugggcugcaaccccggc

SEQ ID NO: 998323 - RNA, 18 nt, Human
ccuccagcccagcugggg

SEQ ID NO: 998324 - RNA, 19 nt, Human
ccuccagcccagcuggggc

SEQ ID NO: 998325 - RNA, 25 nt, Human
ccuggcagguggugggccugugggg

SEQ ID NO: 998326 - RNA, 21 nt, Human
ccuguggggcccgggcugagg

SEQ ID NO: 998327 - RNA, 21 nt, Human
ccuucugccgcuuccuccguc

SEQ ID NO: 998328 - RNA, 21 nt, Human
ccuucugccgcuuccuccguc

SEQ ID NO: 998329 - RNA, 25 nt, Human
ccuugggcugacaaggaaugacccc

SEQ ID NO: 998330 - RNA, 19 nt, Human
cgcgcacgcggcggccgcg

SEQ ID NO: 998331 - RNA, 21 nt, Human
cgcgguccgucgccgcucggc

SEQ ID NO: 998332 - RNA, 18 nt, Human
cggcacgcguccgccuuc

SEQ ID NO: 998333 - RNA, 21 nt, Human
cgucgacacugcccuccacac

SEQ ID NO: 998334 - RNA, 24 nt, Human
cguucugcuccccgggcugcccca

SEQ ID NO: 998335 - RNA, 20 nt, Human
cuagucccaaagccaggccc

SEQ ID NO: 998336 - RNA, 19 nt, Human
cucacagauacaaaagcaa

SEQ ID NO: 998337 - RNA, 19 nt, Human
cucacucaggcucccucca

SEQ ID NO: 998338 - RNA, 20 nt, Human
cucagaacagagaccccgau

SEQ ID NO: 998339 - RNA, 19 nt, Human
cuccagaagccgacggugg

SEQ ID NO: 998340 - RNA, 24 nt, Human
cuccagaagccgacgguggagccu

SEQ ID NO: 998341 - RNA, 24 nt, Human
cucugcuuggccaccggggccucc

SEQ ID NO: 998342 - RNA, 22 nt, Human
cugaagaaacugcuccugugcg

SEQ ID NO: 998343 - RNA, 21 nt, Human
cugaagaaacugcuccugugg

SEQ ID NO: 998344 - RNA, 19 nt, Human
cuggagcaggcugacgugg

SEQ ID NO: 998345 - RNA, 25 nt, Human
cuucuccuacaggcauuucuuacag

SEQ ID NO: 998346 - RNA, 20 nt, Human
cuuucaaaaaaaagaccuag

SEQ ID NO: 998347 - RNA, 21 nt, Human
gaacaguuugggccacaaaga

SEQ ID NO: 998348 - RNA, 20 nt, Human
gaagagccggcggccgccgc

SEQ ID NO: 998349 - RNA, 21 nt, Human
gaaggggugguggaauggggc

SEQ ID NO: 998350 - RNA, 18 nt, Human
gacacagugcagcaggag

SEQ ID NO: 998351 - RNA, 22 nt, Human
gaccccgcugcggacagaaugg

SEQ ID NO: 998352 - RNA, 22 nt, Human
gagcagcucuguccugcuggga

SEQ ID NO: 998353 - RNA, 21 nt, Human
gagcgguacagcgauccugga

SEQ ID NO: 998354 - RNA, 23 nt, Human
gaggcagcuggcugucccagggg

SEQ ID NO: 998355 - RNA, 21 nt, Human
gcaacagagagcucguccgaa

SEQ ID NO: 998356 - RNA, 19 nt, Human
gcagagacugcucugggga

SEQ ID NO: 998357 - RNA, 20 nt, Human
gcagggggcaggcuccaggc

SEQ ID NO: 998358 - RNA, 21 nt, Human
gccaggccccguggguccccc

SEQ ID NO: 998359 - RNA, 20 nt, Human
gcccagggugacugaggacc

SEQ ID NO: 998360 - RNA, 18 nt, Human
gcccguuggucagccugg

SEQ ID NO: 998361 - RNA, 21 nt, Human
gcccguuggucagccugggca

SEQ ID NO: 998362 - RNA, 21 nt, Human
gcccuuguagagacaaagauu

SEQ ID NO: 998363 - RNA, 20 nt, Human
gcugccccaugacggggggc

SEQ ID NO: 998364 - RNA, 19 nt, Human
ggaaugaccccgcugcgga

SEQ ID NO: 998365 - RNA, 19 nt, Human
ggagucugggagggccggg

SEQ ID NO: 998366 - RNA, 24 nt, Human
ggaucaguguacuccccggcccuc

SEQ ID NO: 998367 - RNA, 24 nt, Human
ggcagcaauaaugaccagguagcc

SEQ ID NO: 998368 - RNA, 18 nt, Human
ggcaggcccccgagcagc

SEQ ID NO: 998369 - RNA, 19 nt, Human
ggcauuucuuacagaaauc

SEQ ID NO: 998370 - RNA, 20 nt, Human
ggccgccgcggcugccgccg

SEQ ID NO: 998371 - RNA, 21 nt, Human
ggccuuaaaaauagacaauau

SEQ ID NO: 998372 - RNA, 24 nt, Human
ggcgucccgccaggagcgucugcc

SEQ ID NO: 998373 - RNA, 18 nt, Human
ggcugcggcuugcacgug

SEQ ID NO: 998374 - RNA, 18 nt, Human
gggagaaaggagguguca

SEQ ID NO: 998375 - RNA, 18 nt, Human
gggcccccucuguccacc

SEQ ID NO: 998376 - RNA, 26 nt, Human
gggcugccccaugacggggggcgggg

SEQ ID NO: 998377 - RNA, 18 nt, Human
ggggaagagccggcggcc

SEQ ID NO: 998378 - RNA, 19 nt, Human
ggggugcagggggcaggcu

SEQ ID NO: 998379 - RNA, 19 nt, Human
ggucugggaggcagcuggc

SEQ ID NO: 998380 - RNA, 21 nt, Human
gguggaaaaugcccuugcagu

SEQ ID NO: 998381 - RNA, 18 nt, Human
guaacagaaccgaacaga

SEQ ID NO: 998382 - RNA, 19 nt, Human
gugcagaggugucugaggg

SEQ ID NO: 998383 - RNA, 19 nt, Human
gugggccuguggggcccgg

SEQ ID NO: 998384 - RNA, 22 nt, Human
guggucacaagagccagugccc

SEQ ID NO: 998385 - RNA, 24 nt, Human
guguguguguguuuuuuugguguu

SEQ ID NO: 998386 - RNA, 24 nt, Human
guguguguguguuuuuuugguguu

SEQ ID NO: 998387 - RNA, 23 nt, Human
guucugcuucgggcugugggggu

SEQ ID NO: 998388 - RNA, 19 nt, Human
guuuuccaauuaagucauu

SEQ ID NO: 998389 - RNA, 23 nt, Human
uaacaugcugacauguccagcua

SEQ ID NO: 998390 - RNA, 23 nt, Human
uaacaugcugacauguccagcua

SEQ ID NO: 998391 - RNA, 27 nt, Human
uaacaugcugacauguccagcuauccc

SEQ ID NO: 998392 - RNA, 27 nt, Human
uaacaugcugacauguccagcuauccc

SEQ ID NO: 998393 - RNA, 24 nt, Human
uaacucacaguaacaacaugauua

SEQ ID NO: 998394 - RNA, 21 nt, Human
uacaauaaacaaaacuagaaa

SEQ ID NO: 998395 - RNA, 18 nt, Human
uacagaaaucaccggaca

SEQ ID NO: 998396 - RNA, 19 nt, Human
uacagaaaucaccggacau

SEQ ID NO: 998397 - RNA, 22 nt, Human
uacagcucugccagagcccuuc

SEQ ID NO: 998398 - RNA, 23 nt, Human
uacuucagggucuucugacaaac

SEQ ID NO: 998399 - RNA, 23 nt, Human
uagcaucagaaacacaaaaacau

SEQ ID NO: 998400 - RNA, 20 nt, Human
uagcucuccuucugcagucu

SEQ ID NO: 998401 - RNA, 28 nt, Human
uaucacaagugauaaccaguguuugaag

SEQ ID NO: 998402 - RNA, 18 nt, Human
uauccacuaugacuuuaa

SEQ ID NO: 998403 - RNA, 21 nt, Human
uauucucuuuccuaucacaag

SEQ ID NO: 998404 - RNA, 21 nt, Human
uauuuuagggugaaaacaauu

SEQ ID NO: 998405 - RNA, 18 nt, Human
ucacagauacaaaagcaa

SEQ ID NO: 998406 - RNA, 21 nt, Human
ucacgcguggcuccucccgcc

SEQ ID NO: 998407 - RNA, 21 nt, Human
ucacgcguggcuccucccgcc

SEQ ID NO: 998408 - RNA, 21 nt, Human
ucacucguggggccuagagau

SEQ ID NO: 998409 - RNA, 19 nt, Human
ucacugagccacccaaccc

SEQ ID NO: 998410 - RNA, 21 nt, Human
ucagaaacacaaaaacauugc

SEQ ID NO: 998411 - RNA, 18 nt, Human
ucagcaggugcagaggug

SEQ ID NO: 998412 - RNA, 22 nt, Human
ucaugcuugauggcuccuagaa

SEQ ID NO: 998413 - RNA, 23 nt, Human
uccacacccucacugagccaccc

SEQ ID NO: 998414 - RNA, 21 nt, Human
uccacccgcacagggaacaca

SEQ ID NO: 998415 - RNA, 22 nt, Human
uccaccuccccagcuacuuauc

SEQ ID NO: 998416 - RNA, 19 nt, Human
uccaggccuucgcccaggg

SEQ ID NO: 998417 - RNA, 23 nt, Human
ucccaggggcugugccuagaacu

SEQ ID NO: 998418 - RNA, 20 nt, Human
uccccacgugugugugugug

SEQ ID NO: 998419 - RNA, 20 nt, Human
uccccacgugugugugugug

SEQ ID NO: 998420 - RNA, 20 nt, Human
ucccuagcucuccuucugca

SEQ ID NO: 998421 - RNA, 20 nt, Human
ucccucagcagucacccgcc

SEQ ID NO: 998422 - RNA, 18 nt, Human
ucccugaugccaccgugc

SEQ ID NO: 998423 - RNA, 24 nt, Human
uccgaaguauccacuaugacuuua

SEQ ID NO: 998424 - RNA, 19 nt, Human
uccgcgggacaagcccuag

SEQ ID NO: 998425 - RNA, 22 nt, Human
uccucaggccaauccuccccgu

SEQ ID NO: 998426 - RNA, 23 nt, Human
ucuagaacaguuugggccacaaa

SEQ ID NO: 998427 - RNA, 22 nt, Human
ucuagcucugcaggcuccgcgg

SEQ ID NO: 998428 - RNA, 21 nt, Human
ucucgcgguccgucgccgcuc

SEQ ID NO: 998429 - RNA, 18 nt, Human
ucugccagagcccuucug

SEQ ID NO: 998430 - RNA, 20 nt, Human
ucugccgcuuccuccgucuc

SEQ ID NO: 998431 - RNA, 20 nt, Human
ucugccgcuuccuccgucuc

SEQ ID NO: 998432 - RNA, 21 nt, Human
ucugcuaaauccaccucccca

SEQ ID NO: 998433 - RNA, 21 nt, Human
ucugcuaaauccaccucccca

SEQ ID NO: 998434 - RNA, 25 nt, Human
ucugugggacccucaggugggcccc

SEQ ID NO: 998435 - RNA, 19 nt, Human
ucuuuguuuuuggguaaca

SEQ ID NO: 998436 - RNA, 20 nt, Human
ugaaaaugaaaaccuucucu

SEQ ID NO: 998437 - RNA, 20 nt, Human
ugaaaaugaaaaccuucucu

SEQ ID NO: 998438 - RNA, 22 nt, Human
ugaaacaaaauugcacucuuga

SEQ ID NO: 998439 - RNA, 23 nt, Human
ugaaacaaaauugcacucuugaa

SEQ ID NO: 998440 - RNA, 23 nt, Human
ugaaacaaaauugcacucuugaa

SEQ ID NO: 998441 - RNA, 22 nt, Human
ugacaaacaaauuauuaaaaca

SEQ ID NO: 998442 - RNA, 21 nt, Human
ugacacaaaucccaaccuggc

SEQ ID NO: 998443 - RNA, 20 nt, Human
ugacauggagaccgaaggcc

SEQ ID NO: 998444 - RNA, 22 nt, Human
ugaccagguagccugccgacac

SEQ ID NO: 998445 - RNA, 22 nt, Human
ugacugaggacccuggagcagg

SEQ ID NO: 998446 - RNA, 18 nt, Human
ugagaaaaugccaucugg

SEQ ID NO: 998447 - RNA, 21 nt, Human
ugagaaaaugccaucugggca

SEQ ID NO: 998448 - RNA, 24 nt, Human
ugagcaaggggcccgcaaggggag

SEQ ID NO: 998449 - RNA, 21 nt, Human
ugagcagcucuguccugcugg

SEQ ID NO: 998450 - RNA, 21 nt, Human
ugagccacccaacccugcuag

SEQ ID NO: 998451 - RNA, 19 nt, Human
ugagcgcgaggaccucagu

SEQ ID NO: 998452 - RNA, 19 nt, Human
ugagcgcgaggaccucagu

SEQ ID NO: 998453 - RNA, 18 nt, Human
ugcagagagaccauggcc

SEQ ID NO: 998454 - RNA, 21 nt, Human
ugcagagagaccauggcccca

SEQ ID NO: 998455 - RNA, 26 nt, Human
ugcagcaagaugacgggauggagaaa

SEQ ID NO: 998456 - RNA, 18 nt, Human
ugccagagcccuucugac

SEQ ID NO: 998457 - RNA, 19 nt, Human
ugcccaggccgagggugga

SEQ ID NO: 998458 - RNA, 21 nt, Human
ugcccaggccgaggguggagc

SEQ ID NO: 998459 - RNA, 22 nt, Human
ugccugggaagggcuacuggag

SEQ ID NO: 998460 - RNA, 23 nt, Human
ugcuagaaaggcccuacucccag

SEQ ID NO: 998461 - RNA, 21 nt, Human
ugcucgaggcgaggggagagg

SEQ ID NO: 998462 - RNA, 19 nt, Human
ugcuguuggaggguaucuu

SEQ ID NO: 998463 - RNA, 19 nt, Human
uggaaugcucagaggguuc

SEQ ID NO: 998464 - RNA, 20 nt, Human
uggagaaacacaccugcggg

SEQ ID NO: 998465 - RNA, 20 nt, Human
uggcacugccacccuacugg

SEQ ID NO: 998466 - RNA, 18 nt, Human
ugggaagggcuacuggag

SEQ ID NO: 998467 - RNA, 19 nt, Human
ugggcugcaaccccggcuc

SEQ ID NO: 998468 - RNA, 26 nt, Human
uggggcagaauccaaacaccuacagg

SEQ ID NO: 998469 - RNA, 25 nt, Human
uggggcagggaaggagaaaggaggg

SEQ ID NO: 998470 - RNA, 21 nt, Human
ugguaaacaagcagcaccccc

SEQ ID NO: 998471 - RNA, 21 nt, Human
ugguggaauggggcugcaaug

SEQ ID NO: 998472 - RNA, 20 nt, Human
ugguggagagaaaagucugg

SEQ ID NO: 998473 - RNA, 19 nt, Human
uggugggccuguggggccc

SEQ ID NO: 998474 - RNA, 24 nt, Human
uggugggccuguggggcccgggcu

SEQ ID NO: 998475 - RNA, 18 nt, Human
ugucggggcucacucagg

SEQ ID NO: 998476 - RNA, 19 nt, Human
ugucggggcucacucaggc

SEQ ID NO: 998477 - RNA, 22 nt, Human
uguggucacaagagccagugcc

SEQ ID NO: 998478 - RNA, 22 nt, Human
uguguuuuccaauuaagucauu

SEQ ID NO: 998479 - RNA, 21 nt, Human
uguuccacaccugccucccuc

SEQ ID NO: 998480 - RNA, 22 nt, Human
uguuccacaccugccucccuca

SEQ ID NO: 998481 - RNA, 23 nt, Human
uguugaguacaugagaggaagac

SEQ ID NO: 998482 - RNA, 23 nt, Human
uguuuuguuacgaaggugacggg

SEQ ID NO: 998483 - RNA, 24 nt, Human
uuaaaacagagaccagaugaggcu

SEQ ID NO: 998484 - RNA, 21 nt, Human
uuaaaacaggcagauuaaaaa

SEQ ID NO: 998485 - RNA, 24 nt, Human
uuaaaacaggcagauuaaaaagac

SEQ ID NO: 998486 - RNA, 22 nt, Human
uuacuagaccaagauguugcau

SEQ ID NO: 998487 - RNA, 21 nt, Human
uucacaagacagacuagacac

SEQ ID NO: 998488 - RNA, 23 nt, Human
uucagagugaaguguggcuaguc

SEQ ID NO: 998489 - RNA, 23 nt, Human
uucagagugaaguguggcuaguc

SEQ ID NO: 998490 - RNA, 18 nt, Human
uucaugcuugauggcucc

SEQ ID NO: 998491 - RNA, 21 nt, Human
uuccuccgucucacaaggucc

SEQ ID NO: 998492 - RNA, 21 nt, Human
uuccuccgucucacaaggucc

SEQ ID NO: 998493 - RNA, 23 nt, Human
uugaaggauaaauaauucuucag

SEQ ID NO: 998494 - RNA, 23 nt, Human
uugaaggauaaauaauucuucag

SEQ ID NO: 998495 - RNA, 25 nt, Human
uugcaaacggaaaacagaacuaugg

SEQ ID NO: 998496 - RNA, 18 nt, Human
uugcagugagcugcuggc

SEQ ID NO: 998497 - RNA, 18 nt, Human
uuggacugucaagaugug

SEQ ID NO: 998498 - RNA, 18 nt, Human
uuggccaccggggccucc

SEQ ID NO: 998499 - RNA, 23 nt, Human
uuuaaaacaggcagauuaaaaag

SEQ ID NO: 998500 - RNA, 25 nt, Human
uuuagcauauauguuuuccaccuua

SEQ ID NO: 998501 - RNA, 25 nt, Human
uuuagcauauauguuuuccaccuua

SEQ ID NO: 998502 - RNA, 24 nt, Human
uuugaaacaaaauugcacucuuga

SEQ ID NO: 998503 - RNA, 24 nt, Human
aaaaaaucagaucucaagacagac

SEQ ID NO: 998504 - RNA, 24 nt, Human
caaagcccagagaacucucaucca

SEQ ID NO: 998505 - RNA, 25 nt, Human
caaaggcaccaggcagcacacgaau

SEQ ID NO: 998506 - RNA, 19 nt, Human
caacagcagcacggaugaa

SEQ ID NO: 998507 - RNA, 20 nt, Human
caccacugccauugccauug

SEQ ID NO: 998508 - RNA, 24 nt, Human
caccagggcacacaucauggccag

SEQ ID NO: 998509 - RNA, 22 nt, Human
cagcagaagcagcugacggggg

SEQ ID NO: 998510 - RNA, 21 nt, Human
cagggagaaggugacacggcg

SEQ ID NO: 998511 - RNA, 19 nt, Human
cauacuuauguguguagaa

SEQ ID NO: 998512 - RNA, 19 nt, Human
caugucugcccuacccaag

SEQ ID NO: 998513 - RNA, 23 nt, Human
ccaccugcacucagcugaggauc

SEQ ID NO: 998514 - RNA, 21 nt, Human
cccaagaccuguuccccacag

SEQ ID NO: 998515 - RNA, 22 nt, Human
cccaucguccuuuccccucgaa

SEQ ID NO: 998516 - RNA, 19 nt, Human
ccccaauucccacccccuu

SEQ ID NO: 998517 - RNA, 21 nt, Human
ccccaucguccuuuccccucg

SEQ ID NO: 998518 - RNA, 25 nt, Human
cccucgaaccccaccugcacucagc

SEQ ID NO: 998519 - RNA, 22 nt, Human
cccuuucucccuccccaauucc

SEQ ID NO: 998520 - RNA, 21 nt, Human
ccugagcaggcaccucagucc

SEQ ID NO: 998521 - RNA, 20 nt, Human
ccugcagcuccugccguugc

SEQ ID NO: 998522 - RNA, 22 nt, Human
ccugcagcuuguaaccauacuu

SEQ ID NO: 998523 - RNA, 25 nt, Human
cuacccuuucucccuccccaauucc

SEQ ID NO: 998524 - RNA, 18 nt, Human
cucccuccccaauuccca

SEQ ID NO: 998525 - RNA, 20 nt, Human
cuccuggcacuaaggaaaua

SEQ ID NO: 998526 - RNA, 25 nt, Human
cucuccaaguucagccagugccuga

SEQ ID NO: 998527 - RNA, 19 nt, Human
cugauagcuccuccagcuc

SEQ ID NO: 998528 - RNA, 18 nt, Human
cuuggccuuggccuccug

SEQ ID NO: 998529 - RNA, 22 nt, Human
gagaacucucauccagggagcc

SEQ ID NO: 998530 - RNA, 22 nt, Human
gagcggccggcacgggcgagcg

SEQ ID NO: 998531 - RNA, 22 nt, Human
gccccacagcccgcgccucgcu

SEQ ID NO: 998532 - RNA, 23 nt, Human
gcuuggccuuggccuccuguagc

SEQ ID NO: 998533 - RNA, 20 nt, Human
ggagccccgccacgugccuu

SEQ ID NO: 998534 - RNA, 22 nt, Human
ggcacgcggcggccccacagcc

SEQ ID NO: 998535 - RNA, 24 nt, Human
ggccagauguggcuucacacucuc

SEQ ID NO: 998536 - RNA, 23 nt, Human
ggcugggggagggaggauggggu

SEQ ID NO: 998537 - RNA, 22 nt, Human
gguccggcccccucuccaaguu

SEQ ID NO: 998538 - RNA, 20 nt, Human
gguuuagccagcccaggguc

SEQ ID NO: 998539 - RNA, 18 nt, Human
gugagaggugugugcccu

SEQ ID NO: 998540 - RNA, 23 nt, Human
gugcuugcagccggagucuuuga

SEQ ID NO: 998541 - RNA, 24 nt, Human
guuuccagcccuucaugaccccaa

SEQ ID NO: 998542 - RNA, 22 nt, Human
uaacagaaccuaggcagcagaa

SEQ ID NO: 998543 - RNA, 19 nt, Human
uaaccaaagcccagagaac

SEQ ID NO: 998544 - RNA, 20 nt, Human
uagagugugaccggcaccaa

SEQ ID NO: 998545 - RNA, 23 nt, Human
uagguaaagggggaaaaaaucag

SEQ ID NO: 998546 - RNA, 24 nt, Human
ucacacucuccuccacaugccgug

SEQ ID NO: 998547 - RNA, 22 nt, Human
ucaguccguguagagugugacc

SEQ ID NO: 998548 - RNA, 21 nt, Human
uccccaauucccacccccuua

SEQ ID NO: 998549 - RNA, 22 nt, Human
uccccaauucccacccccuuau

SEQ ID NO: 998550 - RNA, 18 nt, Human
uccccugcugugcccucc

SEQ ID NO: 998551 - RNA, 19 nt, Human
uccuggugggagaugaacu

SEQ ID NO: 998552 - RNA, 22 nt, Human
ucugcccuacccaagaagggag

SEQ ID NO: 998553 - RNA, 22 nt, Human
ugaagcacucaagguugggcuu

SEQ ID NO: 998554 - RNA, 24 nt, Human
ugaagcacucaagguugggcuugg

SEQ ID NO: 998555 - RNA, 20 nt, Human
ugagcacgccaucacugccc

SEQ ID NO: 998556 - RNA, 19 nt, Human
ugccugacugaggucaugc

SEQ ID NO: 998557 - RNA, 21 nt, Human
ugcugugcccuccuggcacua

SEQ ID NO: 998558 - RNA, 24 nt, Human
uggcugggggagggaggauggggu

SEQ ID NO: 998559 - RNA, 18 nt, Human
ugggggagggaggauggg

SEQ ID NO: 998560 - RNA, 22 nt, Human
ugggggagggaggaugggguaa

SEQ ID NO: 998561 - RNA, 19 nt, Human
ugggguaacagaaccuagg

SEQ ID NO: 998562 - RNA, 18 nt, Human
uguguagaaggcugggcu

SEQ ID NO: 998563 - RNA, 19 nt, Human
uucccacccccuuauggcu

SEQ ID NO: 998564 - RNA, 20 nt, Human
uugccauugaggaaugcaga

SEQ ID NO: 998565 - RNA, 21 nt, Human
aacaaagagguauacuaacug

SEQ ID NO: 998566 - RNA, 22 nt, Human
aaccaggagggcagggcucccc

SEQ ID NO: 998567 - RNA, 18 nt, Human
aagaaaguacaacaaaga

SEQ ID NO: 998568 - RNA, 21 nt, Human
aagcccaagaaaguacaacaa

SEQ ID NO: 998569 - RNA, 25 nt, Human
aaguacaacaaagagguauacuaac

SEQ ID NO: 998570 - RNA, 24 nt, Human
acuugauuaucacuugcucguucu

SEQ ID NO: 998571 - RNA, 21 nt, Human
agagcaaaagcccaagaaagu

SEQ ID NO: 998572 - RNA, 19 nt, Human
agcaaaagcccaagaaagu

SEQ ID NO: 998573 - RNA, 18 nt, Human
auucaacagacauguuua

SEQ ID NO: 998574 - RNA, 24 nt, Human
caaccgcacgacuccgcucagcca

SEQ ID NO: 998575 - RNA, 21 nt, Human
cacugcgcgccgagacgaggc

SEQ ID NO: 998576 - RNA, 19 nt, Human
cacuguuuucuccagguag

SEQ ID NO: 998577 - RNA, 22 nt, Human
cagagcaaaagcccaagaaagu

SEQ ID NO: 998578 - RNA, 18 nt, Human
caggagggcagggcuccc

SEQ ID NO: 998579 - RNA, 24 nt, Human
cagguuaaaaaaaugagaacucaa

SEQ ID NO: 998580 - RNA, 23 nt, Human
caugccacaggcacuucaggccu

SEQ ID NO: 998581 - RNA, 18 nt, Human
ccaagccccagcugcgga

SEQ ID NO: 998582 - RNA, 21 nt, Human
ccaagccccagcugcggacgc

SEQ ID NO: 998583 - RNA, 19 nt, Human
ccagagcaaaagcccaaga

SEQ ID NO: 998584 - RNA, 20 nt, Human
ccagagcaaaagcccaagaa

SEQ ID NO: 998585 - RNA, 23 nt, Human
cccaggaaaaaacugccucagau

SEQ ID NO: 998586 - RNA, 21 nt, Human
ccccaccaaccgcacgacucc

SEQ ID NO: 998587 - RNA, 21 nt, Human
cccgcaggccaagccccagcu

SEQ ID NO: 998588 - RNA, 23 nt, Human
ccucucuaacaacacucacuagu

SEQ ID NO: 998589 - RNA, 20 nt, Human
ccucugaaaucuauaacagg

SEQ ID NO: 998590 - RNA, 20 nt, Human
ccugaauauccuuaguaaca

SEQ ID NO: 998591 - RNA, 19 nt, Human
ccuggaggaaaaacugggg

SEQ ID NO: 998592 - RNA, 19 nt, Human
cgagggcacuagcacaagg

SEQ ID NO: 998593 - RNA, 22 nt, Human
cggggaggccgaaccaggaggg

SEQ ID NO: 998594 - RNA, 20 nt, Human
cucucuaacaacacucacua

SEQ ID NO: 998595 - RNA, 21 nt, Human
cucuugagucuggacuuucug

SEQ ID NO: 998596 - RNA, 24 nt, Human
cuuucugacaauaaaauacaccag

SEQ ID NO: 998597 - RNA, 19 nt, Human
gcaacaugccacaggcacu

SEQ ID NO: 998598 - RNA, 19 nt, Human
gcccgcaggccaagcccca

SEQ ID NO: 998599 - RNA, 21 nt, Human
gcccgcaggccaagccccagc

SEQ ID NO: 998600 - RNA, 19 nt, Human
gcugcaacaugccacaggc

SEQ ID NO: 998601 - RNA, 22 nt, Human
gcugcugcaacaugccacaggc

SEQ ID NO: 998602 - RNA, 20 nt, Human
ggacacagacacugcgcgcc

SEQ ID NO: 998603 - RNA, 21 nt, Human
gggcucccccaccaaccgcac

SEQ ID NO: 998604 - RNA, 24 nt, Human
uaaaauacaccagagcaaaagccc

SEQ ID NO: 998605 - RNA, 24 nt, Human
uaaacaaguauuauucaacagaca

SEQ ID NO: 998606 - RNA, 22 nt, Human
uaacagguuaaaaaaaugagaa

SEQ ID NO: 998607 - RNA, 24 nt, Human
uacaacaaagagguauacuaacug

SEQ ID NO: 998608 - RNA, 23 nt, Human
uauaacagguuaaaaaaaugaga

SEQ ID NO: 998609 - RNA, 22 nt, Human
ucaacagacauguuuacacuaa

SEQ ID NO: 998610 - RNA, 19 nt, Human
ucccaggaaaaaacugccu

SEQ ID NO: 998611 - RNA, 20 nt, Human
ucccaggaaaaaacugccuc

SEQ ID NO: 998612 - RNA, 23 nt, Human
ucccugaauauccuuaguaacaa

SEQ ID NO: 998613 - RNA, 18 nt, Human
ucuuuuuuuuuuuuuuuu

SEQ ID NO: 998614 - RNA, 18 nt, Human
ugaaaaagcauggaacgu

SEQ ID NO: 998615 - RNA, 18 nt, Human
ugacaauaaaauacacca

SEQ ID NO: 998616 - RNA, 23 nt, Human
ugagaacagggcaaggaaaggca

SEQ ID NO: 998617 - RNA, 26 nt, Human
ugggagccuucgccaccuucgcuggc

SEQ ID NO: 998618 - RNA, 18 nt, Human
uguggauucccaggaaaa

SEQ ID NO: 998619 - RNA, 23 nt, Human
uucugacaauaaaauacaccaga

SEQ ID NO: 998620 - RNA, 18 nt, Human
uuguuuuugagcaaguga

SEQ ID NO: 998621 - RNA, 20 nt, Human
uuuucuccagguaguuguuu

SEQ ID NO: 998622 - RNA, 22 nt, Human
uuuuuuuuuuuuuuuucuuuuu

SEQ ID NO: 998623 - RNA, 23 nt, Human
aaaauaccuucacagcaacaucu

SEQ ID NO: 998624 - RNA, 23 nt, Human
aagagagacuggagaagguggug

SEQ ID NO: 998625 - RNA, 21 nt, Human
acaaaauaccuucacagcaac

SEQ ID NO: 998626 - RNA, 22 nt, Human
acuuuauuuucaucaccauggg

SEQ ID NO: 998627 - RNA, 21 nt, Human
agaaggugguggucuccuugc

SEQ ID NO: 998628 - RNA, 22 nt, Human
agaaggugguggucuccuugcc

SEQ ID NO: 998629 - RNA, 22 nt, Human
auuccucagguuuuuuugaagc

SEQ ID NO: 998630 - RNA, 27 nt, Human
caacugauuguaaauguugaucacauc

SEQ ID NO: 998631 - RNA, 24 nt, Human
caaguugacacauaguacuagcca

SEQ ID NO: 998632 - RNA, 21 nt, Human
caucuagacuacuguuugacc

SEQ ID NO: 998633 - RNA, 23 nt, Human
cccuuguggucccgcuauggcuc

SEQ ID NO: 998634 - RNA, 23 nt, Human
ccucuggagacuuuucagauaga

SEQ ID NO: 998635 - RNA, 19 nt, Human
ccuugcccuuguggucccg

SEQ ID NO: 998636 - RNA, 20 nt, Human
ccuuguggucccgcuauggc

SEQ ID NO: 998637 - RNA, 25 nt, Human
cgaaaagagacuggagaaaguggug

SEQ ID NO: 998638 - RNA, 24 nt, Human
cugauuguaaauguugaucacauc

SEQ ID NO: 998639 - RNA, 21 nt, Human
uagacaaguugacacauagua

SEQ ID NO: 998640 - RNA, 19 nt, Human
ucacauggggcauacccuu

SEQ ID NO: 998641 - RNA, 18 nt, Human
ugaccacacagcugagca

SEQ ID NO: 998642 - RNA, 24 nt, Human
ugcccgggaauuacuggcuguccg

SEQ ID NO: 998643 - RNA, 21 nt, Human
uggagaaggugguggucuccu

SEQ ID NO: 998644 - RNA, 18 nt, Human
uggcccacuccauuccuc

SEQ ID NO: 998645 - RNA, 20 nt, Human
uggcuggauaguguuggccc

SEQ ID NO: 998646 - RNA, 21 nt, Human
ugggguuagaccucuggagac

SEQ ID NO: 998647 - RNA, 20 nt, Human
uguccgaaaagagacuggag

SEQ ID NO: 998648 - RNA, 20 nt, Human
uguccgaagagagacuggag

SEQ ID NO: 998649 - RNA, 21 nt, Human
uuauuuucaucaccauggggc

SEQ ID NO: 998650 - RNA, 18 nt, Human
uucacuuuauuuucauca

SEQ ID NO: 998651 - RNA, 23 nt, Human
uucauuuuauuucccucacaugg

SEQ ID NO: 998652 - RNA, 21 nt, Human
uuccucagguuuuuuugaagc

SEQ ID NO: 998653 - RNA, 21 nt, Human
uugcccgggaauuacuggcug

SEQ ID NO: 998654 - RNA, 18 nt, Human
accuggacaggugaacuc

SEQ ID NO: 998655 - RNA, 18 nt, Human
agcaugguggucaucugc

SEQ ID NO: 998656 - RNA, 23 nt, Human
cagcagcgaggaguccuuguugc

SEQ ID NO: 998657 - RNA, 20 nt, Human
cggccuggggccccgcccac

SEQ ID NO: 998658 - RNA, 21 nt, Human
cuacuggcugaucugcggcgc

SEQ ID NO: 998659 - RNA, 22 nt, Human
cucagaaagaacucggaguucc

SEQ ID NO: 998660 - RNA, 23 nt, Human
cuggucagcagcgaggaguccuu

SEQ ID NO: 998661 - RNA, 18 nt, Human
gaucugcggcgccggcgc

SEQ ID NO: 998662 - RNA, 18 nt, Human
gcugacacagagcauggu

SEQ ID NO: 998663 - RNA, 26 nt, Human
ggacaggugaacucuuguauguuucu

SEQ ID NO: 998664 - RNA, 22 nt, Human
guuucuguuuuggggauuuuua

SEQ ID NO: 998665 - RNA, 19 nt, Human
uagggguuuuccauguaca

SEQ ID NO: 998666 - RNA, 18 nt, Human
ucauuccauguacauuca

SEQ ID NO: 998667 - RNA, 21 nt, Human
ugaucugcggcgccggcgccc

SEQ ID NO: 998668 - RNA, 23 nt, Human
uggcugaucugcggcgccggcgc

SEQ ID NO: 998669 - RNA, 19 nt, Human
uguugcguauggacggaag

SEQ ID NO: 998670 - RNA, 18 nt, Human
uuccauguacauucauag

SEQ ID NO: 998671 - RNA, 20 nt, Human
aaaaaaaaaaaaaaaaagga

SEQ ID NO: 998672 - RNA, 21 nt, Human
aaaaaaaaaaaaaaaaaggag

SEQ ID NO: 998673 - RNA, 21 nt, Human
aaaaggagggggcuuuuaaaa

SEQ ID NO: 998674 - RNA, 21 nt, Human
aaacaaaaauccaagcaucgc

SEQ ID NO: 998675 - RNA, 21 nt, Human
aaagaacacccgcagcaccac

SEQ ID NO: 998676 - RNA, 19 nt, Human
aaccagcccgaaccucgcu

SEQ ID NO: 998677 - RNA, 19 nt, Human
aaugagaaaaacagcuaaa

SEQ ID NO: 998678 - RNA, 19 nt, Human
agcugggccugaccccugg

SEQ ID NO: 998679 - RNA, 19 nt, Human
aggaaacaaaaauccaagc

SEQ ID NO: 998680 - RNA, 22 nt, Human
aguacaaucugugcggcuggug

SEQ ID NO: 998681 - RNA, 20 nt, Human
auaggaaacaaaaauccaag

SEQ ID NO: 998682 - RNA, 23 nt, Human
auaggaaacaaaaauccaagcau

SEQ ID NO: 998683 - RNA, 23 nt, Human
aucuucuugagguuccucuguua

SEQ ID NO: 998684 - RNA, 18 nt, Human
caaaagaacacccgcagc

SEQ ID NO: 998685 - RNA, 21 nt, Human
caaaagaacacccgcagcacc

SEQ ID NO: 998686 - RNA, 23 nt, Human
caaauuagucaucuuagcuccaa

SEQ ID NO: 998687 - RNA, 25 nt, Human
caacggaacaaccagcccgaaccuc

SEQ ID NO: 998688 - RNA, 18 nt, Human
caccccacacaccaacaa

SEQ ID NO: 998689 - RNA, 21 nt, Human
cagcucgcaacggaacaacca

SEQ ID NO: 998690 - RNA, 22 nt, Human
cagcucgcaacggaacaaccag

SEQ ID NO: 998691 - RNA, 21 nt, Human
cagcugcagcucgcaacggaa

SEQ ID NO: 998692 - RNA, 28 nt, Human
ccaacaaaugagaaaaacagcuaaagcc

SEQ ID NO: 998693 - RNA, 25 nt, Human
ccagccaucuucccagcgccucucu

SEQ ID NO: 998694 - RNA, 19 nt, Human
cccaaaagaacacccgcag

SEQ ID NO: 998695 - RNA, 22 nt, Human
cccaaaagaacacccgcagcac

SEQ ID NO: 998696 - RNA, 24 nt, Human
cccacacaccaacaaaugagaaaa

SEQ ID NO: 998697 - RNA, 24 nt, Human
cccacacaccaacaaaugagaaaa

SEQ ID NO: 998698 - RNA, 22 nt, Human
cccauggccagccuccucuguc

SEQ ID NO: 998699 - RNA, 24 nt, Human
ccccaaaagaacacccgcagcacc

SEQ ID NO: 998700 - RNA, 25 nt, Human
ccccaaaagaacacccgcagcacca

SEQ ID NO: 998701 - RNA, 22 nt, Human
ccccaccccacacaccaacaaa

SEQ ID NO: 998702 - RNA, 20 nt, Human
cccccaccccacacaccaac

SEQ ID NO: 998703 - RNA, 23 nt, Human
cccccaccccacacaccaacaaa

SEQ ID NO: 998704 - RNA, 25 nt, Human
ccccugcccccaccccacacacccc

SEQ ID NO: 998705 - RNA, 21 nt, Human
ccccugggccccauggccagc

SEQ ID NO: 998706 - RNA, 19 nt, Human
cccgaaccucgcucgugcc

SEQ ID NO: 998707 - RNA, 26 nt, Human
cccgcagcaccacuggcuucuucacu

SEQ ID NO: 998708 - RNA, 20 nt, Human
cccugggccccauggccagc

SEQ ID NO: 998709 - RNA, 23 nt, Human
cccugggccccauggccagccuc

SEQ ID NO: 998710 - RNA, 18 nt, Human
ccuaaaaaaagaaaaaaa

SEQ ID NO: 998711 - RNA, 25 nt, Human
ccuaaaaaaagaaaaaaaaaaaaaa

SEQ ID NO: 998712 - RNA, 19 nt, Human
ccuaaaaaaagaaaaaaag

SEQ ID NO: 998713 - RNA, 22 nt, Human
ccuaccccugcccccaccccac

SEQ ID NO: 998714 - RNA, 23 nt, Human
cgcaacggaacaaccagcccgaa

SEQ ID NO: 998715 - RNA, 23 nt, Human
cuaauauuacuacauaugccuaa

SEQ ID NO: 998716 - RNA, 25 nt, Human
cuaccccugcccccaccccacacac

SEQ ID NO: 998717 - RNA, 18 nt, Human
cucuguuaagcuccucac

SEQ ID NO: 998718 - RNA, 22 nt, Human
cuucugggccuaccacagagau

SEQ ID NO: 998719 - RNA, 20 nt, Human
gaaacaaaaauccaagcauc

SEQ ID NO: 998720 - RNA, 22 nt, Human
gcaacggaacaaccagcccgaa

SEQ ID NO: 998721 - RNA, 24 nt, Human
gcaacggaacaaccagcccgaacc

SEQ ID NO: 998722 - RNA, 23 nt, Human
gccuaaaaaaagaaaaaaaaaaa

SEQ ID NO: 998723 - RNA, 21 nt, Human
gcuccaaaugaaaugaaauua

SEQ ID NO: 998724 - RNA, 21 nt, Human
ggaaacaaaaauccaagcauc

SEQ ID NO: 998725 - RNA, 22 nt, Human
ggaacaaccagcccgaaccucg

SEQ ID NO: 998726 - RNA, 21 nt, Human
uaagcuccucaccagccaucu

SEQ ID NO: 998727 - RNA, 22 nt, Human
uacuggaucccagacacuaccc

SEQ ID NO: 998728 - RNA, 21 nt, Human
ucaaaguuucccaaauuaaau

SEQ ID NO: 998729 - RNA, 27 nt, Human
ucaggacaggggaaaagagaucgaaaa

SEQ ID NO: 998730 - RNA, 22 nt, Human
ucccaaauuaaauguuucuaau

SEQ ID NO: 998731 - RNA, 18 nt, Human
ucccagacacuaccccaa

SEQ ID NO: 998732 - RNA, 21 nt, Human
ucccgcccuaccccugccccc

SEQ ID NO: 998733 - RNA, 18 nt, Human
ucuccccugggcaggaau

SEQ ID NO: 998734 - RNA, 31 nt, Human
ucuccccugggcaggaaucccgucaaggguu

SEQ ID NO: 998735 - RNA, 21 nt, Human
ucugugcggcugguggggggu

SEQ ID NO: 998736 - RNA, 23 nt, Human
ugaaaugaaauuagaacaaaacu

SEQ ID NO: 998737 - RNA, 21 nt, Human
ugaagagaggaucacuuuuca

SEQ ID NO: 998738 - RNA, 22 nt, Human
ugcccccaccccacacaccaac

SEQ ID NO: 998739 - RNA, 25 nt, Human
ugcccccaccccacacaccaacaaa

SEQ ID NO: 998740 - RNA, 23 nt, Human
ugcggcugguggggggugggggu

SEQ ID NO: 998741 - RNA, 19 nt, Human
uggaucccagacacuaccc

SEQ ID NO: 998742 - RNA, 21 nt, Human
ugggccccauggccagccucc

SEQ ID NO: 998743 - RNA, 22 nt, Human
ugggccccauggccaggacccu

SEQ ID NO: 998744 - RNA, 18 nt, Human
ugguggggggugggggua

SEQ ID NO: 998745 - RNA, 19 nt, Human
uggugggggguggggguag

SEQ ID NO: 998746 - RNA, 22 nt, Human
uuugaacaaugauucaacucgu

SEQ ID NO: 998747 - RNA, 18 nt, Human
accaaaauacaaacccca

SEQ ID NO: 998748 - RNA, 24 nt, Human
accaaaauacaaaccccaucaaag

SEQ ID NO: 998749 - RNA, 20 nt, Human
acuugagggaaaaaaacaau

SEQ ID NO: 998750 - RNA, 26 nt, Human
acuuuauuuugcuuuaaaaaaacaau

SEQ ID NO: 998751 - RNA, 27 nt, Human
agggaaaaaauacuugagggaaaaaaa

SEQ ID NO: 998752 - RNA, 22 nt, Human
cagauaaauaaucuucuucaca

SEQ ID NO: 998753 - RNA, 18 nt, Human
ccagacagcaggugucag

SEQ ID NO: 998754 - RNA, 24 nt, Human
cccggaauugggaggcuguggggc

SEQ ID NO: 998755 - RNA, 22 nt, Human
cggaaggggccagacagcaggu

SEQ ID NO: 998756 - RNA, 23 nt, Human
cggaaggggccagacagcaggug

SEQ ID NO: 998757 - RNA, 18 nt, Human
cggcugcagcuucaggcc

SEQ ID NO: 998758 - RNA, 22 nt, Human
cugcagcuucaggccggaaggg

SEQ ID NO: 998759 - RNA, 23 nt, Human
gaaaaaaacaaugguauaacaug

SEQ ID NO: 998760 - RNA, 21 nt, Human
gagggaaaaaaacaaugguau

SEQ ID NO: 998761 - RNA, 20 nt, Human
gcagcuucaggccggaaggg

SEQ ID NO: 998762 - RNA, 23 nt, Human
guaaaaaucacaauguaaaaaua

SEQ ID NO: 998763 - RNA, 25 nt, Human
uaaccaaaauacaaaccccaucaaa

SEQ ID NO: 998764 - RNA, 22 nt, Human
uagcauuaaaaaaaguuaauau

SEQ ID NO: 998765 - RNA, 22 nt, Human
ugggaggcuguggggccucagc

SEQ ID NO: 998766 - RNA, 18 nt, Human
ugguauaacauguguaaa

SEQ ID NO: 998767 - RNA, 21 nt, Human
uucacagggaaaaaauacuug

SEQ ID NO: 998768 - RNA, 28 nt, Human
uucacagggaaaaaauacuugagggaaa

SEQ ID NO: 998769 - RNA, 21 nt, Human
aggaacuugaggugggugaug

SEQ ID NO: 998770 - RNA, 20 nt, Human
agggagggcaggaucuccgu

SEQ ID NO: 998771 - RNA, 21 nt, Human
cacgaugcugcuggucuggcu

SEQ ID NO: 998772 - RNA, 19 nt, Human
cgagaugggcagcuugggc

SEQ ID NO: 998773 - RNA, 22 nt, Human
cgaugcugcuggucuggcuggg

SEQ ID NO: 998774 - RNA, 21 nt, Human
cgccacggccgacacacgguc

SEQ ID NO: 998775 - RNA, 19 nt, Human
uacggcacuucucgcucac

SEQ ID NO: 998776 - RNA, 18 nt, Human
ugcugcuggucuggcugg

SEQ ID NO: 998777 - RNA, 23 nt, Human
ugcuggaagauguuguucacggg

SEQ ID NO: 998778 - RNA, 21 nt, Human
ugcuggucuggcuggacgcgc

SEQ ID NO: 998779 - RNA, 19 nt, Human
caccuucggcccggaauuc

SEQ ID NO: 998780 - RNA, 23 nt, Human
caggcaccuucggcccggggagg

SEQ ID NO: 998781 - RNA, 19 nt, Human
ccggggggcaggagcuggg

SEQ ID NO: 998782 - RNA, 22 nt, Human
gagcuggggccaggugaggaga

SEQ ID NO: 998783 - RNA, 20 nt, Human
ggcaggagcuggggccaggu

SEQ ID NO: 998784 - RNA, 20 nt, Human
ugacugaaugagcaagccca

SEQ ID NO: 998785 - RNA, 25 nt, Human
ugacugaaugagcaagcccaggcac

SEQ ID NO: 998786 - RNA, 20 nt, Human
ugacugugacugaaugagca

SEQ ID NO: 998787 - RNA, 18 nt, Human
ugagcaagcccaggcacc

SEQ ID NO: 998788 - RNA, 18 nt, Human
aaaaggaaaagaaauagg

SEQ ID NO: 998789 - RNA, 24 nt, Human
aaacaaacccaaaaggacugaaac

SEQ ID NO: 998790 - RNA, 18 nt, Human
aaaccaaacccaaaagga

SEQ ID NO: 998791 - RNA, 18 nt, Human
aaagaaaagaaauaggau

SEQ ID NO: 998792 - RNA, 19 nt, Human
aaaggaaaagaaauaggau

SEQ ID NO: 998793 - RNA, 21 nt, Human
aaagguaaauaaaccaaaccc

SEQ ID NO: 998794 - RNA, 22 nt, Human
aaagguaaauaaaccaaaccca

SEQ ID NO: 998795 - RNA, 23 nt, Human
aaauauuccaacaccaagaacuc

SEQ ID NO: 998796 - RNA, 18 nt, Human
aagcgaccuguuugagga

SEQ ID NO: 998797 - RNA, 22 nt, Human
acaccaagaacucccgagaagc

SEQ ID NO: 998798 - RNA, 20 nt, Human
acccugagaagcugagagaa

SEQ ID NO: 998799 - RNA, 21 nt, Human
acccugagaagcugagagaaa

SEQ ID NO: 998800 - RNA, 23 nt, Human
acccugagaagcugagagaaaag

SEQ ID NO: 998801 - RNA, 23 nt, Human
acccugagaagcugagagaaaag

SEQ ID NO: 998802 - RNA, 21 nt, Human
accuugaccuccgcagauggc

SEQ ID NO: 998803 - RNA, 21 nt, Human
accuugaccuccgcagauggc

SEQ ID NO: 998804 - RNA, 19 nt, Human
agaggaggccugguccugu

SEQ ID NO: 998805 - RNA, 20 nt, Human
agcaggcaguccagguuucc

SEQ ID NO: 998806 - RNA, 24 nt, Human
auuccccccaaccccccacaaaaa

SEQ ID NO: 998807 - RNA, 27 nt, Human
caaaaggacugaaacccugagaagcug

SEQ ID NO: 998808 - RNA, 27 nt, Human
caaaaggacugaaacccugagaagcug

SEQ ID NO: 998809 - RNA, 23 nt, Human
caaacaccugggugaaagagucc

SEQ ID NO: 998810 - RNA, 23 nt, Human
cacaaaaccauaaaaaagguaaa

SEQ ID NO: 998811 - RNA, 23 nt, Human
cacaaaaccauaaaaaagguaaa

SEQ ID NO: 998812 - RNA, 19 nt, Human
cauugcuccccauccucgc

SEQ ID NO: 998813 - RNA, 22 nt, Human
ccaaucaugcugcuuucaugcu

SEQ ID NO: 998814 - RNA, 24 nt, Human
ccaauuauuuauucccccaacccc

SEQ ID NO: 998815 - RNA, 19 nt, Human
ccacagccagggccuuggc

SEQ ID NO: 998816 - RNA, 19 nt, Human
ccacagccagggccuuggc

SEQ ID NO: 998817 - RNA, 24 nt, Human
ccagccacaaaaccauaaaaaagg

SEQ ID NO: 998818 - RNA, 24 nt, Human
ccagccacaaaaccauaaaaaagg

SEQ ID NO: 998819 - RNA, 18 nt, Human
cccaaccccccacaaaaa

SEQ ID NO: 998820 - RNA, 18 nt, Human
cccaaccccccacaaaaa

SEQ ID NO: 998821 - RNA, 18 nt, Human
ccccccaaccccccacaa

SEQ ID NO: 998822 - RNA, 19 nt, Human
ccccccaaccccccacaaa

SEQ ID NO: 998823 - RNA, 24 nt, Human
ccccccaaccccccacaaaaacaa

SEQ ID NO: 998824 - RNA, 25 nt, Human
ccccccaaccccccacaaaaacaaa

SEQ ID NO: 998825 - RNA, 25 nt, Human
cgucuucuuccuucagcauucucca

SEQ ID NO: 998826 - RNA, 25 nt, Human
cgucuucuuccuucagcauucucca

SEQ ID NO: 998827 - RNA, 24 nt, Human
cucacaccuugaccuccgcagaug

SEQ ID NO: 998828 - RNA, 24 nt, Human
cucacaccuugaccuccgcagaug

SEQ ID NO: 998829 - RNA, 26 nt, Human
cucacaccuugaccuccgcagauggc

SEQ ID NO: 998830 - RNA, 19 nt, Human
cuccacagccagggccuug

SEQ ID NO: 998831 - RNA, 19 nt, Human
cuccacagccagggccuug

SEQ ID NO: 998832 - RNA, 19 nt, Human
cuccacggcugacaugucu

SEQ ID NO: 998833 - RNA, 19 nt, Human
cuccacggcugacaugucu

SEQ ID NO: 998834 - RNA, 20 nt, Human
cucgcuggccugggaguagg

SEQ ID NO: 998835 - RNA, 20 nt, Human
cuggguccggaucucgcugg

SEQ ID NO: 998836 - RNA, 21 nt, Human
cuuguacaguugcuggucacc

SEQ ID NO: 998837 - RNA, 20 nt, Human
cuuucaugcugcuggacagg

SEQ ID NO: 998838 - RNA, 20 nt, Human
cuuucaugcugcuggacagg

SEQ ID NO: 998839 - RNA, 23 nt, Human
gaguugggggccugguucugggg

SEQ ID NO: 998840 - RNA, 23 nt, Human
gaguugggggccugguucugggg

SEQ ID NO: 998841 - RNA, 27 nt, Human
ggagacgucgcucacaccuugaccucc

SEQ ID NO: 998842 - RNA, 27 nt, Human
ggagacgucgcucacaccuugaccucc

SEQ ID NO: 998843 - RNA, 19 nt, Human
ggaggccguggguuuucac

SEQ ID NO: 998844 - RNA, 24 nt, Human
ggccaaucaugcugcuuucaugcu

SEQ ID NO: 998845 - RNA, 24 nt, Human
ggccaaucaugcugcuuucaugcu

SEQ ID NO: 998846 - RNA, 19 nt, Human
ggcugaguugggggccugg

SEQ ID NO: 998847 - RNA, 19 nt, Human
ggcugaguugggggccugg

SEQ ID NO: 998848 - RNA, 19 nt, Human
gguuggcaaacaccugggu

SEQ ID NO: 998849 - RNA, 23 nt, Human
uaaaaaagguaaauaaaccaacu

SEQ ID NO: 998850 - RNA, 19 nt, Human
uaaaacaaacccaaaagga

SEQ ID NO: 998851 - RNA, 21 nt, Human
uaaaaugaccacuuuuaaaac

SEQ ID NO: 998852 - RNA, 23 nt, Human
uaaaccaaacccaaaaggacuga

SEQ ID NO: 998853 - RNA, 24 nt, Human
uauucccccaaccccccacaaaaa

SEQ ID NO: 998854 - RNA, 24 nt, Human
uauucccccaaccccccacaaaaa

SEQ ID NO: 998855 - RNA, 19 nt, Human
uauuuauucccccaacccc

SEQ ID NO: 998856 - RNA, 23 nt, Human
ucacccaugcugucugccuuggu

SEQ ID NO: 998857 - RNA, 19 nt, Human
ucagugggcucagcccgcu

SEQ ID NO: 998858 - RNA, 22 nt, Human
ucaugcugcuggacagguggga

SEQ ID NO: 998859 - RNA, 22 nt, Human
ucaugcugcuggacagguggga

SEQ ID NO: 998860 - RNA, 21 nt, Human
uccaacaccaagaacucccga

SEQ ID NO: 998861 - RNA, 23 nt, Human
uccaacaccaagaacucccgaga

SEQ ID NO: 998862 - RNA, 22 nt, Human
uccagcuuguguaagacaccgc

SEQ ID NO: 998863 - RNA, 19 nt, Human
ucccccaaccccccacaaa

SEQ ID NO: 998864 - RNA, 19 nt, Human
ucccccaaccccccacaaa

SEQ ID NO: 998865 - RNA, 24 nt, Human
ucccccaaccccccacaaaaacaa

SEQ ID NO: 998866 - RNA, 24 nt, Human
ucccccaaccccccacaaaaacaa

SEQ ID NO: 998867 - RNA, 25 nt, Human
ucccccaaccccccacaaaaacaaa

SEQ ID NO: 998868 - RNA, 25 nt, Human
ucccccaaccccccacaaaaacaaa

SEQ ID NO: 998869 - RNA, 24 nt, Human
ucguccugcuucugcgucuucuuc

SEQ ID NO: 998870 - RNA, 24 nt, Human
ucguccugcuucugcgucuucuuc

SEQ ID NO: 998871 - RNA, 22 nt, Human
ucuaaaccugaauaaaaugacc

SEQ ID NO: 998872 - RNA, 21 nt, Human
ucucgcuggccugggaguagg

SEQ ID NO: 998873 - RNA, 22 nt, Human
ucucuaagugacacacagggcu

SEQ ID NO: 998874 - RNA, 20 nt, Human
ucugcgucuucuuccuucag

SEQ ID NO: 998875 - RNA, 20 nt, Human
ucugcgucuucuuccuucag

SEQ ID NO: 998876 - RNA, 18 nt, Human
ugaaacccugagaagcug

SEQ ID NO: 998877 - RNA, 18 nt, Human
ugaaacccugagaagcug

SEQ ID NO: 998878 - RNA, 18 nt, Human
ugaaucuuucagggucgu

SEQ ID NO: 998879 - RNA, 18 nt, Human
ugaaucuuucagggucgu

SEQ ID NO: 998880 - RNA, 19 nt, Human
ugagaagcugagagaaaag

SEQ ID NO: 998881 - RNA, 19 nt, Human
ugagaagcugagagaaaag

SEQ ID NO: 998882 - RNA, 21 nt, Human
ugagaagcugagagaaaagug

SEQ ID NO: 998883 - RNA, 21 nt, Human
ugagaagcugagagaaaagug

SEQ ID NO: 998884 - RNA, 22 nt, Human
ugagaagcugagagaaaagugu

SEQ ID NO: 998885 - RNA, 18 nt, Human
ugagauggggggcgagca

SEQ ID NO: 998886 - RNA, 19 nt, Human
ugagauggggggcgagcag

SEQ ID NO: 998887 - RNA, 19 nt, Human
ugagauggggggcgagcag

SEQ ID NO: 998888 - RNA, 19 nt, Human
ugaguugggggccugguuc

SEQ ID NO: 998889 - RNA, 19 nt, Human
ugaguugggggccugguuc

SEQ ID NO: 998890 - RNA, 24 nt, Human
ugaguugggggccugguucugggg

SEQ ID NO: 998891 - RNA, 24 nt, Human
ugaguugggggccugguucugggg

SEQ ID NO: 998892 - RNA, 19 nt, Human
ugccuugguugugaacguc

SEQ ID NO: 998893 - RNA, 19 nt, Human
ugccuugguugugaacguc

SEQ ID NO: 998894 - RNA, 24 nt, Human
uggagccagguguuccuguuggcc

SEQ ID NO: 998895 - RNA, 24 nt, Human
uggagccagguguuccuguuggcc

SEQ ID NO: 998896 - RNA, 23 nt, Human
uggaggccguggguuuucacugu

SEQ ID NO: 998897 - RNA, 24 nt, Human
uggaggccguggguuuucacuguc

SEQ ID NO: 998898 - RNA, 20 nt, Human
uggcugaguugggggccugg

SEQ ID NO: 998899 - RNA, 20 nt, Human
uggcugaguugggggccugg

SEQ ID NO: 998900 - RNA, 24 nt, Human
uggcuggagccagguguuccuguu

SEQ ID NO: 998901 - RNA, 24 nt, Human
uggcuggagccagguguuccuguu

SEQ ID NO: 998902 - RNA, 19 nt, Human
uggggggugagaugggggg

SEQ ID NO: 998903 - RNA, 19 nt, Human
uggggggugagaugggggg

SEQ ID NO: 998904 - RNA, 18 nt, Human
uggucuuguacaguugcu

SEQ ID NO: 998905 - RNA, 19 nt, Human
ugguugugaacguccagcc

SEQ ID NO: 998906 - RNA, 19 nt, Human
ugguugugaacguccagcc

SEQ ID NO: 998907 - RNA, 18 nt, Human
uguguaagacaccgcugg

SEQ ID NO: 998908 - RNA, 20 nt, Human
uuaaaacagguaguuuaaaa

SEQ ID NO: 998909 - RNA, 18 nt, Human
uuccaacaccaagaacuc

SEQ ID NO: 998910 - RNA, 21 nt, Human
uuccccccaaccccccacaaa

SEQ ID NO: 998911 - RNA, 21 nt, Human
uugcauugcuccccauccucg

SEQ ID NO: 998912 - RNA, 21 nt, Human
uuggggggugagauggggggc

SEQ ID NO: 998913 - RNA, 21 nt, Human
uuggggggugagauggggggc

SEQ ID NO: 998914 - RNA, 20 nt, Human
uuggucuuguacaguugcug

SEQ ID NO: 998915 - RNA, 21 nt, Human
aaagcuuuucugggccucuuc

SEQ ID NO: 998916 - RNA, 21 nt, Human
aaagcuuuucugggccucuuc

SEQ ID NO: 998917 - RNA, 19 nt, Human
aaaugacccaucauaagac

SEQ ID NO: 998918 - RNA, 19 nt, Human
aaaugacccaucauaagac

SEQ ID NO: 998919 - RNA, 21 nt, Human
aacccauggcccuccugcccu

SEQ ID NO: 998920 - RNA, 21 nt, Human
aagaacuguacaagggggagg

SEQ ID NO: 998921 - RNA, 21 nt, Human
aagaacuguacaagggggagg

SEQ ID NO: 998922 - RNA, 20 nt, Human
aagccuuccaggaugcacac

SEQ ID NO: 998923 - RNA, 26 nt, Human
aagcuuagccaggagccacaccaccc

SEQ ID NO: 998924 - RNA, 26 nt, Human
aagcuuagccaggagccacaccaccc

SEQ ID NO: 998925 - RNA, 18 nt, Human
aaggaccagggcaguggu

SEQ ID NO: 998926 - RNA, 18 nt, Human
aaggaccagggcaguggu

SEQ ID NO: 998927 - RNA, 18 nt, Human
aaggaccagggcaguggu

SEQ ID NO: 998928 - RNA, 21 nt, Human
aaggugaccuguugcugcaga

SEQ ID NO: 998929 - RNA, 19 nt, Human
aaguucuuuguauugugcc

SEQ ID NO: 998930 - RNA, 20 nt, Human
acacacacuggaaccugggc

SEQ ID NO: 998931 - RNA, 21 nt, Human
acaccaagcuuagccaggagc

SEQ ID NO: 998932 - RNA, 21 nt, Human
acacccacuccccugcucccg

SEQ ID NO: 998933 - RNA, 21 nt, Human
acacccacuccccugcucccg

SEQ ID NO: 998934 - RNA, 21 nt, Human
acacccacuccccugcucccg

SEQ ID NO: 998935 - RNA, 28 nt, Human
acacuggaacccuuugguagagugcuga

SEQ ID NO: 998936 - RNA, 18 nt, Human
acacuggaaccugggcaa

SEQ ID NO: 998937 - RNA, 18 nt, Human
acagcagcagcaggaggc

SEQ ID NO: 998938 - RNA, 19 nt, Human
acagcagcagcaggaggcc

SEQ ID NO: 998939 - RNA, 19 nt, Human
accaccauccguucccccc

SEQ ID NO: 998940 - RNA, 19 nt, Human
accaccauccguucccccc

SEQ ID NO: 998941 - RNA, 19 nt, Human
accaccauccguucccccc

SEQ ID NO: 998942 - RNA, 22 nt, Human
accaccauccguucccccccac

SEQ ID NO: 998943 - RNA, 22 nt, Human
accaccauccguucccccccac

SEQ ID NO: 998944 - RNA, 22 nt, Human
accaccauccguucccccccac

SEQ ID NO: 998945 - RNA, 22 nt, Human
accccagaggccuuccaagauc

SEQ ID NO: 998946 - RNA, 21 nt, Human
acuccuuuguaggaaaagaug

SEQ ID NO: 998947 - RNA, 21 nt, Human
acuccuuuguaggaaaagaug

SEQ ID NO: 998948 - RNA, 20 nt, Human
agaagccuuccaggaugcac

SEQ ID NO: 998949 - RNA, 19 nt, Human
agagcugaggugccagcug

SEQ ID NO: 998950 - RNA, 19 nt, Human
agagcugaggugccagcug

SEQ ID NO: 998951 - RNA, 18 nt, Human
agagggugaggugguuuc

SEQ ID NO: 998952 - RNA, 21 nt, Human
agcaaccccccuuagggcuga

SEQ ID NO: 998953 - RNA, 18 nt, Human
agcagcagcaggaggcag

SEQ ID NO: 998954 - RNA, 22 nt, Human
agcaggcaggcaggcaggcagu

SEQ ID NO: 998955 - RNA, 22 nt, Human
agcaggcaggcaggcaggcagu

SEQ ID NO: 998956 - RNA, 22 nt, Human
agcaggcaggcaggcaggcagu

SEQ ID NO: 998957 - RNA, 21 nt, Human
agccaagguacugccaaaccc

SEQ ID NO: 998958 - RNA, 21 nt, Human
agccaagguacugccaaaccc

SEQ ID NO: 998959 - RNA, 18 nt, Human
agcgcacuguccgccucu

SEQ ID NO: 998960 - RNA, 18 nt, Human
agcgcacuguccgccucu

SEQ ID NO: 998961 - RNA, 18 nt, Human
agcugaggugccagcugg

SEQ ID NO: 998962 - RNA, 18 nt, Human
agcugaggugccagcugg

SEQ ID NO: 998963 - RNA, 19 nt, Human
aggaagcccucggaugagc

SEQ ID NO: 998964 - RNA, 19 nt, Human
aggaagcccucggaugagc

SEQ ID NO: 998965 - RNA, 20 nt, Human
aggagacucagaacuacuac

SEQ ID NO: 998966 - RNA, 20 nt, Human
aggagacucagaacuacuac

SEQ ID NO: 998967 - RNA, 22 nt, Human
aggagguggcaaaggcuuaggg

SEQ ID NO: 998968 - RNA, 22 nt, Human
aggagguggcaaaggcuuaggg

SEQ ID NO: 998969 - RNA, 19 nt, Human
aggcagcuggaaggaccag

SEQ ID NO: 998970 - RNA, 19 nt, Human
aggcagcuggaaggaccag

SEQ ID NO: 998971 - RNA, 19 nt, Human
aggcagcuggaaggaccag

SEQ ID NO: 998972 - RNA, 19 nt, Human
aggcaggaaguuggagagg

SEQ ID NO: 998973 - RNA, 18 nt, Human
aggcaggcaggcaguagu

SEQ ID NO: 998974 - RNA, 18 nt, Human
aggcaggcaggcaguagu

SEQ ID NO: 998975 - RNA, 18 nt, Human
agggacaggaagaaggau

SEQ ID NO: 998976 - RNA, 18 nt, Human
agggacaggaagaaggau

SEQ ID NO: 998977 - RNA, 18 nt, Human
agggacaggaagaaggau

SEQ ID NO: 998978 - RNA, 21 nt, Human
agggcaguggugccagaccag

SEQ ID NO: 998979 - RNA, 18 nt, Human
agguggcaaaggcuuagg

SEQ ID NO: 998980 - RNA, 18 nt, Human
agguggcaaaggcuuagg

SEQ ID NO: 998981 - RNA, 21 nt, Human
agugacaggcagcuggaagga

SEQ ID NO: 998982 - RNA, 21 nt, Human
agugacaggcagcuggaagga

SEQ ID NO: 998983 - RNA, 21 nt, Human
agugacaggcagcuggaagga

SEQ ID NO: 998984 - RNA, 19 nt, Human
aucacuggacacgucccga

SEQ ID NO: 998985 - RNA, 23 nt, Human
aucauaagaaccugugguccuga

SEQ ID NO: 998986 - RNA, 23 nt, Human
aucauaagaaccugugguccuga

SEQ ID NO: 998987 - RNA, 22 nt, Human
augacucaggacaauuccacag

SEQ ID NO: 998988 - RNA, 22 nt, Human
augacucaggacaauuccacag

SEQ ID NO: 998989 - RNA, 24 nt, Human
augcccaccugugggucccaguuu

SEQ ID NO: 998990 - RNA, 24 nt, Human
augcccaccugugggucccaguuu

SEQ ID NO: 998991 - RNA, 19 nt, Human
auggaaccuugaguguuug

SEQ ID NO: 998992 - RNA, 19 nt, Human
auggaaccuugaguguuug

SEQ ID NO: 998993 - RNA, 23 nt, Human
auggaaccuugaguguuugaucu

SEQ ID NO: 998994 - RNA, 23 nt, Human
auggaaccuugaguguuugaucu

SEQ ID NO: 998995 - RNA, 21 nt, Human
auuuuuugacaugccaucuaa

SEQ ID NO: 998996 - RNA, 18 nt, Human
caaaauggaaccuugagu

SEQ ID NO: 998997 - RNA, 25 nt, Human
caaacugaugcaggaccuccacgca

SEQ ID NO: 998998 - RNA, 25 nt, Human
caaacugaugcaggaccuccacgca

SEQ ID NO: 998999 - RNA, 19 nt, Human
caaagcaaugacucaggac

SEQ ID NO: 999000 - RNA, 19 nt, Human
caaagcaaugacucaggac

SEQ ID NO: 999001 - RNA, 19 nt, Human
caaagcaaugacucaggac

SEQ ID NO: 999002 - RNA, 18 nt, Human
caaggccagccaguucuc

SEQ ID NO: 999003 - RNA, 18 nt, Human
caaggccagccaguucuc

SEQ ID NO: 999004 - RNA, 22 nt, Human
cacaccaagcuuagccaggagc

SEQ ID NO: 999005 - RNA, 23 nt, Human
cacaccaccucuuguuccagcug

SEQ ID NO: 999006 - RNA, 23 nt, Human
cacaccaccucuuguuccagcug

SEQ ID NO: 999007 - RNA, 24 nt, Human
cacagaggucauccagggcugccu

SEQ ID NO: 999008 - RNA, 22 nt, Human
caccaccauccguuccccccca

SEQ ID NO: 999009 - RNA, 22 nt, Human
caccaccauccguuccccccca

SEQ ID NO: 999010 - RNA, 22 nt, Human
caccaccauccguuccccccca

SEQ ID NO: 999011 - RNA, 19 nt, Human
caccauguggcuggacacu

SEQ ID NO: 999012 - RNA, 19 nt, Human
caccauguggcuggacacu

SEQ ID NO: 999013 - RNA, 19 nt, Human
caccauguggcuggacacu

SEQ ID NO: 999014 - RNA, 19 nt, Human
caccauguggcuggacacu

SEQ ID NO: 999015 - RNA, 20 nt, Human
caccauguggcuggacacuc

SEQ ID NO: 999016 - RNA, 20 nt, Human
caccauguggcuggacacuc

SEQ ID NO: 999017 - RNA, 20 nt, Human
caccauguggcuggacacuc

SEQ ID NO: 999018 - RNA, 20 nt, Human
caccauguggcuggacacuc

SEQ ID NO: 999019 - RNA, 26 nt, Human
caccauguggcuggacacucagggcu

SEQ ID NO: 999020 - RNA, 26 nt, Human
caccauguggcuggacacucagggcu

SEQ ID NO: 999021 - RNA, 26 nt, Human
caccauguggcuggacacucagggcu

SEQ ID NO: 999022 - RNA, 26 nt, Human
caccauguggcuggacacucagggcu

SEQ ID NO: 999023 - RNA, 18 nt, Human
caccccucccacuccgcc

SEQ ID NO: 999024 - RNA, 18 nt, Human
caccccucccacuccgcc

SEQ ID NO: 999025 - RNA, 18 nt, Human
caccccucccacuccgcc

SEQ ID NO: 999026 - RNA, 21 nt, Human
caccccucccacuccgccaaa

SEQ ID NO: 999027 - RNA, 23 nt, Human
cacucaggguccggguccugcuc

SEQ ID NO: 999028 - RNA, 23 nt, Human
cacucaggguccggguccugcuc

SEQ ID NO: 999029 - RNA, 23 nt, Human
cacucaggguccggguccugcuc

SEQ ID NO: 999030 - RNA, 21 nt, Human
cagagaagccuuccaggaugc

SEQ ID NO: 999031 - RNA, 18 nt, Human
cagaggccuuccaagauc

SEQ ID NO: 999032 - RNA, 20 nt, Human
cagcagcagaaucugccccc

SEQ ID NO: 999033 - RNA, 19 nt, Human
cagcagcagcaggaggcag

SEQ ID NO: 999034 - RNA, 21 nt, Human
cagcagcagcaggaggcagcc

SEQ ID NO: 999035 - RNA, 21 nt, Human
cagcagcagcaggaggcagcc

SEQ ID NO: 999036 - RNA, 22 nt, Human
cagcagcaggaggcagccuucu

SEQ ID NO: 999037 - RNA, 22 nt, Human
cagcagcaggaggcagccuucu

SEQ ID NO: 999038 - RNA, 18 nt, Human
cagccaguucucugggca

SEQ ID NO: 999039 - RNA, 24 nt, Human
cagccuucugagugggaacagagc

SEQ ID NO: 999040 - RNA, 24 nt, Human
cagccuucugagugggaacagagc

SEQ ID NO: 999041 - RNA, 18 nt, Human
caggaaacaaggccagcc

SEQ ID NO: 999042 - RNA, 18 nt, Human
caggaaacaaggccagcc

SEQ ID NO: 999043 - RNA, 18 nt, Human
caggaaacaaggccagcc

SEQ ID NO: 999044 - RNA, 20 nt, Human
caggacaauuccacaggcaa

SEQ ID NO: 999045 - RNA, 20 nt, Human
caggacaauuccacaggcaa

SEQ ID NO: 999046 - RNA, 20 nt, Human
caggacaauuccacaggcaa

SEQ ID NO: 999047 - RNA, 18 nt, Human
caggagccacaccaccuc

SEQ ID NO: 999048 - RNA, 18 nt, Human
caggagccacaccaccuc

SEQ ID NO: 999049 - RNA, 22 nt, Human
caggagccacaccaccucuugu

SEQ ID NO: 999050 - RNA, 22 nt, Human
caggagccacaccaccucuugu

SEQ ID NO: 999051 - RNA, 26 nt, Human
caggagccacaccaccucuuguucca

SEQ ID NO: 999052 - RNA, 26 nt, Human
caggagccacaccaccucuuguucca

SEQ ID NO: 999053 - RNA, 21 nt, Human
cagggacaggaagaaggaucc

SEQ ID NO: 999054 - RNA, 21 nt, Human
cagggacaggaagaaggaucc

SEQ ID NO: 999055 - RNA, 19 nt, Human
cagggcugccucuucacag

SEQ ID NO: 999056 - RNA, 19 nt, Human
cagggcugccucuucacag

SEQ ID NO: 999057 - RNA, 19 nt, Human
cagggcugccucuucacag

SEQ ID NO: 999058 - RNA, 21 nt, Human
caggggugucucugggcugag

SEQ ID NO: 999059 - RNA, 21 nt, Human
caggggugucucugggcugag

SEQ ID NO: 999060 - RNA, 21 nt, Human
caggguccggguccugcucca

SEQ ID NO: 999061 - RNA, 21 nt, Human
caggguccggguccugcucca

SEQ ID NO: 999062 - RNA, 21 nt, Human
caggguccggguccugcucca

SEQ ID NO: 999063 - RNA, 30 nt, Human
ccaaacagaucagacucaggaaacaaggcc

SEQ ID NO: 999064 - RNA, 30 nt, Human; identical to SEQ ID NO: 999063

SEQ ID NO: 999065 - RNA, 30 nt, Human; identical to SEQ ID NO: 999063

SEQ ID NO: 999066 - RNA, 19 nt, Human
ccaagagccaccuccuucc

SEQ ID NO: 999067 - RNA, 19 nt, Human
ccaagagccaccuccuucc

SEQ ID NO: 999068 - RNA, 19 nt, Human
ccaagagccaccuccuucc

SEQ ID NO: 999069 - RNA, 22 nt, Human
ccaccccucccacuccgccaaa

SEQ ID NO: 999070 - RNA, 22 nt, Human
ccaccccucccacuccgccaaa

SEQ ID NO: 999071 - RNA, 18 nt, Human
ccaccuccacauuacacu

SEQ ID NO: 999072 - RNA, 18 nt, Human
ccaggcuccuguuuccuu

SEQ ID NO: 999073 - RNA, 22 nt, Human
ccagggacaggaagaaggaucc

SEQ ID NO: 999074 - RNA, 23 nt, Human
cccacuccccugcucccggggga

SEQ ID NO: 999075 - RNA, 23 nt, Human
cccacuccccugcucccggggga

SEQ ID NO: 999076 - RNA, 23 nt, Human
cccacuccccugcucccggggga

SEQ ID NO: 999077 - RNA, 21 nt, Human
cccauggccccagcccaaagc

SEQ ID NO: 999078 - RNA, 21 nt, Human
cccauggccccagcccaaagc

SEQ ID NO: 999079 - RNA, 21 nt, Human
cccauggccccagcccaaagc

SEQ ID NO: 999080 - RNA, 20 nt, Human
cccccccacacccacucccc

SEQ ID NO: 999081 - RNA, 20 nt, Human
cccccccacacccacucccc

SEQ ID NO: 999082 - RNA, 20 nt, Human
cccccccacacccacucccc

SEQ ID NO: 999083 - RNA, 22 nt, Human
cccccugcccuccgcacuguca

SEQ ID NO: 999084 - RNA, 22 nt, Human
cccccugcccuccgcacuguca

SEQ ID NO: 999085 - RNA, 18 nt, Human
ccccgggcccgcuugcuc

SEQ ID NO: 999086 - RNA, 22 nt, Human
ccccucccacuccgccaaacag

SEQ ID NO: 999087 - RNA, 22 nt, Human
ccccucccacuccgccaaacag

SEQ ID NO: 999088 - RNA, 22 nt, Human
ccccucccacuccgccaaacag

SEQ ID NO: 999089 - RNA, 23 nt, Human
cccugccacacaaugguuucuuc

SEQ ID NO: 999090 - RNA, 19 nt, Human
ccggguccugcuccacccc

SEQ ID NO: 999091 - RNA, 20 nt, Human
ccggugcccggcggcgggcc

SEQ ID NO: 999092 - RNA, 19 nt, Human
ccuacaggcccacgugagc

SEQ ID NO: 999093 - RNA, 19 nt, Human
ccuacaggcccacgugagc

SEQ ID NO: 999094 - RNA, 19 nt, Human
ccuacaggcccacgugagc

SEQ ID NO: 999095 - RNA, 19 nt, Human
ccucggggucuuccacauc

SEQ ID NO: 999096 - RNA, 19 nt, Human
ccucggggucuuccacauc

SEQ ID NO: 999097 - RNA, 19 nt, Human
ccucggggucuuccacauc

SEQ ID NO: 999098 - RNA, 18 nt, Human
ccugcuccaccccuccca

SEQ ID NO: 999099 - RNA, 18 nt, Human
ccugcuccaccccuccca

SEQ ID NO: 999100 - RNA, 18 nt, Human
ccugcuccaccccuccca

SEQ ID NO: 999101 - RNA, 18 nt, Human
ccuuuuccuugucacuga

SEQ ID NO: 999102 - RNA, 23 nt, Human
cgccgggggcucgcuccgccucu

SEQ ID NO: 999103 - RNA, 25 nt, Human
cgcggccggacauuggcucagggcc

SEQ ID NO: 999104 - RNA, 18 nt, Human
cgcuccgccucuugcugc

SEQ ID NO: 999105 - RNA, 23 nt, Human
cggaugagcaugcugacccccgg

SEQ ID NO: 999106 - RNA, 23 nt, Human
cggaugagcaugcugacccccgg

SEQ ID NO: 999107 - RNA, 30 nt, Human
cggcuaauuucaccaaaaccuuaaggcacc

SEQ ID NO: 999108 - RNA, 30 nt, Human; identical to SEQ ID NO: 999107

SEQ ID NO: 999109 - RNA, 18 nt, Human
cggggcagcggcugcgga

SEQ ID NO: 999110 - RNA, 22 nt, Human
cggggucuuccacaucgguuuc

SEQ ID NO: 999111 - RNA, 22 nt, Human
cggggucuuccacaucgguuuc

SEQ ID NO: 999112 - RNA, 22 nt, Human
cggggucuuccacaucgguuuc

SEQ ID NO: 999113 - RNA, 19 nt, Human
cggguccugcuccaccccu

SEQ ID NO: 999114 - RNA, 19 nt, Human
cggguccugcuccaccccu

SEQ ID NO: 999115 - RNA, 19 nt, Human
cggguccugcuccaccccu

SEQ ID NO: 999116 - RNA, 20 nt, Human
cgucaggguccggggcagcg

SEQ ID NO: 999117 - RNA, 23 nt, Human
cucaaggcagaucaguuaccaug

SEQ ID NO: 999118 - RNA, 23 nt, Human
cucaaggcagaucaguuaccaug

SEQ ID NO: 999119 - RNA, 23 nt, Human
cucaaggcagaucaguuaccaug

SEQ ID NO: 999120 - RNA, 24 nt, Human
cucaccaccauccguuccccccca

SEQ ID NO: 999121 - RNA, 24 nt, Human
cucaccaccauccguuccccccca

SEQ ID NO: 999122 - RNA, 24 nt, Human
cucaccaccauccguuccccccca

SEQ ID NO: 999123 - RNA, 23 nt, Human
cucagaacuacuacucaggaggu

SEQ ID NO: 999124 - RNA, 23 nt, Human
cucagaacuacuacucaggaggu

SEQ ID NO: 999125 - RNA, 22 nt, Human
cucagggcugagagggaaaaug

SEQ ID NO: 999126 - RNA, 22 nt, Human
cucagggcugagagggaaaaug

SEQ ID NO: 999127 - RNA, 22 nt, Human
cuccacauuacacuggcaguug

SEQ ID NO: 999128 - RNA, 22 nt, Human
cuccacauuacacuggcaguug

SEQ ID NO: 999129 - RNA, 19 nt, Human
cucccggucuuacacacuu

SEQ ID NO: 999130 - RNA, 18 nt, Human
cugccuggucugucccuc

SEQ ID NO: 999131 - RNA, 18 nt, Human
cugccuggucugucccuc

SEQ ID NO: 999132 - RNA, 18 nt, Human
cugccuggucugucccuc

SEQ ID NO: 999133 - RNA, 22 nt, Human
cugcuccaccccucccacuccg

SEQ ID NO: 999134 - RNA, 24 nt, Human
cuggaaccugggcaagaaaucaca

SEQ ID NO: 999135 - RNA, 19 nt, Human
cuggagccauugugucucc

SEQ ID NO: 999136 - RNA, 19 nt, Human
cuggagccauugugucucc

SEQ ID NO: 999137 - RNA, 20 nt, Human
cuguuuccuuccccagcagc

SEQ ID NO: 999138 - RNA, 20 nt, Human
cuuccccagcagcagaaucu

SEQ ID NO: 999139 - RNA, 19 nt, Human
cuucugcgauaggccgugc

SEQ ID NO: 999140 - RNA, 19 nt, Human
cuucugcgauaggccgugc

SEQ ID NO: 999141 - RNA, 23 nt, Human
gaacacacacuggaacccuuugg

SEQ ID NO: 999142 - RNA, 22 nt, Human
gaccuuaugaucacuggacacg

SEQ ID NO: 999143 - RNA, 21 nt, Human
gaggugccagcuggucguggu

SEQ ID NO: 999144 - RNA, 21 nt, Human
gaggugccagcuggucguggu

SEQ ID NO: 999145 - RNA, 23 nt, Human
gagugggaacagagcugaggugc

SEQ ID NO: 999146 - RNA, 23 nt, Human
gagugggaacagagcugaggugc

SEQ ID NO: 999147 - RNA, 29 nt, Human
gcacggcuccaggaagcuggccgccuacg

SEQ ID NO: 999148 - RNA, 29 nt, Human
gcacggcuccaggaagcuggccgccuacg

SEQ ID NO: 999149 - RNA, 19 nt, Human
gcagcuggaaggaccaggg

SEQ ID NO: 999150 - RNA, 19 nt, Human
gcagcuggaaggaccaggg

SEQ ID NO: 999151 - RNA, 19 nt, Human
gcagcuggaaggaccaggg

SEQ ID NO: 999152 - RNA, 20 nt, Human
gcaggaccuccacgcagugc

SEQ ID NO: 999153 - RNA, 20 nt, Human
gcaggaccuccacgcagugc

SEQ ID NO: 999154 - RNA, 22 nt, Human
gcaggaggaaugugucggugag

SEQ ID NO: 999155 - RNA, 20 nt, Human
gcaggggggugccagcagga

SEQ ID NO: 999156 - RNA, 20 nt, Human
gcaggggggugccagcagga

SEQ ID NO: 999157 - RNA, 18 nt, Human
gcaguggugccagaccag

SEQ ID NO: 999158 - RNA, 18 nt, Human
gcaguggugccagaccag

SEQ ID NO: 999159 - RNA, 24 nt, Human
gccaucccauugugggggccacac

SEQ ID NO: 999160 - RNA, 24 nt, Human
gcucagggccugugacgcgagggu

SEQ ID NO: 999161 - RNA, 20 nt, Human
gcucucgcuggcagcagugg

SEQ ID NO: 999162 - RNA, 20 nt, Human
gcucucgcuggcagcagugg

SEQ ID NO: 999163 - RNA, 20 nt, Human
gcucucgcuggcagcagugg

SEQ ID NO: 999164 - RNA, 19 nt, Human
gcugccucuucacaguccg

SEQ ID NO: 999165 - RNA, 19 nt, Human
gcugccucuucacaguccg

SEQ ID NO: 999166 - RNA, 18 nt, Human
gcuggaaggaccagggca

SEQ ID NO: 999167 - RNA, 18 nt, Human
gcuggaaggaccagggca

SEQ ID NO: 999168 - RNA, 18 nt, Human
gcuggaaggaccagggca

SEQ ID NO: 999169 - RNA, 22 nt, Human
ggaacacacacuggaaccuggg

SEQ ID NO: 999170 - RNA, 19 nt, Human
ggaugagggggugggcugg

SEQ ID NO: 999171 - RNA, 21 nt, Human
ggccccuccccuagugccccc

SEQ ID NO: 999172 - RNA, 24 nt, Human
ggccggggcgaggcgccgggggcu

SEQ ID NO: 999173 - RNA, 18 nt, Human
ggcugcaggggggugcca

SEQ ID NO: 999174 - RNA, 18 nt, Human
ggcugcaggggggugcca

SEQ ID NO: 999175 - RNA, 18 nt, Human
ggcugcggagaagccccg

SEQ ID NO: 999176 - RNA, 24 nt, Human
gggaacccauggcccuccugcccu

SEQ ID NO: 999177 - RNA, 19 nt, Human
gggaggaaaugcacggcuc

SEQ ID NO: 999178 - RNA, 19 nt, Human
gggaggaaaugcacggcuc

SEQ ID NO: 999179 - RNA, 21 nt, Human
gggcugccucuucacaguccg

SEQ ID NO: 999180 - RNA, 24 nt, Human
ggggcucugcacaccaagcuuagc

SEQ ID NO: 999181 - RNA, 24 nt, Human
ggggcucugcacaccaagcuuagc

SEQ ID NO: 999182 - RNA, 20 nt, Human
gggggugccagcaggagacu

SEQ ID NO: 999183 - RNA, 20 nt, Human
gggggugccagcaggagacu

SEQ ID NO: 999184 - RNA, 22 nt, Human
ggugccagcuggucgugguccg

SEQ ID NO: 999185 - RNA, 22 nt, Human
ggugccagcuggucgugguccg

SEQ ID NO: 999186 - RNA, 20 nt, Human
ggugcugaagaaugcuaagu

SEQ ID NO: 999187 - RNA, 24 nt, Human
guaagccgaugaagaacuguacaa

SEQ ID NO: 999188 - RNA, 24 nt, Human
guaagccgaugaagaacuguacaa

SEQ ID NO: 999189 - RNA, 19 nt, Human
guccugcuccaccccuccc

SEQ ID NO: 999190 - RNA, 19 nt, Human
guccugcuccaccccuccc

SEQ ID NO: 999191 - RNA, 19 nt, Human
guccugcuccaccccuccc

SEQ ID NO: 999192 - RNA, 18 nt, Human
gugacugggggcaagggg

SEQ ID NO: 999193 - RNA, 18 nt, Human
gugacugggggcaagggg

SEQ ID NO: 999194 - RNA, 19 nt, Human
gugacugggggcaaggggc

SEQ ID NO: 999195 - RNA, 19 nt, Human
gugacugggggcaaggggc

SEQ ID NO: 999196 - RNA, 22 nt, Human
uaagccgaugaagaacuguaca

SEQ ID NO: 999197 - RNA, 20 nt, Human
uaaggaaaggaguggugcug

SEQ ID NO: 999198 - RNA, 20 nt, Human
uaaggaaaggaguggugcug

SEQ ID NO: 999199 - RNA, 22 nt, Human
uaaggaaaggaguggugcuggu

SEQ ID NO: 999200 - RNA, 22 nt, Human
uaaggaaaggaguggugcuggu

SEQ ID NO: 999201 - RNA, 24 nt, Human
uacaagggggaggaaaugcacggc

SEQ ID NO: 999202 - RNA, 24 nt, Human
uacaagggggaggaaaugcacggc

SEQ ID NO: 999203 - RNA, 24 nt, Human
uacacacugcugggagccccugcu

SEQ ID NO: 999204 - RNA, 27 nt, Human
uacacacugcugggagccccugcugcg

SEQ ID NO: 999205 - RNA, 27 nt, Human
uacacacugcugggagccccugcugcg

SEQ ID NO: 999206 - RNA, 21 nt, Human
uacacuggcaguuggagccag

SEQ ID NO: 999207 - RNA, 21 nt, Human
uacacuggcaguuggagccag

SEQ ID NO: 999208 - RNA, 22 nt, Human
uacauguacagcagcagcagga

SEQ ID NO: 999209 - RNA, 22 nt, Human
uacauguacagcagcagcagga

SEQ ID NO: 999210 - RNA, 20 nt, Human
uaccauggggacgggcucaa

SEQ ID NO: 999211 - RNA, 20 nt, Human
uaccauggggacgggcucaa

SEQ ID NO: 999212 - RNA, 24 nt, Human
uaccauggggacgggcucagcaac

SEQ ID NO: 999213 - RNA, 24 nt, Human
uaccauggggacgggcucagcaac

SEQ ID NO: 999214 - RNA, 24 nt, Human
uaccauggggacgggcucagcaac

SEQ ID NO: 999215 - RNA, 19 nt, Human
uaccccagagcucacgcag

SEQ ID NO: 999216 - RNA, 20 nt, Human
uacuggaugagggggugggc

SEQ ID NO: 999217 - RNA, 24 nt, Human
uagccaggagccacaccaccucuu

SEQ ID NO: 999218 - RNA, 24 nt, Human
uagccaggagccacaccaccucuu

SEQ ID NO: 999219 - RNA, 24 nt, Human
ucaggccgugaugugauguacaug

SEQ ID NO: 999220 - RNA, 24 nt, Human
ucaggccgugaugugauguacaug

SEQ ID NO: 999221 - RNA, 21 nt, Human
ucauaccagugacaggcagcu

SEQ ID NO: 999222 - RNA, 21 nt, Human
ucauaccagugacaggcagcu

SEQ ID NO: 999223 - RNA, 21 nt, Human
ucauaccagugacaggcagcu

SEQ ID NO: 999224 - RNA, 23 nt, Human
uccacgcagugcaucaugaagag

SEQ ID NO: 999225 - RNA, 23 nt, Human
uccacgcagugcaucaugaagag

SEQ ID NO: 999226 - RNA, 24 nt, Human
uccagugaaugccagguucugugc

SEQ ID NO: 999227 - RNA, 24 nt, Human
uccagugaaugccagguucugugc

SEQ ID NO: 999228 - RNA, 20 nt, Human
ucccauggccccagcccaaa

SEQ ID NO: 999229 - RNA, 20 nt, Human
ucccauggccccagcccaaa

SEQ ID NO: 999230 - RNA, 20 nt, Human
ucccauggccccagcccaaa

SEQ ID NO: 999231 - RNA, 22 nt, Human
uccccaggugcuccgcuucucu

SEQ ID NO: 999232 - RNA, 24 nt, Human
uccccaggugcuccgcuucucuua

SEQ ID NO: 999233 - RNA, 26 nt, Human
uccgcggcacagaggucauccagggc

SEQ ID NO: 999234 - RNA, 26 nt, Human
uccgcggcacagaggucauccagggc

SEQ ID NO: 999235 - RNA, 26 nt, Human
uccgcggcacagaggucauccagggc

SEQ ID NO: 999236 - RNA, 22 nt, Human
uccgggcaaccagauucagucc

SEQ ID NO: 999237 - RNA, 22 nt, Human
uccgggcaaccagauucagucc

SEQ ID NO: 999238 - RNA, 18 nt, Human
uccggggcagcggcugcg

SEQ ID NO: 999239 - RNA, 20 nt, Human
uccggguccugcuccacccc

SEQ ID NO: 999240 - RNA, 20 nt, Human
uccggguccugcuccacccc

SEQ ID NO: 999241 - RNA, 19 nt, Human
ucgcuccgccucuugcugc

SEQ ID NO: 999242 - RNA, 24 nt, Human
ucucaccaccauccguuccccccc

SEQ ID NO: 999243 - RNA, 24 nt, Human
ucucaccaccauccguuccccccc

SEQ ID NO: 999244 - RNA, 24 nt, Human
ucucaccaccauccguuccccccc

SEQ ID NO: 999245 - RNA, 25 nt, Human
ucuccaucacgugagcacucauucc

SEQ ID NO: 999246 - RNA, 25 nt, Human
ucuccaucacgugagcacucauucc

SEQ ID NO: 999247 - RNA, 24 nt, Human
ucucugucuccagcugucaacaaa

SEQ ID NO: 999248 - RNA, 24 nt, Human
ucucugucuccagcugucaacaaa

SEQ ID NO: 999249 - RNA, 24 nt, Human
ucugaccaccuccacauuacacug

SEQ ID NO: 999250 - RNA, 18 nt, Human
ucugcugggucuccauca

SEQ ID NO: 999251 - RNA, 18 nt, Human
ucugcugggucuccauca

SEQ ID NO: 999252 - RNA, 26 nt, Human
ucuggagcuuuguccuuaacucuuga

SEQ ID NO: 999253 - RNA, 26 nt, Human
ucuggagcuuuguccuuaacucuuga

SEQ ID NO: 999254 - RNA, 21 nt, Human
ucugggcugaggcacuuuggc

SEQ ID NO: 999255 - RNA, 21 nt, Human
ucugggcugaggcacuuuggc

SEQ ID NO: 999256 - RNA, 18 nt, Human
ucugucaggccgugaugg

SEQ ID NO: 999257 - RNA, 19 nt, Human
ucugucaggccgugaugug

SEQ ID NO: 999258 - RNA, 20 nt, Human
ugacaguaauagggagacga

SEQ ID NO: 999259 - RNA, 22 nt, Human
ugaccaccuccacauuacacug

SEQ ID NO: 999260 - RNA, 18 nt, Human
ugacccccggcaucaccu

SEQ ID NO: 999261 - RNA, 18 nt, Human
ugacccccggcaucaccu

SEQ ID NO: 999262 - RNA, 21 nt, Human
ugacucaggacaauuccacag

SEQ ID NO: 999263 - RNA, 26 nt, Human
ugacucggccccuccccuagugcccc

SEQ ID NO: 999264 - RNA, 18 nt, Human
ugacugggggcaaggggc

SEQ ID NO: 999265 - RNA, 18 nt, Human
ugacugggggcaaggggc

SEQ ID NO: 999266 - RNA, 19 nt, Human
ugagagggaaaaugaccca

SEQ ID NO: 999267 - RNA, 19 nt, Human
ugagagggaaaaugaccca

SEQ ID NO: 999268 - RNA, 20 nt, Human
ugagccaggcccgcccugcu

SEQ ID NO: 999269 - RNA, 20 nt, Human
ugagccaggcccgcccugcu

SEQ ID NO: 999270 - RNA, 20 nt, Human
ugagccaggcccgcccugcu

SEQ ID NO: 999271 - RNA, 21 nt, Human
ugcaggaccuccacgcagugc

SEQ ID NO: 999272 - RNA, 21 nt, Human
ugcaggaccuccacgcagugc

SEQ ID NO: 999273 - RNA, 20 nt, Human
ugccagcuggucgugguccg

SEQ ID NO: 999274 - RNA, 20 nt, Human
ugccagcuggucgugguccg

SEQ ID NO: 999275 - RNA, 20 nt, Human
ugcccaccugugggucccag

SEQ ID NO: 999276 - RNA, 21 nt, Human
ugcccggcggcgggccggggc

SEQ ID NO: 999277 - RNA, 19 nt, Human
ugccuggucugucccucuc

SEQ ID NO: 999278 - RNA, 19 nt, Human
ugccuggucugucccucuc

SEQ ID NO: 999279 - RNA, 19 nt, Human
ugccuggucugucccucuc

SEQ ID NO: 999280 - RNA, 20 nt, Human
ugcggcucugggcaagaaau

SEQ ID NO: 999281 - RNA, 21 nt, Human
ugcugggagccccugcugcgg

SEQ ID NO: 999282 - RNA, 21 nt, Human
ugcugggagccccugcugcgg

SEQ ID NO: 999283 - RNA, 21 nt, Human
ugcugggagccccugcugcgg

SEQ ID NO: 999284 - RNA, 24 nt, Human
uggaccuuaugaucacuggacacg

SEQ ID NO: 999285 - RNA, 18 nt, Human
uggcaaaggcuuagggau

SEQ ID NO: 999286 - RNA, 18 nt, Human
uggcaaaggcuuagggau

SEQ ID NO: 999287 - RNA, 19 nt, Human
uggcagcacuuggaacaca

SEQ ID NO: 999288 - RNA, 19 nt, Human
uggcagcacuuggaacaca

SEQ ID NO: 999289 - RNA, 19 nt, Human
uggcagcaguggcgggaag

SEQ ID NO: 999290 - RNA, 19 nt, Human
uggcagggguggggaaggg

SEQ ID NO: 999291 - RNA, 19 nt, Human
uggcagggguggggaaggg

SEQ ID NO: 999292 - RNA, 23 nt, Human
uggcagggguggggaagggacau

SEQ ID NO: 999293 - RNA, 23 nt, Human
uggcagggguggggaagggacau

SEQ ID NO: 999294 - RNA, 19 nt, Human
uggcgggaagugaaacuug

SEQ ID NO: 999295 - RNA, 21 nt, Human
uggcucagggccugugacgcg

SEQ ID NO: 999296 - RNA, 19 nt, Human
uggcugcaggggggugcca

SEQ ID NO: 999297 - RNA, 19 nt, Human
uggcugcaggggggugcca

SEQ ID NO: 999298 - RNA, 22 nt, Human
ugggaacagagcugaggugcca

SEQ ID NO: 999299 - RNA, 23 nt, Human
ugggaacagagcugaggugccag

SEQ ID NO: 999300 - RNA, 22 nt, Human
ugguggcacaaugcaccggggc

SEQ ID NO: 999301 - RNA, 22 nt, Human
ugguggcacaaugcaccggggc

SEQ ID NO: 999302 - RNA, 22 nt, Human
ugguggcacaaugcaccggggc

SEQ ID NO: 999303 - RNA, 21 nt, Human
ugguuuaggccugggccaaga

SEQ ID NO: 999304 - RNA, 21 nt, Human
ugguuuaggccugggccaaga

SEQ ID NO: 999305 - RNA, 21 nt, Human
ugguuuaggccugggccaaga

SEQ ID NO: 999306 - RNA, 20 nt, Human
uguaggaaaagauguuuuuc

SEQ ID NO: 999307 - RNA, 20 nt, Human
uguaggaaaagauguuuuuc

SEQ ID NO: 999308 - RNA, 20 nt, Human
uguggcuggacacucagggc

SEQ ID NO: 999309 - RNA, 20 nt, Human
uguggcuggacacucagggc

SEQ ID NO: 999310 - RNA, 20 nt, Human
uguggcuggacacucagggc

SEQ ID NO: 999311 - RNA, 20 nt, Human
uguggcuggacacucagggc

SEQ ID NO: 999312 - RNA, 21 nt, Human
uguggcuggacacucagggcc

SEQ ID NO: 999313 - RNA, 21 nt, Human
uguggcuggacacucagggcc

SEQ ID NO: 999314 - RNA, 21 nt, Human
uguggcuggacacucagggcc

SEQ ID NO: 999315 - RNA, 21 nt, Human
uguggcuggacacucagggcc

SEQ ID NO: 999316 - RNA, 22 nt, Human
ugugucuccaaggccacucugu

SEQ ID NO: 999317 - RNA, 22 nt, Human
ugugucuccaaggccacucugu

SEQ ID NO: 999318 - RNA, 18 nt, Human
uucacaugacucggcccc

SEQ ID NO: 999319 - RNA, 21 nt, Human
uucucuguuccucuagaacgg

SEQ ID NO: 999320 - RNA, 24 nt, Human
uuguuuuauggagucaccucucag

SEQ ID NO: 999321 - RNA, 24 nt, Human
uuguuuuauggagucaccucucag

SEQ ID NO: 999322 - RNA, 18 nt, Human
uuucccaggcuuuccugg

SEQ ID NO: 999323 - RNA, 18 nt, Human
uuucccaggcuuuccugg

SEQ ID NO: 999324 - RNA, 18 nt, Human
uuucccaggcuuuccugg

SEQ ID NO: 999325 - RNA, 20 nt, Human
uuugguagagugcugaggga

SEQ ID NO: 999326 - RNA, 19 nt, Human
uuuuuuuuuuuuauggggc

SEQ ID NO: 999327 - RNA, 24 nt, Human
uuuuuuuuuuuuuuuuuuuauggg

SEQ ID NO: 999328 - RNA, 26 nt, Human
uuuuuuuuuuuuuuuuuuuuaugggg

SEQ ID NO: 999329 - RNA, 24 nt, Human
aaacuguccgagcgagaggcacaa

SEQ ID NO: 999330 - RNA, 23 nt, Human
aaggggccaaaggucccugccua

SEQ ID NO: 999331 - RNA, 21 nt, Human
acccaauggucaggcuccgga

SEQ ID NO: 999332 - RNA, 19 nt, Human
acccucgaggaaggggcag

SEQ ID NO: 999333 - RNA, 19 nt, Human
acggagcugcugccacccc

SEQ ID NO: 999334 - RNA, 19 nt, Human
acggagcugcugccacccc

SEQ ID NO: 999335 - RNA, 18 nt, Human
acucuaggaucuccaagc

SEQ ID NO: 999336 - RNA, 21 nt, Human
acugaccggcuuccugggcuu

SEQ ID NO: 999337 - RNA, 21 nt, Human
acugaccggcuuccugggcuu

SEQ ID NO: 999338 - RNA, 18 nt, Human
agacuuggagaaaagcca

SEQ ID NO: 999339 - RNA, 21 nt, Human
agagcucccccagcaaggccu

SEQ ID NO: 999340 - RNA, 18 nt, Human
agccaagauuagcuggug

SEQ ID NO: 999341 - RNA, 22 nt, Human
agcuagacucaugacggagcug

SEQ ID NO: 999342 - RNA, 22 nt, Human
agcuagacucaugacggagcug

SEQ ID NO: 999343 - RNA, 22 nt, Human
aggugucagcaacugccaugac

SEQ ID NO: 999344 - RNA, 22 nt, Human
aggugucagcaacugccaugac

SEQ ID NO: 999345 - RNA, 23 nt, Human
aggugucagcaacugccaugacc

SEQ ID NO: 999346 - RNA, 23 nt, Human
aggugucagcaacugccaugacc

SEQ ID NO: 999347 - RNA, 24 nt, Human
agugcuccaucaggcucgagcaac

SEQ ID NO: 999348 - RNA, 23 nt, Human
aucacggaauccuugagccaagg

SEQ ID NO: 999349 - RNA, 18 nt, Human
auccacucuaggaucucc

SEQ ID NO: 999350 - RNA, 22 nt, Human
auccauccucggccaacucgau

SEQ ID NO: 999351 - RNA, 22 nt, Human
auccauccucggccaacucgau

SEQ ID NO: 999352 - RNA, 22 nt, Human
auccauccucggccaacucgau

SEQ ID NO: 999353 - RNA, 22 nt, Human
caaaaugaacaucacggaaucc

SEQ ID NO: 999354 - RNA, 23 nt, Human
caacugccaugaccacuugcagc

SEQ ID NO: 999355 - RNA, 23 nt, Human
caacugccaugaccacuugcagc

SEQ ID NO: 999356 - RNA, 23 nt, Human
cagcagcaucccugaucgagggg

SEQ ID NO: 999357 - RNA, 22 nt, Human
cagcggccgcagcccgcccccc

SEQ ID NO: 999358 - RNA, 22 nt, Human
cagcggccgcagcccgcccccc

SEQ ID NO: 999359 - RNA, 22 nt, Human
caggugggggcuagagaagagc

SEQ ID NO: 999360 - RNA, 23 nt, Human
ccaccccagcagaucugcucgcc

SEQ ID NO: 999361 - RNA, 23 nt, Human
ccaccccagcagaucugcucgcc

SEQ ID NO: 999362 - RNA, 20 nt, Human
cccgaacaccuccacagccg

SEQ ID NO: 999363 - RNA, 22 nt, Human
cccgaacaccuccacagccgcc

SEQ ID NO: 999364 - RNA, 19 nt, Human
cccgcagcagccccuugcu

SEQ ID NO: 999365 - RNA, 20 nt, Human
cccgcagcagccccuugcuc

SEQ ID NO: 999366 - RNA, 22 nt, Human
cccgucugucucucccucccca

SEQ ID NO: 999367 - RNA, 20 nt, Human
cccugguguccucgaagugc

SEQ ID NO: 999368 - RNA, 21 nt, Human
ccgaacaccuccacagccgcc

SEQ ID NO: 999369 - RNA, 22 nt, Human
ccuccucggacuuggcagaggc

SEQ ID NO: 999370 - RNA, 21 nt, Human
ccugcagugagggccagaccc

SEQ ID NO: 999371 - RNA, 27 nt, Human
ccugcagugagggccagaccggggucc

SEQ ID NO: 999372 - RNA, 22 nt, Human
ccuucagcuucccgaacaccuc

SEQ ID NO: 999373 - RNA, 23 nt, Human
cgccacacaggcugcucuaggcg

SEQ ID NO: 999374 - RNA, 20 nt, Human
cgcccagcucgucgucguag

SEQ ID NO: 999375 - RNA, 19 nt, Human
cggccgcagccagcguccu

SEQ ID NO: 999376 - RNA, 19 nt, Human
cgguacucugaggggcugc

SEQ ID NO: 999377 - RNA, 19 nt, Human
cgucgccgccacggccgca

SEQ ID NO: 999378 - RNA, 27 nt, Human
cuccacagccgcccuggacacgcugcu

SEQ ID NO: 999379 - RNA, 22 nt, Human
cucccuccccaaaggggccaaa

SEQ ID NO: 999380 - RNA, 24 nt, Human
cucccugguguccucgaagugcuc

SEQ ID NO: 999381 - RNA, 27 nt, Human
cucgaagugcuccaucaggcucgagca

SEQ ID NO: 999382 - RNA, 24 nt, Human
cucgagcaacuggagcacccaaug

SEQ ID NO: 999383 - RNA, 20 nt, Human
cucuguugggaccccuuuca

SEQ ID NO: 999384 - RNA, 26 nt, Human
cugaagacuuucuauuucuccauuag

SEQ ID NO: 999385 - RNA, 26 nt, Human
cugaagacuuucuauuucuccauuag

SEQ ID NO: 999386 - RNA, 19 nt, Human
cugaccggcuuccugggcu

SEQ ID NO: 999387 - RNA, 19 nt, Human
cugaccggcuuccugggcu

SEQ ID NO: 999388 - RNA, 21 nt, Human
cuucagcuucccgaacaccuc

SEQ ID NO: 999389 - RNA, 24 nt, Human
gacuuucuauuucuccauuaguuc

SEQ ID NO: 999390 - RNA, 24 nt, Human
gacuuucuauuucuccauuaguuc

SEQ ID NO: 999391 - RNA, 19 nt, Human
gcaaguccucaaacugucc

SEQ ID NO: 999392 - RNA, 21 nt, Human
gcagcacucuccugcagcugc

SEQ ID NO: 999393 - RNA, 20 nt, Human
gcaucagcucguggcccagc

SEQ ID NO: 999394 - RNA, 22 nt, Human
gccacacaggcugcucuaggcg

SEQ ID NO: 999395 - RNA, 25 nt, Human
gccuugcugcuucuucacggucucc

SEQ ID NO: 999396 - RNA, 25 nt, Human
gccuugcugcuucuucacggucucc

SEQ ID NO: 999397 - RNA, 19 nt, Human
gggcagaguugcgcacgug

SEQ ID NO: 999398 - RNA, 19 nt, Human
ggggccgcacggguggagg

SEQ ID NO: 999399 - RNA, 22 nt, Human
gguuggccucuggggauuuggc

SEQ ID NO: 999400 - RNA, 22 nt, Human
guccaugaaguguagcugcuuc

SEQ ID NO: 999401 - RNA, 18 nt, Human
gucguagacuuggagaaa

SEQ ID NO: 999402 - RNA, 21 nt, Human
gucgucgccgccacggccgca

SEQ ID NO: 999403 - RNA, 21 nt, Human
ucacggucuccacggccuucg

SEQ ID NO: 999404 - RNA, 19 nt, Human
ucagagguuggaaggcucg

SEQ ID NO: 999405 - RNA, 25 nt, Human
uccccaaaggggccaaaggucccug

SEQ ID NO: 999406 - RNA, 22 nt, Human
ucccgaacaccuccacagccgc

SEQ ID NO: 999407 - RNA, 28 nt, Human
ucccgaacaccuccacagccgcccugga

SEQ ID NO: 999408 - RNA, 22 nt, Human
ucccuccccaaaggggccaaaa

SEQ ID NO: 999409 - RNA, 23 nt, Human
uccuucagcuucccgaacaccuc

SEQ ID NO: 999410 - RNA, 20 nt, Human
ucgccgccacggccgcagcc

SEQ ID NO: 999411 - RNA, 22 nt, Human
ucgccgccacggccgcagccag

SEQ ID NO: 999412 - RNA, 20 nt, Human
ucgccuugcugcuucuucac

SEQ ID NO: 999413 - RNA, 20 nt, Human
ucgccuugcugcuucuucac

SEQ ID NO: 999414 - RNA, 20 nt, Human
ucugucucucccuccccaaa

SEQ ID NO: 999415 - RNA, 19 nt, Human
ucuguugggaccccuuuca

SEQ ID NO: 999416 - RNA, 23 nt, Human
ucuuuggcucugugauauacaga

SEQ ID NO: 999417 - RNA, 19 nt, Human
ugaauugucuuuggcucug

SEQ ID NO: 999418 - RNA, 18 nt, Human
ugaggacuggggcgggca

SEQ ID NO: 999419 - RNA, 20 nt, Human
ugaggaggggcugcaugucc

SEQ ID NO: 999420 - RNA, 23 nt, Human
ugaggaggggcugcauguccagg

SEQ ID NO: 999421 - RNA, 24 nt, Human
ugcaggugggggcuagagaagagc

SEQ ID NO: 999422 - RNA, 21 nt, Human
ugccuagagcacaacgugggg

SEQ ID NO: 999423 - RNA, 21 nt, Human
ugccuagagcacaacgugggg

SEQ ID NO: 999424 - RNA, 21 nt, Human
ugccuagagcacaacgugggg

SEQ ID NO: 999425 - RNA, 20 nt, Human
ugcguggccuggaugauggg

SEQ ID NO: 999426 - RNA, 22 nt, Human
ugcucuaggcggccuuuaauca

SEQ ID NO: 999427 - RNA, 22 nt, Human
ugcucuaggcggccuuuaauca

SEQ ID NO: 999428 - RNA, 21 nt, Human
uggcagaggcacuggcccacu

SEQ ID NO: 999429 - RNA, 21 nt, Human
ugggggcuagagaagagcucc

SEQ ID NO: 999430 - RNA, 20 nt, Human
uguugaggaggggcugcaug

SEQ ID NO: 999431 - RNA, 22 nt, Human
uucacggucuccacggccuucg

SEQ ID NO: 999432 - RNA, 19 nt, Human
uuggaaggcucggagccuc

SEQ ID NO: 999433 - RNA, 23 nt, Human
uuuuuuuuuuagaaaccaaggcu

SEQ ID NO: 999434 - RNA, 18 nt, Human
aaagagacuauaagaacc

SEQ ID NO: 999435 - RNA, 22 nt, Human
aaccaaguauggcaauacagga

SEQ ID NO: 999436 - RNA, 22 nt, Human
aaggaaccauggcuuguuugag

SEQ ID NO: 999437 - RNA, 23 nt, Human
aaggaaccauggcuuguuugagu

SEQ ID NO: 999438 - RNA, 22 nt, Human
aauacuaaaaccaaguauggca

SEQ ID NO: 999439 - RNA, 18 nt, Human
acugccugagaggacucc

SEQ ID NO: 999440 - RNA, 20 nt, Human
agagaagacaguccaccgcg

SEQ ID NO: 999441 - RNA, 19 nt, Human
aucauugcacagagaagac

SEQ ID NO: 999442 - RNA, 19 nt, Human
caucaaggaaccauggcuu

SEQ ID NO: 999443 - RNA, 18 nt, Human
cccacuucccaaacacca

SEQ ID NO: 999444 - RNA, 18 nt, Human
cgaauccucaucugcgac

SEQ ID NO: 999445 - RNA, 23 nt, Human
cuucccaaacaccacuaggucga

SEQ ID NO: 999446 - RNA, 18 nt, Human
ggcuccugaauaucuccc

SEQ ID NO: 999447 - RNA, 21 nt, Human
ggguagguucucccacuuccc

SEQ ID NO: 999448 - RNA, 22 nt, Human
uaaaaagagacuauaagaaccu

SEQ ID NO: 999449 - RNA, 22 nt, Human
uaaaaccaaguauggcaauaca

SEQ ID NO: 999450 - RNA, 21 nt, Human
uagguucucccacuucccaaa

SEQ ID NO: 999451 - RNA, 20 nt, Human
ucaucaaggaaccauggcuu

SEQ ID NO: 999452 - RNA, 21 nt, Human
ucaucugcgacuuuguguuuc

SEQ ID NO: 999453 - RNA, 23 nt, Human
uccaccgcgcagcgcugacuauc

SEQ ID NO: 999454 - RNA, 18 nt, Human
uccagaguccagaggggu

SEQ ID NO: 999455 - RNA, 19 nt, Human
ucccaaacaccacuagguc

SEQ ID NO: 999456 - RNA, 25 nt, Human
uccgaagagcuucuuccagaguccu

SEQ ID NO: 999457 - RNA, 20 nt, Human
ucucccacuucccaaacacc

SEQ ID NO: 999458 - RNA, 21 nt, Human
ugaauaucucccaggaguccc

SEQ ID NO: 999459 - RNA, 18 nt, Human
ugguuugggugcuuugca

SEQ ID NO: 999460 - RNA, 24 nt, Human
uguguuuccucuuuuugccauggu

SEQ ID NO: 999461 - RNA, 21 nt, Human
uguuucaggguuuugcauggu

SEQ ID NO: 999462 - RNA, 19 nt, Human
uucuguggcgagcugggaa

SEQ ID NO: 999463 - RNA, 26 nt, Human
uugcuaagucaacgucugaacagugu

SEQ ID NO: 999464 - RNA, 21 nt, Human
uuguuuguuugucaucaagga

SEQ ID NO: 999465 - RNA, 22 nt, Human
uuguuuguuugucaucaaggaa

SEQ ID NO: 999466 - RNA, 19 nt, Human
uuuccucuuuuugccaugg

SEQ ID NO: 999467 - RNA, 23 nt, Human
uuugcauuuucccaacugccuga

SEQ ID NO: 999468 - RNA, 18 nt, Human
aaacccagggccggacag

SEQ ID NO: 999469 - RNA, 28 nt, Human
aaacccagggccggacaggaggcgagga

SEQ ID NO: 999470 - RNA, 19 nt, Human
aaagugcugggauuacagg

SEQ ID NO: 999471 - RNA, 20 nt, Human
aaagugcugggauuacaggc

SEQ ID NO: 999472 - RNA, 22 nt, Human
aaagugcugggauuacaggcgg

SEQ ID NO: 999473 - RNA, 24 nt, Human
aaagugcugggauuacaggcggga

SEQ ID NO: 999474 - RNA, 24 nt, Human
aagaaaaccagccuacccuucaag

SEQ ID NO: 999475 - RNA, 19 nt, Human
aagcugacuuaggaugcaa

SEQ ID NO: 999476 - RNA, 18 nt, Human
aagugcugggauuacagg

SEQ ID NO: 999477 - RNA, 19 nt, Human
aagugcugggauuacaggc

SEQ ID NO: 999478 - RNA, 26 nt, Human
aagugcugggauuacaggcgggagcc

SEQ ID NO: 999479 - RNA, 21 nt, Human
acauggcagggcugagcugau

SEQ ID NO: 999480 - RNA, 18 nt, Human
acccugagcaaugcuucc

SEQ ID NO: 999481 - RNA, 21 nt, Human
accugggauuauaggcaugcg

SEQ ID NO: 999482 - RNA, 18 nt, Human
acugccguugguggccug

SEQ ID NO: 999483 - RNA, 26 nt, Human
agaacacccggggcacacacggggca

SEQ ID NO: 999484 - RNA, 21 nt, Human
agagaccgaggaugagaaagu

SEQ ID NO: 999485 - RNA, 21 nt, Human
agccaauggcagcgaaugacg

SEQ ID NO: 999486 - RNA, 23 nt, Human
agccaccgcgccgggccaucuua

SEQ ID NO: 999487 - RNA, 21 nt, Human
aggcccaggugugagcagcag

SEQ ID NO: 999488 - RNA, 25 nt, Human
aggcuggagugcaguggcacaaucu

SEQ ID NO: 999489 - RNA, 21 nt, Human
agguucaagugauucuccugc

SEQ ID NO: 999490 - RNA, 22 nt, Human
agguucaagugauucuccugcc

SEQ ID NO: 999491 - RNA, 23 nt, Human
agguucaagugauucuccugccu

SEQ ID NO: 999492 - RNA, 21 nt, Human
aguaccugggauuauaggcau

SEQ ID NO: 999493 - RNA, 24 nt, Human
agugauucuccugccucagccucc

SEQ ID NO: 999494 - RNA, 20 nt, Human
agugcaguggcacaaucuug

SEQ ID NO: 999495 - RNA, 24 nt, Human
agugcaguggcacaaucuuggcuc

SEQ ID NO: 999496 - RNA, 18 nt, Human
agugcugggauuacaggc

SEQ ID NO: 999497 - RNA, 21 nt, Human
auccgcccgccucggccuccc

SEQ ID NO: 999498 - RNA, 18 nt, Human
aucugaguagguguaaga

SEQ ID NO: 999499 - RNA, 26 nt, Human
caaagugcugggauuacaggcgggag

SEQ ID NO: 999500 - RNA, 21 nt, Human
caacagaacaaaacccccgcc

SEQ ID NO: 999501 - RNA, 24 nt, Human
caacagaacaaaacccccgccgcg

SEQ ID NO: 999502 - RNA, 22 nt, Human
caagugauucuccugccucagc

SEQ ID NO: 999503 - RNA, 24 nt, Human
caaugggccagcuucagaaccauc

SEQ ID NO: 999504 - RNA, 18 nt, Human
cacccggggcacacacgg

SEQ ID NO: 999505 - RNA, 18 nt, Human
cacgacaaggacaaggca

SEQ ID NO: 999506 - RNA, 25 nt, Human
cacuccucccccagaaagccagggg

SEQ ID NO: 999507 - RNA, 18 nt, Human
cacugcaaccucugccuc

SEQ ID NO: 999508 - RNA, 21 nt, Human
cacugcaaccucugccuccca

SEQ ID NO: 999509 - RNA, 20 nt, Human
cagaacaaaacccccgccgc

SEQ ID NO: 999510 - RNA, 20 nt, Human
cagaacaaaacccccgccgc

SEQ ID NO: 999511 - RNA, 20 nt, Human
cagaaggacugccguuggug

SEQ ID NO: 999512 - RNA, 22 nt, Human
cagaaggacugccguugguggc

SEQ ID NO: 999513 - RNA, 20 nt, Human
cagcagggccaccaggccuc

SEQ ID NO: 999514 - RNA, 20 nt, Human
cagcaucuuggcccucacag

SEQ ID NO: 999515 - RNA, 22 nt, Human
cagcccccucugcccuuggccc

SEQ ID NO: 999516 - RNA, 21 nt, Human
cagccuacccuucaagcugac

SEQ ID NO: 999517 - RNA, 20 nt, Human
cagccuccugaguaccuggg

SEQ ID NO: 999518 - RNA, 19 nt, Human
cagccucucagaaccccau

SEQ ID NO: 999519 - RNA, 22 nt, Human
cagcggccuggccugggaaagg

SEQ ID NO: 999520 - RNA, 21 nt, Human
cagggaccuggucuauggccu

SEQ ID NO: 999521 - RNA, 19 nt, Human
ccaaagugcugggauuaca

SEQ ID NO: 999522 - RNA, 22 nt, Human
ccaaagugcugggauuacaggc

SEQ ID NO: 999523 - RNA, 23 nt, Human
ccaaagugcugggauuacaggcg

SEQ ID NO: 999524 - RNA, 19 nt, Human
ccacacuccuaccccaaac

SEQ ID NO: 999525 - RNA, 20 nt, Human
ccacuccucccccagaaagc

SEQ ID NO: 999526 - RNA, 21 nt, Human
ccaggggggaaaagcugcuca

SEQ ID NO: 999527 - RNA, 23 nt, Human
cccagguucaagugauucuccuc

SEQ ID NO: 999528 - RNA, 23 nt, Human
cccagguucaagugauucuccug

SEQ ID NO: 999529 - RNA, 18 nt, Human
cccccagaaagccagggg

SEQ ID NO: 999530 - RNA, 30 nt, Human
ccccccacccugagcaaugcuucccaggcc

SEQ ID NO: 999531 - RNA, 21 nt, Human
cccuaaggaggcccacuccuc

SEQ ID NO: 999532 - RNA, 25 nt, Human
cccucacagcuguggcagugccucu

SEQ ID NO: 999533 - RNA, 24 nt, Human
ccuaaggaggcccacuccuccccc

SEQ ID NO: 999534 - RNA, 18 nt, Human
ccucacagcuguggcagu

SEQ ID NO: 999535 - RNA, 21 nt, Human
ccucacagcuguggcagugcc

SEQ ID NO: 999536 - RNA, 24 nt, Human
ccucccagguucaagugauucucc

SEQ ID NO: 999537 - RNA, 21 nt, Human
ccucccccagaaagccagggg

SEQ ID NO: 999538 - RNA, 23 nt, Human
ccucuaccugccuucagcaacca

SEQ ID NO: 999539 - RNA, 23 nt, Human
ccugaguaccugggauuauaggc

SEQ ID NO: 999540 - RNA, 24 nt, Human
ccuguggccaggaaggcuucagac

SEQ ID NO: 999541 - RNA, 23 nt, Human
ccuucagcaaccacugagaacac

SEQ ID NO: 999542 - RNA, 22 nt, Human
ccuuggcccaaccgugggcccc

SEQ ID NO: 999543 - RNA, 21 nt, Human
cgacaaggacaaggcagggca

SEQ ID NO: 999544 - RNA, 22 nt, Human
cgaccucaacucauccgcccgc

SEQ ID NO: 999545 - RNA, 24 nt, Human
cgccucggccucccaaagugcugg

SEQ ID NO: 999546 - RNA, 21 nt, Human
cggcaacagaacaaaaccccc

SEQ ID NO: 999547 - RNA, 29 nt, Human
cggcuaauuuuguauuuuuaguagagacg

SEQ ID NO: 999548 - RNA, 20 nt, Human
cggcugccuugcuacccagg

SEQ ID NO: 999549 - RNA, 20 nt, Human
cgggagccaccgcgccgggc

SEQ ID NO: 999550 - RNA, 24 nt, Human
cucacugcaaccucugccucccag

SEQ ID NO: 999551 - RNA, 24 nt, Human
cucacugcaaccucugccucccag

SEQ ID NO: 999552 - RNA, 21 nt, Human
cucagcugugucugaggucug

SEQ ID NO: 999553 - RNA, 18 nt, Human
cucccagguucaagugau

SEQ ID NO: 999554 - RNA, 25 nt, Human
cucccgaccucaacucauccgcccg

SEQ ID NO: 999555 - RNA, 26 nt, Human
cucccgaccucaacucauccgcccgc

SEQ ID NO: 999556 - RNA, 22 nt, Human
cuccgaggagaggcccaggugu

SEQ ID NO: 999557 - RNA, 18 nt, Human
cuccuaccccaaacgggc

SEQ ID NO: 999558 - RNA, 20 nt, Human
cucuucuuccuuuuuccacu

SEQ ID NO: 999559 - RNA, 23 nt, Human
cucuuucaaugggccagcuucag

SEQ ID NO: 999560 - RNA, 24 nt, Human
cugaguaccugggauuauaggcau

SEQ ID NO: 999561 - RNA, 23 nt, Human
cugcaaccucugccucccagguu

SEQ ID NO: 999562 - RNA, 24 nt, Human
cugcaaccucugccucccagguuc

SEQ ID NO: 999563 - RNA, 21 nt, Human
cugcaguggcgcacggguuuu

SEQ ID NO: 999564 - RNA, 23 nt, Human
cugccucagccuccugaguaccu

SEQ ID NO: 999565 - RNA, 19 nt, Human
cuugggggaggguucucca

SEQ ID NO: 999566 - RNA, 24 nt, Human
gaccucaacucauccgcccgccuc

SEQ ID NO: 999567 - RNA, 22 nt, Human
gaguaccugggauuauaggcau

SEQ ID NO: 999568 - RNA, 18 nt, Human
gauuacaggcgggagcca

SEQ ID NO: 999569 - RNA, 18 nt, Human
gauuauaggcaugcgcca

SEQ ID NO: 999570 - RNA, 22 nt, Human
gcaaccucugccucccagguuc

SEQ ID NO: 999571 - RNA, 18 nt, Human
gcacccagggucaccugu

SEQ ID NO: 999572 - RNA, 22 nt, Human
gccaccaggccucugucccagg

SEQ ID NO: 999573 - RNA, 23 nt, Human
gcccacuccucccccagaaagcc

SEQ ID NO: 999574 - RNA, 24 nt, Human
gcccacuccucccccagaaagcca

SEQ ID NO: 999575 - RNA, 19 nt, Human
gcccgccugccccaggcac

SEQ ID NO: 999576 - RNA, 21 nt, Human
gcucacugcaaccucugccuc

SEQ ID NO: 999577 - RNA, 19 nt, Human
gcuggagugcaguggcaca

SEQ ID NO: 999578 - RNA, 21 nt, Human
gcuuuuguugcucaggcugga

SEQ ID NO: 999579 - RNA, 19 nt, Human
ggaggguucuccauccaca

SEQ ID NO: 999580 - RNA, 21 nt, Human
ggaugcgaggggaggggcagu

SEQ ID NO: 999581 - RNA, 20 nt, Human
ggcagggguggcacccaggg

SEQ ID NO: 999582 - RNA, 21 nt, Human
ggccauggucccagcccccca

SEQ ID NO: 999583 - RNA, 21 nt, Human
gggaggguucuccauccacac

SEQ ID NO: 999584 - RNA, 21 nt, Human
ggggcagggguggcacccagg

SEQ ID NO: 999585 - RNA, 27 nt, Human
ggggcagggguggcacccagggucacc

SEQ ID NO: 999586 - RNA, 21 nt, Human
ggucugugaacucccagccuc

SEQ ID NO: 999587 - RNA, 24 nt, Human
ggugauugcauaguguccuuugag

SEQ ID NO: 999588 - RNA, 18 nt, Human
ggugcagcccccucugcc

SEQ ID NO: 999589 - RNA, 23 nt, Human
ggugggccaggcccugcuucagg

SEQ ID NO: 999590 - RNA, 20 nt, Human
guaccugggauuauaggcau

SEQ ID NO: 999591 - RNA, 18 nt, Human
guagguguaagaggggag

SEQ ID NO: 999592 - RNA, 23 nt, Human
gugauucuccugccucagccucc

SEQ ID NO: 999593 - RNA, 23 nt, Human
guggcacccagggucaccugucu

SEQ ID NO: 999594 - RNA, 24 nt, Human
uaggcggcaacagaacaaaacccc

SEQ ID NO: 999595 - RNA, 24 nt, Human
uagguguaagaggggaggagaggu

SEQ ID NO: 999596 - RNA, 26 nt, Human
uaguagagacggggacucaaacuccc

SEQ ID NO: 999597 - RNA, 18 nt, Human
ucaacucauccgcccgcc

SEQ ID NO: 999598 - RNA, 19 nt, Human
ucaagugauucuccugccu

SEQ ID NO: 999599 - RNA, 21 nt, Human
ucacaugggggauacuggaca

SEQ ID NO: 999600 - RNA, 19 nt, Human
ucacugcaaccucugccuc

SEQ ID NO: 999601 - RNA, 24 nt, Human
ucacugcaaccucugccucccagg

SEQ ID NO: 999602 - RNA, 25 nt, Human
ucacugcaaccucugccucccaggu

SEQ ID NO: 999603 - RNA, 24 nt, Human
ucagccugacuuuccagagaccga

SEQ ID NO: 999604 - RNA, 20 nt, Human
ucagcugacuccaugagaaa

SEQ ID NO: 999605 - RNA, 19 nt, Human
ucagcugugucugaggucu

SEQ ID NO: 999606 - RNA, 24 nt, Human
ucccaaagugcugggauuacaggc

SEQ ID NO: 999607 - RNA, 22 nt, Human
ucccaggcccgcaggugcagcc

SEQ ID NO: 999608 - RNA, 23 nt, Human
ucccaggcccgcaggugcagccc

SEQ ID NO: 999609 - RNA, 21 nt, Human
ucccagguucaagugauucuc

SEQ ID NO: 999610 - RNA, 24 nt, Human
ucccagguucaagugauucuccug

SEQ ID NO: 999611 - RNA, 19 nt, Human
uccgaacuccaccauuugg

SEQ ID NO: 999612 - RNA, 24 nt, Human
uccugaguaccugggauuauaggc

SEQ ID NO: 999613 - RNA, 18 nt, Human
ucucagaaccccauggca

SEQ ID NO: 999614 - RNA, 22 nt, Human
ucuccauccacacuccuacccc

SEQ ID NO: 999615 - RNA, 24 nt, Human
ucuccugccucagccuccugagua

SEQ ID NO: 999616 - RNA, 20 nt, Human
ucucggcugccuugcuaccc

SEQ ID NO: 999617 - RNA, 25 nt, Human
ucugaggucugugaacucccagccu

SEQ ID NO: 999618 - RNA, 23 nt, Human
ucugcgggccauggucccagccc

SEQ ID NO: 999619 - RNA, 21 nt, Human
ugaaauacaucugagaagcca

SEQ ID NO: 999620 - RNA, 22 nt, Human
ugaaauacaucugagaagccaa

SEQ ID NO: 999621 - RNA, 18 nt, Human
ugacuuaggaugcaaugg

SEQ ID NO: 999622 - RNA, 20 nt, Human
ugaggaggaggagaaaguga

SEQ ID NO: 999623 - RNA, 20 nt, Human
ugauucuccugccucagccu

SEQ ID NO: 999624 - RNA, 18 nt, Human
ugcagcccccucugcccu

SEQ ID NO: 999625 - RNA, 22 nt, Human
ugcaguggcacaaucuuggcuc

SEQ ID NO: 999626 - RNA, 23 nt, Human
ugccccaggcaccuugggugggc

SEQ ID NO: 999627 - RNA, 24 nt, Human
ugcccuuggcccaaccgugggccc

SEQ ID NO: 999628 - RNA, 18 nt, Human
ugccguugguggccuggg

SEQ ID NO: 999629 - RNA, 24 nt, Human
ugccucagccuccugaguaccugg

SEQ ID NO: 999630 - RNA, 23 nt, Human
ugccucaggcaccgcuagaaacc

SEQ ID NO: 999631 - RNA, 25 nt, Human
ugccuugcuacccaggggucggcuc

SEQ ID NO: 999632 - RNA, 20 nt, Human
ugcucaggcuggagugcagu

SEQ ID NO: 999633 - RNA, 21 nt, Human
ugcucaggcuggagugcagug

SEQ ID NO: 999634 - RNA, 22 nt, Human
ugcucaggcuggagugcagugg

SEQ ID NO: 999635 - RNA, 24 nt, Human
ugcucaggcuggagugcaguggca

SEQ ID NO: 999636 - RNA, 24 nt, Human
ugcugggauuacaggcgggagcca

SEQ ID NO: 999637 - RNA, 23 nt, Human
uggagugcaguggcacaaucuug

SEQ ID NO: 999638 - RNA, 24 nt, Human
uggagugcaguggcacaaucuugg

SEQ ID NO: 999639 - RNA, 21 nt, Human
uggcaacacgacaaggacaag

SEQ ID NO: 999640 - RNA, 24 nt, Human
uggcacaaucuuggcucacugcaa

SEQ ID NO: 999641 - RNA, 23 nt, Human
uggccaggaaggcuucagaccuc

SEQ ID NO: 999642 - RNA, 18 nt, Human
ugggauuacaggcgggag

SEQ ID NO: 999643 - RNA, 19 nt, Human
ugggauuacaggcgggagc

SEQ ID NO: 999644 - RNA, 21 nt, Human
ugggauuacaggcgggagcca

SEQ ID NO: 999645 - RNA, 22 nt, Human
ugggauuacaggcgggagccac

SEQ ID NO: 999646 - RNA, 23 nt, Human
ugggauuacaggcgggagccacc

SEQ ID NO: 999647 - RNA, 24 nt, Human
ugggauuacaggcgggagccaccg

SEQ ID NO: 999648 - RNA, 21 nt, Human
ugggauuauaggcaugcgcca

SEQ ID NO: 999649 - RNA, 22 nt, Human
ugggauuauaggcaugcgccac

SEQ ID NO: 999650 - RNA, 18 nt, Human
ugggggaugcgaggggag

SEQ ID NO: 999651 - RNA, 23 nt, Human
ugggugggccaggcccugcuuca

SEQ ID NO: 999652 - RNA, 21 nt, Human
uguauuuuuaguagagacggg

SEQ ID NO: 999653 - RNA, 23 nt, Human
uguccggcuaauuuuguauuuuu

SEQ ID NO: 999654 - RNA, 23 nt, Human
uuaauggcaucagacaaggccuu

SEQ ID NO: 999655 - RNA, 21 nt, Human
uucaagugauucuccugccuc

SEQ ID NO: 999656 - RNA, 23 nt, Human
uucaagugauucuccugccucag

SEQ ID NO: 999657 - RNA, 24 nt, Human
uucaagugauucuccugccucagc

SEQ ID NO: 999658 - RNA, 22 nt, Human
uucacaugggggauacuggaca

SEQ ID NO: 999659 - RNA, 24 nt, Human
uugcucaggcuggagugcaguggc

SEQ ID NO: 999660 - RNA, 21 nt, Human
uugcuuuuguugcucaggcug

SEQ ID NO: 999661 - RNA, 23 nt, Human
uugcuuuuguugcucaggcugga

SEQ ID NO: 999662 - RNA, 19 nt, Human
uuggcccaaccgugggccc

SEQ ID NO: 999663 - RNA, 23 nt, Human
uuguauuuuuaguagagacgggg

SEQ ID NO: 999664 - RNA, 24 nt, Human
uuugcuuuuguugcucaggcugga

SEQ ID NO: 999665 - RNA, 24 nt, Human
uuuguugcucaggcuggagugcag

SEQ ID NO: 999666 - RNA, 24 nt, Human
uuuugcuuuuguugcucaggcugg

SEQ ID NO: 999667 - RNA, 19 nt, Human
uuuuguauuuuuaguagag

SEQ ID NO: 999668 - RNA, 20 nt, Human
uuuuguauuuuuaguagaga

SEQ ID NO: 999669 - RNA, 20 nt, Human
uuuuuaguagagacggggac

SEQ ID NO: 999670 - RNA, 22 nt, Human
aaaacccaauggcaacaugccc

SEQ ID NO: 999671 - RNA, 19 nt, Human
aaagagaaacagaacagua

SEQ ID NO: 999672 - RNA, 18 nt, Human
aaagauccccacgcgccu

SEQ ID NO: 999673 - RNA, 22 nt, Human
aaagaugaauagcagugaccca

SEQ ID NO: 999674 - RNA, 21 nt, Human
aacagaacaguaccuugagga

SEQ ID NO: 999675 - RNA, 25 nt, Human
aacaggacuccuccaggagggcccg

SEQ ID NO: 999676 - RNA, 26 nt, Human
aacaugcccacgaaagcuucaaguca

SEQ ID NO: 999677 - RNA, 23 nt, Human
aacccaacacaaaaaucaacucc

SEQ ID NO: 999678 - RNA, 24 nt, Human
aacugugcagcuuaggugaacccu

SEQ ID NO: 999679 - RNA, 19 nt, Human
aagccacuguuccucccca

SEQ ID NO: 999680 - RNA, 21 nt, Human
aaguggccaaaacacucagug

SEQ ID NO: 999681 - RNA, 23 nt, Human
acccaauggcaacaugcccacga

SEQ ID NO: 999682 - RNA, 20 nt, Human
accuugaggacaaagaaacc

SEQ ID NO: 999683 - RNA, 25 nt, Human
acgcaggcucagaaaggcaccagga

SEQ ID NO: 999684 - RNA, 20 nt, Human
agaacaguaccuugaggaca

SEQ ID NO: 999685 - RNA, 20 nt, Human
agaacgugggccugcaaaag

SEQ ID NO: 999686 - RNA, 18 nt, Human
agcagccacacccaggac

SEQ ID NO: 999687 - RNA, 21 nt, Human
agccugccccacacucuccca

SEQ ID NO: 999688 - RNA, 20 nt, Human
aggcaccaggaguuccuccu

SEQ ID NO: 999689 - RNA, 19 nt, Human
aggggugagaagaggggcc

SEQ ID NO: 999690 - RNA, 22 nt, Human
aggguuccccggacccaccuuu

SEQ ID NO: 999691 - RNA, 20 nt, Human
agugcacauccccaagcagc

SEQ ID NO: 999692 - RNA, 21 nt, Human
caaacccaacacaaaaaucaa

SEQ ID NO: 999693 - RNA, 19 nt, Human
cacaagacuuucagggggc

SEQ ID NO: 999694 - RNA, 21 nt, Human
cacauccccaagcagcagcug

SEQ ID NO: 999695 - RNA, 18 nt, Human
cacccgguggcuggaggg

SEQ ID NO: 999696 - RNA, 21 nt, Human
cacgcaggcucagaaaggcac

SEQ ID NO: 999697 - RNA, 24 nt, Human
cacucccuccucccagguccucca

SEQ ID NO: 999698 - RNA, 27 nt, Human
cacucccuccucccagguccuccaagg

SEQ ID NO: 999699 - RNA, 25 nt, Human
cacuggccccucccaucaucucucu

SEQ ID NO: 999700 - RNA, 21 nt, Human
cagcuucuggaaccacaggcc

SEQ ID NO: 999701 - RNA, 24 nt, Human
caggguuccccggacccaccuuuc

SEQ ID NO: 999702 - RNA, 18 nt, Human
cagguccuccaaguggcc

SEQ ID NO: 999703 - RNA, 21 nt, Human
ccaaacccaacacaaaaauca

SEQ ID NO: 999704 - RNA, 22 nt, Human
ccaauggcaacaugcccacgaa

SEQ ID NO: 999705 - RNA, 22 nt, Human
ccacacaccugcugaacagaca

SEQ ID NO: 999706 - RNA, 18 nt, Human
ccacuguuccuccccagg

SEQ ID NO: 999707 - RNA, 22 nt, Human
ccaggcaccucccagaagcccc

SEQ ID NO: 999708 - RNA, 19 nt, Human
cccacacaccugcugaaca

SEQ ID NO: 999709 - RNA, 21 nt, Human
cccacacaccugcugaacaga

SEQ ID NO: 999710 - RNA, 20 nt, Human
cccacaguuuccuggagugc

SEQ ID NO: 999711 - RNA, 18 nt, Human
cccagcuuugguaagggc

SEQ ID NO: 999712 - RNA, 18 nt, Human
cccaggcaccucccagaa

SEQ ID NO: 999713 - RNA, 23 nt, Human
ccccaagcagcagcugggacccu

SEQ ID NO: 999714 - RNA, 25 nt, Human
cccccagcaucuucagagguggggu

SEQ ID NO: 999715 - RNA, 22 nt, Human
cccuggauucugcaagccccag

SEQ ID NO: 999716 - RNA, 19 nt, Human
cccuggguccugaggggcc

SEQ ID NO: 999717 - RNA, 19 nt, Human
ccggacccaccuuucggcc

SEQ ID NO: 999718 - RNA, 23 nt, Human
ccuccaaguggccaaaacacucu

SEQ ID NO: 999719 - RNA, 18 nt, Human
ccucuaggcccacacacc

SEQ ID NO: 999720 - RNA, 22 nt, Human
ccugaggggccacuggagaccu

SEQ ID NO: 999721 - RNA, 18 nt, Human
ccugccccacacucuccc

SEQ ID NO: 999722 - RNA, 22 nt, Human
cggaguggagccaaggcccguu

SEQ ID NO: 999723 - RNA, 21 nt, Human
cgggaaagaugaauagcagug

SEQ ID NO: 999724 - RNA, 21 nt, Human
cuaggcccacacaccugcuga

SEQ ID NO: 999725 - RNA, 22 nt, Human
cucccaucccagcugccucccc

SEQ ID NO: 999726 - RNA, 19 nt, Human
cucuaggcccacacaccug

SEQ ID NO: 999727 - RNA, 20 nt, Human
cucuguuccuguccucacug

SEQ ID NO: 999728 - RNA, 19 nt, Human
cugaacagacaucugugcc

SEQ ID NO: 999729 - RNA, 25 nt, Human
cugaacagacaucugugcccaggca

SEQ ID NO: 999730 - RNA, 21 nt, Human
cugcugaacagacaucugugc

SEQ ID NO: 999731 - RNA, 18 nt, Human
cuggguccugaggggcca

SEQ ID NO: 999732 - RNA, 23 nt, Human
gagccaaggcccguuccgaggaa

SEQ ID NO: 999733 - RNA, 23 nt, Human
gcaaaacccaauggcaacaugcc

SEQ ID NO: 999734 - RNA, 23 nt, Human
gcaaagcugcaggaacugugcag

SEQ ID NO: 999735 - RNA, 19 nt, Human
gcaauggggcucccagcuu

SEQ ID NO: 999736 - RNA, 19 nt, Human
gcaggcucagaaaggcacc

SEQ ID NO: 999737 - RNA, 21 nt, Human
gccaaaacacucaguggccug

SEQ ID NO: 999738 - RNA, 21 nt, Human
gccccaggcucugagaagcca

SEQ ID NO: 999739 - RNA, 20 nt, Human
gcgcagggcguccuugaugu

SEQ ID NO: 999740 - RNA, 18 nt, Human
gcugcagcuucacauccu

SEQ ID NO: 999741 - RNA, 18 nt, Human
ggaguuccuccucuugcu

SEQ ID NO: 999742 - RNA, 23 nt, Human
ggccaaaacacucaguggccugg

SEQ ID NO: 999743 - RNA, 23 nt, Human
ggccagagcugccggggcaaugg

SEQ ID NO: 999744 - RNA, 19 nt, Human
ggccuggaggggcaggaga

SEQ ID NO: 999745 - RNA, 21 nt, Human
ggggagccaggguuccccgga

SEQ ID NO: 999746 - RNA, 21 nt, Human
gggguucucccacgcaggcuc

SEQ ID NO: 999747 - RNA, 22 nt, Human
ggguucucccacgcaggcucag

SEQ ID NO: 999748 - RNA, 21 nt, Human
ggucccggaguggagccaagg

SEQ ID NO: 999749 - RNA, 19 nt, Human
gucacagacaggcaugggg

SEQ ID NO: 999750 - RNA, 23 nt, Human
guccucacuggccccucccauca

SEQ ID NO: 999751 - RNA, 22 nt, Human
guccugaggggccacuggagac

SEQ ID NO: 999752 - RNA, 22 nt, Human
gugcagcuuaggugaacccugg

SEQ ID NO: 999753 - RNA, 23 nt, Human
gugcccaggcaccucccagaagc

SEQ ID NO: 999754 - RNA, 21 nt, Human
guggaguuuucucagcuucug

SEQ ID NO: 999755 - RNA, 22 nt, Human
uaaagagaaacagaacaguacc

SEQ ID NO: 999756 - RNA, 24 nt, Human
uaauucuuccagagcagccacacc

SEQ ID NO: 999757 - RNA, 23 nt, Human
uagcuccccaggaagaccaggau

SEQ ID NO: 999758 - RNA, 25 nt, Human
ucaacuccugccuucuucuguaugc

SEQ ID NO: 999759 - RNA, 26 nt, Human
ucacuggccccucccaucaucucucu

SEQ ID NO: 999760 - RNA, 19 nt, Human
ucacuggggagccaggguu

SEQ ID NO: 999761 - RNA, 21 nt, Human
ucacuggggagccaggguucc

SEQ ID NO: 999762 - RNA, 22 nt, Human
ucagaaaggcaccaggaguucc

SEQ ID NO: 999763 - RNA, 22 nt, Human
uccagaaagauccccacgcgcc

SEQ ID NO: 999764 - RNA, 20 nt, Human
ucccagcuuugguaagggcu

SEQ ID NO: 999765 - RNA, 24 nt, Human
ucccaucccagcugccucccccag

SEQ ID NO: 999766 - RNA, 25 nt, Human
ucccccagcaucuucagaggugggg

SEQ ID NO: 999767 - RNA, 20 nt, Human
uccccggacccaccuuucgg

SEQ ID NO: 999768 - RNA, 28 nt, Human
uccucuaggcccacacaccugcugaaca

SEQ ID NO: 999769 - RNA, 22 nt, Human
uccuggagugcuagaauugggg

SEQ ID NO: 999770 - RNA, 19 nt, Human
ucgggaaagaugaauagca

SEQ ID NO: 999771 - RNA, 26 nt, Human
ucuccucuaggcccacacaccugcug

SEQ ID NO: 999772 - RNA, 21 nt, Human
ucugcucucuccucuaggccc

SEQ ID NO: 999773 - RNA, 25 nt, Human
ucugugcccaggcaccucccagaag

SEQ ID NO: 999774 - RNA, 27 nt, Human
ucuucuguaugccccaggcucugagaa

SEQ ID NO: 999775 - RNA, 24 nt, Human
ugaacccuggauucugcaagcccc

SEQ ID NO: 999776 - RNA, 20 nt, Human
ugccccaggcucugagaagc

SEQ ID NO: 999777 - RNA, 22 nt, Human
ugcccgcggacagcucgcccuu

SEQ ID NO: 999778 - RNA, 20 nt, Human
ugcucucuccucuaggccca

SEQ ID NO: 999779 - RNA, 24 nt, Human
ugcucucuccucuaggcccacaca

SEQ ID NO: 999780 - RNA, 19 nt, Human
uggaaccacaggccagagc

SEQ ID NO: 999781 - RNA, 21 nt, Human
uggauucugcaagccccagug

SEQ ID NO: 999782 - RNA, 21 nt, Human
uggcaacaugcccacgaaagc

SEQ ID NO: 999783 - RNA, 24 nt, Human
uggcaacaugcccacgaaagcuuc

SEQ ID NO: 999784 - RNA, 22 nt, Human
uggcucccaucccagcugccuc

SEQ ID NO: 999785 - RNA, 23 nt, Human
uggcucccaucccagcugccucc

SEQ ID NO: 999786 - RNA, 19 nt, Human
ugggacccuggguccugag

SEQ ID NO: 999787 - RNA, 22 nt, Human
uggggagccaggguuccccgga

SEQ ID NO: 999788 - RNA, 23 nt, Human
ugggucccggaguggagccaagg

SEQ ID NO: 999789 - RNA, 23 nt, Human
uggguccugaggggccacuggag

SEQ ID NO: 999790 - RNA, 18 nt, Human
ugguaagggcuguuggca

SEQ ID NO: 999791 - RNA, 19 nt, Human
uucucccacgcaggcucag

SEQ ID NO: 999792 - RNA, 22 nt, Human
uugaggacaaagaaaccccaaa

SEQ ID NO: 999793 - RNA, 20 nt, Human
aaagcccgcuggcuccuagg

SEQ ID NO: 999794 - RNA, 22 nt, Human
acccugcccaccaccuaucagc

SEQ ID NO: 999795 - RNA, 19 nt, Human
acucugaggugcagagaag

SEQ ID NO: 999796 - RNA, 23 nt, Human
acucugaggugcagagaaggcca

SEQ ID NO: 999797 - RNA, 23 nt, Human
agagaaagagagagagagagagc

SEQ ID NO: 999798 - RNA, 18 nt, Human
agagacagagagagagag

SEQ ID NO: 999799 - RNA, 23 nt, Human
agagagagagagacagagagaga

SEQ ID NO: 999800 - RNA, 23 nt, Human
agagcgucacagggaggcucagg

SEQ ID NO: 999801 - RNA, 20 nt, Human
agccaguucuuuacuccugg

SEQ ID NO: 999802 - RNA, 19 nt, Human
auaaaguaaaaacaaccgc

SEQ ID NO: 999803 - RNA, 23 nt, Human
caaccgcuguucgagacucaagu

SEQ ID NO: 999804 - RNA, 26 nt, Human
caagaaugccagcacagggaagccac

SEQ ID NO: 999805 - RNA, 23 nt, Human
caaggcugagagacagagagaga

SEQ ID NO: 999806 - RNA, 20 nt, Human
cacgcgaguucccuuucccu

SEQ ID NO: 999807 - RNA, 20 nt, Human
cacggugccuuccccagccc

SEQ ID NO: 999808 - RNA, 18 nt, Human
cacucugaggugcagaga

SEQ ID NO: 999809 - RNA, 19 nt, Human
caguggcuggggagaacug

SEQ ID NO: 999810 - RNA, 20 nt, Human
caguggcuggggagaacugg

SEQ ID NO: 999811 - RNA, 21 nt, Human
ccaguggcggccaaguaagcc

SEQ ID NO: 999812 - RNA, 27 nt, Human
cccagcccguccacuccggucuccuca

SEQ ID NO: 999813 - RNA, 22 nt, Human
ccccagcccguccacuccgguc

SEQ ID NO: 999814 - RNA, 21 nt, Human
cccccgggccgcacacuggcc

SEQ ID NO: 999815 - RNA, 23 nt, Human
ccgccgucuccgcuucgccgccc

SEQ ID NO: 999816 - RNA, 24 nt, Human
ccgccgucuccgcuucgccgcccu

SEQ ID NO: 999817 - RNA, 21 nt, Human
ccucacgcgggcacagggagc

SEQ ID NO: 999818 - RNA, 21 nt, Human
ccugcccaccaccuaucagcg

SEQ ID NO: 999819 - RNA, 22 nt, Human
cgaaagcccgcuggcuccuagg

SEQ ID NO: 999820 - RNA, 19 nt, Human
cgccgcccuucgcgcgccc

SEQ ID NO: 999821 - RNA, 26 nt, Human
cgcuucgccgcccuucgcgcgcccca

SEQ ID NO: 999822 - RNA, 21 nt, Human
cgggcacagggagcccccggg

SEQ ID NO: 999823 - RNA, 23 nt, Human
cuagaacccugcccaccaccuau

SEQ ID NO: 999824 - RNA, 21 nt, Human
cuccuucuggucccuagggug

SEQ ID NO: 999825 - RNA, 22 nt, Human
cuggcuccuucuggucccuagg

SEQ ID NO: 999826 - RNA, 23 nt, Human
cuuuuucuuuuuuuuccccgaaa

SEQ ID NO: 999827 - RNA, 19 nt, Human
gaagccaccuggcuccgcc

SEQ ID NO: 999828 - RNA, 18 nt, Human
gaaucuguagaccacagu

SEQ ID NO: 999829 - RNA, 20 nt, Human
gagagagaaagagagagaga

SEQ ID NO: 999830 - RNA, 20 nt, Human
gagcacacccugaggucacc

SEQ ID NO: 999831 - RNA, 21 nt, Human
gagcaggugggagccauaaac

SEQ ID NO: 999832 - RNA, 22 nt, Human
gcuucgccgcccuucgcgcgcc

SEQ ID NO: 999833 - RNA, 18 nt, Human
ggaaucuguagaccacag

SEQ ID NO: 999834 - RNA, 22 nt, Human
ggucacagggggauggguuucc

SEQ ID NO: 999835 - RNA, 21 nt, Human
gucacacuuacaugaaucgcg

SEQ ID NO: 999836 - RNA, 19 nt, Human
gucacagggaggcucagga

SEQ ID NO: 999837 - RNA, 18 nt, Human
gucugugguucugcacuc

SEQ ID NO: 999838 - RNA, 30 nt, Human
uaaacuucuggcucugaggcgugcccacaa

SEQ ID NO: 999839 - RNA, 22 nt, Human
uaaaguaaaaacaaccgcuguu

SEQ ID NO: 999840 - RNA, 20 nt, Human
uaaauaaaguaaaaacaacc

SEQ ID NO: 999841 - RNA, 22 nt, Human
uacuccuggcuccuucuggucc

SEQ ID NO: 999842 - RNA, 21 nt, Human
ucacagggaggcucaggacgu

SEQ ID NO: 999843 - RNA, 22 nt, Human
uccccagcccguccacuccggu

SEQ ID NO: 999844 - RNA, 23 nt, Human
ucccuagaacccugcccaccacc

SEQ ID NO: 999845 - RNA, 24 nt, Human
ucccuagaacccugcccaccaccu

SEQ ID NO: 999846 - RNA, 21 nt, Human
ucccugaaaucgagucacacu

SEQ ID NO: 999847 - RNA, 21 nt, Human
ucgagacucaaguccccuguu

SEQ ID NO: 999848 - RNA, 20 nt, Human
ucgccgcccuucgcgcgccc

SEQ ID NO: 999849 - RNA, 24 nt, Human
ucuuuuucuuuuuuuuccccgaaa

SEQ ID NO: 999850 - RNA, 22 nt, Human
ucuuuuuuuuccccgaaagccc

SEQ ID NO: 999851 - RNA, 22 nt, Human
ucuuuuuuuuccccgaaagccc

SEQ ID NO: 999852 - RNA, 20 nt, Human
ugaggucacagggggauggg

SEQ ID NO: 999853 - RNA, 20 nt, Human
uggccaggggcggagcugga

SEQ ID NO: 999854 - RNA, 19 nt, Human
uggcuccgccucuuguguu

SEQ ID NO: 999855 - RNA, 18 nt, Human
uggcucugaggcgugccc

SEQ ID NO: 999856 - RNA, 18 nt, Human
ugggagccauaaacuucu

SEQ ID NO: 999857 - RNA, 20 nt, Human
ugggagccauaaacuucugg

SEQ ID NO: 999858 - RNA, 21 nt, Human
uuaaacauuuuauuuuagaug

SEQ ID NO: 999859 - RNA, 21 nt, Human
uuaaacauuuuauuuuagaug

SEQ ID NO: 999860 - RNA, 19 nt, Human
uucccuagaacccugccca

SEQ ID NO: 999861 - RNA, 24 nt, Human
uuggcuguugcccuaggcacagcc

SEQ ID NO: 999862 - RNA, 21 nt, Human
uuuccuggaaucuguagacca

SEQ ID NO: 999863 - RNA, 24 nt, Human
uuuuuuuuuuuuuuuuuuuauuuu

SEQ ID NO: 999864 - RNA, 24 nt, Human
uuuuuuuuuuuuuuuuuuuauuuu

SEQ ID NO: 999865 - RNA, 27 nt, Human
aaaaaaaaaaaaagaauuacugcaaac

SEQ ID NO: 999866 - RNA, 23 nt, Human
aaaaaaaaaagaauuacugcaaa

SEQ ID NO: 999867 - RNA, 18 nt, Human
aaagaauuacugcaaaca

SEQ ID NO: 999868 - RNA, 21 nt, Human
aacagcaccauauggagcaaa

SEQ ID NO: 999869 - RNA, 21 nt, Human
aacagugcgagacuccgucuc

SEQ ID NO: 999870 - RNA, 24 nt, Human
aacagugcgagacuccgucucaaa

SEQ ID NO: 999871 - RNA, 19 nt, Human
aacauggugaaaccccauc

SEQ ID NO: 999872 - RNA, 20 nt, Human
aacauggugaaaccccaucu

SEQ ID NO: 999873 - RNA, 21 nt, Human
aacauggugaaaccccaucuc

SEQ ID NO: 999874 - RNA, 21 nt, Human
aacauggugaaaccccaucuc

SEQ ID NO: 999875 - RNA, 19 nt, Human
aacuguuuccucccuccca

SEQ ID NO: 999876 - RNA, 24 nt, Human
aauugcuugaacucgggaggcgga

SEQ ID NO: 999877 - RNA, 24 nt, Human
acaggcagggcgcaguggcucacg

SEQ ID NO: 999878 - RNA, 24 nt, Human
acagugcgagacuccgucucaaaa

SEQ ID NO: 999879 - RNA, 23 nt, Human
accccauaggauuucaaaagcca

SEQ ID NO: 999880 - RNA, 24 nt, Human
accccaucucuacuaaaaauacaa

SEQ ID NO: 999881 - RNA, 18 nt, Human
acuacaaacaggcagggc

SEQ ID NO: 999882 - RNA, 18 nt, Human
acugcucuccagccuggg

SEQ ID NO: 999883 - RNA, 24 nt, Human
acugcucuccagccugggcaacag

SEQ ID NO: 999884 - RNA, 21 nt, Human
agaacagcaccauauggagca

SEQ ID NO: 999885 - RNA, 29 nt, Human
agagaccccauaggauuucaaaagccagg

SEQ ID NO: 999886 - RNA, 26 nt, Human
agagagcagcuggagaauguuuucau

SEQ ID NO: 999887 - RNA, 19 nt, Human
agaugauugcagcugcugc

SEQ ID NO: 999888 - RNA, 24 nt, Human
agcacuuugggaggccgagguggg

SEQ ID NO: 999889 - RNA, 24 nt, Human
agccugggcaacagugcgagacuc

SEQ ID NO: 999890 - RNA, 23 nt, Human
aggaguuugagaucugccuggcc

SEQ ID NO: 999891 - RNA, 24 nt, Human
aggcaggagaauugcuugaacucg

SEQ ID NO: 999892 - RNA, 21 nt, Human
aggccgaggugggugcaucac

SEQ ID NO: 999893 - RNA, 24 nt, Human
aggcggagcuugcagugagccaag

SEQ ID NO: 999894 - RNA, 21 nt, Human
aggcugaggcaggagaauugc

SEQ ID NO: 999895 - RNA, 24 nt, Human
aggcugaggcaggagaauugcuug

SEQ ID NO: 999896 - RNA, 24 nt, Human
aguggcucacgcauguaaucccag

SEQ ID NO: 999897 - RNA, 24 nt, Human
aucgcgccacugcucuccagccug

SEQ ID NO: 999898 - RNA, 23 nt, Human
auucugggcacagugugacauuu

SEQ ID NO: 999899 - RNA, 24 nt, Human
caacauggugaaaccccaucucua

SEQ ID NO: 999900 - RNA, 25 nt, Human
cacccuaaaaugcaaaucccaucac

SEQ ID NO: 999901 - RNA, 23 nt, Human
caccuguaaucccagcuacucgg

SEQ ID NO: 999902 - RNA, 24 nt, Human
caccuguaaucccagcuacucggg

SEQ ID NO: 999903 - RNA, 24 nt, Human
cacgcauguaaucccagcacuuug

SEQ ID NO: 999904 - RNA, 24 nt, Human
cacugcucuccagccugggcaaca

SEQ ID NO: 999905 - RNA, 22 nt, Human
cacuguagcuggcaaaggucug

SEQ ID NO: 999906 - RNA, 24 nt, Human
cagcacuuugggaggccgaggugg

SEQ ID NO: 999907 - RNA, 24 nt, Human
cagcuacucgggaggcugaggcag

SEQ ID NO: 999908 - RNA, 18 nt, Human
cagcuagaguacucaggc

SEQ ID NO: 999909 - RNA, 19 nt, Human
caucacgaggucaggaguu

SEQ ID NO: 999910 - RNA, 24 nt, Human
caucacgaggucaggaguuugaga

SEQ ID NO: 999911 - RNA, 24 nt, Human
cauucagagaccccauaggauuuc

SEQ ID NO: 999912 - RNA, 18 nt, Human
ccacugcucuccagccug

SEQ ID NO: 999913 - RNA, 21 nt, Human
ccacugcucuccagccugggc

SEQ ID NO: 999914 - RNA, 22 nt, Human
ccacugcucuccagccugggca

SEQ ID NO: 999915 - RNA, 23 nt, Human
ccacugcucuccagccugggcaa

SEQ ID NO: 999916 - RNA, 24 nt, Human
ccacugcucuccagccugggcaac

SEQ ID NO: 999917 - RNA, 18 nt, Human
cccaggaucugugcagcc

SEQ ID NO: 999918 - RNA, 22 nt, Human
ccugaacagagaggagaauggc

SEQ ID NO: 999919 - RNA, 23 nt, Human
ccuggccaacauggugaaacccc

SEQ ID NO: 999920 - RNA, 24 nt, Human
ccuggccaacauggugaaacccca

SEQ ID NO: 999921 - RNA, 21 nt, Human
ccuguaaucccagcuacucgg

SEQ ID NO: 999922 - RNA, 22 nt, Human
cgaggugggugcaucacgaggu

SEQ ID NO: 999923 - RNA, 19 nt, Human
cuacaaacaggcagggcgc

SEQ ID NO: 999924 - RNA, 24 nt, Human
cucacgcauguaaucccagcacuu

SEQ ID NO: 999925 - RNA, 18 nt, Human
cuccagccugggcaacag

SEQ ID NO: 999926 - RNA, 18 nt, Human
cuccagccugggcaacag

SEQ ID NO: 999927 - RNA, 19 nt, Human
cuccgucucaaaaaaaaaa

SEQ ID NO: 999928 - RNA, 23 nt, Human
cuggccaacauggugaaacccca

SEQ ID NO: 999929 - RNA, 21 nt, Human
cuguaaucccagcuacucggg

SEQ ID NO: 999930 - RNA, 20 nt, Human
cuuggcccaggaucugugca

SEQ ID NO: 999931 - RNA, 23 nt, Human
cuuggcccaggaucugugcagcc

SEQ ID NO: 999932 - RNA, 23 nt, Human
gagaauugcuugaacucgggagg

SEQ ID NO: 999933 - RNA, 23 nt, Human
gagaucugccuggccaacauggu

SEQ ID NO: 999934 - RNA, 18 nt, Human
gagcuugcagugagccaa

SEQ ID NO: 999935 - RNA, 23 nt, Human
gagcuugcagugagccaagaucg

SEQ ID NO: 999936 - RNA, 23 nt, Human
gaggugggugcaucacgagguca

SEQ ID NO: 999937 - RNA, 19 nt, Human
gcaaaagagagcagcugga

SEQ ID NO: 999938 - RNA, 18 nt, Human
gcagccagaugcgauggc

SEQ ID NO: 999939 - RNA, 20 nt, Human
gcaucacgaggucaggaguu

SEQ ID NO: 999940 - RNA, 23 nt, Human
gcaucacgaggucaggaguuuga

SEQ ID NO: 999941 - RNA, 24 nt, Human
gccaacauggugaaaccccaucuc

SEQ ID NO: 999942 - RNA, 22 nt, Human
gccacugcucuccagccugggc

SEQ ID NO: 999943 - RNA, 24 nt, Human
gccacugcucuccagccugggcaa

SEQ ID NO: 999944 - RNA, 23 nt, Human
gccuggccaacauggugaaaccc

SEQ ID NO: 999945 - RNA, 20 nt, Human
gcgcaguggcucacgcaugu

SEQ ID NO: 999946 - RNA, 24 nt, Human
ggagcuugcagugagccaagaucg

SEQ ID NO: 999947 - RNA, 19 nt, Human
ggcaccuguaaucccagcu

SEQ ID NO: 999948 - RNA, 18 nt, Human
ggcagggcgcaguggcuc

SEQ ID NO: 999949 - RNA, 23 nt, Human
ggcgcaguggcucacgcauguaa

SEQ ID NO: 999950 - RNA, 18 nt, Human
gggcgcaguggcucacgc

SEQ ID NO: 999951 - RNA, 24 nt, Human
gggugugguggcaggcaccuguaa

SEQ ID NO: 999952 - RNA, 24 nt, Human
gguggcaggcaccuguaaucccag

SEQ ID NO: 999953 - RNA, 20 nt, Human
gucucaaaaaaaaaaaaaag

SEQ ID NO: 999954 - RNA, 21 nt, Human
gugacauuuaccugaacagag

SEQ ID NO: 999955 - RNA, 24 nt, Human
guggcucacgcauguaaucccagc

SEQ ID NO: 999956 - RNA, 22 nt, Human
uaaaaauacaaaacauuagcug

SEQ ID NO: 999957 - RNA, 20 nt, Human
uaacucugcaaucuuuucag

SEQ ID NO: 999958 - RNA, 23 nt, Human
uacaaacaggcagggcgcagugg

SEQ ID NO: 999959 - RNA, 19 nt, Human
uagaagaugagggagauuu

SEQ ID NO: 999960 - RNA, 21 nt, Human
uauggagcaaaagagagcagc

SEQ ID NO: 999961 - RNA, 24 nt, Human
ucacgaggucaggaguuugagauc

SEQ ID NO: 999962 - RNA, 18 nt, Human
ucagacaagagaaccacg

SEQ ID NO: 999963 - RNA, 20 nt, Human
ucagacaagagaaccacgcc

SEQ ID NO: 999964 - RNA, 22 nt, Human
uccgucucaaaaaaaaaaaaaa

SEQ ID NO: 999965 - RNA, 23 nt, Human
uccgucucaaaaaaaaaaaaaag

SEQ ID NO: 999966 - RNA, 25 nt, Human
uccgucucaaaaaaaaaaaaaagaa

SEQ ID NO: 999967 - RNA, 23 nt, Human
ucgcgccacugcucuccagccug

SEQ ID NO: 999968 - RNA, 23 nt, Human
ucgggaggcugaggcaggagaau

SEQ ID NO: 999969 - RNA, 21 nt, Human
ucuccagccugggcaacagug

SEQ ID NO: 999970 - RNA, 20 nt, Human
ucucuacuaaaaauacaaaa

SEQ ID NO: 999971 - RNA, 19 nt, Human
ucugcaaucuuuucagcca

SEQ ID NO: 999972 - RNA, 23 nt, Human
ucugcaaucuuuucagccacucu

SEQ ID NO: 999973 - RNA, 21 nt, Human
ucuucugucccuuggcccagg

SEQ ID NO: 999974 - RNA, 19 nt, Human
ugaaaccccaucucuacua

SEQ ID NO: 999975 - RNA, 22 nt, Human
ugagccaagaucgcgccacugc

SEQ ID NO: 999976 - RNA, 23 nt, Human
ugaggcaggagaauugcuugaac

SEQ ID NO: 999977 - RNA, 25 nt, Human
ugaggcaggagaauugcuugaacuc

SEQ ID NO: 999978 - RNA, 20 nt, Human
ugcaaaucccaucacuguag

SEQ ID NO: 999979 - RNA, 21 nt, Human
ugcaucacgaggucaggaguu

SEQ ID NO: 999980 - RNA, 22 nt, Human
ugcaucacgaggucaggaguuu

SEQ ID NO: 999981 - RNA, 24 nt, Human
ugcaucacgaggucaggaguuuga

SEQ ID NO: 999982 - RNA, 23 nt, Human
ugccuaaaaauuacuacaaacag

SEQ ID NO: 999983 - RNA, 25 nt, Human
ugcgauggcgacaaggcagcuagag

SEQ ID NO: 999984 - RNA, 28 nt, Human
ugcgauggcgacaaggcagcuagaguac

SEQ ID NO: 999985 - RNA, 21 nt, Human
uggagcaaaagagagcagcug

SEQ ID NO: 999986 - RNA, 19 nt, Human
uggcagccagaugcgaugg

SEQ ID NO: 999987 - RNA, 24 nt, Human
uggccaacauggugaaaccccauc

SEQ ID NO: 999988 - RNA, 19 nt, Human
uggcgacaaggcagcuaga

SEQ ID NO: 999989 - RNA, 21 nt, Human
uggcucacgcauguaauccca

SEQ ID NO: 999990 - RNA, 22 nt, Human
uggcucacgcauguaaucccag

SEQ ID NO: 999991 - RNA, 24 nt, Human
uggcucacgcauguaaucccagca

SEQ ID NO: 999992 - RNA, 19 nt, Human
ugggaggccgaggugggug

SEQ ID NO: 999993 - RNA, 24 nt, Human
ugguggcaggcaccuguaauccca

SEQ ID NO: 999994 - RNA, 20 nt, Human
uguaaucccagcacuuuggg

SEQ ID NO: 999995 - RNA, 18 nt, Human
ugucuuucuucugucccu

SEQ ID NO: 999996 - RNA, 19 nt, Human
ugugguggcaggcaccugu

SEQ ID NO: 999997 - RNA, 18 nt, Human
uuagcugggugugguggc

SEQ ID NO: 999998 - RNA, 24 nt, Human
uuagcugggugugguggcaggcac

SEQ ID NO: 999999 - RNA, 22 nt, Human
uugcagugagccaagaucgcgc

SEQ ID NO: 1000000 - RNA, 18 nt, Human
uugcuugaacucgggagg

SEQ ID NO: 1000001 - RNA, 23 nt, Human
uugcuugaacucgggaggcggag

SEQ ID NO: 1000002 - RNA, 21 nt, Human
caccuucugcagagccaggag

SEQ ID NO: 1000003 - RNA, 19 nt, Human
cagguggccugcaguaagc

SEQ ID NO: 1000004 - RNA, 21 nt, Human
cccacaccuucugcagagcca

SEQ ID NO: 1000005 - RNA, 22 nt, Human
cccgcacagcgccuagugcacc

SEQ ID NO: 1000006 - RNA, 23 nt, Human
ccugcaguaagcagaaggcccac

SEQ ID NO: 1000007 - RNA, 21 nt, Human
ccuggccgagcgcucgcugcc

SEQ ID NO: 1000008 - RNA, 19 nt, Human
cgccuagugcaccuggccg

SEQ ID NO: 1000009 - RNA, 18 nt, Human
gaauuugagaaacccccc

SEQ ID NO: 1000010 - RNA, 20 nt, Human
gcaguaagcagaaggcccac

SEQ ID NO: 1000011 - RNA, 26 nt, Human
gccgagcgcucgcugccgggaaaggc

SEQ ID NO: 1000012 - RNA, 25 nt, Human
uaagcagaaggcccacaccuucugc

SEQ ID NO: 1000013 - RNA, 19 nt, Human
ucugcagagccaggagcag

SEQ ID NO: 1000014 - RNA, 22 nt, Human
uggcagguggccugcaguaagc

SEQ ID NO: 1000015 - RNA, 18 nt, Human
uuuagaauuugagaaacc

SEQ ID NO: 1000016 - RNA, 18 nt, Human
aaaaaaaccccuucauau

SEQ ID NO: 1000017 - RNA, 22 nt, Human
aaaaagaaaacaaagcaaaaaa

SEQ ID NO: 1000018 - RNA, 26 nt, Human
aaaacaaagcaaaaaaaaaaaaaccc

SEQ ID NO: 1000019 - RNA, 21 nt, Human
aaaauggcaaacagucauaaa

SEQ ID NO: 1000020 - RNA, 25 nt, Human
aaacauaugaaacagaccuauaaag

SEQ ID NO: 1000021 - RNA, 21 nt, Human
aaaccaacaguauuaccacuu

SEQ ID NO: 1000022 - RNA, 31 nt, Human
aaagaaaacaaagcaaaaaaaaaaaaacccc

SEQ ID NO: 1000023 - RNA, 21 nt, Human
aaaguuuuuaagcaucaugau

SEQ ID NO: 1000024 - RNA, 19 nt, Human
aacauagccaauuuauuaa

SEQ ID NO: 1000025 - RNA, 20 nt, Human
aacggggcaguuuguuuccc

SEQ ID NO: 1000026 - RNA, 18 nt, Human
aagaaaacaaagcaaaaa

SEQ ID NO: 1000027 - RNA, 18 nt, Human
aagaacacacaaaaaagg

SEQ ID NO: 1000028 - RNA, 21 nt, Human
aagcuaccauucacaggauua

SEQ ID NO: 1000029 - RNA, 19 nt, Human
aaguuuaaaacccugcaac

SEQ ID NO: 1000030 - RNA, 22 nt, Human
acaaagcaaaaaaaaaaaaacc

SEQ ID NO: 1000031 - RNA, 24 nt, Human
acaaagcaaaaaaaaaaaaacccc

SEQ ID NO: 1000032 - RNA, 18 nt, Human
accagaaaccauuuucca

SEQ ID NO: 1000033 - RNA, 25 nt, Human
accagagccagccuccuccaaucug

SEQ ID NO: 1000034 - RNA, 24 nt, Human
accauuaaaaaaaauggcaaacag

SEQ ID NO: 1000035 - RNA, 22 nt, Human
acccugcaacauuuacagaaac

SEQ ID NO: 1000036 - RNA, 21 nt, Human
acuaaguaccauuaaaaaaaa

SEQ ID NO: 1000037 - RNA, 28 nt, Human
acuauucauuaaacaaugauaaauaacc

SEQ ID NO: 1000038 - RNA, 18 nt, Human
agacaagagucuagccug

SEQ ID NO: 1000039 - RNA, 18 nt, Human
agacacgugugaaaacau

SEQ ID NO: 1000040 - RNA, 21 nt, Human
agacacgugugaaaacauggu

SEQ ID NO: 1000041 - RNA, 22 nt, Human
agaguuuuuuuuaacccuaaag

SEQ ID NO: 1000042 - RNA, 24 nt, Human
agccaccaccgucauucuuggaaa

SEQ ID NO: 1000043 - RNA, 19 nt, Human
agcuccccgcagcccgcag

SEQ ID NO: 1000044 - RNA, 23 nt, Human
agcugggaucauuuugcaagaca

SEQ ID NO: 1000045 - RNA, 23 nt, Human
agguacucaguaaauaugaaugu

SEQ ID NO: 1000046 - RNA, 18 nt, Human
agugcucauagcaugugu

SEQ ID NO: 1000047 - RNA, 20 nt, Human
auaaaacauaugaaacagac

SEQ ID NO: 1000048 - RNA, 22 nt, Human
auaaaacaugacuaacuuucuu

SEQ ID NO: 1000049 - RNA, 25 nt, Human
auagagucuacaaaaagauuuuucc

SEQ ID NO: 1000050 - RNA, 19 nt, Human
auauauauauauauauaua

SEQ ID NO: 1000051 - RNA, 19 nt, Human
augcuuucaagauaacaca

SEQ ID NO: 1000052 - RNA, 19 nt, Human
auucuagaauauuaauagc

SEQ ID NO: 1000053 - RNA, 23 nt, Human
auuucuggauggucaagugacuc

SEQ ID NO: 1000054 - RNA, 23 nt, Human
caaaagcauugaguuuaaggcug

SEQ ID NO: 1000055 - RNA, 26 nt, Human
caaagcaaaaaaaaaaaaaccccuuc

SEQ ID NO: 1000056 - RNA, 21 nt, Human
caagaaauacaguaaaugcac

SEQ ID NO: 1000057 - RNA, 19 nt, Human
caagugacucucugccucc

SEQ ID NO: 1000058 - RNA, 22 nt, Human
caagugacucucugccucccca

SEQ ID NO: 1000059 - RNA, 23 nt, Human
cacuuauuuuaauauccuucuca

SEQ ID NO: 1000060 - RNA, 22 nt, Human
cagaaggccauuuucugacuaa

SEQ ID NO: 1000061 - RNA, 20 nt, Human
cagagcugggaucauuuugc

SEQ ID NO: 1000062 - RNA, 22 nt, Human
cagcacuuucccccaaaaauau

SEQ ID NO: 1000063 - RNA, 24 nt, Human
cauacaaacacuuugaugcacagc

SEQ ID NO: 1000064 - RNA, 19 nt, Human
cauucuccacaaacagacc

SEQ ID NO: 1000065 - RNA, 19 nt, Human
ccaaccggcaauauuuugc

SEQ ID NO: 1000066 - RNA, 26 nt, Human
cccaaaaauaugcuuaccaagaaaua

SEQ ID NO: 1000067 - RNA, 20 nt, Human
ccccauguccagcaaggggg

SEQ ID NO: 1000068 - RNA, 20 nt, Human
ccccgcagcccgcagacaac

SEQ ID NO: 1000069 - RNA, 19 nt, Human
cccugcacgcugcugcugc

SEQ ID NO: 1000070 - RNA, 22 nt, Human
cccugcacgcugcugcugcguu

SEQ ID NO: 1000071 - RNA, 27 nt, Human
cccugcacgcugcugcugcguuccaua

SEQ ID NO: 1000072 - RNA, 19 nt, Human
ccuacuguaaaagugaggu

SEQ ID NO: 1000073 - RNA, 26 nt, Human
cuagugaauagagaggguacuauaga

SEQ ID NO: 1000074 - RNA, 24 nt, Human
cucaaguauuuuuuaaaacucuac

SEQ ID NO: 1000075 - RNA, 26 nt, Human
cuccaaagggcuacuuauggcucucu

SEQ ID NO: 1000076 - RNA, 18 nt, Human
cuccacaaacagaccaau

SEQ ID NO: 1000077 - RNA, 24 nt, Human
cugucauugaaaacaaaacaaaua

SEQ ID NO: 1000078 - RNA, 24 nt, Human
cuuggaaaguucaccaaugauucc

SEQ ID NO: 1000079 - RNA, 21 nt, Human
cuuugguugacaccaucaguc

SEQ ID NO: 1000080 - RNA, 23 nt, Human
gaagaccccaaagucacuaucaa

SEQ ID NO: 1000081 - RNA, 24 nt, Human
gaagaguuuuuuuuaacccuaaag

SEQ ID NO: 1000082 - RNA, 23 nt, Human
gcagcacuuucccccaaaaauau

SEQ ID NO: 1000083 - RNA, 21 nt, Human
gccggcugucuuugacccugc

SEQ ID NO: 1000084 - RNA, 18 nt, Human
gcuuucauacauucucca

SEQ ID NO: 1000085 - RNA, 22 nt, Human
guaauuauaaaguuuaaaaccc

SEQ ID NO: 1000086 - RNA, 19 nt, Human
guauauauauauauauaua

SEQ ID NO: 1000087 - RNA, 19 nt, Human
guguauauauauauauaua

SEQ ID NO: 1000088 - RNA, 20 nt, Human
guguguauauauauauauau

SEQ ID NO: 1000089 - RNA, 23 nt, Human
uaaaagaacaaaugacgagaaua

SEQ ID NO: 1000090 - RNA, 18 nt, Human
uaaaugcacauauguauc

SEQ ID NO: 1000091 - RNA, 25 nt, Human
uaaauuaaaauaaggaaacuuaggg

SEQ ID NO: 1000092 - RNA, 19 nt, Human
uaacauauauaaucacaua

SEQ ID NO: 1000093 - RNA, 27 nt, Human
uaacccagaaagguugagaaauuugca

SEQ ID NO: 1000094 - RNA, 18 nt, Human
uaagaucaacagccuggg

SEQ ID NO: 1000095 - RNA, 24 nt, Human
uaauaagcaauaaacaucacauuc

SEQ ID NO: 1000096 - RNA, 21 nt, Human
uacacuccauugaugacagaa

SEQ ID NO: 1000097 - RNA, 21 nt, Human
uaccuguaaugcuuucaagau

SEQ ID NO: 1000098 - RNA, 18 nt, Human
uacuacaugugcugacau

SEQ ID NO: 1000099 - RNA, 20 nt, Human
uagcauuacuuuuguaauau

SEQ ID NO: 1000100 - RNA, 21 nt, Human
uagcuacauaaauccuguccc

SEQ ID NO: 1000101 - RNA, 27 nt, Human
uagguuaaaugaaguauauaacuacaa

SEQ ID NO: 1000102 - RNA, 21 nt, Human
uaguggaagcaaguguguucu

SEQ ID NO: 1000103 - RNA, 23 nt, Human
uauauauauauauauauaauaca

SEQ ID NO: 1000104 - RNA, 19 nt, Human
uauauauauauauauauau

SEQ ID NO: 1000105 - RNA, 18 nt, Human
uaucaaaaaugucaaaca

SEQ ID NO: 1000106 - RNA, 22 nt, Human
uaucaaaaaugucaaacaugac

SEQ ID NO: 1000107 - RNA, 24 nt, Human
ucacugauguuaggaaacaguguc

SEQ ID NO: 1000108 - RNA, 18 nt, Human
ucaguagaagaguuuuuu

SEQ ID NO: 1000109 - RNA, 19 nt, Human
ucagugaagaagaccccaa

SEQ ID NO: 1000110 - RNA, 19 nt, Human
ucauaaaagaacaaaugac

SEQ ID NO: 1000111 - RNA, 22 nt, Human
ucauacauucuccacaaacaga

SEQ ID NO: 1000112 - RNA, 19 nt, Human
ucauagcauguguuuuagc

SEQ ID NO: 1000113 - RNA, 18 nt, Human
ucauguauacauaguccc

SEQ ID NO: 1000114 - RNA, 21 nt, Human
ucauugaaaacaaaacaaaua

SEQ ID NO: 1000115 - RNA, 20 nt, Human
uccacaaacagaccaaucac

SEQ ID NO: 1000116 - RNA, 23 nt, Human
ucccccaaaaauaugcuuaccaa

SEQ ID NO: 1000117 - RNA, 18 nt, Human
ucccugggucuugugacc

SEQ ID NO: 1000118 - RNA, 19 nt, Human
ucuuggaaaauggcaaaaa

SEQ ID NO: 1000119 - RNA, 25 nt, Human
ucuuuauuuauaccaaacaaaucuu

SEQ ID NO: 1000120 - RNA, 23 nt, Human
ugaaagcacagaaggccauuuuc

SEQ ID NO: 1000121 - RNA, 19 nt, Human
ugaagaagaccccaaaguc

SEQ ID NO: 1000122 - RNA, 18 nt, Human
ugacauggggggccggcu

SEQ ID NO: 1000123 - RNA, 24 nt, Human
ugagaaauuugcacugauacuuaa

SEQ ID NO: 1000124 - RNA, 21 nt, Human
ugagauuuugugcaugguaaa

SEQ ID NO: 1000125 - RNA, 20 nt, Human
ugcacauauguauccaagug

SEQ ID NO: 1000126 - RNA, 21 nt, Human
ugcagaacguuaguacguggc

SEQ ID NO: 1000127 - RNA, 19 nt, Human
ugcuguacauucauuggaa

SEQ ID NO: 1000128 - RNA, 24 nt, Human
uggcaaaaauuaaaucugcuuuag

SEQ ID NO: 1000129 - RNA, 20 nt, Human
ugggcauaauaaauuuaaca

SEQ ID NO: 1000130 - RNA, 24 nt, Human
uggguuuuuuaugugugugugugg

SEQ ID NO: 1000131 - RNA, 18 nt, Human
uguauauauauauauaua

SEQ ID NO: 1000132 - RNA, 22 nt, Human
uguauauauauauauauauaua

SEQ ID NO: 1000133 - RNA, 22 nt, Human
ugucagagagugcaagacuuag

SEQ ID NO: 1000134 - RNA, 18 nt, Human
uguguauauauauauaua

SEQ ID NO: 1000135 - RNA, 20 nt, Human
uguguauauauauauauaua

SEQ ID NO: 1000136 - RNA, 20 nt, Human
uguguauauauauauauaua

SEQ ID NO: 1000137 - RNA, 22 nt, Human
uguguauauauauauauauaua

SEQ ID NO: 1000138 - RNA, 18 nt, Human
uguguguauauauauaua

SEQ ID NO: 1000139 - RNA, 18 nt, Human
uguguguguauauauaua

SEQ ID NO: 1000140 - RNA, 23 nt, Human
uguguguguguauauauauauau

SEQ ID NO: 1000141 - RNA, 24 nt, Human
uguuuugcuuuuggaaguucugug

SEQ ID NO: 1000142 - RNA, 21 nt, Human
uuagcuccccgcagcccgcag

SEQ ID NO: 1000143 - RNA, 19 nt, Human
uuaguucuggagacuaaag

SEQ ID NO: 1000144 - RNA, 23 nt, Human
uucauauucauacauaggcuuga

SEQ ID NO: 1000145 - RNA, 22 nt, Human
uuccuccaauuaacuaaguagg

SEQ ID NO: 1000146 - RNA, 26 nt, Human
uucuccacaaacagaccaaucacugg

SEQ ID NO: 1000147 - RNA, 21 nt, Human
uuugccuuacgugcccagggg

SEQ ID NO: 1000148 - RNA, 23 nt, Human
uuugugcagaacguuaguacgug

SEQ ID NO: 1000149 - RNA, 21 nt, Human
uuugugcaugguaaagagaua

SEQ ID NO: 1000150 - RNA, 18 nt, Human
uuuguuuugcuuuuggaa

SEQ ID NO: 1000151 - RNA, 21 nt, Human
uuuuucagagguugauuuggg

SEQ ID NO: 1000152 - RNA, 22 nt, Human
uuuuuuuugaaagcacagaagg

SEQ ID NO: 1000153 - RNA, 25 nt, Human
aaaaagaaaacagaacaaaaacaaa

SEQ ID NO: 1000154 - RNA, 26 nt, Human
aaaaagaaaacagaacaaaaacaaaa

SEQ ID NO: 1000155 - RNA, 25 nt, Human
aaaagaaaacagaacaaaaacaaaa

SEQ ID NO: 1000156 - RNA, 27 nt, Human
aaaagaaaacagaacaaaaacaaaaaa

SEQ ID NO: 1000157 - RNA, 25 nt, Human
aaaagaaggggaaagaaaggaagag

SEQ ID NO: 1000158 - RNA, 18 nt, Human
aaaagggaaaacuugggc

SEQ ID NO: 1000159 - RNA, 23 nt, Human
aaacaaaaaauuguuucccaaga

SEQ ID NO: 1000160 - RNA, 21 nt, Human
aaacagaacaaaaacaaaaaa

SEQ ID NO: 1000161 - RNA, 23 nt, Human
aaacuccugcagugcuucagucc

SEQ ID NO: 1000162 - RNA, 23 nt, Human
aaaugaggaagaaaagaaaagga

SEQ ID NO: 1000163 - RNA, 21 nt, Human
aagaaaacagaacaaaaacaa

SEQ ID NO: 1000164 - RNA, 22 nt, Human
aagcaaaaagaaaacagaacaa

SEQ ID NO: 1000165 - RNA, 25 nt, Human
aagcaaaaagaaaacagaacaaaaa

SEQ ID NO: 1000166 - RNA, 24 nt, Human
aagugccuuacauuuaauaaaagu

SEQ ID NO: 1000167 - RNA, 26 nt, Human
acaagccaaggagagaggcauggaac

SEQ ID NO: 1000168 - RNA, 20 nt, Human
agaaaagaaaaggaauuaca

SEQ ID NO: 1000169 - RNA, 24 nt, Human
agaacacucaggagcucggugggg

SEQ ID NO: 1000170 - RNA, 25 nt, Human
agacauucuaaguaaaagaagggga

SEQ ID NO: 1000171 - RNA, 21 nt, Human
agagcccuuccuugcagaccu

SEQ ID NO: 1000172 - RNA, 23 nt, Human
agauuugggauuuccagcccaca

SEQ ID NO: 1000173 - RNA, 22 nt, Human
aggaaugagaacacucaggagc

SEQ ID NO: 1000174 - RNA, 25 nt, Human
aggcauuagcggugggcccugagcc

SEQ ID NO: 1000175 - RNA, 22 nt, Human
auuucauuaaggcauuagcggu

SEQ ID NO: 1000176 - RNA, 24 nt, Human
caaaaagaaaacagaacaaaaaca

SEQ ID NO: 1000177 - RNA, 21 nt, Human
caaugugaagagucauaggga

SEQ ID NO: 1000178 - RNA, 24 nt, Human
cagaacaaaaacaaaaaauuguuu

SEQ ID NO: 1000179 - RNA, 18 nt, Human
cagaaucugagucucagc

SEQ ID NO: 1000180 - RNA, 23 nt, Human
caggucgagaaaagcgacaucca

SEQ ID NO: 1000181 - RNA, 21 nt, Human
caguagagaugaacucaggug

SEQ ID NO: 1000182 - RNA, 23 nt, Human
ccucagaaacucugagcauuaaa

SEQ ID NO: 1000183 - RNA, 23 nt, Human
ccugcagugcuucaguccaaagc

SEQ ID NO: 1000184 - RNA, 24 nt, Human
ccuucuacaagccaaggagagagg

SEQ ID NO: 1000185 - RNA, 22 nt, Human
cgagaaaagcgacauccagaga

SEQ ID NO: 1000186 - RNA, 20 nt, Human
cuucuacaagccaaggagag

SEQ ID NO: 1000187 - RNA, 23 nt, Human
gaaaauacaccaaaauacauuaa

SEQ ID NO: 1000188 - RNA, 22 nt, Human
gaaauaaggucuuuguagagaa

SEQ ID NO: 1000189 - RNA, 30 nt, Human
gaagcaaaaagaaaacagaacaaaaacaaa

SEQ ID NO: 1000190 - RNA, 23 nt, Human
gagaaaagcgacauccagagaac

SEQ ID NO: 1000191 - RNA, 22 nt, Human
gauuuccagcccacaguacggc

SEQ ID NO: 1000192 - RNA, 21 nt, Human
gcggugggcccugagccagua

SEQ ID NO: 1000193 - RNA, 18 nt, Human
ggcacagagauguacaua

SEQ ID NO: 1000194 - RNA, 19 nt, Human
ggguaaaggaaugagaaca

SEQ ID NO: 1000195 - RNA, 21 nt, Human
uaaaaagggaaaacuugggca

SEQ ID NO: 1000196 - RNA, 22 nt, Human
uacuacuagugaaaccaagggg

SEQ ID NO: 1000197 - RNA, 19 nt, Human
uaugaugcuuugcuaugga

SEQ ID NO: 1000198 - RNA, 20 nt, Human
ucaguaauaaucagaacaau

SEQ ID NO: 1000199 - RNA, 21 nt, Human
ucaguagagaugaacucaggu

SEQ ID NO: 1000200 - RNA, 22 nt, Human
uccaaagcagaggagucuugaa

SEQ ID NO: 1000201 - RNA, 30 nt, Human
ucccaauaccuccaaauauuaucuuauuuu

SEQ ID NO: 1000202 - RNA, 20 nt, Human
uccuucugucuugacucuug

SEQ ID NO: 1000203 - RNA, 23 nt, Human
ucucagcacaagggcuacuaugc

SEQ ID NO: 1000204 - RNA, 25 nt, Human
ucucuugcaagaaaggguaagauug

SEQ ID NO: 1000205 - RNA, 26 nt, Human
ugaaaagauaaaauuugaccucaauu

SEQ ID NO: 1000206 - RNA, 26 nt, Human
ugaaaccaagguauuaggaaaauaau

SEQ ID NO: 1000207 - RNA, 19 nt, Human
ugaaauacggauaagcagg

SEQ ID NO: 1000208 - RNA, 19 nt, Human
ugaaauggcugacaucuuu

SEQ ID NO: 1000209 - RNA, 18 nt, Human
ugaagcaaaaagaaaaca

SEQ ID NO: 1000210 - RNA, 18 nt, Human
ugaggaagaaaagaaaag

SEQ ID NO: 1000211 - RNA, 20 nt, Human
ugcagaaucugagucucagc

SEQ ID NO: 1000212 - RNA, 25 nt, Human
ugcagaaucugagucucagcacaag

SEQ ID NO: 1000213 - RNA, 22 nt, Human
ugcagaccucagaaagaaccaa

SEQ ID NO: 1000214 - RNA, 18 nt, Human
ugcuauggaagcccuagc

SEQ ID NO: 1000215 - RNA, 21 nt, Human
ugcuuugcuauggaagcccua

SEQ ID NO: 1000216 - RNA, 25 nt, Human
uggaacagagcccuuccuugcagac

SEQ ID NO: 1000217 - RNA, 18 nt, Human
ugggcacacagucauggg

SEQ ID NO: 1000218 - RNA, 23 nt, Human
ugguuugugacauugaaaaauga

SEQ ID NO: 1000219 - RNA, 29 nt, Human
uugaccucagaaacucugagcauuaaaaa

SEQ ID NO: 1000220 - RNA, 19 nt, Human
uuuuuuuuuuagagccagc

SEQ ID NO: 1000221 - RNA, 29 nt, Human
aaacuagaggcagaaauaagagggacccc

SEQ ID NO: 1000222 - RNA, 21 nt, Human
aaaguggaaccuggaugcugg

SEQ ID NO: 1000223 - RNA, 21 nt, Human
aacuagaggcagaaauaagau

SEQ ID NO: 1000224 - RNA, 25 nt, Human
aaggaaccugggggguuuaagggaa

SEQ ID NO: 1000225 - RNA, 23 nt, Human
aagugaccacugaggcccagagc

SEQ ID NO: 1000226 - RNA, 20 nt, Human
acagcaaaaugaucuuaggc

SEQ ID NO: 1000227 - RNA, 26 nt, Human
accagcaggaggugggaaaagagccc

SEQ ID NO: 1000228 - RNA, 18 nt, Human
acucugugcccagcacug

SEQ ID NO: 1000229 - RNA, 28 nt, Human
agcaugugacacacacaaagugggcaac

SEQ ID NO: 1000230 - RNA, 23 nt, Human
aggcccagagccguuggaacagg

SEQ ID NO: 1000231 - RNA, 24 nt, Human
aggggcaccuggacagagguuggg

SEQ ID NO: 1000232 - RNA, 18 nt, Human
aggguggaggacuuaaaa

SEQ ID NO: 1000233 - RNA, 18 nt, Human
auggaaggcaacuacagc

SEQ ID NO: 1000234 - RNA, 18 nt, Human
augugacacacacaaagu

SEQ ID NO: 1000235 - RNA, 21 nt, Human
auucaacaagucuuuauugag

SEQ ID NO: 1000236 - RNA, 18 nt, Human
auuccagagagugcagag

SEQ ID NO: 1000237 - RNA, 18 nt, Human
auucuuaguucagagagg

SEQ ID NO: 1000238 - RNA, 19 nt, Human
auugaucagugaucacagc

SEQ ID NO: 1000239 - RNA, 19 nt, Human
caaaacuagaggcagaaau

SEQ ID NO: 1000240 - RNA, 24 nt, Human
caagugaccacugaggcccagagc

SEQ ID NO: 1000241 - RNA, 18 nt, Human
caaugguggucaagugac

SEQ ID NO: 1000242 - RNA, 23 nt, Human
caccauuacccuucucuccauuc

SEQ ID NO: 1000243 - RNA, 18 nt, Human
cacccugcuggggaaccc

SEQ ID NO: 1000244 - RNA, 23 nt, Human
cacccugcuggggaacccgguca

SEQ ID NO: 1000245 - RNA, 20 nt, Human
cacucucuccuaggaaagug

SEQ ID NO: 1000246 - RNA, 23 nt, Human
cacugagugagauuucagggggc

SEQ ID NO: 1000247 - RNA, 20 nt, Human
cagcgcgcacccugcuaugg

SEQ ID NO: 1000248 - RNA, 22 nt, Human
cagcgcgcacccugcuaugguu

SEQ ID NO: 1000249 - RNA, 22 nt, Human
caucccguccccccauugagag

SEQ ID NO: 1000250 - RNA, 22 nt, Human
caucuccacucucuccuaggaa

SEQ ID NO: 1000251 - RNA, 20 nt, Human
caugugacacacacaaagug

SEQ ID NO: 1000252 - RNA, 25 nt, Human
cauucaacaagucuuuauugagcac

SEQ ID NO: 1000253 - RNA, 21 nt, Human
ccaaagaagugaagcaucuga

SEQ ID NO: 1000254 - RNA, 20 nt, Human
ccacuggauguuugucuugg

SEQ ID NO: 1000255 - RNA, 24 nt, Human
cccaucuccacucucuccuaggaa

SEQ ID NO: 1000256 - RNA, 20 nt, Human
ccccaaagccguguaugucu

SEQ ID NO: 1000257 - RNA, 21 nt, Human
ccccccauugagaguccugga

SEQ ID NO: 1000258 - RNA, 26 nt, Human
ccccucacaaggaccaaucuagagau

SEQ ID NO: 1000259 - RNA, 19 nt, Human
cccugcuccaggugcuuag

SEQ ID NO: 1000260 - RNA, 18 nt, Human
ccguguaugucuggaucc

SEQ ID NO: 1000261 - RNA, 19 nt, Human
ccuaagaccacagauagcu

SEQ ID NO: 1000262 - RNA, 24 nt, Human
ccuaagaccacagauagcuccagg

SEQ ID NO: 1000263 - RNA, 21 nt, Human
ccucauggacuccagggucag

SEQ ID NO: 1000264 - RNA, 26 nt, Human
ccuccugcugccuuccuuucccuguc

SEQ ID NO: 1000265 - RNA, 21 nt, Human
ccugcugccuuccuuucccug

SEQ ID NO: 1000266 - RNA, 22 nt, Human
ccuuuuaugccgucaguauauu

SEQ ID NO: 1000267 - RNA, 24 nt, Human
cuacucugugcccagcacugcacu

SEQ ID NO: 1000268 - RNA, 23 nt, Human
cuuguggccuccugcugccuucc

SEQ ID NO: 1000269 - RNA, 21 nt, Human
gaagacauguuacucccucuc

SEQ ID NO: 1000270 - RNA, 21 nt, Human
gaaggaaccugggggguuuaa

SEQ ID NO: 1000271 - RNA, 20 nt, Human
gaaguucccucgggaaacca

SEQ ID NO: 1000272 - RNA, 19 nt, Human
gacauguuacucccucucu

SEQ ID NO: 1000273 - RNA, 26 nt, Human
gccagagacagaggcuuaacacccug

SEQ ID NO: 1000274 - RNA, 21 nt, Human
gcugggggcagaugucagggg

SEQ ID NO: 1000275 - RNA, 18 nt, Human
ggaugaacaggggcuggc

SEQ ID NO: 1000276 - RNA, 22 nt, Human
ggcuauggaaauaugcucagcc

SEQ ID NO: 1000277 - RNA, 22 nt, Human
ggcugggggcagaugucagggc

SEQ ID NO: 1000278 - RNA, 18 nt, Human
gggcaagaaaaugcugca

SEQ ID NO: 1000279 - RNA, 21 nt, Human
gggcaguagauggagcaacag

SEQ ID NO: 1000280 - RNA, 18 nt, Human
gggcugggggcagauguc

SEQ ID NO: 1000281 - RNA, 21 nt, Human
ggguccccugcuccaggugcu

SEQ ID NO: 1000282 - RNA, 21 nt, Human
gguaggucuguuuaaaaugcc

SEQ ID NO: 1000283 - RNA, 24 nt, Human
gugcaagaaggaaccugggggguu

SEQ ID NO: 1000284 - RNA, 23 nt, Human
guggaggacuuaaaacuuggaug

SEQ ID NO: 1000285 - RNA, 20 nt, Human
gugggcuuguggccuccugc

SEQ ID NO: 1000286 - RNA, 26 nt, Human
guucacuggugaggacuucuucuccu

SEQ ID NO: 1000287 - RNA, 21 nt, Human
uacccuucucuccauuccuga

SEQ ID NO: 1000288 - RNA, 18 nt, Human
uacucugugcccagcacu

SEQ ID NO: 1000289 - RNA, 21 nt, Human
ucacuggugaggacuucuucu

SEQ ID NO: 1000290 - RNA, 26 nt, Human
ucagugaucacagcuuguaccccaaa

SEQ ID NO: 1000291 - RNA, 22 nt, Human
uccaggcuuuaaauggccuggg

SEQ ID NO: 1000292 - RNA, 18 nt, Human
uccuaggaaaguggaacc

SEQ ID NO: 1000293 - RNA, 19 nt, Human
uccuggaggacuugcucuc

SEQ ID NO: 1000294 - RNA, 22 nt, Human
ucgggcccuuauuccagagagu

SEQ ID NO: 1000295 - RNA, 22 nt, Human
ucucuuauaacaggguggagga

SEQ ID NO: 1000296 - RNA, 21 nt, Human
ucucuugacaugaagaccugg

SEQ ID NO: 1000297 - RNA, 19 nt, Human
ucuuaaaacuccccucaca

SEQ ID NO: 1000298 - RNA, 20 nt, Human
ugacacacacaaagugggca

SEQ ID NO: 1000299 - RNA, 20 nt, Human
ugaggacuucuucuccugga

SEQ ID NO: 1000300 - RNA, 19 nt, Human
ugcaagaaggaaccugggg

SEQ ID NO: 1000301 - RNA, 22 nt, Human
ugccagggaaggugggcagcag

SEQ ID NO: 1000302 - RNA, 23 nt, Human
uggacagagguuggguccguggg

SEQ ID NO: 1000303 - RNA, 22 nt, Human
uggacuccagggucagaaguuc

SEQ ID NO: 1000304 - RNA, 21 nt, Human
uggaugcugguagggccagag

SEQ ID NO: 1000305 - RNA, 22 nt, Human
uggaugugcugaucaagagcaa

SEQ ID NO: 1000306 - RNA, 21 nt, Human
uggggagguggcuaccagugg

SEQ ID NO: 1000307 - RNA, 20 nt, Human
ugggguccccugcuccaggu

SEQ ID NO: 1000308 - RNA, 20 nt, Human
uggguaaggacaagacuggg

SEQ ID NO: 1000309 - RNA, 24 nt, Human
ugguucugcccuuuuaugccguca

SEQ ID NO: 1000310 - RNA, 23 nt, Human
ugugcaagaaggaaccugggggg

SEQ ID NO: 1000311 - RNA, 19 nt, Human
uuccaaagaagugaagcag

SEQ ID NO: 1000312 - RNA, 18 nt, Human
uuggaugugcugaucaag

SEQ ID NO: 1000313 - RNA, 19 nt, Human
acaaccgcucgcccgcgcg

SEQ ID NO: 1000314 - RNA, 19 nt, Human
acaagcacaagcacaaccg

SEQ ID NO: 1000315 - RNA, 23 nt, Human
acagagccaggcugggcuggcca

SEQ ID NO: 1000316 - RNA, 24 nt, Human
agagaacagagccaggcugggcug

SEQ ID NO: 1000317 - RNA, 19 nt, Human
aggcgcagacgcgcucgcc

SEQ ID NO: 1000318 - RNA, 19 nt, Human
caagcacaagcacaaccgc

SEQ ID NO: 1000319 - RNA, 20 nt, Human
caagcacaagcacaaccgcu

SEQ ID NO: 1000320 - RNA, 26 nt, Human
cacacgccgccgggggcgcccagggg

SEQ ID NO: 1000321 - RNA, 18 nt, Human
ccacgcgccacaagcaca

SEQ ID NO: 1000322 - RNA, 20 nt, Human
cccgcaccacgcgccacaag

SEQ ID NO: 1000323 - RNA, 20 nt, Human
ccgaaacccgcaccacgcgc

SEQ ID NO: 1000324 - RNA, 24 nt, Human
ccgccgaaacccgcaccacgcgcc

SEQ ID NO: 1000325 - RNA, 23 nt, Human
ccgccgccgccgccgcgaggccg

SEQ ID NO: 1000326 - RNA, 24 nt, Human
ccgccgccgccgccgcgaggccga

SEQ ID NO: 1000327 - RNA, 19 nt, Human
ccgccgggggcgcccaggg

SEQ ID NO: 1000328 - RNA, 18 nt, Human
ccgcgcgcgggacgcugc

SEQ ID NO: 1000329 - RNA, 18 nt, Human
ccgcgcuucuuccucagc

SEQ ID NO: 1000330 - RNA, 22 nt, Human
ccgcugcccgccgcgcgcggga

SEQ ID NO: 1000331 - RNA, 18 nt, Human
ccgcugccgccgccgccg

SEQ ID NO: 1000332 - RNA, 26 nt, Human
cgagcgccgccacgcgccuccugggc

SEQ ID NO: 1000333 - RNA, 20 nt, Human
cgaggccgagcgccgccacg

SEQ ID NO: 1000334 - RNA, 24 nt, Human
cgaggccgagcgccgccacgcgcc

SEQ ID NO: 1000335 - RNA, 23 nt, Human
cgccgccgccgccgcgaggcccc

SEQ ID NO: 1000336 - RNA, 20 nt, Human
cgccuccugggccgcugccc

SEQ ID NO: 1000337 - RNA, 20 nt, Human
gaacagagccaggcugggcu

SEQ ID NO: 1000338 - RNA, 20 nt, Human
gccgccgaaacccgcaccac

SEQ ID NO: 1000339 - RNA, 23 nt, Human
gccgcugccgccgccgccgccgg

SEQ ID NO: 1000340 - RNA, 21 nt, Human
gccgggggcgcccaggggggg

SEQ ID NO: 1000341 - RNA, 18 nt, Human
gcgcccagggggggagga

SEQ ID NO: 1000342 - RNA, 20 nt, Human
ggacagagaacagagccagg

SEQ ID NO: 1000343 - RNA, 19 nt, Human
ggaggaggggcgcggggcc

SEQ ID NO: 1000344 - RNA, 20 nt, Human
ggcgcagacgcgcucgccgc

SEQ ID NO: 1000345 - RNA, 22 nt, Human
ggcugggcuggccaugggggcu

SEQ ID NO: 1000346 - RNA, 22 nt, Human
ggggaggaggggcgcggggccc

SEQ ID NO: 1000347 - RNA, 22 nt, Human
gggggaggaggggcgcggggcc

SEQ ID NO: 1000348 - RNA, 22 nt, Human
ggggggaggaggggcgcggggc

SEQ ID NO: 1000349 - RNA, 24 nt, Human
uccucagccgccgccgaaacccgc

SEQ ID NO: 1000350 - RNA, 31 nt, Human
ucgccgccaacugcugggccgcugccgccgg

SEQ ID NO: 1000351 - RNA, 19 nt, Human
ugacaggacagagaacaga

SEQ ID NO: 1000352 - RNA, 18 nt, Human
ugcccgccgcgcgcggga

SEQ ID NO: 1000353 - RNA, 18 nt, Human
ugggggauggggccacca

SEQ ID NO: 1000354 - RNA, 23 nt, Human
ugggggauggggccaccagggag

SEQ ID NO: 1000355 - RNA, 24 nt, Human
uuccucagccgccgccgaaacccg

SEQ ID NO: 1000356 - RNA, 21 nt, Human
uuuuuuuuuuuuuuuaacugg

SEQ ID NO: 1000357 - RNA, 26 nt, Human
uuuuuuuuuuuuuuuuuuuuaacugg

SEQ ID NO: 1000358 - RNA, 24 nt, Human
aacggcugagggugggggcagugu

SEQ ID NO: 1000359 - RNA, 21 nt, Human
aagagcagcagggucaggagg

SEQ ID NO: 1000360 - RNA, 21 nt, Human
aagaggcuggcagagggcugc

SEQ ID NO: 1000361 - RNA, 21 nt, Human
aagcaggaggugggccaugug

SEQ ID NO: 1000362 - RNA, 22 nt, Human
aagcaggaggugggccauguga

SEQ ID NO: 1000363 - RNA, 22 nt, Human
acacuccaucgccagagagaau

SEQ ID NO: 1000364 - RNA, 24 nt, Human
accacagacucaaaguggcugugg

SEQ ID NO: 1000365 - RNA, 21 nt, Human
agaagccacccuccagggacc

SEQ ID NO: 1000366 - RNA, 22 nt, Human
agacaagcacaguagcuuagaa

SEQ ID NO: 1000367 - RNA, 19 nt, Human
agagggcaggugcaggacc

SEQ ID NO: 1000368 - RNA, 23 nt, Human
agauccagcccgagaggaggagg

SEQ ID NO: 1000369 - RNA, 19 nt, Human
agcagcagggucaggagga

SEQ ID NO: 1000370 - RNA, 23 nt, Human
aggcaggaaaggagucugaaugg

SEQ ID NO: 1000371 - RNA, 18 nt, Human
aggcaggcugauaccaug

SEQ ID NO: 1000372 - RNA, 18 nt, Human
aggugaccuuucuggcag

SEQ ID NO: 1000373 - RNA, 23 nt, Human
aguggggcaggcaaccacgagga

SEQ ID NO: 1000374 - RNA, 22 nt, Human
auccuugagcacccuuccgcca

SEQ ID NO: 1000375 - RNA, 20 nt, Human
caacggcugagggugggggc

SEQ ID NO: 1000376 - RNA, 20 nt, Human
caaugguuuauuccaaaggg

SEQ ID NO: 1000377 - RNA, 20 nt, Human
caaugguuuauuccaaaggg

SEQ ID NO: 1000378 - RNA, 21 nt, Human
cacaaggcaggaaaggagucu

SEQ ID NO: 1000379 - RNA, 23 nt, Human
cacacuccaucgccagagagaau

SEQ ID NO: 1000380 - RNA, 25 nt, Human
cacacuccaucgccagagagaaugc

SEQ ID NO: 1000381 - RNA, 25 nt, Human
cacccuccagggaccacagacucaa

SEQ ID NO: 1000382 - RNA, 18 nt, Human
cagauccagcccgagagg

SEQ ID NO: 1000383 - RNA, 19 nt, Human
cagcagggcgugggcggga

SEQ ID NO: 1000384 - RNA, 19 nt, Human
cagccacacuccaucgcca

SEQ ID NO: 1000385 - RNA, 18 nt, Human
cagcccagccacacucca

SEQ ID NO: 1000386 - RNA, 26 nt, Human
cagcccgagaggaggaggcuggcggg

SEQ ID NO: 1000387 - RNA, 19 nt, Human
caggaaugauggugaccau

SEQ ID NO: 1000388 - RNA, 20 nt, Human
cagggaccacagacucaaag

SEQ ID NO: 1000389 - RNA, 18 nt, Human
ccacacuccaucgccaga

SEQ ID NO: 1000390 - RNA, 18 nt, Human
ccacacuccaucgccaga

SEQ ID NO: 1000391 - RNA, 19 nt, Human
ccagacaagcacaguagcu

SEQ ID NO: 1000392 - RNA, 20 nt, Human
ccccaaccccugcaagcugg

SEQ ID NO: 1000393 - RNA, 18 nt, Human
ccccaaccuaucucaccc

SEQ ID NO: 1000394 - RNA, 19 nt, Human
ccccaaccuaucucacccc

SEQ ID NO: 1000395 - RNA, 19 nt, Human
ccccugugauggguuggcc

SEQ ID NO: 1000396 - RNA, 19 nt, Human
cccucccacccagacaagc

SEQ ID NO: 1000397 - RNA, 22 nt, Human
ccgagaggaggaggcuggcggg

SEQ ID NO: 1000398 - RNA, 20 nt, Human
ccuccagggaccacagacuc

SEQ ID NO: 1000399 - RNA, 21 nt, Human
ccuccccaaccccugcaagcu

SEQ ID NO: 1000400 - RNA, 21 nt, Human
ccuccccaaccccugcaagcu

SEQ ID NO: 1000401 - RNA, 23 nt, Human
ccucuccaauccuugagcacccu

SEQ ID NO: 1000402 - RNA, 23 nt, Human
ccucuccaauccuugagcacccu

SEQ ID NO: 1000403 - RNA, 22 nt, Human
ccucugggaagcaggagguggg

SEQ ID NO: 1000404 - RNA, 21 nt, Human
ccugguuuugucuccucucca

SEQ ID NO: 1000405 - RNA, 21 nt, Human
ccugguuuugucuccucucca

SEQ ID NO: 1000406 - RNA, 19 nt, Human
cgccucguuccuuccgcca

SEQ ID NO: 1000407 - RNA, 23 nt, Human
cggcagggaguggggcaggcaac

SEQ ID NO: 1000408 - RNA, 22 nt, Human
cgguagugagacucaaggguac

SEQ ID NO: 1000409 - RNA, 22 nt, Human
cuccccaaccccugcaagcugg

SEQ ID NO: 1000410 - RNA, 23 nt, Human
cugcaguggccaagggcugcagg

SEQ ID NO: 1000411 - RNA, 24 nt, Human
cuggaugucucccuccccaacccc

SEQ ID NO: 1000412 - RNA, 24 nt, Human
cuggaugucucccuccccaacccc

SEQ ID NO: 1000413 - RNA, 22 nt, Human
cuggcccauccuuccagagccc

SEQ ID NO: 1000414 - RNA, 22 nt, Human
cuggcccauccuuccagagccc

SEQ ID NO: 1000415 - RNA, 18 nt, Human
cugggguucaggauaggu

SEQ ID NO: 1000416 - RNA, 19 nt, Human
gaacugacaccuccugguc

SEQ ID NO: 1000417 - RNA, 25 nt, Human
gaccaucugaggucacaaggcagga

SEQ ID NO: 1000418 - RNA, 19 nt, Human
gagaagccacccuccaggg

SEQ ID NO: 1000419 - RNA, 23 nt, Human
gagcagggguguggcgccucguu

SEQ ID NO: 1000420 - RNA, 22 nt, Human
gaggaagagcagggguguggcg

SEQ ID NO: 1000421 - RNA, 22 nt, Human
gaggaggcuggcggguuagggc

SEQ ID NO: 1000422 - RNA, 23 nt, Human
gcaaccacgaggacuagagacac

SEQ ID NO: 1000423 - RNA, 25 nt, Human
gccacccuccagggaccacagacuc

SEQ ID NO: 1000424 - RNA, 22 nt, Human
gcugcuccugguuuugucuccu

SEQ ID NO: 1000425 - RNA, 22 nt, Human
gcugcuccugguuuugucuccu

SEQ ID NO: 1000426 - RNA, 19 nt, Human
ggagauggguggcugugcu

SEQ ID NO: 1000427 - RNA, 20 nt, Human
ggagauggguggcugugcug

SEQ ID NO: 1000428 - RNA, 26 nt, Human
ggcaguguguaaggcaccuuuugcgg

SEQ ID NO: 1000429 - RNA, 23 nt, Human
ggccaguggggaagucggagagg

SEQ ID NO: 1000430 - RNA, 22 nt, Human
ggcugcagguucugccaugcug

SEQ ID NO: 1000431 - RNA, 24 nt, Human
ggcugugcuguccaggcaucugcu

SEQ ID NO: 1000432 - RNA, 24 nt, Human
gggaacugacaccuccuggucagc

SEQ ID NO: 1000433 - RNA, 22 nt, Human
gggaagcaggaggugggccaug

SEQ ID NO: 1000434 - RNA, 21 nt, Human
gggaauucuuuaucucagcag

SEQ ID NO: 1000435 - RNA, 20 nt, Human
gggauagggccuuggagaga

SEQ ID NO: 1000436 - RNA, 18 nt, Human
ggggauagggccuuggag

SEQ ID NO: 1000437 - RNA, 23 nt, Human
gggggguaaucagaaggaggagg

SEQ ID NO: 1000438 - RNA, 19 nt, Human
gguaaucagaaggaggagg

SEQ ID NO: 1000439 - RNA, 19 nt, Human
gguggagacccaccgccug

SEQ ID NO: 1000440 - RNA, 18 nt, Human
gucaagacacugagaggu

SEQ ID NO: 1000441 - RNA, 21 nt, Human
uaagggaauucuuuaucucag

SEQ ID NO: 1000442 - RNA, 19 nt, Human
uagaauggccgguagugag

SEQ ID NO: 1000443 - RNA, 19 nt, Human
uagagacacaccugugagg

SEQ ID NO: 1000444 - RNA, 19 nt, Human
uagcccccagauccagccc

SEQ ID NO: 1000445 - RNA, 21 nt, Human
uagggcaggccccaaccuauc

SEQ ID NO: 1000446 - RNA, 21 nt, Human
uaggugaccuuucuggcaggc

SEQ ID NO: 1000447 - RNA, 19 nt, Human
ucaaggguacacugccuuu

SEQ ID NO: 1000448 - RNA, 18 nt, Human
ucagcuccuugccuuugu

SEQ ID NO: 1000449 - RNA, 21 nt, Human
uccaucgccagagagaaugcc

SEQ ID NO: 1000450 - RNA, 18 nt, Human
ucccguugccuuuguuga

SEQ ID NO: 1000451 - RNA, 20 nt, Human
ucccuccccaaccccugcaa

SEQ ID NO: 1000452 - RNA, 24 nt, Human
uccuugagcacccugauaugcaac

SEQ ID NO: 1000453 - RNA, 22 nt, Human
ucucucagggaacugacaccuc

SEQ ID NO: 1000454 - RNA, 23 nt, Human
ucugccaugcugggcauugauag

SEQ ID NO: 1000455 - RNA, 21 nt, Human
uggaugucucccuccccaacc

SEQ ID NO: 1000456 - RNA, 21 nt, Human
uggaugucucccuccccaacc

SEQ ID NO: 1000457 - RNA, 23 nt, Human
uggaugucucccuccccaacccc

SEQ ID NO: 1000458 - RNA, 23 nt, Human
uggaugucucccuccccaacccc

SEQ ID NO: 1000459 - RNA, 23 nt, Human
uggcccauccuuccagagccccc

SEQ ID NO: 1000460 - RNA, 23 nt, Human
uggcccauccuuccagagccccc

SEQ ID NO: 1000461 - RNA, 22 nt, Human
uggggcaacggcugaggguggg

SEQ ID NO: 1000462 - RNA, 21 nt, Human
uggguggcugugcuguccagg

SEQ ID NO: 1000463 - RNA, 26 nt, Human
ugguuuugucuccucuccaauccuug

SEQ ID NO: 1000464 - RNA, 26 nt, Human
ugguuuugucuccucuccaauccuug

SEQ ID NO: 1000465 - RNA, 19 nt, Human
ugucaagacacugagaggu

SEQ ID NO: 1000466 - RNA, 18 nt, Human
ugucuccucuccaauccu

SEQ ID NO: 1000467 - RNA, 24 nt, Human
uuggccucugagcacaggggucac

SEQ ID NO: 1000468 - RNA, 21 nt, Human
uuuugucuccucuccaauccu

SEQ ID NO: 1000469 - RNA, 21 nt, Human
aacucguccauuccuucucca

SEQ ID NO: 1000470 - RNA, 26 nt, Human
aacucguccauuccuucuccaacucu

SEQ ID NO: 1000471 - RNA, 23 nt, Human
acagaacaacagggcuguuucaa

SEQ ID NO: 1000472 - RNA, 20 nt, Human
accaccacccccgcccccau

SEQ ID NO: 1000473 - RNA, 19 nt, Human
acucucuucaccaccaccc

SEQ ID NO: 1000474 - RNA, 20 nt, Human
aggaagcugugccaagucug

SEQ ID NO: 1000475 - RNA, 23 nt, Human
agugucuccauccacccccuaca

SEQ ID NO: 1000476 - RNA, 18 nt, Human
augagggguugggagaga

SEQ ID NO: 1000477 - RNA, 20 nt, Human
caacucucuucaccaccacc

SEQ ID NO: 1000478 - RNA, 22 nt, Human
caagcguggggcggguggcugg

SEQ ID NO: 1000479 - RNA, 25 nt, Human
caccacagccaaagugauaagaagu

SEQ ID NO: 1000480 - RNA, 20 nt, Human
caccaccacccccgccccca

SEQ ID NO: 1000481 - RNA, 22 nt, Human
cacccccgcccccaucuccacu

SEQ ID NO: 1000482 - RNA, 19 nt, Human
cacuaggcggcaccacagc

SEQ ID NO: 1000483 - RNA, 23 nt, Human
cagaauggggaccucauucuauc

SEQ ID NO: 1000484 - RNA, 20 nt, Human
caguagcccgagcccuccca

SEQ ID NO: 1000485 - RNA, 20 nt, Human
ccaacucucuucaccaccac

SEQ ID NO: 1000486 - RNA, 18 nt, Human
ccccggaguccacugugg

SEQ ID NO: 1000487 - RNA, 25 nt, Human
cccgagcccucccauucuccacucc

SEQ ID NO: 1000488 - RNA, 23 nt, Human
ccucccauucuccacuccuucga

SEQ ID NO: 1000489 - RNA, 22 nt, Human
ccuucuccaacucucuucacca

SEQ ID NO: 1000490 - RNA, 24 nt, Human
cgagcccucccauucuccacuccu

SEQ ID NO: 1000491 - RNA, 22 nt, Human
cgccacucuaugcuccgaaguc

SEQ ID NO: 1000492 - RNA, 22 nt, Human
cucucuucaccaccacccccgc

SEQ ID NO: 1000493 - RNA, 20 nt, Human
cugugccaagucuguaggag

SEQ ID NO: 1000494 - RNA, 23 nt, Human
gacccaauuccacuaagucaaga

SEQ ID NO: 1000495 - RNA, 21 nt, Human
gagcccucccauucuccacuc

SEQ ID NO: 1000496 - RNA, 23 nt, Human
gccccggaguccacuguggauac

SEQ ID NO: 1000497 - RNA, 20 nt, Human
gcuugcguggugguuccagu

SEQ ID NO: 1000498 - RNA, 19 nt, Human
ggagcaccaccgcuccccg

SEQ ID NO: 1000499 - RNA, 21 nt, Human
gguugggagagaagggggacg

SEQ ID NO: 1000500 - RNA, 18 nt, Human
uaggaagcugugccaagu

SEQ ID NO: 1000501 - RNA, 18 nt, Human
uaggcggcaccacagcca

SEQ ID NO: 1000502 - RNA, 18 nt, Human
ucaguagcccgagcccuc

SEQ ID NO: 1000503 - RNA, 22 nt, Human
uccaacucucuucaccaccacc

SEQ ID NO: 1000504 - RNA, 22 nt, Human
ucuaugcuccgaaguccgugga

SEQ ID NO: 1000505 - RNA, 19 nt, Human
ugacccaggcuggcguugc

SEQ ID NO: 1000506 - RNA, 20 nt, Human
ugacccaggcuggcguugcu

SEQ ID NO: 1000507 - RNA, 18 nt, Human
ugauggacugugacccag

SEQ ID NO: 1000508 - RNA, 21 nt, Human
ugccaagucuguaggagcccc

SEQ ID NO: 1000509 - RNA, 22 nt, Human
ugcuccgaaguccguggagcac

SEQ ID NO: 1000510 - RNA, 18 nt, Human
ugcuuaaagagugcgggg

SEQ ID NO: 1000511 - RNA, 20 nt, Human
ugggagagaagggggacgug

SEQ ID NO: 1000512 - RNA, 24 nt, Human
ugggagagaagggggacgugggaa

SEQ ID NO: 1000513 - RNA, 21 nt, Human
uggggcggguggcuggagauu

SEQ ID NO: 1000514 - RNA, 22 nt, Human
ugguuccagucugcuaaauauu

SEQ ID NO: 1000515 - RNA, 25 nt, Human
uguaggaagcugugccaagucugua

SEQ ID NO: 1000516 - RNA, 18 nt, Human
uuagaagugucuccaucc

SEQ ID NO: 1000517 - RNA, 22 nt, Human
uucaccaccacccccgccccca

SEQ ID NO: 1000518 - RNA, 26 nt, Human
uucaccaccacccccgcccccaucuc

SEQ ID NO: 1000519 - RNA, 20 nt, Human
uucccuugcugauaugaggg

SEQ ID NO: 1000520 - RNA, 26 nt, Human
uucuccacuccuucgacccaauucca

SEQ ID NO: 1000521 - RNA, 18 nt, Human
uugcucgucucuggauuu

SEQ ID NO: 1000522 - RNA, 20 nt, Human
ccccgcgccgcccgccgccc

SEQ ID NO: 1000523 - RNA, 19 nt, Human
ccccgucgccgccgccgcc

SEQ ID NO: 1000524 - RNA, 19 nt, Human
ccccgucgccgccgccgcc

SEQ ID NO: 1000525 - RNA, 21 nt, Human
ccccgucgccgccgccgccgc

SEQ ID NO: 1000526 - RNA, 21 nt, Human
ccgccccgucgccgccgccgc

SEQ ID NO: 1000527 - RNA, 26 nt, Human
ccgccccgucgccgccgccgccgccc

SEQ ID NO: 1000528 - RNA, 26 nt, Human
ccgccgccccgucgccgccgccgccg

SEQ ID NO: 1000529 - RNA, 19 nt, Human
ccgccgccgcccccagccc

SEQ ID NO: 1000530 - RNA, 21 nt, Human
cgccgccgccgcccccagccc

SEQ ID NO: 1000531 - RNA, 19 nt, Human
cucuuugaacccgccggac

SEQ ID NO: 1000532 - RNA, 21 nt, Human
gccgccgcccccagccccagc

SEQ ID NO: 1000533 - RNA, 21 nt, Human
ucgccgccgccgccgccccca

SEQ ID NO: 1000534 - RNA, 28 nt, Human
ucgccgccgccgccgcccccagccccag

SEQ ID NO: 1000535 - RNA, 21 nt, Human
aaaaaagaagagcgaggaaga

SEQ ID NO: 1000536 - RNA, 23 nt, Human
aaaaagaagagcgaggaagaaau

SEQ ID NO: 1000537 - RNA, 20 nt, Human
aacauagugagaccccccuc

SEQ ID NO: 1000538 - RNA, 21 nt, Human
aacauagugagaccccccuca

SEQ ID NO: 1000539 - RNA, 22 nt, Human
aacauagugagaccccccucac

SEQ ID NO: 1000540 - RNA, 19 nt, Human
aagaagagcgaggaagaaa

SEQ ID NO: 1000541 - RNA, 23 nt, Human
aagaagagcgaggaagaaauaac

SEQ ID NO: 1000542 - RNA, 24 nt, Human
aagagcgaggaagaaauaacaggg

SEQ ID NO: 1000543 - RNA, 18 nt, Human
acagcaagacccugucuc

SEQ ID NO: 1000544 - RNA, 23 nt, Human
accccuaccugacugguaaaaaa

SEQ ID NO: 1000545 - RNA, 18 nt, Human
acuguacuccagccuggg

SEQ ID NO: 1000546 - RNA, 26 nt, Human
acuguacuccagccugggugauacag

SEQ ID NO: 1000547 - RNA, 23 nt, Human
agagcgaggaagaaauaacaggg

SEQ ID NO: 1000548 - RNA, 19 nt, Human
agcccaugaguuugagguu

SEQ ID NO: 1000549 - RNA, 22 nt, Human
agcuugggcaacauagugagac

SEQ ID NO: 1000550 - RNA, 23 nt, Human
agcuugggcaacauagugagacc

SEQ ID NO: 1000551 - RNA, 24 nt, Human
agcuugggcaacauagugagaccc

SEQ ID NO: 1000552 - RNA, 23 nt, Human
aucacccacuguacuccagccug

SEQ ID NO: 1000553 - RNA, 19 nt, Human
cacugagcuauaaucaccc

SEQ ID NO: 1000554 - RNA, 19 nt, Human
cacuguacuccagccuggg

SEQ ID NO: 1000555 - RNA, 19 nt, Human
cacuguacuccagccuggg

SEQ ID NO: 1000556 - RNA, 19 nt, Human
cacuguacuccagccuggg

SEQ ID NO: 1000557 - RNA, 22 nt, Human
cacuguacuccagccuggguga

SEQ ID NO: 1000558 - RNA, 23 nt, Human
cacuguacuccagccugggugau

SEQ ID NO: 1000559 - RNA, 24 nt, Human
cacuguacuccagccugggugaua

SEQ ID NO: 1000560 - RNA, 22 nt, Human
caggaagaugacguuggccagg

SEQ ID NO: 1000561 - RNA, 22 nt, Human
caguacccaggaagcuccagga

SEQ ID NO: 1000562 - RNA, 18 nt, Human
ccacuguacuccagccug

SEQ ID NO: 1000563 - RNA, 20 nt, Human
ccacuguacuccagccuggg

SEQ ID NO: 1000564 - RNA, 20 nt, Human
ccacuguacuccagccuggg

SEQ ID NO: 1000565 - RNA, 21 nt, Human
ccacuguacuccagccugggu

SEQ ID NO: 1000566 - RNA, 21 nt, Human
ccacuguacuccagccugggu

SEQ ID NO: 1000567 - RNA, 23 nt, Human
ccacuguacuccagccuggguga

SEQ ID NO: 1000568 - RNA, 26 nt, Human
ccacuguacuccagccugggugauac

SEQ ID NO: 1000569 - RNA, 23 nt, Human
ccagcuugggcaacauagugaga

SEQ ID NO: 1000570 - RNA, 24 nt, Human
cccacuguacuccagccuggguga

SEQ ID NO: 1000571 - RNA, 18 nt, Human
ccuccaggccaguaccca

SEQ ID NO: 1000572 - RNA, 18 nt, Human
ccuggaacauguggcccu

SEQ ID NO: 1000573 - RNA, 21 nt, Human
ccuguagucccagcuacucag

SEQ ID NO: 1000574 - RNA, 22 nt, Human
ccuguagucccagcuacucagg

SEQ ID NO: 1000575 - RNA, 19 nt, Human
cguuggccagggcuggugg

SEQ ID NO: 1000576 - RNA, 23 nt, Human
cucaccccuaccugacugguaaa

SEQ ID NO: 1000577 - RNA, 18 nt, Human
cucuaaaaaaaagaagag

SEQ ID NO: 1000578 - RNA, 24 nt, Human
cugacugguaaaaaaugaaaaaaa

SEQ ID NO: 1000579 - RNA, 22 nt, Human
gagaccccccucaccccuaccu

SEQ ID NO: 1000580 - RNA, 22 nt, Human
gaguuugagguuacacugagcu

SEQ ID NO: 1000581 - RNA, 24 nt, Human
gaucacuugagcccaugaguuuga

SEQ ID NO: 1000582 - RNA, 21 nt, Human
ggcacgagcagccggcucggg

SEQ ID NO: 1000583 - RNA, 24 nt, Human
guacuccagccugggugauacagc

SEQ ID NO: 1000584 - RNA, 19 nt, Human
guuacacugagcuauaauc

SEQ ID NO: 1000585 - RNA, 24 nt, Human
uacagcaagacccugucucuaaaa

SEQ ID NO: 1000586 - RNA, 27 nt, Human
uacagcaagacccugucucuaaaaaaa

SEQ ID NO: 1000587 - RNA, 22 nt, Human
uacuccagccugggugauacag

SEQ ID NO: 1000588 - RNA, 23 nt, Human
uacuccagccugggugauacagc

SEQ ID NO: 1000589 - RNA, 24 nt, Human
uccagccugggugauacagcaaga

SEQ ID NO: 1000590 - RNA, 19 nt, Human
uccaggccaguacccagga

SEQ ID NO: 1000591 - RNA, 20 nt, Human
uccaggccaguacccaggaa

SEQ ID NO: 1000592 - RNA, 18 nt, Human
ucccagcugguccuggaa

SEQ ID NO: 1000593 - RNA, 23 nt, Human
ucucuaaaaaaaagaagagcgag

SEQ ID NO: 1000594 - RNA, 18 nt, Human
ugacugguaaaaaaugaa

SEQ ID NO: 1000595 - RNA, 19 nt, Human
ugaguuugagguuacacug

SEQ ID NO: 1000596 - RNA, 22 nt, Human
ugauacagcaagacccugucuc

SEQ ID NO: 1000597 - RNA, 24 nt, Human
ugccuguagucccagcuacucagg

SEQ ID NO: 1000598 - RNA, 24 nt, Human
ugguggcucgugccuguaguccca

SEQ ID NO: 1000599 - RNA, 24 nt, Human
uuaguugggcaugguggcucgugc

SEQ ID NO: 1000600 - RNA, 18 nt, Human
aaaaaaaacaggccuaaa

SEQ ID NO: 1000601 - RNA, 19 nt, Human
aaaaaaacaggccuaaaag

SEQ ID NO: 1000602 - RNA, 21 nt, Human
aaaaaccaccuacuugaaagc

SEQ ID NO: 1000603 - RNA, 24 nt, Human
aaaaaugaaaagucaaacagaaga

SEQ ID NO: 1000604 - RNA, 19 nt, Human
aaaaugccacauaagugaa

SEQ ID NO: 1000605 - RNA, 19 nt, Human
aaacaaaugcaagacacau

SEQ ID NO: 1000606 - RNA, 24 nt, Human
aaacaaaugcaagacacauugcuu

SEQ ID NO: 1000607 - RNA, 22 nt, Human
aaacauguaaauauaaaucagg

SEQ ID NO: 1000608 - RNA, 24 nt, Human
aacaacaaggacaaccaaaaaaaa

SEQ ID NO: 1000609 - RNA, 21 nt, Human
aacaaggacaaccaaaaaaaa

SEQ ID NO: 1000610 - RNA, 20 nt, Human
aacagaaaaugccacauaag

SEQ ID NO: 1000611 - RNA, 18 nt, Human
aaccaaaaaaaacaggcc

SEQ ID NO: 1000612 - RNA, 24 nt, Human
aaccaccuacuugaaagcaacacc

SEQ ID NO: 1000613 - RNA, 22 nt, Human
aagaagaaucauacucaaacac

SEQ ID NO: 1000614 - RNA, 24 nt, Human
aagcaacaccuuucaaaaacagac

SEQ ID NO: 1000615 - RNA, 23 nt, Human
aaggacaaccaaaaaaaacaggc

SEQ ID NO: 1000616 - RNA, 23 nt, Human
aaugaaaagucaaacagaagaga

SEQ ID NO: 1000617 - RNA, 21 nt, Human
aaugcuaccagccugaguaac

SEQ ID NO: 1000618 - RNA, 25 nt, Human
acaaaacaaaacaguaguauuccuu

SEQ ID NO: 1000619 - RNA, 21 nt, Human
acaaccaaaaaaaacaggccu

SEQ ID NO: 1000620 - RNA, 24 nt, Human
acagaaaaugccacauaagugaac

SEQ ID NO: 1000621 - RNA, 23 nt, Human
accauaaggaaagugucagcaac

SEQ ID NO: 1000622 - RNA, 19 nt, Human
acugcuacaaugcauaaaa

SEQ ID NO: 1000623 - RNA, 18 nt, Human
acuuuuaugguguuuuuc

SEQ ID NO: 1000624 - RNA, 20 nt, Human
agaauaagaaaaacuaaaga

SEQ ID NO: 1000625 - RNA, 22 nt, Human
agccugaguaacagauuuccau

SEQ ID NO: 1000626 - RNA, 27 nt, Human
aguaaggggguaaaagaauaaauauga

SEQ ID NO: 1000627 - RNA, 19 nt, Human
auaaaguaaaagacagucc

SEQ ID NO: 1000628 - RNA, 24 nt, Human
auauuuuaaccucaaaaaaauaag

SEQ ID NO: 1000629 - RNA, 20 nt, Human
aucauacucaaacacaagug

SEQ ID NO: 1000630 - RNA, 22 nt, Human
augaacuuuucaaacauguaaa

SEQ ID NO: 1000631 - RNA, 22 nt, Human
caaccacaaaugugacuuuagc

SEQ ID NO: 1000632 - RNA, 24 nt, Human
caagaaaccaugcuuacuacccau

SEQ ID NO: 1000633 - RNA, 18 nt, Human
caaggacaaccaaaaaaa

SEQ ID NO: 1000634 - RNA, 21 nt, Human
cacucagcgauauguaauuag

SEQ ID NO: 1000635 - RNA, 25 nt, Human
cagaaaaugccacauaagugaacau

SEQ ID NO: 1000636 - RNA, 21 nt, Human
cagcaacaccagcugacagaa

SEQ ID NO: 1000637 - RNA, 22 nt, Human
caggaaaaccugauauguaaua

SEQ ID NO: 1000638 - RNA, 21 nt, Human
cauaaaugauuacugcuacaa

SEQ ID NO: 1000639 - RNA, 22 nt, Human
ccccgcccauaagcuguuaacc

SEQ ID NO: 1000640 - RNA, 21 nt, Human
ccgagcuccccgcccauaagc

SEQ ID NO: 1000641 - RNA, 23 nt, Human
ccuauccauaaggcauuuaaaaa

SEQ ID NO: 1000642 - RNA, 24 nt, Human
ccuauugaaaacaaaugcaagaca

SEQ ID NO: 1000643 - RNA, 22 nt, Human
ccugagucacaucagauguuuc

SEQ ID NO: 1000644 - RNA, 24 nt, Human
ccugcuaaacacugaaguucucca

SEQ ID NO: 1000645 - RNA, 18 nt, Human
cugaauauuuuaaccuca

SEQ ID NO: 1000646 - RNA, 23 nt, Human
cuuaaaauguccuuagcaauaca

SEQ ID NO: 1000647 - RNA, 18 nt, Human
gaaaagucaaacagaaga

SEQ ID NO: 1000648 - RNA, 21 nt, Human
ggcagaacaacgacaugaaga

SEQ ID NO: 1000649 - RNA, 23 nt, Human
ggccaaaaaugaaaaucacaaaa

SEQ ID NO: 1000650 - RNA, 21 nt, Human
guaaaagacaguccaguugca

SEQ ID NO: 1000651 - RNA, 18 nt, Human
guccuuucuuuucucuuu

SEQ ID NO: 1000652 - RNA, 19 nt, Human
uaaaagacaguccaguugc

SEQ ID NO: 1000653 - RNA, 19 nt, Human
uaaauauaaaucaggaaaa

SEQ ID NO: 1000654 - RNA, 21 nt, Human
uaacaacaaggacaaccaaaa

SEQ ID NO: 1000655 - RNA, 23 nt, Human
uaacaacaaggacaaccaaaaaa

SEQ ID NO: 1000656 - RNA, 18 nt, Human
uaacuuggaaagaacauc

SEQ ID NO: 1000657 - RNA, 20 nt, Human
uaagaaaaacuaaagauaaa

SEQ ID NO: 1000658 - RNA, 24 nt, Human
uaaggcauugcuuuguuuacaguu

SEQ ID NO: 1000659 - RNA, 21 nt, Human
uaauucuuugacauaagaaca

SEQ ID NO: 1000660 - RNA, 18 nt, Human
uacaguuuguggucuuaa

SEQ ID NO: 1000661 - RNA, 19 nt, Human
uacauaaaguaaaagacag

SEQ ID NO: 1000662 - RNA, 21 nt, Human
uaccagccugaguaacagauu

SEQ ID NO: 1000663 - RNA, 20 nt, Human
uagcagcuuuauugcauaau

SEQ ID NO: 1000664 - RNA, 19 nt, Human
uauuaccaaugagaaacag

SEQ ID NO: 1000665 - RNA, 18 nt, Human
ucaaacagaagagaauca

SEQ ID NO: 1000666 - RNA, 21 nt, Human
ucuccaugauauuugcuacuu

SEQ ID NO: 1000667 - RNA, 18 nt, Human
ucuguauuucaagaagaa

SEQ ID NO: 1000668 - RNA, 24 nt, Human
ugaaagcaacaccuuucaaaaaca

SEQ ID NO: 1000669 - RNA, 25 nt, Human
ugacauaagaacaaauauuuucaca

SEQ ID NO: 1000670 - RNA, 21 nt, Human
ugacuuuagcagcuuuauugc

SEQ ID NO: 1000671 - RNA, 18 nt, Human
ugcaaaguuaaccacuuc

SEQ ID NO: 1000672 - RNA, 24 nt, Human
ugcaagaaaccaugcuuacuaccc

SEQ ID NO: 1000673 - RNA, 21 nt, Human
ugcuuuguuuacaguuuuuau

SEQ ID NO: 1000674 - RNA, 18 nt, Human
uggaaagaacaucuucac

SEQ ID NO: 1000675 - RNA, 27 nt, Human
ugggccaaaaaugaaaaucacaaaaca

SEQ ID NO: 1000676 - RNA, 18 nt, Human
uggucuuaacaaaacaaa

SEQ ID NO: 1000677 - RNA, 18 nt, Human
uguaucccccccaccaua

SEQ ID NO: 1000678 - RNA, 25 nt, Human
ugucuacaugauaugugcuuguaca

SEQ ID NO: 1000679 - RNA, 20 nt, Human
ugugaaaggcagaacaacga

SEQ ID NO: 1000680 - RNA, 21 nt, Human
uguguuuucugcaagaaacca

SEQ ID NO: 1000681 - RNA, 25 nt, Human
uuaaaaauauaacaacaaggacaac

SEQ ID NO: 1000682 - RNA, 23 nt, Human
uuaaccucaaaaaaauaaguacu

SEQ ID NO: 1000683 - RNA, 24 nt, Human
uuaaccucaaaaaaauaaguacuu

SEQ ID NO: 1000684 - RNA, 18 nt, Human
uuagauuuucuguauuuc

SEQ ID NO: 1000685 - RNA, 19 nt, Human
uuaggacauaaacaugaua

SEQ ID NO: 1000686 - RNA, 18 nt, Human
uugccgagcuccccgccc

SEQ ID NO: 1000687 - RNA, 20 nt, Human
uuugccgagcuccccgccca

SEQ ID NO: 1000688 - RNA, 20 nt, Human
aaacaaacuaggagaacgca

SEQ ID NO: 1000689 - RNA, 25 nt, Human
aaaugacagcgaagaaaacagaccu

SEQ ID NO: 1000690 - RNA, 19 nt, Human
aaauggcagcaaacaaacu

SEQ ID NO: 1000691 - RNA, 18 nt, Human
aagaaaacagaccaaacg

SEQ ID NO: 1000692 - RNA, 24 nt, Human
aagcaauucuccugccuuggccuc

SEQ ID NO: 1000693 - RNA, 22 nt, Human
aaggaaaugacagcgaagaaaa

SEQ ID NO: 1000694 - RNA, 24 nt, Human
aagugauccaccugccucagccuc

SEQ ID NO: 1000695 - RNA, 21 nt, Human
aauucccuuuucauuugaagc

SEQ ID NO: 1000696 - RNA, 24 nt, Human
acagcgaagaaaacagaccaaaag

SEQ ID NO: 1000697 - RNA, 23 nt, Human
acaggccccuaccaccaugcccg

SEQ ID NO: 1000698 - RNA, 18 nt, Human
acaggguuucaccauguu

SEQ ID NO: 1000699 - RNA, 21 nt, Human
acaggguuucaccauguuggc

SEQ ID NO: 1000700 - RNA, 24 nt, Human
acaggguuucaccauguuggccag

SEQ ID NO: 1000701 - RNA, 24 nt, Human
acauaguucugggauuacaggcgu

SEQ ID NO: 1000702 - RNA, 20 nt, Human
accauguuggccaggcuggu

SEQ ID NO: 1000703 - RNA, 23 nt, Human
agacagcaacauacgaucaucac

SEQ ID NO: 1000704 - RNA, 22 nt, Human
agcccugacccauuaaagacgg

SEQ ID NO: 1000705 - RNA, 22 nt, Human
aggcacagcaugaucuuggcuu

SEQ ID NO: 1000706 - RNA, 22 nt, Human
aguagagacaggguuucaccau

SEQ ID NO: 1000707 - RNA, 22 nt, Human
aguucugggauuacaggcguga

SEQ ID NO: 1000708 - RNA, 24 nt, Human
auaguucugggauuacaggcguga

SEQ ID NO: 1000709 - RNA, 22 nt, Human
augaaguuaaggucuauuugcu

SEQ ID NO: 1000710 - RNA, 24 nt, Human
auggaggcccagccaugccucuga

SEQ ID NO: 1000711 - RNA, 18 nt, Human
caacagccauuucagcaa

SEQ ID NO: 1000712 - RNA, 26 nt, Human
caacauaaaucaauuauauauccacu

SEQ ID NO: 1000713 - RNA, 22 nt, Human
caagcaauucuccugccuuggc

SEQ ID NO: 1000714 - RNA, 22 nt, Human
caagugauccaccugccucagc

SEQ ID NO: 1000715 - RNA, 23 nt, Human
cacauaguucugggauuacaggc

SEQ ID NO: 1000716 - RNA, 24 nt, Human
caccaugcccggcuaauuuuugua

SEQ ID NO: 1000717 - RNA, 18 nt, Human
caccauguuggccaggcu

SEQ ID NO: 1000718 - RNA, 21 nt, Human
caccauguuggccaggcuggu

SEQ ID NO: 1000719 - RNA, 21 nt, Human
caccauguuggccaggcuggu

SEQ ID NO: 1000720 - RNA, 31 nt, Human
caccauguuggccaggcugguguugaacucc

SEQ ID NO: 1000721 - RNA, 22 nt, Human
cacgaguagcuggguuacaggc

SEQ ID NO: 1000722 - RNA, 19 nt, Human
cagaacugaaucccccauc

SEQ ID NO: 1000723 - RNA, 19 nt, Human
cagcugcugcaggcucaag

SEQ ID NO: 1000724 - RNA, 24 nt, Human
caggguuucaccauguuggccagg

SEQ ID NO: 1000725 - RNA, 19 nt, Human
caguccagguuaaccaucu

SEQ ID NO: 1000726 - RNA, 21 nt, Human
cauaguucugggauuacaggc

SEQ ID NO: 1000727 - RNA, 24 nt, Human
cauguuggccaggcugguguugaa

SEQ ID NO: 1000728 - RNA, 23 nt, Human
ccaacagccauuucagcaauaac

SEQ ID NO: 1000729 - RNA, 19 nt, Human
ccaccugccucagccucac

SEQ ID NO: 1000730 - RNA, 23 nt, Human
ccaucugugguauuuuuaguugc

SEQ ID NO: 1000731 - RNA, 23 nt, Human
ccaugccucugacaucuagacac

SEQ ID NO: 1000732 - RNA, 18 nt, Human
cccaucaaaguucaauuu

SEQ ID NO: 1000733 - RNA, 21 nt, Human
ccugaccucaagugauccacc

SEQ ID NO: 1000734 - RNA, 23 nt, Human
ccugaccucaagugauccaccug

SEQ ID NO: 1000735 - RNA, 23 nt, Human
ccugaccucaagugauccaccug

SEQ ID NO: 1000736 - RNA, 23 nt, Human
ccugccuuggccucacgaguagc

SEQ ID NO: 1000737 - RNA, 24 nt, Human
ccugccuuggccucacgaguagcu

SEQ ID NO: 1000738 - RNA, 23 nt, Human
cgugagccaccaugccuggccau

SEQ ID NO: 1000739 - RNA, 27 nt, Human
cuacccuucacuuacuacuuacaaccc

SEQ ID NO: 1000740 - RNA, 26 nt, Human
cucaagcaauucuccugccuuggccu

SEQ ID NO: 1000741 - RNA, 23 nt, Human
cucaagugauccaccugccucag

SEQ ID NO: 1000742 - RNA, 22 nt, Human
cugacccuggggaacaugggca

SEQ ID NO: 1000743 - RNA, 18 nt, Human
cugcagcugcugcaggcu

SEQ ID NO: 1000744 - RNA, 20 nt, Human
cugccucagccucacauagu

SEQ ID NO: 1000745 - RNA, 25 nt, Human
cuggaaaauaccaaauucuuuucca

SEQ ID NO: 1000746 - RNA, 18 nt, Human
cuuagauuauuaaacaac

SEQ ID NO: 1000747 - RNA, 21 nt, Human
cuucucucacacuuugcuugg

SEQ ID NO: 1000748 - RNA, 19 nt, Human
gaacucaguaagucuggua

SEQ ID NO: 1000749 - RNA, 24 nt, Human
gaccucaagugauccaccugccuc

SEQ ID NO: 1000750 - RNA, 21 nt, Human
gacuucaacaaauaucaguaa

SEQ ID NO: 1000751 - RNA, 18 nt, Human
gauuacaggcgugagcca

SEQ ID NO: 1000752 - RNA, 21 nt, Human
gauuacaggcgugagccacca

SEQ ID NO: 1000753 - RNA, 24 nt, Human
gauuacaggcgugagccaccaugc

SEQ ID NO: 1000754 - RNA, 22 nt, Human
gcagcugcugcaggcucaagca

SEQ ID NO: 1000755 - RNA, 22 nt, Human
gcccggcuaauuuuuguauuuu

SEQ ID NO: 1000756 - RNA, 24 nt, Human
gcugcaggcucaagcaauucuccu

SEQ ID NO: 1000757 - RNA, 23 nt, Human
gcugguguugaacuccugaccuc

SEQ ID NO: 1000758 - RNA, 24 nt, Human
ggauuacaggcgugagccaccaug

SEQ ID NO: 1000759 - RNA, 18 nt, Human
ggauuuauauuauuuucu

SEQ ID NO: 1000760 - RNA, 19 nt, Human
ggccaggcugguguugaac

SEQ ID NO: 1000761 - RNA, 24 nt, Human
ggcugguguugaacuccugaccuc

SEQ ID NO: 1000762 - RNA, 18 nt, Human
ggggaacaugggcaauag

SEQ ID NO: 1000763 - RNA, 22 nt, Human
ggguuucaccauguuggccagg

SEQ ID NO: 1000764 - RNA, 18 nt, Human
gugauccaccugccucag

SEQ ID NO: 1000765 - RNA, 22 nt, Human
gugauccaccugccucagccuc

SEQ ID NO: 1000766 - RNA, 19 nt, Human
uaaacaacaugucaguggu

SEQ ID NO: 1000767 - RNA, 18 nt, Human
uaaagacggauggagaca

SEQ ID NO: 1000768 - RNA, 24 nt, Human
uaauuuuuguauuuuuaguagaga

SEQ ID NO: 1000769 - RNA, 23 nt, Human
uacaacccagccucuaucaucau

SEQ ID NO: 1000770 - RNA, 24 nt, Human
uacaacccagccucuaucaucaua

SEQ ID NO: 1000771 - RNA, 22 nt, Human
uacaggcgugagccaccaugcc

SEQ ID NO: 1000772 - RNA, 22 nt, Human
uacaggcgugagccaccaugcc

SEQ ID NO: 1000773 - RNA, 23 nt, Human
uacaggcgugagccaccaugccu

SEQ ID NO: 1000774 - RNA, 22 nt, Human
uaccaccaugcccggcuaauuu

SEQ ID NO: 1000775 - RNA, 22 nt, Human
uagagacaggguuucaccaugu

SEQ ID NO: 1000776 - RNA, 24 nt, Human
uaguagagacaggguuucaccaug

SEQ ID NO: 1000777 - RNA, 26 nt, Human
uaguagagacaggguuucaccauguu

SEQ ID NO: 1000778 - RNA, 26 nt, Human
uaucucccuuaggcagagauggaggc

SEQ ID NO: 1000779 - RNA, 18 nt, Human
ucaaaguucaauuuuacu

SEQ ID NO: 1000780 - RNA, 22 nt, Human
ucaagugauccaccugccucag

SEQ ID NO: 1000781 - RNA, 18 nt, Human
ucacacuuugcuuggcug

SEQ ID NO: 1000782 - RNA, 24 nt, Human
ucacauaguucugggauuacaggc

SEQ ID NO: 1000783 - RNA, 22 nt, Human
ucaccugaagacccuuggaaau

SEQ ID NO: 1000784 - RNA, 23 nt, Human
ucacgaguagcuggguuacaggc

SEQ ID NO: 1000785 - RNA, 24 nt, Human
ucugcuacccuucacuuacuacuu

SEQ ID NO: 1000786 - RNA, 23 nt, Human
ucuguuuuguuuuguuuuaaaug

SEQ ID NO: 1000787 - RNA, 19 nt, Human
ucuuuuccagaacugaauc

SEQ ID NO: 1000788 - RNA, 24 nt, Human
ugaccucaagugauccaccugccu

SEQ ID NO: 1000789 - RNA, 18 nt, Human
ugacuuguggguaccccu

SEQ ID NO: 1000790 - RNA, 19 nt, Human
ugccaacagccauuucagc

SEQ ID NO: 1000791 - RNA, 24 nt, Human
ugcccggcuaauuuuuguauuuuu

SEQ ID NO: 1000792 - RNA, 21 nt, Human
ugccucagccucacauaguuc

SEQ ID NO: 1000793 - RNA, 24 nt, Human
ugccucagccucacauaguucugg

SEQ ID NO: 1000794 - RNA, 21 nt, Human
ugcuucauuucuccuauucuc

SEQ ID NO: 1000795 - RNA, 23 nt, Human
uggaaaauaccaaauucuuuucc

SEQ ID NO: 1000796 - RNA, 22 nt, Human
uggaaaucaaagcccugaccca

SEQ ID NO: 1000797 - RNA, 23 nt, Human
uggaggcccagccaugccucuga

SEQ ID NO: 1000798 - RNA, 24 nt, Human
uggccaggcugguguugaacuccu

SEQ ID NO: 1000799 - RNA, 18 nt, Human
ugggauuacaggcgugag

SEQ ID NO: 1000800 - RNA, 22 nt, Human
ugggauuacaggcgugagccac

SEQ ID NO: 1000801 - RNA, 23 nt, Human
ugggauuacaggcgugagccacc

SEQ ID NO: 1000802 - RNA, 24 nt, Human
ugggauuacaggcgugagccacca

SEQ ID NO: 1000803 - RNA, 25 nt, Human
ugggauuacaggcgugagccaccau

SEQ ID NO: 1000804 - RNA, 20 nt, Human
uggguuacaggccccuacca

SEQ ID NO: 1000805 - RNA, 23 nt, Human
uggguuacaggccccuaccacca

SEQ ID NO: 1000806 - RNA, 24 nt, Human
uggguuacaggccccuaccaccau

SEQ ID NO: 1000807 - RNA, 19 nt, Human
ugugcugguuaaaccaagg

SEQ ID NO: 1000808 - RNA, 21 nt, Human
uguuuuguuuuguuuuaaaug

SEQ ID NO: 1000809 - RNA, 20 nt, Human
uuaacccuucucucacacuu

SEQ ID NO: 1000810 - RNA, 20 nt, Human
uuacaggccccuaccaccau

SEQ ID NO: 1000811 - RNA, 18 nt, Human
uuacugcagcugcugcag

SEQ ID NO: 1000812 - RNA, 22 nt, Human
uuacugcagcugcugcaggcuc

SEQ ID NO: 1000813 - RNA, 22 nt, Human
uuagauuauuaaacaacauguc

SEQ ID NO: 1000814 - RNA, 24 nt, Human
uuaguagagacaggguuucaccau

SEQ ID NO: 1000815 - RNA, 22 nt, Human
uucaaaaugaaguuaaggucua

SEQ ID NO: 1000816 - RNA, 23 nt, Human
uucaacauaaaucaauuauauau

SEQ ID NO: 1000817 - RNA, 24 nt, Human
uucagcaauaacuauuuacugaga

SEQ ID NO: 1000818 - RNA, 20 nt, Human
uugcucuucucugaaucaua

SEQ ID NO: 1000819 - RNA, 22 nt, Human
uugguccuagcagacuggaaaa

SEQ ID NO: 1000820 - RNA, 24 nt, Human
uuucaccauguuggccaggcuggu

SEQ ID NO: 1000821 - RNA, 24 nt, Human
uuugaagcaucucauuguaagcca

SEQ ID NO: 1000822 - RNA, 22 nt, Human
uuuuguauuuuuaguagagaca

SEQ ID NO: 1000823 - RNA, 24 nt, Human
uuuuuaguagagacaggguuucac

SEQ ID NO: 1000824 - RNA, 20 nt, Human
uuuuuguauuuuuaguagag

SEQ ID NO: 1000825 - RNA, 19 nt, Human
aaaaagauucuaugccuuu

SEQ ID NO: 1000826 - RNA, 22 nt, Human
aaaccaaacaucacauguucuc

SEQ ID NO: 1000827 - RNA, 22 nt, Human
aaaccaacacaugaacagaaaa

SEQ ID NO: 1000828 - RNA, 23 nt, Human
aaaccugcacguguuccccuuaa

SEQ ID NO: 1000829 - RNA, 25 nt, Human
aaauacaacuaaaauugucuuauac

SEQ ID NO: 1000830 - RNA, 20 nt, Human
aacaagcguucaacauucuc

SEQ ID NO: 1000831 - RNA, 22 nt, Human
aacauucucaugaugacaugaa

SEQ ID NO: 1000832 - RNA, 21 nt, Human
aaccuaaaugcccaucaacag

SEQ ID NO: 1000833 - RNA, 18 nt, Human
aaccugcacguguucccc

SEQ ID NO: 1000834 - RNA, 19 nt, Human
aagagggcccagggaugug

SEQ ID NO: 1000835 - RNA, 25 nt, Human
aaguaacaaaaucaaaaccugaaac

SEQ ID NO: 1000836 - RNA, 21 nt, Human
acaaaaaagggaacaacagac

SEQ ID NO: 1000837 - RNA, 23 nt, Human
acaaaaaagggaacaacagacac

SEQ ID NO: 1000838 - RNA, 24 nt, Human
acaaagaucaacauccaauaaaug

SEQ ID NO: 1000839 - RNA, 21 nt, Human
accgccucacguaaaagggua

SEQ ID NO: 1000840 - RNA, 23 nt, Human
acuauccaguaacugccacaauc

SEQ ID NO: 1000841 - RNA, 19 nt, Human
acuaugcuuauuaccuggg

SEQ ID NO: 1000842 - RNA, 23 nt, Human
agaaaagcaaucauuaucuuaaa

SEQ ID NO: 1000843 - RNA, 18 nt, Human
agaagauggaccauccag

SEQ ID NO: 1000844 - RNA, 21 nt, Human
agacggaguccgacgugaggc

SEQ ID NO: 1000845 - RNA, 21 nt, Human
agaggccagcaagcugcgagc

SEQ ID NO: 1000846 - RNA, 18 nt, Human
agaggguggaggagggug

SEQ ID NO: 1000847 - RNA, 21 nt, Human
agaguuaugguugggaagaga

SEQ ID NO: 1000848 - RNA, 19 nt, Human
aggcgcgggagaggccagc

SEQ ID NO: 1000849 - RNA, 23 nt, Human
agggcagaagagggcccagggau

SEQ ID NO: 1000850 - RNA, 20 nt, Human
aggguggaggaggguggggu

SEQ ID NO: 1000851 - RNA, 19 nt, Human
auaaagaaaacauaguaca

SEQ ID NO: 1000852 - RNA, 24 nt, Human
auauacaccauggaauacuaugca

SEQ ID NO: 1000853 - RNA, 19 nt, Human
auggacacaaaaaagggaa

SEQ ID NO: 1000854 - RNA, 21 nt, Human
auuaccuggguaaugaaauaa

SEQ ID NO: 1000855 - RNA, 23 nt, Human
auuuuaaucccaacacugccauu

SEQ ID NO: 1000856 - RNA, 21 nt, Human
caaaaccugaaacaaagauca

SEQ ID NO: 1000857 - RNA, 23 nt, Human
caacacaugaacagaaaaccaaa

SEQ ID NO: 1000858 - RNA, 18 nt, Human
caacauaggcagagugag

SEQ ID NO: 1000859 - RNA, 24 nt, Human
caacauggauggagcuggaggcca

SEQ ID NO: 1000860 - RNA, 21 nt, Human
caaccuaaaugcccaucaaca

SEQ ID NO: 1000861 - RNA, 24 nt, Human
caauagcaaagacauggaauccua

SEQ ID NO: 1000862 - RNA, 22 nt, Human
cacacaaagggcagauaccaaa

SEQ ID NO: 1000863 - RNA, 25 nt, Human
cagaagagggcccagggaugugugu

SEQ ID NO: 1000864 - RNA, 18 nt, Human
caggcugcaaguaaccaa

SEQ ID NO: 1000865 - RNA, 22 nt, Human
ccaaaccccugugacauguaau

SEQ ID NO: 1000866 - RNA, 22 nt, Human
ccgccgucaccgccucacguaa

SEQ ID NO: 1000867 - RNA, 20 nt, Human
ccuauacugcgggauguuca

SEQ ID NO: 1000868 - RNA, 25 nt, Human
ccugccgcggagacggagucccccg

SEQ ID NO: 1000869 - RNA, 22 nt, Human
cgggauguucacacuacguccc

SEQ ID NO: 1000870 - RNA, 18 nt, Human
gagcggccgcggggaggc

SEQ ID NO: 1000871 - RNA, 25 nt, Human
gaggguagaggguggaggagggugg

SEQ ID NO: 1000872 - RNA, 22 nt, Human
gaguacccauggacacaaaaaa

SEQ ID NO: 1000873 - RNA, 23 nt, Human
gcacacaaagggcagauaccaaa

SEQ ID NO: 1000874 - RNA, 19 nt, Human
ggaaggaguuuuggucagg

SEQ ID NO: 1000875 - RNA, 20 nt, Human
ggagaggccagcaagcugcg

SEQ ID NO: 1000876 - RNA, 21 nt, Human
ggauucccacaauuuucuaag

SEQ ID NO: 1000877 - RNA, 20 nt, Human
ggccgcggggaggccagacg

SEQ ID NO: 1000878 - RNA, 20 nt, Human
guccgacgugaggcgcggga

SEQ ID NO: 1000879 - RNA, 22 nt, Human
uaaaaaaguaacaaaaucaaaa

SEQ ID NO: 1000880 - RNA, 24 nt, Human
uaaaaauaacuauccaguaacugc

SEQ ID NO: 1000881 - RNA, 24 nt, Human
uaaacuaaaauauaaguuaaaaua

SEQ ID NO: 1000882 - RNA, 19 nt, Human
uaaagggagaguagauaag

SEQ ID NO: 1000883 - RNA, 24 nt, Human
uaaaucacugccugaaagucuuuu

SEQ ID NO: 1000884 - RNA, 21 nt, Human
uaacaagcguucaacauucuc

SEQ ID NO: 1000885 - RNA, 24 nt, Human
uaacacuguacauacaacauacca

SEQ ID NO: 1000886 - RNA, 28 nt, Human
uaacugccacaaucuccugaguccagac

SEQ ID NO: 1000887 - RNA, 22 nt, Human
uacaauaaguacacaugacuua

SEQ ID NO: 1000888 - RNA, 23 nt, Human
uacacaguauaaaaaaguaacaa

SEQ ID NO: 1000889 - RNA, 28 nt, Human
uagacugaggaaaauauacacaguauaa

SEQ ID NO: 1000890 - RNA, 23 nt, Human
ucacaaaagugacuuaagccuau

SEQ ID NO: 1000891 - RNA, 26 nt, Human
ucacugaguugugaugagagucauau

SEQ ID NO: 1000892 - RNA, 19 nt, Human
ucaggcugcaaguaaccaa

SEQ ID NO: 1000893 - RNA, 18 nt, Human
uccucguuaaaucacugc

SEQ ID NO: 1000894 - RNA, 24 nt, Human
ugaaauaauauguacaccaaaccc

SEQ ID NO: 1000895 - RNA, 22 nt, Human
ugaacagaaaaccaaacaucac

SEQ ID NO: 1000896 - RNA, 21 nt, Human
ugacuuaagccuauacugcgg

SEQ ID NO: 1000897 - RNA, 18 nt, Human
ugagagucauaugcaaca

SEQ ID NO: 1000898 - RNA, 19 nt, Human
ugagagucauaugcaacag

SEQ ID NO: 1000899 - RNA, 20 nt, Human
ugaggaaaauauacacagua

SEQ ID NO: 1000900 - RNA, 18 nt, Human
ugaggcgcgggagaggcc

SEQ ID NO: 1000901 - RNA, 20 nt, Human
ugaggggggauucccacaau

SEQ ID NO: 1000902 - RNA, 19 nt, Human
ugaggguagaggguggagg

SEQ ID NO: 1000903 - RNA, 19 nt, Human
ugaucuauagaacaaaccu

SEQ ID NO: 1000904 - RNA, 18 nt, Human
ugaugacaugaauaacac

SEQ ID NO: 1000905 - RNA, 24 nt, Human
ugcagccauaaaaaaagaaugaga

SEQ ID NO: 1000906 - RNA, 18 nt, Human
uggaaagaauaggcaaug

SEQ ID NO: 1000907 - RNA, 20 nt, Human
uggaauacuaugcagccaua

SEQ ID NO: 1000908 - RNA, 20 nt, Human
uggaaucaaccuaaaugccc

SEQ ID NO: 1000909 - RNA, 20 nt, Human
uggauaaagaaaacauagua

SEQ ID NO: 1000910 - RNA, 18 nt, Human
uggauggagcuggaggcc

SEQ ID NO: 1000911 - RNA, 18 nt, Human
ugugaagcacacaaaggg

SEQ ID NO: 1000912 - RNA, 18 nt, Human
uguuucuucuaccuuucc

SEQ ID NO: 1000913 - RNA, 23 nt, Human
uuaagccuauacugcgggauguu

SEQ ID NO: 1000914 - RNA, 23 nt, Human
uuacuggaaagaauaggcaaugc

SEQ ID NO: 1000915 - RNA, 31 nt, Human
uuagugcaguuacgguacuucaggcugcaaa

SEQ ID NO: 1000916 - RNA, 18 nt, Human
uucacaauagcaaagaca

SEQ ID NO: 1000917 - RNA, 23 nt, Human
uuccccgcacaucucuuuaaaag

SEQ ID NO: 1000918 - RNA, 20 nt, Human
uuccgaaccgccgucaccgc

SEQ ID NO: 1000919 - RNA, 21 nt, Human
uuccugucccaucuccauugg

SEQ ID NO: 1000920 - RNA, 18 nt, Human
uugaucuauagaacaaac

SEQ ID NO: 1000921 - RNA, 25 nt, Human
uuggaaaauuuccugucccaucucc

SEQ ID NO: 1000922 - RNA, 26 nt, Human
uuggaaaauuuccugucccaucucca

SEQ ID NO: 1000923 - RNA, 18 nt, Human
uugugaagcacacaaagg

SEQ ID NO: 1000924 - RNA, 19 nt, Human
uuuuuuuuuuuuuuuugca

SEQ ID NO: 1000925 - RNA, 18 nt, Human
uuuuuuuuuuuuuuuuug

SEQ ID NO: 1000926 - RNA, 23 nt, Human
acccagugggggccuggacaggu

SEQ ID NO: 1000927 - RNA, 20 nt, Human
auucacugacuccuuucucc

SEQ ID NO: 1000928 - RNA, 22 nt, Human
auucacugacuccuuucuccaa

SEQ ID NO: 1000929 - RNA, 19 nt, Human
cugagggggcugaagaagc

SEQ ID NO: 1000930 - RNA, 23 nt, Human
gagaggaggcugaggugagccug

SEQ ID NO: 1000931 - RNA, 21 nt, Human
gaggugucccagggaugaaca

SEQ ID NO: 1000932 - RNA, 24 nt, Human
gggggcugaagaagcaauucacug

SEQ ID NO: 1000933 - RNA, 20 nt, Human
ggguagacccagugggggcc

SEQ ID NO: 1000934 - RNA, 19 nt, Human
ugagggggcugaagaagca

SEQ ID NO: 1000935 - RNA, 20 nt, Human
ugaggugucccagggaugaa

SEQ ID NO: 1000936 - RNA, 24 nt, Human
uggguagacccagugggggccugg

SEQ ID NO: 1000937 - RNA, 19 nt, Human
uuccuacccugucagccuc

SEQ ID NO: 1000938 - RNA, 21 nt, Human
uuggaggaaggagagagagga

SEQ ID NO: 1000939 - RNA, 21 nt, Human
uuggaggaaggagagagagga

SEQ ID NO: 1000940 - RNA, 25 nt, Human
aaaaaaaaaagaaaaaagaaaagaa

SEQ ID NO: 1000941 - RNA, 21 nt, Human
aaaaaagaaaaaagaaaagaa

SEQ ID NO: 1000942 - RNA, 18 nt, Human
aaaaaagaaaagaaaagg

SEQ ID NO: 1000943 - RNA, 18 nt, Human
aaaacugggaggaaccuu

SEQ ID NO: 1000944 - RNA, 23 nt, Human
aaaagaaaaggaaauaagcacag

SEQ ID NO: 1000945 - RNA, 19 nt, Human
aaaaugaugcaaaugaguu

SEQ ID NO: 1000946 - RNA, 25 nt, Human
aaauagaaagaagggagacagcaag

SEQ ID NO: 1000947 - RNA, 20 nt, Human
aacauggggaaaccccgucu

SEQ ID NO: 1000948 - RNA, 20 nt, Human
aacauggggaaaccccgucu

SEQ ID NO: 1000949 - RNA, 21 nt, Human
aacauggggaaaccccgucuc

SEQ ID NO: 1000950 - RNA, 21 nt, Human
aacauggggaaaccccgucuc

SEQ ID NO: 1000951 - RNA, 20 nt, Human
aagaaaaggaaauaagcaca

SEQ ID NO: 1000952 - RNA, 22 nt, Human
aagggcaucgaggguaaacuga

SEQ ID NO: 1000953 - RNA, 24 nt, Human
aauugcuugaaucugagaggugga

SEQ ID NO: 1000954 - RNA, 24 nt, Human
accccgucucuacugaaaauacaa

SEQ ID NO: 1000955 - RNA, 24 nt, Human
accccgucucuacugaaaauacaa

SEQ ID NO: 1000956 - RNA, 18 nt, Human
accuggacaagaggugcu

SEQ ID NO: 1000957 - RNA, 23 nt, Human
acugaaaauacaaauuuagccag

SEQ ID NO: 1000958 - RNA, 23 nt, Human
acugaaaauacaaauuuagccag

SEQ ID NO: 1000959 - RNA, 28 nt, Human
acuucaucucaaaaaaaaaaaaaaagaa

SEQ ID NO: 1000960 - RNA, 21 nt, Human
agaaaaaagaaaagaaaagga

SEQ ID NO: 1000961 - RNA, 22 nt, Human
agaaaaauuaacaggucagcua

SEQ ID NO: 1000962 - RNA, 24 nt, Human
agcacuuugggaggccgaggcggg

SEQ ID NO: 1000963 - RNA, 24 nt, Human
agcacuuugggaggccgaggcggg

SEQ ID NO: 1000964 - RNA, 19 nt, Human
agccagggguggugguggg

SEQ ID NO: 1000965 - RNA, 19 nt, Human
agccagggguggugguggg

SEQ ID NO: 1000966 - RNA, 20 nt, Human
agccaggggugguggugggc

SEQ ID NO: 1000967 - RNA, 24 nt, Human
aggaugccaguacaauaauugaaa

SEQ ID NO: 1000968 - RNA, 20 nt, Human
aggcaggagaauugcuugaa

SEQ ID NO: 1000969 - RNA, 24 nt, Human
aggcaggagaauugcuugaaucug

SEQ ID NO: 1000970 - RNA, 21 nt, Human
aggccgaggcggguggaucac

SEQ ID NO: 1000971 - RNA, 21 nt, Human
aggccgaggcggguggaucac

SEQ ID NO: 1000972 - RNA, 22 nt, Human
aggcggguggaucaccugaggu

SEQ ID NO: 1000973 - RNA, 22 nt, Human
aggcggguggaucaccugaggu

SEQ ID NO: 1000974 - RNA, 26 nt, Human
aggcggguggaucaccugaggucaga

SEQ ID NO: 1000975 - RNA, 26 nt, Human
aggcggguggaucaccugaggucaga

SEQ ID NO: 1000976 - RNA, 21 nt, Human
aggcugaggcaggagaauugc

SEQ ID NO: 1000977 - RNA, 24 nt, Human
aggcugaggcaggagaauugcuug

SEQ ID NO: 1000978 - RNA, 19 nt, Human
agggagacagcaaggaaaa

SEQ ID NO: 1000979 - RNA, 24 nt, Human
aggggugguggugggcaccuguaa

SEQ ID NO: 1000980 - RNA, 24 nt, Human
aggggugguggugggcaccuguaa

SEQ ID NO: 1000981 - RNA, 24 nt, Human
agguggagguugcagugaaccgag

SEQ ID NO: 1000982 - RNA, 19 nt, Human
aguacaauaauugaaauuc

SEQ ID NO: 1000983 - RNA, 19 nt, Human
auccucuagauacaaaacc

SEQ ID NO: 1000984 - RNA, 24 nt, Human
aucgugccauugcacuccagccug

SEQ ID NO: 1000985 - RNA, 21 nt, Human
aucucaaaaaaaaaaaaaaag

SEQ ID NO: 1000986 - RNA, 20 nt, Human
auguuucccugaugugauac

SEQ ID NO: 1000987 - RNA, 18 nt, Human
auucacucaccaauccac

SEQ ID NO: 1000988 - RNA, 24 nt, Human
auucuggggagaagagugaagaca

SEQ ID NO: 1000989 - RNA, 18 nt, Human
auugcacuccagccuggg

SEQ ID NO: 1000990 - RNA, 24 nt, Human
caacauggggaaaccccgucucua

SEQ ID NO: 1000991 - RNA, 24 nt, Human
caacauggggaaaccccgucucua

SEQ ID NO: 1000992 - RNA, 24 nt, Human
caagagcaaaacuucaucucaaaa

SEQ ID NO: 1000993 - RNA, 24 nt, Human
caauaauugaaauucacaaauguc

SEQ ID NO: 1000994 - RNA, 21 nt, Human
cacaaaaucacucaauacacc

SEQ ID NO: 1000995 - RNA, 21 nt, Human
cacaaauaagggcaucgaggg

SEQ ID NO: 1000996 - RNA, 19 nt, Human
cacaaggcaauuauuacau

SEQ ID NO: 1000997 - RNA, 21 nt, Human
caccaauccacgggccugauc

SEQ ID NO: 1000998 - RNA, 25 nt, Human
caccaauccacgggccugaucugca

SEQ ID NO: 1000999 - RNA, 26 nt, Human
caccuggacaagaggugcuguacaga

SEQ ID NO: 1001000 - RNA, 23 nt, Human
caccuguaaucccagcuacuugg

SEQ ID NO: 1001001 - RNA, 24 nt, Human
caccuguaaucccagcuacuuggg

SEQ ID NO: 1001002 - RNA, 24 nt, Human
cacgccuguaaucccagcacuuug

SEQ ID NO: 1001003 - RNA, 24 nt, Human
cacgccuguaaucccagcacuuug

SEQ ID NO: 1001004 - RNA, 24 nt, Human
cacuccagccuggggaacaagagc

SEQ ID NO: 1001005 - RNA, 20 nt, Human
cagaaggggcugagugugua

SEQ ID NO: 1001006 - RNA, 21 nt, Human
cagaucccaagguaaauacag

SEQ ID NO: 1001007 - RNA, 22 nt, Human
cagcacuuugggaggccgaggc

SEQ ID NO: 1001008 - RNA, 24 nt, Human
cagcacuuugggaggccgaggcgg

SEQ ID NO: 1001009 - RNA, 24 nt, Human
cagcacuuugggaggccgaggcgg

SEQ ID NO: 1001010 - RNA, 24 nt, Human
cagcuacuugggaggcugaggcag

SEQ ID NO: 1001011 - RNA, 18 nt, Human
caggauccaagcaguuuc

SEQ ID NO: 1001012 - RNA, 18 nt, Human
caggggugguggugggca

SEQ ID NO: 1001013 - RNA, 18 nt, Human
caggggugguggugggca

SEQ ID NO: 1001014 - RNA, 18 nt, Human
cauugcacuccagccugg

SEQ ID NO: 1001015 - RNA, 19 nt, Human
cauugcacuccagccuggg

SEQ ID NO: 1001016 - RNA, 22 nt, Human
cauugcacuccagccuggggaa

SEQ ID NO: 1001017 - RNA, 23 nt, Human
cauugcacuccagccuggggaac

SEQ ID NO: 1001018 - RNA, 24 nt, Human
cauugcacuccagccuggggaaca

SEQ ID NO: 1001019 - RNA, 21 nt, Human
ccaaagacuuccuacuucugc

SEQ ID NO: 1001020 - RNA, 24 nt, Human
ccacaaaaucacucaauacaccuu

SEQ ID NO: 1001021 - RNA, 19 nt, Human
ccauugcacuccagccugg

SEQ ID NO: 1001022 - RNA, 20 nt, Human
ccauugcacuccagccuggg

SEQ ID NO: 1001023 - RNA, 21 nt, Human
ccauugcacuccagccugggg

SEQ ID NO: 1001024 - RNA, 24 nt, Human
ccauugcacuccagccuggggaac

SEQ ID NO: 1001025 - RNA, 22 nt, Human
cccaaagacuuccuacuucugc

SEQ ID NO: 1001026 - RNA, 24 nt, Human
cccaaagacuuccuacuucugccc

SEQ ID NO: 1001027 - RNA, 22 nt, Human
cccaggauccaagcaguuuucu

SEQ ID NO: 1001028 - RNA, 24 nt, Human
cccaggauccaagcaguuuucuug

SEQ ID NO: 1001029 - RNA, 21 nt, Human
ccuguaaucccagcuacuugg

SEQ ID NO: 1001030 - RNA, 20 nt, Human
cgaggcggguggaucaccug

SEQ ID NO: 1001031 - RNA, 20 nt, Human
cgaggcggguggaucaccug

SEQ ID NO: 1001032 - RNA, 24 nt, Human
cgaggcggguggaucaccugaggu

SEQ ID NO: 1001033 - RNA, 24 nt, Human
cgaggcggguggaucaccugaggu

SEQ ID NO: 1001034 - RNA, 26 nt, Human
cgaggcggguggaucaccugagguca

SEQ ID NO: 1001035 - RNA, 26 nt, Human
cgaggcggguggaucaccugagguca

SEQ ID NO: 1001036 - RNA, 23 nt, Human
cgccuguaaucccagcacuuugg

SEQ ID NO: 1001037 - RNA, 24 nt, Human
cgccuguaaucccagcacuuuggg

SEQ ID NO: 1001038 - RNA, 24 nt, Human
cgccuguaaucccagcacuuuggg

SEQ ID NO: 1001039 - RNA, 22 nt, Human
cggaaaaugaugaaaaaaauug

SEQ ID NO: 1001040 - RNA, 23 nt, Human
cggguggaucaccugaggucaga

SEQ ID NO: 1001041 - RNA, 23 nt, Human
cggguggaucaccugaggucaga

SEQ ID NO: 1001042 - RNA, 24 nt, Human
cguggcucacgccuguaaucccag

SEQ ID NO: 1001043 - RNA, 23 nt, Human
cuacuaugcaauaaaacauuagc

SEQ ID NO: 1001044 - RNA, 23 nt, Human
cuacuaugcaauaaaacauuagc

SEQ ID NO: 1001045 - RNA, 22 nt, Human
cuagauacaaaaccucuauacu

SEQ ID NO: 1001046 - RNA, 22 nt, Human
cuauuccacugcuccugccugu

SEQ ID NO: 1001047 - RNA, 18 nt, Human
cucaaaaaaaaaaaaaaa

SEQ ID NO: 1001048 - RNA, 24 nt, Human
cucaaaaaaaaaaaaaaagaaaaa

SEQ ID NO: 1001049 - RNA, 25 nt, Human
cucaaaaaaaaaaaaaaagaaaaaa

SEQ ID NO: 1001050 - RNA, 22 nt, Human
cucacgccuguaaucccagcac

SEQ ID NO: 1001051 - RNA, 22 nt, Human
cucacgccuguaaucccagcac

SEQ ID NO: 1001052 - RNA, 24 nt, Human
cucacgccuguaaucccagcacuu

SEQ ID NO: 1001053 - RNA, 24 nt, Human
cucacgccuguaaucccagcacuu

SEQ ID NO: 1001054 - RNA, 26 nt, Human
cuccacaaaaucacucaauacaccuu

SEQ ID NO: 1001055 - RNA, 18 nt, Human
cugcuccugccuguccug

SEQ ID NO: 1001056 - RNA, 21 nt, Human
cuggcugcugagguuccucuu

SEQ ID NO: 1001057 - RNA, 18 nt, Human
cugggcgccguggcucac

SEQ ID NO: 1001058 - RNA, 18 nt, Human
cugggcgccguggcucac

SEQ ID NO: 1001059 - RNA, 21 nt, Human
cuguaaucccagcuacuuggg

SEQ ID NO: 1001060 - RNA, 19 nt, Human
cuuccuacuucugcccucc

SEQ ID NO: 1001061 - RNA, 18 nt, Human
gagagguggagguugcag

SEQ ID NO: 1001062 - RNA, 23 nt, Human
gagaucgugccauugcacuccag

SEQ ID NO: 1001063 - RNA, 24 nt, Human
gagccuaaccaacauggggaaacc

SEQ ID NO: 1001064 - RNA, 24 nt, Human
gagccuaaccaacauggggaaacc

SEQ ID NO: 1001065 - RNA, 23 nt, Human
gaggcggguggaucaccugaggu

SEQ ID NO: 1001066 - RNA, 23 nt, Human
gagguugcagugaaccgagaucg

SEQ ID NO: 1001067 - RNA, 18 nt, Human
gauaaauaucuggcagaa

SEQ ID NO: 1001068 - RNA, 26 nt, Human
gaucaccugaggucagagguucuaga

SEQ ID NO: 1001069 - RNA, 27 nt, Human
gaucaccugaggucagagguucuagac

SEQ ID NO: 1001070 - RNA, 20 nt, Human
gauucacucaccaauccacg

SEQ ID NO: 1001071 - RNA, 19 nt, Human
ggaagccagcacauacccc

SEQ ID NO: 1001072 - RNA, 23 nt, Human
ggagagacaggaguugaacugag

SEQ ID NO: 1001073 - RNA, 23 nt, Human
ggagguugcagugaaccgagauc

SEQ ID NO: 1001074 - RNA, 24 nt, Human
ggagguugcagugaaccgagaucg

SEQ ID NO: 1001075 - RNA, 24 nt, Human
ggcaccuguaaucccagcuacuug

SEQ ID NO: 1001076 - RNA, 24 nt, Human
ggcgccguggcucacgccuguaaa

SEQ ID NO: 1001077 - RNA, 24 nt, Human
ggcgccguggcucacgccuguaaa

SEQ ID NO: 1001078 - RNA, 21 nt, Human
ggcucacgccuguaaucccag

SEQ ID NO: 1001079 - RNA, 21 nt, Human
gggaaaccccgucucuacuga

SEQ ID NO: 1001080 - RNA, 21 nt, Human
gggaaaccccgucucuacuga

SEQ ID NO: 1001081 - RNA, 22 nt, Human
gggaacaagagcaaaacuucau

SEQ ID NO: 1001082 - RNA, 19 nt, Human
ggggagaagagugaagaca

SEQ ID NO: 1001083 - RNA, 24 nt, Human
gguggugggcaccuguaaucccag

SEQ ID NO: 1001084 - RNA, 24 nt, Human
gguggugggcaccuguaaucccag

SEQ ID NO: 1001085 - RNA, 19 nt, Human
gguuuuuuguuuuauuuug

SEQ ID NO: 1001086 - RNA, 19 nt, Human
gguuuuuuguuuuauuuug

SEQ ID NO: 1001087 - RNA, 18 nt, Human
guacagugugauguuuug

SEQ ID NO: 1001088 - RNA, 18 nt, Human
guacagugugauguuuug

SEQ ID NO: 1001089 - RNA, 23 nt, Human
guggcucacgccuguaaucccag

SEQ ID NO: 1001090 - RNA, 23 nt, Human
guggcucacgccuguaaucccag

SEQ ID NO: 1001091 - RNA, 24 nt, Human
gugguacagugugauguuuugaua

SEQ ID NO: 1001092 - RNA, 24 nt, Human
gugguacagugugauguuuugaua

SEQ ID NO: 1001093 - RNA, 23 nt, Human
guggugggcaccuguaaucccag

SEQ ID NO: 1001094 - RNA, 21 nt, Human
uaaauaucuggcagaaguaau

SEQ ID NO: 1001095 - RNA, 21 nt, Human
uaaggacucauucauugguga

SEQ ID NO: 1001096 - RNA, 22 nt, Human
uaagggcaucgaggguaaacug

SEQ ID NO: 1001097 - RNA, 19 nt, Human
uacacugcugguauaugga

SEQ ID NO: 1001098 - RNA, 21 nt, Human
uacagaaggggcugagugugu

SEQ ID NO: 1001099 - RNA, 23 nt, Human
uacuucaggaauuuauuuuuuca

SEQ ID NO: 1001100 - RNA, 23 nt, Human
uacuucaggaauuuauuuuuuca

SEQ ID NO: 1001101 - RNA, 21 nt, Human
uauuccacugcuccugccugu

SEQ ID NO: 1001102 - RNA, 19 nt, Human
uauuuuaagaaaauaagca

SEQ ID NO: 1001103 - RNA, 19 nt, Human
uauuuuaagaaaauaagca

SEQ ID NO: 1001104 - RNA, 19 nt, Human
ucaaaaaaaaaaaaaaaga

SEQ ID NO: 1001105 - RNA, 19 nt, Human
ucacaguuacacugcuggu

SEQ ID NO: 1001106 - RNA, 22 nt, Human
ucaucucaaaaaaaaaaaaaaa

SEQ ID NO: 1001107 - RNA, 24 nt, Human
ucccaaagacuuccuacuucugcc

SEQ ID NO: 1001108 - RNA, 23 nt, Human
ucgugccauugcacuccagccug

SEQ ID NO: 1001109 - RNA, 24 nt, Human
ucucaaaaaaaaaaaaaaagaaaa

SEQ ID NO: 1001110 - RNA, 19 nt, Human
ucucuacugaaaauacaaa

SEQ ID NO: 1001111 - RNA, 21 nt, Human
ucucuacugaaaauacaaauu

SEQ ID NO: 1001112 - RNA, 24 nt, Human
ucucuuuaacucacaaauaagggc

SEQ ID NO: 1001113 - RNA, 22 nt, Human
ucuggggagaagagugaagaca

SEQ ID NO: 1001114 - RNA, 18 nt, Human
ucugguaucuugucccuc

SEQ ID NO: 1001115 - RNA, 18 nt, Human
ucuucuuagucaguguca

SEQ ID NO: 1001116 - RNA, 22 nt, Human
ugaaccgagaucgugccauugc

SEQ ID NO: 1001117 - RNA, 22 nt, Human
ugaacugagauccucuagauac

SEQ ID NO: 1001118 - RNA, 21 nt, Human
ugaaggacguucaaauagaaa

SEQ ID NO: 1001119 - RNA, 20 nt, Human
ugacacagggcuaaggacuc

SEQ ID NO: 1001120 - RNA, 23 nt, Human
ugagagaaaacugggaggaaccu

SEQ ID NO: 1001121 - RNA, 25 nt, Human
ugagagaaaacugggaggaaccuug

SEQ ID NO: 1001122 - RNA, 21 nt, Human
ugagagcccaggaugccagua

SEQ ID NO: 1001123 - RNA, 24 nt, Human
ugagagguggagguugcagugaac

SEQ ID NO: 1001124 - RNA, 24 nt, Human
ugaggcaggagaauugcuugaauc

SEQ ID NO: 1001125 - RNA, 25 nt, Human
ugaggcaggagaauugcuugaaucu

SEQ ID NO: 1001126 - RNA, 21 nt, Human
uggaagccagcacauaccccc

SEQ ID NO: 1001127 - RNA, 24 nt, Human
uggaucaccugaggucagagguuc

SEQ ID NO: 1001128 - RNA, 24 nt, Human
uggaucaccugaggucagagguuc

SEQ ID NO: 1001129 - RNA, 22 nt, Human
uggcucacgccuguaaucccag

SEQ ID NO: 1001130 - RNA, 22 nt, Human
uggcucacgccuguaaucccag

SEQ ID NO: 1001131 - RNA, 24 nt, Human
uggcucacgccuguaaucccagca

SEQ ID NO: 1001132 - RNA, 24 nt, Human
uggcucacgccuguaaucccagca

SEQ ID NO: 1001133 - RNA, 23 nt, Human
ugggaggccgaggcggguggauc

SEQ ID NO: 1001134 - RNA, 23 nt, Human
ugggaggccgaggcggguggauc

SEQ ID NO: 1001135 - RNA, 24 nt, Human
ugggaggccgaggcggguggauca

SEQ ID NO: 1001136 - RNA, 24 nt, Human
ugggaggccgaggcggguggauca

SEQ ID NO: 1001137 - RNA, 19 nt, Human
ugggaggcugaggcaggag

SEQ ID NO: 1001138 - RNA, 22 nt, Human
ugggaggcugaggcaggagaau

SEQ ID NO: 1001139 - RNA, 22 nt, Human
uggugggcaccuguaaucccag

SEQ ID NO: 1001140 - RNA, 24 nt, Human
ugguggugggcaccuguaauccca

SEQ ID NO: 1001141 - RNA, 24 nt, Human
ugguggugggcaccuguaauccca

SEQ ID NO: 1001142 - RNA, 25 nt, Human
ugugauguuuugauacauguauaca

SEQ ID NO: 1001143 - RNA, 25 nt, Human
ugugauguuuugauacauguauaca

SEQ ID NO: 1001144 - RNA, 24 nt, Human
uuagccaggggugguggugggcac

SEQ ID NO: 1001145 - RNA, 24 nt, Human
uuagccaggggugguggugggcac

SEQ ID NO: 1001146 - RNA, 24 nt, Human
uucaaaauccucucuucuagcuau

SEQ ID NO: 1001147 - RNA, 24 nt, Human
uucaaaauccucucuucuagcuau

SEQ ID NO: 1001148 - RNA, 25 nt, Human
uucaaaauccucucuucuagcuauu

SEQ ID NO: 1001149 - RNA, 20 nt, Human
uuccacugcuccugccuguc

SEQ ID NO: 1001150 - RNA, 21 nt, Human
uucuagacgagccuaaccaac

SEQ ID NO: 1001151 - RNA, 24 nt, Human
uugaaucugagagguggagguugc

SEQ ID NO: 1001152 - RNA, 22 nt, Human
uugcagugaaccgagaucgugc

SEQ ID NO: 1001153 - RNA, 24 nt, Human
uugcuugaaucugagagguggagg

SEQ ID NO: 1001154 - RNA, 25 nt, Human
uugggaggccgaggcggguggauca

SEQ ID NO: 1001155 - RNA, 25 nt, Human
uugggaggccgaggcggguggauca

SEQ ID NO: 1001156 - RNA, 23 nt, Human
uugggaggcugaggcaggagaau

SEQ ID NO: 1001157 - RNA, 20 nt, Human
uuuaugugguacagugugau

SEQ ID NO: 1001158 - RNA, 20 nt, Human
uuuaugugguacagugugau

SEQ ID NO: 1001159 - RNA, 25 nt, Human
uuuuuuguuuuauuuugcuuuuaau

SEQ ID NO: 1001160 - RNA, 21 nt, Human
aaaaaacaacaaaagaauuga

SEQ ID NO: 1001161 - RNA, 22 nt, Human
aaaaaacaacaaaagaauugag

SEQ ID NO: 1001162 - RNA, 25 nt, Human
aaaaaacaacaaaagaauugagaac

SEQ ID NO: 1001163 - RNA, 22 nt, Human
aaaaacagaagaucagaaggga

SEQ ID NO: 1001164 - RNA, 20 nt, Human
aaaaaccaaaaaacaacaaa

SEQ ID NO: 1001165 - RNA, 21 nt, Human
aaaacaacaaaagaauugaga

SEQ ID NO: 1001166 - RNA, 19 nt, Human
aaaacgaaagaacugucug

SEQ ID NO: 1001167 - RNA, 18 nt, Human
aaaauuaguugggcaugg

SEQ ID NO: 1001168 - RNA, 24 nt, Human
aaacaacaaaagaauugagaacac

SEQ ID NO: 1001169 - RNA, 19 nt, Human
aaacagaagaucagaaggg

SEQ ID NO: 1001170 - RNA, 19 nt, Human
aaagcgcccccuauccacc

SEQ ID NO: 1001171 - RNA, 19 nt, Human
aaagcgcccccuauccacc

SEQ ID NO: 1001172 - RNA, 19 nt, Human
aacacggugaaacccuauc

SEQ ID NO: 1001173 - RNA, 20 nt, Human
aacacggugaaacccuaucu

SEQ ID NO: 1001174 - RNA, 21 nt, Human
aacacggugaaacccuaucuc

SEQ ID NO: 1001175 - RNA, 19 nt, Human
aagauguuuccugccugua

SEQ ID NO: 1001176 - RNA, 21 nt, Human
aagcgcccccuauccaccuca

SEQ ID NO: 1001177 - RNA, 22 nt, Human
aauaacauacuuuauuuaaucc

SEQ ID NO: 1001178 - RNA, 23 nt, Human
aaugguguauuucagcaaguugu

SEQ ID NO: 1001179 - RNA, 27 nt, Human
acaacaaaagaauugagaacacagagg

SEQ ID NO: 1001180 - RNA, 22 nt, Human
acagaaaaacagaagaucagaa

SEQ ID NO: 1001181 - RNA, 23 nt, Human
acagaaaaacagaagaucagaag

SEQ ID NO: 1001182 - RNA, 24 nt, Human
acagagcgagauuccaucucaaaa

SEQ ID NO: 1001183 - RNA, 24 nt, Human
acccaggaggcagagguugcagug

SEQ ID NO: 1001184 - RNA, 20 nt, Human
acuaugcuuaauggcaaaau

SEQ ID NO: 1001185 - RNA, 24 nt, Human
acugucugggcgcggcggcucaca

SEQ ID NO: 1001186 - RNA, 24 nt, Human
acuugcggucaggaguucgagauc

SEQ ID NO: 1001187 - RNA, 18 nt, Human
agaaaaacagaagaucag

SEQ ID NO: 1001188 - RNA, 23 nt, Human
agaaccuggcaaagauauuacaa

SEQ ID NO: 1001189 - RNA, 24 nt, Human
agaaucacaugcugauaagccuca

SEQ ID NO: 1001190 - RNA, 21 nt, Human
agaccgaggcggguggaucac

SEQ ID NO: 1001191 - RNA, 22 nt, Human
agagguugcagugagccgagau

SEQ ID NO: 1001192 - RNA, 24 nt, Human
agagguugcagugagccgagauug

SEQ ID NO: 1001193 - RNA, 24 nt, Human
agccuggccaacacggugaaaccc

SEQ ID NO: 1001194 - RNA, 24 nt, Human
agccugggcgacagagcgagauuc

SEQ ID NO: 1001195 - RNA, 18 nt, Human
agcuacucuccuggcucc

SEQ ID NO: 1001196 - RNA, 23 nt, Human
aggagguucgcuugaacccagga

SEQ ID NO: 1001197 - RNA, 21 nt, Human
aggcagagguugcagugagcc

SEQ ID NO: 1001198 - RNA, 24 nt, Human
aggcagagguugcagugagccgag

SEQ ID NO: 1001199 - RNA, 18 nt, Human
aggcaggagguucgcuug

SEQ ID NO: 1001200 - RNA, 24 nt, Human
aggcaggagguucgcuugaaccca

SEQ ID NO: 1001201 - RNA, 26 nt, Human
aggcggguggaucacuugcggucagg

SEQ ID NO: 1001202 - RNA, 22 nt, Human
aguguggaaaagcuggaagaaa

SEQ ID NO: 1001203 - RNA, 20 nt, Human
aguugugguaacaaauugaa

SEQ ID NO: 1001204 - RNA, 21 nt, Human
aucacuugcggucaggaguuc

SEQ ID NO: 1001205 - RNA, 18 nt, Human
aucauccucuuccuuuaa

SEQ ID NO: 1001206 - RNA, 24 nt, Human
augcugaggcaggagguucgcuug

SEQ ID NO: 1001207 - RNA, 24 nt, Human
auugcgccagugcacuccagccug

SEQ ID NO: 1001208 - RNA, 18 nt, Human
caaaaaccaaaaaacaac

SEQ ID NO: 1001209 - RNA, 21 nt, Human
caaaaaccaaaaaacaacaaa

SEQ ID NO: 1001210 - RNA, 21 nt, Human
caaaauacugaaagcgccccc

SEQ ID NO: 1001211 - RNA, 23 nt, Human
caaaauacugaaagcgcccccua

SEQ ID NO: 1001212 - RNA, 24 nt, Human
cacaucuguaaucccagcacuuug

SEQ ID NO: 1001213 - RNA, 21 nt, Human
cacaugcugauaagccucagg

SEQ ID NO: 1001214 - RNA, 20 nt, Human
caccacugggugcauccuag

SEQ ID NO: 1001215 - RNA, 23 nt, Human
caccucaagaccugucaucaguc

SEQ ID NO: 1001216 - RNA, 23 nt, Human
cacuccagccugggcgacagagc

SEQ ID NO: 1001217 - RNA, 24 nt, Human
cacuccagccugggcgacagagcg

SEQ ID NO: 1001218 - RNA, 20 nt, Human
cagagccaaggacuugaagc

SEQ ID NO: 1001219 - RNA, 24 nt, Human
cagcacuuugggagaccgaggcgg

SEQ ID NO: 1001220 - RNA, 19 nt, Human
cagugcacuccagccuggg

SEQ ID NO: 1001221 - RNA, 22 nt, Human
cagugcacuccagccugggcga

SEQ ID NO: 1001222 - RNA, 23 nt, Human
cagugcacuccagccugggcgac

SEQ ID NO: 1001223 - RNA, 24 nt, Human
cagugcacuccagccugggcgaca

SEQ ID NO: 1001224 - RNA, 23 nt, Human
caucucaaaaaagauucaaaaac

SEQ ID NO: 1001225 - RNA, 23 nt, Human
caucuguaaucccagcacuuugg

SEQ ID NO: 1001226 - RNA, 22 nt, Human
caugguggugggugccuguaau

SEQ ID NO: 1001227 - RNA, 18 nt, Human
ccaacccugauuucuaag

SEQ ID NO: 1001228 - RNA, 21 nt, Human
ccagugcacuccagccugggc

SEQ ID NO: 1001229 - RNA, 22 nt, Human
ccagugcacuccagccugggcg

SEQ ID NO: 1001230 - RNA, 23 nt, Human
ccagugcacuccagccugggcga

SEQ ID NO: 1001231 - RNA, 24 nt, Human
ccagugcacuccagccugggcgac

SEQ ID NO: 1001232 - RNA, 21 nt, Human
ccugcaucaaucaaaaaaaac

SEQ ID NO: 1001233 - RNA, 22 nt, Human
ccugccugcccaacccugauuu

SEQ ID NO: 1001234 - RNA, 19 nt, Human
ccuggaucagagccaagga

SEQ ID NO: 1001235 - RNA, 22 nt, Human
ccuggccaacacggugaaaccc

SEQ ID NO: 1001236 - RNA, 24 nt, Human
ccuggccaacacggugaaacccua

SEQ ID NO: 1001237 - RNA, 19 nt, Human
ccuggcuccugccugccca

SEQ ID NO: 1001238 - RNA, 22 nt, Human
ccugggcgacagagcgagauuc

SEQ ID NO: 1001239 - RNA, 21 nt, Human
ccuguaaucccagcuacuugg

SEQ ID NO: 1001240 - RNA, 21 nt, Human
cgaaagaacugucugggcgcg

SEQ ID NO: 1001241 - RNA, 24 nt, Human
cgagaucagccuggccaacacggu

SEQ ID NO: 1001242 - RNA, 24 nt, Human
cgaggcggguggaucacuugcggu

SEQ ID NO: 1001243 - RNA, 22 nt, Human
cggcucacaucuguaaucccag

SEQ ID NO: 1001244 - RNA, 24 nt, Human
cggguggaucacuugcggucagga

SEQ ID NO: 1001245 - RNA, 25 nt, Human
cucaaaaaagauucaaaaaccaaaa

SEQ ID NO: 1001246 - RNA, 24 nt, Human
cucacaucuguaaucccagcacuu

SEQ ID NO: 1001247 - RNA, 18 nt, Human
cucuccccacuacucuuu

SEQ ID NO: 1001248 - RNA, 23 nt, Human
cuggccaacacggugaaacccua

SEQ ID NO: 1001249 - RNA, 21 nt, Human
cuguaaucccagcacuuuggg

SEQ ID NO: 1001250 - RNA, 23 nt, Human
gagauugcgccagugcacuccag

SEQ ID NO: 1001251 - RNA, 25 nt, Human
gaggcggguggaucacuugcgguca

SEQ ID NO: 1001252 - RNA, 24 nt, Human
gaucacuugcggucaggaguucga

SEQ ID NO: 1001253 - RNA, 21 nt, Human
gcaaaauacugaaagcgcccc

SEQ ID NO: 1001254 - RNA, 24 nt, Human
gcacuccagccugggcgacagagc

SEQ ID NO: 1001255 - RNA, 22 nt, Human
gcaggagguucgcuugaaccca

SEQ ID NO: 1001256 - RNA, 19 nt, Human
gcauaaagagaguguggaa

SEQ ID NO: 1001257 - RNA, 24 nt, Human
gccaacacggugaaacccuaucuc

SEQ ID NO: 1001258 - RNA, 22 nt, Human
gccagugcacuccagccugggc

SEQ ID NO: 1001259 - RNA, 19 nt, Human
gccuggaucagagccaagg

SEQ ID NO: 1001260 - RNA, 23 nt, Human
gcggcucacaucuguaaucccag

SEQ ID NO: 1001261 - RNA, 22 nt, Human
ggaggcagagguugcagugagc

SEQ ID NO: 1001262 - RNA, 23 nt, Human
ggcucacaucuguaaucccagca

SEQ ID NO: 1001263 - RNA, 24 nt, Human
gggcaugguggugggugccuguaa

SEQ ID NO: 1001264 - RNA, 24 nt, Human
gggcgcggcggcucacaucuguaa

SEQ ID NO: 1001265 - RNA, 24 nt, Human
ggugccuguaaucccagcuacuug

SEQ ID NO: 1001266 - RNA, 24 nt, Human
gguggugggugccuguaaucccag

SEQ ID NO: 1001267 - RNA, 20 nt, Human
guauauauuuuauacauuga

SEQ ID NO: 1001268 - RNA, 18 nt, Human
gugccuguaaucccagcu

SEQ ID NO: 1001269 - RNA, 19 nt, Human
guugcagugagccgagauu

SEQ ID NO: 1001270 - RNA, 24 nt, Human
uaaaacgaaagaacugucugggcg

SEQ ID NO: 1001271 - RNA, 18 nt, Human
uacguuaucaaaauaaau

SEQ ID NO: 1001272 - RNA, 22 nt, Human
uacucuccuggcuccugccugc

SEQ ID NO: 1001273 - RNA, 21 nt, Human
uagaaccuggcaaagauauua

SEQ ID NO: 1001274 - RNA, 24 nt, Human
uagaugagaacaaaaucuaaacaa

SEQ ID NO: 1001275 - RNA, 19 nt, Human
uaugaaguacucaacagac

SEQ ID NO: 1001276 - RNA, 21 nt, Human
uaugaaguacucaacagacau

SEQ ID NO: 1001277 - RNA, 22 nt, Human
ucaaaauaaauccaguauugca

SEQ ID NO: 1001278 - RNA, 20 nt, Human
ucacuugcggucaggaguuc

SEQ ID NO: 1001279 - RNA, 18 nt, Human
ucagaagggagaaucaca

SEQ ID NO: 1001280 - RNA, 23 nt, Human
uccagccugggcgacagagcgag

SEQ ID NO: 1001281 - RNA, 24 nt, Human
uccagccugggcgacagagcgaga

SEQ ID NO: 1001282 - RNA, 22 nt, Human
ucgcuugaacccaggaggcaga

SEQ ID NO: 1001283 - RNA, 25 nt, Human
ugaaguaaaucaauguacuaagcca

SEQ ID NO: 1001284 - RNA, 23 nt, Human
ugaaguacucaacagacauuggu

SEQ ID NO: 1001285 - RNA, 25 nt, Human
ugaauaacauacuuuauuuaaucca

SEQ ID NO: 1001286 - RNA, 27 nt, Human
ugagaacacagaaaaacagcaggaacu

SEQ ID NO: 1001287 - RNA, 24 nt, Human
ugagaacacagaaaaacuggagac

SEQ ID NO: 1001288 - RNA, 22 nt, Human
ugagccgagauugcgccagugc

SEQ ID NO: 1001289 - RNA, 24 nt, Human
ugaggcaggagguucgcuugaacc

SEQ ID NO: 1001290 - RNA, 25 nt, Human
ugaggcaggagguucgcuugaaccc

SEQ ID NO: 1001291 - RNA, 21 nt, Human
ugcaauacacaaaggaaaagu

SEQ ID NO: 1001292 - RNA, 21 nt, Human
ugcaccucucuaccaaaguca

SEQ ID NO: 1001293 - RNA, 22 nt, Human
ugcacuccagccugggcgacag

SEQ ID NO: 1001294 - RNA, 23 nt, Human
ugccuguaaucccagcuacuugg

SEQ ID NO: 1001295 - RNA, 24 nt, Human
ugccuguaaucccagcuacuuggg

SEQ ID NO: 1001296 - RNA, 26 nt, Human
ugcgccagugcacuccagccugggcg

SEQ ID NO: 1001297 - RNA, 25 nt, Human
ugcggucaggaguucgagaucagcc

SEQ ID NO: 1001298 - RNA, 24 nt, Human
uggaucacuugcggucaggaguuc

SEQ ID NO: 1001299 - RNA, 18 nt, Human
uggcaaaauacugaaagc

SEQ ID NO: 1001300 - RNA, 18 nt, Human
uggcaaaauacugaaagc

SEQ ID NO: 1001301 - RNA, 24 nt, Human
ugggagaccgaggcggguggauca

SEQ ID NO: 1001302 - RNA, 22 nt, Human
uggugggugccuguaaucccag

SEQ ID NO: 1001303 - RNA, 24 nt, Human
uggugggugccuguaaucccagcu

SEQ ID NO: 1001304 - RNA, 24 nt, Human
ugguggugggugccuguaauccca

SEQ ID NO: 1001305 - RNA, 23 nt, Human
uguagaauccuggaaucuguggc

SEQ ID NO: 1001306 - RNA, 21 nt, Human
uguagcuacucuccuggcucc

SEQ ID NO: 1001307 - RNA, 23 nt, Human
uguaguaaauuaacagaucagaa

SEQ ID NO: 1001308 - RNA, 23 nt, Human
ugucaucagucaaagaugcuuac

SEQ ID NO: 1001309 - RNA, 23 nt, Human
uguggaaaagcuggaagaaauca

SEQ ID NO: 1001310 - RNA, 23 nt, Human
uuaaaacgaaagaacugucuggg

SEQ ID NO: 1001311 - RNA, 21 nt, Human
uuacugcaauuaauuugaaag

SEQ ID NO: 1001312 - RNA, 19 nt, Human
uuagagcucaauccuauac

SEQ ID NO: 1001313 - RNA, 24 nt, Human
uuaguugggcaugguggugggugc

SEQ ID NO: 1001314 - RNA, 25 nt, Human
uucaaaaaacauauugcaccucucu

SEQ ID NO: 1001315 - RNA, 18 nt, Human
uucaauuugaguuugaag

SEQ ID NO: 1001316 - RNA, 23 nt, Human
uucauauuuucucuuuguguuuu

SEQ ID NO: 1001317 - RNA, 22 nt, Human
uugaaguagguauuugaaaucu

SEQ ID NO: 1001318 - RNA, 18 nt, Human
uugcagugagccgagauu

SEQ ID NO: 1001319 - RNA, 20 nt, Human
uugcagugagccgagauugc

SEQ ID NO: 1001320 - RNA, 22 nt, Human
uugcagugagccgagauugcgc

SEQ ID NO: 1001321 - RNA, 23 nt, Human
uugcgccagugcacuccagccug

SEQ ID NO: 1001322 - RNA, 19 nt, Human
uuguuucuacccucacaug

SEQ ID NO: 1001323 - RNA, 18 nt, Human
aagaugcuuccgcaggcc

SEQ ID NO: 1001324 - RNA, 18 nt, Human
acaauuauguggacaccc

SEQ ID NO: 1001325 - RNA, 19 nt, Human
acagcuccaguuuaagcca

SEQ ID NO: 1001326 - RNA, 19 nt, Human
agcugggcgccgagggccc

SEQ ID NO: 1001327 - RNA, 18 nt, Human
aggcagagacucgagccc

SEQ ID NO: 1001328 - RNA, 24 nt, Human
auaauauggacucuauuaucuuuc

SEQ ID NO: 1001329 - RNA, 21 nt, Human
auucugcgguuccauagcaca

SEQ ID NO: 1001330 - RNA, 22 nt, Human
cacacacuccaacaccacacac

SEQ ID NO: 1001331 - RNA, 23 nt, Human
caccacacacaccgagcccuggu

SEQ ID NO: 1001332 - RNA, 25 nt, Human
cacuccaacaccacacacaccgagc

SEQ ID NO: 1001333 - RNA, 24 nt, Human
cagcuccaguuuaagccaguuguu

SEQ ID NO: 1001334 - RNA, 18 nt, Human
ccauagcacacacuccaa

SEQ ID NO: 1001335 - RNA, 22 nt, Human
ccucacaggacgcggagcuggg

SEQ ID NO: 1001336 - RNA, 20 nt, Human
cgagcccggggcgcgcccgg

SEQ ID NO: 1001337 - RNA, 21 nt, Human
cgggaggggaggcgcacguug

SEQ ID NO: 1001338 - RNA, 19 nt, Human
cuuuaaaaagcucugguuu

SEQ ID NO: 1001339 - RNA, 23 nt, Human
gagccgggaggggaggcgcacgu

SEQ ID NO: 1001340 - RNA, 22 nt, Human
gcacacacuccaacaccacaca

SEQ ID NO: 1001341 - RNA, 19 nt, Human
gcccggggcgcgcccggcu

SEQ ID NO: 1001342 - RNA, 19 nt, Human
gcgcgcccggcugggagcc

SEQ ID NO: 1001343 - RNA, 23 nt, Human
ggcugggagccgggaggggaggc

SEQ ID NO: 1001344 - RNA, 19 nt, Human
guacaacaauuauguggac

SEQ ID NO: 1001345 - RNA, 20 nt, Human
guacaacaauuauguggaca

SEQ ID NO: 1001346 - RNA, 19 nt, Human
uacaacaauuauguggaca

SEQ ID NO: 1001347 - RNA, 18 nt, Human
uacaagaugcuuccgcag

SEQ ID NO: 1001348 - RNA, 26 nt, Human
uccaacaccacacacaccgagcccug

SEQ ID NO: 1001349 - RNA, 23 nt, Human
uccgcgcacccagaucuggucgc

SEQ ID NO: 1001350 - RNA, 25 nt, Human
ugggagaggaagggcggggcugguc

SEQ ID NO: 1001351 - RNA, 19 nt, Human
ugggagccgggaggggagg

SEQ ID NO: 1001352 - RNA, 21 nt, Human
ugggagccgggaggggaggcg

SEQ ID NO: 1001353 - RNA, 18 nt, Human
uguacaacaauuaugugg

SEQ ID NO: 1001354 - RNA, 18 nt, Human
uucgcugggacagcucca

SEQ ID NO: 1001355 - RNA, 19 nt, Human
uucugcgguuccauagcac

SEQ ID NO: 1001356 - RNA, 24 nt, Human
uucugcgguuccauagcacacacu

SEQ ID NO: 1001357 - RNA, 22 nt, Human
uuuaagccaguuguuuugcaau

SEQ ID NO: 1001358 - RNA, 22 nt, Human
uuuucacuuuaaaaagcucugg

SEQ ID NO: 1001359 - RNA, 25 nt, Human
aaaaaacucacuucaaauucaaagc

SEQ ID NO: 1001360 - RNA, 22 nt, Human
aaaaagcucaauugguaaagac

SEQ ID NO: 1001361 - RNA, 22 nt, Human
aaaaucucggucaugcgcacau

SEQ ID NO: 1001362 - RNA, 22 nt, Human
aaaauuaugccaaaaaggaaag

SEQ ID NO: 1001363 - RNA, 18 nt, Human
aaacaauuguacauaagc

SEQ ID NO: 1001364 - RNA, 19 nt, Human
aaaccaugcaccaaacaug

SEQ ID NO: 1001365 - RNA, 20 nt, Human
aaacucacuucaaauucaaa

SEQ ID NO: 1001366 - RNA, 20 nt, Human
aaacugaaacaagaaggcca

SEQ ID NO: 1001367 - RNA, 21 nt, Human
aaagugccauuuuauaaaguu

SEQ ID NO: 1001368 - RNA, 21 nt, Human
aacaacaaagacaacaacaac

SEQ ID NO: 1001369 - RNA, 18 nt, Human
aacagccuugacaagugu

SEQ ID NO: 1001370 - RNA, 20 nt, Human
aacaugauggaugccuucug

SEQ ID NO: 1001371 - RNA, 25 nt, Human
aaccauuuacagccagaaaagguua

SEQ ID NO: 1001372 - RNA, 21 nt, Human
aagcaggaugcacacaacucc

SEQ ID NO: 1001373 - RNA, 21 nt, Human
aagcccuccucaaaaaccaug

SEQ ID NO: 1001374 - RNA, 20 nt, Human
acaaaagcccuccucaaaaa

SEQ ID NO: 1001375 - RNA, 24 nt, Human
acaaagacaacaacaacaacaaaa

SEQ ID NO: 1001376 - RNA, 19 nt, Human
acaacaacaacaacaaaac

SEQ ID NO: 1001377 - RNA, 18 nt, Human
acccuguuauuguucaga

SEQ ID NO: 1001378 - RNA, 22 nt, Human
acucugcucaaagcaaaaacua

SEQ ID NO: 1001379 - RNA, 25 nt, Human
acuguguguguguuuaugggugugu

SEQ ID NO: 1001380 - RNA, 20 nt, Human
acuuaaacccccagcuccac

SEQ ID NO: 1001381 - RNA, 21 nt, Human
agaaaaaacugaaacaagaag

SEQ ID NO: 1001382 - RNA, 20 nt, Human
agaaaaaauagacaaauaug

SEQ ID NO: 1001383 - RNA, 18 nt, Human
agacaaauaugcacaugc

SEQ ID NO: 1001384 - RNA, 25 nt, Human
aggaggcucuggccacugcucaccc

SEQ ID NO: 1001385 - RNA, 20 nt, Human
auaaaacuuauagaaaaaau

SEQ ID NO: 1001386 - RNA, 18 nt, Human
aucacaugcagcuccacc

SEQ ID NO: 1001387 - RNA, 21 nt, Human
augggugugugcaugugugug

SEQ ID NO: 1001388 - RNA, 21 nt, Human
augguggaggcggcggcggca

SEQ ID NO: 1001389 - RNA, 24 nt, Human
caaaagagaaccaucacuuaaacc

SEQ ID NO: 1001390 - RNA, 22 nt, Human
caaaagcccuccucaaaaacca

SEQ ID NO: 1001391 - RNA, 24 nt, Human
caaagacaacaacaacaacaaaac

SEQ ID NO: 1001392 - RNA, 21 nt, Human
caaaugaccaacaacaaagac

SEQ ID NO: 1001393 - RNA, 20 nt, Human
caacaacaacaaaacauccc

SEQ ID NO: 1001394 - RNA, 18 nt, Human
caagcaagggugcaugca

SEQ ID NO: 1001395 - RNA, 18 nt, Human
cacuccucagcuacuccc

SEQ ID NO: 1001396 - RNA, 18 nt, Human
cacugcuggaagcacauc

SEQ ID NO: 1001397 - RNA, 21 nt, Human
cacugcuggaagcacauccca

SEQ ID NO: 1001398 - RNA, 22 nt, Human
cagggcaaaaaugccagaaaag

SEQ ID NO: 1001399 - RNA, 18 nt, Human
cagugcuugugaaauuug

SEQ ID NO: 1001400 - RNA, 19 nt, Human
caguuauagaaagcaugga

SEQ ID NO: 1001401 - RNA, 22 nt, Human
caucuacuacaacccucaccuc

SEQ ID NO: 1001402 - RNA, 19 nt, Human
caugaagaaguugguugcu

SEQ ID NO: 1001403 - RNA, 23 nt, Human
ccagaaagacccaauuuuaucca

SEQ ID NO: 1001404 - RNA, 21 nt, Human
cccuaagcauugcaacagggc

SEQ ID NO: 1001405 - RNA, 18 nt, Human
ccgcccacuccucagcua

SEQ ID NO: 1001406 - RNA, 18 nt, Human
ccucaaaaaccaugcacc

SEQ ID NO: 1001407 - RNA, 22 nt, Human
ccucaagcugccugccuggccc

SEQ ID NO: 1001408 - RNA, 18 nt, Human
ccucuaaaaaggccgaag

SEQ ID NO: 1001409 - RNA, 27 nt, Human
ccugcuguuuuugggguuuuuguuuug

SEQ ID NO: 1001410 - RNA, 22 nt, Human
cgauaaaaagcucaauugguaa

SEQ ID NO: 1001411 - RNA, 21 nt, Human
cggauguaaaauuucagguca

SEQ ID NO: 1001412 - RNA, 18 nt, Human
cggcggcggcaggcagcg

SEQ ID NO: 1001413 - RNA, 21 nt, Human
cggcggcggcaggcagcggag

SEQ ID NO: 1001414 - RNA, 20 nt, Human
cguaaaggcaccucaagcug

SEQ ID NO: 1001415 - RNA, 20 nt, Human
cuaagcauugcaacagggcu

SEQ ID NO: 1001416 - RNA, 18 nt, Human
cucauucuuagaaacacu

SEQ ID NO: 1001417 - RNA, 26 nt, Human
cuccaggggcccgaggguggcgccgg

SEQ ID NO: 1001418 - RNA, 18 nt, Human
cuccaugcggagugcccc

SEQ ID NO: 1001419 - RNA, 18 nt, Human
cuccucagcuacucccgc

SEQ ID NO: 1001420 - RNA, 24 nt, Human
cucguaaaggcaccucaagcugcc

SEQ ID NO: 1001421 - RNA, 24 nt, Human
cugaauauugacaaaugaccaaca

SEQ ID NO: 1001422 - RNA, 21 nt, Human
cuggcccuggaugccauguga

SEQ ID NO: 1001423 - RNA, 21 nt, Human
cuuagaaacacugaaaacaau

SEQ ID NO: 1001424 - RNA, 28 nt, Human
gaaaaaauagacaaauaugcacaugcaa

SEQ ID NO: 1001425 - RNA, 25 nt, Human
gaaggcacuccaacucugcucaaag

SEQ ID NO: 1001426 - RNA, 27 nt, Human
gaccaacaacaaagacaacaacaacaa

SEQ ID NO: 1001427 - RNA, 27 nt, Human
gaggcggcggcggcaggcagcggagga

SEQ ID NO: 1001428 - RNA, 18 nt, Human
gaggguggcgccggggag

SEQ ID NO: 1001429 - RNA, 24 nt, Human
gcacagcucucaggucuguggggg

SEQ ID NO: 1001430 - RNA, 25 nt, Human
gcacugcuggaagcacaucccacac

SEQ ID NO: 1001431 - RNA, 19 nt, Human
gcggcaggcagcggaggag

SEQ ID NO: 1001432 - RNA, 20 nt, Human
gcggcagguuugccaggucc

SEQ ID NO: 1001433 - RNA, 19 nt, Human
gcuacuaaaaaaacuuuaa

SEQ ID NO: 1001434 - RNA, 24 nt, Human
ggaaaaaaacucacuucaaauuca

SEQ ID NO: 1001435 - RNA, 24 nt, Human
ggcaagaagugagcagaagggacc

SEQ ID NO: 1001436 - RNA, 22 nt, Human
ggcaggcagcggaggaggaagc

SEQ ID NO: 1001437 - RNA, 26 nt, Human
ggcuuggacccccuuuuaauacagau

SEQ ID NO: 1001438 - RNA, 18 nt, Human
gggccuggcuuggacccc

SEQ ID NO: 1001439 - RNA, 20 nt, Human
gggggaaaaaguaaauuaga

SEQ ID NO: 1001440 - RNA, 21 nt, Human
ggggggaaaaaguaaauuaga

SEQ ID NO: 1001441 - RNA, 22 nt, Human
gggguuuccgcccacuccucag

SEQ ID NO: 1001442 - RNA, 25 nt, Human
ggugauggggggggaauugggggga

SEQ ID NO: 1001443 - RNA, 18 nt, Human
gguuuucucguaaaggca

SEQ ID NO: 1001444 - RNA, 20 nt, Human
gugcagcaugcggcagguuu

SEQ ID NO: 1001445 - RNA, 18 nt, Human
gugcaugcacagugugga

SEQ ID NO: 1001446 - RNA, 25 nt, Human
guggaggcggcggcggcaggcagcg

SEQ ID NO: 1001447 - RNA, 21 nt, Human
guugccccuucugucauccag

SEQ ID NO: 1001448 - RNA, 19 nt, Human
guuggugccagggggucag

SEQ ID NO: 1001449 - RNA, 22 nt, Human
uaaaacuacaaaaguaagacug

SEQ ID NO: 1001450 - RNA, 22 nt, Human
uaaaauuaaauguacaccacua

SEQ ID NO: 1001451 - RNA, 23 nt, Human
uaaaauuaacaggcauacugaca

SEQ ID NO: 1001452 - RNA, 26 nt, Human
uaaaauuaacaggcauacugacacug

SEQ ID NO: 1001453 - RNA, 20 nt, Human
uaaagcacuguguguguguu

SEQ ID NO: 1001454 - RNA, 20 nt, Human
uaaaguaccauuggaagaaa

SEQ ID NO: 1001455 - RNA, 19 nt, Human
uaaagugccauuuuauaaa

SEQ ID NO: 1001456 - RNA, 21 nt, Human
uaacagcaagguuuucaaaaa

SEQ ID NO: 1001457 - RNA, 21 nt, Human
uaaccugcacucaacagcuaa

SEQ ID NO: 1001458 - RNA, 23 nt, Human
uaagaaagacaguagcuuuaccc

SEQ ID NO: 1001459 - RNA, 18 nt, Human
uaagauauauauauauag

SEQ ID NO: 1001460 - RNA, 19 nt, Human
uaaguugauacuuuggcuc

SEQ ID NO: 1001461 - RNA, 25 nt, Human
uacaaaaauauaaaauaaauuuggg

SEQ ID NO: 1001462 - RNA, 23 nt, Human
uacauaagagucagagaaccaag

SEQ ID NO: 1001463 - RNA, 23 nt, Human
uacauggucccugguccuauuaa

SEQ ID NO: 1001464 - RNA, 23 nt, Human
uacugacacuggaagcaucuacu

SEQ ID NO: 1001465 - RNA, 22 nt, Human
uacuuuggcucuuuggagcuua

SEQ ID NO: 1001466 - RNA, 18 nt, Human
uagacaaauaugcacaug

SEQ ID NO: 1001467 - RNA, 27 nt, Human
uaggagaacaagugcaauuugaucagu

SEQ ID NO: 1001468 - RNA, 20 nt, Human
uaggaugcaaaagcaauuag

SEQ ID NO: 1001469 - RNA, 20 nt, Human
uauacagggcaaaaaugccc

SEQ ID NO: 1001470 - RNA, 22 nt, Human
uaugggugugugcaugugugug

SEQ ID NO: 1001471 - RNA, 20 nt, Human
uauuguauauguguacguag

SEQ ID NO: 1001472 - RNA, 24 nt, Human
ucacuuuguaagaauaggaugcaa

SEQ ID NO: 1001473 - RNA, 19 nt, Human
ucagaaaauguauaaaggu

SEQ ID NO: 1001474 - RNA, 19 nt, Human
ucagagaaccaaguuuggg

SEQ ID NO: 1001475 - RNA, 20 nt, Human
ucagugcuugugaaauuugg

SEQ ID NO: 1001476 - RNA, 22 nt, Human
ucaguuacauggucccuggucc

SEQ ID NO: 1001477 - RNA, 21 nt, Human
uccaaaacuuguuauccccaa

SEQ ID NO: 1001478 - RNA, 25 nt, Human
ucccacacucaaacugggacuugga

SEQ ID NO: 1001479 - RNA, 18 nt, Human
ucccagccccagcucggu

SEQ ID NO: 1001480 - RNA, 23 nt, Human
uccucagcuacucccgcuccaug

SEQ ID NO: 1001481 - RNA, 21 nt, Human
ucuacuacaacccucaccuca

SEQ ID NO: 1001482 - RNA, 22 nt, Human
ucucccagccccagcucgguuu

SEQ ID NO: 1001483 - RNA, 21 nt, Human
ugaaacaagaaggccauaaac

SEQ ID NO: 1001484 - RNA, 18 nt, Human
ugacaaaagcccuccuca

SEQ ID NO: 1001485 - RNA, 24 nt, Human
ugacaaaagcccuccucaaaaacc

SEQ ID NO: 1001486 - RNA, 18 nt, Human
ugacaaaugaccaacaac

SEQ ID NO: 1001487 - RNA, 21 nt, Human
ugaccaacaacaaagacaaca

SEQ ID NO: 1001488 - RNA, 19 nt, Human
ugaccucagggcagcuggg

SEQ ID NO: 1001489 - RNA, 24 nt, Human
ugagaagaccugggggccuggcuu

SEQ ID NO: 1001490 - RNA, 24 nt, Human
ugagcacauguggcucuggcuuug

SEQ ID NO: 1001491 - RNA, 24 nt, Human
ugaguuuugggguaaaacagccuu

SEQ ID NO: 1001492 - RNA, 18 nt, Human
ugauggggggggaauugg

SEQ ID NO: 1001493 - RNA, 21 nt, Human
ugcuucacuugaacuguuuau

SEQ ID NO: 1001494 - RNA, 22 nt, Human
ugcuuuucuuaaaaauuuggag

SEQ ID NO: 1001495 - RNA, 21 nt, Human
uggaagaaaagaaaaaacuga

SEQ ID NO: 1001496 - RNA, 19 nt, Human
uggaggcggcggcggcagg

SEQ ID NO: 1001497 - RNA, 24 nt, Human
uggaugaaggcacuccaacucugc

SEQ ID NO: 1001498 - RNA, 22 nt, Human
uggccugcauuucucuuccaaa

SEQ ID NO: 1001499 - RNA, 23 nt, Human
uggcgccggggagcgggcagcag

SEQ ID NO: 1001500 - RNA, 21 nt, Human
ugggagauaaggugauggggg

SEQ ID NO: 1001501 - RNA, 18 nt, Human
ugguggaggcggcggcgg

SEQ ID NO: 1001502 - RNA, 18 nt, Human
uguaagagugcaucccgg

SEQ ID NO: 1001503 - RNA, 20 nt, Human
uguagcaguacgaggugucu

SEQ ID NO: 1001504 - RNA, 22 nt, Human
uguauaaagguccaauuuguaa

SEQ ID NO: 1001505 - RNA, 20 nt, Human
uguccugggagauaagguga

SEQ ID NO: 1001506 - RNA, 18 nt, Human
ugugcagcaugcggcagg

SEQ ID NO: 1001507 - RNA, 18 nt, Human
ugugcagcaugcggcagg

SEQ ID NO: 1001508 - RNA, 20 nt, Human
ugugcagcaugcggcagguu

SEQ ID NO: 1001509 - RNA, 20 nt, Human
ugugcaugugugugccugug

SEQ ID NO: 1001510 - RNA, 22 nt, Human
uguguacguagguagaugugug

SEQ ID NO: 1001511 - RNA, 23 nt, Human
uguguguguguuuaugggugugu

SEQ ID NO: 1001512 - RNA, 23 nt, Human
uguguguguuuaugggugugugc

SEQ ID NO: 1001513 - RNA, 19 nt, Human
uguugggacaucacuuugu

SEQ ID NO: 1001514 - RNA, 18 nt, Human
uguuggugccaggggguc

SEQ ID NO: 1001515 - RNA, 24 nt, Human
uuaaaaaacaaaauaaaaacaauu

SEQ ID NO: 1001516 - RNA, 23 nt, Human
uucaaagcucuuacgauucugcu

SEQ ID NO: 1001517 - RNA, 23 nt, Human
uuggcuuugucugcaauagcauu

SEQ ID NO: 1001518 - RNA, 18 nt, Human
uuggugacugaauauuga

SEQ ID NO: 1001519 - RNA, 24 nt, Human
uuuccaacuuaauccuugugcuuc

SEQ ID NO: 1001520 - RNA, 18 nt, Human
uuucucguaaaggcaccu

SEQ ID NO: 1001521 - RNA, 19 nt, Human
uuucuuaaaaauuuggagg

SEQ ID NO: 1001522 - RNA, 23 nt, Human
agggggcagcagguuacacagga

SEQ ID NO: 1001523 - RNA, 18 nt, Human
caaaauggccggagccga

SEQ ID NO: 1001524 - RNA, 23 nt, Human
cagguuacacaggucucagccga

SEQ ID NO: 1001525 - RNA, 19 nt, Human
ccacggggucagaaauaaa

SEQ ID NO: 1001526 - RNA, 28 nt, Human
ccagaagcagcagccgacagccccccuc

SEQ ID NO: 1001527 - RNA, 22 nt, Human
ccccguggcccagaagcagcag

SEQ ID NO: 1001528 - RNA, 22 nt, Human
cccgccgccgccgccgcagcca

SEQ ID NO: 1001529 - RNA, 20 nt, Human
ccgcagccaccaccgcggcc

SEQ ID NO: 1001530 - RNA, 21 nt, Human
ccgccgccgccgccgcagcca

SEQ ID NO: 1001531 - RNA, 22 nt, Human
cggagccgagcgcagaaagaaa

SEQ ID NO: 1001532 - RNA, 20 nt, Human
cuggggcuccccguggccca

SEQ ID NO: 1001533 - RNA, 18 nt, Human
cuggguuggggguggagg

SEQ ID NO: 1001534 - RNA, 23 nt, Human
gagggggcagcagguuacacagg

SEQ ID NO: 1001535 - RNA, 22 nt, Human
gcagaaagaaaagauguaaaac

SEQ ID NO: 1001536 - RNA, 20 nt, Human
gccgcagccaccaccgcggc

SEQ ID NO: 1001537 - RNA, 19 nt, Human
gcucccgccgccgccgccg

SEQ ID NO: 1001538 - RNA, 21 nt, Human
ggggguggagggggcagcagg

SEQ ID NO: 1001539 - RNA, 19 nt, Human
gggguggagggggcagcag

SEQ ID NO: 1001540 - RNA, 20 nt, Human
ggguuggggguggagggggc

SEQ ID NO: 1001541 - RNA, 25 nt, Human
guggaacgaugguagaaggcacagc

SEQ ID NO: 1001542 - RNA, 22 nt, Human
guggagggggcagcagguuaca

SEQ ID NO: 1001543 - RNA, 21 nt, Human
ucaaugguggaacgaugguuu

SEQ ID NO: 1001544 - RNA, 27 nt, Human
ugcucccgccgccgccgccgcagccac

SEQ ID NO: 1001545 - RNA, 22 nt, Human
uggcccagaagcagcagccgac

SEQ ID NO: 1001546 - RNA, 23 nt, Human
uggccggagccgagcgcagaaag

SEQ ID NO: 1001547 - RNA, 23 nt, Human
uuggggguggagggggcagcagg

SEQ ID NO: 1001548 - RNA, 23 nt, Human
aaaagcaccagauggggaagccc

SEQ ID NO: 1001549 - RNA, 23 nt, Human
aaaagguaagguaacauguucuu

SEQ ID NO: 1001550 - RNA, 21 nt, Human
aaacaaaaccgugggcagaaa

SEQ ID NO: 1001551 - RNA, 24 nt, Human
aaacaaaaccgugggcagaaacau

SEQ ID NO: 1001552 - RNA, 24 nt, Human
acaaacaaaaccgugggcagaaac

SEQ ID NO: 1001553 - RNA, 22 nt, Human
acaaagccuggccuugguggcu

SEQ ID NO: 1001554 - RNA, 19 nt, Human
accugcauuaaucuuccuu

SEQ ID NO: 1001555 - RNA, 20 nt, Human
agacaaacaaucugaauuau

SEQ ID NO: 1001556 - RNA, 21 nt, Human
agcaccagauggggaagccca

SEQ ID NO: 1001557 - RNA, 20 nt, Human
agguaagguaacauguucuu

SEQ ID NO: 1001558 - RNA, 25 nt, Human
auagaauacacuucuuuuaacaaag

SEQ ID NO: 1001559 - RNA, 21 nt, Human
augcuucuuuagggugacaca

SEQ ID NO: 1001560 - RNA, 21 nt, Human
auugcacaaacaaaaccgugg

SEQ ID NO: 1001561 - RNA, 22 nt, Human
caauugccaccuuccaccugga

SEQ ID NO: 1001562 - RNA, 21 nt, Human
cacaaacaaaaccgugggcag

SEQ ID NO: 1001563 - RNA, 21 nt, Human
cagagucugcacuuuuccugc

SEQ ID NO: 1001564 - RNA, 23 nt, Human
cagagucugcacuuuuccugcaa

SEQ ID NO: 1001565 - RNA, 20 nt, Human
cagcccgcgggccccgcccu

SEQ ID NO: 1001566 - RNA, 21 nt, Human
cagcccgcgggccccgcccua

SEQ ID NO: 1001567 - RNA, 18 nt, Human
caguaugcauuuuaaaac

SEQ ID NO: 1001568 - RNA, 18 nt, Human
cccagcgucgccgccaca

SEQ ID NO: 1001569 - RNA, 22 nt, Human
cccagcgucgccgccacagccg

SEQ ID NO: 1001570 - RNA, 19 nt, Human
cccauaccggguuacaagg

SEQ ID NO: 1001571 - RNA, 24 nt, Human
cccccgagagcaguggggacccaa

SEQ ID NO: 1001572 - RNA, 21 nt, Human
ccgccgccaccucacgcccag

SEQ ID NO: 1001573 - RNA, 24 nt, Human
cgccacagccgcugccucagcccg

SEQ ID NO: 1001574 - RNA, 19 nt, Human
cgcccagcgucgccgccac

SEQ ID NO: 1001575 - RNA, 18 nt, Human
cucauuagaaaugugaua

SEQ ID NO: 1001576 - RNA, 19 nt, Human
cuccaugggaaaagcacca

SEQ ID NO: 1001577 - RNA, 22 nt, Human
cuggaguaaugugugcauuuuu

SEQ ID NO: 1001578 - RNA, 18 nt, Human
cuugaaaacuucuaaaac

SEQ ID NO: 1001579 - RNA, 22 nt, Human
gaaagcaauugccaccuuccac

SEQ ID NO: 1001580 - RNA, 20 nt, Human
gagagcaguggggacccaac

SEQ ID NO: 1001581 - RNA, 22 nt, Human
gccgcugccucagcccgcgggc

SEQ ID NO: 1001582 - RNA, 27 nt, Human
uaaaacaacauaaauagaauacacuuc

SEQ ID NO: 1001583 - RNA, 21 nt, Human
uaacaaagccuggccuuggug

SEQ ID NO: 1001584 - RNA, 18 nt, Human
uaaguaacguuugguuug

SEQ ID NO: 1001585 - RNA, 18 nt, Human
uacugugagauaaaagca

SEQ ID NO: 1001586 - RNA, 23 nt, Human
ucacgcccagcgucgccgccaca

SEQ ID NO: 1001587 - RNA, 19 nt, Human
ucagcccgcgggccccgcc

SEQ ID NO: 1001588 - RNA, 28 nt, Human
ucagcccgcgggccccgcccuagcuucg

SEQ ID NO: 1001589 - RNA, 22 nt, Human
uccagcauguguuucccuggaa

SEQ ID NO: 1001590 - RNA, 25 nt, Human
ucccuggaacacucagagucugcac

SEQ ID NO: 1001591 - RNA, 22 nt, Human
ucccugggagacggcugugugg

SEQ ID NO: 1001592 - RNA, 18 nt, Human
ucuaaaacaaaagguaag

SEQ ID NO: 1001593 - RNA, 21 nt, Human
ucuccaugggaaaagcaccag

SEQ ID NO: 1001594 - RNA, 21 nt, Human
ucuuuuacaaacagugaaaau

SEQ ID NO: 1001595 - RNA, 22 nt, Human
ugagauaaaagcaaaacauaac

SEQ ID NO: 1001596 - RNA, 18 nt, Human
ugcagaagggauucccug

SEQ ID NO: 1001597 - RNA, 20 nt, Human
ugcagaagggauucccuggg

SEQ ID NO: 1001598 - RNA, 20 nt, Human
uggaacacucagagucugca

SEQ ID NO: 1001599 - RNA, 21 nt, Human
uggcuuucuagcuugcagucu

SEQ ID NO: 1001600 - RNA, 18 nt, Human
ugggaaaagcaccagaug

SEQ ID NO: 1001601 - RNA, 19 nt, Human
ugggaaaagcaccagaugg

SEQ ID NO: 1001602 - RNA, 24 nt, Human
ugggaaaagcaccagauggggaag

SEQ ID NO: 1001603 - RNA, 22 nt, Human
ugggaacaaacagguuucgaug

SEQ ID NO: 1001604 - RNA, 20 nt, Human
ugggagacggcugugugggg

SEQ ID NO: 1001605 - RNA, 23 nt, Human
ugguuugcagaagggauucccug

SEQ ID NO: 1001606 - RNA, 22 nt, Human
uuaacaaagccuggccuuggug

SEQ ID NO: 1001607 - RNA, 23 nt, Human
uuuuuuuuuucuaaaaaauauuu

SEQ ID NO: 1001608 - RNA, 22 nt, Human
aaacaugagccacaucaaugcc

SEQ ID NO: 1001609 - RNA, 19 nt, Human
agagggagcaggcagguuc

SEQ ID NO: 1001610 - RNA, 21 nt, Human
ccuaaucugcauccuggaaac

SEQ ID NO: 1001611 - RNA, 18 nt, Human
ccuggaaaccucuuuugc

SEQ ID NO: 1001612 - RNA, 23 nt, Human
cuccccagccccaaacuagcugg

SEQ ID NO: 1001613 - RNA, 22 nt, Human
gcacacgcuugagcaagcagca

SEQ ID NO: 1001614 - RNA, 18 nt, Human
gccugagcuccccagccc

SEQ ID NO: 1001615 - RNA, 26 nt, Human
ggucugggagagggagcaggcagguu

SEQ ID NO: 1001616 - RNA, 22 nt, Human
gucaaguuuucucuccauaaag

SEQ ID NO: 1001617 - RNA, 19 nt, Human
ucaacuguaccaaaaguaa

SEQ ID NO: 1001618 - RNA, 23 nt, Human
ucuccauaaaggacuugccaccu

SEQ ID NO: 1001619 - RNA, 22 nt, Human
ugagcaagcagcacaauaaucc

SEQ ID NO: 1001620 - RNA, 23 nt, Human
ugagcaagcagcacaauaaucca

SEQ ID NO: 1001621 - RNA, 19 nt, Human
ugccugagcuccccagccc

SEQ ID NO: 1001622 - RNA, 21 nt, Human
ugccugagcuccccagcccca

SEQ ID NO: 1001623 - RNA, 22 nt, Human
uuaaaaacaaucaucugaaugu

SEQ ID NO: 1001624 - RNA, 23 nt, Human
uugccaccuuaaggaccccaagu

SEQ ID NO: 1001625 - RNA, 24 nt, Human
ccacuaugcuguauaguuccuuuu

SEQ ID NO: 1001626 - RNA, 22 nt, Human
ccccauuacauaaaguaggaau

SEQ ID NO: 1001627 - RNA, 21 nt, Human
ccuuaagaaaaauauacagau

SEQ ID NO: 1001628 - RNA, 22 nt, Human
cuguauaguuccuuuucuccug

SEQ ID NO: 1001629 - RNA, 18 nt, Human
gccaagccuuuagguuuc

SEQ ID NO: 1001630 - RNA, 22 nt, Human
uagguuucuacuacuucaauuc

SEQ ID NO: 1001631 - RNA, 23 nt, Human
uuagguuucuacuacuucaauuu

SEQ ID NO: 1001632 - RNA, 18 nt, Human
uuaguacacaaaacucca

SEQ ID NO: 1001633 - RNA, 19 nt, Human
uucaagccugacgccaagc

SEQ ID NO: 1001634 - RNA, 20 nt, Human
aaacaagcaugaacggcagu

SEQ ID NO: 1001635 - RNA, 24 nt, Human
acauaccuaaguaaacauaacauu

SEQ ID NO: 1001636 - RNA, 21 nt, Human
caucuacuuggguagcuuggu

SEQ ID NO: 1001637 - RNA, 24 nt, Human
gcuuuggaaauuauugccucugau

SEQ ID NO: 1001638 - RNA, 18 nt, Human
uacuuggguagcuuggug

SEQ ID NO: 1001639 - RNA, 24 nt, Human
uagcuuggugccauuauccugugg

SEQ ID NO: 1001640 - RNA, 18 nt, Human
uaggaaacaagcaugaac

SEQ ID NO: 1001641 - RNA, 20 nt, Human
uaugcagucauuucugaggc

SEQ ID NO: 1001642 - RNA, 23 nt, Human
ucauagccccugugacauuuccu

SEQ ID NO: 1001643 - RNA, 24 nt, Human
ucuagaauaccagaaacaucuacu

SEQ ID NO: 1001644 - RNA, 21 nt, Human
ugaauagauacugcuucagaa

SEQ ID NO: 1001645 - RNA, 21 nt, Human
ugaugagauuauuuccuguau

SEQ ID NO: 1001646 - RNA, 23 nt, Human
ugcucugcuuuuuaguagccauc

SEQ ID NO: 1001647 - RNA, 24 nt, Human
uggaaaugaugagauuauuuccug

SEQ ID NO: 1001648 - RNA, 19 nt, Human
uggaaucugauaugucugg

SEQ ID NO: 1001649 - RNA, 20 nt, Human
ugugccaaugauacaggcac

SEQ ID NO: 1001650 - RNA, 21 nt, Human
uucagcacuggccugugccaa

SEQ ID NO: 1001651 - RNA, 23 nt, Human
uuggaaaugaugagauuauuucc

SEQ ID NO: 1001652 - RNA, 18 nt, Human
uuuuuuuuuuuuuuuuug

SEQ ID NO: 1001653 - RNA, 23 nt, Human
uuuuuuuuuuuuuuuuuuguuau

SEQ ID NO: 1001654 - RNA, 18 nt, Human
aauaagggcuaaaaggaa

SEQ ID NO: 1001655 - RNA, 24 nt, Human
aggaagaaguacggcagggcagga

SEQ ID NO: 1001656 - RNA, 22 nt, Human
aggccccucagggccuacccag

SEQ ID NO: 1001657 - RNA, 21 nt, Human
agggccuacccagcuuccucc

SEQ ID NO: 1001658 - RNA, 22 nt, Human
ccccucagggccuacccagcuu

SEQ ID NO: 1001659 - RNA, 19 nt, Human
cccucagggccuacccagc

SEQ ID NO: 1001660 - RNA, 25 nt, Human
ccucagggccuacccagcuuccucc

SEQ ID NO: 1001661 - RNA, 18 nt, Human
gaggacaaaagugggcgg

SEQ ID NO: 1001662 - RNA, 20 nt, Human
gggcagggcucagguaccuc

SEQ ID NO: 1001663 - RNA, 20 nt, Human
uaccgaggccccucagggcc

SEQ ID NO: 1001664 - RNA, 24 nt, Human
ugacccucucgggugcugcuggag

SEQ ID NO: 1001665 - RNA, 21 nt, Human
uggagggcagggcucaggucg

SEQ ID NO: 1001666 - RNA, 23 nt, Human
aaaacaauaaaaccauuaagagc

SEQ ID NO: 1001667 - RNA, 25 nt, Human
aagugacaccugugaucuaacccug

SEQ ID NO: 1001668 - RNA, 23 nt, Human
acuacucgccugaaagugacacc

SEQ ID NO: 1001669 - RNA, 19 nt, Human
acugcaaaccucuggcugc

SEQ ID NO: 1001670 - RNA, 20 nt, Human
acugcaaaccucuggcugcg

SEQ ID NO: 1001671 - RNA, 19 nt, Human
agacauggucccugucccc

SEQ ID NO: 1001672 - RNA, 24 nt, Human
agacauggucccuguccccaagga

SEQ ID NO: 1001673 - RNA, 20 nt, Human
agaugcuggagacacaaaga

SEQ ID NO: 1001674 - RNA, 29 nt, Human
aggcaaacagguagugcaaaggggacccc

SEQ ID NO: 1001675 - RNA, 21 nt, Human
auacuaaaaauuuacaucaua

SEQ ID NO: 1001676 - RNA, 22 nt, Human
auauugggcuuuucaacacaau

SEQ ID NO: 1001677 - RNA, 25 nt, Human
caaaccucuggcugcaggggucggc

SEQ ID NO: 1001678 - RNA, 21 nt, Human
caaagccaaauccagguugcu

SEQ ID NO: 1001679 - RNA, 23 nt, Human
cacuguacuagaugcuggagacc

SEQ ID NO: 1001680 - RNA, 22 nt, Human
caucgguaccuuccgcucuuaa

SEQ ID NO: 1001681 - RNA, 27 nt, Human
cauggucccuguccccaaggaacugau

SEQ ID NO: 1001682 - RNA, 21 nt, Human
ccacugcaaaccucuggcugc

SEQ ID NO: 1001683 - RNA, 25 nt, Human
cccaaggaacugauagucucuugga

SEQ ID NO: 1001684 - RNA, 18 nt, Human
cccagaaggaagccggca

SEQ ID NO: 1001685 - RNA, 22 nt, Human
ccccaaggaacugauagucucu

SEQ ID NO: 1001686 - RNA, 19 nt, Human
gaacucaucgguaccuucc

SEQ ID NO: 1001687 - RNA, 23 nt, Human
ggaauacacacuacccacugcaa

SEQ ID NO: 1001688 - RNA, 18 nt, Human
ggcacauuccuuccuuuc

SEQ ID NO: 1001689 - RNA, 25 nt, Human
uaaaacaacuguagaauauuagggc

SEQ ID NO: 1001690 - RNA, 24 nt, Human
uaacuacucgccugaaagugacac

SEQ ID NO: 1001691 - RNA, 19 nt, Human
uaauauugggcuuuucaac

SEQ ID NO: 1001692 - RNA, 20 nt, Human
uagaaauauuauugcccaca

SEQ ID NO: 1001693 - RNA, 27 nt, Human
uagaaauauuauugcccacauuugugc

SEQ ID NO: 1001694 - RNA, 21 nt, Human
uagcgauaccguugcuaacua

SEQ ID NO: 1001695 - RNA, 18 nt, Human
uaguaaaggauggaacuc

SEQ ID NO: 1001696 - RNA, 24 nt, Human
ucaaagccaaauccagguugcugc

SEQ ID NO: 1001697 - RNA, 29 nt, Human
ucaauaauauaguaauauugggcuuuucu

SEQ ID NO: 1001698 - RNA, 21 nt, Human
uccccaaggaacugauagucu

SEQ ID NO: 1001699 - RNA, 20 nt, Human
ucucuuggaggcaaacaggu

SEQ ID NO: 1001700 - RNA, 22 nt, Human
ugcuagaucccagaaggaagcc

SEQ ID NO: 1001701 - RNA, 21 nt, Human
uggaauacacacuacccacug

SEQ ID NO: 1001702 - RNA, 21 nt, Human
uggaggguacuugacauucaa

SEQ ID NO: 1001703 - RNA, 21 nt, Human
uggcugcaggggucggcucag

SEQ ID NO: 1001704 - RNA, 19 nt, Human
uguuggcaguucaguuggu

SEQ ID NO: 1001705 - RNA, 20 nt, Human
uuaaaagucuugggacauug

SEQ ID NO: 1001706 - RNA, 24 nt, Human
uuggaggguacuugacauucaagu

SEQ ID NO: 1001707 - RNA, 22 nt, Human
aaaaagguuuuugauugccuuu

SEQ ID NO: 1001708 - RNA, 25 nt, Human
aaagcaaaagcaggcuacaaaacaa

SEQ ID NO: 1001709 - RNA, 22 nt, Human
aacaaaaacaauuguaagacaa

SEQ ID NO: 1001710 - RNA, 26 nt, Human
aagcaaaagcaggcuacaaaacaaaa

SEQ ID NO: 1001711 - RNA, 21 nt, Human
acggcgcgggugccgugcggg

SEQ ID NO: 1001712 - RNA, 18 nt, Human
agacaaauugugaaagca

SEQ ID NO: 1001713 - RNA, 21 nt, Human
caaaagcaggcuacaaaacaa

SEQ ID NO: 1001714 - RNA, 18 nt, Human
cagcuggcaccgaacugg

SEQ ID NO: 1001715 - RNA, 19 nt, Human
cccacgcagcuggcaccga

SEQ ID NO: 1001716 - RNA, 18 nt, Human
cgcuuccuccuucaagua

SEQ ID NO: 1001717 - RNA, 27 nt, Human
uaacaaaaacaauuguaagacaaauug

SEQ ID NO: 1001718 - RNA, 19 nt, Human
uaagacaaauugugaaagc

SEQ ID NO: 1001719 - RNA, 26 nt, Human
ugaaagcaaaagcaggcuacaaaaca

SEQ ID NO: 1001720 - RNA, 20 nt, Human
ugaagugaugggauccgagg

SEQ ID NO: 1001721 - RNA, 25 nt, Human
ugagagcacgcccggcaaauuccaa

SEQ ID NO: 1001722 - RNA, 18 nt, Human
ugcuauaaaguguaaguu

SEQ ID NO: 1001723 - RNA, 23 nt, Human
uggagcccacgcagcuggcaccg

SEQ ID NO: 1001724 - RNA, 22 nt, Human
uguaaguuagcauuugcuaaua

SEQ ID NO: 1001725 - RNA, 25 nt, Human
uuuuuuuuuuuuuuuuuuuucaagg

SEQ ID NO: 1001726 - RNA, 18 nt, Human
aaaagaaaacagaaugga

SEQ ID NO: 1001727 - RNA, 25 nt, Human
aaaggggaaaaacuggaguuggaga

SEQ ID NO: 1001728 - RNA, 18 nt, Human
aacccuuccuucucccuc

SEQ ID NO: 1001729 - RNA, 22 nt, Human
aaggaaaggggaaaaacuggag

SEQ ID NO: 1001730 - RNA, 23 nt, Human
acagaauggaaguuuagaauauc

SEQ ID NO: 1001731 - RNA, 26 nt, Human
acccuuccuucucccucucuuccccc

SEQ ID NO: 1001732 - RNA, 21 nt, Human
agcuaagaauaaagcagguau

SEQ ID NO: 1001733 - RNA, 24 nt, Human
agugauggagccaaugugaaaaga

SEQ ID NO: 1001734 - RNA, 19 nt, Human
auggagcgugcucgaagcc

SEQ ID NO: 1001735 - RNA, 19 nt, Human
cagcaagugugaacaugcc

SEQ ID NO: 1001736 - RNA, 18 nt, Human
ccccugugucuggcacug

SEQ ID NO: 1001737 - RNA, 20 nt, Human
ccccuuguuuccccugcucu

SEQ ID NO: 1001738 - RNA, 21 nt, Human
ccccuuguuuccccugcucuc

SEQ ID NO: 1001739 - RNA, 19 nt, Human
cccucucuucccccucccu

SEQ ID NO: 1001740 - RNA, 20 nt, Human
cccuuccuucucccucucuu

SEQ ID NO: 1001741 - RNA, 21 nt, Human
cuauuuuauuuuauuuugcaa

SEQ ID NO: 1001742 - RNA, 20 nt, Human
cucccucucuucccccuccc

SEQ ID NO: 1001743 - RNA, 21 nt, Human
cuuucugcugugacugcggau

SEQ ID NO: 1001744 - RNA, 23 nt, Human
gaagccccuuguuuccccugcuc

SEQ ID NO: 1001745 - RNA, 21 nt, Human
gaguuggagagaauuuuaggg

SEQ ID NO: 1001746 - RNA, 19 nt, Human
gcuggccaaagucucugga

SEQ ID NO: 1001747 - RNA, 19 nt, Human
uaaacaguuguggcaccag

SEQ ID NO: 1001748 - RNA, 18 nt, Human
uauaauaaaucacuugac

SEQ ID NO: 1001749 - RNA, 22 nt, Human
ucaucagucaccagugauggag

SEQ ID NO: 1001750 - RNA, 19 nt, Human
ucucauggcuuucugcugu

SEQ ID NO: 1001751 - RNA, 19 nt, Human
ucuccugagcuugcucgac

SEQ ID NO: 1001752 - RNA, 20 nt, Human
ucuguggcccagaagucacc

SEQ ID NO: 1001753 - RNA, 21 nt, Human
ugaaaagaaaacagaauggaa

SEQ ID NO: 1001754 - RNA, 22 nt, Human
ugaaaagaaaacagaauggaag

SEQ ID NO: 1001755 - RNA, 21 nt, Human
ugaauagauaagagacaggug

SEQ ID NO: 1001756 - RNA, 20 nt, Human
ugccuuaaauccccuguguc

SEQ ID NO: 1001757 - RNA, 18 nt, Human
ugcuugcugccggcuuau

SEQ ID NO: 1001758 - RNA, 20 nt, Human
uggagagaauuuuagggcug

SEQ ID NO: 1001759 - RNA, 23 nt, Human
ugguccaggagcuccacagccag

SEQ ID NO: 1001760 - RNA, 19 nt, Human
uuaaauccccugugucugg

SEQ ID NO: 1001761 - RNA, 18 nt, Human
uucaaggaaaggggaaaa

SEQ ID NO: 1001762 - RNA, 23 nt, Human
uucaucagucaccagugauggag

SEQ ID NO: 1001763 - RNA, 25 nt, Human
uucauccaugacaggugagauacaa

SEQ ID NO: 1001764 - RNA, 22 nt, Human
uuguuuugcucagcuaagaaua

SEQ ID NO: 1001765 - RNA, 23 nt, Human
uuucuguucccuuauuuucuuca

SEQ ID NO: 1001766 - RNA, 25 nt, Human
aagaaacaggucuaggaugacagca

SEQ ID NO: 1001767 - RNA, 24 nt, Human
agacacuggcagauuauagaaaug

SEQ ID NO: 1001768 - RNA, 23 nt, Human
agauggggucuauuuggggcugg

SEQ ID NO: 1001769 - RNA, 20 nt, Human
aggcacagaaguuagacacu

SEQ ID NO: 1001770 - RNA, 20 nt, Human
aggcagaggucuccgucucu

SEQ ID NO: 1001771 - RNA, 18 nt, Human
augccaugccuggcucuu

SEQ ID NO: 1001772 - RNA, 21 nt, Human
augugugugcaugcagugugu

SEQ ID NO: 1001773 - RNA, 21 nt, Human
caaccgggaguaaggucaaga

SEQ ID NO: 1001774 - RNA, 19 nt, Human
ccagaaaauacgugagaca

SEQ ID NO: 1001775 - RNA, 22 nt, Human
ccccaggccaaccgggaguaag

SEQ ID NO: 1001776 - RNA, 18 nt, Human
ccccgcccccaggccaac

SEQ ID NO: 1001777 - RNA, 20 nt, Human
cccgcccccaggccaaccgg

SEQ ID NO: 1001778 - RNA, 22 nt, Human
cccgcccccaggccaaccggga

SEQ ID NO: 1001779 - RNA, 24 nt, Human
cccuggggagccagaauagccuca

SEQ ID NO: 1001780 - RNA, 21 nt, Human
ccucuaugccaugccuggcuc

SEQ ID NO: 1001781 - RNA, 20 nt, Human
ccuggagggggaggagcucu

SEQ ID NO: 1001782 - RNA, 22 nt, Human
cgaaagaaacaggucuaggaug

SEQ ID NO: 1001783 - RNA, 19 nt, Human
cgcugaggggacugaccgc

SEQ ID NO: 1001784 - RNA, 21 nt, Human
cgcugaggggacugaccgccc

SEQ ID NO: 1001785 - RNA, 23 nt, Human
cucuaugccaugccuggcucuuc

SEQ ID NO: 1001786 - RNA, 18 nt, Human
cuugcaagagcccagaaa

SEQ ID NO: 1001787 - RNA, 18 nt, Human
gcucuuugcagagcugag

SEQ ID NO: 1001788 - RNA, 18 nt, Human
gcugaggggacugaccgc

SEQ ID NO: 1001789 - RNA, 21 nt, Human
ggagggggaggagcucuuugc

SEQ ID NO: 1001790 - RNA, 22 nt, Human
ggcgaaagaaacaggucuagga

SEQ ID NO: 1001791 - RNA, 18 nt, Human
gggagccagaauagccuc

SEQ ID NO: 1001792 - RNA, 18 nt, Human
gggcagaagagaaauggg

SEQ ID NO: 1001793 - RNA, 21 nt, Human
gugugugugcaugcaggugcg

SEQ ID NO: 1001794 - RNA, 20 nt, Human
uaacaggcacagaaguuaga

SEQ ID NO: 1001795 - RNA, 20 nt, Human
uaggugugugugugugcaug

SEQ ID NO: 1001796 - RNA, 24 nt, Human
uaugcacaguguguggcuguggug

SEQ ID NO: 1001797 - RNA, 23 nt, Human
uaugugugugcaugcagugugug

SEQ ID NO: 1001798 - RNA, 18 nt, Human
ucuaggggcugcgugggg

SEQ ID NO: 1001799 - RNA, 21 nt, Human
ucuccuguaugacuuguguau

SEQ ID NO: 1001800 - RNA, 19 nt, Human
ugaccauugcccauugcca

SEQ ID NO: 1001801 - RNA, 22 nt, Human
ugagaugggugacuugcaagag

SEQ ID NO: 1001802 - RNA, 24 nt, Human
ugagguggugugugugcaugcagg

SEQ ID NO: 1001803 - RNA, 18 nt, Human
ugcagugugugguuguga

SEQ ID NO: 1001804 - RNA, 18 nt, Human
ugccucaugucuuuaguu

SEQ ID NO: 1001805 - RNA, 21 nt, Human
ugcguguaugcacagugugug

SEQ ID NO: 1001806 - RNA, 18 nt, Human
uggagggggaggagcucu

SEQ ID NO: 1001807 - RNA, 20 nt, Human
uggggcagaagagaaauggg

SEQ ID NO: 1001808 - RNA, 19 nt, Human
uggggugugcguguaugca

SEQ ID NO: 1001809 - RNA, 19 nt, Human
uggguuguggggugugcgu

SEQ ID NO: 1001810 - RNA, 18 nt, Human
uguaggugugugugugug

SEQ ID NO: 1001811 - RNA, 22 nt, Human
uguaugcagcaugcagcuugua

SEQ ID NO: 1001812 - RNA, 22 nt, Human
uguaugugugugcaugcagugu

SEQ ID NO: 1001813 - RNA, 19 nt, Human
uguggcgaaagaaacaggu

SEQ ID NO: 1001814 - RNA, 19 nt, Human
ugugguguaugugugugca

SEQ ID NO: 1001815 - RNA, 21 nt, Human
ugugguguaugugugugcaug

SEQ ID NO: 1001816 - RNA, 19 nt, Human
ugugguugugagguggugu

SEQ ID NO: 1001817 - RNA, 18 nt, Human
ugugugcaugcaggugcg

SEQ ID NO: 1001818 - RNA, 24 nt, Human
uguguggcugugguguaugugugu

SEQ ID NO: 1001819 - RNA, 24 nt, Human
ugugugguugugagguggugugug

SEQ ID NO: 1001820 - RNA, 20 nt, Human
ugugugugcaugcaguaugu

SEQ ID NO: 1001821 - RNA, 19 nt, Human
ugugugugugugcaugcag

SEQ ID NO: 1001822 - RNA, 19 nt, Human
uguucugucucacccuccc

SEQ ID NO: 1001823 - RNA, 25 nt, Human
uuaacaggcacagaaguuagacacu

SEQ ID NO: 1001824 - RNA, 18 nt, Human
uuagacacuugcauaggc

SEQ ID NO: 1001825 - RNA, 18 nt, Human
uucccacguaagcccugg

SEQ ID NO: 1001826 - RNA, 22 nt, Human
uucccacguaagcccuggggag

SEQ ID NO: 1001827 - RNA, 22 nt, Human
uuguggggugugcguguaugca

SEQ ID NO: 1001828 - RNA, 24 nt, Human
uuuaguugccaaccuccuuuuucc

SEQ ID NO: 1001829 - RNA, 20 nt, Human
acccaggaaaaugagagcaa

SEQ ID NO: 1001830 - RNA, 22 nt, Human
accuagccccacuucccacccc

SEQ ID NO: 1001831 - RNA, 25 nt, Human
agaguuccucacgcccugccagccc

SEQ ID NO: 1001832 - RNA, 22 nt, Human
aggagaguuccucacgcccugc

SEQ ID NO: 1001833 - RNA, 25 nt, Human
aggccgaggccagacccugacggga

SEQ ID NO: 1001834 - RNA, 18 nt, Human
aguaaugcaggccuggag

SEQ ID NO: 1001835 - RNA, 22 nt, Human
cagagccguuccugucucccuc

SEQ ID NO: 1001836 - RNA, 19 nt, Human
cauuccuuggcguucaugc

SEQ ID NO: 1001837 - RNA, 23 nt, Human
ccacccccagagccguuccuguc

SEQ ID NO: 1001838 - RNA, 22 nt, Human
ccagacccugacgggacucagc

SEQ ID NO: 1001839 - RNA, 18 nt, Human
cccaagggccggcccacc

SEQ ID NO: 1001840 - RNA, 24 nt, Human
cccaggaaaaugagagcaaguucc

SEQ ID NO: 1001841 - RNA, 26 nt, Human
ccccaagggccggcccaccgucuccc

SEQ ID NO: 1001842 - RNA, 18 nt, Human
ccccacuucccaccccca

SEQ ID NO: 1001843 - RNA, 21 nt, Human
ccccagccaguuuggagaggg

SEQ ID NO: 1001844 - RNA, 19 nt, Human
cccccaagggccggcccac

SEQ ID NO: 1001845 - RNA, 25 nt, Human
ccccgugcuugggcugggcuuccuc

SEQ ID NO: 1001846 - RNA, 21 nt, Human
cccgucuccugucuccugccu

SEQ ID NO: 1001847 - RNA, 23 nt, Human
cccugcaccugccugggugcccu

SEQ ID NO: 1001848 - RNA, 19 nt, Human
ccggcccaccgucucccug

SEQ ID NO: 1001849 - RNA, 22 nt, Human
ccugaggccgaggccagacccu

SEQ ID NO: 1001850 - RNA, 27 nt, Human
ccugaggccgaggccagaccggggucc

SEQ ID NO: 1001851 - RNA, 19 nt, Human
cuacuccucuuucuccccu

SEQ ID NO: 1001852 - RNA, 23 nt, Human
cucccucacucacacgcuuucca

SEQ ID NO: 1001853 - RNA, 23 nt, Human
cuugggcugggcuuccucugccc

SEQ ID NO: 1001854 - RNA, 24 nt, Human
gaaaaugagagcaaguuccaggaa

SEQ ID NO: 1001855 - RNA, 20 nt, Human
gaagauggaguuggcaagac

SEQ ID NO: 1001856 - RNA, 18 nt, Human
gaguuuguuacacuuggc

SEQ ID NO: 1001857 - RNA, 22 nt, Human
gccccagagcugaaggaguaau

SEQ ID NO: 1001858 - RNA, 18 nt, Human
ggccugggagaugagacc

SEQ ID NO: 1001859 - RNA, 18 nt, Human
ggcugggcuuccucugcc

SEQ ID NO: 1001860 - RNA, 19 nt, Human
gguguuugguuuuuguuuu

SEQ ID NO: 1001861 - RNA, 20 nt, Human
uacuccucuuucuccccugg

SEQ ID NO: 1001862 - RNA, 23 nt, Human
uagaggucccgucuccugucucc

SEQ ID NO: 1001863 - RNA, 20 nt, Human
uagccccacuucccaccccc

SEQ ID NO: 1001864 - RNA, 19 nt, Human
uaugacccugggguggaga

SEQ ID NO: 1001865 - RNA, 25 nt, Human
ucccagcagccccagccaguuugga

SEQ ID NO: 1001866 - RNA, 19 nt, Human
ucccuguagaggucccguc

SEQ ID NO: 1001867 - RNA, 22 nt, Human
ucccuguagaggucccgucucc

SEQ ID NO: 1001868 - RNA, 20 nt, Human
uccugucuccugccuuccug

SEQ ID NO: 1001869 - RNA, 22 nt, Human
uccuugggagucucccagcagc

SEQ ID NO: 1001870 - RNA, 19 nt, Human
ucuccugucuccugccuuc

SEQ ID NO: 1001871 - RNA, 24 nt, Human
ucuccugucuccugccuuccugac

SEQ ID NO: 1001872 - RNA, 21 nt, Human
ugacccugggguggagaccga

SEQ ID NO: 1001873 - RNA, 21 nt, Human
ugacgggacucagccuugggg

SEQ ID NO: 1001874 - RNA, 21 nt, Human
ugaggccgaggccagacccug

SEQ ID NO: 1001875 - RNA, 23 nt, Human
ugaugcacccaggaaaaugagag

SEQ ID NO: 1001876 - RNA, 21 nt, Human
ugggagucucccagcagcccc

SEQ ID NO: 1001877 - RNA, 21 nt, Human
ugggcugggcuuccucugccc

SEQ ID NO: 1001878 - RNA, 18 nt, Human
ugggugcccugggaaggg

SEQ ID NO: 1001879 - RNA, 19 nt, Human
uguagggccggcuccuugg

SEQ ID NO: 1001880 - RNA, 21 nt, Human
uuccuuggcguucaugcuacu

SEQ ID NO: 1001881 - RNA, 23 nt, Human
uugaagauggaguuggcaagacc

SEQ ID NO: 1001882 - RNA, 19 nt, Human
uuuuguuugaugcacccag

SEQ ID NO: 1001883 - RNA, 21 nt, Human
uuuuuuuuuuuucagggaucc

SEQ ID NO: 1001884 - RNA, 25 nt, Human
uuuuuuuuuuuuuuuuuuucagggg

SEQ ID NO: 1001885 - RNA, 18 nt, Human
aggaggugucugugaggu

SEQ ID NO: 1001886 - RNA, 24 nt, Human
cuggaggauccagagaggaggugu

SEQ ID NO: 1001887 - RNA, 19 nt, Human
ggaggauccagagaggagg

SEQ ID NO: 1001888 - RNA, 24 nt, Human
uggaggauccagagaggagguguc

SEQ ID NO: 1001889 - RNA, 20 nt, Human
uuuuuuuuuugagaacaggg

SEQ ID NO: 1001890 - RNA, 24 nt, Human
uuuuuuuuuuuugagaacaggguu

SEQ ID NO: 1001891 - RNA, 25 nt, Human
uuuuuuuuuuuuuuugagaacaggg

SEQ ID NO: 1001892 - RNA, 20 nt, Human
aagcaacagccugggcucca

SEQ ID NO: 1001893 - RNA, 20 nt, Human
accaccagacuggaaagcaa

SEQ ID NO: 1001894 - RNA, 21 nt, Human
auuuuauugcaggacuuuagg

SEQ ID NO: 1001895 - RNA, 23 nt, Human
caauggccaggagaguuuucagc

SEQ ID NO: 1001896 - RNA, 20 nt, Human
caccagacuggaaagcaacg

SEQ ID NO: 1001897 - RNA, 22 nt, Human
ccuccaauggccaggagaguuu

SEQ ID NO: 1001898 - RNA, 22 nt, Human
cugaaguuccagccuccaaugg

SEQ ID NO: 1001899 - RNA, 23 nt, Human
gauuuuauugcaggacuuuaggu

SEQ ID NO: 1001900 - RNA, 23 nt, Human
gcagugaaaggggcaguccugaa

SEQ ID NO: 1001901 - RNA, 21 nt, Human
uccuaagcaaaagagacugga

SEQ ID NO: 1001902 - RNA, 21 nt, Human
ugaaaggggcaguccugaagu

SEQ ID NO: 1001903 - RNA, 20 nt, Human
uggccaggagaguuuucagc

SEQ ID NO: 1001904 - RNA, 22 nt, Human
aaacguggaccuacauggagcu

SEQ ID NO: 1001905 - RNA, 18 nt, Human
aagagaggucccuuugau

SEQ ID NO: 1001906 - RNA, 23 nt, Human
aggggccguuugcccucugcccu

SEQ ID NO: 1001907 - RNA, 24 nt, Human
cauggagcugcguaaucucccggc

SEQ ID NO: 1001908 - RNA, 21 nt, Human
cccucugcccuaggagccuua

SEQ ID NO: 1001909 - RNA, 22 nt, Human
cccucugcccuaggagccuuac

SEQ ID NO: 1001910 - RNA, 22 nt, Human
ccucccaaccuaaacguggacc

SEQ ID NO: 1001911 - RNA, 24 nt, Human
ccucccaaccuaaacguggaccua

SEQ ID NO: 1001912 - RNA, 23 nt, Human
cucccaaccuaaacguggaccua

SEQ ID NO: 1001913 - RNA, 18 nt, Human
cucccggcucccuccugg

SEQ ID NO: 1001914 - RNA, 18 nt, Human
gcccuaggagccuuaccu

SEQ ID NO: 1001915 - RNA, 20 nt, Human
gggccguuugcccucugccc

SEQ ID NO: 1001916 - RNA, 21 nt, Human
gguggaggucugccagacugu

SEQ ID NO: 1001917 - RNA, 20 nt, Human
uaucaacuccuggggcuggu

SEQ ID NO: 1001918 - RNA, 21 nt, Human
uccuggggcugguggaggucu

SEQ ID NO: 1001919 - RNA, 18 nt, Human
ucucccagcgccaucacc

SEQ ID NO: 1001920 - RNA, 19 nt, Human
ucucccggcucccuccugg

SEQ ID NO: 1001921 - RNA, 22 nt, Human
ugaguaaagacuggagaucugg

SEQ ID NO: 1001922 - RNA, 24 nt, Human
ugaguaaagacuggagaucuggaa

SEQ ID NO: 1001923 - RNA, 23 nt, Human
ugccagacugugggccuaggggc

SEQ ID NO: 1001924 - RNA, 24 nt, Human
ugguggaggucugccagacugugg

SEQ ID NO: 1001925 - RNA, 23 nt, Human
uugaguaaagacuggagaucugg

SEQ ID NO: 1001926 - RNA, 23 nt, Human
uuggugacaagagaggucccuuu

SEQ ID NO: 1001927 - RNA, 25 nt, Human
uuuuuuuuuucuuuuuuuaaauuuu

SEQ ID NO: 1001928 - RNA, 25 nt, Human
cuagagaugguggcaucacuucuuc

SEQ ID NO: 1001929 - RNA, 22 nt, Human
aaacagaaaacggcagcccuaa

SEQ ID NO: 1001930 - RNA, 24 nt, Human
aacaugcacagaaacauaugcaua

SEQ ID NO: 1001931 - RNA, 22 nt, Human
aacucuguucccccucauuuua

SEQ ID NO: 1001932 - RNA, 20 nt, Human
aagaaagaggcacaguacua

SEQ ID NO: 1001933 - RNA, 18 nt, Human
aagcaggagagagaaccc

SEQ ID NO: 1001934 - RNA, 24 nt, Human
acaaagugaguaacugugccaaau

SEQ ID NO: 1001935 - RNA, 20 nt, Human
acaauaagcaaaacaaccuu

SEQ ID NO: 1001936 - RNA, 21 nt, Human
agagaacaugcacagaaacau

SEQ ID NO: 1001937 - RNA, 18 nt, Human
agcccagggagaaacaga

SEQ ID NO: 1001938 - RNA, 21 nt, Human
agcccagggagaaacagaaaa

SEQ ID NO: 1001939 - RNA, 19 nt, Human
aggagagaggcgaguccag

SEQ ID NO: 1001940 - RNA, 19 nt, Human
agggcuugaugaucccagg

SEQ ID NO: 1001941 - RNA, 23 nt, Human
caaccuucaugguaagauagccu

SEQ ID NO: 1001942 - RNA, 19 nt, Human
cacaccuccucagacagcc

SEQ ID NO: 1001943 - RNA, 23 nt, Human
cagacagccaaugaaacaacuaa

SEQ ID NO: 1001944 - RNA, 18 nt, Human
cagauucucccuagcaca

SEQ ID NO: 1001945 - RNA, 26 nt, Human
cagcccagggagaaacagaaaacggg

SEQ ID NO: 1001946 - RNA, 24 nt, Human
cagcuucuagggcuugaugauccc

SEQ ID NO: 1001947 - RNA, 20 nt, Human
caggugauaugcagaaaccc

SEQ ID NO: 1001948 - RNA, 22 nt, Human
caguacuauuguuuuuuaugaa

SEQ ID NO: 1001949 - RNA, 18 nt, Human
caguuaaauacagugaca

SEQ ID NO: 1001950 - RNA, 18 nt, Human
caguucacacgcagcagc

SEQ ID NO: 1001951 - RNA, 21 nt, Human
cauaugcauauaacuacuaua

SEQ ID NO: 1001952 - RNA, 19 nt, Human
ccacaccuccucagacagc

SEQ ID NO: 1001953 - RNA, 19 nt, Human
cccagggagaaacagaaaa

SEQ ID NO: 1001954 - RNA, 19 nt, Human
cccuagcacaucuucuccg

SEQ ID NO: 1001955 - RNA, 19 nt, Human
ccuaggucccagcuaccug

SEQ ID NO: 1001956 - RNA, 19 nt, Human
cggaagggauggaaaggca

SEQ ID NO: 1001957 - RNA, 23 nt, Human
cucauaguuuugugucauccauu

SEQ ID NO: 1001958 - RNA, 21 nt, Human
cuuuccgcagcccagggagaa

SEQ ID NO: 1001959 - RNA, 21 nt, Human
gaaacagaaaacggcagcccu

SEQ ID NO: 1001960 - RNA, 25 nt, Human
gaaauuucuccaagccauaagcaua

SEQ ID NO: 1001961 - RNA, 20 nt, Human
gacuucagugaacaaggauu

SEQ ID NO: 1001962 - RNA, 22 nt, Human
gagaaacagaaaacggcagccc

SEQ ID NO: 1001963 - RNA, 18 nt, Human
gccuaggucccagcuacc

SEQ ID NO: 1001964 - RNA, 21 nt, Human
gcggaucccagugccgugaag

SEQ ID NO: 1001965 - RNA, 22 nt, Human
gcuuuccgcagcccagggagaa

SEQ ID NO: 1001966 - RNA, 18 nt, Human
ggggggaggagaggagag

SEQ ID NO: 1001967 - RNA, 22 nt, Human
gguuuuugucauguagcaguuu

SEQ ID NO: 1001968 - RNA, 24 nt, Human
gucauguagcaguuuuuauguaga

SEQ ID NO: 1001969 - RNA, 19 nt, Human
gucccgguauauccaugcu

SEQ ID NO: 1001970 - RNA, 18 nt, Human
uaaauacagugacaccuu

SEQ ID NO: 1001971 - RNA, 21 nt, Human
uaacuacuauacaggugauau

SEQ ID NO: 1001972 - RNA, 18 nt, Human
uacuggaaaagagauaau

SEQ ID NO: 1001973 - RNA, 21 nt, Human
uacuucagcguauucagcagc

SEQ ID NO: 1001974 - RNA, 24 nt, Human
uauaaaaguccacaccuccucaga

SEQ ID NO: 1001975 - RNA, 25 nt, Human
uauauaaaaguccacaccuccucag

SEQ ID NO: 1001976 - RNA, 22 nt, Human
uaugaguguuuaauacuggaaa

SEQ ID NO: 1001977 - RNA, 21 nt, Human
ucaguucacacgcagcagcca

SEQ ID NO: 1001978 - RNA, 18 nt, Human
uccacaccuccucagaca

SEQ ID NO: 1001979 - RNA, 18 nt, Human
ucuuuuuacccuccuuuc

SEQ ID NO: 1001980 - RNA, 22 nt, Human
ugacaccuuacaauuguguaga

SEQ ID NO: 1001981 - RNA, 24 nt, Human
ugcaacaguuaaauacagugacac

SEQ ID NO: 1001982 - RNA, 22 nt, Human
uucacaaccccauguaggacac

SEQ ID NO: 1001983 - RNA, 23 nt, Human
aaagugcuuuuccccauccacca

SEQ ID NO: 1001984 - RNA, 21 nt, Human
aacccagugucugccuaaugg

SEQ ID NO: 1001985 - RNA, 24 nt, Human
aagcaguggguugcuuaggucacc

SEQ ID NO: 1001986 - RNA, 25 nt, Human
acaaaacaucccuuccacauucccc

SEQ ID NO: 1001987 - RNA, 20 nt, Human
acaaggauaugcucccaaau

SEQ ID NO: 1001988 - RNA, 24 nt, Human
accaguucccuggucccuucuuuu

SEQ ID NO: 1001989 - RNA, 21 nt, Human
auggcugauguuuucaguucc

SEQ ID NO: 1001990 - RNA, 20 nt, Human
cacagcacccaggugacuag

SEQ ID NO: 1001991 - RNA, 21 nt, Human
cagagccagggcacgcagcgc

SEQ ID NO: 1001992 - RNA, 18 nt, Human
cccgcccagcagccgagu

SEQ ID NO: 1001993 - RNA, 23 nt, Human
ccucccuguaacccuuaagguca

SEQ ID NO: 1001994 - RNA, 28 nt, Human
ccugagccagagcaggucauucugaggc

SEQ ID NO: 1001995 - RNA, 19 nt, Human
ccugugacagcagcccgcc

SEQ ID NO: 1001996 - RNA, 18 nt, Human
ccuuccacauuccccuca

SEQ ID NO: 1001997 - RNA, 21 nt, Human
cucaagacagucccuugaaga

SEQ ID NO: 1001998 - RNA, 21 nt, Human
cugggggccuggccauggcug

SEQ ID NO: 1001999 - RNA, 20 nt, Human
cuguagcuggagucugaagc

SEQ ID NO: 1002000 - RNA, 25 nt, Human
cugugugcagccucccuguaacccu

SEQ ID NO: 1002001 - RNA, 21 nt, Human
cuuaaggucaugcucugcuuu

SEQ ID NO: 1002002 - RNA, 19 nt, Human
gcuccgugcgccgggagcg

SEQ ID NO: 1002003 - RNA, 19 nt, Human
gcuccgugcgccgggagcg

SEQ ID NO: 1002004 - RNA, 18 nt, Human
ggagcgcgagugugcucc

SEQ ID NO: 1002005 - RNA, 20 nt, Human
ggugucuuaaagcugagaac

SEQ ID NO: 1002006 - RNA, 21 nt, Human
uacuuuggagcccucaagaca

SEQ ID NO: 1002007 - RNA, 18 nt, Human
ucaagacagucccuugaa

SEQ ID NO: 1002008 - RNA, 19 nt, Human
ucaagguuuuauuuuaauu

SEQ ID NO: 1002009 - RNA, 24 nt, Human
ucagguuucagucccggagcgcga

SEQ ID NO: 1002010 - RNA, 21 nt, Human
ucauucugaggccaacucugg

SEQ ID NO: 1002011 - RNA, 22 nt, Human
uccaccagggaucccugagcca

SEQ ID NO: 1002012 - RNA, 18 nt, Human
ucccggagcgcgagugug

SEQ ID NO: 1002013 - RNA, 24 nt, Human
ucccuguaacccuuaaggucaugc

SEQ ID NO: 1002014 - RNA, 18 nt, Human
uccgugcgccgggagcgc

SEQ ID NO: 1002015 - RNA, 18 nt, Human
uccgugcgccgggagcgc

SEQ ID NO: 1002016 - RNA, 19 nt, Human
ucuggcugcagugacaagg

SEQ ID NO: 1002017 - RNA, 28 nt, Human
ucuuuugucuucugggggccuggccaug

SEQ ID NO: 1002018 - RNA, 18 nt, Human
ugacagcagcccgcccag

SEQ ID NO: 1002019 - RNA, 19 nt, Human
ugggacuuucagcacagca

SEQ ID NO: 1002020 - RNA, 20 nt, Human
uuaaaagacauuguucgugc

SEQ ID NO: 1002021 - RNA, 23 nt, Human
uucugggggccuggccauggcug

SEQ ID NO: 1002022 - RNA, 18 nt, Human
uuuuuuuuuuuuuuuuug

SEQ ID NO: 1002023 - RNA, 26 nt, Human
uuuuuuuuuuuuuuuuuugacuuuuu

SEQ ID NO: 1002024 - RNA, 24 nt, Human
aaaguucugcacuaggugagaagu

SEQ ID NO: 1002025 - RNA, 22 nt, Human
acccuaagggaugagggagggg

SEQ ID NO: 1002026 - RNA, 19 nt, Human
acuuccuccauugcucuuc

SEQ ID NO: 1002027 - RNA, 21 nt, Human
agagcuccucccccgccuccc

SEQ ID NO: 1002028 - RNA, 25 nt, Human
agagcuccucccccgccucccgccu

SEQ ID NO: 1002029 - RNA, 23 nt, Human
agguaacaugaaucucaaagucc

SEQ ID NO: 1002030 - RNA, 24 nt, Human
agguaacaugaaucucaaagucca

SEQ ID NO: 1002031 - RNA, 23 nt, Human
caaaacacaacccaaauaaacug

SEQ ID NO: 1002032 - RNA, 22 nt, Human
caaagcgucauuuaaauuaaaa

SEQ ID NO: 1002033 - RNA, 22 nt, Human
cagccgccuagccgacuccagc

SEQ ID NO: 1002034 - RNA, 20 nt, Human
cagccugguaaaaguucugc

SEQ ID NO: 1002035 - RNA, 24 nt, Human
cagcugaagaauaacugcagguau

SEQ ID NO: 1002036 - RNA, 24 nt, Human
cccaagaaauuguacaguaguuga

SEQ ID NO: 1002037 - RNA, 19 nt, Human
cccccgccucccgccuccc

SEQ ID NO: 1002038 - RNA, 21 nt, Human
ccggcggcagccgccguuucc

SEQ ID NO: 1002039 - RNA, 18 nt, Human
cgccuagccgacuccagc

SEQ ID NO: 1002040 - RNA, 18 nt, Human
cucccccgccucccgccu

SEQ ID NO: 1002041 - RNA, 20 nt, Human
cucccccgccucccgccucc

SEQ ID NO: 1002042 - RNA, 18 nt, Human
cucccgccucccugaguc

SEQ ID NO: 1002043 - RNA, 18 nt, Human
cucccugagucaccggcg

SEQ ID NO: 1002044 - RNA, 20 nt, Human
gaggggacucagacacaaaa

SEQ ID NO: 1002045 - RNA, 25 nt, Human
uaaacacuagaaauauacauuagac

SEQ ID NO: 1002046 - RNA, 22 nt, Human
uacauauacacauuuacugucu

SEQ ID NO: 1002047 - RNA, 20 nt, Human
uagccgacuccagcgcugac

SEQ ID NO: 1002048 - RNA, 19 nt, Human
uccauugcucuucuggacc

SEQ ID NO: 1002049 - RNA, 21 nt, Human
ucccccgccucccgccucccu

SEQ ID NO: 1002050 - RNA, 22 nt, Human
uccucccccgccucccgccucc

SEQ ID NO: 1002051 - RNA, 20 nt, Human
ucuguaaacacuagaaauau

SEQ ID NO: 1002052 - RNA, 19 nt, Human
ugagguaacaugaaucuca

SEQ ID NO: 1002053 - RNA, 21 nt, Human
ugcaaaaugcuuaacacuuaa

SEQ ID NO: 1002054 - RNA, 22 nt, Human
ugcaggaagagcuccucccccg

SEQ ID NO: 1002055 - RNA, 24 nt, Human
ugcagguauuguuccagagcugau

SEQ ID NO: 1002056 - RNA, 24 nt, Human
ugccauacaauaagaacugcaaca

SEQ ID NO: 1002057 - RNA, 21 nt, Human
ugguaaaaguucugcacuagg

SEQ ID NO: 1002058 - RNA, 22 nt, Human
uuagcaaagcgucauuuaaauu

SEQ ID NO: 1002059 - RNA, 19 nt, Human
uucuguaaauaguuacuac

SEQ ID NO: 1002060 - RNA, 24 nt, Human
uuuaacuaaagaugguuaacccca

SEQ ID NO: 1002061 - RNA, 20 nt, Human
uuuacugucuguaaacacua

SEQ ID NO: 1002062 - RNA, 22 nt, Human
accccucagucucaagagagcg

SEQ ID NO: 1002063 - RNA, 18 nt, Human
aggcgggaggacugaggg

SEQ ID NO: 1002064 - RNA, 22 nt, Human
cacacaguguguacucaugccc

SEQ ID NO: 1002065 - RNA, 18 nt, Human
cgacuucugcggaccccu

SEQ ID NO: 1002066 - RNA, 22 nt, Human
cucuaaauaguccacguucugc

SEQ ID NO: 1002067 - RNA, 28 nt, Human
ucaauucaauccaaauauucuuuccuua

SEQ ID NO: 1002068 - RNA, 18 nt, Human
uccaaauauucuuuccuu

SEQ ID NO: 1002069 - RNA, 18 nt, Human
uccacguucugcaggggu

SEQ ID NO: 1002070 - RNA, 27 nt, Human
aaaaaaaacaaaacaaaaaaacuaaaa

SEQ ID NO: 1002071 - RNA, 22 nt, Human
aaaaaaacuaaaaacguagaua

SEQ ID NO: 1002072 - RNA, 21 nt, Human
aaaaaugugcauuuuucuauc

SEQ ID NO: 1002073 - RNA, 20 nt, Human
aaaauaguacuguuaaggca

SEQ ID NO: 1002074 - RNA, 24 nt, Human
aaacaacacagagagacccaacaa

SEQ ID NO: 1002075 - RNA, 27 nt, Human
aaacaacacagagagacccaacaagcu

SEQ ID NO: 1002076 - RNA, 22 nt, Human
aaacagaacugggcugaaucug

SEQ ID NO: 1002077 - RNA, 19 nt, Human
aaagaaaauacaaagccag

SEQ ID NO: 1002078 - RNA, 21 nt, Human
aaagaaaauacaaagccagag

SEQ ID NO: 1002079 - RNA, 22 nt, Human
aacaccgcucuuuuccaucuga

SEQ ID NO: 1002080 - RNA, 23 nt, Human
aagcaucggaaaauguugcacuu

SEQ ID NO: 1002081 - RNA, 22 nt, Human
aaucacaacuuccuaaucacag

SEQ ID NO: 1002082 - RNA, 22 nt, Human
acaaaaaaacuaaaaacguagg

SEQ ID NO: 1002083 - RNA, 24 nt, Human
acaaaacaaaaaaacuaaaaacgu

SEQ ID NO: 1002084 - RNA, 24 nt, Human
acaaaacaacacagagagacccaa

SEQ ID NO: 1002085 - RNA, 18 nt, Human
agaaacuggcaaaguaga

SEQ ID NO: 1002086 - RNA, 22 nt, Human
agaaauacuguggugcauuuuu

SEQ ID NO: 1002087 - RNA, 19 nt, Human
agacccaacaagcuggacc

SEQ ID NO: 1002088 - RNA, 24 nt, Human
agacccaacaagcuggaccuuauu

SEQ ID NO: 1002089 - RNA, 18 nt, Human
agugggcuuuucagaagc

SEQ ID NO: 1002090 - RNA, 18 nt, Human
auacaaagccagagcauu

SEQ ID NO: 1002091 - RNA, 20 nt, Human
aucacaacuuccuaaucaca

SEQ ID NO: 1002092 - RNA, 21 nt, Human
aucggaaaauguugcacuuug

SEQ ID NO: 1002093 - RNA, 26 nt, Human
caaaacaaaaaaacuaaaaacguaga

SEQ ID NO: 1002094 - RNA, 20 nt, Human
caaaacaacacagagagacc

SEQ ID NO: 1002095 - RNA, 21 nt, Human
caaaacaacacagagagaccc

SEQ ID NO: 1002096 - RNA, 22 nt, Human
caaaacaacacagagagaccca

SEQ ID NO: 1002097 - RNA, 21 nt, Human
caaaacgcagauuagaacagc

SEQ ID NO: 1002098 - RNA, 20 nt, Human
caaaguagaauguuaaaagc

SEQ ID NO: 1002099 - RNA, 24 nt, Human
caacaagcuggaccuuauuaaaaa

SEQ ID NO: 1002100 - RNA, 19 nt, Human
caacacagagagacccaac

SEQ ID NO: 1002101 - RNA, 19 nt, Human
caacuccugacaagucacc

SEQ ID NO: 1002102 - RNA, 19 nt, Human
caagaacagugaaugaaaa

SEQ ID NO: 1002103 - RNA, 23 nt, Human
cacaacuuccuaaucacaguuca

SEQ ID NO: 1002104 - RNA, 23 nt, Human
cacaccaagacugcccggagaag

SEQ ID NO: 1002105 - RNA, 20 nt, Human
cacagaccauaaaaauuaac

SEQ ID NO: 1002106 - RNA, 22 nt, Human
cacagaccauaaaaauuaacac

SEQ ID NO: 1002107 - RNA, 23 nt, Human
cacagagagacccaacaagcugg

SEQ ID NO: 1002108 - RNA, 22 nt, Human
cacaggcacuggcuuccauacu

SEQ ID NO: 1002109 - RNA, 19 nt, Human
cacucuaaaacagaacugg

SEQ ID NO: 1002110 - RNA, 23 nt, Human
cagaacuuucuuacagagaaaaa

SEQ ID NO: 1002111 - RNA, 22 nt, Human
caggacaggcaauuuucagugg

SEQ ID NO: 1002112 - RNA, 23 nt, Human
cauaacugauauacugaccacaa

SEQ ID NO: 1002113 - RNA, 18 nt, Human
cauacaaacacagccccc

SEQ ID NO: 1002114 - RNA, 23 nt, Human
ccaaagcugguauuuucaacugg

SEQ ID NO: 1002115 - RNA, 18 nt, Human
ccaugacaaagagcacaa

SEQ ID NO: 1002116 - RNA, 23 nt, Human
ccauuuacuuucaaaauagaauc

SEQ ID NO: 1002117 - RNA, 22 nt, Human
cccccaugcuagaaauacugug

SEQ ID NO: 1002118 - RNA, 23 nt, Human
cccggagaagccuucaugaaguc

SEQ ID NO: 1002119 - RNA, 23 nt, Human
ccugacaagucaccuuuaaaaca

SEQ ID NO: 1002120 - RNA, 20 nt, Human
ccugaggggagaggaacugg

SEQ ID NO: 1002121 - RNA, 24 nt, Human
cgcagauuagaacagcucuuuuga

SEQ ID NO: 1002122 - RNA, 19 nt, Human
cgggcagaugugacugaag

SEQ ID NO: 1002123 - RNA, 23 nt, Human
cguuuauuucucauacaaacaca

SEQ ID NO: 1002124 - RNA, 24 nt, Human
cuaaagcaucggaaaauguugcac

SEQ ID NO: 1002125 - RNA, 23 nt, Human
cuccugaggggagaggaacugga

SEQ ID NO: 1002126 - RNA, 25 nt, Human
cugaaucugaaaguuauuuuuccau

SEQ ID NO: 1002127 - RNA, 18 nt, Human
cugcugggguggggucug

SEQ ID NO: 1002128 - RNA, 21 nt, Human
cuuaacaugcaaaacgcagau

SEQ ID NO: 1002129 - RNA, 18 nt, Human
gaaaagguggcagggaca

SEQ ID NO: 1002130 - RNA, 23 nt, Human
gaacugggcugaaucugaaaguu

SEQ ID NO: 1002131 - RNA, 22 nt, Human
gaagccuucaugaagucaagaa

SEQ ID NO: 1002132 - RNA, 19 nt, Human
gacccaacuugggaaaugc

SEQ ID NO: 1002133 - RNA, 19 nt, Human
gauauuaacacuuaacaug

SEQ ID NO: 1002134 - RNA, 20 nt, Human
ggcaaagcaagcacugugga

SEQ ID NO: 1002135 - RNA, 23 nt, Human
ggcuggaaccuaaggcucaucug

SEQ ID NO: 1002136 - RNA, 19 nt, Human
gggcagagagcuccuugcu

SEQ ID NO: 1002137 - RNA, 21 nt, Human
ggucuuuccucugcagaaguu

SEQ ID NO: 1002138 - RNA, 23 nt, Human
guccucuucaccuugugugucca

SEQ ID NO: 1002139 - RNA, 21 nt, Human
guggagaaauacacauaaaua

SEQ ID NO: 1002140 - RNA, 23 nt, Human
uaaaaaaaaacaaaacaaaaaaa

SEQ ID NO: 1002141 - RNA, 20 nt, Human
uaaaacagcauaaccagaac

SEQ ID NO: 1002142 - RNA, 23 nt, Human
uaaacaacagggaggagacuaga

SEQ ID NO: 1002143 - RNA, 24 nt, Human
uaaauggaaugaaugucagucauu

SEQ ID NO: 1002144 - RNA, 24 nt, Human
uaaccagaacuuucuuacagagaa

SEQ ID NO: 1002145 - RNA, 18 nt, Human
uaacugauauacugacca

SEQ ID NO: 1002146 - RNA, 22 nt, Human
uaaucuaaugaagaaacuggca

SEQ ID NO: 1002147 - RNA, 21 nt, Human
uacaaacacagcccccaugcu

SEQ ID NO: 1002148 - RNA, 18 nt, Human
uacacaggcacuggcuuc

SEQ ID NO: 1002149 - RNA, 21 nt, Human
uacguuuauuucucauacaaa

SEQ ID NO: 1002150 - RNA, 25 nt, Human
uagcaaaggcugaacuaaguucuca

SEQ ID NO: 1002151 - RNA, 26 nt, Human
uauuaaaaaaaaacaaaacaaaaaaa

SEQ ID NO: 1002152 - RNA, 24 nt, Human
ucagcccugacaaaggacuucgga

SEQ ID NO: 1002153 - RNA, 21 nt, Human
ucagugaguguacagcuacuu

SEQ ID NO: 1002154 - RNA, 22 nt, Human
ucagugggcuuuucagaagcuc

SEQ ID NO: 1002155 - RNA, 18 nt, Human
uccaugcuaggggaaagc

SEQ ID NO: 1002156 - RNA, 19 nt, Human
ucccaugagaggcccuccu

SEQ ID NO: 1002157 - RNA, 22 nt, Human
uccugacaagucaccuuuaaaa

SEQ ID NO: 1002158 - RNA, 22 nt, Human
ucggaacaaggagggaagacca

SEQ ID NO: 1002159 - RNA, 25 nt, Human
ucuccaaccgaccacguucgggguu

SEQ ID NO: 1002160 - RNA, 24 nt, Human
ugaaaagaggaagaacauuuauuu

SEQ ID NO: 1002161 - RNA, 22 nt, Human
ugaaugucagucauuuagcaau

SEQ ID NO: 1002162 - RNA, 22 nt, Human
ugacaggcuccucauuaaagcu

SEQ ID NO: 1002163 - RNA, 20 nt, Human
ugagaaugaaaaguaagcag

SEQ ID NO: 1002164 - RNA, 22 nt, Human
ugcaaaacgcagauuagaacag

SEQ ID NO: 1002165 - RNA, 23 nt, Human
ugcccggagaagccuucaugaag

SEQ ID NO: 1002166 - RNA, 22 nt, Human
ugcugagugagccugcuggggu

SEQ ID NO: 1002167 - RNA, 24 nt, Human
ugcugggcagagagcuccuugcug

SEQ ID NO: 1002168 - RNA, 19 nt, Human
ugcugggguggggucugca

SEQ ID NO: 1002169 - RNA, 20 nt, Human
ugcugggguggggucugcag

SEQ ID NO: 1002170 - RNA, 22 nt, Human
uggcuugacaucugaacaaugu

SEQ ID NO: 1002171 - RNA, 19 nt, Human
ugggaaaugcucagggguu

SEQ ID NO: 1002172 - RNA, 21 nt, Human
ugggaacgcagaaucggaaca

SEQ ID NO: 1002173 - RNA, 19 nt, Human
uggggaaacaugacaggcu

SEQ ID NO: 1002174 - RNA, 24 nt, Human
ugggguggggucugcaggcggcug

SEQ ID NO: 1002175 - RNA, 21 nt, Human
uguaaagaaaauacaaagcca

SEQ ID NO: 1002176 - RNA, 18 nt, Human
uguggugcauuuuuuuuu

SEQ ID NO: 1002177 - RNA, 20 nt, Human
uuaacacuuaacaugcaaaa

SEQ ID NO: 1002178 - RNA, 26 nt, Human
uucaaaauagaauccggcagggaagu

SEQ ID NO: 1002179 - RNA, 18 nt, Human
uuccucaucuucaauuuc

SEQ ID NO: 1002180 - RNA, 22 nt, Human
uucucaggcaauaaauuuaugg

SEQ ID NO: 1002181 - RNA, 24 nt, Human
uucucauacaaacacagcccccau

SEQ ID NO: 1002182 - RNA, 19 nt, Human
uuucagaguuccucauccu

SEQ ID NO: 1002183 - RNA, 21 nt, Human
uuuucagugggcuuuucagaa

SEQ ID NO: 1002184 - RNA, 18 nt, Human
uuuuuuuuuuuuuuuuug

SEQ ID NO: 1002185 - RNA, 22 nt, Human
uuuuuuuuuuuuuuuuuggugg

SEQ ID NO: 1002186 - RNA, 25 nt, Human
aagcaauccuccugccucagccucu

SEQ ID NO: 1002187 - RNA, 24 nt, Human
aaguagcuggaacuagauacacac

SEQ ID NO: 1002188 - RNA, 21 nt, Human
acugcacccggcuaacgacag

SEQ ID NO: 1002189 - RNA, 19 nt, Human
agagcaguggcgcgaucuc

SEQ ID NO: 1002190 - RNA, 21 nt, Human
agcccggaagauggggagcgg

SEQ ID NO: 1002191 - RNA, 20 nt, Human
auccuccugccucagccucu

SEQ ID NO: 1002192 - RNA, 22 nt, Human
caagcaauccuccugccucagc

SEQ ID NO: 1002193 - RNA, 23 nt, Human
cacacagcacugcacccggcuaa

SEQ ID NO: 1002194 - RNA, 22 nt, Human
cacccaggcuggagagcagugg

SEQ ID NO: 1002195 - RNA, 22 nt, Human
ccagcccggaagauggggagcg

SEQ ID NO: 1002196 - RNA, 23 nt, Human
ccagcccggaagauggggagcgg

SEQ ID NO: 1002197 - RNA, 21 nt, Human
ccgccgcgucccgcgucgcca

SEQ ID NO: 1002198 - RNA, 21 nt, Human
ccgccgcgucccgcgucgcca

SEQ ID NO: 1002199 - RNA, 19 nt, Human
ccucccagcccggaagaug

SEQ ID NO: 1002200 - RNA, 26 nt, Human
ccuccugccucagccucucaaguagc

SEQ ID NO: 1002201 - RNA, 24 nt, Human
ccugccucagccucucaaguagcu

SEQ ID NO: 1002202 - RNA, 19 nt, Human
ccuggaucacagccgcagc

SEQ ID NO: 1002203 - RNA, 19 nt, Human
cgcggccggucccgccucc

SEQ ID NO: 1002204 - RNA, 22 nt, Human
cgcggccggucccgccucccuc

SEQ ID NO: 1002205 - RNA, 18 nt, Human
cggggacaggcgacgcgg

SEQ ID NO: 1002206 - RNA, 23 nt, Human
cuagauacacacagcacugcacc

SEQ ID NO: 1002207 - RNA, 24 nt, Human
cucaagcaauccuccugccucagc

SEQ ID NO: 1002208 - RNA, 24 nt, Human
gacuaaaaacccucuaauaaagau

SEQ ID NO: 1002209 - RNA, 18 nt, Human
gcccggaagauggggagc

SEQ ID NO: 1002210 - RNA, 18 nt, Human
gccggucccgccucccuc

SEQ ID NO: 1002211 - RNA, 25 nt, Human
gcucugccacccaggcuggagagca

SEQ ID NO: 1002212 - RNA, 21 nt, Human
uaacauacagcugagaaagaa

SEQ ID NO: 1002213 - RNA, 20 nt, Human
uacagcugagaaagaaagac

SEQ ID NO: 1002214 - RNA, 23 nt, Human
ucacugcaacugccacuuucugg

SEQ ID NO: 1002215 - RNA, 25 nt, Human
ucacugcaacugccacuuugggccu

SEQ ID NO: 1002216 - RNA, 18 nt, Human
ucucaaguagcuggaacu

SEQ ID NO: 1002217 - RNA, 23 nt, Human
ucucgcucugccacccaggcugg

SEQ ID NO: 1002218 - RNA, 24 nt, Human
ucucgcucugccacccaggcugga

SEQ ID NO: 1002219 - RNA, 24 nt, Human
ucucgcucugccacccaggcugga

SEQ ID NO: 1002220 - RNA, 25 nt, Human
ucucgcucugccacccaggcuggag

SEQ ID NO: 1002221 - RNA, 22 nt, Human
ugagacagggucucgcucugcc

SEQ ID NO: 1002222 - RNA, 24 nt, Human
ugccucagccucucaaguagcugg

SEQ ID NO: 1002223 - RNA, 24 nt, Human
uggacucaagcaauccuccugccu

SEQ ID NO: 1002224 - RNA, 23 nt, Human
uggagagcaguggcgcgaucucc

SEQ ID NO: 1002225 - RNA, 24 nt, Human
uguuuauuuuuugagacagggucu

SEQ ID NO: 1002226 - RNA, 26 nt, Human
uuuuguuuauuuuuugagacaggguc

SEQ ID NO: 1002227 - RNA, 19 nt, Human
acccccaucccugcccaag

SEQ ID NO: 1002228 - RNA, 18 nt, Human
agaagcccaccaucccag

SEQ ID NO: 1002229 - RNA, 23 nt, Human
aggcauccaacacccccaucccu

SEQ ID NO: 1002230 - RNA, 20 nt, Human
aggccuaggccugggguggg

SEQ ID NO: 1002231 - RNA, 24 nt, Human
cacccccaucccugcccaagcguc

SEQ ID NO: 1002232 - RNA, 21 nt, Human
cacuucuggcccuuacagaga

SEQ ID NO: 1002233 - RNA, 26 nt, Human
cauccaacacccccaucccugcccaa

SEQ ID NO: 1002234 - RNA, 23 nt, Human
ccaacacccccaucccugcccaa

SEQ ID NO: 1002235 - RNA, 22 nt, Human
cccaccaucccagacucuggua

SEQ ID NO: 1002236 - RNA, 26 nt, Human
cccagcccaggcccaggccuaggccu

SEQ ID NO: 1002237 - RNA, 19 nt, Human
ccccagcccaggcccaggc

SEQ ID NO: 1002238 - RNA, 20 nt, Human
ccccugggggacccagaccu

SEQ ID NO: 1002239 - RNA, 23 nt, Human
ccccugggggacccagaccucug

SEQ ID NO: 1002240 - RNA, 18 nt, Human
ccgccgccgccgccgccg

SEQ ID NO: 1002241 - RNA, 18 nt, Human
ccgccgccgccgccgccg

SEQ ID NO: 1002242 - RNA, 23 nt, Human
ccucugggcccucacuucuggcc

SEQ ID NO: 1002243 - RNA, 19 nt, Human
ccuuuggccccugcccccu

SEQ ID NO: 1002244 - RNA, 21 nt, Human
cuugcagcuggcagugggggg

SEQ ID NO: 1002245 - RNA, 19 nt, Human
gacccagaccucugggccc

SEQ ID NO: 1002246 - RNA, 18 nt, Human
gaccucugggcccucacu

SEQ ID NO: 1002247 - RNA, 22 nt, Human
gccgccgccgccgccgccgccg

SEQ ID NO: 1002248 - RNA, 21 nt, Human
ggagaagcccaccaucccaga

SEQ ID NO: 1002249 - RNA, 20 nt, Human
gggacccagaccucugggcc

SEQ ID NO: 1002250 - RNA, 22 nt, Human
ggggacccagaccucugggccc

SEQ ID NO: 1002251 - RNA, 21 nt, Human
uccaacacccccaucccugcc

SEQ ID NO: 1002252 - RNA, 24 nt, Human
uccaacacccccaucccugcccaa

SEQ ID NO: 1002253 - RNA, 23 nt, Human
ugggggacccagaccucugggcc

SEQ ID NO: 1002254 - RNA, 25 nt, Human
uggggggagaagcccaccaucccag

SEQ ID NO: 1002255 - RNA, 18 nt, Human
uuggccccugcccccugg

SEQ ID NO: 1002256 - RNA, 19 nt, Human
aagcaugagaaacagcaac

SEQ ID NO: 1002257 - RNA, 21 nt, Human
aagccggacccggaccucgaa

SEQ ID NO: 1002258 - RNA, 20 nt, Human
acaccaaccaaaacuggacc

SEQ ID NO: 1002259 - RNA, 18 nt, Human
agccaauggcaacgcagc

SEQ ID NO: 1002260 - RNA, 20 nt, Human
aucugcuaacagcuuucccu

SEQ ID NO: 1002261 - RNA, 24 nt, Human
cagccucuaggcaauucauauuuu

SEQ ID NO: 1002262 - RNA, 27 nt, Human
cauuuuaauuuuaagcuaucuuaagga

SEQ ID NO: 1002263 - RNA, 19 nt, Human
cccucccuguuuccuuccu

SEQ ID NO: 1002264 - RNA, 20 nt, Human
cccuguuuccuuccuuccuu

SEQ ID NO: 1002265 - RNA, 21 nt, Human
ccguccuuucccucccuguuu

SEQ ID NO: 1002266 - RNA, 21 nt, Human
ccucccuguuuccuuccuucc

SEQ ID NO: 1002267 - RNA, 19 nt, Human
ccucuccaguucgcugacc

SEQ ID NO: 1002268 - RNA, 22 nt, Human
cuacaccaaccaaaacuggacc

SEQ ID NO: 1002269 - RNA, 20 nt, Human
cucugugugcuguucacagu

SEQ ID NO: 1002270 - RNA, 23 nt, Human
cuugaagcugcaaucucccaucc

SEQ ID NO: 1002271 - RNA, 23 nt, Human
gcaaucucccauccugccuuagc

SEQ ID NO: 1002272 - RNA, 22 nt, Human
ggcaacauuauccucggcccuc

SEQ ID NO: 1002273 - RNA, 18 nt, Human
guuuguuugccuuuuucc

SEQ ID NO: 1002274 - RNA, 21 nt, Human
uaacagcuuucccucccgcuu

SEQ ID NO: 1002275 - RNA, 25 nt, Human
uaagcuaucuuaaggauauuacuau

SEQ ID NO: 1002276 - RNA, 22 nt, Human
uacaccaaccaaaacuggaccu

SEQ ID NO: 1002277 - RNA, 18 nt, Human
uaguucuuagggaaaggg

SEQ ID NO: 1002278 - RNA, 24 nt, Human
uaguucuuagggaaagggcuugau

SEQ ID NO: 1002279 - RNA, 25 nt, Human
uauugcucucuucucucugucuucu

SEQ ID NO: 1002280 - RNA, 19 nt, Human
ucagugauguaucuugucu

SEQ ID NO: 1002281 - RNA, 20 nt, Human
uccaacuuccucaauucuuu

SEQ ID NO: 1002282 - RNA, 21 nt, Human
ucccuccguccuuucccuccc

SEQ ID NO: 1002283 - RNA, 19 nt, Human
ucccuguuuccuuccuucc

SEQ ID NO: 1002284 - RNA, 19 nt, Human
ucccuguuuccuuccuucc

SEQ ID NO: 1002285 - RNA, 19 nt, Human
ucuacaccaaccaaaacug

SEQ ID NO: 1002286 - RNA, 18 nt, Human
ucucugucuucugauaua

SEQ ID NO: 1002287 - RNA, 20 nt, Human
ugaaaaggauccaacuuccu

SEQ ID NO: 1002288 - RNA, 18 nt, Human
ugccauuucauagccauc

SEQ ID NO: 1002289 - RNA, 20 nt, Human
ugccuuagcuuucuugaucu

SEQ ID NO: 1002290 - RNA, 21 nt, Human
ugccuuuuuccaaauuucagu

SEQ ID NO: 1002291 - RNA, 20 nt, Human
ugcuugugauuucuuucccu

SEQ ID NO: 1002292 - RNA, 20 nt, Human
uggacuguucucaucauucu

SEQ ID NO: 1002293 - RNA, 22 nt, Human
uuaaagauuccauguaauuauu

SEQ ID NO: 1002294 - RNA, 23 nt, Human
uuaguaguugcuugugauuucuu

SEQ ID NO: 1002295 - RNA, 21 nt, Human
uucacaguuuggguuaauuua

SEQ ID NO: 1002296 - RNA, 18 nt, Human
uucaccccugcucccggg

SEQ ID NO: 1002297 - RNA, 21 nt, Human
uucucucugucuucugauaua

SEQ ID NO: 1002298 - RNA, 18 nt, Human
uucuuuugaggggggccc

SEQ ID NO: 1002299 - RNA, 26 nt, Human
uugcucucuucucucugucuucugau

SEQ ID NO: 1002300 - RNA, 22 nt, Human
aagucaaaagcuaaaaccauga

SEQ ID NO: 1002301 - RNA, 24 nt, Human
auggggcucugcucagcuugggac

SEQ ID NO: 1002302 - RNA, 23 nt, Human
cacagcaaagucaaaagcuaaaa

SEQ ID NO: 1002303 - RNA, 18 nt, Human
cagaaagauggggcucug

SEQ ID NO: 1002304 - RNA, 26 nt, Human
cagcaaagucaaaagcuaaaaccaug

SEQ ID NO: 1002305 - RNA, 22 nt, Human
cagcuugggacagaaggaccuc

SEQ ID NO: 1002306 - RNA, 27 nt, Human
cagggguucuuucucuauuugacauuc

SEQ ID NO: 1002307 - RNA, 20 nt, Human
cauucuuagcauaauuccaa

SEQ ID NO: 1002308 - RNA, 20 nt, Human
cuaaaacucgaucuuccagc

SEQ ID NO: 1002309 - RNA, 21 nt, Human
cuaaaacucgaucuuccagca

SEQ ID NO: 1002310 - RNA, 24 nt, Human
gucuguaucuuuacagagaagucu

SEQ ID NO: 1002311 - RNA, 20 nt, Human
uaaaaaucagauaguuaaaa

SEQ ID NO: 1002312 - RNA, 24 nt, Human
uaagugccguuuaugaagaacuag

SEQ ID NO: 1002313 - RNA, 24 nt, Human
uaauauagacccagaaagaugggg

SEQ ID NO: 1002314 - RNA, 19 nt, Human
uauuuacacagcaaaguca

SEQ ID NO: 1002315 - RNA, 20 nt, Human
ucuguaucuuuacagagaag

SEQ ID NO: 1002316 - RNA, 18 nt, Human
ugaagaacuagaauccuc

SEQ ID NO: 1002317 - RNA, 19 nt, Human
uucacauuuuuaaagagcu

SEQ ID NO: 1002318 - RNA, 18 nt, Human
aagugccuucuacacauc

SEQ ID NO: 1002319 - RNA, 24 nt, Human
acauccacccagaggcucugcuga

SEQ ID NO: 1002320 - RNA, 21 nt, Human
aggcagagggacgccuggcuc

SEQ ID NO: 1002321 - RNA, 23 nt, Human
agguccauucuggcccaagugac

SEQ ID NO: 1002322 - RNA, 19 nt, Human
agucuggagcagaaagggc

SEQ ID NO: 1002323 - RNA, 18 nt, Human
auccuguccccuccccca

SEQ ID NO: 1002324 - RNA, 23 nt, Human
caaaacagcucccggguguugcc

SEQ ID NO: 1002325 - RNA, 19 nt, Human
caaaggacaaaacagcucc

SEQ ID NO: 1002326 - RNA, 19 nt, Human
caccaauggaaggaaaguc

SEQ ID NO: 1002327 - RNA, 19 nt, Human
cacccauccacccaccaau

SEQ ID NO: 1002328 - RNA, 20 nt, Human
caggcuauaaaaugccuuuc

SEQ ID NO: 1002329 - RNA, 21 nt, Human
cagguccauucuggcccaagu

SEQ ID NO: 1002330 - RNA, 22 nt, Human
cccauccacccaccaauggaag

SEQ ID NO: 1002331 - RNA, 20 nt, Human
ccccaaucacugcugcuugc

SEQ ID NO: 1002332 - RNA, 19 nt, Human
cccccaaucacugcugcuu

SEQ ID NO: 1002333 - RNA, 19 nt, Human
ccccccacccauccaccca

SEQ ID NO: 1002334 - RNA, 23 nt, Human
ccccccacccauccacccaccaa

SEQ ID NO: 1002335 - RNA, 19 nt, Human
cuagggggcauaucaaggg

SEQ ID NO: 1002336 - RNA, 24 nt, Human
cuccuguucagggcucuuggcagu

SEQ ID NO: 1002337 - RNA, 24 nt, Human
cuggagcagaaagggcagguccau

SEQ ID NO: 1002338 - RNA, 24 nt, Human
gaggcucuggaaugccccccaccc

SEQ ID NO: 1002339 - RNA, 19 nt, Human
gcccaggcuauaaaaugcc

SEQ ID NO: 1002340 - RNA, 21 nt, Human
gcuccuguucagggcucuugg

SEQ ID NO: 1002341 - RNA, 21 nt, Human
gcucuuggcagugaguucuga

SEQ ID NO: 1002342 - RNA, 23 nt, Human
gcugaggcuccacaaaggacaaa

SEQ ID NO: 1002343 - RNA, 24 nt, Human
ggaaugccccccacccauccaccc

SEQ ID NO: 1002344 - RNA, 22 nt, Human
ggaguggucccuaucuagcccc

SEQ ID NO: 1002345 - RNA, 24 nt, Human
gggcaggcagagggacgccuggcu

SEQ ID NO: 1002346 - RNA, 25 nt, Human
gggcaggcagagggacgccuggcuc

SEQ ID NO: 1002347 - RNA, 20 nt, Human
gggcucuuggcagugaguuc

SEQ ID NO: 1002348 - RNA, 19 nt, Human
gguggcuccuguucagggc

SEQ ID NO: 1002349 - RNA, 19 nt, Human
guagagcacugggaucacc

SEQ ID NO: 1002350 - RNA, 22 nt, Human
guucugaaagagggaacugcug

SEQ ID NO: 1002351 - RNA, 23 nt, Human
uaaaaugccuuucucucaucccc

SEQ ID NO: 1002352 - RNA, 21 nt, Human
uaccuuagaggcucuggaaug

SEQ ID NO: 1002353 - RNA, 22 nt, Human
uagaggcucuggaaugcccccc

SEQ ID NO: 1002354 - RNA, 20 nt, Human
ucacaguucccauguggcag

SEQ ID NO: 1002355 - RNA, 19 nt, Human
ucccccaaucacugcugcu

SEQ ID NO: 1002356 - RNA, 23 nt, Human
ucuagccccaagucuggagcaga

SEQ ID NO: 1002357 - RNA, 18 nt, Human
uggcagaggcagaagugg

SEQ ID NO: 1002358 - RNA, 19 nt, Human
uggcagcaguaguggcaga

SEQ ID NO: 1002359 - RNA, 20 nt, Human
uggcagcaguaguggcagag

SEQ ID NO: 1002360 - RNA, 26 nt, Human
uggcagcaguaguggcagaggcagaa

SEQ ID NO: 1002361 - RNA, 20 nt, Human
ugggaucaccacuaggccua

SEQ ID NO: 1002362 - RNA, 23 nt, Human
uguuagauccuguccccuccccc

SEQ ID NO: 1002363 - RNA, 22 nt, Human
uuaugcauuuugaagugccuuc

SEQ ID NO: 1002364 - RNA, 24 nt, Human
uucccauguggcagcaguaguggc

SEQ ID NO: 1002365 - RNA, 19 nt, Human
uuugaagugccuucuacac

SEQ ID NO: 1002366 - RNA, 21 nt, Human
uuuuuuuuuuuuuuuuuaaca

SEQ ID NO: 1002367 - RNA, 19 nt, Human
aaaauuuccuccaaaauca

SEQ ID NO: 1002368 - RNA, 25 nt, Human
aaacagaagaguuugacauaaaagu

SEQ ID NO: 1002369 - RNA, 19 nt, Human
aacccuucucuucuacuuu

SEQ ID NO: 1002370 - RNA, 20 nt, Human
aagaacccgaguaugcacuu

SEQ ID NO: 1002371 - RNA, 19 nt, Human
agaacccuucucuucuacu

SEQ ID NO: 1002372 - RNA, 25 nt, Human
agagauggacugccuguucuuugcc

SEQ ID NO: 1002373 - RNA, 20 nt, Human
agcugggagacagcuccugu

SEQ ID NO: 1002374 - RNA, 18 nt, Human
auaaacuaaagcuaagag

SEQ ID NO: 1002375 - RNA, 21 nt, Human
auguguauguauauauauaua

SEQ ID NO: 1002376 - RNA, 31 nt, Human
cacacaucuguauauacauacauguauauag

SEQ ID NO: 1002377 - RNA, 19 nt, Human
caguaaugagccaaacaua

SEQ ID NO: 1002378 - RNA, 26 nt, Human
caguagcaguagcaaguauggcagaa

SEQ ID NO: 1002379 - RNA, 19 nt, Human
ccuaaauuuggguuuacua

SEQ ID NO: 1002380 - RNA, 19 nt, Human
cgcagaucacacaugaaua

SEQ ID NO: 1002381 - RNA, 25 nt, Human
cuagaaaaauuuccuccaaaaucag

SEQ ID NO: 1002382 - RNA, 22 nt, Human
gaaaaauuuccuccaaaaucag

SEQ ID NO: 1002383 - RNA, 23 nt, Human
gaaacccuuacacccaacuuaga

SEQ ID NO: 1002384 - RNA, 20 nt, Human
ggaauucucuaauuuuacuc

SEQ ID NO: 1002385 - RNA, 21 nt, Human
guauguauauauauauauaca

SEQ ID NO: 1002386 - RNA, 22 nt, Human
guucuaaaacugugguuuacug

SEQ ID NO: 1002387 - RNA, 18 nt, Human
uaaacacucacuuuuaua

SEQ ID NO: 1002388 - RNA, 20 nt, Human
uaacacguuaaaaaucacuu

SEQ ID NO: 1002389 - RNA, 19 nt, Human
uaagaagaaaucucugaau

SEQ ID NO: 1002390 - RNA, 24 nt, Human
uaagaccaaaaaaacauugaaaau

SEQ ID NO: 1002391 - RNA, 23 nt, Human
uaaguuuuuagcuugccucaaau

SEQ ID NO: 1002392 - RNA, 21 nt, Human
uacaaauucucuuucccacaa

SEQ ID NO: 1002393 - RNA, 23 nt, Human
uacagcagggucagaaaaugaaa

SEQ ID NO: 1002394 - RNA, 18 nt, Human
uacauggaacagaacccu

SEQ ID NO: 1002395 - RNA, 30 nt, Human
uagccaaguucucaaaguuucugaaagcuu

SEQ ID NO: 1002396 - RNA, 18 nt, Human
uaggagaagaugcuuuuc

SEQ ID NO: 1002397 - RNA, 21 nt, Human
uaguccuauaaacacucacuu

SEQ ID NO: 1002398 - RNA, 18 nt, Human
uauaaaaaaacccaggaa

SEQ ID NO: 1002399 - RNA, 22 nt, Human
uauaaacacucacuuuuauagg

SEQ ID NO: 1002400 - RNA, 21 nt, Human
uauaacaagaaucaggaauuc

SEQ ID NO: 1002401 - RNA, 20 nt, Human
uauacagauauauauauaua

SEQ ID NO: 1002402 - RNA, 21 nt, Human
uauacagauauauauauauau

SEQ ID NO: 1002403 - RNA, 22 nt, Human
uauauacacacacaucuguaua

SEQ ID NO: 1002404 - RNA, 24 nt, Human
uauauacacacacaucuguauaua

SEQ ID NO: 1002405 - RNA, 25 nt, Human
uauauacacacacaucuguauauac

SEQ ID NO: 1002406 - RNA, 20 nt, Human
uauauacauacauguauaua

SEQ ID NO: 1002407 - RNA, 27 nt, Human
uauauacauacauguauauauucaaau

SEQ ID NO: 1002408 - RNA, 22 nt, Human
uauauauauacacacacaucug

SEQ ID NO: 1002409 - RNA, 26 nt, Human
uauauauauccacacacacauauaaa

SEQ ID NO: 1002410 - RNA, 26 nt, Human
uauauccacacacacauauaaaaucu

SEQ ID NO: 1002411 - RNA, 22 nt, Human
uauauguguauguauauauaua

SEQ ID NO: 1002412 - RNA, 18 nt, Human
uauguauauauauauaua

SEQ ID NO: 1002413 - RNA, 18 nt, Human
uauguauauguguaugua

SEQ ID NO: 1002414 - RNA, 18 nt, Human
uauguauauguguaugua

SEQ ID NO: 1002415 - RNA, 22 nt, Human
uauguguauguauauauauaua

SEQ ID NO: 1002416 - RNA, 24 nt, Human
ucaaagacuuguguuuucacaugu

SEQ ID NO: 1002417 - RNA, 18 nt, Human
ucaggcagagagauaaac

SEQ ID NO: 1002418 - RNA, 19 nt, Human
ucagucaucauaaacaggc

SEQ ID NO: 1002419 - RNA, 22 nt, Human
uccacacacacauauaaaaucu

SEQ ID NO: 1002420 - RNA, 28 nt, Human
uccuauaaacacucacuuuuccucccug

SEQ ID NO: 1002421 - RNA, 18 nt, Human
ucuaaucucaaauuaguu

SEQ ID NO: 1002422 - RNA, 24 nt, Human
ucugaguuggaaagaaccgggguc

SEQ ID NO: 1002423 - RNA, 21 nt, Human
ugacauaaaagucccuuugag

SEQ ID NO: 1002424 - RNA, 24 nt, Human
ugcccacacacaacuaggagaaga

SEQ ID NO: 1002425 - RNA, 22 nt, Human
uggaaagcuuaucuccaaaagg

SEQ ID NO: 1002426 - RNA, 20 nt, Human
uggaacagaacccuucucuu

SEQ ID NO: 1002427 - RNA, 21 nt, Human
uggaacagaacccuucucuuc

SEQ ID NO: 1002428 - RNA, 21 nt, Human
uggagaaacagaagaguuuga

SEQ ID NO: 1002429 - RNA, 20 nt, Human
uguauauacauacauguaua

SEQ ID NO: 1002430 - RNA, 19 nt, Human
uguauauauauauauacac

SEQ ID NO: 1002431 - RNA, 27 nt, Human
uguauauauauauauacacacacaucu

SEQ ID NO: 1002432 - RNA, 19 nt, Human
uguauauguguauguauau

SEQ ID NO: 1002433 - RNA, 20 nt, Human
uguauauguguauguauaua

SEQ ID NO: 1002434 - RNA, 23 nt, Human
uguggaaucagagaugauucuga

SEQ ID NO: 1002435 - RNA, 24 nt, Human
uguggccuuacaaaauguaguuuu

SEQ ID NO: 1002436 - RNA, 18 nt, Human
uguguauauauauccaca

SEQ ID NO: 1002437 - RNA, 18 nt, Human
uguguauguauauauaua

SEQ ID NO: 1002438 - RNA, 18 nt, Human
uguguauguauauauaua

SEQ ID NO: 1002439 - RNA, 20 nt, Human
uguguauguauauauauaua

SEQ ID NO: 1002440 - RNA, 22 nt, Human
uguguauguauauauauauaua

SEQ ID NO: 1002441 - RNA, 21 nt, Human
ugugugacuucucuuuccaga

SEQ ID NO: 1002442 - RNA, 24 nt, Human
uguguguguauauauauccacaca

SEQ ID NO: 1002443 - RNA, 22 nt, Human
uuaaaagcauguuugggucuaa

SEQ ID NO: 1002444 - RNA, 23 nt, Human
uuauacagauauauauauauaua

SEQ ID NO: 1002445 - RNA, 23 nt, Human
uucaucuggggguuuccaaagcc

SEQ ID NO: 1002446 - RNA, 21 nt, Human
uucccagcaaacagauuucau

SEQ ID NO: 1002447 - RNA, 19 nt, Human
uugaaaauuuuauuuucac

SEQ ID NO: 1002448 - RNA, 21 nt, Human
uugaaaauuuuauuuucacag

SEQ ID NO: 1002449 - RNA, 25 nt, Human
uugcaguaguuuacagcagggucag

SEQ ID NO: 1002450 - RNA, 20 nt, Human
uugcuuuagucuuuuuuccc

SEQ ID NO: 1002451 - RNA, 19 nt, Human
uuuacuguauucuggggag

SEQ ID NO: 1002452 - RNA, 26 nt, Human
uuucaagcagucauaucuuuuuagca

SEQ ID NO: 1002453 - RNA, 19 nt, Human
uuugcauaaaaagaacauu

SEQ ID NO: 1002454 - RNA, 20 nt, Human
uuuugugaguuuuuugggag

SEQ ID NO: 1002455 - RNA, 24 nt, Human
uuuuuaguccuauaaacacucacu

SEQ ID NO: 1002456 - RNA, 22 nt, Human
uuuuugggagugugacacuuuu

SEQ ID NO: 1002457 - RNA, 21 nt, Human
aaaaaccacuaguuucaaagc

SEQ ID NO: 1002458 - RNA, 21 nt, Human
aaaaccuuuggccaagaguuc

SEQ ID NO: 1002459 - RNA, 23 nt, Human
aaccagaaagcugguuuccuccu

SEQ ID NO: 1002460 - RNA, 27 nt, Human
aagccaacuuugauuaaaaaccacuag

SEQ ID NO: 1002461 - RNA, 21 nt, Human
aaggacaccaaugaggggcac

SEQ ID NO: 1002462 - RNA, 23 nt, Human
aaggaccuggugacauuucggca

SEQ ID NO: 1002463 - RNA, 19 nt, Human
agaacaagaccaaaaagcu

SEQ ID NO: 1002464 - RNA, 19 nt, Human
agacugaaaggaccuggug

SEQ ID NO: 1002465 - RNA, 19 nt, Human
agccccgaccccagcaagc

SEQ ID NO: 1002466 - RNA, 22 nt, Human
agcuagaacaaggaaaaagaaa

SEQ ID NO: 1002467 - RNA, 26 nt, Human
agcugguuuccuccuccuccccccaa

SEQ ID NO: 1002468 - RNA, 24 nt, Human
agguaacagaagcaggcucguguc

SEQ ID NO: 1002469 - RNA, 23 nt, Human
agguaguagguaaguaggugggc

SEQ ID NO: 1002470 - RNA, 18 nt, Human
augaaccaagauauacgc

SEQ ID NO: 1002471 - RNA, 21 nt, Human
caacagcagcagaccugcuca

SEQ ID NO: 1002472 - RNA, 19 nt, Human
cagaacaagaccaaaaagc

SEQ ID NO: 1002473 - RNA, 20 nt, Human
cagaacaagaccaaaaagcu

SEQ ID NO: 1002474 - RNA, 24 nt, Human
cagguaguagguaaguaggugggc

SEQ ID NO: 1002475 - RNA, 23 nt, Human
caucaguccuguuaccacuugga

SEQ ID NO: 1002476 - RNA, 18 nt, Human
caugaaaagccaagcugc

SEQ ID NO: 1002477 - RNA, 23 nt, Human
ccacacuacaugacucgcaauug

SEQ ID NO: 1002478 - RNA, 20 nt, Human
cccagcaagcgccucgcucc

SEQ ID NO: 1002479 - RNA, 19 nt, Human
ccccaaaaaccuuuggcca

SEQ ID NO: 1002480 - RNA, 20 nt, Human
ccccccaaaaaccuuuggcc

SEQ ID NO: 1002481 - RNA, 22 nt, Human
ccccccaaaaaccuuuggccaa

SEQ ID NO: 1002482 - RNA, 22 nt, Human
cccgcagccccugcgccgucgc

SEQ ID NO: 1002483 - RNA, 18 nt, Human
cccgcgaaggcccggccc

SEQ ID NO: 1002484 - RNA, 19 nt, Human
ccgucgcgcagccccgacc

SEQ ID NO: 1002485 - RNA, 21 nt, Human
ccucagggcucccgcgccgcu

SEQ ID NO: 1002486 - RNA, 22 nt, Human
ccuccuccuccccccaaaaacc

SEQ ID NO: 1002487 - RNA, 19 nt, Human
ccugcgcggcgcuccccgc

SEQ ID NO: 1002488 - RNA, 27 nt, Human
cgccucgcuccuccgcgcagccgccgc

SEQ ID NO: 1002489 - RNA, 21 nt, Human
cggcccggagagcggggcugc

SEQ ID NO: 1002490 - RNA, 23 nt, Human
cuccagaggccaacagcagcaga

SEQ ID NO: 1002491 - RNA, 24 nt, Human
cuccccccaaaaaccuuuggccaa

SEQ ID NO: 1002492 - RNA, 24 nt, Human
cugcgcggcgcuccccgcagcccc

SEQ ID NO: 1002493 - RNA, 21 nt, Human
cuuuaacuaaaugaacuccag

SEQ ID NO: 1002494 - RNA, 21 nt, Human
gaccuggugacauuucggcau

SEQ ID NO: 1002495 - RNA, 22 nt, Human
gagcggcaauggcggcggcgcc

SEQ ID NO: 1002496 - RNA, 27 nt, Human
gcagguaguagguaaguaggugggcac

SEQ ID NO: 1002497 - RNA, 18 nt, Human
gcccgcgaaggcccggcc

SEQ ID NO: 1002498 - RNA, 20 nt, Human
gccucgcuccuccgcgcagc

SEQ ID NO: 1002499 - RNA, 18 nt, Human
gcgcuccccgcagccccu

SEQ ID NO: 1002500 - RNA, 25 nt, Human
gcggcaauggcggcggcgccuccuc

SEQ ID NO: 1002501 - RNA, 23 nt, Human
uaaaaggacaccaaugaggggca

SEQ ID NO: 1002502 - RNA, 21 nt, Human
uaacagaagcaggcucguguc

SEQ ID NO: 1002503 - RNA, 29 nt, Human
uaacuaaaugaacuccagaggccaacagg

SEQ ID NO: 1002504 - RNA, 22 nt, Human
uagaacguucaccaucguacuu

SEQ ID NO: 1002505 - RNA, 27 nt, Human
uagaacguucaccaucguacuuaaaaa

SEQ ID NO: 1002506 - RNA, 22 nt, Human
uaggugggcacaugaaaagcca

SEQ ID NO: 1002507 - RNA, 18 nt, Human
ucaauucaccuuccaaau

SEQ ID NO: 1002508 - RNA, 20 nt, Human
ucagcuagaacaaggaaaaa

SEQ ID NO: 1002509 - RNA, 19 nt, Human
uccaaaucagaacaagacc

SEQ ID NO: 1002510 - RNA, 26 nt, Human
uccaaaucagaacaagaccaaaaagc

SEQ ID NO: 1002511 - RNA, 26 nt, Human
uccccccaaaaaccuuuggccaagaa

SEQ ID NO: 1002512 - RNA, 23 nt, Human
uccgcgcagccgccgcagucccc

SEQ ID NO: 1002513 - RNA, 19 nt, Human
uccuccuccccccaaaaac

SEQ ID NO: 1002514 - RNA, 24 nt, Human
ucguguccuccuuuaauucuacca

SEQ ID NO: 1002515 - RNA, 20 nt, Human
ucucugauuuugaagaugaa

SEQ ID NO: 1002516 - RNA, 21 nt, Human
ucuguccaacaccaguguaca

SEQ ID NO: 1002517 - RNA, 19 nt, Human
ugaaaagccaagcugcucu

SEQ ID NO: 1002518 - RNA, 19 nt, Human
ugaagagucagcuagaaca

SEQ ID NO: 1002519 - RNA, 18 nt, Human
ugaggggcaccaucuggu

SEQ ID NO: 1002520 - RNA, 19 nt, Human
ugaggggcaccaucuggug

SEQ ID NO: 1002521 - RNA, 19 nt, Human
ugcucaauucaccuuccaa

SEQ ID NO: 1002522 - RNA, 23 nt, Human
ugcucaauucaccuuccaaauca

SEQ ID NO: 1002523 - RNA, 18 nt, Human
uggaacugaaauaucccc

SEQ ID NO: 1002524 - RNA, 18 nt, Human
uguccuccuuuaauucua

SEQ ID NO: 1002525 - RNA, 20 nt, Human
ugugcuuuaacuaaaugaac

SEQ ID NO: 1002526 - RNA, 20 nt, Human
uuaauucuaccacacuacau

SEQ ID NO: 1002527 - RNA, 26 nt, Human
uuacaacugagaucacaucuacauac

SEQ ID NO: 1002528 - RNA, 19 nt, Human
uuuccuccuccucccccca

SEQ ID NO: 1002529 - RNA, 23 nt, Human
uuuuuuuuuuuuuuuuuggaacu

SEQ ID NO: 1002530 - RNA, 20 nt, Human
uuuuuuuuuuuuuuuuuugg

SEQ ID NO: 1002531 - RNA, 19 nt, Human
aagcgagcgcccgcguccg

SEQ ID NO: 1002532 - RNA, 21 nt, Human
agagcggcucccgcaccucca

SEQ ID NO: 1002533 - RNA, 20 nt, Human
agcgcccgcguccgugcgcc

SEQ ID NO: 1002534 - RNA, 22 nt, Human
cacgcgggagggucccgaaagc

SEQ ID NO: 1002535 - RNA, 22 nt, Human
cacuccccuaauggcagcucca

SEQ ID NO: 1002536 - RNA, 18 nt, Human
cagcccggcggggagcag

SEQ ID NO: 1002537 - RNA, 18 nt, Human
cagcuccauuaggcgaga

SEQ ID NO: 1002538 - RNA, 18 nt, Human
ccccgaacacaaagcgag

SEQ ID NO: 1002539 - RNA, 19 nt, Human
cccucgcgcgccgaggccg

SEQ ID NO: 1002540 - RNA, 20 nt, Human
cccucgcgcgccgaggccgc

SEQ ID NO: 1002541 - RNA, 20 nt, Human
ccgcaccuccagccccucgc

SEQ ID NO: 1002542 - RNA, 22 nt, Human
cgccgacgcuagccccgaacac

SEQ ID NO: 1002543 - RNA, 18 nt, Human
cggagcagcccggcgggg

SEQ ID NO: 1002544 - RNA, 23 nt, Human
cggcucccgcaccuccagccccu

SEQ ID NO: 1002545 - RNA, 19 nt, Human
cuccccuaauggcagcucc

SEQ ID NO: 1002546 - RNA, 19 nt, Human
cugcaagcucaagccucgc

SEQ ID NO: 1002547 - RNA, 19 nt, Human
gaacacaaagcgagcgccc

SEQ ID NO: 1002548 - RNA, 19 nt, Human
gagaaagcagggaagccgc

SEQ ID NO: 1002549 - RNA, 20 nt, Human
gagaaagcagggaagccgcg

SEQ ID NO: 1002550 - RNA, 19 nt, Human
gagcgcccgcguccgugcg

SEQ ID NO: 1002551 - RNA, 22 nt, Human
gccgacgcuagccccgaacaca

SEQ ID NO: 1002552 - RNA, 22 nt, Human
ucauggcuacaguagagauuca

SEQ ID NO: 1002553 - RNA, 22 nt, Human
uccccuaauggcagcuccauua

SEQ ID NO: 1002554 - RNA, 19 nt, Human
uccgugcgccaggcggucg

SEQ ID NO: 1002555 - RNA, 20 nt, Human
ucgccgacgcuagccccgaa

SEQ ID NO: 1002556 - RNA, 21 nt, Human
ugcagcagcgguugcaggggg

SEQ ID NO: 1002557 - RNA, 23 nt, Human
uggcggccugggcucagccgcgc

SEQ ID NO: 1002558 - RNA, 20 nt, Human
uucaugaagacacuugcccc

SEQ ID NO: 1002559 - RNA, 21 nt, Human
uugcucggagcagcccggcgg

SEQ ID NO: 1002560 - RNA, 21 nt, Human
aaacacgaaggucccaaagcc

SEQ ID NO: 1002561 - RNA, 22 nt, Human
aaagagcaguauaaauacacuu

SEQ ID NO: 1002562 - RNA, 18 nt, Human
aaggacucagagguggau

SEQ ID NO: 1002563 - RNA, 19 nt, Human
aaggagcaggugggaacag

SEQ ID NO: 1002564 - RNA, 21 nt, Human
aaggggcacacagagcagcca

SEQ ID NO: 1002565 - RNA, 18 nt, Human
aaggucccaaagccggca

SEQ ID NO: 1002566 - RNA, 21 nt, Human
acccaggccaugcccaggcuu

SEQ ID NO: 1002567 - RNA, 21 nt, Human
accugagccccggaaaaacac

SEQ ID NO: 1002568 - RNA, 22 nt, Human
acggcaccacaccugcucaggc

SEQ ID NO: 1002569 - RNA, 19 nt, Human
agaccagaccgucacuggg

SEQ ID NO: 1002570 - RNA, 21 nt, Human
agagggaggagggugugguca

SEQ ID NO: 1002571 - RNA, 20 nt, Human
aggagaaaaggagcaggugg

SEQ ID NO: 1002572 - RNA, 21 nt, Human
agggagcuaggacagccagca

SEQ ID NO: 1002573 - RNA, 22 nt, Human
agugcauuuacggguaaacuga

SEQ ID NO: 1002574 - RNA, 19 nt, Human
caagaccagaccgucacug

SEQ ID NO: 1002575 - RNA, 22 nt, Human
cacagcgauggcuggagugaga

SEQ ID NO: 1002576 - RNA, 19 nt, Human
caccacaccugcucaggcg

SEQ ID NO: 1002577 - RNA, 19 nt, Human
cacccccucucauccucac

SEQ ID NO: 1002578 - RNA, 18 nt, Human
caccuggccaccccaguu

SEQ ID NO: 1002579 - RNA, 19 nt, Human
cacgaaggucccaaagccg

SEQ ID NO: 1002580 - RNA, 20 nt, Human
cagcacacaggcagacggag

SEQ ID NO: 1002581 - RNA, 22 nt, Human
caggagugcucucugagcugaa

SEQ ID NO: 1002582 - RNA, 19 nt, Human
caggcagacggaggcacgc

SEQ ID NO: 1002583 - RNA, 21 nt, Human
caggggcucugggccucugcc

SEQ ID NO: 1002584 - RNA, 25 nt, Human
caugacugauugcuccaugcugcag

SEQ ID NO: 1002585 - RNA, 23 nt, Human
ccacaccugcucaggcggccgga

SEQ ID NO: 1002586 - RNA, 19 nt, Human
cccaggcuugugauuucug

SEQ ID NO: 1002587 - RNA, 22 nt, Human
ccccggaaaaacacgaaggucc

SEQ ID NO: 1002588 - RNA, 20 nt, Human
cccuaggcugggcccaccug

SEQ ID NO: 1002589 - RNA, 25 nt, Human
cccuccugcccaggacgcuugggaa

SEQ ID NO: 1002590 - RNA, 19 nt, Human
ccgcucagccugcagggaa

SEQ ID NO: 1002591 - RNA, 20 nt, Human
ccguguccguggugaggggc

SEQ ID NO: 1002592 - RNA, 18 nt, Human
ccuacauggguuaagagg

SEQ ID NO: 1002593 - RNA, 18 nt, Human
ccuguuuaucucgugcuc

SEQ ID NO: 1002594 - RNA, 21 nt, Human
ccuugcgcccaucacccccuc

SEQ ID NO: 1002595 - RNA, 23 nt, Human
cgaaauccccgcuugacacucag

SEQ ID NO: 1002596 - RNA, 24 nt, Human
cggacagacaagcagcucucccag

SEQ ID NO: 1002597 - RNA, 22 nt, Human
cggccggacgcacacugcagga

SEQ ID NO: 1002598 - RNA, 21 nt, Human
cgggacggcaccacaccugcu

SEQ ID NO: 1002599 - RNA, 24 nt, Human
cucagccugcagggaaguggcugc

SEQ ID NO: 1002600 - RNA, 20 nt, Human
cugcacccugccugaugccc

SEQ ID NO: 1002601 - RNA, 22 nt, Human
cugcagagacaagaugaccaca

SEQ ID NO: 1002602 - RNA, 22 nt, Human
cugcgguguaggaaauaggaag

SEQ ID NO: 1002603 - RNA, 23 nt, Human
cugggagggaagccucucucugu

SEQ ID NO: 1002604 - RNA, 18 nt, Human
gaaaaaaucccgggcccg

SEQ ID NO: 1002605 - RNA, 25 nt, Human
gaaagcagggcccaacccuccugcc

SEQ ID NO: 1002606 - RNA, 18 nt, Human
gaaggucccaaagccggc

SEQ ID NO: 1002607 - RNA, 19 nt, Human
gacaagaugaccacaggag

SEQ ID NO: 1002608 - RNA, 23 nt, Human
gagcugaaggugaacagacagcu

SEQ ID NO: 1002609 - RNA, 24 nt, Human
gcagagacaagaugaccacaggag

SEQ ID NO: 1002610 - RNA, 18 nt, Human
gcccaucacccccucuca

SEQ ID NO: 1002611 - RNA, 23 nt, Human
gccccaccuggccaccccaguug

SEQ ID NO: 1002612 - RNA, 26 nt, Human
gccccggagccugcugucugagccuc

SEQ ID NO: 1002613 - RNA, 18 nt, Human
gccugagucccagucagc

SEQ ID NO: 1002614 - RNA, 19 nt, Human
gcuaaggaugcacccagga

SEQ ID NO: 1002615 - RNA, 21 nt, Human
gcugggagggaagccucucuc

SEQ ID NO: 1002616 - RNA, 19 nt, Human
ggaaaaaaucccgggccca

SEQ ID NO: 1002617 - RNA, 21 nt, Human
ggaaagcagggcccaacccuc

SEQ ID NO: 1002618 - RNA, 21 nt, Human
ggaaaggcagcuuccugcagg

SEQ ID NO: 1002619 - RNA, 22 nt, Human
ggcaggggcucugggccucugc

SEQ ID NO: 1002620 - RNA, 18 nt, Human
ggcuggcgagaggccagc

SEQ ID NO: 1002621 - RNA, 18 nt, Human
ggcugugcccacccgcug

SEQ ID NO: 1002622 - RNA, 18 nt, Human
ggcuugggugccaagcuc

SEQ ID NO: 1002623 - RNA, 21 nt, Human
gggaguggcucuccacuggcc

SEQ ID NO: 1002624 - RNA, 19 nt, Human
gggcaaagggaaaggcagc

SEQ ID NO: 1002625 - RNA, 18 nt, Human
gggcagagggaggagggu

SEQ ID NO: 1002626 - RNA, 21 nt, Human
gggcccaacccuccugcccag

SEQ ID NO: 1002627 - RNA, 20 nt, Human
gggccguggggagggggugc

SEQ ID NO: 1002628 - RNA, 19 nt, Human
ggggaaaagccggcuggag

SEQ ID NO: 1002629 - RNA, 24 nt, Human
ggggugguuucucuggcaccuaca

SEQ ID NO: 1002630 - RNA, 21 nt, Human
ggguaaacugaggcugggagg

SEQ ID NO: 1002631 - RNA, 20 nt, Human
ggguggggccguggggaggg

SEQ ID NO: 1002632 - RNA, 21 nt, Human
ggguggggccguggggagggg

SEQ ID NO: 1002633 - RNA, 22 nt, Human
ggugguuucucuggcaccuaca

SEQ ID NO: 1002634 - RNA, 21 nt, Human
guaaagagcaguauaaauaca

SEQ ID NO: 1002635 - RNA, 19 nt, Human
guccacaguucugauuggc

SEQ ID NO: 1002636 - RNA, 22 nt, Human
guggcucuccacuggccacagc

SEQ ID NO: 1002637 - RNA, 20 nt, Human
guggguggggccguggggag

SEQ ID NO: 1002638 - RNA, 24 nt, Human
guggguggggccguggggaggggg

SEQ ID NO: 1002639 - RNA, 21 nt, Human
uaaauacacuuccguucagau

SEQ ID NO: 1002640 - RNA, 23 nt, Human
uaaauacacuuccguucagauaa

SEQ ID NO: 1002641 - RNA, 20 nt, Human
uagggcaaagggaaaggcag

SEQ ID NO: 1002642 - RNA, 19 nt, Human
ucacaugacugauugcucc

SEQ ID NO: 1002643 - RNA, 22 nt, Human
ucacugccugugacggacagac

SEQ ID NO: 1002644 - RNA, 19 nt, Human
ucagcuggaggacauguga

SEQ ID NO: 1002645 - RNA, 21 nt, Human
ucagcuggaggacaugugauu

SEQ ID NO: 1002646 - RNA, 21 nt, Human
ucaguugggggaggugcuggg

SEQ ID NO: 1002647 - RNA, 19 nt, Human
ucccaaagccggcaaaagu

SEQ ID NO: 1002648 - RNA, 21 nt, Human
ucccgggcccagaaguugagg

SEQ ID NO: 1002649 - RNA, 19 nt, Human
uccuggaagaccguggcag

SEQ ID NO: 1002650 - RNA, 20 nt, Human
ucucucccaagaugauguug

SEQ ID NO: 1002651 - RNA, 20 nt, Human
ugaacagacagcugcggugu

SEQ ID NO: 1002652 - RNA, 21 nt, Human
ugaaggugaacagacagcugc

SEQ ID NO: 1002653 - RNA, 19 nt, Human
ugaauuggggugucgaguu

SEQ ID NO: 1002654 - RNA, 21 nt, Human
ugaccacaggagagccagcag

SEQ ID NO: 1002655 - RNA, 19 nt, Human
ugagccccggaaaaacacg

SEQ ID NO: 1002656 - RNA, 23 nt, Human
ugagccccggaaaaacacgaagg

SEQ ID NO: 1002657 - RNA, 19 nt, Human
ugaggucccuguggguggg

SEQ ID NO: 1002658 - RNA, 22 nt, Human
ugagugaauuggggugucgagu

SEQ ID NO: 1002659 - RNA, 18 nt, Human
ugcagagacaagaugacc

SEQ ID NO: 1002660 - RNA, 23 nt, Human
ugcaggacucagcuuucagcuuu

SEQ ID NO: 1002661 - RNA, 22 nt, Human
ugcccaggacgcuugggaaagc

SEQ ID NO: 1002662 - RNA, 18 nt, Human
ugcccuaggcugggccca

SEQ ID NO: 1002663 - RNA, 26 nt, Human
ugcccuaggcugggcccaccuggacg

SEQ ID NO: 1002664 - RNA, 22 nt, Human
ugcuggggucccgccccggggg

SEQ ID NO: 1002665 - RNA, 22 nt, Human
uggacggaggggaaggaggcuc

SEQ ID NO: 1002666 - RNA, 18 nt, Human
uggcucagaaggacucag

SEQ ID NO: 1002667 - RNA, 24 nt, Human
ugggcugcguggccccggagccug

SEQ ID NO: 1002668 - RNA, 21 nt, Human
uuaccagggagcuaggacagc

SEQ ID NO: 1002669 - RNA, 21 nt, Human
uucuugguugagugaauuggg

SEQ ID NO: 1002670 - RNA, 18 nt, Human
uugacagcgaaauccccg

SEQ ID NO: 1002671 - RNA, 20 nt, Human
uugaggucccuguggguggg

SEQ ID NO: 1002672 - RNA, 21 nt, Human
uuggcggaaaaagcacauugu

SEQ ID NO: 1002673 - RNA, 20 nt, Human
uugggaccuucugagugacu

SEQ ID NO: 1002674 - RNA, 26 nt, Human
uuuacggguaaacugaggcugggagg

SEQ ID NO: 1002675 - RNA, 23 nt, Human
aaaaagcgaaacuccugacaccc

SEQ ID NO: 1002676 - RNA, 23 nt, Human
aaacuccugacacccuuaaaaca

SEQ ID NO: 1002677 - RNA, 23 nt, Human
aagaggaaaaccacucaauggga

SEQ ID NO: 1002678 - RNA, 21 nt, Human
accccggccacucacacgcua

SEQ ID NO: 1002679 - RNA, 20 nt, Human
acucucaagagaaagaagag

SEQ ID NO: 1002680 - RNA, 19 nt, Human
agcgaaacuccugacaccc

SEQ ID NO: 1002681 - RNA, 23 nt, Human
agcgaaacuccugacacccuuaa

SEQ ID NO: 1002682 - RNA, 27 nt, Human
agcgcccauucauucccuccccgcagc

SEQ ID NO: 1002683 - RNA, 18 nt, Human
auucauucccuccccgca

SEQ ID NO: 1002684 - RNA, 19 nt, Human
caaagagcugcgacuguuu

SEQ ID NO: 1002685 - RNA, 19 nt, Human
caagaggaaaaccacucaa

SEQ ID NO: 1002686 - RNA, 21 nt, Human
cccgcagcaaacgacuccaaa

SEQ ID NO: 1002687 - RNA, 23 nt, Human
ccggcgcguccccaccucgcggg

SEQ ID NO: 1002688 - RNA, 23 nt, Human
ccucgcuacggccggcgcguccc

SEQ ID NO: 1002689 - RNA, 23 nt, Human
ccuggauaacccaggcccgggag

SEQ ID NO: 1002690 - RNA, 19 nt, Human
cgaccccggccacucacac

SEQ ID NO: 1002691 - RNA, 23 nt, Human
cuacaggaagggaacagcggcuc

SEQ ID NO: 1002692 - RNA, 21 nt, Human
cucaagagaaagaagaguuac

SEQ ID NO: 1002693 - RNA, 22 nt, Human
cucaagagaaagaagaguuacu

SEQ ID NO: 1002694 - RNA, 22 nt, Human
cucaaugggaccuggauaaccc

SEQ ID NO: 1002695 - RNA, 23 nt, Human
cucugucucugccgacaggggcu

SEQ ID NO: 1002696 - RNA, 19 nt, Human
cuggaagucuucucgugcc

SEQ ID NO: 1002697 - RNA, 23 nt, Human
gcugcugcuacaggaagggaaca

SEQ ID NO: 1002698 - RNA, 21 nt, Human
ggaacagcggcucucccagag

SEQ ID NO: 1002699 - RNA, 19 nt, Human
ucacauaauaauguggggc

SEQ ID NO: 1002700 - RNA, 19 nt, Human
ucccagagagggauccacc

SEQ ID NO: 1002701 - RNA, 23 nt, Human
ucgcgggcguguucccagcgccc

SEQ ID NO: 1002702 - RNA, 19 nt, Human
ucucaagagaaagaagagu

SEQ ID NO: 1002703 - RNA, 21 nt, Human
uucccagcgcccauucauucc

SEQ ID NO: 1002704 - RNA, 20 nt, Human
uuuuuuuuuuuuuuugucag

SEQ ID NO: 1002705 - RNA, 21 nt, Human
uuuuuuuuuuuuuuugucagc

SEQ ID NO: 1002706 - RNA, 18 nt, Human
uuuuuuuuuuuuuuuuug

SEQ ID NO: 1002707 - RNA, 19 nt, Human
uuuuuuuuuuuuuuuuugu

SEQ ID NO: 1002708 - RNA, 20 nt, Human
aaaacgaaacugcucuaagc

SEQ ID NO: 1002709 - RNA, 30 nt, Human
aacugagaaaacgaaacugcucuaagcacu

SEQ ID NO: 1002710 - RNA, 23 nt, Human
acaaaaauucacaagcugccucc

SEQ ID NO: 1002711 - RNA, 20 nt, Human
auugguucccuuugcuccaa

SEQ ID NO: 1002712 - RNA, 23 nt, Human
cacagagacacagggcauccaac

SEQ ID NO: 1002713 - RNA, 21 nt, Human
cagagacacagggcauccaac

SEQ ID NO: 1002714 - RNA, 19 nt, Human
cagggcauccaacugagaa

SEQ ID NO: 1002715 - RNA, 23 nt, Human
caguaaaacaaaaauucacaagc

SEQ ID NO: 1002716 - RNA, 19 nt, Human
caucgcacuccgcggcagc

SEQ ID NO: 1002717 - RNA, 22 nt, Human
ccacccccgccucccuccccug

SEQ ID NO: 1002718 - RNA, 20 nt, Human
cccccgccucccuccccugc

SEQ ID NO: 1002719 - RNA, 22 nt, Human
cccccgccucccuccccugccc

SEQ ID NO: 1002720 - RNA, 19 nt, Human
ccucggucuucggcauugg

SEQ ID NO: 1002721 - RNA, 20 nt, Human
cugccucccuguccaccccc

SEQ ID NO: 1002722 - RNA, 19 nt, Human
cuggguucugggugguugc

SEQ ID NO: 1002723 - RNA, 18 nt, Human
ggagacgugaugaaggga

SEQ ID NO: 1002724 - RNA, 21 nt, Human
gggcauccaacugagaaaacg

SEQ ID NO: 1002725 - RNA, 23 nt, Human
uaaaacaaaaauucacaagcugc

SEQ ID NO: 1002726 - RNA, 26 nt, Human
uaaaacaaaaauucacaagcugccuc

SEQ ID NO: 1002727 - RNA, 23 nt, Human
uccaccccacucacagagacaca

SEQ ID NO: 1002728 - RNA, 21 nt, Human
ucccuuugcuccaccccacuc

SEQ ID NO: 1002729 - RNA, 26 nt, Human
ugagugaaucugcauuuucugggucg

SEQ ID NO: 1002730 - RNA, 25 nt, Human
ugcccucggucuucggcauugguuc

SEQ ID NO: 1002731 - RNA, 20 nt, Human
uguccacccccgccucccuc

SEQ ID NO: 1002732 - RNA, 23 nt, Human
uucuggguucugggugguugccc

SEQ ID NO: 1002733 - RNA, 18 nt, Human
uugcuccaccccacucac

SEQ ID NO: 1002734 - RNA, 25 nt, Human
uugguucccuuugcuccaccccacu

SEQ ID NO: 1002735 - RNA, 19 nt, Human
uuuuuuuuuuucuuuuuua

SEQ ID NO: 1002736 - RNA, 18 nt, Human
aaaaauauacucuguaac

SEQ ID NO: 1002737 - RNA, 23 nt, Human
aaacugcagaggaacucaagagg

SEQ ID NO: 1002738 - RNA, 24 nt, Human
aaaugucaaaacugcagaggaacu

SEQ ID NO: 1002739 - RNA, 18 nt, Human
aacaaccaaccccuaaau

SEQ ID NO: 1002740 - RNA, 21 nt, Human
acauggcuucccucugugcgc

SEQ ID NO: 1002741 - RNA, 25 nt, Human
agacaaaaauauacucuguaacaac

SEQ ID NO: 1002742 - RNA, 18 nt, Human
agcaaacauugcucucuc

SEQ ID NO: 1002743 - RNA, 22 nt, Human
aggaaagugaagaccagccaga

SEQ ID NO: 1002744 - RNA, 24 nt, Human
aggacaucauggccaagacccaga

SEQ ID NO: 1002745 - RNA, 20 nt, Human
aggcuccucccccaccacga

SEQ ID NO: 1002746 - RNA, 21 nt, Human
agggugacggaaagaaagcac

SEQ ID NO: 1002747 - RNA, 23 nt, Human
agucaggauggauaaacuccucu

SEQ ID NO: 1002748 - RNA, 25 nt, Human
auggggcaacaaacagcugcagaca

SEQ ID NO: 1002749 - RNA, 22 nt, Human
caacaaacagcugcagacaaaa

SEQ ID NO: 1002750 - RNA, 23 nt, Human
caaccccuaaaucucacugcuua

SEQ ID NO: 1002751 - RNA, 19 nt, Human
caagaggccacuguccaaa

SEQ ID NO: 1002752 - RNA, 21 nt, Human
caaggcaucuucagcaacccc

SEQ ID NO: 1002753 - RNA, 22 nt, Human
caccucaaggcaucuucagcaa

SEQ ID NO: 1002754 - RNA, 23 nt, Human
caccucaaggcaucuucagcaac

SEQ ID NO: 1002755 - RNA, 19 nt, Human
cagaggcuccucccccacc

SEQ ID NO: 1002756 - RNA, 20 nt, Human
cagcaaccccacauggcuuc

SEQ ID NO: 1002757 - RNA, 24 nt, Human
cagcugauucaggugugcuagguu

SEQ ID NO: 1002758 - RNA, 18 nt, Human
caguggcugcaggccagc

SEQ ID NO: 1002759 - RNA, 18 nt, Human
ccaaccccuaaaucucac

SEQ ID NO: 1002760 - RNA, 18 nt, Human
ccagaguuuuauaucaac

SEQ ID NO: 1002761 - RNA, 21 nt, Human
ccagaguuuuauaucaacuga

SEQ ID NO: 1002762 - RNA, 18 nt, Human
ccagcugauucaggugug

SEQ ID NO: 1002763 - RNA, 22 nt, Human
ccaggaaggacuauccccaggg

SEQ ID NO: 1002764 - RNA, 23 nt, Human
cccagcagaggaggguaagggag

SEQ ID NO: 1002765 - RNA, 21 nt, Human
cccccaccacgaugccaggaa

SEQ ID NO: 1002766 - RNA, 18 nt, Human
ccccuaaaucucacugcu

SEQ ID NO: 1002767 - RNA, 23 nt, Human
ccgugaagcgagcggcuccuucc

SEQ ID NO: 1002768 - RNA, 18 nt, Human
ccuuccggcggcgcgggu

SEQ ID NO: 1002769 - RNA, 19 nt, Human
cgaugccaggaaggacuau

SEQ ID NO: 1002770 - RNA, 23 nt, Human
cgcggguucccuucccucaaucc

SEQ ID NO: 1002771 - RNA, 20 nt, Human
cggcgcggguucccuucccu

SEQ ID NO: 1002772 - RNA, 21 nt, Human
cggggggauggggugggggca

SEQ ID NO: 1002773 - RNA, 21 nt, Human
cucaagaggccacuguccaaa

SEQ ID NO: 1002774 - RNA, 20 nt, Human
cucacagcagagggaagaag

SEQ ID NO: 1002775 - RNA, 22 nt, Human
cuccacagaccagggugccgcu

SEQ ID NO: 1002776 - RNA, 18 nt, Human
cucccccaccacgaugcc

SEQ ID NO: 1002777 - RNA, 20 nt, Human
cugcccccauuucaccucaa

SEQ ID NO: 1002778 - RNA, 19 nt, Human
gacggaaagaaagcacugg

SEQ ID NO: 1002779 - RNA, 24 nt, Human
gacggaaagaaagcacuggacucc

SEQ ID NO: 1002780 - RNA, 18 nt, Human
gcaggacagcucaugccu

SEQ ID NO: 1002781 - RNA, 22 nt, Human
ggaagagcacaggccaaccaca

SEQ ID NO: 1002782 - RNA, 19 nt, Human
ggcaucuucagcaacccca

SEQ ID NO: 1002783 - RNA, 24 nt, Human
ggcgcggguucccuucccucaauc

SEQ ID NO: 1002784 - RNA, 23 nt, Human
gggucucucagcuuuaaagccuu

SEQ ID NO: 1002785 - RNA, 18 nt, Human
guggcuuuccugccccca

SEQ ID NO: 1002786 - RNA, 22 nt, Human
uaccaaggaucugaguuuguac

SEQ ID NO: 1002787 - RNA, 24 nt, Human
uacucauguauuagcucugcuaua

SEQ ID NO: 1002788 - RNA, 21 nt, Human
ucagacgcaggacagcucaug

SEQ ID NO: 1002789 - RNA, 23 nt, Human
ucagcaaccccacauggcuuccc

SEQ ID NO: 1002790 - RNA, 22 nt, Human
uccggcggcgcggguucccuuc

SEQ ID NO: 1002791 - RNA, 26 nt, Human
uccuccauauggcaaagaugaagaaa

SEQ ID NO: 1002792 - RNA, 25 nt, Human
ucucccggggggauggggugggggc

SEQ ID NO: 1002793 - RNA, 23 nt, Human
ucucucagcuuuaaagccuugga

SEQ ID NO: 1002794 - RNA, 22 nt, Human
ugacggaaagaaagcacuggac

SEQ ID NO: 1002795 - RNA, 22 nt, Human
ugcagaggaacucaagaggcca

SEQ ID NO: 1002796 - RNA, 26 nt, Human
ugcccugccuuccagcccggguccca

SEQ ID NO: 1002797 - RNA, 18 nt, Human
uggauccugaguccaucu

SEQ ID NO: 1002798 - RNA, 27 nt, Human
uggcaaucuuuuuagggguaccaagga

SEQ ID NO: 1002799 - RNA, 23 nt, Human
uguaacaacccaacaugcuagaa

SEQ ID NO: 1002800 - RNA, 24 nt, Human
aaaggaaaaaagcucuacaaaagg

SEQ ID NO: 1002801 - RNA, 20 nt, Human
aagcucuacaaaagggaaau

SEQ ID NO: 1002802 - RNA, 24 nt, Human
acucggaggagcgcccugcaggga

SEQ ID NO: 1002803 - RNA, 21 nt, Human
acugccaggcgcaccggcccg

SEQ ID NO: 1002804 - RNA, 18 nt, Human
agccgcgcccucgccccg

SEQ ID NO: 1002805 - RNA, 21 nt, Human
aggaaaaaagcucuacaaaag

SEQ ID NO: 1002806 - RNA, 21 nt, Human
auaggcacugacagagcacca

SEQ ID NO: 1002807 - RNA, 22 nt, Human
cagguggagugaguaguuuuga

SEQ ID NO: 1002808 - RNA, 19 nt, Human
ccgccuccagccccucucc

SEQ ID NO: 1002809 - RNA, 18 nt, Human
ccggccccuccuucuucc

SEQ ID NO: 1002810 - RNA, 21 nt, Human
cgcagccgacugccaggcgca

SEQ ID NO: 1002811 - RNA, 21 nt, Human
cucgccccgccuccagccccu

SEQ ID NO: 1002812 - RNA, 18 nt, Human
gaggacgcagccgacugc

SEQ ID NO: 1002813 - RNA, 19 nt, Human
gcagccgacugccaggcgc

SEQ ID NO: 1002814 - RNA, 21 nt, Human
gccggccccuccuucuucccu

SEQ ID NO: 1002815 - RNA, 21 nt, Human
ggacucggaggagcgcccugc

SEQ ID NO: 1002816 - RNA, 22 nt, Human
gggcuuaggaaaggaaaaaagc

SEQ ID NO: 1002817 - RNA, 21 nt, Human
ucacugacgccggccccuccu

SEQ ID NO: 1002818 - RNA, 18 nt, Human
ucagcaggggcccaggug

SEQ ID NO: 1002819 - RNA, 23 nt, Human
ucccugugggcucagagcgccga

SEQ ID NO: 1002820 - RNA, 24 nt, Human
ucgccccgccuccagccccucucc

SEQ ID NO: 1002821 - RNA, 21 nt, Human
ugacgccggccccuccuucuu

SEQ ID NO: 1002822 - RNA, 23 nt, Human
ugccaggcgcaccggcccgcccc

SEQ ID NO: 1002823 - RNA, 22 nt, Human
uggcaacgcccacgcucaccuc

SEQ ID NO: 1002824 - RNA, 18 nt, Human
uuugauaagguccaggug

SEQ ID NO: 1002825 - RNA, 21 nt, Human
uuugauaagguccagguggga

SEQ ID NO: 1002826 - RNA, 24 nt, Human
uuuuuuuuuuuuuuuuuuccaaag

SEQ ID NO: 1002827 - RNA, 24 nt, Human
aaaaaaccaggaugggauuuggca

SEQ ID NO: 1002828 - RNA, 23 nt, Human
aaccaggaugggauuuggcaguu

SEQ ID NO: 1002829 - RNA, 21 nt, Human
accacuaaauugccuccgauu

SEQ ID NO: 1002830 - RNA, 20 nt, Human
agaaaaaaaccaggauggga

SEQ ID NO: 1002831 - RNA, 24 nt, Human
aggcuggagcugacacuggaucca

SEQ ID NO: 1002832 - RNA, 22 nt, Human
cacacagggcuaggauggucaa

SEQ ID NO: 1002833 - RNA, 31 nt, Human
cuguuuugcagaaaaaaaccaggaugggauu

SEQ ID NO: 1002834 - RNA, 20 nt, Human
gauucugcuggguccaggua

SEQ ID NO: 1002835 - RNA, 23 nt, Human
ggaugggauuuggcaguuggcca

SEQ ID NO: 1002836 - RNA, 20 nt, Human
guggauaaucaccaagcugc

SEQ ID NO: 1002837 - RNA, 20 nt, Human
guggggucacaugccccuuc

SEQ ID NO: 1002838 - RNA, 22 nt, Human
uccuuaaccacuaaauugccuc

SEQ ID NO: 1002839 - RNA, 23 nt, Human
uccuucuucuuuugcauuucucu

SEQ ID NO: 1002840 - RNA, 18 nt, Human
ugcagaaaaaaaccagga

SEQ ID NO: 1002841 - RNA, 21 nt, Human
uggaaaauuuccuucuucuuu

SEQ ID NO: 1002842 - RNA, 22 nt, Human
uggcugcugcaauggggugggg

SEQ ID NO: 1002843 - RNA, 18 nt, Human
ugucacagcauuggcugu

SEQ ID NO: 1002844 - RNA, 18 nt, Human
uugccuccgauuuucagc

SEQ ID NO: 1002845 - RNA, 25 nt, Human
uuuccuucuucuuuugcauuucucu

SEQ ID NO: 1002846 - RNA, 25 nt, Human
uuuucagccuggggauggauggagc

SEQ ID NO: 1002847 - RNA, 20 nt, Human
aaagauaugacucuucugac

SEQ ID NO: 1002848 - RNA, 21 nt, Human
aggugauguaacucucuugcc

SEQ ID NO: 1002849 - RNA, 18 nt, Human
auuccugucuuuaacccc

SEQ ID NO: 1002850 - RNA, 23 nt, Human
caaccuguaaaagauaugacucu

SEQ ID NO: 1002851 - RNA, 19 nt, Human
caucauagugauauaucac

SEQ ID NO: 1002852 - RNA, 19 nt, Human
cauucucacagacaucaua

SEQ ID NO: 1002853 - RNA, 20 nt, Human
cccauucucacagacaucau

SEQ ID NO: 1002854 - RNA, 18 nt, Human
cccccaaguuaugcaacu

SEQ ID NO: 1002855 - RNA, 22 nt, Human
cccccaaguuaugcaacuuuuc

SEQ ID NO: 1002856 - RNA, 19 nt, Human
ccugucuuuaacccccaag

SEQ ID NO: 1002857 - RNA, 21 nt, Human
cuaggugaugugacuuucuuc

SEQ ID NO: 1002858 - RNA, 24 nt, Human
cugcccauucucacagacaucaua

SEQ ID NO: 1002859 - RNA, 20 nt, Human
gaacucagaaccagaugaug

SEQ ID NO: 1002860 - RNA, 23 nt, Human
uaacccccaaguuaugcaacuuu

SEQ ID NO: 1002861 - RNA, 21 nt, Human
uaugagucucuucuucugucu

SEQ ID NO: 1002862 - RNA, 18 nt, Human
ucucagaacucagaacca

SEQ ID NO: 1002863 - RNA, 18 nt, Human
ucuugccugaguuguuuu

SEQ ID NO: 1002864 - RNA, 20 nt, Human
ugaaaacaagagaugugugg

SEQ ID NO: 1002865 - RNA, 20 nt, Human
ugacauaaggguggaacggg

SEQ ID NO: 1002866 - RNA, 18 nt, Human
uggaacgggcuccuaggu

SEQ ID NO: 1002867 - RNA, 21 nt, Human
uggcaauucauccucguuucu

SEQ ID NO: 1002868 - RNA, 20 nt, Human
uguacacaugaagcacugug

SEQ ID NO: 1002869 - RNA, 24 nt, Human
ugugacauauucuggguuugucau

SEQ ID NO: 1002870 - RNA, 20 nt, Human
uuagcaaacagaggaaauug

SEQ ID NO: 1002871 - RNA, 22 nt, Human
uuaggugauaugagucucuucu

SEQ ID NO: 1002872 - RNA, 26 nt, Human
uucuuaguccuguacacaugaagcac

SEQ ID NO: 1002873 - RNA, 22 nt, Human
uuggcugacaguaaggacuuuc

SEQ ID NO: 1002874 - RNA, 27 nt, Human
uugugccauauuccugucuuuaacccc

SEQ ID NO: 1002875 - RNA, 20 nt, Human
uuguuuucuaaggggacuug

SEQ ID NO: 1002876 - RNA, 19 nt, Human
uuucugguccuuucaacag

SEQ ID NO: 1002877 - RNA, 18 nt, Human
acaggggugaggauacaa

SEQ ID NO: 1002878 - RNA, 24 nt, Human
auaaggucagacaggggugaggau

SEQ ID NO: 1002879 - RNA, 23 nt, Human
auggggugaggauacaaucugcu

SEQ ID NO: 1002880 - RNA, 19 nt, Human
cccacaacuucaacuuuua

SEQ ID NO: 1002881 - RNA, 22 nt, Human
cuacgauggugguaauccccuu

SEQ ID NO: 1002882 - RNA, 20 nt, Human
cuauagcugcugcugcuguu

SEQ ID NO: 1002883 - RNA, 21 nt, Human
cuucuugggauuuuauccugg

SEQ ID NO: 1002884 - RNA, 19 nt, Human
cuugguggugagucucccu

SEQ ID NO: 1002885 - RNA, 24 nt, Human
gacaggggugaggauacaaucugg

SEQ ID NO: 1002886 - RNA, 20 nt, Human
gaugcacuucuccaucuucu

SEQ ID NO: 1002887 - RNA, 19 nt, Human
gcacaugcuucacaucaug

SEQ ID NO: 1002888 - RNA, 19 nt, Human
ggaauuggaugagauccca

SEQ ID NO: 1002889 - RNA, 23 nt, Human
ggaugagaucccacaacuucaac

SEQ ID NO: 1002890 - RNA, 22 nt, Human
ggggugaggauacaaucuggug

SEQ ID NO: 1002891 - RNA, 18 nt, Human
ucaacuuuuauuuugguu

SEQ ID NO: 1002892 - RNA, 18 nt, Human
ucaacuuuuauuuugguu

SEQ ID NO: 1002893 - RNA, 19 nt, Human
ucaacuuuuauuuugguug

SEQ ID NO: 1002894 - RNA, 19 nt, Human
uccaucuucuugggauuuu

SEQ ID NO: 1002895 - RNA, 23 nt, Human
ugcugcugcuguuguagcuuugg

SEQ ID NO: 1002896 - RNA, 21 nt, Human
uggcucugcuugggcucuggg

SEQ ID NO: 1002897 - RNA, 22 nt, Human
uggcucugcuugggcucugggg

SEQ ID NO: 1002898 - RNA, 20 nt, Human
uucaacuuuuauuuugguug

SEQ ID NO: 1002899 - RNA, 21 nt, Human
uuggcucugcuugggcucugg

SEQ ID NO: 1002900 - RNA, 22 nt, Human
aaguauuccuucagccucagcc

SEQ ID NO: 1002901 - RNA, 25 nt, Human
aaguauuccuucagccucagccucc

SEQ ID NO: 1002902 - RNA, 18 nt, Human
aggcuagucuugaauucc

SEQ ID NO: 1002903 - RNA, 22 nt, Human
caagcugggauucgaagacugg

SEQ ID NO: 1002904 - RNA, 22 nt, Human
caccaagcugggauucgaagac

SEQ ID NO: 1002905 - RNA, 19 nt, Human
caccccuuauccgucacag

SEQ ID NO: 1002906 - RNA, 21 nt, Human
caugcaugccaccaagcuggg

SEQ ID NO: 1002907 - RNA, 24 nt, Human
caugccaccaagcugggauucgaa

SEQ ID NO: 1002908 - RNA, 26 nt, Human
cccacaccccuuauccgucacagcca

SEQ ID NO: 1002909 - RNA, 22 nt, Human
ccccgcaccccacaccccuuau

SEQ ID NO: 1002910 - RNA, 21 nt, Human
cccuuauccgucacagccauu

SEQ ID NO: 1002911 - RNA, 19 nt, Human
ccggcggcucagcggcggg

SEQ ID NO: 1002912 - RNA, 19 nt, Human
ccugggcucaaguauuccu

SEQ ID NO: 1002913 - RNA, 20 nt, Human
cggcucagcggcggggcgcg

SEQ ID NO: 1002914 - RNA, 19 nt, Human
cucaaguauuccuucagcc

SEQ ID NO: 1002915 - RNA, 20 nt, Human
cuugaauuccugggcucaag

SEQ ID NO: 1002916 - RNA, 18 nt, Human
gucagggucucaguaugu

SEQ ID NO: 1002917 - RNA, 23 nt, Human
guggcggcguuuccccggcggcg

SEQ ID NO: 1002918 - RNA, 24 nt, Human
uauguugugcaggcuagucuugaa

SEQ ID NO: 1002919 - RNA, 21 nt, Human
uccccgcaccccacaccccuu

SEQ ID NO: 1002920 - RNA, 18 nt, Human
uccugggcucaaguauuc

SEQ ID NO: 1002921 - RNA, 20 nt, Human
uccugggcucaaguauuccu

SEQ ID NO: 1002922 - RNA, 24 nt, Human
ugggacuaaacaugcaugccacca

SEQ ID NO: 1002923 - RNA, 25 nt, Human
uguagcugggacuaaaccggggucc

SEQ ID NO: 1002924 - RNA, 23 nt, Human
uuccugggcucaaguauuccuuc

SEQ ID NO: 1002925 - RNA, 18 nt, Human
aaaacccucaaaccagga

SEQ ID NO: 1002926 - RNA, 25 nt, Human
aaagcaggaaccaagacaaaggcaa

SEQ ID NO: 1002927 - RNA, 23 nt, Human
aaaggcaaguccaaauugaaaca

SEQ ID NO: 1002928 - RNA, 23 nt, Human
aaaggcagguccaaagucaagca

SEQ ID NO: 1002929 - RNA, 19 nt, Human
aacugcugggaacacagga

SEQ ID NO: 1002930 - RNA, 19 nt, Human
aacugucccauggauccca

SEQ ID NO: 1002931 - RNA, 18 nt, Human
aagcagcugcucagcugg

SEQ ID NO: 1002932 - RNA, 21 nt, Human
acaaacacacaaagccacaca

SEQ ID NO: 1002933 - RNA, 23 nt, Human
acacaaauguggaggccacaacc

SEQ ID NO: 1002934 - RNA, 21 nt, Human
acacacacacagacacauaca

SEQ ID NO: 1002935 - RNA, 19 nt, Human
acacacacagacacauaca

SEQ ID NO: 1002936 - RNA, 19 nt, Human
acacauacacaaacacaca

SEQ ID NO: 1002937 - RNA, 22 nt, Human
acacucccacaguaacacacag

SEQ ID NO: 1002938 - RNA, 19 nt, Human
acagacacauacacaaaca

SEQ ID NO: 1002939 - RNA, 19 nt, Human
accaaugaggacaauggaa

SEQ ID NO: 1002940 - RNA, 19 nt, Human
accucacugucucccuuca

SEQ ID NO: 1002941 - RNA, 19 nt, Human
acucugugucccagaauga

SEQ ID NO: 1002942 - RNA, 19 nt, Human
acugcugggaacacaggaa

SEQ ID NO: 1002943 - RNA, 19 nt, Human
agaagacaggugacagugc

SEQ ID NO: 1002944 - RNA, 24 nt, Human
agacaaaggcaaguccaaauugaa

SEQ ID NO: 1002945 - RNA, 24 nt, Human
agacacauacacaaacacacaaag

SEQ ID NO: 1002946 - RNA, 25 nt, Human
agacacauacacaaacacacaaagc

SEQ ID NO: 1002947 - RNA, 22 nt, Human
agacugaaaucccaagacaaug

SEQ ID NO: 1002948 - RNA, 24 nt, Human
agaggucuccuucucuaccaagcc

SEQ ID NO: 1002949 - RNA, 22 nt, Human
aggaaaaugguacaggcagagc

SEQ ID NO: 1002950 - RNA, 22 nt, Human
aggaaccaagacaaaggcaagu

SEQ ID NO: 1002951 - RNA, 22 nt, Human
aggcaggaaccacgacaaaggc

SEQ ID NO: 1002952 - RNA, 23 nt, Human
aggccacaacccacccagcauca

SEQ ID NO: 1002953 - RNA, 22 nt, Human
aggggcagacgauggggaaccc

SEQ ID NO: 1002954 - RNA, 24 nt, Human
agggguuuugugaaagaaucaugc

SEQ ID NO: 1002955 - RNA, 24 nt, Human
agggugucagggcugucagccugc

SEQ ID NO: 1002956 - RNA, 21 nt, Human
agguauuaaaacccucaaacc

SEQ ID NO: 1002957 - RNA, 22 nt, Human
aggugcuaucugggaaaagcag

SEQ ID NO: 1002958 - RNA, 19 nt, Human
auaaaacauucuccaggaa

SEQ ID NO: 1002959 - RNA, 18 nt, Human
augauagugucucuccuu

SEQ ID NO: 1002960 - RNA, 22 nt, Human
augcuagcuggagcccauagcu

SEQ ID NO: 1002961 - RNA, 18 nt, Human
auguccacuaaugcuguu

SEQ ID NO: 1002962 - RNA, 18 nt, Human
caaaagauggccuggcac

SEQ ID NO: 1002963 - RNA, 18 nt, Human
caaacacacaaagccaca

SEQ ID NO: 1002964 - RNA, 21 nt, Human
caaacacacaaagccacacac

SEQ ID NO: 1002965 - RNA, 20 nt, Human
caaauguggaggccacaacc

SEQ ID NO: 1002966 - RNA, 22 nt, Human
caacacucccacaguaacacac

SEQ ID NO: 1002967 - RNA, 18 nt, Human
caaguccaaauugaaaca

SEQ ID NO: 1002968 - RNA, 19 nt, Human
caccagguuguauacucac

SEQ ID NO: 1002969 - RNA, 20 nt, Human
cacuccaaauuuuuccugca

SEQ ID NO: 1002970 - RNA, 23 nt, Human
cagccugccuaagcagaggaaaa

SEQ ID NO: 1002971 - RNA, 22 nt, Human
caggaaccaagacaaaggcaag

SEQ ID NO: 1002972 - RNA, 23 nt, Human
caugaaaucucaagaugauggag

SEQ ID NO: 1002973 - RNA, 21 nt, Human
cauucugcagaaagccccacc

SEQ ID NO: 1002974 - RNA, 30 nt, Human
cauuuacauacacacacacagacacauaca

SEQ ID NO: 1002975 - RNA, 23 nt, Human
ccaacacucgcaacacucccaca

SEQ ID NO: 1002976 - RNA, 23 nt, Human
ccacggaguucuuauccacaaag

SEQ ID NO: 1002977 - RNA, 23 nt, Human
ccagcaucaaucuauuccacuuc

SEQ ID NO: 1002978 - RNA, 22 nt, Human
cccacaguaacacacagcccag

SEQ ID NO: 1002979 - RNA, 24 nt, Human
cccacccagcaucaaucuauucca

SEQ ID NO: 1002980 - RNA, 18 nt, Human
cccaguagcuucugaggc

SEQ ID NO: 1002981 - RNA, 18 nt, Human
ccccauccacccuucacc

SEQ ID NO: 1002982 - RNA, 21 nt, Human
ccuaggaucauggaacugucc

SEQ ID NO: 1002983 - RNA, 22 nt, Human
ccucacaacgugaagcagcugc

SEQ ID NO: 1002984 - RNA, 21 nt, Human
ccuggcacuugaccucucugc

SEQ ID NO: 1002985 - RNA, 18 nt, Human
ccuggguuggguaggugc

SEQ ID NO: 1002986 - RNA, 21 nt, Human
cuccauggucagaucacaugg

SEQ ID NO: 1002987 - RNA, 22 nt, Human
cucgcaacacucccacaguaac

SEQ ID NO: 1002988 - RNA, 31 nt, Human
cucgcaacacucccacaguaacacacagccu

SEQ ID NO: 1002989 - RNA, 22 nt, Human
cuggagcaccagggugucaggg

SEQ ID NO: 1002990 - RNA, 18 nt, Human
cugucccauggaucccac

SEQ ID NO: 1002991 - RNA, 22 nt, Human
cuugaccucacugucucccuuc

SEQ ID NO: 1002992 - RNA, 21 nt, Human
gaaaucccaagacaauggaga

SEQ ID NO: 1002993 - RNA, 21 nt, Human
gaagacguugagccagaccaa

SEQ ID NO: 1002994 - RNA, 19 nt, Human
gaagauguugagccagauc

SEQ ID NO: 1002995 - RNA, 22 nt, Human
gacaauggaagucaguaaaaga

SEQ ID NO: 1002996 - RNA, 19 nt, Human
gacugaaaucccaagacaa

SEQ ID NO: 1002997 - RNA, 20 nt, Human
gagaagacaggugacagugc

SEQ ID NO: 1002998 - RNA, 21 nt, Human
gauguugaaaaauguucacag

SEQ ID NO: 1002999 - RNA, 20 nt, Human
gcagagcuggcuugguauca

SEQ ID NO: 1003000 - RNA, 18 nt, Human
gccacaacccacccagca

SEQ ID NO: 1003001 - RNA, 20 nt, Human
gcucuccucuucuuuguaga

SEQ ID NO: 1003002 - RNA, 18 nt, Human
ggauaaaggcugccugug

SEQ ID NO: 1003003 - RNA, 18 nt, Human
gguacaggcagagcuggc

SEQ ID NO: 1003004 - RNA, 22 nt, Human
guucuuggguguggugcucucc

SEQ ID NO: 1003005 - RNA, 19 nt, Human
uaaaacccucaaaccagga

SEQ ID NO: 1003006 - RNA, 19 nt, Human
uaaaagaggacacaaaugu

SEQ ID NO: 1003007 - RNA, 23 nt, Human
uacagguauuaaaacccucaaac

SEQ ID NO: 1003008 - RNA, 26 nt, Human
uacauacacacacacagacacauaca

SEQ ID NO: 1003009 - RNA, 22 nt, Human
uacccuaaaagucucaaacuua

SEQ ID NO: 1003010 - RNA, 24 nt, Human
uaucccagacugaaaucccaagac

SEQ ID NO: 1003011 - RNA, 21 nt, Human
ucaaaccaggaguuuuccaga

SEQ ID NO: 1003012 - RNA, 22 nt, Human
ucacagaaggugucugcggaaa

SEQ ID NO: 1003013 - RNA, 19 nt, Human
ucagugaaagauggcuggg

SEQ ID NO: 1003014 - RNA, 23 nt, Human
uccauggucagaucacaugggag

SEQ ID NO: 1003015 - RNA, 18 nt, Human
ucccacagagaagacagg

SEQ ID NO: 1003016 - RNA, 19 nt, Human
ucccaugaggaucauuuuc

SEQ ID NO: 1003017 - RNA, 22 nt, Human
ucucacaggugcagaugugguu

SEQ ID NO: 1003018 - RNA, 21 nt, Human
ucugugucccagaaugaaauc

SEQ ID NO: 1003019 - RNA, 23 nt, Human
ucuguucuuggguguggugcucu

SEQ ID NO: 1003020 - RNA, 24 nt, Human
ugaaagaaucaugccccaugagga

SEQ ID NO: 1003021 - RNA, 19 nt, Human
ugaaagauggcugggcucu

SEQ ID NO: 1003022 - RNA, 26 nt, Human
ugacauccaacacucgcaacacuccc

SEQ ID NO: 1003023 - RNA, 24 nt, Human
ugacugauuuugcaauuaugggaa

SEQ ID NO: 1003024 - RNA, 25 nt, Human
ugagaaaggcaggaaccacgacaaa

SEQ ID NO: 1003025 - RNA, 22 nt, Human
ugagauguugagcagucuuugg

SEQ ID NO: 1003026 - RNA, 22 nt, Human
ugagauguugagcagucuuugg

SEQ ID NO: 1003027 - RNA, 21 nt, Human
ugcagauccuuuuggaucugu

SEQ ID NO: 1003028 - RNA, 19 nt, Human
ugccugugauaacgcauug

SEQ ID NO: 1003029 - RNA, 22 nt, Human
uggaagauguugagccagaucc

SEQ ID NO: 1003030 - RNA, 22 nt, Human
uggaagucaguaaaagaggaca

SEQ ID NO: 1003031 - RNA, 21 nt, Human
uggagcaccagggugucaggg

SEQ ID NO: 1003032 - RNA, 19 nt, Human
uggcaggggaucuaugaga

SEQ ID NO: 1003033 - RNA, 20 nt, Human
uggcucacaucuacccucuc

SEQ ID NO: 1003034 - RNA, 21 nt, Human
uggcucacaucuacccucucc

SEQ ID NO: 1003035 - RNA, 18 nt, Human
uggcugggcucuugaccu

SEQ ID NO: 1003036 - RNA, 21 nt, Human
uggcuugguaucaggauaaag

SEQ ID NO: 1003037 - RNA, 21 nt, Human
ugggagagagaaacugcuggg

SEQ ID NO: 1003038 - RNA, 20 nt, Human
ugggagaugucuguucuugg

SEQ ID NO: 1003039 - RNA, 23 nt, Human
ugggugucagugaaagauggcug

SEQ ID NO: 1003040 - RNA, 22 nt, Human
ugguacaggcagagcuggcuug

SEQ ID NO: 1003041 - RNA, 18 nt, Human
ugguaucaggauaaaggc

SEQ ID NO: 1003042 - RNA, 24 nt, Human
uggugagauguugagcagucuuug

SEQ ID NO: 1003043 - RNA, 19 nt, Human
ugugaaagaaucaugcccc

SEQ ID NO: 1003044 - RNA, 23 nt, Human
ugugaacagggaagaguuuagug

SEQ ID NO: 1003045 - RNA, 26 nt, Human
ugugaacagggaagaguuuaguguga

SEQ ID NO: 1003046 - RNA, 19 nt, Human
uucacccuuuuugcuggug

SEQ ID NO: 1003047 - RNA, 26 nt, Human
uucaggacaauaaaacauucuccagg

SEQ ID NO: 1003048 - RNA, 23 nt, Human
uucuuuguagaagaguaccugac

SEQ ID NO: 1003049 - RNA, 21 nt, Human
uugcaagucugacaaucaugu

SEQ ID NO: 1003050 - RNA, 24 nt, Human
uuggccacaauuugcacuccaaau

SEQ ID NO: 1003051 - RNA, 25 nt, Human
uuuggaucuguagugauuuugugcu

SEQ ID NO: 1003052 - RNA, 18 nt, Human
uuuuaugauggucuucug

SEQ ID NO: 1003053 - RNA, 18 nt, Human
uuuuuuggcaggggcagc

SEQ ID NO: 1003054 - RNA, 23 nt, Human
acuucauauucaguuccuagcug

SEQ ID NO: 1003055 - RNA, 27 nt, Human
caucccauggagaaacacuagcagucc

SEQ ID NO: 1003056 - RNA, 24 nt, Human
cccauggagaaacacuagcagucc

SEQ ID NO: 1003057 - RNA, 20 nt, Human
ccccuugaauuuacuucaua

SEQ ID NO: 1003058 - RNA, 22 nt, Human
ccuacaacaucuaggcaggccu

SEQ ID NO: 1003059 - RNA, 20 nt, Human
cuccaguguacaucccaugg

SEQ ID NO: 1003060 - RNA, 24 nt, Human
uacuucauauucaguuccuagcug

SEQ ID NO: 1003061 - RNA, 18 nt, Human
ucccauggagaaacacua

SEQ ID NO: 1003062 - RNA, 24 nt, Human
ucuccaguguacaucccauggaga

SEQ ID NO: 1003063 - RNA, 26 nt, Human
ugcuuuauucuccaguguacauccca

SEQ ID NO: 1003064 - RNA, 22 nt, Human
uucuccaguguacaucccaugg

SEQ ID NO: 1003065 - RNA, 23 nt, Human
uuuuuuuuuuuuuuuuuuaacag

SEQ ID NO: 1003066 - RNA, 18 nt, Human
aaucauggcacuguccug

SEQ ID NO: 1003067 - RNA, 24 nt, Human
acacacacucacacacacacacag

SEQ ID NO: 1003068 - RNA, 23 nt, Human
acacccucuuugccagaaugaaa

SEQ ID NO: 1003069 - RNA, 19 nt, Human
acagaaacaagcagccugg

SEQ ID NO: 1003070 - RNA, 23 nt, Human
acucacacacacacacacacaca

SEQ ID NO: 1003071 - RNA, 20 nt, Human
aggcaaacacacacacacuc

SEQ ID NO: 1003072 - RNA, 19 nt, Human
cacacaauggcacacacac

SEQ ID NO: 1003073 - RNA, 24 nt, Human
cacacacacacacacacaccccua

SEQ ID NO: 1003074 - RNA, 22 nt, Human
cacacacacacucacacacaca

SEQ ID NO: 1003075 - RNA, 24 nt, Human
cacacacacacucacacacacaca

SEQ ID NO: 1003076 - RNA, 24 nt, Human
cacacacaccccuaagcacacaau

SEQ ID NO: 1003077 - RNA, 25 nt, Human
cacacacacucacacacacacacac

SEQ ID NO: 1003078 - RNA, 22 nt, Human
caccugcucggcuggggaugga

SEQ ID NO: 1003079 - RNA, 27 nt, Human
cacucacacacacacacacacacaccc

SEQ ID NO: 1003080 - RNA, 22 nt, Human
cagaaugaaauuccaagaaaau

SEQ ID NO: 1003081 - RNA, 22 nt, Human
ccaacacucacaacauuuucac

SEQ ID NO: 1003082 - RNA, 19 nt, Human
cccaccuuauugcugcuca

SEQ ID NO: 1003083 - RNA, 31 nt, Human
cucacaacauuuucacagaaacaagcagccu

SEQ ID NO: 1003084 - RNA, 20 nt, Human
cucacacacacacacacaca

SEQ ID NO: 1003085 - RNA, 21 nt, Human
cucacacacacacacacacac

SEQ ID NO: 1003086 - RNA, 21 nt, Human
cuccugaguuugguugguucu

SEQ ID NO: 1003087 - RNA, 21 nt, Human
cuuugccagaaugaaauucca

SEQ ID NO: 1003088 - RNA, 23 nt, Human
gaagacccaccuuauugcugcuc

SEQ ID NO: 1003089 - RNA, 22 nt, Human
gcagacauccaacacucacaac

SEQ ID NO: 1003090 - RNA, 18 nt, Human
uaaaggcaaacacacaca

SEQ ID NO: 1003091 - RNA, 21 nt, Human
uaagcaccugcucggcugggg

SEQ ID NO: 1003092 - RNA, 23 nt, Human
uaagcagacuccaguuaaaggca

SEQ ID NO: 1003093 - RNA, 21 nt, Human
ucacacacacacacacacaca

SEQ ID NO: 1003094 - RNA, 20 nt, Human
uggcacacacacaugcagac

SEQ ID NO: 1003095 - RNA, 22 nt, Human
uggcacacacacaugcagacau

SEQ ID NO: 1003096 - RNA, 26 nt, Human
aaaaacuaacgaaauacuugaagccc

SEQ ID NO: 1003097 - RNA, 20 nt, Human
aaaaagccuagcuacuucca

SEQ ID NO: 1003098 - RNA, 21 nt, Human
aaauaaaaaugagaucaauug

SEQ ID NO: 1003099 - RNA, 25 nt, Human
aagugacuacaaagugagacagucu

SEQ ID NO: 1003100 - RNA, 24 nt, Human
aauaagaaggcuuuuuuaaaagaa

SEQ ID NO: 1003101 - RNA, 21 nt, Human
aauauucuuuuaucuccacuc

SEQ ID NO: 1003102 - RNA, 19 nt, Human
acacuggauuacccaccgg

SEQ ID NO: 1003103 - RNA, 18 nt, Human
acaguaccuuggacuggg

SEQ ID NO: 1003104 - RNA, 21 nt, Human
acauuaggaaaaaccaguaca

SEQ ID NO: 1003105 - RNA, 21 nt, Human
accuccucccaaaguccccac

SEQ ID NO: 1003106 - RNA, 22 nt, Human
accuugaaguucaaucugucuc

SEQ ID NO: 1003107 - RNA, 23 nt, Human
acuggauuacccaccgguuucua

SEQ ID NO: 1003108 - RNA, 20 nt, Human
agaaggcuuuuuuaaaagaa

SEQ ID NO: 1003109 - RNA, 24 nt, Human
agccagaacaccaguuucuggacc

SEQ ID NO: 1003110 - RNA, 19 nt, Human
aggcacuaauagguccaau

SEQ ID NO: 1003111 - RNA, 18 nt, Human
agggaccagagcagggcu

SEQ ID NO: 1003112 - RNA, 25 nt, Human
agguagaaaacagaaauaugcuggg

SEQ ID NO: 1003113 - RNA, 18 nt, Human
agugugauuagagcuggg

SEQ ID NO: 1003114 - RNA, 18 nt, Human
auaagaaggcuuuuuuaa

SEQ ID NO: 1003115 - RNA, 23 nt, Human
auguuccugaugcuauaacacag

SEQ ID NO: 1003116 - RNA, 21 nt, Human
auuccaacauauaaauucugg

SEQ ID NO: 1003117 - RNA, 19 nt, Human
cacaguaccuuggacuggg

SEQ ID NO: 1003118 - RNA, 21 nt, Human
caccuuguugcuguguucucc

SEQ ID NO: 1003119 - RNA, 25 nt, Human
cacuaaaaaugagguuuucuggaua

SEQ ID NO: 1003120 - RNA, 21 nt, Human
cacucuuucacuaaaaaugag

SEQ ID NO: 1003121 - RNA, 18 nt, Human
cacuggauuacccaccgg

SEQ ID NO: 1003122 - RNA, 20 nt, Human
cauuaaguaugaggaccaaa

SEQ ID NO: 1003123 - RNA, 23 nt, Human
cauugaguucuuuuauaaggucu

SEQ ID NO: 1003124 - RNA, 23 nt, Human
ccaaauacauuaggaaaaaccag

SEQ ID NO: 1003125 - RNA, 21 nt, Human
ccaacauauaaauucuggagc

SEQ ID NO: 1003126 - RNA, 21 nt, Human
ccacaaaaucuaggacacucu

SEQ ID NO: 1003127 - RNA, 21 nt, Human
ccagagaggacaaauacagug

SEQ ID NO: 1003128 - RNA, 22 nt, Human
cuggauuacccaccgguuucua

SEQ ID NO: 1003129 - RNA, 19 nt, Human
cuuguccgcaucugaaaau

SEQ ID NO: 1003130 - RNA, 19 nt, Human
gaaaaaacacagcuuaccc

SEQ ID NO: 1003131 - RNA, 20 nt, Human
gacagucuaaggcagggcca

SEQ ID NO: 1003132 - RNA, 19 nt, Human
gauuacccaccgguuucua

SEQ ID NO: 1003133 - RNA, 21 nt, Human
gccuagcuacuuccauugagu

SEQ ID NO: 1003134 - RNA, 22 nt, Human
ggaaaaaccaguacacuggagg

SEQ ID NO: 1003135 - RNA, 18 nt, Human
ggccacagccagaacacc

SEQ ID NO: 1003136 - RNA, 18 nt, Human
ggcuuguuguccucuucu

SEQ ID NO: 1003137 - RNA, 24 nt, Human
guagaaaaauaagaaggcuuuuuu

SEQ ID NO: 1003138 - RNA, 24 nt, Human
guguucuccagagaggacaaauac

SEQ ID NO: 1003139 - RNA, 20 nt, Human
uaaauuauccauagugauuc

SEQ ID NO: 1003140 - RNA, 22 nt, Human
uaaauuauccauagugauucug

SEQ ID NO: 1003141 - RNA, 20 nt, Human
uaaccuccucccaaaguccc

SEQ ID NO: 1003142 - RNA, 26 nt, Human
uaaggcagggccacagccagaacacc

SEQ ID NO: 1003143 - RNA, 24 nt, Human
uacccaccgguuucuauucagagu

SEQ ID NO: 1003144 - RNA, 18 nt, Human
uagaaaacagaaauaugc

SEQ ID NO: 1003145 - RNA, 23 nt, Human
uagguuauacuuaucuaaaaauu

SEQ ID NO: 1003146 - RNA, 20 nt, Human
uauaacacaguaccuuggac

SEQ ID NO: 1003147 - RNA, 21 nt, Human
uaugcugggaaaaacgacguc

SEQ ID NO: 1003148 - RNA, 24 nt, Human
uauucuuuuaucuccacucuuuca

SEQ ID NO: 1003149 - RNA, 23 nt, Human
ucaaucugucucugggaaagacu

SEQ ID NO: 1003150 - RNA, 19 nt, Human
ucacagcccaacucuucgg

SEQ ID NO: 1003151 - RNA, 24 nt, Human
ucuaucacacaggggcauuuaaau

SEQ ID NO: 1003152 - RNA, 21 nt, Human
ucucuaauugcacucuuaacu

SEQ ID NO: 1003153 - RNA, 21 nt, Human
ucugaaaauucacuuuuaccu

SEQ ID NO: 1003154 - RNA, 23 nt, Human
ucuggugaaggugggucucuucu

SEQ ID NO: 1003155 - RNA, 18 nt, Human
ucugucucugggaaagac

SEQ ID NO: 1003156 - RNA, 21 nt, Human
ucuuacaguuuuagacacugg

SEQ ID NO: 1003157 - RNA, 19 nt, Human
ugacuacaaagugagacag

SEQ ID NO: 1003158 - RNA, 18 nt, Human
ugacucgauuauucucgg

SEQ ID NO: 1003159 - RNA, 20 nt, Human
ugagguuuucuggauauuua

SEQ ID NO: 1003160 - RNA, 19 nt, Human
ugccacaaaaucuaggaca

SEQ ID NO: 1003161 - RNA, 24 nt, Human
uggaaagaaauaaauuucuuacag

SEQ ID NO: 1003162 - RNA, 21 nt, Human
uggauuacccaccgguuucua

SEQ ID NO: 1003163 - RNA, 20 nt, Human
ugggaaagacugaugaguuu

SEQ ID NO: 1003164 - RNA, 19 nt, Human
ugggaaguccaagaucaag

SEQ ID NO: 1003165 - RNA, 24 nt, Human
ugggaaguccaagaucaaggcacu

SEQ ID NO: 1003166 - RNA, 25 nt, Human
uggguaacuuaugaaacuggaaaga

SEQ ID NO: 1003167 - RNA, 22 nt, Human
uguaaaggaggagcccuguuuu

SEQ ID NO: 1003168 - RNA, 20 nt, Human
uguaagccuagauuugagga

SEQ ID NO: 1003169 - RNA, 21 nt, Human
uuauaaggucucuaauugcac

SEQ ID NO: 1003170 - RNA, 22 nt, Human
uuccugcauaaagugacuacaa

SEQ ID NO: 1003171 - RNA, 19 nt, Human
uuuagguagaaaacagaaa

SEQ ID NO: 1003172 - RNA, 19 nt, Human
uuuggagggaccagagcag

SEQ ID NO: 1003173 - RNA, 19 nt, Human
aauggcagagguaggagga

SEQ ID NO: 1003174 - RNA, 21 nt, Human
acacccagacacccacccagu

SEQ ID NO: 1003175 - RNA, 23 nt, Human
accucaugacauuuuuaaggcug

SEQ ID NO: 1003176 - RNA, 19 nt, Human
accugcaccuguuuccccu

SEQ ID NO: 1003177 - RNA, 18 nt, Human
agaaauagaagagcggcc

SEQ ID NO: 1003178 - RNA, 19 nt, Human
agacacccacccaguuucc

SEQ ID NO: 1003179 - RNA, 23 nt, Human
agagguggggcccacacucccac

SEQ ID NO: 1003180 - RNA, 18 nt, Human
agcacuuauaaaaauaag

SEQ ID NO: 1003181 - RNA, 19 nt, Human
aggaggaaaagaguggcug

SEQ ID NO: 1003182 - RNA, 18 nt, Human
auccggagggaaauaaaa

SEQ ID NO: 1003183 - RNA, 24 nt, Human
augaauggcagagguaggaggaaa

SEQ ID NO: 1003184 - RNA, 22 nt, Human
augaugggggaaagaaugcaac

SEQ ID NO: 1003185 - RNA, 22 nt, Human
auuauguuggguaaaacgcauc

SEQ ID NO: 1003186 - RNA, 20 nt, Human
auucagggaagaagcaacag

SEQ ID NO: 1003187 - RNA, 21 nt, Human
caaagucuuuuucaugauggg

SEQ ID NO: 1003188 - RNA, 25 nt, Human
caaugugugccggagaccuugaucc

SEQ ID NO: 1003189 - RNA, 20 nt, Human
cagaaccugcagggcuuugg

SEQ ID NO: 1003190 - RNA, 22 nt, Human
caugacauuuuuaaggcugacc

SEQ ID NO: 1003191 - RNA, 18 nt, Human
cauggaccugaaaugaca

SEQ ID NO: 1003192 - RNA, 22 nt, Human
ccacaggugugccucaaacgca

SEQ ID NO: 1003193 - RNA, 19 nt, Human
ccacccaguuucccuggua

SEQ ID NO: 1003194 - RNA, 18 nt, Human
ccagagguggggcccaca

SEQ ID NO: 1003195 - RNA, 23 nt, Human
ccaggaugccucaccuggaagcc

SEQ ID NO: 1003196 - RNA, 24 nt, Human
cgugugcacguuccagccugcaug

SEQ ID NO: 1003197 - RNA, 22 nt, Human
cuccuuaacccggagggacucc

SEQ ID NO: 1003198 - RNA, 20 nt, Human
gagaugucauggaccugaaa

SEQ ID NO: 1003199 - RNA, 22 nt, Human
gcauccagcacuuauaaaaaua

SEQ ID NO: 1003200 - RNA, 22 nt, Human
gccagagguggggcccacacuc

SEQ ID NO: 1003201 - RNA, 18 nt, Human
gccccgcacauccucucc

SEQ ID NO: 1003202 - RNA, 25 nt, Human
gcgaacuaccuaaaggagaugucau

SEQ ID NO: 1003203 - RNA, 21 nt, Human
gcgugugcacguuccagccug

SEQ ID NO: 1003204 - RNA, 24 nt, Human
ggaagaagcaacagaaccugcagg

SEQ ID NO: 1003205 - RNA, 21 nt, Human
ggaagcccagcaccagcugag

SEQ ID NO: 1003206 - RNA, 20 nt, Human
ggcugggcgaacuaccuaaa

SEQ ID NO: 1003207 - RNA, 20 nt, Human
ggucggggaaggcaggcauu

SEQ ID NO: 1003208 - RNA, 18 nt, Human
gguguagacacccagaca

SEQ ID NO: 1003209 - RNA, 27 nt, Human
guaaaacgcauccagcacuuauaaaaa

SEQ ID NO: 1003210 - RNA, 26 nt, Human
guauugguguagacacccagacaccc

SEQ ID NO: 1003211 - RNA, 23 nt, Human
guccuuguccuguccaaguacua

SEQ ID NO: 1003212 - RNA, 19 nt, Human
uaccuuuguuuggccagag

SEQ ID NO: 1003213 - RNA, 24 nt, Human
uaccuuuguuuggccagagguggg

SEQ ID NO: 1003214 - RNA, 20 nt, Human
uauguuggguaaaacgcauc

SEQ ID NO: 1003215 - RNA, 21 nt, Human
uccaaguacuauccauagaaa

SEQ ID NO: 1003216 - RNA, 21 nt, Human
ucuguaucugcuauuauguug

SEQ ID NO: 1003217 - RNA, 18 nt, Human
ugaaaugacauccggagg

SEQ ID NO: 1003218 - RNA, 22 nt, Human
ugaccuucgccccgcacauccu

SEQ ID NO: 1003219 - RNA, 18 nt, Human
ugagcuggcaagcagggg

SEQ ID NO: 1003220 - RNA, 18 nt, Human
uggaagcccagcaccagc

SEQ ID NO: 1003221 - RNA, 24 nt, Human
uggcaagcaggggaccacuggguu

SEQ ID NO: 1003222 - RNA, 24 nt, Human
ugguuuuggcuggaagcauuacuc

SEQ ID NO: 1003223 - RNA, 20 nt, Human
ugucauggaccugaaaugac

SEQ ID NO: 1003224 - RNA, 21 nt, Human
ugucauggaccugaaaugaca

SEQ ID NO: 1003225 - RNA, 19 nt, Human
uucaugaugggggaaagaa

SEQ ID NO: 1003226 - RNA, 21 nt, Human
uucucaugaauggcagagguu

SEQ ID NO: 1003227 - RNA, 20 nt, Human
aaacaacccucuaguugcca

SEQ ID NO: 1003228 - RNA, 26 nt, Human
aaacagaagcaccgagucaccgcacg

SEQ ID NO: 1003229 - RNA, 19 nt, Human
aacucuggucccucaacag

SEQ ID NO: 1003230 - RNA, 20 nt, Human
aagcaccaaagaccccaacu

SEQ ID NO: 1003231 - RNA, 22 nt, Human
aagguuugcccaccugguuccu

SEQ ID NO: 1003232 - RNA, 21 nt, Human
acacuggagaaaagaaagacc

SEQ ID NO: 1003233 - RNA, 18 nt, Human
accagagagaacacacag

SEQ ID NO: 1003234 - RNA, 24 nt, Human
accagccugugaucccccagcccc

SEQ ID NO: 1003235 - RNA, 20 nt, Human
accgagucaccgcacgcccc

SEQ ID NO: 1003236 - RNA, 19 nt, Human
acuggguggggacaggugg

SEQ ID NO: 1003237 - RNA, 24 nt, Human
agagagaggcuggcccgcguggug

SEQ ID NO: 1003238 - RNA, 23 nt, Human
agaggccuauccuccuauaaaga

SEQ ID NO: 1003239 - RNA, 21 nt, Human
agccccggagccaccagcccc

SEQ ID NO: 1003240 - RNA, 22 nt, Human
aggaacuccccgaggaaucugu

SEQ ID NO: 1003241 - RNA, 24 nt, Human
aggcagccagcucagggaugguac

SEQ ID NO: 1003242 - RNA, 23 nt, Human
aggcuggcccgcguggugagucu

SEQ ID NO: 1003243 - RNA, 24 nt, Human
aggcuucgcugggagcugagaaca

SEQ ID NO: 1003244 - RNA, 20 nt, Human
agggaacgaggacagagggg

SEQ ID NO: 1003245 - RNA, 23 nt, Human
agggaggggacagcugauguagg

SEQ ID NO: 1003246 - RNA, 23 nt, Human
agugccagcaaaaucugcaaaag

SEQ ID NO: 1003247 - RNA, 19 nt, Human
caaaacagaagcaccgagu

SEQ ID NO: 1003248 - RNA, 23 nt, Human
caaaacagaagcaccgagucacc

SEQ ID NO: 1003249 - RNA, 21 nt, Human
caaagaccccaacucuggucc

SEQ ID NO: 1003250 - RNA, 19 nt, Human
caacaggcaguauuggggg

SEQ ID NO: 1003251 - RNA, 18 nt, Human
caacauguuuaaaacacu

SEQ ID NO: 1003252 - RNA, 21 nt, Human
caccaaagaccccaacucugg

SEQ ID NO: 1003253 - RNA, 21 nt, Human
caccgagucaccgcacgcccc

SEQ ID NO: 1003254 - RNA, 20 nt, Human
caccgggguucaccagccug

SEQ ID NO: 1003255 - RNA, 20 nt, Human
caccucuguucccaccgggg

SEQ ID NO: 1003256 - RNA, 21 nt, Human
cacuggagaaaagaaagaccu

SEQ ID NO: 1003257 - RNA, 22 nt, Human
cagagcuuuccugaugccuccc

SEQ ID NO: 1003258 - RNA, 23 nt, Human
cagaucugcagaucuccagauca

SEQ ID NO: 1003259 - RNA, 25 nt, Human
cagggagucccggcugcccuguggc

SEQ ID NO: 1003260 - RNA, 19 nt, Human
cagggcaaaagagagaggc

SEQ ID NO: 1003261 - RNA, 19 nt, Human
ccaaaacagaagcaccgag

SEQ ID NO: 1003262 - RNA, 23 nt, Human
ccauucuguuguggaggcuucgc

SEQ ID NO: 1003263 - RNA, 20 nt, Human
ccccacugcagagcuuuccu

SEQ ID NO: 1003264 - RNA, 25 nt, Human
cccccagccccggagccaccagccc

SEQ ID NO: 1003265 - RNA, 21 nt, Human
ccccggagccaccagcccccc

SEQ ID NO: 1003266 - RNA, 23 nt, Human
cccucuguggcccaggaagagcc

SEQ ID NO: 1003267 - RNA, 19 nt, Human
cccuggggcuuuggucggg

SEQ ID NO: 1003268 - RNA, 21 nt, Human
ccuauccuccuauaaagacac

SEQ ID NO: 1003269 - RNA, 22 nt, Human
ccucacugccacuccccuccug

SEQ ID NO: 1003270 - RNA, 22 nt, Human
ccuccuggccaauaagcuccug

SEQ ID NO: 1003271 - RNA, 22 nt, Human
ccucugaggcagccaagcaccu

SEQ ID NO: 1003272 - RNA, 22 nt, Human
ccucuguggcccaggaagagcc

SEQ ID NO: 1003273 - RNA, 24 nt, Human
ccugggacacuggguggggacagg

SEQ ID NO: 1003274 - RNA, 20 nt, Human
cgaggccguggggcucuggu

SEQ ID NO: 1003275 - RNA, 21 nt, Human
cggaaaaaggaggcaggaacc

SEQ ID NO: 1003276 - RNA, 22 nt, Human
cggcugcccuguggccccauuc

SEQ ID NO: 1003277 - RNA, 27 nt, Human
cuccagaucagugccagcaaaaucugc

SEQ ID NO: 1003278 - RNA, 23 nt, Human
cucugaggcagccaagcaccugg

SEQ ID NO: 1003279 - RNA, 18 nt, Human
cugcagaucuccagauca

SEQ ID NO: 1003280 - RNA, 23 nt, Human
cuggcccuggaacucugauuugg

SEQ ID NO: 1003281 - RNA, 20 nt, Human
cugguguggagagcagggca

SEQ ID NO: 1003282 - RNA, 22 nt, Human
cuguggccugggacacugggug

SEQ ID NO: 1003283 - RNA, 19 nt, Human
cuuucccucuuggcuuuuu

SEQ ID NO: 1003284 - RNA, 24 nt, Human
gaaagaccuaaagucguuucaaag

SEQ ID NO: 1003285 - RNA, 20 nt, Human
gaagcaccaaagaccccaac

SEQ ID NO: 1003286 - RNA, 21 nt, Human
gaaucuguuuaguuuccaugc

SEQ ID NO: 1003287 - RNA, 24 nt, Human
gaaucuguuuaguuuccaugcauu

SEQ ID NO: 1003288 - RNA, 20 nt, Human
gacuccuucccgucuccucc

SEQ ID NO: 1003289 - RNA, 24 nt, Human
gagaaaagaaagaccuaaagucgu

SEQ ID NO: 1003290 - RNA, 28 nt, Human
gagcagggccaggcagccagcucaggga

SEQ ID NO: 1003291 - RNA, 22 nt, Human
gcagggcagaggccuauccucc

SEQ ID NO: 1003292 - RNA, 24 nt, Human
ggaaucccagcugcuccucugccc

SEQ ID NO: 1003293 - RNA, 21 nt, Human
ggaaugagcugcaaaucuguu

SEQ ID NO: 1003294 - RNA, 20 nt, Human
ggacagcugauguaggcauu

SEQ ID NO: 1003295 - RNA, 19 nt, Human
ggaggguuagggagacagg

SEQ ID NO: 1003296 - RNA, 18 nt, Human
ggcaggagguuggaagca

SEQ ID NO: 1003297 - RNA, 19 nt, Human
gggacacuggguggggaca

SEQ ID NO: 1003298 - RNA, 21 nt, Human
gggcaaaagagagaggcuggc

SEQ ID NO: 1003299 - RNA, 19 nt, Human
ggggguggggcagggcaga

SEQ ID NO: 1003300 - RNA, 21 nt, Human
gggguggggcagggcagaggc

SEQ ID NO: 1003301 - RNA, 21 nt, Human
ggguggggacagguggugggg

SEQ ID NO: 1003302 - RNA, 19 nt, Human
gugaggccgcauguauaua

SEQ ID NO: 1003303 - RNA, 20 nt, Human
gugguucuuccaaaacagaa

SEQ ID NO: 1003304 - RNA, 24 nt, Human
guucccaccgggguucaccagccu

SEQ ID NO: 1003305 - RNA, 20 nt, Human
uaaagagcaucuccugauca

SEQ ID NO: 1003306 - RNA, 18 nt, Human
uaagaaucgacuccuucc

SEQ ID NO: 1003307 - RNA, 18 nt, Human
uagcacuuugcuaaaacc

SEQ ID NO: 1003308 - RNA, 18 nt, Human
uauaagcaaagguuugcc

SEQ ID NO: 1003309 - RNA, 24 nt, Human
uauauaagcaaagguuugcccacc

SEQ ID NO: 1003310 - RNA, 20 nt, Human
ucagugugcgaggccguggg

SEQ ID NO: 1003311 - RNA, 24 nt, Human
uccaaaacagaagcaccgagucac

SEQ ID NO: 1003312 - RNA, 23 nt, Human
uccccuagaacagggaacucugg

SEQ ID NO: 1003313 - RNA, 22 nt, Human
ucccucaacaggcaguauuggg

SEQ ID NO: 1003314 - RNA, 23 nt, Human
ucccucaacaggcaguauugggg

SEQ ID NO: 1003315 - RNA, 23 nt, Human
uccuccagaucugcagaucucca

SEQ ID NO: 1003316 - RNA, 24 nt, Human
ucucuugaugguggugccugaccu

SEQ ID NO: 1003317 - RNA, 21 nt, Human
ucugcagcuaacacauucugc

SEQ ID NO: 1003318 - RNA, 21 nt, Human
ucuggcccuggaacucugauu

SEQ ID NO: 1003319 - RNA, 18 nt, Human
ucuguggcccaggaagag

SEQ ID NO: 1003320 - RNA, 21 nt, Human
ucuuggcugggcugacaagag

SEQ ID NO: 1003321 - RNA, 21 nt, Human
ugaaacuuuaagaagcaacac

SEQ ID NO: 1003322 - RNA, 20 nt, Human
ugaacccagauccccaccaa

SEQ ID NO: 1003323 - RNA, 19 nt, Human
ugacgucgcagaguuccuc

SEQ ID NO: 1003324 - RNA, 18 nt, Human
ugagaacacccugcuguc

SEQ ID NO: 1003325 - RNA, 19 nt, Human
ugagaacacccugcugucc

SEQ ID NO: 1003326 - RNA, 19 nt, Human
ugagaccaugccuaucugc

SEQ ID NO: 1003327 - RNA, 23 nt, Human
ugagaugaacccagauccccacc

SEQ ID NO: 1003328 - RNA, 24 nt, Human
ugaggccgcauguauauaagcaaa

SEQ ID NO: 1003329 - RNA, 26 nt, Human
ugaucccccagccccggagccaccag

SEQ ID NO: 1003330 - RNA, 19 nt, Human
ugccagcaaaaucugcaaa

SEQ ID NO: 1003331 - RNA, 23 nt, Human
ugcgaggccguggggcucugguc

SEQ ID NO: 1003332 - RNA, 19 nt, Human
uggaagcaccaaagacccc

SEQ ID NO: 1003333 - RNA, 22 nt, Human
uggaagcaccaaagaccccaac

SEQ ID NO: 1003334 - RNA, 19 nt, Human
uggcugggcugacaagagg

SEQ ID NO: 1003335 - RNA, 24 nt, Human
ugggacacuggguggggacaggug

SEQ ID NO: 1003336 - RNA, 23 nt, Human
ugggggacauuauucccuccugg

SEQ ID NO: 1003337 - RNA, 25 nt, Human
ugguaccucugaggcagccaagcac

SEQ ID NO: 1003338 - RNA, 21 nt, Human
ugguggggguggggcagggca

SEQ ID NO: 1003339 - RNA, 21 nt, Human
ugguggggguggggcagggcc

SEQ ID NO: 1003340 - RNA, 19 nt, Human
ugguggugccugaccuggc

SEQ ID NO: 1003341 - RNA, 25 nt, Human
ugucagcaggggugcgaacuucuua

SEQ ID NO: 1003342 - RNA, 20 nt, Human
uguucuggugucagcagggg

SEQ ID NO: 1003343 - RNA, 23 nt, Human
uuaaaaacaacccucuaguugcc

SEQ ID NO: 1003344 - RNA, 21 nt, Human
uuaaagauccucccucugugg

SEQ ID NO: 1003345 - RNA, 19 nt, Human
uucagugugcgaggccgug

SEQ ID NO: 1003346 - RNA, 21 nt, Human
uuggcugggcugacaagaggc

SEQ ID NO: 1003347 - RNA, 24 nt, Human
uuggcugggcugacaagaggcaga

SEQ ID NO: 1003348 - RNA, 22 nt, Human
uuugcuaaaaccuuuucuggca

SEQ ID NO: 1003349 - RNA, 19 nt, Human
uuuggucgggaaucccagc

SEQ ID NO: 1003350 - RNA, 24 nt, Human
uuuuucuccucuuaaagauccucc

SEQ ID NO: 1003351 - RNA, 23 nt, Human
aaaaaaaaaaaaaaaaaaaagag

SEQ ID NO: 1003352 - RNA, 24 nt, Human
aaaaaaaaaaaaaagagaaaagag

SEQ ID NO: 1003353 - RNA, 25 nt, Human
aaaaaaaaaaaacaaacuauacaaa

SEQ ID NO: 1003354 - RNA, 25 nt, Human
aaaaaacaaaacaaaacaaaaaaaa

SEQ ID NO: 1003355 - RNA, 20 nt, Human
aaaaagagcaaaacuaaauc

SEQ ID NO: 1003356 - RNA, 27 nt, Human
aaaacaaaacaaaacaaaaaaaaaaaa

SEQ ID NO: 1003357 - RNA, 23 nt, Human
aaaacacccuauaacuggcaccu

SEQ ID NO: 1003358 - RNA, 20 nt, Human
aaaacaccuagaagcaagca

SEQ ID NO: 1003359 - RNA, 19 nt, Human
aaaacagacaggcacuaug

SEQ ID NO: 1003360 - RNA, 22 nt, Human
aaaaggccuuuugagaagagga

SEQ ID NO: 1003361 - RNA, 21 nt, Human
aaaauaaauagcaaauucaca

SEQ ID NO: 1003362 - RNA, 21 nt, Human
aaacaaaaaggcaaaaucaga

SEQ ID NO: 1003363 - RNA, 22 nt, Human
aaacaaaaaggcaaaaucagag

SEQ ID NO: 1003364 - RNA, 24 nt, Human
aaacaaaacaaaaaaaaaaaaaca

SEQ ID NO: 1003365 - RNA, 19 nt, Human
aaacaaaacaaaacaaaaa

SEQ ID NO: 1003366 - RNA, 21 nt, Human
aaacaaacuauacaaacuccc

SEQ ID NO: 1003367 - RNA, 20 nt, Human
aaacagcccaaaaagccaaa

SEQ ID NO: 1003368 - RNA, 19 nt, Human
aaacaucacaggagugaaa

SEQ ID NO: 1003369 - RNA, 21 nt, Human
aaacuacaaaacuuggccagg

SEQ ID NO: 1003370 - RNA, 27 nt, Human
aaagaaagaaaaaccugguacaaaaga

SEQ ID NO: 1003371 - RNA, 20 nt, Human
aaagcaacacucagacccac

SEQ ID NO: 1003372 - RNA, 24 nt, Human
aacaaaacaaaaaaaaaaaaacaa

SEQ ID NO: 1003373 - RNA, 25 nt, Human
aacaaaacaaaaaaaaaaaaacaaa

SEQ ID NO: 1003374 - RNA, 19 nt, Human
aacaacacuggaaaaagaa

SEQ ID NO: 1003375 - RNA, 19 nt, Human
aacauggugaaaccccauc

SEQ ID NO: 1003376 - RNA, 20 nt, Human
aacauggugaaaccccaucu

SEQ ID NO: 1003377 - RNA, 21 nt, Human
aacauggugaaaccccaucuc

SEQ ID NO: 1003378 - RNA, 21 nt, Human
aacauggugaaaccccaucuc

SEQ ID NO: 1003379 - RNA, 19 nt, Human
aacauggugaaaccccguc

SEQ ID NO: 1003380 - RNA, 20 nt, Human
aacauggugaaaccccgucu

SEQ ID NO: 1003381 - RNA, 21 nt, Human
aacauggugaaaccccgucuc

SEQ ID NO: 1003382 - RNA, 23 nt, Human
aaccaagaauuauuuuuaagcaa

SEQ ID NO: 1003383 - RNA, 21 nt, Human
aaccccaucaugccugcccaa

SEQ ID NO: 1003384 - RNA, 19 nt, Human
aaccugggaggcaagaggu

SEQ ID NO: 1003385 - RNA, 26 nt, Human
aagaaagaaagaaaaaccugguacaa

SEQ ID NO: 1003386 - RNA, 28 nt, Human
aagaaagaaagaaaaaccugguacaaaa

SEQ ID NO: 1003387 - RNA, 18 nt, Human
aagaggacagaagaaaag

SEQ ID NO: 1003388 - RNA, 21 nt, Human
aagaggacagaagaaaagcca

SEQ ID NO: 1003389 - RNA, 22 nt, Human
aagcaaacagcccaaaaagcca

SEQ ID NO: 1003390 - RNA, 24 nt, Human
aagcaaacagcccaaaaagccaaa

SEQ ID NO: 1003391 - RNA, 21 nt, Human
aagcagaaacuugaagccaag

SEQ ID NO: 1003392 - RNA, 20 nt, Human
aagccacagccugaggacca

SEQ ID NO: 1003393 - RNA, 19 nt, Human
aaggacgcaggaaccacac

SEQ ID NO: 1003394 - RNA, 20 nt, Human
aaggaugcuauauaacucau

SEQ ID NO: 1003395 - RNA, 25 nt, Human
aaggcgggcagauuaucugagguca

SEQ ID NO: 1003396 - RNA, 25 nt, Human
aaggguuacaggcaggaagggggua

SEQ ID NO: 1003397 - RNA, 24 nt, Human
aaucacuugaacccaggaggcgga

SEQ ID NO: 1003398 - RNA, 24 nt, Human
aaucgcuugaacccgggaggcaga

SEQ ID NO: 1003399 - RNA, 21 nt, Human
aauucaaacuuuuauuuggca

SEQ ID NO: 1003400 - RNA, 20 nt, Human
aauugauuacaaaacucauu

SEQ ID NO: 1003401 - RNA, 18 nt, Human
aauugcuugaaccuggga

SEQ ID NO: 1003402 - RNA, 24 nt, Human
acaaaacaaaacaaaaaaaaaaaa

SEQ ID NO: 1003403 - RNA, 21 nt, Human
acaaaacagaaagaaaugaga

SEQ ID NO: 1003404 - RNA, 19 nt, Human
acaaaacuuggccaggccu

SEQ ID NO: 1003405 - RNA, 24 nt, Human
acaaaauguagaagaaaagauggg

SEQ ID NO: 1003406 - RNA, 24 nt, Human
acaccacugcacuccagaaugggc

SEQ ID NO: 1003407 - RNA, 19 nt, Human
acagaagaaaagccacuua

SEQ ID NO: 1003408 - RNA, 20 nt, Human
acagaagaaaagccacuuag

SEQ ID NO: 1003409 - RNA, 24 nt, Human
acagagcgagaccuugccucaaaa

SEQ ID NO: 1003410 - RNA, 21 nt, Human
acagugcugugggcugagccg

SEQ ID NO: 1003411 - RNA, 19 nt, Human
acaguggcucacacccaga

SEQ ID NO: 1003412 - RNA, 19 nt, Human
accaaauacagcccacagc

SEQ ID NO: 1003413 - RNA, 19 nt, Human
accauggagaaaccccauc

SEQ ID NO: 1003414 - RNA, 20 nt, Human
accauggagaaaccccaucu

SEQ ID NO: 1003415 - RNA, 24 nt, Human
acccaaggucaggaguucgagacc

SEQ ID NO: 1003416 - RNA, 24 nt, Human
accccaucucuacuagaaauacaa

SEQ ID NO: 1003417 - RNA, 24 nt, Human
accccaucucuauuaaaacuacaa

SEQ ID NO: 1003418 - RNA, 24 nt, Human
accccgucucuacuaaaaauacaa

SEQ ID NO: 1003419 - RNA, 20 nt, Human
accuacagaacuuucuccuc

SEQ ID NO: 1003420 - RNA, 20 nt, Human
accugauguuccaggaccuc

SEQ ID NO: 1003421 - RNA, 24 nt, Human
acuacuuuucaauucuccuuugca

SEQ ID NO: 1003422 - RNA, 19 nt, Human
acucacagcagcguuuuac

SEQ ID NO: 1003423 - RNA, 24 nt, Human
acugcacuccagaaugggcaacag

SEQ ID NO: 1003424 - RNA, 18 nt, Human
acugcacuccagccuggg

SEQ ID NO: 1003425 - RNA, 21 nt, Human
acugcacuccagccugggcaa

SEQ ID NO: 1003426 - RNA, 24 nt, Human
acugcacuccagccugggcaauaa

SEQ ID NO: 1003427 - RNA, 25 nt, Human
agaaaagccacuuaguuugcccaaa

SEQ ID NO: 1003428 - RNA, 21 nt, Human
agaaacuugaagccaagaaca

SEQ ID NO: 1003429 - RNA, 23 nt, Human
agaaagaaaugaaaaaaggggac

SEQ ID NO: 1003430 - RNA, 21 nt, Human
agaagaaaagauggggagaag

SEQ ID NO: 1003431 - RNA, 18 nt, Human
agaagaggacagaagaaa

SEQ ID NO: 1003432 - RNA, 25 nt, Human
agaagcaagcaaacaauaaacaaaa

SEQ ID NO: 1003433 - RNA, 18 nt, Human
agaaggcucuauagaagg

SEQ ID NO: 1003434 - RNA, 18 nt, Human
agacauggcaucaagugg

SEQ ID NO: 1003435 - RNA, 18 nt, Human
agagguugcagugagccg

SEQ ID NO: 1003436 - RNA, 23 nt, Human
agagguugcagugagccgagauc

SEQ ID NO: 1003437 - RNA, 24 nt, Human
agagguugcagugagccgagauca

SEQ ID NO: 1003438 - RNA, 22 nt, Human
agagguugcagugagcugagau

SEQ ID NO: 1003439 - RNA, 24 nt, Human
agagguugcagugagcugagauug

SEQ ID NO: 1003440 - RNA, 22 nt, Human
agauuaucugaggucaggaguu

SEQ ID NO: 1003441 - RNA, 23 nt, Human
agauuaucugaggucaggaguuc

SEQ ID NO: 1003442 - RNA, 21 nt, Human
agcacaauuacaaacuaaugc

SEQ ID NO: 1003443 - RNA, 24 nt, Human
agcacuuuggaaggcugagguggg

SEQ ID NO: 1003444 - RNA, 20 nt, Human
agcagacauucccauagcac

SEQ ID NO: 1003445 - RNA, 18 nt, Human
agccugaccaccauggag

SEQ ID NO: 1003446 - RNA, 22 nt, Human
agccuggccaacauggugaaac

SEQ ID NO: 1003447 - RNA, 22 nt, Human
agccuggccaacauggugaaac

SEQ ID NO: 1003448 - RNA, 24 nt, Human
agccuggccaacauggugaaaccc

SEQ ID NO: 1003449 - RNA, 24 nt, Human
agccuggccaacauggugaaaccc

SEQ ID NO: 1003450 - RNA, 20 nt, Human
agcuggaugugguggugggc

SEQ ID NO: 1003451 - RNA, 23 nt, Human
agcugggugugguagugcaugcc

SEQ ID NO: 1003452 - RNA, 22 nt, Human
aggaggccagaccuuuguaccc

SEQ ID NO: 1003453 - RNA, 20 nt, Human
aggaguuugagaccagccug

SEQ ID NO: 1003454 - RNA, 22 nt, Human
aggaucuuguuuguuuccaucu

SEQ ID NO: 1003455 - RNA, 30 nt, Human
aggcaaaaaagaaagaaagaaaaaccuggg

SEQ ID NO: 1003456 - RNA, 26 nt, Human
aggcaaaaaagaaagaaaggggaccc

SEQ ID NO: 1003457 - RNA, 22 nt, Human
aggcacgaaaauugcuugaacc

SEQ ID NO: 1003458 - RNA, 24 nt, Human
aggcacgaaaauugcuugaaccug

SEQ ID NO: 1003459 - RNA, 20 nt, Human
aggcagagguugcagugagc

SEQ ID NO: 1003460 - RNA, 24 nt, Human
aggcagagguugcagugagcugag

SEQ ID NO: 1003461 - RNA, 27 nt, Human
aggcaggaaggggguaugaucuggggc

SEQ ID NO: 1003462 - RNA, 18 nt, Human
aggcaggagaaucacuug

SEQ ID NO: 1003463 - RNA, 23 nt, Human
aggcaggagaaucacuugaaccc

SEQ ID NO: 1003464 - RNA, 24 nt, Human
aggcaggagaaucgcuugaacccg

SEQ ID NO: 1003465 - RNA, 26 nt, Human
aggcagguggauuacccaaggucagg

SEQ ID NO: 1003466 - RNA, 18 nt, Human
aggccaaggcgggcagau

SEQ ID NO: 1003467 - RNA, 19 nt, Human
aggcggagguuggagugag

SEQ ID NO: 1003468 - RNA, 24 nt, Human
aggcggagguuggagugagccaag

SEQ ID NO: 1003469 - RNA, 24 nt, Human
aggcugaggcacgaaaauugcuug

SEQ ID NO: 1003470 - RNA, 24 nt, Human
aggcugaggcaggagaaucacuug

SEQ ID NO: 1003471 - RNA, 20 nt, Human
aggcugaggcaggagaaucg

SEQ ID NO: 1003472 - RNA, 24 nt, Human
aggcugaggcaggagaaucgcuug

SEQ ID NO: 1003473 - RNA, 24 nt, Human
aggcugaggugggcagaacacuug

SEQ ID NO: 1003474 - RNA, 20 nt, Human
aggguuacaggcaggaaggg

SEQ ID NO: 1003475 - RNA, 23 nt, Human
aggguuacaggcaggaagggggu

SEQ ID NO: 1003476 - RNA, 21 nt, Human
agguaaucaaugaauaucuga

SEQ ID NO: 1003477 - RNA, 19 nt, Human
aggucaggaguucgagacc

SEQ ID NO: 1003478 - RNA, 24 nt, Human
aggugcgguggcucacaccuguaa

SEQ ID NO: 1003479 - RNA, 22 nt, Human
agguggauuacccaaggucagg

SEQ ID NO: 1003480 - RNA, 23 nt, Human
aggugggcagaacacuugaggcu

SEQ ID NO: 1003481 - RNA, 21 nt, Human
agugcaguaaauaugcacuuu

SEQ ID NO: 1003482 - RNA, 21 nt, Human
agugggagcucuaagccaaac

SEQ ID NO: 1003483 - RNA, 22 nt, Human
aguuaaaaucuguccugacuga

SEQ ID NO: 1003484 - RNA, 20 nt, Human
aucacaccacugcacuccag

SEQ ID NO: 1003485 - RNA, 24 nt, Human
aucgugccauugcacuccggccug

SEQ ID NO: 1003486 - RNA, 22 nt, Human
aucugaggucaggaguucgaga

SEQ ID NO: 1003487 - RNA, 24 nt, Human
aucugaggucaggaguucgagacc

SEQ ID NO: 1003488 - RNA, 19 nt, Human
augccuguaaucccagcac

SEQ ID NO: 1003489 - RNA, 22 nt, Human
auuaaaacaguauuagcagccc

SEQ ID NO: 1003490 - RNA, 24 nt, Human
auuacccaaggucaggaguucgag

SEQ ID NO: 1003491 - RNA, 22 nt, Human
auugcacuccggccugggcaaa

SEQ ID NO: 1003492 - RNA, 23 nt, Human
auugccccuagaaagaaaugaaa

SEQ ID NO: 1003493 - RNA, 24 nt, Human
auugugccacugcacuccagccug

SEQ ID NO: 1003494 - RNA, 21 nt, Human
auuuagcccagucucugcugc

SEQ ID NO: 1003495 - RNA, 20 nt, Human
caaaaaagaaagaaagaaaa

SEQ ID NO: 1003496 - RNA, 22 nt, Human
caaaaagagcaaaacuaaaucu

SEQ ID NO: 1003497 - RNA, 22 nt, Human
caaaaagccaaaaauacuuccu

SEQ ID NO: 1003498 - RNA, 23 nt, Human
caaaaaggcaaaaucagaguucc

SEQ ID NO: 1003499 - RNA, 27 nt, Human
caaaacaaaacagaaagaaaugagaaa

SEQ ID NO: 1003500 - RNA, 21 nt, Human
caaaacacccagugcagugug

SEQ ID NO: 1003501 - RNA, 22 nt, Human
caaaaucagaguuccaauguga

SEQ ID NO: 1003502 - RNA, 26 nt, Human
caaacagcccaaaaagccaaaaauac

SEQ ID NO: 1003503 - RNA, 26 nt, Human
caaacucccaaauagucgcacaaaca

SEQ ID NO: 1003504 - RNA, 22 nt, Human
caaagcagaaacuugaagccaa

SEQ ID NO: 1003505 - RNA, 24 nt, Human
caaagcagaaacuugaagccaaga

SEQ ID NO: 1003506 - RNA, 23 nt, Human
caacaaaacaaaacagaaagaaa

SEQ ID NO: 1003507 - RNA, 21 nt, Human
caacacaauccauuagagcaa

SEQ ID NO: 1003508 - RNA, 24 nt, Human
caacauggugaaaccccaucucua

SEQ ID NO: 1003509 - RNA, 24 nt, Human
caacauggugaaaccccgucucua

SEQ ID NO: 1003510 - RNA, 25 nt, Human
caagaacaccagcgcauuggagacc

SEQ ID NO: 1003511 - RNA, 24 nt, Human
caagaucgugccauugcacuccgg

SEQ ID NO: 1003512 - RNA, 24 nt, Human
caagcucaauggcccagagacuga

SEQ ID NO: 1003513 - RNA, 24 nt, Human
caaggcagguggauuacccaaggu

SEQ ID NO: 1003514 - RNA, 26 nt, Human
caaggcagguggauuacccaagguca

SEQ ID NO: 1003515 - RNA, 19 nt, Human
caaggggcucuggagcugg

SEQ ID NO: 1003516 - RNA, 24 nt, Human
caauaugcauucaucaaugugcac

SEQ ID NO: 1003517 - RNA, 22 nt, Human
caauucaaacuuuuauuuggca

SEQ ID NO: 1003518 - RNA, 24 nt, Human
cacacccagaaucccagcacuuug

SEQ ID NO: 1003519 - RNA, 24 nt, Human
cacaccuguaaucccagcaauuug

SEQ ID NO: 1003520 - RNA, 18 nt, Human
cacacugaggacaaaagg

SEQ ID NO: 1003521 - RNA, 19 nt, Human
cacacuggccauacaugua

SEQ ID NO: 1003522 - RNA, 27 nt, Human
cacagccugaggaccaaauacagccca

SEQ ID NO: 1003523 - RNA, 23 nt, Human
caccauuauaguuaaauacagcc

SEQ ID NO: 1003524 - RNA, 22 nt, Human
cacccuauaacuggcaccuggu

SEQ ID NO: 1003525 - RNA, 21 nt, Human
caccuagaagcaagcaaacaa

SEQ ID NO: 1003526 - RNA, 23 nt, Human
caccuguaaucccagcaauuugg

SEQ ID NO: 1003527 - RNA, 24 nt, Human
caccuguaaucccagcaauuuggg

SEQ ID NO: 1003528 - RNA, 21 nt, Human
caccuguaaucccagcuacuc

SEQ ID NO: 1003529 - RNA, 24 nt, Human
caccuguaaucccagcuacucggg

SEQ ID NO: 1003530 - RNA, 24 nt, Human
cacuccagccugggcaauaagagc

SEQ ID NO: 1003531 - RNA, 18 nt, Human
cacugcacuccagaaugg

SEQ ID NO: 1003532 - RNA, 19 nt, Human
cacugcacuccagaauggg

SEQ ID NO: 1003533 - RNA, 23 nt, Human
cacugcacuccagaaugggcaac

SEQ ID NO: 1003534 - RNA, 24 nt, Human
cacugcacuccagaaugggcaaca

SEQ ID NO: 1003535 - RNA, 18 nt, Human
cacugcacuccagccugg

SEQ ID NO: 1003536 - RNA, 19 nt, Human
cacugcacuccagccuggg

SEQ ID NO: 1003537 - RNA, 21 nt, Human
cacugcacuccagccugggca

SEQ ID NO: 1003538 - RNA, 23 nt, Human
cacugcacuccagccugggcaau

SEQ ID NO: 1003539 - RNA, 24 nt, Human
cacugcacuccagccugggcaaua

SEQ ID NO: 1003540 - RNA, 27 nt, Human
cacugcacuccagccugggcaauaaga

SEQ ID NO: 1003541 - RNA, 18 nt, Human
cacuuuggaaggcugagg

SEQ ID NO: 1003542 - RNA, 21 nt, Human
cagaaacuugaagccaagaac

SEQ ID NO: 1003543 - RNA, 24 nt, Human
cagaacacuugaggcuaggaguuu

SEQ ID NO: 1003544 - RNA, 21 nt, Human
cagaugaaaccaacucaggug

SEQ ID NO: 1003545 - RNA, 24 nt, Human
cagauuaucugaggucaggaguuc

SEQ ID NO: 1003546 - RNA, 24 nt, Human
cagcaauuugggaggccaaggcgg

SEQ ID NO: 1003547 - RNA, 21 nt, Human
cagcaccuugggaggccaagg

SEQ ID NO: 1003548 - RNA, 24 nt, Human
cagcaccuugggaggccaaggcag

SEQ ID NO: 1003549 - RNA, 24 nt, Human
cagcacuuuggaaggcugaggugg

SEQ ID NO: 1003550 - RNA, 20 nt, Human
cagcccaaaaagccaaaaau

SEQ ID NO: 1003551 - RNA, 22 nt, Human
cagcccaaaaagccaaaaauac

SEQ ID NO: 1003552 - RNA, 19 nt, Human
cagccugaccaccauggag

SEQ ID NO: 1003553 - RNA, 24 nt, Human
cagcuacucgggaggcugaggcag

SEQ ID NO: 1003554 - RNA, 24 nt, Human
cagcuacuugggaggcugaggcag

SEQ ID NO: 1003555 - RNA, 24 nt, Human
cagguggauuacccaaggucagga

SEQ ID NO: 1003556 - RNA, 24 nt, Human
cagugcacuuauuaccuacagaac

SEQ ID NO: 1003557 - RNA, 18 nt, Human
caucagagaacaaaacac

SEQ ID NO: 1003558 - RNA, 22 nt, Human
caucagagaacaaaacacccag

SEQ ID NO: 1003559 - RNA, 25 nt, Human
caucuaaaaaaaaacaaaacaaaac

SEQ ID NO: 1003560 - RNA, 20 nt, Human
caugccacuugcauugcccc

SEQ ID NO: 1003561 - RNA, 24 nt, Human
caugccuguaaucccagcuacuug

SEQ ID NO: 1003562 - RNA, 19 nt, Human
cauggagaaaccccaucuc

SEQ ID NO: 1003563 - RNA, 18 nt, Human
cauugcacuccggccugg

SEQ ID NO: 1003564 - RNA, 19 nt, Human
cauugcacuccggccuggg

SEQ ID NO: 1003565 - RNA, 21 nt, Human
cauugcacuccggccugggca

SEQ ID NO: 1003566 - RNA, 22 nt, Human
cauugcacuccggccugggcaa

SEQ ID NO: 1003567 - RNA, 23 nt, Human
cauugcacuccggccugggcaaa

SEQ ID NO: 1003568 - RNA, 27 nt, Human
cauugcacuccggccugggcaaaaaga

SEQ ID NO: 1003569 - RNA, 19 nt, Human
ccaaaaauacuuccuaucu

SEQ ID NO: 1003570 - RNA, 20 nt, Human
ccaaaagcaacacucagacu

SEQ ID NO: 1003571 - RNA, 18 nt, Human
ccaauacacccugauggc

SEQ ID NO: 1003572 - RNA, 20 nt, Human
ccacugcacuccagaauggg

SEQ ID NO: 1003573 - RNA, 21 nt, Human
ccacugcacuccagaaugggc

SEQ ID NO: 1003574 - RNA, 22 nt, Human
ccacugcacuccagaaugggca

SEQ ID NO: 1003575 - RNA, 24 nt, Human
ccacugcacuccagaaugggcaac

SEQ ID NO: 1003576 - RNA, 20 nt, Human
ccacugcacuccagccuggg

SEQ ID NO: 1003577 - RNA, 20 nt, Human
ccacugcacuccagccuggg

SEQ ID NO: 1003578 - RNA, 21 nt, Human
ccacugcacuccagccugggc

SEQ ID NO: 1003579 - RNA, 23 nt, Human
ccacugcacuccagccugggcaa

SEQ ID NO: 1003580 - RNA, 23 nt, Human
ccacugcacuccagccugggcaa

SEQ ID NO: 1003581 - RNA, 24 nt, Human
ccacugcacuccagccugggcaau

SEQ ID NO: 1003582 - RNA, 23 nt, Human
ccagaucccaguugagucaugau

SEQ ID NO: 1003583 - RNA, 19 nt, Human
ccagcaccuugggaggcca

SEQ ID NO: 1003584 - RNA, 19 nt, Human
ccagccagcagcacuccca

SEQ ID NO: 1003585 - RNA, 23 nt, Human
ccaggcuucugucacaugggaga

SEQ ID NO: 1003586 - RNA, 21 nt, Human
ccaguagucccagcuacucgg

SEQ ID NO: 1003587 - RNA, 21 nt, Human
ccagugcagugugccagaucc

SEQ ID NO: 1003588 - RNA, 20 nt, Human
ccauugcacuccggccuggg

SEQ ID NO: 1003589 - RNA, 21 nt, Human
ccauugcacuccggccugggc

SEQ ID NO: 1003590 - RNA, 23 nt, Human
ccauugcacuccggccugggcaa

SEQ ID NO: 1003591 - RNA, 19 nt, Human
cccaaaaagccaaaaauac

SEQ ID NO: 1003592 - RNA, 23 nt, Human
cccaaagcuaaauuaacuaggac

SEQ ID NO: 1003593 - RNA, 22 nt, Human
cccaaauagucgcacaaacauc

SEQ ID NO: 1003594 - RNA, 22 nt, Human
cccaaggucaggaguucgagac

SEQ ID NO: 1003595 - RNA, 21 nt, Human
cccaaguuggggugaggaggc

SEQ ID NO: 1003596 - RNA, 22 nt, Human
cccacaguaguaguagcaaaag

SEQ ID NO: 1003597 - RNA, 24 nt, Human
ccccagaggguuucccaaguuggg

SEQ ID NO: 1003598 - RNA, 27 nt, Human
ccccguuaccgccacgacaugggucua

SEQ ID NO: 1003599 - RNA, 20 nt, Human
ccccuagaaagaaaugaaaa

SEQ ID NO: 1003600 - RNA, 20 nt, Human
ccccuggccaauccaagcac

SEQ ID NO: 1003601 - RNA, 19 nt, Human
cccuagaaagaaaugaaaa

SEQ ID NO: 1003602 - RNA, 25 nt, Human
ccgacaccgagcaguucugggcgua

SEQ ID NO: 1003603 - RNA, 24 nt, Human
ccggccugggcaaaaagagcaaaa

SEQ ID NO: 1003604 - RNA, 19 nt, Human
ccuaccacaaauguuuugg

SEQ ID NO: 1003605 - RNA, 23 nt, Human
ccuggccaacauggugaaacccc

SEQ ID NO: 1003606 - RNA, 23 nt, Human
ccuggccaacauggugaaacccc

SEQ ID NO: 1003607 - RNA, 24 nt, Human
ccuggccaacauggugaaacccca

SEQ ID NO: 1003608 - RNA, 24 nt, Human
ccuggccaacauggugaaaccccg

SEQ ID NO: 1003609 - RNA, 19 nt, Human
ccuggccaauccaagcacc

SEQ ID NO: 1003610 - RNA, 20 nt, Human
ccuguaaucccagcaccuug

SEQ ID NO: 1003611 - RNA, 22 nt, Human
ccuguaaucccagcaccuuggg

SEQ ID NO: 1003612 - RNA, 21 nt, Human
ccuguaaucccagcuacucgg

SEQ ID NO: 1003613 - RNA, 21 nt, Human
ccuguaaucccagcuacuugg

SEQ ID NO: 1003614 - RNA, 24 nt, Human
ccuugccucaaaaaaaaaaaaaaa

SEQ ID NO: 1003615 - RNA, 24 nt, Human
cgacaccgagcaguucugggcgua

SEQ ID NO: 1003616 - RNA, 20 nt, Human
cgacaugggucuacagucug

SEQ ID NO: 1003617 - RNA, 24 nt, Human
cgagaccagccuggccaacauggu

SEQ ID NO: 1003618 - RNA, 27 nt, Human
cgaggccaggcaugacaguggcucaca

SEQ ID NO: 1003619 - RNA, 21 nt, Human
cgauauuaagaaggcaaaaug

SEQ ID NO: 1003620 - RNA, 21 nt, Human
cgccucccggguagcgcuccc

SEQ ID NO: 1003621 - RNA, 24 nt, Human
cgggaggcagagguugcagugagc

SEQ ID NO: 1003622 - RNA, 27 nt, Human
cgggaggcugaggcacgaaaauugcuu

SEQ ID NO: 1003623 - RNA, 24 nt, Human
cgggaggcugaggcaggagaauca

SEQ ID NO: 1003624 - RNA, 24 nt, Human
cgggcagauuaucugaggucagga

SEQ ID NO: 1003625 - RNA, 21 nt, Human
cgguaaggguuacaggcagga

SEQ ID NO: 1003626 - RNA, 25 nt, Human
cuaaaaaaaaacaaaacaaaacaaa

SEQ ID NO: 1003627 - RNA, 20 nt, Human
cuaaggcaaaaaagaaagaa

SEQ ID NO: 1003628 - RNA, 22 nt, Human
cuaauaacagcagacauuccca

SEQ ID NO: 1003629 - RNA, 18 nt, Human
cuacagaacuuucuccuc

SEQ ID NO: 1003630 - RNA, 18 nt, Human
cuagaagcaagcaaacaa

SEQ ID NO: 1003631 - RNA, 23 nt, Human
cucacacccagaaucccagcacu

SEQ ID NO: 1003632 - RNA, 24 nt, Human
cucacacccagaaucccagcacuu

SEQ ID NO: 1003633 - RNA, 21 nt, Human
cucacaccuguaaucccagca

SEQ ID NO: 1003634 - RNA, 21 nt, Human
cucacaccuguaaucccagca

SEQ ID NO: 1003635 - RNA, 25 nt, Human
cucaugccuguaaucccagcaccuu

SEQ ID NO: 1003636 - RNA, 20 nt, Human
cucauguuccugccauccuu

SEQ ID NO: 1003637 - RNA, 20 nt, Human
cucuccacaagcuccccuca

SEQ ID NO: 1003638 - RNA, 18 nt, Human
cugcaucccagcuauaag

SEQ ID NO: 1003639 - RNA, 24 nt, Human
cugccuaauuugcauuaauugugc

SEQ ID NO: 1003640 - RNA, 22 nt, Human
cuggaaaagucuccaaagucag

SEQ ID NO: 1003641 - RNA, 24 nt, Human
cuggaaaagucuccaaagucagag

SEQ ID NO: 1003642 - RNA, 21 nt, Human
cuggaggggugggcugcuagc

SEQ ID NO: 1003643 - RNA, 23 nt, Human
cuggccaacauggugaaacccca

SEQ ID NO: 1003644 - RNA, 24 nt, Human
cugggcaauaagagcaaaacucca

SEQ ID NO: 1003645 - RNA, 21 nt, Human
cuguaaucccagcuacucggg

SEQ ID NO: 1003646 - RNA, 24 nt, Human
cugugcuucucuucgccucccggg

SEQ ID NO: 1003647 - RNA, 23 nt, Human
cuuuggaaggcugaggugggcag

SEQ ID NO: 1003648 - RNA, 19 nt, Human
gaacacagccaugaccaug

SEQ ID NO: 1003649 - RNA, 20 nt, Human
gaacacucauggaaacaggu

SEQ ID NO: 1003650 - RNA, 24 nt, Human
gaacacuugaggcuaggaguuuga

SEQ ID NO: 1003651 - RNA, 21 nt, Human
gacaccgagcaguucugggcg

SEQ ID NO: 1003652 - RNA, 26 nt, Human
gacgcaggaaccacacacugaggaca

SEQ ID NO: 1003653 - RNA, 23 nt, Human
gagaaucacuugaacccaggagg

SEQ ID NO: 1003654 - RNA, 23 nt, Human
gagaaucgcuugaacccgggagg

SEQ ID NO: 1003655 - RNA, 23 nt, Human
gagaucacaccacugcacuccag

SEQ ID NO: 1003656 - RNA, 23 nt, Human
gagauugugccacugcacuccag

SEQ ID NO: 1003657 - RNA, 21 nt, Human
gagcugggauggccccagagg

SEQ ID NO: 1003658 - RNA, 24 nt, Human
gaggcacgaaaauugcuugaaccu

SEQ ID NO: 1003659 - RNA, 23 nt, Human
gagguuggagugagccaagaucg

SEQ ID NO: 1003660 - RNA, 24 nt, Human
gauuacccaaggucaggaguucga

SEQ ID NO: 1003661 - RNA, 24 nt, Human
gauuaucugaggucaggaguucga

SEQ ID NO: 1003662 - RNA, 23 nt, Human
gcagaaacuugaagccaagaaca

SEQ ID NO: 1003663 - RNA, 22 nt, Human
gcaggagaaucacuugaaccca

SEQ ID NO: 1003664 - RNA, 24 nt, Human
gcaggccaggugcgguggcucaca

SEQ ID NO: 1003665 - RNA, 24 nt, Human
gccaacauggugaaaccccaucuc

SEQ ID NO: 1003666 - RNA, 24 nt, Human
gccaacauggugaaaccccgucuc

SEQ ID NO: 1003667 - RNA, 19 nt, Human
gccaauccaagcaccucuc

SEQ ID NO: 1003668 - RNA, 22 nt, Human
gccacugcacuccagccugggc

SEQ ID NO: 1003669 - RNA, 24 nt, Human
gccacugcacuccagccugggcaa

SEQ ID NO: 1003670 - RNA, 22 nt, Human
gccauugcacuccggccugggc

SEQ ID NO: 1003671 - RNA, 24 nt, Human
gccauugcacuccggccugggcaa

SEQ ID NO: 1003672 - RNA, 20 nt, Human
gccgagaucacaccacugca

SEQ ID NO: 1003673 - RNA, 20 nt, Human
gccuguaaucccagcuacuu

SEQ ID NO: 1003674 - RNA, 23 nt, Human
gcugagccggcuggguacaggcu

SEQ ID NO: 1003675 - RNA, 22 nt, Human
gcugggcacgguggcucaugcc

SEQ ID NO: 1003676 - RNA, 27 nt, Human
ggaauagcagaaaauagugccgaaggg

SEQ ID NO: 1003677 - RNA, 23 nt, Human
ggacaaaaggguccaggaguugc

SEQ ID NO: 1003678 - RNA, 23 nt, Human
ggacauggcuaaguugugguggc

SEQ ID NO: 1003679 - RNA, 20 nt, Human
ggagcugggauggccccaga

SEQ ID NO: 1003680 - RNA, 24 nt, Human
ggagguuggagugagccaagaucg

SEQ ID NO: 1003681 - RNA, 22 nt, Human
ggauuacccaaggucaggaguu

SEQ ID NO: 1003682 - RNA, 21 nt, Human
ggcaagagguugcagugagcc

SEQ ID NO: 1003683 - RNA, 24 nt, Human
ggcaagagguugcagugagccgag

SEQ ID NO: 1003684 - RNA, 23 nt, Human
ggcacgguggcucaugccuguaa

SEQ ID NO: 1003685 - RNA, 21 nt, Human
ggcagauuaucugaggucagg

SEQ ID NO: 1003686 - RNA, 24 nt, Human
ggcccagagacugaaauucuucua

SEQ ID NO: 1003687 - RNA, 19 nt, Human
ggcuaggaguuugagacca

SEQ ID NO: 1003688 - RNA, 21 nt, Human
ggcucacaccuguaaucccag

SEQ ID NO: 1003689 - RNA, 20 nt, Human
ggcugagccggcuggguaca

SEQ ID NO: 1003690 - RNA, 23 nt, Human
ggcugggcacgguggcucaugcc

SEQ ID NO: 1003691 - RNA, 21 nt, Human
ggcuugucagggagaggcacu

SEQ ID NO: 1003692 - RNA, 22 nt, Human
gggaaaggcuggaggggugggc

SEQ ID NO: 1003693 - RNA, 24 nt, Human
gggaggcaagagguugcagugagc

SEQ ID NO: 1003694 - RNA, 24 nt, Human
gggugugguagugcaugccuguaa

SEQ ID NO: 1003695 - RNA, 24 nt, Human
gguagugcaugccuguaaucccag

SEQ ID NO: 1003696 - RNA, 23 nt, Human
gguggcucacaccuguaauccca

SEQ ID NO: 1003697 - RNA, 24 nt, Human
gguggcucacaccuguaaucccag

SEQ ID NO: 1003698 - RNA, 23 nt, Human
gguggcucaugccuguaauccca

SEQ ID NO: 1003699 - RNA, 24 nt, Human
gguggcucaugccuguaaucccag

SEQ ID NO: 1003700 - RNA, 24 nt, Human
gguggugggcaccuguaaucccag

SEQ ID NO: 1003701 - RNA, 23 nt, Human
guaaacaaaaaggcaaaaucaga

SEQ ID NO: 1003702 - RNA, 24 nt, Human
guacacacacuggccauacaugua

SEQ ID NO: 1003703 - RNA, 24 nt, Human
guagaagaaaagauggggagaagc

SEQ ID NO: 1003704 - RNA, 22 nt, Human
gugaacacucauggaaacaggu

SEQ ID NO: 1003705 - RNA, 19 nt, Human
gugcagugugccagauccc

SEQ ID NO: 1003706 - RNA, 21 nt, Human
guggagcccacgaaaucagcc

SEQ ID NO: 1003707 - RNA, 23 nt, Human
guggugggcaccuguaaucccag

SEQ ID NO: 1003708 - RNA, 21 nt, Human
guuccacuagcuggcagguuu

SEQ ID NO: 1003709 - RNA, 19 nt, Human
guugcagugagccgagauc

SEQ ID NO: 1003710 - RNA, 24 nt, Human
guugcagugagcugagauugugcc

SEQ ID NO: 1003711 - RNA, 25 nt, Human
uaaaaaaaaacaaaacaaaacaaaa

SEQ ID NO: 1003712 - RNA, 19 nt, Human
uaaaaaacagacaggcacu

SEQ ID NO: 1003713 - RNA, 18 nt, Human
uaaaacaguauuagcagc

SEQ ID NO: 1003714 - RNA, 21 nt, Human
uaaaacuacaaaacuuggcca

SEQ ID NO: 1003715 - RNA, 22 nt, Human
uaauaauaaagugggaugugcc

SEQ ID NO: 1003716 - RNA, 22 nt, Human
uacauguaacuaugcccaggaa

SEQ ID NO: 1003717 - RNA, 23 nt, Human
uaccaguagucccagcuacucgg

SEQ ID NO: 1003718 - RNA, 24 nt, Human
uaccaguagucccagcuacucggg

SEQ ID NO: 1003719 - RNA, 23 nt, Human
uacccaaggucaggaguucgaga

SEQ ID NO: 1003720 - RNA, 24 nt, Human
uagaagaaaagauggggagaagcc

SEQ ID NO: 1003721 - RNA, 18 nt, Human
uagauaaaaaccaagaau

SEQ ID NO: 1003722 - RNA, 22 nt, Human
uagcaaaagcaaacagcccaaa

SEQ ID NO: 1003723 - RNA, 18 nt, Human
uagcaaauucacaucuag

SEQ ID NO: 1003724 - RNA, 18 nt, Human
uagcagugucaaagguua

SEQ ID NO: 1003725 - RNA, 19 nt, Human
uagcucagagggaauacag

SEQ ID NO: 1003726 - RNA, 22 nt, Human
uagcugaacuuugagcuaagcu

SEQ ID NO: 1003727 - RNA, 22 nt, Human
uagcugaacuuugagcuaagcu

SEQ ID NO: 1003728 - RNA, 23 nt, Human
uagcugaacuuugagcuaagcuc

SEQ ID NO: 1003729 - RNA, 23 nt, Human
uagcugaacuuugagcuaagcuc

SEQ ID NO: 1003730 - RNA, 22 nt, Human
uagugcaugccuguaaucccag

SEQ ID NO: 1003731 - RNA, 20 nt, Human
ucaaaaaaaaaaaaaaaaaa

SEQ ID NO: 1003732 - RNA, 22 nt, Human
ucaaaaaaaaaaaaaaaaaaaa

SEQ ID NO: 1003733 - RNA, 23 nt, Human
ucaaaaaaaaaaaaaaaaaaaaa

SEQ ID NO: 1003734 - RNA, 24 nt, Human
ucaaagcaacuaguaauuguaguc

SEQ ID NO: 1003735 - RNA, 22 nt, Human
ucacaccacugcacuccagaau

SEQ ID NO: 1003736 - RNA, 23 nt, Human
ucacaccacugcacuccagaaug

SEQ ID NO: 1003737 - RNA, 22 nt, Human
ucaccuggggaaccucucugcc

SEQ ID NO: 1003738 - RNA, 22 nt, Human
ucagaguucaaaccugcaggac

SEQ ID NO: 1003739 - RNA, 18 nt, Human
ucagaguuccaaugugaa

SEQ ID NO: 1003740 - RNA, 18 nt, Human
ucagccuucuggaagcag

SEQ ID NO: 1003741 - RNA, 18 nt, Human
ucaggaaauguuccaugg

SEQ ID NO: 1003742 - RNA, 30 nt, Human
ucaugauaggcugggcacgguggcucaugg

SEQ ID NO: 1003743 - RNA, 22 nt, Human
ucaugccuguaaucccagcacc

SEQ ID NO: 1003744 - RNA, 24 nt, Human
uccaaaagcaacacucagacccac

SEQ ID NO: 1003745 - RNA, 21 nt, Human
uccaaagucagaguucaaacc

SEQ ID NO: 1003746 - RNA, 21 nt, Human
uccaacuauaacaagcagcau

SEQ ID NO: 1003747 - RNA, 18 nt, Human
uccagggaggcuguguuc

SEQ ID NO: 1003748 - RNA, 23 nt, Human
ucccaggaaaccugauguuccag

SEQ ID NO: 1003749 - RNA, 22 nt, Human
ucccuccaacaaaaggaauaca

SEQ ID NO: 1003750 - RNA, 18 nt, Human
uccuucagucuggaaagg

SEQ ID NO: 1003751 - RNA, 18 nt, Human
ucgcuugaacccgggagg

SEQ ID NO: 1003752 - RNA, 23 nt, Human
ucgggaggcugaggcacgaaaau

SEQ ID NO: 1003753 - RNA, 25 nt, Human
ucgggaggcugaggcaggagaauca

SEQ ID NO: 1003754 - RNA, 23 nt, Human
ucgugccauugcacuccggccug

SEQ ID NO: 1003755 - RNA, 27 nt, Human
ucuaaagggucaccuucaccauuauag

SEQ ID NO: 1003756 - RNA, 19 nt, Human
ucucaaaaaaaaaaaaaaa

SEQ ID NO: 1003757 - RNA, 25 nt, Human
ucucuacuaaaaauacaaaaaaauu

SEQ ID NO: 1003758 - RNA, 22 nt, Human
ucucuacuagaaauacaaaauu

SEQ ID NO: 1003759 - RNA, 18 nt, Human
ucucuuguucuuucucac

SEQ ID NO: 1003760 - RNA, 22 nt, Human
ucugaggucaggaguucgagac

SEQ ID NO: 1003761 - RNA, 19 nt, Human
ucuucaaacccacucguuu

SEQ ID NO: 1003762 - RNA, 24 nt, Human
ugaaaacacacagaagcuggagac

SEQ ID NO: 1003763 - RNA, 25 nt, Human
ugaaccugggaggcaagagguugca

SEQ ID NO: 1003764 - RNA, 21 nt, Human
ugaagucaaccccaucaugcc

SEQ ID NO: 1003765 - RNA, 19 nt, Human
ugaccaccauggagaaacc

SEQ ID NO: 1003766 - RNA, 20 nt, Human
ugaccagagcucucaucucc

SEQ ID NO: 1003767 - RNA, 21 nt, Human
ugacugaguauauacaaggau

SEQ ID NO: 1003768 - RNA, 23 nt, Human
ugagaccagccuggccaacaugg

SEQ ID NO: 1003769 - RNA, 24 nt, Human
ugagaccagccuggccaacauggu

SEQ ID NO: 1003770 - RNA, 22 nt, Human
ugagccaagaucgugccauugc

SEQ ID NO: 1003771 - RNA, 18 nt, Human
ugagccugauggcucaag

SEQ ID NO: 1003772 - RNA, 22 nt, Human
ugagcugagauugugccacugc

SEQ ID NO: 1003773 - RNA, 24 nt, Human
ugaggacaaaaggguccaggaguu

SEQ ID NO: 1003774 - RNA, 24 nt, Human
ugaggcacgaaaauugcuugaacc

SEQ ID NO: 1003775 - RNA, 20 nt, Human
ugaggcaggagaaucacuug

SEQ ID NO: 1003776 - RNA, 24 nt, Human
ugaggcaggagaaucacuugaacc

SEQ ID NO: 1003777 - RNA, 25 nt, Human
ugaggcaggagaaucacuugaaccc

SEQ ID NO: 1003778 - RNA, 24 nt, Human
ugaggcaggagaaucgcuugaacc

SEQ ID NO: 1003779 - RNA, 25 nt, Human
ugaggcaggagaaucgcuugaaccc

SEQ ID NO: 1003780 - RNA, 24 nt, Human
ugaggugggcagaacacuugaggc

SEQ ID NO: 1003781 - RNA, 19 nt, Human
ugauaucauacaggcacaa

SEQ ID NO: 1003782 - RNA, 20 nt, Human
ugaucuggggcaggcagggc

SEQ ID NO: 1003783 - RNA, 21 nt, Human
ugcaauuaaaacaguauuagc

SEQ ID NO: 1003784 - RNA, 24 nt, Human
ugcacaucagagaacaaaacaccc

SEQ ID NO: 1003785 - RNA, 19 nt, Human
ugcacuccggccugggcaa

SEQ ID NO: 1003786 - RNA, 22 nt, Human
ugcacuccggccugggcaaaaa

SEQ ID NO: 1003787 - RNA, 21 nt, Human
ugcauggggggaaaggcugga

SEQ ID NO: 1003788 - RNA, 19 nt, Human
ugccaagcucaauggccca

SEQ ID NO: 1003789 - RNA, 24 nt, Human
ugccacugcacuccagccugggca

SEQ ID NO: 1003790 - RNA, 23 nt, Human
ugccccugcaguucccaaugcau

SEQ ID NO: 1003791 - RNA, 21 nt, Human
ugcccuggggaaggacgcagg

SEQ ID NO: 1003792 - RNA, 23 nt, Human
ugccucaaaaaaaaaaaaaaaaa

SEQ ID NO: 1003793 - RNA, 21 nt, Human
ugccuguaaucccagcaccuu

SEQ ID NO: 1003794 - RNA, 23 nt, Human
ugccuguaaucccagcaccuugg

SEQ ID NO: 1003795 - RNA, 23 nt, Human
ugccuguaaucccagcaccuugg

SEQ ID NO: 1003796 - RNA, 23 nt, Human
ugccuguaaucccagcuacuugg

SEQ ID NO: 1003797 - RNA, 24 nt, Human
ugccuguaaucccagcuacuuggg

SEQ ID NO: 1003798 - RNA, 21 nt, Human
ugcuucucuucgccucccggg

SEQ ID NO: 1003799 - RNA, 20 nt, Human
uggaaaaagaaaaucagcug

SEQ ID NO: 1003800 - RNA, 25 nt, Human
uggaaaagucuccaaagucagaguu

SEQ ID NO: 1003801 - RNA, 18 nt, Human
uggaacacagccaugacc

SEQ ID NO: 1003802 - RNA, 24 nt, Human
uggaaggaaccaauucuucugugg

SEQ ID NO: 1003803 - RNA, 19 nt, Human
uggaaggcugaggugggca

SEQ ID NO: 1003804 - RNA, 20 nt, Human
uggaaggcugaggugggcag

SEQ ID NO: 1003805 - RNA, 24 nt, Human
uggaaggcugaggugggcagaaca

SEQ ID NO: 1003806 - RNA, 23 nt, Human
uggaaugccagacuuggauuuca

SEQ ID NO: 1003807 - RNA, 25 nt, Human
uggacauggcuaaguugugguggcc

SEQ ID NO: 1003808 - RNA, 20 nt, Human
uggaggggugggcugcuagc

SEQ ID NO: 1003809 - RNA, 24 nt, Human
uggaggggugggcugcuagcuccu

SEQ ID NO: 1003810 - RNA, 24 nt, Human
uggauuacccaaggucaggaguuc

SEQ ID NO: 1003811 - RNA, 23 nt, Human
uggcagcaaaugagcaggcagaa

SEQ ID NO: 1003812 - RNA, 24 nt, Human
uggccaacauggugaaaccccauc

SEQ ID NO: 1003813 - RNA, 24 nt, Human
uggccaacauggugaaaccccguc

SEQ ID NO: 1003814 - RNA, 22 nt, Human
uggcucacacccagaaucccag

SEQ ID NO: 1003815 - RNA, 24 nt, Human
uggcucacacccagaaucccagca

SEQ ID NO: 1003816 - RNA, 21 nt, Human
uggcucacaccuguaauccca

SEQ ID NO: 1003817 - RNA, 22 nt, Human
uggcucacaccuguaaucccag

SEQ ID NO: 1003818 - RNA, 24 nt, Human
uggcucacaccuguaaucccagca

SEQ ID NO: 1003819 - RNA, 22 nt, Human
uggcucaugccuguaaucccag

SEQ ID NO: 1003820 - RNA, 24 nt, Human
uggcucaugccuguaaucccagca

SEQ ID NO: 1003821 - RNA, 21 nt, Human
ugggagaucucaacacugcca

SEQ ID NO: 1003822 - RNA, 22 nt, Human
ugggaggccaaggcgggcagau

SEQ ID NO: 1003823 - RNA, 19 nt, Human
ugggaggcugaggcaggag

SEQ ID NO: 1003824 - RNA, 23 nt, Human
ugggaggcugaggcaggagaauc

SEQ ID NO: 1003825 - RNA, 20 nt, Human
ugggauggccccagaggguu

SEQ ID NO: 1003826 - RNA, 24 nt, Human
uggggagaagccuuauuggaucua

SEQ ID NO: 1003827 - RNA, 25 nt, Human
uggguacaggcuugucagggagagg

SEQ ID NO: 1003828 - RNA, 24 nt, Human
ugguagugcaugccuguaauccca

SEQ ID NO: 1003829 - RNA, 24 nt, Human
ugguggugggcaccuguaauccca

SEQ ID NO: 1003830 - RNA, 21 nt, Human
uguggccacaaugaggucuca

SEQ ID NO: 1003831 - RNA, 18 nt, Human
uguuuuaaaaaacagaca

SEQ ID NO: 1003832 - RNA, 22 nt, Human
uuagacaucuaaaaaaaaacaa

SEQ ID NO: 1003833 - RNA, 18 nt, Human
uuagauaaaaaccaagaa

SEQ ID NO: 1003834 - RNA, 18 nt, Human
uuagcuggaugugguggu

SEQ ID NO: 1003835 - RNA, 20 nt, Human
uuagcugggugugguagugc

SEQ ID NO: 1003836 - RNA, 24 nt, Human
uuagcugggugugguagugcaugc

SEQ ID NO: 1003837 - RNA, 18 nt, Human
uucaaaccugcaggacug

SEQ ID NO: 1003838 - RNA, 28 nt, Human
uuccaaaaaaagaacauacuacuguggu

SEQ ID NO: 1003839 - RNA, 21 nt, Human
uuccaacuauaacaagcagca

SEQ ID NO: 1003840 - RNA, 25 nt, Human
uugaaccugggaggcaagagguugc

SEQ ID NO: 1003841 - RNA, 18 nt, Human
uugcagugagccgagauc

SEQ ID NO: 1003842 - RNA, 19 nt, Human
uugcagugagccgagauca

SEQ ID NO: 1003843 - RNA, 20 nt, Human
uugcagugagccgagaucac

SEQ ID NO: 1003844 - RNA, 19 nt, Human
uugcagugagcugagauug

SEQ ID NO: 1003845 - RNA, 22 nt, Human
uugcagugagcugagauugugc

SEQ ID NO: 1003846 - RNA, 18 nt, Human
uugcuugaaccugggagg

SEQ ID NO: 1003847 - RNA, 25 nt, Human
uugcuugaaccugggaggcaagagg

SEQ ID NO: 1003848 - RNA, 19 nt, Human
uuggaaggcugaggugggc

SEQ ID NO: 1003849 - RNA, 22 nt, Human
uuggagugagccaagaucgugc

SEQ ID NO: 1003850 - RNA, 24 nt, Human
uugggaggcugaggcaggagaauc

SEQ ID NO: 1003851 - RNA, 23 nt, Human
uugucagggagaggcacugggcu

SEQ ID NO: 1003852 - RNA, 23 nt, Human
uugugccacugcacuccagccug

SEQ ID NO: 1003853 - RNA, 20 nt, Human
uuuagaaccccgacaccgag

SEQ ID NO: 1003854 - RNA, 20 nt, Human
uuucuaguuuuugcccuugg

SEQ ID NO: 1003855 - RNA, 23 nt, Human
uuugugauggcugcugcccugga

SEQ ID NO: 1003856 - RNA, 22 nt, Human
aaaaggaacuguuacuauagua

SEQ ID NO: 1003857 - RNA, 19 nt, Human
aaagaaacaggccugguuu

SEQ ID NO: 1003858 - RNA, 19 nt, Human
aaaggagaugcuauuccag

SEQ ID NO: 1003859 - RNA, 18 nt, Human
aacuguucagcuuuucau

SEQ ID NO: 1003860 - RNA, 18 nt, Human
aagaggcccagggaggug

SEQ ID NO: 1003861 - RNA, 19 nt, Human
aagcauggguuaagggaga

SEQ ID NO: 1003862 - RNA, 26 nt, Human
aagccagaggcagggauuucagggga

SEQ ID NO: 1003863 - RNA, 18 nt, Human
aagcuuccugaggcagcc

SEQ ID NO: 1003864 - RNA, 21 nt, Human
aaggggccaguccauaaaggu

SEQ ID NO: 1003865 - RNA, 25 nt, Human
aaucccuuuccuccgacagucccac

SEQ ID NO: 1003866 - RNA, 18 nt, Human
acaggaaaggccuucuga

SEQ ID NO: 1003867 - RNA, 21 nt, Human
acaucacagacgucccagggc

SEQ ID NO: 1003868 - RNA, 19 nt, Human
accacugggugaaucccca

SEQ ID NO: 1003869 - RNA, 27 nt, Human
acccaguuaugaguaagaccagaacaa

SEQ ID NO: 1003870 - RNA, 20 nt, Human
acccucaaaccacccaguua

SEQ ID NO: 1003871 - RNA, 24 nt, Human
accugcagucugcccugcccuucc

SEQ ID NO: 1003872 - RNA, 22 nt, Human
acgaccccugaaaagugaacca

SEQ ID NO: 1003873 - RNA, 18 nt, Human
agaagacccuaaacagcu

SEQ ID NO: 1003874 - RNA, 21 nt, Human
agaagacccuaaacagcuguc

SEQ ID NO: 1003875 - RNA, 19 nt, Human
agacuagcaaggagggcug

SEQ ID NO: 1003876 - RNA, 18 nt, Human
agccuccacaguuggagu

SEQ ID NO: 1003877 - RNA, 26 nt, Human
aggaaaaaguaaaaaaaaagggaccc

SEQ ID NO: 1003878 - RNA, 21 nt, Human
aggaaaaccuaggagcuuagg

SEQ ID NO: 1003879 - RNA, 20 nt, Human
aggaagaagaggcccaggga

SEQ ID NO: 1003880 - RNA, 22 nt, Human
aggccugggcagaacagaaggc

SEQ ID NO: 1003881 - RNA, 19 nt, Human
agggcguggugcuugaggu

SEQ ID NO: 1003882 - RNA, 19 nt, Human
auccccgcccaccuggccg

SEQ ID NO: 1003883 - RNA, 21 nt, Human
auuccguaacccguacuaccg

SEQ ID NO: 1003884 - RNA, 18 nt, Human
auucuggagaaggauggc

SEQ ID NO: 1003885 - RNA, 26 nt, Human
caacaaggccaccugcagucugcccu

SEQ ID NO: 1003886 - RNA, 18 nt, Human
caagccacacgcuugaga

SEQ ID NO: 1003887 - RNA, 25 nt, Human
caagcuggcguaucagaucgaaaca

SEQ ID NO: 1003888 - RNA, 21 nt, Human
caagguaggaagaagaggccc

SEQ ID NO: 1003889 - RNA, 27 nt, Human
cacacgcacacaggcgcaauaucugca

SEQ ID NO: 1003890 - RNA, 21 nt, Human
cacaggaaaagcacgacuuca

SEQ ID NO: 1003891 - RNA, 23 nt, Human
cacaggugggggaguucucugag

SEQ ID NO: 1003892 - RNA, 22 nt, Human
cacauaaccaacacaauuugcu

SEQ ID NO: 1003893 - RNA, 18 nt, Human
caccucuuccuccucaag

SEQ ID NO: 1003894 - RNA, 20 nt, Human
caccucuuccuccucaauuc

SEQ ID NO: 1003895 - RNA, 24 nt, Human
caccugaucacauagccauccuaa

SEQ ID NO: 1003896 - RNA, 25 nt, Human
caccugcagucugcccugcccuucc

SEQ ID NO: 1003897 - RNA, 18 nt, Human
cacuggaguuggcccagc

SEQ ID NO: 1003898 - RNA, 18 nt, Human
cacuggaguuggcccagc

SEQ ID NO: 1003899 - RNA, 23 nt, Human
cacugguaagaaaugcagauugg

SEQ ID NO: 1003900 - RNA, 21 nt, Human
cagcaacaaggccaccugcag

SEQ ID NO: 1003901 - RNA, 21 nt, Human
cagcgauggcuucagggguga

SEQ ID NO: 1003902 - RNA, 18 nt, Human
cagcuagggcaucgacag

SEQ ID NO: 1003903 - RNA, 26 nt, Human
caggaaaagcacgacuucagucaccc

SEQ ID NO: 1003904 - RNA, 20 nt, Human
caggggaaaagaaacaggcc

SEQ ID NO: 1003905 - RNA, 24 nt, Human
cagggugggcaguggccugagccc

SEQ ID NO: 1003906 - RNA, 24 nt, Human
cagguguccuugaagcuaagcucu

SEQ ID NO: 1003907 - RNA, 18 nt, Human
cagucacauucaggagcc

SEQ ID NO: 1003908 - RNA, 26 nt, Human
caucacagacgucccagggccugggg

SEQ ID NO: 1003909 - RNA, 23 nt, Human
cauggacccgagggcugcuucuu

SEQ ID NO: 1003910 - RNA, 23 nt, Human
ccaccgggaagucccagacuagc

SEQ ID NO: 1003911 - RNA, 20 nt, Human
ccaccucuuccuccucaauu

SEQ ID NO: 1003912 - RNA, 23 nt, Human
ccaccucuuccuccucaauucuu

SEQ ID NO: 1003913 - RNA, 23 nt, Human
ccacugggugaauccccaggcau

SEQ ID NO: 1003914 - RNA, 23 nt, Human
ccagggugggcaguggccccggg

SEQ ID NO: 1003915 - RNA, 18 nt, Human
ccccagccucccagggag

SEQ ID NO: 1003916 - RNA, 18 nt, Human
ccccgcccaccuggccgg

SEQ ID NO: 1003917 - RNA, 24 nt, Human
cccuaaacagcugucuuuguuaau

SEQ ID NO: 1003918 - RNA, 18 nt, Human
cccugcccuuccuccccu

SEQ ID NO: 1003919 - RNA, 24 nt, Human
cccuggagggcguggugcuugagg

SEQ ID NO: 1003920 - RNA, 27 nt, Human
ccucacuccaccgggaagucccagaag

SEQ ID NO: 1003921 - RNA, 25 nt, Human
ccucaguggcuuugaaggcaggugu

SEQ ID NO: 1003922 - RNA, 19 nt, Human
ccucugggaacggaggcug

SEQ ID NO: 1003923 - RNA, 21 nt, Human
ccucuggggaccacuggguga

SEQ ID NO: 1003924 - RNA, 24 nt, Human
ccugggguugcagaaguggggugg

SEQ ID NO: 1003925 - RNA, 25 nt, Human
ccugugcuggcagcacacacaggaa

SEQ ID NO: 1003926 - RNA, 19 nt, Human
ccuugggaagggaagucag

SEQ ID NO: 1003927 - RNA, 21 nt, Human
cuaauucuuuaaaaaugggau

SEQ ID NO: 1003928 - RNA, 21 nt, Human
cuauugaguuagaagcuguau

SEQ ID NO: 1003929 - RNA, 22 nt, Human
cucaaaggggccaguccauaaa

SEQ ID NO: 1003930 - RNA, 24 nt, Human
cucacauaaccaacacaauuugcu

SEQ ID NO: 1003931 - RNA, 21 nt, Human
cucugauuaaaacaacacuca

SEQ ID NO: 1003932 - RNA, 22 nt, Human
cuggugggaaggccugggcaga

SEQ ID NO: 1003933 - RNA, 21 nt, Human
cuuggagcaggagggcugggu

SEQ ID NO: 1003934 - RNA, 20 nt, Human
cuuguuagaaaugcaggauc

SEQ ID NO: 1003935 - RNA, 26 nt, Human
gacuuguugccuccauggagcaccuc

SEQ ID NO: 1003936 - RNA, 21 nt, Human
gagaagcggggcccuggggag

SEQ ID NO: 1003937 - RNA, 23 nt, Human
gagaggcacaaauaaauacccau

SEQ ID NO: 1003938 - RNA, 19 nt, Human
gagcaugccaguggcagcu

SEQ ID NO: 1003939 - RNA, 22 nt, Human
gagcugggguguacggagaagc

SEQ ID NO: 1003940 - RNA, 24 nt, Human
gcagcacacacaggaaaagcacga

SEQ ID NO: 1003941 - RNA, 21 nt, Human
gcagguaaaaccacagguggg

SEQ ID NO: 1003942 - RNA, 20 nt, Human
gcaugaaauucagagacugc

SEQ ID NO: 1003943 - RNA, 22 nt, Human
gccaccucuuccuccucaauuc

SEQ ID NO: 1003944 - RNA, 25 nt, Human
gccccagccucccagggagagccag

SEQ ID NO: 1003945 - RNA, 18 nt, Human
gccugggcagaacagaag

SEQ ID NO: 1003946 - RNA, 21 nt, Human
gccugggcagaacagaaggcu

SEQ ID NO: 1003947 - RNA, 24 nt, Human
gcuagaauugcaucguaacagugu

SEQ ID NO: 1003948 - RNA, 21 nt, Human
ggagcaggagggcugggugcu

SEQ ID NO: 1003949 - RNA, 23 nt, Human
ggagcugggguguacggagaagc

SEQ ID NO: 1003950 - RNA, 19 nt, Human
ggagggucaggcaagagug

SEQ ID NO: 1003951 - RNA, 20 nt, Human
ggaguucucugagaccuagg

SEQ ID NO: 1003952 - RNA, 20 nt, Human
ggaguuggcccagcuagggg

SEQ ID NO: 1003953 - RNA, 21 nt, Human
ggcacccuggguagguguggu

SEQ ID NO: 1003954 - RNA, 20 nt, Human
ggcaguggccugagcccggc

SEQ ID NO: 1003955 - RNA, 18 nt, Human
ggccuggggcccagggcu

SEQ ID NO: 1003956 - RNA, 23 nt, Human
ggcugaaggaggcuguccaggcc

SEQ ID NO: 1003957 - RNA, 21 nt, Human
ggcugcuguggcuccaggcau

SEQ ID NO: 1003958 - RNA, 25 nt, Human
gggaaucccuggggcaucaguccac

SEQ ID NO: 1003959 - RNA, 21 nt, Human
gggagccucggagauuccugg

SEQ ID NO: 1003960 - RNA, 21 nt, Human
gggcccuggggagccucggag

SEQ ID NO: 1003961 - RNA, 24 nt, Human
ggggagccucggagauuccuggug

SEQ ID NO: 1003962 - RNA, 21 nt, Human
gggguugcagaaguggggugg

SEQ ID NO: 1003963 - RNA, 23 nt, Human
gggguugcagaagugggguggga

SEQ ID NO: 1003964 - RNA, 22 nt, Human
ggguaggugugguuagaaagcc

SEQ ID NO: 1003965 - RNA, 24 nt, Human
gguaaaaccacaggugggggaguu

SEQ ID NO: 1003966 - RNA, 18 nt, Human
ggugacagaggccgggga

SEQ ID NO: 1003967 - RNA, 20 nt, Human
gucaccuuagaugauggguu

SEQ ID NO: 1003968 - RNA, 20 nt, Human
uaaaacaacacucacauaac

SEQ ID NO: 1003969 - RNA, 22 nt, Human
uaagaaaugcagauuggcaauc

SEQ ID NO: 1003970 - RNA, 25 nt, Human
uaagaaaugcagauuggcaaucaug

SEQ ID NO: 1003971 - RNA, 21 nt, Human
uacaagaauucuggagaagga

SEQ ID NO: 1003972 - RNA, 24 nt, Human
uacaagaauucuggagaaggaugg

SEQ ID NO: 1003973 - RNA, 20 nt, Human
uaccugggguugcagaagug

SEQ ID NO: 1003974 - RNA, 19 nt, Human
uagcaaggagggcugccuc

SEQ ID NO: 1003975 - RNA, 21 nt, Human
uagcaaggagggcugccucua

SEQ ID NO: 1003976 - RNA, 18 nt, Human
uaggaaaaaguaaaaaaa

SEQ ID NO: 1003977 - RNA, 19 nt, Human
uaggaagaagaggcccagg

SEQ ID NO: 1003978 - RNA, 22 nt, Human
uauacacacgcacacaggcgca

SEQ ID NO: 1003979 - RNA, 25 nt, Human
uauacacacgcacacaggcgcaaua

SEQ ID NO: 1003980 - RNA, 18 nt, Human
uauauuugcuuuccauaa

SEQ ID NO: 1003981 - RNA, 21 nt, Human
ucacaccagcagccuccgccu

SEQ ID NO: 1003982 - RNA, 24 nt, Human
ucacuccaccgggaagucccagac

SEQ ID NO: 1003983 - RNA, 24 nt, Human
ucaggucgaguccuugggaaggga

SEQ ID NO: 1003984 - RNA, 24 nt, Human
uccaggccagggugggcaguggcc

SEQ ID NO: 1003985 - RNA, 18 nt, Human
ucccagggccuggggccc

SEQ ID NO: 1003986 - RNA, 20 nt, Human
ucccaugggagggaagccaa

SEQ ID NO: 1003987 - RNA, 18 nt, Human
ucccuggggcaucagucc

SEQ ID NO: 1003988 - RNA, 27 nt, Human
ucccuggggugggagucugggaugggg

SEQ ID NO: 1003989 - RNA, 23 nt, Human
uccugugcugggcucugaacccc

SEQ ID NO: 1003990 - RNA, 22 nt, Human
uccuugggaagggaagucagga

SEQ ID NO: 1003991 - RNA, 19 nt, Human
ucucugauuaaaacaacac

SEQ ID NO: 1003992 - RNA, 19 nt, Human
ucugcacggcugcccugga

SEQ ID NO: 1003993 - RNA, 25 nt, Human
ucuuaugggagggucaggcaagagu

SEQ ID NO: 1003994 - RNA, 24 nt, Human
ugaggcacccugcagacuucugag

SEQ ID NO: 1003995 - RNA, 20 nt, Human
ugaguaagaccagaacaauc

SEQ ID NO: 1003996 - RNA, 21 nt, Human
ugauagggucaaugacucugu

SEQ ID NO: 1003997 - RNA, 19 nt, Human
ugcaggaucucccagaucu

SEQ ID NO: 1003998 - RNA, 24 nt, Human
ugcagggaggggugcagguuaucc

SEQ ID NO: 1003999 - RNA, 20 nt, Human
ugcagucugcccugcccuuc

SEQ ID NO: 1004000 - RNA, 20 nt, Human
ugccaguggcagcuaucugu

SEQ ID NO: 1004001 - RNA, 21 nt, Human
ugcccugcccuuccuccccuc

SEQ ID NO: 1004002 - RNA, 19 nt, Human
ugcccuggagggcgugguu

SEQ ID NO: 1004003 - RNA, 18 nt, Human
ugcggcacccuggguagg

SEQ ID NO: 1004004 - RNA, 24 nt, Human
ugcuaggccaaagucuucacgggc

SEQ ID NO: 1004005 - RNA, 19 nt, Human
uggagaaggauggcggcug

SEQ ID NO: 1004006 - RNA, 21 nt, Human
uggcagcuaucuguggcaguu

SEQ ID NO: 1004007 - RNA, 20 nt, Human
uggcuccaggcaucacaccc

SEQ ID NO: 1004008 - RNA, 27 nt, Human
ugggacgaccccugaaaagugaaccaa

SEQ ID NO: 1004009 - RNA, 20 nt, Human
ugggaugggguggauaauga

SEQ ID NO: 1004010 - RNA, 22 nt, Human
ugggcaguggccugagcccggc

SEQ ID NO: 1004011 - RNA, 18 nt, Human
uggggaccacugggugaa

SEQ ID NO: 1004012 - RNA, 24 nt, Human
ugggggccagcgauggcuucaggg

SEQ ID NO: 1004013 - RNA, 23 nt, Human
ugggguguacggagaagcggggc

SEQ ID NO: 1004014 - RNA, 19 nt, Human
uguccaggccagggugggc

SEQ ID NO: 1004015 - RNA, 24 nt, Human
ugucuaacucuauccacaguucca

SEQ ID NO: 1004016 - RNA, 19 nt, Human
ugucugaacaacacaugga

SEQ ID NO: 1004017 - RNA, 21 nt, Human
ugugcuggcagcacacacagg

SEQ ID NO: 1004018 - RNA, 20 nt, Human
uuacagccuccacaguugga

SEQ ID NO: 1004019 - RNA, 19 nt, Human
uucagagacugcugugucc

SEQ ID NO: 1004020 - RNA, 20 nt, Human
uuccuggugggaaggccugg

SEQ ID NO: 1004021 - RNA, 21 nt, Human
uuccuggugggaaggccuggg

SEQ ID NO: 1004022 - RNA, 18 nt, Human
uucugccagagaaagcuc

SEQ ID NO: 1004023 - RNA, 23 nt, Human
uugaggucccuucuaccucuggg

SEQ ID NO: 1004024 - RNA, 18 nt, Human
uuuuuuuuuuuuuuuuug

SEQ ID NO: 1004025 - RNA, 22 nt, Human
uuuuuuuuuuuuuuuuuuuggc

SEQ ID NO: 1004026 - RNA, 22 nt, Human
aaagaaaucaagagaacuugaa

SEQ ID NO: 1004027 - RNA, 18 nt, Human
aaaguugggucuuuccag

SEQ ID NO: 1004028 - RNA, 23 nt, Human
aaguugggucuuuccagagagag

SEQ ID NO: 1004029 - RNA, 19 nt, Human
aaugcgcuagaaaccuagc

SEQ ID NO: 1004030 - RNA, 21 nt, Human
acacacauucacugugccccu

SEQ ID NO: 1004031 - RNA, 25 nt, Human
acagcagcccugcagugugcuuccu

SEQ ID NO: 1004032 - RNA, 19 nt, Human
accaccaucacccauuaau

SEQ ID NO: 1004033 - RNA, 22 nt, Human
acccgcucuccauuacuccccu

SEQ ID NO: 1004034 - RNA, 22 nt, Human
acuacaacacacuacuacccca

SEQ ID NO: 1004035 - RNA, 19 nt, Human
acugugccccuaccugcug

SEQ ID NO: 1004036 - RNA, 24 nt, Human
agaaaucaagagaacuugaaguuc

SEQ ID NO: 1004037 - RNA, 22 nt, Human
agacacagcaaaccuggagaaa

SEQ ID NO: 1004038 - RNA, 20 nt, Human
agauacuaguuucuuggggg

SEQ ID NO: 1004039 - RNA, 20 nt, Human
agcuggguuccuacugccuc

SEQ ID NO: 1004040 - RNA, 24 nt, Human
aggcugcauaguaagaccuggagc

SEQ ID NO: 1004041 - RNA, 23 nt, Human
aggcuggugaccuggaccccauu

SEQ ID NO: 1004042 - RNA, 18 nt, Human
agggagcccacugagggc

SEQ ID NO: 1004043 - RNA, 22 nt, Human
agggcccauccaccaagacagc

SEQ ID NO: 1004044 - RNA, 19 nt, Human
aguuucuugggggacagug

SEQ ID NO: 1004045 - RNA, 22 nt, Human
augcagaaugggccccaggagg

SEQ ID NO: 1004046 - RNA, 21 nt, Human
auucacccugucccauucccu

SEQ ID NO: 1004047 - RNA, 26 nt, Human
auucucaucccuucacacccacccac

SEQ ID NO: 1004048 - RNA, 23 nt, Human
caacacacuacuaccccaagggu

SEQ ID NO: 1004049 - RNA, 21 nt, Human
caaccccaaagggcacgaaga

SEQ ID NO: 1004050 - RNA, 18 nt, Human
caagacagcccugagagc

SEQ ID NO: 1004051 - RNA, 21 nt, Human
caagccaggcaccugcaaucc

SEQ ID NO: 1004052 - RNA, 24 nt, Human
cacacauucacugugccccuaccu

SEQ ID NO: 1004053 - RNA, 24 nt, Human
cacauucacugugccccuaccugc

SEQ ID NO: 1004054 - RNA, 21 nt, Human
caccaagacagcccugagagc

SEQ ID NO: 1004055 - RNA, 18 nt, Human
caccuaaagcaacaaggu

SEQ ID NO: 1004056 - RNA, 21 nt, Human
cacuacuaccccaaggguggg

SEQ ID NO: 1004057 - RNA, 23 nt, Human
cacuacuaccccaagggugggag

SEQ ID NO: 1004058 - RNA, 19 nt, Human
cacugcugaucucuugugg

SEQ ID NO: 1004059 - RNA, 19 nt, Human
cacugugccccuaccugcu

SEQ ID NO: 1004060 - RNA, 23 nt, Human
cacugugccccuaccugcuggag

SEQ ID NO: 1004061 - RNA, 21 nt, Human
cagaaugggccccaggaggcc

SEQ ID NO: 1004062 - RNA, 18 nt, Human
cagcccugcagugugcuu

SEQ ID NO: 1004063 - RNA, 18 nt, Human
caguacugaaaccagcac

SEQ ID NO: 1004064 - RNA, 22 nt, Human
caugcacuucugcaugcugagc

SEQ ID NO: 1004065 - RNA, 22 nt, Human
ccacagcaagccaggcaccugc

SEQ ID NO: 1004066 - RNA, 28 nt, Human
ccagcugauucccauagccacagcaagc

SEQ ID NO: 1004067 - RNA, 23 nt, Human
ccagggagcccacugagggccaa

SEQ ID NO: 1004068 - RNA, 18 nt, Human
cccagaacaacccugauc

SEQ ID NO: 1004069 - RNA, 23 nt, Human
cccauagccacagcaagccaggc

SEQ ID NO: 1004070 - RNA, 21 nt, Human
cccauagccacagcaagccuu

SEQ ID NO: 1004071 - RNA, 23 nt, Human
cccuucacacccacccacccgcu

SEQ ID NO: 1004072 - RNA, 22 nt, Human
cccuucaucaccguggcaacag

SEQ ID NO: 1004073 - RNA, 24 nt, Human
ccucaguagcagaggcaaaggagc

SEQ ID NO: 1004074 - RNA, 21 nt, Human
ccucccaacuucucucaggcu

SEQ ID NO: 1004075 - RNA, 20 nt, Human
ccucucccucuaugccucuu

SEQ ID NO: 1004076 - RNA, 19 nt, Human
ccugcaauccugacagggu

SEQ ID NO: 1004077 - RNA, 18 nt, Human
ccugcagugugcuuccuc

SEQ ID NO: 1004078 - RNA, 23 nt, Human
ccugccacuuaccuguccccacc

SEQ ID NO: 1004079 - RNA, 23 nt, Human
ccugucccauucccucccaagaa

SEQ ID NO: 1004080 - RNA, 25 nt, Human
ccuucaggaccagacugaauccuca

SEQ ID NO: 1004081 - RNA, 25 nt, Human
cgacuacaacacacuacuaccccaa

SEQ ID NO: 1004082 - RNA, 22 nt, Human
cgccucaguacugaaaccagca

SEQ ID NO: 1004083 - RNA, 25 nt, Human
cuccccccaaacccuucaggaccag

SEQ ID NO: 1004084 - RNA, 23 nt, Human
cuccccugccucaguagcagagg

SEQ ID NO: 1004085 - RNA, 21 nt, Human
cugcagugugcuuccucuccc

SEQ ID NO: 1004086 - RNA, 22 nt, Human
cuguccccaccacccucccaac

SEQ ID NO: 1004087 - RNA, 19 nt, Human
cugugccccuaccugcugg

SEQ ID NO: 1004088 - RNA, 25 nt, Human
cuucacacccacccacccgcucucc

SEQ ID NO: 1004089 - RNA, 22 nt, Human
cuucaggcugcauaguaagacc

SEQ ID NO: 1004090 - RNA, 23 nt, Human
cuucccagcugaagagguugcuc

SEQ ID NO: 1004091 - RNA, 19 nt, Human
gaaguggggagggcaugca

SEQ ID NO: 1004092 - RNA, 20 nt, Human
gacagcagugagaaaguugg

SEQ ID NO: 1004093 - RNA, 19 nt, Human
gacagugggaacaaagaaa

SEQ ID NO: 1004094 - RNA, 19 nt, Human
gacuccuuggcugagcgga

SEQ ID NO: 1004095 - RNA, 18 nt, Human
gagauucuucaaggagca

SEQ ID NO: 1004096 - RNA, 21 nt, Human
gagugaggccuucugaaguug

SEQ ID NO: 1004097 - RNA, 22 nt, Human
gccacuuaccuguccccaccac

SEQ ID NO: 1004098 - RNA, 21 nt, Human
gcccugagagcuggguuccua

SEQ ID NO: 1004099 - RNA, 20 nt, Human
gcucagcagagagcuccugg

SEQ ID NO: 1004100 - RNA, 22 nt, Human
gcugagccugugucuugcaggg

SEQ ID NO: 1004101 - RNA, 21 nt, Human
ggaaggccuauauacagagga

SEQ ID NO: 1004102 - RNA, 19 nt, Human
ggccacagcagcccugcag

SEQ ID NO: 1004103 - RNA, 24 nt, Human
ggcccauccaccaagacagcccug

SEQ ID NO: 1004104 - RNA, 19 nt, Human
gggcaaccccaaagggcaa

SEQ ID NO: 1004105 - RNA, 25 nt, Human
gggcaaccccaaagggcacgaagag

SEQ ID NO: 1004106 - RNA, 20 nt, Human
ggggaaguggggagggcaug

SEQ ID NO: 1004107 - RNA, 21 nt, Human
gugcagucaggcuggugaccu

SEQ ID NO: 1004108 - RNA, 18 nt, Human
gugugcagucaggcuggu

SEQ ID NO: 1004109 - RNA, 23 nt, Human
uaccuguccccaccacccuccca

SEQ ID NO: 1004110 - RNA, 27 nt, Human
uauauacagaggauaggcagggcuguc

SEQ ID NO: 1004111 - RNA, 24 nt, Human
ucaucccuucacacccacccaccc

SEQ ID NO: 1004112 - RNA, 19 nt, Human
ucccagaacaacccugauc

SEQ ID NO: 1004113 - RNA, 20 nt, Human
ucccauagccacagcaagcc

SEQ ID NO: 1004114 - RNA, 29 nt, Human
ucccucuaugccucuugcggccuuccccu

SEQ ID NO: 1004115 - RNA, 18 nt, Human
ugacaggacucccagaac

SEQ ID NO: 1004116 - RNA, 19 nt, Human
ugacccagggcaagcccca

SEQ ID NO: 1004117 - RNA, 20 nt, Human
ugacucaccuaaagcaacaa

SEQ ID NO: 1004118 - RNA, 21 nt, Human
ugacuuggcugacagcaguga

SEQ ID NO: 1004119 - RNA, 26 nt, Human
ugauguggccuucauacauacacaca

SEQ ID NO: 1004120 - RNA, 23 nt, Human
ugcaauccugacaggguccugcc

SEQ ID NO: 1004121 - RNA, 20 nt, Human
ugcuuuauucacccuguccc

SEQ ID NO: 1004122 - RNA, 33 nt, Human
ugcuuuauucacccugucccauucccucccaac

SEQ ID NO: 1004123 - RNA, 18 nt, Human
uggaaagaauauucucau

SEQ ID NO: 1004124 - RNA, 21 nt, Human
uggaguggguuuaagggaugg

SEQ ID NO: 1004125 - RNA, 18 nt, Human
uggcugggccagggagcc

SEQ ID NO: 1004126 - RNA, 18 nt, Human
uggcugggccagggagcc

SEQ ID NO: 1004127 - RNA, 19 nt, Human
ugggaguguguguugaucu

SEQ ID NO: 1004128 - RNA, 20 nt, Human
ugucuccacaggcaggcagg

SEQ ID NO: 1004129 - RNA, 18 nt, Human
ugugcugggcugcucagc

SEQ ID NO: 1004130 - RNA, 22 nt, Human
uguucaugcacuucugcaugcu

SEQ ID NO: 1004131 - RNA, 22 nt, Human
uuaagggauggucccacuucag

SEQ ID NO: 1004132 - RNA, 25 nt, Human
uucauacauacacacauucacugug

SEQ ID NO: 1004133 - RNA, 19 nt, Human
uucaugcacuucugcaugc

SEQ ID NO: 1004134 - RNA, 23 nt, Human
uucccaggcaugccuagcugugu

SEQ ID NO: 1004135 - RNA, 18 nt, Human
uuccuggcuggcugggcc

SEQ ID NO: 1004136 - RNA, 23 nt, Human
uucucuggcagcaggauucccag

SEQ ID NO: 1004137 - RNA, 22 nt, Human
uucugaaugcugccauuaacca

SEQ ID NO: 1004138 - RNA, 31 nt, Human
uuucuugggggacagugggaacaaagaaauu

SEQ ID NO: 1004139 - RNA, 19 nt, Human
aacauagugaauaggcucc

SEQ ID NO: 1004140 - RNA, 19 nt, Human
uuaaccgugcaaggaaacu

SEQ ID NO: 1004141 - RNA, 24 nt, Human
uuuuuuuuuuaaccgugcaaggaa

SEQ ID NO: 1004142 - RNA, 23 nt, Human
uuuuuuuuuuuuuuuuuuaaccg

SEQ ID NO: 1004143 - RNA, 20 nt, Human
aaauaaagagacacagccaa

SEQ ID NO: 1004144 - RNA, 18 nt, Human
aaggcaggaaucaggcug

SEQ ID NO: 1004145 - RNA, 18 nt, Human
acaguggcccucacuuuc

SEQ ID NO: 1004146 - RNA, 21 nt, Human
accaacucuccagcucucagu

SEQ ID NO: 1004147 - RNA, 26 nt, Human
accccugccccggaaucuucccaggc

SEQ ID NO: 1004148 - RNA, 19 nt, Human
acccuggguacuggggccc

SEQ ID NO: 1004149 - RNA, 23 nt, Human
aggcacccuccuccuggguaagg

SEQ ID NO: 1004150 - RNA, 18 nt, Human
aggcuggggcggggagag

SEQ ID NO: 1004151 - RNA, 21 nt, Human
aggcuggggcggggagagugu

SEQ ID NO: 1004152 - RNA, 19 nt, Human
caccccugccccggaaucu

SEQ ID NO: 1004153 - RNA, 23 nt, Human
cacucaugugaacguccgcucac

SEQ ID NO: 1004154 - RNA, 23 nt, Human
caguguccacuuagcccagucgu

SEQ ID NO: 1004155 - RNA, 18 nt, Human
ccacuuagcccagucgug

SEQ ID NO: 1004156 - RNA, 20 nt, Human
ccagcaggccauguuuuggg

SEQ ID NO: 1004157 - RNA, 21 nt, Human
cccaggcccagaucuccccuu

SEQ ID NO: 1004158 - RNA, 22 nt, Human
cccgccccgacugcuccagaua

SEQ ID NO: 1004159 - RNA, 21 nt, Human
ccgccccgacugcuccagaua

SEQ ID NO: 1004160 - RNA, 24 nt, Human
ccgcgcaccucucagcugggccug

SEQ ID NO: 1004161 - RNA, 19 nt, Human
ccgcuguccucgcccgcgc

SEQ ID NO: 1004162 - RNA, 19 nt, Human
ccuccuccuggguaaggca

SEQ ID NO: 1004163 - RNA, 21 nt, Human
ccuccuggguaaggcaggaau

SEQ ID NO: 1004164 - RNA, 19 nt, Human
ccucgcccgcgcaccucuc

SEQ ID NO: 1004165 - RNA, 21 nt, Human
cucgcuuaucaccaacucucc

SEQ ID NO: 1004166 - RNA, 21 nt, Human
cucugaguguucccacucccc

SEQ ID NO: 1004167 - RNA, 22 nt, Human
cuuaucaccaacucuccagcuc

SEQ ID NO: 1004168 - RNA, 26 nt, Human
gagcgggcuauagacccacucaugug

SEQ ID NO: 1004169 - RNA, 22 nt, Human
gccccggaaucuucccaggccc

SEQ ID NO: 1004170 - RNA, 18 nt, Human
gcugcagccucacccgcc

SEQ ID NO: 1004171 - RNA, 21 nt, Human
ggaaucuucccaggcccagau

SEQ ID NO: 1004172 - RNA, 23 nt, Human
ggccauguuuuggggcuggaccc

SEQ ID NO: 1004173 - RNA, 18 nt, Human
gggagggccugaugaagc

SEQ ID NO: 1004174 - RNA, 21 nt, Human
gguguguauuggaauauguga

SEQ ID NO: 1004175 - RNA, 24 nt, Human
gucucgcuuaucaccaacucucca

SEQ ID NO: 1004176 - RNA, 21 nt, Human
gugaaacugggcugcagccuc

SEQ ID NO: 1004177 - RNA, 19 nt, Human
uaaauaaagagacacagcc

SEQ ID NO: 1004178 - RNA, 21 nt, Human
uaaauaaagagacacagccaa

SEQ ID NO: 1004179 - RNA, 18 nt, Human
uauguguguaugagggca

SEQ ID NO: 1004180 - RNA, 20 nt, Human
ucagugccuagggcagggug

SEQ ID NO: 1004181 - RNA, 24 nt, Human
uccgcucaccccugccccggaauc

SEQ ID NO: 1004182 - RNA, 24 nt, Human
ugaacguccgcucaccccugcccc

SEQ ID NO: 1004183 - RNA, 22 nt, Human
ugacacaaagcugcuccuaccc

SEQ ID NO: 1004184 - RNA, 20 nt, Human
ugccccggaaucuucccagg

SEQ ID NO: 1004185 - RNA, 20 nt, Human
ugcccggagcgggcuauaga

SEQ ID NO: 1004186 - RNA, 21 nt, Human
uggggccaggcacccuccucc

SEQ ID NO: 1004187 - RNA, 20 nt, Human
uggggcuggacccagcccga

SEQ ID NO: 1004188 - RNA, 19 nt, Human
uguucuguucucuugaaca

SEQ ID NO: 1004189 - RNA, 20 nt, Human
uuggaauaugugauggggga

SEQ ID NO: 1004190 - RNA, 21 nt, Human
uuggaauaugugaugggggag

SEQ ID NO: 1004191 - RNA, 20 nt, Human
uuuuggggcuggacccagcc

SEQ ID NO: 1004192 - RNA, 18 nt, Human
aaaaaacaaaaccguaaa

SEQ ID NO: 1004193 - RNA, 22 nt, Human
aaacacaaaccaguaaaaaaca

SEQ ID NO: 1004194 - RNA, 22 nt, Human
aaacgucaggccuggagcugca

SEQ ID NO: 1004195 - RNA, 19 nt, Human
aagcaggaaggagucguug

SEQ ID NO: 1004196 - RNA, 20 nt, Human
acaaaccaguaaaaaacaaa

SEQ ID NO: 1004197 - RNA, 18 nt, Human
accugccucucacuccag

SEQ ID NO: 1004198 - RNA, 18 nt, Human
acgaggccauaaauacug

SEQ ID NO: 1004199 - RNA, 25 nt, Human
aggaaggagucguuggaagguuacc

SEQ ID NO: 1004200 - RNA, 18 nt, Human
aggagcagcucacacgug

SEQ ID NO: 1004201 - RNA, 26 nt, Human
aggagggcggcaagggagcccuaggg

SEQ ID NO: 1004202 - RNA, 19 nt, Human
aguaaaaaacaaaaccgua

SEQ ID NO: 1004203 - RNA, 22 nt, Human
caaaccaguaaaaaacaaaacc

SEQ ID NO: 1004204 - RNA, 23 nt, Human
caaaccaguaaaaaacaaaaccg

SEQ ID NO: 1004205 - RNA, 22 nt, Human
caauaagacagagacaggagca

SEQ ID NO: 1004206 - RNA, 22 nt, Human
cagguccccacaguucuucccc

SEQ ID NO: 1004207 - RNA, 19 nt, Human
cccacaguucuuccccucc

SEQ ID NO: 1004208 - RNA, 20 nt, Human
cccacaguucuuccccucca

SEQ ID NO: 1004209 - RNA, 20 nt, Human
ccccacaguucuuccccucc

SEQ ID NO: 1004210 - RNA, 22 nt, Human
ccccgaaaauauaaacacaaac

SEQ ID NO: 1004211 - RNA, 19 nt, Human
ccccggccgccaccugccu

SEQ ID NO: 1004212 - RNA, 23 nt, Human
ccuccagguguccugcuuaguuc

SEQ ID NO: 1004213 - RNA, 24 nt, Human
cugcaauaagacagagacaggagc

SEQ ID NO: 1004214 - RNA, 22 nt, Human
gaaaauauaaacacaaaccagu

SEQ ID NO: 1004215 - RNA, 24 nt, Human
gagacaggagcagcucacacgugg

SEQ ID NO: 1004216 - RNA, 20 nt, Human
gauggcuccggggguuuaga

SEQ ID NO: 1004217 - RNA, 19 nt, Human
gccccggccgccaccugcc

SEQ ID NO: 1004218 - RNA, 20 nt, Human
ggagggcggcaagggagccc

SEQ ID NO: 1004219 - RNA, 20 nt, Human
ggccuccagguccccacagu

SEQ ID NO: 1004220 - RNA, 21 nt, Human
ggggaaagcagggugucggca

SEQ ID NO: 1004221 - RNA, 24 nt, Human
uaaacacaaaccaguaaaaaacaa

SEQ ID NO: 1004222 - RNA, 18 nt, Human
uaagacagagacaggagc

SEQ ID NO: 1004223 - RNA, 21 nt, Human
uccccgaaaauauaaacacaa

SEQ ID NO: 1004224 - RNA, 25 nt, Human
ucggcagcaagauggcuccgggggu

SEQ ID NO: 1004225 - RNA, 21 nt, Human
aaagauaaauuagggcucaaa

SEQ ID NO: 1004226 - RNA, 18 nt, Human
aaaggugaagcagaaguc

SEQ ID NO: 1004227 - RNA, 24 nt, Human
aaguagccagagguaaagcgagcu

SEQ ID NO: 1004228 - RNA, 20 nt, Human
agagaaguuggagucagagg

SEQ ID NO: 1004229 - RNA, 23 nt, Human
aggagcuggggcucagguggggg

SEQ ID NO: 1004230 - RNA, 25 nt, Human
aggcagggaagcggggagggagggu

SEQ ID NO: 1004231 - RNA, 21 nt, Human
aggcagggaggaugcaugggg

SEQ ID NO: 1004232 - RNA, 23 nt, Human
aggcagggaggaugcauggggcc

SEQ ID NO: 1004233 - RNA, 19 nt, Human
agggaagcggggagggagg

SEQ ID NO: 1004234 - RNA, 19 nt, Human
aggggugaccucucuuccu

SEQ ID NO: 1004235 - RNA, 21 nt, Human
aggguggacgcggcggcgggg

SEQ ID NO: 1004236 - RNA, 23 nt, Human
agguaggagcuggggcucaggug

SEQ ID NO: 1004237 - RNA, 24 nt, Human
agguaggagcuggggcucaggugg

SEQ ID NO: 1004238 - RNA, 21 nt, Human
cagcucagagggaggggucaa

SEQ ID NO: 1004239 - RNA, 19 nt, Human
caggugggggguuaaaggu

SEQ ID NO: 1004240 - RNA, 21 nt, Human
cggcaggggcugaggggagug

SEQ ID NO: 1004241 - RNA, 21 nt, Human
cucauagagggugaaagagaa

SEQ ID NO: 1004242 - RNA, 19 nt, Human
cugacgcuguggggggugg

SEQ ID NO: 1004243 - RNA, 20 nt, Human
gaagcggggagggaggguag

SEQ ID NO: 1004244 - RNA, 22 nt, Human
gacaggugggaagcgaugggag

SEQ ID NO: 1004245 - RNA, 22 nt, Human
gaccucucuuccucacaggcac

SEQ ID NO: 1004246 - RNA, 18 nt, Human
gcaaaguuaaaggugcgg

SEQ ID NO: 1004247 - RNA, 20 nt, Human
gccuuggagggaaagcgggg

SEQ ID NO: 1004248 - RNA, 20 nt, Human
gcggcggcgguggcacgagc

SEQ ID NO: 1004249 - RNA, 19 nt, Human
gcugugggggguggggggu

SEQ ID NO: 1004250 - RNA, 20 nt, Human
ggaagcggggagggagggua

SEQ ID NO: 1004251 - RNA, 23 nt, Human
ggcacgagcgcggggagcugcgg

SEQ ID NO: 1004252 - RNA, 20 nt, Human
ggcggagcacggucccugcg

SEQ ID NO: 1004253 - RNA, 19 nt, Human
gggccuagcggaucaaagg

SEQ ID NO: 1004254 - RNA, 21 nt, Human
gggcugaggggagugaggcag

SEQ ID NO: 1004255 - RNA, 18 nt, Human
gggggcagaggucaaagg

SEQ ID NO: 1004256 - RNA, 24 nt, Human
ggggggccuagcggaucaaagguc

SEQ ID NO: 1004257 - RNA, 19 nt, Human
gggguuaaaggugaggcaa

SEQ ID NO: 1004258 - RNA, 21 nt, Human
guggacgcggcggcgguggca

SEQ ID NO: 1004259 - RNA, 22 nt, Human
gugggaaucagagagaagcugg

SEQ ID NO: 1004260 - RNA, 18 nt, Human
uaaagauaaauuagggcu

SEQ ID NO: 1004261 - RNA, 22 nt, Human
uaaagcgagcuccaaagguauu

SEQ ID NO: 1004262 - RNA, 24 nt, Human
uaagcuaaggucggcaggggcuga

SEQ ID NO: 1004263 - RNA, 21 nt, Human
uagagguaaaaugggauucau

SEQ ID NO: 1004264 - RNA, 23 nt, Human
uagccagagguaaagcgagcucc

SEQ ID NO: 1004265 - RNA, 18 nt, Human
ucaaagagaaguuggggu

SEQ ID NO: 1004266 - RNA, 24 nt, Human
ucagcggugaagugcagcucagag

SEQ ID NO: 1004267 - RNA, 22 nt, Human
ucuaggguucagagaugggggg

SEQ ID NO: 1004268 - RNA, 21 nt, Human
ugaaagagaaguuggagucag

SEQ ID NO: 1004269 - RNA, 18 nt, Human
ugaaaggugaggcaaggu

SEQ ID NO: 1004270 - RNA, 19 nt, Human
ugaagcagaagucaggggu

SEQ ID NO: 1004271 - RNA, 20 nt, Human
ugaagcagaagucaggggug

SEQ ID NO: 1004272 - RNA, 24 nt, Human
ugaccucucuuccucacaggcacc

SEQ ID NO: 1004273 - RNA, 20 nt, Human
ugcagguguagaaguaaaau

SEQ ID NO: 1004274 - RNA, 25 nt, Human
ugcggcggcggcgaggguggaagau

SEQ ID NO: 1004275 - RNA, 21 nt, Human
uggaagagcucaaggggguua

SEQ ID NO: 1004276 - RNA, 19 nt, Human
uguggggggugggggguga

SEQ ID NO: 1004277 - RNA, 19 nt, Human
uuggaagagcucaaggggg

SEQ ID NO: 1004278 - RNA, 24 nt, Human
uuggagucagaggggauucagaga

SEQ ID NO: 1004279 - RNA, 19 nt, Human
uuuauugagggugaggcag

SEQ ID NO: 1004280 - RNA, 20 nt, Human
uuuuuuuuuuuuuuuuccau

SEQ ID NO: 1004281 - RNA, 24 nt, Human
uuuuuuuuuuuuuuuuuuuccaug

SEQ ID NO: 1004282 - RNA, 27 nt, Human
accccacacccuuccuuccugucacag

SEQ ID NO: 1004283 - RNA, 23 nt, Human
aucacaauauguucuccgcaguc

SEQ ID NO: 1004284 - RNA, 18 nt, Human
caauauguucuccgcagu

SEQ ID NO: 1004285 - RNA, 22 nt, Human
caccagucccugcugaccccac

SEQ ID NO: 1004286 - RNA, 21 nt, Human
ccagucccugcugaccccaca

SEQ ID NO: 1004287 - RNA, 26 nt, Human
cccugcugaccccacacccuuccuuc

SEQ ID NO: 1004288 - RNA, 23 nt, Human
gaacaucacaauauguucuccgc

SEQ ID NO: 1004289 - RNA, 22 nt, Human
gcaccagucccugcugacccca

SEQ ID NO: 1004290 - RNA, 18 nt, Human
uucuccgcagucccggag

SEQ ID NO: 1004291 - RNA, 22 nt, Human
uuugaaaauucuggacccauuu

SEQ ID NO: 1004292 - RNA, 18 nt, Human
aaaaaacaauccccccca

SEQ ID NO: 1004293 - RNA, 18 nt, Human
aaaaaacaauccccccca

SEQ ID NO: 1004294 - RNA, 27 nt, Human
aaaaaacaaucccccccaccccaacau

SEQ ID NO: 1004295 - RNA, 21 nt, Human
aaaaacaaucccccccacccc

SEQ ID NO: 1004296 - RNA, 20 nt, Human
aaacacgacguggcuucucc

SEQ ID NO: 1004297 - RNA, 23 nt, Human
aaacacgacguggcuucucccac

SEQ ID NO: 1004298 - RNA, 18 nt, Human
acaaaaaacaaucccccc

SEQ ID NO: 1004299 - RNA, 20 nt, Human
acaaaaaacaauccccccca

SEQ ID NO: 1004300 - RNA, 23 nt, Human
acuccauuaacuuucucaucacu

SEQ ID NO: 1004301 - RNA, 19 nt, Human
agacaaaugugaacagugc

SEQ ID NO: 1004302 - RNA, 20 nt, Human
aggaaaaaggaaaucuucau

SEQ ID NO: 1004303 - RNA, 23 nt, Human
aggaaaucuucauuauccauguc

SEQ ID NO: 1004304 - RNA, 24 nt, Human
aggagagaaaauaagaauaaauau

SEQ ID NO: 1004305 - RNA, 26 nt, Human
caaaaaacaaucccccccaccccaac

SEQ ID NO: 1004306 - RNA, 19 nt, Human
caccugcagcaugcaguuc

SEQ ID NO: 1004307 - RNA, 20 nt, Human
cacggugguccgggcagagc

SEQ ID NO: 1004308 - RNA, 20 nt, Human
cagugcaacgaacaucaccc

SEQ ID NO: 1004309 - RNA, 19 nt, Human
ccacugccgccgcacgcgc

SEQ ID NO: 1004310 - RNA, 23 nt, Human
ccaucuuaacuaaugaauauccu

SEQ ID NO: 1004311 - RNA, 27 nt, Human
ccgacaugugaaacacgacguggcuuu

SEQ ID NO: 1004312 - RNA, 20 nt, Human
ccgcacgcgcagggaccgcg

SEQ ID NO: 1004313 - RNA, 22 nt, Human
cgccgcacgcgcagggaccgcg

SEQ ID NO: 1004314 - RNA, 20 nt, Human
cgcggcccgcgcccuuccug

SEQ ID NO: 1004315 - RNA, 22 nt, Human
cucugaaaggagagaaaauaag

SEQ ID NO: 1004316 - RNA, 21 nt, Human
cuuucucaucacuccuauuua

SEQ ID NO: 1004317 - RNA, 27 nt, Human
gaaaaaggaaaucuucauuauccaugu

SEQ ID NO: 1004318 - RNA, 22 nt, Human
gcgcacucgugggcggaagggc

SEQ ID NO: 1004319 - RNA, 21 nt, Human
ggaaaucuucauuauccaugu

SEQ ID NO: 1004320 - RNA, 21 nt, Human
uaaaauacuccauuaacuuuc

SEQ ID NO: 1004321 - RNA, 22 nt, Human
uaaugaauauccuaucacccua

SEQ ID NO: 1004322 - RNA, 22 nt, Human
uacaaaaaacaaucccccccac

SEQ ID NO: 1004323 - RNA, 22 nt, Human
uacaacacuaaaaaaaaauaaa

SEQ ID NO: 1004324 - RNA, 19 nt, Human
ucccccccaccccaacauc

SEQ ID NO: 1004325 - RNA, 20 nt, Human
ucccugggaggaccgcgagc

SEQ ID NO: 1004326 - RNA, 20 nt, Human
ucgcccggagccgugcacgg

SEQ ID NO: 1004327 - RNA, 18 nt, Human
ucgugggcggaagggcag

SEQ ID NO: 1004328 - RNA, 23 nt, Human
ucuuuuagcgaugaagacuuuua

SEQ ID NO: 1004329 - RNA, 27 nt, Human
ugaaaauaaaauacuccauuaacuuuc

SEQ ID NO: 1004330 - RNA, 18 nt, Human
ugaauauccuaucacccu

SEQ ID NO: 1004331 - RNA, 24 nt, Human
ugaauauccuaucacccuaauuuu

SEQ ID NO: 1004332 - RNA, 21 nt, Human
ugggcggaagggcaggacacc

SEQ ID NO: 1004333 - RNA, 24 nt, Human
uuccugcaggacgucaaugggaau

SEQ ID NO: 1004334 - RNA, 20 nt, Human
uuuacaaaaaacaauccccc

SEQ ID NO: 1004335 - RNA, 20 nt, Human
uuuagagacaaaugugaaca

SEQ ID NO: 1004336 - RNA, 25 nt, Human
uuuugguuauguuaacaaaaauuac

SEQ ID NO: 1004337 - RNA, 22 nt, Human
uuuuuguucucuaucacuccua

SEQ ID NO: 1004338 - RNA, 25 nt, Human
aaaaaaaaaaaauacucaaaugugc

SEQ ID NO: 1004339 - RNA, 21 nt, Human
aaaaaacgucuaucagaagaa

SEQ ID NO: 1004340 - RNA, 22 nt, Human
aaaaacaucacugagaaugaag

SEQ ID NO: 1004341 - RNA, 22 nt, Human
aaaaaugugagaugucacaaag

SEQ ID NO: 1004342 - RNA, 21 nt, Human
aaaauggugaaacccugucuc

SEQ ID NO: 1004343 - RNA, 18 nt, Human
aaacagagucucauaaga

SEQ ID NO: 1004344 - RNA, 21 nt, Human
aaagaauuccacuauucauca

SEQ ID NO: 1004345 - RNA, 21 nt, Human
aaaucugacagaaaaaugaca

SEQ ID NO: 1004346 - RNA, 22 nt, Human
aaaucuuccaguuaaaagagac

SEQ ID NO: 1004347 - RNA, 21 nt, Human
aacagaguugagacccugucu

SEQ ID NO: 1004348 - RNA, 20 nt, Human
aacauagcaaaacucugucu

SEQ ID NO: 1004349 - RNA, 21 nt, Human
aacauagcaaaacucugucuc

SEQ ID NO: 1004350 - RNA, 24 nt, Human
aaccaggaggcagagguugcagug

SEQ ID NO: 1004351 - RNA, 19 nt, Human
aagccaagaaauuuaaaau

SEQ ID NO: 1004352 - RNA, 18 nt, Human
aaucgcuugagcccggga

SEQ ID NO: 1004353 - RNA, 18 nt, Human
acaagcaaaaaacaucac

SEQ ID NO: 1004354 - RNA, 19 nt, Human
acaagcaaaugcugacaca

SEQ ID NO: 1004355 - RNA, 20 nt, Human
acaagucuguccugaaagcc

SEQ ID NO: 1004356 - RNA, 18 nt, Human
acaccacugcacuccagc

SEQ ID NO: 1004357 - RNA, 20 nt, Human
acaccacugcacuccagccu

SEQ ID NO: 1004358 - RNA, 24 nt, Human
acagagcgagacuccaucucaaaa

SEQ ID NO: 1004359 - RNA, 19 nt, Human
accacugcacuccagccug

SEQ ID NO: 1004360 - RNA, 22 nt, Human
accauaaaaaaaacugacucaa

SEQ ID NO: 1004361 - RNA, 18 nt, Human
acccugucucuacuaaaa

SEQ ID NO: 1004362 - RNA, 23 nt, Human
accuguaguccuagcuacucagg

SEQ ID NO: 1004363 - RNA, 19 nt, Human
acuacugagaauacaagga

SEQ ID NO: 1004364 - RNA, 24 nt, Human
acugcacuccagccuagaugacag

SEQ ID NO: 1004365 - RNA, 26 nt, Human
acugcacuccagccuagaugacagag

SEQ ID NO: 1004366 - RNA, 24 nt, Human
acugcacuccagccuggguaacag

SEQ ID NO: 1004367 - RNA, 26 nt, Human
acugcacuccagccuggguaacagag

SEQ ID NO: 1004368 - RNA, 25 nt, Human
agaaaacaaugucaacuaaaaauac

SEQ ID NO: 1004369 - RNA, 18 nt, Human
agaaagccaaauaaauaa

SEQ ID NO: 1004370 - RNA, 24 nt, Human
agaaauuuaaaauauagagaacaa

SEQ ID NO: 1004371 - RNA, 20 nt, Human
agacagaggcugcagugagc

SEQ ID NO: 1004372 - RNA, 24 nt, Human
agacagaggcugcagugagcugag

SEQ ID NO: 1004373 - RNA, 23 nt, Human
agaggcugcagugagcugagauc

SEQ ID NO: 1004374 - RNA, 24 nt, Human
agaggcugcagugagcugagauca

SEQ ID NO: 1004375 - RNA, 22 nt, Human
agagguugcagugagcugagau

SEQ ID NO: 1004376 - RNA, 23 nt, Human
agagguugcagugagcugagauc

SEQ ID NO: 1004377 - RNA, 24 nt, Human
agagguugcagugagcugagaucg

SEQ ID NO: 1004378 - RNA, 18 nt, Human
agaguuggcuuauuuuuu

SEQ ID NO: 1004379 - RNA, 24 nt, Human
agauguuacccagucuucuucugu

SEQ ID NO: 1004380 - RNA, 19 nt, Human
agcaaauuugaaaauagac

SEQ ID NO: 1004381 - RNA, 24 nt, Human
agcacuuugggaggcugagguggg

SEQ ID NO: 1004382 - RNA, 22 nt, Human
agccuggccaacauagcaaaac

SEQ ID NO: 1004383 - RNA, 24 nt, Human
agccuggccaacauagcaaaacuc

SEQ ID NO: 1004384 - RNA, 20 nt, Human
agccuggccaacauagcaag

SEQ ID NO: 1004385 - RNA, 21 nt, Human
agcugggcugugguggugcau

SEQ ID NO: 1004386 - RNA, 24 nt, Human
agcugggcugugguggugcaugcc

SEQ ID NO: 1004387 - RNA, 23 nt, Human
aggaaaauagaauauaagccaag

SEQ ID NO: 1004388 - RNA, 21 nt, Human
aggaaauacggaagcuaaaag

SEQ ID NO: 1004389 - RNA, 19 nt, Human
aggaggcugaggcaagaga

SEQ ID NO: 1004390 - RNA, 22 nt, Human
aggaggcugaggcacaauaauc

SEQ ID NO: 1004391 - RNA, 18 nt, Human
aggcaagagaaucgcuug

SEQ ID NO: 1004392 - RNA, 24 nt, Human
aggcaagagaaucgcuugagcccg

SEQ ID NO: 1004393 - RNA, 24 nt, Human
aggcacgguggcucaugccuguaa

SEQ ID NO: 1004394 - RNA, 20 nt, Human
aggcagagguugcagugagc

SEQ ID NO: 1004395 - RNA, 24 nt, Human
aggcagagguugcagugagcugag

SEQ ID NO: 1004396 - RNA, 20 nt, Human
aggccgaggcggguggauca

SEQ ID NO: 1004397 - RNA, 24 nt, Human
aggcggguggaucaugaggucagg

SEQ ID NO: 1004398 - RNA, 24 nt, Human
aggcugaggcaagagaaucgcuug

SEQ ID NO: 1004399 - RNA, 24 nt, Human
aggcugaggcacaauaaucgcuug

SEQ ID NO: 1004400 - RNA, 24 nt, Human
aggcugagguggguggaucacuug

SEQ ID NO: 1004401 - RNA, 23 nt, Human
agguggguggaucacuugaggcc

SEQ ID NO: 1004402 - RNA, 24 nt, Human
agguguaguggccuguaaucccag

SEQ ID NO: 1004403 - RNA, 19 nt, Human
aguggacaccaaacacuga

SEQ ID NO: 1004404 - RNA, 19 nt, Human
aguuuuuuaaaucuucuga

SEQ ID NO: 1004405 - RNA, 20 nt, Human
aguuuuuuaaaucuucugag

SEQ ID NO: 1004406 - RNA, 22 nt, Human
auaaaauagugauauaucaagc

SEQ ID NO: 1004407 - RNA, 20 nt, Human
auaacagauuacucuucuca

SEQ ID NO: 1004408 - RNA, 20 nt, Human
auacaaaaaaaaaaaagacu

SEQ ID NO: 1004409 - RNA, 26 nt, Human
auacaaaaaaaaaaaagacugucauc

SEQ ID NO: 1004410 - RNA, 20 nt, Human
aucacaccacugcacuccag

SEQ ID NO: 1004411 - RNA, 24 nt, Human
aucgcaccacugcacuccagccug

SEQ ID NO: 1004412 - RNA, 19 nt, Human
augccuguaaucccagcac

SEQ ID NO: 1004413 - RNA, 18 nt, Human
augguuuauuucuagaug

SEQ ID NO: 1004414 - RNA, 24 nt, Human
caaaauggugaaacccugucucua

SEQ ID NO: 1004415 - RNA, 24 nt, Human
caacauagcaaaacucugucucua

SEQ ID NO: 1004416 - RNA, 23 nt, Human
caacuaaaaauacuacaagcaaa

SEQ ID NO: 1004417 - RNA, 21 nt, Human
cacaccacugcacuccagccu

SEQ ID NO: 1004418 - RNA, 23 nt, Human
cacagacaacaacaggugaacac

SEQ ID NO: 1004419 - RNA, 24 nt, Human
caccuguaguccuagcuacucagg

SEQ ID NO: 1004420 - RNA, 28 nt, Human
cacgaaaacauuaaucaaaagacagcug

SEQ ID NO: 1004421 - RNA, 24 nt, Human
cacuccagccuagaugacagagcg

SEQ ID NO: 1004422 - RNA, 22 nt, Human
cacuccagccuggguaacagag

SEQ ID NO: 1004423 - RNA, 18 nt, Human
cacugcacuccagccuag

SEQ ID NO: 1004424 - RNA, 19 nt, Human
cacugcacuccagccuaga

SEQ ID NO: 1004425 - RNA, 19 nt, Human
cacugcacuccagccuaga

SEQ ID NO: 1004426 - RNA, 22 nt, Human
cacugcacuccagccuagauga

SEQ ID NO: 1004427 - RNA, 19 nt, Human
cacugcacuccagccuggg

SEQ ID NO: 1004428 - RNA, 21 nt, Human
cacugcacuccagccugggua

SEQ ID NO: 1004429 - RNA, 22 nt, Human
cacugcacuccagccuggguaa

SEQ ID NO: 1004430 - RNA, 23 nt, Human
cacugcacuccagccuggguaac

SEQ ID NO: 1004431 - RNA, 24 nt, Human
cacugcacuccagccuggguaaca

SEQ ID NO: 1004432 - RNA, 18 nt, Human
cacuuuggaaggccgagg

SEQ ID NO: 1004433 - RNA, 19 nt, Human
cagacaacaacaggugaac

SEQ ID NO: 1004434 - RNA, 24 nt, Human
cagcacuuuggaaggccgaggcgg

SEQ ID NO: 1004435 - RNA, 24 nt, Human
cagcacuuugggaggcugaggugg

SEQ ID NO: 1004436 - RNA, 18 nt, Human
caggauacacugcaccca

SEQ ID NO: 1004437 - RNA, 25 nt, Human
cauaacagauuacucuucucaugag

SEQ ID NO: 1004438 - RNA, 24 nt, Human
caugccuguaaucccagcacuuug

SEQ ID NO: 1004439 - RNA, 19 nt, Human
cauuuucuuuuuggugguu

SEQ ID NO: 1004440 - RNA, 19 nt, Human
ccacugcacuccagccuag

SEQ ID NO: 1004441 - RNA, 20 nt, Human
ccacugcacuccagccuaga

SEQ ID NO: 1004442 - RNA, 21 nt, Human
ccacugcacuccagccuagau

SEQ ID NO: 1004443 - RNA, 23 nt, Human
ccacugcacuccagccuagauga

SEQ ID NO: 1004444 - RNA, 25 nt, Human
ccacugcacuccagccuagaugaca

SEQ ID NO: 1004445 - RNA, 20 nt, Human
ccacugcacuccagccuggg

SEQ ID NO: 1004446 - RNA, 20 nt, Human
ccacugcacuccagccuggg

SEQ ID NO: 1004447 - RNA, 21 nt, Human
ccacugcacuccagccugggu

SEQ ID NO: 1004448 - RNA, 22 nt, Human
ccacugcacuccagccugggua

SEQ ID NO: 1004449 - RNA, 23 nt, Human
ccacugcacuccagccuggguaa

SEQ ID NO: 1004450 - RNA, 24 nt, Human
ccacugcacuccagccuggguaac

SEQ ID NO: 1004451 - RNA, 25 nt, Human
ccacugcacuccagccuggguaaca

SEQ ID NO: 1004452 - RNA, 19 nt, Human
ccagaugcuugcacuaacc

SEQ ID NO: 1004453 - RNA, 25 nt, Human
ccaucucaaaaaaaaaaaaaaaaaa

SEQ ID NO: 1004454 - RNA, 22 nt, Human
ccuagaugacagagcgagacuc

SEQ ID NO: 1004455 - RNA, 19 nt, Human
ccuaucagaaccacucuaa

SEQ ID NO: 1004456 - RNA, 23 nt, Human
ccucacugcugcuacucuuuucu

SEQ ID NO: 1004457 - RNA, 22 nt, Human
ccuggccaaaauggugaaaccc

SEQ ID NO: 1004458 - RNA, 24 nt, Human
ccuggccaaaauggugaaacccug

SEQ ID NO: 1004459 - RNA, 20 nt, Human
ccuggccaacauagcaaaac

SEQ ID NO: 1004460 - RNA, 20 nt, Human
ccuguaaucccagcacuuug

SEQ ID NO: 1004461 - RNA, 19 nt, Human
ccuguaaucccagcuacuc

SEQ ID NO: 1004462 - RNA, 21 nt, Human
ccuguaaucccagcuacucag

SEQ ID NO: 1004463 - RNA, 18 nt, Human
cgacacagacaacaacag

SEQ ID NO: 1004464 - RNA, 30 nt, Human
cgacacagacaacaacaggugaacacuccu

SEQ ID NO: 1004465 - RNA, 19 nt, Human
cgaccggaaguccugagag

SEQ ID NO: 1004466 - RNA, 24 nt, Human
cgagaccauccuggccaaaauggu

SEQ ID NO: 1004467 - RNA, 22 nt, Human
cgaggcggguggaucaugaggu

SEQ ID NO: 1004468 - RNA, 24 nt, Human
cgaggcggguggaucaugagguca

SEQ ID NO: 1004469 - RNA, 21 nt, Human
cgcaccacugcacuccagccu

SEQ ID NO: 1004470 - RNA, 19 nt, Human
cgcccacagccaucauggc

SEQ ID NO: 1004471 - RNA, 19 nt, Human
cuacaagcaaaaaacauca

SEQ ID NO: 1004472 - RNA, 19 nt, Human
cuauucaucaaaauuuuca

SEQ ID NO: 1004473 - RNA, 22 nt, Human
cucagaagaggaggaaaaaaac

SEQ ID NO: 1004474 - RNA, 19 nt, Human
cucaguggacaccaaacac

SEQ ID NO: 1004475 - RNA, 23 nt, Human
cucaugccuguaaucccagcacu

SEQ ID NO: 1004476 - RNA, 24 nt, Human
cucaugccuguaaucccagcacuu

SEQ ID NO: 1004477 - RNA, 19 nt, Human
cuccaucucaaaaaaaaaa

SEQ ID NO: 1004478 - RNA, 20 nt, Human
cucuuccucacugcugcuac

SEQ ID NO: 1004479 - RNA, 19 nt, Human
cugcagugagcugagauca

SEQ ID NO: 1004480 - RNA, 20 nt, Human
cugcagugagcugagaucac

SEQ ID NO: 1004481 - RNA, 24 nt, Human
cuggccaaaauggugaaacccugu

SEQ ID NO: 1004482 - RNA, 18 nt, Human
cuggcugacugaggauaa

SEQ ID NO: 1004483 - RNA, 28 nt, Human
cuuccucacugcugcuacucuuuucugg

SEQ ID NO: 1004484 - RNA, 20 nt, Human
cuugaacacugaaaucaaug

SEQ ID NO: 1004485 - RNA, 19 nt, Human
gaaacccugucucuacuaa

SEQ ID NO: 1004486 - RNA, 20 nt, Human
gacacagacaacaacaggug

SEQ ID NO: 1004487 - RNA, 18 nt, Human
gacgacacagacaacaac

SEQ ID NO: 1004488 - RNA, 22 nt, Human
gacgacacagacaacaacaggu

SEQ ID NO: 1004489 - RNA, 23 nt, Human
gagaaucgcuugagcccgggaga

SEQ ID NO: 1004490 - RNA, 23 nt, Human
gaggcggguggaucaugagguca

SEQ ID NO: 1004491 - RNA, 18 nt, Human
gaggcugcagugagcuga

SEQ ID NO: 1004492 - RNA, 22 nt, Human
gagguggguggaucacuugagg

SEQ ID NO: 1004493 - RNA, 18 nt, Human
gaucacuugaggccagga

SEQ ID NO: 1004494 - RNA, 24 nt, Human
gaucacuugaggccaggaguucaa

SEQ ID NO: 1004495 - RNA, 22 nt, Human
gcaaaugacaacucaguggaca

SEQ ID NO: 1004496 - RNA, 20 nt, Human
gcaccacugcacuccagccu

SEQ ID NO: 1004497 - RNA, 24 nt, Human
gcacuccagccuagaugacagagc

SEQ ID NO: 1004498 - RNA, 23 nt, Human
gcacuccagccuggguaacagag

SEQ ID NO: 1004499 - RNA, 24 nt, Human
gccaaaauggugaaacccugucuc

SEQ ID NO: 1004500 - RNA, 24 nt, Human
gccaacauagcaaaacucugucuc

SEQ ID NO: 1004501 - RNA, 22 nt, Human
gccaggcacgguggcucaugcc

SEQ ID NO: 1004502 - RNA, 22 nt, Human
gcccagaugcuugcacuaaccg

SEQ ID NO: 1004503 - RNA, 24 nt, Human
gcccgggagacagaggcugcagug

SEQ ID NO: 1004504 - RNA, 19 nt, Human
gccuguaaucccagcacuu

SEQ ID NO: 1004505 - RNA, 20 nt, Human
gcugagaucacaccacugca

SEQ ID NO: 1004506 - RNA, 20 nt, Human
gcugagaucgcaccacugca

SEQ ID NO: 1004507 - RNA, 22 nt, Human
ggaggcagagguugcagugagc

SEQ ID NO: 1004508 - RNA, 19 nt, Human
ggccaaaauggugaaaccc

SEQ ID NO: 1004509 - RNA, 23 nt, Human
ggccuguaaucccagcacuuugg

SEQ ID NO: 1004510 - RNA, 24 nt, Human
ggccuguaaucccagcacuuuggg

SEQ ID NO: 1004511 - RNA, 23 nt, Human
ggcggguggaucaugaggucagg

SEQ ID NO: 1004512 - RNA, 18 nt, Human
ggcuaaaaacuaaagaua

SEQ ID NO: 1004513 - RNA, 24 nt, Human
ggcugugguggugcaugccuguaa

SEQ ID NO: 1004514 - RNA, 24 nt, Human
gggcguguuggcaugcaccuguag

SEQ ID NO: 1004515 - RNA, 21 nt, Human
gguggaucaugaggucaggag

SEQ ID NO: 1004516 - RNA, 23 nt, Human
gguggcucaugccuguaauccca

SEQ ID NO: 1004517 - RNA, 24 nt, Human
gguggcucaugccuguaaucccag

SEQ ID NO: 1004518 - RNA, 24 nt, Human
gguggugcaugccuguaaucccag

SEQ ID NO: 1004519 - RNA, 22 nt, Human
gguguaguggccuguaauccca

SEQ ID NO: 1004520 - RNA, 23 nt, Human
gguguaguggccuguaaucccag

SEQ ID NO: 1004521 - RNA, 19 nt, Human
gucucuacuaaaaauacaa

SEQ ID NO: 1004522 - RNA, 22 nt, Human
guggaucacuugaggccaggag

SEQ ID NO: 1004523 - RNA, 23 nt, Human
guggcucaugccuguaaucccag

SEQ ID NO: 1004524 - RNA, 23 nt, Human
guggugcaugccuguaaucccag

SEQ ID NO: 1004525 - RNA, 24 nt, Human
guguaguggccuguaaucccagca

SEQ ID NO: 1004526 - RNA, 19 nt, Human
guugcagugagcugagauc

SEQ ID NO: 1004527 - RNA, 21 nt, Human
guugcagugagcugagaucgc

SEQ ID NO: 1004528 - RNA, 24 nt, Human
guuggcaugcaccuguaguccuag

SEQ ID NO: 1004529 - RNA, 25 nt, Human
uaaaaauacucaaaugaggccaguc

SEQ ID NO: 1004530 - RNA, 20 nt, Human
uaaaagagacuaucagaaug

SEQ ID NO: 1004531 - RNA, 19 nt, Human
uaaaaggaaacugcugaac

SEQ ID NO: 1004532 - RNA, 19 nt, Human
uaacaguagaauagaaaag

SEQ ID NO: 1004533 - RNA, 22 nt, Human
uaacauacaaaaaaaaaaaaga

SEQ ID NO: 1004534 - RNA, 19 nt, Human
uaauuuauugauggguuuu

SEQ ID NO: 1004535 - RNA, 25 nt, Human
uacaaaaaaaaaaaagacugucauc

SEQ ID NO: 1004536 - RNA, 28 nt, Human
uacagaaagauuauguagaagauaacua

SEQ ID NO: 1004537 - RNA, 22 nt, Human
uacauacagugaccaaaauuua

SEQ ID NO: 1004538 - RNA, 20 nt, Human
uacuaccuucuucagacauu

SEQ ID NO: 1004539 - RNA, 18 nt, Human
uacuguaucuuuuuuacc

SEQ ID NO: 1004540 - RNA, 24 nt, Human
uagaaauuaggcugaaaaccucua

SEQ ID NO: 1004541 - RNA, 22 nt, Human
uaugaauuggagcaaauuccaa

SEQ ID NO: 1004542 - RNA, 22 nt, Human
ucaaaaaaaaaaaaaaaaaaaa

SEQ ID NO: 1004543 - RNA, 23 nt, Human
ucaaaaaaaaaaaaaaaaaaaaa

SEQ ID NO: 1004544 - RNA, 25 nt, Human
ucaaaaaaaaaaaaaaaaaaaaaau

SEQ ID NO: 1004545 - RNA, 21 nt, Human
ucaaaaccagccuggccaaca

SEQ ID NO: 1004546 - RNA, 22 nt, Human
ucacugcugcuacucuuuucug

SEQ ID NO: 1004547 - RNA, 24 nt, Human
ucagaaccacucuaaaagaacuaa

SEQ ID NO: 1004548 - RNA, 18 nt, Human
ucaugaggucaggagauc

SEQ ID NO: 1004549 - RNA, 24 nt, Human
ucaugaggucaggagaucgagacc

SEQ ID NO: 1004550 - RNA, 23 nt, Human
uccagccuagaugacagagcgag

SEQ ID NO: 1004551 - RNA, 24 nt, Human
uccagccuagaugacagagcgaga

SEQ ID NO: 1004552 - RNA, 23 nt, Human
uccaucucaaaaaaaaaaaaaaa

SEQ ID NO: 1004553 - RNA, 23 nt, Human
ucgcaccacugcacuccagccug

SEQ ID NO: 1004554 - RNA, 24 nt, Human
ucgcuugagcccgggagacagagg

SEQ ID NO: 1004555 - RNA, 22 nt, Human
ucucuacuaaaaauacaaaaaa

SEQ ID NO: 1004556 - RNA, 25 nt, Human
ucucuacuaaaaauauuuuuuaaaa

SEQ ID NO: 1004557 - RNA, 22 nt, Human
ugaacauuuaacccaacaacuc

SEQ ID NO: 1004558 - RNA, 19 nt, Human
ugaauuggagcaaauucca

SEQ ID NO: 1004559 - RNA, 19 nt, Human
ugacaaagacuuuaaaaga

SEQ ID NO: 1004560 - RNA, 22 nt, Human
ugacacacuacauacagggaaa

SEQ ID NO: 1004561 - RNA, 21 nt, Human
ugaccaaaauuuaaaaggugg

SEQ ID NO: 1004562 - RNA, 19 nt, Human
ugaccaugaacauuuaacc

SEQ ID NO: 1004563 - RNA, 20 nt, Human
ugaccaugaacauuuaaccc

SEQ ID NO: 1004564 - RNA, 21 nt, Human
ugaccaugaacauuuaaccca

SEQ ID NO: 1004565 - RNA, 22 nt, Human
ugagaaggauauaaaaguuugu

SEQ ID NO: 1004566 - RNA, 21 nt, Human
ugagaauacaaggaugagcug

SEQ ID NO: 1004567 - RNA, 23 nt, Human
ugagaauacaaggaugagcugca

SEQ ID NO: 1004568 - RNA, 18 nt, Human
ugagaucacaccacugca

SEQ ID NO: 1004569 - RNA, 24 nt, Human
ugagaucacaccacugcacuccag

SEQ ID NO: 1004570 - RNA, 24 nt, Human
ugagaucgcaccacugcacuccag

SEQ ID NO: 1004571 - RNA, 24 nt, Human
ugagcccgggagacagaggcugca

SEQ ID NO: 1004572 - RNA, 22 nt, Human
ugagcugagaucgcaccacugc

SEQ ID NO: 1004573 - RNA, 21 nt, Human
ugagcugauauuaagaccuca

SEQ ID NO: 1004574 - RNA, 19 nt, Human
ugaggaaaaugcaugagga

SEQ ID NO: 1004575 - RNA, 20 nt, Human
ugaggcaagagaaucgcuug

SEQ ID NO: 1004576 - RNA, 24 nt, Human
ugaggcaagagaaucgcuugagcc

SEQ ID NO: 1004577 - RNA, 25 nt, Human
ugaggcaagagaaucgcuugagccc

SEQ ID NO: 1004578 - RNA, 23 nt, Human
ugaggccaggaguucaaaaccag

SEQ ID NO: 1004579 - RNA, 24 nt, Human
ugaggccaggcacgguggcucaug

SEQ ID NO: 1004580 - RNA, 23 nt, Human
ugagguggguggaucacuugagg

SEQ ID NO: 1004581 - RNA, 24 nt, Human
ugagguggguggaucacuugaggc

SEQ ID NO: 1004582 - RNA, 26 nt, Human
ugagguggguggaucacuugaggcca

SEQ ID NO: 1004583 - RNA, 23 nt, Human
ugccuguaaucccagcacuuugg

SEQ ID NO: 1004584 - RNA, 24 nt, Human
ugccuguaaucccagcuacucagg

SEQ ID NO: 1004585 - RNA, 19 nt, Human
ugccuugaguguccucagc

SEQ ID NO: 1004586 - RNA, 24 nt, Human
ugcgcugguccuaauucacauuca

SEQ ID NO: 1004587 - RNA, 24 nt, Human
uggaaggccgaggcggguggauca

SEQ ID NO: 1004588 - RNA, 24 nt, Human
uggaucacuugaggccaggaguuc

SEQ ID NO: 1004589 - RNA, 27 nt, Human
uggaucacuugaggccaggaguucaaa

SEQ ID NO: 1004590 - RNA, 24 nt, Human
uggccaaaauggugaaacccuguc

SEQ ID NO: 1004591 - RNA, 19 nt, Human
uggcccagaugcuugcacu

SEQ ID NO: 1004592 - RNA, 24 nt, Human
uggcucaugccuguaaucccagca

SEQ ID NO: 1004593 - RNA, 19 nt, Human
uggcuuauuuuuuguaugg

SEQ ID NO: 1004594 - RNA, 20 nt, Human
uggcuuauuuuuuguauggu

SEQ ID NO: 1004595 - RNA, 19 nt, Human
ugggacgacacagacaaca

SEQ ID NO: 1004596 - RNA, 20 nt, Human
ugggaggcugaggugggugg

SEQ ID NO: 1004597 - RNA, 23 nt, Human
ugggaggcugagguggguggauc

SEQ ID NO: 1004598 - RNA, 24 nt, Human
ugggaggcugagguggguggauca

SEQ ID NO: 1004599 - RNA, 24 nt, Human
uggguggaucacuugaggccagga

SEQ ID NO: 1004600 - RNA, 21 nt, Human
uggugcaugccuguaauccca

SEQ ID NO: 1004601 - RNA, 22 nt, Human
uggugcaugccuguaaucccag

SEQ ID NO: 1004602 - RNA, 24 nt, Human
ugguggugcaugccuguaauccca

SEQ ID NO: 1004603 - RNA, 20 nt, Human
uguagcaggcuacacaccag

SEQ ID NO: 1004604 - RNA, 19 nt, Human
ugucaacuaaaaauacuac

SEQ ID NO: 1004605 - RNA, 24 nt, Human
uguuggcaugcaccuguaguccua

SEQ ID NO: 1004606 - RNA, 28 nt, Human
uuaaaagagacauuauaaaaauacucaa

SEQ ID NO: 1004607 - RNA, 22 nt, Human
uuagccgggcguguuggcaugc

SEQ ID NO: 1004608 - RNA, 21 nt, Human
uuagcugggcugugguggugc

SEQ ID NO: 1004609 - RNA, 25 nt, Human
uuagcugggcugugguggugcaugc

SEQ ID NO: 1004610 - RNA, 18 nt, Human
uuccagacuaccuaacug

SEQ ID NO: 1004611 - RNA, 22 nt, Human
uucuuuuuggugguucugugga

SEQ ID NO: 1004612 - RNA, 18 nt, Human
uugcagugagcugagauc

SEQ ID NO: 1004613 - RNA, 19 nt, Human
uugcagugagcugagaucg

SEQ ID NO: 1004614 - RNA, 22 nt, Human
uugcagugagcugagaucgcac

SEQ ID NO: 1004615 - RNA, 25 nt, Human
uuggaaggccgaggcggguggauca

SEQ ID NO: 1004616 - RNA, 21 nt, Human
uuggauacaaauaaaacagag

SEQ ID NO: 1004617 - RNA, 25 nt, Human
uugggaggcugagguggguggauca

SEQ ID NO: 1004618 - RNA, 19 nt, Human
uuuacuguaucuuuuuuac

SEQ ID NO: 1004619 - RNA, 26 nt, Human
uuuacuguaucuuuuuuaccauugaa

SEQ ID NO: 1004620 - RNA, 20 nt, Human
uuuauccauuuccaaugaga

SEQ ID NO: 1004621 - RNA, 23 nt, Human
uuugcauuuucucccauuuuugu

SEQ ID NO: 1004622 - RNA, 23 nt, Human
aaaaaaaaaaaaaagggaaaaag

SEQ ID NO: 1004623 - RNA, 21 nt, Human
aaaaaaaccuucuaucauauc

SEQ ID NO: 1004624 - RNA, 18 nt, Human
aaaaaagcuaaucuuaga

SEQ ID NO: 1004625 - RNA, 24 nt, Human
aaaaaauccauuuuuuucuucuca

SEQ ID NO: 1004626 - RNA, 24 nt, Human
aaaacaaaaaacaacaacaaaaaa

SEQ ID NO: 1004627 - RNA, 23 nt, Human
aaaacaaaaacaaaaaacaacaa

SEQ ID NO: 1004628 - RNA, 26 nt, Human
aaaacaaaaacaaaaacaaaaaacaa

SEQ ID NO: 1004629 - RNA, 27 nt, Human
aaaacaaaagcagaagccagagucaga

SEQ ID NO: 1004630 - RNA, 24 nt, Human
aaaacagaccagaguuugugcaga

SEQ ID NO: 1004631 - RNA, 20 nt, Human
aaaauacaaaaacauuagcc

SEQ ID NO: 1004632 - RNA, 25 nt, Human
aaacaaaaaacaacaacaaaaaaca

SEQ ID NO: 1004633 - RNA, 26 nt, Human
aaacaaaaaacaacaacaaaaaacaa

SEQ ID NO: 1004634 - RNA, 23 nt, Human
aaacaaaaacaaaaaacaacaac

SEQ ID NO: 1004635 - RNA, 25 nt, Human
aaacaaaaacaaaaaacaacaacaa

SEQ ID NO: 1004636 - RNA, 19 nt, Human
aaacaaaagcagaagccag

SEQ ID NO: 1004637 - RNA, 20 nt, Human
aaacaaaagcagaagccaga

SEQ ID NO: 1004638 - RNA, 26 nt, Human
aaacaaacaaaccaacacuggagggg

SEQ ID NO: 1004639 - RNA, 23 nt, Human
aaacaaaguaagccacaacccau

SEQ ID NO: 1004640 - RNA, 20 nt, Human
aaacaaaugcaaaaacaaua

SEQ ID NO: 1004641 - RNA, 25 nt, Human
aaacaaaugcaaaaacaauaccccu

SEQ ID NO: 1004642 - RNA, 22 nt, Human
aaacaacaacaaaaaacaacaa

SEQ ID NO: 1004643 - RNA, 26 nt, Human
aaacaacaacaaaaaacaacaacaaa

SEQ ID NO: 1004644 - RNA, 21 nt, Human
aaacaacaagaucuuagaacc

SEQ ID NO: 1004645 - RNA, 25 nt, Human
aaacagaccagaguuugugcagaca

SEQ ID NO: 1004646 - RNA, 21 nt, Human
aacaaaaaacaacaacaaaaa

SEQ ID NO: 1004647 - RNA, 22 nt, Human
aacaaaaacaaaaaacaacaac

SEQ ID NO: 1004648 - RNA, 22 nt, Human
aacaaacaaaccaacacuggag

SEQ ID NO: 1004649 - RNA, 20 nt, Human
aacaaacacaauuccaaaca

SEQ ID NO: 1004650 - RNA, 19 nt, Human
aacaacaaaaaacaacaac

SEQ ID NO: 1004651 - RNA, 22 nt, Human
aacaacaacaaaaaacaacaac

SEQ ID NO: 1004652 - RNA, 27 nt, Human
aacaacaacaaaaaacaacaacaaaaa

SEQ ID NO: 1004653 - RNA, 27 nt, Human
aacaacaucacagguaagacugagaaa

SEQ ID NO: 1004654 - RNA, 19 nt, Human
aacauggcaaaaccccauc

SEQ ID NO: 1004655 - RNA, 21 nt, Human
aacauggcaaaaccccaucuc

SEQ ID NO: 1004656 - RNA, 21 nt, Human
aacauggcaaaaccccaucuc

SEQ ID NO: 1004657 - RNA, 24 nt, Human
aacucacgugcgccaaacauccga

SEQ ID NO: 1004658 - RNA, 20 nt, Human
aagaagaaaagaagaacaga

SEQ ID NO: 1004659 - RNA, 19 nt, Human
aagaccaccacuauuaacu

SEQ ID NO: 1004660 - RNA, 23 nt, Human
aagaccaccacuauuaacugaaa

SEQ ID NO: 1004661 - RNA, 23 nt, Human
aagagugggacuccgucucaaaa

SEQ ID NO: 1004662 - RNA, 20 nt, Human
aagauaaauaauuaucuccu

SEQ ID NO: 1004663 - RNA, 23 nt, Human
aagcagaagccagaggggacccc

SEQ ID NO: 1004664 - RNA, 22 nt, Human
aagcagaagccagagucagauu

SEQ ID NO: 1004665 - RNA, 26 nt, Human
aauaaaaugcaaauuuggaacccagu

SEQ ID NO: 1004666 - RNA, 24 nt, Human
aaucaccugaacccuggagucaga

SEQ ID NO: 1004667 - RNA, 22 nt, Human
aaucccuuaaaacaaaagcaga

SEQ ID NO: 1004668 - RNA, 20 nt, Human
aaugcaaaccauuaaugccu

SEQ ID NO: 1004669 - RNA, 19 nt, Human
acaacaaaaaacaacaaca

SEQ ID NO: 1004670 - RNA, 21 nt, Human
acaagagugggacuccgucuc

SEQ ID NO: 1004671 - RNA, 24 nt, Human
acaagagugggacuccgucucaaa

SEQ ID NO: 1004672 - RNA, 24 nt, Human
acacaaaaauugcacaaagccaaa

SEQ ID NO: 1004673 - RNA, 23 nt, Human
acacaaaccgugcaaaacagacc

SEQ ID NO: 1004674 - RNA, 23 nt, Human
acacuggguuuugucaucagggc

SEQ ID NO: 1004675 - RNA, 22 nt, Human
acagaaaucccaggaacucaaa

SEQ ID NO: 1004676 - RNA, 21 nt, Human
accaacuaccuagguauuaca

SEQ ID NO: 1004677 - RNA, 21 nt, Human
accauggacuccuucuccagu

SEQ ID NO: 1004678 - RNA, 24 nt, Human
accccaucucuauuaaaaauacaa

SEQ ID NO: 1004679 - RNA, 24 nt, Human
accugaggucaggaguucaagacc

SEQ ID NO: 1004680 - RNA, 24 nt, Human
acgguuaaaaaaaaaaaaaaggga

SEQ ID NO: 1004681 - RNA, 20 nt, Human
acuccccuuuucugcuccua

SEQ ID NO: 1004682 - RNA, 21 nt, Human
acugcuaccacuaccacaggc

SEQ ID NO: 1004683 - RNA, 26 nt, Human
agaaaaacaaaaacaaaaacaaaaaa

SEQ ID NO: 1004684 - RNA, 22 nt, Human
agacaagaguccaaauuuuagg

SEQ ID NO: 1004685 - RNA, 28 nt, Human
agacagaagccugugccuccaucggggg

SEQ ID NO: 1004686 - RNA, 25 nt, Human
agacagaauacacaggaucaucuuc

SEQ ID NO: 1004687 - RNA, 19 nt, Human
agagacagaauacacagga

SEQ ID NO: 1004688 - RNA, 22 nt, Human
agagcaggcuugacccuggggu

SEQ ID NO: 1004689 - RNA, 19 nt, Human
agaggcuagaaagaaggcc

SEQ ID NO: 1004690 - RNA, 25 nt, Human
agagggcuguccaggcugauccuuu

SEQ ID NO: 1004691 - RNA, 22 nt, Human
agagguuguggggagccgagau

SEQ ID NO: 1004692 - RNA, 23 nt, Human
agagguuguggggagccgagauu

SEQ ID NO: 1004693 - RNA, 24 nt, Human
agagguuguggggagccgagauug

SEQ ID NO: 1004694 - RNA, 23 nt, Human
agauuugaccauacucccucugu

SEQ ID NO: 1004695 - RNA, 24 nt, Human
agcacuuugggaggccgaggcggg

SEQ ID NO: 1004696 - RNA, 18 nt, Human
agccuggccaacauggca

SEQ ID NO: 1004697 - RNA, 24 nt, Human
agccuggccaacauggcaaaaccc

SEQ ID NO: 1004698 - RNA, 21 nt, Human
aggcaaaauaaucaccugaac

SEQ ID NO: 1004699 - RNA, 21 nt, Human
aggccccuggguagaggggag

SEQ ID NO: 1004700 - RNA, 21 nt, Human
aggccgaggcgggcggaucac

SEQ ID NO: 1004701 - RNA, 22 nt, Human
aggcgggcggaucaccugaggu

SEQ ID NO: 1004702 - RNA, 26 nt, Human
aggcgggcggaucaccugaggucagg

SEQ ID NO: 1004703 - RNA, 20 nt, Human
aggcuauaaccauuauugca

SEQ ID NO: 1004704 - RNA, 23 nt, Human
agggcagccccucuuuucaggcc

SEQ ID NO: 1004705 - RNA, 21 nt, Human
aggggcagagagaguagaggc

SEQ ID NO: 1004706 - RNA, 26 nt, Human
aguaaaguuacacaaaaauugcacaa

SEQ ID NO: 1004707 - RNA, 24 nt, Human
agucagagguuguggggagccgag

SEQ ID NO: 1004708 - RNA, 18 nt, Human
aguggaaugaugaggcug

SEQ ID NO: 1004709 - RNA, 20 nt, Human
auaaagggaaaaaaaggcac

SEQ ID NO: 1004710 - RNA, 18 nt, Human
auacacaggaucaucuuc

SEQ ID NO: 1004711 - RNA, 24 nt, Human
auaggucuccccuuuuuauuucag

SEQ ID NO: 1004712 - RNA, 23 nt, Human
aucaaccaacuaccuagguauua

SEQ ID NO: 1004713 - RNA, 24 nt, Human
aucaccugaggucaggaguucaag

SEQ ID NO: 1004714 - RNA, 20 nt, Human
aucaguguaaaucaaaugcu

SEQ ID NO: 1004715 - RNA, 24 nt, Human
aucccuuaaaacaaaagcagaagc

SEQ ID NO: 1004716 - RNA, 22 nt, Human
augaacauaacacauucuucca

SEQ ID NO: 1004717 - RNA, 25 nt, Human
augauacaggcacacagcgacaccg

SEQ ID NO: 1004718 - RNA, 20 nt, Human
augauuccagagacaaaggg

SEQ ID NO: 1004719 - RNA, 21 nt, Human
auugcacaaccaauaagcacu

SEQ ID NO: 1004720 - RNA, 23 nt, Human
auuucugcugcuaaagcugaaaa

SEQ ID NO: 1004721 - RNA, 21 nt, Human
auuugcucuuauuaaacaggu

SEQ ID NO: 1004722 - RNA, 25 nt, Human
caaaaacaaaaacaaaaaacaacaa

SEQ ID NO: 1004723 - RNA, 22 nt, Human
caaaaauugcacaaagccaaag

SEQ ID NO: 1004724 - RNA, 24 nt, Human
caaaauaaucaccugaacccugga

SEQ ID NO: 1004725 - RNA, 26 nt, Human
caaaauaauuccuaagaacacuauga

SEQ ID NO: 1004726 - RNA, 22 nt, Human
caaacaccacaccacuagucca

SEQ ID NO: 1004727 - RNA, 21 nt, Human
caaaccgugcaaaacagacca

SEQ ID NO: 1004728 - RNA, 21 nt, Human
caaauuuacaguaccaaaaua

SEQ ID NO: 1004729 - RNA, 23 nt, Human
caacaaaaaacaacaacaaaaaa

SEQ ID NO: 1004730 - RNA, 19 nt, Human
caacaacaaaaaacaacaa

SEQ ID NO: 1004731 - RNA, 23 nt, Human
caagaaaaaaauaaggagauuaa

SEQ ID NO: 1004732 - RNA, 30 nt, Human
caaguaaaguuacacaaaaauugcacaaaa

SEQ ID NO: 1004733 - RNA, 20 nt, Human
caccacaccacuaguccaac

SEQ ID NO: 1004734 - RNA, 21 nt, Human
caccacaccacuaguccaaca

SEQ ID NO: 1004735 - RNA, 22 nt, Human
caccacaccacuaguccaacaa

SEQ ID NO: 1004736 - RNA, 24 nt, Human
caccacuaguccaacaaaaagaaa

SEQ ID NO: 1004737 - RNA, 23 nt, Human
caccugaggucaggaguucaaga

SEQ ID NO: 1004738 - RNA, 24 nt, Human
cacgucuguaaucccagcacuuug

SEQ ID NO: 1004739 - RNA, 24 nt, Human
cagaaaauaacuuggacaaaccac

SEQ ID NO: 1004740 - RNA, 19 nt, Human
cagagcacacucaggaauu

SEQ ID NO: 1004741 - RNA, 20 nt, Human
cagagugaugugaaccugug

SEQ ID NO: 1004742 - RNA, 22 nt, Human
cagcacuuugggaggccgaggc

SEQ ID NO: 1004743 - RNA, 24 nt, Human
cagcacuuugggaggccgaggcgg

SEQ ID NO: 1004744 - RNA, 20 nt, Human
cagccccucuuuucaggccc

SEQ ID NO: 1004745 - RNA, 21 nt, Human
cagcuugugucugccuuggcg

SEQ ID NO: 1004746 - RNA, 19 nt, Human
caggcccaggagaggggcc

SEQ ID NO: 1004747 - RNA, 23 nt, Human
caggccccuggguagaggggagg

SEQ ID NO: 1004748 - RNA, 23 nt, Human
caguaccaaaauaaugcauuuau

SEQ ID NO: 1004749 - RNA, 22 nt, Human
cagucuucuaagaaaagguaau

SEQ ID NO: 1004750 - RNA, 23 nt, Human
cagugccauagaggcuagaaaga

SEQ ID NO: 1004751 - RNA, 19 nt, Human
cauacaaacucacgugcgc

SEQ ID NO: 1004752 - RNA, 21 nt, Human
cauccaacccuguggcagagc

SEQ ID NO: 1004753 - RNA, 21 nt, Human
cauuaaaacgcauuugggagu

SEQ ID NO: 1004754 - RNA, 24 nt, Human
cauucagagacugucuccaaacac

SEQ ID NO: 1004755 - RNA, 23 nt, Human
ccaagcuguuuccugaaagaacu

SEQ ID NO: 1004756 - RNA, 19 nt, Human
ccacuacacucuaguuggg

SEQ ID NO: 1004757 - RNA, 19 nt, Human
ccacuacacucuaguuggg

SEQ ID NO: 1004758 - RNA, 20 nt, Human
ccacuacacucuaguugggc

SEQ ID NO: 1004759 - RNA, 23 nt, Human
ccacuacacucuaguugggcgac

SEQ ID NO: 1004760 - RNA, 24 nt, Human
ccacuacacucuaguugggcgaca

SEQ ID NO: 1004761 - RNA, 24 nt, Human
ccagagguaaggaaucacacaaau

SEQ ID NO: 1004762 - RNA, 18 nt, Human
ccaguaguaauaaacuca

SEQ ID NO: 1004763 - RNA, 22 nt, Human
ccaucccauuccccaagaaccu

SEQ ID NO: 1004764 - RNA, 22 nt, Human
ccaucuugaugaaaaaagcuaa

SEQ ID NO: 1004765 - RNA, 19 nt, Human
ccccagggacuugcccaag

SEQ ID NO: 1004766 - RNA, 21 nt, Human
ccccaguuagcacuccccuuu

SEQ ID NO: 1004767 - RNA, 20 nt, Human
cccccagcugucucccuaga

SEQ ID NO: 1004768 - RNA, 20 nt, Human
ccccucagugccauagaggc

SEQ ID NO: 1004769 - RNA, 19 nt, Human
ccccucuuuucaggccccu

SEQ ID NO: 1004770 - RNA, 20 nt, Human
ccccuggguagaggggaggu

SEQ ID NO: 1004771 - RNA, 22 nt, Human
cccguggagacuccuucuuacc

SEQ ID NO: 1004772 - RNA, 20 nt, Human
cccucuagcauguuuccuga

SEQ ID NO: 1004773 - RNA, 19 nt, Human
ccuagccagccccagggac

SEQ ID NO: 1004774 - RNA, 25 nt, Human
ccucuagcucgaauuuuucucuuca

SEQ ID NO: 1004775 - RNA, 22 nt, Human
ccucuugcugacaaaacagagc

SEQ ID NO: 1004776 - RNA, 20 nt, Human
ccucuuuucaggccccuggg

SEQ ID NO: 1004777 - RNA, 24 nt, Human
ccuggccaacauggcaaaacccca

SEQ ID NO: 1004778 - RNA, 20 nt, Human
cgagacagaagccugugccu

SEQ ID NO: 1004779 - RNA, 24 nt, Human
cgagauugugccacuacacucuag

SEQ ID NO: 1004780 - RNA, 20 nt, Human
cgaggcgggcggaucaccug

SEQ ID NO: 1004781 - RNA, 24 nt, Human
cgaggcgggcggaucaccugaggu

SEQ ID NO: 1004782 - RNA, 19 nt, Human
cgaugaaacuaguggaggc

SEQ ID NO: 1004783 - RNA, 19 nt, Human
cgccaaacauccgagacag

SEQ ID NO: 1004784 - RNA, 26 nt, Human
cgccuuugggggagggagcuaggcau

SEQ ID NO: 1004785 - RNA, 24 nt, Human
cggaucaccugaggucaggaguuc

SEQ ID NO: 1004786 - RNA, 23 nt, Human
cgucuguaaucccagcacuuugg

SEQ ID NO: 1004787 - RNA, 27 nt, Human
cgugcaaaacagaccagaguuugugca

SEQ ID NO: 1004788 - RNA, 23 nt, Human
cuaccccuccccuuaaaaagaac

SEQ ID NO: 1004789 - RNA, 25 nt, Human
cuacuccuccaccagccggcgcacc

SEQ ID NO: 1004790 - RNA, 24 nt, Human
cucacgucuguaaucccagcacuu

SEQ ID NO: 1004791 - RNA, 19 nt, Human
cuccgucucaaaaaaaaaa

SEQ ID NO: 1004792 - RNA, 19 nt, Human
cuccugggccugccgggcu

SEQ ID NO: 1004793 - RNA, 24 nt, Human
cuccugggccugccgggcuuuucc

SEQ ID NO: 1004794 - RNA, 20 nt, Human
cucuauuaaaaauacaaaaa

SEQ ID NO: 1004795 - RNA, 22 nt, Human
cucucugcaucucucuccuccc

SEQ ID NO: 1004796 - RNA, 21 nt, Human
cucugggguuuggagagaauu

SEQ ID NO: 1004797 - RNA, 28 nt, Human
cugaaacgucacacuacuaggaccgcac

SEQ ID NO: 1004798 - RNA, 22 nt, Human
cugaagccacccucuagcaugu

SEQ ID NO: 1004799 - RNA, 18 nt, Human
cugaaugaccaucacuga

SEQ ID NO: 1004800 - RNA, 21 nt, Human
cugauccuaaacaacaucaca

SEQ ID NO: 1004801 - RNA, 24 nt, Human
cugauccuaaacaacaucacaggu

SEQ ID NO: 1004802 - RNA, 25 nt, Human
cugcuaaagcugaaaaagauugcau

SEQ ID NO: 1004803 - RNA, 22 nt, Human
cugcuucuuuggccccaauuuu

SEQ ID NO: 1004804 - RNA, 23 nt, Human
cuggccaacauggcaaaacccca

SEQ ID NO: 1004805 - RNA, 21 nt, Human
cuguaaucccagcacuuuggg

SEQ ID NO: 1004806 - RNA, 18 nt, Human
cuucugaagccacccucu

SEQ ID NO: 1004807 - RNA, 20 nt, Human
cuuggacuugacagggaagu

SEQ ID NO: 1004808 - RNA, 20 nt, Human
cuuuuuacuccacuugguua

SEQ ID NO: 1004809 - RNA, 27 nt, Human
gaacauaacacauucuuccauguccuu

SEQ ID NO: 1004810 - RNA, 22 nt, Human
gacaccauggacuccuucucca

SEQ ID NO: 1004811 - RNA, 27 nt, Human
gacuacuccuccaccagccggcgcacc

SEQ ID NO: 1004812 - RNA, 19 nt, Human
gagacugucuccaaacacc

SEQ ID NO: 1004813 - RNA, 18 nt, Human
gagccgagauugugccac

SEQ ID NO: 1004814 - RNA, 24 nt, Human
gaucaaccaacuaccuagguauua

SEQ ID NO: 1004815 - RNA, 21 nt, Human
gaucaccugaggucaggaguu

SEQ ID NO: 1004816 - RNA, 23 nt, Human
gaucaccugaggucaggaguuca

SEQ ID NO: 1004817 - RNA, 24 nt, Human
gaucaccugaggucaggaguucaa

SEQ ID NO: 1004818 - RNA, 24 nt, Human
gaugcugaauuaaaaaacaaacaa

SEQ ID NO: 1004819 - RNA, 18 nt, Human
gcaaaauauacugugacc

SEQ ID NO: 1004820 - RNA, 23 nt, Human
gcagagcaggcuugacccugggg

SEQ ID NO: 1004821 - RNA, 19 nt, Human
gcaggagggcagccccucu

SEQ ID NO: 1004822 - RNA, 22 nt, Human
gcaggugccuagcacucuuugc

SEQ ID NO: 1004823 - RNA, 21 nt, Human
gcccaggagaggggccugauc

SEQ ID NO: 1004824 - RNA, 20 nt, Human
gcgggugucuauaaucccag

SEQ ID NO: 1004825 - RNA, 23 nt, Human
gcuccaucggacuacuccuccac

SEQ ID NO: 1004826 - RNA, 23 nt, Human
gcuguucagugcugcgcucuuag

SEQ ID NO: 1004827 - RNA, 23 nt, Human
gcuguuggcuucugguccuccca

SEQ ID NO: 1004828 - RNA, 23 nt, Human
ggagugguggcucacgucuguaa

SEQ ID NO: 1004829 - RNA, 23 nt, Human
ggaucaccugaggucaggaguuc

SEQ ID NO: 1004830 - RNA, 25 nt, Human
ggaucaccugaggucaggaguucaa

SEQ ID NO: 1004831 - RNA, 18 nt, Human
ggcaguggcugccggggu

SEQ ID NO: 1004832 - RNA, 21 nt, Human
ggcggaucaccugaggucagg

SEQ ID NO: 1004833 - RNA, 21 nt, Human
ggcucacgucuguaaucccag

SEQ ID NO: 1004834 - RNA, 22 nt, Human
ggcuucugguccucccaggcau

SEQ ID NO: 1004835 - RNA, 22 nt, Human
gggaaaaaaaggcacacaaacc

SEQ ID NO: 1004836 - RNA, 24 nt, Human
ggugagucuuaaauccucuugcug

SEQ ID NO: 1004837 - RNA, 24 nt, Human
gguggcucacgucuguaaucccag

SEQ ID NO: 1004838 - RNA, 23 nt, Human
guggcucacgucuguaaucccag

SEQ ID NO: 1004839 - RNA, 19 nt, Human
guuucuuuuccaauuuuuu

SEQ ID NO: 1004840 - RNA, 20 nt, Human
uaaaaaaacaugggguccau

SEQ ID NO: 1004841 - RNA, 23 nt, Human
uaaaaaaauccauuuuuuucuuc

SEQ ID NO: 1004842 - RNA, 19 nt, Human
uaaaaaacaaacaaaccaa

SEQ ID NO: 1004843 - RNA, 22 nt, Human
uaaaaacacuagccugugaaau

SEQ ID NO: 1004844 - RNA, 18 nt, Human
uaaaacaaaagcagaagc

SEQ ID NO: 1004845 - RNA, 18 nt, Human
uaaaacaaaagcagaagc

SEQ ID NO: 1004846 - RNA, 20 nt, Human
uaaaacaaaagcagaagcca

SEQ ID NO: 1004847 - RNA, 19 nt, Human
uaaacagucuguacaguua

SEQ ID NO: 1004848 - RNA, 19 nt, Human
uaacucaccaaaacguaac

SEQ ID NO: 1004849 - RNA, 23 nt, Human
uaagaccaccacuauuaacugaa

SEQ ID NO: 1004850 - RNA, 22 nt, Human
uaagacugagaaaaacaaaaac

SEQ ID NO: 1004851 - RNA, 19 nt, Human
uaccacagccaagcuguuu

SEQ ID NO: 1004852 - RNA, 23 nt, Human
uaccacaggccaggaucuuucca

SEQ ID NO: 1004853 - RNA, 21 nt, Human
uacuuuaaaugcacugguuua

SEQ ID NO: 1004854 - RNA, 20 nt, Human
uagaaagaaggccccuucac

SEQ ID NO: 1004855 - RNA, 24 nt, Human
uagaaggucaguauuuuauaaaga

SEQ ID NO: 1004856 - RNA, 19 nt, Human
uagcacuccccuuuucugc

SEQ ID NO: 1004857 - RNA, 19 nt, Human
uaucaagcuacauaaacuc

SEQ ID NO: 1004858 - RNA, 28 nt, Human
uauugcacaaccaauaagcacugaaaca

SEQ ID NO: 1004859 - RNA, 20 nt, Human
ucaccauccaacccuguggc

SEQ ID NO: 1004860 - RNA, 21 nt, Human
ucaccuucucccagaaccagu

SEQ ID NO: 1004861 - RNA, 21 nt, Human
ucaguacuuuuguauauucua

SEQ ID NO: 1004862 - RNA, 22 nt, Human
ucaguacuuuuguauauucuau

SEQ ID NO: 1004863 - RNA, 20 nt, Human
uccagauuaaaaaguaaaaa

SEQ ID NO: 1004864 - RNA, 26 nt, Human
ucccccagcugucucccuagagagug

SEQ ID NO: 1004865 - RNA, 22 nt, Human
ucccccaguuagcacuccccuu

SEQ ID NO: 1004866 - RNA, 24 nt, Human
ucccccaguuagcacuccccuuuu

SEQ ID NO: 1004867 - RNA, 30 nt, Human
ucccccaguuagcacuccccuuuucugcuu

SEQ ID NO: 1004868 - RNA, 23 nt, Human
uccccggggaacgcagggcucca

SEQ ID NO: 1004869 - RNA, 23 nt, Human
uccgucucaaaaaaaaaaaaaaa

SEQ ID NO: 1004870 - RNA, 18 nt, Human
uccuauagaugcaggaaa

SEQ ID NO: 1004871 - RNA, 21 nt, Human
ucuauaaucccagcugcuugg

SEQ ID NO: 1004872 - RNA, 22 nt, Human
ucuaucauauccucuuuauuuc

SEQ ID NO: 1004873 - RNA, 25 nt, Human
ucuccaaacaccacaccacuagucc

SEQ ID NO: 1004874 - RNA, 20 nt, Human
ucuccaguugcugggccaaa

SEQ ID NO: 1004875 - RNA, 21 nt, Human
ucucuauuaaaaauacaaaaa

SEQ ID NO: 1004876 - RNA, 18 nt, Human
ucucucaccuucucccag

SEQ ID NO: 1004877 - RNA, 19 nt, Human
ucugaagccacccucuagc

SEQ ID NO: 1004878 - RNA, 20 nt, Human
ucugaagccacccucuagca

SEQ ID NO: 1004879 - RNA, 21 nt, Human
ucugcaucucucuccucccca

SEQ ID NO: 1004880 - RNA, 23 nt, Human
ucugcaucucucuccuccccaca

SEQ ID NO: 1004881 - RNA, 25 nt, Human
ucuucaaugaacuguuuuacuuaaa

SEQ ID NO: 1004882 - RNA, 20 nt, Human
ugaaaaaauuccucuauaaa

SEQ ID NO: 1004883 - RNA, 24 nt, Human
ugaaaauaagaccaccacuauuaa

SEQ ID NO: 1004884 - RNA, 21 nt, Human
ugaaugcaaaccauuaaugcc

SEQ ID NO: 1004885 - RNA, 22 nt, Human
ugagaaaaacaaaaacaaaaac

SEQ ID NO: 1004886 - RNA, 21 nt, Human
ugagaaaacugcuaccacuac

SEQ ID NO: 1004887 - RNA, 23 nt, Human
ugagaacaccccuguaaagagcc

SEQ ID NO: 1004888 - RNA, 24 nt, Human
ugagaacaccccuguaaagagccu

SEQ ID NO: 1004889 - RNA, 20 nt, Human
ugaggcaaaauaaucaccug

SEQ ID NO: 1004890 - RNA, 24 nt, Human
ugaggcaaaauaaucaccugaacc

SEQ ID NO: 1004891 - RNA, 20 nt, Human
ugauacaggcacacagcgac

SEQ ID NO: 1004892 - RNA, 20 nt, Human
ugaugugaaccuguguauac

SEQ ID NO: 1004893 - RNA, 20 nt, Human
ugcaaauacauagauuucaa

SEQ ID NO: 1004894 - RNA, 25 nt, Human
ugcacgccacugccgaggucuggac

SEQ ID NO: 1004895 - RNA, 19 nt, Human
ugcagagacagaauacaca

SEQ ID NO: 1004896 - RNA, 19 nt, Human
ugcauaaagggaaaaaaag

SEQ ID NO: 1004897 - RNA, 22 nt, Human
ugcuaugauuacaagaugaaca

SEQ ID NO: 1004898 - RNA, 21 nt, Human
ugcugcuaaagcugaaaaaga

SEQ ID NO: 1004899 - RNA, 21 nt, Human
ugcugugaaauuuaaaccaau

SEQ ID NO: 1004900 - RNA, 22 nt, Human
ugcuucuuuggccccaauuuuu

SEQ ID NO: 1004901 - RNA, 18 nt, Human
uggaaacaaaguaagcca

SEQ ID NO: 1004902 - RNA, 18 nt, Human
uggagagaauugggagug

SEQ ID NO: 1004903 - RNA, 18 nt, Human
uggcagagcacacucagg

SEQ ID NO: 1004904 - RNA, 27 nt, Human
uggcagagcaggcuugacccugggguu

SEQ ID NO: 1004905 - RNA, 18 nt, Human
uggcgcaggagggcagcc

SEQ ID NO: 1004906 - RNA, 24 nt, Human
uggcgggugucuauaaucccagcu

SEQ ID NO: 1004907 - RNA, 24 nt, Human
uggcucacgucuguaaucccagca

SEQ ID NO: 1004908 - RNA, 19 nt, Human
ugggaggccgaggcgggcg

SEQ ID NO: 1004909 - RNA, 24 nt, Human
ugggaggccgaggcgggcggauca

SEQ ID NO: 1004910 - RNA, 24 nt, Human
ugggaggcugaggcaaaauaauca

SEQ ID NO: 1004911 - RNA, 21 nt, Human
ugggcgacaagagugggacuc

SEQ ID NO: 1004912 - RNA, 19 nt, Human
uggguauaacucaccaaaa

SEQ ID NO: 1004913 - RNA, 18 nt, Human
uggugaucaagaaacggu

SEQ ID NO: 1004914 - RNA, 24 nt, Human
ugguggcucacgucuguaauccca

SEQ ID NO: 1004915 - RNA, 19 nt, Human
ugguggucuaguuuggucu

SEQ ID NO: 1004916 - RNA, 21 nt, Human
ugucaaaagauuugaccauac

SEQ ID NO: 1004917 - RNA, 23 nt, Human
ugucuauaaucccagcugcuugg

SEQ ID NO: 1004918 - RNA, 24 nt, Human
ugucuauaaucccagcugcuuggg

SEQ ID NO: 1004919 - RNA, 22 nt, Human
uguuugcccugggugagucuua

SEQ ID NO: 1004920 - RNA, 21 nt, Human
uuaaccuuuuacuggacugcu

SEQ ID NO: 1004921 - RNA, 18 nt, Human
uuagaacccuaccccucc

SEQ ID NO: 1004922 - RNA, 24 nt, Human
uuagcacuccccuuuucugcuccu

SEQ ID NO: 1004923 - RNA, 24 nt, Human
uucacagauggacaaguggaggcc

SEQ ID NO: 1004924 - RNA, 18 nt, Human
uuccugaaagaacugcag

SEQ ID NO: 1004925 - RNA, 23 nt, Human
uuccugaacuagacaaauuucug

SEQ ID NO: 1004926 - RNA, 20 nt, Human
uucgucaguauuucucuggg

SEQ ID NO: 1004927 - RNA, 26 nt, Human
uucucugggguuuggagagaauuggg

SEQ ID NO: 1004928 - RNA, 22 nt, Human
uugaaaauacuuuucuguagca

SEQ ID NO: 1004929 - RNA, 20 nt, Human
uugcacaaccaauaagcacu

SEQ ID NO: 1004930 - RNA, 18 nt, Human
uugcugggccaaacuuuc

SEQ ID NO: 1004931 - RNA, 25 nt, Human
uugggaggccgaggcgggcggauca

SEQ ID NO: 1004932 - RNA, 25 nt, Human
uugggaggcugaggcaaaauaauca

SEQ ID NO: 1004933 - RNA, 24 nt, Human
uuuauauucaguacauagcucauu

SEQ ID NO: 1004934 - RNA, 24 nt, Human
uuuguagucaacugaauuuuaaug

SEQ ID NO: 1004935 - RNA, 23 nt, Human
uuuugugguuggcuugcguugcu

SEQ ID NO: 1004936 - RNA, 23 nt, Human
aaagucccuccuggggaccacau

SEQ ID NO: 1004937 - RNA, 25 nt, Human
acacuuuuauauuaaaagcuagggg

SEQ ID NO: 1004938 - RNA, 21 nt, Human
acauguccucccgcugguacc

SEQ ID NO: 1004939 - RNA, 24 nt, Human
accccguccuacccuccuggcccu

SEQ ID NO: 1004940 - RNA, 24 nt, Human
aucuucuccucauucuuuuugucg

SEQ ID NO: 1004941 - RNA, 22 nt, Human
cauuucaaagucccuccugggg

SEQ ID NO: 1004942 - RNA, 20 nt, Human
ccacaucuccaaaguuggcc

SEQ ID NO: 1004943 - RNA, 18 nt, Human
ccagcaggaggagcuccu

SEQ ID NO: 1004944 - RNA, 23 nt, Human
ccaggauccucucauugcagucc

SEQ ID NO: 1004945 - RNA, 22 nt, Human
cccccagaugccuggcgacugg

SEQ ID NO: 1004946 - RNA, 22 nt, Human
ccguccuacccuccuggcccug

SEQ ID NO: 1004947 - RNA, 23 nt, Human
ccuggcccugccugccugccagc

SEQ ID NO: 1004948 - RNA, 26 nt, Human
ccuggcccugccugccugccagcacc

SEQ ID NO: 1004949 - RNA, 22 nt, Human
ccuucauguuguugaguuccau

SEQ ID NO: 1004950 - RNA, 19 nt, Human
cucauucaggucugcgaug

SEQ ID NO: 1004951 - RNA, 21 nt, Human
cuccuggcccugccugccugc

SEQ ID NO: 1004952 - RNA, 21 nt, Human
cugccugccugccagcaccug

SEQ ID NO: 1004953 - RNA, 21 nt, Human
cugugagaccccguccuaccc

SEQ ID NO: 1004954 - RNA, 20 nt, Human
cuucaggggcuccagagccc

SEQ ID NO: 1004955 - RNA, 20 nt, Human
gcagguacuccucagccaag

SEQ ID NO: 1004956 - RNA, 20 nt, Human
ggacauuggcccuggccccc

SEQ ID NO: 1004957 - RNA, 26 nt, Human
ggcccuggccccccaccugugagacc

SEQ ID NO: 1004958 - RNA, 18 nt, Human
uaccgcagcucauucagg

SEQ ID NO: 1004959 - RNA, 24 nt, Human
uaguuccuggguggaaucugugcc

SEQ ID NO: 1004960 - RNA, 24 nt, Human
ucauauuucuccucagcucucaug

SEQ ID NO: 1004961 - RNA, 19 nt, Human
uccuggguggaaucugugc

SEQ ID NO: 1004962 - RNA, 19 nt, Human
uccuuguuggucuucuccu

SEQ ID NO: 1004963 - RNA, 22 nt, Human
ucucaggguguccagcuguggg

SEQ ID NO: 1004964 - RNA, 18 nt, Human
ucuuaagagccaggguua

SEQ ID NO: 1004965 - RNA, 22 nt, Human
ugagaccccguccuacccuccu

SEQ ID NO: 1004966 - RNA, 19 nt, Human
ugccgggucaucuuaagag

SEQ ID NO: 1004967 - RNA, 23 nt, Human
ugccgggucaucuuaagagccag

SEQ ID NO: 1004968 - RNA, 20 nt, Human
uggcagugcgaaaggggugc

SEQ ID NO: 1004969 - RNA, 24 nt, Human
uggcccugccugccugccagcacc

SEQ ID NO: 1004970 - RNA, 24 nt, Human
ugggaagcugugguagcguacagc

SEQ ID NO: 1004971 - RNA, 25 nt, Human
uuaagagccaggguuaacuucacag

SEQ ID NO: 1004972 - RNA, 20 nt, Human
uucacaggguccucccccca

SEQ ID NO: 1004973 - RNA, 23 nt, Human
uucgucuauggucacuccugaag

SEQ ID NO: 1004974 - RNA, 19 nt, Human
uucucuuucuugagcaggg

SEQ ID NO: 1004975 - RNA, 20 nt, Human
uucucuuucuugagcaggga

SEQ ID NO: 1004976 - RNA, 25 nt, Human
uugcgaaccuccucguagcuggcuc

SEQ ID NO: 1004977 - RNA, 22 nt, Human
uuuuuuuuuuuuuuuuuuucag

SEQ ID NO: 1004978 - RNA, 26 nt, Human
aagggaccaagaugaggaccaaggug

SEQ ID NO: 1004979 - RNA, 23 nt, Human
acaaaacagcagcuggaaagaga

SEQ ID NO: 1004980 - RNA, 19 nt, Human
accaagguguggcugccug

SEQ ID NO: 1004981 - RNA, 20 nt, Human
agacaggagggaggcagcag

SEQ ID NO: 1004982 - RNA, 20 nt, Human
agacaggagggaggcagcag

SEQ ID NO: 1004983 - RNA, 22 nt, Human
agacaggagggaggcagcagga

SEQ ID NO: 1004984 - RNA, 22 nt, Human
agcagcaccaccauccucugau

SEQ ID NO: 1004985 - RNA, 18 nt, Human
aggcccuagaaggaggga

SEQ ID NO: 1004986 - RNA, 24 nt, Human
aguuugggcuucuuuuuucuuuuu

SEQ ID NO: 1004987 - RNA, 27 nt, Human
caagaugaggaccaagguguggcugcc

SEQ ID NO: 1004988 - RNA, 18 nt, Human
cagacaggagggaggcag

SEQ ID NO: 1004989 - RNA, 18 nt, Human
cagcaggaagggcuggca

SEQ ID NO: 1004990 - RNA, 21 nt, Human
caguccgccagcucggaagca

SEQ ID NO: 1004991 - RNA, 23 nt, Human
caguccgccagcucggaagcacu

SEQ ID NO: 1004992 - RNA, 23 nt, Human
ccggaucagcagcagcaccacca

SEQ ID NO: 1004993 - RNA, 22 nt, Human
cuaagcaugggccccaggagcc

SEQ ID NO: 1004994 - RNA, 22 nt, Human
cugaguucuauuggggucccac

SEQ ID NO: 1004995 - RNA, 29 nt, Human
cuucuuuuuucuuuuucuuuuuacaaaaa

SEQ ID NO: 1004996 - RNA, 23 nt, Human
gcagcaggaagggcuggcaugga

SEQ ID NO: 1004997 - RNA, 18 nt, Human
ggcaguccgccagcucgg

SEQ ID NO: 1004998 - RNA, 19 nt, Human
ggcucuaagcaugggcccc

SEQ ID NO: 1004999 - RNA, 24 nt, Human
gggaugaaaggcguaugggaggga

SEQ ID NO: 1005000 - RNA, 23 nt, Human
uaagcaugggccccaggagccag

SEQ ID NO: 1005001 - RNA, 26 nt, Human
ucccacgcgggcaagggaaccaggac

SEQ ID NO: 1005002 - RNA, 19 nt, Human
uccccggaucagcagcagc

SEQ ID NO: 1005003 - RNA, 22 nt, Human
uccccggaucagcagcagcacc

SEQ ID NO: 1005004 - RNA, 22 nt, Human
ugaaaggcguaugggagggaag

SEQ ID NO: 1005005 - RNA, 19 nt, Human
ugaggaccaagguguggcu

SEQ ID NO: 1005006 - RNA, 19 nt, Human
uggaagggaccaagaugag

SEQ ID NO: 1005007 - RNA, 24 nt, Human
uggaagggaccaagaugaggacca

SEQ ID NO: 1005008 - RNA, 23 nt, Human
uggcagacgagccaggcacgagg

SEQ ID NO: 1005009 - RNA, 22 nt, Human
uggccccugggcaguccgccag

SEQ ID NO: 1005010 - RNA, 18 nt, Human
uggccccugggcaguccu

SEQ ID NO: 1005011 - RNA, 19 nt, Human
ugggagggaagacagcggu

SEQ ID NO: 1005012 - RNA, 24 nt, Human
ugggagggaagacagcgguccccg

SEQ ID NO: 1005013 - RNA, 18 nt, Human
ugggcucuaagcaugggc

SEQ ID NO: 1005014 - RNA, 23 nt, Human
uguagguggcagacgagccaggc

SEQ ID NO: 1005015 - RNA, 18 nt, Human
uuggaagggaccaagaug

SEQ ID NO: 1005016 - RNA, 23 nt, Human
uuucuuuuuacaaaacagcagcu

SEQ ID NO: 1005017 - RNA, 25 nt, Human
uuuuucuuuuuacaaaacagcagcu

SEQ ID NO: 1005018 - RNA, 21 nt, Human
uuuuuuuuuuuuuuaguuugg

SEQ ID NO: 1005019 - RNA, 20 nt, Human
aaaccaaacaaaaugaucaa

SEQ ID NO: 1005020 - RNA, 21 nt, Human
aacccugcaauauucaaaaaa

SEQ ID NO: 1005021 - RNA, 22 nt, Human
gcccaccucacagggagcgcgg

SEQ ID NO: 1005022 - RNA, 26 nt, Human
gcgggcugcucagcgcaagcgcacua

SEQ ID NO: 1005023 - RNA, 21 nt, Human
ucaaaccaaacaaaaugauca

SEQ ID NO: 1005024 - RNA, 20 nt, Human
cacaacagugauauuugaga

SEQ ID NO: 1005025 - RNA, 25 nt, Human
caguugguuuucccucucuguauuc

SEQ ID NO: 1005026 - RNA, 18 nt, Human
ccuucucuuuggccuggg

SEQ ID NO: 1005027 - RNA, 20 nt, Human
gagagcuucaagguggcucc

SEQ ID NO: 1005028 - RNA, 22 nt, Human
ggagaggcacguugcuggacag

SEQ ID NO: 1005029 - RNA, 19 nt, Human
ucuagggccaggagaggca

SEQ ID NO: 1005030 - RNA, 23 nt, Human
uggccugggcuauuuccaagaac

SEQ ID NO: 1005031 - RNA, 26 nt, Human
aaacacuagugauaccaucugaacaa

SEQ ID NO: 1005032 - RNA, 23 nt, Human
aaggccgaggccuggacagaaga

SEQ ID NO: 1005033 - RNA, 20 nt, Human
agaggaaggagagaugcuca

SEQ ID NO: 1005034 - RNA, 19 nt, Human
agaucugauugcaauaugg

SEQ ID NO: 1005035 - RNA, 18 nt, Human
agcuguagaucugauugc

SEQ ID NO: 1005036 - RNA, 21 nt, Human
aggaaggagagaugcucagga

SEQ ID NO: 1005037 - RNA, 24 nt, Human
aggaaggccgaggccuggacagaa

SEQ ID NO: 1005038 - RNA, 23 nt, Human
aggagaagacgaucugggagagg

SEQ ID NO: 1005039 - RNA, 20 nt, Human
cacagagagcccggcagggu

SEQ ID NO: 1005040 - RNA, 22 nt, Human
caucugaacaaaagcaaugauu

SEQ ID NO: 1005041 - RNA, 22 nt, Human
ccagggacgcggagcggccgag

SEQ ID NO: 1005042 - RNA, 19 nt, Human
cgccacuggcuuugaaacu

SEQ ID NO: 1005043 - RNA, 22 nt, Human
cgcgacgccacuggcuuugaaa

SEQ ID NO: 1005044 - RNA, 24 nt, Human
gagaagacgaucugggagaggaag

SEQ ID NO: 1005045 - RNA, 20 nt, Human
ggaaacacuagugauaccau

SEQ ID NO: 1005046 - RNA, 21 nt, Human
guaauggcaaugaaugaaaca

SEQ ID NO: 1005047 - RNA, 21 nt, Human
guagaucugauugcaauaugg

SEQ ID NO: 1005048 - RNA, 21 nt, Human
uacaauggaaacacuagugau

SEQ ID NO: 1005049 - RNA, 23 nt, Human
uauccaggagcuguagaucugau

SEQ ID NO: 1005050 - RNA, 23 nt, Human
ucaagauuacaauggaaacacua

SEQ ID NO: 1005051 - RNA, 20 nt, Human
ucaagcaauuauccaggagc

SEQ ID NO: 1005052 - RNA, 18 nt, Human
ugaaacauugacagucuc

SEQ ID NO: 1005053 - RNA, 26 nt, Human
ugaaggagaagacgaucugggagagg

SEQ ID NO: 1005054 - RNA, 23 nt, Human
ugcucaggaaggccgaggccugg

SEQ ID NO: 1005055 - RNA, 18 nt, Human
uggcaaaaguggugacuu

SEQ ID NO: 1005056 - RNA, 20 nt, Human
ugguaauggcaaugaaugaa

SEQ ID NO: 1005057 - RNA, 22 nt, Human
ugucaagauuacaauggaaaca

SEQ ID NO: 1005058 - RNA, 24 nt, Human
ugugucaagauuacaauggaaaca

SEQ ID NO: 1005059 - RNA, 25 nt, Human
uuggcaaaaguggugacuuuuauuu

SEQ ID NO: 1005060 - RNA, 27 nt, Human
aaagcccccaagacucugaaaccagga

SEQ ID NO: 1005061 - RNA, 18 nt, Human
aaagugcugggauuacaa

SEQ ID NO: 1005062 - RNA, 23 nt, Human
aacccgccugccuccgccuccca

SEQ ID NO: 1005063 - RNA, 19 nt, Human
aagugcugggauuacaagc

SEQ ID NO: 1005064 - RNA, 26 nt, Human
aagugcugggauuacaagcacgagcc

SEQ ID NO: 1005065 - RNA, 21 nt, Human
aaucgugccacugcacuccag

SEQ ID NO: 1005066 - RNA, 18 nt, Human
acccgccugccuccgccu

SEQ ID NO: 1005067 - RNA, 24 nt, Human
acugcacuccagccugggugacag

SEQ ID NO: 1005068 - RNA, 26 nt, Human
acugcacuccagccugggugacagag

SEQ ID NO: 1005069 - RNA, 24 nt, Human
agcacuuugggaggcugaggcagg

SEQ ID NO: 1005070 - RNA, 22 nt, Human
agcuguaugaaaaaagccccca

SEQ ID NO: 1005071 - RNA, 18 nt, Human
aggcaggaggaucgcuug

SEQ ID NO: 1005072 - RNA, 24 nt, Human
aggcaggaggaucgcuuggccccg

SEQ ID NO: 1005073 - RNA, 24 nt, Human
aggcaucaggaagcuacugcagcu

SEQ ID NO: 1005074 - RNA, 20 nt, Human
aggcugaggcaggaggaucg

SEQ ID NO: 1005075 - RNA, 24 nt, Human
aggcugaggcaggaggaucgcuug

SEQ ID NO: 1005076 - RNA, 18 nt, Human
agugcugggauuacaagc

SEQ ID NO: 1005077 - RNA, 24 nt, Human
aucgugccacugcacuccagccug

SEQ ID NO: 1005078 - RNA, 20 nt, Human
augaggcaucaggaagcuac

SEQ ID NO: 1005079 - RNA, 18 nt, Human
augagguuucgccauguu

SEQ ID NO: 1005080 - RNA, 24 nt, Human
augagguuucgccauguugcucag

SEQ ID NO: 1005081 - RNA, 23 nt, Human
caaagugcugggauuacaagcac

SEQ ID NO: 1005082 - RNA, 24 nt, Human
caaagugcugggauuacaagcacg

SEQ ID NO: 1005083 - RNA, 28 nt, Human
caagcaacccgccugccuccccugaaag

SEQ ID NO: 1005084 - RNA, 18 nt, Human
cacgccuguggucccagc

SEQ ID NO: 1005085 - RNA, 22 nt, Human
cacuccagccugggugacagag

SEQ ID NO: 1005086 - RNA, 23 nt, Human
cacuccagccugggugacagagc

SEQ ID NO: 1005087 - RNA, 19 nt, Human
cacugcacuccagccuggg

SEQ ID NO: 1005088 - RNA, 21 nt, Human
cacugcacuccagccugggug

SEQ ID NO: 1005089 - RNA, 22 nt, Human
cacugcacuccagccuggguga

SEQ ID NO: 1005090 - RNA, 23 nt, Human
cacugcacuccagccugggugac

SEQ ID NO: 1005091 - RNA, 24 nt, Human
cacugcacuccagccugggugaca

SEQ ID NO: 1005092 - RNA, 25 nt, Human
cacugcacuccagccugggugacag

SEQ ID NO: 1005093 - RNA, 22 nt, Human
cagaagccccagacuugggcaa

SEQ ID NO: 1005094 - RNA, 24 nt, Human
cagcacuuugggaggcugaggcag

SEQ ID NO: 1005095 - RNA, 25 nt, Human
cagcacuuugggaggcugaggcagg

SEQ ID NO: 1005096 - RNA, 24 nt, Human
cagcuacucagaaggcugaggcag

SEQ ID NO: 1005097 - RNA, 23 nt, Human
cauguugcucaggcuggucucaa

SEQ ID NO: 1005098 - RNA, 24 nt, Human
cauguugcucaggcuggucucaag

SEQ ID NO: 1005099 - RNA, 19 nt, Human
ccaaagugcugggauuaca

SEQ ID NO: 1005100 - RNA, 20 nt, Human
ccacugcacuccagccuggg

SEQ ID NO: 1005101 - RNA, 20 nt, Human
ccacugcacuccagccuggg

SEQ ID NO: 1005102 - RNA, 20 nt, Human
ccacugcacuccagccuggg

SEQ ID NO: 1005103 - RNA, 21 nt, Human
ccacugcacuccagccugggu

SEQ ID NO: 1005104 - RNA, 21 nt, Human
ccacugcacuccagccugggu

SEQ ID NO: 1005105 - RNA, 24 nt, Human
ccacugcacuccagccugggugac

SEQ ID NO: 1005106 - RNA, 22 nt, Human
ccauguugcucaggcuggucuc

SEQ ID NO: 1005107 - RNA, 18 nt, Human
ccauugugcccagccugg

SEQ ID NO: 1005108 - RNA, 19 nt, Human
ccauugugcccagccuggc

SEQ ID NO: 1005109 - RNA, 27 nt, Human
cccccaagacucugaaaccagaugggg

SEQ ID NO: 1005110 - RNA, 23 nt, Human
cccgccugccuccgccucccaaa

SEQ ID NO: 1005111 - RNA, 19 nt, Human
ccuguaaauuccagcacuu

SEQ ID NO: 1005112 - RNA, 21 nt, Human
ccuguggucccagcuacucag

SEQ ID NO: 1005113 - RNA, 22 nt, Human
ccuguggucccagcuacucaga

SEQ ID NO: 1005114 - RNA, 24 nt, Human
cgccauguugcucaggcuggucuc

SEQ ID NO: 1005115 - RNA, 19 nt, Human
cgccuguggucccagcuac

SEQ ID NO: 1005116 - RNA, 24 nt, Human
cucaagcaacccgccugccuccgc

SEQ ID NO: 1005117 - RNA, 21 nt, Human
cucccucaauguguucugcug

SEQ ID NO: 1005118 - RNA, 21 nt, Human
cuucaagcacagcacuggggc

SEQ ID NO: 1005119 - RNA, 20 nt, Human
gacaaagcuguaugaaaaaa

SEQ ID NO: 1005120 - RNA, 22 nt, Human
gagguuucgccauguugcucag

SEQ ID NO: 1005121 - RNA, 21 nt, Human
gauuacaagcacgagccauug

SEQ ID NO: 1005122 - RNA, 24 nt, Human
gcacuccagccugggugacagagc

SEQ ID NO: 1005123 - RNA, 24 nt, Human
gcaugguggugcacgccugugguc

SEQ ID NO: 1005124 - RNA, 19 nt, Human
gccacugcacuccagccug

SEQ ID NO: 1005125 - RNA, 21 nt, Human
gccacugcacuccagccuggg

SEQ ID NO: 1005126 - RNA, 24 nt, Human
gccacugcacuccagccuggguga

SEQ ID NO: 1005127 - RNA, 19 nt, Human
gccauaaucgugccacugc

SEQ ID NO: 1005128 - RNA, 21 nt, Human
gccuccgccucccaaagugcu

SEQ ID NO: 1005129 - RNA, 19 nt, Human
gcugcaaugagccauaauc

SEQ ID NO: 1005130 - RNA, 19 nt, Human
ggaggcugaggcaggagac

SEQ ID NO: 1005131 - RNA, 24 nt, Human
ggauuacaagcacgagccauugug

SEQ ID NO: 1005132 - RNA, 21 nt, Human
ggcaugguggugcacgccugu

SEQ ID NO: 1005133 - RNA, 21 nt, Human
gggaugccaguuauaaaacuu

SEQ ID NO: 1005134 - RNA, 18 nt, Human
gggcaacuccacucacua

SEQ ID NO: 1005135 - RNA, 24 nt, Human
gguggugcacgccuguggucccag

SEQ ID NO: 1005136 - RNA, 21 nt, Human
guagauaugagguuucgccau

SEQ ID NO: 1005137 - RNA, 20 nt, Human
uaaaguuacccauccuggug

SEQ ID NO: 1005138 - RNA, 21 nt, Human
uaacuugcagcgugcuaccuc

SEQ ID NO: 1005139 - RNA, 20 nt, Human
uaauuugugaaagccacacc

SEQ ID NO: 1005140 - RNA, 21 nt, Human
uaauuuuuuauuuuuuguaga

SEQ ID NO: 1005141 - RNA, 24 nt, Human
uacaagcacgagccauugugccca

SEQ ID NO: 1005142 - RNA, 23 nt, Human
uaccaggucauuucagaagcccc

SEQ ID NO: 1005143 - RNA, 23 nt, Human
uagaaccuuacagugaccuaagu

SEQ ID NO: 1005144 - RNA, 23 nt, Human
ucaaagccaguguggcacgaggc

SEQ ID NO: 1005145 - RNA, 25 nt, Human
ucaagcacagcacuggggcugcgcu

SEQ ID NO: 1005146 - RNA, 23 nt, Human
ucagacaaagcuguaugaaaaaa

SEQ ID NO: 1005147 - RNA, 24 nt, Human
uccagccugggugacagagccaga

SEQ ID NO: 1005148 - RNA, 22 nt, Human
uccaucacaaggggcacagccg

SEQ ID NO: 1005149 - RNA, 18 nt, Human
ucccaaagugcugggauu

SEQ ID NO: 1005150 - RNA, 24 nt, Human
ucccaaagugcugggauuacaagc

SEQ ID NO: 1005151 - RNA, 22 nt, Human
ucccagcccuagaaccuuacag

SEQ ID NO: 1005152 - RNA, 22 nt, Human
uccuguaaauuccagcacuuug

SEQ ID NO: 1005153 - RNA, 21 nt, Human
ucgccauguugcucaggcugg

SEQ ID NO: 1005154 - RNA, 22 nt, Human
ucgccauguugcucaggcuggu

SEQ ID NO: 1005155 - RNA, 23 nt, Human
ucgugccacugcacuccagccug

SEQ ID NO: 1005156 - RNA, 19 nt, Human
ugaaaaaagcccccaagac

SEQ ID NO: 1005157 - RNA, 19 nt, Human
ugaaagccacaccauuucu

SEQ ID NO: 1005158 - RNA, 20 nt, Human
ugaggcaggaggaucgcuug

SEQ ID NO: 1005159 - RNA, 24 nt, Human
ugagguuucgccauguugcucagg

SEQ ID NO: 1005160 - RNA, 20 nt, Human
ugauucagaaagguggauac

SEQ ID NO: 1005161 - RNA, 22 nt, Human
ugcaaugagccauaaucgugcc

SEQ ID NO: 1005162 - RNA, 18 nt, Human
ugcccggcccaugagcua

SEQ ID NO: 1005163 - RNA, 24 nt, Human
ugccuccgccucccaaagugcugg

SEQ ID NO: 1005164 - RNA, 21 nt, Human
ugcucaggcuggucucaagcu

SEQ ID NO: 1005165 - RNA, 24 nt, Human
ugcugggauuacaagcacgagcca

SEQ ID NO: 1005166 - RNA, 18 nt, Human
ugggaggcugaggcagga

SEQ ID NO: 1005167 - RNA, 19 nt, Human
ugggaggcugaggcaggag

SEQ ID NO: 1005168 - RNA, 21 nt, Human
ugggauuacaagcacgagcca

SEQ ID NO: 1005169 - RNA, 21 nt, Human
ugggauuacaagcacgagcca

SEQ ID NO: 1005170 - RNA, 22 nt, Human
ugggauuacaagcacgagccau

SEQ ID NO: 1005171 - RNA, 24 nt, Human
ugggauuacaagcacgagccauug

SEQ ID NO: 1005172 - RNA, 26 nt, Human
ugggauuacaagcacgagccauugug

SEQ ID NO: 1005173 - RNA, 27 nt, Human
ugggauuacaagcacgagccauugugc

SEQ ID NO: 1005174 - RNA, 18 nt, Human
uggugcacgccugugguc

SEQ ID NO: 1005175 - RNA, 21 nt, Human
uggugcacgccugugguccca

SEQ ID NO: 1005176 - RNA, 24 nt, Human
uggugcacgccuguggucccagcu

SEQ ID NO: 1005177 - RNA, 24 nt, Human
ugguggugcacgccugugguccca

SEQ ID NO: 1005178 - RNA, 20 nt, Human
uguugcucaggcuggucuca

SEQ ID NO: 1005179 - RNA, 19 nt, Human
uuaaaguuacccauccugg

SEQ ID NO: 1005180 - RNA, 20 nt, Human
uuaggugggcaugguggugc

SEQ ID NO: 1005181 - RNA, 24 nt, Human
uuaggugggcaugguggugcacgc

SEQ ID NO: 1005182 - RNA, 22 nt, Human
uuauaaaacuugucuuuaaagu

SEQ ID NO: 1005183 - RNA, 24 nt, Human
uuccagcacuuugggaggcugagg

SEQ ID NO: 1005184 - RNA, 24 nt, Human
uuguagauaugagguuucgccaug

SEQ ID NO: 1005185 - RNA, 23 nt, Human
uuucgccauguugcucaggcugg

SEQ ID NO: 1005186 - RNA, 24 nt, Human
uuucgccauguugcucaggcuggu

SEQ ID NO: 1005187 - RNA, 24 nt, Human
uuuguagauaugagguuucgccau

SEQ ID NO: 1005188 - RNA, 22 nt, Human
uuuuuuguagauaugagguuuc

SEQ ID NO: 1005189 - RNA, 23 nt, Human
uuuuuuguagauaugagguuucg

SEQ ID NO: 1005190 - RNA, 18 nt, Human
uuuuuuuuuuuuuuuuug

SEQ ID NO: 1005191 - RNA, 20 nt, Human
aaccccccaacccccgcucc

SEQ ID NO: 1005192 - RNA, 21 nt, Human
aaccccccaacccccgcuccc

SEQ ID NO: 1005193 - RNA, 24 nt, Human
agaagcccccagccagcccugccc

SEQ ID NO: 1005194 - RNA, 23 nt, Human
agccagcccugcccccacccucc

SEQ ID NO: 1005195 - RNA, 21 nt, Human
cagagggggauaagggggggg

SEQ ID NO: 1005196 - RNA, 26 nt, Human
caguccccucccugcccuaacccccc

SEQ ID NO: 1005197 - RNA, 22 nt, Human
ccagcccugcccccacccuccc

SEQ ID NO: 1005198 - RNA, 26 nt, Human
cccaacccccgcuccccacccuuaau

SEQ ID NO: 1005199 - RNA, 23 nt, Human
cccagccagcccugcccccaccc

SEQ ID NO: 1005200 - RNA, 26 nt, Human
cccagccagcccugcccccacccucc

SEQ ID NO: 1005201 - RNA, 25 nt, Human
ccccaaccccccaacccccgcuccc

SEQ ID NO: 1005202 - RNA, 18 nt, Human
ccccaacccccgcucccc

SEQ ID NO: 1005203 - RNA, 20 nt, Human
ccccagccagcccugccccc

SEQ ID NO: 1005204 - RNA, 19 nt, Human
ccccaguccccucccugcc

SEQ ID NO: 1005205 - RNA, 18 nt, Human
cccccaaccccccaaccc

SEQ ID NO: 1005206 - RNA, 19 nt, Human
cccccaaccccccaacccc

SEQ ID NO: 1005207 - RNA, 22 nt, Human
cccccaaccccccaacccccgc

SEQ ID NO: 1005208 - RNA, 19 nt, Human
cccccaacccccgcucccc

SEQ ID NO: 1005209 - RNA, 24 nt, Human
ccccccaacccccgcuccccaccc

SEQ ID NO: 1005210 - RNA, 21 nt, Human
cccccgcuccccacccuuaaa

SEQ ID NO: 1005211 - RNA, 18 nt, Human
ccccucccugcccuaacc

SEQ ID NO: 1005212 - RNA, 18 nt, Human
cccuaaccccccaacccc

SEQ ID NO: 1005213 - RNA, 19 nt, Human
cccugcccccacccucccc

SEQ ID NO: 1005214 - RNA, 23 nt, Human
cccuuaauugcugccauuccagu

SEQ ID NO: 1005215 - RNA, 21 nt, Human
ccuaaccccccaaccccccaa

SEQ ID NO: 1005216 - RNA, 23 nt, Human
ccucccugcccuaaccccccaac

SEQ ID NO: 1005217 - RNA, 19 nt, Human
ccugcccuaaccccccaac

SEQ ID NO: 1005218 - RNA, 26 nt, Human
ccugcccuaaccccccaaccccccaa

SEQ ID NO: 1005219 - RNA, 23 nt, Human
cugcccuaaccccccaacccccc

SEQ ID NO: 1005220 - RNA, 19 nt, Human
cugcggcugucacuccucu

SEQ ID NO: 1005221 - RNA, 23 nt, Human
cugcggcugucacuccucugccc

SEQ ID NO: 1005222 - RNA, 24 nt, Human
cugugugcgcacuuccccaguccc

SEQ ID NO: 1005223 - RNA, 27 nt, Human
cugugugcgcacuuccccaguccccuc

SEQ ID NO: 1005224 - RNA, 22 nt, Human
gauaagggggggggcgggagug

SEQ ID NO: 1005225 - RNA, 22 nt, Human
gccagcccugcccccacccucc

SEQ ID NO: 1005226 - RNA, 22 nt, Human
gcccugcccccacccuccccca

SEQ ID NO: 1005227 - RNA, 20 nt, Human
gggcgggaguggggagaagc

SEQ ID NO: 1005228 - RNA, 19 nt, Human
uaaccccccaaccccccaa

SEQ ID NO: 1005229 - RNA, 23 nt, Human
uaaccccccaaccccccaacccc

SEQ ID NO: 1005230 - RNA, 24 nt, Human
uaaccccccaaccccccaaccccc

SEQ ID NO: 1005231 - RNA, 18 nt, Human
uccaguugcugccggcug

SEQ ID NO: 1005232 - RNA, 21 nt, Human
uccccaguccccucccugccc

SEQ ID NO: 1005233 - RNA, 20 nt, Human
ugugcgcacuuccccagucc

SEQ ID NO: 1005234 - RNA, 19 nt, Human
uugcugccauuccaguugc

SEQ ID NO: 1005235 - RNA, 23 nt, Human
uugcugccauuccaguugcugcc

SEQ ID NO: 1005236 - RNA, 19 nt, Human
ccaccaggcguguagcagc

SEQ ID NO: 1005237 - RNA, 25 nt, Human
ugggaaggacuuaaauaaggaggau

SEQ ID NO: 1005238 - RNA, 21 nt, Human
aaacaggaaaacagcuguccg

SEQ ID NO: 1005239 - RNA, 21 nt, Human
aacagcuguccagaugacagu

SEQ ID NO: 1005240 - RNA, 20 nt, Human
aacuuccuuuaccauccaaa

SEQ ID NO: 1005241 - RNA, 21 nt, Human
aagcaaagaagggcagaacug

SEQ ID NO: 1005242 - RNA, 22 nt, Human
aauuugcucucccugccuccga

SEQ ID NO: 1005243 - RNA, 20 nt, Human
acacagucaagucugugcca

SEQ ID NO: 1005244 - RNA, 23 nt, Human
acccugagucugaaccgcccaac

SEQ ID NO: 1005245 - RNA, 21 nt, Human
accgcccaacgcggccucaac

SEQ ID NO: 1005246 - RNA, 18 nt, Human
agggaugugaggguucug

SEQ ID NO: 1005247 - RNA, 18 nt, Human
agugacaaagauggacac

SEQ ID NO: 1005248 - RNA, 18 nt, Human
caacgcggccucaacguc

SEQ ID NO: 1005249 - RNA, 22 nt, Human
caagagugaggaccuggaaaga

SEQ ID NO: 1005250 - RNA, 21 nt, Human
caaucccaaagcaaagaaggg

SEQ ID NO: 1005251 - RNA, 23 nt, Human
cacucagugacaaagauggacac

SEQ ID NO: 1005252 - RNA, 18 nt, Human
cagcgucguccucuccuu

SEQ ID NO: 1005253 - RNA, 21 nt, Human
ccaaagcaaagaagggcagaa

SEQ ID NO: 1005254 - RNA, 21 nt, Human
ccaagagugaggaccuggaaa

SEQ ID NO: 1005255 - RNA, 26 nt, Human
ccagugcaaucccaaagcaaagaagg

SEQ ID NO: 1005256 - RNA, 20 nt, Human
cccaaagcaaagaagggcag

SEQ ID NO: 1005257 - RNA, 19 nt, Human
ccccauaucccaagaguga

SEQ ID NO: 1005258 - RNA, 21 nt, Human
cccccauaucccaagagugag

SEQ ID NO: 1005259 - RNA, 22 nt, Human
ccccccaucuacuuagaaaauc

SEQ ID NO: 1005260 - RNA, 20 nt, Human
ccccuuggugcggggcugug

SEQ ID NO: 1005261 - RNA, 20 nt, Human
ccuaagcccccauaucccaa

SEQ ID NO: 1005262 - RNA, 22 nt, Human
ccuaagcccccauaucccaaga

SEQ ID NO: 1005263 - RNA, 23 nt, Human
ccuaagcccccauaucccaagag

SEQ ID NO: 1005264 - RNA, 18 nt, Human
cuaagcccccauauccca

SEQ ID NO: 1005265 - RNA, 21 nt, Human
cugagggucugggcuagggag

SEQ ID NO: 1005266 - RNA, 23 nt, Human
gccagguuucuguucagucuggg

SEQ ID NO: 1005267 - RNA, 25 nt, Human
gcccccauaucccaagagugaggac

SEQ ID NO: 1005268 - RNA, 24 nt, Human
ggcugugcacaggucuaaagacuc

SEQ ID NO: 1005269 - RNA, 21 nt, Human
gggucugggcuagggaguugg

SEQ ID NO: 1005270 - RNA, 18 nt, Human
ggucugggcuagggaguu

SEQ ID NO: 1005271 - RNA, 22 nt, Human
ggucugggcuagggaguuggau

SEQ ID NO: 1005272 - RNA, 23 nt, Human
gugaggguucugaaaaacaggca

SEQ ID NO: 1005273 - RNA, 18 nt, Human
uaagcccccauaucccaa

SEQ ID NO: 1005274 - RNA, 22 nt, Human
uagaaaacagagauuucacuca

SEQ ID NO: 1005275 - RNA, 19 nt, Human
ucagcccacaggaagagug

SEQ ID NO: 1005276 - RNA, 22 nt, Human
ucauggugccaggucuccuggg

SEQ ID NO: 1005277 - RNA, 19 nt, Human
uccaaacaggaaaacagcu

SEQ ID NO: 1005278 - RNA, 18 nt, Human
uccagaugacaguaagau

SEQ ID NO: 1005279 - RNA, 18 nt, Human
ucccaaagcaaagaaggg

SEQ ID NO: 1005280 - RNA, 22 nt, Human
uccuaagcccccauaucccaag

SEQ ID NO: 1005281 - RNA, 19 nt, Human
ucuccuggggcaucuaggg

SEQ ID NO: 1005282 - RNA, 28 nt, Human
ugagcugauggcccagugcuguaaugac

SEQ ID NO: 1005283 - RNA, 22 nt, Human
ugagggucugggcuagggaguu

SEQ ID NO: 1005284 - RNA, 18 nt, Human
ugagucugaaccgcccaa

SEQ ID NO: 1005285 - RNA, 19 nt, Human
uggaaagagggaugugagg

SEQ ID NO: 1005286 - RNA, 20 nt, Human
uggacacagccaguucaccg

SEQ ID NO: 1005287 - RNA, 24 nt, Human
uggcccagugcaaucccaaagcaa

SEQ ID NO: 1005288 - RNA, 22 nt, Human
uggugccaggucuccuggggca

SEQ ID NO: 1005289 - RNA, 21 nt, Human
uguuuuccuaagcccccauau

SEQ ID NO: 1005290 - RNA, 21 nt, Human
uuuaccauccaaacaggaaaa

SEQ ID NO: 1005291 - RNA, 23 nt, Human
uuugcagccccacacgcaggccu

SEQ ID NO: 1005292 - RNA, 27 nt, Human
uuuuccuaagcccccauaucccaagag

SEQ ID NO: 1005293 - RNA, 22 nt, Human
aaagugcucuggcccccuacuc

SEQ ID NO: 1005294 - RNA, 24 nt, Human
aaagugcucuggcccccuacucca

SEQ ID NO: 1005295 - RNA, 23 nt, Human
aaccauggcuaaggucaaacuug

SEQ ID NO: 1005296 - RNA, 18 nt, Human
aagacagaggucagaaug

SEQ ID NO: 1005297 - RNA, 25 nt, Human
aagacagaggucagaauguucuguu

SEQ ID NO: 1005298 - RNA, 21 nt, Human
aagcaccagauggggcagggg

SEQ ID NO: 1005299 - RNA, 19 nt, Human
aagcagaggcagugaagcc

SEQ ID NO: 1005300 - RNA, 18 nt, Human
aaggaagcaggaggccaa

SEQ ID NO: 1005301 - RNA, 23 nt, Human
acucucugacaacacgaaggcca

SEQ ID NO: 1005302 - RNA, 23 nt, Human
acuuggaguaaauggcuggaaau

SEQ ID NO: 1005303 - RNA, 24 nt, Human
agagcaagacagaggucagaaugu

SEQ ID NO: 1005304 - RNA, 25 nt, Human
agauucuuaggggaggcagcaguuu

SEQ ID NO: 1005305 - RNA, 21 nt, Human
aggaaggaggcugcagcugga

SEQ ID NO: 1005306 - RNA, 18 nt, Human
aggcaggaaggaggcugc

SEQ ID NO: 1005307 - RNA, 24 nt, Human
aggcaggaaggaggcugcagcugg

SEQ ID NO: 1005308 - RNA, 21 nt, Human
aggcaggcggcuucccugggg

SEQ ID NO: 1005309 - RNA, 19 nt, Human
agggccccuugggguuuca

SEQ ID NO: 1005310 - RNA, 23 nt, Human
agguggugggguagacuucugau

SEQ ID NO: 1005311 - RNA, 20 nt, Human
aguaaauggcuggaaaucaa

SEQ ID NO: 1005312 - RNA, 18 nt, Human
auggagcccggcagaggc

SEQ ID NO: 1005313 - RNA, 29 nt, Human
caacucccaagccaucuuaggucccuuuu

SEQ ID NO: 1005314 - RNA, 19 nt, Human
caagcuccucucuuuuccu

SEQ ID NO: 1005315 - RNA, 19 nt, Human
caaguacaggaguugcagc

SEQ ID NO: 1005316 - RNA, 19 nt, Human
cacugggggagaacagagu

SEQ ID NO: 1005317 - RNA, 20 nt, Human
cagagcaagacagaggucag

SEQ ID NO: 1005318 - RNA, 22 nt, Human
cagcauggagugggagcaaggg

SEQ ID NO: 1005319 - RNA, 19 nt, Human
caggaacccaacaacuccc

SEQ ID NO: 1005320 - RNA, 19 nt, Human
ccaagcuccucucuuuucc

SEQ ID NO: 1005321 - RNA, 21 nt, Human
ccaagcuccucucuuuuccuu

SEQ ID NO: 1005322 - RNA, 22 nt, Human
ccaagcuccucucuuuuccuuc

SEQ ID NO: 1005323 - RNA, 21 nt, Human
cccaaagauagggccccuugg

SEQ ID NO: 1005324 - RNA, 22 nt, Human
cccaacaacucccaagccaucu

SEQ ID NO: 1005325 - RNA, 21 nt, Human
cccacuguagggagcaggagc

SEQ ID NO: 1005326 - RNA, 20 nt, Human
ccccuugggguuucaucccc

SEQ ID NO: 1005327 - RNA, 20 nt, Human
cugcagcuggaagcagaggc

SEQ ID NO: 1005328 - RNA, 18 nt, Human
cuggcccccuacuccagg

SEQ ID NO: 1005329 - RNA, 19 nt, Human
gagaggacuuggaguaaau

SEQ ID NO: 1005330 - RNA, 21 nt, Human
gaugaaaggagcagagcaaga

SEQ ID NO: 1005331 - RNA, 25 nt, Human
gcagugaagccucuugggagaugac

SEQ ID NO: 1005332 - RNA, 19 nt, Human
ggagacgaggaugaaagga

SEQ ID NO: 1005333 - RNA, 24 nt, Human
gggagaggacuuggaguaaauggc

SEQ ID NO: 1005334 - RNA, 24 nt, Human
gggcaauaauggggccuuggcgcu

SEQ ID NO: 1005335 - RNA, 20 nt, Human
ggggcaauaauggggccuug

SEQ ID NO: 1005336 - RNA, 24 nt, Human
guagggagcaggagcucccaggag

SEQ ID NO: 1005337 - RNA, 20 nt, Human
ucagaauguucuguucacuu

SEQ ID NO: 1005338 - RNA, 18 nt, Human
ucauaugaggucucagcu

SEQ ID NO: 1005339 - RNA, 26 nt, Human
uccagggcaaggaagauucuuagggg

SEQ ID NO: 1005340 - RNA, 23 nt, Human
uccauguaaaucccaaagauagg

SEQ ID NO: 1005341 - RNA, 27 nt, Human
ucccaagccaucuuaggucccaccguu

SEQ ID NO: 1005342 - RNA, 18 nt, Human
ucccuggggacccaggca

SEQ ID NO: 1005343 - RNA, 25 nt, Human
uccuugggaauggagcccggcagag

SEQ ID NO: 1005344 - RNA, 18 nt, Human
ucucugacaacacgaagg

SEQ ID NO: 1005345 - RNA, 19 nt, Human
uggaagcagaggcagugaa

SEQ ID NO: 1005346 - RNA, 19 nt, Human
uggagguuggugaguuguu

SEQ ID NO: 1005347 - RNA, 22 nt, Human
uggaguaaauggcuggaaauca

SEQ ID NO: 1005348 - RNA, 21 nt, Human
uggagugggagcaagggggca

SEQ ID NO: 1005349 - RNA, 19 nt, Human
uggguuggagguuggugag

SEQ ID NO: 1005350 - RNA, 20 nt, Human
uuccugaggagguggugggg

SEQ ID NO: 1005351 - RNA, 21 nt, Human
uuccuugggaauggagcccgg

SEQ ID NO: 1005352 - RNA, 25 nt, Human
aagauaaaacagauacuggcaguca

SEQ ID NO: 1005353 - RNA, 18 nt, Human
accuuaaaggcugcggag

SEQ ID NO: 1005354 - RNA, 20 nt, Human
aguaaggcccagaaagacca

SEQ ID NO: 1005355 - RNA, 23 nt, Human
caaagaauguucagcaccagcaa

SEQ ID NO: 1005356 - RNA, 19 nt, Human
caagauaaaacagauacug

SEQ ID NO: 1005357 - RNA, 22 nt, Human
cacaguaaggcccagaaagacc

SEQ ID NO: 1005358 - RNA, 18 nt, Human
ccauggaguugcacaaag

SEQ ID NO: 1005359 - RNA, 18 nt, Human
ccccaccugccugccacc

SEQ ID NO: 1005360 - RNA, 22 nt, Human
cccccgcgcgaaccuuaaaggc

SEQ ID NO: 1005361 - RNA, 21 nt, Human
ccccgcgcgaaccuuaaaggc

SEQ ID NO: 1005362 - RNA, 19 nt, Human
gcagcagaggcggcgcggg

SEQ ID NO: 1005363 - RNA, 22 nt, Human
gcgaaccuuaaaggcugcggag

SEQ ID NO: 1005364 - RNA, 20 nt, Human
gcuaacucuugccuggcccc

SEQ ID NO: 1005365 - RNA, 20 nt, Human
ggcugcagcagaggcggcgc

SEQ ID NO: 1005366 - RNA, 21 nt, Human
uaaggcccagaaagaccaugg

SEQ ID NO: 1005367 - RNA, 24 nt, Human
uagacggcagcggcugcagcagag

SEQ ID NO: 1005368 - RNA, 24 nt, Human
uauaccagcacaguaaggcccaga

SEQ ID NO: 1005369 - RNA, 24 nt, Human
aaucauaaaaaugcuaucugaaau

SEQ ID NO: 1005370 - RNA, 22 nt, Human
accccgccccucucgccacgac

SEQ ID NO: 1005371 - RNA, 24 nt, Human
agacgucuuguagguucacaguug

SEQ ID NO: 1005372 - RNA, 20 nt, Human
agccccggccaccccgcccc

SEQ ID NO: 1005373 - RNA, 19 nt, Human
agcgccagccccggccacc

SEQ ID NO: 1005374 - RNA, 20 nt, Human
caaaauaaaacccuguggau

SEQ ID NO: 1005375 - RNA, 21 nt, Human
caacaagcaaaauaaaacccu

SEQ ID NO: 1005376 - RNA, 31 nt, Human
caacaagcaaaauaaaacccuguggauauuu

SEQ ID NO: 1005377 - RNA, 20 nt, Human
caccccgccccucucgccac

SEQ ID NO: 1005378 - RNA, 23 nt, Human
cacgacuaguggcugccgacgcc

SEQ ID NO: 1005379 - RNA, 23 nt, Human
cagccccggccaccccgccccuc

SEQ ID NO: 1005380 - RNA, 26 nt, Human
caguuguccaagacgucuuguagguu

SEQ ID NO: 1005381 - RNA, 22 nt, Human
ccaccccgccccucucgccacg

SEQ ID NO: 1005382 - RNA, 24 nt, Human
ccagacacgucagcgccgggagca

SEQ ID NO: 1005383 - RNA, 19 nt, Human
cccagacacgucagcgccg

SEQ ID NO: 1005384 - RNA, 21 nt, Human
ccccgccccucucgccacgac

SEQ ID NO: 1005385 - RNA, 20 nt, Human
ccccggccaccccgccccuc

SEQ ID NO: 1005386 - RNA, 25 nt, Human
ccccggccaccccgccccucucgcc

SEQ ID NO: 1005387 - RNA, 22 nt, Human
cccgccccucucgccacgacua

SEQ ID NO: 1005388 - RNA, 22 nt, Human
cccggccaccccgccccucucg

SEQ ID NO: 1005389 - RNA, 21 nt, Human
ccgcagcuacgaccgucucca

SEQ ID NO: 1005390 - RNA, 27 nt, Human
cgccagccccggccaccccgccccucu

SEQ ID NO: 1005391 - RNA, 21 nt, Human
cugcaaguaaacugauguuga

SEQ ID NO: 1005392 - RNA, 20 nt, Human
gaccgcagcuacgaccgucu

SEQ ID NO: 1005393 - RNA, 23 nt, Human
gagcgggggccaaguggagcgcc

SEQ ID NO: 1005394 - RNA, 22 nt, Human
gccaccccgccccucucgccac

SEQ ID NO: 1005395 - RNA, 26 nt, Human
gccagccccggccaccccgccccucu

SEQ ID NO: 1005396 - RNA, 21 nt, Human
gccgcggcggcggggcgggcc

SEQ ID NO: 1005397 - RNA, 21 nt, Human
gccgggagcacagccucgugc

SEQ ID NO: 1005398 - RNA, 22 nt, Human
gggggccgcggcggcggggcgg

SEQ ID NO: 1005399 - RNA, 21 nt, Human
uacaaugacauauuauuacua

SEQ ID NO: 1005400 - RNA, 22 nt, Human
uaucaaaaauaaaagcuauucc

SEQ ID NO: 1005401 - RNA, 19 nt, Human
uauuucagcuguacgaaau

SEQ ID NO: 1005402 - RNA, 21 nt, Human
uccgcgcggccacucaucggc

SEQ ID NO: 1005403 - RNA, 20 nt, Human
uccuggauggccaauggucu

SEQ ID NO: 1005404 - RNA, 24 nt, Human
ucggcgcgaccgcagcuacgaccg

SEQ ID NO: 1005405 - RNA, 21 nt, Human
ucuccagcuccuuccgcgcgg

SEQ ID NO: 1005406 - RNA, 19 nt, Human
ugauaaaauaaaacaaacu

SEQ ID NO: 1005407 - RNA, 22 nt, Human
uggcaaacaaaacuugguaucu

SEQ ID NO: 1005408 - RNA, 21 nt, Human
uuuuuuuuuuuuuuuuccaga

SEQ ID NO: 1005409 - RNA, 22 nt, Human
uuuuuuuuuuuuuuuuuuccag

SEQ ID NO: 1005410 - RNA, 20 nt, Human
aaauaaccugaaacuguaac

SEQ ID NO: 1005411 - RNA, 18 nt, Human
aaccagguaucaacuuua

SEQ ID NO: 1005412 - RNA, 19 nt, Human
agacauaccaggcgguaca

SEQ ID NO: 1005413 - RNA, 21 nt, Human
aggcgguacaaacugaaaacu

SEQ ID NO: 1005414 - RNA, 21 nt, Human
agguaucaacuuuacuaaacc

SEQ ID NO: 1005415 - RNA, 19 nt, Human
aucuaggcuaaaaauaauu

SEQ ID NO: 1005416 - RNA, 23 nt, Human
cauaccaggcgguacaaacugaa

SEQ ID NO: 1005417 - RNA, 25 nt, Human
cauuguguuguuuuaucucaugacu

SEQ ID NO: 1005418 - RNA, 20 nt, Human
cugaaacuguaacaauacac

SEQ ID NO: 1005419 - RNA, 19 nt, Human
gaauauaaauaaccugaaa

SEQ ID NO: 1005420 - RNA, 18 nt, Human
gcaaaaugaaugcuuuca

SEQ ID NO: 1005421 - RNA, 23 nt, Human
gguacaaacugaaaacuugagua

SEQ ID NO: 1005422 - RNA, 24 nt, Human
uaacaauacacaaaaauuggcuuc

SEQ ID NO: 1005423 - RNA, 23 nt, Human
uacaaaacaucgaauauaaauaa

SEQ ID NO: 1005424 - RNA, 20 nt, Human
uacaaacugaaaacuugagu

SEQ ID NO: 1005425 - RNA, 25 nt, Human
uacaaacugaaaacuugaguaaauu

SEQ ID NO: 1005426 - RNA, 22 nt, Human
uagccaaaaauaaaggcauaau

SEQ ID NO: 1005427 - RNA, 23 nt, Human
uagccaaaaauaaaggcauaaua

SEQ ID NO: 1005428 - RNA, 19 nt, Human
uauaaauaaccugaaacug

SEQ ID NO: 1005429 - RNA, 22 nt, Human
uauaaccagguaucaacuuuac

SEQ ID NO: 1005430 - RNA, 22 nt, Human
ucuucuagccaaaaauaaaggc

SEQ ID NO: 1005431 - RNA, 21 nt, Human
ugaguaaauuaacauuguuuu

SEQ ID NO: 1005432 - RNA, 22 nt, Human
ugaguaaauuaacauuguuuua

SEQ ID NO: 1005433 - RNA, 21 nt, Human
uugaaucuguuucaaucaguu

SEQ ID NO: 1005434 - RNA, 20 nt, Human
uuucaaagggagcagaauca

SEQ ID NO: 1005435 - RNA, 19 nt, Human
acaccugaccuucuaaccc

SEQ ID NO: 1005436 - RNA, 22 nt, Human
acauaaacaccccagaaagacu

SEQ ID NO: 1005437 - RNA, 21 nt, Human
agagauauugcagaaccagug

SEQ ID NO: 1005438 - RNA, 22 nt, Human
agcaccuagcuccacagcagca

SEQ ID NO: 1005439 - RNA, 20 nt, Human
agcagcacugagucuggccc

SEQ ID NO: 1005440 - RNA, 18 nt, Human
agggaagcauggugacug

SEQ ID NO: 1005441 - RNA, 20 nt, Human
agguggaguuagugcuggcc

SEQ ID NO: 1005442 - RNA, 24 nt, Human
auuauuuuagauucaagacuguau

SEQ ID NO: 1005443 - RNA, 20 nt, Human
caaaacaaaccagagagacu

SEQ ID NO: 1005444 - RNA, 21 nt, Human
caaaagaaacaggcuggggua

SEQ ID NO: 1005445 - RNA, 23 nt, Human
caacauaauacaaaacaaaccag

SEQ ID NO: 1005446 - RNA, 26 nt, Human
cacaccugaccuucuaacccccaaaa

SEQ ID NO: 1005447 - RNA, 25 nt, Human
cagaaaaggcaaacucugggcccca

SEQ ID NO: 1005448 - RNA, 20 nt, Human
cagcaacuaggccaggcuuc

SEQ ID NO: 1005449 - RNA, 18 nt, Human
cagcagcacugagucugg

SEQ ID NO: 1005450 - RNA, 21 nt, Human
cagcagcacugagucuggccc

SEQ ID NO: 1005451 - RNA, 20 nt, Human
cagcugaggacauaaacacc

SEQ ID NO: 1005452 - RNA, 23 nt, Human
cauaauacaaaacaaaccagaga

SEQ ID NO: 1005453 - RNA, 18 nt, Human
ccaaaccaagccaaaaga

SEQ ID NO: 1005454 - RNA, 25 nt, Human
ccaaugauuucuuaaacuguuuccu

SEQ ID NO: 1005455 - RNA, 20 nt, Human
ccagucucaggggaaggggg

SEQ ID NO: 1005456 - RNA, 20 nt, Human
cccagcucagggccuaggcu

SEQ ID NO: 1005457 - RNA, 23 nt, Human
cccccaaaagaaaauccggaagc

SEQ ID NO: 1005458 - RNA, 19 nt, Human
ccuagagcaggggcucuaa

SEQ ID NO: 1005459 - RNA, 18 nt, Human
ccucccagggaugguggu

SEQ ID NO: 1005460 - RNA, 23 nt, Human
ccucccgccccaucuccccagcc

SEQ ID NO: 1005461 - RNA, 20 nt, Human
cgaaucuuccccaccucccc

SEQ ID NO: 1005462 - RNA, 24 nt, Human
cgccaccaccuccaacucugcccg

SEQ ID NO: 1005463 - RNA, 19 nt, Human
cgccccaucuccccagccc

SEQ ID NO: 1005464 - RNA, 19 nt, Human
cgccccaucuccccagccc

SEQ ID NO: 1005465 - RNA, 21 nt, Human
cggccucccaggcucgguccc

SEQ ID NO: 1005466 - RNA, 23 nt, Human
cucacagagacuggcgagcaguc

SEQ ID NO: 1005467 - RNA, 25 nt, Human
cuccacaccugaccuucuaaccccc

SEQ ID NO: 1005468 - RNA, 19 nt, Human
cuccccagcucagggccua

SEQ ID NO: 1005469 - RNA, 23 nt, Human
cucccgccccaucuccccagccc

SEQ ID NO: 1005470 - RNA, 22 nt, Human
cucuaaaacccuggguagcaga

SEQ ID NO: 1005471 - RNA, 18 nt, Human
cucuccggagggcugaag

SEQ ID NO: 1005472 - RNA, 20 nt, Human
gaagccgaaaggugcuggca

SEQ ID NO: 1005473 - RNA, 21 nt, Human
gcagaaccaguguuaacacua

SEQ ID NO: 1005474 - RNA, 24 nt, Human
gcaggggcucuaaaacccugggua

SEQ ID NO: 1005475 - RNA, 24 nt, Human
gccccaucuccccagccccucuca

SEQ ID NO: 1005476 - RNA, 19 nt, Human
gccuaggcucacagagacu

SEQ ID NO: 1005477 - RNA, 24 nt, Human
ggaaaagugcauucuuugcaccuc

SEQ ID NO: 1005478 - RNA, 21 nt, Human
ggccaggccgucaccguagcc

SEQ ID NO: 1005479 - RNA, 18 nt, Human
ggguagggaagcauggug

SEQ ID NO: 1005480 - RNA, 20 nt, Human
guacaacauaauacaaaaca

SEQ ID NO: 1005481 - RNA, 21 nt, Human
guucaaggagaacagaggugg

SEQ ID NO: 1005482 - RNA, 21 nt, Human
uaaacaccccagaaagacuag

SEQ ID NO: 1005483 - RNA, 22 nt, Human
uagggagagcgaacgccaccac

SEQ ID NO: 1005484 - RNA, 18 nt, Human
ucaaggagaacagaggug

SEQ ID NO: 1005485 - RNA, 18 nt, Human
uccccgcugagcucccga

SEQ ID NO: 1005486 - RNA, 24 nt, Human
ucccgccccaucuccccagccccu

SEQ ID NO: 1005487 - RNA, 26 nt, Human
uccggaagcugccccuucucuuuccc

SEQ ID NO: 1005488 - RNA, 21 nt, Human
ucuaaaacccuggguagcaga

SEQ ID NO: 1005489 - RNA, 19 nt, Human
ucuaacccccaaaagaaaa

SEQ ID NO: 1005490 - RNA, 21 nt, Human
ucucagaagccgaaaggugcu

SEQ ID NO: 1005491 - RNA, 21 nt, Human
ucuccacaccugaccuucuaa

SEQ ID NO: 1005492 - RNA, 21 nt, Human
ucuccccagccccucucagca

SEQ ID NO: 1005493 - RNA, 24 nt, Human
ucugcggcagggccuaggcagggc

SEQ ID NO: 1005494 - RNA, 26 nt, Human
ucuuuccccacaggugggcucugcag

SEQ ID NO: 1005495 - RNA, 23 nt, Human
ugaagugggaaggacacuucuca

SEQ ID NO: 1005496 - RNA, 24 nt, Human
ugauuucuaugacuagguguuauu

SEQ ID NO: 1005497 - RNA, 22 nt, Human
uggcagaaaaggcaaacucugg

SEQ ID NO: 1005498 - RNA, 21 nt, Human
uggcccucccgccccaucucc

SEQ ID NO: 1005499 - RNA, 24 nt, Human
ugggaaggggccaaugauuucuua

SEQ ID NO: 1005500 - RNA, 27 nt, Human
ugggcucugcagggccucccagggaug

SEQ ID NO: 1005501 - RNA, 18 nt, Human
ugggcuggaggggaagcu

SEQ ID NO: 1005502 - RNA, 19 nt, Human
ugggcuggaggggaagcug

SEQ ID NO: 1005503 - RNA, 21 nt, Human
ugggcuggaggggaagcuguu

SEQ ID NO: 1005504 - RNA, 22 nt, Human
uucagcugaggacauaaacacc

SEQ ID NO: 1005505 - RNA, 19 nt, Human
aaaacgaagaaagaugagc

SEQ ID NO: 1005506 - RNA, 21 nt, Human
aaacacauuuguaaaugcuga

SEQ ID NO: 1005507 - RNA, 18 nt, Human
aaagacaacacggaagau

SEQ ID NO: 1005508 - RNA, 20 nt, Human
aaagcuaaaccuaggagccu

SEQ ID NO: 1005509 - RNA, 18 nt, Human
aagaacgcaggagcagcc

SEQ ID NO: 1005510 - RNA, 22 nt, Human
aagcuaaaccuaggagccuggu

SEQ ID NO: 1005511 - RNA, 23 nt, Human
acacaaggcccacccacaccagc

SEQ ID NO: 1005512 - RNA, 24 nt, Human
acacggaagauaagcuacaaaucc

SEQ ID NO: 1005513 - RNA, 20 nt, Human
acccaggcgaagucacggaa

SEQ ID NO: 1005514 - RNA, 18 nt, Human
acccgcggacgccagcuc

SEQ ID NO: 1005515 - RNA, 22 nt, Human
acggccgagacccggggagcca

SEQ ID NO: 1005516 - RNA, 23 nt, Human
agaaauaaagauauaaugaaaga

SEQ ID NO: 1005517 - RNA, 22 nt, Human
agaagguggaccccugaccaag

SEQ ID NO: 1005518 - RNA, 18 nt, Human
agacccggggagccacgc

SEQ ID NO: 1005519 - RNA, 22 nt, Human
agacggccgagacccggggagc

SEQ ID NO: 1005520 - RNA, 20 nt, Human
agagaaaagcucugcaggua

SEQ ID NO: 1005521 - RNA, 20 nt, Human
agcacacaaggcccacccac

SEQ ID NO: 1005522 - RNA, 24 nt, Human
agccacgcggcccgaaacagcccc

SEQ ID NO: 1005523 - RNA, 18 nt, Human
agccauuaccuacuguga

SEQ ID NO: 1005524 - RNA, 26 nt, Human
agccccugcuggcucuggcgucuuuc

SEQ ID NO: 1005525 - RNA, 23 nt, Human
aggaggcccggccugcggagggc

SEQ ID NO: 1005526 - RNA, 21 nt, Human
agggcagcaaaaacccccaag

SEQ ID NO: 1005527 - RNA, 23 nt, Human
agggcagcaaaaacccccaagca

SEQ ID NO: 1005528 - RNA, 22 nt, Human
agguacccaaggccccccagcc

SEQ ID NO: 1005529 - RNA, 28 nt, Human
auccagcacacaaggcccacccacaccc

SEQ ID NO: 1005530 - RNA, 21 nt, Human
caaaaacccccaagcacuuuc

SEQ ID NO: 1005531 - RNA, 21 nt, Human
caaggcccacccacaccagcc

SEQ ID NO: 1005532 - RNA, 21 nt, Human
cacaccagccccagcggcccg

SEQ ID NO: 1005533 - RNA, 21 nt, Human
caccacacggccaggccagac

SEQ ID NO: 1005534 - RNA, 26 nt, Human
caccacacggccaggccagaccagca

SEQ ID NO: 1005535 - RNA, 19 nt, Human
cacccuggguauccuccgc

SEQ ID NO: 1005536 - RNA, 18 nt, Human
caccgaggggcgcccagg

SEQ ID NO: 1005537 - RNA, 19 nt, Human
cacgcggcccgaaacagcc

SEQ ID NO: 1005538 - RNA, 26 nt, Human
cagcaaaaacccccaagcacuuucua

SEQ ID NO: 1005539 - RNA, 24 nt, Human
cagcacacaaggcccacccacacc

SEQ ID NO: 1005540 - RNA, 24 nt, Human
cagcauaggaggacgggcuucugg

SEQ ID NO: 1005541 - RNA, 24 nt, Human
caggagcuccaagaacgcagggaa

SEQ ID NO: 1005542 - RNA, 22 nt, Human
cagggcugaggcuccagucucc

SEQ ID NO: 1005543 - RNA, 24 nt, Human
ccaccccugggccccgagguuccc

SEQ ID NO: 1005544 - RNA, 22 nt, Human
ccagcacccgcggacgccagcu

SEQ ID NO: 1005545 - RNA, 18 nt, Human
ccaggacagggcugaggc

SEQ ID NO: 1005546 - RNA, 19 nt, Human
ccaggccagaccagcaccc

SEQ ID NO: 1005547 - RNA, 20 nt, Human
ccaggccagaccagcacccg

SEQ ID NO: 1005548 - RNA, 20 nt, Human
cccacccacaccagccccag

SEQ ID NO: 1005549 - RNA, 24 nt, Human
ccccaccucgacgcgaugcaccug

SEQ ID NO: 1005550 - RNA, 18 nt, Human
ccccccagccugcagcac

SEQ ID NO: 1005551 - RNA, 19 nt, Human
ccccccagccugcagcacc

SEQ ID NO: 1005552 - RNA, 24 nt, Human
cccccgagugcacggggccuucug

SEQ ID NO: 1005553 - RNA, 22 nt, Human
ccccugggccccgagguuccca

SEQ ID NO: 1005554 - RNA, 24 nt, Human
ccccugggccccgagguucccacc

SEQ ID NO: 1005555 - RNA, 20 nt, Human
cccgcuaagccucaucacca

SEQ ID NO: 1005556 - RNA, 19 nt, Human
cccgcugaggagccgggag

SEQ ID NO: 1005557 - RNA, 19 nt, Human
cccggggagccacgcggcc

SEQ ID NO: 1005558 - RNA, 19 nt, Human
cccguggccaggacagggc

SEQ ID NO: 1005559 - RNA, 25 nt, Human
cccguggccaggacagggcugaggc

SEQ ID NO: 1005560 - RNA, 22 nt, Human
cccugggccccgagguucccac

SEQ ID NO: 1005561 - RNA, 23 nt, Human
ccgggccggggugccccucugcc

SEQ ID NO: 1005562 - RNA, 22 nt, Human
cgcagaagaggggagacggccg

SEQ ID NO: 1005563 - RNA, 26 nt, Human
cgccaggagcuccaagaacgcaggag

SEQ ID NO: 1005564 - RNA, 26 nt, Human
cuaaaacagguccaaagacaacacgg

SEQ ID NO: 1005565 - RNA, 21 nt, Human
cuccagucuccuccaaagccc

SEQ ID NO: 1005566 - RNA, 19 nt, Human
cugagccacggccgucacu

SEQ ID NO: 1005567 - RNA, 20 nt, Human
cugaggcuccagucuccucc

SEQ ID NO: 1005568 - RNA, 21 nt, Human
cugaucaaaaaacgaagaaag

SEQ ID NO: 1005569 - RNA, 22 nt, Human
cuggcgucuuuccgggccgggg

SEQ ID NO: 1005570 - RNA, 20 nt, Human
cuugucucacgcccgccucc

SEQ ID NO: 1005571 - RNA, 25 nt, Human
gagagcacucugguggccaaggggc

SEQ ID NO: 1005572 - RNA, 18 nt, Human
gagccgggagcuccgaga

SEQ ID NO: 1005573 - RNA, 18 nt, Human
gcagcaccgaggggcgcc

SEQ ID NO: 1005574 - RNA, 20 nt, Human
gccccgagguucccacccgc

SEQ ID NO: 1005575 - RNA, 21 nt, Human
gccccgagguucccacccgcu

SEQ ID NO: 1005576 - RNA, 21 nt, Human
gccugggcugggccuccucug

SEQ ID NO: 1005577 - RNA, 18 nt, Human
gcggacgccagcuccacc

SEQ ID NO: 1005578 - RNA, 18 nt, Human
ggacuccgguccuccgcc

SEQ ID NO: 1005579 - RNA, 22 nt, Human
ggagggcaccggcagcccccgc

SEQ ID NO: 1005580 - RNA, 23 nt, Human
ggccgagacccggggagccacgg

SEQ ID NO: 1005581 - RNA, 20 nt, Human
gggagccacgcggcccgaaa

SEQ ID NO: 1005582 - RNA, 22 nt, Human
gggcugggccuccucugugagc

SEQ ID NO: 1005583 - RNA, 19 nt, Human
gggcugggcuugucucacg

SEQ ID NO: 1005584 - RNA, 19 nt, Human
guccaaagacaacacggaa

SEQ ID NO: 1005585 - RNA, 19 nt, Human
guuuuugcuuccccuuuca

SEQ ID NO: 1005586 - RNA, 22 nt, Human
uacccaaggccccccagccugc

SEQ ID NO: 1005587 - RNA, 18 nt, Human
uaggagccuggugggucu

SEQ ID NO: 1005588 - RNA, 22 nt, Human
uaggaggacgggcuucuggccc

SEQ ID NO: 1005589 - RNA, 24 nt, Human
uauggauccugagccacggccguc

SEQ ID NO: 1005590 - RNA, 21 nt, Human
uccccuuucagguuuuuaaaa

SEQ ID NO: 1005591 - RNA, 18 nt, Human
uccgccugccugggcugg

SEQ ID NO: 1005592 - RNA, 22 nt, Human
uccgguccuccgccuuccacca

SEQ ID NO: 1005593 - RNA, 21 nt, Human
uccuccgccugccugggcugg

SEQ ID NO: 1005594 - RNA, 18 nt, Human
uccucugugagccagaga

SEQ ID NO: 1005595 - RNA, 23 nt, Human
uccucugugagccagagaaggug

SEQ ID NO: 1005596 - RNA, 24 nt, Human
ugaaaaacggguuuacuaaaacag

SEQ ID NO: 1005597 - RNA, 26 nt, Human
ugaaagaccuuuuuuuuccacaagaa

SEQ ID NO: 1005598 - RNA, 20 nt, Human
ugaaggccagcgcagggggc

SEQ ID NO: 1005599 - RNA, 19 nt, Human
ugagcgcgugcgggcuggg

SEQ ID NO: 1005600 - RNA, 21 nt, Human
ugaggcuccagucuccuccaa

SEQ ID NO: 1005601 - RNA, 21 nt, Human
ugagggaggcccccgagugca

SEQ ID NO: 1005602 - RNA, 23 nt, Human
ugcacggggccuucugcagggac

SEQ ID NO: 1005603 - RNA, 22 nt, Human
ugcagcaccgaggggcgcccag

SEQ ID NO: 1005604 - RNA, 27 nt, Human
ugccugggcugggccuccucugugagc

SEQ ID NO: 1005605 - RNA, 24 nt, Human
ugcggagggcaccggcagcccccg

SEQ ID NO: 1005606 - RNA, 20 nt, Human
uggagugagcaggcuccugg

SEQ ID NO: 1005607 - RNA, 19 nt, Human
uggauccugagccacggcc

SEQ ID NO: 1005608 - RNA, 28 nt, Human
ugggggcagagagcacucuccccgaggg

SEQ ID NO: 1005609 - RNA, 19 nt, Human
uggguauccuccgccugcc

SEQ ID NO: 1005610 - RNA, 23 nt, Human
ugguggccaaggggcuccgccuc

SEQ ID NO: 1005611 - RNA, 23 nt, Human
uguccagccugccgaggucacgc

SEQ ID NO: 1005612 - RNA, 18 nt, Human
ugugaaggccagcgcagg

SEQ ID NO: 1005613 - RNA, 19 nt, Human
uuccagggcagcaaaaacc

SEQ ID NO: 1005614 - RNA, 21 nt, Human
uuggagugagcaggcuccugg

SEQ ID NO: 1005615 - RNA, 23 nt, Human
aaaaaaaaaaaaaaaagcaacua

SEQ ID NO: 1005616 - RNA, 22 nt, Human
aaaaaaagcaacuaaccccaaa

SEQ ID NO: 1005617 - RNA, 26 nt, Human
aaaaaaaugcaggcuuggcuaggcga

SEQ ID NO: 1005618 - RNA, 22 nt, Human
aaaagcaacuaaccccaaaccc

SEQ ID NO: 1005619 - RNA, 24 nt, Human
aaagugcugggauaauaggcauga

SEQ ID NO: 1005620 - RNA, 24 nt, Human
aaccccaaacccagaucucuaaag

SEQ ID NO: 1005621 - RNA, 20 nt, Human
aaccucugccuccccggcuc

SEQ ID NO: 1005622 - RNA, 23 nt, Human
aacuaaccccaaacccagaucuc

SEQ ID NO: 1005623 - RNA, 22 nt, Human
aagaacacaagcacaccggagg

SEQ ID NO: 1005624 - RNA, 21 nt, Human
aagagccccgggagggagcag

SEQ ID NO: 1005625 - RNA, 21 nt, Human
aagcaacuaaccccaaaccca

SEQ ID NO: 1005626 - RNA, 24 nt, Human
aagcagccugauccucccgaaggu

SEQ ID NO: 1005627 - RNA, 22 nt, Human
aagcaucuuuaggcuguuccuu

SEQ ID NO: 1005628 - RNA, 21 nt, Human
aagcccaggaguucgaggcug

SEQ ID NO: 1005629 - RNA, 19 nt, Human
aagcuaaauguugggcuga

SEQ ID NO: 1005630 - RNA, 18 nt, Human
aagcugcagugacugcac

SEQ ID NO: 1005631 - RNA, 24 nt, Human
aagugauccacccaccuuggccuc

SEQ ID NO: 1005632 - RNA, 19 nt, Human
aagugcugggauaauaggc

SEQ ID NO: 1005633 - RNA, 23 nt, Human
aaugauguaggaacucaaaaaaa

SEQ ID NO: 1005634 - RNA, 20 nt, Human
acaccaccaugcccagcuaa

SEQ ID NO: 1005635 - RNA, 22 nt, Human
acagacacccccacugcuccca

SEQ ID NO: 1005636 - RNA, 23 nt, Human
acagacccagaaagccaggggca

SEQ ID NO: 1005637 - RNA, 21 nt, Human
acagagaccaacccugucuca

SEQ ID NO: 1005638 - RNA, 20 nt, Human
accaggaggaaacccacagc

SEQ ID NO: 1005639 - RNA, 20 nt, Human
accccaaacccagaucucua

SEQ ID NO: 1005640 - RNA, 22 nt, Human
accuugucucuacaaaaaauaa

SEQ ID NO: 1005641 - RNA, 24 nt, Human
acuagagcucuggacggccuaaag

SEQ ID NO: 1005642 - RNA, 22 nt, Human
acuccacagacacccccacugc

SEQ ID NO: 1005643 - RNA, 18 nt, Human
acuccgucgcccaggcug

SEQ ID NO: 1005644 - RNA, 19 nt, Human
acuccgucgcccaggcugg

SEQ ID NO: 1005645 - RNA, 25 nt, Human
acuccgucgcccaggcuggaguaca

SEQ ID NO: 1005646 - RNA, 24 nt, Human
acugcccucaagcuugggcaacag

SEQ ID NO: 1005647 - RNA, 23 nt, Human
agaaaaacacacgcaacuccugg

SEQ ID NO: 1005648 - RNA, 19 nt, Human
agaaagccaggggcacaca

SEQ ID NO: 1005649 - RNA, 22 nt, Human
agaggcacagacccagaaagcc

SEQ ID NO: 1005650 - RNA, 22 nt, Human
agcaacuaaccccaaacccaga

SEQ ID NO: 1005651 - RNA, 19 nt, Human
agcaucagaagcagccuga

SEQ ID NO: 1005652 - RNA, 19 nt, Human
agcuggcacuggccagagg

SEQ ID NO: 1005653 - RNA, 23 nt, Human
agcugggcaugguggcacaugcc

SEQ ID NO: 1005654 - RNA, 23 nt, Human
aggaaugugccgguucacaggga

SEQ ID NO: 1005655 - RNA, 20 nt, Human
aggaguuugagaccagucug

SEQ ID NO: 1005656 - RNA, 19 nt, Human
aggcacagacccagaaagc

SEQ ID NO: 1005657 - RNA, 19 nt, Human
aggcaggggggguggcagg

SEQ ID NO: 1005658 - RNA, 19 nt, Human
aggcaggggggguggcagg

SEQ ID NO: 1005659 - RNA, 22 nt, Human
aggcaggggggguggcagggag

SEQ ID NO: 1005660 - RNA, 20 nt, Human
aggcaugagccaccaugccc

SEQ ID NO: 1005661 - RNA, 21 nt, Human
aggcaugagccaccaugcccg

SEQ ID NO: 1005662 - RNA, 21 nt, Human
aggcgaaguggcucaugccug

SEQ ID NO: 1005663 - RNA, 19 nt, Human
aggcugagguagaaggauc

SEQ ID NO: 1005664 - RNA, 18 nt, Human
aggcugcgagucgggggg

SEQ ID NO: 1005665 - RNA, 20 nt, Human
agggagcccuccacccuccc

SEQ ID NO: 1005666 - RNA, 19 nt, Human
agggccugccacuccaggg

SEQ ID NO: 1005667 - RNA, 26 nt, Human
agggggguaugcggacugaccuucgg

SEQ ID NO: 1005668 - RNA, 19 nt, Human
aggguggggcuggcuccag

SEQ ID NO: 1005669 - RNA, 22 nt, Human
aggugaugaagaagagccccgg

SEQ ID NO: 1005670 - RNA, 20 nt, Human
aguacaguggugcgaucucg

SEQ ID NO: 1005671 - RNA, 24 nt, Human
aguacaguggugcgaucucggcuc

SEQ ID NO: 1005672 - RNA, 18 nt, Human
aguagcuggcauuacagg

SEQ ID NO: 1005673 - RNA, 24 nt, Human
agucuggacaacauagcaagaccu

SEQ ID NO: 1005674 - RNA, 19 nt, Human
agugauccacccaccuugg

SEQ ID NO: 1005675 - RNA, 24 nt, Human
aguggcucaugccugcaauccaag

SEQ ID NO: 1005676 - RNA, 24 nt, Human
auccuuguauuuuuaguagagaug

SEQ ID NO: 1005677 - RNA, 22 nt, Human
augccucagccuccugaguagc

SEQ ID NO: 1005678 - RNA, 20 nt, Human
auggggucuugccauguugg

SEQ ID NO: 1005679 - RNA, 24 nt, Human
caaagugcugggauaauaggcaug

SEQ ID NO: 1005680 - RNA, 25 nt, Human
caacagagaccaacccugucucaau

SEQ ID NO: 1005681 - RNA, 22 nt, Human
caacauagcaagaccuugucuc

SEQ ID NO: 1005682 - RNA, 24 nt, Human
caacauagcaagaccuugucucua

SEQ ID NO: 1005683 - RNA, 24 nt, Human
caacuaaccccaaacccagaucuc

SEQ ID NO: 1005684 - RNA, 19 nt, Human
caacuccuggggguggcuc

SEQ ID NO: 1005685 - RNA, 21 nt, Human
caagaaaugcuuuugcuacau

SEQ ID NO: 1005686 - RNA, 28 nt, Human
caagcgauucucaugccucagccuccug

SEQ ID NO: 1005687 - RNA, 23 nt, Human
caagcuugggcaacagagaccaa

SEQ ID NO: 1005688 - RNA, 19 nt, Human
caaggguagugaaaagacc

SEQ ID NO: 1005689 - RNA, 18 nt, Human
caaugggucuccuccagu

SEQ ID NO: 1005690 - RNA, 18 nt, Human
cacaagcacaccggaggg

SEQ ID NO: 1005691 - RNA, 22 nt, Human
cacaaucuagggugagccaccc

SEQ ID NO: 1005692 - RNA, 19 nt, Human
cacacaccaccaugcccag

SEQ ID NO: 1005693 - RNA, 18 nt, Human
cacaccaccaugcccagc

SEQ ID NO: 1005694 - RNA, 20 nt, Human
cacaggagccucgccagcga

SEQ ID NO: 1005695 - RNA, 19 nt, Human
cacagggacccgcggcuaa

SEQ ID NO: 1005696 - RNA, 19 nt, Human
caccaaaccggggacgccg

SEQ ID NO: 1005697 - RNA, 20 nt, Human
caccaaaccggggacgccgc

SEQ ID NO: 1005698 - RNA, 18 nt, Human
caccagagcagucuuggg

SEQ ID NO: 1005699 - RNA, 21 nt, Human
caccagagcagucuugggggc

SEQ ID NO: 1005700 - RNA, 19 nt, Human
caccagcccccacacucac

SEQ ID NO: 1005701 - RNA, 22 nt, Human
cacccaccuuggccucccaaag

SEQ ID NO: 1005702 - RNA, 23 nt, Human
cacccaccuuggccucccaaagu

SEQ ID NO: 1005703 - RNA, 22 nt, Human
cacccucccaccacguaugccc

SEQ ID NO: 1005704 - RNA, 24 nt, Human
cacucaccaagaaaugcuuuugcc

SEQ ID NO: 1005705 - RNA, 21 nt, Human
cacuccacagacacccccacu

SEQ ID NO: 1005706 - RNA, 22 nt, Human
cacuccgucgcccaggcuggag

SEQ ID NO: 1005707 - RNA, 18 nt, Human
cacugcaaccucugccuc

SEQ ID NO: 1005708 - RNA, 24 nt, Human
cacugcccucaagcuugggcaaca

SEQ ID NO: 1005709 - RNA, 22 nt, Human
cagagggagcccuccacccucc

SEQ ID NO: 1005710 - RNA, 19 nt, Human
cagccuccugaguagcugg

SEQ ID NO: 1005711 - RNA, 18 nt, Human
cagccugauccucccgaa

SEQ ID NO: 1005712 - RNA, 20 nt, Human
caggaguucgaggcugcaau

SEQ ID NO: 1005713 - RNA, 19 nt, Human
cagggacauccccccgccc

SEQ ID NO: 1005714 - RNA, 19 nt, Human
cagggacccgcggcuaagc

SEQ ID NO: 1005715 - RNA, 22 nt, Human
cagugccaagaggaagcagagc

SEQ ID NO: 1005716 - RNA, 19 nt, Human
cagugcccugcuggacagg

SEQ ID NO: 1005717 - RNA, 25 nt, Human
cauagcaagaccuugucucuacaaa

SEQ ID NO: 1005718 - RNA, 23 nt, Human
caugagccaccaugcccggccau

SEQ ID NO: 1005719 - RNA, 24 nt, Human
caugccucagccuccugaguagcu

SEQ ID NO: 1005720 - RNA, 24 nt, Human
cauguuggccaggcuggucucgaa

SEQ ID NO: 1005721 - RNA, 24 nt, Human
cauuacaggcacacaccaccaugc

SEQ ID NO: 1005722 - RNA, 24 nt, Human
ccaaagugcugggauaauaggcau

SEQ ID NO: 1005723 - RNA, 25 nt, Human
ccacuccaggggcucccaggcugga

SEQ ID NO: 1005724 - RNA, 24 nt, Human
ccacugcccucaagcuugggcaac

SEQ ID NO: 1005725 - RNA, 24 nt, Human
ccagagcagucuugggggcaggag

SEQ ID NO: 1005726 - RNA, 22 nt, Human
ccaugcccggccaugcuggggc

SEQ ID NO: 1005727 - RNA, 19 nt, Human
ccauguuggccaggcuggu

SEQ ID NO: 1005728 - RNA, 22 nt, Human
ccauguuggccaggcuggucuc

SEQ ID NO: 1005729 - RNA, 23 nt, Human
ccauguuggccaggcuggucucg

SEQ ID NO: 1005730 - RNA, 19 nt, Human
cccagcagccagagcacac

SEQ ID NO: 1005731 - RNA, 21 nt, Human
ccccacugcucccaaggucca

SEQ ID NO: 1005732 - RNA, 21 nt, Human
cccccucagcuccucccagca

SEQ ID NO: 1005733 - RNA, 20 nt, Human
ccccggcucaagcgauucuc

SEQ ID NO: 1005734 - RNA, 19 nt, Human
cccucagcaggggucuucc

SEQ ID NO: 1005735 - RNA, 19 nt, Human
ccgucgcccaggcuggagu

SEQ ID NO: 1005736 - RNA, 19 nt, Human
ccgugcugacgcugacugc

SEQ ID NO: 1005737 - RNA, 19 nt, Human
ccuauaguuccugcuaccu

SEQ ID NO: 1005738 - RNA, 20 nt, Human
ccucaggggugcuguggccc

SEQ ID NO: 1005739 - RNA, 22 nt, Human
ccucaggggugcuguggcccug

SEQ ID NO: 1005740 - RNA, 24 nt, Human
ccugaccucaagugauccacccac

SEQ ID NO: 1005741 - RNA, 23 nt, Human
ccugaguagcuggcauuacaggc

SEQ ID NO: 1005742 - RNA, 19 nt, Human
ccugcagcggucugggcag

SEQ ID NO: 1005743 - RNA, 22 nt, Human
cgacuccgagccucacagcccc

SEQ ID NO: 1005744 - RNA, 22 nt, Human
cuaggguggggcuggcuccagu

SEQ ID NO: 1005745 - RNA, 24 nt, Human
cucaagugauccacccaccuuggc

SEQ ID NO: 1005746 - RNA, 25 nt, Human
cucacugcaaccucugccuccccgg

SEQ ID NO: 1005747 - RNA, 25 nt, Human
cucaugccucagccuccugaguagc

SEQ ID NO: 1005748 - RNA, 23 nt, Human
cuccacagacacccccacugcuc

SEQ ID NO: 1005749 - RNA, 24 nt, Human
cuccgagccucacagccccacuuc

SEQ ID NO: 1005750 - RNA, 23 nt, Human
cuccuguucccccucagcuccuc

SEQ ID NO: 1005751 - RNA, 18 nt, Human
cucugugccuggggccug

SEQ ID NO: 1005752 - RNA, 21 nt, Human
cugaagccagcugagcacagc

SEQ ID NO: 1005753 - RNA, 20 nt, Human
cugcaaccucugccuccccg

SEQ ID NO: 1005754 - RNA, 20 nt, Human
cuggacaacauagcaagacc

SEQ ID NO: 1005755 - RNA, 18 nt, Human
gacacagauacuggcucc

SEQ ID NO: 1005756 - RNA, 23 nt, Human
gaccucaagugauccacccaccu

SEQ ID NO: 1005757 - RNA, 24 nt, Human
gagagggagucucacuccgucgcc

SEQ ID NO: 1005758 - RNA, 19 nt, Human
gagcacagcuggcacuggc

SEQ ID NO: 1005759 - RNA, 22 nt, Human
gagccucacagccccacuuccg

SEQ ID NO: 1005760 - RNA, 24 nt, Human
gaguagcuggcauuacaggcacac

SEQ ID NO: 1005761 - RNA, 18 nt, Human
gauaauaggcaugagcca

SEQ ID NO: 1005762 - RNA, 24 nt, Human
gauaauaggcaugagccaccaugc

SEQ ID NO: 1005763 - RNA, 21 nt, Human
gauucucaugccucagccucc

SEQ ID NO: 1005764 - RNA, 19 nt, Human
gcacacaccaccaugccca

SEQ ID NO: 1005765 - RNA, 18 nt, Human
gcacagacccagaaagcc

SEQ ID NO: 1005766 - RNA, 22 nt, Human
gcacagacccagaaagccaggg

SEQ ID NO: 1005767 - RNA, 20 nt, Human
gcauuacaggcacacaccac

SEQ ID NO: 1005768 - RNA, 20 nt, Human
gcccaggcuggaguacagug

SEQ ID NO: 1005769 - RNA, 18 nt, Human
gccccgggagggagcagg

SEQ ID NO: 1005770 - RNA, 22 nt, Human
gcccugcuccuguucccccuca

SEQ ID NO: 1005771 - RNA, 22 nt, Human
gccgcaacaccaaaccggggac

SEQ ID NO: 1005772 - RNA, 22 nt, Human
gccugauccucccgaagguggg

SEQ ID NO: 1005773 - RNA, 24 nt, Human
gcgauucucaugccucagccuccu

SEQ ID NO: 1005774 - RNA, 23 nt, Human
gcgggcggcggcgacacagauac

SEQ ID NO: 1005775 - RNA, 19 nt, Human
gcuaccugggaggcugagg

SEQ ID NO: 1005776 - RNA, 19 nt, Human
gcucugugccuggggccug

SEQ ID NO: 1005777 - RNA, 23 nt, Human
gcuggucucgaacuccugaccuc

SEQ ID NO: 1005778 - RNA, 19 nt, Human
ggaggcaguccggcccuca

SEQ ID NO: 1005779 - RNA, 21 nt, Human
ggagggagcaggcagcucugu

SEQ ID NO: 1005780 - RNA, 24 nt, Human
ggauaauaggcaugagccaccaug

SEQ ID NO: 1005781 - RNA, 24 nt, Human
ggcagggacauccccccgcccucu

SEQ ID NO: 1005782 - RNA, 24 nt, Human
ggcuggucucgaacuccugaccuc

SEQ ID NO: 1005783 - RNA, 25 nt, Human
gggaagcaggcuguucccugagacc

SEQ ID NO: 1005784 - RNA, 19 nt, Human
gggagcccuccacccuccc

SEQ ID NO: 1005785 - RNA, 19 nt, Human
gggcgccgcaacaccaaac

SEQ ID NO: 1005786 - RNA, 22 nt, Human
gggcucucgggguuggguggac

SEQ ID NO: 1005787 - RNA, 19 nt, Human
gggcuuuuuucuuuuuuug

SEQ ID NO: 1005788 - RNA, 22 nt, Human
ggggucuugccauguuggccag

SEQ ID NO: 1005789 - RNA, 23 nt, Human
ggguaagacaagauucuggagag

SEQ ID NO: 1005790 - RNA, 23 nt, Human
ggguagugaaaagaccacuuccu

SEQ ID NO: 1005791 - RNA, 20 nt, Human
ggguccugggcucaggcagg

SEQ ID NO: 1005792 - RNA, 22 nt, Human
gggucuugccauguuggccagg

SEQ ID NO: 1005793 - RNA, 20 nt, Human
gggugcaggugggcgacagg

SEQ ID NO: 1005794 - RNA, 22 nt, Human
gggugcuguggcccugcuccug

SEQ ID NO: 1005795 - RNA, 23 nt, Human
ggguguggacuagagcucuggac

SEQ ID NO: 1005796 - RNA, 19 nt, Human
gguccugggcucaggcagg

SEQ ID NO: 1005797 - RNA, 19 nt, Human
ggucucgaacuccugaccu

SEQ ID NO: 1005798 - RNA, 27 nt, Human
ggugaugaagaagagccccgggaggga

SEQ ID NO: 1005799 - RNA, 24 nt, Human
gguggcacaugccuauaguuccug

SEQ ID NO: 1005800 - RNA, 18 nt, Human
guaagacaagauucugga

SEQ ID NO: 1005801 - RNA, 23 nt, Human
guagagauggggucuugccaugu

SEQ ID NO: 1005802 - RNA, 23 nt, Human
gucagugccaagaggaagcagag

SEQ ID NO: 1005803 - RNA, 20 nt, Human
gugaggugaugaagaagaga

SEQ ID NO: 1005804 - RNA, 24 nt, Human
gugauccacccaccuuggccuccc

SEQ ID NO: 1005805 - RNA, 20 nt, Human
gugccaagaggaagcagagc

SEQ ID NO: 1005806 - RNA, 28 nt, Human
guuuguguccuuucaggucgucgacagg

SEQ ID NO: 1005807 - RNA, 19 nt, Human
uaagaaaaacacacgcaac

SEQ ID NO: 1005808 - RNA, 18 nt, Human
uaagaacacaagcacacc

SEQ ID NO: 1005809 - RNA, 19 nt, Human
uaagaacacaagcacaccg

SEQ ID NO: 1005810 - RNA, 22 nt, Human
uaaggggaggcaguccggcccu

SEQ ID NO: 1005811 - RNA, 23 nt, Human
uaaggggaggcaguccggcccuc

SEQ ID NO: 1005812 - RNA, 24 nt, Human
uaauccuuguauuuuuaguagaga

SEQ ID NO: 1005813 - RNA, 23 nt, Human
uagaaggaucccuuaagcccagg

SEQ ID NO: 1005814 - RNA, 22 nt, Human
uagagauggggucuugccaugu

SEQ ID NO: 1005815 - RNA, 22 nt, Human
uagagcucuggacggccuaaag

SEQ ID NO: 1005816 - RNA, 18 nt, Human
uagcauguuucuggcaag

SEQ ID NO: 1005817 - RNA, 18 nt, Human
uagcuggcauuacaggca

SEQ ID NO: 1005818 - RNA, 22 nt, Human
uagcugggcaugguggcacaug

SEQ ID NO: 1005819 - RNA, 24 nt, Human
uaguagagauggggucuugccaug

SEQ ID NO: 1005820 - RNA, 24 nt, Human
uaucgcuugagcccaggaguuuga

SEQ ID NO: 1005821 - RNA, 21 nt, Human
ucaaaaaaaugcaggcuuggc

SEQ ID NO: 1005822 - RNA, 25 nt, Human
ucaauuaaaaaaaaaaaaaaaaaaa

SEQ ID NO: 1005823 - RNA, 27 nt, Human
ucaauuaaaaaaaaaaaaaaaaaaagc

SEQ ID NO: 1005824 - RNA, 21 nt, Human
ucacugagguucuucuagugg

SEQ ID NO: 1005825 - RNA, 23 nt, Human
ucacugagguucuucuaguggcu

SEQ ID NO: 1005826 - RNA, 19 nt, Human
ucacugcaaccucugccuc

SEQ ID NO: 1005827 - RNA, 24 nt, Human
ucacugcaaccucugccuccccgg

SEQ ID NO: 1005828 - RNA, 27 nt, Human
ucacugcaaccucugccuccccggcuc

SEQ ID NO: 1005829 - RNA, 20 nt, Human
ucagccuccugaguagcugg

SEQ ID NO: 1005830 - RNA, 20 nt, Human
ucaggcaggggggguggcag

SEQ ID NO: 1005831 - RNA, 24 nt, Human
uccacagacacccccacugcuccc

SEQ ID NO: 1005832 - RNA, 24 nt, Human
uccacagacacccccacugcuccc

SEQ ID NO: 1005833 - RNA, 20 nt, Human
uccacuugugugggugcagg

SEQ ID NO: 1005834 - RNA, 21 nt, Human
uccaguuuguguccuuucagg

SEQ ID NO: 1005835 - RNA, 24 nt, Human
ucccaaagugcugggauaauaggc

SEQ ID NO: 1005836 - RNA, 20 nt, Human
ucccagcagccagagcacac

SEQ ID NO: 1005837 - RNA, 23 nt, Human
uccccagggaccugcagcggucu

SEQ ID NO: 1005838 - RNA, 18 nt, Human
ucccccucagcuccuccc

SEQ ID NO: 1005839 - RNA, 21 nt, Human
uccccggcucaagcgauucuc

SEQ ID NO: 1005840 - RNA, 21 nt, Human
uccccggcucaagcgauucuc

SEQ ID NO: 1005841 - RNA, 23 nt, Human
ucccuuaagcccaggaguucgag

SEQ ID NO: 1005842 - RNA, 23 nt, Human
uccggcgacuccgagccucacag

SEQ ID NO: 1005843 - RNA, 26 nt, Human
uccucccagcaaugggucuccuccag

SEQ ID NO: 1005844 - RNA, 19 nt, Human
uccugagaucugggccaca

SEQ ID NO: 1005845 - RNA, 24 nt, Human
uccugaguagcuggcauuacaggc

SEQ ID NO: 1005846 - RNA, 20 nt, Human
uccuuguauuuuuaguagag

SEQ ID NO: 1005847 - RNA, 24 nt, Human
ucgcccaggcuggaguacaguggu

SEQ ID NO: 1005848 - RNA, 19 nt, Human
ucgcuugagcccaggaguu

SEQ ID NO: 1005849 - RNA, 23 nt, Human
ucucacuccgucgcccaggcugg

SEQ ID NO: 1005850 - RNA, 24 nt, Human
ucucacuccgucgcccaggcugga

SEQ ID NO: 1005851 - RNA, 25 nt, Human
ucucacuccgucgcccaggcuggag

SEQ ID NO: 1005852 - RNA, 21 nt, Human
ucuccgagagaugggcuccca

SEQ ID NO: 1005853 - RNA, 21 nt, Human
ucucgaacuccugaccucaag

SEQ ID NO: 1005854 - RNA, 18 nt, Human
ucucgggguuggguggac

SEQ ID NO: 1005855 - RNA, 23 nt, Human
ucuugccauguuggccaggcugg

SEQ ID NO: 1005856 - RNA, 24 nt, Human
ucuugccauguuggccaggcuggu

SEQ ID NO: 1005857 - RNA, 18 nt, Human
ugaaaaaaggaugcagcc

SEQ ID NO: 1005858 - RNA, 24 nt, Human
ugaagaagagccccgggagggagc

SEQ ID NO: 1005859 - RNA, 18 nt, Human
ugacacagacaggcacuc

SEQ ID NO: 1005860 - RNA, 19 nt, Human
ugacacagacaggcacucc

SEQ ID NO: 1005861 - RNA, 23 nt, Human
ugagcccaggaguuugagaccag

SEQ ID NO: 1005862 - RNA, 30 nt, Human
ugaggaaacgcugcgcucccccucaauucc

SEQ ID NO: 1005863 - RNA, 20 nt, Human
ugagguucuucuaguggcug

SEQ ID NO: 1005864 - RNA, 19 nt, Human
ugagucaugcacuccacag

SEQ ID NO: 1005865 - RNA, 24 nt, Human
ugauccacccaccuuggccuccca

SEQ ID NO: 1005866 - RNA, 22 nt, Human
ugcaaugaguuaugauugcacc

SEQ ID NO: 1005867 - RNA, 19 nt, Human
ugcaccacugcccucaagc

SEQ ID NO: 1005868 - RNA, 27 nt, Human
ugccacuccaggggcucccaggcugga

SEQ ID NO: 1005869 - RNA, 24 nt, Human
ugccauguuggccaggcuggucuc

SEQ ID NO: 1005870 - RNA, 27 nt, Human
ugccauguuggccaggcuggucucgaa

SEQ ID NO: 1005871 - RNA, 22 nt, Human
ugccuaggguggggcuggcucc

SEQ ID NO: 1005872 - RNA, 24 nt, Human
ugccucagccuccugaguagcugg

SEQ ID NO: 1005873 - RNA, 23 nt, Human
ugccugcaauccaagcacucugg

SEQ ID NO: 1005874 - RNA, 18 nt, Human
ugccuggggccuggccag

SEQ ID NO: 1005875 - RNA, 24 nt, Human
uggaguacaguggugcgaucucgg

SEQ ID NO: 1005876 - RNA, 19 nt, Human
uggcacaugccuauaguuc

SEQ ID NO: 1005877 - RNA, 23 nt, Human
uggcauuacaggcacacaccacc

SEQ ID NO: 1005878 - RNA, 24 nt, Human
uggcauuacaggcacacaccacca

SEQ ID NO: 1005879 - RNA, 20 nt, Human
uggccagaccucaggggugc

SEQ ID NO: 1005880 - RNA, 24 nt, Human
uggccaggcuggucucgaacuccu

SEQ ID NO: 1005881 - RNA, 24 nt, Human
uggcuaggcgaaguggcucaugcc

SEQ ID NO: 1005882 - RNA, 22 nt, Human
uggcucaugccugcaauccaag

SEQ ID NO: 1005883 - RNA, 24 nt, Human
uggcucaugccugcaauccaagca

SEQ ID NO: 1005884 - RNA, 26 nt, Human
uggcugagaggauaucuuccaagcau

SEQ ID NO: 1005885 - RNA, 25 nt, Human
ugggaagcaggcuguucccugagac

SEQ ID NO: 1005886 - RNA, 19 nt, Human
ugggaggcugagguagaag

SEQ ID NO: 1005887 - RNA, 23 nt, Human
ugggauaauaggcaugagccacc

SEQ ID NO: 1005888 - RNA, 24 nt, Human
ugggauaauaggcaugagccacca

SEQ ID NO: 1005889 - RNA, 21 nt, Human
ugggcgccgcaacaccaaacc

SEQ ID NO: 1005890 - RNA, 24 nt, Human
uggggucuugccauguuggccagg

SEQ ID NO: 1005891 - RNA, 23 nt, Human
ugguggcacaugccuauaguucc

SEQ ID NO: 1005892 - RNA, 21 nt, Human
uguauuuuuaguagagauggg

SEQ ID NO: 1005893 - RNA, 21 nt, Human
uuaagcccaggaguucgaggc

SEQ ID NO: 1005894 - RNA, 18 nt, Human
uuagcugggcaugguggc

SEQ ID NO: 1005895 - RNA, 24 nt, Human
uuagcugggcaugguggcacaugc

SEQ ID NO: 1005896 - RNA, 18 nt, Human
uuaguagagauggggucu

SEQ ID NO: 1005897 - RNA, 23 nt, Human
uuaguagagauggggucuugcca

SEQ ID NO: 1005898 - RNA, 24 nt, Human
uuaguagagauggggucuugccau

SEQ ID NO: 1005899 - RNA, 22 nt, Human
uugagcccaggaguuugagacc

SEQ ID NO: 1005900 - RNA, 24 nt, Human
uugccauguuggccaggcuggucu

SEQ ID NO: 1005901 - RNA, 18 nt, Human
uuggccucccaaagugcu

SEQ ID NO: 1005902 - RNA, 23 nt, Human
uuguauuuuuaguagagaugggg

SEQ ID NO: 1005903 - RNA, 19 nt, Human
uuuggaugacccugaaggc

SEQ ID NO: 1005904 - RNA, 23 nt, Human
uuuucuuuuuuugagagggaguc

SEQ ID NO: 1005905 - RNA, 21 nt, Human
uuuuuaguagagauggggucu

SEQ ID NO: 1005906 - RNA, 21 nt, Human
uuuuuucuuuuuuugagaggg

SEQ ID NO: 1005907 - RNA, 20 nt, Human
aaaaaaagacaaaucguggc

SEQ ID NO: 1005908 - RNA, 22 nt, Human
aaaaaaagacaaaucguggcaa

SEQ ID NO: 1005909 - RNA, 20 nt, Human
aaaaagacaaaucguggcaa

SEQ ID NO: 1005910 - RNA, 23 nt, Human
aaacagaugaaaauauugcccau

SEQ ID NO: 1005911 - RNA, 21 nt, Human
aaaugcuuacaagcaccaaca

SEQ ID NO: 1005912 - RNA, 21 nt, Human
accaacaccaaaauucugucu

SEQ ID NO: 1005913 - RNA, 21 nt, Human
acuauugcuaaaaaugacauc

SEQ ID NO: 1005914 - RNA, 19 nt, Human
agagguuguaugcuuccuc

SEQ ID NO: 1005915 - RNA, 19 nt, Human
agcuauaacaccauuuaca

SEQ ID NO: 1005916 - RNA, 20 nt, Human
auggccacaauuaaaugagu

SEQ ID NO: 1005917 - RNA, 24 nt, Human
caagaaauagccuauguucaauau

SEQ ID NO: 1005918 - RNA, 21 nt, Human
caccaacaccaaaauucuguc

SEQ ID NO: 1005919 - RNA, 26 nt, Human
ccauuuacaaaucauuaugaacaaga

SEQ ID NO: 1005920 - RNA, 19 nt, Human
cuacaaguaaacagaugaa

SEQ ID NO: 1005921 - RNA, 25 nt, Human
cucauaaucucucucuccagguauc

SEQ ID NO: 1005922 - RNA, 19 nt, Human
gcuuacaagcaccaacacc

SEQ ID NO: 1005923 - RNA, 22 nt, Human
uaaaaaaagacaaaucguggca

SEQ ID NO: 1005924 - RNA, 20 nt, Human
uaaaagaagcaauacauuug

SEQ ID NO: 1005925 - RNA, 21 nt, Human
uacaagcaccaacaccaaaau

SEQ ID NO: 1005926 - RNA, 26 nt, Human
uauaaaaaaagacaaaucguggcaac

SEQ ID NO: 1005927 - RNA, 22 nt, Human
uaugaacaagauaaauucugca

SEQ ID NO: 1005928 - RNA, 21 nt, Human
ucauaaucucucucuccaggu

SEQ ID NO: 1005929 - RNA, 19 nt, Human
ugaaaaugcuuacaagcac

SEQ ID NO: 1005930 - RNA, 27 nt, Human
ugaacaagauaaauucugcaauaauau

SEQ ID NO: 1005931 - RNA, 20 nt, Human
uuaaacagccaugucuuggc

SEQ ID NO: 1005932 - RNA, 18 nt, Human
uuguaugcuuccuccucu

SEQ ID NO: 1005933 - RNA, 22 nt, Human
uuuccaugaguuuucuauuaug

SEQ ID NO: 1005934 - RNA, 22 nt, Human
aaaaacaaaacaaaaauaccac

SEQ ID NO: 1005935 - RNA, 20 nt, Human
aaaaagacgacacaaggaca

SEQ ID NO: 1005936 - RNA, 22 nt, Human
aaaaagacgacacaaggacagg

SEQ ID NO: 1005937 - RNA, 26 nt, Human
aaaaagacgacacaaggacaggcugg

SEQ ID NO: 1005938 - RNA, 19 nt, Human
aaaacaaaacaaaaauacc

SEQ ID NO: 1005939 - RNA, 20 nt, Human
aaaaggacagaccaucuaag

SEQ ID NO: 1005940 - RNA, 21 nt, Human
aaaauaccacagcucaagaua

SEQ ID NO: 1005941 - RNA, 21 nt, Human
aaacaaaacaaaaauaccaca

SEQ ID NO: 1005942 - RNA, 24 nt, Human
aauuuaaaagacaaaaacaaaaca

SEQ ID NO: 1005943 - RNA, 18 nt, Human
acaaaacaaaaauaccac

SEQ ID NO: 1005944 - RNA, 21 nt, Human
caaaacaaaaauaccacagcu

SEQ ID NO: 1005945 - RNA, 22 nt, Human
cacagcucaagauaaagagucc

SEQ ID NO: 1005946 - RNA, 22 nt, Human
cagaccaucuaaggaaaaauua

SEQ ID NO: 1005947 - RNA, 21 nt, Human
cagcucaagauaaagaguccu

SEQ ID NO: 1005948 - RNA, 22 nt, Human
ccaucuaaggaaaaauuaaaaa

SEQ ID NO: 1005949 - RNA, 23 nt, Human
gggcggcguuggcagagagacag

SEQ ID NO: 1005950 - RNA, 19 nt, Human
uaaaaagacgacacaagga

SEQ ID NO: 1005951 - RNA, 22 nt, Human
uaaaagacaaaaacaaaacaaa

SEQ ID NO: 1005952 - RNA, 22 nt, Human
uacagaaaucacaaaaaggaca

SEQ ID NO: 1005953 - RNA, 25 nt, Human
uauacaagggcucaaccgaggcuua

SEQ ID NO: 1005954 - RNA, 21 nt, Human
ucuaaggaaaaauuaaaaaga

SEQ ID NO: 1005955 - RNA, 22 nt, Human
ucuaaggaaaaauuaaaaagac

SEQ ID NO: 1005956 - RNA, 22 nt, Human
uuaaaaagacgacacaaggaca

SEQ ID NO: 1005957 - RNA, 21 nt, Human
uuuuuuuuuuuaaaaaaggac

SEQ ID NO: 1005958 - RNA, 22 nt, Human
aaacugacaucuuagacaacac

SEQ ID NO: 1005959 - RNA, 23 nt, Human
aaacugacaucuuagacaacaca

SEQ ID NO: 1005960 - RNA, 23 nt, Human
aagucaaguauaacaaaaucaaa

SEQ ID NO: 1005961 - RNA, 21 nt, Human
agacaaauaguagaaaaagca

SEQ ID NO: 1005962 - RNA, 24 nt, Human
auacagauuuauaaaacugacauc

SEQ ID NO: 1005963 - RNA, 18 nt, Human
caaauaguagaaaaagca

SEQ ID NO: 1005964 - RNA, 23 nt, Human
caagacaaauaguagaaaaagca

SEQ ID NO: 1005965 - RNA, 21 nt, Human
caaguauaacaaaaucaaaac

SEQ ID NO: 1005966 - RNA, 23 nt, Human
caauacuguucacaggaaaaaag

SEQ ID NO: 1005967 - RNA, 18 nt, Human
ccgcucccuggcucgcuc

SEQ ID NO: 1005968 - RNA, 24 nt, Human
cgccggucccugcuccgugugcgc

SEQ ID NO: 1005969 - RNA, 18 nt, Human
cucccuggcucgcuccgg

SEQ ID NO: 1005970 - RNA, 18 nt, Human
cuccgcgcgguggguccc

SEQ ID NO: 1005971 - RNA, 19 nt, Human
ggaaaaaauucaaauguga

SEQ ID NO: 1005972 - RNA, 27 nt, Human
gggcucgcuggcagcuaggcuggcucc

SEQ ID NO: 1005973 - RNA, 23 nt, Human
guaaaaacaucuaguuucagcaa

SEQ ID NO: 1005974 - RNA, 18 nt, Human
uaaaauggguaaaaauca

SEQ ID NO: 1005975 - RNA, 22 nt, Human
uaaaugcucucaucacagucuu

SEQ ID NO: 1005976 - RNA, 21 nt, Human
uaacaaagaaugaaaucugaa

SEQ ID NO: 1005977 - RNA, 23 nt, Human
uaacaaagaaugaaaucugaaua

SEQ ID NO: 1005978 - RNA, 19 nt, Human
uaagaaaucugcaaucaau

SEQ ID NO: 1005979 - RNA, 22 nt, Human
uaagucaaguauaacaaaauca

SEQ ID NO: 1005980 - RNA, 21 nt, Human
uacagaauauccuaagacaag

SEQ ID NO: 1005981 - RNA, 24 nt, Human
uacuguucacaggaaaaaaguaau

SEQ ID NO: 1005982 - RNA, 20 nt, Human
uauaaagugagcuaacaaag

SEQ ID NO: 1005983 - RNA, 21 nt, Human
uauaaagugagcuaacaaaga

SEQ ID NO: 1005984 - RNA, 20 nt, Human
uauggaaaaagcuacaguaa

SEQ ID NO: 1005985 - RNA, 24 nt, Human
ucacuuaauuaucagccguugggg

SEQ ID NO: 1005986 - RNA, 22 nt, Human
ucagaaacacauuuaaaauggg

SEQ ID NO: 1005987 - RNA, 20 nt, Human
uccgggcgccggucccugcu

SEQ ID NO: 1005988 - RNA, 23 nt, Human
uccgggcgccggucccugcuccg

SEQ ID NO: 1005989 - RNA, 21 nt, Human
ucuuaaggguauuuuuggaag

SEQ ID NO: 1005990 - RNA, 20 nt, Human
ugagcuaacaaagaaugaaa

SEQ ID NO: 1005991 - RNA, 21 nt, Human
uggcuccgcgcgguggguccc

SEQ ID NO: 1005992 - RNA, 18 nt, Human
uggcucgcuccgggcgcc

SEQ ID NO: 1005993 - RNA, 21 nt, Human
uguaaagaucauuucagauuu

SEQ ID NO: 1005994 - RNA, 24 nt, Human
uuuuuuaaguaaucaagacaaaua

SEQ ID NO: 1005995 - RNA, 18 nt, Human
aagaaaaucaaaaaagga

SEQ ID NO: 1005996 - RNA, 23 nt, Human
aagcaguuauuguccaaagcugg

SEQ ID NO: 1005997 - RNA, 21 nt, Human
aaucaaaaaaggaacaguaau

SEQ ID NO: 1005998 - RNA, 22 nt, Human
acacaggcgcuugguaucgagg

SEQ ID NO: 1005999 - RNA, 22 nt, Human
acuacuuuacaguuucuaaaag

SEQ ID NO: 1006000 - RNA, 22 nt, Human
auaaagcauaucauguaaccuc

SEQ ID NO: 1006001 - RNA, 18 nt, Human
auccaucucccucccccu

SEQ ID NO: 1006002 - RNA, 21 nt, Human
augagcaugugaaugaaugga

SEQ ID NO: 1006003 - RNA, 20 nt, Human
caaagguccggccaaaacuc

SEQ ID NO: 1006004 - RNA, 19 nt, Human
caacugagcauccaucucc

SEQ ID NO: 1006005 - RNA, 22 nt, Human
caacugagcauccaucucccuc

SEQ ID NO: 1006006 - RNA, 18 nt, Human
caagaacaggucauuccu

SEQ ID NO: 1006007 - RNA, 18 nt, Human
cagcuauaaugcagguua

SEQ ID NO: 1006008 - RNA, 21 nt, Human
ccggccaaaacucuugauuau

SEQ ID NO: 1006009 - RNA, 21 nt, Human
cggccaaaacucuugauuauc

SEQ ID NO: 1006010 - RNA, 24 nt, Human
cuccucacucucucgguguaugcu

SEQ ID NO: 1006011 - RNA, 22 nt, Human
cucgucucacaccagcucugcc

SEQ ID NO: 1006012 - RNA, 19 nt, Human
cugcuagaauaaugcugua

SEQ ID NO: 1006013 - RNA, 21 nt, Human
cuuugaugugacaacugagca

SEQ ID NO: 1006014 - RNA, 25 nt, Human
gacccuauuuuggaauacaaagggu

SEQ ID NO: 1006015 - RNA, 18 nt, Human
gagcauccaucucccucc

SEQ ID NO: 1006016 - RNA, 27 nt, Human
gcaacuuuauugaagaaaaauaaauca

SEQ ID NO: 1006017 - RNA, 20 nt, Human
gguaucgaggagacgacucu

SEQ ID NO: 1006018 - RNA, 26 nt, Human
guagaacaagaacaggucauuccuuu

SEQ ID NO: 1006019 - RNA, 21 nt, Human
uaaaaaagaugaggucugaua

SEQ ID NO: 1006020 - RNA, 20 nt, Human
uaagaaaaucaaaaaaggaa

SEQ ID NO: 1006021 - RNA, 20 nt, Human
uauuuuggaauacaaagggu

SEQ ID NO: 1006022 - RNA, 23 nt, Human
uccaucucccucccccucagaug

SEQ ID NO: 1006023 - RNA, 24 nt, Human
ucuaacaguggaaggcuuaaacaa

SEQ ID NO: 1006024 - RNA, 18 nt, Human
ucucuguagaacaagaac

SEQ ID NO: 1006025 - RNA, 18 nt, Human
ugaaugaauggagggagg

SEQ ID NO: 1006026 - RNA, 23 nt, Human
ugacaugcauaaaauacaucaca

SEQ ID NO: 1006027 - RNA, 20 nt, Human
ugacuuccaauuuccauucu

SEQ ID NO: 1006028 - RNA, 22 nt, Human
ugagcauccaucucccuccccc

SEQ ID NO: 1006029 - RNA, 21 nt, Human
ugagucuugggcaacuguucu

SEQ ID NO: 1006030 - RNA, 18 nt, Human
ugaugugacaacugagca

SEQ ID NO: 1006031 - RNA, 20 nt, Human
ugcucaaagguccggccaaa

SEQ ID NO: 1006032 - RNA, 20 nt, Human
uuuuuuuuuuuuuuuuuugg

SEQ ID NO: 1006033 - RNA, 23 nt, Human
uuuuuuuuuuuuuuuuuugguuu

SEQ ID NO: 1006034 - RNA, 19 nt, Human
aaccccccaccccaccccg

SEQ ID NO: 1006035 - RNA, 20 nt, Human
aaccccccaccccaccccgc

SEQ ID NO: 1006036 - RNA, 22 nt, Human
aacucccacccucccugacccc

SEQ ID NO: 1006037 - RNA, 18 nt, Human
aagacugaauaauaucug

SEQ ID NO: 1006038 - RNA, 21 nt, Human
aagcggaagugcagcaacagc

SEQ ID NO: 1006039 - RNA, 21 nt, Human
aaguaguccacaacauagaac

SEQ ID NO: 1006040 - RNA, 24 nt, Human
acccucccugaccccuucaaaauc

SEQ ID NO: 1006041 - RNA, 19 nt, Human
acucccacccucccugacc

SEQ ID NO: 1006042 - RNA, 21 nt, Human
agaccuuuuuuaaacaaagua

SEQ ID NO: 1006043 - RNA, 18 nt, Human
agggaaaacaaauuccaa

SEQ ID NO: 1006044 - RNA, 18 nt, Human
caaaugucuaaauguaca

SEQ ID NO: 1006045 - RNA, 21 nt, Human
caaauuaagcuguuuuaaauu

SEQ ID NO: 1006046 - RNA, 20 nt, Human
caacauagaaccaauccacu

SEQ ID NO: 1006047 - RNA, 25 nt, Human
caacugaacccaaaugucuaaaugu

SEQ ID NO: 1006048 - RNA, 21 nt, Human
caccccaccccgcaaacagcc

SEQ ID NO: 1006049 - RNA, 26 nt, Human
caccccgcaaacagccccucucuuug

SEQ ID NO: 1006050 - RNA, 25 nt, Human
cagcuaauauugcagaacuaaugac

SEQ ID NO: 1006051 - RNA, 19 nt, Human
ccaacucccacccucccug

SEQ ID NO: 1006052 - RNA, 23 nt, Human
ccaccccgcaaacagccccucuc

SEQ ID NO: 1006053 - RNA, 24 nt, Human
ccacccucccugaccccuucaaaa

SEQ ID NO: 1006054 - RNA, 25 nt, Human
ccacugagcaacuccuauuccacgc

SEQ ID NO: 1006055 - RNA, 23 nt, Human
ccauauguguaaccuguaccaaa

SEQ ID NO: 1006056 - RNA, 24 nt, Human
cccacccucccugaccccuucaaa

SEQ ID NO: 1006057 - RNA, 18 nt, Human
ccccaccccaccccgcaa

SEQ ID NO: 1006058 - RNA, 21 nt, Human
ccccccaccccaccccgcaaa

SEQ ID NO: 1006059 - RNA, 22 nt, Human
ccccccaccccaccccgcaaac

SEQ ID NO: 1006060 - RNA, 26 nt, Human
ccccccaccccaccccgcaaacagcc

SEQ ID NO: 1006061 - RNA, 21 nt, Human
cccucccugaccccuucaaaa

SEQ ID NO: 1006062 - RNA, 19 nt, Human
ccgcaaacagccccucucu

SEQ ID NO: 1006063 - RNA, 21 nt, Human
ccgugccgccgcggcggcugc

SEQ ID NO: 1006064 - RNA, 23 nt, Human
cucccacccucccugaccccuuc

SEQ ID NO: 1006065 - RNA, 26 nt, Human
cucccacccucccugaccccuucaaa

SEQ ID NO: 1006066 - RNA, 19 nt, Human
cugcugcugcggcugcggc

SEQ ID NO: 1006067 - RNA, 25 nt, Human
cuuccaagaagggaaaacaaauucc

SEQ ID NO: 1006068 - RNA, 20 nt, Human
gcggcggcugcugcugcggc

SEQ ID NO: 1006069 - RNA, 22 nt, Human
ggagagaagcggaagugcagca

SEQ ID NO: 1006070 - RNA, 19 nt, Human
uaagguauuucacuacagg

SEQ ID NO: 1006071 - RNA, 19 nt, Human
uaaguaguccacaacauag

SEQ ID NO: 1006072 - RNA, 22 nt, Human
uacauaaauggccauaugugua

SEQ ID NO: 1006073 - RNA, 18 nt, Human
uagaaccaauccacugag

SEQ ID NO: 1006074 - RNA, 24 nt, Human
uagaaccaauccacugagcaacuc

SEQ ID NO: 1006075 - RNA, 20 nt, Human
uagcacaguaacaaaugcag

SEQ ID NO: 1006076 - RNA, 24 nt, Human
uagcacaguaacaaaugcagacuu

SEQ ID NO: 1006077 - RNA, 19 nt, Human
uccgugccgccgcggcggc

SEQ ID NO: 1006078 - RNA, 21 nt, Human
uccgugccgccgcggcggcug

SEQ ID NO: 1006079 - RNA, 26 nt, Human
ucucucgcugggagagaagcggaagu

SEQ ID NO: 1006080 - RNA, 18 nt, Human
ucuggcuccuccgugccg

SEQ ID NO: 1006081 - RNA, 18 nt, Human
ugcugcugcggcugcggc

SEQ ID NO: 1006082 - RNA, 22 nt, Human
uuaccaacucccacccucccug

SEQ ID NO: 1006083 - RNA, 21 nt, Human
uuuacauaaauggccauaugu

SEQ ID NO: 1006084 - RNA, 18 nt, Human
aaaaaaggacauacaacg

SEQ ID NO: 1006085 - RNA, 25 nt, Human
aaaaaggacauacaacguuuguaga

SEQ ID NO: 1006086 - RNA, 19 nt, Human
aaacaguucauuagaauuc

SEQ ID NO: 1006087 - RNA, 22 nt, Human
aaagccuguagcugugcaugcu

SEQ ID NO: 1006088 - RNA, 26 nt, Human
aaccucacaacaaacaugaaggagcc

SEQ ID NO: 1006089 - RNA, 18 nt, Human
aagcaccuagugaugacu

SEQ ID NO: 1006090 - RNA, 24 nt, Human
aaggacaaagcaccuagugaugac

SEQ ID NO: 1006091 - RNA, 18 nt, Human
aaggagccuaaggccugc

SEQ ID NO: 1006092 - RNA, 19 nt, Human
aauucaaaaugcguaauca

SEQ ID NO: 1006093 - RNA, 20 nt, Human
acaacaaacaugaaggagcc

SEQ ID NO: 1006094 - RNA, 21 nt, Human
acaacaaacaugaaggagccu

SEQ ID NO: 1006095 - RNA, 23 nt, Human
acagugccauguuucucaauugg

SEQ ID NO: 1006096 - RNA, 18 nt, Human
accggagcgccggagccg

SEQ ID NO: 1006097 - RNA, 18 nt, Human
agaacauucuggcaggua

SEQ ID NO: 1006098 - RNA, 20 nt, Human
agagauaaaagcaaagggga

SEQ ID NO: 1006099 - RNA, 24 nt, Human
agaggucugggcucuuggcaggag

SEQ ID NO: 1006100 - RNA, 20 nt, Human
agcauuucuccaaaccccac

SEQ ID NO: 1006101 - RNA, 21 nt, Human
agccaacaacuugacaauuau

SEQ ID NO: 1006102 - RNA, 24 nt, Human
aggaaagaaaaccugcuaaaaucu

SEQ ID NO: 1006103 - RNA, 24 nt, Human
aggguuuaagggaaauuaaaugga

SEQ ID NO: 1006104 - RNA, 21 nt, Human
agguaagagauaaaagcaaag

SEQ ID NO: 1006105 - RNA, 19 nt, Human
aucccuuauaagccaaaga

SEQ ID NO: 1006106 - RNA, 20 nt, Human
auuucuuuguacaauaggug

SEQ ID NO: 1006107 - RNA, 24 nt, Human
auuugcugaaguuguuuuagaaaa

SEQ ID NO: 1006108 - RNA, 23 nt, Human
caaaaaggacaaagcaccuagug

SEQ ID NO: 1006109 - RNA, 19 nt, Human
caaaccccacagagcagag

SEQ ID NO: 1006110 - RNA, 22 nt, Human
cacaacaaacaugaaggagccu

SEQ ID NO: 1006111 - RNA, 19 nt, Human
cacaaucaaacaccauguc

SEQ ID NO: 1006112 - RNA, 22 nt, Human
cacacaaccucacaacaaacau

SEQ ID NO: 1006113 - RNA, 21 nt, Human
cacacacaaccucacaacaaa

SEQ ID NO: 1006114 - RNA, 21 nt, Human
cacuacauaaggugacagaau

SEQ ID NO: 1006115 - RNA, 26 nt, Human
caucgcaauuucuuuguacaauaggu

SEQ ID NO: 1006116 - RNA, 28 nt, Human
cauuuuauuucugcuuaaaaaaggacau

SEQ ID NO: 1006117 - RNA, 20 nt, Human
ccccgcgaccggagcgccgg

SEQ ID NO: 1006118 - RNA, 20 nt, Human
ccgaagggcuggggacaggc

SEQ ID NO: 1006119 - RNA, 21 nt, Human
ccgggcugaggcggcgggagc

SEQ ID NO: 1006120 - RNA, 18 nt, Human
ccuuauaagccaaagacu

SEQ ID NO: 1006121 - RNA, 21 nt, Human
cugggaucaagagcucacaac

SEQ ID NO: 1006122 - RNA, 19 nt, Human
cuuauaagccaaagacuac

SEQ ID NO: 1006123 - RNA, 22 nt, Human
cuuccgaagggcuggggacagg

SEQ ID NO: 1006124 - RNA, 23 nt, Human
gauguacaugaacaguauauaua

SEQ ID NO: 1006125 - RNA, 21 nt, Human
gcgggagcggcgccucgcugc

SEQ ID NO: 1006126 - RNA, 21 nt, Human
gcggggugugccgaggaaccc

SEQ ID NO: 1006127 - RNA, 18 nt, Human
gcuaaaaucucuuagaau

SEQ ID NO: 1006128 - RNA, 21 nt, Human
ggaaaagucagauuugcuauu

SEQ ID NO: 1006129 - RNA, 20 nt, Human
ggcuggggacaggcucuggg

SEQ ID NO: 1006130 - RNA, 22 nt, Human
gggaaauuuucaguaaguugaa

SEQ ID NO: 1006131 - RNA, 21 nt, Human
gggcuggcgccggggcuuccg

SEQ ID NO: 1006132 - RNA, 20 nt, Human
gucaaaacaaagaagauaca

SEQ ID NO: 1006133 - RNA, 22 nt, Human
uaaaaucucuuagaauuuacac

SEQ ID NO: 1006134 - RNA, 18 nt, Human
uaaacugauaagaaacaa

SEQ ID NO: 1006135 - RNA, 24 nt, Human
uaacuggcauguuuuauugcagcc

SEQ ID NO: 1006136 - RNA, 24 nt, Human
uaaggugacagaauuccaaaauca

SEQ ID NO: 1006137 - RNA, 22 nt, Human
uaaguagaaagccuguagcugu

SEQ ID NO: 1006138 - RNA, 18 nt, Human
uacaaaaguuuaguaagu

SEQ ID NO: 1006139 - RNA, 22 nt, Human
uacaagaaagcauuauuuggua

SEQ ID NO: 1006140 - RNA, 24 nt, Human
uagaaccaaauacauauacugcca

SEQ ID NO: 1006141 - RNA, 23 nt, Human
uagaggcagagaaauaugaagga

SEQ ID NO: 1006142 - RNA, 20 nt, Human
uauauauauuauccggauca

SEQ ID NO: 1006143 - RNA, 20 nt, Human
ucaaaacaaagaagauacaa

SEQ ID NO: 1006144 - RNA, 18 nt, Human
ucaaggguuuaagggaaa

SEQ ID NO: 1006145 - RNA, 19 nt, Human
ucacuacauaaggugacag

SEQ ID NO: 1006146 - RNA, 24 nt, Human
ucagggguaaugacugggaucaag

SEQ ID NO: 1006147 - RNA, 20 nt, Human
ucauuuauccaaccuuaaua

SEQ ID NO: 1006148 - RNA, 23 nt, Human
uccaaaccccacagagcagagau

SEQ ID NO: 1006149 - RNA, 19 nt, Human
uccaagaggugggugcaac

SEQ ID NO: 1006150 - RNA, 20 nt, Human
ucuccaaaccccacagagca

SEQ ID NO: 1006151 - RNA, 21 nt, Human
ugaaauauauugaagcucaaa

SEQ ID NO: 1006152 - RNA, 22 nt, Human
ugaauaggaaagaaaaccugcu

SEQ ID NO: 1006153 - RNA, 21 nt, Human
ugacagaauuccaaaaucaaa

SEQ ID NO: 1006154 - RNA, 18 nt, Human
ugagaaaaaucugcagua

SEQ ID NO: 1006155 - RNA, 21 nt, Human
ugauucucacaaucaaacacc

SEQ ID NO: 1006156 - RNA, 22 nt, Human
ugcaacuagaauacaaaaagga

SEQ ID NO: 1006157 - RNA, 21 nt, Human
ugccgaggaacccgggccccg

SEQ ID NO: 1006158 - RNA, 24 nt, Human
ugccgaggaacccgggccccgcga

SEQ ID NO: 1006159 - RNA, 19 nt, Human
ugggugcaacuagaauaca

SEQ ID NO: 1006160 - RNA, 20 nt, Human
uuaaugaagccucaaggguu

SEQ ID NO: 1006161 - RNA, 19 nt, Human
uucacucuucugccaaagc

SEQ ID NO: 1006162 - RNA, 18 nt, Human
uuuuuuuuuuuuuuuucg

SEQ ID NO: 1006163 - RNA, 23 nt, Human
aaaaauaacuaggggcacguggc

SEQ ID NO: 1006164 - RNA, 23 nt, Human
caaaccccuacccauggccccca

SEQ ID NO: 1006165 - RNA, 20 nt, Human
cacguggcaggaaggggagg

SEQ ID NO: 1006166 - RNA, 22 nt, Human
ccccaaaccccuacccauggcc

SEQ ID NO: 1006167 - RNA, 24 nt, Human
ccccaaaccccuacccauggcccc

SEQ ID NO: 1006168 - RNA, 21 nt, Human
cccccaaaccccuacccaugg

SEQ ID NO: 1006169 - RNA, 22 nt, Human
cccccaaaccccuacccauggc

SEQ ID NO: 1006170 - RNA, 22 nt, Human
cccccaccggccgccccccaaa

SEQ ID NO: 1006171 - RNA, 21 nt, Human
ccccuacccauggcccccaau

SEQ ID NO: 1006172 - RNA, 19 nt, Human
ccguggcggcgggugggua

SEQ ID NO: 1006173 - RNA, 21 nt, Human
ggccgccccccaaaccccuac

SEQ ID NO: 1006174 - RNA, 21 nt, Human
gggauucccccaccggccgcc

SEQ ID NO: 1006175 - RNA, 22 nt, Human
gggauucccccaccggccgccc

SEQ ID NO: 1006176 - RNA, 19 nt, Human
guggccguggcggcgggug

SEQ ID NO: 1006177 - RNA, 26 nt, Human
uagccugguguuaaaaaaaaaauaac

SEQ ID NO: 1006178 - RNA, 23 nt, Human
ucccccaccggccgccccccaaa

SEQ ID NO: 1006179 - RNA, 24 nt, Human
ucccccaccggccgccccccaaac

SEQ ID NO: 1006180 - RNA, 18 nt, Human
uggcaggaaggggaggca

SEQ ID NO: 1006181 - RNA, 19 nt, Human
uggcaggaaggggaggcaa

SEQ ID NO: 1006182 - RNA, 21 nt, Human
uggcaggaaggggaggcaagg

SEQ ID NO: 1006183 - RNA, 22 nt, Human
uggcaggaaggggaggcaaggc

SEQ ID NO: 1006184 - RNA, 24 nt, Human
uggcaggaaggggaggcaaggcca

SEQ ID NO: 1006185 - RNA, 25 nt, Human
uggcaggaaggggaggcaaggccaa

SEQ ID NO: 1006186 - RNA, 18 nt, Human
aaacguuucacaacaauc

SEQ ID NO: 1006187 - RNA, 21 nt, Human
aaauaaaauaaaaacacccac

SEQ ID NO: 1006188 - RNA, 25 nt, Human
aaccugacaacuaccuucauucaca

SEQ ID NO: 1006189 - RNA, 23 nt, Human
aagaggaggaagucuuggcagaa

SEQ ID NO: 1006190 - RNA, 22 nt, Human
aaggagcccauaaaauuaaacu

SEQ ID NO: 1006191 - RNA, 24 nt, Human
aauaaaauaaaaacacccacaccc

SEQ ID NO: 1006192 - RNA, 23 nt, Human
aauaaaauaaaauaaaaacaccc

SEQ ID NO: 1006193 - RNA, 22 nt, Human
accugguuagcugcuuuuaacc

SEQ ID NO: 1006194 - RNA, 18 nt, Human
agaacccgaguucggccu

SEQ ID NO: 1006195 - RNA, 21 nt, Human
agacauagauuugcuaaugug

SEQ ID NO: 1006196 - RNA, 18 nt, Human
agugagggcugugauguu

SEQ ID NO: 1006197 - RNA, 25 nt, Human
auaaaauaaaaacacccacaccccc

SEQ ID NO: 1006198 - RNA, 20 nt, Human
auauucuaaagaccugguua

SEQ ID NO: 1006199 - RNA, 22 nt, Human
auuagaucaccaaaaaaggggg

SEQ ID NO: 1006200 - RNA, 23 nt, Human
caaacaaagaggaggaagucuug

SEQ ID NO: 1006201 - RNA, 19 nt, Human
cacaccccugcagcuaacc

SEQ ID NO: 1006202 - RNA, 18 nt, Human
cacccacaccccugcagc

SEQ ID NO: 1006203 - RNA, 19 nt, Human
cagaacaggagaagugaug

SEQ ID NO: 1006204 - RNA, 24 nt, Human
ccaaaaaagggggaaaggagccca

SEQ ID NO: 1006205 - RNA, 21 nt, Human
ccaggaugggggaaaugaaua

SEQ ID NO: 1006206 - RNA, 21 nt, Human
cccauaaaauuaaacuaccuc

SEQ ID NO: 1006207 - RNA, 25 nt, Human
ccccugcagcuaaccugacaacuac

SEQ ID NO: 1006208 - RNA, 21 nt, Human
cuacagcgucuaaauaaaguu

SEQ ID NO: 1006209 - RNA, 20 nt, Human
cugguuagcugcuuuuaacc

SEQ ID NO: 1006210 - RNA, 24 nt, Human
gagggcugugauguuuguuuaaug

SEQ ID NO: 1006211 - RNA, 24 nt, Human
gcagaacaggagaagugaugcaca

SEQ ID NO: 1006212 - RNA, 23 nt, Human
gcagggaggggccacugcuuuua

SEQ ID NO: 1006213 - RNA, 24 nt, Human
gcuagagcauauucuaaagaccug

SEQ ID NO: 1006214 - RNA, 23 nt, Human
uaaaauaaaauaaaaacacccac

SEQ ID NO: 1006215 - RNA, 19 nt, Human
uacuuaaaccaggaugggg

SEQ ID NO: 1006216 - RNA, 19 nt, Human
uagaucaccaaaaaagggg

SEQ ID NO: 1006217 - RNA, 22 nt, Human
ugacagcaauguuauuagugag

SEQ ID NO: 1006218 - RNA, 18 nt, Human
ugcaaacaaagaggagga

SEQ ID NO: 1006219 - RNA, 20 nt, Human
uggcagaacaggagaaguga

SEQ ID NO: 1006220 - RNA, 23 nt, Human
uuauuagugagggcugugauguu

SEQ ID NO: 1006221 - RNA, 24 nt, Human
uucccauuuugguuccaacaauca

SEQ ID NO: 1006222 - RNA, 20 nt, Human
uuuaaccaaugcaauuagaa

SEQ ID NO: 1006223 - RNA, 21 nt, Human
uuuacagaaguuuccagacaa

SEQ ID NO: 1006224 - RNA, 22 nt, Human
aaacacacaugcuuccacugcc

SEQ ID NO: 1006225 - RNA, 24 nt, Human
aaauggcacagucucugaggacac

SEQ ID NO: 1006226 - RNA, 24 nt, Human
aagcaugccauuucuguuuucuug

SEQ ID NO: 1006227 - RNA, 22 nt, Human
aagcuacaauaauuccaauuuu

SEQ ID NO: 1006228 - RNA, 24 nt, Human
aaugacagugccuuucaagagaaa

SEQ ID NO: 1006229 - RNA, 23 nt, Human
acugccaucugacacuucuccac

SEQ ID NO: 1006230 - RNA, 24 nt, Human
agaaacacacaugcuuccacugcc

SEQ ID NO: 1006231 - RNA, 22 nt, Human
aguaagauggguaaagcaugcc

SEQ ID NO: 1006232 - RNA, 18 nt, Human
auguguauuuugcauugu

SEQ ID NO: 1006233 - RNA, 26 nt, Human
caaaacaauccugaacauauuuuuga

SEQ ID NO: 1006234 - RNA, 21 nt, Human
caacauaauagaaauggcaca

SEQ ID NO: 1006235 - RNA, 18 nt, Human
cacagucucugaggacac

SEQ ID NO: 1006236 - RNA, 18 nt, Human
cagcucucuuucacuaag

SEQ ID NO: 1006237 - RNA, 23 nt, Human
caucaacauaauagaaauggcac

SEQ ID NO: 1006238 - RNA, 19 nt, Human
cuaguagucagcacccaca

SEQ ID NO: 1006239 - RNA, 21 nt, Human
cugcagcucucuuucacuaag

SEQ ID NO: 1006240 - RNA, 20 nt, Human
cuuguaaaccugaauucuau

SEQ ID NO: 1006241 - RNA, 27 nt, Human
cuuuuuaauauuauuauuucuggugaa

SEQ ID NO: 1006242 - RNA, 23 nt, Human
gccagaaugcaaagaucuuuuua

SEQ ID NO: 1006243 - RNA, 19 nt, Human
guacauauacaucaacaua

SEQ ID NO: 1006244 - RNA, 20 nt, Human
guguacauauauuaaauaua

SEQ ID NO: 1006245 - RNA, 21 nt, Human
guguacauauauuaaauauaa

SEQ ID NO: 1006246 - RNA, 21 nt, Human
uaagauggguaaagcaugcca

SEQ ID NO: 1006247 - RNA, 23 nt, Human
uaauccuaaaagaacugccagaa

SEQ ID NO: 1006248 - RNA, 19 nt, Human
uaauggguguacauauauu

SEQ ID NO: 1006249 - RNA, 21 nt, Human
ucaaaaucacauauccauaca

SEQ ID NO: 1006250 - RNA, 24 nt, Human
ucaagacauuaacaugaguagaag

SEQ ID NO: 1006251 - RNA, 24 nt, Human
uccagguuuauguuuaaaugacag

SEQ ID NO: 1006252 - RNA, 21 nt, Human
uggcaagguacuguacauaua

SEQ ID NO: 1006253 - RNA, 20 nt, Human
uguaaacaaauauuuaccau

SEQ ID NO: 1006254 - RNA, 23 nt, Human
uguaaacaaauauuuaccauguc

SEQ ID NO: 1006255 - RNA, 20 nt, Human
uguacauauacaucaacaua

SEQ ID NO: 1006256 - RNA, 20 nt, Human
uguauacaugaaaagcuaca

SEQ ID NO: 1006257 - RNA, 20 nt, Human
uguuuaaaugacagugccuu

SEQ ID NO: 1006258 - RNA, 19 nt, Human
uuaugcuuuaaaaaauggg

SEQ ID NO: 1006259 - RNA, 22 nt, Human
uucaagagaaaaaaaauugugc

SEQ ID NO: 1006260 - RNA, 23 nt, Human
uucaagagaaaaaaaauugugcu

SEQ ID NO: 1006261 - RNA, 24 nt, Human
uucacaagaaguacacaaaauagg

SEQ ID NO: 1006262 - RNA, 20 nt, Human
uucccuggcaagguacugua

SEQ ID NO: 1006263 - RNA, 21 nt, Human
uuuuuuuuuuuuaugcuuuaa

SEQ ID NO: 1006264 - RNA, 23 nt, Human
aaaaaaaaacaaaaaacccagag

SEQ ID NO: 1006265 - RNA, 25 nt, Human
aaaaaaaaacaaaaaacccagaggg

SEQ ID NO: 1006266 - RNA, 20 nt, Human
aaaaaacaaaaaacccagag

SEQ ID NO: 1006267 - RNA, 23 nt, Human
aaaagcuuguuauuuuuuccaag

SEQ ID NO: 1006268 - RNA, 23 nt, Human
aaacaaaaaacccagagggugug

SEQ ID NO: 1006269 - RNA, 22 nt, Human
aacaaaucacccagcauuaguc

SEQ ID NO: 1006270 - RNA, 21 nt, Human
aacccaugcugcaaaaaccac

SEQ ID NO: 1006271 - RNA, 19 nt, Human
aacuagcuaaaagaagccc

SEQ ID NO: 1006272 - RNA, 24 nt, Human
aacuagcuaaaagaagccccucug

SEQ ID NO: 1006273 - RNA, 22 nt, Human
aagccaccgcccagaugggaug

SEQ ID NO: 1006274 - RNA, 22 nt, Human
acacacucuuuuccagaagccu

SEQ ID NO: 1006275 - RNA, 20 nt, Human
acaggcagcacauucuggaa

SEQ ID NO: 1006276 - RNA, 23 nt, Human
acccaaguuuccugggauuuugc

SEQ ID NO: 1006277 - RNA, 21 nt, Human
accgcaggcccuaccggccua

SEQ ID NO: 1006278 - RNA, 23 nt, Human
accuggccaggcagggacugugc

SEQ ID NO: 1006279 - RNA, 22 nt, Human
acucccaaaagaucaaacuagc

SEQ ID NO: 1006280 - RNA, 19 nt, Human
agaaucagagguuacgaac

SEQ ID NO: 1006281 - RNA, 21 nt, Human
agacaaauaagcagggucaaa

SEQ ID NO: 1006282 - RNA, 19 nt, Human
agagcacacacucuuuucc

SEQ ID NO: 1006283 - RNA, 21 nt, Human
agagcacacacucuuuuccag

SEQ ID NO: 1006284 - RNA, 24 nt, Human
agauaaccagugagacaaauaagc

SEQ ID NO: 1006285 - RNA, 19 nt, Human
agcagaggagggacugggc

SEQ ID NO: 1006286 - RNA, 23 nt, Human
agcaggcgccugcgcuucccugg

SEQ ID NO: 1006287 - RNA, 21 nt, Human
agcagggucaaaggcagccgu

SEQ ID NO: 1006288 - RNA, 21 nt, Human
aggaaagacagacucccaaaa

SEQ ID NO: 1006289 - RNA, 24 nt, Human
aggaaggaugggcagcaagaccca

SEQ ID NO: 1006290 - RNA, 21 nt, Human
aggcgcuguggacggcaugga

SEQ ID NO: 1006291 - RNA, 21 nt, Human
agggacugggccuuccuggcu

SEQ ID NO: 1006292 - RNA, 23 nt, Human
agggacugggccuuccuggcuuc

SEQ ID NO: 1006293 - RNA, 18 nt, Human
auagguccgggaagacuc

SEQ ID NO: 1006294 - RNA, 19 nt, Human
augcagcugaaacucugaa

SEQ ID NO: 1006295 - RNA, 19 nt, Human
caaacuagcuaaaagaagc

SEQ ID NO: 1006296 - RNA, 20 nt, Human
caaaguccccagccccacca

SEQ ID NO: 1006297 - RNA, 21 nt, Human
caaaucacccagcauuagucc

SEQ ID NO: 1006298 - RNA, 21 nt, Human
caacgggcuuccggguucccu

SEQ ID NO: 1006299 - RNA, 24 nt, Human
caagacccaaguuuccugggauuu

SEQ ID NO: 1006300 - RNA, 21 nt, Human
cacaggaacaaaucacccagc

SEQ ID NO: 1006301 - RNA, 19 nt, Human
cacauucuggaaacggggc

SEQ ID NO: 1006302 - RNA, 23 nt, Human
caccuggagaugcuguguagugc

SEQ ID NO: 1006303 - RNA, 20 nt, Human
cacgccagaucccagcacuu

SEQ ID NO: 1006304 - RNA, 21 nt, Human
cacucggaggacugacgaccc

SEQ ID NO: 1006305 - RNA, 19 nt, Human
caggaacaaaucacccagc

SEQ ID NO: 1006306 - RNA, 20 nt, Human
caggagcccuggaggcaggg

SEQ ID NO: 1006307 - RNA, 22 nt, Human
caggagcccuggaggcagggcu

SEQ ID NO: 1006308 - RNA, 22 nt, Human
caggaugcagcugaaacucuga

SEQ ID NO: 1006309 - RNA, 22 nt, Human
caguuuaggugaguccuggggc

SEQ ID NO: 1006310 - RNA, 19 nt, Human
caucaaaguagagcacaca

SEQ ID NO: 1006311 - RNA, 19 nt, Human
ccacucggaggacugacga

SEQ ID NO: 1006312 - RNA, 18 nt, Human
ccagugagacaaauaagc

SEQ ID NO: 1006313 - RNA, 23 nt, Human
cccaaaagaucaaacuagcuaaa

SEQ ID NO: 1006314 - RNA, 22 nt, Human
ccccaaagugaaaagaggugga

SEQ ID NO: 1006315 - RNA, 22 nt, Human
cccuagcaggcgccugcgcuuc

SEQ ID NO: 1006316 - RNA, 23 nt, Human
cccucaaaguccccagccccacc

SEQ ID NO: 1006317 - RNA, 23 nt, Human
cccuggagcacacacgccagauc

SEQ ID NO: 1006318 - RNA, 21 nt, Human
ccggguucccugugcugagga

SEQ ID NO: 1006319 - RNA, 22 nt, Human
ccggguucccugugcugaggaa

SEQ ID NO: 1006320 - RNA, 20 nt, Human
ccucaaaguccccagcccca

SEQ ID NO: 1006321 - RNA, 22 nt, Human
cgaacaguauucgaacuccagu

SEQ ID NO: 1006322 - RNA, 26 nt, Human
cggaaggagaggaucucacgcacagu

SEQ ID NO: 1006323 - RNA, 23 nt, Human
cggcaucaaccuugguggugcag

SEQ ID NO: 1006324 - RNA, 23 nt, Human
cggggccgcagcugccacugucu

SEQ ID NO: 1006325 - RNA, 19 nt, Human
cguccccaaagugaaaaga

SEQ ID NO: 1006326 - RNA, 22 nt, Human
cguggagcgcguggcuucaagg

SEQ ID NO: 1006327 - RNA, 18 nt, Human
cucaaaguccccagcccc

SEQ ID NO: 1006328 - RNA, 18 nt, Human
cucaggagugaagccacc

SEQ ID NO: 1006329 - RNA, 20 nt, Human
cucaggagugaagccaccgc

SEQ ID NO: 1006330 - RNA, 23 nt, Human
cugcaaaaaccacucuagacucu

SEQ ID NO: 1006331 - RNA, 21 nt, Human
cuggggcccagagucuuuccu

SEQ ID NO: 1006332 - RNA, 21 nt, Human
cuuguuccuccgaccuggcca

SEQ ID NO: 1006333 - RNA, 22 nt, Human
gaacaccaguuacaaaaggaga

SEQ ID NO: 1006334 - RNA, 19 nt, Human
gagcagaggagggacuggg

SEQ ID NO: 1006335 - RNA, 20 nt, Human
gagguggaaagggccgcgga

SEQ ID NO: 1006336 - RNA, 24 nt, Human
gccaucaccaggaagaauggaccc

SEQ ID NO: 1006337 - RNA, 19 nt, Human
gcccaggagcccuggaggc

SEQ ID NO: 1006338 - RNA, 21 nt, Human
gccgcggaaagagccccugga

SEQ ID NO: 1006339 - RNA, 23 nt, Human
gccugcgcuucccugggcagcag

SEQ ID NO: 1006340 - RNA, 21 nt, Human
gcggaaagagccccuggagca

SEQ ID NO: 1006341 - RNA, 23 nt, Human
gcggaaagagccccuggagcaca

SEQ ID NO: 1006342 - RNA, 22 nt, Human
gcuaagggccguuguuuuucuu

SEQ ID NO: 1006343 - RNA, 20 nt, Human
ggacgggaauagguccggga

SEQ ID NO: 1006344 - RNA, 25 nt, Human
ggcaggagcagcgccuugggguccc

SEQ ID NO: 1006345 - RNA, 25 nt, Human
ggcccagagucuuuccucggcauca

SEQ ID NO: 1006346 - RNA, 18 nt, Human
gggcucgaccuggguggg

SEQ ID NO: 1006347 - RNA, 20 nt, Human
gguggugcaggugcaggagc

SEQ ID NO: 1006348 - RNA, 24 nt, Human
guggagcgcguggcuucaaggcag

SEQ ID NO: 1006349 - RNA, 25 nt, Human
uaaaagaagccccucugccaucacc

SEQ ID NO: 1006350 - RNA, 21 nt, Human
uaaaggccuaccguccccaaa

SEQ ID NO: 1006351 - RNA, 18 nt, Human
uaaggaaagacagacucc

SEQ ID NO: 1006352 - RNA, 26 nt, Human
uaagggccguuguuuuucuuccccca

SEQ ID NO: 1006353 - RNA, 21 nt, Human
uaauaaagccuuugaucacau

SEQ ID NO: 1006354 - RNA, 23 nt, Human
uacaaaaacaaaaaauccuacaa

SEQ ID NO: 1006355 - RNA, 24 nt, Human
uacacagcucacucagacggcuaa

SEQ ID NO: 1006356 - RNA, 25 nt, Human
uaccugaguaagagauuucagaaac

SEQ ID NO: 1006357 - RNA, 21 nt, Human
uagagccaacucccucaaagu

SEQ ID NO: 1006358 - RNA, 22 nt, Human
uagauaaccagugagacaaaua

SEQ ID NO: 1006359 - RNA, 21 nt, Human
uagugcaauauuuccagcugc

SEQ ID NO: 1006360 - RNA, 23 nt, Human
ucaauaauauuaauacauuccug

SEQ ID NO: 1006361 - RNA, 18 nt, Human
uccccaaagugaaaagag

SEQ ID NO: 1006362 - RNA, 21 nt, Human
ucccccaaaccaggaugccaa

SEQ ID NO: 1006363 - RNA, 22 nt, Human
ucccugggcagcagaugggccu

SEQ ID NO: 1006364 - RNA, 24 nt, Human
ucucccgcaggccggaccgcaggc

SEQ ID NO: 1006365 - RNA, 18 nt, Human
ucucuggcagcucagccc

SEQ ID NO: 1006366 - RNA, 22 nt, Human
ugacgacccaguucucccgcag

SEQ ID NO: 1006367 - RNA, 21 nt, Human
ugagacaaauaagcaggguca

SEQ ID NO: 1006368 - RNA, 18 nt, Human
ugaggagagcagaggagg

SEQ ID NO: 1006369 - RNA, 21 nt, Human
ugagggcagaggaacacaaug

SEQ ID NO: 1006370 - RNA, 24 nt, Human
ugagggcagaggaacacaaugggu

SEQ ID NO: 1006371 - RNA, 18 nt, Human
ugaggugggagagggugg

SEQ ID NO: 1006372 - RNA, 21 nt, Human
ugaggugggagagggugggug

SEQ ID NO: 1006373 - RNA, 22 nt, Human
ugccucaguucccuggagcuaa

SEQ ID NO: 1006374 - RNA, 20 nt, Human
ugcugaggaaggaugggcag

SEQ ID NO: 1006375 - RNA, 21 nt, Human
ugcugcaaaaaccacucuaga

SEQ ID NO: 1006376 - RNA, 21 nt, Human
uggaaacggggcugcugcuaa

SEQ ID NO: 1006377 - RNA, 27 nt, Human
uggaacuccugggacuuguucauacac

SEQ ID NO: 1006378 - RNA, 18 nt, Human
uggaagagaaaugaaguu

SEQ ID NO: 1006379 - RNA, 19 nt, Human
uggaagagaaaugaaguuu

SEQ ID NO: 1006380 - RNA, 21 nt, Human
uggacggcauggaggcagaaa

SEQ ID NO: 1006381 - RNA, 21 nt, Human
uggagcacacacgccagaucc

SEQ ID NO: 1006382 - RNA, 22 nt, Human
uggagcuaaaguucuuacaaca

SEQ ID NO: 1006383 - RNA, 23 nt, Human
uggcaaguccacagaaucagagg

SEQ ID NO: 1006384 - RNA, 23 nt, Human
uggcagcucagcccgcugaggac

SEQ ID NO: 1006385 - RNA, 22 nt, Human
uggcuauagagagggucuaggg

SEQ ID NO: 1006386 - RNA, 22 nt, Human
ugggaagaggcgcuguggacgg

SEQ ID NO: 1006387 - RNA, 23 nt, Human
ugggaagaggcgcuguggacggc

SEQ ID NO: 1006388 - RNA, 21 nt, Human
ugggagcugaaggucccuggc

SEQ ID NO: 1006389 - RNA, 19 nt, Human
ugggauuuugcagacucag

SEQ ID NO: 1006390 - RNA, 21 nt, Human
ugucaacacagaccacaaaca

SEQ ID NO: 1006391 - RNA, 21 nt, Human
ugucagugcaacgggcuuccg

SEQ ID NO: 1006392 - RNA, 23 nt, Human
uuccuggcuucgaauccggcauc

SEQ ID NO: 1006393 - RNA, 19 nt, Human
uuggagaaaguggcaaguc

SEQ ID NO: 1006394 - RNA, 18 nt, Human
uugguggugcaggugcag

SEQ ID NO: 1006395 - RNA, 22 nt, Human
uuuauaaaggccuaccgucccc

SEQ ID NO: 1006396 - RNA, 28 nt, Human
uuuuccaaggucacacagcgagcgaaca

SEQ ID NO: 1006397 - RNA, 21 nt, Human
aaaaaaaaauucaugaaggga

SEQ ID NO: 1006398 - RNA, 23 nt, Human
aaaaaagauucuuuagcagcaaa

SEQ ID NO: 1006399 - RNA, 23 nt, Human
aaaaacccaacccucaucucccc

SEQ ID NO: 1006400 - RNA, 18 nt, Human
aaaauguccaagguucuc

SEQ ID NO: 1006401 - RNA, 21 nt, Human
aaacaaauaugugaauaugau

SEQ ID NO: 1006402 - RNA, 24 nt, Human
aaacccaacccucaucuccccaaa

SEQ ID NO: 1006403 - RNA, 20 nt, Human
aaaccggcagacauacuccc

SEQ ID NO: 1006404 - RNA, 23 nt, Human
aaaggguaggaaggagagcaggg

SEQ ID NO: 1006405 - RNA, 19 nt, Human
aacaccaauuaaaaaaaca

SEQ ID NO: 1006406 - RNA, 24 nt, Human
aacccucaucuccccaaaauauaa

SEQ ID NO: 1006407 - RNA, 24 nt, Human
aaccugucccuuaagcuuuugacc

SEQ ID NO: 1006408 - RNA, 19 nt, Human
aagaaaaaaaaaacugaaa

SEQ ID NO: 1006409 - RNA, 18 nt, Human
aagaaaaaagaaaguaug

SEQ ID NO: 1006410 - RNA, 21 nt, Human
acccaacccucaucuccccaa

SEQ ID NO: 1006411 - RNA, 21 nt, Human
acccugccucaaacucacaca

SEQ ID NO: 1006412 - RNA, 18 nt, Human
aggaagggggagagggga

SEQ ID NO: 1006413 - RNA, 19 nt, Human
agggucaggaagggggaga

SEQ ID NO: 1006414 - RNA, 20 nt, Human
aguuuacuuuuguuuuugcu

SEQ ID NO: 1006415 - RNA, 23 nt, Human
auacucccacauucuugcacccu

SEQ ID NO: 1006416 - RNA, 21 nt, Human
augcugcccagacccauuagc

SEQ ID NO: 1006417 - RNA, 19 nt, Human
caaaagaaaaaaaaaacug

SEQ ID NO: 1006418 - RNA, 23 nt, Human
cacaagcaaccauaaaaccuguc

SEQ ID NO: 1006419 - RNA, 18 nt, Human
cacaaggaccagagcagc

SEQ ID NO: 1006420 - RNA, 20 nt, Human
cacacaaaugacccugccuc

SEQ ID NO: 1006421 - RNA, 23 nt, Human
cacacaaaugacccugccucaaa

SEQ ID NO: 1006422 - RNA, 24 nt, Human
cacacaaaugacccugccucaaac

SEQ ID NO: 1006423 - RNA, 18 nt, Human
cagcagcuucgcugcggc

SEQ ID NO: 1006424 - RNA, 22 nt, Human
cagcaggauuuucuuuauuuug

SEQ ID NO: 1006425 - RNA, 23 nt, Human
cauccauguccuuucaggucuca

SEQ ID NO: 1006426 - RNA, 23 nt, Human
caugcuuuauuacacaagcaacc

SEQ ID NO: 1006427 - RNA, 21 nt, Human
ccaacccucaucuccccaaaa

SEQ ID NO: 1006428 - RNA, 23 nt, Human
ccucaaacucacacacccaaggg

SEQ ID NO: 1006429 - RNA, 23 nt, Human
ccuucuguucucgagaccaaagg

SEQ ID NO: 1006430 - RNA, 20 nt, Human
ccuuuuuuuuuuuuuacccc

SEQ ID NO: 1006431 - RNA, 18 nt, Human
cucagcguuugcucgcuc

SEQ ID NO: 1006432 - RNA, 19 nt, Human
cugaacgugugucaccauu

SEQ ID NO: 1006433 - RNA, 24 nt, Human
cuuaaagggacauuucaaaagaaa

SEQ ID NO: 1006434 - RNA, 19 nt, Human
cuugccucguuggccuugg

SEQ ID NO: 1006435 - RNA, 24 nt, Human
cuugccucguuggccuuggcugug

SEQ ID NO: 1006436 - RNA, 19 nt, Human
gcucugggugggccugggg

SEQ ID NO: 1006437 - RNA, 23 nt, Human
ggcagacauacucccacauucuu

SEQ ID NO: 1006438 - RNA, 26 nt, Human
ggccuccaacacaugaacagcagcuu

SEQ ID NO: 1006439 - RNA, 20 nt, Human
ggcuguguuugucugugugu

SEQ ID NO: 1006440 - RNA, 18 nt, Human
gggaaaaaagauucuuua

SEQ ID NO: 1006441 - RNA, 22 nt, Human
ggugaaaggcguuaaggagaga

SEQ ID NO: 1006442 - RNA, 20 nt, Human
uaaaaaaaaacccaacccuc

SEQ ID NO: 1006443 - RNA, 21 nt, Human
uaaaaaaaaacccaacccuca

SEQ ID NO: 1006444 - RNA, 22 nt, Human
uaaaaaaaaacccaacccucau

SEQ ID NO: 1006445 - RNA, 20 nt, Human
uaaaaaaaaauucaugaagg

SEQ ID NO: 1006446 - RNA, 22 nt, Human
uaaaaaaacaaauaugugaaua

SEQ ID NO: 1006447 - RNA, 23 nt, Human
uaaaaaaauccacagcagugcaa

SEQ ID NO: 1006448 - RNA, 26 nt, Human
uaaagggacauuucaaaagaaaaaaa

SEQ ID NO: 1006449 - RNA, 18 nt, Human
uacacuuacaccccuaga

SEQ ID NO: 1006450 - RNA, 23 nt, Human
uagaauaaaaaaaucuuaaaggg

SEQ ID NO: 1006451 - RNA, 20 nt, Human
ucacaaggaccagagcagca

SEQ ID NO: 1006452 - RNA, 22 nt, Human
ucacagaauauauguuuggagg

SEQ ID NO: 1006453 - RNA, 26 nt, Human
ucagaacacuuuaugguuucaaaucc

SEQ ID NO: 1006454 - RNA, 23 nt, Human
ucugaaaauaucuugccuuuuuu

SEQ ID NO: 1006455 - RNA, 18 nt, Human
ucuguucucgagaccaaa

SEQ ID NO: 1006456 - RNA, 22 nt, Human
ucuuuagcagcaaaauguccaa

SEQ ID NO: 1006457 - RNA, 24 nt, Human
ugacccugccucaaacucacacac

SEQ ID NO: 1006458 - RNA, 18 nt, Human
ugauauaaaaauacgauc

SEQ ID NO: 1006459 - RNA, 18 nt, Human
ugccucguuggccuuggc

SEQ ID NO: 1006460 - RNA, 18 nt, Human
ugcguuaggaauugaaca

SEQ ID NO: 1006461 - RNA, 23 nt, Human
ugcucgcucugggugggccuggg

SEQ ID NO: 1006462 - RNA, 24 nt, Human
uggcugugucuagcagaggguggg

SEQ ID NO: 1006463 - RNA, 23 nt, Human
uggcuguguuugucugugugugu

SEQ ID NO: 1006464 - RNA, 20 nt, Human
uuaaguagggagcaguaaua

SEQ ID NO: 1006465 - RNA, 25 nt, Human
uucaaaagaaaaaaaaaacugaaau

SEQ ID NO: 1006466 - RNA, 23 nt, Human
uugcucgcucugggugggccugg

SEQ ID NO: 1006467 - RNA, 21 nt, Human
uugcuucucuuaaaaaaaucc

SEQ ID NO: 1006468 - RNA, 20 nt, Human
uuggagggccagggaaagga

SEQ ID NO: 1006469 - RNA, 21 nt, Human
uuuggagggccagggaaagga

SEQ ID NO: 1006470 - RNA, 18 nt, Human
uuuuuuuuuuuucuucug

SEQ ID NO: 1006471 - RNA, 23 nt, Human
aaaaugcaaaacauaaaccacug

SEQ ID NO: 1006472 - RNA, 18 nt, Human
aaagcaucagguuuacaa

SEQ ID NO: 1006473 - RNA, 25 nt, Human
aaagcuaugggguuuucccagagcu

SEQ ID NO: 1006474 - RNA, 24 nt, Human
aaagugcugggauuacagguguga

SEQ ID NO: 1006475 - RNA, 21 nt, Human
aacaagccuggccagcauggu

SEQ ID NO: 1006476 - RNA, 18 nt, Human
aacaugguaaaaccccau

SEQ ID NO: 1006477 - RNA, 19 nt, Human
aacaugguaaaaccccauc

SEQ ID NO: 1006478 - RNA, 23 nt, Human
aacaugguaaaaccccaucccca

SEQ ID NO: 1006479 - RNA, 23 nt, Human
aagaaucaguugaacuugggagg

SEQ ID NO: 1006480 - RNA, 21 nt, Human
aagcagagguugcaaugagcc

SEQ ID NO: 1006481 - RNA, 24 nt, Human
aagcagagguugcaaugagccgag

SEQ ID NO: 1006482 - RNA, 23 nt, Human
aagcaucagguuuacaagcauga

SEQ ID NO: 1006483 - RNA, 18 nt, Human
aagugcugggauuacagg

SEQ ID NO: 1006484 - RNA, 19 nt, Human
aagugcugggauuacaggu

SEQ ID NO: 1006485 - RNA, 26 nt, Human
aagugcugggauuacaggugugagcc

SEQ ID NO: 1006486 - RNA, 24 nt, Human
aaucaguugaacuugggaggcaga

SEQ ID NO: 1006487 - RNA, 19 nt, Human
aaucaugccaccuaacucc

SEQ ID NO: 1006488 - RNA, 22 nt, Human
acagacaaaaacaagaagcaug

SEQ ID NO: 1006489 - RNA, 21 nt, Human
acagagcgagacucugucuca

SEQ ID NO: 1006490 - RNA, 24 nt, Human
acagagcgagacucugucucaaaa

SEQ ID NO: 1006491 - RNA, 24 nt, Human
acagagugagacucugucucaaaa

SEQ ID NO: 1006492 - RNA, 19 nt, Human
accauagugaaacauaccu

SEQ ID NO: 1006493 - RNA, 22 nt, Human
acggggcugcagagccgccucu

SEQ ID NO: 1006494 - RNA, 24 nt, Human
acgguacucuagccugggagacag

SEQ ID NO: 1006495 - RNA, 24 nt, Human
acgugacucaggcacugcacacca

SEQ ID NO: 1006496 - RNA, 18 nt, Human
acucaggcacugcacacc

SEQ ID NO: 1006497 - RNA, 21 nt, Human
acuccagcaagagcuuauacc

SEQ ID NO: 1006498 - RNA, 21 nt, Human
acucccgccugggugacagag

SEQ ID NO: 1006499 - RNA, 23 nt, Human
acucccgccugggugacagagug

SEQ ID NO: 1006500 - RNA, 19 nt, Human
acucuagccugggagacag

SEQ ID NO: 1006501 - RNA, 24 nt, Human
acucuagccugggagacagagcga

SEQ ID NO: 1006502 - RNA, 24 nt, Human
acuugaggucaggaguuugagacc

SEQ ID NO: 1006503 - RNA, 23 nt, Human
agacaaaaacaagaagcauguca

SEQ ID NO: 1006504 - RNA, 26 nt, Human
agagagcaggaugguccugauaucau

SEQ ID NO: 1006505 - RNA, 19 nt, Human
agaggcucaugccuguaau

SEQ ID NO: 1006506 - RNA, 24 nt, Human
agaggcucaugccuguaauuucag

SEQ ID NO: 1006507 - RNA, 22 nt, Human
agagguugcaaugagccgagau

SEQ ID NO: 1006508 - RNA, 24 nt, Human
agagguugcaaugagccgagauug

SEQ ID NO: 1006509 - RNA, 18 nt, Human
agagguugcagugagccg

SEQ ID NO: 1006510 - RNA, 24 nt, Human
agagguugcagugagccgaaauca

SEQ ID NO: 1006511 - RNA, 22 nt, Human
agcaguuucauuuauaacagac

SEQ ID NO: 1006512 - RNA, 19 nt, Human
agcauggugaaaccccauu

SEQ ID NO: 1006513 - RNA, 21 nt, Human
agcauggugaaaccccauugc

SEQ ID NO: 1006514 - RNA, 22 nt, Human
agccuggccaacaugguaaaac

SEQ ID NO: 1006515 - RNA, 24 nt, Human
agccuggccaacaugguaaaaccc

SEQ ID NO: 1006516 - RNA, 22 nt, Human
agccuggccagcauggugaaac

SEQ ID NO: 1006517 - RNA, 24 nt, Human
agccuggccagcauggugaaaccc

SEQ ID NO: 1006518 - RNA, 24 nt, Human
agccugggagacagagcgagacuc

SEQ ID NO: 1006519 - RNA, 24 nt, Human
agcuacucuggaggcugagguggg

SEQ ID NO: 1006520 - RNA, 22 nt, Human
agcugggcguggugguguguac

SEQ ID NO: 1006521 - RNA, 22 nt, Human
aggaggucuggccauguugccc

SEQ ID NO: 1006522 - RNA, 20 nt, Human
aggaguuugagaccagccug

SEQ ID NO: 1006523 - RNA, 21 nt, Human
aggcagaagaaucaguugaac

SEQ ID NO: 1006524 - RNA, 24 nt, Human
aggcagaagaaucaguugaacuug

SEQ ID NO: 1006525 - RNA, 21 nt, Human
aggcagagguugcagugagcc

SEQ ID NO: 1006526 - RNA, 22 nt, Human
aggcagagguugcagugagccg

SEQ ID NO: 1006527 - RNA, 21 nt, Human
aggcaggcagaucacuugagg

SEQ ID NO: 1006528 - RNA, 22 nt, Human
aggcaggcagaucacuugaggu

SEQ ID NO: 1006529 - RNA, 20 nt, Human
aggcagugccccugcugggc

SEQ ID NO: 1006530 - RNA, 22 nt, Human
aggccaagcacaguaggucaca

SEQ ID NO: 1006531 - RNA, 21 nt, Human
aggcggguggaucacuugagg

SEQ ID NO: 1006532 - RNA, 22 nt, Human
aggcggguggaucacuugaggu

SEQ ID NO: 1006533 - RNA, 26 nt, Human
aggcggguggaucacuugaggucagg

SEQ ID NO: 1006534 - RNA, 24 nt, Human
aggcucaugccuguaauuucagca

SEQ ID NO: 1006535 - RNA, 24 nt, Human
aggcugaggugggcagagugcuug

SEQ ID NO: 1006536 - RNA, 24 nt, Human
aggugcagaggcucaugccuguaa

SEQ ID NO: 1006537 - RNA, 23 nt, Human
agguuuacaagcaugagccacca

SEQ ID NO: 1006538 - RNA, 19 nt, Human
aucacgugacucaggcacu

SEQ ID NO: 1006539 - RNA, 20 nt, Human
aucacuugaggucaggaguu

SEQ ID NO: 1006540 - RNA, 24 nt, Human
aucacuugaggucaggaguuugag

SEQ ID NO: 1006541 - RNA, 23 nt, Human
auuagcugggcgugguggugugu

SEQ ID NO: 1006542 - RNA, 21 nt, Human
caaaacaaaaaaaaugcaaaa

SEQ ID NO: 1006543 - RNA, 18 nt, Human
caaaacauaaaccacuga

SEQ ID NO: 1006544 - RNA, 21 nt, Human
caaaacauaaaccacugacuc

SEQ ID NO: 1006545 - RNA, 24 nt, Human
caaagugcugggauuacaggugug

SEQ ID NO: 1006546 - RNA, 23 nt, Human
caacuccuggccuccaaugaacc

SEQ ID NO: 1006547 - RNA, 24 nt, Human
caaggcggguggaucacuugaggu

SEQ ID NO: 1006548 - RNA, 26 nt, Human
caaggcggguggaucacuugagguca

SEQ ID NO: 1006549 - RNA, 23 nt, Human
cacaccugagaagcugaggcagg

SEQ ID NO: 1006550 - RNA, 21 nt, Human
caccauauuaccauagugaaa

SEQ ID NO: 1006551 - RNA, 22 nt, Human
cacccaccucggccucccaaag

SEQ ID NO: 1006552 - RNA, 23 nt, Human
cacccaccucggccucccaaagu

SEQ ID NO: 1006553 - RNA, 24 nt, Human
caccucggccucccaaagugcugg

SEQ ID NO: 1006554 - RNA, 21 nt, Human
caccuucuagguucagucacc

SEQ ID NO: 1006555 - RNA, 27 nt, Human
cacgugacucaggcacugcacaccacc

SEQ ID NO: 1006556 - RNA, 21 nt, Human
cacugcgccugacccuugcag

SEQ ID NO: 1006557 - RNA, 20 nt, Human
cacuggauagagagcaggau

SEQ ID NO: 1006558 - RNA, 18 nt, Human
cacugugggugcaucgua

SEQ ID NO: 1006559 - RNA, 23 nt, Human
cacuugaggucaggaguuugaga

SEQ ID NO: 1006560 - RNA, 21 nt, Human
cagcacuuugggagucaaggc

SEQ ID NO: 1006561 - RNA, 23 nt, Human
cagcacuuugggagucaaggcgg

SEQ ID NO: 1006562 - RNA, 18 nt, Human
caggcagaucacuugagg

SEQ ID NO: 1006563 - RNA, 22 nt, Human
caguaggucacaccugagaagc

SEQ ID NO: 1006564 - RNA, 24 nt, Human
caugccuguaauuucagcacuuug

SEQ ID NO: 1006565 - RNA, 24 nt, Human
cauguugcccaggcugaucuccaa

SEQ ID NO: 1006566 - RNA, 20 nt, Human
cauuugauaaggcuuucagg

SEQ ID NO: 1006567 - RNA, 21 nt, Human
ccaaagugcugggauuacagg

SEQ ID NO: 1006568 - RNA, 21 nt, Human
ccaaagugcugggauuacagg

SEQ ID NO: 1006569 - RNA, 24 nt, Human
ccaaagugcugggauuacaggugu

SEQ ID NO: 1006570 - RNA, 20 nt, Human
ccacgguacucuagccuggg

SEQ ID NO: 1006571 - RNA, 22 nt, Human
ccacgguacucuagccugggag

SEQ ID NO: 1006572 - RNA, 24 nt, Human
ccacgguacucuagccugggagac

SEQ ID NO: 1006573 - RNA, 27 nt, Human
ccauugcuaauagaaauaaaaaaaaaa

SEQ ID NO: 1006574 - RNA, 21 nt, Human
cccauccccacuaaaaacaca

SEQ ID NO: 1006575 - RNA, 20 nt, Human
ccccugcugggcucagcucc

SEQ ID NO: 1006576 - RNA, 23 nt, Human
ccucugggcaccgaggacgauuc

SEQ ID NO: 1006577 - RNA, 24 nt, Human
ccuggccaacaugguaaaacccca

SEQ ID NO: 1006578 - RNA, 18 nt, Human
ccuggccagcauggugaa

SEQ ID NO: 1006579 - RNA, 23 nt, Human
ccuggccagcauggugaaacccc

SEQ ID NO: 1006580 - RNA, 24 nt, Human
ccuggccagcauggugaaacccca

SEQ ID NO: 1006581 - RNA, 22 nt, Human
ccugggagacagagcgagacuc

SEQ ID NO: 1006582 - RNA, 22 nt, Human
ccugggugacagagugagacuc

SEQ ID NO: 1006583 - RNA, 22 nt, Human
ccuguaauuucagcacuuuggg

SEQ ID NO: 1006584 - RNA, 19 nt, Human
ccuuggacucucuacguca

SEQ ID NO: 1006585 - RNA, 22 nt, Human
ccuuuuggcuacagggccccag

SEQ ID NO: 1006586 - RNA, 22 nt, Human
cgaaaagaaugaaggccaggug

SEQ ID NO: 1006587 - RNA, 24 nt, Human
cgggaggcugaggcagaagaauca

SEQ ID NO: 1006588 - RNA, 24 nt, Human
cggguggaucacuugaggucagga

SEQ ID NO: 1006589 - RNA, 24 nt, Human
cucaaaacaaaaaaaaugcaaaac

SEQ ID NO: 1006590 - RNA, 24 nt, Human
cucaugccuguaauuucagcacuu

SEQ ID NO: 1006591 - RNA, 26 nt, Human
cuccugcuguagccuuuuggcuacag

SEQ ID NO: 1006592 - RNA, 19 nt, Human
cuccuuuaugggcgguggc

SEQ ID NO: 1006593 - RNA, 24 nt, Human
cugcuacucgggaggcugaggcag

SEQ ID NO: 1006594 - RNA, 23 nt, Human
cuggccaacaugguaaaacccca

SEQ ID NO: 1006595 - RNA, 23 nt, Human
cuggccagcauggugaaacccca

SEQ ID NO: 1006596 - RNA, 23 nt, Human
cuucauacacugugccagcugcu

SEQ ID NO: 1006597 - RNA, 24 nt, Human
gacagagcgagacucugucucaaa

SEQ ID NO: 1006598 - RNA, 24 nt, Human
gacagagugagacucugucucaaa

SEQ ID NO: 1006599 - RNA, 22 nt, Human
gagccaccaugccugguucagc

SEQ ID NO: 1006600 - RNA, 21 nt, Human
gaucacuugaggucaggaguu

SEQ ID NO: 1006601 - RNA, 24 nt, Human
gaucacuugaggucaggaguuuga

SEQ ID NO: 1006602 - RNA, 20 nt, Human
gaucacuugaggucaguuca

SEQ ID NO: 1006603 - RNA, 21 nt, Human
gaucacuugaggucaguucau

SEQ ID NO: 1006604 - RNA, 18 nt, Human
gauuacaggugugagcca

SEQ ID NO: 1006605 - RNA, 22 nt, Human
gauuacaggugugagccacugc

SEQ ID NO: 1006606 - RNA, 22 nt, Human
gauuacaggugugagccacugc

SEQ ID NO: 1006607 - RNA, 24 nt, Human
gcacuguauuuccagcuacucugg

SEQ ID NO: 1006608 - RNA, 24 nt, Human
gcagagccgccucugggcaccgag

SEQ ID NO: 1006609 - RNA, 20 nt, Human
gcauucaaauauagcaguuu

SEQ ID NO: 1006610 - RNA, 22 nt, Human
gccaacaugguaaaaccccauc

SEQ ID NO: 1006611 - RNA, 20 nt, Human
gccacgguacucuagccugg

SEQ ID NO: 1006612 - RNA, 21 nt, Human
gccagcauggugaaaccccau

SEQ ID NO: 1006613 - RNA, 21 nt, Human
gccagcugcuucauggauggu

SEQ ID NO: 1006614 - RNA, 24 nt, Human
gccaggugcagaggcucaugccug

SEQ ID NO: 1006615 - RNA, 23 nt, Human
gccugggugacagagugagacuc

SEQ ID NO: 1006616 - RNA, 23 nt, Human
gcugaucuccaacuccuggccuc

SEQ ID NO: 1006617 - RNA, 27 nt, Human
ggccauguugcccaggcugaucuccaa

SEQ ID NO: 1006618 - RNA, 21 nt, Human
ggcucaugccuguaauuucag

SEQ ID NO: 1006619 - RNA, 19 nt, Human
ggucaggaguuugagacca

SEQ ID NO: 1006620 - RNA, 21 nt, Human
gguggaucacuugaggucagg

SEQ ID NO: 1006621 - RNA, 22 nt, Human
gguuuacaagcaugagccacca

SEQ ID NO: 1006622 - RNA, 24 nt, Human
guacucuagccugggagacagagc

SEQ ID NO: 1006623 - RNA, 20 nt, Human
gucaggugauccauccaccc

SEQ ID NO: 1006624 - RNA, 24 nt, Human
gugacagagugagacucugucuca

SEQ ID NO: 1006625 - RNA, 28 nt, Human
gugauccauccacccaccucggccuccc

SEQ ID NO: 1006626 - RNA, 23 nt, Human
gugcaucguaaagguggguaguc

SEQ ID NO: 1006627 - RNA, 23 nt, Human
gugcuugagcccaggaagcagag

SEQ ID NO: 1006628 - RNA, 24 nt, Human
gugcuugagcccaggaagcagagg

SEQ ID NO: 1006629 - RNA, 20 nt, Human
guguguucaaagggcuauca

SEQ ID NO: 1006630 - RNA, 22 nt, Human
uaaaaccccauccccacuaaaa

SEQ ID NO: 1006631 - RNA, 23 nt, Human
uaaagcuaugggguuuucccaga

SEQ ID NO: 1006632 - RNA, 23 nt, Human
uaaccauacucccucuugguaag

SEQ ID NO: 1006633 - RNA, 21 nt, Human
uaagauagaacagaaauucuu

SEQ ID NO: 1006634 - RNA, 22 nt, Human
uacaagcaugagccaccaugcc

SEQ ID NO: 1006635 - RNA, 22 nt, Human
uacaggugugagccacugcgcc

SEQ ID NO: 1006636 - RNA, 23 nt, Human
uacaggugugagccacugcgccu

SEQ ID NO: 1006637 - RNA, 19 nt, Human
uaccauagugaaacauacc

SEQ ID NO: 1006638 - RNA, 26 nt, Human
uacccuggguguccacguuagggugg

SEQ ID NO: 1006639 - RNA, 20 nt, Human
uacgaaaagaaugaaggcca

SEQ ID NO: 1006640 - RNA, 22 nt, Human
uacucuagccugggagacagag

SEQ ID NO: 1006641 - RNA, 24 nt, Human
uacucuagccugggagacagagcg

SEQ ID NO: 1006642 - RNA, 22 nt, Human
uacuuggggaagcacggcccgg

SEQ ID NO: 1006643 - RNA, 21 nt, Human
uagaacagaaauucuuggaca

SEQ ID NO: 1006644 - RNA, 20 nt, Human
uagcugggcgugguggugug

SEQ ID NO: 1006645 - RNA, 21 nt, Human
ucagcuccugcuguagccuuu

SEQ ID NO: 1006646 - RNA, 22 nt, Human
ucauaacaagccuggccagcau

SEQ ID NO: 1006647 - RNA, 19 nt, Human
uccaacuccuggccuccaa

SEQ ID NO: 1006648 - RNA, 24 nt, Human
uccaacuccuggccuccaaugaac

SEQ ID NO: 1006649 - RNA, 21 nt, Human
uccacccaccucggccuccca

SEQ ID NO: 1006650 - RNA, 23 nt, Human
ucccaaagugcugggauuacagg

SEQ ID NO: 1006651 - RNA, 18 nt, Human
ucccagagcuugguagca

SEQ ID NO: 1006652 - RNA, 24 nt, Human
ucccgccugggugacagagugaga

SEQ ID NO: 1006653 - RNA, 18 nt, Human
ucggccucccaaagugcu

SEQ ID NO: 1006654 - RNA, 25 nt, Human
ucgggaggcugaggcagaagaauca

SEQ ID NO: 1006655 - RNA, 23 nt, Human
ucuagccugggagacagagcgag

SEQ ID NO: 1006656 - RNA, 24 nt, Human
ucuagccugggagacagagcgaga

SEQ ID NO: 1006657 - RNA, 24 nt, Human
ugagaagcugaggcaggcagauca

SEQ ID NO: 1006658 - RNA, 23 nt, Human
ugagaccagccuggccaacaugg

SEQ ID NO: 1006659 - RNA, 24 nt, Human
ugagaccagccuggccaacauggu

SEQ ID NO: 1006660 - RNA, 22 nt, Human
ugagccgaaaucaugccaccua

SEQ ID NO: 1006661 - RNA, 22 nt, Human
ugagccgagauugugccacggu

SEQ ID NO: 1006662 - RNA, 18 nt, Human
ugaggaacuucacugugg

SEQ ID NO: 1006663 - RNA, 20 nt, Human
ugaggcagaagaaucaguug

SEQ ID NO: 1006664 - RNA, 23 nt, Human
ugaggcagaagaaucaguugaac

SEQ ID NO: 1006665 - RNA, 23 nt, Human
ugaggcagaagaaucaguugaac

SEQ ID NO: 1006666 - RNA, 26 nt, Human
ugaggcaggcagaucacuugagguca

SEQ ID NO: 1006667 - RNA, 18 nt, Human
ugaggucaggaguuugag

SEQ ID NO: 1006668 - RNA, 25 nt, Human
ugaggugggcagagugcuugagccc

SEQ ID NO: 1006669 - RNA, 22 nt, Human
ugcaaugagccgagauugugcc

SEQ ID NO: 1006670 - RNA, 23 nt, Human
ugccacgguacucuagccuggga

SEQ ID NO: 1006671 - RNA, 26 nt, Human
ugccagcugcuucauggauggugucc

SEQ ID NO: 1006672 - RNA, 23 nt, Human
ugccuguaauuucagcacuuugg

SEQ ID NO: 1006673 - RNA, 23 nt, Human
ugccuguaauuucagcacuuugg

SEQ ID NO: 1006674 - RNA, 24 nt, Human
ugcugggauuacaggugugagcca

SEQ ID NO: 1006675 - RNA, 23 nt, Human
uggaucacuugaggucaggaguu

SEQ ID NO: 1006676 - RNA, 24 nt, Human
uggaucacuugaggucaggaguuu

SEQ ID NO: 1006677 - RNA, 27 nt, Human
uggaucacuugaggucaggaguuugag

SEQ ID NO: 1006678 - RNA, 19 nt, Human
uggaugguguccauuugau

SEQ ID NO: 1006679 - RNA, 24 nt, Human
uggccagcauggugaaaccccauu

SEQ ID NO: 1006680 - RNA, 22 nt, Human
uggcugggucaaaguuuuguga

SEQ ID NO: 1006681 - RNA, 22 nt, Human
ugggaggcagagguugcaguga

SEQ ID NO: 1006682 - RNA, 24 nt, Human
ugggaggcagagguugcagugagc

SEQ ID NO: 1006683 - RNA, 18 nt, Human
ugggauuacaggugugag

SEQ ID NO: 1006684 - RNA, 19 nt, Human
ugggauuacaggugugagc

SEQ ID NO: 1006685 - RNA, 21 nt, Human
ugggauuacaggugugagcca

SEQ ID NO: 1006686 - RNA, 22 nt, Human
ugggauuacaggugugagccac

SEQ ID NO: 1006687 - RNA, 22 nt, Human
ugggauuacaggugugagccac

SEQ ID NO: 1006688 - RNA, 24 nt, Human
ugggauuacaggugugagccacug

SEQ ID NO: 1006689 - RNA, 21 nt, Human
ugggugacagagugagacucu

SEQ ID NO: 1006690 - RNA, 22 nt, Human
uggguggcacuguauuuccagc

SEQ ID NO: 1006691 - RNA, 23 nt, Human
uguauuuccagcuacucuggagg

SEQ ID NO: 1006692 - RNA, 20 nt, Human
uguccacguuagggugguag

SEQ ID NO: 1006693 - RNA, 19 nt, Human
ugucucaaaacaaaaaaaa

SEQ ID NO: 1006694 - RNA, 25 nt, Human
ugugaggaacuucacugugggugca

SEQ ID NO: 1006695 - RNA, 21 nt, Human
uguguguucaaagggcuauca

SEQ ID NO: 1006696 - RNA, 22 nt, Human
uuagcugggcgugguggugugu

SEQ ID NO: 1006697 - RNA, 24 nt, Human
uugaacuugggaggcagagguugc

SEQ ID NO: 1006698 - RNA, 22 nt, Human
uugcaaugagccgagauugugc

SEQ ID NO: 1006699 - RNA, 23 nt, Human
uugcagugagccgaaaucaugcc

SEQ ID NO: 1006700 - RNA, 21 nt, Human
uugggaggcagagguugcagu

SEQ ID NO: 1006701 - RNA, 22 nt, Human
uugguaagauagaacagaaauu

SEQ ID NO: 1006702 - RNA, 21 nt, Human
uuuacaagcaugagccaccau

SEQ ID NO: 1006703 - RNA, 21 nt, Human
aaaaaacaaaaugggagccau

SEQ ID NO: 1006704 - RNA, 22 nt, Human
aaaaaacaaaaugggagccaug

SEQ ID NO: 1006705 - RNA, 22 nt, Human
aaaaaauauauauaacaaaggg

SEQ ID NO: 1006706 - RNA, 19 nt, Human
aaacaaaaugggagccaug

SEQ ID NO: 1006707 - RNA, 18 nt, Human
aaaccgggaaggccagca

SEQ ID NO: 1006708 - RNA, 18 nt, Human
aaacuggcuuucucuuca

SEQ ID NO: 1006709 - RNA, 23 nt, Human
aagaaugauuccuaagaauacaa

SEQ ID NO: 1006710 - RNA, 21 nt, Human
aagccacagccccucucacac

SEQ ID NO: 1006711 - RNA, 24 nt, Human
aaggagccccugagcaguggggug

SEQ ID NO: 1006712 - RNA, 23 nt, Human
aagggcucugggcuaugcagucc

SEQ ID NO: 1006713 - RNA, 19 nt, Human
aaguguagaaaacucaaaa

SEQ ID NO: 1006714 - RNA, 20 nt, Human
aaugaugaaaacugagccca

SEQ ID NO: 1006715 - RNA, 23 nt, Human
aaugaugaaaacugagcccaaaa

SEQ ID NO: 1006716 - RNA, 19 nt, Human
acagugcaggucucccagc

SEQ ID NO: 1006717 - RNA, 22 nt, Human
acccugguauccuugacccuca

SEQ ID NO: 1006718 - RNA, 21 nt, Human
acgcuccuccagaagaacacc

SEQ ID NO: 1006719 - RNA, 23 nt, Human
acuggcccccacagugagcacac

SEQ ID NO: 1006720 - RNA, 23 nt, Human
agaagaacaccaagcagcagaaa

SEQ ID NO: 1006721 - RNA, 23 nt, Human
aggaaaagaaaucucaaacuccc

SEQ ID NO: 1006722 - RNA, 23 nt, Human
aggagggccugggacccgggugu

SEQ ID NO: 1006723 - RNA, 22 nt, Human
aggcaagugcccucaaauccuu

SEQ ID NO: 1006724 - RNA, 24 nt, Human
agggacauggaauuugggggccca

SEQ ID NO: 1006725 - RNA, 20 nt, Human
augaagggcucugggcuaug

SEQ ID NO: 1006726 - RNA, 18 nt, Human
augccgguccccgggcgg

SEQ ID NO: 1006727 - RNA, 19 nt, Human
auuaacaaucuccacacca

SEQ ID NO: 1006728 - RNA, 24 nt, Human
caaagggaaaggaaggagggccug

SEQ ID NO: 1006729 - RNA, 20 nt, Human
caaccgucuagcgacagagc

SEQ ID NO: 1006730 - RNA, 26 nt, Human
caagacaggcaagugcccucaaaucc

SEQ ID NO: 1006731 - RNA, 20 nt, Human
caagccagagcacggggcag

SEQ ID NO: 1006732 - RNA, 23 nt, Human
caagccccagccuagagcugccc

SEQ ID NO: 1006733 - RNA, 18 nt, Human
caccaagcagcagaaagg

SEQ ID NO: 1006734 - RNA, 20 nt, Human
caccaagcagcagaaagggc

SEQ ID NO: 1006735 - RNA, 22 nt, Human
cacccagacccaaguggcaagc

SEQ ID NO: 1006736 - RNA, 18 nt, Human
cacccucugcugcggccu

SEQ ID NO: 1006737 - RNA, 19 nt, Human
cacccucugcugcggccuc

SEQ ID NO: 1006738 - RNA, 22 nt, Human
cacccuucagucgacacauaac

SEQ ID NO: 1006739 - RNA, 21 nt, Human
cacggcccagcgcaagcccca

SEQ ID NO: 1006740 - RNA, 18 nt, Human
cacugccuggagagcccc

SEQ ID NO: 1006741 - RNA, 19 nt, Human
cagagcacggggcagucug

SEQ ID NO: 1006742 - RNA, 25 nt, Human
cagagcagaggccgggccaaagggc

SEQ ID NO: 1006743 - RNA, 18 nt, Human
cagagccuguaaacacug

SEQ ID NO: 1006744 - RNA, 19 nt, Human
cagccuagagcugccccuc

SEQ ID NO: 1006745 - RNA, 24 nt, Human
cagccuccacugccggccucugcu

SEQ ID NO: 1006746 - RNA, 20 nt, Human
caggcagauucacccacagg

SEQ ID NO: 1006747 - RNA, 23 nt, Human
cagggaaaccccugcagccccca

SEQ ID NO: 1006748 - RNA, 21 nt, Human
cagucaguucagacucaccuu

SEQ ID NO: 1006749 - RNA, 23 nt, Human
caguucagacucaccuuguggca

SEQ ID NO: 1006750 - RNA, 26 nt, Human
cauuaccacaaauaaagcauaaacaa

SEQ ID NO: 1006751 - RNA, 22 nt, Human
cauucuagucaggacggcacag

SEQ ID NO: 1006752 - RNA, 24 nt, Human
ccaaaauaggugucuguaaaaauc

SEQ ID NO: 1006753 - RNA, 24 nt, Human
ccacccagacccaaguggcaagcc

SEQ ID NO: 1006754 - RNA, 23 nt, Human
ccacugccggccucugcuuggcu

SEQ ID NO: 1006755 - RNA, 22 nt, Human
ccagagccuguaaacacugugc

SEQ ID NO: 1006756 - RNA, 22 nt, Human
cccacagugagcacacccuagg

SEQ ID NO: 1006757 - RNA, 20 nt, Human
ccccgaggcugcucugcccc

SEQ ID NO: 1006758 - RNA, 23 nt, Human
ccgaggcugcucugccccacccu

SEQ ID NO: 1006759 - RNA, 19 nt, Human
ccgucuagcgacagagcug

SEQ ID NO: 1006760 - RNA, 20 nt, Human
ccuagucucucugauccacu

SEQ ID NO: 1006761 - RNA, 19 nt, Human
ccucaugccgguccccggg

SEQ ID NO: 1006762 - RNA, 25 nt, Human
ccuccacgaacucgggaaaaaacaa

SEQ ID NO: 1006763 - RNA, 20 nt, Human
ccuggagagccccaggacuu

SEQ ID NO: 1006764 - RNA, 25 nt, Human
ccuguaaacacugugccucccacca

SEQ ID NO: 1006765 - RNA, 18 nt, Human
cgaauucugcuccaccau

SEQ ID NO: 1006766 - RNA, 19 nt, Human
cgaggagaaacuggccccc

SEQ ID NO: 1006767 - RNA, 19 nt, Human
cgcuccuccagaagaacac

SEQ ID NO: 1006768 - RNA, 20 nt, Human
cggcagacacuucacagagg

SEQ ID NO: 1006769 - RNA, 23 nt, Human
cggcagacacuucacagaggccu

SEQ ID NO: 1006770 - RNA, 20 nt, Human
cggcccagcgcaagccccag

SEQ ID NO: 1006771 - RNA, 20 nt, Human
cgucuagcgacagagcugca

SEQ ID NO: 1006772 - RNA, 20 nt, Human
cucacaagacaggcaagugc

SEQ ID NO: 1006773 - RNA, 23 nt, Human
cucacaagacaggcaagugcccu

SEQ ID NO: 1006774 - RNA, 21 nt, Human
cuccacaccaccccuaacacc

SEQ ID NO: 1006775 - RNA, 20 nt, Human
cuccugagcagcaagggccc

SEQ ID NO: 1006776 - RNA, 18 nt, Human
cucgccuguaggucugcc

SEQ ID NO: 1006777 - RNA, 21 nt, Human
cugcucugccccacccucugc

SEQ ID NO: 1006778 - RNA, 18 nt, Human
cuggagcagucaguucag

SEQ ID NO: 1006779 - RNA, 18 nt, Human
cuugggacccugguaucc

SEQ ID NO: 1006780 - RNA, 18 nt, Human
gaacucgggaaaaaacaa

SEQ ID NO: 1006781 - RNA, 19 nt, Human
gaagaacaguccccuucua

SEQ ID NO: 1006782 - RNA, 18 nt, Human
gaagggcucugggcuaug

SEQ ID NO: 1006783 - RNA, 18 nt, Human
gagaugaagggcucuggg

SEQ ID NO: 1006784 - RNA, 21 nt, Human
gagcaguggggugcucugagg

SEQ ID NO: 1006785 - RNA, 23 nt, Human
gaggcaucacuagauuccuaaaa

SEQ ID NO: 1006786 - RNA, 18 nt, Human
gagucaggagccaagagc

SEQ ID NO: 1006787 - RNA, 24 nt, Human
gcaccuccugagcagcaagggccc

SEQ ID NO: 1006788 - RNA, 22 nt, Human
gcagcagaaagggcgcagugag

SEQ ID NO: 1006789 - RNA, 19 nt, Human
gcagugaguguacauccug

SEQ ID NO: 1006790 - RNA, 21 nt, Human
gccagagcacggggcagucug

SEQ ID NO: 1006791 - RNA, 22 nt, Human
ggaaaggaaggagggccuggga

SEQ ID NO: 1006792 - RNA, 20 nt, Human
ggauaaggaauccacuuagc

SEQ ID NO: 1006793 - RNA, 27 nt, Human
gggaaaccccugcagcccccagacccc

SEQ ID NO: 1006794 - RNA, 18 nt, Human
gggcagaauggacaugug

SEQ ID NO: 1006795 - RNA, 21 nt, Human
gugaagaacaguccccuucua

SEQ ID NO: 1006796 - RNA, 21 nt, Human
uaaacacugugccucccacca

SEQ ID NO: 1006797 - RNA, 21 nt, Human
uaacaaagggauaaggaaucc

SEQ ID NO: 1006798 - RNA, 22 nt, Human
uaacaaccgucuagcgacagag

SEQ ID NO: 1006799 - RNA, 18 nt, Human
uaagaaacggucacgccc

SEQ ID NO: 1006800 - RNA, 25 nt, Human
uaagaaacggucacgcccgguaagu

SEQ ID NO: 1006801 - RNA, 23 nt, Human
uaccacaaauaaagcauaaacaa

SEQ ID NO: 1006802 - RNA, 24 nt, Human
uaccacaaauaaagcauaaacaag

SEQ ID NO: 1006803 - RNA, 19 nt, Human
uacucuguaaacaaacugg

SEQ ID NO: 1006804 - RNA, 23 nt, Human
uacugggcgcuguacccugggag

SEQ ID NO: 1006805 - RNA, 24 nt, Human
uagcgggugucacugcauggcuuc

SEQ ID NO: 1006806 - RNA, 19 nt, Human
uaggugucuguaaaaaucc

SEQ ID NO: 1006807 - RNA, 23 nt, Human
uauguaaaaaaaggagucagagc

SEQ ID NO: 1006808 - RNA, 19 nt, Human
ucacugcauggcuucuuug

SEQ ID NO: 1006809 - RNA, 18 nt, Human
ucaggcagauucacccac

SEQ ID NO: 1006810 - RNA, 27 nt, Human
uccaagaucuucugcacaucacccuuu

SEQ ID NO: 1006811 - RNA, 20 nt, Human
uccacgaacucgggaaaaaa

SEQ ID NO: 1006812 - RNA, 22 nt, Human
uccagggagcuuacugcagcca

SEQ ID NO: 1006813 - RNA, 23 nt, Human
uccagggagcuuacugcagccag

SEQ ID NO: 1006814 - RNA, 21 nt, Human
uccccagcgccgacgcgggcc

SEQ ID NO: 1006815 - RNA, 25 nt, Human
uccgcugagaacucacgcuccucca

SEQ ID NO: 1006816 - RNA, 24 nt, Human
uccugagcagcaagggcccggcuc

SEQ ID NO: 1006817 - RNA, 20 nt, Human
ucucccagcuguggcucugg

SEQ ID NO: 1006818 - RNA, 20 nt, Human
ucucuucuuuggcucuuuug

SEQ ID NO: 1006819 - RNA, 22 nt, Human
ucuuauguaaaaaaaggaguca

SEQ ID NO: 1006820 - RNA, 24 nt, Human
ugacccucagagagaugaagggcu

SEQ ID NO: 1006821 - RNA, 19 nt, Human
ugacuuaggagcucugcag

SEQ ID NO: 1006822 - RNA, 23 nt, Human
ugaggacaccauauacucucaac

SEQ ID NO: 1006823 - RNA, 19 nt, Human
ugaggcaagaggcaucacu

SEQ ID NO: 1006824 - RNA, 24 nt, Human
ugaggguauucugcuccagcugca

SEQ ID NO: 1006825 - RNA, 21 nt, Human
ugaguggugacuuaggagcuc

SEQ ID NO: 1006826 - RNA, 25 nt, Human
ugaguuacugggcgcuguacccugg

SEQ ID NO: 1006827 - RNA, 22 nt, Human
ugcaagccagagcacggggcag

SEQ ID NO: 1006828 - RNA, 21 nt, Human
ugccgguccccgggcggcggc

SEQ ID NO: 1006829 - RNA, 19 nt, Human
ugcucagccuccacugccg

SEQ ID NO: 1006830 - RNA, 18 nt, Human
ugcucugccaccagagcc

SEQ ID NO: 1006831 - RNA, 21 nt, Human
uggaaauccaaguugcaaaaa

SEQ ID NO: 1006832 - RNA, 19 nt, Human
uggaauuugggggcccaga

SEQ ID NO: 1006833 - RNA, 18 nt, Human
uggcaagccuugccucug

SEQ ID NO: 1006834 - RNA, 22 nt, Human
uggcacagaccucacaagacag

SEQ ID NO: 1006835 - RNA, 19 nt, Human
ugggacccugguauccuug

SEQ ID NO: 1006836 - RNA, 22 nt, Human
ugggagccauggauauaaaggg

SEQ ID NO: 1006837 - RNA, 23 nt, Human
uguaaacaaacuggaaauccaag

SEQ ID NO: 1006838 - RNA, 19 nt, Human
uguagaaaacucaaaacug

SEQ ID NO: 1006839 - RNA, 25 nt, Human
uguucuuaguauuucgcagggacag

SEQ ID NO: 1006840 - RNA, 18 nt, Human
uuacugcagccagaagga

SEQ ID NO: 1006841 - RNA, 21 nt, Human
uuagcccaaugugaaacacag

SEQ ID NO: 1006842 - RNA, 20 nt, Human
uuauguaaaaaaaggagucu

SEQ ID NO: 1006843 - RNA, 18 nt, Human
uucucuaaaagagcuuca

SEQ ID NO: 1006844 - RNA, 22 nt, Human
uuguugaaucuacaaaggucuu

SEQ ID NO: 1006845 - RNA, 21 nt, Human
uuugcuacuaccuaagacuac

SEQ ID NO: 1006846 - RNA, 19 nt, Human
aaaaauggaagcagaagca

SEQ ID NO: 1006847 - RNA, 25 nt, Human
aaaaccugaugaggaauucaaaaua

SEQ ID NO: 1006848 - RNA, 22 nt, Human
aaagcaaagggaaaaagucaga

SEQ ID NO: 1006849 - RNA, 23 nt, Human
aaagcaaagggaaaaagucagaa

SEQ ID NO: 1006850 - RNA, 21 nt, Human
aaagccccuaaaucaucacca

SEQ ID NO: 1006851 - RNA, 20 nt, Human
aacaauaauacuuucucccc

SEQ ID NO: 1006852 - RNA, 20 nt, Human
aacagcacugucccccaucu

SEQ ID NO: 1006853 - RNA, 21 nt, Human
aagcaaagggaaaaagucaga

SEQ ID NO: 1006854 - RNA, 20 nt, Human
aagccaaaacacaaaagucc

SEQ ID NO: 1006855 - RNA, 19 nt, Human
aagccccuaaaucaucacc

SEQ ID NO: 1006856 - RNA, 18 nt, Human
aagccuccggaggggcgg

SEQ ID NO: 1006857 - RNA, 20 nt, Human
aagguuuuggaugaaggacg

SEQ ID NO: 1006858 - RNA, 23 nt, Human
aaguuaaaaaaaaaauucagucc

SEQ ID NO: 1006859 - RNA, 24 nt, Human
acaaaguaacaaauuugcuggugc

SEQ ID NO: 1006860 - RNA, 22 nt, Human
acaacacaacucuccgcauaca

SEQ ID NO: 1006861 - RNA, 23 nt, Human
acagcucauuagaaaggucaucu

SEQ ID NO: 1006862 - RNA, 21 nt, Human
acgaaagcaaagggaaaaagu

SEQ ID NO: 1006863 - RNA, 24 nt, Human
acuauuaaaaaaacaaaguaacaa

SEQ ID NO: 1006864 - RNA, 21 nt, Human
agaaaacaguggauucccuca

SEQ ID NO: 1006865 - RNA, 22 nt, Human
agaaaggucaucuuguguuuuc

SEQ ID NO: 1006866 - RNA, 21 nt, Human
agaaguuaaaaaaaaaauuca

SEQ ID NO: 1006867 - RNA, 19 nt, Human
agacaagcauuugguuuua

SEQ ID NO: 1006868 - RNA, 27 nt, Human
agacagcaaaggcugcuucuaggaacu

SEQ ID NO: 1006869 - RNA, 24 nt, Human
agagaaagaagcuaguauguggug

SEQ ID NO: 1006870 - RNA, 19 nt, Human
agagagggaagaaaaugag

SEQ ID NO: 1006871 - RNA, 21 nt, Human
agagauggagggagagaggga

SEQ ID NO: 1006872 - RNA, 19 nt, Human
agagauuucaaacucaaaa

SEQ ID NO: 1006873 - RNA, 25 nt, Human
agcaaagggaaaaagucagaaagga

SEQ ID NO: 1006874 - RNA, 21 nt, Human
agcacaacacaacucuccgca

SEQ ID NO: 1006875 - RNA, 18 nt, Human
agccaaaacacaaaaguc

SEQ ID NO: 1006876 - RNA, 19 nt, Human
aggacggagauaugggagg

SEQ ID NO: 1006877 - RNA, 21 nt, Human
aggacggagauaugggaggaa

SEQ ID NO: 1006878 - RNA, 23 nt, Human
aggcagcuaugccugcaccgugg

SEQ ID NO: 1006879 - RNA, 23 nt, Human
agggagagagggaagaaaaugag

SEQ ID NO: 1006880 - RNA, 20 nt, Human
agugacagugaggagauuca

SEQ ID NO: 1006881 - RNA, 18 nt, Human
auaaaucuugagacccaa

SEQ ID NO: 1006882 - RNA, 24 nt, Human
auacagcucauuagaaaggucauc

SEQ ID NO: 1006883 - RNA, 22 nt, Human
augaaaaccagaaacuaaaaug

SEQ ID NO: 1006884 - RNA, 22 nt, Human
augaaggacggagauaugggag

SEQ ID NO: 1006885 - RNA, 19 nt, Human
augcaguuugcuucaagcc

SEQ ID NO: 1006886 - RNA, 23 nt, Human
caaacgagauaaacucacuucuu

SEQ ID NO: 1006887 - RNA, 19 nt, Human
caaacgguacacccucaga

SEQ ID NO: 1006888 - RNA, 25 nt, Human
caaacuggcacagaaagguaaaugc

SEQ ID NO: 1006889 - RNA, 23 nt, Human
caaauaguacauucaaaucagga

SEQ ID NO: 1006890 - RNA, 24 nt, Human
caacagcacugucccccaucuccu

SEQ ID NO: 1006891 - RNA, 22 nt, Human
caaggaaucuccaaaaaugaaa

SEQ ID NO: 1006892 - RNA, 21 nt, Human
cacaacacaacucuccgcaua

SEQ ID NO: 1006893 - RNA, 19 nt, Human
cacaacagcacuguccccc

SEQ ID NO: 1006894 - RNA, 19 nt, Human
cacacgaaagcaaagggaa

SEQ ID NO: 1006895 - RNA, 20 nt, Human
cacagcauuaaaugacauuu

SEQ ID NO: 1006896 - RNA, 19 nt, Human
caccagcggcgcccgggac

SEQ ID NO: 1006897 - RNA, 21 nt, Human
caccguggccuccagagcugg

SEQ ID NO: 1006898 - RNA, 22 nt, Human
cagauucacugcuggccccaca

SEQ ID NO: 1006899 - RNA, 21 nt, Human
cagcacugucccccaucuccu

SEQ ID NO: 1006900 - RNA, 18 nt, Human
caguguaaaaagacagca

SEQ ID NO: 1006901 - RNA, 21 nt, Human
cauucaaaucaggacaccugg

SEQ ID NO: 1006902 - RNA, 22 nt, Human
ccacaucagcacaacacaacuc

SEQ ID NO: 1006903 - RNA, 23 nt, Human
ccagagcuggaugcaugcugugc

SEQ ID NO: 1006904 - RNA, 24 nt, Human
cccacaacagcacugucccccauc

SEQ ID NO: 1006905 - RNA, 19 nt, Human
ccccgcacaccgcggccuc

SEQ ID NO: 1006906 - RNA, 23 nt, Human
ccgcacaccgcggccuccgcguc

SEQ ID NO: 1006907 - RNA, 23 nt, Human
ccugcaccguggccuccagagcu

SEQ ID NO: 1006908 - RNA, 25 nt, Human
cgcccgggacgagagcugcgggggc

SEQ ID NO: 1006909 - RNA, 18 nt, Human
cuauaggaguuacagaua

SEQ ID NO: 1006910 - RNA, 25 nt, Human
cugccagagcagcaggcagcuaugc

SEQ ID NO: 1006911 - RNA, 19 nt, Human
cuggccccacaacagcacu

SEQ ID NO: 1006912 - RNA, 20 nt, Human
cuggccccacaacagcacug

SEQ ID NO: 1006913 - RNA, 22 nt, Human
cuggugccaaaauuuauuuagc

SEQ ID NO: 1006914 - RNA, 21 nt, Human
cugucccccaucuccucucca

SEQ ID NO: 1006915 - RNA, 25 nt, Human
cuuuuacucacugaaguaguuuguc

SEQ ID NO: 1006916 - RNA, 19 nt, Human
gaagaaaaugagagaaaaa

SEQ ID NO: 1006917 - RNA, 19 nt, Human
gagccucuuaccugaccac

SEQ ID NO: 1006918 - RNA, 20 nt, Human
gagcuccgcuggcgcguccu

SEQ ID NO: 1006919 - RNA, 21 nt, Human
gaucuauaggaguuacagaua

SEQ ID NO: 1006920 - RNA, 23 nt, Human
gcagcaggcagcuaugccugcac

SEQ ID NO: 1006921 - RNA, 27 nt, Human
gccaaaacacaaaagucuuuguaccua

SEQ ID NO: 1006922 - RNA, 24 nt, Human
gccaaacuggcacagaaagguaaa

SEQ ID NO: 1006923 - RNA, 21 nt, Human
ggagagauuucaaacucaaaa

SEQ ID NO: 1006924 - RNA, 18 nt, Human
ggccacaucagcacaaca

SEQ ID NO: 1006925 - RNA, 22 nt, Human
gggaagaaaaugagagaaaaac

SEQ ID NO: 1006926 - RNA, 20 nt, Human
gggcuuuaaaaauguuuaau

SEQ ID NO: 1006927 - RNA, 23 nt, Human
gggggugggggguuagggugggg

SEQ ID NO: 1006928 - RNA, 21 nt, Human
gguuaggguggggguggucag

SEQ ID NO: 1006929 - RNA, 20 nt, Human
guccugggggagggcgcggg

SEQ ID NO: 1006930 - RNA, 19 nt, Human
gugaggagauucaccucuc

SEQ ID NO: 1006931 - RNA, 20 nt, Human
uaaaacauaaaaugucaaag

SEQ ID NO: 1006932 - RNA, 23 nt, Human
uaaaugcccacaguaaguuucua

SEQ ID NO: 1006933 - RNA, 20 nt, Human
uacacugauccucucaccaa

SEQ ID NO: 1006934 - RNA, 22 nt, Human
uagaaguuaaaaaaaaaauuca

SEQ ID NO: 1006935 - RNA, 19 nt, Human
uagcaaauaauuaaccccc

SEQ ID NO: 1006936 - RNA, 22 nt, Human
uagcaaauaauuaacccccuuu

SEQ ID NO: 1006937 - RNA, 20 nt, Human
uagcauacuuuucaaaguga

SEQ ID NO: 1006938 - RNA, 19 nt, Human
uaguuugucuucugggaga

SEQ ID NO: 1006939 - RNA, 20 nt, Human
uaugcuagcagacaagcauu

SEQ ID NO: 1006940 - RNA, 20 nt, Human
uauuguuccauaaaucuuga

SEQ ID NO: 1006941 - RNA, 26 nt, Human
ucaauaaaucugugacaaagccaaaa

SEQ ID NO: 1006942 - RNA, 18 nt, Human
ucacugaaguaguuuguc

SEQ ID NO: 1006943 - RNA, 18 nt, Human
ucacugggacaaacucac

SEQ ID NO: 1006944 - RNA, 24 nt, Human
ucagcauaagguucaggcaauaaa

SEQ ID NO: 1006945 - RNA, 22 nt, Human
ucauaugguaaaauccaauccc

SEQ ID NO: 1006946 - RNA, 20 nt, Human
uccaaugucugggguagggc

SEQ ID NO: 1006947 - RNA, 19 nt, Human
uccagggcgaaggagccgg

SEQ ID NO: 1006948 - RNA, 18 nt, Human
uccaugauuguacuaaag

SEQ ID NO: 1006949 - RNA, 22 nt, Human
uccccagugacugguacagaaa

SEQ ID NO: 1006950 - RNA, 22 nt, Human
uccccuacaccacaggccucaa

SEQ ID NO: 1006951 - RNA, 22 nt, Human
uccgcguccagggcgaaggagc

SEQ ID NO: 1006952 - RNA, 20 nt, Human
uccuacaauuaaaauggaau

SEQ ID NO: 1006953 - RNA, 20 nt, Human
ucuccaaaaaugaaaaccag

SEQ ID NO: 1006954 - RNA, 23 nt, Human
ucugugacaaagccaaaacacaa

SEQ ID NO: 1006955 - RNA, 27 nt, Human
ucugugacaaagccaaaaccggggucc

SEQ ID NO: 1006956 - RNA, 18 nt, Human
ugccugaacacaaugagg

SEQ ID NO: 1006957 - RNA, 20 nt, Human
uggaagcagaagcaaaaaag

SEQ ID NO: 1006958 - RNA, 18 nt, Human
uggcgcguccugggggag

SEQ ID NO: 1006959 - RNA, 23 nt, Human
ugggacaaacucacguucaaugc

SEQ ID NO: 1006960 - RNA, 21 nt, Human
ugggggguuagggugggggug

SEQ ID NO: 1006961 - RNA, 20 nt, Human
ugggggugggggguuagggu

SEQ ID NO: 1006962 - RNA, 22 nt, Human
ugggggugggggguuagggugg

SEQ ID NO: 1006963 - RNA, 23 nt, Human
uggugggggugggggguuagggu

SEQ ID NO: 1006964 - RNA, 22 nt, Human
uguaaaaagacagcaaaggcug

SEQ ID NO: 1006965 - RNA, 20 nt, Human
ugucccccaucuccucucca

SEQ ID NO: 1006966 - RNA, 23 nt, Human
ugugacaaagccaaaacacaaaa

SEQ ID NO: 1006967 - RNA, 19 nt, Human
uguuuaauaggaugguggg

SEQ ID NO: 1006968 - RNA, 22 nt, Human
uuaauaggaugguggggguggg

SEQ ID NO: 1006969 - RNA, 25 nt, Human
uuacacugauccucucaccaaggua

SEQ ID NO: 1006970 - RNA, 18 nt, Human
uuauagagaaagaagcua

SEQ ID NO: 1006971 - RNA, 22 nt, Human
uuccaagaaggugccgagccuc

SEQ ID NO: 1006972 - RNA, 23 nt, Human
uuuauuuagccuguuucacuggg

SEQ ID NO: 1006973 - RNA, 22 nt, Human
uuuuaccccgcuucuaaaaccu

SEQ ID NO: 1006974 - RNA, 19 nt, Human
acaacauguucggaauuca

SEQ ID NO: 1006975 - RNA, 22 nt, Human
acucugaaauccagggaugcug

SEQ ID NO: 1006976 - RNA, 25 nt, Human
agcugacugcaagaaagggaacugg

SEQ ID NO: 1006977 - RNA, 19 nt, Human
agucaccacaucaccucag

SEQ ID NO: 1006978 - RNA, 27 nt, Human
caauguccuucacuuugggucagucuc

SEQ ID NO: 1006979 - RNA, 24 nt, Human
ccagggaugcugcaggccucuccc

SEQ ID NO: 1006980 - RNA, 24 nt, Human
gggaugcugcaggccucucccggc

SEQ ID NO: 1006981 - RNA, 24 nt, Human
uaagcuaauggugaaaguacaacg

SEQ ID NO: 1006982 - RNA, 24 nt, Human
uaauuggcagaucuacucucaaac

SEQ ID NO: 1006983 - RNA, 23 nt, Human
ucacuuugggucagucuccuggg

SEQ ID NO: 1006984 - RNA, 25 nt, Human
ucagauuuauugauuuccauuguau

SEQ ID NO: 1006985 - RNA, 21 nt, Human
uccacacaacauguucggaau

SEQ ID NO: 1006986 - RNA, 23 nt, Human
ucucccggcaauguccuucacuu

SEQ ID NO: 1006987 - RNA, 23 nt, Human
ucuccugggccagaggugaaagu

SEQ ID NO: 1006988 - RNA, 18 nt, Human
ugcaagaaagggaacugg

SEQ ID NO: 1006989 - RNA, 21 nt, Human
ugcugcaggccucucccggca

SEQ ID NO: 1006990 - RNA, 23 nt, Human
uguccuucacuuugggucccguu

SEQ ID NO: 1006991 - RNA, 23 nt, Human
agcaugagacagacccacagggc

SEQ ID NO: 1006992 - RNA, 19 nt, Human
aggaacagggagagcauga

SEQ ID NO: 1006993 - RNA, 25 nt, Human
cacagcuccacggcuggcgccccuc

SEQ ID NO: 1006994 - RNA, 18 nt, Human
cagggcugaggccaaccc

SEQ ID NO: 1006995 - RNA, 20 nt, Human
ccaggccucucccucggggg

SEQ ID NO: 1006996 - RNA, 22 nt, Human
cggcggcggggggccgcggggg

SEQ ID NO: 1006997 - RNA, 20 nt, Human
cuccacggcuggcgccccuc

SEQ ID NO: 1006998 - RNA, 21 nt, Human
cuccacggcuggcgccccucc

SEQ ID NO: 1006999 - RNA, 24 nt, Human
gagagcaugagacagacccacagg

SEQ ID NO: 1007000 - RNA, 21 nt, Human
gccacggggcccaauuccaca

SEQ ID NO: 1007001 - RNA, 20 nt, Human
gcggcggggggccgcggggg

SEQ ID NO: 1007002 - RNA, 21 nt, Human
ggcggcggggggccgcggggg

SEQ ID NO: 1007003 - RNA, 18 nt, Human
gggcgggggggcacgggg

SEQ ID NO: 1007004 - RNA, 19 nt, Human
ggggacggggccgccggag

SEQ ID NO: 1007005 - RNA, 21 nt, Human
guggcggcuggcccggcggcg

SEQ ID NO: 1007006 - RNA, 27 nt, Human
uccccacagcccccaagggaugggggc

SEQ ID NO: 1007007 - RNA, 24 nt, Human
uccccaggccucucccucgggggc

SEQ ID NO: 1007008 - RNA, 21 nt, Human
uggaggcccugggguggcggg

SEQ ID NO: 1007009 - RNA, 22 nt, Human
uggcuuggaggcccuggggugg

SEQ ID NO: 1007010 - RNA, 20 nt, Human
ugggggcucugccacggggc

SEQ ID NO: 1007011 - RNA, 21 nt, Human
ugggguggcggggagaggaac

SEQ ID NO: 1007012 - RNA, 22 nt, Human
uugguguccccaggccucuccc

SEQ ID NO: 1007013 - RNA, 24 nt, Human
aaaaaaaaaaucagagacauagga

SEQ ID NO: 1007014 - RNA, 21 nt, Human
aaaaauaccacuaaaaucaca

SEQ ID NO: 1007015 - RNA, 22 nt, Human
aaaacauauauaagggugccaa

SEQ ID NO: 1007016 - RNA, 21 nt, Human
aaacuagguugcagacuagca

SEQ ID NO: 1007017 - RNA, 21 nt, Human
aacagaugcucaguaaacaug

SEQ ID NO: 1007018 - RNA, 21 nt, Human
aacccacacccacuaagcagg

SEQ ID NO: 1007019 - RNA, 19 nt, Human
aagaagcugauggaggcag

SEQ ID NO: 1007020 - RNA, 21 nt, Human
aagaagcugauggaggcaggc

SEQ ID NO: 1007021 - RNA, 20 nt, Human
aagcaaggaccuagcagaga

SEQ ID NO: 1007022 - RNA, 19 nt, Human
acaaaacucaaagcaaaac

SEQ ID NO: 1007023 - RNA, 21 nt, Human
acagguaaaaaauagaaaguu

SEQ ID NO: 1007024 - RNA, 21 nt, Human
accuucaacccacacccacua

SEQ ID NO: 1007025 - RNA, 21 nt, Human
acuaacaaagacauacggaua

SEQ ID NO: 1007026 - RNA, 21 nt, Human
agagacauuuuauagaccagu

SEQ ID NO: 1007027 - RNA, 19 nt, Human
agaugcuagauaacaaaac

SEQ ID NO: 1007028 - RNA, 19 nt, Human
aggaacuguuuucaaacau

SEQ ID NO: 1007029 - RNA, 25 nt, Human
aggcaggcuguggcagauuuuuggu

SEQ ID NO: 1007030 - RNA, 20 nt, Human
agguugcagacuagcagcug

SEQ ID NO: 1007031 - RNA, 19 nt, Human
agucacaugccaucagugu

SEQ ID NO: 1007032 - RNA, 19 nt, Human
auacuggggaaaaaaaaaa

SEQ ID NO: 1007033 - RNA, 24 nt, Human
auauaagcaaggaccuagcagaga

SEQ ID NO: 1007034 - RNA, 19 nt, Human
aucacugcugaaaguuugg

SEQ ID NO: 1007035 - RNA, 20 nt, Human
augaucccauuuauuuaaaa

SEQ ID NO: 1007036 - RNA, 21 nt, Human
caaaacucaaagcaaaacuaa

SEQ ID NO: 1007037 - RNA, 22 nt, Human
caaaauaaagucacagucuuuc

SEQ ID NO: 1007038 - RNA, 21 nt, Human
caaaguagcucuaaacaaaac

SEQ ID NO: 1007039 - RNA, 20 nt, Human
caacuuuuuaagaaaaacca

SEQ ID NO: 1007040 - RNA, 21 nt, Human
cacagucuuuccguaugucca

SEQ ID NO: 1007041 - RNA, 22 nt, Human
caucauuaguuuagcggucucc

SEQ ID NO: 1007042 - RNA, 21 nt, Human
ccaguuacuuugggcuuaaga

SEQ ID NO: 1007043 - RNA, 19 nt, Human
ccaguuggaaaauauaaag

SEQ ID NO: 1007044 - RNA, 18 nt, Human
ccgcaaccuuggcugguu

SEQ ID NO: 1007045 - RNA, 23 nt, Human
ccgcaaccuuggcugguucggcc

SEQ ID NO: 1007046 - RNA, 22 nt, Human
ccucccauuacaaaauaaaguc

SEQ ID NO: 1007047 - RNA, 23 nt, Human
cgcccuccgucuucguccggcuc

SEQ ID NO: 1007048 - RNA, 20 nt, Human
cggcccccaccuccggcucc

SEQ ID NO: 1007049 - RNA, 25 nt, Human
cugacaccgagucaaguuacucagu

SEQ ID NO: 1007050 - RNA, 22 nt, Human
cugcggcccccgcaaccuuggc

SEQ ID NO: 1007051 - RNA, 20 nt, Human
cuggagauuuucuuuuucaa

SEQ ID NO: 1007052 - RNA, 20 nt, Human
cuggauccugcugcuuuuuc

SEQ ID NO: 1007053 - RNA, 20 nt, Human
cuugccaacacugucaccau

SEQ ID NO: 1007054 - RNA, 24 nt, Human
gaucauuccaauuuaggggaaagu

SEQ ID NO: 1007055 - RNA, 23 nt, Human
gcaaagcugagaucacacuguac

SEQ ID NO: 1007056 - RNA, 19 nt, Human
gcaacaaaaagaugcuaga

SEQ ID NO: 1007057 - RNA, 20 nt, Human
gcgcucgcucgguguguagu

SEQ ID NO: 1007058 - RNA, 20 nt, Human
gcuguuuccuugccaacacu

SEQ ID NO: 1007059 - RNA, 20 nt, Human
ggugagagggaaaacuaggu

SEQ ID NO: 1007060 - RNA, 19 nt, Human
guuaaaggugagagggaaa

SEQ ID NO: 1007061 - RNA, 26 nt, Human
guuugcucugagaaaauuucuuccuc

SEQ ID NO: 1007062 - RNA, 22 nt, Human
uaaagagacauuuuauagacca

SEQ ID NO: 1007063 - RNA, 24 nt, Human
uaagaaaaaccaaaugacuaaagg

SEQ ID NO: 1007064 - RNA, 19 nt, Human
uacaagauuuugcuugcag

SEQ ID NO: 1007065 - RNA, 19 nt, Human
uacugguuuucacuccuac

SEQ ID NO: 1007066 - RNA, 19 nt, Human
uaggagacaagucacaugc

SEQ ID NO: 1007067 - RNA, 19 nt, Human
uaguugguuuccaguucuu

SEQ ID NO: 1007068 - RNA, 20 nt, Human
uauauaagggugccaaaaag

SEQ ID NO: 1007069 - RNA, 19 nt, Human
ucaaagcaaaacuaagauc

SEQ ID NO: 1007070 - RNA, 21 nt, Human
ucaacuuuuuaagaaaaacca

SEQ ID NO: 1007071 - RNA, 20 nt, Human
ucaaggcaaacugacuugag

SEQ ID NO: 1007072 - RNA, 20 nt, Human
ucaguaaacauguuaaacca

SEQ ID NO: 1007073 - RNA, 21 nt, Human
ucaguaaacauguuaaaccaa

SEQ ID NO: 1007074 - RNA, 18 nt, Human
uccgucuucguccggcuc

SEQ ID NO: 1007075 - RNA, 24 nt, Human
ucugagaaaauuucuuccucccau

SEQ ID NO: 1007076 - RNA, 21 nt, Human
ucuggauccugcugcuuuuuc

SEQ ID NO: 1007077 - RNA, 22 nt, Human
ugaaauacuaaauaagaagcug

SEQ ID NO: 1007078 - RNA, 19 nt, Human
ugagaaaauuucuuccucc

SEQ ID NO: 1007079 - RNA, 24 nt, Human
ugagaaaauuucuuccucccauua

SEQ ID NO: 1007080 - RNA, 20 nt, Human
ugaguuaaacaccuucaacc

SEQ ID NO: 1007081 - RNA, 28 nt, Human
ugaguuaaacaccuucaacccacaccca

SEQ ID NO: 1007082 - RNA, 18 nt, Human
uggaaaacauauauaagg

SEQ ID NO: 1007083 - RNA, 24 nt, Human
uggagauuuucuuuuucaaacuca

SEQ ID NO: 1007084 - RNA, 23 nt, Human
uguguuugcaaagcugagaucac

SEQ ID NO: 1007085 - RNA, 22 nt, Human
uuaaacaccuucaacccacacc

SEQ ID NO: 1007086 - RNA, 24 nt, Human
uuagcggucuccacuaacaaagac

SEQ ID NO: 1007087 - RNA, 20 nt, Human
uucacagguaaaaaauagaa

SEQ ID NO: 1007088 - RNA, 21 nt, Human
uucacuccuaccaacagcgca

SEQ ID NO: 1007089 - RNA, 24 nt, Human
uuccucccauuacaaaauaaaguc

SEQ ID NO: 1007090 - RNA, 19 nt, Human
uuccugucuuuacuuuucu

SEQ ID NO: 1007091 - RNA, 21 nt, Human
uucguccggcucugcggcccc

SEQ ID NO: 1007092 - RNA, 23 nt, Human
uucuuuuauguacauuucucuaa

SEQ ID NO: 1007093 - RNA, 19 nt, Human
uuucacagguaaaaaauag

SEQ ID NO: 1007094 - RNA, 20 nt, Human
uuucagaagaauuauacugg

SEQ ID NO: 1007095 - RNA, 19 nt, Human
uuugcaaagcugagaucac

SEQ ID NO: 1007096 - RNA, 22 nt, Human
uuuucugaaaauuacauaagaa

SEQ ID NO: 1007097 - RNA, 22 nt, Human
agaaaacuaacaguugucagac

SEQ ID NO: 1007098 - RNA, 25 nt, Human
agaaaacuaacaguugucagacuca

SEQ ID NO: 1007099 - RNA, 25 nt, Human
agacaggcuggcacuauugccaaac

SEQ ID NO: 1007100 - RNA, 19 nt, Human
aucguuugugcauuuucua

SEQ ID NO: 1007101 - RNA, 18 nt, Human
caaccacacgucaccccg

SEQ ID NO: 1007102 - RNA, 18 nt, Human
cacagaucucagcaaacc

SEQ ID NO: 1007103 - RNA, 21 nt, Human
caccgccccgauccaccucuc

SEQ ID NO: 1007104 - RNA, 19 nt, Human
caugcacaugaugcaggua

SEQ ID NO: 1007105 - RNA, 22 nt, Human
ccacagaucucagcaaacccgc

SEQ ID NO: 1007106 - RNA, 25 nt, Human
ccgccccgauccaccucucgcucuc

SEQ ID NO: 1007107 - RNA, 21 nt, Human
cgccgagcucgucaaccacac

SEQ ID NO: 1007108 - RNA, 26 nt, Human
cucagcugccccccgcaccagcugcc

SEQ ID NO: 1007109 - RNA, 20 nt, Human
cucgcucucagcugcccccc

SEQ ID NO: 1007110 - RNA, 18 nt, Human
cugccccccgcaccagcu

SEQ ID NO: 1007111 - RNA, 21 nt, Human
gccacagaucucagcaaaccc

SEQ ID NO: 1007112 - RNA, 24 nt, Human
gccggccacagaucucagcaaacc

SEQ ID NO: 1007113 - RNA, 24 nt, Human
ggaaagcauucuuaauaucacuuu

SEQ ID NO: 1007114 - RNA, 23 nt, Human
uaaaauccucaaaacacuuagau

SEQ ID NO: 1007115 - RNA, 28 nt, Human
uaaaauccucaaaacacuuagauaucaa

SEQ ID NO: 1007116 - RNA, 22 nt, Human
uaauaugcacuacaugcacaug

SEQ ID NO: 1007117 - RNA, 25 nt, Human
uagcuucauaugguaguuggacaac

SEQ ID NO: 1007118 - RNA, 24 nt, Human
uaugcacuacaugcacaugaugca

SEQ ID NO: 1007119 - RNA, 19 nt, Human
ucaaaacacuuagauauca

SEQ ID NO: 1007120 - RNA, 18 nt, Human
ucagcugccccccgcacc

SEQ ID NO: 1007121 - RNA, 18 nt, Human
ucucagcaaacccgccgc

SEQ ID NO: 1007122 - RNA, 23 nt, Human
ugaauccaugcauuaaagacaag

SEQ ID NO: 1007123 - RNA, 20 nt, Human
ugacagcagugaaaaucacu

SEQ ID NO: 1007124 - RNA, 24 nt, Human
ugacagcagugaaaaucacuggaa

SEQ ID NO: 1007125 - RNA, 18 nt, Human
ugagaagaaauaagacaa

SEQ ID NO: 1007126 - RNA, 22 nt, Human
ugcacugagccaauuaggaugu

SEQ ID NO: 1007127 - RNA, 24 nt, Human
ugccgccggccacagaucucagca

SEQ ID NO: 1007128 - RNA, 21 nt, Human
uguacauaucugaaaacaucu

SEQ ID NO: 1007129 - RNA, 19 nt, Human
ugucaaauaauggaauuug

SEQ ID NO: 1007130 - RNA, 20 nt, Human
ccuccagcucugaccggacg

SEQ ID NO: 1007131 - RNA, 20 nt, Human
uaguguauggcagagaaaau

SEQ ID NO: 1007132 - RNA, 21 nt, Human
ugcccggcccuccagcucuga

SEQ ID NO: 1007133 - RNA, 20 nt, Human
uggcagagaaaauuuaguug

SEQ ID NO: 1007134 - RNA, 18 nt, Human
uguauggcagagaaaauu

SEQ ID NO: 1007135 - RNA, 18 nt, Human
uguauggcagagaaaauu

SEQ ID NO: 1007136 - RNA, 21 nt, Human
uuuaguugcaaauaauacagu

SEQ ID NO: 1007137 - RNA, 18 nt, Human
aaaggaggcuugcugacu

SEQ ID NO: 1007138 - RNA, 20 nt, Human
aaaguacuuguucacaaaac

SEQ ID NO: 1007139 - RNA, 20 nt, Human
aaaguacuuguucacaaaac

SEQ ID NO: 1007140 - RNA, 25 nt, Human
aaaguacuuguucacaaaacuuuug

SEQ ID NO: 1007141 - RNA, 22 nt, Human
aacagaaaacagaaaacaugag

SEQ ID NO: 1007142 - RNA, 18 nt, Human
aagaaccagaucagacug

SEQ ID NO: 1007143 - RNA, 23 nt, Human
aaggaggcuugcugacuuugggc

SEQ ID NO: 1007144 - RNA, 19 nt, Human
accugggugauccagugcg

SEQ ID NO: 1007145 - RNA, 19 nt, Human
acgcuguucuccagccggg

SEQ ID NO: 1007146 - RNA, 21 nt, Human
acugugggugagccuggacgg

SEQ ID NO: 1007147 - RNA, 21 nt, Human
agaaaacagaaaacaugagga

SEQ ID NO: 1007148 - RNA, 23 nt, Human
agcaaggggggaaaacaucccuc

SEQ ID NO: 1007149 - RNA, 24 nt, Human
agcaaggggggaaaacaucccuca

SEQ ID NO: 1007150 - RNA, 24 nt, Human
agcaccuugggggcuccccugagg

SEQ ID NO: 1007151 - RNA, 19 nt, Human
agccgggacagaccuggcc

SEQ ID NO: 1007152 - RNA, 22 nt, Human
aggaagcagugggugugggugg

SEQ ID NO: 1007153 - RNA, 21 nt, Human
aggcccggcgcgcccgcccag

SEQ ID NO: 1007154 - RNA, 23 nt, Human
agggaucuuuaaaccgcaacgag

SEQ ID NO: 1007155 - RNA, 22 nt, Human
augcuuuccagagacagccacc

SEQ ID NO: 1007156 - RNA, 21 nt, Human
caacaaaacaucaggccagcc

SEQ ID NO: 1007157 - RNA, 18 nt, Human
cacaagccugggugugau

SEQ ID NO: 1007158 - RNA, 21 nt, Human
caccccaggcaacccagacac

SEQ ID NO: 1007159 - RNA, 24 nt, Human
cagaaaacagaaaacaugaggaca

SEQ ID NO: 1007160 - RNA, 24 nt, Human
cagaaaacaugaggacauguaaca

SEQ ID NO: 1007161 - RNA, 18 nt, Human
cagaacccagccacaggg

SEQ ID NO: 1007162 - RNA, 22 nt, Human
cagccgggacagaccuggccuc

SEQ ID NO: 1007163 - RNA, 24 nt, Human
cagcggcaagggaugcuuuccaga

SEQ ID NO: 1007164 - RNA, 18 nt, Human
caggcucagucccugaac

SEQ ID NO: 1007165 - RNA, 19 nt, Human
caucugaguuuccacuccu

SEQ ID NO: 1007166 - RNA, 21 nt, Human
cauguaaaaaaggaaaguacu

SEQ ID NO: 1007167 - RNA, 22 nt, Human
cauucuguggcauuucucaguc

SEQ ID NO: 1007168 - RNA, 25 nt, Human
ccaaaggggccuaagcucgacaaaa

SEQ ID NO: 1007169 - RNA, 23 nt, Human
ccagccagugucuaggcugucuc

SEQ ID NO: 1007170 - RNA, 23 nt, Human
ccaggcuuccugcacauucugug

SEQ ID NO: 1007171 - RNA, 19 nt, Human
ccagggcauccgccucgcu

SEQ ID NO: 1007172 - RNA, 21 nt, Human
ccagugcgugccacagccaga

SEQ ID NO: 1007173 - RNA, 21 nt, Human
ccagugucuaggcugucuccu

SEQ ID NO: 1007174 - RNA, 21 nt, Human
cccgcgcaucggguccccgcg

SEQ ID NO: 1007175 - RNA, 21 nt, Human
cccgcgcccgccccuucccca

SEQ ID NO: 1007176 - RNA, 24 nt, Human
cccggcgcgcccgcccagcgccga

SEQ ID NO: 1007177 - RNA, 22 nt, Human
ccgcgcccgccccuuccccagg

SEQ ID NO: 1007178 - RNA, 22 nt, Human
ccgcucccgcgcaucggguccc

SEQ ID NO: 1007179 - RNA, 19 nt, Human
ccgggcgggagaccugccc

SEQ ID NO: 1007180 - RNA, 20 nt, Human
ccucgcugcuaacacucccc

SEQ ID NO: 1007181 - RNA, 21 nt, Human
ccucgcugcuaacacuccccu

SEQ ID NO: 1007182 - RNA, 23 nt, Human
ccugcacauucuguggcauuucu

SEQ ID NO: 1007183 - RNA, 20 nt, Human
cgagaggaagcagugggugu

SEQ ID NO: 1007184 - RNA, 18 nt, Human
cgccgagaggaagcagug

SEQ ID NO: 1007185 - RNA, 24 nt, Human
cucacagaagccucccaggcuucc

SEQ ID NO: 1007186 - RNA, 24 nt, Human
cucugccuuuaaggcacaagcaag

SEQ ID NO: 1007187 - RNA, 19 nt, Human
cugcccguggcagcggcaa

SEQ ID NO: 1007188 - RNA, 19 nt, Human
cuguucuccagccgggaca

SEQ ID NO: 1007189 - RNA, 18 nt, Human
gaaaacaugaggacaugu

SEQ ID NO: 1007190 - RNA, 26 nt, Human
gaaacagaaaacagaaaacaugagga

SEQ ID NO: 1007191 - RNA, 21 nt, Human
gaugcuuuccagagacagcca

SEQ ID NO: 1007192 - RNA, 20 nt, Human
gccacuagccacccuggggu

SEQ ID NO: 1007193 - RNA, 22 nt, Human
gccagccagugucuaggcuguc

SEQ ID NO: 1007194 - RNA, 27 nt, Human
gccuaaguggcugaaaaccucaggaac

SEQ ID NO: 1007195 - RNA, 18 nt, Human
ggaaaaaacucucuccca

SEQ ID NO: 1007196 - RNA, 24 nt, Human
ggacgggggcuggggcugcccgug

SEQ ID NO: 1007197 - RNA, 20 nt, Human
ggacugcaaaccacuggguc

SEQ ID NO: 1007198 - RNA, 23 nt, Human
gggaccugggugauccagugcgu

SEQ ID NO: 1007199 - RNA, 18 nt, Human
ggggcugcccguggcagc

SEQ ID NO: 1007200 - RNA, 21 nt, Human
ggggcuggggcugcccguggc

SEQ ID NO: 1007201 - RNA, 20 nt, Human
ggugcgccgagaggaagcag

SEQ ID NO: 1007202 - RNA, 23 nt, Human
uaaggcacaagcaaggggggaaa

SEQ ID NO: 1007203 - RNA, 21 nt, Human
uaugaaacagaaaacagaaaa

SEQ ID NO: 1007204 - RNA, 21 nt, Human
ucaccccaggcaacccagaca

SEQ ID NO: 1007205 - RNA, 20 nt, Human
ucagaacccagccacagggc

SEQ ID NO: 1007206 - RNA, 20 nt, Human
uccagugcgugccacagcca

SEQ ID NO: 1007207 - RNA, 18 nt, Human
uccccaggcucagucccu

SEQ ID NO: 1007208 - RNA, 23 nt, Human
uccccaggcucagucccugaaca

SEQ ID NO: 1007209 - RNA, 18 nt, Human
uccccugagggucaguga

SEQ ID NO: 1007210 - RNA, 22 nt, Human
uccccugagggucagugagggc

SEQ ID NO: 1007211 - RNA, 24 nt, Human
ucccgcgcaucggguccccgcggu

SEQ ID NO: 1007212 - RNA, 20 nt, Human
ucccucaguggcuccccaua

SEQ ID NO: 1007213 - RNA, 19 nt, Human
ucccugaacacacaugccg

SEQ ID NO: 1007214 - RNA, 22 nt, Human
ucccugaacacacaugccgggc

SEQ ID NO: 1007215 - RNA, 19 nt, Human
uccucacagaagccuccca

SEQ ID NO: 1007216 - RNA, 23 nt, Human
uccugagugaggaaggccucgcu

SEQ ID NO: 1007217 - RNA, 23 nt, Human
ucuccagccgggacagaccuggc

SEQ ID NO: 1007218 - RNA, 23 nt, Human
ucugcugggaccugggugaucca

SEQ ID NO: 1007219 - RNA, 19 nt, Human
ugaaacagaaaacagaaaa

SEQ ID NO: 1007220 - RNA, 19 nt, Human
ugaacacacaugccgggcg

SEQ ID NO: 1007221 - RNA, 26 nt, Human
ugagccuggacggacgggggcugggg

SEQ ID NO: 1007222 - RNA, 21 nt, Human
ugaugcugggugcuuccaggg

SEQ ID NO: 1007223 - RNA, 22 nt, Human
ugcccuacugcaugggcuccca

SEQ ID NO: 1007224 - RNA, 20 nt, Human
ugcgugccacagccagaagc

SEQ ID NO: 1007225 - RNA, 20 nt, Human
uggaaaaaacucucucccac

SEQ ID NO: 1007226 - RNA, 23 nt, Human
ugggcguccccaggcucaguccc

SEQ ID NO: 1007227 - RNA, 21 nt, Human
ugggugggcguccccaggcuc

SEQ ID NO: 1007228 - RNA, 22 nt, Human
uggguucacugucaacaaaaca

SEQ ID NO: 1007229 - RNA, 24 nt, Human
uguaaaaaaggaaaguacuuguuc

SEQ ID NO: 1007230 - RNA, 20 nt, Human
ugucuaggcugucuccucaa

SEQ ID NO: 1007231 - RNA, 23 nt, Human
ugucuaggcugucuccucaauuu

SEQ ID NO: 1007232 - RNA, 18 nt, Human
uuccagagacagccacca

SEQ ID NO: 1007233 - RNA, 20 nt, Human
uugggggcuccccugagggu

SEQ ID NO: 1007234 - RNA, 22 nt, Human
uuuguaggccacaaccagccuu

SEQ ID NO: 1007235 - RNA, 22 nt, Human
acagagcuuuaaucccaaagau

SEQ ID NO: 1007236 - RNA, 23 nt, Human
accagaguacagaagucagaauc

SEQ ID NO: 1007237 - RNA, 20 nt, Human
caaaagguguggcacuccug

SEQ ID NO: 1007238 - RNA, 20 nt, Human
ccaaagauccaguggccacc

SEQ ID NO: 1007239 - RNA, 21 nt, Human
cccaaagauccaguggccacc

SEQ ID NO: 1007240 - RNA, 23 nt, Human
gucagaaucaaaugcucagaauc

SEQ ID NO: 1007241 - RNA, 19 nt, Human
ucccaaagauccaguggcc

SEQ ID NO: 1007242 - RNA, 18 nt, Human
ugauuuccuguccuucuc

SEQ ID NO: 1007243 - RNA, 18 nt, Human
uugagguacaaauccaac

SEQ ID NO: 1007244 - RNA, 21 nt, Human
uuuuuuuuuuuuuuuuugagg

SEQ ID NO: 1007245 - RNA, 18 nt, Human
aggcggcagguuuccugu

SEQ ID NO: 1007246 - RNA, 21 nt, Human
cacagucuguggccgccacgc

SEQ ID NO: 1007247 - RNA, 21 nt, Human
ccagcaggcggcagguuuccu

SEQ ID NO: 1007248 - RNA, 21 nt, Human
cccacagucuguggccgccac

SEQ ID NO: 1007249 - RNA, 19 nt, Human
uuccccagcaggcggcagg

SEQ ID NO: 1007250 - RNA, 20 nt, Human
uuucgccuuccuucucauau

SEQ ID NO: 1007251 - RNA, 25 nt, Human
uuuuaaaauuaaagaauaugucacu

SEQ ID NO: 1007252 - RNA, 21 nt, Human
uuuuuuuuuuuuaaauacuca

SEQ ID NO: 1007253 - RNA, 24 nt, Human
aaacuccauggaacacauuaguaa

SEQ ID NO: 1007254 - RNA, 18 nt, Human
aagaggaagggaaggaag

SEQ ID NO: 1007255 - RNA, 18 nt, Human
aagggaaacacaggaugc

SEQ ID NO: 1007256 - RNA, 22 nt, Human
acccgaagacuccuccaaguuc

SEQ ID NO: 1007257 - RNA, 21 nt, Human
acugacaugcagggaccccug

SEQ ID NO: 1007258 - RNA, 21 nt, Human
agaaaguauacaauuauuccu

SEQ ID NO: 1007259 - RNA, 21 nt, Human
agcuaggggaguccagcugga

SEQ ID NO: 1007260 - RNA, 19 nt, Human
auagaagagcagagcagag

SEQ ID NO: 1007261 - RNA, 18 nt, Human
auccaggagaggagagau

SEQ ID NO: 1007262 - RNA, 22 nt, Human
augaagauggguacuaugaacu

SEQ ID NO: 1007263 - RNA, 23 nt, Human
augaagauggguacuaugaacug

SEQ ID NO: 1007264 - RNA, 21 nt, Human
caagacccgaagacuccucca

SEQ ID NO: 1007265 - RNA, 23 nt, Human
caaggucauccaaaguuuacuga

SEQ ID NO: 1007266 - RNA, 21 nt, Human
cagagcagaguugggcaugga

SEQ ID NO: 1007267 - RNA, 20 nt, Human
cagcccaccuuccuggccag

SEQ ID NO: 1007268 - RNA, 22 nt, Human
cagguuaaccugaaucuucaau

SEQ ID NO: 1007269 - RNA, 23 nt, Human
ccacagagcauuacuggggcuca

SEQ ID NO: 1007270 - RNA, 21 nt, Human
ccacccccuguaugaugacuc

SEQ ID NO: 1007271 - RNA, 23 nt, Human
ccccugugugaucuagugggagu

SEQ ID NO: 1007272 - RNA, 19 nt, Human
cccuguaugaugacucccc

SEQ ID NO: 1007273 - RNA, 23 nt, Human
cccuuuuuuuucugccggauccc

SEQ ID NO: 1007274 - RNA, 18 nt, Human
cuccuccaaguucucacu

SEQ ID NO: 1007275 - RNA, 27 nt, Human
cuuaaccuuaguccuaauuccgguucc

SEQ ID NO: 1007276 - RNA, 19 nt, Human
gaaaacuuggauuucccaa

SEQ ID NO: 1007277 - RNA, 24 nt, Human
gaagauggagaagagccaucccaa

SEQ ID NO: 1007278 - RNA, 18 nt, Human
gaaggaagcaggcccuaa

SEQ ID NO: 1007279 - RNA, 20 nt, Human
gagcagagcagaguugggca

SEQ ID NO: 1007280 - RNA, 18 nt, Human
gcaauccaggagaggaga

SEQ ID NO: 1007281 - RNA, 24 nt, Human
gcccaacucauaagaaucagacug

SEQ ID NO: 1007282 - RNA, 20 nt, Human
gcuggagcagaagagucugg

SEQ ID NO: 1007283 - RNA, 18 nt, Human
ggagagagagacugaggg

SEQ ID NO: 1007284 - RNA, 20 nt, Human
gggaguccagcuggagcaga

SEQ ID NO: 1007285 - RNA, 25 nt, Human
gggcuggggcagaaagucaaagggu

SEQ ID NO: 1007286 - RNA, 24 nt, Human
gugcagcccaccuuccuggccagu

SEQ ID NO: 1007287 - RNA, 18 nt, Human
uaacuugauucagguuaa

SEQ ID NO: 1007288 - RNA, 23 nt, Human
uaagaggggcuggggcagaaagu

SEQ ID NO: 1007289 - RNA, 20 nt, Human
uaauaggcucuuuuuguauc

SEQ ID NO: 1007290 - RNA, 22 nt, Human
uaggagaacuaagaggggcugg

SEQ ID NO: 1007291 - RNA, 18 nt, Human
uagguuucauagcaccca

SEQ ID NO: 1007292 - RNA, 22 nt, Human
uauuugaaggaagcaggcccua

SEQ ID NO: 1007293 - RNA, 19 nt, Human
ucccaagacccgaagacuc

SEQ ID NO: 1007294 - RNA, 21 nt, Human
ucccaagagggcacuuaaccu

SEQ ID NO: 1007295 - RNA, 25 nt, Human
uccccugcaucccuuuuuuuucugc

SEQ ID NO: 1007296 - RNA, 18 nt, Human
ucccuuaaggaaccgagc

SEQ ID NO: 1007297 - RNA, 22 nt, Human
uccugguaaaugauccaccccc

SEQ ID NO: 1007298 - RNA, 27 nt, Human
ucuaggagaacuaagaggggcuggggc

SEQ ID NO: 1007299 - RNA, 23 nt, Human
ugacuccccugcaucccuuuuuu

SEQ ID NO: 1007300 - RNA, 25 nt, Human
ugacuccccugcaucccuuuuuuuu

SEQ ID NO: 1007301 - RNA, 20 nt, Human
ugaugacuccccugcauccc

SEQ ID NO: 1007302 - RNA, 20 nt, Human
ugcaacuaggaagggaacuc

SEQ ID NO: 1007303 - RNA, 19 nt, Human
ugccaaggagauaggauaa

SEQ ID NO: 1007304 - RNA, 24 nt, Human
ugccaaggagauaggauaagugag

SEQ ID NO: 1007305 - RNA, 19 nt, Human
ugccacagagcauuacugg

SEQ ID NO: 1007306 - RNA, 21 nt, Human
ugccacagagcauuacugggg

SEQ ID NO: 1007307 - RNA, 24 nt, Human
ugccacagagcauuacuggggcuc

SEQ ID NO: 1007308 - RNA, 26 nt, Human
ugcugucaggaaauagaagagcagag

SEQ ID NO: 1007309 - RNA, 23 nt, Human
uggauccugguaaaugauccacc

SEQ ID NO: 1007310 - RNA, 20 nt, Human
uggauuucccaagacccgaa

SEQ ID NO: 1007311 - RNA, 20 nt, Human
uggggcagaaagucaaaggg

SEQ ID NO: 1007312 - RNA, 19 nt, Human
ugguaaaugauccaccccc

SEQ ID NO: 1007313 - RNA, 22 nt, Human
uguaggaaguguggauccuggu

SEQ ID NO: 1007314 - RNA, 22 nt, Human
uguggauccugguaaaugaucc

SEQ ID NO: 1007315 - RNA, 25 nt, Human
uguuaaaucaggaaacuauuuuguu

SEQ ID NO: 1007316 - RNA, 18 nt, Human
uuacuggggcucauuuuc

SEQ ID NO: 1007317 - RNA, 19 nt, Human
uuccccagcuucaaaucuc

SEQ ID NO: 1007318 - RNA, 20 nt, Human
uuuguaggaaguguggaucc

SEQ ID NO: 1007319 - RNA, 20 nt, Human
aaccggcaccggcagcagcg

SEQ ID NO: 1007320 - RNA, 19 nt, Human
agccgacuggagacccgcu

SEQ ID NO: 1007321 - RNA, 20 nt, Human
agcggcggcggaggcgacag

SEQ ID NO: 1007322 - RNA, 26 nt, Human
cagcagcggcggcggaggcgacagcu

SEQ ID NO: 1007323 - RNA, 21 nt, Human
cgacuggagacccgcucacaa

SEQ ID NO: 1007324 - RNA, 21 nt, Human
cgcucacaaccggcaccggca

SEQ ID NO: 1007325 - RNA, 20 nt, Human
cggcagcagcggcggcggag

SEQ ID NO: 1007326 - RNA, 22 nt, Human
cuggagacccgcucacaaccgg

SEQ ID NO: 1007327 - RNA, 24 nt, Human
cuugauguggagguagucucucuc

SEQ ID NO: 1007328 - RNA, 25 nt, Human
uaaaaaagacuggaacucaguccca

SEQ ID NO: 1007329 - RNA, 18 nt, Human
cagcagcgguggccuggc

SEQ ID NO: 1007330 - RNA, 18 nt, Human
cagcgguggccuggcggc

SEQ ID NO: 1007331 - RNA, 21 nt, Human
ccgcagcagcgguggccuggc

SEQ ID NO: 1007332 - RNA, 19 nt, Human
ccuacguaucagaugaagc

SEQ ID NO: 1007333 - RNA, 26 nt, Human
uaggaacugccaguguucugaguuga

SEQ ID NO: 1007334 - RNA, 18 nt, Human
uccauaaucaagacaccu

SEQ ID NO: 1007335 - RNA, 27 nt, Human
aaaaaaauacaaaaacaaaaacaacca

SEQ ID NO: 1007336 - RNA, 21 nt, Human
aaaacaaaaacaaccaaaccc

SEQ ID NO: 1007337 - RNA, 24 nt, Human
aaaagaaaaaaaauacaaaaacaa

SEQ ID NO: 1007338 - RNA, 21 nt, Human
aaacaucaacagccuccacac

SEQ ID NO: 1007339 - RNA, 20 nt, Human
aaccuuuuuagggaacggag

SEQ ID NO: 1007340 - RNA, 19 nt, Human
aauacaaaaacaaaaacaa

SEQ ID NO: 1007341 - RNA, 23 nt, Human
aauacaaaaacaaaaacaaccaa

SEQ ID NO: 1007342 - RNA, 24 nt, Human
aauacaaaaacaaaaacaaccaaa

SEQ ID NO: 1007343 - RNA, 21 nt, Human
aaucuggacaaaguacuggac

SEQ ID NO: 1007344 - RNA, 24 nt, Human
acaaaaacaaaaacaaccaaaccc

SEQ ID NO: 1007345 - RNA, 19 nt, Human
acaaaaucagugccgauga

SEQ ID NO: 1007346 - RNA, 22 nt, Human
acaaaaucagugccgaugaacg

SEQ ID NO: 1007347 - RNA, 24 nt, Human
acaccagaaacaucaacagccucc

SEQ ID NO: 1007348 - RNA, 18 nt, Human
accgcaguuucuagaauc

SEQ ID NO: 1007349 - RNA, 18 nt, Human
accuugggggccagaacc

SEQ ID NO: 1007350 - RNA, 22 nt, Human
acgcggaucucagacgcuaagc

SEQ ID NO: 1007351 - RNA, 22 nt, Human
acugagaaguccaacuuuuagc

SEQ ID NO: 1007352 - RNA, 22 nt, Human
acuggacuuuagaaaaagccua

SEQ ID NO: 1007353 - RNA, 18 nt, Human
agaaacaucaacagccuc

SEQ ID NO: 1007354 - RNA, 20 nt, Human
agaaacaucaacagccucca

SEQ ID NO: 1007355 - RNA, 25 nt, Human
agaacuaaacacaauacugagaagu

SEQ ID NO: 1007356 - RNA, 18 nt, Human
agcaccucugagccaugc

SEQ ID NO: 1007357 - RNA, 20 nt, Human
aggaagacaaaccuuuuuag

SEQ ID NO: 1007358 - RNA, 24 nt, Human
aggcaaagguuugaacuaggcccg

SEQ ID NO: 1007359 - RNA, 22 nt, Human
auaaauuccugaaaauguauag

SEQ ID NO: 1007360 - RNA, 23 nt, Human
auacaaaaacaaaaacaaccaaa

SEQ ID NO: 1007361 - RNA, 19 nt, Human
aucaacagccuccacacca

SEQ ID NO: 1007362 - RNA, 27 nt, Human
caaaaacaaaaacaaccaaacccuaac

SEQ ID NO: 1007363 - RNA, 19 nt, Human
caaaaacaaccaaacccua

SEQ ID NO: 1007364 - RNA, 22 nt, Human
caaaaacaaccaaacccuaacg

SEQ ID NO: 1007365 - RNA, 22 nt, Human
caaaagaaaaaaaauacaaaaa

SEQ ID NO: 1007366 - RNA, 18 nt, Human
caacagccuccacaccac

SEQ ID NO: 1007367 - RNA, 20 nt, Human
caacuuuuagccagaauaca

SEQ ID NO: 1007368 - RNA, 31 nt, Human
caauacugagaaguccaacuuuuagccagaa

SEQ ID NO: 1007369 - RNA, 22 nt, Human
caggaagaacuggaugaccgca

SEQ ID NO: 1007370 - RNA, 23 nt, Human
ccagaacccuagagaaggacuga

SEQ ID NO: 1007371 - RNA, 18 nt, Human
ccccacguggagcagagu

SEQ ID NO: 1007372 - RNA, 19 nt, Human
cccugcucucgugggcaga

SEQ ID NO: 1007373 - RNA, 23 nt, Human
ccgacacguuuucagcaaaacgc

SEQ ID NO: 1007374 - RNA, 21 nt, Human
ccuccacaccacguaguuucu

SEQ ID NO: 1007375 - RNA, 21 nt, Human
ccuggccccacguggagcaga

SEQ ID NO: 1007376 - RNA, 23 nt, Human
cucccugcucucgugggcagagg

SEQ ID NO: 1007377 - RNA, 19 nt, Human
cuggacaaaguacuggacu

SEQ ID NO: 1007378 - RNA, 21 nt, Human
cuugacaccagaaacaucaac

SEQ ID NO: 1007379 - RNA, 19 nt, Human
cuuguaaguucucacuugc

SEQ ID NO: 1007380 - RNA, 22 nt, Human
cuuuagaaaaagccuacacaaa

SEQ ID NO: 1007381 - RNA, 21 nt, Human
gagaaucuaaaaucuggacaa

SEQ ID NO: 1007382 - RNA, 20 nt, Human
gagcccuccgacacguuuuc

SEQ ID NO: 1007383 - RNA, 25 nt, Human
gagggacagcaaaaacccccaucag

SEQ ID NO: 1007384 - RNA, 22 nt, Human
gauggcuuugaggcaaagguuu

SEQ ID NO: 1007385 - RNA, 19 nt, Human
gcagaguccccuugaggcc

SEQ ID NO: 1007386 - RNA, 20 nt, Human
gcagaguccccuugaggcca

SEQ ID NO: 1007387 - RNA, 18 nt, Human
gcagcaacuucugagaac

SEQ ID NO: 1007388 - RNA, 23 nt, Human
gccuucuuaaagaguugguggca

SEQ ID NO: 1007389 - RNA, 23 nt, Human
ggaucucagacgcuaagcagucu

SEQ ID NO: 1007390 - RNA, 20 nt, Human
uaaaaaaaaacccucuuguu

SEQ ID NO: 1007391 - RNA, 22 nt, Human
uaaacacaauacugagaagucc

SEQ ID NO: 1007392 - RNA, 23 nt, Human
uaacaacaaagacugucgucuuu

SEQ ID NO: 1007393 - RNA, 18 nt, Human
uaagaacaaaaucagugc

SEQ ID NO: 1007394 - RNA, 22 nt, Human
uacaaaaacaaaaacaaccaaa

SEQ ID NO: 1007395 - RNA, 23 nt, Human
uacaaaaacaaaaacaaccaaac

SEQ ID NO: 1007396 - RNA, 26 nt, Human
uagaaaaagccuacacaaaauugucu

SEQ ID NO: 1007397 - RNA, 18 nt, Human
uauucugagaaucuaaaa

SEQ ID NO: 1007398 - RNA, 22 nt, Human
ucaaacgguucccaagcaccca

SEQ ID NO: 1007399 - RNA, 20 nt, Human
ucaacagacagcugagccac

SEQ ID NO: 1007400 - RNA, 18 nt, Human
ucacuggacuuuagauga

SEQ ID NO: 1007401 - RNA, 23 nt, Human
uccgacacguuuucagcaaaacg

SEQ ID NO: 1007402 - RNA, 19 nt, Human
uccguccguggccgccuuc

SEQ ID NO: 1007403 - RNA, 23 nt, Human
ucuggugggggauggcuuugagg

SEQ ID NO: 1007404 - RNA, 26 nt, Human
ugaaaaauaaaaauaaaaaaaaagga

SEQ ID NO: 1007405 - RNA, 19 nt, Human
ugacaccagaaacaucaac

SEQ ID NO: 1007406 - RNA, 18 nt, Human
ugagaacuugacaccaga

SEQ ID NO: 1007407 - RNA, 19 nt, Human
ugagaaucuaaaaucugga

SEQ ID NO: 1007408 - RNA, 19 nt, Human
ugccacgggccaccacggg

SEQ ID NO: 1007409 - RNA, 23 nt, Human
ugccacgggcugccacgggccac

SEQ ID NO: 1007410 - RNA, 20 nt, Human
ugcucucgugggcagaggac

SEQ ID NO: 1007411 - RNA, 22 nt, Human
ugcuugcucugaccuugggggc

SEQ ID NO: 1007412 - RNA, 20 nt, Human
uggacaaaguacuggacuuu

SEQ ID NO: 1007413 - RNA, 23 nt, Human
uuaaaaaaucuuguguuguuuug

SEQ ID NO: 1007414 - RNA, 25 nt, Human
uuaagagaaaaaaaaauuaaaaaaa

SEQ ID NO: 1007415 - RNA, 23 nt, Human
uuaccagcaccucugagccaugc

SEQ ID NO: 1007416 - RNA, 18 nt, Human
uuagccagaauacauaaa

SEQ ID NO: 1007417 - RNA, 24 nt, Human
uucaaaagaaaaaaaauacaaaaa

SEQ ID NO: 1007418 - RNA, 21 nt, Human
uucaaagaacuaaacacaaua

SEQ ID NO: 1007419 - RNA, 22 nt, Human
uuucaaagaacuaaacacaaua

SEQ ID NO: 1007420 - RNA, 18 nt, Human
uuucugauuccaucuuua

SEQ ID NO: 1007421 - RNA, 20 nt, Human
aaaacaccagaaaaaagcac

SEQ ID NO: 1007422 - RNA, 24 nt, Human
aaaagacaguugagaaaugggccu

SEQ ID NO: 1007423 - RNA, 22 nt, Human
aaaauaaaucauaacuuggaua

SEQ ID NO: 1007424 - RNA, 21 nt, Human
aaccacaccacauuacacuaa

SEQ ID NO: 1007425 - RNA, 21 nt, Human
aagcaauuucaaauccucuca

SEQ ID NO: 1007426 - RNA, 20 nt, Human
aagccaccaugaacaacaca

SEQ ID NO: 1007427 - RNA, 24 nt, Human
accacaccacauuacacuaaugca

SEQ ID NO: 1007428 - RNA, 18 nt, Human
agaaaaaagcacaaugga

SEQ ID NO: 1007429 - RNA, 20 nt, Human
agcacagcccucaaaacucu

SEQ ID NO: 1007430 - RNA, 19 nt, Human
agccaccaugaacaacaca

SEQ ID NO: 1007431 - RNA, 24 nt, Human
aguguguagcuaaaauuucauuua

SEQ ID NO: 1007432 - RNA, 20 nt, Human
auaaaacaccagaaaaaagc

SEQ ID NO: 1007433 - RNA, 23 nt, Human
auaaaacaccagaaaaaagcaca

SEQ ID NO: 1007434 - RNA, 21 nt, Human
auaaaucuuuucuguccugag

SEQ ID NO: 1007435 - RNA, 19 nt, Human
auauuugggaggcagugug

SEQ ID NO: 1007436 - RNA, 23 nt, Human
auuucuuccacccuccccaccca

SEQ ID NO: 1007437 - RNA, 22 nt, Human
caaaaagccaccaugaacaaca

SEQ ID NO: 1007438 - RNA, 23 nt, Human
caaaaagccaccaugaacaacac

SEQ ID NO: 1007439 - RNA, 28 nt, Human
caaauuacaagaaccaggcacaacuaaa

SEQ ID NO: 1007440 - RNA, 25 nt, Human
cacaacuaauauuugggaggcagug

SEQ ID NO: 1007441 - RNA, 23 nt, Human
cacagcccucaaaacucugcaga

SEQ ID NO: 1007442 - RNA, 24 nt, Human
caccacauuacacuaaugcagcaa

SEQ ID NO: 1007443 - RNA, 18 nt, Human
caccagaaaaaagcacaa

SEQ ID NO: 1007444 - RNA, 20 nt, Human
caccagaaaaaagcacaaug

SEQ ID NO: 1007445 - RNA, 20 nt, Human
cacuuuagaagcuguguuca

SEQ ID NO: 1007446 - RNA, 18 nt, Human
cagcaacaaugcauucau

SEQ ID NO: 1007447 - RNA, 24 nt, Human
cauaaaacaccagaaaaaagcaca

SEQ ID NO: 1007448 - RNA, 21 nt, Human
cauaaaucuuuucuguccuga

SEQ ID NO: 1007449 - RNA, 22 nt, Human
cauuucuuccacccuccccacc

SEQ ID NO: 1007450 - RNA, 24 nt, Human
ccaggcacaacuaauauuugggag

SEQ ID NO: 1007451 - RNA, 20 nt, Human
ccccugagcucugggcgccg

SEQ ID NO: 1007452 - RNA, 19 nt, Human
cccgcgccgcuuucccugc

SEQ ID NO: 1007453 - RNA, 23 nt, Human
cccggcccgcgccgcuuucccug

SEQ ID NO: 1007454 - RNA, 18 nt, Human
ccgcgccccgcccggccc

SEQ ID NO: 1007455 - RNA, 18 nt, Human
ccgcgccgcuuucccugc

SEQ ID NO: 1007456 - RNA, 20 nt, Human
ccggcccgcgccgcuuuccc

SEQ ID NO: 1007457 - RNA, 21 nt, Human
ccucaaaacucugcagaugua

SEQ ID NO: 1007458 - RNA, 22 nt, Human
cgcgccccgcccggcccgcgcc

SEQ ID NO: 1007459 - RNA, 20 nt, Human
cggcccgcgccgcuuucccu

SEQ ID NO: 1007460 - RNA, 22 nt, Human
cggcucgggcccucagcggcag

SEQ ID NO: 1007461 - RNA, 20 nt, Human
gccccgcccggcccgcgccg

SEQ ID NO: 1007462 - RNA, 23 nt, Human
uaaaacaccagaaaaaaggggag

SEQ ID NO: 1007463 - RNA, 22 nt, Human
uaaaaccacuggugagacacua

SEQ ID NO: 1007464 - RNA, 22 nt, Human
uaaaauccccauaaaucuuuuc

SEQ ID NO: 1007465 - RNA, 19 nt, Human
uaacuaguuauucaaugau

SEQ ID NO: 1007466 - RNA, 23 nt, Human
uaacuaguuauucaaugauuuuu

SEQ ID NO: 1007467 - RNA, 18 nt, Human
uaauggaagaagagacgu

SEQ ID NO: 1007468 - RNA, 23 nt, Human
uagagcauaugaauaccucuuuu

SEQ ID NO: 1007469 - RNA, 21 nt, Human
uauuguccaaaaagccaccau

SEQ ID NO: 1007470 - RNA, 19 nt, Human
ucagaacgugagagauaca

SEQ ID NO: 1007471 - RNA, 19 nt, Human
ucagaacgugagagauaca

SEQ ID NO: 1007472 - RNA, 19 nt, Human
uccacccuccccacccauu

SEQ ID NO: 1007473 - RNA, 18 nt, Human
uggaguucacaaaguggg

SEQ ID NO: 1007474 - RNA, 21 nt, Human
uggcgccuagagaggaaccgg

SEQ ID NO: 1007475 - RNA, 24 nt, Human
ugggcuaaaaaaaaugaaccuguc

SEQ ID NO: 1007476 - RNA, 22 nt, Human
uucccugcggcucgggcccuca

SEQ ID NO: 1007477 - RNA, 24 nt, Human
uuuaaaauccccauaaaucuuuuc

SEQ ID NO: 1007478 - RNA, 21 nt, Human
uuuauuguccaaaaagccacc

SEQ ID NO: 1007479 - RNA, 26 nt, Human
uuuucuguaaaaucaaauuacaagaa

SEQ ID NO: 1007480 - RNA, 21 nt, Human
aagaagccccagcaccagccc

SEQ ID NO: 1007481 - RNA, 21 nt, Human
aauacaggugcacacaggugu

SEQ ID NO: 1007482 - RNA, 27 nt, Human
aaucacauaacggacaucaaaacuaaa

SEQ ID NO: 1007483 - RNA, 27 nt, Human
agccccuucaggagaagaagccccagc

SEQ ID NO: 1007484 - RNA, 19 nt, Human
aucucuuuccuauauucag

SEQ ID NO: 1007485 - RNA, 23 nt, Human
ccagcccugcuggcuucuuacug

SEQ ID NO: 1007486 - RNA, 18 nt, Human
cccagcaccagcccugcu

SEQ ID NO: 1007487 - RNA, 23 nt, Human
ccccagcaccagcccugcuggcu

SEQ ID NO: 1007488 - RNA, 22 nt, Human
cuauguaauggguaucucuuuc

SEQ ID NO: 1007489 - RNA, 22 nt, Human
cucaggaauaguaacucuucuu

SEQ ID NO: 1007490 - RNA, 18 nt, Human
cugaccaaccacagcagc

SEQ ID NO: 1007491 - RNA, 21 nt, Human
cuugcagccccuucaggagaa

SEQ ID NO: 1007492 - RNA, 19 nt, Human
gaauaguaacucuucuuuc

SEQ ID NO: 1007493 - RNA, 25 nt, Human
uaacuggauuccuucucuaauauuc

SEQ ID NO: 1007494 - RNA, 25 nt, Human
uaauggguaucucuuuccuauauuc

SEQ ID NO: 1007495 - RNA, 25 nt, Human
uacugaguaacuauguaauggguaa

SEQ ID NO: 1007496 - RNA, 22 nt, Human
uaguaacucuucuuuccuaccu

SEQ ID NO: 1007497 - RNA, 19 nt, Human
ugguauuucucuuuuguuu

SEQ ID NO: 1007498 - RNA, 21 nt, Human
uuacuggacugaccaaccacu

SEQ ID NO: 1007499 - RNA, 20 nt, Human
uuuuuuggaaaucugccuau

SEQ ID NO: 1007500 - RNA, 22 nt, Human
aaaaaaaaaaaaaugugcaaag

SEQ ID NO: 1007501 - RNA, 24 nt, Human
aaaauacacauuaggcagaagaca

SEQ ID NO: 1007502 - RNA, 24 nt, Human
aaccaaauaauacacaacguagga

SEQ ID NO: 1007503 - RNA, 23 nt, Human
aagaaaccaaauaauacacaacg

SEQ ID NO: 1007504 - RNA, 25 nt, Human
aagcagguaaguaaaagaaaccaaa

SEQ ID NO: 1007505 - RNA, 21 nt, Human
aagcugccgcgcggagccagg

SEQ ID NO: 1007506 - RNA, 23 nt, Human
aagcugccgcgcggagccagggu

SEQ ID NO: 1007507 - RNA, 23 nt, Human
aagcuguaaucccaaaggcauca

SEQ ID NO: 1007508 - RNA, 23 nt, Human
acaacguaggaaccauuccugga

SEQ ID NO: 1007509 - RNA, 19 nt, Human
acaauaaaaaauggaacca

SEQ ID NO: 1007510 - RNA, 20 nt, Human
acaggcaauaauaaaaaggc

SEQ ID NO: 1007511 - RNA, 21 nt, Human
agaauaaaccuacaacugaga

SEQ ID NO: 1007512 - RNA, 22 nt, Human
agaccggagcggaaacugggga

SEQ ID NO: 1007513 - RNA, 24 nt, Human
agagguagaaacacuguauuaaag

SEQ ID NO: 1007514 - RNA, 24 nt, Human
agccuugauaauggaaguauaacc

SEQ ID NO: 1007515 - RNA, 18 nt, Human
aggcaauaauaaaaaggc

SEQ ID NO: 1007516 - RNA, 22 nt, Human
agggaaagggugauuuucucca

SEQ ID NO: 1007517 - RNA, 18 nt, Human
aguccaaacugggagcca

SEQ ID NO: 1007518 - RNA, 21 nt, Human
aguuccugacuuuaggccaau

SEQ ID NO: 1007519 - RNA, 21 nt, Human
augguuuauucaaguauucaa

SEQ ID NO: 1007520 - RNA, 20 nt, Human
auguacauucugcaugcaca

SEQ ID NO: 1007521 - RNA, 25 nt, Human
auuuuccuaagagaaaacgaacuuc

SEQ ID NO: 1007522 - RNA, 20 nt, Human
caacugagauaacacaggug

SEQ ID NO: 1007523 - RNA, 22 nt, Human
caccaucuaccccaagaccuuu

SEQ ID NO: 1007524 - RNA, 19 nt, Human
cacugugcgcgcccagagc

SEQ ID NO: 1007525 - RNA, 24 nt, Human
cacuuaauauguacccagcuacac

SEQ ID NO: 1007526 - RNA, 23 nt, Human
cacuuugucaguuuuauuuuacc

SEQ ID NO: 1007527 - RNA, 22 nt, Human
cagcggacgggcgggcggcgca

SEQ ID NO: 1007528 - RNA, 24 nt, Human
caguagccaagaucuaaauccugg

SEQ ID NO: 1007529 - RNA, 23 nt, Human
caugacaguagccaagaucuaaa

SEQ ID NO: 1007530 - RNA, 21 nt, Human
cauggccaagucucuaaacuc

SEQ ID NO: 1007531 - RNA, 23 nt, Human
cauuuauucaccaaguccaaacu

SEQ ID NO: 1007532 - RNA, 22 nt, Human
ccaaauaaaccuagccuuuaau

SEQ ID NO: 1007533 - RNA, 19 nt, Human
ccccgcgcuuccccgccuc

SEQ ID NO: 1007534 - RNA, 20 nt, Human
ccccgggcccgggcggacuc

SEQ ID NO: 1007535 - RNA, 20 nt, Human
cccgcaccgccgcggccccg

SEQ ID NO: 1007536 - RNA, 19 nt, Human
cccgguacucuccaucccc

SEQ ID NO: 1007537 - RNA, 19 nt, Human
ccgccgcggccccgcgcuu

SEQ ID NO: 1007538 - RNA, 18 nt, Human
ccgcggccccgcgcuucc

SEQ ID NO: 1007539 - RNA, 24 nt, Human
ccgcucggggcgcugcugcgacgg

SEQ ID NO: 1007540 - RNA, 19 nt, Human
ccggccgcuggcugucugg

SEQ ID NO: 1007541 - RNA, 22 nt, Human
ccugcaugacaguagccaagau

SEQ ID NO: 1007542 - RNA, 20 nt, Human
ccugccgcucauggcccggc

SEQ ID NO: 1007543 - RNA, 18 nt, Human
cgcaccgccgcggccccg

SEQ ID NO: 1007544 - RNA, 23 nt, Human
cgcccagagccgcacacgcgcuc

SEQ ID NO: 1007545 - RNA, 22 nt, Human
cgcggcuccgcgggcccggagc

SEQ ID NO: 1007546 - RNA, 22 nt, Human
cgcucugaggcagugaggggcc

SEQ ID NO: 1007547 - RNA, 19 nt, Human
cggccucggcgcugccggg

SEQ ID NO: 1007548 - RNA, 18 nt, Human
cuagaacccgcaccgccg

SEQ ID NO: 1007549 - RNA, 27 nt, Human
cugcgacggcgacggccgccgcccuuu

SEQ ID NO: 1007550 - RNA, 18 nt, Human
gaagaggagaggauagaa

SEQ ID NO: 1007551 - RNA, 18 nt, Human
gacaaccauguuuguuuu

SEQ ID NO: 1007552 - RNA, 21 nt, Human
gacagaacucaagcuguaauc

SEQ ID NO: 1007553 - RNA, 23 nt, Human
gagccgcacacgcgcucugaggc

SEQ ID NO: 1007554 - RNA, 22 nt, Human
gcauguaggaacuccacaucac

SEQ ID NO: 1007555 - RNA, 20 nt, Human
gcccaaauaaaccuagccuu

SEQ ID NO: 1007556 - RNA, 20 nt, Human
gcccaacgcccucgcgcgcg

SEQ ID NO: 1007557 - RNA, 19 nt, Human
gcccuagaacccgcaccgc

SEQ ID NO: 1007558 - RNA, 18 nt, Human
gcgggucuggggcagccg

SEQ ID NO: 1007559 - RNA, 18 nt, Human
ggcccggagcgcgccagc

SEQ ID NO: 1007560 - RNA, 24 nt, Human
ggcgcccaacgcccucgcgcgcgc

SEQ ID NO: 1007561 - RNA, 22 nt, Human
gggccaggggugccgucaccgu

SEQ ID NO: 1007562 - RNA, 23 nt, Human
gucuggggcagccgcagccccgg

SEQ ID NO: 1007563 - RNA, 23 nt, Human
uaaaaaauggaaccaaaagcuaa

SEQ ID NO: 1007564 - RNA, 24 nt, Human
uaaaaggauuaaaauaaaaggauu

SEQ ID NO: 1007565 - RNA, 23 nt, Human
uaaaauuagauuaaugccaaaga

SEQ ID NO: 1007566 - RNA, 22 nt, Human
uaacaaaaacauuacugagaaa

SEQ ID NO: 1007567 - RNA, 24 nt, Human
uaacuacuggaauuucauacagau

SEQ ID NO: 1007568 - RNA, 20 nt, Human
uaauaacaaauaggguugug

SEQ ID NO: 1007569 - RNA, 19 nt, Human
uacaaaauccaauacacag

SEQ ID NO: 1007570 - RNA, 18 nt, Human
uacaacugagauaacacc

SEQ ID NO: 1007571 - RNA, 24 nt, Human
uacacaguuguuuuaauaaauuag

SEQ ID NO: 1007572 - RNA, 22 nt, Human
uacccagcuacacccuagaaac

SEQ ID NO: 1007573 - RNA, 23 nt, Human
uacccagcuacacccuagaaaca

SEQ ID NO: 1007574 - RNA, 18 nt, Human
uaccuggcucaacaagcc

SEQ ID NO: 1007575 - RNA, 20 nt, Human
uagaauaaaccuacaacuga

SEQ ID NO: 1007576 - RNA, 19 nt, Human
uaggguuguggagguaaaa

SEQ ID NO: 1007577 - RNA, 23 nt, Human
uaggguuguggagguaaaacagu

SEQ ID NO: 1007578 - RNA, 18 nt, Human
uauguaguuuuuggauug

SEQ ID NO: 1007579 - RNA, 19 nt, Human
uauguaguuuuuggauugu

SEQ ID NO: 1007580 - RNA, 22 nt, Human
uauguuccuggaagccugcaug

SEQ ID NO: 1007581 - RNA, 22 nt, Human
ucacuaaggaaguaccuggcuc

SEQ ID NO: 1007582 - RNA, 21 nt, Human
ucacuggagauuacaugugaa

SEQ ID NO: 1007583 - RNA, 30 nt, Human
ucccaaaggcaucaccucacguucccaccc

SEQ ID NO: 1007584 - RNA, 18 nt, Human
ucgggccuccucggcccu

SEQ ID NO: 1007585 - RNA, 22 nt, Human
ucggggcgcugcugcgacggcg

SEQ ID NO: 1007586 - RNA, 19 nt, Human
ucuaaacucacuaaggaag

SEQ ID NO: 1007587 - RNA, 24 nt, Human
ugagauaacacaggugauaacuga

SEQ ID NO: 1007588 - RNA, 21 nt, Human
ugaggcagugaggggcccggu

SEQ ID NO: 1007589 - RNA, 19 nt, Human
ugaugaacccagugacgag

SEQ ID NO: 1007590 - RNA, 21 nt, Human
ugcacaauaaaaaauggaacc

SEQ ID NO: 1007591 - RNA, 20 nt, Human
ugccaaagagcucugugcaa

SEQ ID NO: 1007592 - RNA, 19 nt, Human
ugccgggccaggggugccg

SEQ ID NO: 1007593 - RNA, 24 nt, Human
ugcgcgcccagagccgcacacgcg

SEQ ID NO: 1007594 - RNA, 24 nt, Human
uggaaccaaaagcuaacaaaaacc

SEQ ID NO: 1007595 - RNA, 18 nt, Human
ugggagaggaagaggaga

SEQ ID NO: 1007596 - RNA, 19 nt, Human
ugggagaggaagaggagag

SEQ ID NO: 1007597 - RNA, 20 nt, Human
ugggagccaaacacucuugc

SEQ ID NO: 1007598 - RNA, 23 nt, Human
uggggaagcugccgcgcggagcc

SEQ ID NO: 1007599 - RNA, 18 nt, Human
uggggauggggugacaga

SEQ ID NO: 1007600 - RNA, 26 nt, Human
uggggauggggugacagaacucaagc

SEQ ID NO: 1007601 - RNA, 26 nt, Human
uguauacaaucaaguaaaauauuuua

SEQ ID NO: 1007602 - RNA, 24 nt, Human
ugucaaagaguucagauuauuuua

SEQ ID NO: 1007603 - RNA, 22 nt, Human
uucaaaauuucuuccaagaucc

SEQ ID NO: 1007604 - RNA, 18 nt, Human
uucaaaucacugcuuguu

SEQ ID NO: 1007605 - RNA, 18 nt, Human
uucacuucuucuuaagcu

SEQ ID NO: 1007606 - RNA, 24 nt, Human
uucuuccugagcuguuuaaagaug

SEQ ID NO: 1007607 - RNA, 20 nt, Human
uuucacacacaccaucuacc

SEQ ID NO: 1007608 - RNA, 22 nt, Human
uuucacacacaccaucuacccc

SEQ ID NO: 1007609 - RNA, 19 nt, Human
aaaaacauccauuaacuug

SEQ ID NO: 1007610 - RNA, 23 nt, Human
aaaaaccuuugaaguguuacuaa

SEQ ID NO: 1007611 - RNA, 19 nt, Human
aaaaaguuuugcucacaga

SEQ ID NO: 1007612 - RNA, 20 nt, Human
aaaacaaacaaaaaaaaacc

SEQ ID NO: 1007613 - RNA, 25 nt, Human
aaaaugcuccuaagaauccauuuug

SEQ ID NO: 1007614 - RNA, 19 nt, Human
aaacaaaaagcaaagccuc

SEQ ID NO: 1007615 - RNA, 22 nt, Human
aaacaaacaaaaaaaaaccuuu

SEQ ID NO: 1007616 - RNA, 18 nt, Human
aaaggaagcaaagcaccu

SEQ ID NO: 1007617 - RNA, 23 nt, Human
aaaguauucaagaaaauaaaaua

SEQ ID NO: 1007618 - RNA, 23 nt, Human
aaauaacuaugaaaaaaguauuc

SEQ ID NO: 1007619 - RNA, 23 nt, Human
aagaaaccaagauaaucucaaua

SEQ ID NO: 1007620 - RNA, 24 nt, Human
aagcaaacaaaaagcaaagccuca

SEQ ID NO: 1007621 - RNA, 18 nt, Human
aagcaugauuucaaggau

SEQ ID NO: 1007622 - RNA, 19 nt, Human
aagguuggaaauuuaaaac

SEQ ID NO: 1007623 - RNA, 25 nt, Human
acacuaaaaugcuccuaagaaucca

SEQ ID NO: 1007624 - RNA, 26 nt, Human
acauccaacaucacugaauggaaaua

SEQ ID NO: 1007625 - RNA, 25 nt, Human
agaagaaaaaaaaguaaggcgaaaa

SEQ ID NO: 1007626 - RNA, 18 nt, Human
agaaggcacaaacuauaa

SEQ ID NO: 1007627 - RNA, 21 nt, Human
agaaggcacaaacuauaaaag

SEQ ID NO: 1007628 - RNA, 20 nt, Human
agaauaugcccugucauaca

SEQ ID NO: 1007629 - RNA, 25 nt, Human
agauuccuaucugacagauuucuuc

SEQ ID NO: 1007630 - RNA, 19 nt, Human
agcaaaggccacagcacaa

SEQ ID NO: 1007631 - RNA, 23 nt, Human
aguuaagucauauuaucucaauc

SEQ ID NO: 1007632 - RNA, 21 nt, Human
aucagucuucuucaaaacuuu

SEQ ID NO: 1007633 - RNA, 18 nt, Human
augucagacuaaagcuga

SEQ ID NO: 1007634 - RNA, 22 nt, Human
auguuucuugguuucuguucuc

SEQ ID NO: 1007635 - RNA, 23 nt, Human
caaaaaacucaaaacauucuugg

SEQ ID NO: 1007636 - RNA, 22 nt, Human
caaaacucaauguugccaacau

SEQ ID NO: 1007637 - RNA, 23 nt, Human
caaaacucaauguugccaacaug

SEQ ID NO: 1007638 - RNA, 22 nt, Human
caaaugauguaagugcugaaaa

SEQ ID NO: 1007639 - RNA, 21 nt, Human
cagcugaaucaugaauaacac

SEQ ID NO: 1007640 - RNA, 25 nt, Human
caggcucugaaccccuagugccccc

SEQ ID NO: 1007641 - RNA, 18 nt, Human
ccacaugcauuucaaggu

SEQ ID NO: 1007642 - RNA, 23 nt, Human
cccccaacccaaaucuuggaagc

SEQ ID NO: 1007643 - RNA, 19 nt, Human
ccccuagugcccccaaccc

SEQ ID NO: 1007644 - RNA, 18 nt, Human
cccuagugcccccaaccc

SEQ ID NO: 1007645 - RNA, 19 nt, Human
ccucggccggacgcugagg

SEQ ID NO: 1007646 - RNA, 19 nt, Human
ccugaauucacugucuacu

SEQ ID NO: 1007647 - RNA, 21 nt, Human
cuagaaaacaaacaaaaaaaa

SEQ ID NO: 1007648 - RNA, 20 nt, Human
cuaucucuuccaagaaacca

SEQ ID NO: 1007649 - RNA, 19 nt, Human
cugaaccccuagugccccc

SEQ ID NO: 1007650 - RNA, 19 nt, Human
cugaaccccuagugccccc

SEQ ID NO: 1007651 - RNA, 22 nt, Human
gaaaacaaauuccucagagauu

SEQ ID NO: 1007652 - RNA, 22 nt, Human
gaacucauuccuaucucuucca

SEQ ID NO: 1007653 - RNA, 22 nt, Human
gaaggcacaaacuauaaaaggg

SEQ ID NO: 1007654 - RNA, 23 nt, Human
gcaaacaaaaagcaaagccucau

SEQ ID NO: 1007655 - RNA, 23 nt, Human
gcagguaucccuaaauccuaaaa

SEQ ID NO: 1007656 - RNA, 19 nt, Human
ggacacaagcauuagaugu

SEQ ID NO: 1007657 - RNA, 18 nt, Human
ggccggacgcugagggag

SEQ ID NO: 1007658 - RNA, 28 nt, Human
uaaaaugcuccuaagaauccauuuugag

SEQ ID NO: 1007659 - RNA, 20 nt, Human
uaauagaguauaaggacaca

SEQ ID NO: 1007660 - RNA, 19 nt, Human
uaauuaccauguuucuugg

SEQ ID NO: 1007661 - RNA, 19 nt, Human
uaauuuaguaauuaccaug

SEQ ID NO: 1007662 - RNA, 22 nt, Human
uacacaaaaaguuccuuugaaa

SEQ ID NO: 1007663 - RNA, 19 nt, Human
uacuuaaaagcaaacaaaa

SEQ ID NO: 1007664 - RNA, 22 nt, Human
uagaaaacaaacaaaaaaaaac

SEQ ID NO: 1007665 - RNA, 22 nt, Human
uagcaauacuuuguuuucuaau

SEQ ID NO: 1007666 - RNA, 21 nt, Human
uaguaauuaccauguuucuug

SEQ ID NO: 1007667 - RNA, 25 nt, Human
uaucaaagcaauauucaagcaugau

SEQ ID NO: 1007668 - RNA, 20 nt, Human
uaucucuuccaagaaaccaa

SEQ ID NO: 1007669 - RNA, 21 nt, Human
ucaaaacauucuuggugacug

SEQ ID NO: 1007670 - RNA, 21 nt, Human
ucaaagcaauauucaagcaug

SEQ ID NO: 1007671 - RNA, 22 nt, Human
ucagcugaaucaugaauaacac

SEQ ID NO: 1007672 - RNA, 20 nt, Human
uccucagagauuuuuaaagg

SEQ ID NO: 1007673 - RNA, 23 nt, Human
ugaaaaaaguauucaagaaaaua

SEQ ID NO: 1007674 - RNA, 25 nt, Human
ugaaccccuagugcccccaacccaa

SEQ ID NO: 1007675 - RNA, 18 nt, Human
ugaccaaaaaaagaacau

SEQ ID NO: 1007676 - RNA, 18 nt, Human
ugagcaccauaacuaagg

SEQ ID NO: 1007677 - RNA, 23 nt, Human
ugccaaacaaaaaucuacugaau

SEQ ID NO: 1007678 - RNA, 20 nt, Human
ugcucacagaaggcacaaac

SEQ ID NO: 1007679 - RNA, 23 nt, Human
uggaaauuuaaaacuugcaagaa

SEQ ID NO: 1007680 - RNA, 19 nt, Human
uggaaugacaaaacuaguu

SEQ ID NO: 1007681 - RNA, 18 nt, Human
uuaaaacuugcaagaaaa

SEQ ID NO: 1007682 - RNA, 21 nt, Human
uuaaaagcaaacaaaaagcaa

SEQ ID NO: 1007683 - RNA, 26 nt, Human
uucaagcaugauuucaaggaugcuuu

SEQ ID NO: 1007684 - RNA, 19 nt, Human
uucauaacacauagaaaua

SEQ ID NO: 1007685 - RNA, 24 nt, Human
uuugaauuuaaaaaaaaauagcug

SEQ ID NO: 1007686 - RNA, 24 nt, Human
uuugaguuuguuuaccaaacacau

SEQ ID NO: 1007687 - RNA, 18 nt, Human
uuugcuggccugcaacac

SEQ ID NO: 1007688 - RNA, 22 nt, Human
aaaagaaacauaaagaagaaac

SEQ ID NO: 1007689 - RNA, 23 nt, Human
aaaaguucuucucuuuaaagaga

SEQ ID NO: 1007690 - RNA, 22 nt, Human
aaaauccuccaagauggauucc

SEQ ID NO: 1007691 - RNA, 22 nt, Human
aacuccccaccucccccauucc

SEQ ID NO: 1007692 - RNA, 25 nt, Human
aagaaacaagacaggcugaaggaug

SEQ ID NO: 1007693 - RNA, 21 nt, Human
aagaagaaacaagacaggcug

SEQ ID NO: 1007694 - RNA, 18 nt, Human
aagaggcaaaaugaggau

SEQ ID NO: 1007695 - RNA, 18 nt, Human
aagcaaauguccccaagc

SEQ ID NO: 1007696 - RNA, 19 nt, Human
aagcacacuagcaaaaggg

SEQ ID NO: 1007697 - RNA, 21 nt, Human
aagcuuccuuuuggcuuaaag

SEQ ID NO: 1007698 - RNA, 22 nt, Human
aaggaaaaacaaaagcauauca

SEQ ID NO: 1007699 - RNA, 22 nt, Human
aaguaaaagguggagggacccc

SEQ ID NO: 1007700 - RNA, 18 nt, Human
aaguaacuuaccaaguac

SEQ ID NO: 1007701 - RNA, 22 nt, Human
aagucauacaaauggguuggca

SEQ ID NO: 1007702 - RNA, 22 nt, Human
aauccauagagcaagcuuccuu

SEQ ID NO: 1007703 - RNA, 24 nt, Human
acaaugggccacagacagugggcc

SEQ ID NO: 1007704 - RNA, 18 nt, Human
acauuuugaaauucacag

SEQ ID NO: 1007705 - RNA, 21 nt, Human
acccaaauguggauuccaagg

SEQ ID NO: 1007706 - RNA, 22 nt, Human
acuagugacugguugaccaucu

SEQ ID NO: 1007707 - RNA, 21 nt, Human
acugaaagaaaaauacagaga

SEQ ID NO: 1007708 - RNA, 20 nt, Human
acugagagauuuugugauga

SEQ ID NO: 1007709 - RNA, 24 nt, Human
acuuaaaauguaucaaacaucuaa

SEQ ID NO: 1007710 - RNA, 24 nt, Human
agacaaaacaguggaaacuacgga

SEQ ID NO: 1007711 - RNA, 23 nt, Human
agagaaagcauauucagggaggc

SEQ ID NO: 1007712 - RNA, 18 nt, Human
agagaccucugcgagaac

SEQ ID NO: 1007713 - RNA, 19 nt, Human
agaggaagaaagaauaagg

SEQ ID NO: 1007714 - RNA, 20 nt, Human
agaguucuuccaugccuuac

SEQ ID NO: 1007715 - RNA, 21 nt, Human
agcaagagcaaaucuguucac

SEQ ID NO: 1007716 - RNA, 20 nt, Human
agggaaaaugcuaaagacag

SEQ ID NO: 1007717 - RNA, 25 nt, Human
agggaggcugaauagucacagggug

SEQ ID NO: 1007718 - RNA, 19 nt, Human
augacacaguacccacaug

SEQ ID NO: 1007719 - RNA, 25 nt, Human
caacugaaagaaaaauacagagacc

SEQ ID NO: 1007720 - RNA, 19 nt, Human
caagacaggcugaaggaug

SEQ ID NO: 1007721 - RNA, 23 nt, Human
caccacaccuuggucuguaaauc

SEQ ID NO: 1007722 - RNA, 23 nt, Human
cacuauggcaacuaacaccaaag

SEQ ID NO: 1007723 - RNA, 22 nt, Human
cagaaagcggccucuuucccag

SEQ ID NO: 1007724 - RNA, 24 nt, Human
cagagaccuuggcaaaagacacca

SEQ ID NO: 1007725 - RNA, 22 nt, Human
cauagcucaucuuuucccacag

SEQ ID NO: 1007726 - RNA, 21 nt, Human
caucuuuaggccuuuuucacu

SEQ ID NO: 1007727 - RNA, 23 nt, Human
ccaggccaaaggaaaaaaaaauc

SEQ ID NO: 1007728 - RNA, 23 nt, Human
cccaaagacaacugaaagaaaaa

SEQ ID NO: 1007729 - RNA, 21 nt, Human
ccccagauaacauauuacagc

SEQ ID NO: 1007730 - RNA, 24 nt, Human
cccccagauaacauauuacagcuu

SEQ ID NO: 1007731 - RNA, 21 nt, Human
ccuugugguucaucugggucc

SEQ ID NO: 1007732 - RNA, 18 nt, Human
cuaauagcacucagcaau

SEQ ID NO: 1007733 - RNA, 18 nt, Human
cuagaagagacagggagc

SEQ ID NO: 1007734 - RNA, 24 nt, Human
cucaacacauuuacagagggcaga

SEQ ID NO: 1007735 - RNA, 21 nt, Human
cuccccaacuccccaccuccc

SEQ ID NO: 1007736 - RNA, 18 nt, Human
cucuuugaaauuguauug

SEQ ID NO: 1007737 - RNA, 19 nt, Human
cugaggauucaaacucugc

SEQ ID NO: 1007738 - RNA, 18 nt, Human
cuuugaggacugaaagau

SEQ ID NO: 1007739 - RNA, 21 nt, Human
gacacaguacccacauguuag

SEQ ID NO: 1007740 - RNA, 23 nt, Human
gcaagcuuccuuuuggcuuaaag

SEQ ID NO: 1007741 - RNA, 22 nt, Human
gcacaccaccucaugccaacca

SEQ ID NO: 1007742 - RNA, 22 nt, Human
ggaaaaacaaaagcauaucaag

SEQ ID NO: 1007743 - RNA, 18 nt, Human
ggaaaaugcuaaagacag

SEQ ID NO: 1007744 - RNA, 19 nt, Human
ggaauagagauggucccac

SEQ ID NO: 1007745 - RNA, 18 nt, Human
ggacugaaagauuuggca

SEQ ID NO: 1007746 - RNA, 24 nt, Human
ggacugaaagauuuggcauugagu

SEQ ID NO: 1007747 - RNA, 22 nt, Human
gggcagaaagcggccucuuucc

SEQ ID NO: 1007748 - RNA, 21 nt, Human
guagaggauuccucaagucua

SEQ ID NO: 1007749 - RNA, 18 nt, Human
gugcuuucuacaaguuuu

SEQ ID NO: 1007750 - RNA, 21 nt, Human
uaaaacaaaaauccuccaaga

SEQ ID NO: 1007751 - RNA, 19 nt, Human
uaaaacccaggccaaagga

SEQ ID NO: 1007752 - RNA, 24 nt, Human
uaaaccaguaagaauguagaagca

SEQ ID NO: 1007753 - RNA, 20 nt, Human
uaaagcaaauguccccaagc

SEQ ID NO: 1007754 - RNA, 20 nt, Human
uaaauucuaaaugcccuccu

SEQ ID NO: 1007755 - RNA, 23 nt, Human
uaaccaaccucuaaguagcugac

SEQ ID NO: 1007756 - RNA, 21 nt, Human
uaacuaaguucaaguguaagc

SEQ ID NO: 1007757 - RNA, 25 nt, Human
uaacuagaucaacacgugucuccua

SEQ ID NO: 1007758 - RNA, 22 nt, Human
uacccaugguaucacaaauuca

SEQ ID NO: 1007759 - RNA, 21 nt, Human
uacucaauagugaaugcagcu

SEQ ID NO: 1007760 - RNA, 24 nt, Human
uagaagaaauaaauaaguuaagca

SEQ ID NO: 1007761 - RNA, 18 nt, Human
uagcuauaucacucaaca

SEQ ID NO: 1007762 - RNA, 21 nt, Human
uauaacaacaauguuagauaa

SEQ ID NO: 1007763 - RNA, 21 nt, Human
uauguagauucacagaguaga

SEQ ID NO: 1007764 - RNA, 21 nt, Human
uauuuguguugugacaggcac

SEQ ID NO: 1007765 - RNA, 19 nt, Human
ucaagaguucuuccaugcc

SEQ ID NO: 1007766 - RNA, 23 nt, Human
ucaauucuuuuucaucucuuaca

SEQ ID NO: 1007767 - RNA, 21 nt, Human
ucacugauuauaaaugaaggc

SEQ ID NO: 1007768 - RNA, 22 nt, Human
ucacugauuauaaaugaaggcu

SEQ ID NO: 1007769 - RNA, 21 nt, Human
ucauacauuucuauagaaauc

SEQ ID NO: 1007770 - RNA, 18 nt, Human
ucaugcuguuuaucuauu

SEQ ID NO: 1007771 - RNA, 24 nt, Human
uccaaggagauaguagagcccucu

SEQ ID NO: 1007772 - RNA, 19 nt, Human
uccacaauaucacugccuc

SEQ ID NO: 1007773 - RNA, 23 nt, Human
uccacaauaucacugccuccuaa

SEQ ID NO: 1007774 - RNA, 22 nt, Human
uccccaagcuggccaucacucu

SEQ ID NO: 1007775 - RNA, 23 nt, Human
uccccaagcuggccaucacucug

SEQ ID NO: 1007776 - RNA, 20 nt, Human
uccccaccucccccauuccc

SEQ ID NO: 1007777 - RNA, 20 nt, Human
uccugugaccuuuacagagc

SEQ ID NO: 1007778 - RNA, 18 nt, Human
ucuguaggccaacauuuu

SEQ ID NO: 1007779 - RNA, 23 nt, Human
ugaaauucacagguaaauuugcc

SEQ ID NO: 1007780 - RNA, 19 nt, Human
ugacaaugggccacagaca

SEQ ID NO: 1007781 - RNA, 24 nt, Human
ugacaggcacauauuacaauagga

SEQ ID NO: 1007782 - RNA, 23 nt, Human
ugacaucacagaugccaguuggu

SEQ ID NO: 1007783 - RNA, 21 nt, Human
ugacuuaacauccccucccaa

SEQ ID NO: 1007784 - RNA, 24 nt, Human
ugagcaagagcaaaucuguucacc

SEQ ID NO: 1007785 - RNA, 19 nt, Human
ugaguaaaucucuuucaag

SEQ ID NO: 1007786 - RNA, 22 nt, Human
ugaucugcaauucuaccuccuc

SEQ ID NO: 1007787 - RNA, 21 nt, Human
ugccaaguacuccccaacucc

SEQ ID NO: 1007788 - RNA, 22 nt, Human
ugccaguugguagaaaacucug

SEQ ID NO: 1007789 - RNA, 26 nt, Human
uggacaaaauacauuuuugcuuguag

SEQ ID NO: 1007790 - RNA, 23 nt, Human
uggccaucacucugucucauggg

SEQ ID NO: 1007791 - RNA, 26 nt, Human
uggcuaaagcaucgauuuucaaauac

SEQ ID NO: 1007792 - RNA, 18 nt, Human
uggugaaucugugaagug

SEQ ID NO: 1007793 - RNA, 21 nt, Human
uuaacccaaauguggauucca

SEQ ID NO: 1007794 - RNA, 18 nt, Human
uucaauacaucugauagc

SEQ ID NO: 1007795 - RNA, 21 nt, Human
uucacagaguagaugaaacaa

SEQ ID NO: 1007796 - RNA, 22 nt, Human
uucucagcuccuucacgauucc

SEQ ID NO: 1007797 - RNA, 22 nt, Human
uugaauuacauguagcaaagac

SEQ ID NO: 1007798 - RNA, 21 nt, Human
uuggcaacccuguuucacguc

SEQ ID NO: 1007799 - RNA, 22 nt, Human
uuguauuguaacauacugugca

SEQ ID NO: 1007800 - RNA, 24 nt, Human
uuucucagcuccuucacgauuccu

SEQ ID NO: 1007801 - RNA, 23 nt, Human
aaacugaggccggcgaggaggga

SEQ ID NO: 1007802 - RNA, 21 nt, Human
agaagacccugaccgugcucc

SEQ ID NO: 1007803 - RNA, 21 nt, Human
agcccggaggugaccugggcu

SEQ ID NO: 1007804 - RNA, 18 nt, Human
agcuguggggaucuggag

SEQ ID NO: 1007805 - RNA, 22 nt, Human
caggggccuuugaagacagcgc

SEQ ID NO: 1007806 - RNA, 19 nt, Human
cccggaggugaccugggcu

SEQ ID NO: 1007807 - RNA, 24 nt, Human
cccggaggugaccugggcucuggg

SEQ ID NO: 1007808 - RNA, 18 nt, Human
ccugggcucugggagggg

SEQ ID NO: 1007809 - RNA, 18 nt, Human
cggcgcuggggcgcgugc

SEQ ID NO: 1007810 - RNA, 19 nt, Human
cggcgcuggggcgcgugcu

SEQ ID NO: 1007811 - RNA, 26 nt, Human
cggcggacccuggggauaggaggugc

SEQ ID NO: 1007812 - RNA, 21 nt, Human
cggggaggggagacaggggcc

SEQ ID NO: 1007813 - RNA, 22 nt, Human
cucggcggacccuggggauagg

SEQ ID NO: 1007814 - RNA, 21 nt, Human
gaagacagcgcgggacucgga

SEQ ID NO: 1007815 - RNA, 18 nt, Human
gccuuggagggggcugcg

SEQ ID NO: 1007816 - RNA, 20 nt, Human
gcgcucacacgcggcccggg

SEQ ID NO: 1007817 - RNA, 19 nt, Human
gggaggcugaguccgggga

SEQ ID NO: 1007818 - RNA, 18 nt, Human
gugaccugggcucuggga

SEQ ID NO: 1007819 - RNA, 18 nt, Human
guggcucucggcggaccc

SEQ ID NO: 1007820 - RNA, 22 nt, Human
ugacaguacaaaaucucuuuau

SEQ ID NO: 1007821 - RNA, 18 nt, Human
ugcuaagggcccgcgggg

SEQ ID NO: 1007822 - RNA, 29 nt, Human
uggccgagggguucccaaggcuccacucc

SEQ ID NO: 1007823 - RNA, 24 nt, Human
uucagcuguauuuucgaaccccug

SEQ ID NO: 1007824 - RNA, 25 nt, Human
uucagcuguauuuucgaaccccugu

SEQ ID NO: 1007825 - RNA, 22 nt, Human
uuuucuguaaaaaaucguggcu

SEQ ID NO: 1007826 - RNA, 24 nt, Human
cagguccugaagccuucucugugg

SEQ ID NO: 1007827 - RNA, 22 nt, Human
cugaagccuucucuguggacca

SEQ ID NO: 1007828 - RNA, 18 nt, Human
uaaaauaccagaugcuag

SEQ ID NO: 1007829 - RNA, 20 nt, Human
uaggaguccagacucaaccc

SEQ ID NO: 1007830 - RNA, 19 nt, Human
uccagacucaacccggaaa

SEQ ID NO: 1007831 - RNA, 19 nt, Human
ugcagcugaccaagcaggu

SEQ ID NO: 1007832 - RNA, 23 nt, Human
ugcccgaguucgguaggagucca

SEQ ID NO: 1007833 - RNA, 22 nt, Human
ugcucgcugcaaaauaaauaaa

SEQ ID NO: 1007834 - RNA, 18 nt, Human
aagcagccccuuacccau

SEQ ID NO: 1007835 - RNA, 21 nt, Human
aagcugacacauccaaagacc

SEQ ID NO: 1007836 - RNA, 19 nt, Human
aaggcaggcacugaagccg

SEQ ID NO: 1007837 - RNA, 20 nt, Human
aaucaggucaggcugaccca

SEQ ID NO: 1007838 - RNA, 18 nt, Human
agccugccacacuugcua

SEQ ID NO: 1007839 - RNA, 19 nt, Human
aggcaggcuaucagaaggg

SEQ ID NO: 1007840 - RNA, 19 nt, Human
caccacagccuugcuguag

SEQ ID NO: 1007841 - RNA, 24 nt, Human
cagacugucaggaacucucgccaa

SEQ ID NO: 1007842 - RNA, 21 nt, Human
caggcagaauuucuuccucag

SEQ ID NO: 1007843 - RNA, 18 nt, Human
ccaugccacucucccccu

SEQ ID NO: 1007844 - RNA, 18 nt, Human
ccccagaaguaagcagcc

SEQ ID NO: 1007845 - RNA, 25 nt, Human
ccccagaaguaagcagccccuuacc

SEQ ID NO: 1007846 - RNA, 18 nt, Human
ccuagcuaagcugacaca

SEQ ID NO: 1007847 - RNA, 19 nt, Human
ccucuaccuaguccccaaa

SEQ ID NO: 1007848 - RNA, 21 nt, Human
cuaaccucaaauccaccugca

SEQ ID NO: 1007849 - RNA, 19 nt, Human
cucuggaucagcccucacc

SEQ ID NO: 1007850 - RNA, 22 nt, Human
cucuguucuuuaggccuucuga

SEQ ID NO: 1007851 - RNA, 19 nt, Human
cugccuaaccucaaaucca

SEQ ID NO: 1007852 - RNA, 24 nt, Human
cugccugcccuuugcccgcagugg

SEQ ID NO: 1007853 - RNA, 21 nt, Human
gcacaagcaguaccugggcau

SEQ ID NO: 1007854 - RNA, 18 nt, Human
gccugggaauuuuaaaac

SEQ ID NO: 1007855 - RNA, 22 nt, Human
gcuaagcugacacauccaaaga

SEQ ID NO: 1007856 - RNA, 26 nt, Human
uaaaaccaaccuggacaauguuaguu

SEQ ID NO: 1007857 - RNA, 21 nt, Human
uaagcagccccuuacccauua

SEQ ID NO: 1007858 - RNA, 22 nt, Human
uagcuaagcugacacauccaaa

SEQ ID NO: 1007859 - RNA, 25 nt, Human
uagcuaagcugacacauccaaagac

SEQ ID NO: 1007860 - RNA, 24 nt, Human
uagugucugauugaauuacuggug

SEQ ID NO: 1007861 - RNA, 21 nt, Human
ucagcccucacccucuuccca

SEQ ID NO: 1007862 - RNA, 19 nt, Human
ucaucugccuaaccucaaa

SEQ ID NO: 1007863 - RNA, 20 nt, Human
uccaauaccccagaaguaag

SEQ ID NO: 1007864 - RNA, 22 nt, Human
uccccaugccacucucccccug

SEQ ID NO: 1007865 - RNA, 21 nt, Human
ucugccuaaccucaaauccac

SEQ ID NO: 1007866 - RNA, 22 nt, Human
ucugccuaaccucaaauccacc

SEQ ID NO: 1007867 - RNA, 20 nt, Human
ugauugaauuacuggugacu

SEQ ID NO: 1007868 - RNA, 18 nt, Human
ugccacacuugcuaaucc

SEQ ID NO: 1007869 - RNA, 18 nt, Human
ugccugggaauuuuaaaa

SEQ ID NO: 1007870 - RNA, 21 nt, Human
uggccuagcuaagcugacaca

SEQ ID NO: 1007871 - RNA, 18 nt, Human
ugucuaaacucugugagg

SEQ ID NO: 1007872 - RNA, 21 nt, Human
ugucugauugaauuacuggug

SEQ ID NO: 1007873 - RNA, 18 nt, Human
uucaguggcauuuaguac

SEQ ID NO: 1007874 - RNA, 20 nt, Human
uucuuuaggccuucugacua

SEQ ID NO: 1007875 - RNA, 23 nt, Human
uuguaggagcuggcuagucaugu

SEQ ID NO: 1007876 - RNA, 19 nt, Human
uuuccaauaccccagaagu

SEQ ID NO: 1007877 - RNA, 23 nt, Human
uuuuuaguugagguaaaauuuac

SEQ ID NO: 1007878 - RNA, 21 nt, Human
aaacgguucagcaagaauggc

SEQ ID NO: 1007879 - RNA, 19 nt, Human
aagcaggaggaggaugcgg

SEQ ID NO: 1007880 - RNA, 20 nt, Human
agaggcuuccagagcucaaa

SEQ ID NO: 1007881 - RNA, 20 nt, Human
aggaggaugcggaggagucc

SEQ ID NO: 1007882 - RNA, 20 nt, Human
caagagagguaucugugaau

SEQ ID NO: 1007883 - RNA, 19 nt, Human
caggcccagcggaggaagc

SEQ ID NO: 1007884 - RNA, 20 nt, Human
ccccgugcugggugaugaug

SEQ ID NO: 1007885 - RNA, 22 nt, Human
cccgugcugggugaugaugggg

SEQ ID NO: 1007886 - RNA, 21 nt, Human
ccuugaaagaugggcuaagga

SEQ ID NO: 1007887 - RNA, 21 nt, Human
cucauggcaauagaggcuucc

SEQ ID NO: 1007888 - RNA, 21 nt, Human
gaaaaagaucuuggaagugga

SEQ ID NO: 1007889 - RNA, 22 nt, Human
gcccugggguuucagggcacac

SEQ ID NO: 1007890 - RNA, 22 nt, Human
guagggcucaggaaccuggaaa

SEQ ID NO: 1007891 - RNA, 23 nt, Human
uaugugcacacaagcccuggggu

SEQ ID NO: 1007892 - RNA, 22 nt, Human
ucagggcacaccugagacacag

SEQ ID NO: 1007893 - RNA, 19 nt, Human
ucuaguauaugcuuagccc

SEQ ID NO: 1007894 - RNA, 19 nt, Human
ucucauggcaauagaggcu

SEQ ID NO: 1007895 - RNA, 24 nt, Human
ucucauggcaauagaggcuuccag

SEQ ID NO: 1007896 - RNA, 19 nt, Human
ugaggcagccauccaggcc

SEQ ID NO: 1007897 - RNA, 18 nt, Human
uggaaaaagaucuuggaa

SEQ ID NO: 1007898 - RNA, 20 nt, Human
ugggaggugggaucauggag

SEQ ID NO: 1007899 - RNA, 23 nt, Human
ugggaggugggaucauggagagg

SEQ ID NO: 1007900 - RNA, 23 nt, Human
uuggaaguggaaggacguaaggg

SEQ ID NO: 1007901 - RNA, 20 nt, Human
uugggaggugagaggugagg

SEQ ID NO: 1007902 - RNA, 19 nt, Human
agaggaggaugcugcugcc

SEQ ID NO: 1007903 - RNA, 19 nt, Human
aggaugcugcugcccaggg

SEQ ID NO: 1007904 - RNA, 21 nt, Human
caagcccuguuucaccuuccc

SEQ ID NO: 1007905 - RNA, 22 nt, Human
gaggaggaugcugcugcccagg

SEQ ID NO: 1007906 - RNA, 18 nt, Human
gaggaugcugcugcccag

SEQ ID NO: 1007907 - RNA, 21 nt, Human
gcagggccuggggcaaggcca

SEQ ID NO: 1007908 - RNA, 22 nt, Human
ugcugcccagggguggugcugg

SEQ ID NO: 1007909 - RNA, 23 nt, Human
ugcugcugcccagggguggugcu

SEQ ID NO: 1007910 - RNA, 20 nt, Human
uggggcaaggccagagagga

SEQ ID NO: 1007911 - RNA, 19 nt, Human
ugugacaaccaccgcugca

SEQ ID NO: 1007912 - RNA, 19 nt, Human
uuuagaacucaucagaaga

SEQ ID NO: 1007913 - RNA, 21 nt, Human
aaacagcacagccuccccagc

SEQ ID NO: 1007914 - RNA, 23 nt, Human
aagagaaagagaagagaaguggg

SEQ ID NO: 1007915 - RNA, 24 nt, Human
aagcccccagacugacgggggaaa

SEQ ID NO: 1007916 - RNA, 20 nt, Human
aaggaccaccccugcagggc

SEQ ID NO: 1007917 - RNA, 27 nt, Human
aaugaaaccagacacugggggcucaaa

SEQ ID NO: 1007918 - RNA, 21 nt, Human
acagcacagccuccccagcca

SEQ ID NO: 1007919 - RNA, 18 nt, Human
acuguaauggucauauag

SEQ ID NO: 1007920 - RNA, 21 nt, Human
agaacccuuaagucucugccc

SEQ ID NO: 1007921 - RNA, 24 nt, Human
agauguuagugguugaugauggcu

SEQ ID NO: 1007922 - RNA, 21 nt, Human
agggacugagaguucugcagc

SEQ ID NO: 1007923 - RNA, 18 nt, Human
agucaggucuccagggga

SEQ ID NO: 1007924 - RNA, 22 nt, Human
auucagaauauuuuuauuuaac

SEQ ID NO: 1007925 - RNA, 18 nt, Human
caaaagacaacccuguuc

SEQ ID NO: 1007926 - RNA, 21 nt, Human
caagcccaacccuuaagacca

SEQ ID NO: 1007927 - RNA, 23 nt, Human
cagauccagccacagggcuccca

SEQ ID NO: 1007928 - RNA, 23 nt, Human
cagcccuaacagggaaaggccau

SEQ ID NO: 1007929 - RNA, 19 nt, Human
caggagcacucagauccag

SEQ ID NO: 1007930 - RNA, 24 nt, Human
ccaaaggaccaccccugcagggcc

SEQ ID NO: 1007931 - RNA, 18 nt, Human
ccagacugacgggggaaa

SEQ ID NO: 1007932 - RNA, 22 nt, Human
ccagcacccagcaacuggcaag

SEQ ID NO: 1007933 - RNA, 22 nt, Human
ccagcuuuccaccaaaggacca

SEQ ID NO: 1007934 - RNA, 19 nt, Human
cccucagacuaaaaggcuc

SEQ ID NO: 1007935 - RNA, 18 nt, Human
ccggagcggagcgcgggg

SEQ ID NO: 1007936 - RNA, 19 nt, Human
ccggagcggagcgcggggg

SEQ ID NO: 1007937 - RNA, 18 nt, Human
ccuguggcaggaagaagg

SEQ ID NO: 1007938 - RNA, 19 nt, Human
ccuuaagucucugcccucc

SEQ ID NO: 1007939 - RNA, 19 nt, Human
ccuuccugcuaaaucaagg

SEQ ID NO: 1007940 - RNA, 23 nt, Human
cuaacacagguccagacauagag

SEQ ID NO: 1007941 - RNA, 21 nt, Human
cucucccuucuuucuuugccu

SEQ ID NO: 1007942 - RNA, 19 nt, Human
cugaguccagagccaugcc

SEQ ID NO: 1007943 - RNA, 27 nt, Human
cuuggcccauuccugccagggcccagc

SEQ ID NO: 1007944 - RNA, 22 nt, Human
cuugugaagcccccagacugac

SEQ ID NO: 1007945 - RNA, 19 nt, Human
gaacaaaugucucagcucc

SEQ ID NO: 1007946 - RNA, 24 nt, Human
gaaugaaaccagacacugggggcu

SEQ ID NO: 1007947 - RNA, 21 nt, Human
gagagugagauccaagagaac

SEQ ID NO: 1007948 - RNA, 24 nt, Human
gcauccaucaaccccgacuauucc

SEQ ID NO: 1007949 - RNA, 22 nt, Human
gccacagggcucccaggccccu

SEQ ID NO: 1007950 - RNA, 18 nt, Human
gcccuaacagggaaaggc

SEQ ID NO: 1007951 - RNA, 23 nt, Human
gcgcgagcguggagcugccggag

SEQ ID NO: 1007952 - RNA, 18 nt, Human
gcgggcgcgagcguggag

SEQ ID NO: 1007953 - RNA, 19 nt, Human
gcuccugaguugaccaaga

SEQ ID NO: 1007954 - RNA, 18 nt, Human
ggagcggagcgcgggggg

SEQ ID NO: 1007955 - RNA, 25 nt, Human
gggaauauaggagaaugccgguacc

SEQ ID NO: 1007956 - RNA, 18 nt, Human
gguaaugagauaggaaag

SEQ ID NO: 1007957 - RNA, 19 nt, Human
gguaaugagauaggaaaga

SEQ ID NO: 1007958 - RNA, 24 nt, Human
ggugcucucuagucuccccugcuu

SEQ ID NO: 1007959 - RNA, 24 nt, Human
guuccugugggaaccacagaccag

SEQ ID NO: 1007960 - RNA, 18 nt, Human
guuggaauuuagugaagg

SEQ ID NO: 1007961 - RNA, 23 nt, Human
uaaaaggcuccugaguugaccaa

SEQ ID NO: 1007962 - RNA, 24 nt, Human
uagaauuucuagggcugggaagca

SEQ ID NO: 1007963 - RNA, 25 nt, Human
uaggaaagaaccgccaucagcccua

SEQ ID NO: 1007964 - RNA, 18 nt, Human
uccagagccaugcccugg

SEQ ID NO: 1007965 - RNA, 19 nt, Human
uccagagccaugcccugga

SEQ ID NO: 1007966 - RNA, 18 nt, Human
uccaucaaccccgacuau

SEQ ID NO: 1007967 - RNA, 23 nt, Human
ucccaagcccaacccuuaagacc

SEQ ID NO: 1007968 - RNA, 23 nt, Human
ucccucagacuaaaaggcuccug

SEQ ID NO: 1007969 - RNA, 21 nt, Human
uccugccagggcccagcaccc

SEQ ID NO: 1007970 - RNA, 18 nt, Human
ucugcagcugaagccagc

SEQ ID NO: 1007971 - RNA, 26 nt, Human
ucugcagcugaagccagcucaggagc

SEQ ID NO: 1007972 - RNA, 21 nt, Human
ugaaauaacaagucugagaug

SEQ ID NO: 1007973 - RNA, 25 nt, Human
ugaaauaacaagucugagaugaaug

SEQ ID NO: 1007974 - RNA, 18 nt, Human
ugaccagccagaauggau

SEQ ID NO: 1007975 - RNA, 18 nt, Human
ugacccugccuauuccca

SEQ ID NO: 1007976 - RNA, 18 nt, Human
ugagaugaaugaaaccag

SEQ ID NO: 1007977 - RNA, 23 nt, Human
ugaguugaccaagagaaagagaa

SEQ ID NO: 1007978 - RNA, 20 nt, Human
ugcaucugacucuacaauuu

SEQ ID NO: 1007979 - RNA, 18 nt, Human
ugccagggcccagcaccc

SEQ ID NO: 1007980 - RNA, 25 nt, Human
uggaugugaucuguagacaacugua

SEQ ID NO: 1007981 - RNA, 19 nt, Human
uggcaggaagaaggccagc

SEQ ID NO: 1007982 - RNA, 18 nt, Human
uggcccauuccugccagg

SEQ ID NO: 1007983 - RNA, 21 nt, Human
uggcuuggcccauuccugcca

SEQ ID NO: 1007984 - RNA, 24 nt, Human
uggcuuggcccauuccugccaggg

SEQ ID NO: 1007985 - RNA, 20 nt, Human
ugucucagcuccccaguuuu

SEQ ID NO: 1007986 - RNA, 22 nt, Human
uucuauuacucucccuucuuuc

SEQ ID NO: 1007987 - RNA, 19 nt, Human
uuggcccauuccugccagg

SEQ ID NO: 1007988 - RNA, 26 nt, Human
aaacauaagaagccugaagcugagcu

SEQ ID NO: 1007989 - RNA, 21 nt, Human
aaccaagccaccagcaugauc

SEQ ID NO: 1007990 - RNA, 25 nt, Human
aaccaagccaccagcaugaucaaca

SEQ ID NO: 1007991 - RNA, 21 nt, Human
aaccucauucuccucccucug

SEQ ID NO: 1007992 - RNA, 24 nt, Human
aaccucauucuccucccucugcac

SEQ ID NO: 1007993 - RNA, 21 nt, Human
aagaagccugaagcugagcug

SEQ ID NO: 1007994 - RNA, 24 nt, Human
aagccaccagcaugaucaacaucc

SEQ ID NO: 1007995 - RNA, 18 nt, Human
aaguggcuccagccccag

SEQ ID NO: 1007996 - RNA, 25 nt, Human
aaguguugggauuguaggcugagcc

SEQ ID NO: 1007997 - RNA, 21 nt, Human
acaaccacccagauacaucac

SEQ ID NO: 1007998 - RNA, 18 nt, Human
acagacugugagagagug

SEQ ID NO: 1007999 - RNA, 18 nt, Human
agaggccaugccgugagg

SEQ ID NO: 1008000 - RNA, 24 nt, Human
agauacaucacucccaaauccccg

SEQ ID NO: 1008001 - RNA, 19 nt, Human
aggcagaggccaugccgug

SEQ ID NO: 1008002 - RNA, 22 nt, Human
aggcuguggcggaagugaucac

SEQ ID NO: 1008003 - RNA, 22 nt, Human
aggugcugaggugggaggagcu

SEQ ID NO: 1008004 - RNA, 18 nt, Human
augcagcaggugcugagg

SEQ ID NO: 1008005 - RNA, 18 nt, Human
caaaguguugggauugua

SEQ ID NO: 1008006 - RNA, 22 nt, Human
caaccacccagauacaucacuc

SEQ ID NO: 1008007 - RNA, 22 nt, Human
cacagaaccucauucuccuccc

SEQ ID NO: 1008008 - RNA, 23 nt, Human
cagccccaguugagccuuccuca

SEQ ID NO: 1008009 - RNA, 22 nt, Human
cagcuacagucacaguaaccaa

SEQ ID NO: 1008010 - RNA, 19 nt, Human
caggcaccagagcagucug

SEQ ID NO: 1008011 - RNA, 20 nt, Human
caggggccucuuuguugccc

SEQ ID NO: 1008012 - RNA, 19 nt, Human
caguaaccaagccaccagc

SEQ ID NO: 1008013 - RNA, 23 nt, Human
cauccugaggcuugggcugcucc

SEQ ID NO: 1008014 - RNA, 18 nt, Human
ccaaaguguugggauugu

SEQ ID NO: 1008015 - RNA, 23 nt, Human
ccaaaguguugggauuguaggcu

SEQ ID NO: 1008016 - RNA, 23 nt, Human
ccaaauccccgacugacacagac

SEQ ID NO: 1008017 - RNA, 19 nt, Human
ccccuuccucagccuccca

SEQ ID NO: 1008018 - RNA, 19 nt, Human
cccuucaaaacacagaacc

SEQ ID NO: 1008019 - RNA, 22 nt, Human
ccucagccucccaaaguguugg

SEQ ID NO: 1008020 - RNA, 23 nt, Human
ccugaggcuugggcugcuccaga

SEQ ID NO: 1008021 - RNA, 20 nt, Human
ccugguucaagugaugcccc

SEQ ID NO: 1008022 - RNA, 19 nt, Human
ccuugguucaccugcucug

SEQ ID NO: 1008023 - RNA, 21 nt, Human
cugacacagacugugagagag

SEQ ID NO: 1008024 - RNA, 20 nt, Human
cugugccacuccagcuacag

SEQ ID NO: 1008025 - RNA, 23 nt, Human
cuguucauuuuuguaucccuaau

SEQ ID NO: 1008026 - RNA, 24 nt, Human
gagacucugggccacaaccaccca

SEQ ID NO: 1008027 - RNA, 24 nt, Human
gagagacucugggccacaaccacc

SEQ ID NO: 1008028 - RNA, 21 nt, Human
gagcagguuucagugagguuu

SEQ ID NO: 1008029 - RNA, 18 nt, Human
gaggaugcucaagcagcu

SEQ ID NO: 1008030 - RNA, 21 nt, Human
gaugccccuuccucagccucc

SEQ ID NO: 1008031 - RNA, 20 nt, Human
gauuguaggcugagccacca

SEQ ID NO: 1008032 - RNA, 19 nt, Human
gcacgugggcugggccugg

SEQ ID NO: 1008033 - RNA, 24 nt, Human
ggccacaaccacccagauacauca

SEQ ID NO: 1008034 - RNA, 19 nt, Human
gggccucuuuguugcccag

SEQ ID NO: 1008035 - RNA, 21 nt, Human
ggguggcucauagaagcacug

SEQ ID NO: 1008036 - RNA, 22 nt, Human
gugcugaggugggaggagcuag

SEQ ID NO: 1008037 - RNA, 22 nt, Human
guugagccuuccucagacgaag

SEQ ID NO: 1008038 - RNA, 20 nt, Human
uauuuuuucauuuuuuuucu

SEQ ID NO: 1008039 - RNA, 19 nt, Human
ucaaaacacagaaccucau

SEQ ID NO: 1008040 - RNA, 22 nt, Human
ucaagcagcuucguguaggggc

SEQ ID NO: 1008041 - RNA, 22 nt, Human
uccaagcuguuuucagaaacau

SEQ ID NO: 1008042 - RNA, 24 nt, Human
ucccaaaguguugggauuguaggc

SEQ ID NO: 1008043 - RNA, 18 nt, Human
ucccuaaugugacaguuu

SEQ ID NO: 1008044 - RNA, 25 nt, Human
ucccucugcacgugggcugggccug

SEQ ID NO: 1008045 - RNA, 23 nt, Human
uccuagacuugcaacauucugga

SEQ ID NO: 1008046 - RNA, 24 nt, Human
ucugauauucuucccuucaaaaca

SEQ ID NO: 1008047 - RNA, 20 nt, Human
ucugcacgugggcugggccc

SEQ ID NO: 1008048 - RNA, 23 nt, Human
ucugcacgugggcugggccuggg

SEQ ID NO: 1008049 - RNA, 24 nt, Human
ucugcacgugggcugggccugggg

SEQ ID NO: 1008050 - RNA, 18 nt, Human
ucuuguccauccugaggc

SEQ ID NO: 1008051 - RNA, 20 nt, Human
ugaacacacugcagauacua

SEQ ID NO: 1008052 - RNA, 18 nt, Human
ugaggaugcucaagcagc

SEQ ID NO: 1008053 - RNA, 21 nt, Human
ugaggaugcucaagcagcuuc

SEQ ID NO: 1008054 - RNA, 21 nt, Human
ugagggcacuggcuuggaagu

SEQ ID NO: 1008055 - RNA, 23 nt, Human
ugaugucuuaacugcaaccucau

SEQ ID NO: 1008056 - RNA, 21 nt, Human
ugcagcaggugcugagguggg

SEQ ID NO: 1008057 - RNA, 24 nt, Human
ugcccagguuaguacugaacuccu

SEQ ID NO: 1008058 - RNA, 18 nt, Human
ugccccuuccucagccuc

SEQ ID NO: 1008059 - RNA, 26 nt, Human
ugcuccagaugcagcaggugcugguc

SEQ ID NO: 1008060 - RNA, 20 nt, Human
uggaaguggcuccagcccca

SEQ ID NO: 1008061 - RNA, 24 nt, Human
uggaaguggcuccagccccgaccc

SEQ ID NO: 1008062 - RNA, 20 nt, Human
ugggauuguaggcugagcca

SEQ ID NO: 1008063 - RNA, 23 nt, Human
ugggauuguaggcugagccacca

SEQ ID NO: 1008064 - RNA, 21 nt, Human
ugggcugcuccagaugcagca

SEQ ID NO: 1008065 - RNA, 21 nt, Human
ugggcugggccuggggggcuu

SEQ ID NO: 1008066 - RNA, 22 nt, Human
uguaucccuaaugugacaguuu

SEQ ID NO: 1008067 - RNA, 21 nt, Human
ugucagccauuggaacacucu

SEQ ID NO: 1008068 - RNA, 18 nt, Human
uguugcccagguuaguac

SEQ ID NO: 1008069 - RNA, 23 nt, Human
uucaagugaugccccuuccucag

SEQ ID NO: 1008070 - RNA, 20 nt, Human
uuccucagccucccaaagug

SEQ ID NO: 1008071 - RNA, 23 nt, Human
uuccucagccucccaaaguguug

SEQ ID NO: 1008072 - RNA, 24 nt, Human
uugggauuguaggcugagccacca

SEQ ID NO: 1008073 - RNA, 24 nt, Human
uuucuuuuuaucagagacaggggc

SEQ ID NO: 1008074 - RNA, 24 nt, Human
uuuguugcccagguuaguacugaa

SEQ ID NO: 1008075 - RNA, 23 nt, Human
uuuuucuuuuuaucagagacagg

SEQ ID NO: 1008076 - RNA, 27 nt, Human
uuuuuuuucuuuuuaucagagacaggg

SEQ ID NO: 1008077 - RNA, 25 nt, Human
uuuuuuuuuuuuuuuuuuucuuuuu

SEQ ID NO: 1008078 - RNA, 22 nt, Human
aaacaaaugguacauccaaaac

SEQ ID NO: 1008079 - RNA, 25 nt, Human
aaauaagaaacaaaugguacaucca

SEQ ID NO: 1008080 - RNA, 20 nt, Human
aagccaaacccaugagguca

SEQ ID NO: 1008081 - RNA, 26 nt, Human
agaaacaaaugguacauccaaaacca

SEQ ID NO: 1008082 - RNA, 22 nt, Human
agacuggggugaauuaagucca

SEQ ID NO: 1008083 - RNA, 24 nt, Human
cagcaacagcggcaccuaacccag

SEQ ID NO: 1008084 - RNA, 18 nt, Human
cagcggcaccuaacccag

SEQ ID NO: 1008085 - RNA, 26 nt, Human
caggaucaagaaggacuuguaagggu

SEQ ID NO: 1008086 - RNA, 24 nt, Human
cuaagccaaacccaugagguucau

SEQ ID NO: 1008087 - RNA, 21 nt, Human
guacauccaaaaccauaagga

SEQ ID NO: 1008088 - RNA, 25 nt, Human
ucaugugaacuuacaguuacacaaa

SEQ ID NO: 1008089 - RNA, 24 nt, Human
ugaugcccagaugaugaagacugg

SEQ ID NO: 1008090 - RNA, 21 nt, Human
uuacaguuacacaaauaagaa

SEQ ID NO: 1008091 - RNA, 22 nt, Human
aaaaacacugaaagaaaaaggc

SEQ ID NO: 1008092 - RNA, 24 nt, Human
aaaccaaacucaaacaacagcagc

SEQ ID NO: 1008093 - RNA, 22 nt, Human
accaaacucaaacaacagcagc

SEQ ID NO: 1008094 - RNA, 24 nt, Human
accaaacucaaacaacagcagcca

SEQ ID NO: 1008095 - RNA, 19 nt, Human
agaaaaacacugaaagaaa

SEQ ID NO: 1008096 - RNA, 18 nt, Human
aguguggaagaauggagc

SEQ ID NO: 1008097 - RNA, 19 nt, Human
cacugaaagaaaaaggcag

SEQ ID NO: 1008098 - RNA, 19 nt, Human
cacuuuuuccuccucuuuu

SEQ ID NO: 1008099 - RNA, 19 nt, Human
ccaaacucaaacaacagcc

SEQ ID NO: 1008100 - RNA, 19 nt, Human
ccacuuuuuccuccucuuu

SEQ ID NO: 1008101 - RNA, 19 nt, Human
ccuggauucagucccagaa

SEQ ID NO: 1008102 - RNA, 24 nt, Human
cuggauucagucccagaaauguua

SEQ ID NO: 1008103 - RNA, 20 nt, Human
cuuuuuccuccucuuuuucu

SEQ ID NO: 1008104 - RNA, 20 nt, Human
cuuuuucuucuucuuuuucu

SEQ ID NO: 1008105 - RNA, 22 nt, Human
gaaaaaggcaggaaauguagua

SEQ ID NO: 1008106 - RNA, 19 nt, Human
gaaagaaaaaggcaggaaa

SEQ ID NO: 1008107 - RNA, 20 nt, Human
gcacuagagccccuccaguu

SEQ ID NO: 1008108 - RNA, 21 nt, Human
gcacuagagccccuccaguua

SEQ ID NO: 1008109 - RNA, 18 nt, Human
uagaaaaacacugaaaga

SEQ ID NO: 1008110 - RNA, 20 nt, Human
uagaaaaacacugaaagaaa

SEQ ID NO: 1008111 - RNA, 22 nt, Human
ucaguuuugcuccaaaccaaac

SEQ ID NO: 1008112 - RNA, 18 nt, Human
uccacuuuuuccuccucu

SEQ ID NO: 1008113 - RNA, 21 nt, Human
uccacuuuuuccuccucuuuu

SEQ ID NO: 1008114 - RNA, 22 nt, Human
ucccagaaauguuaggacuacc

SEQ ID NO: 1008115 - RNA, 28 nt, Human
ucuuuuucuucuucuuuuucuucuuuuc

SEQ ID NO: 1008116 - RNA, 19 nt, Human
ucuuuuucuucuuucucuu

SEQ ID NO: 1008117 - RNA, 24 nt, Human
ugaaagaaaaaggcaggaaaugua

SEQ ID NO: 1008118 - RNA, 21 nt, Human
ugcagaggaaacuggcugagu

SEQ ID NO: 1008119 - RNA, 27 nt, Human
uguaauccacuuuuuccuccucuuuuu

SEQ ID NO: 1008120 - RNA, 19 nt, Human
uguggaagaauggagcugg

SEQ ID NO: 1008121 - RNA, 18 nt, Human
uuccuccucuuuuucuuc

SEQ ID NO: 1008122 - RNA, 24 nt, Human
uuugcuccaaaccaaacucaaaca

SEQ ID NO: 1008123 - RNA, 19 nt, Human
uuuuccuccucuuuuucuu

SEQ ID NO: 1008124 - RNA, 27 nt, Human
uuuuuccuccucuuuuucuucuucuuu

SEQ ID NO: 1008125 - RNA, 22 nt, Human
aaaacacaugggguggggauca

SEQ ID NO: 1008126 - RNA, 19 nt, Human
aaacagaacaaaaaaauau

SEQ ID NO: 1008127 - RNA, 23 nt, Human
aaauauauauauauauaauuuuu

SEQ ID NO: 1008128 - RNA, 23 nt, Human
aaugcagcaaauccuucugaaca

SEQ ID NO: 1008129 - RNA, 23 nt, Human
acacauggucacgaaggacaugc

SEQ ID NO: 1008130 - RNA, 21 nt, Human
acagcaaaaggcccaucagca

SEQ ID NO: 1008131 - RNA, 23 nt, Human
acagcaaaaggcccaucagcaag

SEQ ID NO: 1008132 - RNA, 19 nt, Human
acaucaaagucgaggacac

SEQ ID NO: 1008133 - RNA, 21 nt, Human
acggcauggaaaggggagaga

SEQ ID NO: 1008134 - RNA, 21 nt, Human
agaaucugaggagcacacugu

SEQ ID NO: 1008135 - RNA, 18 nt, Human
agacaggucccugcaaag

SEQ ID NO: 1008136 - RNA, 19 nt, Human
aggacagcaaaaggcccau

SEQ ID NO: 1008137 - RNA, 20 nt, Human
aggagaugugcauagaugag

SEQ ID NO: 1008138 - RNA, 21 nt, Human
aggugaggaaacaggcggcgg

SEQ ID NO: 1008139 - RNA, 22 nt, Human
auccugcccuucuucuccuuca

SEQ ID NO: 1008140 - RNA, 22 nt, Human
augcaaacagaacaaaaaaaua

SEQ ID NO: 1008141 - RNA, 22 nt, Human
auuaagaaaugcaaacagaaca

SEQ ID NO: 1008142 - RNA, 21 nt, Human
caacacagacgccaaucuugu

SEQ ID NO: 1008143 - RNA, 21 nt, Human
caagcacaaauuaagaaaugc

SEQ ID NO: 1008144 - RNA, 21 nt, Human
caaugguaaaaaaaaccccac

SEQ ID NO: 1008145 - RNA, 19 nt, Human
cacagugcggugagucucu

SEQ ID NO: 1008146 - RNA, 21 nt, Human
cacgaaggacaugcacagcca

SEQ ID NO: 1008147 - RNA, 19 nt, Human
cccgcaggagcccgccagg

SEQ ID NO: 1008148 - RNA, 18 nt, Human
ccuuuuuaaaacacaugg

SEQ ID NO: 1008149 - RNA, 20 nt, Human
cgcuggggaagauggggcag

SEQ ID NO: 1008150 - RNA, 20 nt, Human
cgcuggggaagauggggcag

SEQ ID NO: 1008151 - RNA, 24 nt, Human
cggagccccucaucuaaacgcucc

SEQ ID NO: 1008152 - RNA, 28 nt, Human
cggcauggaaaggggagagaaggugagg

SEQ ID NO: 1008153 - RNA, 22 nt, Human
cuccccagguccaacaauggua

SEQ ID NO: 1008154 - RNA, 21 nt, Human
cuccccccuccccagguccaa

SEQ ID NO: 1008155 - RNA, 23 nt, Human
cuccccccuccccagguccaaca

SEQ ID NO: 1008156 - RNA, 18 nt, Human
cugcaaaggcuacugccu

SEQ ID NO: 1008157 - RNA, 21 nt, Human
cuggggaagauggggcagcug

SEQ ID NO: 1008158 - RNA, 19 nt, Human
gacagacaggucccugcaa

SEQ ID NO: 1008159 - RNA, 19 nt, Human
gacaucaaagucgaggaca

SEQ ID NO: 1008160 - RNA, 26 nt, Human
gagugcucuuuauuugaaaccuccac

SEQ ID NO: 1008161 - RNA, 19 nt, Human
gcuggggaagauggggcag

SEQ ID NO: 1008162 - RNA, 21 nt, Human
ggacagacaggucccugcaaa

SEQ ID NO: 1008163 - RNA, 22 nt, Human
ggagccccucaucuaaacgcuc

SEQ ID NO: 1008164 - RNA, 18 nt, Human
ggcauggaaaggggagag

SEQ ID NO: 1008165 - RNA, 27 nt, Human
ggugaggaaacaggcggcggggagaga

SEQ ID NO: 1008166 - RNA, 22 nt, Human
guuuuugacaauuucuuucugg

SEQ ID NO: 1008167 - RNA, 20 nt, Human
uagcugugcacaucaacaca

SEQ ID NO: 1008168 - RNA, 23 nt, Human
uauauaauuuuuuccccuaucca

SEQ ID NO: 1008169 - RNA, 24 nt, Human
uauuugaaaccuccacaacacaga

SEQ ID NO: 1008170 - RNA, 21 nt, Human
ucccugcaaaggcuacugccu

SEQ ID NO: 1008171 - RNA, 21 nt, Human
ucccugcaaaggcuacugccu

SEQ ID NO: 1008172 - RNA, 21 nt, Human
uccuucugaacacagaaucug

SEQ ID NO: 1008173 - RNA, 20 nt, Human
ucucugcaaagcgaaggaac

SEQ ID NO: 1008174 - RNA, 22 nt, Human
ucucugcaaagcgaaggaacuu

SEQ ID NO: 1008175 - RNA, 18 nt, Human
ugaaaccuccacaacaca

SEQ ID NO: 1008176 - RNA, 19 nt, Human
ugaaaccuccacaacacag

SEQ ID NO: 1008177 - RNA, 21 nt, Human
ugacaucaaagucgaggacac

SEQ ID NO: 1008178 - RNA, 19 nt, Human
ugaggaaacaggcggcggg

SEQ ID NO: 1008179 - RNA, 21 nt, Human
ugcaaacagaacaaaaaaaua

SEQ ID NO: 1008180 - RNA, 23 nt, Human
ugccguaggaucugguuuaacac

SEQ ID NO: 1008181 - RNA, 25 nt, Human
ugccuuuuuaaaacacauggggugg

SEQ ID NO: 1008182 - RNA, 24 nt, Human
uguagucuaccaggacagcaaaag

SEQ ID NO: 1008183 - RNA, 23 nt, Human
uuaacuccccccuccccaggucc

SEQ ID NO: 1008184 - RNA, 25 nt, Human
uuauugguuuuugacaauuucuuuc

SEQ ID NO: 1008185 - RNA, 22 nt, Human
uuugacaauuucuuucugguuc

SEQ ID NO: 1008186 - RNA, 24 nt, Human
aagcgucuacaaugugccaggccc

SEQ ID NO: 1008187 - RNA, 22 nt, Human
agacagggcugcccacagcagc

SEQ ID NO: 1008188 - RNA, 23 nt, Human
agcacagccccacacgggugccc

SEQ ID NO: 1008189 - RNA, 19 nt, Human
aggggccagugacagagag

SEQ ID NO: 1008190 - RNA, 21 nt, Human
agugacagagagcagcuauac

SEQ ID NO: 1008191 - RNA, 18 nt, Human
caaagugcuguggggcac

SEQ ID NO: 1008192 - RNA, 18 nt, Human
caggacaacuuccccacc

SEQ ID NO: 1008193 - RNA, 18 nt, Human
cagggcugcccacagcag

SEQ ID NO: 1008194 - RNA, 18 nt, Human
ccacuggaggcccuuggg

SEQ ID NO: 1008195 - RNA, 22 nt, Human
ccaggcccuggggacacagagc

SEQ ID NO: 1008196 - RNA, 22 nt, Human
ccaggggccagugacagagagc

SEQ ID NO: 1008197 - RNA, 18 nt, Human
cccgccugggccugcagu

SEQ ID NO: 1008198 - RNA, 21 nt, Human
cgggagcaaggccuacuucug

SEQ ID NO: 1008199 - RNA, 20 nt, Human
cuccuacaccugaacugggu

SEQ ID NO: 1008200 - RNA, 21 nt, Human
cuccuacaccugaacuggguu

SEQ ID NO: 1008201 - RNA, 22 nt, Human
gcaccagagcacagccccacac

SEQ ID NO: 1008202 - RNA, 21 nt, Human
gcagagguauaacaaagugcu

SEQ ID NO: 1008203 - RNA, 23 nt, Human
gcuauacagagggcccaccccgc

SEQ ID NO: 1008204 - RNA, 18 nt, Human
gggcacucacaucuugaa

SEQ ID NO: 1008205 - RNA, 19 nt, Human
uaacaucucugagcugguc

SEQ ID NO: 1008206 - RNA, 22 nt, Human
uacuucugcuuccucaggacaa

SEQ ID NO: 1008207 - RNA, 21 nt, Human
ucccugcccucaaggagcuca

SEQ ID NO: 1008208 - RNA, 20 nt, Human
uccucaggacaacuucccca

SEQ ID NO: 1008209 - RNA, 22 nt, Human
uccucaggacaacuuccccacc

SEQ ID NO: 1008210 - RNA, 22 nt, Human
uccugggcaggggucagggaag

SEQ ID NO: 1008211 - RNA, 22 nt, Human
ucugcucgucuucucaugucga

SEQ ID NO: 1008212 - RNA, 18 nt, Human
ugaaguguguggcagagg

SEQ ID NO: 1008213 - RNA, 19 nt, Human
ugaaugcugguccacugga

SEQ ID NO: 1008214 - RNA, 22 nt, Human
ugacagagagcagcuauacaga

SEQ ID NO: 1008215 - RNA, 21 nt, Human
ugagacagaacaaacugcugc

SEQ ID NO: 1008216 - RNA, 19 nt, Human
ugccccaucagacagggcu

SEQ ID NO: 1008217 - RNA, 20 nt, Human
uggaggcccuuggguugggc

SEQ ID NO: 1008218 - RNA, 21 nt, Human
ugguaacaucucugagcuggu

SEQ ID NO: 1008219 - RNA, 25 nt, Human
uuccucaggacaacuuccccaccuc

SEQ ID NO: 1008220 - RNA, 22 nt, Human
uuuuuuuuuuuuuuuuucauuu

SEQ ID NO: 1008221 - RNA, 18 nt, Human
aggagggugguggggacg

SEQ ID NO: 1008222 - RNA, 18 nt, Human
aggcaggaggaggguggu

SEQ ID NO: 1008223 - RNA, 22 nt, Human
aggcaggaggaggguggugggg

SEQ ID NO: 1008224 - RNA, 20 nt, Human
aucuuuguauucaacagucc

SEQ ID NO: 1008225 - RNA, 18 nt, Human
cgggauggcucacugggc

SEQ ID NO: 1008226 - RNA, 20 nt, Human
gagggugguggggacgggau

SEQ ID NO: 1008227 - RNA, 22 nt, Human
ggaggagggugguggggacggg

SEQ ID NO: 1008228 - RNA, 20 nt, Human
gggucaggaggcaggaggag

SEQ ID NO: 1008229 - RNA, 18 nt, Human
gguggggacgggauggcu

SEQ ID NO: 1008230 - RNA, 24 nt, Human
ugcgggccuggccgggcggcgcgc

SEQ ID NO: 1008231 - RNA, 18 nt, Human
ugggucaggaggcaggag

SEQ ID NO: 1008232 - RNA, 25 nt, Human
ugggucaggaggcaggaggagggug

SEQ ID NO: 1008233 - RNA, 19 nt, Human
uuuuuuuuuuuuuuucuaa

SEQ ID NO: 1008234 - RNA, 19 nt, Human
uuuuuuuuuuuuuuuuucu

SEQ ID NO: 1008235 - RNA, 22 nt, Human
aaauuuacaaguguuguugcug

SEQ ID NO: 1008236 - RNA, 19 nt, Human
aaguguuguugcuggugca

SEQ ID NO: 1008237 - RNA, 22 nt, Human
agggacgcagcauuagagaaga

SEQ ID NO: 1008238 - RNA, 23 nt, Human
auggauuaaaaaauuucuuuuuu

SEQ ID NO: 1008239 - RNA, 23 nt, Human
auggcaauaaaguuacaaucacc

SEQ ID NO: 1008240 - RNA, 23 nt, Human
caagcaacagucuguuucaacca

SEQ ID NO: 1008241 - RNA, 21 nt, Human
cacacacagcgcacacagggu

SEQ ID NO: 1008242 - RNA, 22 nt, Human
cacgaaccccaaggcaucuccu

SEQ ID NO: 1008243 - RNA, 18 nt, Human
cagacagcagaauuaaac

SEQ ID NO: 1008244 - RNA, 24 nt, Human
cagcagaauuaaacagagcagacu

SEQ ID NO: 1008245 - RNA, 20 nt, Human
cagcauuauuucagaaauau

SEQ ID NO: 1008246 - RNA, 21 nt, Human
cauacacacucgcaucggccg

SEQ ID NO: 1008247 - RNA, 30 nt, Human
cauuuuuaucauuuaucaaaaacuaaaggg

SEQ ID NO: 1008248 - RNA, 21 nt, Human
ccccgccgccgccaucuucuc

SEQ ID NO: 1008249 - RNA, 23 nt, Human
cccgccgccgccaucuucucgcc

SEQ ID NO: 1008250 - RNA, 21 nt, Human
ccgccgccaucuucucgcccg

SEQ ID NO: 1008251 - RNA, 20 nt, Human
ccgccgccgccaucuucucg

SEQ ID NO: 1008252 - RNA, 22 nt, Human
ccgccgccgccaucuucucgcc

SEQ ID NO: 1008253 - RNA, 20 nt, Human
cgaaccccaaggcaucuccu

SEQ ID NO: 1008254 - RNA, 18 nt, Human
cgcacauacacacucgca

SEQ ID NO: 1008255 - RNA, 23 nt, Human
cuagcccauuuuugcaaagggag

SEQ ID NO: 1008256 - RNA, 24 nt, Human
cucuaaagagccacuaaagagagg

SEQ ID NO: 1008257 - RNA, 19 nt, Human
cugaaggagagaucuucau

SEQ ID NO: 1008258 - RNA, 21 nt, Human
cuucccccgccgccgccaucu

SEQ ID NO: 1008259 - RNA, 23 nt, Human
gcagacagcagaauuaaacagag

SEQ ID NO: 1008260 - RNA, 19 nt, Human
gcgacaacuuuauacuccu

SEQ ID NO: 1008261 - RNA, 20 nt, Human
ggcaauaaaguuacaaucac

SEQ ID NO: 1008262 - RNA, 23 nt, Human
gugguguccuacgaagcgggcac

SEQ ID NO: 1008263 - RNA, 23 nt, Human
guuucaaccaaaugauuuugauu

SEQ ID NO: 1008264 - RNA, 19 nt, Human
uaaacagagcagacugaag

SEQ ID NO: 1008265 - RNA, 23 nt, Human
uaaacagagcagacugaaggaga

SEQ ID NO: 1008266 - RNA, 22 nt, Human
uaaagagccacuaaagagaggc

SEQ ID NO: 1008267 - RNA, 20 nt, Human
uagggaagaaaagugugaug

SEQ ID NO: 1008268 - RNA, 18 nt, Human
uaucucaggaaucagcau

SEQ ID NO: 1008269 - RNA, 25 nt, Human
uauuugcccauuuuucauuaugugu

SEQ ID NO: 1008270 - RNA, 21 nt, Human
ucagcauuauuucagaaauau

SEQ ID NO: 1008271 - RNA, 22 nt, Human
ucccccgccgccgccaucuucu

SEQ ID NO: 1008272 - RNA, 23 nt, Human
ucccccgccgccgccaucuucuc

SEQ ID NO: 1008273 - RNA, 22 nt, Human
uccuccggcugcucacgcugcu

SEQ ID NO: 1008274 - RNA, 21 nt, Human
ucuucuuugauaacuggcuca

SEQ ID NO: 1008275 - RNA, 24 nt, Human
ugaaggagagaucuucauuauuug

SEQ ID NO: 1008276 - RNA, 21 nt, Human
ugagacuggggaucaaaucca

SEQ ID NO: 1008277 - RNA, 23 nt, Human
ugagacuggggaucaaauccacu

SEQ ID NO: 1008278 - RNA, 23 nt, Human
ugggcgcacacacagcgcacaca

SEQ ID NO: 1008279 - RNA, 18 nt, Human
uguguacacagaagcaug

SEQ ID NO: 1008280 - RNA, 19 nt, Human
uuaaaauuuuuccuguuag

SEQ ID NO: 1008281 - RNA, 24 nt, Human
uuacaaucacccaucuauguagac

SEQ ID NO: 1008282 - RNA, 18 nt, Human
aaaaaaaaaaaaaagaaa

SEQ ID NO: 1008283 - RNA, 19 nt, Human
aaaaaaaaaaagaaaaaaa

SEQ ID NO: 1008284 - RNA, 30 nt, Human
aaaaaaaaaaagaaaaaaaaaaccccaaaa

SEQ ID NO: 1008285 - RNA, 25 nt, Human
aaaaaagaaaaaaaaaaccccaaag

SEQ ID NO: 1008286 - RNA, 24 nt, Human
aaaaagaaaaaaaaaaccccaaag

SEQ ID NO: 1008287 - RNA, 23 nt, Human
aaaacagcagcaaacuuaaaagg

SEQ ID NO: 1008288 - RNA, 23 nt, Human
aaaagaaaaaaaaaaccccaaag

SEQ ID NO: 1008289 - RNA, 18 nt, Human
aaaauaaaugaccaacau

SEQ ID NO: 1008290 - RNA, 19 nt, Human
aacagugggacacaaagca

SEQ ID NO: 1008291 - RNA, 20 nt, Human
aaccagcuuuaauaucaaga

SEQ ID NO: 1008292 - RNA, 21 nt, Human
aaccuguuuccacaguggcag

SEQ ID NO: 1008293 - RNA, 23 nt, Human
aagcaaagccaugaucaacauac

SEQ ID NO: 1008294 - RNA, 25 nt, Human
aagcagcaaauaaaaauguuucaaa

SEQ ID NO: 1008295 - RNA, 20 nt, Human
agaaaaaaaaaaccccaaag

SEQ ID NO: 1008296 - RNA, 23 nt, Human
agagcucaaguugccaaauuacc

SEQ ID NO: 1008297 - RNA, 20 nt, Human
agccuaaugcacaugaacua

SEQ ID NO: 1008298 - RNA, 20 nt, Human
auaaaugaccaacauccaca

SEQ ID NO: 1008299 - RNA, 22 nt, Human
aucauuuccauagauaccacca

SEQ ID NO: 1008300 - RNA, 18 nt, Human
augaacuagauuauccaa

SEQ ID NO: 1008301 - RNA, 18 nt, Human
caaagaaaguuaacagac

SEQ ID NO: 1008302 - RNA, 23 nt, Human
caacauaccucauuuauccuggu

SEQ ID NO: 1008303 - RNA, 23 nt, Human
cacaaauuuaacauuugucauca

SEQ ID NO: 1008304 - RNA, 20 nt, Human
cacauugauacugcagcuaa

SEQ ID NO: 1008305 - RNA, 21 nt, Human
caccagcaggaaagugucucu

SEQ ID NO: 1008306 - RNA, 19 nt, Human
cacuucaaguacugcacaa

SEQ ID NO: 1008307 - RNA, 20 nt, Human
cagcaggaaagugucucuuu

SEQ ID NO: 1008308 - RNA, 24 nt, Human
ccacaaaaugggguagagaaaaac

SEQ ID NO: 1008309 - RNA, 18 nt, Human
cuauaucaaagggaaaaa

SEQ ID NO: 1008310 - RNA, 19 nt, Human
gagaaaaacagacagcaaa

SEQ ID NO: 1008311 - RNA, 21 nt, Human
gccgcaguauuuaugccacau

SEQ ID NO: 1008312 - RNA, 25 nt, Human
gggaaaaagcagcaaauaaaaaugu

SEQ ID NO: 1008313 - RNA, 21 nt, Human
uaaacucaagugaacucaagu

SEQ ID NO: 1008314 - RNA, 23 nt, Human
uaaagcaaaaaauguuuuugaau

SEQ ID NO: 1008315 - RNA, 22 nt, Human
uacagaauacuauuaugucugu

SEQ ID NO: 1008316 - RNA, 18 nt, Human
uagcuuguaaauacaaga

SEQ ID NO: 1008317 - RNA, 22 nt, Human
uauaaagcaaagccaugaucaa

SEQ ID NO: 1008318 - RNA, 23 nt, Human
uauccuggucaaaugcauuuuuu

SEQ ID NO: 1008319 - RNA, 21 nt, Human
uaugaaaucuagaaccuguuu

SEQ ID NO: 1008320 - RNA, 24 nt, Human
ucaaauguaaacucaagugaacuc

SEQ ID NO: 1008321 - RNA, 24 nt, Human
uccacaaauuuaacauuugucauc

SEQ ID NO: 1008322 - RNA, 19 nt, Human
uccacaguggcaguaaaau

SEQ ID NO: 1008323 - RNA, 24 nt, Human
ucccaauagcaguaaauaauacuu

SEQ ID NO: 1008324 - RNA, 19 nt, Human
ucgaagaaugcugccgcag

SEQ ID NO: 1008325 - RNA, 20 nt, Human
ucgaagaaugcugccgcagu

SEQ ID NO: 1008326 - RNA, 18 nt, Human
ugaaaaaaauuucucauc

SEQ ID NO: 1008327 - RNA, 24 nt, Human
ugaacuagauuauccaaaaacuaa

SEQ ID NO: 1008328 - RNA, 25 nt, Human
ugagaaaagcuguaaggcuauggug

SEQ ID NO: 1008329 - RNA, 20 nt, Human
ugauuugguuuuuuaauagg

SEQ ID NO: 1008330 - RNA, 21 nt, Human
ugccccagcauuuagguuuuc

SEQ ID NO: 1008331 - RNA, 25 nt, Human
uggaguaugaaaucuagaaccuguu

SEQ ID NO: 1008332 - RNA, 23 nt, Human
ugugaaaugugccccagcauuua

SEQ ID NO: 1008333 - RNA, 22 nt, Human
uuaaagguauuacaaagggaaa

SEQ ID NO: 1008334 - RNA, 18 nt, Human
uuaaaugcuaacauaaau

SEQ ID NO: 1008335 - RNA, 28 nt, Human
uuaacauuugucaucaacucacauccaa

SEQ ID NO: 1008336 - RNA, 27 nt, Human
uuacauuaaaaaaaaaaaaaagaaaaa

SEQ ID NO: 1008337 - RNA, 19 nt, Human
uucaucauuuccauagaua

SEQ ID NO: 1008338 - RNA, 20 nt, Human
uugaauaucugaagaauaga

SEQ ID NO: 1008339 - RNA, 22 nt, Human
uuuaccaaaaugugcacucaca

SEQ ID NO: 1008340 - RNA, 19 nt, Human
aaaaaccacuaugacaaua

SEQ ID NO: 1008341 - RNA, 22 nt, Human
aaagcaggaauaaaaaccacua

SEQ ID NO: 1008342 - RNA, 22 nt, Human
aagcaggaauaaaaaccacuau

SEQ ID NO: 1008343 - RNA, 25 nt, Human
aagcaggaauaaaaaccacuaugag

SEQ ID NO: 1008344 - RNA, 20 nt, Human
agccauuauaaaagccauaa

SEQ ID NO: 1008345 - RNA, 20 nt, Human
cauccccucaugggccuuug

SEQ ID NO: 1008346 - RNA, 22 nt, Human
ccacuaugacaauauaaaaccu

SEQ ID NO: 1008347 - RNA, 20 nt, Human
ggccuuugggcugggcagcc

SEQ ID NO: 1008348 - RNA, 18 nt, Human
gggcugggcagccagcuc

SEQ ID NO: 1008349 - RNA, 23 nt, Human
uauuuaauguuaagugaacauga

SEQ ID NO: 1008350 - RNA, 21 nt, Human
ucagccauuauaaaagccaua

SEQ ID NO: 1008351 - RNA, 25 nt, Human
ucuuuuuuuaucguuauuucagcca

SEQ ID NO: 1008352 - RNA, 22 nt, Human
ugggcagccagcuccgucuucc

SEQ ID NO: 1008353 - RNA, 25 nt, Human
uguacauuuuuagguauuuuucccu

SEQ ID NO: 1008354 - RNA, 22 nt, Human
uguguuuccagaaaaagugcuu

SEQ ID NO: 1008355 - RNA, 18 nt, Human
uuuccagaaacaaagcag

SEQ ID NO: 1008356 - RNA, 22 nt, Human
aaccuccccacccucucccacc

SEQ ID NO: 1008357 - RNA, 22 nt, Human
acaaccuccccacccucuccca

SEQ ID NO: 1008358 - RNA, 19 nt, Human
acccuaggauacucugccc

SEQ ID NO: 1008359 - RNA, 24 nt, Human
agccagauggauacacacccuagg

SEQ ID NO: 1008360 - RNA, 23 nt, Human
agccgagcgagaccgccgcagcc

SEQ ID NO: 1008361 - RNA, 18 nt, Human
caaaggcaggcauggccu

SEQ ID NO: 1008362 - RNA, 19 nt, Human
cacaaccuccccacccucu

SEQ ID NO: 1008363 - RNA, 20 nt, Human
cacaaccuccccacccucuc

SEQ ID NO: 1008364 - RNA, 23 nt, Human
cacccucucccaccagaugcaac

SEQ ID NO: 1008365 - RNA, 23 nt, Human
caggaugaauggacagacagcca

SEQ ID NO: 1008366 - RNA, 31 nt, Human
cccacaacaaaggcaggcauggccuggggcc

SEQ ID NO: 1008367 - RNA, 18 nt, Human
ccccacccucucccacca

SEQ ID NO: 1008368 - RNA, 19 nt, Human
ccccacccucucccaccag

SEQ ID NO: 1008369 - RNA, 20 nt, Human
ccccacccucucccaccaga

SEQ ID NO: 1008370 - RNA, 18 nt, Human
ccccacccucucccaccg

SEQ ID NO: 1008371 - RNA, 22 nt, Human
ccgagcgagaccgccgcagcca

SEQ ID NO: 1008372 - RNA, 22 nt, Human
ccggcgcgccccucccccgucc

SEQ ID NO: 1008373 - RNA, 21 nt, Human
ccugaggccaagggucagagc

SEQ ID NO: 1008374 - RNA, 20 nt, Human
ccuggcccagcuaucuuggc

SEQ ID NO: 1008375 - RNA, 22 nt, Human
cuccagcaaggaacggacagcc

SEQ ID NO: 1008376 - RNA, 22 nt, Human
cugcaggggccacaaccucccc

SEQ ID NO: 1008377 - RNA, 18 nt, Human
gagcagcaggaugaaugg

SEQ ID NO: 1008378 - RNA, 21 nt, Human
gagugccccggggucggcaac

SEQ ID NO: 1008379 - RNA, 19 nt, Human
gccaagggucagagcagcg

SEQ ID NO: 1008380 - RNA, 21 nt, Human
gcccaaagcccagagguguuc

SEQ ID NO: 1008381 - RNA, 20 nt, Human
gcccuggcaacccgcucucc

SEQ ID NO: 1008382 - RNA, 19 nt, Human
ggcaggcagguaggccagc

SEQ ID NO: 1008383 - RNA, 20 nt, Human
gggcaggcagguaggccagc

SEQ ID NO: 1008384 - RNA, 22 nt, Human
gggccaagccugaggccaaggg

SEQ ID NO: 1008385 - RNA, 24 nt, Human
guggccaaauucuccagcaaggaa

SEQ ID NO: 1008386 - RNA, 19 nt, Human
uaagcugaggcccaaagcc

SEQ ID NO: 1008387 - RNA, 21 nt, Human
ucacagcagcugccugcaggc

SEQ ID NO: 1008388 - RNA, 24 nt, Human
ucugguuuuauuaacacuuuuaag

SEQ ID NO: 1008389 - RNA, 23 nt, Human
ugaauagucugguuuuauuaaca

SEQ ID NO: 1008390 - RNA, 18 nt, Human
ugaauggacagacagcca

SEQ ID NO: 1008391 - RNA, 22 nt, Human
ugaauggacagacagccagaug

SEQ ID NO: 1008392 - RNA, 18 nt, Human
ugaggcccaaagcccaga

SEQ ID NO: 1008393 - RNA, 21 nt, Human
ugccccggggucggcaacagc

SEQ ID NO: 1008394 - RNA, 18 nt, Human
uggauacacacccuagga

SEQ ID NO: 1008395 - RNA, 19 nt, Human
uggcaacucuuuguggcca

SEQ ID NO: 1008396 - RNA, 18 nt, Human
uggccuggggcaggcagg

SEQ ID NO: 1008397 - RNA, 21 nt, Human
uuucuuccuggcccagcuauc

SEQ ID NO: 1008398 - RNA, 26 nt, Human
aaaccaaaaccagcguuuuccaaaga

SEQ ID NO: 1008399 - RNA, 19 nt, Human
aagggacguggcuccuggc

SEQ ID NO: 1008400 - RNA, 19 nt, Human
acucucucccaccuccgcc

SEQ ID NO: 1008401 - RNA, 21 nt, Human
agcugcgggugagucccggcu

SEQ ID NO: 1008402 - RNA, 21 nt, Human
auggagcugcgggugaguccc

SEQ ID NO: 1008403 - RNA, 19 nt, Human
caaaaccagcguuuuccaa

SEQ ID NO: 1008404 - RNA, 22 nt, Human
caaaugcaaacgccgagggcac

SEQ ID NO: 1008405 - RNA, 22 nt, Human
caagacacaguuguuucugaca

SEQ ID NO: 1008406 - RNA, 25 nt, Human
cauccacuccugcucggcagcuuca

SEQ ID NO: 1008407 - RNA, 19 nt, Human
ccacagcucaggaaagccc

SEQ ID NO: 1008408 - RNA, 19 nt, Human
ccaggcgaucuucccugcc

SEQ ID NO: 1008409 - RNA, 23 nt, Human
cccaagacacaguuguuucugac

SEQ ID NO: 1008410 - RNA, 23 nt, Human
cccccaagacacaguuguuucug

SEQ ID NO: 1008411 - RNA, 18 nt, Human
ccccucggaggcgcgggc

SEQ ID NO: 1008412 - RNA, 18 nt, Human
ccgggcacaagcauggag

SEQ ID NO: 1008413 - RNA, 21 nt, Human
ccuccgccgggggcccagaag

SEQ ID NO: 1008414 - RNA, 24 nt, Human
cgcgggcguccaggcggugaugcu

SEQ ID NO: 1008415 - RNA, 23 nt, Human
cggccucggcuccugccugacuc

SEQ ID NO: 1008416 - RNA, 19 nt, Human
cggcuccugccugacucuc

SEQ ID NO: 1008417 - RNA, 20 nt, Human
cuccagagggcgcugucccc

SEQ ID NO: 1008418 - RNA, 18 nt, Human
cuccccggccucggcucc

SEQ ID NO: 1008419 - RNA, 21 nt, Human
cucucccaccuccgccggggg

SEQ ID NO: 1008420 - RNA, 20 nt, Human
cucuuggcucauggcucugg

SEQ ID NO: 1008421 - RNA, 20 nt, Human
gaagggagaagggacguggc

SEQ ID NO: 1008422 - RNA, 18 nt, Human
gagcaccagcugacgaag

SEQ ID NO: 1008423 - RNA, 27 nt, Human
gagcugcgggugagucccggcuggcgc

SEQ ID NO: 1008424 - RNA, 24 nt, Human
gccacagcucaggaaagcccggcu

SEQ ID NO: 1008425 - RNA, 22 nt, Human
gcccagaagggaccuccccggg

SEQ ID NO: 1008426 - RNA, 18 nt, Human
gcucuggaccggcgagcc

SEQ ID NO: 1008427 - RNA, 19 nt, Human
ggagaagggacguggcucc

SEQ ID NO: 1008428 - RNA, 22 nt, Human
ggagcggggccaccacggggaa

SEQ ID NO: 1008429 - RNA, 25 nt, Human
ggagcugcgggugagucccggcugg

SEQ ID NO: 1008430 - RNA, 21 nt, Human
ggccacagcucaggaaagccc

SEQ ID NO: 1008431 - RNA, 21 nt, Human
ggggacugggagccucauggg

SEQ ID NO: 1008432 - RNA, 19 nt, Human
gucugaacacuuuaguuau

SEQ ID NO: 1008433 - RNA, 18 nt, Human
uccccggccucggcuccu

SEQ ID NO: 1008434 - RNA, 23 nt, Human
uccccggccucggcuccugccug

SEQ ID NO: 1008435 - RNA, 19 nt, Human
ucccggcuggcgcuggcgc

SEQ ID NO: 1008436 - RNA, 22 nt, Human
ucccggcuggcgcuggcgcggc

SEQ ID NO: 1008437 - RNA, 19 nt, Human
uccugccugacucucuccc

SEQ ID NO: 1008438 - RNA, 19 nt, Human
ucuguccccuggaguuagc

SEQ ID NO: 1008439 - RNA, 18 nt, Human
ucuucuuggaggauggac

SEQ ID NO: 1008440 - RNA, 18 nt, Human
ugaagagggcucuuggcu

SEQ ID NO: 1008441 - RNA, 23 nt, Human
ugagcaccagcugacgaagaggg

SEQ ID NO: 1008442 - RNA, 24 nt, Human
ugccugacucucucccaccuccgc

SEQ ID NO: 1008443 - RNA, 21 nt, Human
ugcuccagacccugaucaggc

SEQ ID NO: 1008444 - RNA, 18 nt, Human
ugggcuuuuuaaaaacca

SEQ ID NO: 1008445 - RNA, 21 nt, Human
uguuguuguuuuguuuuuguc

SEQ ID NO: 1008446 - RNA, 24 nt, Human
uguuguuguuuuguuuuugucuuu

SEQ ID NO: 1008447 - RNA, 18 nt, Human
uuggaggauggacgaguc

SEQ ID NO: 1008448 - RNA, 19 nt, Human
uuguuguuguuuuguuuuu

SEQ ID NO: 1008449 - RNA, 22 nt, Human
uuguuguuguuuuguuuuuguc

SEQ ID NO: 1008450 - RNA, 24 nt, Human
uuguuguuuuguuuuugucuuuuu

SEQ ID NO: 1008451 - RNA, 21 nt, Human
aaacaaagacgcaguagugug

SEQ ID NO: 1008452 - RNA, 18 nt, Human
aaacaucccccacuggca

SEQ ID NO: 1008453 - RNA, 20 nt, Human
aaauuacagccaauccaggg

SEQ ID NO: 1008454 - RNA, 19 nt, Human
aacacaaacuagacagcac

SEQ ID NO: 1008455 - RNA, 21 nt, Human
aaggcuggggccaaugccagg

SEQ ID NO: 1008456 - RNA, 19 nt, Human
acaaacuagacagcacaga

SEQ ID NO: 1008457 - RNA, 19 nt, Human
acaaagacugauagaaaca

SEQ ID NO: 1008458 - RNA, 23 nt, Human
acaaagacugauagaaacaaaga

SEQ ID NO: 1008459 - RNA, 24 nt, Human
accucgcccuggcgguuucuccag

SEQ ID NO: 1008460 - RNA, 22 nt, Human
acgaagcccacaggaagcggcc

SEQ ID NO: 1008461 - RNA, 24 nt, Human
acuggccagggcuucuggcugcgc

SEQ ID NO: 1008462 - RNA, 22 nt, Human
acuuuucugccucuuuacacgg

SEQ ID NO: 1008463 - RNA, 25 nt, Human
agaaauccaaccuccuccugguguu

SEQ ID NO: 1008464 - RNA, 20 nt, Human
agacagcacagacauggggc

SEQ ID NO: 1008465 - RNA, 18 nt, Human
agagccccuuccccaccc

SEQ ID NO: 1008466 - RNA, 23 nt, Human
agcaucagcucgggaagcugccu

SEQ ID NO: 1008467 - RNA, 23 nt, Human
aggacaaagacccaaauuaacgu

SEQ ID NO: 1008468 - RNA, 18 nt, Human
aggccucagggccucugc

SEQ ID NO: 1008469 - RNA, 18 nt, Human
aggccucuggcaaggagc

SEQ ID NO: 1008470 - RNA, 23 nt, Human
aggcuggggccaaugccagggga

SEQ ID NO: 1008471 - RNA, 21 nt, Human
agugcugagagcagcccggga

SEQ ID NO: 1008472 - RNA, 19 nt, Human
aguggaggccucuggcaag

SEQ ID NO: 1008473 - RNA, 20 nt, Human
augaagaugaacugcugaac

SEQ ID NO: 1008474 - RNA, 22 nt, Human
auggggcccgaucccagccugc

SEQ ID NO: 1008475 - RNA, 24 nt, Human
caccaccaccugcuucuacaaaga

SEQ ID NO: 1008476 - RNA, 18 nt, Human
caccaccugcuucuacaa

SEQ ID NO: 1008477 - RNA, 22 nt, Human
cagcagcccggccucucuucug

SEQ ID NO: 1008478 - RNA, 23 nt, Human
cagcagcccggccucucuucugg

SEQ ID NO: 1008479 - RNA, 22 nt, Human
cagcaggacgcgguguggggga

SEQ ID NO: 1008480 - RNA, 18 nt, Human
cagcccccacaucccucc

SEQ ID NO: 1008481 - RNA, 25 nt, Human
caggacaaagacccaaauuaacguc

SEQ ID NO: 1008482 - RNA, 20 nt, Human
caggagaagugcugagagca

SEQ ID NO: 1008483 - RNA, 19 nt, Human
caggcucagcagggaggga

SEQ ID NO: 1008484 - RNA, 18 nt, Human
cagugacuggcagaggca

SEQ ID NO: 1008485 - RNA, 22 nt, Human
cagugcagcgugcggccucugg

SEQ ID NO: 1008486 - RNA, 23 nt, Human
ccacgccccgucugcuuugaucc

SEQ ID NO: 1008487 - RNA, 21 nt, Human
ccagagccccuuccccaccca

SEQ ID NO: 1008488 - RNA, 19 nt, Human
ccaggccgcagccucuguc

SEQ ID NO: 1008489 - RNA, 19 nt, Human
cccuuccccacccacgccc

SEQ ID NO: 1008490 - RNA, 21 nt, Human
ccgaucccagccugcacagaa

SEQ ID NO: 1008491 - RNA, 21 nt, Human
ccucugggugacacgaagccc

SEQ ID NO: 1008492 - RNA, 21 nt, Human
ccugcacagcccccacauccc

SEQ ID NO: 1008493 - RNA, 19 nt, Human
ccugcuggaauuuccacca

SEQ ID NO: 1008494 - RNA, 21 nt, Human
cgaugacagugacuggcagag

SEQ ID NO: 1008495 - RNA, 24 nt, Human
cgcaccucgcccuggcgguuucuc

SEQ ID NO: 1008496 - RNA, 18 nt, Human
cggcccugagcagcuccc

SEQ ID NO: 1008497 - RNA, 18 nt, Human
cgggaagcugccuuugcc

SEQ ID NO: 1008498 - RNA, 18 nt, Human
cugcacccugcacagccc

SEQ ID NO: 1008499 - RNA, 18 nt, Human
cugcagcagcccggccuc

SEQ ID NO: 1008500 - RNA, 19 nt, Human
cugccaggacaaagaccca

SEQ ID NO: 1008501 - RNA, 19 nt, Human
cuggcccaggccgcagccu

SEQ ID NO: 1008502 - RNA, 20 nt, Human
cuggucccagagccccuucc

SEQ ID NO: 1008503 - RNA, 22 nt, Human
cuucggggcuccgggccaaucg

SEQ ID NO: 1008504 - RNA, 18 nt, Human
cuuugauccugaugaugg

SEQ ID NO: 1008505 - RNA, 20 nt, Human
gcacagcccccacaucccuc

SEQ ID NO: 1008506 - RNA, 23 nt, Human
gcagcucccuccgagucuucggg

SEQ ID NO: 1008507 - RNA, 24 nt, Human
gcccaggagaugcagaggugcggg

SEQ ID NO: 1008508 - RNA, 20 nt, Human
gccccuuccccacccacgcc

SEQ ID NO: 1008509 - RNA, 21 nt, Human
gcccggccucucuucugggca

SEQ ID NO: 1008510 - RNA, 23 nt, Human
gcccggccucucuucugggcaca

SEQ ID NO: 1008511 - RNA, 20 nt, Human
gccugggcucaccucugggu

SEQ ID NO: 1008512 - RNA, 18 nt, Human
gcugagagcagcccggga

SEQ ID NO: 1008513 - RNA, 18 nt, Human
gggccaaugccaggggaa

SEQ ID NO: 1008514 - RNA, 18 nt, Human
gggggcucagcaaauuuc

SEQ ID NO: 1008515 - RNA, 22 nt, Human
ggggggucuggucccagagccc

SEQ ID NO: 1008516 - RNA, 23 nt, Human
gggguggggcacauggggagacu

SEQ ID NO: 1008517 - RNA, 23 nt, Human
gucccagagccccuuccccaccc

SEQ ID NO: 1008518 - RNA, 21 nt, Human
gugcagcgugcggccucuggc

SEQ ID NO: 1008519 - RNA, 21 nt, Human
gugcagcgugcggccucuggc

SEQ ID NO: 1008520 - RNA, 23 nt, Human
guugacagcugacagcgacgggc

SEQ ID NO: 1008521 - RNA, 20 nt, Human
uagcaagaggacaguugugg

SEQ ID NO: 1008522 - RNA, 22 nt, Human
uagcaagaggacaguugugggg

SEQ ID NO: 1008523 - RNA, 21 nt, Human
ucacagagucuuggucguuuc

SEQ ID NO: 1008524 - RNA, 24 nt, Human
ucacuggccagggcuucuggcugc

SEQ ID NO: 1008525 - RNA, 19 nt, Human
ucagagccuuccuggugac

SEQ ID NO: 1008526 - RNA, 23 nt, Human
ucagcauccagaggcugcuuccc

SEQ ID NO: 1008527 - RNA, 24 nt, Human
ucccuccgagucuucggggcuccc

SEQ ID NO: 1008528 - RNA, 19 nt, Human
ucccugacucuggcccagg

SEQ ID NO: 1008529 - RNA, 25 nt, Human
uccgcgggguggggcacauggggag

SEQ ID NO: 1008530 - RNA, 21 nt, Human
ucgcacaguggagacgccgug

SEQ ID NO: 1008531 - RNA, 22 nt, Human
ucugcgggacccaccugcugga

SEQ ID NO: 1008532 - RNA, 19 nt, Human
ucuucggggcuccgggcca

SEQ ID NO: 1008533 - RNA, 22 nt, Human
ugacacgaagcccacaggaagc

SEQ ID NO: 1008534 - RNA, 21 nt, Human
ugacagcugacagcgacgggc

SEQ ID NO: 1008535 - RNA, 22 nt, Human
ugacagcugacagcgacgggcu

SEQ ID NO: 1008536 - RNA, 23 nt, Human
ugacagggguagcaucgggcucc

SEQ ID NO: 1008537 - RNA, 19 nt, Human
ugaguggaggccucuggca

SEQ ID NO: 1008538 - RNA, 19 nt, Human
ugauagaaacaaagacgca

SEQ ID NO: 1008539 - RNA, 18 nt, Human
ugcagcguuacugcaaac

SEQ ID NO: 1008540 - RNA, 20 nt, Human
ugccuuugccucaaauggcc

SEQ ID NO: 1008541 - RNA, 20 nt, Human
ugcugaacuucgaggcaaau

SEQ ID NO: 1008542 - RNA, 21 nt, Human
ugcugggaggaagggaaaguc

SEQ ID NO: 1008543 - RNA, 22 nt, Human
ugcuuugauccugaugaugguc

SEQ ID NO: 1008544 - RNA, 22 nt, Human
uggcucccuccacucagcaucc

SEQ ID NO: 1008545 - RNA, 22 nt, Human
uggugccuugcugugcucagug

SEQ ID NO: 1008546 - RNA, 22 nt, Human
uuccgcgggguggggcacaugg

SEQ ID NO: 1008547 - RNA, 23 nt, Human
uucuguguuuauucugacauuuu

SEQ ID NO: 1008548 - RNA, 23 nt, Human
agaacacagcgcggaggccggac

SEQ ID NO: 1008549 - RNA, 24 nt, Human
agcgcggcgugggggcugcucggc

SEQ ID NO: 1008550 - RNA, 21 nt, Human
aggccggacaaagauggggcu

SEQ ID NO: 1008551 - RNA, 21 nt, Human
caggcuggccaaggcccgggc

SEQ ID NO: 1008552 - RNA, 18 nt, Human
gagaacacagcgcggagg

SEQ ID NO: 1008553 - RNA, 20 nt, Human
gccgagaacacagcgcggag

SEQ ID NO: 1008554 - RNA, 24 nt, Human
ggccaggcuggccaaggcccgggc

SEQ ID NO: 1008555 - RNA, 21 nt, Human
ggccgcgcgcggggggcggcg

SEQ ID NO: 1008556 - RNA, 20 nt, Human
ggcugcucggcggcuggcca

SEQ ID NO: 1008557 - RNA, 18 nt, Human
gggcaaggcccggccgcg

SEQ ID NO: 1008558 - RNA, 22 nt, Human
gggcugcucggcggcuggccag

SEQ ID NO: 1008559 - RNA, 21 nt, Human
gggggcggcggcgagggaggc

SEQ ID NO: 1008560 - RNA, 18 nt, Human
ugccaaggcaggcaucgc

SEQ ID NO: 1008561 - RNA, 20 nt, Human
aaaacagggccgaaaaugug

SEQ ID NO: 1008562 - RNA, 18 nt, Human
aaacagcucccaaaccuu

SEQ ID NO: 1008563 - RNA, 20 nt, Human
aaacaucuucauccaaaaaa

SEQ ID NO: 1008564 - RNA, 18 nt, Human
aaaccuggcacuuccuaa

SEQ ID NO: 1008565 - RNA, 18 nt, Human
aagcagcuugcuuuuucu

SEQ ID NO: 1008566 - RNA, 23 nt, Human
aagucacagaauaacaaugaagu

SEQ ID NO: 1008567 - RNA, 20 nt, Human
aauuucuuuuguagcaucgu

SEQ ID NO: 1008568 - RNA, 19 nt, Human
acaagcaguguguaccaac

SEQ ID NO: 1008569 - RNA, 18 nt, Human
acaggcacuucagggcug

SEQ ID NO: 1008570 - RNA, 23 nt, Human
accuccagcaagucacagaauaa

SEQ ID NO: 1008571 - RNA, 19 nt, Human
accuggcacuuccuaaggc

SEQ ID NO: 1008572 - RNA, 24 nt, Human
accuggcacuuccuaaggcucccu

SEQ ID NO: 1008573 - RNA, 22 nt, Human
acuacaguuuauucaauauguc

SEQ ID NO: 1008574 - RNA, 19 nt, Human
agaaagcaguucuuuuaua

SEQ ID NO: 1008575 - RNA, 19 nt, Human
agaccacgcucccgggaca

SEQ ID NO: 1008576 - RNA, 18 nt, Human
agagguagcagaggaaaa

SEQ ID NO: 1008577 - RNA, 20 nt, Human
aggagaaacaaauucucaaa

SEQ ID NO: 1008578 - RNA, 23 nt, Human
aggaugccuucaacgggcagaau

SEQ ID NO: 1008579 - RNA, 25 nt, Human
aguaaaauuauaucuuaaagugcuu

SEQ ID NO: 1008580 - RNA, 18 nt, Human
agucugaugauacggcac

SEQ ID NO: 1008581 - RNA, 22 nt, Human
aguggcaauuucacuccugauu

SEQ ID NO: 1008582 - RNA, 21 nt, Human
auaagcaacaugaucugaagc

SEQ ID NO: 1008583 - RNA, 18 nt, Human
aucuccaggcucuuccaa

SEQ ID NO: 1008584 - RNA, 20 nt, Human
auuuuugauccugauccugg

SEQ ID NO: 1008585 - RNA, 22 nt, Human
caaucaagugguuaccagcaaa

SEQ ID NO: 1008586 - RNA, 19 nt, Human
cacaaugccacagcagcca

SEQ ID NO: 1008587 - RNA, 21 nt, Human
cacaaugccacagcagccaga

SEQ ID NO: 1008588 - RNA, 19 nt, Human
cacagaaacccucacugcc

SEQ ID NO: 1008589 - RNA, 22 nt, Human
cacugccaaacagcucccaaac

SEQ ID NO: 1008590 - RNA, 18 nt, Human
cagaaacccucacugcca

SEQ ID NO: 1008591 - RNA, 25 nt, Human
cagcaacaauauaagcaacaugauc

SEQ ID NO: 1008592 - RNA, 23 nt, Human
caguaaaaaugacaacucuucca

SEQ ID NO: 1008593 - RNA, 23 nt, Human
cauauacaaccaauaccaagggu

SEQ ID NO: 1008594 - RNA, 25 nt, Human
caucugaaauucuauacaaauaggg

SEQ ID NO: 1008595 - RNA, 23 nt, Human
ccaaccuccagcaagucacagaa

SEQ ID NO: 1008596 - RNA, 20 nt, Human
ccacaugcccacacaaugcc

SEQ ID NO: 1008597 - RNA, 20 nt, Human
ccagucugcuuguuccaagc

SEQ ID NO: 1008598 - RNA, 21 nt, Human
ccaucugaaauucuauacaaa

SEQ ID NO: 1008599 - RNA, 22 nt, Human
cccacacaaugccacagcagcc

SEQ ID NO: 1008600 - RNA, 23 nt, Human
cccacacaaugccacagcagcca

SEQ ID NO: 1008601 - RNA, 21 nt, Human
cccacauaucuaaaagcagcu

SEQ ID NO: 1008602 - RNA, 18 nt, Human
cccacauaucuaaaagcu

SEQ ID NO: 1008603 - RNA, 25 nt, Human
ccuguaacuaaaggcaaaacagggc

SEQ ID NO: 1008604 - RNA, 25 nt, Human
cguggugagaugcccgcugggaugc

SEQ ID NO: 1008605 - RNA, 23 nt, Human
cuaguggcuuaaaaaugcuuucc

SEQ ID NO: 1008606 - RNA, 20 nt, Human
cucccgggacagcugaucca

SEQ ID NO: 1008607 - RNA, 20 nt, Human
cuccugauuuugggcuccug

SEQ ID NO: 1008608 - RNA, 18 nt, Human
cugguauaaaugagugaa

SEQ ID NO: 1008609 - RNA, 19 nt, Human
cuguaguugucagugaccg

SEQ ID NO: 1008610 - RNA, 25 nt, Human
cuuaaaauauaaaaaccaaaggaau

SEQ ID NO: 1008611 - RNA, 21 nt, Human
cuucagggcuggcugcgccuc

SEQ ID NO: 1008612 - RNA, 19 nt, Human
gaaaaauaucuucaagagc

SEQ ID NO: 1008613 - RNA, 23 nt, Human
gaacacacagcauuauugaguua

SEQ ID NO: 1008614 - RNA, 21 nt, Human
gaaguauucacguacucaaaa

SEQ ID NO: 1008615 - RNA, 18 nt, Human
gaccauuggaaccgucug

SEQ ID NO: 1008616 - RNA, 27 nt, Human
gaggacuccaggagaagucguggugag

SEQ ID NO: 1008617 - RNA, 19 nt, Human
gcacagaaacccucacugc

SEQ ID NO: 1008618 - RNA, 21 nt, Human
gcacagaaacccucacugcca

SEQ ID NO: 1008619 - RNA, 23 nt, Human
gcagaaucggccaucuuaagauc

SEQ ID NO: 1008620 - RNA, 19 nt, Human
gccaaccuccagcaaguca

SEQ ID NO: 1008621 - RNA, 20 nt, Human
ggaagguggggcaggacagg

SEQ ID NO: 1008622 - RNA, 26 nt, Human
ggaguucucccacugccaaacagcuc

SEQ ID NO: 1008623 - RNA, 21 nt, Human
gggaagguggggcaggacagg

SEQ ID NO: 1008624 - RNA, 19 nt, Human
gucuccaagcauuaaaaag

SEQ ID NO: 1008625 - RNA, 18 nt, Human
uaacuaaaggcaaaacag

SEQ ID NO: 1008626 - RNA, 21 nt, Human
uaacuaugaaacucacaagca

SEQ ID NO: 1008627 - RNA, 19 nt, Human
uaauuauaucagaaaaaua

SEQ ID NO: 1008628 - RNA, 26 nt, Human
uacaauaacuaugaaacucacaagca

SEQ ID NO: 1008629 - RNA, 19 nt, Human
uagaaguggcaauuucacu

SEQ ID NO: 1008630 - RNA, 23 nt, Human
uagcaucguagagaaagcaacag

SEQ ID NO: 1008631 - RNA, 24 nt, Human
uauaaacaagauuuuauacacaag

SEQ ID NO: 1008632 - RNA, 21 nt, Human
ucaaauaaugcacccuguacu

SEQ ID NO: 1008633 - RNA, 18 nt, Human
ucaagugguuaccagcaa

SEQ ID NO: 1008634 - RNA, 24 nt, Human
ucacagaauaacaaugaagucuga

SEQ ID NO: 1008635 - RNA, 26 nt, Human
ucagaaaaauaucuucaagagcuuag

SEQ ID NO: 1008636 - RNA, 20 nt, Human
uccaaaaaauuggcaguaaa

SEQ ID NO: 1008637 - RNA, 24 nt, Human
ucccacugccaaacagcucccaaa

SEQ ID NO: 1008638 - RNA, 24 nt, Human
ucuaguggcuuaaaaaugcuuucc

SEQ ID NO: 1008639 - RNA, 22 nt, Human
ucuggagaacacagcauuuuca

SEQ ID NO: 1008640 - RNA, 21 nt, Human
ucuugacuccucucaggcugg

SEQ ID NO: 1008641 - RNA, 22 nt, Human
ugaaaaccuggcacuuccuaag

SEQ ID NO: 1008642 - RNA, 25 nt, Human
ugaaaaccuggcacuuccuaaggcu

SEQ ID NO: 1008643 - RNA, 20 nt, Human
ugacaaaggccacugccaac

SEQ ID NO: 1008644 - RNA, 19 nt, Human
ugacagcacagaaacccuc

SEQ ID NO: 1008645 - RNA, 19 nt, Human
ugacuguagcugucagcaa

SEQ ID NO: 1008646 - RNA, 18 nt, Human
ugagaugccaucugccug

SEQ ID NO: 1008647 - RNA, 19 nt, Human
ugagaugccaucugccugg

SEQ ID NO: 1008648 - RNA, 21 nt, Human
ugagaugccaucugccuggcc

SEQ ID NO: 1008649 - RNA, 25 nt, Human
ugagaugcccgcugggaugcuuguu

SEQ ID NO: 1008650 - RNA, 21 nt, Human
ugaugucaaauaaugcacccu

SEQ ID NO: 1008651 - RNA, 22 nt, Human
ugauuuugggcuccugagagug

SEQ ID NO: 1008652 - RNA, 24 nt, Human
ugccacacaugaaccaaauuuaga

SEQ ID NO: 1008653 - RNA, 19 nt, Human
ugcccacacaaugccacag

SEQ ID NO: 1008654 - RNA, 19 nt, Human
ugccuggccacaugcccac

SEQ ID NO: 1008655 - RNA, 19 nt, Human
uggcaguaaaaaugacaac

SEQ ID NO: 1008656 - RNA, 21 nt, Human
ugguauaaaugagugaauggu

SEQ ID NO: 1008657 - RNA, 19 nt, Human
ugugggcggagagaaggug

SEQ ID NO: 1008658 - RNA, 19 nt, Human
uguuuuaagcaaaagcaaa

SEQ ID NO: 1008659 - RNA, 18 nt, Human
uuaagguucuucccuagu

SEQ ID NO: 1008660 - RNA, 19 nt, Human
uuagcagggaagguggggc

SEQ ID NO: 1008661 - RNA, 25 nt, Human
uucccaguccaaucuccaggcucuu

SEQ ID NO: 1008662 - RNA, 22 nt, Human
uucuggagaacacagcauuuuc

SEQ ID NO: 1008663 - RNA, 23 nt, Human
uugcuguuuuuaaaaucuguuug

SEQ ID NO: 1008664 - RNA, 21 nt, Human
aaaauaggugguuaguaacau

SEQ ID NO: 1008665 - RNA, 21 nt, Human
aaacagcaucauauaauagca

SEQ ID NO: 1008666 - RNA, 18 nt, Human
aaaguuucaguguaguuu

SEQ ID NO: 1008667 - RNA, 19 nt, Human
aaaucuaaacccaaacaua

SEQ ID NO: 1008668 - RNA, 22 nt, Human
aauauauauauacaugugugua

SEQ ID NO: 1008669 - RNA, 20 nt, Human
aaucuuaauccccagacaaa

SEQ ID NO: 1008670 - RNA, 22 nt, Human
acaaacagcaucauauaauagc

SEQ ID NO: 1008671 - RNA, 18 nt, Human
acauuuaaaaaguaagau

SEQ ID NO: 1008672 - RNA, 22 nt, Human
acuauguucacaaaacaucauu

SEQ ID NO: 1008673 - RNA, 24 nt, Human
agaguuuauacaguguguucaggg

SEQ ID NO: 1008674 - RNA, 22 nt, Human
aggcgcgaaggcgauggcggca

SEQ ID NO: 1008675 - RNA, 19 nt, Human
aguguaguuugacuuaaaa

SEQ ID NO: 1008676 - RNA, 24 nt, Human
auacauguguguauguguauauau

SEQ ID NO: 1008677 - RNA, 24 nt, Human
auacugcaacaggaagguggcaaa

SEQ ID NO: 1008678 - RNA, 18 nt, Human
aucuuacuccuccaucca

SEQ ID NO: 1008679 - RNA, 24 nt, Human
auggcggcaggcgugcgcgggcac

SEQ ID NO: 1008680 - RNA, 20 nt, Human
auuaauaccuuuacaaacag

SEQ ID NO: 1008681 - RNA, 19 nt, Human
auuucaucuuacuccucca

SEQ ID NO: 1008682 - RNA, 19 nt, Human
cacgucuccacgcggcccg

SEQ ID NO: 1008683 - RNA, 24 nt, Human
caguagacaacuuaaaaucuaaac

SEQ ID NO: 1008684 - RNA, 19 nt, Human
cauggaaggauccagacug

SEQ ID NO: 1008685 - RNA, 20 nt, Human
cauuuugucuuuugcaguua

SEQ ID NO: 1008686 - RNA, 22 nt, Human
cccgcggcggcggcggcggcuu

SEQ ID NO: 1008687 - RNA, 18 nt, Human
ccgccgagcuccagggag

SEQ ID NO: 1008688 - RNA, 20 nt, Human
ccggcccuggcugccgcgcu

SEQ ID NO: 1008689 - RNA, 23 nt, Human
ccucgcgccuccgccggcccugg

SEQ ID NO: 1008690 - RNA, 18 nt, Human
cgccagccaggcgcgaag

SEQ ID NO: 1008691 - RNA, 19 nt, Human
cgcccccgccagccaggcg

SEQ ID NO: 1008692 - RNA, 19 nt, Human
cgccggcccuggcugccgc

SEQ ID NO: 1008693 - RNA, 20 nt, Human
cgccucagcgccgaucgucc

SEQ ID NO: 1008694 - RNA, 21 nt, Human
cgcggcggcggcggcggcggc

SEQ ID NO: 1008695 - RNA, 22 nt, Human
cgcgggcaggcggcgaaacgcc

SEQ ID NO: 1008696 - RNA, 19 nt, Human
cggcccgggccaugagcgg

SEQ ID NO: 1008697 - RNA, 21 nt, Human
cggcggcggcgguggcgcccg

SEQ ID NO: 1008698 - RNA, 22 nt, Human
cgggccaugagcgggcggagga

SEQ ID NO: 1008699 - RNA, 21 nt, Human
cguccgcggcggcccgggcca

SEQ ID NO: 1008700 - RNA, 21 nt, Human
cuaguauuacuaauacacuaa

SEQ ID NO: 1008701 - RNA, 21 nt, Human
cuccucgcgccuccgccggcc

SEQ ID NO: 1008702 - RNA, 23 nt, Human
cucgcgccuccgccggcccuggc

SEQ ID NO: 1008703 - RNA, 22 nt, Human
cuuuuucuuuuugaaaaggaau

SEQ ID NO: 1008704 - RNA, 18 nt, Human
gaaacgccgacugugagg

SEQ ID NO: 1008705 - RNA, 22 nt, Human
gagcgcgagccagucgggcggc

SEQ ID NO: 1008706 - RNA, 20 nt, Human
gagcgggcggaggacgccgg

SEQ ID NO: 1008707 - RNA, 24 nt, Human
gauggcggcaggcgugcgcgggca

SEQ ID NO: 1008708 - RNA, 18 nt, Human
gccggcccuggcugccgc

SEQ ID NO: 1008709 - RNA, 18 nt, Human
gcgcccccgccagccagg

SEQ ID NO: 1008710 - RNA, 19 nt, Human
gcgcgggcaccgcgggcag

SEQ ID NO: 1008711 - RNA, 19 nt, Human
gcggcccgggccaugagcg

SEQ ID NO: 1008712 - RNA, 19 nt, Human
gcggcggcggcggcggcgg

SEQ ID NO: 1008713 - RNA, 20 nt, Human
gcggcggcggcggcggcggc

SEQ ID NO: 1008714 - RNA, 20 nt, Human
gcggcggcggcggcggcggc

SEQ ID NO: 1008715 - RNA, 20 nt, Human
gcggcggcggcggcggcggc

SEQ ID NO: 1008716 - RNA, 23 nt, Human
gcggcggcggcggcggcggcggc

SEQ ID NO: 1008717 - RNA, 20 nt, Human
gcggcggcggcggcggcggu

SEQ ID NO: 1008718 - RNA, 23 nt, Human
gcggcggcggcggcggcgguggc

SEQ ID NO: 1008719 - RNA, 21 nt, Human
gcgggcaggcggcgaaacgcc

SEQ ID NO: 1008720 - RNA, 19 nt, Human
gcgucacgcguucgcacgu

SEQ ID NO: 1008721 - RNA, 19 nt, Human
ggaauaaaggcaguuaaga

SEQ ID NO: 1008722 - RNA, 20 nt, Human
ggcggcggcggcggcggcgg

SEQ ID NO: 1008723 - RNA, 20 nt, Human
ggcggcggcggcggcggcgg

SEQ ID NO: 1008724 - RNA, 23 nt, Human
ggcggcggcggcggcggcggcgg

SEQ ID NO: 1008725 - RNA, 19 nt, Human
ggcggcggcggcggcggug

SEQ ID NO: 1008726 - RNA, 21 nt, Human
gggccaugagcgggcggagga

SEQ ID NO: 1008727 - RNA, 18 nt, Human
gggcggaggacgccgggg

SEQ ID NO: 1008728 - RNA, 20 nt, Human
guauguguauauauguguau

SEQ ID NO: 1008729 - RNA, 20 nt, Human
gugcugaacacuuaaauggc

SEQ ID NO: 1008730 - RNA, 23 nt, Human
uaaaaaaaacaccacuuacuuga

SEQ ID NO: 1008731 - RNA, 23 nt, Human
uaaauaaaacuuuauucuuuauu

SEQ ID NO: 1008732 - RNA, 22 nt, Human
uaacaggacuggaaaaccaaug

SEQ ID NO: 1008733 - RNA, 26 nt, Human
uaacaggacuggaaaaccaaugcaga

SEQ ID NO: 1008734 - RNA, 20 nt, Human
uaauccccagacaaaauuca

SEQ ID NO: 1008735 - RNA, 18 nt, Human
uacaagcuaccaaauauu

SEQ ID NO: 1008736 - RNA, 23 nt, Human
uagacaacuuaaaaucuaaaccc

SEQ ID NO: 1008737 - RNA, 28 nt, Human
uagacaacuuaaaaucuaaacccaaaca

SEQ ID NO: 1008738 - RNA, 19 nt, Human
uagcagcaacaagcaaacc

SEQ ID NO: 1008739 - RNA, 23 nt, Human
uaguuugacuuaaaaaaaacacc

SEQ ID NO: 1008740 - RNA, 21 nt, Human
uauauauauacauguguguau

SEQ ID NO: 1008741 - RNA, 24 nt, Human
uauauauauacauguguguaugug

SEQ ID NO: 1008742 - RNA, 18 nt, Human
uauauauguguauauaua

SEQ ID NO: 1008743 - RNA, 26 nt, Human
uaucuaguauuacuaauacacuaaua

SEQ ID NO: 1008744 - RNA, 21 nt, Human
uaugaagaauauauauauaca

SEQ ID NO: 1008745 - RNA, 23 nt, Human
uaugaagaauauauauauacaug

SEQ ID NO: 1008746 - RNA, 18 nt, Human
uauguguauauauaaaua

SEQ ID NO: 1008747 - RNA, 19 nt, Human
uauguguauauauguguau

SEQ ID NO: 1008748 - RNA, 22 nt, Human
uauguguauauauguguauaua

SEQ ID NO: 1008749 - RNA, 22 nt, Human
uauguguauauauguguauaua

SEQ ID NO: 1008750 - RNA, 25 nt, Human
ucaaaaauaggugguuaguaacaug

SEQ ID NO: 1008751 - RNA, 18 nt, Human
uccagacugaauggaaag

SEQ ID NO: 1008752 - RNA, 21 nt, Human
uccucgcgccuccgccggccc

SEQ ID NO: 1008753 - RNA, 23 nt, Human
uccucgcgccuccgccggcccug

SEQ ID NO: 1008754 - RNA, 20 nt, Human
ugacaggaaggcaaggguua

SEQ ID NO: 1008755 - RNA, 21 nt, Human
ugagaaagaaaagauaaaagc

SEQ ID NO: 1008756 - RNA, 22 nt, Human
ugcgauuuucagcuuuauuguc

SEQ ID NO: 1008757 - RNA, 25 nt, Human
uggaaaaccaaugcagaaaucugcu

SEQ ID NO: 1008758 - RNA, 22 nt, Human
uggaaagcuguugagaaagaaa

SEQ ID NO: 1008759 - RNA, 23 nt, Human
uggaaggauccagacugaauggu

SEQ ID NO: 1008760 - RNA, 29 nt, Human
uguauauauguguauauauaaauaaugua

SEQ ID NO: 1008761 - RNA, 20 nt, Human
uguauauauguguauauauu

SEQ ID NO: 1008762 - RNA, 19 nt, Human
uguaucaaacauacacaua

SEQ ID NO: 1008763 - RNA, 18 nt, Human
uguguauauauguguaua

SEQ ID NO: 1008764 - RNA, 21 nt, Human
uguguauauauguguauauau

SEQ ID NO: 1008765 - RNA, 22 nt, Human
uguguauauauguguauauaua

SEQ ID NO: 1008766 - RNA, 21 nt, Human
uguguauguguauauaugugu

SEQ ID NO: 1008767 - RNA, 22 nt, Human
uguguauguguauauaugugua

SEQ ID NO: 1008768 - RNA, 26 nt, Human
uguguauguguauauauguguauaua

SEQ ID NO: 1008769 - RNA, 18 nt, Human
uguguguauguguauaua

SEQ ID NO: 1008770 - RNA, 19 nt, Human
uguguguauguguauauau

SEQ ID NO: 1008771 - RNA, 27 nt, Human
uguguguauguguauauaugugucaau

SEQ ID NO: 1008772 - RNA, 22 nt, Human
uuaaucuuaaacaguaguuuca

SEQ ID NO: 1008773 - RNA, 18 nt, Human
uuagagcagaauuaaaag

SEQ ID NO: 1008774 - RNA, 20 nt, Human
uuagagcagaauuaaaagau

SEQ ID NO: 1008775 - RNA, 23 nt, Human
uuaugaagaauauauauauacau

SEQ ID NO: 1008776 - RNA, 18 nt, Human
accuaauccuuuucccaa

SEQ ID NO: 1008777 - RNA, 29 nt, Human
agaggcaggcagccaggaacccccaaggg

SEQ ID NO: 1008778 - RNA, 19 nt, Human
aggcagccaggaaccagaa

SEQ ID NO: 1008779 - RNA, 22 nt, Human
aggcaggcagccaggaaccaga

SEQ ID NO: 1008780 - RNA, 18 nt, Human
caucugguucagguucuc

SEQ ID NO: 1008781 - RNA, 18 nt, Human
uaugugcccaccuaaucc

SEQ ID NO: 1008782 - RNA, 21 nt, Human
ucaauccuucuuuacacaugc

SEQ ID NO: 1008783 - RNA, 23 nt, Human
ucuucuauucugcugucaaaaau

SEQ ID NO: 1008784 - RNA, 23 nt, Human
ucuuuacacaugcagcaugguug

SEQ ID NO: 1008785 - RNA, 19 nt, Human
ugcaauuuuauuuucaauc

SEQ ID NO: 1008786 - RNA, 19 nt, Human
ugcagcaugguuggggucu

SEQ ID NO: 1008787 - RNA, 22 nt, Human
uguagguacaaggcauuucagg

SEQ ID NO: 1008788 - RNA, 20 nt, Human
uucccaaggugagcacuaug

SEQ ID NO: 1008789 - RNA, 26 nt, Human
uuucccaaggugagcacuaugacaac

SEQ ID NO: 1008790 - RNA, 23 nt, Human
aaauacaccaagauacuccacac

SEQ ID NO: 1008791 - RNA, 21 nt, Human
aagcaauccauaucaacagua

SEQ ID NO: 1008792 - RNA, 20 nt, Human
acaccaagauacuccacaca

SEQ ID NO: 1008793 - RNA, 21 nt, Human
agcacuagaaucuccaucuga

SEQ ID NO: 1008794 - RNA, 18 nt, Human
agggaaaauaugcauaug

SEQ ID NO: 1008795 - RNA, 18 nt, Human
aguagcaaaauacaccaa

SEQ ID NO: 1008796 - RNA, 21 nt, Human
aucugauugcuggcucacacc

SEQ ID NO: 1008797 - RNA, 20 nt, Human
caacaguagcaaaauacacc

SEQ ID NO: 1008798 - RNA, 21 nt, Human
caacaguagcaaaauacacca

SEQ ID NO: 1008799 - RNA, 23 nt, Human
caucaguuggucuagagagugac

SEQ ID NO: 1008800 - RNA, 24 nt, Human
ccuccuguuucugcaucaguuggu

SEQ ID NO: 1008801 - RNA, 23 nt, Human
cgucaaaacgugaagagcaccau

SEQ ID NO: 1008802 - RNA, 23 nt, Human
cugaguucugggaucuagguguc

SEQ ID NO: 1008803 - RNA, 23 nt, Human
cuggcucacaccuccuguuucug

SEQ ID NO: 1008804 - RNA, 19 nt, Human
gcaaggaugaagugaggcc

SEQ ID NO: 1008805 - RNA, 21 nt, Human
gcaaggaugaagugaggccga

SEQ ID NO: 1008806 - RNA, 19 nt, Human
guuaaaauagauauucccc

SEQ ID NO: 1008807 - RNA, 22 nt, Human
uaaaauagauauucccccaaaa

SEQ ID NO: 1008808 - RNA, 20 nt, Human
uaccaguguucuucaaacuu

SEQ ID NO: 1008809 - RNA, 21 nt, Human
uagagagugacccaagaauuu

SEQ ID NO: 1008810 - RNA, 18 nt, Human
ucauccugagauacuugu

SEQ ID NO: 1008811 - RNA, 23 nt, Human
uccacacauuaccaguguucuuc

SEQ ID NO: 1008812 - RNA, 20 nt, Human
ucccuagcuguugcuguugc

SEQ ID NO: 1008813 - RNA, 21 nt, Human
ugaagugaggccgagugaguc

SEQ ID NO: 1008814 - RNA, 20 nt, Human
ugauugcuggcucacaccuc

SEQ ID NO: 1008815 - RNA, 21 nt, Human
uugcuggcucacaccuccugu

SEQ ID NO: 1008816 - RNA, 23 nt, Human
uuguuccuucauucugagugaag

SEQ ID NO: 1008817 - RNA, 18 nt, Human
uuuauguaaccuaaagaa

SEQ ID NO: 1008818 - RNA, 23 nt, Human
aaauccuuccacaguggacacuu

SEQ ID NO: 1008819 - RNA, 23 nt, Human
aaucacuugagccuagaguucga

SEQ ID NO: 1008820 - RNA, 18 nt, Human
acugugugcugaacuuua

SEQ ID NO: 1008821 - RNA, 20 nt, Human
agacccaagggcuuuuguug

SEQ ID NO: 1008822 - RNA, 23 nt, Human
agccugggcaacauacaguacuc

SEQ ID NO: 1008823 - RNA, 20 nt, Human
agcucagguguggacacucc

SEQ ID NO: 1008824 - RNA, 18 nt, Human
aggcagaagaaucacuug

SEQ ID NO: 1008825 - RNA, 22 nt, Human
aggcagaagaaucacuugagcc

SEQ ID NO: 1008826 - RNA, 24 nt, Human
aggcagaagaaucacuugagccua

SEQ ID NO: 1008827 - RNA, 24 nt, Human
aggcugaggcagaagaaucacuug

SEQ ID NO: 1008828 - RNA, 21 nt, Human
agguguggacacuccauggcc

SEQ ID NO: 1008829 - RNA, 22 nt, Human
auaaacauuugaaggcgcugca

SEQ ID NO: 1008830 - RNA, 19 nt, Human
auggccacgaggagggcag

SEQ ID NO: 1008831 - RNA, 23 nt, Human
cacuccauggccacgaggagggc

SEQ ID NO: 1008832 - RNA, 18 nt, Human
cagcaaaacugcucaauc

SEQ ID NO: 1008833 - RNA, 24 nt, Human
cagcuacuugggaggcugaggcag

SEQ ID NO: 1008834 - RNA, 20 nt, Human
cagguuccccaaauccuucc

SEQ ID NO: 1008835 - RNA, 25 nt, Human
caguggacacuugaacaagucaaac

SEQ ID NO: 1008836 - RNA, 24 nt, Human
caucuguagucccagcuacuuggg

SEQ ID NO: 1008837 - RNA, 20 nt, Human
ccacgaggagggcagcuggg

SEQ ID NO: 1008838 - RNA, 20 nt, Human
ccuuccugcuguuuucccau

SEQ ID NO: 1008839 - RNA, 22 nt, Human
cgccuuccugcuguuuucccau

SEQ ID NO: 1008840 - RNA, 23 nt, Human
cuacuuuucuucuuuuuuaaaaa

SEQ ID NO: 1008841 - RNA, 20 nt, Human
cuguagucccagcuacuugg

SEQ ID NO: 1008842 - RNA, 21 nt, Human
cuguagucccagcuacuuggg

SEQ ID NO: 1008843 - RNA, 27 nt, Human
cuuccugcuguuuucccauuccuuaac

SEQ ID NO: 1008844 - RNA, 21 nt, Human
cuugagccuagaguucgaggc

SEQ ID NO: 1008845 - RNA, 22 nt, Human
gaaucacuugagccuagaguuc

SEQ ID NO: 1008846 - RNA, 21 nt, Human
gcagaagaaucacuugagccu

SEQ ID NO: 1008847 - RNA, 22 nt, Human
gcagcugggaggacugcggcuc

SEQ ID NO: 1008848 - RNA, 19 nt, Human
gcugaguccggagcaaugc

SEQ ID NO: 1008849 - RNA, 20 nt, Human
ggacacuugaacaagucaaa

SEQ ID NO: 1008850 - RNA, 19 nt, Human
gugugguggugauugcauc

SEQ ID NO: 1008851 - RNA, 23 nt, Human
uaucuugcuuuucugauuucuua

SEQ ID NO: 1008852 - RNA, 19 nt, Human
ucacuugagccuagaguuc

SEQ ID NO: 1008853 - RNA, 20 nt, Human
ugaggcagaagaaucacuug

SEQ ID NO: 1008854 - RNA, 24 nt, Human
ugaggcagaagaaucacuugagcc

SEQ ID NO: 1008855 - RNA, 24 nt, Human
ugaggcagaagaaucacuugagcc

SEQ ID NO: 1008856 - RNA, 21 nt, Human
uggcugaguccggagcaaugc

SEQ ID NO: 1008857 - RNA, 24 nt, Human
ugggaggcugaggcagaagaauca

SEQ ID NO: 1008858 - RNA, 26 nt, Human
ugguggugauugcaucuguaguccca

SEQ ID NO: 1008859 - RNA, 20 nt, Human
uguggacacuccauggccac

SEQ ID NO: 1008860 - RNA, 21 nt, Human
uuaaagguacuugugcaucuu

SEQ ID NO: 1008861 - RNA, 20 nt, Human
uucagguuccccaaauccuu

SEQ ID NO: 1008862 - RNA, 23 nt, Human
uugagccuagaguucgaggccag

SEQ ID NO: 1008863 - RNA, 25 nt, Human
uugggaggcugaggcagaagaauca

SEQ ID NO: 1008864 - RNA, 22 nt, Human
uuggggaacuuggcugaguccg

SEQ ID NO: 1008865 - RNA, 22 nt, Human
uuuaucuugcuuuucugauuuc

SEQ ID NO: 1008866 - RNA, 24 nt, Human
aaaaaagcaauccucugaguucua

SEQ ID NO: 1008867 - RNA, 22 nt, Human
aaaaaguuguuuugaaauaaau

SEQ ID NO: 1008868 - RNA, 24 nt, Human
aaaaggccauaacagugaaaagga

SEQ ID NO: 1008869 - RNA, 24 nt, Human
aaagaaaaaaagcaauccucugag

SEQ ID NO: 1008870 - RNA, 18 nt, Human
aaaugcccaucucccaag

SEQ ID NO: 1008871 - RNA, 20 nt, Human
aacagugaaaaggaaaaaaa

SEQ ID NO: 1008872 - RNA, 24 nt, Human
aaggaccacguguuaaacuaugua

SEQ ID NO: 1008873 - RNA, 25 nt, Human
aauucccguuuuaaaaaaauuaaag

SEQ ID NO: 1008874 - RNA, 20 nt, Human
acagcggacgacuucccaga

SEQ ID NO: 1008875 - RNA, 22 nt, Human
acuguccuagaauuccucuaaa

SEQ ID NO: 1008876 - RNA, 22 nt, Human
agaaaggacugaaguuaacuca

SEQ ID NO: 1008877 - RNA, 22 nt, Human
agaaaugugaaaaggccauaac

SEQ ID NO: 1008878 - RNA, 24 nt, Human
agagaacaggugcuagggcccaag

SEQ ID NO: 1008879 - RNA, 19 nt, Human
agcccaaagccaacagaaa

SEQ ID NO: 1008880 - RNA, 22 nt, Human
agcuugucuccgggguaaccag

SEQ ID NO: 1008881 - RNA, 22 nt, Human
auacagcccaaagccaacagaa

SEQ ID NO: 1008882 - RNA, 21 nt, Human
auaggcugaaagaaaaaaagc

SEQ ID NO: 1008883 - RNA, 19 nt, Human
cacaaauacagcccaaagc

SEQ ID NO: 1008884 - RNA, 19 nt, Human
cagcccaaagccaacagaa

SEQ ID NO: 1008885 - RNA, 19 nt, Human
ccaucucccaagaacucga

SEQ ID NO: 1008886 - RNA, 23 nt, Human
cccaaagccaacagaaaaauugc

SEQ ID NO: 1008887 - RNA, 23 nt, Human
ccucuaaauggccagcuauagcu

SEQ ID NO: 1008888 - RNA, 22 nt, Human
ccucuccgcggacagagcuugu

SEQ ID NO: 1008889 - RNA, 22 nt, Human
ccucugaguucuagguuucaca

SEQ ID NO: 1008890 - RNA, 24 nt, Human
ccuucucgccaaaugcccaucucc

SEQ ID NO: 1008891 - RNA, 18 nt, Human
ccuuuuaaaagauaacua

SEQ ID NO: 1008892 - RNA, 24 nt, Human
cgccagccuucucgccaaaugccc

SEQ ID NO: 1008893 - RNA, 23 nt, Human
cgggguaaccagcagcuggugga

SEQ ID NO: 1008894 - RNA, 19 nt, Human
ggacgacuucccagagaac

SEQ ID NO: 1008895 - RNA, 21 nt, Human
ggacggaagccagcccagcuc

SEQ ID NO: 1008896 - RNA, 20 nt, Human
guuguguugcugagccuuuu

SEQ ID NO: 1008897 - RNA, 24 nt, Human
uaaauauguacacauacauuccua

SEQ ID NO: 1008898 - RNA, 23 nt, Human
uaacucaaaauaggcugaaagaa

SEQ ID NO: 1008899 - RNA, 19 nt, Human
uaagaaaggacugaaguua

SEQ ID NO: 1008900 - RNA, 19 nt, Human
uaagaaaggacugaaguua

SEQ ID NO: 1008901 - RNA, 22 nt, Human
uaagugaugauuacugcaauac

SEQ ID NO: 1008902 - RNA, 19 nt, Human
uacagcccaaagccaacag

SEQ ID NO: 1008903 - RNA, 27 nt, Human
uagggcccaagacccgcacuccgaggg

SEQ ID NO: 1008904 - RNA, 23 nt, Human
uauguacaucgauuugaugugca

SEQ ID NO: 1008905 - RNA, 18 nt, Human
ucacaaaaggaccacgug

SEQ ID NO: 1008906 - RNA, 19 nt, Human
ucagcacugaccggaauua

SEQ ID NO: 1008907 - RNA, 20 nt, Human
ugaaagaaaaaaagcaaucc

SEQ ID NO: 1008908 - RNA, 24 nt, Human
ugaaauaaaugguaccuguaagug

SEQ ID NO: 1008909 - RNA, 23 nt, Human
ugaguucuagguuucacaaaagg

SEQ ID NO: 1008910 - RNA, 26 nt, Human
ugcuucuuuccuuuaggaguuguccc

SEQ ID NO: 1008911 - RNA, 20 nt, Human
ugcuuugcccugucauuucc

SEQ ID NO: 1008912 - RNA, 19 nt, Human
ugguggaaggaaaggcguu

SEQ ID NO: 1008913 - RNA, 22 nt, Human
uuaaaagauaacuaguuuauaa

SEQ ID NO: 1008914 - RNA, 25 nt, Human
uuaaaguuuccauuuuuuuuuuuag

SEQ ID NO: 1008915 - RNA, 20 nt, Human
uugucccacuccucuccgcg

SEQ ID NO: 1008916 - RNA, 22 nt, Human
uuucacaaaaggaccacguguu

SEQ ID NO: 1008917 - RNA, 22 nt, Human
aaaaacauccaucagaccaaaa

SEQ ID NO: 1008918 - RNA, 19 nt, Human
aaaacacagccaacucaac

SEQ ID NO: 1008919 - RNA, 23 nt, Human
aaaacauccaucagaccaaaaua

SEQ ID NO: 1008920 - RNA, 22 nt, Human
aaacaaauaaaacccgcaaaac

SEQ ID NO: 1008921 - RNA, 23 nt, Human
aaacauccaucagaccaaaauaa

SEQ ID NO: 1008922 - RNA, 19 nt, Human
aacacacaucucaugauaa

SEQ ID NO: 1008923 - RNA, 21 nt, Human
aagccauggcaccuggcucca

SEQ ID NO: 1008924 - RNA, 22 nt, Human
aagcucuugcugcuucuuuuug

SEQ ID NO: 1008925 - RNA, 23 nt, Human
aaugacucacaggguaccaggca

SEQ ID NO: 1008926 - RNA, 22 nt, Human
aauggagcuggccaugcacuuu

SEQ ID NO: 1008927 - RNA, 22 nt, Human
aauugguuccuagaacuuccau

SEQ ID NO: 1008928 - RNA, 18 nt, Human
aauuuuccuuuuaaaaaa

SEQ ID NO: 1008929 - RNA, 18 nt, Human
acagcucacugcaaccuc

SEQ ID NO: 1008930 - RNA, 21 nt, Human
acauccaucagaccaaaauaa

SEQ ID NO: 1008931 - RNA, 23 nt, Human
acaugugggaauguuuuguucuu

SEQ ID NO: 1008932 - RNA, 19 nt, Human
acccaaagagccaagagaa

SEQ ID NO: 1008933 - RNA, 23 nt, Human
acccaggcuggagugcaguggug

SEQ ID NO: 1008934 - RNA, 24 nt, Human
acccaggcuggagugcaguggugu

SEQ ID NO: 1008935 - RNA, 19 nt, Human
acccauggagauccuccuc

SEQ ID NO: 1008936 - RNA, 20 nt, Human
accugcacagaacucaggua

SEQ ID NO: 1008937 - RNA, 19 nt, Human
accuggcuccauccuccuu

SEQ ID NO: 1008938 - RNA, 18 nt, Human
acucugucacccaggcug

SEQ ID NO: 1008939 - RNA, 25 nt, Human
acucugucacccaggcuggagugca

SEQ ID NO: 1008940 - RNA, 24 nt, Human
acuuuauuuucagauugugagauu

SEQ ID NO: 1008941 - RNA, 18 nt, Human
agaaaacacagccaacuc

SEQ ID NO: 1008942 - RNA, 21 nt, Human
aggcagaaagaaggcccauga

SEQ ID NO: 1008943 - RNA, 21 nt, Human
aggcaucauugauagguggca

SEQ ID NO: 1008944 - RNA, 20 nt, Human
aggcaucauugauagguggg

SEQ ID NO: 1008945 - RNA, 23 nt, Human
agugcaguggugugaucacagcu

SEQ ID NO: 1008946 - RNA, 24 nt, Human
agugcaguggugugaucacagcuc

SEQ ID NO: 1008947 - RNA, 23 nt, Human
caaaagacacagccaugcccuuu

SEQ ID NO: 1008948 - RNA, 25 nt, Human
caaacuccugggcucaagugauccu

SEQ ID NO: 1008949 - RNA, 21 nt, Human
caaagaucaacuagcuuaaaa

SEQ ID NO: 1008950 - RNA, 19 nt, Human
caaauaaaacccgcaaaac

SEQ ID NO: 1008951 - RNA, 24 nt, Human
caaccucaaacuccugggcucaag

SEQ ID NO: 1008952 - RNA, 22 nt, Human
caagagcagagaaaacacagcc

SEQ ID NO: 1008953 - RNA, 20 nt, Human
caagugauccucccaccuca

SEQ ID NO: 1008954 - RNA, 23 nt, Human
caauaguacauaguaccaggucc

SEQ ID NO: 1008955 - RNA, 25 nt, Human
caccaucuguggucaggcucagaac

SEQ ID NO: 1008956 - RNA, 21 nt, Human
cacccaggcuggagugcagug

SEQ ID NO: 1008957 - RNA, 23 nt, Human
cacucugucacccaggcuggagu

SEQ ID NO: 1008958 - RNA, 24 nt, Human
cacucugucacccaggcuggagug

SEQ ID NO: 1008959 - RNA, 21 nt, Human
cacugcaaccucaaacuccug

SEQ ID NO: 1008960 - RNA, 23 nt, Human
cacugcaaccucaaacuccuggg

SEQ ID NO: 1008961 - RNA, 21 nt, Human
cacugcugaaaagaaaugccu

SEQ ID NO: 1008962 - RNA, 25 nt, Human
caggacaaaggauauuuccuccucu

SEQ ID NO: 1008963 - RNA, 22 nt, Human
cauuuuaauuaacuccuuccug

SEQ ID NO: 1008964 - RNA, 20 nt, Human
ccaaagagccaagagaaaac

SEQ ID NO: 1008965 - RNA, 20 nt, Human
ccacaugaccuucagauuua

SEQ ID NO: 1008966 - RNA, 21 nt, Human
ccaggcagcaguucuuguacu

SEQ ID NO: 1008967 - RNA, 23 nt, Human
ccaggcuguggauugguugggga

SEQ ID NO: 1008968 - RNA, 21 nt, Human
ccauggagauccuccuccuuc

SEQ ID NO: 1008969 - RNA, 18 nt, Human
ccauggcaccuggcucca

SEQ ID NO: 1008970 - RNA, 18 nt, Human
cccaaagagccaagagaa

SEQ ID NO: 1008971 - RNA, 21 nt, Human
cccacagccugcccgugccuu

SEQ ID NO: 1008972 - RNA, 24 nt, Human
cccagauaaacuugcaguaagagg

SEQ ID NO: 1008973 - RNA, 23 nt, Human
cccauaagaaaugggacucuacc

SEQ ID NO: 1008974 - RNA, 19 nt, Human
cccaugcggguagaaacca

SEQ ID NO: 1008975 - RNA, 19 nt, Human
ccccgccuucccuggacuc

SEQ ID NO: 1008976 - RNA, 24 nt, Human
cccgcaaaaccgggcaucucccag

SEQ ID NO: 1008977 - RNA, 22 nt, Human
cccuggacuccugugggcugca

SEQ ID NO: 1008978 - RNA, 21 nt, Human
ccgccgcgaggaggagagccc

SEQ ID NO: 1008979 - RNA, 28 nt, Human
ccucccaccucagccucggauuauaggc

SEQ ID NO: 1008980 - RNA, 23 nt, Human
ccucugaggcagaaagaaggccc

SEQ ID NO: 1008981 - RNA, 22 nt, Human
ccugggcucaagugauccuccc

SEQ ID NO: 1008982 - RNA, 21 nt, Human
ccuuuaaaaaaaaaaaauuaa

SEQ ID NO: 1008983 - RNA, 25 nt, Human
cgcaaaaccgggcaucucccaauga

SEQ ID NO: 1008984 - RNA, 19 nt, Human
cggauuauaggcucaagcc

SEQ ID NO: 1008985 - RNA, 21 nt, Human
cgggaaagacccaaagagcca

SEQ ID NO: 1008986 - RNA, 22 nt, Human
cgggaaagacccaaagagccaa

SEQ ID NO: 1008987 - RNA, 24 nt, Human
cucaagugauccucccaccucagc

SEQ ID NO: 1008988 - RNA, 24 nt, Human
cucacucugucacccaggcuggag

SEQ ID NO: 1008989 - RNA, 21 nt, Human
cucacugcaaccucaaacucc

SEQ ID NO: 1008990 - RNA, 24 nt, Human
cucacugcaaccucaaacuccugg

SEQ ID NO: 1008991 - RNA, 18 nt, Human
cucccaacucacacauuu

SEQ ID NO: 1008992 - RNA, 22 nt, Human
cucccaacucacacauuugcua

SEQ ID NO: 1008993 - RNA, 21 nt, Human
cucccacagccugcccgugcc

SEQ ID NO: 1008994 - RNA, 22 nt, Human
cuccgcugccucccacagccug

SEQ ID NO: 1008995 - RNA, 23 nt, Human
cuccugggcucaagugauccucc

SEQ ID NO: 1008996 - RNA, 25 nt, Human
cuccugggcucaagugauccuccca

SEQ ID NO: 1008997 - RNA, 20 nt, Human
cucggauuauaggcucaagc

SEQ ID NO: 1008998 - RNA, 21 nt, Human
cugaaccucggcuucuuagcc

SEQ ID NO: 1008999 - RNA, 21 nt, Human
cugaugccacaugaccuucag

SEQ ID NO: 1009000 - RNA, 23 nt, Human
cugcaaccucaaacuccugggcu

SEQ ID NO: 1009001 - RNA, 19 nt, Human
cugcacagaacucaggacc

SEQ ID NO: 1009002 - RNA, 24 nt, Human
cugcagccuucuuaacacacaucu

SEQ ID NO: 1009003 - RNA, 20 nt, Human
cugccucccacagccugccc

SEQ ID NO: 1009004 - RNA, 21 nt, Human
cuuaggacagugagacugccc

SEQ ID NO: 1009005 - RNA, 23 nt, Human
cuuccugcugccaccacugaacc

SEQ ID NO: 1009006 - RNA, 22 nt, Human
gaaaauauuucagaacucaaag

SEQ ID NO: 1009007 - RNA, 21 nt, Human
gagaagauguuucauauuggg

SEQ ID NO: 1009008 - RNA, 21 nt, Human
gaguucucaggagcacacagg

SEQ ID NO: 1009009 - RNA, 24 nt, Human
gcugcagccuucuuaacacacauc

SEQ ID NO: 1009010 - RNA, 22 nt, Human
ggaaagaagacauaccuuagga

SEQ ID NO: 1009011 - RNA, 20 nt, Human
ggcagaacucuacccaugcg

SEQ ID NO: 1009012 - RNA, 22 nt, Human
ggcuggagugcaguggugugau

SEQ ID NO: 1009013 - RNA, 21 nt, Human
gggcucaagugauccucccac

SEQ ID NO: 1009014 - RNA, 22 nt, Human
gggcucaagugauccucccacc

SEQ ID NO: 1009015 - RNA, 22 nt, Human
guacuccaggcuguggauuggu

SEQ ID NO: 1009016 - RNA, 19 nt, Human
guguacccgggaaagaccc

SEQ ID NO: 1009017 - RNA, 21 nt, Human
uaaaaaacauccaucagacca

SEQ ID NO: 1009018 - RNA, 20 nt, Human
uaaauaagacagucaaagau

SEQ ID NO: 1009019 - RNA, 20 nt, Human
uaaguuaauguuucaguucc

SEQ ID NO: 1009020 - RNA, 24 nt, Human
uaauugagacagagucucacucug

SEQ ID NO: 1009021 - RNA, 21 nt, Human
uacuuccccaaacaaagaacu

SEQ ID NO: 1009022 - RNA, 19 nt, Human
uagaggcaacacagucaca

SEQ ID NO: 1009023 - RNA, 24 nt, Human
uagcuguucuccagguugcuucug

SEQ ID NO: 1009024 - RNA, 20 nt, Human
uagcuuguguaaagucagag

SEQ ID NO: 1009025 - RNA, 22 nt, Human
uaggacccaacuuggccagggg

SEQ ID NO: 1009026 - RNA, 24 nt, Human
uaugaaaaguauaaaauguguagc

SEQ ID NO: 1009027 - RNA, 22 nt, Human
ucacccaggcuggagugcagug

SEQ ID NO: 1009028 - RNA, 24 nt, Human
ucacucugucacccaggcuggagu

SEQ ID NO: 1009029 - RNA, 24 nt, Human
ucacugcaaccucaaacuccuggg

SEQ ID NO: 1009030 - RNA, 19 nt, Human
ucagagauaauuacacugc

SEQ ID NO: 1009031 - RNA, 23 nt, Human
ucagagucuuauuuacuauuaac

SEQ ID NO: 1009032 - RNA, 18 nt, Human
uccaccugcacagaacuc

SEQ ID NO: 1009033 - RNA, 20 nt, Human
uccaucagaccaaaauaaaa

SEQ ID NO: 1009034 - RNA, 20 nt, Human
ucccacagccugcccgugcc

SEQ ID NO: 1009035 - RNA, 23 nt, Human
ucccccuuuucccaugauauggg

SEQ ID NO: 1009036 - RNA, 21 nt, Human
uccccgccuucccuggacucc

SEQ ID NO: 1009037 - RNA, 21 nt, Human
uccugggcucaagugauccuc

SEQ ID NO: 1009038 - RNA, 22 nt, Human
uccugugggcugcagccuucuu

SEQ ID NO: 1009039 - RNA, 18 nt, Human
uccuuacacagcaaacaa

SEQ ID NO: 1009040 - RNA, 23 nt, Human
ucucaaguaagaguucucaggag

SEQ ID NO: 1009041 - RNA, 22 nt, Human
ucucacucugucacccaggcug

SEQ ID NO: 1009042 - RNA, 23 nt, Human
ucucacucugucacccaggcugg

SEQ ID NO: 1009043 - RNA, 24 nt, Human
ucucacucugucacccaggcugga

SEQ ID NO: 1009044 - RNA, 26 nt, Human
ucucacucugucacccaggcuggagu

SEQ ID NO: 1009045 - RNA, 27 nt, Human
ucucacucugucacccaggcuggagug

SEQ ID NO: 1009046 - RNA, 24 nt, Human
ucugucacccaggcuggagugcag

SEQ ID NO: 1009047 - RNA, 28 nt, Human
ucuguggucaggcucagaaccggggucc

SEQ ID NO: 1009048 - RNA, 21 nt, Human
ugaaaagaaaugccuuugaac

SEQ ID NO: 1009049 - RNA, 23 nt, Human
ugaaaagaaaugccuuugaacac

SEQ ID NO: 1009050 - RNA, 23 nt, Human
ugaaauagacaaaauuuguggca

SEQ ID NO: 1009051 - RNA, 19 nt, Human
ugaaauauacaagucugga

SEQ ID NO: 1009052 - RNA, 19 nt, Human
ugaacaggacaaaggauau

SEQ ID NO: 1009053 - RNA, 21 nt, Human
ugaauguuuuugaacgaccaa

SEQ ID NO: 1009054 - RNA, 22 nt, Human
ugagacagagucucacucuguc

SEQ ID NO: 1009055 - RNA, 22 nt, Human
ugauauggggugggggaaagcu

SEQ ID NO: 1009056 - RNA, 24 nt, Human
ugauauggggugggggaaagcuga

SEQ ID NO: 1009057 - RNA, 18 nt, Human
ugaucacugcugaaaaga

SEQ ID NO: 1009058 - RNA, 19 nt, Human
ugccaggaaaaggucaccc

SEQ ID NO: 1009059 - RNA, 22 nt, Human
uggaaagaagacauaccuuagg

SEQ ID NO: 1009060 - RNA, 19 nt, Human
uggagugcaguggugugau

SEQ ID NO: 1009061 - RNA, 19 nt, Human
uggagugcaguggugugau

SEQ ID NO: 1009062 - RNA, 21 nt, Human
uggagugcaguggugugauca

SEQ ID NO: 1009063 - RNA, 28 nt, Human
uggagugcaguggugugauggcucuagc

SEQ ID NO: 1009064 - RNA, 20 nt, Human
uggcaggggaggggcagugg

SEQ ID NO: 1009065 - RNA, 24 nt, Human
ugggcucaagugauccucccaccu

SEQ ID NO: 1009066 - RNA, 24 nt, Human
uggugugaucacagcucacugcaa

SEQ ID NO: 1009067 - RNA, 27 nt, Human
ugucuuaccuucucuuagauccuucca

SEQ ID NO: 1009068 - RNA, 23 nt, Human
uguguuugauagauuacacacca

SEQ ID NO: 1009069 - RNA, 24 nt, Human
uguguuugauagauuacacaccau

SEQ ID NO: 1009070 - RNA, 21 nt, Human
uguucuuuuuaaugcacccaa

SEQ ID NO: 1009071 - RNA, 21 nt, Human
uucagaacucaaagcaacaga

SEQ ID NO: 1009072 - RNA, 23 nt, Human
uuccagaggagauacccuggucu

SEQ ID NO: 1009073 - RNA, 20 nt, Human
uuccaucaacgucaaacacc

SEQ ID NO: 1009074 - RNA, 24 nt, Human
uucuuaacacacaucucaugauaa

SEQ ID NO: 1009075 - RNA, 20 nt, Human
uugguuccuagaacuuccau

SEQ ID NO: 1009076 - RNA, 22 nt, Human
uuuugugaaguuauaaugauua

SEQ ID NO: 1009077 - RNA, 20 nt, Human
aaggugcugggauuacaggc

SEQ ID NO: 1009078 - RNA, 24 nt, Human
aaggugcugggauuacaggcguga

SEQ ID NO: 1009079 - RNA, 18 nt, Human
acaggguuucaccauguu

SEQ ID NO: 1009080 - RNA, 23 nt, Human
acaggguuucaccauguuggcca

SEQ ID NO: 1009081 - RNA, 24 nt, Human
acaggguuucaccauguuggccag

SEQ ID NO: 1009082 - RNA, 22 nt, Human
agagguucaaagagggaaaaug

SEQ ID NO: 1009083 - RNA, 20 nt, Human
agccaccgcacccagccuug

SEQ ID NO: 1009084 - RNA, 26 nt, Human
aggugcugggauuacaggcgugagcc

SEQ ID NO: 1009085 - RNA, 27 nt, Human
aguuuuguauuuguuuuaguagagaca

SEQ ID NO: 1009086 - RNA, 24 nt, Human
augaucugcccgccucagccuccc

SEQ ID NO: 1009087 - RNA, 24 nt, Human
caaggugcugggauuacaggcgug

SEQ ID NO: 1009088 - RNA, 18 nt, Human
caccauguuggccagggu

SEQ ID NO: 1009089 - RNA, 22 nt, Human
caccauguuggccagggugguc

SEQ ID NO: 1009090 - RNA, 23 nt, Human
caccauguuggccaggguggucu

SEQ ID NO: 1009091 - RNA, 24 nt, Human
caccauguuggccaggguggucuu

SEQ ID NO: 1009092 - RNA, 24 nt, Human
caggguuucaccauguuggccagg

SEQ ID NO: 1009093 - RNA, 22 nt, Human
ccaaggugcugggauuacaggc

SEQ ID NO: 1009094 - RNA, 22 nt, Human
ccaaggugcugggauuacaggc

SEQ ID NO: 1009095 - RNA, 24 nt, Human
ccaaggugcugggauuacaggcgu

SEQ ID NO: 1009096 - RNA, 24 nt, Human
ccgccucagccucccaaggugcug

SEQ ID NO: 1009097 - RNA, 22 nt, Human
ccuaagucacacuaaauguguu

SEQ ID NO: 1009098 - RNA, 23 nt, Human
cguaagaaauaauuugcucagau

SEQ ID NO: 1009099 - RNA, 18 nt, Human
cucaugaucugcccgccu

SEQ ID NO: 1009100 - RNA, 19 nt, Human
cugauuguucccuucaucu

SEQ ID NO: 1009101 - RNA, 24 nt, Human
cuucugaccucaugaucugcccgc

SEQ ID NO: 1009102 - RNA, 23 nt, Human
gagagguucaaagagggaaaaug

SEQ ID NO: 1009103 - RNA, 18 nt, Human
gauuacaggcgugagcca

SEQ ID NO: 1009104 - RNA, 20 nt, Human
gauuacaggcgugagccacc

SEQ ID NO: 1009105 - RNA, 23 nt, Human
gauuacaggcgugagccaccgca

SEQ ID NO: 1009106 - RNA, 23 nt, Human
gccucagccucccaaggugcugg

SEQ ID NO: 1009107 - RNA, 18 nt, Human
gggaaaauguuuucuuuc

SEQ ID NO: 1009108 - RNA, 18 nt, Human
gggucagauagguagccg

SEQ ID NO: 1009109 - RNA, 22 nt, Human
ggguuucaccauguuggccagg

SEQ ID NO: 1009110 - RNA, 18 nt, Human
ggugcugggauuacaggc

SEQ ID NO: 1009111 - RNA, 23 nt, Human
gguggucuuuaucuucugaccuc

SEQ ID NO: 1009112 - RNA, 21 nt, Human
gugcugggauuacaggcguga

SEQ ID NO: 1009113 - RNA, 20 nt, Human
guuuugauccugaccccacu

SEQ ID NO: 1009114 - RNA, 24 nt, Human
uacaggcgugagccaccgcaccca

SEQ ID NO: 1009115 - RNA, 22 nt, Human
uagagacaggguuucaccaugu

SEQ ID NO: 1009116 - RNA, 24 nt, Human
uaguagagacaggguuucaccaug

SEQ ID NO: 1009117 - RNA, 26 nt, Human
uaguagagacaggguuucaccauguu

SEQ ID NO: 1009118 - RNA, 24 nt, Human
ucaccauguuggccaggguggucu

SEQ ID NO: 1009119 - RNA, 24 nt, Human
ucccaaggugcugggauuacaggc

SEQ ID NO: 1009120 - RNA, 21 nt, Human
ucccuaagucacacuaaaugu

SEQ ID NO: 1009121 - RNA, 20 nt, Human
ucugcagcaggaccguggaa

SEQ ID NO: 1009122 - RNA, 21 nt, Human
ucugcccgccucagccuccca

SEQ ID NO: 1009123 - RNA, 24 nt, Human
ugcugggauuacaggcgugagcca

SEQ ID NO: 1009124 - RNA, 18 nt, Human
ugggauuacaggcgugag

SEQ ID NO: 1009125 - RNA, 19 nt, Human
ugggauuacaggcgugagc

SEQ ID NO: 1009126 - RNA, 21 nt, Human
ugggauuacaggcgugagcca

SEQ ID NO: 1009127 - RNA, 22 nt, Human
ugggauuacaggcgugagccac

SEQ ID NO: 1009128 - RNA, 23 nt, Human
ugggauuacaggcgugagccacc

SEQ ID NO: 1009129 - RNA, 24 nt, Human
ugggauuacaggcgugagccaccg

SEQ ID NO: 1009130 - RNA, 19 nt, Human
uguucccuucaucuggcuc

SEQ ID NO: 1009131 - RNA, 24 nt, Human
uuaguagagacaggguuucaccau

SEQ ID NO: 1009132 - RNA, 21 nt, Human
uucccuaagucacacuaaaug

SEQ ID NO: 1009133 - RNA, 21 nt, Human
uuggggucagauagguagccg

SEQ ID NO: 1009134 - RNA, 19 nt, Human
uuucaccauguuggccagg

SEQ ID NO: 1009135 - RNA, 23 nt, Human
uuuuaguagagacaggguuucac

SEQ ID NO: 1009136 - RNA, 21 nt, Human
augcuguguuuagggcugcca

SEQ ID NO: 1009137 - RNA, 20 nt, Human
caagauagacggcuuccuuc

SEQ ID NO: 1009138 - RNA, 18 nt, Human
caucccugaagaaugaca

SEQ ID NO: 1009139 - RNA, 23 nt, Human
ccacaagauagacggcuuccuuc

SEQ ID NO: 1009140 - RNA, 20 nt, Human
cugagcugacuaacagaugc

SEQ ID NO: 1009141 - RNA, 19 nt, Human
gcaaaacauagaggauuua

SEQ ID NO: 1009142 - RNA, 27 nt, Human
uaagauggguguuucugagcugacuaa

SEQ ID NO: 1009143 - RNA, 24 nt, Human
ucuuucaugagugaguagaugagu

SEQ ID NO: 1009144 - RNA, 22 nt, Human
ugagcugacuaacagaugcuua

SEQ ID NO: 1009145 - RNA, 20 nt, Human
ugaguagaugaguugccaug

SEQ ID NO: 1009146 - RNA, 22 nt, Human
ugagugaguagaugaguugcca

SEQ ID NO: 1009147 - RNA, 23 nt, Human
uuucugagcugacuaacagaugc

SEQ ID NO: 1009148 - RNA, 21 nt, Human
uuuuccagguaacaaugaaca

SEQ ID NO: 1009149 - RNA, 22 nt, Human
aaaaaacuugaaaauacgcaga

SEQ ID NO: 1009150 - RNA, 18 nt, Human
aaagaaaccaguaaauaa

SEQ ID NO: 1009151 - RNA, 21 nt, Human
aaauacaucccaucaagugua

SEQ ID NO: 1009152 - RNA, 26 nt, Human
aacaaaaaaaagccaaaaauacaucc

SEQ ID NO: 1009153 - RNA, 23 nt, Human
aacgacaacaaaaaaaagccaaa

SEQ ID NO: 1009154 - RNA, 29 nt, Human
aagauaaaaaaacuugaaaauacgcagaa

SEQ ID NO: 1009155 - RNA, 23 nt, Human
aagcaagcuucagaaugaaauuc

SEQ ID NO: 1009156 - RNA, 19 nt, Human
aggcaaaaucugcaguuuu

SEQ ID NO: 1009157 - RNA, 23 nt, Human
auacaucccaucaaguguacaau

SEQ ID NO: 1009158 - RNA, 24 nt, Human
augcaucuacgcuauuuuacauaa

SEQ ID NO: 1009159 - RNA, 26 nt, Human
caaaaaaaagccaaaaauacauccca

SEQ ID NO: 1009160 - RNA, 21 nt, Human
caaaguuucccaccacccccc

SEQ ID NO: 1009161 - RNA, 20 nt, Human
caaaugcagacuccugagcc

SEQ ID NO: 1009162 - RNA, 19 nt, Human
cacagcaagauaaaaaaac

SEQ ID NO: 1009163 - RNA, 22 nt, Human
cagaaugaaauuccaguuuguu

SEQ ID NO: 1009164 - RNA, 22 nt, Human
cagagauucacacaugccuucc

SEQ ID NO: 1009165 - RNA, 24 nt, Human
cagcuucacaaagaaaccaguaaa

SEQ ID NO: 1009166 - RNA, 21 nt, Human
caucugguucaguguuucuuc

SEQ ID NO: 1009167 - RNA, 18 nt, Human
cauuaaagcaagcuucag

SEQ ID NO: 1009168 - RNA, 25 nt, Human
ccaaaggccauuccaucugguucag

SEQ ID NO: 1009169 - RNA, 24 nt, Human
cccuccucgucgucugcuccaguc

SEQ ID NO: 1009170 - RNA, 20 nt, Human
ccggaaggcugagggccgcc

SEQ ID NO: 1009171 - RNA, 25 nt, Human
cggaaggcugagggccgccccauca

SEQ ID NO: 1009172 - RNA, 20 nt, Human
cucuucccuccucgucgucu

SEQ ID NO: 1009173 - RNA, 20 nt, Human
cugcuccaguccuggcuuuc

SEQ ID NO: 1009174 - RNA, 22 nt, Human
gacaacaaaaaaaagccaaaaa

SEQ ID NO: 1009175 - RNA, 25 nt, Human
gacaacaaaaaaaagccaaaaauac

SEQ ID NO: 1009176 - RNA, 27 nt, Human
gagcccacugcaggucucacccuucag

SEQ ID NO: 1009177 - RNA, 24 nt, Human
gagggccgccccaucagacugucg

SEQ ID NO: 1009178 - RNA, 20 nt, Human
gauucacacaugccuuccuc

SEQ ID NO: 1009179 - RNA, 18 nt, Human
gcaggccuuucccuuccu

SEQ ID NO: 1009180 - RNA, 25 nt, Human
gcuccacaaaaguuagcugagagaa

SEQ ID NO: 1009181 - RNA, 19 nt, Human
gcucuccacaguguggacu

SEQ ID NO: 1009182 - RNA, 21 nt, Human
ggaggggaggcuggagaugcc

SEQ ID NO: 1009183 - RNA, 22 nt, Human
ggaggggaggcuggagaugcca

SEQ ID NO: 1009184 - RNA, 21 nt, Human
ggcugagggccgccccaucag

SEQ ID NO: 1009185 - RNA, 21 nt, Human
ggggaggcccccucggucacc

SEQ ID NO: 1009186 - RNA, 18 nt, Human
uaaaaaaacuugaaaaua

SEQ ID NO: 1009187 - RNA, 22 nt, Human
uaacaauaacuccaguuccuau

SEQ ID NO: 1009188 - RNA, 19 nt, Human
uacaacaaauaccccucca

SEQ ID NO: 1009189 - RNA, 24 nt, Human
uacaacaaauaccccuccacggug

SEQ ID NO: 1009190 - RNA, 19 nt, Human
uaccccuccacggugcucu

SEQ ID NO: 1009191 - RNA, 23 nt, Human
uauuuuacauaaaaagagagauu

SEQ ID NO: 1009192 - RNA, 20 nt, Human
ucaaacucuucccuccucgu

SEQ ID NO: 1009193 - RNA, 19 nt, Human
ucaaagcucaauccagacg

SEQ ID NO: 1009194 - RNA, 22 nt, Human
ucacugagcacaagaugcaggc

SEQ ID NO: 1009195 - RNA, 22 nt, Human
ucagcgcugccuuguccagaga

SEQ ID NO: 1009196 - RNA, 18 nt, Human
ucagucccacugcugcuc

SEQ ID NO: 1009197 - RNA, 22 nt, Human
ucagucccacugcugcuccgga

SEQ ID NO: 1009198 - RNA, 21 nt, Human
uccacggugcucuggcccagg

SEQ ID NO: 1009199 - RNA, 19 nt, Human
uccagagauucacacaugc

SEQ ID NO: 1009200 - RNA, 26 nt, Human
uccccaaaggccauuccaucugguuc

SEQ ID NO: 1009201 - RNA, 20 nt, Human
ucuuguguccuaaaagugag

SEQ ID NO: 1009202 - RNA, 21 nt, Human
ugaaaacccuaugaaaaucaa

SEQ ID NO: 1009203 - RNA, 22 nt, Human
ugagaggaaacugaaaacccua

SEQ ID NO: 1009204 - RNA, 21 nt, Human
uggaggggaggcuggagaugc

SEQ ID NO: 1009205 - RNA, 18 nt, Human
uguccagagauucacaca

SEQ ID NO: 1009206 - RNA, 24 nt, Human
uguggacucuagagggaggggagg

SEQ ID NO: 1009207 - RNA, 18 nt, Human
uucccaccaccccccucu

SEQ ID NO: 1009208 - RNA, 20 nt, Human
uuucuuuaaacgacaacaaa

SEQ ID NO: 1009209 - RNA, 21 nt, Human
uuugggaacagggcuccacaa

SEQ ID NO: 1009210 - RNA, 22 nt, Human
cagcaauaagaacgguugguag

SEQ ID NO: 1009211 - RNA, 19 nt, Human
gguaggaaccgcggcuucc

SEQ ID NO: 1009212 - RNA, 22 nt, Human
ucaggccgccagcaauaagaac

SEQ ID NO: 1009213 - RNA, 21 nt, Human
aagaaggccucuucaucagcc

SEQ ID NO: 1009214 - RNA, 24 nt, Human
aggggaguaauggcaauuaauuag

SEQ ID NO: 1009215 - RNA, 21 nt, Human
agguuucuugaacagcaguuu

SEQ ID NO: 1009216 - RNA, 21 nt, Human
cagguucuaagucaaaagucu

SEQ ID NO: 1009217 - RNA, 19 nt, Human
gugcauauuaaaaaacaaa

SEQ ID NO: 1009218 - RNA, 26 nt, Human
uaaaaaacaaaggcacguuuccuaga

SEQ ID NO: 1009219 - RNA, 19 nt, Human
uaacaguagguaagcuuga

SEQ ID NO: 1009220 - RNA, 21 nt, Human
uaacaguagguaagcuugaua

SEQ ID NO: 1009221 - RNA, 24 nt, Human
uagcagguucuaagucaaaagucu

SEQ ID NO: 1009222 - RNA, 23 nt, Human
ucuaagucaaaagucuugaagag

SEQ ID NO: 1009223 - RNA, 23 nt, Human
ucuguaaaggcacugugcaaaau

SEQ ID NO: 1009224 - RNA, 18 nt, Human
ugauaauauagcagguuc

SEQ ID NO: 1009225 - RNA, 21 nt, Human
uggcaauuaauuagugacaac

SEQ ID NO: 1009226 - RNA, 21 nt, Human
uguggacggggccggccuucu

SEQ ID NO: 1009227 - RNA, 24 nt, Human
uuacauuaacacaaaaaaaauuuu

SEQ ID NO: 1009228 - RNA, 20 nt, Human
uugauaauauagcagguucu

SEQ ID NO: 1009229 - RNA, 19 nt, Human
uuggcagcugcggcgcuuu

SEQ ID NO: 1009230 - RNA, 21 nt, Human
uuuagagauaacaguagguaa

SEQ ID NO: 1009231 - RNA, 18 nt, Human
aaaggaacuauauuucug

SEQ ID NO: 1009232 - RNA, 19 nt, Human
aaaguuauauacacauagg

SEQ ID NO: 1009233 - RNA, 20 nt, Human
aacauuuuguuagaaaggga

SEQ ID NO: 1009234 - RNA, 19 nt, Human
aggcuaguucucuuugccu

SEQ ID NO: 1009235 - RNA, 19 nt, Human
aggcucccggggaacuccc

SEQ ID NO: 1009236 - RNA, 27 nt, Human
caaaacaacuguaauaugaaaggaacc

SEQ ID NO: 1009237 - RNA, 20 nt, Human
caaaguaucuuuugcuucuc

SEQ ID NO: 1009238 - RNA, 22 nt, Human
cagcagcgccuccgcucaucga

SEQ ID NO: 1009239 - RNA, 19 nt, Human
caggauagucaccaccuga

SEQ ID NO: 1009240 - RNA, 23 nt, Human
ccggcgucggccgcagcgccgca

SEQ ID NO: 1009241 - RNA, 19 nt, Human
ccugaggcucccggggaac

SEQ ID NO: 1009242 - RNA, 25 nt, Human
cgagguaagaagcugggagggggag

SEQ ID NO: 1009243 - RNA, 18 nt, Human
cucaacaggauagucacc

SEQ ID NO: 1009244 - RNA, 19 nt, Human
cucccggcagcucucccgg

SEQ ID NO: 1009245 - RNA, 21 nt, Human
cucccgggcuggcggugcugg

SEQ ID NO: 1009246 - RNA, 22 nt, Human
cugggagggggagacaguuggu

SEQ ID NO: 1009247 - RNA, 23 nt, Human
gagacaguuggugcggacccggc

SEQ ID NO: 1009248 - RNA, 22 nt, Human
ggaaggaguaggaagccgaggu

SEQ ID NO: 1009249 - RNA, 24 nt, Human
guuucauuuaaauuaugcagcaau

SEQ ID NO: 1009250 - RNA, 19 nt, Human
uauggaaaaauagaggcua

SEQ ID NO: 1009251 - RNA, 19 nt, Human
uccugacccccagcaugac

SEQ ID NO: 1009252 - RNA, 21 nt, Human
ucuuucagcauauaauuuggu

SEQ ID NO: 1009253 - RNA, 19 nt, Human
ugaaaggaacuauauuucu

SEQ ID NO: 1009254 - RNA, 23 nt, Human
ugacccccagcaugacccgcucc

SEQ ID NO: 1009255 - RNA, 19 nt, Human
ugacccgcucccuaaugca

SEQ ID NO: 1009256 - RNA, 20 nt, Human
uggcggugcugggcgggcgg

SEQ ID NO: 1009257 - RNA, 23 nt, Human
uuaaaagaacauuuuguuagaaa

SEQ ID NO: 1009258 - RNA, 24 nt, Human
uuacuggaauguuuuuaguuauac

SEQ ID NO: 1009259 - RNA, 18 nt, Human
uuggugcggacccggcgu

SEQ ID NO: 1009260 - RNA, 25 nt, Human
uuugccuuaaacauaauuauuaaaa

SEQ ID NO: 1009261 - RNA, 26 nt, Human
aaacagaauaaagauguguccccugg

SEQ ID NO: 1009262 - RNA, 25 nt, Human
aaugaagaagaauuuuuaaaaaaga

SEQ ID NO: 1009263 - RNA, 18 nt, Human
agccacaaauauagaacu

SEQ ID NO: 1009264 - RNA, 22 nt, Human
cgaggcucccaagaagcaccag

SEQ ID NO: 1009265 - RNA, 22 nt, Human
gaagaagaauuuuuaaaaaaga

SEQ ID NO: 1009266 - RNA, 24 nt, Human
gggcugaccagaagcaacggggga

SEQ ID NO: 1009267 - RNA, 20 nt, Human
guaacagaagcuccaaggaa

SEQ ID NO: 1009268 - RNA, 19 nt, Human
gugucgugacugguuuccu

SEQ ID NO: 1009269 - RNA, 21 nt, Human
uaacauacacaaauacauaug

SEQ ID NO: 1009270 - RNA, 28 nt, Human
uaacauacacaaauacauauguggaagg

SEQ ID NO: 1009271 - RNA, 23 nt, Human
uaauaaagccacaaauauagaac

SEQ ID NO: 1009272 - RNA, 19 nt, Human
uacacaaauacauaugugg

SEQ ID NO: 1009273 - RNA, 20 nt, Human
ugacugguuuccugaaacag

SEQ ID NO: 1009274 - RNA, 21 nt, Human
uggcuucuugagaagucccuc

SEQ ID NO: 1009275 - RNA, 20 nt, Human
uuccugaaacagaauaaaga

SEQ ID NO: 1009276 - RNA, 23 nt, Human
aaaacaaauguacugcaagaccc

SEQ ID NO: 1009277 - RNA, 19 nt, Human
aaacaaauguacugcaaga

SEQ ID NO: 1009278 - RNA, 19 nt, Human
aagaguacacuuugaggug

SEQ ID NO: 1009279 - RNA, 20 nt, Human
acaaaaguccacugacccuc

SEQ ID NO: 1009280 - RNA, 20 nt, Human
acaaauguacugcaagaccc

SEQ ID NO: 1009281 - RNA, 19 nt, Human
accauauuacacaagggcu

SEQ ID NO: 1009282 - RNA, 21 nt, Human
agaaaucucagcauuaagacu

SEQ ID NO: 1009283 - RNA, 21 nt, Human
agaaaucucagcauuaagacu

SEQ ID NO: 1009284 - RNA, 19 nt, Human
agacaaaacauucccgaga

SEQ ID NO: 1009285 - RNA, 18 nt, Human
aggcuacaccugcuucau

SEQ ID NO: 1009286 - RNA, 23 nt, Human
aggcugcucccuccauaacaaag

SEQ ID NO: 1009287 - RNA, 21 nt, Human
agggauagcucacuuaugaug

SEQ ID NO: 1009288 - RNA, 18 nt, Human
auaagacuuuacaggaaa

SEQ ID NO: 1009289 - RNA, 19 nt, Human
auacacucccaggaugggc

SEQ ID NO: 1009290 - RNA, 23 nt, Human
augcuacaauaccauccacagga

SEQ ID NO: 1009291 - RNA, 23 nt, Human
augggcugcagagggggagacuc

SEQ ID NO: 1009292 - RNA, 22 nt, Human
caaaacaaauguacugcaagac

SEQ ID NO: 1009293 - RNA, 23 nt, Human
caaaacaaauguacugcaagacc

SEQ ID NO: 1009294 - RNA, 25 nt, Human
caaaacaaauguacugcaagaccca

SEQ ID NO: 1009295 - RNA, 20 nt, Human
caaaacauucccgagacaga

SEQ ID NO: 1009296 - RNA, 23 nt, Human
caaaccugagcacuggccucaua

SEQ ID NO: 1009297 - RNA, 19 nt, Human
caaauauaaucaggacacc

SEQ ID NO: 1009298 - RNA, 19 nt, Human
caccauauuacacaagggc

SEQ ID NO: 1009299 - RNA, 21 nt, Human
cagacaaaacauucccgagac

SEQ ID NO: 1009300 - RNA, 23 nt, Human
cagacggauugaugagagggcag

SEQ ID NO: 1009301 - RNA, 18 nt, Human
caggaaagggccaaguua

SEQ ID NO: 1009302 - RNA, 28 nt, Human
caggcuguuucuugcacagcucuaggcc

SEQ ID NO: 1009303 - RNA, 25 nt, Human
ccacugaaccuugaguucuggcacc

SEQ ID NO: 1009304 - RNA, 22 nt, Human
ccacugacccucuuucuguccc

SEQ ID NO: 1009305 - RNA, 18 nt, Human
ccaggcccaugaaaugca

SEQ ID NO: 1009306 - RNA, 22 nt, Human
cccacaaaaguccacugacccu

SEQ ID NO: 1009307 - RNA, 22 nt, Human
cccaggaagaauguauuuaggc

SEQ ID NO: 1009308 - RNA, 19 nt, Human
cccaggaugggcugcagag

SEQ ID NO: 1009309 - RNA, 20 nt, Human
ccuaauauaccuagcccaga

SEQ ID NO: 1009310 - RNA, 22 nt, Human
ccuagaugaaaaguccuagccc

SEQ ID NO: 1009311 - RNA, 22 nt, Human
ccuuccaaaauccucaacaaag

SEQ ID NO: 1009312 - RNA, 18 nt, Human
ccuugaguucuggcaccc

SEQ ID NO: 1009313 - RNA, 18 nt, Human
cgcggcugggccggggcg

SEQ ID NO: 1009314 - RNA, 24 nt, Human
cgggacgcggcugggccggggcgg

SEQ ID NO: 1009315 - RNA, 25 nt, Human
cuccaauauccucugcuaggaaacc

SEQ ID NO: 1009316 - RNA, 20 nt, Human
cuccgggacgcggcugggcc

SEQ ID NO: 1009317 - RNA, 25 nt, Human
cugaccagaagaaguaaagggaagc

SEQ ID NO: 1009318 - RNA, 20 nt, Human
cugacccucuuucuguccca

SEQ ID NO: 1009319 - RNA, 23 nt, Human
cugcaagacccaucuucccucca

SEQ ID NO: 1009320 - RNA, 20 nt, Human
gaagaaguaaagggaagcac

SEQ ID NO: 1009321 - RNA, 20 nt, Human
gaagguugugaagguuuaau

SEQ ID NO: 1009322 - RNA, 21 nt, Human
gacaaaacauucccgagacag

SEQ ID NO: 1009323 - RNA, 18 nt, Human
gcaagacccaucuucccu

SEQ ID NO: 1009324 - RNA, 20 nt, Human
ggaaaacauuuacuucuguc

SEQ ID NO: 1009325 - RNA, 20 nt, Human
ggaaagaauccauuccaaga

SEQ ID NO: 1009326 - RNA, 23 nt, Human
ggaggggcuaaggagggaggaug

SEQ ID NO: 1009327 - RNA, 22 nt, Human
ggcaaaacaaauguacugcaag

SEQ ID NO: 1009328 - RNA, 18 nt, Human
ggccggggcgggcggcaa

SEQ ID NO: 1009329 - RNA, 19 nt, Human
gguuuugcccuggucccug

SEQ ID NO: 1009330 - RNA, 22 nt, Human
gucccugacaaugacagacugg

SEQ ID NO: 1009331 - RNA, 23 nt, Human
guccuagcccaugagggucucua

SEQ ID NO: 1009332 - RNA, 21 nt, Human
guuucuguaaacaaugccagc

SEQ ID NO: 1009333 - RNA, 22 nt, Human
uaaaaguguuugccgggcaaug

SEQ ID NO: 1009334 - RNA, 22 nt, Human
uaaagggaagcacgaaccaaug

SEQ ID NO: 1009335 - RNA, 21 nt, Human
uaaggagggaggauguugaac

SEQ ID NO: 1009336 - RNA, 24 nt, Human
uaauucacgaugcugugcaggcuu

SEQ ID NO: 1009337 - RNA, 22 nt, Human
uaggaaacccccaggcccauga

SEQ ID NO: 1009338 - RNA, 21 nt, Human
uaggaggggcuaaggagggag

SEQ ID NO: 1009339 - RNA, 23 nt, Human
uaggcaagccauuaaucugucag

SEQ ID NO: 1009340 - RNA, 19 nt, Human
uauaaucaggacaccaaau

SEQ ID NO: 1009341 - RNA, 19 nt, Human
uccaagaaaaugugggaau

SEQ ID NO: 1009342 - RNA, 23 nt, Human
uccaauauccucugcuaggaaac

SEQ ID NO: 1009343 - RNA, 23 nt, Human
ucccagaaaugaauaaaggaccc

SEQ ID NO: 1009344 - RNA, 19 nt, Human
ucugaccagaagaaguaaa

SEQ ID NO: 1009345 - RNA, 23 nt, Human
ucugcagcauuuaaauuuuccaa

SEQ ID NO: 1009346 - RNA, 18 nt, Human
ucugcuaggaaaccccca

SEQ ID NO: 1009347 - RNA, 23 nt, Human
ugaaaaguccuagcccaugaggg

SEQ ID NO: 1009348 - RNA, 21 nt, Human
ugaaaugcaacaggaagacua

SEQ ID NO: 1009349 - RNA, 21 nt, Human
ugaagguuuaauaugaagaca

SEQ ID NO: 1009350 - RNA, 23 nt, Human
ugacggcaacagacaaaacauuc

SEQ ID NO: 1009351 - RNA, 21 nt, Human
ugagaauaaagcaaaagugua

SEQ ID NO: 1009352 - RNA, 24 nt, Human
ugagagaagcuggaggcccacaaa

SEQ ID NO: 1009353 - RNA, 19 nt, Human
ugaggguaaaaguguuugc

SEQ ID NO: 1009354 - RNA, 24 nt, Human
ugagguaaaggucuugaaucuauc

SEQ ID NO: 1009355 - RNA, 23 nt, Human
ugauggcugggcaaaacaaaugu

SEQ ID NO: 1009356 - RNA, 18 nt, Human
ugcagggugcaacacggg

SEQ ID NO: 1009357 - RNA, 21 nt, Human
ugcauacaggcaagacaaagu

SEQ ID NO: 1009358 - RNA, 24 nt, Human
ugcauacaggcaagacaaaguaua

SEQ ID NO: 1009359 - RNA, 27 nt, Human
ugcuaggaaacccccaggcccaugaaa

SEQ ID NO: 1009360 - RNA, 23 nt, Human
uggcaacuaccccuaauauaccu

SEQ ID NO: 1009361 - RNA, 31 nt, Human
uggcaggcuguuucuugcacagcucuaggcc

SEQ ID NO: 1009362 - RNA, 25 nt, Human
ugggaagaacagcucuugguuuugc

SEQ ID NO: 1009363 - RNA, 25 nt, Human
ugguaaugucacaaaaaggggcucc

SEQ ID NO: 1009364 - RNA, 25 nt, Human
ugucaguaccagcaucuuuagaaau

SEQ ID NO: 1009365 - RNA, 24 nt, Human
ugugugugugcgggggagguggau

SEQ ID NO: 1009366 - RNA, 18 nt, Human
uucugcuucuuuguacca

SEQ ID NO: 1009367 - RNA, 21 nt, Human
uugaugagagggcaggcuaca

SEQ ID NO: 1009368 - RNA, 21 nt, Human
uugguaaugucacaaaaaggg

SEQ ID NO: 1009369 - RNA, 22 nt, Human
uuuacaaaauaauacaaaguga

SEQ ID NO: 1009370 - RNA, 23 nt, Human
uuuaucccuucucugaaauuuuu

SEQ ID NO: 1009371 - RNA, 22 nt, Human
uuugugugcuuuuuucaccuuu

SEQ ID NO: 1009372 - RNA, 22 nt, Human
aauggcaagcaccccgcuggug

SEQ ID NO: 1009373 - RNA, 21 nt, Human
agaauggcaagcaccccgcug

SEQ ID NO: 1009374 - RNA, 19 nt, Human
cgacuaacuccaggcugcc

SEQ ID NO: 1009375 - RNA, 22 nt, Human
ucuucagaauggcaagcacccc

SEQ ID NO: 1009376 - RNA, 19 nt, Human
ugagaucucugaggucugg

SEQ ID NO: 1009377 - RNA, 19 nt, Human
uggugagaucucugagguc

SEQ ID NO: 1009378 - RNA, 22 nt, Human
uucagaauggcaagcaccccgc

SEQ ID NO: 1009379 - RNA, 24 nt, Human
uuuucaauuugcaacacauucauu

SEQ ID NO: 1009380 - RNA, 22 nt, Human
aauggcaagcaccccgcuggug

SEQ ID NO: 1009381 - RNA, 21 nt, Human
agaauggcaagcaccccgcug

SEQ ID NO: 1009382 - RNA, 22 nt, Human
ggagauaggggaguagcuggcc

SEQ ID NO: 1009383 - RNA, 22 nt, Human
ucuucagaauggcaagcacccc

SEQ ID NO: 1009384 - RNA, 19 nt, Human
ugagaucucugaggucugg

SEQ ID NO: 1009385 - RNA, 19 nt, Human
uggugagaucucugagguc

SEQ ID NO: 1009386 - RNA, 22 nt, Human
uucagaauggcaagcaccccgc

SEQ ID NO: 1009387 - RNA, 24 nt, Human
uuuucaauuugcaacacauucauu

SEQ ID NO: 1009388 - RNA, 23 nt, Human
acaauaucaccuggguguugagc

SEQ ID NO: 1009389 - RNA, 19 nt, Human
agaagugucagcuuuaugc

SEQ ID NO: 1009390 - RNA, 23 nt, Human
cagaagaguaacaucauccaggu

SEQ ID NO: 1009391 - RNA, 20 nt, Human
cagacuccagaauaaagagg

SEQ ID NO: 1009392 - RNA, 20 nt, Human
cagacuccagaauaaagagg

SEQ ID NO: 1009393 - RNA, 21 nt, Human
ccuuugaaggcagagccacga

SEQ ID NO: 1009394 - RNA, 21 nt, Human
ccuuugaaggcagagccacga

SEQ ID NO: 1009395 - RNA, 22 nt, Human
cgcugggagugucauaauacug

SEQ ID NO: 1009396 - RNA, 22 nt, Human
cgcugggagugucauaauacug

SEQ ID NO: 1009397 - RNA, 18 nt, Human
cucaaagauuaugucacc

SEQ ID NO: 1009398 - RNA, 18 nt, Human
gaaggcugggcauaguca

SEQ ID NO: 1009399 - RNA, 18 nt, Human
gaccuaggcagaagaguu

SEQ ID NO: 1009400 - RNA, 23 nt, Human
gagaguugcauuacccaguuuuu

SEQ ID NO: 1009401 - RNA, 23 nt, Human
gagaguugcauuacccaguuuuu

SEQ ID NO: 1009402 - RNA, 20 nt, Human
gcccauaucacaugguccug

SEQ ID NO: 1009403 - RNA, 18 nt, Human
guuguaucauugcauggu

SEQ ID NO: 1009404 - RNA, 18 nt, Human
guuguauuauugcauggu

SEQ ID NO: 1009405 - RNA, 20 nt, Human
uacccaguuuuugcagucag

SEQ ID NO: 1009406 - RNA, 20 nt, Human
uacccaguuuuugcagucag

SEQ ID NO: 1009407 - RNA, 23 nt, Human
uaccugggugcuggacuccgcaa

SEQ ID NO: 1009408 - RNA, 23 nt, Human
uaccugggugcuggacuccgcaa

SEQ ID NO: 1009409 - RNA, 20 nt, Human
ucaccaagcacacuucugug

SEQ ID NO: 1009410 - RNA, 25 nt, Human
uccacauauggcacaauuacuucug

SEQ ID NO: 1009411 - RNA, 18 nt, Human
uccagaauaaagaggaga

SEQ ID NO: 1009412 - RNA, 18 nt, Human
uccagaauaaagaggaga

SEQ ID NO: 1009413 - RNA, 20 nt, Human
ucccuuugaaggcagagcca

SEQ ID NO: 1009414 - RNA, 20 nt, Human
ucccuuugaaggcagagcca

SEQ ID NO: 1009415 - RNA, 19 nt, Human
ugaagcuggguauaugaca

SEQ ID NO: 1009416 - RNA, 19 nt, Human
ugaagcuggguauaugaca

SEQ ID NO: 1009417 - RNA, 21 nt, Human
uggaacaauaucaccugggug

SEQ ID NO: 1009418 - RNA, 20 nt, Human
uggcagacuccagaauaaag

SEQ ID NO: 1009419 - RNA, 20 nt, Human
uggcagacuccagaauaaag

SEQ ID NO: 1009420 - RNA, 20 nt, Human
uuacccaguuuuugcaguca

SEQ ID NO: 1009421 - RNA, 20 nt, Human
uuacccaguuuuugcaguca

SEQ ID NO: 1009422 - RNA, 22 nt, Human
uuacccaguuuuugcagucagc

SEQ ID NO: 1009423 - RNA, 22 nt, Human
uuacccaguuuuugcagucagc

SEQ ID NO: 1009424 - RNA, 20 nt, Human
uuggguccagguaugauagu

SEQ ID NO: 1009425 - RNA, 20 nt, Human
uuggguccagguaugauagu

SEQ ID NO: 1009426 - RNA, 24 nt, Human
uuggugaugugacagccucaaaga

SEQ ID NO: 1009427 - RNA, 24 nt, Human
aagaacuccucauccaccaggugg

SEQ ID NO: 1009428 - RNA, 21 nt, Human
acaggggugcccggccucccu

SEQ ID NO: 1009429 - RNA, 19 nt, Human
accuugcaggccgggaagg

SEQ ID NO: 1009430 - RNA, 18 nt, Human
caccgugaugcccagcgc

SEQ ID NO: 1009431 - RNA, 20 nt, Human
cacugaugacguagcagagc

SEQ ID NO: 1009432 - RNA, 18 nt, Human
caggggugcccggccucc

SEQ ID NO: 1009433 - RNA, 20 nt, Human
cagggucaccugcaggucac

SEQ ID NO: 1009434 - RNA, 19 nt, Human
ccaccgagucgaaaguggg

SEQ ID NO: 1009435 - RNA, 23 nt, Human
ccggcugcuggcugaccccgacg

SEQ ID NO: 1009436 - RNA, 24 nt, Human
ccugcaggucacggucccaaugcu

SEQ ID NO: 1009437 - RNA, 21 nt, Human
ccuggugccgggcgugcgucu

SEQ ID NO: 1009438 - RNA, 19 nt, Human
ccuugcgcugguccuggcc

SEQ ID NO: 1009439 - RNA, 20 nt, Human
cgcugggcagguaggccagg

SEQ ID NO: 1009440 - RNA, 22 nt, Human
cgggcugggcugaguggggggc

SEQ ID NO: 1009441 - RNA, 22 nt, Human
cguagcagagcgcgcgcacgcg

SEQ ID NO: 1009442 - RNA, 18 nt, Human
cugcuggcugaccccgac

SEQ ID NO: 1009443 - RNA, 27 nt, Human
gauguggcugaaucuagggacaggcgg

SEQ ID NO: 1009444 - RNA, 21 nt, Human
gcccaacaccgugaugcccag

SEQ ID NO: 1009445 - RNA, 21 nt, Human
gcgcacgcgcuggaagaacuc

SEQ ID NO: 1009446 - RNA, 18 nt, Human
gggccucgaguggcaguc

SEQ ID NO: 1009447 - RNA, 19 nt, Human
gggcugggcugaguggggg

SEQ ID NO: 1009448 - RNA, 21 nt, Human
ggugggguggcugacaccccg

SEQ ID NO: 1009449 - RNA, 23 nt, Human
ggugggguggcugacaccccggg

SEQ ID NO: 1009450 - RNA, 22 nt, Human
guggcugacaccccgggccggc

SEQ ID NO: 1009451 - RNA, 19 nt, Human
gugggguggcugacacccc

SEQ ID NO: 1009452 - RNA, 22 nt, Human
ucggcgauggggcuagaacucc

SEQ ID NO: 1009453 - RNA, 22 nt, Human
ucuggacaggggugcccggccu

SEQ ID NO: 1009454 - RNA, 23 nt, Human
ugaggacuuucuggacaggggug

SEQ ID NO: 1009455 - RNA, 23 nt, Human
uggcugaccccgacgggccucga

SEQ ID NO: 1009456 - RNA, 19 nt, Human
ugggcagguaggccagguc

SEQ ID NO: 1009457 - RNA, 23 nt, Human
uggggaucagggucaccugcagg

SEQ ID NO: 1009458 - RNA, 23 nt, Human
uggggggcgugucggcgaugggg

SEQ ID NO: 1009459 - RNA, 27 nt, Human
aaagagcacguagcaugccagcaccau

SEQ ID NO: 1009460 - RNA, 19 nt, Human
accaaagaccuccaccccg

SEQ ID NO: 1009461 - RNA, 20 nt, Human
acuucagaacugaacugaaa

SEQ ID NO: 1009462 - RNA, 28 nt, Human
agaaaaaucucucucaggcucuuaugaa

SEQ ID NO: 1009463 - RNA, 21 nt, Human
agaaguuucuuguccuucacu

SEQ ID NO: 1009464 - RNA, 24 nt, Human
aggauucagcaacgauugagauug

SEQ ID NO: 1009465 - RNA, 19 nt, Human
augaaaccaaagaccucca

SEQ ID NO: 1009466 - RNA, 20 nt, Human
auguacaaacugguggguca

SEQ ID NO: 1009467 - RNA, 18 nt, Human
caaaaccaaagauuccac

SEQ ID NO: 1009468 - RNA, 22 nt, Human
cagcucccccaguuugaccucc

SEQ ID NO: 1009469 - RNA, 22 nt, Human
cauuucucuucacuuccaggga

SEQ ID NO: 1009470 - RNA, 20 nt, Human
ccaaaacauaguggguucau

SEQ ID NO: 1009471 - RNA, 21 nt, Human
ccacuaggacugaagucccgc

SEQ ID NO: 1009472 - RNA, 25 nt, Human
ccagaaguuucuuguccuucacugg

SEQ ID NO: 1009473 - RNA, 20 nt, Human
ccaguuugaccuccagaagu

SEQ ID NO: 1009474 - RNA, 23 nt, Human
ccgguaguaaccucuuugaaacg

SEQ ID NO: 1009475 - RNA, 21 nt, Human
cgagggccugucucugcuccg

SEQ ID NO: 1009476 - RNA, 21 nt, Human
cgcuccgaaaaugccacuagg

SEQ ID NO: 1009477 - RNA, 18 nt, Human
cugaacugaaacguggca

SEQ ID NO: 1009478 - RNA, 24 nt, Human
cugucgcugaggaacacauuuaau

SEQ ID NO: 1009479 - RNA, 18 nt, Human
cugucucugcuccgccuc

SEQ ID NO: 1009480 - RNA, 21 nt, Human
gaaaaugccacuaggacugaa

SEQ ID NO: 1009481 - RNA, 19 nt, Human
gaaacgcuccgaaaaugcc

SEQ ID NO: 1009482 - RNA, 21 nt, Human
gagaugcuccccuucuucaca

SEQ ID NO: 1009483 - RNA, 20 nt, Human
gaguuuuuuuuuuuuuuuuu

SEQ ID NO: 1009484 - RNA, 22 nt, Human
gaguuuuuuuuuuuuuuuuuuu

SEQ ID NO: 1009485 - RNA, 22 nt, Human
gcaucaagauccagcuuggcag

SEQ ID NO: 1009486 - RNA, 21 nt, Human
gcucuuaugaaaccaaagacu

SEQ ID NO: 1009487 - RNA, 22 nt, Human
gucguggggugggggggugcag

SEQ ID NO: 1009488 - RNA, 24 nt, Human
gugauguacaaacuggugggucag

SEQ ID NO: 1009489 - RNA, 21 nt, Human
uagcuaaagagcacguagcau

SEQ ID NO: 1009490 - RNA, 22 nt, Human
uaggaaaaggaguagcuaaaga

SEQ ID NO: 1009491 - RNA, 24 nt, Human
uaguggguucauuucucuucacuu

SEQ ID NO: 1009492 - RNA, 19 nt, Human
uaugaaaccaaagaccucc

SEQ ID NO: 1009493 - RNA, 20 nt, Human
uaugaaaggauucagcaacg

SEQ ID NO: 1009494 - RNA, 19 nt, Human
uauuuuacuaugaugcaaa

SEQ ID NO: 1009495 - RNA, 22 nt, Human
ucaagauccagcuuggcagcuc

SEQ ID NO: 1009496 - RNA, 23 nt, Human
ucaggcucuuaugaaaccaaaga

SEQ ID NO: 1009497 - RNA, 19 nt, Human
ucagugguauuugcggagc

SEQ ID NO: 1009498 - RNA, 20 nt, Human
uccacuauagcacagagacu

SEQ ID NO: 1009499 - RNA, 25 nt, Human
ucccucaggagggauucgcaacccc

SEQ ID NO: 1009500 - RNA, 22 nt, Human
ucucucucaggcucuuaugaaa

SEQ ID NO: 1009501 - RNA, 22 nt, Human
ucuuuggaagaauaaaaaguuc

SEQ ID NO: 1009502 - RNA, 22 nt, Human
ugaaacgcuccgaaaaugccac

SEQ ID NO: 1009503 - RNA, 23 nt, Human
ugaaacguggcacaaacaugaca

SEQ ID NO: 1009504 - RNA, 21 nt, Human
ugaaaggauucagcaacgauu

SEQ ID NO: 1009505 - RNA, 26 nt, Human
ugacgccauugagagagagagacuag

SEQ ID NO: 1009506 - RNA, 19 nt, Human
ugcaaaaccaaagauucca

SEQ ID NO: 1009507 - RNA, 21 nt, Human
ugccuucaagcaucucccuca

SEQ ID NO: 1009508 - RNA, 18 nt, Human
uggcacaaacaugacaac

SEQ ID NO: 1009509 - RNA, 28 nt, Human
uggggccggacacucaccaacugacgcc

SEQ ID NO: 1009510 - RNA, 20 nt, Human
uggggugggggggugcagag

SEQ ID NO: 1009511 - RNA, 19 nt, Human
uggugugggacaugcagga

SEQ ID NO: 1009512 - RNA, 21 nt, Human
uggugugggacaugcaggacg

SEQ ID NO: 1009513 - RNA, 23 nt, Human
uguuccaaaugugauggguuuau

SEQ ID NO: 1009514 - RNA, 26 nt, Human
uuaaggccaaaacauaguggguucau

SEQ ID NO: 1009515 - RNA, 22 nt, Human
uucacagaagaauuuuaaggcc

SEQ ID NO: 1009516 - RNA, 18 nt, Human
uuucuuguccuucacugg

SEQ ID NO: 1009517 - RNA, 20 nt, Human
uuuuuuuuuuuuuuuuucac

SEQ ID NO: 1009518 - RNA, 22 nt, Human
uuuuuuuuuuuuuuuuucacgu

SEQ ID NO: 1009519 - RNA, 23 nt, Human
aaaaaguuuucaaagcaaaagua

SEQ ID NO: 1009520 - RNA, 24 nt, Human
aacaaagccaucaugagguaacca

SEQ ID NO: 1009521 - RNA, 22 nt, Human
aacaccacagcacuccagccug

SEQ ID NO: 1009522 - RNA, 19 nt, Human
aacauggugaaaccccauc

SEQ ID NO: 1009523 - RNA, 20 nt, Human
aacauggugaaaccccaucu

SEQ ID NO: 1009524 - RNA, 21 nt, Human
aacauggugaaaccccaucuc

SEQ ID NO: 1009525 - RNA, 21 nt, Human
aacauggugaaaccccaucuc

SEQ ID NO: 1009526 - RNA, 23 nt, Human
aagcaaauaaacacgcuuuuagg

SEQ ID NO: 1009527 - RNA, 18 nt, Human
aagugcccuaaaacuaac

SEQ ID NO: 1009528 - RNA, 24 nt, Human
aaucgcuugaacccaggaggugga

SEQ ID NO: 1009529 - RNA, 23 nt, Human
acaaagcaagacucugucucaaa

SEQ ID NO: 1009530 - RNA, 24 nt, Human
acaaagcaagacucugucucaaaa

SEQ ID NO: 1009531 - RNA, 22 nt, Human
acaccacagcacuccagccugg

SEQ ID NO: 1009532 - RNA, 18 nt, Human
acagcacuccagccuggg

SEQ ID NO: 1009533 - RNA, 23 nt, Human
acagcacuccagccugggugaca

SEQ ID NO: 1009534 - RNA, 24 nt, Human
accacagcacuccagccuggguga

SEQ ID NO: 1009535 - RNA, 24 nt, Human
acccaggagguggaggcugcagug

SEQ ID NO: 1009536 - RNA, 23 nt, Human
accccaucucuacuaaaauacaa

SEQ ID NO: 1009537 - RNA, 24 nt, Human
accugaggucaggaguuugagacu

SEQ ID NO: 1009538 - RNA, 24 nt, Human
acuaaaauacaaaaauuagccggu

SEQ ID NO: 1009539 - RNA, 23 nt, Human
agcaaauaaacacgcuuuuagga

SEQ ID NO: 1009540 - RNA, 24 nt, Human
agcacuuugggaggccgagguggg

SEQ ID NO: 1009541 - RNA, 23 nt, Human
agccgggcaugguggcaggugcc

SEQ ID NO: 1009542 - RNA, 22 nt, Human
agccuggccaacauggugaaac

SEQ ID NO: 1009543 - RNA, 24 nt, Human
agccuggccaacauggugaaaccc

SEQ ID NO: 1009544 - RNA, 24 nt, Human
agccugggugacaaagcaagacuc

SEQ ID NO: 1009545 - RNA, 24 nt, Human
agcucgaccaacaacggccugcag

SEQ ID NO: 1009546 - RNA, 21 nt, Human
agcugccccaaaccaaaacaa

SEQ ID NO: 1009547 - RNA, 25 nt, Human
agcuggugacagcugccccaaacca

SEQ ID NO: 1009548 - RNA, 20 nt, Human
aggaauugaaguuuaacauu

SEQ ID NO: 1009549 - RNA, 23 nt, Human
aggcaggagaaucgcuugaaccc

SEQ ID NO: 1009550 - RNA, 24 nt, Human
aggcaggagaaucgcuugaaccca

SEQ ID NO: 1009551 - RNA, 21 nt, Human
aggccgagguggguggaucac

SEQ ID NO: 1009552 - RNA, 24 nt, Human
aggcgcuguggcucacaccuguaa

SEQ ID NO: 1009553 - RNA, 20 nt, Human
aggcugaggcaggagaaucg

SEQ ID NO: 1009554 - RNA, 24 nt, Human
aggcugaggcaggagaaucgcuug

SEQ ID NO: 1009555 - RNA, 20 nt, Human
agguggaggcugcagugagc

SEQ ID NO: 1009556 - RNA, 24 nt, Human
agguggaggcugcagugagcugag

SEQ ID NO: 1009557 - RNA, 22 nt, Human
agguggguggaucaccugaggu

SEQ ID NO: 1009558 - RNA, 22 nt, Human
auaaaaagugcccuaaaacuaa

SEQ ID NO: 1009559 - RNA, 21 nt, Human
auaaagcaaauaaacacgcuu

SEQ ID NO: 1009560 - RNA, 21 nt, Human
caaaaagacuuuaucuauuuc

SEQ ID NO: 1009561 - RNA, 22 nt, Human
caacaaucguagugacacauuc

SEQ ID NO: 1009562 - RNA, 24 nt, Human
caacauggugaaaccccaucucua

SEQ ID NO: 1009563 - RNA, 19 nt, Human
caagcuccucuuuuccuuc

SEQ ID NO: 1009564 - RNA, 24 nt, Human
cacaccuguaaucccagcacuuug

SEQ ID NO: 1009565 - RNA, 24 nt, Human
cacagcacuccagccugggugaca

SEQ ID NO: 1009566 - RNA, 19 nt, Human
caccacagcacuccagccu

SEQ ID NO: 1009567 - RNA, 23 nt, Human
caccugaggucaggaguuugaga

SEQ ID NO: 1009568 - RNA, 23 nt, Human
caccuguaaucccagcacuuugg

SEQ ID NO: 1009569 - RNA, 24 nt, Human
caccuguaaucccagcacuuuggg

SEQ ID NO: 1009570 - RNA, 22 nt, Human
cacuccagccugggugacaaag

SEQ ID NO: 1009571 - RNA, 23 nt, Human
cacuccagccugggugacaaagc

SEQ ID NO: 1009572 - RNA, 24 nt, Human
cagcacuuugggaggccgaggugg

SEQ ID NO: 1009573 - RNA, 18 nt, Human
cagccgcaccuccgcaag

SEQ ID NO: 1009574 - RNA, 24 nt, Human
cagcuacucgagaggcugaggcag

SEQ ID NO: 1009575 - RNA, 25 nt, Human
cagcuuuaucaacaaucguagugac

SEQ ID NO: 1009576 - RNA, 20 nt, Human
caggagguggaggcugcagu

SEQ ID NO: 1009577 - RNA, 22 nt, Human
caugguggcaggugccuguaau

SEQ ID NO: 1009578 - RNA, 20 nt, Human
cauugcuuuagcuggugaca

SEQ ID NO: 1009579 - RNA, 23 nt, Human
cauuuaaaaaaucaaguugcaag

SEQ ID NO: 1009580 - RNA, 24 nt, Human
ccaaaccaaaacaaagccaucaug

SEQ ID NO: 1009581 - RNA, 18 nt, Human
ccacagcacuccagccug

SEQ ID NO: 1009582 - RNA, 20 nt, Human
ccacagcacuccagccuggg

SEQ ID NO: 1009583 - RNA, 21 nt, Human
ccacagcacuccagccugggu

SEQ ID NO: 1009584 - RNA, 24 nt, Human
ccacagcacuccagccugggugac

SEQ ID NO: 1009585 - RNA, 19 nt, Human
ccagcucgaccaacaacgg

SEQ ID NO: 1009586 - RNA, 18 nt, Human
ccaggcgcuguggcucac

SEQ ID NO: 1009587 - RNA, 19 nt, Human
cccacuaagaagaaauaaa

SEQ ID NO: 1009588 - RNA, 24 nt, Human
cccgcagcagccgcggcuccuucc

SEQ ID NO: 1009589 - RNA, 18 nt, Human
cccgcagcgcugcccucg

SEQ ID NO: 1009590 - RNA, 20 nt, Human
cccgcgggacccgccagcuc

SEQ ID NO: 1009591 - RNA, 24 nt, Human
cccgcgggacccgccagcucgacc

SEQ ID NO: 1009592 - RNA, 21 nt, Human
cccucgggggguccgccuccu

SEQ ID NO: 1009593 - RNA, 19 nt, Human
ccgcaagcuccucuuuucc

SEQ ID NO: 1009594 - RNA, 20 nt, Human
ccgcaagcuccucuuuuccu

SEQ ID NO: 1009595 - RNA, 20 nt, Human
ccgcagcagccgcggcuccu

SEQ ID NO: 1009596 - RNA, 22 nt, Human
ccgcagcagccgcggcuccuuc

SEQ ID NO: 1009597 - RNA, 19 nt, Human
ccucaauguaauccaguau

SEQ ID NO: 1009598 - RNA, 19 nt, Human
ccuccgcaagcuccucuuu

SEQ ID NO: 1009599 - RNA, 22 nt, Human
ccugaggucaggaguuugagac

SEQ ID NO: 1009600 - RNA, 23 nt, Human
ccuggccaacauggugaaacccc

SEQ ID NO: 1009601 - RNA, 24 nt, Human
ccuggccaacauggugaaacccca

SEQ ID NO: 1009602 - RNA, 22 nt, Human
ccugggugacaaagcaagacuc

SEQ ID NO: 1009603 - RNA, 19 nt, Human
ccuguaaucccagcuacuc

SEQ ID NO: 1009604 - RNA, 22 nt, Human
ccuguaaucccagcuacucgag

SEQ ID NO: 1009605 - RNA, 21 nt, Human
ccuugauacauucaaaaagac

SEQ ID NO: 1009606 - RNA, 20 nt, Human
cgaccaacaacggccugcag

SEQ ID NO: 1009607 - RNA, 24 nt, Human
cgagguggguggaucaccugaggu

SEQ ID NO: 1009608 - RNA, 24 nt, Human
cgcgucaggagggccggaaaacgg

SEQ ID NO: 1009609 - RNA, 20 nt, Human
cggaaaacggccccgcagcg

SEQ ID NO: 1009610 - RNA, 18 nt, Human
cggccccgcagcgcugcc

SEQ ID NO: 1009611 - RNA, 30 nt, Human
cucaaaauaaaaagugcccuaaaacuaacc

SEQ ID NO: 1009612 - RNA, 22 nt, Human
cucacaccuguaaucccagcac

SEQ ID NO: 1009613 - RNA, 24 nt, Human
cucacaccuguaaucccagcacuu

SEQ ID NO: 1009614 - RNA, 18 nt, Human
cucugucucaaaaaaaaa

SEQ ID NO: 1009615 - RNA, 18 nt, Human
cugaaagacuuuauggua

SEQ ID NO: 1009616 - RNA, 21 nt, Human
cugccccaaaccaaaacaaag

SEQ ID NO: 1009617 - RNA, 23 nt, Human
cuggccaacauggugaaacccca

SEQ ID NO: 1009618 - RNA, 21 nt, Human
cuggccacuucccgcagcagc

SEQ ID NO: 1009619 - RNA, 21 nt, Human
gaaaaaaaauaaagcaaauaa

SEQ ID NO: 1009620 - RNA, 21 nt, Human
gaccaacaacggccugcagcc

SEQ ID NO: 1009621 - RNA, 24 nt, Human
gaccaacaacggccugcagccgca

SEQ ID NO: 1009622 - RNA, 23 nt, Human
gagaaucgcuugaacccaggagg

SEQ ID NO: 1009623 - RNA, 19 nt, Human
gaggcugcagugagcugag

SEQ ID NO: 1009624 - RNA, 22 nt, Human
gagguaacaccuccacggccug

SEQ ID NO: 1009625 - RNA, 25 nt, Human
gagguggguggaucaccugagguca

SEQ ID NO: 1009626 - RNA, 24 nt, Human
gaucaccugaggucaggaguuuga

SEQ ID NO: 1009627 - RNA, 20 nt, Human
gcaagcuccucuuuuccuuc

SEQ ID NO: 1009628 - RNA, 22 nt, Human
gcaggagaaucgcuugaaccca

SEQ ID NO: 1009629 - RNA, 24 nt, Human
gccaacauggugaaaccccaucuc

SEQ ID NO: 1009630 - RNA, 18 nt, Human
ggaggcugcagugagcug

SEQ ID NO: 1009631 - RNA, 20 nt, Human
ggaggcugcagugagcugag

SEQ ID NO: 1009632 - RNA, 23 nt, Human
ggaggcugcagugagcugaggua

SEQ ID NO: 1009633 - RNA, 22 nt, Human
ggaucaccugaggucaggaguu

SEQ ID NO: 1009634 - RNA, 21 nt, Human
ggcaggugccuguaaucccag

SEQ ID NO: 1009635 - RNA, 23 nt, Human
ggcaugguggcaggugccuguaa

SEQ ID NO: 1009636 - RNA, 21 nt, Human
gguggaucaccugaggucagg

SEQ ID NO: 1009637 - RNA, 24 nt, Human
gguggcaggugccuguaaucccag

SEQ ID NO: 1009638 - RNA, 20 nt, Human
guggaggcugcagugagcug

SEQ ID NO: 1009639 - RNA, 22 nt, Human
guggcucacaccuguaauccca

SEQ ID NO: 1009640 - RNA, 21 nt, Human
uaaaaagugcccuaaaacuaa

SEQ ID NO: 1009641 - RNA, 22 nt, Human
uaaaaagugcccuaaaacuaac

SEQ ID NO: 1009642 - RNA, 24 nt, Human
uaaaugaugaaaaaaaauaaagca

SEQ ID NO: 1009643 - RNA, 24 nt, Human
uaacauuguacaauauaagcggca

SEQ ID NO: 1009644 - RNA, 21 nt, Human
uaagaagaaauaaaugggaua

SEQ ID NO: 1009645 - RNA, 23 nt, Human
uaagaagaaauaaaugggauaaa

SEQ ID NO: 1009646 - RNA, 23 nt, Human
uaccaaccugugguauauuacac

SEQ ID NO: 1009647 - RNA, 22 nt, Human
uagaacucucuacauccuaaaa

SEQ ID NO: 1009648 - RNA, 24 nt, Human
uagccuggccaacauggugaaacc

SEQ ID NO: 1009649 - RNA, 21 nt, Human
uaggacaaugaaaaaguuuuc

SEQ ID NO: 1009650 - RNA, 23 nt, Human
ucaaaaauauuacacugggccag

SEQ ID NO: 1009651 - RNA, 19 nt, Human
ucaccugaggucaggaguu

SEQ ID NO: 1009652 - RNA, 22 nt, Human
uccacggccuggcccgcgggac

SEQ ID NO: 1009653 - RNA, 24 nt, Human
uccagccugggugacaaagcaaga

SEQ ID NO: 1009654 - RNA, 24 nt, Human
ucgcuugaacccaggagguggagg

SEQ ID NO: 1009655 - RNA, 20 nt, Human
ucucuacuaaaauacaaaaa

SEQ ID NO: 1009656 - RNA, 23 nt, Human
ucuuccauaaugcccacuaagaa

SEQ ID NO: 1009657 - RNA, 19 nt, Human
ugaaaccccaucucuacua

SEQ ID NO: 1009658 - RNA, 24 nt, Human
ugaagccaugacaaaacuauacaa

SEQ ID NO: 1009659 - RNA, 21 nt, Human
ugaaugcuauucaacauccuc

SEQ ID NO: 1009660 - RNA, 20 nt, Human
ugacaaagcaagacucuguc

SEQ ID NO: 1009661 - RNA, 23 nt, Human
ugagacuagccuggccaacaugg

SEQ ID NO: 1009662 - RNA, 24 nt, Human
ugagacuagccuggccaacauggu

SEQ ID NO: 1009663 - RNA, 24 nt, Human
ugagcuuuaggaaauuaacaauuu

SEQ ID NO: 1009664 - RNA, 20 nt, Human
ugaggcaggagaaucgcuug

SEQ ID NO: 1009665 - RNA, 24 nt, Human
ugaggcaggagaaucgcuugaacc

SEQ ID NO: 1009666 - RNA, 25 nt, Human
ugaggcaggagaaucgcuugaaccc

SEQ ID NO: 1009667 - RNA, 18 nt, Human
ugaggucaggaguuugag

SEQ ID NO: 1009668 - RNA, 22 nt, Human
ugccccaaaccaaaacaaagcc

SEQ ID NO: 1009669 - RNA, 21 nt, Human
ugccuguaaucccagcuacuc

SEQ ID NO: 1009670 - RNA, 22 nt, Human
ugccuguaaucccagcuacucg

SEQ ID NO: 1009671 - RNA, 18 nt, Human
uggaggcugcagugagcu

SEQ ID NO: 1009672 - RNA, 22 nt, Human
uggaggcugcagugagcugagg

SEQ ID NO: 1009673 - RNA, 23 nt, Human
uggaucaccugaggucaggaguu

SEQ ID NO: 1009674 - RNA, 24 nt, Human
uggaucaccugaggucaggaguuu

SEQ ID NO: 1009675 - RNA, 27 nt, Human
uggaucaccugaggucaggaguuugag

SEQ ID NO: 1009676 - RNA, 22 nt, Human
uggcaggugccuguaaucccag

SEQ ID NO: 1009677 - RNA, 24 nt, Human
uggcaggugccuguaaucccagcu

SEQ ID NO: 1009678 - RNA, 24 nt, Human
uggccaacauggugaaaccccauc

SEQ ID NO: 1009679 - RNA, 21 nt, Human
uggcucacaccuguaauccca

SEQ ID NO: 1009680 - RNA, 24 nt, Human
uggcucacaccuguaaucccagca

SEQ ID NO: 1009681 - RNA, 23 nt, Human
ugggaggccgagguggguggauc

SEQ ID NO: 1009682 - RNA, 24 nt, Human
ugggaggccgagguggguggauca

SEQ ID NO: 1009683 - RNA, 22 nt, Human
ugggauaaaugaugaaaaaaaa

SEQ ID NO: 1009684 - RNA, 24 nt, Human
uggguggaucaccugaggucagga

SEQ ID NO: 1009685 - RNA, 24 nt, Human
uggucagagucagggugauuuagg

SEQ ID NO: 1009686 - RNA, 24 nt, Human
ugguggcaggugccuguaauccca

SEQ ID NO: 1009687 - RNA, 24 nt, Human
uguggcucacaccuguaaucccag

SEQ ID NO: 1009688 - RNA, 20 nt, Human
uguguacaugucagggcaca

SEQ ID NO: 1009689 - RNA, 21 nt, Human
uguguacaugucagggcacau

SEQ ID NO: 1009690 - RNA, 22 nt, Human
uguguacaugucagggcacaug

SEQ ID NO: 1009691 - RNA, 23 nt, Human
uuagaacucucuacauccuaaaa

SEQ ID NO: 1009692 - RNA, 24 nt, Human
uuagccgggcaugguggcaggugc

SEQ ID NO: 1009693 - RNA, 25 nt, Human
uugggaggccgagguggguggauca

SEQ ID NO: 1009694 - RNA, 19 nt, Human
uuucacaauugucccuccu

SEQ ID NO: 1009695 - RNA, 22 nt, Human
aaccggacauccgagcuccccg

SEQ ID NO: 1009696 - RNA, 21 nt, Human
aagaggccuuuugcagaugag

SEQ ID NO: 1009697 - RNA, 20 nt, Human
agaaaaccagucuuuacaag

SEQ ID NO: 1009698 - RNA, 21 nt, Human
agaaaaucgaugaacuggaaa

SEQ ID NO: 1009699 - RNA, 26 nt, Human
agaaaucacaagaggaaaaucuuggc

SEQ ID NO: 1009700 - RNA, 21 nt, Human
agccagugccggggaaaggcg

SEQ ID NO: 1009701 - RNA, 20 nt, Human
aggcggcgggagcggguccg

SEQ ID NO: 1009702 - RNA, 27 nt, Human
caccagaacaccccgcgauguucagcc

SEQ ID NO: 1009703 - RNA, 23 nt, Human
cagaacaccccgcgauguucagc

SEQ ID NO: 1009704 - RNA, 18 nt, Human
cagagcccucgucccccu

SEQ ID NO: 1009705 - RNA, 19 nt, Human
cagagcccucgucccccuc

SEQ ID NO: 1009706 - RNA, 19 nt, Human
cauccgagcuccccgcauu

SEQ ID NO: 1009707 - RNA, 19 nt, Human
cccccgggcuccucccggc

SEQ ID NO: 1009708 - RNA, 21 nt, Human
cccccuccucccuccccuucc

SEQ ID NO: 1009709 - RNA, 21 nt, Human
ccccgcgauguucagccccuc

SEQ ID NO: 1009710 - RNA, 24 nt, Human
ccccgggcuccucccggcgacccc

SEQ ID NO: 1009711 - RNA, 18 nt, Human
ccccugcgaggccgcggg

SEQ ID NO: 1009712 - RNA, 22 nt, Human
ccccugcgaggccgcgggcccc

SEQ ID NO: 1009713 - RNA, 24 nt, Human
ccccugcgaggccgcgggccccuc

SEQ ID NO: 1009714 - RNA, 25 nt, Human
cccgccagagcccucgucccccucc

SEQ ID NO: 1009715 - RNA, 24 nt, Human
cccgcgaggugaagcgagggcgag

SEQ ID NO: 1009716 - RNA, 21 nt, Human
cccuccaaacccgccagagcc

SEQ ID NO: 1009717 - RNA, 24 nt, Human
ccuccaaacccgccagagcccucg

SEQ ID NO: 1009718 - RNA, 21 nt, Human
ccucccggcgacccccccugg

SEQ ID NO: 1009719 - RNA, 23 nt, Human
ccucccggcgacccccccugggc

SEQ ID NO: 1009720 - RNA, 20 nt, Human
ccuccucccuccccuucccc

SEQ ID NO: 1009721 - RNA, 24 nt, Human
ccuccuggucccucucccccgggc

SEQ ID NO: 1009722 - RNA, 27 nt, Human
ccuggucccucucccccgggcuccucc

SEQ ID NO: 1009723 - RNA, 20 nt, Human
cucucccccgggcuccuccc

SEQ ID NO: 1009724 - RNA, 23 nt, Human
cucucuguucacagacaguucua

SEQ ID NO: 1009725 - RNA, 22 nt, Human
cuuuuuggagaggcggggcggg

SEQ ID NO: 1009726 - RNA, 20 nt, Human
gagcccucgucccccuccuc

SEQ ID NO: 1009727 - RNA, 22 nt, Human
gagcggguccggggcuccgcgu

SEQ ID NO: 1009728 - RNA, 22 nt, Human
gagcuccccgcauucggagccc

SEQ ID NO: 1009729 - RNA, 24 nt, Human
gcauggacccacaagggucucucu

SEQ ID NO: 1009730 - RNA, 18 nt, Human
gcuccucccggcgacccc

SEQ ID NO: 1009731 - RNA, 22 nt, Human
gcuggcgggggcaggggugggg

SEQ ID NO: 1009732 - RNA, 23 nt, Human
gggaccgguccgcuggcgggggc

SEQ ID NO: 1009733 - RNA, 22 nt, Human
gggcaggggugggggcgcgggc

SEQ ID NO: 1009734 - RNA, 18 nt, Human
guucacagacaguucuac

SEQ ID NO: 1009735 - RNA, 18 nt, Human
ucccagccagugccgggg

SEQ ID NO: 1009736 - RNA, 21 nt, Human
ucccccgggcuccucccggcg

SEQ ID NO: 1009737 - RNA, 22 nt, Human
ucccccuccucccuccccuucc

SEQ ID NO: 1009738 - RNA, 19 nt, Human
uccccgcauucggagcccg

SEQ ID NO: 1009739 - RNA, 25 nt, Human
uggucccucucccccgggcuccucc

SEQ ID NO: 1009740 - RNA, 24 nt, Human
uguaaaguuauccacaugguucag

SEQ ID NO: 1009741 - RNA, 24 nt, Human
uguucagccccuccaaacccgcca

SEQ ID NO: 1009742 - RNA, 25 nt, Human
uguugcuauaaaaaugaaugcagaa

SEQ ID NO: 1009743 - RNA, 21 nt, Human
aagcuuggguggguugguagc

SEQ ID NO: 1009744 - RNA, 21 nt, Human
aagguguugaguugccuuggu

SEQ ID NO: 1009745 - RNA, 22 nt, Human
acuuuauucuucuuacacuguu

SEQ ID NO: 1009746 - RNA, 23 nt, Human
agacggaaaggagggggaggagg

SEQ ID NO: 1009747 - RNA, 25 nt, Human
agcccagagaaagaagguguugagu

SEQ ID NO: 1009748 - RNA, 23 nt, Human
aggaggagauugggggcgggggu

SEQ ID NO: 1009749 - RNA, 26 nt, Human
aggagggggaaggaaggaagguggug

SEQ ID NO: 1009750 - RNA, 21 nt, Human
agggaagacggaaaggagggg

SEQ ID NO: 1009751 - RNA, 19 nt, Human
agggggaaggaaggaaggu

SEQ ID NO: 1009752 - RNA, 21 nt, Human
agggggaaggaaggaaggugg

SEQ ID NO: 1009753 - RNA, 24 nt, Human
aguguugucuuuuacuaugugcug

SEQ ID NO: 1009754 - RNA, 22 nt, Human
caauguauguaaagcccacgug

SEQ ID NO: 1009755 - RNA, 19 nt, Human
cagacuagaaaaccucucc

SEQ ID NO: 1009756 - RNA, 21 nt, Human
ccgcucguagugagaaaaaaa

SEQ ID NO: 1009757 - RNA, 24 nt, Human
cggaaaggagggggaggaggggga

SEQ ID NO: 1009758 - RNA, 26 nt, Human
cuagaaaaccucucccucugcacacu

SEQ ID NO: 1009759 - RNA, 19 nt, Human
gacuuuauucuucuuacac

SEQ ID NO: 1009760 - RNA, 22 nt, Human
gagauugggggcggggguggag

SEQ ID NO: 1009761 - RNA, 19 nt, Human
gagggggaggagggggaag

SEQ ID NO: 1009762 - RNA, 22 nt, Human
gagggggaggagggggaaggaa

SEQ ID NO: 1009763 - RNA, 19 nt, Human
ggaaaggagggggaggagg

SEQ ID NO: 1009764 - RNA, 20 nt, Human
ggaaaggagggggaggaggg

SEQ ID NO: 1009765 - RNA, 21 nt, Human
ggaaaggagggggaggagggg

SEQ ID NO: 1009766 - RNA, 19 nt, Human
ggaagacggaaaggagggg

SEQ ID NO: 1009767 - RNA, 23 nt, Human
ggaagacggaaaggagggggagg

SEQ ID NO: 1009768 - RNA, 21 nt, Human
ggaggagauugggggcggggg

SEQ ID NO: 1009769 - RNA, 22 nt, Human
ggaggagauugggggcgggggu

SEQ ID NO: 1009770 - RNA, 23 nt, Human
ggaggagauugggggcgggggug

SEQ ID NO: 1009771 - RNA, 22 nt, Human
ggagggggaaggaaggaaggug

SEQ ID NO: 1009772 - RNA, 29 nt, Human
ggagggggaaggaaggaaggugguggugg

SEQ ID NO: 1009773 - RNA, 18 nt, Human
ggagggggaggaggggga

SEQ ID NO: 1009774 - RNA, 18 nt, Human
ggagggggaggaggggga

SEQ ID NO: 1009775 - RNA, 18 nt, Human
gggaagacggaaaggagg

SEQ ID NO: 1009776 - RNA, 18 nt, Human
ggggcggggguggagagg

SEQ ID NO: 1009777 - RNA, 18 nt, Human
ggguggguugguagccag

SEQ ID NO: 1009778 - RNA, 21 nt, Human
guaaagaauuuauacaccaug

SEQ ID NO: 1009779 - RNA, 18 nt, Human
gugagaaaaaaaggagga

SEQ ID NO: 1009780 - RNA, 18 nt, Human
guggagaagaaagcuugg

SEQ ID NO: 1009781 - RNA, 21 nt, Human
guggagaagaaagcuugggug

SEQ ID NO: 1009782 - RNA, 19 nt, Human
guuugcagacuagaaaacc

SEQ ID NO: 1009783 - RNA, 24 nt, Human
uauacaccauguguucacagcuuc

SEQ ID NO: 1009784 - RNA, 21 nt, Human
ucauagacuuuauucuucuua

SEQ ID NO: 1009785 - RNA, 19 nt, Human
ucccacugcagugaaugga

SEQ ID NO: 1009786 - RNA, 22 nt, Human
ucguagugagaaaaaaaggagg

SEQ ID NO: 1009787 - RNA, 24 nt, Human
ugagcaguggcgguucaagcccag

SEQ ID NO: 1009788 - RNA, 19 nt, Human
ugaucaaguagcuuucccu

SEQ ID NO: 1009789 - RNA, 18 nt, Human
uggaaggucaauguaugu

SEQ ID NO: 1009790 - RNA, 25 nt, Human
uggagagggaagacggaaaggaggg

SEQ ID NO: 1009791 - RNA, 21 nt, Human
ugggggcggggguggagaggg

SEQ ID NO: 1009792 - RNA, 18 nt, Human
uggguggguugguagcca

SEQ ID NO: 1009793 - RNA, 21 nt, Human
ugguggagaagaaagcuuggg

SEQ ID NO: 1009794 - RNA, 23 nt, Human
ugugcugggauucugaagcacgg

SEQ ID NO: 1009795 - RNA, 18 nt, Human
uuuauucuucuuacacug

SEQ ID NO: 1009796 - RNA, 21 nt, Human
uuugaucaaguagcuuucccu

SEQ ID NO: 1009797 - RNA, 21 nt, Human
aaaguaaucuaaacccaggac

SEQ ID NO: 1009798 - RNA, 22 nt, Human
aacugcuuuauauacagcaacu

SEQ ID NO: 1009799 - RNA, 20 nt, Human
aagcaggcuguuccauuuug

SEQ ID NO: 1009800 - RNA, 21 nt, Human
aagcaggcuguuccauuuugg

SEQ ID NO: 1009801 - RNA, 24 nt, Human
aagucacagacuuacagaaaccaa

SEQ ID NO: 1009802 - RNA, 23 nt, Human
aaucuucagaagucuuuauuauu

SEQ ID NO: 1009803 - RNA, 20 nt, Human
acacauuccaaaagcgagcc

SEQ ID NO: 1009804 - RNA, 22 nt, Human
acuagaaucccuuauuguacca

SEQ ID NO: 1009805 - RNA, 18 nt, Human
acuccaugcuuauaacaa

SEQ ID NO: 1009806 - RNA, 26 nt, Human
agaacuauacauaaggauuugaauaa

SEQ ID NO: 1009807 - RNA, 25 nt, Human
agaccuaaauggcacaucuuggcag

SEQ ID NO: 1009808 - RNA, 21 nt, Human
agcaggcuguuccauuuugga

SEQ ID NO: 1009809 - RNA, 20 nt, Human
agccggccuccugaccaccc

SEQ ID NO: 1009810 - RNA, 28 nt, Human
aggaacagcaaagagcaauccgguaccc

SEQ ID NO: 1009811 - RNA, 18 nt, Human
aggcaguguucuagugcu

SEQ ID NO: 1009812 - RNA, 23 nt, Human
auaacacauuccaaaagcgagca

SEQ ID NO: 1009813 - RNA, 23 nt, Human
auagaagaaguagaaaacccuag

SEQ ID NO: 1009814 - RNA, 22 nt, Human
auguuugcuuuauugacuacag

SEQ ID NO: 1009815 - RNA, 20 nt, Human
auuacauacuugggcacccc

SEQ ID NO: 1009816 - RNA, 21 nt, Human
caaaagcgagcauauauuaaa

SEQ ID NO: 1009817 - RNA, 22 nt, Human
caacaguaauagcaagcacuua

SEQ ID NO: 1009818 - RNA, 19 nt, Human
caacuaacuccaugcuuau

SEQ ID NO: 1009819 - RNA, 19 nt, Human
caagagguuacccuaacca

SEQ ID NO: 1009820 - RNA, 20 nt, Human
caagagguuacccuaaccaa

SEQ ID NO: 1009821 - RNA, 24 nt, Human
cacagcuaauauguggcaaaacca

SEQ ID NO: 1009822 - RNA, 20 nt, Human
caccccacaauccuuugcca

SEQ ID NO: 1009823 - RNA, 23 nt, Human
cagacaugcuauauaagaaacug

SEQ ID NO: 1009824 - RNA, 18 nt, Human
caggacucuaaccauguc

SEQ ID NO: 1009825 - RNA, 18 nt, Human
cauaucagucacauuuca

SEQ ID NO: 1009826 - RNA, 21 nt, Human
cauuuuggacagcucuaauga

SEQ ID NO: 1009827 - RNA, 25 nt, Human
ccaccccuacuguagcacuuggaaa

SEQ ID NO: 1009828 - RNA, 22 nt, Human
ccagcaaaauauagugcucaga

SEQ ID NO: 1009829 - RNA, 19 nt, Human
cccaccccuacuguagcac

SEQ ID NO: 1009830 - RNA, 25 nt, Human
ccuguuacguguccuuccuucuucc

SEQ ID NO: 1009831 - RNA, 25 nt, Human
ccuuccuucugcucuuuuuugaguu

SEQ ID NO: 1009832 - RNA, 19 nt, Human
ccuucuuccuuccuucugc

SEQ ID NO: 1009833 - RNA, 18 nt, Human
cuagaacucugccuagcu

SEQ ID NO: 1009834 - RNA, 21 nt, Human
cuccaagaaauaccgaauucu

SEQ ID NO: 1009835 - RNA, 21 nt, Human
cuccugaccaccccacaaucc

SEQ ID NO: 1009836 - RNA, 23 nt, Human
cuguuccauuuuggacagcucua

SEQ ID NO: 1009837 - RNA, 25 nt, Human
cuucuuccuuccuucugcucuuuuu

SEQ ID NO: 1009838 - RNA, 18 nt, Human
gcagugguagagaauaua

SEQ ID NO: 1009839 - RNA, 21 nt, Human
gcaguguucuagugcucaaaa

SEQ ID NO: 1009840 - RNA, 21 nt, Human
gcuaaacuucaccaucuaccu

SEQ ID NO: 1009841 - RNA, 21 nt, Human
ggaauagagaaaauaaucaug

SEQ ID NO: 1009842 - RNA, 23 nt, Human
ggcuacgauaguacuuguuuauu

SEQ ID NO: 1009843 - RNA, 20 nt, Human
gucaggaacagcaaagagca

SEQ ID NO: 1009844 - RNA, 18 nt, Human
guuacuggaaauucccca

SEQ ID NO: 1009845 - RNA, 22 nt, Human
uaacagcaacaguaauagcaag

SEQ ID NO: 1009846 - RNA, 21 nt, Human
uaacaucaaugcauaacacau

SEQ ID NO: 1009847 - RNA, 23 nt, Human
uaacuccaugcuuauaacaaucu

SEQ ID NO: 1009848 - RNA, 20 nt, Human
uaagagagcuaacaaaagug

SEQ ID NO: 1009849 - RNA, 21 nt, Human
uaaguugggcugaaaucugcc

SEQ ID NO: 1009850 - RNA, 22 nt, Human
uaauaauaacagcaacaguaau

SEQ ID NO: 1009851 - RNA, 18 nt, Human
uacacagcuaauaugugg

SEQ ID NO: 1009852 - RNA, 22 nt, Human
uacuuagauccauucacuuaac

SEQ ID NO: 1009853 - RNA, 24 nt, Human
uacuugggcacccccuggcuacga

SEQ ID NO: 1009854 - RNA, 21 nt, Human
uagaagaaguagaaaacccua

SEQ ID NO: 1009855 - RNA, 22 nt, Human
uauauuacacagcuaauaugug

SEQ ID NO: 1009856 - RNA, 23 nt, Human
uauuacacagcuaauauguggca

SEQ ID NO: 1009857 - RNA, 22 nt, Human
uauuuagcacucucuagaauca

SEQ ID NO: 1009858 - RNA, 19 nt, Human
ucaauaccuauugaaugaa

SEQ ID NO: 1009859 - RNA, 19 nt, Human
ucacugcugcacacaacau

SEQ ID NO: 1009860 - RNA, 18 nt, Human
ucagauauuaagagagcu

SEQ ID NO: 1009861 - RNA, 19 nt, Human
ucagguacuggucuaacug

SEQ ID NO: 1009862 - RNA, 23 nt, Human
ucauuuuuuucuucuuaauguuu

SEQ ID NO: 1009863 - RNA, 22 nt, Human
uccuucuuccuuccuucugcuc

SEQ ID NO: 1009864 - RNA, 23 nt, Human
ucuccucccccaccccuacugua

SEQ ID NO: 1009865 - RNA, 20 nt, Human
ucucucauggucagauggcu

SEQ ID NO: 1009866 - RNA, 19 nt, Human
ucucucuccucccccaccc

SEQ ID NO: 1009867 - RNA, 23 nt, Human
ucugccuagcucauagcuggugc

SEQ ID NO: 1009868 - RNA, 19 nt, Human
ucugcucuuuuuugaguug

SEQ ID NO: 1009869 - RNA, 24 nt, Human
ugaacagcugucaagccacgugga

SEQ ID NO: 1009870 - RNA, 18 nt, Human
ugagaaagagcaguggua

SEQ ID NO: 1009871 - RNA, 20 nt, Human
ugagaaagagcagugguaga

SEQ ID NO: 1009872 - RNA, 20 nt, Human
ugcauaacacauuccaaaag

SEQ ID NO: 1009873 - RNA, 18 nt, Human
ugccaggauuaguguucu

SEQ ID NO: 1009874 - RNA, 18 nt, Human
ugccuagcucauagcugg

SEQ ID NO: 1009875 - RNA, 19 nt, Human
uggcuggugugucauccuu

SEQ ID NO: 1009876 - RNA, 23 nt, Human
ugguagagaauauacuucucacu

SEQ ID NO: 1009877 - RNA, 19 nt, Human
uguaaaaaucccuguuacg

SEQ ID NO: 1009878 - RNA, 26 nt, Human
uguuuuaagcuaggauucugugagag

SEQ ID NO: 1009879 - RNA, 25 nt, Human
uuaaaaauaacaaaaaugaagaaaa

SEQ ID NO: 1009880 - RNA, 18 nt, Human
uuacugcccucauucuga

SEQ ID NO: 1009881 - RNA, 19 nt, Human
uuagauccauucacuuaac

SEQ ID NO: 1009882 - RNA, 19 nt, Human
uuaucauuuuaucuuccuc

SEQ ID NO: 1009883 - RNA, 22 nt, Human
uuuuuuuuuuuuagagauauca

SEQ ID NO: 1009884 - RNA, 23 nt, Human
aaaaaagaaaaaaaauaacuaag

SEQ ID NO: 1009885 - RNA, 24 nt, Human
aaaaagaaaaaagaaaaaaaauaa

SEQ ID NO: 1009886 - RNA, 20 nt, Human
aaaaaggagucauacuaaau

SEQ ID NO: 1009887 - RNA, 21 nt, Human
aaaaaugcaaauucuugggcc

SEQ ID NO: 1009888 - RNA, 18 nt, Human
aaaaucaaugaaaauuua

SEQ ID NO: 1009889 - RNA, 22 nt, Human
aaaaugccuaagaaaugaaaug

SEQ ID NO: 1009890 - RNA, 27 nt, Human
aaaaugccuaagaaaugaaaugagaua

SEQ ID NO: 1009891 - RNA, 22 nt, Human
aaagaaaaaaaauaacuaagga

SEQ ID NO: 1009892 - RNA, 22 nt, Human
aacauauuucaaagucugugug

SEQ ID NO: 1009893 - RNA, 24 nt, Human
aaccuggaucuuuaagacugguag

SEQ ID NO: 1009894 - RNA, 19 nt, Human
aagcagcaacaacagaaaa

SEQ ID NO: 1009895 - RNA, 18 nt, Human
aagcagugguucugaaag

SEQ ID NO: 1009896 - RNA, 21 nt, Human
aauaagcagcaugguuuucac

SEQ ID NO: 1009897 - RNA, 20 nt, Human
acaaagaagaacauauuuca

SEQ ID NO: 1009898 - RNA, 28 nt, Human
acacggcuucaaauaaaaagggaacgcc

SEQ ID NO: 1009899 - RNA, 24 nt, Human
acaguaaaaaggagucauacuaaa

SEQ ID NO: 1009900 - RNA, 20 nt, Human
agaccuccugaaauggaaac

SEQ ID NO: 1009901 - RNA, 23 nt, Human
agagaagcagcaacaacagaaaa

SEQ ID NO: 1009902 - RNA, 20 nt, Human
agcuguagccgugccagccu

SEQ ID NO: 1009903 - RNA, 20 nt, Human
aggcaguggguugcuugcua

SEQ ID NO: 1009904 - RNA, 19 nt, Human
agguagcaaauucuggcaa

SEQ ID NO: 1009905 - RNA, 23 nt, Human
aguaugaagcaugacggaaggaa

SEQ ID NO: 1009906 - RNA, 22 nt, Human
aucaccuuaagguagcaaauuc

SEQ ID NO: 1009907 - RNA, 18 nt, Human
augaagcaugacggaagg

SEQ ID NO: 1009908 - RNA, 22 nt, Human
auucccuuuccagucuugaagc

SEQ ID NO: 1009909 - RNA, 20 nt, Human
auugucuguuguggcggauu

SEQ ID NO: 1009910 - RNA, 21 nt, Human
caaagaagaacauauuucaaa

SEQ ID NO: 1009911 - RNA, 24 nt, Human
caaauucuugggccugaucccaga

SEQ ID NO: 1009912 - RNA, 18 nt, Human
caacagaaaaaaaauggc

SEQ ID NO: 1009913 - RNA, 22 nt, Human
caacagaaaaaaaauggccaca

SEQ ID NO: 1009914 - RNA, 24 nt, Human
caagcccucaucuugauucugaua

SEQ ID NO: 1009915 - RNA, 18 nt, Human
cacauguauacauauaua

SEQ ID NO: 1009916 - RNA, 18 nt, Human
caccaaaagucuguuccu

SEQ ID NO: 1009917 - RNA, 25 nt, Human
cacgaaaaauacaaaugaagucugc

SEQ ID NO: 1009918 - RNA, 18 nt, Human
cacugggucuacaggaga

SEQ ID NO: 1009919 - RNA, 23 nt, Human
cacuucugcagcaaggccagcag

SEQ ID NO: 1009920 - RNA, 24 nt, Human
cagaaccuggaucuuuaagacugg

SEQ ID NO: 1009921 - RNA, 21 nt, Human
cagcaugagggguuaguacaa

SEQ ID NO: 1009922 - RNA, 18 nt, Human
caggaaccaucccuaagc

SEQ ID NO: 1009923 - RNA, 18 nt, Human
caguaaaaaggagucaua

SEQ ID NO: 1009924 - RNA, 23 nt, Human
caguuuauucaaaagagcccuua

SEQ ID NO: 1009925 - RNA, 19 nt, Human
ccuccucaucaccaaaagu

SEQ ID NO: 1009926 - RNA, 21 nt, Human
ccugcauggugguaaaggaga

SEQ ID NO: 1009927 - RNA, 21 nt, Human
cuccugaaauggaaacucugg

SEQ ID NO: 1009928 - RNA, 23 nt, Human
cugauacacacuaaaguuugaga

SEQ ID NO: 1009929 - RNA, 23 nt, Human
cuuccuguaaauccacaucuuag

SEQ ID NO: 1009930 - RNA, 18 nt, Human
gaccacuuccaucugcuu

SEQ ID NO: 1009931 - RNA, 23 nt, Human
ggaaggaaaaaagugcuucucga

SEQ ID NO: 1009932 - RNA, 25 nt, Human
guaggacucuuguaggaggcuuuug

SEQ ID NO: 1009933 - RNA, 23 nt, Human
uaaaaaggagucauacuaaaugu

SEQ ID NO: 1009934 - RNA, 23 nt, Human
uaaaaggcuuaaaguaaucuaga

SEQ ID NO: 1009935 - RNA, 25 nt, Human
uaaaauacaaacaacuuguuauuaa

SEQ ID NO: 1009936 - RNA, 23 nt, Human
uacaaguuaaaacagcauggaaa

SEQ ID NO: 1009937 - RNA, 24 nt, Human
uacaauacaauauaguaugaagca

SEQ ID NO: 1009938 - RNA, 21 nt, Human
uaccacgaaaaauacaaauga

SEQ ID NO: 1009939 - RNA, 22 nt, Human
uagaaguugucccuugcaagga

SEQ ID NO: 1009940 - RNA, 18 nt, Human
uagagaagcagcaacaac

SEQ ID NO: 1009941 - RNA, 18 nt, Human
uagccgugccagccucug

SEQ ID NO: 1009942 - RNA, 20 nt, Human
uagcugcaguuauuaacugc

SEQ ID NO: 1009943 - RNA, 25 nt, Human
uauaaacaaaaauaaaauacaaaca

SEQ ID NO: 1009944 - RNA, 24 nt, Human
uauuuucuucuauuauuuguucuu

SEQ ID NO: 1009945 - RNA, 26 nt, Human
ucaaauaaaaaaaaagaaaaaagaaa

SEQ ID NO: 1009946 - RNA, 19 nt, Human
ucacauaaauacucagucc

SEQ ID NO: 1009947 - RNA, 19 nt, Human
ucagaccacuuccaucugc

SEQ ID NO: 1009948 - RNA, 23 nt, Human
ucaguaucauuuuuacugacuuu

SEQ ID NO: 1009949 - RNA, 22 nt, Human
uccacuagagaagcagcaacaa

SEQ ID NO: 1009950 - RNA, 25 nt, Human
ucccagaccuccugaaauggaaacu

SEQ ID NO: 1009951 - RNA, 18 nt, Human
ucccagguauuuugguag

SEQ ID NO: 1009952 - RNA, 20 nt, Human
ucccuaagcugcaguaacuc

SEQ ID NO: 1009953 - RNA, 20 nt, Human
ucccugaaccaacauuauca

SEQ ID NO: 1009954 - RNA, 21 nt, Human
uccuccucaucaccaaaaguc

SEQ ID NO: 1009955 - RNA, 20 nt, Human
ucuguugugcauuuuucugu

SEQ ID NO: 1009956 - RNA, 23 nt, Human
ucuugggccugaucccagaccuc

SEQ ID NO: 1009957 - RNA, 24 nt, Human
ugaaagaaaagccauaacuucuac

SEQ ID NO: 1009958 - RNA, 18 nt, Human
ugaauuacuuauggguuc

SEQ ID NO: 1009959 - RNA, 20 nt, Human
ugagugauuacuauauccca

SEQ ID NO: 1009960 - RNA, 19 nt, Human
ugccacaaauaaaacagca

SEQ ID NO: 1009961 - RNA, 19 nt, Human
uggaaacucugggaguugg

SEQ ID NO: 1009962 - RNA, 21 nt, Human
ugguauaaacaaaaauaaaau

SEQ ID NO: 1009963 - RNA, 24 nt, Human
uggugacagcuguagccgugccag

SEQ ID NO: 1009964 - RNA, 23 nt, Human
uguucuugcaacagaauuuuccc

SEQ ID NO: 1009965 - RNA, 22 nt, Human
uguugugcauuuuucuguuuuu

SEQ ID NO: 1009966 - RNA, 22 nt, Human
uuaaaacagcauggaaaaaaau

SEQ ID NO: 1009967 - RNA, 25 nt, Human
uuaguacaauacaauauaguaugaa

SEQ ID NO: 1009968 - RNA, 22 nt, Human
uucaaauaaaaaaaaagaaaaa

SEQ ID NO: 1009969 - RNA, 23 nt, Human
uucacugauaauacaucagauaa

SEQ ID NO: 1009970 - RNA, 19 nt, Human
uucagaaccuggaucuuua

SEQ ID NO: 1009971 - RNA, 21 nt, Human
uucuugcaacagaauuuuccc

SEQ ID NO: 1009972 - RNA, 27 nt, Human
uuuaacuuacuugccaaccaccuaaca

SEQ ID NO: 1009973 - RNA, 25 nt, Human
uuuucacauaaauacucaguccuac

SEQ ID NO: 1009974 - RNA, 25 nt, Human
aaaaauacccuaaaguuuuccagga

SEQ ID NO: 1009975 - RNA, 21 nt, Human
aaaucauuacaaaaccaaguc

SEQ ID NO: 1009976 - RNA, 21 nt, Human
aacaccaaguucccagcuccu

SEQ ID NO: 1009977 - RNA, 18 nt, Human
aacaguuggaaaaccucc

SEQ ID NO: 1009978 - RNA, 20 nt, Human
aagagcaggagacaaacaca

SEQ ID NO: 1009979 - RNA, 19 nt, Human
aagcccccagugacuccag

SEQ ID NO: 1009980 - RNA, 21 nt, Human
aaggccucaugggaaaggaca

SEQ ID NO: 1009981 - RNA, 19 nt, Human
acaagaaagacaccccuga

SEQ ID NO: 1009982 - RNA, 21 nt, Human
acagacccgagggcacuugua

SEQ ID NO: 1009983 - RNA, 20 nt, Human
acaguuggaaaaccucccuu

SEQ ID NO: 1009984 - RNA, 20 nt, Human
acccaucaccccagugugca

SEQ ID NO: 1009985 - RNA, 21 nt, Human
accccagaccccccaaagagc

SEQ ID NO: 1009986 - RNA, 18 nt, Human
accccccaaagagcugag

SEQ ID NO: 1009987 - RNA, 24 nt, Human
accgcccccacaaccuccacaacc

SEQ ID NO: 1009988 - RNA, 19 nt, Human
accucugggaccuccccac

SEQ ID NO: 1009989 - RNA, 21 nt, Human
accucugggaccuccccaccg

SEQ ID NO: 1009990 - RNA, 21 nt, Human
acugcacaagaaagacacccc

SEQ ID NO: 1009991 - RNA, 24 nt, Human
agaaaacagcuuaagguuuugauc

SEQ ID NO: 1009992 - RNA, 23 nt, Human
agaaagacaccccugauuaaccu

SEQ ID NO: 1009993 - RNA, 21 nt, Human
agcagaguggggagugauugg

SEQ ID NO: 1009994 - RNA, 21 nt, Human
agggggaaggguuuguccaag

SEQ ID NO: 1009995 - RNA, 22 nt, Human
auccuccucaaggcccugauug

SEQ ID NO: 1009996 - RNA, 21 nt, Human
auuacaaaaccaagucugggg

SEQ ID NO: 1009997 - RNA, 23 nt, Human
caaaaauacccuaaaguuuucca

SEQ ID NO: 1009998 - RNA, 18 nt, Human
caaccccacaaauucucu

SEQ ID NO: 1009999 - RNA, 28 nt, Human
caagaaagacaccccugauuaaccacau

SEQ ID NO: 1010000 - RNA, 22 nt, Human
caagaccuggaugccagccucc

SEQ ID NO: 1010001 - RNA, 22 nt, Human
cacccaucaccccagugugcaa

SEQ ID NO: 1010002 - RNA, 19 nt, Human
caccccacugaggcccagc

SEQ ID NO: 1010003 - RNA, 25 nt, Human
caccccagaccccccaaagagcuga

SEQ ID NO: 1010004 - RNA, 21 nt, Human
caccgcccccacaaccuccac

SEQ ID NO: 1010005 - RNA, 21 nt, Human
caccucugggaccuccccacc

SEQ ID NO: 1010006 - RNA, 21 nt, Human
cacuccagcaagccuugauug

SEQ ID NO: 1010007 - RNA, 20 nt, Human
cagaaauacccccucuaccc

SEQ ID NO: 1010008 - RNA, 21 nt, Human
cagaaauacccccucuacccu

SEQ ID NO: 1010009 - RNA, 23 nt, Human
cagaaauacccccucuacccuga

SEQ ID NO: 1010010 - RNA, 24 nt, Human
cagaaauacccccucuacccugau

SEQ ID NO: 1010011 - RNA, 22 nt, Human
cagaagagcaggagacaaacac

SEQ ID NO: 1010012 - RNA, 19 nt, Human
cagagccaagaccuggaug

SEQ ID NO: 1010013 - RNA, 21 nt, Human
cagagccaagaccuggaugcc

SEQ ID NO: 1010014 - RNA, 18 nt, Human
cagaguggggagugauug

SEQ ID NO: 1010015 - RNA, 24 nt, Human
caggagacaaacacaccccacuga

SEQ ID NO: 1010016 - RNA, 22 nt, Human
caggcuccagaagagcaggaga

SEQ ID NO: 1010017 - RNA, 23 nt, Human
cagggcagagccaagaccuggau

SEQ ID NO: 1010018 - RNA, 23 nt, Human
ccaacccugaaggaguuugcgca

SEQ ID NO: 1010019 - RNA, 18 nt, Human
ccacaaccuccacaaccc

SEQ ID NO: 1010020 - RNA, 19 nt, Human
ccacaaccuccacaacccc

SEQ ID NO: 1010021 - RNA, 20 nt, Human
cccaaaggcgccuccaacag

SEQ ID NO: 1010022 - RNA, 21 nt, Human
cccacaaccuccacaacccca

SEQ ID NO: 1010023 - RNA, 23 nt, Human
cccacacaaucucucuuucuggu

SEQ ID NO: 1010024 - RNA, 25 nt, Human
cccacccaucaccccagugugcaag

SEQ ID NO: 1010025 - RNA, 18 nt, Human
ccccacacaaucucucuu

SEQ ID NO: 1010026 - RNA, 19 nt, Human
ccccacugaggcccagcuu

SEQ ID NO: 1010027 - RNA, 21 nt, Human
ccccauuaucccagcagagug

SEQ ID NO: 1010028 - RNA, 21 nt, Human
cccccacaaccuccacaaccc

SEQ ID NO: 1010029 - RNA, 22 nt, Human
cccccacaaccuccacaacccc

SEQ ID NO: 1010030 - RNA, 19 nt, Human
cccccacccaucaccccag

SEQ ID NO: 1010031 - RNA, 22 nt, Human
cccccacccaucaccccagugu

SEQ ID NO: 1010032 - RNA, 18 nt, Human
ccccccgcggcccccgag

SEQ ID NO: 1010033 - RNA, 21 nt, Human
cccccgagcccccucacaugg

SEQ ID NO: 1010034 - RNA, 22 nt, Human
cccccgagcccccucacauggc

SEQ ID NO: 1010035 - RNA, 21 nt, Human
cccccgcggcccccgagcccc

SEQ ID NO: 1010036 - RNA, 22 nt, Human
ccccucacauggcgccgggagc

SEQ ID NO: 1010037 - RNA, 24 nt, Human
ccccugauuaaccacauagacucu

SEQ ID NO: 1010038 - RNA, 24 nt, Human
cccucggaagcccccagugacucc

SEQ ID NO: 1010039 - RNA, 23 nt, Human
cccugcuagagggcagaaaagga

SEQ ID NO: 1010040 - RNA, 19 nt, Human
ccuagcggcugggcggagg

SEQ ID NO: 1010041 - RNA, 24 nt, Human
ccucacagccuccuccugaagccc

SEQ ID NO: 1010042 - RNA, 21 nt, Human
ccucacauggcgccgggagcc

SEQ ID NO: 1010043 - RNA, 23 nt, Human
ccuccacaaccccacaaauucuc

SEQ ID NO: 1010044 - RNA, 22 nt, Human
ccucugggaccuccccaccgcc

SEQ ID NO: 1010045 - RNA, 23 nt, Human
ccucugggaccuccccaccgccc

SEQ ID NO: 1010046 - RNA, 23 nt, Human
ccucugggaccuccccaccgccc

SEQ ID NO: 1010047 - RNA, 22 nt, Human
cgcccccacaaccuccacaacc

SEQ ID NO: 1010048 - RNA, 24 nt, Human
cgcccccacccaucaccccaguuu

SEQ ID NO: 1010049 - RNA, 23 nt, Human
cuagcugcuggccuccuccaucu

SEQ ID NO: 1010050 - RNA, 18 nt, Human
cucacagccuccuccuga

SEQ ID NO: 1010051 - RNA, 23 nt, Human
cuccagacagcuucuacccccac

SEQ ID NO: 1010052 - RNA, 23 nt, Human
cuccucugacccuccugaggucc

SEQ ID NO: 1010053 - RNA, 20 nt, Human
cuccugaggucccacaggcu

SEQ ID NO: 1010054 - RNA, 20 nt, Human
gagccaagcuaauggcagcu

SEQ ID NO: 1010055 - RNA, 26 nt, Human
gccagccucccaccucugggaccucc

SEQ ID NO: 1010056 - RNA, 18 nt, Human
gccgggccuccagacagc

SEQ ID NO: 1010057 - RNA, 18 nt, Human
ggaggguccagacgggga

SEQ ID NO: 1010058 - RNA, 20 nt, Human
ggcccccgagcccccucaca

SEQ ID NO: 1010059 - RNA, 24 nt, Human
gggaccuccccaccgcccccacaa

SEQ ID NO: 1010060 - RNA, 20 nt, Human
ggugcccagagagggggaag

SEQ ID NO: 1010061 - RNA, 23 nt, Human
uaagaaaacagcuuaagguuuug

SEQ ID NO: 1010062 - RNA, 19 nt, Human
uaagagccaagcuaauggc

SEQ ID NO: 1010063 - RNA, 22 nt, Human
uacaaaaccaagucuggggcag

SEQ ID NO: 1010064 - RNA, 23 nt, Human
ucaccccagaccccccaaagagc

SEQ ID NO: 1010065 - RNA, 21 nt, Human
ucaccgcccccacccaucacc

SEQ ID NO: 1010066 - RNA, 25 nt, Human
ucaccgcccccacccaucaccccag

SEQ ID NO: 1010067 - RNA, 25 nt, Human
uccagacaaaggggcagccccaaag

SEQ ID NO: 1010068 - RNA, 24 nt, Human
ucccaaaucccugauucgccaaca

SEQ ID NO: 1010069 - RNA, 21 nt, Human
uccccaccgcccccacaaccu

SEQ ID NO: 1010070 - RNA, 23 nt, Human
uccccaccgcccccacaaccucc

SEQ ID NO: 1010071 - RNA, 25 nt, Human
uccccaccgcccccacaaccuccac

SEQ ID NO: 1010072 - RNA, 22 nt, Human
ucccccaacccugaaggaguuu

SEQ ID NO: 1010073 - RNA, 23 nt, Human
ucccuccagccucacagccuccc

SEQ ID NO: 1010074 - RNA, 18 nt, Human
ucccuggccuagcggcug

SEQ ID NO: 1010075 - RNA, 23 nt, Human
uccuccugaagcccuuuccuucc

SEQ ID NO: 1010076 - RNA, 21 nt, Human
uccuugggacaggaccccauu

SEQ ID NO: 1010077 - RNA, 23 nt, Human
ucggaagcccccagugacuccag

SEQ ID NO: 1010078 - RNA, 24 nt, Human
ucuccggcggggagcgcccggccc

SEQ ID NO: 1010079 - RNA, 26 nt, Human
ugaagcccuuuccuuccaggcuccag

SEQ ID NO: 1010080 - RNA, 24 nt, Human
ugagccucaguuuccucaucuccg

SEQ ID NO: 1010081 - RNA, 22 nt, Human
ugagggggcaacaccaaguucc

SEQ ID NO: 1010082 - RNA, 21 nt, Human
ugauucgccaacagauucccc

SEQ ID NO: 1010083 - RNA, 19 nt, Human
ugccugauacagagccagg

SEQ ID NO: 1010084 - RNA, 20 nt, Human
ugccugauacagagccaggg

SEQ ID NO: 1010085 - RNA, 21 nt, Human
uggccgggccuccagacagcu

SEQ ID NO: 1010086 - RNA, 18 nt, Human
uggcgccgggagccgagc

SEQ ID NO: 1010087 - RNA, 21 nt, Human
uggcugggaggguccagacgg

SEQ ID NO: 1010088 - RNA, 21 nt, Human
uggcugggaggguccagacgg

SEQ ID NO: 1010089 - RNA, 23 nt, Human
uggcugggaggguccagacgggg

SEQ ID NO: 1010090 - RNA, 22 nt, Human
ugggaaaggacauguccuuagc

SEQ ID NO: 1010091 - RNA, 25 nt, Human
ugggacaggaccccauuaucccagc

SEQ ID NO: 1010092 - RNA, 19 nt, Human
ugggaggguccagacgggg

SEQ ID NO: 1010093 - RNA, 18 nt, Human
uggggagugauugggggg

SEQ ID NO: 1010094 - RNA, 25 nt, Human
ugucccguuuccuucagaguccccc

SEQ ID NO: 1010095 - RNA, 26 nt, Human
ugucccguuuccuucagaguccccca

SEQ ID NO: 1010096 - RNA, 23 nt, Human
uguccuuagccucagauugacuc

SEQ ID NO: 1010097 - RNA, 28 nt, Human
ugugggcagaagggugcccagagagggg

SEQ ID NO: 1010098 - RNA, 19 nt, Human
uucagagucccccaacccu

SEQ ID NO: 1010099 - RNA, 21 nt, Human
uuccaggagguggggagguca

SEQ ID NO: 1010100 - RNA, 20 nt, Human
uuccccaggcccugauuggc

SEQ ID NO: 1010101 - RNA, 18 nt, Human
uuuuuuuuuuuuuuuucg

SEQ ID NO: 1010102 - RNA, 18 nt, Human
aaaagaaaggacaacaga

SEQ ID NO: 1010103 - RNA, 20 nt, Human
aaaggacaacagaaacgcag

SEQ ID NO: 1010104 - RNA, 20 nt, Human
aaccaaagugucggggcccc

SEQ ID NO: 1010105 - RNA, 19 nt, Human
aagcgcucuugcuggaaau

SEQ ID NO: 1010106 - RNA, 19 nt, Human
aagcuggccccgccgcggc

SEQ ID NO: 1010107 - RNA, 28 nt, Human
aaggacccgaggaugcggggaacgcgau

SEQ ID NO: 1010108 - RNA, 22 nt, Human
aaucccuguccccucccauccc

SEQ ID NO: 1010109 - RNA, 22 nt, Human
accccgccuccccccaaaacca

SEQ ID NO: 1010110 - RNA, 23 nt, Human
accccgccuccccccaaaaccag

SEQ ID NO: 1010111 - RNA, 27 nt, Human
agaacccugcccgcaaaugcaccccgc

SEQ ID NO: 1010112 - RNA, 24 nt, Human
agagauguuuaaagcuuggccucc

SEQ ID NO: 1010113 - RNA, 20 nt, Human
agcggcggcggcggcggugg

SEQ ID NO: 1010114 - RNA, 24 nt, Human
agcggcggcggcggcggugguggc

SEQ ID NO: 1010115 - RNA, 19 nt, Human
auucaccacgagcacacca

SEQ ID NO: 1010116 - RNA, 21 nt, Human
caaaugcaccccgccuccccc

SEQ ID NO: 1010117 - RNA, 22 nt, Human
caacagaaacgcagacgcgaug

SEQ ID NO: 1010118 - RNA, 20 nt, Human
caaggaggcgagggcugggg

SEQ ID NO: 1010119 - RNA, 19 nt, Human
caccugauaaauugcacaa

SEQ ID NO: 1010120 - RNA, 20 nt, Human
cagccuuucccgcugcaggg

SEQ ID NO: 1010121 - RNA, 22 nt, Human
cagcggaaaggacagaaggacc

SEQ ID NO: 1010122 - RNA, 21 nt, Human
ccaaagugucggggccccacu

SEQ ID NO: 1010123 - RNA, 18 nt, Human
ccacacgcacaguagaac

SEQ ID NO: 1010124 - RNA, 19 nt, Human
ccagucagccuuucccgcu

SEQ ID NO: 1010125 - RNA, 24 nt, Human
cccccaaggucaaguugccacgcc

SEQ ID NO: 1010126 - RNA, 25 nt, Human
ccccucucccucccuucccaacccc

SEQ ID NO: 1010127 - RNA, 19 nt, Human
cccucucccucccuuccca

SEQ ID NO: 1010128 - RNA, 23 nt, Human
ccucccaucccccccauccccga

SEQ ID NO: 1010129 - RNA, 24 nt, Human
ccucccuucccaacccccucgaug

SEQ ID NO: 1010130 - RNA, 23 nt, Human
ccugcccgcaaaugcaccccgcc

SEQ ID NO: 1010131 - RNA, 22 nt, Human
cgaggaugcggggaacgcgaug

SEQ ID NO: 1010132 - RNA, 21 nt, Human
cgcaaaugcaccccgccuccc

SEQ ID NO: 1010133 - RNA, 26 nt, Human
cgcccccucucccucccuucccaacc

SEQ ID NO: 1010134 - RNA, 26 nt, Human
cggaaaggacagaaggacccgaggau

SEQ ID NO: 1010135 - RNA, 18 nt, Human
cggcggcggcggcggugg

SEQ ID NO: 1010136 - RNA, 18 nt, Human
cucagggcuggaccgggc

SEQ ID NO: 1010137 - RNA, 18 nt, Human
cucccucccuucccaacc

SEQ ID NO: 1010138 - RNA, 18 nt, Human
cucuaaauuagagauaga

SEQ ID NO: 1010139 - RNA, 19 nt, Human
cuggccccgccgcggcuuc

SEQ ID NO: 1010140 - RNA, 21 nt, Human
cuggcggagcggcggcggcuu

SEQ ID NO: 1010141 - RNA, 24 nt, Human
gaaaagaaaggacaacagaaacgc

SEQ ID NO: 1010142 - RNA, 22 nt, Human
gaaaggacaacagaaacgcaga

SEQ ID NO: 1010143 - RNA, 22 nt, Human
gacagcggaaaggacagaagga

SEQ ID NO: 1010144 - RNA, 19 nt, Human
gagcggcggcggcggcggu

SEQ ID NO: 1010145 - RNA, 20 nt, Human
gcaaaugcaccccgccuccc

SEQ ID NO: 1010146 - RNA, 22 nt, Human
gcaaaugcaccccgccuccccc

SEQ ID NO: 1010147 - RNA, 25 nt, Human
gccccgccgcggcuucucgccuucc

SEQ ID NO: 1010148 - RNA, 25 nt, Human
gcggcggcggugguggcuagugcac

SEQ ID NO: 1010149 - RNA, 20 nt, Human
gcugcgcccccucucccucc

SEQ ID NO: 1010150 - RNA, 23 nt, Human
gcuggugggggcggggugagggg

SEQ ID NO: 1010151 - RNA, 27 nt, Human
ggaaggacagagaacccugcccgcaaa

SEQ ID NO: 1010152 - RNA, 22 nt, Human
ggagcggcggcggcggcggugg

SEQ ID NO: 1010153 - RNA, 20 nt, Human
ggcagggcgcacugggcugg

SEQ ID NO: 1010154 - RNA, 20 nt, Human
ggccccgccgcggcuucucg

SEQ ID NO: 1010155 - RNA, 19 nt, Human
ggcggcggcggcgguggug

SEQ ID NO: 1010156 - RNA, 20 nt, Human
ggcggcggugguggcuagug

SEQ ID NO: 1010157 - RNA, 25 nt, Human
ggggacagcggaaaggaccgguacc

SEQ ID NO: 1010158 - RNA, 23 nt, Human
ggggcggggugaggggagaaggg

SEQ ID NO: 1010159 - RNA, 21 nt, Human
ggugaggggagaagggagaga

SEQ ID NO: 1010160 - RNA, 19 nt, Human
gucgcuaucuccgcuugcu

SEQ ID NO: 1010161 - RNA, 20 nt, Human
uagaacaguuccacaccuga

SEQ ID NO: 1010162 - RNA, 24 nt, Human
uccacaccugauaaauugcacaag

SEQ ID NO: 1010163 - RNA, 19 nt, Human
ucccaucccccccaucccc

SEQ ID NO: 1010164 - RNA, 18 nt, Human
uccccucccauccccccc

SEQ ID NO: 1010165 - RNA, 20 nt, Human
ucccuucccaacccccucga

SEQ ID NO: 1010166 - RNA, 23 nt, Human
ugaaggaaauugcccacccaaaa

SEQ ID NO: 1010167 - RNA, 19 nt, Human
ugcaaggaggcgagggcug

SEQ ID NO: 1010168 - RNA, 24 nt, Human
ugcaccccgccuccccccaaaacc

SEQ ID NO: 1010169 - RNA, 26 nt, Human
ugcgcccccucucccucccuucccaa

SEQ ID NO: 1010170 - RNA, 18 nt, Human
ugcuggaaauggcuggac

SEQ ID NO: 1010171 - RNA, 19 nt, Human
uggcagcaggucuggcgga

SEQ ID NO: 1010172 - RNA, 21 nt, Human
uggcggagcggcggcggcggc

SEQ ID NO: 1010173 - RNA, 22 nt, Human
ugggaagcgcucuugcuggaaa

SEQ ID NO: 1010174 - RNA, 20 nt, Human
ugggcuggugggggcggggu

SEQ ID NO: 1010175 - RNA, 26 nt, Human
ugggcuggugggggcggggugagggg

SEQ ID NO: 1010176 - RNA, 22 nt, Human
uggugggggcggggugagggga

SEQ ID NO: 1010177 - RNA, 20 nt, Human
uguccccucccauccccccc

SEQ ID NO: 1010178 - RNA, 21 nt, Human
uucaucuuauucaccacgagc

SEQ ID NO: 1010179 - RNA, 21 nt, Human
uucccaacccccucgaugacu

SEQ ID NO: 1010180 - RNA, 21 nt, Human
uucccagucagccuuucccgc

SEQ ID NO: 1010181 - RNA, 18 nt, Human
uugaaggaaauugcccac

SEQ ID NO: 1010182 - RNA, 19 nt, Human
accacaccuccaccuuccc

SEQ ID NO: 1010183 - RNA, 20 nt, Human
acgcaggcugcccacccugc

SEQ ID NO: 1010184 - RNA, 22 nt, Human
acgggcugccuguguaaguccu

SEQ ID NO: 1010185 - RNA, 21 nt, Human
acugacacgcagaggaugacc

SEQ ID NO: 1010186 - RNA, 21 nt, Human
agccgcaaguuguugacuucu

SEQ ID NO: 1010187 - RNA, 18 nt, Human
caaaagccucugagggga

SEQ ID NO: 1010188 - RNA, 24 nt, Human
cacagaucauuauaugagcugucc

SEQ ID NO: 1010189 - RNA, 21 nt, Human
caccaaucugugcacgaccac

SEQ ID NO: 1010190 - RNA, 18 nt, Human
caccacaccaaucugugc

SEQ ID NO: 1010191 - RNA, 22 nt, Human
cacccugcggcccagcacagcc

SEQ ID NO: 1010192 - RNA, 22 nt, Human
caccuccaccuucccagagccg

SEQ ID NO: 1010193 - RNA, 18 nt, Human
cacggcccagccucuggu

SEQ ID NO: 1010194 - RNA, 25 nt, Human
cacguugguguagguucggguuagc

SEQ ID NO: 1010195 - RNA, 21 nt, Human
cagccuccaugaucugcauga

SEQ ID NO: 1010196 - RNA, 19 nt, Human
caggcccccguugaucgug

SEQ ID NO: 1010197 - RNA, 20 nt, Human
cagguccugggucagugggg

SEQ ID NO: 1010198 - RNA, 19 nt, Human
caugaaucgauuuaucccu

SEQ ID NO: 1010199 - RNA, 20 nt, Human
ccacacauagaucuugaagc

SEQ ID NO: 1010200 - RNA, 20 nt, Human
ccacgcccucuggcaggucc

SEQ ID NO: 1010201 - RNA, 18 nt, Human
ccacggcaccugcccugc

SEQ ID NO: 1010202 - RNA, 24 nt, Human
cccaagugaagaaccauccaauga

SEQ ID NO: 1010203 - RNA, 24 nt, Human
ccccguugaucguggcgcuggugc

SEQ ID NO: 1010204 - RNA, 23 nt, Human
ccgggcuccucccugcuggggga

SEQ ID NO: 1010205 - RNA, 20 nt, Human
ccucaucauccaccacacca

SEQ ID NO: 1010206 - RNA, 26 nt, Human
ccuccacguggccaugcuguagaauu

SEQ ID NO: 1010207 - RNA, 21 nt, Human
ccuccugcagcagguccuggg

SEQ ID NO: 1010208 - RNA, 22 nt, Human
ccucgcgccgagcuucugguuc

SEQ ID NO: 1010209 - RNA, 19 nt, Human
ccucugaggggaguggaag

SEQ ID NO: 1010210 - RNA, 22 nt, Human
ccugccgcugccuccacguggc

SEQ ID NO: 1010211 - RNA, 25 nt, Human
ccuucucagaaaugcuggucuuggg

SEQ ID NO: 1010212 - RNA, 25 nt, Human
cgaccaccaccacguucccuguccc

SEQ ID NO: 1010213 - RNA, 21 nt, Human
cgccaacuccaggaccaccag

SEQ ID NO: 1010214 - RNA, 22 nt, Human
cgcuugggguccacgggcugcc

SEQ ID NO: 1010215 - RNA, 22 nt, Human
cuccaugaucugcaugaggucc

SEQ ID NO: 1010216 - RNA, 20 nt, Human
cuccuuggauuucccaaaga

SEQ ID NO: 1010217 - RNA, 18 nt, Human
cugccauccaccacuucc

SEQ ID NO: 1010218 - RNA, 22 nt, Human
cugccgggcugccauccaccac

SEQ ID NO: 1010219 - RNA, 22 nt, Human
cugguuccugcgccgcuucuca

SEQ ID NO: 1010220 - RNA, 24 nt, Human
cugguuccugcgccgcuucucaga

SEQ ID NO: 1010221 - RNA, 18 nt, Human
cuugggguccacgggcug

SEQ ID NO: 1010222 - RNA, 20 nt, Human
gaccagcacgaugggugugg

SEQ ID NO: 1010223 - RNA, 22 nt, Human
gcacgcaggcugcccacccugc

SEQ ID NO: 1010224 - RNA, 22 nt, Human
gccagccccgagccuucucaga

SEQ ID NO: 1010225 - RNA, 19 nt, Human
gccucugaggggaguggaa

SEQ ID NO: 1010226 - RNA, 19 nt, Human
ggauaggggcagucgagag

SEQ ID NO: 1010227 - RNA, 18 nt, Human
ggcggcacgcaggcugcc

SEQ ID NO: 1010228 - RNA, 20 nt, Human
ggcuguaggucaaagccagc

SEQ ID NO: 1010229 - RNA, 19 nt, Human
gggauaggggcagucgaga

SEQ ID NO: 1010230 - RNA, 21 nt, Human
gggcagucgagagggcuuggg

SEQ ID NO: 1010231 - RNA, 28 nt, Human
guagaauuccuccuuggauuucccaaag

SEQ ID NO: 1010232 - RNA, 22 nt, Human
uacaggcgaacauuggccuucu

SEQ ID NO: 1010233 - RNA, 27 nt, Human
uagaaguccuccuccugcagcaggucc

SEQ ID NO: 1010234 - RNA, 23 nt, Human
uaucucagagaugguugaugcug

SEQ ID NO: 1010235 - RNA, 24 nt, Human
uccaccauccugagcugggccgcu

SEQ ID NO: 1010236 - RNA, 20 nt, Human
uccacgggcugccuguguaa

SEQ ID NO: 1010237 - RNA, 20 nt, Human
ucccaaagauaucuuggaag

SEQ ID NO: 1010238 - RNA, 20 nt, Human
ucccucgcgccgagcuucug

SEQ ID NO: 1010239 - RNA, 19 nt, Human
ucccugccacacauagauc

SEQ ID NO: 1010240 - RNA, 21 nt, Human
ucccugcugggggagucuuca

SEQ ID NO: 1010241 - RNA, 24 nt, Human
uccugggagcccuugagggccugc

SEQ ID NO: 1010242 - RNA, 19 nt, Human
ucgagagggcuuggguuca

SEQ ID NO: 1010243 - RNA, 27 nt, Human
ucucagaaaugcuggucuugggcccau

SEQ ID NO: 1010244 - RNA, 21 nt, Human
ucuccugccgcugccuccacg

SEQ ID NO: 1010245 - RNA, 19 nt, Human
ugacuucugcuguuaucuc

SEQ ID NO: 1010246 - RNA, 22 nt, Human
ugcacgaccaccaccacguucc

SEQ ID NO: 1010247 - RNA, 18 nt, Human
ugcugcugacggagcugc

SEQ ID NO: 1010248 - RNA, 21 nt, Human
uggaagucagagucugagaga

SEQ ID NO: 1010249 - RNA, 20 nt, Human
uggccgggcuccucccugcu

SEQ ID NO: 1010250 - RNA, 19 nt, Human
uggcggcacgcaggcugcc

SEQ ID NO: 1010251 - RNA, 25 nt, Human
ugggagcccuugagggccugcaggg

SEQ ID NO: 1010252 - RNA, 23 nt, Human
uggggcuucgcacagaucauuau

SEQ ID NO: 1010253 - RNA, 21 nt, Human
ugguauguguagagcacaagg

SEQ ID NO: 1010254 - RNA, 22 nt, Human
uguagguauguugggguccagg

SEQ ID NO: 1010255 - RNA, 22 nt, Human
uguccugggagcccuugagggc

SEQ ID NO: 1010256 - RNA, 24 nt, Human
uguggccgggcuccucccugcugg

SEQ ID NO: 1010257 - RNA, 18 nt, Human
uguugggguccaggggau

SEQ ID NO: 1010258 - RNA, 23 nt, Human
uuacaugaaucgauuuaucccuc

SEQ ID NO: 1010259 - RNA, 30 nt, Human
uuagcccuuggccuggaugaagccccacaa

SEQ ID NO: 1010260 - RNA, 18 nt, Human
uuccucagcguugcuguu

SEQ ID NO: 1010261 - RNA, 27 nt, Human
uuccucagcguugcuguucaggccuca

SEQ ID NO: 1010262 - RNA, 21 nt, Human
uucggguuagcccuuggccuc

SEQ ID NO: 1010263 - RNA, 26 nt, Human
uuuucuccugccgcugccuccacgug

SEQ ID NO: 1010264 - RNA, 22 nt, Human
aaauaacaacuuaaaaaucuca

SEQ ID NO: 1010265 - RNA, 18 nt, Human
acauugucaugacaaaaa

SEQ ID NO: 1010266 - RNA, 21 nt, Human
accacacagaaugaauauucu

SEQ ID NO: 1010267 - RNA, 19 nt, Human
acuugaugcaccgugcgug

SEQ ID NO: 1010268 - RNA, 24 nt, Human
agcacccucaacaugauguagccu

SEQ ID NO: 1010269 - RNA, 22 nt, Human
aggaagaaacagggagaggucc

SEQ ID NO: 1010270 - RNA, 20 nt, Human
aucacaaaucccauccaaau

SEQ ID NO: 1010271 - RNA, 26 nt, Human
augauggcaaagaauaauaacaagac

SEQ ID NO: 1010272 - RNA, 22 nt, Human
caaaaaauuuucaccacacaga

SEQ ID NO: 1010273 - RNA, 22 nt, Human
caacacgucaguuaguaaagca

SEQ ID NO: 1010274 - RNA, 23 nt, Human
caagacauuuguuucuccaugcc

SEQ ID NO: 1010275 - RNA, 21 nt, Human
caccacacagaaugaauauuc

SEQ ID NO: 1010276 - RNA, 19 nt, Human
cacccuuguuugaagaagg

SEQ ID NO: 1010277 - RNA, 23 nt, Human
cacccuuguuugaagaaggcaau

SEQ ID NO: 1010278 - RNA, 24 nt, Human
caccgugcgugccccauuaagcug

SEQ ID NO: 1010279 - RNA, 23 nt, Human
cagggagagguccaagaaccuuu

SEQ ID NO: 1010280 - RNA, 24 nt, Human
cuuuuuuuuuuuuuuuucauccuu

SEQ ID NO: 1010281 - RNA, 22 nt, Human
gaaaaagcaugauggcaaagaa

SEQ ID NO: 1010282 - RNA, 20 nt, Human
gaacauuuauuuugaaaaca

SEQ ID NO: 1010283 - RNA, 20 nt, Human
gcucuacguaagccugucgu

SEQ ID NO: 1010284 - RNA, 18 nt, Human
guuacagaguucuaauca

SEQ ID NO: 1010285 - RNA, 19 nt, Human
uaaaaucuccagcacccuc

SEQ ID NO: 1010286 - RNA, 24 nt, Human
uaaaaucuccagcacccucaacau

SEQ ID NO: 1010287 - RNA, 20 nt, Human
ucagaaauaacaacuuaaaa

SEQ ID NO: 1010288 - RNA, 25 nt, Human
uccugcaucacaaaucccauccaaa

SEQ ID NO: 1010289 - RNA, 20 nt, Human
ucuaaucagaaauaacaacu

SEQ ID NO: 1010290 - RNA, 18 nt, Human
ugaaaaagcaugauggca

SEQ ID NO: 1010291 - RNA, 25 nt, Human
ugaaaaagcaugauggcaaagaaua

SEQ ID NO: 1010292 - RNA, 22 nt, Human
ugacaaaaaugaaacuugcuga

SEQ ID NO: 1010293 - RNA, 21 nt, Human
uugaagaaggcaauuuuuuuu

SEQ ID NO: 1010294 - RNA, 23 nt, Human
aaaaauaagccuccaaaccgguu

SEQ ID NO: 1010295 - RNA, 20 nt, Human
aaaauugcuacaaugacagg

SEQ ID NO: 1010296 - RNA, 19 nt, Human
aaacacucacuuuuucuag

SEQ ID NO: 1010297 - RNA, 25 nt, Human
aaacugaccuuacuaacguuuucca

SEQ ID NO: 1010298 - RNA, 24 nt, Human
aaagcuaugaaacuguauagggcu

SEQ ID NO: 1010299 - RNA, 19 nt, Human
aaagugcugggguuacagg

SEQ ID NO: 1010300 - RNA, 24 nt, Human
aaagugcugggguuacaggcauga

SEQ ID NO: 1010301 - RNA, 25 nt, Human
aagcagcugggauuacaagcaccug

SEQ ID NO: 1010302 - RNA, 21 nt, Human
aagugcugggguuacaggcau

SEQ ID NO: 1010303 - RNA, 26 nt, Human
aagugcugggguuacaggcaugagcc

SEQ ID NO: 1010304 - RNA, 24 nt, Human
aaguguacuuaaaacauaguaguu

SEQ ID NO: 1010305 - RNA, 24 nt, Human
accauauuacaaaagcaauuggua

SEQ ID NO: 1010306 - RNA, 18 nt, Human
accauguuggccaggcug

SEQ ID NO: 1010307 - RNA, 24 nt, Human
acccaggcuggagugcaauggugu

SEQ ID NO: 1010308 - RNA, 18 nt, Human
acucugccacccaggcug

SEQ ID NO: 1010309 - RNA, 26 nt, Human
acucugccacccaggcuggagugcaa

SEQ ID NO: 1010310 - RNA, 18 nt, Human
agacaacauuaugaucua

SEQ ID NO: 1010311 - RNA, 26 nt, Human
agaugcuaaaaauaagccuccaaacc

SEQ ID NO: 1010312 - RNA, 24 nt, Human
agcugggauuacaagcaccugcca

SEQ ID NO: 1010313 - RNA, 19 nt, Human
aggaacgcagaagugcuag

SEQ ID NO: 1010314 - RNA, 19 nt, Human
agguuucaccauguuggcc

SEQ ID NO: 1010315 - RNA, 21 nt, Human
agguuucaccauguuggccag

SEQ ID NO: 1010316 - RNA, 22 nt, Human
agguuucaccauguuggccagg

SEQ ID NO: 1010317 - RNA, 23 nt, Human
agugcaauggugugaucuuggcu

SEQ ID NO: 1010318 - RNA, 24 nt, Human
agugcaauggugugaucuuggcuc

SEQ ID NO: 1010319 - RNA, 21 nt, Human
aguuuauuagcaauucagagg

SEQ ID NO: 1010320 - RNA, 24 nt, Human
aucauauuucucaaucugaauaca

SEQ ID NO: 1010321 - RNA, 25 nt, Human
augaccauuuuuccauuuucuuucu

SEQ ID NO: 1010322 - RNA, 23 nt, Human
caaaaaaaaacuaugaacagagu

SEQ ID NO: 1010323 - RNA, 24 nt, Human
caaagugcugggguuacaggcaug

SEQ ID NO: 1010324 - RNA, 18 nt, Human
caacaaagcugcuugucu

SEQ ID NO: 1010325 - RNA, 23 nt, Human
caagcaagcccuuauuucuggcc

SEQ ID NO: 1010326 - RNA, 22 nt, Human
caagcaauucuccugcuucagc

SEQ ID NO: 1010327 - RNA, 18 nt, Human
cacaguaaugcuaaaaca

SEQ ID NO: 1010328 - RNA, 24 nt, Human
caccacaccuggcuaauuuuugua

SEQ ID NO: 1010329 - RNA, 24 nt, Human
caccagaugcuaaaaauaagccuc

SEQ ID NO: 1010330 - RNA, 21 nt, Human
caccauguuggccaggcuggu

SEQ ID NO: 1010331 - RNA, 24 nt, Human
caccauguuggccaggcuggucuc

SEQ ID NO: 1010332 - RNA, 27 nt, Human
caccauguuggccaggcuggucucaaa

SEQ ID NO: 1010333 - RNA, 24 nt, Human
caccugggccucccccaaagugcu

SEQ ID NO: 1010334 - RNA, 22 nt, Human
cacucugccacccaggcuggag

SEQ ID NO: 1010335 - RNA, 23 nt, Human
cacucugccacccaggcuggagu

SEQ ID NO: 1010336 - RNA, 23 nt, Human
cagccucccaagcagcugggauu

SEQ ID NO: 1010337 - RNA, 22 nt, Human
cauaaaggcagcaacaaagcug

SEQ ID NO: 1010338 - RNA, 22 nt, Human
caucccuuccuaggaagucuca

SEQ ID NO: 1010339 - RNA, 24 nt, Human
caugagauuaaggcauuaaaauca

SEQ ID NO: 1010340 - RNA, 24 nt, Human
cauguuggccaggcuggucucaaa

SEQ ID NO: 1010341 - RNA, 23 nt, Human
ccaaagugcugggguuacaggca

SEQ ID NO: 1010342 - RNA, 24 nt, Human
ccaaagugcugggguuacaggcau

SEQ ID NO: 1010343 - RNA, 22 nt, Human
ccaagcagcugggauuacaagc

SEQ ID NO: 1010344 - RNA, 23 nt, Human
ccaauaaucugccaucuccauga

SEQ ID NO: 1010345 - RNA, 20 nt, Human
ccauauuacaaaagcaauug

SEQ ID NO: 1010346 - RNA, 24 nt, Human
cccaaagugcugggguuacaggca

SEQ ID NO: 1010347 - RNA, 19 nt, Human
cccaagcagcugggauuac

SEQ ID NO: 1010348 - RNA, 24 nt, Human
ccccaaagugcugggguuacaggc

SEQ ID NO: 1010349 - RNA, 19 nt, Human
ccggguucaagcaauucuc

SEQ ID NO: 1010350 - RNA, 22 nt, Human
ccggguucaagcaauucuccug

SEQ ID NO: 1010351 - RNA, 18 nt, Human
ccuccaaccuacuuguuu

SEQ ID NO: 1010352 - RNA, 23 nt, Human
ccuccggguucaagcaauucucc

SEQ ID NO: 1010353 - RNA, 20 nt, Human
ccugaccucaaaugauccac

SEQ ID NO: 1010354 - RNA, 24 nt, Human
ccugaccucaaaugauccacccac

SEQ ID NO: 1010355 - RNA, 23 nt, Human
ccugccuccggguucaagcaauu

SEQ ID NO: 1010356 - RNA, 22 nt, Human
cuaacaaaauugcuacaaugac

SEQ ID NO: 1010357 - RNA, 20 nt, Human
cuaauuuuuguauuuuuagg

SEQ ID NO: 1010358 - RNA, 24 nt, Human
cucaaaugauccacccaccugggc

SEQ ID NO: 1010359 - RNA, 19 nt, Human
cucagcuuaaugcaggaaa

SEQ ID NO: 1010360 - RNA, 23 nt, Human
cugcuucagccucccaagcagcu

SEQ ID NO: 1010361 - RNA, 23 nt, Human
cugggccucccccaaagugcugg

SEQ ID NO: 1010362 - RNA, 19 nt, Human
cuuagauuaaggcuaaugc

SEQ ID NO: 1010363 - RNA, 19 nt, Human
cuuauuuucuucacuucug

SEQ ID NO: 1010364 - RNA, 22 nt, Human
cuuccuguagcaugggcaaaua

SEQ ID NO: 1010365 - RNA, 20 nt, Human
cuucugucccuucaagucuu

SEQ ID NO: 1010366 - RNA, 21 nt, Human
gaacagaguucaaauacagga

SEQ ID NO: 1010367 - RNA, 18 nt, Human
gaagauuacuacugcaaa

SEQ ID NO: 1010368 - RNA, 20 nt, Human
gaguacaguuacagcaaguc

SEQ ID NO: 1010369 - RNA, 21 nt, Human
gcaaccccugccuccggguuc

SEQ ID NO: 1010370 - RNA, 21 nt, Human
gcucacugcaaccccugccuc

SEQ ID NO: 1010371 - RNA, 23 nt, Human
gcuggucucaaacuccugaccuc

SEQ ID NO: 1010372 - RNA, 21 nt, Human
ggcaagcaagcccuuauuucu

SEQ ID NO: 1010373 - RNA, 22 nt, Human
ggcuggagugcaauggugugau

SEQ ID NO: 1010374 - RNA, 24 nt, Human
ggcuggucucaaacuccugaccuc

SEQ ID NO: 1010375 - RNA, 20 nt, Human
gggaaaaaucugacucagua

SEQ ID NO: 1010376 - RNA, 22 nt, Human
ggguuacaggcaugagccacug

SEQ ID NO: 1010377 - RNA, 22 nt, Human
gguuacaggcaugagccacugc

SEQ ID NO: 1010378 - RNA, 22 nt, Human
gugauuuuugaaugcugcacag

SEQ ID NO: 1010379 - RNA, 23 nt, Human
uaaaaacaaacuacaugagauua

SEQ ID NO: 1010380 - RNA, 24 nt, Human
uaaaaacaccagcuuuucagaagu

SEQ ID NO: 1010381 - RNA, 19 nt, Human
uaaaaauaagccuccaaac

SEQ ID NO: 1010382 - RNA, 18 nt, Human
uaaaacacccagcuuuga

SEQ ID NO: 1010383 - RNA, 24 nt, Human
uaaaacacccagcuuugagauccu

SEQ ID NO: 1010384 - RNA, 19 nt, Human
uaaaggcagcaacaaagcu

SEQ ID NO: 1010385 - RNA, 26 nt, Human
uaaaggcagcaacaaagcuggagacc

SEQ ID NO: 1010386 - RNA, 20 nt, Human
uaaaucuucuuccaaaaaag

SEQ ID NO: 1010387 - RNA, 20 nt, Human
uaacuucuugggguccuccu

SEQ ID NO: 1010388 - RNA, 21 nt, Human
uaacuucuugggguccuccuc

SEQ ID NO: 1010389 - RNA, 21 nt, Human
uaauaucaccuugccuuucaa

SEQ ID NO: 1010390 - RNA, 18 nt, Human
uaaugcauauaacagacu

SEQ ID NO: 1010391 - RNA, 22 nt, Human
uacaaaagcaauugguacccau

SEQ ID NO: 1010392 - RNA, 22 nt, Human
uacaagcaccugccaccacacc

SEQ ID NO: 1010393 - RNA, 23 nt, Human
uacacaguaaugcuaaaacaccc

SEQ ID NO: 1010394 - RNA, 18 nt, Human
uacaggacuguuuguuuu

SEQ ID NO: 1010395 - RNA, 23 nt, Human
uacaggcaugagccacugcaccc

SEQ ID NO: 1010396 - RNA, 18 nt, Human
uagaaccuuuguauccuc

SEQ ID NO: 1010397 - RNA, 23 nt, Human
uagguuucaccauguuggccagg

SEQ ID NO: 1010398 - RNA, 22 nt, Human
uaucaccuugccuuucaaaaua

SEQ ID NO: 1010399 - RNA, 21 nt, Human
uauuuuaaaucuucuuccaaa

SEQ ID NO: 1010400 - RNA, 22 nt, Human
ucaaucugaauacauguuaaaa

SEQ ID NO: 1010401 - RNA, 24 nt, Human
ucacucugccacccaggcuggagu

SEQ ID NO: 1010402 - RNA, 20 nt, Human
ucacugcaaccccugccucc

SEQ ID NO: 1010403 - RNA, 23 nt, Human
ucacugcaaccccugccuccggg

SEQ ID NO: 1010404 - RNA, 25 nt, Human
ucacugcaaccccugccuccggguu

SEQ ID NO: 1010405 - RNA, 20 nt, Human
ucagccucccaagcagcugg

SEQ ID NO: 1010406 - RNA, 23 nt, Human
ucaguaacuucuugggguccucc

SEQ ID NO: 1010407 - RNA, 23 nt, Human
uccacccaccugggccuccccca

SEQ ID NO: 1010408 - RNA, 18 nt, Human
uccugaccucaaaugauc

SEQ ID NO: 1010409 - RNA, 20 nt, Human
ucuaaaguguacuuaaaaca

SEQ ID NO: 1010410 - RNA, 23 nt, Human
ucucacucugccacccaggcugg

SEQ ID NO: 1010411 - RNA, 24 nt, Human
ucucacucugccacccaggcugga

SEQ ID NO: 1010412 - RNA, 26 nt, Human
ucucacucugccacccaggcuggagu

SEQ ID NO: 1010413 - RNA, 27 nt, Human
ucucacucugccacccaggcuggagug

SEQ ID NO: 1010414 - RNA, 24 nt, Human
ucugccacccaggcuggagugcaa

SEQ ID NO: 1010415 - RNA, 20 nt, Human
ugaaauuaaaaacaaacuac

SEQ ID NO: 1010416 - RNA, 24 nt, Human
ugaacagaguucaaauacaggacu

SEQ ID NO: 1010417 - RNA, 20 nt, Human
ugaccuuacuaacguuuucc

SEQ ID NO: 1010418 - RNA, 18 nt, Human
ugagacagagucucacuc

SEQ ID NO: 1010419 - RNA, 22 nt, Human
ugagacagagucucacucugcc

SEQ ID NO: 1010420 - RNA, 26 nt, Human
ugauccacccaccugggccuccccca

SEQ ID NO: 1010421 - RNA, 18 nt, Human
ugaugagaacaccugcuu

SEQ ID NO: 1010422 - RNA, 20 nt, Human
ugaugagaacaccugcuuga

SEQ ID NO: 1010423 - RNA, 24 nt, Human
ugcaaccccugccuccggguucaa

SEQ ID NO: 1010424 - RNA, 23 nt, Human
ugcaauggugugaucuuggcucc

SEQ ID NO: 1010425 - RNA, 19 nt, Human
ugcacccggccacuguugc

SEQ ID NO: 1010426 - RNA, 22 nt, Human
ugcaggaaauugguuuaauuuc

SEQ ID NO: 1010427 - RNA, 20 nt, Human
ugccacccaggcuggagugc

SEQ ID NO: 1010428 - RNA, 23 nt, Human
ugccacuuucuuuuugguagcuu

SEQ ID NO: 1010429 - RNA, 22 nt, Human
ugccuccggguucaagcaauuc

SEQ ID NO: 1010430 - RNA, 18 nt, Human
ugcuaaaaauaagccucc

SEQ ID NO: 1010431 - RNA, 24 nt, Human
ugcuucagccucccaagcagcugg

SEQ ID NO: 1010432 - RNA, 19 nt, Human
uggagugcaauggugugau

SEQ ID NO: 1010433 - RNA, 23 nt, Human
uggagugcaauggugugaucuug

SEQ ID NO: 1010434 - RNA, 24 nt, Human
uggagugcaauggugugaucuugg

SEQ ID NO: 1010435 - RNA, 24 nt, Human
uggauucaguguuuaaaaacugac

SEQ ID NO: 1010436 - RNA, 24 nt, Human
uggccaggcuggucucaaacuccu

SEQ ID NO: 1010437 - RNA, 18 nt, Human
ugggaaaaaucugacuca

SEQ ID NO: 1010438 - RNA, 21 nt, Human
ugggaaaaaucugacucagua

SEQ ID NO: 1010439 - RNA, 22 nt, Human
ugggauuacaagcaccugccac

SEQ ID NO: 1010440 - RNA, 24 nt, Human
ugggauuacaagcaccugccacca

SEQ ID NO: 1010441 - RNA, 18 nt, Human
ugggguuacaggcaugag

SEQ ID NO: 1010442 - RNA, 19 nt, Human
ugggguuacaggcaugagc

SEQ ID NO: 1010443 - RNA, 22 nt, Human
ugggguuacaggcaugagccac

SEQ ID NO: 1010444 - RNA, 22 nt, Human
ugggguuacaggcaugagccac

SEQ ID NO: 1010445 - RNA, 24 nt, Human
ugggguuacaggcaugagccacug

SEQ ID NO: 1010446 - RNA, 24 nt, Human
ugggguuacaggcaugagccacug

SEQ ID NO: 1010447 - RNA, 24 nt, Human
uggguauuaauauuucuggguucu

SEQ ID NO: 1010448 - RNA, 24 nt, Human
uuaauucuuaucuaccuucuacau

SEQ ID NO: 1010449 - RNA, 21 nt, Human
uuacaggcaugagccacugca

SEQ ID NO: 1010450 - RNA, 21 nt, Human
uuagguuugcuuuuaguuucu

SEQ ID NO: 1010451 - RNA, 23 nt, Human
uucaaaauaucccuccaaccuuu

SEQ ID NO: 1010452 - RNA, 24 nt, Human
uucaagcaauucuccugcuucagc

SEQ ID NO: 1010453 - RNA, 22 nt, Human
uucauagugucaacugaccuug

SEQ ID NO: 1010454 - RNA, 27 nt, Human
uuccagaaaccauuuccuuccuggugg

SEQ ID NO: 1010455 - RNA, 22 nt, Human
uuguauccucuuuguuuuuagu

SEQ ID NO: 1010456 - RNA, 23 nt, Human
uuguauuuuuagguuucaccaug

SEQ ID NO: 1010457 - RNA, 25 nt, Human
uuuaaaaaugaccauuuuuccauuu

SEQ ID NO: 1010458 - RNA, 24 nt, Human
uuuacacaguaaugcuaaaacacc

SEQ ID NO: 1010459 - RNA, 24 nt, Human
uuuagguuucaccauguuggccag

SEQ ID NO: 1010460 - RNA, 24 nt, Human
uuucaccauguuggccaggcuggu

SEQ ID NO: 1010461 - RNA, 21 nt, Human
uuuccugaugaguuuccuuua

SEQ ID NO: 1010462 - RNA, 24 nt, Human
uuuuuuuuuuuuuuuuuuaauuuu

SEQ ID NO: 1010463 - RNA, 20 nt, Human
agaagacagcucugaucuca

SEQ ID NO: 1010464 - RNA, 21 nt, Human
agacagcucugaucucagccc

SEQ ID NO: 1010465 - RNA, 21 nt, Human
agggcuuacaccugaaguucu

SEQ ID NO: 1010466 - RNA, 23 nt, Human
cacggagaccgcagauccucacu

SEQ ID NO: 1010467 - RNA, 20 nt, Human
cagaagacagcucugaucuc

SEQ ID NO: 1010468 - RNA, 23 nt, Human
ccagaagacagcucugaucucag

SEQ ID NO: 1010469 - RNA, 18 nt, Human
ccccaccagcguccuucu

SEQ ID NO: 1010470 - RNA, 20 nt, Human
ccgcagauccucacuacuca

SEQ ID NO: 1010471 - RNA, 20 nt, Human
gcucugaucucagcccccac

SEQ ID NO: 1010472 - RNA, 25 nt, Human
uccuucucuuccaagcacagcucuc

SEQ ID NO: 1010473 - RNA, 21 nt, Human
ucuugucagcuuuuccggggc

SEQ ID NO: 1010474 - RNA, 20 nt, Human
aagggacaccgaguguguug

SEQ ID NO: 1010475 - RNA, 22 nt, Human
accccaguggguuggccagguu

SEQ ID NO: 1010476 - RNA, 23 nt, Human
acugagguugaggguauggccag

SEQ ID NO: 1010477 - RNA, 24 nt, Human
aucugaguuuauucugccacugcu

SEQ ID NO: 1010478 - RNA, 26 nt, Human
cauuuccagcccacugagguugaggg

SEQ ID NO: 1010479 - RNA, 21 nt, Human
ccaggaugaaagggacaccga

SEQ ID NO: 1010480 - RNA, 19 nt, Human
cccacugucauuuccagcc

SEQ ID NO: 1010481 - RNA, 23 nt, Human
ccccuaccccaguggguuggcca

SEQ ID NO: 1010482 - RNA, 20 nt, Human
cccuaccccuaccccagugg

SEQ ID NO: 1010483 - RNA, 23 nt, Human
ccgaguguguuggggugggggug

SEQ ID NO: 1010484 - RNA, 20 nt, Human
gcuuugaucccuaccccuac

SEQ ID NO: 1010485 - RNA, 19 nt, Human
ucccuaggagccggacgcg

SEQ ID NO: 1010486 - RNA, 26 nt, Human
ugaaagggacaccgaguguguugggg

SEQ ID NO: 1010487 - RNA, 18 nt, Human
uggcuggcuuugaucccu

SEQ ID NO: 1010488 - RNA, 20 nt, Human
ugggguggggguggcuggcu

SEQ ID NO: 1010489 - RNA, 20 nt, Human
uuuauucugccacugcuaca

SEQ ID NO: 1010490 - RNA, 18 nt, Human
uuuuuuuuuuuuuuuuug

SEQ ID NO: 1010491 - RNA, 20 nt, Human
aaaaacaucacaaacaucug

SEQ ID NO: 1010492 - RNA, 22 nt, Human
aaaaauggagaaaacaaaaaga

SEQ ID NO: 1010493 - RNA, 27 nt, Human
aaacaucacaaacaucuguuggggagc

SEQ ID NO: 1010494 - RNA, 20 nt, Human
aaagucacgaucuaugaaag

SEQ ID NO: 1010495 - RNA, 22 nt, Human
aagacagcaccacgcagaaaac

SEQ ID NO: 1010496 - RNA, 20 nt, Human
aaggaagaaaaaaaaaaggg

SEQ ID NO: 1010497 - RNA, 20 nt, Human
aaguccucuuuuucuucuuc

SEQ ID NO: 1010498 - RNA, 20 nt, Human
aagugcagccagccuagcug

SEQ ID NO: 1010499 - RNA, 21 nt, Human
agacaggaauggaagacagca

SEQ ID NO: 1010500 - RNA, 22 nt, Human
agccacaaaaacaucacaaaca

SEQ ID NO: 1010501 - RNA, 24 nt, Human
agcuacuugggaggcugagguggg

SEQ ID NO: 1010502 - RNA, 18 nt, Human
agcugccugaacugagca

SEQ ID NO: 1010503 - RNA, 19 nt, Human
aggaaaaaaaauggagaaa

SEQ ID NO: 1010504 - RNA, 25 nt, Human
aggaaaaaaaauggagaaaacaaaa

SEQ ID NO: 1010505 - RNA, 19 nt, Human
aggaauggaagacagcacc

SEQ ID NO: 1010506 - RNA, 24 nt, Human
aggaucgcuugagcccaggaguuc

SEQ ID NO: 1010507 - RNA, 24 nt, Human
aggcugaggugggaggaucgcuug

SEQ ID NO: 1010508 - RNA, 24 nt, Human
agggguuuucugguggccggguac

SEQ ID NO: 1010509 - RNA, 23 nt, Human
aggugggaggaucgcuugagccc

SEQ ID NO: 1010510 - RNA, 18 nt, Human
agugagacaggaauggaa

SEQ ID NO: 1010511 - RNA, 23 nt, Human
aucgcuugagcccaggaguucaa

SEQ ID NO: 1010512 - RNA, 22 nt, Human
caagauacagucuaaaaacuca

SEQ ID NO: 1010513 - RNA, 19 nt, Human
cacauggcaaaaauggaau

SEQ ID NO: 1010514 - RNA, 18 nt, Human
cacauuagccauugguga

SEQ ID NO: 1010515 - RNA, 24 nt, Human
caccgcccuccagcagagcugccu

SEQ ID NO: 1010516 - RNA, 23 nt, Human
cagcacuucaucucaaaggaaaa

SEQ ID NO: 1010517 - RNA, 24 nt, Human
cagcuacuugggaggcugaggugg

SEQ ID NO: 1010518 - RNA, 18 nt, Human
ccacagcugaacacagcc

SEQ ID NO: 1010519 - RNA, 21 nt, Human
ccagugaaggaagaaaaaaaa

SEQ ID NO: 1010520 - RNA, 26 nt, Human
cccacagcugaacacagcccuagggc

SEQ ID NO: 1010521 - RNA, 25 nt, Human
cccaccauggugacagccacaaaaa

SEQ ID NO: 1010522 - RNA, 18 nt, Human
cccaucgccgucggccac

SEQ ID NO: 1010523 - RNA, 21 nt, Human
cccccuccgauccccugaccc

SEQ ID NO: 1010524 - RNA, 21 nt, Human
cccguggagcaagugcagcca

SEQ ID NO: 1010525 - RNA, 19 nt, Human
ccgcccuccagcagagcug

SEQ ID NO: 1010526 - RNA, 21 nt, Human
ccgcuguacuccaaccuaggc

SEQ ID NO: 1010527 - RNA, 22 nt, Human
ccgcuguacuccaaccuaggca

SEQ ID NO: 1010528 - RNA, 22 nt, Human
ccuagcugcagaucucucgcug

SEQ ID NO: 1010529 - RNA, 18 nt, Human
ccuguagucccagcuacu

SEQ ID NO: 1010530 - RNA, 21 nt, Human
ccuguagucccagcuacuugg

SEQ ID NO: 1010531 - RNA, 19 nt, Human
ccuucccagcuuugaaguc

SEQ ID NO: 1010532 - RNA, 21 nt, Human
cgacucgaugacacauggcaa

SEQ ID NO: 1010533 - RNA, 18 nt, Human
cucaaaaucagagaauuc

SEQ ID NO: 1010534 - RNA, 18 nt, Human
cucaaaggaaaaaaaaug

SEQ ID NO: 1010535 - RNA, 24 nt, Human
cucaaaggaaaaaaaauggagaaa

SEQ ID NO: 1010536 - RNA, 21 nt, Human
cugaaagaaucccaccauggu

SEQ ID NO: 1010537 - RNA, 23 nt, Human
cugacucagugaauuuccaggag

SEQ ID NO: 1010538 - RNA, 19 nt, Human
cuugaucuuuccuuuuaau

SEQ ID NO: 1010539 - RNA, 22 nt, Human
gagcaagugugaguccacccau

SEQ ID NO: 1010540 - RNA, 21 nt, Human
gaggugggaggaucgcuugag

SEQ ID NO: 1010541 - RNA, 22 nt, Human
gauucuaaaguuggcaauuuua

SEQ ID NO: 1010542 - RNA, 20 nt, Human
gcaccgcccuccagcagagc

SEQ ID NO: 1010543 - RNA, 23 nt, Human
gccaaaucuucuuuaucucgaaa

SEQ ID NO: 1010544 - RNA, 24 nt, Human
gcccaggaguucaaggcugcagug

SEQ ID NO: 1010545 - RNA, 22 nt, Human
gccggguacaaggaagcaccca

SEQ ID NO: 1010546 - RNA, 24 nt, Human
ggaaaauaacacaaagucacgauc

SEQ ID NO: 1010547 - RNA, 23 nt, Human
ggaucgcuugagcccaggaguuc

SEQ ID NO: 1010548 - RNA, 22 nt, Human
ggcauaaaucagacaagaagaa

SEQ ID NO: 1010549 - RNA, 19 nt, Human
gggguuuucugguggccgg

SEQ ID NO: 1010550 - RNA, 23 nt, Human
gggguuuucugguggccggguac

SEQ ID NO: 1010551 - RNA, 24 nt, Human
gguggccggguacaaggaagcacc

SEQ ID NO: 1010552 - RNA, 23 nt, Human
gucucauucugaaagaaucccac

SEQ ID NO: 1010553 - RNA, 18 nt, Human
uaaccacgggcauaaauc

SEQ ID NO: 1010554 - RNA, 24 nt, Human
uaagcagcuggaugcaugugcaca

SEQ ID NO: 1010555 - RNA, 25 nt, Human
uacaaggaagcacccaucuuaagca

SEQ ID NO: 1010556 - RNA, 22 nt, Human
uagaaggaacuaaaacuuccug

SEQ ID NO: 1010557 - RNA, 18 nt, Human
uauauugcccacagcuga

SEQ ID NO: 1010558 - RNA, 19 nt, Human
uaugacagcguuguauaaa

SEQ ID NO: 1010559 - RNA, 21 nt, Human
uauugugauccagaacuccca

SEQ ID NO: 1010560 - RNA, 23 nt, Human
ucaaucccccuccgauccccuga

SEQ ID NO: 1010561 - RNA, 18 nt, Human
ucagugaauuuccaggag

SEQ ID NO: 1010562 - RNA, 23 nt, Human
ucgcuugagcccaggaguucaag

SEQ ID NO: 1010563 - RNA, 24 nt, Human
ucgcuugagcccaggaguucaagg

SEQ ID NO: 1010564 - RNA, 21 nt, Human
ucuaugaaagaggaguuccag

SEQ ID NO: 1010565 - RNA, 21 nt, Human
ucuaugaacacauaugacaaa

SEQ ID NO: 1010566 - RNA, 22 nt, Human
ucucagucuaaucugaauccau

SEQ ID NO: 1010567 - RNA, 19 nt, Human
ucuguuggggagcgacucg

SEQ ID NO: 1010568 - RNA, 18 nt, Human
ucuucuucuucugguuua

SEQ ID NO: 1010569 - RNA, 22 nt, Human
ucuuguuugagaaugaaaaccc

SEQ ID NO: 1010570 - RNA, 18 nt, Human
ugaaagaaucccaccaug

SEQ ID NO: 1010571 - RNA, 19 nt, Human
ugaaagaaucccaccaugg

SEQ ID NO: 1010572 - RNA, 21 nt, Human
ugaaagaaucccaccauggug

SEQ ID NO: 1010573 - RNA, 21 nt, Human
ugaaagaggaguuccaggggu

SEQ ID NO: 1010574 - RNA, 27 nt, Human
ugaaggaagaaaaaaaaaagggggggg

SEQ ID NO: 1010575 - RNA, 22 nt, Human
ugaauccauacauuaaaacaaa

SEQ ID NO: 1010576 - RNA, 19 nt, Human
ugacaaaaucuuacacaua

SEQ ID NO: 1010577 - RNA, 24 nt, Human
ugacagccacaaaaacaucacaaa

SEQ ID NO: 1010578 - RNA, 20 nt, Human
ugagaaugaaaacccuuuuu

SEQ ID NO: 1010579 - RNA, 18 nt, Human
ugaggugggaggaucgcu

SEQ ID NO: 1010580 - RNA, 20 nt, Human
ugaggugggaggaucgcuug

SEQ ID NO: 1010581 - RNA, 22 nt, Human
ugaggugggaggaucgcuugag

SEQ ID NO: 1010582 - RNA, 24 nt, Human
ugaggugggaggaucgcuugagcc

SEQ ID NO: 1010583 - RNA, 20 nt, Human
ugcaagugaugagacgaaca

SEQ ID NO: 1010584 - RNA, 22 nt, Human
ugcagaucucucgcuggggucc

SEQ ID NO: 1010585 - RNA, 21 nt, Human
ugcccacagcugaacacagcc

SEQ ID NO: 1010586 - RNA, 23 nt, Human
ugccugaacugagcaagugugag

SEQ ID NO: 1010587 - RNA, 24 nt, Human
ugccuguagucccagcuacuuggg

SEQ ID NO: 1010588 - RNA, 21 nt, Human
uggcaaaaauggaaucucaga

SEQ ID NO: 1010589 - RNA, 23 nt, Human
uggcaaaaauggaaucucagaug

SEQ ID NO: 1010590 - RNA, 19 nt, Human
uggcaccgcccuccagcag

SEQ ID NO: 1010591 - RNA, 19 nt, Human
ugggaggcugaggugggag

SEQ ID NO: 1010592 - RNA, 23 nt, Human
ugggaggcugaggugggaggauc

SEQ ID NO: 1010593 - RNA, 24 nt, Human
ugggaggcugaggugggaggaucg

SEQ ID NO: 1010594 - RNA, 23 nt, Human
ugggggugguggcaggugccugu

SEQ ID NO: 1010595 - RNA, 19 nt, Human
uggugacagccacaaaaac

SEQ ID NO: 1010596 - RNA, 24 nt, Human
ugguggcaggugccuguaguccca

SEQ ID NO: 1010597 - RNA, 21 nt, Human
uuagauaaaccaauauuagaa

SEQ ID NO: 1010598 - RNA, 21 nt, Human
uugaacacugcauaaauagau

SEQ ID NO: 1010599 - RNA, 21 nt, Human
uugagcccaggaguucaaggc

SEQ ID NO: 1010600 - RNA, 24 nt, Human
uugggaggcugaggugggaggauc

SEQ ID NO: 1010601 - RNA, 21 nt, Human
uuuaagguggcacaauuuuaa

SEQ ID NO: 1010602 - RNA, 21 nt, Human
uuugaaguccucuuuuucuuc

SEQ ID NO: 1010603 - RNA, 20 nt, Human
uuugagaaugaaaacccuuu

SEQ ID NO: 1010604 - RNA, 20 nt, Human
uuuuuuggucaagauucuaa

SEQ ID NO: 1010605 - RNA, 22 nt, Human
aaaaacaucccaauggaaaaaa

SEQ ID NO: 1010606 - RNA, 21 nt, Human
aaauggcccuuuuuugaggau

SEQ ID NO: 1010607 - RNA, 22 nt, Human
aacccauccacuccaauuucug

SEQ ID NO: 1010608 - RNA, 22 nt, Human
aagaaaacggacacaauuuugg

SEQ ID NO: 1010609 - RNA, 24 nt, Human
aagacuguuauccaaucuagauaa

SEQ ID NO: 1010610 - RNA, 21 nt, Human
aagaugucuuuauaaaguuuu

SEQ ID NO: 1010611 - RNA, 21 nt, Human
aaucauuugugacaagccuaa

SEQ ID NO: 1010612 - RNA, 24 nt, Human
acacuuacagaacggcaagaaaac

SEQ ID NO: 1010613 - RNA, 23 nt, Human
acccauccacuccaauuucugca

SEQ ID NO: 1010614 - RNA, 21 nt, Human
agacaccaaccagauuuuccu

SEQ ID NO: 1010615 - RNA, 22 nt, Human
aggcagaacccauccacuccaa

SEQ ID NO: 1010616 - RNA, 18 nt, Human
auaaaguuuuuuucaaga

SEQ ID NO: 1010617 - RNA, 24 nt, Human
auuuuccucccaagcaaaacaaaa

SEQ ID NO: 1010618 - RNA, 24 nt, Human
caagaaauccccagguaggccaaa

SEQ ID NO: 1010619 - RNA, 24 nt, Human
cacccuaagaaaacacaaggugga

SEQ ID NO: 1010620 - RNA, 19 nt, Human
cacuuguaagacaccaacc

SEQ ID NO: 1010621 - RNA, 21 nt, Human
caugcaaauaaaagaaagcuu

SEQ ID NO: 1010622 - RNA, 20 nt, Human
ccaagcaaaacaaaaugaac

SEQ ID NO: 1010623 - RNA, 24 nt, Human
ccaaucccagaggugccauuuagc

SEQ ID NO: 1010624 - RNA, 22 nt, Human
ccgcuccgaccccggcugcucc

SEQ ID NO: 1010625 - RNA, 19 nt, Human
ccucccaauuuaaggcaga

SEQ ID NO: 1010626 - RNA, 19 nt, Human
cggcuuggaguccucccaa

SEQ ID NO: 1010627 - RNA, 22 nt, Human
cggcuuggaguccucccaauuu

SEQ ID NO: 1010628 - RNA, 23 nt, Human
cuaaacugcuuucaggaaaaaag

SEQ ID NO: 1010629 - RNA, 22 nt, Human
cucaugcaaauaaaagaaagcu

SEQ ID NO: 1010630 - RNA, 23 nt, Human
cucucaugcaaauaaaagaaagc

SEQ ID NO: 1010631 - RNA, 22 nt, Human
cuugaggagccgcuccgacccc

SEQ ID NO: 1010632 - RNA, 21 nt, Human
gaacaaguucaaucaaaaaca

SEQ ID NO: 1010633 - RNA, 18 nt, Human
gcuccgaccccggcugcu

SEQ ID NO: 1010634 - RNA, 20 nt, Human
gggaauucucuaauuguauc

SEQ ID NO: 1010635 - RNA, 24 nt, Human
guaucaugugggccuuuugaaagu

SEQ ID NO: 1010636 - RNA, 20 nt, Human
uaaaacacuuacagaacggc

SEQ ID NO: 1010637 - RNA, 18 nt, Human
uaacacagauacgacaga

SEQ ID NO: 1010638 - RNA, 23 nt, Human
uacaugcuagaaaacauuaacac

SEQ ID NO: 1010639 - RNA, 27 nt, Human
uagcacagaaggaaaaaguaugucagu

SEQ ID NO: 1010640 - RNA, 24 nt, Human
ucacacccgccgcugggcuccccc

SEQ ID NO: 1010641 - RNA, 18 nt, Human
ucugcaguuuaaaacuuc

SEQ ID NO: 1010642 - RNA, 23 nt, Human
ugaaaguaacaaacagaaggcca

SEQ ID NO: 1010643 - RNA, 20 nt, Human
ugaggaugggagaggaaggg

SEQ ID NO: 1010644 - RNA, 26 nt, Human
ugaggaugggagaggaaggguuggaa

SEQ ID NO: 1010645 - RNA, 19 nt, Human
uggacuaaacugcuuucag

SEQ ID NO: 1010646 - RNA, 20 nt, Human
ugggagaggaaggguugggc

SEQ ID NO: 1010647 - RNA, 23 nt, Human
uuauuuuccucccaagcaaaaca

SEQ ID NO: 1010648 - RNA, 22 nt, Human
uucccggcuuggaguccuccca

SEQ ID NO: 1010649 - RNA, 21 nt, Human
uugauacagguuggaaaaggg

SEQ ID NO: 1010650 - RNA, 21 nt, Human
uugguaguggcucucucaugc

SEQ ID NO: 1010651 - RNA, 18 nt, Human
aaccagacagcccugcua

SEQ ID NO: 1010652 - RNA, 22 nt, Human
aagcaccgaggggacacccacc

SEQ ID NO: 1010653 - RNA, 21 nt, Human
accagacagcccugcuaccau

SEQ ID NO: 1010654 - RNA, 18 nt, Human
caccuugauggccagcuc

SEQ ID NO: 1010655 - RNA, 23 nt, Human
ccaugcccccgcuccucagcauu

SEQ ID NO: 1010656 - RNA, 20 nt, Human
cuaccaugcccccgcuccuc

SEQ ID NO: 1010657 - RNA, 21 nt, Human
cuccgugcggccacaaccaua

SEQ ID NO: 1010658 - RNA, 19 nt, Human
cuccucagcauugcucuag

SEQ ID NO: 1010659 - RNA, 21 nt, Human
gcuucugguuaauggcucgag

SEQ ID NO: 1010660 - RNA, 21 nt, Human
guggagggcugggcacccaca

SEQ ID NO: 1010661 - RNA, 24 nt, Human
uaccaugcccccgcuccucagcau

SEQ ID NO: 1010662 - RNA, 24 nt, Human
ucaucugagacauccuucuguugc

SEQ ID NO: 1010663 - RNA, 25 nt, Human
ucccccagcuucugguuaauggcuc

SEQ ID NO: 1010664 - RNA, 18 nt, Human
uccgugcggccacaacca

SEQ ID NO: 1010665 - RNA, 20 nt, Human
uccgugcggccacaaccaua

SEQ ID NO: 1010666 - RNA, 19 nt, Human
uguggagggcugggcaccc

SEQ ID NO: 1010667 - RNA, 18 nt, Human
uuuuuuuuuuuuuuuuug

SEQ ID NO: 1010668 - RNA, 19 nt, Human
aaaagcaugccccaacuag

SEQ ID NO: 1010669 - RNA, 22 nt, Human
aaccugcagccgucgccuccuc

SEQ ID NO: 1010670 - RNA, 20 nt, Human
acaaaagggcuacccccccg

SEQ ID NO: 1010671 - RNA, 20 nt, Human
acagauccugggaaccugca

SEQ ID NO: 1010672 - RNA, 20 nt, Human
accaccaccgaccauccucc

SEQ ID NO: 1010673 - RNA, 18 nt, Human
acccaaugcccaggacuu

SEQ ID NO: 1010674 - RNA, 25 nt, Human
agggcacccuucacacuggagcccc

SEQ ID NO: 1010675 - RNA, 18 nt, Human
caccaccaccgaccaucc

SEQ ID NO: 1010676 - RNA, 22 nt, Human
cacuggagccccagagagugug

SEQ ID NO: 1010677 - RNA, 23 nt, Human
cagccggugccaggugaucccaa

SEQ ID NO: 1010678 - RNA, 21 nt, Human
caucaccaccaccgaccaucc

SEQ ID NO: 1010679 - RNA, 19 nt, Human
ccaccgaccauccuccaca

SEQ ID NO: 1010680 - RNA, 22 nt, Human
ccagagagugugcacaaaagca

SEQ ID NO: 1010681 - RNA, 25 nt, Human
cccaaccucgccccggcagcucagc

SEQ ID NO: 1010682 - RNA, 24 nt, Human
ccccaacuagcaucacuuucucac

SEQ ID NO: 1010683 - RNA, 23 nt, Human
cccccccgggguccccgucgccc

SEQ ID NO: 1010684 - RNA, 18 nt, Human
cccccgcuacaaaaaaau

SEQ ID NO: 1010685 - RNA, 23 nt, Human
ccccgucgccccagaauggaagc

SEQ ID NO: 1010686 - RNA, 20 nt, Human
cccucagccccagggcaccc

SEQ ID NO: 1010687 - RNA, 22 nt, Human
cccucagccccagggcacccuu

SEQ ID NO: 1010688 - RNA, 18 nt, Human
ccgaccauccuccacaag

SEQ ID NO: 1010689 - RNA, 21 nt, Human
ccgcuacaaaaaaaucacagg

SEQ ID NO: 1010690 - RNA, 19 nt, Human
ccuccaucaccaccaccga

SEQ ID NO: 1010691 - RNA, 21 nt, Human
cggccucugggcucuuugucc

SEQ ID NO: 1010692 - RNA, 19 nt, Human
cgucgccccagaauggaag

SEQ ID NO: 1010693 - RNA, 20 nt, Human
cucuuuguccggggccuggg

SEQ ID NO: 1010694 - RNA, 22 nt, Human
cucuuuguccggggccugggga

SEQ ID NO: 1010695 - RNA, 19 nt, Human
gauccucuugcucuugccu

SEQ ID NO: 1010696 - RNA, 22 nt, Human
gcacccuucacacuggagcccc

SEQ ID NO: 1010697 - RNA, 22 nt, Human
gccucugacagauccugggaac

SEQ ID NO: 1010698 - RNA, 19 nt, Human
gcuacaaaaaaaucacagg

SEQ ID NO: 1010699 - RNA, 28 nt, Human
gggcacccuucacacuggagccccagag

SEQ ID NO: 1010700 - RNA, 21 nt, Human
uacaaaaaaaucacaggcucc

SEQ ID NO: 1010701 - RNA, 18 nt, Human
uacaaaagggcuaccccc

SEQ ID NO: 1010702 - RNA, 23 nt, Human
ucacacuggagccccagagagug

SEQ ID NO: 1010703 - RNA, 22 nt, Human
ucaccaccaccgaccauccucc

SEQ ID NO: 1010704 - RNA, 18 nt, Human
uccaccuccaucaccacc

SEQ ID NO: 1010705 - RNA, 22 nt, Human
uccaucaccaccaccgaccauc

SEQ ID NO: 1010706 - RNA, 23 nt, Human
uccaucaccaccaccgaccaucc

SEQ ID NO: 1010707 - RNA, 18 nt, Human
ucccaaccucgccccggc

SEQ ID NO: 1010708 - RNA, 21 nt, Human
uccccgcccccgcuacaaaaa

SEQ ID NO: 1010709 - RNA, 25 nt, Human
uccuccacaaggcccucagccccag

SEQ ID NO: 1010710 - RNA, 23 nt, Human
ugaucccaaccucgccccggcag

SEQ ID NO: 1010711 - RNA, 25 nt, Human
ugccaggugaucccaaccucgcccc

SEQ ID NO: 1010712 - RNA, 18 nt, Human
uggcgcagucuugcaccu

SEQ ID NO: 1010713 - RNA, 24 nt, Human
ugggaaccugcagccgucgccucc

SEQ ID NO: 1010714 - RNA, 23 nt, Human
ugggcucuuuguccggggccugg

SEQ ID NO: 1010715 - RNA, 18 nt, Human
uugcaccuuacuccccgc

SEQ ID NO: 1010716 - RNA, 22 nt, Human
uugcaccuuacuccccgccccc

SEQ ID NO: 1010717 - RNA, 18 nt, Human
uuuuuuuuuuuuuuuuug

SEQ ID NO: 1010718 - RNA, 19 nt, Human
uuuuuuuuuuuuuuuuugc

SEQ ID NO: 1010719 - RNA, 21 nt, Human
uuuuuuuuuuuuuuuuugcag

SEQ ID NO: 1010720 - RNA, 22 nt, Human
acaccaaagacagacaccagac

SEQ ID NO: 1010721 - RNA, 18 nt, Human
accaaagacagacaccag

SEQ ID NO: 1010722 - RNA, 22 nt, Human
agacagacaccagacaggcagc

SEQ ID NO: 1010723 - RNA, 23 nt, Human
agacagacaccagacaggcagcu

SEQ ID NO: 1010724 - RNA, 21 nt, Human
caaaguucugacaccaaagac

SEQ ID NO: 1010725 - RNA, 22 nt, Human
caccaaagacagacaccagaca

SEQ ID NO: 1010726 - RNA, 22 nt, Human
caccaaagacagacaccagacu

SEQ ID NO: 1010727 - RNA, 19 nt, Human
cagacagugaguugugugg

SEQ ID NO: 1010728 - RNA, 23 nt, Human
ccaaagacagacaccagacaggc

SEQ ID NO: 1010729 - RNA, 21 nt, Human
cccccaaaguucugacaccaa

SEQ ID NO: 1010730 - RNA, 29 nt, Human
cccccaaaguucugacaccaaagacagag

SEQ ID NO: 1010731 - RNA, 20 nt, Human
ccucagacucugcccuucug

SEQ ID NO: 1010732 - RNA, 20 nt, Human
cgccucagacucugcccuuc

SEQ ID NO: 1010733 - RNA, 22 nt, Human
cggcccccaaaguucugacacc

SEQ ID NO: 1010734 - RNA, 19 nt, Human
ucugacaccaaagacagac

SEQ ID NO: 1010735 - RNA, 19 nt, Human
ucuggggggggcacagcac

SEQ ID NO: 1010736 - RNA, 21 nt, Human
ugacaccaaagacagacacca

SEQ ID NO: 1010737 - RNA, 21 nt, Human
uggggaggggcccggccccca

SEQ ID NO: 1010738 - RNA, 21 nt, Human
uuguggggaggggcccggccc

SEQ ID NO: 1010739 - RNA, 20 nt, Human
uuuuuuuuuuuuugaagguc

SEQ ID NO: 1010740 - RNA, 23 nt, Human
uuuuuuuuuuuuugaaggucgga

SEQ ID NO: 1010741 - RNA, 23 nt, Human
aaaaaaaaccaaaaaucaucaag

SEQ ID NO: 1010742 - RNA, 25 nt, Human
aaaaaaccaaaaaucaucaagacag

SEQ ID NO: 1010743 - RNA, 24 nt, Human
aacaggacaaugaaaaaaaaccaa

SEQ ID NO: 1010744 - RNA, 24 nt, Human
aacaggacaaugaaaaaaaaccaa

SEQ ID NO: 1010745 - RNA, 21 nt, Human
aaccaaaaaucaucaagacag

SEQ ID NO: 1010746 - RNA, 19 nt, Human
aaugaaaaaaaaccaaaaa

SEQ ID NO: 1010747 - RNA, 20 nt, Human
acugcaaaauauuauaaaag

SEQ ID NO: 1010748 - RNA, 22 nt, Human
acuuugaagauacuuacaagga

SEQ ID NO: 1010749 - RNA, 21 nt, Human
aggacaaugaaaaaaaaccaa

SEQ ID NO: 1010750 - RNA, 25 nt, Human
aggacaaugaaaaaaaaccgguacc

SEQ ID NO: 1010751 - RNA, 24 nt, Human
aggucaucucguccacuuuaauau

SEQ ID NO: 1010752 - RNA, 20 nt, Human
auaaaguuccaaauaucaac

SEQ ID NO: 1010753 - RNA, 20 nt, Human
augaaaaaaaaccaaaaauu

SEQ ID NO: 1010754 - RNA, 25 nt, Human
caacaggacaaugaaaaaaaaccaa

SEQ ID NO: 1010755 - RNA, 26 nt, Human
caacaggacaaugaaaaaaaaccaaa

SEQ ID NO: 1010756 - RNA, 20 nt, Human
caccaccgucgccgcccucu

SEQ ID NO: 1010757 - RNA, 25 nt, Human
caggacaaugaaaaaaaaccaaaaa

SEQ ID NO: 1010758 - RNA, 19 nt, Human
cgcucagucaccaccaccg

SEQ ID NO: 1010759 - RNA, 21 nt, Human
cuuaacaagugaccaauuacu

SEQ ID NO: 1010760 - RNA, 23 nt, Human
gaaagguaauuguuuauuacugg

SEQ ID NO: 1010761 - RNA, 22 nt, Human
gacaaugaaaaaaaaccaaaaa

SEQ ID NO: 1010762 - RNA, 21 nt, Human
uaauuacuugauuucaacagg

SEQ ID NO: 1010763 - RNA, 19 nt, Human
uauuauaaaagugauacaa

SEQ ID NO: 1010764 - RNA, 23 nt, Human
uauuauaaaagugauacaauuuu

SEQ ID NO: 1010765 - RNA, 27 nt, Human
ucaacaggacaaugaaaaaaaaccaaa

SEQ ID NO: 1010766 - RNA, 25 nt, Human
ucaccaccaccgucgccgcccucuu

SEQ ID NO: 1010767 - RNA, 21 nt, Human
ugaaaaaaaaccaaaaaucau

SEQ ID NO: 1010768 - RNA, 21 nt, Human
uggaauaaaguuccaaauauc

SEQ ID NO: 1010769 - RNA, 19 nt, Human
uggcucuuaaauguuuaau

SEQ ID NO: 1010770 - RNA, 21 nt, Human
uggcucuuaaauguuuaauua

SEQ ID NO: 1010771 - RNA, 21 nt, Human
uguauuaacagagaagauggu

SEQ ID NO: 1010772 - RNA, 19 nt, Human
aaaaagggaauacaaaaga

SEQ ID NO: 1010773 - RNA, 18 nt, Human
aacauggugaaacaccau

SEQ ID NO: 1010774 - RNA, 21 nt, Human
aagcaguaaacaguaguauaa

SEQ ID NO: 1010775 - RNA, 24 nt, Human
aauugcuugaaccuaggaggugga

SEQ ID NO: 1010776 - RNA, 20 nt, Human
acagagcaagacuccgucuc

SEQ ID NO: 1010777 - RNA, 23 nt, Human
acagagcaagacuccgucucaaa

SEQ ID NO: 1010778 - RNA, 24 nt, Human
acagagcaagacuccgucucaaag

SEQ ID NO: 1010779 - RNA, 20 nt, Human
acccugagcuuagaaaacuc

SEQ ID NO: 1010780 - RNA, 24 nt, Human
accgugccacugcacucuagucug

SEQ ID NO: 1010781 - RNA, 24 nt, Human
accugaggucaggaguuugagacc

SEQ ID NO: 1010782 - RNA, 24 nt, Human
acugcacucuagucugggugacag

SEQ ID NO: 1010783 - RNA, 26 nt, Human
acugcacucuagucugggugacagag

SEQ ID NO: 1010784 - RNA, 22 nt, Human
agaauugcuugaaccuaggagg

SEQ ID NO: 1010785 - RNA, 23 nt, Human
agccgggugugguggugcaugcc

SEQ ID NO: 1010786 - RNA, 19 nt, Human
agccuggccaacaugguga

SEQ ID NO: 1010787 - RNA, 20 nt, Human
aggaguuugagaccagccug

SEQ ID NO: 1010788 - RNA, 24 nt, Human
aggcacgguggcucaggccuguaa

SEQ ID NO: 1010789 - RNA, 22 nt, Human
aggcaggagaauugcuugaacc

SEQ ID NO: 1010790 - RNA, 23 nt, Human
aggcaggagaauugcuugaaccu

SEQ ID NO: 1010791 - RNA, 24 nt, Human
aggcaggagaauugcuugaaccua

SEQ ID NO: 1010792 - RNA, 18 nt, Human
aggcagguggaucaccug

SEQ ID NO: 1010793 - RNA, 22 nt, Human
aggcagguggaucaccugaggu

SEQ ID NO: 1010794 - RNA, 26 nt, Human
aggcagguggaucaccugaggucagg

SEQ ID NO: 1010795 - RNA, 21 nt, Human
aggccgaggcagguggaucac

SEQ ID NO: 1010796 - RNA, 21 nt, Human
aggcugaggcaggagaauugc

SEQ ID NO: 1010797 - RNA, 24 nt, Human
aggcugaggcaggagaauugcuug

SEQ ID NO: 1010798 - RNA, 19 nt, Human
agguggagguugcagugag

SEQ ID NO: 1010799 - RNA, 24 nt, Human
agguggagguugcagugaggugag

SEQ ID NO: 1010800 - RNA, 24 nt, Human
agucugggugacagagcaagacuc

SEQ ID NO: 1010801 - RNA, 20 nt, Human
aucaccugaggucaggaguu

SEQ ID NO: 1010802 - RNA, 24 nt, Human
aucaccugaggucaggaguuugag

SEQ ID NO: 1010803 - RNA, 23 nt, Human
caaaagagacggagaaagcagua

SEQ ID NO: 1010804 - RNA, 25 nt, Human
caaaagagacggagaaagcaguaaa

SEQ ID NO: 1010805 - RNA, 21 nt, Human
caaaggaaaaaaaaaaaggga

SEQ ID NO: 1010806 - RNA, 23 nt, Human
caagacuccgucucaaaggaaaa

SEQ ID NO: 1010807 - RNA, 24 nt, Human
caccauggcuacuaaaaauacaaa

SEQ ID NO: 1010808 - RNA, 23 nt, Human
caccugaggucaggaguuugaga

SEQ ID NO: 1010809 - RNA, 22 nt, Human
cacucuagucugggugacagag

SEQ ID NO: 1010810 - RNA, 19 nt, Human
cacugcacucuagucuggg

SEQ ID NO: 1010811 - RNA, 19 nt, Human
cacugcacucuagucuggg

SEQ ID NO: 1010812 - RNA, 22 nt, Human
cacugcacucuagucuggguga

SEQ ID NO: 1010813 - RNA, 23 nt, Human
cacugcacucuagucugggugac

SEQ ID NO: 1010814 - RNA, 24 nt, Human
cacugcacucuagucugggugaca

SEQ ID NO: 1010815 - RNA, 25 nt, Human
cacugcacucuagucugggugacag

SEQ ID NO: 1010816 - RNA, 21 nt, Human
cacuuguuaagucuccucuga

SEQ ID NO: 1010817 - RNA, 24 nt, Human
cagcacugugggaggccgaggcag

SEQ ID NO: 1010818 - RNA, 26 nt, Human
cagcacugugggaggccgaggcaggu

SEQ ID NO: 1010819 - RNA, 22 nt, Human
cagcagauuaggggccaggcac

SEQ ID NO: 1010820 - RNA, 24 nt, Human
cagcuacucaggaggcugaggcag

SEQ ID NO: 1010821 - RNA, 22 nt, Human
caggccuguaaucccagcacug

SEQ ID NO: 1010822 - RNA, 24 nt, Human
cagguggaucaccugaggucagga

SEQ ID NO: 1010823 - RNA, 19 nt, Human
caguuucaccuccucaguc

SEQ ID NO: 1010824 - RNA, 20 nt, Human
ccacugcacucuagucuggg

SEQ ID NO: 1010825 - RNA, 20 nt, Human
ccacugcacucuagucuggg

SEQ ID NO: 1010826 - RNA, 21 nt, Human
ccacugcacucuagucugggu

SEQ ID NO: 1010827 - RNA, 21 nt, Human
ccacugcacucuagucugggu

SEQ ID NO: 1010828 - RNA, 24 nt, Human
ccacugcacucuagucugggugac

SEQ ID NO: 1010829 - RNA, 19 nt, Human
cccccaccauccuuaaugu

SEQ ID NO: 1010830 - RNA, 22 nt, Human
ccugaggucaggaguuugagac

SEQ ID NO: 1010831 - RNA, 19 nt, Human
ccuggccaacauggugaaa

SEQ ID NO: 1010832 - RNA, 24 nt, Human
ccuggccaacauggugaaacacca

SEQ ID NO: 1010833 - RNA, 21 nt, Human
ccuguaaucccagcacugugg

SEQ ID NO: 1010834 - RNA, 21 nt, Human
ccuguagucccagcuacucag

SEQ ID NO: 1010835 - RNA, 22 nt, Human
ccuguagucccagcuacucagg

SEQ ID NO: 1010836 - RNA, 26 nt, Human
cgaggcagguggaucaccugagguca

SEQ ID NO: 1010837 - RNA, 26 nt, Human
cucaaaggaaaaaaaaaaagggaaua

SEQ ID NO: 1010838 - RNA, 23 nt, Human
cucaggccuguaaucccagcacu

SEQ ID NO: 1010839 - RNA, 21 nt, Human
cugggugacagagcaagacuc

SEQ ID NO: 1010840 - RNA, 19 nt, Human
gaggcagguggaucaccug

SEQ ID NO: 1010841 - RNA, 23 nt, Human
gaggcagguggaucaccugaggu

SEQ ID NO: 1010842 - RNA, 23 nt, Human
gagguugcagugaggugagaccg

SEQ ID NO: 1010843 - RNA, 21 nt, Human
gaucaccugaggucaggaguu

SEQ ID NO: 1010844 - RNA, 24 nt, Human
gaucaccugaggucaggaguuuga

SEQ ID NO: 1010845 - RNA, 24 nt, Human
gcacucuagucugggugacagagc

SEQ ID NO: 1010846 - RNA, 24 nt, Human
gccacugcacucuagucuggguga

SEQ ID NO: 1010847 - RNA, 25 nt, Human
ggaaaaaaaaaaagggaauacaaaa

SEQ ID NO: 1010848 - RNA, 20 nt, Human
ggaauacaaaagagacggag

SEQ ID NO: 1010849 - RNA, 18 nt, Human
ggagguugcagugaggug

SEQ ID NO: 1010850 - RNA, 20 nt, Human
ggagguugcagugaggugag

SEQ ID NO: 1010851 - RNA, 24 nt, Human
ggagguugcagugaggugagaccg

SEQ ID NO: 1010852 - RNA, 23 nt, Human
ggccuguaaucccagcacugugg

SEQ ID NO: 1010853 - RNA, 24 nt, Human
ggccuguaaucccagcacuguggg

SEQ ID NO: 1010854 - RNA, 18 nt, Human
gggaauacaaaagagacc

SEQ ID NO: 1010855 - RNA, 19 nt, Human
ggucaggaguuugagacca

SEQ ID NO: 1010856 - RNA, 23 nt, Human
gguggcucaggccuguaauccca

SEQ ID NO: 1010857 - RNA, 24 nt, Human
gguggcucaggccuguaaucccag

SEQ ID NO: 1010858 - RNA, 19 nt, Human
guaguauaauuuaagaagc

SEQ ID NO: 1010859 - RNA, 18 nt, Human
uacaaaagagacggagaa

SEQ ID NO: 1010860 - RNA, 29 nt, Human
uaggagguggagguugcagugacaacggu

SEQ ID NO: 1010861 - RNA, 26 nt, Human
uaggagguggagguugcagugaggug

SEQ ID NO: 1010862 - RNA, 24 nt, Human
ucaaagagguaguuuauucugcag

SEQ ID NO: 1010863 - RNA, 24 nt, Human
ucaaaggaaaaaaaaaaagggaau

SEQ ID NO: 1010864 - RNA, 26 nt, Human
ucaccuccucagucucagcuuucuua

SEQ ID NO: 1010865 - RNA, 24 nt, Human
ucuagucugggugacagagcaaga

SEQ ID NO: 1010866 - RNA, 21 nt, Human
ugaaacaccauggcuacuaaa

SEQ ID NO: 1010867 - RNA, 23 nt, Human
ugagaccagccuggccaacaugg

SEQ ID NO: 1010868 - RNA, 24 nt, Human
ugagaccagccuggccaacauggu

SEQ ID NO: 1010869 - RNA, 24 nt, Human
ugagaccgugccacugcacucuag

SEQ ID NO: 1010870 - RNA, 24 nt, Human
ugaggcaggagaauugcuugaacc

SEQ ID NO: 1010871 - RNA, 24 nt, Human
ugaggcaggagaauugcuugaacc

SEQ ID NO: 1010872 - RNA, 18 nt, Human
ugaggucaggaguuugag

SEQ ID NO: 1010873 - RNA, 24 nt, Human
ugccuguagucccagcuacucagg

SEQ ID NO: 1010874 - RNA, 23 nt, Human
uggaucaccugaggucaggaguu

SEQ ID NO: 1010875 - RNA, 24 nt, Human
uggaucaccugaggucaggaguuu

SEQ ID NO: 1010876 - RNA, 27 nt, Human
uggaucaccugaggucaggaguuugag

SEQ ID NO: 1010877 - RNA, 18 nt, Human
uggccaacauggugaaac

SEQ ID NO: 1010878 - RNA, 24 nt, Human
uggcucaggccuguaaucccagca

SEQ ID NO: 1010879 - RNA, 24 nt, Human
ugggaggccgaggcagguggauca

SEQ ID NO: 1010880 - RNA, 18 nt, Human
uggugcaugccuguaguc

SEQ ID NO: 1010881 - RNA, 24 nt, Human
ugguggugcaugccuguaguccca

SEQ ID NO: 1010882 - RNA, 22 nt, Human
uuagccgggugugguggugcau

SEQ ID NO: 1010883 - RNA, 24 nt, Human
uuagccgggugugguggugcaugc

SEQ ID NO: 1010884 - RNA, 24 nt, Human
uucagcagauuaggggccaggcac

SEQ ID NO: 1010885 - RNA, 20 nt, Human
uucccauguuucuucuaugg

SEQ ID NO: 1010886 - RNA, 22 nt, Human
uucuuauuuuaagagcuggccc

SEQ ID NO: 1010887 - RNA, 24 nt, Human
uugaaccuaggagguggagguugc

SEQ ID NO: 1010888 - RNA, 21 nt, Human
uugcagugaggugagaccgug

SEQ ID NO: 1010889 - RNA, 22 nt, Human
uugcagugaggugagaccgugc

SEQ ID NO: 1010890 - RNA, 24 nt, Human
uugcuugaaccuaggagguggagg

SEQ ID NO: 1010891 - RNA, 18 nt, Human
uuuuuuuuuuuuagagga

SEQ ID NO: 1010892 - RNA, 22 nt, Human
uuuuuuuuuuuuuuuuuagagg

SEQ ID NO: 1010893 - RNA, 24 nt, Human
aaacagaaaagagaaauauccugg

SEQ ID NO: 1010894 - RNA, 18 nt, Human
agaaccccgccuucuacc

SEQ ID NO: 1010895 - RNA, 18 nt, Human
cagaccugcagccaccgu

SEQ ID NO: 1010896 - RNA, 21 nt, Human
cagauaauguucucuaaaucc

SEQ ID NO: 1010897 - RNA, 22 nt, Human
cagcaggauuccggucuacacc

SEQ ID NO: 1010898 - RNA, 19 nt, Human
cagggaagaugucaacacu

SEQ ID NO: 1010899 - RNA, 19 nt, Human
ccacucugcccgucagcag

SEQ ID NO: 1010900 - RNA, 22 nt, Human
ccugcgccgcgggguggaagga

SEQ ID NO: 1010901 - RNA, 20 nt, Human
cgacccucccucccugaucc

SEQ ID NO: 1010902 - RNA, 19 nt, Human
cgccgcgggguggaaggac

SEQ ID NO: 1010903 - RNA, 21 nt, Human
cuccaggaaugaauggccacc

SEQ ID NO: 1010904 - RNA, 21 nt, Human
cucccugauccacucugcccg

SEQ ID NO: 1010905 - RNA, 25 nt, Human
cuccucagcagcacuccaggaauga

SEQ ID NO: 1010906 - RNA, 19 nt, Human
cucugcccgucagcaggau

SEQ ID NO: 1010907 - RNA, 23 nt, Human
cugagagcagaggcuuuauuuac

SEQ ID NO: 1010908 - RNA, 25 nt, Human
cuuuucucagauaauguucucuaaa

SEQ ID NO: 1010909 - RNA, 22 nt, Human
gaaaagagaaauauccugggag

SEQ ID NO: 1010910 - RNA, 18 nt, Human
gagcagccuugucucaga

SEQ ID NO: 1010911 - RNA, 24 nt, Human
gaugucaacacuggccgggaaaaa

SEQ ID NO: 1010912 - RNA, 25 nt, Human
gaugucaacacuggccgggaaaaac

SEQ ID NO: 1010913 - RNA, 18 nt, Human
gauuccggucuacacccc

SEQ ID NO: 1010914 - RNA, 21 nt, Human
gcagccaccgugucucgaccc

SEQ ID NO: 1010915 - RNA, 20 nt, Human
gcagcugggugccagaugcc

SEQ ID NO: 1010916 - RNA, 24 nt, Human
ggagcaggaagugaacucuuuucu

SEQ ID NO: 1010917 - RNA, 23 nt, Human
uacaaugacauucaaacaggauu

SEQ ID NO: 1010918 - RNA, 24 nt, Human
uagcagcauggguuguacuucaua

SEQ ID NO: 1010919 - RNA, 22 nt, Human
ucaacacuggccgggaaaaaca

SEQ ID NO: 1010920 - RNA, 21 nt, Human
ucagggaagaugucaacacug

SEQ ID NO: 1010921 - RNA, 20 nt, Human
ucccaacacguuccaugcuc

SEQ ID NO: 1010922 - RNA, 18 nt, Human
uccugggagcaggaagug

SEQ ID NO: 1010923 - RNA, 25 nt, Human
ucuacaccccgcagagacuccgcag

SEQ ID NO: 1010924 - RNA, 18 nt, Human
ugaauggccaccuccagg

SEQ ID NO: 1010925 - RNA, 19 nt, Human
ugggagcaggaagugaacu

SEQ ID NO: 1010926 - RNA, 21 nt, Human
uuagcaaaggaugccucuucc

SEQ ID NO: 1010927 - RNA, 18 nt, Human
uucucuaaaucccaacac

SEQ ID NO: 1010928 - RNA, 20 nt, Human
uuuucucagauaauguucuc

SEQ ID NO: 1010929 - RNA, 25 nt, Human
uuuuuuuuuuuuuuuuuacaucuga

SEQ ID NO: 1010930 - RNA, 25 nt, Human
uuuuuuuuuuuuuuuuuuacaucug

SEQ ID NO: 1010931 - RNA, 20 nt, Human
aaaacccucacuggauguac

SEQ ID NO: 1010932 - RNA, 21 nt, Human
aaacacaucacagguaagaaa

SEQ ID NO: 1010933 - RNA, 22 nt, Human
agaaagacuugaacacuuacca

SEQ ID NO: 1010934 - RNA, 23 nt, Human
agaaagacuugaacacuuaccaa

SEQ ID NO: 1010935 - RNA, 18 nt, Human
agagccugcagcaagcag

SEQ ID NO: 1010936 - RNA, 20 nt, Human
aggugaguguccggaggugc

SEQ ID NO: 1010937 - RNA, 20 nt, Human
aguauggugagcuauuuccu

SEQ ID NO: 1010938 - RNA, 22 nt, Human
cacaaucuauggaagggaaacc

SEQ ID NO: 1010939 - RNA, 24 nt, Human
cagguaagaaaugggaaaccuacc

SEQ ID NO: 1010940 - RNA, 20 nt, Human
caugcuacuuggggugauca

SEQ ID NO: 1010941 - RNA, 24 nt, Human
ccccagagccugcagcaagcagca

SEQ ID NO: 1010942 - RNA, 23 nt, Human
cuugaacacuuaccaagugaaua

SEQ ID NO: 1010943 - RNA, 21 nt, Human
gaguauggugagcuauuuccu

SEQ ID NO: 1010944 - RNA, 23 nt, Human
gguaagaaaugggaaaccuaccu

SEQ ID NO: 1010945 - RNA, 20 nt, Human
ggugcuggguaaaacacauc

SEQ ID NO: 1010946 - RNA, 21 nt, Human
guaaaacacaucacagguaaa

SEQ ID NO: 1010947 - RNA, 22 nt, Human
gugcuggguaaaacacaucaca

SEQ ID NO: 1010948 - RNA, 19 nt, Human
guguccggaggugcugggu

SEQ ID NO: 1010949 - RNA, 22 nt, Human
uacagaucacaggaauuuuaaa

SEQ ID NO: 1010950 - RNA, 26 nt, Human
ucagaaagacuugaacaacgggggcg

SEQ ID NO: 1010951 - RNA, 22 nt, Human
uccccagagccugcagcaagca

SEQ ID NO: 1010952 - RNA, 21 nt, Human
ugcagcaagcagcacccgccc

SEQ ID NO: 1010953 - RNA, 21 nt, Human
uggguaaaacacaucacaggu

SEQ ID NO: 1010954 - RNA, 19 nt, Human
uguccggaggugcugggua

SEQ ID NO: 1010955 - RNA, 21 nt, Human
aaaaagcuggcaaugccagac

SEQ ID NO: 1010956 - RNA, 24 nt, Human
aaacuccagccugugcaccucugg

SEQ ID NO: 1010957 - RNA, 21 nt, Human
aaauggugagaaagaaaagga

SEQ ID NO: 1010958 - RNA, 23 nt, Human
aaucucuuuucccauuaaaaagc

SEQ ID NO: 1010959 - RNA, 18 nt, Human
aauggcacucacugucuc

SEQ ID NO: 1010960 - RNA, 20 nt, Human
acaccauugcugaacaaagc

SEQ ID NO: 1010961 - RNA, 18 nt, Human
acagaaugcgagccaucg

SEQ ID NO: 1010962 - RNA, 21 nt, Human
accaucacccacccucaccac

SEQ ID NO: 1010963 - RNA, 21 nt, Human
acggcaggucaaggacaggcc

SEQ ID NO: 1010964 - RNA, 22 nt, Human
acuggugugcaaaggcaagaug

SEQ ID NO: 1010965 - RNA, 18 nt, Human
acuugugacaaguuuccu

SEQ ID NO: 1010966 - RNA, 19 nt, Human
acuugugacaaguuuccuu

SEQ ID NO: 1010967 - RNA, 22 nt, Human
agaaaacacacauucuuuauuc

SEQ ID NO: 1010968 - RNA, 19 nt, Human
agaaagaaaaggagacuga

SEQ ID NO: 1010969 - RNA, 19 nt, Human
agaaagggcccagagcaca

SEQ ID NO: 1010970 - RNA, 21 nt, Human
agaccgggauccggccaggaa

SEQ ID NO: 1010971 - RNA, 25 nt, Human
agaguuguuccagggcacaagauag

SEQ ID NO: 1010972 - RNA, 22 nt, Human
agcacaacucuccaaccacacc

SEQ ID NO: 1010973 - RNA, 20 nt, Human
agccaguaauguccaaaugg

SEQ ID NO: 1010974 - RNA, 22 nt, Human
agccuagucuacuuaccaucag

SEQ ID NO: 1010975 - RNA, 22 nt, Human
agcucuguggagggcagagagu

SEQ ID NO: 1010976 - RNA, 21 nt, Human
agcuggcccagaugaggcccc

SEQ ID NO: 1010977 - RNA, 20 nt, Human
aggaagcagaguccaagcug

SEQ ID NO: 1010978 - RNA, 21 nt, Human
agggaagugggagagaaagcc

SEQ ID NO: 1010979 - RNA, 25 nt, Human
agggaagugggagagaaagccuggg

SEQ ID NO: 1010980 - RNA, 19 nt, Human
agguccacucauccccugc

SEQ ID NO: 1010981 - RNA, 21 nt, Human
agugauaaauggugagaaaga

SEQ ID NO: 1010982 - RNA, 26 nt, Human
aguugagggaaggaagaauggagcuu

SEQ ID NO: 1010983 - RNA, 24 nt, Human
auguccaaauggggagccuugugg

SEQ ID NO: 1010984 - RNA, 22 nt, Human
caaauggggagccuuguggugg

SEQ ID NO: 1010985 - RNA, 23 nt, Human
caaccacaccauugcugaacaaa

SEQ ID NO: 1010986 - RNA, 19 nt, Human
caagauagccaguaauguc

SEQ ID NO: 1010987 - RNA, 23 nt, Human
caaugccagaccaugagucuaau

SEQ ID NO: 1010988 - RNA, 20 nt, Human
cacaacucuccaaccacacc

SEQ ID NO: 1010989 - RNA, 19 nt, Human
cacacacugcuccuccgaa

SEQ ID NO: 1010990 - RNA, 22 nt, Human
cacacacugcuccuccgaacuc

SEQ ID NO: 1010991 - RNA, 21 nt, Human
caccaccaucaaagacacugg

SEQ ID NO: 1010992 - RNA, 27 nt, Human
cagggcacacauggcaggucaaguucc

SEQ ID NO: 1010993 - RNA, 19 nt, Human
caggugcuccuucaccucu

SEQ ID NO: 1010994 - RNA, 21 nt, Human
cauagcucuguggagggcaga

SEQ ID NO: 1010995 - RNA, 18 nt, Human
cauguacuuaauagaaaa

SEQ ID NO: 1010996 - RNA, 22 nt, Human
ccacaccauugcugaacaaagc

SEQ ID NO: 1010997 - RNA, 28 nt, Human
ccacccucaccaccaucaaggccucggc

SEQ ID NO: 1010998 - RNA, 24 nt, Human
ccagagcuucccugcugcuccugg

SEQ ID NO: 1010999 - RNA, 28 nt, Human
ccagaguguuccgggccgggcugggguc

SEQ ID NO: 1011000 - RNA, 20 nt, Human
ccagguccacucauccccug

SEQ ID NO: 1011001 - RNA, 20 nt, Human
cccacaucugcgaauggggc

SEQ ID NO: 1011002 - RNA, 28 nt, Human
cccacccucaccaccaucaaccccuagg

SEQ ID NO: 1011003 - RNA, 18 nt, Human
cccagaguguuccgggcc

SEQ ID NO: 1011004 - RNA, 24 nt, Human
cccaugguuacaaacacuugugac

SEQ ID NO: 1011005 - RNA, 21 nt, Human
cccccacggacggcaugccug

SEQ ID NO: 1011006 - RNA, 22 nt, Human
cccccgcguccccucugcugug

SEQ ID NO: 1011007 - RNA, 25 nt, Human
ccccgcguccccucugcugugccua

SEQ ID NO: 1011008 - RNA, 24 nt, Human
ccccggcuacaggcccuucaacaa

SEQ ID NO: 1011009 - RNA, 21 nt, Human
ccccggggaggacaggaggca

SEQ ID NO: 1011010 - RNA, 21 nt, Human
ccccucugcugugccuaaaca

SEQ ID NO: 1011011 - RNA, 19 nt, Human
ccggggaggacaggaggca

SEQ ID NO: 1011012 - RNA, 22 nt, Human
ccugcagugccugaaacuccag

SEQ ID NO: 1011013 - RNA, 21 nt, Human
ccugcgcuaucccagcacaac

SEQ ID NO: 1011014 - RNA, 23 nt, Human
ccuuguggugguggcagccagga

SEQ ID NO: 1011015 - RNA, 20 nt, Human
cggccagggcaggcuguaag

SEQ ID NO: 1011016 - RNA, 22 nt, Human
cggccugaggcaagggaugcag

SEQ ID NO: 1011017 - RNA, 25 nt, Human
cgggacccaccuuccugcgcuaucc

SEQ ID NO: 1011018 - RNA, 18 nt, Human
cguccccucugcugugcc

SEQ ID NO: 1011019 - RNA, 24 nt, Human
cuagcacuguauuccuagaacuga

SEQ ID NO: 1011020 - RNA, 19 nt, Human
cucccugugugucaucagc

SEQ ID NO: 1011021 - RNA, 21 nt, Human
cucuccaaccacaccauugcu

SEQ ID NO: 1011022 - RNA, 18 nt, Human
cugaaacuccagccugug

SEQ ID NO: 1011023 - RNA, 24 nt, Human
cugcugcuccuggaggaagcagag

SEQ ID NO: 1011024 - RNA, 21 nt, Human
cuggcuggaaaaagagaaagg

SEQ ID NO: 1011025 - RNA, 21 nt, Human
cuuccugcgcuaucccagcac

SEQ ID NO: 1011026 - RNA, 21 nt, Human
gaaggaagaauggagcuuggg

SEQ ID NO: 1011027 - RNA, 18 nt, Human
gaccaugagucuaauuaa

SEQ ID NO: 1011028 - RNA, 25 nt, Human
gaccccuugcuucucaucuuaccuu

SEQ ID NO: 1011029 - RNA, 24 nt, Human
gacggagcaggcaccucuguggga

SEQ ID NO: 1011030 - RNA, 24 nt, Human
gaggccccgggcagcacugcuucu

SEQ ID NO: 1011031 - RNA, 19 nt, Human
gagugcuguucucucaugg

SEQ ID NO: 1011032 - RNA, 24 nt, Human
gauaacaagcacagcuggccagga

SEQ ID NO: 1011033 - RNA, 22 nt, Human
gcaagggaugcagggccuugcc

SEQ ID NO: 1011034 - RNA, 18 nt, Human
gccccgggcagcacugcu

SEQ ID NO: 1011035 - RNA, 22 nt, Human
gccccgggcagcacugcuucug

SEQ ID NO: 1011036 - RNA, 26 nt, Human
gcuuucaucuccagccuucuccauag

SEQ ID NO: 1011037 - RNA, 18 nt, Human
ggaagaauggagcuuggg

SEQ ID NO: 1011038 - RNA, 20 nt, Human
ggaagcagaguccaagcugg

SEQ ID NO: 1011039 - RNA, 20 nt, Human
ggaauugcccacaacauaau

SEQ ID NO: 1011040 - RNA, 18 nt, Human
ggaggaagcagaguccaa

SEQ ID NO: 1011041 - RNA, 18 nt, Human
ggccaauggcacucacug

SEQ ID NO: 1011042 - RNA, 19 nt, Human
ggccaggugcuccuucacc

SEQ ID NO: 1011043 - RNA, 22 nt, Human
gggcaggcccauccucaggagc

SEQ ID NO: 1011044 - RNA, 21 nt, Human
ggggagccuuguggugguggc

SEQ ID NO: 1011045 - RNA, 21 nt, Human
ggguauggccagucgggacgu

SEQ ID NO: 1011046 - RNA, 27 nt, Human
guaaaacacuacacagaaugcgagcca

SEQ ID NO: 1011047 - RNA, 19 nt, Human
guaaggcaagugaauggaa

SEQ ID NO: 1011048 - RNA, 18 nt, Human
guauaccaggaaagaaaa

SEQ ID NO: 1011049 - RNA, 23 nt, Human
gugaagggcugcccagccucaca

SEQ ID NO: 1011050 - RNA, 23 nt, Human
gugccuaaacaccucucaggaac

SEQ ID NO: 1011051 - RNA, 21 nt, Human
gugggaacauguaucuaggga

SEQ ID NO: 1011052 - RNA, 20 nt, Human
gugguggcagccaggauucc

SEQ ID NO: 1011053 - RNA, 18 nt, Human
uaacaagcacagcuggcc

SEQ ID NO: 1011054 - RNA, 22 nt, Human
uaacaagcacagcuggccagga

SEQ ID NO: 1011055 - RNA, 22 nt, Human
uaaggccaggugcuccuucacc

SEQ ID NO: 1011056 - RNA, 19 nt, Human
uacaaagcuuucaucucca

SEQ ID NO: 1011057 - RNA, 24 nt, Human
uaccaggaaagaaaacacacauuc

SEQ ID NO: 1011058 - RNA, 19 nt, Human
uaccaucagcacguugauc

SEQ ID NO: 1011059 - RNA, 25 nt, Human
uauaacuaaucucuuuucccauuaa

SEQ ID NO: 1011060 - RNA, 24 nt, Human
uauggccagucgggacguggcgcc

SEQ ID NO: 1011061 - RNA, 22 nt, Human
ucccugcugcuccuggaggaag

SEQ ID NO: 1011062 - RNA, 24 nt, Human
uccgcuggauccccaggaugcugg

SEQ ID NO: 1011063 - RNA, 22 nt, Human
ucucauggaacucuccagugag

SEQ ID NO: 1011064 - RNA, 18 nt, Human
ugaagggcugcccagccu

SEQ ID NO: 1011065 - RNA, 22 nt, Human
ugaauucucuggaauugcccac

SEQ ID NO: 1011066 - RNA, 19 nt, Human
ugagcagagucucccacau

SEQ ID NO: 1011067 - RNA, 19 nt, Human
ugaggccccgggcagcacu

SEQ ID NO: 1011068 - RNA, 23 nt, Human
ugaggccccgggcagcacugcuu

SEQ ID NO: 1011069 - RNA, 24 nt, Human
ugagggaaggaagaauggagcuug

SEQ ID NO: 1011070 - RNA, 21 nt, Human
ugagggaagugauaaauggug

SEQ ID NO: 1011071 - RNA, 19 nt, Human
ugcagggcacaguuaccau

SEQ ID NO: 1011072 - RNA, 21 nt, Human
ugccagaccaugagucuaauu

SEQ ID NO: 1011073 - RNA, 19 nt, Human
ugcccagccucacaggccu

SEQ ID NO: 1011074 - RNA, 20 nt, Human
ugccuaaacaccucucagga

SEQ ID NO: 1011075 - RNA, 24 nt, Human
ugccuaaacaccucucaggaacac

SEQ ID NO: 1011076 - RNA, 23 nt, Human
ugccugaaacuccagccugugca

SEQ ID NO: 1011077 - RNA, 21 nt, Human
uggaaacuggcuggaaaaaga

SEQ ID NO: 1011078 - RNA, 23 nt, Human
uggaagauaacaagcacagcugg

SEQ ID NO: 1011079 - RNA, 18 nt, Human
uggcaggaugccccacac

SEQ ID NO: 1011080 - RNA, 19 nt, Human
uggccaaagagggucuauu

SEQ ID NO: 1011081 - RNA, 23 nt, Human
uggcccagagcuucccugcugcu

SEQ ID NO: 1011082 - RNA, 22 nt, Human
uggcuggaaaaagagaaagggc

SEQ ID NO: 1011083 - RNA, 22 nt, Human
ugggaacauguaucuagggauc

SEQ ID NO: 1011084 - RNA, 27 nt, Human
ugguuacaaacacuugugacaaguuuc

SEQ ID NO: 1011085 - RNA, 20 nt, Human
ugucacacagcauggagcca

SEQ ID NO: 1011086 - RNA, 26 nt, Human
ugucaucagccugcagugccugaaac

SEQ ID NO: 1011087 - RNA, 19 nt, Human
uguggugguggcagccagg

SEQ ID NO: 1011088 - RNA, 24 nt, Human
uguggugguggcagccaggauucc

SEQ ID NO: 1011089 - RNA, 22 nt, Human
uuccugcgcuaucccagcacaa

SEQ ID NO: 1011090 - RNA, 22 nt, Human
uugagugcuguucucucaugga

SEQ ID NO: 1011091 - RNA, 18 nt, Human
aacaaaauucaucaguaa

SEQ ID NO: 1011092 - RNA, 24 nt, Human
aacaaccagcacagaacccaaagc

SEQ ID NO: 1011093 - RNA, 24 nt, Human
aacccuuuccccaagucagauccc

SEQ ID NO: 1011094 - RNA, 22 nt, Human
aaugaaaagcagaaaggguuaa

SEQ ID NO: 1011095 - RNA, 23 nt, Human
acaaccagcacagaacccaaagc

SEQ ID NO: 1011096 - RNA, 22 nt, Human
acccuacagcccuucccgcccc

SEQ ID NO: 1011097 - RNA, 21 nt, Human
agcacagaacccaaagcugcu

SEQ ID NO: 1011098 - RNA, 22 nt, Human
caaaugauuacuuuuuaagccc

SEQ ID NO: 1011099 - RNA, 18 nt, Human
caaccagcacagaaccca

SEQ ID NO: 1011100 - RNA, 21 nt, Human
cagaacccaaagcugcucucc

SEQ ID NO: 1011101 - RNA, 21 nt, Human
cagacuuauuguuaggacaac

SEQ ID NO: 1011102 - RNA, 22 nt, Human
cccuacagcccuucccgccccc

SEQ ID NO: 1011103 - RNA, 21 nt, Human
cccucuaggcucugauaaccc

SEQ ID NO: 1011104 - RNA, 22 nt, Human
ccuacagcccuucccgcccccu

SEQ ID NO: 1011105 - RNA, 23 nt, Human
ccuguaguggggacaagagagga

SEQ ID NO: 1011106 - RNA, 23 nt, Human
ccuucccgcccccuuuucuggcu

SEQ ID NO: 1011107 - RNA, 18 nt, Human
cuccaacaccuuuguuua

SEQ ID NO: 1011108 - RNA, 22 nt, Human
cucugauaacccuuuccccaag

SEQ ID NO: 1011109 - RNA, 22 nt, Human
gaaaagcagaaaggguuaaggg

SEQ ID NO: 1011110 - RNA, 22 nt, Human
gacuuauuguuaggacaacucu

SEQ ID NO: 1011111 - RNA, 19 nt, Human
gaggaagcugugcccuucc

SEQ ID NO: 1011112 - RNA, 18 nt, Human
gcacagaacccaaagcug

SEQ ID NO: 1011113 - RNA, 22 nt, Human
ggagaaaaguggguugagaugg

SEQ ID NO: 1011114 - RNA, 19 nt, Human
ggcucugauaacccuuucc

SEQ ID NO: 1011115 - RNA, 20 nt, Human
uacagcccuucccgcccccu

SEQ ID NO: 1011116 - RNA, 20 nt, Human
uaguggggacaagagaggaa

SEQ ID NO: 1011117 - RNA, 21 nt, Human
ucugggagucuugugucugug

SEQ ID NO: 1011118 - RNA, 20 nt, Human
ugaaaagcagaaaggguuaa

SEQ ID NO: 1011119 - RNA, 19 nt, Human
ugguagguuuucagaaaug

SEQ ID NO: 1011120 - RNA, 19 nt, Human
ugugguuaaugaaaagcag

SEQ ID NO: 1011121 - RNA, 19 nt, Human
uguuaggacaacucuggga

SEQ ID NO: 1011122 - RNA, 18 nt, Human
uuaagggaagagaaagga

SEQ ID NO: 1011123 - RNA, 18 nt, Human
uuuuuuuuccuuucacaa

SEQ ID NO: 1011124 - RNA, 21 nt, Human
uuuuuuuuccuuucacaaaaa

SEQ ID NO: 1011125 - RNA, 22 nt, Human
aaaaaaagggggggaggcagaa

SEQ ID NO: 1011126 - RNA, 24 nt, Human
aaccuaggagggugggaauggcuu

SEQ ID NO: 1011127 - RNA, 25 nt, Human
agcuugggcugggguugcaggggca

SEQ ID NO: 1011128 - RNA, 21 nt, Human
aggaagaaaaggcagugguga

SEQ ID NO: 1011129 - RNA, 19 nt, Human
aggaggaaguaggaagagc

SEQ ID NO: 1011130 - RNA, 28 nt, Human
aggggaacaaaagauggaaaaaaaaggg

SEQ ID NO: 1011131 - RNA, 20 nt, Human
caaucaaccucccaccuuca

SEQ ID NO: 1011132 - RNA, 18 nt, Human
cacugugugccccagggc

SEQ ID NO: 1011133 - RNA, 18 nt, Human
caggggcaguggcugggu

SEQ ID NO: 1011134 - RNA, 28 nt, Human
caucuccucccccaaggaagacacagcc

SEQ ID NO: 1011135 - RNA, 19 nt, Human
caucuccuggguccgcccc

SEQ ID NO: 1011136 - RNA, 24 nt, Human
ccaaucugcucucaaggagcaaaa

SEQ ID NO: 1011137 - RNA, 24 nt, Human
ccacaccccgcggcgcugcuugcg

SEQ ID NO: 1011138 - RNA, 18 nt, Human
ccaccccgccccacuccu

SEQ ID NO: 1011139 - RNA, 27 nt, Human
ccaccccgccccacuccuugacacugu

SEQ ID NO: 1011140 - RNA, 18 nt, Human
ccagacagcagagggaac

SEQ ID NO: 1011141 - RNA, 25 nt, Human
ccccacaccccgcggcgcugcuugc

SEQ ID NO: 1011142 - RNA, 23 nt, Human
cccccgccaccccgccccacucc

SEQ ID NO: 1011143 - RNA, 18 nt, Human
cccgcggcgcugcuugcg

SEQ ID NO: 1011144 - RNA, 23 nt, Human
cgccccacuccuugacacuucca

SEQ ID NO: 1011145 - RNA, 27 nt, Human
cggugggcgcugagcgcggugcgcggg

SEQ ID NO: 1011146 - RNA, 20 nt, Human
cucccccgccaccccgcccc

SEQ ID NO: 1011147 - RNA, 22 nt, Human
cucccccgccaccccgccccac

SEQ ID NO: 1011148 - RNA, 20 nt, Human
cugcuugcggccucgguccg

SEQ ID NO: 1011149 - RNA, 22 nt, Human
cuggauuugccccaaucaaccu

SEQ ID NO: 1011150 - RNA, 19 nt, Human
gaaaaggcaguggugaaca

SEQ ID NO: 1011151 - RNA, 21 nt, Human
gcccuggagcccugucuggcu

SEQ ID NO: 1011152 - RNA, 23 nt, Human
gcucaagaagggaaaaggauuua

SEQ ID NO: 1011153 - RNA, 28 nt, Human
ggaacaaaagauggaaaaaaaagggggg

SEQ ID NO: 1011154 - RNA, 23 nt, Human
gggaggcagaaggagcugaugag

SEQ ID NO: 1011155 - RNA, 19 nt, Human
gggcaguggggcuagccgg

SEQ ID NO: 1011156 - RNA, 19 nt, Human
gggcuagccggcugucugg

SEQ ID NO: 1011157 - RNA, 19 nt, Human
guccgccccacaccccgcg

SEQ ID NO: 1011158 - RNA, 19 nt, Human
gugaaccuaggaggguggg

SEQ ID NO: 1011159 - RNA, 22 nt, Human
uaaacgacaccaucuccucccc

SEQ ID NO: 1011160 - RNA, 23 nt, Human
uaaacgacaccaucuccuccccc

SEQ ID NO: 1011161 - RNA, 23 nt, Human
uaaacgacaccaucuccuccccc

SEQ ID NO: 1011162 - RNA, 18 nt, Human
uaagaugaaaauccaagc

SEQ ID NO: 1011163 - RNA, 22 nt, Human
ucaagaagggaaaaggauuuau

SEQ ID NO: 1011164 - RNA, 20 nt, Human
ucaaggagcaaaacuugggc

SEQ ID NO: 1011165 - RNA, 20 nt, Human
ucaaggagcaaaacuugggc

SEQ ID NO: 1011166 - RNA, 22 nt, Human
uccacugugugccccagggcag

SEQ ID NO: 1011167 - RNA, 21 nt, Human
ucccaccuucaccauugccca

SEQ ID NO: 1011168 - RNA, 23 nt, Human
ucccccaaggaagacacagcccu

SEQ ID NO: 1011169 - RNA, 19 nt, Human
ucucccccgccaccccgcc

SEQ ID NO: 1011170 - RNA, 24 nt, Human
ucuccuggguccgccccacacccc

SEQ ID NO: 1011171 - RNA, 19 nt, Human
ucucuguggcugcaaggcc

SEQ ID NO: 1011172 - RNA, 24 nt, Human
ucucuguggcugcaaggcccuucc

SEQ ID NO: 1011173 - RNA, 24 nt, Human
ugaaccuaggagggugggaauggc

SEQ ID NO: 1011174 - RNA, 19 nt, Human
ugccuuacccugaucuaaa

SEQ ID NO: 1011175 - RNA, 21 nt, Human
uggaaaaaaaagggggggagg

SEQ ID NO: 1011176 - RNA, 18 nt, Human
uggagcccugucuggcug

SEQ ID NO: 1011177 - RNA, 24 nt, Human
uggcagacggccagacagcagagg

SEQ ID NO: 1011178 - RNA, 21 nt, Human
uggggagugccuggauuugcc

SEQ ID NO: 1011179 - RNA, 25 nt, Human
uggggagugccuggauuugccccaa

SEQ ID NO: 1011180 - RNA, 19 nt, Human
ugugccccagggcagugga

SEQ ID NO: 1011181 - RNA, 22 nt, Human
uuccuucuggcucccuggcaga

SEQ ID NO: 1011182 - RNA, 24 nt, Human
uuuaggggaacaaaagauggaaaa

SEQ ID NO: 1011183 - RNA, 23 nt, Human
aaaaaagacacugaaauagacaa

SEQ ID NO: 1011184 - RNA, 24 nt, Human
aaaaaggaaauauacauauaugua

SEQ ID NO: 1011185 - RNA, 20 nt, Human
aaaacccaaaggcaaccaca

SEQ ID NO: 1011186 - RNA, 22 nt, Human
aaaaucuuucaaacccaaucac

SEQ ID NO: 1011187 - RNA, 18 nt, Human
aaacuggggaggccggug

SEQ ID NO: 1011188 - RNA, 19 nt, Human
aaagugcugggauuacagg

SEQ ID NO: 1011189 - RNA, 21 nt, Human
aaagugcugggauuacaggca

SEQ ID NO: 1011190 - RNA, 23 nt, Human
aaagugcugggauuacaggcaua

SEQ ID NO: 1011191 - RNA, 22 nt, Human
aacaaaaacaaucuguacagaa

SEQ ID NO: 1011192 - RNA, 25 nt, Human
aacccuauaucauuuuaguaaaaaa

SEQ ID NO: 1011193 - RNA, 22 nt, Human
aacuuaaaaggugaaggacaag

SEQ ID NO: 1011194 - RNA, 20 nt, Human
aagaaacuucccauaauuca

SEQ ID NO: 1011195 - RNA, 18 nt, Human
aaggacaagaccccauau

SEQ ID NO: 1011196 - RNA, 19 nt, Human
aaggucccaaaauaaagaa

SEQ ID NO: 1011197 - RNA, 19 nt, Human
aagugcugggauuacaggc

SEQ ID NO: 1011198 - RNA, 21 nt, Human
aagugcugggauuacaggcau

SEQ ID NO: 1011199 - RNA, 26 nt, Human
aagugcugggauuacaggcauaagcc

SEQ ID NO: 1011200 - RNA, 25 nt, Human
aauaaguaauggaggaaaaguacaa

SEQ ID NO: 1011201 - RNA, 19 nt, Human
aauauacauauauguacac

SEQ ID NO: 1011202 - RNA, 25 nt, Human
acaacacucucuccaccagagcucc

SEQ ID NO: 1011203 - RNA, 24 nt, Human
accauguuggccagacuggucuug

SEQ ID NO: 1011204 - RNA, 24 nt, Human
acggcauuucaccauguuggccag

SEQ ID NO: 1011205 - RNA, 23 nt, Human
acuggucuugaacuccugaccuc

SEQ ID NO: 1011206 - RNA, 20 nt, Human
agaaggucccaaaauaaaga

SEQ ID NO: 1011207 - RNA, 25 nt, Human
agacaccccauaucacagacaagaa

SEQ ID NO: 1011208 - RNA, 27 nt, Human
agccaacagcagcaacgucgaagcgcg

SEQ ID NO: 1011209 - RNA, 23 nt, Human
agcgcgcacgggguaacagcccu

SEQ ID NO: 1011210 - RNA, 19 nt, Human
agcuccgacccuccccacc

SEQ ID NO: 1011211 - RNA, 21 nt, Human
aggagagccaacagcagcaac

SEQ ID NO: 1011212 - RNA, 19 nt, Human
aggggcgaggagagccaaa

SEQ ID NO: 1011213 - RNA, 24 nt, Human
aggugauccacccaucguagccuc

SEQ ID NO: 1011214 - RNA, 21 nt, Human
agguucaagugauucucccgc

SEQ ID NO: 1011215 - RNA, 23 nt, Human
agguucaagugauucucccgccu

SEQ ID NO: 1011216 - RNA, 21 nt, Human
aguagcugggauuacagacac

SEQ ID NO: 1011217 - RNA, 18 nt, Human
agugcugggauuacaggc

SEQ ID NO: 1011218 - RNA, 21 nt, Human
auaaaaccuaauggaacucug

SEQ ID NO: 1011219 - RNA, 20 nt, Human
auaauacacagaauacaguc

SEQ ID NO: 1011220 - RNA, 21 nt, Human
aucguagccucccaaagugcu

SEQ ID NO: 1011221 - RNA, 19 nt, Human
aucucggcgcccaggcugg

SEQ ID NO: 1011222 - RNA, 21 nt, Human
augucaauuucugacauccuu

SEQ ID NO: 1011223 - RNA, 24 nt, Human
auuuuuguauuuuuaguagagacg

SEQ ID NO: 1011224 - RNA, 24 nt, Human
caaagugcugggauuacaggcaua

SEQ ID NO: 1011225 - RNA, 21 nt, Human
caaggcacaacucagcguuga

SEQ ID NO: 1011226 - RNA, 22 nt, Human
caagugauucucccgccucagc

SEQ ID NO: 1011227 - RNA, 18 nt, Human
cacaaagcucuuugcugu

SEQ ID NO: 1011228 - RNA, 24 nt, Human
cacaccuaccaccuguuuugguca

SEQ ID NO: 1011229 - RNA, 18 nt, Human
caccagagcuccgacccu

SEQ ID NO: 1011230 - RNA, 22 nt, Human
caccagagcuccgacccucccc

SEQ ID NO: 1011231 - RNA, 19 nt, Human
caccaugcccagccaaagc

SEQ ID NO: 1011232 - RNA, 21 nt, Human
caccauguuggccagacuggu

SEQ ID NO: 1011233 - RNA, 24 nt, Human
caccauguuggccagacuggucuu

SEQ ID NO: 1011234 - RNA, 27 nt, Human
caccauguuggccagacuggucuugaa

SEQ ID NO: 1011235 - RNA, 23 nt, Human
cacccaucguagccucccaaagu

SEQ ID NO: 1011236 - RNA, 22 nt, Human
caccccauaucacagacaagaa

SEQ ID NO: 1011237 - RNA, 18 nt, Human
cacugcaaccucugccuc

SEQ ID NO: 1011238 - RNA, 21 nt, Human
cacugcaaccucugccuccca

SEQ ID NO: 1011239 - RNA, 21 nt, Human
cagaaaacccaaaggcaacca

SEQ ID NO: 1011240 - RNA, 22 nt, Human
cagaaaacccaaaggcaaccac

SEQ ID NO: 1011241 - RNA, 20 nt, Human
cagccuccugaguagcuggg

SEQ ID NO: 1011242 - RNA, 22 nt, Human
caggcgguucccaagggaacga

SEQ ID NO: 1011243 - RNA, 21 nt, Human
caugcccagcuaauuuuugua

SEQ ID NO: 1011244 - RNA, 24 nt, Human
cauguuggccagacuggucuugaa

SEQ ID NO: 1011245 - RNA, 24 nt, Human
cauuacacugauaacauaugugug

SEQ ID NO: 1011246 - RNA, 23 nt, Human
ccaaagugcugggauuacaggca

SEQ ID NO: 1011247 - RNA, 24 nt, Human
ccaaagugcugggauuacaggcau

SEQ ID NO: 1011248 - RNA, 21 nt, Human
ccaacagcagcaacgucgaag

SEQ ID NO: 1011249 - RNA, 20 nt, Human
ccaccaugcccagccaaagc

SEQ ID NO: 1011250 - RNA, 24 nt, Human
cccaaagugcugggauuacaggca

SEQ ID NO: 1011251 - RNA, 18 nt, Human
cccaggcuggagugcaau

SEQ ID NO: 1011252 - RNA, 22 nt, Human
cccagguucaagugauucuccc

SEQ ID NO: 1011253 - RNA, 23 nt, Human
cccgccucagccuccugaguagc

SEQ ID NO: 1011254 - RNA, 24 nt, Human
cccgccucagccuccugaguagcu

SEQ ID NO: 1011255 - RNA, 21 nt, Human
cccuccccaccaaacuuccgc

SEQ ID NO: 1011256 - RNA, 19 nt, Human
ccgacccuccccaccaaac

SEQ ID NO: 1011257 - RNA, 21 nt, Human
ccgcgaagggcagccucccuu

SEQ ID NO: 1011258 - RNA, 24 nt, Human
ccucccagguucaagugauucucc

SEQ ID NO: 1011259 - RNA, 20 nt, Human
ccugaacuuaaaaggugaag

SEQ ID NO: 1011260 - RNA, 23 nt, Human
ccugaccucaggugauccaccca

SEQ ID NO: 1011261 - RNA, 24 nt, Human
ccugaccucaggugauccacccau

SEQ ID NO: 1011262 - RNA, 19 nt, Human
ccugaguagcugggauuac

SEQ ID NO: 1011263 - RNA, 20 nt, Human
ccugugguaaaagaguuuua

SEQ ID NO: 1011264 - RNA, 24 nt, Human
cgccucagccuccugaguagcugg

SEQ ID NO: 1011265 - RNA, 20 nt, Human
cuaaccaauuuagguaauau

SEQ ID NO: 1011266 - RNA, 24 nt, Human
cucacugcaaccucugccucccag

SEQ ID NO: 1011267 - RNA, 24 nt, Human
cucacugcaaccucugccucccag

SEQ ID NO: 1011268 - RNA, 24 nt, Human
cucagccuccugaguagcugggau

SEQ ID NO: 1011269 - RNA, 19 nt, Human
cucccagguucaagugauu

SEQ ID NO: 1011270 - RNA, 23 nt, Human
cugcaaccucugccucccagguu

SEQ ID NO: 1011271 - RNA, 24 nt, Human
cugcaaccucugccucccagguuc

SEQ ID NO: 1011272 - RNA, 21 nt, Human
gaccauuuccuuauuagcaaa

SEQ ID NO: 1011273 - RNA, 20 nt, Human
gaccucaggugauccaccca

SEQ ID NO: 1011274 - RNA, 24 nt, Human
gacuggucuugaacuccugaccuc

SEQ ID NO: 1011275 - RNA, 20 nt, Human
gagcuccgacccuccccacc

SEQ ID NO: 1011276 - RNA, 25 nt, Human
gaguagcugggauuacagacacucg

SEQ ID NO: 1011277 - RNA, 24 nt, Human
gauuacagacacucgccaucaugc

SEQ ID NO: 1011278 - RNA, 18 nt, Human
gauuacaggcauaagcca

SEQ ID NO: 1011279 - RNA, 21 nt, Human
gauuacaggcauaagccacca

SEQ ID NO: 1011280 - RNA, 24 nt, Human
gauuacaggcauaagccaccaugc

SEQ ID NO: 1011281 - RNA, 21 nt, Human
gauucucccgccucagccucc

SEQ ID NO: 1011282 - RNA, 22 nt, Human
gcaaccucugccucccagguuc

SEQ ID NO: 1011283 - RNA, 22 nt, Human
gcccagcuaauuuuuguauuuu

SEQ ID NO: 1011284 - RNA, 20 nt, Human
gcccaggcuggagugcaaug

SEQ ID NO: 1011285 - RNA, 21 nt, Human
gcuggagugcaauggcgcuag

SEQ ID NO: 1011286 - RNA, 20 nt, Human
ggacaagaccccauauuauu

SEQ ID NO: 1011287 - RNA, 24 nt, Human
ggauuacagacacucgccaucaug

SEQ ID NO: 1011288 - RNA, 24 nt, Human
ggauuacaggcauaagccaccaug

SEQ ID NO: 1011289 - RNA, 22 nt, Human
ggcggaguucccaggcgguucc

SEQ ID NO: 1011290 - RNA, 19 nt, Human
ggucuugaacuccugaccu

SEQ ID NO: 1011291 - RNA, 20 nt, Human
guagagacggcauuucacca

SEQ ID NO: 1011292 - RNA, 19 nt, Human
gucgcccaggcuggagugc

SEQ ID NO: 1011293 - RNA, 24 nt, Human
gugauccacccaucguagccuccc

SEQ ID NO: 1011294 - RNA, 23 nt, Human
gugauucucccgccucagccucc

SEQ ID NO: 1011295 - RNA, 19 nt, Human
uaaaagaguuuuacuggaa

SEQ ID NO: 1011296 - RNA, 20 nt, Human
uaauuuagaaaaucuuccuc

SEQ ID NO: 1011297 - RNA, 24 nt, Human
uaauuuuuguauuuuuaguagaga

SEQ ID NO: 1011298 - RNA, 21 nt, Human
uacacagacaccccauaucac

SEQ ID NO: 1011299 - RNA, 24 nt, Human
uacagacacucgccaucaugccca

SEQ ID NO: 1011300 - RNA, 24 nt, Human
uacaggcauaagccaccaugccca

SEQ ID NO: 1011301 - RNA, 23 nt, Human
uacauauauguacacagacaccc

SEQ ID NO: 1011302 - RNA, 20 nt, Human
uagaauuucacuguaauuag

SEQ ID NO: 1011303 - RNA, 22 nt, Human
uagagacggcauuucaccaugu

SEQ ID NO: 1011304 - RNA, 24 nt, Human
uagcgcgaucucagcucacugcaa

SEQ ID NO: 1011305 - RNA, 20 nt, Human
uaguaaaaaaaaaagaaaau

SEQ ID NO: 1011306 - RNA, 24 nt, Human
uaguagagacggcauuucaccaug

SEQ ID NO: 1011307 - RNA, 24 nt, Human
uaucauuuuaguaaaaaaaaaaga

SEQ ID NO: 1011308 - RNA, 21 nt, Human
uauuaaaaacuauuaagagca

SEQ ID NO: 1011309 - RNA, 21 nt, Human
uauucagucgcccaggcugga

SEQ ID NO: 1011310 - RNA, 24 nt, Human
uauucagucgcccaggcuggagug

SEQ ID NO: 1011311 - RNA, 19 nt, Human
ucaagugauucucccgccu

SEQ ID NO: 1011312 - RNA, 19 nt, Human
ucacugcaaccucugccuc

SEQ ID NO: 1011313 - RNA, 24 nt, Human
ucacugcaaccucugccucccagg

SEQ ID NO: 1011314 - RNA, 25 nt, Human
ucacugcaaccucugccucccaggu

SEQ ID NO: 1011315 - RNA, 18 nt, Human
ucagauuauuuauuugaa

SEQ ID NO: 1011316 - RNA, 20 nt, Human
ucagccuccugaguagcugg

SEQ ID NO: 1011317 - RNA, 19 nt, Human
ucagcguugaugcuaaagu

SEQ ID NO: 1011318 - RNA, 27 nt, Human
ucagcucacugcaaccucugccuccca

SEQ ID NO: 1011319 - RNA, 18 nt, Human
ucagucgcccaggcugga

SEQ ID NO: 1011320 - RNA, 24 nt, Human
ucagucgcccaggcuggagugcaa

SEQ ID NO: 1011321 - RNA, 25 nt, Human
uccaccagagcuccgacccucccca

SEQ ID NO: 1011322 - RNA, 24 nt, Human
ucccaaagugcugggauuacaggc

SEQ ID NO: 1011323 - RNA, 21 nt, Human
ucccagguucaagugauucuc

SEQ ID NO: 1011324 - RNA, 24 nt, Human
ucccagguucaagugauucucccg

SEQ ID NO: 1011325 - RNA, 19 nt, Human
ucccugaguaaagauucua

SEQ ID NO: 1011326 - RNA, 18 nt, Human
uccugaguagcugggauu

SEQ ID NO: 1011327 - RNA, 18 nt, Human
ucgcccaggcuggagugc

SEQ ID NO: 1011328 - RNA, 24 nt, Human
ucucccgccucagccuccugagua

SEQ ID NO: 1011329 - RNA, 24 nt, Human
ucucggaccgcgaagggcagccuc

SEQ ID NO: 1011330 - RNA, 18 nt, Human
ucucggcgcccaggcugg

SEQ ID NO: 1011331 - RNA, 21 nt, Human
ucuguacagaaaacccaaagg

SEQ ID NO: 1011332 - RNA, 23 nt, Human
ucuugaacuccugaccucaggug

SEQ ID NO: 1011333 - RNA, 18 nt, Human
ugaaggacaagaccccau

SEQ ID NO: 1011334 - RNA, 21 nt, Human
ugacaguuaaaaauuacacac

SEQ ID NO: 1011335 - RNA, 19 nt, Human
ugaccucaggugauccacc

SEQ ID NO: 1011336 - RNA, 21 nt, Human
ugaccucaggugauccaccca

SEQ ID NO: 1011337 - RNA, 20 nt, Human
ugauucucccgccucagccu

SEQ ID NO: 1011338 - RNA, 24 nt, Human
ugcaaagaccaccauucauaaaaa

SEQ ID NO: 1011339 - RNA, 18 nt, Human
ugcaagauagaauuucac

SEQ ID NO: 1011340 - RNA, 22 nt, Human
ugcaguagcgcgaucucagcuc

SEQ ID NO: 1011341 - RNA, 24 nt, Human
ugcugggauuacaggcauaagcca

SEQ ID NO: 1011342 - RNA, 24 nt, Human
uggaaugcaguagcgcgaucucag

SEQ ID NO: 1011343 - RNA, 23 nt, Human
uggagugcaauggcgcuaucucg

SEQ ID NO: 1011344 - RNA, 24 nt, Human
uggagugcaauggcgcuaucucgg

SEQ ID NO: 1011345 - RNA, 24 nt, Human
uggccagacuggucuugaacuccu

SEQ ID NO: 1011346 - RNA, 19 nt, Human
ugggauuacagacacucgc

SEQ ID NO: 1011347 - RNA, 21 nt, Human
ugggauuacagacacucgcca

SEQ ID NO: 1011348 - RNA, 22 nt, Human
ugggauuacagacacucgccau

SEQ ID NO: 1011349 - RNA, 24 nt, Human
ugggauuacagacacucgccauca

SEQ ID NO: 1011350 - RNA, 18 nt, Human
ugggauuacaggcauaag

SEQ ID NO: 1011351 - RNA, 22 nt, Human
ugggauuacaggcauaagccac

SEQ ID NO: 1011352 - RNA, 24 nt, Human
ugggauuacaggcauaagccacca

SEQ ID NO: 1011353 - RNA, 25 nt, Human
uggucaaucuugcuaaaaaagacac

SEQ ID NO: 1011354 - RNA, 20 nt, Human
uguuuuuuuuugagacagag

SEQ ID NO: 1011355 - RNA, 24 nt, Human
uuaacaauuuuuuugaaaauauaa

SEQ ID NO: 1011356 - RNA, 24 nt, Human
uuaguagagacggcauuucaccau

SEQ ID NO: 1011357 - RNA, 22 nt, Human
uuauucagucgcccaggcugga

SEQ ID NO: 1011358 - RNA, 24 nt, Human
uuauucagucgcccaggcuggagu

SEQ ID NO: 1011359 - RNA, 23 nt, Human
uucaaaaucuuucaaacccaauc

SEQ ID NO: 1011360 - RNA, 23 nt, Human
uucaagugauucucccgccucag

SEQ ID NO: 1011361 - RNA, 24 nt, Human
uucaagugauucucccgccucagc

SEQ ID NO: 1011362 - RNA, 21 nt, Human
uucccaggcgguucccaaggg

SEQ ID NO: 1011363 - RNA, 24 nt, Human
uucccugugguaaaagaguuuuac

SEQ ID NO: 1011364 - RNA, 22 nt, Human
uugaaaauauaaaauaaacccu

SEQ ID NO: 1011365 - RNA, 18 nt, Human
uuuacuggguaauuucug

SEQ ID NO: 1011366 - RNA, 21 nt, Human
uuucaccauguuggccagacu

SEQ ID NO: 1011367 - RNA, 23 nt, Human
uuuuaugccguucauauaucgcu

SEQ ID NO: 1011368 - RNA, 23 nt, Human
uuuuauucagucgcccaggcugg

SEQ ID NO: 1011369 - RNA, 24 nt, Human
uuuuauucagucgcccaggcugga

SEQ ID NO: 1011370 - RNA, 24 nt, Human
uuuugaaaauauaaaauaaacccu

SEQ ID NO: 1011371 - RNA, 24 nt, Human
uuuuuaguagagacggcauuucac

SEQ ID NO: 1011372 - RNA, 20 nt, Human
uuuuuguauuuuuaguagag

SEQ ID NO: 1011373 - RNA, 20 nt, Human
aggcaggauuuugucauaua

SEQ ID NO: 1011374 - RNA, 19 nt, Human
caggauuuugucauauagg

SEQ ID NO: 1011375 - RNA, 21 nt, Human
caggauuuugucauauaggca

SEQ ID NO: 1011376 - RNA, 19 nt, Human
uaaagcagugugguuaggc

SEQ ID NO: 1011377 - RNA, 20 nt, Human
uaaaguaaaugggcuuaaaa

SEQ ID NO: 1011378 - RNA, 21 nt, Human
ugguuaggcaggauuuuguca

SEQ ID NO: 1011379 - RNA, 20 nt, Human
uuccaaaaagagcuuugugg

SEQ ID NO: 1011380 - RNA, 21 nt, Human
uuccaaaaagagcuuuguggg

SEQ ID NO: 1011381 - RNA, 19 nt, Human
uuugugggggacggaaaaa

SEQ ID NO: 1011382 - RNA, 27 nt, Human
acauuacaguggcccagagucuucugu

SEQ ID NO: 1011383 - RNA, 20 nt, Human
cacaaacauuacaguggccc

SEQ ID NO: 1011384 - RNA, 20 nt, Human
cccgaccuugggccuccagc

SEQ ID NO: 1011385 - RNA, 21 nt, Human
cccugugggugcugcuuuucc

SEQ ID NO: 1011386 - RNA, 19 nt, Human
cgcaggcgcucccuguggg

SEQ ID NO: 1011387 - RNA, 19 nt, Human
cgccagaugccuuucagaa

SEQ ID NO: 1011388 - RNA, 20 nt, Human
cuccccgaccuugggccucc

SEQ ID NO: 1011389 - RNA, 21 nt, Human
cuccccgaccuugggccucca

SEQ ID NO: 1011390 - RNA, 18 nt, Human
gaccuugggccuccagcc

SEQ ID NO: 1011391 - RNA, 23 nt, Human
gagaagaaaccucgcaggcgcuc

SEQ ID NO: 1011392 - RNA, 19 nt, Human
uccaaaucuaaacacaaac

SEQ ID NO: 1011393 - RNA, 19 nt, Human
uggcccagagucuucugcc

SEQ ID NO: 1011394 - RNA, 21 nt, Human
uguccaaaucuaaacacaaac

SEQ ID NO: 1011395 - RNA, 19 nt, Human
aaaaagccaaauacaauug

SEQ ID NO: 1011396 - RNA, 27 nt, Human
aaaaagccaaauacaauugcacagaua

SEQ ID NO: 1011397 - RNA, 23 nt, Human
aaacagugcaaaaaaaagccaaa

SEQ ID NO: 1011398 - RNA, 23 nt, Human
aaagccaaauacaauugcacaga

SEQ ID NO: 1011399 - RNA, 19 nt, Human
aaagugaauacaaccaaau

SEQ ID NO: 1011400 - RNA, 23 nt, Human
aacuugauuccugaccucuccca

SEQ ID NO: 1011401 - RNA, 22 nt, Human
aagaaggaguagaagcagaggu

SEQ ID NO: 1011402 - RNA, 22 nt, Human
aagugcccauuucagcaaaucc

SEQ ID NO: 1011403 - RNA, 23 nt, Human
acaggcccccgagaagugugcgc

SEQ ID NO: 1011404 - RNA, 19 nt, Human
accagcuucuccgccucgg

SEQ ID NO: 1011405 - RNA, 22 nt, Human
acccugcccuuccaacagcagc

SEQ ID NO: 1011406 - RNA, 19 nt, Human
accuucccuuugacaaaac

SEQ ID NO: 1011407 - RNA, 21 nt, Human
agcaaccccaaagucaaaaug

SEQ ID NO: 1011408 - RNA, 22 nt, Human
agcaaccccaaagucaaaaugc

SEQ ID NO: 1011409 - RNA, 22 nt, Human
agccugcugcuggucuccuccu

SEQ ID NO: 1011410 - RNA, 19 nt, Human
aggaacauggagaagucac

SEQ ID NO: 1011411 - RNA, 20 nt, Human
agugugcgcugcuucaacga

SEQ ID NO: 1011412 - RNA, 18 nt, Human
aguuuucagccacagucu

SEQ ID NO: 1011413 - RNA, 21 nt, Human
auuuuguuccagccaguccca

SEQ ID NO: 1011414 - RNA, 24 nt, Human
caaaaaaaagccaaauacaauugc

SEQ ID NO: 1011415 - RNA, 19 nt, Human
caaguuuaaguuccuugcc

SEQ ID NO: 1011416 - RNA, 18 nt, Human
cagcagcaggaguaguag

SEQ ID NO: 1011417 - RNA, 19 nt, Human
cagugcaaaaaaaagccaa

SEQ ID NO: 1011418 - RNA, 20 nt, Human
cauggagaagucacgcuccu

SEQ ID NO: 1011419 - RNA, 27 nt, Human
cauuuugacuccuggcuuuucagcaac

SEQ ID NO: 1011420 - RNA, 25 nt, Human
ccacagucuccccaacuccggcucu

SEQ ID NO: 1011421 - RNA, 21 nt, Human
ccagcuucuccgccucgggga

SEQ ID NO: 1011422 - RNA, 20 nt, Human
cccuuccaacagcagcagga

SEQ ID NO: 1011423 - RNA, 21 nt, Human
ccucgcagguguuggcgaaca

SEQ ID NO: 1011424 - RNA, 20 nt, Human
ccuugggucucgcaccggau

SEQ ID NO: 1011425 - RNA, 18 nt, Human
cggcucugcuccccucuc

SEQ ID NO: 1011426 - RNA, 19 nt, Human
cucucccauugucacucca

SEQ ID NO: 1011427 - RNA, 21 nt, Human
cugcuccccucuccuuggguc

SEQ ID NO: 1011428 - RNA, 21 nt, Human
gaaacagucugguucgugcuu

SEQ ID NO: 1011429 - RNA, 23 nt, Human
gaaacagugcaaaaaaaagccaa

SEQ ID NO: 1011430 - RNA, 20 nt, Human
gaaccaauggauaccuuagg

SEQ ID NO: 1011431 - RNA, 21 nt, Human
gacacacggcuuuaccuuccc

SEQ ID NO: 1011432 - RNA, 18 nt, Human
gacagucacaccugauga

SEQ ID NO: 1011433 - RNA, 23 nt, Human
gacuccuggcuuuucagcaaccc

SEQ ID NO: 1011434 - RNA, 23 nt, Human
gagccugcugcuggucuccucgg

SEQ ID NO: 1011435 - RNA, 20 nt, Human
gcaaugguggcagucaaagc

SEQ ID NO: 1011436 - RNA, 23 nt, Human
ggaaccacaaguuuaaguuccuu

SEQ ID NO: 1011437 - RNA, 21 nt, Human
ggccucgaacuucaccagggc

SEQ ID NO: 1011438 - RNA, 19 nt, Human
ggcgcgggcggcugguggg

SEQ ID NO: 1011439 - RNA, 23 nt, Human
gggcugaccccaagaaacagucu

SEQ ID NO: 1011440 - RNA, 22 nt, Human
gguuggagguacucacggcacc

SEQ ID NO: 1011441 - RNA, 21 nt, Human
guugcaaugguggcagucaaa

SEQ ID NO: 1011442 - RNA, 18 nt, Human
uaguaggugaccagcuuc

SEQ ID NO: 1011443 - RNA, 19 nt, Human
uaguggacucccuuagauc

SEQ ID NO: 1011444 - RNA, 19 nt, Human
uaucaaagacagacaaggu

SEQ ID NO: 1011445 - RNA, 20 nt, Human
uaucaaagacagacaaggug

SEQ ID NO: 1011446 - RNA, 22 nt, Human
uauguacacaacaacauuuuug

SEQ ID NO: 1011447 - RNA, 26 nt, Human
uauuaaaaaacuuggaagccaacauu

SEQ ID NO: 1011448 - RNA, 18 nt, Human
ucaaagcacaccacgcag

SEQ ID NO: 1011449 - RNA, 18 nt, Human
uccagccagucccagugc

SEQ ID NO: 1011450 - RNA, 18 nt, Human
ucccacacuccucgcagg

SEQ ID NO: 1011451 - RNA, 21 nt, Human
ucccagugcugauugauuucc

SEQ ID NO: 1011452 - RNA, 23 nt, Human
ucccgcaggauguaccucuugcc

SEQ ID NO: 1011453 - RNA, 22 nt, Human
ucucgcaccggauucggccccc

SEQ ID NO: 1011454 - RNA, 21 nt, Human
ucuugcuucuugguuaguaug

SEQ ID NO: 1011455 - RNA, 21 nt, Human
ugaaacagugcaaaaaaaagc

SEQ ID NO: 1011456 - RNA, 23 nt, Human
ugaaacagugcaaaaaaaagcca

SEQ ID NO: 1011457 - RNA, 18 nt, Human
ugaccccaagaaacaguc

SEQ ID NO: 1011458 - RNA, 19 nt, Human
ugaccccaagaaacagucu

SEQ ID NO: 1011459 - RNA, 23 nt, Human
ugagagcaaaaucaacacuagca

SEQ ID NO: 1011460 - RNA, 24 nt, Human
ugagguacagccagcccuggcggg

SEQ ID NO: 1011461 - RNA, 23 nt, Human
ugaugaggagaauggcucagcug

SEQ ID NO: 1011462 - RNA, 23 nt, Human
ugcaaaaaaaagccaaauacaau

SEQ ID NO: 1011463 - RNA, 19 nt, Human
ugcacagauaguggacucc

SEQ ID NO: 1011464 - RNA, 23 nt, Human
ugccagccuagucuccaggaaga

SEQ ID NO: 1011465 - RNA, 20 nt, Human
uggcagucaaagcgcucagu

SEQ ID NO: 1011466 - RNA, 22 nt, Human
uggcagucaaagcgcucaguca

SEQ ID NO: 1011467 - RNA, 19 nt, Human
ugggaaggcagggggugca

SEQ ID NO: 1011468 - RNA, 23 nt, Human
uugaggguugugucgguuccccu

SEQ ID NO: 1011469 - RNA, 22 nt, Human
uugaugcugagguacagccagc

SEQ ID NO: 1011470 - RNA, 23 nt, Human
uuugucagguuguuuagccagau

SEQ ID NO: 1011471 - RNA, 21 nt, Human
aagccugacgagaagucggga

SEQ ID NO: 1011472 - RNA, 20 nt, Human
accaccgccgcccaggacga

SEQ ID NO: 1011473 - RNA, 24 nt, Human
accuucuccagccagugauugcug

SEQ ID NO: 1011474 - RNA, 21 nt, Human
agcaauaugcuuauucuaucc

SEQ ID NO: 1011475 - RNA, 25 nt, Human
agccugacgagaagucgggagacug

SEQ ID NO: 1011476 - RNA, 18 nt, Human
agcgccggcgcgaaagcc

SEQ ID NO: 1011477 - RNA, 18 nt, Human
augcauucacaaggucaa

SEQ ID NO: 1011478 - RNA, 23 nt, Human
cagcccaguggccauaacggcga

SEQ ID NO: 1011479 - RNA, 18 nt, Human
caucccuaacaucaugca

SEQ ID NO: 1011480 - RNA, 22 nt, Human
cccgagaagugccggguccggg

SEQ ID NO: 1011481 - RNA, 21 nt, Human
cccugggcccuuuccuagccc

SEQ ID NO: 1011482 - RNA, 22 nt, Human
ccgccgcaccaccgccgcccag

SEQ ID NO: 1011483 - RNA, 20 nt, Human
ccgcgccggggcgaucggca

SEQ ID NO: 1011484 - RNA, 18 nt, Human
ccgcgcuggagcagcggc

SEQ ID NO: 1011485 - RNA, 19 nt, Human
ccggguccggguuggggaa

SEQ ID NO: 1011486 - RNA, 19 nt, Human
cgcaggccgcgcuggagca

SEQ ID NO: 1011487 - RNA, 18 nt, Human
cggaacccgagaagugcc

SEQ ID NO: 1011488 - RNA, 20 nt, Human
cgggcccugggcccuuuccu

SEQ ID NO: 1011489 - RNA, 23 nt, Human
gcccaguggccauaacggcgacc

SEQ ID NO: 1011490 - RNA, 25 nt, Human
gcccugggcccuuuccuagcccgcg

SEQ ID NO: 1011491 - RNA, 18 nt, Human
gcggucagccgcccagcc

SEQ ID NO: 1011492 - RNA, 19 nt, Human
ggccauaacggcgaccgcc

SEQ ID NO: 1011493 - RNA, 22 nt, Human
ggcccugggcccuuuccuagcc

SEQ ID NO: 1011494 - RNA, 21 nt, Human
ggcgaucggcagucgcggaac

SEQ ID NO: 1011495 - RNA, 21 nt, Human
gggaaaggccgcagcgaaagg

SEQ ID NO: 1011496 - RNA, 22 nt, Human
uaaagaagucauaaacagcauu

SEQ ID NO: 1011497 - RNA, 18 nt, Human
uacagugcauccuugaac

SEQ ID NO: 1011498 - RNA, 22 nt, Human
uauucuauccacaucccuaaca

SEQ ID NO: 1011499 - RNA, 23 nt, Human
ucaugcauucacaaggucaaagu

SEQ ID NO: 1011500 - RNA, 19 nt, Human
uuccggagccgcggcaggg

SEQ ID NO: 1011501 - RNA, 21 nt, Human
uuccucccuccucccacagcc

SEQ ID NO: 1011502 - RNA, 24 nt, Human
uuuucaucuuuccucccuccuccc

SEQ ID NO: 1011503 - RNA, 18 nt, Human
uuuuuuuuuuaaagaagu

SEQ ID NO: 1011504 - RNA, 23 nt, Human
uuuuuuuuuuuuuaaagaaguca

SEQ ID NO: 1011505 - RNA, 18 nt, Human
cacuccgccaccucgucc

SEQ ID NO: 1011506 - RNA, 22 nt, Human
cccgggcugcauauuccagggg

SEQ ID NO: 1011507 - RNA, 21 nt, Human
ccgccaccucguccuugccgc

SEQ ID NO: 1011508 - RNA, 22 nt, Human
ccgcugucuggggcucccccgg

SEQ ID NO: 1011509 - RNA, 22 nt, Human
ccucccgccccacuccgccacc

SEQ ID NO: 1011510 - RNA, 21 nt, Human
cucguccuugccgcugucugg

SEQ ID NO: 1011511 - RNA, 20 nt, Human
gcauauuccaggggcugggg

SEQ ID NO: 1011512 - RNA, 22 nt, Human
gccaccgucaggaccaaccauu

SEQ ID NO: 1011513 - RNA, 19 nt, Human
gcucagccaccgucaggac

SEQ ID NO: 1011514 - RNA, 19 nt, Human
ggcugggggcucagccacc

SEQ ID NO: 1011515 - RNA, 24 nt, Human
ggcugggggcucagccaccgucag

SEQ ID NO: 1011516 - RNA, 20 nt, Human
ucccccgggcugcauauucc

SEQ ID NO: 1011517 - RNA, 23 nt, Human
ugcauauuccaggggcugggggc

SEQ ID NO: 1011518 - RNA, 22 nt, Human
aacauauuuacaacgugaagga

SEQ ID NO: 1011519 - RNA, 18 nt, Human
aacauuucucugcaaaac

SEQ ID NO: 1011520 - RNA, 20 nt, Human
aacauuucucugcaaaacaa

SEQ ID NO: 1011521 - RNA, 22 nt, Human
acaggaaugaaaagguuauaga

SEQ ID NO: 1011522 - RNA, 20 nt, Human
accacguucauugggccauu

SEQ ID NO: 1011523 - RNA, 26 nt, Human
agaaaggagauaaagaggagggaccc

SEQ ID NO: 1011524 - RNA, 23 nt, Human
agaaggaaauggaaacacacggg

SEQ ID NO: 1011525 - RNA, 23 nt, Human
agcaacagugccuuaagaaagga

SEQ ID NO: 1011526 - RNA, 19 nt, Human
aucaggugcaaguguggaa

SEQ ID NO: 1011527 - RNA, 18 nt, Human
caaaacaaauggagaagc

SEQ ID NO: 1011528 - RNA, 20 nt, Human
caaaacaaauggagaagcac

SEQ ID NO: 1011529 - RNA, 24 nt, Human
caaaacaaauggagaagcacugcu

SEQ ID NO: 1011530 - RNA, 25 nt, Human
caacagugccuuaagaaaggagaua

SEQ ID NO: 1011531 - RNA, 23 nt, Human
cacaggaaugaaaagguuauaga

SEQ ID NO: 1011532 - RNA, 28 nt, Human
cagaaggaaauggaaacacacgggaaau

SEQ ID NO: 1011533 - RNA, 18 nt, Human
cagacagguuuacaugua

SEQ ID NO: 1011534 - RNA, 19 nt, Human
cagggugcaaauggauuuc

SEQ ID NO: 1011535 - RNA, 23 nt, Human
cagucugcccuuuccuucuuuuc

SEQ ID NO: 1011536 - RNA, 21 nt, Human
cauagcaacagugccuuaaga

SEQ ID NO: 1011537 - RNA, 24 nt, Human
cauagcaacagugccuuaagaaga

SEQ ID NO: 1011538 - RNA, 25 nt, Human
ccagcaguacuuuuaaguccauucu

SEQ ID NO: 1011539 - RNA, 23 nt, Human
cccccuccggucgugacagcucg

SEQ ID NO: 1011540 - RNA, 19 nt, Human
ccggaagaggacggugggg

SEQ ID NO: 1011541 - RNA, 26 nt, Human
ccggccuuucuccuccucugaggccu

SEQ ID NO: 1011542 - RNA, 19 nt, Human
ccuuaagaaaggagauaaa

SEQ ID NO: 1011543 - RNA, 23 nt, Human
cggccugugagugugugucgggg

SEQ ID NO: 1011544 - RNA, 21 nt, Human
cuacuggggugacucuucgau

SEQ ID NO: 1011545 - RNA, 18 nt, Human
cuagguauuuagccaccu

SEQ ID NO: 1011546 - RNA, 24 nt, Human
cugaggccuggaucuucucuucgc

SEQ ID NO: 1011547 - RNA, 26 nt, Human
cuggaucuucucuucgcgaccagucu

SEQ ID NO: 1011548 - RNA, 24 nt, Human
cugguaaggcugcgaguccccccu

SEQ ID NO: 1011549 - RNA, 22 nt, Human
cuguuacacauggcuucccaug

SEQ ID NO: 1011550 - RNA, 25 nt, Human
cuuaaaaaaauggauaaaaucagaa

SEQ ID NO: 1011551 - RNA, 24 nt, Human
cuuaagaaaggagauaaagaggag

SEQ ID NO: 1011552 - RNA, 22 nt, Human
gauaaagaggagccuuaaaaaa

SEQ ID NO: 1011553 - RNA, 19 nt, Human
gcaaaacaaauggagaagc

SEQ ID NO: 1011554 - RNA, 25 nt, Human
gcucuguuuccucuuuccccuccca

SEQ ID NO: 1011555 - RNA, 21 nt, Human
ggaagaggacgguggggcgcg

SEQ ID NO: 1011556 - RNA, 18 nt, Human
gugaaggauacaucuaca

SEQ ID NO: 1011557 - RNA, 23 nt, Human
uaaaaaaauggauaaaaucagaa

SEQ ID NO: 1011558 - RNA, 21 nt, Human
uaacccccccaauuuuuuuuu

SEQ ID NO: 1011559 - RNA, 22 nt, Human
uaagcucuguuacacauggcuu

SEQ ID NO: 1011560 - RNA, 20 nt, Human
uaagugccugguaaggcugc

SEQ ID NO: 1011561 - RNA, 22 nt, Human
uacaacagauacaauucacauc

SEQ ID NO: 1011562 - RNA, 18 nt, Human
uacuguacacaggaauga

SEQ ID NO: 1011563 - RNA, 19 nt, Human
uacuuugagcacacaugcc

SEQ ID NO: 1011564 - RNA, 19 nt, Human
uacuuugagcacacaugcc

SEQ ID NO: 1011565 - RNA, 24 nt, Human
uccccugaauugacucucacagac

SEQ ID NO: 1011566 - RNA, 22 nt, Human
ucggcuggcuccggccuuucuc

SEQ ID NO: 1011567 - RNA, 18 nt, Human
ucugcccuuuccuucuuu

SEQ ID NO: 1011568 - RNA, 22 nt, Human
ucuguuuccucuuuccccuccc

SEQ ID NO: 1011569 - RNA, 18 nt, Human
ugaaaaacauuucucugc

SEQ ID NO: 1011570 - RNA, 19 nt, Human
ugaaaaacauuucucugca

SEQ ID NO: 1011571 - RNA, 24 nt, Human
ugaaaaacauuucucugcaaaaca

SEQ ID NO: 1011572 - RNA, 18 nt, Human
ugauaaauuaaccccccc

SEQ ID NO: 1011573 - RNA, 21 nt, Human
ugcaaaacaaauggagaagca

SEQ ID NO: 1011574 - RNA, 23 nt, Human
ugcucgaggcugaucucaggggc

SEQ ID NO: 1011575 - RNA, 18 nt, Human
uggagaagcacugcucuu

SEQ ID NO: 1011576 - RNA, 24 nt, Human
uggcuucacucuacaaaacauauu

SEQ ID NO: 1011577 - RNA, 23 nt, Human
uggggugacucuucgaugaauac

SEQ ID NO: 1011578 - RNA, 21 nt, Human
uuacacauggcuucccauggc

SEQ ID NO: 1011579 - RNA, 23 nt, Human
uucucugcaaaacaaauggagaa

SEQ ID NO: 1011580 - RNA, 20 nt, Human
uuuuuuuuguuuguuuuaac

SEQ ID NO: 1011581 - RNA, 22 nt, Human
uuuuuuuuguuuguuuuaacau

SEQ ID NO: 1011582 - RNA, 22 nt, Human
uuuuuuuuuuuuuguuuguuuu

SEQ ID NO: 1011583 - RNA, 24 nt, Human
uuuuuuuuuuuuuguuuuaacaug

SEQ ID NO: 1011584 - RNA, 18 nt, Human
uuuuuuuuuuuuuuuuug

SEQ ID NO: 1011585 - RNA, 18 nt, Human
uuuuuuuuuuuuuuuuug

SEQ ID NO: 1011586 - RNA, 21 nt, Human
uuuuuuuuuuuuuuuuuguuu

SEQ ID NO: 1011587 - RNA, 24 nt, Human
uuuuuuuuuuuuuuuuuuuguuuu

SEQ ID NO: 1011588 - RNA, 28 nt, Human
uuuuuuuuuuuuuuuuuuuuuguuuuaa

SEQ ID NO: 1011589 - RNA, 21 nt, Human
acaggcagcgugcaaccuauc

SEQ ID NO: 1011590 - RNA, 19 nt, Human
agaaaccagggguggaugg

SEQ ID NO: 1011591 - RNA, 22 nt, Human
agccacagauccuaaaucagaa

SEQ ID NO: 1011592 - RNA, 18 nt, Human
agcgggcagggccccagg

SEQ ID NO: 1011593 - RNA, 21 nt, Human
cagaggccuuccuccgagcuc

SEQ ID NO: 1011594 - RNA, 20 nt, Human
cauucuggaugguugggcug

SEQ ID NO: 1011595 - RNA, 24 nt, Human
ccccaggccucccaucgugaacuc

SEQ ID NO: 1011596 - RNA, 18 nt, Human
ccuaucauggugcuauuu

SEQ ID NO: 1011597 - RNA, 18 nt, Human
ccugagggagaggucagg

SEQ ID NO: 1011598 - RNA, 21 nt, Human
cuccgagcucaggcuauggac

SEQ ID NO: 1011599 - RNA, 18 nt, Human
cugagggagaggucaggg

SEQ ID NO: 1011600 - RNA, 25 nt, Human
gaaaaucaugaaagaggugaaugac

SEQ ID NO: 1011601 - RNA, 18 nt, Human
ggcagggccccaggccuc

SEQ ID NO: 1011602 - RNA, 19 nt, Human
ggcuauggacuuugacucc

SEQ ID NO: 1011603 - RNA, 18 nt, Human
ggguggauggguugcagg

SEQ ID NO: 1011604 - RNA, 19 nt, Human
gguggauggguugcaggga

SEQ ID NO: 1011605 - RNA, 19 nt, Human
gugugaaagcguuaggaag

SEQ ID NO: 1011606 - RNA, 23 nt, Human
uacggauuggugugaaagcguua

SEQ ID NO: 1011607 - RNA, 20 nt, Human
uauggcaguggugcagagua

SEQ ID NO: 1011608 - RNA, 21 nt, Human
ucaggcuauggacuuugacuc

SEQ ID NO: 1011609 - RNA, 23 nt, Human
ucgugaacucuuuccguuggucc

SEQ ID NO: 1011610 - RNA, 22 nt, Human
ugaaagaggugaaugacugaug

SEQ ID NO: 1011611 - RNA, 19 nt, Human
ugauacagaggccuuccuc

SEQ ID NO: 1011612 - RNA, 21 nt, Human
ugccugagggagaggucaggg

SEQ ID NO: 1011613 - RNA, 19 nt, Human
ugcugccggcucagggccc

SEQ ID NO: 1011614 - RNA, 18 nt, Human
ugggaagcucguauggca

SEQ ID NO: 1011615 - RNA, 24 nt, Human
uggugugaaagcguuaggaagggu

SEQ ID NO: 1011616 - RNA, 23 nt, Human
uucugcugccggcucagggccca

SEQ ID NO: 1011617 - RNA, 18 nt, Human
uuucugcugccggcucag

SEQ ID NO: 1011618 - RNA, 22 nt, Human
agcaggcgcugacggcgagcca

SEQ ID NO: 1011619 - RNA, 19 nt, Human
agcggggaggaggacgagg

SEQ ID NO: 1011620 - RNA, 21 nt, Human
ccccucucggugacaggggcu

SEQ ID NO: 1011621 - RNA, 24 nt, Human
ccggagcggggaggaggacgaggu

SEQ ID NO: 1011622 - RNA, 21 nt, Human
ccucucggugacaggggcggg

SEQ ID NO: 1011623 - RNA, 21 nt, Human
cgagagcucguucccccucuc

SEQ ID NO: 1011624 - RNA, 18 nt, Human
cggagcggggaggaggac

SEQ ID NO: 1011625 - RNA, 22 nt, Human
cggggagaaguggagucagagg

SEQ ID NO: 1011626 - RNA, 20 nt, Human
cguucccccucucggugaca

SEQ ID NO: 1011627 - RNA, 22 nt, Human
cucguucccccucucggugaca

SEQ ID NO: 1011628 - RNA, 21 nt, Human
gagcggggaggaggacgaggu

SEQ ID NO: 1011629 - RNA, 18 nt, Human
gcggggaggaggacgagg

SEQ ID NO: 1011630 - RNA, 21 nt, Human
ggaggaggacgaggucgaggg

SEQ ID NO: 1011631 - RNA, 20 nt, Human
gggagaaguggagucagagg

SEQ ID NO: 1011632 - RNA, 18 nt, Human
ucggcucguccggagcgg

SEQ ID NO: 1011633 - RNA, 24 nt, Human
ucucuccggcgagugggcgagagc

SEQ ID NO: 1011634 - RNA, 20 nt, Human
ugagaaagggaagcucccgg

SEQ ID NO: 1011635 - RNA, 19 nt, Human
aagaagcaggaggagggua

SEQ ID NO: 1011636 - RNA, 18 nt, Human
aagcaggaggaggguaug

SEQ ID NO: 1011637 - RNA, 20 nt, Human
aauguuugaauuugguuggu

SEQ ID NO: 1011638 - RNA, 22 nt, Human
accgauucccacccacacacgc

SEQ ID NO: 1011639 - RNA, 22 nt, Human
agcagugaauguuugaauuugg

SEQ ID NO: 1011640 - RNA, 21 nt, Human
agccagcacaggcaggcugca

SEQ ID NO: 1011641 - RNA, 19 nt, Human
caacuucucgaguuccccu

SEQ ID NO: 1011642 - RNA, 20 nt, Human
caauaugaaaagcuaggugc

SEQ ID NO: 1011643 - RNA, 19 nt, Human
cagcugaagcaagcaauag

SEQ ID NO: 1011644 - RNA, 23 nt, Human
caggcugcagcugaagcaagcaa

SEQ ID NO: 1011645 - RNA, 25 nt, Human
cauauucccacucccccucccaccu

SEQ ID NO: 1011646 - RNA, 24 nt, Human
ccacacacgcauauucccacuccc

SEQ ID NO: 1011647 - RNA, 27 nt, Human
ccacccacacacgcauauucccacucc

SEQ ID NO: 1011648 - RNA, 19 nt, Human
cccacacacgcauauuccc

SEQ ID NO: 1011649 - RNA, 19 nt, Human
cccaccuuuccuccugccc

SEQ ID NO: 1011650 - RNA, 25 nt, Human
cccccucccaccuuuccuccugccc

SEQ ID NO: 1011651 - RNA, 24 nt, Human
cccugcugucuucuaaccugcccg

SEQ ID NO: 1011652 - RNA, 21 nt, Human
ccgauucccacccacacacgc

SEQ ID NO: 1011653 - RNA, 22 nt, Human
ccucccaccuuuccuccugccc

SEQ ID NO: 1011654 - RNA, 23 nt, Human
ccucccaccuuuccuccugccca

SEQ ID NO: 1011655 - RNA, 21 nt, Human
cgcauauucccacucccccuc

SEQ ID NO: 1011656 - RNA, 28 nt, Human
cugaaaacaaccaacuucucgaguuccc

SEQ ID NO: 1011657 - RNA, 22 nt, Human
cugcagcugaagcaagcaauag

SEQ ID NO: 1011658 - RNA, 23 nt, Human
cugcagcugaagcaagcaauagc

SEQ ID NO: 1011659 - RNA, 21 nt, Human
cugcugucuucuaaccugccc

SEQ ID NO: 1011660 - RNA, 20 nt, Human
gacaaaagccuaucgacccc

SEQ ID NO: 1011661 - RNA, 23 nt, Human
gcaauagccuggagaauaaacac

SEQ ID NO: 1011662 - RNA, 18 nt, Human
ggaagaagcaggaggagg

SEQ ID NO: 1011663 - RNA, 21 nt, Human
uacagucuguaacaaauaagc

SEQ ID NO: 1011664 - RNA, 19 nt, Human
uaccgauucccacccacac

SEQ ID NO: 1011665 - RNA, 18 nt, Human
uaggugcauuucuuaccg

SEQ ID NO: 1011666 - RNA, 26 nt, Human
uauuacgacaaaagccuaucgacccc

SEQ ID NO: 1011667 - RNA, 19 nt, Human
ucccacucccccucccacc

SEQ ID NO: 1011668 - RNA, 22 nt, Human
ugcccauacaugaggcacaagg

SEQ ID NO: 1011669 - RNA, 21 nt, Human
ugguggaaagcugggaugcaa

SEQ ID NO: 1011670 - RNA, 22 nt, Human
uguaacaaauaagcagugaaug

SEQ ID NO: 1011671 - RNA, 25 nt, Human
uucccacucccccucccaccuuucc

SEQ ID NO: 1011672 - RNA, 21 nt, Human
uugguugguggaaagcuggga

SEQ ID NO: 1011673 - RNA, 21 nt, Human
aaaaauaacucaaacacaaaa

SEQ ID NO: 1011674 - RNA, 19 nt, Human
aagcggguagggggcgacu

SEQ ID NO: 1011675 - RNA, 24 nt, Human
aaucaaauaauuguacauauucuu

SEQ ID NO: 1011676 - RNA, 21 nt, Human
acuacgagaagcggguagggg

SEQ ID NO: 1011677 - RNA, 21 nt, Human
agaaaucucuacuccagugcc

SEQ ID NO: 1011678 - RNA, 26 nt, Human
aggcaagaugaaauaaacuguuuuuu

SEQ ID NO: 1011679 - RNA, 18 nt, Human
auuacaaaauauuuacag

SEQ ID NO: 1011680 - RNA, 27 nt, Human
caaaacaaauaagcaacuaagaucccc

SEQ ID NO: 1011681 - RNA, 19 nt, Human
caaauaagcaacuaagauc

SEQ ID NO: 1011682 - RNA, 21 nt, Human
caaauaauuguacauauucuu

SEQ ID NO: 1011683 - RNA, 24 nt, Human
cacacaagagucaaaacaaauaag

SEQ ID NO: 1011684 - RNA, 25 nt, Human
cacagcacacaagagucaaaacaaa

SEQ ID NO: 1011685 - RNA, 21 nt, Human
cagcacugcuucaauaacuga

SEQ ID NO: 1011686 - RNA, 20 nt, Human
ccaaagaacuggaggagggg

SEQ ID NO: 1011687 - RNA, 19 nt, Human
ccagugcccacagcacaca

SEQ ID NO: 1011688 - RNA, 21 nt, Human
ccagugcccacagcacacaag

SEQ ID NO: 1011689 - RNA, 21 nt, Human
cgacucccggccucuuucacu

SEQ ID NO: 1011690 - RNA, 24 nt, Human
cuaagaucccccgaucacaaauuu

SEQ ID NO: 1011691 - RNA, 24 nt, Human
cucaaacacaaaaggcaagaugaa

SEQ ID NO: 1011692 - RNA, 19 nt, Human
cugaaaguuuaggucagug

SEQ ID NO: 1011693 - RNA, 24 nt, Human
cugaaauuagaaaauacccugaca

SEQ ID NO: 1011694 - RNA, 26 nt, Human
cugacaauggaagcagcucuuucauc

SEQ ID NO: 1011695 - RNA, 21 nt, Human
gaggggaagaaacagggugaa

SEQ ID NO: 1011696 - RNA, 25 nt, Human
ggguagggggcgacucccggccucu

SEQ ID NO: 1011697 - RNA, 18 nt, Human
gugguaugaaagggaaug

SEQ ID NO: 1011698 - RNA, 23 nt, Human
uaaaaaaagaaaaacacuucugc

SEQ ID NO: 1011699 - RNA, 21 nt, Human
uaacucaaacacaaaaggcaa

SEQ ID NO: 1011700 - RNA, 19 nt, Human
uaagagccucuuucuccau

SEQ ID NO: 1011701 - RNA, 24 nt, Human
uagcagcacugcuucaauaacuga

SEQ ID NO: 1011702 - RNA, 20 nt, Human
uaggauauuccuugaacuga

SEQ ID NO: 1011703 - RNA, 21 nt, Human
uauccugccuuguauuaggaa

SEQ ID NO: 1011704 - RNA, 20 nt, Human
uauucuggaugaaauacccu

SEQ ID NO: 1011705 - RNA, 21 nt, Human
ucccccgaucacaaauuucca

SEQ ID NO: 1011706 - RNA, 21 nt, Human
ucucuacuccagugcccacag

SEQ ID NO: 1011707 - RNA, 22 nt, Human
ugaaagggaauggauguuagca

SEQ ID NO: 1011708 - RNA, 22 nt, Human
ugaaauuagaaaauacccugac

SEQ ID NO: 1011709 - RNA, 24 nt, Human
ugaacaaggcuaaauuuuaggaua

SEQ ID NO: 1011710 - RNA, 21 nt, Human
ugcaguaaauucugaacaagg

SEQ ID NO: 1011711 - RNA, 24 nt, Human
uucguaaaggccuucaacuggguc

SEQ ID NO: 1011712 - RNA, 26 nt, Human
uuguacauauucuucccacauauccu

SEQ ID NO: 1011713 - RNA, 22 nt, Human
uuuucccacaaaucacugaaag

SEQ ID NO: 1011714 - RNA, 20 nt, Human
uuuuuuuuuuuuuuuuuggu

SEQ ID NO: 1011715 - RNA, 24 nt, Human
uuuuuuuuuuuuuuuuugguguag

SEQ ID NO: 1011716 - RNA, 20 nt, Human
uuuuuuuuuuuuuuuuuugg

SEQ ID NO: 1011717 - RNA, 26 nt, Human
aaacacuaaaaacuuuuacugaagcu

SEQ ID NO: 1011718 - RNA, 21 nt, Human
aacuuuuacugaagcuggaga

SEQ ID NO: 1011719 - RNA, 18 nt, Human
aaguaccugagcugcucc

SEQ ID NO: 1011720 - RNA, 22 nt, Human
agacagaaagugagaaauuacu

SEQ ID NO: 1011721 - RNA, 24 nt, Human
agacagaaagugagaaauuacuaa

SEQ ID NO: 1011722 - RNA, 26 nt, Human
aguaaacacuaaaaacuuuuacugaa

SEQ ID NO: 1011723 - RNA, 19 nt, Human
augcauuuucaaugcagga

SEQ ID NO: 1011724 - RNA, 22 nt, Human
auguacaaaaagcucuccugca

SEQ ID NO: 1011725 - RNA, 23 nt, Human
auuucauucaucuuuaucccugg

SEQ ID NO: 1011726 - RNA, 31 nt, Human
caaacaaacacagauaaacuuuggguguugu

SEQ ID NO: 1011727 - RNA, 23 nt, Human
caaacacagauaaacuuugggug

SEQ ID NO: 1011728 - RNA, 24 nt, Human
caaauacauuuagaauaaaucuaa

SEQ ID NO: 1011729 - RNA, 19 nt, Human
cagaaccaaaucaucacug

SEQ ID NO: 1011730 - RNA, 20 nt, Human
cagccgcccgaugcccaccc

SEQ ID NO: 1011731 - RNA, 22 nt, Human
cagccgcccgaugcccacccga

SEQ ID NO: 1011732 - RNA, 23 nt, Human
caucugaaguaccugagcugcuc

SEQ ID NO: 1011733 - RNA, 24 nt, Human
caucuuaaaaagacaaauauuaac

SEQ ID NO: 1011734 - RNA, 25 nt, Human
cauucuguccuaaaagcauguacaa

SEQ ID NO: 1011735 - RNA, 18 nt, Human
ccacccgaaccucccucc

SEQ ID NO: 1011736 - RNA, 18 nt, Human
ccacccgaaccucccucc

SEQ ID NO: 1011737 - RNA, 20 nt, Human
ccagccgcccgaugcccacc

SEQ ID NO: 1011738 - RNA, 19 nt, Human
cgagcucuuccagccgccc

SEQ ID NO: 1011739 - RNA, 24 nt, Human
cgccagccgcucugcaagucgucc

SEQ ID NO: 1011740 - RNA, 23 nt, Human
cguccaggguuccacucagacuc

SEQ ID NO: 1011741 - RNA, 20 nt, Human
cuccauauuaagcacaucug

SEQ ID NO: 1011742 - RNA, 22 nt, Human
cugaagaacagaaauacauuuc

SEQ ID NO: 1011743 - RNA, 23 nt, Human
cuuaaauuaugacuuaauuagca

SEQ ID NO: 1011744 - RNA, 24 nt, Human
gaaaaaaggcauaugcuagaaugu

SEQ ID NO: 1011745 - RNA, 22 nt, Human
gaaguaccugagcugcuccugg

SEQ ID NO: 1011746 - RNA, 18 nt, Human
gacugggggaaaaaaggc

SEQ ID NO: 1011747 - RNA, 19 nt, Human
gcaggauaaauaugcucuu

SEQ ID NO: 1011748 - RNA, 18 nt, Human
uaagguaagccaauaugc

SEQ ID NO: 1011749 - RNA, 19 nt, Human
uaaguaaacacuaaaaacu

SEQ ID NO: 1011750 - RNA, 22 nt, Human
uaaguaaacacuaaaaacuuuu

SEQ ID NO: 1011751 - RNA, 18 nt, Human
uacaucagcuuucucaca

SEQ ID NO: 1011752 - RNA, 19 nt, Human
uaccugagcugcuccuggc

SEQ ID NO: 1011753 - RNA, 22 nt, Human
uaccugagcugcuccuggcugu

SEQ ID NO: 1011754 - RNA, 23 nt, Human
uaugcuagaaugugaacuccuga

SEQ ID NO: 1011755 - RNA, 21 nt, Human
ucaucuuuaucccuggauucc

SEQ ID NO: 1011756 - RNA, 23 nt, Human
ucaucuuuaucccuggauuccua

SEQ ID NO: 1011757 - RNA, 21 nt, Human
uccuaacacaaugccugguuc

SEQ ID NO: 1011758 - RNA, 20 nt, Human
ucucacaucagccucagaac

SEQ ID NO: 1011759 - RNA, 22 nt, Human
ugaagugaacuggggcaaauac

SEQ ID NO: 1011760 - RNA, 24 nt, Human
ugcucuuaugaauaugaauggaau

SEQ ID NO: 1011761 - RNA, 19 nt, Human
uggauuccuaacacaaugc

SEQ ID NO: 1011762 - RNA, 22 nt, Human
uuaagacauuuuaaccagacag

SEQ ID NO: 1011763 - RNA, 19 nt, Human
uuagacacugaacauaaua

SEQ ID NO: 1011764 - RNA, 20 nt, Human
uuagacacugaacauaauac

SEQ ID NO: 1011765 - RNA, 24 nt, Human
uucuuacauguacagucaucuuaa

SEQ ID NO: 1011766 - RNA, 27 nt, Human
uuuuuuuuuuuuuuuuuuucuuugggg

SEQ ID NO: 1011767 - RNA, 18 nt, Human
aaaaccaaaaggcagaaa

SEQ ID NO: 1011768 - RNA, 29 nt, Human
aaccaaaaggcagaaaauagagggacccc

SEQ ID NO: 1011769 - RNA, 18 nt, Human
aauuucuggaucuuccuc

SEQ ID NO: 1011770 - RNA, 19 nt, Human
acacaaaccaagagacugc

SEQ ID NO: 1011771 - RNA, 21 nt, Human
acacugcacgcaggguccucc

SEQ ID NO: 1011772 - RNA, 21 nt, Human
acugcagcugagccuuggcgg

SEQ ID NO: 1011773 - RNA, 22 nt, Human
agacagagcagaaaccucccga

SEQ ID NO: 1011774 - RNA, 21 nt, Human
agcguggugggaggcuggggc

SEQ ID NO: 1011775 - RNA, 25 nt, Human
aggcagaaaauagacuuuauuccaa

SEQ ID NO: 1011776 - RNA, 22 nt, Human
aggcagugagcguggugggagg

SEQ ID NO: 1011777 - RNA, 24 nt, Human
aggcggccaggaagggccaugagc

SEQ ID NO: 1011778 - RNA, 21 nt, Human
caaaccaagagacugccauga

SEQ ID NO: 1011779 - RNA, 18 nt, Human
caaaggcugccauccaag

SEQ ID NO: 1011780 - RNA, 24 nt, Human
cacaaaccaagagacugccaugac

SEQ ID NO: 1011781 - RNA, 21 nt, Human
cacgcauggccuuggccagac

SEQ ID NO: 1011782 - RNA, 22 nt, Human
cacugcacgcaggguccuccgc

SEQ ID NO: 1011783 - RNA, 20 nt, Human
cacugcagcugagccuuggc

SEQ ID NO: 1011784 - RNA, 21 nt, Human
cacuguguucaagcuaagcuu

SEQ ID NO: 1011785 - RNA, 22 nt, Human
cagccugacucccucgccuaag

SEQ ID NO: 1011786 - RNA, 22 nt, Human
caggccacggugcuucuagugu

SEQ ID NO: 1011787 - RNA, 21 nt, Human
caugacagacagagcagaaac

SEQ ID NO: 1011788 - RNA, 23 nt, Human
caugacagacagagcagaaaccu

SEQ ID NO: 1011789 - RNA, 18 nt, Human
ccccagcgagcuugcggu

SEQ ID NO: 1011790 - RNA, 18 nt, Human
cccccagcgagcuugcgg

SEQ ID NO: 1011791 - RNA, 19 nt, Human
ccccccagcgagcuugcgg

SEQ ID NO: 1011792 - RNA, 22 nt, Human
ccgccaccaccauccaagaacc

SEQ ID NO: 1011793 - RNA, 27 nt, Human
ccgccaccaccauccaagaaccccggg

SEQ ID NO: 1011794 - RNA, 25 nt, Human
ccuaagcuggggcucgguccgaggc

SEQ ID NO: 1011795 - RNA, 23 nt, Human
ccuccgccaccaccauccaagaa

SEQ ID NO: 1011796 - RNA, 18 nt, Human
ccugcagcuggagaggga

SEQ ID NO: 1011797 - RNA, 21 nt, Human
cgccaccaccauccaagaacc

SEQ ID NO: 1011798 - RNA, 23 nt, Human
cgcgcuggccucugccaaggagu

SEQ ID NO: 1011799 - RNA, 24 nt, Human
gaaucccaggccacggugcuucua

SEQ ID NO: 1011800 - RNA, 19 nt, Human
gaggcuggggcuggugccu

SEQ ID NO: 1011801 - RNA, 21 nt, Human
gcacugcagcugagccuuggc

SEQ ID NO: 1011802 - RNA, 22 nt, Human
gcaggguccuccgccaccacca

SEQ ID NO: 1011803 - RNA, 18 nt, Human
gccagugguucccgggac

SEQ ID NO: 1011804 - RNA, 18 nt, Human
gccugcggacagcuccag

SEQ ID NO: 1011805 - RNA, 21 nt, Human
ggaacuuggccucgauucucu

SEQ ID NO: 1011806 - RNA, 25 nt, Human
ggacagagcgucacacugcacgcag

SEQ ID NO: 1011807 - RNA, 20 nt, Human
ggccucaccugcagcuggag

SEQ ID NO: 1011808 - RNA, 26 nt, Human
guccuccgccaccaccauccaagaac

SEQ ID NO: 1011809 - RNA, 21 nt, Human
uaaaucaaacauuguucacaa

SEQ ID NO: 1011810 - RNA, 26 nt, Human
uccuccgccaccaccauccaagaacc

SEQ ID NO: 1011811 - RNA, 23 nt, Human
ucgccuaagcuggggcucggucc

SEQ ID NO: 1011812 - RNA, 19 nt, Human
ugacagacagagcagaaac

SEQ ID NO: 1011813 - RNA, 24 nt, Human
ugacagacagagcagaaaccuccc

SEQ ID NO: 1011814 - RNA, 19 nt, Human
ugagcguggugggaggcug

SEQ ID NO: 1011815 - RNA, 23 nt, Human
ugcccugauccuccugguaggua

SEQ ID NO: 1011816 - RNA, 21 nt, Human
uggcacugcagcugagccuug

SEQ ID NO: 1011817 - RNA, 22 nt, Human
uggcaggcggccaggaagggag

SEQ ID NO: 1011818 - RNA, 18 nt, Human
uggccugaaugaaaaccg

SEQ ID NO: 1011819 - RNA, 24 nt, Human
uguucaagcuaagcuuuccuaagg

SEQ ID NO: 1011820 - RNA, 21 nt, Human
uuccgcaggccucaccugcag

SEQ ID NO: 1011821 - RNA, 24 nt, Human
uuccugaggggcuucuuaacuuuu

SEQ ID NO: 1011822 - RNA, 24 nt, Human
aaaaaauacucuucagagaggaaa

SEQ ID NO: 1011823 - RNA, 21 nt, Human
aacccacacccuucucauccc

SEQ ID NO: 1011824 - RNA, 28 nt, Human
aacgcacagccagacacacacacacaca

SEQ ID NO: 1011825 - RNA, 21 nt, Human
aagacgucaccaaaugagaca

SEQ ID NO: 1011826 - RNA, 22 nt, Human
aagcagcaagcccaaggccaca

SEQ ID NO: 1011827 - RNA, 24 nt, Human
aagcagcaagcccaaggccacaca

SEQ ID NO: 1011828 - RNA, 26 nt, Human
aagcagcaagcccaaggccacacagc

SEQ ID NO: 1011829 - RNA, 24 nt, Human
acacacacacacacacccugccac

SEQ ID NO: 1011830 - RNA, 30 nt, Human
acagccagacacacacacacacacccugcc

SEQ ID NO: 1011831 - RNA, 19 nt, Human
acagcucccagcuguaccc

SEQ ID NO: 1011832 - RNA, 21 nt, Human
acaggaggggacccugccagu

SEQ ID NO: 1011833 - RNA, 23 nt, Human
accaaaugagacacugcgaaucc

SEQ ID NO: 1011834 - RNA, 24 nt, Human
accccacagggcagggcugagacc

SEQ ID NO: 1011835 - RNA, 21 nt, Human
acucuucagagaggaaacgac

SEQ ID NO: 1011836 - RNA, 23 nt, Human
acugcgaaucccacacagggcaa

SEQ ID NO: 1011837 - RNA, 19 nt, Human
agagggcaaucgaaaaaaa

SEQ ID NO: 1011838 - RNA, 18 nt, Human
agccagcagagcgugggg

SEQ ID NO: 1011839 - RNA, 23 nt, Human
aggcaggagagcuggcccaagca

SEQ ID NO: 1011840 - RNA, 22 nt, Human
aggggcaguagcugccuugggg

SEQ ID NO: 1011841 - RNA, 22 nt, Human
aggggccagaaaaguccagagc

SEQ ID NO: 1011842 - RNA, 22 nt, Human
aggguggggggcuuuuccaggg

SEQ ID NO: 1011843 - RNA, 20 nt, Human
agguucuggauggaggaccg

SEQ ID NO: 1011844 - RNA, 22 nt, Human
auccuuccggccagugacaugg

SEQ ID NO: 1011845 - RNA, 23 nt, Human
augaagcagcaagcccaaggcca

SEQ ID NO: 1011846 - RNA, 21 nt, Human
caaaagcaucuucaagggucc

SEQ ID NO: 1011847 - RNA, 19 nt, Human
caagagaugagacacagga

SEQ ID NO: 1011848 - RNA, 19 nt, Human
caagcccaaggccacacag

SEQ ID NO: 1011849 - RNA, 21 nt, Human
caagcccaaggccacacagcu

SEQ ID NO: 1011850 - RNA, 19 nt, Human
caaggguccuggcagccuu

SEQ ID NO: 1011851 - RNA, 24 nt, Human
cacacacacccugccacgcacagc

SEQ ID NO: 1011852 - RNA, 19 nt, Human
cacacccuucucaucccuc

SEQ ID NO: 1011853 - RNA, 20 nt, Human
cacacgcguucauauauuaa

SEQ ID NO: 1011854 - RNA, 21 nt, Human
cacagggcagggcugagacac

SEQ ID NO: 1011855 - RNA, 24 nt, Human
caccacagcucccagcuguacccg

SEQ ID NO: 1011856 - RNA, 18 nt, Human
caccccacagggcagggc

SEQ ID NO: 1011857 - RNA, 27 nt, Human
cacgcacagcacgcaggcacacacaca

SEQ ID NO: 1011858 - RNA, 26 nt, Human
cagagcugcagugcccaaagcuaccc

SEQ ID NO: 1011859 - RNA, 18 nt, Human
cagccuuugcuucagccc

SEQ ID NO: 1011860 - RNA, 21 nt, Human
caggaggggccagaaaagucc

SEQ ID NO: 1011861 - RNA, 22 nt, Human
caggaggggccagaaaagucca

SEQ ID NO: 1011862 - RNA, 23 nt, Human
cauccggggucccugugcugccc

SEQ ID NO: 1011863 - RNA, 22 nt, Human
ccaaaugagacacugcgaaucc

SEQ ID NO: 1011864 - RNA, 20 nt, Human
ccacaaggugggagaugggg

SEQ ID NO: 1011865 - RNA, 20 nt, Human
cccacacagggcaagggggc

SEQ ID NO: 1011866 - RNA, 19 nt, Human
ccccgcugccucccaccgg

SEQ ID NO: 1011867 - RNA, 19 nt, Human
cccuggagaagcccugggg

SEQ ID NO: 1011868 - RNA, 19 nt, Human
cccugguccuugacccagc

SEQ ID NO: 1011869 - RNA, 19 nt, Human
ccgcugccucccaccgugu

SEQ ID NO: 1011870 - RNA, 21 nt, Human
ccggccccuugcugucucucc

SEQ ID NO: 1011871 - RNA, 21 nt, Human
ccgugggccgaguucucguac

SEQ ID NO: 1011872 - RNA, 20 nt, Human
ccucugccagccagcagagc

SEQ ID NO: 1011873 - RNA, 21 nt, Human
ccugguccucacugccuccuu

SEQ ID NO: 1011874 - RNA, 20 nt, Human
cgaaaaaaauacucuucaga

SEQ ID NO: 1011875 - RNA, 25 nt, Human
cgcacagcacgcaggcacacacaca

SEQ ID NO: 1011876 - RNA, 19 nt, Human
cgcacagccagacacacac

SEQ ID NO: 1011877 - RNA, 22 nt, Human
cgcacagccagacacacacaca

SEQ ID NO: 1011878 - RNA, 28 nt, Human
cgcaggcacacacacacuugugcaugca

SEQ ID NO: 1011879 - RNA, 20 nt, Human
cgggggcaccccacagggca

SEQ ID NO: 1011880 - RNA, 21 nt, Human
cugggcagggcuuggccaggg

SEQ ID NO: 1011881 - RNA, 25 nt, Human
cuugugcaugcacacgcguucauau

SEQ ID NO: 1011882 - RNA, 24 nt, Human
cuuugcuucagcccuuagguucug

SEQ ID NO: 1011883 - RNA, 19 nt, Human
gaagcagcaagcccaaggc

SEQ ID NO: 1011884 - RNA, 26 nt, Human
gacacacacacacacacccugccacg

SEQ ID NO: 1011885 - RNA, 18 nt, Human
gacauggcugaagccccc

SEQ ID NO: 1011886 - RNA, 20 nt, Human
gauggcuggaguucagcagc

SEQ ID NO: 1011887 - RNA, 24 nt, Human
gcacgcaggcacacacacacuugu

SEQ ID NO: 1011888 - RNA, 18 nt, Human
gcagcuacaggguucagc

SEQ ID NO: 1011889 - RNA, 22 nt, Human
gccauguccugggggccaggcu

SEQ ID NO: 1011890 - RNA, 23 nt, Human
gccggccccuugcugucucuccc

SEQ ID NO: 1011891 - RNA, 21 nt, Human
gcucccugguccuugacccag

SEQ ID NO: 1011892 - RNA, 22 nt, Human
ggcagggcugagacacauccuu

SEQ ID NO: 1011893 - RNA, 21 nt, Human
ggccacacagcuaggucagca

SEQ ID NO: 1011894 - RNA, 21 nt, Human
gggauuaggagagaaagcauc

SEQ ID NO: 1011895 - RNA, 24 nt, Human
gggcagcugaaugccugagggggg

SEQ ID NO: 1011896 - RNA, 24 nt, Human
ggggucccugugcugcccuggaga

SEQ ID NO: 1011897 - RNA, 18 nt, Human
guccugggggccaggcuc

SEQ ID NO: 1011898 - RNA, 20 nt, Human
guccuugacccagcuccauc

SEQ ID NO: 1011899 - RNA, 23 nt, Human
gugcugcccuggagaagcccugg

SEQ ID NO: 1011900 - RNA, 18 nt, Human
uauaugugcacccuaacc

SEQ ID NO: 1011901 - RNA, 23 nt, Human
ucacugccuccuuuuagggcggg

SEQ ID NO: 1011902 - RNA, 23 nt, Human
ucagaggcuguggaagacagcug

SEQ ID NO: 1011903 - RNA, 23 nt, Human
uccagagcugcagugcccaaagc

SEQ ID NO: 1011904 - RNA, 19 nt, Human
uccauccugcggggcccuu

SEQ ID NO: 1011905 - RNA, 22 nt, Human
ucccaccguguugauggcugga

SEQ ID NO: 1011906 - RNA, 19 nt, Human
ucccagaggaagggugggg

SEQ ID NO: 1011907 - RNA, 22 nt, Human
ucccugguccuugacccagcuc

SEQ ID NO: 1011908 - RNA, 26 nt, Human
ucccugguccuugacccagcuccauc

SEQ ID NO: 1011909 - RNA, 19 nt, Human
uccuacugcaggcuuagcc

SEQ ID NO: 1011910 - RNA, 20 nt, Human
uccugggggccaggcuccag

SEQ ID NO: 1011911 - RNA, 22 nt, Human
ugaagcagcaagcccaaggcca

SEQ ID NO: 1011912 - RNA, 21 nt, Human
ugacccagcuccauccugcgg

SEQ ID NO: 1011913 - RNA, 22 nt, Human
ugacccagcuccauccugcggg

SEQ ID NO: 1011914 - RNA, 21 nt, Human
ugagacacaggaggggacccu

SEQ ID NO: 1011915 - RNA, 23 nt, Human
ugauaagagccuagugcccaggg

SEQ ID NO: 1011916 - RNA, 22 nt, Human
ugcaugcacacgcguucauaua

SEQ ID NO: 1011917 - RNA, 26 nt, Human
ugccagccagcagagcgugggguggu

SEQ ID NO: 1011918 - RNA, 19 nt, Human
uggcugagauccuacugca

SEQ ID NO: 1011919 - RNA, 18 nt, Human
uggcuggaguucagcagc

SEQ ID NO: 1011920 - RNA, 21 nt, Human
uggcuuccucuagacacaggc

SEQ ID NO: 1011921 - RNA, 19 nt, Human
ugggaaggguuaggggcag

SEQ ID NO: 1011922 - RNA, 21 nt, Human
ugggaaggguuaggggcagua

SEQ ID NO: 1011923 - RNA, 21 nt, Human
ugggagauguggaggagaacu

SEQ ID NO: 1011924 - RNA, 19 nt, Human
uggggacugggagauggga

SEQ ID NO: 1011925 - RNA, 19 nt, Human
uggggccaaacccacaccc

SEQ ID NO: 1011926 - RNA, 23 nt, Human
uggggggagcagccauguccugg

SEQ ID NO: 1011927 - RNA, 23 nt, Human
uggggggcccaucgagcaccugc

SEQ ID NO: 1011928 - RNA, 24 nt, Human
uggggggcccaucgagcaccugcc

SEQ ID NO: 1011929 - RNA, 22 nt, Human
uggugggaaggguuaggggcag

SEQ ID NO: 1011930 - RNA, 19 nt, Human
ugucaguuucccagaggaa

SEQ ID NO: 1011931 - RNA, 23 nt, Human
uguccugggggccaggcuccagu

SEQ ID NO: 1011932 - RNA, 21 nt, Human
uugugcaugcacacgcguuca

SEQ ID NO: 1011933 - RNA, 21 nt, Human
aagcaagaagacagacucugg

SEQ ID NO: 1011934 - RNA, 18 nt, Human
aagguuacagaggcccac

SEQ ID NO: 1011935 - RNA, 22 nt, Human
accacaucuggaagcaagaaga

SEQ ID NO: 1011936 - RNA, 20 nt, Human
acccuagagacuccaggaac

SEQ ID NO: 1011937 - RNA, 23 nt, Human
acccuagagacuccaggaacccc

SEQ ID NO: 1011938 - RNA, 18 nt, Human
acuccugggcuuucggga

SEQ ID NO: 1011939 - RNA, 25 nt, Human
agcaagaagacagacucuggaagaa

SEQ ID NO: 1011940 - RNA, 20 nt, Human
agcacccuagagacuccagg

SEQ ID NO: 1011941 - RNA, 25 nt, Human
aggcaggaaaaaaggccguuucugg

SEQ ID NO: 1011942 - RNA, 20 nt, Human
aucggcuaagcugggcgggu

SEQ ID NO: 1011943 - RNA, 20 nt, Human
caagaagacagacucuggaa

SEQ ID NO: 1011944 - RNA, 21 nt, Human
caagaagacagacucuggaag

SEQ ID NO: 1011945 - RNA, 25 nt, Human
cacuccccuucccuucucucuccga

SEQ ID NO: 1011946 - RNA, 18 nt, Human
caggaggagauaaaucuu

SEQ ID NO: 1011947 - RNA, 18 nt, Human
ccccuucccuucucucuc

SEQ ID NO: 1011948 - RNA, 19 nt, Human
ccccuucccuucucucucc

SEQ ID NO: 1011949 - RNA, 20 nt, Human
cccuagagacuccaggaacc

SEQ ID NO: 1011950 - RNA, 18 nt, Human
cggcuaagcugggcgggu

SEQ ID NO: 1011951 - RNA, 18 nt, Human
cggcuaagcugggcgggu

SEQ ID NO: 1011952 - RNA, 22 nt, Human
cuccaggaacccccuucacucc

SEQ ID NO: 1011953 - RNA, 21 nt, Human
cuccugggcuuucgggacucu

SEQ ID NO: 1011954 - RNA, 22 nt, Human
cuucacuccugggcuuucggga

SEQ ID NO: 1011955 - RNA, 19 nt, Human
gaaguugaccacaucugga

SEQ ID NO: 1011956 - RNA, 20 nt, Human
gcggggcaggaggagauaaa

SEQ ID NO: 1011957 - RNA, 24 nt, Human
gcuggggacacuccccuucccuuc

SEQ ID NO: 1011958 - RNA, 19 nt, Human
gggcagggggaguacaguu

SEQ ID NO: 1011959 - RNA, 23 nt, Human
gggucggggagggcagggggagu

SEQ ID NO: 1011960 - RNA, 20 nt, Human
gugcaggucaucggcuaagc

SEQ ID NO: 1011961 - RNA, 18 nt, Human
guuacagaggcccaccau

SEQ ID NO: 1011962 - RNA, 22 nt, Human
guuucugggggguuggcugggg

SEQ ID NO: 1011963 - RNA, 19 nt, Human
uccugggcuuucgggacuc

SEQ ID NO: 1011964 - RNA, 22 nt, Human
ucuacagcguggggccucuuuc

SEQ ID NO: 1011965 - RNA, 23 nt, Human
ugcaggucaucggcuaagcuggg

SEQ ID NO: 1011966 - RNA, 22 nt, Human
ugggggguuggcuggggacacu

SEQ ID NO: 1011967 - RNA, 22 nt, Human
uucugggggguuggcuggggac

SEQ ID NO: 1011968 - RNA, 23 nt, Human
uucugggggguuggcuggggaca

SEQ ID NO: 1011969 - RNA, 20 nt, Human
uuuuuuuuucguacaacccc

SEQ ID NO: 1011970 - RNA, 19 nt, Human
uuuuuuuuuuucguacaac

SEQ ID NO: 1011971 - RNA, 18 nt, Human
uuuuuuuuuuuuuuuucg

SEQ ID NO: 1011972 - RNA, 20 nt, Human
uuuuuuuuuuuuuuuuucgu

SEQ ID NO: 1011973 - RNA, 18 nt, Human
aaacggagcaggucuuga

SEQ ID NO: 1011974 - RNA, 18 nt, Human
aagcaggagaaucgcuug

SEQ ID NO: 1011975 - RNA, 24 nt, Human
aagcaggagaaucgcuugaaccca

SEQ ID NO: 1011976 - RNA, 24 nt, Human
aaggagucagcccggagccucugc

SEQ ID NO: 1011977 - RNA, 24 nt, Human
aaucgcuugaacccaggaggcaga

SEQ ID NO: 1011978 - RNA, 25 nt, Human
acacagcccgaggaaggggggaacc

SEQ ID NO: 1011979 - RNA, 21 nt, Human
acagcccgaggaagggaccca

SEQ ID NO: 1011980 - RNA, 24 nt, Human
acccaggaggcagagguugcggug

SEQ ID NO: 1011981 - RNA, 23 nt, Human
accccgaagaaccuugagccgag

SEQ ID NO: 1011982 - RNA, 20 nt, Human
acccuuggccaggugcggcu

SEQ ID NO: 1011983 - RNA, 23 nt, Human
accucgccuggugccgucccaac

SEQ ID NO: 1011984 - RNA, 24 nt, Human
agagccuuccauuggcccccaccc

SEQ ID NO: 1011985 - RNA, 24 nt, Human
agagguugcggugagccgagaucg

SEQ ID NO: 1011986 - RNA, 21 nt, Human
agcccggagccucugcuaugu

SEQ ID NO: 1011987 - RNA, 27 nt, Human
aggagaaaccuugucucuccucggaag

SEQ ID NO: 1011988 - RNA, 21 nt, Human
aggcagagguugcggugagcc

SEQ ID NO: 1011989 - RNA, 24 nt, Human
aggcagagguugcggugagccgag

SEQ ID NO: 1011990 - RNA, 24 nt, Human
aggcugaagcaggagaaucgcuug

SEQ ID NO: 1011991 - RNA, 22 nt, Human
caacaacucauacacuagcacc

SEQ ID NO: 1011992 - RNA, 20 nt, Human
caagaacacagcccaaggaa

SEQ ID NO: 1011993 - RNA, 20 nt, Human
caagaacacagcccgaggaa

SEQ ID NO: 1011994 - RNA, 19 nt, Human
cacacgcacaaaucgaggc

SEQ ID NO: 1011995 - RNA, 22 nt, Human
caccagcaagaacacagcccaa

SEQ ID NO: 1011996 - RNA, 22 nt, Human
cacuuuugcucaccagcaagaa

SEQ ID NO: 1011997 - RNA, 21 nt, Human
caggagaaaaugcuuccccuu

SEQ ID NO: 1011998 - RNA, 28 nt, Human
cauccugcgccucccaagcacgccccca

SEQ ID NO: 1011999 - RNA, 22 nt, Human
caucuuccuuucccaccaggaa

SEQ ID NO: 1012000 - RNA, 18 nt, Human
ccaaggaagggacccaau

SEQ ID NO: 1012001 - RNA, 26 nt, Human
ccacccccucgaaagcccuuucccaa

SEQ ID NO: 1012002 - RNA, 23 nt, Human
ccagcucacaccccgaagaaccu

SEQ ID NO: 1012003 - RNA, 19 nt, Human
ccagggcacuccauccagc

SEQ ID NO: 1012004 - RNA, 19 nt, Human
ccauccugcgccucccaag

SEQ ID NO: 1012005 - RNA, 22 nt, Human
cccaaggaagggacccaauaac

SEQ ID NO: 1012006 - RNA, 24 nt, Human
cccacagauguggaggggcaggcc

SEQ ID NO: 1012007 - RNA, 26 nt, Human
cccccacccccucgaaagcccuuucc

SEQ ID NO: 1012008 - RNA, 19 nt, Human
cccccucgaaagcccuuuc

SEQ ID NO: 1012009 - RNA, 25 nt, Human
cccccucgaaagcccuuucccaaca

SEQ ID NO: 1012010 - RNA, 19 nt, Human
ccuugagccgagccaacuc

SEQ ID NO: 1012011 - RNA, 24 nt, Human
cgaaagcccuuucccaacaacuca

SEQ ID NO: 1012012 - RNA, 21 nt, Human
cgccagggcacuccauccagc

SEQ ID NO: 1012013 - RNA, 19 nt, Human
cugcaggcaacacuuuugc

SEQ ID NO: 1012014 - RNA, 21 nt, Human
cugcggugagggcccaggguc

SEQ ID NO: 1012015 - RNA, 19 nt, Human
cuggcggcucuccacgccg

SEQ ID NO: 1012016 - RNA, 21 nt, Human
cuuccaacagguccucaugcc

SEQ ID NO: 1012017 - RNA, 21 nt, Human
cuuucccaacaacucauacac

SEQ ID NO: 1012018 - RNA, 23 nt, Human
gagaaucgcuugaacccaggagg

SEQ ID NO: 1012019 - RNA, 21 nt, Human
gaggcagagguugcggugagc

SEQ ID NO: 1012020 - RNA, 21 nt, Human
gccaccccuucauaaucccag

SEQ ID NO: 1012021 - RNA, 21 nt, Human
gcccccacccccucgaaagcc

SEQ ID NO: 1012022 - RNA, 22 nt, Human
gcccggagccucugcuaugugc

SEQ ID NO: 1012023 - RNA, 22 nt, Human
gcugcagcuucuucgcacugag

SEQ ID NO: 1012024 - RNA, 21 nt, Human
gcugggugugcguucuggugc

SEQ ID NO: 1012025 - RNA, 19 nt, Human
guugcggugagccgagauc

SEQ ID NO: 1012026 - RNA, 20 nt, Human
uagagcccuggcggcucucc

SEQ ID NO: 1012027 - RNA, 19 nt, Human
uagcacccuuggccaggug

SEQ ID NO: 1012028 - RNA, 28 nt, Human
uaggagaaaccuugucucuccucggaag

SEQ ID NO: 1012029 - RNA, 18 nt, Human
uaucccacagauguggag

SEQ ID NO: 1012030 - RNA, 23 nt, Human
ucaaaacccaaacugcuuccugc

SEQ ID NO: 1012031 - RNA, 19 nt, Human
ucccacuuccaacaggucc

SEQ ID NO: 1012032 - RNA, 24 nt, Human
ucuuucucuuuggggcugggcugg

SEQ ID NO: 1012033 - RNA, 20 nt, Human
ugaagcaggagaaucgcuug

SEQ ID NO: 1012034 - RNA, 24 nt, Human
ugaagcaggagaaucgcuugaacc

SEQ ID NO: 1012035 - RNA, 22 nt, Human
ugagccgagaucgcgccagggc

SEQ ID NO: 1012036 - RNA, 22 nt, Human
ugagccgagccaacucaacacc

SEQ ID NO: 1012037 - RNA, 23 nt, Human
uggaaguugcuggaguacaccag

SEQ ID NO: 1012038 - RNA, 20 nt, Human
ugggaggcuggaccaggccu

SEQ ID NO: 1012039 - RNA, 21 nt, Human
uucgcacugaggaggccggcg

SEQ ID NO: 1012040 - RNA, 18 nt, Human
uugcggugagccgagauc

SEQ ID NO: 1012041 - RNA, 19 nt, Human
uugcggugagccgagaucg

SEQ ID NO: 1012042 - RNA, 22 nt, Human
uugcggugagccgagaucgcgc

SEQ ID NO: 1012043 - RNA, 19 nt, Human
aaagugcuggaauuacagg

SEQ ID NO: 1012044 - RNA, 24 nt, Human
aaagugcuggaauuacaggcauga

SEQ ID NO: 1012045 - RNA, 21 nt, Human
aaccucgugcccacacagugc

SEQ ID NO: 1012046 - RNA, 26 nt, Human
aagugcuggaauuacaggcaugagcc

SEQ ID NO: 1012047 - RNA, 21 nt, Human
aauuacaggcaugagccacca

SEQ ID NO: 1012048 - RNA, 18 nt, Human
acaggguuucaccauguu

SEQ ID NO: 1012049 - RNA, 23 nt, Human
acaggguuucaccauguuggcca

SEQ ID NO: 1012050 - RNA, 24 nt, Human
acaggguuucaccauguuggccag

SEQ ID NO: 1012051 - RNA, 18 nt, Human
accauguuggccaggcug

SEQ ID NO: 1012052 - RNA, 18 nt, Human
acgacgcagggcaccagg

SEQ ID NO: 1012053 - RNA, 21 nt, Human
acgccaggcuaauuuuuguau

SEQ ID NO: 1012054 - RNA, 22 nt, Human
acuccuggccucaagucaucuu

SEQ ID NO: 1012055 - RNA, 18 nt, Human
agccuccagaguagcugg

SEQ ID NO: 1012056 - RNA, 27 nt, Human
agccugggguuuugugccuccuuuuug

SEQ ID NO: 1012057 - RNA, 18 nt, Human
aggaaagcggaagcggcc

SEQ ID NO: 1012058 - RNA, 23 nt, Human
aggguucaagugauucuccugcc

SEQ ID NO: 1012059 - RNA, 19 nt, Human
agguugcaaagugggagac

SEQ ID NO: 1012060 - RNA, 18 nt, Human
aguagcugggauuacagg

SEQ ID NO: 1012061 - RNA, 24 nt, Human
agugauucuccugccucagccucc

SEQ ID NO: 1012062 - RNA, 19 nt, Human
aguguaguggugugaucuc

SEQ ID NO: 1012063 - RNA, 20 nt, Human
aguguaguggugugaucucg

SEQ ID NO: 1012064 - RNA, 24 nt, Human
aguguaguggugugaucucggcuc

SEQ ID NO: 1012065 - RNA, 21 nt, Human
auguggagcaggcugcagaga

SEQ ID NO: 1012066 - RNA, 24 nt, Human
auuuuuguauuuuuaguagagaca

SEQ ID NO: 1012067 - RNA, 24 nt, Human
caaagugcuggaauuacaggcaug

SEQ ID NO: 1012068 - RNA, 24 nt, Human
caacuccuggccucaagucauccu

SEQ ID NO: 1012069 - RNA, 22 nt, Human
caagugauucuccugccucagc

SEQ ID NO: 1012070 - RNA, 27 nt, Human
caagugauucuccugccucagccucca

SEQ ID NO: 1012071 - RNA, 24 nt, Human
caccacgccaggcuaauuuuugua

SEQ ID NO: 1012072 - RNA, 21 nt, Human
caccaggcccagcuggggcag

SEQ ID NO: 1012073 - RNA, 21 nt, Human
caccauguuggccaggcuggu

SEQ ID NO: 1012074 - RNA, 24 nt, Human
caccauguuggccaggcuggucuc

SEQ ID NO: 1012075 - RNA, 27 nt, Human
caccauguuggccaggcuggucuccaa

SEQ ID NO: 1012076 - RNA, 22 nt, Human
cagagacuugaagccugggguu

SEQ ID NO: 1012077 - RNA, 24 nt, Human
cagaguagcugggauuacaggugu

SEQ ID NO: 1012078 - RNA, 24 nt, Human
caggguuucaccauguuggccagg

SEQ ID NO: 1012079 - RNA, 24 nt, Human
cauguuggccaggcuggucuccaa

SEQ ID NO: 1012080 - RNA, 19 nt, Human
ccaaagugcuggaauuaca

SEQ ID NO: 1012081 - RNA, 24 nt, Human
ccaaagugcuggaauuacaggcau

SEQ ID NO: 1012082 - RNA, 23 nt, Human
ccaccacgcccggccaucuucuu

SEQ ID NO: 1012083 - RNA, 19 nt, Human
ccaccagcucuggcugugg

SEQ ID NO: 1012084 - RNA, 22 nt, Human
ccacugggcugauaucuacagc

SEQ ID NO: 1012085 - RNA, 19 nt, Human
ccagaguagcugggauuac

SEQ ID NO: 1012086 - RNA, 22 nt, Human
ccagaguagcugggauuacagg

SEQ ID NO: 1012087 - RNA, 22 nt, Human
ccagaguagcugggauuacagg

SEQ ID NO: 1012088 - RNA, 24 nt, Human
ccagaguagcugggauuacaggug

SEQ ID NO: 1012089 - RNA, 25 nt, Human
ccagaguagcugggauuacaggugu

SEQ ID NO: 1012090 - RNA, 20 nt, Human
ccaggcuggucuccaacucc

SEQ ID NO: 1012091 - RNA, 20 nt, Human
ccaggguucaagugauucuc

SEQ ID NO: 1012092 - RNA, 23 nt, Human
ccaggguucaagugauucuccug

SEQ ID NO: 1012093 - RNA, 21 nt, Human
ccccucggccgccgcugcugc

SEQ ID NO: 1012094 - RNA, 20 nt, Human
ccccuguaaaaccucgugcc

SEQ ID NO: 1012095 - RNA, 21 nt, Human
ccccuguaaaaccucgugccc

SEQ ID NO: 1012096 - RNA, 20 nt, Human
ccgaagagcccgugcaaaaa

SEQ ID NO: 1012097 - RNA, 24 nt, Human
ccgccuuagccucccaaagugcug

SEQ ID NO: 1012098 - RNA, 19 nt, Human
ccuaggcuggaguguagug

SEQ ID NO: 1012099 - RNA, 24 nt, Human
ccuccaggguucaagugauucucc

SEQ ID NO: 1012100 - RNA, 24 nt, Human
ccugccucagccuccagaguagcu

SEQ ID NO: 1012101 - RNA, 19 nt, Human
ccuguaaaaccucgugccc

SEQ ID NO: 1012102 - RNA, 24 nt, Human
cgaagcuagggccgugggggccga

SEQ ID NO: 1012103 - RNA, 23 nt, Human
cgacgacgcagggcaccaggccc

SEQ ID NO: 1012104 - RNA, 21 nt, Human
cgcccccucggccgccgcugc

SEQ ID NO: 1012105 - RNA, 24 nt, Human
cgccuuagccucccaaagugcugg

SEQ ID NO: 1012106 - RNA, 21 nt, Human
cgcgggagccuccaggcucgg

SEQ ID NO: 1012107 - RNA, 23 nt, Human
cucagccuccagaguagcuggga

SEQ ID NO: 1012108 - RNA, 24 nt, Human
cucauugcaaccucugccuccagg

SEQ ID NO: 1012109 - RNA, 19 nt, Human
cuccaggguucaagugauu

SEQ ID NO: 1012110 - RNA, 22 nt, Human
cucggcucggcgcccccucggc

SEQ ID NO: 1012111 - RNA, 21 nt, Human
cugaacuuggucauccaacga

SEQ ID NO: 1012112 - RNA, 21 nt, Human
cugcagagacuugaagccugg

SEQ ID NO: 1012113 - RNA, 21 nt, Human
cugcagggcccucaggguaua

SEQ ID NO: 1012114 - RNA, 24 nt, Human
cugcugcugcugggugcgacaggc

SEQ ID NO: 1012115 - RNA, 18 nt, Human
cugggcugugggggcugu

SEQ ID NO: 1012116 - RNA, 18 nt, Human
cuggucuccaacuccugg

SEQ ID NO: 1012117 - RNA, 18 nt, Human
cugugcuuuccacugggc

SEQ ID NO: 1012118 - RNA, 19 nt, Human
cugugggggcugucaccgu

SEQ ID NO: 1012119 - RNA, 19 nt, Human
cuucugugcccaaaugugg

SEQ ID NO: 1012120 - RNA, 24 nt, Human
cuugcucuguugccuaggcuggag

SEQ ID NO: 1012121 - RNA, 19 nt, Human
gaauuacaggcaugagcca

SEQ ID NO: 1012122 - RNA, 18 nt, Human
gagcaggcugcagagacu

SEQ ID NO: 1012123 - RNA, 24 nt, Human
gaguagcugggauuacaggugugc

SEQ ID NO: 1012124 - RNA, 24 nt, Human
gccuaggcuggaguguaguggugu

SEQ ID NO: 1012125 - RNA, 19 nt, Human
gccugaggucugaccaccc

SEQ ID NO: 1012126 - RNA, 23 nt, Human
gccugucugcugggccaagaucu

SEQ ID NO: 1012127 - RNA, 23 nt, Human
gcuggucuccaacuccuggccuc

SEQ ID NO: 1012128 - RNA, 19 nt, Human
ggaaagcggaagcggccuc

SEQ ID NO: 1012129 - RNA, 22 nt, Human
ggcuggaguguaguggugugau

SEQ ID NO: 1012130 - RNA, 24 nt, Human
ggcuggucuccaacuccuggccuc

SEQ ID NO: 1012131 - RNA, 24 nt, Human
gggcggcucacccucuguagugcc

SEQ ID NO: 1012132 - RNA, 22 nt, Human
gggcugugggggcugucaccgu

SEQ ID NO: 1012133 - RNA, 23 nt, Human
ggguucaagugauucuccugccu

SEQ ID NO: 1012134 - RNA, 22 nt, Human
ggguuucaccauguuggccagg

SEQ ID NO: 1012135 - RNA, 25 nt, Human
gguccagcggagcaugcuugcaagc

SEQ ID NO: 1012136 - RNA, 18 nt, Human
guagcugggauuacaggu

SEQ ID NO: 1012137 - RNA, 24 nt, Human
gucauccucccgccuuagccuccc

SEQ ID NO: 1012138 - RNA, 27 nt, Human
gucccagguugccugcagggcccucag

SEQ ID NO: 1012139 - RNA, 19 nt, Human
gucuuaggcagacauaggg

SEQ ID NO: 1012140 - RNA, 21 nt, Human
gugauucuccugccucagccu

SEQ ID NO: 1012141 - RNA, 26 nt, Human
guggagcaggcugcagagacuugaag

SEQ ID NO: 1012142 - RNA, 24 nt, Human
uaauuuuuguauuuuuaguagaga

SEQ ID NO: 1012143 - RNA, 23 nt, Human
uacaggcaugagccaccacgccc

SEQ ID NO: 1012144 - RNA, 22 nt, Human
uagagacaggguuucaccaugu

SEQ ID NO: 1012145 - RNA, 24 nt, Human
uaguagagacaggguuucaccaug

SEQ ID NO: 1012146 - RNA, 26 nt, Human
uaguagagacaggguuucaccauguu

SEQ ID NO: 1012147 - RNA, 25 nt, Human
ucaagucauccucccgccuuagccu

SEQ ID NO: 1012148 - RNA, 19 nt, Human
ucaagugauucuccugccu

SEQ ID NO: 1012149 - RNA, 23 nt, Human
ucauugcaaccucugccuccagg

SEQ ID NO: 1012150 - RNA, 24 nt, Human
ucauugcaaccucugccuccaggg

SEQ ID NO: 1012151 - RNA, 24 nt, Human
uccagaguagcugggauuacaggu

SEQ ID NO: 1012152 - RNA, 24 nt, Human
uccaggguucaagugauucuccug

SEQ ID NO: 1012153 - RNA, 24 nt, Human
ucccaaagugcuggaauuacaggc

SEQ ID NO: 1012154 - RNA, 27 nt, Human
uccucccgccuuagccucccaaagugc

SEQ ID NO: 1012155 - RNA, 20 nt, Human
ucggccgccgcugcugcugc

SEQ ID NO: 1012156 - RNA, 30 nt, Human
ucggcgcccccucggccgccgcugcugcug

SEQ ID NO: 1012157 - RNA, 24 nt, Human
ucuccugccucagccuccagagua

SEQ ID NO: 1012158 - RNA, 24 nt, Human
ucugccuccaggguucaagugauu

SEQ ID NO: 1012159 - RNA, 24 nt, Human
ucuguugccuaggcuggaguguag

SEQ ID NO: 1012160 - RNA, 20 nt, Human
ucuugcucuguugccuaggc

SEQ ID NO: 1012161 - RNA, 23 nt, Human
ucuugcucuguugccuaggcugg

SEQ ID NO: 1012162 - RNA, 24 nt, Human
ucuugcucuguugccuaggcugga

SEQ ID NO: 1012163 - RNA, 19 nt, Human
ugaccaccccuguaaaacc

SEQ ID NO: 1012164 - RNA, 18 nt, Human
ugagacagagucuugcuc

SEQ ID NO: 1012165 - RNA, 22 nt, Human
ugagacagagucuugcucuguu

SEQ ID NO: 1012166 - RNA, 20 nt, Human
ugauucuccugccucagccu

SEQ ID NO: 1012167 - RNA, 18 nt, Human
ugcaaaaagacgacggcc

SEQ ID NO: 1012168 - RNA, 20 nt, Human
ugcaaccucugccuccaggg

SEQ ID NO: 1012169 - RNA, 18 nt, Human
ugccagcagcauggcugu

SEQ ID NO: 1012170 - RNA, 20 nt, Human
ugccuaggcuggaguguagu

SEQ ID NO: 1012171 - RNA, 24 nt, Human
ugccuaggcuggaguguaguggug

SEQ ID NO: 1012172 - RNA, 24 nt, Human
ugccucagccuccagaguagcugg

SEQ ID NO: 1012173 - RNA, 20 nt, Human
ugcugggccaagaucuuggc

SEQ ID NO: 1012174 - RNA, 24 nt, Human
ugcugggugcgacaggcacccucg

SEQ ID NO: 1012175 - RNA, 18 nt, Human
uggaauuacaggcaugag

SEQ ID NO: 1012176 - RNA, 22 nt, Human
uggaauuacaggcaugagccac

SEQ ID NO: 1012177 - RNA, 24 nt, Human
uggaauuacaggcaugagccacca

SEQ ID NO: 1012178 - RNA, 24 nt, Human
uggaauuacaggcaugagccacca

SEQ ID NO: 1012179 - RNA, 24 nt, Human
uggaguguaguggugugaucucgg

SEQ ID NO: 1012180 - RNA, 24 nt, Human
uggccaggcuggucuccaacuccu

SEQ ID NO: 1012181 - RNA, 20 nt, Human
uggccucaagucauccuccc

SEQ ID NO: 1012182 - RNA, 24 nt, Human
uggccucaagucauccucccgccu

SEQ ID NO: 1012183 - RNA, 21 nt, Human
ugggauuacaggugugcacca

SEQ ID NO: 1012184 - RNA, 22 nt, Human
ugggauuacaggugugcaccac

SEQ ID NO: 1012185 - RNA, 24 nt, Human
ugggauuacaggugugcaccacca

SEQ ID NO: 1012186 - RNA, 25 nt, Human
ugggauuacaggugugcaccaccac

SEQ ID NO: 1012187 - RNA, 18 nt, Human
ugggguuuugugccuccu

SEQ ID NO: 1012188 - RNA, 24 nt, Human
ugggguuuugugccuccuuuuugu

SEQ ID NO: 1012189 - RNA, 20 nt, Human
ugucugggcugugggggcug

SEQ ID NO: 1012190 - RNA, 24 nt, Human
ugugcaccaccacgccaggcuaau

SEQ ID NO: 1012191 - RNA, 19 nt, Human
uguugccuaggcuggagug

SEQ ID NO: 1012192 - RNA, 24 nt, Human
uuaguagagacaggguuucaccau

SEQ ID NO: 1012193 - RNA, 21 nt, Human
uucaagugauucuccugccuc

SEQ ID NO: 1012194 - RNA, 23 nt, Human
uucaagugauucuccugccucag

SEQ ID NO: 1012195 - RNA, 24 nt, Human
uucaagugauucuccugccucagc

SEQ ID NO: 1012196 - RNA, 19 nt, Human
uugcaaccucugccuccag

SEQ ID NO: 1012197 - RNA, 24 nt, Human
uugcaaccucugccuccaggguuc

SEQ ID NO: 1012198 - RNA, 24 nt, Human
uugccuaggcuggaguguaguggu

SEQ ID NO: 1012199 - RNA, 24 nt, Human
uugcucuguugccuaggcuggagu

SEQ ID NO: 1012200 - RNA, 20 nt, Human
uuguuuuuuuugagacagag

SEQ ID NO: 1012201 - RNA, 24 nt, Human
uuucaccauguuggccaggcuggu

SEQ ID NO: 1012202 - RNA, 24 nt, Human
uuuuuaguagagacaggguuucac

SEQ ID NO: 1012203 - RNA, 20 nt, Human
uuuuuguauuuuuaguagag

SEQ ID NO: 1012204 - RNA, 25 nt, Human
aaaugauccucccaccucagccucc

SEQ ID NO: 1012205 - RNA, 18 nt, Human
aacaaagcaacuccccuc

SEQ ID NO: 1012206 - RNA, 24 nt, Human
aagccugccuuuguggccuggguu

SEQ ID NO: 1012207 - RNA, 22 nt, Human
aaggcaucccaccccaccuccg

SEQ ID NO: 1012208 - RNA, 18 nt, Human
aaggcccagaaaacaagc

SEQ ID NO: 1012209 - RNA, 20 nt, Human
aaggugcugggauuacaggu

SEQ ID NO: 1012210 - RNA, 24 nt, Human
aaggugcugggauuacagguguga

SEQ ID NO: 1012211 - RNA, 20 nt, Human
aagugccuuuccagaaccgc

SEQ ID NO: 1012212 - RNA, 19 nt, Human
acagaacaaagcaacuccc

SEQ ID NO: 1012213 - RNA, 21 nt, Human
accaagagaaggcaucccacc

SEQ ID NO: 1012214 - RNA, 27 nt, Human
accucccuccccuccuucagaagccag

SEQ ID NO: 1012215 - RNA, 20 nt, Human
accuccgcagaugccacccc

SEQ ID NO: 1012216 - RNA, 18 nt, Human
agaaaacaagcagaggua

SEQ ID NO: 1012217 - RNA, 19 nt, Human
agaaaacaagcagagguag

SEQ ID NO: 1012218 - RNA, 20 nt, Human
agacagcuucaccucccucc

SEQ ID NO: 1012219 - RNA, 23 nt, Human
agagaaaaguacaggcuagaauc

SEQ ID NO: 1012220 - RNA, 20 nt, Human
agcagacagcuucaccuccc

SEQ ID NO: 1012221 - RNA, 22 nt, Human
agcagacagcuucaccucccuc

SEQ ID NO: 1012222 - RNA, 21 nt, Human
agccaccacgcccggcccaga

SEQ ID NO: 1012223 - RNA, 23 nt, Human
aggcaggucucaaacuccuggcc

SEQ ID NO: 1012224 - RNA, 20 nt, Human
agggacccagcuccccacuc

SEQ ID NO: 1012225 - RNA, 26 nt, Human
aggugcugggauuacaggugugagcc

SEQ ID NO: 1012226 - RNA, 20 nt, Human
aucccaccccaccuccgcag

SEQ ID NO: 1012227 - RNA, 27 nt, Human
caaaugauccucccaccucagccuccc

SEQ ID NO: 1012228 - RNA, 24 nt, Human
caaggugcugggauuacaggugug

SEQ ID NO: 1012229 - RNA, 24 nt, Human
caagugccuuuccagaaccgcgug

SEQ ID NO: 1012230 - RNA, 24 nt, Human
caccucagccucccaaggugcugg

SEQ ID NO: 1012231 - RNA, 21 nt, Human
cagaacaaagcaacuccccuc

SEQ ID NO: 1012232 - RNA, 18 nt, Human
cagaggcaagugccuuuc

SEQ ID NO: 1012233 - RNA, 25 nt, Human
cagcuccaacugaggaaagaaaggc

SEQ ID NO: 1012234 - RNA, 20 nt, Human
cagcugaacaauauagaaaa

SEQ ID NO: 1012235 - RNA, 19 nt, Human
caucccaccccaccuccgc

SEQ ID NO: 1012236 - RNA, 19 nt, Human
cauggcccacaccucccuc

SEQ ID NO: 1012237 - RNA, 27 nt, Human
cauuauguugcccaggcaggucucaaa

SEQ ID NO: 1012238 - RNA, 22 nt, Human
cauucauguuauuagucaggaa

SEQ ID NO: 1012239 - RNA, 21 nt, Human
ccaaggugcugggauuacagg

SEQ ID NO: 1012240 - RNA, 21 nt, Human
ccaaggugcugggauuacagg

SEQ ID NO: 1012241 - RNA, 24 nt, Human
ccaaggugcugggauuacaggugu

SEQ ID NO: 1012242 - RNA, 22 nt, Human
cccuggguucaacuucauccug

SEQ ID NO: 1012243 - RNA, 25 nt, Human
ccgacucuuccucaccauuccccgc

SEQ ID NO: 1012244 - RNA, 24 nt, Human
ccuggccucaaaugauccucccac

SEQ ID NO: 1012245 - RNA, 22 nt, Human
cgcagaugccacccccuuagga

SEQ ID NO: 1012246 - RNA, 23 nt, Human
cggccgguguacugggugucagg

SEQ ID NO: 1012247 - RNA, 21 nt, Human
cggugcccucucacccuuccu

SEQ ID NO: 1012248 - RNA, 24 nt, Human
cucaaaugauccucccaccucagc

SEQ ID NO: 1012249 - RNA, 23 nt, Human
cuccagcacccaugcccgacucu

SEQ ID NO: 1012250 - RNA, 27 nt, Human
cuccuggccucaaaugauccucccacc

SEQ ID NO: 1012251 - RNA, 19 nt, Human
cucuuccucaccauucccc

SEQ ID NO: 1012252 - RNA, 20 nt, Human
cugugccgcuccuucuucuc

SEQ ID NO: 1012253 - RNA, 21 nt, Human
cuucagaagccagucugcucc

SEQ ID NO: 1012254 - RNA, 20 nt, Human
gaaggcccagaaaacaagca

SEQ ID NO: 1012255 - RNA, 18 nt, Human
gauuacaggugugagcca

SEQ ID NO: 1012256 - RNA, 21 nt, Human
gauuacaggugugagccacca

SEQ ID NO: 1012257 - RNA, 22 nt, Human
gauuacaggugugagccaccac

SEQ ID NO: 1012258 - RNA, 22 nt, Human
gcagaaaacauuuuuauaacuu

SEQ ID NO: 1012259 - RNA, 24 nt, Human
gcuucaccucccuccccuccuuca

SEQ ID NO: 1012260 - RNA, 22 nt, Human
ggaaaggaaguuucauuauguu

SEQ ID NO: 1012261 - RNA, 24 nt, Human
ggaaguuucauuauguugcccagg

SEQ ID NO: 1012262 - RNA, 26 nt, Human
ggagaagccugccuuuguggccuggg

SEQ ID NO: 1012263 - RNA, 20 nt, Human
ggucucaaacuccuggccuc

SEQ ID NO: 1012264 - RNA, 21 nt, Human
gugcugggauuacagguguga

SEQ ID NO: 1012265 - RNA, 23 nt, Human
uacagaacaaagcaacuccccuc

SEQ ID NO: 1012266 - RNA, 23 nt, Human
uacaggugugagccaccacgccc

SEQ ID NO: 1012267 - RNA, 25 nt, Human
uaccaagagaaggcaucccacccca

SEQ ID NO: 1012268 - RNA, 24 nt, Human
uauguugcccaggcaggucucaaa

SEQ ID NO: 1012269 - RNA, 19 nt, Human
ucaacaucuacauccuacu

SEQ ID NO: 1012270 - RNA, 24 nt, Human
ucaacuucauccugauuuucacuc

SEQ ID NO: 1012271 - RNA, 18 nt, Human
uccagaaccgcgugguga

SEQ ID NO: 1012272 - RNA, 23 nt, Human
ucccaaggugcugggauuacagg

SEQ ID NO: 1012273 - RNA, 20 nt, Human
ucccaccccaccuccgcaga

SEQ ID NO: 1012274 - RNA, 20 nt, Human
uccgcagaugccacccccuu

SEQ ID NO: 1012275 - RNA, 27 nt, Human
uccucccaccucagccucccaaggugc

SEQ ID NO: 1012276 - RNA, 24 nt, Human
ucuaccaagagaaggcaucccacc

SEQ ID NO: 1012277 - RNA, 23 nt, Human
ucuccagcacccaugcccgacuc

SEQ ID NO: 1012278 - RNA, 21 nt, Human
ugcccucucacccuuccuaaa

SEQ ID NO: 1012279 - RNA, 20 nt, Human
ugcuccaggacaaauccugc

SEQ ID NO: 1012280 - RNA, 24 nt, Human
ugcugggauuacaggugugagcca

SEQ ID NO: 1012281 - RNA, 18 nt, Human
uggccucaaaugauccuc

SEQ ID NO: 1012282 - RNA, 21 nt, Human
ugggagaacuuaaggucgcug

SEQ ID NO: 1012283 - RNA, 18 nt, Human
ugggauuacaggugugag

SEQ ID NO: 1012284 - RNA, 19 nt, Human
ugggauuacaggugugagc

SEQ ID NO: 1012285 - RNA, 22 nt, Human
ugggauuacaggugugagccac

SEQ ID NO: 1012286 - RNA, 23 nt, Human
ugggauuacaggugugagccacc

SEQ ID NO: 1012287 - RNA, 24 nt, Human
ugggauuacaggugugagccacca

SEQ ID NO: 1012288 - RNA, 21 nt, Human
ugucaucuaccaagagaaggc

SEQ ID NO: 1012289 - RNA, 22 nt, Human
ugucaucuaccaagagaaggca

SEQ ID NO: 1012290 - RNA, 22 nt, Human
ugugagccaccacgcccggccc

SEQ ID NO: 1012291 - RNA, 22 nt, Human
ugugaucagcuccaacugagga

SEQ ID NO: 1012292 - RNA, 22 nt, Human
uucaacaucuacauccuacucc

SEQ ID NO: 1012293 - RNA, 19 nt, Human
uuccccgccucgacauccu

SEQ ID NO: 1012294 - RNA, 18 nt, Human
uugcccaggcaggucuca

SEQ ID NO: 1012295 - RNA, 19 nt, Human
uuggaauccagagucauuc

SEQ ID NO: 1012296 - RNA, 20 nt, Human
uuggugaacacagacucccu

SEQ ID NO: 1012297 - RNA, 23 nt, Human
uuggugaacacagacucccuggg

SEQ ID NO: 1012298 - RNA, 24 nt, Human
uuguggccuggguugugaucagcu

SEQ ID NO: 1012299 - RNA, 18 nt, Human
uuuuuuuuuuucucccug

SEQ ID NO: 1012300 - RNA, 21 nt, Human
aaaacaggagucauugucagc

SEQ ID NO: 1012301 - RNA, 24 nt, Human
aaacuggcuuccuuucugaggccu

SEQ ID NO: 1012302 - RNA, 24 nt, Human
aaagugcugggauuacaggcguga

SEQ ID NO: 1012303 - RNA, 19 nt, Human
aacauggugaaaccccguc

SEQ ID NO: 1012304 - RNA, 20 nt, Human
aacauggugaaaccccgucu

SEQ ID NO: 1012305 - RNA, 21 nt, Human
aacauggugaaaccccgucuc

SEQ ID NO: 1012306 - RNA, 24 nt, Human
aacuggcuuccuuucugaggccug

SEQ ID NO: 1012307 - RNA, 22 nt, Human
aagcaggagagacuuugcagga

SEQ ID NO: 1012308 - RNA, 20 nt, Human
aaguagcugggacuauaggc

SEQ ID NO: 1012309 - RNA, 22 nt, Human
aaguagcugggacuauaggcau

SEQ ID NO: 1012310 - RNA, 19 nt, Human
aagugcuaggauuacaagu

SEQ ID NO: 1012311 - RNA, 19 nt, Human
aagugcugggauuacaggc

SEQ ID NO: 1012312 - RNA, 19 nt, Human
aagugcugggauuacaggc

SEQ ID NO: 1012313 - RNA, 23 nt, Human
aaucauagcucacugcagacuug

SEQ ID NO: 1012314 - RNA, 18 nt, Human
aauugcuugaaccugaga

SEQ ID NO: 1012315 - RNA, 24 nt, Human
aauugcuugaaccugagaggcgga

SEQ ID NO: 1012316 - RNA, 18 nt, Human
acagacaagagccacugu

SEQ ID NO: 1012317 - RNA, 18 nt, Human
acagacgugcaccaccau

SEQ ID NO: 1012318 - RNA, 21 nt, Human
accaaugccagcuaaguuuua

SEQ ID NO: 1012319 - RNA, 24 nt, Human
accauguuggccaggcuggucucg

SEQ ID NO: 1012320 - RNA, 19 nt, Human
acccaggcuggagugcagu

SEQ ID NO: 1012321 - RNA, 23 nt, Human
acccaggcuggagugcaguggug

SEQ ID NO: 1012322 - RNA, 24 nt, Human
accccgucucuacuaaaaauacaa

SEQ ID NO: 1012323 - RNA, 24 nt, Human
accugaggucaggaguuugagacc

SEQ ID NO: 1012324 - RNA, 18 nt, Human
acgugcaccaccaugccc

SEQ ID NO: 1012325 - RNA, 19 nt, Human
acuacaggugcauaccacc

SEQ ID NO: 1012326 - RNA, 19 nt, Human
acuauauugcccagguugg

SEQ ID NO: 1012327 - RNA, 19 nt, Human
acugcagccuccaauuccu

SEQ ID NO: 1012328 - RNA, 23 nt, Human
acuugaacuccuggguucaagcg

SEQ ID NO: 1012329 - RNA, 25 nt, Human
acuuugucgcccaggcuggagugca

SEQ ID NO: 1012330 - RNA, 18 nt, Human
agacagggucuuacugug

SEQ ID NO: 1012331 - RNA, 19 nt, Human
agagaauguauuggaggag

SEQ ID NO: 1012332 - RNA, 22 nt, Human
agagauagggucuggcucuguc

SEQ ID NO: 1012333 - RNA, 19 nt, Human
agauagggucuggcucugu

SEQ ID NO: 1012334 - RNA, 23 nt, Human
agccaggugugguggugcaugcc

SEQ ID NO: 1012335 - RNA, 21 nt, Human
agcccauuucccaccagcacc

SEQ ID NO: 1012336 - RNA, 23 nt, Human
agccgggcgugguggcucaagcc

SEQ ID NO: 1012337 - RNA, 22 nt, Human
agccuggccaacauggugaaac

SEQ ID NO: 1012338 - RNA, 24 nt, Human
agccuggccaacauggugaaaccc

SEQ ID NO: 1012339 - RNA, 24 nt, Human
agcgauucuucugccucagccucc

SEQ ID NO: 1012340 - RNA, 24 nt, Human
agcgcugggauuacagacaagagc

SEQ ID NO: 1012341 - RNA, 23 nt, Human
aggagagagagcagugagcuagg

SEQ ID NO: 1012342 - RNA, 20 nt, Human
aggaguuugagaccagccug

SEQ ID NO: 1012343 - RNA, 22 nt, Human
aggcaggagaauugcuugaacc

SEQ ID NO: 1012344 - RNA, 24 nt, Human
aggcaggagaauugcuugaaccug

SEQ ID NO: 1012345 - RNA, 18 nt, Human
aggcagguggaucaccug

SEQ ID NO: 1012346 - RNA, 22 nt, Human
aggcagguggaucaccugaggu

SEQ ID NO: 1012347 - RNA, 26 nt, Human
aggcagguggaucaccugaggucagg

SEQ ID NO: 1012348 - RNA, 19 nt, Human
aggcggaggcaggagaauu

SEQ ID NO: 1012349 - RNA, 24 nt, Human
aggcggaggcaggagaauugcuug

SEQ ID NO: 1012350 - RNA, 20 nt, Human
aggcuggagguggagguggg

SEQ ID NO: 1012351 - RNA, 23 nt, Human
aggcuggagguggagguggggac

SEQ ID NO: 1012352 - RNA, 18 nt, Human
aggcuggagugcaguggc

SEQ ID NO: 1012353 - RNA, 25 nt, Human
aggcuggagugcaguggcgcgaucu

SEQ ID NO: 1012354 - RNA, 25 nt, Human
aggcuggagugcaguggugcgaucu

SEQ ID NO: 1012355 - RNA, 24 nt, Human
agggauucuccucccucagccucc

SEQ ID NO: 1012356 - RNA, 24 nt, Human
aggugauccaccugccucagccuc

SEQ ID NO: 1012357 - RNA, 22 nt, Human
aggugcacggccuucagugcug

SEQ ID NO: 1012358 - RNA, 22 nt, Human
agguggaucaccugaggucagg

SEQ ID NO: 1012359 - RNA, 24 nt, Human
aggugugguggugcaugccuguaa

SEQ ID NO: 1012360 - RNA, 22 nt, Human
aguagagaugggguuucaccau

SEQ ID NO: 1012361 - RNA, 19 nt, Human
aguagcugggacuacagac

SEQ ID NO: 1012362 - RNA, 23 nt, Human
aguagcugggacuauaggcaugc

SEQ ID NO: 1012363 - RNA, 23 nt, Human
aguagcugggauuacaggcgugu

SEQ ID NO: 1012364 - RNA, 25 nt, Human
agugauccuccuccgucagccuccu

SEQ ID NO: 1012365 - RNA, 19 nt, Human
agugcaguggcgcgaucuc

SEQ ID NO: 1012366 - RNA, 21 nt, Human
agugcaguggcgcgaucucag

SEQ ID NO: 1012367 - RNA, 21 nt, Human
agugcaguggcgugaucauag

SEQ ID NO: 1012368 - RNA, 23 nt, Human
agugcaguggcgugaucauagcu

SEQ ID NO: 1012369 - RNA, 24 nt, Human
agugcaguggcgugaucauagcuc

SEQ ID NO: 1012370 - RNA, 21 nt, Human
agugcaguggugcaaucauag

SEQ ID NO: 1012371 - RNA, 23 nt, Human
agugcaguggugcaaucauagcu

SEQ ID NO: 1012372 - RNA, 24 nt, Human
agugcaguggugcaaucauagcuc

SEQ ID NO: 1012373 - RNA, 23 nt, Human
agugcaguggugcgaucuuggcu

SEQ ID NO: 1012374 - RNA, 24 nt, Human
agugcaguggugcgaucuuggcuc

SEQ ID NO: 1012375 - RNA, 18 nt, Human
agugcugggauuacaggc

SEQ ID NO: 1012376 - RNA, 24 nt, Human
auagcucacugcagacuugaacuc

SEQ ID NO: 1012377 - RNA, 18 nt, Human
auagcucacugcagccuc

SEQ ID NO: 1012378 - RNA, 22 nt, Human
augggguuucaccauguuggcc

SEQ ID NO: 1012379 - RNA, 24 nt, Human
augggguuucaccauguuggccag

SEQ ID NO: 1012380 - RNA, 24 nt, Human
auuucuguauuuuuaguagagaug

SEQ ID NO: 1012381 - RNA, 24 nt, Human
caaagugcugggauuacaggcgug

SEQ ID NO: 1012382 - RNA, 24 nt, Human
caacauggugaaaccccgucucua

SEQ ID NO: 1012383 - RNA, 25 nt, Human
caagagccacugugccuggccucgu

SEQ ID NO: 1012384 - RNA, 24 nt, Human
caagccuauaaucccaguacuuug

SEQ ID NO: 1012385 - RNA, 27 nt, Human
caagcgauccuccuaccucaaccuccc

SEQ ID NO: 1012386 - RNA, 28 nt, Human
caagcgauccuccuaccucaaccuccca

SEQ ID NO: 1012387 - RNA, 22 nt, Human
caagcgauucuucugccucagc

SEQ ID NO: 1012388 - RNA, 19 nt, Human
caaggugaaccgugggauc

SEQ ID NO: 1012389 - RNA, 22 nt, Human
caagugauccuccugccucagc

SEQ ID NO: 1012390 - RNA, 27 nt, Human
caagugauccuccugccucagccuccc

SEQ ID NO: 1012391 - RNA, 27 nt, Human
caagugauccuccugccucagccuccc

SEQ ID NO: 1012392 - RNA, 22 nt, Human
caagugauccuccugucucagc

SEQ ID NO: 1012393 - RNA, 19 nt, Human
caccagcaccuacucugaa

SEQ ID NO: 1012394 - RNA, 21 nt, Human
caccauguuggccaggcuggu

SEQ ID NO: 1012395 - RNA, 24 nt, Human
caccauguuggccaggcuggucuc

SEQ ID NO: 1012396 - RNA, 27 nt, Human
caccauguuggccaggcuggucucgaa

SEQ ID NO: 1012397 - RNA, 21 nt, Human
cacccagccuaucccaaaccu

SEQ ID NO: 1012398 - RNA, 24 nt, Human
cacccaggcuggagugcaguggug

SEQ ID NO: 1012399 - RNA, 23 nt, Human
cacccagugauggagacacaguc

SEQ ID NO: 1012400 - RNA, 23 nt, Human
caccugaggucaggaguuugaga

SEQ ID NO: 1012401 - RNA, 23 nt, Human
caccugccucagccucccaaagu

SEQ ID NO: 1012402 - RNA, 23 nt, Human
cacggcacccagccuaucccaaa

SEQ ID NO: 1012403 - RNA, 22 nt, Human
cacuauauugcccagguugguc

SEQ ID NO: 1012404 - RNA, 24 nt, Human
cacuuugucgcccaggcuggagug

SEQ ID NO: 1012405 - RNA, 22 nt, Human
cagagcgcugggauuacagaca

SEQ ID NO: 1012406 - RNA, 21 nt, Human
cagcacaaggugaaccguggg

SEQ ID NO: 1012407 - RNA, 19 nt, Human
cagccgggcgugguggcuc

SEQ ID NO: 1012408 - RNA, 19 nt, Human
cagccuccaauuccugggc

SEQ ID NO: 1012409 - RNA, 23 nt, Human
cagccuccaauuccugggcucaa

SEQ ID NO: 1012410 - RNA, 20 nt, Human
cagccuccugaguagcuggg

SEQ ID NO: 1012411 - RNA, 20 nt, Human
cagccuccugaguagcuggg

SEQ ID NO: 1012412 - RNA, 22 nt, Human
cagccucgcucccccagcucug

SEQ ID NO: 1012413 - RNA, 18 nt, Human
cagggucuuacuguguug

SEQ ID NO: 1012414 - RNA, 24 nt, Human
cagguggaucaccugaggucagga

SEQ ID NO: 1012415 - RNA, 20 nt, Human
caguacuuugggaagcccag

SEQ ID NO: 1012416 - RNA, 21 nt, Human
caguacuuugggaagcccagg

SEQ ID NO: 1012417 - RNA, 24 nt, Human
caguacuuugggaagcccaggcag

SEQ ID NO: 1012418 - RNA, 26 nt, Human
caguagcuaggacuacaggugcauac

SEQ ID NO: 1012419 - RNA, 23 nt, Human
cagugacaggcacaggacggcac

SEQ ID NO: 1012420 - RNA, 19 nt, Human
caguggugcgaucuuggcu

SEQ ID NO: 1012421 - RNA, 18 nt, Human
caguuagggaaagcaugg

SEQ ID NO: 1012422 - RNA, 18 nt, Human
cauaccaccaggccuggc

SEQ ID NO: 1012423 - RNA, 24 nt, Human
cauguuggccaggcuggucucgaa

SEQ ID NO: 1012424 - RNA, 22 nt, Human
cauuuagggacccaagucaucc

SEQ ID NO: 1012425 - RNA, 20 nt, Human
cauuuuugcacaguuaggga

SEQ ID NO: 1012426 - RNA, 22 nt, Human
ccaaagugcugggauuacaggc

SEQ ID NO: 1012427 - RNA, 22 nt, Human
ccaaagugcugggauuacaggc

SEQ ID NO: 1012428 - RNA, 24 nt, Human
ccaaagugcugggauuacaggcgu

SEQ ID NO: 1012429 - RNA, 22 nt, Human
ccaagugcuaggauuacaagug

SEQ ID NO: 1012430 - RNA, 26 nt, Human
ccaccugccucagccucccaaagugc

SEQ ID NO: 1012431 - RNA, 19 nt, Human
ccagagcgcugggauuaca

SEQ ID NO: 1012432 - RNA, 26 nt, Human
ccaggcagguggaucaccugagguca

SEQ ID NO: 1012433 - RNA, 19 nt, Human
ccaggguucaagcgauucu

SEQ ID NO: 1012434 - RNA, 23 nt, Human
ccaggguucaagcgauucuucug

SEQ ID NO: 1012435 - RNA, 22 nt, Human
ccaugaaccuccgccucccggg

SEQ ID NO: 1012436 - RNA, 19 nt, Human
cccaaguagcugggacuau

SEQ ID NO: 1012437 - RNA, 24 nt, Human
cccaaguagcugggacuauaggca

SEQ ID NO: 1012438 - RNA, 21 nt, Human
cccaggcuggagugcaguggc

SEQ ID NO: 1012439 - RNA, 21 nt, Human
ccccaugaaccuccgccuccc

SEQ ID NO: 1012440 - RNA, 24 nt, Human
ccccaugaaccuccgccucccggg

SEQ ID NO: 1012441 - RNA, 18 nt, Human
cccggguucaagggauuc

SEQ ID NO: 1012442 - RNA, 21 nt, Human
cccuggggcggucuuggaggg

SEQ ID NO: 1012443 - RNA, 23 nt, Human
ccuaccucaaccucccaaguagc

SEQ ID NO: 1012444 - RNA, 22 nt, Human
ccucaagugauccuccugucuc

SEQ ID NO: 1012445 - RNA, 24 nt, Human
ccuccaggguucaagcgauucuuc

SEQ ID NO: 1012446 - RNA, 24 nt, Human
ccucccggguucaagggauucucc

SEQ ID NO: 1012447 - RNA, 21 nt, Human
ccuccugccucagccucccag

SEQ ID NO: 1012448 - RNA, 22 nt, Human
ccuccugccucagccucccaga

SEQ ID NO: 1012449 - RNA, 26 nt, Human
ccuccugucucagccuuuccaagugc

SEQ ID NO: 1012450 - RNA, 18 nt, Human
ccugaccucaagugaucc

SEQ ID NO: 1012451 - RNA, 23 nt, Human
ccugaccucaagugauccuccug

SEQ ID NO: 1012452 - RNA, 21 nt, Human
ccugacuugaggugauccacc

SEQ ID NO: 1012453 - RNA, 22 nt, Human
ccugaggucaggaguuugagac

SEQ ID NO: 1012454 - RNA, 19 nt, Human
ccugaguagcugggacuac

SEQ ID NO: 1012455 - RNA, 23 nt, Human
ccugaguagcugggauuacaggc

SEQ ID NO: 1012456 - RNA, 24 nt, Human
ccugaguagcugggauuacaggcg

SEQ ID NO: 1012457 - RNA, 24 nt, Human
ccugccucagccucccaaagugcu

SEQ ID NO: 1012458 - RNA, 23 nt, Human
ccuggccaacauggugaaacccc

SEQ ID NO: 1012459 - RNA, 24 nt, Human
ccuggccaacauggugaaaccccg

SEQ ID NO: 1012460 - RNA, 18 nt, Human
ccuggccucaagugaucc

SEQ ID NO: 1012461 - RNA, 21 nt, Human
ccuggccucaagugauccucc

SEQ ID NO: 1012462 - RNA, 22 nt, Human
ccuggccucaagugauccuccu

SEQ ID NO: 1012463 - RNA, 23 nt, Human
ccuggccucaagugauccuccug

SEQ ID NO: 1012464 - RNA, 21 nt, Human
ccuggccucuacccugugggc

SEQ ID NO: 1012465 - RNA, 22 nt, Human
ccugggcucaagugauccuccu

SEQ ID NO: 1012466 - RNA, 20 nt, Human
ccuggguucaagcgauccuc

SEQ ID NO: 1012467 - RNA, 19 nt, Human
ccuguaaucccagcuacuu

SEQ ID NO: 1012468 - RNA, 21 nt, Human
ccuguaaucccagcuacuugg

SEQ ID NO: 1012469 - RNA, 22 nt, Human
ccuguaaucccagcuacuuggg

SEQ ID NO: 1012470 - RNA, 18 nt, Human
ccuuuuuuuuuuuuuuga

SEQ ID NO: 1012471 - RNA, 24 nt, Human
ccuuuuuuuuuuuuuugaguuggg

SEQ ID NO: 1012472 - RNA, 22 nt, Human
cgccaccaaugccagcuaaguu

SEQ ID NO: 1012473 - RNA, 24 nt, Human
cgcccaggcuggagugcaguggcg

SEQ ID NO: 1012474 - RNA, 24 nt, Human
cgcccaggcuggagugcaguggcg

SEQ ID NO: 1012475 - RNA, 24 nt, Human
cgcccaggcuggagugcaguggug

SEQ ID NO: 1012476 - RNA, 22 nt, Human
cgcugggauuacagacaagagc

SEQ ID NO: 1012477 - RNA, 24 nt, Human
cggcaaccuccgccuccaggguuc

SEQ ID NO: 1012478 - RNA, 20 nt, Human
cggcacagagcagagcugcc

SEQ ID NO: 1012479 - RNA, 24 nt, Human
cuagccaggugugguggugcaugc

SEQ ID NO: 1012480 - RNA, 24 nt, Human
cucaagccuauaaucccaguacuu

SEQ ID NO: 1012481 - RNA, 24 nt, Human
cucaagugauccuccuccgucagc

SEQ ID NO: 1012482 - RNA, 24 nt, Human
cucaagugauccuccugccucagc

SEQ ID NO: 1012483 - RNA, 20 nt, Human
cucacaacucccugggggcc

SEQ ID NO: 1012484 - RNA, 21 nt, Human
cucacugcagccuccaauucc

SEQ ID NO: 1012485 - RNA, 24 nt, Human
cucacugcagccuccaauuccugg

SEQ ID NO: 1012486 - RNA, 24 nt, Human
cucacuuugucgcccaggcuggag

SEQ ID NO: 1012487 - RNA, 24 nt, Human
cucagccuccugaguagcugggac

SEQ ID NO: 1012488 - RNA, 24 nt, Human
cucagccuccugaguagcugggau

SEQ ID NO: 1012489 - RNA, 24 nt, Human
cucagggaauaauuuugggggaaa

SEQ ID NO: 1012490 - RNA, 19 nt, Human
cucccccagcucugccucc

SEQ ID NO: 1012491 - RNA, 23 nt, Human
cucccucagccuccugaguagcu

SEQ ID NO: 1012492 - RNA, 25 nt, Human
cucccucagccuccugaguagcugg

SEQ ID NO: 1012493 - RNA, 24 nt, Human
cuccucaguagcuaggacuacagg

SEQ ID NO: 1012494 - RNA, 19 nt, Human
cuccuccgucagccuccuc

SEQ ID NO: 1012495 - RNA, 20 nt, Human
cugaggccugcuuccucagc

SEQ ID NO: 1012496 - RNA, 22 nt, Human
cugaguagcugggauuacaggc

SEQ ID NO: 1012497 - RNA, 24 nt, Human
cugaguagcugggauuacaggcgu

SEQ ID NO: 1012498 - RNA, 20 nt, Human
cugcagacuugaacuccugg

SEQ ID NO: 1012499 - RNA, 23 nt, Human
cugcagccuccaauuccugggcu

SEQ ID NO: 1012500 - RNA, 23 nt, Human
cugccucagccucccagagcgcu

SEQ ID NO: 1012501 - RNA, 18 nt, Human
cuggaggcuggaggugga

SEQ ID NO: 1012502 - RNA, 21 nt, Human
cuggagguggaggugcacggc

SEQ ID NO: 1012503 - RNA, 21 nt, Human
cuggcucugucgcccaggcug

SEQ ID NO: 1012504 - RNA, 22 nt, Human
cugggcucaagugauccuccuc

SEQ ID NO: 1012505 - RNA, 22 nt, Human
cuguauuuuuaguagagauggg

SEQ ID NO: 1012506 - RNA, 23 nt, Human
cuguauuuuuaguagagaugggg

SEQ ID NO: 1012507 - RNA, 23 nt, Human
cugucucagccuuuccaagugcu

SEQ ID NO: 1012508 - RNA, 18 nt, Human
cuuugucgcccaggcugg

SEQ ID NO: 1012509 - RNA, 23 nt, Human
cuuuuuuuuuuuuuugaguuggg

SEQ ID NO: 1012510 - RNA, 22 nt, Human
gaccucaagugauccuccugcc

SEQ ID NO: 1012511 - RNA, 24 nt, Human
gaccucaagugauccuccugccuc

SEQ ID NO: 1012512 - RNA, 24 nt, Human
gacuugaggugauccaccugccuc

SEQ ID NO: 1012513 - RNA, 23 nt, Human
gagaauguauuggaggaggggag

SEQ ID NO: 1012514 - RNA, 20 nt, Human
gagacagagucucacuuugu

SEQ ID NO: 1012515 - RNA, 18 nt, Human
gagaugggguuucaccau

SEQ ID NO: 1012516 - RNA, 24 nt, Human
gagaugggguuucaccauguuggc

SEQ ID NO: 1012517 - RNA, 23 nt, Human
gaggcaggagaauugcuugaacc

SEQ ID NO: 1012518 - RNA, 24 nt, Human
gaggcaggagaauugcuugaaccu

SEQ ID NO: 1012519 - RNA, 24 nt, Human
gaguagcugggacuacagacgugc

SEQ ID NO: 1012520 - RNA, 20 nt, Human
gaguagcugggauuacaggc

SEQ ID NO: 1012521 - RNA, 25 nt, Human
gaguagcugggauuacaggcgugug

SEQ ID NO: 1012522 - RNA, 21 nt, Human
gaucaccugaggucaggaguu

SEQ ID NO: 1012523 - RNA, 24 nt, Human
gaucaccugaggucaggaguuuga

SEQ ID NO: 1012524 - RNA, 19 nt, Human
gaucauagcucacugcagc

SEQ ID NO: 1012525 - RNA, 18 nt, Human
gauuacagacaagagcca

SEQ ID NO: 1012526 - RNA, 21 nt, Human
gauuacagacaagagccacug

SEQ ID NO: 1012527 - RNA, 23 nt, Human
gauuacaggcgugacccacggca

SEQ ID NO: 1012528 - RNA, 22 nt, Human
gcaaccuccgccuccaggguuc

SEQ ID NO: 1012529 - RNA, 24 nt, Human
gccaacauggugaaaccccgucuc

SEQ ID NO: 1012530 - RNA, 19 nt, Human
gcccaggcuggagugcagu

SEQ ID NO: 1012531 - RNA, 19 nt, Human
gcccaggcuggagugcagu

SEQ ID NO: 1012532 - RNA, 20 nt, Human
gcccaggcuggagugcagug

SEQ ID NO: 1012533 - RNA, 20 nt, Human
gcccaggcuggagugcagug

SEQ ID NO: 1012534 - RNA, 20 nt, Human
gcccaggcuggagugcagug

SEQ ID NO: 1012535 - RNA, 23 nt, Human
gcccaggcuggagugcaguggug

SEQ ID NO: 1012536 - RNA, 21 nt, Human
gccucagccucccaaagugcu

SEQ ID NO: 1012537 - RNA, 21 nt, Human
gccugcuuccucagccccacc

SEQ ID NO: 1012538 - RNA, 20 nt, Human
gccuguaaucccagcuacuu

SEQ ID NO: 1012539 - RNA, 20 nt, Human
gccuucagugcuguccucag

SEQ ID NO: 1012540 - RNA, 23 nt, Human
gcgauucuucugccucagccucc

SEQ ID NO: 1012541 - RNA, 25 nt, Human
gcucuaucacccaggcuggagugca

SEQ ID NO: 1012542 - RNA, 25 nt, Human
gcucugucgcccaggcuggagugca

SEQ ID NO: 1012543 - RNA, 25 nt, Human
gcucugucgcccaggcuggagugca

SEQ ID NO: 1012544 - RNA, 19 nt, Human
gcuggagugcaguggcgcg

SEQ ID NO: 1012545 - RNA, 19 nt, Human
gcuggagugcaguggcgug

SEQ ID NO: 1012546 - RNA, 22 nt, Human
ggacuacaggugcauaccacca

SEQ ID NO: 1012547 - RNA, 20 nt, Human
ggagacacagucagcauugg

SEQ ID NO: 1012548 - RNA, 19 nt, Human
ggagguggaggugcacggc

SEQ ID NO: 1012549 - RNA, 19 nt, Human
ggccucaagugauccuccu

SEQ ID NO: 1012550 - RNA, 20 nt, Human
ggcgugguggcucaagccua

SEQ ID NO: 1012551 - RNA, 21 nt, Human
ggcucaagccuauaaucccag

SEQ ID NO: 1012552 - RNA, 24 nt, Human
ggcucugucgcccaggcuggagug

SEQ ID NO: 1012553 - RNA, 22 nt, Human
ggcuggagugcaguggcgugau

SEQ ID NO: 1012554 - RNA, 18 nt, Human
gggcacccaggggcccau

SEQ ID NO: 1012555 - RNA, 19 nt, Human
gggcucaagugauccuccu

SEQ ID NO: 1012556 - RNA, 22 nt, Human
gggguuucaccauguuggccag

SEQ ID NO: 1012557 - RNA, 23 nt, Human
ggguuccccaugaaccuccgccu

SEQ ID NO: 1012558 - RNA, 18 nt, Human
ggguuucaccauguuggc

SEQ ID NO: 1012559 - RNA, 21 nt, Human
ggucagauuaucagagaaugu

SEQ ID NO: 1012560 - RNA, 19 nt, Human
ggucaggaguuugagacca

SEQ ID NO: 1012561 - RNA, 24 nt, Human
ggugauccaccugccucagccucc

SEQ ID NO: 1012562 - RNA, 21 nt, Human
ggugcaugccuguaaucccag

SEQ ID NO: 1012563 - RNA, 24 nt, Human
gguggcucaagccuauaaucccag

SEQ ID NO: 1012564 - RNA, 24 nt, Human
gguuggucucaaacuccuggccuc

SEQ ID NO: 1012565 - RNA, 21 nt, Human
gguugucguuuuauuauuguu

SEQ ID NO: 1012566 - RNA, 23 nt, Human
guagagaugggguuucaccaugu

SEQ ID NO: 1012567 - RNA, 18 nt, Human
guagcugggauuacaggc

SEQ ID NO: 1012568 - RNA, 18 nt, Human
guagcugggauuacaggc

SEQ ID NO: 1012569 - RNA, 24 nt, Human
gucuugcucuaucacccaggcugg

SEQ ID NO: 1012570 - RNA, 19 nt, Human
gugaggugacuggaggcug

SEQ ID NO: 1012571 - RNA, 18 nt, Human
gugauccaccugccucag

SEQ ID NO: 1012572 - RNA, 19 nt, Human
gugauccaccugccucagc

SEQ ID NO: 1012573 - RNA, 24 nt, Human
gugauccaccugccucagccuccc

SEQ ID NO: 1012574 - RNA, 24 nt, Human
gugauccuccuccgucagccuccu

SEQ ID NO: 1012575 - RNA, 24 nt, Human
gugauccuccugccucagccuccc

SEQ ID NO: 1012576 - RNA, 24 nt, Human
gugauccuccugucucagccuuuc

SEQ ID NO: 1012577 - RNA, 23 nt, Human
gugggauccuuuuuuuuuuuuuu

SEQ ID NO: 1012578 - RNA, 23 nt, Human
guggugcaugccuguaaucccag

SEQ ID NO: 1012579 - RNA, 21 nt, Human
uaaaaauacaaaaacuagcca

SEQ ID NO: 1012580 - RNA, 24 nt, Human
uaauuucuguauuuuuaguagaga

SEQ ID NO: 1012581 - RNA, 22 nt, Human
uacagacaagagccacugugcc

SEQ ID NO: 1012582 - RNA, 24 nt, Human
uacaggcgugugcaaccacaccca

SEQ ID NO: 1012583 - RNA, 19 nt, Human
uacccugugggcaacaggu

SEQ ID NO: 1012584 - RNA, 24 nt, Human
uaccucaaccucccaaguagcugg

SEQ ID NO: 1012585 - RNA, 22 nt, Human
uagagacagggucuuacugugu

SEQ ID NO: 1012586 - RNA, 22 nt, Human
uagagaugggguuucaccaugu

SEQ ID NO: 1012587 - RNA, 24 nt, Human
uagcucacugcagccuccaauucc

SEQ ID NO: 1012588 - RNA, 21 nt, Human
uaggacuacaggugcauacca

SEQ ID NO: 1012589 - RNA, 24 nt, Human
uaggacuacaggugcauaccacca

SEQ ID NO: 1012590 - RNA, 24 nt, Human
uagggucucacuauauugcccagg

SEQ ID NO: 1012591 - RNA, 24 nt, Human
uagggucuggcucugucgcccagg

SEQ ID NO: 1012592 - RNA, 24 nt, Human
uaguagagaugggguuucaccaug

SEQ ID NO: 1012593 - RNA, 26 nt, Human
uaguagagaugggguuucaccauguu

SEQ ID NO: 1012594 - RNA, 23 nt, Human
uauaggcaugcgccaccaaugcc

SEQ ID NO: 1012595 - RNA, 24 nt, Human
uauauugcccagguuggucucaaa

SEQ ID NO: 1012596 - RNA, 28 nt, Human
uauuuuauuuuuuguagaaauagggucu

SEQ ID NO: 1012597 - RNA, 22 nt, Human
ucaagcccauuucccaccagca

SEQ ID NO: 1012598 - RNA, 22 nt, Human
ucaagccuauaaucccaguacu

SEQ ID NO: 1012599 - RNA, 24 nt, Human
ucacccaggcuggagugcaguggu

SEQ ID NO: 1012600 - RNA, 19 nt, Human
ucaccugaggucaggaguu

SEQ ID NO: 1012601 - RNA, 23 nt, Human
ucacggcaaccuccgccuccagg

SEQ ID NO: 1012602 - RNA, 24 nt, Human
ucacggcaaccuccgccuccaggg

SEQ ID NO: 1012603 - RNA, 25 nt, Human
ucacggcaaccuccgccuccagggu

SEQ ID NO: 1012604 - RNA, 27 nt, Human
ucacggcaaccuccgccuccaggguuc

SEQ ID NO: 1012605 - RNA, 24 nt, Human
ucacugcagacuugaacuccuggg

SEQ ID NO: 1012606 - RNA, 24 nt, Human
ucacugcagccuccaauuccuggg

SEQ ID NO: 1012607 - RNA, 24 nt, Human
ucacuuugucgcccaggcuggagu

SEQ ID NO: 1012608 - RNA, 20 nt, Human
ucagcauugguugucguuuu

SEQ ID NO: 1012609 - RNA, 20 nt, Human
ucagccuccugaguagcugg

SEQ ID NO: 1012610 - RNA, 23 nt, Human
ucagccuccugaguagcugggac

SEQ ID NO: 1012611 - RNA, 23 nt, Human
ucauagcucacugcagacuugaa

SEQ ID NO: 1012612 - RNA, 21 nt, Human
uccacaggcccagaggcagcc

SEQ ID NO: 1012613 - RNA, 24 nt, Human
uccaggguucaagcgauucuucug

SEQ ID NO: 1012614 - RNA, 24 nt, Human
ucccaaagugcugggauuacaggc

SEQ ID NO: 1012615 - RNA, 24 nt, Human
ucccaaguagcugggacuauaggc

SEQ ID NO: 1012616 - RNA, 18 nt, Human
ucccagagcgcugggauu

SEQ ID NO: 1012617 - RNA, 22 nt, Human
ucccagcuacuugggaggcgga

SEQ ID NO: 1012618 - RNA, 19 nt, Human
ucccccagcucugccuccc

SEQ ID NO: 1012619 - RNA, 21 nt, Human
ucccggguucaagggauucuc

SEQ ID NO: 1012620 - RNA, 23 nt, Human
ucccggguucaagggauucuccu

SEQ ID NO: 1012621 - RNA, 18 nt, Human
ucccucagccuccugagu

SEQ ID NO: 1012622 - RNA, 24 nt, Human
ucccucagccuccugaguagcugg

SEQ ID NO: 1012623 - RNA, 23 nt, Human
ucccugggggccucuucuggccc

SEQ ID NO: 1012624 - RNA, 19 nt, Human
uccucagccccacccagug

SEQ ID NO: 1012625 - RNA, 18 nt, Human
uccucaggcaccuggccu

SEQ ID NO: 1012626 - RNA, 21 nt, Human
uccucaggcaccuggccucua

SEQ ID NO: 1012627 - RNA, 27 nt, Human
uccuccuaccucaaccucccaaguagc

SEQ ID NO: 1012628 - RNA, 22 nt, Human
uccuccugccucagccucccag

SEQ ID NO: 1012629 - RNA, 25 nt, Human
uccuccugccucagccucccagagc

SEQ ID NO: 1012630 - RNA, 18 nt, Human
uccugaguagcugggacu

SEQ ID NO: 1012631 - RNA, 24 nt, Human
uccugaguagcugggauuacaggc

SEQ ID NO: 1012632 - RNA, 21 nt, Human
uccugggcucaagugauccuc

SEQ ID NO: 1012633 - RNA, 22 nt, Human
uccugggcucaagugauccucc

SEQ ID NO: 1012634 - RNA, 22 nt, Human
uccugggcucaagugauccucc

SEQ ID NO: 1012635 - RNA, 21 nt, Human
uccuggguucaagcgauccuc

SEQ ID NO: 1012636 - RNA, 24 nt, Human
ucgcccaggcuggagugcaguggc

SEQ ID NO: 1012637 - RNA, 24 nt, Human
ucgcccaggcuggagugcaguggc

SEQ ID NO: 1012638 - RNA, 24 nt, Human
ucgcccaggcuggagugcaguggu

SEQ ID NO: 1012639 - RNA, 19 nt, Human
ucgcucccccagcucugcc

SEQ ID NO: 1012640 - RNA, 19 nt, Human
ucuaucacccaggcuggag

SEQ ID NO: 1012641 - RNA, 24 nt, Human
ucuaucacccaggcuggagugcag

SEQ ID NO: 1012642 - RNA, 19 nt, Human
ucucacuauauugcccagg

SEQ ID NO: 1012643 - RNA, 23 nt, Human
ucucacuauauugcccagguugg

SEQ ID NO: 1012644 - RNA, 22 nt, Human
ucucacuuugucgcccaggcug

SEQ ID NO: 1012645 - RNA, 23 nt, Human
ucucacuuugucgcccaggcugg

SEQ ID NO: 1012646 - RNA, 24 nt, Human
ucucacuuugucgcccaggcugga

SEQ ID NO: 1012647 - RNA, 21 nt, Human
ucucuacuaaaaauacaaaaa

SEQ ID NO: 1012648 - RNA, 24 nt, Human
ucugccucagccuccugaguagcu

SEQ ID NO: 1012649 - RNA, 19 nt, Human
ucuggcucugucgcccagg

SEQ ID NO: 1012650 - RNA, 23 nt, Human
ucuggcucugucgcccaggcugg

SEQ ID NO: 1012651 - RNA, 24 nt, Human
ucuggcucugucgcccaggcugga

SEQ ID NO: 1012652 - RNA, 24 nt, Human
ucugucgcccaggcuggagugcag

SEQ ID NO: 1012653 - RNA, 24 nt, Human
ucugucgcccaggcuggagugcag

SEQ ID NO: 1012654 - RNA, 19 nt, Human
ucuugcucuaucacccagg

SEQ ID NO: 1012655 - RNA, 23 nt, Human
ucuugcucuaucacccaggcugg

SEQ ID NO: 1012656 - RNA, 24 nt, Human
ucuugcucuaucacccaggcugga

SEQ ID NO: 1012657 - RNA, 23 nt, Human
ucuugcucugucgcccaggcugg

SEQ ID NO: 1012658 - RNA, 24 nt, Human
ucuugcucugucgcccaggcugga

SEQ ID NO: 1012659 - RNA, 24 nt, Human
ugaaaacaggagucauugucagcc

SEQ ID NO: 1012660 - RNA, 25 nt, Human
ugaacuccuggguucaagcgauccu

SEQ ID NO: 1012661 - RNA, 18 nt, Human
ugaccucaagugauccuc

SEQ ID NO: 1012662 - RNA, 20 nt, Human
ugaccucaagugauccuccu

SEQ ID NO: 1012663 - RNA, 21 nt, Human
ugaccucaagugauccuccug

SEQ ID NO: 1012664 - RNA, 24 nt, Human
ugaccucaagugauccuccugccu

SEQ ID NO: 1012665 - RNA, 24 nt, Human
ugacuugaggugauccaccugccu

SEQ ID NO: 1012666 - RNA, 23 nt, Human
ugagaccagccuggccaacaugg

SEQ ID NO: 1012667 - RNA, 24 nt, Human
ugagaccagccuggccaacauggu

SEQ ID NO: 1012668 - RNA, 22 nt, Human
ugagauggagucuugcucuguc

SEQ ID NO: 1012669 - RNA, 25 nt, Human
ugagcuaggugaggugacuggaggc

SEQ ID NO: 1012670 - RNA, 18 nt, Human
ugaggucaggaguuugag

SEQ ID NO: 1012671 - RNA, 22 nt, Human
ugcaguggugcgaucuuggcuc

SEQ ID NO: 1012672 - RNA, 24 nt, Human
ugcccagguuggucucaaacuccu

SEQ ID NO: 1012673 - RNA, 24 nt, Human
ugccucagccucccaaagugcugg

SEQ ID NO: 1012674 - RNA, 24 nt, Human
ugccucagccucccagagcgcugg

SEQ ID NO: 1012675 - RNA, 24 nt, Human
ugccucagccuccugaguagcugg

SEQ ID NO: 1012676 - RNA, 23 nt, Human
ugccuguaaucccagcuacuugg

SEQ ID NO: 1012677 - RNA, 24 nt, Human
ugccuguaaucccagcuacuuggg

SEQ ID NO: 1012678 - RNA, 22 nt, Human
ugcucuaucacccaggcuggag

SEQ ID NO: 1012679 - RNA, 24 nt, Human
ugcucuaucacccaggcuggagug

SEQ ID NO: 1012680 - RNA, 24 nt, Human
ugcucugucgcccaggcuggagug

SEQ ID NO: 1012681 - RNA, 22 nt, Human
ugcugggauuacaggcgugacc

SEQ ID NO: 1012682 - RNA, 21 nt, Human
uggaaccagccgggcguggug

SEQ ID NO: 1012683 - RNA, 18 nt, Human
uggaggaggggaggcugg

SEQ ID NO: 1012684 - RNA, 19 nt, Human
uggaggcuggagguggagg

SEQ ID NO: 1012685 - RNA, 23 nt, Human
uggagucuugcucugucgcccag

SEQ ID NO: 1012686 - RNA, 24 nt, Human
uggagucuugcucugucgcccagg

SEQ ID NO: 1012687 - RNA, 23 nt, Human
uggagugcaguggcgcgaucuca

SEQ ID NO: 1012688 - RNA, 24 nt, Human
uggagugcaguggcgcgaucucag

SEQ ID NO: 1012689 - RNA, 19 nt, Human
uggagugcaguggcgugau

SEQ ID NO: 1012690 - RNA, 19 nt, Human
uggagugcaguggcgugau

SEQ ID NO: 1012691 - RNA, 21 nt, Human
uggagugcaguggcgugauca

SEQ ID NO: 1012692 - RNA, 28 nt, Human
uggagugcaguggcgugauggcucuagc

SEQ ID NO: 1012693 - RNA, 18 nt, Human
uggagugcaguggugcaa

SEQ ID NO: 1012694 - RNA, 19 nt, Human
uggagugcaguggugcaau

SEQ ID NO: 1012695 - RNA, 21 nt, Human
uggagugcaguggugcaauca

SEQ ID NO: 1012696 - RNA, 23 nt, Human
uggagugcaguggugcgaucuug

SEQ ID NO: 1012697 - RNA, 24 nt, Human
uggagugcaguggugcgaucuugg

SEQ ID NO: 1012698 - RNA, 23 nt, Human
uggaucaccugaggucaggaguu

SEQ ID NO: 1012699 - RNA, 24 nt, Human
uggaucaccugaggucaggaguuu

SEQ ID NO: 1012700 - RNA, 27 nt, Human
uggaucaccugaggucaggaguuugag

SEQ ID NO: 1012701 - RNA, 24 nt, Human
uggccaacauggugaaaccccguc

SEQ ID NO: 1012702 - RNA, 24 nt, Human
uggccaggcuggucucgaacuccu

SEQ ID NO: 1012703 - RNA, 18 nt, Human
uggccucaagugauccuc

SEQ ID NO: 1012704 - RNA, 20 nt, Human
uggccucaagugauccuccu

SEQ ID NO: 1012705 - RNA, 24 nt, Human
uggccucaagugauccuccugucu

SEQ ID NO: 1012706 - RNA, 18 nt, Human
uggcgugaucauagcuca

SEQ ID NO: 1012707 - RNA, 24 nt, Human
uggcgugaucauagcucacugcag

SEQ ID NO: 1012708 - RNA, 24 nt, Human
uggcucaagccuauaaucccagua

SEQ ID NO: 1012709 - RNA, 24 nt, Human
uggcucugucgcccaggcuggagu

SEQ ID NO: 1012710 - RNA, 24 nt, Human
ugggaagcccaggcagguggauca

SEQ ID NO: 1012711 - RNA, 22 nt, Human
ugggacccuucacaggugucuu

SEQ ID NO: 1012712 - RNA, 21 nt, Human
ugggacuacagacgugcacca

SEQ ID NO: 1012713 - RNA, 24 nt, Human
ugggacuacagacgugcaccacca

SEQ ID NO: 1012714 - RNA, 21 nt, Human
ugggacuauaggcaugcgcca

SEQ ID NO: 1012715 - RNA, 22 nt, Human
ugggacuauaggcaugcgccac

SEQ ID NO: 1012716 - RNA, 24 nt, Human
ugggacuauaggcaugcgccacca

SEQ ID NO: 1012717 - RNA, 19 nt, Human
ugggaggcggaggcaggag

SEQ ID NO: 1012718 - RNA, 20 nt, Human
ugggaggcggaggcaggaga

SEQ ID NO: 1012719 - RNA, 22 nt, Human
ugggauccuuuuuuuuuuuuuu

SEQ ID NO: 1012720 - RNA, 21 nt, Human
ugggauuacagacaagagcca

SEQ ID NO: 1012721 - RNA, 22 nt, Human
ugggauuacagacaagagccac

SEQ ID NO: 1012722 - RNA, 22 nt, Human
ugggauuacagacaagagccac

SEQ ID NO: 1012723 - RNA, 23 nt, Human
ugggauuacagacaagagccacu

SEQ ID NO: 1012724 - RNA, 24 nt, Human
ugggauuacagacaagagccacug

SEQ ID NO: 1012725 - RNA, 18 nt, Human
ugggauuacaggcgugac

SEQ ID NO: 1012726 - RNA, 21 nt, Human
ugggauuacaggcgugaccca

SEQ ID NO: 1012727 - RNA, 22 nt, Human
ugggauuacaggcgugacccac

SEQ ID NO: 1012728 - RNA, 22 nt, Human
ugggauuacaggcgugacccac

SEQ ID NO: 1012729 - RNA, 23 nt, Human
ugggauuacaggcgugacccacg

SEQ ID NO: 1012730 - RNA, 24 nt, Human
ugggauuacaggcgugacccacgg

SEQ ID NO: 1012731 - RNA, 19 nt, Human
ugggauuacaggcgugugc

SEQ ID NO: 1012732 - RNA, 24 nt, Human
ugggauuacaggcgugugcaacca

SEQ ID NO: 1012733 - RNA, 20 nt, Human
ugggcucaagugauccuccu

SEQ ID NO: 1012734 - RNA, 20 nt, Human
ugggggaaaacuggcuuccu

SEQ ID NO: 1012735 - RNA, 19 nt, Human
uggggucuugcucuaucac

SEQ ID NO: 1012736 - RNA, 24 nt, Human
ugggguuucaccauguuggccagg

SEQ ID NO: 1012737 - RNA, 19 nt, Human
uggguucaagcgauccucc

SEQ ID NO: 1012738 - RNA, 23 nt, Human
uggguucaagcgauccuccuacc

SEQ ID NO: 1012739 - RNA, 24 nt, Human
uggugcaaucauagcucacugcag

SEQ ID NO: 1012740 - RNA, 21 nt, Human
uggugcaugccuguaauccca

SEQ ID NO: 1012741 - RNA, 22 nt, Human
uggugcaugccuguaaucccag

SEQ ID NO: 1012742 - RNA, 24 nt, Human
ugguggcucaagccuauaauccca

SEQ ID NO: 1012743 - RNA, 24 nt, Human
ugguggugcaugccuguaauccca

SEQ ID NO: 1012744 - RNA, 24 nt, Human
uguagagacagggucuuacugugu

SEQ ID NO: 1012745 - RNA, 21 nt, Human
ugucgcccaggcuggagugca

SEQ ID NO: 1012746 - RNA, 20 nt, Human
ugucucagccuuuccaagug

SEQ ID NO: 1012747 - RNA, 18 nt, Human
ugugggcaacaggugccc

SEQ ID NO: 1012748 - RNA, 18 nt, Human
uuaguagagaugggguuu

SEQ ID NO: 1012749 - RNA, 22 nt, Human
uuaguagagaugggguuucacc

SEQ ID NO: 1012750 - RNA, 24 nt, Human
uuaguagagaugggguuucaccau

SEQ ID NO: 1012751 - RNA, 24 nt, Human
uucaagcgauccuccuaccucaac

SEQ ID NO: 1012752 - RNA, 23 nt, Human
uucaagcgauucuucugccucag

SEQ ID NO: 1012753 - RNA, 24 nt, Human
uucaagcgauucuucugccucagc

SEQ ID NO: 1012754 - RNA, 18 nt, Human
uucuccugcaucuuacuc

SEQ ID NO: 1012755 - RNA, 21 nt, Human
uugagauggagucuugcucug

SEQ ID NO: 1012756 - RNA, 23 nt, Human
uugaggugauccaccugccucag

SEQ ID NO: 1012757 - RNA, 24 nt, Human
uugcucuaucacccaggcuggagu

SEQ ID NO: 1012758 - RNA, 24 nt, Human
uugcucugucgcccaggcuggagu

SEQ ID NO: 1012759 - RNA, 24 nt, Human
uugcuugaaccugagaggcggagg

SEQ ID NO: 1012760 - RNA, 24 nt, Human
uuguagaaauagggucucacuaua

SEQ ID NO: 1012761 - RNA, 23 nt, Human
uuguuuucagagauagggucugg

SEQ ID NO: 1012762 - RNA, 24 nt, Human
uuucaccauguuggccaggcuggu

SEQ ID NO: 1012763 - RNA, 20 nt, Human
uuucuguauuuuuaguagag

SEQ ID NO: 1012764 - RNA, 23 nt, Human
uuuguagagacagggucuuacug

SEQ ID NO: 1012765 - RNA, 24 nt, Human
uuuguagagacagggucuuacugu

SEQ ID NO: 1012766 - RNA, 24 nt, Human
uuuuuaguagagaugggguuucac

SEQ ID NO: 1012767 - RNA, 25 nt, Human
uuuuuggagacagagucucacuuug

SEQ ID NO: 1012768 - RNA, 18 nt, Human
uuuuuuuguagagacagg

SEQ ID NO: 1012769 - RNA, 24 nt, Human
uuuuuuuuuuuugaguuggggucu

SEQ ID NO: 1012770 - RNA, 27 nt, Human
uuuuuuuuuuuuggagacagagucuca

SEQ ID NO: 1012771 - RNA, 18 nt, Human
uuuuuuuuuuuuuuuuug

SEQ ID NO: 1012772 - RNA, 19 nt, Human
aagaguccccuugcgagug

SEQ ID NO: 1012773 - RNA, 18 nt, Human
acucugguaaugauuugg

SEQ ID NO: 1012774 - RNA, 22 nt, Human
gccgggcugaggagacugcugg

SEQ ID NO: 1012775 - RNA, 19 nt, Human
gucugcuuuaccacucugg

SEQ ID NO: 1012776 - RNA, 22 nt, Human
ugcuuuaccacucugguaauga

SEQ ID NO: 1012777 - RNA, 21 nt, Human
uggccggagcggaacgccgga

SEQ ID NO: 1012778 - RNA, 25 nt, Human
uggccggagcggaacgccggaaacc

SEQ ID NO: 1012779 - RNA, 19 nt, Human
ugugcacauggguaaucug

SEQ ID NO: 1012780 - RNA, 18 nt, Human
uguuaaaaaaauagcuuc

SEQ ID NO: 1012781 - RNA, 18 nt, Human
uuuuuuuuuuuuuuuuug

SEQ ID NO: 1012782 - RNA, 20 nt, Human
uuuuuuuuuuuuuuuuuguu

SEQ ID NO: 1012783 - RNA, 19 nt, Human
aaguuuguauagagaaugu

SEQ ID NO: 1012784 - RNA, 24 nt, Human
acaacacgaagcuccugccuuuua

SEQ ID NO: 1012785 - RNA, 19 nt, Human
agcagacccacaacacgaa

SEQ ID NO: 1012786 - RNA, 23 nt, Human
caaagaggcagcucaaaauuaga

SEQ ID NO: 1012787 - RNA, 24 nt, Human
cagcucaaaauuagacugcacagg

SEQ ID NO: 1012788 - RNA, 22 nt, Human
cuccugccuuuuaagacuacaa

SEQ ID NO: 1012789 - RNA, 24 nt, Human
cuuucugcaucugcaucuauguaa

SEQ ID NO: 1012790 - RNA, 21 nt, Human
ugccuucugcccuccggucuc

SEQ ID NO: 1012791 - RNA, 21 nt, Human
acagcagcagggccgacagga

SEQ ID NO: 1012792 - RNA, 24 nt, Human
accauggucaucaccccagcccug

SEQ ID NO: 1012793 - RNA, 23 nt, Human
acccaucuuguccccgccgcccu

SEQ ID NO: 1012794 - RNA, 18 nt, Human
acgaggcuggaguaagag

SEQ ID NO: 1012795 - RNA, 18 nt, Human
agaacagacaccgccccu

SEQ ID NO: 1012796 - RNA, 21 nt, Human
agccugcaggacaagggccug

SEQ ID NO: 1012797 - RNA, 18 nt, Human
aggacaagggccuggaau

SEQ ID NO: 1012798 - RNA, 22 nt, Human
aggcuggaguaagagggguggg

SEQ ID NO: 1012799 - RNA, 24 nt, Human
cacacagcgauucagaacagacac

SEQ ID NO: 1012800 - RNA, 20 nt, Human
caccaggcgaccauugccau

SEQ ID NO: 1012801 - RNA, 22 nt, Human
caccgccccuccccagucgcca

SEQ ID NO: 1012802 - RNA, 19 nt, Human
cagacaccgccccucccca

SEQ ID NO: 1012803 - RNA, 18 nt, Human
cagcagcagggccgacag

SEQ ID NO: 1012804 - RNA, 21 nt, Human
cagcgauucagaacagacacc

SEQ ID NO: 1012805 - RNA, 18 nt, Human
caucaccccagcccugcc

SEQ ID NO: 1012806 - RNA, 21 nt, Human
ccauagacaucgagucccucc

SEQ ID NO: 1012807 - RNA, 23 nt, Human
cccagcccugcccuuccugggca

SEQ ID NO: 1012808 - RNA, 22 nt, Human
ccccgccgcccuccgccuuccc

SEQ ID NO: 1012809 - RNA, 21 nt, Human
ccccggccuccuccucuggcg

SEQ ID NO: 1012810 - RNA, 23 nt, Human
cccgcugcccucugcccuguccg

SEQ ID NO: 1012811 - RNA, 22 nt, Human
cccgggugacacacagcgauuc

SEQ ID NO: 1012812 - RNA, 19 nt, Human
cccuccgccuucccuucuc

SEQ ID NO: 1012813 - RNA, 18 nt, Human
cccugcccuuccugggca

SEQ ID NO: 1012814 - RNA, 22 nt, Human
ccggagaugucacgaacuccca

SEQ ID NO: 1012815 - RNA, 19 nt, Human
ccuggagcugcccgcugcc

SEQ ID NO: 1012816 - RNA, 18 nt, Human
ccuugcuugacauucucc

SEQ ID NO: 1012817 - RNA, 18 nt, Human
cugcccucugcccugucc

SEQ ID NO: 1012818 - RNA, 19 nt, Human
cugucgccgguuccuucug

SEQ ID NO: 1012819 - RNA, 19 nt, Human
gaacagacaccgccccucc

SEQ ID NO: 1012820 - RNA, 23 nt, Human
gacaagggccuggaaugugagcc

SEQ ID NO: 1012821 - RNA, 22 nt, Human
gagcugcccgcugcccucugcc

SEQ ID NO: 1012822 - RNA, 20 nt, Human
gccgcccuccgccuucccuu

SEQ ID NO: 1012823 - RNA, 24 nt, Human
ggagcugcccgcugcccucugccc

SEQ ID NO: 1012824 - RNA, 29 nt, Human
uagcaacgccccucccccgccuagcauuc

SEQ ID NO: 1012825 - RNA, 21 nt, Human
uccuggagcugcccgcugccc

SEQ ID NO: 1012826 - RNA, 22 nt, Human
uccuugcuugacauucuccacc

SEQ ID NO: 1012827 - RNA, 26 nt, Human
ucgccauagcaacgccccucccccgc

SEQ ID NO: 1012828 - RNA, 20 nt, Human
ucgccgguuccuucugucuc

SEQ ID NO: 1012829 - RNA, 21 nt, Human
ucgccgguuccuucugucucu

SEQ ID NO: 1012830 - RNA, 19 nt, Human
ucugucucuccucccuuuc

SEQ ID NO: 1012831 - RNA, 23 nt, Human
ucuugaggccccccggagcggcc

SEQ ID NO: 1012832 - RNA, 21 nt, Human
ugccuccgguucuugaggccc

SEQ ID NO: 1012833 - RNA, 20 nt, Human
uggaguaagaggggugggau

SEQ ID NO: 1012834 - RNA, 18 nt, Human
ugggcagcgcccggguga

SEQ ID NO: 1012835 - RNA, 21 nt, Human
ugucacgaacucccacccggg

SEQ ID NO: 1012836 - RNA, 23 nt, Human
uugacauucuccacccaucuugu

SEQ ID NO: 1012837 - RNA, 21 nt, Human
uuucucaggcuccaggcaaga

SEQ ID NO: 1012838 - RNA, 26 nt, Human
aaaacccgaacacgacacagaacuga

SEQ ID NO: 1012839 - RNA, 23 nt, Human
aaacagacuagcaccacugugac

SEQ ID NO: 1012840 - RNA, 19 nt, Human
acagaggaaaaacccgaac

SEQ ID NO: 1012841 - RNA, 21 nt, Human
aggccugggcuggugggggcc

SEQ ID NO: 1012842 - RNA, 21 nt, Human
cacgacacagaacugaggaga

SEQ ID NO: 1012843 - RNA, 22 nt, Human
cacgagacaccaagacggccca

SEQ ID NO: 1012844 - RNA, 18 nt, Human
cccgaacacgacacagaa

SEQ ID NO: 1012845 - RNA, 24 nt, Human
cccgaacacgacacagaacugagg

SEQ ID NO: 1012846 - RNA, 18 nt, Human
ccucgggccggggucucc

SEQ ID NO: 1012847 - RNA, 21 nt, Human
cggcccagucacagaggaaaa

SEQ ID NO: 1012848 - RNA, 18 nt, Human
cuagcaccacugugacgc

SEQ ID NO: 1012849 - RNA, 19 nt, Human
gaaaaacccgaacacgaca

SEQ ID NO: 1012850 - RNA, 23 nt, Human
gacacagaacugaggagagucca

SEQ ID NO: 1012851 - RNA, 22 nt, Human
gaggaaaaacccgaacacgaca

SEQ ID NO: 1012852 - RNA, 22 nt, Human
gcgggcccugguugcugggagg

SEQ ID NO: 1012853 - RNA, 18 nt, Human
ggccggggucuccgggcc

SEQ ID NO: 1012854 - RNA, 18 nt, Human
ggccugggcugguggggg

SEQ ID NO: 1012855 - RNA, 22 nt, Human
guccaggccugggcuggugggg

SEQ ID NO: 1012856 - RNA, 18 nt, Human
ugaggagaguccaggccu

SEQ ID NO: 1012857 - RNA, 21 nt, Human
ugaggagaguccaggccuggg

SEQ ID NO: 1012858 - RNA, 21 nt, Human
uggugggggccacacccgcgg

SEQ ID NO: 1012859 - RNA, 22 nt, Human
ugguugcugggaggcauggggc

SEQ ID NO: 1012860 - RNA, 23 nt, Human
uugcugggaggcauggggcucag

SEQ ID NO: 1012861 - RNA, 23 nt, Human
aacauggauggaccuggaggcca

SEQ ID NO: 1012862 - RNA, 20 nt, Human
aaccaggcaguccaguacuu

SEQ ID NO: 1012863 - RNA, 23 nt, Human
aagugacauaaauccauaaaaau

SEQ ID NO: 1012864 - RNA, 22 nt, Human
agacggaaucagcagcacggcu

SEQ ID NO: 1012865 - RNA, 19 nt, Human
auuugggugaggguauacu

SEQ ID NO: 1012866 - RNA, 24 nt, Human
cacuagagccuucaaaggugggaa

SEQ ID NO: 1012867 - RNA, 22 nt, Human
cagcaaaaugaagauaaacgca

SEQ ID NO: 1012868 - RNA, 22 nt, Human
cauaaaaauuacaaaaaguugc

SEQ ID NO: 1012869 - RNA, 22 nt, Human
ccagauuucaccacuaugcaau

SEQ ID NO: 1012870 - RNA, 20 nt, Human
ccuucaaaggugggaguggg

SEQ ID NO: 1012871 - RNA, 21 nt, Human
cuugagaaauacuguuagaag

SEQ ID NO: 1012872 - RNA, 21 nt, Human
gauggaccuggaggccauuaa

SEQ ID NO: 1012873 - RNA, 24 nt, Human
ggagauaaacaauguguacacccc

SEQ ID NO: 1012874 - RNA, 20 nt, Human
gggaguggggugagagaugg

SEQ ID NO: 1012875 - RNA, 22 nt, Human
guacaguuuugaaagcuuaaag

SEQ ID NO: 1012876 - RNA, 21 nt, Human
uacaaaaaguugcucaaaaaa

SEQ ID NO: 1012877 - RNA, 20 nt, Human
uacagaaagucaaaaaccac

SEQ ID NO: 1012878 - RNA, 18 nt, Human
uaccaaacugccaaaauu

SEQ ID NO: 1012879 - RNA, 23 nt, Human
uagguacaauguauacuauuugg

SEQ ID NO: 1012880 - RNA, 18 nt, Human
ucaaaggugggagugggg

SEQ ID NO: 1012881 - RNA, 22 nt, Human
ucccaaaauuuaacaauagaca

SEQ ID NO: 1012882 - RNA, 19 nt, Human
ucugaagcuccaaguuagc

SEQ ID NO: 1012883 - RNA, 21 nt, Human
ucuuaucuuuugcaacaacau

SEQ ID NO: 1012884 - RNA, 23 nt, Human
ugaaguaaugauacagaaaguca

SEQ ID NO: 1012885 - RNA, 18 nt, Human
ugccaaaauuaaaagaaa

SEQ ID NO: 1012886 - RNA, 18 nt, Human
uggaggccauuaagugaa

SEQ ID NO: 1012887 - RNA, 18 nt, Human
ugggaguggggugagaga

SEQ ID NO: 1012888 - RNA, 21 nt, Human
ugugagacggaaucagcagca

SEQ ID NO: 1012889 - RNA, 25 nt, Human
aaacacaacagcacguucaccaaac

SEQ ID NO: 1012890 - RNA, 20 nt, Human
aaacauuaaagguguacgcu

SEQ ID NO: 1012891 - RNA, 25 nt, Human
aaacuacuaaauagacuaucauuua

SEQ ID NO: 1012892 - RNA, 21 nt, Human
aacacacauauguacacagga

SEQ ID NO: 1012893 - RNA, 21 nt, Human
aacagcacguucaccaaacaa

SEQ ID NO: 1012894 - RNA, 19 nt, Human
aacauuaaagguguacgcu

SEQ ID NO: 1012895 - RNA, 20 nt, Human
aaccaaacaaccccucacaa

SEQ ID NO: 1012896 - RNA, 23 nt, Human
aaccaaacaaccccucacaagua

SEQ ID NO: 1012897 - RNA, 19 nt, Human
aaccgcuggcuuuccccug

SEQ ID NO: 1012898 - RNA, 21 nt, Human
aaccuaaacuuuuaagacuaa

SEQ ID NO: 1012899 - RNA, 19 nt, Human
aacuacuaaauagacuauc

SEQ ID NO: 1012900 - RNA, 21 nt, Human
aagcaacaagagcguucccag

SEQ ID NO: 1012901 - RNA, 24 nt, Human
aagcaagagaugagcacuucagaa

SEQ ID NO: 1012902 - RNA, 27 nt, Human
aagcugggaugaaguuugggacugugg

SEQ ID NO: 1012903 - RNA, 23 nt, Human
aauuucauaacugacauaugcca

SEQ ID NO: 1012904 - RNA, 18 nt, Human
accccaggguuuugcagc

SEQ ID NO: 1012905 - RNA, 23 nt, Human
acuggggugggcaggccccuggg

SEQ ID NO: 1012906 - RNA, 18 nt, Human
agaagaaaguggucuagu

SEQ ID NO: 1012907 - RNA, 26 nt, Human
agagauuaguuacagugacuggauaa

SEQ ID NO: 1012908 - RNA, 23 nt, Human
agcaacaagagcguucccaggaa

SEQ ID NO: 1012909 - RNA, 21 nt, Human
aggcaaccaaacaaccccuca

SEQ ID NO: 1012910 - RNA, 18 nt, Human
aggccuacccacgcuugu

SEQ ID NO: 1012911 - RNA, 23 nt, Human
aguggaaucauuaagaaaugucu

SEQ ID NO: 1012912 - RNA, 20 nt, Human
auacaauguacaugcaugug

SEQ ID NO: 1012913 - RNA, 20 nt, Human
auauguacacaggaacauuc

SEQ ID NO: 1012914 - RNA, 20 nt, Human
augaaguuugggacuguggc

SEQ ID NO: 1012915 - RNA, 25 nt, Human
augaccucaacacccagugucagaa

SEQ ID NO: 1012916 - RNA, 23 nt, Human
caaccuaaacuuuuaagacuaaa

SEQ ID NO: 1012917 - RNA, 21 nt, Human
caaugaagccacauaugucuc

SEQ ID NO: 1012918 - RNA, 24 nt, Human
cacauccugcagagcaugugugcg

SEQ ID NO: 1012919 - RNA, 21 nt, Human
cacuggggugggcaggccccu

SEQ ID NO: 1012920 - RNA, 21 nt, Human
cagaacggccagauucaagca

SEQ ID NO: 1012921 - RNA, 20 nt, Human
cagugccaguaaaaucaaua

SEQ ID NO: 1012922 - RNA, 20 nt, Human
ccaacuaaccaaccaaucaa

SEQ ID NO: 1012923 - RNA, 24 nt, Human
ccacacauaugggaacuacaggau

SEQ ID NO: 1012924 - RNA, 19 nt, Human
ccacuggauggcacugggg

SEQ ID NO: 1012925 - RNA, 21 nt, Human
ccaucucuggcagggaaaaac

SEQ ID NO: 1012926 - RNA, 23 nt, Human
ccaucucuggcagggaaaaacua

SEQ ID NO: 1012927 - RNA, 18 nt, Human
cccacuggaaaacaaagu

SEQ ID NO: 1012928 - RNA, 23 nt, Human
cccaggaaccgcuggcuuucccc

SEQ ID NO: 1012929 - RNA, 24 nt, Human
ccucacaaguauauacagaucaag

SEQ ID NO: 1012930 - RNA, 18 nt, Human
ccucugggcccccuggcu

SEQ ID NO: 1012931 - RNA, 19 nt, Human
cgucaauggaaauaacauc

SEQ ID NO: 1012932 - RNA, 25 nt, Human
cuaccgcucucacaccucuuuccug

SEQ ID NO: 1012933 - RNA, 20 nt, Human
cuccucugggcccccuggcu

SEQ ID NO: 1012934 - RNA, 21 nt, Human
gcacuggggugggcaggcccc

SEQ ID NO: 1012935 - RNA, 20 nt, Human
gccacaugaccucaacaccc

SEQ ID NO: 1012936 - RNA, 19 nt, Human
gcuagaaccagcacaaucu

SEQ ID NO: 1012937 - RNA, 21 nt, Human
ggaaggacagagcaacaucgg

SEQ ID NO: 1012938 - RNA, 22 nt, Human
gggaaaaacuaccuggugacag

SEQ ID NO: 1012939 - RNA, 20 nt, Human
gucacggcggcaggcagcag

SEQ ID NO: 1012940 - RNA, 20 nt, Human
uaaaacgcagucacggcggc

SEQ ID NO: 1012941 - RNA, 25 nt, Human
uaaaugauuuugcccaacuaaccaa

SEQ ID NO: 1012942 - RNA, 22 nt, Human
uaaauuaccaaugaagccacau

SEQ ID NO: 1012943 - RNA, 26 nt, Human
uaaguggaaucauuaaggguguauaa

SEQ ID NO: 1012944 - RNA, 23 nt, Human
uacauuuaccucaucauuccaaa

SEQ ID NO: 1012945 - RNA, 22 nt, Human
uacgcugggaugacaaugcaga

SEQ ID NO: 1012946 - RNA, 20 nt, Human
uacuggccuugguugccugu

SEQ ID NO: 1012947 - RNA, 22 nt, Human
uagccaaggagagauuuauguu

SEQ ID NO: 1012948 - RNA, 19 nt, Human
uagcuaaacccuaggaaau

SEQ ID NO: 1012949 - RNA, 21 nt, Human
uauuaugagcuagaaccagca

SEQ ID NO: 1012950 - RNA, 19 nt, Human
ucaaacaucguccacccca

SEQ ID NO: 1012951 - RNA, 27 nt, Human
ucaacacccagugucagaacggccaga

SEQ ID NO: 1012952 - RNA, 19 nt, Human
ucaaccuucguggcggggg

SEQ ID NO: 1012953 - RNA, 19 nt, Human
ucaguaguaguuugaaggc

SEQ ID NO: 1012954 - RNA, 28 nt, Human
ucccaggaaccgcuggcuuuccccugcc

SEQ ID NO: 1012955 - RNA, 23 nt, Human
ucuaaaaccaaggaacaguauag

SEQ ID NO: 1012956 - RNA, 22 nt, Human
ugaaauaaccaauguuuguucc

SEQ ID NO: 1012957 - RNA, 21 nt, Human
ugcccaacuaaccaaccaauc

SEQ ID NO: 1012958 - RNA, 22 nt, Human
ugccccugagaagcaugcacug

SEQ ID NO: 1012959 - RNA, 21 nt, Human
ugcggcaggcugccuaccgcu

SEQ ID NO: 1012960 - RNA, 20 nt, Human
uggaaaacuauuuucuacaa

SEQ ID NO: 1012961 - RNA, 18 nt, Human
uggaaucauuaagaaaug

SEQ ID NO: 1012962 - RNA, 20 nt, Human
uggcacgagcggguucugcc

SEQ ID NO: 1012963 - RNA, 18 nt, Human
ugggaacuacaggauugc

SEQ ID NO: 1012964 - RNA, 19 nt, Human
ugggaacuacaggauugca

SEQ ID NO: 1012965 - RNA, 20 nt, Human
uggugugaggaaggacagag

SEQ ID NO: 1012966 - RNA, 21 nt, Human
uggugugaggaaggacagagc

SEQ ID NO: 1012967 - RNA, 23 nt, Human
uguacacagggaguucaaucauc

SEQ ID NO: 1012968 - RNA, 22 nt, Human
uguguacauaauuaaucaugaa

SEQ ID NO: 1012969 - RNA, 26 nt, Human
uguuuuauuuaacacacauauguaca

SEQ ID NO: 1012970 - RNA, 19 nt, Human
uuacauuucucuagcuaug

SEQ ID NO: 1012971 - RNA, 20 nt, Human
uuagaagcauaaugaacacc

SEQ ID NO: 1012972 - RNA, 19 nt, Human
uugcuccucugggcccccu

SEQ ID NO: 1012973 - RNA, 23 nt, Human
aaaaaaacccaacagcacuuggg

SEQ ID NO: 1012974 - RNA, 24 nt, Human
aaaaauauauauucccugaauuag

SEQ ID NO: 1012975 - RNA, 19 nt, Human
aaaauauauauucccugaa

SEQ ID NO: 1012976 - RNA, 27 nt, Human
aaacaugcacucaaaucauuaaaaaua

SEQ ID NO: 1012977 - RNA, 25 nt, Human
aaaccaggagaucuuggacagaaga

SEQ ID NO: 1012978 - RNA, 19 nt, Human
aagaaaaaaaaaaaagugg

SEQ ID NO: 1012979 - RNA, 21 nt, Human
aagaagaaaaaaacccaacag

SEQ ID NO: 1012980 - RNA, 20 nt, Human
aagauuauggaagagcaaga

SEQ ID NO: 1012981 - RNA, 23 nt, Human
acaaagaccagcaagugcaaaua

SEQ ID NO: 1012982 - RNA, 21 nt, Human
agaaaaaaaaaaaagugguag

SEQ ID NO: 1012983 - RNA, 19 nt, Human
agaaaccauuucaaugaaa

SEQ ID NO: 1012984 - RNA, 18 nt, Human
agaauuccccagagcaca

SEQ ID NO: 1012985 - RNA, 23 nt, Human
agccaggggaagaaaaaaaaaaa

SEQ ID NO: 1012986 - RNA, 19 nt, Human
agcugacugggaggaaccc

SEQ ID NO: 1012987 - RNA, 19 nt, Human
aggaaaagccgugauagua

SEQ ID NO: 1012988 - RNA, 18 nt, Human
aggggaagaaaaaaaaaa

SEQ ID NO: 1012989 - RNA, 22 nt, Human
agucuuauagcaggccauuugu

SEQ ID NO: 1012990 - RNA, 20 nt, Human
agugcacaauuuaaaagaaa

SEQ ID NO: 1012991 - RNA, 24 nt, Human
auaaucaguaucuccagcugaaau

SEQ ID NO: 1012992 - RNA, 18 nt, Human
auggaagagcaagauuuu

SEQ ID NO: 1012993 - RNA, 23 nt, Human
augucuguacaagagcugacugg

SEQ ID NO: 1012994 - RNA, 24 nt, Human
caaauucagaaaauaacugcauga

SEQ ID NO: 1012995 - RNA, 23 nt, Human
caauggacuuucucuaauugccu

SEQ ID NO: 1012996 - RNA, 18 nt, Human
cacaugucuguacaagag

SEQ ID NO: 1012997 - RNA, 21 nt, Human
cagaaaauaacugcaugacac

SEQ ID NO: 1012998 - RNA, 23 nt, Human
cagaauuccccagagcacauguc

SEQ ID NO: 1012999 - RNA, 24 nt, Human
caugacaccauaguugucgugguc

SEQ ID NO: 1013000 - RNA, 23 nt, Human
cauucuacucaaguagccagggg

SEQ ID NO: 1013001 - RNA, 22 nt, Human
ccaccucuccaccuacagacuc

SEQ ID NO: 1013002 - RNA, 21 nt, Human
ccagagcacaugucuguacaa

SEQ ID NO: 1013003 - RNA, 22 nt, Human
ccuacagacucugcaauuuauu

SEQ ID NO: 1013004 - RNA, 24 nt, Human
ccucuccaccuacagacucugcaa

SEQ ID NO: 1013005 - RNA, 25 nt, Human
ccugugcugaaugcugcuacaaaga

SEQ ID NO: 1013006 - RNA, 22 nt, Human
ccuuuggaaaaaugccugauuu

SEQ ID NO: 1013007 - RNA, 22 nt, Human
cgcggggcgggaggcgggagcg

SEQ ID NO: 1013008 - RNA, 19 nt, Human
cuccaaagaugccaauaag

SEQ ID NO: 1013009 - RNA, 21 nt, Human
cugaaugcugcuacaaagacc

SEQ ID NO: 1013010 - RNA, 20 nt, Human
cugguccuagagguuuaaaa

SEQ ID NO: 1013011 - RNA, 22 nt, Human
cuuuuagcccuguacacucuau

SEQ ID NO: 1013012 - RNA, 20 nt, Human
gaaucaugucuucaaggccu

SEQ ID NO: 1013013 - RNA, 21 nt, Human
gcacucaaaucauuaaaaaua

SEQ ID NO: 1013014 - RNA, 21 nt, Human
gcgcggggcgggaggcgggag

SEQ ID NO: 1013015 - RNA, 22 nt, Human
gcgcggggcgggaggcgggagc

SEQ ID NO: 1013016 - RNA, 18 nt, Human
gggaagaaaaaaaaaaaa

SEQ ID NO: 1013017 - RNA, 19 nt, Human
uaaaacaaagagauggaga

SEQ ID NO: 1013018 - RNA, 24 nt, Human
uaaagaacacacuucuaaaucuaa

SEQ ID NO: 1013019 - RNA, 23 nt, Human
uaacugauuaagaccugccucuu

SEQ ID NO: 1013020 - RNA, 19 nt, Human
uaacugcaugacacuugcu

SEQ ID NO: 1013021 - RNA, 20 nt, Human
uaagaagaaaaaaacccaac

SEQ ID NO: 1013022 - RNA, 19 nt, Human
uaccagcacuuuauaaauu

SEQ ID NO: 1013023 - RNA, 19 nt, Human
uagaaaccauuucaaugaa

SEQ ID NO: 1013024 - RNA, 24 nt, Human
uagccaggggaagaaaaaaaaaaa

SEQ ID NO: 1013025 - RNA, 21 nt, Human
uauagaacagggguuagaaac

SEQ ID NO: 1013026 - RNA, 18 nt, Human
uauauagcauuuuguuag

SEQ ID NO: 1013027 - RNA, 24 nt, Human
uauguagucaaauacugucaaaau

SEQ ID NO: 1013028 - RNA, 23 nt, Human
uauuuccaacacucuacuucaga

SEQ ID NO: 1013029 - RNA, 22 nt, Human
ucaaauacugucaaaauagauc

SEQ ID NO: 1013030 - RNA, 21 nt, Human
ucagaaaauaacugcaugaca

SEQ ID NO: 1013031 - RNA, 18 nt, Human
ucccugaauuguaagaca

SEQ ID NO: 1013032 - RNA, 22 nt, Human
ucccugaauuguaagacaaaaa

SEQ ID NO: 1013033 - RNA, 25 nt, Human
uccuccaaagaugccaauaagggag

SEQ ID NO: 1013034 - RNA, 18 nt, Human
ucuuuccaccucuccacc

SEQ ID NO: 1013035 - RNA, 22 nt, Human
ugacaaauucagaaaauaacug

SEQ ID NO: 1013036 - RNA, 21 nt, Human
uggaaaggaauaguagucuua

SEQ ID NO: 1013037 - RNA, 23 nt, Human
uguaacuacuauagaacaggggu

SEQ ID NO: 1013038 - RNA, 23 nt, Human
uguaccaauuguuuucagaugcc

SEQ ID NO: 1013039 - RNA, 22 nt, Human
uguagucaaauacugucaaaau

SEQ ID NO: 1013040 - RNA, 23 nt, Human
ugucaaaauagaucugcccccaa

SEQ ID NO: 1013041 - RNA, 22 nt, Human
uuagugcacaauuuaaaagaaa

SEQ ID NO: 1013042 - RNA, 26 nt, Human
uuauauucuuccucuaaggaaucaug

SEQ ID NO: 1013043 - RNA, 21 nt, Human
uuguguaccaauuguuuucag

SEQ ID NO: 1013044 - RNA, 23 nt, Human
uuuagaaaauuccuccaaagaug

SEQ ID NO: 1013045 - RNA, 20 nt, Human
uuuccaccucuccaccuaca

SEQ ID NO: 1013046 - RNA, 19 nt, Human
uuuugaaauuuguucacuu

SEQ ID NO: 1013047 - RNA, 21 nt, Human
aagagggaauacagagucccg

SEQ ID NO: 1013048 - RNA, 21 nt, Human
aagagggaauacagagucccg

SEQ ID NO: 1013049 - RNA, 22 nt, Human
acugcucagccuggugguggcu

SEQ ID NO: 1013050 - RNA, 22 nt, Human
acugcucagccuggugguggcu

SEQ ID NO: 1013051 - RNA, 20 nt, Human
agaguggaagagauugacug

SEQ ID NO: 1013052 - RNA, 25 nt, Human
agccauugcggcagcauuucaucug

SEQ ID NO: 1013053 - RNA, 27 nt, Human
agccauugcggcagcauuucaucuggc

SEQ ID NO: 1013054 - RNA, 20 nt, Human
agccuggugguggcuggacc

SEQ ID NO: 1013055 - RNA, 20 nt, Human
aguggaagagauugacugaa

SEQ ID NO: 1013056 - RNA, 22 nt, Human
caagagggaauacagagucccg

SEQ ID NO: 1013057 - RNA, 20 nt, Human
cacugcucagccugguggug

SEQ ID NO: 1013058 - RNA, 20 nt, Human
cacugcucagccugguggug

SEQ ID NO: 1013059 - RNA, 20 nt, Human
cagcccaagagggaauacag

SEQ ID NO: 1013060 - RNA, 20 nt, Human
cagcccaagagggaauacag

SEQ ID NO: 1013061 - RNA, 25 nt, Human
cccuccuuaucuuugagagaguccc

SEQ ID NO: 1013062 - RNA, 19 nt, Human
ccugggggcaggaacccuc

SEQ ID NO: 1013063 - RNA, 24 nt, Human
cgaagggcgauacaguguccaggg

SEQ ID NO: 1013064 - RNA, 22 nt, Human
gaaagggagaagcuguggucag

SEQ ID NO: 1013065 - RNA, 22 nt, Human
gaaagggagaagcuguggucag

SEQ ID NO: 1013066 - RNA, 18 nt, Human
gggaaagggagaagcugu

SEQ ID NO: 1013067 - RNA, 18 nt, Human
gggaaagggagaagcugu

SEQ ID NO: 1013068 - RNA, 27 nt, Human
gggaaaguuaauguucaccugggggca

SEQ ID NO: 1013069 - RNA, 19 nt, Human
ggggagggcaggugggcug

SEQ ID NO: 1013070 - RNA, 19 nt, Human
ggggagggcaggugggcug

SEQ ID NO: 1013071 - RNA, 18 nt, Human
gguugggaaagggagaag

SEQ ID NO: 1013072 - RNA, 18 nt, Human
gguugggaaagggagaag

SEQ ID NO: 1013073 - RNA, 22 nt, Human
gugacacaggacaccuucccac

SEQ ID NO: 1013074 - RNA, 20 nt, Human
uacuuuauugguugggaaag

SEQ ID NO: 1013075 - RNA, 20 nt, Human
uacuuuauugguugggaaag

SEQ ID NO: 1013076 - RNA, 19 nt, Human
ugaaagacgacgaagggcg

SEQ ID NO: 1013077 - RNA, 20 nt, Human
ugguggcuggaccucagaaa

SEQ ID NO: 1013078 - RNA, 21 nt, Human
ugguggcuggaccucagaaau

SEQ ID NO: 1013079 - RNA, 23 nt, Human
uguucaccugggggcaggaaccc

SEQ ID NO: 1013080 - RNA, 22 nt, Human
uuucucuccucacugcucagcc

SEQ ID NO: 1013081 - RNA, 22 nt, Human
uuucucuccucacugcucagcc

SEQ ID NO: 1013082 - RNA, 19 nt, Human
uuuuuuuuuuuuuuuugcu

SEQ ID NO: 1013083 - RNA, 22 nt, Human
acaguccaguugggguucaugg

SEQ ID NO: 1013084 - RNA, 23 nt, Human
agacaaaucagcacagcuagggc

SEQ ID NO: 1013085 - RNA, 22 nt, Human
agcggcaggaggagaagcagag

SEQ ID NO: 1013086 - RNA, 27 nt, Human
aggaaaagcuuccagaauuaccaaaga

SEQ ID NO: 1013087 - RNA, 18 nt, Human
auccaggauuccagagac

SEQ ID NO: 1013088 - RNA, 21 nt, Human
augucacaagccccaggaugu

SEQ ID NO: 1013089 - RNA, 19 nt, Human
caagccccaggaugucacc

SEQ ID NO: 1013090 - RNA, 18 nt, Human
caccacacacccacuacc

SEQ ID NO: 1013091 - RNA, 21 nt, Human
caccacacacccacuacccaa

SEQ ID NO: 1013092 - RNA, 18 nt, Human
cacuacccaauccagggc

SEQ ID NO: 1013093 - RNA, 20 nt, Human
cagagacccaagagcaagaa

SEQ ID NO: 1013094 - RNA, 26 nt, Human
cagccuuuaucgggaaagagaagcac

SEQ ID NO: 1013095 - RNA, 24 nt, Human
caggaaaagcuuccagaauuacca

SEQ ID NO: 1013096 - RNA, 23 nt, Human
ccacuacccaauccagggcuauu

SEQ ID NO: 1013097 - RNA, 21 nt, Human
ccaggauuccagagacccaag

SEQ ID NO: 1013098 - RNA, 22 nt, Human
ccucacaguccaguugggguuu

SEQ ID NO: 1013099 - RNA, 23 nt, Human
ccugacuugcaacauuuuucucc

SEQ ID NO: 1013100 - RNA, 23 nt, Human
ccugcaguuauccaggauuccag

SEQ ID NO: 1013101 - RNA, 23 nt, Human
cggaaucagaccucacaguccag

SEQ ID NO: 1013102 - RNA, 22 nt, Human
gaaaagcuuccagaauuaccaa

SEQ ID NO: 1013103 - RNA, 18 nt, Human
gcaggaggagaagcagag

SEQ ID NO: 1013104 - RNA, 20 nt, Human
gccccaggaugucacccucu

SEQ ID NO: 1013105 - RNA, 19 nt, Human
ggaggagaagcagagcaga

SEQ ID NO: 1013106 - RNA, 20 nt, Human
gggaaagagaagcaccacac

SEQ ID NO: 1013107 - RNA, 23 nt, Human
uaccaaagaagcuccagacaaau

SEQ ID NO: 1013108 - RNA, 20 nt, Human
uaucgggaaagagaagcacc

SEQ ID NO: 1013109 - RNA, 23 nt, Human
ucacaagccccaggaugucaccc

SEQ ID NO: 1013110 - RNA, 18 nt, Human
ucagaccucacaguccag

SEQ ID NO: 1013111 - RNA, 20 nt, Human
uccagaauuaccaaagaagc

SEQ ID NO: 1013112 - RNA, 22 nt, Human
uccagaauuaccaaagaagcuc

SEQ ID NO: 1013113 - RNA, 23 nt, Human
ucuccagcuugacaauucucauc

SEQ ID NO: 1013114 - RNA, 20 nt, Human
ugacuugcaacauuuuucuc

SEQ ID NO: 1013115 - RNA, 20 nt, Human
ugagugccccuggaaauguc

SEQ ID NO: 1013116 - RNA, 22 nt, Human
ugcucuggucagcggcaggagg

SEQ ID NO: 1013117 - RNA, 19 nt, Human
uucccaugcucuggucagc

SEQ ID NO: 1013118 - RNA, 19 nt, Human
uucccaugcucuggucagc

SEQ ID NO: 1013119 - RNA, 20 nt, Human
uucccaugcucuggucagcg

SEQ ID NO: 1013120 - RNA, 18 nt, Human
uugggggcaggacuggug

SEQ ID NO: 1013121 - RNA, 26 nt, Human
caccaggacgggguggcgcaggcccc

SEQ ID NO: 1013122 - RNA, 23 nt, Human
ucaccaggacgggguggcgcagg

SEQ ID NO: 1013123 - RNA, 19 nt, Human
ugcguuuauucaccaggac

SEQ ID NO: 1013124 - RNA, 22 nt, Human
aaaauacccaaaacacuaugca

SEQ ID NO: 1013125 - RNA, 22 nt, Human
aagaaaagaaaauccuacagaa

SEQ ID NO: 1013126 - RNA, 20 nt, Human
agcucccgcguccgcccgcc

SEQ ID NO: 1013127 - RNA, 24 nt, Human
augaacacaauuucaaaguuacac

SEQ ID NO: 1013128 - RNA, 23 nt, Human
caccaggcaaccaacuuugcaau

SEQ ID NO: 1013129 - RNA, 20 nt, Human
caccgagugcaaaugaacac

SEQ ID NO: 1013130 - RNA, 22 nt, Human
cacgcggaggccuucgaugccc

SEQ ID NO: 1013131 - RNA, 21 nt, Human
cacguccgcagcucccgcguc

SEQ ID NO: 1013132 - RNA, 20 nt, Human
cagcaggacgcucgcgggcc

SEQ ID NO: 1013133 - RNA, 24 nt, Human
ccaccaggcaaccaacuuugcaau

SEQ ID NO: 1013134 - RNA, 18 nt, Human
ccccgcgccgcgagaccc

SEQ ID NO: 1013135 - RNA, 18 nt, Human
ccccgcgccgcgagaccc

SEQ ID NO: 1013136 - RNA, 22 nt, Human
ccccgcgccgcgagacccucgc

SEQ ID NO: 1013137 - RNA, 21 nt, Human
ccccggcgcccggcgcggccg

SEQ ID NO: 1013138 - RNA, 20 nt, Human
cccggcgcccggcgcggccg

SEQ ID NO: 1013139 - RNA, 22 nt, Human
cccggcgcccggcgcggccgca

SEQ ID NO: 1013140 - RNA, 21 nt, Human
cccuccgcuaggccccgcgcc

SEQ ID NO: 1013141 - RNA, 21 nt, Human
cccuuaaaaaagcaacauccu

SEQ ID NO: 1013142 - RNA, 21 nt, Human
ccgccgcccuccccggcgccc

SEQ ID NO: 1013143 - RNA, 21 nt, Human
cuccccggcgcccggcgcggc

SEQ ID NO: 1013144 - RNA, 23 nt, Human
cuccccggcgcccggcgcggccg

SEQ ID NO: 1013145 - RNA, 18 nt, Human
gcgcccggcgcggccgca

SEQ ID NO: 1013146 - RNA, 20 nt, Human
gucuguucuaacuuccacca

SEQ ID NO: 1013147 - RNA, 23 nt, Human
uaaccgcugcaccgagugcaaau

SEQ ID NO: 1013148 - RNA, 21 nt, Human
uaacuuccaccaggcaaccaa

SEQ ID NO: 1013149 - RNA, 22 nt, Human
ucaaaguuacacauuuauucga

SEQ ID NO: 1013150 - RNA, 20 nt, Human
uccgcagcucccgcguccgc

SEQ ID NO: 1013151 - RNA, 19 nt, Human
ucgcucggggaaccagcag

SEQ ID NO: 1013152 - RNA, 21 nt, Human
ucugcugucgugcccugagga

SEQ ID NO: 1013153 - RNA, 24 nt, Human
ugaaaugacauuaugacuuaaaua

SEQ ID NO: 1013154 - RNA, 19 nt, Human
uucauugcacaaagcugcc

SEQ ID NO: 1013155 - RNA, 26 nt, Human
uuuuuuuuuuuuuuuuuuuacuuuga

SEQ ID NO: 1013156 - RNA, 21 nt, Human
aaaaugcuccccucccaccca

SEQ ID NO: 1013157 - RNA, 18 nt, Human
aaacaaaauacccccaaa

SEQ ID NO: 1013158 - RNA, 26 nt, Human
aaacaucccucagccuagcacccuga

SEQ ID NO: 1013159 - RNA, 21 nt, Human
aaaguccuuugcagccccaca

SEQ ID NO: 1013160 - RNA, 24 nt, Human
aagaaguccucauccaaucagcuu

SEQ ID NO: 1013161 - RNA, 21 nt, Human
aagcaguggggugaggggucc

SEQ ID NO: 1013162 - RNA, 19 nt, Human
aaggcccaggcccacgccc

SEQ ID NO: 1013163 - RNA, 18 nt, Human
aauuccuugcccuuucuc

SEQ ID NO: 1013164 - RNA, 18 nt, Human
accugccaagcuuccccc

SEQ ID NO: 1013165 - RNA, 19 nt, Human
accugccaagcuuccccca

SEQ ID NO: 1013166 - RNA, 21 nt, Human
agaaaaccaaagcaucuggug

SEQ ID NO: 1013167 - RNA, 22 nt, Human
agaugagaugcauagauggaga

SEQ ID NO: 1013168 - RNA, 20 nt, Human
aggaaggauggaugcagggu

SEQ ID NO: 1013169 - RNA, 23 nt, Human
aggaaggauggaugcaggguuug

SEQ ID NO: 1013170 - RNA, 25 nt, Human
aggcuggagugcaguggcgcaaucu

SEQ ID NO: 1013171 - RNA, 19 nt, Human
aggguuugagauccuacug

SEQ ID NO: 1013172 - RNA, 22 nt, Human
agugcaguggcgcaaucucgug

SEQ ID NO: 1013173 - RNA, 21 nt, Human
aguggacaggagaaggaagga

SEQ ID NO: 1013174 - RNA, 20 nt, Human
augaaauauaauauaccugc

SEQ ID NO: 1013175 - RNA, 22 nt, Human
caaaaacaaaauacccccaaaa

SEQ ID NO: 1013176 - RNA, 19 nt, Human
caaauggcuccuguucccu

SEQ ID NO: 1013177 - RNA, 19 nt, Human
caacaaggcaccuuucccc

SEQ ID NO: 1013178 - RNA, 20 nt, Human
caacaaggcaccuuucccca

SEQ ID NO: 1013179 - RNA, 24 nt, Human
caccuuuccccaagaggaaggcag

SEQ ID NO: 1013180 - RNA, 20 nt, Human
cacuaaaaaugcuccccucc

SEQ ID NO: 1013181 - RNA, 22 nt, Human
cacuguucucucuccgucuuua

SEQ ID NO: 1013182 - RNA, 22 nt, Human
cagcaggugagaacaaaaacaa

SEQ ID NO: 1013183 - RNA, 19 nt, Human
cagcuccuuccaugagggg

SEQ ID NO: 1013184 - RNA, 20 nt, Human
cauccaaucagcuuccuacc

SEQ ID NO: 1013185 - RNA, 23 nt, Human
cauccaaucagcuuccuaccuag

SEQ ID NO: 1013186 - RNA, 18 nt, Human
cccacaaagccagcuccu

SEQ ID NO: 1013187 - RNA, 22 nt, Human
cccaggcuggagugcaguggcg

SEQ ID NO: 1013188 - RNA, 18 nt, Human
cccauccugcugucggaa

SEQ ID NO: 1013189 - RNA, 20 nt, Human
ccccaaaaauaaagcagacc

SEQ ID NO: 1013190 - RNA, 18 nt, Human
ccccacaaagccagcucc

SEQ ID NO: 1013191 - RNA, 20 nt, Human
ccccacaaagccagcuccuu

SEQ ID NO: 1013192 - RNA, 22 nt, Human
cccccaaaaauaaagcagaccc

SEQ ID NO: 1013193 - RNA, 24 nt, Human
cccccaaaaauaaagcagacccaa

SEQ ID NO: 1013194 - RNA, 23 nt, Human
ccggaagacaaagaaacaaccua

SEQ ID NO: 1013195 - RNA, 22 nt, Human
ccucuacacauagcaacaguug

SEQ ID NO: 1013196 - RNA, 23 nt, Human
ccugaggaacgggaccaagccag

SEQ ID NO: 1013197 - RNA, 21 nt, Human
ccugcccuucuuuguuauccu

SEQ ID NO: 1013198 - RNA, 22 nt, Human
ccugggaaggcaagggugguag

SEQ ID NO: 1013199 - RNA, 22 nt, Human
ccuggggugguggggugggggg

SEQ ID NO: 1013200 - RNA, 18 nt, Human
cuaaaaaugcuccccucc

SEQ ID NO: 1013201 - RNA, 25 nt, Human
cucacuucuucacccuucuguacuc

SEQ ID NO: 1013202 - RNA, 23 nt, Human
cucaugccacgcucugagcaccu

SEQ ID NO: 1013203 - RNA, 20 nt, Human
cucugucgcccaggcuggag

SEQ ID NO: 1013204 - RNA, 20 nt, Human
cugaaggacagaaagagcca

SEQ ID NO: 1013205 - RNA, 18 nt, Human
cugcuguguuaaaccgug

SEQ ID NO: 1013206 - RNA, 21 nt, Human
cuggcucugucgcccaggcug

SEQ ID NO: 1013207 - RNA, 19 nt, Human
cuuccuaccuagacugggg

SEQ ID NO: 1013208 - RNA, 21 nt, Human
cuuccuaucucccaccagagg

SEQ ID NO: 1013209 - RNA, 21 nt, Human
gaaaaacaucccucagccuag

SEQ ID NO: 1013210 - RNA, 24 nt, Human
gaacaaaaacaaaauacccccaaa

SEQ ID NO: 1013211 - RNA, 21 nt, Human
gagaacaaaaacaaaauaccc

SEQ ID NO: 1013212 - RNA, 20 nt, Human
gagaagaagagaagguccau

SEQ ID NO: 1013213 - RNA, 21 nt, Human
gagacggagucuggcucuguc

SEQ ID NO: 1013214 - RNA, 18 nt, Human
gaggaaggauggaugcag

SEQ ID NO: 1013215 - RNA, 18 nt, Human
gcauagaagaguaucuga

SEQ ID NO: 1013216 - RNA, 24 nt, Human
gccagucagaaaagacugaggcag

SEQ ID NO: 1013217 - RNA, 18 nt, Human
gcccaagagccccauccu

SEQ ID NO: 1013218 - RNA, 19 nt, Human
gcccaggcuggagugcagu

SEQ ID NO: 1013219 - RNA, 20 nt, Human
gcccaggcuggagugcagug

SEQ ID NO: 1013220 - RNA, 20 nt, Human
gcccuaucuuccuaucuccc

SEQ ID NO: 1013221 - RNA, 22 nt, Human
gcccuaucuuccuaucucccac

SEQ ID NO: 1013222 - RNA, 25 nt, Human
gcucugucgcccaggcuggagugca

SEQ ID NO: 1013223 - RNA, 23 nt, Human
gcugaaggacagaaagagccagu

SEQ ID NO: 1013224 - RNA, 19 nt, Human
gcuggagugcaguggcgca

SEQ ID NO: 1013225 - RNA, 20 nt, Human
ggaaaaaaagaaguccucau

SEQ ID NO: 1013226 - RNA, 18 nt, Human
ggacccggaagacaaaga

SEQ ID NO: 1013227 - RNA, 18 nt, Human
ggacuuaaaaguccuuug

SEQ ID NO: 1013228 - RNA, 24 nt, Human
ggggggcagcaggugagaacaaaa

SEQ ID NO: 1013229 - RNA, 22 nt, Human
gggugguggggugggggggcag

SEQ ID NO: 1013230 - RNA, 23 nt, Human
gguagagaaaggaacaggaagag

SEQ ID NO: 1013231 - RNA, 25 nt, Human
gguggggugggggggcagcagguga

SEQ ID NO: 1013232 - RNA, 26 nt, Human
guagagaaaggaacaggaagagucug

SEQ ID NO: 1013233 - RNA, 20 nt, Human
guggggugggggggcagcag

SEQ ID NO: 1013234 - RNA, 21 nt, Human
guuguagaaaaccaaagcauc

SEQ ID NO: 1013235 - RNA, 18 nt, Human
uaaaaaugcuccccuccc

SEQ ID NO: 1013236 - RNA, 24 nt, Human
uaaguccuggucaugccagccucc

SEQ ID NO: 1013237 - RNA, 25 nt, Human
uagauggaggugagcugggaggaca

SEQ ID NO: 1013238 - RNA, 23 nt, Human
uagcaacaguuguagaaaaccaa

SEQ ID NO: 1013239 - RNA, 23 nt, Human
uaguucuaaaauggucuucaguu

SEQ ID NO: 1013240 - RNA, 22 nt, Human
ucagaaaagacugaggcagaca

SEQ ID NO: 1013241 - RNA, 19 nt, Human
uccaaauaugaccuuuaaa

SEQ ID NO: 1013242 - RNA, 19 nt, Human
ucccaguuggcacuguucu

SEQ ID NO: 1013243 - RNA, 18 nt, Human
ucccucagccuagcaccc

SEQ ID NO: 1013244 - RNA, 21 nt, Human
uccuuccaugaggggcuucaa

SEQ ID NO: 1013245 - RNA, 24 nt, Human
ucgcccaggcuggagugcaguggc

SEQ ID NO: 1013246 - RNA, 22 nt, Human
ucuacacauagcaacaguugua

SEQ ID NO: 1013247 - RNA, 19 nt, Human
ucuggcucugucgcccagg

SEQ ID NO: 1013248 - RNA, 23 nt, Human
ucuggcucugucgcccaggcugg

SEQ ID NO: 1013249 - RNA, 24 nt, Human
ucuggcucugucgcccaggcugga

SEQ ID NO: 1013250 - RNA, 24 nt, Human
ucugucgcccaggcuggagugcag

SEQ ID NO: 1013251 - RNA, 22 nt, Human
ucuucaguuuauuucacccuuu

SEQ ID NO: 1013252 - RNA, 21 nt, Human
ugaaauauaauauaccugcca

SEQ ID NO: 1013253 - RNA, 22 nt, Human
ugaaauauaauauaccugccaa

SEQ ID NO: 1013254 - RNA, 20 nt, Human
ugagaacaaaaacaaaauac

SEQ ID NO: 1013255 - RNA, 20 nt, Human
ugagguuaaggcccaggccu

SEQ ID NO: 1013256 - RNA, 22 nt, Human
ugcauuggagaaacauguuagg

SEQ ID NO: 1013257 - RNA, 21 nt, Human
ugcugcagagaacugacuagu

SEQ ID NO: 1013258 - RNA, 27 nt, Human
ugcuucacuaaaaaugcuccccuccca

SEQ ID NO: 1013259 - RNA, 18 nt, Human
uggagugcaguggcgcaa

SEQ ID NO: 1013260 - RNA, 23 nt, Human
uggagugcaguggcgcaaucucg

SEQ ID NO: 1013261 - RNA, 24 nt, Human
uggcucugucgcccaggcuggagu

SEQ ID NO: 1013262 - RNA, 22 nt, Human
uggcuggcugccaaggaagauc

SEQ ID NO: 1013263 - RNA, 19 nt, Human
ugggaaggcaaggguggua

SEQ ID NO: 1013264 - RNA, 25 nt, Human
uggggugaggggucccagaggguuu

SEQ ID NO: 1013265 - RNA, 20 nt, Human
uggggugguggggugggggg

SEQ ID NO: 1013266 - RNA, 22 nt, Human
uggggugguggggugggggggc

SEQ ID NO: 1013267 - RNA, 19 nt, Human
ugguggggugggggggcag

SEQ ID NO: 1013268 - RNA, 21 nt, Human
uguagaaaaccaaagcaucug

SEQ ID NO: 1013269 - RNA, 21 nt, Human
uguuaggagcucucaugcagg

SEQ ID NO: 1013270 - RNA, 21 nt, Human
uucaggggaauggaagggacc

SEQ ID NO: 1013271 - RNA, 20 nt, Human
uuccuugcccuuucuccaaa

SEQ ID NO: 1013272 - RNA, 18 nt, Human
uucuguacucugcugugu

SEQ ID NO: 1013273 - RNA, 22 nt, Human
uuuuccccauccauuucaaaga

SEQ ID NO: 1013274 - RNA, 19 nt, Human
aaagccccucccuugcccu

SEQ ID NO: 1013275 - RNA, 20 nt, Human
aacguuacccacaacaaaga

SEQ ID NO: 1013276 - RNA, 21 nt, Human
aacuggacguugagagacccg

SEQ ID NO: 1013277 - RNA, 19 nt, Human
aagccccucccuugccccc

SEQ ID NO: 1013278 - RNA, 18 nt, Human
acaaagaagaggacagag

SEQ ID NO: 1013279 - RNA, 25 nt, Human
acaaagccccucccuugcccccccc

SEQ ID NO: 1013280 - RNA, 29 nt, Human
acccacaacaaagaagaggaccgguuucg

SEQ ID NO: 1013281 - RNA, 21 nt, Human
acucuuuauuacggccugcgg

SEQ ID NO: 1013282 - RNA, 23 nt, Human
agaacaaauugagacauauccuc

SEQ ID NO: 1013283 - RNA, 21 nt, Human
agaggcagugccgcggaaucc

SEQ ID NO: 1013284 - RNA, 18 nt, Human
agggaacuccucccaccu

SEQ ID NO: 1013285 - RNA, 23 nt, Human
aguugaaucuggggucaggaguu

SEQ ID NO: 1013286 - RNA, 19 nt, Human
auaauaauagaggcagugc

SEQ ID NO: 1013287 - RNA, 22 nt, Human
caaagccccucccuugcccccc

SEQ ID NO: 1013288 - RNA, 21 nt, Human
caaaggcccacacugcucucc

SEQ ID NO: 1013289 - RNA, 21 nt, Human
cacacagcuguugguuaccug

SEQ ID NO: 1013290 - RNA, 24 nt, Human
cagaacagacgaguaaccccagcg

SEQ ID NO: 1013291 - RNA, 18 nt, Human
cagauggugcgcucagga

SEQ ID NO: 1013292 - RNA, 20 nt, Human
caguaccuaacgguuccggg

SEQ ID NO: 1013293 - RNA, 21 nt, Human
caucaauuucaugggccuacg

SEQ ID NO: 1013294 - RNA, 20 nt, Human
caucagaacagacgaguaac

SEQ ID NO: 1013295 - RNA, 20 nt, Human
ccacaacaaagaagaggaca

SEQ ID NO: 1013296 - RNA, 19 nt, Human
ccacacugcucuccuaucu

SEQ ID NO: 1013297 - RNA, 18 nt, Human
ccauccccacuguggcau

SEQ ID NO: 1013298 - RNA, 18 nt, Human
ccccgcgcgcaguguggc

SEQ ID NO: 1013299 - RNA, 18 nt, Human
cccugcgacugcaggagu

SEQ ID NO: 1013300 - RNA, 19 nt, Human
ccuucggcugucugggccu

SEQ ID NO: 1013301 - RNA, 23 nt, Human
cgacaggcagcagcgaggucgag

SEQ ID NO: 1013302 - RNA, 25 nt, Human
cggagacuuccugucgggucccugg

SEQ ID NO: 1013303 - RNA, 21 nt, Human
cgggcauguggauccguuggg

SEQ ID NO: 1013304 - RNA, 22 nt, Human
cuaauccucagaacaacucuau

SEQ ID NO: 1013305 - RNA, 19 nt, Human
cuacguaucugcucuggcc

SEQ ID NO: 1013306 - RNA, 19 nt, Human
cucucaguucaucaauuuc

SEQ ID NO: 1013307 - RNA, 19 nt, Human
cucuccuaucuaauccuca

SEQ ID NO: 1013308 - RNA, 23 nt, Human
cucuuuaccgcugcgcuccauag

SEQ ID NO: 1013309 - RNA, 19 nt, Human
cugcagcuuucuuugccaa

SEQ ID NO: 1013310 - RNA, 22 nt, Human
cugcagcuuucuuugccaaucg

SEQ ID NO: 1013311 - RNA, 22 nt, Human
cugcuuuucucugggaccucga

SEQ ID NO: 1013312 - RNA, 23 nt, Human
cuguccuuaaacaguaguaguaa

SEQ ID NO: 1013313 - RNA, 19 nt, Human
cuuggccccgcaggcugca

SEQ ID NO: 1013314 - RNA, 23 nt, Human
cuuuuccccauuuuuuuccccuu

SEQ ID NO: 1013315 - RNA, 22 nt, Human
gaacaaauugagacauauccuc

SEQ ID NO: 1013316 - RNA, 24 nt, Human
gaacagcuguugggcugucuugcg

SEQ ID NO: 1013317 - RNA, 21 nt, Human
gaacguuacccacaacaaaga

SEQ ID NO: 1013318 - RNA, 23 nt, Human
gaaggugggugaaagaagggggc

SEQ ID NO: 1013319 - RNA, 20 nt, Human
gaguaaccccagcggcucca

SEQ ID NO: 1013320 - RNA, 19 nt, Human
gagucggcggggaggggag

SEQ ID NO: 1013321 - RNA, 18 nt, Human
gcagagcugagguuccau

SEQ ID NO: 1013322 - RNA, 18 nt, Human
gccccggggagaggcgcu

SEQ ID NO: 1013323 - RNA, 19 nt, Human
gcgaagggcgggccucgcg

SEQ ID NO: 1013324 - RNA, 19 nt, Human
ggaaaaccucaggucuccc

SEQ ID NO: 1013325 - RNA, 22 nt, Human
ggaauccuuucacugaggacuc

SEQ ID NO: 1013326 - RNA, 22 nt, Human
ggcgcccaguuuuccacagccu

SEQ ID NO: 1013327 - RNA, 21 nt, Human
ggcggggaggggaggaacagc

SEQ ID NO: 1013328 - RNA, 19 nt, Human
gggcgcgggccccggggag

SEQ ID NO: 1013329 - RNA, 23 nt, Human
gggcgcgggccccggggagaggc

SEQ ID NO: 1013330 - RNA, 21 nt, Human
gggcugucuugcgcguggggc

SEQ ID NO: 1013331 - RNA, 21 nt, Human
gguaagaaggugggugaaaga

SEQ ID NO: 1013332 - RNA, 21 nt, Human
gguuccgggcucccagauagg

SEQ ID NO: 1013333 - RNA, 22 nt, Human
gucuagggucacacagcuguug

SEQ ID NO: 1013334 - RNA, 20 nt, Human
gugggugaaagaagggggcg

SEQ ID NO: 1013335 - RNA, 23 nt, Human
guugaaucuggggucaggaguuc

SEQ ID NO: 1013336 - RNA, 24 nt, Human
guuguuugcaaaguugaaucuggg

SEQ ID NO: 1013337 - RNA, 22 nt, Human
uaaacaguaguaguaacaaaaa

SEQ ID NO: 1013338 - RNA, 26 nt, Human
uaaaguugauugagucaaaggcccac

SEQ ID NO: 1013339 - RNA, 22 nt, Human
uaacaaaaacuguaaaguugau

SEQ ID NO: 1013340 - RNA, 21 nt, Human
uaagaaggugggugaaagaag

SEQ ID NO: 1013341 - RNA, 27 nt, Human
uaaggaaacugaggcucagagagacug

SEQ ID NO: 1013342 - RNA, 22 nt, Human
uacagaucucggcgcugacagg

SEQ ID NO: 1013343 - RNA, 19 nt, Human
uacggccugcgggccccgc

SEQ ID NO: 1013344 - RNA, 21 nt, Human
ucacugaggacucucggggag

SEQ ID NO: 1013345 - RNA, 20 nt, Human
uccauagacugccucuccuu

SEQ ID NO: 1013346 - RNA, 19 nt, Human
ucccccuuggaaaaccuca

SEQ ID NO: 1013347 - RNA, 22 nt, Human
ucccuugccccccccuuuuuuu

SEQ ID NO: 1013348 - RNA, 23 nt, Human
uccgggcauguggauccguuggg

SEQ ID NO: 1013349 - RNA, 18 nt, Human
uccuccgacugcggcucc

SEQ ID NO: 1013350 - RNA, 23 nt, Human
ucuaauuguaaccucagacugga

SEQ ID NO: 1013351 - RNA, 18 nt, Human
ucucccgcgacaggcagc

SEQ ID NO: 1013352 - RNA, 23 nt, Human
ucucggggagcucggggaccauc

SEQ ID NO: 1013353 - RNA, 22 nt, Human
ugaaaugaucagaagaagcugg

SEQ ID NO: 1013354 - RNA, 21 nt, Human
ugaaucuggggucaggaguuc

SEQ ID NO: 1013355 - RNA, 19 nt, Human
ugcagaauaauuuuuuuuc

SEQ ID NO: 1013356 - RNA, 19 nt, Human
ugcagccccgagugggcag

SEQ ID NO: 1013357 - RNA, 24 nt, Human
ugccgcggaauccuuucacugagg

SEQ ID NO: 1013358 - RNA, 22 nt, Human
uggcuuagugucgccugggcuu

SEQ ID NO: 1013359 - RNA, 21 nt, Human
ugggugaaagaagggggcgcc

SEQ ID NO: 1013360 - RNA, 25 nt, Human
ugggugaaagaagggggcgcccagu

SEQ ID NO: 1013361 - RNA, 21 nt, Human
ugucgggucccugggguccuc

SEQ ID NO: 1013362 - RNA, 22 nt, Human
ugucgggucccugggguccucc

SEQ ID NO: 1013363 - RNA, 20 nt, Human
uuagcucugaagagguagag

SEQ ID NO: 1013364 - RNA, 20 nt, Human
uuccugucgggucccugggg

SEQ ID NO: 1013365 - RNA, 22 nt, Human
uugaaucuggggucaggaguuc

SEQ ID NO: 1013366 - RNA, 20 nt, Human
uuuccccauuuuuuuccccu

SEQ ID NO: 1013367 - RNA, 19 nt, Human
uuugaaaugaucagaagaa

SEQ ID NO: 1013368 - RNA, 23 nt, Human
uuuucuuuuccccauuuuuuucc

SEQ ID NO: 1013369 - RNA, 31 nt, Human
uuuuuucccucucucgugguuuuucuuuuuu

SEQ ID NO: 1013370 - RNA, 26 nt, Human
aacccagucaguccuagagcccacag

SEQ ID NO: 1013371 - RNA, 19 nt, Human
agacggcgcccgccucccc

SEQ ID NO: 1013372 - RNA, 19 nt, Human
agccaggggcgccggcgca

SEQ ID NO: 1013373 - RNA, 20 nt, Human
agcuuccauucauuccccac

SEQ ID NO: 1013374 - RNA, 19 nt, Human
aggaggcugucugggcccu

SEQ ID NO: 1013375 - RNA, 22 nt, Human
aggaggcugucugggcccuuua

SEQ ID NO: 1013376 - RNA, 26 nt, Human
caagaccguaagccucagagggccag

SEQ ID NO: 1013377 - RNA, 20 nt, Human
caagaggacaaguguugugu

SEQ ID NO: 1013378 - RNA, 19 nt, Human
cacccccgggcaccgcccu

SEQ ID NO: 1013379 - RNA, 18 nt, Human
caccgcccccagagugcc

SEQ ID NO: 1013380 - RNA, 24 nt, Human
cacgcaccccaccgcccccagagu

SEQ ID NO: 1013381 - RNA, 18 nt, Human
cagaagugaguggugggg

SEQ ID NO: 1013382 - RNA, 21 nt, Human
cagcaagaauguaaccuccaa

SEQ ID NO: 1013383 - RNA, 22 nt, Human
cagcaagaauguaaccuccaag

SEQ ID NO: 1013384 - RNA, 21 nt, Human
cagcacccccgggcaccgccc

SEQ ID NO: 1013385 - RNA, 19 nt, Human
cagcccaacugaacugucu

SEQ ID NO: 1013386 - RNA, 23 nt, Human
ccagcaagaauguaaccuccaag

SEQ ID NO: 1013387 - RNA, 22 nt, Human
cccacgcaccccaccgccccca

SEQ ID NO: 1013388 - RNA, 21 nt, Human
cccagcaagaauguaaccucc

SEQ ID NO: 1013389 - RNA, 21 nt, Human
ccccaccgcccccagagugcc

SEQ ID NO: 1013390 - RNA, 24 nt, Human
ccccaccgcccccagagugccgca

SEQ ID NO: 1013391 - RNA, 19 nt, Human
ccccacgcaccccaccgcc

SEQ ID NO: 1013392 - RNA, 21 nt, Human
cccccacgcaccccaccgccc

SEQ ID NO: 1013393 - RNA, 19 nt, Human
cccccagagugccgcaaag

SEQ ID NO: 1013394 - RNA, 23 nt, Human
ccccccagcaagaauguaaccuc

SEQ ID NO: 1013395 - RNA, 24 nt, Human
cccccgcgacaacucccggugccu

SEQ ID NO: 1013396 - RNA, 19 nt, Human
cccgcuccauggggcagca

SEQ ID NO: 1013397 - RNA, 19 nt, Human
cccggaggugcagcgggcu

SEQ ID NO: 1013398 - RNA, 20 nt, Human
cccucggggggggcgggggg

SEQ ID NO: 1013399 - RNA, 21 nt, Human
cccugacgggcugggaguggg

SEQ ID NO: 1013400 - RNA, 19 nt, Human
ccgaggcccccccgcgaca

SEQ ID NO: 1013401 - RNA, 21 nt, Human
ccucagagcugagggguuccu

SEQ ID NO: 1013402 - RNA, 22 nt, Human
ccuccagcgcagcgccgggagc

SEQ ID NO: 1013403 - RNA, 20 nt, Human
ccucgaucagggcccagggg

SEQ ID NO: 1013404 - RNA, 19 nt, Human
ccucggggggggcgggggg

SEQ ID NO: 1013405 - RNA, 19 nt, Human
ccucggggggggcgggggg

SEQ ID NO: 1013406 - RNA, 25 nt, Human
ccuugcauugccacccccacgcacc

SEQ ID NO: 1013407 - RNA, 22 nt, Human
cgaucacagaccucagagcuga

SEQ ID NO: 1013408 - RNA, 21 nt, Human
cgcagcgccgggagccugcgc

SEQ ID NO: 1013409 - RNA, 20 nt, Human
cgcaggcccugacgggcugg

SEQ ID NO: 1013410 - RNA, 23 nt, Human
cgcccucggggggggcggggggu

SEQ ID NO: 1013411 - RNA, 19 nt, Human
cgcgcaggcccugacgggc

SEQ ID NO: 1013412 - RNA, 21 nt, Human
cggcgcccgccuccccgcucc

SEQ ID NO: 1013413 - RNA, 22 nt, Human
gaagaacccagucaguccuaga

SEQ ID NO: 1013414 - RNA, 21 nt, Human
gacaaguguugugucucgcuu

SEQ ID NO: 1013415 - RNA, 22 nt, Human
gagcagacggcgcccgccuccc

SEQ ID NO: 1013416 - RNA, 19 nt, Human
gaggaggcugucugggccc

SEQ ID NO: 1013417 - RNA, 21 nt, Human
gaggcuggggugccggggaac

SEQ ID NO: 1013418 - RNA, 23 nt, Human
gaggcuggggugccggggaaccc

SEQ ID NO: 1013419 - RNA, 21 nt, Human
gcaccccaccgcccccagagu

SEQ ID NO: 1013420 - RNA, 20 nt, Human
gcagacggcgcccgccuccc

SEQ ID NO: 1013421 - RNA, 20 nt, Human
gcccaugccuccccccagca

SEQ ID NO: 1013422 - RNA, 23 nt, Human
gcccucggggggggcggggggug

SEQ ID NO: 1013423 - RNA, 20 nt, Human
gcggggggugaagagcgggc

SEQ ID NO: 1013424 - RNA, 18 nt, Human
gcuuccauucauucccca

SEQ ID NO: 1013425 - RNA, 19 nt, Human
ggacuggagagccaggggc

SEQ ID NO: 1013426 - RNA, 22 nt, Human
ggcccggaggugcagcgggcuc

SEQ ID NO: 1013427 - RNA, 22 nt, Human
gggaacccuccagcgcagcgcc

SEQ ID NO: 1013428 - RNA, 19 nt, Human
gggaaugguggaggaggcc

SEQ ID NO: 1013429 - RNA, 19 nt, Human
gggcccggaggugcagcgg

SEQ ID NO: 1013430 - RNA, 19 nt, Human
gggcuucggggagggagga

SEQ ID NO: 1013431 - RNA, 18 nt, Human
ggggacgggaggcugggg

SEQ ID NO: 1013432 - RNA, 23 nt, Human
ggggggcccggaggugcagcggg

SEQ ID NO: 1013433 - RNA, 23 nt, Human
ggggugaagagcgggcgaaccgg

SEQ ID NO: 1013434 - RNA, 22 nt, Human
ggugaaaggauggagacagacu

SEQ ID NO: 1013435 - RNA, 24 nt, Human
ggugcagcgggcuggggacgggag

SEQ ID NO: 1013436 - RNA, 23 nt, Human
gguggaggaggcugucugggccc

SEQ ID NO: 1013437 - RNA, 22 nt, Human
guuuauugcccaugccuccccc

SEQ ID NO: 1013438 - RNA, 23 nt, Human
uaagaucaugugguccaaucucc

SEQ ID NO: 1013439 - RNA, 21 nt, Human
uauugcccaugccucccccca

SEQ ID NO: 1013440 - RNA, 22 nt, Human
uauuucuuuuuuuuaauccucc

SEQ ID NO: 1013441 - RNA, 23 nt, Human
ucacagcccagugggacuggaga

SEQ ID NO: 1013442 - RNA, 21 nt, Human
ucaguccuagagcccacagaa

SEQ ID NO: 1013443 - RNA, 21 nt, Human
uccagggaaggggugaaagga

SEQ ID NO: 1013444 - RNA, 19 nt, Human
uccccaccucccaucucca

SEQ ID NO: 1013445 - RNA, 22 nt, Human
ucccgaggcccccccgcgacaa

SEQ ID NO: 1013446 - RNA, 20 nt, Human
uccuagagcccacagaagug

SEQ ID NO: 1013447 - RNA, 21 nt, Human
ucucucugcccgucagcuucc

SEQ ID NO: 1013448 - RNA, 24 nt, Human
ucucugcccgucagcuuccauuca

SEQ ID NO: 1013449 - RNA, 21 nt, Human
ucugggcuucggggagggagg

SEQ ID NO: 1013450 - RNA, 18 nt, Human
ugcagcgggcuggggacg

SEQ ID NO: 1013451 - RNA, 23 nt, Human
ugcauugccacccccacgcaccc

SEQ ID NO: 1013452 - RNA, 18 nt, Human
uggaggaggcugucuggg

SEQ ID NO: 1013453 - RNA, 21 nt, Human
uggaggaggcugucugggccc

SEQ ID NO: 1013454 - RNA, 25 nt, Human
uggcuggcgggggcggcgcugucug

SEQ ID NO: 1013455 - RNA, 18 nt, Human
ugggaguggggggcucac

SEQ ID NO: 1013456 - RNA, 24 nt, Human
uggugggguucagacaggccugga

SEQ ID NO: 1013457 - RNA, 21 nt, Human
uugcauugccacccccacgca

SEQ ID NO: 1013458 - RNA, 24 nt, Human
uugccuggcugaggcuuguuuuag

SEQ ID NO: 1013459 - RNA, 24 nt, Human
aaaauagaaacuuuuuaaacaaaa

SEQ ID NO: 1013460 - RNA, 20 nt, Human
aaacaagaaagaccacuuaa

SEQ ID NO: 1013461 - RNA, 24 nt, Human
aaagaucaaagauugcuauauacc

SEQ ID NO: 1013462 - RNA, 18 nt, Human
aacauuaaaaggccagca

SEQ ID NO: 1013463 - RNA, 23 nt, Human
aagaucaaagauugcuauauacc

SEQ ID NO: 1013464 - RNA, 19 nt, Human
aauaaccuuaugaguuaag

SEQ ID NO: 1013465 - RNA, 18 nt, Human
aauuguuucucugccuca

SEQ ID NO: 1013466 - RNA, 22 nt, Human
acaucuucuauccacacacaaa

SEQ ID NO: 1013467 - RNA, 19 nt, Human
agaaacuuuuuaaacaaaa

SEQ ID NO: 1013468 - RNA, 20 nt, Human
agaaauagaaugaagacugu

SEQ ID NO: 1013469 - RNA, 18 nt, Human
agaaucccaagaaaucca

SEQ ID NO: 1013470 - RNA, 21 nt, Human
aggaaccuuguaaaauaugau

SEQ ID NO: 1013471 - RNA, 19 nt, Human
agguuuuuccagauucucc

SEQ ID NO: 1013472 - RNA, 21 nt, Human
auaaaucauauaacuuaagua

SEQ ID NO: 1013473 - RNA, 24 nt, Human
augaugaauauacaugcaugaaua

SEQ ID NO: 1013474 - RNA, 27 nt, Human
caauuaaucuuacugcugaaauaacac

SEQ ID NO: 1013475 - RNA, 20 nt, Human
caccaaguuaucccucgccc

SEQ ID NO: 1013476 - RNA, 23 nt, Human
caccaaguuaucccucgcccucu

SEQ ID NO: 1013477 - RNA, 23 nt, Human
cauguuucaggauccucccccca

SEQ ID NO: 1013478 - RNA, 18 nt, Human
ccacuguuuaccucuccu

SEQ ID NO: 1013479 - RNA, 23 nt, Human
ccagcaccaaguuaucccucgcc

SEQ ID NO: 1013480 - RNA, 26 nt, Human
ccagcagugauagggacucucagcag

SEQ ID NO: 1013481 - RNA, 20 nt, Human
cccagcccagccgcuccucu

SEQ ID NO: 1013482 - RNA, 20 nt, Human
ccccagcccagccgcuccuc

SEQ ID NO: 1013483 - RNA, 23 nt, Human
cccccaguaucucagaggugggu

SEQ ID NO: 1013484 - RNA, 21 nt, Human
ccccccaguaucucagaggug

SEQ ID NO: 1013485 - RNA, 24 nt, Human
cccccgcauggagucccccagccc

SEQ ID NO: 1013486 - RNA, 18 nt, Human
ccuccccagaggcccuuc

SEQ ID NO: 1013487 - RNA, 20 nt, Human
cgcauggagucccccagccc

SEQ ID NO: 1013488 - RNA, 24 nt, Human
cugaggcaucuugcccaaggcugg

SEQ ID NO: 1013489 - RNA, 26 nt, Human
cugcuaaguuaaauucucuucgaugu

SEQ ID NO: 1013490 - RNA, 22 nt, Human
cuuuucaacauuagaaucccaa

SEQ ID NO: 1013491 - RNA, 23 nt, Human
gaaaaugaauauucucuuugucc

SEQ ID NO: 1013492 - RNA, 26 nt, Human
gaccacuuaacauucaaauagaaaug

SEQ ID NO: 1013493 - RNA, 18 nt, Human
gaucacuauucugauuua

SEQ ID NO: 1013494 - RNA, 22 nt, Human
gccagcagugauagggacucuc

SEQ ID NO: 1013495 - RNA, 19 nt, Human
ggcuuugcccucugugguu

SEQ ID NO: 1013496 - RNA, 22 nt, Human
guuugcagggagcuguaggaga

SEQ ID NO: 1013497 - RNA, 24 nt, Human
uaaaaacaagaaagaccacuuaac

SEQ ID NO: 1013498 - RNA, 22 nt, Human
uaaaaaugacuaauguucaccc

SEQ ID NO: 1013499 - RNA, 18 nt, Human
uaaaauuaaagagaaaua

SEQ ID NO: 1013500 - RNA, 19 nt, Human
uaaaauuaaagagaaauag

SEQ ID NO: 1013501 - RNA, 22 nt, Human
uaaagagaaauagaaugaagac

SEQ ID NO: 1013502 - RNA, 23 nt, Human
uaagaaaaugaauauucucuuug

SEQ ID NO: 1013503 - RNA, 20 nt, Human
uaagcauaacuaaugugaaa

SEQ ID NO: 1013504 - RNA, 23 nt, Human
uaagucagcacccaaugcuuaug

SEQ ID NO: 1013505 - RNA, 23 nt, Human
uaaucuuacugcugaaauaacac

SEQ ID NO: 1013506 - RNA, 20 nt, Human
uaccaggaaccuuguaaaau

SEQ ID NO: 1013507 - RNA, 20 nt, Human
uaccuuauggagguuuuucc

SEQ ID NO: 1013508 - RNA, 22 nt, Human
uagaaucccaagaaauccacau

SEQ ID NO: 1013509 - RNA, 22 nt, Human
uauaaaucauauaacuuaagua

SEQ ID NO: 1013510 - RNA, 23 nt, Human
uaucacuuaagaagauucuuuuu

SEQ ID NO: 1013511 - RNA, 24 nt, Human
uauguuaacuuuucaacaucuucu

SEQ ID NO: 1013512 - RNA, 19 nt, Human
ucaaauagaaaugcagcau

SEQ ID NO: 1013513 - RNA, 20 nt, Human
ucaauauauauuccccaaau

SEQ ID NO: 1013514 - RNA, 23 nt, Human
ucacccaccauuauugaguccug

SEQ ID NO: 1013515 - RNA, 20 nt, Human
ucacuaaacaucuguaauga

SEQ ID NO: 1013516 - RNA, 22 nt, Human
ucacuauucugauuuagauucu

SEQ ID NO: 1013517 - RNA, 20 nt, Human
uccaucuuucuggcuuugcc

SEQ ID NO: 1013518 - RNA, 24 nt, Human
ucccccagcccagccgcuccucuu

SEQ ID NO: 1013519 - RNA, 24 nt, Human
ucccucgcccucuuccuccuugca

SEQ ID NO: 1013520 - RNA, 24 nt, Human
ucuauaacauauaaaacugucauu

SEQ ID NO: 1013521 - RNA, 25 nt, Human
ucuccuccugcgcagggguggagau

SEQ ID NO: 1013522 - RNA, 23 nt, Human
ugaaauaacacaaauuuuugaua

SEQ ID NO: 1013523 - RNA, 22 nt, Human
ugaggcaucuugcccaaggcug

SEQ ID NO: 1013524 - RNA, 27 nt, Human
ugcaagagucaacuuuacuagcgcugc

SEQ ID NO: 1013525 - RNA, 19 nt, Human
ugcagggagcuguaggaga

SEQ ID NO: 1013526 - RNA, 18 nt, Human
ugccuuagcucuuaggcu

SEQ ID NO: 1013527 - RNA, 18 nt, Human
ugccuuuccaucuuucug

SEQ ID NO: 1013528 - RNA, 24 nt, Human
ugccuuuccaucuuucuggcuuug

SEQ ID NO: 1013529 - RNA, 22 nt, Human
uggagguuuuuccagauucucc

SEQ ID NO: 1013530 - RNA, 23 nt, Human
uggcaggccuccuggcauaaggg

SEQ ID NO: 1013531 - RNA, 22 nt, Human
ugucacuaaacaucuguaauga

SEQ ID NO: 1013532 - RNA, 19 nt, Human
uuagaaucccaagaaaucc

SEQ ID NO: 1013533 - RNA, 21 nt, Human
uuccauauucaaggaucuuau

SEQ ID NO: 1013534 - RNA, 21 nt, Human
uucuuuuuuccaguuaagacu

SEQ ID NO: 1013535 - RNA, 18 nt, Human
uugcacccccuccccaga

SEQ ID NO: 1013536 - RNA, 19 nt, Human
uuucaggauccucccccca

SEQ ID NO: 1013537 - RNA, 23 nt, Human
uuuuuuucacaguuaaaugcuua

SEQ ID NO: 1013538 - RNA, 24 nt, Human
uuuuuuucacaguuaaaugcuuag

SEQ ID NO: 1013539 - RNA, 22 nt, Human
uuuuuuuuuuuuuuuuucacag

SEQ ID NO: 1013540 - RNA, 26 nt, Human
uuuuuuuuuuuuuuuuucacaguuaa

SEQ ID NO: 1013541 - RNA, 24 nt, Human
uuuuuuuuuuuuuuuuuuucacag

SEQ ID NO: 1013542 - RNA, 19 nt, Human
aaaaagaagcucucuacag

SEQ ID NO: 1013543 - RNA, 22 nt, Human
aaacaaaaagaagcucucuaca

SEQ ID NO: 1013544 - RNA, 22 nt, Human
aaagugugauauaggagaaaga

SEQ ID NO: 1013545 - RNA, 19 nt, Human
aaccacauugcuugggcuc

SEQ ID NO: 1013546 - RNA, 22 nt, Human
aagcgguagcagcccagggugg

SEQ ID NO: 1013547 - RNA, 18 nt, Human
aaggaucuugugcuuuug

SEQ ID NO: 1013548 - RNA, 22 nt, Human
aauggaaccuuguccacuaugg

SEQ ID NO: 1013549 - RNA, 20 nt, Human
acaaaaagaagcucucuaca

SEQ ID NO: 1013550 - RNA, 22 nt, Human
acaccaagaagugucgggaagc

SEQ ID NO: 1013551 - RNA, 25 nt, Human
acucauuucacucuaaagacccccu

SEQ ID NO: 1013552 - RNA, 18 nt, Human
agaaaaaaggagccucaa

SEQ ID NO: 1013553 - RNA, 21 nt, Human
agcgggaaaucagggagcuug

SEQ ID NO: 1013554 - RNA, 22 nt, Human
aggaaagaaaaaaggagccuca

SEQ ID NO: 1013555 - RNA, 22 nt, Human
agggcuaaggaaccagccagga

SEQ ID NO: 1013556 - RNA, 21 nt, Human
aguugagaggcuugaauugga

SEQ ID NO: 1013557 - RNA, 18 nt, Human
augagcaugugaauggaa

SEQ ID NO: 1013558 - RNA, 19 nt, Human
auuuugcaaauuuuacaac

SEQ ID NO: 1013559 - RNA, 19 nt, Human
caaaaagaagcucucuaca

SEQ ID NO: 1013560 - RNA, 19 nt, Human
caaaagaggcagugcuguc

SEQ ID NO: 1013561 - RNA, 22 nt, Human
cagggcuaaggaaccagccagg

SEQ ID NO: 1013562 - RNA, 19 nt, Human
ccacugcauuccaccucag

SEQ ID NO: 1013563 - RNA, 19 nt, Human
ccacugcauuccaccucag

SEQ ID NO: 1013564 - RNA, 20 nt, Human
ccacugcauuccaccucagu

SEQ ID NO: 1013565 - RNA, 22 nt, Human
ccagagcgggaaaucagggagc

SEQ ID NO: 1013566 - RNA, 24 nt, Human
ccagggcuaaggaaccagccagga

SEQ ID NO: 1013567 - RNA, 20 nt, Human
ccaggguggaggguggagga

SEQ ID NO: 1013568 - RNA, 25 nt, Human
ccauggucccuauggauuacucucu

SEQ ID NO: 1013569 - RNA, 27 nt, Human
cccccuaucucuucuacucucccuuca

SEQ ID NO: 1013570 - RNA, 28 nt, Human
cccccuaucucuucuacucucccuucaa

SEQ ID NO: 1013571 - RNA, 22 nt, Human
ccccugacaacuccuucccagg

SEQ ID NO: 1013572 - RNA, 20 nt, Human
cccuaucucuucuacucucc

SEQ ID NO: 1013573 - RNA, 20 nt, Human
ccucuugcacaccaagaagu

SEQ ID NO: 1013574 - RNA, 23 nt, Human
cuaaagacccccuaucucuucua

SEQ ID NO: 1013575 - RNA, 22 nt, Human
gaaccuuguccacuauggcuaa

SEQ ID NO: 1013576 - RNA, 23 nt, Human
gaagcgguagcagcccagggugg

SEQ ID NO: 1013577 - RNA, 20 nt, Human
gaagcucucuacagguaccc

SEQ ID NO: 1013578 - RNA, 19 nt, Human
gaaugguagagagaaaaag

SEQ ID NO: 1013579 - RNA, 22 nt, Human
gacccccuaucucuucuacucu

SEQ ID NO: 1013580 - RNA, 18 nt, Human
gagacagcaguguuaaca

SEQ ID NO: 1013581 - RNA, 19 nt, Human
gccagguagaaacaaaaag

SEQ ID NO: 1013582 - RNA, 21 nt, Human
ggaaagaaaaaaggagccuca

SEQ ID NO: 1013583 - RNA, 23 nt, Human
ggccagguagaaacaaaaagaag

SEQ ID NO: 1013584 - RNA, 20 nt, Human
guagagagaaaaagagagaa

SEQ ID NO: 1013585 - RNA, 18 nt, Human
guagcagcccagggugga

SEQ ID NO: 1013586 - RNA, 22 nt, Human
uaaauagaagcgguagcagccc

SEQ ID NO: 1013587 - RNA, 23 nt, Human
uaaggaaccagccaggacaccau

SEQ ID NO: 1013588 - RNA, 23 nt, Human
uacccuuccucuugcacaccaag

SEQ ID NO: 1013589 - RNA, 21 nt, Human
uaucucuucuacucucccuuc

SEQ ID NO: 1013590 - RNA, 21 nt, Human
uccagagcgggaaaucaggga

SEQ ID NO: 1013591 - RNA, 18 nt, Human
ucccagggcuaaggaacc

SEQ ID NO: 1013592 - RNA, 19 nt, Human
ucccagggcuaaggaacca

SEQ ID NO: 1013593 - RNA, 18 nt, Human
uccccugacaacuccuuc

SEQ ID NO: 1013594 - RNA, 22 nt, Human
uccccugacaacuccuucccag

SEQ ID NO: 1013595 - RNA, 18 nt, Human
ucuaaagacccccuaucu

SEQ ID NO: 1013596 - RNA, 26 nt, Human
ucuaaagacccccuaucucuucuacu

SEQ ID NO: 1013597 - RNA, 18 nt, Human
ucuaacuuuggccaggua

SEQ ID NO: 1013598 - RNA, 23 nt, Human
ucucuacauccuuaaauagaagc

SEQ ID NO: 1013599 - RNA, 23 nt, Human
ucuugugcuuuugaguugagagg

SEQ ID NO: 1013600 - RNA, 21 nt, Human
ucuuucgggguaccagguagu

SEQ ID NO: 1013601 - RNA, 18 nt, Human
ugagaaugguagagagaa

SEQ ID NO: 1013602 - RNA, 19 nt, Human
ugccauucaucuuuguccc

SEQ ID NO: 1013603 - RNA, 24 nt, Human
uggccagguagaaacaaaaagaag

SEQ ID NO: 1013604 - RNA, 19 nt, Human
uguccaauacagguugaga

SEQ ID NO: 1013605 - RNA, 23 nt, Human
ugucccaucuaacuuuggccagu

SEQ ID NO: 1013606 - RNA, 23 nt, Human
uguuaugauucuuuuucuucuac

SEQ ID NO: 1013607 - RNA, 23 nt, Human
aaggucccucuagauauagaccc

SEQ ID NO: 1013608 - RNA, 21 nt, Human
accagguccagcucagggcca

SEQ ID NO: 1013609 - RNA, 20 nt, Human
acugcaauuuuccgauugcu

SEQ ID NO: 1013610 - RNA, 22 nt, Human
agaacucuuucguuuuuugcuu

SEQ ID NO: 1013611 - RNA, 22 nt, Human
agaacucuuucguuuuuugcuu

SEQ ID NO: 1013612 - RNA, 20 nt, Human
agauauagaccccaaaccaa

SEQ ID NO: 1013613 - RNA, 19 nt, Human
agcuggguuggacaugguc

SEQ ID NO: 1013614 - RNA, 19 nt, Human
agcuggguuggacaugguc

SEQ ID NO: 1013615 - RNA, 19 nt, Human
aggagugaggagagggcag

SEQ ID NO: 1013616 - RNA, 27 nt, Human
caaaccaaacucucccuguagaaagcu

SEQ ID NO: 1013617 - RNA, 20 nt, Human
cagcucagggccaaguccag

SEQ ID NO: 1013618 - RNA, 21 nt, Human
cagcucagggccaaguccaga

SEQ ID NO: 1013619 - RNA, 22 nt, Human
cagcuggauauaucuuagaagc

SEQ ID NO: 1013620 - RNA, 22 nt, Human
cagcuggauauaucuuagaagc

SEQ ID NO: 1013621 - RNA, 18 nt, Human
caggaaagaugaaauggg

SEQ ID NO: 1013622 - RNA, 23 nt, Human
ccaaagucaggaggcccagguuc

SEQ ID NO: 1013623 - RNA, 21 nt, Human
ccccaaaccaaacucucccug

SEQ ID NO: 1013624 - RNA, 18 nt, Human
ccugccuaccccagugga

SEQ ID NO: 1013625 - RNA, 21 nt, Human
cgcccugccuaccccagugga

SEQ ID NO: 1013626 - RNA, 19 nt, Human
cugggagucuguauuguuu

SEQ ID NO: 1013627 - RNA, 19 nt, Human
cugggagucuguauuguuu

SEQ ID NO: 1013628 - RNA, 21 nt, Human
cuucuauucuccugauuccca

SEQ ID NO: 1013629 - RNA, 21 nt, Human
cuucuauucuccugauuccca

SEQ ID NO: 1013630 - RNA, 22 nt, Human
gaccagguccagcucagggcca

SEQ ID NO: 1013631 - RNA, 19 nt, Human
gccaaagucaggaggccca

SEQ ID NO: 1013632 - RNA, 23 nt, Human
gcccugccuaccccaguggacca

SEQ ID NO: 1013633 - RNA, 21 nt, Human
gcucuucagaagucugaacag

SEQ ID NO: 1013634 - RNA, 21 nt, Human
gcucuucagaagucugaacag

SEQ ID NO: 1013635 - RNA, 19 nt, Human
gggaaaguaguuugcagga

SEQ ID NO: 1013636 - RNA, 21 nt, Human
gggaguaauagaagucccagc

SEQ ID NO: 1013637 - RNA, 21 nt, Human
gggaguaauagaagucccagc

SEQ ID NO: 1013638 - RNA, 19 nt, Human
gucuuccucaguauuuaug

SEQ ID NO: 1013639 - RNA, 19 nt, Human
uaccugccaaacacugaaa

SEQ ID NO: 1013640 - RNA, 20 nt, Human
ucagggccaaguccagagga

SEQ ID NO: 1013641 - RNA, 23 nt, Human
uccaauuucagccccgccaggaa

SEQ ID NO: 1013642 - RNA, 18 nt, Human
uccccuuccacugaugca

SEQ ID NO: 1013643 - RNA, 20 nt, Human
ucccucuagauauagacccc

SEQ ID NO: 1013644 - RNA, 22 nt, Human
ucuuccucaguauuuaugugag

SEQ ID NO: 1013645 - RNA, 24 nt, Human
ugaaaugggggucugccaaaguca

SEQ ID NO: 1013646 - RNA, 22 nt, Human
ugaggacuacagaccaaaacug

SEQ ID NO: 1013647 - RNA, 20 nt, Human
ugaggagagggcagggucuu

SEQ ID NO: 1013648 - RNA, 19 nt, Human
ugauucccagcagcacagc

SEQ ID NO: 1013649 - RNA, 19 nt, Human
ugauucccagcagcacagc

SEQ ID NO: 1013650 - RNA, 21 nt, Human
ugcauaaguacaggcacaaag

SEQ ID NO: 1013651 - RNA, 21 nt, Human
ugcuguagaaucuugggccuc

SEQ ID NO: 1013652 - RNA, 18 nt, Human
ugggaaaguaguuugcag

SEQ ID NO: 1013653 - RNA, 18 nt, Human
uguccccuuccacugaug

SEQ ID NO: 1013654 - RNA, 19 nt, Human
uuccaaagggaguaauaga

SEQ ID NO: 1013655 - RNA, 19 nt, Human
uuccaaagggaguaauaga

SEQ ID NO: 1013656 - RNA, 22 nt, Human
uugggauacagaagaaggguuu

SEQ ID NO: 1013657 - RNA, 22 nt, Human
uugggauacagaagaaggguuu

SEQ ID NO: 1013658 - RNA, 24 nt, Human
uuuguuaccugccaaacacugaaa

SEQ ID NO: 1013659 - RNA, 23 nt, Human
uuuuuugcuucuauucuccugau

SEQ ID NO: 1013660 - RNA, 23 nt, Human
uuuuuugcuucuauucuccugau

SEQ ID NO: 1013661 - RNA, 23 nt, Human
agaaaagaaccaaggauauagga

SEQ ID NO: 1013662 - RNA, 18 nt, Human
augacaguaugucuuuuc

SEQ ID NO: 1013663 - RNA, 24 nt, Human
caaaagaaaagcuaaaucuguaaa

SEQ ID NO: 1013664 - RNA, 22 nt, Human
caaaagacaguggucaaagaca

SEQ ID NO: 1013665 - RNA, 18 nt, Human
cgccuggguagagcgaua

SEQ ID NO: 1013666 - RNA, 22 nt, Human
uaaauuaucagaaaagaaccaa

SEQ ID NO: 1013667 - RNA, 25 nt, Human
uauauaacaaaagaaaagcuaaauc

SEQ ID NO: 1013668 - RNA, 24 nt, Human
ucaaggguagccuuuuacauaacu

SEQ ID NO: 1013669 - RNA, 18 nt, Human
uccacaugcgauuggaga

SEQ ID NO: 1013670 - RNA, 18 nt, Human
uuaucagaaaagaaccaa

SEQ ID NO: 1013671 - RNA, 22 nt, Human
uucugugaguuguuaagaguac

SEQ ID NO: 1013672 - RNA, 23 nt, Human
uuuuuuuuuuuuuaaagguccug

SEQ ID NO: 1013673 - RNA, 19 nt, Human
aaaaaaaaaaaaaaagaca

SEQ ID NO: 1013674 - RNA, 19 nt, Human
aaaaaaaaaaaaaaagaca

SEQ ID NO: 1013675 - RNA, 23 nt, Human
aaaaaaauauacagacagaaaac

SEQ ID NO: 1013676 - RNA, 23 nt, Human
aaaaaauagcacagagaaaccau

SEQ ID NO: 1013677 - RNA, 22 nt, Human
aaaaccaaauacauuucguaug

SEQ ID NO: 1013678 - RNA, 23 nt, Human
aaaagaaaaaaagaaagaaagaa

SEQ ID NO: 1013679 - RNA, 19 nt, Human
aaacaacagaaggcaaaag

SEQ ID NO: 1013680 - RNA, 19 nt, Human
aaacaacagaaggcaaaag

SEQ ID NO: 1013681 - RNA, 21 nt, Human
aaacagaguuuuuuuuuuuuu

SEQ ID NO: 1013682 - RNA, 21 nt, Human
aaaccacauuacaaaaugaaa

SEQ ID NO: 1013683 - RNA, 23 nt, Human
aaagaauuccaaaaaauagcaca

SEQ ID NO: 1013684 - RNA, 20 nt, Human
aaagauacauauuguggcuc

SEQ ID NO: 1013685 - RNA, 20 nt, Human
aaagauacauauuguggcuc

SEQ ID NO: 1013686 - RNA, 22 nt, Human
aaauacacacuuccgucaugug

SEQ ID NO: 1013687 - RNA, 19 nt, Human
aacagaaggcaaaagcaga

SEQ ID NO: 1013688 - RNA, 26 nt, Human
aaccacagacaauagacccuguaccc

SEQ ID NO: 1013689 - RNA, 18 nt, Human
aaccauuugaaagccaaa

SEQ ID NO: 1013690 - RNA, 18 nt, Human
aaccugcaauaaaaaggc

SEQ ID NO: 1013691 - RNA, 27 nt, Human
aagcagaaaguggacaucgagggaccc

SEQ ID NO: 1013692 - RNA, 23 nt, Human
aagcgccgacugcaaacgagaca

SEQ ID NO: 1013693 - RNA, 22 nt, Human
aagcuugagguuuguguuaagu

SEQ ID NO: 1013694 - RNA, 22 nt, Human
aagcuugagguuuguguuaagu

SEQ ID NO: 1013695 - RNA, 24 nt, Human
aaguagcuaggacuacaggugugc

SEQ ID NO: 1013696 - RNA, 24 nt, Human
aaguagcuaggacuacaggugugc

SEQ ID NO: 1013697 - RNA, 22 nt, Human
aauggcacaucuuauacuaaaa

SEQ ID NO: 1013698 - RNA, 25 nt, Human
acaaaaccaaauacauuucguaugg

SEQ ID NO: 1013699 - RNA, 21 nt, Human
acaacagaaggcaaaagcaga

SEQ ID NO: 1013700 - RNA, 18 nt, Human
acacucuccaacaaaacc

SEQ ID NO: 1013701 - RNA, 18 nt, Human
acacucuccaacaaaacc

SEQ ID NO: 1013702 - RNA, 19 nt, Human
acagaguuuuuuuuuuuuu

SEQ ID NO: 1013703 - RNA, 18 nt, Human
acaggguuucaucauguu

SEQ ID NO: 1013704 - RNA, 18 nt, Human
acaggguuucaucauguu

SEQ ID NO: 1013705 - RNA, 18 nt, Human
acaggguuucaucauguu

SEQ ID NO: 1013706 - RNA, 19 nt, Human
acaggguuucaucauguuu

SEQ ID NO: 1013707 - RNA, 20 nt, Human
acaggguuucaucauguuug

SEQ ID NO: 1013708 - RNA, 20 nt, Human
acaggguuucaucauguuug

SEQ ID NO: 1013709 - RNA, 24 nt, Human
acaggguuucaucauguuugccag

SEQ ID NO: 1013710 - RNA, 24 nt, Human
acaggguuucaucauguuugccag

SEQ ID NO: 1013711 - RNA, 19 nt, Human
accagcaccuguguacgua

SEQ ID NO: 1013712 - RNA, 21 nt, Human
accaucuaacucaguguccca

SEQ ID NO: 1013713 - RNA, 21 nt, Human
accaucuaacucaguguccca

SEQ ID NO: 1013714 - RNA, 18 nt, Human
acccccuucucuuuuuuu

SEQ ID NO: 1013715 - RNA, 21 nt, Human
acugcaaccuccaccuccugg

SEQ ID NO: 1013716 - RNA, 21 nt, Human
acugcaaccuccaccuccugg

SEQ ID NO: 1013717 - RNA, 21 nt, Human
acugcaaccuccaccuccugg

SEQ ID NO: 1013718 - RNA, 21 nt, Human
acugcaaccuccaccuccugg

SEQ ID NO: 1013719 - RNA, 21 nt, Human
acugcaaccuccaccuccugg

SEQ ID NO: 1013720 - RNA, 22 nt, Human
acugcaaccuccaccuccuggg

SEQ ID NO: 1013721 - RNA, 22 nt, Human
acugcaaccuccaccuccuggg

SEQ ID NO: 1013722 - RNA, 24 nt, Human
acugcaaccuccaccuccuggguu

SEQ ID NO: 1013723 - RNA, 18 nt, Human
acuuccgucauguguccc

SEQ ID NO: 1013724 - RNA, 24 nt, Human
agaaaagcaaaaggguccauucaa

SEQ ID NO: 1013725 - RNA, 21 nt, Human
agaacuaaaaaucagaaaagc

SEQ ID NO: 1013726 - RNA, 19 nt, Human
agagaaacagauacugcaa

SEQ ID NO: 1013727 - RNA, 23 nt, Human
agagaaggcacagcaaagaccau

SEQ ID NO: 1013728 - RNA, 22 nt, Human
agagaugccacucuuucugccc

SEQ ID NO: 1013729 - RNA, 18 nt, Human
agcuaacaccauugugcg

SEQ ID NO: 1013730 - RNA, 19 nt, Human
agcucuacgucuuggauga

SEQ ID NO: 1013731 - RNA, 19 nt, Human
agcucuacgucuuggauga

SEQ ID NO: 1013732 - RNA, 19 nt, Human
agcuuggaaggaaucggca

SEQ ID NO: 1013733 - RNA, 19 nt, Human
agggggaguaaaaaaaaaa

SEQ ID NO: 1013734 - RNA, 22 nt, Human
agggggaguaaaaaaaaaaaaa

SEQ ID NO: 1013735 - RNA, 22 nt, Human
agggggaguaaaaaaaaaaaaa

SEQ ID NO: 1013736 - RNA, 25 nt, Human
agguauguauguuuucacaguuagg

SEQ ID NO: 1013737 - RNA, 25 nt, Human
agguauguauguuuucacaguuagg

SEQ ID NO: 1013738 - RNA, 25 nt, Human
agguuggagugcaguggugugaucu

SEQ ID NO: 1013739 - RNA, 25 nt, Human
agguuggagugcaguggugugaucu

SEQ ID NO: 1013740 - RNA, 23 nt, Human
agugcaguggugugaucuuggcu

SEQ ID NO: 1013741 - RNA, 23 nt, Human
agugcaguggugugaucuuggcu

SEQ ID NO: 1013742 - RNA, 23 nt, Human
agugcaguggugugaucuuggcu

SEQ ID NO: 1013743 - RNA, 23 nt, Human
agugcaguggugugaucuuggcu

SEQ ID NO: 1013744 - RNA, 24 nt, Human
agugcaguggugugaucuuggcuu

SEQ ID NO: 1013745 - RNA, 24 nt, Human
agugcaguggugugaucuuggcuu

SEQ ID NO: 1013746 - RNA, 25 nt, Human
auaaaauaaaggcaaugcaauuuaa

SEQ ID NO: 1013747 - RNA, 20 nt, Human
auaaacaacagaaggcaaaa

SEQ ID NO: 1013748 - RNA, 20 nt, Human
auaaacaacagaaggcaaaa

SEQ ID NO: 1013749 - RNA, 22 nt, Human
auacugaaauccauuuauucca

SEQ ID NO: 1013750 - RNA, 19 nt, Human
auccuuuuugguuuuuuuu

SEQ ID NO: 1013751 - RNA, 25 nt, Human
augcaguagccaguaaugcuccauc

SEQ ID NO: 1013752 - RNA, 21 nt, Human
auucuccugccucagccuccc

SEQ ID NO: 1013753 - RNA, 22 nt, Human
caaaaugcaguacaagaacaua

SEQ ID NO: 1013754 - RNA, 22 nt, Human
caaaaugcaguacaagaacaua

SEQ ID NO: 1013755 - RNA, 21 nt, Human
caacaaaaccaaauacauuuc

SEQ ID NO: 1013756 - RNA, 21 nt, Human
caacaaaaccaaauacauuuc

SEQ ID NO: 1013757 - RNA, 23 nt, Human
caaccuccaccuccuggguucaa

SEQ ID NO: 1013758 - RNA, 23 nt, Human
caaccuccaccuccuggguucaa

SEQ ID NO: 1013759 - RNA, 22 nt, Human
caagcaauucuccugccucagc

SEQ ID NO: 1013760 - RNA, 22 nt, Human
caagcaauucuccugccucagc

SEQ ID NO: 1013761 - RNA, 27 nt, Human
caagcaauucuccugccucagccuccc

SEQ ID NO: 1013762 - RNA, 27 nt, Human
caagcaauucuccugccucagccuccc

SEQ ID NO: 1013763 - RNA, 19 nt, Human
cacaacaauuuauaauacu

SEQ ID NO: 1013764 - RNA, 19 nt, Human
cacaacaauuuauaauacu

SEQ ID NO: 1013765 - RNA, 24 nt, Human
cacagcaaagaccauugcucaaag

SEQ ID NO: 1013766 - RNA, 22 nt, Human
caccaccacgccuggcuaauuu

SEQ ID NO: 1013767 - RNA, 22 nt, Human
caccaccacgccuggcuaauuu

SEQ ID NO: 1013768 - RNA, 23 nt, Human
caccuugcagccgaaugcaaggu

SEQ ID NO: 1013769 - RNA, 19 nt, Human
cacuuuacagcaaagauac

SEQ ID NO: 1013770 - RNA, 19 nt, Human
cacuuuacagcaaagauac

SEQ ID NO: 1013771 - RNA, 22 nt, Human
cagaacuaaaaaucagaaaagc

SEQ ID NO: 1013772 - RNA, 24 nt, Human
cagaauagcucuaaacaggauucu

SEQ ID NO: 1013773 - RNA, 20 nt, Human
cagauauauacucgaguauc

SEQ ID NO: 1013774 - RNA, 18 nt, Human
cagcagcuaaaacacugc

SEQ ID NO: 1013775 - RNA, 20 nt, Human
cagcuccugaacuucuuggg

SEQ ID NO: 1013776 - RNA, 24 nt, Human
caggguuucaucauguuugccagg

SEQ ID NO: 1013777 - RNA, 24 nt, Human
caggguuucaucauguuugccagg

SEQ ID NO: 1013778 - RNA, 25 nt, Human
cauacagaggacaaaauggcacauc

SEQ ID NO: 1013779 - RNA, 24 nt, Human
caucauguuugccaggcuagucuc

SEQ ID NO: 1013780 - RNA, 24 nt, Human
caucuuauacuaaaacugcuaaau

SEQ ID NO: 1013781 - RNA, 26 nt, Human
caucuuauuuuucccaaacuaaccac

SEQ ID NO: 1013782 - RNA, 22 nt, Human
caugugucccagcagcuaaaac

SEQ ID NO: 1013783 - RNA, 21 nt, Human
cauguuugccaggcuagucuc

SEQ ID NO: 1013784 - RNA, 18 nt, Human
cauuugaaagccaaauac

SEQ ID NO: 1013785 - RNA, 22 nt, Human
cauuugaaagccaaauacuuua

SEQ ID NO: 1013786 - RNA, 26 nt, Human
ccaccuccuggguucaagcaauucuu

SEQ ID NO: 1013787 - RNA, 27 nt, Human
ccaccuccuggguucaagcaauucuuu

SEQ ID NO: 1013788 - RNA, 18 nt, Human
ccagguuggagugcagug

SEQ ID NO: 1013789 - RNA, 18 nt, Human
ccagguuggagugcagug

SEQ ID NO: 1013790 - RNA, 19 nt, Human
ccauuauguggaucccaga

SEQ ID NO: 1013791 - RNA, 22 nt, Human
cccaaguagcuaggacuacagg

SEQ ID NO: 1013792 - RNA, 22 nt, Human
cccaaguagcuaggacuacagg

SEQ ID NO: 1013793 - RNA, 18 nt, Human
ccccuucucuuuuuuuuc

SEQ ID NO: 1013794 - RNA, 21 nt, Human
cccuguacccagccucgcgcc

SEQ ID NO: 1013795 - RNA, 19 nt, Human
ccuccaccuccuggguuca

SEQ ID NO: 1013796 - RNA, 19 nt, Human
ccuccaccuccuggguuca

SEQ ID NO: 1013797 - RNA, 24 nt, Human
ccuccuggguucaagcaauucucc

SEQ ID NO: 1013798 - RNA, 24 nt, Human
ccuccuggguucaagcaauucucc

SEQ ID NO: 1013799 - RNA, 23 nt, Human
ccugccucagccucccaaguagc

SEQ ID NO: 1013800 - RNA, 23 nt, Human
ccugccucagccucccaaguagc

SEQ ID NO: 1013801 - RNA, 23 nt, Human
ccuggguucaagcaauucuccug

SEQ ID NO: 1013802 - RNA, 23 nt, Human
ccuggguucaagcaauucuccug

SEQ ID NO: 1013803 - RNA, 24 nt, Human
cgcgccugcggaggaagacaguuc

SEQ ID NO: 1013804 - RNA, 22 nt, Human
cggaaauaaauaggguuaagua

SEQ ID NO: 1013805 - RNA, 19 nt, Human
cuaaaauuaaggcagcagc

SEQ ID NO: 1013806 - RNA, 19 nt, Human
cuaaaauuaaggcagcagc

SEQ ID NO: 1013807 - RNA, 24 nt, Human
cucccaaguagcuaggacuacagg

SEQ ID NO: 1013808 - RNA, 24 nt, Human
cucccaaguagcuaggacuacagg

SEQ ID NO: 1013809 - RNA, 21 nt, Human
cuccuggguucaagcaauucu

SEQ ID NO: 1013810 - RNA, 21 nt, Human
cuccuggguucaagcaauucu

SEQ ID NO: 1013811 - RNA, 21 nt, Human
cugaccucaggugauuugccc

SEQ ID NO: 1013812 - RNA, 21 nt, Human
cugaccucaggugauuugccc

SEQ ID NO: 1013813 - RNA, 18 nt, Human
cugcaaccuccaccuccu

SEQ ID NO: 1013814 - RNA, 23 nt, Human
cugcaaccuccaccuccuggguu

SEQ ID NO: 1013815 - RNA, 23 nt, Human
cugcaaccuccaccuccuggguu

SEQ ID NO: 1013816 - RNA, 24 nt, Human
cugcaaccuccaccuccuggguuc

SEQ ID NO: 1013817 - RNA, 24 nt, Human
cugcaagcaaauagaauauucaca

SEQ ID NO: 1013818 - RNA, 23 nt, Human
cugcccagcuaacaccauugugc

SEQ ID NO: 1013819 - RNA, 23 nt, Human
cugccucagccucccaaguagcu

SEQ ID NO: 1013820 - RNA, 23 nt, Human
cugccucagccucccaaguagcu

SEQ ID NO: 1013821 - RNA, 26 nt, Human
cugcugaccucaggugauuugcccgc

SEQ ID NO: 1013822 - RNA, 26 nt, Human
cugcugaccucaggugauuugcccgc

SEQ ID NO: 1013823 - RNA, 19 nt, Human
cuguauugcuucuuuggca

SEQ ID NO: 1013824 - RNA, 23 nt, Human
cuucuaaauacgauacgagagaa

SEQ ID NO: 1013825 - RNA, 23 nt, Human
cuucucuuuuuuuuccagaaacu

SEQ ID NO: 1013826 - RNA, 19 nt, Human
cuugcacuggauaauccuc

SEQ ID NO: 1013827 - RNA, 18 nt, Human
cuuuauaccacaagggua

SEQ ID NO: 1013828 - RNA, 18 nt, Human
cuuuauaccacaagggua

SEQ ID NO: 1013829 - RNA, 22 nt, Human
gaaagaaagaaaagcagaaagu

SEQ ID NO: 1013830 - RNA, 20 nt, Human
gacaggguuucaucauguuu

SEQ ID NO: 1013831 - RNA, 24 nt, Human
gaccucaggugauuugcccgccuc

SEQ ID NO: 1013832 - RNA, 24 nt, Human
gaccucaggugauuugcccgccuc

SEQ ID NO: 1013833 - RNA, 19 nt, Human
gagacgggcgggggcggcc

SEQ ID NO: 1013834 - RNA, 23 nt, Human
gagagaaacuccaaaagcuugga

SEQ ID NO: 1013835 - RNA, 20 nt, Human
gagucaaccacagacaauag

SEQ ID NO: 1013836 - RNA, 20 nt, Human
gaguuuuuuuuuuuuuuuuu

SEQ ID NO: 1013837 - RNA, 22 nt, Human
gcaaccuccaccuccuggguuc

SEQ ID NO: 1013838 - RNA, 20 nt, Human
gcagguaagauaaacaacag

SEQ ID NO: 1013839 - RNA, 22 nt, Human
gccgacugcaaacgagacacug

SEQ ID NO: 1013840 - RNA, 21 nt, Human
gccugcggaggaagacaguuc

SEQ ID NO: 1013841 - RNA, 22 nt, Human
ggacuacaggugugcaccacca

SEQ ID NO: 1013842 - RNA, 22 nt, Human
ggacuacaggugugcaccacca

SEQ ID NO: 1013843 - RNA, 18 nt, Human
ggcggccgcugcggcuuc

SEQ ID NO: 1013844 - RNA, 26 nt, Human
gggcgggggcggccgcugcggcuucu

SEQ ID NO: 1013845 - RNA, 21 nt, Human
gggggaguaaaaaaaaaaaaa

SEQ ID NO: 1013846 - RNA, 21 nt, Human
gggggaguaaaaaaaaaaaaa

SEQ ID NO: 1013847 - RNA, 24 nt, Human
gguccauucaacauauagcagcuu

SEQ ID NO: 1013848 - RNA, 21 nt, Human
ggucccucccgggcccaggga

SEQ ID NO: 1013849 - RNA, 22 nt, Human
gguuggagugcaguggugugau

SEQ ID NO: 1013850 - RNA, 22 nt, Human
gguuggagugcaguggugugau

SEQ ID NO: 1013851 - RNA, 20 nt, Human
gugauuugcccgccucaccc

SEQ ID NO: 1013852 - RNA, 20 nt, Human
gugauuugcccgccucaccc

SEQ ID NO: 1013853 - RNA, 18 nt, Human
uaaaauuaaggcagcagc

SEQ ID NO: 1013854 - RNA, 18 nt, Human
uaaaauuaaggcagcagc

SEQ ID NO: 1013855 - RNA, 19 nt, Human
uaaaggucgcccccagccc

SEQ ID NO: 1013856 - RNA, 22 nt, Human
uaacuaaaauauacggaaauaa

SEQ ID NO: 1013857 - RNA, 19 nt, Human
uaacucagugucccagaau

SEQ ID NO: 1013858 - RNA, 19 nt, Human
uaacucagugucccagaau

SEQ ID NO: 1013859 - RNA, 19 nt, Human
uaacucagugucccagaau

SEQ ID NO: 1013860 - RNA, 19 nt, Human
uaacucagugucccagaau

SEQ ID NO: 1013861 - RNA, 23 nt, Human
uaagauaaacaacagaaggcaaa

SEQ ID NO: 1013862 - RNA, 23 nt, Human
uaagauaaacaacagaaggcaaa

SEQ ID NO: 1013863 - RNA, 23 nt, Human
uaagauaucucuggaaucugaaa

SEQ ID NO: 1013864 - RNA, 22 nt, Human
uaagaugcaguagccaguaaug

SEQ ID NO: 1013865 - RNA, 20 nt, Human
uaaguuaauuaaggcagaca

SEQ ID NO: 1013866 - RNA, 22 nt, Human
uacaggugugcaccaccacgcc

SEQ ID NO: 1013867 - RNA, 22 nt, Human
uacaggugugcaccaccacgcc

SEQ ID NO: 1013868 - RNA, 28 nt, Human
uacaugucagaacuaaaaaucagaaaag

SEQ ID NO: 1013869 - RNA, 28 nt, Human
uacaugucagaacuaaaaaucagaaaag

SEQ ID NO: 1013870 - RNA, 21 nt, Human
uacauucuuaauaucugcagg

SEQ ID NO: 1013871 - RNA, 21 nt, Human
uacauucuuaauaucugcagg

SEQ ID NO: 1013872 - RNA, 23 nt, Human
uacgauacgagagaaacuccaaa

SEQ ID NO: 1013873 - RNA, 20 nt, Human
uacuacaaacccccuucucu

SEQ ID NO: 1013874 - RNA, 21 nt, Human
uacugcaaccuccaccuccug

SEQ ID NO: 1013875 - RNA, 21 nt, Human
uacugcaaccuccaccuccug

SEQ ID NO: 1013876 - RNA, 23 nt, Human
uacugcaaccuccaccuccuggg

SEQ ID NO: 1013877 - RNA, 23 nt, Human
uacugcaaccuccaccuccuggg

SEQ ID NO: 1013878 - RNA, 22 nt, Human
uagagacaggguuucaucaugu

SEQ ID NO: 1013879 - RNA, 22 nt, Human
uagagacaggguuucaucaugu

SEQ ID NO: 1013880 - RNA, 24 nt, Human
uagagggggaguaaaaaaaaaaaa

SEQ ID NO: 1013881 - RNA, 25 nt, Human
uagcacagagaaaccauuugaaagc

SEQ ID NO: 1013882 - RNA, 21 nt, Human
uaggacuacaggugugcacca

SEQ ID NO: 1013883 - RNA, 21 nt, Human
uaggacuacaggugugcacca

SEQ ID NO: 1013884 - RNA, 24 nt, Human
uaggacuacaggugugcaccacca

SEQ ID NO: 1013885 - RNA, 24 nt, Human
uaggacuacaggugugcaccacca

SEQ ID NO: 1013886 - RNA, 24 nt, Human
uaguagagacaggguuucaucaug

SEQ ID NO: 1013887 - RNA, 24 nt, Human
uaguagagacaggguuucaucaug

SEQ ID NO: 1013888 - RNA, 24 nt, Human
uaguauaaacaaaauauuuagcaa

SEQ ID NO: 1013889 - RNA, 25 nt, Human
uaguauaaacaaaauauuuagcaau

SEQ ID NO: 1013890 - RNA, 22 nt, Human
uauaauacuuuauaccacaagg

SEQ ID NO: 1013891 - RNA, 22 nt, Human
uauaauacuuuauaccacaagg

SEQ ID NO: 1013892 - RNA, 19 nt, Human
uauauacaugucagaacua

SEQ ID NO: 1013893 - RNA, 19 nt, Human
uauauacaugucagaacua

SEQ ID NO: 1013894 - RNA, 21 nt, Human
uauucacagccaaaugaaauu

SEQ ID NO: 1013895 - RNA, 20 nt, Human
uauuucaaauguuucuguua

SEQ ID NO: 1013896 - RNA, 20 nt, Human
ucaaagacguaagauaucuc

SEQ ID NO: 1013897 - RNA, 19 nt, Human
ucaagcaauucuccugccu

SEQ ID NO: 1013898 - RNA, 19 nt, Human
ucaagcaauucuccugccu

SEQ ID NO: 1013899 - RNA, 21 nt, Human
ucacuuccagaucagucugac

SEQ ID NO: 1013900 - RNA, 21 nt, Human
ucacuuccagaucagucugac

SEQ ID NO: 1013901 - RNA, 24 nt, Human
ucagaccaaaguacggagucaacc

SEQ ID NO: 1013902 - RNA, 18 nt, Human
ucagccucccaaguagcu

SEQ ID NO: 1013903 - RNA, 20 nt, Human
ucagccucccaaguagcuag

SEQ ID NO: 1013904 - RNA, 20 nt, Human
ucagccucccaaguagcuag

SEQ ID NO: 1013905 - RNA, 25 nt, Human
ucagugucccagaauuuaaaauuuc

SEQ ID NO: 1013906 - RNA, 25 nt, Human
ucagugucccagaauuuaaaauuuc

SEQ ID NO: 1013907 - RNA, 21 nt, Human
ucauucagacauacagaggac

SEQ ID NO: 1013908 - RNA, 28 nt, Human
uccaaaaaauagcacagagaaaccauua

SEQ ID NO: 1013909 - RNA, 18 nt, Human
uccauuggcaucucccuu

SEQ ID NO: 1013910 - RNA, 24 nt, Human
ucccaaguagcuaggacuacaggu

SEQ ID NO: 1013911 - RNA, 24 nt, Human
ucccaaguagcuaggacuacaggu

SEQ ID NO: 1013912 - RNA, 24 nt, Human
ucccagaauuuaaaauuuccuugc

SEQ ID NO: 1013913 - RNA, 24 nt, Human
ucccagaauuuaaaauuuccuugc

SEQ ID NO: 1013914 - RNA, 18 nt, Human
ucccagcagcuaaaacac

SEQ ID NO: 1013915 - RNA, 19 nt, Human
ucccgaaggccucagacca

SEQ ID NO: 1013916 - RNA, 21 nt, Human
uccuggguucaagcaauucuc

SEQ ID NO: 1013917 - RNA, 21 nt, Human
uccuggguucaagcaauucuc

SEQ ID NO: 1013918 - RNA, 24 nt, Human
uccuggguucaagcaauucuccug

SEQ ID NO: 1013919 - RNA, 24 nt, Human
uccuggguucaagcaauucuccug

SEQ ID NO: 1013920 - RNA, 26 nt, Human
ucuccugccucagccucccaaguagc

SEQ ID NO: 1013921 - RNA, 26 nt, Human
ucuccugccucagccucccaaguagc

SEQ ID NO: 1013922 - RNA, 19 nt, Human
ucucgcucuguuguccagg

SEQ ID NO: 1013923 - RNA, 19 nt, Human
ucucgcucuguuguccagg

SEQ ID NO: 1013924 - RNA, 19 nt, Human
ucucgcucuguuguccagg

SEQ ID NO: 1013925 - RNA, 19 nt, Human
ucucgcucuguuguccagg

SEQ ID NO: 1013926 - RNA, 23 nt, Human
ucucgcucuguuguccagguugg

SEQ ID NO: 1013927 - RNA, 23 nt, Human
ucucgcucuguuguccagguugg

SEQ ID NO: 1013928 - RNA, 24 nt, Human
ucucgcucuguuguccagguugga

SEQ ID NO: 1013929 - RNA, 24 nt, Human
ucucgcucuguuguccagguugga

SEQ ID NO: 1013930 - RNA, 23 nt, Human
ucugcagguaagauaaacaacag

SEQ ID NO: 1013931 - RNA, 24 nt, Human
ucuguuguccagguuggagugcag

SEQ ID NO: 1013932 - RNA, 24 nt, Human
ucuguuguccagguuggagugcag

SEQ ID NO: 1013933 - RNA, 24 nt, Human
ugaaaaugcuauuuuaugaaaaua

SEQ ID NO: 1013934 - RNA, 18 nt, Human
ugaccucaggugauuugc

SEQ ID NO: 1013935 - RNA, 18 nt, Human
ugaccucaggugauuugc

SEQ ID NO: 1013936 - RNA, 24 nt, Human
ugaccucaggugauuugcccgccu

SEQ ID NO: 1013937 - RNA, 24 nt, Human
ugaccucaggugauuugcccgccu

SEQ ID NO: 1013938 - RNA, 22 nt, Human
ugagauggagucucgcucuguu

SEQ ID NO: 1013939 - RNA, 20 nt, Human
ugagguuuguguuaagugua

SEQ ID NO: 1013940 - RNA, 20 nt, Human
ugagguuuguguuaagugua

SEQ ID NO: 1013941 - RNA, 21 nt, Human
ugcagaaacagaguuuuuuuu

SEQ ID NO: 1013942 - RNA, 21 nt, Human
ugcagaaacagaguuuuuuuu

SEQ ID NO: 1013943 - RNA, 21 nt, Human
ugcaguggugugaucuuggcu

SEQ ID NO: 1013944 - RNA, 23 nt, Human
ugccucagccucccaaguagcua

SEQ ID NO: 1013945 - RNA, 24 nt, Human
ugccucagccucccaaguagcuag

SEQ ID NO: 1013946 - RNA, 24 nt, Human
ugccucagccucccaaguagcuag

SEQ ID NO: 1013947 - RNA, 20 nt, Human
uggaaggaaucggcagcucc

SEQ ID NO: 1013948 - RNA, 22 nt, Human
uggaaucugaaagaauuccaaa

SEQ ID NO: 1013949 - RNA, 19 nt, Human
uggagugcaguggugugau

SEQ ID NO: 1013950 - RNA, 19 nt, Human
uggagugcaguggugugau

SEQ ID NO: 1013951 - RNA, 23 nt, Human
uggagugcaguggugugaucuug

SEQ ID NO: 1013952 - RNA, 23 nt, Human
uggagugcaguggugugaucuug

SEQ ID NO: 1013953 - RNA, 24 nt, Human
uggagugcaguggugugaucuugg

SEQ ID NO: 1013954 - RNA, 24 nt, Human
uggagugcaguggugugaucuugg

SEQ ID NO: 1013955 - RNA, 21 nt, Human
uggcaucucccuuugagauaa

SEQ ID NO: 1013956 - RNA, 19 nt, Human
ugggugggcaucacucuuc

SEQ ID NO: 1013957 - RNA, 22 nt, Human
ugggugggcaucacucuucgga

SEQ ID NO: 1013958 - RNA, 21 nt, Human
uggguucaagcaauucuccug

SEQ ID NO: 1013959 - RNA, 21 nt, Human
uggguucaagcaauucuccug

SEQ ID NO: 1013960 - RNA, 23 nt, Human
uggguucaagcaauucuccugcc

SEQ ID NO: 1013961 - RNA, 23 nt, Human
uggguucaagcaauucuccugcc

SEQ ID NO: 1013962 - RNA, 24 nt, Human
uggguucaagcaauucuccugccu

SEQ ID NO: 1013963 - RNA, 24 nt, Human
uggguucaagcaauucuccugccu

SEQ ID NO: 1013964 - RNA, 20 nt, Human
uguccagguuggagugcagu

SEQ ID NO: 1013965 - RNA, 20 nt, Human
uguccagguuggagugcagu

SEQ ID NO: 1013966 - RNA, 24 nt, Human
uguccagguuggagugcaguggug

SEQ ID NO: 1013967 - RNA, 24 nt, Human
uguccagguuggagugcaguggug

SEQ ID NO: 1013968 - RNA, 23 nt, Human
ugucccagcagcuaaaacacugc

SEQ ID NO: 1013969 - RNA, 19 nt, Human
uguuguccagguuggagug

SEQ ID NO: 1013970 - RNA, 19 nt, Human
uguuguccagguuggagug

SEQ ID NO: 1013971 - RNA, 24 nt, Human
uuacugcaaccuccaccuccuggg

SEQ ID NO: 1013972 - RNA, 24 nt, Human
uuacugcaaccuccaccuccuggg

SEQ ID NO: 1013973 - RNA, 25 nt, Human
uuacugcaaccuccaccuccugggu

SEQ ID NO: 1013974 - RNA, 27 nt, Human
uuacugcaaccuccaccuccuggguuc

SEQ ID NO: 1013975 - RNA, 24 nt, Human
uuaguagagacaggguuucaucau

SEQ ID NO: 1013976 - RNA, 24 nt, Human
uuaguagagacaggguuucaucau

SEQ ID NO: 1013977 - RNA, 21 nt, Human
uucaagcaauucuccugccuc

SEQ ID NO: 1013978 - RNA, 21 nt, Human
uucaagcaauucuccugccuc

SEQ ID NO: 1013979 - RNA, 24 nt, Human
uucaagcaauucuccugccucagc

SEQ ID NO: 1013980 - RNA, 24 nt, Human
uucaagcaauucuccugccucagc

SEQ ID NO: 1013981 - RNA, 23 nt, Human
uucacaacaauuuauaauacuuu

SEQ ID NO: 1013982 - RNA, 23 nt, Human
uucacaacaauuuauaauacuuu

SEQ ID NO: 1013983 - RNA, 18 nt, Human
uucacaguuagaucuuua

SEQ ID NO: 1013984 - RNA, 18 nt, Human
uucacaguuagaucuuua

SEQ ID NO: 1013985 - RNA, 19 nt, Human
uuccaaaggaaaaccugca

SEQ ID NO: 1013986 - RNA, 18 nt, Human
uuccagaucagucugaca

SEQ ID NO: 1013987 - RNA, 19 nt, Human
uuccagaucagucugacac

SEQ ID NO: 1013988 - RNA, 22 nt, Human
uucucuuuuuuuuccagaaacu

SEQ ID NO: 1013989 - RNA, 19 nt, Human
uucuuuggcaacucaccaa

SEQ ID NO: 1013990 - RNA, 24 nt, Human
uuguccagguuggagugcaguggu

SEQ ID NO: 1013991 - RNA, 20 nt, Human
uuguuguuguuuuuaaauaa

SEQ ID NO: 1013992 - RNA, 20 nt, Human
uuguuguuguuuuuaaauaa

SEQ ID NO: 1013993 - RNA, 23 nt, Human
uuuauccauauuccaaaggaaaa

SEQ ID NO: 1013994 - RNA, 21 nt, Human
uuucaucauguuugccaggcu

SEQ ID NO: 1013995 - RNA, 21 nt, Human
uuucaucauguuugccaggcu

SEQ ID NO: 1013996 - RNA, 20 nt, Human
uuuugguuuuuuuuuuuucu

SEQ ID NO: 1013997 - RNA, 23 nt, Human
uuuuuaguagagacaggguuuca

SEQ ID NO: 1013998 - RNA, 24 nt, Human
uuuuuaguagagacaggguuucau

SEQ ID NO: 1013999 - RNA, 22 nt, Human
uuuuuguauuuuuaguagagaa

SEQ ID NO: 1014000 - RNA, 22 nt, Human
uuuuuguauuuuuaguagagaa

SEQ ID NO: 1014001 - RNA, 24 nt, Human
uuuuuuguauuuuuaguagagaca

SEQ ID NO: 1014002 - RNA, 24 nt, Human
uuuuuuguauuuuuaguagagaca

SEQ ID NO: 1014003 - RNA, 22 nt, Human
uuuuuuguauuuuuaguagagg

SEQ ID NO: 1014004 - RNA, 22 nt, Human
uuuuuuguauuuuuaguagagg

SEQ ID NO: 1014005 - RNA, 24 nt, Human
uuuuuuuucugcacagacacaaua

SEQ ID NO: 1014006 - RNA, 25 nt, Human
uuuuuuuuuuuuaaauccauggucu

SEQ ID NO: 1014007 - RNA, 20 nt, Human
uuuuuuuuuuuuacaagucu

SEQ ID NO: 1014008 - RNA, 25 nt, Human
uuuuuuuuuuuugagauggagucuc

SEQ ID NO: 1014009 - RNA, 22 nt, Human
uuuuuuuuuuuuuugagaugga

SEQ ID NO: 1014010 - RNA, 23 nt, Human
uuuuuuuuuuuuuuuuuuacaag

SEQ ID NO: 1014011 - RNA, 22 nt, Human
aaacaaacugacaaguucaagc

SEQ ID NO: 1014012 - RNA, 24 nt, Human
aaacugacaaguucaagcaccugu

SEQ ID NO: 1014013 - RNA, 21 nt, Human
aacccugucuguugaauccac

SEQ ID NO: 1014014 - RNA, 22 nt, Human
aaccugagacggagaugaaggu

SEQ ID NO: 1014015 - RNA, 18 nt, Human
aagcccuuaauaccuuuc

SEQ ID NO: 1014016 - RNA, 21 nt, Human
aaggcaucaccauuuuccugu

SEQ ID NO: 1014017 - RNA, 20 nt, Human
aagggagagaagaacaugga

SEQ ID NO: 1014018 - RNA, 22 nt, Human
aagucaguauuucuugaacugg

SEQ ID NO: 1014019 - RNA, 21 nt, Human
aaucuaucguugcuuuuccua

SEQ ID NO: 1014020 - RNA, 18 nt, Human
aauuugcacuuuuucccc

SEQ ID NO: 1014021 - RNA, 22 nt, Human
acagagcuuguuucaaaucuau

SEQ ID NO: 1014022 - RNA, 21 nt, Human
acagccaaccuggcaguuguc

SEQ ID NO: 1014023 - RNA, 22 nt, Human
acuuugagagguucggaaaauu

SEQ ID NO: 1014024 - RNA, 20 nt, Human
agagaagaacauggagcaau

SEQ ID NO: 1014025 - RNA, 25 nt, Human
agccagcagcauuuuuuuuuuuuuu

SEQ ID NO: 1014026 - RNA, 24 nt, Human
agcccuuaauaccuuucugaacag

SEQ ID NO: 1014027 - RNA, 22 nt, Human
auaagggagagaagaacaugga

SEQ ID NO: 1014028 - RNA, 23 nt, Human
auaagggagagaagaacauggag

SEQ ID NO: 1014029 - RNA, 28 nt, Human
aucuacaacuacuucuguauauauugcu

SEQ ID NO: 1014030 - RNA, 19 nt, Human
caaacugacaaguucaagc

SEQ ID NO: 1014031 - RNA, 21 nt, Human
cagaaaagccagcagcauuuu

SEQ ID NO: 1014032 - RNA, 22 nt, Human
caguggccaugucccaaaauuc

SEQ ID NO: 1014033 - RNA, 18 nt, Human
cauucuuguuuuccaagg

SEQ ID NO: 1014034 - RNA, 19 nt, Human
ccaaccuggcaguuguccu

SEQ ID NO: 1014035 - RNA, 20 nt, Human
ccacugugguuauuacuagu

SEQ ID NO: 1014036 - RNA, 18 nt, Human
ccagccuucuggcagggg

SEQ ID NO: 1014037 - RNA, 22 nt, Human
ccauaagggucauuuucugcag

SEQ ID NO: 1014038 - RNA, 22 nt, Human
cccuuaauaccuuucugaacag

SEQ ID NO: 1014039 - RNA, 21 nt, Human
ccugguggcaaagguccauaa

SEQ ID NO: 1014040 - RNA, 18 nt, Human
ccugucuucagaaaagcc

SEQ ID NO: 1014041 - RNA, 21 nt, Human
cuagcuucagauuccaauucu

SEQ ID NO: 1014042 - RNA, 20 nt, Human
cugaacagccaugcaacuaa

SEQ ID NO: 1014043 - RNA, 25 nt, Human
cugaaggcucuccauuuucauguaa

SEQ ID NO: 1014044 - RNA, 20 nt, Human
cugagacggagaugaaggug

SEQ ID NO: 1014045 - RNA, 18 nt, Human
cuugcugaaggcucucca

SEQ ID NO: 1014046 - RNA, 25 nt, Human
cuuuaugaaugaauggcugucaugu

SEQ ID NO: 1014047 - RNA, 21 nt, Human
cuuuuuccuggucagucauuu

SEQ ID NO: 1014048 - RNA, 18 nt, Human
gaaaaggaugaacuguuu

SEQ ID NO: 1014049 - RNA, 19 nt, Human
gaacagcuuauauacacua

SEQ ID NO: 1014050 - RNA, 21 nt, Human
uaagacacgauucccucuuuc

SEQ ID NO: 1014051 - RNA, 21 nt, Human
uaaggaugaucuuuuuccugg

SEQ ID NO: 1014052 - RNA, 20 nt, Human
uaaggcaucaccauuuuccu

SEQ ID NO: 1014053 - RNA, 22 nt, Human
uaccuuacaccuucacgaguau

SEQ ID NO: 1014054 - RNA, 25 nt, Human
uacuucuagcuucagauuccaauuc

SEQ ID NO: 1014055 - RNA, 24 nt, Human
uagaaaaggaugaacuguuuugca

SEQ ID NO: 1014056 - RNA, 18 nt, Human
uagaaggaauacauucau

SEQ ID NO: 1014057 - RNA, 24 nt, Human
uaguaucagaccuuggugaagcag

SEQ ID NO: 1014058 - RNA, 18 nt, Human
uauauacacuaucugugc

SEQ ID NO: 1014059 - RNA, 22 nt, Human
ucaccauuuuccuguauuucua

SEQ ID NO: 1014060 - RNA, 20 nt, Human
ucagauuccaauucugcacu

SEQ ID NO: 1014061 - RNA, 21 nt, Human
ucccaaaauucagcuaaaacu

SEQ ID NO: 1014062 - RNA, 23 nt, Human
ucccagccuucuggcagggguuc

SEQ ID NO: 1014063 - RNA, 19 nt, Human
uccuguauuucuaugguug

SEQ ID NO: 1014064 - RNA, 22 nt, Human
uccuugcugaaggcucuccauu

SEQ ID NO: 1014065 - RNA, 23 nt, Human
ucuaauauacuucuagcuucaga

SEQ ID NO: 1014066 - RNA, 22 nt, Human
ucuauaaaacuagagccacuau

SEQ ID NO: 1014067 - RNA, 18 nt, Human
ucuaugguuggagaugag

SEQ ID NO: 1014068 - RNA, 18 nt, Human
ucuguaagccuugaguuc

SEQ ID NO: 1014069 - RNA, 18 nt, Human
ucuguaagccuugaguuc

SEQ ID NO: 1014070 - RNA, 22 nt, Human
ucuuguguuaugaucaacaaag

SEQ ID NO: 1014071 - RNA, 21 nt, Human
ucuuugaauguuguuguucuu

SEQ ID NO: 1014072 - RNA, 23 nt, Human
ugauucacaaaguaaacccuguc

SEQ ID NO: 1014073 - RNA, 27 nt, Human
ugcaauuuuucuuggcugggguauuua

SEQ ID NO: 1014074 - RNA, 20 nt, Human
ugcacugguagaaggaauac

SEQ ID NO: 1014075 - RNA, 25 nt, Human
uggaagaacggaaaacauacuuuga

SEQ ID NO: 1014076 - RNA, 23 nt, Human
ugggguauuuaaaugcaagagcu

SEQ ID NO: 1014077 - RNA, 20 nt, Human
ugucaucggcaggcucagau

SEQ ID NO: 1014078 - RNA, 21 nt, Human
uguguaucaacagagcuuguu

SEQ ID NO: 1014079 - RNA, 19 nt, Human
uguguuaugaucaacaaag

SEQ ID NO: 1014080 - RNA, 22 nt, Human
uguuuauauagauauauaugua

SEQ ID NO: 1014081 - RNA, 21 nt, Human
uucaaaagcagaacuacuucu

SEQ ID NO: 1014082 - RNA, 23 nt, Human
uucugaggaagucaguauuucuu

SEQ ID NO: 1014083 - RNA, 22 nt, Human
uucuucagacacuacuggagua

SEQ ID NO: 1014084 - RNA, 23 nt, Human
uugcugaaggcucuccauuuuca

SEQ ID NO: 1014085 - RNA, 25 nt, Human
uuucccagccugguggcaaaggucc

SEQ ID NO: 1014086 - RNA, 20 nt, Human
uuuccuggucagucauuuca

SEQ ID NO: 1014087 - RNA, 18 nt, Human
aaaccacagagagcagca

SEQ ID NO: 1014088 - RNA, 21 nt, Human
aaagaacuuagcaacaaagag

SEQ ID NO: 1014089 - RNA, 22 nt, Human
aaccuccaacucagugcauccc

SEQ ID NO: 1014090 - RNA, 21 nt, Human
aagcagacggugguggucagg

SEQ ID NO: 1014091 - RNA, 19 nt, Human
aaggcacacagggcaaaga

SEQ ID NO: 1014092 - RNA, 23 nt, Human
aauccucuccuuaaaugucuggc

SEQ ID NO: 1014093 - RNA, 24 nt, Human
aaucuugccuucaccuaaguccac

SEQ ID NO: 1014094 - RNA, 19 nt, Human
aauggcagagaggagaggg

SEQ ID NO: 1014095 - RNA, 21 nt, Human
acgcuggacacaaacugggcc

SEQ ID NO: 1014096 - RNA, 22 nt, Human
agaaguuuccuguuuugccuaa

SEQ ID NO: 1014097 - RNA, 24 nt, Human
agagagcagcacaaagagguuuac

SEQ ID NO: 1014098 - RNA, 21 nt, Human
agagagugugauuugagggug

SEQ ID NO: 1014099 - RNA, 21 nt, Human
agaggaagaagaggaucaaag

SEQ ID NO: 1014100 - RNA, 21 nt, Human
agaggaagaagaggaucaaag

SEQ ID NO: 1014101 - RNA, 20 nt, Human
agccaagaaauggcagagag

SEQ ID NO: 1014102 - RNA, 24 nt, Human
auggaaucaacaauaauccucucc

SEQ ID NO: 1014103 - RNA, 18 nt, Human
caaaccacagagagcagc

SEQ ID NO: 1014104 - RNA, 18 nt, Human
caaagaaucauuagccca

SEQ ID NO: 1014105 - RNA, 24 nt, Human
caacagaagcaaaucuugccuuca

SEQ ID NO: 1014106 - RNA, 24 nt, Human
caacucagugcaucccaaacccag

SEQ ID NO: 1014107 - RNA, 20 nt, Human
cacaaaccacagagagcagc

SEQ ID NO: 1014108 - RNA, 21 nt, Human
cacagggcaaagaggacuuuc

SEQ ID NO: 1014109 - RNA, 23 nt, Human
cagacacgggagccaacaggugg

SEQ ID NO: 1014110 - RNA, 18 nt, Human
cagagagcagcacaaaga

SEQ ID NO: 1014111 - RNA, 21 nt, Human
cagagugcuccuuuuuuuuga

SEQ ID NO: 1014112 - RNA, 19 nt, Human
cagccaagaaauggcagag

SEQ ID NO: 1014113 - RNA, 21 nt, Human
cagccaagaaauggcagagag

SEQ ID NO: 1014114 - RNA, 21 nt, Human
cagccuaggauaaauccagcu

SEQ ID NO: 1014115 - RNA, 20 nt, Human
cagcggccaccaagcagacg

SEQ ID NO: 1014116 - RNA, 25 nt, Human
ccaaacccagacgggccuggaccga

SEQ ID NO: 1014117 - RNA, 19 nt, Human
cccaguuucugcccaugcc

SEQ ID NO: 1014118 - RNA, 24 nt, Human
ccuugggaaugcugcgaggcccag

SEQ ID NO: 1014119 - RNA, 19 nt, Human
cgaggcccagcagaggaag

SEQ ID NO: 1014120 - RNA, 24 nt, Human
cuccaacucagugcaucccaaacc

SEQ ID NO: 1014121 - RNA, 21 nt, Human
cucccagccaagaaauggcag

SEQ ID NO: 1014122 - RNA, 19 nt, Human
cuggagguagcggagggca

SEQ ID NO: 1014123 - RNA, 25 nt, Human
cugugcauuuacuccugaaugcccu

SEQ ID NO: 1014124 - RNA, 19 nt, Human
gaagcaaaucuugccuuca

SEQ ID NO: 1014125 - RNA, 20 nt, Human
gaaucaacaauaauccucuc

SEQ ID NO: 1014126 - RNA, 23 nt, Human
gaggaucaaagcuuucauaaccu

SEQ ID NO: 1014127 - RNA, 21 nt, Human
gaguggccuucugucuuccag

SEQ ID NO: 1014128 - RNA, 25 nt, Human
gaucacaccugggcacgcuggacac

SEQ ID NO: 1014129 - RNA, 19 nt, Human
gcaacaaagagagacacga

SEQ ID NO: 1014130 - RNA, 20 nt, Human
ggcacacagggcaaagagga

SEQ ID NO: 1014131 - RNA, 18 nt, Human
gggcaaagaaucauuagc

SEQ ID NO: 1014132 - RNA, 23 nt, Human
guuucaaggcauuuucuuugucu

SEQ ID NO: 1014133 - RNA, 18 nt, Human
uaaauccagcuagauuua

SEQ ID NO: 1014134 - RNA, 23 nt, Human
uaaccuccaacucagugcauccc

SEQ ID NO: 1014135 - RNA, 20 nt, Human
uaagaggacacaaaccacag

SEQ ID NO: 1014136 - RNA, 26 nt, Human
uaagaggacacaaaccacagagagca

SEQ ID NO: 1014137 - RNA, 22 nt, Human
uaucuggagguagcggagggca

SEQ ID NO: 1014138 - RNA, 22 nt, Human
uccaagagggaaagaacuuagc

SEQ ID NO: 1014139 - RNA, 19 nt, Human
uccaccagaucacaccugg

SEQ ID NO: 1014140 - RNA, 20 nt, Human
uccagagugcuccuuuuuuu

SEQ ID NO: 1014141 - RNA, 25 nt, Human
ucccaaacccagacgggccuggacc

SEQ ID NO: 1014142 - RNA, 25 nt, Human
uccuuuuuuuugagguggaccacag

SEQ ID NO: 1014143 - RNA, 23 nt, Human
ucgcagagcagugaaaggccaaa

SEQ ID NO: 1014144 - RNA, 19 nt, Human
ugaagugggcaaagaauca

SEQ ID NO: 1014145 - RNA, 22 nt, Human
ugccagggcaugugacccuugg

SEQ ID NO: 1014146 - RNA, 26 nt, Human
ugccagggcaugugacccuugggaau

SEQ ID NO: 1014147 - RNA, 24 nt, Human
ugcuccuuuuuuuugagguggacc

SEQ ID NO: 1014148 - RNA, 18 nt, Human
uggaguggccuucugucu

SEQ ID NO: 1014149 - RNA, 22 nt, Human
uggcagagaggagagggauccu

SEQ ID NO: 1014150 - RNA, 18 nt, Human
ugggaaugcugcgaggcc

SEQ ID NO: 1014151 - RNA, 20 nt, Human
uucugcccaugccagggcau

SEQ ID NO: 1014152 - RNA, 19 nt, Human
uucuucagcagaaaucugg

SEQ ID NO: 1014153 - RNA, 24 nt, Human
uugccuucaccuaaguccaccaga

SEQ ID NO: 1014154 - RNA, 22 nt, Human
uuucuuaaguagaaggugaaca

SEQ ID NO: 1014155 - RNA, 25 nt, Human
aaaugcaccugaguguauaccacac

SEQ ID NO: 1014156 - RNA, 19 nt, Human
uggaaaaaugcaccugagu

SEQ ID NO: 1014157 - RNA, 22 nt, Human
uguauaccacacuugagcacuu

SEQ ID NO: 1014158 - RNA, 22 nt, Human
uuggaaaaaugcaccugagugu

SEQ ID NO: 1014159 - RNA, 24 nt, Human
uugugauuggaaaaaugcaccuga

SEQ ID NO: 1014160 - RNA, 21 nt, Human
caacuccuagaacuaucuccu

SEQ ID NO: 1014161 - RNA, 25 nt, Human
caagaucuugacuugaaguuucaca

SEQ ID NO: 1014162 - RNA, 20 nt, Human
cacaacuccuagaacuaucu

SEQ ID NO: 1014163 - RNA, 18 nt, Human
caugaaaauaauguugua

SEQ ID NO: 1014164 - RNA, 19 nt, Human
cccauucgccuccuuuugg

SEQ ID NO: 1014165 - RNA, 22 nt, Human
cuccugagcccauucgccuccu

SEQ ID NO: 1014166 - RNA, 23 nt, Human
cugagcccauucgccuccuuuug

SEQ ID NO: 1014167 - RNA, 22 nt, Human
cugcgcuccggggguggcuggg

SEQ ID NO: 1014168 - RNA, 25 nt, Human
uaucuccugagcccauucgccuccu

SEQ ID NO: 1014169 - RNA, 21 nt, Human
ucacaacuccuagaacuaucu

SEQ ID NO: 1014170 - RNA, 22 nt, Human
uggauaguaacuaaaaccaaga

SEQ ID NO: 1014171 - RNA, 24 nt, Human
uggcugggucccaucauuugaauu

SEQ ID NO: 1014172 - RNA, 18 nt, Human
uggcugggucgcugucgc

SEQ ID NO: 1014173 - RNA, 18 nt, Human
uggcugggucgcugucgc

SEQ ID NO: 1014174 - RNA, 18 nt, Human
uuuuuuuuuuuuuuuuug

SEQ ID NO: 1014175 - RNA, 21 nt, Human
uuuuuuuuuuuuuuuuugcaa

SEQ ID NO: 1014176 - RNA, 20 nt, Human
agaaaaaaaaagugagagaa

SEQ ID NO: 1014177 - RNA, 23 nt, Human
auccccacaaauucaguagaaaa

SEQ ID NO: 1014178 - RNA, 18 nt, Human
ccuauguagcugcaaagg

SEQ ID NO: 1014179 - RNA, 22 nt, Human
gugggauacagaaaaaaaaagu

SEQ ID NO: 1014180 - RNA, 24 nt, Human
ucauauguuuaaccuugauuugga

SEQ ID NO: 1014181 - RNA, 25 nt, Human
ugagaaaaaaauauuuaccauagga

SEQ ID NO: 1014182 - RNA, 20 nt, Human
uggaaucugauauauguuuu

SEQ ID NO: 1014183 - RNA, 19 nt, Human
ugggauacagaaaaaaaaa

SEQ ID NO: 1014184 - RNA, 25 nt, Human
uucacuuuuauuauaggauccccac

SEQ ID NO: 1014185 - RNA, 18 nt, Human
aaagaaaccagccucagg

SEQ ID NO: 1014186 - RNA, 22 nt, Human
accuaccccuucagagccaggg

SEQ ID NO: 1014187 - RNA, 19 nt, Human
accuagccucagacagccg

SEQ ID NO: 1014188 - RNA, 22 nt, Human
agcaaaaauaaaaauuaguuug

SEQ ID NO: 1014189 - RNA, 18 nt, Human
aggaaccaaggguggacu

SEQ ID NO: 1014190 - RNA, 20 nt, Human
agugguagagaccagaaaaa

SEQ ID NO: 1014191 - RNA, 22 nt, Human
aucucucagucccuucuuguug

SEQ ID NO: 1014192 - RNA, 18 nt, Human
augaaagaaaccagccuc

SEQ ID NO: 1014193 - RNA, 19 nt, Human
caauguacuucuuagguau

SEQ ID NO: 1014194 - RNA, 24 nt, Human
caauguacuucuuagguauguuaa

SEQ ID NO: 1014195 - RNA, 23 nt, Human
caauuacagaguguaauaccuug

SEQ ID NO: 1014196 - RNA, 24 nt, Human
caccuaccccuucagagccaggga

SEQ ID NO: 1014197 - RNA, 21 nt, Human
ccaccuagccucagacagcca

SEQ ID NO: 1014198 - RNA, 24 nt, Human
ccuagccucagacagccaggaggc

SEQ ID NO: 1014199 - RNA, 21 nt, Human
ccucagacagccaggaggccu

SEQ ID NO: 1014200 - RNA, 22 nt, Human
ccucagacagccaggaggccuu

SEQ ID NO: 1014201 - RNA, 26 nt, Human
cuagccucagacagccaggaggccuu

SEQ ID NO: 1014202 - RNA, 21 nt, Human
cuccuuggcuuucaacccacc

SEQ ID NO: 1014203 - RNA, 23 nt, Human
cuuggucucagugacuccuuggc

SEQ ID NO: 1014204 - RNA, 18 nt, Human
gaaauaucaaaacugaaa

SEQ ID NO: 1014205 - RNA, 23 nt, Human
gaggauaggauccagacaggguu

SEQ ID NO: 1014206 - RNA, 25 nt, Human
gaguaaucuuccuuaguaaucauuu

SEQ ID NO: 1014207 - RNA, 19 nt, Human
gauccagacaggguuacaa

SEQ ID NO: 1014208 - RNA, 21 nt, Human
guagagaaagccuuggucuca

SEQ ID NO: 1014209 - RNA, 22 nt, Human
gugguagagaccagaaaaagua

SEQ ID NO: 1014210 - RNA, 22 nt, Human
uacuuuuuaaacaaauuacuga

SEQ ID NO: 1014211 - RNA, 22 nt, Human
uaucaaaacugaaaaaaauagc

SEQ ID NO: 1014212 - RNA, 18 nt, Human
ucaggugugucuccucau

SEQ ID NO: 1014213 - RNA, 26 nt, Human
uccccagcuggggcaggguaaggagc

SEQ ID NO: 1014214 - RNA, 24 nt, Human
uccugagcugauuccaguuaggaa

SEQ ID NO: 1014215 - RNA, 25 nt, Human
uccugagcugauuccaguuaggaac

SEQ ID NO: 1014216 - RNA, 19 nt, Human
ucucucagucccuucuugu

SEQ ID NO: 1014217 - RNA, 22 nt, Human
ucuuucagagcugaagaaaggg

SEQ ID NO: 1014218 - RNA, 21 nt, Human
ugaaaaaaauagcuucccaga

SEQ ID NO: 1014219 - RNA, 23 nt, Human
ugaaaaaaauagcuucccagaua

SEQ ID NO: 1014220 - RNA, 22 nt, Human
ugaaagaaaccagccucaggug

SEQ ID NO: 1014221 - RNA, 21 nt, Human
ugacuccuuggcuuucaaccc

SEQ ID NO: 1014222 - RNA, 18 nt, Human
ugccauucuuuugcucuu

SEQ ID NO: 1014223 - RNA, 21 nt, Human
uggugcacuccauaguccaau

SEQ ID NO: 1014224 - RNA, 26 nt, Human
uguucuauuucuuuauuuuagcuuua

SEQ ID NO: 1014225 - RNA, 22 nt, Human
uuaguaaucauuucuguaacuc

SEQ ID NO: 1014226 - RNA, 21 nt, Human
uuagucucagcaaaaauaaaa

SEQ ID NO: 1014227 - RNA, 20 nt, Human
uucagagccagggaaacacc

SEQ ID NO: 1014228 - RNA, 24 nt, Human
uuuacagucccugcugacagugua

SEQ ID NO: 1014229 - RNA, 22 nt, Human
uuucaggggcuaaacuuuucug

SEQ ID NO: 1014230 - RNA, 24 nt, Human
uuugcaaaacuccuuucucccagu

SEQ ID NO: 1014231 - RNA, 24 nt, Human
uuuuuuuuuuuuucuaaaugcuuu

SEQ ID NO: 1014232 - RNA, 23 nt, Human
uuuuuuuuuuuuuuuucuaaaug

SEQ ID NO: 1014233 - RNA, 18 nt, Human
aagugcaaaguucuccca

SEQ ID NO: 1014234 - RNA, 22 nt, Human
cacgcaggagcacagacacguc

SEQ ID NO: 1014235 - RNA, 22 nt, Human
ccugcaauugaggugcuccauc

SEQ ID NO: 1014236 - RNA, 20 nt, Human
gcaaaguucucccagggaag

SEQ ID NO: 1014237 - RNA, 18 nt, Human
uccaaagaguucuucuua

SEQ ID NO: 1014238 - RNA, 22 nt, Human
uccaaagaguucuucuuagccc

SEQ ID NO: 1014239 - RNA, 18 nt, Human
uccacccaugaauggaau

SEQ ID NO: 1014240 - RNA, 18 nt, Human
ugagucagaaaucagagc

SEQ ID NO: 1014241 - RNA, 20 nt, Human
aaacccagagcaccacacag

SEQ ID NO: 1014242 - RNA, 23 nt, Human
aagggaaagaagagaugacaaga

SEQ ID NO: 1014243 - RNA, 24 nt, Human
acaauagaaaauuucuagcaugaa

SEQ ID NO: 1014244 - RNA, 21 nt, Human
acaccacugcagucccgggac

SEQ ID NO: 1014245 - RNA, 19 nt, Human
acagaaacccagagcacca

SEQ ID NO: 1014246 - RNA, 23 nt, Human
accacacaggaagagggagcaac

SEQ ID NO: 1014247 - RNA, 18 nt, Human
accuugaggcuggggagg

SEQ ID NO: 1014248 - RNA, 24 nt, Human
agacagaauaguuuaagcccuaac

SEQ ID NO: 1014249 - RNA, 18 nt, Human
agcaacacaagacuccca

SEQ ID NO: 1014250 - RNA, 21 nt, Human
aggaggagcguuagcagcaac

SEQ ID NO: 1014251 - RNA, 21 nt, Human
agggaaagaagagaugacaag

SEQ ID NO: 1014252 - RNA, 25 nt, Human
aggugaccagauucuugcccaaagc

SEQ ID NO: 1014253 - RNA, 23 nt, Human
auaaacaauagaaaauuucuagc

SEQ ID NO: 1014254 - RNA, 23 nt, Human
auaaauacaacuacauccuccac

SEQ ID NO: 1014255 - RNA, 18 nt, Human
auccacagaaacccagag

SEQ ID NO: 1014256 - RNA, 22 nt, Human
auccauguccucucuuuacagg

SEQ ID NO: 1014257 - RNA, 21 nt, Human
cacagaaacccagagcaccac

SEQ ID NO: 1014258 - RNA, 19 nt, Human
cacagccccaaccagacag

SEQ ID NO: 1014259 - RNA, 24 nt, Human
cagaaacccagagcaccacacagg

SEQ ID NO: 1014260 - RNA, 23 nt, Human
cagacugaggggucauucaugga

SEQ ID NO: 1014261 - RNA, 21 nt, Human
cauccuccacagccccaacca

SEQ ID NO: 1014262 - RNA, 22 nt, Human
caugcagaugugcuuuagaguu

SEQ ID NO: 1014263 - RNA, 23 nt, Human
ccaaccagacaggaauaggcagc

SEQ ID NO: 1014264 - RNA, 20 nt, Human
ccacagaaacccagagcacc

SEQ ID NO: 1014265 - RNA, 23 nt, Human
ccacagccccaaccagacaggaa

SEQ ID NO: 1014266 - RNA, 23 nt, Human
ccagcccagcagcaaaagggcuc

SEQ ID NO: 1014267 - RNA, 18 nt, Human
ccaggcugacaguggugg

SEQ ID NO: 1014268 - RNA, 22 nt, Human
cccagcccugguccuuggaggu

SEQ ID NO: 1014269 - RNA, 18 nt, Human
ccuaacccagacaugccc

SEQ ID NO: 1014270 - RNA, 23 nt, Human
cgagagcgcacaccacugcaguc

SEQ ID NO: 1014271 - RNA, 21 nt, Human
cgaggaaggaugcccaaaagc

SEQ ID NO: 1014272 - RNA, 23 nt, Human
cggccaguaauaaccucagggcc

SEQ ID NO: 1014273 - RNA, 21 nt, Human
cuaaagacuucccagcccugg

SEQ ID NO: 1014274 - RNA, 24 nt, Human
cuacaaagggaaagaagagaugac

SEQ ID NO: 1014275 - RNA, 21 nt, Human
cuccagcuccagaccuggauc

SEQ ID NO: 1014276 - RNA, 22 nt, Human
cucggggaaacccucuugucag

SEQ ID NO: 1014277 - RNA, 18 nt, Human
cugcuuccccagcuuugc

SEQ ID NO: 1014278 - RNA, 24 nt, Human
cuggggaggccagacugagggguc

SEQ ID NO: 1014279 - RNA, 18 nt, Human
gaagcuggaggaggagcg

SEQ ID NO: 1014280 - RNA, 22 nt, Human
gagcguuagcagcaacucgcgc

SEQ ID NO: 1014281 - RNA, 21 nt, Human
gagggcuugugggagaagggc

SEQ ID NO: 1014282 - RNA, 24 nt, Human
gagguggcagugcaagaagggccu

SEQ ID NO: 1014283 - RNA, 25 nt, Human
gaugacaagaaaggccgaggaagga

SEQ ID NO: 1014284 - RNA, 27 nt, Human
gauucuugcccaaagcaaaguugagag

SEQ ID NO: 1014285 - RNA, 22 nt, Human
gcacuaaagacuucccagcccu

SEQ ID NO: 1014286 - RNA, 21 nt, Human
gcagcaaaagggcucaguggg

SEQ ID NO: 1014287 - RNA, 20 nt, Human
gcccagcagcaaaagggcuc

SEQ ID NO: 1014288 - RNA, 19 nt, Human
gcggcuuugcuagcugcuc

SEQ ID NO: 1014289 - RNA, 20 nt, Human
gcgggggugggaagcuggag

SEQ ID NO: 1014290 - RNA, 20 nt, Human
ggaaaagccaaaucuccaag

SEQ ID NO: 1014291 - RNA, 18 nt, Human
ggaagagggagcaacaca

SEQ ID NO: 1014292 - RNA, 22 nt, Human
ggaaggcaccuggacuuagucc

SEQ ID NO: 1014293 - RNA, 22 nt, Human
ggcuacaaagggaaagaagaga

SEQ ID NO: 1014294 - RNA, 19 nt, Human
gggggugggagggcuugug

SEQ ID NO: 1014295 - RNA, 20 nt, Human
gguacuguggcucuugugcc

SEQ ID NO: 1014296 - RNA, 22 nt, Human
gucuguauuauccuuggaugac

SEQ ID NO: 1014297 - RNA, 24 nt, Human
uacaaagggaaagaagagaugaca

SEQ ID NO: 1014298 - RNA, 19 nt, Human
uacagguauguggcugcac

SEQ ID NO: 1014299 - RNA, 21 nt, Human
uacagguugugaugugaaggc

SEQ ID NO: 1014300 - RNA, 18 nt, Human
uaccgggccgcggcgggc

SEQ ID NO: 1014301 - RNA, 23 nt, Human
uagacagaauaguuuaagcccua

SEQ ID NO: 1014302 - RNA, 21 nt, Human
uagcaccuaacccagacaugc

SEQ ID NO: 1014303 - RNA, 19 nt, Human
uagcaguagccuguaccau

SEQ ID NO: 1014304 - RNA, 19 nt, Human
uagccuaguuggucuguau

SEQ ID NO: 1014305 - RNA, 24 nt, Human
uagccuguaccauggaucccauca

SEQ ID NO: 1014306 - RNA, 22 nt, Human
uaguccuaggagaagaccagcg

SEQ ID NO: 1014307 - RNA, 22 nt, Human
ucacgauccacagaaacccaga

SEQ ID NO: 1014308 - RNA, 18 nt, Human
uccacagaaacccagagc

SEQ ID NO: 1014309 - RNA, 19 nt, Human
uccacagaaacccagagca

SEQ ID NO: 1014310 - RNA, 24 nt, Human
uccacagaaacccagagcaccaca

SEQ ID NO: 1014311 - RNA, 20 nt, Human
uccacagccccaaccagaca

SEQ ID NO: 1014312 - RNA, 21 nt, Human
uccacuucggcucucggggaa

SEQ ID NO: 1014313 - RNA, 22 nt, Human
ucccaacuucugcuuccccagc

SEQ ID NO: 1014314 - RNA, 24 nt, Human
uccuccacagccccaaccagacag

SEQ ID NO: 1014315 - RNA, 18 nt, Human
ucuccaaguagaauggga

SEQ ID NO: 1014316 - RNA, 21 nt, Human
ucuccagcuccagaccuggau

SEQ ID NO: 1014317 - RNA, 22 nt, Human
ugacaagaaaggccgaggaagg

SEQ ID NO: 1014318 - RNA, 20 nt, Human
ugaccaaguucucuucagca

SEQ ID NO: 1014319 - RNA, 21 nt, Human
ugagguggcagugcaagaagg

SEQ ID NO: 1014320 - RNA, 20 nt, Human
ugaguggaccuugaggcugg

SEQ ID NO: 1014321 - RNA, 24 nt, Human
ugcccaaagcaaaguugagagaac

SEQ ID NO: 1014322 - RNA, 23 nt, Human
ugccuuacggccaguaauaaccu

SEQ ID NO: 1014323 - RNA, 23 nt, Human
uggaagggcaagaugugugaacu

SEQ ID NO: 1014324 - RNA, 19 nt, Human
ugggaagaagccggcgcug

SEQ ID NO: 1014325 - RNA, 21 nt, Human
uggggaggccagacugagggg

SEQ ID NO: 1014326 - RNA, 18 nt, Human
uuaacucugccuuacggc

SEQ ID NO: 1014327 - RNA, 20 nt, Human
uucuugcccaaagcaaaguu

SEQ ID NO: 1014328 - RNA, 22 nt, Human
uugcuagcugcucaucacagau

SEQ ID NO: 1014329 - RNA, 20 nt, Human
uuucagugaccucuagaaug

SEQ ID NO: 1014330 - RNA, 25 nt, Human
uuuccugccagcccagcagcaaaag

SEQ ID NO: 1014331 - RNA, 18 nt, Human
uuucuuggaaaagccaaa

SEQ ID NO: 1014332 - RNA, 18 nt, Human
aaaaaucagcauggaucu

SEQ ID NO: 1014333 - RNA, 19 nt, Human
aaauagcauaaaacuguag

SEQ ID NO: 1014334 - RNA, 23 nt, Human
aagcaauaauaaauucagaucca

SEQ ID NO: 1014335 - RNA, 21 nt, Human
acuaaaguucagaaauuucug

SEQ ID NO: 1014336 - RNA, 21 nt, Human
agagacgggagcagcggcaga

SEQ ID NO: 1014337 - RNA, 18 nt, Human
auaaaaaucagcauggau

SEQ ID NO: 1014338 - RNA, 20 nt, Human
cacggcuggaggcggcggcc

SEQ ID NO: 1014339 - RNA, 21 nt, Human
cauaaaacuguagaaugauga

SEQ ID NO: 1014340 - RNA, 23 nt, Human
ccacaaauagcauaaaacuguag

SEQ ID NO: 1014341 - RNA, 24 nt, Human
cuuuccacaaauagcauaaaacug

SEQ ID NO: 1014342 - RNA, 25 nt, Human
gaaaucuuuccacaaauagcauuau

SEQ ID NO: 1014343 - RNA, 25 nt, Human
gacgggagcagcggcagagggcacc

SEQ ID NO: 1014344 - RNA, 18 nt, Human
gagcagcggcagagggca

SEQ ID NO: 1014345 - RNA, 21 nt, Human
gagcguaaccaaagagacggg

SEQ ID NO: 1014346 - RNA, 19 nt, Human
gcaauaaaaaucagcaugg

SEQ ID NO: 1014347 - RNA, 22 nt, Human
guacauuaaugaaauguuucca

SEQ ID NO: 1014348 - RNA, 20 nt, Human
uaaaagaaauacacaaagua

SEQ ID NO: 1014349 - RNA, 23 nt, Human
ucagauccacuguauuaugcaac

SEQ ID NO: 1014350 - RNA, 18 nt, Human
ugaaaggauuugggaaag

SEQ ID NO: 1014351 - RNA, 22 nt, Human
ugaaaggauuugggaaagcuuu

SEQ ID NO: 1014352 - RNA, 21 nt, Human
ugaaauccacagcugguuuca

SEQ ID NO: 1014353 - RNA, 18 nt, Human
ugagaaagaaaucuuucc

SEQ ID NO: 1014354 - RNA, 20 nt, Human
ugggaaagcuuuacaaaagc

SEQ ID NO: 1014355 - RNA, 18 nt, Human
uuccaaagaaauacugaa

SEQ ID NO: 1014356 - RNA, 25 nt, Human
uuuuuuuuuuuuuuuuuugaguuuu

SEQ ID NO: 1014357 - RNA, 20 nt, Human
uuuuuuuuuuuuuuuuuugg

SEQ ID NO: 1014358 - RNA, 23 nt, Human
aaaaaaaaaaaaaaaagaaagaa

SEQ ID NO: 1014359 - RNA, 26 nt, Human
aaaaaagaaauucaaacuagacagga

SEQ ID NO: 1014360 - RNA, 22 nt, Human
aauuaaaaaaaaaaaaaaaaga

SEQ ID NO: 1014361 - RNA, 20 nt, Human
acagacauggcccacuuccu

SEQ ID NO: 1014362 - RNA, 18 nt, Human
accucacuuccagugcac

SEQ ID NO: 1014363 - RNA, 20 nt, Human
agaaaaaaaagaaauucaaa

SEQ ID NO: 1014364 - RNA, 21 nt, Human
agagucuugacagagucuucu

SEQ ID NO: 1014365 - RNA, 21 nt, Human
agccacugcuccccacagaca

SEQ ID NO: 1014366 - RNA, 22 nt, Human
aggaaggugaggaagagcuggg

SEQ ID NO: 1014367 - RNA, 18 nt, Human
aggugaggaagagcuggg

SEQ ID NO: 1014368 - RNA, 19 nt, Human
aggugaggaagagcugggu

SEQ ID NO: 1014369 - RNA, 19 nt, Human
augugaccucacuuccagu

SEQ ID NO: 1014370 - RNA, 18 nt, Human
cacgagcaccacaggccc

SEQ ID NO: 1014371 - RNA, 26 nt, Human
cacgagcaccacaggcccagaauggg

SEQ ID NO: 1014372 - RNA, 22 nt, Human
cagagacaucagcaguaguuca

SEQ ID NO: 1014373 - RNA, 22 nt, Human
caggcccagccucgugcagaac

SEQ ID NO: 1014374 - RNA, 20 nt, Human
cauggcccacuuccuggggc

SEQ ID NO: 1014375 - RNA, 19 nt, Human
ccacaggcccagaaugggg

SEQ ID NO: 1014376 - RNA, 21 nt, Human
ccagaauggggcaugaggccc

SEQ ID NO: 1014377 - RNA, 20 nt, Human
cccagcccugcaacccggcc

SEQ ID NO: 1014378 - RNA, 19 nt, Human
ccccaacagagacaucagc

SEQ ID NO: 1014379 - RNA, 21 nt, Human
cccccccuccuccacgccuag

SEQ ID NO: 1014380 - RNA, 19 nt, Human
cccuccuccacgccuaggg

SEQ ID NO: 1014381 - RNA, 19 nt, Human
cccugacccugccuuuccc

SEQ ID NO: 1014382 - RNA, 22 nt, Human
cccugccuuucccauccagggg

SEQ ID NO: 1014383 - RNA, 18 nt, Human
ccggccgcgagcgcgcgc

SEQ ID NO: 1014384 - RNA, 18 nt, Human
ccugcccgggacgcgggg

SEQ ID NO: 1014385 - RNA, 23 nt, Human
ccugugggaggggacaccccucc

SEQ ID NO: 1014386 - RNA, 19 nt, Human
cgcccccccuccuccacgc

SEQ ID NO: 1014387 - RNA, 22 nt, Human
cuagagcccagcucugcagcgc

SEQ ID NO: 1014388 - RNA, 23 nt, Human
cucucccaaccacccauuuuccu

SEQ ID NO: 1014389 - RNA, 19 nt, Human
cugacccugccuuucccau

SEQ ID NO: 1014390 - RNA, 24 nt, Human
cuggaaacucugcaugggucucag

SEQ ID NO: 1014391 - RNA, 21 nt, Human
cuggcuacaaaagaacugucc

SEQ ID NO: 1014392 - RNA, 20 nt, Human
cuucuaggguccccuggcua

SEQ ID NO: 1014393 - RNA, 23 nt, Human
cuugcagcccuguggagccucag

SEQ ID NO: 1014394 - RNA, 21 nt, Human
gacccugccuuucccauccag

SEQ ID NO: 1014395 - RNA, 23 nt, Human
gagcgcgcgcacgggcgcggggc

SEQ ID NO: 1014396 - RNA, 23 nt, Human
gccacgagcaccacaggcccaga

SEQ ID NO: 1014397 - RNA, 19 nt, Human
gccacugcuccccacagac

SEQ ID NO: 1014398 - RNA, 21 nt, Human
gcccuggagccgccccacccc

SEQ ID NO: 1014399 - RNA, 18 nt, Human
gcgcgcacgggcgcgggg

SEQ ID NO: 1014400 - RNA, 19 nt, Human
gcgcgcacgggcgcggggc

SEQ ID NO: 1014401 - RNA, 18 nt, Human
gcgcgcgcacgggcgcgg

SEQ ID NO: 1014402 - RNA, 22 nt, Human
gcggggcugagccgcccccccu

SEQ ID NO: 1014403 - RNA, 21 nt, Human
gcugcucaugugaccucacuu

SEQ ID NO: 1014404 - RNA, 18 nt, Human
ggcucagcaagccacugc

SEQ ID NO: 1014405 - RNA, 20 nt, Human
guggaaugcugcuggugccc

SEQ ID NO: 1014406 - RNA, 22 nt, Human
uaaaaaaaaaaaaaaaagaaag

SEQ ID NO: 1014407 - RNA, 19 nt, Human
uacaaaagaacuguccugg

SEQ ID NO: 1014408 - RNA, 22 nt, Human
uauuucagacuucacgcugagc

SEQ ID NO: 1014409 - RNA, 21 nt, Human
ucccacgcugcucaugugacc

SEQ ID NO: 1014410 - RNA, 22 nt, Human
uccuggggcugcucugagcccu

SEQ ID NO: 1014411 - RNA, 19 nt, Human
ucucagugggcccugaccc

SEQ ID NO: 1014412 - RNA, 22 nt, Human
ucucccaaccacccauuuuccu

SEQ ID NO: 1014413 - RNA, 21 nt, Human
ucucgcguucccgccagcccu

SEQ ID NO: 1014414 - RNA, 20 nt, Human
ucuguucuaguuucucuccc

SEQ ID NO: 1014415 - RNA, 21 nt, Human
ucuugauggcugaaaugggug

SEQ ID NO: 1014416 - RNA, 20 nt, Human
ugagccgcccccccuccucc

SEQ ID NO: 1014417 - RNA, 20 nt, Human
ugagcuucaggcacaauuac

SEQ ID NO: 1014418 - RNA, 23 nt, Human
ugcuccccacagacauggcccac

SEQ ID NO: 1014419 - RNA, 19 nt, Human
ugcucugagcccuauugca

SEQ ID NO: 1014420 - RNA, 23 nt, Human
uggcccacuuccugguccccugg

SEQ ID NO: 1014421 - RNA, 21 nt, Human
ugggcccugacccugccuuuc

SEQ ID NO: 1014422 - RNA, 21 nt, Human
uguccaccuucccugccgucu

SEQ ID NO: 1014423 - RNA, 22 nt, Human
ugugcagccugggccucugguu

SEQ ID NO: 1014424 - RNA, 22 nt, Human
uuaaaaaaaaaaaaaaaagaaa

SEQ ID NO: 1014425 - RNA, 19 nt, Human
uucaaacuagacaggaagg

SEQ ID NO: 1014426 - RNA, 28 nt, Human
uucccugccgucuguguggguucuugau

SEQ ID NO: 1014427 - RNA, 22 nt, Human
uucuguucuaguuucucuccca

SEQ ID NO: 1014428 - RNA, 18 nt, Human
uugcagcccuguggagcc

SEQ ID NO: 1014429 - RNA, 22 nt, Human
uuucccggguccuccacgggua

SEQ ID NO: 1014430 - RNA, 24 nt, Human
aaacuggcauuugcagagcccuug

SEQ ID NO: 1014431 - RNA, 20 nt, Human
aaagcuccuucugucuacuc

SEQ ID NO: 1014432 - RNA, 18 nt, Human
aaaugcuauuuccuggac

SEQ ID NO: 1014433 - RNA, 21 nt, Human
aacaucauccuauuucugcua

SEQ ID NO: 1014434 - RNA, 20 nt, Human
aaccagaagaggugagacag

SEQ ID NO: 1014435 - RNA, 19 nt, Human
aaccuguaggacuugagga

SEQ ID NO: 1014436 - RNA, 21 nt, Human
aagucugaaaaucacacgucu

SEQ ID NO: 1014437 - RNA, 24 nt, Human
acccauucacagagggccuccccc

SEQ ID NO: 1014438 - RNA, 18 nt, Human
acccugggcaaggggacc

SEQ ID NO: 1014439 - RNA, 18 nt, Human
acuugucagcuucaacca

SEQ ID NO: 1014440 - RNA, 20 nt, Human
aggcggucuggacacauccu

SEQ ID NO: 1014441 - RNA, 23 nt, Human
aggcuggcaccagagucccccag

SEQ ID NO: 1014442 - RNA, 19 nt, Human
agguuguuggcugauccug

SEQ ID NO: 1014443 - RNA, 19 nt, Human
aguuugaacccaugguugg

SEQ ID NO: 1014444 - RNA, 20 nt, Human
auucacagagggccuccccc

SEQ ID NO: 1014445 - RNA, 24 nt, Human
auuuucaaggaucaaagaagguca

SEQ ID NO: 1014446 - RNA, 21 nt, Human
caaaaggcuuucccacuuacc

SEQ ID NO: 1014447 - RNA, 19 nt, Human
caagagaagcagaaaaaug

SEQ ID NO: 1014448 - RNA, 26 nt, Human
caagagaagcagaaaaaugaaccaaa

SEQ ID NO: 1014449 - RNA, 24 nt, Human
cacagugcagggacugagccaucc

SEQ ID NO: 1014450 - RNA, 21 nt, Human
cacccgcagcuugccaaaggc

SEQ ID NO: 1014451 - RNA, 19 nt, Human
caccggggccuuucccagg

SEQ ID NO: 1014452 - RNA, 24 nt, Human
cacuuucucuuucggccgaugaga

SEQ ID NO: 1014453 - RNA, 21 nt, Human
cagcaccggugugcaauugac

SEQ ID NO: 1014454 - RNA, 19 nt, Human
cagcagcccuaacuugugg

SEQ ID NO: 1014455 - RNA, 20 nt, Human
cagcagcccuaacuuguggc

SEQ ID NO: 1014456 - RNA, 19 nt, Human
cagccaagagaagcagaaa

SEQ ID NO: 1014457 - RNA, 25 nt, Human
cagcuugccaaaggcagguuguugg

SEQ ID NO: 1014458 - RNA, 24 nt, Human
caugaaauuaaaaaccaaaucuga

SEQ ID NO: 1014459 - RNA, 23 nt, Human
ccauucacagagggccuccccca

SEQ ID NO: 1014460 - RNA, 25 nt, Human
cccacaaccccucuggcugcuuucc

SEQ ID NO: 1014461 - RNA, 18 nt, Human
ccccaguuuuccuggcau

SEQ ID NO: 1014462 - RNA, 20 nt, Human
ccucaccggggccuuuccca

SEQ ID NO: 1014463 - RNA, 19 nt, Human
ccucagaacggaagggcuc

SEQ ID NO: 1014464 - RNA, 18 nt, Human
ccuggcaugaggcggucu

SEQ ID NO: 1014465 - RNA, 20 nt, Human
cgucuggggucagggguggg

SEQ ID NO: 1014466 - RNA, 19 nt, Human
cucaccggggccuuuccca

SEQ ID NO: 1014467 - RNA, 19 nt, Human
cuccaugggaaagggccca

SEQ ID NO: 1014468 - RNA, 23 nt, Human
cucccaacagcaccggugugcaa

SEQ ID NO: 1014469 - RNA, 20 nt, Human
cuccuaaggcugcagccucc

SEQ ID NO: 1014470 - RNA, 24 nt, Human
cuccuaaggcugcagccuccaugg

SEQ ID NO: 1014471 - RNA, 20 nt, Human
cuguccccgggaggcagcac

SEQ ID NO: 1014472 - RNA, 23 nt, Human
cuuaaaucauacuguuuuuuguu

SEQ ID NO: 1014473 - RNA, 18 nt, Human
cuucccguggcugcuguu

SEQ ID NO: 1014474 - RNA, 24 nt, Human
cuuguggcggcaguaagucucccc

SEQ ID NO: 1014475 - RNA, 22 nt, Human
gaaagaaaagucugaaaaucac

SEQ ID NO: 1014476 - RNA, 19 nt, Human
gaaauuaaaaaccaaaucu

SEQ ID NO: 1014477 - RNA, 19 nt, Human
gaaguucugcugcucgaaa

SEQ ID NO: 1014478 - RNA, 22 nt, Human
gagacagucacagugcagggac

SEQ ID NO: 1014479 - RNA, 24 nt, Human
gccccacaaccccucuggcugcuu

SEQ ID NO: 1014480 - RNA, 22 nt, Human
gcugagcuuugggagggaaccu

SEQ ID NO: 1014481 - RNA, 18 nt, Human
gcuucugcuuuugagucc

SEQ ID NO: 1014482 - RNA, 19 nt, Human
ggcagcaccucaccggggc

SEQ ID NO: 1014483 - RNA, 20 nt, Human
ggcagcaccucaccggggcc

SEQ ID NO: 1014484 - RNA, 19 nt, Human
ggucauggcugucaaaguu

SEQ ID NO: 1014485 - RNA, 24 nt, Human
guccuuuuccuuucuccugcuguu

SEQ ID NO: 1014486 - RNA, 20 nt, Human
gugcugcugugcugucuagc

SEQ ID NO: 1014487 - RNA, 19 nt, Human
gugcuucugcuuuugaguc

SEQ ID NO: 1014488 - RNA, 18 nt, Human
uaacucaacacuuaaauc

SEQ ID NO: 1014489 - RNA, 19 nt, Human
uacccugggcaaggggacc

SEQ ID NO: 1014490 - RNA, 19 nt, Human
uacuaaggagaauaguuca

SEQ ID NO: 1014491 - RNA, 21 nt, Human
uacuaaggagaauaguucaac

SEQ ID NO: 1014492 - RNA, 21 nt, Human
uccugcuguggcccacuccuc

SEQ ID NO: 1014493 - RNA, 18 nt, Human
ucucguuguugcugucug

SEQ ID NO: 1014494 - RNA, 20 nt, Human
ugaacccaugguuggucugg

SEQ ID NO: 1014495 - RNA, 19 nt, Human
ugaccugcugaccuucccu

SEQ ID NO: 1014496 - RNA, 20 nt, Human
ugaccugcugaccuucccuu

SEQ ID NO: 1014497 - RNA, 23 nt, Human
ugagacagucacagugcagggac

SEQ ID NO: 1014498 - RNA, 21 nt, Human
ugaggcggucuggacacaucc

SEQ ID NO: 1014499 - RNA, 20 nt, Human
ugaguccugggugcgaaguu

SEQ ID NO: 1014500 - RNA, 23 nt, Human
ugaguccugggugcgaaguugcu

SEQ ID NO: 1014501 - RNA, 21 nt, Human
ugccuugugaguuucaugguc

SEQ ID NO: 1014502 - RNA, 19 nt, Human
ugcucacaaacaucauccu

SEQ ID NO: 1014503 - RNA, 23 nt, Human
ugcuuugugaguuucaucgcguu

SEQ ID NO: 1014504 - RNA, 22 nt, Human
uggaaggggaagacaaggaacc

SEQ ID NO: 1014505 - RNA, 25 nt, Human
uggccaugccacaucaaaaggcuuu

SEQ ID NO: 1014506 - RNA, 18 nt, Human
uggccgaagggcaugaaa

SEQ ID NO: 1014507 - RNA, 18 nt, Human
uggcggcagugcuuggac

SEQ ID NO: 1014508 - RNA, 19 nt, Human
ugggaaagggcccacgacc

SEQ ID NO: 1014509 - RNA, 21 nt, Human
ugggaggccgggguucaggcc

SEQ ID NO: 1014510 - RNA, 22 nt, Human
ugggcagugcuugucaaacugg

SEQ ID NO: 1014511 - RNA, 18 nt, Human
uggggucaggggugggua

SEQ ID NO: 1014512 - RNA, 22 nt, Human
uggggucaggggugggucacug

SEQ ID NO: 1014513 - RNA, 22 nt, Human
ugggugcugcugugcugucuag

SEQ ID NO: 1014514 - RNA, 18 nt, Human
uggucuugagucuggugc

SEQ ID NO: 1014515 - RNA, 18 nt, Human
ugguuuggucacucccaa

SEQ ID NO: 1014516 - RNA, 22 nt, Human
uguccccgggaggcagcaccuc

SEQ ID NO: 1014517 - RNA, 20 nt, Human
uguggcuggaccuuggccau

SEQ ID NO: 1014518 - RNA, 24 nt, Human
uguucgcacuuucucuuucggccg

SEQ ID NO: 1014519 - RNA, 22 nt, Human
uguugcaugucccguugagccu

SEQ ID NO: 1014520 - RNA, 24 nt, Human
uucucguuguugcugucuguucgc

SEQ ID NO: 1014521 - RNA, 20 nt, Human
uuggccaugccacaucaaaa

SEQ ID NO: 1014522 - RNA, 18 nt, Human
uuggcugcggcucugucc

SEQ ID NO: 1014523 - RNA, 20 nt, Human
uuuauguugcaugucccguu

SEQ ID NO: 1014524 - RNA, 21 nt, Human
uuuauguugcaugucccguug

SEQ ID NO: 1014525 - RNA, 22 nt, Human
uuucaaggaucaaagaagguca

SEQ ID NO: 1014526 - RNA, 18 nt, Human
uuucauggucauggcugu

SEQ ID NO: 1014527 - RNA, 23 nt, Human
uuuccuggcaugaggcggucugg

SEQ ID NO: 1014528 - RNA, 28 nt, Human
aaucuaacaaauucuaacaaauuucuau

SEQ ID NO: 1014529 - RNA, 21 nt, Human
agaaauuggagaaaauaaacu

SEQ ID NO: 1014530 - RNA, 19 nt, Human
aggcaucauugcaauaaaa

SEQ ID NO: 1014531 - RNA, 18 nt, Human
cacuuaacugcagagacc

SEQ ID NO: 1014532 - RNA, 22 nt, Human
ugcaugguaggacagaagugac

SEQ ID NO: 1014533 - RNA, 23 nt, Human
aaaaugcuucaguccuaaagcua

SEQ ID NO: 1014534 - RNA, 21 nt, Human
aaacuugggguuguacugaug

SEQ ID NO: 1014535 - RNA, 19 nt, Human
aacagggucugaaacuugg

SEQ ID NO: 1014536 - RNA, 20 nt, Human
aacaugcugcugcaucugcu

SEQ ID NO: 1014537 - RNA, 20 nt, Human
aacauggcaagacccugucu

SEQ ID NO: 1014538 - RNA, 22 nt, Human
aagaagguggauuugugucaag

SEQ ID NO: 1014539 - RNA, 18 nt, Human
aagcugcucaagagcccc

SEQ ID NO: 1014540 - RNA, 22 nt, Human
aagugaggaagaggggguggcc

SEQ ID NO: 1014541 - RNA, 21 nt, Human
acacccuaugcgccaccaauc

SEQ ID NO: 1014542 - RNA, 20 nt, Human
acaugugugcugaagucuuc

SEQ ID NO: 1014543 - RNA, 19 nt, Human
acccuuuagggguuuccua

SEQ ID NO: 1014544 - RNA, 18 nt, Human
accgcggaucccucccgc

SEQ ID NO: 1014545 - RNA, 23 nt, Human
accuucucuaccuccuucugcug

SEQ ID NO: 1014546 - RNA, 22 nt, Human
agaagcuggcguagagcuugag

SEQ ID NO: 1014547 - RNA, 25 nt, Human
agcaaagguucccagcucuuuaaga

SEQ ID NO: 1014548 - RNA, 27 nt, Human
agcaauaaaagcacagaagggagggcc

SEQ ID NO: 1014549 - RNA, 24 nt, Human
agcacuuugggagguugaggcagg

SEQ ID NO: 1014550 - RNA, 18 nt, Human
agccuucuccaccuccuc

SEQ ID NO: 1014551 - RNA, 19 nt, Human
agcgaugagaguacaggga

SEQ ID NO: 1014552 - RNA, 20 nt, Human
aggaagaggggguggccgcc

SEQ ID NO: 1014553 - RNA, 24 nt, Human
aggaagaggggguggccgccaggg

SEQ ID NO: 1014554 - RNA, 22 nt, Human
aggcaggaagauuacuugagcc

SEQ ID NO: 1014555 - RNA, 24 nt, Human
aggcaggaagauuacuugagccua

SEQ ID NO: 1014556 - RNA, 20 nt, Human
agggaagugaggaagagggg

SEQ ID NO: 1014557 - RNA, 21 nt, Human
agguugaggcaggaagauuac

SEQ ID NO: 1014558 - RNA, 24 nt, Human
agguugaggcaggaagauuacuug

SEQ ID NO: 1014559 - RNA, 22 nt, Human
augcugcugcaucugcugcugg

SEQ ID NO: 1014560 - RNA, 21 nt, Human
caagaagguggauuuguguca

SEQ ID NO: 1014561 - RNA, 21 nt, Human
cacacgcuccuccucuucugg

SEQ ID NO: 1014562 - RNA, 21 nt, Human
cacacgcuccuccucuucugg

SEQ ID NO: 1014563 - RNA, 23 nt, Human
caccaaucggaggccgaagugaa

SEQ ID NO: 1014564 - RNA, 20 nt, Human
cacccuaugcgccaccaauc

SEQ ID NO: 1014565 - RNA, 19 nt, Human
caccgcggaucccucccgc

SEQ ID NO: 1014566 - RNA, 24 nt, Human
cagaaucagggucugaugaacuuc

SEQ ID NO: 1014567 - RNA, 24 nt, Human
cagcacuuugggagguugaggcag

SEQ ID NO: 1014568 - RNA, 24 nt, Human
cagcacuuugggagguugaggcag

SEQ ID NO: 1014569 - RNA, 21 nt, Human
caguaacagaagcuggcguag

SEQ ID NO: 1014570 - RNA, 18 nt, Human
caguugcaaaaucugggg

SEQ ID NO: 1014571 - RNA, 24 nt, Human
caucuucagcuguucaaauaguuc

SEQ ID NO: 1014572 - RNA, 22 nt, Human
cccaagccuucuccaccuccuc

SEQ ID NO: 1014573 - RNA, 25 nt, Human
cccauaacaaggagacuucacuuga

SEQ ID NO: 1014574 - RNA, 25 nt, Human
ccuaugcgccaccaaucggaggccg

SEQ ID NO: 1014575 - RNA, 21 nt, Human
ccuccgcuucccuggguccac

SEQ ID NO: 1014576 - RNA, 23 nt, Human
ccuuacacugggguuuaaccuuc

SEQ ID NO: 1014577 - RNA, 24 nt, Human
cucacugucaguuggcgggcaguc

SEQ ID NO: 1014578 - RNA, 22 nt, Human
cugcugcaucugcugcuggagu

SEQ ID NO: 1014579 - RNA, 19 nt, Human
cuguaauuccagcacuuug

SEQ ID NO: 1014580 - RNA, 22 nt, Human
cuuccauguuggagaaucccau

SEQ ID NO: 1014581 - RNA, 21 nt, Human
cuucugcuguuuggcugaagg

SEQ ID NO: 1014582 - RNA, 21 nt, Human
cuugagccuaugaguuccaga

SEQ ID NO: 1014583 - RNA, 21 nt, Human
cuugagggguguuaaaguuag

SEQ ID NO: 1014584 - RNA, 21 nt, Human
cuugagggguguuaaaguuag

SEQ ID NO: 1014585 - RNA, 20 nt, Human
cuuuagggguuuccuauugg

SEQ ID NO: 1014586 - RNA, 24 nt, Human
gaagauuacuugagccuaugaguu

SEQ ID NO: 1014587 - RNA, 25 nt, Human
gcaagaagguggauuucuccccugg

SEQ ID NO: 1014588 - RNA, 22 nt, Human
gccaccaaucggaggccgaagu

SEQ ID NO: 1014589 - RNA, 19 nt, Human
gccgaagugaaggcuccca

SEQ ID NO: 1014590 - RNA, 20 nt, Human
gcugcugcaucugcugcugg

SEQ ID NO: 1014591 - RNA, 22 nt, Human
ggaacagggucugaaacuuggg

SEQ ID NO: 1014592 - RNA, 20 nt, Human
ggcuccuccgcuucccuggg

SEQ ID NO: 1014593 - RNA, 21 nt, Human
uaaagcaagcugcucaagagc

SEQ ID NO: 1014594 - RNA, 23 nt, Human
uaaagcaagcugcucaagagccc

SEQ ID NO: 1014595 - RNA, 19 nt, Human
uaacaaggagacuucacuu

SEQ ID NO: 1014596 - RNA, 23 nt, Human
uaagaaacucagucccuucaaaa

SEQ ID NO: 1014597 - RNA, 22 nt, Human
uacccuuuagggguuuccuauu

SEQ ID NO: 1014598 - RNA, 21 nt, Human
uaugaguuccagaacauggca

SEQ ID NO: 1014599 - RNA, 19 nt, Human
uauuccacagagugggagc

SEQ ID NO: 1014600 - RNA, 22 nt, Human
uauugguuacacccuaugcgcc

SEQ ID NO: 1014601 - RNA, 18 nt, Human
ucagcggcgcgagcccaa

SEQ ID NO: 1014602 - RNA, 27 nt, Human
ucagcggcgcgagcccaagccuucucc

SEQ ID NO: 1014603 - RNA, 18 nt, Human
ucagggucugaugaacuu

SEQ ID NO: 1014604 - RNA, 24 nt, Human
ucccaaacagauacagcuuggccu

SEQ ID NO: 1014605 - RNA, 24 nt, Human
ucucacugucaguuggcgggcagu

SEQ ID NO: 1014606 - RNA, 22 nt, Human
ucuuggaaaguuucaaacagau

SEQ ID NO: 1014607 - RNA, 22 nt, Human
ucuuggaaaguuucaaacagau

SEQ ID NO: 1014608 - RNA, 24 nt, Human
ugaacaugcugcugcaucugcugc

SEQ ID NO: 1014609 - RNA, 20 nt, Human
ugaagcaaaaguauauuccc

SEQ ID NO: 1014610 - RNA, 21 nt, Human
ugacaguuuuaugagggcugc

SEQ ID NO: 1014611 - RNA, 19 nt, Human
ugaggaagaggggguggcc

SEQ ID NO: 1014612 - RNA, 24 nt, Human
ugaggcaggaagauuacuugagcc

SEQ ID NO: 1014613 - RNA, 25 nt, Human
ugaggcaggaagauuacuugagccu

SEQ ID NO: 1014614 - RNA, 18 nt, Human
ugcugcugcaucugcugc

SEQ ID NO: 1014615 - RNA, 23 nt, Human
ugcuggagucucuuccuuugugc

SEQ ID NO: 1014616 - RNA, 19 nt, Human
ugcuguuuggcugaagguu

SEQ ID NO: 1014617 - RNA, 18 nt, Human
uggagaaucccaucucau

SEQ ID NO: 1014618 - RNA, 23 nt, Human
uggcaagaagguggauuuguguc

SEQ ID NO: 1014619 - RNA, 21 nt, Human
uggccgccaggcuccuccgcu

SEQ ID NO: 1014620 - RNA, 23 nt, Human
ugggagguugaggcaggaagauu

SEQ ID NO: 1014621 - RNA, 18 nt, Human
uuacuugagccuaugagu

SEQ ID NO: 1014622 - RNA, 24 nt, Human
uuccagcacuuugggagguugagg

SEQ ID NO: 1014623 - RNA, 21 nt, Human
uuccauguuggagaaucccau

SEQ ID NO: 1014624 - RNA, 19 nt, Human
uucccuggguccaccgcgg

SEQ ID NO: 1014625 - RNA, 19 nt, Human
uugaagcaaaaguauauuc

SEQ ID NO: 1014626 - RNA, 26 nt, Human
uugaagcaauaaaagcacagauuuau

SEQ ID NO: 1014627 - RNA, 20 nt, Human
uugagauugggguugcaggu

SEQ ID NO: 1014628 - RNA, 22 nt, Human
uuugcuuccuuuucucccuggg

SEQ ID NO: 1014629 - RNA, 18 nt, Human
uuuuuuuuuuuuuuuuug

SEQ ID NO: 1014630 - RNA, 27 nt, Human
uuuuuuuuuuuuuuuuuuuuuuugggg

SEQ ID NO: 1014631 - RNA, 21 nt, Human
aaaaaaaacaaaaaacccaac

SEQ ID NO: 1014632 - RNA, 25 nt, Human
aaaaaaaacaaaaaacccaacaaaa

SEQ ID NO: 1014633 - RNA, 23 nt, Human
aaaaaaaucccaacaacaugcua

SEQ ID NO: 1014634 - RNA, 20 nt, Human
aaaaaacccaacaaaacaga

SEQ ID NO: 1014635 - RNA, 23 nt, Human
aaaaacaaaaaaaacaaaaaacc

SEQ ID NO: 1014636 - RNA, 20 nt, Human
aaaacaacuacaauaaccau

SEQ ID NO: 1014637 - RNA, 24 nt, Human
aaaaccaaccaaccaaccaacccc

SEQ ID NO: 1014638 - RNA, 23 nt, Human
aaacaaaaaaaacaaaaaaccca

SEQ ID NO: 1014639 - RNA, 24 nt, Human
aaacaaaaaaaacaaaaaacccaa

SEQ ID NO: 1014640 - RNA, 21 nt, Human
aaacaaaaaacccaacaaaac

SEQ ID NO: 1014641 - RNA, 22 nt, Human
aaacaaaaaacccaacaaaaca

SEQ ID NO: 1014642 - RNA, 18 nt, Human
aaacaaacaaaaagguau

SEQ ID NO: 1014643 - RNA, 21 nt, Human
aaacaagagaccacaucaagg

SEQ ID NO: 1014644 - RNA, 25 nt, Human
aaacauugaaagacccuuaaaacac

SEQ ID NO: 1014645 - RNA, 22 nt, Human
aaacccaacaaaacagaacaaa

SEQ ID NO: 1014646 - RNA, 23 nt, Human
aaaguaaaacagucuucagccuu

SEQ ID NO: 1014647 - RNA, 19 nt, Human
aaauaaagguauaaucaug

SEQ ID NO: 1014648 - RNA, 21 nt, Human
aacaaaaagguauuacauaag

SEQ ID NO: 1014649 - RNA, 20 nt, Human
aacaaaaugcacacccacaa

SEQ ID NO: 1014650 - RNA, 23 nt, Human
aacaagagaccacaucaaggcua

SEQ ID NO: 1014651 - RNA, 24 nt, Human
aacaggcucacuucccccagcccc

SEQ ID NO: 1014652 - RNA, 22 nt, Human
aaccaaccaaccaaccaacccc

SEQ ID NO: 1014653 - RNA, 23 nt, Human
aaccaaccaaccaaccaaccccc

SEQ ID NO: 1014654 - RNA, 23 nt, Human
aaccaacccccccaccgacccug

SEQ ID NO: 1014655 - RNA, 20 nt, Human
aaccacauaaacaaacaaaa

SEQ ID NO: 1014656 - RNA, 22 nt, Human
aaccccccccccaaacuuuccc

SEQ ID NO: 1014657 - RNA, 20 nt, Human
aacuucuuacuuccaacuuu

SEQ ID NO: 1014658 - RNA, 20 nt, Human
aagcaauucaagaauaccca

SEQ ID NO: 1014659 - RNA, 21 nt, Human
aagcggcgacggcugcgggcc

SEQ ID NO: 1014660 - RNA, 22 nt, Human
aaggacauaaaacaagagacca

SEQ ID NO: 1014661 - RNA, 23 nt, Human
aaggacucuuaggucuccuucag

SEQ ID NO: 1014662 - RNA, 22 nt, Human
aaggugguaaaaaaaaccagga

SEQ ID NO: 1014663 - RNA, 24 nt, Human
aaguaagaacaaucuugaaggcaa

SEQ ID NO: 1014664 - RNA, 23 nt, Human
aaucaugauuaucucuauuucuu

SEQ ID NO: 1014665 - RNA, 21 nt, Human
acaaaaccaaccaaccaacca

SEQ ID NO: 1014666 - RNA, 19 nt, Human
acacaauuaauuacuguua

SEQ ID NO: 1014667 - RNA, 23 nt, Human
acauuaacagcagcaauggacaa

SEQ ID NO: 1014668 - RNA, 22 nt, Human
accaaccaaccaacccccccac

SEQ ID NO: 1014669 - RNA, 19 nt, Human
accaacccccccaccgacc

SEQ ID NO: 1014670 - RNA, 23 nt, Human
accaacccccccaccgacccugc

SEQ ID NO: 1014671 - RNA, 19 nt, Human
accagauuuaaacuaccag

SEQ ID NO: 1014672 - RNA, 21 nt, Human
accaggaaaugaagauuuuac

SEQ ID NO: 1014673 - RNA, 22 nt, Human
acccaacaaaacagaacaaaau

SEQ ID NO: 1014674 - RNA, 21 nt, Human
acccccccaccgacccugcca

SEQ ID NO: 1014675 - RNA, 18 nt, Human
acuacaauaaccauccca

SEQ ID NO: 1014676 - RNA, 20 nt, Human
acuacucuaaaacuccaucu

SEQ ID NO: 1014677 - RNA, 22 nt, Human
acuuuuucaagauacagaaaac

SEQ ID NO: 1014678 - RNA, 18 nt, Human
agaaaacuuccaaagcua

SEQ ID NO: 1014679 - RNA, 21 nt, Human
agaaaauacugaaaguaaaac

SEQ ID NO: 1014680 - RNA, 22 nt, Human
agaaacauugaaagacccuuaa

SEQ ID NO: 1014681 - RNA, 21 nt, Human
agauaaucgagauuuaaauaa

SEQ ID NO: 1014682 - RNA, 20 nt, Human
agauuuaaacuaccagugaa

SEQ ID NO: 1014683 - RNA, 25 nt, Human
agcacucauuucucaggaccuuugg

SEQ ID NO: 1014684 - RNA, 20 nt, Human
agcacugaauauugccaccc

SEQ ID NO: 1014685 - RNA, 19 nt, Human
agugauugcauuuuuuuga

SEQ ID NO: 1014686 - RNA, 26 nt, Human
auaaaauugguuuauuguaaaagcaa

SEQ ID NO: 1014687 - RNA, 24 nt, Human
auaaacaaacaaaaagguauuaca

SEQ ID NO: 1014688 - RNA, 18 nt, Human
auaaaguucucuaucaag

SEQ ID NO: 1014689 - RNA, 20 nt, Human
auaaaguucucuaucaaggg

SEQ ID NO: 1014690 - RNA, 19 nt, Human
auagcaaaagaaauaaaaa

SEQ ID NO: 1014691 - RNA, 19 nt, Human
aucuaccguaugcccagag

SEQ ID NO: 1014692 - RNA, 21 nt, Human
aucuucacaacccccccccca

SEQ ID NO: 1014693 - RNA, 22 nt, Human
aucuucacaaccccccccccaa

SEQ ID NO: 1014694 - RNA, 18 nt, Human
augaacccuugaaaauaa

SEQ ID NO: 1014695 - RNA, 19 nt, Human
auuacaaaugagaacuaca

SEQ ID NO: 1014696 - RNA, 20 nt, Human
auuauccaccaaaaucuaua

SEQ ID NO: 1014697 - RNA, 24 nt, Human
caaaacagaacaaaaugcacaccc

SEQ ID NO: 1014698 - RNA, 31 nt, Human
caaaacagaacaaaaugcacacccacaaaag

SEQ ID NO: 1014699 - RNA, 20 nt, Human
caaaaccaaccaaccaacca

SEQ ID NO: 1014700 - RNA, 24 nt, Human
caaaaccaaccaaccaaccaaccc

SEQ ID NO: 1014701 - RNA, 27 nt, Human
caaaaccaaccaaccaaccaacccccc

SEQ ID NO: 1014702 - RNA, 20 nt, Human
caaaauacuuagauuuugua

SEQ ID NO: 1014703 - RNA, 18 nt, Human
caaacuuucccacccucc

SEQ ID NO: 1014704 - RNA, 22 nt, Human
caaagaaaacuuccaaagcuaa

SEQ ID NO: 1014705 - RNA, 20 nt, Human
caaagcacugugccagguau

SEQ ID NO: 1014706 - RNA, 24 nt, Human
caacacugagguauaacugggcaa

SEQ ID NO: 1014707 - RNA, 22 nt, Human
caaccaaccaaccaaccccccc

SEQ ID NO: 1014708 - RNA, 23 nt, Human
caaccaaccaaccaaccccccca

SEQ ID NO: 1014709 - RNA, 21 nt, Human
caaccaaccaacccccccacc

SEQ ID NO: 1014710 - RNA, 21 nt, Human
caaccaacccccccaccgacc

SEQ ID NO: 1014711 - RNA, 20 nt, Human
cacaaccccccccccaaacu

SEQ ID NO: 1014712 - RNA, 22 nt, Human
cacaaccccccccccaaacuuu

SEQ ID NO: 1014713 - RNA, 24 nt, Human
cacaaccccccccccaaacuuucc

SEQ ID NO: 1014714 - RNA, 26 nt, Human
cacaaccccccccccaaacuuuccca

SEQ ID NO: 1014715 - RNA, 21 nt, Human
cacccucccccuaagcuaaag

SEQ ID NO: 1014716 - RNA, 22 nt, Human
caccgacccugccaaaaacaaa

SEQ ID NO: 1014717 - RNA, 21 nt, Human
cacgggccgagguggagaagc

SEQ ID NO: 1014718 - RNA, 26 nt, Human
cagaaaacaauuguuaugauaggcac

SEQ ID NO: 1014719 - RNA, 27 nt, Human
cagcaacauuauuuguagcaaaggagg

SEQ ID NO: 1014720 - RNA, 28 nt, Human
cagcagcaauggacaaggaagagcaaaa

SEQ ID NO: 1014721 - RNA, 21 nt, Human
cagcuaacucaaaaccuuaua

SEQ ID NO: 1014722 - RNA, 23 nt, Human
caggcucacuucccccagccccc

SEQ ID NO: 1014723 - RNA, 27 nt, Human
caggcucacuucccccagcccccaaaa

SEQ ID NO: 1014724 - RNA, 25 nt, Human
caucccccgccccggcgccuccgcc

SEQ ID NO: 1014725 - RNA, 19 nt, Human
cauuacuacucuaaaacuc

SEQ ID NO: 1014726 - RNA, 22 nt, Human
ccaaccaacccccccaccgacc

SEQ ID NO: 1014727 - RNA, 24 nt, Human
ccaaccagauuuaaacuaccagug

SEQ ID NO: 1014728 - RNA, 19 nt, Human
ccaacccccccaccgaccc

SEQ ID NO: 1014729 - RNA, 22 nt, Human
ccaacccccccaccgacccugc

SEQ ID NO: 1014730 - RNA, 19 nt, Human
ccaaugcuacccaauacaa

SEQ ID NO: 1014731 - RNA, 20 nt, Human
ccacccucccccuaagcuaa

SEQ ID NO: 1014732 - RNA, 22 nt, Human
ccagauuuaaacuaccagugaa

SEQ ID NO: 1014733 - RNA, 19 nt, Human
ccccaccgacccugccaaa

SEQ ID NO: 1014734 - RNA, 20 nt, Human
ccccagcccccaaaaugaac

SEQ ID NO: 1014735 - RNA, 23 nt, Human
ccccccaaacuuucccacccucc

SEQ ID NO: 1014736 - RNA, 24 nt, Human
ccccccaaacuuucccacccuccc

SEQ ID NO: 1014737 - RNA, 25 nt, Human
ccccccaaacuuucccacccucccc

SEQ ID NO: 1014738 - RNA, 18 nt, Human
cccccccaccgacccugc

SEQ ID NO: 1014739 - RNA, 22 nt, Human
cccccgcccugcgccccggcuc

SEQ ID NO: 1014740 - RNA, 21 nt, Human
cccccuaaaucuucacaaccc

SEQ ID NO: 1014741 - RNA, 18 nt, Human
cccccugacccaggcgag

SEQ ID NO: 1014742 - RNA, 20 nt, Human
ccccgcccugcgccccggcc

SEQ ID NO: 1014743 - RNA, 23 nt, Human
ccccuaaaucuucacaacccccc

SEQ ID NO: 1014744 - RNA, 23 nt, Human
cccgacgcgcacccccugaccca

SEQ ID NO: 1014745 - RNA, 20 nt, Human
cccuaaaucuucacaacccc

SEQ ID NO: 1014746 - RNA, 21 nt, Human
ccgacgcgcacccccugaccc

SEQ ID NO: 1014747 - RNA, 25 nt, Human
ccgcaucccccgccccggcgccucc

SEQ ID NO: 1014748 - RNA, 18 nt, Human
ccgccccggcgccuccgc

SEQ ID NO: 1014749 - RNA, 21 nt, Human
ccggggggcugcgccgcggcc

SEQ ID NO: 1014750 - RNA, 18 nt, Human
ccuccgcccccgcccugc

SEQ ID NO: 1014751 - RNA, 21 nt, Human
cgacaaaaccaaccaaccaac

SEQ ID NO: 1014752 - RNA, 23 nt, Human
cgacaaaaccaaccaaccaacca

SEQ ID NO: 1014753 - RNA, 24 nt, Human
cgacccugccaaaaacaaaaaaaa

SEQ ID NO: 1014754 - RNA, 24 nt, Human
cgcccccgcccugcgccccggcuc

SEQ ID NO: 1014755 - RNA, 24 nt, Human
cgccuccgcccccgcccugcgccc

SEQ ID NO: 1014756 - RNA, 18 nt, Human
cgcggccccgcauccccc

SEQ ID NO: 1014757 - RNA, 19 nt, Human
cgggaggggcugcgaggca

SEQ ID NO: 1014758 - RNA, 19 nt, Human
cgggccgggcggcgcuguc

SEQ ID NO: 1014759 - RNA, 21 nt, Human
cgggcggcgcuguccucgcuc

SEQ ID NO: 1014760 - RNA, 25 nt, Human
cuaaaacuccaucugcaguggccau

SEQ ID NO: 1014761 - RNA, 24 nt, Human
cuaaaugcugugacaugaagcauc

SEQ ID NO: 1014762 - RNA, 23 nt, Human
cuaggaggaaaagaaaauacuga

SEQ ID NO: 1014763 - RNA, 20 nt, Human
cucaaaaagggaaaggacuc

SEQ ID NO: 1014764 - RNA, 19 nt, Human
cucacuucccccagccccc

SEQ ID NO: 1014765 - RNA, 18 nt, Human
cuccaaaucaaugugcuc

SEQ ID NO: 1014766 - RNA, 18 nt, Human
cugaauuccaaucgagac

SEQ ID NO: 1014767 - RNA, 25 nt, Human
cugcacauuaaaaaaaaucccaaca

SEQ ID NO: 1014768 - RNA, 22 nt, Human
cuggugccacuuuaauucacaa

SEQ ID NO: 1014769 - RNA, 26 nt, Human
cuuaaaauaaaacuucuuacuuccaa

SEQ ID NO: 1014770 - RNA, 22 nt, Human
cuuauaagcuccuaaaauaaaa

SEQ ID NO: 1014771 - RNA, 21 nt, Human
cuucccaagcugaggcuuuuc

SEQ ID NO: 1014772 - RNA, 19 nt, Human
gaaaacugcaacuggcuua

SEQ ID NO: 1014773 - RNA, 26 nt, Human
gaaauugucucaugccuuauaagcuc

SEQ ID NO: 1014774 - RNA, 18 nt, Human
gacgcgcacccccugacc

SEQ ID NO: 1014775 - RNA, 22 nt, Human
gaggaaaagaaaauacugaaag

SEQ ID NO: 1014776 - RNA, 19 nt, Human
gaggcuuuucauagcagcu

SEQ ID NO: 1014777 - RNA, 23 nt, Human
gaucacuuuuccagcuaacucaa

SEQ ID NO: 1014778 - RNA, 20 nt, Human
gccaaaaacaaaaaaaacaa

SEQ ID NO: 1014779 - RNA, 18 nt, Human
gcccccaaaaugaacagu

SEQ ID NO: 1014780 - RNA, 18 nt, Human
gccccggcgccuccgccc

SEQ ID NO: 1014781 - RNA, 21 nt, Human
gccgagguggagaagcggcga

SEQ ID NO: 1014782 - RNA, 20 nt, Human
gcuccacgggccgaggugga

SEQ ID NO: 1014783 - RNA, 19 nt, Human
gcugcgccucgggaggggc

SEQ ID NO: 1014784 - RNA, 21 nt, Human
ggaaaagaaaauacugaaagu

SEQ ID NO: 1014785 - RNA, 19 nt, Human
ggaaagcagggaaaccuaa

SEQ ID NO: 1014786 - RNA, 18 nt, Human
ggagaagcggcgacggcu

SEQ ID NO: 1014787 - RNA, 24 nt, Human
ggcaaagaaaacuuccaaagcuag

SEQ ID NO: 1014788 - RNA, 20 nt, Human
ggcaaauuauaggcacuccu

SEQ ID NO: 1014789 - RNA, 19 nt, Human
ggccggggggcugcgccgc

SEQ ID NO: 1014790 - RNA, 24 nt, Human
gguaaaaaaaaccaggaaaugaag

SEQ ID NO: 1014791 - RNA, 20 nt, Human
guguacuuaggugacugaaa

SEQ ID NO: 1014792 - RNA, 24 nt, Human
uaaaaaauacucuuuggaaaccau

SEQ ID NO: 1014793 - RNA, 19 nt, Human
uaaaacaagagaccacauc

SEQ ID NO: 1014794 - RNA, 20 nt, Human
uaaaacaagagaccacauca

SEQ ID NO: 1014795 - RNA, 20 nt, Human
uaaaacacagaggugcuagc

SEQ ID NO: 1014796 - RNA, 18 nt, Human
uaaaagagagagcagaua

SEQ ID NO: 1014797 - RNA, 18 nt, Human
uaaaauaaaaucaagguc

SEQ ID NO: 1014798 - RNA, 22 nt, Human
uaaaccacuauaaagcuuauuu

SEQ ID NO: 1014799 - RNA, 18 nt, Human
uaaacuaccagugaaaua

SEQ ID NO: 1014800 - RNA, 21 nt, Human
uaacaacaugcuugcgaggau

SEQ ID NO: 1014801 - RNA, 22 nt, Human
uaacacagcaacauuauuugua

SEQ ID NO: 1014802 - RNA, 21 nt, Human
uaagaucaaagcacugugcca

SEQ ID NO: 1014803 - RNA, 23 nt, Human
uaagggcuuauucuagaaacauu

SEQ ID NO: 1014804 - RNA, 19 nt, Human
uaaucugaucacuuuucca

SEQ ID NO: 1014805 - RNA, 27 nt, Human
uacaacacugagguauaacugggcaaa

SEQ ID NO: 1014806 - RNA, 25 nt, Human
uagcaaaagaaauaaaaaguuuuuu

SEQ ID NO: 1014807 - RNA, 21 nt, Human
uaggaacaaggacauaaaaca

SEQ ID NO: 1014808 - RNA, 19 nt, Human
uaugaauacuuaacacagc

SEQ ID NO: 1014809 - RNA, 19 nt, Human
uaugaauucugaauuacac

SEQ ID NO: 1014810 - RNA, 19 nt, Human
uauguuuggguguguguau

SEQ ID NO: 1014811 - RNA, 19 nt, Human
ucaaccauaaguagaucua

SEQ ID NO: 1014812 - RNA, 25 nt, Human
ucaaggcuaugauucaaacucaaaa

SEQ ID NO: 1014813 - RNA, 25 nt, Human
ucacaaccccccccccaaacuuucc

SEQ ID NO: 1014814 - RNA, 22 nt, Human
ucacuucccccagcccccaaaa

SEQ ID NO: 1014815 - RNA, 22 nt, Human
ucagauguaccaacgcuagaaa

SEQ ID NO: 1014816 - RNA, 20 nt, Human
uccaagggagaaaauaaagc

SEQ ID NO: 1014817 - RNA, 21 nt, Human
uccaagggagaaaauaaagcc

SEQ ID NO: 1014818 - RNA, 20 nt, Human
uccaucauccaaacaggcuc

SEQ ID NO: 1014819 - RNA, 22 nt, Human
uccaucauccaaacaggcucac

SEQ ID NO: 1014820 - RNA, 23 nt, Human
ucccacccucccccuaagcuaaa

SEQ ID NO: 1014821 - RNA, 24 nt, Human
ucccccuaaaucuucacaaccccc

SEQ ID NO: 1014822 - RNA, 22 nt, Human
ucucuauuucuuugcuaaauuc

SEQ ID NO: 1014823 - RNA, 21 nt, Human
ucugcagacugccccaaccag

SEQ ID NO: 1014824 - RNA, 18 nt, Human
ugaaaauaacacaaaugu

SEQ ID NO: 1014825 - RNA, 21 nt, Human
ugaaauauaaacuacuaguca

SEQ ID NO: 1014826 - RNA, 28 nt, Human
ugaaccacauaaacaaacaguuaaagag

SEQ ID NO: 1014827 - RNA, 26 nt, Human
ugaagaaacaacuguugaacaaacua

SEQ ID NO: 1014828 - RNA, 22 nt, Human
ugaauacuuaacacagcaacau

SEQ ID NO: 1014829 - RNA, 21 nt, Human
ugacugaaaauaacacaaaug

SEQ ID NO: 1014830 - RNA, 23 nt, Human
ugagggguaaaggaagaucucca

SEQ ID NO: 1014831 - RNA, 22 nt, Human
ugauaggcacacccacaauucu

SEQ ID NO: 1014832 - RNA, 20 nt, Human
ugauuggugaacauuuaacu

SEQ ID NO: 1014833 - RNA, 20 nt, Human
ugauuggugaacauuuaacu

SEQ ID NO: 1014834 - RNA, 19 nt, Human
ugcaguggccauuuccccc

SEQ ID NO: 1014835 - RNA, 21 nt, Human
ugccaaaaacaaaaaaaacaa

SEQ ID NO: 1014836 - RNA, 22 nt, Human
ugccaaaaacaaaaaaaacaaa

SEQ ID NO: 1014837 - RNA, 25 nt, Human
ugccaaaaacaaaaaaaacaaaaaa

SEQ ID NO: 1014838 - RNA, 22 nt, Human
ugcgccccggcuccacuggucu

SEQ ID NO: 1014839 - RNA, 19 nt, Human
uggaaagcagggaaaccua

SEQ ID NO: 1014840 - RNA, 23 nt, Human
uggaaagcagggaaaccuaaaaa

SEQ ID NO: 1014841 - RNA, 19 nt, Human
uggguguguguauguauau

SEQ ID NO: 1014842 - RNA, 18 nt, Human
ugguacuauauauauaua

SEQ ID NO: 1014843 - RNA, 20 nt, Human
ugguacuauauauauauauu

SEQ ID NO: 1014844 - RNA, 23 nt, Human
ugugaaagaggucagcaauacau

SEQ ID NO: 1014845 - RNA, 19 nt, Human
uguuaugaacccuugaaaa

SEQ ID NO: 1014846 - RNA, 23 nt, Human
uuaaagagaaagaaguuuauaaa

SEQ ID NO: 1014847 - RNA, 21 nt, Human
uuauauacaacacagugauug

SEQ ID NO: 1014848 - RNA, 23 nt, Human
uucaacacugauugguaugaauu

SEQ ID NO: 1014849 - RNA, 19 nt, Human
uucacaaccccccccccaa

SEQ ID NO: 1014850 - RNA, 22 nt, Human
uucacaaccccccccccaaacu

SEQ ID NO: 1014851 - RNA, 23 nt, Human
uucacaaccccccccccaaacuu

SEQ ID NO: 1014852 - RNA, 22 nt, Human
uucauagcuuauauugaagagu

SEQ ID NO: 1014853 - RNA, 21 nt, Human
uucccacccucccccuaagcu

SEQ ID NO: 1014854 - RNA, 19 nt, Human
uucccuguguucauuuuuc

SEQ ID NO: 1014855 - RNA, 21 nt, Human
uuccgacaaaaccaaccaacc

SEQ ID NO: 1014856 - RNA, 21 nt, Human
uugaucuucugcacauuaaaa

SEQ ID NO: 1014857 - RNA, 25 nt, Human
uugcuaaauucaacuaccaauauac

SEQ ID NO: 1014858 - RNA, 20 nt, Human
uuggaaaccauuauuacucc

SEQ ID NO: 1014859 - RNA, 22 nt, Human
aggggggaagaugcugggcugg

SEQ ID NO: 1014860 - RNA, 20 nt, Human
gaagaaggggggaagaugcu

SEQ ID NO: 1014861 - RNA, 20 nt, Human
ggggggaagaugcugggcug

SEQ ID NO: 1014862 - RNA, 21 nt, Human
ggggggaagaugcugggcugg

SEQ ID NO: 1014863 - RNA, 26 nt, Human
gugguggaagaaggggggaagaugcu

SEQ ID NO: 1014864 - RNA, 21 nt, Human
aacaccgacgcugccaagaag

SEQ ID NO: 1014865 - RNA, 24 nt, Human
aagcgcccgccuguaccgcuaccc

SEQ ID NO: 1014866 - RNA, 19 nt, Human
ccaacaccgacgcugccaa

SEQ ID NO: 1014867 - RNA, 22 nt, Human
ccaagaagcuguaguucgcagu

SEQ ID NO: 1014868 - RNA, 18 nt, Human
ccaggaugccgugcaccu

SEQ ID NO: 1014869 - RNA, 23 nt, Human
ccccaggaagccggccuccugcc

SEQ ID NO: 1014870 - RNA, 20 nt, Human
cccgcggccaacaccgacgc

SEQ ID NO: 1014871 - RNA, 21 nt, Human
ccgacgcugccaagaagcugu

SEQ ID NO: 1014872 - RNA, 21 nt, Human
ccgccgcggucuccccuucuc

SEQ ID NO: 1014873 - RNA, 22 nt, Human
ccuccugccucuucgcugcgca

SEQ ID NO: 1014874 - RNA, 21 nt, Human
ccuguaccgcuaccccaggaa

SEQ ID NO: 1014875 - RNA, 24 nt, Human
cugggggccgccgcggucuccccu

SEQ ID NO: 1014876 - RNA, 19 nt, Human
gaaagccgcucucacuggg

SEQ ID NO: 1014877 - RNA, 22 nt, Human
gaguaagcgcccgccuguaccg

SEQ ID NO: 1014878 - RNA, 22 nt, Human
gccuguaccgcuaccccaggaa

SEQ ID NO: 1014879 - RNA, 23 nt, Human
gcgcagcacaucgcaccguccug

SEQ ID NO: 1014880 - RNA, 23 nt, Human
ggaugccgugcaccuuuaccuca

SEQ ID NO: 1014881 - RNA, 21 nt, Human
ggucccauucauccgaggggg

SEQ ID NO: 1014882 - RNA, 23 nt, Human
uaccgcuaccccaggaagccggc

SEQ ID NO: 1014883 - RNA, 19 nt, Human
ucacugggggccgccgcgg

SEQ ID NO: 1014884 - RNA, 20 nt, Human
ucauccgagggggcguccga

SEQ ID NO: 1014885 - RNA, 21 nt, Human
ucccaggaugccgugcaccuu

SEQ ID NO: 1014886 - RNA, 21 nt, Human
ucucacugggggccgccgcgg

SEQ ID NO: 1014887 - RNA, 18 nt, Human
aaggacccaagaguccag

SEQ ID NO: 1014888 - RNA, 25 nt, Human
acccuauccucuuccuaagauccag

SEQ ID NO: 1014889 - RNA, 20 nt, Human
acugacccuauccucuuccu

SEQ ID NO: 1014890 - RNA, 21 nt, Human
agaagcagaaaccccagccca

SEQ ID NO: 1014891 - RNA, 19 nt, Human
agaggacccaggggucugg

SEQ ID NO: 1014892 - RNA, 19 nt, Human
aggacccaagaguccagcc

SEQ ID NO: 1014893 - RNA, 20 nt, Human
aggcccccagaccacucacc

SEQ ID NO: 1014894 - RNA, 24 nt, Human
cacucuuuccccgggagucgggag

SEQ ID NO: 1014895 - RNA, 24 nt, Human
cagaaccggacuuccacccacugg

SEQ ID NO: 1014896 - RNA, 20 nt, Human
cagcccuaaaccuccacccc

SEQ ID NO: 1014897 - RNA, 20 nt, Human
cccaagaguccagcccuaaa

SEQ ID NO: 1014898 - RNA, 22 nt, Human
cccagaccacucaccuuuaaag

SEQ ID NO: 1014899 - RNA, 24 nt, Human
cccagcccacucuuuccccgggag

SEQ ID NO: 1014900 - RNA, 18 nt, Human
ccccaagcccagaggccc

SEQ ID NO: 1014901 - RNA, 25 nt, Human
ccccaagcccagaggcccccagacc

SEQ ID NO: 1014902 - RNA, 20 nt, Human
ccccgggagucgggaguccg

SEQ ID NO: 1014903 - RNA, 19 nt, Human
cgcagaaccggacuuccac

SEQ ID NO: 1014904 - RNA, 20 nt, Human
cggagccccacuaccuuccc

SEQ ID NO: 1014905 - RNA, 18 nt, Human
cuggccccaagcccagag

SEQ ID NO: 1014906 - RNA, 21 nt, Human
gaagcagaaaccccagcccac

SEQ ID NO: 1014907 - RNA, 25 nt, Human
gauccagaagcagaaaccccagccc

SEQ ID NO: 1014908 - RNA, 22 nt, Human
gccccaagcccagaggccccca

SEQ ID NO: 1014909 - RNA, 18 nt, Human
gcccuaaaccuccacccc

SEQ ID NO: 1014910 - RNA, 20 nt, Human
gcccuaaaccuccaccccgc

SEQ ID NO: 1014911 - RNA, 21 nt, Human
gggaacgggggacccagguga

SEQ ID NO: 1014912 - RNA, 21 nt, Human
guccggagccccacuaccuuc

SEQ ID NO: 1014913 - RNA, 24 nt, Human
uaaaccuccaccccgcuuuccgca

SEQ ID NO: 1014914 - RNA, 18 nt, Human
uaguccagacugacccua

SEQ ID NO: 1014915 - RNA, 19 nt, Human
uaucagaacaaaagaguuc

SEQ ID NO: 1014916 - RNA, 25 nt, Human
ugacccuauccucuuccuaagaucc

SEQ ID NO: 1014917 - RNA, 19 nt, Human
ugcggugggaaaggagagg

SEQ ID NO: 1014918 - RNA, 23 nt, Human
uggccccaagcccagaggccccc

SEQ ID NO: 1014919 - RNA, 19 nt, Human
ugggaaaggagaggugcag

SEQ ID NO: 1014920 - RNA, 21 nt, Human
ugggaaaggagaggugcagug

SEQ ID NO: 1014921 - RNA, 24 nt, Human
uuccuaagauccagaagcagaaac

SEQ ID NO: 1014922 - RNA, 19 nt, Human
uugccgcccucuccuccca

SEQ ID NO: 1014923 - RNA, 23 nt, Human
uugccgcccucuccucccaccua

SEQ ID NO: 1014924 - RNA, 20 nt, Human
aaaaauacaccuuuggggac

SEQ ID NO: 1014925 - RNA, 21 nt, Human
aaagagcccuuuggcaucuac

SEQ ID NO: 1014926 - RNA, 18 nt, Human
aacaggagcaggggaucu

SEQ ID NO: 1014927 - RNA, 23 nt, Human
aacagucucagaaucugagaccc

SEQ ID NO: 1014928 - RNA, 24 nt, Human
aacccaacccacacacuccccgcc

SEQ ID NO: 1014929 - RNA, 21 nt, Human
aaggcaaguugcaagucaagg

SEQ ID NO: 1014930 - RNA, 22 nt, Human
aauucauaccuccauuuucccc

SEQ ID NO: 1014931 - RNA, 21 nt, Human
acagagccuucccaggguuag

SEQ ID NO: 1014932 - RNA, 19 nt, Human
accaaagaucgagaaacag

SEQ ID NO: 1014933 - RNA, 22 nt, Human
accaagaaggaacuagcaagcc

SEQ ID NO: 1014934 - RNA, 24 nt, Human
accacacauaugaauuugaacaau

SEQ ID NO: 1014935 - RNA, 24 nt, Human
accauaccacacugguucaaaacc

SEQ ID NO: 1014936 - RNA, 18 nt, Human
accccacccuccugccca

SEQ ID NO: 1014937 - RNA, 18 nt, Human
acccuccugcccagcccc

SEQ ID NO: 1014938 - RNA, 20 nt, Human
accuguguuugaucuucccc

SEQ ID NO: 1014939 - RNA, 23 nt, Human
agaaacagcuggcuccgaccucc

SEQ ID NO: 1014940 - RNA, 21 nt, Human
agaccccacccuccugcccag

SEQ ID NO: 1014941 - RNA, 19 nt, Human
agagucuucaaacuccacc

SEQ ID NO: 1014942 - RNA, 26 nt, Human
agcaggggaucuguggguggggcugg

SEQ ID NO: 1014943 - RNA, 21 nt, Human
agccagucggaguuuaugguu

SEQ ID NO: 1014944 - RNA, 18 nt, Human
aggagaggcuuucccaag

SEQ ID NO: 1014945 - RNA, 18 nt, Human
aggcaaguugcaagucaa

SEQ ID NO: 1014946 - RNA, 20 nt, Human
aggcaggggcugaccugcaa

SEQ ID NO: 1014947 - RNA, 19 nt, Human
aggccgcccgccugcccag

SEQ ID NO: 1014948 - RNA, 23 nt, Human
aggcugagucugggccucaaggg

SEQ ID NO: 1014949 - RNA, 27 nt, Human
agguggggugcugggaauccucggggc

SEQ ID NO: 1014950 - RNA, 21 nt, Human
agugacuguuccccccgcccc

SEQ ID NO: 1014951 - RNA, 24 nt, Human
agugucccagaggcccugggcagc

SEQ ID NO: 1014952 - RNA, 25 nt, Human
auauaccaaagaucgagaaacagcu

SEQ ID NO: 1014953 - RNA, 22 nt, Human
aucucacuuccucuuaccccaa

SEQ ID NO: 1014954 - RNA, 22 nt, Human
aucugagacccagugacuguuc

SEQ ID NO: 1014955 - RNA, 22 nt, Human
caaauccucccacaagccaccu

SEQ ID NO: 1014956 - RNA, 20 nt, Human
caaaugauuuacaacagaac

SEQ ID NO: 1014957 - RNA, 18 nt, Human
caacagaacacaacagga

SEQ ID NO: 1014958 - RNA, 28 nt, Human
caacaguggccccaggagaggcuuuccc

SEQ ID NO: 1014959 - RNA, 23 nt, Human
caagcggagaucucacuuccucu

SEQ ID NO: 1014960 - RNA, 21 nt, Human
caaggcaagugucccagaggc

SEQ ID NO: 1014961 - RNA, 23 nt, Human
caaggcaagugucccagaggccc

SEQ ID NO: 1014962 - RNA, 21 nt, Human
caaggggcccugggcuuaggg

SEQ ID NO: 1014963 - RNA, 20 nt, Human
cacagagucaaauaaaaauc

SEQ ID NO: 1014964 - RNA, 20 nt, Human
cacagcagaccccacccucc

SEQ ID NO: 1014965 - RNA, 19 nt, Human
cacagcuuagaccaaaccc

SEQ ID NO: 1014966 - RNA, 21 nt, Human
cacagcuuagaccaaacccuu

SEQ ID NO: 1014967 - RNA, 21 nt, Human
caccaggaaaacaucccccuu

SEQ ID NO: 1014968 - RNA, 21 nt, Human
caccagugggcaggcugaguc

SEQ ID NO: 1014969 - RNA, 22 nt, Human
caccauccauuucucgcaggaa

SEQ ID NO: 1014970 - RNA, 20 nt, Human
cacccaccccagcccuagca

SEQ ID NO: 1014971 - RNA, 19 nt, Human
cacccccaacaguggcccc

SEQ ID NO: 1014972 - RNA, 18 nt, Human
cacccuccugcccagccc

SEQ ID NO: 1014973 - RNA, 23 nt, Human
cacccuccugcccagccccugcc

SEQ ID NO: 1014974 - RNA, 20 nt, Human
cacuaggacccaagggaucc

SEQ ID NO: 1014975 - RNA, 24 nt, Human
cagaaucugagacccagugacugu

SEQ ID NO: 1014976 - RNA, 21 nt, Human
cagagcagagcucccaaggac

SEQ ID NO: 1014977 - RNA, 22 nt, Human
cagagcagagcucccaaggacc

SEQ ID NO: 1014978 - RNA, 19 nt, Human
cagagccuucccaggguua

SEQ ID NO: 1014979 - RNA, 21 nt, Human
cagagcucccaaggaccauac

SEQ ID NO: 1014980 - RNA, 22 nt, Human
cagcagaagcuuccaugggugc

SEQ ID NO: 1014981 - RNA, 19 nt, Human
cagcgcggccgccgccccu

SEQ ID NO: 1014982 - RNA, 21 nt, Human
cagggacuccccaccccccac

SEQ ID NO: 1014983 - RNA, 21 nt, Human
cagggacuccccaccccccac

SEQ ID NO: 1014984 - RNA, 21 nt, Human
caguguggcaagcucagagca

SEQ ID NO: 1014985 - RNA, 25 nt, Human
cauccaaacaccaggaaaacauccc

SEQ ID NO: 1014986 - RNA, 20 nt, Human
cauuuuaggcccaucuccug

SEQ ID NO: 1014987 - RNA, 26 nt, Human
ccaaauccucccacaagccggguguc

SEQ ID NO: 1014988 - RNA, 26 nt, Human
ccaagagucuucaaacuccacccacc

SEQ ID NO: 1014989 - RNA, 20 nt, Human
ccacacauaugaauuugaac

SEQ ID NO: 1014990 - RNA, 18 nt, Human
ccacagagccuucccagg

SEQ ID NO: 1014991 - RNA, 22 nt, Human
ccacagcaccugcugcuuugau

SEQ ID NO: 1014992 - RNA, 21 nt, Human
ccacagcagaccccacccucc

SEQ ID NO: 1014993 - RNA, 19 nt, Human
ccacccuccugcccagccc

SEQ ID NO: 1014994 - RNA, 21 nt, Human
ccacuccacuccgucuccggc

SEQ ID NO: 1014995 - RNA, 21 nt, Human
ccacugagacucuggucagga

SEQ ID NO: 1014996 - RNA, 19 nt, Human
ccagacaggcgccucucaa

SEQ ID NO: 1014997 - RNA, 23 nt, Human
ccagccccugcccacauuggggg

SEQ ID NO: 1014998 - RNA, 21 nt, Human
ccagcugaccauccaaacacc

SEQ ID NO: 1014999 - RNA, 23 nt, Human
cccacaaugcagcuccuuccaaa

SEQ ID NO: 1015000 - RNA, 22 nt, Human
cccacccccaacaguggcccca

SEQ ID NO: 1015001 - RNA, 18 nt, Human
ccccacccuccugcccag

SEQ ID NO: 1015002 - RNA, 19 nt, Human
ccccacccuccugcccagc

SEQ ID NO: 1015003 - RNA, 20 nt, Human
ccccaggguccucaaguggg

SEQ ID NO: 1015004 - RNA, 22 nt, Human
ccccccgccccaggccuugggc

SEQ ID NO: 1015005 - RNA, 22 nt, Human
ccccgccccaggccuugggccc

SEQ ID NO: 1015006 - RNA, 25 nt, Human
ccccucugcagcuaccucugaccaa

SEQ ID NO: 1015007 - RNA, 19 nt, Human
cccgcccccaucucucccc

SEQ ID NO: 1015008 - RNA, 20 nt, Human
cccgcccccaucucucccca

SEQ ID NO: 1015009 - RNA, 18 nt, Human
cccucaggccgcccgccu

SEQ ID NO: 1015010 - RNA, 20 nt, Human
cccucccacagagccuuccc

SEQ ID NO: 1015011 - RNA, 20 nt, Human
cccucugcagcuaccucuga

SEQ ID NO: 1015012 - RNA, 20 nt, Human
ccgcccgccugcccagcugc

SEQ ID NO: 1015013 - RNA, 19 nt, Human
ccgcgcccucaggccgccc

SEQ ID NO: 1015014 - RNA, 19 nt, Human
ccuccugcccagccccugc

SEQ ID NO: 1015015 - RNA, 20 nt, Human
ccuuccaccauccauuucuc

SEQ ID NO: 1015016 - RNA, 19 nt, Human
ccuugggccugaagugggg

SEQ ID NO: 1015017 - RNA, 20 nt, Human
cgaacccaacccacacacuc

SEQ ID NO: 1015018 - RNA, 18 nt, Human
cggcuggcacccacuccu

SEQ ID NO: 1015019 - RNA, 20 nt, Human
cggggccggcuggcacccac

SEQ ID NO: 1015020 - RNA, 22 nt, Human
cuccacccaccccagcccuagc

SEQ ID NO: 1015021 - RNA, 18 nt, Human
cucccacaagccaccuuu

SEQ ID NO: 1015022 - RNA, 22 nt, Human
cucccacccccaacaguggccc

SEQ ID NO: 1015023 - RNA, 21 nt, Human
cuccccaccccccacuggagu

SEQ ID NO: 1015024 - RNA, 22 nt, Human
cuccccccucugcagcuaccuc

SEQ ID NO: 1015025 - RNA, 21 nt, Human
cuccgcgcccucaggccgccc

SEQ ID NO: 1015026 - RNA, 25 nt, Human
cugaccauccaaacaccaggaaaac

SEQ ID NO: 1015027 - RNA, 24 nt, Human
cugcaagcggagaucucacuuccu

SEQ ID NO: 1015028 - RNA, 19 nt, Human
cugcccccacucuggcucc

SEQ ID NO: 1015029 - RNA, 23 nt, Human
cuggaacauaacacuaggaccca

SEQ ID NO: 1015030 - RNA, 19 nt, Human
cugggccucaaggggcccu

SEQ ID NO: 1015031 - RNA, 22 nt, Human
cugggccucaaggggcccuggg

SEQ ID NO: 1015032 - RNA, 19 nt, Human
cugucucuucuuuuccagg

SEQ ID NO: 1015033 - RNA, 23 nt, Human
cuguggccucuguggugggcuca

SEQ ID NO: 1015034 - RNA, 19 nt, Human
cuguuccccccgccccagg

SEQ ID NO: 1015035 - RNA, 23 nt, Human
cuucaaacuccacccaccccagc

SEQ ID NO: 1015036 - RNA, 23 nt, Human
gaacccaacccacacacuccccg

SEQ ID NO: 1015037 - RNA, 19 nt, Human
gaucucacuuccucuuacc

SEQ ID NO: 1015038 - RNA, 19 nt, Human
gcaagugucccagaggccc

SEQ ID NO: 1015039 - RNA, 23 nt, Human
gcugcauccugagcacagguggg

SEQ ID NO: 1015040 - RNA, 20 nt, Human
gcuggcuccgaccucccucc

SEQ ID NO: 1015041 - RNA, 21 nt, Human
ggaaaacaucccccuuuccug

SEQ ID NO: 1015042 - RNA, 25 nt, Human
ggagcaggggaucuguggguggggc

SEQ ID NO: 1015043 - RNA, 20 nt, Human
gggaagccaauccuagcaga

SEQ ID NO: 1015044 - RNA, 23 nt, Human
ggggccugccuguggccucugug

SEQ ID NO: 1015045 - RNA, 22 nt, Human
ggggugcugggaauccucgggg

SEQ ID NO: 1015046 - RNA, 19 nt, Human
ggguggggcugggcugggc

SEQ ID NO: 1015047 - RNA, 18 nt, Human
gugggcaggcugagucug

SEQ ID NO: 1015048 - RNA, 20 nt, Human
uaagcuaaacaacagucuca

SEQ ID NO: 1015049 - RNA, 22 nt, Human
uaccacacugguucaaaaccca

SEQ ID NO: 1015050 - RNA, 23 nt, Human
uaccuccauuuuccccgccccca

SEQ ID NO: 1015051 - RNA, 19 nt, Human
uacgaacccaacccacaca

SEQ ID NO: 1015052 - RNA, 25 nt, Human
uagaacacagggaaguuaggcagcc

SEQ ID NO: 1015053 - RNA, 21 nt, Human
uaggguaucuauggcaguagg

SEQ ID NO: 1015054 - RNA, 21 nt, Human
ucaaaacccauaggugacacc

SEQ ID NO: 1015055 - RNA, 22 nt, Human
ucaaaacccauaggugacacca

SEQ ID NO: 1015056 - RNA, 23 nt, Human
ucaaaacccauaggugacaccau

SEQ ID NO: 1015057 - RNA, 18 nt, Human
ucaaaauaaaaauggcca

SEQ ID NO: 1015058 - RNA, 21 nt, Human
ucaaaauaaaaauggccaguc

SEQ ID NO: 1015059 - RNA, 25 nt, Human
ucaaggcaagugucccagaggcccu

SEQ ID NO: 1015060 - RNA, 22 nt, Human
ucaaggggcccugggcuuaggg

SEQ ID NO: 1015061 - RNA, 19 nt, Human
ucaagugggaaagggagag

SEQ ID NO: 1015062 - RNA, 19 nt, Human
ucagagcagagcucccaag

SEQ ID NO: 1015063 - RNA, 23 nt, Human
ucagggacuccccaccccccacu

SEQ ID NO: 1015064 - RNA, 19 nt, Human
ucaguuccuagucuacuug

SEQ ID NO: 1015065 - RNA, 20 nt, Human
uccacccaccccagcccuag

SEQ ID NO: 1015066 - RNA, 21 nt, Human
uccacccaccccagcccuagc

SEQ ID NO: 1015067 - RNA, 22 nt, Human
uccacccaccccagcccuagca

SEQ ID NO: 1015068 - RNA, 20 nt, Human
uccaugggugcuggauccca

SEQ ID NO: 1015069 - RNA, 20 nt, Human
ucccacagagccuucccagg

SEQ ID NO: 1015070 - RNA, 21 nt, Human
ucccacagagccuucccaggg

SEQ ID NO: 1015071 - RNA, 19 nt, Human
ucccagaggcccugggcag

SEQ ID NO: 1015072 - RNA, 18 nt, Human
ucccagcugaccauccaa

SEQ ID NO: 1015073 - RNA, 22 nt, Human
uccccugaugauggacacuccc

SEQ ID NO: 1015074 - RNA, 20 nt, Human
uccuagcagaaagguaagcu

SEQ ID NO: 1015075 - RNA, 20 nt, Human
uccucuuaccccaaauucau

SEQ ID NO: 1015076 - RNA, 20 nt, Human
ucgccacccuuccaccauca

SEQ ID NO: 1015077 - RNA, 20 nt, Human
ucucacuuccucuuacccca

SEQ ID NO: 1015078 - RNA, 20 nt, Human
ucucagaaucugagacccag

SEQ ID NO: 1015079 - RNA, 18 nt, Human
ucugcagcuaccucugac

SEQ ID NO: 1015080 - RNA, 24 nt, Human
ucugcagcuaccucugaccaagaa

SEQ ID NO: 1015081 - RNA, 19 nt, Human
ucuggccagcaguacccag

SEQ ID NO: 1015082 - RNA, 20 nt, Human
ucuucaaacuccacccaccc

SEQ ID NO: 1015083 - RNA, 19 nt, Human
ugaaaaagagcccuuuggc

SEQ ID NO: 1015084 - RNA, 26 nt, Human
ugaccaagaaggaacuagcaagccua

SEQ ID NO: 1015085 - RNA, 20 nt, Human
ugagacucuggucaggacag

SEQ ID NO: 1015086 - RNA, 23 nt, Human
ugcgggaagccaauccuagcagg

SEQ ID NO: 1015087 - RNA, 19 nt, Human
ugcuggaucccagggcugc

SEQ ID NO: 1015088 - RNA, 22 nt, Human
ugcuggcaagaccauagguggg

SEQ ID NO: 1015089 - RNA, 21 nt, Human
uggacacucccagcugaccau

SEQ ID NO: 1015090 - RNA, 22 nt, Human
uggcaguaggaaaaugacaugg

SEQ ID NO: 1015091 - RNA, 18 nt, Human
uggccccaggagaggcuu

SEQ ID NO: 1015092 - RNA, 21 nt, Human
uggccuccccccucugcagcu

SEQ ID NO: 1015093 - RNA, 19 nt, Human
ugggcucacucccaccccc

SEQ ID NO: 1015094 - RNA, 18 nt, Human
uggguggggcugggcugg

SEQ ID NO: 1015095 - RNA, 20 nt, Human
uggguggggcugggcugggc

SEQ ID NO: 1015096 - RNA, 24 nt, Human
ugucccagaggcccugggcagcug

SEQ ID NO: 1015097 - RNA, 20 nt, Human
ugugggacuuggaagcugcu

SEQ ID NO: 1015098 - RNA, 18 nt, Human
uguggguggggcugggcu

SEQ ID NO: 1015099 - RNA, 23 nt, Human
uguggguggggcugggcugggcc

SEQ ID NO: 1015100 - RNA, 25 nt, Human
uucaaaacccauaggugacaccauc

SEQ ID NO: 1015101 - RNA, 24 nt, Human
uugggggucaggaccacugagacu

SEQ ID NO: 1015102 - RNA, 20 nt, Human
uuuuuuuuuuuuuuuuuugg

SEQ ID NO: 1015103 - RNA, 22 nt, Human
aaaaaaaagaacaugaaaaugc

SEQ ID NO: 1015104 - RNA, 22 nt, Human
aaaaaagaacaugaaaaugcac

SEQ ID NO: 1015105 - RNA, 21 nt, Human
aaaaagaacaugaaaaugcac

SEQ ID NO: 1015106 - RNA, 22 nt, Human
aaacggaaaauggccuccccuu

SEQ ID NO: 1015107 - RNA, 23 nt, Human
aaacugugccccucuguccacgg

SEQ ID NO: 1015108 - RNA, 23 nt, Human
aaaggcuauauuccuggcucugu

SEQ ID NO: 1015109 - RNA, 19 nt, Human
aaagugcugggauuacaga

SEQ ID NO: 1015110 - RNA, 23 nt, Human
aaagugcugggauuacagaugug

SEQ ID NO: 1015111 - RNA, 24 nt, Human
aaagugcugggauuacagauguga

SEQ ID NO: 1015112 - RNA, 20 nt, Human
aaagugcugggauuacaggc

SEQ ID NO: 1015113 - RNA, 23 nt, Human
aaagugcugggauuacaggcgug

SEQ ID NO: 1015114 - RNA, 24 nt, Human
aaagugcugggauuacaggcguga

SEQ ID NO: 1015115 - RNA, 20 nt, Human
aaccuccaucucccaggcuc

SEQ ID NO: 1015116 - RNA, 21 nt, Human
aacgucaagaauauaaucugg

SEQ ID NO: 1015117 - RNA, 22 nt, Human
aacugugccccucuguccacgg

SEQ ID NO: 1015118 - RNA, 23 nt, Human
aagaacaugaaaaugcacacagc

SEQ ID NO: 1015119 - RNA, 24 nt, Human
aagcaauccacccgccucagccuc

SEQ ID NO: 1015120 - RNA, 25 nt, Human
aagcaauucucgugccucagccucu

SEQ ID NO: 1015121 - RNA, 25 nt, Human
aagcacaguuauagucaaaaugagg

SEQ ID NO: 1015122 - RNA, 22 nt, Human
aaguagcugggauuccaggcau

SEQ ID NO: 1015123 - RNA, 24 nt, Human
aaguagcugggauuccaggcaugc

SEQ ID NO: 1015124 - RNA, 18 nt, Human
aagugcugggauuacaga

SEQ ID NO: 1015125 - RNA, 26 nt, Human
aagugcugggauuacagaugugagcc

SEQ ID NO: 1015126 - RNA, 19 nt, Human
aagugcugggauuacaggc

SEQ ID NO: 1015127 - RNA, 19 nt, Human
aagugcugggauuacaggc

SEQ ID NO: 1015128 - RNA, 20 nt, Human
aauucucgugccucagccuc

SEQ ID NO: 1015129 - RNA, 24 nt, Human
accacguuggccaggcuggucucg

SEQ ID NO: 1015130 - RNA, 18 nt, Human
accauguuggccaggcug

SEQ ID NO: 1015131 - RNA, 19 nt, Human
acccaggcuggagugcagu

SEQ ID NO: 1015132 - RNA, 25 nt, Human
acccguugccccucacuccucccag

SEQ ID NO: 1015133 - RNA, 24 nt, Human
acuccuggccucaagcaauccacc

SEQ ID NO: 1015134 - RNA, 18 nt, Human
acucugucacccaggcug

SEQ ID NO: 1015135 - RNA, 25 nt, Human
acucugucacccaggcuggagugca

SEQ ID NO: 1015136 - RNA, 21 nt, Human
agcaauccacccgccucagcc

SEQ ID NO: 1015137 - RNA, 24 nt, Human
agcaauucucgugccucagccucu

SEQ ID NO: 1015138 - RNA, 23 nt, Human
aggcacaauuuuuaucaaaucua

SEQ ID NO: 1015139 - RNA, 20 nt, Human
aggcgcugagcccuucuuuu

SEQ ID NO: 1015140 - RNA, 18 nt, Human
aggcuggagugcaguggc

SEQ ID NO: 1015141 - RNA, 25 nt, Human
aggcuggagugcaguggcaugaucu

SEQ ID NO: 1015142 - RNA, 24 nt, Human
aggugauuugcccgccuuggccuc

SEQ ID NO: 1015143 - RNA, 22 nt, Human
aguagagaugggguuucaccau

SEQ ID NO: 1015144 - RNA, 21 nt, Human
aguagcugggauuauaagcac

SEQ ID NO: 1015145 - RNA, 23 nt, Human
agugacaguaaugcuaaaaaaaa

SEQ ID NO: 1015146 - RNA, 19 nt, Human
agugcaguggcaugaucuc

SEQ ID NO: 1015147 - RNA, 21 nt, Human
agugcaguggcaugaucucag

SEQ ID NO: 1015148 - RNA, 23 nt, Human
agugcaguggcaugaucucagcu

SEQ ID NO: 1015149 - RNA, 24 nt, Human
agugcaguggcaugaucucagcuc

SEQ ID NO: 1015150 - RNA, 28 nt, Human
agugcaguggcuccugugaucuuggcuc

SEQ ID NO: 1015151 - RNA, 24 nt, Human
agugcugggauuacagaugugagc

SEQ ID NO: 1015152 - RNA, 18 nt, Human
agugcugggauuacaggc

SEQ ID NO: 1015153 - RNA, 18 nt, Human
agugcugggauuacaggc

SEQ ID NO: 1015154 - RNA, 24 nt, Human
aguggcaugaucucagcucacugc

SEQ ID NO: 1015155 - RNA, 18 nt, Human
aguggcuccugugaucuu

SEQ ID NO: 1015156 - RNA, 19 nt, Human
auaaaaccagcaagcaucc

SEQ ID NO: 1015157 - RNA, 21 nt, Human
auaagcaccugccaccaugcc

SEQ ID NO: 1015158 - RNA, 18 nt, Human
augggguuucaccauguu

SEQ ID NO: 1015159 - RNA, 22 nt, Human
augggguuucaccauguuggcc

SEQ ID NO: 1015160 - RNA, 23 nt, Human
augggguuucaccauguuggcca

SEQ ID NO: 1015161 - RNA, 24 nt, Human
augggguuucaccauguuggccag

SEQ ID NO: 1015162 - RNA, 24 nt, Human
auguauauagaaggcuaaaggcac

SEQ ID NO: 1015163 - RNA, 19 nt, Human
auuacagaugugagccaug

SEQ ID NO: 1015164 - RNA, 24 nt, Human
auuuuaguagagacagcguuucac

SEQ ID NO: 1015165 - RNA, 24 nt, Human
auuuuugcauguuuaguagagaug

SEQ ID NO: 1015166 - RNA, 19 nt, Human
auuuuuuuuugagacagag

SEQ ID NO: 1015167 - RNA, 19 nt, Human
auuuuuuuuugaggcagag

SEQ ID NO: 1015168 - RNA, 20 nt, Human
caaaagagcuguuuucaauc

SEQ ID NO: 1015169 - RNA, 24 nt, Human
caaaagugcugggauuacagaugu

SEQ ID NO: 1015170 - RNA, 23 nt, Human
caaccuccaccuccuggguucaa

SEQ ID NO: 1015171 - RNA, 23 nt, Human
caaccuccaucucccaggcucaa

SEQ ID NO: 1015172 - RNA, 24 nt, Human
caaccuccaucucccaggcucaag

SEQ ID NO: 1015173 - RNA, 22 nt, Human
caagcaauucuccugccuuggc

SEQ ID NO: 1015174 - RNA, 27 nt, Human
caagcaauucuccugccuuggccccca

SEQ ID NO: 1015175 - RNA, 27 nt, Human
caagcaauucucgugccucagccucuc

SEQ ID NO: 1015176 - RNA, 19 nt, Human
cacacccuucaauuacacc

SEQ ID NO: 1015177 - RNA, 19 nt, Human
cacacccuucaauuacacc

SEQ ID NO: 1015178 - RNA, 21 nt, Human
caccacguuggccaggcuggu

SEQ ID NO: 1015179 - RNA, 24 nt, Human
caccacguuggccaggcuggucuc

SEQ ID NO: 1015180 - RNA, 27 nt, Human
caccacguuggccaggcuggucucgaa

SEQ ID NO: 1015181 - RNA, 24 nt, Human
caccaugccaaaaggcuauauucc

SEQ ID NO: 1015182 - RNA, 21 nt, Human
caccauguuggccaggcuggu

SEQ ID NO: 1015183 - RNA, 24 nt, Human
caccauguuggccaggcuggucuc

SEQ ID NO: 1015184 - RNA, 27 nt, Human
caccauguuggccaggcuggucucaaa

SEQ ID NO: 1015185 - RNA, 20 nt, Human
caccuggcuauuuuuuuuug

SEQ ID NO: 1015186 - RNA, 24 nt, Human
cacguuggccaggcuggucucgaa

SEQ ID NO: 1015187 - RNA, 23 nt, Human
cacucugucacccaggcuggagu

SEQ ID NO: 1015188 - RNA, 24 nt, Human
cacucugucacccaggcuggagug

SEQ ID NO: 1015189 - RNA, 21 nt, Human
cacugcaaccuccaccuccug

SEQ ID NO: 1015190 - RNA, 23 nt, Human
cacugcaaccuccaccuccuggg

SEQ ID NO: 1015191 - RNA, 24 nt, Human
cagaguagcugggauuauaagcac

SEQ ID NO: 1015192 - RNA, 24 nt, Human
cagagucuugcucuguugcccagg

SEQ ID NO: 1015193 - RNA, 24 nt, Human
cagcguuucaccacguuggccagg

SEQ ID NO: 1015194 - RNA, 19 nt, Human
caugcaccccacaccuggc

SEQ ID NO: 1015195 - RNA, 24 nt, Human
cauguuggccaggcuggucucaaa

SEQ ID NO: 1015196 - RNA, 18 nt, Human
ccacccgccucagccucc

SEQ ID NO: 1015197 - RNA, 26 nt, Human
ccaccuccuggguucaagcaauucuu

SEQ ID NO: 1015198 - RNA, 27 nt, Human
ccaccuccuggguucaagcaauucuuu

SEQ ID NO: 1015199 - RNA, 18 nt, Human
ccagaguagcugggauua

SEQ ID NO: 1015200 - RNA, 19 nt, Human
ccagaguagcugggauuau

SEQ ID NO: 1015201 - RNA, 20 nt, Human
ccagaguagcugggauuauu

SEQ ID NO: 1015202 - RNA, 20 nt, Human
ccaggcaugcaccccacacc

SEQ ID NO: 1015203 - RNA, 21 nt, Human
cccaggcucaagcaauucucc

SEQ ID NO: 1015204 - RNA, 23 nt, Human
cccaggcuggagugcaguggcau

SEQ ID NO: 1015205 - RNA, 23 nt, Human
cccgccuuggccucugaaaagug

SEQ ID NO: 1015206 - RNA, 19 nt, Human
cccucagcgaccucacccg

SEQ ID NO: 1015207 - RNA, 18 nt, Human
ccgagacugcuuuuaauc

SEQ ID NO: 1015208 - RNA, 20 nt, Human
ccgccucagccuccaaaagu

SEQ ID NO: 1015209 - RNA, 22 nt, Human
ccucaagcaauccacccgccuc

SEQ ID NO: 1015210 - RNA, 18 nt, Human
ccucagcgaccucacccg

SEQ ID NO: 1015211 - RNA, 19 nt, Human
ccuccaccuccuggguuca

SEQ ID NO: 1015212 - RNA, 22 nt, Human
ccuccuggguucaagcaauucu

SEQ ID NO: 1015213 - RNA, 23 nt, Human
ccugccuuggcccccagaguagc

SEQ ID NO: 1015214 - RNA, 24 nt, Human
ccugccuuggcccccagaguagcu

SEQ ID NO: 1015215 - RNA, 19 nt, Human
ccuggccucaagcaaucca

SEQ ID NO: 1015216 - RNA, 22 nt, Human
ccuggccucaagcaauccaccc

SEQ ID NO: 1015217 - RNA, 23 nt, Human
ccuggccucaagcaauccacccg

SEQ ID NO: 1015218 - RNA, 20 nt, Human
ccuggguucaagcaauucuc

SEQ ID NO: 1015219 - RNA, 19 nt, Human
cgccucagccuccaaaagu

SEQ ID NO: 1015220 - RNA, 23 nt, Human
cggaaaauggccuccccuuccua

SEQ ID NO: 1015221 - RNA, 18 nt, Human
cuacagcuacugcaacga

SEQ ID NO: 1015222 - RNA, 22 nt, Human
cucaaaagagcuguuuucaauc

SEQ ID NO: 1015223 - RNA, 24 nt, Human
cucaagcaauucuccugccuuggc

SEQ ID NO: 1015224 - RNA, 23 nt, Human
cucaaguagcugggauuccaggc

SEQ ID NO: 1015225 - RNA, 24 nt, Human
cucacucugucacccaggcuggag

SEQ ID NO: 1015226 - RNA, 24 nt, Human
cucacugcaaccuccaccuccugg

SEQ ID NO: 1015227 - RNA, 26 nt, Human
cucacugcaaccuccaccuccugggu

SEQ ID NO: 1015228 - RNA, 27 nt, Human
cucacugcaaccuccaccuccuggguu

SEQ ID NO: 1015229 - RNA, 24 nt, Human
cucacugcaaccuccaucucccag

SEQ ID NO: 1015230 - RNA, 21 nt, Human
cucagccuccaaaagugcugg

SEQ ID NO: 1015231 - RNA, 24 nt, Human
cucagccucucaaguagcugggau

SEQ ID NO: 1015232 - RNA, 25 nt, Human
cucccaggcucaagcaauucuccug

SEQ ID NO: 1015233 - RNA, 23 nt, Human
cuccuggccucaagcaauccacc

SEQ ID NO: 1015234 - RNA, 21 nt, Human
cuccuggguucaagcaauucu

SEQ ID NO: 1015235 - RNA, 25 nt, Human
cucgugccucagccucucaaguagc

SEQ ID NO: 1015236 - RNA, 23 nt, Human
cucuguugcccaggcuggagugc

SEQ ID NO: 1015237 - RNA, 26 nt, Human
cucuugaccucaggugauuugcccgc

SEQ ID NO: 1015238 - RNA, 23 nt, Human
cugcaaccuccaccuccuggguu

SEQ ID NO: 1015239 - RNA, 24 nt, Human
cugcaaccuccaccuccuggguuc

SEQ ID NO: 1015240 - RNA, 23 nt, Human
cugcaaccuccaucucccaggcu
